United States Patent Application Publication US 2009/0311680 A1 - sequence listing, part 3

SEQ ID NO: 3940 - DNA, 1143 bp, Saccharomyces pastorianus
atgggtactcacagcaagatgccatcatacaaccacgagtccaaggaatccttgatagatatcatctccaaggacccttctgccatgttgggtaagaaaatcatcgacaagttccatgccacaaacgaattgcctttcctttttaaggtcttgtccatcgggaaagtcttgtccatccaggctcatcccgataagaccttgggtaaaatgctgcacgctcaagaccccaagaactacccagacgataaccataaacctgaaatggctattgccgtcaccgacttcgaagggttctgcgggttcaaaccattgcaagaaattgctgatgaattgaaacgtattcctgaattacacagcattgtgggtgatgaaacttcccaagaatttatcaatggtattgacacgtctgctcaaaagggttctccagaagacgagcaaaacaaaaagcttttgcaagctgtcttcagtaaagtaatgaacgcctcagacgacgaaatcaaggttcaggcccgctccttggttgaaagatcgaaaaattcaccttctgacttcaataagtctgatttaccagagctaattcaaagactaaacaagcaattcccagatgatgtaggtctattctgtgggtgtttgttgttgaaccattgcagattgaaagcaggtgaagctatcttcctaagagccaaggatcctcacgcctatatcagtggtgatattatggaatgtatggccgcttccgataacgtggttagagcaggcttcactccaaagttcaaagacgtcaagaacttggtttctatgctaacctacacctatgatcctgttgaaaagcagaaaatgcaacctttaaaattcgacagatcttccggctgtggtaagtctattttatataaccccccaatcgaagaatttgccgtcttggagactacttttgatggcaagcttggtcaaagacattttgaaggtgttgacggcccaagtatcttgattactacaaagggtaatggttacatcaaggctgatggccaaaagttgaaagccgaacctggctttgtattcttcattgctccacatttgcccgttgatttagaagcaggagatgaagcttttactacttacagagcctttgtcgaaccaaattag

SEQ ID NO: 3941 - DNA, 726 bp, Saccharomyces pastorianus
atgcacattgtaaaaacggtgcaagcaaagatgaacggattagtgttaggtgctacaggtctatgcgggggagcatttctgagacaggctcaggaagccccccagttcgcaaaggtttttgctatcttgagacgggaactgccctccccagccactaacaagatcgtggctatggtagaaaaggacacttcgcagtggccagcgttgatcagcgaggaaatgcatccgcaggttctgttcaccgcgctggctacgaccagagccgctgccggcggcctggacaagcagtacaagatcgaccacgacctgaacatgcagttggcctgtgccgccaaggacagagggtgcgacaccatcgtccttgtgtcctctgccggtgctcatgtggactccaggttcggttacatgaagatgaaaggtgagatcgagcgcgatatcatcgccctagatttcaaacacacaataatcttgcgtccggggcccttgctgggagaaagaacgaattccaagcagagcggttttggtggaaatctggctgctgcgctgggcgctcgtgtataccgttcgagattgcagagttggctgggctatcccgtctacggcgacgatgtggggaaagccggtgttcacttggcattgaacccttctggaaaggacaaagtccaattcgtatcgagcagggatatcctcgacattgccagttctctcggtaaaaccaatgcctga

SEQ ID NO: 3942 - DNA, 483 bp, Saccharomyces pastorianus
atgaaacttactggtaaagaatttatgtccggtaagatacttgaaacagaccaaatgcataggcagagttcaagtctttccacgaaagggttttttttatggtttggagtgatctgtttcttattttacatggtgttttacaaatctcacacgatcaaaaggttgcgtttatctggactgtacaatgttgctaaggaagtcaagacaggtataaggagaaaattgaaatcgctaaggagatcagatccattttccagattggaggaaggtgaatttgggactgatagggacaacctcaaagaagcatttaggctgaagagcaacagcatgtttgatctgggcaagagttcggcgacaatgcaaagggagcacgaaccacaaaggacagcaagtcaatctgctaatctcggtccgtcaaacttacgacccgcattctctatggccgatttctctaaattcaaggacagcagattatacgattaa

SEQ ID NO: 3943 - DNA, 1416 bp, Saccharomyces pastorianus
atgcttatagaaaacactaatgatcggtttggtatcgtcatagatgcagggtcttcgggttccagaatacatgtgttcaagtggcaggatccagaatcgcttctccatgcaggctaccaagactcagagtctatattgcaatcagtgccccatatccatcaagaaagcgattggactttcaaaaagaatcctggtctatccagtttcgaaaaaattccccaagaggcttacaaatcacacatcaaaccactgctggattttgccaaagatatcatccccgaatcgcattggtcgaattgccctgttttcattcaggctaccgcaggtatgcgtcttttgcctcaggacaaacaatctgccatcttggagaatttatgccaggggctcaggcactcctctgaattcttgatcaaagattgctcttcacaaattcaggtcatcgacggtgaaactgaaggcttgtatggctggctgggcttgaattatctttatggacatttcaacaactacaatccgcaggtttcgagtcactttacttttggattcatggacatgggcggtgcctctacccaaattgcatttgcaccccatgatgaagatcaaatagcaaaacatagagatgatattgccagtatttttttaagaagcgttaatggggacctgcaaaaatgggatgtgttcgttagcacgtggctagggtttggcgccaatcaagctagaagaagatacttggctcaattgatcaatacccttccagaaaacacaaacgattacaatgatgacgatttcaatacaaagactttgaatgatccatgtatgcctcgcggaagtaccactgattttgaatttaaagacaccaccttccaaattgttggctcggggaattatgaacagtgtactaaatctatgtaccctttactcctgaaaaacataccttgtgatgaccagccttgcctgttcaatggtgttcatgcgcctcgaatagactttgctaaggataaatttataggcacttctgagtattggtatactgctaacgatgtattcaaattgggcggtgaatataactttgacaaatttagtgaaagtgtaaaggagttctgcaatgcagattggagtcatatatcggaaaacagtgacaagggaatgtacaactctattccggacgatttcctgaaagattcatgcttcaagggtaactgggtcctcaatatacttcatgaagggttcgatttgcctcgtataaacgtcgatgcagagaaagttgatgagaaacccttatttcaaagtgtcgagaaagtcaatgaaagagaattgtcctggacattgggtagaatcttgctcttcgcttcaggaagcatactcgctagtcatgacagttccgtagttgtatcgcccccagtgaaagaagaatga

SEQ ID NO: 3944 - DNA, 1545 bp, Saccharomyces pastorianus
atgagagtcagaaagcgtcaatccagaagaacctctaccaaattaaaggaaggtattaagaagaaggcctctgctcatagaaaaaaggaaaagaagatggcaaagacggatgtcacttggaaggcaagagctaagaaagatcccggtattccagccaactttccatataaggctaagatcttagctgagatagaagctaagaaaatgaaggatttagaagagaaaatgttggccaaacaacaaaaaattgaggctaggaaagctgctagggaacaaggtgtcgacgcaatggacgaagacgattcggacgaagatggaaacggattagcagctctggtcgagtccgctcaacaagcagctgccgaattcgaaggtacttcatctaacgatgcagctgtgaatgacgatgatttggatgtcattgactataacattgatttttacggtgacgatgtggagggagaatcagaactggaaaaatctaggaaggcatatgacaagattttcaaatctgtcgttgatgcgtctgatgtcattctgtatgtgttagatgctagagatccagaaggtacgagatcaaggaaagtggaagaagctatcttacaaagtcaaggtaaaagattgatcttaatattgaataaagttgatttaattcctccatatgtgttagaacaatggttgaattacttgaagtccagttttcctacaatcccattaagagcctcctctggtgcagttaacggaacttctttcaacagaaagttaagtcaaactactaccgcaagcgcattgctggaatctttgaagacttactctaccaacagtaatttgaagagatctattgtagtaggtgttattggttatcctaacgttggtaaatcgtccgttattaacgcccttttagctcgtcgtggtggtcattctaaggcctgcccagtcggtaatgaagcgggtgttactacttccttaagagaaatcaaagtcgacaataaactgaaaattctagattctccaggtatatgtttcccaagtgaaaataagaaaagatcaaaggttgagcatgaagccgaattggctcttctaaatgctctaccggcaaaacacattgttgatccatacccagctgttttaatgttagtaaagagattggctaaatctgatgaaatgacagaaagcttcaaaaagctttatgaagttcctcccattcccgctaatgatgctgatactttcacgaagcatttcttaattcatatcgctcgtaaaagaggtagattagggaagggtggtattccaaaccttgccagtgctggtctttctgtcttaaatgactggagggatggtaagattcttggttgggttttaccgaatacttcggtagccacatctcaacaagataaacaaaattcaagtaccattagcactggtaccaaacaagccccagctaccactaatgaatctaccgttgtatccgaatggtctaaagaattcgatttagatggattgtttagctcccttgataaaatcatagatgctagcaaagactaa

SEQ ID NO: 3945 - DNA, 219 bp, Saccharomyces pastorianus
atgtgccctggtttaacttcagcaggggccgaattgccacctgctcctggctatgagaaaggtaaaattgttgtcattaatgctgaaaacaaagaaaatgcgttggctattggtgaactgatgatgagtacagaagaaatcaaatccataaacaaaggtcattccatagaattgattcaccatttgggtgatccgttatggaatttcagcattgaatga

SEQ ID NO: 3946 - DNA, 3396 bp, Saccharomyces pastorianus
atgggtaaacagtattattgggaaacgaattctgcgaaagaaaggaccgttttcatcaaatctttgattactttatatattcaaacttttgaaggtcatgtccctgaattgatcaattgggatttgtctcttttttatcttgatgaaaagagttaccagagagctgtcattaccaatcgtcccggttccatatctccaattaaatcaccaaccagcaattttgcagctaacaccgcacaatcaatgggctctatcccttcttcttcatcttttgatagggccagaagatctgagacagagaatgatgtttcagcaaatactcccacaggtgtcgcatatcatactgaaataaagtctttaagtaaggccccttactcttcaaattctactcttaatgaggtaaatagaagatacgagctcgaacaacaacagcaacagcaagaggctgaacagagacgattagaagaacaaagaaaattacaattacagaaagaaaatgaaatgcaaagactggaagaggaaaaaagaataaggcaggaagaacagaaaagacaaatggaactggagagtaaaagacaacaagaattagagcttcaacggcaatccgaggaagaacaacgtttgaaaaaggaaagagagttattggagttacaaaaaagacaaagggaacaagacattttagagagacaaaaaaaagaggaacaggagaggcttgctagggaggaggaagaagaaaaaattaagaaaacccaattagacaacgaaggctatgctcaagaaatcaatggcaaagttgataatcttctagaggacttgaatgcagttttaggggaagagacagggaccgctacggttacgcaaagcaatacttacatacctgaaaggagtttagccagaactcaagatcaattaaaaaaacccctaaatgttgccaaggtggagacacttgatggaagccatttaaacgaatcaattgacttagacgatgagatcatcggtttgaatacttccaacatatccgaggagtatcaggatgagaaaaacgatctttcatttgagaagggcgatgaagttaggtacagtcaaaactttgaagatggcactcctcacgtgtatcacgaagtatctataattcaagaagaagcaccaccagcagtacaaaaaataactcatacagaagagcatgaagaatcagaggccttagctccctccaaagagggggttgaaaaaatagataatattgacgatgaagtcctgctagagatacttacagatataaattggacagttgaagatgatgcggatagtatgatcgaaaggattgacatgaggttagctgagacagaatattcattcaaccagaatctattatccctgcaaaaaatcggtcccaatctacttccttatgaggacaaggtcagtgaagaatgtcaccgaataattccaacattttccctgtttttaatggaaatgagtaatttctctagtgatattgaatacgtggagagccaagataacggattacaagttgaaagtgccaacaagaaacttctgtggaataccctggatgaactcttgaaaaccgtttcacttgatgaagtctctttgaatcaattattagaatgcccaataagggagaagaacttgccatggatggaaaatcaattgaatttgttattaaaagcgtttcaggctatcggtagtgatgagaacgaagtagaatataatctaagggagatttccggtttaaaacagagactccagttctatgaaaaagtcaccaaaatattccttgatagaattgtggatgaaatgcaaagcaagttttccaatatacatggtcaagatatctcacacgatcaaatgattagaattctaacgactttactaatattttctccactaattcttttttgtaaagagatctcgcaaaaatcataccaggtcattatagaaaactggaacataagtatccaaccaatgtatatgaagctatggaccagaaaaatatcacagttggaaaaagttgatgctagcgatgataaagagaataagttaggtttaagtcagctattacaggaatggaacacgtttaggaaagaaagaaaaattaacgacgtcagcccagttttcagcaccaaattctctcatttaactgaatgcgtagagactatgagacaagagtgtattgtttatcaaaatttcgtagaaatattctttcatatctcttcgaaacataactttgaagaatttgtcaagcagtttaataacccagacgctcctccattactattgaataccatgaaggaaatgcagtcagatagagaagcagctgttatcgaaactcagttggtctcaaggatatttcaaccgatcgtcactaggctatcatcgttttttgtggaaacagttaaaaatgaacctacactagcccccgccttaactctttacttggaaaatgaaatcaagagtctagaatcatcgaatcatgaattcttactatctgcagtgacaagggtgtatacccaaataaaacaagtatggttagacaatgtagaagaacaggttctatattttgaaagaatttcgaatgcgacgaccaatggagaaattcttccagctatagtcgatttaccggtggatttgaaaaattcagaggacttatttaaatacaccaagaattccatggatattaaggatactgataaaagttacgagtccatagagttgatcaactcaagcttcaaaaaattgagcatggctgctacgcaatcaatggctcataaaagaggtgtttcaagtattgaccccagcctgtcagattctgctgcgttaaataacgactatatgcaaactgcttccttcctagtgaacagtaactggttaacagaaatgctctctatgctaaacttcaataaagatggtatttttgacacatcattgcagaacgcaaagaaagtgtttgatgccgaaaaagaatcctatgcttctttcctgctccgcgatactatgcccaagctaacagcttttgtttatggagtgagtaacatcattgaaaacacaaataatgtgaacgtaaccaacccatcaagatgggctgcatacagcaagcagaacctagagaacattcttttagcatactcgtcccaagaaattgagacgttggtgaaaaggttgcatacacacatggcaaacgatttcggctaccatcaagacgatgccataaataacgtgttgtgtgacaagttgtggtcgtgcatccaaggtcaaaccgtttcattatatctgaaattatacactgtcattgataaacactacaagggaacaaatatccgtttcacaaagaacgatatcatcagtgcgttcgaagaatacaagagtgcttggaacttatga

SEQ ID NO: 3947 - DNA, 423 bp, Saccharomyces pastorianus
atgagaactgggaagtccccttttaagagaaaatcccacagtcgtgaggcatcacacgatgaaaattcatcgtttttccacaagagaacaatatccggtagtagtgcacaccattccagaaatgtcagtcaaggtggagtgccctcctctgcaccaccaatttctggtggcaactattcacacaagagaaatgtgtcaagagcttccaattcctctcaaaattcaaattttctagccgagcagtatgaaagggataggaaagccatcattagtttctgcttttccagacctgaccacaagaccggcgagccaccaagcaattatatcacacatgtacgaattatcgaagattcaaaattcccaagttcaaagcctcctccagattcaagattagaaaacaaaagaaaaggattctcattttga

SEQ ID NO: 3948 - DNA, 717 bp, Saccharomyces pastorianus
atgtcgtctccaatgtcaatcctgcaaaagttacgcaagttttccacctgtgatatatctgatggtttattgaatgtctataatatctcaacaggtggctatttccctaatctaacagcgatatctttaccaccaggtagctccatagtaggcgctgcatacacagtactatttgcacatgccgacgacccaagacctgctgtaaactatatagattccgtgccccctaactctgctcttgttctcgccttagaacctcatttacaaagccaattccatccatttgttaagattactcaagcgatgtacggagggttgatgagtacaagggcgcagtttttgaaatgcaatgggacagtagtttttggtcgtgtaagagatgtggatgaacatcgaactttaaatcaccctgtttttgcttatggtgtaggatcttgcgctccaaaagccatggttaaagctgtggccaccaatgtacagttgcaaatcttaacaagcgatggtatgacccaattgatacatcctggtgattatgttgttggagatagtaacggcatagtctgtgttccagttcaggaggtcgacattccgaaattaaccacctatatcgaaaaatccatcgaggtagatatacttgtctctgaggacattaagaatggcgttcccgcaaaacaggcgcagaaggatcgaagatcggttttaaaacagtacatttaa

SEQ ID NO: 3949 - DNA, 2667 bp, Saccharomyces pastorianus
atggaggaaacaaatgatacagaggttgaaagtagaggtagacctaacgatattcaaacaggtagaccggcaaaaaataagattaaaaggcgtgcgttaacttcacctgaaagatgggagattagacaactcattgctagtggtgctgcttctatcgacgattatccagaactaaaggaggaaatccccagaaatacttcctatataatggaagaggagaataaagtagcaacaccttctaacgaaaaaaattctgagggtgtgaaaccagaagtagaggaggaagaggaacagatagacgagattgatgtcgagctgaatacagatgatgaacctaaattcctgaaagatcaacaagttaagggtgccagaaaatatgaaatgcctaaaataacaaaagttccaagaggatccatgaatcgtacagcaatgaatggttcgaatgctgtaagagatcacagagaagaaaaaatgaagaaaaaaagagagattgaacaaaaaataagaaaaaaacaatcatttgacgatcctacgaagaacaaacaagattccaggaatgaaatccaaacgttgagaaaccaattggttgttactgaatgggaaaggaacagaatgaatgaacctatttcctacgggaaaagaacctccatgccaatcagcgtacaacgtcaaacattacctgtatacgcaatgagatccgaattaatgcaggctgttcgcgaaaatcagtttttagtcattgttggtgaaacaggttcgggtaaaaccactcaaattacacaatatttagacgaagaagggttcagcaattatgggatgattggatgtactcaacctcgtagggttgctgctgtctctgtagcaaaaagagtcgctgaagaagttggctgtaaagttggtcatgatgttggttacactattagatttgaagatgttactggcccagatacgagaataaaatatatgactgatggtatgctacagagagaagcattgttagaccctgagatgtcaaaatattctgttataatgttagatgaagctcatgaaagaaccgtggcaacagacgttttatttgcattgttgaagaaagctgtggtcaagagaccagaattaaaagtgatagttacatcggcaactttgaactctgctaagttttctgagtattttttgaattgtccgattattaagatacctggtaaaacgtttcctgtagaggtgctttactcacaaaccccccaaatggattatatagaggccgcattggattgtgttatagacattcatataaatgaaggccaaggtgatattttggtttttttgacagggcaagaagaaattgactcatgctgtgaaatactttttgatagagtaaagacgttaggcgatagtattggcgagttacttattctacctgtctactctgccttgccaagtgaaattcaatcaaaaattttcgaacccactccgaagggcagtagaaaagttgtgcttgctacaaatattgctgaaacttctattactattgacggtatctattacgttgttgaccctggttttgcgaagattaacatctataacgctagagcaggtatcgaacaactgatagtatctccaatatcacaagcacaggcaaaccaaagaaagggtagagctgggagaacaggtccaggtaaatgttatcgactatacacagaatccgcattttacaatgaaatgctagaaaatactgttcccgaaattcaaagacagaatctttctcatactattttaatgctaaaggccatgggcatcaacgacttgctaaaatttgatttcatggatccaccaccgaagaatttaatgctgcatgcactaacagaattatatcatttacagtcattagacgacgagggaaatttgacgagactaggtagagaaatgtccttgtttccaatggatcccactttatcacgctccctgttatcgtctgtggatcagcaatgttccgatgaaatcgttactataatctcaatgttatcggtacagaatgttttttaccgtccgaaagataaacagctggaagctgatcataaaaaggcaagattccatcacccatatggtgaccacctgacgttattgaacgtttacacgagatggcagcaagcagattactcagaacaatactgtaaaacaaactttttacactttaggcatttgagaagagccagagatgtcaaaagtcagatcagcatgatttttaaaaaatcgggtctaagattaattagctgtcatagcgatcccgatttgattcgtaaaactttagtatcagggttctttatgaatgctgctaagcgagattcgcaagtgggttataagactatcaacggtgacacagaagtaggaatacatccttcaagttcgttgtatgggaaagaatatgaatacgtgatttaccatagtcttgtattgactagtagggaatacatgtctcaaataacaagcatcgaacctcaatggcttcttgaggttgcgcctcatttttataaagctacagatgctgaaagtcaatctaggaaaagagccaaaataattcctttacacaacaaatttgcgaaggatcaaaattcatggagactaagttcaataagacaatctagggaaagagcattaggtatcaagagataa

SEQ ID NO: 3950 - DNA, 765 bp, Saccharomyces pastorianus
atgtctgatgtttcgaaaaccatagcttctattgtagggtccgatgaccctgtgatcattgaattcatactaaatatcatgaatagatcaaaaaatttgcaagagttcatacaaaatattcaaggcttagaagccggcatatcttacgaagacagcactaaattgtataatgtattttcaaaaaatgacaagaatgaaaagagcccagacattgttatagattcagggttaagtcgcgaagttcatcaaatcttaaaggatgacgttaatttggacgaccctgtagtgactgatttcgtacttagcattttaaatgaatccaagtcaataaccgaatttcaagaaaaactaagctccatgcaaagcggtctcgataatgaaacaatctttaaaatatatcaaatcgtatccccgcctatagcgaaagaagaagctccaaaaaccaagattgcaataaaagcagaagcaaaagtgagccaagaggcagaagaaaaagagcggaaaacagacgatttagaccttaatcctgttcttgataaagtatatcgtggtagagtgagaaatataaccgcttttggttgttttgttcaaatcttggggacacaaaggaagaactgcgatgggttggttcatatatcggaaatgtcaaaacaaagaataagggatccacatgatttagtgaaacaaggtcaacacgtgtttgttaaagtaataaaagtacaaaataatggaaaaatatcgctctcgatgaaaggcgttgatcaa

SEQ ID NO: 3951 - DNA, 1341 bp, Saccharomyces pastorianus
atgtccgatgacgataccgcttactctataaagtttctgacgttcaacacgtgggggttgaaatacgtctccaagcaccgcaaggagcggctcagagcaattgccgacaagctggcgggccattccacgctgaccccgatagcagaggagtttttgtccagtgccaccgagggcgaagaggagtacgacgtgattgcgctgcaagagatctggtgtgtggaggactggaagtacctggcctcggcgtgtgccgccaagtacccgcaccagcgtctgttccactccgggattctcaccgggcccggactggctatcctgtccaaggtacccatagagtcgacctttctgtaccggttccccatcaacggtaggcccagcgcggtgctccgcggcgactggtatgtggggaagtccgtcgccatcaccgtgctgaacacgggcacgcgtcccattgccataatgaacagtcacatgcacgccccgtacgccctgcagggcgacgcggcgtacctgtgccacaggtcttgccaggcctgggacttcagcaggctcatcaagctgtacagacaggcagggtacgcggtgattgtggttggcgacttgaactccaaaccggggtcgctgccccacaagtttctcacgatggaggccgggctgatcgattcttgggaacagctgcatgggacgcaggacctggaagcgatttcgcgcatgggcccgttgcaacagttgctcaacggctgcaccacgtgcgactcgctgctaaacacctggagggcccacagacagcccgatgaggcgtgccgtctggactacgcgctcatcgacccggagttcttacagactgtcgatgccggtgtccggttcaccgaaaggatccctcacttggactgcagcgtttccgaccacttcgcgtactcgtgcaccttgaatgtactgccccagggcgtggagacgcgtcccgccacctcagcaacgggggccagggcccacgcccgggacctgctcctgcagaagtactccaactacgaaaccatgatagaatgcctccacacgtacatgaagaccgcgcagagacagaagttcttgcgcggcgtgcacttctgggcctcagtgctgctgctgattgcgacgctggtcgtgacgacgttcaccgccaacagggcgggctggtcgtccatcctgtgggttcttttcgccattgccgtctcgatcacgggaaccatcgacggtgggatttcgtttctgtttggcaggtctgaaatcagagcgcttatcgaggtggagcaggaggtcctggatgcggaacgccatctgcaaacctttctgagcaaaaaatga

SEQ ID NO: 3952 - DNA, 273 bp, Saccharomyces pastorianus
atgacacacaatcctgcaatggttgtaccacctggtgtgcacacttggtgcttcaagacggatgggtgcgcaccactcttctcaaccatcttgactgtgccttctaacaccttcattgcacactccttactttcttgcaatgggattcccaacttcaacccactttccatcaaggattccagcatcaacaaaacaaaggcagggcctgaaccaaccaatgcagtagctgcgtccatattcttttctggcaattcgacgtacttgccaacttga

SEQ ID NO: 3953 - DNA, 456 bp, Saccharomyces pastorianus
atggccgaagaagcaaagaataagcgtccattaggaggacaaaaggaacccattgaaactaagcctggaaaatctgaagagcctaaaccaaaaaaaagaagaagaagaaactacgacgattacgatgctgaggtggccaaagaggaaaccaagacaaaggacggttcgaaaaagagcgaaggcaagactgctgcggaggactcagagtcggacatggacgatgccaaattagacgcgttgatgggaaatgaagtggaagaagaagaggacgatttagctgaaattgatacctccaatatcattacatctggaagaagaacccgcggcaaggtaattgattataagaagactgcagaggaattagacaagaatgaagctactgtaaagcccactaatgaagcaggaagggatgacgaagaagatgaggatgaggatgatgactttaaggagcaataa

SEQ ID NO: 3954 - DNA, 2616 bp, Saccharomyces pastorianus
atgagcttgccttcgacacctgtcaagagcaaagttcacagtgcattatcgatggaacaggagatggacttcaatctaagccgtgatataccgtacccgcttgagaatggacctgccattcctcaatttgatgacacagaattcgctgccgtaccgcgacagggttggaacaagaataagaaacctaatgaccatacacaatctcaagttcgattctcaatcccagatcctaatgagttatcccaagattctccattgaaaattgtctacccgaagagtgtagatgagattcaaagagaaatatctaccgcatcactgttcatgaacagccatggccatttggtcgacatgcgttctaaaatactggttgatgttccggaagaagtttggaaatttcatcataatagaaaagtaagaaatgagaattctcatcgcaggactcgttcggatgctagatcttatgcaagcagtaaattgaaatcgccaagtcattcgaggtcgagatcgttacagtcaattatagtggatacaatgaatacataccgcacaggcgatgccgacaccacttccaacgaaaacactagcaacgtaagccaagtatctcctttaaacatttcctttgacaaacttcctccattaacaccccaaagaaatttgtatcttacacctgaatctccattgaataaatatcgtttgccagtcccattagaaatatcgctaccgccatacctatctccacaaaacaagcataaacagagaaacagtctagtttacgatggagatgggtacagccagtttcaagagtgtaacacgtcatcatccacagagtcttctttagaacaaccgtcatcgtcgtattcagatggaaataactctattccgtacgcgcatcatgaaatatccttcgaattaaacaacgcagatcctgataaatttcttggaatcgatggaaatgccaacgtgaatctgaaaatacaaagaagaaacctaaggagcccacagcatatcaagaagaagtcagatgtcaggagtgagcaggaagggattgaaaacaataaatcgttgaagattttgtcgacaccaaataaactaatagacattcctgacttggatgatatgaagtctccaccaagcgcaggtttaaacggtactttgaaattctttcagcatttcgaaccttgtgaggcaccagcaccttcacctaacaactttaaccctaaatcacaggacaagctcgatatgtcgtttaaattccctgctagttccgctaacaacaatactggtgaagagcgtgcaaataaagattttgtggacacgaataatgaagatttcctgaaaatcgatacttcgcctgtgaaccaatcaatcgagttgaggcgacagatgctaatggatttacaaaaatctccaacaagtaacgacccgagaatgcataagcatagaagaagtagaagcgttcataatattgacgataattttttaaaatttgacgccacgtctacaccaccaccagcaccagcaccagccccaatatctcctgttgagaattgtactccatacacttctcctgaaataccggaaagatcaccactacgatttaagtcatctccaaatacacctagcgttaaatcacctcaaaacaactctttccggcaagaaatgtcagtgccttcgattcaaatcataccggatgaaaccacttcaaatacagtagattcatcgattaccgagaatccagaagagaaaactggccccaaatcgttttctattgaagatgctgacaaatccattgcaatcattcgtgaaacaaaaaaaaatccaacggtagaaccgttcaaaccactgtcttcattcaattcgttcagtcttccaattcagactaaaaaaagatcccctctggaacaatctcttacagaattagccaccaaacaacaaacttatgcagctccaccttcactacctctcaacactgtatctcccaaaagacaactgtcaaattcaggtagtagtaaatcctcatcatataattctgaattttcggctaatactggccttacggatgcaacatctcaaccctctgtaacggctaacaggtcaatcctacaacagaacctaaaaaaccagaaaaaatcgaataataacattgattttcgtcctcattcccagaagaacaacttttcatttcccaggaagggggccacacctacacccgagcgtgtcctagagttcaacaccatttatgagaaaagaaatggtaaaatggttgaggttatcttactagatgaagacgaagacagcagcgttgaaagcaatatcagtccacaatcaaaattaattcaagctcaaaaaagcaaaaacgaacaagataagaaaaacctaaactactataacgaagttttagatatgtgtgaaaaaacagcagacgaagcaaagaaaatcatctatcaattggtggacgaaactgctagatacccgaaaaacaagcaaacaagatcaagagtgcttccgccactaccctttcccttatacgaccaaaacgggaattctttgaacaccaacaagtacggatcaaataccgccgacaacattccacgtcaacaaaacaacttgagataa

SEQ ID NO: 3955 - DNA, 117 bp, Saccharomyces pastorianus
atgatcatcgcggacagcgagtcagccgacaggttcatggacaaattgtctacagaccagtcttccatgatgatggagcaaacaatcagcaggggtaacgccagaatgttgttgtag

SEQ ID NO: 3956 - DNA, 120 bp, Saccharomyces pastorianus
atgccagacagaaaccccagaaagatcgacagaaacgacaaaacgtttcttggagcgtcaaagaggatcaatccggcaagtgctataggcagtttgttcagggctcccaccatggaataa

SEQ ID NO: 3957 - DNA, 1026 bp, Saccharomyces pastorianus
atgagtaagagcaagcatgaatgggctgactcggtggccaactctgggccggcctcgatcctgtcgtactgcgcgtcgtcgatcctgatgacagtgacgaacaagttcgttgtcaacctggccaacttcaacatgaacttcgtgatgctttttgtgcagtcgctggtatgtacactagcgttgtgcgtgctgcggactgtgggagttgccaagtttcggtctcttaacaggaccgacgtgaagagctggttccccatatcctttcttctggtgttgatgatatatacgtcttccaagagcctgcagtacttagacgtacccatctacaccattttcaagaacctgacaatcattctcatcgcgtatggcgaggttgtcttctttggcgggaaagtcacctccatggagctgtcatcgttctttatgatggtgctttcgtccgtggtggcgaccttgggcgaccagcaggccatggcaaccaagatgtcgcccctagaagatcttgaccaggatctggctgagtcggcctcgttcgtcttgaatccaggttacctctggatgttcaccaactgcatctcgtctgcgctgttcgttttgatcatgcggaagagaatccgcctgactaactttaaggattacgacaccatgttctacaacaacattctggcgttacccctgctgattgtttgctccatcatcatggaagactggtctgtagacaatttgtccatgaacctgtcggctgactcgctgtccgcgatgatcatcagtggtttggcgtccgtggggatatcgtactgttccggctggtgtgttcgtgtcacttcatccaccacttattccatggtgggagccctgaacaaactgcctatagcacttgccggattgatcctctttgacgctccaagaaacgttttgtcgtttctgtcgatctttctggggtttctgtctggcatcctatacgcagtcgctaaacagaacaaggcacagaagcaaaaaattctagcaaccactactgagaaataa

SEQ ID NO: 3958 - DNA, 810 bp, Saccharomyces pastorianus
atgagttcaaagacacagggagccaatcctaagggaatttcgcaagtattccaaacccttcaagcgctgttggtttctcattattcacatcgattagattctgacacttctgtcaaaaagacgctagttgacgtacatgtttataacttcatcgccaaattcttatttaataaaattctattaaagaaaaaccataatgatcccaaatgggttcgaaatttctaccaccaggaaaacaataaccctccaaatgacgatgtggactgcgagattttgtgttcgttgcacttcaccacagtttattctattattaacattcaactgatcaaaatcaagacaaatcaaacacttgaaccccagctttcagaatacatctcgatcttgaaacttattgaacacatgtttgccattatcgaaagcctaattcatgtgcttattagacttatatccaggcatgaacaagtaagcatcaacaggaagagagcttattgtcaagtgtatcttgagagagaattgagtttgaagagaacctatctaaggggcttttacaatacagtaagtgctattccaaaagaagaactgcaaggtctcttaaaaatggtcaagatagttattctatctttactcgaagccttagaaaggattgagtggaaatatttcgcggcttttttggaaaagttccctgcatatgagatatcattacaaaaaaaaagagcgtacatacaggctgctctattggttacggccgaaagaaatttgattgctcgttttcgattgtcatgctgttttaataaaacaactggtacttaa

SEQ ID NO: 3959 - DNA, 453 bp, Saccharomyces pastorianus
atgaatgtaattacaggtactaaaattcaaaatgtaatgttacctttcatcaagaaggtagcaaattgttcatccaaacgtaccttgtacaacttcggagtgaaagaaaagaaaagtgtggatattgaagtaagcagaaccgcacaaaccaaaaaaattgaccagtcattgtccaaaaagctccccaaaggtactatctacgatccgtttgatttttctatgggtcggattcatttagacagaaaatatcaggcaagcaagaacgcaaatagaaatgatataatgaaaagtggcgtgaatcccttagagttctatgcaagaccaagaattctttcaaaatatgtcaccaccacaggaagaatccagcatagagataccacaggcttatcggccaagaatcaaagaaggctatcaaaagctataagaagatgccaggcaataggcttaatgtga

SEQ ID NO: 3960 - DNA, 1500 bp, Saccharomyces pastorianus
atgtacaattgtaccactatgcaggattctaatatatgcacacattgcgaacttgaagaaaatccaaatgcattgctctgggtgaaatgtgatagttgtccgcagtgggtacatgtgaaatgtgtgcctttgaagcgcatccactattcagatattccaagtaccccagtttcctcttatccgaattcatggaaggagatcaagagctaccgctgtgtcaaccattatgaagaggagtttcttgctatatttcctcgcggccttccaaatggaaagcgacaaagagatcgtggggaaaatgaagatagcaatcatatcagcaagcgatataattttaggaagaaaaaggatattgactacattgctttgaatgagggcgaagcaaaaagagagaaaatgatccatcctcataaagacacctttttaagatgttttgaaaagtgggaaaataagtcgaatattatcaatgccgccaaatttgctgctacattcaatgatataagggagccatacaaaataagcgatccttggagtagtggtgtgcaagtgccgaaaatggagacaaacaaaggagttttaaccgttaatgatattacggaaattataggggaggattatcgtgttgatgtgatggatgttcaaacgcaaatgaatgagacctggactctgggttcttggaatagatattttactcaaactgaaccaggtaatagagatcgaataagaaacgttatatcattggaggtctccaacatcaaggctttagaacttgagaggcccacatcagtgaaacagaatgatcttgtcgatcaaatttggaattggaacgagggtctcgggaaagtcaatgatgaagaagcagaagaggataatccaagaccaaaagtaaccaagtatatcttaatgtccgtaaaggacgcctacacggactttcatttggatttcgccggcacatcagtttattataacgtcatctctggacagaagaagtttttgctatttcctcctactcaatcaaatgtagataagtatgtcgaatggtctttgaaggaataccaaaacagcttttttctaggcgatgttcttgaggatggttttgcaatggaattgaatgctggtgatttgtttatgatcccgtccggatacattcatgtagtttatacaccagcagattctctggtatttgggggtaatttcctagcaatgcgtgatctagagactcattttagaattgtggaaattgaaaaattgacaaaggttcccaaaagatttacctttcccaaatttgatcaagttataggtaaattatgtgagtatattgtgctttctaaaaataagaagactgttggtgggagagatacggatttgatagccgaagtcagtaactccacaattgagttactatatggataccttttaaaacctggagtgaagtataaacctttgagttttgcttccaggaattatttagtgaaagctttagccgatcttgtcacgtag

SEQ ID NO: 3961 - DNA, 579 bp, Saccharomyces pastorianus
atgggtggtgtgatctatgctatcctggttcccaactctctaaacgggtttggtcagttctgttgtgttctattggctttgtccaccattgccaataatattccagacatgtatactgttgctttatccgcccaagctttgtgggcacctttggctaaaataccgagagttgtctggaccatggctggtaatgccgcaacgttgggtatctctatacctgccacctattactttgatgggttcatggaaaacttcatggactccatcggttattacttggcaatctacatcgccattgcctgctccgagcatttcatttacaggcgttcgtttagcgcttacaatgtcgatgactgggataattgggaccgtttacctattggtattgcaggtattgctgccttatttgttgctgccttcggcgttgccttgggtatgtgtcaaacttactgggttggcgaaatcagtcgtttgatcggtgattatggtggtgatattggtttcgaattaggcggaagttgggcatttattgtttacaatattgtcagacctttagagctcaaatattttggtcgttga

SEQ ID NO: 3962 - DNA, 1587 bp, Saccharomyces pastorianus
atgtctctgacacatggaatgtctgtagctggtactaaagatacaggatatgcgctcaaagatcttgagtctcgagctcgcgatgttaaaactccttcagccgatgaatactatgaagatacagaatcacacggaaccgaagaactagttgagaccaagttgtcctttttaaacagagttgctgccagtctaagcgctgagacaaagggtattgagccaatcacagacgatgaaaaaaccgacgactctatactgaacgccgcgtccatgtggttttctgctaatatggttttgcctgcctacgctatcggtgccctaggtcccttgatatttgggctgaatttcggtcaaagtgttctggttatcattttcttcaatcttatgggattgatatctgtagcgttcttttctgtttttggtgcggaactaggtctaagacagatggtcctttccagatacttagtcggtaatgttgcagcacgaattttctctttaatcaactttatcgcttgtattggttggggtattgtaaatactgtagcaagttcacaagtgctgaatatggtcaatccaggtcatcagtgtcctctttgggccggctgcattgttattatcggtgccactgtgattgtgacattttttggttataatgtcattcactcttatgaaaaatgggcgtgggtaccaaattttgctgttttcttagtcatcattgcccgtttggcaagatctggaaaatttgtccttggtgcatggacatctggccctactactgcaggaaatgtgctatcgtttggttcaactgtttatggatttgctgcaggttggaccacgtacgccgctgattacactgtatacatgccaaggaaaacaagtaagtacaaaatattcttttcacttgtagccggtttagcagctccattgtatttcaccatgattcttggtgctgccgtagcaatgactgctgtcggtgatccaacgtggagagcatattatgatgataactctattggtggtttaacatttgctatccttgttccaaattctgttcatggattcggccaattttgctgcgttttgttgtctttatccactattgcaaataatgttcctaacatgtacacgattgctttatcagtgcaggctacgtgggagcctttggcaaaagttccaagagttgtttggactttattaggtaacgcagccgctttagctatttcgattcccgcttgttattatttttctactttcatgaattactttatggactccatcggttattacttggctatctacatcgccatcgcctgctccgagcatttcatttacagacgttcgtttagcgcttacaatgtcgatgactggaataattgggaccgtttacctattggtattgcaggcactgctgccttaatcgtcggtgccttcggtgttgccttgggtatgtgtcaaacttactgggtaggtgaaattggtcgtttgatcggcgattatggtggtgatattgggttcgagttagggttaagttgggcatttattgtttacaatattgcaagacctttagaactcaaatactttggtcgttga

SEQ ID NO: 3963 - DNA, 1542 bp, Saccharomyces pastorianus
atgactgacgatctagatagttccaaagttcattctgaaagctgccacaaggctgggaaatatgctggctatggtaccacacataagatcagggctcaattgaactttagcgatgagaagaaatggaaaaagttttctggcaggaggctagagctcattgactcattcgggttgagtcagcataaagcaagtgaacaggacgataatataaaacaaatagctaccatactaagaaatgaattcgagtatcctgagacagtctcaggagaatttgagaagttggttactgctgctgttcaatcggtgagaaggaacagaaaacgttccaaaaagaaattactggactcaaaaaagaagactgcgtcaggcaagattcaaaaaattcctttgtctccgccaagttcaagcaatatggggtcttcctgttctgcttccaatgcatcaagctctgacgaagatgctagtgtcaaagaggaacccattttacctgctcttactagcacgacatcagtaaaattgctatctaacccgaacgaatgcaatctcccatcagtgtcaaatcatctccgctctttactaaagaagaacactttggggtttcacggctcatctataccatgtgcgcccagtgatgataacgcattaccaaaacttcgtgtggaggctcaatctttagtcccaaacgaaaactacgactctatcgttaaatcaataattgttgatatcgtgaataattctgttccactacctgagcaaattcatagagatagatttgctagaccatatttaacagaaaaaacaagctgccaaaacaaagttctgatatcaaatagtctaagaaaacttattctgtcaaagatacataactcaaaaacgtgcttaggtgtctgtaaagatgaaaagctgctggattcctttacaaacttagaaaccctgggcgaaaattcactaagggcttctatctcatttgtagtagaaagcagcttcacacatttaccatcctccacaaggcagtaccttactgacaggattttgtcgatggacttcttgactatactatcgcaaaggttattcgtacccgccactagccaattatttgccgatttaccgcaaaaaaagatccaagtcagagtgctgaacctcttattagggagtcttgtcaaagattatgggttcgacacggccttggcccccataaatgaagtcatatatcacatgacgcttcaccaatacccattagtttgtattcaaaaaaatccgaacgttacgaaaacgaactcagcatctgaagtactccgtttacaaacttcatcagaaagtatagctaaaagagagcctcaaccgaacacgccaaacaagtcgcaaaagtgtaccgatctcacacaaccttcattggatgcatcaaacacatacaacgatgacggattaaagatgttgagtgcgatttcattacaaatcgaaaattccagacttccggaacgatttaataatgttccaaaacaaacaggtgcctctgcaccaatcctccctgcatttccatag

SEQ ID NO: 3964 - DNA, 153 bp, Saccharomyces pastorianus
atgtgtagccacagggtgtgttttgtagtcgacaaacaccatggcatcgtcatgtgtacacactacttgaacgtctatcttgaatggcctaccatgatactcggtttcctcaccatagtgccacacgattttatcaaaagtttcgtcctttga

SEQ ID NO: 3965 - DNA, 1221 bp, Saccharomyces pastorianus
atgccgccggcgagcactatcaccatcattccacaggctacggtgtttacattacctttgcttcccaaggatgatgccgcaagatgtatagcccaggtggatggaacgtatatggatggtcgcctcattaaagctgcatatggtaccactaaatactgctcttcctacctcagaggatcaccatgcccaaatccaaactgtatgtttttgcacgaacctggggaagaagctgattctttcaataaaagggaactacacaacaaacaacaagcacaacagcaaggcggtggaactacgtttcctagaactggcataccaaataatgtacccgccagtgcagccggttcaaacacaaatctactgagtgagcacttcaacagcacaccgtcaccagctgctatgagggctcaattacatcaagacagccacacaggtgcagggacgcctgttttaactcctgctccagtccctgctggatcgaatccatggggagttactcaatcagctacgcctattgcatctatcaatctctccaagaacagtagctccatcaacttgccaaccttgaacgattccctgggacaccatactattaccacaactgagacttgtaccacaactacgacaactatcacgaacaacaatgtcacaactcactcccatggcagcagcaagaaaaagcattctcttgctgcggaagaatacaaagacccttacgatgcgttgggaaatgccgtcggttttttggacacaagactacattctctatcaaattaccaaaaacgtcccgtatctatcaaatctaacattgttgatgacgagacctatagaaaatatccgtcattattttcctgggacaaaatcgaaacttccaagaggagtgataacacattggctaataaactcgtggagatactggctattaagccaatagactactctgcttccgtggttcaattcttacaaagcgtgaacgttggtgcaaatgacagcagtgcaattactgaaaacatgaaagcttcctcacaattaataagactacaaaccgtgcaaccgcaaattcaaccccctctaaatgtcagcacccctccaccaggtatctttggcccacaaaataaagtacccatgcaacaacagcaaatgggtgagacaagctcaaggaactcatctgatctactaaaccaactaatcaacggaagaaagattattgctggcaattaa

SEQ ID NO: 3966 - DNA, 621 bp, Saccharomyces pastorianus
atgatgaatccacatgttcaagaaaatttgcaagccatccataacgccttaagcaattttgatacatcgtttttatcagaagatgaagaagactactgccccctttgtattgagccgatggatattactgacaagaatttttttccctgtccctgtggttaccaaatctgtcaattctgttacaataatatcagacaaaacccagagttaaatggccgttgcccagcatgccgtcgtaagtacgatgacgagaacgttaggtacgtcacactgtctcctgaagagctgaaattggagagggccaagctagccagaaaagaaaaggagagaaagcatagagagaaagaacgtaaagagaacgaatatacaaatagaaagcatttatctggcactagagtcattcaaaagaatttggtttatgtagtcggtatcaaccctcctgttccatatgaagaagttgctcccgctctgaaatctgaaaagtattttggccaatatggtaaaataaataagattgtggtaaatagaaagacaccccattctaacaatgccgccggcgagcactatcaccatcattccacaggctacggtgtttacattacctttgcttcccaaggatga

SEQ ID NO: 3967 - DNA, 756 bp, Saccharomyces pastorianus
atggccttacccaataaagtctgtgaaccctttgtggaagtaatcgaaagcgttcacggcaaatcaaagattattgatttatccgccgatcataggtttgtctcggaatcagactgggcctatggcttaccagaattgaacaatagggaaaagattgctgccgctacgaaaattgccaatcctggttgttatgcaacagggtcacaattgactatcgcccccttggctaaatacatcaacggccttccaaccgttttcggtgtttcaggatattctggtgccggtacgaagccttctccaaagaatgatcctaaatttctgaataacaacttgattccttacgcgctaactaaccacatccacgaacgtgagatttctactcgtattgggcacgatgttgcatttatacctcatgtcggacagtggttccaaggtatttctctgacggtctccattcctatcaaaaagggttcattgtccaccggtgaggtcaaacaactatacaaagatttttacaaggacgaaagacttgtccgtgtcattgatgacattccactggttaaagatataggaggcactcacggtgctgtcattggtggctttaaagtcaacgatgcccaagatcgtatagtaatttgtgcaactatcgacaatttgctaaagggtgcagccactcaatgtttgcaaaacatgaatcttgcgttaggttatggagaatacgctggtattcccaacgacaaaattatcggtaactga

SEQ ID NO: 3968 - DNA, 1650 bp, Saccharomyces pastorianus
atgccatctgcaagcttactcgtctcggcaaagagactcaatgcttccagatttccaaaacttgcctctttattaaataggtctgctacagcagggtttgcgtctgtaacttcgagagcctcaccatctgttacttttacaagaaagaaagtaggctactcaaagagatgcatttcatctactgacgactcttcggctactaggtccactgttatccaactactgaacaatatcagtacaaagagagaagttgagcaatatttaaaaaacttcacttctgtttcgcaacaacagtttgctgtcatcaaagtgggtggtgctattattagtgataacctacacgaattggcctcctgcttggctttcctgtatcatgttggtctatatccaatagtattgcatggtaccggtccacaagtcaatggtagactagaagcacacggaattgagccggactacatagacggtattaggatcacagatgagcacacaatggctgttgtcagacaatgctttctagaacaaaacctcaaattggtaaccgcactagagcaattaggagttcgcgcaagacctatcacatctggcgttttcactgctgactacttggacaaggacaaatataaactggtggggaatataaaaaacgtcacgaaagaaccaattgaagcatctattaaagcaggtgccttacctatcttaacttctttagctgaaactgcttcaggccaaatgttgaacgtcaacgctgatgtagccgcaggggaattggcccgtgtttttgaaccattaaaaattgtctacctaaatgagaaaggtggtatcatcaatggctctaccggcgataaaatttctatgatcaacttagatgaagaatacgacgatctaatgaaggaaagctgggtcaagtatggtaccaaattaaagattagagaaatcaaagaattattggactacttaccacgctcttcttcagtcgcgattatcaacgtacaagacttacaaaaggaactgttcactgactccggtgcgggaactatgattagaagaggttacaaattgctgaagagatcatccattggcgaatttccatcatctgatgcactaagaaaggctcttcaaagagatactgatattgctactggtaaagaatctgttgcatcctacttgagagacttggaaaatgccgatttcgtttcttacggtgatgaaccccttgaagcactagctattgtgaaaaaaggtacaaaggttccgaaattagacaagcttgtatgttccgatgcggcttggttaaataacgtcaccgataatatattcaatgccttacgtcgtgatttctctgcattacaatgggtagtcaatgaagatgatcctaacattgcatggcattttgatagatctcaagggtcgtatttgaaaaacggtaaagttttgttctggtatggtattgatgacgtaaataacatctctgaattggtagaaacattcgtcaggtcttttgataccactcggtccaaaccatgcagtacgaataacgtagtggaaatctctaataacttaccagttatctgccaaggactaacactcgccgtgctgatggcaagtccgtacatggcggacaggcccgtaatgcctgtccgaagagga

SEQ ID NO: 3969 - DNA, 102 bp, Saccharomyces pastorianus
atgatgatatttggattagggagactgttttatgttattctattactaattaatgctgttgctgtgctgagtgaagaaagattcttaagaaggagtatgtaa

SEQ ID NO: 3970 - DNA, 135 bp, Saccharomyces pastorianus
atgattcgtacagttggcttaggaagatcaaatgatgagacacctgtttttggtcaggatcaaaacaccaccaagtccaaggttgtacaattgattggtgccgtacagactttactgaggagtatgttattttga

SEQ ID NO: 3971 - DNA, 888 bp, Saccharomyces pastorianus
atgagttgtttatcgatacttttcagtattatcactgtatggaatatagctacgacttttgcggcaagcgatagtatttaccttaagggacacagggtggggcaagatattgacaacctatacaaagtgtatgataatggcactatgtatcccgtcactttcaatgagtggttaaatgatctatctaggacaaacgactcaccatcaggtaatgtgaccatatcaaagcgtgatagtgaaatttcctgtattaatgacacatgccagcacgtagattaccatgtgagtgacaaaggggttattactatagacatagctacgtatagcactcctgccgaacgggataactctgtttcaagcaacgcatcgtatggactttcaaaacgtgaaacaacgtatgaaacgttttgtaagaagaaaatatacggtatgaatgtttccggtttctgtaatgcctatgacttcgctgttcctgctttcgactttggtagtaatgtctacactcttgtcagtggtatcattgataagatcaaaaacactacgaagagggataagacagcgtgtttaggttacgagttagatcatgtgataatagatcctgccgttgattggtctatcttcgtttctacttggaaacaaggatcggctaaccgtgacacacaggcctctgctgacagcttgaaatgtgctgcccaaaaagcacttgacagtgaacataatcaccaaaaaacggctttctgtatccatctagatagcggaggatcgtttaacttagacatcaggctaatttccgagctttcattttcgaaatacaacccctgggctctttcatgtccaaaggacaagggttctaactcttggcaggttgtgagtgactgttttgaatag

SEQ ID NO: 3972 - DNA, 1968 bp, Saccharomyces pastorianus
atgctactccgaataaacgctaagttttgcccaaaagagcagttactgaaaaggacattctattcactaactaacttacgaaaaagtcaagtaagagaaaggttacatcagctggaaaagaatgattttgtaccgaataaaacttccaaagaattagacaggttaaactccaagaaaagacgacagttaaagaaattacaaaagactgcttaccccaaggatcaggctctccacgttcttcgtaaatttcataatgtaaataatgaagcattggcagatacaaaattgggtcccactagtcgaacagatctgaagtttttgtccttgactaaggataagagattgttctataccatattaggtgtaaatggtcaacaattaagagatgccaaattaattgccaatgatgttcaaaaatttttgaaaagaggtcaattagaaaaggctgtcttcttggccagattggctaagaaaaagggtgtcgttgggatgaatctgattatgaagtattattttgaagttttgaaatcccaacagagtgctgttgatattttcaattggagaaaaaaatggggcgtgcctattgatgaacattcgatcacaatactctttaatgggctgtcgaagcaagataacctggtctctaaaaaattcggggagcttgtcttgaagacgatagacagtttgagcgataaaaatgagctcaacgggatggaatataatactgctttagcggcattgacaaactgtaccgatgaaagcttagtgtttaagcttcttaacaagaaatttccaggattgaaaaaagacgctatcacctataccttgatgattagatcgtgtactagaatttcagatgaggaacgttttttggtagtactcaatgacttgatgaataaggtaccttcttattgcattgactccaagttgttgttcgaatattgcggagtagtacttgaccggaagttttcaaaatccgagagtcaagagatggggctgcgggccttgtgtgaatacttcctatttgataaggccatctttaataaatacttgcaatctagcgagtctctagaattggtttcgttgagccattggaacattaacgagccatttcctctcaataagcatgttgtggggttgtttatgaactactgtctaaggagcaagaaatacagttttgctgttgaaacatttcaagcgttagaagaacggaataacaaaatgctagatctggacatatatcataagtacatggagacgcttataacagccaggcctacgacatgtggcgaagagtgcatggatgtctatgaacgtatagactcattggcgtcgcacatttccgttacaaagagaacattgattttagtgtataacgctttccaaagacaaagtctcaaagctgttacaaatagagatgaatccaaaaccgaaattattctgcggaagattcaaggattcattggtcatacggaggctatctactcttcgaagctaaacgaaaaggtatatggctttgactcatggaagttcttgtttcctgtcctgaaaaacctcaacatgcatgataaagtgaatacgatgggcttgaaggacgtactagacgaatacgtgaaatctttgctaaacggcatcttcgatgcgggggccaaagaaagcgtagaagacaagcggttcgttgcgttagaggggattcgtttagttaagattttgaccgagagaatcaagctaccgacgctagacagcgaggagatagctggactaaaaggcgtagataggagcaagtttctcgccagaagacatctcttgagactcaagcaaatgttactggagaatctggctattattgagggcaacatgaaagaaaagaacgttgataacgttggtgatgacactggcgccagtaaagagggagtactagaagacctgcttgaattaatactagaaaccagctacgagaaattctag

SEQ ID NO: 3973 - DNA, 255 bp, Saccharomyces pastorianus
atggacgccaataataaatccaaggagaataatgacattccagatgtgaaacctgaagtaaagggcaaaaattcaggtctgcgttcgtttatgcgtaaaaagactcagaatgttattgatgaaagaaaattgagagttcagaaacaattacataaggagaaaagtatgcgtaaaagaaatcaacagattaaagaaggtgtgatttcggaagatcacaaagatgtcgttgaagaggcattaagtagatttagttag

SEQ ID NO: 3974 - DNA, 1149 bp, Saccharomyces pastorianus
atgggctacaagaaaactggtcacaaaaaccacacaaaggagcgagaaaaccaaaataaatttgaacgttcaataaatactaccgctaatagtaataacaatgtcaataatattcgtaatcaaacaaaggataagaaattgagagctggtttgaagaaaatagatgaccaatacaaaaaggcggtctcttctgccgcggccacagactaccttttacctgaatccaacggttatttggaacccgaaaatgaactagaaaagactttcaaagtacaacaatctgaaattaaatccagcgtggacgtcaccacagcaaacaaggccttagatttatcgttaaaggaatttggcccttacaatataaactacgccaagaacggtacacatctattgatcacaggccgtaaaggtcatgtggcttctatggattggaggaagggtgagctacgtgccgaactgtttttgaatgaaacctgtcattcagcaacttacttgcaaaatgagcaatattttgccgtggcacaaaagaaatatacatttatttacgaccatgaaggcacagaactacaccgtttgaaacagcatatcgaggcaagacatttagaattcctaccatatcattacctgctagccactgctggtgaaacaggctggttgaaataccatgatgtttccactggtcaactggtttcagaattaagaaccaaagccggtcccaccacagcaatggcgcaaaacccatggaatgctgtaatgcatttaggccattcgaatggtacagtttcgctatggtctccgtcaatgcctgaccccttggtaaagttactctctgccagaggcccggtgaaaagcattgccatcgacagaagcggttactatatggtcaccacaggtgctgataaatcgatgaagatatgggatatcagaaacttcaaacaactacattcaatcgaaaacttgccaacaccaggcacgaacgtttcaatttcagataccggtctattagcattgtctcgtggtcctcatgttacattatggaaggacgctttgaaactaagtagagatagtaaaccatgctttggatccatgggaggaaaccttcatagaaacactccttacatgtcacatttgttgccggtaataaagtag

SEQ ID NO: 3975 - DNA, 930 bp, Saccharomyces pastorianus
atgggcctttgcaccctcccctcactcaccgccagcaacagcattaaacaacgtcacactgtagagatggctgaattgactgaggcagaaaagcgcaggctgcttagggaaaggagacagcagaagtttagcaatggaggtgccagttccagactgaataaaatcaccgggcaggcaagcagtcatttgaacgcagaatctcccttggatgctcccagcattccaacgggtaccccggtggagagttctggtgtggctactccagccagcaaaaacgacagcagcgcggctcctcaatttgacttactaaagcaattagctgccatgcagggccaaggtccgggctcaggctcaggctccccaccggactcttccactcctgatttgttttccttactgagctccatgaatactggtatgccgggcgcagagggcacaccatcacttggtcaggcgtctcctatggctcccatcaatcaagctgccttagactaccacgattacttgctcaataaactgaaggcatggaccattttggtgaaatgggtcttctttttattgccctatctgtttctacttacaagaccaaatgctgcggtgtggtctgctttcgcattcgctcaatcggcttggtttgcgcctttgagaaacccatctaacttcaccactgttttcgctacatttgagtttctttctatatccatttactaccaactgttgaaaaatgtggagcataagagtaagattagaaatttgcaagatacaaacaaactggtcaagctagtttcgcttgtgcccgaggggatgattcctatccccaacctgaagggcaaaatagtcacggctttgcaatattgggatctgctgtccatgctcatcactgacatttcattcgtattgatcatgctaggcttgttgacgtacttatag

SEQ ID NO: 3976 - DNA, 195 bp, Saccharomyces pastorianus
atgttcaaacaaaacacacaccagtccctctcaggctcacctacagactccagcaccaggttcaggccatccaccatgtgggcaccacagctcgcggtttcttctgccttttcgacttccagcaacaccgccgttcctgctgctgctgttgcaggtgagtctgttgcgcccgcagtgtcaaaggaacagtcatag

SEQ ID NO: 3977 - DNA, 393 bp, Saccharomyces pastorianus
atgtccatatcgttcactcttttgttcatgttcttgttcttttgtcccagcaaatccgcacggcggggtcaccccgaaaatctatccgaaatgcattataagaacagccatatggcatctatactcgttccttcgccccttaccacaaaagaccaatgttcaaacaaaacacacaccagtccctctcaggctcacctacagactccagcaccaggttcaggccatccaccatgtgggcaccacagctcgcggtttcttctgccttttcgacttccagcaacaccgccgttcctgctgctgctgttgcaggtgagtctgttgcgcccgcagtgtcaaaggaacagtcataggcgatttcccaggaacaccccagattataacattaatatctaa

SEQ ID NO: 3978 - DNA, 81 bp, Saccharomyces pastorianus
atggctggccatctaaacccatttgcatcacggcccagttccgccactgatccagttagcctgcttactccgatgccgtag

SEQ ID NO: 3979 - DNA, 2538 bp, Saccharomyces pastorianus
atgcgcttcaggggtagatgcgcagaaaccgcgcacgcgtctgcaccgacgccacaaaagcgggccgggccgggccgcagctgcagccgggctgccccggctgttgcctccccccctcctccgagtcgccccgtgctacgctacgctacggtcggcaacacgtgtattgccgatgcggaaaacaggatggacggcacgggcaggatccgcgcgttgcctggcgcatctgtgcccatcctatctatctctctatccgtctatctaccgcccgtttctattgttatcgtcctagcacgcacactccctggtgctccaccggcaatcgaccaggcagagacagaccagacggcaacagaatactgcactgcactgcactgcacacaggacggaaaggaaagatcccggctcgaatcaaaaaataaaaaaatacaaacacacgtcagaacgtgtgtttgttctctttccctctcttctgtacacactcaaacccccccccggtatctttctttttttttttttcttctgtggtatatttatccgtgcttcgtcctttccgcactcagtctcatcccatctcatcgaaaaaactactgtgcacgtcccgctctccttctctgctccatgatgtccgtctcaaccagattgaaccctgcctccattcatttgagtaccatgagccctcatcctcagcttcactcgctctcccgccagccacacgcttccatgtccagcgacgaggcccaggagtcgtcgccttcgctgccaccttcgaagaactcgagcaagaacccctcctcgtgggatccgcaggacgacctgctgctgcgccatttgaaggaggtcaagaaaatgggctggaaagatatctcgcagtacttccccaacagaactcccaacgcgtgccagttcagatggagacggttgaagtccggcaacctgaagtcgaacaagaccgcactgatcgatatcaacacctactcgggcccggtcaagatcacaaacactgacagcgtccccgacgaggaaaccgctatcgaggcgcccgccagcgcctccgcgacgccatccattccgattccctctagaaaggcgtccttgccttcgttcagcgcatcgatgtcatttgcgcactctccgtcgaatatgacccctcccgcaatcgtcccgaacgctccctcctcgataccgttcgtcccaccccagctgcccgttgcacacctgcaccaccatccgcaccaccacctgcaccaccacccgaaccataaggctttgaaacctcggtcaaactctcattcgttcacaagctcgttgaaccaggaccccgtggtccgcctcaacgacgaggaaaagtacgggttcattcctaaagtgtttgttaggtccagaagaagctcgtttgcctacccgcaacaggccgccataaccaccaccccatcttctccaaattcctcccacgtcttgaactcttctttgcttggttccaagtctaggaaggactcgtttgccaactggtccagaagatcttccttcaacatctccagtaacaacacttcaaggcgctcttccatcgttctggctccaaattcagtgtcgaacgtgttcaacgccaacaccaacaacagcagcagcagcagcaacacgaactccagaagggagtccatcatcaaaaaagaatttcaacaaagattgaaccatctgaataccagcggcgcctctaccccgagcaatggagccattttccccgcctcttataccttcatggacctaccacgtcgttcgtccgtttcatcgtcatctaccacattgcccaagttcaagagaggctcgctttcgggtcattctacaaacccctccaagtcatcatggtcaagggatgaagacatcttactagtggaaaacaaaaagagaaatttgtccatgatggagttgtcaattcttcttccacagagaaccgaggtggaaatccaatggagactgggcgtctcgtcaaacgatgccgaggaactatctcccgtacattcaccccagagaaccctggccaagaagattcgcccaagaatgttccaaaccgcctccaccacggataacaacaaagaaaacgataatgtgcgcgacgatgacgaagatgatgtagatcccttgcatcgttccaaaggatccgcacacaaaaccgctttttcgtccagcagttccaatttgtcctccaaggatgtttctccggaccccattttttcaccagatccagcagatgattcgtccaatgcttccgactccggatcaagattcacaatcacttccgagacgagcttttcgaacaccaccgaccgtgccaccagctccaagcacccacacgacatcactttgttggacaacttccgttccgaagccatcactccaagaccaaagccttcctccacgactacatccatcactaccgaaaccacttgcaacatgatgaaccattccagctctacaaccaccactacgaataatagtccgctgccaagcatcaatactatcttcaaggatatgctctaa

SEQ ID NO: 3980 - DNA, 4005 bp, Saccharomyces pastorianus
atgaccaaagcgctccttagtctcaaatcagaaataaacaaccagtatcaagagctggcccgactgcgcaggaagaaagatgatttggagcatcttcgggattccacaatatctgatatctattctggatcttactccacagatcatttacaaaagcactcaatgaggatacgggctaatacacaacttagggaaattgacaactcaataaaaagaaccgagcgacatctttttgacctcaaacaacaattcgacaagaaaagacaaagatcccttacaacatccagctcgattaaggctgacatagggagcatcagaaatgatgatcttcaaaatatcgacagcgaagaatcaaacggccacaatagtttggcagaccaaatcactcttgatgatgagtatctaaccactcccacttctgcaactgagctcaatagtcagcaaaatttaaatcgccatggtacgataaattcccaaaataatgagaatctttccactctttctgtttcaaataatgacgatccaaatagggggaatttaaaagataataaaatggaaagcgatcacggaggcattgacaacgaaaatcaaatctttaaatccacaacgactgaggcagctacatggctcgtaagcgactatatgcaaagttttcaagaaaaaaatgtaaatcctgattttattgctcaaaaggcaaacggcctagtggttttattaaaagagcattccgaaataagaaaagatttagtgctaacttcgtttatgtcatcaatccaaaacctgcttcttaatgaaaacaaacttatagcagcatccgcttacagggtatgcagatatttaattaatggttcaagttttattgatgaactgttggaattgaggttagatgcattcattatcatttccttagcaaaagataactcttttcaaattgaaagagaacaggcattgaaactgatacgaaggttcatcgaatataacactggtataacacagggaattacgcaagccattatcagttgtgttgaaaaacctgaagactctttgaggcatatggctttggaaacgctattagagctttgttttgtcgcaccagaaatggttaaggaatgccgtggtatgagagtgatcgagggatttctacaagattacaattctttctcactagcgtgtgtgatactggacactgttttacaattgatggctactcacaaaacaagacaacattttttgaaagattttaatgtatctgtattaaccacagttttctccgatacaaacacaaaatcaaccgttaatgtcgaaaaaatgcaaaacgcctctacacttatttcgatcacattaaatagttataatggattcatgcttttttctaacgacaatttcaaaccacttaaacaattggtatctttttttcaaattccaatatgcgcccagtacctcattgacatttttctagatgttttgaaaatcaaaccattgccatacaaatcaaaaagcaggcactctcatgctttcaaaccgattccttcccaatactacaaagaatgtatgtctgtgaaccaaagactagcactaattgtgttaattcttgacaattcaggattcgtctcccatcttcttgaactcttgaatgatgaggatagagatgacaacctggtggcaaaaggcagatacctacttaccgagtactttaatctcagaatgaacctagtcgataataagtacacctcggtgtcaagaccaatttccaaggaaaacttcacttacgttgacgaaacattccaattcaggaagatcgcctatcgaatgaatagaaatagaaatacaattggaatgtcggagattgattacgtccaaaacataaaggcattctctaaaacggtcaaagagaacactcttcttcgcgaagtagatgattttcgatttagaagaatggtttatgactctaaagttttgcaaacaaaagacttcacacgatggaattggaacataataaacgaactactcgaaggaccgctattgaataagaaacagttggaagaattagtgaaatcaaccaagttcattagaagattattggtgttttatagaccacttaggttaagattttctaatgttaatagaggcgcaaaattgtctcaaaagtatgttcaagttggatgtcaattttttaaaactttaacggcaacgccagaaggtataaaaattcttatggatgataccaaaatcataccgcaattggcatctctaatgtttagagccatggagggaaacatatcaggaaatatcttcgacaaaaacacgttaaaggagaaaatgatatatggatatttcaaatttatcggaattctgacgcaatcaacgaatgggattcatgttttaacaaggtggaatttttttactgtgatttacaaaatgttccaatttgaatcgaaactggggctcgaatttttattattaactatacctgagttagatttaaagtattcatcacattgccgtgccattatgggcaaagcccttgttgttgcaaatgaaaaagttagaatcaaggccacaaagcatattggtgataaactaaaggaattattatctatcaaagaatgtgatctcaagttaagagcaaataaaactagattacagcaatataaaatggaaatgttaacaagacaattatacgatttaagcccgagtgtagttgctgtagctgaccaagctctatatgaatgtattgttgcaggcaatggttccgaagagttaggtacctcatttaggatgtttttgaaccaaatggtgtttatcaggtcaccgatacttttcgaattattgagtcggccatacgggtttcagttgttgaatgaaattaatttcgtgaaggaagaaagagattcatggctgtccaaaaaaaacgtagattatgtccatattgtggaagaattcttgaaaaaaaatcaatcaattaatacgaaatcccttacctttcaacaaaagggtaggttaccgctacatttctatgaaagcttgacaaggacagaagatggaattttgctattaagtcaaacaggtgacttagtttctttcatgaatgttataaagagatatgttaacggaggtagtatggcaacgatggaagatgctaaagaaattatggatttgaaagctgcgttgtggtgcgttgggttcattggatccacagaattagggataggcttactagataactattcgttagtagaagatattatcgaggtggcatataaagctagcgtaaccaccgttaggttcaccgcattttacgtccttgggttaattagcatgacgcacgaagggtgcgaaatcctggacgaaatggggtggaactgttgtatcagcgtacaagatgaacctatcgggattgcactgccaaaccggcttgataggttcctatcatataacgaaaataaatggtcaacgtttggtgagtatacagacgaaatgattgttttcgatagaaacaatggtgatctggctgaaaagagctcacctatagagtttgatttggataaattattgagcgagaaaaatactgcagagaatccattgaatgaaagaatcaccggcggtaaatataacaaggatatcacaagccaaagcattactgtttcggatgaaaacactagtcttttcgcgaacgagagccttccttcgccctacgtaggacagtatcgcaatgacgaggactccattgagcgtaaagtgctgcatatagtgagtcaattgggcaaccacatcctttcgaaccgcgcagtaaaggaaatcacagaaataaacgataagtatggtccgaggctctttgaaaatgagagaatgtttttcaaagtgttcaatatgatgtctaagtatcggttcaagccgcatgtcagaaagttcctttgcgggttattcatcaacaatagagcgcttgaaaatgtcatcaagcatgacaacaagagagacaaaagaccaacaaacttaacacattag

SEQ ID NO: 3981 - DNA, 423 bp, Saccharomyces pastorianus
atgaaaaatctcgatcacttcctattgttcttcggatataacaacaatgttttctcaaaacggaattacacacaccagggaggacacttctcgttggaccatctcgccgagtctttttatgatttcacaatgagcatacctcgcagtacaaagcagagtagccctctctcaagtcgacaccgttcagtgactaacgtaactccattattaacaccgagacatagccatgataactcaagtacccaaatatcaagtatgaagaacactacgtcaagtagtccgtctacaatcatgaacgaaagttctaagagaaacaagcaaaacctggtcctttcaacctcattcatatctaccaaaaactggaaaatagtgcaccttcaccgaccagtcccctacaagcaagacgaacgagaagcacaatga

SEQ ID NO: 3982 - DNA, 279 bp, Saccharomyces pastorianus
atgttccaactgaactacaagccgccaccgttctctcaaaggagcgaggcaatgtctgcattgacgtttgcgtccgctgcttccataggtacgttcagtacgttggtatttggattttgttgggcatttgatgtttcaaccgctagagaattcgtcttcaaggcaagagaattcatgggtctccctcaaacgtcagacactgatacaagtatggacgaagaaacggcaagtataacgaagcaattacaagaccttttatcaagcgacaaagacgagtaa

SEQ ID NO: 3983 - DNA, 162 bp, Saccharomyces pastorianus
atgatgacaaatacgccaatgagcagcactatgactgatgcgaagaagcagtacaagagaaggaggatgctccaaatggtcaagttttatggtgcagccagtttcaccctcatcactatgaggctaatctccaaggccataagagtacgaaaatgtatgtag

SEQ ID NO: 3984 - DNA, 303 bp, Saccharomyces pastorianus
atggaaatatcgattatcggaagttacttattaatgagattctgcttcgaagacaaagaagtccgtaacaattggagatggaagtgttttgagatgggctttagcggtggggtgtatatggaattatactctctctactacattttcgcggtactgaatatccatggtttttcatctattctaatctccatttgttatagtctactcttcaacataatgtgcggtctgggactgggcggactgagctacttaacggcttcgtggtttatcaataagatttaccatttgaaagtcagcagataa

SEQ ID NO: 3985 - DNA, 348 bp, Saccharomyces pastorianus
atgaactgtgctgacaacagtggtgctagaaacttgtacgtcattgctgtcaaaggttctggttctagattaaacagattgccagccgcctctttaggtgacatggttatggccactgttaagaaaggtaagccagaattgagaaagaaggttatgccagctattgttgtccgtcaagctaagtcttggagaagaagagacggtgtctttttgtacttcgaagacaatgccggtgtcatcgccaacccaaagggtgaaatgaagggttctgccatcaccggtccagtcggtaaggaatgtgccgatttgtggccaagagttgcttcaaactccggtgttgttgtttaa

SEQ ID NO: 3986 - DNA, 249 bp, Saccharomyces pastorianus
atgggtgacactttggggctgtatagcgatataggcgatgacaactttgtatacaaggcaaaggcgttgtatccctacgacgcagatggcgatgatgcttacgaaatttcattcgaacaaaacgaaattctacaagtctctgacattgaaggtaggtggtggaaggcaagaagagcaaatggtgaaacaggaattattccaagtaattatgttcagttaattgatagccccgaagaaatgcatcgttga

SEQ ID NO: 3987 - DNA, 1131 bp, Saccharomyces pastorianus
atggctaaagaggtgaaggaagcaaggagaatcgacttgaacgcgaggtcgaaaatgtctgaacttaacacactactaaaggaaataaatggttcacttgctgccacatcagaatcattggagaaactctcagatctatatagtaattctgatagcgatgaggtttccgaaaataacaaaatgcatgaacatctattttccggcgctaataagcctactgagaaagtatcgctactatctttaaagaacgggagcatgctggggtatataaattcgttgatgatgctcataggcgacagactagacgaaaaatgtaagaatcccactgcaatggatgcacgtgaacgttctgtccaacaccgtgtagtgttggaacgtggtgtcaaaccgctggaaaagaagctgtcttatcaattggacaagctaactagagcatacacaaagatggagaaggaatataaggacgcagagaaacgtgcgctggaaagatcttctttggtaagccacggcgatggagcagatagtgaagatgaagactcaagtgatgaagagatggcatacagaccaaatactgcgggcattatcaacacggacaaaaaatcttcacacagagctactgctgaagaagcatcgaaggaagaaaatggggaagaagatggcgagaacgaatcgggtgtatatagaccaccaaagattaccgccgttttaccaccacaacaaacacattttgaagacaaattcaatgccagagaacataaggatcgtagcaataaatcgcgtatgcaagccatggaagaatatatcagagaatcatccgaccaaccagattggagcacgtctattggtgctgacattgtaaatcacggacggggtggtattaaatcttccagagatacagaaaaggaacgtaaggtcacctcgtttgaggaagataatttcacaagagtgaatgtcacaaacaagaacgataagaggaaacagaaacaaagagaaagaagcgcaagagtgaatgttattggtggtgaagattttggtatattcagttcaaagaggaagctagaagacagtacttcaagacgtggtgccaagaaaactcgttctgcttgggatagggcacagaggagactgtag

SEQ ID NO: 3988 - DNA, 627 bp, Saccharomyces pastorianus
atgataaacgaatatgtttctagaaaagttgccctaaaggacatgcaaccatgcgcaatttgcagtaaaccatctacaaccgtcctttataacgcatctggtccagactggctatacacgtgcgatatacatctacaagataaccctcagtttactatccccatctacagtaaagagtataacgatgctgtggctcaattgaaagtagtcaagaggaaaatggataccttaatatctgcccaaagccgattagggtcctgggatggttgggtaactaaaatattcaccaaaaaggataaggaaaagaaagacggttcagaaagtacagaacctgctccagctgagcctgctgatgtccctctagaggtaaaggaggacgcagacaccttactggaaacccaggcaatgtataggaaacttcttgacgaggttacagaattgcaaggaaaaaaccgcaagtatgagctagcaaaaatcatgttcgagagtagggttcaaagaaagaaaacagaacaaatgaatcgggaacgatatcgcaaagaacaagagaactactctaatacggaccctaaggaactgctgcaaaaacatgtgtttccctcagtaccacaacaggagacgcaatag

SEQ ID NO: 3989 - DNA, 3432 bp, Saccharomyces pastorianus
atgggcactcgtgatcgaaaaaacgtcatcgaagagctcgatataccttctgatttacaactagaattgacagagtcaggtaataatagtaccgcatccctccgaagtccaactaagaccagcgctaccaatctaccagctatgtctgaagatatagcagataatgcatccatagcctcttcgtcagtagattcattaaacatgctattagagcgacaaagagtaagacaattgaatcatcctcaacaccaacaacatataagtagttctttagcgaaaactccaaccactctgtcatcgttttcttcaattggaagcgcaactaagaataaagtcaaagaaaccaatcgaatatccttaacatatgatcctgtatcaaaaaggaaagttttaaacacttatgaaatcatcaaggaattaggtcatgggcagcatgggaaagtgaagttggcacgagatatattgagtaagcaattagtggcaattaagattgtcgataggcatgaaaagaagcaaaggaaatttttcacgttcatcaaatcaagcaaaatatttgaaaatgataaaattaaacgtgaaattgctatcatgaaaaaatgccatcacaaacacgtagtacaactgatagaagtactagatgacttaaagtcaaggaagatctatctagttctagagtactgtgcaagaggtgaagttaaatggtgtccgccggactgtttagaatcagatgccaagggcccatctttactaagttttcaagaaacgcgagatatattgagaggcgtagtgctcggtttagaatatctacattatcaaggaatcattcatcgagatatcaaacctgccaacctattaatatcagaagatggtactgttaagatttcagattttggagtttcattagctgcgacgagcaccaatagctcagatagtagcgaatctttggatgagttggaattggcaaaaaccgtgggtactcctgctttttttgcgcccgaaatgtgtttgggtgaggatgcatttgctaagtataatctaacaaaggaaaacctatttcgtggctcttgcatttcattcatgatagacatttgggctgtgggtgtcactttatactgtctaatttttggaatgttaccatttttctccgattttgaattgagactttttgaaaagattgtcaatgaccctttaaaatttccgtcttataaagaaatgcagtccaacaaagtatctaaaatatcttgtaaggaagaatacgaaatggccaaagaccttttattgaaactgttagaaaaaaatcctcaaaaaagaatgaccataccagagattaaaaagcatccttttgtttcttgggattttgatcatatatcgaaggaagacgacaaattacttgcttccactctcgaacaaaaacttcggtttcaatgtaatcaaactgatcagtttgaacctatctctatttcgaagcatgaactgaaaaatgctgtttctggtgtagggaaaaagatcaaagagtctgtactgaagagcatcccgctaaaggatccagtggatccgtcacatatgaactatattcatcctacagaaacttcaagaagccgaagtgacgctaatgtcattgtgagtgaaggctcggttttgtcaaatatcaaagacttaagtgccaataacgcagatagtgatgctgttgatagtagtaacggcgaagatcgtttccgtgacaatacaaatgacggccatttaactaaaaaagagctagaacaagaattaagcaaatttgatgataaacacgagcccagcaatatggtgaatttaccaatcaactcatcatttgcatcattagatagcttctacattgacaattttgcaatggcaaaaatgggtatgagctctcccgaagcaggggatcctactctgtctacaccgaatcttccttctgcaccttcgtcgacaagactaggacgatctccaatatttggtggactgcctaatcaaccaagccctattcgtcctgttttgccgcaacaaaaatcatcattttatgcatcaggccgatatgataataaccacaataatcttgttaggaattcctcatctcatttgatgtcactccattccggtagaccatcttcaagaagtagccgaatgaactcgcgcaaccaaaacttaacgaagacacctgatagcttttccaagagctcgaacgtgcaagtgagtgaacgaaaagtccccaaggatttggaaatgccgacacctaaaagaaaccctaatactagctactcgaagagaccgtcttcgggaaatggcagtaacataccatccgccaaaactgatactctggataaaaattctaacgttgaaggtaaacccccttctagaaattctcctataaaatcgttatatcaaagaatgaagcaatctaaggacaaatcgcaaacgtttgaagtacgtcgaggtaatttctttagtcactttaatggtgatgatgatgatagcagtagtcagtcctcagtaaccagttctggttccgcatctgattcagaattatcatcctcctcatcatcgggtacatctcagattccatccaggaacagttctagtaattttaatagtggctattcagaaacagaatctttaccttttgagtttggtgttgattcagaagatggaagtggtgtactgttaagagatctacctaccggagaccaaataaggccattcctggatatgcaaccatatagccacgtgaaagttaggaatacactcaattccaaaccaccttctatttcgtcttcttcatcttcatcagagggtgaagaggagttaatgctaaacgccgggaatgcggggcataggaggagacacaactcttcaaaagttgatgagccatcaaacaacccacaaaatgtaccaaataaagcaatctattccaatggaagcgttcatgatagcgagacgacgataactccacataacatagacggactgaagatacatcaaagtccgtgccttgatcaacccattgggaatctcaaaactctagtattaccaaaacacttggatcaaaaaaaggcaactacagaaacttcaaatttaaccgatattgttgaattcaatgctaatagtagttgccaaaaggatgaacaccttggaaaaatcctttattcaagggacttgttaaaggacgccctagattctactaatgtaggtagaagaaggtctataccctcaaataaactaagaggaaggagggaagccaataccattactactactgataatggtagtgatgataaagacgtgaggaagaatggttataggaataacgaacaactaggaggctttggcggtaatcacaaaaatcatgaacgatcgcgatctttgacagttgcagaactaaatgagttaaagagaagaggtgttcagttataa

SEQ ID NO: 3990 - DNA, 429 bp, Saccharomyces pastorianus
atgcatggtggtctttcaccagatttgaacagtatggagcaaattagaagagtaatgagaccaacggatattcccgatgttggtttgttatgtgatttattgtggtcggatccagataaagatatcgtaggttggagtgaaaatgatagaggtgtttctttcacttttggtcctgatgtagtgaatagatttttacagaaacaagacatggagctgatttgcagagcccatcaagtcgtggaagatggttacgaattcttcagtaagagacagttggtaacacttttcagtgctcctaattattgtggtgaattcgataatgcgggtgcaatgatgagtgttgacgaaagtttattatgttctttccaaattttaaaacctgctcagaaaagtttaccaaggcaagccggtggtagaaagaaaaaataa

SEQ ID NO: 3991 - DNA, 186 bp, Saccharomyces pastorianus
atggactcacagccagttgacgttgacaatatcatcgatagattattggaggtaagaggatctaaaccaggtcaacaagttgatctagaggaaaacgaaatcagatacttatgctcaaaagccagatccatattcataaagcaacccattttactagagctagaagccccaatcaaggtatgttaa

SEQ ID NO: 3992 - DNA, 957 bp, Saccharomyces pastorianus
atgagaaggagaagctacattctccattttaaactatatgctcagacaggaaggttccaatcaatgaaattaaaaagagaccacaatgagctaacaaaggcagacaataatgccgatggcatatcgaaagaattagagtctccattggtggaggtcgcccttcccgaggattatattgctagacatgaagaaaagttcaacgtagcttgccaacacattttggagagagacccgtcgcttttacctcatataaagaataacgaattttcgctatatttgaggaagacccaagtccctaatacacttgaggactactttacaagacttgccagtacgatcatatctcagcagattagtggcctagcagcgaagagtattaaaggaagagttgttgaccattatggcggtacgtttccggactacaaagtgcttttcgaggactttaaagacccaattaaaaacgcagaaattgcaaagtgtgggttaagtaaaagaaaaatgacatacttggaatctcttgcagcgtactttactgaaagcaataaggagattgaaaaaatttttggccaagaagataatgatgaggcggtggttgacagtctagttacaaatgttaaggggattggtccatggagtgctaaaatgttcttgatgtcggggctgaaaagaatggatatattcgctccagaagatctgggtattgccagaggattttcaagatatctttcagataagccagaactagaaaaggaactgatgcgtgaaaggggggaagttaaaaagagtaaaataaaacataaaaaatataactggaagatatatgacgatgacataatgcagaaatgctcggaaagatttgcaccttataggtctgtgtttatgttcatactgtggaggctctcgagcacaaatattgaagctatgatgaaggcagaaaaggattttgtgaaatcttaa

SEQ ID NO: 3993 - DNA, 336 bp, Saccharomyces pastorianus
atggttactacaagcactcatgcagggcaaaccacacacacacagaagcacacaatgagtctaccggagattttgcccttggaggtcatagacaaaacaatcaaccagagagtgctgatcgtgctgcagtcgaaccgcgaatttgagggcacgctggtcggcttcgacgacttcgtcaacgtcatactggaggacgctgttgagtggctcatcgacccggaggacgagaccaagaacaagaaggtcatgcaacaccacggcagaatgcttttgagcggcaacaacatcgccattcttgtgccaggcggcaaaaagtcccctgcccaggcgttgtag

SEQ ID NO: 3994 - DNA, 309 bp, Saccharomyces pastorianus
atgattctggcatattttctactggctaatttagagtcatcttcacttttggcaccggtaacgaccattttccccgatgcaaaaatcagagctgtagtttttggctctctgatacgcatgataacagcagcgaaacgtttagggttatactccgcattacgcgcatgtagtgccactgttttcaagtccagcctacaacccaaagtcacagtggccacaatattttgcaatgttggaacaataccagatgtggcagatgtatccttttcagattctggggccgccctctttatgtcttcttcactttga

SEQ ID NO: 3995 - DNA, 423 bp, Saccharomyces pastorianus
atgttttataatgagatgtcaatgtgcatcgtgacgttttcttatagcatatctgattgttgcgcatcactgagtgcgaatgaggtgttttccttttcacttttcagcatagctaattccttttctagtttgtatctatgttcacgttcttcggccagttccctttcatattttctttgcgtactcgtcaacacttttttaaattcacctgtcattattgaaagtgagcgtgatccagagccacctgttggacttcctatagaagagggagaagccggatcccacgtagctggcgagctcaccggtgatgatatactaaaattacttttgtttgaactcaacttgctgtttgcttcctctaattctttattcatttgttctaagtcgtatatttttttttctgttttattcaaattcgaatga

SEQ ID NO: 3996 - DNA, 123 bp, Saccharomyces pastorianus
atgtcttgtacgtattcggcacgatcgttttcaaattgcttggtcaaaaaattatgtgccagttgcaaatcattaaacgccgtctccaactcatctagtttgttagaagtatttttctcttga

SEQ ID NO: 3997 - DNA, 1920 bp, Saccharomyces pastorianus
atgcggcgtttaaaccatgcgacttcccccgctatcgtcaagaaaggctctttcacttcgatgttggccacgatagatgaatctttgcattttttggacgagaatagtcaattcaaagacgctgcggcctacagaattaagtttaagcaatgtttgattagggcctgtgaattggtttcccattttttgcaaaacttgttaaaacagacaaatcaagaaattttagataaaacaaaaaataaaaactcattgtctggactaccgtcgagtacaagagatgcgttcttgtatagtaagttctccacaatagctgaaactttcaaaagccaggcgagtgaaattgtcaagcgagtcaatgacaaggcgtattataggtatcacgacgaattgaattctattctccatgaatgcttcaatcactatttccagactcgtttgaaactattaacgcctgtcatttggacacatattgacgatattatcgttaaggataaagatctcgacttagtcaagtttattcaggacggtaaagcttacttccaacagctatgcacggatgaatataagcttttcgtcgagttcttccctgaaaaagaatgtcgttttaagatcaaccaatggttcttacagttatgcgagccactatatgattccataagaatcagagtcttgaaagagacagatatttcgaccttgtgtgactctgtgactttgtttgccccatactatgagtttgaagaaggttctgaagagtatttgaggcaatttaccgatattcaatacgataaattgtttgaaccaattgttcacaaggttcaagctagattgattttgagggttcagatttacgttcaacagaatattctcagctataagccttcaagggacgttttcatgatttcaaatagaaggaaaaatccaaaggccaactcaaatgatggcgacaagaggacaaccaatgccaaaaacggttcagatcctttgttagattcttatttgtcttctctcaaaactagaaatattctatccatttccgacgatgatgcagatgagaagtatattaattcggaagaaacaaccgatagaattacacaattgcaaacttactatccgcccctgttaaagaccctggctctgttgtctaaaatttatgaaatgatcaactccgtggtgtttgatgatatggcccatcatatagttcacgattgtatcatatctttgagaaaagcttacgatatggtaattagatcatcggcagggaaatcagatatcaacaatctcgatgtttcattggcgtacttgaaaaacctattgatgttgcgtgactccatacaaaattttaatattcaatataccgttaatgaaacttacctggatttttctggtgtggaaggatttttcaaatcgctcaaagaaaatggtagaaatgtgttgaagaaaacaaactcatccacgattttgactttagcaagggagttggtccccaaagttgtaaacaatatggtggatgcacgtacagaactaatctccgagttgagaaatgtcataaaggactttactgaaaaaacctctttagaacttattgatgatactttggatatcagcaacggcgaagatttatcatcaagaaatttaaaattaagggaaaatataaaagccaggttgcccagaatatacgaacaaatattgaattacatcgacgatcaagatattgttgtcaacctattagatgctgtgcaagagttaatcacacagtcctattctaaatattatgaaaatataagtgaaatggcggaaaatggggaattaggtaaggatcaaattgccgatgttatgtatttagatgtctttgcggatttttttgccaaagaagtggcagaaattctaaaaaatgatggcacgaacacccaaacaaggtaa

SEQ ID NO: 3998 - DNA, 1542 bp, Saccharomyces pastorianus
atggatttgttctacataccagatgccactgtctcaaaaaggcgttcaatgcatgtggcacctagaacagataacaataccagagttgcgtcaatgcggcacaacaataaacctagctttgcttcctcctcaacgtcgtctctaccctccaccagaaacggttcctctcgccatgaaaactcaaacaataacagtgctatcgataacaacgtgcgcccccaatataattataggcccaacctatccaagcgccactctttggtgaccatcccagagaagtatacaggtaaccgttataatctacggtcgtctccgccgacgtattcaaaccctcgtataaggaaagaattaactcctttccagttacaaaggaagcaaatgaaaactgcttttcaatttcccaatggtgaaaattttactccaagaaaccagaatccaaaatttccaccttccccttcgacttcgtcattgcctctcataacagccccaccaatacctaaatcatcttcaatgagcaatctccctgtcgctgcgccctcaacttatcagtcgcccaagaagactactacctctgctaatagtggtggttcaaaggtagaacccgagtctccaaaactaataaggtcgaattctaaaaaaatatcacactttttcaggaaaatctggtcatccaaatcatcaaattccacggatttcttagaagaaaatgtcaaaaccaagcagaaacggaaaaatccagagaagtctgtgccagaaccaatcacgtctctcgaacaaccagttgaaattaaaaagcaaagctcgttaaccgtcaacaatgaagtaacgtttttaccatcaattgaacagcccgacttggtacacgaattggctgcgtttggagacagtaataagatacccataattccacctccaagatcgccaaatagacctactttgtctgacaaacgaacaaccaagttatattattccaaccaagattcttctaatgaggacgtcactccggtagaaaagaccagcgtgttcttgaggcgtctgcgagatgaatggtctaccgtgtatttaaacaaaatacctctgactgcgtctgttccctcttctctttctaccactgccgaggcccctaattcctctattatcaactctttaccatcatcgccaggtcctttctcctcctcctcgtcttcattggtttcccgtggcccaacccaatccttatcttcctcttcaccaactccagtactttcttcaatgtcatcgaaatccaaaaatgcttccaagtccttacgctttgctgatgaaatttatgtaaacgagacatggtctcccatcgactattgtagatgtgacaattcctttcttgataatttttctaaagtgaaaagtcaagacatggctaacccttccacttttactggtaataatttctcttccaccaaaaacatctccaatgttgaaatcaagatggaggtaaatgagttcaaaagaagagaaatgcgcgtccatcaaaacagcaccaggtatacgcattactacttatga

SEQ ID NO: 3999 - DNA, 300 bp, Saccharomyces pastorianus
atggaaaagcacagagatagatgcgccggttgtcattggtacgtacgtgattacatttcgtccttgataataaaatatatatatataaatttggtttatattacattacattacatcatgtttatgcttatgcgctctcttcttcctcctgtgcttggctttcttccgcacacaccccctctcttagaaaatcgaacttttcgtcgtttagtatcgtcttcttcaatatgtcggcggttattctcttggttccttgatctcttgccatgtccccgctttttttcaccaacagcgctatga

SEQ ID NO: 4000 - DNA, 84 bp, Saccharomyces pastorianus
atggaaagtgctgcagaagagggccttgcagaagattattcggatttcatgaaagaactagaaatgtcggaaggaaatgactga

SEQ ID NO: 4001 - DNA, 153 bp, Saccharomyces pastorianus
atgaatgacaacctgccgaaggagtacttcgaactaatacggaaagttcttaaagagaaggaaaccgataatgcgcctttgcaaagacgaaggggactaagaaggagaaaccaggccctaccggatgccaaaagtttaaaaaggtttgaatga

SEQ ID NO: 4002 - DNA, 162 bp, Saccharomyces pastorianus
atgactattgattctgaagatttcgaagatgtcacagatgaaaacgaggcaaacggtgtaggagatatctccgttgaaatcaaaccccctagtaagatcaccagcaccgccaaaagggtaaaccgcaacatatgttctaatgatgagcggaaaagaagataa

SEQ ID NO: 4003 - DNA, 1494 bp, Saccharomyces pastorianus
atgctatatctactttgcctgatggttcacgggtccatacggaacgaatggattaacagtaagcgtttatccagaaaactgagtaacctggtacctgagagagtgtttgagttactgcatcctcaaagggatgaagagctcccacttagaagcaccagaaaattattggatgggttaaagaaatgtatggaattgtggcaaaaacactggaaaattactaaaaagtacgataatattgggttttacatgaggacatggaaggaagttgataagagcaacaagaatagaaaattcaaaacattgacgaaatcgaattttttaaaggcagtcgacaaaggtcatggagatcctgatgtttccgcacagggcttcgttgcgatgctaagggcttgcaacgtcaacacacggctcattatgtcatgtcaacctccagactttaccaatatgaaaattgacacttctttggatagcgacattgcctatagagatatggtaaaatacccaattttttggtgtgaagtatgggataagtttgccaagaaatggataaccattgacccagtaaaccttaagaccattgaacaggttagattgcgttctaagctcgcgccaaaaggagtggcgagctgtgaaagaaatatgctgaggtacgtgattggttacgatcgcaaggacggttgtagagatgtcactcgtagatacgctcaatggatgaactcaaaagtaaggaaaagaaggattactaaagacgagtttggcgaacagtggttcctaaaagcaataactacacttcaccgcaggaagagaaccaagatcgacgattatgaagaccaatacttttttcaaagagatgaaggtgaaggtatcccagactcagtacaggatttaaaaaaccatccatattatgtgttggaacaagatatcaaacaaactcaaatcataaagcctggttgcaaagagtgcggctatttaaaagtgcatggaaaaatcggtaaagtattaaaggtatacgcaaaaagggacattatggatttaaaaagtgccagacagtggtatatggaaggccgaatcttaaagactggctgtaggtgcaaaaaggtgattaagaaaaatgttgggagaatcaagggggatgtggaaaaggaagacgaaaggttgtatagttgggacgatacggaagtatatattccaccattggcgaccggaaatggggagattactaagaacacatttggaaatatcgaggtttttgcacccacaatgatacctgccaactgctgtctaattgaaagccctgtggccattaaagccgctaggtttttaggggtggagtttgctcctgctgtaacttctttcaagttcgaacgtggaaattcagttaagccagtcctaagcggtattgttattgcaaagtggcttagagaagctgttgaggccgctattgatggaatagagtttgttcaagaagacgataacaggaaggatcatttgctt

SEQ ID NO: 4004 - DNA, 1470 bp, Saccharomyces pastorianus
atgattacttacccatatggttatcatgcagggttcaattacggctacaacctagccgaatcggtgaacttcgctctagaagagtggctgccgatcggaaagaaagctgggaaatgcaattgtatttccgactcagtggagatagatgttaaaaaattggccaaatcttggaaagaccatgataataaggacccggaagatgcactctatctcaatcaattaccaaaccctgctcttcccttgcctcacaggccaacactaaaggaaatggagaatagttcacttcgatccacaagcccagatgtcggtcatttttcaagtttcaaaacaaagagttcgggtgtttcttcaccactactatcacgtatgaaagactattccaatatcgtcgaacccacgctagaagacccgactttgaaactgaaaaggatttcatcttttcaggaattgccttcaaccaaattactgaaaagagaaacttcacaattgctcacagacaacgaagacagtatagtggccatgagcctgacttcaatggcgaatagcgctgcgtcttctccaagattaccattgtcaagattgaattcatccaatgagctttcgaatacccaaccactacttgacatgactaataacactcttgcattcccacgacctaatgggccgtccggtttaaatcctttattatatatttccaacaagaacgtgaacggaatttcccattctgcaccccattccccagtgaatcccaatatatcattaataaagagagtcaagtctcccaacattgtaacattaaatatatccagagagtcgtccagaagccctatatcattgaattccgaggtaaggcaacaacaacaacaacaacaacagcattcgcaactacattcattctcaaccccatccaccgtgtcaaatctatccaattgtgtgcttgggccattaactgacccaagtgacataaaaataccgcatcctgaaaggtcattccatcgcccaacgaatagaatgctcaaaaaggaactgtcaacagagaggtcgaggtcgaggtccaatcctttacttctaaaggttgcatccatgtgtgaagaagagacgttcaccagtgaaaacatcgattcggacagggaaccatcctcccctctacaaacttctaaatttgctcccgaggaaattgtactatcaggtaaaaacaagatttacgtttgtaaagagtgccagagaaagttttcttctggtcatcatctcaccaggcacaaaaaatcagtccactctggggagaagcctcactcctgccccaaatgtggcaaaagattcaagagaagagatcatgtcctgcagcatttgaacaagaaaataccttgtgttccaaacgacacgtctgtagtggcccctctcttgaaccctactgtgcaaccgcaggatgagaagacggccattaatcaacaaagtacatctttaaactga

SEQ ID NO: 4005 - DNA, 1089 bp, Saccharomyces pastorianus
atgactaaaccaatcgctccttcagaggtcgtgggcggaatacccgtcttcaagcccacgtacgagcaattcgaagatttctattcatattgcaaggcgataaacaaatacggtatgaaaagcggtgtggtgaaagttattccgccgccagagtggaagaagaagttggatttgccccatcctgcggagactttacagaaaatcaaaattagatcgcccattcagcaacatatatccgggaataaaggcctgttcatggtacagaacgtggagaagaacaagacgtataatatcatacaatggaaagacctatcgaaggattacgtgcctccagaggaccctaaatcgagacgggactctaggaagaattctgtctcaaagtcttccaaattgaaactgaagaattttgagtcctctttcaacatcgatgattttgaacaattcaaaacggaaaacacggtagacctatctgactttgaaaatccagaaaggttgaagtttttggaagagtattactggaaaacgctaaactttacaacgcccatgtacggcgcggatactccgggatccatatttcctgaaaacctagacgtttggaacgtggccaagctaccgaacatcttagaccatatggaaacaaaggtccctggtgtaaacgactcctacctctacgctggcctatggaaggcctctttttcttggcacttggaggaccaagacttatattctataaactacatccattttggcgccccaaaacaatggtattcgatacctcaggaagacaaattcaaattttacaggtttatgcaggaacaatttcctgaggaagccaagaactgtcccgaatttctaagacataaaatgtttttggcgtcccccaaactcctgcacgaaaacggtatacgatgcaatagttcatcatgcaggcgagtttatgattacttacccatatggttatcatgcagggttcaattacggctacaacctagccgaatcggtgaacttcgctctagaagagtggctgccgatcggaaagaaagctgggaaatgcaattgtatttccgactcagtggagatagatgttaa

SEQ ID NO: 4006 - DNA, 153 bp, Saccharomyces pastorianus
atgttgctttctcgtctatatttaggaactaaaacttttgagagttcctttacgattgtacttttagagcatccactaggaccggaaagcaacaggatcctatgtttggcatcaggcaaaaacatagcctctaaagcttctcgtacatcctga

SEQ ID NO: 4007 - DNA, 2103 bp, Saccharomyces pastorianus
atgttatttagtagatcattcataatgtttaagtataatgatatcttatatgtaagcactaaaagtgagctcaatgcaaatgatctaaagccgacaccttgtcatagttatctgtatccgaatgatatggatagcacgaatttgaataaacgcccttcactacagtacagtctcagttcgttgggttcgcaaatcacaaaatggagctcatctagaccgacttcgccagtgcgtagggctagaagtacagaaaatgaattcagtattaagcgagaagcagtaactgactccccagacgttaataattataatgataaacaatggtatgaaaaatacaagccaacaaatctggaacaggtggctatccataaaaggaagcttcaggatgtacgagaagctttagaggctatgtttttgcctgatgccaaacataggatcctgttgctttccggtcctagtggatgctctaaaagtacaatcgtaaaggaactctcaaaagttttagttcctaaatatagacgagaaagcaacatagcatctcttcgaagtaccaggaatcattctgttgtaactgagtacaggggagattgcataatcaacgatgttcctcagatggaaagtttcagtgagtttttgaagagtgcgagataccttgtaatgtctaacttatcgttaatacttattgaagatctgccgaatgtctttcatagggacaccagaaatcgcttccagcaacttattttacagtggttatatagttcagaacctttactacctcctcttgttatatgcctaactgaatgtgaaattccagagagtgataataattatcgtacgtttggtattgattatacatttagtgctgaaacggttatgaacaaagaaatactgatgcattcaaaattgaaaagaataaaatttaatccgattaatagcactttattgaaaaagtatctgaaacttatctgcgttgacaacatggccctgttaaagaaaaataataaatggagtaaaagagaagaagtcataagccacattgcccaagaaacgggcgatattaggtcagcaataactacacttcagttctgggtgacctcaggcggggagttaccaatctcgacacgagaatccaccatttcatattttcatgctattggaaaggtgattcacggttcacatagcacgagcgatgataatgaaatgattaacactcttttcagtagtgccaatggtttgttatcaaatcaggattacaagatgggtattctagaaaattatggtacatttaataagggcaattttaatatttctgacgcgttatcaatcgtgaattgtttaagtgagtgtgaaacaatgaatagtttaccggaatcaaatgagtacggtttacggaaagtacgaaaaacttttcggaatattgccaaggagagtcacaatcatgggacagtttattttccgagagagtggaaagttagaaaattacaaaattcattcagggtccaagccaaggattggatgaatgttaatctctacaaatataatacagtgcattcattcagagatatagcgctacagcttggctattacgcacctttgatcaggaagtcacaaagttataaaaagaactccatgctatattatttaaaaaatcttccgactgactctgtggagctaaaacaaacattggaggagttccaagatacaatgcaaattgaagaagacatcgatataattgatcgcataggcggacctattgagtctctatctgtagaagacgggctagaaccattgatggatagcgattatagtaattctgattatatagaaaatcagaaaaagcgaagcgatacaaaacttcgtattttgattgaacggtacgaaaaaaatgtaatgatgacggatagaggttccgaaagtgaagacgtgtcgtttaatgatgatcctattgtggatagcgataatgataacaataaaactggcgacgatacatttggaagaagtgacgaggatgaatctctttatgaaatgctatcccaaagacaaccacgcattgcctcagtggttaacgagtcactttcagattctgatctagagatgctctga

SEQ ID NO: 4008 - DNA, 1263 bp, Saccharomyces pastorianus
atgcttgctgcttcattcaaacgccaaccatcgcaattggcccgtgggctgagaagtgtcctgtacacttccaccagattaagccatgttcgtactatggcaactttaaagacaaacgataaaaaagcacctgaagaaattgagggcacggacactgtgcaaatcgagttgcccgagtcctcttttgaatcgtacatgctggaccctccagacttgtcctacgagacttccaaagccactttattgcaaatgtataaagatatggtcatcatcagaagaatggagatggcttgcgacgccttgtacaaggccaagaaaatcagaggtttctgccacttgtctgtcggtcaagaagctatcgccgtcggtattgagaacgccatcacaaaactggacaccatcattacatcctatagatgtcatggtttcaccttcatgagaggcgcctcagtgaaagccgtcctggctgagttactgggcagaagagccggtgtctcctttggtaaaggtggctccatgcatctttatgctccagggttctacggtggtaacggtatcgtgggtgctcaagttcctttgggtgcaggtttagcgtttgctcaccagtacaagaacgaagacgcctgctctttcactttgtatggtgacggtgcctccaaccaaggccaagtctttgagtctttcaatatggccaagttatggaacttgcccgttgtgttttgttgtgagaacaataagtacggtatgggtacttctgccgcaagatcatctgccatgaccgaatatttcaagcgtggtcaatacatcccaggtttgaaagtcaatggtatggatattttagccgtctaccaagcatccaagtttgccaaggactggtgtttatccggtaagggtcctcttgttttggaatacgaaacctatagatacggtggccattccatgtccgaccctggtaccacatacagaactagagacgaaattcaacacatgagatccaagaacgacccaattgctggtctcaagatgcatttggtcgatttaggtattgccactgaaggggaagtcaaagcttacgacaaggccgctagaaaatacgttgacgaacaagtcgaattagccgatgctgctgctcctccagaagctaaactatctatcttgtttgaagatgtctacgtgaagggtacagaaaccccaactttaagaggtagaattcctgaagatacttgggacttccaaaagcaaggcttcgcttctaggaattaa

SEQ ID NO: 4009 - DNA, 672 bp, Saccharomyces pastorianus
atgacaatgagtattactgaagtatttggtgagtttaggtgtggtaaaacacagatgtctcatactttatgcgttacgacacaacttccaagggaaatgggtggaggtgaaggtaaagtggcatatattgatacagaaggtacttttaggcccgaaagaatcaaacagattgctgaaagctacgaccttgatcctgaatcatgcttagcaaacgtttcttatgctagagccttgaatagcgaacaccaaatggagcttgtagaacaattgggtgaagaactaagttctggagattatcgtttggtggttgtggactcaataatggctaattttcgagttgattactgtggtagaggtgaactgagtgaaagacagcagaagttaaatcaacatctctttaaattgaatagattagcggaagaatttaacgtcgcagtatttctgactaaccaagttcaatccgacccaggtgcttctgccttatttgcatctgcagatggcagaaaaccgattggtgggcacgtcctggcacatgcttcagcaacaagaatcctgctgagaaaaggtcgtggtgatgaaagagtcgctaaattacaggattctccagatatgcctgaaagagagtgtgtttacgtgatcggtgaaaaaggtattacggacgcaagtgattag

SEQ ID NO: 4010 - DNA, 378 bp, Saccharomyces pastorianus
atgtacttcctttttcatcacttttcccctcatacaacaggagaacactattttcaaaacaccgaaaatagccgccctagtaccagctttttgtataaagggaaggcaggtttggctaatgtatccttttcgttccttcacttttcacataccctttctgcatcttggtcttttgagtcaaacaacaaatcacccaaagtcatgtctgttacaggaactgaagttgatagcgatacaacaaaaaatattcttagcgtggatgaattacaaaactacggtattaatgcctcggatctccaaaaattgaagtcaagtggaatttacactgttaatgtatgttacaataaaaactttcgtgtacgtagctttttttactaa

SEQ ID NO: 4011 - DNA, 1956 bp, Saccharomyces pastorianus
atgagtagcaattccagcagttcgtcctgctcttctgacggtccgcagaaaatttctgcgagcagcaagtatcatcaggaggcacgttcaggaactaccaatgaaagcttctctggaaaagtggatcagaatggaaatgctcgcccttttagagaaataggtaaggatacggaatatctgtcgccaggtaaagtagaaacctctaccgagcccgaaggacagtcaagaaataggctttccccttcgatcaaaactcctgacgatgattcatttcgtcctcgacaaaaaggtcctcctgtgggattcgcacgctcttcaccaaatttaaaagctttgaatacacttgccagtgcagagcaagcgaggctattagaggattatttatctggaaatatgtctcgtagaaatggtagttatgttgacccactttatcgtcaactcaatcctaccccgggtggtactagaaataagccagtttggagtttaaatcaaccactaccgcacgttttagataaaaccttggcagaaaagatgatacaaaagaacatagatgccagatctcatgcttcctcgaaattaggctcaagagatgcgtcacggtccggttcaatgacttcaattaatgattggaggaaattcctgaggcgtgctgcgtcgaatatgaagctaaccgacatcgaagcacagcttcctaatgctgggaatggcgctggtgacctgtcacctaaatcaaaagtagaacacattcaaaaacctcctgagtcacaaatcgagtttgctcaagagagcagaactaagccccatcatgccgtcagtttttcattgggaggtgaaagttatccaccgtcggtggttggtgaagaagcgcaatcatttccaaatgtgcgaaagaaagatgaacgcgagtcaaaagaggcagatcttttgaaagggactcttgaacaggaggctaaaattacaagtaaactggacggagacagcagtattggtaacatagaggatgatcatccagacgaactgaaattcaccaatttttgggcgaaaattcgatatcgtatgcgtgagccgtttgcagaattccttggtacactagtgcttgtaattttcggtgtgggcggtaaccttcaggccactgtaacaaagggaagcggaggatcttatgagtctctgtcatttgcatggggcttcggttgtatgcttggtgtttatgtcgctggtggtattagtggtggtcatattaaccctgctgttactatttcgatggcaattttcagaaaattcccttggaaaaaggtgccagtttacatcgttgctcaaattatcggtgctttctttggtggagcaatggcgtacggctatttttggagttcgattacagagtttgaaggaggaccgcatattaggactacggcaactggtgcatgtctcttcaccaatcccaagacatatgtaacttggcgaaatgcattttttgatgaatttatcggtgcttccgtattggtaggttgcttgatggctgtgttagatgacagcaatgctccaccagctaacggtatgacggcgttcatcgtaggacttttagtggccgcgataggtatggcccttggataccaaacaagcttcacaataaacccagctagagatctgggtcctcgtatattcgcttctatgattggttatggtcctcatgcctttcatcttacgcattggtggtggacttggggtgcttggggagggccaattgctggtggaattgcaggagctcttgtatacgacctgttcattttcactggatgtgaatcacctatcaactacccggataatggctatattgagcatagagtagacaaacttctccacgctgagtttttgaagaataataatgcggaatctgttgaagttgacttagacagtaacagtaacagtaattccagcaagaagtctcctcctacataa

SEQ ID NO: 4012 - DNA, 1794 bp, Saccharomyces pastorianus
atgtcgcacaaacaatcaatgtcgcacaaacaattcaaatccgatggaaacattgttgctcagtatctattcggactagccagaagtaatccgggtcttacggtaattaaacatgatcgtgttattttccgtactgcatccgctccagactcaggaaatgccccgaaggtaacattggtatctggcggtggtagtggtcacgagcctactcatgctggatttgtcggtgaaggtgccttggatgcagctgctgcaggagcaatatttgcttcgccttccactaaacagattttttctgctcttaaggctgttgagtctcctaagggtaccttgattattgtgaaaaattataccggtgatattattcattttggtttggccgcggaaagggccaaagcggctggcatgaatatagaactagttgcagttggggatgatgtgtcggttggaaaaagtaaagggtctttggttggccgtcgtggtttaggggccactgcacttgttcataagattgccggcgctgcagcttcccacggactcgatttatctgaggttgccaaagttgctcagtcggttgtcgacaatagcgttacaattaatgcatctcttgatcactgcagtgtccctggacacaaatccgagaatatcttgggagaggatgagtatgagattggtatgggtattcacaatgagtctggtacccaaaaatcttctccattgccatcaattcctgaacttgttgctcaattgctacctctacttcttggggtggatgaggaccgttcttatgtgaagtttgattccaaggatgacgtagttctcatggtgaacaatatgggtggcatgtcaaatctagaattgggttatgccacagaagtcatctcagaaaaattgattgaaaagtaccacattattcctaagagaacaatcactggtgcttttgtgactgctttgaacggacccggatttggtatcactctattgaacgcatcgaaagctggctcgcatattatccaatactttgactaccccaccacagcaagcggatggaatcaaacttatcacgcagctgaagactggaaagttcttgctgacggaaaagttcctactgctccttctatagaaacagtgaagaacaaaaaaagttcaggcgtgacggcagactatgatacttttgccaaaattttacttgccggaattgcgaggatcaacgaggttgagccaaaagtcacctggtatgataccattgcaggagatggtgattgtggaacaactcttgtttctggtggtaaggcgttgaccgaagctattgaaaatcattcgttgcgtctcgatgatgctgctcgtggtattgaggacgttgcacatatagttgaagactcaatgggtggcacttctggaggtctgtactcaatctacctttcagctcttgcaaaaggtgtcgatgattcgggagacaagaaacttactgtggaaacgtttaaggaagcctcccaatttgctttagaagctctgtataagtacaccagagcacgtcctggttataggacattgattgatgctcttcaaccttttgttgaaacgttgaatgccggaaagggccctagagcagctgctcaagctgctattgaaggcgcagagaagactagaaagatggatgctcttgtggggcgtgcctcatacgtggctaaggaagaattgagtaaacttgatggagagggtggattgcctgaccctggggccatcggtctcgctgctttgcttgatggtttggttggagctgctgggtactaa

SEQ ID NO: 4013 - DNA, 2190 bp, Saccharomyces pastorianus
atgttaagtggtatcgtactcggtatcgtacaccagcaagccggtatgctatcattttgtgattatttctggtctgaggaccttgcctctggtctggaggtgctatttgaccggctgtaccatggttgtgagcaatgcgacttgttcattcagttatttgcgtcaagaatgcagtttgaagtcagtcatgggaggcaattatttggaatagaagccggtatgaataatttgaaggtagtacaggaagatgagcaggaaactgtgacggtggccagggctctgagaggaattttgcaagaaatgtcgcaagaagggacgcatcacttgacaatagcatcgaacatcgaaagtttggtgttgcaaccattcagtaagtggtgcgtggaacatagggaaaggattcagtactctgaaaagaccttgctgaccaacgtcaacaatttcaggaaatctaagaaatacgtcagcaaactggagaaagagtactttaataaatgcagacaattagaagaatttaagagaaataatttcaacgacaatgagctggccaatgccatgaaatcattgacagtacaacacaaatacgaagaggatttagctagggaaaaagatcaccggttttttaatcaaatagcaggaatagattttgattacaagactatgaaagagactcttcaactgttgttgaccaaactgcccaaatctgattacaaactgccccttattagctattctttgagtaacactaataatgggggggaaataaccaaatttctcctggaccacatgtcattaaaggatattgaccaagcagaaacttttggccaggatttgttaagtttgggctttttaaaatattgtaatggtgtcggtacaacatttgtcaattccaagaagttccaataccagtggaagaacaccgcgtacttgttcgccaatgtgccaatgcccggctcagaggataccgtcactggtgaatctttgatatccaggtttaacaactgggacagttcatcagcaaaggaaatcattcagtctaaaatcagtaatgatcaacgggctacatcaatccaggctcctcatatctcggatagtgagaggatcctcttcaaaatgatggatggacttaaagcgtcagatacgaagtattatcaagaatgctttaaaatggatgctttgagatgctccatagaggagttattgatcgatcacttatcgtttatggaaaagtgcgaaactgatagactaaatgccatcaagaaagccacgttggatttttgttccactttgggcaataaaatctcttcgttgaaactgtgtgtcgataaaatgctctcgttggaaaatgatatcgatcccacggcagatcttttgcaacttttgaccaaatacaagacgggaagtttccagcctcaagccattgtctacaacaattattacaatcctggtttatttcagaactttggtgttgatttagagactcgttgtaggttagacaagaaaattgtcccactgataatttcctcaatcttttcatatatggacaagatatatcctgatttgcctaacgacaaagtgagaacttccatttggaccgattcagtgaaattaagtctgacacatcaacttcgaaatttattaaataagcaacaattccataacgaaggcgaaatctttgatataatgtctcaatcgaagctgggaccaagcactgttgccagcgttgtcaaaatttatttattagaattaccggatccattgattcctaatgatgtatcggacattcttcgggtactataccttgactatccaccattagtaaaacctgtagatgacgattcagattcctcttctaaggaccaagagaacgacgaaaaagaggaagactctgacactaagagaataagaggtctttatacaactttgtcttccttaagcaaaccccatatagcaacactagacgcgataaccacccatttttacagattgattaagattttaaaaatgggccaagatggcaatgaagtggctaatgaattcaccatttctatttcacaagagtttgcaaattgcattattcaatcgaagattacggatgataacgaagtcggctttaaaatcttctacgacctgttgacgcataagaagcaaattttccacgaattaaaaagacaaaattcaagaaattag

SEQ ID NO: 4014 - DNA, 1026 bp, Saccharomyces pastorianus
atggcaacggtagtaactaactataaagggcgaaacaagccgatttcagtggcaaatggcaactccaccaagagagacgaaatcgagaaaaaacacccaacaggagaagctttcgagatgaagttaagagtcactggtccaggcatcaaccaggtcattaccttgaagcaggacgccacagtcaacgacctgattgagcatgtcggaatagatgttaagacgttaaggtttggatacccccctcaacggatcaacctacaagaggaagaggctgctatgaggcaaacccagctagatgagctcggaatcaactctggtgaaaggatcacgctagaaacttcccaaagtaacgacagttttagcatgtcgccaccaaaaccgaaaccaaagagagttttgaagagcacagaaatgtccattggtggcggtggagagaacgttctatcagtccatcctgttcccgatgacaactcatgcctcttccatgctatcgcctactgtatcttcaaacaagataacgtccgtgccctaagagagatggtctccaaggaggtccttagcaacccagtcaaattcagcgacgccattttggacaaacccaaccgagaatatgcccaatggatattgaaaatggagtcttggggcggggccatcgagatcggcatcatatctgacacactcgcagtggccatttacgtggtggatattgatgctgtcaagattgaaaagttcaacgaggacaagttcgacaattacatcctggtcctgttcaacggtattcattacgactccttgaccaagaatgagttcaaaactgtttttgacaagaaaaatcagcctgaatcagatgatgttttaacggcagctttgcaactagcctctaacctgaagcaaactggctactccttcaacactcacaaggctcagattaagtgcaacacctgccagatgaccttcgtgggcgaaagagaagttgccaggcacgctgaatccacaggtcacgtcgattttggccaaaataaatga

SEQ ID NO: 4015 - DNA, 1872 bp, Saccharomyces pastorianus
atgaagttgtcgtgctcgctggtgtggtttatactgactgctagtgtcgctgtggccaagacacacacgcttaattatactgcttcctgggtgaaggccaatcccgatggtctgcacgagaagaagatgattggtttcaacggcgaatggccactcccagacattcatgtcgaaaagggagaccgtgttcaggtttatttgaccaacggctttgatgacggcactgcaacctccctgcattttcacggtcttttccaaaataccagtttggggaaccaacttcagatggacggtccctctatggtaactcaatgtcctatagtccctgggcaaacatacctgtacaactttacggttcctgaacaagtggggacattctggtatcatgcacatatgggtgcccagtacggtgatggtatgaggggtgcattcataatccacgatcccgaagagcccttccaatacgatcacgaaaaaatcgtcattttagcagatcattaccatgaaaactataatgtcgttaccgaagaatttttatccaggtataatcctacaggtgccgagcccgttcctcaaaatatccttttcaataataccatgaatgtgactttggatttcacacctggtgaaacatatcttttcaggttcctaaatgtagggttgtttgtatctcaatatattatcctcgaggaccatgaaatgactgtggtagaggtagatggaatttacgttaaaccaaacgttaccgattcaatatacctttctgcagggcaaagaatgagtgttttaatcaaagctaaagataaaatgcccacaaggaattatgctatgatgcaattaatggatgaaacaatgcttgatgtagttccaccggagcttcaacttaaccaaactattcaaatgacatacggtcacgctttaccacaggcggctgctttgaatatcgaagattgtgatttggaccgtgccacaaacgatttttatttagagccgttagttgaaagagatttactttcccactacgatcatcaaattgttatggatgtgagaatgataaatttggatgatggtgtgaaatatgcttttttcaataatattacttatgtgacccccaagatccccactttgactacattgctaacctcaggaaagcttgcctccgattctagaatttatggtgataatatcaatgcgcagtttttaaagcataacgacatcatagaagttgttttaaacaattacgactcaggcagacacccattccatttacacggtcataatttccaaatagttcaaaaatcccctggctttcatattgatgaaaactatgatgaatctgaacaagataagatgaccgttccttataacgaatccgcaccactacaaccgttccctgagaggccaatggtgagagacactgtggttttggaacctagtggacatgttgtgcttagatttagagctgataatcctggtgtttggtatttccattgccacgtagattggcatttgcaacaaggtttagcatcaatcttcattgaggcccctacaatacttcaggaaagagaaacgcttaatgaaaactacctcgatatttgtcaagctgctggtattcccgttgctggtaatgcagcaggtcattcaaacgattggttcgatttagatggattaccaagacagccaaaaccattacctaagggatttaccgcagaaggatatgtggcatttattgtttcctttattattggtgtatgggggctgtactctattgctcaatatggtattggcgaagtgatccctaacgatgagaaagtgtaccatactttaagggaaatcttggctgagaatgacatagaggttcctcgcaattaa

SEQ ID NO: 4016 - DNA, 1083 bp, Saccharomyces pastorianus
atgtgtaaagccggtttcgccggtgacgacgctccccgtgccgtcttcccatctatcgttggtagaccaagacaccaaggtatcatggtcggtatgggccaaaaggactcctacgttggtgatgaagcgcaatccaagagaggtatcttgacattgcgttacccaattgaacatggtatcgtgaccaactgggacgatatggaaaagatctggcatcacaccttttacaacgagttgagagttgcaccagaagaacaccctgttcttttgaccgaagctccaatgaaccctaaatcaaacagagaaaagatgactcagatcatgtttgaaactttcaacgtcccagctttctacgtctccatccaagccgttttgtccttgtactcttctggtagaaccaccggtattgttttggattctggtgacggtgttactcacgtcgtcccaatctacgccggtttctccctacctcacgccatcttgagaatcgatttggccggtagagatttgaccgactacttgatgaagatcttgagtgaacgtggttactctttctccaccactgccgaaagagaaatcgtccgtgacatcaaggaaaaactatgttacgtcgctttggacttcgaacaagaaatgcaaaccgccgctcaatcctcttccattgaaaaatcctacgaactaccagatggtcaagtcattaccattggtaacgaaagattcagagccccagaagctttgttccatccttccgtcttgggtttggaatccgctggtattgaccaaaccacttacaactctatcatgaagtgtgacgtcgatgtccgtaaggaattatacggtaacatcgtcatgtccggtggtaccaccatgttcccaggtattgccgaaagaatgcaaaaggaaatcaccgctttggctccatcttccatgaaggtcaagatcattgctcctccagagagaaagtactctgtctggatcggtggttccatcttggcttctttgaccactttccaacaaatgtggatctcaaaacaggaatacgacgaaagtggtccatccatcgttcaccacaaatgtttctaa

SEQ ID NO: 4017 - DNA, 350 bp, Saccharomyces pastorianus
atgtgtaaagccggtttcgccggtgacgacgctccccgtgccgtcttcccatctatcgttggtagaccaagacaccaaggtatcatggtcggtatgggccaaaaggactcctacgttggtgatgaagcgcaatccaagagaggtatcttgacattgcgttacccaattgaacatggtatcgtgaccaactgggacgatatggaaaagatctggcatcacaccttttacaacgagttgagagttgcaccagaagaacaccctgttcttttgaccgaagctccaatgaaccctaaatcaaacagagaaaagatgactcagatcatgtttgaaactttcaacgtcccagcttt

SEQ ID NO: 4018 - DNA, 326 bp, Saccharomyces pastorianus
ctacgtctccatccaagccgttttgtccttgtactcttctggtagaaccaccggtattgttttggattctggtgacggtgttactcacgtcgtcccaatctacgccggtttctccctacctcacgccatcttgagaatcgatttggccggtagagatttgaccgactacttgatgaagatcttgagtgaacgtggttactctttctccaccactgccgaaagagaaatcgtccgtgacatcaaggaaaaactatgttacgtcgctttggacttcgaacaagaaatgcaaaccgccgctcaatcctcttccattgaaaaatcctacg

SEQ ID NO: 4019 - DNA, 756 bp, Saccharomyces pastorianus
atggggggaatacagagaaaaaagaacagaagccagaagaagccagcaatcgagcacacccagagggggactgaaagaattcctgttgggcccaggtcgagacaagcaagaaaagaaacgaaacgaaacgcaattatgaatagcgagtacgattatctgttcaagctactgttgatcgggaactccggtgtcgggaagtcctgtctgcttttgaggttttcagacgacacgtacaccaacgactacatctccacgatcggggtagacttcaagatcaagaccgtggagcttgacggcaagaccgtcaagctgcagatctgggacaccgcgggccaagagcgtttccgcaccatcacctcgtcctactaccgtggttcgcacgggatcatcatagtgtatgatgtcacggaccaagagtccttcaacggcgtgaagatgtggttacaagaaatcgaccgctacgcgacctcaacggtcttgaagctgttggtgggcaataagtgcgacctcaaagacaagcgggtcgtggagtacgacgtggccaaggagttcgcggacgcaaacaagatgccgttcttggagaccagtgctctggactccaccaacgtcgaggacgcgttcttgaccatggccagacagatcaaggagagtatgtcccaacagaacctgaacgagaccactcagaagaaggatgacaagggcaacgtcaacctaaagggccagagcttgaccaacaccagcggcggctgctgttaa

SEQ ID NO: 4020 - DNA, 771 bp, Saccharomyces pastorianus
atgaataccgtttattcgagtccgcacagtagcagttccagactatcactgaggaataaacaccactcgcccaagaggcattcacagacaagcttccccgcacaaaagactacgccacaatcacaacaactggcatcaccacaatatcaacaagaatccaatgagaggccggaatcacaacaagtaatgtttctcagcgaaccgttcgtaagaacagctttagtgaaaggttcattcaagacaatagtacaactacccaaatatgtggacttgggagagtggatagcgttgaacgttttcgaattcttcacaaacttgaaccagttttacggtgtagtggcggaatacgtaacgccagatgcatatccaacaatgaatgccggtcctcacacagattatttatggttggatgccaataatagacaagtctcactaccggctagtcaatacatagatttggcactcacgtggataaataataaagtcaacgataagaacctctttcctaccaagaatgggttaccgttcccgcaacaattttctagagacgtacaaagaattatggtgcaaatgtttagaatatttgcacatatttatcaccaccatttcgacaaaattgtacacctatcgctagaagcccattggaactcgtttttttcccatttcattagttttgccaaggagtttaaaatcattgataggaaggaaatgactccacttttaccgttaatcgaaagttttgaaaagcaaggcaaaatcatatataattaa

SEQ ID NO: 4021 - DNA, 693 bp, Saccharomyces pastorianus
atggaaatgactgattttgaactcactagcgattcgcaatcgaacttagctatcccatccaacttcaaatcgactctgccccctaggaaaagagccaagacgaaagaggaaaaggaacagcggagaatcgagcggattttgagaaacagaagagcggctcaccagagcagagaaaagaagagactgcatctgcagtacctcgagaagaagtgctccctcctggagagcttgctgagtaacgtcgacctcgagaaactggccgagcgcaaagacgtgttggcctgcagccgcgacgccttcgtcgcccacctcgacgagtacagggacttccagtgctcgcgggacacgtcgatggacgcccgtaccagctcacactcgtcttctgacactttcacaccttcgccattgaactgcacgctcgagcctgcgacactgtcgcccaagagcatgcgcgactcctcgtcggaccaagagacctcgtgggagctgcagatgttcaagacggagaacatacaagaacccgccacactacctgccgcagacgataacaacctgtttcacacggcggcttcaccgctcgtggacccgctctgcggcgagatagcagagaatagtctgccctttgacaattcaattgaccttgacaattggcgtaatccagccgtgattacgatgaccaggaaactgcactga

SEQ ID NO: 4022 - DNA, 1443 bp, Saccharomyces pastorianus
atgagcaagaacagagccccgaatctcgacccggatctgaatttaaacaacgatatttggaatctgtactcgagcgcgcagaaaatattgccagactcagatcgtattttgaacctttcttggcgcctgcacaatcgcacgtcgttccagcacattaaccgcattatgcagcattccaactctgccttggacttctctgcctcgccctttgccgggactacggcggcgacgactaacaacgagaccgatgacactgacaaccagcagttcttcctttcggacatgaatcttaacggcgcgtccgtgttcgagaacgtgtttgatgatgacgatgatgatgatgatgatgtggagacgcactcgatagtgcactccgacctgctgaacgacatggatgggggcgcccaccgccccttacacaatgcttctgcctttcccaacttcctggacacctcctcgtcatcctcctttgacgaccactttattttcaccaataacttaccgtttctaaatagtagtagcattaataataatcataatcataataataatcataataataacaacaacaacaacaacaacaacaacaacaacaacaacaacatcatcatcaataacaccaccgccaacaatgtcgccaacagtcccttgctgagaagaaatccctccccctccatagtcaagcccggctcgcgaagaaattcgtccattagaaagaaaaagcctgcgctcaagaagatcaagtctacgacgtctcttcagtcgtccgccacgccgccctcgtcgtccaacgcctcctccaatccggatatcaagtgctccaactgcaccacctccaccaccccgttgtggagaaaggaccccaagggcctgcccctctgcaacgcctgtggcctgttcctcaagctgcacggtgtcacaagaccgatgtccctgaaaacagacatcatcaagaagagacaacgctcctccgccaagataaccgccaatacaacccctcctccatcatcgtcctccgcagccgcaggagcagcatcatcgaaaaagaaaaactacaccgccagcgtggccgcgtctaagaggaagaactcgctcaacatcatcactcccctgaggccccaggacatacccatcccgaagacctcgtcgccctccatcccacaacatctccgttcgaacaacaataacaataacagccaccacttttcgagctccgcgcccgtcgagatcgagacacccttctccagcttccagcccgacatgaacatgaccatgaacatgaacctccacaacacatccacctccgccctcaacagtgaggccttctggacgcccctggacgctaccatagaccaccacgtgccagacactaccccgggctcgaacgccaacaccaccccgaacggcaacctgagcctggactggctgaatctcaatttatag

SEQ ID NO: 4023 - DNA, 705 bp, Saccharomyces pastorianus
atgtcctcaaactcgttaaatatcttgaccagcccgatatcgcgtcttttcagcctgttgggtacttgcgactttctcaggtccaccagaaactcttcctgcgtcttgccgttctccgccacgtgcttgtgcagatccagcgatatcagcttgtccaccttgttcaccgtggcggaactgttgtactttttcaatggcgttaggttcaggtcgtttttgtcaataacaactgcgccggcggccccggcttcttcttctatttctgctgctgctgctgctgctgctgctgctgtcgctgccttgggcggttgcggcgtcgctttcttcctgctcaacaccatgggtgaagaggattccagtatgggcgtgggcgtcaacagcgacctggtctcctccacagtctcttcgcccttgtcgtcttcctcctcgccgtccatttcgctcgtgtccgcattgacgtttttcacctctgtagcgctgttgcgttcgcgcttcttaccttccttttccatcttgttcatgaactcccttctcttgatgcgttggtcggacccaaactccacctcgtcctcggggtccacatcgtactcgtgtcctgtacgtcttaaaatgaacttgccgggagatgcatcgccctccgccgcttcatggaagaattttagcgactcttggatctcccgttcgctgaggtttgtttccaaatga

SEQ ID NO: 4024 - DNA, 2187 bp, Saccharomyces pastorianus
atgagcaaagttggagctgacaagagagtcggtatcactaatttctttcaattaaaaatggggaaaagagtatacgatccaattcatgatactttccaagaacgaaatgacagccccgaggaaagaaagccatctacagattctacagtaggtgctgcgccaccggtactagccgaggaagaatctccagtttccaagtcacaagaatctgaagctaagactagcaaagccattccagttatacatgagattgaaattgacgataagaacgatgacgattccacccaaagtgaagaggaaaatacaaatatcttgctcaactttgaaccttcaatggtacctggagcaacaggagcaacaggagcaggagcagcagtggggggaaccacaacaagctctgctaaaagaaagcccaaagaaagcagttcgagcaaatacaatcgtcatttgaaaaaacctgatggtgagccgtttaataggaaagatatacagtttagtttcatgcaagaactgttgatggataagagacagattttcaccaatgttttgaagcctctatacaaaaattcgatagtgcccattaacatcgacggtgataagatatcaataaatgtgaccgataaagagtacgatgcgaggacgtttgttttcaacgacaagttgacgtttgcgcaattgtacgtgttgacgatagcaacgtctatcaaatgctccaaaatacttagagataaactgttgctggaccaacaagtagcgttttctacgtgcattttggcactgttggtcaatattggtagactaaacaccacgataaacttttatttggagatgacttcgcagttaagaactttccattctgtgcccgttttgcaattgcatgccaatgatccgaaacttctccaagacacaccaagattgaagtccatattgaagaatctaccgtggggcaatgagcaaatttcactcttggaaatctacgaaaaaatagaccaaaatgatagcgaagtggacaatattaacaagtttaacatcatcaatatgttgtttagcatatgcgacaacttcagtcttattgacaaaagattcctttccaaatatgtggaaataaaaagcgaagatggcacaacactaaaagccgaggagatagatacagtggaggaagacaatgaagcagagggagaagccgaaggaggagaggaggaatcaggttgtggagtaacgctgtttgatatactcgatttttcgaagtatgagccaaaagacagatgcgacgtgttgatctggttgttatatattcatttggaaacaaacctcagcgaacgggagatccaagagtcgctaaaattcttccatgaagcggcggagggcgatgcatctcccggcaagttcattttaagacgtacaggacacgagtacgatgtggaccccgaggacgaggtggagtttgggtccgaccaacgcatcaagagaagggagttcatgaacaagatggaaaaggaaggtaagaagcgcgaacgcaacagcgctacagaggtgaaaaacgtcaatgcggacacgagcgaaatggacggcgaggaggaagacgacaagggcgaagagactgtggaggagaccaggtcgctgttgacgcccacgcccatactggaatcctcttcacccatggtgttgagcaggaagaaagcgacgccgcaaccgcccaaggcagcgacagcagcagcagcagcagcagcagcagcagaaatagaagaagaagccggggccgccggcgcagttgttattgacaaaaacgacctgaacctaacgccattgaaaaagtacaacagttccgccacggtgaacaaggtggacaagctgatatcgctggatctgcacaagcacgtggcggagaacggcaagacgcaggaagagtttctggtggacctgagaaagtcgcaagtacccaacaggctgaaaagacgcgatatcgggctggtcaagatatttaacgagtttgaggacatccctgtagcctccgtgctggggatccgcggtaagaagagaaagaagttcaaagataacctgctggggttcgaaacagactacatgaagaacctcggcgcatcgaaaaaggtgcttctgcagaggatcgaaaatgcggacgtagacgacgaggagtcgagtagcatgtttaagctagaactagactag

SEQ ID NO: 4025 - DNA, 669 bp, Saccharomyces pastorianus
atgtctaagcgccggctaaaaagaaccattgcgccttgctcatctgatatttacgacagtttacagtttcaaaataatggttatgtcaagataaaagaactgatatcacacgttgtcatcgaaaacagctttatgtccaatgcaatagcagacgaagctggaatacgacgggccgctgaacctacagtaaaggaacaggttcacaagttcagaaaatggaaaaataaaactcgctgcgtatcgaaagaccctacgatgaaagatttcagagctcgtaaaagagatatggtgtacagatggttcgaaagacatttgcctaaggagaaagtagaagtcctttcccatgaaaaacaattgagcagcattgacttgcattttctgccctcaaatgtcatcgtcggatgttcgagggagttgagtaaaccgggatcacctcaagttttaggaagcccaaattttggccctaaggaagagttcaatgaacgttttttcaatatcgctagttgtcctgtaaagagagaatttcgtgaattagtttttgaactaaatgatgaaaaccagaattattatacatccctcagggcttctaggaaacctgtcatacaaggccaaaaaaatgcacatgcgtctcagtttattgttggtaaggagcatcggaccaatttttaa

SEQ ID NO: 4026 - DNA, 195 bp, Saccharomyces pastorianus
atgggctgtttaatcttttcctacttttatgttttcttctttgtttgtgagacaaagggactaactctagaagaagtcaacgaaatgtatgaagagaggataaagccatggaagtctggcgactgggtaccaagcgctaagaggttagaacaactaacagatggtaccccgctagacacagaggatattaaatag

SEQ ID NO: 4027 - DNA, 6429 bp, Saccharomyces pastorianus
atgactgctaacaatgatgatgatataaaatcgcccattcccattacgaacaaagctctctctcaattgaagcgcgtagagagaagtcccggaaggcccagttcgtcgcaaggcgagataaaccgcaaaaagtccagactgtttgcatcggaaggaaggcctgattcgccattgagagcaaggtccgccactccaacggtggaccaaaaaatgttcaacggtatggattccacgtcgcttttgaacgaaagattggagcattacaagcttgattatgttagtgacaaggcgcaacacactaagaatatatacgatccgaactctagatggttcagcagatcggtgagacccgaattccccattgaagagtttttgccatataagaccgaaagtcatgaggaccaagccaaatacttgtgccatgtcttagtcaatctttatattgccattagttcgttagatatacaagggttaatctctatttccagtaaagatctggctgatttgaagaaagaggtagacgatttagctttaaaaacggaccttttccgattatctaataacacagcagagaacgacttagttggtaacgacattgctgattacgacgatgcagaaggtctagaagacgagttggatgaatacttcgacctggcgggccctgacttcaatgccacgggtaagattaccgctaaatctgctactatcgtcaacgtcaaccattggactaatgagttcaagaactgtttgcatttcgatttcccagtggccttaaggaaatcccttgccacagtttattattatctgtcactcgtccagggtcaaaaagtgtataggcaaatgcacgttgatatgtttgaaagactggtaaacaccgatgacgataaaacaaatttcactgaacttttacaaaacgaaggtcttttgttggaccatcaaaccatgttagatttcctatgcgagtttttaccttatccagacccggactatgctcgatatgaactaacgtcgaaggaagatttacagttattcagattacttttgaagcacgcacacaacgctaaaccgttttttgacaaaacaaaggaaaatttattagttgacaccatgaatttcttgttgtctagtcttgccccatccactatgatggccatcatgcccattatcacatctgtcgtcccttaccactataatatacattccaaaatcattgactacttcccattctgctacagtatctggagttcagtgagtgccaacgtggccattgatactcacatgtatgattttgttggatcaatatccaaggacgttcataacaagatattaagcaatgatcatgggaaggaaataaacagggtagagtttggaaaatttgggattttcacagatgaccagatgacttttatgttcaacagactgcaaggtcaccttagaactgatggtcaaatacattcatactctcgcactgtgaagcctttcgtctatgctatcaacggctccaataaagataactttttcgagaaactcttgagcttagcaaaggctatcgaaacattcattcatccttctaacaatggattttggacgaagccaaatgctaaattcattcatgccttcattaaatcttatcatggaagagccaagtatgaagaagaaacatgtgccaatggtatcacgaacgaaatatgtctgacttcctcttgtcatgaagagattgtcgaaattttcttgaatatagtcggcctgggttcacaaaataaaaatcctgatattgccaactattacatttcctgtttcgcatatttattagaactgaatccttcaaatgcatacctcatttatgacaaaatactgatagatctgtatgatacgttggccgaccaatatattaattctagacacagaatcatatcttctttgaaacaatttacaagagtcatcaggtttgttgtaatggacaaattatatcgtgtgcacataacaaacattctttcaatgctagtttccaagctcgatatgaacgataccaatttgacaagcaaccttatcaatggcattgtatcgattgctgctttcatccctatcgaaaaccttacaagtgaagaagattacttatcgttcgaatctcatacccttcctttggtcgagcagcatttctatcacatcaaaaacggtgaaagttcaaagactttcccaattgacgaaacgcagttgggtgttgctttcaaagcctctactacggtttttgaaagtattctgaaagtgtacgtagaaaaagtcttccaactggtcgatgtggatttagaagactctttggccaccaaaataaaccaaacttctatgattttgcaagaatctatggacgataagatattccattactttggtgagttattacaaagaaacttctggagtaatgactccttcaaggaaaaggatccaaattacgaattaatcaccatcccgttggcagcattggtaagaagaaataatgccttaagtaaagacttggtcaagactcttttattccatatcaaagagcaaattaaaagaggcgctgggtctgttagaagtacatctgaaattcagcaaagagatgtaaagttggttttgtatttgactacgctaaatgatgtcttgagacaatgccacaattcactactggagtatagcgatgagttgataaccttcatgaaatatttatatgacaacataaccaatccaccattagatgtcatcacatctattgtcattcacagtgctttagcaactctatgtacaacagaaataacagactgtcgtctatttccagaacattctaaaatttctaaagaggatagatgggggggactgcagttcgatcctagaagatttgaaaaacagcacctggactttcaatggcatgttccttccaatgatgagataaccttgtccataagtattttagaaagccttacagactattgtgttaacaaagtagaagaactgatgaagactccccaaaatgattctgaatatagtgacatgatacaaaaatacgttttagttatgacacacacgctttccgggtcaagtttacttttcgatccagattttaacaagtatagaacacaatcaaacttgtcatatagagagaaactggttttgttgaagaatatccgtgaaaacaattgtgaccctcaagagctagatatcgatattgaacaaatccgttctggtaaggatgacgaagagtatatcgagagtaaggatattgaagcaggattggatacgggtgtctctgatgttgtgcaactgagagatgaattccaagatgaactgattgttgatgatgaaatggtatccgagatgccctccggtgtaaacacccccgttgcaggagctcatggtgctggtaattcatctatgagttccgaccttgcctttagagatttggacatctacagttgtaactattactttggaaataccacagaggagaagctacagaatccacaatacttacaagtccacaaggtaagatcacgtattggacgcttcttccacaagctttatttgttcctttctgccaactttgaaaacaataccaacatgttccaaatcttactgcatggtcttaaagtttggtttacagatttgggacaagaaactgttttcaatgaagatccggatgcctttattgatatcgatttcctcgagaacgttcaatctctttcgcatatgaatgagcctttcacgagaaccaactttgctattaggacaaacggtttgcatcaaagcagagtcctattacattcaacaaatagaaaaggttccaagttggaaaaccttttattggttgacatcatacatttagctacatcaatttatcctgatatttataaacctgcacaaggtactttggtacattgcatgaaacagttggtagggtcgtatggtatcgttattaacaaagtgatcccaatattggagaaagctgttaaagatcacgattatatgaaaatccaagttattctgaatgtattgttgattaaaaaagttcatagaaagcttatgacagattatagagatatcgacaaattgatatttctactaattgaatgctgtcatgtaaatgaattagaaattggtatgtacgcagacaagattttaactgatattgttattggtatcaaaattccgtcgagtgtatgtgtcatttctgatgaagctttcttacccttagcgccccccgatggtacaattaatttgcaggttgaagccgtaaggctagccaaaaagaaaaagcgtgaatactatctctcgctattggtcgatttgcaaaacagactgttagataaactggacaatgagaaagagatgggctggaagataaaaatgtttattatgcgctttgttacgcaaatccaatcgagtttggaaagtaagcccgacaaacgcgcagtttcctcaatagtctcacaaactgctactaagcatccagaaattatacatttggttgtaaagtcgttgctgtcaatttgtaacaaaataatttctctttctgactatgagtatgacatcagcagggcctataaaaatgaatttaatccatcttttgttgaaataatggacacctcgaatacggacttctctaagaattttgctaaggaaatgaataacttcgacaatccggagtactttattgactcaagagcatttgttggatggctatgttggggcagacctatttatgtgatgtcgtcaaaaactttgagcgttaatttacaaaagaatgagttagaagtgttgaagagcactggccatttagtgacgaaagaatttttgaaggatgtaacaatgaacttggtacaagataatgaaacaaggggtgtttttagtagtggcaatgtgtcattcttttctttaatcatccttttaatatcgtctggtttctgtgaactaaacatgtcagaactatttgagctgtgtgagtcatattataacaaagatgacaaggcttcaatgattatgtccgttgaaatagtagctggtttagtttgtggtagtaaatttatgtcagccgttgatttagagaagcgtgatgtcttcatagagaaatttttggcaaaatgcttagattatgaattaaatcacgacgcatttgaaatttggagcacgttggcatggtggttacctgcggtggttgatttaagaagatccaagacgtttttcaaccatttcatcaatgctgataacatgtttgatcctgaatctgatgcagccacacaccaaacttctaaaatttacatgttaagaagtattttgatgagtatggagttcagagcaccagatgttagtagactgttcgatgaattggtatttgaccatccttacgatcaggtccgtcaagctgttgccaaattattgaccaccctggtgcaaaatcaaagtaatccttcgatatcagatcccaagacattgttggaagcagaactgaatgactcagatggattggggttgcctttaaagagagttccagaaagtgtggacacgtacatcaagaaacaatttgaaatcatcatacgtatggcagagagtgttattggtttgagtcctcaagaatttatcaagaccgactacttctacaggacgtctaccatattttattggatcaaggagatggcaaggggacctaataaggttatattggttccatacctggtggattacgtgctaccatttctaatcggattagtgaagcacaaggacgtttgcgctcttgccggtctggaccctatccgattatacgctggcttgggctacatgccaatcagaaaaaatcatgttgccagaatcgtcgaatatgtctgttcttcggatgtagttctatcgtcgaaccaaaccaaactgcaactagcttttatccaacacttcctgtcagcagaattacttcaactaactgaagaagaaaaaaataaaatcttggaatttgttgtgagcaacctgtataacgaacaatttgtggaagtaagagtgcgtgctgcagccatactgtctgatatcgttcacaactggaaggaagaccaagcattgttggacctgatcgacaggtttgcaaaggggcttgacgccaacaaatacacttcgaaggaaaagcaaaagttatcaaagacagatatcaaaatccatggtaacgttttaggtctgggggccattatatcagccttcccatatgttttccctctaccgccatggattcctaagcagctaagcaacttatcctcgtgggccagaaccagtggtatgactgggcaagctgccaagaacaccatcagtgaattcaagaaggtgagggccgacacgtggaagttcgatagagtctctttcaacacggaagagctggaagacctggagggtgtcttatggagaagttactacgcttga

SEQ ID NO: 4028 - DNA, 684 bp, Saccharomyces pastorianus
atgccatcagattcggctatgagtgatcaaatcaatgctttgtcagtacagcagcagcagcagcagcagcagcagcaacaacaagtatatatgtcccctcaagcagaaaacttgaatcacatgtattcgttagttaacaaacttgtgctgcagttgaggaaaaaccaagcagaaaagacgaagatattacagaatgtagacgtattatctggtagcctgaacaggtatgaaaagtcggaacaatctcatgacacaacagacaacattgcattattcaatagatttttggaacaaagagggagggatactattatgggagaagaacaagtaagcgatggcattgaagaggacagggaggatgaggctatgttggaaacactgaagcgccaaaatgcgaagcttcgggaaactctagaggcatccaaacagaccacctttgaatccatggatttgttgaaatattctgaaaattcattaaagcatgtcgttgcgcaattaagggagaacaccttaatgtatcacgaagagacgatcaagttggttaggcaaaaattccaaatggaaacagttccctcggaggacaaagaattcaaaatgtatatggaaaatgtaaatgatttacaagagttggcagacatatcgaacacttataggctactattgaggctacatgtactagactga

SEQ ID NO: 4029 - DNA, 135 bp, Saccharomyces pastorianus
atggcattttcttttctcttggctgagcttgagtatgcttttctttattcaacccataacgagttttttgaattcctccatctcctcataacagttcaacgatttgcctctattggccaaaaggcactcagttaa

SEQ ID NO: 4030 - DNA, 1410 bp, Saccharomyces pastorianus
atgcttggtttaaaaccaacattgttgttgtgttctcttctccaattcatttcctttattgggtttctattatgctgcttaacatctccgataatcaaaaagtgggggctggctcaacacagaggggtttcctacggtgcctttggttactgtcgagccgcagcagtcgtttcctgctctcgaatacagttgatgtataatcctaccaaaataccgcaccttgactcctctttagaacgctggtggtcggatcccagggcaagacatatcatcgggaaacttttaatttgtatacctatagccacaggtttgacttttattagtttcttattttctttggttttcttttttctatacaagcctggaggatgtttgaacgtttccttgattatttctaacagtgttctccaaacagtgacatttttgtcgactttatttgcctgcgttgttattttgacacaattccatccttatacaacttggtgcggttggttaaccgttccgtgctcattatggtcactaattgtgtgtgtcttgtcagtgttgggctttgtgggcttgcatgaccaaccagaaaccattgataaagaggctagcgtggaaaacgttgatagcattcttaaactatatggtaggagccaaacacccagcaccattactgataaatctttgcaacttacaagaaccacgacaccttcctcctttagccattctatgtatgttagcgcaaatttcatcaatgatgacttacaaaagaccttagatccttatcgagaagaaccagccactgaaaatcaagatcaaccacagctaaaggatgactcccctttaaaacaagaccccctagtgaattttttcattcctaagttgaacgatacagaaatgttttccagaagggatgcagggaagcaggaaacattccccttgaataaaattgacttagctagcattcctgtaaagcaggaagaaggggaggtacccatcgagaagaaaatggaaaacattttgtactatgaaggaatttcgagccattcgcaacgcaactacgatccgccgtggttgttcggtgctcaggttgcctcagcagcccgcctcttcaagatatattcacagagagattaccaagtcacagcgcctccccaataccaactccatcatccgctagatttccagcaccaagaagatgtttatcacaattttacttccccatcgtatccgcagcaggtgggagactaccacaattataactataactctcattccattccgaacacttccaagcacaccctccaaacactctccgacacctacgtctcgcaccaaatggtgcctaagaaatacaagcctgcctacagacaacggatgcgtcctgtgaagagtagcccccagccagcttactctttctactag

SEQ ID NO: 4031 - DNA, 741 bp, Saccharomyces pastorianus
atggaagatcttattacagatcttactgaagagggaaaactggaaaaaaatacaaaagatcacggagacagagaaaccgaaaccatccaagaagaagttgaaatatgtggcttggacttcactgaagaagccgctcttgaaactagggaagcctcgttcaatggtgaagatcgacacgttagcgaagccacctcacaaagcgaaaaggcaaaggaggtttccgaggagccaaccgcggatgacatcttcaaagatatcatggatgagactgacgagttcctggagcaattgaaaatcgttgacgactctgaaataaacgccctgctccaatcattagaagggaaggacaccaaaactcaaaacaccaagactcaaaacaccagtcaaaacacgcaagaccaagcaaaagtacaagcgcaagccgtcatcaagacaagtgagatccgcaagctgaacgaacaagagcccgtatacatatacacttcactagccggaggcgggttccacatgatcccgcgaacaaaccgtctaagcactatcctgactgccaacagggtcccattcacctacagagacctgggtacggatgacgaggcaagaaaggtctggaagacgttcagtaagggcagaagccttccaggtgtggtgagagggcgcaacgacctcatagggaactgggaagacgttgaggaggctaacgaagactataaactgcgcgaacttatttacgacactatgtag

SEQ ID NO: 4032 - DNA, 2823 bp, Saccharomyces pastorianus
atggtagagccttcaactgtaaaggatcaggaacttaacattcaacccacaaaagtaagcggcgatgaaaatgctcatacatcggtttcaatagatccgtctttcttaagtgtggaaaatttgacaaacggtgaagatgagcttacagacgatatagacgaggtgttaaataccactgaaaatttcgcaatggaactaacatctcaaaggaaatttttgaaattgagaaacaaaaagaagaatcaaaagcaaaagaaatcaggtattagcggggctacttctgtagagcttcgtgatcttgttgatgagaccgtaacaatcctgccccgggatgtaagttctcataatttgagacaggaagatgatataatcaaagtaaatatagatacatcaaatgacggaattgaatcttctgtagacgcctcaacagacatagatatggatatcaatgagtcttccactaacgaatcagcaaagacgggagttgataatattccaactaggaagagcaaaaaaggtaaaaagaagaaagttaaaaaggctcgtagctccttgaattctacaggcagtactgattctttgaaccaatcgactttagattccatattggtaggtattgaagagtacctacaggacgataactcaaaggacgatgaggatatcaaggtaaatgttattaaagatgaagtcatcgaagataagcaaaccacagacaatgaggtcagtaaaataagctgcatacctttgtcagaaaaacgatttgatgagggaaaagagaatattgaaactgtcaagaaatctactcaggaaatactcaatgctgatgtgatcaacacagaccactatgaaaaccaataccgtgctggcttaggtgaggtggaacgtgctacatctcaagagcataatgacactttgaatactggcaaagaaagtatagaccatcaccacaaaccgcgcagtttggatgaagagaaggaaaacacagaaattgcaacagctgattctcttttacaaagcggaactaaaattgctaaaaccgatacctcagctatggatggatttcactctaatactggcaaatttaaaggtagcgatttggaagagggacggcaaactgatactgctcagaaaccagaacatccactaaatgtagagttaaaagacgaggataaaaataaaagtcatgccttggaactgcaaaccaagggaaacgaaaagccagtaacagcgaatcataaaaaagacgaaaacgtcaaaaagttcaaaggcattgtttccaaaaaagacactacactagaagaagatccgattaagaaagaggctgacattgataacacagcttatcaaacgggatgcactagtgaggatgagttgcaagacaatgctgttaaagtacctttagaagctgtaaaaaacgaaaaagaaaattcaacttcgcaagaacttgaaactggtaatacgactgagcagccagctgctgtaaaaaacaacaaagtatccggtatcgaagagggatcatcctcgaaaaaagacatgacttcaggaggttataaagaaaaattgaagacggggtatgattccatcgctagggaattagaaggtaatgcaaagtttgaagaaacatcagaaaagcctgctcgtaaagattctgctgaagtggccagcaaagaaaacgagccaaaagagcatgttattcttgaaatgtctagggtagatacggaggaaaaagaggtcgaaactgctgaagctttgaagggtgatacgaacggaaaagctttcagtgctgctgaggctttaaaagaagataccaaagtacatggcgccgttgctgctaaaacttcgaaagaagatgcgaaagtaaaaggcgttgaaactgctaaggaagctaaaaaaacagaagatgccagaacttctgaacctataaaagaaagcacaaatgtcaaggacgccgacgctacaaaacaagaagcgaaaggagacttcaccgaaactaatgaagctgtaagagaagctgcacaacctgagaatggcaaggatgctgacgcttccggagaaaacacacaaacaaaagatcccgaagttgcaaaagaagacgccgaagctgtcaaagaaggtgtgaagtcggaggatgtgaaagtggcagacaccgaagacaccgaagctactgaagctataaaagctaccgatgctaccgaagctataaaagctgctaaatctaccgatgctaccgaagctataaaagctgctaaatctaccgatgctaccgaagctataaaagctgctaaatctaccgatgctaccgaagctataaaagctgctaaagctaccgacgctaccgacgctataaaagctaccgacgctaccgaagcagccaagactttggaagaggatacgaaagagcagggtgtcgaggttgttaaaaaatgtgtagaaacggaagatgtgaaagtggaagatgtgaaagtggaagatacgaaagtggaagacgccgaagctgccggagctctgaaagaagatgcaaaagagaagggcgttaaaaccgttagagaaactatgaagtcagaggaaacgaaagtggaagctgacgaaactgtgaaagataccgaagcagccaaggctctggaaaaagacacagaaggacagggtgtcgaggctgttaaaattggtgtgaaatcagaagacaccaaagtggaggatgcgaaagtggaagatgcgaaagtggaagatgccgaagctctggaagaagatgcgaaaggtcaaaatgtcgaggataacaggctttcggagaaggcgcaacggcagccaatgcttcttatccagtga

SEQ ID NO: 4033 - DNA, 1101 bp, Saccharomyces pastorianus
atggcaggtgccggtgccggtggtatggttggtatagaattgaccgatttcgtttttattttaaattcgcaagacgctgttaagtcattttctgaattcgggactatcaccctaggtggtaatgtctctgtagctgccgggccccttggtagaagtgctgaagcagccgcttctgcctctgcgggtggtctggctgccgttttcgcctattccaagagtaaagggctattcgcaggtgtttccgtggaaggttctgccattttggaaagaagggaggccaacagaaagttttatggtgataattgtactgcgaaaatgattttgtccggtaggataagaccacccccagcggtggatcccttgttccgtgttttggagtcgagagccttcaattacaggtctcccaacagcggccgtggtggttacgatgaagacgaagatggctattacgatggcgacgatttttacaacgacattcctagttcattcagctcttcagacacttcatctggcagggccaatacaagatccacaagagggagagctaaaagtgattctcgctacacatttgacgatgatgacaatgacgacgattacggtgatgggcttccaagaaactcgagagtaacacccactgttagtggtggtagtggtggtaaacttgacgacccgactggagcttcgagttattatgccagccataggagatcgggcaccgctcagtcgaggtctcacccttcaagaaattcacgttgggctgatgatgaatacgatgattacaccggtggtagtggaagggacaggacgaacgatcgtgaggtggatgatttatcaaacagattttccaagtctagaatctcgtccgcttcaacgccgcaaacaagtcaaggcagatttgctgctccaacatccctatccacatcttctccaaaagctgtggcattatatagctttgcaggagaagaatccggagatttgccatttagaaagggtgatgttgtcacaattttgaagaaatctgactcccaaaatgactggtggactgggagagttaatggtagagaaggtatctttccagcaaattatgttgaactagtctga

SEQ ID NO: 4034 - DNA, 156 bp, Saccharomyces pastorianus
atgaatccagttgaccatcctcacggtggtggtaaccatcaacatattggtaaggcttctactatttctagaggtgccgtttctggtcaaaaggccggtttgattgctgccagaagaactggtttgttacgtggttcccaaaagacccaagattag

SEQ ID NO: 4035 - DNA, 948 bp, Saccharomyces pastorianus
atgccatgccacaaagaaacgtcacaaaataaaaactgtcattataacataatccacacaattaaaaaccaactaaaaaaacaaaagaccacactccactccaccgcaatgtctgaacaagccaacgtcgatactgccgaaatgatcacagtctacatctcgaacctgcccttctccgccagcgagcgcgacctgcacgcctttttgagtgactacggcgccacctcggtgctgatccccacacagaccgtgcgcaggttcagcaagaaacgcaccgacaagccccgcaagcccctgggcattgcatttgcccagttcgcaaacgccaccctagcctcgaaggccatccaagacctcaacggaaccaccttccagaaccagaaactgtttctgaaactgcatgtcccttacgaggcagaaccctccccgctaccagagaccaaaaagtccaaggacaagaagaagaagaacgggaaggaggccccggaaactgccccggacacggtctactgccacgatttgcctgacgacgttactgacagcgagatccgcgagctgttccagctttactccccgcaggagatctggatttacaggtccaaggtgtacaagaagagatgcattcccttggcgcctcaccagatcaccgccgctctggtcactttgcaatctgacaaaaacatcgtagatatctgcgacgacgtgggcaaggctgctgccctgaggggcaaaccagtgattgtgaagcccgctttcgtctccaagattcaagaaatcaagcaattggtcaaggacaacctcaccaacgcacgcgacccaccacctccggcggcaccagcggcaccagcggcactagtacaagaagtgcaaaataacgatgcaggttctggcgggattccaccacctcccccttcttcttcgggcgcccccgccctggctgctgcttaa

SEQ ID NO: 4036 - DNA, 972 bp, Saccharomyces pastorianus
atgagccaggagagcagaagaacacggcacgccatgggccgcacatcttctgaaggaccacacgggttcgtggacgacctggagcccaagagcagcatcctcgacaaggtcggggactttatcacggtcgcgaagcggcatggggagcgcgaggatgtggatgttgaccacgaccatcatcaccatcaggaaaacgaaaacgacaacgacaacgacaacgacaacgacaacgacaacgatgagctcgcgctggacgacctggaccgcgcgttcgagctggtcgagggcatggacatggactggatgatgccctcgcacgcgcaccacgcgccggccaccaccaccaccatcaagccacggctgctatactcgccgctgattcatacgcagactgcagtacccgtgaccatttcgcccaatctaatggccaccactttcacttccgccaacaagatcaccaagaataagaacaacagtagcccgtatctgaacaagcgtagaggcaagcccggaccggactcggccgcttcgctgtttgaactgccggacagcgtaattccgacgccgaaaccgaaaccgaaaccaaagcagtatcctaaggtgattctgccgtcgaatagcacacgacactcgtcgtgtgcgacggcctcgtcgtcgacgacgaccagcaacaacgacgacgtggtcgtcgctagcgagtcaccagtgatcgcaccgcacggctcgggcggcggacggccgctcagccggcgccggtcgtcgggcttgatcgtcgacgacgataagcgcgagtcgcacaagcacgcggaacaggcgcggcgcaaccggctggccgtcgcgttgcacgagctggccgcgctgatcccccccgagtggaagcagcagcacgtgtcgaccgcgccgtccaaggcgaccaccgtcgaggccgcgtgccggtacatccgccacctgcagcggcacggcagcacgtga

SEQ ID NO: 4037 - DNA, 168 bp, Saccharomyces pastorianus
atgtacttctgcgagatctccttagacttgtcagaaaccttatccagtttgtcgttaccttgcaacaacgcaacgaccgcatcgttcacacaccccatcagtttggacccagacgcgccactgctgtggtcgctcttgttatttagttgcgagccaaccacctcgtga

SEQ ID NO: 4038 - DNA, 231 bp, Saccharomyces pastorianus
atgcctgagtctacttgctccgagatcagtaccagttttttcgacacgttcagctcctccagcgacttgttaacgtccaggatctgcttgctcaacgataaccggtcgtttagcatcttttcggactccttcacgtatttcagcttttccagctccagttgcgtctccagatcacacagcttcgtgaacttgttctccagtttgtccatggtcaatttcaccagctcttga

SEQ ID NO: 4039 - DNA, 2550 bp, Saccharomyces pastorianus
atgacggactcggcgatgagtagacaactggggccaacgataccaatgactgctgtcgaagatgtggtgggggccagaatggctgcaaggaccaggaaaattaatggcgacatcaactataaagagaaagaagtgtacgatttgactgctgacacgttagattctgacgatgacgatgacgataaagatggcgatgtcaaggatgatgctcccgtgtggttgcaagatgatgtgcattccgacgaagatattgagctggactcagaggacgatgccgacacagaggctgtgcaggctcaggtggtggataagttggctaaagatacgaaattggaagaagacgcttcagatgatgaagtctctgaattggacactaagactgtttcattgaaactaaagaaactgaacgagttcgtgaggcagagccaagtatattccagcattattgcagacacgttgctgcaaagatctaacgaggtggttcaatctaatgctaagagtgaagagcattctgcaaagaaacgtaaaactaaaaagaaatccataaccgatttctttaaaaagcagaaaaagcccgaggcagccgtcgtcccagataatgcaccggatgatatggctataaagcagcctcaccttttgaaaaactgtactttgaagccgtaccaattagaaggccttaattggctgattactctttacgaaaacgggctcaatgggatccttgctgacgaaatgggcctaggtaagactgttcagagtatcgctctcttggcatttatatacgaaatggatacaaagggtccctttttggtgactgctcccttgagcacgctagataattggatgaacgagtttgggaaattcgcgcctgatttaccagtcttgaaatattatggagccaatggctacaaggagcgttccaccaaattaaagaatttctttaaacaaaacggcgggactggtatcattatcacctcatatgagattattctaagagatactgatttgatcatgagtcaaaattggaaattcttgatcgtcgatgaaggtcatcgtttgaaaaacgtaaattgtagattgattaaagaactgaaaaaaatcaatacttccaatagactactattaacaggaacgcctttgcagaataacttgactgaactgtggtcacttttaaatttcataatgcctgacatatttgctgattttgaaatcttcaacagatggtttgattttgatagtttgaacttgggatctggcgccaattctgaagcacttaataagctaatcaatgatgaattacaaaaaaatttgatttccaatttgcacaccatcctaaaaccatttctcttgaggagattgaagaaagttgtcttggcaaatatcctaccgccaaagagagaatatatcataaactgttcaatgacaccggcacaaaagaaattttacaaagctggtctaaatgggaaattaaagagaaccatgtttaaggaattgatcaaagaatttttcactttaaatgatgaatatatcggtcatatttctaataagtccataagagattttatagactataaattatccgtcagtatagattcaaatacaaaaagtggaatcaactcgactgtgttacaaatggataagttatacaaggagcacttacaagtggaggtttcgaataaaaaattacaaaacatgatgatgcaactaagacaaatcattgattctacgtatttgttttattttccgtatttgcatcctgaggatttaagtttggaaaatcttttaaaaacatcaggaaaattacaagttctgcaaatattgatcccaccattaatagccaagggacataaagtcctcatttattctcaattcgtcaatatgcttgatttgctcgaagattggtgcgagctaaatttctttgaaacatttcgaatcgacggttcagtgaataatgagacgagaaaagctcaactagagaaattcaataactctaacgataagcacaatatctttctgttatccacaagagccgcagggctgggtatcaacctagtcggagcggacacggttgttttgtttgacagtgattggaacccacaggtggacttacaagccatggaccgatgccatcgtattggccaagaaacaccagtaatagtgtacagattatgctgtgataatacgattgaacatgtcatattaactagagcggctaataagcggaatttggaaagaatggttattcagatgggaaaatttaacaacttgaaaagattggcactaaatgaaggctcatttttgaaaacaaataagccaggggcgaacgttactaacaaagatttagttcaagaactgtctatgctgttattgagtgacgactccagtatcggatttcgaaataggaggaaagggggaaacaatgccgctgagggccagctgaccgatgaggaggtcaaggaattaactgacagatcactcgaggcatacaagtctaatagggcagtgaacttacctcacgtcagactattcgaaaccacctcagggctttag

SEQ ID NO: 4040 - DNA, 3012 bp, Saccharomyces pastorianus
  modified_base (2846)..(2880): a, c, g, t, unknown, or other
atgtcattctggccatttggacagaatctaaaccattctaatatcaataaaattctagatgaatactttcatgtgttgcacgaaatagagaagattaacccgagtattgggaagtctataccggctgtcttcaacaacgttcagcagcgaggtaccaacgattccctggagtctatcccggaggagtatagccatgccaatgaagtcaggggcacaggtggtggacagaagagcaggtttgagaaggacgagcagcaggagcgctatgaaaaggaggaagaggagcagagtttgaactctagtgagtcttccagcacgtcgttctcctctgggtcgacttccaaaacagatttggacgaggaggatatcagtaattctacggcccccatgatggttaccaccaaggccttggataactcgttcatcgagaggatgcttgttgaaacggagctgctgaacgaactatcaagacagaacaagacgctattggactttatttgttttgggtttttctttgataaggaaaccaacaaaaaagtaaacaacatggaatacctggttgaccaactgatgtattgtgtctcgaagatccagaccgccaccacggtagatctcaacaatctgatagactaccaagaacaacagcagctcgacgacagctcgcaagaagatatctatgtggagtccgatacagagcaggaagaggaaagggacaataatttgaacaacataaataagagacgaaaacgcaagaactcttcacttgacgatgacgacaatgacgacgacgagggcggtaacaaaagcgacgagaacgaaagcgatgaatcggcttatctgaccaaagccactataatatcagaaatattttctctagatatatggttggttagtgaatcgttggtgaaaaaccaaccttatcttaacaagatatggtccattatcaaccagtccaatttcaattctgaaaattctcccctggtaccgattttcttgaagattaaccaaaatctgttactaaccagacaagatcaatatttgaattttattcgaaccgagaaaagtttcgtggacgatatgttgaagcatgtggacatttcattattaatggactttttcctaaagataatatctacagacaagattgaatcgccaacgggaataatcgaactagtgtacgaccaaaatttggtttgcaaatgtctaagatttttgaataatggagaatcaccagcggatatccaagcttgtgtgggtgattttttgaaggctttgatagccatttccgccaatgcgcccctggacgatatttccattgggccaaattctttaacaagacagttagcatctcctgaagccattgccaagctagtcgatatcatgatcaaccaaagggggtctgcattaaataccacggtctcaatcgttatcgaactgataaggaagaacaattctgattacgatcaagtcaatcttttggccaccactattaagacgcatccaccttcaaatagagatccaatctacttgggttatctacttaggacattttccgaccatttgtctgattttttccaaattatattagatattgaaaacgatctcgatcttccgttacatgagaaccaactgcacgaaaaattcaaacctctagggttcgaaaggttcaaagtggtagagttgattgctgagttactacactgttccaatatggggttaatgaattccaaaagagcagaaagaattgccagaaggcgagacaaagtaaggagccaactgtcccatcatttacaagacgcattaaacgatttgagtatagaagagaaggaacaattcaaaacaaagcactcccctacgcacaacgctgatgacgacgagataaataacaacaacgataacgatgatgagagtgattatggtgacgaaattgatgaaagctttgaaattccgtatattaatgtgaatcaaaatacaaaattaagaagtaatcccaccgtgggggacttgtttaaaattaaactgtatgacaccagaatcgtttctaaaataatggaactgtttctaacgcatccttggaataatttttggcacaatgttatattcgacataattcaacagatcttcaacgggagaatggatttttcatataattcattcctcgttctgtccttgtttaatttaaagagctcgtatcaatttatgactgatataaccgttccaaatgaagagggagctgaagtttccacatatactcctgttatcagagatccaaatttcaattttaagataactacgaatttcatattaaaaggttaccaggattcctataaattttatgaattgaggaaaatgaatttagggtatatggggcatattgtattgatcgctgaagaagtggtcaagttttccaagctgtacaaagttgaattgatctcgcctgatattcaagaaattctgcaaaccgaggattggcaatactactctgaagaagtactgaacgaaacgagaatgatgtactcaaagattcttggtggtggcagctacatagacgatggtaacggtaatattattcctcaactacccgataatagcgcagtactgggctccaatatggatgctaatgataacaatgaaatgtttgattcagatacagggaatgacagtgacagtaatggtggcggtcaattgatcaacgttgagtctttagaggaacaactgtgtttatccacggaatcagatttacacaacaagttaagagaaatgttgattaataaggctcaagaagacgttgataacaagaacacagaaaatggggtcttcatactgggaccaccagatgatgacgnnnnnnnnnnnnnnnnnnnnnnnnnnnnnnnnnnngacaataacaataacaacgacaataataacaataacaataataataataacgataataatgataatgacaatgacaaaactcgtgattataatgaaaatgctgctaatgataatgattatgatagtgaatga

SEQ ID NO: 4041 - DNA, 717 bp, Saccharomyces pastorianus
atggacgattatcaatacccgcagaataaaatactagtgctatcgcacgactcgcatatcttttcacaaacgcaacttttgaaggacttattccactacaataccacaagcgccacaatagtcaagagtcaaacctgggaaaataaatactataagacctctttcgacttgtatatagactctttcgcaagtctaccggaatggatgaaggattttgtcacgccggaatgtgagccacttcggaatgtcatggcaggaataattctcttaacagataacaaattaataaatccccaagagttcttacagccactcctgggtgtcttgcatcccaatacattcattgtagtagtaaacattaatgaagaagtggagcaagacgaaatcgacgggttaaacgaagcgtggaacaatggttttaccaacgtcatcgaatttataaactggaccaaatcaagagcaaccattggtcataacgagtatggagaaagactgggcctcgatagaattcacgaaattatagatacacacgactggttgaattgtgagcttcaaccgattgcaacaagggtggaggagccggcgtacgatatgccacttgaacaattaatcacaaatttgcaaagtgcaagactcagatacaaatctatggggaacaacgacgaagcagacgtatttgcaaacgaaatggctaacgaactatccaaatatttatga

SEQ ID NO: 4042 - DNA, 1641 bp, Saccharomyces pastorianus
atgcacttattccatccttcttggcagaccaatatattatgcatttgtttgccaaaatcccttatattcgtcgctcaaaacggcttaggaaataatgtgtcaaaaaaaaagctgcagtataatagcgacccgtttttcttatcagtcaaccattttgtttattgcccaaactaccccagagcatcatccacaagcatgtctcactcactgacttcagttttccaaaaaatcgacgccttgaagcctcagttcttcaacagactgaccaaggccattcaaatccctgcggtttcttcagacgaatcattaaggcctaagcttttcgaaaaagccaagtttatctccgagcaattgtcccaatcagggttctatgacatcaagttggtggacctgggcattcagcctccaccaaccgctacacccaacttgtctctgccacctgtgatcctgtctaggttcggcaacgaccctgcgaagaagaccgtattagtatatggtcattatgatgtccagcctgctcaattggacgacggttgggatactgagccctttaagctgattattgatgaagctaatggcattatgaaaggtagagggatcaccgatgacactggtccattgttgtcctggatcaacgttgtggaagcgttcagtgcatccgggaaagagttccccgttaatctggtcacctgtttcgaaggtatggaggaaagtggttctttaaaactggatgaattgatcgaaaaggaagccactggctacttcaaaggcgtggacgctgtctgcatctccgataattattggctaggcaccaagaaacctgttttgacttacggtctaaggggttgcaactactatcaaactatcattgaaggtccaggcgctgatttgcactccggtatctttgggggtgttgtcgccgaaccaatgatcgacttgatgcgcgtcttgggttctcttgtagattccaagggtaaaatcttggttgacggtattgatgaaatggttgctcctttgactgaaaaggaaaaggccctatacaaggatatagaattcagcgtagaagagttgaacgctgctaccggctccaagactagtttgtacgaaaagaaggaagacatcttgatgcatagatggagatacccttcattatccattcatggtgtagaaggtgccttttccgctcaaggtgcgaagactgtcatcccagcaaaggtctttggtaaattctctatcagaacggttccagacatggactctgaaagactgacctctttggttcaaaagcactgtgatgccaaattcaagtcgttaggctccccaaacaaatgtaggactgaactaattcatgatggtgcctactgggtttcggatccattcaatgctcaatttaccgctgccaagaaggccaccaagttggtctacggcgttgatcctgatttcaccagagagggtggctctatcccaattactttgacctttgaaaaggccttgaagacaagtgttttgctgttaccaatgggtagaggtgatgacggtgcccattcaatcaacgagaagttggatatttccaactttattggcggtatgaaaactatggctgcttacttgcagtactacgctgaatcgccagaaaactaa

SEQ ID NO: 4043 - DNA, 858 bp, Saccharomyces pastorianus
atgacgtatccctttgagtacttgaagaccggcttacagctgcagcccaagggtaccgcttttgagatcatcttgccccagattaagtcgtatttcgtgggtatttccgctttgaacctggccgcatttggtaagactattgtgaggttcattacgtttgacaagttatgtcaatctttgaataacaacaccgaaaataatgacaacttccaaagattgacgggtcccaacctgctggttgccggtacattaaccggtatagtggagagtctgtttatcatcccctttgaaaacataaagaccaccatgattcagtcagcaatggtcgatcctaaaacattggagaaggcccaccctcaagctagtgggaagcccactttccataaaccgaccaccaaggccgcctctgtgactcgtatcgaaaaacttttgcctacagtcaaacacatgtatcacacaagaggcctttcggcatttgtccagggaacaacccctaccttatttaggcagatagcaaacacttccatccagtttactgcgtacacagcgttcaaacggctgttgcaaggaagaaacgataagtcgtcgtcagtaatcacaggactagccacatcctttacgcttgtggcaatgactcaacccattgacgtcgtaaagacaaggatgatgagccaaaatgctaaagccgaatatagaaatacactcaactgtatgtatagaatatttgtccaagaaggtatggccacattctggaaaggttccatttttagattcatgaaagttggtatttctggtgggttaacgtttgctgtttacgaacaggtcagtttgttaatgggcttctcctccaggtcgtga

SEQ ID NO: 4044 - DNA, 159 bp, Saccharomyces pastorianus
atgccaccaacgatccaatcaagattgtcccagctgaagatggttccggtgccggtgctgctgttattgctgctttatccgaaagaagaattgccgaaggtaagtctcttggtgtcatcggtgcttaacgaaaaagaaaaaaaaagtaacgaagtatga

SEQ ID NO: 4045 - DNA, 1278 bp, Saccharomyces pastorianus
atgtataaaggagtcaatgcctttgccaatcctttgaggactgggataacaaattttttctctacttctattaaaagaaccgtcaacaataagcttacttttgctacaggttatactcaattgagaaaaatgtcttccgttactggtttttacattccgccaatctctttcttcggtgaaggtgctctagaagaaactgccgatttcatccagaacaaggagtacaaaaaggctttgattgttaccgatcctggtattgccgccattggtctctccggtagagtccaaaaaatgttggaagaacgtggtttggacgttgctgtctacgaccaaacccaaccaaacccaaacactggtaacgtcctggacggtttgaaggttttgaagaaacaagactctgaaatcgttgtttccatcggtggtggttctgctcacgacaatgctaaagctattgctctgttagctaccaacggtggtgacattggggattacgaaggtctcaacagatccaagaaggctgctttgccactgtttgccatcaacactactgccggtaccgcttctgaaatgaccagattcaccattatctccaacgaagaaaagaaggtgaaaatggccatcattgacaacaacgtcaccccggctgttgctgtcaacgatccatctaccatgtttggtttgccacctgctttgactgctgccactggtctagatgctttgactcactgtatcgaagcttttgtttcaactgcatctaacccaataactgatgcatgtgctctaaagggtattgatttgattcaagaaagtttagttaacgcttacaacgacggctctgacaagaaggccagaactgatatgtgttacggcgaatacttggcaggtatggcttttaacaatgcttctctaggttacgtccacgccattgctcatcaacttggtggtttctaccatttgcctcatggtgtttgtaacgctgtcttgttgcctcacgtccaggaattcaacatggaatgtccaaaagctaagaagagattaggtgaaattgctttgcatgttggtgcctcacaagcaattccagaagagaccatcaaggctttgcacgccttcaatagaactatgaacatcccaagaaacttaaaggatttgggtgtcaagaccgaagatttcggtatcttggctgagaacgctatgaaggatgcttgccacgtgaccaacccagttcaattcaccaaagaacaagttgttgctatcttgaagcaagcctacgaatattaa

SEQ ID NO: 4046 - DNA, 171 bp, Saccharomyces pastorianus
atgacaggagacataacctcgtgcgaagcagaaaatttgctgcagttgaaaacaggtttaggtgccatagtgtctaccgtgatagaagaattcaccctgtttatggatatcgctgagagaattgccgtgctacatcaaaaaacaaaaacactggcatcagcggccatatga

SEQ ID NO: 4047 - DNA, 864 bp, Saccharomyces pastorianus
atgtttggatttaataaggcatcatcaacacctgcgggtgggctttttagccagaacagtggggccagcagtggaaatacgaataccggattttcctttggtggaaatcaagctggacaaaacacaactccaggggcaggtgggctttttggtgcaaagcctgtcggtgcgagtatgcctggaacaacgggtgggttaggtgcgtcgtttggccaacagcagcaacaaccacaggccaatgcgtttggaggcagtagcactacaggaggcggtctctttggtagcaaacttggtaacacaacaagtaccagtggcggtttatttggcgctggtacgaataattctggccagggtgctaataccaacgccagtggtggattttttggctccaacgcagcgcccacaagcggaagtttattcggtaataataacaattcaagcagtgcaagcagtggcctattcggttctaaacctgccggtagtacttccttgttcgggaatacaagcgcttccacggctcctacacaaggccaagggctttttggagcgaaaccagccggtacatctctatttggtaacaacccagctaacacaaccacaggtggaggattgtttggttccaaacctgcaggaacaacctccttgtttggctcgtcaaataacaacaacatgggtacatcaggaggactgttcggaaatcagcagcaaccacaacagcaagcgcagtccgcgttgcagagtctttcccagctccccatcaccccaatgacccgaatttctgagctaccaccccaaattcgtcaagaaattgagcaattagaccaatatattcaaaagcaagtacagatcgacaagctggtccgc

SEQ ID NO: 4048 - DNA, 1677 bp, Saccharomyces pastorianus
atggacatttttagagtgttgactaggggtgcttctgtaaagaaaaattctggttcaaaggccaaagcggcagattacagtgccataaatgacaaggaagcaaatcataaggaaaaggatagtgaaacacaaatcgtgaaagagcttgatttcttccggaacaaaaaaataatcagcaaggtggaaaatgagaagggggaagaaacaaaagaagatgtttcgaatgaacgagatgatggcggcaatgatgatcaagatgtgttaaaaccaacaattactaatgcagccgaggcatctgccttaagaaaatcgtacaaaggtaatgtatcgggcgcggatgtaccatttccaataggctcatttgaagatctgatttctagattttcatttgataaacgtttactaaacaatctggttgaaaacggattcactgaacccaccccaattcaaagtgagtgtattcccatcgccctaaacaacagggatgtcttggcatgcggtccaaccgggtccggtaagacattggcattcttaatcccgttagttcaacagatcattgacgacaagaacaccccagggctgaaagggttgatcatttctcctacaaaggaattagcaaatcaaatttacatcgaatgttttaaactgtctcacaaaatattcttggaaaagaaaagacctttgcaaattgctctgttatccaaatctttaagtgctaaattgaagaacaaggtaattagtgataagaaatatgatatcatcatttccacaccactgagactaattgacgttgtgaagaacgaagctcttgacctttccaaagtgaagcatttgatttttgatgaggccgataaattgttcgacaaaacatttgttgaacaaagtgatgatattctaagtgcttgcaaggaaccagctctgcgcaaggcgatgttttctgccacgattccatcaagcgtggaagagatcgcacaaagcattatgatggatcctgcaagagttatcattggtcataaagaagctgcaaatacagatattgaacaaaaattggtattctgtggtaatgaagagggtaaactaatcgctatcagacaattggttcaagagggtgagtttaagccgcctattatgatttttctggaatctattacaagagctaaagcattatatcatgaattgatgtacgacagaataaacgtagacgtgattcatgcggaaagaacagcattacaaagagatagaattattgaacgatttaagtctggtgagttatggtgtttgatttgtacagatgttttagcccgtggtatcgatttcaaaggtgtgaatctggtcattaattatgatgttccaggatcttctcaggcttatgttcatagaattggtagaacaggtagaggtggacggtcaggtaaggccataacgctttatacaaagcaagattcagtagctatcaaaccgataataaacgtcatgaaacaaagtggttgcgaagtatcagaatggatggacaagatggccaaactgaccaaaagagagaaggaaagcataaagaatggtaaagcacatacggaaagaaaacagatcaccactgtgcctaagattgatagatccaaaagaagacgtcagcaagaaatgattgcagcatccaaaagaagaaaaaacgaagaactatga

SEQ ID NO: 4049 - DNA, 78 bp, Saccharomyces pastorianus
atgacaaaatcgtttggtaacattgatttaaataaaatgcccaaaaaaaccaacgaagaaacgtatggatggtcatga

SEQ ID NO: 4050 - DNA, 1110 bp, Saccharomyces pastorianus
atgggcagtggtaatttttcagatgagttagaaaaagaaaacttccaaaggcaaatccatatagatttgagtacccaccgagacatgagatctcaaaatgatgacaacactgggcaaaagaacaatgtgaattttgggaaacaaaaatcaccacacgataaagaaagtgtaactcgaagccacacaacaagtaacatatttaatgaagaagagttgcatgaagggtttaagaagatgggagaaataaataatagctcgaggcttgcccccgactccaactttgacatggaggattcccaattaaaaaactgggaaagtttttggtgcaatacagaaggttacaaaactaaacacattcaaccttttcatttcacaagcgggttagaggagataaaggaaccagttatggaggtgaatatttcaacgtcaccgtacaaagggcaaagacccaattctgctcccactgaatgctcagctgctactaccacatttaccaaaacacagcttgaggtgagctttttgaaaactaatctacttacatatatcaaaaaggagattgacatttgcctgacaagtataccatttttcgatgatgcaattcaaatgcaaaagaaattcttagaatatagagacatcgagttggatgaagaatatgaactgaagattttaggagagcttttgaatgaattgaatttttttcacttgcaggaaaactgtttactcaatagagagctagcagttcgcaaattctccaaccaatctgaaacccaaaatcttccctctcttaaaagtttcagagcctccctaattcctatgatcaactcacactctccctcaagaatgtcgaaaaggaatggaaaatcgttcgaggagagctatgagtttacaaccaactcttcaaatttctgggagaaagcagaatttcaaaactcagcaagtgggacacccaattgtttccccggtaataatctatatcaaacaaaaccttttatgccctttgaaaaccaaaatgagccttcttttaatagaatgaatgtagattgcaagcagcattttaactccggaagaagtattcaaaagggattagaggcgagtcttacaggggactaa

SEQ ID NO: 4051 - DNA, 108 bp, Saccharomyces pastorianus
atgaaaacagtactactaatgagtaatagcagtaatatgtcagacacccctaaacgttcggttttaaagatactttggaagaacggtatatatatagcacacatttga

SEQ ID NO: 4052 - DNA, 369 bp, Saccharomyces pastorianus
atgtcgtccgtcttggcgccatcgctttgtaggggtgactccaagctagacagagtcgttgtcatgtccacatacgacgaggggctcaggtcaataagatcgacgctgttcaggcccagagaagcctccaagtctaatacccgaagatttttaacggtcgccgcttcaggactgactgagctatggcacgatgctgccttctgcttcctactagtctttctcttggtgtggcacttacagggctcgccttcgtcgcaacggcaccgcgactcatcttcctcgctgcccaccgccagccgtcgcttggaagcacacatgcatccgccagaagggttgaaattcttggtcctcctcagctccttacaatga

SEQ ID NO: 4053 - DNA, 873 bp, Saccharomyces pastorianus
atgtcatcatttagtgaggatttagctcgtcacgttatcacacaagtagcaatgtccataaaacatatgcattacatgggtatagttcaccgcgatattaaaccagaaaacttactattcgagccaatcccattttacggcgttgacggggacgaattcaaactaggtgtcggcggaggcggtattggtttggtcaagttaacagatttcggattagccaagataatttctcataatactgctaaaactccttgtgggacaatagaatacactgcaccagaaatattcaactttgaggaatactcaatgaaagttgacatgtggggtattggttgcgtgctgtacacgatgttgtgcggctaccctccatttaacgaaaaagaccaatcaaagctagtgaagaaaatatctgaaggggactaccaattctcagcgccctggtgggatggcataagtttaggagcgaaaaatgcagtttcacacttactagaagttgacccgcgcaaaagatatgatatcggtgaatttttgaatgatccttggttgaatacgtacgattgcttgaggccgtcaactttagacgaccagccggcgtctgaatacgcttacgctaccgttgaggatatattaaatggctcgttcgataagaggacaacagagaacttacattccgcccttgaacagagttacgaacttcaagaacaagatgataccgaatcccataagagtgcaagctcacagtatattttcatgccagacaataatgaacctttaagaaacagctcatttgatgaactcgatgggccttttagtttagacctaaaaaggtcttctgtgtaccaaagaaggaaaagtaaagtgtccttttggtag

SEQ ID NO: 4054 - DNA, 654 bp, Saccharomyces pastorianus
atgtcaaagggtaccacgaaaaaccaaagttttatagcggacggtctctgttttcgcccgcagacacctgatgccacttattctgaagctgacaataataaaatatataggatagcgagtaatctcgataatgcgcacagcacgtattccactgattgccgtaggtcttctctctcagtgaacatcgataccccttctggagagagtgacaatgaggaagataacttcctggacagcgacattcaagaagtcggatattttagtgacgtctttccaaacgaattcgagttgaacgatgagtctgactcgtctacttactattccgttatggaatctgaatttcctgaacaatctgaattatgcaattacaaactacttaatcaaataggagacggcgcattttccagagtattcaaggcagtaaacgttgccggcattgaacaaattccggttgccatcaaagtaatcaaaaagaaaagcatttttggcgaatacgaaaaatatggcaacggtgcagaagacggcgataggattaagccatgcaacagagaaagtattttgaacgaaattgccattcataggatggtttccgagaacaacccctactctgttaagtttataagtttccaagaatctaccacttattttatctag

SEQ ID NO: 4055 - DNA, 810 bp, Saccharomyces pastorianus
atggctgaaacaattgaggcactgaagaacatttcaaaggtggaaaatggaagcgtatgggctggtgtttttgcagttaaaattcaagaggatttgcttgctgacgactttacattcgaagtgctaacaagagtgttaccattggactcgcaagctcaaatctttaataggaagtcgtttcatgatagatgtactattttatgcaatcggcttctgcaattgtttggctgttctattgttacgggcttagattatcaagcgttgaggttcgacaggggcagctttggtaagccattcttgggcaatgatcgatctattccttttagcatgacaacaggtgaacagtgtgtagctatgtccttggtgaagggcgcgagcacagatgaatatcagaacattggtatcgatattgcttctacgcgtaattatggtgggaatgaagaactggagttatttaaagagatttttagtgatgaggaatttaagggtttacaaagagcgtctgatccatgtgtgatattcacttacctgtggtccctgaaagaatcgtatacaaagtttaccggaacagggcttaatacaaatttggcaacgatagattttggtgcgatcactgtctttcccgttaacggagcttcattggacattaccttagataacgttccactggttttttattctcgatggttcaacagcgaaatcataactacttgcataccaaagtcgatcagcaatgaccttaacatgggcatcccaaaattatataacgttcccttatctatgttaattgattatttcatcaagacgtga

SEQ ID NO: 4056 - DNA, 519 bp, Saccharomyces pastorianus
atggagccattgctatcgacagtttgctctctcacttttttccatgccggaacggtgtttgcctcgttggcagcattatcaccgttctccttctcttcgtcattctcttcttgcatgcccatcttggctaggatttcggacgcagatgggatcgcgtctataccaggtatgccattaggagacatggaaaatggtctattgtcatgcatgtcagttggttcccggttttttatcaaactcttgagcgaatccatttctctttggatattgtttagttcctgcatgttgctgttgtctgaaacaaacttgtcaatggtgctttgtaggttggacatctcgagcttaactagtctaaattcgtcttcgatcttttctttgtttctcgtagtttgcactagtacttgttgcagttcggaaattgtgtcacctagctctttcaacttattgctttcttgctctctaagctctgtctgttctgtttcgatggcattgaggactttatcaattttggcaaactga

SEQ ID NO: 4057 - DNA, 1458 bp, Saccharomyces pastorianus
atgcaatttagaaaagtttgtaatcatccagatctttttgaaagagctgacgtcgattctccattttccttcactacttttggtaaaactacttcaatgctaactgcatctgtggccaacaataacagtactgttgtaagcaacagcaatatgaacctctctagtatgagcagtaataatatttcgaatggaaaattcactgatctgatttactcttcaaggaatccaattaagtataatttaccaaggttagtttatgatgatttgattctaccaaactataacaataacgttgatatagttcagaaaatacaaaatgtgaaattcaatattttcaacacatcaataaattatgaattgtgtttattcttgtccaaattaaccggagaaagctctctgaatgaatttttcaggatatccaatacgccactactgaaaaaaataatagaatttacagaccaaccacacaatcctaatagtttgatggtcaaaagtaaaactaaagaattattgagactttccaaaaatacaccttcgaaaggtgtattggcatcattattaaacatcaaacaactaacctatgaagatgagtacttgaatagtatacaacgtggttatcatccaaatgtttctgctcctccaattactattgaagttcttggttccagtcacatttctaatagcataaacaatgatctatttggcccaatagtgactcaggcactatccgatattccgacagcaacgcaatacaacatgcacgtcaacaaaaaaataccgattgaaagctttccaaggacaggattattccctgaaccattaaataagcatttttcatcaaacatatcgatgccgtctatggatagattcattaccgaatcagcaaagctaagaaaattggatgaattattagtgaaattgaaagcggaaggtcacagagttctgatttatttccaaatgaccaaaatgatggatttgatggaagagtatttaacctataaacagtacaaccatattagactggatggttcatcgaaattggaagatcgtcgtgatttggttcatgattggcaaactaacccagagatttttgtatttcttttgagtacaagagcgggtgggttaggtattaacttaacggctgctgatacagttatattctatgattctgattggaaccctactattgactcacaggctatggatagagcacatagattgggtcaaactagacaagtgacggtatacagactgcttgttcgtggcaccatcgaagaaagaatgagagatagagccaaacagaaggaacaggttcaacaagttgtgatggaaggcaagacccaagaaaagaacattaaaaccattgaagttggtgaaaatgattctgatgtaactccagaaagtgataagaacataattcagaatgaaatcaaagccagagcaagtgcattggcatga

SEQ ID NO: 4058 - DNA, 1089 bp, Saccharomyces pastorianus
atgtcgctagccgttttgctcaacaaggaagacaaagacatatctgatttctcaaagctcactgcggatgaacttcccacgagcaatggcaatgagggagtagccgatgctggacctcgcaaagtgctagataagagacaggcgtacctgtcccgattaaacagcgagtttgatcgcatcaagaaaagagactcgatagagcagctctaccaggactggaagtttgtcaatctacaggagtttgagttgatatctgaatggaatcagcagtccaaggactggcaattcgacaacactagtgattccatcgatctgcatttcaagaagctgtaccgtgatatgagttcgatcaacaaggaatggtcggagtaccagacgttcaagaacactaatctttcggacataatcaacgaaaaggatgctgacgaagatgaggacgaagacgaagatgacgtggaagatggtgacgaggcggtggaacaggaagaccaaagccctaccaaacacgtcaatggtaaaaatttgcatgcaaatggtgctcaaaaatcaaaaaagaaggattccacggctgccctggggagagctataaagaaggaacaagacaatgtcgatgcggtctcggctgtcgatggcgacgataacgaaggtgacggtgatggtgacgataacgacgacgaaaatgatgacgatgacgatgacgatgacgatgacgatgacgatgacgacgacgacaacgacaacgacaacgatgatgacgaggaagaagaagacgaaatggaggagcttgaagaggaggacttcgccgcttttgaagagcaagatgacaatgacgacgaagacttcaatcctgacggcgagaagaggagaaagaggtcttcgtcatcttcgtcatctaccaagttgtcaatgaactcgctatctcttataacatccaagaaaataaataaaaatatcactatcgacagcgatagaccgaaaatcgtacgtgagcttatcaaaatgtgtaataagaacaaacaccaaaagatcaagaagaggaggttcaccaaatgtattgtcacagactacaatacaatagactcagagtta

SEQ ID NO: 4059 - DNA, 1122 bp, Saccharomyces pastorianus
atgaagatgtatgctaaagtagctcgggccatccaaaggcactatgacaacacttacacgaccatttggaaagatatggcgcgtaaagattctgcaaaaatgtcaagattggttcaacaaatgcaatccatcagatcgacgaatttcaggaaaacctcgtcactctgtgctagagaagcgaaaaaatggcaatccaagaacttcaaacaaatcaaggatttccaaacaagagctagaagaggtattagagaaatgtccaatttctggaagaagaatgaacgtgaagaaagggacctaaagaagaaaatagaaaaggaggccatggaacaggccaagaaggaggaagaagagaaagaatctaagaggcaagccaaaaaactaaatttcctcttaactcagacagaactgtattcgcattttattggaaggaaaatcaaaacagacgaactggaagggaatggtgcttccaacaatggttctcaaaatcataaaaatatcgatatttcagcattagttccaaacaaaaatgatttccactctattgatttcgataacgaaaatgatgaacaactaagacaaagagctgcagagaatgcttcgaatgctctggctgaaacaagagcgaaagccaagcaatttgatgctcacgcaaacgcacaggggggtgacgatgaagatgacgatgaagatgagttgaatttccaaaatccaacctctttaggtgaaataactattgagcaacccaaaattttagcatgcactttgaaagaataccaactgaaggggttgaactggctagccaacctgtatgaccaaggtatcaatggtatcttggcagatgaaatggggttgggtaaaaccgtacaatctatttctgttctagctcatttggcggaaaatcataacatttgggggccctttctggtggtcacacctgcctccactctacataattgggtcaacgaaatatccaaatttcggcctgaattcaaaattttgcggtattgggggaacgccaatgaccgtaaagttctgagaaaattttgggataggaaaaacttgaggtataataggaatgctccattccatgttatgatacttcgtaccagatgtcgtcactga

SEQ ID NO: 4060 - DNA, 441 bp, Saccharomyces pastorianus
atggaaaaattgctaagctttcattgtcgtaatagactattattaactggtacacctatccagaacagtatgcaagaattatgggcacttttacattttatcatgccttccctttttgactctcatgatgaatttaatgaatggttctccaaggacattgaatctcatgccgaagcaaatacaaaattgaaccagcagcaattacgtcgtttgcatatgatcttgaagccgtttatgttaagacgtgtgaaaaagaacgtgcaatccgaattgggtgacaagattgaaatcgacgttttatgtaatttgactcaaagacaagccaagttataccaagtgttgaaatctcaaatttctacaaattatgatgccattgagaatgccgccacaaacgactctactctaattcaacctccagttcgggttccgatcaaaatttaa

SEQ ID NO: 4061 - DNA, 858 bp, Saccharomyces pastorianus
atgacttgctcgttgatctttatgaacttgacgtcatcctacctcgattacatcttagctgtggattctttgaatgagacaagaactaaagagcaagaattataccaaaccatggctaaactgcaacatgtcaatctagtgtacaaaaaaatcagatctctatctgagaattttatcttcattcagctagctgacattgtcaataccacggaatctaagaagtacaactctttatttcaaaatgtggaaaacgattacgaaaaggttatgaacacagatatgcaaaattcaattgtccataggattcaaaaattgctgaaggaaacgcttcgaaattacttcaagattgcaacgtggtcgacactagaaatgcctgtcgatgaatatgatgatgataatgatgacggcgccactgtaccaagtgctgaattggtgaatccaataaacgttttaacaagattgatcaacaagctagattcattagatatcccattacctatatttttgaaggttaaaaacgaactgttgaatgtcattgtcaattatttcatagagtcaatcttaaagttgaacaaattcaacctaaatggtttgaaccagtttctacacgattttgaatctttaaagaacgttttaagcttaccaccacacgccatcaaccataaatctatgagtttacacgaacttataaaaatattgaaaataaaatacgatcgaaacaatcagcagctcctagatccagaatatatcaaaatgggtgatttcgcatctttaagagaaatatactctatcaagtacctaagagacacggagatccaggacgcactttacagaattatatatggtaatataatataa

SEQ ID NO: 4062 - DNA, 2091 bp, Saccharomyces pastorianus
atgaatacaaatagcgtgtggcgttcaaggatgtctcttacgctaaccaatgaaattctatttcactacaagtcctcggtgaaggtaggtgagctagagagatatgtcattacttataatctatatgaaggtgaagcgatcccctcagatttgaatttagactctttatggctaaaagtaaggaacatgaacccgctgtcgtacagagctgcgtatctcatgggtcccttcatgctgtattgcgatgttaagactgccgagtatcaccattctcaaaaaataatagcttcagtggactaccccaaatttgaaccgaacgtacaggctcaacaagatttcgttgctgaactttcagtacataacataaggcagcagtacatatggattgcagatatcatgagccaaatattgtttactacgaacacaaacattacatacgaagtcacagttggcacaaccagagagtcagtagaaaatccacacgatctgccgtcttatttgggctcctatagccctaagttaacagtaaacaggcttacaaccttggatttatggaaccttcctgttcaaatcacaactccgaaaagaaagaagcatctcgtgcttttaactcatggtttgcactctaatgtgtctacggatctagtttatatcatggaacaagtatacaaatcccagaaaaactatcctaatgagcaaatagtcgtaaagggttacagggggaacgtctgtcaaactgagaagggagttaagtacttaggtactcgcctagccgaatacattatccaagaactgtacgatgaatcagtctgcaagatttcctttataggacattcattgggcggcctgatccaagctttttcaattgcatacatctacgaggtttacccttggtttttccagaaagtaaaaccaataaatttcataactttagcctcaccacttttaggtattgttacagataatcctgcttatattaaagtactgctatcatttggggttatcggtaagacgggtcaagatttgggtttggaaaatgaatccgagggggggaagccactgatatatttgttgtctggtgaaccgttaacagggatcctgcgtagatttaaaagaagaaccgtatatgcaaacgccatcaatgacggaattgtaccactgtatacagcatcactgttatacttagactatgatgatattttggaacaactacagaagattaaagagaatagcaaaaaaccccctccgatgaacaatgttacggtaaacgaaaaccgagatttcttcaataagaattttatttcacctttgactaaaatgctgagtatatgggcgccacaaaaatttcctacagaagaaggttcaaagattcctaaagtttctttttttgaatccgcaagttcaattctattgccgccattacctgaaaaagcatatataatggatccagactctagagatcctgtgattattcatgacaaaatatatacagaggatgatattccgcaatctaaattcaatatcgaggatggattcttcgataaaaagaatattcttctccaagctttttttgcaagaaagaaagaacgtgcaaaataccggaatctagaagaaactattgctagaagatggcacacggggatgtcatggagaaaggttgtcgtcgctttgaaaccggacgctcataataatatcatagttcgaagaaagtttcctaacgcgtacggatggcccgtaatcgatcatttaatagacgtccattttaacggtgatgacggagacagtgacggtgacggtgacgacaattgttttcctcaagatattgaagccattcaaaaggcaacaaatgagggagcaaataaatatgagaaggtggaaagcattcccaaagaatatgaatggttgaataaagtggaaacaaacggcgtctttgatgaaggtcctacagggatgatatctactgtgggggaaatagtagaagcgctggctaaaagaggcttcagtgctatgaccgacagagggaatactccggaggatcccaatgacgagattcttcgttttgaagaaatgaatagtgacttggttcaatga

SEQ ID NO: 4063 - DNA, 1851 bp, Saccharomyces pastorianus
atgcctcgaaaatccaatagaacgaagcaagaagttagaagagctccaatcttttggatattcctagctttcagagtgctgaacgcagccttgacaagaaccttctttcaggcagatgagttttggcaagcgttggagcctgcgcactggaaagcctttaaatacggggaactcacttgggaatggaaatttggagttcgtagctatatgtttccgatgatctttgagctaacctacagattggtttcactatcggtaataattctccattacacccttaaagctttttcaactataggttccgatttacttattctactcttaccaaattatgaattaacctggcagattgaacaagacttacagagacttcctttggatgcctcacggtcatttgaatactacggcgtgatatatgcaccaaaaattgtcatggctgtactagcatccactggagaatattatattataagatttgttcagaaaatctatttactgacacttgataagaaaaaggacgagaaggaagataagggacttagtggtttgtcggaaattacgaaatttgccctacttctaagcctaactaactttttcaattgcttttttatttcgaggacatttatcaactcttttgaaatggtgctcacctctattgcgctttatcattgggattggacaggggggcaaagggtgaaagagtcatcgttcacaaaagcgcttatttttgcatttttggcatgtttgcaaaggcctagcaatgggctcatctggatagttcccggccttttcctgctgctaaatttggtgtccaagaagcagtatcacttactgtctgtcacactatcgaaagtcattcgatcgttttcgctagtattccttgcgaataccattattgatatgtatttttatagggaactgaccttcccgatcttccgctttctaaaattcaattttacaacaccattagcgaaattttatggggtggctccctggcatttccatattttgcaaagtctgcccattatactaggcgcatctattcctattttcatatttggatttttttcccagctcagcaggaaaaagtttcccaactggtacttaaatccatttttccaggttaattgtactattttgttgaacctaatagtatactctagcttacctcataaagaatttaggttcatctttccattacagccgctctttatattaatatcatcgtttggtttatcaagacttagtacggagtatcgaaacaagctgaccagcttaaaacttctgctctggctcgttccctttatatcagtgtttgctgcattactgttaaatacattccacgaatcagggtccatcgaagtcatgaagtttctgcacgaagagccagaaatagatagcttgggatttataatgccctgtcattcgacaccgggtcaaagttatctacacaggaatgatatttcagatctgtggtcaattacttgcgatcctccattgcacctacttgaagacccaaaagcctcttcgaagcttgaggtttatatggacgaaagtgaccatttgtatgaagacatacccaaattcatctatagaaacttcccaccgatattccgtaaaaacctaagaagcccagacaagatatttagccatgaatggccaacatatttggttgttttcgagcacatggaaaacacttacctaaaagattttctgaaggattcgtcgtatgtcgaatacaataggtttttcaactcccttgctcattgggattcaagaagatcaggtgacataattgtttactataaactaccttttgatcttaaagatatgtcggtagtaaaaagctga

SEQ ID NO: 4064 - DNA, 1797 bp, Saccharomyces pastorianus
atgtcacttttcttatatttccaatcggtagtcgtggtcgcaatgcagcatgtccatcgggttccacccattgctgctgcttgggcggaaaatctggtttggtcaatggggttgattagaatctcattcatgcaaagaattttccgttggtatgtacagtccacaggcggcacgccaagtttgtatttgacctctacttccatgtctgtcttggctcaaagaagctgggactatttaatggaattttccttaatgaaaagagccaccaacgtcttatatggaaattctaatacattgatttttagaggtatcaagagactgggatataaaatgaagattgaaaacacatccatcgtttgtaccggtttcaccttcttcgttttatgtggttatgtacttgctggatttatcgtgatcgtgaaatgctgtgtggaattggccgttagattgggttggattgaaaagacaagattttgggagtttaggaaacagtggaaaataatattaaagggcgctttattaagatatatatacatcggtttcgttcagttaacaatcctaagtttctgggaattcaccgagagagactcagctggtgttatcgttatcgcttgtctattcattcttctgtcatgtggattaatgctttgggctgcgtggagaaccgtgttttttgcaagaagatctgttgcaatgtacaataacccagctgctttattatatggtgatgaatatgtgttacacaaatacggatttttctatacaatgtttaacgccaatcactattggtggaacattgtccttttgtcccacatatttgtaaaatcattattggttggatttgctcaagcttccggtcaaactcaagttctcttcatgtttatactggatctgctttattttatcgccatcatctactataagccctatctggatcgtccaacaaacataatgaacattttgatttccaccgtcacagtggttaattccttcctttttatgtttttttcagatctgtttaaccaaagctacaaggtatcagccatcatgggatggattttttttatcatgaatgctgcattctcgttcattttattattaatgatattggcatttgccggtatgatactcttctcaaagaatcctgatctaagattcaaacctgcaaaggatgatagaacctccttccaaaggaacactatgaaaccagaaggtaccgtcaacagatctgtagccaacgaattacttgctttaggcaacgttgcaagggatcataacgacaattcggattacaaatcaaataatactggaatgaacgatgagccaaaacaagtgcaagatgaaaccactcccacaacgttcacctcaagtgatgagaacaaagcctctttgacagaaaaaatatttagcaaattcacaaggcagaagaacaacaatgcaagtacagatgttttaaaggatgaaaattctaatcaacaaacatttccccacaacctaacaaatctttcgcgcgaaaacctgtcaacattaacaatgggttccaaatcatacccaggacacacaaggacacagtctgacgcacataatggattgataaactcttttgaggaagaagacacaagctcaactgcagacccattccacgactccactgaaggagaccttttagatacctcaagctcagatggaggattcggatcacaaaactttgttagagatgacagtatgaatagtttaggaaataatcaacaaccagtaaggaaaccaccaggattttttgatgaaggtttcatgtga

SEQ ID NO: 4065 - DNA, 243 bp, Saccharomyces pastorianus
atgaaatttttacaaaccttcaaatcgtgttccataattgggctgataatatcactgaccagtaacataggtctagtagaggcgaaaaggaagctagtagcgacgtcattagtcacatgtatggaaaactcccaactgtcagcaaacagttttgatgtcgtctttgacccggacgacaggtcgctacactacaaccttgacatgacaacccagatgacctgcagcatgcagctggcactgccg

SEQ ID NO: 4066 - DNA, 2256 bp, Saccharomyces pastorianus
atgtgcgtagcattcaatccaaaggaccctactacatttgcctccggttgtttagatcgaacagttaaagtttggtcgttgggccagtcaacaccaaatttcactttaactacggggcaagaaaggggcgttaactacgttgattactacccattacctgacaagccttatatgatcactgcgtcggatgacttgaccatcaagatctgggactaccaaacaaagtcatgcgtagccactttagaaggtcacatgtctaatgtttcgtttgctgttttccacccaactttaccaatcataatttctggttctgaagatggtactttgaagatctggaactcttccacttacaaggtggagaaaactttaaacgttggtttagaaagaagttggtgtattgccactcatccaactggacgtaaaaactacattgcgtccgggtttgataacgggttcactgtgctttcgttaggtaatgatgttccaactttatcgcttgatcctgttggtaagttggtatggtcaggtggtaaaaatgcagcagtttccgacatattcactgctgttataagaggcaacgaagatgtcgaacaagatgaaccattatccttacaaactaaagaacttgggtccgtcgatgttttccctcagtctttagctcattctccaaacggtaggttcgttacagttgttggggacggtgaatacgttatttatacagctttggcttggagaaacaaagcttttggtaaatgccaagactttgtttggggccctgactccaacagttatgccttaattgacgagaccggacaaacaaaatactataagaattttaaggaagttacatcatggtctatcccattacactcagcagtcgataggctattttcaggtgctttgttgggtcttaaatccgaaggctttgtttatttcttcgactgggacaacggtgcgctggtcagaagaattgatgttaatgctaaggatgtgatttggtccgataacggtgaattgctcatgatcatcaacactaacgacagcggtgacgaagccagtggttacactttattattcaacagagatgcttacctcgaagcagcaaaagacggcaacattgacgactcagaaggtgttgacgaagcattcgacgtattgtatgaattaagcgaatctgttacatcgggtaaatgggttggcgatgtctttattttcaccacagcaaccaataggctaaattacttcgtcggtggtaagacttataatttggctcattacacaaaagaaatgtacctattaggctatttggctcgtgacaacaaagtatacttagctgatagagaggtgcatgtttatggttacgaaatatctttagaggttctcgagtttcaaacattaactttaagaggagaaattgaagaagctatcgaaaatgttctcccaaatgtcgaaggtaaggactctttaaccaagattgctagatttttggaaggtcaagagtattatgaagaagcactaaacatatccccagatcaagatcaaaagttcgaattagccttgaaagttggtcaacttacgctggctcatgatttgttgacagacgagagtgctgatatgagatggagatcactaggtgacgcatctttacaaagattcaatttcaaacttgctattgaagctttcacaaaagcacacgacctagaatccttattcttattgcattcatctttcaatgataaagagggattagttactttagctaaagatgctgaaactgctggtaaattcaatttggcattcaatgcttattgggttgctggtgatatagaaggtgctaaagaacttttaatcaaatccgagaggttctcagaagcagctttattaggttcgacatatggtctaggggataatgaagttaatgatattgtcaagaaatggaaagaaagtttagtactcaatggaaagaaaactgtatcagaaagaatatgcgagaccgaagggttaccaagctcatcaaaggcagctgatgcacaacctctaattgatttagattctgctccaacatcgaaacatgcccaagaaattcaaaatactgaaatcgaagaaggcgagtttgtagaatcaaacataaaagaacctgaaggagaaaaggaggtagaaacttcacaaccaaaagaagaagatgaacaagggcaacaggaaaaggctgccgctgcagaagaagagaacgagagcaagtcggagaaagacgaataa

SEQ ID NO: 4067 - DNA, 1716 bp, Saccharomyces pastorianus
atgtacacagagtttattgactttttcattaacaaaattgtacctaaggacatatcagctactcaactgcccaaacagctttggaggaatttttgtcgaaatttttcatttgacgacaaaacaaatgcactatgggtgctcatagatcttgtatctcatttctctcctgatataaaggcagctgtagatgactctatggaattatgtggtcaaattcgtagtgagagatttaaagttgcgagggagctgaagtcagaagcagtcgtattgggtaatcttcagaacgagctgcaggcaattcaagagaagttgaccaaaaaagacgaaaatgcacaatctactgataatctggataaacaacatgatgtcgaaaccaataatgaacttttggatccttctgtcattaaagaaaagcaagagctgaccatggaacaagaaaaaaaagtggaagctctacaatcggataaaaattatctcgacaactgccttttcgaaaacgatttgcagagattaaaaccgctcggcttggatcgatatgggaacagatatttttggttggaccacaatggtgttccatgtcatgagcttcctgttgatattgaggagacgtccaagagtatcagtgatttcagctaccagtccggccgtttgctaattcagggccctagagcttcatctgcgaaattctttttaaatgtcagtgatgaacaattgagtgattggcagaatatcagcagttccaaaggagcatctaaggcaaccaaagaagtgtttggtatattcaaaactgactccgggtcttatagttacgttgaaaacgggatagagaccgaattattggatagcaatggtcgcgtaaacccactcattgagttgacaccgattcaaaagaaaatcatggatgaaactccttcaaggctgctgctgtcaccagaccaatggtactgtatcgataagtatgaagacttgtcaaaaataatagattggttagacaactggggtcgcaaagagcacgatcttttaagacaaatcagacctgtactacagcggattaaaacttccgttagcctccgcgaccatacattatcattgggagcatttactaagagcgaagaaaagttgttaaaggaattagaaaataatgagtttaccgaaaatgaattgaacattgacaacatggacattaataataacaataaaaataacaataataataacggtgtcaaaagtgaagctgatattctagctgatgcggaagaggaaaaggaggctgcgttggatgaaaaactggaggccattgccgacgaacttgtgaaactagatgatagctccaagacacggaaagtgcttaatagaatccaagaactagaaaaccagagggacaagctcttgaaacagaagagaacaataataaattctcaaagaccaggagcaagaattttggctcgctcggaaaggaaaagaaccaaagtctctcggagcaataagttgaatagacagatcgaaatacttactgatctaatcaattacagacatttcaaggccatggaagatgtgataggctggaagaatacattggctaattcgatatggggatcttcacttcgcaagaatgcatcaggtaataaaaaaaatggcactattgaaacggttgatgacaaactaaaagatatagtgggccaaacgtctagaactgtaacacctgctccaaattaa

SEQ ID NO: 4068 - DNA, 4209 bp, Saccharomyces pastorianus
atgtctagcgaagagcagcatagaagaagagaggctactaaaaatgttaattacaatgaaaaggaagtggatgctgaattagctaagaggatacaaatactggaaaaaagtagcaatgaatccaggggtagcaataatcaaagccccaaaaacagtagaagctccagcagcctatctgggaggaatgagaagtttaaataccaaaaattccttcatgataagaatacctgttggaattttattccaacattacctccttcgtttagaaaaaatagcaggttttcaaacgtattggatctggatgatgccatgattgatttagagaaaatggttcttttcaactcggactccgtacttctatctgcaaatgacacaatttatatgatatcagagccagccggcgagccgtattatattggcagagtcgtcaatttcgtcagtaaaccagaattttcaaataccattaaagatgctacgaagactacttttatctttcctgccaaatttttccaagttaggatgaattggtattatcgccccagggatattcaagaagaagtaaatacttttaacccgaggttggtatacgcgtcactacatcaggacatatgtccaatatcatcatatagaggcaaatgtaccatactgcataaagatgaagttttagatgcccttccgaatgaaaaagaaagtattatacgaccgaatattttttattttgatgaacttttcgatagatacactttaaaatattatagagtttttagtactgacaaaatactgaacaaatggaacagcagatcgccgtttctttatgttttaaacaagaggtttcgatatgtctatacagaaccgaaatatccgttggaaaacattttgagaaagtacgtctttcaagatcaagacgtcaataaaataagacatgaggactacaattgggacaaaaggtgccagttttgtaaagaatggtgtctccagaaagaaagtcttctgtgcgacgaatgtggtgtctgtgcacacctgtgctgcatggaccccccactcgatagaaaaccgaataaagatgttgcttggacatgcttcagctgtcttcaaatgcaagagaataccgaagagtcacatcgcaaatttaaggaagaacaggcgacagagttgagctttatccgtttcgtgagagaaacaatcgaagaagtctctaataaagctattaaagaaaatgttggttataacgctgaaaattgctggtttcaatattttgggatatattccatttcacatattggcgacatcttgaatgaatctgttttcttaccatatcccttcaaaccttctagagtgggtatgaaatatcagtggtcgggctgtatcaataataagccctggaagcagagaccgtattcactgacagatgcagaagaagagcgaggttcaatcaaaacgtctcaattagcatgggtatttgaaccgtcaaaaataactacacagaaattaaatgaatatgttgaacaatgtaaaaaggaattatgtcccgttttagaagtaaaaggggagatttgtaacttcatcgatgtaatcctaaaaaatctgctatcaacaagttatgacacagcagaagcgtttgaaaaatccaaaaaggaactttctagagaatctttgaacgagccgacatttacaattgaggaaatacataaattcgaaacggctgtgggaaaatttggaagtgaattacgtcccgtatgtgagtatgttggcactcaacccatgtcgatgatcgtaagattttattataactggaagaaaactgaaaggggttttacagtgagagggaaactcagcaaattatcacaaagtaaaataaagaagaatgcacacgttgacgaggatgagctggtaaccaaatatatagacgactcttcctttgataccgaaaaactctctttaacagaaacttcttttcaatgcatgttttgtaaaatagattactctccaatgtggtataaagttactggcggttcagatgaagaaaacattaagataagaatgcaaacaggcgttaacgaaaaaacagaaatttcagaaaaattgccagctaatagtaaaaaaaatgagagattaggcgccctttgtattcgttgcgcacgtatgtggcgaagatacgcaattaaatgggtatacccgcttgaaacactaaaaaagataacaggcaccagtcagaatagtttttatgcagcaatagaaggaataatcgaagagagcaacattaacaaattcaccttgtctccatttcaagctcacagtaaactactggaatgggagcttgttcaggattcggagctgatcataaggcagagaatgaaagtgtatgaaaatccaagttcattcatgagaatgaagcgctattcgatgacatttcacgcacaactttacaaaatggttttgagaacatattgcaagaacgaatttggcccggaaagaatgcaatcagagcttaagtcgtttttgaaagataagaaaaacgtagataaagttcttagagtagatggttcagagggaacaagtaataaggaagatgggtatcctgtaaatataattcagcaattgccgaatattatcaataaatttaacacagccaagaacctcgaaaatgaaaacagtttcatcgataatgatagcagcgacagtgctgctaataccacgagtccttcaaatgaaatgataaaaattccaatgaaagcaggaaacgattccttaggttccgtttccgtagataaaggctttaaatttgtcaagtttgataataaaatattccaacggttacgaaatagtctaaaaccgctgaatcataagcagccaaaaaacaacggaccttcaacaaaaaaagctagaatgattagcgatactgtagatagtccgtcaaagtgtacaaagagtcaggattacaattacccagttattctacattgtaaggatacttctgtcatccttcaaaaataccacgattataatctaccgagcagagtacccgatgaaaactcaagtttgaagtattctaaaaataaaatcaaaagtcccgatccaccacaggataaatatggctcgagagggttttgctgtgtctgtaaagagaacttcaatgcctatgagaactttgagctactatgtggcaattgcgggctaactgttcattacttttgttatggtgtcatattatccaagcatatacgggagtactctgacctgaaaaagtataaatggctatgcgacccttgttcaaatgacctgaatcctatactgtcaaccacgtaccgatgtacaatgtgtcctactaaagagaatgactatgataaatgtaagagtcaatcttcaaaattatttcctgacgcattaaaatgcacgagctcaggaacatggattcatttggtttgttcgctttttgacgagaatatcaagtatggatgcggacaagcaatgcaaccagcccttaataccactgctgtgcttattgaaaacaataggttcacctgcggcatatgcagaataagcggaggtggattggtcaagtgtgaccaatgctcctataggtatcatgttacatgtgcgcaaagtagcgctgactttaagcttttgtttaaaaagaggaacatttcttcaaatacttcacattcttgtattagagatactaaacttaatgaaagttatacattaaagcctgtattattatgtgataaacacgacgtcaattcaaatggaaatgagtactttcaattggcatataagcctcaacataccctttcgtatatggaacagtattgcagatattataaacataccagcggtcgcaccttggccgaatcgagatatttggaacagctagcaacgttatatggtggaataatgagggatccaggcgaatctataactaatcctagagcgtgcgtactccctaccgaaaaaatttgctcatgctgtggtacatctaaaactatatattggtatgaaggagatatttgccattcttgtaacttaaactcaggcgttttagaggctgactacgaaagtgtggatgataacagtgccaaaactaatgatatttcaattgatatatctcaaaaattgatggaagggcttgacccagccattcttggtatgaatactcataaaattgttactggtaaaaaaaaaaagcacaacaatcaagcaaataggtag

SEQ ID NO: 4069 - DNA, 1353 bp, Saccharomyces pastorianus
atgctacgttcatcgtcctccaaatttacggggcagagactgttcaccacagctcgtctcctccaggctgccaaaccagcaccaaaaggtaaaactcaagggttttccaaaaaaacatcatcaacatcgtcttactcttctgccaagagaatcaccccaggctcgctctacaaaaactggacgaataccacacatactgcccaattacaacaaactgccgttcctttaccattacccatcttcaatttcgaacacatttccaagacgttgaacaaagtcgtatcattctccaacaaacaatataaatcccttcaccatttgggttcattcaagaaatctcaatttaacgaactatttcaaaaaccggtctctttagttcgtgaagatgcaactaacagttttttaaaaaaattgatttctcatccaataaaaaaattcataatcaccggagaatcaggtgtgggaaaaagtgtgctgttatcccaagtacacgcgtttgctgtggactctaagcaaatcatcattaacatctcataccctgatctgttcttaaatggtagaaatgacttttcctatgatgaggacttaaaactttatattcaaccaatgtttttgaaaacacttataaggaaaatactcaaggctaatgaccccttactattaaaatccatcgagctgtctcaagactataaattctcgaatgtaaacccaaagaatgcctctatcaaaccatacgttactttaaacaaagagaagaatacagttttcgatttgctatccgtcatgacccactcacataatcgtggaaaactaatggaagccatcatcaatgagttagccatccagtccaaagtgcccatcatgttcacggtagataatttctcgaagttcttaactacctctttttctgcatacagaaatatgcagaataaacaagtgtattccttggatctgcaaatgggtaaattgatcatggacatcatttcaggggaaacaaagttcgccaatagagaaagctctaccattctggccatctctggtgtagatagaacaaacaaaactttacctgtggccctgggcaaaatccctgccgacccttatgttaccagacaccactacgaacctaaatttgtagaattgttgcaaaaaggcaaagtcaccgaattcgaggttcctaaactgaataagcaggaagttaatgagttaatggaatactataaaacgtctaatatcttgttaagcaaggatgccacggaaaagaattgggaccacttgatcgatgagaagtatttcctgagcggcaacggtaatccaagagaattattgaagagtttagttctttcccataggtga

SEQ ID NO: 4070 - DNA, 855 bp, Saccharomyces pastorianus
atgcccggacacgaactggacgacgtgataaaccagcgtttgaacctgtacgatgtgctagaactgcccactcccctcgacgcccgcaccatctacgatgacctgccccaaataaaacgcaagtacaggtctttggccttgcgctaccatccggacaagcatccgaacgacccattgatcatacacaagttccacctgctgtcaacagcaaccaacatcctcaccaacacagacgtacggccgcgttacgaccgctggctcatcgagcaacaacgcaggacaaacgacattcaaaggaacagactcatagaaaagctacaacgctccgaatccgagacagcaaccgccacaccgccgcaacacgcaaacgtctcgcaagtccagcgctatggcgaactactgagaaaactaaaacacttcaataaaccatacggcgactggaaacatctggaccaacaagatcaagagaagccccagaaccatccttactacgattgctctactttgagaattgtcctcgacaacttcccgcattcaaacgccaaatcaagctgtgttgctcatctgcgaacccatgtgttcgccgcgctcagctctcacgagatccacgacatctacttctccgaaagaaatgactacttcaagggcgactctataataatatacacagtgtttgacacccccatcacggcacaacacatattcaggagctggtcaagtggcaacgtcacccccacggtccgcggcatatcgccgctgatcccactacactattattcggacttcaacctacaaacggaattgaacgacgacatcgcgaggttggtttccaatgaacctattcctcttgactga

SEQ ID NO: 4071 - DNA, 594 bp, Saccharomyces pastorianus
atgcgtgtgcgtgcgtgcgtgttcactagggctctctctctcccttttggttttttcaagctgccttttgtatttcctcgcgcttttcccgctaacgtgttcttaaagaaggaaaaggaaaaggaaaaggaaaaaagaacgcaagtggaaacaagcccaaactcgcagctctgtgaagaaagacgcctcccgccctccaccatgccagatgccaacaacgacaccagcggcgcggcgacgcccggcctcccggaccagaacccgctgcccaccaggttcgaggtggaactcgagttcgtccagtccttggctaacatccaatacgtaacgtacttgctcacccaacaacagatatggaagtctcccaacttcaaaaactacttgaaatacctcgagtactggtgcaacccgccctactcgcaatgcatagtgtacccgaactgcctcttcatcttgaagctgctgaacgggttcatggagtccgccatcgtcaatgaagacggcctactggaggggctggacgagctgcccaagatcatccagttgcaaggcccgcaatggatgaacgaaatggtcgagagatgggccaactaa

SEQ ID NO: 4072 - DNA, 273 bp, Saccharomyces pastorianus
atgcggtgtgggggccggctgtggcgcgctctctctctagccgtcggtcacgctgtcgctcgcgcgctgctgcgcttggcgcggtgcatcgcgtgcgaccacccgatcgtgctgctgttggcgttgctggtcacgtggctgtggcagctgctgctgactgcggtggcgtcgcgcttccacaccgtgcgcgagcacctgtccgggctgctcgccgcgtacatagtgacaggcattgtgtatgcccgcgacgcagccgcgctgcgttcgctatga

SEQ ID NO: 4073 - DNA, 1236 bp, Saccharomyces pastorianus
atgttctacgacgtcgacaacttcatcgcgtggtgtgcgcaggttagggccgcgggcatggacgtgcccatcatccccggcatcatgcccattaccacgtacgcggcgttcttgagaagggcccaatggggccaggtctccattccacagtcgtttctggcggagttggagcccatcaaggacgatgacgaactcgtccgtgacatcggcaccaacttgatcgtgcaaatgtgccagaagctgctccacagcgggtacgtttcgcatctgcacatctacaccatgaacctggaaaaggcgccgctgatgattttggagagactgaacatcttgcccacggagtccgagttcaacgctcacccgttggccgttctgccctggaggaagtctttgaacccgaagcgtaaaaacgaagaggtcagacccatcttctggaagagaagaccttactcctacgtcgcgagaacctcgcagtgggccgtggacgagttccccaacggtagattcggtgactcgtcttcgcccgcgttcggtgatctggatctgtgcggctcggacctgattagacaatccgccaacaggtgtctggagctgtgggccaccccgacttccatccacgacgttgcttgtctggttatcagctacttgaacgggaatttgaagtgcttgccctggagcgacgtccccatcaacgacgaagtcaacccgatcctgtcccacttggtcgagttgaaccagcactccataatcaccatcaactcccaaccccaggtcaacggcattcggtccaacgacaacgtccacggctggggccccaaggacggctacgtttaccaaaagcagtacctggagttcatgttgcccaagaccaagttgcccaagctgatcgaaacactgaaaaacaacgagttcctgacctacttcgccatcgactctcaaggcgacctgctaagcaatcacccagacaactccaagtctaacgccgtcacctgggggattttccccggcagagaaatcctacagcccaccattgtcgagaagatctccttcttggcatggaaggaggagttctaccacattttggacgaatggaaactgaacatggacaacaacgacaagcctcagagctcccggttcatccagtccctgatcgacgattattgcctggtcaacatcgtcgacaacgactacatttctcccgaagaccagatccactccatcttattagctttataa

SEQ ID NO: 4074 - DNA, 525 bp, Saccharomyces pastorianus
atgaacatcaagccagtccaaaagcaaaccagagccggtcaaagaaccagatttaaggctgttgtcgttgtcggtgactctaacggtcacgttggtttgggtatcaagacctctaaggaagtcgctggtgccatcagagctggtatcatcattgccaagttgtctgttattccaatcagaagaggttactggggttccaacttgggtcaaccacattctttggccaccaagaccaccggtaagtgtggttccgtcactgttagattgatcccagccccaagaggttccggtatcgtcgcttctccagctgttaagaagttgttgcaattggctggtgttgaagatgtctacactcaatccaacggtaagactagaactctagaaaacaccttgaaggcttctttcgttgccattggtaacacttacggcttcttgactccaaacttgtgggccgaacaaccattgccagtttctccattggacatctactccgatgaagctactgctcaaaagaagagattttaa

SEQ ID NO: 4075 - DNA, 246 bp, Saccharomyces pastorianus
atgtctgctccagaggctcaacaacaacaaaagagaggtggtttcggtggccgtaacaagggtcgtcaaaacagaagaggaccaagaaacgttgaagaaaagggatgggtcccagttaccaagctaggtagattagtcaaggctggtaagatcaccaccattgaagaaatcttctgcactcttggccagtcaaggaataccaaatcattgacactttgttgccaaacttgcaagatgaagttatga

SEQ ID NO: 4076 - DNA, 393 bp, Saccharomyces pastorianus
atgtggttgacccaagttggaaccccagtaacctcttctgattggaataacagacaacttggcaatgatgataccagctctgatggcaccagcgacttccttagaggtcttgatacccaaaccaacgtgaccgttagagtcaccgacaacgacaacagccttaaatctggttctttgaccggctctggtttgcttttggactggcttgatgttcataacttcatcttgcaagtttggcaacaaagtgtcaatgatttggtattccttgactggccaagagtgcagaagatttcttcaatggtggtgatcttaccagccttgactaatctacctagcttggtaactgggacccatcccttttcttcaacgtttcttggtcctcttctgttttga

SEQ ID NO: 4077 - DNA, 99 bp, Saccharomyces pastorianus
atgttcataacttcatcttgcaagtttggcaacaaagtgtcaatgatttggtattccttgactggccaagagtgcagaagatttcttcaatggtggtga

SEQ ID NO: 4078 - DNA, 363 bp, Saccharomyces pastorianus
atgcaagaacgttacgtcgttgttgtatgcaacttgaagcctgttaacatgagaggtatcaagtccacggccatggtcttgtgtggttctaacgacgataaagtcgagtttgtggaaccaccaaaaggttccaaggctggtgacaaggtattctttgaaggattcggtgatgaagctccaatgaaacagttgaatccaaagaagaaaatctgggaacaattacaacctcatttcaccaccgatagcggtctggaggttatctttaaagacgaagaagaaaaagaccatccagtaagaaagttgactaacgccaagggcgaatcattcaaggttgccactattgctgatgctcaagtccgttaa

SEQ ID NO: 4079 - DNA, 384 bp, Saccharomyces pastorianus
atgacatccaccatttcagtctccattgccgccttcataatgggtatggcaatgaattataacaaaatgaatctgttaatagtattttcgttcatatacatgggggtcttcacgatggggttaaatttgttgccgttcataataatgagagaaatttccagccctcaagacatggtccttgctcaaagatacggcaccatctgcaattgggtaggaactttcatcgttgcatacactttcccgattattcacgacattctttcaggttatgtttttgtaatttttgctgtcacagctgcttcaatgagtgtctacatttggaaaagggtcccagagactaagaaacatggagcccactataatgacatacgggtcagtcattga

SEQ ID NO: 4080 - DNA, 351 bp, Saccharomyces pastorianus
atggccggtggtcaacatcatcacagaattaacatggataaataccatccaggttacttcggtaaggtcggtatgagatacttccacaagcaacaagctcatttctggaagccagtcttgaacttggacaaattgtggactttgatcccagaagacaagagagaccaatacttgaagtctgcttccaaggaatctgctccagtcattgacaccttggctgccggttacggtaagatcttaggtaagggtagaattccaaacgtcccagttatcgtcaaggccagatttgtctccaagttggctgaagaaaagatcagagctgctggtggtgttgttgaattgatcgcttaa

SEQ ID NO: 4081 - DNA, 741 bp, Saccharomyces pastorianus
atgtatataaacaaagggtttgagaagaaaacagataaacaaacaaataaaaagcaaaacatccttcaaaaatcaaaagatcgaaggaacagaatgactatgaacaatatttggaagccagaagaaaacattcctgcaaatattctagcggttctttcgaaacctcatcccaattatcagttagcgttcttaaacatcgttcaacttctgaaaacgcaaaggagaacaggttgggttgaccatgatatcgatccatgtgaaagtatatccgatcacatgtatagaatgggcttaacttccatgttgattacgaacaaagatatagatcgtaacaaatgtatcagaattgccctcgttcatgatttcgcggagtcacttgtgggtgacataactcctaacgaccccatgacgaaggaggagaaacatcgcagagagtttgaaactgtcaaatacttatgtgagactgtgattaaaccgtgtagtgaaactgcatcggaggaaatccttgatgattggttagcatacgaaaaacagacttgtttggaagggagatatgtcaaagatatcgataagtatgaaatgctggtacaatgttttgagtatgaacagaagtataatggtaagaaagatttggaacaattttggagcgccatcagtgacattaagacagaggaagtcaaaggatggacccagcgtctattagaagaccggaaagcattttttgatagtttgaaaaagtaa

SEQ ID NO: 4082 - DNA, 915 bp, Saccharomyces pastorianus
atggcaatatggcacgccattgtagggctgttgggcgagagaaaatatgcactaaacgttacaagctctctcattgaaccccaaaagggagaaaaggatttgaaagcgaaggttaatagagaagagttggctatcattcataatacaactataatatcccactcttgcaaacacatgatggctgaagtatctaatgatccacttttgacctatgttttgaacagcaaacagttaacaaatttagatcgtctacgaaagaaggcagttacaaaacaactggaattaagtgcggggcataagaattcagaggagttttcaaagtatcaaaatatctatcaaacagaagcattcgagtgtctacaaaataagcatgatacacacaaaataatggaatgtcagtacgaatcataccagagaaattgcaaaacaaaaagatacagtattgacctagactctgtacatgcaacagacgcgtatccacaagaggaagatccaaatggagatttccttgaaagaaacgaggacgatgaaggcgttagggaattgaggaaaaggttattaggaaaacagcaaagcaacaatttagggcatgactctgttaaatcagtagacaggcaaattgaagatcaagataacttacaacaagacttaattcaagatatgagtaaacttgttgggagcctgaagcagggtgccgtggcatttcaatcagcacttgatgaagataagcaagttcttggggccgcagaaattggtattcaagttgcatcgcaaggtctgatggacgttagtggtaaattgagaaaatatgacaagagcaaactgagttatctattttacatttcagttttcattttcatgatcctcggtttgatgctaacatttataataattcagctctttccagcgctctga

SEQ ID NO: 4083 - DNA, 831 bp, Saccharomyces pastorianus
atgtcaagagccatgggcactagtatagtagacgtaaataaaaacacggcgctacccccaatccaagctttgtttgagtcgttgaacatggaaaatgaactgaatgcaaagccgaacttcgaggagcgccggttataccaaactagccctttgtttattcctcgaacaaacagcacagttggttgtcaagttaacccagttccagtagcatcccctgtgttttttattggccactctccaatggcgattggccaaaacaacaacaacgctgctcttaatcagagcgtaccttcatttccggttttatacaaaactccggatattgcgtccaatggcgaaagagactatataattgctgttggagcgcctcccatatcttcgatggctgagtatgagcatccgcccgtctatagtcattatcaagatcagagacaaggtcaagcctaccctgtaaattcaaaccacacagtgataggcagctatgcgatgcctcagcctgttgggatttccagtaataaggtattttctagtagcacaaatagaaaagccgctgtcaggcccaatactaaaccatccgtaaaggaaaaaagaaacaagggccacgggaaaagatcaaatttacctggagctaccgttcatattttaaataaatggttactggagcacataaacaacccatatccaacccttcaggagaaaagagaactcttagcgcaaacaggtctcactaaactccaaatttcaaactggtttatcaacgctagaagaagaaaggtcttctctggccaaaatgatataaattgtttcaaaaggaagttcagctctccttaa

SEQ ID NO: 4084 - DNA, 1683 bp, Saccharomyces pastorianus
atgatgaatagatcgaatggaaaaatttgcagctctaccaacttacaaacttctttgaaatctttgacggataaaaggtatttagacaacaatgtgccgcaagagcatttggaagagtacttggaatctttgtgtataggggaaaacatcgaaggttttagttcttctgaaagtattaaacgtaatatgcctcaaaaatttaaccgatttttactttcacaactcataaaagaagaagcgcagactgtgaatcataacatcacactcaaccaatgtttcggtttggaaacagaaataagaacacattccgcctgtgatcactatgatacttccgttaaacttctgccatcattaccgatagctggaatcaacaaaagtgtaatcaagcaattgaataaaaagaataacggccaaaatattttaccgtatattgaatatgccatgaaaaattctattcaaaaaaacagcatctgtcctatctgtggcaaaaccgatatcataacacaggagaatacagttaagaacttgccctcagtgttatcgctggaactgtcattactggacactgagctgtctaatataagatcatccaagaattggttgatcaacgagttttatggaagcatcataaagaacaaggccattttgcgaccagcagcgtccgagttgaaaggcacgggtcatatattcaaatatgaattgaacggctatgtagccaaaatcaccgataacaataatgagacacgtctagtaacctacgtcagaaaatatgatttaagggaaaataacttcaaatggctcatgtttaatgattatctcgtagtcgaaatatcagaagaagaagcacttaagatgtcatatccttggaagacaccagaaataatcatatattgcgatgcggaagagcttcggaaacccttcttttctgtggatacgtattctatcaactatgatattctctatcgtgattattttgcaaatggaataagagataccgcaagatccgagtataagctcttgacacatgatgaagctcccaaatctggatccttggttgccattgatgccgagtttgtctcgttgcaaagcgaactatgcgaaattgatcatcaagggatcagaagtgttataagacctaaaaggacagcccttgccagaatatccattataaggggcgaagaaggggatttgtatggaacaccattcgttgatgattacgtggtaaatacaaaccacatagaagattacttaacaagatacagtggtattcttcccggtgatctagatcctgagaagagtactaaaagactcgtgaagaggaatgttgtatatcgaaaagtctggctgctgatgcagcttggctgtatatttgtcggacatggtttgaacaatgatttcaaacacatcaacattaatgttccaagaaatcaaattcgcgacaccgccatatacttcttgcaaggaaaaagatacctttcgttgcgttacctggcatacgtcttgttaggaatgaacatccaagaagggaatcatgattcaattgaggacgcctacactgccttaattctctacaagaagtatctcgacttgaagaggaaagctatttttgaaaaggtgttgaacagcgtatatgaagagggcagagcccataatttcaaagttccagaaacgtcaaagacatag

SEQ ID NO: 4085 - DNA, 177 bp, Saccharomyces pastorianus
atgtacgccgcaacgaataaatatgaagtaccaccagcgtatagtagactgccattgacgacaggcaggtttggtacggataactttgattttactccctttaataacactgaatattccggattagatccagacgtcgataaccattataccaatgctatcatacagttataccgt

SEQ ID NO: 4086 - DNA, 1353 bp, Saccharomyces pastorianus
atgaataattggcaacattttttcaacaaccctgttgatctttctgaacacttgaaaaagccgtattttcgttttgataacagagacaaggaagttactacaatcagcttcgatgaaaaggcaaatctggtatggagtggagatagctacggttgcatatcctcgtacgatccaaactttcaactttatacacgatataggggacacataggcggtagttccgtcaaggatattctcagtcatcgagatggtattttatctatcagcgaagattccttacattttgcaaatagaagaggtgttactaagctgaatttaacgagtatcgatattgctgcgtttagcgaattaaatactatgtgctacgcccctcattcgctacagaataacatttactgtggtggtgacaatacaaattggggcattgcctcaattgacttgaacaaaggttgcttggactcacttctgaattactcgtctaaagctaagttgcttcgctctaataataagatcttatctgttggaagacaaaccgggtctgtagatttgatagatccaacttctaatcgaacaatcaaatccttcaacgcccactctgcgtctatatccggaatggacttacgtgataataccttagttacagtaggaaaatccaaaagattttataacttatatgctgacccatttgtgaatgtctacgacctaagaacaatgcgtcaacttcctcctgtttctttttctaagggaactacaatggggtctggcggcgcagactttgttcaattacatcctttgcttcctactgttatgatcgttggctctagttctggttcttttgattttatcgatctttcaaatccaactttgagaacacagtacgttcacccttgtcagtcaatcaaagagttttctttatcacctaatggtgacgtattagggatactagaggctgataaccatctagacacatggaggagatcttcaaataatatggggatgtttaccaatactcctgaaatgctggcatatccagactacttcaatgatattaagtctgaaagccctatatcaatagacgacgaaacatatccattgagctcagtggggatgccttactatcttgataaattattatctgcatggcctcatgtagttttcaaaagtgaaggcactataccacagctatcaggtaagcctcctttaccatcaagcggtagactaaaaagtaacactgctgtaatttcaagtcaaaatgagaaattgagcacacaagaatttcccctgttacggtatgatcgtaccaaatatggaatgagaaacactgtgccggattatgtatgcttaagagattga

SEQ ID NO: 4087 - DNA, 723 bp, Saccharomyces pastorianus
atgcgttccattaagttgacaattgcaaataaatcacgcgatttgttgacattaagaaacgaggtagcagccatcgacaagaaaatggacaagcggatattgtttacacgctttgacataccaaaattgcgagatagtctcaaaattctagagtcattaacgggcgtacgttttctgaaattttcaaaagcgacactttcagtagagtttcttcaattggataatctgagagtagatgttaatttaacaacctttagaaacgatcctatcaagtctatgaatgtcattaatgataaaaaagcggactctactagttattattttttcagaatacttttgcagagtgttgagcctggagaccaagagaacgtattttccaacttgtttattgccatgaaaaagtggagcccattattaaagtatataaaattactgaagctcttgtttccagttaaaattgttgaaagcgaacatcatgaagcgcttctacaatttaaagattatgatagaaggaacaagaatgcagtcttttaccgcatatccttatcatcctttgcccagggaatattctcagaaaatgggcagattccgatgaaagttcgcataacttctcaacaagactattcgccatcacgggatgtactttccgatagaataattcacaaaataagtggaatcctcccttcattcactaaaagtagaatacatcttgaatttacataa

SEQ ID NO: 4088 - DNA, 1968 bp, Saccharomyces pastorianus
atgaaatttaaattagacgatggcggtggaagtgcaggaaaagataaagatgcgggcccagggaagggcattctcaaacagaactcgaactcacaaatgactgcgaactttctggaaagctcaggaatccgtattcccaccagaataatgacgaaaaaggacgtcctagatgggaacaatacgacatctaggatcaacacctctaatttgcaaagcaaagcaaatagaagagtttcttttgctcctgatgttacattgcacagttttacttttgtacctgaacaaagcaatgaagccaaagaacccagacgtaggaaaaccacgaataatagccccacgaaaaaatttagtcaagatgacccttttgtaacgtctactcaaatcgatgatgttcgaaggcaagaaaccgacgttaatgaagatgccgaggcctctggaatggagtttacagagcctctactgacaacacgcgattttaacaaggtttcgcaggacgatcttacttcaatggaaatgacagatattttcccccaaagtatgaggccagagggcctggatataggaggagacatgaatgagtcgtctcagcaagttgacgaagctgaaaacatacgggaagaaaccatggaattaactggcatacattatgtccacaatttaggtgacactttagaggagacggacgaaggagaacctatagaactcacggcctacgagactaacccgtttatttcaaatagtgctgtgaaatcctcaaaccatgacttggataaaagtgatggtgaagaaaaaggtgcaccgaaacctgaaaaccagatgaattcctctcagccgatggaaatgactgaagtgtttcatagcgacatacagggtgatgttcataccagtgatgatggtaatgagatggaactgacacaaattcaaacacgttctaatcatagaagtccccgcagccataatgaggaactttcctataagaagcatatggcaacgcccaacaaaaggcgtaagctggatgctgtttctcattatgcggtctctgttacgacaccagataaggagggggcggatgagaacgatttggagatgatggaaaagatgtcaccgatcacgtttagtgatgttgataataaggttgggactaaatcccattgtgcgcctataaccgaaagtgacgttaagaacgttgatattgaaattaataatgtttatccaaaagatgcggaaggcaagaatgaggacggcaataaagtgcctgaactaatagaacctccagaaactgacaaaaagacgcaagctgatatggtctttcccacacaagactattctttacgagagtttattgatgaagtgggagtagggtttttagacactaaactaatagacggcctggataagaaagttaactttccgctcaacaggtctaatctcacagagactcaacgaatagagaatgcattctctgcttactatatcgatatacccattttagaagtagaagcattcagatgtaaagagctttggagaagcgttaatgaatctaagaacaaattcaaggactttgaggcccaaattgatcaatctcatccccctcttttgctccaagagtatttttcttcaagtaatgaaataaagcagttaatgagggatcaacttcagttggttaaaggatactctaagttagaggcagcgatggaatggtacgaatggaggaaaaaacaactgaacgggttggaattggttctagcggaaaatttgagtattttgaaaggagaatgcgataagttaaatgaagaacttggaaaggtcaatgctataaaagacaaaatacgaaaacttaatgaatcaataacggaagagataagatctttgaaaaattcaccatctggctcttacaagccgactttaatgaacaggatcaaaattgaggcttttaagcgagaattaattaagcattccatatcttga

SEQ ID NO: 4089 - DNA, 99 bp, Saccharomyces pastorianus
atgggtgaaagtttcttggacagctaccctgatagtcctgcttcaacagccgtactcaacgtcgtggaagctcttcgagatgcagtaggggatatttag

SEQ ID NO: 4090 - DNA, 975 bp, Saccharomyces pastorianus
atgacggagatattgccacatgtaaatgatgaagtgctaccagcggagtatgaactgaatcaaccagaaccagagcattgtcctggtccagaatcagagatggcaggtaaatccgatgcctgcggtggttgttccaataaagacatttgtgaaagtcttccgaagggccctgatccggacattccattaattacagataatttatcaggaattgaacataaaatattagttctatctggtaagggtggtgttggtaaatcaacttttgctacaatgttgagttgggcactctcggctgacgaagacttacaagtaggtgctatggatctagatatatgcggaccctcactgccacatatgctgggttgtgttaatgagaccgtgcacgaatcgaattccggttggacacccgtctatgtagccgataacctagccaccatgtccatccaatatatgctcccagaagacgactcagctattatatggagaggttcgaaaaaaaacttgttgataaagaaatttttgaaagacgttgattgggatagactagattatttggtgatcgacactccgcctggaacgtccgatgaacacatatcaataaacaaatacatgaaggagtctggaatagatggtgcccttgtggtcactactcctcaagaagtggcactgctagacgtacgaaaagagatagatttctgtagaaaggctggcattaatattcttggattagtggagaatatgagtggatttgtatgtccaaactgtaaaggggaatctcaaatatttaagcctactacaggtggtggtgaagcgctttgtaaggaattgggaattcaatttttgggtccgttcccttggatccaaggattggcaagagttgcgacatgggtgaaagtttcttggacagctaccctgatagtcctgcttcaacagccgtactcaacgtcgtggaagctcttcgagatgcagtag

SEQ ID NO: 4091 - DNA, 432 bp, Saccharomyces pastorianus
atgaaattgtcttctgtgatttccactattgccctagccgccgtttctgtcgccgctgcttccagcgacgatgtcgccaaggtcccagccgaggccgttatcgggtacctggatctaggaggtgatcatgacatcgctgttctaccattcagcaattctactgccagtggcctattattcatcaatacgaccattgttgacgcggctcaaagggaagaaaatagtactttggcaaaaagagaagccgtcgccgatgcttggcactggctgaagttgagacctggtcaaccaatgtacaagagggatgctgaagcaaatgcagaagcagaagcttggcactggctgcaattgaggcctggccaaccaatgtacaaaagagaagctgacgcttggcattggttgcaactaaggccaggccaaccaatgtactaa

SEQ ID NO: 4092 - DNA, 303 bp, Saccharomyces pastorianus
atgactaaatggaacggtactattttgggcccgcctcacagtaatcatgaaaacaggatctattctctttccatagagtgtggcccaaactatccagattctccaccaaaggttacattcatttccaagataaatctaccatgtgtgaatcaaactacaggcgaggtccaaccggactttcacactctgcgtgactggaaaagggcatacaccatggaaaccctattacttgatcttagaaaggaaatggcaactccagctaataagaaattgcgccaaccaaaagaaggtgagaccttttaa

SEQ ID NO: 4093 - DNA, 1521 bp, Saccharomyces pastorianus
atggaaaggatgatgattatccacgtggaagcttcaaagatgataaattcccatccaaactattctacagaagagttcaatgagcttaccgaaatgaataagattgttcaagaccaagttcaatataccaaagaattagaagtagcgaacatgcaacaggctaatgagctgaaaaaattgaaacagtcgcaagatttctctaccttttggaaactagaaaatgaaaaattgcaaaataagctaaagcaattccacgtactagaaggccaatttgaagatttacaattagaaaacattgatttgaaatcgaaattaacgaactgggaaatttataatgataacgatgataacgatgatgataaggctaaaaataatctgcaaagtaatcccgaagagattattcgcgactggaaactgaccaaaaaggaatgcttaattttgacagacaaaaatgataaactaaggctagataataacaacttaaaacttctgaatgatgaaatggctttggagagaaatcaaatattagatttgaacaataattatgagaatagcatagtaaatctgaagagattaaaccacgaactagaacaacaaaagagcttgtcctttgaagaatgtcgattattgcgagaacagttagatgatttgtattctgcacagaataatgttttgtcagaaacaaatgattgtaaaactcatattccggacgcgaatttaaacgaagacatgaacaatttattggataactacaaaaataaaactgaagatctaacgagtgaattgaaaaaattaaacgatcagttgttatcaaattccaatgatgtggaaactcaaaggaaaaagaggaagttaacaaacgatcaaataggcttaaattattctcaaagacttaacgaattgcaacttgaaaatttaaacgtttcgagagaactaagtaaagcggaaactactatccatctattaaaaaaaaaattagaaaaattgaccagtttaaaggagaaaagaattcgcatattacaactgcgcgatggtccattcattagtgaccaatttatcaagaagaataaactacatctcttacagaaggaaaattcagacttattggagcaattgaaacagaaaaactctaacatcgaaacaataccaatttctgtctatgattcattgaacttcgaattgaaacaaattgagcaagaaacattcaagtcaaataagaggttttccaggcttaagcaggtctttaataaaaaatcattagagtttattgatgtcgtgaattcattactaggttttaaattggaattccagcaagatggtcgagttaagatattttcttgtttcaaacctgaaagacatttgattgctgacttaaacgaaaatactctgaaatcaaatcttgattcagatatagaaggctgggatgatctcatgaacttatgggttgaagatagaggtcaactcccctgttttttagcaactataacattgcgcctttgggaacagcaacagaccaaataa

SEQ ID NO: 4094 - DNA, 495 bp, Saccharomyces pastorianus
atgagcaatagcggtgggtcatctccatttctagaaagtcctaaaggttcacctagtatggacaataagagtatgcacaatgatggacaaggtaaccgtcagattcaagcgctgcaattcaaattaaacactttacaaaatgaatatgagattgaaaaattgcagttacagaagcagacgaatattctggaaaagaaatacaaggccacgattggtgaattagagaaatcattaaatgatacgaaatatctgtatgatagtaatgctaaattggaatacgaactacatggtttaaaggaaagcttaatcaagtctacaagcgacaaggacaaacttatacaggaattacaaacaactctgcaaaaaaaagatttaaacatggagaacttaaaacaggaatacgattccaagctatcgaaagtgacgaaccaatgtgaccatttcacgctggaatcggaaagctcacgttccctatcgaagaaatatgaaaatgaa

SEQ ID NO: 4095 - DNA, 669 bp, Saccharomyces pastorianus
atgtggaactactccatggcctcgacactaacaaaatcgcaatattcagggtacacaaaggccatcaataaaatgtcctcagatatccagaagcatcacatcgcaaaactaagtgatagaacaaacgacagcgatggagatgccttccataaagtcatcgaaccaacagttcagaagagggaggaccctgagacagtagcggctaggaatatcgaagtagcagccatgaaacccgttagaaaagcaaccacacccactcagaaagacgcctccttgtcatccaaaagcgtttctaatgctcggcctttaaacccaaagagtgtactgggcactagaggcttttcaacaagcacactcaaccctccaccacagacaacaccaagtgaaaccacttccaaggtcagaggtgaaatcgcttttagcgggactccacacaccaagtttgatgatgaattcaacgaatttcaatctttttcaagcacgggcaccacgcatcgaagtccctcgtcacccaatgtctggacgaccagcactccgagtcccgtcccaacgtctacaagcaataacaacctgccacctgggttttcgatttctttgcaaccaaacaaaaaaaaggaaagctcaactgaaattccctctaataataatacgtacggttccttaatatag

SEQ ID NO: 4096 - DNA, 1668 bp, Saccharomyces pastorianus
atgatgttttggtcctcaaagacaggcatcacgtccaagtactccttctcatcatcaccaacttttactgctgaaccatggagcgtttataccggtcgtcccaaatcgtcgtcttcatcatcgccttctaaagtgtcaatattcatgttcgacaagaaacagttcgagaactatttattgcattacaatatcatcaaatccaaatctggatccagagataaagtactcatacaagaagcttatgaaatattaagaaaccaggctaacaatctggcaaggctcaaacacccgaatattttgacactaattgaaccgttagaagaacacagcaagaattttatgtttgttactgagtttgtcaccggctcgttggagaccgtgtttagagagactgatgacgaagagaaaaacttcttgcaaggccatgttaaggataatattgtggttcaacgaggaatattgcaactagtgaatgcccttgactttattcataaccgtgcaagcttcgttgacttaaacattcaacctagggcaattttcataaatgaaaactcagactggaaaatttccggcttgggctacttggtgaagataccaccgggaacaaacacctctgaatattttctaccacaatatgatccaagagtacccccctttatgcatttgcaattgaattatacagctccagagattatatttgagaacaccctggcatacaaaaatgactatttttcattaggttcgctgatatattttctgtatagtggtaaagatttatttcgaaccgagaattcaaccaccgaatacaaatcggaatacagtaaattcgaaaaaaaaatcaataccatgtcatgggataatatctttaataagattccaccaaaattgagacattgtttgccgaaactgatgaacagagatatttattccaggtacgataatataacgttaattttggactccgagtttttccaggaccctttaataaagactttgaattttttagatgatttgcccacgaagaataatgaagaaaagtatgtttttctagaaggtctaataaacttactaccagactttcccccagcgttgttacaaaagaaattcctgccaattttattggaattgttgaaccagttctgtgcagaaaaaatagtaaacgataaatgtgtaaacaaaaatttggatttaatagttaagatagggtccactttatctcaactatcctttcaagagaagatttatccaattttactaagtgctacgaatttcccaatccttcttagaaaagccaccgtttgcttgatcgatagtttagatacgttaaagcaaaaagtcaaacgttctgatttcttggagagcgtactaaaaccactatttagctatgtcttacaggactcagaaagtgaggttgctttgatatcacaagaaaaacttctattgcaaatcccgttagctttagaggtgctagattttcccactgtaaaacagttcttgttaccgttgctttcagggctatttaccaagacaaccagtttaacagtgaaaaacacatgtgtgacatgtttccaaattatgatagagcagaaatccatcgattcttacacgtgctcggacactattcttcctttgttcaaatcgatgaaaactagagatccaagaatttaa

SEQ ID NO: 4097 - DNA, 978 bp, Saccharomyces pastorianus
atgagagcagataataagataatgggagatacaagaacctttgttttcgccatagaggatacagaaaccacacaaggtctatgtaaaataattggtcgatccagtcgtaatgataagaagaggctgagtgggccaaataatctttatttcgatgaacctgaattagggaagagacatgccatgttatgtatcaagacaccaaaaccaaaaattcaaagtgttccttccatagaacaaatacgaatctgtattcgagacttggatagtgaaagtggtattgttaatttagaatctgatggaccacatgatgaagtcgatttaaaaagtggcgatatatttggcttgattgcagttgttaaccgctctttacacgatagccaaaatttagccgccaagttgatttttcaaatcaaactcgagtattttgatgaggaaagggaactaatcaggtgcactattgcaaatgtaacatttcggaacaattccgtattgccctcttccccggtttattcaaaacttgcggacgatagtgaatcaagttggtatggtctatctgaagctagtattcaaactggaagtattcaggagtgttgcgagactggggctataaagactcgaggaggcaggttttccgtccttaaattaagggaagaagacagcaaatcgcaccagaaggctgatggtagccttagagggaagcttttgcaaacaaactctttccaagaagaaaccaatacagataccacagaaaaagaagaagaagaggacagaaagaaggtagaagaagaagaagaagtggaagaggacttagaatttgaaatcattagagtaaaaaagataagaagcagggccaagacggaatacatgctcatttcctcttctaaaatcaagagaaatgcgacttcacctggacaatccaacagcgcgtggatattactaataatcatcctgattctagatcgcctactgtcaaattag

SEQ ID NO: 4098 - DNA, 1695 bp, Saccharomyces pastorianus
  modified_base (794)..(862): a, c, g, t, unknown, or other
atgagtgggagcggtgtttcattggacagtactgcaggtgtcaacagcaacaacagcagtaacagttttttcaataacagtcatttgttgcagggaaaaacgctaaggttaatgaatgaagcagccttgggagataagaatgatgttactgcaattttgggtgaactagagcagataaagtataatcaaattgcgatttccaaagatttgttaagaataaacaaggataatgaattgttgtggaaggagaacatgatggcaagagaaagacacagaacacaacaacaagctctagagaaaatgttccgatttctaacatccatagtaccacacttggatccaaaaatgatcatggatgggcttggcgatccaaaaaccaataatgaaaacctcaatagcacgaataatatcgggctaaatcacgacaatacaggcactatagatgaacttcagtccaacgactccttcataaacgatgaccataattcatacatcaacgctgcggccaactcccgtaataacatgggcaccaataatgacgttgacagcaacaagagcggtagcatcaatactagtaatagaaagagaaatgtagacgaaagtatcaaacacaacaacgacatactaaatgacattatattcaacactaacctcgccaataatctcacaaactacaattcaagcaataatgctggctcaccattgagaccatacaaacaaagataccttttgaaaaatagagcaaattcggcgacgtccagtgaaactccaagcctagcaccattcgatctcgnnnnnnnnnnnnnnnnnnnnnnnnnnnnnnnnnnnnnnnnnnnnnnnnnnnnnnnnnnnnnnnnnnnnncagagattccgtttgacgacgaagatgaagaaacaaacttcaagaatttctctacacgaaatcccgccagtcaagtgaacgaaaacgcctttgatccaagcaggtttacgatgctttctgatgaagatctgaagaaggactcgcatgcccatagcatcgcagatgacaataagcacaatgaaagcgatctattcctggataacgtgcatcgcaatatagacgaacaagatgcgaggcttcagaacttggaaaacatggttcatatactctcaccagggtatcctaataaaccgtacagcaagaacccccccacagcgcactccaattctaatatagagattaataccaatgtcaatagccctggtttcaatttgcaggattacttaacgggagaatccaactctcccaattctgttcattctatcccttcgaacactggcgggtctaccccattgcccatgcctactgacaacgacaacgaacacgggagtgccagtgccagcgccagtgcaggcagaagcggaagtggactgacgtctttcctggcggtagacgaccacaccctaaacgacgacaatgacggcggtggcaccagcgcgtcccccgatataaaatttggcgccacacacagcagcaaaacaagcgataccctgccaagctttaatgaccacggtagtcccgcccagatggctaggcctactgagaacgctaagaagagatacgtggaggaaataccggagccggctatcgtcgagatccaagacccggccgagtacaacgaccagcgccagctcaaacgagccaagaagtcgcacacagacccaggtcactaa

SEQ ID NO: 4099 - DNA, 828 bp, Saccharomyces pastorianus
atgaacaatattgcaaatactggggcgaccaatgagtcaaacatcagcgatgcttcccgtatagagtctttaccaagcttgaatgatgacgacattgagaaaatcttacaaccgaatgatattttcaccaatgatcgtaccgaggggagcactacgtcctccactgctattgaagatatcattaatccatccctggatccgcaaattggaacgtcaccggctccctctccttcctttttcaatgactcaaggaagccatccactagcacacatctagtaaggaggggcacaccattgggaatcttccaaaccaacctatacaaccacaataacagagagaatagcaattccaataatactttgttgtcttctaagctactcacgcatccaccggttccttacggccaaacccccaatctattgcaacaacattccgtatatagggcgccagcttctagtggagctactaacgtacagccccgccaagccacgagaagatatcagtcgcacaagtcgagacctgcttttgttaataagttatggagcatgctaaatgatgattccaatacaaaactaatacagtgggcattagacgggaaatcttttattgttacaaacagagaggaattcgttcatgaaattttacccaagtattttaaacattcaaacttcgcttcttttgttaggcaactaaacatgtatggatggcataaagttcaagatgtcaagtcaggttccattcaaagtagttcagacgataaatggcaatttgagaacgaaaatttcatcagagacagagaagatttgctggaaaaaatcatcagataa

SEQ ID NO: 4100 - DNA, 123 bp, Saccharomyces pastorianus
atggtgattggggtggttaacgctggtgtaatgcgcgttttcatccagatagaggaggatctcttcgctagtatacttagggacatgctgtgtgcttgtgtgactggtcttgtttgttgctaa

SEQ ID NO: 4101 - DNA, 342 bp, Saccharomyces pastorianus
atgttttctttcaagacctttggagcagcctcgacgaatttcttagcttcaactagtgagagacctagtaaacctttgacttctttgatgactttagccttggtctttgcgtcgaaagaatccaacttcacagtgaacacagttttggcctccggcttggcttcttcttcagcaccggcacctgcttcaccagctgagcctgctgcgttaccagcaccgacaccggcacctcctgccataaatccgcccataggcatggtcatctctgggatgtttaatgcagtcttcaattcggtaatcaaactagaggtttccaaaagagtcaattgtgagatatcctga

SEQ ID NO: 4102 - DNA, 1515 bp, Saccharomyces pastorianus
atgagtggtaacgatagaaagatcaagatagctttcattcacccggatcttggtatcggcggtgcagaaaggttagttgtcgatgccgcgttgggtttgcaacaacaaggtcataacgtcaccatttacaccagccattgtgacaaatcgcattgtttcgaagaaatcaaaagcggtcaattgaaagtcgaggtctatggtgatttcttgccaacacactttctaggccgtttctttattgtttttgccacaatcagacaactttatttagtaatgcaattaatctttaacaaaaaagtgaatgcctaccaactatttataatcgatcagctatcgacgtgcatcccacttttgcatatatttagttctgccactttgatgttttattgccatttccctgatcaattattggctcaaagaactgggttattgaagaaattatatagacttccatttgatctaatagaacagttttcaataagcgctgcggatactgtcgtcgtgaattcaaatttcacaaagaacacctatcacaaaacatttaactttttatccaatgatccagacgttatttatccatgtgtagatttatcacccatggaaatagaaggtattgataaagaattcatcaagactatactaaatgaaggtgatagattttatttgagtataaaccgttttgaaaagaaaaaggatattgcgttggccataaaggcctttgcactatctgaagaccaaagtaatgaaaacgttaaattggttatttgcggtggctatgatgaaagagtcgctgaaaatgtggaataccttaaggaactgcaaggtttggccgacgaatatgagttgtctcacacaaccgtgtattaccaagaaataaagcgcgcttctgatttagaatcattcaaagccagccatacaaaaatcatatttttgacctccatttcatcatccttgaaggacttattgttggaaaaaacagacatgttattgtatacacctgcatatgaacattttggtatagttccgttagaagcaatgaaattggggaagccagtactggctgtaaataatggcggtccattggagactatcgagccgtatgtcgctggcgaaaatgaagcacacgccacggggtggctaaggcctgctgttcccattcaatgggctactgccattgaccaaagcaggcaggttttgaaaaatgacaaggtggacttcaagaagagtggtccattgagagttaaaaaatacttttctagagaagcaatgacccagtcatttgaagaaaacattgataaagtcatatggaaggaaaagaaatattacccttgggaaatgcttggagtttcgctctttaatttcctcttgcacatgacatttataagggtcctccctaatgatccatggcccttcctggttatggctgccgttatggtattttattttaagaactacttatggggtatttactgggggtttatatttgctttgtcatatccttatgaagaagtgtaa

SEQ ID NO: 4103 - DNA, 1746 bp, Saccharomyces pastorianus
atggttaacaacggcttcagtgcagcttcccagcttgaaacaaagctgataagcccaatggcacttgtatttaatttagcggctttgccacgatggagtagtcccgttgtgcttaggatggggctgcgctcttatgctgggggccccagaacaaagcataaaaagttctccccacagcctccagtgcccgcaagcaatggtaacaagaacaggaaacagaataaaaggggcaggaagaatgatgccaaggccaagactgaacaggcgtttaactttggtcagtacggagggttgaaaaaagacgtcgacgtcgacgttaatacgaccggtaaactcattcagaaaatatcaaatttcgaccaattgctcatattgccatctgtcagggatgctatgaaagaaatcatctctaaggagtcgttgaaaatccaggacaacaacactaagaacaccagcgagaacatcataccgagtcccatccaagcggtggccattaagaaaatctccaagactttgatgagccccaaattacaactgcatgccatcgccgcagaaaccggctcaggcaagaccatggcctacttgatacctttgatagattatttgaagagacaggagctggaaacgccggaactgtgggagacactcaaagaaaaagctttgatcaggtccattatactagtgcccacgcacgaattagtggaccaagtgtatgaaaccgtctccaagacaaactcctcattggggctgaactccttcaaatgggacaagaccacctcgtaccgcgacctattggaccacatcaaaaacagaatagacattctggtcaccactccggcaaagctactgaacctgttcagcattaggatgatctctaggcccgacaaaatactgtccaaagtggggtttgtggtattagatgaagctgacacccttttggatagatcctggcttgaagaaacccactccgccataaagaaaattcccaacatcaatcaccttatcttttgctccgccaccattcctcaagaattcaacaagacaatgcaaagacttttccccacggtggtccccatcatgacgcctagattgcataaactgccgttcggtctggattttaaagttataaactctgcattgagccccttcaagggttccaagattaaggcgttggcgcaaactctctacgccatttccaacgatgacactgaacccgggtttgagaaaagatgtgttatctttgtcaatgagaaaaaggatgtccctgaaatcatcgatactttaaatagcaagttcggacataatgccgtcggtctaactggtgatgatacaaccgaagaaagatctgaaaaaatcactccctttctgtcttcaccaagaccaatctcgcagttaaggcctccagagccgtctccagagccccccttgaagcgactggaaattcctgattccaacatcgtcattggtgaattgaaaaaggcaaattcagatgccattatacccaaaaagaagtccctgcacgtgcttgtagctacagacctaatggccagaggcctcaacttcaaaggcgtacggaacgttgttctctacgacgtgccgaaaacatccatcgatctgatacacagagtgggcagaactgctcgaatgaaacaaggtggtcgtgtgtttatgctgattgacaataggacaaaatcttgggctaaagcccttccaaaaattatcaagaaacaccaaaggttatcataa

SEQ ID NO: 4104 - DNA, 1197 bp, Saccharomyces pastorianus
atgaaagcaacacagtttactaacagaccaccctacaccagcaccagcacaagcacaagcaaagagagtgcgcccacgcccgcggtcaagaggaggcccagcaagcacaaggtcgctatgcttgtcggctaccgtgggggcggatactacggaatgcagtacaaccccccgcacaaaaccatcgagggcgagatactcgccaagctattcgacgtgggcgccatttctgagcacaactcaacgtcgccgaagaaaaactcattcatggccgcggcaagaacagacaagggcgtgcatgccgtggtaaatctgttgtcgctgaagatctcactgcagcaagacacggttgcgagactgaacgccgcactgccgcccgagatccgcgtgtggggtatccagccgaccaataagaagttcaacgcccgctcggcatgcgactcccgctggtacgaatacctgatcccggactttgtgctcgtggggcctccacagggctctgccttgcatcaaaacgtggggggatgttactgcgacgacggttcgcaggacgtgtgggatgcatttggggggcaggtgcgagacagattcggcgcgcaaccagatgaggacgagcctttaacgcgcgactacgtggatctcttgagcaccgccctcggcggctaccgcccgccgagggcaaagctgctcgctctcgaggccgcgatgcagcagtacgtgggtacgcacaacttccacaacttcaccacgggcaagcttgccgctgatccgagcgccaagcggtacatcaaggaagtcgtagtagcaccggccgcaccgcagtggacaagcgtgcggatccacggccagtcgttcatgctgcaccagatccggcggatggtggcacttgcggtgctggtcgctcgctgtcagttgccgcccagtgtcgtgcgcgaccacctcgtcgccgcgacaaggaaacacatcccgagggctcccgctgcaggcctgctgctggagggtcccgtgttcgcgcagtacaacagcaagctgcgccggctgttgtaccgcgaaattcgcccggacagcgaggccgtcgagcacatgcgccgcttccgggaatgccagatctacactgcggtggcgcgcgaagaaacgcagcgtcacgtgttttgccactttgtacgacgcacgaatcgtctggccgcgccgctaatctag

SEQ ID NO: 4105 - DNA, 138 bp, Saccharomyces pastorianus
atgaaaatggaaatgatcatctcttctccatcagacggccaagtcaaagaagtctttgtcaccgatggtgaaaatgtggactcttccgatttgttggtcttattggaagatgaaattcccgctgagactaaggcttga

SEQ ID NO: 4106 - DNA, 3372 bp, Saccharomyces pastorianus
atgtcgcaaatgaaattcgccggcctaagagataactttaatctcttgggtgagaaaaataagatcctggtggccaacagaggagaaatccccattagaatcttccgtactgctcatgaactgtccatgcagaccgtagctatatattcgcatgaagatcgtctctccacacacaagcaaaaggcggacgaagcatatgtgattggtgaagcgggccagtatacccccgtgggcgcttacttggccattgatgagattatctcgattgcccagagacaccaagtggattttatccatccaggttacgggttcttgtctgaaaactcggaatttgccgacaaagtggcgaaggcaggcatcacgtggattggcccaccagcggaagtcattgactccgtgggagacaaggtctcggccagaaacctggctgcgaaggcccatgtgcccaccgtccccggtactccgggccccatcgagaccgtgcaagaagcacaggacttcgtcgataaatatggctaccccgtcatcatcaaggccgcctttggcggtggtggtagaggtatgagagtggtgagagaaggtgacgacgttggcgatgcgttccagcgtgccacatccgaggcccgcaccgccttcggcaacggtacctgtttcgtggagagattcctggacaggccaaaacatatcgaagtccaattgctggccgataaccacggtaacgtggttcatcttttcgaaagagactgttccgtgcaaagaagacaccagaaggtggttgaagtcgctccagcaaagaccttgcctcgcgaagtccgtgacgccattctcacagacgctgtcaggttggcaaaggaatgtggctatagaaacgccggtactgccgagttcttggtcgacaaccaaaacagacattatttcatcgaaatcaacccaagaatccaagtcgagcacaccatcaccgaagaaatcacaggcatagacattgtagccgcccagatccagatcgctgccggtgcctctttgccccaattgggcttgtttcaagacaagatcaccacccgtggctttgccatccaatgtcgtatcaccacagaagaccctgccaagaatttccaacccgacaccggtagaatagaagtctaccgctccgccggtggtaacggtgtcagactggacggtggtaatgcatacgcggggacgatcatctcgccccattacgattccatgctggtcaaatgttcatgttccggttccacttacgaaatcgttcgtagaaaaatgatccgtgccttgatcgaattcagaatcagaggtgtcaagaccaacattcccttccttttgacccttttgacacacccggttttcattgacggtagctactggacaacgttcatcgatgataccccacaactgttccaaatggtctcttccaaaaacagagcccaaaagttgctgcactatctagctgatttggctgtcaatggttcctctatcaagggccaaattggtttgcccaagttgaagtcgaaccctagtgtccctcacatacacgattctaagggcaacgttatcgacgttgtgaagactgctccaccttccggatggagacaagtgctactggaaaagggaccagctgagtttgccaaacaagtaagacaattcagcggtaccctattgatggataccacttggagagacgctcatcaatccttgttggccacaagagtcagaacccatgatctggccacaatcgctccaactaccgcccatgccctagcaggcgcctttgctttagaatgttggggtggtgccacttttgatgtcgctatgagattcttgcatgaagatccgtgggaacgtttaagaaaattaagaaccttggtgcccaacattccattccaaatgttgttgcgtggtgccaatggtgtcgcctactcctccttaccagataacgccattgaccatttcgtcaagcaagccaaggacaacggtgttgacatcttcagagtcttcgatgccttgaatgacttggaccaactaaaggtcggtgtagatgccgtcaagaaggccggtggtgtcgtggaagccacagtctgcttttccggtgatatgcttcaaccaggtaagaaatataaccttgactactatttggagattgctgaaaaaatcgttcaaatgggtactcatatcttaggtatcaaggatatggcaggaaccatgaagccagccgccgctaaactgttgataggatctattagggctaaataccctgatcttccaatccatgtccatacacatgattcggctggtacagctgttgcatctatggctgcatgtgcgcttgcaggtgctgatgttgttgatgtagccatcaactcgatgtctggtttgacctcccaaccatccatcaacgctttgctagcttctttggaaggtaacattgacacaggtatcaacgttgaacaagtccgtgaattagacgcctactgggctgaaatgagattgctatattcgtgctttgaagctgatttgaagggtccagatccagaagtttaccaacatgaaattccaggtggtcaattgactaacttgttattccaagctcaacaattgggtcttggtgaacaatgggccgaaactaagagagcctacagagaagctaactacctgttaggcgatatcgttaaggtcaccccaacttccaaggttgttggtgacttggcccaattcatggtttcaaacaagctaaactcagatgacgtcaaacgtctagctaactctttggatttccctgactctgttatggacttctttgaaggtttgatcggtcaaccatacggcggattcccagaaccattaagatctgatgtgctaagaaacaagagaagaaagttgacatgtcgtccaggtttggagttagagtcatttgatctggaaaaaattagagaagatttacaaaacagatttggcgatgtagacgaatgtgacgttgcctcttacaatatgtatccaagagtttatgaagacttccaaaagatgaaagagaaatacggtgacttgtcagtactaccaaccaaatgtttcttgtctccgctagatacagatgaagaaatcgaagttattatcgaacaaggtaaaactttgatcatcaagttacaagctgtcggtgacttaaacaagaaaaccggtgaaagggaagtctactttgacttgaatggtgaaatgagaaaaatccgcgttgctgatagatcacagaagatcgaaactgtcacccaatcaaaggcggacatccacgatccattgcacattggttggtcaactggtgggtgtcagtcgtggaggatagtagttcttaatggcgctctggtgtag

SEQ ID NO: 4107 - DNA, 681 bp, Saccharomyces pastorianus
atggtaactacttcatcttgctctggtagagttagtgtgtttttggaaggtacaaagtcatataatggagaggtgaagataggcggtaaaggtcaaggtggcaagtggctatatgtcactcacgaccatgaaaaggttgttggctggctggacgagttgatgtcaaagaatgagtatgctcttgaaacatgtggcaagcatataccatccgaacaaattacgggaactactagatatattttgtataaatatgagccgttcatattgcatgtcaaatgtagagacttccagatagcttcgaagctctataacgctgcaatgtcttgtggcttcagagaaagtgggattgggtcaaataatctcgttgcaattagaataaacattaaactggatgtgccaatcggctatttggatgagagttcagaaactttgatgttgtttgttagcccagaatatgtaagtattttggattctttatcgttaagcaaatttgatgagaatgctagaaaaatgcaaacattatatgataaaatcgacaatgaacttataaactgcataccggctccaaataccaagactaaagtagcattagctgaaacaaaagaagaaagaagagaacgaaaaaaaaaggaaggtatggaaagacaacgtcaattaaaaagcacacaaaatcaactctaa

SEQ ID NO: 4108 - DNA, 858 bp, Saccharomyces pastorianus
atgttgcataaggtccttgagaataaggcggacccgctggtttcattaatgatggtagagaaggttcctgattcgacgtatgacatggtttttgggttaacaaaacaaatcaaagaaatcaaagaagtcattgaactgcccgtaaaacacccggaactgtttgaaagtctgggtattgctcatccaaaaggtgtcatcctatatggtccacccggtacagggaaaaccttgttggcaagagccgtcgctcatcacaccgactgtaagttcatcagagtcagtggtgccgaactggtccagaagtatatcggtgagggttcccgtatggttcgtgaactgtttgtgatggccagagaacatgctccttccattatcttcatggatgaaatcgattcgatcgggtccacccgtgtggagggctctggtggtggtgattccgaagtccaaagaacaatgttggagttgctaaaccagttagatgggttcgaaacctccaagaatatcaaaatcatcatggccacaaacagattggatatcttagatccagtgcttttaagaccaggtagaatagatagaaagatcgagttccctcctccaagtgtcgcagctagagctgaaatcttaagaatccactctagaaaaatgaacttgacccgtggtatcaacctaaggaaagttgctgaaaagatgaacggttgttctggtgccgatgttaaaggtgtgtgtacagaagctggtatgtttgccctaagagaaagaagaatacacgtcacccaagaggatttcgaattggctgtcggcaaggttatgaacaagaaccaagaaacagccatttctgtcgcaaagttgttcaagtga

SEQ ID NO: 4109 - DNA, 162 bp, Saccharomyces pastorianus
atgacagctgccgtaacctcctcgaaaatgatactggaaacccacgaaagtggtatcaagccttattttgaacaaaagatccaagagacagacataaagatccgctccaaaacagagaactgtgcgccgactagaggctcaccgaaatgcattgaacgataa

SEQ ID NO: 4110 - DNA, 1539 bp, Saccharomyces pastorianus
atgctggcccataacaacgtccggcaatttcgcattgacataaacgagccgcacagtgtgtggaagcccgatgaatgcataaccggtgagacagtcatcgacatcaagagagacatcactaatgtggccattaagctctctctggtgtgtgaggtacgagtgaagaccggcaatagtccaacctccaagaataaaagagtagagaagattttagaaaagtcaacctttctttacgggcaagagtacataaaggcagctcccgcggagaaaaaaccggccatcgacaagtctaccgttctcaacggtctaagcaagggcgaacacagattccccttcagaataaaaataccaaggggcaagggcatgttgagctccatcaaattcgaaagaggctccatcgcatacttcctgaactgcaccttggagtcccttaataacgttaatgctctgaaaaaaccagaggcgaggtgcgaacgtgagttctcggtcatagtgcccttggacgtctcgaggctgcccaaacagaagaccaagacggtggtgctgcagtccgcatccatggtccaaaacaaaaagggcaaatcctcggaggacgcatcctcctcctacacacaattaacccataagtccaacaattccaattcttccagcagtacggtaaactcctccaagacatcctccccaccaaacaaaacagtgaccatatccgtcgacataccgcacgccgggttcgtgatcggcgagacgatccccatcgacgtgaagatcgaacactataaacccttctaccacccagcgggcctcaccaccaccttggtgagaatctgcagggtgggcggtgcgggcaaagacgaccccatggagacttttagaaaggacatctgccagagtatctcccctatatacatcaatcctgaaacgctccagttccagcccagaattcatttgaaagtgcccctagacgcattttcgacactcacctccgtgagcaagttcttctccttccaatactacatcgaagtcatggtcaatttgtccaagaaaaacgtggtctatacggaatccaacagggtagtaggaacccccgtcgaggagcagaacggctcgggcgtagaacacaacatcaaccgcattcaaaggaaaatgctacgcatggtcaatccagaaactttggaaaacgtctccgagggctatgaatccagtatattcttcaaagacatggtcaacgtagaaaaactgaaaaggctcagaaacgtcacaggcatgtccatcgaaactgtcataggaacgacaagatccgagcagcaacagtacgatacgaacctccctcgccagcccgccaccactaccgcgcaagatccagtaccggacttgagagactggctagccccactgaatgcatacgaatgcgacgatgtccccgttccaaagtattcccccaatgatagagttaacgtagcgtcggaagacaagcaggagctggagcaaaaaagactacaacaactagaaagtgaccctccgtcctgtgatgactattag

SEQ ID NO: 4111 - DNA, 99 bp, Saccharomyces pastorianus
atgcttcacaagtacagaaagtggttaatggttcatccgcggatcttgtttgcaattggtagtaggacaccttcttttctttacatttaccacatgtaa

SEQ ID NO: 4112 - DNA, 465 bp, Saccharomyces pastorianus
atgttgagaggattatggaaacaaggttttggcgtcgctcgttcgatgaaattctcgaatggacccatcactaattacacccagagtttgaggagaacttctccagtatatgctaaaagaaactatgctcagtcttgggacaacaggcaacctaacgacaagatcgatgcgcacatcaaagttcaaaaactcatggacgaaataaactcaaagcctaacgttctggagaaactagaagaggttagtaacataatgatcgagaaaaaacttgttaatttagatgggacttctgccactgaagagaacacgatgaagccatggcaaatgatcaagattctaatggacaaagatttaaggcatgcaatgaaggaattcaaatcagagctgcaaaaatctggcattcaattaggaccggaccaattaggaccattaatgaccgttttaggattggaaaagaaaaaataa

SEQ ID NO: 4113 - DNA, 138 bp, Saccharomyces pastorianus
atgttgtccaagactaaggtctactacttccaaggtggtaacaacgaattgggtactgccgtcggtaagttattcagagtcggtgttgtctctattttggaagctggtgactctgatatcttgaccactttggcttaa

SEQ ID NO: 4114 - DNA, 105 bp, Saccharomyces pastorianus
atggacctggatgttacaattttatcgacttataatgattactggaaagaacctggtcaatacggtatcgaacaatcattcggtgtcattgaatatctgccataa

SEQ ID NO: 4115 - DNA, 558 bp, Saccharomyces pastorianus
atgatttcagctacagagtttctatcatcgctattatgcttaacctatctagcctctgctctgccagtcctgcccaagagagaaattgtaacaagagtccacacagcaagcacaactaacgtagtaacagatttctactctactaccactcaggttattgttgcccccaccgttgaattcttaatcagcgatagtgttaccttcaccacaactttaattccagaaggtgtcaacccaaccgctgaaccaactacgactatcactaaagttctcgtaaaaaaggttcaagaaactacgcccgctctgcaaccaacctctactttgcaaccaacttctactttgcaactagcttctacacaacaaattaacgactccccttccagtacaacttcaaccgaaaacgcacagcaaccaagtactacttccgcttccacttctacacaaaacatggtcagcggtgttggtgaaattaatgtcgcaggtgattcgcaaacccaacatcattctcatcaagctgctgcgacaactgatgtgaaccaacaaacaacgacgacttcc

SEQ ID NO: 4116 - DNA, 705 bp, Saccharomyces pastorianus
atgatgattaccctagagcgcaaccacctgatgtcgcagaagagaatggtagatgccttggcatgggtgggggtgatgacaaggtccatgaaacaaatcggtcatgttctaaagttgacagacgacgagacaaaatacgcagagattgaacacaatgtaatcgaaaatttagacttacttcattggagtgagaaggacaattgctactgtgacatcagcatcgatttcgaagatgaagaaattaaagaattcgtgtgccatgagggttatatctctttgttgccatttgcattaaagcttatccccaaagactcgcccaaactggggaaaattgttgccttgatgagtgactcaaacaaaatattttccgaattcgggctgctgtcgttatcaagacaagacgaatattttggtaaggacgaaaattactggagagggccagtttggatgaacatcaattacttgtgccttgatgcaatgagatactactaccctgaggtcactcttggcgtggctggtgaggctagtgatgccaagaagctgtaccaaagcttaaagactaatctcagtaacaacgtctataaagtttggaaagaacaggggtactgttatgaaaactacagtcccgtagacggtcacggtacgggcgctgagcatttcactggttggacagcactggttgtgaacattctgggccgtttttga

SEQ ID NO: 4117 - DNA, 1401 bp, Saccharomyces pastorianus
atgtttaattcaagattaaagttgcttagggtattctgggtagttgctaatatagctctcctggtatctggaaccgtcaatgttgataaattggaagaattcgaagaataccaaaagtttacgaatgagtccctattatgggcaccttacagatcgaattgttactttggcattacacctagatatgtcaacgaaagcccgctagtgatgggtattatgtggtttaacagtttgaaccaggacggattgcagtcattaagacattttgctacacctcaagataaattacaaaagtacggctgggaagtttatgatccaagaattggtggcaaagagatctttattgatgaaaaaaataatttgaacctaactgtgtattttgtaaagagcaggaatggggaaaattggtcagtaagagttcacggtgaacctttggaccctcagctaccttccacggcctctatagtattgtatttcagccaaaatggtggtgaaatagacggaaagtcttcattagcattgatagatcaggatggtcccaatgatttgaaatttttcggctattctcaagaattgggagagtatgatctgacggtgagggacaactttggtcaatatttcaacaatccggcacatgacactatggaagtagcaccaggaagtgactgttccaagacaagtcatttatctcttcaagtcccaggtagtgaagtttggaaagctcgcgatatttttcagtctctggtaagcgattctatacgtgatatacttgaaaccgaagacaagcaagaacgtccagctgatttgataccgagtattttgaccattagaaatatatataacttcaaccctgggaattttcattatgtacaaaagacatttgatttgtccaaagagggggggtttgagtttgataccacatataataagcttgaaacaactcagagtatttccactagggaacaaatcacagaattgatcacatggtcactaaacgaaataaatgcacgctttgacaaaaagtttaattttgaacaagggtccgatttaatcgggagtgttgatgataagaggaaatttgccttggaaacactatcaaacctgttaggagggattggctacttccatgggaagcaactaattgatcgtgaaaccgagttcgacgagagtcaatttgccgagataaaattgctgaatgcaaaagaggagggtccattcgatttatttaccagcattccgagccgtgggttttttccacgtggattctactgggacgaaggtttccatcttttacaaattatggaatacgatttcgatcttgcctttgaaatattgactagctggtttgaaatgattgacgacgatagcgggtggattgctagagaaattatcatggggtga

SEQ ID NO: 4118 - DNA, 2169 bp, Saccharomyces pastorianus
atggtagagagtcccattaacgagaccaaagcacattcaaaagctatgtcggaacaactcagacaaacatttgctaacgccaagaaagaaaacaggaacgctctggtcacgttcatgactgcagggtacccaacggtcaacgacaccgtccccatcctcaagggtttccaagatggtggtgtggatatcatcgaattgggtatgcctttctccgatcctattgcagacgggcccaccatccaactgtccaacacggtcgccttgcagaacggtgtcactctgcctcaaactctagaaatggtctctcaagccagaaatgaaggtgtcaccgtacccatcatcttgatgggttactataatccaatcttaaactacggtgaagagagatttattcaggatgccgctaaagctggtgccaacgggtttatcatcgttgatttgccaccggaagaggccttgaaagtcagaaactacgtcaatgatagcggactgagcttaattcctttagtggcgccttccactaccgacgatagactggaattgctatcccacattgccaattcgtttgtttatgttgtttcaagaatgggtaccaccggtgcacaaagtgctgtcgctagtgatttgaatgaacttgtctccagagtcagaaaatacaccaaggaaactcctttggccgtcgggtttggtgtctccacaagagaacattttaaatctgtcggtagcgtctcggacggtgttgtgattgggtccaagattgtcacgctgtgtggagatgctccagagggcaagagatatgatgtcgctaaggaatacgtagagggaattctagatggtgccaagcacaaggttttgtccaaagatgaatttttcgccttccaaaaggattctttgaagactgcaaatgtcaagaaggaaatactagacgaattcgaagaaaaccataagcatccaattagatttggtgattttggtggccaatacgttccagaagccttgcatgcatgtctgagagagttggaacaaggtttcgatgaagctgttgctgaccctacattctgggaagatttcaagtctttgtactcctacatcggccgtccttcttcactacacaaagctgagagattgactgaacattgccaaggtgctcaaatttggttgaagagagaagacctaaatcataccgggtctcacaagattaataacgccttggcacaagttcttttagccaagaggttgggtaagaaaaatatcatcgctgaaaccggtgctggtcagcatggtgtagccactgcgactgcatgtgctaagttcgggttgacttgtaccgtcttcatgggtgcagaagatgtccgtcgtcaagctttgaacgtctttagaatgagaatccttggtgccaaggtgattgccgttactaatggtaccaagactttgagagacgccacttcagaagcattcagattttgggtcactaacttgaaaaccacatattacgttgtcggctctgctattggtcctcatccatacccaactttagttagaactttccaaagtgtaattggtaaggaaaccaaggaacaattcgccgccatgaacaacggtaaactacctgatgctgtcgttgcatgtgtcggtggcggttccaactccacgggtatgttctcgccatttgaacatgatgcctctgttaagctattgggtgtagaagctggtggtgatggtgtagatacaaagttccactctgctactctaaccgttggtagaccaggtgtcttccacggtgtcaagacctatgtcctgcaagacaacgacggtcaagtccatgacactcactctgtttccgctgggttagattacccaggtgttggtccagaattggcatactggaagtccactggccgtgctgaattcattgcagccaccgatgctcaagctctactcggattcaaactattgtctcagttagaaggtatcattcctgctttggaatcctctcatgctgtttatggtgcttgtgagttggccaagacaatgaagcctgatcagcatttgatcatcaatatctccggtagaggtgataaagatgttcaaagtgttgccgaagtcttgccaaaattgggtccaatgattaactgggatctgagattcgaagaagacccatctgcttaa

SEQ ID NO: 4119 - DNA, 96 bp, Saccharomyces pastorianus
atgggcatgaacaccgtgaacagcaatggcaaggaactggattctctggacctcaacaacctggagctgggtggcctgaatatggacttcttgtga

SEQ ID NO: 4120 - DNA, 1587 bp, Saccharomyces pastorianus
atggtgtcgatattaaggaagagttgtacggaggagaatgtccgcagcagtcacagcagtcaagctggcgacggtatgggagacggcaggaatccctcgagcggcaaggagattgggaggagtttgcccttcacggacgaccagcggtcgaaccctgagttggacccgacccgtgatgtggtagatgccgccaggaacaagaagaagagcaaagctgtgttcagcgagccggaaaacgatgcagacgaggacgacgaggtgcgccagaagaatttgaccacgcaggcgctgcggaagctgtcgtcgttcaagatgaacgccagctccaacctgcggttgagtagcgacaccagggcgagggagtcctcgtcctcgtcaacgtcgtccgtgtcttcgtcgtctgcatcagtgcccaaaaccgagtatatcgctgacaagctcaccacaacgaattccaattccatgactcaactgagattcggcaataagaacgtgatcatcgactcggtgaaccacgcggctgctgcaaagccaccgcatcagcagatgctaagaaagccctcgctggagttcttgccacagcccgcctcgacctccaacctgaacttcaactctaacaggaacaagtcaactgtaagacagattaacaacccaaaaaaaccactatacatccctgctgtgctaagaaaagtatcggagacgaacataaccaatgacgacttactgaacgccacgttgtcatcttactacaaaaaggcctccaatttggacaacaacttgtctccaaaggcgccccagtcagccagcgctcagaacgcaaacaatctgaggatcatatcgtcgcaatccagcgtgcaatcaaacacgtcgtcgatcttggaaaactacaaaaacaagatatcttcgtacctgttccccaactccatcccgaacaacaacagaatcaacctaatacccaccatctcgaacagaaactcctccagagtaaacccgcccactatggaccactggatcccggacagcaagcggaactcatgccgctactgccacaaaccatttactctgtgggaaagaaagcatcattgtagacactgcggggacatcttctgccagaaccacctgcgccactggctgtatctggactcacaggcgaacttcataatgattaacgagttgagtcgcggtggcctcaacgacggcggcacgttgtgcaagatatgcgacgactgcctggtcgagtacgagaacctatccagttctaatcctagtgcaaacgagaccaataacaacaacagcaacaacggcaacagcgacggcgccgacaatgaagacgaaagcgataataggaagaaggtccgcaactactacaagaacagacagatgaactcccttttcaggccaagaaagggcgctccggcccaaccccatgccggggtcgaccaggacacgataacgcccatccaggtgagatcgtacgaggacgacacggaaaacgagaatgctggggaagaagaagaggaaggaaacgatgttctgggcagcgtgatcggctctgtgcccgcaaactggaactggagcagtttctaa

SEQ ID NO: 4121 - DNA, 435 bp, Saccharomyces pastorianus
atgactgcgttgcacagtgtggccaaaacacccgcgatcaaggaagaggaggaggacggcgacgagcgggccggtggggggatgcccctggggcccaagaaccatgactaccgaggcatggatggcgatggtgatggcgaaggtgatgcggacacggtgacgtctcccatcacgttcgagaagcagaaggtggtgcccaggacatcggcacactcggaacagagcattttgagtagcatctcgctcaagtcgatggtgaaccagcaccggcagcaggaaggctcgacgggtgctggagccggggccgggactgggactgtgaatgggactgggactgggaatgggagtacgactgcgtcgcactcacattctgcgtatgtcgacaggaagcagaagatccagtcgccggcgatggtgtcgatattaaggaagagt

SEQ ID NO: 4122 - DNA, 288 bp, Saccharomyces pastorianus
atgagaaactcgttactgtacaagatgtcctacaaggatttcccacaattgttcaacggtggtcaagctaccgacagagtacgtcaacaaatgatcacctcacaagacgtccctccattagactactttgatgaagtgtttacgtccgaaaactggatggtcagaatatatcaattaaagaaagatgacgtccaaggtaggtctttgaaagacgttggtgacctaaccagagcttctacaaagtcaagaaggtctatcaagagacctgagctaggtctaagagtataa

SEQ ID NO: 4123 - DNA, 669 bp, Saccharomyces pastorianus
atggttagactgatgttgactttgacacccgttatctgtgtgtgcggtgctgtggcgttgtccaagatttttgacgtctatttggatttcaaagctagcgaccgcaaatccgtcgccaagccaagtgccatactagccaaattgattgtttccggatcgttcgtcttctacttgtaccttttcgtcttccattccacttgggtaacgaaaaccgcatactcttctccatccgttgttttgccatcgcaaaccccagacggtaagctggctttgatcgacgatttcagagaagcctattactggctaagaatgaactccgatgaggacagcaaagtcgcagcatggtgggattacggttaccaaattggtggtatggccgacagaacgactttggtcgacaacaacacctggaacaacactcatatcgccattgttggtaaggctatggcctccccagaggaaaagtcgtacgaaatcctaaaggaactcgatgtcgactacgtcctggtcatcttcggtggcctaattgggttcggtggtgatgacatcaacaaattcctgtggatgatcagaattagtgaaggtatctggcctgacgagatcaagaacgtgacttctataccccagaaggtgaatacagagtggattcaagggcctcggagactatga

SEQ ID NO: 4124 - DNA, 1050 bp, Saccharomyces pastorianus
atgggatctgaccggtcgtgtgttttgtctgtgttccagaccgtcctcaagctcgtcatcttcgtggcgatcttcggggctgccatctcgtcacgtttgtttgccgtcatcaagttcgagtccatcatccatgagtttgacccctggtttaatttccgggccaccaaatacctggtcaacaactcgttttataagtttttgaactggttcgacgaccgtacctggtaccccctcggtagggtcaccggaggtaccttgtacccgggcctgatgaccaccagtgcgttcatttggcacgcattgcgcaactggcttgggctacccatcgatattaggaacgtttgtgtcttgtttgcgccactgttttccggggccaccgcctgggctacctacgagtttaccaaggaaatcaaagacgccagtgccgggctcctggctgcgggcttcatcgccattgtccccggctacatttctagatctgtggctggatcctacgacaacgaggccatcgccatcactctgttgatggtcactttcatgttctggataaaggctcagaagaccggctccatcatgcatgccaccgctgccgcgctatgctacttctatatggtctccgcctggggtggctacgtattcatcaccaacctgatcccactccacgtcttcctactgatcttgatgggtagatactcgtccaagctgtattccgcctacactacatggtacgccatcgggaccgttgcatccatgcaaatccccttcgtcggcttcttgcccatcagatccaacgatcacatggccgcattgggagtcttcggcttgattcagatcgtcgcctttggtgacttcatcaaggctcaagttagcacggctaaattcaaagtcatcatgatggtctctttgatgttgatcctggtcctcggtgtcgttggcctttccgccttgacttacatggggctgattgctcccttggacgggcagattctattcgctatgggacaccaactacgccaagatccacatccccatcatcgcctctgtttctga

SEQ ID NO: 4125 - DNA, 2241 bp, Saccharomyces pastorianus
atggattttgaaacttcgttcgaggaattcgtcgaggataaacggttcattgcattagaagtatctgataatgatgacgattacgacactgatctgactactgaaacgggagacgagctcgacagctcggtcattccacgtatgaggagctccaaagcatctttgaacactaccggtcacagtataccaagaaagaacaccaccaattcaaaaaaacgatggtctttattgtctaatcattctactgtttcatcatccaaatcaaagaaaagatggtcagtactttcttcaagctttactagtgagactcacaaggacagggatccgaggggcacttcacagcaaaaaagaaagtctttacaaagttactctagtttggatacggtagcctctaatacttctctttctgcttcctcctctttgaaacgatcatctacagggttatccctcaggcagctgtttaccaagatagttatcaatgatgaaacgccacaacctggaattgggatcccaggaggtaaggaaaatctgcctccaacttcgaataagaaaattttgcccatcgcaccaattggttcagaacaaaacagacttagaacgccactaaagccgctaaataatcaagcgagaagatcaactttacaacaacaacaacagcaacagcaacaccagcaccagcaccagcaaccacaatctctagtaaatgcgtcattttcctcaagaaggtcatcaatttcgtccactgcttcttcctctagcgcttctaaatggaagttctggaaaaaagatagaagtatgccgcctccaatgcttcaagcagatcatcattccatgaattcattttcagtagtgaaccgtcgtgattcggcgacacctgttgacccaaggattaaggttaagcacaagtcatccttctcagaattccataaagccattttcaactcaaatacatattcagaaagtagtgatactgtctcatctatggaaacgtccttaaaaacaaaagcatcttcttcgagtttatctttgggcgtgttaaagaacagaaattcacaatcaagtttaaagcacaagagttcacatgcatctttgcaaaaattcaagagaaacaaggcgaagtcttccataatggcaccacccacaacaactagtagtagcaatgatgattcttgtagctatagctccaagagttctactttgagtcaccggatctcattacctgtaccggatcaagtgtcccgtgataaaatacagaataaactaaggaattcaaactcgttactctcactaaactccacaacttcttcgcccatgaacaaaaatgaccatgacgaatcgcttttaagacaaattttacaaaattgtgatatcaaaaagattttgaatcctgcaaagggagatatattgcctttgattaatgatgtaagtcatttgtcgtcgatccaattaacttcacatatttggcaaattggcgaggtgatctgtaagaaaatcgcattaggctctatcaatgatattacgtgggatacgaaattcttgtctttacaagaattggaaaaatacagaattatgaagcaaaaatttggcggaattcctcaattgttaaagagttttgttgttaaagaggcaaacaatacactgtgtttatatttactgttcaaagatcatggtacgccaatttcgttgatttcgttgaaaaactggaagcagattttaaagattttttggtcctgcgttggtataatcaataacttggaaacaaatctgaaatttgagcatcgaaatttaacgttagataatattttaatggatggtaatggaaacataactattattgattttaaatgtagtagattgcaaacccctcaggaagacgtcttatgcttacggttggaccatccactctttttcccgaatgggaaagacaagaacaaaataaatgaataccaataccagtttgagtttgaaatttaccaaagtatgcgaatcttattgaacatggattcgaaagtctttgaaccaatgacgaatttatattggttatattacttgtcacgaattctattaagattgggtgacagaaaacttggtaaaaatgatttaaacagggacaaattggctaaagtggtgagtcatttggaaatgaacttagcggttcataagaggggaggacagatattcaagagattagaggcaacggacattaaaaacacaggagacttgttgaaactatacaaataa

SEQ ID NO: 4126 - DNA, 399 bp, Saccharomyces pastorianus
atggaagaagaagaagaaatacgtccattaaactatccagacggtggagcgagtaggccaataagtctgcttgagacgacaaacaatttaaaaagctctttgaaaaagctttctcaaaaggcgaaagcatcacacatttctagcgaccggatccaccattttagaaagtggaaaaacaaaaacggattactttcggaggagcactcagagtcttgtccagaggtggactttctatgtttcagtaacagcctacaatctgccgcttcacattcgacggtgtccatctctcataaacttccagaactgtattggaacgaagagcaatgtcaattggagatggaaatcttaaagtctctaaagttaaatcctataaacaagcgtagcgctttaaataattag

SEQ ID NO: 4127 - DNA, 246 bp, Saccharomyces pastorianus
atgtttaccttattcggttggtggtctgaaaactggactgatatcgtcactgttgtccgtgtctggatctggtctattggtatcttctgtgtcttgggtggtttctactacgaaatgtctacatccgaagcctttgacagaatgatgaacggtaagccagcaaaggaaacaaagtccacaagaagtgtcgaagatttcttagctgccatgcaaagagtctctactcaacacgaaaaggaagcttaa

SEQ ID NO: 4128 - DNA, 2271 bp, Saccharomyces pastorianus
atgaagaaattcgaaactaaactagggcgaatgataactaataataaaaccaggataagcgtcccagaaaagctgggtctttcggggcagtcttttgagcaatcgtgggaaatagttaaacatgccattgatcatatatatatagatgacatggccgatctctcattcgaacaagtatacaggacaatttacacaattgttctaaacagaaaaggaccaatgctttatgataatttgaaaacatacacaatagaaaaactacttttttttagggaaacagtattcaagaacaatgcacctgattatgaaattctcgaaacaatggcaggattatgggagacgctatgtaattgttttaaaattactggggatttgatgatgtacatggacaaagtttattgcaagccgaataggtgcttggaggtatatgatatgtgtcttgatctttttagaaccgaaatactccaaaagcgttcctcttctcttatttcagcattgatttcagatatagatggaattcgtagttcagggtccatggacccaaaacatactagcatgtggaaagtgttaataggaatgatggaaacgttgcatgacaatagagacaactttttcttgactgattttgaaccagttttaatcagcgcaacagaaagatactatactgatgctatcaatattaaatcgctaacgccgcttgagggactggaaaaaataaggaaactgaagcagttcgaaaatgtattagattcttcttttttgaatgcagattctcacaacaagttaaaaaaagtcttaggaaatgtcctcatatggggaaaattgagtgatgtcatagaggatttgacacatgaagcaatgaagctctcggatgaaaggctgcttcaagaaatctatgatttatctggtgaaaggaaatataaaactactattattgagtctattaaatcatatattcggcgaattgccacagcagttccttttaaggatggtagtcgtaaaaaagggcagaatgcgattacttggtcatcagaaattttaagcatattccgtaagcaacgcttatttctgggtaatactaaatttggttctgtccaagtcaatagttcagttacgtacaaattcattggtatgacaatacttcacgatgtttttgagacctacttttctgaagaaggggcgttgccatcagagtatatttccacctacgttgactactgtatgaagcaaacaaacgataacgatgccgaggttgctaaaatcaaggaagatttgcttgacagtaccaaattgatagaattgctatccgaaaaggatatttttgaaagtacttataaaaagcaactctccagaagactgttgcagcagaaatctatactagaaattgaaaagtggatggtgcaaatgataaaggatgctctagggactttttttactttgaaactagagataatgttacgggatatttccttgtcttcaagaattttgcaagcatttaaatcctcaagtaccagcagcatagaatatatgaattttgtaccagaggttttaacaaggacaagttggccttttcaaagtaccaacccaattgatgagagtattgcattgcctcctaggatgtctcaaatgttaatgggcttcgacgagtattactccttaaaatacaaggaaagagtattaaaatgggcccatcatttaagtgtgattgagattggatgtcagtttaataacggttactacgaaataagtttttctgtttacgccggagctattttccttctttttgagaattatgaagaactaacattagaagagatccgtgaacttacccatattcctgaggaagatgtaaaatctcttgtaatgtcaatgtcagcagttcctaaatgtaggattttgaaaaggtcgtcgaattcaggaaatgctaaattttccgtaaattattttttttctgctccaaataggaaagtgaaggtgccaattattgccggtcctgcttcattccataaatcggacaacttagctagccaaagtttggtagactcctatgaaaatgaaagcattatggaggttaatgctgctattgtccgtatcatgaagacagaaggaaagttaagccaccaacagctactgcagagagctacgaagcatatggagcgtcgttttcatcttacgtccagtacgttcaaacgaagccttcaacttttattggaaaaagagtacatacagagagacgcagacgacacctcttgttatcattaccttcactga

SEQ ID NO: 4129 - DNA, 753 bp, Saccharomyces pastorianus
atggatttagatttaagtagtatcttaaaggctgagatttctaagaaacaaaaggagcttagaaactccaacaatgttcaaccattatcccatggaatatcccaggaacatgaaagagtggacgcagacgaaataccccagaaggcagaacaagatgagagtacaaacgaggaagtaccatcggattaccagctcgatgacgatattgtagaagtcattggtaaattaggaaatcggccagaaagaatacaagaagccataactcaagataagactacttcttcaacgatagatccatcacaaatcggttccacaaaagacgaaactgttctgtcaatgaaatgtaatctttatattcacgaaatactagttcattggaaggcgttcttggaagagtaccatccggagttgtttttagatactaagaaggcgctcttcccgttattattgcaactgcgacggggccagctccccacggatttgttaatctccctcgctactgttctttatcatttacagcaacctagtcagaccaaccttgccattcaatcctacatgaaactcagtatcgggaatgtggcctggcctattggtgtgaccagcgtgggcatccacgcccgtagtgctcattccaagattcaaggcggccaaagtgctgctaatataatgactgacgagaagacaaggctatggatcaccagtatcaaaagattaataacctttgaagattggtttgccaaacaaccacgctag

SEQ ID NO: 4130 - DNA, 1185 bp, Saccharomyces pastorianus
atgaaagaccgagccaaagtcgtaccagaggccaagccagagaacgctgaacgcctctataacattttccaagacatcgaaggtcacacagatgaaggtaattcaaagagtgagcaattggacgattcttccatacagtacaaagtcgatactaatactctgagcgatttgccccacgatgcccttgaccaattgtgcaaggatatagttgagtttagaaccaaagttgtcagcatagagaaggaaaagaaaatgaaaagtacgtatgaggaaaacaggcgccaaagacaccaaatgcagaaggtttttgaccaaataaagaaaaacacgtcaggcgccaagggcaatagcaacatagacgaggatgacgccaatatggaagaggacgaagaggacgacatggaggatgaccttgccctagagaaaaggagagaagaaagagagctagaagaatcaaaccgccgatacgaagagttgctccgccatctacacaacgacgtggagcccaagataaaatccaccagagccgatatcatcaccgctgcgaactatgaggagcatttggagaaaaatcgctcgctatatttgaaagagctgctacatcttgccaacgacgtccactacgaccaccacagatctttcaaggagcaagaggaaagaagggataaagaggacagaaccaaaaacggtaatgcacgggagccgccatcatccgaccaagcatccagcggcgaacccccatctgcagagaacctcggtgcgcttgtcctccccgaggacaccaccctaaagaacaggaacattggcgcccacaagaatgtgtccgagggcccagagcacgtcaaaatcaaattcgagttcaagaaggccatagacaactcggcggaaagctccagtgatggcgaggatgccgacgagggcgcggcagaggaccttttgccctttacggcggaagaactggacgcaagattggcaaaactgaaggaatcgcggtgcgttgacgagctggtgcgtgagttccttggcgtatatgagagcgagctagtcgactacattctcgagaacatccgcacgcaccagagcaagcgggcccttgtacacgagctgagggaaaccttcgatgaagacggggaaacgatagctgccagactgtggagtcgtggagaatttcagcgtgggacctga

SEQ ID NO: 4131 - DNA, 630 bp, Saccharomyces pastorianus
atgagagattttgttttcgtatcaccacagttgtatttgtcatcacagaaagattggaaaagtgactgtgccaaagctggatacattcctatccttaaaaatgatctacaacatttccagaactcactaaaacacattgtagatgccaggaatcatgtctcagggacagcaccgaacagcagcaatgatgcggttatgaagaactctgatcataacagcgcctccaacatacttaaggacagtacaacaggaagtgacggtgctgctaacaagagcgatgtaaccgcctctcactatcaggtgctcaaacagtttctccccatttccttagatcaacaaattcatacagtatctcttcagggcgtctcatcatcattctctcgcgcacagatagaatcagtattgggcagttgtttgaatttggccttagtgaacattcaaagtaactcgccattaaagattgaagcttggtcatccttttcctcattcttggacacccaagacgtttttgtgcggttcaacaaggtcgatgatgatgaagcctttgtgaaaacactaaaatactgggaagaattattcgattttgccaaaaagtacatggagaattcagagatcgacaagctgatccgg

SEQ ID NO: 4132 - DNA, 1341 bp, Saccharomyces pastorianus
atgggctatagcagtcagacaactgcggctacttcatcacaaccctcatctgtcaccgaggcaaggagtagttctacttctacttcatcttcattggaaatagtaacatctgctcctgtccaatcatcggaggcaccatctccggtgcttacaccatctacatcctcagtgaatgaagtgccagcaaatacggacgttcaaacgagtttgacaatggaatccacgactgttttacaaccatcagtgaccagtagtaccagtactttcgaaagctcggtcacgtcgagtaacaacaattggtggattccaactaagctaatcacccaggtaccagagaccgcatcctcggcatccactaccactggcggaacacaaaccatgactttgcctcatgcgattgcggctgctactcaaatacccgaacctgagggatatagcttaatcacagttggatttcagaaagctctaaactacgaatttgtcgtgtctgaaccaaaatcatcggcccaaatttttgcgtacttgcctgaagcgctaaacacgccctttaaggatgtattcacgaatattacagtcctacaaatagtgccacttcaggatgattcgttcagctacttggtgagtgttgccgaaatctatttcccaacagcggaaatagaaacgttgtcaaatttgatcacgaacacctcaagctctttttacacagacggcatgggcacggccaaatctatggccgcaatggttgatccatccatccctctaactggcctattacatagcagcagtagcggctcaactggatcctcttctggcggatcctcttccggttcttcaaattcgggatcttcaaattcaggatctagctctagttctggcagctcttcatcttcaggaaactaccaagacgcaggtaccttggaatattcatcaaaatctaattccagtgtatctagttccagcaaatcgaagaaaaaaatcattggcttagttgttggtgttgttgtcggagggtgcttgtacattttgttaatgattttcgctttcaaatatttcatcaaaagacgccttcaaaaccaacaagctatcaagaatccagagacttccagtattagttcaagcgaatttggtggcgagaagaatttcaataatgaaaagagaatgagtgttcaagaatctgtaacacaatccatgcggatccagaactggatggatgacagttactatggtaacgggttgacaaatgatgactcggcaccagctagaaacaacacatcaacctctatacccaaaatttcaaggcccatcgccagccaaaactccttaggttggaacgaagtttaa

SEQ ID NO: 4133 - DNA, 1866 bp, Saccharomyces pastorianus
atgcagttttcattcgcttctctcctctcgacgctcttgatgagtaggctattggtcgaggctagtcccttcgatcatatatttggtaacgggacatatggagcccaaagtcagagtcaaagctctcttaccagtgtagcttcccaagacaccaccatctccatcgcttctgaaacagagtcttctcagactacccattcccatcgttctgccacactagtcacagctaccatctcgtctctcccatctacttggtacggtgcggattccacttcccagcttcctgcttcctctagtacaccatatgcctatgctagtaaccaagacacttggagttcatctgtcaacgcgcaaccagcagccagcgcagatgattcattcactgcagagtctagtacgactaccagctttaccactactggttttaatgctgcctccgatgtttccgccactaacgtttacactgttgcgagcgcaaaccctatttcaactgctgttcaatttaccaccacccccgtggtagcatcgagcacatcttcaacttctgaaattccaatcatttccaccagcacgactccttcggccgatagttatatggttccatcgtcagaagcatccgttgtagtttcaacaagtcccggaaactcagagagttttgacgaggcttcgactactgaatcaacaccccttgtcgcctcaggtatcagtactactccactgcagacctcaacagttattgatggttccagtgcttctggtgcaatgagcccatctgtatcagatattcctctacaaacttcaacagagataaccagtaccgacagttcaatcacaacgagcctatccggagcagctgtaccactgcaaacgagtggctccagcagtttcagcgtagtcagcccatctgaatcgtccattccaccacaaggttcatcagatattacaagctccagtgactcaactatggtagcctcatcgccatcatccactctactacaaacagccagttctagcagtttcagcgtagtcagcccatctgaatcatccatcccattgcaaagtccatcagacattgctagttccgctagtacaactgcctcatctttgtcgactattccactacaaactagtagttccaactccatcagcccatctttgtcagctacatcatctccaatcgataccagcagctcgaagacatccattaccacctcaatttcggaagcactatcaagtttcatatcaacaacttctacagcggaaacttcccaaactcaactttcatccacctctagtttgtcttcggtgtctcaaatctcaactgccacaagtgtattacctagtagccaaatcactaccacgtcatcaccataccctactgcaagcacttcatctacgattattccatcctctataccatcttcatctgcgggaagttcggttagcaccgtttcacagagctcgaccggagttcaaagtatctcgtcaccattatcttcaacgataatggaaagtgcgacatctagtcaaaagccatccaccacctctattttgtctgagaaatcgacctcaatttcttctaaattcctatctcaaacaaccaagcaatcgagttccaccacaacccccattttgtctcaaaaattgacctcaatctcttctgctttgttatctcaaacaaccaagcaatcgagttccaccacaacccccattttgtctcagaaatcgacctcaatttcttctgctttgctatctcaaacaaccaaacaatcaagctctaccaccctacctaaatctacaacgtcatcggccgatgtcctctctcaggtttcaaagatctcattactagcacaagctcaaaattga

SEQ ID NO: 4134 - DNA, 990 bp, Saccharomyces pastorianus
  modified_base (53)..(53): a, c, g, t, unknown, or other
  modified_base (74)..(74): a, c, g, t, unknown, or other
atgtcaggactactacagaacaaggcgctgccttataaaagaattgttgagtnatcattccatcgaacacgatngccgtcgaatgtttcaacattagtgaaatttgagcaaaggcccgccattgttaatatccatgggcttttaggctcacatgtaatgtttcattctcttaacaaattcctttcaagaaagattgacgctgacatttttagtgttgatttaagaaaccacggcatttctcccaaggcgttcccttacgactatactacattgaccaatgatttggtgaacttcataaagacacatattggctcggaaaggcctatatatctgttagggttctcaatgggtgggaaaattgcattattaactaccttgttcaaaggtatcaatattcaaaaatgtatatctattgatttaccgccctatgaaactccagaattggaccctttaatagtacaaaactatgatctaataatgcagattattcgaagagatgttaaaattctaaagggttctcccaattggcagaaaaaggttctcgaactattcaaaactctagactgtaatcagaggaagtgtggcggatctgtggctctctactttgcctatggtttcctttctgtaaaatcgaataatattcacctggcacaaccacatcatatgcaactacaggatagtagagaatctgatccttatataaacttttcgatgcccctctccagtatgcctcacttgttagatgaagtaaaaaaatggcccgacttatcaggacaggataatttctttctaaagggaataaccgaacgtaaagttttattcatgaggggcttgcaatctagctttatcagcagcgattattctcttttgagggctaagtttccatgcgccgatgttaaggaatttgacactggacacaatttattattggaggattcagaagcttcattcaagtgcattttagactttttctgtgaacgacagcattag

SEQ ID NO: 4135 - DNA, 90 bp, Saccharomyces pastorianus
gatgcgctcgagaaactgcagaagctgaccgctgcgctcgaggacatcgaggaagtgacgtcgctgtacagcaacgccagcaacgcctga

SEQ ID NO: 4136 - DNA, 753 bp, Saccharomyces pastorianus
  modified_base (510)..(510): a, c, g, t, unknown, or other
  modified_base (633)..(633): a, c, g, t, unknown, or other
  modified_base (666)..(666): a, c, g, t, unknown, or other
atgttggtgagaaacagatgcttaagtaggctcttcaaggcgtatcgatcgttcagtgccctgaactctccggttgcttcgggtcacaacaagtggtcttctatcaagcacggtaaagccaagaatgacgcagaacggaacaagattaacaacaagtttgccaaccaaatagccatgtcggtcaagttgggcaacggcgtcacagacccgagcatgaacatccgactcgccaccagcatagaactagccaacaaaagcaacgttagcaagaaggtgattgaaaatgccatccggaagggatcaggaagcagcggctcgggaaaagaagcgaacgtgtctgaactatgtgtgtacgaaggcatgggacccggcggggtggccgtcgtggtggaggcgctcacggataacaagaacagaacaatagggctaataagaagcgcgttcaacaaagccaacggctccattaccccgacactgttcttctttgacaagaagggatacgtgacggtnacccccccgcatgaactggacaccgaggacaaggtgctagaaagggtgctagagatccagggcatcgaggacattgcatccgtggaggaggacgcagaagacgcagaggccgacgcagaaacngaacccgcgagccccacgtacgaggcggtaacngaacctgcagacactaacaaggtagcggccttgctcaaagagcaaggcttccacatcagagacctgggaatcggctacaacgcttag

SEQ ID NO: 4137 - DNA, 222 bp, Saccharomyces pastorianus
atgaaacaatttttaaatatattttcacatatctatccttgcaactggtgcgctaaagactttgaaaaatacataagagaaaacgctccaaaaatagaatcaagagaagagcttggaaggtggatgtgtgaggcccataataaagtcaatacgaaactgaaaaaacctaaattcgactgcaacttttgggaaaaaagatggagggacggctgggatgaataa

SEQ ID NO: 4138 - DNA, 321 bp, Saccharomyces pastorianus
atgttattctggttaaaaccatcccgccaaattcgtccacccatctactctttgaaacagacacgtttacgtaaacgtatggtcaggaaatattgcagcctgttctttctgattttacttatatttgttgcatgcattgttggacccgctgtagcttcatctcactttaaaaatattggttccggtttgaatggcactttccataacttggttcaaccgagaaatcaatcgaataacgatactggctcaaagatgtcaacttataaaagtcactactacactcatactccatccttaaagacatggtcaaccataaaataa

SEQ ID NO: 4139 - DNA, 135 bp, Saccharomyces pastorianus
atggcatggactcagccaacgagagagttaactgccaaagttatagaactttccgaatttgcagcggattttgtcttaggacatgtaattttaatttttcaactaccggttatttgtattccacaaatagattaa

SEQ ID NO: 4140 - DNA, 5154 bp, Saccharomyces pastorianus
atgaacgctgatcaacatccttaccaggatcaaacggtataccctcaggagcaaggggaaggtcaaggtcaagagcaggactacgaccagtatggccagcctttgtatcctcaacaaactgatggttactacgacccagctatggccgccggtaacgaagctgatatgtacggtcaacagccaccaaacgactcttatgaccaagaatacacaaacggcgaatactatggccaaccgccaaacatggctgcgcaagacggtgaaaacttctccgatttcagcagttacggcccccctggcacccctggctatgacagctatggtggccagtacaccccttctcaaatgagttacggagaacctaactcatctggtacttccacccccgtctatggtaactacgatccaaacgctattgctatggctttaccgaatgaaccttatcctgcttggactgcagactctcaatctcccgtctctatcgagcaaatagaagatatcttcatcgatttgacaaatagactagggttccaaagagactccatgagaaatgtcttcgaccactttatggttcttttggattcgaggtcttcgagaatgtcaccagatcaagctttgctatccctacatgccgattatatcggtggtgatactgccaattacaaaaaatggtatttcgctgctcaattagatttggatgacgatatcggtttcagaaatatgagtcttggtaagctatcaagaaaggcaagaaaggctaagaagaagaataagaaggccatggaagaggcggaccctgaagatgctgaagaaaccttaaataaaatcgaaggtgacaactctttagaagccgctgatttcagatggaaagcaaaaatgaaccagttgtccccactggaaagagttcgccaaatcgccctatacctattgtgttggggtgaagctaatcaagtcaggttcacagcagagtgtttgtgttttatttacaagtgtgctgctgattatttggattctcctctctgccaacaacgtcaagaacccatgccagaaggtgatttcttgaacagagtcataacaccgctatatcaattcattagaaatcaagtttacgaagttgttgatggtcgttttgtcaaacgtgaaagagaccacaacgaagtcattgggtacgatgacttaaatcaattgttttggtacccagaaggtattgctaagatcgtttttgaagatggaaccaagttgattgagttaccagtcgaagaacgttatttaagattaggcgatgttgtctggcgcgatgtcttttttaagacttataaggaaacccgtacctggttacatttgatcactaatttcaaccgtatttgggtcatgcatatttccatctattggatgtactgtgcttataatgcaccaaccttctacacccacaactatcaacaactggtcaacaataagcctttgggggcctataaatgggccaccgcggcattaggtggtactgtggcgtgcataattcagatcattgccactatatgtgaatggtcattcgttccaagaaaatgggctggtgctcaacatctatctcgtaggttctggttcttatgcgtcattcttgctatcaatctaggtccgcttatattcgttttcgcttacgataaagacaccgttaactccactgctgcacgtgttgtagctgccgttacatttttcattgccgttgctactgtcattttcttttccattatgccgttgggtgggttgtttacatcctatatgaagaaatctactagacgttatgtcgcatctcaaacttttactgctgcttttgctcctttgcatggcctagacagatggatgtcttatctagtctgggtcactgtttttgccgccaaatattcagaatcatatttctttttgattttatcattgagagatccaatgagaattttgtctaccacttcaatgagatgtacaggtgaacattggtggggcgacaagatttgtaaaatccaaccaaagattgtgctaggtttgatgattgccacagatttcatccttttcttcttggatacctacttatggtatatcattgtcaataccgttttctctgtcggtaaatctttctatttaggtatttctatcttaacaccatggagaaatatctttacgagattaccaaagagaatttactctaaaattttggctaccagcgatatggaaattaagtacaaaccaaaagttttaatttctcaagtttggaatgctgtcattatttccatgtacagagaacacttgttggcaattgatcatgtacaaaagttattgtatcatcaagttccatctgaaattgaaggtaaaagaactttgagagctccaaccttctttgtttctcaagatgacaacaatttcgaaaccgaatttttccccagagactcagaagctgaacgtcgtatttcatttttcgctcagtctctgtctacaccaattcccgaaccactaccagttgacaacatgccaactttcactgtgttaactcctcactacgccgaaagaattttattgtctttgagagaaattattcgtgaagatgatcaattctccagagtcactctattggaatacttaaaacagttacatcccgttgaatgggagtgctttgtcaaggataccaagattttggctgaggaaactgctgcatatgaaggaaatgaagatgatcccgaaaaagatgacgctttgaaatcccaaatcgatgatttgcccttttactgtattggtttcaaatctgctgcaccagaatatactttgcgtaccagaatttgggcttctttgagatcccaaactttgtaccgtaccgtttccggtttcatgaattactctagagccatcaaattgttataccgtgttgaaaatcctgaaattgttcaaatgtttggtggaaacgctgaaggtttggaaagagaattggaaaaaatggccagaagaaagttcaagtttttggtttctatgcaaagattggctaagttcaaacctcacgaattagaaaatgctgaatttttgttgagagcttacccagatttgcaaattgcttacttggacgaagaacctccattgaatgaaggtgaagaaccaagaatttactcttctctaatcgatggtcactgtgaaattttagacaatggtcgcagacgtcctaagtacagagttcaattatctggtaacccaattcttggtgatggtaagtctgataaccaaaatcatgctttaattttctacagaggtgaatatcttcaattaattgattctaaccaagacaactatttggaggaatgtttgaagatcagatccgttttggctgaatttgaagagttgaatgtcgaacaagttaacccatacgcccctggtttgaagtatcaagaccaatcaaacaatcatcctgttgctatcgtgggtgcaagagaatacattttctctgaaaactctggtgtcttgggtgatgttgctgctggtaaagaacagacttttggtacattatttgctcgtactttatctcaaattggtggtaaattgcattatggtcatcctgatttcatcaatgctacattcatgactacaagaggtggtgtttctaaagcacaaaaaggtttacatttaaatgaagatatttatgctggtatgaatgctttgcttcgtggtggtcgtattaagcattgtgaatattatcaatgtggtaaaggtagagatttgggtttcggtactattttgaatttcaccacaaagattggtgccggtatgggtgaacaaatgttatctcgtgaatactactacttgggtactcaattacctgttgatcgtttcttaacattctattatgcgcatccaggtttccatttgaacaacttgttcattcaattatcgttacagatgtttatgctaactttggtgaacctgcatgctttagcccatgaatccatcctgtgtatctataatagaaacacaccaatcacagatgttttgtatccaatcggatgttataactttcatcctgcaattgattgggtgagacgttatacattatctattttcattgttttctggattgcctttgtccccattgtcgtccaagaactgatcgaacgtggtctgtggaaagccactcaaagatttttccgtcatattctatctttgtcaccaatgttcgaagtgttcgccggtcaaatctattcttctgcactcctaagtgatttagcggttgggggagctcgttacatttcaacaggtcgtggtttcgctacgtcacgtatccctttctccatcctttactcgagattcgctggttcagctatttatatgggctcaagatcaatgttaatgttattatttggtactgttgcgcattggcaagctccattgttgtggttttgggcatctctatcttccttgatttttgcgcctttcgttttcaatccacatcaatttgcttgggaagattttttcttagattacagagatttcatcagatggctatcaagaggtaataataagtatcacaggaactcatggattggttatgtgaggatgtcaaggtcccgtatcactgggttcaaacgtaaaatggttggcgatgaatctgagaagtctgcgggcgatgcaagcagagctcatagaactaatttgatcacggctgagattataccgtgcgcaatttatgcagcaggttgttttatcgcctttacatttattaatgctcaaactggtgtcaaaactacagataatgataaagtgaactccgctttacgtgttatcatttgtactttggctccaatcgtcattgatattgctattcttttcctatgccttggcctttcttgttgttctgggccattattcggtatgtgctgtaagaaaacaggttctgtcatggcaggttttgctcacggtgttgctgttgttgtccacattctcttctttattgtcatgtgggttttggaaggtttcagttttgtcagaatgttgattggtgttgttacatgcatacaatgtcaaagactcattttccactgtatgaccgtattactgttgactcgtgaattcaaaaatgatcacgctaataccgcattttggaccggtaatggtattctactggtttag

SEQ ID NO: 4141 - DNA, 411 bp, Saccharomyces pastorianus
atgcctagtgcacattctcagttcatggggttttgcttcacctacaactctttgaaaatatatacctcatggagaaatttgagcgtctttgaaaaatgcatttttgctagtgggctagctttactgtcattctgcgtctgtttttctagagtttacttacactaccacaatttagaccaggtgattgtgggatttagcgtgggcgcattgaacggttcgctatatttttttatactcggcatcattagggagacgggcttgatcaactggtttttgaagctgcggatcgttaggttattctacatgacagactcgtacaacttggcgcctgtaacattgaaggagaattatgaaatgtactggcaaagaatagaaaaacagtcccccagcggtaaacccaaaaatgattag

SEQ ID NO: 4142 - DNA, 117 bp, Saccharomyces pastorianus
atgaatagtacagccgccgcgataaatcctaacccaaatgtcataccgttcgatgatacctacattctctacgattcgcatatttgctgtcattttaagttgctattcctccgttaa

SEQ ID NO: 4143 - DNA, 84 bp, Saccharomyces pastorianus
atgcgtccagaggaagaagaagaagtgcctatagaagtgcttaaagacatgctctacgatgaactgatgaagaccatggaatag

SEQ ID NO: 4144 - DNA, 114 bp, Saccharomyces pastorianus
atgctgcaattcaatcctgacaagagaataagcgctgcggaagccctgagacatccttacctggcgatgtatcacgattcagcgacgaaccagaataccctccgctcaacttag

SEQ ID NO: 4145 - DNA, 906 bp, Saccharomyces pastorianus
atggccagaaccataacattcgatattccctctcagtacaaactcgtagatttgataggcgagggagcatacggaacagtatgttcggcaattcacaaaccttctggtataaaagtagctatcaagaagatacagccatttagcaagaaacttttcgtaaccaggaccatacgtgagatcaaactgctacggtatttccacgaacacgaaaatataataagtatattagataaagtaagaccagtatccatcgacaagttgaacgctgtctacttagtcgaagaattgatggaaactgacttacaaaaagtgatcagtaaccagaataatggctcctctactttaagtgatgatcacattcaatatttcacttaccagattttgagggcgctcaaatctatccatagtgcacaggttatccatagagatataaagccatcgaacctgttactgaattcaaattgtgacttgaaggtttgcgattttgggctagctcggtgcttagctagtagtagtgattcaagagaaaccttggttgggttcatgacggaatacgtagcgacgcgatggtacagagcaccagaaattatgttaaccttccaagagtatacaactgcgatggatatttggtcatgtgggtgtatactggctgaaatgctttcagggaaacctttgttcccaggcagggactatcaccatcagttatggctaattttggaagtgctaggcaccccgtccttcgaagacttcaaccaaatcaaatccaagagagctaaagaatatatagcaaacttacccatgaggccgcctttaccgtgggagaacgtgtgggcaaaaacggatctaaatcctgatatgatagatttactaaacagatgctgcaattcaatcctgacaagagaataa

SEQ ID NO: 4146 - DNA, 360 bp, Saccharomyces pastorianus
atgttcgtaccaaggctggccggtggttacaacaatgaaggagatttgcatgaaagcttacaacacacaagacaatacgtctggcaagacctgcccgatatttacgatgtcttccacttgtgcaaaatcattgtggatacgctcctgagggtatcggatgccgaagagagatcaatggaaaaatttatgaacatggttgactctgcatggaacaaagacacctctacaaaagattccttttcttaccaaagtaaaattgacctgttctgggaacaatggtcaataaacactgaatcaataccatctaatttccagttaagaaattttgaaaagccctgcttggttcaggacagcaagtag

SEQ ID NO: 4147 - DNA, 738 bp, Saccharomyces pastorianus
atgtatacaaaattaagacctatacaatcaggaacttttagcacggtttacaaagcatggagtaccaagtacaatcgctacgtcgctttaaaaatcactcctaaatacaaaacttcagaaaaaaacatgctaaacgaatacaatgtaatgaagactttaagctctcacagccctcaccccaacatttgttcaatgcttgatttttacactgacgattcgtactacgtcatggttctagagtactgcgagtgcggtgacctttacgactttcttgatattgctaagagtcaaggcaccccttcatctccctctttggtccaaatcgacatgcaaaaaatcatcaggcaattgtattcagcaatacaatttgctcacagcttagggattgcacatagagacatcaaaccggaaaacgttcttttaaccatcaatggtgacgttaaattggccgattggggccatgctatccaagcctccaagtctaatgactaccaaatcggcacagataattatagagcaccagaaaccttttcaaaccgtatcgagacttcttcttttaagaggaagctggaccaatcatccgccccattgtacaacacttacaaggcagactattggtcgctgggtgctactatattctatttgctttttggtgattgtcttttcagagttttgaaaccaaagaagggtcaacatctaaaaaacttacatgaattcgaaaaggatcgacaagcttga

SEQ ID NO: 4148 - DNA, 153 bp, Saccharomyces pastorianus
atgaggtcactattaaaaaagttaagggccattgaaaccttaaaagaaaggcaagctgttggcgataagctagaggatacgcaaatccttaaaattcaaactgaagaaaaagttttgaaagatttggaaaaattaggctggaaagatgaataa

SEQ ID NO: 4149 - DNA, 1398 bp, Saccharomyces pastorianus
atgtcatctcaatttttcctaaagacatcccaagatatagagttgttccaaagctatcctacttttgagcaatccaatacaaattcaaaggacttccctgttatttcctcggttttatcgccatgtggcagatttttggctctatctacgaaggaaaacgtcaaggtcttcacgggtccatgtttagataccgttttattaacgatgaagcttaccgacgtatatgatttgcatttctctcccgctggtaactatttgagtacttgggaaagaacctctgtacaagacccaaatcacaagaacgtaaaagtctggtatttgaataaaccattcaagagtgactctactccagaagacatacatcctgcctatgagtaccaagccaaatctcaaagcggctggtttttgcaattttccaaattagacaactacgcattgaaactttttaaacacgacttgaaaattgtcaagttgggctcaacaaatgccgacagtttcgatttccaatctccatatgctgtgttgtctgatagtaacgaaacttctcaacacttcaccacttatttggtctctccggcagaacatccaacaatttgtactttcactccagaaaaaggtggtaaaccagcccaattgatcatctgggctctttcagaaggtaaaattactaaaaaaattgcatccaagacttttttcaaagccgattcctgccaattgaaatggaacccgttaggtaacgctatcttatgtttggccattactgattttgattcctcaaacaaatcctactatggtgagaatacactatatctactctctttccaaggtgtcaacggtaccttaggaggtaactctgtgcgtgtttccttgaccactggtcctgtccatgatttcacatggtccccaacttcaaggcaatttggtgtcattgctggctatatgccagctaccatttcctttttcgatttaagaggtaacgtcgttcattccttaccaaaacaagccaaaaacacgatgctattttctccttccggtcattatattcttattgccgggtttggtaacctacaaggttccgtagaaattctagatcgtcttgacaagttcaaatgcgtgagtaaattcgatgctacaaacacttctgtatgcaaatggtcgcccggaggagaattcatcatgacagccactacatcaccaagattgagagtggacaatggtgtcaaaatatggcatgtatctggctctttagtatttgttaaagaatttaaggagctattgaaagtggattggagactaccttgtaattataagaccttggaaagtagagatgaagcattgattgaagaccatgtcattagtaactgggaagcgttacctgaatcatcgacatcttactag

SEQ ID NO: 4150 - DNA, 840 bp, Saccharomyces pastorianus
atgaagattggattagaactatccagtcaaagacctaaggttgccattttaagagagcaaggtgtcaacggccaaatggaaatggcatggtgtttccaacaagctggattcaactcagtggatgttactatgacagatctattagaaggtagattccatttggatgactttattggtcttgctgcatgtggtgggttttcatatggtgatgttcttggtgctggtgcaggttgggctaaatctgttttgtatcatgaaggtgtccgttcacaattctctaaattcttcaatgaaagacaagatacatttgcttttggtgcttgtaatggttgtcaatttttgagtaggttaaaagatatcataccgggatgtgaaaactggccaagttttgaaagaaatatcagtgagcaatatgaagctcgtgtatgtatggtgcaaatatctcaagaaaaggataactctagcgaagaatccgttttcttgaacggcatggcgggatctaaattaccaattgctgtcgcacacggtgaaggtaaagccaccttctcgcaaggcggtgaccagttggacaaattcgaaaaagacgggttatgttgcataaggtacgtggacaattacggtaatgttaccgaaaggttcccattcaaccctaacggatctagtaatggtattgctggtatcaagtcgccaaatggtagagttcttgccatgatgcctcaccctgagagagtttgcagattggaggccaactcttggtacccagaaggcaaatatgaagaatggggcggatatggtccatggattagattattcagatctgccagaagatgggttggttaa

SEQ ID NO: 4151 - DNA, 3219 bp, Saccharomyces pastorianus
atgactgattacattttgccaggccctaaggccttatcccagttcagagttgacaacttgatcaaagatataaattcctatacaaacagcacttctgttatcaatgaactacgctcatgttacatccactatgtcaacggcatcgcccaaaatttgtctgaacaagatactaaattgctagaggtcttgttgacttatgattctgctctagacattgccaatgacccattagcaagacaactgaacgatgctgtcgctaacaatctgactagctcggctcttggtgaagacacgtatttgattagagttgttcctagaccaggtaccatttctccttggtcttcaaaggctaccaacattgctcatgtatgtgggttgcaagacagagtagaacgtattgaaagaggtgtagccttattgattaagaccgttccaggtttccctcttttggaaaatttaagtgacgtttcattgaaatgtgtttacgatagaatgacccagcaactgtttttgactgaacctccaaatacaatggacattttcacacatgacgagccaaaaccattggttcatgtcccattaactcccacggacacaaagcagtctccaaaagacattctttctaaagccaatgtaaaactaggtttggctttagattgtggagagatggagtatttgattcatgcctttgttgaaactatgaagagagacccaacggatgttgagctgtttatgtttgctcaagtgaactctgaacattgtcgtcacaaaatcttcaacgccgattggactattgatggattaaaacaacaatttaccttgtttcaaatgattagaaatacccataaattaaacccagaatatacgatcagtgcttattctgataacgcagcagtcttggacagtgagaatgatgcatttttctttgcaccaaattctactacaaaggaatggacctctttaaaggaaaaagtcccattgcttattaaggtggaaacccataatcacccaacagcagtttctcctttccctggtgccgccacaggttccggtggtgaaataagagatgaaggtgctacaggtagaggttctaaaaccaagtgtgggttaagtgggttctccgtaagtgaccttttgataccaggcaatgaacaaccttgggaattgaacattggtaagccttaccatattgcatccgcactagatattatgattgaggccccattaggttccgctgcattcaataacgaatttggtagaccttgtatcaacggttacttcagaaccttaaccactaaggttttgaatcatcaaggaaaggaggaaatcagaggatttcataaaccaattatgcttgctggtgggttaggaacagttagacctcagtttgctttgaaaaatactccaatcaccccaggttcttgtttaattgtccttggtggtcaatctatgttgatcggtctgggtggtggtgctgcttcctctattgcttccggtgaaggatccgctgatttagatttcgcttctgtgcaaagaggaaatccagaaatggagcgccgttgtcaacaagtgattgacgcttgtgtagccctaggcaacaacaatcctatccaatccatccatgatgttggtgctggtggattatccaatgccttgcctgagttagttcacgataatgatctaggtgccaaatttgacattagaaaggttctttcattagaacctggtatgtcaccaatggagatttggtgtaatgaatctcaagaacgttatgttcttggtgtctctcctcaagatttgtcaatttttgaagacatatgtcaaagagaaagagctccatttgctgttgttggtcatgctacagctgaacaaaatcttaccttgttgacacatcctcttttgaaaacaactccaattgatttggaaatgccaattttgtttggtaagcctccaaagatgtcaagagaagccataaccgagccactaagtttgccagaagcaaacctagccgaaattccatctttacaggatgccattgaaagagttttgaacttaccaactgtaggctctaaatcatttttaatcactatcggtgatagatctgttacaggtctaattgatagagatcaatttgtcggcccttggcaagtacctgttgccgatgttggtgtcactggtacatctctgggtgaaacaataatttctagtggtgaagcattggccatgggtgaaaaaccagtcaatgctttaatctcggctgctgcgtccgctaaattgtctgtagcagaatcgttattgaatatttttgcagctgacgtgaaatccctacaacatattaagctatccgctaactggatgtcaccagcctctcatcaaggtgaaggttcaaaattatacgaagccgttcaagcattgggtatggacttatgtcctgcattaggcattgctattcccgttggtaaggattctatgtctatgaaaatgaaatgggatgacaaggaagtcacagcaccattatcattaaacatcactgcatttgctccagtttctaatactagcaaaacatggactccattattggaggaaagcgctaaagattctgtccttgtattggttgatttatccgtcaaacaagaaactaaatcattgggtgcctctgctttgttacaagtttacaatcaagttggtaacaaatcacccactgttcatgataatgttatcttgaagggcttcttgaagagtttgattcaattgcaccaagaaaatgacaacatagtgttggcatatcacgatagatctgatggtggtttacttgtcactttactagaaatggcctttgcctctagatgtggtttggaaatcaacattgatggtgaaaatttggaaagtcaattgaccaacttatttaatgaagaattgggtgcagttttccaagtctctagtaagaacttgagtaagtttgaaaacatcttgaaggataacggagttgcgaaagaatatatttcagtggtaggtaagccatctttccaaagtcaagaaataaagattgttgattctaagggtggcgatgtaatttacaccaacacaagatctgaattagaacaaacttggagcaagacgtcatatgagatgcagaaattgagagacaatccaaagaccgcggaagaagagtttgccacaatcacggatgataaagaccccggttacaatatgctttga

SEQ ID NO: 4152 - DNA, 126 bp, Saccharomyces pastorianus
atggcggatcagctgtcgatcacatgttgcgggcatgtacgccatcaagtcgatggtaggcttccggccgaggtcgtggagctgttgcctcattacaaaccaagagatggtagtcaagttgaataa

SEQ ID NO: 4153 - DNA, 1212 bp, Saccharomyces pastorianus
atgctagagttgccagagaacggtgtcacaggaacgccattcgagggactcaacaacaatagcagcagcagtagcagcagtaataacaataaagacggatccggagggtcgtacttatttctactgaaaaggggtaactacgagctgcctttcaatgccatgctcccaccagaggtgtgcgagactatcgagggacttcaaagcggcagtatcctgtattcattcgaagccgtgatagatggccgccagttgtgggaaagcgacgtgaacacccacacgacgtccagtaatgccaccggcagcgcgagcgcaaacgcaaccggcataagaacgaagaacaaaatcatcgtcaagaagtacaaatacctcagaatccttcgaaccctgtcgatggacaacctggccatgcaagaggaaatcagcgtgggcaacacatggcacgacaaactccagtacgagacatcaatcccgagcagagccgtccccatcggcagcaccacccccgttaagatcaagatcttccccttcgagaagaacatccgcctggacaaaatcgaaatggccctaatccagtactacgcgatgaaagacggcagcgcgcagatctacgacgacgagttggccgtgatgaaaaccacccatctggcagatttcggcccgctgacggacaaacttgacgtggactgtcccttcactatcccggacaacctgaagcagatcactcaggactgctgcgtgcacgacaacctgatccgcgtcatgcacaaactgcaggtgcgtatcctattgcagcgccaagtagacggcgaatacaaaaacttggagatcaaggctcaattgcccgtgttgctgttcatctccccgcacctgcccatgaagggccgcttggttctgttcgacaagcacgatggcaagatccacttccggccgggcgagctagtacccctattcgcagacacctgccccgcgccgggtctgactccgggcccatcattggcctccactgttgccgccacggcgcacctcgtgctaccgccgccgcctaactaccacgaaagcaccagcgaccacctcgtgcccgcgctacagccgctcggcgccggctcggccacgctggtggtgccgtcctacgagcaggcgcaagcgcaggcgtctgcgcccgcctcgtcgcacgcgacagggtccgtgcccgcgtaccgcgatgacgactga

SEQ ID NO: 4154 - DNA, 132 bp, Saccharomyces pastorianus
atgttttcacttagttccttatctaatggtggtgggcattcagagcaaaaagaaaaagagaagataagctatttcgatatacgaataaactccccgtataaggacatagtgttgatccaggatcgccgttag

SEQ ID NO: 4155 - DNA, 1815 bp, Saccharomyces pastorianus
atgcaggtggagaagaagagcattttgaaaggccatcaagccagcatgtctgatcgtgacgtcgactatctgattacagcgctcacttccacgaagaggattcagtatgacgagcgtttgctggacgaattctcggctaatttggtgtactacatccccaggattaaatcacccgatattttgtaccgtttcgtccgagcacttttccaatcacatttcattgttcagttaccaccgctacgtctactacacgtcatcaaggacattttcctatggaaactagaggtttctgaacccaccctccccatcgacaggttctaccaagtttggaatgctgtcatggaaccgcatcgggccgcttggaacctgtcacagttgatgctactgggcggcatactggtcacgtacccgaggttcaaatctttgaacgagaggtacttcatcgacgaatctcggaacaaaacggcggtttactacaaaaactggaaacagaatacattcttacccatttgggcccagttctggaatgatcccgctatcactgccaagcccttgattcagaaatatttgctcgtttcaatggttttgctgttcaatcgcccgaacacgaaacttcctttgtgcggagtcagagtatcatgggatgtagtcactggaaaattactagacctcttggcggagtacacacatgccattgagcagccgatggaaaagttcaccgtcaactctgtcctatcaacgaacctcaaccatttggccaattgcttgagcaccctgttgacgctgtcaaatgaacctgctatactgagttcactgcacaggctgggcaaaatatgtcagtatttgtctgatgccctgaagttgtccagacaagaacaactagatctcaagttgcaggatttattcatcttagtaatccttactttgaaagaaatatctgccatgaacatgaaaatctcatttgctcacaaagacgatttttattccatgatttgcttgagtcttttcaatattcacgttttgactgagaaaatcggtacagctggatttcccagctatcactacgtttacgacaatttgataacatactttattgtattggacgatctacccaaaatcaccccaatcctgaatcgtatgaggggggataacatcaaaaataatccgaataaactaattttttatatcaacttcttgaacaagattaccagttattattcatggcgcgtccatttacccttcattttggaattcatcgagcctctactacatttcaacagcttcctcgagggaggcatgactgaccctttggaaatcgagatcaaggaatctatacacacattggcaatcacttccttaactatagatccctcccattcttcacagattgcacaatggcaagtgtcccgcattattaactatttgaaaatgtccatggaccagtatattgcagaaagattgtcggcccctcagattctcattatatttaacagtctatccatgcaatttccgctattacatagctatgataagcatttactgagggactctttgcacgaaacatacatcaggattctaaatacaaggaaactggagaaaaagaaggtactgatggaatgtttgattgtacaaatactttttgtcaacgatccgcatcatttgatcacttggttaaacatttgcttccatctgatcagtgctcataataaaaaactactcctacaattatgggagatgatttcaagttccgaatcctccttggccatcgactggtggtatgcaacggtaataccgtcgcaatcttctaaattgtag

SEQ ID NO: 4156 - DNA, 939 bp, Saccharomyces pastorianus
atgtttaaaagcgtggtgtggaaacgtttttcatctactagcggaactgcaaggggaaagttagacgaattcttgatataccacaagacagatgccaggttaaagccatttatttaccgtcccaagaatgctcagatcttgctaactaaagatatcagagaccccaagaccaaggaaccattggagccaagaccccccgtaaagccgttatcgagacaaacgttaaatgattttatttattcagttgaacccaattcgacggaattgttggactggtttaaagagtggactggcacctcaattagaaaacgtgctgtttggacctatatctcaccaatccatgttcagaaaatgttaactgcgtctttttttaaaatcggtaaatatgcacatatggtgggactcttatatggtatggaacacaagtttctcaaagcccaaaacccatccgtgtttgacatcgaacatttcttcaatatcaatctcatgtgctccttgcaccgtaataagctaagaaactataaagacgtagacatcgctcaaaagaaactgctcgttgcatggagaaaagtactagatcggaaaaataatacagggctagcaaacacccttgtggcgacattgggcagacaaattggctttactccagaactacctggcttggaacctgtccaaattagcctaccagaaatgcctacttccttaagtagcgccgaaacaaaggaattattagacagattcgaaggagtattcttgattgccagaacactcttagatattgatcaacacaacgctcaatatccggaattacagaagtttataagccaataccagagcgcattgggtgaatctcatgacccttacgacacgtacttgaaatcattggaacacctagaagcgcaagctcctcaagaaattgccgaagaaaaagcagaatag

SEQ ID NO: 4157 - DNA, 153 bp, Saccharomyces pastorianus
atggatttctacgttgtcattaacagaccaggtgccagagtcgccagaagaaagagatgtaagggtaccgttggtaactctcaccaaaccactaaggaagatactgtctcttggttcaagcaaaagtacgacgccgatgtgctcgataaataa

SEQ ID NO: 4158 - DNA, 252 bp, Saccharomyces pastorianus
atgtctgctaaagcccaaaacactatgcgtgatcttaagatcgagaaattggtcttgaacatctccgtcggtgaatctggtgacagattgaccagagcctccaaggttctagagcaattgtctggtcaaactccagttcaatccaaggctagatacaccgtcagaactttcggtatcagaagaaacgaaaagatcgccgttcacgtcactgtcagaggtccaaggctgaagaaatcttggaaagaggtttga

SEQ ID NO: 4159 - DNA, 1683 bp, Saccharomyces pastorianus
atgtttggtaaaaaggaagaaaagcctgagaaagtttacactttgcaaaatgggttcccatactctcatcacccatacgcctcccaatactcaagacccgacggccctatcttgctgcaagacttccatctattggagaatatcgctagctttgacagagaaagagtaccagagcgtgtagtccacgccaaaggtggtggttgtagattagaattcgaattgacggattctttgagcgacattacatacgctgctccttaccaagaagtgggttacaaatgccccggccttgtccgtttctccactgttggtggtgaaagtggtaccccggacactgcaagagacccaagaggtgtttctttcaaattctacactaaatggggcaaccacgactgggtctttaataacacacccgtattctttttaagggatgccatcaagttccctgcattcattcacacccaaaagagagacccccaaagtcacctgaatcaattcgaggacactaccctttactgggattatttgactatgaaccccgagtcgattcaccaaatcacatatatgtttggtgagagaggtactcctgcctcttggtctgacatgaacgcttactccggccactcatatatcatggtcaacaaagaggggaaggacacttatgtacagtttcacgtcctgtcggatactggtttcgaaacattgaccggcgacaaagctgctgaactatctggttctcatccagactataaccaggctaagttgttcacacaaatgcaaaacggtgaaaagccaaaattcacctgttatgtacaaacaatgactcctgaacaagccgccaagttcaaatactcggttaatgacttgaccaagatctggccgcacaaagaattcccattgagaaaattcggtaccatcacgttgactactaacgttgacaactactttcaagaaatcgagcaagtagcattcagtccaaccaacacttgtattccaggtattaaaccttccaatgattcagttctacaggctagactcttctcttacccagacacgcaacgacacagactaggggccaactatcagcaactgcctgtcaacagaccaagaaatcttggatgtccatactctaaggaggactcccaatactctgccgaacagtgtccattcaaggctgctaactttcaaagagacggcccaatgagttactataactttggtcctgaaccaaactatctctccagtttaccaaaccaaactctcaaattcaaaaatgaacaaaacgatgaagtgtctgacgaattcaaaggaatagttctagatgaagttaccaaggcttctttgaaaaaacaagaagaagaccaaatcagaaatgaacatatcgtcgatgctaagatcaatcaatattattacgtctacggtatgagtccccttgacttcgaacaacctagagctttatttgaaaaagtttacgaccctgaacaaaagaagctattcgttcataacgttgtttgccatgcttgtaagattaaagatcctaatgtgaaaaagagagttacccaatactttggtttgttgaacgaggacttgggtaaagtcatcgctgagggcctggaggttgaatgggaacctgtcgaccttcaaggttacgccaagacttggagcattgcaagtgcaaactaa

SEQ ID NO: 4160 - DNA, 2127 bp, Saccharomyces pastorianus
atgtcttctaagatgttcggtagacatgcggaaagtataatttactatttgtctttccatataatcttcttttcatttgctgcaagtctgctttctccacagaggccaatagctgaaaataaatcacccaaaaaaggtataaattctaacaaaacagaagtgaatcgtatacaagggttacaaaggatgagaatttcgtcttcatcttccgcatctggcttggttacaaacagtactgattcaaacattttagaggaccaaactccgatgataccaaatgatccagggggccttaataacgacaaccaatctgcccattcacttcaacaaaataactcgcccctacctccatcatcacatagtaatttattgagccctgcaaattccgatcacaatgaggctgtttctaactttccttatttcacagctatggtaaaagagtataagtcgtttcaaccctcagtgatttctgccgaaagaagcaattctcaagccgttgctacaaccacaacaacaacttctcctacaacattcaatttttctggtgaaagaaatagcttgccaaatgaaattcccttatccaacgcttccaatacaacttccaagaaaaaatccgacccttcttttccaccaaatgacaagtacactaaccaactatttgaactgaacgtcgattttgggaatgtcttttcatcgagcaatttatcgtctgacatatctgttacgacaaatttggagaatttcatccgtcatttatttagaaggaaaaaccagcacataattgcacctctctggtccatggtagttaccttaaaaacaacaaactttgaaaagaaatatttgcaagagacatcaggaaatcctctaacaccgacaaactccaattcttcttacatcgacagtcaagaaaaacacaataagaattcggatacgatcaagacacactcaattccatcaaaaattagttttacacatgcgggcaagtttaagaaaagtgtgtttaacaattttgagccttcaaacacaatggcattaattgctaaaacaacgtctgatgattacaatcaattgaatttggtttccaccaacgagaatattttcaatagaaacgataatgattataaagtttgcattatcgacatcagcacaaattccatcactttccatattgagaatttgcatgatggtgaactcattgttttagtaaacggtgtaatttggtcagaagtctcgtgcgctctgattttagagcatgtgggagaagaatacgttgttgtgaatgggctagttccttcttgttcttacgacatccagttcatcaatagattgaatcaccaagatgattatttggtttctgatttgattgtccgaacatgtgggaatagcaatacagttgctggaaaatttgaaaatcttgattttagcttcccttcatattaccacagaaaattcttatctccactgctaactctaaagcattctgtattaaccacgaacgcaaatttatccgatgaaagagcaaagttgaaaaagacgaaaaaggaaataagtaaaaaattaagtcttttaagacaagaaattgattatttcaaaaacagaatatcacagaacgcaacaaatgatgaaaagagtacttacaaagttgaaaatctaaaagttgctttacaacagagcgaaactgcggtgaataaattagagaagcaacttaagactcttaccgagaaggagcttgacttggaagaggaatacctgaaaaagaaagatttacatttgaaaaatcaattagaatacagcaaattggaagaaagcctatcaaatgagctgaaaaattctgaaaagaagtcaaataagctaaaccaagattttggtcaattgacgtctaaactagataaattaaacgctagaaacgagaagttgaaaaaggaagttgacgaaaacgaggaatacatagagaagttcagtactctgttcatgagtaaaagggaaaaagacagactcagaagaaaagaatacagaatacgtgaagctaataaattcgagttaactataaaagggttagaacaggatattaatcgtttagaacacgagaacgagaatattcatagtctaataggcaatagttactga

SEQ ID NO: 4161 - DNA, 309 bp, Saccharomyces pastorianus
atggagaaacaatctaagaaccataagaaagcactatcaccatcgctgccacccatggacgctgaatcgggtgaacaaccaacagaatttgccaaaaagcataggttcaaagatacgcttgcgttatttttggtatttttgagtttcaaccatttcacttccctatgtttattggtgtctttcatcgtcgccaccaagtgcaaagattttttggcaaattgcttcattgtacttttcctatctaagaaaccttcgcgccatattagtgaagtggcacgtatagatatactacttccaaagggactaata

SEQ ID NO: 4162 - DNA, 1803 bp, Saccharomyces pastorianus
atgaccattccaacttgttccagatcaggtgatatcatcgaacctttattaaacctcaatggtgggttcccaagtgaaatggccaaggaagccatcaaggttgtgaaagatggccaaatcactatcacccctaaatcttctgaagccgaatacttccattggttaggcaacattcaagattggtgtatttccagacaactatggtggggtcaccgttgtccagtttatttcatcaacattgaaggtgaagaacacgaaggaattgacggtaactattgggttgccggtaagaccttggaggaggctgagaaaaaggctactgccaaattccctaatgccaagttcactttggaacaagatgaagatgttttagacacctggttctcatccggtttatggccattctccactttgggctggccagaaaagaccatggacatggagactttctacccattttctatgttagaaaccggttgggacatcctgttcttttgggtttctagaatgatcctgctgggcttgaagttaactggctccattccattcaaggaagtcttctgtcactctttagttcgtgatgctcaaggccgtaagatgtcaaagtctctaggtaacgttgtcgacccattggatgttattaccggtattaagttggaagacttgcatgctaaactattacaaggtaacttagatcctagagaggtcgaaaaagctaaaatcggtcaaaaggaatcctaccctaacggtattcctcaatgtggtacagatgctatgagatttgccttatgtgcttataccactggtggtcgtgatattaacctggatatcttgcgtgttgaaggttacagaaagttctgtaacaagatttatcaagctaccaagtttggtttaatgagattgggtgacgactaccaaccacctgctaacgaaggtttatcaggtaatgaatccttagttgaaaagtggatcttgcataaattgactgaaacctctaaggttgttaatgaagcattggacaggcgtgactttttaacatccaccagcatcatctatgaattttggtatttgatttgtgatgtctacatcgaaaattccaagtacttgattcaagaaggttctgctgttgaacaaaaatcagcaaaagatactttatacatcttactagacaatgctttgaagctgattcatccattcatgccattcatttctgaggaaatgtggcaaagaattccaaagcgttccaccgaaaaggctgccacaattgttaaggctgcttatccagtacatgaatccaaatacgatgacgttaaatctgccgatgcctacgaattggtcttgaacatcaccaaggaagcccgttctttattatctgaatacaatatattgaaaaacggtaaggtttttgttgaatctaatcttaaggaatactttgaaactgccaatgctcaaaaggattccatcgtttctttaattaaggccattgatgaagttaccgttgtccatgagtcttctgaaattccagaaggttgtgtgttgaaatctgttaatccagaagttaatgtacatcttttggtcaagggtcacgttgacattgatgctgaaatcactaaggttcaaaagaaactagaaaaagccaaccagtcccagagcaatattgagcaaactattgacagtaaggtttatgaatcgaaggctaatgaacaagctaaagaggctaacaagaccaaattggataacacagttgccgaaatcgaaggtttggaagccactattacaaacttgaagcgtttgaaattgtag

SEQ ID NO: 4163 - DNA, 1542 bp, Saccharomyces pastorianus
atgaataagtggctaaacgtattacctacaccatttacttctcggtttttgacccctcattataggcgatctttaccactttgtcagaactttctttcaaagaaaccgttaactcataatcaagtcagatttttcaaaatgagcgatcttgataatttacctccagtcgacccaaaaactggtgaggttatcatcaacccagtaaaggaagatggctctccaaagtctctcaaggaaatcgaaaaggagaagaagaaagccgaaaaactgctaaaatttgctgccaagcaggctaagaagaaagctgcctctactactggtgctcctcaaaagaagcctaagaagaagaaggaagttgagccaatcccagaatttgtcgacaagactgtaccaggtgagaaaaaagttttagtttccttggatgatccagctttaaaagcctataacccagccaatgttgaaagttcttggtacgactggtgggtaaaaacaggcgtttttgaacctgagttcaccgccgatggtaaggtcaaaccagaaggtgtattctgtattcccgctcccccaccaaatgttaccggtgctttacatatcggacatgctttaactatcgccattcaagattctttgatcagatacaacaggatgaaaggtaagactgttctgtttttgccaggtttcgaccatgctggtattgctactcaatcggttgttgaaaaacaaatgtgggccaacgaaaaaaagactagacacgattatggtagagaagcctttgttggaaaggtctgggaatggaaagatgagtaccacaacagaattaagaatcaaattcaaaggttgggagcctcttatgactggagccgcgaagctttcactttgagtccagaattgactaaatccgttgaagaggcttttgttagattacacgatgaaggtgttatttatcgtgcctccagattggttaattggtccgttaaattgaataccgccatctctaacttagaagttgaaaacaaagatgttaaatgcagaactttactatctgtcccaggctatgatgaaaaggtcgaatttggtgttctaacctcgttcgcttacccagttgttgattctgatgagaaattaattattgctactactagacctgaaactctattcggtgatactgccgttgcagttcatcccgatgatgatcgttacaagcatttacacggtaagtttattcaacatccattcttgccaagaaaattaccaatcatcactgataaagaagccgttgatatggaattcggtactggtgccgttaagattacaccagctcatgaccaaaacgattacaataccgggaaacgtcataacctagaattcatcaacatttttaccgacgatggtttgctaaatgaagagtgtggtccagaatgggaaggcatgaagagattcgatgcaaggaaggcggttattgaacaattaaaggaaaataactatatgttggccagaagacaacgaaatgaccattccaactgttccagatcgacgccgatt

SEQ ID NO: 4164 - DNA, 672 bp, Saccharomyces pastorianus
atgcatttccaagcagaagtaggtgtcctaggccatgtagatggttcgtctcaatttgtatcacaagatactaagatcgtttgttctgtaacgggccccattgaaccaaaggcaagacaagaactacccacacagctagcattagaagtaatcatacgtcccgcgaagggtgtagctaccaccagagagaaactactcgaagataagctacgtgcggtactgacccctattatcaatcgttattgttatccaagacagctttgtcaaataacttgtcaaatcctggaatccggcgaagacgagtcagaattctcccaaagagagctaagttgttgtataaatgctgcgttcttggctttagtcgatgcgggaatcgctatgaacagcatgtgcgcaagcatacccattgctatcatgaaagactcaaatgaaatcatcgacaatccttccgctgagcaattgaagacatcactgtcagttcatactttagcattagagtttgttgacggtggtaaagtggtaaaaaatgtccttttattggatagtaatggtgatttcaacgaagaccagttgtttaacatactggaacttggtgagcaaaaatgtcaaggacttgttaaaaatctcagaaagataatacaagaccaaatatccccccgtttagtggtatag

SEQ ID NO: 4165 - DNA, 1143 bp, Saccharomyces pastorianus
atgaattgcattcccagtccaatcacagaaagaaaaatccaagttaacgatgagaatcatacaggcaaggaaaatgttcctcagacagtctcaagagaaagttcaataaacctgacaccaaattctacaaatgaaaagaaaattctatccgaggtgaacagcaataaaatcgatgctttacaacttcctcaaagtaagatacgaagaaattctactcatatcgaaaaaactaggaaaagacagttttcagatgattccacagatttgaagactgtaaaaaaaccaaaactcgatcacaggaaaaatttagattcatcagaggtaaatgatccattcatggtagcagaatatacagattctatattttctcacctttacgaaaaagaaactcttatgcttccgacgcataactacttaatggatactgagtctccataccatttgaagagttccatgagggctttattaatcgattggctaattgaggtccatgaaaaatttcaatgcttacctgaaacattgtttctggcaattaacctattggatcgttttctatctcaaaacgttgttaaactgaacaagttacaattattgtgcatcacttgtttatttattgcctgcaaatttgaggaagttaaactaccaaaactggcaaacttcgcatacattactgacggtgccgccaccgttgaagatatcaaaaaggctgaagtatttaccttgacttcattagcttacaatatatctctaccaaatcctttgaatttcataagaagaatttcgaaggccgatagttatgacattgagacaagaaacatggccaaattcatcatggaatattccatatgctgcaataaattcattcatttgaaaccatcatacttagccgccatgtcaatgtatatcgctaagaaaattaaagacgaatcctcccaatgggatcaaactttcattcattacagcggtggtgtcgatgctgaatcagattcagcattcaaacattttgtcaatgaattaatcggggatatcgccgtacccgaaacaaatctagactctctaagactcaaattcaaaaaaccaaaacacggcatggtttatttcaaagtttttgattggtgtaaacaaaagacattaaaacattaa

SEQ ID NO: 4166 - DNA, 1356 bp, Saccharomyces pastorianus
atgagaattcgctttttgacgcttaaatccacgctgggctcaataataagaagccccttgaagggtttccaatttttgacaggagctagctcatcgaacacacagtcagaatcacctgaagcctccattaaatatgccacggagaaacagatattgagaacaccgtctgcaccgacagccatccctctgagggagattatttataaagtgcccggtttgtttcctcgccctctagaagattctgttaaggatttccgagatttcatcaaaaacgaggatagctttcaaactgagctcttggcaacgttgccattttatccaaacccgtcgacagccaagaagtcgaaacttataaagactgctgttgatgatgacggtaattatatcaatgaattttgcatatatcctcagacaccttcagtacctgaagctgatttgaaacacttggtttttattcacgggtacggtgccggattgggtttttttattaagaattttgaagatatccctctattaaataatgaatggtgtgttcatgccattgatttgcccgggtacggcttttcttcaagaccaaaatttccattcaagtatccaagagatgatattcatagcgttcaagattggtttcacgagaggatacacacttggtttaagaaaagaaaccttttagacaaacctgaaaaaaatattgtcatggcccattctttgggatcttatttgatggcattatacttacaaaaatatgaaaagtctccgtctttcaagaaattgattctttgttccccggcaggcgtatctcacagagattttaatagtagtaattcagacgttgagaaatggaaaccccctccttggtggtacgttaagctttgggataagaatatttctccatttacgctagtgagaaactctcgccagttcggttccaaaatcacaagcggatggtcatatcggcgttttaaacatatcttgaacggtgatccggatcaatcaaaacggtttgaagctttgcatagatatgcttattccattttcaacaaacgtggttcagtcgaatacctattaagttttgctctgaagtgtggcggtgaaccaagattatccctggaagagcaattatttaacggcaagaacgcaaatgttttagagaatgcgaagtatgagtggatttggctctatggggatgacgattggatggatgtcaatggtggacttagagtctctaaacttttaaacgataagttgaagcaaaaaagcaatgttatcaccgtccctaatgcagggcatcatttatatttggataaccataaatttttcaacagtatcattatgaaagaaatgcaaaaagtatga

SEQ ID NO: 4167 - DNA, 234 bp, Saccharomyces pastorianus
atgcttgttcctaaatcttcgttttcatcatcatcattgacaatgaagccctcttgcacttttcttgcctcgtcttcatcttcgtcaatgtcttcgtcctcctctgaagagtcgaaaacgtcctcaccttcttcttcatcactaggcgctttagtttcatcgttgtcattcactatttcctcgtcgtccctagggactagctttgaatctcccgtctcttccataaaaggttag

SEQ ID NO: 4168 - DNA, 84 bp, Saccharomyces pastorianus
atgggtaaaggtaagccaagaggtttgaactctgctagaaaattgcgtgtccacagaagaaacaagtatgttatttttaattga

SEQ ID NO: 4169 - DNA, 825 bp, Saccharomyces pastorianus
atggtgaaacgtaacgacattgatgggaatattagtgtccccgccttccagtatgacgagattatcagaaaaatttctgctctcaaaatcaatgatgtcgcttcatttgatgacatcttttttaaagatctgaacgtaaaggaggagcattacactgaaaaggatagatttatttctgattctgaatttctgaataaaattttagacttaattttcgagaaattcaatggaaatgattatccaaaggctctaacatttttacttacccatccgctgtttccattgaaccgtacacataacttgctatcccgtttaagagaccaaccaaggctgttcaaacaggcgatcgtaacatgtccaaatctaccattaaatgaattacttgaggaattattttccataagaaacaaagaattattactggatatctcatttagaatacttcaagatttcacaagggattcaatcaaacaagaaatgaaaaatttaagcaaactagatatccaaaactttatcgacttcgtaacaaatactgatgaagatagctcactagaaaatctcaaccacagtcaaagctctcagttatttcaacttttgtcactagttctggattccattgggctattttcattagaaggtaccctcttggataatctagcatcgtatatcgataagcaagtggaaattgctgaaagaaacacagaattatggaatctggttgaaacaaggggttctcaacatgggtttactaatatgaactctgatagtacaacttctcaaaaacaagccttgccaacttacactatggaatatttggacatttga

SEQ ID NO: 4170 - DNA, 1053 bp, Saccharomyces pastorianus
atgccctctttgtcccaaccattcaggctagcaacccttccgaaaattgcctctctgagcaatttctctttgcaagcggattatgttcaagttgcagacggccctttcaatgaattcacaaacaacataacattaggtatatccggatcatccatatctcagtatattatcaatcctacaccaaagcttacatttgactacccaataccttctacaaacattatcactgcatgcaatgctgtaaaaggccaagttgaaattgaaaatgataccaaaattagcaacaacgacaaaaacgaagttgccgactttcaatcaaagagagatgttgaaatctggtcttttgggctaatggtaaataaaggtaattacacattgaatgtcatcactaaagcggtagaggataatgatatctccgctgagcacttgactgaggatggcactgacaagaaagcttatacagatacggacgacctcttatctcagtataagattaaaacgaaagataaggttatgaacattaaaatcgatgctaaaaatagcttaatcattgccgtgttacagaatgggctagttgaattttatgatttcaaactaaagcttttatactcttttgacatctcatacggtaacttgaaatatgccaaatggttcactgaaaatggcacggaatttgtgttcgttctgtgtccattagaggatgataaagtctgttataaattattcgaactatcagattttgaaaacaaagaaagttcacccattaaagagctatcatctacaattattgagggattttcttttgaaaattctaaattctgttaccagttcggtaagctttacaaattgaatcaaggtaaaatattcgtttactccctaccacattgccagttacaacagattattgatgtcccattaatcaataaacccactaccgaagatgatttgatttcttttcagcctgtttcggtaaacaggattttattgaccgtgaataacatcgtctacttgcttgacttattacactgctctattctataccagagagaataa

SEQ ID NO: 4171 - DNA, 315 bp, Saccharomyces pastorianus
atgttcgtcctggattttttaaattttctatttacatttatagcaggtactgctttggccgtaggcattagatgtcattcgtgcagtaataaaacttacctggataagaataagatcacacagggctcaggttcaaggtgccatcaagcaaaagctgctgtggcatttttctacttttcctgtcttttgtttctgatcaaagtggtggtatctatggccgctatgattcaaaacggtggatttggctttggtagcagcttcggcagaaaaagagcaagaagacaaatgggagttcccacaatttctcaggtctag

SEQ ID NO: 4172 - DNA, 195 bp, Saccharomyces pastorianus
atgctatctgttgcagacaacttagtgcgcatcattaacgctgttttcctgatcatatcaataggtctgatcagtggcttgataagcacgcagaccaagcacagttccagagtgaacttttgcatgtttgccgcggcttacggtctacttactgattcattttacgtttcttcgctaatttttggtcatctttaa

SEQ ID NO: 4173 - DNA, 315 bp, Saccharomyces pastorianus
atgctgatagacgtccctaattcttacccaatggcaccgccgaagataatgtttgagcgggacgctatactgcactgtaacgtcaagtcagccacgggcgaaatatgtcttgatatcctcaagctgcaagactggacgccggtatgggatattttacattgtgtacatgccgtttggaggcttttaagggaacccgtttgtgagtcaccgctggacgtggatatgggcaatataatacgctgtggcgatacaagagcataccatgggattgtaaagtacttcctagcagaaagagaacgcaataaccagaattaa

SEQ ID NO: 4174 - DNA, 906 bp, Saccharomyces pastorianus
atgctatacgttaatcatgacgttgcttggcggctaatggacgaaatgttgatgtgtaccggttataggaggatattaatatggtttcttactcatttagagctaaagcactcattgatatactatgtgtttgagctgataatggggttgcgtgggagcccattttccggggaagccagtgatcaagatagaaaagatgatatgatatacgagatcttaaagaaaaagcagaagaacgagaatacctccggtcttccattttcaagacaaggaccgattgtgctgtctgatattgaaaccaaaatgctattacaagagttttttatgaacgcagccattttcctatcatcaaaaaacaccgaagaggagagtgaagacggtgataaggtttctctatactccctgggtttagttaagctaatttgctacatggtgcagacactcattgcgaacgacaagttttttttcaccaagtctgaatgcacttttgagcttcaaactttactgatgacatggattggtatcctgcccgaagctaaagatttgttctttcagatcaaatcaaggctggccatggaagaagatgacaatgctgatgttaccgttcaacataaagataagaaagaccttgactcaaagaagtcaaacacaaagtcaatttctaaactgaacatgaaaatattgagcctatttccttctaaccttactgacaaagacgataattccgctatcagtacattgcgtagcttcataactgattactctttcgacacgcaggtggtggctccggggcgaagagtggtgtttcatgacgataaaattttaccgttaccaaaggctgacaagccgatcccacttcacgaatatataacgctcgctgagctcgacatgggggatagcgagtga

SEQ ID NO: 4175 - DNA, 1860 bp, Saccharomyces pastorianus
atgatgaacaaaaagaaaagcgccagtaatgatgttgaaaagcagaccctagccagtggcgttgacgatccactgggagatgcgcatcattatgcacaattcgtttcattgcaggaattgctaaaagacaaacattataccccatcggtagaaaatttagaaaaactactgtatgatgaaaccatattgaacgatcaagaaataaggtttccactattgtttgaggccctttcggttaccttatttactacgaaagcggggaaatcggctctacagatgatgaaagcttctactttaaaggaaagaaaagcctgggaaaagtcatttgaaaaccacgattcgaattacgcctcaataatactaagttggaaaaaggatgatgtccttttcttaaaatttttgaaatttatactggcaaacaagacgacgcctttacaaattgacagatacaaccttccgaaatataaactcccgctaagctttttgattgtttctaaggttaatctaccctccataatactcaatgaaaagtataacatgttaaaagactatttgtacgctataagtggacgtatagaaggttttataacgtgcaattccacgtttgatcaatctgcacgtatattcaagagaactttgcaagagtatgataggatgatagaattccgtaattttttttggtattcctttaatgcggagaaaactataacttctaaactcaataataatatcaatctattgatggacagccatgaggataatcctgatggtactggtatcgttgatgacgctggtaagagtaataaccatcagaaacagccgaaagacacaataatacatcgaaccgttaatgatcaagagcaaatatattcatttgaactaaaccaagatggaacgctccaaatacctaatgttatggagcattctctactgagacacgaacttcttttcaaaatcttgaatcttaccccagtaatgacaccgctgttggaacaacaatttactacattatgtggcctagtggatccgttgacacaacctaccccaaatgacaaacacgttatatctatagacttcctttatcagctctttctgggtttaatgtatccatcaattgaaacctcccaggaacacaataaccattatgattggaaattctatacgtgttttaacatgcagaaaattatagatgctaccatgttgaggctaaattgctttggttttgaaaaattaaactcaataaacaatacagatgacacagttcattggaggacacaactgcatatatggttaccgcacggtttaaacactcaggatttagaattactttacatgattgatatattggcagtatataccatctacaagttatatgaagaggtgcccatacaactgaatccatttctgttttccttgttatcattatggaaaaacttatcgtgtgttatacttctggctttggaaatcgatagaatagaagaagagaaaggtacctacgaaacgccgcttatggttcgtgccacaattcgtggagctgctgcattaagatctgtgatagctactgtactcaatggactagtgaaaagtaatgatcatgatttcaaacacgagtcattaaatacattcatgtcaccctatggaagaaagttatgtcacggcgcattatatgccgacttgagatcgcacactgcatctttacttgccctaggagcaaatatcgaggacgttactgatttgtttgctgatttgcaatcgggtgatagatttgacgaggatatcaggtatatgtttgattacgaatgtgaagattatatgaatccttttctgacagcggtgacgaagagctggaagaaggtgtga

SEQ ID NO: 4176 - DNA, 156 bp, Saccharomyces pastorianus
atgtaccacaaattgaacttacactggggttcttggttgttggctttcatctctactgctatgattgctctaccttttgcattctcttactggggtaaggaattgagacataaactgtccaagaaggactactctatcgatagtgtcgatatgtaa

SEQ ID NO: 4177 - DNA, 1608 bp, Saccharomyces pastorianus
atgagtgatcaagaatctgttgtttcattcaactcccaaaacacttccatggtggacgttgaagaccaacaaccccaacaatacgtccccgcaaaaaccagttctcgtacaaaccaattgaagttaaccaagactgaaacagtaaagtctttacaagatttaggtgtcacttcggctgccccggtgcctgacatcaatgctcctcaaactgctaaaaataacattttcccagaagaatatactatggaaactccatctggactggttccagtagccaccttgcaatccatgggtagaaccgccactgctttatctcgtaccagaacgagacaattgaaccgtaccggtaccaattcttcatccaccggtaaagaagaaatggaggaagaagaaatcgaagaaggtgaagatcagagcgccgaaaacgaattggacccagaaatcgaattcgtcacttttgtcactggtgatcctgaaaacccccacaactggcccggatggatccgttggacctataccgtgctgctatccatcctggttatttgcgttgcctacgggtccgcttgtatcagtggtgggctgggaaccgtcgagaagaaataccacgtcggtttggaagccgctattttatcgtgttccttaatggtcatcgggttctccttgggtcctttgatctggtctccagtcagtgacttgtacggtagaagagtcgcttacttcgtgtctatgggtctttatgttattttcaacattccttgcgcattggccccaaatctaggttgtcttttggcctgtaggtttttatgtggtgtctggtcctcctccggcctatgtctcgttggtgggtccatcgccgatatgttccctagtgaaactagaggtaaagccatcgctttctttgcctttgctccttatgttggtcccgttgttggcccattagtcaatggtttcatttctgtttccaccggccgtatggacctgatcttctgggtcaacatggccttcgcaggtgttatgtggatcgtggcctctgctattccagaaacatacgctccagtcatcttgaaaagaaaggccgccagattaagaaaggagaccggtaaccctaagatcatgactgaacaagaagcccaaggtgttagtatgagcgaaatgatgagagcttgtttgttaagacctctatactttgctgtcaccgaacctgtcttggttgccacttgcttttacgtgtgtttgatttactctctattatatgcgttcttcttcgccttccccgtcattttcggtgaattgtatggttacaaggataacattgttggactgatgtttattccaattgttatcggtgctctctgggccctagccaccaccttttactgtgaaaacaagtatctagcaatcgtcaaacaacgtaaacctacacccgaagatcgtctgttgggtgccaagatcggtgctccattcgctgctattgccctttggattttaggtgccacctcttacaaacatattatttgggtcgggccagcttctgccggtttagcttttggttatggtatggtgttgatttactattcgctaaacaactatatcattgattgtacgtcc

SEQ ID NO: 4178 - DNA, 2802 bp, Saccharomyces pastorianus
atgtcttcgaaggataagttccaagagttggtggactcattgaaaccaagaacagctcaccaatacaaaacctactatacaaaatacatacaatggtgccagcttaaccagattataccgacaccggaagatgattctacaaatagcgtcccttataaagacctacccatatccgcagaactcatacattggttcctactggacacgttgataacggatgataagtttgaagagaagcaagaagatgaagagtttgatgatgaggaagaaaattcgttcaaaatcgctactttaaagaaaatcattggaagtttaaacttcctttctaaattatgtaaagtgcataacaatccaaatgctaatatagacaccaaatatctggaactagtcacaaagctgcacacacactggctagattctcagaaggcaataaccgctaacgaaacaaataatactaacactcaggtgttatgcccacccttactaaaagtctctctgaatttatggaatccacaaactaatcatcttcctgaaaaattctttaaaacttgctccgaaaaattaaggtttctggtagatttccaatttagaagctacttgaatctatcgtttgaggaaaggtctgaaatacgatttggttccctcaaggtcggccgaacaggcaaagactctatagtataccataagactattcacacaaaggaaaacaaagacatgtcgagtcatcatcaactcgtagcactgttaccacaggattgtccctttatttgtcctcaaactacactggcagcatacctgtatctgagattttatggtataccatctgtttcaaaaggtgatggctttcccaacttgaacgctgatgaagatggctcgcttttacaagacttgcccatactaagaggcaagtcattgaccacttacccaagagaagagacttttagtaactactataccaccgtatttaggtattgtcacttaccttataaacggagagaatactttaagaaatctaacctggtttacccaacctgggacgaaaccgtttttcaaaatttctttgatgaaaaagcccatggaaattggttagaacaacctgaggctttcgcattcccagatagaattccattcgattttaaaagagtcatgaatttcaaatcgccttacacttcatattctaaaaccggtgataaggacccactatcgcctccaaaggatttgctagttcagatctttcctgaaattgacgaatataaaagacacggctacaatgatttgtcccaggatgcaaaggagtttctaggattaatggagaaactgcgagaaagactactgagcaacttgccatggattttcaaatacttcccgaaccatgatatatttcaggatccaatttttgggaattccgattttcaatcttactttaatgataaaacaatacattcaaatggtctcaacactttaccattcgatatattgccgggcttcaataagatttataaaaatgaatcgaatttttgcaacctcttaattgaaccaccttcgcagttgtctttgtcaacgactagtaatccagactcgcgtgtcccccaaagagcagaatcagaaggtccatctcaaatggcacaaattgatactgctcacatgagcgaattattaaaggaacaaagtttcgagtttgttcaatttcaaacactgtctaacttccagatcttattatcggtgtttaataaaatttttgaaaaattagaaatgaaaaaatcttcaagaggttatattctacatcaactcaacctattcaaagacaccttaaatgataggatcaagaaatctaaaatcagtgattctgataaatacatccgcgatatccagcctataaagaaggaggaaattactataaatggggatggaccaaataatgtacgccgggcaaagaggccaaaaccaatcaggttactttcaatcgcggattcctcagacgattcctcagcagagagttcgaatctattcaaaagggacgaagaagctaatggtgacgacgatgccgatgaagaaaatgaagatgaagatgaaaatgatcctgaaatgcaggaacaattgaaatctatgataaatgaactcatcaactcaaagataaccacttttctacaggatcaaatggaacaattcgagctgaagttaaacgcttcactagataaagttctcgaagaaaaagttgctcgtatcattgaacaaaaatttaatacatatgctacgccactttcgactttgaagagatcgcaatctcatatgacagaagatgtcgcatttgatatcgatatctcgaagaagcctaggttcagtggtaaatacgcggagcctgtagaagataaggatgaccgtcaacccatctccagtacggtatcaccagcgctcgaacaagacctgcgagaaaacaaggatgctgatgaacagcctttcatgctggacaattctatagatacaatagaaggaataattcttgaatggttcactccaacccccaagtacggcaatcaatgcgttcactcaatgaacaaatctggcaataagtcttggagggttaattgtgaagcattatacaaggaaaggaaatcaatagttgagttttatattcacttggtcaaccatgaaaaccttgacagatacaaagcggtagacatttgtgagaaaatacgggatcaaaacgaaggttcgttttcccgcttagcgaagttcctaaagaagtggagacacgaacatcacaattcatatgatggactgttggtctatttatctagttga

SEQ ID NO: 4179 - DNA, 402 bp, Saccharomyces pastorianus
atgcaagaagagagtaggcaagcaaaaagggaaaaattagcaaaggaaaatcaagaaaggcaaaaaaaagaaaaacaagctaaactaaaagccaagaaggaatctttaatgaaaaagcaaaaagctaggagagcggagcaaaaaaaagaacaggaatccaacaaaccaaaaacttcaaagaacgaagtaaggcacaacattagcaatgttgatgtcactggaagcgacaatgaaagtataaacagtggatctgaaataaattcagattcctcaataacaagcaacgttttaaaaaaacatatttcacctgtattagaagacgttgaagatgaagaggttgataggtacaatgagctgttaactagatcgcccaggggcaattctattatcgaagacatatga

SEQ ID NO: 4180 - DNA, 804 bp, Saccharomyces pastorianus
atgttttccgtatttaactcaccatgcgttttcgagcaattaccaactttcagccagtccgctcacaattttgaatacgactctccaatgaactatcaaccagaatgtaaaagaagaagggccgtaagagcaaataaaggagcaccagaaagaagaagtaaagctcaatctccaattttaaagtatacactttcggaaacgccaaccggatataatctaagcttgtataagcatatttcatattcacttttttcaaagtacgttaatgagaaactgggtgaattaaaggagagtcgctacagaccaacttaccacgtcgttgaagatttttttggaaaccaatactatgttgaggatgagtttgatgaaaatgccttactaagatctgcattagaggatctagacttcaaagctattggaaagaaaattgccaaagacctatttcaagattacgaaatagaattgaatcatagaggtgatgaattgagcatattgagtaagaaggataacatatccaaagatttctgtttggatgaagtttttgaggatgtttttgttattggctgtggcgtcgaaaatatagatgatgactccagtgacaaatatgctcttttaaagattggtttggttaagcatgaaagaaaaaatgtattattgaactctcagcaaccaaagatggtgcaaaatgaagtacctcaagaacagcctcaagaagaagttgaaccattctatccctctctccaaaaagaggacgaggaaaaggaagaaatggtagatcatcaccaaccaaagatgaacaaataa

SEQ ID NO: 4181 - DNA, 633 bp, Saccharomyces pastorianus
atggttatgagaaaaccagctcatttgtttttacaagaattagaaattccttatgaagacgaaggtgactatgttgttgttaaacatgctgctttattcatctccactgtcctttcaaaggttttgcaactaccaaatgtcaaactattcaacgccacctgtgttgaagatttagttaccagaccacctactgaaaagggtgaagtcaccgttgctggtgttgtcacaaactggacattagtcaccatggctcatggtactcaatgttgcatggaccctaacgtcattgaattggccggttacaaaaatgacggtacccgtgatttgagccagaagcacggtgttattttgtctaccactggtcacgatggtccattcggtgcattctgtgccaagagaattgttgacattgaccaaaacaaaaagttgggtggtatgaagggtttggacatgaaccacgccgaacacgacgtcgttatccactctggttcttacgaaggtgttgacaacatgtacttcgccggtatggaagttgccgaattagatggtttgaaccgtatgggtccaactttcggagctatggctttgagtggtgtccacgccgccgaagaaatcttgaagcattttgcttaa

SEQ ID NO: 4182 - DNA, 267 bp, Saccharomyces pastorianus
atgtctgctacttctaccactacttccacttctcaattgcacttgaactctaccccagttactcattgcttatctgatattgttaagaatgaagattggtctgatttcaagtttgctcctatccgtgagtctaccgtctcccgtgccatgacttctcgttatttcaaggaccttgacaagtttgccgtctctgatgttattattgtcggtgctggttcttccggtttatctgctgcttacgtcattgctaagaacagaccagactga

SEQ ID NO: 4183 - DNA, 906 bp, Saccharomyces pastorianus
atgggtaggttcccagaatggtttcacatttattataccatgcttttttttgtcctaatgcccattcgattttacacatattataaaaccaaaaatcattactttttggctgacttttgttattttgtgaatattttatgcctattgttcatttggattttcccacattcttctagtcttttccaatcgtgttttgcattcacttttggaacgttatgttttgctgttatcacttggagaaattctctagtaatacattcaattgataaaactacctcatgtttcatccacatcatacctccttgtgtcatgtatgttatctatcatggattgccgcttgactacaagtttgatagattcccaggggcaatcattcaaagttcattggatatcaaaaagaacattctttggacatccctttactacttgatttggcaatgcctataccattacttcattactttgaaaaagtccaacaaaatcaagtccggtgaaagaatgacaagttttgagtacttaaccactcaccagttcaaaaacttctgggcagttaaattgagatcaccttggccgatggtgatttatacactctctcaatacttctaccagttatttaccatgttattatgtggtatatggattcgttacaagctagctgcagctctatttttaatcattgtattcctttgggcagcccataatggggctacctattatattgatcattacgggaaaaatttcgagaaggaagttgataggctacgtcttgaagtcgaaaatttacagcaaaagttacaacctgattcggatgcggtttctgatgcatctgtgaatgacaaagactttttaactgtcgatcataatgaagaagacgattcatcgagtacgtcctcaaaaagtaattaa

SEQ ID NO: 4184 - DNA, 165 bp, Saccharomyces pastorianus
atgaaaaaattagacaatgatgagatggaggatgaaacaaataattctgtctcactaacgagtcttttagaatttctcgatccgatagcgtcaaaagtcgtttccaaatattaccatggctcgatctttcagagcagaacagaaagtgagaatttgaagttttag

SEQ ID NO: 4185 - DNA, 990 bp, Saccharomyces pastorianus
atgacaaattttgctgtaccaaatataatcttagctgttttgtggactttaacaaacttcattcttgtcaagttcattgaaactcctcatgtcaataaaatttacggtgagactaaacgcgttagtggtgttggaaaaactctgttgggcttgaagcctttgaaacaagtttcagatattgtccatagaatcgaaaatatcatcgttaaatctctaatcgacgaaagcaaaaagcccaatagtgaggcagaactcttacctaaaaactatcgagaaaataaggattggagcgccttgatccaagacgcaatggacagcgttgcgacaaggttgagtccgtactgtgaattgaacattgaaaatgaagtcaccgaaaataattttgtgtcgcctgaaccaataactttaaactggaaactgcctatcgaactttataatgaagacgattggatcgggctgtataaagtcatcgatacaagggctgaccgtgaaaaaacaaaagttggttcaggtggtcactggagtgcgactttcaaaacctcatacatgaaccacggcttgagacataaagaatctatcacagatttcaaggtaaatgaaaagtacgttcaaggcaaaataacatttgatacatctttactgttctttgaaaatggtatctacgaatttaggtatcactccggaaactcccataaggttctattgatttctacaccatttgaaatctcgttgccggtattgaacactgaaacgtgtgaactttttgaaaaggacttaactgagtttttgaccaaagtaaatgttttgaaggacggtaaattttatcctctaggcaataagttcttcggaatggactgcttgaaacagttgataaaaatctcgattggcgttgagctttctactgaatatataaagagagtgaacggtgatgctaacgttatctcgcatagggtctggagtataaagcaaacgcttgatagtcttgcatga

SEQ ID NO: 4186 - DNA, 1419 bp, Saccharomyces pastorianus
atgtccaactgtaatattaccgtgtctgagatggttgatcctgtggcaaaagacaagggatctggttacagtaaggctaaaacgcggtcgagtaatgtaacattcagaccgcctgtgacccacgatatggtgcgttcgctttttgatccaactttaaagaaatctttactggagaaatgtattgcactcgccattctatcaaatttttttatttgttactggtcttatcagagatttggcatccagtttacaaagtatttttttcttttgcaatatatgttctggagaatagcctataatctgggtattggtcttgtgctacattaccagtcccattatgaaactttaacaaacactgctaaaacccatgcgatttttagtaaggagacgccgcagacacaacatggcagttcaggtttctcaacaaactctaatgcgttctcagaaaagttctggaattttatcagaaaattctctcagtatgagatcaggtcaaaaatgccaaaagaatatgatttattcgcttatccagaagaaatcaacgtttggttgattttccgtcaatttgttgatttgatcttgatgcaagattttgtaacttacatcacttacgtttacctttccatcccatacaactgggttcaaatctgcaattggagatctctatttggtgtcattttgatcctatttaatatttgggtcaaattggatgcgcatcgtgttgttaaggattatgcttggtactggggtgatttcttcttcttagaagaatcagaattaatttttgacggtgttttcaatatctcccctcatccaatgtattccattggttatttgggttactatggtctatcgttgatttgcaatgactacagagttcttttggtgtccgtatttggccattattcacaatttctatttttgaagtacgtagagaatcctcacatagaaagaacctatggcgatgactttggttccgaatctcaagtaaacggtagaattgatgatttggtttcaaaggagaattacgactactcaagaccactaatcaacatgggattttcgtttaacaattttaacaagctaagatttaccgactatttcactattggtactgtagtggcgctcaccttgggagcaatcctaaatgtaaattccattaatttgaattatttgttcattaccgtttttataataaaatcggtttcctggctatttatctccactatactgtataaaaaatctaagaccaaatggtttacaagattgtttttagaaaacgggtacactcaagtgcattcgtatgaacaatggcaattcatttacaattattatttggtgttaacatacacactgatgacaattcaaactgggcttcaaatgtggagtactactcgagcagacctgcagcagcagctg

SEQ ID NO: 4187 - DNA, 651 bp, Saccharomyces pastorianus
atgccaatttcctcggcatcttctcagtactctagcaccaacaacatcatcaatcataacacctacttgaatggcaccaacaatatcaatagcggtagcttgatgaacaatttgagaataggcgggatttcttcatcaagattcagtcttggagccatctcgactacgtccctagtgaacaataaattaaacaatgtaaaatttaagtttgttaataacaacatcaaggttattaagggtgaaaaattcactatgaggcttcagatcataaattcatcaccatcgccgctggatcttgttgtatactataacaatacaataaacccgatcacatcagcgaatattgtacgcaacaataccggtatcaacatctacggtatgcataatggaggcatctccaatccgtcattaacattagaaaagcaatgccaattgtataaaaaacacagcaagattgcagagggcattatactgctatcaaacgattataaagttccagtggtgcccccgagtgaaacatattttgtagatttacgatttattggaattatgtccggatattatgccactctttctgggctcaaagtattggacttgaacacgaacgaacttattgaagtcggaattggtgcatctgtgctcgtccaatag

SEQ ID NO: 4188 - DNA, 810 bp, Saccharomyces pastorianus
atggaatgttttataccgctgcatagcgaccttaatggaaatgatatagaacaattacgtcagtcacatacgtcccgtaaattcattatattcgacgagcaattgaatctttggctacggtttcaggatgatacacagacaaacaagagattcgaactgcagaatatgataatatctataaatgaagctcaagtaacaagtacgactgatattgacgatttttttactcaggttggcgagaagctctggaaattgaaagatgaccgctgctcaaaagctctcttcaaatcgaatgtggttatgaataacggatataataatcagattaaatttttgtttgagtataagtcagtggatgcagatctcagcaatcgcgactcctcaccagtttcagacggtagcattgcgatggggaaaaaacgtggcgaagaaattttgtcaagttttgaaccagtttattcttggtcatcgacggccattacatcaaccagtatttccaaggtgcataagcaaaacaatactaaaacagcccatctagatacttctagaaatggcgaaactcttcaagcgaaccaagatatgtttagtttaaagctacagtatccaatatattcgcttttaaatatgagactgagaaacacatctttgaaatccgaacattgcatactatcatcgttagattttcaaacttctaaagcatccgagcaactaacgaagagattcatttatccccaagagcacaattcacttctcaaactaaattttcatgaaatatcgtacaaactgattgatggaacatcacaaaattaa

SEQ ID NO: 4189 - DNA, 483 bp, Saccharomyces pastorianus
ggcaatcggcgtcgatcaaacggcagtactgttgcacctactagtaacgataatggcgatgagagcgacgatttctcggaattcgaaagcgtgccagccaaccagagtacagaatccaccaaagaggaccgttctgaagttgtagatcaatggaaccaacgtcgtgctacggaaatccatcaaaaggacgtaaaggacgaagaatctaagaaggaattacaagacgaagccgttaaacatgttgacaaattttacgattcatacaacaaaaagaaggaacaacaattagaagatgcttcaaaggatgccgaagctttcttgaaaaaaagagatgaattttttggccaagacaatacaacttgggatcgtgtactacaattaatcaatcaagacgatgcagatgtcattggaagtagagacagatccaagtttaaagaaatccttttgagattgaagggtaattccaaggctcctggtgcttaa

SEQ ID NO: 4190 - DNA, 270 bp, Saccharomyces pastorianus
atgtccgaaaaatttcctcctctagaagatgaaaatgtggatttcacagccaatgataaaaaggaagacgataccagttttttgagaagagaagctgaaatagtcggagacgagttcaggactgaacaagacgacgaaatattggaaaacgaagcttctcctgcggatgacgaaattaaagattttgaagaacaattccctgatatcaactctggcaatggtgaaatcccaacgacaaaacggcggactgttgccctactattacgataa

SEQ ID NO: 4191 - DNA, 912 bp, Saccharomyces pastorianus
atgccatggctaagagaatcaactatattagtcttgttgaacatattatatcctgctttaaaaaaacttccgattttgggaaatgattacgttcactggacttctatggtcggaatatcattgatgctcactaagggtgaagtgccgtcatggatttttgctcacttgcttattgaggtattgcattctaaatcaaaggattcagaaattatacgatggttaaaaagaaaattttcccagggcacatggacaaaatttaaacaagtctttgtttgttctatgatggtagtattattcaaaaaattggataggaattcgttatcgtttcgtgcacttttcgactacaggccatttttaacggatttcgtaacaattaatggcatttcctcacttttatcgatatatcgaagagtattaaaatccgcttttacatcaagcacaaaagcgaataagagtggctccaaccatgacattaggaacttctcgcaatcactcggtgtcaaaaatcatgatgattggcccatatcctcatcaaatttaaagcatgtaatggatagactaaatgaaatatacgaaattacaaccgaggacaattatgcaagcttaagcgaaaagataataaattcgtgttttgtgaagggtatcattccaagtttaagatgggctataataaggcagtgcatcgagtacttattcgcggccaaaagacgtatgttgatgaataacaagttgcggtggattgtgatgcttctcacatttactttgatagacccgaagaacaaaatggtaattagcccactctttgtgaaattgcttgctaaaaccttagtcaatgtctatttaaaaaaatattggcatcacaatttccaaaagtatatattatttttcatgtttcaatttagtattacgtga

SEQ ID NO: 4192 - DNA, 144 bp, Saccharomyces pastorianus
atgaagcgcaaccgttcaaatgataatggtaaggctgattccgtattcaaacagatactactacagctttcatctcttgtgaaccggaaaagaagaaaacaattgatcataatattaaaagaatactgcaagtctatggcataa

SEQ ID NO: 4193 - DNA, 1707 bp, Saccharomyces pastorianus
atgcaatacaggacagcgattcaccgcttgtattcgaaagcctcccatataacgacgccgattttctatcccaatgctaaaccgcacattggtcatctttactccagtttgttatgcgatgttcaccaccgatggcaactgttaaaggaaaaccaatctttcttcacgacaggtaccgatgaacatggactgaagattcaattggctagtgaaagtaatgggtttgatcagccaaaaaagtttgttgataagctatacatggatttcgttcatttagacaaaatatttgacatcaattacactagattcataagaacaacagatcctgaccacattgagaatgtcaaagaactatggcagctgtgtttgaaaaacgggttcatttataaaggcgaacataaaggttggtattcaatatctgacgaaactttttacccagaatccaaggttgttaaagatcctagtcatgacgggaaatatctgaatactgaatctaataatgaagtaatctatcagtcggaaacaaactactttttcaggctatccctgtttagggagagattgattagccatataaaacaacatccccatttcatctttcccgtcactaaaagagaacaaattctccaagaactagaaactactgaaaatttattagatttgtcgatatcaagaccctctacaaggctcaagtggggcatatcgactcccaatgatccgtcacaaaaagtttacgtatggtttgatgccttgtgtaattatctttcctctattggtggtatatcatctattttaaataacactgcggaggttgtttcgaagcattataatgctggatccaatgttgaaatgcaattgacaataccacacccaaaagaagtttggcagactactatacatgtaataggtaaagatattgcgaaattccataccatatactggccttctttcttattggccgctggattgcctttacctaagcaagtcgttatccatggacattggttgtgtaatggcgtcaagatgtcaaaaagtttagggaacgtcgtagatccagttgatatggcaagctactatggctccgatattgtgcgttggttcttgttagaaaattcaaagttggaagaggatggcgatttccaggaacaaagactatctgaaacaagagaattgctagtctctaaatggggtaatttggttaataggtgttgcggctcgaagtttgatgtcgaaagagctgtgacaaaatttagtaataagggacatctacaattgcaagaagtctttcaaaatgaaccagagatctcccagcaaattaaaagtcatattaaactgttgaacgaaacaaaagacgtttttgaagaaaaaataaccctattccagtattcccaactgttaaagcatgtttggggtataattaatgatgcgaacaccctagtccaaaacggtaagccctgggagagagaggtggaccaacaagacgctataatattcttgtctatggaaacatcaagaattctcaccattctatgccaacccataatgccagctctttcacaaagtcttctcgaccgcattgatgtcttagaagagaggaggactataactttcattgaattggggtccgacgaagcgtatggaaaatactctaataagaggggtagagaagtaccattaaaaagaattccatacagactttcggagtag

SEQ ID NO: 4194 - DNA, 441 bp, Saccharomyces pastorianus
atggaaagaccattgtgggtacgttggttgaaagtctacgcaatcggtggtgcagttattggaggaggagcattgcttttcaagtataccacaccaacagacgaacagctaatcagccaactttctcctgaattacgtttacaatatgagagggagaaaaacttacgtcaggcagagcagcgggctttaatgaagatcgtccaagagacttcccagagcgacgatcctatttggaaaacaggccctcttcaatcaccatgggaaagaaagggcgataacgttcaaagtagagaccatttcgccaaagtaagggcggaggaagtacagaaggaggaactatctagaatcaggaacgaactttctcagttaagatccgagactgaagagaacacaaagaaaattgtagagaacaagcacggcagttggtggaaattctggtaa

SEQ ID NO: 4195 - DNA, 114 bp, Saccharomyces pastorianus
  modified_base (20)..(20): a, c, g, t, unknown, or other
atggaagaacgcggtttctnagggttgccaatggccttattggaaggtatcatgatcttaatcacagctattagggtattcactccattcttgtttggtgaattgattggttaa

SEQ ID NO: 4196 - DNA, 1638 bp, Saccharomyces pastorianus
atggatagtttagaggaatacgaaccgcacgttacgcaagagctgatcgatcgtggccatgcaaggcgcatgggccatttggaaaactattttgctgttttgcgtaggcaaaacatgtattcgaatttcgctgtttatggggaactgaataaggccgttagcaagagacaactgagacttgccttgaggttattgcttctaaagtatccaattctttcgcatacaattgttcccaaaaaataccctaaccacgaagcgtattatctcagtcaggaatatctgaataagccgtttcctcagcatgattttatcaaggttatacctcacctagaactggaggatttaatcatgaacagtcaatcagaatacagggaagtcatcggcaaaatttcggaacaatataagaatgataattttaaagtcacgagtagcttaatcgaattagtcgctcctataatcgtaccggcatgtgacccggaaaggcccaattggaggcttatttgtttacctagtagggatactagcgcgggcgaggcgtggaccaacttcgtttatgtcagtaaccattgcggctccgatggtattagtggaacgaatttttttcaggatttgactgctttactctctacgatcgaggagaacgggttcgactatgaggaggagatcgtggataacaacgtcatcatcgactataacgaagatcacaaagaaatctcgaagcttccgatctccatcacagaccgtattgactataagcctagattgacgtcgctacctaaattcttcttgaagaacatcgtgtctgagtattgtgagttcagaacttccaatgagtcgacagtcacttccaggtactctccctcctctaatgcaaatgcaggtttcaaccatctgttgcatttcagtgccgaagatacacaacaaattaggtcggaaattaaaaaaaaagttcatgctggatgtaccataacgcccttcattcaagcctgctttttcgtagctttatatagacacgataaagttttcaccaagtccttccttgaatatgggttcgacgtggccctcccaagtagcacaagaagattcttaccaaacgacgaagagctaagagactcctacaaatacggcgcaaacgttggtggttcacattacacctatttgatctcctcttttaacgtccccgagggcgacgccaacaagttctggcgtctcgtcgagtactaccacgactgcttcttaaagtcgtacgataacggagaccacttgatcggcttgggcacactacaactagacttcatcgttcaaaacaagaacgtggaccaaattatttccaccacctacttggaccaccaaagaggcggtgccatcatcagcaacacagggtttgtcaggcaagatacgaccaagccgtactacgcccgcgacctaatattctcacagtctgcaggcgccttgagatttgcgtttggcctaaacgtctgctccacaaacgttggtggtatgaacatggacatgagcgtagttcagggcactctacggaatcggggcgaatgggagtcgttctgcgacgttttctaccacgccatcggcgaatttgcgtcgcttggatgcgatactgccgtcgcgggtctcgtatag

SEQ ID NO: 4197 - DNA, 1074 bp, Saccharomyces pastorianus
atgttgcacccagagcctaacggcatccaatcgaagaaaacactcttttatgagaattctgatgacgctgaagaggaggagcagaacattcgcaagagcgctgaagaaggacagcaacgctacaaagcttccaaacagctccgattcaagataaacaaagagaccacaaataatgggcaacagcaactgtctggtggaagtgcggaaaatgaagaacgcgacgtacgaccctgggaatttagaaaagtaatacaagctgagtacagagaaaggatgccgcgcaattacgagttgaaacattggaagaagccctccaaagtgatgctagagtccatattccgtttattggagaccaatacggcaagcgccctcgattccgtcactgaaaaataccatgaggagttgaaccagatgacacacggtgacaataatgaactgaacaggatctacaagaaaaaggaacgcttgctcgagacaatcgtaacgaaaataaacaagaagctgaggcaggcaaaattcccctccagaatatcggaaagagacctggatatcgagtatatttattccaagaggcaatttatccagaaccgttattcacaagaattacaaaactgtgagaggctggaaacaaatcttgcacgtgaaaaaaaactactggaagagactaagaaactctgcaaaaacttgaagacaagcaataaaaggcggctcactgagaagttgatacaaagagacctccatccagtactcaataaagccatggaatacacatatgggttggattccactaatggatctgcacaggcagatgggcaagtggcttttaaaaacgacgccaacgaattaaacctgatgtggaacgaccctattaaaagcacgaccgatgtgggactcgacaacaaagaagtgttttcgttgttgccgtctttacaagagtatgcaagcacgtcacatgaccttaaggaaaccatagatcgaatagttacgaactcacatgaacgggaaatcaaagaattggcggtatctacccatgaagaccatcaggacgatacagaggaagattcacaggactga

SEQ ID NO: 4198 - DNA, 1332 bp, Saccharomyces pastorianus
atgttcttgaagttcccattgtctgtctctcacttcctcctctcattgttttctctgttccggtatacaaaaacaccatctatagatacatcggtttttcacccatcactgtccccttatactttcagttttcagtttttcattctttctttttttttgcaaaaggccttgtctcgaaacaaagaaaaaaaaaaaataattcatttaaaaagggaaaataaaattttgccaattaaaagaacagatcttttagccacacatcaacgcgcgccgtatacacaatcaactaaaatggaagcacacaaccaatttttaaagaccttcgaacaagaacgtcatgacatgaaagaatccgaaaaggatgaaatccttttgatggagaacagacgtagatttgtcatgttccctatcaagtaccatgagatctgggccgcctataagaagatggaagcctctttctggacatctgaagaaatcgaactggccaaggactctgaagacttcaagcaattgaccgacgaccaaaaggtctacatcggtaacctgttggctttgtctatctcctctgacaacatcgtcaacaagaacttgatcgagaagttttctgctcagttgcaaaacccagaaggtaagagtttctacgggttccagattatgatggagaacatctatgctgaagtctactccatgatggtggacgcctttttcgaagacccaaagaacattccattgttcaaggaaattgctactttgcccgaagtgaaggacaaggccgcctacgttcaaagatggatttccaacgaagatagcttgtacgctgaaagacttgtggctttcgctgccaaggaaggtatcttccaggctggtaactacgcctccatgttctggttaaccaacaagaagattatgccaggtttggctatggccaacaagaatatctgtagagacagaggtgcttacaccgacttctcgtgcttgttattcgctcatttgagaaccaagccaaacgtcaagatcaccgaaagaatcatcaccgaagccgtcgaaatcgaaaagaagtactactctaactctttgcccgtcgaaaaattcggtattgacttgaagagcattcacacctacatagaatttgttgctgatggtctattactcggtttcggtaacgaaaaatactacaacgcctccaacccattcgaattcatggaaggtgtcgctaccgctggtaagaccaccttctttgaaaagaaggtttccgactatcaaaaggctagtgatgtgtccaagtcttctgcccccgtatccaaggatatcaactttgatgatgacttctaa

SEQ ID NO: 4199 - DNA, 1092 bp, Saccharomyces pastorianus
atgaatctttatgatatccgtgaaagaaaattcaacaatgagctgctccacttgattggcgactcatgcaagcaaaagctaatgggcgcccctatgaaagctatgattgccggcaaaatttgtgaatattttacccaaaaatacggttttagcgcagactgtaaggtctcccccatgactggtgataatctagccacgatatgttcattgcccttgcggaaggacgacgtgttggtctccctcggcacaagcactaccgttctcttggtcactgacaagtatcatccctctccgaattaccatctctttattcatcccactctaccaaaccactatatgggtatgatttgttactgtaatggctctttggcaagagagaaaataagagaccagttgaacaaagagcgggccaataatacggaaaacgataacgattggacgcttttcaatcaagctgtgctggacgactcaaaggacgatgacaatgaactaggtgtatacttccctcttggagaaatcgttcccagcgtcaaagccgtagataaaagggtccttttcaatgcgaaaacaggtaagatcgaacaagtcgtgggaaaatttgcggatttgacacacgatgccaagaacattgtagaatcacaagctttgagttgcagagtaagaatctctcctttactttcggattcaaacacaaagtcgcaaaaaaacctcgacgaagacacgatagttaaattcgactacgacgaatctcctttacgtgagtacttgaataaaagaccagaaagaactttctttgtgggtggagcttccaaaaacggtgctattgtgaagaaattcgctcaagtcatcggcgctacgaagggtaatttcaggttagacacaccaaactcgtgtgcccttggtggctgctacaaggccatgtggtcatttttgtacgattcaaacaagattacagtcccatttgataaatttttgaacgataatttcccatggcatgtaatggagaacatttccgatatagataacgagagttgggaccgctataatacaaagattgtccctctgagtgaattagaaaaaacactctcttga

SEQ ID NO: 4200 - DNA, 339 bp, Saccharomyces pastorianus
atgtcccaggactcatactacctcggatttgatctctcgacgcagcagctgaaatgtctcgccattgatcaggacctgaaaattgtccattcggaaaccgtcgagttcgaaaaggacctgcccaactaccgcacgaagaaaggcgtttatatccgcggcgataccatcgaatgtcccgtggccatgtggctggaggcgctagacctggttctctcgaagtactgcaaagcagggtttcctctcgagaaagtggtagcagtttcaggatcctgccaacagcacgggtccgttactggtcctctcaggctgaagcttgtgagccaattgacaatgatcgaa

SEQ ID NO: 4201 - DNA, 1974 bp, Saccharomyces pastorianus
atgacaccggaaatgaggcagacttctgattttcagcgtgatccagacagttccgacgaaactcaaaacaaaccgcaatcacaaattccagtgtctcccttggcagaaaacgcatgtgccgattacgaagaggccgaaataaagctcatacaagatggtatgtgcatgaacctgccgacagaaaatgaagatgaaaatggagatgaatctgaaaatgaaaatgaaaacagtgacgaggatgattctgaaaatgaaggggaagactttgaagtgtccaaaaccggatacctttcaggtatgttgtcttcgcagcaggaagaacaagtagaacaggaaaaggcagatgaagtcaagaatgcagatatgctagaagaagaagaaggaaaaagtgaagaagaaaagagtattagcagtagggattctactgaattcttcgagacatctaataagccaacccaagtagcaggtctaaagaatacagggaaggagatgaagcttctcgatgacgaataccgcaactcctttttcaacgactaccagcgttcttcagactctgaaaaagagaccaaagaggaggaatatgacggtaatgaaaggtcttcaccgatttcagatgagccttcaagtgtaaaccaaacatcaaaacaacttgatacgacggacgatgatgctttatcgtatactgaatcaatcaagtattcagcaaacgatacaaaagtcggagaagaaggagaagaagacagcgaaaccactgaaaacgataacgaagctactgatgattacagattttccagtagagaaagagattctgtgctaatttcgagtaatgaaaacgacagtgaagcaaatataaactctgactcggatgagggtagtttgaaggcttcgaagtcaggctatttttccaaaatgattgacgatgatgaaagttcagaccataacgatgaggagaaatcgacaatggatcacaaagaagctaaagacaatgaaaacgttaactcggaagatggtagtgttgaatcaatgccgaaccctaacggtgatgaaggggataacgcacacgaagacaaagatacggaggaaaattcaactagggactcaaatgatattggctcttggaaaccagatagtgaagcgttgcgatcgggattcgtacaggatacagcaaataaaaaagcgccacctgggtatgtgattgactctaatggtaagttagtagatttaacgcctgctagtatgaaacctcgcgtagtctctacatactcggaaatggaaagtacctgggatgcatttccttctaaaagtgggaacgaagatttggagactattagggacaccaagaccctatacgataacaatacgatctataatgttcccggtttaataggtaatcattcaaacctaccacctttaccgacgattgcacacgaacaattgaatgcaggaaacgagaacggtaccacagaggacgataataacaaccacaatattgatagtcaggtggcacgcgatgcatctttgaaaagtgagagcagggcgctatcacagggcgaaatggtgagcattcatgagcccagttctaaagaaatagcaaaattggggcaacagagtaatgtgcccaatctagacgtaaacaaagtactgaatagtaaaacatcgcatgaaagtaagataaaccaattgagaacccagaagcacgaattggacgaatacgacacgggaatacagacatggataaactatacattaaaatcgtcctctaggaaggataaggactttatagttgaagagtataagcagcataatcatgtcagggaggcatacgcgaatgcagacgatttgagcaagaagcatacagttattaatacggtcgccagcgtcaatcagaatgttacgcatctgaggaggaaagtcttccagcattctatgaaaccaaaggacttgtttgcgtcaataggtaagaaaaaactgtga

SEQ ID NO: 4202 - DNA, 1230 bp, Saccharomyces pastorianus
atgagcaaaacggaatctttagattggctggaaaacagcaccaggtctgtttgtccagaaaacgtttcgaaagttttggtcaatgcatggtcgaccttgtacgaaatcagaaagtatcaattggatttcctcacatctaatgatttgacttcatatttatgcaatgcaatgatgttatcaacaaaggaaaaggagagtactaccgatggaggggaagaagaagaagaagaagaagaagaaacacttcgtgaattacaatttaaatattcttacactctagcacaacagagacatattgagcctgcagtcaagactctagaatcacttatcttaaacaaaagtccaaactgctacaaagcttggcatctattggctctgtgtaggtctgttcaagaggataaggaaatgtcgtataagattgtttgctctgtactagaagccatgaatgaaagtcttcaaaatgatactttaagtctgaatgatagatggcaactcgttcatcttaaattaactcaattggctattattgaagaaatttttggcacgttggaagctctggaaacactgccagaagtcttcgagctttacacaacattgtttcccgattcaaaaccagaattgaacagcacaggtcctaagtacagtcaaactaaagaatacctcttacaaatggtctggatctttgctgcaaatatgtatatgagaacaaaagaaaacgactcggatgccaaggcagccatcaaggaagcctcaaaagtagagagcaaatttaagaacctaaattgtaatattgctaacggttatttatcgataataaagaatgaagcagatgttgcactgaaagaatttgaaaccgtactatactacgacgaatataatctggacgctctgatcggatttgccgaattaattttcccagaggaactagatgcaaacgaggaaaacctcgaaagttactatacactgagcctcgacaaaaaaccaaccaagcgggctcaattaacgtttgtaaatgacacagacaggtctgcagcgtacgccaggttaaaatttctactagagtgcggaatactagagtcaatagaggcgtatcattccccggaggtatggtggtacttgtctttaatttacgaaaagtatcaagatgatgaatacaaaaattccttattaaaatgtgttaaatatcaagagttgaaccctattcgctccttcaggtattgcaattactaa

SEQ ID NO: 4203 - DNA, 1053 bp, Saccharomyces pastorianus
atgatttgtgttgagccagtcactaatacacgatttgtaagtggtggcgatgaaaaaattctaaggtcttttgatttacctaaaggtgtggctggaatgttgcagaagtttgttggtgttcagtttggtcaagaaaatgaaatgcctgagtctgccactgtgcctgttttaggtttatctaataaagccggagaggatgacgctaataatgacgatgatgatgacgatgatgacgaaggtagtggcaataaagagtcggatgttatcgatcctttatccttgttggaaacgccaccaatggaagatcaattacaaagacatctattgtggccagaagtagaaaaactttacggacatggttttgaaataacgtgcctcgatgtttctccagatcagaaactaattgcatctgcttgtagatcgaataatgtccaaaatgcggttataagaatatttagtacagaaaattggttggaaataaaaccagccttaccgttccacagcttaacgataacaagattgaaattttctaaggatggaaaattcctgctgagtgtttgtagggacagaaaatgggcactttgggaaagaaatatggaagacaatacttttgaattaagatataagaatgaaaaaccacatacaagaattatttgggacgcagattgggcaccattagagtttggtaatgtctttgtcaccgcctccagagataagactgtcaagatctggagacaccaaacggaaccaacagatgattacgtcatggaagcatccattaagcatagcaaacctgctacagctgtctctgtgcatgatgccatggtgggagacaagattttaatatcggtggggctcgaagatggtgaaatctatttgtacagctatttttccggcaacttcgaactaatatcacacttgaaagaggacataacaccagcagataaggttacaagattgagatggtcacatttgaaaagaaacggtagattttatctaggcgttggaagtagcgatttgtctacccgtgtatactctttagcatacgaatag

SEQ ID NO: 4204 - DNA, 1365 bp, Saccharomyces pastorianus
atggcggaatctgttgttcccgaagctatcttcataggtgctaacaaacaaactcaagttagtgatctacacaacgataaaaaaatcgttgcatttggtgcaggcaaaactattgcgttatggagtcccattgagcttaaccatcaaggtgtttacgcaactttgaaaagtcatgaagcagaagtcacatgtgtgaagtttattccagagacagaatttatggtatccgcatctgaagatcatcatgtcaagatttggaaattcatcgatgactctcatttacaatgtgttcaaaccataaaacactattcaaagacaatcgtggcattgaccgctttgccaaacatcattgctgtcggttctgctgatggtaccgtcactttatggacacagaacacacaaaccgatcagttcagttttggtcaagaaattagcataaaaaaaggatttttctatccattatgtttatcattgtctagggtagaaaagaacaagtacttgcttgccatcggtggtaccaatgtacacgtatttattgcctctttcattctaaagaatgcggacatcgaaaactgtcaaattgttgcagaattagaaggccatgaagactggattaaatcattggcttttcgtcaccaagaaaccccaggagactatttattatgttctgggtcccaagaccgttatatcagattgtggagagttagggttaatgatttaattgatgactcagaggaaaattcatcgaagttgaccttactaagtaataaacaatataaattccatattgacgatgatttgagagttggtattgattttgaagcactgattatgggacatgatgactggatttcatctctccagtggcacgaatctcgcttacaactactagccgccacggctgacacttcactaatggtatgggagcctgacgagacctcaggtatttgggtatgtggtctgagattgggtgaaatatcctcgaaaggtgcctcgaccgctactggttcttccggtgggttttggtcctgtatatggtttactcatgaaggaatggattactttttgactaacggtaagactgggtcttggagaatgtggtgtactaaggataacataatctgtgaccaaaagttaggtacatcgggcgctacgaaggacgtgacggatgtcgcttggtctcccagcggtgagtacctattggcaacttctctggaccagacagcaagactgtacgcaccatgggtgtataacgctaacggacagaaaagagatgttacgacttggcatgagttttctaggccccaaatacatggtgactctagagatccccggtaccgagctcgattcgtaatcatgtcatac

SEQ ID NO: 4205 - DNA, 678 bp, Saccharomyces pastorianus
atgtcagacggaactttatttaccgatttgaaagcaaggaaattgatcagaacaatcgtgccaaggggtttggtgcgttcgttgaagctggacgtcaagctcaaggaccccagcgacgctcgagaactgtacgaaagcgaatttccatggggaaagtaccccacgtttgtgggaccacacgacgagtggactctcacggaggctatggccattgactattacctaatccacctgtctaaggacaagaaagccattactcacttattggggcccgtgggtgatttcaaggtccgtgcggacatcctgagatgggagtcgctctccaacagcgatttcttgatcgagctgtgtaagttgttttaccctatagtggggataaagccttacgatgccgccgagttcaacaccgcaagggggaacattgacactatggtctccctctacgagaggaggttgaaggaacagcagtttctggcgtgcgattatcatgaaactctcgctgatctaatctctgcgtctgttttttcattggggttcataagtatcttcgacgaagaatggagatcaaaccacccggaaatcactaagtggttcagtaagacgctcaagtctcgcttttttgagggagagtttgaaaagtttgaaatgtgcaagatggcattgcaacctaagaaataa

SEQ ID NO: 4206 - DNA, 639 bp, Saccharomyces pastorianus
atgggcaagttcctgaccacccaaagaaccaacggtgtctccacaagtgacatcatcaccaagatcatcagggactatgacaagtatctgatgaggaatttcgcaagaggagccactaggcaagagttgaacgtttcttggttaaagaaaaacgagctggagttcaaaaaacacatcaacgagttcagatcgtatttcaagaaaaaccagacaaatttgaacaatgcctccagagatttgtatttcgaagtgcgtgaaatcctactaaagaaaaccctgggcaagaaactctattccaagttgataggcaacgaattgaagaaacagggccaacgacaaagacagcagaatttcttggacgacccgcttaccagaaaactaatcagggaagcctccccagccacagagtttgccaatgagttcaccggtgaaaaggctaccaccacatcagcaaataaatccattttcagccaagacgatgatgaagacacgaactccaacacaaacacaaatacgaactcggagtctgattcaaacacaaactcgacccctcccagtgataacgatgatgataatgacgacagtgatagcctaactttggaaaacttgactcaaaagagaaagaaccccaggaactga

SEQ ID NO: 4207 - DNA, 639 bp, Saccharomyces pastorianus
atggcaaacccaacagcagggaagtcttcaatcagggctaagctatctagctcttccctatcaaacttattcaaaagtaaccgaaacaaaagacatcacgacgaggcggaggagcaagataacgagcatcagcaggatgagcaggaccatgaacaagaaaataaagacgctcagctcagcccaaggaagcgccgtcgcttagccaaagaattcgaagaaaacgaggcccgtttgaataccgaattgcccaaggagctgcgcaagtatcgtccaaagggtttcaggttcaacctgccccccacagacagacccatcagaatatatgcggacggtgtgttcgatcttttccatctgggccatatgaagcaactggaacagtgtaaaaaggccttccctaacgtaacactcatagtcggcgtacccagcgacaaaatcacccataaattaaaaggtttgaccgtgctgaccgacaaacagcgttgcgaaactctgatgcattgcaaatgggtcgatgaagtcataccaaacgctcctggtgcgtcaccccggaattcctactcaaacacaagatcgactatgtggcccacgacgacatcccctacgtcagcgcagagagtgatgatatctacaagccgataa

SEQ ID NO: 4208 - DNA, 633 bp, Saccharomyces pastorianus
atgggcaagccgctttctgtcattggattttttgttggttctcggatgacatttgttaactccatccccaccgcacagacaataaaaacagctaccgccaaagctagaactagagctagaactagaaatacagctacaaacgcacacgagaaggccaattacaaaatggactcgtactcgataacaaacgtgaagtacctggaccccagcgaactgcaccgctggatggtcgagggccacaccacgacgctgcaagagcccttccaggtcgtggacgtgcgaggctcggattacatggggggacacatcagggacggatggcatttcgcctactctcgcctgaaacaggacccggggtacttgcgtgagcttaagcgccttttgctggagaagcagcaggtcgcggcggacggcgacggcgacggcgacggcgcgctcaacgtggtgttccattgcatgttgtcacaacagcgcgggccgtccgcggcgatgctactgctgcggtcgctcgacacggcagagctgccacgctgccggctgtgggtgttgcgcggcggcttctcgagttggcaagccgtgtacggtgatgacgctggcgtcacggagggttacctcgcggacctgtggcgctga

SEQ ID NO: 4209 - DNA, 1209 bp, Saccharomyces pastorianus
atgctaagacaggtcaccattggccaagccccaactgagaaaaaccacaccagagtcaccgggttcgatatcactgtggcgtccgaattgatggccattcttgctctttcaaaggacttgagagacatgaaagaacgaatcggacgcattgttgtcgctgctgacgtaaacagatctcccgtcaccgtggaagatgtgggctgtacgggcgccttgaccgccttgttgagagacgcaatcaagccaaacttgatgcagactttggagggtactccagtcttggtccatgctggtccatttgccaacatctcgatcggtgcctcttctgtcattgcagaccgtgtagctttgaaattgatcggtactgaaccaaacgcagagacagagcccggttatgtggtcactgaagcagggttcgatttcaccatgggtggtgaaagattcttcaacatcaagtgccgttcctccgggttgacacccaacactgtggttcttgttgccactgtgagagctttgaagtcacacggtggtgctccagacgtcaagcctggccaacctttaccttctgcatacaccgaggaaaacatcgagtacatcgtaaagggtgctgctaacatgtgtaaacagatcgccaacatcaagcaatttggcgtccccgtcgttgtagcaatcaacaggtttgaaacagacactcaaggtgaaatcgccgccatcaaaaaagctgcgttagaagctggcgcatttgatgccgtcacttcgaaccattgggccgaaggtggtaaaggtgctatcgatttggccaaggcggtcttttttttctctaagcaaccagtagacttccacttcttatatgattttaatgcctctgttgaagaaaaattaactactattgtccaaaagatgtacggtggtgccgcgatcgatatcttgcccgaagctcaacaaaagatcgacatgtacaaagagcaagggttcggtaacttaccaatctgtattgccaagacccagtactctttatcccacgatgccagtttgaaaggtgttcctacaggatttaccttccccatcagagacgtcagattgtctaatggtgccggatacttgtacgctcttgctgctgaaatccaaacaattccaggtttggctacttatgctggttacatggctgtcgaagtagatgacgacggtgaaattgatgggttgttctaa

SEQ ID NO: 4210 - DNA, 1545 bp, Saccharomyces pastorianus
  modified_base (1536)..(1536): a, c, g, t, unknown, or other
atggctggtcaagtgctggacggcaaagcatgtgctcagcaattcagaaccgatatcgctaccgaaattaaatccatccagggtcacgtgcctggattcacgcccaatctggccattatccaagtaggtaacaggccggattctgccacgtacgtgcgcatgaagcgcaaggctgctgaggaggtcggaatcgtggcaagcttcgtacacttggacgagacggtttccgagttcgaagtgctgcgttgcgtagaccgtttgaacgaagatcctcaaacgcacggaatcattgtgcaactgccattgcctgcccatttggaagaagacaaaatcacctcgagggtgctggccgagaaggacgtggacgggttcggccccactaacatcggcgagttgaacaagaagaacggccacccattcttcttgccctgcactcccaaggggatcattgagctactgcgcaagtccaacgttaccatcgaaggctccagatccgttgtgatcggtagatccgacatcgtcggttctcccgtcgcggagatgttgaagtccctaaactccactgtcactatcacccactccaagacccgcgacatcgcctcctacttgcacgacgcggacatcgtcgtcgttgccatcggccaaccagagttcgtcaagggcgaatggttcaagccaagagatggcgcttcctccgacaagaagactgtggtcatcgacgtcggcactaactatgtggccgacccatccagaaagtccggcttcaagtgtgtcggtgacgtcgagttcgacgaagccatcaaacacgtccacttgatcacccccgttcccggtggtgtgggccccatgaccgtagctatgctgatgcataacactttgcttgccgccaaacgccaactggagcaatcttctaaaccattacagatcccagctttacccttgaagttgctgacccccgtgccctccgatatagacatctctagggcgcagcaacctaagctcatcaaccaactggccgaagaattgggcatctactcccacgaattggaactgtatggtcactacaaagccaaggtttcccccaaagtcatcgaaagactccaatcgcgccagaacggtaaatacatcttggtctccggtatcacccccaccccattgggtgaaggtaaatccaccaccacgatgggtcttgttcaagcgctaaccgcacatttgggcaagcccgccatcgccaacgtcagacagccctccttgggccctacgctgggtgtcaaaggtggtgctgctggtggtggttactcccaggttatcccaatggacgaattcaacttgcacttgaccggtgacattcacgctatcggtgccgctaacaacttgcttgctgcagctatcgatactagaatgttccacgaaaccactcaaaagaacgacgctaccttttacaacagactggtgccaaaaaagagcggtaagagaaagttcactgcctccatgcaaagaagaatagacagactgggcatcaacaagtccaacctngatgagtga

SEQ ID NO: 4211 - DNA, 453 bp, Saccharomyces pastorianus
atgtcagtatataaggaagagcattcggggatggaagctgccaagggaacgactttcaacaattgtcttctcaatttggcggtgaaggaatttataacgcacacatacacagctacacacctgctaacaaaatcaacaatggtcactcaattaaaatccgcttctgaatatgacaacgctttggcctctggcgacaaactggtcgtcgttgactttttcgccacatggtgtggtccatgtaagatgatcgctccaatgattgaaaagtttgccgagcagtattccgatgcctccttttacaagttagacgtcgatgaagtatccgatgtcgctcagaaggctgaagtctcctccatgcctaccctcgtcttttacaagggcggtaaggaagtcaccagagtcgtcggtgccaacccagctgctattaaacaggccattgcttctaacgtgtaa

SEQ ID NO: 4212 - DNA, 1074 bp, Saccharomyces pastorianus
atggcggatcaagcttgtgatctttgtaaacctaactacgggtggtgcagtcagggcaagagacatatcccgatcaaactgctggacgttgctgggctggtgcctggggcccattctggtagagggcttgggaataaattcttggatgatttgagacacgcagatgcgcttatccatgtcgtggacgtgagtggcactacggactccgagggcaagaacacaagaggctacgaccctttgaacgatatagtgtggctgcaggacgagattagactttgggtcgaggggaacctgaagaaaagatgggggtcgattgtgcgtagacacacggcgacgaagtctagcatagtggatacactgcaagcgcaattcggtgggtacggttcgcacgcccccatgatccaacgagccctagacaggctaaaggggctgccaccgctggaaaaatgggacgacgaatggatcacccgagtggtgaagtccttcatgatggaaaagttccctaccgtgctgggcttgaacaagatcgaccacccggatgcggataaaaacgtttccaagatcatgttgaagtaccctgacaccaaggctgtgctgactagtgccgtgactgaagtgttcctaaggaaattgaagaagcaaggcttcatattgtacgaggagggcacggaattcgtcgacacgtacgaagacgagcctgacaaactaaaaccactggacgataatatcctcaacaggatcgaaaacatcagagatttggtcctgtacaggtttgggtccacaggtgtcgtccaggtgctgcaagcagccacggacatccttgggctgataccggtgtacacggtgaagaacgttcagactttcacggggggcaacggaaccaacgtgttcagagattgtttcctggtcaagagaggcacccccgtcggcaaggttgctagatacataatgggtggcgaggtcaccatcgcagccatcgaaactgtgggcagcgtaagagtcagcgaagagagtcttgtcgagcctggcaaaaacgacatccttggcttcaagatcgccccaagatcagcataa

SEQ ID NO: 4213 - DNA, 972 bp, Saccharomyces pastorianus
atgaggaagtccatagacgagagtctttacaataagatcgatgaattcatcaaaaaagttcggtcctacatggactgcgagcccaacaccatccctgtcacctttgtgttggatgatcctgcaggcaactcatggatcgaatataagcctggcgagcctcagcacaaatggtcgcatacgcagtacgtgagaactgatgaacaaaacgttcaggtcggcatcatcaccagagaccagctggaacaacgtcgccaagaaaaattgaaggcattggctaaccgtgaaagaaacccctcccagactgttaaagtcggttcatcaaccccacaatttatatctgatgccacagacatagagaacttcaacaacgaagtgcaaacattcagagcggcttgtccatcgtgtacgcaagagtgcgaaacccatatgaaaccggttgatattccgcatttcaaagaagtcatcatcatgtccacggtgtgtgaccactgcggttacaaatctaacgaagtgaaaaccggtggcgccattccagaaaaggggagaaagataaccttgtactgtgatgacgctgcagacctatcccgtgatattttaaagtctgaaagttgtagtatggttgtccctgaattacatctcgatattcaagagggtaccttgggtggcagatttaccactttggaaggtttattgagacaagtctatgaagaattggagtcccgtatttttacccaaacctctgactccatggacgaagcaacaaagacccgttgggtagagttctttgcaagattaaaggatgccattgccggtaaagtcaagtttactgtcattatggaagatccattggccggctcgtacatacagaatgtctatgccccagatccagatccaaatatgactatcgaggattacgaaaggacaaaggaacaaaatgaagacctagggctgtccgatatcaaggttgactaa

SEQ ID NO: 4214 - DNA, 3093 bp, Saccharomyces pastorianus
atggaagtaaaagaagaggaaaaaagaccgcaacagataaaacattatctgaaatttgtctatcctcaaaagatccaagaatatacacatgcgagtttaatagcaaggattagaaaaaagctttttggaagtcgtagcaatgaagacaccagagatttcaaacaatttcttatgagaggaactgcaatcatgaacatagcacaaaatatgggagaattagccgacgaactcaaagaacctccatctcagaatataattcaaagaggtttatcaaagctcacgaagggcgttccatcattgagacgattaagaatgttcgctaataatccattttataagagtagtgatgttgtattcacagaaacgaacgatatcaacggaagaacctatgttttgcagttgaatgaatatgaagaagaaaagttagaatatttgaaaaggtatcctttgttcaattattcgtattatttcttttctcctcagcataggtttcggaaattttgtcaacgccttgtaccacccagtactggtaaaagaactgacggcacacgattcgttgaggatagtacagatctgtacaataagagaagctattttcaccacattgaaagggacgtgttcgtttttatttttgcgcttgctactattttattgattgtttgttcatgctacgtcacaccattgtaccgtatgtataatcatatgggaacctggaattggtcttctgccttggattgtgcgttcattggtgccttttctattgaatttattgtaaagacaattgcagatggatttttgtattctccaaatgcttacttaaggaatccatggaattttattgattttctcgtcctcgtctcaatgtggattaatttgattgcttacctgaaaaataatggaaatttatctagaatttttaaaggtttgacagcactgagagcacttagatgcctaacaatcagtaacaccgcacgtcaaacatttaatcttgtcatgtttgatggtttgaataagatttttgaagcagggttaatatcattgagtttactatttccatttacagtttggggtttaaatatctttaaaggccgcttgggtacttgcaatgatggaagtttaggccgtgagcaatgttacaatgaatattcaaattctgtgtttcaatgggaaattatgtccccaagggtttaccagcaaccatatcttcatttagattctttcgcaagtgcattcaattcattataccagattatttctttggaaggttgggtagatttgttagaagatatgatgaacagctcaggaataggtacacctgctacagtaatgggatcggcaggaagtgctgtatttctggttttgtttaatttcttgagtatggttttcattttgaacttgtttgtttccttcattgtcaacaaccaggcaagaacaacaggtagcgcgtactatactatagaagaaaaagcatggttggaatctcagaaacttttatcccaagccaagccaaaagcaattcccaatttaatagacctatccaaaatcagacagtttttttaccaaattgctgttgacaaaaagaatctctattatgcgtcgttcctgcagatagtactctatatccatataataatgctgctaagtcgcagctacgatccgaagcacttgattggttaccaaggcgtttttttcatgttttccaccagtgtattcttgatccaggaagcattccacatgtgtggcgaaggaccaagattgtattttagacaaaagtggaatagtacacggctcagcatcgtaattatagcatttattatgaatgctgtagcattccatattccagcttctcactattggtttcacaacaccaaagggttttttttattggtaatatttttattcgtaataccccaaaatgatacattgactgaactattggaaactgcaatggcaagtttgcccccaattttatcattaacttacacctggggtgttttatttttagtttatgctattgctttgaatcagattttcggtttaacaaggctaggaagcaatacaacagataacataaactttaggactatcatcaaatccatgattgttttgttcagatgcagctttggtgaaggttggaactacattatgaatgatctaactatatctgaaccctattgttcttctgatgacaactcaacatatacggattgtggctcagaaacatacgcatacttattactcatgtcgtggaatattatttcaatgtatatttttgtgaatatgtttgtctcattgattattggtaatttcagttatgtttatcgcagcggtggatctagctcaggtatcaacagatcagagataaaaaagtacatagaggcatggtctaaatctgataccgacggaactggtgaacttgaattgtcttaccttccaaaaataatgcattcatttgatggcccactttctttcaaaatttgggaagggagattaacaataaagaatctagtcaagaactttatggaggtaaacccagaggatccatatgatgtcaagatagacctgaatggattaaataaagagttgaacaccattagtaaagcgaaggtcatacaaagaaagctgcaatatagaagatttgttcagggaatacattatacgaatgcgtataatgggggcattaggttttcggacctattactacagatacctctcttcaccacttattccgcaagagagtgtttaggtatcgatcaatacgtgcattacttgtatgtattgggtaaagtggacaagtatctagagaaccaaaggaacttcgatgttttagaaatggtggtgacgagatggaaatttcacagtaggatgaaacgtgctattgaacccgattgggatgtcaaagatcatttagcatcatctcatatttcaaatattgatataaacgtggaatccgttccagaaactgcaatgacagaacctatcgggacacctaggatgaactatggtgtaaacaactttatgtggtctccaagaattgaccaagcgtccacgatggaaccgacagaaaaaccaaaagatggtaattcagaataa

SEQ ID NO: 4215 - DNA, 3006 bp, Saccharomyces pastorianus
atggaaggaaggaaaaggacactcacagagccattcgagccaaacaagaatccgttcgctgacaatgcagctataatgacggaagatagtgaagacgaagttgaaagaaacgatgatcatttggagacgaggccacaggctttggtaccaccatctttaaacattgtgccaccggatagtactggatatacaattgaaggtgaacaagaagatagtaactcagaagacaatgagaaagatgattcattaatttccaacatatttcgtactcgtatcggaaggagtactaataaaaacatgagtagacctaagctttctcttcaaacagcatcatttagtgctgcagaatcttccggacgtaacgcttcgccttcggtagggtctgccaaatctagttcacagcatattgatttaaatgatgaaaggctgcgcaggcgtagctttagtaactacagccgaacgtccagtaggcgggtttctaactcagcaagttcaaccgatagaccaccgaggtcggcaaaagttctgtcactaattgctgctgacgatatggatgaatttgaagatttgcagaaagggttcaaaagcgcgatagacgaagagggtttgacgtggttacctcagttaaataaaagccatactggaccagttgctggagaagaaggagaaggacgaggaggggcagaagaagatgaaatagagggagaagaagatgattatgatgaatcaatagctgatgtacatacacccaacgtgggaacgagcgcagcgcctggttccattcaccttgcgccagaacttggacaaagtagaccgctgtctgaggcacacgagggctttttatatacttcaagaaagaaattcagccccaagttcattgatcatttgtcacctcaaaagaagagcaaggatcaagcggaggttaatgaacatactatagacattccagatttcgaagcgcttcagaagaagctagataaaagaccttttgttctttatggacattcccttgggattttctcacctacaaataaaataagactgaaaattgctcgctgtttgctgaataaacgctattcatttctttgcagccttttattgacattttatactatacttctggcggtaaggacgtacgatcctcacaatgtcgtttttttataccgattttctgactggactgattattttattttcatattatctgcttgctttacagccaatgatgtagcaaaaataatcgcttttgggttttgggatgactctcaaatgttcagtgcatatgggcgtgagtataaatcaatcttacagagatccggaataatgaaactttatacatatatgagagagaaatatggcagtgaactaatagattttattattccgttcaaaattgaatctacagaggaagaaaaaaagtaccaacaaaaatcattaactgcttctttaacacaaccttatggtgcgaagggacagaacaggtcatttgccactccaagggcatttgcgcggtcgtcatggaatagaatagatctcgtatcttctgtaagcttctggctcggtatgttcttatccattagaagctacgattcaaaagcaggcataagaatattcaagcccctagctatactaagaattcttcgactcgtaaatatcgataccggtatgccatcaattttaagaggactgaaatatggtatccctcaattggtcaatgttagttctatgttagtgtatttttggatcttttttggaattttaggagtacagatttttcaaggttcatttcgaagacaatgtgtgtggtataattccgaagaccctactgatacatatcaatacagcctgcagttttgcggcggccatcttgacccagtgacaaaacaaagacaaaactatatctatgaggatggtactgaaggtcctgtttcaaagggctttctttgcccacaatattccaagtgtgtttctaatgctaatccgtataacggtagaattagctttgataatattgtcaattcgatggaacttgtctttgtcataatgagtgctaacaccttcactgatttgatgtattatacgatggattcagatgaaatggctgcatgtttgttttttatcgtttgtatttttgtcttaactatttggctactgaatttacttattgcagttctggtgtcttctttcgaaatagctaacgaggagtacaagaagagaaagacaatatatggttcaaaaaacatgggttatattgcgcgtttgataacaggctattggaaatattttaaactgaaggcaaaccaagccaaatttccaaattggtctcagaaagggcaaatgatctactcttatgttgagtttatttttgttatgcttattatctgtgatataggtatgcgtgcctctgtgaaggtgacaacttccgcacattatgccaatattctcttaaagactgacagaggaatttcaatcgttcttttcatcgaatcaatagtaaggctaatattatatctacccaacatgtggaagtttttgacaaaacccagctacgtgtacgatcttatcatctcgattatcactctggttattagttgccttgctgtcgaaggagttttaggacatgcatatgcttggctgtccatatttcagatatccagattttatagagtgatcatatcattcaactttactaaaaaattatggatacagatattaggtaacggtgttatgatttggaatttatcttccttttacttttttttcacctttgtggttgctatagttatggctgtgtatttcgaaggtgtcgttccaccagaggagatggcagaccagccgttcggaatgtatcattaccgaattcatttctatcattgtttattattgggtccactgaaaattggacagatatctgatacccacttcaaaaacactctcctaatatttcctcagcttttttttgttcagtgcttttcattatatggtttctcttgtccaattcagtga

SEQ ID NO: 4216 - DNA, 96 bp, Saccharomyces pastorianus
atgtctatgcatgatagatgtaccatgagatgctctcagacccttaaatccatatctcttcatcacacctgtaaaccccttacctttgctgactga

SEQ ID NO: 4217 - DNA, 834 bp, Saccharomyces pastorianus
atggaaagtagaacaaatatagtcatgtcgaagttcttacaagggcaaatatttaatatttcgaaaatttatgtcagacactcttctactaggccctttctggtggctcccagtatagccaaaagtataacgactgaagctccgccaatcaatcactcacctgaactagcgcatacgaggaaatggctaccagaaagatgcggtttgattacccgtaagaaggggatgatgccctatttcgatcaatctacgggtgagagaactgccgcaaccatattagaagttaataatgttgaagttttaatgcatagaactccagatgccaatgggtattttgcatgccaggttggatttggctccaagcatctgtccaaagtcacaagacaaatgctgggacattttgcttccaaagttgtcaatcctaaagaacttgtttcagaattcagagtgaaaaatgacaacggattgctaccacctggcactttattgaagccatcttttttcaaggaagggcagtacgtcgatgtcagatcagtcagcaaaggtaaggggtttacaggtgtgatgaagagatatggatttaagggtctgagagcatctcatggtacatctatcatgcatagacatggtggttcttatggtcaaaatcaagatccaggaagagtgctaccgggtaggaaaatgcccggccatatgggtaatgataacgtgacgatccagaatgttaaaattttgaaagttgatgatgcaaataacgttatttgggttaaaggttctgtagcggggcctaagaacactttcgtcaagattcaagatgcaatcaaaaaaacctaa

SEQ ID NO: 4218 - DNA, 1899 bp, Saccharomyces pastorianus
atgtccagtcattaccatcatacaactaatgcctcttcgtggaaaagagacgctgtactagacaaatctcgcacatcatttacgtttcttcagagaaacgctgaggacacaggatccgactgcaaggtgtctaaaaactcttcttcgaacgtcactgttgctgtggcagtagcagttcccgtcggtgctattattatactactgtccgtcgttttagtgcttgtgtataggagaagcaagaaagaaacattgatgcaggatttggacccaaattttgaaggtgatctatactacttgccaaaaatggattcgtccatcaattctgcaaactcagagggaaattccaccgaaagaaggtatatttacggctcttacgatgactacttgcaaccggcaacagacaaagcgctatctttcaaagattatgtgaagagaattcacgaccgagccccctccgcttataacattgcctcactcgcttcacgaaatatcagtaaggcatccgttgtctccaagcaaaccggacttcctggcagagtctccctgcgatcgataaagaacctcgaggcaacagcgaatgtgccatctctaggcccaaatgacgagaaaaaaaatagtggtcaaaaatgtgacaatacttcaagttctagttttgagaaaaatttaaagaccagtaacgatagccggcttgagttgggccaggcaagcggtggtgatcccgagccacaactgttgaaggatgacggagaaagtatagacagaataagaagcatctataacatttatttcgaaagaagtagcagctcaatacgtacttctgtggcttcttcactacgacgtggttccatagtaattactacaacagaacaaaacccagataagaacttccaaaacgacactacacttgctgatcaaggcccgttagaagccacagatgccatagagaccgactccggttcaacgtgtaatgacgactatgaagatgtgactgactatctgcaagctcccgcttcacagaagattacacacatcccatcctcagtatattcagaaatgccttttaaagacaaaaatatcgccgagccattcttattaacaaagttttctccgcccaatgccacctcaacgagaattgcctcatctatatactctgaactgcccgcaaaaggacaactttactctgcaaaattgcctgtacgggttcctccactggaggttttggctcatcctcctccaaactattcacaacaataccgccagtatcgaccaaaaggtcacgaccaagagaaaaataattattattatagtcatagcccgtcatcattagaacatcctcaaaattttgagaatatcggggagctgccaacgccaactcgattagcatattcgacttcctcacattcgcttacttcatttaaaggaagccttacaccttcacacgcactgaagcatgtgaccactgctagactaaacgggacggctttgaacccgatggaccatccagaaatgttttacaatactcctacggaagcatcttcagcagcatccttatcaaagcaatcgtgcattcctttgccataccaactaagacaaagtgtcgttatgacaaacccatccgatctttctatcaaaacacgttataaacctgcgggctctttgggccatttgataagggcccaacagctccccagtagcccgtccactatcactactccaatgtctctttcacagcagcggtcaacggtgccaacactaattaacgttcgtgtgagtgggctattggacgactctgatgttttacaacctccgaatggggatggcatcctaccttttactgcctctgtagaagacctaagaaagcaactgggcacaccgcataaatacgaaatgacatcctaa

SEQ ID NO: 4219 - DNA, 483 bp, Saccharomyces pastorianus
atgacaccattgatgcagcccttacccaatttgatgacaaagttccaaagatattcacaaaatctacataacgcattccagtcgtctgagaaatattttgaaggattgaccgagaaaattgagccaaaggatatgatagacgtgacccaactatggcgcgttcttgattcagtacgtgagatggaacgtaaatccgtgttagtgtggaacttacccactgaactacagtcgtttaatatattaaactacttctggttttacaatataagatcaaacttcaagatattctgggatgacgagatgaagagaaatctccagtttatatcttttgaaaactcaaacgatgcgtaccgctttaaaagaaactatcatggtttgttagcaaaggagttactaaacccgccgaaaaaggaggaaagcacactcgagacggactctgttatagacgattccaaactattaatcgagcatctaaacgaatga

SEQ ID NO: 4220 - DNA, 159 bp, Saccharomyces pastorianus
atggccttcactgctgctttatggggaagcacaaacttctttactggtttatctaagtttgaaatatcccacaaactgcaggagttatcgtttccgccaaccgcaagcaggttagaatgttcatttaatgaaatgcctgcaataataccattttgttag

SEQ ID NO: 4221 - DNA, 456 bp, Saccharomyces pastorianus
atgagttatcccacttcagtgtcacaaagcgagatgaacaaccttaccagagatgtgcaaactacgtcgatgtcttgcgcagagaaggatgtaacaagaggttatttcgaccagtccacgaaggatagctcgaaacatgcacatcttacaaaggtgaatgcaaagcactcacttcacaggtgcgtcttcaagaagccatacaaaagcaagaaagttgcggaagagcaaaggaagactctgaacacacagcttagacagaaattcatttcgccatcagacaacttgctttcaccatgctcaaggaaactgaatgatcataagtcaaaactatttgttgccaaatcgcaacccaaaagactcgactttgcacacagcaagcagagtatactgaccagttcaaaggtggttgccgaatccgataatgaccgcgatgacgacgatttgtttattagctaa

SEQ ID NO: 4222 - DNA, 933 bp, Saccharomyces pastorianus
atgaacagatcacccggtgagtttcaaaggtacgcaaaggcgtttcaaaaacagttgtctagggtacagcagcccggaggcaagggcagaatgccctccccagggggagcatttgcagggattagtggtttgattttgcttggaggtggtgctcttttagtgaataatgcgctatttaatgtggacggtggtcatagagccattgtttattccaggttgaatggtgtctccaccaggattttcaacgaaggtacgcattttatcttcccttggatcgacaccccaatcatctttgatgtgagagccaaacctcgtaatgttgcgtctttgacgggtaccaaagacttgcaaatggtgaatatcacttgtagagtgctttctagaccagacgtgggacaactgcctaccatatatagaactttaggtcaggattatgacgaaagagttctaccctctattgtcaacgaagttttaaaggctgtcgtagcccaattcaatgcgtcgcaactaatcactcaaagagaaaaagtttctcggttgattcgtgagaacttggttcgtcgtgcaagcagattcaatatcttgttagatgatgtttccattacatacatgaccttttcgcctgagtttaccaatgctgtagaagccaagcaaattgctcaacaagatgcccagagagcggcatttgtggttgataaggctagacaagaaaagcaaggaatggtagtgaaggcacagggtgaggccaaatctgcagagctgattggtgaagccatcaaaaaatcgaaagattacgtggaattgaaaagattggatactgccagggacattgccaagatcctggccaactctcctaatagagtcgtcttggataatgaagcattgttattgaacacaatggtagacgcgagaattaacgagaggagcaaataa

SEQ ID NO: 4223 - DNA, 567 bp, Saccharomyces pastorianus
atgtccggtttttcctacgatgaagaatggcactattccgttaaattcccctttgataacattaatgagttcattgataagttgttgctcattatttttgagcatgaaagatttttacgtcataacgggagtgagagtatgcgtcaaatagttttgagttcatgtaattgggaggcttgttcgattttgaactggaaacaacccaactttccggtattattgcaaatgaaaaatctgtttagagactcaaacactggtaagtttattagcgatacaccaaattgtttgaaagagctggccgtgaaccctcaaaagatgtcatatttggatactgcgcctttgaacatacatacaatgattcaatttgccattaataataacttgctgggtgttactatcccacatgaaacattaaagatatgcccctcattgaccaaaaatattaaacaaagcggcttgttgttaattgcttcaattgacgaaaacgaacaattacccaataacgaaaataatagtgggatttactgtggctctgaactgctatttgagaataatattgatatgtga

SEQ ID NO: 4224 - DNA, 2628 bp, Saccharomyces pastorianus
  modified_base (2472)..(2472): a, c, g, t, unknown, or other
  modified_base (2501)..(2501): a, c, g, t, unknown, or other
atgaagttcggcaaatatctggaagctagacagctggaattggcggagtataatagtcattttattgattacaaggctctgaaaaaactaatcaaacagttggctattcccactttaaagacgagctcggagttagatctacatttgacattagatgatatagatgaaaaaatcatacatcagagattgcaagaaaacaaagctgcatttttctttaaactggaaagagaactcgaaaaggtcaatggatattacttggcaagagaatctgatttgagaataaagtttaacattttgcactcaaaatacaatgactacaagtcaaatggtaaattaacttccaaccaagctacttcattcaaaaacttgtatgcggcttttaaaaaatttcaaaaagatttaagaaatttggagcagtatgttgaactaaataaaacggggttttcaaaagctttgaaaaagtgggataaaaggtctcagtctcatgataaagatttttatcttgctacggttgtctctattcaaccaatattcactaaggatgggccactcaaactaaacgatgaaactttacacattcttttggagttaaatgacattgacaataacaataggacggcaggcttagaatccaatgatttcgttagtgaggataataatgacggaaaaagagagcttaacagttaccagttagcgacatcgaaaacttccgaaaaccaacttcaacatattttttctgcaccatcttcttcttccctcgatatggagatggaaatcgaaaactggtacaaggaaattttgaatattacgactgttaaagacatccaaaggaagcacgcattattaagaaatttcagggaggccaagatctttacatatttattacaaaatgcttcggaatcatttcataaaaatgtgttttccctgttgaaggaatgcctaactacactattcttattgttggtggctagccctctagacgataactccttgcatatcttttacaaaagcaaccaagaccatatcgatttgtcatattgtgatgaagatgaccaagtattctcacgaaaaaacgtatttcatgaagccgcaagctgcccaaaccaatctcgtttattcgttcttgatgaagctttaacgacttcaaaattatccaaagaaacagtccagaagttactgaatgctcaagatatacacgcgcgggtaccgctacactatgcttcagaactaggtaaattggaatttgttcattctttattgattaccaatcttttaaaagatattgatccgattgatagcgattctaagacacctttggtattggctatcactaacaaccacatagatgtcgtgagggacttgttaaccatcggtggtgcaaatgcatcccctgttgaaaagccagtcttagactacagtaagaatataatcagttctgctaaagtccaatttgatcctttgaacgttgcttgtaaattcaataaccacgatgctgctaaattactcttggaaatacggagtaaacaaaacgctgatcataacaaacaaagttctcaacatttatgtcaaccacttttcaagaaaaactcgactggtttatgtacccttcatatagtagccaaaattggtggtgatgcacaattaatccaactgttaattcaatatggtgcggaccccaatgaaatcgatggcttcaacaaatggactcctattttttatgctgttcgatctggtcattctgaagttatcggtgaactattgagaaatggagcacgtttagatattgaggacgataatggacattctccattattttatgcattatgggagagtcacgtcggtgttttgaatgcacttctacaaacaccaacgaatcttgcacccaaatatttaaatgaagcagatgctcaaatcaaaaggctacaggctagcacgatcgctttaactccaaatgacaataaatcagatctggacattccagacagcattccagactttgctctacctccgcctattatcccccttagaaaatatggtcacaattttttggaaaagaaaatttttataaaactgaaactaaaaccaggtcttgaatccatcaaattgactaaagataacggcattattatgtcttcttcaccaggaagaattactttgtcttccaatttacctgaaatattacctcgtaatataattctacctgttagagttgatgaaaacaatgattttggtaaaaacatcagtgagacgaacgatgaagaagatgacgaagaaattagtgaagatcatgacgacggtgaactcatctttcaagttgattccatcaaggatttttccatggattttgaaatatttcccgcttttggtacaagaataattgccaaaacaacagcaatgtcataccattgtataaaacctgcaatgaacagtattacaaccataaatctacccttgtttgatacaggactaaancatattggatgtcttactttcgactatcnaattattttcccatatccaggaaacccatttaaaatcataaagtatgaaccctattggaaatctaccggaggtgatatgatgacctcttctagcagggaagggcatttgtcacttcatcatccttaa

SEQ ID NO: 4225 - DNA, 288 bp, Saccharomyces pastorianus
atgaagttagattcaggcatatattcagaagcacaacgagtggtaagaactccgaaatttaggtacatcatgctagggctagtcggtgctgctgtggtaccgactgcatacatgaggaggaactatactgtccccccacacagcttagataggataaacggcatggacacaactaagatgtctgtagccggtgtagaccagaggactgttatgacgaaaggtaagagtttgcaagaaatgatggatgatgatgagaccacctacttaatgttttcatccatcatgtga

SEQ ID NO: 4226 - DNA, 858 bp, Saccharomyces pastorianus
atgtctgatgcttgtcgtacaaatccaataaaccagattatacaaaaaggtcataccatacacaacggttccctaataccgtcaaaacccaccaggttcatccacagagaaccaactgcacaccatatcgataaaggtccacatgcggaaacatcctttttgcaccgtgccagcaatatgaagagcgttgatgatgtggcatttcaaaatcgtccctctctaacaagttttgaaaaccatattgaagagtccagtagctggattccccaattttcttcaatggaaattaatgatccattagaattcagctcagaatataaaaatttgtattcaaactacgaatcacatcaacgccaaaattcaagtagacaacagttccccattacgagttctatggtgcggaagacggcaagccatcttccgtcacgaaacatgtttcgacaacagcgccaagaaaaccgcaacagctcaacggatgccttcaaattcgacgcggaattccaaaatttagagaacgaaatccaagaagtgcggtacgagccaataatacaagaagacgaaagctggctggaccaagaccaattggagttacagaagatcgctacagatatagtaaaatgctgcactcctccactttcatcagcatcctccacctccactgtttcctctatcgactcaaagctctccgaatcgaaatttatacagctgatgagaggaatcagcagtggtgacgtgactttaaaaaaggaagcaaatgggcattctgcaagcgagctattctcgcccagcaatggagaactggtgggaaatgagcacatccccgtagagaaccaaagtcatcgaggcgcatacaattga

SEQ ID NO: 4227 - DNA, 1359 bp, Saccharomyces pastorianus
atgccattggttgaatctgttaaactaactaaatccgtcgccactgctatcgaaagcaaagattttgataaagcaatttctttaagagatacagaattcattgaactatacgaaaactttttgtcgaccaccgtcaaggatgatggttctgaattgttacctgtttctgacagactaaacattggtgttgttcacgttggtgctccatctgccgctttgaatgctgccactcgtgctgccactctatactgtttgtctcacggtcacaaaccatacgctatcatgaacggtttcagtgggttgattcaaactggtgaagtaaaggagttatcatggattgatgtcgaaaactggcacaacttgggtggttccgagattggtaccaacagatctgttgcctcagaagatttaggtaccattgcttactacttccaaaagaacaagctagatggtttaatcattcttggtggtttcgaaggtttcaaatctttgaagcaattacgtgatggtagactccaacatccaatcttcaacatcccaatgtgcttgattccagccactgtttccaacaatgtaccaggtactgaatactcactaggtgttgatacctgcttgaacgcattagtcaactacactgatgacattaaacaaagtgcttctgctacaagaagaagagtttttgtttgcgaagttcaaggtggtcattctggttacattgcttctttcactggtttaattaccggtgccgtctctgtgtacactccagaaaagaagatcgacttagcctctatcagagaagacataactttactaaaagaaaacttccgtcacgataaaggtgaaaacagaaacggtaagctattggttagaaacgagcaagcttcaagcgtatatagtacagagttacttgctgacattatttctgaatcaagcaagggtaagtttggtgttagaactgccatcccaggtcatgttcaacaaggtggtgttccatcttctaaggatcgtgttactgcttctagattcgctgttaaatgtattaaattcatcgaacaatggaacaagaagaacgaagcctctccaaacactgatgctaaggttttgagattcaaattcgatacccatggtgaaaaggtgccaacagttgaacacgaagatgactctgccgctgttatctgcgttaatggttctcacgtctccttcaagccaattgctaacctatgggaaaacgaaaccaatgttgaattaagaaagggtcatgaggttcattgggccgaatataataagattggtgacatattatctggtagattaatgttgagagctgaagtggccgcttcaaccgctgaaaacaaatga

SEQ ID NO: 4228 - DNA, 1431 bp, Saccharomyces pastorianus
atgcaatctcaagattcttgttacggtgttgcattcagatctatcatcaccaatgatgaagctcttttcaagaaaaccattcacttctaccacactttgggttttgccactgtcaaagattttaacaaattcaaacatggtgaaaatagcctcttatcttcaggaacatctcaagattccttaagagaagtttggttagaatctttcaagttaagtgaagtggatgcttctggtttccgtataccacaacaagaagcctctaacaagtctcaaagtcaaggtgctttgttgaagatacgtttagtgatggctgccccaattgatgaaactttcgacaccaatgaaactgccacaatcacttatttctctactgacttgaacaaaattgtcgagcaattcccaaaacaagctgaaaaactgtctgacactttagtatttttgaaagatccaatgggtaacaatatcactttctcaggcttggctaacgctacagattcagccccaacttctaaggacgctttcttggaagccacttctgaagacgaaattatttctaaagcctcctctgaagcttccgatctattgagacaaacattgggctcttcccaaaagaagaagaagatcgctgtcatgacttctggtggtgattctccaggtatgaacgctgccgtccgtgctgttgttcgtacaggtattcatttcggttgcgatgtcttcgccgtctatgaaggttacgaaggtttactaagaggtggtaaatacttgaagaaaatggcctgggaggacgttagaggttggttaagtgaaggtggtaccctaattggtactgctcgttccatggaattcaaaaaacgtgaaggtcgtagacaagcagcaggcaatttgatttcccaaggtatcgatgctttgattgtttgcggtggtgatggttctttaaccggtgccgatctatttagacatgaatggccatctttggtcgaagaattggttgctgaaggtagattcactaaagaagaagttgcaccatacaagaacttatccattgttggtcttgttggttctattgataacgatatgtctggtactgactctaccattggtgcttattccgctttagaaagaatctgtgaaatggtcgactacatcgatgctacagctaagtctcactctcgtgctttcgttgttgaagttatgggtagacattgtggttggttggccttaatggctggtattgccactggtgccgattacattttcattcctgaaagagctgttcctcatggtaaatggcaagaagaattacaagaagtttgccaaagacatagaagtaagggtagaagaaacaacacaattattgtcgctgaaggtgccttggatgatcaattgaacctgttactgccaacgatgttaaggatgctttggttgatttag

SEQ ID NO: 4229 - DNA, 1143 bp, Saccharomyces pastorianus
atgtctaaagactggatgtttgaaggacgtagacccgccggtattgcgggggcatgtattttactagcatgtagaatgaataatctgagaagaacacatacggaaattgtggccgtttcacatgttgccgaggaaacgttacaacagcggttaaacgaattcaaaaacacaaaggcagcaaaactgtccgtccaagaatttagggagaacgacgtggaagatggtgaggccagaccaccttcatttgtaaaaaacagaaataaggagaaaaagataaaggatactctggataaagaagaaatgtctcaaactagtgaagaagcattgaacaaaaatccgattttaacacaagtgttgggtgaacaagagctatcttccaaagaagttttgttttacttgaagcagttttcagaaagaagggctcgtgttgtagaaagaattaaggctacaaatggaatagatggcgagaatatatatcatgaagattctgaaggagaaggtgggaagcgcagaacatctgacgtcgatgctgaagaagaagaaagagacgaggagaatgaacctggacataaaaacaaaaagacaaagacaataacaaaaggaaaaggaaaagaaaccggtcattttcaagatgccattgatggctactccctagaaacagatccatatcgtcctcgtaatttgcatttattacccacatcagacgcatacctttctaaggtctgtgacgatcccgacaacttggatgatgttgatgatgaggaacttaacgctcacttattgaacgaagaagcctctaaattaaaggagagaatatgggttggcttgaatgcagaattcttgctagagcaagaaagtaagcgattaaagcaagaagctgacattgctacaggtaacacctcggtaaaaaagaagcgtacgaggcgcaagaatagaaatgacgaacctactaaaactgtggatgcagctgcagctattgggttgatgtcagatttacaagataaatcagggttgcatgcagcattgaaagcagccgaggaaaacggtgattttacaactgctgacagtgtgaagaatatgctacaaaaggcgagtttctctaaaaagattaattatgatgctatcgacggtttgtttaggtga

SEQ ID NO: 4230 - DNA, 582 bp, Saccharomyces pastorianus
atgcctgtgtgtaagagttgtcacgggacagaattcgaaagagacctttccaacgctaataatgatttggtttgtaaggcctgtggtgttgtttcagaagataaccctatcgtgtcggaagtgacgtttggtgagacgagtgcaggggctgctgtcgtccaaggttcatttatcggtgcaggacaaagccatgcctcgttcggtggttccagtgctctcgaatcgagagaagctactttaaacaatgcgagaagaaaattgcgtgctgtctcttatgctttgcatatcccggaatatattaccgacgctgctttccaatggtataagcttgcactagctaataattttgtgcaaggccggagatcccaaaacgtcattgcgtcatgtatttacgtggcatgcagaaaggaaaagactcatcacatgctgattgatttctcatcgagattacaagttagcgtatattctattggtgcaacatttttgaaaatggttaaaaagctacatattaccgaattaccgttagcggatccattctttattcattcaacattttgccgaaaaattaaggattcttgctga

SEQ ID NO: 4231 - DNA, 2343 bp, Saccharomyces pastorianus
  modified_base (584)..(584): a, c, g, t, unknown, or other
atgattaccccagaagaaacatttgacgaagcattatccagtggccctgaggatacagacatttacagtcaacaaacaacagcaagtgtagaatgtggagatcaatcactaaaaagcgaaagaaaaagttctacggggttacagctggaacaactcgccaatacaaatttattgactataagaatcaaatggaaactacaagaagaaaatgatttcaataaatctagaataactgatgtgattatggacacaatacagcattataaaggtatttctgtgaacaatgctgattcggaggcatatgaattccttgcagataaaaaaagactacagattctcgagcaaaacaaagacatttatctttacgagcatggaacacaagaatacgaaaaatctttcaaggatagcgaaaatgatgaagaagatgattggaaatatgatactgttttacaagcacaattcaaatatcccagatctttggaaaatacatgtgcagatatctcagaattactgagaagtgatgttaatgcccaatttcttgtcaaatggtccataggtgtaaacaagcatgcgttgacgtaccntggaaatatatttgtcggggggattgcaaaaagcttgtctattggcgaattaagttttcttttctcaaaatacggacccgttttgtcgatgaaattgatttatgataaaacgaaaggggagcctaatggatatggttttttttcttaccctttaggttctcaagcctcactttgcatcaaagaactcaatggtaagacaataagtgggtctacactatttatcaactatcatgtcgaaaggaaagagagagagagaattcactgggatcatgtcaaagaaaacaacaacgatgataattacaggtgtcttttcattggaaatttgccttatcataatccagaaaaggaggaatctttaattacaccaaaggatgttatagatgtaattaaaaaggagttatccaagaagttttcagactttgatatcatttcatactatttccccaagaaaagtaatgcgagaagtagtagctcggttagcttccaagatgaaggatctatagactcgaacaaaatgtccaatattacaaatggagatgcccaagaagaagatatgttgaagggttatggatttattaagcttattaatcatgaacaggcactggctgctattgagacattcaatggttttatgtggcatggaaacagactcgttgttaataaagccgttcaacataaggtgtataataaccacaataatcatgataagcaatcctcaattagtaaccataccgatatggaagcctttgaatttaccaatagtccaacgtacgattacaataattatacatatgatggatactatttcaacaatatcaagattggcaacagtaatgacagctccaatggacggtactttgactcagtgaaatcgactcctgtaacagaaaagatggatttgtattatcctccaagggaatccttcagtgagggtcgtggccagcgtgtgccaaggtttatgggcagtaaatacgatatgtaccaatacccgtccgcttcttgtggcttacccataccaatgagcaaccagcaggaatcaaacctttacgtgaagcacattcctctttcttggacggatgaagatctatatggcttctacaagacctttggagaaataattagtgttaaggtcattactgtcggcggtagcaagaataaatatcgtcaacaatcgaatgatagttcttcagatagtgacttaccggtgggatcatcaaggggttatggatttgtttcttttgaaagcccgttggatgcagccaaggccatttcgaatacagacggttatcaggtgagcaaagatcaagtgttatccgtctcgttcgcacaaaaacgtggtaacttaccttctggcgacgatgacgatctatctcaaactgatgaatcatcaaactatcaaggttcccagccacagaatgaatatcataaatcgtatccaacaaagtataacagaaagttcatgaacgccttgatgaaccagaaccacccacaacagcaagtctcgagagaaaattatttcatgcaatatcctactaatagttcaaaagctgtgaacagttataacttgataagcgcaaatcaaaacaacccaaattggatgatgccaatgtttccatcgtttggcttcattccacaagtgccgccagtcccttacatgatacctccccaaaatccaacattaaatcatattcctataatgacaaacggtaataatgaagaagaagagttttccaatgctaattattctatggatttttaa

SEQ ID NO: 4232 - DNA, 1422 bp, Saccharomyces pastorianus
atgcttactcgacgtgttttggcgagaggcttggcgacagccaagtcttcaactccgaagttgactgatgtgctaatcgttggtggtggcccagccggtctaaccttggctgcctcgatcaaaaactcaccccagttaaaaaatctgaaaacgaccttggttgatatggtggatttgaaggataagttatctagtttttataattcacccccagattactttacgaacagggtcgttagtgttactcctaggtctatccagttcttggagaacaaagccggggccactttgatgcacgatagaattcaaagttatgatgggttatatgttacagacggttgttctaaagctactttagatctggcaagagattctatgctttgtatgattgaaatcctgaatatacaggcctccttgtacaacagaatctctcaatacgattccaagaaggacatgattgatatcattgataacacaaaagtcgtaagtatcaagcacagtgacaccaacgacccattgtcttggcccctggtcacactttctaatggtgaagtgtacaaaacaagattattagtaggtgcggacgggttcaactctcccacaagacggttttctcaaattccatctagaggctggatgtacaacgcatacggtgttgtagcaagcatgaagttggaatatcctccatttaaattaaggggttggcaaaggtttttaccaacgggccccattgcacatttgccaatgcctgagaacaatgccactctcgtttggagttcctctgaacgtctatcgagattattgttatcgttacctgcagaatcgtttaccgcacttgtcaacgcagcctttgttttggaagacgccgatatgaattattattatcgtacgctagaagaaggttctatggacacagataaaatgattgatgatattaaatctagaacagaagaaatatatgcaacgctaaaggatgaatctgaaattgaagagatttacccgccaagagtggttagtatattagataagacaagagcacgtttcccgttgaagttaacgcatgccgatcgttattgtacagatagagttgcccttgttggagacgctgcacacacaacacatcctttggctggacaaggactaaatatgggtcagacagacgttcatggtttagtgtatgccttggaacaggcgatggaaagaggcttagacattggttcttcgttgagtttagagccattttgggcagaaagatatccgtccaataacgttttgttagggatggcggacaaattatttaaattataccatacaagtttcccacctgtggtagccctgaggtcatttggtttgaatttgactgacaagcttggcccaattaaaaatgttattattgacacgctaggtgggaatgagaaatga

SEQ ID NO: 4233 - DNA, 456 bp, Saccharomyces pastorianus
atgttgatccgtgaagcagctgtcacatacggctggaaactaaacaaccctgccattgctttgatgtggagaggcggttgtatcatcagatctgtcttcttggcagagatcactaaagcttatagggacgatccagatttggaaaatttgttattcaacgatttcttcgcctccgcggctactaaggcccaatctgggtggagaaggtccattgcccttgccgctacttacggtatccccactccagctttctccacagcattagcattttacgacggctatagatccgagagattacctgctaatcttctgcaagctcaacgtgactactttggtgcacatacatttagggttttgcctgaatgtgcttctgctaatttaccggtagacagggacattcatatcaattggactggacacggtggtaatatctcttcctccacctaccaggcctag

SEQ ID NO: 4234 - DNA, 1725 bp, Saccharomyces pastorianus
atggaagcaatgcaacgctctaagaacgaacagaaatccaaaccaaaaactgcagatgccgaaagggctcgttcgcctataatacagtatggatcgcttggtgtacaaccagatcgttcgcaaagagaccatgtcgccaatttgaataataaatcaggctcagtcattgaaaagaacagcagggcaactgttagtgagttcataccgccgtccgttcctgaggaccaagagatatcgttaacagaaggagagcaaaatttgaatttcatttccaacaagataccgcaatttgactttaacaacaaaaactctctcctattccaaaatgacactagtaataaaaaaggcgagcttgcccatgagtctaaggagaagattccagttcctgaaattccgagctggttttcttcaacaacctctcaacaaccatataacccttatagcaccaccaattttgttgaagacaagaatacgacaagtgaaaggggggctgaagatggagcgaccactgatggaaaaaattacgaacttctgactggtttaaatgcagctgaaatgttagaaaatgaaaacaactctaccaatgcgagaaataatcaaaaggacactgatctggaagtattatcagataaagtgtttgaggacattccagcggaacccccaattgagactgcggtaaatgataaagaagacgcaaatttagaatctacaagcaatgagcatagggaaccccttgcttttgattatgatttttccgaggacgaagaagatcatatagtggagaacatgagaaaggaacaagaggaattcaatacatttaggaaaacgacattgttgtcttcggatggaagaagcgttgccgataatgcctttatggaagaccaactatttgaacaacagatgaaggataaaagggattctgatgaagtaaccttggatatgatcaaagaagtccaagagttactctccagatttggtattccatacgtcactgctcccatggaagctgaagcacaatgtgcagagttattgcaattaaagcttgttgatggtataattactgatgatagtgacgttttcttatttggcggtacaaaaatttataagaatatgtttcatgaaaagaactatgttgagttttacgatgcggaatctattttgaaattgctgggtttgggtagaaagaacatgattgaattggcgcagcttttgggaagtgactacacaaatggattgaaaggtatggggcctgtttcgagtatagaagtgattgcggaattcggcaacttggaaaattttaaagactggtacaacaatgggcaatttgacaaacacaaacaggaaacggaaaacaaatttgaaaaagacttgagaaagaaactggtaaacaatgaagttatgttagacgacgattttccaagtgtcatggtttatgacgcgtatatgaggccagaagttgaccatgatactacgccgttcgtttgggggttactagacctggatatgctacgttcattcatgaataatcaattaggctggccatacgaaaagtccgatgaaatccttattcctctgataagggatgttaataatcgtaaaaagaagggaaaacaaaaaagaatcaacgagttttttccaagagaatatatatctgatgataagaagctgaatacgagtaaaagagtaacaacagcaacaggtaaactgaaaaaaagaaagttgtga

SEQ ID NO: 4235 - DNA, 339 bp, Saccharomyces pastorianus
atgttcgatttatccaagttggaaagaaagtatagcagtcccatgagcggaattaagtatatgtccatcttgcgcaaaacttgcttttccattgggtgggaaggagatgggatcccatcatcatctgtggtggtggccattatttctctttcgagggctaggtccgacttcttgtcgtggttacgattgtgcaagtcagcatcatgcgcctcatcttcctggaaggtgattgtcgtgggtttttcttctgaatcatcgttggtggctgatataaaaagcacatcgtctaccaaatccttaggcgacttcattgcgaattcgttggtcatctatgtttga

SEQ ID NO: 4236 - DNA, 2571 bp, Saccharomyces pastorianus
atgtatatctttttaaacatgtttaccattgaagcgaatcggaaaccttgcgattttgacaaacttggacaaatcacttttagaagcccaactgaaagaaaagcaacggtagaccaaacgaccaaacgaccggaaaagcggataacagcaatggtagactcaatcagccgtattgcatctgcattggacacagccaaagtgataacgagggaagctgcggcggtggccacgtccaaactgggggaatcctcgtacacttattattctcagaatattaatcctcagcaattggtcactctgttaaattctagaaactctagagaggttagagatgccatgaaaaggatcgtatccataatggcttcggacgacaactctatcgatgtcgaattatactttgctgatgtggtgaagaatattaccactaacgataccaaagtgaaaagactcattcatctgtacctgcttcgatatgctgaaaatgacccaaatttgacgcttctgtctatcaattctcttcaaaaatcattgtctgattcaagtcctgaactaagatgttttgccataagggccctctctgatatgaaaatgtcatcactagcacccataatccttcatactatcaagaagctagttacagatccatcagcaatggttcgtggtgaggtcgctttggctattgttaaactatacagagctgggaaaagcgagtttcatgaagaactactagacgttttaaaggatttaatggcagatacagatcctaaagtgatatcttgtgccgtcctcactttgaaagaatgttattatgatcacttagagctactacacggacatttccgtaggtattgtaaagcgattaagcagtttaattcatggtctcaatcgtatttgattgaaatattaatcaaatactgtaaacagtttttgccaaaacccactgtcgtggataagtcatcagaaggctctccaaggacctgtccattaccagaaaaatacaatgaaattgaataccctctttacgatgtggtaaaccaccctgatctggatttatttctacagagtttaaatcgtctgatttacagttccaatcctgctgtaattttatcgtgttgtaatgccttataccagttggcctcaccgatgcaaatgaaaaatactaaattcattgaatccttgattaaaacgttgactacaaccacaaatcaaggcaacaaagagatgctattgcaaacagttcattttttatccgttttagaccaaactttatttttacctttcatcagtaaattttatgtttttcccaaagacccgattgttgtatctgtttggaagattcaaattttgtctacgttaatcaacgaatcaaatgttaaggaaatattcaaagaattaaaatattacgtggccaatgctcatcttccagagaaagtagtcattatggcggttaaaagcctgtctaaatgtggccaattgtctacgggttgggaatcaagcgtgatgaaatggttgatcgatcatatggaatcacacaagctgtctgtttctatcttagatgcatacgtaaatgtcatcagaacgttggtacaaaataatcccacgaaacacctgcgtataattttcaaacttgctgatttattaacagtacaaatgaacctagccgataatgcacgtgcaggtattgtttggctatttggtgaaattgcctcgattgaattcaagatatgtccagacgtattgagaaaattgattccaaatttttcacaagaaggccctgaaacaagatgccaaatcttagtgctatcagcaaaactgttgtcatatgaaattgacaattttaatcaagcgcaaacgactagagttgaggactccgaaacggaagaaaatggccaaaataatacttattacgactttagcagttctcgaatctctcaaatgtacaatgcggtcctctatctggcgaaatatgatgatgattttgatattagggatagagcaagaatgatttcatcattatttgattcaggaaaatatgaaattgtttctttattattacaagcacctaaacctgcagcgagaaatgatgattttatcaactctctcagactggaaacgcatgattcaaaaattaaagagtttttcaaaatgcttccttggaatacagacattattgaaacagacaatgatgttagagaaacggctgcattgaaagattataacaaatacaaaaagagcttttcatctcaatctttcataagccctaattcaacaaggtcatttacatctacttccaatacaaatctgacagaaaataatgagatcagcaataatggcaatagcatctcaggtaaaagcaacaatagcacatttgcgtctcaaaatggaaaaaaatatcgtttacaaagcttggatgaatttctctctgacatcccagagaggaaaagcaagcccgagagggttctgagagtaagagaagaaagcagtgacgaagacgaatcggaatcggaatcggatgacgatagttactcctcctcgtctttggaaacatcttcttcactttcggaagcttaa

SEQ ID NO: 4237 - DNA, 369 bp, Saccharomyces pastorianus
atggaacttggccatgaaagacgtggtttagaaattgccatgtcactaagtgctcgcggtaaccaattcttgcaagaaaataagctcgacaatactttattctctcaatccccagaaaagtcagatgctgttgtcgcggtcggcttgaatattatttacgcagtcagttctattatcacaccatacatgcctgagattggtgaaaagataaataagatgttgaatgcaccagctttgaggattggggatgaattccacctggctattttaggaggtcacaatatcaataaggctgaatacttgttccaacgtattgatgaaaagaaaatcgatgagtggagagccaaatacggtggtggacaagtgtaa

SEQ ID NO: 4238 - DNA, 939 bp, Saccharomyces pastorianus
atgaagttggattccaacggttacctggaagagcaatccatgaaacagctatactgtccagtgcacaactcttacttggccgatcgttatgtagagggtgaatgtccaaaatgtcactacgacgacgctcgtggtgatcaatgtgataaatgtggtactttattagatccatttgaattgatcaatccacgttgtaaattagacgatgcttctccagaacccaaattttccgatcatatctttttgtcattggacaaattggaatcccaaatttctgaatgggttggaaaggcttctgaagatggtaactggtctaaaaattcaaaaaccattacgcaatcttggttaaaagatggtctaaaaccacgttgtattacaagagatttggtctggggtactccagtgcctgtagaaaaatataaggataaagttttgtacgtttggttcgacgctaccattggttacgtttccatcactgccaactacactaaggaatggaaacaatggtggaaaaatccagagaacgtttcattgtatcaattcatgggtaaggacaacgttcctttccataccgttgttttccccggttctcaattgggtacagaagagaactggaccatgttacaccatctaaacaccacagaatatttacaatatgaaaacggtaagttttctaaaagtagaggtgttggtgtctttggtaacaatgctcaagactctggtatctctccaagtgtttggagatattacttggcatctgttagacccgaatccagtgattctcacttttcatgggacgattttgttgctagaaataacagtgaattgttggctaacttgggtaactttgtcaataggttggttaagtttgttaatgccaaatacaacggtgttgttccagattcgatcctaagaaggtctctaactatgatagcttag

SEQ ID NO: 4239 - DNA, 423 bp, Saccharomyces pastorianus
atgtctttacaaatctcctttgataaatcaaagagtcatcctgctcatttgcagttggccaataatttgaaggttgccttggcgctagaatttgcaagcaaaggtttaaagcttgaaatcgatgatgagaacacatctatggaattgcatcacgcaaaggaacaatttactttgtttgatgctaatgccatcttaagatatgtcatgaacgactttgaagatcaagattctgacaagtaccaatttgcattggcatctctacaaaatttgctgtatcataaagagttacctcaacaacatgtcgaagtcttgacaaacaaggccatcgaaaactacttatctcagttgaaagaaccttcaactgcgacagacttgattgtgtttgccaatattacgccttggatccctcttaattcaaactaa

SEQ ID NO: 4240 - DNA, 3294 bp, Saccharomyces pastorianus
atgaataggaacaacaatgcactttctttccataatccatcacctgcacgtcgtggccgtggcggttggaatgctagtcaaaattcgggtccaacaaggcgacttttccccacaggtggcccatttggtggcaatgatgttactactatttttggtaaaaatacaaacttttataaccaagtcccatctgcatacaataatgataataacaacaacaaactaatactagattccgattcctccgacgacgaaatattacctcttggcgctacacccaaagtaaagaaagtggatgcccaaaaaaagaagaagaaaaagccagaaattgccgatctcgatccattaggcgttgatatgaatatcaattttgatgacataggtggtttagataattatattgatcaattgaaggaaatggttgcattaccgctactgtacccagagctataccaaaacttcaatatcacgcctccgcgtggtgttctattccatggccccccaggtactggtaaaacgttaatggcaagagctctggctgcaagttgctcctccgatgaaagaaaaattacgtttttcatgcgtaagggagcagacattttgtcgaagtgggtgggtgaagctgaaagacaactccgtttattattcgaagaagccaaaaagcaacaaccatccatcatctttttcgacgagattgacgggttagcacccgtgagaagttccaaacaagaacaaattcatgctagtattgtatcaactttattagctttaatggatggtatggacaatcgaggtcaagttatcgttattggtgccacaaatcgacctgatgctgtagatcctgctttaagaaggccgggaaggtttgatagagaattttatttcccattgcctgatgtgaaagcacgttctaagattctacaaattcaaactaaaaaatggacttcaccattgtcaattgagttcataaacaaattagccatcttgactaaaggttatggtggtgcagatttaaggtccttatgcaccgaagctgcacttataagtatacaaagaaactttccccaaatttacagatcgaatgataagctattggtggacccctccaaaatcaaagtcaaagtcaatgatttcatgctagctttgaaaaagattgttccatcatccgcaagatctaccggtagctcccctcagccattgcctgaattgattaaaccattattagtggatcaagtaaataacttgaaagaaaaactggactacatattaaaaaaggacgattctgactttcaaaaaactacatcgctactccaagactttatagattacgaagaatacagtgaagaagaagaagaagacgaagatgactacaaagggttcgaaggtgcatctaagttcaggtcatatgaattttttgattcgatggcggagtcacaaatttgcaaacctcgattattaataaacggacctaagggcaatggccaacagtatgttggagctgctcttctaaactacctagaagacttcaacgtacagaacttggatttggcttctctagtctcggaaagttcaaggaccattgaagctgctgtggtgcaaagctttatggaggcaaagaaaagacaaccttctgttgtattcattcctaatatggacatttggatcaataccatcccagaaaacgttattctagttctatcaggcttgttcagatctctgcaaagtaacgaaatggttcttttattatgtcttgcagaggatttgaatatatctgaaattaaggacggcattttgtcggattttgcatttgataggaatatctttcatttaaataagccctccattcaaaatataatggcgtactactccaatctaattgaactattgaaaacaaaaccaagcgatattcccatgaaaaggaaaagggtcaagccgctgccagaattaccaaaagtgatttcaaacgcaacactcactaactttgatgagaatggtgaaccattgtccgagaacgaagttctaagaaggaaactgaagacgttccaacatcaagacatgagatcaaaaaatgtcttaaagatcaaactctcgggcttaatggatcttttcaaaaatagatataaaaggtttagaaaaccgccgatagacgatgcctttttggttcaccttttcgagccagacacgaatgctgatcctagttggcaaccagcctatataaaagatatggatatgattttagagatttctacaggccggagattttttaatatggacttggacatcgtagaggagagactttggaacggttattattcagaaccaaagcagttcttaaaagacattgagctgatataccgagacgccaataccatcggtgatagagagcgtgtgatcaaggcgtctgaaatgtttgccaacgcacaaatgggtattgaagaaatttctactccagatttcattcaagaatgtaaagctacacgccaaagggatttagagagacaagaacttttcttaaaggacgaagaaaatagggtggcaattgacttagaagcccagcaagaagaacaacaggatatactgccgcaacctgaggtagatgttaatgaagttggtgagtttggtgtagctgcaggtaaccaattacaggctcaattacaggctactgctaatacaaattccattgtcagtaacggagaagtcccagcaccaattgataccgaaatatataagaagcatgaggcaatcctaacaccttctactgttggtacgggagaagtactcactccgaaagacggtggcgcacacgaacaacgtccatcagaatcactccaatctagctgcataatacatgaacaaattaatgatgataaacagactgtagcgccactaaatcaaagtgatccacttttgctgtcagaagcaaaagacgggcctagtgaatcagctttcaagacttcagaaataaagcaagtgacagagagtctacccatcaacaacagtacatgtataggagcagaacttcttcacaaaggtgaaaagacaggtgaacaagacgctacaactattacaaaggaagttggtaagccacaacgaaagaagaaagacagtagagatgtaattttatcatctgaacaactaaaagaaatatctgaacgcttaatcgagcattgcaaaaactttacagtttcccaactagaagatgttcattcctctattgcaaaaataatatggaggaacagatctgtatgggacaaaacagacgctgttgctgatatattgaaatttctctcggagtaa

SEQ ID NO: 4241 - DNA, 210 bp, Saccharomyces pastorianus
atgacacgaaatttaaggaatagacgcgatagtgacgacaaacgtagcgatgctgaagatacaaataatgcaaacgttggttatgaaacccagatcaaagatgaaaatggcataattcatactacttctcgttctttaagaaaaataaactacgcagaaatggagaaggtactcggactttattggaggatgaccaggttatggacgccg

SEQ ID NO: 4242 - DNA, 699 bp, Saccharomyces pastorianus
atggctaaaatacaaggaaaaagaaatagggcccttgggtcatctttagagatgtctcagataatggacgcaggtgcaaataaaattaaaagaagaataagagatctagaaagactattagaaaagaagaaggatatattgccttctactgtgataatagaaaaggaaagaaatttgcaagccttgcgattggagttgcagaacaacgagctaaagaacaaaattaaagccaacgctaaaaaataccatatggtgaggttttttgagaaaaagaaagcattgagaaaatacaataaattactgaaaaaagcaaacgaatctgactcagacgataaagatctgcaagctcaattaagggccactaaagttgaactatgttatgttataaatttccctaaaactgagaaatacattgcattatatccaaatgatacgccatccacagatccaaagggtgtaaaattaacaaatattagaagagaaaaattcctcaaattggtggctgaaagaatggatgcaaacgcgcttgatgtatcatttaaagacattttaatgggtaagaaactggatgaagactctgtcggattaactttgtccgacaagtcagacaataagagtgaatcccatacatcttctacaaatgacaaaaatgaatcagcagtcgaaggagaagatgaagaggatgacttctttgaataa

SEQ ID NO: 4243 - DNA, 567 bp, Saccharomyces pastorianus
atggaagccaagacacatagcacttcaatacgtaacaagaatatgctacacttcaaaagtccagacaaaactgaaaggaatgaggacatatcaagaacagaattacggtcgtcctcattaacagccccgattctcgaagctgttcaagaagctcagcctttcgaagaagcaacattttctaactttcagaataaacaccctcttacagaaaattcaacttgcaatgcctatactgtatatgatgcaaatggcaaattgaagcccataaaagatacatttggtaaagatattgcaataccagacatgtcaaatccaacaagaccaagagatgaaaggcccatggacactataagaggattcgagtactcgataacaaaagacccacgctggttacaagagttggagacatctaaattaggatttaaagtcagatctggattctcagccatcaatcgagattcacaagcttcagtaaatctacctcaactagaagaaaaggtgataaaagatcaaaagagcccaaaaaagcattctagatggtggttctctcggttatttggcaggtag

SEQ ID NO: 4244 - DNA, 477 bp, Saccharomyces pastorianus
atggattctcagacattaattcacaaggctaataaagtgtcatactacggcggtgctaccagcggagagtcctggaggtacgattggtaccaaccatctaaaataagctccacaaagcagcaaccacagcaacaagtgggaaacgtggagaataacgtggagaaatacccgttcaggtacaagacgtggttgaaggtccatgaagatgatgggaaggctttacaggaagggggttgcgaagatatactggacttgagattgtttgatagaacaataaggaaagagtcccaaaccgcatcgcacattaaaggcgacacaaatattaccaacggggctccttctactaccgaaggaggcaaagccctaagtgtggatgatataagaggtgctgtcggtggcagcgaggctattcctgggctatctgcaggtgcgaataatgagaaaccagaggaaagcaaagatgtagagatgagttga

SEQ ID NO: 4245 - DNA, 894 bp, Saccharomyces pastorianus
atgctggaagaaggttccagggtcctggtggttcttccacatatcttgcccaacgctaccttacagagaattataaagcagacggttccatttttaagaaaatggcaaagccaattagacgtggtagttatccccgagttcgagacctcgttccaattggattctgcactgggcaagatgtacagtgtcatccgagatgttcttttgcgctatgaaatgatcaacagcggtatcaatgtcatcttcaacaacaaacaatttgccaagagcagtctgcaatggaaggtgggtttattgccacacggttccactttcgacacgtggcagctggaactggaaaatgagcagtgtcacaatacagaacactattccctacacgaagacactgtcgaaaggatagtcggtcccaaggatgctaatgaattccgtgtaactgcgttaggcgggacatttgaccatattcacgatggacacaagatattgttgagtatcgctgcgttcatcacatctcaaagattaatctgcggtatcacatgcgatgagctgttgcagaacaagaaatacaaagagctaattgaatcttacgagacacggtgcagccacgtgtctcgattcatcgagctactaaaaccaaatctctcggtggaactcgtccctctgaaggatgtctgtgggcccactgggaaagtgcctgagattgaatgccttgttgtgagtagagagaccgttgccggggcagagactgtgaataagacaagagcagagaggggcatggaccgtttaataatacatgtggtcaatgtgcttggaggcagggaggaagacggctggagtgagaagctgagcagtacagagatcagacgtcttctccagacgtctcgccccttaaactag

SEQ ID NO: 4246 - DNA, 1749 bp, Saccharomyces pastorianus
atgtctaccataattaacgatggagaaggtacgaagttccaaagggaaaactgggaactgataaagtcccatatctcacccataatctccaatttaactatggataacttgctggaatcatataaagatctgttccaagtcaacatagtcgtcggtggcaatatagtttgccagaatgctgtggatttcattctcaagaaacagaacaaaaggcatattcccgctttagcagctttaattaccttgttgaactccgatatcccagagattggcgaaactttagttaaagaattaatgctgacatttgtgaatcagttcaaccacagagattaccaatcatgtgataacattcttcaatgcctctccattctgtttctttacgacgtggcccatgaaattatcatcttacagattctgttgcttttactggaaaagaattatttgcaatttgtcatctcagtgttaaagatatgtggctggaagttggctcttgtgagcggaaaaactcatcatatgatctgggagaaactaagatatatcttgcaaacacagggtccgtctagaactgtgcatgaggccctggaagaactatttgagatcagacaaaccgactaccaaaatggatctcaaggtttgcttgttttggagtctagtgactatacagttaatacacactcttatattgttaatgatgaagataaagctaacaataaactaggcgattttaaagaatgtacaagatttgacgaattgaccaagatattcgacgccctgcgacaaaaattattgacaaataatgtgtccaacgaggatacgaccgaagaattaaaaatcaatgacatgacgtctgcgaatgacgtcgagttcaaaaaaaaaatttatctggttttgaaaagttcgttatctggtgatgaagcagcccacaaattactgagactaaaggttgctaacaatttgaagaaaactgtggtggatatcatcattaagtctagtttacaggaatccacattctctaaattctattcaattctatccgaaagagtaatcacgttccataggagttggcaaattgcatataatgagacctttgaaaaaaactacaaggaagatatggaagacttcgaaactgaacagttgcgcatcttgggtaaattatggggacatttgatttcttatgagtttctccccatgaagtgtctcacgattattaggttaaccgaggaagactcgtgtccgcaaggaagaatttttatcaagtttttatttcaagagttaatcaacgaattggggttggacgaactgcaaacaagactagcttccattaatctcgagggaatgttcccactggagggggatgctgaccacatcagatactctataaatttcttcactgctattggattaggtgtattgacagaggaaatgagaagtcggttgacgattgttcaagaaatcgaggacgcgcaagaggaggaagagagactgaaacgggaagaagaactccgggagctaaggaaaaaggtcagagagtcacaactatctcaaggaccaaaaattcacgaatccagattattcttacgagaagatcctagaggagacgccagatcaaggccgcctccatcgtctgctgaccggaagcgtgccagatcaaggaccccgccaagaggtccaagaaacaaccgtaacagatccagaactccgcctgcaagaagacaacgccaaagatcaagaaccccgcccagaagataa

SEQ ID NO: 4247 - DNA, 594 bp, Saccharomyces pastorianus
atgaatgaatccacagtgggaaactacaaagaaggtttgtctattgcacaagattcctcagcaaaggactcagacgagaatttgactaatttggtgtatataggaaaagagaaaaccattaaattacctaaccaaaatattcccaagactgtacgtgtaacggttgacacacagcgcaaagaagtagtatcgcccagagatgcctacaaaaacagcccattgggatatcacgttcgcgtgtccgacactttggatgaagtttccgaaggatacacaaagactctttgggtcaacagtggcgactaccactacgacgaagctttgtcaaggaactacaaggcagaaacgaaactcccatacgttacaaagataacaaaaagctcaaaatcacaaccaccatgcaatatactgcttatcttcggcaaatgggaccacttgaagcgttgtttcaaaagatctgatctagaatcgtcagcgttgcaccactacttctcagggcaactagaatttccaggtacagtaccccaggggaagctgaccatccaagacagcttcccaatagccctcaccatgctccaacgttggaccagctga

SEQ ID NO: 4248 - DNA, 1971 bp, Saccharomyces pastorianus
atggttaagagttctggtaaagagtcaaaagagcctgctaagggtaaagtgcgaggcaagatttatagggtaggaaggatggtaaactggcaaacgttatttttggtctcgttgaggagagaaggcagttcctcccgttataaatacaagtccaatatagaaagaatcacacatcaggcctttcttcgctctaaaaaggcctttaaaagagcacaacctgcttatgagtattgtgatattggtggggagctgtactatgcctcacttgtggacttacagaaactcttgctacaagatattaatgcccccaatggacacgttcttaaaattgttaggacagatctgatcaaaaaaagtcgaaataacagagttcagcattgggatcagattctacctatctttagtcatccgttaagcctttacgaagcgccgctgggtgtgatgaacaaggactacaagccgtcgttcgaatggcaacaattgataacggtacggtccaaaggtgaaaaatatcaattgcaacgtgttatctggcccaaatcggtgctcgcgaacttctgtagaggaatcggtgttaagaaaactacttacgataggctcctgaagcaaaatgatgaacaagtgcccgtgtttgttaaccccgctaatgcaaaacctttgccacttttcgagattactgacgacacagaaattggcgaatttgatggtattggtatcttcccctactttgtagaagagcatcagaggtttttcattaccgaggtagataagctgaaaacaaagttaatctcaccactctgtagcccaaatgagaaaacaagaatcgataaagctaacagcggtcgtttgctaggggatgaaaagggtaaaccgtttcactcggatacaaaaggcacagcgaagcaagtggcaaatggcaacattgctaccttaagacaactcctaaatgggtccattggccagaagacactatggagcaaacaaacaaccaaggatagaacatgtcctggtgacgtactgagagccacagtgttatcaaacgatttttccatgcgccagttgaagaacgagttctgtaaaaacttcattctttataacatattcaccatcttacagcgtaataagaagaatatccgttccgacacttctggaactgatatatctgcttcaagttttgattggaaagtttgggactcatacatatggaagcagtaccaagaaaccgagtccatgggaattcccatgagtcaagctggcctgatcaactacaaggcaaaatacgatctatttctgcaggatttacaaacctattctacactaataatttcggagatgaaatggaaccagttctccatcttccataatgacaaaatatcactgtcgagatttgaacacattggactgattttacaaaccatattgaccaactctcgaatgataaaggttttccaacccaacctgtgcaaatttatgcaagacgacttacgatcaacttttttggaatcgataaatttcgttgactcaataagtaaaacggtagagcctagcttcacaaacgaacaatcactgcaatctgcgagtgcgttatggaagttgactaatcaattattattcttcgaaaatgaaatatacgctgagaatttccgtgtcaatagacccaaccaaatccgttccctgacagtatcagaaaactttaaaatcgtgatcctggataaattaaacgccgttcccgaaacattcaagacgttgttgaagttcatgacgcaaataagcacatattttgtggaagatttgactgacatagagcttcatgggcacatgcactgcattgagaagaagatgctagataagtcgacattcatgtatctgtacgaattgaaatacaatgaagctcccaaaatgattccgcctccagaagagaaaatcgtcgataatattattgacttattatcaaatgataaagaaaattaa

SEQ ID NO: 4249 - DNA, 306 bp, Saccharomyces pastorianus
atggagtcggcgttagcaccgaagaattcggcaacttcttccttggtggccttgaatggaacgttattgacgtataaggtatcctttgatctttccatttggtctaacggaatcttttcccttttttggccattaaaaccacccctggcaccacctctgcccctgaagttacctctacctctggcaccacctctgaaggtacctctgaaaccgcctctgaaaccagctctgcctctgaaggcgcctctacctcctctgaaaccacctctttgcatttggccgggggttctagctcttttgatatga

SEQ ID NO: 4250 - DNA, 942 bp, Saccharomyces pastorianus
atgaagccatcagtgccagccaccccagcggagtccagaaactccctgtggtcaattttgatctatcttttcgctgtccagggtctagggtccgccatcatttcaggcggcatagagttcgccattgcctacgctatgtaccattcccgcaaagatcgcatcaccctgtgggcgttccctcacacactctcgggagattgtgcgctgagtctgctcattcaggtcggcctcacatgggccagtgaagagctcttggtcgggttcgatgactacaaaaaacctgtgtttagactaaataaatgggttgtgaagccatcgcctctgcggaacgactccagcgaagagatcccggcgcccaggaagcgcttcattgtagactacttcgagtccgaaaacaaccttatttccaatcaaagcgctctctataacaaccacaagtggctattcgcctttctagaggttaaccgagggattatacccaagggtagcgatgccacgctgaaaggctttcttgcatctcaattcattcatgacagctcccgctctaagtttgtgaactttctggaatggacggtacagaaattcatcagatccatgattctagccgtgcccatgttcatcgtaatttggcccatcagtatggggattcttgctggcataggccacaagatggggtcctatgaatactacttcaacgattacccgctaccgcaagttatgaagttgatttccggtgttgtcattgcgttggtatgcaccccagcgaccatcgtcgtcattgcgttgcgaaaccaattccatgaagagctttactatgaaggtttagccaatggcacgctacttcaggaccaagaaagcagttccgcgggtaatgtcagttcgggatccacagatcaagatgtcagcagcaccaagcaacaatctatggaagcaatggtatga

SEQ ID NO: 4251 - DNA, 561 bp, Saccharomyces pastorianus
atggtccaacgccaacgaagcagatctatcgtggtgaagatggaagtggtcggcaccgtcaagaaggtttactcgctgatatcgaagtttacggccaactcgctgcccgagcccgcaaggtcccaggtacgagaaagtttactgaacctgcccacgaactggttcgatagcgtccatagcacgtcactgccgcacgacacttcgtaccactacgctcacaggcaggaacaagaagtggggcggcagcagcggcaagagcaggaaagggacagcaatgacgacgatgaagcgcaggacgatgcgtcgtcctcgtcctcttccgtcaccccgaatgggaaagtactaatcctcgcgaaggagtcgctggaaatggtcagaagtgtgatgggcgtggtcgactccacgctgggcaaggctgaagagtgggtgaagcagaaacgagaggtgaaggaaatgatccgagaacgcttcctgcgccagcagcagcagtacagacaacgccaacagaacgataacaaccgcataaaacccttccaagatacctcaaaaagtggcgagtag

SEQ ID NO: 4252 - DNA, 552 bp, Saccharomyces pastorianus
atgtcagaaagtcagcgtttaggattatcggaggaagaagtagaagcggctgaagtactaggagtactgaaacaatcatgcaggcagaaaccacagcgaccagaggacgtctcgcgaggtgacgaggggagatcggcgagtgaatcgtcgacgacgcctctgaatatactggatcgcgtcagcaacaaaattattaacaacgtcgtgacgttctacgacgaaataaacaccaccaagagaccgctgaagtcgatcgggagactgctggacgacgacgacgacgagcacgacgattacgactataacgaccgggagtttttcaccaacaagagacagaagctgtcgcaggcgtttgccaaggggaaggacaacctgaaggagtacaagctgaacatgtccatcgagtccaagaagaggctcattacgtgcctgcaccttttgaaactagccaacaagcagctgtccgacaaagtttcgtgcttgcaggatctcgtagaaaaggagcaggcgcaccctatgcataacgaagacggcagcctcgtgggcgactag

SEQ ID NO: 4253 - DNA, 546 bp, Saccharomyces pastorianus
atggtgaaacctcggaagtgctatctatgtatatggggtacgtgcgagtgtcagacgatgtatgcgtactcgtcgtcgctgatggtcttgtatcggacccaagggaacgactggtactgcagctgtggctcttcgaccttcaggtattcgactttcagcccgctgcatgtgcaatacgggatctcgaaatcgacgctgaccagcttatctcgaggggcgacatcgtgcgtgtgggggagacgctcttcgtgtacctgtttgtacagttcctctagcttgggtcccgtgcgcaggggcggcgggttcatagaggttttcagttcttcttgcatccggtcatattcttcctggttgaacagtgggaactctgccaccatggatgccagagcgctggcattgtcctcctgtggggcagtgccagtgttgcgttcacggtggcccttcatagtttctatttcccagagcaagaagtcgtcgctcaggttgaacacgactttgcctaagttggccttgaaccggatttgcttgctcaggtctatcttgtag

SEQ ID NO: 4254 - DNA, 978 bp, Saccharomyces pastorianus
atggacacatcaccttccgatgccaacgggttcataacattctttgattctcagcaacaagggcaggaccagtgcaatgagagctctatattccaagacaacaatgaatgtgtaaaacagcagcgaaatttgttaaatgaccaaacgtcttctttccctacgttgaacgggcaatgccctgttttaagtcttacggagtccggtaatgatttaatgttccacaacggcatatctctcgtccaagcaagtcaaccaacacctaactccggcgactgtgcttcctacctggatgaaaagaagagtaacttcggtaataataatatggacactaattattcctctggaaaaaaggataactcttcaggttcgaaaactcctccactttatagtgacaatcttccaggtgactccaaggcaaagaaaaaggcacagaacagggctgcccaaaaggcttttagagaaaggaaggaagcccgacttaaagagctggaagataaactgttgcaaagtgagaagaaccgtcaaagtttgttgaaggaaattcaagagttgagaaaagcaaattctgaaatcaacgcagaaaataggttgctactcaggaatggtagtgaaaaagccacgaagtcctctagagacgttatagatgatagtaattccaaatactctttccccaccaaagatgaattctccacttccatgatcctagaagggaaactggataataaaagtacaaactcgtcaaaggacaatgtgcccataacaaaacaaaagacccagtacaccgacgaaacaggaagacatgtactaacggtccccgccacttgggagtatctttacaaactttcgaacgggagagattttgacgtgacttatgtcatgagtaaattacaagggcaagaatgttgccatagctacggaccggcttatccaaggactttgatcgattcactagttgaagaagccgcttcaaaagaatga

SEQ ID NO: 4255 - DNA, 453 bp, Saccharomyces pastorianus
atgaggtttgaagaacgactacagcaactggtggcagaggagtggggtccggaacagtcagacgcagaagtgctggtgatagtcctgggagacgccgccaggaagtacgtggaatctggagcgctgcgggagcacgtgatcccaaagacgatcgcaggtcacgtggccagccgtgggcgggtagccgttgtgtttctcgggcgggtaaagtacctctacatgtatctcacccggatgcaggcgcaggcacgtgctccgcggtgctcgcacgtgctcgtttacggcctgtgggacctcaccgcgacccaggacggcccacggcaactgcgactgctcagcctggtgctgtgccagtgtctaaatctgccctctaaggtcgagttctacccagaaccgcctgtggccagcgtggctgcgcggctgctgcagtactggaggcacgtgatggggtag

SEQ ID NO: 4256 - DNA, 138 bp, Saccharomyces pastorianus
atgtccactgattctattgttaaagcttccaactggagattagtcgaagtcggccgtgtcgttttgatcaacaaaggtcactccgcaggcaaattggctgctatcgtcgaaatcattgaccaaaagaaggtatgttaa

SEQ ID NO: 4257 - DNA, 144 bp, Saccharomyces pastorianus
atgctatggggtggggccagtatgttcgctttatttgtgttcactgaagggtggcccaaattccaagacgccatatacaaaaagattccattgttaggacctacattggaggaccatactccaccagaagataagcctaattga

SEQ ID NO: 4258 - DNA, 1311 bp, Saccharomyces pastorianus
atgattgagtatggaaacgtactttcatgtcttctagaaaagagaaagaacattggatttgtttattttgacaacgatatttccgcaagaaatgtaattaagaaatttaataatcaagagttttttggaaataaagttatatgtgggatacatttcgataaagaggtaagaagtagacctgaatttaccaaaagaaaaaggatgattggttccgacgttgttatagaagatgaattgtcaattggtaaaaatttgccagataatgctcccttaaaaacaatacttgtcaagaatttaccgacggaaacaacacaagaagaagtgctagatttctttagtgccagtggtcccgtcaaatctgtatttgtctctcgaaaacaaggaaataagtcacctaaggcatttgttacatataaaaatgaaaaagattctaaaacggcacaaaaagatttggacaaaacagtcttcaaaggccaaactatttgggtgggccctgccaaagatagatgtattcataataaaaatgggacgagcaagaagacaaagatttacttgaaaagtttaagcttcaattgtaacaaggaatttctttcccaagtttgcatacaagagagaataaaatatagcgagattaaaatcacaaactataactcatctaattggacattttctggatacgttgaatgtgtttccagttgtgaggctgagaaactatttaaaatcttagatagaagactcatcggaagtagcctggttgaagcatcatggacaagaaattatgatcatgtgtttgatgaaattggttataatggtaatgacgacagtaatatcccagttaacactagctctatgatgcgttttcattatccacagcagcaaccttcttaccagatgggactaccatcacagcttctatcacaaatctccccgttcccatcgtatgcaaattcctgtacgaacatgaactctcttgtagcgacgccaatgaaacctcatcctgcgtttgacctcacttcaagtaacagtaacgaaaaaatgcaacctgttagagaatgtaaacaaggaaatgaagagatattagagtcattaaaaaaagtcataaagagaaatctacggtacataaatatttccggcttgagtaaaggagaaaacttgcgcagtatttcagaatttatttttgaagtcttttgggaccatgattctggaaggctcgctcactttttattattaacaaatacttcacccgaatcacagaagagcttacaaaaacaaatcattaaggctgctgaaagtcttggattttcaatttaa

SEQ ID NO: 4259 - DNA, 747 bp, Saccharomyces pastorianus
atgacaatttctcaaggtaatgtactaaacaatatctctttaaatagcaagcaaaatctgagatcagttcctaaaattagttcaaaagtaaaggctgtgaaagaaaaaagcttcaaggcgatgtccaccgaaacacaagaacataagcaaagagctggatatatgcgtaaagatttgcaattgaaagagtttagaattaaaggccagacacatttcaaaaatgacgaatgcaagaaagtgattcaggaaccgaaagagcagttacaaacgcaaaaaaagcctgtctctaatattcataatgtaaaagaaagttcagaaaaaaaatttcaaagggcatcaaaggttagttcacttttcattgggaagttgaaaccgaccgtcactgaggaaatgttgaagcaaacctttaaaaagtaccaatcttttgaatctgctaagttatgtcgcgattttctcaccaagaaatcgttgggatatggatatttaaacttcagaaatgaaaaagatgtagattctgcaagaaaagattacaactatacgttattctttggccaagaagttaaaatcatgccatcaatgaaaaatacattatttaggaaaaatatcggaacaaacgtctttttttcaaacttaccggtagataatcctcaactgacgacaagatcattttatctaataatgattgagtatggaaacgtactttcatgtcttctagaacagagaaagaacttggattggttaatttga

SEQ ID NO: 4260 - DNA, 1116 bp, Saccharomyces pastorianus
atggcgggtgccggcgccggtggtatggtcggtattgaactgactgatttcgtctttattttaaattctgaggaagcggtgaggtcattttctgagttcggtacaatcactctaggtggtaatgtatcagtttccgcaggtcctcttggtagaagtgcggaagcagcagcatcagcatctacaggtggtgtctcggctgttttcgcctattccaagagcaaagggttattcgcaggtgtttctgtggaaggttcagccatcttagagaggagggaagctaacagaaagttctatggtgatgactgtacttcaaagatgattttgtcaggtagagtaagggttccgccagcagcagatccattgcttcatattctagaatcaagagcgtttaattttacaggtcccggtcatgatgatgatgctgacgaattttacgatgacgaccaaaacagcgatgaaaacagccgttactatgatgacattccagactcctttgattctgctgatgaatcctcaacacgcccaaacacaaaatcgtcaagaagaggaatatcacaaggatctcgcagtcgttatgaagatccggtttatgatgacgaatctgacagtgccgatgacgagcgtgactacggaaggtctcccgataagagtgctagccacaatataggcccgcatgtagatagaggcactaaaccgcgcactaatactcgatgggaagatgatttgtatgacagagcttctgggtatgccagtaaagaatatgacaacgctcgaggaaatacacgtagctatggtagagaaagaggctatagccaaagacatggccaagactatttcagcggcgataacaatgccgataattcatcgcataaaatgtctaaaattgacattgacaataatcattctagggcgaagtcgccaacatctcttcactcgacttcacaaacagctgttgctctgtataactttgcaggagagcaatctggcgatctagctttcaagaaaggtgacgttataaccatcttgaagaaatcagattcccagaatgattggtggacgggaagagtcaatggcaaagaaggtatttttcctgccaattatgttcgagtttcttag

SEQ ID NO: 4261 - DNA, 1173 bp, Saccharomyces pastorianus
atgtggtctggagggaaagacatagtggatcagatatttgatactgggtattgggtggtttcgaaaagtgttgttttgggtgacgagatcagaaatcatgtcggaagatctatagaaaccattaatgaaaagatttccaacagaaaggctctccccgtgcaggaaagcaatttcagcactagcagacaggatatatttaaaaaattgaaaattggattccaggatcattggaagcttggattgggcctttctgccacttccctttgcctttaccttggatatcggacctttttaaaactcccacctcatttacctgaggcggaatctaaggccgtgttgatatttggtgacatgaatgatcctatcgcaagaaatcaggtgatggatttatatcgcagaaggtttatagtgtatatttgcacagagaatgcagatgtttataagaagcatgaagaagatcaggattttgtatattacattgatcctacttgtgaaaaagacttcgaagccttttatcgtgaggtgccaaggctagcatccatattgtttacgccaaggttatcatatcatccatccggaataatatcgtgtgactcattagaatccgaaatacattcaagcatttttgtgtattatcaagcattattaaacgttataccacatttaaagaagaagacacaattgattctatttgacccgtctttaacttcggaactaaacttgattcatcatagcactgaaatcatatcatctggaataatcaactcactattcaatattttccagagacatcaaagattaagtgtttttttaatcaagcttggaattctacaaatcgggtctcagccatcaaactataaattcctgaacacatccggttcagatatacacaaggccctacattaccccgtatacaaaatgataatggacgccaatgggtataaagtaagacaattcttcaattggtttgtgaccttggggggatggaatactgtttaccattgcggtcggtttagttacttggccacatggccgtttgcgtcattcatatttaaccgtcaaacatgtttttccttcaaacatctcaaaaaacggttggccagcgcataccgtaatattatcgccattctgcccacaccacagtcaaacccatctgaagaacgtctaaagtag

SEQ ID NO: 4262 - DNA, 1755 bp, Saccharomyces pastorianus
atgtgtgtgtggcctgggtcagcagtcggtgctgaccattgctcgggctcccaggcaagcagacagatattacaccttgattttttcaccatgtcatctttgtacattaaggagattgccggtgtggacgaattgaccacggccggttctcaagaccaacctttcaagaccccagcatatgctctatttgcatcccagcagaaaagtgatgccaccgaacccaagttgtttgtgttcaaggctgaagacaacgagtttcaggagatcagtgcctctgctttgaagaaggctcgtaagggctgtgaaggtttaaagaaaaaagctgttaagcagaaggaacaagagttgaagaaacagcagaaggatgccgaaaacgctgccaagcaactttctgccttgaagatcaccataaaggaggacgagtccctaccagctgccaccaaagccaagatctacgattcttacgccaaggttgggcaaagagtcaagatctccggttgggtccacagattgcgttccaacaaaaaggtcatcttcgttgtcctaagagacggttccgggttcatccagtgtgttttatccggtgatttggccttggctcaacaaaccctagatttgactttggaatccaccgttactctgtacggtaccgtggccaagttgcctgaaggtaagaccgccccaggtggtgtcgagttggacgtcgactactacgaaatcgtaggcttggcccccggtggcgaggactctttcaccaacaagatcgcagagggcgccgacccatctttgctgttggatcaacgtcatttagccctaagaggggacgctttatctgctgtcatgaaagttcgtgctgctctattgaaaagtgtcagacgtgtttacgatgaagaaagcttaaccgaagtaactccaccatgcatggtgcaaacccaagtcgaaggtggttccactttgttcaagatggactattacggcgaacaagcgtacttgacccaaagttcacaattatacttggaaacctgtttgcccgctctaggtgatgtctacagtatccaggaatccttcagagctgaaaagtcccacacaagaagacatttgtccgaatacactcacatcgaagccgaactagctttcttgactttcgaagacctactacaccacatcgaaactgtgattgtcaaaaccgtccaatacgttttggaagaccccatcgccggtccactggtgaagcagttgaaccctggcttccaagccccgaaggcccctttcatgagactacaatacaaggacgccatcacttggttgcaagagcacggcatcaagaacgaagaagaccaagacttccagtttggtgacgacattgccgaggctgccgaaagaaagatgaccgacaccatcggtgtcccaatcttgctgacaagattcccagtagaaatcaagtctttctacatgaagcgttgctctgatgacccacgtgtcaccgagtccgttgacgtcctaatgcccaccgttggtgaaattaccggtggttccatgagaatcgatgacactgaagaattaatggccggcttcaaccgtgaaggcatcgataccgacgcctactactggttcatcgaccaaagaaaatacggtacttgtccacacggtggctatggtctcggtaccgagcgtatcttggcctggttatgtgacagattcaccgtcagagactgctccttgtacccacgtttcagcggtagatgtaaaccataa

SEQ ID NO: 4263 - DNA, 2607 bp, Saccharomyces pastorianus
atgtccagacttcaatctttggtggcagagaactcagatttgcgttcaaagaatgagaatctccagaaagaaaaagctgtattgagtaaccaattaaaaaacaaggaaaatgaactacagaaaatgagagaaaagatagataaccatcaaaaagagctagccattttttctaagcaaagagatgatgcagtcaatgaacacggtaaaattactgttgaattaaaggaaaccagaaaccagctcactgaatataaatcgaactgtcaaaagattgaagacgaatattccaactttcaaagacaaatgaaagaaaaagaacaaaagaaaagaactgacttagcggaatctttgaatgataacaaggtcaaggaattagaagctcgcctatcacaagagatatcattgaatcagtacttgaataagaggatatctggtccatctatacaatccaatagttcgccaacggaacgttctgtatcacatgccgatgactcactcaataaagaagatgtaatgaaaaagtactatgaccttcaactagcatttactgaagtgactagaaatttggagaacgagattgaggagaagaagaacttgatttctagattaagatttacagaaacaaggctagcttcttcatcattcgatgatcagaaagttagagctcaaatgaaaaagttaaaaaaactagtccaagatatggatcctaacattcagttggatagtcttttggaggagcccctaaaccgttctaccagtgaatcagatatcaataaattgatgtcagaagtcgaatatttaaagagacaattagatatcgaagcaagagctcattatgatgcagaaaatgtcataactgccttacacgataaattcagaaaaattcaaggggaaggctccctatcatcctccgacatttataaactgaagtttgaagccagtgaagagagggttaagtctttggaagacaagctaaaaactatgcctttacgtgatagaacgaatttgcccgttggtgatattataaagaaccgtgatagtatatcgaagtacgaagaagaaatcagatactataagcttgaaaattacaaacttcaggaaatactgaatgaatccaacggaaagttgagtaaattgacccatgagctgagacaatcaaactcaaaagaggccttacttagtgaacaactagccagattacaaaaggatcttgaatctactgaacgccaaaaagaattactttcatccactatgaaacaacaaaaacaacaatttgaagactgtatggacgatctacaagggaacgaactacagctaagagagcatgttcacgcactcaaacaagctcaagaggatgtaaagagtatggcgactatcattgagagactaaagactcaaaacaaacaaaaggaaaagctcatttgggaacgtgaaatggaaagaaatgactcagatatgcagttacaggaaacgttgttggaattgaagagagttcaggatgtgaaaaaaattctaagtgatgatttatcccatttaaaggagcgattaggagcggtggaagacagatctcaatacacagatgagataaatagattaaaagaggaactaaaccggtctttgaaaaccgaaaccaacttgaaaaaagaatttgcaacccttaaatataggttggagacatcaaacaatgattctgaagcaaaaatatctgatttattaaaacagcttgatcattatacaaaggtagtagaaatgttgaataatgaaagagatgccgtctctctttcagaaaacgagctgtatcaaaaatttgaagctcttaataccgaatgccagtcgcttagaagtacagttgcatctctatcaaagattaaggaggagttggagtctaatttaaaactaaaaacggatgagctagatgcatcaagtacagccttcacaaagtctgctcaagagaataaagagataactgaaaaaatcaaatacttggaagaaacgctgaagcttcaaatagagcaaaatgcaaggaacggggaactggttagaaaactgcaagatagcagcaatgtattcagagaaaaattcgacaatgagaaacagaagaacattgatttgttcgaagaaaatcaatcgtcgcaaaagcttattaccgacttacagtctcatttagagaatttacaggacagattgtctgacacttctgaaaagaaagcatggctagccaagatacatgagctggagaatttagtaagtcaagaaaccaagttgaagtacgaagaaatgaaaaaaaataaaaacatggagaggatggtcgaggatttacaaaataagaactctcaacaatcagacgtcattgaactagcgaacagaaacagagccgaatttgaagaaactgctttgaaatatgaggcacaaatttctgagttggaaaaatatatttcccagcaagaacttgacataaagaaatctatcagggataattcttcttaccatgataaagtgcaagagatggcgcaagaaatcgagttttggaaaacccgttatgaatctaccatgatagggtcaaaaaatatggatagcaataacgcagaaggaggagtttttatttaa

SEQ ID NO: 4264 - DNA, 2943 bp, Saccharomyces pastorianus
atgactggcggacagtcttgcggtagtaatatgattgtctggataccagatgagaaggatgttttcataaaaggggagttaacgaataccgatatcaccaaaaataaactcacagggcaggaagagcagatagggattgttcatcccttggattcggcagaggcctcaaatcttgttcatgtgcgaatatcccatgtattcccagttaatccgtcaacgtttgacaaggtagagaacatgtcggagttgacccatttgaacgagccctctgtgctctataatttagagaaaaggtaccactctgatctgatttacacttattccggtttatttttggtcgccatcaatccttatcgcaacttaaatctatattccggggaccttataagcttgtaccataacaatcataggcagctatctgaggatggcttacaaaacgacacttatgaaaaactaccacctcacatctttgcaattgctgaagaagcttacgagaaccttttatctgaaggtaaaaaccaatccattttagtaacgggtgaatctggtgcaggtaagacggaaaacacgaagaagatcctgcaatatttagcgtctataacttccgtttcctcttcatcaaatgccacaccggtcaataacggttctgttgtagaaagtttcgaaatgaaaatcttacaaagtaatcctgttttagaatcatttggtaatgcgcaaactgtacgaaacaacaactcttctagatttggtaaattcataaagattgaatttaatgaacacggtatgatcaatggtgcgcatattgaatggtaccttttagaaaaatcaagaatcgtacaacaaaacgcaaaggaaagaaactaccacatcttttaccagttattatccggattagatgatcatgaattaaaaaaattgtgtctaaaatctagaaacataaaggattacaaaattttatcaaactccaaccaagacattataccaggaattaatgatgctgaaaatttcaaggacctgttttcggcgttaagtattatcggattctcaaaagatcaaataagagggatattccaagtagtggcaattattttgttaattggtaacatcgaatttgtctcagatagagcagaacaagcttctttcaaaaatgacgttggcccaatctgtaatgttttgggtgtggacgagaaagattttcaaactgccattttaaggcctagatcaaaagctggcaaagagtgggtttcgcaatccaaaaactctcaacaagccaaatttattttaaatgcactgtcgagaactctttacgaacgacttttcggatacattgtcgatatgatcaataagaatttggatcatggcagcacgactttaagttatatcggattattagatatcgcaggttttgaaatttttgaaaacaactcctttgaacaactgtgcatcaattatacaaatgaaaaactacaacagtttttcaataatcatatgtttgttttggaacaaagcgaatatctaaaggaaaatatacaatggaattacatcgattatggtaaggatttgcagttgacgatcgagttgattgaaagcaagggtcctccaactggtgtgctcccgttattagatgaagaagctgtcctgccaaagtcaactgatgagtcattctactctaagctgattttaacatgggaccaaaactctcctaaatttaaacgttcaaaattgagaaatgggttcattttgaagcactatgctggggacgtagaatatactgttgagggctggttatctaagaacaaagacccactaaacgacaatcttttatccgtattgtctatctcccaaaatgatatcatttccagactattcaactcggagggtggaaaatcttctagtcaagaaaagcagacctctgatcaagaggtaaaaaagtcaactagaacaagtactttcaagaccacgtcatcacgccatagagaacaacaaataacattactaaatcagttagcttctacgcatccacactttgttcgttgcattattccaaacaacgttaaaaaggcaaacacgtttgacaggaagttaatcttggatcaactgcgctgtaacggtgtcctagagggtatcagacttgccagagaaggttacccaaatagaatagcatttcaagagtttttccagcgatataagattttgtatcctgaaacttcaaactctgtaccgtttcattccaaattaaggaccggcatcaaacaaaactgcgagtttcttctatcttctttacaattggatgcaaatgtttataagatcggtactacaaaactcttttttaaagctggagtattagctgatctggaaaaacaaaaagatgctaaattgaactctataatgattaaaatcacagcaagcatacgtgggtgcattataaggaaggaaataacttctcatttacaaaaattgaagaatgcgagggcaattggtggtactttcagactatacaatcaattagtaaaagaagatccctggttcaacttgttcattagaattaaacctctcttaatatcgtccaatgatatgtcacgaaccaaaaaatttaatgaacaaataaacaaactaaaggataacctacaggagatggaatctaaaaaaaaatttttggaagatagaaatcaaagtaccgttaatgaattgaaagatacgcaagaattgctaaaactagaaaaagaaaatttaagaaaaaacgaaagtttattaaagagagttaaaactaattcagaaacgttgcaaagtcaatttgacgatattgttacggaaaaaaatgaaattaataagcaaaaattacaaattatacaaaaccttgaaagagccgagcaaacgatccaagaacttcaaggagttattaatgaacgggaaactgccttaagaaagttaagttcagaatga

SEQ ID NO: 4265 - DNA, 1866 bp, Saccharomyces pastorianus
atgtctaagcaatttagtcataccacaaacgacagaaggtcatccatcatctactccacgagtgtcgggaaggcagggctattcacgcctgccgactacatcccacaggagtcagaggagaacctgattgaagacgaagaggacgtgaacgaggacgaggccggtgaacagaggcccatccgcggcggtgatggggcccaaccggagagggagggcgagtaccattcgctgctggacgccaacaactcccggacgttacagcaagaagcgtggcaacaggggtacggctccaacgaccgcaagcagttgctggaccaagaacgggacttgctgatagacaacaagctgcttttgcgcgacggtgacatcggaggagacatcgaaagtcgcgaccacggtcacagccctggaccggatggcgcagacaggcccacggagatcgaacacgcatgggacaacgccattgagagcggccagcccatcaactccaccttcaagcgggagacacaggtgattaccatgaacgcgttaccgctcatcttcaccttcatcctacaaaactcgctatcactagcatccattttctccgtctcccacctgggaacgaaggagctgggcggtgtgacgttggggtccatgaccgcaaacataacaggcctggccgcaatccaaggtctgtgcacgtgtctggacacgctgtgcgcacaggcgtacggtgccaagaactaccacctggtgggtgtgctggtgcagagatgtgccgtgatcaccattctggcattcttgcccatgatgtacgtgtggtttgtctggtcggagagaatcctggcgctgatgattcccgagagagagctgtgcacactggcagccaaatacctgcgcgtcaccgcattcggtgtccccggtttcatcctgttcgagtgtggaaagaggttcctgcaatgccagggcatcttccatgcgtccacgatcgtgctgtttgtgtgcgcgcccttgaacgcggttatgaactacctgctggtgtggaacgacaagatcggcatcggctacctgggcgctccgctctccgtggtgatcaactactggctgatgacgctcggactactaatatacgcaatgaccaccaaacacaaggaaagaccgcttaagtgctggaacggcatcatccctcgggagcaagcattcaagaactggcgcaagatgatcaacctggccatccccggtgtggtcatggtcgaagccgagttcctcggcttcgaagtgctcaccatcttcgcctcccacttgggaacggacgcgctgggtgcccagtcgatcgtggccaccgtcgcgtcgctggcataccaggtacctttctccatctctgtctccacaagcacccgagtggccaacttcatcggcgcgtcgctctacgacagctgcatgatcacgtgccgcgtgtccttgctactatcctttgtgtgttcgtcgctaaacatgttcgtgatctgccggtacaaacagcaaatcgcagagctgttctcctcagagaacggtgtggtccagatggtcgtggagacgctgccgctgctggccttcatgcagctgttcgacgcgttcaacgcctcgacagcgggctgcctgcgtggacagggcagacagaagatcggcggttatatcaacctgtttgccttctactgcctgggtgtgcccatggcttacgtgctgactttcgcctaccacttgggcgtgggcggcttgtggctggggatcaccagtgcgttggtgatgatgagcgtgtgccagggctacgcggtgttccatggcgacaagcgccggatccttgccgcagcccgcaagcgtaacgcagagacccacacatcgtga

SEQ ID NO: 4266 - DNA, 1317 bp, Saccharomyces pastorianus
atgtttgtatttcctccccccgtcaaaagcagcaccgcagaagcaatgactaaagcgtacaccatcgttctcaagctcggtagctcgtcgctcgtggacgagagcacgaaggagcccaagctgtccaccatgacgctgatcgtcgagactgtgacgaacctcaagcgtatgggccacaaagtgatcatcgtgtccagtggcggcatcgcggtcggcctggacgcgctcaacatcccgcacaagcccaagcagctttccgaagtgcaggcgatcgccgccgtcggccaaggccgcctcatcgcgcgctggaacatgctgttttcgcagtacggcgaggaaaccgcgcagatcctgctcactcgcaacgacatcctgcgctggaaccagtacaacaacgcgcgcaacaccatcaacgagctgctgacaatgggcgtcatccccattgtcaacgagaacgacacgctgtccatcagcgagatcgagttcggcgataacgacacgctctccgccatcaccgccgccctcgtgggcgcggactttttgttcctgctcacagacgtggactgcttgtacacggacaacccgcgaactaacccgcacgcgcgtcccatcgtgctggtgcccgagttgtccgagggcctacccggcgtcaacacctcctcgggctccggctccgagatcggcacaggcggcatgcgcaccaagctcatagccgccgacctcgcctccaacgccggcatcgagactatcgtgatgaagagcgaccgcccggagtacgtcctggccatcgtcgactacattcagcatcacttccgtccgccgcgctgcgcgggtaacggctcgcagcagcagttccgcgacctgcaggacgcggaacttgcagcgctgcgtcgccacggcgttcccctgcacaccaagttcctggctaacgacaccaaccacaaactcaagaacagggagttctggattctgcacgggctcatcaccaagggcgccatcgtcatcgaccagaacagctacgaccggcttctgtgcaaggacaagactagcttggccccggccgcggtcattgccgtgcgcgacaacttccacgagctggagtgtgtcgacctcgagatcggcaggcggctgcccaacggcgacctggatgtctcgcacccggtccagtccgtcggcagggtccgctccaactacacgagcctggagctcgccaagattaagggcctgcccggcgagaagatccacgatgttctgggctacagcgtcagcgagtacgttgcccacagggaaaacatcgccttcccgccgcagttttga

SEQ ID NO: 4267 - DNA, 2403 bp, Saccharomyces pastorianus
atgatcgggatctcccactcgttctggataataagcgggaacactatcctcgcatcgaactccgtctcgggtttgggcacgagcccggaatggcacacgttgatgaacaccttcttggcgttctgcaactcctctgggccattgctggataccagtttggtctttatgacgaaatccgcgatgggctcgatcttggacactgatccgccgccagcatctaccgtcacgtatttgccgtcactgctgtggcgttgcttgatcggtctcagcaggaaatcggccattgtttgcgctttgctctgccaaactcccaattattgttctctctctctctctctctctctctctctctctctctcttttccgctttctttatgtaagaaaccagagcttttatttttcttcaatcgctattgttttcgaatcgctgaaaaaaaaaggaaaaagtgcccatcacatacacatgtaccgtcgcacagaagactctggtccggcagcgggttctggccaagggcagcgtccatgagctctccaattgatttgctttatgaaccgttttcccaccacgacttggcccagccatttgacccaaatctaaagtgcgctggatgcggtgccttttattcgatggattgcccactgcgggagcaaaacctctggtcatgtttattctgcagccgctccaacccaatggatagaacgccgttggtatcgtctgacgcctacactttgacctctgagagaaaaggcacgtttgaaagaagaaccgttatggttatagacgccgtttgcggcccccatgagctggatcatttgattgccacgctgtgtaacgccgccgcttccaaggacagcgagctgacatgcgtcatcaccattcaggactcaggcagtgtcaccgtgcacaacactgtgggtcagaaacgtaacgctgttttttcaattgatgactttatgacccactataatctcgataaattgaatgtcaaacatttcgaaaaaaaattaagagcgactcactcaacatcgtactggtttgcacacgactctttgaaaaagcaattgcaggaaatttccaagacggcaaaggaggggagcaagtccaaacggggcaaacgctgtaccggattagcattattcattgcctccatattggcgtctcaatgcgctttgtcaacttgttgccatatagtatcatttcttaacggcccatgtaccaaaggcgctggggaggtcttatcaagggaacgtagaaaacatatgagacaaaactatcattttgattccgagaatccaaattcgaaattgtccagaagttcgtggaagttttatgaagagttattcaagaaatttaaacagcagaaatcaaactatgaattttttataagctcgttggatcaaatcggtttgctggaaatgggtccgttagtaaattcatcaatggcggtttctcagtttgattccttcaacgacgagagattcgttagatgtttccagaaatacttgcgtttgagaaatgaaaatgccatttacaactgtaagatgaaaatattaaccgctgaaaacacttcgattgtgtatgagattcctgattatgttttgaacccgaagaatctttctctaccggtagaaatctcactggacaaccgttccacaaagaattctgtacagcttcaaattacgtttgagaatagtgagcaagcatacactaaaatcgaaacatttgtgctaccagcgcaaccaaagaccgatttgtttcaaatacaaaaaataattgcgatagccatgaaaaaaatggcttctcaaatcacgggtgatttcgattactcatccaaacataccaaggagttgaacaagcaattagcttctttactaaggcaagttcagggaattgacaaggacaagattatagaatggtgttattacttatacaaatcgcccatattatcgagcaggaacacttcaccggatgaaaggtacctcttccttcaccaagtactcaactccagtcgtaacgtctgtctttcactatgtaaacctttgatttggaattataatgactcaaaacacgactgggtcgttttggacatttcgctggcaagaacaccgatgttccaagatggcaacaccactttgtgtattgacggtgggtcatacgttattctaagaataggagaacgttttcaaagggaaggccaggagttctgttgcaagcttttaaatgatttacaaagatttacccaaccattatatgtggagactgaaattggtgggagtcaggatcgcttcttgaaaagtaaaattgttccttttgatgccagcgacaagaaaattcttgatacagaagatatgacattccgagatttcttcaacttatacaccagctcgactgaaaacaaatag

SEQ ID NO: 4268 - DNA, 366 bp, Saccharomyces pastorianus
atgtcaacagaattttttggccctatattgtcagtttatgaataccctgatcaagaatttaatacaatctgtgatgttatcgataagaccagtcagtacgctttgaccggtgcaatttttgctaaagatcgtaaagctattgagtatgctgatgaaaaattgaaatttagtgcaggtaatttttacgttaacgacaagtgcactggtgcagttgtctctcaacaatggtttggtggtgcaagaatgagtggtactgatgataaagctggtggtccaaatatcttgagcagatttgtgagtattagaaacatcaaggaaaacttctacgagttaaccgacttcaaatatccatccaattacgattaa

SEQ ID NO: 4269 - DNA, 1206 bp, Saccharomyces pastorianus
atgcttgctgctaggaactttaaactcgcatatttcaggagatctgtctcccaattatctcacatcaaacctcccaaacatatcaaaaatgagcctgtgaagttatttggtaacacagactcgaaagattgggacttgttgagggcctcattgatgaaattcaagagttcttccttagaggttcccttagtcatcaatggagaaagaatttacgacaataatgaaagagccctgttcccacaaaccaaccctgcaaaccatcagcaagtgttggccaacgtcacccaggccactgaaaaggacgtcatgaatgcagtgaaagcagccaaagatgccaaagaggactggtacaagctaccgttctacgacaggtctgccatctttttaaaagctgctgacttgatctctaccaagtatcgctatgatatgttggctgccaccatgctaggacaaggtaagaacgtgtatcaggcagaaattgactgtatcacagaactatccgattttttcagatattacgttaagtatgcttcagacttgtatgctcaacaacccatggaatccgcagatggaacatggaacagagcagagtacaggcctttagaagggtttgtttacgcagtttcaccatttaactttactgcaattgccgcaaatttgatcggcgctcccgctttaatgggtaatactgttgtatggaaaccatctcaaacggctgccttgtcgaactatttattgatgactgttttggaagaagcaggattgccaaagggtgtcattaatttcatcccaggtgacccagttcaagtcaccaatcaaattttggctgataaagatttcggagctctgcacttcacaggttctactaatgttttcaagagtttgtacggcaaaatccagagcggtgttgttgaagggaaatacagagactacccacgtattgttggtgaaactggtggtaaaaattttcatttagttcatccaagtgcaaacatctctcatgcagtactctctaccattagaggtacatttgaattccaaggccagaagtgctctgccacctctagaatatatttaccagaatccaaaagtgaggaatttttatccgatatgtttggcatcctgcagcagcaaaatgttgttccagtaaacacatccgcaagcccaatatctggtggtaatctgcgtggattcatggtcctgtga

SEQ ID NO: 4270 - DNA, 474 bp, Saccharomyces pastorianus
atgtactcgataacgttccaccaccacgcccggcagaccgtgctcatcaaggacaagtccgccatggtcaccaccgctgccgccgctgacatccctccagcgctggtgttcaatggctcgtccacaggtgttccggagtccatcgactccatcctgtcttcaaagctgtccaacatctggctgcagcgccagctcatcaagggcgatgccggcgagacgttgctcatggacgggctcacagttcgcctggtcaacctcttctcctctaccggattcaaaggcctgctcatagaactgcaggcgggcacatcaaacgaggccgccaactttgaggccaagatcgcagacatcgaggcccatctctctgagatccaggtcaaggactacaagacctcttcggactccttgacgccggactcggacaactacatatgcgacctggcataccagtacgttcgtgccctggaattctga

SEQ ID NO: 4271 - DNA, 1545 bp, Saccharomyces pastorianus
atggctccagcagatccagatgcaaacaggttaccaacgtcaccggaattgagcgatgaagagcatttctcaatgcattcggacaaggatatagaacgtgggtctcaattgaccagtggacgaagaaccaatggcacacaatcatatgaagtggcttttggcgaggattccgcggacccagaagatatagctcgtcatattagcatggtccgtcgatattacatttcttctgtcatcacattcacatcaatggtaatcacaatggtttcgtcctgttggacacttccctcaacgcacatcattgagcactttcacatctcacatgaggtaagcacattgggaatcacgctatatgtgtttgggcttggtataggacccttatttctgtccccactaagcgagctgtacggacgcagaaccacattcatatacgctctgacgctcagcgtgatatggcagtgtttgacaatttggtccaagaccattacaggcgtcatgtttggtaggttcctctctgggttcttcggttcagcctttcttagcgtggctggtggcgccatagctgatatcttcgataaagaccagatcggtgtccccatggccatattcaccacatctgccttcctaggaccgtctttgggtccgatcattggtggcgccctataccacgaaaattacaaatggacatttatcactcttctaatcacatcgggatgttgtctcgttattatcgtgctgaccatcccggaaacttataaaccaatgctactaatgcgcaaggccaagagattaagaaaagaagaaaacgatgaacgctactacgccgccttggaagttacgcgtaaacaaacttctctgctttcggcgatcctactatcaactagaagaccctttggattgctgctacgggacccaatgatgggtgtgctttgtttctacactggcctagaactggcaattgtctatctgtattttgtagcattcccgtacgtatttaagaaactctacgattttgggcccatggaggtggcatgctcatatatcggtatcatggtgggcatgcttatctccgccccaacatgtctactattccaaaaaacgtttgaacggagggtcaagaggaataatggtgtcaagacgcccgaaatgcggttcgagccattgttctacggcgcctttttgaccccgatcgggttgttcattttcgcctttacttgctacaaacacgtccactggatagcacccataataggtagtgccgtattcggttcaggcgtgtatttcatcttcaccggtgttttcgcatacactgtggacgcctacagaagatatgcggcctcggggatggcctgcaacacgttcgtgaggtgcataatggccggtgttttcccactcttcgggctacaaatgtataaggcaatgggcgtgaactgggccgggttcctcttggcaatggtgaccgtattgatgatcccaatcccgttcctgttcaccaagtacggggcccgattgagggccaagtcgccgtatgcatgggacgattga

SEQ ID NO: 4272 - DNA, 186 bp, Saccharomyces pastorianus
atggtcaccattgatggtgttcaagttcacctatctactttcaacaagggtttgatggaaatcgctaaccctactgaactgggtgcaatcttctctagacaggtcaatagcgctaaaaagagaacttctgatgaacttgagaagaagtctagtgaatctgaaaccgtcaagaaagctaagaattga

SEQ ID NO: 4273 - DNA, 153 bp, Saccharomyces pastorianus
atggcttcttggttttttcagacttgttgccacaggggcatttgtcatcactgtcacagccagttggacagttgcacgatttttgacactgttcattggttttgcaactaccacatttgcattgacattggtggccttcgttttggaaattga

SEQ ID NO: 4274 - DNA, 2646 bp, Saccharomyces pastorianus
atgatggacatgcaagtgagaaaagtgaggaagccgcctgcttgcacccagtgcaggaagagaaagatcgggtgcgacagagcaaaaccgatatgtgggaattgcgtcaagtacaataagccggattgtttctatccggacgggcccggtaagatggtagctgtgccttctgcgtccgggatctccacgcttggcaacggccaaggtaccaaccatttcaatcagggaaacggtgggagccagaaaaacgtgatgattcagacccagtacccgatcatgcaaacgtcggtagacccttctaacttcacctttagcactgctatagacaccagcgcgcaatggaacaagaccgccagctaccaaaataccactactagcaataataccgctcctcctcaaattaacagtaacgttaataatactgctcacgccagcaccattgtaagaactgatagtcctgatgtgccctccatggaccaaatcagagaatacaacacgcgactacaactgatcaacgctcaaaattttgactatgcggacaacccatactctttcaatgtgagcttgaatcaagactcagcaattttcgatctaatgacttctccgttcacacaagaagaagtcttgctcaaggaaatgaagtttttgagaactaagttgattgacttacaaaatctgcaattgaaaagtttaaaagaaaaatctaatctaatcactagtagtgccaccacgaacaaaatcaccaagatgggacatggttacaagaaaggtctggccaatggtaagggagctgaattggaccctccaaattctgcttcctctttgtcgtcgcaaaagtactttacagccttaacaataacagatatacaaagtttggttcaggtgaaaccattgaaggacactccaaattttcttttcaccaaaaatttcattatcttgagagacaattatctgttcaagttctataacattttgcacgatatttgccatatcaatcagttcaaattgagcccaggtgatgacaacgatcacaaaatatttgcggaaattgataaagtaaagttaccatcaaagcccacaattgtcgaggcattgggtactgcagctgctgagaatctaagttttggagacttcctgccaatatttaaaatatcggacttgttggacttcgttaacgggcttttctccgaaagtgagtctgatcaatccttctcgacaactgatttatcattgtctcagttagctaaactaggtcaactgaacgtagttctgttgatgctgaacgattcaatgactttattcaataaacaggccacctcttttaacgtttcagaattaatgaataattcaaagttgatccgaagccggatcaaactgatagacctgaaatcttatgacgaagaaacaattaaattcattgccatagcgaagttttacgaaactctaaacatacatgatgatcgcaagtcaaatttggacgaagacttggactgtctgttaaacttccagatacaggattttggattattccatttcttgaaaaagatgtattacttgaggcattcacttttaggtcagtcctcattcatggtatccaccattgaaaatttatcgccaataccttctttcatggatgcaaatgatatacctttaattgccaacgatttaaaactgttggaaacacaaacaaaattgataaatattctacaaaatattcccttctatttgccagtaaatttatccaaaatcaaaagtttactagaaacattgactacaggggtgaataaattattgagttctaacggtgaagaggctagtaaagagtggaatgatatcttaaacttcattaataccacagtctacacaaatttttttcttttcattcaaaacgaatcatccttaccaatggcagctcaacagccgtctaacaataacaaaacacagagcaatgaaaaatgcgcaaagaacttgatgaacatcattagttccatgcacattttttatttaatttcattcaactttatttttcccattaaatcaataaggtcattcttaaatggcaatcagcgtttccacgcaaacggtaatgagtttttgtccaccgaccagtttgttcgaatcttgcagaatttcataatgataacttttgccattttccaacgttgtgaggtaatattatatgacgagttttataaaagtctttctaatgaggaaatcaatgttcaattgctattgatacatgacaaaatcttggaacttttgaaaaagctagaaattatcgtttctttcttaagaaacgaaatgaattctaacggagacttcaaatctatcaaaggcttcaacaaagctttggattctatcaagtatatgttgagattcagcaagaaaaaacaaaatttcgcaagaaactccaataataacaatgctacagattatagtcagtcagcgaagaacaaaaacgttctcttaaagtttccgatcaacgaactaaacagaacctatttgaagttcaaagaaatttcggatttcttaatggatagagaaattttccaaaaaaatataattattgacaaggatttggaatcagacaatttagggattactacggctaacttcaatgatttctatgacgcattctataagtag

SEQ ID NO: 4275 - DNA, 249 bp, Saccharomyces pastorianus
atggttggtaccttggccgttgccaagcgtggagatcccggacgcagaaggcacagctaccatcttaccgggcccgtccggatagaaacaatccggcttattgtacttgacgcaattcccacatatcggttttgctctgtcgcacccgatctttctcttcctgcactgggtgcaagcaggcggcttcctcacttttctcacttgcatgtccatcatagtcaaaaagaaacagcaacgctacagcactag

SEQ ID NO: 4276 - DNA, 576 bp, Saccharomyces pastorianus
atgagaaaaatgtcgattagcaagatgagtaaagcaacgacggcccaggacatgaacgcctcagatggacagcacttgcgattgcttgaactactggcagactacgattccactttagagcaattacaaaagggtttccaagatgggtacattcaattaagcagatcgaactactacaataaagactcgttgcgaggcaattatggtaaagactattgggacgaaacgtacgtagggcaattggaggcagcagtagatgaaagcagctctaaattggtgatagatatcgtaaaaagaaaccctcaagaagaccaagtggcggatgtaacaaaagaagaagataatacactgattcaaagaaagaaaggaacgaaaaaggaaactgaaaaagggcaaagccctaaacctgtgcagaattatgacccgattttgatgtttggaggggtgctgtccgttccatcttcattgagacagtcgcagacaagcttcagaggctgtattcccttaatggttcagttgattaattataaaaacgagatattaacgctatcaaagaaactggctgagcagaaataa

SEQ ID NO: 4277 - DNA, 936 bp, Saccharomyces pastorianus
atgtgtaaattgaaaagataccaaaggcaaagactgagagctaaaagaataaggatgctggtcgatttaaatgtgccatggccacagaacagctatgcggacaaagtgactccacaggcaatcaataatttaacaaagacattaaccacattgcatacattgggatatacgcacatcgccataaattttacagtaaatcacagtgagaagttccccaatgatgccaagatgctaaaccccattgacataaagacacggtttggggaattgatggctcaaacgggtctaaaactgtatagcagaatcactctaatcatcgacgacccatcaaagggccagtctctctccaagataagccaagcctttgatattgtagcggccttaccgatcagtgagaagggtcttactctctcaacgaccaacttggatattgacctactgacctttcagtacggttcgcgtctgcccacgttcctcaaacacaaaagcatatgtagttgtgtgaaccgaggtgtaaaactggagatcgtttacgggtacgcactgcgtgacgtacaggctcggagacagtttgtctctaatgtgagaagcgtcatcaggagctcgaggttcagaggcattgtcatcggtagtggtgccatgtcgccattagagtgtcgtaacatattgggagtaacgagcttaatcaagaacctgggtcttccgagcgacaagtgctctaaggccatgggcgacctggcctcgctggttctactgaatgggcgcttaaggaacaagagtcacaagcagaccatcgttgctggtggtggtgatgaagacgacaatgacgtggtcaacgacgtgcaaggcattgacgacacgcggaccatcaaagtcgtcaagagaactatggaccctgagcagctgggccacgccgccaagaggcgcaagccatga

SEQ ID NO: 4278 - DNA, 645 bp, Saccharomyces pastorianus
atgaagattgctagattgccttggactgatgaagatatgattcagaaaaaaataattgttaaacaggatttggccaataactcgttggtgaaattgttaatggaaccaaaatttgccaaggagtttggtatggaacactctacctaccaagaaatgctatctggccaattatttaagtttttagtcaacgcgtgcataaatccagttaccgcaacgctcgattgtatcaatggtgaaataaaggactcctgtggcccaattttcagatccatcattgatgaatgtctgcaaatattaagactggcttacaagccgctgtttgagtaccgcgaaaaatttggtggaaatgatgaatacccagatatgaacgtcaatgaagttttaactaccgacaatatggtttccgaagtcaccaggattggttgtgatatcaatgccaaaaacagtagttctatgagacaagattctctgttcttaagagacatcgagattgagtttattaatggttacgttgttagattggcatcgaaattgaacttagatccaaactcttctaaagtcaacaagaccattcaagaaatggctagtttgagactggcattgaacaggtccagaaagatcaacggagactggagaagcgaatga

SEQ ID NO: 4279 - DNA, 144 bp, Saccharomyces pastorianus
atgaccgcgacgcatagaaccactattcatatccttggattgggtgccatgggtaccgttttggcagtagatcttttgagatttacgaatgcccttgtcgtgcctctattcagatcgacaagcttcatccgccataaggccaat

SEQ ID NO: 4280 - DNA, 180 bp, Saccharomyces pastorianus
atgttgaaaatgatttcaacgccgttggcgttcttgatacctaattccatcaatttagtacccagagtgtacagtttttccctgacaacttctggttcgtcgtcggaccattcactttcatcgtcttcttcagcgttttcttcctttggagctggttccaaagttttttcctcaatgtga

SEQ ID NO: 4281 - DNA, 1617 bp, Saccharomyces pastorianus
atgtcctctccagtgatcggtatcaccttcggtaacacctcatcttccatcgcttacatcaacccaaagaatgacgtagacgttattgccaacccagatggtgagcgtgccattccatctgctttgtcctacgtcggtgaggatgaatatcacggtggtcaagctttgcaacaattgatcagaaaccctaagaacaccataatcaacttccgtgacttcattggtttaccattcgataaatgtgacattaccaagtgcgctaacggagccccagctgttgaaattgacggtaaagccgggttcattatctcaagaggtgaagataaagaagagaaacttactgttgatgaagttgtctccagacatttgaacagattgaagttggctgctgaagattacattggctctaccgtcaaggaagctgtgttgaccgtcccaacaaacttttctgaagaacaaaagactgccttaaaggcttctgccggaaaggttggcttgaagattgttcaattcattaatgaaccatctgctgctctattggcccatgctgaactattcccatttgaaaaggatgttaacgtagtcgttgctgattttggtggtattagatccgatgctgctgttattgccgttcgtaacggtatcttcaccatcttgtctagtgtccacgacttcagcttaggtggtgacaacttggatactgaattggtagaatacttcgccaatgaattccaaaagaagaatcaaactaacccaagaaagaacgctagatctttggccaaattaaaggctaactcttccatcaccaaaaagactttatctaatgccacttcagctaccatttccattgattctttggctgacgggtttgattatcacgcttctatcaacagaatgagatacgagttagtggctaacaaggttttcgctcaattctcctctttcattgattctgccattgccaaagctgaattagacccattagacatcgatgctgttcttttgactggtggtgtatcattcactccaaagttgaccaccaatttggaatacacattaccagaatctgttgaaattctcggtccacaggacaagaacgcttctaacaatccaaacgaattatctgcatccggtgccgctttacaagccagactagtcagcgactacgatgccgatgaattagctgaagctttacaaccagttatcatcaacaccccacatctaaagaaagccattggtttggtcggtgccaagggtgaattccatccagttttgctagctgaaacttcctacccagtacaaaagaaattgactttgaaacaggcgaagggtgacttcttggttggtgtttacgaaggtgaacatcacattgaggaaaaaactttggaaccagctccaaaggaagaaaacgctgaagaagacgatgaaagtgaatggtccgacgacgaaccagaagttgtcagggaaaaactgtacactctgggtactaaattgatggaattaggtatcaagaacgccaacggcgttgaaatcattttcaacatcaacaaagacggtgcgctaagagtcactgctagagatttgaagtctggcgctgctgttaagggtgaattatag

SEQ ID NO: 4282 - DNA, 1512 bp, Saccharomyces pastorianus
atgtcaaagatcattaagaaaaaggaaaataagaatgttaacgaattagcttctttggctgaaaagatcagagcaaaggctcttgagaaccaaaagaaacggatagaagcggaaaatgaaagtagttcagaatctgattctgaagaaccttccgctattaaaaaaaaaagagtttccaaaccaaagagcaaatctaaagactccacgtcgaccgaaaatgaccattcaaatgacggtgaatccttcgaaacttttaacgagttaaatctggttcccgagctactccaagcttgtaagaacttgaactactccaaaccaactccaattcaatctaaatcaattccgccagcacttgcaggccatgatatcattggtcttgcacaaacaggttccggtaagactgctgcgtttgctattcccattttaaaccgtttatggcacgatcaagagccatactatgcatgtattcttgccccaacgagagaattggcacaacagatcaaagaagcttttgattcattagggtccttaatgggtgtgaggtcgacatgtattgtgggtggtatgaatatgatggaccaagctagagacttgatgagaaaaccacatattatcattgctacgcctggtagattaatggatcatctagagaacaccaaggggttctcgctgaggaagctgaaatttttagtcatggatgaagcagatagattgttagatatggaattcggacccgttcttgatagaattctaaagattataccaacgcaagatagaactacatatttattttctgccactatgacttccaaaattgataaattgcaaagagccagtttgacaaatcctgtgaaatgtgccgtatcaaataaatatcaaaccgtggacacattggtgcaaacattgatggttgtgccaggcggtctcaaaaacacttatttgatatatctattaaatgagttcatcgggaagacaatgattattttcactagaacaaaggccaatgccgaaagattatcgggattgtgcaacttgctggagttcagcgccactgctctacatggtgacttgaatcaaaaccaaagaatgggtgctctggatctgtttaaggcaggaaagagagctatccttgtcgctacagatgttgctgctagaggattagatattccatctgtggatatagttgtaaactacgatattcctgttgactctaaatcctacattcaccgtgtgggtagaacagcaagagccggtagatcagggaaatctgtttcgctggtgtcacagtatgatctggaattgatcttgaggattgaagaagtgttgggtaaaaaactaccgaaggaaaatgtggacaagaacattatattaaccctgagagactctgttgataaggccaacggtgaagttgtcatggaaatgaacagaagaaacaaggagaagattgccagaggtaagggaagaacaggaagaatcatgatgagagaaaacatggataggggtgaaagataa

SEQ ID NO: 4283 - DNA, 282 bp, Saccharomyces pastorianus
atggaatcgtgtaacaacacccccttcgagattgtgccattgtcgctatctgcggtctttagcttcttgttttgcacgcttgtgggttcctccgatggcttggcggcgctcaatttcacaacgtgcgggatacgtggcacccttagaatgcaatctttgaagttctcggagaacgtgctgatgttcttgggctcgggaaacttcactgcacacattggtatcctggtgatgaaaaacgacctgtctaattctcgcatttcgcggttcactggcgggctgtaa

SEQ ID NO: 4284 - DNA, 120 bp, Saccharomyces pastorianus
atggatcggatggcaagagaaaggagagatcatattcttcgctgtccattagtagcatacagcagcaatctcaagaaatacctttacgtgagaaactatccgggtcgggatttacactag

SEQ ID NO: 4285 - DNA, 639 bp, Saccharomyces pastorianus
atgggcgaattaagtactacattggcggaagactcatctaaggaaacacttttaacaccaaaaaacattattgacgctgcttatgctaaaattaaggatgacaaaatagtaaaagtaggaggaacaacagccattatggcccatttcccacccagtggtaaattacaagtcgccaacttgggtgactcctggtgtggtgtctttagagattccaaacttgtgttccaaactgagtttcaaactgtcgggtttaatgcaccttatcagctgtcaattataccggaaaaaatgttgaaagaggctgaaagaaaaggcagtaaatacattctgaacacccccgccgatgctgatgagtatactttccaattagaaaaaaatgacatagttatgttagccaccgacggtgtaactgataatattgccacagatgatattgaactttttttgaaagataattctgccaggacaaaagacgaactacagttattgacacaggaacttgtgaaaaacgttgtcagtttaagtaaagatcctaattaccctagcgtttttgcccaagaaatttctaaattaactggtagaaactacagtggtggaaaggaagacgatattactgtagttgttgtaagagtcgactaa

SEQ ID NO: 4286 - DNA, 414 bp, Saccharomyces pastorianus
atgtttgcaaacgttgggtttaggactttgagaacctccagaggttccatttatggtatgtttgttattttgctattgggtgtgcttattgccaattttgctggacatttactaatcgactcagagtccaatatttctcgtataataggatcctgtagccaagttatcaatttctccaaaagaaccttctattcaagtgccaaagatggttatcagtcgaacggtagtaatggtgacggatatagtgccaaggcacagacaggcccattcacttataagaccgccgttgctttccagccaaaggacagagacgaccaaatataccaaaagctaaaggaatccattaaatcacctacgggagaagataactactttacgacctgcaggcatgcaagctggcactgccgtcgttta

SEQ ID NO: 4287 - DNA, 462 bp, Saccharomyces pastorianus
atggaatatggtggtgaccttgatgcggatagagatattgagatgaaaagaatgtatgaagagtacgagaagaaattgaaggatgaagaagaaagaaaagcggaagaagaattagaaaggcaatttcagcaaatgatgcaagaatctatggacgcgagaaagagtgaaaagattgttgtcaacaaaataccagtaatatcgaaacccattaatgttcaaaaacccttattattgaaaaagaatgaggagctttcttcaaaggtggaagctgaccaaaaattatctaagccaaagaaaattgcatttacatttttaactaaaagtggtaagaaaacacaatcaagagttttacagttaccaacagatgtgaagttcgtttctgatgttcttgaagaagaagaaaagttaaagactgaaagagacaaaattaaaagaattgtcttgaaacgctcttttgattga

SEQ ID NO: 4288 - DNA, 1353 bp, Saccharomyces pastorianus
atgatcacaaaccaggccctaccacccaaccaacgattgtgggaaaatgaagaaataagaaaattttatgaaattttaccagatatctctaaaactgtggaagaatcactggccattaagatagaaaaagactcaaattcaaactccaagaatattaacttatttttcacagacttggaaatggctgactctaaagatataatagacgaactttcaaatagatactggtcatcgcatttggacaataaagccacaagaaaccgaatattgaaattcttcatggagacacaagactggagcaagctgtcggtatattctaggtttattgcaacaaacagtaaatatatgcctgaaattgttgcagaatttattaattacctggacaatggtttcagaaaccaattgcactcaaataagattaatgtaaaaaacatcatcttcttcagtgaaatgatcaagttcctattgataccgtcgtttatgattttccataagataagaacattaatcatgaatatgcaagttccaaacaatgtagaaattttgaccattttattggaacattcaggaaaatttctgctgaataaaccagaatacaaggaattaatggagaaaatggttcaattaattaaagacaaaaaaaatgacaggcaattgaacatgaacatgaagggtgccttggaaaacataataaccctactttatccaccttctgtaaagtctttaaatgtgatggtaagaacattaaccccagaacaacaattttatcgcattttaatcaggagtgaacttaataacctggatttcaaacacattgttaagctagttcgtaaagcccattggacagatccggccatcaagaaaacactattctctctgttttcgaagccacataagctgagctatcaaaacatccccgttttgaccaaagttttaggtggtttatacagttaccatcgtgactttgtcatcagatgtatagaccaaatattggagaatattgagcggagtttagaggtcaacgattatggacaaaatatgcatagagtttcaaatgtaagatatttgaccgaaattttcaattatgaaatgataaagtccgacgttttgttggatacaatttaccacattatcaggtttggtcacataaataatcaacccaaccctttctatttgaatgattcagatctacctgataactatttcagaattcagttggttactacgattctactaaatatcaataggacaccagcagcatttacaaaaaaatgtagagttttgttaaggttctcggaatactatattttcaccaaggagactctagaggtccccggtaccggctcgattgta

SEQ ID NO: 4289 - DNA, 132 bp, Saccharomyces pastorianus
atggggccggtacccgatggattttacgattactttatcaagcgtttcccaaacctactaatagggatttataagattgtcaaggagaacttgagcgacgaccaaattttacatggatttttgtattcataa

SEQ ID NO: 4290 - DNA, 2064 bp, Saccharomyces pastorianus
atgatgagaactgaattacaaaatttatccgaatacaccttggatgatgagtactacaacaacgtggacgaaacctatgaagaagctatgaacgacggtttacctcctcaacctgttcctccttcttctgctccagtctctttacctacccctatatcatctaataataaacaacctgtaccagaattcaaaaaagatttcaattttaataacacaaatgaaagaaagcgtccagatgctcctcagaatcaaaatattgtgaacaatcccttcaagaaaccttccactcagcaacagaagatttccagccaaagttataatcacacttcaccgtctccttacgaaagggcgaaatctgttcctaaattcaaattcaagaaacgcaataagtacggaaagactgataatcaatatcctaaaccggtcagtattgaagataggaagaagagtaaaattcttaaggaatcaaggaaacctttgggtataccaacacctaatactcatatgaataactttttccatgattataaggcaaaggatgaatttaacactagagattttttcactcctccgagtgtccaacacaggtatatggaagggttttccaacaacaataatagacaatacagacagaaccgtaattataacggcaacaatcatggaaataattataacttcaacaacggtaatggctatataaagggctggaacaagaacttcaataaatatagaagacctagctcttccagttgcaccggaaaatcactactttcaagatatagcatgagctataaccacaacaatggttccaccaacggctatacaaggcgtggctccactagtacggttcaacattcgccaggcgcttatattccaccaaatgctagaaaccatcacgtcagccctagcaatcatcttttaagggttccacaatctactgctccggatatctccactgttttagatagcaagccttcatatcacgatcattatactcaggataacatagactccgagggagaacaagattcggacgacgttctattcactcttgaagaaagtgatcacgattttgtcaatggaatggacaatttatccatacatgatcacttgccaccaataacaacaagtgcccaaagcggtatttttgctcatgctaataacagccacgataacagcgatactagcaatactaataataatgatcaccatcacaatagacaatatattccacctcccttagcaacatcattgcacatcaacaacaataatgaaactaacgaactacctgatttattaaaatcaccagcatcttccgaagcacatctaaatttatcttccggaccagttgatccgatattgacagatagtagtaatattggcaacagatattcacgctcatctgattctaaagaacaacaagagcaagatcaagatcaagatcgtaggctcagtatggaacaaaagttcaaaaatggagtttatgtcccaccccatcatagaaagagtttcaacctaggaacgcaagaaccacctctgaacatgaaatcaagtaatgaggctacattatcggtctcgcacaattctgtcaattttggtggatcttacaattcaagacgttctagtatcaatgaccctaacccattgcatatgaacaagacacctgacaatatgcctgcatctccaggagccaagaattcatttgctgggttccctaaaccattattaccgcgtaatcattctagcaccacaattgcattacaaaatgaagatgtattcgcggattccaacaatgatgccataatcttcgaagacgaagaatacgacggggaaagtgataaaatggttcatggcaagatgggagacggtggtgatgaatcatcatcaacttctccagatgaaaggcaaatttttggaccatacgaaatttatgcgcaaactttcaccggctccactcatgacaaaaaactgagggctggtagaaagtctaatattcaagatgaaatggtcgggtcgttggagcagtataagaacaactggctaattctacaacaacaggattaa

SEQ ID NO: 4291 - DNA, 552 bp, Saccharomyces pastorianus
atgactttggactacgagatttataaagaaggaggcatcttgaacaaccgataccaaaagatagaagatattagtgaaggttcatatggttacgtctcgttggctaaagacgtcagggagaaaagattggttgcagtcaaatatattttcaaattagaagatgacggccactatgaaggagacgacgacgacgacgattatgccaatgattgtgacgatgacggcgatgatgaaaataccaaagttgatgcagacggccatgaagatggagatgttaatgctgctacaaacaacgggtcaagtagagagaagaaacacaatctttacaaacataaaaagtctttgatttcttcgaaagtcaaatcaagactgtccaacaacatctgtctcgaagccatgtatgaagtagatatccaaacaaaaattggtagacacaacaatattgcagctttactggattttttcgattcatatatcatcatggagtattgttcgggcggtgatttgtatgaagcatcaaagccgatgctgtcccaagaagaccaatctatc

SEQ ID NO: 4292 - DNA, 234 bp, Saccharomyces pastorianus
atgtcgccggaattgtttgatagcaacttggatatcgacgaaagaaaggaaccttacgattgcgctaaagttgacttgtgggctatgggtatcgttttccttaatattgttttccacaagaacccatttagcatcgctaatcaatcagacaaatcctttggttatttcgctgccaacagagaggctctattcgatgttttctccacaatgcttatgatttcttccaagtactaa

SEQ ID NO: 4293 - DNA, 1032 bp, Saccharomyces pastorianus
atggtagtaaatgagctcaaagtgagggtgttgtacgcaatggtaagtctgttcagtgttcccaagccggtgaaacgaatgtttgacacgttccccttgcaaacgtatggtgcgcaagccgacaaggacgaggcagttgcgttggaagtacaacgcaggtcctatccattcacaggacgcggtgatggcgacttgaagttgactgcggaggacacatacaagctgggtgtctacaacgtcttttccgaggccactacgggggccatgctggccacagacccgtggtgtctattcgttcagcttgcactgtgccagaagaacggtctttgcctgcctacggaatcgcaagaaaagggcacatctcaatcctgcaaccatgaactgatggtactatcacgtctgtccaaccctaatgagactctgcccattctcgttgagggccacaagaagagaatcgtgaggtctacagacgccatcagcaacaccatgcgttcccgggtgctcgaagatgctgagcagcttatgtacgatatgcttctggacacggtgctctatgattgttggatgacacaggtacttttccgtatctccaattcacaattcatggaactgtattcctcccagaagccaaatgagtcgacatccaccttagtggacgtagaaaactctttgctgggcaagttatctgccaacagcttgaaaatgtctttgctgaagagaaacaagttccagctgcgtcatcgagaaattgccgacagtatgcacgccatttatcacaagcgtcataacagcattagccaagagcaggcaatagatgtactctttgagaacagtaagcaagtcctcttggatttccaaagcagtttgagtggtaataatactcaacccgcttctctgcatctaaagatcgcaagctacattctttgtatcatgaacgtcaaagagcctatagagttgaaggtttttgtcgaagatgagtgtaaagacctggtcaactttgcgcacaaagtcctaaataattttatccagtaa

SEQ ID NO: 4294 - DNA, 183 bp, Saccharomyces pastorianus
atggaaccaatgcgacgctgttgtcattggctacacaggacatcgagactcgttagggcggctttcagcgaacaattcctgcctgtcgtactcaagcaaatcgaaattattatcaaggaggggggagagtgcggtaaaaccgcaaacaacctcaagaagctgcttgcgaaagtcttcgactaa

SEQ ID NO: 4295 - DNA, 234 bp, Saccharomyces pastorianus
atgctcgttgaatacggctgtcaagatgagcgtgctagaggcgtcgacagtgatacagcagtttctttcgaagacagcagtgatttgcgaaacccatacttaattccagactgtccgcagccattcgagcatctgaaactgtttaccagagaattgaaagtcaaggatccagctgctaatggaaccaatgcgacgctgttgtcattggctacacaggacatcgagactcgttag

SEQ ID NO: 4296 - DNA, 258 bp, Saccharomyces pastorianus
atgacaaaatcaagaaagcagaagcagaagaaacaggattttttgagaaaaaagttaaaagttggtaagccaaaggaaagagcaagtaatgccactaatacgtctttcgtttccaaaaccatttctattagaaaccagcatctagatcatgatcctcacgatctgacgaaacggttaactttattaaaacaccacaacaccaacgtgagaaaggaaacattaataacattccagaaatctataccgtctatcataaat

SEQ ID NO: 4297 - DNA, 750 bp, Saccharomyces pastorianus
atgagctcgaagagaaaccatatgtctcaattcatttaccccgtccaacaacagccgtctctaaaccatttcactgatccaaacaataccactgtctttattgggggtctgtcatctttggtgaccgaggatgagctccgtgcttatttccaaccttttggcacgattgtctacgtcaagatcccagtaggcaaaggctgtgggtttgttcaatacgttgaccgactatccgccgagacagccattgccggaatgcaaggttttccaattgcgaattcaagagttaggctatcttggggcagatctgccaagcagacggcattgctccagcaagctatgttgagtaactctttgcaagttcaacaacagcaaccagctttacagcaacctacgtacggatacattccctccacttcgtatgaaaatccagctccgctaaatagtaacattacggcttcaatgcttccaggttctcaaactttaaactatgctaactcatacgccaatgataactcgttacttcatgattcgagtaatagcttaggcttaaatgattttggtttctacaataacaatggtgccacgaacgcatctaccgctagcctaatgactaacaacgactccatcagcgctattgatgcccaaggccaacaacaggttataatgcaaggaaacgaagcatttgcgaatagcacaacttcaatgttgaatcgtttggaacaaggtagtaatggatttatgtttgcttga

SEQ ID NO: 4298 - DNA, 711 bp, Saccharomyces pastorianus
atgtcttataaacaattcaattactatcccaataggggagatccgactaggaacgactcatttcaatataatgatgttgcctcttcgaacaacaatagtacaaataataatagtacgaacgtattaaatgtccaaggtgcatccgatataaattcgggcactaccgggaaccaattgtatatgggggacttggatcctacttgggataagaataccataagtcaaatttgggggtctttgggcgaagcaaatattaacgttcgaatgatgtggaataacccttctaatggtagttccagaccatcaatgggtccaaaaaacaatcaggggtattgctttatcgattttccttcttccacacatgcggcaaatgctcttttgaagaacgggatgattatacctagttttccaaataaaaaattgaaattaaactgggctacgtcgtcgtattcaaacggcaacagcagcagcagcaactcgattagtaacagcaagagtggcaataactattccatatttgttggagacttagcgccaaatgttaccgaatcacagttattcgagctcttcattaccagatatgcttctgcgtctcacgcgaaaatcgtgcatgaccaggtcacaggaatgtccaaggggtacggctttgtaaaattcagcagcgctgaagaacaacaactagctctttcagaaatgcaggcgtattcttga

SEQ ID NO: 4299 - DNA, 321 bp, Saccharomyces pastorianus
atgtctaccgtaatcaagtatttctacaaaggtgaaaacaccgatttgattatatttgctgcatctgaagaactcgtaaacgaatatttggaaaatccatccatcggtaagctttcggaagtggttgaagtctttgaaattttcaccccgctagatggtaggggtgccgaaggtgaattgggcgctgcatccaaggcccaagtggaaaatgaattcggtaagggtaagaagatcgaagaagttatcgatttgatattgaaaaatggtgaaccaaattccgttacttccagtctcaaaactaaaggtaacgcctacaaataa

SEQ ID NO: 4300 - DNA, 1011 bp, Saccharomyces pastorianus
atggagagtcccattggtctaggtttcgcctgggctttgtttatgatcggtggtatgacgtttgttccagaatctccacgttacttagttgaagttggcaaaattgaagaagctaagcgttctattgctctttcaaacaaggttagcgttgatgatccagctatcgcagctgaaattgaaatcgtccaatctggtattgaggctgaaaaattagctggtaacgcttcctggggtgaattattcaacaccaagactaaagttctacaacgtttgatcatgggtgctatgattcaatcgttacaacaattgactggtgataactatttcttctactacggtactaccgttttcactgctgtcggtttacaagattctttcgaaacttctattgttttaggtattgtcaatttcgcttccactttggttggtatctttttagtcgaaagatatggtcgtcgtagatgtttattgtggggtgccgcttctatggtttgttgtatggttgttttcgcctctgtcggtgttactagattatggccaaatggtaagaaaaacggttcttccaagggtgctggtaactgtatgattgtctttacctgtttctacttattctgtttcgccaccacctgggctccaattccttttgttgtcaactctgaaactttcccattgagagtcaagtccaagtgtatgtctattgcccaagcctgtaactggttgtggggtttcttgattgggttctttaccccatttatctccggtgccatcgatttctactacggttacgttttcatgggttgtttagtattttcctacttttatgtcttcttctttgttcctgaaactaagggtttaactttggaagaagtcaacactttgtgggaagaaggtgtcttaccatggaaatcaactgaatgggtcccaccaaacaaaagaagttccgactataatgctaatgacttggctgaggacgaccaacctttcttcaagaagatgttcggaaaaaagtaa

SEQ ID NO: 4301 - DNA, 741 bp, Saccharomyces pastorianus
atgtctgaagaaggtgcttatcacgaggatacagccgtccaaaatcctccaccagaagctttgtcaccagttgaatctgactcgaactcagctttatctactccatctaacaaagctgagggagatgacttgaaagacttcgacgagaaccatgaagaatcaaacaattacattgaaattccaaaaaagccagcttccgcttacattactgtctccatcatgtgtatcatgattgcttttggtggtttcgttttcggttgggatactggtaccatttctggttttgttgctcaaactgatttcatcagaagattcggtatgaagcatcacgacggtactcactacttgtctaaggttagaactggtttaattgtcgctattttcaacattggttgtgcctttggtggtattattttgtccaagttaggtgacatgtatggtcgtaaaatgggtttaatcgttgttgtcgttatttacattatcggtattatcattcaaattgcatccattgacaagtggtaccaatatttcattggtagaattatctctggtttaggtgttggtggtattgctgtcttatccccaatgttaatctcagaagtttctccaaagcatattagaggtactctggtttcgtgttaccaacttatgatcaccttgggtattttcttgggttactgtaccaattatggtaccaagacttactccaactctgtgcaatggagagtcccattggtctag

SEQ ID NO: 4302 - DNA, 690 bp, Saccharomyces pastorianus
atggacgttacagggttatttggcggatcttttcatcacgatggtccctttgacgcatgcactccacaaagaaacaaggataataaagtggcacccgtgctagcgtttccagcggacggtccaaacaatacagtcggtggtggtaccagtaagaagtctactctagatgaggtgttcggcagagaaacagtagacgatgatcatgagaggccggataaactgcaagatagagcatatttgtacaataaagccaattccagcactaccacgttggacgcgataaaaccaaacaaaaagaacattactcaatttgactctaagatgaaaaccgaactcgttcacggacccacaacaatgggtctaggctccacaacattcttggatggagcgcctgcatcttctgcagcaataagacaagacgttattaaccatgcgcacgaatctcgtaggaaaaacagcatatcaaggaaaaaatctctcccaagaaggcatttgcaagttaacaacaacaatctaaagctcgtcaagacgcatagtgggcacttggagcaaaatgaaaccagcggcggcaatcctacggccagcactaacacctacggaagcggctatgacgatgtcgccagaaatgaaaataccggaaacaaattgctgagaagagtgaaaagtttgaaaaccagtagaaaaaactga

SEQ ID NO: 4303 - DNA, 141 bp, Saccharomyces pastorianus
atgaaccactcaggtagaaaccttgaagggtcccaaaataggacaaatcccgcggtcaatccattcagaacctcgccttctgacgatagagtaccaagcagggacgacacgcccagaaattacaagtacgtaggaatataa

SEQ ID NO: 4304 - DNA, 10581 bp, Saccharomyces pastorianus
atgttttctttcaagattctttcagaatgccctataacaatggtcactttatattcatcttacaagcagctaactagcacttcgttgcctgaatttacacctctaatcatggatttactgaatattcaaatcaaacaacaacaagatgcgagagagcaggctgaatctcacggagagcattttacttctatctctttggagattactaatagaccagcttactgtgatttcatattggctcagatcaaagccacttccttcttagcttatgtgttcataagaggatatgcaccagaatttttacaggattatgtcaatttcgtcccggatttaatcattagactcttacaagattgtccctctgaattgtcatctgccaggaaagaactcttacatgctactagacatatcctatccacaaactataaaaaactctttttgcccaaattagactatttgttcgatgaacgtatactcattggaaacggctttactatgcacgaaacattgaggccattggcctatagtactgtggcagatttcatccacaatatcagatctgaattacaactgagtgaaatcgaaaaaaccataaaaatatataccggatatctattggatgagtcattagctttgacggttcaaattatgagtgcgaagttactacttaacttggtggaaaggatactaaaattaggcaaagagaatcctcaagaatcacctagagccaagaaattgttaatgataattattgactcatatatgaatagatttaagaccttgaacaggcaatacgatacaataatgaagtatcataccaaatatgaaacaaacaaaaaggagaaagcagaacaactaaaaatctctatagagaataacgacaaagagagcgaggaattcatgaagagtatactggagccatctgacgacaacgggttggtaccagaactcaagcaagaagacaataataaaagtttagacgctgcagtgacagattctgtcaaagaggatagttccattgagatgtttgacataaaaaactatgccccaatattattattgcccataccaacaaacgaccctattaaagacgctttttatttataccgaactttaatgtcctttttgaagacaattattcatgacttgaaggtcttcaatcctccacctaatgaatatacagttgccaatcctaagttatgggcatccgtgtccagagtgttctcatacgaagaagtcattgttttcaaagatctattccacgaatgtatcatcggcttgaagtttttcaaagatcataatgaaaaactatccgcaacacttacaaaaaagcattttgatatatcaatgcccagtttaccagtctcagccacgaaggatgcccgcgagttgatggactacttggcgtttatgtttatgcaaatggacaatgcaacctttaatgaaataattgaagaggaactaccattcgtttacgaaagaatgctagaagattcagggttgttacatgttgcccaatcatttttgacaagtgagattacctctccaaattttgctggcattcttttaaggtttttgaaaggcaagttaaaggacttagggaatgttgattttaacacatctaacattttaatacgacttttcaaactatcctttatgtccgttaatctttttccaaacatcaatgaggtcgttctgcttccacatttgaatgatctaattttaaactccctcaaatactcaactactgcagaagaacccctggtttatttttatctcatcagaactctcttcagaagtataggtggtggtagattcgaaaatttatatagatccattaagcctatactacaagtgctgttacagtctttgaatcagatgatacttactgcaagattacctcatgaaagagaactttatgtggaattatgcattactgtacctgtgcgtttaagcgtactggctccttacttaccatacctgatgaaaccgttggtttttgcattacaacaatacccggatctcgtttcacaaggcttaaggaccttagagctgtgtattgataacttgaccgccgaatattttgacccaattattgagcctgttatcgacgacgtctcgaaagccttgttcaatcttttacaacctcaaccgttcaatcatgctataagtcataatgtggttaggataatgggcaaattggggggaagaaaccgccaatttttgaaaccaccaacggatcttacagaaaaaaccgaattagatatccatgttatagccgatttcaagattaatggtatgccagaagatgtcccactctcaataacaccgggaattcaatctgcattggacatattagaaagctacaagaccgatattcactataagaaaagtgcctacaagtatttaaccttcgtactactgttaatgacaaaatcttccgcggaatttcctgaaaattacacagaattgctgaaaacagcagtaaattccataaagctggaaaaaattgagctaaaaaaagacttcaatttagaaccgactgtaaacaaaagagatttttcaaatcaagaaagtttgtttttaagattattggaaagcgtcttttatgcaacttccattaaagaattaaaagatgaagcaatatctctcttaaacaaccttctggaccatttctgcttattacaagttaataccaccttactgaacaaaagaaactataacggaacatttaatattgatttgaagaatccagatttcatgttggatagttcattgattttagatgctattccttttgccctttcatactatattccagaagttcgtgaggtaggcattatggcgtataagcgaatatatgaaaagagttgtctgatatatggagaagaattagctttgagccattcgtttataccggaattggctaaacaattcattcatctatgttacgacgaaacttattacaacaagaggggcggtgtcttaggtattaaggtcttaattgataatgtaaagtcgtcttcagctttcctaaaaaaataccagtacaacttagcaaacggtttactatttgtattaaaggacactcagaatgaggccccctctgccataacggatagcgctgaagaattattaatagagctattaagcattactttcaccgatgtgaaagaagaagatttgggtaacaaagtcttggaaaatactttgaccgatatcgtatgcgaattaagtaatgcaaatgcaaaggtaagaagtgcttgccagaagtctctacacacaatatcagaccttactagaatttcagtggtgaagttgatggatcattccaaacaatttcttttatcaccaatattcgcaaaacctttaagagcattgccatttacaatgcaaattggtaatgtcgatgctatcacgttctgcctaagcttaccaaacacattcttaacatttaatgaagaattatttagattactacaagaatctattgtattagcagatgcagaagatgagtcgctttctacaaatattcagaagacaaccgaatacagtacttcagaacaactagtacaactaagaatagcgtgcataaaattgcttgccattgctctaaaaaatgaagaatttgctacagcccaacaagggaacattaggattcgtattttagctgtatttttcaagacaatgttaaagacatcgccagaaatcatcaatactacatatgaagctcttaaggaatctttagcagaaaattcaaagctgccaaaagaattgctccaaaatgggctaaaacctctattaatgaatttatccgaccaccaaaagttgacagttcctggtttagatgctttgtcgaaactgctcgaattactgatcgcctactttaaagtggaaattggaagaaaattactagatcacctcagtgcatggtgccgtgttgaggttcttgacacgttatttggccaagatttagtggaacaaatgccgactaagataattatcaacatcatcaacattttccatttacttccaccacaagctgatatgtttttgaatgatttgttacttaaagttatgcttctagaaagaaaactacgacttcaattagattcaccatttcgtacaccactggccaagtatctaaaccgttttcatggtcccgtcacggaatactttaaaaaaaacatgacattaaggcaattagttcttttcatgtgtaacattattcagaggcctgaggcaaaagatttggctgcagattttgagagagaacttgattggttttatgatttctatatttccaacataccaaagaatcaagtacgtgttgtcagtttctttaccaatatggtagacctatttaataccatggtaagaacaaatgaagacgaatggctgaagagaaaaggtgacatggttttgaagttgaaagatatgctaagtttaaccttaaaaacaataaaagaaaactcgttttatatcgatcacttacaactgaaccaaagtatcgaaaaattccaaaacctttatctacggtacactaaattagcagatggagaccaaggttctttatttttagattttattgatttttcgttttcaaatggtatcaaagcctcccattccttgaagaaatttattttccataatataattgcgaattcaaataaaaaggaacagaatgatctcattaataatatgattgcttttgctatatcggacaagtgtttggatgctaagatatttgttcttaaaaatgtgataaattctacattaatttatgaagttacgacggttggatctttgaaaaacttccttgttgacgataaaaagcctaaatggttggaactacttcacaataaaatctggaagaattcaaacgcaattttagcatatgatgttatagatcatcatgatctgtttcgttttgaactattgcaactatcagcaatttttatcaaagcggatcctgatatgatagccgaaataaagaaagacataataaagttttgctggaactttattaaatttgaagatactttaatcaaacagtccgcctatttggtaacatcatactttatatctaaattcgactttcctatcaaggttgtcacccaagtttttgttgcattactgcgctcttcgcatgtcgaagctaggtacctagtcaaacaatcattggatattcttactcctgttctccatgaacgtatgaatgctgctgggactccagatacatggattaactgggtgaaaagggtgatggtagaaaattcttctagtcagaataatatcttataccagtttttgataaatcaccctgatttgttttttaattcaagggatttgttcatatcgaatattattcaccatatgaacaagataacttttatgactaatgcgaatcctgatagtcataccttagctattgatttagcttcgttgatactttattgggaaaacaagtctttggatatcagcaatagaaataatactaagactgatgctgagggtgatgttgtaatgtctgatctccaaaccgataccaatccagtcgaatctgacacaacagcaataattgtagatacaaacaataactcacctatttctttacatctacgcgaggcttgtacggctttcttaataaggtatgtgtgtgcaagcaaccaccgtgccatagaaacagaactgggattgagagctattaacattctgtcagacttaatttcagacaagcactggacaaatgtcaatgtcaaattagtttacttcgaaaaatttttgatattccaagaccttgattctgagaacattctttattattgtatgaatgcactagatgtcctgtacgtattctttaaaaacaagacaccagaatggataatggaaaaccttctaactatccaaaatctactagaaaaatgtatcaaatccgatcatcatgatgtacaggaagcattgcaaaaagttttgcgtgtgatcatgaaggcaataaaagcacaaggtacttcgataatagcagaagaggaaacccctgggaaagtgttctctcagatgctaatctctgtcattactcaagaccttcaagaaacctcatctgttacagctggtgtaacacttgcgtgggtgcttttcatgaacttcccagacagtgttatatcgttacttacccctttaatgaaaacattcagcaaactgtgcaaagatcacctaagcatatctcaaccaaaggatgcaatggccttggaagaggcaagaattacgaccaaacttttggaaaaagttttgtacatattgtctctaaaagtttcattattgggtgattcacgtcggccgtttctttccacagtggcgcttttgatcgatcactctatggatcaaaatttcttgagaaaaatcgtcaacatgtctagaagttggatattcaacaccgaaatatttccaactgttaaagagaaggctgctattttaaccaaaatgctggcgtttgagataagaggagaaccttctttatcaaaattattctacgaaattgttttgaagctattcgatcaagaacattttaataatacagagattactgtaagaatggaacaacctttcttagtaggaacgcgtgtcgaagatatcggcattagaaaaaggttcatgacaattctagataacagtttagaaagagatatcaaagagagattatattatgttatacgtgaccaaaactgggaattcatcgccgactatccatggttaaatcaagctttgcaactgttatatggttctttcaacaaggacaaagaactgtttttaagggacatctactacttgtctcctccatctatcttaaaagagtacctccctgaaaatattgaaatagtaaccgaagtaaatgaccaaaaattgttagattttgtcaaaaatcacatatattctatgcaagacttgtgtcaggtaaactcttcagattttatcgattccttaattgaaatcttttaccaagatccaaaagcaatccacaaggcgtgggttagcttgtttcctcaagtatataaaagtattcccaaaaatgaaaagtatgggtttgttcgttccattattacattgctttccaaaccttatcacaccagacaaatctcctctaggaacaatgttatcaacatgcttttagactccataagtaagattgaatcgttagagttgccccctcatttggtgaaatacctggcgatatcttataatgcctggtaccaatccatcaatattttagaatccattcaaaccaacaccagtatcgacaatacaaaaattatcgaggccaatgaagacgcactattagaattgtatgtcaatttacaagaagaagacatgttttatggcctatggagacgtagagctaagtataccgagacaaatatcggactatcttatgaacaaattgggctgtgggacaaagctcagcaactatatgaggttgcgcaggtaaaagcccgtagtggagcattaccttactcacaatctgagtatgcgttatgggaagataactggatccaatgtgctgagaaattacaacattgggacgtattaactgaattggccaagcacgaaggctttacagacttgctactggaatgcggttggcgtgttgctgattggaatagtgatcgtgatgcccttgagcaatctgtgaagagtgttatggatgttccaaccccacgtaggcaaatgtttaaaacctttttggctcttcaaaattttgcagaaactcgaaaaggtgaccaggaagttaggaaactatgtgatgagggcatacagttgagtttgatcaagtgggtatctttaccagttagatacaccccagctcataaatggttgttacacggattccaacaatatatggagttcttagaggcaacacaaatatatgccaatttgcatacaacaacagtacagaacctggattccaaagctcaagaaatcaagcgtatcttacaagcttggagagatcgccttccaaacacatgggatgatgttaacatgtggaatgacctagttacatggagacaacatgcatttcaggtcatcaacaatgcatatcttccattgataccagcacttcaacaatcgaatagcaatagtaacatcaatactcacgcttatagaggatatcatgaaattgcttgggtcattaacagatttgcacatgttgcaaggaaacacaatatgccagatgtgtgtatcagtcaattggcacgtatctacaccttgccaaatatcgaaatccaagaagctttcttaaaactgagagaacaagccaaatgccactatcaaaacatgaacgaattgacaactggtttggatgtcatcagtaacacgaatctagtttactttggtaccgtacaaaaagctgaatttttcacattaaaaggtatgtttttgtctaagctacgtgcatacgaggaagccaatcaagcttttgcgacagctgtccagattgacctgaacttagcaaaagcgtgggcacaatggggtttcttcaatgaccgtcgtttgtctgaggaaccaaataatattagttttgccagcaacgccatcagttgctacttacaagctgcgggtttatataagaattcaaagatcagggaactattgtgcagaattctgtggcttatcagtatggacgatgcttcaggtatgcttacaaacgcatttgattcatttagaggcgaaattcctgtttggtactggattacttttatcccacaactattgacttctttatcacataaggaagctaacatggtccgccatattttgattagaatcgctaaaagttatcctcaagcgcttcacttccaattgagaacaacaaaagaagattttgctgtcattcagagacaaacaatggcagttatgggggataaaccagatacgaacgaccgcgatggacgtcgccaaccttgggagtacctacaagaattgaacaacatcctaaaaacggcttatccactattggccttatctctagagtcacttgttgcccaaataaacgatcgctttaaatccaccactgacgaagatcttttcagattgataaacgtgcttttgattgacggaacattgaattacaatcgcttaccatttcctagaaataatccaaaacttcctgaaaatacggaaaagaatttggttaaattttccacgactttgttggcaccttacataaggccaaaattcaatgccgatttcattgatagcaagccagattatgagacttatatcaagaggttacgttattggcgtaggagactggaaaataaactggatagagcatcgaagaaagaaaacctagaagtactatgcccacatttgagtaatttccatcaccaaaaattcgaagacatagaaattcctggccagtatcttttgaataaggataataatgttcacttcattaagatcgcaagattcttacctactgttgatttcgttcgcggaactcattcctcgtatagacgtctaatgattcgtggacatgacggtagcgtgcactcatttgctgtccagtatccagccgttcgtcattcaagaagagaagaaagaatgttccaattatacagattattcaacaaatcactatccaagaatgtagaaaccagacgtcgtaatattcagttcaatttaccaatagctattcctctatctccacaagttcgcataatgaatgataatgtatcttttaccacccttcatgaaatacataatgaattttgtaagaaaaagggattcgatcccgacgatattcaggacttcatggctgaaaaattaaatgcagcacatgatgatgctttacctgccccagatatgactatattgaaggttgagattttcacttctattcaaacaatgtttgtaccatcgaatgttttaaaggaccacttcacttcgttgtttactcaatttgaagatttctggttattccgcaaacagtttgcttcacaatatagtgcgttcgtcttcatgtcctacatgatgatgatcaacaaccgtactcctcataaaatccatgttgacaaaaaatctggtaacgtatttaccttggagatgctgccttcaagattcccgtatgaaagagtgaaaccgttgctaaaaaaccacgacttgaatcttccaccagattctcctatattccacaacaatgaaccggtgccgtttagattaactcctaatattcaaactttgataggtgattccgctttagaaggtatatttgctgttgacttatttactatatcacgtgccctaattgaacctgataatgagttaaacacatatttggcgcttttcatccgtgatgaaatcatatcgtggtttagtaatctccatcgtccaataatcgagaatccacagttacgtgagatggttcaaaccaacgtagatctaattataagaaaggtagctcaattgggccatttgaactcgacacctacagtcacaacccaatttattctagattgtattggcagcgctgttagtccaagaaacttagccagaacagatgtaaacttcatgccatggttctag

SEQ ID NO: 4305 - DNA, 405 bp, Saccharomyces pastorianus
atgtcacttacagagcagattgagcaatttgccagtagatttcgcgatgatgatgctaccttacaatccaggtattctacactatctgagttgtatgatataatggaactgttgaattctcctgaggactaccatttttttttacaggctgtagtacctttacttttaaatcaactgaaggaagtacccatctcattcgatgcacactcaccagaacaaaaactaagaaactcgatgctcgatatttttaatagatgcctaatgaaccaaacttttcagccttacgcattggaggtactggagttcttactttcaattctaccaactgaaaatgaggaaaatggtgtactgtgtatgaaagttttgaccacgctttttaaatcattcaatcatactgcaagataa

SEQ ID NO: 4306 - DNA, 843 bp, Saccharomyces pastorianus
atggctctgacgctgccagcgagcgactttctcgaaacggcagagaagtttgtgggctcatgcgatgccgacacctatgtgttagttaaccagccgggactgaggaggctagattttttggaatttcagactgaatttgcctccctacgaagatatgtaaaacagagttcaacagcaattaagtttgaaaaggtggagttactgtctcaggatttttacgatgaccttgcagactacttgaatgagtactgtaatgcaggtcaggtgttgaagctacggggcaaccatacggaggatttccaaccctttattgacagtgagaggagggtcgtcatcatcgagtatccaatgttaccagaagacacgggtctacgtagggaagccataggccattatgacaagtatctgagaaccgtcctcgcacagatcccttcaccggaacaaaaaatcatatacacctcattgaatccaggaaccgctctggctcacgagtcaatcgttcccattgatattttcccagacatttttgacaccaaatctagagctggggaagtggaacagaataacagggtgttggatgttcctccactgtcattcaatgattacgctccacggttcttggagcccccttctaagtatatttcgatttttgacccggaattcatccaggacaatagagtcctacttcaactgatcttgacatctttaatcgggtttgtcctctttcaactctttgccccaaagaaaagggatgtcgtgggtaccaaggctaacacaagtaaaaaagagactacctcatcgtcaccaaagacgcaagaggccaaaaaagtggtctctgagtga

SEQ ID NO: 4307 - DNA, 141 bp, Saccharomyces pastorianus
atgctgaaagtattggggtacctgctgtttatggtatatgtcagcctatgtgcttcggaggagttgcagaaccagacaaatgttccagcaataatgttctcctacaaactgtatgtagagcaagaaatgtttcttcagtga

SEQ ID NO: 4308 - DNA, 321 bp, Saccharomyces pastorianus
atgcattacgaaacatatagaagattaagactagaaggtcacgaaaacacaggggagggcaatgaagacttcactcttccagctattgcaccagcaagaaaattatcacataatcctaaatacaaagaagaagaaaatgcattaaagaaatacttcactgaccaagttaaagctgaagaacaaagatttaggcaatgggagcaaaatattgttaatgagagaattagattgaacggggacttggaagagatccagggcaaagttaaaaaattggaagaacaagttaaaggcttacaattgaaaaaatcacatttgaaatga

SEQ ID NO: 4309 - DNA, 810 bp, Saccharomyces pastorianus
atgagtgccgctactgccaccgctactgctgttcctcccccagtagggatctctaatctcccaaaccaacgctacaagattgtcaacgaagaaggtggtacattcaccgtgatgttgtgtggtgagagtggactgggtaaaaccacctttatcaatacgctatttcagactgtcttgaaaagagctgatggacagcaacatcgtcaagaacccattagaaagactgtagggatcgatattacaagggctttgctagaagagaaacatttcgagttacgtgtaaacgtcatcgacactccaggtttcggggacaatgtcaataataacaaagcttggcaaccattggtggatttcattgatgatcaacatgattcctacatgcgtcaagaacaacaaccatatcgtgctaagagatttgacttaagagttcatgctgttctttatttcatcaggcccactgggcacggtttgaaaccaattgatattgagaccatgaaaagattatctacaagagccaatttagttccagtcattgctaagtccgatactttgactgctcaagaattacaacaattcaaatctagaatcagacaagtaatagaagcgcaggaaattcgtattttcacacctccattggacgctgaatctaaggaagacgcgaaaaatggtgcaggtccagattcagcagccatcgaacatgcaaggcaattgatagaagcaatgccatttgccatagtagggtctgaaaaaaattcgataatgggcaaggcactcaagtggttgctagaaaatacccatggggtcttgtag

SEQ ID NO: 4310 - DNA, 1614 bp, Saccharomyces pastorianus
atgatttccaaggaccatgatcaattatcttcggattttgaaaaccatttagcaaatcaattgagtgggttgttcactaagcttgatatgacgttgagcaagattgctggttttaacgatgatatggtaaacaaaaaggataacatttaccatgagttggaaaaggccaagaaagactatgacgaatcttgttccaccatggaaatggcaagaaacaaatgcactaaagcttctaatgatagaaataaaaaaaagttaaatgaaaaagaggtggaaatgaataagtgtaaaaacgaatacttgattaagatcaatcaggcaaataggaccaaggataagtattattttcaagatgttcctgaagtgctagatcttctacaagacgtgaatgaagcaaaaactcttttcttgaatgatctgtggctgaaagcggcttctgttgaaaaggatttaggtacaagagttagcaaaaggttacagactgctgattctgtagtaaagcagaataaaccctctctgaatacggcaatttttattaagcataatttgaaaagttggaaagagccacaagactttacgtataaaccatcaccagtatggcacgacgatgagaaatttgcagtcccatccacattggaggttgaagacttgagagttaagttggcaaaagcggagaatgactacaatctattgcaagataagactcaaaacgagttgtctagactttccgccttaaacaagataaaacatgagatgaaaactaacgaagattccgtcaatgcggttaagttttacgacacgttaaagaactacttaactgttatttctccctttacttcgcacgagactttgaaactgcaagccgaggtgcagattgaaagtattcagaacaatgttcctgaggaatacgatctatccacggataatattaatttatcgaaaatgaagaagaagtccggaatattcagtaagcttaagcataacatcctgaacgttgattcgaggccttcaagcggcggaaatgctacgagtggcaacggaggacctctacatataaccaaccttttcaatacatcgagaagaacaagactaggtgctgcatccagcaaagctggtgaagatggagagaacacttccatttacactagcgaaaccagcaccacgacaaaaaccacacacacttccaacgaagatggtgggaataaagtattgtatgcatatacaaagcaagatgatgatgaaattagtatttcgccaggtgacaaaatttcattggtgacacgggattcaggttccggatggactaagataaataacgacagtactggtgaaacggggcttgtacccactacatatgttcgcatttctaatgcggatgggggaggcacagctaatggcaggggccctgctccagaagtgccaccaccaagaagaactgcgctgcccgtcaggacattagaagccgcgtatgcgtatgaggcaaaaggtgatgatgagatgtcgattgatgtgggggacgttataaccgtcattagaggcgatgatggccgcgggtggacgtatggtgagtgtgatggtctgaaagggttatttccaacaagttattgtaaataa

SEQ ID NO: 4311 - DNA, 261 bp, Saccharomyces pastorianus
atgagcgcagatttatctattggtaatgaaattaaagatgcgtttaaggaaacccataaatgggttcaaaataatttgaaatggttaaaggatattgagcagttctatcgagaaagggctaaattagaaaaagagtatagtgaaaaattatctcgcttatcggctgactacttcaataagaaatcttcaaccacggtccctatctcggtgggtgatacacctgccaccacaccggttccgttgaagctgccggagtggtag

SEQ ID NO: 4312 - DNA, 387 bp, Saccharomyces pastorianus
atgggaaccaacatgagcaacaccaccaccaccactacgaacgacagcagcgacagcagcgacaactcggcacctccaacacagccgacgtccaggggacccgtcacggatagaaccaaggtcaactacgttcctcagagcaacgacccgtcgtcgttccagtactatccagacgatccggagaacccggtcaataagtacaagttcgcgctcaagggcgatagtcagtattacgatccctgcgaggagtcttccaagctcagctttcagtgcctcgagcgcaacggctacgaccggactaagtgccaggactacttcgatgcgtaccgcgagtgcaagaagcaatggctcacagccaggcggaacaacaggcagcagtgggagtga

SEQ ID NO: 4313 - DNA, 417 bp, Saccharomyces pastorianus
atgtctatgcgacaggtccaacgttgcgtttcggaggtgcttcgactggatccacaagaaaaaccagattggtctaggggttatttaaagaaattgactaatgcgacctcgatcctatacaatacttcactgaataaagtgatgctgaaacaagatgaagaagtagcgagatgccacatatgtgcgtacatagcatcacagaaaatgaacgagaaacacatgcctgacctgggctattacatggacaatattcccttagagccaaaaaaggccaaacatttaatgagtcttttcaggcaaagcttgtctaattcgtcacccatgaagcagtttgcatggacaccgagtcccaaaaagaataagcgaagtcctgtgaagaatggtgacaggttacttcctctgatcctaaagaattga

SEQ ID NO: 4314 - DNA, 381 bp, Saccharomyces pastorianus
atgtcgggcgtgcaggagaacaagaggagaaacgccaaacaagtcaaaaaaatcagaaaaccccaatccgaattgaaaacagcaaaggcattaaggaaaagaggtagagttccaaattcattgttagcgaagaaatattgcaagatgaccacagaagaaataatacgattatgcaatgattttgaactcccaagagaagtagcgtatcaaattgtggatgagtacaatataaacgcgtcaagattggtttgtccatggcaattggtatgcgggctagtattaaattgcacatttattgtattcaatgaaagaagacgcaaagacccgcgtattgaccatttcatcattagcaagatgtgcggattgatgctgacgcactaa

SEQ ID NO: 4315 - DNA, 1041 bp, Saccharomyces pastorianus
atggcacctaatgtcgtcacgttatctgggttcgccttcattgttattaacgtgctgactgtattctattacgatccaaatctaaacgctgaatcgcctcgctggacatgtttttcgtatgccctaggagttttcctgtatcagacatttgacggttgtgatggtgtccacgctcgtcgtataaatcagtcaggaccattgggagaattgtttgatcatagtattgatgctataaactctactttgtcaatttttatctttgcctcggtaaccgggatggggttttcctataggctgatgttgtcccagtttgcgatgctgacaaatttctacctaagcacctgggaagaataccacacacacacattattcttgagtgagttttctgggccagtggagggcattctgatcgtttgcgttgtgtttatattgaccggcatatacggaaaacaaaccatctggcatacttacttatttacaatcacgattggcgataaggtcattgatgtggacactttggatgttgtattctccttatctgtcttcggtttggtgctaaatgcattatccgcaaaaagaaacgtggataaatattacagaaatagtacctcttcgactaacaatattactcaaatcgagcaaggcagtgctataaaaggtcttttgccattttttgcttattttgcaagcatatctttactcgtgtggattcagccacgttttatcacactcgcttttatcctatccatcggcttcacaggggcattcaccgtcggaagaattattgtctgtcatttgaccaagcaggatttccctatgttcaatgcgccaatgctaattcccttgtgccagttagttctgtacaagatatgccaggttgcttggggaattgaactcgacagaattgtctatgccttatcttggcttgggtttggccttgcattgggcgtccatatcatgtttatgaatgaaatcattcatgaatttactaaatacctggatgtctacgctttgtccatcaaacactccaagctaacataa

SEQ ID NO: 4316 - DNA, 792 bp, Saccharomyces pastorianus
atgaaatacacattcgtttccgctttgtttgccgccaccaatttttttgttgctcaggctcaaataaataactcctccgattcattttacctacagttttctaacagcacactttccgacctaaaggggaaactcaatgtctcagatagaatattcgccggcagcgggcctttgccgttagaaattcaaccagatggatcacttgttgctgatttaactaacatagacaaccaaccaacaaccttctctataacttccgaaaaaggtttggtcagcaacgataacagcactttgaattcagccgcatatcaaagcaacgcaacctctttaaccggattcgatgttgctaacggtgttttgaattttaacgggttagaaaagtggactattaatgtgaacggaacattgactaccatcaatttacctgcaactgaaagttctggtgtacctgtttcattgaacgctgtcactattggtgaacctgctttaccgcaacatatcccacaacaaaaaaacatagtcagatcagctgtctatgatgttggtggatggaacggttccttgtatcgctccaatagcactgcagtttctgaccatcatcctgtcagaaagcaagaagctgccgtttctcagattactgatggtcaagtccaagctacctccatttcaactgcaactgctaccattccaagcaatagtacttacatttcttcctacgaaggtgccggtattaagatggaatccaagaacatgggttttgttgttggattggcagctttattatttttatga

SEQ ID NO: 4317 - DNA, 651 bp, Saccharomyces pastorianus
atgtcttcagaaccatataaaaacgtttacttgctacctcaaaccaaccagctgttaggtttgtacactatcatcagagataagaaaacagctagacccgatttcattttctactccgatagaatcattagattattggttgaagaaggtttgaaccatctcccagtgcaaaagcaaattgtagaaaccgacaccagcgaaaacttcgatggtgtttcattcatgggtaagatctgtggtgtttccattgttagagctggtgaatctatggaacagggtttgagggactgttgtagatctgtacgtattggtaagattttgattcaaagagatgaagaaactgctttgccaaagctgttctatgaaaaattaccagaagatatctctcaaagatacgtcttcttattagacccaatgttggctactggtggtagtgcaatcatggctactgaagtcttgatcaagagaggcgtcaagccagaaagaatctactttttaaacttaatctgtagtaaagaaggtattgacaaatatcacgctgctttcccagatgtcaagatcgttactggtgctctagacagaggtttagatgagcacaagtatttggttccaggtttaggtgactttggtgacagatactactgtgtttga

SEQ ID NO: 4318 - DNA, 369 bp, Saccharomyces pastorianus
atgcattcgtatgcgcaggagattctgtacccctacgcatattcatgcgacgccttgcctagagatttggaaaacctgttggaattatcatatgggctatccaaggcaatacgttcaaaatcaggtagaatttacgatgtaatttccgcatgtaaggaccgtggttccgacatattccccgggcttggtgcgggctccgccttggactacatgtaccatcatagagctcattgggcattccaactgaagttaagagacacaggaaaccatgggttcttactgcctccagaaaacatcaagcccgtgggtaaagaagcatatgcggccttgaagtacttctgtgattttttactagatccagaaatataa

SEQ ID NO: 4319 - DNA, 312 bp, Saccharomyces pastorianus
atgtataagaactcgttgggatcattcattaggtgcgctaatactcttttaggtataatctttggtattaggaaaattgaatggtcttcatccttgcaggcagctggtgcatggagcttgttgaatatcgtcttgtggttgttttttgatggcaccctaactgtcttgatttcaggtctagtcgtcggtgcgattagtgcatttagttgcactcaatatgtctcgcaattgtcgcagaccttatattttatagatttctatttttttggttttttgatgtttagcaagttgggcagatatttattcgattaa

SEQ ID NO: 4320 - DNA, 279 bp, Saccharomyces pastorianus
atgggaaaaaaaaagagcaagagccaagtacgttctaatgacactagtggcgctgccgcttctttcaaggaggcaacatctttgccacctttggggaataagctaggtagtgcaagtttcacagctataaacacactaacaaaacctgcatggttctcattttacgacgaagatatcactaagaatgaaggcgacgttcatgataagacattgctgtccaatgcttctcagttggaaatggttgcaccccctgacgaagtgaaacacgagagatcgctg

SEQ ID NO: 4321 - DNA, 762 bp, Saccharomyces pastorianus
atgaccggatcccagggaatagcagctcacaagaaccctcatattcggaatgtagccgttttgcaacgtaagcccaatcaggaatatgcactaaaaataatgaaggaagttgcacataaagtgtcctacttaatgaaggaaaacaactttaaagtggttagtcttgtggaattttaccctcgcgaccaacggcttttgggtatgaacgttaatcgtggactaaagataatgttacgactacgatgtcccacggacgaggttcagtttctaccgatggaatctataatgggcaccatgttgcacgaattaactcacaacttatttgggccccatgacaaaaagttttatgataagttagacgagctgattgggaggcaatgggttattgaacagaggggcctacatgacgcgttcttgggtaacggccaacgtcttggcgggagaccgaatgtagcttcgagtaagtatcccatgacgggggtgagtactaatacgggggtagtgagacgaaggggcaaaggtgtcaagttggggactctgagtctgggaggacagccgtctcccaacaggagcaaaactccaagagagatggcagccttggcagccgaaagaaggtataaggatgatcgttggtgtggagagaaaaagagtagtaaagatcagataaatgattataacgacgacttattggaaattgtggtacttgacgatgagaaggagccctcacagaccaagcgatcagaggttattgaccttacgtaa

SEQ ID NO: 4322 - DNA, 351 bp, Saccharomyces pastorianus
atggcaacagtagtcccacagcaagaacaacaacagcagcagcagcagcagcagcagcacagaggtaggaggctctccgaagagatcgcctcccttctcaggctgaaagagtccaggagactcaacccggccccttactacactccacgcaaggcctcgcaatcgcagtcgctcagcgagtccaccttcaagcagtacaacgagtacgtcaacgagaaggacccgaacatgtcgcagcacaaccgcgcgatggccgtcacactgaacaagcttgcgcaccagttctgggagaacgactgcgcaatcgatggagacatcttcgacgactcttctgacgaagaacaatactga

SEQ ID NO: 4323 - DNA, 432 bp, Saccharomyces pastorianus
atggaatctattgtggccaccgtttattggccgttaagattgtttttcgtcagcttaattcttcatggcgttgattctaatgcaaagacgcctttacccgtgacagttgatatggcaatccacctataccccatcttatatttactggccgatcactacttatccagatccggctcaaagtttaagctatcggattatactgcgtggtttattgtaaccagcctggcattttcatattttcagtatctagctttcctaatagatccaaagaaaggccaagcctatccgtatccattcctagacgtgaaagaaccatataaatctgttatttttatcgcggtttccaccatcacgtggggttattacgtgttttatcaaaaatatcctcccaaagataccaagaggttaatgggcaaggtttataagaattga

SEQ ID NO: 4324 - DNA, 321 bp, Saccharomyces pastorianus
atggcgtcatcttcttcagctataccgccctccacatccgtcgtcgaatcgactcaaacagagtctttctcaacgagaactacttccacattgacaccatcctccaaggtaagcgcgatttctagaacaacgacatctgcgccagcgcaatcttcttctgttcagtcgatatctgtctcgagctcagaaggcacttgttatgtatattatgatgacgatgattactatagtactgtctacctgaccaacccaactcaatctgttgatgcggccactacaataacgagtacgaacacaatatatgccactgttaccatttag

SEQ ID NO: 4325 - DNA, 285 bp, Saccharomyces pastorianus
aaacgacggcagtgcaagcttgcatgcctgcaggtcccagctggctctttcagaagcgtaagcgccacaaattcaagaaataacagtctaaccacacaaaataactcgtatcagtatcttcagcagcagcagcagcagcagcattacaactctcgtgttagtgggatattagaagaaaccgatgttgtacaacccccaagtgttggcggtattttaccacatagtggttcacaggacgatttaagaagacaattaggttcttctcataattacgcaatcaattga

SEQ ID NO: 4326 - DNA, 1092 bp, Saccharomyces pastorianus
atgcaccaatatccatcagaactgaatcatccgtactccagtgactctcaagacttcgtggaaaaagcttttcaacagcctccttcggacccatttgctaatagcatggatggaagcagatataatatgaaaagtgctactccacctggaaataccggacgttggtacgtagatccgttccaacttccacaggaaacgagtgattctaacagtctgagggattttgccatgagagtacaaagcgatggatttggagggtataaagtggctgcaaattccagaaatgctagttcattgtctttacatcctgataacttttcgaatcacacggcaataagagcgtgttcgaggtttcaagaaagcgaaagctcggaatcctactccagtcccatcgataatagtcacatttcaaatggctttgctactgaagatgcatacaggcaaccagcatttcttgataaagagagtagtttagctacagtaagcaaagagactaaagtttcgaacaagttagatgaatcgcccaataacgacgcattcgagtttgaatttgataacgaactagggaaccctcaaagaaagagcatacaggttggtatgaatgataactacgaactccaggatatcaaagatcctgaacatgtggatgtcagtagctctaacaaaggcgaaaacgatgactattatgtgtcacgcttatcagctaatgaggaagaagatatacaaagaatgaaaagtatttatcaagtttatttggatagaaccaaaacagtaaaagacgaacaagagagacagcaacaacagagtgtgaatgtcttgacaagaggtgaaccttgcatggacagtgcgggtcaaaatccactaccttctatccagattggcaacgaagatcctactgatgtgccagaggctgaccagtaccaagaacaatacccagtacaaaatgcacttgctgtaaatgatgtaaattcaaatgcgcatggcctagaaacagctcaacaccaagaccaatacttgacacatgataccctcgccgtaaatggtacagaaggagcagctactaatagaatagcttcctccatttattctatg

SEQ ID NO: 4327 - DNA, 1566 bp, Saccharomyces pastorianus
atgagccattcgtcgttggctgcttcttcagcaacaagccaaggtattagtaaaaaggaattacttcaacaaatcgctggttcgttgttgagtacgtctattgagcggttaaagaccacccattctcccgatgggtcatctatgctggagtactcggaagaagtcccgtacgatgaacaagagtgctatgactgcgatggtcccttcaagtgccctgctcaccttggggaggcggctgcgtattatgatgacgacatcgacgcagagcctgctctagaacccataagttctaatactgagagagatccatttatcgatgtctttttagacaagctaatatcgaggctagtacctgaaaaactgcctgaaagagaacattttagtagcagcgctaccattgagcacgatttggacacaggaagggttcctgtgttttctgcaactgtattaggcgggaacttcaagaaattgtctaagaaaatgggctcgatttttgaactacaggattccatagttcgcctgttgacttggagaaacccgaccggaacggtaacatcactgataatattcactttaatttgctttaacccaatgtatttggtgattttgccaattttccgtttcatctatagtattatagttcccggctacgtacttagacatcccttacaaagaagcatatatccgcttaaacgtaaccatggttcatcgttattgtatgacttttgctatgaaggcaagaacgaatacacttatggtcaacaatttttttccaaatcctttatggacaccttggaatcgagaaatcaagaaaaggatgagatttccgaattggacaaaagacctgaaaacacacgggaatttaaacatggaatgaaagtattgattaatcttcgcgatatgcaagacatgacttctggtacccttcacgtcattgacacaataaataattttctccgaaaggcttctagtttccagaatgaagtactttctactaagaggtttttcacaggcttcctttcaatcgccgtcctaaaaatcctgtcacccttcgtaaattggagttacatgtttagcatatctgcctggtgtctattgatatatatgcatccaagagctcaccctaaaataatcaaattcttccaaagtggaaaggtggaaagagaatataagaacttgaaaaggaaggaaaatcaaacatacaacatgatatttgacgaaaaaccagaaatcagatacattgaaatttttgaaatatataaaaagggcttactgccaaacgattggaagttttttagattctccagtagcatttttgatcctctggattcctatagaagagcacaacaagttccaccaggaacagattcattgcaggacgtcatgccacctctaggatggatattcgatccaaattttgagtggagaatcgacgctgacgtggaaacctgggttacggaacgaggattaaatttaccaactaccaaagaatttttactcgatccaatgtttaagaggaggcggctgattcatcgtgtcattaagagctcaaaaccagtaacatga

SEQ ID NO: 4328 - DNA, 753 bp, Saccharomyces pastorianus
atggttgcagtgcgtgtgttctcagaaaggactgctttaacccatcaattgggggagttcattgtcaggaagcaagacgaagcgctgctaaagaatccatactttaaagtctccattagcggtggctctttgatcaatgctctgtacgactgcctggtggccgacaaaacgctagctcctaaggtagaatggaccaaatggcaggtgtacttctccgatgagagaatcgtgcccttaacgcacaatgatagtaactatggtacatttaagaaagacgtgctagacaaattgccctcggctgttcaagtcagtgtccaccatatggacgattcattgcccttggatggtgacgctcaatctaacaacaaaatcgctgcagagtacgaacagatcttgcccgagtccctcgacttggttctattgggctgtggtcccgatggacacacctgctctttgttcccgggtgaaaaacaccagtatttgctaagggaaactaccaagagagttgcttggtgtcacgattcccctaagcctccgagtgacagaatcactttcaccttgcccgtgctcaaggaggccggggccttatgttttgtggcggaaggcagctccaagcaagatataatgcacgacatttttgatttgaaaaacgaacaattaccgacagtattaattaataaactgtacggcggaaaaacgtcttggtttgtcaatgacgaagcttttgcaaaagtccaaacgcaaactttttag

SEQ ID NO: 4329 - DNA, 1563 bp, Saccharomyces pastorianus
atgacaatagtccggtctagcttccttagaaggcagccatggggtagaggacgttttccaagactatactcgacaaaggtccctgataatgcaccgagagcggctgacaacgaacaatggttggaaaccctgagacatacaacgccggcaaaacaggggaggcagtggcctggtcgtggaaccagccaaactgatctgattgaagttccattgggcgatgtaacatctatcaactatctacaacggtataacaaacacaagcatagccaaggcaatttcgttgatgttcgaatagttaaatgtagaagcggtgctggtggaagtggagctgtctcattttttagggatgcaggaaggtcgattggccctccagacggtggagatggtggggctggaggtagtatttatgttcaagctgtagctggattgggatctttggcgaagatgaagacgacatatattggtgaagatggagaggcgggtgctgccaggcagttagatggtgtaaacggcaaagatattttaatacaagttcctgtaggtaccgttgtaaagtggtgcttaccacctcaaaaagttcgtgaactcgtagaaaaagaactatggaaagatcaaggtactacattaagatctatattggcctccaaaaccattcccttgaacagtccttgcggctcaaatgagaaaacgatacagttataccgacatcaaatggcggaaagctggctttttaaggacaagtccaaggaatatcacgaaactaaggattggttcaagattttgcataagaaaatggaagcgtatgaccattctttgaaacaatctgaaatgttctacgaccggtttcccttaaatggacttgatctggaacagcctatgtccaaaccggtgtgtttgctaaaaggtggtaaaggtgggctcggtaatatgcactttttaacaaacgtgatcaggaacccaagattttccaaacctggtaggaatggtttggaacaatattttttatttgaattaaagagcattgcagaccttgggttgattggcttgcctaatgcaggcaagtctacgatattaaataaaatttctaatgcgaaaccaaaaataggacattggcagttcaccacactgaaccccactattgggacagtttcgttgggctttgggcaagatgtcttcactgtggctgatattcctggaataatcgagggcgcatcactagataaaggaatgggtcttgagtttttgaggcatatagaacgttccaagggctgggtctttgttctaaacctagctaacgaaaatccgctgaacgaattgcgtttgctaatagatgaagtcggtggtctagagaaggtcaagacgaaaaacgtattgattgtgtgcaacaaagccgatatcgatttcgataactcaaaatcattggccaagtacctacaagtggaacaattttctaagggtcaagagtgggattgccttccgataagcgccctcaaagaagaaaacatagaagttttaaagcaaaagttgctgcaatgtgcgcgcccgtctcatgatgagaagtag

SEQ ID NO: 4330 - DNA, 1314 bp, Saccharomyces pastorianus
atgtccgaaattgctaaaagcaccgatttcaagtctttaggcctatcgaaatggcttaccgaatcgttaaaggctatgaagattactcagccaaccgccattcaaaaggcttgtattcctaaaattctggaaggaagagattgtattggtggtgccaagaccggttctggtaaaactatcgcgtttgccggacctatgttaaccaaatggtccgaagacccatgtgggatgttcggggtggttttgacgcccaccagagagttggccatgcaaatagccgaacaatttactgcgcttggtagtaacatgaacatcagagtatctgtggtggtcggcggtgaaagcattgttcaacaggctttggatttacaaagaaagccacacttcatcatcgctacgcctggtcgtctggcacaccatataatgagcagcggggaagacaccgttgggggactcatgagagccaagtacttggtcttggatgaagccgatattctgttgaccagcacttttgctaatcatttggccacgtgtataggtgccctacctcccaaggataagagacaaactttactattcactgctaccataacagaccaagtaaggtcactgcaagatgctccagcacaagggaataaacctccattattcgcttaccaagtagaaagcgtggataacgttgccatcccgtcaacattgaaaacagagtatatcttggttccagaacatgtgaaagaggcgtatttgtatcagttgttaacgtgtgaagaatacgtaaacaaaaccgccatagtatttgtaaatagaacgatgagtgcggaaatcctaaggagaactttgaaacagttggaagtcagagtggcatcgttgcactctcaaatgccccagcaggaaagaacgaactcgttacacagatttcgcgctaatgcggccagagtcctaatcgctacagatgtcgcatccagaggtttggatatcccaaccgtcgagcttgtagtcaattacgatattccttcagacccggatgtattcattcatagatccggtcgtactgcgcgtgctggtagagacggtgacgccatatcctttgtcacccaaagagacgtttccagaatagaggccatcgaagaccgtatcaacaagaagatgacagaggcaaacaaggtccatgacaccgccgttataagaaaagcattgaccaaggtaacaaaggcgaagagggagtcgctgatggcaatgcaaaaggagaatttcggtgacagaaggagactacaaaagcagaagcagatggacagcaaaagtatgcgttcctga

SEQ ID NO: 4331 - DNA, 462 bp, Saccharomyces pastorianus
atggaaggaagcactgatcacgagcatggtggcatgcacatgggagacggagatgatacgtgttctatgaacatgctattttcatggtcctacaaaaacacctgtattgtattcaaatggtggcatatcaagacattgcctgggctaattttgagttgtctagcaatttttgggttggcgtacctttacgagtatctgaaatactgcatccataagagacagcaatcacaaagggttttgttgcctaatagatcccaggctaagataaaccaagccgacaaaatttccaatagtattctatacggtctacaagtaggattctcattcatgctgatgcttgtattcatgacttataacggctggttgatgctagctgttgtatgtggggcaatatgggggaactatagctggagcgcctcttataatcctgacattgatgacagttcccttgcttgccactga

SEQ ID NO: 4332 - DNA, 1299 bp, Saccharomyces pastorianus
atgacagtgaatggcaaacaaagattggctattataggtggcgggccgggcgggctagccgctgcaagagtcttctcacaaagcctcagtaattttgaaatcgaaatcttcgtaaaggatcacgatatcggcggtgtttggcattacccagaacaagagagagatacaagggttatgtacgatcatttggagaccaacatttccaaagagctgatgcagtttagtgggtttcccttcgaagctagtgtacctctctatccttcgaggatacacatctggaaatatttgaagaagtactataagactttcattgccagccaggcttccattaccgtgcaccttagtaccgaggttacttatctggaaaagaaaggctctaagtgggaaatatcctccaaaaatgagctaggaacgaccacatcggatttcgatttcgttatcgttgcctcgggtcattacagcgtcccgaggttcccgtctaacattaccggtatagaccaatggttcgacaacaagagcgccggccattctaaagatttcaaaaactgcgagtttgcccgcgataaaatagtcattgttgtgggtaacgggagttctggccaggatattgccaaccaattaaccactgtcgcgaagaaagtctacaacagtataaggaaacctgcaaacaatcagccgcagtctaaactaatcgagaccgtctcgacaataaatgacgctgattggaagagtcattcagtgactctctctgatgggcaagtaatcagaaatgttgactacgtagtcttcgccacaggctactattataatttccccttcatagacccctctatcagatcggatgtgttgggagagggcgtcactgacgatgcatgctcgtccgtcaacctgcgtggcttatgggaacacatggtctacgtgaaggaccttacattagcgtttgccctgacccctcagttggtcattcccttccccttggcagaactccaagcggccatcaccgtcgaagtcttttgcaagaccttagccatccccgcagattttgactccaccgtctgcggggcccataacttccccaagggcaaagatctagaacactatgcagagctacagcgacttctggactgtatcccacatagagctggtcactttgacccagtcaagtgggacggaagactcaccgacctaagaaacgcaagctacacagacaaggaagagagaaatgtgcttctaacagaacacgcgcaaatcctaaacaaacaaaatctgccgtactttctcccagcgccacacatttag

SEQ ID NO: 4333 - DNA, 855 bp, Saccharomyces pastorianus
atgtttagcgcagtgggtaactggatccgaggatcccataaggataaggacttcgtgacgaagtatacagcagatctctcgcaaataacctcacgaatccatcaactagatgctgcactgaaaaaaagccaaacgattttgggtcaatggcaatccaatctaaccttctacggagccgctttcacggtattggctttgagctacacttattgggagtaccatggctactggccgtacctcgtagtgactttgtttctatgcctaggttcactgatcctggtgaaatggatgctaaccaaactctatgcattatacaacaacaacagattgcgcaagttgagtaaactacgtgccgtccatcaaaagaagctggaaaagttgaaagaagagacccattacaacgccacgagctcgattattcaacgattttcatcgggagacgaccaaaatgacgatgccatggttctcctagatgacgagttgaacgctaaataccaagaactaaataacctgaaaacagaattggaaaaattcaagaagcaaagccatgtggagggcttgaaaaaggaggacagtgacgcctggtttgacaaaatcattggcctgatagcaggtggtaatgaattgagctcaacaaattcactatctcccttcaaaaaaatcgtatgccccgaatgccattggaaatctagctgctacagattagctgacagaccagttctctttgtatgccctcaatgcaaccacagagcagacgaggaaaaggaaagacacgctatcatcgaagccaagcaggccaagcaagatgcacagcctgcactccccgagaaggacaaagaaagtgatttgcattag

SEQ ID NO: 4334 - DNA, 528 bp, Saccharomyces pastorianus
atggcagtctcaaacacaatcgacaacgagtcattcttggtgatgaacttaccgatcttgctcgcgagatattcctgcgcaaacacggtattgaccaaatacagaaccaaagacacgaatgtggtcgtccagaagatgaaaatgaaaatgttgctgacgaggatccatgagatgaacgcgcttatatcgtctgaattgaacggccgggtggattttttcaagaaccatcgtatgttgatcttcaatttggtgaagatgttattggtctgcaccagcagcgaatccctctcggtgatatatttcaagttgcgtttgacctcaggaggaggcccccgtctatgttctggctcattagagtatgccctcgcagacggagctagcagtaccaatgacgagtttcttgttactgttcctggcgggatccccaggtttcttcgaagaactgcacttctagcccagtacacatatcttggcacggcaaacggccggcacctcctaagaagaggcctggcaaaaagcaacatgtaa

SEQ ID NO: 4335 - DNA, 942 bp, Saccharomyces pastorianus
atgctcagaacattccaacgatcattcatcaaatttcagacgccctcattggccatccgtaagcaatgcttcaaaagacaattcgctaatgcgcgctccagtaaatacctgggacgttctggttcatcggttcgttattggccttggctcacagcatcggcattgattgccacctctttgtgcctctacgatgagacgatacaaaatgacgaaaagaatgagggttctttaccccataatgaatcggtacaagtagattcaagcgtatcggattttcccctcacaattacagccctaaacttccccgtctctacaaattttaaactgctaggatacggccaaagacatgtcacatttctaaggttcaaggtttatgccttgggcctatatttagctgaaaatgatgaaaatctgattgcaaacactttcaatgaagcttacttgcataaatatttccttgacgtggacgattccaagactcccaagcagaacctggctagatttttgaagcaggatgattcaaaatcagtcatgatgattgatgatttactggattcgggaatgagaatgttggcaaagataacacctgtgagaaacacagatttcaagcatctcaaagagggtttggtcaaaactatttccaaacatcctgatgtggttaacaataaagaaactttggaaaacgggctggaagaactaaataaagccttttcacgaaacggatccgttcgtaaaaatgatgacttgatcatcgagttactagctaacggcgccttacagttttcgtaccaagataataaaaacaatgaatctgaaattatgggattggtgaacaaccaattagtcggtaaatttttattcagtcaatatttaagtggcgacaaatctccttctcctcaggctaagaaaaccgctattgataaattgattacacttatgtaa

SEQ ID NO: 4336 - DNA, 591 bp, Saccharomyces pastorianus
atgcaacgtcacgtcaaagtcgacggtaaggtcagaaccgacaccacctacccagctggtttcatggatgtcatcactctagatgccaccaacgaaaacttcagattggtctacgacgtcaagggtagatttgccgttcaccgtatcaccgaagaagaagcctcttacaaattgggtaaggtcaagaaggtccaattaggtaagaagggtgttccatacgtcgtcacccacgatggtagaactctaagatacccagacccaaacatcaaggtcaatgacaccgtcaagatcgatttggcctctggtaagatcaccgacttcatcaagttcgacgctggtaagctagtttacgttaccggtggtcgtaacttgggtcgtatcggtaccattgttcacaaggaaagacacgatggtggtttcgacttggttcacatcaaggactccttggacaacactttcgtcaccagattgaacaacgttttcgtcattggtgaacaaggtaagccttacatttctttgccaaagggtaagggtatcaagttgtctattgctgaagaacgtgacagaagaagagctcaacaaggtttataa

SEQ ID NO: 4337 - DNA, 99 bp, Saccharomyces pastorianus
atgaggaactacatgaagcggtacttgaatgtgggggagtccgtgtacgactactctgttgccacgtgtggctcctcgacctacttcgctaggaagtaa

SEQ ID NO: 4338 - DNA, 1962 bp, Saccharomyces pastorianus
atggttgctgcaatgttttcactgactagaagaagagctgctgctgctgttgctgccgccaccacggcgtccggggcagcgtactgggtggcgtcgcagggcgaagggcccctggtacacaatgacccgagttatatggtgcaattccccactgcggctccgccgcaggtgggcaggcgggacctgctggaccggctgggcaagacgcaccagttcgacgtgctgatcatcggtggcggggccaccgggaccgggtgtgccctcgatgcggccaccaggggcctcaacgtggcgctggtggagaagggcgactttgcgtcgggcacgtcgtccaagtccaccaagatgattcacggcggcgtgcggtacctggagaaggcgttctgggagttctccaaggcgcagctggacctggtgatcgaggcgctcaacgagcgcaaacacctcatcaacaccgcgccgcatctgtgcacggtgttgcccatccttattcccatctacaacacgtggcaggtgccgtacatctacgccgggtgcaagttctacgacttcttcgcgggcaagcagaacctgaagagctcgtatctgctgtccaaggccgcgaccgtggagaaggcgcccatgctgaccacggacaacctgaaggcgtcgctcgtgtaccacgatgggtcgttcaacgactcgcggttgaacgcgactttggccatcacggccatcgagaacggcgccacggtgcttaactacgtcgaggtccagaaactgatcaaggacccggcttcgggcaaggtcgtgggcgccgaggcgcgcgatgtcgagaccaacgagctcgtcaggatcaacgccaagtgtgtggtcaacgccacggggccctacagtgacgccatcctgcagatggaccgcaacccctcgggccagcccaactcgcccttgaacgacaattccaagatcaagtccgcgttcaaccaggtcgccgtgatggacccggagatggtcatcccctccatcggcgtccacatcgtcctgccctcgttttactgcccaaaggacatgggcctgcttgacgtcaggacttctgacggcagagtgatgtttttcttgccctggcagggcaaagtcctggcgggcaccaccgacatccccttgaaacaggtcccggaaaaccccatgcccactgaagcagacatccaggacatcttgaaagaactgcaacactacatcgagttccccgtcaaacgtgaagacgtccttagcgcctgggcgggtgtcagacccttggtcagagacccgcggacaatcccggccggcggcaaaaagggctctgccactcagggcgtggtcagatcccacttcctgttcacttccgacaacggcctgatcaccattgccggtggtaaatggaccacttatagacagatggccgaagaaaccgtcgacaaagtcgtcgaggtcggcgggttccacaacttgaaaccttgccacacaagggacatcaagctggccggagcagaggaatggacgcagaactacgtggcccttttggcccagaactaccacttgtcttccaaaatgtccaactacctggtcgaaaactacgggacccggtcctccatcatttgcgagtttttcaaagaatccatggaaaacaaactgcccctgtccctagccgacaaggaaaataacaccatctattccaacgaggaaaacaacttggtcaatttcgacactttcaggtatcccttcaccattggtgagttgaaatactcgatgcaatacgaatactgcagaacccctttggacttcctcttgagaagaacaaggttcgctttcttggacgccaaggaagctttgaactctgtccatgccaccgttaaagtcatgggcgatgagttcaactggtcggataagaaaagacaatgggaactcgaaaaaaccgttaactttatcaagacattcggtgtctaa

SEQ ID NO: 4339 - DNA, 1290 bp, Saccharomyces pastorianus
atgatgatgatggaaaaaaaaaaaacaaaagcaaacttaaagcccaaagaattagaaccgaaatgcaagacacggatataccaaacacacagtcgtaaccaagccatgtccctggatcacgtcgactggccgcatgccacgttctccacccccgcgaagcgcatctttgacacgcagaccacgcaggacttccagtcctcgctggccatccacagaatcaagtaccatttgcacaagtacaccaccctgatgtcgcattgtgcggaccctgacccgcacgccactgcctcgtcgatccccatggtcaccgggctgatggcggtgctggacaggtttgcgcagttgatcgacgacaccccgccgctgccggggcccagaaggtacggcaacctggcgtgtcgtgagtggcaccacaagctggatgagcacctggcccagtggatccgggacgtgctgcctgcagagtaccatgccgtggtgcccgaactgcagtactacttgggcaacagctttggctcgtcgacgagattggactacggcacgggccacgagctctcgttcgtggccaccgtcgcggctctggacctgctgggcctgttcccgcacttgaggggcactgacgtgtttctgctcttcaccaagtactactcgatcgtgaggaggctgatcctgacgtacacgctggagcccgctgggtcgcatggcgtgtgggggctcgacgaccacttccatctggtctacattctgggctcgtcgcaatggcagctgctcgatgcgcacgccccgctgcagccaagagaagtactggacaaggcgctggtccgggagtacaaagacacgaacttctactgccaggggataaacttcatcaaccaggtgaaaatggggcccttcgaagagcactcgcccattttgtacgacatcgccgtcaccgtgccccgctggtctaaggtgtgcaaagggcttctgaaaatgtattccgtcgaggtgctgcagaagttccccgtcgtgcagcatttctggttcggtacaggcttcttcccttggatcaacgtccagaatggtaccgatctgcccgtttttgaggaaaaggaggaagagagtatagaccaggccaacgccacatcggtcgcaccggaccacacgtccacacggttcccaacgtccacggcgatgccccctccgatggcaccgccatctgggaacagtgtgaactctctactaagccaccagaatccccactcgcacagaaaccaggcgtctttgtcaagagacagactacgcaggtag

SEQ ID NO: 4340 - DNA, 930 bp, Saccharomyces pastorianus
atgagggttttccatacggttgaggaggttgttcaatggagaacgcaggagctcaaggataccagatccaaagaatccattgggtttgtccccacaatgggttgcctgcactcgggccatgctagtttgatctcgaaatctgtgagtgaaaacacatacaccgtggtcagtatattcgtcaatccctcgcagtttgcccccacagaggatctagataactatcctcggactctaccggatgatatcaaaatgcttgaatcgttgaacgtagacgttttatttgcacccaacgctcatgtcatgtatccacaagggatccctctcaacgtggaaaagcagagagggccttttgtcagtgttcttgggctgagtgagaaactggagggtgagacgagacctaacttcttcagaggcgtggctactgtcgtgaccaaattgttcaacattgtaatggctgatgtggcctattttggccagaaggacatccagcaattcatcgttctgcagtgtatggtggacgagctgttcgtcaatacaaagttgcagatgatgcgcattgttagaaacagcagtggcctggctttaagtagcagaaacaaatatctctgcccaaagtctctaaagattgctgaaaacctataccgtggactaaaagctgcagaaattgcaatcaagggcttggcatccggggctcgtctctctagatcagaaattattgacatcgtcacccaaatttgggcaccatacgttgattcccacgattttaagatagactacatttcgttggcagattttaaaacactcgatgagctgtctcttgttgaaaacactagagagcaacagccacttgtgatcagttgtgccgtatacgtgactgaccgcgaaaatccgaataccatcgttagattgatagacaacattgttatctag

SEQ ID NO: 4341 - DNA, 2067 bp, Saccharomyces pastorianus
atgcaaagctcgacaagtacagaccagcatgtgctacatcacatggaccctcataggttcacttcgcaaatacctactgcttcatcgtcgcaattgaggagaagaaatagtacgaaccccggtctaacagacatgatcaacaagagtattgcaagaaacacgataggtggtaccggcattcctacgggaggaataaacaaaaagaaaaattcaagaagcacggttgcaggtggtacaaatagcacggcattggccttcaatgataaaccgatcaacagtaatagcagcaataggttatcaataaatcagatcggtaacatacagcagcacctaagtaatagagatccgaggccattaagggacaaaaatttccaaaacgccattcaagaagagatttttgattatttgaagaaaaataaatttgacatcgaaacaaaccaccccatatcaataaagtttttaaaacaacctacccaaaaaggttttatcattatctttaagtggttatattccagactcgacccaggttatggtttcactaggtcaattgaaaatgaaatctaccaaattttaaagaatttacgttatccgttcctagaatcaatcaataaatcgcaaatttctgccgtaggtggttcgaattggcataaattcctgggtatgttacattggttagtacgaacaaatatcaaactggatatgtgtttaaataaagtggatcgttcattgatcagtcaaaatacgcaagaaatgacaatcttaaaccaacctttaaagactttggatgaacaggaccaaagacaggaaaaatacgagctcatggtggaaaaacttttaatcgattattttacagaatcatacaaaagttttttaaaactagaagataattacgccccatcgatgcaagatttgaaatcgggttttgaaaaatttgttcatgtaatcaatgcggatatatctaatttacaaaatcaaaatgacactctttatgaaaagtatcaagaagttatgaaaataagtcaaaaagtcaaaactactagagaaaaatggaaggcgctaaaaagtgattctaacaaatatgagagttatgttaatgcaatgaagcaaaaaagtcaagaatggccaagtaaattagaaaagatgaaatctgaatgtagcgtgaaaaaagaagagattaaagctttagaaactaatattgatgaattgcacaaaattttgaaaagaaaggggatctctactgaacaatttgaattacagaatcacgaaagagaagagctaacaaaggaactggataaaataaactttcaatccgataaattaacgagttccatcaagtctagaaagctagaagctgagggtatttttaaaagcttgttggacaccttgaggcaatacgatctatcaatacaaaacttggtaaaatcgcgtaatcaattaggtcatcatgttgatgaatcgtgtttaaaaatcaacattccagataatctgctagacgcagaacttcacgatagcattacataccagcaattattacccaaaggatccggaatctgcgaatctattaaaaaatgcatattaaaattaaatgatgatatccatgaaaggatcaaagctattgagaaagataatacaacattagaaaaagatatcaaaaacttgaaatatgacataaatgagaaaacccaagtcaacgaaagactcgagttggagttatctgaagcaaactccaaatttgaactttccaaacaagaaaacgaacgactactagtagcacagagaatcgaaatcgaaaaaatggagaaaaaaataagtgactcaaatcttttaatgaaaaccaaaatatcagacgctgaagaattggtgacttcgacagagctaaaattggaagaattaaaagttgatctgaataggaaacgatacaagctgcatcaaaaagtgattcatgtaattgatgtaacaagtaaatttaaaatcagtattcaatcatcattagaaaactccgaaaatagcttgggaagcattattgaagagctaaaacatttggagtttgacaaggaacatcagtag

SEQ ID NO: 4342 - DNA, 216 bp, Saccharomyces pastorianus
atgttcaccagcactttagcagctgggttgtccaacggaatcgacttcaggatcgttgcaccatcattcgtcaccatgcaagtattgctcgatgcactctgcaacaacttgtccatccccttagggcccaacgtgcttttcactaaatcacccacggcaatggctcccacgaaagccgacaaacgagcattttccgctctttcttctgtcacttga

SEQ ID NO: 4343 - DNA, 342 bp, Saccharomyces pastorianus
atggtttctcacaagaccgctcgtggtaaggctgccttggaacgtttaaaggtcttcgaaggtattccacctccatatgacaagaaaaagagagttgttgtcccacaagcattgagagttttaagattgaaaccaggtagaaagtacactactctagctaaattatcctcttctgttggttggaaatacgaaaacattgttgctaaattggaagctaagagaaaggtttcatcagctgaatactacgctaagaagagagctttcactaagaaggtcacatctgctaacgctaccgttgctgaatctgatgttgctaaacaactagctgctttgggttactaa

SEQ ID NO: 4344 - DNA, 666 bp, Saccharomyces pastorianus
atggacaaggacgtactaagaataacgatgggcaataaagatgttaaggatagcgataacgctactactacgttgtttggtttgcctgaagacagtggttggtctgttcctatgccaacaatgactgcggctacaacaagacacaacgttcacgcagtgtttatgacatgtggcacaagcaaatcagatgaaatctctgctcatggatcggatgatatggatgcaattatagagtttcatgcggatggtgactacgaacttggtaggatggatacgattgtagaatttcatgcggatggtgattacgatcttggaagaatggatacgaatgattccatttctgtcacagaagaaaaagatgcttcgttaagtcatatgtgggcagaattggataatttggatagcttttttacaaaagatactaatgtaccaaatatttcctctaagatggacatgggaattcctcacggacgttcagactcaatcgaaacaactcgtactgatcaaacattttcctttgaatctgctccacagctgtacgataaaaaagtctctgttatattgaacaggagcttgtcaagaacgccgtctaatgtttcattcaagacacatttggctgattcgtttgcagtaaaaataaatagaagtggaaaacccagaatataa

SEQ ID NO: 4345 - DNA, 6264 bp, Saccharomyces pastorianus
atggcttcgaaattcacttttccacctcagagggatcatggtaccggtttcactttcccaccgacaaatgcagtagaaaagtccaacagtggtaaccagatatcgatagatattgatccttcgagccaagagcattcagtggaaataagtcaagtccctcaagatccacctcatttgcaccaattccttaccaatgcacccactattgatattccacctcctattgatatttcagagggaaccccattaagtgagcaactactttttcagcatcaacaggaagtaaaggaccaggtttccctagagccctttattgcgcagcaagacaaccataaggatatttcagtgagaataaccgaacaacaagagcagccgagcatgcaagagtcaacacccacggatattgcaacaaaatctgtggcggaagattatgtagctaacctaagacagcaaatggccactgattggaaaagtccatctgaatatgctcttcatatacttttcacaaagtttattcgatatgcggaaaataaattaaatacgtgtctgcagcaactagtcgtgatggaacctgcaatcgtagaaattctaggggaaggaattgatcccagttttgatgaaattataagatccttaggtcacatagcaaaaaaaaagccaaaacccgttattgatgcaatgatgttttggaggaagacaaaatcagaagctgcaaattcagcttcagaggaagtggaaaagctaataaaagattacgagtttgaaaaagtgcaccctactcagtttatgacgaacaggcggttatcaagatcctccagtaatacaacttccaaatataagcataatgccagcataaatggccttcctaacatgaaaaggcatgcttcatcgtctgtaaacaacaaagttccattactcaagactagcagtggcagtaacagtactatttcaggcccatccatagcaaactcgcagctgaaaagcctggagaacgctattgacttggccaaggaagaagctttcttagcggacaggaaatctttaatcagcatatacattctttgcagagtactaaacgaaattgtcaagcaagcaccccataacgaagaagaagatttatccgataagctagaagaaattgttttcactcagttgaaaactacagatccactttctatttcgtctagcttgatcaaatcctcgaactggaattcatttgcagaacttttagggtccatgtctgaaaagaaattcttgtcagttagtgatcgttttatagccgatctagaaataattcctacgtatatccctccggaattagagccaagtacacacttgttaattcttggcatgagatacctgaaattaaagaactatccgctagagaaatttgaagagagtgcagattttatgaaaagtttgtcaaaattttttgcaaaaactgaaaatttccctgtttgtctagcttacgctgaagtcacaaaccaattattactaccattagctggttcgttgaccgcggaagtaaatcatcccacatgggtagaagcaatgtccactctactgaatactgctaaaagactgcaggccgataataagtattgggtaagcggattcaaactaacagtttctattttatgtgcctcaccgccagatttattttccaagaaatggttatcattattggaggcaaacgcatcgaaagttaagtctaaaagtttgaatgaaagaaccatttttgcagttggtttatcaagattagtttgggtttatctgtatagatgtccggagactttgaataacactacaagaacacttacaaaacttttacaactgtacttgaacacgaggaaaaaggaaaattggataaccggcgattttggacttttaaatcccttaacggatgcactgatatcgattgggtttttgcacccaaactttttaatggagcaagccttgattcctttgatacgacaatctttcaatggttccaatctggaaaatgcgaactatgaaaaactaatattaaccataaatacatataaaggtttgttagttactaaggaaaggccgaagtttcccgaagacgataatagattttacgaattgaacctaaacaacattactgtaaaccagattcaagaagcatcctccataaaccataacgaaatatcggattatttttataaattgttccttctactagattctagcattggctctgaagtctggtctcctgaaaatcagcatcaaaagcaatcatcgaatacattcagtccgtttacttttagcttttccaatgacaacgattcaagtaaaaataagtcattctatgttatattgtttggtaccattattgaagctataccttgctgtctctctatttcacgaaatattccatataaatctacgatcgaaatcttatcaaggaacgccgtccattcagagacaataatttcctcgagcagtcaaaacgcactaagggcattagctgctaaaaagaatccatacaccctaattacctggtttgcgaaatattcgtttgattttgacgaaaagacacaatcaagctataacatgtcatatttgtcatcgaaagaatacaacaggctattaatgctttacgttgagctcctagaatcctggctggaggagtttcaatcatctaacaaagaagaaaataagaaagaaactggattagatggaattcgtttgttaccagtcgatccagaacaagaagaaactaatgaaacagaaaaactggaatggaaaaatacagtaaccgttatcgaggaagtggaagggaacggtttatttttcctctgctcgcacgacgcaagaatccgtaggttaggtgtgcagatattgagaattattttcaaatttgacgaggccatgatggaaaaaactgagaaattatctaatggacattcgaggtcatcatctcatttcgcagcggaccgtggtacaaggcttattgatttattgaatgaatgtaacactacagccctaattaatccacacaaggcaacgttaagtgcggttgaaaaaacaagattcaaccggctaaactctaaatataagaagggactacttattaaactggcagaatcagagtatggggtagacgctgcattatggcaaagggcctttcctaaattattggcactggtttttaagacatgtcctatggccatggcattatgccgatctatcgtttgcataaggttggttcaagtacatgaaatcattctgcgcgtagcaaatgacgtcgattttaaacccaagaatgttctaccggaaacaattgtaaaccaatggaaactctatttaattgcagcatgtacttcattaacgtccacgtttgaccaaaaattgcatattccctctaatattcctcaacatggaaggaaaaagagccaacaaatttttactgttcagcatcagaagatcaaatctgcgaaatcaatcttcaaaatggttcttcctttattgaatgcgaaatacgttatgattagggacgccattataacaggattaagttcaatgaatatcaacatcttcaaagcatacgtagaagccatcgatgtattcttaatggcctggaaggagggaagttccaataatcaaattagagttgagatgttccatattgtgacgattttatcaccatatttgaaggctgatatgatatttaatgatgaatggatacttcggaaactatctgagtttttacaaaaaacaaaacagtttcttgaaaaggattccgtacaaatctcttatgaataccaatcactgcgaagctatttcgcaggccttatactaagttattatatggcagtaagggaacacccgcaaatagaccaattattcccttttcaagcccgtgcctcttgtttcaattatttgaaagagtggtgcggttatggtgattatgaaccgatatctgaagagagatatgccataatgatcaaaaatactgaaaatggcagagatagaaccgcgatcactactggaatagagttccaaaaaaatagacttcaaatgatcgtattagagactatggtcgctttatgttcagacccaataacgcaaactttggatgatgatttagaattacccattgtaatttctttcgatactgaagatttacttgcctggattgaagcattattcaactcagataacacaaccgttagaaaccttggggtgcgtgctttagagaatttactggagaaaaacagggaaaactctaaactttttaaagacgttgcattccagtgtgtttcgcaccattctcattcttgggtagctgtcttatattacactacactctgtaaatccgtgttgaaattggatgacttagttttagatgaagacgaattagtttctttgggtttgtatgggctggtggctgataaggaagataccagaacatatgccgttgatttactttcagccgttgaaaccaagttgcatagctcttcttatactaaggtattcaaagaaaggcttgcaaactcttcaaagactgtgtataaatcaactgcaaaggaaatctctagtatctttgccgagctgctatcccaagacttatgtttgagaatattttctagcttggttagaatactagatttgttcccttttgagataaaaagagatttgttagtgctcatggtaccctgggtgaacaaatttacattaaaatcggtagaagagctcgatacctttatggttttgaataatttatttttcatcaccatcgatcttaacgattctttaccaaacgaagtggagcagctctggatttcgctaggcaagggtaattcctttcaaaacatacacgtatcattggaatacattataaactcttcaatgaaccattgtaatccattatttgttcaatatgcgagagatatcgtcttgtatttggcaaatattcctggcggtattggactacttgatacattgttgaataatttagaacccaaatgcatggttccttcaaccaagcatacgttcattgagcccatgaacaataataagtactcttttttggggaatatttgggaacgtttgaattacaacggaaaaagaattatcttttcgaaggcgcagctttcaatagtttttttggtaaatttgctaacgaacctgagtgaatctgtcaaggcaaaaatcccattacttttacatatgtccatttgtttactagaccattatgttcccctcattcatgaaagcgcatgtaaaattgcgtctacattaatatttggattggcaccaacccatgaaaagtctgaggaaactgtcaagctgctaagaaataagcatgtcctgtggtcatatgacaatttgatgaaaaaaggcgctagatcacctaaaactatggatttactgatcaggaacattatcgctatattttcagaattggaggaatttcaagtaacctggcaaagaatcgccttaaaatgggctactacttgctcagtaaggcatatagcgtgcaggtcttttcaagttttcagatcgttattaacattcttggatcaagaaatgttgcgtgatatgcttcatagactctcaaacactatatcagatggaaatgttgatatacaaggatttgccatgcaaattttgatgactttaaatgcgataatggcggaacttgatccaaccaatttaatcagtttcccacagttgttctggtccatcacggcatgcttaagcagtatacacgagcaggaattcattgaagttttatcatgtttgagcaaattcatttccaagatcgatttggattcgccggatactgtgcaatgtttggttgccattttcccttcgaattgggaaggtcggtttgatggtttacagcagatagtcatgactggattgcgatcttcgaattccttggaaattacatggaaatttttggataagttaaatttgttgaaggatagtcgaattatagcaaatacagactctaggctattgtttgcattgattgcaaatcttccaagatttttgaacgcaatggaccgtaaagattttacggccatccaggttgccgcagattctttaattgagctagcaaacgcgtacgagcaaccttcattatcccgcttgattgattctttggcaaagaataaatttaggtcaaaaaaggatttcatgagtcaagtagtaagttttatatcaaggaactatttccccctatattctgctcaaactttggtatatagattaggagctattgttaaataa

SEQ ID NO: 4346 - DNA, 1671 bp, Saccharomyces pastorianus
atgactaaacgacaaatcggtgcgatgcttggtgcacataggtccgagggtgaaccggaaaggaatgaaatctgctccattccagctcatggtgatactaatggtctagcagtgcttaattctcaatcagaagtagacaatgaatcggattttgaattagcgccttattcaaggttcagtaacacccaaaaaatgcttcttgtcgttcagtgcgctttcacaggtttcttttccacggttgcagggtccatatattatcccgtgcttactgtgattgaaaaaaagttcgacatcactgaagagttggctaatgtcactattgtggtttattttgtcttccaaggagtggcaccctcgattatgggcggattggctgatacgtttggaaggcgacccgttgtactgtgggcagtgttaacatactgctgtgcttgtattggattagcatgctcgcgtaattacgcccaaatcctggcattaaggtgtttgcaagcggcaggcatttctcctgttatcgcaataagtagtgggataatgggcgacataactacaaaagtggagaggggcgggtacgttggattagtgtcgggttttcaagtagtcggaactgcatttggtgcactgattggagccggattatcatcaagatggggttggagagccattttttggtttttggcaataggttccggaatctgtttggttgtttccgctctctttttacctgaaacaaaaagaacgttggtgggaaatggctcattaacgccaaggtcgtttttaaatagggccctcatactacgtgttgccagcgtgaggaaaacccttcacttagatgatcctgaactggacacgttagaaccacgtgctagagtggattttttagctcctataaaaattttgcacatacgggaaatagatatcctgttattcattgctggtttgcaattttctacatggacgacgcatcagactgcattgaccactgtcttgagtaagcggtatggtttgtcagtcgccaaaattgggctttgctttttgccagcaggaatttccacactgacgagtgttatctcggctggtagatatttaaattggagctatagaacaaggaaagtcaaatataacaaatggataaaagagcaagagctgcgattgattgaacagtacaagggtgattgcgataaagtggctgaagttcttcagttcgattatcattatacttttaatttggtcgaagcaagactacatccagcatttgtgacacttcttttcagtagtgtagggtttacagcattcgggtggtgtatttctgtgaaagcacctcttgctgctgttttgtgtacgagtgcattcgcaagtttattttcgaattgcattctgaccttttctactactttaatcgtagatctattcccaacgaaagcatccactgccacaggatgtttgaacctatttagatgcattttgtcagctgttttcattgcagccctaagtaggatggcagagaagatgaaatacggaggcgttttcacactactgagtgctttgacttcatcttcgtctttattattatttcatcttttgaagaacgggaaaaggatatcgttcgatagaactaaagaagctggtaaaaaggccattaaagacaagttcgaaaaaacaaaagcatga

SEQ ID NO: 4347 - DNA, 204 bp, Saccharomyces pastorianus
atgaacattgagttcgttactaagtacctgcccgattccacatcacagatcaaggcaaagatcaccgattcgggcctggctacgttgtcctataagcaaaacttgaaaaaaggcatctctttggggatgggcatgtcatttaatgcgctagagttggccgagccggttcacaagttcggctggtctctttcattttcggcatga

SEQ ID NO: 4348 - DNA, 147 bp, Saccharomyces pastorianus
atggcaccaccttttttcaacgacatctccagagatattaacggtcttttgaacagggactttttccataccagcccgctctctttgaacatatctaccacgacgcaaaatggagttaattttgctctgaggggaagcaggctgtga

SEQ ID NO: 4349 - DNA, 711 bp, Saccharomyces pastorianus
atgtctcccatccttactaccccaaagaggcatgcccccccacctgaacaattacagaatgtaacggatttcaattacactccatcacatcaaaaaccattcttacaaccacaagcaggcactacagtaacgacacaccaagacatcaagcagattgtagaaatgacgctgggatctgagggggtgctcaaccaagctgtgaaattgcctcgtggtgaagacgaaaatgaatggttggccgttcattgtgtggatttttataatcaaattaatatgttgtatgggtccatcacagaattctgttctccacaaacttgccccaggatgatagcgacgaacgagtatgaatacctttgggctttccagaaaggtcaacctcctgtttcagtgagcgcacccaagtatgtggaatgtttaatgaggtggtgtcaagaccagtttgacgatgaatctctcttcccctctaaagtaaacggcaattttcccgagggattttttcaacgtgttattcagcctatcctgaggcgactgttcagggtttatgctcacatttactgtcaccattttaatgagattctagagttgaatctacaaacggtgttgaatacaagttttagacacttttgccttttcgctcaagaattccatctattaagaccggctgatttcggcccattgttggagttagtgacagagttaagggataggtag

SEQ ID NO: 4350 - DNA, 2388 bp, Saccharomyces pastorianus
  modified_base (245)..(297): a, c, g, t, unknown, or other
atgctacacggacatggtttgtgggtgttggctcggcccggctccccttttttttttcttgttctgcgcttttctgtgcttcttctcccttccaggagcgccccccttcttgcctcgctggccctcgaattcgccgatcgacggcttggccttccctgtattctaccgcatcgctattgtccgccttttccccatcgcggtgaacgtatacataaatacttactaactttatccatacatattcnnnnnnnnnnnnnnnnnnnnnnnnnnnnnnnnnnnnnnnnnnnnnnnnnnnnnttaaaaacgcgcgcgtacccgcacacgcctcgctctctcacagagtatatatatatttataaatttatatattcgtatattcttgcatttcgagaagtagtgcatttctgcttgtttctcttttgccactccccccctcctttttttcgcaacagcaagaccacagacggtttccacaatatgaagtaccctgctttcagcatcgacaccgacacggtgtgtttgagcgacagccccttggacgactaccagcgtctgtacctcgtcagcgtgctcgacagaaattcgccccccgccagtttcagcagcggtctcagcatcaagaaggccaactacaaatcttccattgctgcgcagtttacacatccgaacttcatcgtccggcctcagaacgccaccgagggtgaagaggacgggcggccaccgcagaacgttctgaactgcttcgagtaccagttccctaatctccagacgattcagagccccctccacgagcaggagttatttgcgcagctttccagctccaacgctgctgccgcggcgaccgcctctcacccaccgctgcatctgcacggcaagaacgttcttatgggtaagatcatactggcagcctcccgtgctaacaggacgcccgtgtcggcgtcgcccatcaagcaggaaaggaagtcgctatcagcggcttcgcgcgagaacggcccctcttctttgacaaagaaccagcagttcaagctgaccaagatggaccataacctgatcaacgacaagctcatcaacccaaacaactgcgtgatctggtcgcacgactccggctacgtgttcatgacggggatttggaggctgtaccaggacgtcatgaagggactcatcaacttgcctaggaaggacgccgcagccgctagccagcagcagttcctctgcaaggccgagttcgaaaaaatcttgtccttctgcttctacaaccacaactcgttcccctccgacgactcttccaacctcctgctgtcgtcgacgtcggcgtcgccgcccaagagacggaagtccacgggctctgccttcttggaccccggttcctcttcttccgccacgccctccgcgcaggcaaacaactacatcgatttccactggaacaacatcaagccggaactgagagacttcatctgccagtcgtacaaggacttcctgatcgacgagctggggcccgaccaactagacctgcccaacttgaatccggcaaacttcaccaagaggataagaggcggttacatcaagatccaaggaacgtggctgcccatggagatctcaagacttctctgtctgaggttttgcttccccataaggtacttgctggtgcccatcttcggtccggagttcccaagagattgcgaagcctggtacttggcccatcaaaacgtcaccgtcaccaccccgacgacttctgccatggcgaaacccaagcagaagccccggcccagaccaagacaaaggtccacctccatgtcccattccaaagcccagaagcttgtcatcgaagacgccttgccctcgttcgactcgtttgtggagaacctgggtctttcgtccagcgacaagaactttatcaaaaagaagaacaaaaggcaaaagtcccccacgtactcctctccctccacttcccccattgggcctaaggaccccacggtgcaaatcctttccaacttggcctccttctacaacacgcacggccacaggtactcctacccgggaaacatctatattccacagcaaaaataccctctgcctgcgtcaggccggctctcctcgccgcaagggcagcagaactacacctatgaccacacgcacccagttccctcgcaataccagtctccaaggcaatacaacatcccgtcttcccccatcgctccggcgccccccaccttccctcaaccttacagtgacgaccactaccacttcctcaaatatgccaacgaggtatacaagcaacgcaactaccaagcggctaacaatacaaacgctaatacggacaccacttcttcccccaaggcgaacaattcactgaacaatctcaaattcaaaacaaactccaaacagtag

SEQ ID NO: 4351 - DNA, 1629 bp, Saccharomyces pastorianus
atggtgaagttatataacaaattgctcggcacactcgccgtgggcgtcggatctgtctgggcgctcgaaaacacgacagtctacgagttcgagtctgtcaagggcttgttcgaacaggagtaccgaagtgtgttctcggacaatgtttcgcaggtgcagttgcgggacgccgttgtgataaatggaacggtggtctacgaggctggcgcaggtggggacggtgggtcgctggacgagtggctgcaggagcagcgtaacgtctccgttcagcgggttctcgagaacatcggccccagcggcttgtatccttctgtgctgcccggggtcgtgattgcgtcgccgtcgcaggcgcacccggactacttctaccagtggattagggacagcgcgctgaccattaacagcctcgtctcgcacacgcacacgcacacgcacacactgctgcagtacttgaatgtcacgttccacttgcagaggaccaacaacaccttgggtgctggggtccagtacaccaacgacacggcgtcgctgggcgaccccaagtggaatgtcgacaacactgcattcacgcaggactggggccgccctcagaacgatgggcccgccctgcgcaccatcgccgtgttgaaaatcattgactaccttaacgaggccggcgctgatctgggcagtgggtatccgttctggtccaccaaagaggtctttgacgatatcgtgcgctgggacttgaggttcgttatggaccactggaactcgccgggcttcgatctctgggaggaagtcagcgggctgcatttctttacgttgctggcgcaactgtccgcggtggacaagtcgctgggctatctcaacgacacggaacagtcgtcgtcggaatttgttgacgagctgcgccaaacgcgccaggccatctcggaattccttttggaccctgcgaacgagttcattcaccctgagtacaactacgtggtcgaaactcccgccattgccaagacgttgcggtccgggctggatatttccactctgctggccgccaacatcgctcatgacacgccaaaggcttcccggttgcccttcaacgtcgacgaccgtgctgtcctgaacactttgcacaacctgatgttccgcatgcgttctctttacccgatcaatagcaacgccacgggcattgccctgggcaggtaccctgaagacgaatacgacggttacggattgggcgaagggaatccgtgggtcttggccacttgtgccgcttccaccacgctttacaaactcatccattggcacatctccaagcagcaagacgtggttgtccccatgcacaatgaaacctcgaatgcattttgggaccagctgattttctccaatctcgcgactttgggcagcgacgatgggtatttgattgtcgagtacaactcccccgccttcaatcaaacaatgcagaaaatctttcagctggcggattcgttcctggtgaaactgaaaacacatgtgggtgcagacggcgaactgagtgaacagttcaacaagcacacgggcttcatgcagggcgctcggcacctcacttggtcctacacctcattttgggacgcccatcaaataagacaagaaattctaaacaccttttaa

SEQ ID NO: 4352 - DNA, 2001 bp, Saccharomyces pastorianus
  modified_base (719)..(761): a, c, g, t, unknown, or other
atggtaaataaatcaaaatttgatggcggtaatggtaccgcaactaatggaaacgcaccatcatcacgaaatcacaagaaaaaatacagtaactgccgtaaaaagagcgtggcatcatctgtacggtgtgggaactttgggatcgcaagaatgggcgatgatgagaaacaggtttctaggatattcgataaaatgaatcatttgaaaaaatttagtgctgaagaggatgatgatagaaatctctttattcaatggtcggatgacataacagacactctatctggattatggtggaccggaacttttctaaaacttctaataagctctgcattaaccggacgtgccaagaaatggtttgattcaactaccgagggcatcgatgaccattcaataaggacttatactttagaaaaatttcttgccttattgtcaggagaatttgatggcataagagtcttaagaagagaaaggtttgccgaattactggagctgtcgattaactctgagacatcattggaaaaattcgcgaaaatttctgaacttctaactccttattacctatcgtctagtgctgcattagatttatttcttaccaagttggagccctgtctgcaaaagcagctgggggatactgcattcccaatgactttggatatagcgttactagtagctgcgtgtgagtttgcgaaggggacatctaaagaaagaaatgacgagcnnnnnnnnnnnnnnnnnnnnnnnnnnnnnnnnnnnnnnnnnnncggcaataccatagatttagaccctagtgtgcggaagaataagaacactattaaaactaacaagaaatgcaagaacaaacatatacatgaaaatattgataatgccatcaaaaagagtaatggtaagaaaaatagaaatgaagagggattacaggtgattcatcctaaacgtcgaaaacaaaatgaatctggaaagcagctttccctctctacggctgtacttgcagatatagtaccattggataatagtatatccaacacaaacgcatcaaataagcattttaatgtaagtaatcctgtggattcttatacgtctaaaaggaatggatctcaaaatcaccctataaatgaaatgccaaccttggacggtaacaggtcctttccaattacaattcctgctgccgccaacctcgcatatgacaaagttgaaagtgtaaaaaatgaaaccaatattcattatgaagcaataaatgacatcccattgtcgttggccagtggtagtgattttgtgaaaagaaatgtagcagaatccatgagctggaaatccattagaggcaacgccggagtgccggattcgaacgcgaagagcgatcttagaggtgatgagtctaatcgtcaaatggctcgtcgatcccatgcggcgcacatttcttcacattcaaacacacctgaacctcgccagacagcatggcacgatccaattgggactaactttgctgagaccaataagattgtagaaattactaacctaaatccatttacgaaacacgaaaatacaataggttccgataaaccaaaaggttccaacaaccctataacttccatgaaggtaaataagccaggctatttcattgatcttgaaaagccacaaagtatgcataatggtaataggaatgtagggctgttagcacaaaaaagctacccacttcataattttgcagtgcgtacaagaaatgcgcattttaatgaccgtccttctaactatacatcagcacatggaaacttgaacgccatccaccctttatctttaaggattaataatattcaatgtttgtccaggcctggtattagggaagcagatactaacaaagaagtacattcacccaagatgacagttcaagaaaaaggaactgtaaatagcgcagttgcgaaagataaggatgggagatccaacagtgtggaaaacccgtttctcgggaacacgttgaacggaacaaaactaaacagctattacatatga

SEQ ID NO: 4353 - DNA, 960 bp, Saccharomyces pastorianus
atgctgggagaggaacaatcacaaaacgctcataacgggcaagaaatcgaaaaggagctgcccttcatggagaggccttggtttaagaaggcctacgaaaaggccatcgagttccacgaaaaggacgaactgctagacgcaaaagacagactggagctgtcgaaggcttacaggtctattgctaaggcccaaatgtggggtggctggctcgccttctcctctgttttttttaccccatttgcgtatcgttactacaagaccaacgctatcaagggcgtcaaagttcccagaaattttgtcctgggggtgatggctctgttttttgctacaaatgtcgctggtcggtccatgtatgatcgcaaactgaacgaacgagacctgaccggttccctgaaggacagtcatgcctacgattatggcgataacgatttcgaagccgctcagcccgaccaaacgaaggaagtttcaagaaacaaaagacagtacgatatgatgcgacttttagatctagggtctccctctaaatggtcaatgtacttttacataacgtaccaaaatccagagagaagactgcccgatccgaaagctaaactagaacaactgaaaaagaccggcgtcttcagtggttcgcccttcatgaaccaaagagatcctatcgggctgtaccgtaacaaaggtaaggaaacttcaggctcaaaagattgggggaaggacgataacgataacgataacgattcattgtcttcgtgggagaaagtgaggaacggcgaagacggctcactttcatcttgggaaagtataaggagttcgaatagagatcaactccaagaacctggtgctcaaaaagatgaaggatccggtgtgtttagctccggattatccgatgacagttttgacaccggaaaaccttcctctgatgacggatatgaacgtctactacaaagcggaagaaatcgctga

SEQ ID NO: 4354 - DNA, 891 bp, Saccharomyces pastorianus
atggattactttaacatcaaacagaattactacacgggaaatttcgtgcaatgtttacaagaagtagagaaattcaacaaagtcacagataacactttattgttctacaaagccaagacccttttagcgttgaaccaatatcaaacacaggatccttcttctaaatttggtaaggctttggacacgtacgttaatttcctagacactaaagacattacagaattggaaggtttactaaaggataaacaaagctccccctatgaattacaccttttggccagtgcccaagctatttttggtaacttggatgaaagtttggagacctgtgttgaaggtatcgataacgatgagatggaaggaaccacggaactgctgttacttgccattgaagttgctttgttgaacaatcaagcctccacggcttccgtcatctttgataattatactaatgcgattgaagaaaatattactggtgacaatgaaatgattttgaaccttgccgaatcgtatatcaaattcggtacaaacaaagaaacagcgacttccaacttctactactatgaagagttatctcaaacttttcccacttggaaaacccaattggggttgctgaatttacacttacaacaacgaaacatagctgaagctcaaggtattgttgagttattactttctgattactatagtgttgaacaaaaggaaaacgctgcattgtacaaacctaacttcctggcaaaccaaatcacgcttgccctcatgcaaggtgctgatactgaagatctaacaaatcaattagtagacttggatcatgagcatgcattcattaagcatcaccaagaaatcgatgcgaaattcgatgaattagtggggaaatatgacctgtcaaactaa

SEQ ID NO: 4355 - DNA, 222 bp, Saccharomyces pastorianus
atgtctttcaaatccatgttttcatttttcagctcacctatggccttgttgattatggtgccgttttttccaatctcgttgataatactttgcaggattgagctatcctcaaagtgtatcacgtcatcatcaatttcgaaatttagctgtcccgacactatcagattagttagttcttctttaatatcctccagatcaatacctaatgtggatgataaataa

SEQ ID NO: 4356 - DNA, 450 bp, Saccharomyces pastorianus
atgattggtgagtcttcttcccattcattccatttgttgaaacagtctgacgccgtcactattcgtaccagaaaggtcatctccaacccattgttggccagaaagcaattcgttgtcgacgtcttgcacccaaacagagccaacgtctccaaggatgaattgcgtgaaaaattggctgaagtctacaaggctgaaaaggatgctgtctccgttttcggcttcagaactcaattcggtggtggtaagtctgtcggtttcggtttgatctacaactctgttgctgaagctaagaagttcgaaccaacctacagattagtcagatacggtttggctgaaaaggttgaaaaggcttctagacaacaaagaaagcaaaagaagaacagaggcaagaagatcttcggtaccggtaagagattggccaagaaggttgctcgtcgtaacgctgattaa

SEQ ID NO: 4357 - DNA, 114 bp, Saccharomyces pastorianus
atgttatctactggttcacagcttagatccatgaaaaactccatcacagtaaaattttgtgtgatcaaaacatctttgctctcattagcatccagaactttaacaaatagttga

SEQ ID NO: 4358 - DNA, 759 bp, Saccharomyces pastorianus
atgagtgttttgaacccattcacttcaaacatgtactctcgtcgtgtcttatctggtgaattccaagtcgtcaatccatacttactacgtgatttagtcgatctgggcatttgggatgatagtatgaaacaatatttgattactcaaaatggctccattaaagatttaccaaacgttcctcaagatttgaaagatctatataaaactgtctgggaaatctctcaaaagactattatcaacatggctgctgatcgttccatttacattgatcaatcccactccttgaatttgttcctacaatcaccatcaatgggtaaaattacaagtatgcatttctacggttggaagaagggtttgaagacgggtatgtactacttgagaacacaagccgcttctgcagccattcaatttaccattgatcaagatgttgccgatcaagccgctacacatgttgcatccactgcagaattgaatcgtcccgtttatatcccaactggtaccaaattctccgataaggaggccgcagaagcaactactgaaaccttggataatgacaaggaaacatctcccgttccatctgaaccatcttctgtctctagtggtatgtcgaacatgaaactggaagacggagcttgcccttcagttccaacagaaaacatcaaagaggattctggagacaaaaaatgtgacatatataatgaaaaagtgattgcttgcagtgcccccacaccagaagcctgtgaagcatgttccggttaa

SEQ ID NO: 4359 - DNA, 1857 bp, Saccharomyces pastorianus
atgttcgttataaagagagacggccgccaagagcccgtgcaattcgataaaatcacctcccgtatcacccgtttgtcatacgggctggatcccaaccgtatcgacgctgtaaaagtcacccaacgtatcatctccggtgtgtactccggtgtcaccaccgtcgaactggacaacctggctgccgagacatgtgcatacatgaccacggtgcaccctgattacgccacgttggccgctagaattgccatctccaacttacataagcagaccacaaagcagttctccaaggtcattgaggacttgcacgactgggtcaaccctgccacggggaagcatgcccctatgatttcggatgaagtctacaatattgtcatggaaaacaaagatacgctgaactcggccatcgtgtacgacagagatttcaagtacacctattttgggtttaagactctggaacgttcctacctgctaagactagacggtgaagtggccgaacgtccccaacatttggtcatgcgtgtggccctaggtattcacggcagcgatatcgagtccgtgctgaagacttacaacttgatgtcgttgagatacttcacccacgcttcccccacactatttaatgccggtacgccacatcctcaaatgtcttcttgtttcctgattgccatgaaggacgactccattgaaggtatttacgacactttgaaagagtgtgccatgatttccaagactgcaggtggtgttggtcttcatatcaacaatattcgttccacaggctcttatattgcaggtaccaacggtacttcaaacgggttgattcccatgatccgtgtcttcaacaacactgcacgttacgtggaccaaggtggtaacaagagacccggtgcctttgcccttttcttggagccatggcatgcagacatcttcgactttgtcgatatcagaaagactcatggtaaggaagaaattcgtgcaagagatttgttccctgctctatggattcccgatcttttcatgaagcgtgtcgaagaggatggggcctggaccttattctcaccaagtgctgccccaggtttggacgacgtttggggtgaagaattcgaagagctatatacccgttacgaaagagaaggtcgtggtaaaaccatcaaggctcaaaaggtatggtacgccatcttgcaagcacaaacagaaaccggtacacccttcatggtttataaggatgcctgtaacagaaagaccaaccaacagaacctgggtaccatcaaatcgtcaaacttgtgttgcgaaatcgtcgagtattcttccccagatgaaactgctgtttgtaatttagcttccattgctctaccagcattcgttgagacttcggaagatggtaaaacggcgacctacaatttccaaagtttacatgacattgctaaagtcatcactcataacttgaatagagtcatcgaccgtaactattatccagtgccagaggctagaaactctaacatgaaacatagacctattgccctgggggttcaaggtttggccgatacttatatgatgctgcgtttaccatttgaatgtgaaaaagctcaaatacttaataaacaaattttcgaaactatttaccatgctacccttgaagcttcttgtgagttagctcaaaaggaaggtaaatattccacttttgaaggctctcctgcctctaagggtattttacagttcgacatgtggaatgctaagccatttggcatgtgggattgggacactttgaagaaggacattgtgaaacatgggttaagaaactctttaaccatggccccaatgccaaccgcttcaacatcccaaattcttagggtacaatga

SEQ ID NO: 4360 - DNA, 690 bp, Saccharomyces pastorianus
atgcaggacaccgcagaattgagcacctcgaagctggggacgaagaagtactgggatgaattgtatgccttagagctggagaattttaggcaaaacccgcaagatacgggagactgttggttcagcgacagtgatgcggaacagaagatgatcgatttcatggtagacaacatcggtgcgcacaggattaccgaagatgcgtctgtggtggacctgggcactgggaatggccacttgctgttcgaattgcacgagacggaattccaggggaagctggtcgggatagactactctgaagaaagcgtcaggctcgccactagcatagctgaggccaccggcgtggaagagttcgtcagtttcgagcaagcggatatctttagcgccgattggagtccgggcaaattcgacatcgtgctggataaagggaccttggacgccatttcgttgagtggtatgaagattaacggcgagcttgacgtggtcgaggtgtatgccggagtggtggagaaaatcctggaaaaggacggtattttcttgatcacgtcttgcaattttacgcaggatgagctggtgcagatcatagagaccgacaaactgaaaatgtggaaaacgataaactatcccgtcttccagtttggcggtgtccagggcgccactatatgtagtatagcatttgtcaaacaaagctga

SEQ ID NO: 4361 - DNA, 381 bp, Saccharomyces pastorianus
atgagacggaggaccaggagttcgaccaagttcaacgcccaatggaagtactatccgccatttgtgttgcacgacgcgcatgacgaccctgagaagatcaaggagactgccaattcgcactccaagaagttcgtgcgccatctccaccagcatgtggagaagcacctgctcatggacatcaagactgccatcaacaagcccgaattgaagttccacgacaagaagaagcaggagtcgtttgacaagatcatctggaattatggcgaagaaacagagctgaacgccaagaaattcaaggtctcggtcgaagtcacgtgcaaccacgacggtgccatggtggacgtggactataagacagagcccgtgcaacccctgatctag

SEQ ID NO: 4362 - DNA, 111 bp, Saccharomyces pastorianus
atggtgaaaaaagacaagaaggcaaagggcccaaagatgtccactattaccaccaaaagcggcgagtctctgaaggttttgaggatctgcacgattttggaacctacttga

SEQ ID NO: 4363 - DNA, 918 bp, Saccharomyces pastorianus
atgttgaaaatactcatacgagccacttgttcacaagcaacacaaccaaccaagcattcaaagatggctgtcgacgctcaaaagcttgtggtggtcatcctgatcgtggccatccccttgttgttaaaactctttagcgggcaaaagcccaaggctgtgctagaccccaagcggggcgagttccaggcattcccactagtagagaagaccatcttgacgcacaacacttcgttgtacaagtttggtttgccccacgctgacgacgttctcggattaccgatcggacagcatattgtgatcaaggccaacatcaatggtaaggatatttctagatcgtatacgcccacttcgttggacgaggacaccaagggaagctttgagctactagtcaagtcataccccacagggaacgtttcgaaggtgattggcgagttgcagataggtgattcgattgagatcaagggcccccgtgggaactaccactacgagagaaactgtcgttcccatctggggatggttgcgggcggtactggtatttcacccatgtaccaaatcatgaaggccattgctatggacccccgcgacaccaccaaggtctccctcgttttcggtaacgtccacgaggaggatattttgttgaagaaggaactagaggcgttggtggccatgaagccttcccagcttaaaattgttcattacttggactcgccagaccgtgaagactggaccggtggcgtcgggtacatcactaaagatgtcatcaaggagtatttgcctgctgccactgaggacaacgttcaaatcttgatctgtggtcctcccgcaatggtggcttccgttagaagaagcgttgttgacttgggattcagacgttccaagccactttccaagatggaagaccaagtgttcgtgttctag

SEQ ID NO: 4364 - DNA, 1869 bp, Saccharomyces pastorianus
atgtttactggtcaggattatcactccgtaaattctacctctgccaaaaaaaatgacagtaacaagcgtagtcgcgacgacacatcaaaaatcatgaacaataaaataccgcataaaaatgcttctgccattgctgctaccactgcgaaacctgttacagctaggcctttggaccccagtgacatgaattacagtaccaatatggccggtatggttgatccaatgcaccattatactgcagccgacatttccggtggcgcttccgttagaaattctttaccgccccaatatgctaacatggcagttggaaacgctagtttgcataaccaagaaattaatgctagtgctagcccaaactaccaccaagctgcatatcttcgacaacaacaacaagaacaacaacccatgaagactgaagacgagtctcaactttacggtgatattctaatgagctctggcgttgtacatgatgtcaatcaggatttagccactcatacaaacataaaccagctgcattctgggcccaaatctgtcccaaacgctgtcaccactgttccaggtaatagcgcaaccgctgcagctgcagcagcagctgccgctacagctgctgccgctacagctgctgccaacaccgctaacacaagtgctttaaataaacaattgtattttatgaatatgaattcaaacaacaatccacatgccttaaacgatccgtccatcctggaaactttatcaccattctttcaaccttttggtgtggacgtggcacacttgccgatgacaaacccaccaatttttcaaagttctctgcctggatgcgacgaacctgttagaagaagaagaatttcgatttctaacggtcaaattagtcaattgggtgaggatattgagacgttagaaaacctacataatacccagccacctcctatgccgaactttcacaattatcagaatggtgcaaataaaaataaaaatttaccgcatagacagaccttcaaccaaatagcgccagtcgatattccgttgtatagcgcaaaaaaaaataccaatcccttgagtggcactagtttggcagaccaaaatgcagactatacgaaagatcagcgtcagcattttgctggctcgctatcaaaaaatattacatcggagagcgcaagcgatcttgagggcatgacgacatttgcgccaactaccgacagcggtaactcaacgaataagaacatgagcaaatctttactcaaagaatctcactccaatcccagtttctcctcaagatcacaagcatctcacatggatttagcaaataatgctcaagaggagccaacccctggtactacggcatggaaaagagcaaggctgttagaaagaaacagaattgcagcttcgaagtgtaggcaaagaaaaaaggttgctcagttgcagttgcaaagggaatttgatgacattaaggacgagaataaaattttgcaaaaaaaactaaattattatgagaagttgatttctaaatttaagaaattttctaaaattcatctacgtgaacacgaaaaattaaccaaaaattcggacgataatggtagtacaaacagtggtatcaagagcgaaagcacgactgtggactcattaaaaattattgaggaattgctaatgatcgattcagacgtaacagaagtggataaagaaaccggtaaaatcattacaatcaaacatgaaccgtattctcaacgtttcgatagttatgtcgatgaagatgatatggatcttgttggtgataaactcacaggaagtagaaataattcagaaaatcaatcattagttgattctgataaggatgtgaaagcatctaacctcaaagaacacgacgttgtttga

SEQ ID NO: 4365 - DNA, 2547 bp, Saccharomyces pastorianus
atgtcattgcttattgtgattgctgtagttttcactgctttatatctagccatttcttatttggtcccaacatcaattggatttggcttgttaaaagtttattttggtgtcattcaaatcactttgcgtggcttatccaatctttattacctctcaaaaattaacatagcctacaatgggttgattaagctagttcctcaactggataccacaatgaactggatttcgaaccacatgattcacaatatcatcaacctctacaatggttacactaaaaacaccatgaaacattcaattttcatccgtgctttacccgctttaacaacatatttaacatcgattagtattgtttctgcttcgtctaatctagtgtctaggggctatggtcgtgaaaatgggatgagtaattcgaccaggagactaattttccaaattttgtttgcgctcaagtgcacttttaaagtttttacattatttttcattgaattggccggattccccattttagcaggtatcatgttggatttctcactattctgcccgattttggcatcaaataatcaaatgctttgggttccttcaatatgcactatatggcctccattttctctctttgtgtattggacaattggtaccctctacatgtattggtttgcaaagtatatcggaatgattagaaaagatataataagaccaggtgttctgtttttcatcagatcccccgaagacccaaatatcaaaattttacacgatagcctaatccacccaatgggtattcaattatcaagattatgcttatccatgttcatatacgctatattcattgtccttgggttcggtttccataccagatttctcttcccatttgttatcaagtctaccttattgtcggtccctgaagcttataaaccaacatctattgttttgtggaagtttgctacaattttattaacactatattttacaaaaagaattttagaatctagttcctacgtcaagcctctattggaaaggtactggaagacaatttttagattgtgttcgagaaaattgcgtttatcatcattcatcttaggtaaagataccccaaccgaaagaggtcatattgtttaccgtaatatgttctacaaatatattgctgccaaaactgcagaatggtcaaatcaagaacttttcactagaccaaagactttggaacaagcagaagaacttttcggacaaattcgcgacgttcatgcttattttatcccggatggtgttttaatgcgtgttccttcttctgatattgtatccagaaactacgtgcaaacgatgtttgttcctgtcaccaaaagtgataaattattgaaaccattgaatttggaaaggataaaagaaagaaacaaacgtgctgcgggtgagttcggttatctggatgaacaaaacacagaatacgaccagtattatatcgtttatgttcctcctaatttccgtttaaggtacatgactctacttggtttggtgtggttatttgcgtcgattttgatgattggtgttacgtttgctagtcaagcattaataaacattgcctgtagctttggcatacttccagtcataaaactggtactgggtggaaacaatagattttatgtcgtgtggaaggaactttccgacattacttattcccatctgaacatttattatgtttgtattggatccatttgtatatctaaaatatccaaggatattttacatttcacagaaggccaaaacactctggatgaacacaatatcgatgaaaatgcgccagaagaggtggaacatgatatccctgaaagagacgccaacaacgctcctgttgataatttcaacaatgcggaagagggccagggtatattaatgaccatcatcaatagtgtatttgatagtatgttggtaaagtacaacctgatggtggctattgcaatcgtgattgcctttatcagaactataacttcatggattgttttaaccgacggcattctagcctgttacaactatatcactattagagcattagggaattcttcatacaccattggtaattccaaatggttcaagtacgatgaaaacgttttatttgttgtttggattattttatcgatggtcaattttggagctgggttcaaatcactaaagctattcttcagaaacagaaataccagcaaatcaaaccttttgaaaactatggcattagagctattcagacaaggtatcctacacatggcaatttacatattgcctattattactctttccttcctatttcttcacgatgttcctgctaagcaaatcattgacgtcaggcaggaatccagaagttttgctctatcgcttaatgaatctttccccacatggaccaaaattcagcacatctactttggattattggtatcactggagtcatttacgttcctcttcaaggcaacggtactgtttatcaaatggttcaagagtactgtacagaacgtcaaagacgaagtttacaccaaaggtagagctttagaaaatttacctgaggaaaattga

SEQ ID NO: 4366 - DNA, 882 bp, Saccharomyces pastorianus
atggttttccacaagatcggtccaaggttttctccaaaggacttgaaatcccgattaaaggagagattcccaatgatggatgatagaatggtagaatatttggcaagagaaatgagggcccatgatgaaaatcgccaagaccaaggccatgatagactggacatgccagctgctggtgctgataacaacaacaacatcaaccgtcccgaaggtgttgatagaccactgcaggatattcgtgaacaccgttatttcgagaatctccgtcatgttgatgaactagataatgatgtgaacagtaacgacgattcggataatagtctgccactagataatgactcatccagcaatatagccgagcccctaagtgaccataatcagaacgacgacgagggcgatgataatgaagaagaagagcaccaacaacagccggaggaagaaatagattatcgtgaccatgtagatccgaatccaatggacatgtgggccaaccaccgtgcccagaatgaatttgatgacatagtagctgctcaacaaaacgccataaataggccgaacgctccagtcttcattccacctccagcccaaaatagagccggcaatgtcgaccaagatgaacaagatttcggcgcagctattggtgtaccgccggcacaagctaatgcagatgagcaaggtcaaggccccttggtgataaatctgaaattgaaactgttcaatgtcattgcttattgtgattgctgtagttttcactgctttatatctagccatttcttatttggtcccaacatcaattggatttggcttgttaaaagtttattttggtgtcattcaaatcactttgcgtggcttatccaatctttattacctctcaaaaattaa

SEQ ID NO: 4367 - DNA, 2310 bp, Saccharomyces pastorianus
atgttgcacttatcgatctggattaaaaactatccagaatatttcctcaaggtcacatttttgaaatattttggctggctactcagcgataattccgtctctgtcaggttacaagttgccaagattcttccacatttgatcatccaaaatcataacagcaaatccagtgataattccgcgatccgccaagtctttgaaaggtttaaatctaagatcctggaggtcgccatccatgacgtcaatcttgatgtcagaattcatagtgttcaaattctaactgaagcgtcatcactgggctatttggatgattttgagattctaatgatttctagcttaatgtttgatgaagaattcgaccctttcaaaacatcctcattcaataaaaggtccaaatttttatctactgtagccaagttcttagcaagagtaataagcgaaaaacatgaggaattcaccaagacccatgaagagttgcctgaagaagtcgatggattagctgttgctccagtcgtgcaagttgggatctttatcaagatcttgagcaactccttgatttatcatttaaaggattcggcggaagttgattcaaaaactaagattcgtatgctaacgcaggccgccgagtttttatctccatacatttcatcacacttgaaaactatctgtgatcttttgatctcggatactgaatcgaacgaattgatccagacactacaaaactcgactgacaataacaacgatgacgacgaggaagatggtcaagaactagacatcactccgctgtttcccattgacagaaacagcactatattatatcttaacgtattcaatgggttgtgtacgggtgcgaataacccaaagattcaaaccaaaggcaatgttcgggaaatagtgttacctttattccataacttattgaacacaacatcaattgaatccgctgatatcctatgcccgcttctggagagttttattacattttctttggatgattggatatccattggctatgaaacagaattgaaaaaaattaccgacaaaatcatcaaagtatttatggattcaacaattggcgactcaaaagtcgatttgaaatatgacatttttgctaaatttattcatcacatccattattttgagaaaaaggaactagaagaaaaactattgaatcaaataagcacactggatgttcatttaaagaaattcttacgggaaaagatggatcccaacaattctagagatgattataatgatttgacctgttctttatacgaactctacatcaataaattgaccatccttgggagggagtatccaattgaagttgatgaagagttattacaactattgctgaacaattttgtctcacgtatccctataatgttccaagattttgatgacagcaccaaccaagaaataaacttcaaaatattagtgctgttagctacatggaatttggaaaaatggaggggcataatagaaaatgtaaaggatcacgaggcttcgactccaaaaaacctcaaatcaatttggaaacctatagctgctataataggtcgtttaaatacactagttatttccttggcggctatacccgaaaatgctgaaaatataagcaacttactttacctaaaatggtcagcttgcacctcgttagtggacatcatcgttgctgtgaaagttttcgagttaaaattacctacagatgctacatcatggaaatatagtatgagtgaacagttcccatattaccttcatgacagtgcgtcaaaagtccttttgcaagtgtttttatatttagagagtcttttcgctaaacagcttgacgtccaattagacagagtggccgatgaagacgccaatcttaatgatttgccagaaaccggttttttcaacgatatcgaaacccaattccttttgttcacggtcaaactgatggggctgatgaaattaaatattttggatggacgacttgcttctcgtatggcattgaataaggaaaaacttggctcactattcaacaaaatattggatgataccatgacagaaggttcggaacctaataagaagaacatacagaagacgaaaccaattcaaatgcaaaggggaagggagatttctccacaatcaaacaatgaaagggaaccgaatcatgcgaatattgaagagaataattcagatattcccatgacagatgacctagaacctattgaagaaagttcacaaggcaatcaagaattagcaccgattgaggaacatcctaccatggtagattctatagatgacagcgatgctatcactcaagattga

SEQ ID NO: 4368 - DNA, 1419 bp, Saccharomyces pastorianus
  modified_base (1149)..(1150): a, c, g, t, unknown, or other
  modified_base (1160)..(1161): a, c, g, t, unknown, or other
  modified_base (1170)..(1171): a, c, g, t, unknown, or other
  modified_base (1174)..(1174): a, c, g, t, unknown, or other
  modified_base (1186)..(1187): a, c, g, t, unknown, or other
  modified_base (1205)..(1205): a, c, g, t, unknown, or other
  modified_base (1208)..(1208): a, c, g, t, unknown, or other
  modified_base (1222)..(1223): a, c, g, t, unknown, or other
  modified_base (1231)..(1232): a, c, g, t, unknown, or other
  modified_base (1239)..(1240): a, c, g, t, unknown, or other
  modified_base (1258)..(1259): a, c, g, t, unknown, or other
  modified_base (1261)..(1261): a, c, g, t, unknown, or other
  modified_base (1270)..(1271): a, c, g, t, unknown, or other
  modified_base (1279)..(1280): a, c, g, t, unknown, or other
  modified_base (1287)..(1288): a, c, g, t, unknown, or other
  modified_base (1296)..(1297): a, c, g, t, unknown, or other
  modified_base (1303)..(1304): a, c, g, t, unknown, or other
  modified_base (1311)..(1312): a, c, g, t, unknown, or other
  modified_base (1320)..(1321): a, c, g, t, unknown, or other
  modified_base (1336)..(1337): a, c, g, t, unknown, or other
  modified_base (1353)..(1354): a, c, g, t, unknown, or other
  modified_base (1361)..(1362): a, c, g, t, unknown, or other
  modified_base (1376)..(1377): a, c, g, t, unknown, or other
  modified_base (1386)..(1387): a, c, g, t, unknown, or other
  modified_base (1406)..(1407): a, c, g, t, unknown, or other
  modified_base (1415)..(1416): a, c, g, t, unknown, or other
atgactgctgtgcgtcgttcgactagaattagaaccaaatctcaggttacagaggaggaaagctccgatgacgagcaagacgcaagtgtgcaacatatagaaactgatgaggccactgccgctgtgcagcgtgatgttgaagaagaagagaacagtgatagcgagagcagtagtgaggacgactttgaagatcaggacgatgatgactacgtagatgctgctgccgcaaagagaaaacctagaaagagaaaacccaagtcaacatcaaataccagtagtaaaagacagaaaaagaaaccgagttccagtgagagatctgctgcatctcacgccccaagtggccaccgctccaaaaaagaccaggagcagtacctggaagttgtcagagatttccagcctacagagctgtttgaggtcatatctacttcagaagacgtttccatcgaagaactactacgagaatggctagagacttacactgaaaatagagatcggtttttgcaggagttcatcaatcttctgctaaactgttgtggctctgttgcccgtgtagaggatcatgatgttcatagtaacgaatcttctaacgaaaccgtaggtgaaattcaattgcttttccaaagacaaaaactacacgagttttatcttctgataagtaaggacaacagaaaacggaaaaatttcaaaatgggacctctctatcaaaattttgtggagctgatgactaaattactcgaagttgcaaatgacctacagctgctctacgttgagtcggatgaagacgacactcaaatagtcacgggcaacctggtcctggacttactgacttggctgtcctcattctctgtctgtaagatcagatgctttagatacatttcaacactaacattatttcttttccaagactacttgactgaacaagctgtaaacttggagaagaattacttagccaaattgactagacagttgtcactagaagaaaagaaaaaaaggcccaataagaaaactttagaaaagctcgaaagcaccattgctgaaactcaaggtagtaaagttgtcattgaaggtgttattgataatattgtgaagttgtgtttcgtgcacaggtacaaggacatatccgattcaattcgttctgagtccatgttnngcacttatcnngatccctanntangtgagtcgtatnntatgcgggcgcgcgaatnttnctcatgttgtgacnncgcttatnncatcganntaagctttctgctttttnngnttgacttcnncattgttnncattccnnacggacannaaaacnnagagaannaggaaacnngacagggaggccaannaaagctttcgctttcnnagcaccnntgttcgtttccttnntcttttcanngagggtattttttaaatannaaaacatnntaa

SEQ ID NO: 4369 - DNA, 90 bp, Saccharomyces pastorianus
atggatcttgctcagcacccgacatcatcacgtcttcgttggttcccagcatgtttgaggcggcgttgttatcgcccgatgcgaaattga

SEQ ID NO: 4370 - DNA, 222 bp, Saccharomyces pastorianus
  modified_base (58)..(99): a, c, g, t, unknown, or other
atggagtgcaaaattagccgtatttcccttttttggttgcttcgtactttagattatnnnnnnnnnnnnnnnnnnnnnnnnnnnnnnnnnnnnnnnnnnaatttttttgttcgttcgcttgtttgtttggttgtttgttccctcttatatgcccacttcaaaatcaccaagcattgtcatacccgcctgatgatccagtattacccatttgagatgcgttga

SEQ ID NO: 4371 - DNA, 156 bp, Saccharomyces pastorianus
atgaatccagttgaccatcctcacggtggtggtaaccatcaacatattggtaaggcttctactatttctagaggtgccgtttctggtcaaaaggctggtttgattgctgccagaagaaccggtttactacgtggttctcaaaagacccaagattaa

SEQ ID NO: 4372 - DNA, 1314 bp, Saccharomyces pastorianus
atgatgtggccgatcgtcaccgatctatcgaccggagaatcagtgccaaacccccaagttgatatggaatcgtcaaaattcaacggcaatttttggtcaaattggagaaagttaagtagtgggagaggttttgtcttgacaatgagtgaaaaagacgttcctttgtttttaaagcaattaaaagtaatggaatttctgaaaaacgtcttaccgtttcaaataatcaccacaggaaatgacttatcactagaatctattggcaagatttccaagattgccaaagaggtgggacaaaaggtctacttaattgattgttcaacaatgcttgactctgaattttccaaggcattcatttctttttttcaaaataaatgggttgctactttattcaatacatttaaagagtttatcttgctagatgctgacgtggtaccattcgtaaaatctgattatttttttaattctccctcttataaaagaagcgggatacttctgttcaaagatagagttatgcaaaacgagcatactttcgattactgcgtagaaatgttaagtggagtggaaccctccggacaagaacacagactgattagtagtaaacttatttttgattcgtcactgtcattttcttcttcatcgtctgaagaagcctctgtgtactacaatttctttgaaaagttacaacttcatcatgttgatagtggtttggtagtagtaaacaaacgagaaaaaataaatgggctactgatgtcatttatgttaaatttggacggaaaaatgcagagatgtgtatatggtgacaaagaaatattttggttaggtcagctttatgctggtcaagattattccatcaatcctgttgacggtagtgttattggtcctgtcgatggacagactggtaacgatggcgaatcttcgaacagtaactactatatctgttctgcccagattgctcacagtgactccgaaaatcaactgttatggacaaatggtggtttgaagacttgcaagattccaaacagtgcggaaaatgacttccagagagagccagattatttcaaagacagatataacgaagtgtctactttaaaagggatatatgacgctccattacacgtggaaggactaattgtccctgatgtttctgttaatcaatggatgcaaatcaaggagtgctccaattacatgtattgtgcttatgctacaggtgacaaacacataaactctgaacttgatgcgggtcgcgtaatcaggttcgatgatgaaaaactaaagtacattaatgatatttcccaagtctggaatgccaactaa

SEQ ID NO: 4373 - DNA, 252 bp, Saccharomyces pastorianus
atgttttcgaccttaaaatcgagaagattgctcataagacgatccgcgatacttctgctttccgtatttttttcatacattatactttctgcatgccggaaccatgcatcaactaaatcgaacggccacgaggacgagagaactgcggttgaatcatctgtgtataagtggattgagaagcggcaacaacgaattgcctctgacagtccaatgaagcgattattaggtcactttttgccccctttcagtacc

SEQ ID NO: 4374 - DNA, 4230 bp, Saccharomyces pastorianus
atgtctctttctaaatatttcaatccgattcccgacgcttcagttacgtttgatggcaccaccgtccagctggaagaatcgctcggaactgtccggaacgatgaagaatccttgtcggatttcgagaatgcaggccatctggaaatctgcgatatcaccttccgtgccaatgaaggtgaggtcgtcttggtactggggaatccgacatcggcgctcttcaaaggcctgttccatggtcacaagaatctgaggtactctcccgaggggtctatcagattcaaggacaatgagtttaagcaatatgccgccaagtgtcctcaccaaatcatctataataacgaacaggatattcacttcccgtatctgacggtggaacagaccatcgatttcgcactgagttgcaagttccatgtctctaagcaagaacgcattgaaatgagagacgagttgctgaaagaattcggcctgtcgcacgtgaagaagacgtatgtcggaaacgactacgttcgtggtgtttctggtggtgaaagaaaacgtatctccattatcgaaaccttcattgctaatgggtctgtgtatctgtgggataactccacaaagggcctggattctgcgactgccttggaatttctctccattacgcaaaaaatggcaagggctaccagatcggttaatttcgtcaagatctctcaagccagtgacaaaatcgtcaacaaatttgacaagattcttatgctgagcgattcttaccaggtgttttacggcaccatgggcgaatgcttgagttatttccacgacactttacagataaagaaaaatcctaacgattgtatcattgaatatctgacgtcaatcctgaatttcaaatttaaggaaatatccaattccatcgttggtctcgacgcaccattccccgtctctaaacccaaacaagcttcgaacatcaataacgaagcagatttacacacattatgggtacagtccccatgctataaacactggaaggcaatcacctcaaagacaatacaagaatgcgtcggaccggacataaatccagacgacgtttctcccgtattcagcatcccactaaaattgcaactgaaaacctgtacgataagagctttccaaagaattattggggatagaaattacttgatctctcagtttgtttccgtcgtcgttcaatctttagtcattgggtctcttttctataacatccccctaacaaccattgggtccttctccagaggatctctgacatttttctccattttgttctttaccttcctttctctggctgatatgcctgcttcttttcaaaggcaacctgtggttcgcaaacatgtccagcttcatttctattttaattgggtcgaaacgttggcaacaacctttttcgattgtttttccaaattcctacttgttgtcgtcttcaccatcattctttactttttagctcatttacaatacaatgctgctaggtttttcatctttttgcttttcctttccatctataacttttgtatggtttcattatttgccctgacggctttgatcgctccaactttatcagtggcaaatcttttagctggtatcttattactagctattgccatgtatgcgtcttatgttatttacatgaaagatatgcacccatggtttatctggattgcttatttgaatcctgctatgtttgccatggaagctatcttgagtaacgaattgttcaaccttaagctagattgtcatgaaagtattatccccaggggcgaatcctataacaatatttcattcagccataaagcttgtgcttggcaaggtgccactctaggtaacgattatgtcagaggacgcgattatttgaagagtgggttaaaatacagttatagtcatgtatggagaaatttcggtatcattattgggtttctttgtttcttcttattctgttctttagcagcctctgagtacatcactcctttgttcaccagagaaaatatgctgcgttggaataactacgtgaaaagacactgtcccttcccaagtcacggaaagagacaggaaaaggctattactgatagctctggtgtatacggtaccaagcctccggcaactaattcatccacttcatcttcatctgtcccatcattctcccgtccatgcgatgctgactataatgttaagtgtcctgatgaatctgttaacaaccacactaaggagtccatagccgtagaaactcaaaagcacgtcatttcctggaaaaacatcgattataccattggtgataaaaaactgattaacgatgcttctggttacataagctctgggttaactgcattaatgggtgaatctggtgctggtaagacaactttgctgaatattctatctcaaagaaccgaaagtggtgtggtgaccggcgaattgttaatcgacggtcagccattaactaacattgatgcttttagaagaagtattgggttcgtccaacaacaggatgttcatttagagctgttaactgttaaagagtctctagaaatttcctgtgttttaagaggtgatggtgatagggaatatttaggaactgttaccaatctattgagattaccttcggaaaaacttgttgctgatttgtcccccactgaaagaaagttactgtccattggtgttgaattagttaccaagccttctctactattgttcttagatgaacctacttctggtttagatgccgaagcagcgttgaccattgtgcagtttttgaaaaagctttcgatgcagggccaagctattttatgtaccatccatcaacctagtaagagtgttatcagatattttgataacgtctacttattgaaaagaggtggtgaatgcgtctactttggttcattaattgatgcctgtgactattttgtggctcatgacaaaagcttagtttttgagagcgaaacggataatccggctgatttcgttatcgatgttgttggtagtggaagtactgaagctaatactggggaaaaatcaaccccaggtgaatttgacgaacagacatctcatcttagacagtcagattgctcaattaattgggcaaatatatggcaatcttctcccgaaaaggtgaagattgctgaaaatttgcttatattggaagaagaagctcgcaactctggtattgattttacgacttcggtatggagtgcaccttcatatatggaacaagtaaaattgatcaccagaagacagtatatttgtaccaagagggacatgacttacgtctttgctaaatatgctttgaatgctggtgctggtttattcatcgggttttccttctggaggacaaagcacaacatcagtggtttgcaagatgctattttcttgtgtttcatgatgctttgtgtttcttcccctttaatcaatcaagtccaggataaagctttgcaatcaaaggaagtctatatagccagagaggcgagatctaatacctaccattggacagttcttttgatcgcccagaccgtcgttgaattaccactagccatttctagttctacattgtttttcctgtgttgttacttctgttgcggctttgagtcttctgctcgtgtagctggtgtcttttacttgaactatattttgtttgccatctattatttgtcgtttgggttatggttattgtactcagctcctgatttacaaactgctgccgtctttgttgcattcctgtatagttttacagcttccttctgtggtgtaatgcagccttacgcattattcccacgattttggacattcatgtacagagtttcaccatacacatatttcatcgaaacttttgtgactttgcttcttcatgatagagaaatcacttgtttaacaggtgaaatggtcccaagtcaacctgtagtgggtcaaaactgtggtcaattcatgaaacccttcatagaagaatatggtggaaaattactcaatgataaaacatttaccgtttgcgcctattgtatgtacactgttggtgacgatttcttggaacaagaaaatatgagctatcaccacagatggagaaatttcggtttggagtgggttttcgtctgcttcaattttgcagccatgtttgttggcttctacttaacctacattaagaagatttggccttcagtgatcagcagcgtcaagaagtgcattccgtcaatgagaatgtccaaaaaaacaaaaaaacaccaaaaagtcaatgcatag

SEQ ID NO: 4375 - DNA, 285 bp, Saccharomyces pastorianus
atgccgagagtagttctagaatccaattcggggcaagtggactcaatattcttacaaccatggataaagccattaattgatgataattccgatcatcatcatcatcaacttccttctgatcatgtgattccggccttggcccagcaagacttggcacttccgcacatgtgcccacaaatcctgaccaacccatatcattttgcaagaattacaagattctataacgtttgcgattatagagtgtacgcatcgataagagattccgctcatcaaatacttagttga

SEQ ID NO: 4376 - DNA, 189 bp, Saccharomyces pastorianus
atgataattggtgatgctgatttggcatacgtaacaagcactcaagcgatgggccgttttatggttcgcttgagcagtatttcaacgaacgaaacagtgccgatcctaactatcaatcaagccacgatattcgatattgaccaggtcggatccctaaataatttcccatttgtatataagtatttgtaa

SEQ ID NO: 4377 - DNA, 1161 bp, Saccharomyces pastorianus
atggctgcgataacagtactaaagagagcagttactggcaccatgacgcaggctgataatcccgttcccacctgcagtgtgctgcccaagcggcagtatactgcagagcacgaaaagcccctgttgctgcatgaagaacaactgatattccctgatcatgcctcacaactatcctccgcggacatcatcgagcccattcagaagaacaacagcatggactccatcgccgggaccacgctgcggagcagtcctgtgtccttgtcctcgacgcagatcactgctctttcaggcgccattgctgggttcttatcgggcgtggcagtgtgtcccctcgacgttgctaaaacacgactgcaagcacagggtctacaaactcggtttgagaacccttactacaggggaatcctggggaccttgagcaccatagtaagagatgagggcccacaggggctatacaaagggctggtgccgatagtcctgggttatttccctacttggatgatatacttctccgtgtacgaagtcagcaagaaattcttccatggcgttttcacccagctcgacttcatcgctcaatcgtgtgctgccatcacagcgggggccgcatccactacgctgaccaacccaatttgggtggtgaagacaagactcatgttgcaatcaaacctcggagagcatcctacccattacaggggcacgttcgatgcgctcaagaaaatatcttcccaggaaggttttaaagcactgtatgcggggctggtcccctcattgttaggattgttccatgtggctatccattttcctatatacgaagagttgaagataagattccattgctattcccgggcagataacggaacatccattgacctacaacggctgatcatggcgtcatccgtgtccaaaatgatcgcatcaacagttacgtatccacacgaaatcttacgaactaggatgcaattaaagtcggacgtaccagactccattcaacgacggttgttcccgttgatcaaggcaacatatgcacaggaagggctcaagggtttctattccggttttactacgaacctaatacgaaccattccggcttctgctatcactctagtgtcctttgaatattttagaaatcgcctggaaaacatcaactctgtggcaatataa

SEQ ID NO: 4378 - DNA, 432 bp, Saccharomyces pastorianus
atgaaattatgtagatttacagggggcaacgcttatcaacgtgatactggtaggacacaattgtttggaacgccagatggttcaagtaatctcgatgacactgcttcttcatcgtttggtagtacggggaaactagactactctcaaagtaatttggcatcactagaatctcaaagtgaagaacaaatgggagccatgggtcaaaggataaaagctttaaaatcattatcattaaggatgggcgacgaaattagaggaagtaatcatacgattgatcagcttggtgacaatttccacaacacctccgtcaaactaaaaagaaccttcagcagtatgatggaaatggccaggagatcaggaattagcataaaaacatggttgataatatttttttttgtaggcttgcttttcttctgggtgtggattatatag

SEQ ID NO: 4379 - DNA, 861 bp, Saccharomyces pastorianus
atggcggaagaacaagaaatgggtgtcccagcagcctctttggcagaaatcaaacatatcattttgatcctttccggtaagggtggtgttggtaaaagctcggtgaccacacaaacagcactgaccctttgcagcatgggtctcagagtgggggtcctagacatcgacttgaccggaccgtctttacctagaatgtttggcatagaaaataaatctatttatcaaggctctgagggctggcaacccgtgaaagttgagactggttccaccggttctcttagtgtaatatcactggggtttttgttaggtgacaggggcaacagtgtgatatggaggggccctaaaaagacttctatgataaagcagttcatctcagacgtcgcctggggtgaactggattacctgttagttgatacgcccccaggaacctcagatgaacacatttcaattgcggaggagctgagatattctaacccagatggtggcatcgtagtgactacaccgcagggtgtggcaactgctgatgtcaaaaaagaaatcaacttctgcaaaaaagttgacctaaagatccttggtataatcgaaaatatgtcaggattcatatgcccatactgtgcagagtgtacaaatatcttttctagtggaggggggaaaaggttatccgaacaattctctgttccatatctaggcaacgttcctatagatccaaaatttgtagagatgatagaaaaccaaacatcgagtgaaaagacactggtagaaatgtacaaagaatcccctttatgccctattttcaaaaaaattatggatacactaagagaacaagacattacatctcgtgttgcggagaaacacgattaa

SEQ ID NO: 4380 - DNA, 261 bp, Saccharomyces pastorianus
atgtcaggaagaggtattaagtgggcaagagtttattcattggtcgatagtatgactcgtgaaacacctgaagatgtcaatgatgcaggagcaaaagatattctagaggttttaaaccttattaaaggaggagaagagaagatatcggaagtcgagcttaagctggatgaaatggaaaagaaaatggactctctattagttcagttagaaggtttgcacaaggataacgatggtttggcgaaggaatctggccagaagtag

SEQ ID NO: 4381 - DNA, 1524 bp, Saccharomyces pastorianus
atggatttaaatttcgaggaactatgctattcatgccgaacaggtgatatggataatgtggaccgactgatttccaccggtgtgaatgtaaatagtgtggataaatttgataactcgccacttttcctagccagtctttgtggccacgagggagtcgtcaaacttctactgcaaagaggagccgtttgtgatagagatagatatgaaggagcccgttgtatatacggggcattgaatgactctatcagagatacccttttgagttatgatatttccaaggccgtagatgttaagcaacccttcgctactcatatttcgtccatatataatgatgaaagctttcttaacaaagatatttcatttacacttgcaaatgatcagcaattcacagcacacaagttcttattatgcgcgaggagcaaggttttggcagaaaaactagcaaatgaatgggcagaaaacaatgtccttctcactgaagtccgcccagatatatttgatatctttctcaaatttctttacttgattcctatcctgcatgtaatccagccagagcaatacgaccagcttataaaattatcaagtgaattcaatgtggaactcttgccagattttttagacaaagctaagcattctaatcctatggaaaagtctaggctgatgtcagaatatcaatataaattcacagaggttgtaagaaaacaacttttacaatttgtgaaccattgtattttcaactctgccattgacgttgttgatgataggcaacaaactacttccttgagagactgtccggcatatccggatatccaactatcagtaagaaatcgaagcggcaatttacgaatatacccttgccatttagccgttttgaaccgtgcagaatattttaagagaatgttcacgaacaactttaaggagaaggttacatatgtaaaggccaagcatatttcaggaaaacacaacaacgtcattccgcaacttacacttcctgactgtgaatttgaggttgctgagataattattcgctatttatacgctgatagcacgaacattccatggacgtatgccgttgatgttttgttacttgcagatattcttttagaagaccgtctaaaaactattgcttcaacaattatcacacaatcaaaagattttattcagcagcacaatgctctcgatgtgctctatctatcatgggagacaagagtggagcgactggaattatttgctgctaaatttatagctatccatttgcaagagttatctaacgacccggagcttaaaagggcgattgtcttaagttcagaacgaatctcgctccgccaggaaaccgacactattgagttggtggatgacatcagatactatttactccgaaaatattccttcgatccggatgatgtggagctatttgagacccaggatgatttagagtacttgaaacaagttggataccttgaatatagaagagatatggaaactttggacaacatcttgaccgaactagggctcgaagtgtaa

SEQ ID NO: 4382 - DNA, 2187 bp, Saccharomyces pastorianus
atgtcatcggacgatatcccaaaaataccctcaaggccttcgaggaagaaaacagtggaactgactccattacctggtaaagaggctgaaggtatgaaaacgaatagtgagcctccaacaccaacaaaagggcctgctgttccaaagcaaaggcccatattaaaagcgaagacgatgacttcgtttgagagtgaggcggttgcagacagtttaccccacatgccatcacaaaggccaattagacgttctacgactgaagaactgaataatgtaatgaataacaccagcaaggagctggaagagattgagagtttcatttcaagacacaatgtacataagaaaaagagcacgactactacccgaggcggagacgcagaaacgtctgccgtccctaaagaccaacagagaagaccattgttaagtgacagtgattcttttactccagatccgtctccacgggaaaccaacaaacaggaaaatagcagtgtagacgagggtgctgaaccttccttgaatttagcgagctcgtccagtgatgaaatcacaaagactagtaactctgaaacgcgcactagacaacaagatgtaagagccgcttcagacgataatataaatgttggaggtgaattgagtaaaaatactactcctgaggacattacaccaccattagatgtttgcagggatttgaaagagggtaataatactgctccggtttcagctggaactactagatctggtgatgaagctggaaatgccactgaactcccggaaccaagatccgaagggctggagaagcacgaagaagaacaagagaaagaattatatgagaatccggctcaaaaagaaagtatcgggtctaatgaaaaattagaaattaaaaacaatacgaaagaagacttacaggagggaaagccttcttctcctggaacggttactctagccgtcgactcaaaggtttcttcacaactaaagagtgaagcggaaaatactccagcagttgactcgcaggtttcttcacaactagagattgaaccagaaaatactccagaggtcggcttgaaggtttcttcacaactgaagagtggaccggagaatactccagtggttccacaaagtagaccaaagaaggatctcgattcagatgtgaagaaggaagagtcatcaaaccaggaaaatgaaccctttccagaagagcaggacacaactgaggatgatattgaagcaaaagatacaagccccaaagtccccgttgaaaggcccagaaaacgtgccccacctccagtccccaagaaaccttcttcaaggattgcagcctttcaagaaatgttacaaaagcaacaacaacaaggtttacgaaacaacgaaccttcactatcttccaccagttcaccggataccgcgaagcaagaatcgaatccttctgccgctggaaacacagtaaaggctgattttacaaacaaattgaatgggctgtttgcgctccctggtatggtaaaccccggccagcttccagcttctctaggaaaaaagttgtcctcacctagcactgaatccacaggagagcaacatgaacaaccacaggcaaggagcacacctttaagtggcactaggagagccagagggcctcgtggacgtaaattaccttctaaagttgccgctgtggagaaggttgaagaagacggtaataaaaacggtatagaaatcttcaacatttggcatgtttactctatcccctctaaacaagagagttctggagatattattccggataaggaatcagaagtttttccaaaggagcaaccaaaaaatacctcggatatgaagccaggaaacactccaagggcggaaatagaacactcgccgaacgagacagtgaatgctattcatcccatcgatctggaggaagagaaagagcttactgccaatgttgaaccaatacctctttctccgttgccgcaggcgtccaccgtgcgtaagaacgaaggtggaagggaagaatcgttgtccccagcggaggctattgccagtagagaccaagatgatgtgacagagatactagaacagcaaatggagggcctaatggaatcggaaatggaggcggaactctcgggtggctacgaagacatcgattctgctttgcattcgaatgacacgtccgccccctccacactagaacctactatataa

SEQ ID NO: 4383 - DNA, 1419 bp, Saccharomyces pastorianus
atggtggccaatagaaaacacagagtccgtgtgcttgtcgaagtatgtgtgcgagttgttggacatatcgacctccaaattgtcctcctcatcttcgttacccatcgcatcatcgtcactctcctcttcaatgtccataggagcgtcctgttccgcctccacagagggcacaatctcttgctcaacttcttcggtggtaataaactcttcttggggctccatcatgatctatacgtcgctatacggtgctcttttggtcatcagaagacctcatctggaggcatcgaatgtatttttctagatattcatagtgaaaaatttgccagaaaaagaaacggcgggcgggttatgcggcgaacgagaaagtcctacttaaaaatacctttagtatacatttctcacttgaaaggttcgaaggtatcagcaaagaaagcagcaaacacaagacagtatagcattatgatgggatttgcgtggggttttaagcccgctggtaaggtgtctcaagacacagcaggctcacagagctcaggccacatggtggtggcaaattctgtagggaaacagaaaagacggtatagcaacgaggagcaacaagaagaaccctctcggaataagtgtatgacgaaattcggaggcgtctccaagaggaggccccatccgagctcactaataagaggtcagcctctgcccttgcaacgaggcatggaattaatgagcaaagagcaattacagcagttgctggtggacctgatgacaaagcatccggaaattcaacagagtgtccacacgaggattactggactggattttagtatacaaaagtgttttgacgttttgaaacagaaatccgaagccgtttaccaaagcataccttacaataggtcctacgagagtaataagttggacgactacgcatttgtgagaatgaagcctcaaattttggagtttttgaactgtttagtggattttatactggataacatcccaccacggctggaaaacttacacgcatcgttaaaatttttggacatctgcacagaattagtcattaaattaccaaggtttgaattggccagtaacaactactactacgataagtgcatcgaacaattatcgcacgtatggtgcacgctcattgaacatgtcgcccgagacaggctaatcctcttggcagataacagctctgtgtggaaaactcacatgacaaggttacaaatctataatgaacaatcgaacggattattggaacgccctcttcaactgttcaagtcattagacatgggggcttctcctgcatcaccatcatcatcatcatcatcatcatcatcatttcaagagacgatcatttaccaccacgataccatgaccaacgaaaataataacagtggtaacactaatgattcacccttcaactaa

SEQ ID NO: 4384 - DNA, 777 bp, Saccharomyces pastorianus
atgctaaaggagcgcacagcaggcatcagggcaagagaccggaagacaatgctgtatttagagtgcgacaatgtgcgacaaaggtccgtcgttgccaacctgcagaagttcgtttattgctgtctgtacatacggttcattaaagacggatcggtgctcctgatcctcatgggatgggtgatttcgtcgctgtgcgagttcgtccaagaattgacgctgagatacctgaagaagaactacctgcaggcggaccgtggtgacgagcaggatgacgacgaaagcctggccatcagagggctggagacgcccattgtaagagtcatcataaacaaggccatacggtactaccagggactgatactcctggagacggcgtactgcatagtgtaccacatcaggctggacgtggcaagggacatatgttcaaagccgtacgggttcgtcgtgatgctgctgataagagagtttacgtgcccggcgccggcgggattccccagcaagctgctgctgctggtgcttgacttcgcggtgcttttcggccagcttctgatcatgaacggttcgttgagttccagtttccaaaacgtcaagctgatcgtcaaggagctggacgcggacaagcaaggcgccctgaacctcctcaagttcaacacctggcacacggacgccaacgggcccgagctcatcgtccaccggaaccgcgatgaacccttgccccaacacctagatacatataccgtcgacgagtccacacccttactaaacaataccgaataa

SEQ ID NO: 4385 - DNA, 504 bp, Saccharomyces pastorianus
atgtcgcaggacctgtccagggcgctggagatgtcttcgttgtgctccagcccgcccgcccgggagcgccaccgcagctccgtcagcacgatctcctcgattctcctccgcccggggagagccgacccggacgagacggccaggagcctcagcgtccctgcccctgcggagcacgagcggccgggcttcttcgcaaaggcctccagcatcttcttccgcagaaacagcacgcccagagatcagtacacccaggccgtcccgggaaccgttaaccgccaacggcctcaaccggccctcccggcggctaaatccgcagccgccgactccctgcgccaccagcagcagctcgaggacggactgtacgcccgggtgatcgcaaacttccgcgccatagggtggtgctcctctcgcgaaatagagtcggtggaatataaacggtctttgatcaatgcgcagtgggacgagaagatctcgctcttgtcgcacgcgcagtgctataaataa

SEQ ID NO: 4386 - DNA, 546 bp, Saccharomyces pastorianus
atgagcatgaacatggacatggacatgaacgtgaacatgaacgtgaacaatctatccgaacatctacagagcctgatctcgaacgactcggagctgggctcgcgtctactatcattgctactggttagcagtggcaacgcggaggagctcataggcatgataaacagcggccaagacgtgtcgcaattcaagaagctgcgcgagccgaaaaaggggaaggcggcaacggcaacggccacggcacaggaagaggaagaggaagaggaagaggaagaggcgcccgtgaacgagctggacaagatcaagcaggagcgaagaaggaagaacacggaggcgtcgcagcggttccgcgtgcgcaagaagcagaggaacttcgagaacctgaacaagctgcatggcctgaacgtgcagatcaacaagctgcgcgaccgcatcgcgcagctgaacaaggagaacgagttctggaaggcgaagctcaacgacatcaacgaaatcaagtcgctgaagctgctgaatgacatcaagaggcggaacatgggcaagtga

SEQ ID NO: 4387 - DNA, 705 bp, Saccharomyces pastorianus
atgtccaagatccatgtgtccaagaactggaagctgcctccaaggctcccgcaccgagctggccagagaaggaagagacccctcccaccccacgacgagtacgagtacgagggcgagggcgagagcactgggactggcaacgaggagctccagaaaaagaaacgccagaatagggacgcccagagagcatacagagaacgcaaaaataacaagctgcaagcgctcgaggacaccatagagtctctgagcaaggtcatcagaaactacgagtcgaaactctcccgcctgcagcacgagctgcaagacagcaactccgaaaaccgtgcgctgcagtcgaaactggacgccctcacctcgcggcaggcctccatgcccgcccaggaccccattctgcagaacctgatcgagaatttcaaaccaatgaaggcaatacccataaaataccagcaccgcaaccgcaaccgcaaccgcaaccaccaccacgggccaaacgagctgcccaactccgcgaagtgcggcttttgtaacgacaactccacctgcgtgtgcaaagagctggaaactggcgccgacaaaaatggcgccgcgctaaaggattcctctccgcctcattctcactgcaacaaggacaactccagtgggctctgcagtaactgcgcaaacatcgacaagtcttgtatcgacatccagtccattgtccattga

SEQ ID NO: 4388 - DNA, 306 bp, Saccharomyces pastorianus
atgggggtcaactggcaccagaaggcattgatgaattcaggattgcaaatggctgcaaacagacgaggtttttcgtctgtagaagaaagccgtaccccttggcatttggcgtatagaagatgttccaggatgtttgattgtagcttgtctgtgaagtccattaggggcgttcggtacctctctatggagacaaaattggtcattttgggtgataccccaagaagagatatgatcttttcggtcgcgaagagcgtatcggtgggcaccaaccccatacgttgtttgttatcgggtgcaaatgtataa

SEQ ID NO: 4389 - DNA, 312 bp, Saccharomyces pastorianus
atgctctgccaattgaccaaactggtattgaaattattgtcaatagtcatcttgcaaaatgcaaacgaattcttcttcaataacacgctaaacaggttgattttgccctcgtcaatcaaacgggtcctcaattgctcaaaaacggcacaacgagccaccataaagcttcgcaccggtgtttttctatcatgcgaactcttattgcacaggatcaaagacatgtattttagcgttttcaagtttgccttgcggcaatacaagtcaatggcggggaccacagaccgtgctaagttctttggagacatttcttga

SEQ ID NO: 4390 - DNA, 1098 bp, Saccharomyces pastorianus
atgtctccaaagaacttagcacggtctgtggtccccgccattgacttgtattgccgcaaggcaaacttgaaaacgctaaaatacatgtctttgatcctgtgcaataagagttcgcatgatagaaaaacaccggtgcgaagctttatggtggctcgttgtgccgtttttgagcaattgaggacccgtttgattgacgagggcaaaatcaacctgtttagcgtgttattgaagaagaattcgtttgcattttgcaagatgactattgacaataatttcaataccagtttggtcaattggcagagcataccaatcgattatacatttgcacccgataacaaacaacgtatggggttggtgcccaccgatacgctcttcgcgaccgaaaagatcatatctcttcttggggtatcacccaaaatgaccaattttgtctccatagagaggtaccgaacgcccctaatggacttcacagacaagctacaatcaaacatcctggaacatcttctatacgccaaatgccaaggggtacggctttcttctacagacgaaaaacctcgtctgtttgcagccatttgcaatcctgaattcatcaatgccttctggtgccagttgacccccattagggcctcgttaaagaaaaatcgctttgttgctgtgcctcaggaatttcaaatacaggatgcgtctgtactgactgctataaaggagattgtcacaaagcgaatattgcgatccgcttttgatggagacaccaactcatcaaagggtctgcatttggatagtagctggaagttcaggcttcccatgctggcctcgacacccgacctcgatttctgcctaaaggattgtcttggcttggatactagagaagatacattcgacatgacggaagcattcctctctaatatggcttggagtaacagtctttgtacgtataataacatagcgaacattgtgatgaaagacaacggtagattcgactcgggcattttaaaggagttcaataactacatcaagctagaaaagactaatttacaagacttccaagctatctcgtcggaatttcttaaagacataaaactaaaaccctatatgtag

SEQ ID NO: 4391 - DNA, 1113 bp, Saccharomyces pastorianus
atgagctattccacaccgcaaaaattcaagtcaaattctactttaactttagcttattttgcgacagaaatcacactacataggaaaatcatctgcaccttaacccccctaacaccaaaggaactggtccaagtatgcaggactgcagcaagaacaaggcttgttgctgcaattgaattcataagagaccttaaaaatgagcatatcaactccttttggtacaattgttccacgggaagcctgatgctgattggtacatttgctgctctattgtatgtgacttcaacaacaaaggaggaggcaacgatttttagagattacctcagaaattatatttgggtattgaagatcgggtccaagtattttgaaaagttgtcaaatgctttgaataatatgcatttattgtttgcccaaattcctggtttattaaccgatgaaccaatgggcttgagccctaactccaacatcaatgctgtcaacctgccacggtctggcacccaatcgcaaatcccaattcagtttaatgtggggtctcctgcgataactgagcaaggttcaccactaaaccagtggaaaaatctaccccaagaaatcctgcagcagttgaactcctttccaaacggtacaaccactacaacaacaccaatgaaccctactccaaggcaaacgcaattagaatctcaagggagtccgactgtaaacagcgctaataacaacagtaacgatacacccttaccgttgatgctgaataaaccctacaaaaggactgctcactcttcaccgaacgttacaccttcgcatatgaataaacacccagcatctaatacgtcttcgccaagagttaattccattgcgaacgtgaactccagtacacaaatgaatgccccacccttgagctctatacacgaacccagacaagattcaacaagtgtcgtagcaaacgaaacatctataggaacggaaaggtcccccaatgagcattcattagcagaactcaaaggcgacaattcgaacctaaaagaggaaccaagtgcggctgacaaccaaactatagaaatgaatgaagtcaatgataaaaatgtaacaattaacacaaaggaaacccatctgtaa

SEQ ID NO: 4392 - DNA, 1542 bp, Saccharomyces pastorianus
atggaccctcaccattcaccaactggtaaagccgcattatctacgaaaagtgtggagactgcccctaaaaactcgtccactaataacaatgccaataacaataatagtaacattaacaataatcatgacatactaaactttaatgacaactatacaaccatcctgcaacacttggcaaacgaccatcctaatttattgagggaaaaggggagctcgcaacagcagcagcagcagaacctggatacgcttttacatcattatcaaagcttgatttctaaaagcgataatgcggcagcttttgaggacaatgttaacaatagcaccgacaataatgcacatagtaataacagcgccaataacaataataataacatagcaagtccaagcaacctgatgggatcctgtaaccaatgtaaatcgaagaaattaaaatgcaactattttcctgacctaggtaattgccttgaatgtgaaaccaacagaactaaatgtactttcaacagcacgccaaattacttgaagagaacgtcttctaatgcaaataataattttacagcttcttcgcattccaaacgaatgaagaatcttgaagaatatccgaatcgcctacctagcagcatgctgtatagacagcaacagcagcaacagcagcaacagcagcgcgtacaataccctagatcttcattcttcgtggggcctacctcagttttcgatttgaacttaactaaacatgtaagattagacaacgtggaccaaatacaactatcgaaaacattatcattaagaaaagtttctcccacagcacagttcatcctacaggacgattttgactctgctctccatagcaaacaagaatacgaggttgatctagtggagaatctagtgcatccacatggttatctattagtagaaatttttttcaaattaattcatcccttcctaccgatcctacacgaacgtgtctttttagagaaatactctaggtcttatagggaactcacagcacctttattggcgtccatctactcgctagcattacagtattgggactttcaccctgctcttttaggatttcctaaaccagatgtcgtatctcagctaaacagtatcgcgctagacacgttttacactcgagttggaagaccaaaattaagcattattcaaaccggtcttttaatcttgcaatgccgcagcgagtgtcataacaattgggttctttgttccagtgtagtagcccttgcagaggaactgggccttggtgtggaatgtaatgactggaaactgcccaaatgggaaaaggatttgaggaagagattggcctgggcggtttggttaatggataaatggtgtgcattgaatgagggaagacaatctcatttgattctagggagaaattggatgatcaagctgttgaatttcgatgacttccctatcaattcaccaactatcctaaattctttacaaaacgaccaattggcatcttcgccttcttcgtcaggcgatgtgagaaaccatcaaataggggatcctctagagtcgacc

SEQ ID NO: 4393 - DNA, 72 bp, Saccharomyces pastorianus
atgatcatgaaccaaccaggtgatttaaatgaaattgctaaagagaatgctaaaatcccaaaatttctgtag

SEQ ID NO: 4394 - DNA, 1473 bp, Saccharomyces pastorianus
atgactgagtttaatatcgatccaaacaccattactaaaagtattggcttgattatcgttttatcatatcttgactttgccttagcacctgcactcgtcgatgtgacggttctaaccgttaatctcatgggactaagacttcttattagcctggttcttaatggaaatcttactaaagacatatttttattcacctgtctatatatggtctctactttctctgtcttttacgctcccccaattccttggtcagatcgatgttatataaaaatgaggatgcgtgaaatagctttatcgttacgactcgtttcaaaaggaattaaaagagcatataacaatagtaaaagaaaagaagggggcaaagaaatggtgagagcattaagagatatagcactattcaacgacattaggaaagatcaaaactccacggggaccaagcatgaaaggtatagcataagagatcttcgggttaagaaaaacattcatggaaacggcttagatgacgatgaggatgattctctggagagatttataaggagaaagaaatctaaaagcataaaatatattccctcattggcggcctataacgttttcaatgagtttccttattatcctacatcgtctagtcaattacaagagggcaggttggacgaatttatcatgctatcagagcaatataaaaacaggttgcccagaatacgtaagctaggatggaacaggttcaagccaataggcattaataaaaccatgcatgatctagaaatgttacgagtccgaacacaagcacaaaacgaagaaatgaataatgaggaagaccttagggaacaagatcttagggaacaagatttcagagaacacggctctatagggcatgcagtattgccccatattctacaggaaaatgatgatgataccgatgaaggtgttgctggtactcataacgctgtgaatgatggtataaccatgtttactcataacagcgctaataattcacatgaagtaatttctgaggaagacgagatatcttatgattacgatgcagaatttgatcatgttgtagatgaggaagaggatgaagaagccgaagtgcaggaaggaggaatagaagtcgatagggaaaggattgttccggatgacttattaatgaggtccacttcattatcacgctccttacaacaattcgtggaagaggtccaccgtttggaccgaaatccatatgatatcgacagcgataatgacggagaggactcaaagatagaagtaggtacaaaccccgactttgaagacgaagacgaaaccaggagagaagtaagggggtatgattataacagtgagtacgctcaagcgcccgcttcctatggtgagatcacacctgatctagcgagcaattggagaaattggaccagagaaagaataactagcttagatgaactaatggaaagacgtgccaggcaacaacggggcgaagactaa

SEQ ID NO: 4395 - DNA, 1071 bp, Saccharomyces pastorianus
atgcccctgaatgctgtccctccgacgacgaatgttgagaatttccatgctaaattgaatgctgctcgaggccaactgtggtgcgatgttggctttttgggtggtcttgtcccagacaacttagcagacttggttccgcttgtaagggccggtgttcgcgggttcaaagggttcttgctggattcgggtgtggaagagttcccccccattggtaagaagtacatccaagaggcgttaggagtcttgggtcaggagaacactatgatgatgttccacgccgaattgcccacagcggatgcccatcacgaggaaaacagtcatgaatattcctcgtttctgtcttcaagaccggattcttttgagattgacgccatcaatttgattctcgagtgcttgtgcgctagagatggaccagtgcctcccgtacatgtagttcatttggcatccatgaaggctgtcccgttgatcaaagaagcccgtgcttcagggctacaaatcaccaccgagacctgtttccactatttgtgcattgcagcagaacaaatcccagacggagccacttacttcaaatgctgtccacctatccgttctgaatctaaccgccagggcctatgggacgcattgcgtgatggtgtcataagctcggtagtgagtgaccattcaccttgcacgcctgagttaaagaacttgaaaaagggcgattttttcgattcctggggaggaatatcgtctgttgggctgggtttacctttgatgttcacccagggctgctccttagtagatatcgtgacatggtgctgtgaaaacacttccaagcaggtgggactggctcaccagaaaggcgctatagctcccgggtacgatgctgactttgtggtctttgatacagagaacgaacatatgataactaactcaaccgttttcttcaaaaacaaactgacagcatataacggaatgaaagtcaagggtattgtcttaaaaactatactaagagggaaagtaggatatacaaatgttgatggagtgacgaaagcaccattgggccagactctgctagagcccagaaagtaa

SEQ ID NO: 4396 - DNA, 153 bp, Saccharomyces pastorianus
atgaatggtctggacgacaaattaggacagattaaaccagggttctttgccgatttattgatgatgaactcaaatcccttagaaaatattgagattttggatgaaccagagaccaatctattgcttgtaatgaaagatggaagaatttactaa

SEQ ID NO: 4397 - DNA, 2286 bp, Saccharomyces pastorianus
atgaagaaagcgaaaggtaagaaatctagagttttggtattatcgagagatgcgggcaccaatgaattaaagccaaccagagggagaactcatcgagcctgtatgacctgtagaaagagaaaagtacggtgcagtggacaaacaccatgtagattttgtcacactaacaaactcgaatgctcatatgacaggcctccacggaacccaccggcatttggtagagaattaagtgaagataattccctgtactctcaggaaacctcccagcaaggcgatgtcctcgctaaaagcagtcaaagtaccgttgattacaaaagtattgttgaggcgataattccacctgaggcgcttcatcagatagtcacttctccttctttcaacaatgagattttcttggagactgtcaaagcatattcactacagggtcaattggatgttaacaatataatacgtgagagtctaccaaaaaatactccgtggcgcatcaagacaagcataccgttacctcccagggatattgctttgaaatttatccaaaagacttgggattgtgcctgcgtgctattcagattttaccatagacctacaatcatttctatcctagattctatttacgcagcagaaaaaattggcaaggagtatactccggagcaagtgaaaacgaaacctctgatctactctgttttggcggtcggagctctcttttccaaggatgacttaagcaaggatagtaatgcaaccagggaattctatacggatgaaggctataggtactttttagaggccaaaagatctttggatttttcgaacattgctgatatatattccatccaagccatatttatgatgaccatatttttacaatgctcagcaaacttgaaggcttgctattccttcattgggattgctcttcgtgcagcgctaaaggagggtttgcatagaaaatcatctataactgggcccactgcgattcaggatgaaacaaagaaaaggcttttttggtctgtgtacaaattggatttgtacatgaattgtattcttggtttcccaagcggtattgacgaatctgatatagatcaagaatttcccctagatgttgacgatgaaaatatatctacagcggggataaagtttcaagattggcgaatgataagctcttgtggaatgaacaatgaacacacaaagcttatattgattatgtctcggatttacaaattaatgtattctttgagaagaaagcctttggaggaagattcgagattgcagatcgtatctctaaatgatcaattagaaaattggtatgcgcaattacctgatatattgaaagttgaaaaaataatctatcgtgagccacaactaccactacatatttgcgcaaatgatagcagttctccatacacgaaacctaaaaaattgctgtatctggactttctattatcaaaaattgtactatacaaacccttttaccattatatatccatagacccactagatgtcccagaattccaatttcaaattcatatggctgagaactgcattgaaatagccaaaaaagtcatccagttatcttatgacatgattgttcaaaatcttttgagtggtagctattggttttctattcatacaattttctttagcgtcgcatgcctcaagttctatgtttaccaaacagagaaggggttaatacagaagggcaaggttgactcagacatatataacgctacacagctaggcagtgaaatattatctcttttgaagggtgcttcaaacgcaagtgaacgaacttttaaagttttgaaccaactattcaaagagttcaacgaaaagacctctgtactatctgaacaaattctaaacatagtcaagttgcaacgtcaggaaagcagcggcactttaagttcaccgttaaatacaaacaatagttttacgaaatgcagagtaccgccacaaaccggacagatatccggacagatatccggacaacaacagcaacaacagcaacagcaacaacaacaaactccagccacgagccttcgttccattctaaatttcccgcaacaagagaccgatttacgttttcaaactgccaacaatggagttcatacggcgactactgcgcaggaagaatacctggataaacttctagcagaatttgaagagtttgattattcaattaatagagtgctgccagatgtcatcgatttttccgcactaattggccctgatactgctgttaacaaccaacttgtcagttcaaattacaattccaatcccacggtcagctga

SEQ ID NO: 4398 - DNA, 456 bp, Saccharomyces pastorianus
atgttattgacgtttatatcaatcatcctggcctcctgcacgctgccaattctgttttccattagagccatttcttcgagaatttcacttactatatacaaaaaatgtcaacatgaaaaagacgccaaaatcaagccgtgcgagatgatgcgggtgcgttattatgatgtactttcagcgtgtatatacttctatctaactctggcttgttttacttatttcttgttcttctttagccttgtctcccctgctgctctaattttacgtttcttacttccaggggctcctcccttagacttcacctggtccagggccgccttttgttcttcattcactggactgacacggtcaaatatcttcatattgggttgtactcttcgcagcctcatctgggataaatcgagagcatctaccaatgtatctgtgtggtcaggaataaagaatttcgccacttga

SEQ ID NO: 4399 - DNA, 1845 bp, Saccharomyces pastorianus
atggctctaatggaaaacagaattggcagcgtgcaggaggccaggatgattgatataaacgtcaataacattttttttagatcttactcggttgaccccaactccggacatgcgatttatgtctttgactcgacgtatttacctgcgcccgatgaaatcggtgataagcaggtttatgatttacttattaatgcacttatggatcgattggtgatgaaattgccacaggcaccgtattcgctagtaatcttttcatctgggttttcccagcgaaaaattagctgggtttacggtattaaaatgtttgccaaattgcctaaagagaccaagttctatttacaaaagatattcattgttcatgaatcattttttgtcagatcggtgtaccaagtgctctcaaatgccatgaatttcaatttcttggactcaaaggatagtcagcatgattttccgagtctggttcatgtcttagatctgacttctttatccgagctattagatattacacggctcaggatatcgttgaacgtgtatttatatgactatcagataagtgagcgtatagatgtttcggaggaatattataaccgattgacgcctttggcgataagacagtatagacaattaatatttgacaaaattttcaagaaattgcaaagcgatgctgtgatgtgtgaactgattttccaaaaaccaggaaactataaaaaggtaaacattttcttagacattatcaagagaaacaactatattgatttgtctcaatgggacatttattcattggcctccgtgtggttgaacttttttatcaagaataaggccaaggctttgattcctattgaattgattccgttaccaattgttgatgatttcatatccacaagagaaacatttcataaaatcatcaaatttaatcagtatcaagacctctttgtggtgatattccccttctttaacacgattatagcgcatggtgaggtgactaggcatgactcaaggacgttaagtaaagctttgacccctgcactatgtaaggagaaactctctatcatgactaacgaccgtttagccattggatcaaggtacattaaaaatttgttagattttttccctgaaatcgtgaaggatataacatcgtctttgtcatcggcatcatcatcttctacaatacctctattacctaaaccaagaaaatcatccccaaccagatacagcgaattgggttgcttaaccttacctagaagtagaagtcccagtccacagagatccgttacgtctccaatattcgcacctgtagcattacagaatacaccaatattaaaacctgagtcatcaaatagaaatgtttcctccccattaattaatactaggcctttgcccccacccaagacacttctacaaccacagttgtcactaacttcccgttcaaataccgatttaacattagccttgtcttctacagataccttatcttcgccaacaaaaacaccatctactgagttacttccaatgagcaacagcagcacagatttgttgatatcggacactatcaaagaaatggttaaggatgagcctgtaaaggacaaaaactccacagacacagatgcgttgatacagcagttcgagagtttggctgttgagcaaaattcaaagatcaaaaaatttgataaagaattacaggaaaagaagaggaaaagtgaaaatacttcaaagatagcagacaaattttcccaaaagggatattcggatattaaagcaggtaataaagtcagtaggctagctgcattatacgaagaacgtttgcaaggtttacaagtaatgaatgaaatgaaacaaaagtggtaa

SEQ ID NO: 4400 - DNA, 945 bp, Saccharomyces pastorianus
atgcaaacatatacgctaagcacttcgaaaaaattttgtctcgaggaagtcgctaaatttcgcccaacggtggatagaccttttttcaatatttatctgtgggaccatttcaacgatgcagtcaagtgggtcactgcaggccgttttcagcccaagaattttgagtttgtggcaggagagctacctttgagtgaggtaaatagcgtgcttatcttcattgcattttactatgtggtcgtctttggtgggaggtatctattaaagtcatgtaggcctctcaaattgaccgttttttcccaaatccacaatttgttgttgacttctgtttccttattgtggttggtgttgatcgtggagcaggcggtgcctatggtgtatcgccacgggttgtacttcgccatttgtgacattagatcttggacccaaccaatggtggcattgtactacttcaattatatcaccaagttcgtagagttcacagatacgattctcatggtattgaagcataagaggctgactttcctgcacacatatcaccacggtgccacagccctgttgtgctacactgaattggtcggttacacagcagtgcaatgggtacctattattttgaacttgaccgttcacgttctcatgtattggtattacttcctttctgctagcggagtctgtgtgtggtggaaagcctgggtaactaggttgcaaattatacaattcatccttgatatgattttcatatatttcgtactttaccaacagaccgtcgccgcatatttcatggactctggtctacccttctgcggaaagtgtctgggttcgttaaccgctatttattctggtgcagccatcgtcacatcttatctgtttttgttcatttccttctatattgaggtttacaaaagtggtggtgccaaagataaaaagaagattgacaggaaagcttga

SEQ ID NO: 4401 - DNA, 453 bp, Saccharomyces pastorianus
atgtttttgatttgcaaagtggggccattcaaatcttggaaagaatcaaaaatcttttggaaaatggaagacggatcgcttagtgatatacagttaatactggtcaccgccacagactccagtctaccatcaggcaattcaaaccaagacaggttctgcaagtgcgggttcgtgtgccttggtgggtgggccgaacttgacattgatagtgacagtggtaatgattggaacttctgtcttataatcatgtccatctgggcagttttgccggtgcctggtggccctgtgatgtatagcgaatcagatttgtgctcagagatagattcggacaaaaatttcatcacatgctcatattccttggttcttgctggtaaagcaccgccattgttattcaaggttaccaactctgatgatttctgcagaagtgccttcgtccttaggaagatagattga

SEQ ID NO: 4402 - DNA, 279 bp, Saccharomyces pastorianus
atgaaggttaaggctgacagagatgaatcttctccatacgctgctatgttggctgcccaagatgtcgccgtcaagtgtaaggaagttggtatcaccgccgtccacgtcaaaatcagagctactggtggtactagaactaagactccaggtccaggtggtcaagctgctttgagagctttggccagatccggtttgagaattggtcgtatcgaagatgttaccccagttccatctgactcaaccagaaagaagggtggtagaagaggtagaagattatga

SEQ ID NO: 4403 - DNA, 120 bp, Saccharomyces pastorianus
atggctaaggctaagaagcaaaacagaccattgccacaatgggtcagattgagaactaacaacactatccgttacaacgctaagagaagaaactggagaagaactaagatgaacatctaa

SEQ ID NO: 4404 - DNA, 1809 bp, Saccharomyces pastorianus
atggaattattaaagcgcgaagaggaaaagacgatctcgacgttaaaagccattatttatggttgtcaaacatatggatcgataccgcatcatttacatgaacgtttaacaaaggtcgtcagtgctgctagatcgatcgtcgctacttattcatttcacggctcaatcggtggtatctcagatgtgagggcctatctctcagtttggcttaaagatctgggggttttacgtttatatcaaacgattctattggaaagtatttccttgatactcgatccagctacacccatttttaggaaatgctcggaaatggatgattttccgcatttgattatacgtatttactccagattagaaggctaccagaaccttataaacgataaaatattagccaagttttttgtagactttgattttacatttagggccgtatacaataaggcaaactgtaccacttacacctatgataacgttcatcttatatcggacgaagcgtatccattggttgcgtctatgaagataaatcttacgcatgtcatcaaaagaggttattttagactctcaatcccgacattaaacgtttccgatatattagtcgagatccttcatatacccgatggattggcattttttaaagtttgctatggcaatctgcccaattcggatgattctatcaaaactattttcaacagcgtttctgaagagaatcaccaaatcctagaattgggaaaaagtttgatgtatccgattttcaggattggagatctagagatcaacaacattaatgaaatcggagcagtgataacgttttccgaagtggaaaacttaaaattggaaatacttagcctggatcaaatctcatggataacacaatggaaatcgagtttccaaaagttcgcagcaaaggcggctaatgacagtacattcatcaaaggccacatgagattcaataaactaaacaacattgatgaaattaatattgggctaggtctcaatctcgatgtggaggcccaaggagagaacttcgtaccattatctgcagaaaacaaaagatcctcgccctcaaatacagtttgctcattacacaggtcaaaacctctacaaattcctttatcgtttgctattcaaaacgattttgatgatatttctttgaaggggcatatatccctcgatgaagatatcagtgatgaatctgttagtggtttagagagtagtatatcagactatgagtttcatgacaacacgtttggtagttaccaatcaatttcttacccttctacggatgtagaaaataactcaatggacatggtaatcaccgatgaaaacactgtcctttctatcaagaatgttcgaataagtcattggtcaaacaactcgtggaaaaaaatctcttcggctcaactgcaactcagtgttattcgactacgtatgggaagctttatggtagctcatgaccctgagttcaagaatctccaccatttgattattcgtttgagtgatgatataaaatgtacgcaatcaacaaaacaggacatacaattacgtgtcccaccaaacgaattaatgtgcacctttaccggcattctgaatatcaggtctagcgacaacgataagttactaccattattaaacttttatacgacatgccatgcggaaactatgtcacattcaagcaccatggaatctgtttcaagtgaagtttcctctgtttcatcagcgatggaacacaggcattcgatactgaagtgctcttcagtaataataccccatactttgacgcaggacgtcatcgattcaacacttgactag

SEQ ID NO: 4405 - DNA, 798 bp, Saccharomyces pastorianus
atggtatcaaagagttggatttgcggttttgcctgtgcaattgcagtggcccagtcgttatcctgtgagaagcacgatgtattgaaaaagtaccaagtgagtcaatttagcacgctgggttctacagaaagagacaccccgccaagcaaaaccactgaaaagtggtgggttaacgtttgtgaggagcatactgcagactcccccgaaggctgtgataaggacgatatgctatgtggcctaacgagtgttatgttgcctgaaaacaaggatgctatcactactcagattattgattttaacagaaacataccctttggcgtcgaggaaactgagaatgcactgtcattgtcattaaagggcaccagatgggggtccaacgtcatcgacgcagtcttggaattccagtgcaatgacaacatgaaagaagacgaactggtttccaccacatgggccgataaaagaattcagctgaccataaagggtccctctggttgcttgaagagcaaagatgacaagaaaaagggcgacgacgacaaggaggaaaagaagccagcaaagaaatcaagcggtgcttcatggtttacttggttattcctatacgccttactgtttacattaatatacctgatggtcgtatcgttcttgaacaccagaggcggctccttccaagatttccgtgccgagttcacccaacgttctactcaatttttcacttccttacctgaattctgtaaagaagttgtctcgaaaatattgggtagaaacactacccaaagaggtggttacagcgccgtttaa

SEQ ID NO: 4406 - DNA, 324 bp, Saccharomyces pastorianus
atggcaagatacggtgctacttcaaccaatccagctaaatctgcatctgctcgtggctcttacttgcgtgtttctttcaagaacaccagagaaaccgctcaagccatcaatggttgggaattgaccaaggctcaaaaatacttggaccaagttttggaccaccaaagagctatcccattcagaagatttaactcctctattggtagaaccgctcaaggtaaggaattcggtgtcaccaaggccagatggccagctaagtctgttaagttcgttcaaggtttgttgcaaaacgcagctgccaacgctgaagtatgtttaaaatga

SEQ ID NO: 4407 - DNA, 279 bp, Saccharomyces pastorianus
atgaaaggtggtgttgtttttgattctagtgggaatgttgtctcttttatctctgatgacactacttttggtcaaactgtttctgcagacgctgttaatgagttgttagctgctattcctcaagacgaaacctactcttctcaattaatgagtatttctgctacggctcctactacttcatcgaaatccaacggtatttctttaacaaagatgcaaaacggtgtatggtattacattatggccatttttactgcttttacacaagtgtttttgatttga

SEQ ID NO: 4408 - DNA, 639 bp, Saccharomyces pastorianus
atgttgcaaagtatagtcctttccgtgtgtgtgtgtctgttacacacagtcgctgcaagcgggcctcagtcgtatcagaagctggatttcacgaacgtgggttttgcaggtacgtacaatagcgtaaaaaagtttacaggtatcactaacaatgatacatgtaattgtgaagtgggtgacaaagaatggttttctggtgtaaacgccccattggctgaatacttgtctgttcatttccgtggtccattaaagttgaaacaatttgccttttacacttcccctggattcactgtcagcaacaatagaagctcttccgattggagccgttcggcctactatgactccagctcgaagacagctaataacgtcactttcttaaatcatggaggtgaagcttccccttgcctaggtaatgctttgtcgtatgctagttccaatggtaccggtaccgccagtgatgccactgttttggctgatgatactttaatttcttctgatgaagaatatataatctactctaacgtttcgtgtccaaaatcaggttacggtaaggattgtggtgtttaccgtagtggtattccagcttattatgggttcggcggtacaacgaagatgttcttgtttgaatctgaaatgccc

SEQ ID NO: 4409 - DNA, 705 bp, Saccharomyces pastorianus
atgaacattcttttatcgtgtaatatttatgttctagtaccagcaatttctcagaatagtacgaaaaacaacatgccaatttcatccagcagaaagaataaaatcagacaactaaccgcgcctttcgaagatgatgagaatccctggatgaaaaaataccattgccaatgtaaatcatgtcaaatgagcgcatctatgcatccttggttaccaaggtttttcattttcggcatcctgtgccccattttctggttggtaaatcttttaggttggtggtacctgcaattttggcaaccacacgaattggaatttcaaaactttcaagaagacgagtaccctggattctatgaacgtgatatcgtcaagaaaagatcactagtacacctgaagaaagaagtgctacaagagatccgcaccattcaagatcttagcgatagcaacagcgaagaagacctaaacaacgacgatgtctacgacacacagtcgtcttctgtaaaagcggacccggaacaacccgagagcgatgaagaggcactagagaagtaccgctacgctttcctgaagaaagtggctcatgatatcttggcgacgcacgattcattacgtaaaagtttccgcgactggaatctgcgctctttgcttggcatcgtcatagattctgtactgatattgtttatagcccttctctgtaaggaaactcgatag

SEQ ID NO: 4410 - DNA, 132 bp, Saccharomyces pastorianus
atgaattctttaaccttatgctttttctctttgcttaaatcatcgggtggtgctctcgataaatcttttttcaattcctttgtggttaacattttcacaatatctttagcacactgtttgatattttcatga

SEQ ID NO: 4411 - DNA, 114 bp, Saccharomyces pastorianus
atgacgtgtcagtttgatgatgttgaaggtgggggagaagacatcctaattgatgccgatgccgagatcgatgcctttttttgcttctttttgagaattatcttgtccatataa

SEQ ID NO: 4412 - DNA, 1224 bp, Saccharomyces pastorianus
atggggggattatcggataggataggcagagttcgtgttttcaaatacatgagcggtatcagagtcatcggacttgcagctcaagtgtttactgtgtcgtctagaatcgggtaccataaatgggctattattcttaccgcctgcatcgttccatctctcggtgggttatttgccctagtggcaaatggaaatagttatgtctcagatgtagtgaaaaccgaacatagaatggtgacgataggaataatgatgagttgtatttatgccaccatgggcgtaggcccgatgtttggatctctcctagtcaagtggactcatggcaacgcatttgttcctatctacacagctatactatttgccatactcgcactcgtaatatgcgagacaatgatggtggaacctcgtcacgaaactcagttggcccattcacaatcaaattacaccaagaggagggagaaactaagatctcaatcaggctctgatgacacgcgaaactatcagtctgttacttatggtaaatttcaaataatgaaactgatggaactactggctccggtcaagaaactgtggttgaagccagatgtcacaggttccttagtgccgcggcatactgttatattactcattgtactggatgtattatttgtttgcggtaccacgtcctgtatgccggcactagttctattttccacatacgagtacaagtggcatgctgtagaactaggctatttcatatcgatattaggtattggaagaggtctcgttttactgatcgtgtcgccaacactgttatatgcattgaaacggatttatcaacacttggaccattccatagataagatagacatcttttgtatacggttttcgatggtcgtcatagcgctaagtctccttgtcatgatccaattcggcgaaaaaagttacgtatcgttagtggtttttgccctcttacaagcattgagtgcgttctgttcacccactctacagtcgggtatcatcaaatacacctccaagaaacacacaggcgagatgttcggagcaatggccctagtcaggtcttgcgtcatgcttgttatcccacccatcttgcttaagatatacggcagtactgtctccgttaaccccggcctattcatatatattccgtttctggcaagcattgttgccatctttttgacatttttcctgaggatttacaacgccccaccactgacctcaccctag

SEQ ID NO: 4413 - DNA, 321 bp, Saccharomyces pastorianus
atgtcagacgaagatgaaacaacgcgtttgatgtctccggatgagatggactatttgttggaaacgacaggaattaacgccttggaagggataattaaccaagatggcattgagagttctggtgcttacgttgatgccaatgatagtacacaaatcattagtcatgaatctatcaggcagagttcgcccagcgttgccaagagcattgacggaggaaatggacggagaaagctattttgcctatacggtcttatcatggtatattatgtatttggcggaagtctatattgcatagactggccagtaatacccgctaagtga

SEQ ID NO: 4414 - DNA, 1593 bp, Saccharomyces pastorianus
atgatacaatcgagctcggtaccggggatctctagagtcaaatgcgaggaattgttcaaagctgtagtacatgcacactctgtcttaactgataaagaagaaaaacttcggtacgatcagaatttgaaaattaaaggcttacatacttaccaaccaaataaatcctgccatactttcaagaccacaataaaggaaccccatgaaacaagctgcatacctacgaaatctgaggtccatcataggcaaaataaaccgtatgaacagcaaccttatggtttcggagtaggaaagaaaatgaatatatcatccaagagcaaggtaccaatatttaaatcctttaacttaaaagactaccagcgaagtcacaattattcatccaaaaaggaaaggaaacatggaaatccagacatagattctttattccaggaaactaatggagcttcaaaagtaagaatggctaattcaaacacagtggatgcgaatccggagttcgaagagatatgggaaaccttggataaaaaaactagtgatagtgaatcccactgtgaagatccagattcacgtttgggatcagttttgagtgacgatgatggagaggaattttgtagagtaccatcgaattccagtagtcctgaggaagacaacaaatacaatgaaggatcgaaaaaggagaggagaaattcctcagaagaaaacagagaagaaatgagatacaagcagtttaaattgcccaaagttaatgtttttcctaatctctctcatcaatcaaattttcagtctccttttatcactcatgagtatcgacattatgcaaggaacaaattcgaaaatagaaaccaaaaccgaagagcagtctcgcccattaaagagatacctgcaaccttggaaactgctgaagggtggactattttgaaagacattgttgagaaactaaacataagcaacacagatgatcgaaataaagacctctttttcctcaagaatgaaaattccaataaaaactacgatgatacaattaaaatagaaaatctatccattaaagaatctaaaggaattaaaaaaagaaaaaaagatgacatatcgttggaagagttgtcaaaatctctaccgaaagaaaaggatttttttgtaatgaatgcagttaatgaatcgttggactcgatctatctccccaaaaaacctaagacagctcagagccaagcacaaagtgagcgtttgtcccaaacagaaggaaatcaggcacagcgtacaataccgttggaaaagtatggaatgagttccaagagcttaagtatacaaataccagaggtcccagacttcgctacaatgacagacttgaaatttttgaatgccagtgtgcaactttttaacctccaatgtaacaaaatcaaggaggaattattccaagcgtccttacagcgtctcagagcagacacgtacttcagcggcacactaatggaaaaacaaaatatcatgacttggaaaacgtgcttggaatttgacagaagtttaatggacaaactaaatattctacaagaaagacaaatgcatgtcgtggagttcttttccaagatatatggcggcagagaataa

SEQ ID NO: 4415 - DNA, 105 bp, Saccharomyces pastorianus
atgtcccaggtattagaaccgatattagatagaactacatattactccatattaggtctaacatcgaatgccacatcttcagaagtacacaagtcatatcttaaa

SEQ ID NO: 4416 - DNA, 837 bp, Saccharomyces pastorianus
atgtattacaagaaagcatttataacatctctattaactagtatcgctttgagcgcatatgctccgcctgaaccatgggcaactctaaccccaggttccacaatggcaggcgcaacaaccgattacagaacttcgtttggtcttgctgttgtccctttcactgtaagtgaagttaaagtcaaaaggaatgtcatttcacaaattaatgacggccaagtgcaagtaacgacacaaaagttgccttcggtagtgtcaaaaatagtgtcgcaaataggcgacggtcagttacaagtaactacagcaaagaatgttgttacaaagtccaaaacttttacctcaactgcaactgcaactgcaaccgcaaccacaactaaaatcaagaccaaaaccaagaccaaaaccaaaactgccatatcacaaattcatgatggccaggtgcaagccactacttcatccatcagcagtaagctcgacccttcaaagagtaaatcagagccagcgaagaaatcgagcgaagtaactgtagttaaggttcaagcttgcaagaatgcaggtactttggaaataacattgcagggtggtgtactcattgattccaaggggagaataggttctattgtaggaaacaggcaattccaatttgatgggcctccaccacaggctggtactatttatgctggtggctggtcaataaccaagcaaggtactctagccattggtaatagtgacatattctaccaatgtttgtccggtactttctataatctctacgataaatcaattggaggccagtgcagcccggttcatttacaagcagttggcctcgtcgactgttga

SEQ ID NO: 4417 - DNA, 1221 bp, Saccharomyces pastorianus
atgcaatataaaaagactttggtcgcctctgctttggccgctactacattggccgcttatgctccatccgagccatggtccactttgactccaacagctacttacagcggaggtattaccgactacgtttccactttcggtattgccgttcaaccaatctccaccacatcttctgccgctgccacagcctcctccaaggctaagagagctgcttcccaaatcggtgacggccaaatccaagccgccactaccaccgctgctgtctccaccaagactactgccccagctgtttctcaaattggtgacggtcaaatccaagctaccaccaagactactgccgctgctgtctcccaaatcggtgatggtcaaatccaagccaccaccaagactacctcagccaagaccactgccgctgctgtttctcaaattggcgacggtcaaatccaagctaccacaaagaccacttcagctaagactactgccgctgccgtttctcaaattggtgatggtcaaattcaagccaccaccaagaccactgccgctgctgtttctcaaattggcgacggtcaaatccaagctaccacaaagaccacttcagctaagactactgccgctgctgtctcccaaatcggtgatggtcaaattcaagctactaccactactttagctccaaagagtaccgctgctgccgtttctcaaatcggtgacggtcaaatccaagccaccacaactacttcagccaagtctagcgccgctgctgtatctcaaatcactgacggtcaagtccaagctaccaccaaaacctctactactcaagctgccagccaagtaagtgacggccaagtccaagctaccaccggtactgctacctccacctccgctgaagcttcttctacctctactgacccagtcgatgctgtttcctgtaagaactcgggtactttggaaatgaacttgaaggaaggtatcttaactgacggtaagggcagaatcggttccattgttgccaacagacaattccaattcgatggtccaccaccacaagccggtgccatctacgctgccggttggtccatcaccccagatggtaacttagctatcggtgacaacgatgtcttctaccaatgtttgtctggtactttctacaacttgtacgacgaacacattggtactcaatgtactccagtccacttagaagctattgatttgatagactgttaa

SEQ ID NO: 4418 - DNA, 84 bp, Saccharomyces pastorianus
atgtcttctaccaatgtttgtctggtactttctacaacttgtacgacgaacacattggtactcaatgtactccagtccacttag

SEQ ID NO: 4419 - DNA, 225 bp, Saccharomyces pastorianus
atgaagcaagataccttcgcatttgaaacttcttcggtgcgatggcattgcctatttccttttcgggtatttttctgtggaatgaccgcatgtaaaaaaacacatcgcagaaaaaacatggacatgcaaacaaaagaaagtagcattctgaaacggttgtgtcccttctgcttgccttacaaaccaaaagaggaaactgacacacacacattatttcctcactag

SEQ ID NO: 4420 - DNA, 2112 bp, Saccharomyces pastorianus
atggctagattttttgctttgaacaagaaaaaggagaaagagaaaaaggagaaagagaaagacaatacagagtctgcagacgctgaagaaaacgtaatagaaagttcatccagttatctaactggaaatgaggaagcattagatcctaaatatggcgatcttcccactgcgaatacagccagtgatgatgtgtccactacttttgactcgtctatacaatcgtcgtctatattttccagaagcaggttaacttctggaacaggtgcctcttccagtatagccacatcaggaatgcgtagtcatagtagtgggaatatcgggtctaagaataccaagaacttacaggggttcgtggatgtcgggaaaccattaagggcagttagttttttgaatcccgttaaagaggaggaatctcaggacgaacagaaagcttcagatgttagccctctggctcctacaacattagctacttcaggcggtgtgcgggaaaatactttcagttcaagaagagctataactttagataatgtccataaaagcctgtcggaattggaggacaatttagtggacataatggatgatattcatcaagacgtcatcagtatctcaagagcagtcattgaagccatcgagtactttaaagaatttttaccgacgataaaagacaggattccatataggataagtgttgaaaaatcttccgcattacgaaagattaataaaattgttctacatttcttagacaacttgttagtgtctgatgcattttccaattcgaggtcgattttattaagaagattttatttttttttgaagaaattaaacttaattaccgatgatgactttatattggagtcaggagttttgccgtgcttgtcagttttctgtatcgacggtcattgcaacttgccaagtatggacaaattagatttaattttgaatgagttggccaagatggactcctctattatttctgatcaagaaggtgcttttatagcacccatattaagagggataacccccaaaagttccatcctcacgataatgttcggtttgcctaatttacagcatgagcactacgagatgataaaagttctctactcgttgttcccagacgtacacttgtactgtgtgaaagattacatcaaaaaggctgcatctgcagtagaaagtattccatctcatacagagcctgatgttggcccaatggctcccgtcaagttccagttttcgcccccatacgcagtttcagaaaatccattggaactgcctatttccatgtctctatccacagaaacaagcacaaaagtaacaggaacgttgggaggttatctttttccgcagactgggattgatacgaaattctcgcagtttgcaaactgctcgttcgccattacatgcgcccatgttgtattgtcggaaaagcaggattatccaaacgtgtcggtaccatctaatgttttacagacttcatataagaaggttttagcaaaagaatccgacagataccccgatgattcagtagaaaaaaccgccttcttggaagaagtacaaagaatagatcagaatctaaaatggcagaaatcaaacaagttcgggcgggttgtttggggcgaaagagccatcgttgatcaccgattgtcagattttgctatcatcaaagtgaattcgtcgtttaaatgtcagaacactttaggtaatgaatcaaattccttgcctgatccaactttgagatttcaaaatttacatgtcaaacgaaaaattttcaaaatgaagcccggtatgaaggtatttaaaataggtgcttctacacgttacacttctggccaactgaattctacgaaattggtttattgggcggacggaaaattgcaaagtagcgaatttgttgtggcatctccaactccattatttgcaagtgctggagattccggtgcatggattttaaccaagttagaagatcggccaggtttaggaattgtaggtatgttgcattcatatgatggtgaacagagacagtttggtttattcacacctataggtgacattttggagaggttacatgcagtgaccaaaattcaatgggatatcgacccacaagtagatggatga

SEQ ID NO: 4421 - DNA, 1602 bp, Saccharomyces pastorianus
atgacggaagatactactgccctaactgcttctgtgagagtgaccagcaacaagtgcacgtacacggacaacgagctgcttaccaagtacagttatgaaaacgctgtggtgtccaagacgtccgatggccgctacgatgtcacgcccaccgtccaggactacgtgttcaagctggatttgaacaagccggcaaaactggggatcatgcttgtcgggctgggcggcaacaacggctccacgttcacggcggcgatcttggcaaacaagcacaacatcgagttccaaacgaaagaggggctcaagaagccgaattacttcggctccatgacccagtcgtccactttgaagctgggaatcgatgcgcagggcaacgacgtgtacgctcccttcaactctctcttgcccatggccaatccgaacgattttgtcgtcaccggctgggacatcaacaatgcaaacctgttcgaggccatgcaaagagcacaggttcttaagtacgacttgcaacagcggttgaaaaccaagatgtctcccttgaagccgctgccctccatctactaccctgattttattgccgctaatcaagacgaaagagccaataactgcatcaacttggacgagaaaggtcacgtgtccacaaaggacaaatgggcccatctgcaacggattaggcacgatataaagagtttcaaagagaagaactccctggacaaggtgattgttctctggacggcgaataccgagcggtacgtggaggtctccgccggcgtcaatgacaccatcgaaaatcttttgcaatccatcaagaatgaccacgaggagattgcgccttccacgatctttgccgctgcatccatcttggaaggagttccgtatatcaacggttcaccacagaacacgtttgtcccgggacttgtccaactggctgagcgtgaagggacttttatcgccggagacgacttcaagtcgggccaaaccaaaatgaagtctgtcttagcccaattcttggtggacgccggtatcaagcccgtctccattgcctcttataaccatctaggtaacaacgacggcttcaacctatccgcaccgaagcaattcaggtcgaaggagatctccaagagttcggtcattgacgacatcattgcatccaatgacatcttgtacaatgataagttgggcagcaaagttgaccactgcatcgtgattaaatacatgaagcccgtgggtgattccaaagtcgccatggatgaatactacagtgaattaatgctgggtggccatagcagaatctccatccacaacgtttgcgaggactcgttattggctacgcccttgatcatcgacctgctagtgatgacggaattctgttcaagagtgtcttacaagaaagcgaactcatcccaagacaacgacagcaagttcgagagcttttatccggttttgaccttcttgagctactggctaaaggcgccattgacaaggccaggcttccatccggtgaacggcttgaataagcaaagaaccgccttggaaaactttatgagattgctaattggattgccttctctgaacgaattgaggtttgaagagaggctttcgtga

SEQ ID NO: 4422 - DNA, 1302 bp, Saccharomyces pastorianus
atggcaaataaaggcttactttatgcccttggcatttttttaccactatggacttttttgatctgtatttttttcaaacagatattcctcatacataaaagtcaaaacattgataattcatatacttatctatcccaaagggcaaaagagcaatatgactcaagccgaagaagaaactacttaccggatttgaaactgtctcgtaatagttatgaagactacactttagattatagaagacaagatgaatttggttgcttttatcagagggaaaatgcaacgatattgatgttagtgagaaactcggaattggaaggggcgttagattctatgagatccttagaagatagattcaataagagataccgttacgattggacgttcctcaatgacgttccctttgaccaagaattcattgaagccactacagctatggcaagtgggaagacccagtacgccttaatcccgcctgcggattggaaccgaccacaatggattaatgaaacattatttgaagctagactacacgagatggagacagagggtgtcctatacggtggatccaggtcgtatagaaatatgtgtcggttcaattctggattcttcttcaagcaatcgatattgaataactatgattattattttagagtggaacctaatgtcgagtactattgtgatttcccgtatgatccattcagggtcatgagattgaaaggtaaaaaatacgggtttgtcatttcattgtatgaatacgaagagaccataccgactttatggaacgtcgtggaggaatatttggagacgaatgaagggaaaatcctgagtaaagaggacagcgcttatgcgtttttgaccgattcaaacttagtcgggaagtactatcctgttgtcgaggcaaactccgattacaatttgtgtcatttttggtcaaacttcgaaatcggtgacttgaattttttcagaagtgacgaatacaagaccttttttgagacattggactccaagggtgggttttattacgagagatggggggatgcaccggtgcattccatcggcgtgtccctgttactaaggccagacgaaatcattcattttgatgagcttggctatttccattcaccattcggcacctgtccggcatctcacgcagtaaggctcgaccaacgttgtagatgcaagagcgatgacgtgagcgtcatagacatagagccacacagttgcttgatgaggtggtggaaaaatgggagcggcaaacactttctaaaagaggtgcaaggcaagaattttgaatatgtcttgtaa

SEQ ID NO: 4423 - DNA, 66 bp, Saccharomyces pastorianus
atgcccgctaccgctatatcatggacagcttatgaatgcgcaaagcattttctaatgacctgttag

SEQ ID NO: 4424 - DNA, 4023 bp, Saccharomyces pastorianus
atgacaagaatcgataaatggttcttgaacaagttacatgatttggtccagtttgcccagaaaataagctcatttggtactaaagaagatttaccttcattagttttgagacaagcaaaacaattaggttttgatgataggcaaattgcaaagttcttggattccaatgaagttgctattcgtaggttaagaaaagagtacggtattacaccatttgtcaaacaaattgataccgttgctgctgaattccctgcatacacaaactatttatacatgacatacaatgctgactctcacgatttatcctttgacgaccacggtgttctagtcttgggttctggtgtctatcgtatcggttcttctgttgaattcgattggtgtgctgtcacagcagttagaacattacgtgctaacaaaatcaaaaccatcatggtcaactacaatcctgaaaccgtctcaacagattacgatgaagctgatagactatatttcgagactatcaatcttgaaagagtcttagacatctatgaagttgaaagttccagtggtgttgttgtctcaatgggtggtcaaacttccaacaacattgctatgacattacatcgtgaaaatgtcaagattcttggtacatccccagatatgattgattctgctgaaaaccgttataagttctctcgtatgttggatcaaattggtgttgatcaaccagcttggaaggaattaacatcaatggatgaagctgagtcttttgctgaaaaggttggctatcctgtgttagtacgtccatcttacgttttatctggtgctgccatgaataccgtttattctagaaacgatttagaatcctacttgaatcaagctgtcgaagtttcccgtgactatcctgttgtcattaccaagtatattgaaaatgcaaaggaaattgaaatggatgcggttgcaagaaatggtgaattggttatgcatgttgtttctgagcatgtcgaaaatgcgggtgtccattcaggtgatgcaacattgattgttccacctcaagatttggctcctgagacggttgatagaattgtcgtcgcaactgcaaagatcggtaaagctttgaagattactggtccatacaatatccaatttattgcaaaggataatgaaattaaggtcattgaatgtaatgttcgtgcatcaagatctttcccatttatttcaaaggttgttggtgtgaacttgattgaactggctacaaaggctataatgggattacctttgacaccatatcctgttgaaaaattgccagatgattatgttgcagtcaaggttccacagttttctttcccacgtttagcaggtgctgatcctgttttgggtgttgagatggcctctactggtgaagtcgctacctttggtcactctaagtatgaagcttacctaaagtctttgttggcaaccggtttcaaacttccaaagaaaaacattttattgtccattggttcttacaaagaaaaacaagaattgctttcttccgttcagaaactatacaatatgggatacaaactatttgcgacatcgggtactgctgatttcttatccgaacacggtatcgctgtccaatatctagaagttttaaacagggatgctgatgaccaaaaatcagaatattcgcttactcagcatttggccaacaatgaaattgatctttacatcaacttaccatccgccaacagattccgccgtcctgcatcttatgtttcaaagggttacaaaacacgtcgtttggccgttgattactcagttccactggtcactaacgtgaagtgtgccaaattgttgattgaagccatttcaagaaacatcactttggatgtttctgaacgtgacgcccaaacctctcacagaactataaccttaccaggcctaatcaatattgcaacctttgttccaaatgcgtcacatgttatcaagggtccggatgaattaaaggagactacacgtctatttttggaatcaggttttacctactgtcaattaatgcctagatctatcagtggaccagttattactgatgctgcatcattaaaggctgcgaactctgtttctcaagattcgtcttatacagatttttctttcactgttgctggtaccgctcataacgctcaaagcgtctcacaatctgctagcaaagtcacagcgttgtttttgcctttacgtgaattaaagaacaaaatcacagaagtagctgaacttttgaagcaatggccagctgaaaagcaagttatcgctgaagctaaaactgccgacctggcatccgttctattgttaacctcacttcaaaacagatctattcatattactggtgtttcaaataaggaagatcttgctttgattatgacggtcaaagagaaagatcctagagtaacctgtgatgtcaacatttactctctgtttattgcccaagatgactatcctgaagctgtgtttttgcccaccaaggaagatcaagaatttttctggaacaatctggatggcattgacgccttctccgtaggcgcacttcctgttgctctagccaatattactggtaataaggttgacgtcggtatgggtatcaaagattccttaccattactattagctgcagttgaagaaggtaagttgactatcgacgatatcgttactcgtctacatgataacccagctaaaattttcaacatccccgcccaggattctgttgtcgaaatcgacttggattattcctttagacgtaacaagagatggtcaccattcaacatggacatgaacggtggtgtcgaacgtgttgtttctaacaacgaaacactagttttgagtggtgaattggtctctccaggcgcaaaaggaaaatgcagtattaatcctgccacagcttccactacagctcccgcagaaattcaacctaccggtactaagagaaggttttcttttaccgatgaaacaatggctgataatctagatgccgcagaggatgctatcccagaacaacccttggaacaaaaactgatgtcttcgagaccaccaagggaacttgttgcaccaggcgctatccaaaacttgattcgtagcaacaatccattccgtggtagacatatattgtctatcaaacaattcaaacgttctgacttccatgtcttgtttgctgttgcacaagaattaagagcagccgttgatagagaaggtgttttagatttaatgaagggacatgtaattactacaattttctttgaaccatctactcgtacctgttcttcattcattgctgctatggaacgtttgggtggtagaattgtgaacgttaacccattggtctcttccgtcaaaaagggtgaaactcttcaggatactatcagaacattggcttgttacagtgatgccattgttatgcgtcattccgaagaaatgtcagttcatattgctgctaagtattctcctgttccaatcatcaatggtggtaatggttctcgtgaacatcccacacaggccttcttagatttattcactattcgtgaagaaataggtaccgttaacggtatcactgttacatttatgggtgacttgaaacacggtagaactgtccattcgttatgccgtttgttgatgcattatcaagttagaattaatcttgtttctcctccggaattaagattgccagaagggctaagggaagaactaagaaggggtggtttgctaggtgtagaaagcgccgaaatgacccctcatataatctccaaaacagatgctctatattgtacaagagtccaagaagagagattcagtagtcctgaagagtaccaacgtttgaaggacacatatattgtggacaacaaaattttggctcatgctaaggaaaatatggctatcatgcatcctttgcctcgtgtaaatgaaatcaaagaggaagtggattacgatcatcgtgctgcttactttagacaaatgaagtatggtttgtatgttagaatggcattattagccatggttatgggggttgatatgtga

SEQ ID NO: 4425 - DNA, 2535 bp, Saccharomyces pastorianus
atggccgctatcgctcccactgccccaatttctcctccaatggagtctacaggtgaccgtctaatcacattggaactaaaggatggcacagtcttacaaggttattcgtttggtgctgaaaagtccactgctggtgaattagttttccaaactggtatggtaggttatcctgaatctgtcactgatccatcttacgaaggccaaatcttagtcatcacctaccccttggtaggtaactatggtgttccagatgtgcacttgcgagatgaattggtcgaagaattgccaagatattttgaaagtaataaaatccacatcgccggtttggttatttctcactataccgacgaatactctcattatcttgctaaatcttccttgggtaaatggttacaaaatgaagggatcccagctgtttatggtgttgatacaagatcattgaccaagcatttgagagatgctggttcaatgttaggtaggttgtctttggaaaaaaccacgtctgatagaaccatttctggatcttcttcttggaaagatgcgtttgacgttccagaatgggtggatccaaatgtccaaaacttggttgctaaggtctcgaccagtgaaccaaaactatacctacctccaacggataacaaggacattgaattgcaaaccggtccagatggcaaagttttaagaattttggccatcgatgtcggtatgaagtacaatcaaattcgttgttttatcaaaaggggtgtggaactaaaggtcgttccatgggactatgatttcaccaaggaagattacgatggtttgttcatttccaacggtccaggtgatccatctgttctagctgaactgtctcaaagattatcaaatgttttggaagctaaaaagactccaatctttggtatttgtcttggtcatcaattaatagctagagcttcaggtgcatccaccctaaaattaaaatttggtaaccgtggccacaacataccttgtacatcaaccataagtggtcgttgttatataacatctcaaaaccatgggtttgctgttgatgtgagcacccttacttccggttggaaaccattatttgttaacgcaaatgatgactctaacgaaggtatctaccattccgaattaccatacttttctgttcaatttcatccagaatcaacaccaggtccaagagatacagaatttttgtttgatgttttcatccaagctgttaaagaatataagcacacacaagtattgaaaccaattgcattcccaggtggtctactagaagataatttgaaggcgcacccaaggatcgaaccaaagaaggtcctagtcttgggttctggtggtttgtccatcggtcaagctggtgaatttgattattctggttctcaagctatcaaagccttgaaggaagagggtatttatacgattttgattaatcccaacattgctacaattcaaacttctaaagggttggctgataaggtctactttgtacctgttactgcagaatttgtgagaaaggttattttgcatgaaagaccagatgccatttatgtgacatttggtggacaaactgctttgtcagttggtatcgacatgaaagatgaatttgagactttaggagttaaagtcttgggtactccaattgaaaccattattactactgaagatcgtgaactgttcagcaacgctattgacgaaattaatgaaaaatgtgccaaatctaaggctgctaactcggtagaggaagctttagccgctgttaaagatatcggcttcccagttatcgtacgtgctgcttacgcattaggtggtttaggttctggttttgctaataatgaaaaggaactagttgacctttgtaatgttgcatttgcatcctctcctcaagtcttagtagaaaggtctatgaagggctggaaagaagtagagtatgaagttgttcgtgacgcttatgataactgtattacagtttgtaacatggaaaatttcgatccattgggtattcatactggtgactccattgtcgtagctccttctcaaactttatctgatgaagattacaacatgcttagaactacagctgtgaatgttatcagacacttgggtgttgtcggtgaatgtaatattcaatatgctctaaatccagtctccaaggaatactgtatcattgaagttaatgctcgtttatcacgttcttctgctttagcatctaaagctactggttatccattggcttataccgcagctaaattaggtttgaacattccattaaatgaagttaaaaattctgttacaaaatccacatgtgcttgttttgaaccttctttagattactgtgttgttaagatgccaagatgggatttaaagaaatttaccagagtgtctaccgaattatcctcatcaatgaaatccgtcggtgaagttatgagtattggtagaacatttgaagaagccatccaaaaagccatcagatctacagagtacgccaacctaggtttcaacgaaacagatcgacagcttgatccgccataa

SEQ ID NO: 4426 - DNA, 936 bp, Saccharomyces pastorianus
atgacaaaagggaaagaaattatttacgatacaaatcaacaaatccaaattgcattagaaatccacttagtggagcatttaggtattaataaagtgacttccaaaatcggtgaaaaatatcattggaggggaatcaagaatactgtttcagaggtcatttcccaatgccagaaatgtaagatgaggtataaagatggaacaggggtgatcattgaacaaaagagggcggtcaagcaggcgcacatgctaccgacgcaacacgtggaaaccatcaataacccaaagaataacaagaagcgtgatggcgcattattgggccagtcaatgaatttcccccaaaacatgatttccagtacactaaatgatgcggagggccaacctactccgccggatactaacgtcgtacgagctgcatttctaaatgccgccaatagtccagcctctaccagtgaatccaaccaagtagacaaaagaaacgagtaccttgcttcgatacagaacacacccttgttggatgacgaacagtcaatgaattcatttaacaggtttgtagaggaagaacattctaggaaaagacgtaaatacctggacgttgctacaaatgggatcgtaccacatttggcgaacgacggttctcaaaatgctgcaagcaccgtcaacgatagtgaacatgacatgggcaaccctgttgccggattagacaggaacgatcatgccataatgaacgatgctatgctgagccttgaagataacgttatggctgctttggaaatggttcaaaaggaacaacagcaaaagatagaacaaggagaagaggatggggaagcctcacgcaacgatatcgatggcactgaagacagtgacaccacggttaacagaatggttaacgatgcatctaacacatttacggggcataattctaatatttactactag

SEQ ID NO: 4427 - DNA, 891 bp, Saccharomyces pastorianus
atgttgatgctgaatcagcatacaggtttagtacgagatgacgaacatctgcacgcgactaaccataataatggtgtagaaatgagggacgatctggcggtttccgatcaaatattgacgcctttacaaccacataccattctgctgaaagacggagagacaatagctactatgtatcctgtaccggcctatcctgatttattgccgctgggacttgtgagtttccttctggatgagtttaatatggaagtggaaaagggagatagctttccctattatgagaatttatcgttagatgaattcaagaatgtctggttccataacgatggccacgtttgtatcatggtgctaggcgaaatacccgaactagattacagtatggacgctgatacagatgtagataataattatggaactgatatagaaaccatgaggcatacctctcaatataagaaacggaaagagcgtcgaaatttaaatctcactatacagtgggagaagcagtgccttggcatttttgatcttaagccggcataccctggacgttcagcacatgtggtcacaggaacgtttctggtgaatgctggtattaggggtaagggcattggcaagacattagtggaaacttttatagagtggtccaagaaattaggatttacatcatcgtttttcccattaatatacggaacgaacgtagggatcagaagaatcctggaaggaatgaatttcagacgaattggtaaacttcctgaagcaggtattctcaaggggtttgatgtcccagtggattcgtttatgtatggcaaagagttcacacatatcacaaagagcattgatgttgtacgagatgcctgcaaaaaagtattgaaattggtaaatatgaacgattga

SEQ ID NO: 4428 - DNA, 1164 bp, Saccharomyces pastorianus
atgacagcaagatgtttttcagactacaaagacctgattgaggagggcgatttaaccctaatatgggtttctagagacaatatcaagccagtaagaatgcaatccgaagagacgttcaacactcgttatggttcgttccctcacaaagatattataggcaaaccttacggttcccaaattgccataagaacaaagggttcaaataagtttgccttcatccatgtcttgcaaccaacgcccgaattatggactttgtcattaccgcacaggactcaaatcgtatatacgcctgactcttcatacatcatgcaaaaactaaactgtagtcctcacagtaaagtaattgaggctggtactggttcaggatcattttcgcatgcttttgcaagatctgtaggtcaccttttcagttttgaattccatcatgtaagatacgaacaggctttggaggagtttaaagaacacggccttattgatgacaatgtcacaatcactcaccgagatgtttgccaaggcggatttactattgagaagggagacactacgtcttatgaatttatcaacgatgagacagctgcctcattgaatgctaatgtagtatttctggacttaccagcaccttgggatgctatacctcacctggattccgtcattgccacagaagaaaaagttggcctgtgttgcttttcgccttgtattgaacaagtggacaaaactttggaagtattggaaaaatacggttgggctgatgtggaaatggtggaaattcaaggtagacaatacgaaagtcgaagacaaatggtcagatctttagatgatgctatggagagattaagagatatcaagagacacaagctccaaggtgtagaaagacgtaagcggatgtttgacaatactatagataccagtgatgaaaaaattgaaaaaagaaatgaagacggtataccgttaacagaaaaggcaaaattcaacccattcggtaaaggttctcgtatcaaagagggtgatagcaattacaaatggaaggaggttactaaagttgaatccgaaattaaatcacacacctcatatttaacttttgcgtttaaagtcataaataaatgcagagatgaggaacaagttaatgaaattctccagtcgataaataaaaaatcaaaggactag

SEQ ID NO: 4429 - DNA, 636 bp, Saccharomyces pastorianus
atggaaaagaagtcttctgttgtggatgccgactctaaaaactcgaaaaaaaaactgcaattcaatctatttgatggcaagataacagacggtgaaaaattagcattcgctaacctggaaaacgccctcaagttattcaatactgcacacgatgaataccagaaacagcagaaggaagctgatgttggaccagatgacgacaagagctccatcagcagtaacggcaataaaatcagtgatttgtttatatccattctcccaattgcaatcccgcaaaagcaacaggatggtgataacgactttcaaataaccgattccaacacacccggcaatttcaattttacacttgtattgaaggacatcaccaatgacatcaccaccataacaagatcgcaaggtttcccagtgaaatgggtcaattggctagaaggctccatcgaaaagagaggaccggacgggaaggaactagaaaaggaagctggcgatgacacgaatcaacacaagagcgcagacgaagatgatgacgatgagattgttgaccctagcgaatgggtcaaagaatggatcgaagacgggctaagcttatcctttggggtcatggcccagaattatgtcatagaccgtatgggtctttga

SEQ ID NO: 4430 - DNA, 714 bp, Saccharomyces pastorianus
atgtctgaaaataagaactccgaggctgaggacgtgtttgaatttttagattcacttccagaagctaaaaatggtggtaaaatggataccgccaacgtaaagggtaccaaaaaagaatctcaggatggttctgattctgcagcagaacagaaaggcaatgatgggaccaagggtgatgacgatatttttgaattcttagaagaactggagaagagcaacttgagcttgactgacaaaaaaaaggtcgaagaaaaggcccgtagtgaactggctagtaagaaagcggaagcccaagaggcagtagaaccaaaggaagttgagaaactagaggaaaaccagcaaaaagaacaaaaagaacaagtggaggaagcggaggaagcggaggaagcagataaagaagaggaggaagaggaggaagaggaggaagaggaagctccgttacatgacccaattgcgtctatctcgaactggtggtcttcctctgggtctgccaaagtgacaagtatttggaacaaaactgcagaacaagcttcccaaataaaaaaccgtcttgcacaagaacagctcgacctctcttcgaaaattagcacaaacacaattactgaaatagccagaaacttacaaaaaattgttgttggcgaaactgaagaggtactacgaatccatttagtacacgatctggtcaactatccatcattacagtataacatttga

SEQ ID NO: 4431 - DNA, 759 bp, Saccharomyces pastorianus
atgcaagaaaagctacaagaacagataaacatacaagaaagaatggtcaaacctattgtagcccccagcatccttgcttccgacttttccaatttgggttgcgagtgtcacagagtcataaatgctggcgcggattggttgcacatcgatgtcatggacggacattttgttcctaacatcacattaggccaaccaatcgtcacttccctgcgtcgttccgtaccacgtcctggtgacgccaccaacacacaaaagaaacccaccgcgttcttcgattgccacatgatggtcgagaacccggaaaaatgggtcgacgacttcgccaagtgcggtgctgaccaattcaccttccactacgaagccactcaggatcccttgtccttggtcaaacagatcaaggccaagggcatcaaggccgcctgtgctatcaaaccaggcacttccgtggacgttttgttcgagctagctcctcatttggacatggctttggttatgaccgtggagcctgggtttggtggccagaaattcatggaggacatgatgcccaaggtagaaactttgagagccaagttccctcatttgaacattcaagtcgatggtggtttgggtaaggagaccattcctaaggctgccaaagctggtgccaacgtcattgttgcaggtaccagtgttttctctgcggctgatccacacgatgttatctccttcatgaaggaggaggtttcaaaagaattgctctccaagggtctactagattag

SEQ ID NO: 4432 - DNA, 558 bp, Saccharomyces pastorianus
atgagtgaatcatccatataccaatgtcctccacgggatcatcgctttttttcttcttctcgtccagttttgttgatccgacattctgtatcaactgtatatacatgggtcgcttcccgcaccactcaggttatccgtgcggccaaaaccgtcgtcaaatggtttattatcgtcgacccattgataaattctatactgatcaactatctcacagataggctttgcaatttcgggcgtgcagtattgcaaataaaagagcacaagcccgaggagagacgtctctgcccccccggcgcacagcatatatactctaggagacgcaagcgtccccgtctgcgaatcgtggccatcaagagaaagcggagacgtcgacagcagcagcagcatcgcatcgaacgcccactcacaaacacgtacccgatggaggtccaaatgatcgccgttccgcttgtcttcccgagtacagctgccctggcacgctaccagcagcagcggaatcatccttggtatgatctgccgctgtcggaagaagccctgtcaacctgttgttgtagttga

SEQ ID NO: 4433 - DNA, 174 bp, Saccharomyces pastorianus
atgtctaagataggcgcgtttgatatgcgagaaaaaaaaactttacagaggcttttgtttatatatagaaagaccaagaaaaaaacagtgatggtttcaagtgaggaagtttgtttcccggtcgcattcttggcacaagtcgcagtcgtcgagcccatcatagtgcaacgttga

SEQ ID NO: 4434 - DNA, 1455 bp, Saccharomyces pastorianus
atgccgataagtaacgatacgaacttcaaagttgaacgtaagcccttgtccaattctacttcgactaacgtgggagcggatgtaaatactctacaccacatattacccaaaaatcaactaaggagtagtggaccgatgacagataccagcggtgatggtagtatatcgagtgacgtgaatgttccagtgtgtaaaaattgtttaacttccacaacgcctttatggagaagagatgagcatggtgctgttctttgtaatgcgtgcggtctatttttaaagctgcatgggaaacctaggccaattagtttgaaaacagatgtaataaagtctcgaaacagaaaaagtaatacaaatcatgcacataacttggataattttcggaatcaaacattagttgcagagcttaaaagtgaaggtagtgtagaatcaagcaatcgcaaggtaagcaaactcccagctgacgacaaaaagaaaaaaatctcacatatttcagttgggttggcatccgcaggaaaaatctcgaaaatctcgaaaatggatcaaaaagataaaagcgactctcacatatcagcaacaaaactggaagtgctaatgtcagcagattcttcgaggccgaagttgaaaccgaaacttttgaagcaagaagcgcctgtgcaacaggaaaggctgcttactttcccaagctacacagatatcaaggaacattcggaccctctccttcagtctacagcgactaaagagcggccgcaatttggcacaggatctcttacatccaatgctacgcattcagtagcgtcaaagacaggcgcagattctccacaattaccgcacctatcaatgctacttggtagtttgaatagcggttcagtatcgaataacataagtgagacagtttccagctgcaacaatggaatagtctcaaccgccgcaactttagcaccgacatcttcacgcacaacggactccaacccatccgatataccgaaccaaatcagatccacgatgtcttcaccagatatagtatctgctaagcgtaatgatccaacgcctctatccttccatatggcgtctatcaatgatatgttagagacaaaagacggtagcgcgaaaaccgatgccaccgtatctcattttaaaccgttaatacaatcttccaaagctccatatctacctacagccaattcttcagcgacgtttaatagcgttttaagcttagatgttgcatctgagcgaaaacgaggtggtcatccaactgagagcctaactggcgactatcctttatccgctaaattacacaaagaagaagaaacaataaggctgaagacgagaatcaacgagttagaacttgtcacagatttatatcggaggcatatcaacgaattagatgggaaatgcaaagctcttgaagaacgtttagaaaacgcagaaccgcagaacggatataaaagcagatag

SEQ ID NO: 4435 - DNA, 198 bp, Saccharomyces pastorianus
atggcatctcatgctacaacacttgacagctatgacactaggaaaagaaataatgtgttcgagtcaaattcaaatgaaaccctaacaatccaaatcaaagcgaagacgaaggccataatgggaagtggccccctctgggatatgaaaccgtttccagtgaacctaaatcatcggttcaattgcctaaaccacaaataa

SEQ ID NO: 4436 - DNA, 2412 bp, Saccharomyces pastorianus
atgggtgctcacagtattcgtcaagatgacgaatttaccaccaaggttgttgagcgtacaatattgactgttgttcctgccttgattaagaatagtaaagacaacgaaaaggaagaaactgaatttttactattgagttttaccaccgctttacagcatgtcccaagacacagaagagtaaaactgttctccacattaattagaactctcaatccgatcaaggccttgggtccattccttttcctgatttctcaacaatactcttcagctttagttaactttaaaattggtgacgccaggacattaattgaattcacgaaggctttactcgttgatttacacgtgagtgaacagctatcaggtttaaatgacttactcgatatcattaaattgttgacgtcatcgaaaaaatcatcagaaaagaagaagttattagagtcccgtgtcttattctcgaacggtatcttgaatttctcagaaactgaatttttagctttcatcaataacactttcgaatttgttaataaaatcaccgaggaaactgatcaagattatcacgacgtaagaaagaatttacgattgaaaatatactctgttctgttggatgtaacaagcgatgataaatcaattaaaaagattagagatgaatttgcaatccttttggaaacgattctttcctttattaattccgtggaattgactttttcatccatagcttcacaagaaaacgacgaagcgtcggattctgaaacgtcgttttcagaccatgccagcgaaataaaagaaattttgttcaaggtgcttggcaatgtattgaatattctaccagttgacgaattcgttaacgcggtcttaccactattgaacacatccagtaatgaagatattagataccacttgaccttggtaattggctccaagtttgaattggaaggttcagaggccattcctatagtcaacagtgtattgaaggttttgctcgacagaatgccggtggaatcgaaatctgttgctatatctcaagtaactttaaacacgataactgccttggtgggcaaatatggtaaaaaacttgacggttctacactaacggaggccttgaccctggctactgaaagaatctcttctgatgtgacagaagtcaagatatcatcgctagctttgataaccaattgtgttcaagtgttaggtgtcaagtcaatcgcatactacccaaagatagtcccacctgctatcaagctgtttgatagttctgtagaagatgacaccaactcgctaaaggagcagttacaagtcgctatattgctactatttgcgggtttgattaaaagtattccaagtttcttaatgtcgaatattttggacgtttttcacgttatttacttcgctaatgaagtcgacagtagtattagattatcagtgatttcattgatcattgagtttattgatttgaaggaagtattaaaggtcttatacaaaatctggtcgaccgagatatcaacatgcgctgataccgttgctgttagtctgtttttaagtacagtggaatctaccgttgaaagtatcgataagaaatcagctacttcacaatctcctgtattcttcaaattgttactatccttattcgagtttagatctatttccacctttggtaataacaccattagtagaatagaggcatctgttcatgaaattgcaaacgcatatgttttgaagatgaacgacaaggtgtttaggcctctgtttgttctattagtgagatgggcattcgacggtgaaggtgtcacgaatgtaggtatcactgaagtggaaagattgctagcgtttttcaagttcttcaataagctacaagaaaatttgagaggtatcatcacttcctacttcacgtatttgttagagcccaccgatatcttattaaagagatttgttgctaaagatatagaaaatgtcaacttaagacgtctggtgattaattctttgacctcctcattgaagtttgacagagacgaatactggaaatccacatccagatttgaaatgatttctgaatccttagttgatcaattgtccaatatagaaaactctattgggaagtacttggttaaggcaattggagctttagcgtctaataatagtggtgttgatgagcacaaccaaatcttgaacaaacggattgtcgaacacatgaaggcttcctgtacctcgactgaaaagctatgggctgttagatccatgaaattgatctactccaagataggtgaaagctggttggttcttcttccacaacttgttcctgttatagccgagctgttggaagacgatgatgaagaagtcgaacgtgaagtgagaactggtttagtcaaggttgttgaaaacgtcttaggggaaccttttgacagatatttggattga

SEQ ID NO: 4437 - DNA, 1191 bp, Saccharomyces pastorianus
atgtctttgctaagtgaccaattagctcaagttgcttccaataatgctacggttgcgttggatagaaaaagaagacaaaaactacattcagcttctttgatttataactcaaaaacagccgccacacaagactatgacttcattttcgagaatgctgttaaagcactagaagagttgactcaaattgaaccaaagttcggtgttttctcaagaactttgttttccgagtcttctatttctcttgatagaaatgtgcaaacaaaagaagagattagagatttggataatgctatcaatgcatatttgcttttggcttcttctaaatggtatttggctcctacgttgcatgcgactgaatggttggttcgtcgtttccaaattcacgttaaaaacacggaaatgctgcttttatctaccctcaattattatcaaacgcctgtcttcaagaggatcctgagtattgttaaattaccagctctcttcaactgtttatctaacttcgttagaagcgaaaaggctccaacaagtttgaccatggtgaaacttttcaatgacatggatttcttgaaactatacactaactatctggatcaatgtattaaacacaacgcaacttatacaaaccagcttctgttcacaacgtgctgttttatcaacgtgattgctttcaactctaacaatgatgacaagttgaaccagctcgttccaattttacttgaaatttctgccaaacttctagcttcgaagtccaaggattgccaaattgctgcacacaccatcttggttgtgtttgctactgccttgcctttgaaaaaaccaattattttggctgccatggaaactatgctctcgaatttggatgataaggaagcaaagcactcagcgcttgtcacaatctgtaagcttttccaaacgttaaaaggacaaggtaatgttgatcagctaccttccaaagtttacaagttgtttgacagcaaattcggcacagcatctgttatagcgttcctagataaggcggataaaccagcttgtgacaagttcatcacctcctatactagagctattgcaagatatgaccattccaagttgaattctattctaaatctattaaagaacataaagctagagagatatgaagtcaggctgatcattactgatttgatccacctttccgacattttagaagaatag

SEQ ID NO: 4438 - DNA, 768 bp, Saccharomyces pastorianus
atgatagattttgttctcaacgctctaaactcggattatgaacagctggctaacttggctgcggaaagacttatcagtgtattcccttcactaagtaatgctcaaaagctaagaattgtccaaaatatggtggattcatctaccaatgtagaattatcatatgatacagtcggtgtattgcaatcgttacctctcgatgctgaaatttttgtatctatactgaaccaaaatagcatctgtaacgagatgaatcaaaccgatttttccaagagaagaagaagacgctcatcaactagtaaaaatgcattcttaaaggaagaggtgtctcaactggctgaattacacttaaggaaattgacagtaattttggaggcactggacaaaatcaagagcgtaggttctgaaaaacttttgtccactctgttttctttattgtcagatttagagaccctggaccaagacggtggattaccagttttatacgcacaagaaactttgatttcctgtatgctaaacaccatcacctccttaaagaataatggttgtacagagctaacaaatataagggctgacatattagtgtccgctatcagaaattcgccatcccctcaagttcaaaacaaattattacttgtaattgggtctcttgctactttgagcccagaagttattttacactccgtgatgcctatcttacttttatgggtgctcacagtattcgtcaagatgacgaatttaccaccaaggttgttgagcgtacaatattga

SEQ ID NO: 4439 - DNA, 1269 bp, Saccharomyces pastorianus
atgtgcagggccctcatgatgtatggtgcccccacacacagactcgaggaatatatgattatgacctcaagagtccttgaaatagacggccagtttctgtatcttccaggttgtatgattgtctcatttggtgacgccacaacaagaacatctgaagttcaattagtgagatgcaaccaaggtttaaacctttggaaactacaccaggttcacgccatttacaaaagagttgtccatgatactatgggtgccgatgaaggtaattccctacttgatcagatattggcagacacgaacttatacccaccatgggtgtgtgttttattatatgcattttgttctgctatggtcactccatatgcctttggcggtgattgggtgaacttggcaatctcatttttcatgggtctttgtgtagggtctttgcaattcattctttcacagaaatcctacatgtactcgaacgttttcgaaatttctgcatccattgttgttagcttctgtggtagagctttcggctctattcctcattcaaatatctgctttggtgccgtcacacaaggttccctggctctaattcttccaggttatataattttgtgcggcgctttagagctacaaagtcgtagtctggttgccggtgcggtccgtatgttttacgctatcatttactccttgtttttgggtttcggtatcacgctgggctcagctttgttcgggtggatgtataccaatgcaacaaaccaaatttcgtgtcctcaaataatttctccgtggtttaggtttctcttcgtccctgcatttactatcagtatatccttattgaatcaagcacacatatcgcaattgcccgttatggttttcatatcttgcagtggttatgtcgtgacatactgggcaggtaagcattttgaaaactctacagaatttactgctgctttggctgcattcgttatcggtgttatgggtaatttatactctagaatttggaaaggtttagcagtatctgccatgttacctgcaatctttgttcaagtgccctccggtattgcttcccaaaactctttactttctgggctacaaagtgcaaacacgattgttaatcgtaatggaagtactgccacctccagcacatctgacccctcatcttcaatgtcattcggtatgacaatgattcaagtgtgtgtaggtatttctgtaggattatttgcctcatcgctctttgtttatccctttggtaaaaagaaaactggtcttttcagtttatag

SEQ ID NO: 4440 - DNA, 903 bp, Saccharomyces pastorianus
atgactacgccaaatataactaccaaggataatgacagtgtacggaaaaaatcgaaacctgaaaaggtagtagtaccaggccactttcttaaacctcttctgaatgaaataacctcttccaatgatacagaattcaaacttataacagcatcaaaatataaggacaagtatgtcaaaatgtttatcgatagccactatgatgacgactgggtcgtatgctctaactgggagagctttgaatcggtggacattgatattaaaaaatcttcgaacgggaaagactttggtgtattcatttcaaagtcttgtgttaaaggacagctgattcaagaatacctaggcgaaattgactttcagaaaaattacctgacaaacgcaagtaacgattatcgcttgatgggtacaacacaaccaaaagtactatttcacccacactggcctttatttatagattcaagagaggtgggtggattaacaaggtatgtaagacgaagttgtgaacctaacgtagaattgataactgtaagaccgcttaacgaaaggccaagaggggacagtgactgtagggtcacgtttgtcttaatggctacaagggatattaaaatgggagaagagataagccttaaatggcaatgggatctaaggaatcctatttgcgagttgataaatgcatctaaagacttggataccctaccagatcttgacaagttttggttgatgggttcgataaagactattttaacaaattgtgattgtgtatgtggatataagggccaaaactgccctataactaaaatcaaaaagttttccgaaaaattcacgaaaaatacgaacgaaacactatctagcaaatcttactttaatacgataatggacaattgtaagaaacgtgacgagttttaa

SEQ ID NO: 4441 - DNA, 810 bp, Saccharomyces pastorianus
atgacttctccagaatcgctaccttctcgtcaaacaaggcaagggagagcatattctactaccgataaagttatatcaaggtcgtcttcatattcgtcatccaacagttcgatgtcaaaagactatggcgatcatacacctctgtccataagtagtgcagcttcagaaacactaatatctcctcaatatatgcccgtgagaacattcaacccaatggctacagctggtccaacacctatgcatttgcttcaaaatgaaagaagtgttttcggccatcattcttcatcaaacgcatctaatactatatcatcgaataaaagaggtatagcagcggccgtagctctggcaacagcagctaccatcccattcccactaaagaaacaaaatcaaaaccaaagttctaaggtccaggccactcataaagaaccaacgggaaaaagcaaaacaccactaccattgactgttgaaaataacaaacctgttagtgcgtgtatctgcggctcaagtgaatctaaggatgggttgtttatacaatgtaacaagtgcaaaacatggcagcataagctatgctatgcattcaagaaatcagatccagtgaaaagagactttgtttgcaagagatgtgacacaaagacagcattacagactggacaggcaaaaccaatgatatttcccagaaaaatgggagatcagcgcctgttccagttttcttctatagtaacaacatcgattctacacgcagagcaacaacaacgacagatggtgaatggttcaaaagcacaatccagaaacgtcatcttgaatgtatga

SEQ ID NO: 4442 - DNA, 999 bp, Saccharomyces pastorianus
atggaaaacgctttggacacattaatcactgaggattccagtctgtcgattactaaaaacgaagagactggtcaaactgtcttaaatggtatgggtgagttacatctcgaaattgctaaagatcgtttaattaatgacttgaaagctgacgtggaattcggtcaattgatggtttcttataaagaaactattactctcgaaacaaatctcgaaacatttgaaaacgataacgactataagttctctttatctgtaatgccaaacactgctactaactctgattgtgctacatatccattgggaattaataacaattatctattaatggaaaagaacaccaaatatgatgataatgaatggaaacttcaagtttccctagaatcgattataaattcaattatggcaagttgcattgttgggttacaaagaggggggaagctggccaactttcctttgtacgggtgctcaatcaaaattaaaggcgattggactttaccgttagatattgaaggtccccaagaaatcttaaaaatcaccagaaacctaattctcaaagctcttgacgatttaccaaccaataactatactcttttagaaccggttatggacttgagtcttattattcctcaatctgatgttggtgtagtattacaggatttgacaggcgcgaggaaagctcaaattctttctatcgaagatgaatcttgtccgatatcttcggatccatcccctaatatttctacagataatcataacaggatatatgttcctcctgatatcagttctaccttacacactatcacaggtaaaaagaatgcgcgagacactaatattaatctgaaaaaaatcataaaagcaaaagtgccactgagagaaattatagcctacaccagtaagctaagaagcctgtcacaaggaagaggcgagtttaatgttgaatataatgatatggacaaagtcactaatgatcgcttacagtccattttaaacgacttataa

SEQ ID NO: 4443 - DNA, 2226 bp, Saccharomyces pastorianus
atggacttgttttggcgttctgaaaccaaaaagcagaatgaagcacctggtacggattacacgtccggtagcccactccaagttcaaaacaatggccaatccatcaaccggaacatattccacggttgtccgcgcattttggaaaggaagtttggcgaatgtttgcatcacagaacacacgtaatcagggattttgtttcttctggtaatgctggattaggtcccgttgagatagtccatatgtcctactcgaataaacaggaaaaagaagaattcggtgaatacttctatgttactggaatcgaagtttccagtccttcaataccagtagaatttctcaagctgttgaaatcggatcagcgaatttctaaaaatatctcaagtgacatcatatccacttattgctgtttcaatttcttcagtaatctggacattcgtatcagaaataatgctgatggtactttccaggcaaaagcaattgactgtgatagggaaactaccgacttgacaatgacagaaaaaatgtgggaggaaacattcgttagttccgttatcagaaccattataataaacaccaacccaaagttgaaacctcctggcctgttagaatgcccattttacatcgagaaagatactgtaacctcctgtaaaaagattattgaattattgtgccggttcttgcctcgttcattggagtgtggatgggatagcaccaaaagtacgcaaattaccattgtgaataactatttagtgtatagcttaaaaagttttattaccatcacacctggcttgatagattctaccattgattacttgaaaggacttaccaaggaagatccaattcataacctacactataaggtggcgatgattgtacttttaaatcaagtacaaacaagagagctagaaatggtaaccattctaaatgaaactttggatccacttttattactgcttgatgatttaccacctagtgatgcaaattcagcgcaattaatgaattgcatgagcgacttattaaatattcaagcgaactttctgctaaacagagaagattatgaactagcgttgagtgtttctaatacatcgactgagttagccttagattctttcgagtcttggtacagtttagccaaatgtcacatcaagagggaagagtatgatgaggcgctttttgcaataaattcaatgcctcgtttgcggaaaacagaccaggttacggaagcactttataacaagtctcttgcctccaactattataaaaaaccattaaatggcagtcaggaatacttcggcataacatcaacagagtttaccaatctttacgggacgttgcgaaattggaaagaagatgagttgaaacagcaaatattcggaagaattgcgatgactaatgaaagaaaggttggctataccaaagatatttgggatgacattgccataaagctgggccccatttatggtccgcaatcggccaacttaatcaacttcgtctcacctcaagagatcaagggtataaaaaacatgaacttaatagcaaggaacacgataggcaaacaattgggacagttcaatagtcgaatatatggattattaatgaaaattgtaaacaagattggttggaatggactactaaacatccgaacaaagatctttataatggaaactgaattctaccagacgcctgccaaaataaccgacgaaaatggtaatatacctatggaagctcgaaagaaacggttctgtgagcgttggctagatgatttgtttttggatctgtatcaagacctaaagttgagcaaaatcaacctaaacaataaagacgaaaaacacagcggattagagtgggaaattttgggcctgaccatgcttcgcacttggcattgggaggatgcggtagcctgtctcagaacaagtatagtagctcgattcgaccctgtcagttgtcaagaattgctaagggtatacctgcaccctccagaagacctttggaacgccacactgctagacacagacacagtagtagaccttctggccaagaaaatatcgtacgactgcagatattacaactactgccagattttcaatctgcaagtactacacaaactttgcgaccagctgggaatggatacagtgcgcagcaagattctcattctatccagcgtcggagatgaaatgatggtcatggtcgacaccatgatctcgtgggtaggtgacctacactag

SEQ ID NO: 4444 - DNA, 486 bp, Saccharomyces pastorianus
atgctacaattgaaattcataaggccggtggccaggatgacacctatatttaggccacttacccattattccttcagaactttaactacgacgtcaaaaattgcgaacacagaatctgagagcccccgtccagatacgaccccactaaaactatcaaatgaattgtatgcagtgttcaggattcacaatcgcccatatttagtgacagagggtgaccgggttattcttccattcaaattgaaacaagcagaagtaggtgatgtactaaatatgaccgatgtaacgactataggttcccgcaactacaaactcgttgatcatccgattgatacttcgctgtatactttaaaagcaactgttgtggagaagactaagagagcctttcaaagtagggaggtaacgaagaggagaaataggcgagttcgtcatgccaacagcaaaggtgatctgacaattttgagggtatccgaactgagtataaattga

SEQ ID NO: 4445 - DNA, 864 bp, Saccharomyces pastorianus
atgtgtaacgttactacaggtgaaatgatggctgttaaacaggttgaagttcccaaatatagctctcaaaatgaagctattttaagcactgtggaagcactaagatctgaagtttccactttaaaagatttggaccatttgaatattgttcaatatctaggttttgaaaataaaaatagtatctacagtttatttctagaatatgttgcaggtgggtcagtgggatctttaattagaatgtatggaaggtttgatgaaccgttaatcaaacatttgacaacacaagtgttggaaggtctggcatatttgcactctaaaggtattcttcacagagacatgaaagcggacaatttgcttttggatcaagacggtatctgtaaaatcagcgattttggtatttcaagaaaatctaaggatatatactctaattcagacatgaccatgcgagggaccgtcttctggatggctccagaaatggttgacacaaagcaaggctacagtgcgaaagttgatatatggtctttgggatgcatagttctagaaatgtttgctggtaagcgtccatggtcgaacctagaagttgttgctgcaatgttcaaaattgggaagtccaaatctgctccgccaatccctgaggatactttaccattaataacacatgttggacgaagctttttagacgcttgttttgagattgatccagagaaaaggcccactgcgactaaacttttgtcgcataaattcagtgaagtagatgtaacatttgattttaaatcaaccaggctagcgaagtttataaagtcaaatgataaactaaacttttcaaaattgagaataacctctcaggaaaataaaactgcatag

SEQ ID NO: 4446 - DNA, 3501 bp, Saccharomyces pastorianus
atgccatttctgaggaagatagcaggaactgcacatacgcactctaggtctgattcgagctcatcaatcaaatttggtcatcagccgactaattcgctcggatcaactaaaagtacaagcaaaagtccccgagtaacgtctcgaaaaagcatttatggtgatattaaaaaccaatttccaaatgcagcccccaatagtacttcccagttgtacgaaaccacaccagctactgaaaaatcctttaattggactacggatgaccacatctcagcaacgactgttgaaaccccgacgagtgttacaagcacattttataaaagtgaaaacagaccggggagcttttctgattccaggaagtcttctggtggtaatagtgtaaatagcttatcgtttgataagttaatactatcgtgggatcctacagacccagacgaatggacaatgaaccgcgtcacttcatggtttaaatttcatgatttcccggaatcctggataactttcttcaaaaaacatcaattgtcaggccataggttcattaagctacttgcatatgagaattttgctgtttatgagaagtatttgccacagacgaagaccgcttcatataccaggtttcaacagttattgaaaaagacaatgaccaagaatgtaacaaatagccacattcgtcaaaaaagcgcaagcaaattgaggggttccagatcttctagtgaatcaattaaatcaaaattcaaaagtagtagatcgcaagaagatatttcgaattcaaggtcaacttcagagtcggaattaagcccaacaaaatcaggtccctccaagacagatgaaaagaattttttacattccacgcaaacccatcaaaagactaaaagtgcaagtgctttatacagaagaagctttatatctctaagaggctcatcatcaactaatgactcctcaataaagtcgccttcaaatatcaaattaagtataccggctcggccacattcaatcattgaacctaacaatacgctcaccaagtcagctagcccacctgcgtccccttcataccctagcatttttagaagacaccacaaaagtagttcatcagaatcttcactattaaactctctttttggtaccggaataggcgaggaaccatcaactaggcctaattcacagggccatagcatctctagcgaaaacctggctaaagtgaaaactaaacactatgaaaccaatgtttcctcacctttaaaacaatcttcgttatacacttcagatgataagggaaatttatggaacaaattcaaaagaaaaagtcaaataggagctccaagtttaaacgcagctcctaatatgactcttcaggcgaccccatcattaaaatcaagctcaagtactaccactttaaccacacaaaccacacaaaccacacaaacctcacaaaccacacaaatcaacgaattacctgtacagtcatcatcaccgtcaccgtcgctaatatccaaaaatgtgaatgaaaatttagaggccatgagcacggaaggtgtatatgaacgcccttcaatagcagcaccttctagattaggtcatgattattacaactcagacgaggtaattccacagccagcaaaaagtcatccttatagtgtaaaaaactttttgctagaacaaaaattttatcctatgaagaagaccacatttggtggtagcgataataagtatgtcttggttactaaagataactggcattttgttccagtaaatttacagaatgtgacaagtttatatagttttaaggagtctgccctctcaaaactgggaataagtcataaaaacgtcacgttccatatgacagattttgattgcgaaattggagcagctcttcctgatgatactttagaatttttaaagaaaattctatttctgaacacatctgaaaaaatctatgtcaaggatcaaacaaaacttctgcagaaatcgaagtctattgctcataattcagaaaaccatgctcccttaaaatccgtgaaaagtaaaagctcaatgagatcaggaacaagtagtttgatagcatcaactgatgatgtctccattgtcacatcttcatctgatataacgtcgtttgatgagcacgcctcaggcaccgggcgtagatatccacaaactccaagctactactacgatagagttcccaatacgagcacaaatgaagagttaaattactggaatattaaggaggttctttctcacgaggaaactgcaccaaaaatggtattcaaaacaagtccaaaattggaactcagcctgccagacaaagcaaacaaactgaaaatcccaacgcccatcacagaaaatgaaagtaagagtagcttccaagtactaaggaaagacgaaggggccgaaatcgatttcaaccatcgcagagaatcgccttatacaaaaccggaattagcaccgaaaagagaggctcccaaacctccaacaaatacttctcctcaaaggtcactgcctagttctaaacagaataatacaatgcgcctaatgagggcaagtacaaaaatttcgagaagcaaacgatccaaacccttaccacctcaactactatcatcccctgtagaggctagtagttcgtctcctgattccgtcacttcttcttacacccctgcttcaacacatgttttaattccccaaccatataagggtgcaaacgatgccatgcgcagattaaaaacagagcaagactccacgagcacatccccatccttgaaaatgaaacagaaagtgaatcgatcaaattcaacggtatctacttcaaactcaatcttctattccccctcacctttattaaaaagaggaaattcaaaaagagttgtttcttccacgtctgcagccgacatatttgaagaaaatgatataacatttgcggatgcgccgccgttatctgaggacgatgatgaaagtgataacaacgactctagctcctccgacgatattatatggtccaaaaagaaaaatggcatcgaggataaagaaagcaaaaaggatgaaaaagatgataatgattccacgcattctgatgaaatattttatgattctgaaatgcaagacaccgtagaaagaaaaatgacttttagaccatctccagaagttgtttaccagaatttggaaaaattctttcccagggctaacctcgataagccaataactgaaggaatagcctcccctacgtccccaaagtctttagacagtttactttccacaaagagcgtaacctcacccagaactgatccgagcacgccttctcgtcctatacctccagatatcctcaacaattcgtatgagctaatccaggatagtattagcaatagaaataaatcattgaatcaaactaaagctcctaaaaggacaaaaactataagaacaattgctcatgaagctagcctagcgaggaaaaaatctgttaaactaaaaagacagaatactaaaatgtgggggtacaagaatgggttgaagtga

SEQ ID NO: 4447 - DNA, 2025 bp, Saccharomyces pastorianus
atggagagaccggatcatgggagccagcctcaggttgttgaaccacgtccagatgctacaatgagagaagccgatcgtattggcgcagaggaactaaaggagtcattacgatttcgaaatgaaagggtcagtatcatcaacgcagacccttcgtcgaccttctttgtcttttggtttgtggtttcgtgctattttcccgttattgttgcgtgtctgggcccggtggctaacaccatctcgatagcctgcgtggtggaaaaatggagatccgtgaggagcaactctgtggtgatgaactcacagagtagcgacacggacgctgtaatgaaccaggttaaaacggtttttgacccccctggtatcttcgctgtcaatattttgtccttaatctttggggtcacgtctaatattgttttgatgctgcattttagcaggaaactgacgtatctgaaatcccagatgatcaatatcaccggttggacactagccggtggcatgcttttgatggatgtgattgtatgctcctcacacgaaatgtccagttattacaaaaagactattggattctggtttgcctgttacagttctggtttgtatcttatctgtactatcattttggcggtgcattttattggttacaagttacaaaaataccctccgacatttaatcttttacccaacgaaaggagtattatggcattcaccgtgctcctgtctatatggttaatttggggtggaggtatgtttagcgctctgttacacattacgtatgggaattcgctctatttctgtactgtgtcattattaactgtaggattgggcgacatcttacccaaaacggtggctgccaagatcatggttttaatcttttcgttaaccggggttgttataatggggttaatcgtatttatgacaagatcaattatccaaaaatcgtctggacccattttcttttttcatagggttgaaagcgggaggtccaaagcttggaaaagctatatggacggtaacaaaatatcatctcaaaaggaagcgtttaatttgatgaaatgtatccgcaggacggccacgaggaggcaacattggttttcattgtctgtcacgctagccatcttcatggttttttggttgttgggagctcttgtcttcaaattttcagaggattggtcatattttaattgtatatatttttgcttcttatgcttattaaccatcgggtacggcgactttgctcccaagtctggtgcaggtcgcgcttttttcgttatatgggcattgggtgccgtgccattgatgggtgctatactatctacagtgggtgacttgttgtttgacatttccacgtccctggatatcaagattggtgactcctttaataataaaatcaagtccatcgtttttaatgggcgccaaagagcactctcctttatggtgaacacgggtgaaattttcgaggaatccgatactagtggggataacgtgggagagaccccgacaagctcacaatcctgtgacatttcagaggatggtgacgaaatttcaggtgacagtgatactggggtaacacctcctccggcaactccacaggaatcattatctactttatcaaaagcaactagtccagagggtatatttcctttggagtacgtttcttctgcagaatacgcgctaggcgattctgaagccagcaacctaaagaaattacaaatattacttaaagctgtgaaaaaattacaccggatatgcctattgaataaagattacacgcttaccttttcggattggtcgtacattcgccaactgcatttgagaaacgctccggatgtcgaggggcatacaaggggcccagaattctggatatcgcccgacacacccctcaggtttccattaaatgaacctcactttgcctttatgaccctatttaaaaacatagaagagctggtcggcaacctggttgaagacgaagagctatacaaggtcatcgccaagagaggcaattttggtgatcatagaaagacactttaa

SEQ ID NO: 4448 - DNA, 1473 bp, Saccharomyces pastorianus
atgtcgacgttaaaacaaagaaaagaagatttcgtgacaggcctcaatggtggttccattacagaaattaacgcagtgacatcaattgcgttagtaacttacgtatcatggaatctattgaaaaattccacctttttgcaatcaaagacgcccaacgtacaatatatcattgattttgcattgaattgggttcctttgctgttatcaattactacttatgctagtgatccatatcttttaggcttcttaataatgattccttgtgtgtccacattcatctacggaagatttaccagctcaagcaaatcttccgctaaagtacataaaaggaacaacttaacttcacagcagttccagctggaaaagaagccttatattactgcttaccggggtgggatgcttattctaactgccattgccatcttggcggtagatttccccatttttccaagaagattcgccaaggtcgaaacttggggtacgtccctgatggaccttggtgtgggatcctttgtgtttagtaacggcattgtttcttctagagcactgctaaggaattcaggcttgaaggataaacccagctttgtaagaaatgtattcaatgctctgaaatctggtggagctctattgtttttaggcttaatgaggctatattttgtgaaaaatttggaatatcaagaacacgttacagaatatggggtacactggaatttttttatcactttggctttgttaccacctgttttgactcttattgatccccttacaagaataattccacgttgttttattgcgacattaatctcttgcatctatgaatggctattattgaaagacgatcaaaccttaagcttcttaattctagctgatagaaagggtttcttcaatgctaacagagaaggtatcttatcattcttaggctattgctcgatctttctttggggtcagaacacagggttttacttattaggaaataaaccaactttaaacaatctttacaagccttccacgcaagatgtgactactaaaccgagaaagccttctgcttggaaccgttggacttcagtaactccattaaccggcctttgtatatggagtgcaattttcattctcattagtcagttggtcttccaatatcatccttataacgcatcaagaaggtttgctaatttaccatatactctatgggtcattacgtataatttactgtttttgactggatactgcataactgacaagatttttgataattcatatgaaacttataagattgcagaatcgttggagtcaatcaactccaatgggttgtttctatttcttttagcaaatgtgtctacgggtttggttaacatgtcaatggttacaatagacgcttcacccatggtttcacttttggttttgcttgcatattgtttattcattgctgtcgtttcagttttcttatatagaagaagaatttttattaaaatatag

SEQ ID NO: 4449 - DNA, 468 bp, Saccharomyces pastorianus
atgtgggtttctaacaggtacctgtatctacgcctgctaccttggtggcccactctcactaatgaagacaatgagctcaatctacaaccattgaatctaccgcaagatggactgatgctgaatttagtcgttaaagatatatggaatcgatcaaacttacccacagaccttctcatacaagtatacaacatggtggacacaagaaaagatggcaccttggacagaaaatccttcatcgtgggcatgtggcttgtcgatcaatgcctctatggccggaaattgacgaatgagctggaccagagagtctggagtagcgtggacaatcatatccttggagccattaacccgcaaccaacaaccactgatcaccaccacattgctgataacgtcctggataagccatcgagactcaccgtacgacaggaattgaaaaacattaaacgcgatcttaggaacgttcgaatatga

SEQ ID NO: 4450 - DNA, 1143 bp, Saccharomyces pastorianus
atgttattctccaagaaaaagcactctggaaaccacgccgtggtggaattgccgaaggaagctctgcgagattctttagttgctgcacaaatcaccttcaagcggtacgctaaccccgataccagcggcactgagaggccgggacacttgcaggtggcatctgcacctgttgttaagaccgaggcatctttgccaaggttaaggcatcctgaaccgaggactgtgcgccatcaggacttaagggaagcgcttgccagccgtactgaaattgcctctgtaccgacgacccccctgggagtgggccagcgcgacatccaaagcagagcatcgaatttgccaggaaatcttgccgctgccgaaactgctgcgtatttggcccattcaggctcatttagcaacagaccatctccggtcaacggccgagatctggtcgatgatggggaatctaagccgccgcgtactccttctgcactgagaagtgagttacagttaaacagagctaggatccccccaccatcgcatgatatttccgagcgctcgcgttctatttcaccgcaggtatcttactctacttctctgtcatcgtcgtcttctttcatttccgatgaagaagacacgtcttatagagaacgaagcgttgacgaggtgcttcctccagagctctccgtttcttcctatagtctcgcatccagggtctcggaaaagccctctgaaacctcacagcaaccgcgagaatcggactacactgcaatgaataaactaaatggcggcaacataatctacaagggcactctgcctgatctaataccaagaagccaaagaaaaataggaaagccaaggcttaagaccaggcttttaagatcttcggatagcaacgaatacaacaacaattatcgccaacaagaaagtttatcgcgtatatactcgaaccagcaacagaacggtaaggcgattataaacacccaaaaaaatgtgaagttgaagactaccatgaggcgtgggaaatacgcaattacggaaaatgacgaaactttcccttatgataaaaggccttctgatgtgtcatccgattcagatactgatgacgaatctgattcaatgaagattgaggaaaaaaaaaaaaaaaccgccgttccaaattaa

SEQ ID NO: 4451 - DNA, 1767 bp, Saccharomyces pastorianus
atgttgttcagcgaaagtatgatggaagcggccaaggctttgttgaaattgaggagagcttatacaatgttacaagaaatcatgatcactgtgaagagagctgaacgatcgaagaactcgagctctccctctccaagtgagaatagcgaacagtcatgcggaagtttcgtttcagcagagacaaccttcacgtctgtagacattccgtttaagctatcccccgatgataaatcaaaccctcagcttttagaatttgcagaaaaaatttacaccatgagaatgggaagattatcaggttctcacatcggcaacaccccatctttcaatagattaagagatgatctgggtttacagaccactccattacaagcttccgatcaccaatgtgctccagatgatttcgatttggaacaagccaccattgatgagtttatccattcgggggctaatttatgttacggtatcttacaagtcgtcttatccttactgccaccagcgattggcgctgttttatccattgtcggattcaaggggtcccgtgaggagggtttgaggctagtctggaaagctacaaaagagagaaacgttcacggttgtattggcctattgggactaatgttttattacgatggtcctttccaatttacggacgctgatttcgacattccagcgggcgataatacatcaagaattctaaacaaaagtaagactaatgatagtagtaccttaccagattatatggatagttcaactctattacatccggggaaaattttagaggattctttattaagagcgagggcactgtttcccaatagtgctttatggttgttaaacgaggctaaaatgctttctggtaagggtaggcttcgtgaatctcttgccctaatggactctattgatgtcaatagtatccgtatgagacaagtgaaatcgctaatggtgtttgaacgtgctattcttttggttaacctacacgaatacaatagggccgccgaagatttaataggcctgcttgatattagtgattggtcccatgcgttgtatacttatttcgcaggttgttgttatttggagaattggagaatgacccaattaggattattaaatgatggtaaggaacagttttataaagaaagagccagagaactcatatttgacgcaccatctctgttaggaaagaagaccttcaaatcgaaaaacctaccattggatagattcatgctaagaaaagttcagcaatttaataatatgcaaaagaagctgaacctgaaagaaccactagattcaatagcaacatctcctgtccatgaactatcctatttctacaacggttacaataggatgactgaggatgatttgattttaaccaaaaaaatgttaacggagtatcataatcctgccatcgactccgaagatcctgatcaagaattgatcaggaacctattactatccctgactttgaggaggttgggcgatgccgaaaaaggcctggccttgttagacgaaattgttttgccaaaaatattttacatccaaaacggtaaagtgaaatatttcaaaaaaaatgaagacccatgggcatatccagctgctctttacgaaagagctttattctgctggaaactgggtggtatgggaagtttaaaagaaagcagagaatggttactaagggcccaaaattacgctgctgattatgaattaagtacacgtatcggtatgaagatcaaagctgcccttgatagagttgaaaacgcacttgcttga

SEQ ID NO: 4452 - DNA, 519 bp, Saccharomyces pastorianus
aatacacagactacagaagtaaccacttctcgttccgtggcaagccaaactgcttcatcttgctctactaccaccaccactaagccagaaaacgacgaaactaattcttctaccatctacaccaactctaatgcagcaaccaccatcatccccggaaaaacatctaaagctagcgttgtcaccacatctgaaaagccaaacgaaacaaccaccgccaaatccaattcgtaccacaacggcacctccgccaccgatgccggccaacaaacggtcacatcgtatgccaagacctccaacgccggcacaggaataaccagtggcaacaacattcgttcaaccacaacccaaccaaagaactccgccacgcgccacccaacttcgtcgatctacacccaactaaaagacggcacatccaccaccgcaaaattatcttcatacgaaggtgctgcagcactgggatcaagcaacctgctaggaacgattaccgctttcgtcatagccatcttgttcgccttctag

SEQ ID NO: 4453 - DNA, 849 bp, Saccharomyces pastorianus
atgagtaagcaattgaaagcaaacaaagttgagatccagaatgaggcaaaaaccgcaaataacacaatcaaagacaaaccaaaacttgccaagccaagtgcgaatgacaaattaaaggatttgaaagccaaattcaccaacagtaaatcatttgcgccagcgggtctagtttctaccgaaaaaaaagattcagttttaagtaatgaagactccgattcctcaggttcttcaacagaagacgaatccagctcgtcctcctcatcctcttctgatggggaaacttctacatccaggaagtccagaagagttgttgttaacacaccaagagagccggttaggtcttcgtcttccaaaattgacgcagtaactccatcgttgagtcaaacaaagaatgccactcctaataaagttccagttacgcagttaatggatatgtcctctccaccatcagcaaaatctagaactccttcaaaatcttctagtattcttcacgatcttccaagaaaggtacgtccatccctgagttcgttatctgacctcgtctcaaggggaattccagacgtcaaggaaaaaagctctaaatcgattggtaaaccacagcccaaagttgcctcgagtagtgacgatgaatcgagccctagttcaggttcagactccagctcggattccggctctgagtctggctcggattctaatagtggttctggtctagattctgatgattcaggtgattcttctggagacggaaaaagcttcatcagtgccaaatctgccagtgctgctctaggtaagaaaaagaaaccaagtggtggatttgcatctttaataaaagattttaagaaaaaatga

SEQ ID NO: 4454 - DNA, 2406 bp, Saccharomyces pastorianus
  modified_base (2372)..(2373): a, c, g, t, unknown, or other
  modified_base (2382)..(2383): a, c, g, t, unknown, or other
  modified_base (2399)..(2401): a, c, g, t, unknown, or other
atgtacaaactacaagtggtcttggtgcccccgagcctccaggcgacgacgcccatgcagtttggatacgggcccacggttgccgagtcctctcaattgctgcctaacagaaccagcatcgcgcaaagtgctggcgacgcttctttgcagtatgccaacatgaggtctgctagcgtgagcttctccccatcctacttcaaccaatccaggttcaaaaagtttcttttgtttaccaagcctaccaacaccctgttgaatctgagtgatgaaatcatcgataaatgcgaaaagatgtacccgagcctacaggaggacatcgagattttaagtttgcaggacaacaccggctgcgatttggacccagatttcttgataaaggatgttttcaacatcaataacatcgtgaaggtcattctgagaaacgaaatagacctggacgactccgcaccagtgtcgctttacagatctgtaaaacgctctaaaatgaacaacgggtcgccccgcccggtacagccgcagcagcaaatctcttcctcttccggggtccttaggattgcaaagaaaaggccaccgacatcaacaacagcaacaagcaccattcgcagtggcaccaacggatccatgaggatctccactccactggctagacagatctatcctccgccttcctccaaaatgatgtccaacaactctgacgacgaagaagaagaagatattggcgaaagatccttcttgccgcccccaacccagccgcaatcgcctcccattagaataagttcgggcattgacacgggaaagaagatcagatcaagcgccgtcgaggaagatatcgtatccagatcagaaaccgtggatccagacaaatcaaaacaacaacgcctattgtccggaaccccggtaatgtccaccatgacccccaacagagttactttgaccggccaacgagtggtgtctgagcacgcccaaaagaatgaattggtcttttcagcctccgcttcctcttcctcttccttcgctgccgtcgctctcacagcctacgactcaaacaagaaaccacctgctacctctccaagaataacatcgggcatgttaagaatccctgaaccaagaatctccgagattgaaaaagaactaaaggagggtccttccagtccggcttctatcttgcccgccaagagcgccaagatcccaatgaaaaaaccttacctagaaaacggtgacgattatgaatctgatgaaagctcaagtagtggaacccaggaaactccagagacggagccacattcaaaggcttccttgcaacgcagtcaaagttctatcgcagataacaacggctcccccgtgaaaaacagccccctgggtgatgccatgccacataatgttcatctcgcagaactgcccaaggcaagcagtcccgccaacgtcaaatcttctaatggccaactccccacaaaacaacaacagaggaaaggctcgctggagacaatagtggaaagaaaaatgcgcaaggatcttgctgctacagcggaaccaagaagaatgaacgatttcccagatgacagtcaaggaaaggaagatggagattcaaacgaaaaaattttgcaaaaggaaaatttgccaacagtccctcataacaagcaacctatacttgcatcatccaagaagcccaatggcaaagtgattccaacgcatagccctctggtcagcaaatttactgcaaatggtggcgctaccatcgacgatgcccttgcggacgatgacgatgaagaggcagataccaccgttcgtatagtacatcaggattccgactcctcctctttccaaaaatcagaactgttcaagatgattgaaggcaacggtgaagatcttccgcaatggtttaaaggtaaaaattcgagaaaaaattctgcctccagtaataacaagaatgcaaagccatacactactgtcttgaacaaagacatagacaattctaaaccagatccaagaaatatcctacctcaacgaaccccaaggagcgcggctaaaagggctgcccaattattagcgggcgccaagaaaaacgaggttcctgaaaaagccacacaagattcaagttcagcaggatctacggacgatgaatcggaaagcggaatcgaaacagacgtgtcatcagacgatttaactaaaaggcaatctgcacccttagctaacggcgggcccaagggggacatctctttgtactcattgaaaggtagtgtcgttccgctgacggatgcaaaggtgaatagcaaacaagacgatgggcaaattgaaaacaaaaaatcgcctcaaaaaattcccgagaagaaaattgaacccgttttaaaagcgactgaaacttctaaaactcnnccacagtcnnttccgatatccagatnnnattaa

SEQ ID NO: 4455 - DNA, 270 bp, Saccharomyces pastorianus
atgaagctttttccgtctccagaagaatcacctgaatcatcagaatctagaccagaaccactattagaatccgagccagactcagagccggaatccgagctggagtctgaacctgaactagggctcgattcatcgtcactactcgaggcaactttgggctgtggtttaccaatcgatttagagcttttttccttgacgtctggaattccccttgagacgaggtcagataacgaactcagggatggacgtacctttcttggaagatcgtga

SEQ ID NO: 4456 - DNA, 1710 bp, Saccharomyces pastorianus
atgtggaagcatatcttttcgcatgggctcaagtataatcaaccaaatgcatcttcaaaaaacctgatcctgtctgttctcaattcgacagctacaaaacgagaggccaaggactacctctccaaacatacaaatagagatggccaacgcaaccactgcttatttttcatcagggacctgcatgaaatcgcgcctgcgattttatcacagctctcaagtgtcataaagagactggggatgctaggtttacgtcccatgtttgtgatcccaccttcgccatcgcacgtgaacaaacaagcagagttacttgaccggattgttacaggtgccgatctaaggccccttcacctcaaagaggggttaaccaaatctttcactgggttatatcattctgtcttctcacaacagggtcagttccctgatatcgcaaattcgaatgttataccaattgttaagccttttgtgtataatgaagagacagcatctgaatttatgactaaagatgtcgtgaaatttatgaattgcctgtgccagggagatatcccacatattgacaaattcttcattctgaatagcactggtggcataccatcgggcgaaagaaatgataacgctcacgtattcattaatctttcacaagaattcaagcatttatcttcattattgtctcgtgatattagcactttggaaaagcgagaaccacgctcacaaaatttactacacagaatggagctacatgttaaaaaggacgaaatatcctccttagaatccgaatgccatgatcatttagaagacctgttactgatgaacaccgttttatcaaatctagcgcctacagcaaccggactgatcactactaccaaaaatgctgcattgtcctcggacaggaaaaatccattagtgtacaatctacttacagaccgatcattgatatcttcatctttaccaagattcaaaaaaaacagcaatgaaacgagctcatcaactaatctgtcggatgaacatgaatggtatgaattaccatctgagccggtgaacgcaactcctcccaatgcagatgccgtcttggtgacgactgtttttaaaaaaggtgtccatataaagacttatgattatgagacgctaactcagtttaactctatcggcctccctgaggaattttatatacccgagacaggaggcgagcctacaaccaacatccctaagttggatatcaataaattcaaaacaatcatcgatcagagctttgctaggtctctggatgtccgcgactacttgaatagaatcaatggacgaatagctacggtcattgttatcggcgactacgaaggtattgccattctaacgtacgaaggctccgaagagaacagatttgtttatttagataagtttgctgttctaccgcatcttaagggctcattgggtatatctgatataatctttaatttgatgtttaaaaaatttcccaatgaagtactatggagaagcaggaaagacaatgtggtgaacaagtggtacttccaacgtagcgttgctgtgctagatttgtcggtggatttagatcccgaacataatgacaaacaacaaagtcagtttaagttattttactacggtaacccccaatacgctgataaagctttacacgataaagctcgtttaagagaattcatgaaatctgttagagacattaaaccaagctggcataagtaa

SEQ ID NO: 4457 - DNA, 1884 bp, Saccharomyces pastorianus
atgaaaaaatgtaacataaaaaaatttcatctcatctcatcgaaggacttctggcacttttatgtggtgttgtcttattgtatctctatattatttagtacgacagcaacgatggcaaccaccgcaatgaacgttagcgttcccccaccagatgaagaagaacaaatcctggccaagtttgtgtttggcgatactacggatttacaagagaatctagctaagttcaatgccgatttcattttcaacgaacaagaaatggatattgaagaccagggagatgaaggtgccgactcggacgatggtagcgatgatggggcgcagaacggtaacttgggccaagttaatgacgatcagctgttttttgtagatgacggcaaagacgctcaaagtaaggataaagacgccatggatatcgacgacgaggacgactcttcaagcgatggctactccaacgacgatgacgaagccgcctgggtagactcagatgatgaaagaattaaagtacccatcctcaccactaataagacgaagaaattaagaacttcttacaatgaatctataattaatggtgttcactatatcaacaggttgagatcccaatttgagaaaatgtatccaaggcccaaatgggtggatgacgaatctgattcggagctagacgaagaagaagaggacgatgaagaaggttctaataacgtcattaacggagatatcaatgcactaacaaagatcctatccaccacttatcattataaagatacattgtcaaattctaaattattgccttccaagaagctagatattttacgtctgaaagatgcaaatgcttcacacccatcccactctgctatacagtctctttcattccatccttccaagcctttgctgttgactggtgggtatgacaagactttaaggatttatcacattgacggaaagacaaaccatctagtgacaagtttacatctcgttggctccccaatacaaacatgtactttctataccactttttcaaatcaaaatgaacaaaaaatatttactgctggtagaagaaggtatatgcattcctgggatttatccctagaaaatttaactcattcacaaaccgctaaaattgagaaattttctagactatatgggcatgaatccactcaaaaatcttttgaaaacttcaagatggcgcatttgcaaaacgcacagactaaatctacccacggcatcatcctcttacaaggtaacaacggttgggtgaatattttgcatgctacctcagggttatggttaatgggctgtaagatagaaggtgtaataaccgacttttgtattgattatcagccgatttcacataataaatttacgaccgttttaatcgcagtaaatacctatggtgaagtgtgggaatttgacctgaataataatggccatgtcataacaagatggaaggaccaaggcggtatgggaataacgaagattcaagtaggtggtggtaccactgctatttctccagctcatcaaataagtaagataaaaccaaacagatggcttgctgtgggtagtgagagtgggttcgtcaacctgtacgacagaaacaacactttgagctcctccacgcccacacccattgctgcgttagaccaactaacgactaccatttcgagtttacaattctcccccgacggtcaaatactatgcatggcatctcgcgcagtcaaggatgcattgagattggtccacttgccctcgtgtactgtgttcagtaactggcccaccagtggtacccccttgggtaaagtcactagcgtcacattctcaccaactggtgaactgctggccgtcggtaatgaacaaggtaaagtaaggctttggaaattgaaccactactga

SEQ ID NO: 4458 - DNA, 1887 bp, Saccharomyces pastorianus
atgtcgaataataacctccatgaccagtaccacaatactagcggccacgaagctcacgaccataacaatagcatgcctgatagcttatctcagcttatgtctcatttatcagaaatagattgcaatttgacttgtgatactccatgcgccacgaccaccgacctcaatcatactcaagatagccaaccattaaacaacgatgaagttttccaaaagtactgcaaattttgtgatgaaaagaccgacaatcaaccttgttccagacatatgcatctcggctccaagcaacctcagctgacgccgaaactttcgtctttgacacctcccgccaaaactgtacaggcgtcaaaccattcttatcatgaacatatcttaaattcagatatggatctaaaaatcttggaggatttgtgcaacatctcgtccttgtatgaagtaccgtttgggaaacacatgagtcaccacaaccacattcacactggtgaggttgatcctggtatggtgaatcaaagtaacggtaatcaaaccatgaatctattactatcaagcatcaacaggtgcgatcccaagaataacattaacagcaacattaacgacaaccctctaactgaaatggctgcaactgatcatcaacaccatcatcacaggatacagctgcactctcacaaaccaaacaaaattggtaacactagcaaccccccagcagtgcccaccacgaatacaccagctgacctaactaacagtgatttgaatgagttaatttccagagaatatggttacgagaggtttaaaaatcaaagcgagctgcctttgccacccaagcttattcatcagactcaaacaaatcttagatcttggctcacaaaggaccatgagtctaatgatttcagctccctgcataatacattatcttccagcgtttcgcccccagttgaaacaacaagtacgataaatttcaactggtgctttaaagaagaaaacaataatgacttaaaatgtaaatggaaagaatgtccggaatcctgtacctctctgtttgatttacaaagacacctgttaaaggaccatgtttcacaagacttcaaagactccttagaaccactaacgtgcaattgggaggattgcgattttctgggggatgatacatgttccattgtcaaccatattaattcccagcacggcatcaacttcgacatccaattcgccagcccagactcatttttacagggtggtttgtcaaaggaaaaacaccatctcttacattgcccgaatcctcaaacacatgaacattcatctggtttggcactatcaggaaatgacacaaccaacacatcaccgtccgaacaactcgaacaagtcctttgtcaatgggatggttgtaataagcaattttccaatgctcaagagttaaatgaccatttggaatcagcgcatttaacacgaggaaaatctaaatatcaatgtttatggcatgactgtcaccgtactttcccccaaagacaaaaactaatacgccacttgaaagtgcattcaaaatataaaccttacaaatgtaagacttgcaaaagatgcttttctagcgaagaaactttggttcagcataccagaacgcattctggtgagaaaccttacaagtgtcacatatgtgataaaaaatttgcgatttcaagttctctaaagattcatataagaattcataccggcgaaaagcctctacaatgtaagatatgtggtaagagattcaacgaatcatcgaatttgagcaagcatatcaagacccataagaaaaagtacaagtgtgctgaatgttctaaaagttttgatgatttagtgaaaatgaattcacataaagtgaaatgcttattggaaagggaaacatatctatga

SEQ ID NO: 4459 - DNA, 420 bp, Saccharomyces pastorianus
atggatgcgttgacccccagagagtcccccaagcgcgacggttcgatggtaacgactacggccactgctgcctctgccaaaccagaagccctgggcataagcacggaaggaatagtccacggccacatccataactacaacaacatgacctatatccatggccaccttcaccacagtgtggctgcggatgacggcggggccgctgctgccaccaccaatactgcatttgcatccgatgctagccatgcagcggatagcggtggccatgccaatgagaagtgtaaagagtacattgattgccagcattttgagtttttgaactaccataacaattcctctctggcgaaatataatgacactgagacatataaagctggtctgaagaatggtgtgcccttcgcaaaaagttcaatccggtag

SEQ ID NO: 4460 - DNA, 2457 bp, Saccharomyces pastorianus
atgtgccaagattctgttaggagtggcggcagggctggttttttgggaatcaaattcggaagtgctcttctatcaattaccacaggtgccattgctattgcactgctctgtaagtttcatcacaccgaagctgtcctagtggttatcgtgtgctcgacgttattgtatggtataccctctttaatatcattcatcacagaaactgtatttgcgcccagcagattccgtattgggtacttttacaacattcttaattttgcattaccactgatcactttgggttgtacagtgggctatttccatgacactttgagagatcaaacatccattcaaaacgagtctcacaaggtctatatcacgacgttagactctttactaattttcactcttttcatcaacggtatacagttaggctccttcttaaaagatcttaacgtggatcacttcggcaacactggttataccagcaacaatacaaatgctaatcagtatgacaaggaggaaaatatggtcgatattggcaggtttgtgccacttaaaaattcttcacagacactaacaccagatttggagttattacatggtggtcccaataatatggacaatgtagcatgggtgattaatgaactctctatgaatacacatgcaaacaaaaccacagcgtcggatgaaaactcgaattcttcagttattcggcataatttaggtccaatgccttccaaaacaaactttacctccaaacagtatcctaaaaaaccatcccattcacatttttctaagctgaaaaaatacaatactttctttttaggtcctatagaaaatagatacaaaaaaaacgcccaaccaagtgtcaaggtcccaaaagagaacaatggaagccatagaaatgaggccagatcatcaaccatctctgatatctctaaaagctttttgaattttctagcattaaatgaaaaaaacggaaactcatcttccgcagcaaagacgccaagtgaaggaagagtttccatgattattaccgaagaaaacaacactccaaagcacaagatatctcacgattcgcattctattgaatctccgaatttgaaactagagagagaggccattgaaagaattaatagtgctttgctccctgcgtgtttgagagttacagatagaatcatttccacacaacaaagcattcaaaatgaacaatcataccagacaacacccttaataccgcaaatggaaaacgaaggtgattgctgtatccaagatatcttgatgactaatgaattacaagacattccacaaatcccaaggatagtctcagatagcgtatacaatatcggccaagaatacactaaccatgtggaactgcctgctcatgtcaccttggaaatgtgggaaaaggaccaggagaatatacttcgaaaagtaacgacaaacctggctggtaataaattactacctcctttccgatttacctctaagagtgatatagatccaaattctttacccactgaattggaagtagaattgcatacacaaaataactttagcttcccctttaagaaagaaggatctcacattgctgcatcaaatgaactcgatcaaaaagactttaaaaattcagacactattagcgaactagatgaatatttgcacgatgcaagtattcaagaagaggatgcaggtcacttaatcgaagacagtttaaaccagaacaatatatcctccactactatcgacaatatcccaaaggacacagctagagttgataccaggcattctccaactaaatctataatttccatgatcagcggatccggaagtgtcaagcatcagcgttcacatagcaccctaaacaacttccttactggtcattcaagaaacaattctcaaataaatcaacttctacagggctcctcttctaacatgatgtccaatacctcaccgcatgcttctccgaccaaatcattaagaatgagattcggaaagaaactctcattatcaaacatctctgatacaatgtcgccgtatgagagtagcctaacagattcaatgaactattctttcggccatgatcgcaagaaaaaccagagtatcgactttagctacgtgcgtactttacaaagtagtcattcgcctacaaaatcaacctcaggaaattcgcgtcgtgactctataaacaatggtagacctcatagtgttgctaatgaaagagcactcagaacagcaagcacattattctacctccaacagaacaacgccacgtgtacgctgaatgcgaaagagccagttttggaaccgccacaatctatacgctcattatcaagtggctctgggcaagaatcgacaggatctggagctggttatccagaagtggtattcagcgaatacgacagagaaaaatggaacgttctaagaaccttacgtcaaatagcacccgaaacaactttagagcaggccagttga

SEQ ID NO: 4461 - DNA, 327 bp, Saccharomyces pastorianus
atgagagaaattgcagcaaagatcgctaagataatgaaggattctaaaattgaagttgtagaaaaggactacgttgaaagcttcagacatgaactaatggaagttgtttacgaatggtgtagaggagctacttttacgcaaatctgtaaaatgaccgacgtttacgaaggttcgttgatcagaatgttcaagagattagaggaattggtgaaggagctggtagacgtcgccaataccattggtaactcttcacttaaggagaagatggaagctgtcttgaaattaattcatagagatatcgtatctgctggttctttgtatttatag

SEQ ID NO: 4462 - DNA, 147 bp, Saccharomyces pastorianus
gagggactcagctacgaccgtctattcgagacggtcaagcaacaaataaaaggcttcagcgttggcgagttcagggacgccctggccaaactcctgcgagacaagttcataaccaaggacgagtctacagagacctacaagtactaa

SEQ ID NO: 4463 - DNA, 2421 bp, Saccharomyces pastorianus
atggaatttgttggtacaatgacggataatggccctttcaaaaatgaggaatatcatggatctctaagtggagaagcaaattcaagtgacaatttagagctgtatcatcgatttaacgatgagagaaaccccaagtaccaagcgatgatcgctgaattgcatgacttctttcgccttactttggcggaaactataaacgtaactgatattgacgggttaaaatatgataatattaaggttactaaatttagagagctaatgcccagaatgctgaataactgtcgcgaattaacacaaaggaagtcttatatccccttagatttagaaattagcgagaatgaagaaaagcaaaagagattccagctactgcaccgacatcaaatcgtgttgagttttcaagaattttgtgatgaaatggccaagtcaataattgaagcacacgttcttagctttttgtccaaatgtgaatattcatatgacatcgtatccaaacattgggcctccttttataaattatttgaatatgtgataggcgcgcttggacctatcatatcatatgttcctgtgaactaccctatgatcaaaaaagaactgggatttgagcttctgacgttatttcaatattacgacttcaaactttttgaatgtataaaagctaattttggagaagagttcccaattcttgtgactgcttctattcatcactatatccatatgtttccaataacgaacattatgttagagaatgaaactcctatgctccgtataatgtctaattgtaacttcaatgtagagggtctgagtcccaaaagttattatttgaaaacactaaaggcttattttgaagaggaaccaaatttaggtccaaagctggaaacttttagaaattttaaagtactactaacaagaaatgcactgttagcgtcgctgttttttcccgaatgggtgagtgacgcaaatgatttatttatagggcacctactgctgaataaatactccatcagtcagtacattgaaattggaaaaaacacatacgatgaacaaaaagagcgatacttcaagactgagacaagttttagtctattgatgtttagaaatgcgtttgaggcaagaaatatgctgaaagagtttagggaattttgtgatgatgtaatttcagaaaagttgggagctgcatatggagccaatcacgacactgaaaagctcttcgatgaagtggttcaactggctaacgtagactacttgaaaatttattccgataccttagaacatcatttatgcgaattgctagggagcactagtaaagccattgaacactatgtcaagtattttgaatctcacctattcaggcttgtgaggaagataaaagcaaaaagaactgagttatccagggacgcgaaaaagaagtacctctacgaaaatatccccatattgagactaaagtttgtcaacctccccacgtttcctagtttttttgaaagatcaatcttcagaaagacaattctacaaagtgaccaagattctgtatttgttaaggatatattaccagtttataaagactgcttgatggaacttttcaagcagagaatcataacgaacgtttcacaagaggacgagatgctctaccgcgatcagtatcaaccgtatctgtcacagttcttccaaccagtggaggttatggcagatttaaaaattaagtacgcgtcgttcttgaccttttacgagaacatcgaagttgcggtcaagtttggcaagaagtacaatgaagacaattatagttcgttcttcccacttatttttgacagagaaagaattcccaaaattttccagcaatctaatgacgagcttggaaaaaatttcattttacctcaagagatggacagtacatggaacgaatttttatccagttttcaccaggataacaagctaaaagattctgatacgtccaagaaggaactatacccgatgtggaatttgcatcattgtgatgtggaatccccctacacaataccccaggggggctatctgacattcgaattgacccttttccaaacctgcgtattgactttattcaatgatagcaatcgcctgacatttcagagcatctcagagcaaacaaagctagggcataaggacttgatgttgattttgaagtcgtttttaaactacaaaatcgtgacgagagacaatgaaaatacctacaagataaatgagaacttccaacctgatttgaggaaagtaaagaatggtaaactacgtgtagtgctaccgagaaacacctccatgcaaatcagcagtaactcgaccaatgggagaagtagttctttgcaccacgagggaagtaattcacagtggacttcagaactactgaagactggattaccggtctgtcagggcgagaagagggatcagctacgaccg

SEQ ID NO: 4464 - DNA, 1224 bp, Saccharomyces pastorianus
atgtctataatactcaggaatttggggttatctcctcactacatgggacagcgtagtcttgtgtgctgcactactctattccacacacttacgaaattggagaaagatacagatgataaatatcatgatataaattcaatgtaccaaaatatgtttacaccaatgtacaaccatagtccaatgacccaaagagaatcagaaggtgcaataaaggctaatacctctttagaagacgacatcaatgattttaataaggatatgcatgatctttacaacataggcttcagcaaagagactctatctgcttcgcaattgaaggacattgttaaagcaaaaggaagatttgttttacaaagtttatccactaacccttattacaatttggcgttggaaaattatatgtttacaaatacaccaaagaccaaaaaaggttttgatagctgcaggctgttattttatatcaataacaaatgcgcagtcatcggtaaaaaccaaaatctttggcaagaagtcgaccttgctcaattaaagagcaaaaactttgaacttctgaggagattttctggaggtggcacggtactccatgatttgggtaatgttaattattcatttttgacatcaagagataaatttgatacaaagtttttcaacaagaaagtaattgggtggttgaattcatccgatcccgaactgaaattagagctaaacgatagaggagacattgttcagaacgggtttaaagttagtggcagcgcgtataaaattgctgggggtaaagcatatcaccatgcaacaatgttgttaaacgctaatttagagcagttcagtggtttgttagaaccctcatttcccagtaatatggaatgggaatcaagtggcgtccaaagtgtcaagtccaaaataaaaaacgtcggtacaatcagtcctggccaatttattggactagtgtctgaacgctttcaaaaaagcttcaaagttgacaaaaatatacccatttacgcctgtgacgaatctacaactataaatgatgaaataaaagatgcaatgaaaagtttacaaagcgataattggaaatacttttcgggacccaaattttcaataaagttgaaagataaaaatttgaaaatacaagtcgttaaaggtatggtttatgaatgtaacaggaaaaaattaatcggcttggagtttaacgacttcttggaaaatattgatagctatacatag

SEQ ID NO: 4465 - DNA, 858 bp, Saccharomyces pastorianus
atggcaccaataagaaatacagaagaaaaagaatgcaatacagagagaagggcaatgtttgttgattgttccggcctggagagctacacggacataaacacgtccttcggaaagttggtaaacacctactactgtttcgccgcatgcgattgcgtggacgaacaactgggcattttgaagagcctggtgccggcatactacgaggtcgcggcgctcacaaacacagactttgtcagcgggcgcgcgggcgggataacgcagaaactgcttgccatggccatgactctgcgtcaaatcgcagactgtctggcgctcatcgaaaggtgcgacagcatggtacccgtcgaggttgcgaacccgaccagtttcaagggcagcgtcatgacgctgcccttgagccgggcttacgcccggctgctggacgattggagctactacatgcggcggcagcagcagcagcagcggcagccgatggcagggcgcacagggtgggtcgaccgtctgcagcaccggctcccctggcagaggtcacggacggtcgttatccccatgctgtatatcggcgggaccgcagagagcgcaagggacctgggcagcgtgctgcgggactgcgaggtcaggcacacgggtgagacgccgctgcagctgctatggacgtcgtcgcccgaattggcgtatgccacaccgcaggcgtacgtcggcaatagtagcatgcacgactggtcgcgctacgagttcgacttcagcaacgcaaccgaggacgacagcttgcctggagggcgcgagcgtaagtgcgtggtgcaactggaggcgctactgggcgcgctggccaccacggacccgctgttccagtggtaa

SEQ ID NO: 4466 - DNA, 360 bp, Saccharomyces pastorianus
atgacgtttctactatcttgggtgttattgacgaattgcatagccagggatatcatttgcatcatattttcaaaaagcagggaaaccaatctgataaacaagaagacgctacccttcaagcgaaggatgcgccagaccagtcccaagcagacaattcaagtgataacatatctcttacgaccgaccaaacatcgacagggttctgccagtgccaagacgaacaatgatgcccatgttcctcccactgatgcatctggatttaacaaatttatggactatgcagaggagaatgccatcgatgctgcttatgatgatgtgctagataaaatccagaatgcgcggaacagtaatactaaataa

SEQ ID NO: 4467 - DNA, 4074 bp, Saccharomyces pastorianus
atggattccaaggacacgcaaaagttgcttaaggagcaccgaattccctccatcgatgtcggctggctggtcaggcccaacgcctccgccctcaggcacgagaggtccaagtcgacggctgagagcgtggcccccgacgtccagatggacactgctcactcgtccgtcttcgacaagtctgtagacacgtcttgcggcattctctccccaaatgatagggtgcgccgccactccgtggcggcggccgctctgatgaataaccagcacatcactgttgcccctaccgcgccctccacgaacttcccctccggtagaggacggtccaaatccgtggtagagatcacgatgccaggctccggcgttgacgccgatgctgacgctggacttcgccatcaccatcaccatcatcaccatcatgcggaagacgcagcttcgtcacctgcccccaagaagatcggtttcttcaagagtttatttggcaaaaggaagggagaacaagagcagcagaagcgcgaaaaagacaaggaggaacaagaacaaaaccgctcgccctccccgggccacgtgaaccgcaactccataagaagagaacgaaccgcgaccatttctgctgagtcacctccgcccttgcagtacgtggccccgccgtcgtacaacgacaccgtggtgccgctgacgaggtccaagactgaatccgaggtgtactacgagaaccatccgcagaacaacactcacggtcacatccacacgcaacacactttcgatgaaggtcaaactgattgcagctcccccatagatggcgccgcctgcagcggcactcgtcctgacccgagattgatggatttcttgcggtactacaaatctaaggactacaaattagccgcctttaaagaggggaacttcctgcaatccacgccctcgtcgccgatcaagagaaacacacgggcctcgttttcccttcagaatgacagacaattgccccccaagttagccgcccgccagaaattcgacgttaagggcagacctatcccgccgcatccggacaaaccgaggttggcgcccgccttcaagaagaagaagcaaccagtcgctatggcatcgttggaggccgtggactctaactcagacgtctcgtcctccgcgcagaacaacaacgcggcgccgtcttctcacaagttcggcgcatttctcagaaaggttacctcttacgggaacaacgcctcatcctcctccgccaataccaacaacctgctcaatgcctcgtccacgtccgtatggtctgccaactcgctcgagttcgatcctgcaaagataaccgtcgtgcccgggcttgagtacgtcaagcccttgaaacacgtctcctttgctacgaacacctacttcaacgaccctccacagcagatctgtagtaaaaaccccagaagaggcgaagtggaggtggagcccaacgggtccgtcgttatacacagactgacaccgcaagagaggaagaaaattatggagtcgacaagcctgggcgtcgtcgttgggggcactggccaattgaaactgctaaatccagaagaggacgacatcaacgccaagagcaaagaggagatggctccgcaaaggcaaaacgcagccgaagcgcccgatgaggaagatggcaacccgcagagaagaaacatcgttatggctgccgcagaagccgccgcagaagccagagccaaagaggcccccaacgagttgaagcgtattgtcacgaacaatgaggaggaagtcatcgttagtaagaccgcgtgtcatttaaccattgataagccgatgatctcaagaaggggtgcttccacaacctctctggcctccatggtgtcgagtgatactaatggtacgaacgcagatgacgagaaggagaccatgcccccacccaaccaaaagatcccccacgatatcgtgtatacccgctgctgtcatttaagagaaattttgccaataccggccactttgaaacagttgaaaaagggatccaccgaccccatccccatcttacaattgcgtaacccaagaccctccatggtggaaatttggtcatttagcgacttcttgagtgtggcccccgttttgtgtctttcgttggacggtgtgcaattaacggtgcaaatgctcagaagcattttgagttctttgatttacaacccacatttccaaaaactgtccttgagaaacactttcctggatgaagaaggctggaaaatgttatgctattttgtctccaaggccaggtctttgcattccatcgatttgaccatggtcccctccatcaagacaaatgtacagaagccctccaaatcctctttgaagtcaaccatcctcagaatgcagtgcaatacagacgacaggtccgacatgaattgggatctcttgactgcttccatcgcccttagaggcggtttggacgaaattgtcatttcgggggcaaaaatgaatggagcacaattcaaaaattttatccttgtcgcttgtatcgctaccgaaagactgggcctggcttataatggcttgtccaagagtcaatgtgacgatctggccagttgggtggtgcaatccgaagtgacaggtttggatatcggattcaatgatctgaatgggaaactatcgtccttcactaatgctgtcctgggcaaaattcaaaaggtcaacgagaaaaacgtcttcaagtttctatctttaaatggaacaaatttagaagtaaaggaacacgatacttatgaaaacaacgaggttttgaaattgatcagtgtcctgtgctattcagaaaacctgaagttcttagatatctcgaacaaccctgcaatctttccgtattgtgtcccgacactaattgattttctgcccgttttcgtcaacttggtccgtttacaaatcgactacaataatttaagctccaccagtgtggttatgttggctgaagtattgcccatgtgttcgagactgagttacttctccatgttggggacagaattggatctggcatcctctaaagccctagcggaagccgtgagaaagagctcatcgttgatgaccttggacgtggattacgcttacatgccagagaatatcaaggaaaaaatttcactatatgccatgagaaacattcaaggtgaattgaaaagagttcaaaacgacgacaaagatatcaaagacactcaattttcaagtttacaagaccaactatcgcttttattaactgaaaaggcagacgattccgaacactataaaaaaatggtcgaaaacttcatggccaaaatcgcattggcccgtatcaagatcagtaaagtggttcacgaccttttcggtttaaaacttaatggtcaattaaatttggaaggcaaagaagctttgattagattgtgtttcatcgaggcaagtttggaaagaggttccgacttattaagacaaagacatcataatgctttgaaaccacgaagctcattctcggcaaaccaaacagacgcaaattcagaaagttgtcaaagaatgttattgagttcatctatcctacaaaattcagaccacattgccctgatgccatttggcagtgcactagtcgaaaaatctagcgcggacgcagaagacgctgtagagtttagagaaggcgatgattcaaataccaaccatgaagagggcccagctaatgatctacaagcccaagatcaagtcgatattaagaataaatactctatcatcaaaaaagaactagaacacgaaaagcttgttggcggtggggatttaccagtggacaaagacattctaaatcgcgccgctcaatcccttgatagtgatcaaatcaaagagtttttgttgaaaaatgacgtttctactatcttgggtgttattgacgaattgcatagccagggatatcatttgcatcatattttcaaaaagcagggaaaccaatctgataaacaagaagacgctacccttcaagcgaaggatgcgccagaccagtcccaagcagacaattcaagtgataacatatctcttacgaccgaccaaacatcgacagggttctgccagtgccaagacgaacaatga

SEQ ID NO: 4468 - DNA, 702 bp, Saccharomyces pastorianus
atgtttgaacgtaaaaatcaaaccattctaagtgaacattatctaaatataacgaaggcccaagcacaagaggatgaggacgatgattttatctccgtcaagcgtactaatcatgaaataaatgaagctgaactgccagcccttactcttccctcttcaaggagagcccaaaagaaagcgctttctaaaaaggcatccatatcttccaaaggtaacgctagtaaagtggtatttgatgatgacggtgaagctcatccagtttacgaactagaaggcgaagaggaatttcacaagaagggtgatgcagaaatccaaaagacagaatacttgagtaaagaatctgcagtaatggctgatatcgatggtatcgataaacaagtggctaaggaaaagaaacaagaaaagaaaagaaagaggttggaagctataagaagagagatggaggccacaaaggaagaggaacattctggagatgaaggcgaaggggcatcagtagcatacttaggaacaggtaacttaagtgatgacatgcacgatgatgatatgtctgaatcagaaggccatttgaagaagaaagctagaactgttgattactcacacggtaagaaacaatctaattcggccgatgatattactgaagtggaagaaccacaaactttggaagatttagaatctttgacagctaagttgattcaaggttaa

SEQ ID NO: 4469 - DNA, 1500 bp, Saccharomyces pastorianus
atggccaaaaaaaatagactaaacacttctcaaagaaagtctctacgtcaaaaggaagacgaatacatcgaaaatttgaagactaaaatcgatgaatatgaccctaagataactaccgccaaattttttaaagacctacctattagtgagcccactttaaaaggtttgagagaatcatcctttatgaaacttaccgaaatccaagcagattccattccagtatctttacaaggtcacgatatactagcagccgcaaagacaggttctggtaagacgctagctttcttaattccagtcatcgaaagactatatcgcgagaaatggactgaattcgacggtttgggtgcactcattatctctcctaccagagagttagctatgcaaatatacgaagttttgaccaaaattggtagtcatacttcattttcagctggtttagttattggtggtaaagacgtcaaatttgaactagaaagaatatccagaatcaacattcttattggtacacccggtcgtatcttacaacatttggatcaagccgtaggtttaaacacctccaatttacaaatgcttgtccttgacgaggctgatagatgtttggatatgggattcaaaaaaaccctagatgctatcgtaagcaatttgtccccatctaggcaaactcttttattttctgcaactcagtctcagtccgttgcagatttggctaggctatccttgacggactataaaactgttgggacaagtgacgttatggacggatcagataacgcaggaccatccactccagaaactttacagcagtcctacatcgaggtgcccttggcagataaactggatactcttttcagtttcatcaaatcgcatctgaaaagcaaaatgattgttttcttatcaagttccaaacaagtgcattttgtttatgaaacatttagaaaaatgcagccaggtatctctttgatgcatttacacggtagacaaaaacaacgtgcgagaacagaaactttagataaatttaaccgtgctcaacaggtctgtctttttgctacagatgtcgtcgccagaggtatcgattttcctgcggttgaatgggttgtccaaaatgattgcccagaagatgtagacacatacatccatagagttggtagatgtgctcgttatggcaaaaagggtaaatcgttaattatgttgactccacaagaacaagaagcgttcctaaaaagattacaagccaggaagattgagcccagtagactaaacataaaacaatcgaagaagaaatctatcaagccgcaattacaatcattgttatttaaggacccagaactgaaatatctgggacaaaaggcatttatttcatacgtgagatccatctatgtacaaaaagataaagaagttttcaaattcgatgacttgccaacagaggagtttgcctattcgcttggtttaccgggtgctccaaagatcaaaatgaagggtatgaagaccaatggactgtag

SEQ ID NO: 4470 - DNA, 177 bp, Saccharomyces pastorianus
atgtcttctaggactaacaacatctttagacaccatatattttgctttccagagaattcgatttcgtcattattgattaacaagatgttttctcttagttcctttagcattttgacatactcctgtttgtccaaagttttacaaacgatgtcatttttaatgaaccatttaatgtaa

SEQ ID NO: 4471 - DNA, 708 bp, Saccharomyces pastorianus
atgatgcaattaaagcactaccccaaagtttactggatatggaatcacagactttgggttttgaagcactatcctacaaattcgtccatgatctggcagactgagctcgcagtcgtaaataagctacttgaactggatgcaaggaactaccatggctggcactatcgtagaatagttgttggtaatattgaagagattactaatagcagtcttgataaggaagagtttgaatacacgactacaaagattaacagtaatatctcgaattattccgcatggcaccaaagagtgcaaataattagcaggatgtttcaaaagggcgagattgacaaccaaaaggagtacatccagacagaagtctcttatatcatcaacgccatgtttacagacgctgaagaccaatccgtgtggttttacattaaatggttcattaaaaatgacatcgtttgtaaaactttggacaaacaggagtatgtcaaaatgctaaaggaactaagagaaaacatcttgttaatcaataatgacgaaatcgaattctctggaaagcaaaatatatggtgtctaaagatgttgttagtcctagaagacatattggaagagaatggagctttcacggaaaaaaactcagaagcatacttggttcaattgatggatgcggacccgttaagaaaaaatagataccaaagtcttttgaagaaccacagatga

SEQ ID NO: 4472 - DNA, 2541 bp, Saccharomyces pastorianus
atggttttgggacaaaggtggccccgtatttttgaacacgcatcgttttactcggaaagaagctgccgtgaagcgacaatgctggcgagtaccatagattacgaccccttggaagatatcactagtatacttttttcgaaggaatccctaaacaacatagacgaattgataaatgtcaccagaaactacaagcagcagctgcaggaagacattcttaaggaggaaaacagcataagcactggtcttggcgactcctcggaaacgcaggctgctttgcgaaaggtctttcgagacttcaaggaaactcaagatgtctcctcttccactgaattgacaatctcaaacttgacggaaggcatctcgtacctggacatcgctaagaaaaacctcacccactccatgacgcttttccagaacctgaaaatactcacggacagctacattcaatccaacgagttgctctcgcaaggctcgttcaagaagatggcttcgccgtacaagataatgtgttcgctagcggaaaacacgttcgtctcttacaagtccctggacgagataaactttctgctcagctccatatcaagactgaaggctgacaccttgtccaggatcaaacagaactacaacgcgctgttttcgagtagcggcctccccgagcaggacacggccctcagcactgagttgcgcgagggcgcttgcgagttgctcgactgcgactcaagcacaaagacccagatgatagactggtgtttgaccaagctgttgttcgagatgaacgagatcttcaggctggacgacgagtccggttccttggaaaacttgtctaggcggtacatctatttcaaaaaaatcctgaacaactttaatgcgaagttcgcagactacttcccgaaggactgggagatgcccgtcagattgacgacctccttctacctcaccacgcatagggaccttcaaatactgttgaagcgggaattcaaagacaaaaacccctcgatagacttgttcatggccgcgttgcaatcgaccctggacttcgagaagtacgtcgacgtgcggttctccaaaaaaataaaagagcccaagctgagttcctgttttgaaccctatttgaccctgtgggtgtcccaccaaaaccaaatgatggacaaaaaattcctctcttacttgagcgaaccgaaattcccctccagcgacgcggaatctctcgtgttaccgtccagtgcagatctcttccgaacctaccgttctgtactgacccagaccttggaactaatcgacaacaacgccaacgatgggatactgacctcactggcaaattttttcagcaagtggctgcaaacgtactcgcagaagatccttcttcccctgcttctgcccgaaaccatcgaagtgcaggacaagcaagaggctgccagatacaccgtcttgttgatcaacacggcggactattgcgccactacaatagaccagctggaggagaagctgtctgagttcagcagtgatcctgaaaagcttgcaagcacttttgcgagaaccaagaacatatacgatgacctactagccaagggaacctcctttctactgaaccgtgtcataccattggacctgaatttcgtatggagggagttcaacaacaacgactggtctaacgctatgatagaagactatagcagatacatggtgactctcaaatccgtattgaaagtatcgccctcaatggcaactgacgcatccaataaacaaccatccattttggcgttcatcttatcacaattcaacagagacgtctacaagtggaacttcctggacaacgtggttgatattgtcaccaataacttctcaagttgcatcatccgcctttttcaaccgatcccgcccttttctttggcaagtagcaagaggaaattcgagaccaagaccgtcatcaatatcggagagcaactgcttcttgatctagagctactaaaggaaattttccataccctgccagaaaatgtcaataatgattctgatttgcgagagaatacctcttacaagagagttaaaagacacgtggatagcaacatagaccaactactaaagttcatcaagctactggtggcacctctggactctgctgacgactattacgagacatactctcaattaacaaacaacaacgctgatccagcagtatggtcttttattcttgccttgaagggtattccatgggacctggcattgtggagaaaactgtggagtgcattcaacctggaaactgataataccgaagaaggcagtaagccggagggaacccgtgatcttttcgtttttaaatgggataaggcacttctgggtcaattcgagaataacctgtcaaggattcaagatccggcttggtctaaatttgtgagacaagatttaaaaatatcacctcctgtgatgaaaagaatagtgtccactccgcaagtacaacaacctaaagaggagcaaaaaaagcagagtttgagcgttaaggactttgtttccaattccaggtttttcaacagaggagcttga

SEQ ID NO: 4473 - DNA, 987 bp, Saccharomyces pastorianus
atggaaaaggatgagccattgttgaacgaagacaaggaaagaaccgtcttgttccccatccagtaccacgagatctggcaatcgtacaagcgtgccgaggcctctttctggactgccgaggaaatcgatttgtccaaggatatccatgactggaacaacagaatgaacgaaaacgaaaggttcttcatctcaagagtccttgccttcttcgccgcctccgacggtattgtcaacgaaaacttggtcgagaatttctccaccgaggtccagatcccggaagccaagagtttctacggtttccaaatcgctatcgaaaacattcattccgaaacctactccttgttgatcgatacctacatcaaggatccaaaggaaagtgaattcttgttcaacgccatcgacaccatcccagaaatttgcgagaaggccgaatgggcccttagatggatccaagacgcagacgcgctgttcggtgaaagactagtcgccttcgcgtccatcgaaggtgttttcttctccgggtccttcgcctccatcttctggttgaagaagagaggtatgatgcccgggttgaccttctccaacgagttgatctgcagagacgaaggtttgcacaccgactttgcctgtttgttgttcgcccatttgaagaacaagccggacccagccatcgtcgagaaaatcgtcaccgaggccgtcgagatcgaacaaagatacttcctagacgccttgccagtcgccttgctaggtatgaatgccgacttgatgaaccagtacgtcgagttcgtcgcagacagactgttggtcgccttcggtaacaagaagtactacaaggtcgacaaccccttcgatttcatggaaaacatttccttggccggtaagaccaacttcttcgaaaagagagtctccgactaccaaaaggccggtgtcatgtccaagtccaccaaccaagaagccggtgcgttcaccttcaacgaagacttttaa

SEQ ID NO: 4474 - DNA, 318 bp, Saccharomyces pastorianus
atggctgggtccggcttgttcttcaaatgggcgaacaacaaacaggcaaagtcggtgtgcaaaccttcgtctctgcagatcaactcgttggagaaggtcaacccgggcatcatacctctcttcttcaaccagaagatggaggcgaaggacccggagaagaaaacaccttcgatggacgcgaaggcgactagtctttcaccgaacagcgcgtctgcgtcttggatccatctaagggcccattcggccttctcgcaaatttctgggatggtgtcgatggcgttgaacaagaattcactttcctttggatccttgatgtag

SEQ ID NO: 4475 - DNA, 1443 bp, Saccharomyces pastorianus
atggacggtgatgtggagttcaacgacgatgaagacgaccttaacggccttgccgccggtattatcacaagacggctgaacctcaccaccaacgcgacgggcagtttccagtccagtcagctctcgaactcgcagctcttactgcaacagcagagacggtcccacaagaaattcaaaaaactgatcggccacgaggccaaactattatttctcaagtccttccagttcatcctgaaaaggcagacccggtggctgatcgatgaaatgcacttccccgcggaattcgaccacgttgtcaaaataatatggctgaaactcctgaaaacaatcaacgaccaaccccaagaagagctgaggctccggctgcacatggcgtccacagtttccatcctgtatctcgcatctacccacctgtccttgcccgtttacacttgtgactacatcaaatggatatgcactacaaagatgccgtatttccaagcaagtgaactactgcccaaatcgtggagaacccggctgccgaattactacatttccatattggagggctccatttcgcccttcaacggccagttgtgcaacaaaatcgctttaacttgcggcacgattcaattcaacaaatctttcaactcccaagtttcatgccagggtttgttattgaaactggtgatgcaatacgcgctgcccccagagttctacttttatacaaagcaaatcatcgaatttcaagaaaccgacatcaagaacctagcgctttgggaaagaatagacgaacgtcacacaggaccgataagcaaccacgctgaattgagaatcatctcttatttcatgcttacgatacactggattatttcttttgatcaagaccaccggtacccgttgaaatggatcctcgaactctcgagttcattaacccgccattcgacaacaagggagtctattgacagaaacatcgttaacgtggtttacccagataagtcgacttctaacgactacttccaatggtccgacgaagaaactctgcagttcttgaattggatggaaaagcagttcttgcccacacaaacaaggtctttggatgatgaaagcggctcaaatgatatgaccattgatcaaaaaatcgccagaaggaaactctacaagattttccccttggaccccgacactaatcgtgatcatgaggccatcgactcgaagcatcaattgacatttattgaagacttacaagaaagatacgccaaacaacagtcttttcttaacaacaataaaacagttcactttactactcgtcaagatatccatctgccgactagaaaggaggctgtcaatagtctcatgactcaaatagcatcgcaactttcagctgacttcgccatttctgaacagcaactaaaagattgtatttatagacttaaaaaagcttgcatccacaaaatgaactga

SEQ ID NO: 4476 - DNA, 411 bp, Saccharomyces pastorianus
atgagtaatgggagtaatagtgatgatgtaaacaacgaggatattcagatcatcttcaaaaactacgctacattgtatttcacttttattgtggacgaccaagaatcagagttagccatattagacttgattcaaactttcgttgaatcattggaccgttgttttactgaagtcaacgaactcgatttgattttcaattggcaaactttaaagagtatattggaagagatcgtacagggaggaatggtgattgaaaccaacgtaaacaagatcgtcgcttccgttgatgaattgaacaaagcttctgagtccacagatagtaaaataggaagactatcatcgactggattcgggagcgcactgcaagcgtttgctcaaggtggatttgctcaatgggccactggacagtaa

SEQ ID NO: 4477 - DNA, 1677 bp, Saccharomyces pastorianus
atgggcttcttaaactccttaaagaaaccggttaacattaagacctcactccctaggttctccggcagtgccacgggttcatcgttcacttcgagtagtcacccaataaagacacgttccttccaagaattacccccggagctattcgctattgccaaacctatattcaggttgctgcaggcacaagtaaacaaggtctactttcaatcttcaggcgctgaagcagcatggaatattaaggattcgtctggtcacatttttgaagcggaatcgatctccttgatcggttctcatatagtcattacaggctcgtcttttgggaccatgaacgtttccatcatagattccccatctaatataaatcaatgctctatttcaaacgttggcgaattcctgcagttcaattacggccagttgtctgttacatgtaacgactttgccctactagaagagttcaaaaggttgtgcatgatctccattttcgagtctgtgtccatatataaggccttgaccggtacagtaatttcatcctacgggttaagaatgtctgatatgcatgtcattttgaactcggcatttaatttcaaagattggtgcgagatttatctcgatgatcaaggctgggtcaaagtgtggtgccatattgacaaggtggctaaaagtaatagtgatcatgatgccaaaggtaaataccaaatcagattttatagagatgacaagtccacatctagaaaaaattgcgttcttttcattcctgacaatgaatacgtacaagattcgtttttttataacgccaactcaagtaaaccctctaaaaatatgaacgaatttttccaaggattgcagatgataaagctcgttggtaatgtgcgtttctgcggtgatacgtatttaaacgacataatggatagtgggtcaatttatagtaatgcgaacaatgggagtggtgacagcagctcgaccgcattgaacaatgaaagtcccaacactacaccgaagagtagaacttttttctcaccgaaaggtcacaaaagaaacggttctcatgtaagttcgctaacttcaagatcaacaaagaagcccatcaccaacttcaccataagttcaaaaggtctcttgatcaggccattgccgcatcacggtgtgcaccacttggaagcaatgattaggtttattgttcccttgatggactgtgcaaggctttacgggcgtccagttcaattcaagacagacaggacagacataaactcattaatgtttgggttacccaaattgccctcagtcgattattttgctcaggaagagattgcccatttaatgacccaggattttaatcccttaaaagaaaaagacaccgacgatacaatggcattgaccatgtcgaggttttctagctatttacaagaaagaatgaccaaagtctctaaaagaaacaccgacttaagtttcaggactatcggtgatgtaatgggcatgtacaaccctacaagggacgacgctaaagtgagccctattggcaatgaaaataacttagtgaagcaactttcgttgagcgaaaagagtaacactagctcagatacagcagatgtgatgaaccaattccaggtgaacgctcgtgaatatcaaaatactatgcgcgaatgtccgcttgttacaactacatcacccttggcctag

SEQ ID NO: 4478 - DNA, 1512 bp, Saccharomyces pastorianus
atggcatcatcaccatcacaaaatgttgtcaactttgaacatattgaagtgcaaaaggaaaacattttacctttaaagcacggaagatcagcatcagcacttctgaaagcaatacaccaaccgttgacagagatgagtcatatcaaatcaagctttgagcaaagactgatagatgagctcccgacattggatgacccaattactttatacctcgaatacataaactggcttaacaatgcctatccccaaggcggcaattccaaacaaagcggaatgctcactcttatggaaaagtgtttatcccacttgaaggacttcaaaagataccagaatgatttaagatttttaaaaatatggttttggtatatggaaatctttacggtaaattcttttatggaaagtagagatatcttcatgtatatgttaagaaatggcattggttctaagctgtcattattttacgaggaatttgcaagccttctgattcaaaaacaaaagtttcaacatgcagtaaacattttacagcttggaataaagaacaatgctgagcctggtctgattttagagaatcagttgtctcatcttcagaaacagctggacgagcaaaatattcaagaggacggggttatagtggatttgttggaaactacggtgcttgggaaaactagatctggatttgtcaacagactcgaacttgcaaatccgaatgatccattaactaacgaaaacatattgaaaaatactatatttgtggatgatgaggacttgaacacagaaccatctgaagaattcaagagtaatgtttatagggacggatgggaaaactttggctctaaagcagaaagaagtaaagaaaataggtccattatatcagtactcgaagcaaacacaaatttaggtgagctgaaacaacaccaaataccctcccaaaaaagtaggcaacgtgatgaaaaattacctatcttcagagattctatgggtagaagcgaccctgtttatcatataataagcgtgagagaccaaaaacctgaaaagatcgattgtaactttaaactgatttattgtcaggatgagaaagctaaaagcgagagattggaattctctttagatgagatcttagctatttcaagaaatatttataaaaaaaaaagcttgaacaagaagcacccaagggaaatagaggagggcggtgaagaaaacgaagagcatgaagaaactgagatacgttcaaaaaagcctaaaacatctagaaaagccttggtttctaagacactgatcccctcataccaagaaaaaatatctgccggtgagggatacattaacagtcccatgacacctaagaaccaagatattagattattagacgattcccctgttactgggccacgccggctaacaccaattttggaaatgagagaatcatattccgtttcacaaagcagaaattccgagattatttcagatgatgacaaatcaagttcatcctttgtctcgtacccattgccacgctga

SEQ ID NO: 4479 - DNA, 2163 bp, Saccharomyces pastorianus
atgaaatttggtgagcacctgagcaagtctcttatcaggcagtatagctattactacattagttacgatgatttgaaaacagagttagaagataacttatctaagaataacggtcaatggtcgcaagaactagaaacatattttttagaatctttggagatcgagctggacaaagtttacacattttgtaaagtcaaacacagtgaagtctttagacgtgtgaaagaagttcaagaacaagtgcaacatactgttcgtttattggactcaaataaccctcccacgcaattagattttgaaatcctagaagaagagctaagtgatatcattgctgatgttcatgatctagccaaattttcaaggttaaattacactggttttcaaaaaatcataaaaaagcacgataagaagacaggatttattttgaaaccagttttccaagttcggttggactccaaaccattcttcaaagaaaactacgatgaattagtcatcaagatctctcaattgtatgatatcgctagaacctcaggacgcccaataaagggtgattcatcagcaggtggaaaacaacaaaattttgttagacagacgacaaagtactgggttcaccctgataacatcacggaattgaaattaattattttgaaacatttgcccgtcttggttttcaacacaaacaaggaatttgaaagggaagattccgcaatcacttctatttatttcgataatgaaaatatggatctttattatggtagattaagaaaagacgaaggtgcggaggctcatagattaagatggtacgggggtatgtctactgacactatatttgtagaaagaaaaacccatagggaagattggactggtgaaaagtccgtcaaggcaagatttgcgctaagggaacgtcatgttaacgatttcttgcagggcaaatatactgtagaacaagcttttgctaaaatgcgtaaagagggtaaaaaaccaatgaacgaaattgaaaacctggaagctttggcatctgaaattcaatacgtcatgttaaagaaaaaattaagacctgtagtgagatcattttacaacagaactgcttttcaattacctggtgacgcaagagttcgtatttctcttgataccgagttaactatggtaagagaagataatttcgatggtgttgatagaacccataagaattggagaagaaccgatattggtgttgactggccatttaagcaactagatgataaggatgtttgtcgtttcccatatgcagtcttggaagttaagttgcaaactcaactaggccaagaacctccagagtgggtgcgtgaattggttggatcccacttggtcgaacccgttccaaagttctccaaatttattcatggtgtagctactttattgaatgaaaaagtagattcaattccattttggttgccacaaatggatgtggatatcaggaaacccccattaccttcaaacattgaaataacaagaccaggcaggtccgataacgaagataacgacttcgatgaagatgatgaagatgatgctgctttggttgctgccatgacaaatgctcctggtaattcccttgatatggaagaatccgttggatacggggctactgcggctcctacttccaacgttaatcacattgtagatagcgttaattctgcttattatcaaagaaaaattagacatgcagaaaaccctgttaccaaaaaatactatgaagttgtggcattttttgaccactatttcaatggtgaccaaatatccaaaatcccaaaaggtaccacgtttgatactcaaatttgtgcccccccaggaaagacaatatgtgtcccagttcgtgtggaaccaaaagtttactttgccactgaaagaacatatctgtcttggttatccatctcgattttactgggtggtgtttcgactaccctattaacctatggttcaccaacagccatgatcggctcaattgggttctttatgacatctttggctgtgttgatacgtactgttatggtttatgctacgagagtggtgaatattagactaaagagagcagttgattatgaggataaggttggacctggcatggtttctgtgctcctaatcatatctattttgttctcttttttctgcaacatagttgcttaa

SEQ ID NO: 4480 - DNA, 249 bp, Saccharomyces pastorianus
atgcagaaaaccctgttaccaaaaaatactatgaagttgtggcattttttgaccactatttcaatggtgaccaaatatccaaaatcccaaaaggtaccacgtttgatactcaaatttgtgcccccccaggaaagacaatatgtgtcccagttcgtgtggaaccaaaagtttactttgccactgaaagaacatatctgtcttggttatccatctcgattttactgggtggtgtttcgactaccctattaa

SEQ ID NO: 4481 - DNA, 288 bp, Saccharomyces pastorianus
atgacgttatattttgctggcttgcaggtatatctattttatgaatttggaggcgcgaccttattaatcatcttgatcccagtttcctggttttggaccttgaggcgctcttggaccaccagctttcttggccataataatttgatcaatagaaagcacagtagttgcagcctctgtggcgacgttgatagcaaatttcttggtggcaagcatgtcgtaaataccatcttctctaatatcctttacaccttcaccagtttcaccatcgatatccacacctttatataa

SEQ ID NO: 4482 - DNA, 582 bp, Saccharomyces pastorianus
atggccgtgacatttaaggatggtgtgatactaggtgctgattcacgtaccaccactggtgcgtacatagctaaccgtgtgacagataaattaacgagagtacatgacaaaatttggtgttgtaggtccggttctgcagcagacacgcaggcgattgccgacattgttcagtaccatttggaattatatacttctcaatatggtaccccctccacagagactgctgcctcggtgttcaaagaattatgttacgaaaataaagataaccttactgctggtataattgtggctggatatgatgacaaaaacaaaggggaagtatatactattccattgggtggctccgtccataagctgccttatgcgatagcaggatctggctctactttcatatatgggtattgtgataaaaactttagagaaaatatgtcaaaggaagaaaccgtagatttcataaagcattcgctatcgcaagccattaaatgggacggatcttccggtggtgttataagaatggttgttttgacagctgctggtgtggaacgtttgatattctaccctgatgaatatgaacaactataa

SEQ ID NO: 4483 - DNA, 582 bp, Saccharomyces pastorianus
atggccgtaacattcaaggacggtgtaatattaggtgccgattcacgtaccactactggggcctatattgctaaccgtgtaacagataaattgacgagagtccacgacaaaatttggtgctgtagatctggttctgcagcagatacgcaagcagttgctgacattgttcaatatcatttagaattgtatacctctcaatatgggaccccttccacagagactgcagccgctatatttaaagaactatgctatgagaataaagataacctaacagccggtataattgttgctgggtatgatgacaagaataaaggagaagtatacaccatcccgttgggtggttctgtccataaactaccatacgccatcgcaggttctgggtctaccttcatatatgggtattgtgataagaactttaaagaaaacatgacaaaggaagaaacggtagatttcataaagcattcgctatcgcaagctattaaatgggacggctcttctggcggtgtcatcagaatggttgttttgacagaagctggtgtggaacgtttgatattctacccagacgagtacgaaagactataa

SEQ ID NO: 4484 - DNA, 1800 bp, Saccharomyces pastorianus
atgaaaagccctaagcatagcgatataatgtcaggacttgttgaagcattgcgatccgatgcaggtagcatcattttgaaggattcttctgcaatctctaaagatgtcaaaggatatatagattctgttatcagtatttgcaaaaatgaaaatactatgaagaaaacagatttagacgaaatcaccgtcgatggtttagatgcgaatcaaatttggtggcaagtcaaactagttcttgatagtattgacggtgatttgattgagagaattcaagagcttaaaaatgttgctgtgccttctaacgatctttctgatgatgacgatgcaaactcggcagcagaaggagaacctgagagcgattctgaggaagaaccgatattgtccggtgatgcttttgaggctgatcaggacaacagcgacagcttttctgaaaaagatgaggaacctatatcgcatgtcaaagaatctactatagaagaaaacaaagaaagatatgtggaaaaagataaaaagccttctgaaaaagaccaaaaaaaaattcctgctgatccttatggtgttaatgataagtttttcgatcttgaaaagttcaatagagatacgttagctgctgagaattatgatgctgccgatgctgctacggagaatgaaggtgaccagatagattactttcaagatataccttcagatgaggaggaggaggaggcggtctattatgaagatttttttgacaaacctgcagagatgtctccaactgaaagcgtcgatgtaaacgatttagaagatgatgaagagttgaatgaaaaggagcatgattccgtaatggacaaagtcaaactggatttatttgctgatgaagaggaagattcgaacgctgtagcagtgggtgtttcaaacgacaaaaatttatctacttttcaaaagcaacaattagaaattagcaaacagatagagcaattggaaaaggaagcagttgcggagaagaagtggtccttaaaaggtgaagtaaaggccaaggaccgtcccgatgatgcgttacttacagaggaccttgaatttgatagaacggcaaagcctgtgcctgtaataacaagtgaggtgacagaatcattagaagacatgatcagacggaggatacaagatagtaattttgacgaccttcaaagaagaaccctattagatgtctcacgccaatctcaaaggccgcaatttgagttaagtgatgtcaaatccgcaaagtctttaacagaaatatatgagaacgattacgcgcatgttgaggatgaatctgctataagtgaagagcttaaaaaggcacactctgaaatatcagagctttacagcggcttggtatataaattggacgtgctctcatcagtacactttattcctaagccagcaagttcttccttggaaatcagagtcgaaacacccgctatatcgatggaggatgctcaaccacttcatatgtcgaatgcgtctactttggctccccaagaaatatacaatgtcggtaaggcagaaaaggagggagaaatccgcttgaagaacggtgttgcgatgtctaaggatgagttgactagagaagataaaaatagattacgcagggctttgaaaagaaaaagatcaaaaggtatttcatcaaatctgaacaaaaaatctaaaaagaatgaggtagttgacactctgtcaagggcgaagaacatcactatcattaatcaaaagggtgaaaagaaagacgttgccggtaagaccaaaagaaacacatcggggccagatagcactaacataaaactttga

SEQ ID NO: 4485 - DNA, 1560 bp, Saccharomyces pastorianus
atgttacgttcactacaaacagttgctgctttagctaacagaagattatattctgtcaaatcgcactcgaaccgaaacaaaatcatcaaaactcttttgactcatcgttcattcgacccaattcgccgtcacttacctacggatatagcgagtgctgatccgtattctctctcacagaatgttatcaaaagcctaaacacactaggccttcccaaagaagatgcagcgataatacacaatatgatgatagaaaacctaagtaacctggactacagcattgcaacaattcactccaagaatttgcatgaacttgatttgaagccatcaatttctgcaataaaacaaatcgtcaaaaacaatccgggaagagtagagagttcatgggagctttttacaaaatataaagcttcagtagaaatcattcctgatgagttaattgaggtggttctagaaaaaattattaatttcgacaatgctgaaaaggtcgatgggaaaaaacaattaacttttcaagacctggtaagatgtctctatttaatagatcacctctctcccaaccacgttatatcttcaaagctcgttgaatcgattcttacatacacaatagataatggaatacctaatgtttttgctttcttgctcaaacacaaaataccgttgaacttctttgataagtatattgatgaaatgacaccctgccagatttttgaactctataggtttttcccaattgatgtagtaataaccaacataccgatactacataaatgtgtagcagttctaggtaagaacgaaacgatcccactaactgaagaagaaaaagaaacgacgacaaagttagaagaagaggcagaaattgttaaattacaatgtcatgataattggaatcttgatattccaaaagaggatgcgtacaaaacagaggatgcattcaaaaacttatttgtagaaattcaaaaaagagaactagatagaaaagatttcggattagctcttactttactgagagtaaccggagtttttaaaggtaacatatccttgttctttgagttatatcacgaataccttttgagattcgaacgcaacgaggacagcttaatgtttgaagcctttttaacgctttgctaccagggctataagagagataacagcaaaatgttgcaatatgccgaagctttcgttaaagagggtactagtgccaaacttcaaagccaaatttttagtgtactaattgtcgccaatgcaaaaacaaacatcgacttatcgcttgagatttacaactcaaacatagccaaggctcacagagagaaagacgaatccacggatctttctgagagtgacatactgactgagtcgctaattttagctttcttatccaaagatgatgccgattttgccagagtcgtctttgatggtgcattgggagagaaagttctttcaggacctactgctgctaaaaagataaagaagctttttgcacagtacggagaagcagtagaggccaaagaaagtataaaagtcatgcaatctaggatagaacattatatggaaaatatttaa

SEQ ID NO: 4486 - DNA, 198 bp, Saccharomyces pastorianus
atgaagggtgttttgggttacactgaagacgctgttgtctcctctgacttcttgggtgacgctaactcttccatcttcgatgctgccgctggtatccaattgtctccaaagttcgtcaagttggtctcctggtacgataacgaatacggttactctaccagagttgtcgacttggttgaacacgttgccagagcttaa

SEQ ID NO: 4487 - DNA, 1212 bp, Saccharomyces pastorianus
atggttggcgaagattggggcttgattgtactatcatttcttgtaagagttggatttttccttttcggtatttaccaagacgccaattttaaagtgaggtataccgatattgattattttgtgtttcatgatgccgccaaatatgtatatgagggcaaatcaccttatgcgagagatacgtaccgttatacgcctctattaagttggttgctggtgcccaatcattattttggatggttccatttggggaagatcatattcgttattctcgatttgattactgggttcttaattatgaagcttttgaaccaagccatctccaagaagagagctctgatgctagagagcatttggctattgaatccaatggttattacgatcagtacaagaggaaacgcggaaagcgtattgtgctgcttgattatgcttgcactttattatttgcaaaagggcaaatataccatggcaggtctcttatatggcctttccattcatttcaagatatacccgataatatactgtatcccgatggcgatctttatataccatagaatgcgtaaggaaggtccacgagcacaattgacggctttacttaatattggtgtaagcacgctagtgcctttgttgggatgcggatgggcaatgtacaagatgtatgggtacgaattcttggaccagtcatacttgtatcatttgtacaggacagaccatagacataatttctcaatatggaacatgctattatatttggattctgcgaacaaggggaatggcgggtccaatttatcgaagtatgcattcgtacctcaattgctgctcgtattggtaaccgggtgttttgagtggtggaatcccacattcgataatctactgagtgttctatttgtgcagacgtttgcctttgtggcgtacaataaggtttgtacatcacagtattttgtatggtacttgatatttttaccattttacctgtcaagatcacatatcagctggagaaggggcattctgatggtcacgctctgggcagtgacacagggcatttggctaagtcaagggtactatttagaatttgaaggcaagaacgtattttatcctggagtcttcgtagcgagcgctctgtttttcctgaccaacgtgtggctgttaggcgggtttatcactgacctcaagacaccggtgccactcgcaatggccggtaagaagaacaattga

SEQ ID NO: 4488 - DNA, 528 bp, Saccharomyces pastorianus
  modified_base (12)..(12): a, c, g, t, unknown, or other
atgaacgtgtanaagttggttatccgaaaacatcctgacctttacgcacaactatacgggaccgaagagaatgcacaagaggaagtagaagccgtgaccaccaaactggctgaatccagtatcggtgaagccagagaggaaaagctggaaaaggacttattgagaatccaaaagaagcaggaaaacaaagaacaaagagagctagccaagaaactgtcatccaaagtgatcatcaagagagaggccagaaccaagaagaagttcatcgtggccatttctgggctggaggtctttgacatcgacatgaagaaactggccaagacatttgcgtccaggttcgccactggctgttccgtgtccaagaacgtggaaaagaaggaagaggtcgtcattcaaggtgacgtgatggatgaggtggaaacttatatacactcgctactggaagagaagggaatgaaagacgtcaaagtggagaccatcgacgcgaagaaaaagaagaaacccgcagcagaaggcgtcgccaagtaa

SEQ ID NO: 4489 - DNA, 195 bp, Saccharomyces pastorianus
atgatgcctgtccataatatcattgatatctatagagtgatttttttggacttgtcaagaggcaagatggggaggaattatggtattttagttgccctcattgcattaaataccgcattgttaccatttgtcagtaaatacgcgggcagaaaattgagacaaaaggccttagctgcatcacaacagggccagtaa

SEQ ID NO: 4490 - DNA, 1350 bp, Saccharomyces pastorianus
atggaaacagatgccgaatattgtagacgcaaagatatacacgacctttccagtgtggtcggtgttgcctgtaatcaaggtgttccaggtgctgactcagacctagttgacagtgagaaggaacaagtggccgattccgaggaagactttcagccgggttccatacatgccaatggggcctcatcaacaacagctcaggcagcagcgctggccccatcttctcccggcgctggttatgaaggtggggggcccgtgcagaagactcccaccaggtttttctcacccagtttgcaaggccaaagaaagaaagtccttttaaagttcgtttttgccaattgcctgctagctattttttgctttacaatttttgttttgttttggggggctctctacaatacagaaaaatatgtgcataaggtcaggctgctggccgtcatccaggagcctcctgtcgtggccctggacagcaacagctcgatggccgtgccatccatctcatccgcactacccaccttcattggcaaggtgccttgccattgggacctttacaacgcttccacgtttcagactaaattccatgtgaactcctccgagcagatcaatgacaaggtcatcgatttgatttacgacgaaaaatactggttcgccatcaatattaaacccaatgccacagagactctctttgagtcgctggtcaacgacaccgccccctattttaattccaccctgtttaaccaggtcgtttatgaaagtggtagagacccaacgaatctaaaatccacgatattgccgcttgcccaagaaattgaagagtactacggagccttctatacgttcaactacttaccgaaattcctgactaatataacactgatggataactacaacttgactagcaacctcacacatatcaccgcggcggggaaatacaactacgaatactatgaccacaggccgttcaccgaccgtattgtgctggcgcccacccagatcggtgttgtttattgtctgctattaacctttttccagttcctgttatatggcccattgcacgcagaaatggcaaaagtgctaaggcctgccaacggtataatttaccgtatcgccatgtcatggtctacctttttccttgcatccttattcttctgcacaatttccgccatcttccaggtcgacttcaccaagtctttcggcagaggtggcttcatggtgtattggatgtccacgtggctgttcatgcttgccgctggtggagctaacgaaaacgcggtgatgcttgtcatcaccttgggtccacaattccttggattttggatcctatcggtcgtcatcttaaacatcgttccatcc

SEQ ID NO: 4491 - DNA, 513 bp, Saccharomyces pastorianus
atgccatccgacgcagcagccagcaccggcctgcccacgccgtggactgtcaggtacagcaagtccaagaaaagagagtacttcttcaacccggacacgaagcactcgcagtgggaggagcccgagggtacggataaggaacagctgcacgagtatctgaaagaccacccaatgcgtgtaaggtgtctgcacatcctcatcaagcaccaggactcgagaagacctgcttcgcaccggtccgagaacatcaccatatccaagcaagaggccacggacgagctaaagaccctggtcacgaggctggacgacgcttccaagaccaactccttcgaggcgctggctaaggagaggtccgactgctcttcgtacaagaggggcggcgacctgggctggttcggcaggggcgagatgcagcccagtttcgaggacgccgccttcaagctcaaggtcggagaagtgagcgacattgtcgagtcgggcagcggtgtccatttaatcaagcgtgtgggttag

SEQ ID NO: 4492 - DNA, 513 bp, Saccharomyces pastorianus
atgacagcgctggtcgatgagctgggcaggtataactccaagatcacgcgacacgtcaccaacaagcagcatgagactgagaagtcgatgaggtgcacccaggagatgctgttcaacgtcggcagccagatggaagacgtgcagaaggtgctgctctcgctgtccaaggacatgcatgctttgcaggcccgccagacctctctggagacggcgttccgagagcgggcaggccaccacacctgcgacccacaagacgtcacatccttgaacggcaccactctcttgcacgactctgacgaccaccacaagaggtccacgcctccgccaagaacgatggtcacaaggtccatgaaacgcgacaggtccacttcccccgccgtgtcaaccagccaaggccatgccagcgaagacgaccacgactacgactacgacggccgccagctgaagcgtgcggccaggaccatcattccctgggaggaaataaggcccgacacgctggagtccgaactgtga

SEQ ID NO: 4493 - DNA, 348 bp, Saccharomyces pastorianus
atggacactcgaaccaggacagacgaggcatccacggacatctcggagaccaattctgagaggtcgttgatgatcacggagacatcatcaccgttcagatctatattctcccacagtgggaaaataacgactaccgctggcttggaagagtccgacaagcagatattggaatgggcaggtaagctggaactggagagcatggatttaagggaaaactcggggaaactgatcaaggttctgaacgacaactccaagacgctgtgtaaatcgctaggcaagttcaaccagctactagaacaagacaccgctacgaacggtttgtatcggacagaatgtgcacacctttaa

SEQ ID NO: 4494 - DNA, 414 bp, Saccharomyces pastorianus
atgagcctatacgcaggctgcagggaaaagacaagacaagacaagaccagacaagacaaggggacaaggcagataccaagctcaatgtcaccaatactcaaggaatacctgaataaaagggtcgttataatcaagactgacggccagtgtctcatagcaagcttggacggcttcgacaagaacactaacctattcatatcgaacgttttcaaccgtataaataaagagtttgtctgcaaagctcagatacttcgaggcagcgaaatcgcgctcattggcctcttggacatcgaggacgatgatagcctggctcctatcgatgaagcgaagataccgatgataaaagacaccaagaatataattgaaaatgagcatatagtatgggagaaagtctacgaatcaaaaacaaaatga

SEQ ID NO: 4495 - DNA, 2520 bp, Saccharomyces pastorianus
atggatttatttataaggacagaagctagcttctatgacgtgctgaaaaaattgctcgctgtctgtgagtctcacagcaggtactctggttcaagtttagacccaatggttaaagtcggttgcgaaatgagggaaatcagcagttgcttgaggcgaattttaagaaaacatgctgcagtttatcacaatctatctctaactgaaaataccatgaatttttatagtgatttttttgaagacgtaagagtactagatatgtaccacagtcttctatttgggtgtatgcgtttgcttctggatgcagatatatcattttttagaatgaattcccaaaaatcctttaccatattactattcaaggtatattacaaactaagggatgtttactacgctacaaatgagacgcgactggattccctactcaatgcatttatataccaattcaaaaactgctataattctgtcagttgcaacacgttgaaatatggcagtgttcgtgacattatgtctcagaacttttccttgataaatcctccttttatcggcctgaaggaagtgaccaaaagaacctatttcagattagatattgagaagctgaagatcaataataaacttattgagattctggaattgaataacggaggaatcgctctctttgaggttcttggtagcgaaatgccatatacttcacaaaacgtcgaaaccctgttccaatcccttgcgtcaggtaaccatgatttgatgaatgtcggtaggtcgttgctgtttcaaacactaagagctggggatctagaaataattaaacttgatgacaacggggctaagctgaaaacgctgacaggtaatggcgtagtgctaaaaataacgtgtaaagaccctagtcagtggcaagcgcattggaaagatatcatcagaaatttatccgatcgattatcaatgaataagtacaatggatgcaagagcgatttttcacagaactttcatgcaggacacaacaaagtgggatataatcaacccgaacaaaatgccggcatggcaactggctctactgaaccatcagtcagctcttcaaatacagtacggagtagtggtactttgcatagatccacccacttaccggggggtttgtcttccttggtggaagcctctcaagaattttctgcaggagaatcgaactcaattttgaatggaaaggtaatatccgataatgattcagacctagaaacctcattaaaagatattgaatccttaagctgtgaaaagctaattgaattagatagaagcatacaaattcctctgtcaccgaaaattttggatacccctactttaaaaaacgttagaacagcttctcaaatattcagtttggagaacgtttcgcctgaattgctagagagtgcttcgtctgaaatctgtgatgatgaaagtataatttctgaagatgaaaaggacaacggtgaggaaactgtattcgatccaaacgtcgattactataagccggtactttatcgacgtaaatcctcatctttattgagtgtctttacttcgaaaaacaaaaaggacttaactattgacatccccaagaatcgttccggatcgttgtttagtatagctggagatcaacaattgcttacgcctatatcagcaggctctcataacagtgatgttggtgaagcgtacgtgtcagttccatcggatgtggacgcctccagcagtgcagtattctttgaaaactattcagtcaaggtttctctatggaatggtaagtcatgggtgcagttgagtaaagaagcaatgtgcctctctttgattctctctggtggtaatgagacccttttaatcataagcaaaaatttcaaaagggagaaatgtaagtttgttgtcaaattagaatctagctggaagtgcaacaggtcaacagcccaagatgttcagcttcgaatctattcttcagattttaaagctagtgtattcgaaatgaggcatgacgttacactgtctatacgctgttcgcaagccgaccaattaatgagcgtattacagtatcagctacaaaggattcaagcgccatcccttccagcctctgctaccgcaaggactttatcgaccatatcttcatcttcatgtttcagtcgaaatgtaacacggtcatctacggaaaattcagaattggccaatatgaaaaatggatccgggggtgtaaattcgtcacttctgctatcttcaataaaagtaaggcaacacgttaaaaccaagcccgatatttggaaaccatctcgggttggctttgctgatatattttctcaggaatataaaggaattgtggtagcgataaaatttgtgatttgctctgatgccgagggaaccttgaaccctagagagtacaattctcgtctccacgatatcaaaaggctaggaagaacaggcttgtcgcttgcggatcgaacaggagcatatttgctggaattcaaagatcgaaacgctgcagaccaagtttataaactggctatgccaccaagctag

SEQ ID NO: 4496 - DNA, 3345 bp, Saccharomyces pastorianus
atggctggtgacattatagttagtgaggtggacggtccgctggacgtggtcggatgctttgttaggaaagaagatgggctccaagagcagaaacgacaattggtggttgttgggctggaacgtgtcgatgtatatgcaggcgtggaacaagatgagccccgtaaagtcttaagtttcaggactgacgggtgtacggtggctgctttttactacagagatcactccgtagcagaccagcggttttttattttgttgaaggccacaggacgacttgatttcattgacctggagtacaaactggtgaagtccctggaaacggagatcgaccaggtgagatccgagccaaagtttctgtttcaagacccgctgcggccagctttggttttcaacttatcttgtactgaaatttatgagattcccacagacgatattcttggtgtagtacaagctgacattaagttaagctatatcacctcttcgccaatagtgtccatagatgcatgcataaatttcaatgatatcttggataaggatgcttttacgttgtccattctcacacatgcatatggtgccaacgagtacaatttagaggcctgtgtatgcgtattcgagcctaagccagctaaaactgtcaagtggaaaagaacaaccaatgtgtcctttatggatgaagccgtggtttcacaagtacttttaaagtcggtagctaacattggccatttcgtcttttcgcccttgaaaacttatcttattaagcatgcaccgtcctcgaaacaaacgattaacggtgaagagataggtacgatgtatttagggtctggggcctttgaatctggacatgaagaggcaatacactttttgcgacccattttttcagaggttacattaaaatatttagcgtttatgttcatgactgatacgggtactttgatcacatgtaaactgaatgcgattttaagcagttttgaagacgatacgtatatgtgggatagtttcgtctttgagaggtctaataccgataacaatataccattagaacattatttttcagcatttttcgatgagaagcgttggatgcttgtatgcccgaagggctacatcacaatgaattcattcgaaaatcacaaccatagtgttttcatcacgtttggttctttgcttcgtaaatcaacgctatatgcagatttcacaggaaactacatccgatctcatatatcatgtggctcgttgcatagtggacagggatttttgagcctgaaatcacgattatttatgaacatatttgctgtcacttcaaaggagccatttttccagacaagaaacggtgcccctcttcaagtctacgctacaaagaaaggtatttattgggcagatacggataattttatttataaggacaatgatcgaataagcacagagacaaacgttgatctaattgttactggaaagggaactttactgaaggacaaatctatcgttactttagcttctattgggaaggatgaagagtgcaattatgtatatgtcacgaaacaaggccacctgaaatggagtcatctggaaaggttttatcagattcaaaatttgcaaagagctttgaccactgaaaattgttgtttatctgccatctctagaaattgttctattttgacagtacttgtattaaatgatgaaattatggtatttgattcctgcaacaaattgaaaaatcaaaacaaaaccttcaatatgctttctaatatatcatccctctttctatacgagtccgcacatatagtttatattctcatatccgacattgaaggaaatctttgtgttatagacgcatcgacattggaagttttagaagaagtgaaaatttgtaagaagaggctacaattctgtggagtacccaactcggattacgttctcatatttacgccagatactatagttcttttcaagccaagtgctttaaagggggaatttgatatacaagaagtatacactccatatcacataagccatttggtgccaggaaaaaatgacagctcagttattatggttactcgtcaaggccaattttatgacgtgactgtccctggcgatgttggtgaggccatttttagttctaaacttgaacaagttccaaaaccttgcctcaaattcataactttggaatcttcatcgaggtacatttttgtcgcagctctgccgatagcacaacaaaggcacgataattattctgaaatttatgtttatgacattaaggagatcaaacgcatccgtacttttaatttttgtagtgttgataatggcaccaagagcataaaatatgaaaacgttttgataacagatatgattggtgtacctatcctcaaaagaaaggaaacattagccaaaaagaaagcttccgagttgtataaggaagtgattttcaattcatgcgttttggtgtctttgaatttaaacccggttgatgacattgatagcaatgaaatgaacaacttgatgttgttttcttttgatgagaaatcagggaccatagaatatctttttgggattaacactggattctcggttaccgggctgtacaactactataatggttgtattttggcccatggggagtcgatacaggcataccaactaaattattcagtccatggaaataagtttagcatagaacatgtatcaaacagactaaacatctctggtgttgcaataacatcatctatattttttgaagaagagaaggctaaaatggctagaaaacaacaaaacataaacacttgggtgtatttggaaaaaatgatcctacttgatgtacgtaaaggtatgaccagatttaacattacccacacaacagatggtaacattgaaaagatacaattgcaagtgcagcctcttagtccacttggaagagagctcatcaatagcactaccgatcgtgggataatgtttactggtgtggcaacggtaaccttcaagggaagtaggtacctgttgacttcgtacggcagccaacgtctcaccttgtttagttttgcatttggtgatgatgatgatgatgaaatagatcaaaatgagttcgatatcgccgcacaagtgacaaccattaagtctgtggaaatcgctcatttcagtggaggcgtatttttaaacagagcaacatttacaccttttttcttagttactaccttaggcaacggttgctatgtaatcggttttctacacgaagaatcggttatttcatcgtttaaactatcagaagtggaagcagggtttacaagcgtggaaaacccaaaatacttgggacttcttgaccctcacagggatgatcacgatatgatatctgagcgttaa

SEQ ID NO: 4497 - DNA, 2307 bp, Saccharomyces pastorianus
atgcggagacattcaacatatatgctcaaactgaggcaaaaaagaacgatcggagtgcaattagggaatatgacggtggaggactcggatcacttgcttatggatgtcaatcaaatagattttttagatgacgcgacggcgcaaacaggcgattgtatggctgatgattatgacgaacaattttatgaaagggatctagccagcggagctatagtggttccaatgactttgaatgagcagcctattgaaaaacatggagaaaaattgcccttaaagttcagattggggccagtttcctctcaaaatatgggatttataactgcagaaggtaaatataagctttaccctgtgaaaatacctagagtagatacaacaaaagagttcaccacgtatgtgtcaagcttatttgaaatctatcgtgatttgggtgatgatagagtatttaatgtaccaactatcggggttgttaattctaatttcgcaaaggaacacaatgcaacagtcaacctggccatggaggctatattgaatgaattggaagtgtttatcaatagcactaaagatttgaacggaagattgaacagattctatgagttagaagaatcattaaccatattaaactgcttaagaacaatatacttcacattagacggtcaggatgtagaagaaaacaggcctaaattcattgagtcgttgttgaattggattaacagatcagatggtgaacctgatgaagaatacatcgagcaagtgttttcatttaatggctcaacacctggtaaaaaagtttttgaaatacaatatttctggaaacttataaaccaattagtgctaaggggtctgctccctcaagctataggttgcattgaaagatcagatcttttgtcatatttagaaggcacgtgtgctgtttcattcgatgcaataggcgattccattgaactcctgaaacaatatccaagggattcatctagtgcatttagagaatggaaaaatttggtgctaaaactgggtcaagcttttggcagttcagccaccaatatttctggtgagctgcgcgattatattgaggacttcttattagtaattggaggtaatcaacggaaaattctgcaatattcaaggacgtggtatgaatccttttgtgggtttctattatattatatcccttcattagaattatccacagaatatttagaaatctcattggagtccaaccccgttgatgtaacaaataattgggagcaatcgtgtgtcgacatcattagtggtaaaatacactctattctgccagtgatggaatccttggatagttgtacggctgcattcactgctatgatttgtgaagccaaagggttgatagagaatgtgtttgaaaatgatgaaagtatgggtgaatataactatgaagataatgaaatgctagaggatctattttcctataagaacggtatggcatcgtacatgctaaacagcttcgcttttgagttgtgttcactaggtgataaggaactgtggcctatagccattggtttgatagctttatctctcacagggactagaagtgcgaagaaaatggtgattgcggagttattacctcattacccttttgttacaaatgacgacattgagtggatgctaagtatatgtgttgaatggagactgccagaaatagcaaaggaaatatacaccacgttgggtaatcaaatgctatcggcacataatatcgttgaaagtattgcaaatttcagcaaagccggtaaatttgaactagtaaaatcttattcatggctattgtttgaagcatcatgcatggaaggccgaaagttagacgatcctgtattaaacgccattgtgagtaataatgctactgcaggagaagatttcctaataccggaagatattttgaactgtgtagtgactagcgccatgcgccaaactttagcaccatatgccattttatcacagttctacgaagagagcgacagtggacgttgggaccaagcactatatctattgcttttattgattgaattcccatttttaccaaaacactatttgattttacttgtggcgaagtttctgtatccaatctttctcttagatgataaaaggccaatagatgaagagtcagcggcgaaaataattgaagtcatagaagccaaatgggacgaaactgatgagaggactttgaacttgtatgaaactattattgaaacagaaaagagtctacccaatagtaccttggagcttttgaagagtgtaagaaaaaaactgaattttaagttatgtcaaacgttcatgtaa

SEQ ID NO: 4498 - DNA, 1389 bp, Saccharomyces pastorianus
atgatcatcgttgaaatcctggcgggcggaactcgtattattgaaatgacaaacaagcttctcgtttcgttgaaagtacttattattcaattgaatccccagatcgggcagacggaccagactatcaagagaacatggagtattctggataaagtggcgagaagttccacatatgtgaagcctgatataatattatttcctgagtttgccttaacggggtacaattttcactctaagaacgacattctaccctatgtgtctgggcaaggtgaagggccatctttccaattggctaaatcagtatctgagaagtttcgctgttatactataatggggtatcctgagcaagctggtgagcagaagctgtataattctgcgctagtgattgaccccgagggaaagcaggtattcaactatagaaaaacttttctctatgatactgaagagaactgggactgtggggagaatccagagggatttcagactttccccatgcattttccaaaatgtgccaaacttcctcacgagaaaagctttactagaaatgtgaccctgaagtcttcaataggtatctgtatggatctaagcccctataaattcaaagctccctttaatcacttcgaattttcctcgttctgtgtggataataacgtcgagttgattttatgctctatggcatggctaaactccacttcgatcactgataagcaggttttacaaaatgattcgctattaaatgccgccaaggacaaaatagcttttggtttaaaggagcaaggattgcccctaagtggatctcacggtgtttaccagcttaaaattggtgattcgcaacatacttctagagtgccctctgaaaactgcacgagtgactacaaaaatatggatgaaccagatatgacaaatgtgaactactggatgctgcgctttttccctcttttatattacaaagcaagaactaagtggtttagagattcatccctcctggaaagtatcttggccaagagtaaaatgcctctagaccatcaatattataaggatgaaagacataaagaagacactacggaccttgtggattccgaaggaacgataaaggacgctctactagaaaaaacatttttgggagcatccctaagacaaccctggaagtttaaaggtaaaaacgcagtcttagcagtggctaatagatgcggtattgaagatggaactacaattttcgcaggaagttctggtgtttataaatttaatggtaaggaaacggactatctagaaaatagtgaggacactacacttgactctcggaatgaaagcgtagaactactgggcaacttaggcaaaggcttggaaggcgctattttgcgtgaagtacagtttgaagtgtcaaggtaa

SEQ ID NO: 4499 - DNA, 168 bp, Saccharomyces pastorianus
atgtactcaatggccttcttggcttcttccggcttggtagcgaattcctcagcaacggtcttcaagttgaatagagctctgaatctgttggccaagacggtcttgccggatttgttaaccaagatgtctcttagctgttctaaagtacattcatcgacgttttcttga

SEQ ID NO: 4500 - DNA, 567 bp, Saccharomyces pastorianus
atgagcaacaaggtagtcgagttatacgggggcgccatcaccacggtcgtcccagctgggtttctggatgcctcttccttgagagaggtccctgatacgcaagaggtgtacgtcaattcccgccgtgatgcagacaagtttaaagacgggttggccaccaacgagagcatcatcgtggacctcttggagaccgtcgacaaggcggacgtgagggaagcttggaagtttcacgtggatgacctgaccgagttgaacgggacgtcccagtgggagactttgcaagaagacaccgtccagcaggggaccaagcttacagggctcgtcatggaagtggcgaataagtgggggaagcaagacctggcacagactgttgtcattggcgttgcattgatcagactgccccagtttgacacggatgcggtcatctccatcaacgtacctttgaccgaagaggaggcctcgcaagcaagaaacaacgaggttcctccaagatgtcgtgccgtctacaagtttttgcaagaaatggtggacaagttcgtcgtcgtggacgcttcgctgtttgcgtga

SEQ ID NO: 4501 - DNA, 1332 bp, Saccharomyces pastorianus
atgtcgctatcgcacagaacaaagatgataccgctgccagtactagaagaatattgtatttcgccagaccatgggtttttggacggccggttgcccttgactaggctgaccagcaagaaatacacgaggtgggaggatatcgtggcacagctgccttctcttttgcaggatggcagccaggtgcggagtgctatcgacgagctggaggtgttggcgctggacgagagcatattgggcgatgtcagggagctcagaagggcctattctgtgctcgggttcatggcacacgcatacgtttgggcgacggagaggcctcgggacgtgctgcccgagtgtgttgcaggaccgttgttgcatgcagcagatatcttgggggtgcctccgctcgccacgtattcttcgttggtgttgtggaacttcaaggtcgcagacgtgtgcgagcagccggaatccgggtgtttggacttggagaacatcaccaccataaacaccttcacggggaccgtggacgagagctggttttatctggtgagcgtgcggtttgaaaaaatcggtagttcttgtttgaaccacggtttgcagatattaagagccataagagacggtgatgacaaggccgtgacagacgggctgaataagttggctgcagccattgagaggttatcgcgggcgctgatggaaatggagaccaagtgtgagcccagcgtgttttatttcaagataaggccttttttggccggatggactaacatgtcgcatctggggctgccacaaggcgtcaagtatggggcggaaggccagtaccagatcttttctggagggtccaacgcccagagctcgttgatccagacgctggacatcttgctgggtgtgaagcattctgccaacgctgcgcattcctccaaggccaaccagaaggttaattatttggatgaaatgaaaaaatacatgccaagacagcatcgtgagtttctttaccacctagcgtccgtgtgcaacatcagcgagtacgtctccgctaacgcttccaacgagccattgcaaaaggcgtacggccattgcattgcgatgctgcaaagattcagagacaaccatatccaaatagtcaccaagtacatcatcttgccctccaattcgaagcaagagaattccaacaaaaagggggtgttgagtccaatcgagcccaacaccaaggcagcggactcctcgggacccaaaaccgcctcatgcaagactatcggaactggtggtacgaaactaatgccctttttgaagcagtgcagagacgaaactatcgccactggtgaagctaaaaaagagaacaaaaattga

SEQ ID NO: 4502 - DNA, 303 bp, Saccharomyces pastorianus
atgcctttttgcgaccactaccaccctctattcttttttttttcctttattcatactttatttaaaatcaattcagccgtaattttgtccttactgttggacttagtagagatctcctttaatttagattcagacaacttgatcagtttattcttactctcccctatttcccgagaaatcacattaaccaatgcccatcccttcaggtacagttcgctcaattccacgcttcttagagcgttcttcaacgccttgtctaagagctcagatttggcttgttttttgttacgaagggcttcataa

SEQ ID NO: 4503 - DNA, 1035 bp, Saccharomyces pastorianus
atgttgatattcgtctcgcgtgacgttttaatagcgttggttgataaattcatagaagaagtgagtatctttgactatttgagtaactatagaggggtcaatgacattgacgaatgtgctggaaacacaacaagtcgagccgaggataaatcgaaaacgatgatgaaagatttggttagagaaaaactcttgactattatgaataccaaggcatatactcgatttaatccggaacagttactgaaactggaaaatgaggtaaaactctacatgaaatgtggagattccgcactaacagagggcaactacttcttcttgatggaaatgcttttctatgttctggtttacttaaaccaagacgtggacgcgcaagttatttataatacactgagagatcgtcttggtgagagttcgtataagatggtcattatgaaagccaccctattgcaaataaatggtgatgataagggtgctattgagtatttagaaaaattattgaaggacgatctagaatacgaaacagacttcgttacctatgtctccattgctaagaaattgatagcgatcaagacgaatgccaaggatttaaaccaggaagccgttctgcaagaattggtgaagttgatggataagttccctctagatgctgaattgtggtggtatgccaatgagatttatttcgaaatgggccaatttgaaagggcccgctattgcttggaacaggtcctgtgcatcaccccattcaattatgtttgttttggtaagctaagtgaaactctatattatgaagcccttcgtaacaaaaaacaagccaaatctgagctcttagacaaggcgttgaagaacgctctaagaagcgtggaattgagcgaactgtacctgaagggatgggcattggttaatgtgatttctcgggaaataggggagagtaagaataaactgatcaagttgtctgaatctaaattaaaggagatctctactaagtccaacagtaaggacaaaattacggctgaattgattttaaataaagtatga

SEQ ID NO: 4504 - DNA, 507 bp, Saccharomyces pastorianus
atgtcattagcgaattcactaacgcactacgaaatcttaagaatcccatcagatgcttcacaagaagaaattaaaaaagcatatagggaccgtcttctgaatacgcatcctgacaagcttactaagagtgaaaataacagagtaaataccgttacgataaataaaatacaagacgcttatagaatattatcaaataatcaaacacgtgttgaatatgacaagatgatccttgagaactataaaaagcaaggatttcataattgtggtgacgggctagacgagttttcactggacgatttctcatttgatgacgaaaagctcgagtttatgatgaattgtcctcgttgccaatttgccaacgggttccacttcaacgaaaatctcctagacgaatgcattgataacgtaaacatcattgaacagagccatgatggatatcaattgttaacccaatgtagtgcgtgcagtttatggctaaaagttaattttgatgtcgaggaagagtga

SEQ ID NO: 4505 - DNA, 1965 bp, Saccharomyces pastorianus
atgagaaatccaactgttgatgcttcaggtcaagacgataaatgcagtgaagaatcactcgctaactcaataaatagtaatagtaatttcagctcttcttcggaaggcggaaatgaatgtgaatttggtagagtagaaaaggtggacacattgattggtggtagaagagttataaacagtaatgtggaaagcgccaacaataatgatcaggagacaaggactgcggaaccacttcagtcttcgattaacagtcgccaaaattcagaaaaggagcgcgtgaactttattcctctcgacaacgatgacgaagaactcgataaaattatttcgtacacccctgatggcggttttgacagctctcataaaactttttcgttttccttgccatttggtaatacgaattttaaatcaaactcgccgttggctatatttaaaacagtcctacccaagacccctgatgagatcatcaaggatatttcgaggaagaatgcaatcagactaaagctgaagaaatcaaactctatttcttcgttggaagaaatggagttatttaaagatgaaaaaggtatcgataattccagattaagggctgttaaaaaatcattagaaatggatgcgttgaagaactccttgaagcaaataactgcagacccgttcgacaaaacacatgacggatactaccgctcaagattagagtccatatggaatgaattagaaggtgatattgtcataatgggcggttaccgaggtagtatattaagagatgcaactacacataagcgaatttggatcccgttaagggcaggtcttaatatgacgaaagtagatttattgattgggcctaatgatgaagatgaattggcaactcaaaaaaaaatcatccccgatgggatgttgacgcacataggtcctgtcgatgtctctagaagattgattaagaaattagaagcgaacccaaatgtaaacattcagcagtttggttatgactggagattatcattagacatttctgctgagcatttgaagagtaaattacaagaactgtatgataagcagattgataaaaagggagtatatattatctctcattcgatgggcggtttagtggcgcataaagttttacaagactgtacgcatttgataagaggcattatttacgtgggttctcctaatcaatgtccaaatattttgggtcctatcaggttcggagatgatgtgatgtggaacaaaaccattttcagcaaagaaacaaacttttttatgagaagcagcttctattttctaccggtggatgggaggtgttttgttgacaaaactaccttaaaaaggtatgattttgactattttgatacagaagtttggaagtatcttggcctatcacctctggttaatgaaaagagaggtaaattagccgacgaaaaagaaaagttactgcccaaaaaatccaagtcatcactttcacttaaagctacattcaacgccactactaagttcgtcttaagtacacctgtagttcgagctgttacaggtaataacaacaagcagtcagtaaaagaaataccctctgatgaggtcttccacacgtcttatgaagatagctgtgaatatttaatgaaagctttgaaacgtaccaaggattacttggatagtctggattatgattcgagtaaagaatatcctccattagccatggtttacggtaacaaggttcccactgtcagaggcgccaaggttaatggcatacaagatattagagacggaaattacgaagatctttactatggccctggtgacggtgttgtgcatcacaaatggttattgcctgaacaaagaggttttccggtcgtttgtaaaatagctagttccgcaggtcatgtcagtttaatgacagatttgaaatcaatggcgaaggcatttatttctattgtcgatagtgagagggaaagggcaaacccaccttcatga

SEQ ID NO: 4506 - DNA, 969 bp, Saccharomyces pastorianus
atgctccccatcacacggtcatgcgtgaggcatttcactacgctaagcaaaacgcttacaaattcccccggtagaattgtaagaaatggttcatttagaaggataaatcgtgaaacgaatttaaggataaatacgccacctctatatacatttagtggtagtagtaataacgatacgataaaggtacatgaccccatagctaccacgattttaaatgagcccactgtcatcattgaaagacagattgaatttatgaatgtcttcttaggattcgagcaagccaataaatatgccattttggatgtaaatgggaacaaaattgcttcaatgatggagagagatttctcaataacgaaggctataatgaggcagttctatcgtctacatagaccgttcttagtggacgtcttcgataattgggggaacgtcataatgacaatcaaaaggcccttttcatttatcaactctcatatcaaaactatcgtcccaccatctgcgtatgttgataatggtagtggcaccacacagtatcacgatggcaaagatggaacagtagtgggggagaccatccagaattggcatctttggaggcgccgttatgaattattccagaaagacggggcagagggttcttcgtttgaccagtttggtaagatagatgcgccatttttatcattcgatttccctgtgttagatgccaatggtaagataatggccagtgtagatagaaattgggttgggctaggtagagaaatgttcacggatacaggtgtgtacgttgttagatttgactcgcaaagatgtttcaaggacatctatcacgatgaaatgttaagtgatcaagtgctgagtttggatcaaagagcagttttattagcaaacgccgtctccattgatttcgattatttttcaagacattccaggcagtcaggaggatttcttccatttggtggcggttacgacgagtag

SEQ ID NO: 4507 - DNA, 783 bp, Saccharomyces pastorianus
atgattgaattggttctaagtgccgagaagggggaactgggctcgggttatgtggctgttgatcatggaaagaatgttgttatattagcctttcgaggatctacaactaaacaagattggtttagtgattttgaaatatacccagttgagtatactccgctttgcgtgaatgaatatcgcaagcttatagaggaaggaaagctaagagaatgtaaaggctgtaaaatgcacagaggctttctcagattcactgaaacccttgggatggacgttttcagaaaaatggagagtattttggaaagctatccagattaccgaattgttgtgacaggtcattcattaggggcagcattagcaagtttggctgggattgaattgaggctaaggggctttgatcctttggtcttgacatatgcaacaccaaagatatttaatagtgaaatgagacaatgggtggacgaattgtttgagacagaggctatagaaaaggactcaatatcaaaaaaagaaatccagttccgtaaggggtattttcgagtggtccataatggagattatattcccatggtcccaccattttatcatccggccggtttggagatttatattaacaagatcggaatacctcaaaatgcagaagatgttgagtatcgtggtagaaacaacaagatggctctaaacgatggattccgggatggcatgagcggtttagttgaagactggttacatgtttatgaacatcgagcctattttatcgacgtatttgggtgctctggactttaa

SEQ ID NO: 4508 - DNA, 264 bp, Saccharomyces pastorianus
atgtccccgtacatcaccattccacagcaatacttatacatcagcaagatacgctctaagctgtctcagtgcgctctggctaaacgtcaccacagagacctcgacctgcggaaaatggtcggtcacgccaacctgctggacagggtccttgacgagatcgacgccttagatggtgactttgtcctcttcgacggcgctgcagcttccacttccagcgacgcctcttctctcggtaatagtattcggcccatcagtataatgtga

SEQ ID NO: 4509 - DNA, 870 bp, Saccharomyces pastorianus
atgctgtttctgggactagctgtccattgtaaagccaacccgcttttacaagacgtcatttacgaagccgctaagcttactgagtttaatggtcacgaggatcggacattgtacgaccattggaaacatgattctaatgctactatttcattacttgacggtttgtcgagctacaactcgttccaataccatctcggagtgcctgcagcgaacttccagtttagtgctaatgacacctcgggcgcagtttatcacggcaactccatcctcgatagtccggcttggttagaaaagttcaccagctccgactataagttgcacaacaccatggccatgtttgttggtttaacaacgctgatgctcagtgaaaatgagctcgcaagatttaacactcacgtttacctaaaaaagacgtacaattggtacattgagtggtactccaaactatcatcggcattccctaacgaccaagaattggcccatctagcgaaaagggtcctagaccttttgaaagtcgccacttgggaagatagtgttcgatttgataagcaaaatgaacttctatataaagaatgtagagaagctctccccgtttggacgttttacaagaaaattaagagctatattaagttgcaaagatcgaacagcaaatcgaaacaaattgatcaactatttatcacacacagagggctgaaagatagggaatggatgaaatattccctcttggagcctgataaattccaagggtccgtgggggatgttttgcctggccttcatgaagcgttggatgatatggatagagaagaggtagctcagtggctaaccattctgttaagccaattcagcaacgttcgttacttactccagtaa

SEQ ID NO: 4510 - DNA, 1527 bp, Saccharomyces pastorianus
atggtagagccagaagataatgaaatagaggccactggattgcaacagtatagcggtgatagcacacgcgatgacgatgaggaaaacacgaacgattctttcacactaacatctagacataggggccggagtaataccatatctagtatcgtcagcggatacgagatagtgaaggaacacatggacaaggaacggtttatatacttgattctggctagtctacttctatacttgagctttgtggcagcgtttgctcctaggacgtcattgtcaagagacttccgacggttccactcttccaagttgactaatgctgaagtatacagaatatacttgaattcgttacaacaggagaataaagcaaaagaacatgtgtacaagtatgccggccacatggatagtgaactgggtgcctcgtcggcgcttaagtatactttggacgagtttctggatatggaatataaacccaaaatcgaaaagtactatccttgggttggtgagttggtagacactaacgtagctcttttggaagatgacagagtgatttaccaagccagtatggtcgaagacagaatcagagacgatcccgctacacacatgaaaagaagacaaaaaggttttcatcaatactcaaaaaatgggaacgtgactgctcagtacgtgttctgtaattatggcagcatagaagactataaacgacttttgaacaagaacattgatattgaggacaagattcacattgtacgatcgggtaaattagtatctgggctaaaggtcaagaatgccgaactttatggtgcttctagtgttatcatctatacagacccctttgatgatggtaaagttaccgaaaaagatggctatttacattatccttatggcccagcaagaaacccaagttatattgagagagatgcagttaattattttagcgataccccaggggatccaacgaccccaggctacccttccaaggattatgacactgaacatatgtcacctgtaggaagagtaccgaggataccatctgtaccgatgagtgccaaggatattcaaccaatcttagaaaaattgaacggtaaagggttccaaatcggtcctggtagtaatatcaaaaaatttagatcattcacgggaccttctagtttcaaagataaggttcatctgcacaacgaattaaactacaccattaaagaaattgctagtgtagaagttagcatccctggtatatttactgagggagagattataattggagctcatagagattcattggctttaagcagtgctggcgatgctagtagcggcagcgctattcttttggaaattgcacgaggcatgagccgattattaaaacatggttggaaaccattacgtcccatcaaactaattagttgggatggtgaaagatcaggtttactcggttccacagattatgcagaagctcattccgccatactcagaagaagagcattggtgtatctcaatctagataatgctgtttctgggactagctgtccattgtaa

SEQ ID NO: 4511 - DNA, 3801 bp, Saccharomyces pastorianus
atgtttgctaacggtaatcagtctaatttcgccaagcctgctggccacggcatactccccatcccgaagaagtctcggattatcaagactgacaagccgagaccgttcttgtgtcccacgtgcacaaggggatttgtcagacaggagcatttgaagagacaccagcattcgcacacccgtgaaaaaccgtatctttgtatcttttgcggtaggtgttttgctcgtagagatctagtgcttagacaccagcagaaactacacgccgctcttgtagggacgggtcatctgcagcacatggccccgtcaccgagccccagtgcttcgttcgcccccaagcgccgccattcagtgactgcagacgacccgtctgaccttcacatcattaaaatagccgggaacaaggaaacaattctgcccaccccgaagaaccttaccggcaagacccctgaagagctgaaggaggccgtggtggctctggccaagtcaagtaacctggacttccccaccccgaccccttcgacgagcagcgaacaagcagaaatggctcccaggaagacaaattctctagcgttgcaccacgctaaagaagctggggtgaaagacgtaccgatccattctgcatccagtggtgacattatcgagaaagtacgcaccccttccaccccatcctccatgcacaagacgaaaagacacgcgtccttttctgcgtctagtgcgatgacttacatgtctaacgacaacagtcctcgccatactatcaccaacttcgaactcatcgaagaagctccgcatcaggtcggattctccactcctcaaatgactgccaagcaactcatggaaaccgtttccgaactggatatgcccccactgactctagacgattcgtcgcaggccatcaagtttaatttgaacttgtttaacaatgatgcttctgagcagcaacagcaacagcagctgcgctccacctccgctactatcgtaaacagcaacaatggcagcaccattgctacgcccggtgtttaccttttgagcagcggtccctctttgtcagatctcctaacgatgcactccacgcatgcgggtgcaggcggatacacagcaagccaccattcgccattagattttggttgtttcaaccataataaacggacgtcttcagaatttatcctgccttcgagtttctcgcatagtatagcatcgaactccattactgcttctaacagtttcagcaatttggcgaaccaatcctatagggaaatgagcaatgagaaaccactcgcgtcactatctccaagacatccgccaacaagcgtgtcagattcgtcctccacggtgcatttcaacgctagcaccaataattcattggaaccgatgatgggatttaacgacaatgatagtaatgtcgatccggctaccataaacgatcaatggttgtctgatttcatcaacaacgccgatcaaaaatccggcttcaaaattaattttaaccatttcaatgatatcggctttacttattctccgccttcttcaaggtcatcaataccaagtaaatcgcacccaaaccagtctgcctcctcagttgggtcatctaactcagaaaagaacacattatcacctcatttgaacttgacctcaaacgggaacacggatttaccagttacaccacaaaaccaattaaaggagccttcccaatcagattcaatatccctgagctcccataagagacgtcgggatagcattatgatggactataacatatccaatcttttcagctcgagacaattggatatgtcaaaagctttatttgatacaggactaaacaacgctaacgccgacgacgataatctcactttatcatatactaataacgctaattccactacgacgtacaaacaattgccagcggtaacaccttcagacttgttgtccccattttctgttcctccaacctcacaagcagtttttactagcgaactaagaagtatggtgttaacagataacaacatcgaatcgaaagctttccccacaatcggtgaattaaatgattacgttgcttactataaagaggaattccatcccttcttctcctttattcatcttccttctgtcgcacccgacatggacatttatcccttgttactatctatctctatgatcggtgcattatatgggctccattcaacgcatgccaaagtattggccaatgttgcaaacacccaaataaaaaagagtttaaaagcaagtgaagcagccccagaaacgacaccgttatgggttattcaaacatttgtactattgacgttttatggtatttttaacaagaacgcatctgtgataaaagggatgagttgtcagctgatgacaattattcgtcttttgaaatccacgcggttgaatttaccgttagagtcaatttgccaaccccccatcgagagcgatcacgtcatggaatatgaaaacagccctcttatgttttcgaaaattaaagcgcaatatacttcgccggaccaaatgaacaaaaactatcagtattttattttggcacagtcaagaatcagaacgtgccacgcagtgttgttgttgtccaatttgttttcttctttggttggtattaactgttgtttccattcaattgacttgaaatgtggtgttccgtgctacaaggaggaactgtatcggtgccaagactccgatgaatggacaaaattattatcccaatacaagatcacattggattcaaaattctcattgattgagttatctaacggtaatgaagcatacgaaaattgtttaaggttcctgtccagtggcgacggtttcttttataaacatgccaggatctcattgagtacatgtctttccttactgatatctattcatgagaaaatcctaatcgaaagaaataatgccagaattggtgataacgatgataacatcgagctagatgatattgaatggaagatcgcttcaagacaacggatagatacaatgttaaattattgggaaaatctgtatttgaaaaatggcggtatcttaacacccaccgaaaatagtattccaacgataaatgctaatccagcaatgaggctaatcattccgctatatctatttgccaaaatgagaagatgcttggatttggcgcatgttataaaaaagatttggctaaaggattggtccaatatgaacaaagctctggaggaggtttgttatgacatggattcgctgagagaagctacagaatatgccttaaatttagtagatacatggacttttttcctctcgtaccttaaacgggataattgcttggtctttaagactgcagttttcactaccacatgcatgttcactgctgtgctagtcatttcagagtatatgaaatgcatcgaggactgggcacgcgaatacaacgctagtaaccctaattcaacaacattgagtttcgcagacaggatcttatggttgggggcagagaaagtcttgaaaagattacaaatgaacctgctaccgaaagagtatgacattttaaagtcgtataccgattttctaagatggcaagataaggatgcgttagatttatcagcattggatgaagcgcaagcagagagagccatggatcctagtaccgatataaatgagacgattcaaatgattatcgcaacaagcctatcctccaagtgtctgtatttgggtgttagaatactgggtgacgcaccaatctggcccattactctatcgttcgctcatgcattgcaatctagagccatatatagcgttacaaaaaaaaaaaacattagaatttag

SEQ ID NO: 4512 - DNA, 744 bp, Saccharomyces pastorianus
atggatggtatgaaaaaacatttgctagcacgttccaaaccttctttcctatcttacattggcgaaagagagcgaggtcttaacggtgtgttttcttcaaagatggaccacctcgtttgtttcatgggtggtttattggcatctggtgccactgaaggccttcctgttcatgaggcccgcagaaggccattctgggatactgacagggaaaatgactgggatttggctaaagagttaacgaatacatgttaccaaatgtacaatcaaactccttcagggctagctcctgaaattgttgttttcaatcagggaaaagcagcaccaagaaattggtggcagtcgtcactgggtgatttctttgtaaagcccttcgataaacataatatgcaaagaccggaaacggtggaatcgatcatgtttatgtaccaattatcccatgataaaaaataccgtcaatggggtgctgaaattacatccagcttctacgataatacttgtgtcagttgtaacgatgcgaaattgagacgcttcgcaagtttaagtgattgcatcacattgcctacaaaaaaaactaacaacatggagagtttttggttggcggagactttaaagtacttatatatattgtttttggatgactttgatttgactaaagttgtattcaacacagaagctcatcccttcccagtgctggataaggaggtattaaagtctcaacatttgaccacagggtggtcattatag

SEQ ID NO: 4513 - DNA, 741 bp, Saccharomyces pastorianus
atgcggggtctcgttgctaccattattgttatcgtagcaaccgtctattacgtgccatggaaagcttattttaaacagaagccagaggcctccagagagatgagagatcgaatcgaaaccatgttcttggcgtcgtggatggactattccaagtatggctggggttatgacatttacggcccgatttaccactcttttcgcaatatgccccgtggcggtcagccgctgggttggattattgtggattcattggacacgttgatgctaatgtataattcttccgcactacacaaaagtgaattcgaggctgaaatcctgaaatcagaacactggatagatactgtcttggattttgatatcgatgcggaggttaatgttttcgagaccaccattagaatgcttggcgggttattatctgcctaccactactctgaacagtttgaagtgggtaacaaaactgtttacttgaacaaggccattgatttgggggataggcttgctttagcgtttatatccacccaaaagggaattccatactccagcgtaaaccttcacagcggccaggctattaagaatcatgttaatggtggggcgtcatccacggcagagtttacaacattacaaatggaatttaaatatttggcatacttgacagagaatagcacttattggaagatggtggagcgtgtttatgaaccattatacaaaaccaatgatcttttaatgtctacgatggattag

SEQ ID NO: 4514 - DNA, 1356 bp, Saccharomyces pastorianus
atggttttttttttaagtagagctaaaaacaaaaatcaattattttgtggaaatgtggctaaaaacaaaatcttgaaagaaggcatcggaaagcgaatgactataataagtaacatcactgatgaattgaataacccagggctttcttccacaaggctatcagaactgtgcactcaattacaagatagtgttgatagtagatatgcagtgaaagatgaagtcgagcttatcgagtctctatcataccactccatatacaaaggagtagacctgcggattaataacgacgttttaaaaactatagactgttactttcggcggaatgtgcatgactatgatggtataatccaagcccttatttcctcgctacagccgttacttttaaaaggtaaaagtaactcagagctccaagagcagcaaaatctcggcctcaaaccagtacttggaatgtcattgaaggaagaccagctcaaggaagcgtggatacgtcaagacggcttgaagagcattccattattttacgtaatcctactacatataaaaagaaaagacgtatcgacaaatctatcttggatcattccaggaattctaaacatactagatgataccactgatttaaggaaaattaaacttcgcggtgtttttttgcttcagacagctttagaccatacatttatgcacgaaatcaatgactccgaatggatacagttctcaagtactggtttattcccactgttcgaaaagaccttgattaatatgtgctattttctaccgccttcatacgatgctaatgagacattagcgatatggcaactggttttcccaacgatcaattccttatataaggtggaatttttcaacgagaaaaataattaccagtatcacctagaaaaattcatgtctgagattcttctacagaatattattcctagggcaagtctgaactacgagaatttgacgttatatgcattagaaacaacagcaaccgtactcaaaatgcaaaaagaagagtctgtcgtacatctccaaaggctcatttatgtcctaggtgaatatatagtcagaaatcccttttacactactttcccaaagctagtttcgaaggctctttcagtggtagacatccttttaacggtctgcccacatgaaagaatagaggctcacaagttcgacattttgtctttgatcctgattacatatgacaagtgttcacaagagaatgcattaaacgagtcgattgagttgcagtgcaaggggacgatgaggggtttattgcattataactacggtatggaagacgagttgtccactttgtctaatcaaccacgttttcggttactatttgagtcattgtag

SEQ ID NO: 4515 - DNA, 1098 bp, Saccharomyces pastorianus
atgaaaaaaaagacaagaagaagaaaaaaagaaacagatgcacgaacgatggttcagtatgtggtagagtggttaccaaggattaacagaattgctatagtagtagagggctgggaacgggttcaaatagagagtgttgaaggaacatttctcagcatacttggagatgatgggcaaagagaagatatctcactcccggtggaagttgaagaaaacgttaatttaccgtatgaatttgagaagggacgtaatgatttagagtacatcgtgaaaataaggagcaagtcctcagaaaagtatgataatttaatcatgtcgctcccagatggtaaatggacgaaagaagatctctgtctagatcctgaattctcaatagaatgccttcaatgtaagcaaaaaattatcaataaagacaactgtcgcgttcttaataacatgccttccgagttttggatggagcttatggattattggcattgccataagccagatgtgggggaaaccaaatttggttcttattcgcagtatgaaacgctgaaaccatcagaaaatgagattctaatcggaaattctttcttccaaggtactccagcgacactcaagaatgctgtgcttgaaaaagacagtaatatgcttctatgcaaaaattgctcagtagttctgggccagacaacggctggcccactttataagctgtacaaatggaaattgcgtttgcgacgtaatggaatgacttatcacttccctccagaacttgacgttatgctgtctttaataagtgttgtcaaggccaattcctgccggtacgctctcctaaagagtggaggaaaacgactgctggtttggatattctccttcgaccttggtgtcacattaacggggaacaagcaactcaagagatcaatgaagttgctttacacagacaacgacgctactacaaaccactgtatcgagcgacaaaacgctgaggaactagatatccaagaaactacatttcacgcattctatgacggtctccagagagttaatgcacttctaccctcaaatatgaaagtagtgggggaatggtccatcagctatgtctcactagttgaataa

SEQ ID NO: 4516 - DNA, 591 bp, Saccharomyces pastorianus; identical to SEQ ID NO: 4336

SEQ ID NO: 4517 - DNA, 1083 bp, Saccharomyces pastorianus
atgtgtctgtctgtcgcgcgtagccccacgcaatatagagccatgatggacgcaatctcgacgatggagctgtctgatgtgttcgtgagcgagctgttccggctgctgcagagcaacgcttactcggatataatccagtggtcgcccgacggtagcaggtttatcatctggaacacagaccagttcaccaaggtcattctccagaggtttttttccacgttgccgagtttcgcatcgttcgtgcggcagttgggcaggtataagttccagaaggccgaaaggttgcattgtaaagagtttttcaacgcccatttccaaagagacaacctggctggcctgcgttttgtaaagaccacacgcaggtcgccgccggcaaagaaactgtccaaggcctgtgcttaccgctgggacccttttaaagtgaattccattctcagcaaggctgtcggtaagccgtcgttcgaaaaactggagaaaaacgtcgatactctgcagggcaacctcgatgaggtcacctcgaacaacgcagagagcctgcggattataaaagagatcaacgcgggcttgcagacgctctcctaccaccagttccatgcctaccagatggccaattttctgcaagcgaacttcgaagccatcaggaaagccgcctgccagcagcagcagcagcgacaagacccaaggcgccgccgcctgctgctcctgatggcaggcacgtgcgacgcatcgaaaacgcccctggtgcgcttgctcaagtccatgaacttctccatcgacacagctacccagtggcattcgctgctgaatcttgacacgtacgacctgcttttcgtcgccgtgtccccctacatgcccgaagacgagattgtctacttcaagaaactccggaacctgctgcccagcttccccatagtcggcgtcatgaacaacctcacctctgccctcgacacgaacacttccccctccaactactcccgctactactgcaaccatttcctgcgattgggcttcaacgacattctggtgagccccttcaccccaacccagcttacaaccctcctctcgaaacattttccgacgtga

SEQ ID NO: 4518 - DNA, 1143 bp, Saccharomyces pastorianus
atgagcaaagcttttcaaaaatgcttaaatttgaaatatcctattattcaagcccctatggcaggggtgacaactattgacatggccgccaaggcttgccgtgcaggtgcaatggcttctctacctttatcacatttggactttagaatcgcaaaggatttcgaacaattcaagtcgatgatctcacaatacagagaccatgtggcaaacgaatccctggagaagaatattaacttgaatttcttttgtcatgacatccttaataagccatccaaacttcaaatagataactgggtcaagttatacgagagatccttgaacatacctattgatgtagacaaaatcaattttaagaacggcaatatttctttcaaggcttttgaaagggacgatgcgctgcaagattttttccaatatataacagatgaatttaaacctaaagtcattagcttccattttggctacccatcgaaagctacaatcaaatatttgcaaaggcagggaattttggtttttgtaactgcgacatcaacaaaagaagttcatctcctagcaaagctagatatcaacggaatagtgtgtcaaggttatgaagccggaggacatagaggcaattttttggcaaatgattctaaaaacgacgaaaacctgtccacggcccagttggtgaaaagagctgttaatgagcttgctgtaatgagggataagggtttcgtatacgatatccctctcgttattgcgacgggcggaataatggattctaaggacatatcatatatgctatccctacaagctgacggagttcagctgggaactgcatttctcggctgcaatgaatccaatgcatcggaaaattttacaaaaccatttacgccacactcagaaactaggatggtcaacattgtttccggaaagcctgcgagaacaattttgactccatttatcgagcatcttttggctaatttccaaggcgaagagcttcctccgtatggatatatgtataatgcttttaagcaggtaaaaagaacatatcctgaattggctaatttttttctggctggagaaggatttcaaagtgttcagtcaggcattgcaaccaaccaaaaaatcacagaattaggcgaaaacatagcaaaaaattga

SEQ ID NO: 4519 - DNA, 2454 bp, Saccharomyces pastorianus
atggcaagacctgtaagagccatcacagaggcaaagggacacttagtatctcagcatcgcttagtttcattcgttggtgctggcggccagcacgctatagctgtcgcgaattcattggacattaagaacgttttaattcatagatactcttccatcttgtctgcttacggtatctttttagcagatgttattgaggaaaatcaagagccttgctcttttatcataagtgggccagagaccatctcgaaagtcaaagaaaggtttttagaactttctgaaaagtcgatagataaccttttatctcagtcgttttctcgagaacatataacagtggaaaaatatttgaatctgagatatgaaggcactgaaactagtttaatgattttgcaaaaagacgaagatgattggaattttgcaaaatggttttctgaagatcacaaaagagagtttggattttcgtttgatgataaacaaataataatcgatgatataagaataagggcaattgggaagtcggacgttagaaacgagaagacaatcgaggaccaaatgaaggaagttcctcgctttaaaaaggctgacgtgtcgaaggattcgagtttttcccaaaaagcgttttttgaccacaaatgggtcgacactgcagtatataagattgacgatatctctattggaacagttatagaaggtccggctatactagctgatggtacccaaactaatgttattttaccaaactctcaagcgttcatattaaattctcatatatatatcgaaaccgttaataagcccaccgaaacgctttcagagaatgaagctgacgcccaaatcgatccaatcttattatccatttttagccacaggtttatggacattgcccttcaaatgggaactcagttaaggaagacttctgtttccaccaacgtcaaagagagattagatttttcatgtgctttatttgaccctaaagggaacttagtggctaatgcacctcatgtccctgttcacttgggttcaatgtcaacctgcatttccgctcaggcaaagttatggaaagacaaattgaagtcaggagatgtactaataacaaaccatccagacattggtggcacacatttaccagacataacggttataacgccctcattttctttaacaggcgaattaatattctacgttgcttcaagagcccatcatgcagatattggaggtgttcttcccggctcagtccccccaaattcaaaggaactgtatgaggaaggcactgcaatatattctgaatttgtggttaaagagggagttttccaagaagaattgatgcacaaattattcgtagaagacccaagcaaatatccaggttgctcaggctccagaagattcagtgataacgtaagcgatctgaaggctcaagtggccgcaaacactaaaggaatacaactgattgaatctttgactaaggaatacgatctccctacaattttgaaatacatgacggccattcaagaaaatgcttctgaatctattaagaaaatgcttgcaaaaatggtagagcattttggcaccactaaattttcaggcgaagatcgcatggatgatggcagcctaataaaacttcaagttgacatagatcctggaaacgaaaaatacgtgtttaattttgacggaacttcaccacaagtttatggcaacctgaatgcaccagaagccatcactaattctgcggtcctctattgtttgaggtgcttggtaggggaagacatccctttgaaccaaggttgcttaaaaccattaacaataataattcctgctggatctatactaagccctcgatccggtgctgcagtcgttgggggcaacgtgttaacttcacaaagagttacagatgttattttaaagacatttaaagtcatggctgattcccaaggcgactgtaacaatttcacttttggaactggaggtggatctgacagtaagacaggtgaattaattaagggctttggatactatgagaccatatgtggtggttcaggggctggtgccgattcgtggcgaggttctggttggaatggttcagatgccgtacatacgaacatgactaatacgagaatgacagacagtgaagtgtttgaacggagatatcctgttttattacgagaattctcaatcagaagggattcaggaggtaagggcaagtatacaggtggaaatggtgttgtaagagatgttcaatttcgaaacgctgtaacggcatctatactgtcagaacgtcgtgttattgctcctcatggtatacatggagggaaagacggtagccggggtgaaaatttatgggtacgtaatagcacaggcgctttgattaatataggcggtaaaaatacaatttacgctcaacctggcgatcgccttatcatcaaaacccctggtgggggaggatttgaggaatataggaattag

SEQ ID NO: 4520 - DNA, 852 bp, Saccharomyces pastorianus
atgctgttaagaaagattggcataccaacaatagcatctcctactactctaaactgtgtaacaaacaacacaatactctgcactttcgcacgcttacagatgttattggacgaccagctgaagtactgggtcttgttgcccatctcgattgtgatggtgttgactggtgtgctcaaacagtacatcatgacgcttataacggggaacagtgctaacgaaacgcagccaagagtgaagttgacagagtggcaatacctgcaatgggcacaattgctgatcggtaacggtgggaacctctctgcggaggcattttctgccaagaaagagtttctcatcaaggacctcaccgacgaaagacatttggcccaagccaagcaacaggacggatcgtctgccggagagatggtaaaccccttcaatgacccgaacatgtctaatgctatgatgaacatggccaagggcaatatggccagtttcgtcccacagaccattatcatgtggtgggtcaaccacttctttgcgggattcattcttatgcagttgcccttccccttgaccgccaagttcaaggagatgttgcaaaccggtatcatctgtcaagacctggatgtgagatgggtcagttccatttcgtggtatttcatctctgtgctcgggttgaacccagtctacaacttaattgggttgaatgaccaggacatgggcgtacaaactggaacggcaggaccacaggggcctccacaatcgcaggtggacaaagctatgcaagctatggccaacgatctgaccatcatccagcatgcgacgtgtcttgatagcgtcgagcagagggttttggaacattatatgtaa

SEQ ID NO: 4521 - DNA, 624 bp, Saccharomyces pastorianus
atggcatttccacagcatcctcctaataatagtgcattcttcaacgggctattgaacaaagggaaaagcgaaactaacactccacctccacctccaggtttagtctctcatcaaggtccacagtttcctatgatgggagtaccaccaaacttttcacaacaaatgatgccaccccctccaggtcttgttcagttccaaaaggattctaaagatgtaaataaaaagcataacaacaagcaaccaaggcaaaataaaaatgcaaacggcaatagaaataacaaaggaaagcaagcagcgacagtagcaacagatatgccccaacagcaattcatgccgccacccccacccccaggttttttccccatgcatcctaatttccccaatggcccactaccaccattaccgcagggatttcctatgccaccaaatggtatgttaccagcgggtcaacaaccacaaccaccttatccaaatatgatgcttcagggtaatttcccaccaaatttccaacagggctttagaaataatccccctatgccaatgccacctatggttaatgctaatagcgaaaatgtttcaaatcaattgccaccgggattgaactctaaaaagaacatgaaatga

SEQ ID NO: 4522 - DNA, 1335 bp, Saccharomyces pastorianus
atggaactaaacgacccttcaattatatcagccactcagttttccggtgaatcgccggacggagaagctgctgtcgccactcacaaatcgcaacaagccatctcgaatctatttcagaaattggacaaaaaggacaaacaggagagaccaatgggtagcatagaatcttcgaatgatagctctaccgcttctgtggccacgagcactaacggcaaagagagcaatagtaaaaaaaataaaaaaacggccatgctaaactttagtagtttgacggatcctataacgaactataaaccaatggagctgaaatacaagacatatgcatattccatgaatgagctctatcatttgaagccgtctttaacaagtgcctcttatgaagaagacccgctcactgcggagcttgtgaagagtctacctaagaggaagttttggcgattgcgcatggggcctccagatcaaaagcatgctaataaccatcacttcagcggaagcaatggtgcaagtaactggaaggccggttacaaaaacggcaagagcgaagagaggagaatgagtagaaccaagaacatgcaggggggcaaaagaagatctcagcatgatgatgaagacaaaaagatcgagcaagaaatgctggaaatggaaaagaatttgcaattaggtggtgatgtaggtcattcaatggcagattttgaagattggaaggcaaagatgaaggaactcgaattgagaaaaatttccaaaactaacggaaccaacaactccacagccattgctccaagggaaagtactacacaagacacttcagaggacttgagacctgcaatgccaaccggttccagctcgataacggatttcttgaacctgaaaagacaagaaaagaaggaacaacctccacaacagactcctgccaaacccactaggcaacctattatggccaaagccaacgtagaacaggccaatgatttagagacaaattcggatttgggtaaaagttcatcgtctcgcttttcgtcattcttcaataagtccgccacttcattgccttcattagacaacaataatcaagcgccatcaccaggtgcacctgtagtaaacaatgatgacaacagcacaccacgtcaaagtggttcaagattgatgtcttttttcaaggaatctagatcaagtactccaaattcagagccacaaccactatcgacctccgataaagatactagaaagatacagactccctcccaatttcaacagcaacctcaacccccacaacaaatgcaccaatggcatttccacagcatcctcctaataatagtgcattcttcaacgggctattga

SEQ ID NO: 4523 - DNA, 2562 bp, Saccharomyces pastorianus
atgaagaacgagtaccgccccagtatcgataaaaagtcgaatagtgatgttttcctaccttcaaaaagaaaaatcctgagaagcactatttgcaagaatggccttactgaaaaggaactgtttgttgtttacgtcgatgacgaggtagaactggcttcgacaagaggttatgtttctatagtacagtgcaattcaagacaatccaagaaaaatgagccggaaaataaagtaataggtgttcctccaaagaaaattggtgttcgcattaagcatgacaatcaagtacctaaaaatcacattgcactaagcttgtacacttgggaagcactctttacacgtccagttaacgggactaaaatcaaactggaatttttgaaaacgagtgaaatgaatatgaaacctgtaggaaatataacagttaacattaaatactatggagaaaactcatctcttaaggatgaagatgaatttattaaactgctgggaaaaagcaccctaactagtaacataatacttcctgaagagcaaattttgattgagttaaagaaagctaattccttacaaccatttcttgatttgaacgatctccccaaagattctattcaatgggaaatagcgcaaatgggaaaggaagaagtcaaaaaagttgtcgaagaattcttacctaaatttcagcacatcgaaggaacagatgaatttatgcatacaagtaaaaatgaagaccatttcgttaatgttaatagcactacgcaagaaatgatagattacatgacatcacccattgtctcctcaccggctattatattggacgggaagcaaggaatggggaaaaccagattgttgaaggaattcatgagcagaatcacaaatgaacaccacatcttcgtcaaatatgcggattgtgacacattgcgcgaaacttctaatctagataaaatgcaaaaattaattaccgagtggtgctctttatgttactggtgcggtccttcgttaatagtgttggataacgtagaaagtttatttggcaaaccccaatctaatgaaggcgatccgtctaacagtaacaaatgggacaatccaagcaaactcctaaatttttttatgaaccaggtgaccaaaatgtacagtaaaaacaacatatgcatcagggttttattttcaggcaaagagaagactcagataaattcattattgttcgataaacattttgtttcagaaagctggtctttgaaagcgccagataaacaagcacgaactaaattactggagtatttcttttcgaaaaacgcgatgataaaactacaccacgaagtgcaatttagtgacctgtcattagaaacagaagggttttcaccactggatttgaaaatatttacggaaaagctattttacgatttgcaactacaaaaaaagtgtgataatacagtaacaagagaaaccttctcaagatcactgaatgggttcacaccttctgcactgcgcggagtcaagttaaccaaagaaaccaacatcaaatggacggacattggtgcattaacgggtgcaaagaaaattctcctcgaaacattggaatggcccactaaatatgagccaatatttgccaattgtcccttaagactaagatcgggtatcttgctctacgggtaccctggttgtggtaagacgctattggcgagtgccgtagcacagcagtgtgggctcaacttcatctctgtcaagggacctgagattctaaacaagttcattggtgcgagtgaacaaaacgtcagagagttgtttgaaagagcacagtctgtcaaaccgtgtattcttttctttgatgaattcgactcgatcgcgcccaagagggggcatgactccactggtgtcacagaccgtgttgtcaatcagctcttgacacaaatggacggtgctgaaggtcttggtggcgtatacattttagcagccacgagtagacccgacttaatcgatagtgcattgttgagaccgggccggttggacaagagcgtgatctgtaatatacccagtgaacctgaaagattggacattttagaaacggttgtcaactccaaggacaaggatacgggtctgaagaaatttgaactagaggaaggaactgacctcgccatgatcgcccagaaaacagcagggttttcaggtgcggatttgcagggcctctgttacaacgcgtatttgaaatcggtacatcggtacctgtctgccagtagagaacctgaacaggcgtccggagataatgatatcgagtacttcactatcaacgggaagtgccagaaagaggaaaataaactacgtttgcggactctgctggagcaagaccaggtccacgaaccgaagacaaaagtatcggacggggtgaagccaacagctgtggtcacgatagatgatttgatggaggcctgtcaagagacgaaacccagtatttcgacgagtgaactggctaagttaaggagaatttacagcaagttccagacggatagaaatggcgagatgcccaacggcgagaattccgttgacattggcagccggctttccctgatgtaa

SEQ ID NO: 4524 - DNA, 438 bp, Saccharomyces pastorianus
atgaaattagacagagacagctctgggtccattgataaaaacgagttcatgagtattccaggtgtttcttcgaaccccttggcaggtcgtataatggaagttttcgatgctgataatagcggtgacgtggacttccaggagttcattaccgggctatccatctttagtgggcgtgggtccaaggacgagaaactaaagttcgctttcaaaatctacgatatcgataaggacggatttatatcgaatggtgagttgttcattgttttgaagattatggtgggttctaatctggacgatgaacagttacaacagattgtagacagaaccataatggagaatgacggcgatggtgacggccgtttaaattttgaagagttcaaaaatgccatcgaaaccacggaagtggccaagagtctgacattacagtacgaagtttga

SEQ ID NO: 4525 - DNA, 1845 bp, Saccharomyces pastorianus
atgaattcatcgttactactaaaccaattgctgaagccaatgctggacctgatcctttgctcattcaaactattaacatcgaatactagtgtcatgggtgaaggtacgctggcactaggcctgatcgtgtacgcttccaattccttactaaagctaattcaaccaaattttacaaggcttacaatggtaagctcgtctttggaaagttggttccgttctttacactcaaatctgcattctagcaatgaagaaatcgcactgctgagaggacagaagagagaattagccaacgttgattattcattttaccgtttggtgctatttttaaatagagaaataaaggcaagagccatttacgatattgctactgcttttgtcattaaatatacttggggtgcagctggtttggtgttatgttcgattccaatattcttcaaagacccaccaagtgaagacgccttggaacttaaggagcccaagactgatatgacagctgacttcattacaaataggaggctgttagttactgcgtctagttccatcggaaggtttgtcgaattgaaaaggaatattcagcaattacgtggtatcagattacgtctaaataaattcaatgacctattggatgcaaataaaggtgatgctaatgagtctaataaggaaggctacatagtggaatatgatgactcaaaaataaaatttgaaaacattccgttgataactcctacgaatcaggttttagttcctgaactaagttttgatttggagcatgggaaccatctgttgattattgggcctaatggttgcggtaagtcatcgttattccgtatacttggtggattatggcctgtgagggcaagtgccaataaaaatcatcaatccaaattaataatgccccgtagaactgtgggtaaagattgtgcaatcttttatttgcctcaaaggccatatatggggaataggtcaactttcagagaacagattatttacccagatacgattgaacagtttgaagaaaagtatcacaaagattacagcttaggtgatgcagacttgataaaaattttgcagttattggatttggaagatttggttacagagaacatgtcacttgtgctagcccagagaacttctaaaaatggtattcagcaaccgccatcagaggggaatcaatcgccatgtagtatcgagatacgtgatgcatttagtataataagaaactggtccgaggaattaacagtcggcgttcaacaaagactagccatggcaaggatgtattatcataagcctaaatttgctgtccttgatgaatgtacatcagcagtggctccagaaatggagcaacaaatgtacgaaaatgcccaaaagtttggtatttcattaatatccgtttgtcatagaactagtttatggcattttcacaactatcttttgaagtttgacggtaaaggcggatatcaatttggtcccttcaacccacaagaaaggttaggaaatgaggaaaaattgcttgaattaaatgccatactagaccaacaagtaccgctctgggagaggaaattgaaagatttgacaattgccaaagaatcaaacattattcgtaagtcagagaccaacttgaaccttttcggaaaaatcgaagatccaaaatcatccaaagccaacgcattattggactcaaacaaagacaaatcttttatcacaccatccatagggaaagagaccagtaaaaggctaccgctgttttcgaaaccatcatcaacagcatcgtcaaatttattaagaaacaacaaaagcaagacgaagaatggaaaatccaaaacggaaccatcaaatgaaaaatag

SEQ ID NO: 4526 - DNA, 528 bp, Saccharomyces pastorianus
atgaagaatataaaaatgtcttcaacggcatctggtttataccagaaacatagagtgaatctactacgttcctcatacatcatattgctgctagcaacgctttacaactcaaattcaagctctagcaataataaaaacggtaaaaaggatacacagtcgacggattcagagagtgaaaagattggggaagaaaaaggagcagaactagatgaagaagaagaggatgataacaatgaagagttgacgatggtttccaaacacagtaccgattcagtcaatggaacaatagcggtagacaaagaaagtataaataagtataaagaaagacggcagccgggaaaggtagattttctgttcaaacttttgctacatgacaggaaatgtcttgttttatttatcacgcaggctatccttttgaatatcaggacgttattgtctcttcgtgtggctactttggatggtcagctagtttccactttagtgagagcccaatacgcaaattcgcaaagattgtactggggaaatgac

SEQ ID NO: 4527 - DNA, 885 bp, Saccharomyces pastorianus
atgagtccaccaactaatagaactatggaacgaacatcttctaaagatacaaatatttcgttttttgaagatcaacctaacaacaatgatcccatattcaatccaataattagtgaaaagttggttcaagaagttaaacaacaaagacagttgaaaaggaactcatttcctacgccaactcccagtcataaaaagaccaacagttttaaagccctacaaatgaaaaaattgcttgccaatagagacattctttcgaataattccaaatccagtataaggaaacctgcaaagaacaaaatcactaaacaagcatcaaatgttttcggtaacactgcaagacaattggtcatgaaactagataatccaagctacagctccgtgacatcatctccatccccttccacaccgacgaaaagtggcaaagcgagatcgagatcatcttcacctgtacgccccaaagcactcactcaatccccaatatcacccaattatcacagatttgccctagattcccccccacaaagccctcgaagatcatccaactcgagcattacgaaaaagggaagtagaaggtctagtggctcatcacccactcgccatcataccagagtgtgcgtgtcatgccattctagtgattcgccttgttggagaccgtcatggtcgccaagaaagcaagaccaactatgtaactcctgtggcttgcgctataagaaaacacatacgagatgtttgaacgatatatgtcgcaagatccccacaaagggtgaaataaacatcatgaaatctaatggcatagacagagaattcgtccctgaacgcaactgtgaaattgaaggataccgctgcttattctgtaattacataactgagactgtggagaactaa

SEQ ID NO: 4528 - DNA, 834 bp, Saccharomyces pastorianus
  modified_base (126)..(186): a, c, g, t, unknown, or other
atgtcaagtttatacctcaagtcaccgttacatgcattttctgctggtccagactcacatgcaaacggatcgtattttgataacttattacttccttcgttctccaaattatcgagtaacaacagnnnnnnnnnnnnnnnnnnnnnnnnnnnnnnnnnnnnnnnnnnnnnnnnnnnnnnnnnnnnncattctgcatgtcctaggaaatattcattccactccctcaatgtgtcaccaattttacctccattgtcattagctaatgaaatactcgggaagaagtcaaatactgcaccagcatctccgcatcacatggcttacaacccaatttcatcattgacgcccaacagctcgcctgaattcaataaggccagcttatctcatataagttttacgaatccattgaattatgggtctcatttaggaatttcaacccattcacaagctcaactaccattattggacaggatatcgaccgtctctttctctaaaagaccggagcactgccagcaatccttaccatcgttaaggcatctacaattactacctagtccacttcaacaagaaaatgcagctcgtttccctgatacatcaaaacgtacgccttattggaaaactaatctcactcattggtgtaaggatacaaactatcaagactatgtcaaaatacgcgaagaagtggcccactttaagccactgagtataccaaacttggcacacgaaataatgatgattcaattagggaaggaagttttcacagcaaagaatcagagtcaaatagatcatccaagcgtcactcatcatctgattatactttcgctcgtactaaactga

SEQ ID NO: 4529 - DNA, 4365 bp, Saccharomyces pastorianus
atgactccatgtaccgtttccccagatttcgtcgctgctactactaatgctggttacaccatcgaattagcaggtggtggttacttctcggcaactggtatgactgctgctatcgactctgtggtttcacaaattgaaaagggttcaactttcggtataaacttaatctacgtcaatccattcatgttacaatggggtgttccattaatcaaagaattaagagccaaaggctatccaattcaatttttgaccattggtgccggtgttccatctttggaagttgccagtgaatatatagaaacactaggtttgaagtacttgggtttgaaaccaggctccatcgatgccatttctcaagtcatcaacattgctaaaactcatccaaatttcccaattgccttgcaatggactggtggtagaggtggtggtcaccattctttcgaagacgctcatactccaatgttacaaatgtactccaagattagaagacatccaaacattatgttgattttcggttccggtttcggttctgctgatgacacctacccatacttgactggtgaatggtctacaaaattcgactatccaccaatgccatttgatggtttcctatttggttccagagttatgatcgcaaaggaagttaagacttcccctgatgccaagaagtgtattgctgcttgtaccggtgttaccgatgacaaatgggaacaaacttacaagaagccaactggtggtattgtcactgttcgttctgaaatgggtgaaccaattcacaaaattgctacccgtggtgttatgctatggaaagaatttgacgaaacaatttttaacttgccaaaaaccaaattagtaccaacattggaagctaagagagactatatcatttcaagattgaacgctgatttccaaaagccatggtttgccaccgttgatggtgaagctcgcgatctagctaccatgacttacgaagaagtctccaagagattagtggaactgatgttcatcagatccaccaactcttggtttgatgccacttggagaaccttcactggtgatttcctacgtcgtgttgaagaacgtttcaccaagagtaagacattgtctttgattcaatcctactccttattggacaagcctgatgaagctcttgaaaaagttttcaatgcttatcccgctgccaaggaacaattcttgaacgcacaagatattgatcactttttgagtatgtgtcaaaacccaatgcaaaagcctgtcccatttgttccaatcttggatcgtagatttgaaatcttcttcaagaaggattcattgtggcaatccgagcacttggaagctgttgtcgaccaggatgttcaaagaacatgtattttgcatggtcctgttgctgcgcaattcacgaagatcattgatgaacctattaagagcattatggatggtattcatgacggccacatcaaaaagttgttgcatcaatactacagcgacgatgaatccaagatcccagctgttgaatacttcggcggtgacagtccagttgacgtacatgctcaagttaagtcttctgcatctgaagactccgctgttttcaaggcaacttcttctaccgatgaagatagttggttcaaaactttagctggatctaaaattaactggagacgcgcaagtttcttgtgctcctttatcactcaagataaaatgtttgtttctaatcctattagagaagttttcaagccaagccaaggtatggttgttgagatttctaacggaaagactccatcgaaaactgttatcactctttcagagcctgtacaaggccaattgaaaccaactgttatattaaaattgttaaaagacaacttggtccaaatggaaatgattgagaacagaaccatggatggcaagcccgtcagtttaccattgctatacaactacaacccagacaatggtttcgctccaatttctgaagttatggaagacagaaaccaaagaattaaggaaatgtactggaagttgtggattgatgaacctttcaatttggactttgatccaagagacgtcatcaagggtagcgacttcgaggttactgccaaggaagtctatgactttacccacgccgtcggaaacaactgtgaagatttcgtttccagaccaggtagaacaatgttggctccaatggatttcgctattgttgttgggtggagagctattatcaaggctatcttccctaacacagttgatggtgacttattgaagttggtgcacttgtctaacggttataagatgattcctggtgctaagccattgccagttggtgacgttgtttcaactgctgccgtgattgagtccgttgtcaaccaaccaaacggtaaaattgtcgatgttgtaggtactttatcaagagacggtaaaccagtaatggaagtctcttcttctttcttctatagaggtaactacaccgactttgaaaacaccttccaaaagactgtggagcctgtctaccaaatgcatatcaaaacatcaaaggatattgctgttttgcgttccaaagaatggttccaattagatgatgaagattgcgatttactgaacaagactttgaccttcgaaaccgaaactgaagtcactttcaagaacgctaacatttttgcctcagtgaaatgtttcggtccaattaaagtggaattgccaactaaggaaacagtcgaaattggtattgtcgattacgaagctggtgcctcccacggtaacccagttgttgacttcttgaagagaaacggttctactttggaacaaaaggtcaacctagaaaactccattccaattgctgttcttaattcatacactccaagtactaatgagccatatgctagggtttctggtgatttgaacccaattcacgtttcccgtcattttgcttcctacgctaacttgccaggtaccatcacacatggtatgttttcctccgcatctgttcgtgctttgatcgaaaactgggccgctgacggtgtttcatccagagttcgtggtttcacttgtcaattcattgacatggtcttgcctaacactgctttgaaaacatccattcaacatgttggtatgatcaacgggagaaaattgattaagtttgaaactagaaatgaagaagatgttgttgttttgactggtgaagctgaaattgaacaacctgtttctacttttgtctttactggtcaaggttcacaagaacaaggtatgggtatggaattatacaagacatctaaagctgcccaagacgtttgggatagagctgacaaccatttcaagaatacttatggtttctccattctggatatagttattaacaacccaattaatttgacaattcatttcggtggtgaaacgggtaaaaagatcagacaaaattacgctgccatgatttttgaaactatcgttgatggtaaattgaagactgaaaagattttcaaggacattgatgaacacagtacctcttttacattcaaatctgcaactggtttgttgtctgctactcaattcacacaaccagctttaactttaatggaaaaggctgcgtttgaggatttgaagtctaagggtttgattcccgcagacgctacatttgctggtcactctttaggtgaatacgctgccttggcctctttagcagatgttatgtccattgaatctttggttgaagttgtgttctacagaggtatgactatgcaagttgctgttgcaagagatgaattgggtagatccaactacggtatgattgctattaacccaggaagggttgctacatcattttctcaagaagctttgcaatatgtcgttgaaagagttggtaagagaaccggatggttaattgaaattgtcaactacaatgttgaaaaccaacagtacgttgccgccggtgatctaagagccttggacgccactaccaatgttttgaacttcatcaagttacaaaagattgatctaattgagttgcaaaagtctttgtctttggaagaagtcgaaggtcacttgttcgaaatcattgacgaagccgccaagaaatctgcagttaaacctcgcccacttgttttggaaagaggttttgcttgtattccattgcctggtatctctgttcctttccattcgacttacttgagaaatggtgtcaaaccattcaaaagtttcttgaagaagaacattatcaaggaaaatgttaaggttgacagattagccggaaagtatattccaaacttgactgccaagccattccaagttactaaggaatacttccaggacgtttacgatttgactggctctgaacctatcaaggagattattgacaattgggaaaagtatgaacaatcctag

SEQ ID NO: 4530 - DNA, 1755 bp, Saccharomyces pastorianus
atggatgcttattcaaccagaccattaactctctctcacggttctttggaacacgtgctactggttccgaccgcttcatttttcattgcttcgcaactacaagaacaattcgtcaagattttgcccgccccaaccgaagggtttgccgcagacgaggagccaaccacacctgctgaactagtgggaaaattccttggctacgtatcttctctggtcgacccttccaaagtcggtcaattcgatcaagtcttgaacctttgtttgacagaattcgaaaactgttatttggagggtaacgacattcatgccttggccgctaaattattaaaggaaaacgacacaactttggtaaagactaaagaactaattaaaaactacatcaccgctagaatagtggccaagagaccattcgacaaaaaatcgaattctgctctatttaaggccgttagcgagggaaacgcacaattagtcgccatctttggtggtcaaggtaacaccgacgactacttcgaagaactacgtgatctatatcaaacttaccatgccttggtgggagatctaattaaattctccgctgatactttaagcgaactgattagaactactttagatgctgaaaaagttttcactcaaggtttaaacatattagaatggttagaaaccccttcaaataccccagacaaggactacttactatctattccaatctcgtgccccttaattggtgtcattcaattggctcattacgttgtcactgccaagctattgggtttcactccaggtgagttaagatcttatttgaagggtgctacaggtcattctcaaggtttggttactgctgtcgctatagctgaaacagattcttgggactctttctttgcctccgtaagaaaggcaattactgtactattcttcatcggtgtccgttgttacgaagcatatccaaacacttccttgccaccatctatcttggaggactctttggaaaacaatgaaggtgttccatctccaatgttatccatttccaacctaactcaagaacaagttcaagactacgtaaataagaccaactctcatttaccagcaggaaagcaggttgacatttctttagtcaatggtgccaagaacttggtcgtatcaggcccaccacaatcactatatggtttgaacttaaccctaagaaaggccaaggccccatctggattagatcaatcaagaattccatttagtgaaagaaaattgaagttttccaatagattcttacctgttgcatcaccttttcattctcatttattggttccagcttccgatttgattaacaaagacttaattaaaaacaatgtcagtttcgaagctaaggatatccaaatcccagtttacgacacttttgatggttcagatctaagagaactctcgggctccatctcagaaagaatcgtcgactgcattattaggttacctgtcaaatgggaaactaccacacaattcaaaaccactcatatactagatttcggtccaggtggtgcttctggtctaggtgtcttgactcatcgtaataaggatggtaccggtgttcgtattatcgttgctggtactctagacatcaacccagacggtgactacggattcaagcaagaaatcttcgacgttaccagcaatgggttgaagaaaaatccaaactggttggaagaatatcatccaagagtgaatcaagaacaaatccggcgaaagtctgtgtcgaaactaaatctctaa

SEQ ID NO: 4531 - DNA, 318 bp, Saccharomyces pastorianus
atggctagatacggtgctacctccactaaccctgctaaatccgcttctgctcgtggttcctacttgcgtgtttctttcaagaacaccagagaaactgctcaagctatcaacggttgggaattgaccaaggctcaaaaatacttggaccaagttttggaccaccaaagagccattcctttcagaagatttaactcttccatcggtagaaccgctcaaggtaaggaatttggtgtcaccaaggctagatggccagctaagtctgttaagttcgttcaaggtttgttgcaaaatgctgctgccaacgctgaagtatgttag

SEQ ID NO: 4532 - DNA, 1932 bp, Saccharomyces pastorianus
atggatacggctgtatattctcatgccttggatatctgggccaaggcggatttgacaaatctccaaaaggaattggatgctgatgtcattgagatcaaggataaagaaacccagtcattgacgtcgagaaagtctttggccactgagacaaagaaatttaaaaagctcgaagcagaagagaagctgaaccacataaataagattattaagcaatatcaatgcgaaattgataacctgacacagagatcaaaattttctgaaaaagtcctatttgacgtttatgaaaagctttcagaggctcctgaccctcaacctttgttgcaaagctccttggaaaaattaggaaagatcgatgactcaaaggaactcaaagaaaaaataagtgatttagaagataggctagccaaatacgctgattatgaaactttaaaatcaagattattagatttggaacaaagctcagcgaaaactttggccaaaaggctaacagcaaaaactcaggaaataaactctacttgggaggagaagggaagaaactggaaagagagagaggctgacttggtaaaacaattaacaactgtacaagaccaaaataaggcactagagaccaaaatatctagaaatatcgatattgacaatagcgaagaaagtggagagtatactcagaataatcagaatgaaatgaagacaaagattgcagagtacaatctgctaactcaagaattggagaccacacaagctagaacttaccaattagaaaaaagaaacgaagaattgagtggagctcttgcaaaagcaaccagtgaagcagaaagagaatctgagctacatgctaaggagctgaaactcaaccaattggaaagtgagaatgctttgttgagtgcatcttacgaacaagaacggaagtcaaattctaatacaattaatgaattcaaagagcaactaaatggcattatggccgaatctgaatcttacaaatcagagctggagactgtcagaagaaaattgaacaattactccgactatagcaagttaaaggaagagttatctgccttgaaaaaaattgagtttggagtaaacgaagacgactccgaaaatgaaaatgactccgaaggtaaaaatgacaataccgtcgaatcgtccttactatcagccaataaaaaactccaggcttcccttgcggaataccgctcaaagagtactgcacaagaagaggaacgtgctcaattaaaaaaatccgttgaccaactgaagcagaaaattgctaccctagaagaagcaaacgagaaattagaaatggatctcgaaaaactagaagatgttggtcctcagtttaacgatgctgcaagtatgatgtctggtgtaacaagacaaatgaacagtcgtacatcccatagaatatcaccaacaagctctattataggcattccagaagaaggagaactaacttcactaagtggaaaccaatccaccattttgccaatagttactaaacaaagagatagattccgttcgagaaacatggatttagaaaagcaagtaagacaaggaaactcagaaaagggcaagctcaaattagaaatctcaaagctgaagggcgataatacgaagctttatgaacggatcaggtatttgcaagcctataacggtagtgctactccagcaacttcaaaaccagaaggcgttgacgtagaatctcaatattctagggtgtatgaagaatcgctacatccaattgcaaacttcagacagaatgagttaaaccactataaaaataaaaaattatcggcactagaaaagctatttttgagtttcgcaaaagtcatcctgcagaacaaaacaacacgaatggtatttttgttctactgtattggcttacatggactcgtattcatgatgtgcatgtatgtgatcatcttagcggttacatga

SEQ ID NO: 4533 - DNA, 279 bp, Saccharomyces pastorianus
atgttagtgacggcacaagatataccaatattcgcaccgacttgcagtttgataacaatatcacaccaacctttaccatcccatcttgttaggaagtcttcaccactccatatagccgcgtctacaatacacgttatattcattataagcaaccacgttatcaaaattatagccggaatattcttggtcttggaatgccacgctaaaggtggtatgagtaatatcactccaagtagacatagtcctattattgctgacttgtatgacataaggctttga

SEQ ID NO: 4534 - DNA, 1011 bp, Saccharomyces pastorianus
atgcattatttgtcgtcttccatttctagtcaacctggatcgtatgggtcctggttcaataagagaccgacattgtctcaattttttcaaccaagtccttctctaaaacacaacgaatcttgggaaagattgcaaacgactgctggtaatttgcacaggacttctagttcttcttctctgcaacaagccacctctaggctatcattaactacaccacagcaatctccttctattagtgaatatgatgagtatccttggatggggaccccaggctctcctaatgttggagaatcatcgcatgctctcccatttatcaagaatatatcatataagtttccactgaagaatgttgatctaaaaagagactgtcaacgaatttctcaaaacgatatattggatgaagcttttgaaagaatatgccaaccttcattgaatgatttaggctccagttacgaaattttcccaggcaattcctcgtatgcagatatattgactaccgatatagatattggtgatgagctgatgaataaaccactggaactgttgcccaaatatacaatgtatatgacccattttagcaactttttccaattacaagcgtgtcccgccggccaagaatctgagagtagaataactaattccatgaaaattgatctattgaaagcagattacacaaggagtttactggtttcattacgctcgagagacatcagagatattgcgctaaaaagagagttcaccagtaatagtaaccataataaccctaatatttatgatgaaaacttcactggtaaaaggaattatgtgctgaagcagaaaactaaaaaaatattttcctgtggtaagattggtagattgggttccagcctagaaaattgtgttaattttgttgagagtagtataaagagtgcgatgatattgtatgatgataacagaataaacgcagatctgcgagattctgaagctctacggatcttttcatctcttgttcattactgtgatgcaagttag

SEQ ID NO: 4535 - DNA, 1338 bp, Saccharomyces pastorianus
atgttaggtaatttgttgagaaacaagaccaatgtatctgcttctgagaagaatccagatcgttccgaattttcatcggtcgtgcccaatgtttctgtgtattgtaaagcagccaacacaggaactacgaagactgctgttggggcgcttctagacactgccgtcaatgtggaagagcattcggaactgctgtcgaccacttctccacctatcttagaccatatctcggatgatttaaaacttaagctcttcggctctagggatgtcccctatagtcgtcccattgattcgctacaaaaaaacggcgggctttgtactgacaaaataacctcaatcaatgagggtacgcacgcatttaggattttgatcatcgaagaagctggtcaaatggcgtgtaggaacaattatcgtgatatcttcgattacaccacctcaaaaatctcaaactcgatggaccaaatacggcctagtgaattgaaggagtacatatttggttctcctgtgagagcgtcagacttgactcaatgtgacaagatcaggaccattcctaactcggatttggtgctgataactaggatattttattacatgcaccaatacaaccgtattgcgattagcgtatgcattcctaagatattgctgccagtggtagctgagtcttggtcttgtctttcatcgtggttgacccaaactcaaaaaatgctcactgttttattaaataaaaatcgtgcaatgcaagagaatactggcaacaacagtaacaatctaattataaggttatcgaacatagacatcaaaacatattacccaaaggaaatcgaaatcatggttcaaactttgcaaaaaagacttattccttgtttgcgctctttgtctgaaatcccaagacttttcttgtaccctgagacattcaaagaattcgttcatgtttggttcaagagcatatttaactggattgaaattaaggatggtcccaaattgggatttcttccccttttgatggcaataatcatatcagattacagagaaacgatgaaagaattgacgacgtccaaaatcgttattctttcaggaaatatggtggttgcgaacaagttattgtttatcttatctgccttattagagccaaaatacaaggggaaagtaacaatacggcacgaaggtctggacccagattcatctgccgtatcaaaaactgaatctaattacaacattggaagtaaatctgaggcggagttgagcacgttaacttcaactgacaatcttccgggccgcgcagatagcaataataatcatagtaattttaacactaacaacaacaacaacaacaacaacaac

SEQ ID NO: 4536 - DNA, 120 bp, Saccharomyces pastorianus
atgattacaattcagctcggtaccggggatcctctagagtctcactgttctggtacgacttgcctaaaatggtgttgcactggtgttttgcttatcctagcaagtgccttattcacttga

SEQ ID NO: 4537 - DNA, 1419 bp, Saccharomyces pastorianus
atggaaggaattcctagatggttactgtattctctgatatcgtcggtgctttgtatactaggggcactgtgtgtgccgttgatatcggttgcgtttgataacaagcggaacagccagtcgaagctggtcaattacggtctctctttaagtgctgggtccatgataaccacgtcgctgtacatgctgctgcctcggattgacaaatcaaaccggttcaaggtgtttcctgggttgctcattggtatttgcctcagttttttcctgaactacctggttcatgcctttgctagcgaatccttggtgcactgtgccgataagtctgacaatggtacacattcgcatgtgcactcgctgtcacaatcacaatcacaatcacatttacattcgcattcgcgttcgcatctcgataacgatcaagatatagaaaattctccctctggacatggccaactgacctcatcttctagcgtgtctgaaaatgacgcattgctctcaaaggacaaccagaggcccaaaatgaaaagaaagctatctttgattgatttgctaacacgaagaaaatcagaaggtgagtgtcgcgacttgaacgagtgcacaccagtgctgcaatctgaagagccagagtatattgcttgcgttccgccagttataaagtcgtctcaagatgaaggagataattctcatggttccagcgagtctgacgataacctacagggggatgctaaggaccatcgcggtcttgtttgtatggagaataatgttggttatgatttggaaaatttatcactgtatcgtaaaaatttcctctcgagccgtcataatcatacctctggaacctctgagaactacggctccaatcagtcatcgcactctctgtcgtcatctttgggtagcaacatagctgaggaaccagccccattggtggaaacacaatctcatcatgaaaacgcctctttgtaccatcaccatcatcatttagaaacgcccttctcgaaactattgtccattggtatgcagacctgtctagtcttggcactgcataaatttcctgaaggtttcattattttctacaccaatagatcagattcgtcaaaatccttggggttttctatctttttaagtttgacgattcataatttcgttgaggggttcgcaatgactttgccattttacactgcattcaagtctaaatgggttgccattttaattactgccgtcctcggtggtggttctcagccattgggggcattaataggttattttattttcaggggtagcactccaaaggaccacgaaccaaatatggatctcttattgagcatcaccgcaggattcttgttggtaattggtttgcaaatgttccaaaccggtattggctttagcgatgggcatcatcatcatccagatgaaggagattaa

SEQ ID NO: 4538 - DNA, 126 bp, Saccharomyces pastorianus
atgaacacaagaaggaggaagggtatttctacaggcgggtttatgtcgaatgatggcccaacattagaaaaatatataagtaccaagctgtttgtacaattgagggaaaatgacctggtattgtaa

SEQ ID NO: 4539 - DNA, 186 bp, Saccharomyces pastorianus
atggagggtgatgatttatttgatgagttcggaaatctagtcggagctgatccttttgattctgatgaagaaggaagtgtgctagatgaggaagaacaatatgaaacggttatgtttgacaacagtgatagggaaagtgaaactggaagccatcaactaattactgtggcggatgagacctgcagc

SEQ ID NO: 4540 - DNA, 147 bp, Saccharomyces pastorianus
aaggagtcggaccaccgtggacatccttacgtcaaagacgtggaagtgctaatagaaaccgagaacacacagtcaactgaaacccctttagtagagccagtagcacaacgaacaaaactacagaacatacaatttttacacaattga

SEQ ID NO: 4541 - DNA, 1914 bp, Saccharomyces pastorianus
atgctatccattgccgacatcccagaaagaataaggaatgttggtataatcgggcctcttcattcaggcaagacctctctggtggatctcttggtgactgaatcacacaaacggatcccagatatgtctaaaaacgtagaactcggttggaaaccgttgaaatatatggacaatttaaaacaggagatagatcgaggtatctctctaaaagttaatggatccactttactttgtactgatctggaatctaagtccagcatgataaatttcttagacgccccagggcatgttaatttcatggatgaaacggctgttactcttgctgcgagcgacatagctttaattgtaatagatgttgtcgaaggtgtaacttctgttgtagaacagttgatcaaacagagtatcagaaataaactaggtatgtgctttgttataaacaagcttgataggctgattttagatctaaaactaccgccaatggacgcatatttgaaattaagtcatataatcagagacatcaattcgtttaccaagggaaaggtgttttcaccgacatccaatgatatcatttttgcatcaacaaagctaggttttacattcactgttaaggaattcgtaaactattattattcctcttcgatcccttcttctaagataaatgaatttactgcacggttgtggggtgagatttactttcataaaggcaaattccaaatgaaaccattcgaaaatattggaaagtacccaacttttgttgagtttattcttaatccactctataaactattctcctatgctctcgctatggggaaagataaattgaagactttgttaaaaactaactttaaagttactttaacacaagaagctcttaagtatgacccacagccatttttaaagcacgttctgcagttaatattcagagatcagaccggtctcgtggattcgatcacgaattgttatgaccctctaagcttaatagaaaataaaatatgtcatctctcaggtcctcgtgaagatatctcagaaaaagttttttgggctcatgttttgaaaactttggattatggtggagcagaatggtctctcgtacgcgtttattcgggccatttgaagagaggggaccacatacgtgttttagattctttgcaatccgaatcccgccaaaagaggcaattgcatggaagttttgctatggaaacccacgacgaagaagaggaagaagaagatgaaacgccaatttgtgaaatagaagaaatctgtttactaggtggtagatatgtttatcctgtccacgaagcatccaaaggacagatagtacttgtaaagggtatttccgatgcatacatcaaatcagctactttgtattctgtcaataataaaagagagatgatgtcactaaattattttaagcctttggattatataattcaaccagtgttcaaaatcgttcttcaaccgttattaccaagggagctccctaagttattggacgctctaagcaaaatctcaaagtactatccaggtgcgattatcaaagtagaggaatccggtgaacatgtaatactggggaatggggaattatatatggactgcttgctgtatgatttaagagcaaggtatgcaaatatagaaatcaaaatttcagatcctttaactgtcttttctgaaagttgctcaggtgaatcattcgcttcaatccctgtgaataactctgtatcacgttcaagtgataaagacgtccagagcatatcgattagtgtcacagcggaaccaatggattctaaaatgattcaggacttgagtaagaacagattaggaaaaggccaaaacagtttggatgttgaccaaattatggataatcccaaaaaactgtacaagatattgagaacagagtataactgggattcttaa

SEQ ID NO: 4542 - DNA, 363 bp, Saccharomyces pastorianus
atgaaaagtcaaacaattccgttgatgaagaaggcctgttacgttggtctgttgacagcaacacccacattattagagcccatttacgaagttgacgttatggttcacgctccactgttaccaatagttgaagaactgttcaagaaaagacgcggcagtcgattatacaagacaacgaagcttgtaggaacaccgttgttggaaattcgcggacaaattcccgttatcgaatcagcagggtttgaaaccgatttaagaatatcgacaaacggtctggggatgtgccaattgtacttctggaacaagatatggagaaaagtgcccggtgatgttttggataagatgcctttattccaaaattga

SEQ ID NO: 4543 - DNA, 201 bp, Saccharomyces pastorianus
atggaaggaaagaagtccgacagaggcaggcccaacggcaagagagtcgcaaagaatgccaagtacggtcaaggtggaatgaagagattcaagagaaagaacgacgcagactccactgccgatgtcaccggattctcctccagaaagatgaagggtaagaccaacaggccaggaaagaacaaacgtaccaaaagattctaa

SEQ ID NO: 4544 - DNA, 1875 bp, Saccharomyces pastorianus
atggtagatttgattcagaaactgcccaggaattttttaaatttgccctactcacaaaggaaaaaggtgatgattgaatatgcaccacaccaggactacaaagccctgatgtcattggtgaaaaagttcatgctaacatcttcaaagagtaatttctctctcactgggtttgtcaataatgctccagctactgaggtcaccactaccaatagcaacaacaattttcaaaatgctagcaggaatcagtccaataacggcaacgataacaatgcaaatgcgcgcccacctcagcgatctaggcatggctcaattgcatctcagtttttgagctcattttcaccttccatgacttcaatagcaaacatgaacaccaattcattgagcggctgcgccagcggcagtgtgagacccgatgataaaggtatggaaatattaggacaccgattaggtaaaattataggtttcggggcatggggtataatacgtgaatgcttcgatatcgagacgggtgtcggaagagtgataaaaattgtgaaattcaaaggccatgcaaaaatcaagaggcaggtgttgagagaagtagccatatggaggactttaaagcacaatcgaatacttccccttttggactggaggcttgatgaaaactacgcaatgtactgtttaacagaaaggatcaatgaaggaaccttgtatgacttggtgatatcctgggatgaatccaaacgctctaaaatatcatttgcagagagatgcaaaatgactatttttttgattttgcagctactatctgctttgaagtacatgcattccaaaaagattgttcacggtgacattaaattggaaaattgtcttttacaaaaaggacataaaaaatcagaatggaaggtgattctatgcgactttggaatgagttgtcatttcgatgacaaacatccctaccgcaacgatactaaagataaaagtatcaacagtagcaaaagatctagaaacgaaagcggagaagaaacaagtttggttaaatatcccacaactaactttctacctgatgaactaaccaacgactttgacgtaaatgaagacctcaaatatcagtttaaaaatcggaaatatgattcctatacaccaaaaaaagtggccagctctagctcttattcactaaagcctcttaactcaccatcttcatcatcttccaacctatttcacaagccggcctctcaaccacagccacaacaccgatacccgtttcatgggagacacaatactacagtttttccaaatttgggacccgagccttccaagtatatcggatccttaccttacgcttccccagagcttttaaagtactcggacacaagacgctcgaagtcggttgacttgcatatttatgattcgcccgactcttctcaatcagaaattagcgcggcatccttatcttcctctaactcgtcctctacatcatcgactggaaatgcatccatgaacaccaagcctggtgtagctaaaaactcaccatcgagttctctaatcgatgaaccatgtaacacttctcctttagggccagcgtccgatatttgggcattaggggtgatgctttatacgatattagtaggaaagttaccattcaatcatgaattcgaacctagactacgctctttaattaaatcaggcgagtttgaccggatttcgttagctcaagtctgtaaatatgacaagaaaagcaccgaagaaaccatgtttcaagggttgtatgacacagttattggatgcttgacgattgatttagacaaaaggtggagtctcgagagaatagaggaggtctttcaaaacgaaataaaactaaatgagtccatttacgatgataatgatttatga

SEQ ID NO: 4545 - DNA, 105 bp, Saccharomyces pastorianus
ttcacaccgctttccaactgggaagcggagagacgatcctcgtatacaattagtagcaacaacaacagcattacacaaagtaataacttcccttcgccaaactga

SEQ ID NO: 4546 - DNA, 747 bp, Saccharomyces pastorianus
atgtatacgtcgcaacgacaactacgacaaaatgagagcccgatttcatcgccatcacgttcgtcacagccttcctccggcacgccatcgccattatctggctctccagcatcgaatcacagctatggaagggatatgcgaggcatggtaggaattgatatacctgctaacgaggcggcgccggagagggtgaaaagcagcgatacgctctacttcaggcccaagaagatttaccagatggaacatgagcatccatcgcggtctactctcgtgcagctgcatagcaaaccgcacccagacgattccgccagtagctacaagaatgctaatgctgatgctgggcgtggtggcgttgagtcgggaaagtcgtgtggcaagcagcctttacacacgatgggggcagagtacgtcccagatttggacttcacaaagctagttgatgattggcaaaagtccagtgacgatttttacgagttcagaaacagtgctactccgcaggtggaaattaaaaacgatagtaaaggcaactatgaactttggaactctccagaggcaatattgggtcgacaccaacttagaagagacagtttttcccaagaaaatagcgattcaatgagtccagaaggctctctcttatcgagagatttgcactctaatgtcaagcctatccctttacccagaaatagtcaaccaatattcacaccggtttccacttggaagcggaaagacatcctcgtatacaactag

SEQ ID NO: 4547 - DNA, 2190 bp, Saccharomyces pastorianus
atgaccgcccaagacgggagagaacaccaaggactcgcagatagaagagcaagatcattttctgagtctttcaaatgccttttcaaaccctcacgttcaagaggcgcaagcccttctaatgtcaccagacttccctatcgatcgtcatcttcttcacccaagaggaattccgagccaccgagacggtccaccatatctgcacagttagatccgaaagcaccctcggtatggcagcatacgtatacattgaggcgttgttccccaggtatgccaaaactatttaaacacgcaggaagtgaagcaagtaatagcccaaccagacgtcgttctagatccaacaaaaaagaagaagcaaagaatgagtcaccaggaagttttggatcaacctctaatgactttcgcggtacgcaaggtctacgctctagaagttcatcaaattcgtcatgcgacggttcgaatggaacaactacttcttcagagagccattgggcaatggactccctgttagaccattctgataacgatgttataccgtatcggggctcaaataaggatgtactaaatgccagagacaaggtgcctgatgatttcatagacagttatgaggaagatgctttacatagagcaacttcatatccaatttccctcccccctaagcagctttaccacgaagggttgtatacaataaggtcgcatactgacggcgaaagtctaaaaagcctgcccagatttgcaggagcagatttaacatgcattattgagcaagatggatttaaagtttacgaggatggaagccatgagcacaatgtaaaagtgatggagatagtcactaaactagagaaaagtgagtccttaccggttcaccgtcaagggtcattatccaagccaaaactaggcatcgcgctgtccggtttgtttaaacatcataaagatgaatgtgacatcgaaaacgcattgtcacttttaccaaatgaaaatggctctgaaacaaatcataagaagcaagccaccgatcaaagctgtgacaagaacggaaagggcgacagcaatagtatcccgcccacacaaaacaagaaagattatttaaaaatagtaaatcctgacgcatcgctaggagatgatgaattgaaattgataaattcattatcaagcaaaatacatacaagtttacaacattatctgcacgaaaaaaatttaaagccagcggcgtgtgctagagaagaagcccctacttttcaagaaagctatggtcatcctgttgggacagtgggcgctggagcttatggtgaagtgaaagtgtgtgccagatccagaactgacagtgatattccgccatttcagacatatcatgatgataagttcatatattatgctgtgaaagaactgaaacccaaaacaaacaacgatctggagaggttttgtacgaaaatcacatcagagttcatcatcgggcattcattaagccactatcataaaaacggccaaaagccggcccccaacattttaagcgtatttgacattttggagagcagtagctctttcattgaggtcatggaattttgtcccgcaggtgatctttatggtatgctggtggataaatcaaaatcgaaaggtcgactacacccattggaagccgattgtttcatgaagcaattactccacggtgtcaaattcatgcatgatcatggaatcgctcattgcgacttgaaacctgagaatattctcttttatcctcatggtttgttgaagatttgcgattttggcacaagttctgttttccaaaccgcttgggaaaggagagttcatactcaaaagggcacaatcggatcggagccgtatatggctccagaagagtttgtaaatggcgaatattacgatccaagattaatagactgttggagttgtggtgttgtttatgtaagtatggtactaggacaccacctttggaaggtggcctccagggagaaagacatatcctttgacaccttttgcaaggaaatgacacgcacaaaagagttcaaagtattcgaagagctgaagcacgtgaactcagaactagcggcaactagaaagatagcattatattgtatattccaatgggagcccaaaaagagaatttctatcgataaacttttaggcatgcagtggatgaagcatacaaattgttgcctaatatatgaatctagctag

SEQ ID NO: 4548 - DNA, 408 bp, Saccharomyces pastorianus
atgtctaaaatcacacagcaactgaattttttgaacaagattagtgccaccactaagttaccccaaatcctcatagattcgaagaagtattcggggcttaggttgacctttcagatgaaaaaccacaacgggcatatgggtgccagagtcttttggcatgactacctacctaccttgcaattctacaatccagaaatcaagttcgatgtgataagaatcaagaacgaagataagcagaagagtgttccgtgcaaactggaaatcctctctcaagagggcacggttacagaaactattgacatgcgcaataagatgcatgacgacataatgaaagatctacttgaaaagatagaacacaaccctcttccagagaacgaggttataagggctgggtcgccaatagaataa

SEQ ID NO: 4549 - DNA, 144 bp, Saccharomyces pastorianus
atgaggtatacagtcattatgcagctctcggtaattttttcccgtcgcttcagctacgggatttcttcgatgcgattgaaaaataaagttgtgttcaatgagaatatgggaaggaaagacactttttacaaactgatcttataa

SEQ ID NO: 4550 - DNA, 939 bp, Saccharomyces pastorianus
atgcttttatctacctttacattatgcgacgccgttaagatcgaaagcctaaaccaaatccatttagcaggattactgattataatcagctccttctatgctctttacaagatatacctgaatataaattcctatacgcgtaccatattcaccatacaaatttctttagtggctgccatgctagtagttacccatcgttcagctgtgtctctgcagcttagacaagggttaccaagggaatctcagattgctggttgggtgatttttttcgtatcactcttcgtaatgccatttttacattacagaaaacctaacaatgattataaagttagattactagtcatctacttaacttttgctcctgcgtttatcattttaaccatctcctttgaatcactgttctactttttgttcaccgtttatatggtgcagtggattgaaattgaagacaaaatcaaggaaatgaaaactaaaaagaatgaaaattggctgcaggtgttaagagtctccgtaataggattttttctattacaagttgcattttttggaactgggaatgtcgcttccatttcttcattttcattagactcagtttatagattgctaccaatttttgatccgttcccaatgggtgcattattaatgttaaaactgatcattccatatgggctactgtctacatgcttgggtatactaaatttgaaactaaatttcaaagactacacaatctcgtctctgatcatttcaatgagtgatattttgtctttgaattttttctatcttttaagaacagagggatcatggttagatattggtataacaatttctaactattgtttggctatcctgtcttccttattcatgttaattttggaagtagttggccatgtattgttgagaaatgttactatccaaaataaaactaagaaaacacagtaa

SEQ ID NO: 4551 - DNA, 1797 bp, Saccharomyces pastorianus
atgtggaacaaaaccagaacaacgcttctggctgttggtgtcttattccatttgttttacttatggtcaatttttgatatctacttcatttcgccgctagttcatggtatgagcccataccaaagtacttcgactcctcctgccaagagattgttcctgattgttggtgatggcctgcgtgcagatacgacatttgataaagtcacccacccggtaactggaaagacggagtttttggcaccttttattagatctttagttatgaacaatgctacttatggtatttctcataccagaatgcccactgaatctcgtcctggccacgttgccatgattgctgggttttatgaagatgtcagtgctgttacaaaaggttggaaatcaaatcctgtcgattttgacagttttttcaatcaatccactcacacctattcctttggttcacctgatattttacccatgtttaaagatggtgcatctgacccaaataaagttgatgcctggatgtatgatcatactttcgaggattttacacagtcttcaatagaactggatgcgtacgtcttcaaacatctggatcaactgtttcataattcgacactaaactcaactctggattatgaaatcagacaagacggtaacgtattctttctacatttactgggttgcgatactgcgggacattcttacagaccttattctgctgaatactatgataatgtcaaatatattgacgaccaaatcccaacccttatagagagggtcaacgaattttttgacgatgacaagactgcattcgtatttaccgcagatcacggaatgagtgcatttgggtcacatggtgatgggcatcctaacaacacaagaactcccctggtcgcttggggagcaggtttgaataagccagtacataattcctatccggtatttgacaactatactgaaaactgggagctatccgacattaaaagaaatgatgtcaagcaagctgacattgcctccttaatgtcatatttgatcggtgtaaactatcctaagaattcagtaggcgagttaccaatagcatatatcgatggaaaagagagtgataaacttgctgcgttatataacaacgcaagaagcattttagaacagtacctggtcaagcaaagcgaggttacggattcccagttttattataaagagtatccaagatttgtcgagaagcctcatttgcgttacttggaggagatagaaaccctaattcaacgtatatctgaaggagagaactacctagaagaagaagcaatcacacttacagaagaactaatgcaaacgactctggaaggtttgtattatttaacaacctataactggagattcattagaactatcgtcacttttggcttcataggctggatctttttctcttttacaatatttttgaagtcatttattttagaggatgccgccgatgaccagaaaacatcgctgttaactcatgtgacatttggatccgttggaattctattgaactggatcctcttttaccagcattctcctttcaacttttacatgtacctgcttttcccgttatacttttggaggtacattttcacaaataggtctgtattacgcacgggtatcaaggagttttttaaaggtacttccatatgcaaaagaattctaatcacagtttccattatttcagtttatgaagggatcgtatacgggtttttccatagatggacatttacgttagttacaaacatactagcattttatccatttatctgcggtgtgagggggttactgtaa

SEQ ID NO: 4552 - DNA, 297 bp, Saccharomyces pastorianus
atgcaagagctctggtactctggaaatgaacttaacgccggtatcctaacagatggtaagggcagaatcggttctattgttgccaacagacaattccaatttgatggtccaccaccacaagccggtgctctttacgctgctggttggtccatcactccagatggtaacttggccattggtaaccaagacattttctaccaatgtttgtccggtaacttctacaatctgtacgatgaacacattgggtctcaatgtaacgaggttcacttacaagctatcgatttagttgactgttaa

SEQ ID NO: 4553 - DNA, 471 bp, Saccharomyces pastorianus
atgcaatacaagaaaaccctagtcgcatctgctttagctgccaccactctagctgcctacgctccgaaggacccatggtccactttgactccatctgctaccttcaagggtggaataactgactacgcttctactttcggtatcgctgttgaaccaatcgctactaccgcctcctccaaggctaagaggggtgcagctatttcccaaatcggtgatggccaaattcaagctactaccaagactcaagctaccactaagactcaagctcctgctgtctctcaaatcggtgatggtcaaattcaagccaccaccaaaactcaagctcctgccgtctctcaaatcggtgatggtcaaattcaagccaccaccaaaactcaagctcctgccgtctctcaaatcggtgatggtcaaattcaagccaccaccaaaactcaagctcctgccgactctagagatcgccggtacgagctg

SEQ ID NO: 4554 - DNA, 1290 bp, Saccharomyces pastorianus
atgcaatacaaaaagaccatagttgcatctgctttagctgcgaccactctggctgcctacgctccgaaggacccatggtccactttgactccatctgctaccttcaagggtggaataactgactacgcttctactttcggtattgccatcgaaccagccgccaccacagcttcttctaaggccaagagagctgcttctcagatcggtgacggtcaagtgcaggccgccaccaccaccgccgctgtttctaagaagtctaccgccgctgctgtctcccaaatcaccgacggccaagttcaagctgctaaatctaccgccgctgccatctcccaaataggtgatggccaagttcaagctgctaaatctaccgccgctgccatctcccaaataggtgatggccaagttcaagctgctaagtctaccgttgctgctgtctcccaaattaccaacggccaagttcaagctgctaagtctaccgccgctgccgtctctcaaataggtgatggccaagttcaggttgctaaatctaccgccgctgccgtctctcaaataggtgatggccaagttcaggctgctaaatctaccgccgctgccgtctctcaaataggtgatggccaagttcaggctgctaaatctaccgccgctgccgtctctcaaataggtgatggccaagttcaggctgctaaatctaccgccgctgccgtctctcaaataggtgatggccaagttcaggctgctaaatctaccgccgctgccgtctctcaaataggtgatggccaagttcaggctgctaaatctaccgccgctgccgtctctcaaataggtgatggccaagttcaagccactacctctactaaaggtgctgcttctcagatcacagatggtcaagtacaggcttcgaaaactaccaacggcgctagtcaagtgagtgatggtcaagttcaggccactaccgaagccaagagcgccaacgatccagtcgatgtcgtctcttgcaataataatagtacactatcaatgagtttgaagaagggtatcctaactgatgttaagggcagaatcggttctattgttgccaacagacaattccagtttgatggtccaccaccacaagccggtgctctttacgctgctggttggtccatcactccagatggtaatttggctttaggtgaccaagacactttctaccagtgtttgtcgggtgacttttacaacttgtacgataaacacattggttcccagtgtcatgaagtttacttgcaagctattgatttgatcgattgttaa

SEQ ID NO: 4555 - DNA, 1515 bp, Saccharomyces pastorianus
atggcgactgattccgatagatgtgtttttcgtgcctttggccaggaatatatcctgaataagcactttcgactcgtagatgaaattggccggggctccaacgggcttatttgttcttcgacttatacagagaagaacgaagaaagcacaatcgctatcaagaaaatccctaatgcttttgtgagtaaactatcctgcaagagaacccttcgtgaactaaaaatattgagacattttagaggccaccctaatataatctggctttttgatactgatatagttttttatccaaacggagtattaaacggcgtgtacttgtatgaagaactaatggaatgtgatctttctcaagtgataagatccggacaatgcttagaaaatacacactgtcaaagcttcatataccagatactttgtgcattgaaatacatacattctgctgacgttttacaccgcgacttgaagccaaacaacctacttgtcaatagtgattgcctattaaagatttgcaattttggtctgtcacgaggttattcagaaaactatgaagaaaacaatcactttcttacagagtttgtagcaacaagatggtatagagcgccggaaatcatgttgagttatcaaggatatacgaaagctatcgatgtttggtcaacagggtgtattttggcggaattgctgggcggaaaacctatctttgatggcaaagattatgtagatcaactgaatcatatcctccaaatactcggaactccatcaaaggaaacattacaaggaatcagttctcagaaggttcagaattacatcttccagttcggtaatataccaaggacaccttttgagagtctattgccgagagctagttcagaaggattagacctattacggaaaatgctggagtttgatccggaacgacgagtaacagtaagtgaggcattagagcatccatatttgtccatatggcacgatatagacgatgaaccttcatgcgaaataaagtttgactttgagttcgaacatatcgatagtatagaggaactacaaagccaagtcataaaggaagtgtttgactttagacaagttgttaggaaacatcccattggtggagacttttcatcatcatcttcgtcatcagaagaccccattctccaagaggttgctgatgtccatccctcaataaaaaaattaggcagccctaactccgatgcctctcttatgagtcaactaccatcattgactacaactcagccgtttgaaagccatgtaaaggcaaactcaggttcgtctcaaggtgcaaacacgctcgaatgcaataccacccaggaacataaggacgcgttgaggtcacacagcgggccaaataaaacggaatgtttgatcgtgtcatcatctcctcccgaacataatacaaatggtaatgagagtgtaagccaggataccaatgacaatgacagtatttttttctttgatttagaaaaagaattagaatttggactggatggtagatttttataa

SEQ ID NO: 4556 - DNA, 2586 bp, Saccharomyces pastorianus
atgaccagcaacaccccaaaacgtgaaattcttccagataatgtcgcccctttacactacgatttaaccgtagaacctgattttaaaacgttcaagtttgaaggttctgttaaaatagaactaaaaatcaacaattctgccattgacacagtaagattgaacactatcgatattgacatccattctgccaaaattggcgatgtcactgcttctaagattagtactgacgaagaacaacaagtcgcagactttgtatttcctgaagggaccttgtcctcatttaaagataacgcaattttagaagtaaagtttacaggtatcttgaatgataatatggctggcttttatagagccaagtatgaagacaaattgactggcgaaacgaaatatatggctactactcagatggaaccaacagatgctagaagagcttttccatgtttcgacgagcctaacctaaaagcttcgtttgctatcactttagtctccgacccatccttaactcacttgtccaacatggatgtcaaaaacgaatatgtcaagaacggaaaaaaattcactttgtttaacacaaccccaaaaatgtcaacttatctcgttgcttttatagttgccgaattgaaatatgtcgaatctaaaaacttccgtatccctgttagagtttacgctacaccaggtaatgaaaagcatggacagtttgccgctgacttgactgcaaaaactttggcattttttgaaaaaacttttggtattcaatatcctttaccgaaaatggacaatgttgccgttcatgaattttcagcaggtgctatggaaaattgggggttagtcacatacagagtggttgatctactattagacaaggacaattctacgttggatcgaattcaaagagttgccgaagtcgttcaacatgaattggcccatcaatggtttggtaacctggttaccatggactggtgggaaggtttgtggttaaacgaaggtttcgctacttggatgtcatggtattcatgtaacgcatttcaaccagaatggaaagtctgggaacaatatgttactgataccttacaacatgctttggccctcgactctttgagatcttctcatccaatcgaagtacctgtaagaaaagctgacgagattaaccaaatatttgacgctatttcttactcaaaaggtgcttctttattgagaatgacttcaaaatggttaggtgaagaaactttcatcaaaggtgtttcccaatacctgaataaatttaagtacggtaacgcgaagactgaagacttatgggatgccttagcagatgcttctggtaaggacgtccgttctgtgatgaacatttggactaaaaaggttggatttcctgtcatctcagtaagtgaagacggtaatggtaagataacgttccatcaaaaccgttacttgagtaccgccgacgtcaaagccgacgaagatgaaacaatctaccctgtgtttttggctttgaaaaccaaagatggtgtcgatggatctgctgtattaaatgagaggagcaagactattgaattaaaggaccaagaatttttcaaagtcaatagcgaacaatccggtatttatatcacatcctatagtgatgaaagatgggcaaagctgggaaaacaggctgatttattgtctgttgaagaccgtgtcggtttggttgctgatgttaagaccctatctgcctctggttacacctcgactaccaacttcatgaatttagtctccaaatggaataacgaaaaatcatttgtcgtttgggagcagataatcaacagtatttcttcattaaagtccacttggttgttcgaaccagaggagacccaaaatgctcttaataacttcacgaaacaactgataagcggcatgacacgaaacttgggttggaaattcgaatcctctgattcattctccactcaacgtttgaaagtgaccatgttcggtgctgcctgtgctgccagagatcagcatgtcgaaaaagctgctctgcaaatgtttactgactattgcaatggtgacaaagacgccatcccagcattaatcaagccaattgtattcaacacagccgcaagaattggtggcgttgaaaactacgaaaaagtctataaaatctacttaaatcccatctctaatgacgaaaaattagctgcattgagaactttaggtagattcaaagaatctgagttattggaaagaactttaggctatctgtttgacggcactgtcttaaaccaagatatctatatcccaatgcaaggcatgagagctcaccgtgagggtgtcgaggctttatggagttggatacagaagaactgggatgaaattgccaagagattacctcctggtctatcaatgttgggttctgtcgtcaccttaggtacttccggctttacttcactgcaaaaaatagatgaaatcaagaagttctttgctactaaatctactaagggcttcgatcaaagtctggcccaaacattggacaccattacctcaaaggcccaatgggtcaacagagaccgtgatgtggtcaacaagtacttgaaggataatagatacttttag

SEQ ID NO: 4557 - DNA, 393 bp, Saccharomyces pastorianus
atggtggattccacaatcgatcctaagaaattaactacaaccgctgagttcttggtagacatattattgatcactgaatctagctgtgagaatggtgtggatattttgatcgcatgcaacaaaagcgaatcatttactgcaagaccatcatcaaagattaacgatgctttagaaaacgaaattcaaaagatcattgaaaggagaaaaaaatcgttaaacgaagtcaaaagaaaggtcaacgaagacgaggataccgagaattcattagatgctttacaatctgctaatgggtttaaatttgcaaatatggaagggtctgtcgttaccatcgagggtagtgtcagtaagaataatatttccaaatggcaaaaatggatagacgaaaaactttag

SEQ ID NO: 4558 - DNA, 309 bp, Saccharomyces pastorianus
atgctaagtaattcgctagtgattgcctgtttattggtgataataactgccatagcatttatcacagtgcaaaagacatcatcatcaaagactgggattaaacaaaagagttatcagccatctattgttattgcaggtcctcaaaatacaggcaagactagctttcttacgctactaaccacagattccgtgagaccaaccgtcgtgtcccaggaaccgttattagcggcgaattacaataattctagagctagtttggtggattcccaggccacgtcaaattacgctataagctctctgaatacttga

SEQ ID NO: 4559 - DNA, 753 bp, Saccharomyces pastorianus
  modified_base (16)..(16): a, c, g, t, unknown, or other
atgtacgattgtcagnatgttgctccccttttcatgatcaggcatcgcattgatgttatgctgagccacgactggcccagtggtgtcgtatatcatggtgatataaaacatctattgaagtttaagcctttttttgaacaagatattcaaaagggtgaactgggcagtccagcgacttggcagctgttgagagatttgtgccctcagtggtggctgagtgctcatttgcacgtcagatttcaagcttctatcaaacacaataagaggaactctcaattagccaatcgatcaacctcgaaaataaaaaaaaactccaacgaaatcgacctggatttgtccagcgatgatgatgaaaagccgcctgctgtggcaaaaagtgaggaaaagagcgaacctagcttgaagtacgatgagacacggttcctatcactggacaaatgcctacccaggaggcgctggttagaaatagtggaggtagagccggataaatcgcacatttcgtggaaagacaaagaccattgtatgttttgggatccggaattcattaacaatataaaaatatgggagcgaaatgaagatgctttacgaaataaatcgtttgacgatatcaattggatgggactatctcaatcaaatggaaaagaagacatcgaaatcgaatgggaaaagtatgctgttcctgaatacactttagatatacaaaaagatgagatagggcagactaaattattcgccgacaaatttttagcttag

SEQ ID NO: 4560 - DNA, 1611 bp, Saccharomyces pastorianus
atgcacaaggacaactggaaatggcacatgtacgataccgtgaaggggtctgattggctcggtgaccaggactctatccattacatgacccgagaggcgcctaagtcgatcatcgagctggaacattacggtgtgcccttttcgagaaccgaaagcggcaagatctaccaaagagcctttggtggccaaactaaggagttcggtaagggtgctcaggcctacagaacttgtgcggtcgcggacagaacgggacatgcccttttgcacactctttacggccaagccttgagacacgacacacatttctttatcgaatatttcgccatggatctgttgacccataacggcgaggtcgtgggtgtcattgcgtacaaccaagaggatggtaccatccacagattcagagcgcacaagaccattatcgccaccggtggctacggtagagcatacttctcctgtacctccgcgcacacgtgcacaggtgacggtaacgccatggtttcgcgtgctgggttcccgctgcaagatctggagtttgttcaattccacccttcgggtatttacgggtccggttgtttgatcactgaaggtgctcgtggtgaaggtgggttcctgctcaattctgaaggtgaaagattcatggaacgttacgcccccacggccaaggatttggcctgtagagacgtcgtgtccagggctattaccatggaaattagagaaggtaggggtgttggtaagaagaaggaccatatgtacttgcaattgagccatctgcctccagaagtcttgaaagaaagattgcccggtatttctgaaaccgcggccattttctctggtgtagacgtgacaaaggaacctattccaatcattcctaccgtgcactacaatatgggtggtatccccaccaaatggagcggtgaagcgttgactattgacgaagaaactggcgaagacaagcttattcctggtttaatggcttgtggtgaagccgcttgtgtctctgttcacggtgccaatagattgggtgctaactccttgttagatcttgttgtttttggtcgtgctgtagcccatactgtcgctgacaccctacaacctggcttaccacataaaccactaccttcagatctaggtaaagagtccattgccaacttggataaaataagaaacgctaatggttcaagaactaccgccgaggttagaatgaacatgaaacaaacaatgcaaaaggatgtatccgttttcagaacacaatcgtctctggacgatggtgttcgcaacatcaccgctgtggaaaagaccttcgatgacgtcaaaaccacagacagatcaatgatctggaattccgacttagttgaaaccttggaattacaaaacttactaacttgcgcctcccaaactgccgtttctgccgctaatagaaaagaatcccgtggtgctcatgcaagagaagattatccaaacagagacgatgaaaactggatgaagcacactttatcctggcagaaggatgtcgctgctccagtgactttgaaatatagaaaggttatttctcacactttggatgagaatgaatgcccctctgttcctccaactgtaagatcctattag

SEQ ID NO: 4561 - DNA, 150 bp, Saccharomyces pastorianus
atgctatcgctaaagaaatctacgctctctaagcttgctgtgtttaagagcgcaaggacgttttcatcgtccgcttttgtccgccagacacaggggtctgtgaatggctccacgtccacttccgcggatggacaagtaccatataattga

SEQ ID NO: 4562 - DNA, 2160 bp, Saccharomyces pastorianus
atgattagaagagatagagagaagagagaagaaaaagggatggcgaatagcataagacgtgtaagcatcgcagatatgaagggcaacaacggcaatgcagtcacgggaggcggcacaggaacctcgcacgcgtctgattcactcttaacggatggtagtggcagtggcagtggtagtggcagtggcagtggtagtggcagcaacagcgggagcagaagcagaagcaggaaatcaagtgggactgccggcggtctgctgaagaacccaccactgcaggtaaacagcgaatcggcgaatggtgcagtgcctgccgcgccgcacactataactaataatggcggtacgctcgacgtgagcataaacaatcctgacccgcaggtggttgatgtggtggcccgccacctgatccggaacccgaccaacaatctgcacttgcaaggtggagatatcacgagagacctgtacaagtggacgaacgagcatccggcgtcgccgtcgcagaaccagaacctgcccgctccgtccacctcgataccttcgcaagcgccctcattctccaaccgcaggaggtcgatgagcttttcagcggcctccgtagcatcctcatcctaccctaacaacaatgcagatgcgaacgtgaactctttgacggggaatgtatccgccatgggtctggcgcccgcatcgatgacgcacgaagagatcagggcccccggcgggttcagaaggtcgttcatcatacaaaagcacaagaggcataacatcaatgcccccgtaccgaattttttcaccaggaactttatcgagtttctgaccctgtacggtcattttgctggtgaagacctgtccgaagaggaggatgaggaagaaaccgaggcggaacaggaaccagaagaaccggaggaggaagctttggaaacggaaagcacccagcttgtctctcgcgaacgtgaccgccgcccccataagtcctccacggtgaaggcagtactacttttgttgaaatcgtttgtcggtactggtgtgcttttcctgcccaaggccttccacaacggtggctggggatttagcggcgtctgtctactcatgtgcgccattgtttcttacggatgctttgtttcgttgatcaccactaaggacaaagtgggcgttgatgggtacggtgacatgggtagggtactttacgggcccaagatgaaactggctattctcctgtccatcgccttatcgcaaatcggattttctgccgcttataccgtcttcaccgccactaatttgcaggtcttttgcgagcattttttccatttgaaaccgggcagcattaatttagccacctacatctttgcgcaggtgctaatttttgttccattatcattgacaagaaacatagccaagttgagtgggaccgcgttgatagccgacgtatttatattactgggtctggtttacgtttactattactccatttaccacatctccgttaatgggattgcatccgacaccatgctcatgttcaataaggcagattggtctttgttcattggtactgccatctttactttcgaaggcatcggcctgcttatccccatccaggagtcaatgaaacacccgaatcacttccagccatcattgtccgcagtgatgtgcattgtggcagtagtcttcatatcctgtggtctcttatgctatgccgcatttggggccgatgtgaaaacggttgttttattgaatttcccgcaagatagctcctacaccctcactgttcaactactgtacgcattggccatattattatccacacctttgcagttattccccgccatacgtatcttggaaaattggactttcccctcaaatgcatctggtaaacacaatccgaaggtcaaatggttaaagaactacttccgttgcgccattgtgcttttgacatccgtcctagcatgggtaggtgcaaacgatctggacaaatttgtatccctggtagggtcctttgcatgcataccattgatatacatatacccaccgctgttacattacaaggcgttcagcctatccggaatttcaaggccaaggcttctgttggatttggttatcataatcttcggagtcgctgtcatggcctacacttcatggcagaccataaaaatgtggagctcataa

SEQ ID NO: 4563 - DNA, 93 bp, Saccharomyces pastorianus
atggtcctcctggtaccggtaagacattatgtgctcgtgctgtcgctaatagaactgacgctactttcatcagagtcatcggttccgaattag

SEQ ID NO: 4564 - DNA, 660 bp, Saccharomyces pastorianus
atgtttgaagcatccgatagtatgctgaattcattaacaagaccttaccaaattgctagttttcccactagaacgaatattaaaattcctattttattaatttatggcggtattgattccttagtcgatattgaagtgatgaaaagaaatttgccttccaactctgtatttgatgtaaaagttgacaattacgaacatttggatttgatttggggtaaagataccgacaccctagtcatagctaaagtactcaggtttatcgagttttttgattctagcaatagtttaatgaaaacaaaccacttactaccatctgcaagtttagttgaggaagtaccaactactacatggaaagctatatctcacccatcccatgactatagccaaaaggttcaatcattggatcgttcccctttgtcagtgcaagctgacgaaatggatgaaaaacccagtgctgataatgcgaggtttttgagacgagtcttctctaccagtgccatagacgatgaaaatgggagtgtgccccaagaagagacggaaggtgaaattcataaggagcagcaaagaagattaagcgcttaccttgaatcatctaatgacctacgacaactagacaccaatctttcatcagcggtgctagatggcacggaccaagaataa

SEQ ID NO: 4565 - DNA, 972 bp, Saccharomyces pastorianus
atgtttttccctttcttgggcagattatcaataacagactacatcatagtcatcttagtatacatcgaaagtattgtctcatctgtacttaaattaataccgcaaccgatgtttaaccttttcgaatggctgatcaacttctcaacatgctctgacgataataccattgaacagaaattaagggcagctccaaccatccatgaaatgtgcgcacttttcgatatctctgtcgaggaccatttggtaaggaccgaggatgactacatcttgacgttgcacagaattccaccactttccaaaaataggttcaataataaggtggtttacttacatcacggtcttttaatgtgttccgacgtttggtgttgtaatgttgaaagacataaaaacttgccatttgttttacatgatttaggttacgatgtttggatgggtaacaataggggtaataaatactcgaccgcccacttgaataaaccaccaaaatcgagcaagttttgggatttctctatcgatgaattcgcgttctttgatattccgaactcaattgagttcatactggatatagcgaaagtggacaaggttatttgtattgggttctcccaaggttcggctcaaatgtttgcagctttttcgttaagtgaaaagctgaaccaaaaagtctcgcattttattgccatagctccggctatgacacccaggggcctacacaacagaattgtggatactctggctaaatcctcacccagcttcatgtatcttttctttggtaggaatatcgtgttgccttctgctgtgatttggcaaaggactttacatccaacccttttcaatttctgcattgatgtagcaaacaaggttctcttcaattggaaatccttcaacattcagccaagacaaaaaattgcttcctacgcaaaactttattcaaccaccagcgtgaatccatcgttcattggtttcaaatattaa

SEQ ID NO: 4566 - DNA, 1008 bp, Saccharomyces pastorianus
atgcaagtcggggagggaacatatggtaaagtttataaagcaaaaaatacgataacagggaagttagtagcattaaagaaactaagactacagggggagagagaaggctttcctataacctctatacgagaaatcaaattattacaaagttttgatcatccgaatgtttctactattaaagaaataatggtagaatctcagaaaaccgtgtatatgatattcgaatatgctgacaatgatctgagtgggctgcttttgaataaagaaatcaacatttcccattcccaatgcaaacaccttttcaagcaactcttattaggaatggaatacctgcatgatagcaaaatcctacaccgtgatgtcaaaggttctaatatcttaatcgataatcaagggaaactaaaaataacagatttcggtctggcaagaaaaatgaattccaggacggactatactaatcgtgtcataactttatggtacaggcctcctgaattactattaggaactacaaattatggagcagaagttgatatgtggggctgtggttgcctactagtagaattgtttaacaaaactgcaatttttcaaggttcgaatgaattagaacaaattgaatcaattttcaaaattatgggtactcccacaataaagaactggccaacgctttatgacatgccgtggtttttcatgattatgccacagcaaacaaccaaatataagagcattttttctgaaaaattcgaaagtattttgccatctgcaaaatgtctacagttagcaactaatttgttgtgttacgatcaaaaaaagagatttactgctagtgacgccttgcaaagcgactatttcaaagaggagcccaaacccgaacctttagttcttgacggacttttaagctgccatgaatacgaagttaagttagcgagaaaacaaaagcgttctaatattgcatctaataacgttaataacgctaacaataataagagtaacactaataatgataaatag

SEQ ID NO: 4567 - DNA, 141 bp, Saccharomyces pastorianus
atgcaagtcggggagggaacatatggtaaagtttataaagcaaaaaatacgataacagggaagttagtagcattaaagaaactaagactacagggggagagagaaggctttcctataacctctaacgagaaatcaatatac

SEQ ID NO: 4568 - DNA, 549 bp, Saccharomyces pastorianus
  modified_base (418)..(462): a, c, g, t, unknown, or other
atgtcttttaacaacggcagtacttattcaaagagttatagcaggaataataagagacccccgttcggaaagaggtcgccacacccccagtctctatcgaggccaccgccaccaaagagaatacggactaataatagttaccagtcaaatctagataatgactcgcctcaaacgatggatccaactgatacaccagctcatgcgaaaagtcgcaataataatatcctttcccgttacaatgacacatcttcccaaacaaactcaagatatcaaggttcgagatacaataatagcacatcgtatgcggataggtccaacactatgaagagggatgaaacgaaagctgaatttctatctcatttaccgaaggggcctaaatctgtagagacgtcgagatataataattcaccaatcaccnnnnnnnnnnnnnnnnnnnnnnnnnnnnnnnnnnnnnnnnnnnnncgtactactacttctaattaccacaataataggggtcaggaaataccaattctccgtgccccaagaaaccacaagtatcagttctaa

SEQ ID NO: 4569 - DNA, 336 bp, Saccharomyces pastorianus
atggagcaaaacaaagatccgcaaatgatatcaaaacatagttcgagactacctgtatgggtactcagtccccgtgaagaacaacaggcccgtaagaatttaaagacgacaacatatgaaaaatgtgcaaattttgtgcaggccatggctgattgcgccaaggcaaatggtatgaaagtttttcctacttgcgataagcagcgagacgaaatgaagtcgtgcctcttattttaccaaacagatgagaaatatttggacgatgaaagggacaagattgttttgaagaaaatcaacaagctagaagagctacttcaaaagcaaaactcagcaaagtaa

SEQ ID NO: 4570 - DNA, 1032 bp, Saccharomyces pastorianus
atggaatatgaaccggagtttgtctcaagagctattcaagctttatctcaactaggtattaaatatgcacaagaatcatttgttagcaaagtcttggatatactcctagaattgttagaaagacaggatacaataaaggacgactgctgtatatcgttatgtgatttattgagacattgtcctgaaaacaatgaaatggccaaacaagtctgtgcagtattcaacacatggtccaatccagaagttttgttacaatcagatattgccaagtgtaatttcgtatggttattgggacagcatccaaatgatttttccaatttagagccaaagatcaatatcttcatagaaaattttgttcaagaagaagctttgacacaagtgtctttgttaatgacagttgtcagattgcattccactttaacggggagcgcactacaaagtgtcttggaattggccacacaacaaacacatgaattagatgtccgagatatggctatgatgtattggagatgtctttctatgccaaattctgagaagcttattaatgatttatgtcaaagtaaactcccaatgatttcaaatacacttgataagttctcaccagaagtcttagaaaaattattgatggaattgggtaccataagttccatctatttcaagcctaacgcagacaggagaaaaggtgaaaaatacgtccaaaatatagtcaaggggaagcatatggaggaactagaaagcatggcaaaagatgaaattgccaacaaggcaaatgacgatgtgctactagatttcgatgatagaaatgatgcgacgaatacgagcacaggaatgctcaatacttcaagcacattgggcgatttagacgacttattcgatttcggatcttccgaggatactccacaaataaataaggatggttccaagactgttcaagggctcaatagcttgaatttgaacgacaacttaaacaccatgtctaccaataataaaaacaacaatggagtgtcgcaggacctacttgacctgttttga

SEQ ID NO: 4571 - DNA, 1077 bp, Saccharomyces pastorianus
atgccaccgctggataagaggatcaagaagtttttaaaggactccattagaatagcacctaaaatttccagtaagggtgaattgggtgaattacgaaccggcctagtctctcaatacccgcaaactcggaaagatgccatcaaaaaaactattcaacaaatgacattagggaaagatgtatcttcactgtttcctgacgtcttaaagaacattgccacgattgatgttgaacagaaaaaactggtttacctttatgtgatgaactatgccgaaacacaccccgagttatgtatccttgccgtcaatacatttattaccgatgcgcaggatcccaatcccttaattcgttgtctggcaattagaacaatgtcaatgataagagtggagaaaattttagaatacattgaaacccctcttcgtcgtactttgcatgatgataatgcttatgtcaggaaaactgctgtgatatgtgttgcaaaacttttccaattaaacaaggaactatgtgtcgagctaggtgttcttgaagatttggttaatgccctagatgattcgaaccctttggtcattgcaaacgcaacagctgcattaatagagattcacaatatggacatgaatgctgtcaaactttcaagtttgattcaatcgcacgtgtcacaatttctactggcgttgaatgaatgtaccgaatgggcgagaatcactatattgagtacactgtctgaatattcggcgaaggattcgctagaagcacaggatatcattgacagagtaaccgctcatttacaacacgtcaacccagcggttgtcttggcaactataaaagtgatcgtaagaaacttaccacaaattgaatactcttcaaatagcatgataatgaaaaggttatcatctgctttggtatcattaatgtctacaccgcctgagatgcaatatgtggccttgaagaatattagaattatactagaaaaataccctgaattattaaccaaggaattgaggatattttatatcaagtttaccgatccactctatgttaagctggaaaaaatcgacattcttgtgagaattggttga

SEQ ID NO: 4572 - DNA, 1842 bp, Saccharomyces pastorianus
atgtttgaattcatgaacgttttaaacacggatgtctcattatgtaacatgctaaaatcagtcttgaatagtcccgagatatcatcgaaattgagcgaagaagagcttaaagttggtaaaatcttattggatgattttgaaaagtcaggcatatatatgaatcccgacgttagagaaaactttattcagttatcccaagaaatcagtttaataggtcaagaatttatcaaccatacagattatcctggttctaattctgtgaagataccatgcaaggagttagataacagcaatgtaagcacattcctattgaaacagttaaataaagatgttaagggccagaattacaaagtacctacatttggttacgcagcttacgcattattaaaaagttgcgaaaaggaacaagtaaggaaaaagctatggaccgcattacatagttgttctgacaagcaaatcaaaaggctgaaccacttacttaaactgagggcaaatttagctaacctgatgcacaaagaaagttatgcggaatatcaattagagggaaaaatggcaaaaaccccgaaagatgtacaagattttatcttgaccttaatgaatgataccatagataagacggcaagcgagttaaaatttatagccgaactcaaggccaaagatctcaagaagcctttggctacaagtacagacgaaatactgaaacttgtcagaccttgggatagagactattatactggcaaatatctacagcttaacccttcaaatgcaccaagtgccaaagagataagctcatatttcacattaggaaatgttatccaaggtttatccgatttgttccaacatatatatgggattaaattggaaccagcaattgctgacgagggagaaacatggtcccctgacgtgagaagattgaatgtgatatcagaagaggaaggaattattggcgtgatttactgtgatttgtttcaaagaagtggaaagacttcaaatccagcacatttcactgtttgttgttccagacaaatatatcctaacgaaacagacttctcaacaattcaactgggtgagaatgcagacggttccttttttcagctgccggtaatttcgctcgtgtgtaactttgccccaataccgattgcttctaagaaaagcttgtgttttttacaactaagtgaagttgaaaccctctttcatgaaatgggtcatgcgatgcattcaatgttaggaagaacccacatgcagaatataagtggtacaaggtgcgctactgactttgttgagctaccaagtattctgatggaacacttcgccaaagatatacggatcttgacaagaattggcaagcactatgagactggagaaaccattgaggcagatatgttgcagagctttatgagaacgacaaattttctacagaattgtgagacgtactctcaagcaaagatggctatgttagaccaatcatttcatgatgaagaagtgatttctagtattcatagctacgatgtagttaaaaattatcaagcattagaactacgtttgaaggtactagttgatgaccagagtaattggtgcgggagatttggccatttatttggatacggagctacgtactacagctacttatttgataggacaatagcatccaaaatttggtacgccttatttgaagacgatccatatagccgaaagaatggtgataaattcaaaaagcatctactaaaatggggtggattgaaagatccttggaaatgcatcgctgacgttttacagtgccctatgttaaaggaaggcggcagcgaagcaatggagtttattgcacaaagtcataaatcttag

SEQ ID NO: 4573 - DNA, 492 bp, Saccharomyces pastorianus
atgttttatatggcaaccctgaagagagggttcaatgtcttgataccgtcgctctcccgccaaagtcaattaattaggtcgtttgccacagccggtgcagtttccagaactagttcaaaaagtataaagaatattttcgacgacaattcatactggagaagcataaacagtcaggatgctaataacagtaagattgcacagtaccttttccaaaaaaccaaaaccggactttttaagaacccttatttgacttccccagacggcttgcgtcaatttagccaagtctctttgaggcaagcacaggaacttctcgaacgaatgagaaacgattcttctgaaaacggtaaattaacctacattatgaacctggatagattgagcgatacattatgtagggtgattgatttgtgtgagttattagatcaacacatccagatgatgcgtttgttaaggctgcccaagactgctatgaacaaatgtttgaattcatga

SEQ ID NO: 4574 - DNA, 1392 bp, Saccharomyces pastorianus
atgtggaaatacctgcctaagcaggccaaacatggaagaaccataaaaagacttagcgttctccagtttgttatcaatgatcggctcaggttatattctacgttcgaagaacatagtatttggagaacgccattcagaaaaagaagcaagttccagaaatggactttgtcgatagctatagtaagttttgtttcatttaacatatggtgggtcttttggccacatcacaccttccccaagcctgtggctaagatattaaggaaggggttacatgcagaaattgaaaaagaaggtgctgattacagaaaaagccttcattactaccttgaagctttagaagaatgcaaggttgagaacgtgcatcctctatcggacgagtacactggtatcgaaattaagatcggagaaatgtatgagaagttggattcacttaacgatgcggtcactttgtatgaaggcatgttaaaaaggttctacaatgaactcagcaagcccaccaatatcttaccgatgagaaaagccttgttattcaaaagggacctccaaattttgataagatacattgaagtaaacaagagctctgaaatgaacataagtttactgataatgcaccttctattggcacaaaaatattttatggatggctcaccagaacttaaagaaatctgtcagaaatccgaaattcaagaccatcagcagcttgactggagaaatttcaaaggactgccattaattggcaaatccaaagctcagtatcaaacatatttgagctcaaaaagcaaacaagttctaaacataaaggagcccgaaaacagtcaaaatgtctttgtaaaggagctgttaactgcaagggagctatacactcagtattgcctcacgaaaaacaatcttacaggggccttgaatagcaaaataacaacattcgaatggatgctactgacagataggcctcttgatgaagtcttgctcgcgcaggcagaactaggttcaatattttatctgaactcagagaagttcgaaggaagtatatatagtattagtaatgaactacacagaggacctgaagataaagaacacaccaaatctaagttgcaaagtaatcaagaagcttgcttacaatattcggctgattgctataaaagcattattggttttgctcatgaaaaccaatatccacagaacgcaacggatagcgaaacagaccaaaaaatactcaaggcactatctctttcccattacgggctaggtgtgataaatttgcataagggacggctgaaggcctctaagaagcaactaaaaagggctattcgcatttcagaaatgatacatttcaacgaacttattaaagaagctaattgtgaaatcaaaaagggtagcgatatagttgtgtaa

SEQ ID NO: 4575 - DNA, 1653 bp, Saccharomyces pastorianus
atgcgggataaatattggttcaatatggcagctagaattcaacgggcatggagaagattcttgcagagacgtattgacgctgcgattaagattcagcgtactattagggagaaaaaaggtggtaacaagtatgaaaagcttcgtgacagtggtaccaaactcttaggtggtaaaaaggagagaagatctatgtcactgcttggatatagagctttcatgggtgattatctgtcttgtaatgagtccaaaacaaaaggttcatatatcagaagacaagcggggatcaaggagaaagctgttttttcgatgcaaggggaatgcttacattcaaaatttggcaggtcagctcaaaggttaagagcagtatttatcttaacaaagaaggcactttatattgttggacaaacacgagtacaaaatgccatgaaatatacacaggattatggaatcgatatcaataaaatcagacaagtgaatttaacgaatcttcaagacgattggattggtatcattctcgctaacagtacacaacctgatccatttattaatacacctttcaagacggaattggtcacgcgtatgaagaaattgaatgaaaagataataattaatgtaagtcctacgattgattaccacaaacaacctggtaaatctcatactgttcgttcgaaaatcagcgactcagcaccaaaatatagtgatatttataagtctagtacgatctttgtgcgtcgcgggcaccctcctaattccaagtcgaacaagaaacctgagaatccaggtgggcttgagggaaggccgatcaaaagcaaaaaaagtaaccatacacacacacataaacacaagcatagtcatagacctcagggaaaggctcaaaaaaaacaaccgttgcctgcgcaaaagttaaaaagcaatccgttgtccctggcggctacagctgcacaagcagcatacaaccctaaaccagcttctagtagcaaaaccgtgacccccaaatctgctgcaaaaccaagcttaacgaatacctcaaagccctcttctaaggaaagaacccaagcaaaaaatgtctcttcgattcataaatcattatcaagtaaaggaacgaaaacaccagtgccacctccaaaaaaggtagatggaagtcaaaaaccgttaaaggaaaaaacttcaaatattccagttccacctccccctcctcctatgggtgaacctgaagatccaaaatttgaagccgcatacgatttcccaggttctggatctgcttcagagttgccattgaaaaagggagacattatatacaaaagtagagacgaacccagcggttggagtttagccaaacttcttgatggaagcaaagaaggttgggttccgactgcatatattacggcatgtaaagggagtacaaaaatagcacccaccccggtagcaacaaatagccctgcaaaccaggaatcgagcctctttagcagtagcatcccaacagcgcaagaaaatgtgacaatagaaactgttcagtccactggtaatgcagaaaatagtcccatgggagagtttagtgatggtttggcttccgcattggcagcaagagcgaacaaaatgcggacggaaagtgctgacgatgacagtgaaggagatgaagaggatgattggtaa

SEQ ID NO: 4576 - DNA, 1797 bp, Saccharomyces pastorianus
atggctgtcataaaaagaggagcacgtaagaaggacgtcaaggagcctaagaaaagatctgcaaaaatcaaaaaagctacgtttgatgcccataaaaagaaagaggtaggcgtttctgatttgacacttttgtcaaaaatatctgatgagtctatcaatgaaaatttgaagaaacggtttaaaaatggaattatttatacctacattggccatgtgttgattagtgtaaatccattccgcgatttgggtatatatacagattctgttttagagtcctataagggcaaaaatagactagaagttccacctcatgtctttgcaattgcagagtctatgtactataatcttaaatcatacaacgaaaatcaatgtgtcattatttctggtgaatcaggcgctggtaagactgaagcagccaagcgtattatgcagtatatcgcagctgcatctagtagccattcagaatcaattgggaagattaaagacatggttctagccacgaatcctctccttgagtcgtttggctgtgctaaaacgttgcggaacaataactcgtcgagacatgggaagtatctggagattaaattcaactctcaatttgaaccttgtgcaggtaatatcacgaactatctattagaaaaacaaagagttgtaagtcaaattaaacacgaaaggaactttcatattttttaccaattcactaaaggtgcgtctgatgcatatagacaaacatttggcgtacagatgcccgaacaatacatatatacagctgcggccggctgtacttctgcagacacaattgatgatgtgaaggattaccaagggaccttagaggctatgagaactattggtttggtccaagaagaacaggatcaaatattcagaatgctggcagcaattctatggattggtaacatttcttttattgaaaatgaggagggaaatgctcaagtaagagacacatcggtgacggatttcgttgcatatttgctacaagttgatgcctcattattgataaaatgcttagtcgaaagaattatgcagactagtcatggaatgaaaaggggctcggtttaccatgtgcctctaaatgcagttcaagcgacagctgcgagggatgctcttgcaaaagcaatctataataatttatttgactggatcgttgacagggttaatctatctttgcaagccttccctggtgccgataagtcaattggaattctggatatttatggtttcgaaatttttgagcataactcctttgagcaaatatgcatcaattacgttaatgaaaaactacaacagatttttattcaattaactttaaaagctgagcaagatacttatgaaagagaaaaaatcaaatggacacctatcaagtatttcgataataaggttgtctgtgatttgatcgaagcgaaaaggccgccgggaatctttgctgcgatgaatgattccattgcaaccgcccacgcggattctaatgccgctgatcaagcatttgctcaaagactaaacctatttaattcaaatccttattttgaattgagagcgaaaaaattcgtcgttaagcattatgcaggtgatgtcacatatgatattgatggtatcactgacaaaaacaaggaccaactccaaaaggacctgatcgagctagttggcacaactacaaataggtttctttctacgatgtttccagacgatgttgataaggattcaaaacgacgtcccccaactgcaggtgataaaatcatcaaaagcgcaaatgaactggtagaaactttgtcaaaggccgaa

SEQ ID NO: 4577 - DNA, 351 bp, Saccharomyces pastorianus
atgaacgattttgtcaaaagccctaatgttgttgactcaccattcccaggtgacaagtccctgactgtcactgaatgtggcgatttttcgtatacggacttggatggttccatctccaagaaccaaggcctattcgtaaagttatcaaacggggctaagtttgttttgagattatcgggcacaggctcttccggtgcaacaataagattgtacgtagaaaaatacactgataacaaggagaagtacgatgaaaccgccgatgtctttttgaagccagtcatcagttctatcgtgaaattcttaaaattcaatgagattttaggaacagaagaaccaaccgtccgtacatag

SEQ ID NO: 4578 - DNA, 93 bp, Saccharomyces pastorianus
atgaatcgtttcgcaataaagaaagggttgaactgctacgaagtcccaaccggctggaagttcttctgtgctttgttcgatgctaagaagtaa

SEQ ID NO: 4579 - DNA, 1083 bp, Saccharomyces pastorianus
atgtctttttcaatagagctcatatctactacgccttacaaggaccagaaaccgggcacgtccggtttacgtaagaagacgaaagttttcatgaatgaacctcattataccgagaattttattcaagcaatgatggaatctattcctgaaggtccaagcggcgctactctggtggtaggtggtgatgggcgtttctataatgatgttattatgaacaagatcgcagcagttggggctgctaacggtattaaaaagttagtcattggtcaaggcggtctactctcaacgccggctgcttcgcatattatcagatcatatgaagacaaatgtaatggtggtggtattattttaaccgcttcgcataatccaggtggtccagaaaatgatttaggtatcaagtacaatttacctaatggtggtccagctccagagagtgttacagacgccatctgggaagcttctaagaaactaactcattataaaattataaagagttttcctgagttggatctgaataagatcggtaaaaaccaaaagtatgggccattgttagtggatataattgacccaaccaaggcatatgttaaatttttgaaagagatcttcgattttgatttaatcaaaaacttcttgacaaaacagcgtaaggctaagggatggaaattgctttttgattctttgaacggtatcacaggaccatatggtaaggccatatttgtggatgaatttggtttaccagccgaagaagtgctccaaaactggcaccctctacctgacttcggcggtttacaccccgacccaaatctaacttatgctcgcactcttgttgacagagttgaccgtgagaaaatcgcctttggtgccgcttccgacggtgacggtgacaggaatatgatctacggatatgggcctgcttttgtctcaccaggtgactctgttgctattattgccgaatatgcctcagaaattccatattttgccaaacaaggtatttacgggttagctcgttcattcccaacatcctctgccattgatcgtgtcgcaataaagaaagggttgaactgttccaagtccaaccgctga

SEQ ID NO: 4580 - DNA, 1689 bp, Saccharomyces pastorianus
atgatgaccattaaagtctataatggtgatgattttatcttacctttccctataacttcaaatgagcaaatattgaacaagctactggcctctggtgttcctccaccacataaggaaatttctaaagaagtagatgcgttggtcgcgcagctgtctcgtgttcaactgaaaaaccaaggtccagcagatgaggatttgatttcgagtgagtcagcggcaaagtttattccgtcgactatcatgttaccaggctcttcgactctaaacccattactttactttactattgaatttgataatacagttgccactatcgaagcagaatatggtaccattgctaagcctggtttcaacaagatatctacatttgatgtgacaagaaagttaccatacttaaagattgatgtatttgcaaggattccctcaattcttttgccatcgaagtcgtggcaacaggaaatgggtttacaagacgagaaactacaagttatactgaacaaaataaattccaaccaagatatacatttggattctttccatttgcccataaacttaggtttcgattctgcagccagtattagactatataaccaccactggattacattagaaaatggattaggcaagataaacatcagtattgattacaagccctcgagaaacaagcccttgtcaatcgacgatttcgatcttttgaaggtcatcggtaagggttcattcggtaaagtcatgcaagtgagaaagaaagacacgcaaaaggtttacgctctgaaagcaatcagaaaatcatacatcgtgtctaaatctgaagttacgcacactttggcggaaagaacagtattagcacgtgtagattgtccatttattgtgcctttgaaattttctttccaatcgcctgaaaaactgtatttcgttttagcctttatcaatggtggtgaattgttttaccacttacaaaaggaaggtaggtttgatttatcccgtgctagattttacaccgcagaactgttatgtgcattagataacttgcacaaattagacgttatttatcgtgatttgaagccagaaaatatattgttagattatcaagggcatattgcactttgtgactttgggctgtgcaaattgaacatgaaggacgatgacaaaacggacactttctgtgggactccagaatatttggcgccggagctactattaggtttaggctattcaaaggcggtagattggtggacgctaggtgtcttgttatatgagatgctgaccggtcttccaccttattatgacgaggatgttccaaaaatgtataaaaaaatcttacaggagcccctggttttcccagatggatttgatagagaggcaaaggatctattgattagtttattaagccgtgatccgacgaggagattgggatataatggtgccgacgaaatcagaaaccatccctttttcagccaattgtcttggaaacgtttattgatgaagggttacattccgccatacaagccagctgttagtaatgccatggatactagtaattttgatgaagaatttaccagagaaaagccaatcgatagtgtagttgatgaatatttaagtgagagtgttcaaaagcaattcggcggctggacatacgtcggaaatgaacagctcggcagctcaatggtgcaaggtagaagcattcactag

SEQ ID NO: 4581 - DNA, 771 bp, Saccharomyces pastorianus
atggacgtaacacaaaatatcggtattgatcttttcattggaattggggcatttaatgccgcatatacaagaacatacacaagggacgggctattggaagacccagataatgtcagcctccgtgaagctctgtcagaaggtaaagatattgaagttaccaaggatcttcaaagagttcatgatccacatgacgagagtgacgaaatgacatctgatgaagttgaattacacgttaacttaggtcaaattggatttgtttttatagaagcgaatgtgaaaaaatatgcatttggaagcgtttatggacaaatcggaattcctccagcttataacggaactgagatcaacaaggatacgatcttacaaaagggggaagagttaccacccagatatgctgacgctgacaattttttcggtaaaccgcaagtgagagaaggctcgtctgctggaataatagctcagacaagtagatccaagcactcgattgggacgtatgaaaggatatcctctaatttcgacagagaaaacaatgtttacgatgatagtcttgacatcaactacaacaacggtagcaataatgacgaaaatgcagattacaatgaaacttctccgttattagaaaatgccagtactaaaagctcagtaatcataaataccccttctgaaatatccggtggagctaccaataagaaatctataaacaaatctagcaagagacgcgaaaagaacaaaggtaaaggctccaaaaagaaaaagaggtcgagaagatag

SEQ ID NO: 4582 - DNA, 834 bp, Saccharomyces pastorianus
atgtatgtcacttttacgcaagatttggataaggcgttcagtaatctagaaagtacaaccaatgactttaaagtaagtgaccctaacatggtgccaacacctcctatggattcggattccgcggctataagtttggcattcctaataagtctctcgatcacatttgcaatattgatgcttatcttgatagtaatcgctgcatatgttaccttttgtggtgacgatgagtcagaatatgatgaagagaatgctttgggtacacgaacttcaggaactttacattctttgtttggaaagaaacatagcggcatcttgctggattccagctttgcatctccgggtgggtttgatgacgagatcgctctgcaagaaagagaactcgaagagttgccaaagatgtcagcatatgaggttgaactatatataagaacgaaagaatttcagatgatgagcccgccaatggtaaaggaatttggaacgtacttggataaggacgatcagcaattcattaaggatcgtggtattcaaagttacttcttgttgcccagtataaatgataatatagacgaatatggaaactttctgcctagttttattgtccaagacaaactagatatacaattttcaaaattcaataaaagctcatccacagtaatgaattatcccttgccccacaacaagaaggacgcggtatatttcgaagtgaaggttttcagacatatcccaaaatccaatagcattttcagtataggtttgactaccgttccatatccttattttagggtacccggtatggctaagtattccatcgcttatgaatccacagtaaattaa

SEQ ID NO: 4583 - DNA, 330 bp, Saccharomyces pastorianus
atgattgcccattccaagcatcttgagggtattccaattgtcttggagactccgtacgagaatgatgaaggctatgggaatgaaattaaactgttagagtggttggaatccaagagtgacagtgaattgctagaagacaaagagtacttaaataaaaatgagacattacagaagttgggtgctaagtcgcgtaaggaacaattagataggtttgaagtaaaacagaaaaagcaagcgggaggtcccaaaagaaaaagagctactgctgaatcaaataataatgacatcttatctcaaatggtaaaaaaaagaaaagttaagaaagaatga

SEQ ID NO: 4584 - DNA, 687 bp, Saccharomyces pastorianus
atgtcctcaaaaactagttttgttagatctgctgtttcaaaatataaatttggtgcccatatgtcgggggccggtggaatttcaaatagtgtaacaaatgcatttaacactggttgtaattcctttgccatgtttttaaaatctccaagaaaatgggtgtctccacagtatacacaagaggaaataaacaaattcaagaaaaattgtgaaacttataactacaatccactaactgatatcttaccgcacggccaatatttcattaatttagctaatccagataaggaaaaggctgaaaagagttatgaatcattcatggatgatttaaagagatgtgagcaattgggcgttggtctctataacctacatccaggctctaccttaaaaggcgaccatcaattgcaattgaagcaattggcctcatacttgaacaaagctatcaaagaaacagaatttgtcaagattgtattagaaaatatggcgggtactgggaatctggtaggaagctccttggtagacttaaagcaagttatcggaatgattgaagacaaatcaagaataggtgtttgtatagatacctgtcatacctttgccgcaggctacgatataagtaccactgaggcataccacaattttcggaaagaatacgacgatataataggattcacaccatctacagcgctattc

SEQ ID NO: 4585 - DNA, 924 bp, Saccharomyces pastorianus
atgggcgaatataacgatctacaaccttcttcgtcttccaataataacgataacaacgatgacgaactgtccagcgcaaacatgaggaataattccattgactatactaaacatcaggaaatttcaagtgcggcggcctcgccaaatacaattaagaatgagaataacataagcgacaccaaaaatgagaatagtaacaacagtaacaataacgacaattcgaacctattggaaggcgtcttggataaatcatctagtcatcgttatcagcccaaaaagttgcccaatgttaataaatggaacaaaccagatcaaatcactcattccgatgtatcccttgttggactggatgaaccaaacgatggcagtaattcaaatgttcacccaaccttggccgaagtggacgcgcaagaggctcgcgaaaccgctcaattggccatagataagatcaattcttataaaagatctatcgacgataaaaatagtggtggccacaacaactcatcaagaaacgttgtggatgacaacctgatcaacgatatggattcagaagacaaccacaagtctaagagacaacatttgtccgatatcacactggaagaaagaaacgaagatgataaattgccacatgaagtggcggaacaattaagattactgtcgtcacacctaaaagaggtggagaacttgcatcagaataacgatgatgacgtggacgatgttatggtggatgtagatgtcgaatcgcaatacaacaagaaccctactcaccatcaccataaccatcacagccaacctcatcacgacgaagaagacgttgccggattaatgggcaaaccggatgatgatgatgatgatgacgatgatgatgatgacgacgatgacctttctgacgaaaatatccagcctgaattaagaggccaataa

SEQ ID NO: 4586 - DNA, 1347 bp, Saccharomyces pastorianus
  modified_base (845)..(905): a, c, g, t, unknown, or other
atggacaagctggtcgtgaactactatgaatacaagcaccccataatcaataaagacctggccattggggcccatggcggcaagaaattcccgacgttgggtgcttggtacgacgttatcaacgagtacgaatttcaaacgcgttgtcctatcatcctgaagaattcccacagaaataaacattttacatttgcctgtcatttgaaaaactgtccgtttaaagttttactaagttatgctggcaattctacgtcctcggacacttcttccccttccggcaatgacaatgtagacccctccggagcttctgatcatgttcatcaccatagcgacaacattaacgatgacgacaacaataacaataatgtcaataacaacactaaggtcagaaatgacaacaaactcgaattcgttacagacgatcttgagtaccatctggcaaacccgcatccagacgatgccggtgacaaaatcgagtcgagaaacaatgggggcgatgggaacaacgacgatgatggtgatgctaacaacattttcaagcagcagggcgttaatatcaagaatgacaccgacgaagattcggtaaacaagtcgtctatcgatcaaaatttggaaaactctaatgattctactactgctaacgacaacaacaacaacagcaacaataacaacgctaacgatgaggatgacgttcacactcaaatgactaagagctactctgatgtggtgaacgatgaagacattaacgttgccattgcgaacgctgttgccaatgtggattctcaatcaaataacaagcaagccgacaaagacgacgacgcctccaataacaatgatgacaatannnnnnnnnnnnnnnnnnnnnnnnnnnnnnnnnnnnnnnnnnnnnnnnnnnnnnnnnnnnntaataacagtgttactaaccacgacatttcctctcactcaccttcttcgatacgagaatcatctatgaatctcgatgtcttcaattctgctaccgacgacattccaggtccatttgtcgttaccaagatcgagccctatcatagccacccgctagaagataacctatcgctggggaagttcatcttaacgaagattcctaagatattacaaaacgatttgaaatttgatcaaatactagaaagctcttacaataattccaaccacactgtaagtaaattcaaagtttcccattatgtggaagaatctggcctgctggacatcctaatgcaaagatatgggttgacggctgaagatttgagaaagattattgtctcaatcgcgagacgtataccacatacaagcaagatttgttctgaaaaagaaaaaaatgggcgaatataa

SEQ ID NO: 4587 - DNA, 231 bp, Saccharomyces pastorianus
atgagactgaaaaaaaggaaggtggcagaatttttgggctccacctcagaactacctgacactgaatccgaagatgacgatgaagcagccaatagcagcgtgaagcctcaacaaaaacctgctgctaaacgcaagggcagaaagaagtacaacctagtgagtaataacttcagaaggctcaaactaccaaagaaaaaccgtttcccaaacaggcgttggggaagaaggtga

SEQ ID NO: 4588 - DNA, 246 bp, Saccharomyces pastorianus
atgtattcgttggaactggataaactgaaagtcgagctaaaaacatgggaacacaaatttattgatacgcataacagagaaccaacgagagatgacatcaagggtctacgcgatgttaaacatatgtataagcaatattccatactaaagaagaaaaacggattgcaacaacagcgggacctcttgctcaagaatctgctaaaatggtggttcatattaaagatcgacggccgatttggccagctt

SEQ ID NO: 4589 - DNA, 768 bp, Saccharomyces pastorianus
atggagatagggcctacaccccaagtttatggcaaggcaatcagtatctttgaaatgaacctgtcacctatcaagcctgtttacatgaccactgcaaataattttggtgccgatgacgactctaaaacaatatccaatgaatcttccccacaaaggaccatttcacaggaatcttcgccggcaaatcgaactctagtatcagagtcaatatcgaatgtcaagcgccagttgaacttccaaatgttgaaagcaccatcttcgcatactccaatttcatccccatgtaagaaagcagagccatcattggaagctgaaaagcccgactttgtattcacgatggctaaacccgtgttaaaaccaagcaacccatcgagatattatggccctaactcgccactaaaattagaagaagaaaacattcatctaaatatttcattagaatcgaacactagacgccggcttcaaatggcattcccatctttacaaaaaactccctccaaggacaatcatgcaggcgtttcaacttcattcagtccatctcctttgattaggagacccctaacgaaatctttgatagaattagccaaggagcatcatgaaatcgttaaagaattcagcatccttcaagaagaggatgaagaggatgaagatggtggtaatgataatgacggcgatgaagaaggcgatgagaacgacgacagccttgaaagcgggttagttagaccaacggtggtgaaggatatattccagaggatgacacgaagataa

SEQ ID NO: 4590 - DNA, 3327 bp, Saccharomyces pastorianus
atgagcagacgcatgggcgataggaggacggcccaagaaaacagtccagacgccctagcagcggctgccgcaattggtaacgcgctcagcaataacggaagaactgttgataaaagcaaaatacctcaatataaccaaaacttcatttctcgaacaacgtcaattgcaggaattaaaagatatacattgacttcggatcataagaccagttcaaaagcaccttcaatgtgtgcgaacacaaatcaattctctaggcgtacctcgagtttgcccaataggaaacattgtaccaccgccaacaattcgaacatgagaaaacaacacaggattcatgaggatgcagaaaccgccttccgggagttcggaggtcatgaatcgacaaggattttgaacgttccaattacgaacgatagaaacagtaatcctaggaccgcatcgcttaggaactcaagtagcataatagggacaaccaagaagtatataccaggtcccaggggactagttgccgtggaagttcccgtgcgagaagaatccccaagatttagcttgaactcacattcacgtaatccagctagtagaacatattcattacctactggaaaccccaacatgaatctaatgcacaggaagaaaaccactaaaacagtggggccacaagagagaaaacctgaacgagaactcaaatcaaaatctcatcgttcaatcaaagcgccacctaaaatgcatgccaagtcatcaaagcaaaaccataacgatagtattccactaattcaaataaccatgaatgaagaaacggaacaggaactgaaagaggatcgcgatgacccatttgagttcaagcccatgattatatctgacgacgactttttcattgagtcaaatgcacttggtcaccatgaggctgataaaagttctagcactctaagtggacgtgggaagaaagaacagatcgaaaaactacttgaagatgttcatgctctagaagcaaaaatatcaaatatcaaaatggcgaaatcaaacgaagaagaacgagaacaaaagctaatcctagaattacaaacagttaaagtaaatgaagaacggagggtagagatattggaaagggaactgagtatagccaaggaaaatgccgaccttgaagcagaagaactgaagctaatagagctgaaaagacaagagcagcttcgtaaggaaaaggaaaccaaaaccaaaactgaactggtcgatgttcaactgctaactgtaactgaatctgggtccgaaaaatcaccttcaaaagatgcacaaaatgagccaccgaatactcaaaataaagatgaaggtattgacgagagtaatcattcactacttgaaactgtcgacaaaaccctggcaaaccctattctccctggatcgtttgacaaatctgccttacatgttaattcaaccagtgaatctgaagttgatttagattctgatagtcccgctggaagccaattatctgattataactacatagagggatctacaattgacctgcgtgccaccgcaaagacaagtgtggagtccgagatcgacacaaatcaaaccgaactgaaatttccacaaggcgaggattttgacaatacaaagaaccacatttcaggcccaggcaacgattttttttcagatgaaaacaaaaaagattttggtcaagaagacttacatttgaatgatgctgacccagagagctttgaagcatcttctgacacttctaagatccgtagcatcatagcggagaatgagagtgatgttattgaaaacgagcacggaaatgacgacgatgatgatgacgatgacgacgacgaagaatttcatgattcttatgacgtaatagttcacgaacccattcaggtaaagcaaacaataactaatgttcctcacttaaagtattcgttgcagcacctgaatgaagtggaaatcgacaagaacattggacaaagttatgatgctgtagaggtcaaccaatccgaagcgaacatggccaaatacttacgtaatgataatagttatccccccagcatgagttcaggaactcttgagttggattcacaaaacgggaactcaaggtcctctactgaaaccacaaggatttttcctagtatctggaaggacttaccacagccagcattcaaatccgctctgaagaaaacactagctactccattgagtacatcttcctccgtatactcaacaggcacacctccaaatagtaacgttcatatagcacacacgacaacctccaatatcaaaatcaacggccagaatccgccaactcatgacttggaacagaaacatagcccacccaatcagcctgttttaagggaaattcctgcgatgtcaccaagacgtttggaagataaaaggaaaagccctaaccatttgggctttaggactttacgtggtggttccagcggggctcctctttcccaaaagatacccgagtcatattctaatccacctttatccccatcttaccgcaccacaaagtcgtgggtaactacttcaacttctgcagctcctgtttcaaaagaagcttctaaaactcattcgaccgtttctccaacaatcaaaaattcaaataaaatagccaaccagcctccctcgaacatcgatgaacataacagtattctttaccccaaagaacctctaaccaagaagtctagtttcgaaaaagaaagacctatgaaggataatctgggattcaaaagtatgtctttaagagggccacttgtgacgaagaattctccggttatgagagcaggaagttttgaggcggaggacaggcatgaacagaggaaccatgtctctaggaaatcatggaattttagcttgtcttctccactaaaaacaaagatgaaccattctgctcatccctcgaacgaaatagagaaaatagatcacccaatgagcgacttcaagaataagtttaatgtaaatggagaaaaatcatcagtgaacaagagagacagtgaccgccaaaattcatctttatacataggatcttcgacgaccaattacgagaatgcaagcgaagtgggaactgagggccaccggttttcattatttagaaacagaagccaaacatcgaataggaatatgccagctggaacaaccagtctgaatccagcgtactctgaggtatctacagctctacccttaagcgttccggtaaccgttatcgaaaagaatggagagatacacaagctatataatgacgatgctgctaagaaagataagtctcataatcatcacagtagtcataataagtttagtaagaagcttaggaaaattttcggtagaaagtaa

SEQ ID NO: 4591 - DNA, 1623 bp, Saccharomyces pastorianus
atgcactcttggccctttaatagagaggttacggtggtagttcccaataaagaaaaaaaactacaaaaacaaagcaaggaaaagatggcggaacaacgagaaatactagaacaattgaagaaaacccttcaacagcttagcgttgagccatccaagaatggccaaatcgcggacgagacgaaagaaaggagacacgaggagtttacagctcgtgacctagagcacagttacgaggtggcttctcaggagttcatcgacttcatgtacgagaaccccaccacctaccatgttatatcgtttttctctaaaatgttagataagaatggcttcaagtacttgagcgagaaatctaattggaacgacagcatcggcgaaaacggtggtaagttctacaccctgagaaacggtactaacctttctgctttcgtcctagggaagaactggaaggcagagaagggtattggtgccatcggatctcatgtggacgctttgaccgtcaaattgaaacctgcttccttcgaagacttatcgcaaggttacggtagaattgctgtcgctccctatggtggcactttgaacgagctgtggctagacagagacctgggtattggtggccgtcttctttacaagaaaaagggcaccaacgaaatcaagagtacattgatcgactccacgccctatcctatctgtagaattccctctttggcccctcacttcggtaaaccggcagaaggcccattcgacaaagaagaccaaaccgtcccggtcatcggattccccactccaagcgaagacgagacacccactgacgacgaaaagaattcgcctttggccggcaagcacaacacgcatcttttgagatacgtcgccaatttggccggtttggaggtgtccgagttgattcaaatggacttggacttattcgacgttcaaaagggtaccattggtggtatccgtaagcacttcatctttgctccacgtctggatgacagactatgtagttttgcagcaatgattgccttggtctcttacgccaagaacgttaacaccgatgactcggacgctttctccaccgtcactttgtatgataacgaagaaatcggctcattgacaagacaaggtgcgaagggtcgtttgttggagtcagtggtggaacgtgctacttccgccttcagcaagaagccagttgacttacacactgtgtgggcaaattccatcattctgtctgcagacgtcaaccatttgctaaacccaaacttcccagaagtctacatgaagaaccattccccagtgcccaacgtcggtatcactctgtccttagatccaaacggacacatggccacggacgttgtgggcactgccctggtggaagaactcgcacgcctcaacggggacaaagtacagtacttccaaatcaaaaacaactcaagatcaggcggtaccatcggcccatccttggcctcccaaaccggtgcccgtaccatagatctgggcattgcgcaaatgtccatgcacagtatcagagctgctacagggtccatggacgtcaaattgggtaccaagttcttcaacgggtttttcagaaactggagatccgtctacgatgaattcggagaattgtga

SEQ ID NO: 4592 - DNA, 489 bp, Saccharomyces pastorianus
atggccggatccaagcttgtcgatcacgatgacactgagtttcacttcttgaattggtcatatattggcaagtactttatcacagctataattagttacgttgctgctttaatatccaccatggtatcgttatctttattcaatacctcacaaccagctttgttatacatcgttccttccttgttgattagtactataatggtggcatgctggaacaaagacttcaagcaattctggaatttccaatatgacacgattgaaatggatgagaattcgaaaaaaactgtggagaaaaaggaagactccatgacttattcgacctttatcttgtcggagtactacgatgacgctgacaaatatgctctgtttgttgatgatttaaacgagaataatgatgaagatgaagaatttgtacaagacgaagatttaaacgatagttctgaagaagagctctctgaatatgatttatcggatgacgaattctcttaa

SEQ ID NO: 4593 - DNA, 1005 bp, Saccharomyces pastorianus
atgaacaagtatttaaactccgttgtagaccacttctcggagtggtcgtctcgtatctttagggccaattcgtcaagcacgagccaaggtgcgtcgaacaaagaactagaagaagtttttgaaaaaattaatgctatagtcgaaaaccataacaacggcttggccactacctttgacaagatatcgtatcgtgtggcccacaagatcacacacctagtcgaaagccattctttagcgttcaactatgctaccctagttctcattgccagtgctttggtcgttattggctcattcacgtccatatcttctattccgtttaccgctttgcctcctaccagggaacacccgttgtttgaccccactgatttcgatgtagatcatgattgccatgtaatttaccatgagaatgacgaagacaaaaagaagaagaaaaagagcaaaaagttctttgatatgatggatgagaaacatgcgattatacttcctttaactagtggttgcactttattagctttgtattttgttattaagaagctacatttgaattggttgagatacgtggttaagattttgaattttaacataacactattgaatataccagcaggtacatttgtctactcatatttccttaattctttttccaggaatatatcgcatatgacttcttggaacccattgactgttttgccaaggtaccgtgtaaccattgctgacgataacgacgatctaaacaaaataggtgggttcgttacaaatttgaactataaagatggattaactaactcggctgttcaccaaaagaccttgactgaaatcgaaaaggaccactggatgaaacatttctatagaagggaactgattaaacccaaagacgtcaagtcgaaaagacaaatcagtaacatatacctgaataacgcacttatcgtttcatttgtgctctccgtagtcgccactgtctacttttatttgtctcctaacaatggcctatatccatgcagtgag

SEQ ID NO: 4594 - DNA, 753 bp, Saccharomyces pastorianus
atggctaagctagtgcatgatgttcaaaaaaaacagcatagagagcgttctcaaataacgagtcgtaccagatatggtttcttagaaaagcataaagactatgtaaagcgtgcacaagatttccataggaagcagtccagtttgaagattctcagagaaaaagtgaaagaaagaaaccctgatgaatactaccatgctatgcattcgagaaagacagatgcaaaagggctcttaatcacctcacgtcacggtgacgatgaagacgagtctctttccatggaccaagtcaaattgctcaagacacaggatagtaactatgtgaggacgttgagacaactagaattgaagaaactggaaaaaagatcgaaggagctgatgttcaaaagcagtgggaatcatacaatatttgttgattcccgagaaaagatggaggattttgctccagaaacgtttttcaataccacttctgagatggtgaataggtctgagaatagattaaccaaggaccagttgacccaagatgttttgaacaataagagcgcctcatcaataatgcccaaggaatcactagacaagaagaagttgaaaaaattcaaacaagtaaaacaacatatacagagagaaacccagttgaaacaagtccaacagagaatggacgctcaaagagaactgttgaaaaagggttcaaagaagaaaatcgtggactcgtcagggaagtcttcttttaaatggaagaagcaacgtaagcgttag

SEQ ID NO: 4595 - DNA, 195 bp, Saccharomyces pastorianus
  modified_base (12)..(12): a, c, g, t, unknown, or other
  modified_base (43)..(43): a, c, g, t, unknown, or other
atgcactggagnctggtacggcgttcgtctatggatagctccntactatacggcagtgatcccaacctagtagacgaaatgttagagaagctaggcaaaataaagttcgaggaagttaatgagtttgaaaatccgcttttcttggaatctcttgtagtgaaaaacgtaataggcaaagtcgtgccgcctgtatag

SEQ ID NO: 4596 - DNA, 762 bp, Saccharomyces pastorianus
atgacataccatttaaaacatcattgcagttgtgtacagcggttacgatatggtagagagcggtgttgtcgggtgagggtggtgaaaacagtattagtaatgggcgatcatagtttgccggatttccgaacctgtttgaagttttctgttactgctcgaaagagctttctctgtatgtacagagatgacgttgcagacgaaaaattggcttctccaatgcccagcgcctgcgatatacagctgaagacgacgatcggcgaaatgtaccccgctgcggggatgagggtcacaatcatgaattcaacaaccgaaagcttggattcactagcaactacgcacattcaggattttgagattgttattattccagacgtcaattcactttcacgaccagaccaggccaagttagtgagagttatgagagagtctgaaatatctagcgaaagggcgcaatcaggacgaatatttatcggggtcattcactggagtaatcaaacaccgccttcaagcgcaaccaaagacggagatgatgcaagtaaaccaaccgccaagacacgagtctttctacccgcatgcatacatatagatggctggctcaagcacaagttttggtttgcatgtgcgccgccccacttaaatttcgatagtttttctgaatcaagcataagtacgagggccaccaacaacaccgaagccacgaaagaagaggaacaagaatccgcagatcagaggtctgttggggtggacgaggaggcaatttag

SEQ ID NO: 4597 - DNA, 162 bp, Saccharomyces pastorianus
atgctcctatttacgttcgccattcttgaaggccggaaacctatcatatggcccgatccggtcacggcactgggtgttgtgggctcaaaacgcgcgcagaccacgcctcgcggtcttggccgggccccacctggtgcctgcggagttgcccttcggagctaa

SEQ ID NO: 4598 - DNA, 843 bp, Saccharomyces pastorianus
atgtctgaaagaaaggctataaacaagtactatccaccggattacaacccgttggaggctgaaaagctgtccaggaagatgtccaaaaaactgaaaaccatgaataagagccaagcatcgattagattgatgacgccattcagtatgagatgtttagaatgtaacgaatacatccctaaaagtagaaagtttaacggtaagaaggaactcctgaaagagaagtatttggactctataaaaatctacaggttaaccatatcatgtcctcgctgcgccaactccattacattcagaacggatcccggtacctctgattatgtgatggagatcggaggtgtgagaaactatgtcccacagaagcccgatgataattctgaaccaaaaccggcggcggaaagtatagatgacacactccagcgattagtacgagagaaggaaacggagcagaatgagaaattgggcataaaggaccaagcagacgacaagatggatctgctggagaaacgactggctaagattcagcaagaacaagaagatgacgaagaattggaaaatctaaggaaaaggaatctagaaatgggacaaagagcagaattgataaactgcaacaaccattcccaacaggaaaagacagagacgtcgcatgagcttgacgatcttgtggagcgagtattcgataatcacaggcagcatgctgccaagacagacgatggccacgataaaaaaaaggccccactgttcaatcccctagccatcaaggggagagtgcaaaagaagaagaagctctcgcggactaatccattggggatagtcgtgaagcgtgggaacccgtctcccaagtga

SEQ ID NO: 4599 - DNA, 213 bp, Saccharomyces pastorianus
tcctccaaggagctgccgcccgtggacgtgctgggcgtgcgtgcccacgaccagacgctatactacgcctttggcggctgccaccgtctgcaggcctacgaccgccgggcccgcgagacgcagaacgccgccttccccgtgcgctgcagggtgctgccggccactccccgccagatccgcctctacctgggcagcagcctcgacatcgagtag

SEQ ID NO: 4600 - DNA, 147 bp, Saccharomyces pastorianus
atgtcactacagagcaacagtgtgaagcctacggaaattcccctgtcacagatcaggcgcccgctggcgcccgtgctggatccacagaagatcaacgccatggtggccactatgaagggcgtccctacggccagcaagacgtgctcc

SEQ ID NO: 4601 - DNA, 306 bp, Saccharomyces pastorianus
atgtctaacaacttggtcgctggtttcttcaacagattgtcagcttctaccaagtacatgttcggttgtctagtcgtctacggtgaaaacaacaacaatggtattgtcggtgccgtcctggtcagaggccaagattttgctccagctttcgatgttgccccagattgggaatcttacgaatactctaagttggacccaaccaacgaagaagacaaggaatttatcaacaacatgtgggcttgggataagccagttgttgtcaactgtgaatccaaggaaattgctgacggtaaggttttgaaatga

SEQ ID NO: 4602 - DNA, 288 bp, Saccharomyces pastorianus
atgatgccatacaacaagaaggacgttgacgctgctttcactaaggttgacaacattgctgctgttttcgatgctagactaagagactacacttttgttgcaactgaaaacatctctttggctgatcttcacgccgccagtgcttgggcttttggcttatcctctattttgggtccagaatggagagccaagcaccctcaactaatgagatggttcaacactatcgctgcttctccaatttttaagacccagacctgcaggcatgcaagcttggcactgccgtcttta

SEQ ID NO: 4603 - DNA, 237 bp, Saccharomyces pastorianus
atgtctcaaggtactctatacatatccaagtctccaagaaactttgcttccaaagctttgatttctcacttcaaactagatgttaaaatcgttgagaaagaccaagccagcgagtttgcatctttgttcccattgaagcaagttccagctttcttggggccaaaggggttcaagctaactgaagctatcgccatccaatattactgtatgttatttccttttttatctccacattaa

SEQ ID NO: 4604 - DNA, 1365 bp, Saccharomyces pastorianus
atgaggggtattaagctatctgattcattcaagactaaaccattaaacgtcattgatcgttctgtaaatacatactcttacaaactatcaagtgaatccgacttgcatgatgtttttattaagggaagtgtttatccgaacaatactttcgcattgacaaactcaagtgattccattcctgaaagctttaccattgacttattcgaaaatgagaagctatttgaaacgtacaaagtgaattctgcggtggtaaagaactcttatgcctccgagaagtgtcctgccggagtagcgtataacattactttcggtttgtccagtgacagattattttctgtccaagaagttagctgcatttgcctaaacgaaaatgacgtagatgaatcaaagcaaactagaaatagaaatactcggttaaacattgcctccaaggaaaccgaaattcagaggttgtctactcccgagcttctgaatttgcacaatcatgtcaaattactcgacaaacaggataataaaagatttcaattacaagaaaatttaaacatcctcgagagcgacttatacgatgctagaaacctgttaatggatgatgaaattgtacaaaatggaccgaaatctcaagtagagaaattgtcagaaatggtcagagtatatttagattggcttgaggatgcatcttttgacactgatcctcaagacataatcagcagaattagagagattggaatattaaaaaagaaaatagagttatacttggaatattcgaaggaacccctgaactccgaacagtttaaaggaatgcttgaagaaggaaatgaattattacaggctgtggaaaaacacaaaaacactgttgaagggtttttgagtgaatttgaaactgcgtacatagatacgatagaaaatgttcgggaagagttcaaaaagactaaatacccggcatatatttccaaagcactgtctacttgggaagaagccctaacctcttttaaaggttccattatcgagatcgaagcacttttggccaaaaacttattcggtgaagatctccgagagcgcctgtttgaaataaaattgagattcgacacgtatcgtgccagcttagaggaaaaactgcatcttattaaaagcggtgatgaaagtcgtttgaatgaaataaagaagttacatttgcgcaagttccgttctcaaaagagaaaggaggaaaaattgaaaagaaaacttgaacaagaaaaaagcgaaaggaataaccaaacagaaccggtaataaacaattcgactaataaggaggatactcctgttaacgataaaactactgaatcaaatccatcatttaagaatgacattctgcatgatgaattatag

SEQ ID NO: 4605 - DNA, 297 bp, Saccharomyces pastorianus
  modified_base (276)..(276): a, c, g, t, unknown, or other
atgcgaggcgttttaaaactgttgctttttgcaacttttatcatcacaggatctttggcagccgttttaggtattgactatggccagcaaaatatcaaagctattgtagtctcaccacaggctccagtagagcttgtgcttactccagaagccaaacgtaaggaaatatctggcctttcaataaaaagattacctggtttcaagaagaacgacccaaatgcagttgaaagagtttacggttccgctgtgggaagtttggcaacgaggtttccccanaacacgacctgcagcatgcag

SEQ ID NO: 4606 - DNA, 2340 bp, Saccharomyces pastorianus
atgctggaaactgatacatcggctctagaacaagaacgagtggaaattttacgcagaaaagaaggctatttatcgccattagctagcttcatttttccagacttcagagcactatttaatatagggtttaactcatatccgaacttgaattataaggaggtagatatcaatggatttgaaatttacattgttgaacaatgggcagcgcaaagaaaaatatcgactctgattacatcatatacgggcaatttacaggacaccatttctgcagttgaggttgttcttccacaagatcctgaagaatggcccagtggtctgaagaaatactatgatgaattgctgaaattttcccgtcccaaaaaaactacgaaagggacactgttcattacaaatctctcttctttcaagtttacactcagtttattgcacgtagaatgtggtaatctcaaaaaaatctggaaaaattttaagacgaattacgatttgaaaacgttgcattgtggtgggcgttcggctcagttgttgaaaaggacgcctagcgcttcaatagcaaagtttgctcaactgtataaatttccgaattcagcatttgctcatgaaattacttccgatttccaacaggctcttcttcagaacgataatcgtgactatgacgacctagatgacatagaaaatatcactgttaactactgcccagtcgtggaactgactactttggtacaaatatctcttagctattttgcattgttcgaatataggaaggagagggatggcttattatgtaatggaacgaagcagtccctcgaaaaatggtggcaaatatatgggaagcgatatttaggcatagacaaaccaaagaatgaaacaattcttggtccaactacagtagcctcgttgctcagcctcgtattgacttgctactttaaattaatggtggaagattgcatgtcggcgaaagacccatttgatgaagatgagttttattctggcctttatgcctttcaaaagaaatatggactttctaaaaatcatagacaaacgtttttagatgagcaaacaattgataaattgttcgaagtctcctctaagacctccaataaagatatttttaaattcaaaaaagttgtgaaatcaacagtgcaagatatgactgggaaaggtaatttcatgcatttatctaatgagattttaacaactgacttagatactttagtaaagaatatacacggtggatctcttgggatgctttggaaaggaaaaagtgcatctagaaaggaaacatgtatggcttgggaaagaaagacttttttgagcttcaagttcaaacgtggcgatccagcattacaactagacaataatgagttattttatggaaaattaacacatgaaccttttacagcagctgataaaaagggagataatacaaaacaaaccaaaagaaatagtacacatgatgtaaccaatgcttcgacatcatcgctctctatttcatcgatgttatgtaactatgatgagaatcgttatgcaagcactcataacattaatagagcttatagaagagaatacttcaggcgtaattcgattccgtttcttagtgatggtatgcatgatacaaaaaaatgttcccttgatttcaatgaagtagaaggactgtatcgttgtaactcatattctgaagtacaaaatgcaatagaaacttggaaactgccctttgattcttcggtggtcaaattagcacgagatttattaaagatacaaagtttgttatccgttcagcgtcagctcgatgaaatacgtgatggatacttggggaaggactcagaaagatcctatcaagataatttaaggttcaaagaaagcctgaataagttacaagatatgtgcgagaagtgtaagaaaggttcaaacgagttcaattgggaatatactaacacgcaaaacaaacagcaactcttagagaacgagaaaaaaaatatgaaatctctctcttcgaaactaaaatataatgttcgtattttggataggcgtgtgagagatgttgaaaccagtgttgatcattttgacggaaagttggaaggtgttaggaaaaaacttttggaacaaaataaaagtaaacagatttcgattgccttagaaagtccttatgataagcttgaattcgatagcttcatggactctatggtacagtctgaacaaacaaagtatgaagggctctgtttcaaaatcctggataaaaaaagtcttggaaagctaaaaaaggaactttggaaatggagtacttggacgtttgataccttcctatttaaaaataaatccaacagagaaaaggacatgttatag

SEQ ID NO: 4607 - DNA, 240 bp, Saccharomyces pastorianus
atggtgaacccaaataattctgttagctacttttatgaaacctctatcccaaagagatccagcgggttacttacacaaacaactaagccaacaagttttcaagaagctttcaatcaaaaagaagaggaaattgaagatgaggatctgatggtggacctaaacacaggatcattgactccagttaatctaaagcattggactcaaatgagcagcatgaccgagaaattcgggaagctatga

SEQ ID NO: 4608 - DNA, 801 bp, Saccharomyces pastorianus
atgaaggcccgccgccgcccgggctacatgtgttatggttgtggtggtagagaccattggatcaagaattgtccaacgaatagcgatccaaattttgagggtaaaaggatcaggagaaccacgggtatcccaaaaaagtttttaaaatccattgagatagaccctgagacgatgacgcccgaggagatggctcagcggaagatcatgataacagacgaggggaaattcgtggttcaagtcgaagacaaacagtcctgggaagactaccaaaggaaaagagaaaacaggcaaattgacggcgacgaaacgatatggaggaaagggcatttcaacgatctacccgccgatttgaagtgttccttgacgggaggccttttaaggcaacccgtaaagacaagcaaatgctgcaacaaagacttttccaaagtggcgctggaagacgcgctggtggacagcgactttgtttgccccaattgcgaaaccagcgatattcttctggattcgttagtgcccgacgaggataagcaaaaggaagtggaagcgtttttgaaaaagcaagaagatctgggcggcaaatccaaagatggcaagcagcctgaaaccaagaaaatgaaactattggacactaccagcactgccgccttgaatactcccactcctatgaataacggtggcacacccgtccccccagtacctctgccctttggcatgccgccttttcccatgtttccaatgcccttcgtgtcttcggcaccgacggctccaaatcctcgccaaacagaggcaagccccaagaaatga

SEQ ID NO: 4609 - DNA, 1071 bp, Saccharomyces pastorianus
  modified_base (818)..(1029): a, c, g, t, unknown, or other
atgagtagtaccatcttttatcgttttaaatctcaaaaaaacacatcgaggattttgtttgatggtacagggcttacagtgtttgatttgaagagagaaattatccaagagaacaaactaggcgatggaacagatttccagctgaaagtatacaatccggatacagaagaggattacgacgacgatgcatatgttatacccagatctaccagtgtgatagtgaaaaggtctccggcgattaaatcattttctatacatagccgacttaaagggaacgtgggagcagcagccctggggaatgcgacgagatacgttactggtagaccgagagtgttacagaggaaacagcatgctgccacaaccactgctaatgtaagtggtgtcacagaagaagaaagaatagctagtatgtttgccacgcaggaaaaccaatgggagcaaacacaagaagaaatgtctgcagctacccctgttttttttaagtcacaagggaacaagaattcagcacaagagaatgaaggcccgccgccgccgggctacatgtgttatcgttgtggtggtagagaccattggatcaagaattgtccaacgaatagcgatccaaattttgagggtaaaaggatcaggagaaccacgggtatcccaaaaaagtttttaaaatccattgagatagaccctgagacgatgacgcccgaggagatggctcagcggaagatcatgataacagacgaggggaaattcgtggttcaagtcgaagacaaacagtcctggttaagactaccaaaggaaaagaggacctgcaggcatgcaagcttggnnnnnnnnnnnnnnnnnnnnnnnnnnnnnnnnnnnnnnnnnnnnnnnnnnnnnnnnnnnnnnnnnnnnnnnnnnnnnnnnnnnnnnnnnnnnnnnnnnnnnnnnnnnnnnnnnnnnnnnnnnnnnnnnnnnnnnnnnnnnnnnnnnnnnnnnnnnnnnnnnnnnnnnnnnnnnnnnnnnnnnnnnnnnnnnnnnnnnnnnnnnnnnnnnnnncgtcaaagcaaccatagtacgcgccctgtagcggcgcattaa

SEQ ID NO: 4610 - DNA, 1344 bp, Saccharomyces pastorianus
atgaagcctggcgtatttgctaagaaggattttatctcttcaatcaagttcgatgcttttacaagtataatttccacagaaactattcaccaattaatctccatacattatcgtattactttacaagtattattgacgtttatcctgttagactttgatggtaacatttttgaagaacaattgtccgctttattggatttgcattataagcaatctttattcttacacctctatagacaagataagtttctattaacgaaggttcttctcaagaactcatctgaatattcttatggtgtcaaattcttcaactacggacagctcatttcctatattgactcgttaaactacgatgtctacaacgcttcaatcacggagaactcattctttttagcatttttcaaatcgtatatcgttgataactcctcgcataagaatacaagtttcttcttggagaatgttgagcgtcccttctatttacgtaataatgcggtacgggagtttatgtttgccatgacgttattcagttgcggtaaattcgatcaatcatacgaaatatttcaattacacgattatccagaagccattaacgacttattgccgacatttctagaagatcttaaaagtgaaatttaccatggcggcagtatatggaaagaccttttgggtactttcgcatcaccatatagacattctgctttctactatcaattatctcttctattcgatagcaataacagtcaggagtttgccttgaaatgtatatcgaaatcagcagaatattcactgaaagaaattcaagttgaagaacctcaagaattcaaagagaggcagcatatccactatttaaatcttttaatccatttcagaatgtttgaagaagttttggacattctgagattaggtcatgaatacctcactgatacgataagaactaactttttccgtttactactgatgaaagatgcatattctcatgattttttcagtacgctcttacgcttatgcgattctcatgcaaatgatgaaggactttaccttcgtactgtggatatcaaaatagtggataacattttatccgaaaacttaagaagcagcgattggaaatgcttcaagaagatctactgctttagaatgttgaacaagagcgagaggtcggctgcagaagtgctgtacaagtatatttcaatgcaatctgacattaatgttattgaaaagaagaagtgttatttaatgattattaacgtattatctacctttgacagctcatatgaccaatggatcttggacggtagcagagtgataacattaaccgatataaaagacgaattgagcaatctctag

SEQ ID NO: 4611 - DNA, 1701 bp, Saccharomyces pastorianus
atggcatgcctctcgagaattgatgcaaatttgcttcaatattacgaaaaatctaaacctaataataccgttgatttatacatcaacaataatggcaataataagagattcaaaactggagagagcgtgatcacaactccagtttctcaacaccatggtagcgaatattcgaattgtatccttttgagtaactccgaatatatctgttaccacctttcctcaaaatcaacactattaacattttattctttaagtgatgcatataatggcaagacgataaatgttcacttaccaaatgcttctatgaatcaaagacataccttaacgatacgagaggtaaaccaatgtttgctggctaatttgattttgaaagacggttcgttcttaactttgcaactacccctaagttttatcttttcatcagatgacactctcgacaaagagtggtttcacattcagaacccatatgatttcacagtcaggattcctcatttcctgtattttgtagcacccgagttctctgtcgtatttttggaagatggtggtttgttgggtctaaagaaaatcgataacttaaattacgagcccttactattcaatgataattcttatttgaaaagtttaacaagatttttttccaaaaattccagttcagattttgatggtgtgatcagttgcaagctattccatgagaaatatttaatcgttttgactcaaaattgccatttaaaaatttgggacttagcttcatttgccctaatacaagattatgatataatttctcaaccaggtttaaatacaagtcatttcagaaaagtggaagtggtaggacagtacctttccttatataacaatactctggttacatctttgcctttagaaaatgggcttttccaaatgggtactttgttagtcgattcaaacggtattttgacttacacttttcaaaataatattcctactaatctttccgcatctgccatttggtcaattgtggatatagtgttaacgagaccattggagttgaacgttgagtctagttatctaaatttgattgttttgtggaaaagtggtactaccagcaaattacagatactgaacataaaggatgaaagttatagaaactacgaatggatagaatcggtaaataaatctttagtagatttacagtctgaacatgacttagatatcgtaacaaaaactggagatatcgaaagaggtttatgtagcttgaaatcaagatacggtgcccaaatatttgaacatgcacaacaaattttgagtgaaaataagatcgttatggctcgtaacgaagacgaagaatatttggcaaacctggaaacgatattaagagatgtgaaaactgcttttaatgaagcttcttcgataactctttacggtgatgaaattatccttgttaattgttttcaaccatacaaccattctctctacaaacttaatactacagtggagaattggttttacaatatgcattccgatactcaagagtctgagctattcaaatatctaaagacattaaacgggttcgcttctacattgtctagcgatgtgctcaggtcgatttctagaaagtttctggacataataaccggagagctaccgaattctctgactacttctgaaaaattcacagatattttcaaaagttgcttagaaaaccatttgaaatcacaaatctaa

SEQ ID NO: 4612 - DNA, 240 bp, Saccharomyces pastorianus
atgcaaccacaatcaacatgcatgcaaccacaagctcaagctcaaccacaaccagaagctcaaatacagaatggtcaacctgtcaacccacaacaacaaatgcaattccaacaatactatcaattccaacagcagcaacaacaacaagccgctgctgccgctgctgcagcacaacaaggtgttccatacggttacaacggttatgattacaattccaagaattcaagaggtttctattga

SEQ ID NO: 4613 - DNA, 120 bp, Saccharomyces pastorianus
aagcaggaacaccgctcaaagggacgatcggatgacgacaacgaggggccagacgaagaggagagtacgaaggaggttctcaagccaggaactatcatccatttctcaaccaatagatag

SEQ ID NO: 4614 - DNA, 1557 bp, Saccharomyces pastorianus
atggatttaagagatgcagagcctaccataaacccaaacgtgtttaacatatctaaacttttggactgtaagaatgaaagaccaagaattgcctgtatattcttgagtcagtttgatatgaaaaaaggaaatatcataatatggtctaaaagtatcaaagatacaacattcaacttgaacaatattgaatttaaatcgttacctgctggaattcacgaacaaaccgacgatattgtcaattttgtagttcctaagggagaagcacttggcgacgatgatactgttaagaggcctgtctatgattacggaattgcctatttcaaacaaaattcctttgatattattgaaaatgataatcaggttgatagaaataaagttctaatgttttctcttggtatagttatcgatgttcaagatctcctatcgaatggtaaaaaaaacttttataaagagatataccatgcttacgacgcaaacagatatacaagccatttaaaggagctgcttagtcaatggatgaggcagggcgagcttgacaacttttgccttttcgaaaatttctttgaaaagaataataaagatcacataactgaaaattcaatagaaactgtggaaaccacacccaaggaaacgcgacatttgatcgaatacatgccgtattgggcgagaagtttgggccctttaatatttacattatggaaggcaagccttctccaaaggagaatattggttctaattcctcaaggagaatcatttgaaaaatgtaattccttggcttattgcattttcttaatatcaatgctttctaaggatatggtggggaaccatataaacgatgaatacgttgtgcctcttttcactgtatcaacatcggatatatcattcctggagtcgcttggcgaagagcgtggctatgtggcaacaactagtgaagagattttgttgtataaacctgaaatttacgatatcatagtcaaacttccctcaagttcaatcaccgaagaatttccagaaaacgatgtggagatcatcgctgcatctggtgaacacaatagagccactcctcttgacttagaaacatatgaaaaagttatacttagtgaattagaagaagatgtttcaacaaatgtgaaaaataagctttataaggtgacagagcctatatcgtggttacaatttttgattgatggtttctatctcctaaccacagcgggttatttaatggcgccgtaccatatggcaaagaatttcaagcctttaaagcttatttctggttcaaagtccaatgattcggaaattcagatggccgaaaatttaattcgttacttccaccttagaacgttaaacttatacaaccgattgaaagacgttattcaaaaaaatgaaagcatcgggtccgaacaatctattaccatcttagcctcatttttaaccgacttgaatctggattgctttagtttacaagatcatcaatttataaaggatatcacctataaatggtttcaaagaaatatcgatattactaatcttccagaatgtgttggggatctctgctaa

SEQ ID NO: 4615 - DNA, 768 bp, Saccharomyces pastorianus
atgttcaagtcaatagctaggttgcggaggccgcggttcatctttttgaattctcaacggtttattcacatcaagactttaactactccaaatgaaaatgccttgaaatttctctccacggatggtgagctgttgcaaactcgtggttccaagagcatcgtcatcaaaaacactgatgaaaatctcatcaaccattccaagctagcacaacagatctttgtccagtgtcccggagtggagtcgttgatgataggtgatgattttctcactattaataaagatagaatggtccactggaacgtcattgagccagaaatcatcgagttattgaccaagcagcttgcttctggcaacgatgtgatatctgaggaattccatgctgttcaagaagaagaaggagaaggtggctacaagatcaatatgcctaagtttgaacttactgcagaagatgaagaagtcagcgagttgatcgaagagctaatagacacaagaataagaccggcaatattagaagatggtggtgacattgactaccgtggttgggatccaaagacgggaaccgtgtatttaagattacagggtgcatgtactacttgctcgtctagtgaagtgactttgaaatatggtattgaatccatgctgaagcattatgtggatgaggtaaaagaagtaattcaaataatggatcccgaacaagaaattgcgttaaaggaatttgacaagctcgagaagaaattggaatcgagtaaaaatagccgtggtgcttaa

SEQ ID NO: 4616 - DNA, 741 bp, Saccharomyces pastorianus
atggccggatcaagcttgtcgatcattgctctgggttacggtattgtttaccctaaattaaacaagactttaatgaggcgttgtcaagtgtatgctgcagtgacctatgcaatttgtatcggatttttgattcaaagttatttgagcaatatgcaagcaccatctgcattgatcttaattactttgattccaatggcgcttgctttggctgtattttactacatgattatcagctccatgacaaaaactttaatttatttgaaagaacaaagacagattgtgaaattgaacatgtacaagaggttactcttcatcatttacgcttccttcttaagtgttttagccggcagtatagtttcatcatttatttacattggcatgaacaccattgatatgattgaaaagaactggagatcaagattcttcattactgatttctggcctacgttagtatatttcattgtttttgttaccattgccttcttgtggagaccaacagacacctcatacatgctagccgcatcccaacaactacctacagacccagaaaacgttgcggactttgacttgggcgatttacaatcgttcgacgaccaagatgatgccagcatcatcactggtgagcatggtatggacgaagatgacctgaatttgaatttcactgatgatgaagaaggacgtgataatgtaaataaccatggtctaggccataaaacattgcctacttctccaagaaaataa

SEQ ID NO: 4617 - DNA, 87 bp, Saccharomyces pastorianus
  modified_base (71)..(71): a, c, g, t, unknown, or other
atggcgttatattcatttgccttctggaaacacaagcatgaattgctaccattgcaaaagtatttgttggnctttatcgagttttaa

SEQ ID NO: 4618 - DNA, 624 bp, Saccharomyces pastorianus
atgagagtacgtcaacattgccgaccttttcaactgcttgcttcccttctatgttggctactagcgttcgtagcagctaataaggagaagataaaccaaaataattaccaagtgtgtgcaggtatgtattccaaagaggattggaagggtaaagtagatccatttatatcgttcaacgtcaagaaaattagtgagccaattgacgaatctgatgctggtattgtcgttgcgatttacgattttcaagatttcgagcacttgggtgtagaattgcctgatggagaacagtactatatctgtgatgattatgctattgacatcggaatctgtgaagaagagcatcgtgatgagtttattgtccaagaagttgtttacgatccatatacttccacgaataaatctctcgctaatcccatcatgacgttttctaaaaacgacgtaggtttgcacgatactaaatacccggtgacgaaaactggattttactgtgttactgcattcagatcatcgaaaagtaccaaatttaaggctgtggtaaacttcagaaacgcttatggtcaccttgcaggtactgagatcataaactaccgctatatggtcttttggctgtcgcatatgttgtag

SEQ ID NO: 4619 - DNA, 711 bp, Saccharomyces pastorianus
atgacacatcctgtagatgtaaaagcatgtttgtttgatatggatggtcttcttattaacacagaagatatttacactgaaacgttaaatgaaaccttggcggaatttggtaaaggtcctttgacttgggacgtgaagattcagttacaagggcttccagggccggaagcgggaatgaaggtcattgagcattacggcctcccaataaccttaaaggagtatgaagaaaggaatatctctttgcaatctcttaaatggggcacctgcgaatttctgcctggtgcatttgacttgttgaaatacttaaagtcaaagggtattcctattgctctatgtacctcttcgaataaatcgaaattcctctgtaaaacaagtcatctaagccatggtttcgatcttttcgatgccattgtaactggcgatgatccaagaattccaaaaggcaggggaaagccgttcccagacgtttggcaattgggtttgaaggaactaaatgaaaagtatcatactgacattaaacccgatgaatgtatggtcttcgaagatggcatccctggtgttcaatcaggcaagtcgtttggtgcacatgttatttgggtccctcatccggaggcacatgctgttttgggcgatacaaaaactttgttggctggtaaaggtgagctgttgtcctctttagaagaattagaaaaagctaaatatggcctgtga

SEQ ID NO: 4620 - DNA, 1995 bp, Saccharomyces pastorianus
atgtttaaattatctacacatttaggcagcttgaaaaaagttctcaatgaagatctgggtaagttgagtgatactattcgatttgagaacaccgataagttgtcgatcatggcatatgcggttaatattttacaaaaagatgatgacgatgacatattggtcaacggaatagttaagcgtttacttgactcgattaatgaatccgttgaacccctgagtttagtcgataaaaaagatagaataacagagcaaagtaaccgaataacgacaatggtaaacttcgaaaaaatagaaaatagagacactgtaattactttgccaaggttgtcaaaagaaatttcggtaaacctgcaaaattttgcatgtcatattggatccttgctattagaaaaccataacctaaacaatgtagttatggagttgatttcagaacaggttggttcgccaaggacacaaaagatagttgcattatggttaagtgccagtttcctcaaaggggcggggcgaaaaccaagggaggaagaaaattacctgcaatttggttcaagtatagatgattctggctcagtagttgaagaatcgtgcttaacagtgctggaatattgtaatgaactttctcaagatattagtatgaaaattgaggggaacggtattaaaaagagcgatgaattcgccctatgcacaattttatcgtccatcgaaatagtctgttctgtcatgaagcgtgattttcaaccagaattaattgattatatatataccgttactgatgccctggcatcaccttctgaagccatcaggtatgtgggccagtcgtgtgcattgaccatagcgaataccttgtatgatggatccgtttccactatgatccttagaaacgtggattacttagtagaatctatttcttcgaggttgaattctgggatgactgaaagggtaagtagcatattgatggtgatttgtcaattggccggctatgaaactatcgaaagctttaaagatgtaattgaaacaatattcaagcttctggattactatcatggatatagtgaattatgtcttcaatttttccagttatttgaaacaatcattttggagatgaaaaaaaaatatgtcagtgatgatgagatgatcttgaaaatagcaaaccaacacctttcgcaaagtacatttgcaccttgggggatgactcactttgaacaagtgcttaatatgttagataaagagacaggatctaaagatgatataatggatgatgcaaaactgttggaagagaacacggggcctagtagtttccaagaatacttcgattccaagctgagagagccagacagtgatgacgaagaagaagaagagccagaaggagatagtccgagtaatgacgcagatcagtgggtctcgcctataccgcgggactcatataaaatactactacaaattctaagctatggagaaagattgctaacgcatccatcaaaacgattaagagtgcaaattttatctgttatgaggctgactttccccttgttagccacgcaacataatctgttgataaaggaggttgccagtacatgggattccatcgtccaatgtgtcgtatgtgcggacttttcaattgttcaaccagcatgcatgtgtgtcgagcagatgattaaatattccggcgattttgtctctaagaggtttgtcgaactttggcggaaaatgtgcgaggaatcctttcttttgaaagaactaagagtcgatccgacggtgcacaacgatgatacaagatgtatagaaaagcgtgtaaagtttccgccagtgaccgaaaacgcgctggtgtcaatggtgcatatggtcttggaaggtatcaagattacagaatacttagtctctgaggcggtgttggagcaaatgatatactgttgtgttcaggttgtgccaatggaggatatatccgctatatctttgattacgggtgatatcgtgtggaaaataagaaatataaattga

SEQ ID NO: 4621 - DNA, 1179 bp, Saccharomyces pastorianus
atgttcaagagctccggggaaatgaattcagacacggaagcatttaagggcataagggttgcatgcgttgaactgtccaaaaccgcctttttgcctgctgaatcatttgatccgaattcattaaaattgttagcatgtttgaaaaaagttgaattgaagctttcaacttaccaagacgattcactctcccctaaatttgcagattatgtttttgttcctatagcaagtttattgaaacagccaactcttggggaatctcaaacagaatatgtcctattgatcatatcacacctattacggatatgttggtcatccaatggaaaacttccacaacagttggcacagcaactgttccccctgatttcatttttaataagcccagataaagaaaacctcaaacttaattctcggtcagatgagtttagatacgctggtagtttagtcctatatcaattttttgattcattaagattccaacaatatcacaatgaattcttttcaaattcaagtcctaaatcacttcccagtttaggacattctattactattctcctgaagattttggagcaaacaccgcaaaataacgagcttcaattgaaagttttatcagctttagaaatactctttcaagacattataacagatggagaaatgctctcatttatactaccaggaaatgtttctgtcttctccaaaatactaatgagacctggccgtcaaatacattacaaagtgagtgttcgtacgctggaagtcctggccaagttgttagtattggtttatgatgattttggtttacaagttcaaataaatgagttgacagatattcgagaattgaaggaaaccgggatgaagtccgaacaagatcaatctttttcgtttaataaacccattattgttttacagaaagataaagaatctgatggcaacactcatagagacacaagttggttaagggcaacttcaagccaaattaaaattgctttagaggcctttattcctaagttactcaaacgcaataatgactcaatcaatgagaaattagcgttgttcgtttccactctgctaaatagatgtgaaaagtctctgcataattgtgagcctgtatttgtatccaccttagtaaacttacagcgagatactctagagatccccggtaccgagctcgaattcgtaatc

SEQ ID NO: 4622 - DNA, 420 bp, Saccharomyces pastorianus
atgttgttctatatagccgccgccgctgccacctacaactggttggtatgcaccgagggatcgtgctgcaccttgatcatgggcctgtacataggctcccacatctgcgccttgacccattgcaaacactcgtcaaagtcacgaggcaccttgaccgtctcaccgggaacaccgccgggcacctgctcctgttcgatgcgggctgtgccctcttctagcgcctgcaggatcactgcggtggctagacgggccgaggtgttggtgatggtgtccaggccgggcaacagccccggcctggagtcaccctctctcagtggtgacaattcggccagttggtccactgcagcagaaatcatcttgtccgtaatgatggtggcgcgcgaaagcacggcaccaagaccaattcccgggaaggagtaa

SEQ ID NO: 4623 - DNA, 2448 bp, Saccharomyces pastorianus
atgaggataagttttagtcgccaagtgtgccacagtggtgcaaaatcattgaaaacaccagctatgagaaatcccatgtcccccacggaacagcactcacagcataattctactctggcggcctcaccctttgtttctaacgtatctgcagcaaggacacaacataatttagcaaatgatactcaaaatgatcattctcaaccctggaacagaaccaatacgacaaccagtccttaccaatcgttggccaatagccctttgatacaaaagctacaggcaaatatcatgaccccgcaccagccatcgatcaattccggctctgctgccggcaataatgcaaatgacaacaacttattggcttccatgtctaagaatagcatgtttggttctactataccgtccacattgagaaaagtgagcctgcagcgggaatacaaagattcgattgatggcacgcttgatgatggtgacgacaacaatggtaatacgactgtgaatactaataatgatcgagagagtaaactagaaaataatgggcctctgacgacaactacattgacgacaacaactacggcgactcaattagatgtttctgaattgtcagctatagagagactgagactttggaggtttgacgcattgatgcaacatatgtacaggacggcagaatacattgctgataaagtatacaccatatcgaatgatcctgatgacgccttttggctgggtcaggtatactataacaataaccagtacgtaagagctgtggaacttattaccagaaacaatttggatagcattaatattttatgccgatacttattaggactttcttttgtgaagttacaaaaatatgatgacgctctcgatgtcataggcgagtacaacccattcagtgaggatccaacatttgcagctgcaaacgtcacgagcaataacgggactaatagtagcacgtcacaacctaccgatgggggaataaaaatggaatcatcattgtgttttttgagagggaaaatatattttgcgcaaaataatttcaacaaggcaaaggaggcatttcgtgaagccatcttggtggacataaagaatttcgaagcttttgaaatgctcctttcaaaaaatctactaactccacaagaggaatgggacctgttccattctttagatttcaaagagtttggcgaggacagagaaattatgaaaaacctttataaaatcaacttgtccaaatacatcaatacagatgagataacgaggtccaatgagattctaacagaggaatacaagttgggtgataatgtagacgttataagaagcagagtagatattctttacacgcaatgcaaattcaacgagtgcttagagttatgcgaagctgttttggaaaatgatgaattcaacacgaacattctgccaacgtatatcggatgcttgtatgaactgtccaataaaaataagctttttcttttatcacatcgtttagcagagaatttccctaaatctgcgattacttggttcagcgttgccacatattatatgagcctagacagaattagcgaagctcaaaaatactattctaaatcctcgatactagacccgagctttgcagctgcatggctaggatttgcacatacatatgccctggaaggtgaacaagaccaagcgttgacagcatattctacagcgtcaagatttttccccgggatgcacctgccaaaattgtttctcggaatgcagtttatggccatgaattcattgaacttggcagaatcatatttcgtcctggcatacgacatctgccccaatgatcccttagttttaaatgaaatgggtgtgatgtatttcaaaaaaaacgaattcgttaaagccaagaaatacttaaagaaggcgttggaagtggtgaaagatttagatccaggttcgagaacgacaatatcgattcaattaaatttaggccacacttatagaaagttgaatgaaaacgagattgccatcaaatgctttaaatgtgtcctagaaaaaaatgacaaaaactcagaaatccattgttcactaggttatctgtatttaaagaccaaaaaattgcagaaggctattgaccatctgcacaagtcattatatctgaagcctaataatgtatctacgacgacattactgaaaaacgccctagaattaaacgttacgttatcgctggactccagtcatccgctgcttgacaagtcgaatctaatggatcaagcaaacaaaaacaagactttagtcaacaagaaaaggtcttcgttggcatatgatcctgttaatatggccaagaggttgaggacccaaaaggagctttttgatcagaacaatgagtttctcaaagcgggagtgcacgacagtaacaatggcaatggcagtaatgataatggtgatgatgattttgacgctgatatggagttagagtaa

SEQ ID NO: 4624 - DNA, 1248 bp, Saccharomyces pastorianus
atgagtagcattgaagggaagaaccagtttcgtattattgtaggctcgtatgaacacaatatcttatgtttatccctagatattccggcgcaaaaggaaaacgatgtggccaagacacctcattttatgccgatattccatttccaagctcattctttaagtatcaaatgtttggctgtttccaggagatatctggtctctggatcgaatgacgaacacatcaggatttacgatctacagaagagaaaggaattgggtacgttgttgagccatcagggttctattactgcgttgcaattttcgcatccagcttcttctagtgaagatcctgccattgcaaagggtagtaagaacagcaaatggttattatcggcatctgaggaccacaagatcatggtttggagagttaaggattgggaaactgtgggatcgttgaagggccatacggccaggattaatgatgtggacatccatcctaccaatagaatcgccattagcgttagtgatgaccattctatacgtctctggaacctcatgactctaaggaacgctgctgtactaaaactaagaaaatataacacaaatgggtccttcgttagatggttaggtgctaaaggtgattacttcgctgtaggtttaagagacagagttcttatttatgaaacaggatccgccaaagtgtacaaagaaatacttttcgatagaaagactatcatgcatcttgagacacacatcctgccattcgataataaggaatacctttctgttggtgttagtgatggtaatgttcatttctacccttgtgaacaattattcgaaaaggaggaagaaacagaagacggagacgaaagtgaagatgacaagaagaagatcgaacctgctttttcattattaggccacacaaaccgtgtcaaagactttaaattctatacaaatgaattcggtacctacttaataaccatcggttctgacggtaagattgttgtttgggatatgtctacaaaagagcaagtagcagtctacgactgcggtgaaagattgaactgtctaacactatgcgacgaaagcattgaaaagtacagcatgatgaagaaaagagatgctgaaacagccgagctaggtgagcaaagtgaagtagaaagtgatactgaagaattgaagaaaattatgtttggtgagaagaagaagcttaacaagaagaaaaggaaggaaccgaagaagagcaaagtctctgtagaattagaataa

SEQ ID NO: 4625 - DNA, 1866 bp, Saccharomyces pastorianus
atgagcatagaagacatcgcgctggcaagctcgtctattgctataatcagatatgaaagtgaggtattcagtgcgcaaagtttattgtgggtgttgagtcgtggggtcatgtctaactggaaagaggcgaaagatgcaaacggaagggtatattactacaatacgttgacaaaagaatctacatgggagaaaccaaaggaactagttcctcagcaagagggactttttcaggagaatggctggaaagcggcaaagactgcagaaggaaagacgtattactacaatgcatctacgaggcaaactagttggactattcccgcctttgataagagcacagatctcatcgcaaagagagaatctgaggtaataacatcggcacaacccaccgcaaacaagtcaatttctataggtgaagagaagaaggcgttgcaacaaacggctaaagaagaggaaagccaatataccaataactctagattgctaaatgtcactagaaggacaaaggaagaagcggaaaaagaatttatcacgatgttggaggataatcaagtagactcgacttggtcgttcagtaaaattatttcagaactgggaaccaaagacccaagatactggatggtggacgatgatccattatggaaaaaggaactgtttgaaaaatatctttctaatagatcagctgatcagcttttaaaagaacataacgaaacgagcaaattcaaagacgccttcctaaaaatgctacagaataattctaatataaaatactacacccgctggtcaaccgcaaagagactgattgctgacgaaccaatatataaacactctgtggttaacgaaaagacgaaaagacagacttttcaagaatacatagacactcttacaaacactgaaagagaatctaaagaaaaactgaaggagcaggctttagttgaattaagagagtatttaaacagcattttggctgtaggttcgccatcttctgaggctttcataacatggcaacaactattgaatcactatgtttttgagaagagcaagagatatatggcgaacaaacatttccgaattttgacccatgaagatgtcttaattgaatatctgaaggtcgtggatacgatggaaattaacctcgaaaacgaactgagccagcttcggctgggtaattatactaaagaccgtatcggtagagataactttaagagtttattgaaggagattcccattcaaatcaaagcaaatacccaatggtccgatatttatccttatttcaagtctgatccacgctttttgcaaatgcttggaagaaatggttcttcctgccttgatttatttttagattacgttgatgaacaaaagatgtacatctttgcacaaagatcaatagcccaacagacattgatagatcagaatttccaatggaacaatggggatagcgatgaggctactaaaaaggccatagaaaaactactggcgaatgatcccaagttcagcaaagatgataaagaagaccttggtttgataactgatggaataattcagcaaagaaacgaaaagatacagcagaagctacaaaatgaacgtaggatattggagcaaaagaaacattacttttggttacttttgcaaaggatttacacaaaaaccggtaagcctaagcctagtacttgggacctcgcttccaaggagctgtgcgaaactcttgaatttaaggcattaggtgatgacgacgcaacgaggaagcaaatttttgatgatttcaagcctgaacactctgcacctaataccgagagcgctacagttggtgtaacattaaccacatctaggaagaggcatttaagcccatcaatcgagttagactattga

SEQ ID NO: 4626 - DNA, 321 bp, Saccharomyces pastorianus
atgtttaaagttactaacaacaattttctgcacgccacattggtgtgttttttattcacccagaatgataataaattagaaggcttagccaataagttagctacgtttagaaatataaatcaagagattggagaccgagcggtctctgacagttcggttataaaccagatgacagattcgttggggtcgatgttcaccgatattaagaactcatcctcaaggttgacgcgatcattaaaagccggtaatggtatatggagaatggttggtttggcactgttaatattcttcattctgtatactctgtttaagctgttttga

SEQ ID NO: 4627 - DNA, 138 bp, Saccharomyces pastorianus
atgtccaccgattctattgtcaaggcttctaactggagattagtcgaagttggccgtgtcgttttgatcaacaaaggtcaatccgcaggtaaattggctgctatcgtcgaaattattgaccaaaagaaggtatgttaa

SEQ ID NO: 4628 - DNA, 456 bp, Saccharomyces pastorianus
atgaaagctcaacttcaagccatatcattaagaatccaagctgttcgaagtagtgaccaaatgacccgttcgatgagcgaggcaactggtctattggcagggatgaacagatctatgaatttgcctcagttacaaaggatatcgatggagttcgagaagcaaagtgatttaatgggccaaagacaagaattcatggatgaagctattgataacgtcatgggtgatgaggtagatgaagatgaagaagcagatgaaatcgtaaataaggtcttggatgagattggagtagatttgaattcacagttgcagagcacacctcaaaacttggtttctaacgcgccagttgcagaaacaatcgtaggaattgctgaacctattggagcaggatcagactctcatggaaatcctgatgatgagctacaagctcgattaaacactttgaaaaagcagacttag

SEQ ID NO: 4629 - DNA, 1653 bp, Saccharomyces pastorianus
atgtgtaagagaccaaatttgaataaatgcgtgttccattatttcgatgaacaatattcattttgtcggtcctgtgtcatcgtaaataatgaaacgatggaagattcgaataattgcagatgtgtacaatgtgctttaagttctcttaataatagttgttttcaagactactgtacttctggagatgaacaaaaaacgttacagaactttattgaacagttcaaatcaatcaatggagtctcggataacggagtaagcttgaagcctgggaataataaattttcaagtaaaaaattgacttactttgttgaccagaatcataccgttttcagaaatcctttgccattcgaaaaaaaccaattaatttttgcaatattagcctctttaacgaatagccaaaacggcaagctatcacttgctgtggtcagtgaagttgagaatgacaatgaataccaggatataacagaaactcaattttggggtggaagaagaagaaagaacaaaaaacaattacccaaaacagctgatgatgaagatgataatgacgaagatctagttgaagagaagcatagagacgacaaagaagaagacggaaataacgaaaaagaaggtgaaaactgtaatgaaaatcacggtgatgatgatgacgatgaaggaagacctagaaaacccccattgctttatactacaactgaagcttatacatcctatctcaccaaaccgagggaaaatccggtcacctattcagtggatgaatgtaaaaatataagaacaataaccgcaatcgtagatactctttacgatactgaaactgaaactaaaactgaaactgaaactgaaattttaacacgaattgaatataagcaagattttttcaccaccacagaaaccaaggtaagagaaattacgaaaatcattggagtcggtaaagtaacaattactgattacgatacaattaccgaaacaccatacgaaattgtgaccaaaactaagttcagaaaaaaactcacaaaagttactgaaacttcgactgtaactcaaacgaaaactgcgataaccacgtcaacaaaggcaaaaagaaggtggttcccaaggacgacaacaataacaagtactacaaccacaacgttcccaagtacgacaactactactacaacgagcttgttgataactgtggtcaatccaggtaggctccagaaaataaccggaatcaagtttggtcttttcaatgttagtggggaggctgttccaccaccagatgagaaaaatgtgcaatcaatagtgaaaagaaatataatcgccgattcaaatacaagcacgcaaagtagtataatcaatacaactaccacgcaagtgccttctaaatcagaacttgattctggccaatatatctcggcggcatctcaactagacaaaaggattttcattttcaccgttatcacagtctcaataactacattaacgatgctggggttttcttacaggtcgcgagtgtcttttagagatcatactgttgatgaatccgacgatgatgatgattggtctgatgaagaagttgaacttgatgaagaagatttctactctctccctataagcataccagaaaaggggctcagtttagacaaaatggcacagcaactcggtgtagagtag

SEQ ID NO: 4630 - DNA, 354 bp, Saccharomyces pastorianus
atgcaggtctacctggtgcctgttgaaagggtggcacagctgaaaccttacttcaggtacatcgatgacgtgaacgtaacaagaaagcaggaagacgccaagaggaaccctaatccttcatcgcagcgtgcacaagtggtcaccatgtcagtgaagagcgtcaacgatccctcgcaaaatagactcaccgggtccttgctggcgcataaggtggctgatgaagaggctaatcttgaattgacctgggcggaagatacttttgagcaattcaaagattctgtcgtgaaggaaactgaaggtaagatcctaattgcctcagaaaaacaagaagattacatagataatttagtttga

SEQ ID NO: 4631 - DNA, 1209 bp, Saccharomyces pastorianus
atgttcactaagtttccgtggaacaattttttgcacaatgttattttcgacattgctcagcaaatttttaacgggccacttaaaactggttataacaggtttcttttgaaggattatttggtagatgcatacttaactcgaaagatagtagatgctgacaaagcatgtcaaaactacgaaaaagaaacaggtttacgctatggttatatgggacatttaacattaattgccgaagaaatatcaaaattcaaagagtatattgacgaaatgaaactgactttttgcaatactgttgtttcagatcgtcttgatgaagctttttggaaagaatatagtgaaacaactttggcggataccagagagaagtataacacggttttgggagatttcggaaatgaacaagaaagtgatgacgatgacgttattagaaattctgattcagaagatataattagcgacacccaaggcagtgataactacggagatggggatgatgatgagcttcttagtaatcgacacgatgctgggaacatggacttatattacaactttaataacaacgaaaatgacgaaaatgaagaagactacgcagagtatagtgacgtggacaataaaaattactataacaatgtcaacgctaatgttgatgattatgatagtgacgacaataattccaagaattccaatccaaactttacagacaacgtatctcaacataatgacgattctgaagatagaaacaataagagtctacatagtgaagacaatgacgaaaacaagaatgacaaatggacttcaggtgcttccttgtttcccctagaccattttcctagtagatcgcaaccttcggaccccaaactgcaagatcagaatatctttcagcacgaattcggctttaatggtgctggtgatgatgatgattatatggatcctaatgacgatggtcaatcgtatgccagaccaggcaaccccttatatagtaccccaaaaacaccaccaagaccaaaaacaatacttttcaattccttatctgcattggaagacgatgaagacgatggagaaatagcacaaagcattggtatcgatgatcgaatagataatgatatatcgagtgatgacgaagattccgaagacgaagatgaagataatgacatggccaatgatgacggttattcattatatagatcaaggagtaaggaagcattctaa

SEQ ID NO: 4632 - DNA, 81 bp, Saccharomyces pastorianus
  modified_base (76)..(76): a, c, g, t, unknown, or other
atgagggaatgtttgagagagaaaccacttgtgggagacagactaaaaatcgctctagaagacactaaaatactgngttag

SEQ ID NO: 4633 - DNA, 2472 bp, Saccharomyces pastorianus
atgtatgataggaaagtaattccaagaatgccatggcatgatgtgcaaatgatgactttgggcgaacccgcaagagatttagcccgtcattttgttcaaagatggaattacttattaagagccaagaggcctagtagattaactccgctgttaacaccaccttcagatttgaccgctgaagagttgaatagattgccaatgtttgaaatattacgcgaaaaatccacttgtgaaactcagatacttagaagtgccgggaattggtcactcggcttaaaagaaacggaatgttccattcaaaatgcttacttaaagttgattgaaaaaagtgaacatttcatttatattgagaaccaatttttcattacatcaactgcctggaatggtacttatgttttgaataaaattggtgatgcccttgtggatagaattatcaaagctaaccaagacaacaaaccttggaaagccttcgtgcttatcccactaatgccagggttcgattctccagtagacgccgcggaagcttcaagtcttcgtttgatcatgcaatttcaatatcagtcaatttcaagaggtgagcattctgtttttcaaaaattaaaaaaactaaatattgacccagctcaatatatccagtttttttcactgagaaaatggtcaactttcgaaccaaatgaaaaactaatcactgaacaactttatgttcatgctaaaatcatgattgctgatgatagaaggtgtatcatagggtctgccaatatcaacgaaagatcacagttgggtaatagagatagtgaagtggcaatccttgttagagataccgacctggtgaaaactaaaatgaatggtgacgaatattacgcgggaagatttccttgggagttaagacaacgtttgatgagagaacatctgggctgtgatgtagatcttgttgaatttgttgagcaaaaattcgagaggtttgaaaacgtggctacaaagaattataagacactccataccttggataatgatggtgatggtagtaacaaatggacggaacagcaaatgatcgattctgctatgattgaattaggttatcgtgaaattttcgattgtaaatgcagttcccaatggcataatattcatggaaacgttgctaatgccaataccactaaatatggaataaatgaagaagaaccgaaaagagcaggtgaagatgcttacaacaagctctttacatctgtggatcatcaacaatcatttcgtaaaaggaagccattgcccaaacatcgcttcgcatcgttaggactaacatttaatcacagagccggtgttgagaacattggtattagagaccataaagttttaagtacagatccaagattaagaaaaaatgatgaacacaaaaaagaggttgacggctatgggcccgatggctggaaaaaagaatctaacgaaaagtataaatccgacgccactgaacagttgaaagaatgggcgttaaagtcgctaacctcaaaagttcttgatgataaaaatttgattaaatccaaagcttcagagggattttcagaatacttacctgatgagaaagatcttgaaatgtatatcatggataaaagcgttacgaatagaaacaaatggggtatgctgaaaagaatttgctatttacaatacctatcccacaaacttgatgataggaaatcgcagaggttaaagaagattaaagatatgaaaagacatttgagttcaagtactgaaagcacgaagaatgcctctaatagtcctccgttgaacgaaaaaagcaacgaaggagaaagtacagacgttaatcaggatggtgatggcgatgaatatcatagattacacgcagacattttgagaaaccaagaattagacgataattcactagatgatttactttctcagatcattccaaagataaccaattttaacagtggcgaaattgatgatgcgaaaaaagaagaattattgaaactgaactttattgatccatattcatttgaggatcctctaatttcttccttttccgaaggactgtggtttactgttgcattaagaaatactctactttacaaattagtattccattgtcaacccgataatgctgtacagaattggaaggaatatggagagtttactgaactggaacaagaatttcacataaaccaggagaaactgattgatttggaagcagagaacatcaattctacagcaacaaatgtagtagataaagaaagggagaaggaaagaatgaaaagagctgctgaactgaggatgaaattatccggtagcttgctgtacggatttaaccaaaagatctttgataaacatacagcccaaagaattttggaaaggatccatggccatttggttattttccccactgagtggttagctaaagaagttgagagtagaaactggatttttaactcggacagactctcaccaatggaaatctacaattag

SEQ ID NO: 4634 - DNA, 351 bp, Saccharomyces pastorianus
atgaggcaggtgtcagcatcaatggggcaagtttgcaaaggcatggataaggcgttacagaatatgaacctccaacagataaccatgataatggacaagttcgaacagcaattcgaagatttggacaccagtgttaacgtatatgaagatatgggtgtgaattcggatgccatgctggtggacaacgataaggtggatgaactaatgagcaaagttgctgacgaaaatggcatggaattgaagcaaagtgcaaaactggacaatgttccagagataaaggcgaaagaggttaatgttgacgacgaaaaggaagacaaacttgcacaaagattaagagcattgaggggctga

SEQ ID NO: 4635 - DNA, 1938 bp, Saccharomyces pastorianus
atggcttcagaaaatggtaaaagaggaagatctctgacgattaaacccattgaaatcatactaaacaggttgccaaatgctataataggacagcaacaactcaaaaaatacataacgggcccggtctacaaatatctctgcaaactactactgataggaaacagtggttggaccaacagtatagagtcttttcaaagaggccaggcggggaagctttttttccaaaacaattttgctgattctgcaacaacttttaagatcctcgcttatttggataagcaacgatacccgttacccattgacgccaatgaggggcattcaccttctttgtctgaaggattcaaatccaccatttctattgtccagcaaaaactactgctggacgatgtcggagaggatatgagcagcgatgaggacgatcacattttgccgcgagatataaacatcgactttgtgaataaaacatattccagccatgatttaggaaaactgcttcaaaacgtggagtctaatataaataacttgtcggttcagaaaaaattggaaagggacgaactaaccaggctagacctcatgatagatgatttaaaatccagaaaattaaaaatctttgaaagaatccaactcattgatagcaagtccaccacttttgaaaatgacgtatcattaataaaggacaggatagatttcattaaggaatacagtttggaagcggacggtaaagaaaatatacagcggaatttagaagaagagacattatctgaagcctcgttctctactgtgaatgaagaagcaatctcgttgccgcataatgataaaactagcgataaacgattaaaagatttttacaaggggcccaatatgaaacgccaacttaaaaacaagaaattaaagagtatcacagatacacatagccgaaattctgtaactttcagaatgaccataccccatggagaacatgggaatagtataaccgcgcttgatttcgataaaccgtggggtactttatgttcatcaagctaccaagatcgtatagtgaaagtttgggatttgaaccatggagagcaggccggagagttacctggtcatcttgccacggtcaactgtatgcaaatggatagagtaaactataacatgttgattactggaagtaaagatgccactttgaaaatttgggacttaaacttgtgcaaagagctttattcggatcaaagtcccctgaaacagaatgcggaagaagatgttacaccatgtgtccataatttcgacttgcatagtgacgaaattacagctttatcgtttgattcagaagctttgattagtggctccaaagacaagaaaattctccactgggacttggttacaggtaaatgtattcaacaactggacctgattgtcacgcctacatataacgacactaaggtgttggcacgctccgccaacaatagcacatgtgtgcttggcagcgaagctccaatgataggtgcacttcaatgctataattcagcgttggcctctggtacaaaagatggggttgtacgactatgggatctaagagtcggcaagccggtgagggcactggagggtcataccgatgggattacgagtttgaagtttgattctgaaaaattagtcacgggctccacggacaatagcgtaaggatatgggatttgagaacaagctcaatcattgatgtcattacttatgatttgcccattacttccttagattttgatgacaaattaattactgttggtgcgagcgagaacggagtgaatgtttttaatatggaacgcgatgagcattggatgacgccagaaccaccaaactcactgaagggcgacgaggccaatgagagaattgctatcgtcaagtacaaaaacggattcctcatcaacggccacaataatggagatatcaacgtatggtcaatttag

SEQ ID NO: 4636 - DNA, 294 bp, Saccharomyces pastorianus
atggacaatagcgtaaggatttgggatttgaggacaagctcaattcttgacgtaattgcttacgatttaccagtatcgtccttagatttcgatggtaaattgatcactgttggcgcaaacgagggaggggttaatgtctttaacatggagcgcgatgagcattggatgactcctgaaccaccgcattcactagatggggatgagctgagcagaagaattgctattgtcaagtataaagacggatttctgatcaatgggcacaacgatggagacatcaatgtatggacactttag

SEQ ID NO: 4637 - DNA, 1374 bp, Saccharomyces pastorianus
atgggttcgggcgatactagaggagaaagctctctggtagctaaaccaatcgaaattatacttaataagctaccacatgccatactagcgcaacaacaatttcaaaaatatataacgagccccatctacagatatctttccaaacttctactgttcagagaggtggcttggcccgaaagtacaaaagatacccagaaaggacaagtagggatattttcctttcaaaacaattatgcagactctgcaacaactttcagaatacttgctcatttagatgagcagcgatacccgctacccaacggtgccgctgaaaagaatttaccttctttatttgaaggattcaaagctaccgtttccatcattcaacagagactgttgttagacaatgtagacggggccacgaatagtgataaggaaaaatacgttcaattgccggatattaatactggttttgtgaataaaacgtactctagaattgacctaacacatttacttgaggatgtagaaactaacgtggaaaatctgtcaatcaataaaacgttagagatggatgagttgaccagattagattccatgatcaacgaactagaatccaggaaattaaaaatcctggaaagggttaagcacattgatagtaagtctaccaatcttgagaatgatgtaacactgataaaggatagaataaattttatcgaggaatacaatttggaagctgatcgtgaacagagcttacggaagcaaatggaagaagaaagatcatctgaagcgtcgtccttcacgcaaaatgaagaagccatatcgtcgttatgtgatgttgaaagtaaggatacgagattaaaagatttttacaagatgccccatgaaaaaagccacgataaaaacaggcaaattatctcagaaacatatagccgaaataccacggctttcagaatgacaataccccatggcgaacatggaaacagcataaccgcattagactttgatacaccatggggaaccttgtgctcatcaagctaccaagatcgtatagtaaaagtgtgggatttgaaccatgggatacaagttggagagctgcctggtcaccttgctactgttaattgcatgcaaatagataagaaaaattacaatatgttgattactggaagtaaggatgccactctcaagttatgggacttaaatctgagtagagaactatatttggaccatagtccattgaaggagaagacagaagaaattgtaacaccatgtatccataattttgagttacataaagacgaaatcacagccctgtcttttgattctgaagctttggttagcggatctagggacaaaaaaaatgccactgggatacaacgacgggcaaatgtatacagc

SEQ ID NO: 4638 - DNA, 1161 bp, Saccharomyces pastorianus
atggtcaacttgaacacggtggcaccgaaaaataacagagactactacattgcgctcgggctcgaggggtcggcgaataagctgggcgtaggggtggttaagcatccgcttctgcccaagcatgccaatagcgacctgtcttatgactgcgaggcggagatgctctccaacatcagagacacctacgtaacgcctcccggggagggcttcttgccccgtgacacggcaagacaccaccggaattggtgtgtgaggcttatcaaacaggcgatagccgaggcgggtcttcaggacccggcactcgacatcgacgtgatctgcttcaccaggggccccggaatgggtgcgcccctgcattcggtggttgttgccgccagaacgtgctcgctgctctgggacgtgcccctagtgggcgtaaaccactgtataggccacatcgaaatggggagggaaatcaccaaggcccagaaccctgtggtactgtatgtgagtggcggtaacacgcaggtcatcgcatactcggagaagcggtataggatcttcggcgagacgctcgatatcgccattggtaactgtcttgacagattcgccagaactttgaagatcccgaacgaaccctcgcccggctacaacatcgagcaattggcaagaagcgctccgcacaaggacgccctggtggagcttccgtacacggtgaaaggaatggacctttccatgagcggtattctggcctccatcgactcattggccaaggacctgttcaagggcaacaagaaaaacaagatcctatttgacaggcaaacgggcgagcagaaagtcaccgtcgaggatctttgctactctctgcaagaaaacctgtttgccatgctcgtggagatcacggaaagagccatggcgcacgtcaactccaaccaggtgctgatcgtgggcggtgtaggctgcaacgtgcggttacaagaaatgatggcacagatgtgtaaagacagggccaacgggcaggtgcacgccacggacaacagattctgtatcgataacggggtcatgattgcgcaagcagggctgttagagtatagaatgggcggcattgtgaaagacttttcggaaactatcgttacgcaaaagttcagaacagacgaagtgtacgcggcttggcgtgactag

SEQ ID NO: 4639 - DNA, 786 bp, Saccharomyces pastorianus
atgagtggtaacgacgactacgtgactagcgatgacgacaatgacgccgaaaagaaatacgcccggccagtctttgttagaaaaagcaagagagaagtccaggccaagagcctcgaaggcgtaggccatcttggtgacacgcccgtgaagcaaacgcagcgccatggcgaagagaaacagaaacctactatacggctggtgccggtggctatggagagtccgcagaaccggccaaaaaagaaacgacaacgcacaagtccggcgaatcatggcagtgcgcttttcgagtacggtgaaagcatagcgggttacaagtgtgtcaccactgagagcgagagggaccgcctgaaacagaaaagagagatcgagatcgagaacgagggcgaaagcacaagcgagggcgagggcgaggacgggatagatgcctctgccttcgaccaggctaaagtcaccgagactgaagctgaaacagaacgagccatccgccagtactggcgccggcccaaaggcgagccaaccgtgctgccgctgccaggcacaccgacgctggcagccgccagcgtcgaccagatcagcgaacgcagcgtagaacggttctatgcgatgagcatcccgctggtggcagctaaccgtatagagcttctccgccgcgatagaatccggtggcacccggataagcaccgccatcaccaggccaaggtcacaaaactgtttcaactcgtcaatggcctgtgggagcgagagcaagaactgcagcaggcgcgccaccgccggccggaggcctag

SEQ ID NO: 4640 - DNA, 1095 bp, Saccharomyces pastorianus
atgaagttgtctgctctattagctctatcggcatccactgccgtcatggccgctcctgctgtgcgccacaacgataaccaccaccataacgataagcgtgccgtggttaccgtcacccagtttgttaacgcggacggtgctgttgttatcccagctgcctccactggcgctgctgcgactgccaccgcagtcgcctctaacactgaggttaaggtcgagtctgccgctatcaccgctgcaggtaccaccaccttgtcctctgccgctgccgccgcctcttctgcctcctcttcctcctcctcctccgttggctctgctgacttcgaagacggtaccatctcctgttccgatttcccatctgcacacggtgctctctccttggactgggtgggtctaggcggttgggcttccatcatggacttggacggtaacactgccacttcttgtcaagatggcttctactgttcttacgcctgctccccaggctctgccaagacccaatggccttccgagcagcctacagacggtagatccgttggtgggttgtactgtaagaacggtaagctgtaccgttccaacaccaacaccaacagcttgtgtgaagaaggccaaggttctgcccaagccgtcaaccaagtctccgggtccatcgctatttgcggtaccgattacccaggttccgaaaatatggtcgtccccactgtcgttggcgccggttccaccgaacccatcaatgtcatcaaggaagactcctactaccaatggcaaggcaagaagacctctgctcaatactacgtcaacaacgctggtgtttctgtagaggacggttgtatctggggtaccgatggctccggtgtcggtaactgggccccagtcgtcttgggtgctggttacaccaacggtatcacttacttgtccatcattcctaacccaaacaacaaagaagctccaaacttcaacgtcaagatcgaagccacctccggttctaccatcaacggtgcttgttcttacgaaaacggtgtgtacactggttctggctctgacggttgtaccgtttctgtcacctccggttctgccaactttgtcttctactaa

SEQ ID NO: 4641 - DNA, 588 bp, Saccharomyces pastorianus
atgtcgaacaaccatcacacgtttcaggggaaaagaaacaaactgtcagtgtgggtgaaaaaaattatcaacacaaccacaacgaccaatgcatcggtcacgagcaataaaccaagtcggatcggggctggccctacaagagccaagcacgcacagttggacccggatgccaccactatcagttcgtctctccgacccatgatcgaccagggctcgttgcactcaagcgaatcagacgatgaggggccgcaaagagtagtatgggacaagccaccggcaggacgagcgaagcagcagcaacaacaacaacaacagcagcagcagcaacagcagcaacagcaacagcagcaacagcaacagcacgacaacgcaagcgtcataccgctggtttcgttctgctcctcttcggtaaagtcgtccactttctcggatatccattcgatacagtccactaggcccaccatattctccggcaggacccttgagacgaactctagtgtgctggccatcccgccgcagagcattctggaccggtctagagctctcccgtcgtccaacgcaagcatcaccacgacaagaagaccgtga

SEQ ID NO: 4642 - DNA, 1389 bp, Saccharomyces pastorianus
atgccattacccagcgcgcaaggaaaattttttaagcctttatatagcaagagtcaagaatggttatttgggatcaaatgcggtggatcaacactggaagagcaggggaccaagagcatcagcatgtcagaccctatcagaacgaaacctaagtcgtcgatgaagatcgacaacgcccccacgccccacaacacgccagcgtcggtgctgaacccgagctacctgaagaacgggaacccggtgagagcccaggctcaggctcaggcccaagagcaggagcaggagcagcacgccaagatcggcaccatcagcgaggaggatatcctggccaaccagccgctgttgttgcagtccatccaggacagactaggctcgctggtgggccaagacagcgggtacgtaggagcgctacccaggaacgtcaaggagaagctgctgggcctgaagacgctgcagagcgagctgtttgaagtggagaaggagttccaggtcgagatgttcgagctggagaacaagtttttgcagaagtacaagcccatctgggagcgccggtccaggatcatctctgggcaggagcagcctgggcccgagcagatagccaagggtgcggagattgtggagtcgctgaacgagaccgagttgcaactggacgacgaggacgaggacgagggtgagcaggtcaagggcatcccctccttctggctgaccgcgctggcaaacttgcccattgtttgcgacaccatcacagaccgcgatgcggaggtcctggagtatgtgcaggacatcggcctggagtacctgaccgacggcaggccaggtttccagctggtgttccagtttgactcggccgccaacccgttcttctccaacagcacgctgcgcaagacatacttctaccagaaggagctgggctactccggcgacttcatctacgaccacgctgagggttgcgagattgcctggaaggacaacgcccacaacgtcaccgtggacctggagatgcgcaagcagagaaacaagtccaccaagcaggtgcgcaccatcgagaagatcacccccatcgagtccttcttcaacttcttcgacccacccaaggtcctgcacgaggatcaggacgaggagctggaagacgacctcgaagagcgtctggccctggactactccatcggtgaacagctcaaggacaagctggtccccagagccgtggactggttcacgggcgccgcccttgaattcgagttcgacgaagaagatgacgacgaagaagacgaagacgacgaagacgaagacgatgatgataacgacgacgacgacgacgtggggtccgccgaggagcaggatgactttgcgggcaagccggagcaggccccagagtgcaagcagtcgtga

SEQ ID NO: 4643 - DNA, 1224 bp, Saccharomyces pastorianus
atggcttctattactactgaaataataagcgagatcagcgctgtcaatgacaacgtcaatgttgagatggcagcaacctcgggcagcaagcatctcttggcagatcccggtaaccacccagcagaacatttcaagaatcgaatgtcacggttaaggttccagtcgcgggaatacctcaccaaattcacaaacaatcaatcaaatttcttatattcattacaaaaaaggcatagaacaccgcttagagatatttatttcaagtacacgtcgttcatgggtgctcatactttctacgtcatcgcattgcccatgcccgtgtggtttgggtatttcgatgtaactcaagacatgatctacatccttggttactcaatctacttgagcgggtacttgaaggactactggtgcctaccaagaccaagagctccaccagtggaaagaattgcgcggagtaagtccactacgaaggaatatggggcgcccagctcacattctgccaatgctaccggagtgagtcttctgttcttttggaaaatatgtatggctgaaacactaacgtggccaatgagattattttttttgagtccggtggttctttactacttgactctggtctttggtagggtgtattgcggcatgcatggaacgttagatttgtttagcggtgcctctgttggggctatctgtttcattattagaattggatcgggttatgttttccggaatttccatagtggtgaacacttctggttccccttcttgagtgtagcatgggggcttttcatcctgttcaatcacgttaggcccgttgacgaatgtccttgttttgaagatagcgtagcatttattggtgttgtgggcgggttggaatttagcgattggctaatccagagatacggattgaacctggtatgcagtagatacacagtgtacggcctcaaagtgtttttaagacctcttgtgggtgtcgcctccgtgctcatttggaaagatgtcattagcaagacactagtttatacgctgctaatcaaactactaaaattccgcgatgacagaggtgaaaaggcccatttgcataacaagaacagggaagacgtcgagtgttctctgtacattggtgttcctaagatagaaatcttcgggagatacatcatatatgcaggtatacccgctaccgtcattttattgtgtccaatttttttcacttgggccaacctggggtga

SEQ ID NO: 4644 - DNA, 12342 bp, Saccharomyces pastorianus
atgtattggtggtctctagcgaggaattggaacgcacaacaacacacacacactcaggcaatgccggaaaatgaggaaggacttgctaatgagctgataaggtttatcgcaaccaccgtggcaggcataaagagtctcactaaagaagatgagcaaaggctcaataattgtcttcatggtcaacatcgtgaacgttttagatcgtttcttggcttaatggatgggcaagagcatagcactctttttgtccttcttttcgaagagttggatagaatattagttactattgactttgatgaagagatggtagaaaataataattgggcagatgagaaatactctacattattgatcgtcaagtccaaaaacgaaattgtggatgcggagccgataacaacgcaagtaaacgtgatatacatgcccggtcccgtaaacacaggaaacttagcttcgattgttactcatggtgtatcgtctgtattcggccagttggtgaagtccgatgcaaagtcatattctgtcgaaaccatagataaaaccaggaggaaactagatgacatatctaagcaatttcagcagcttcataattcaattgaaactccagaccttttggaaatggttcctaatagtatcaaagatgctgtttcgaaaggtgctacttcacatgactatgcaaactatttttccagcaatgaaccgaacgatataaaaattttaaattctttgcaaagcatagcaaacaaatgggtcttagtcatcaaacaaacattagccattgacagagatataaaagatggttcagttttaaatgagctagagttttggtcgaatttgcacgaggtattgaaatcgcttatccaacaaacgcaaaatcaagaatttcaaatatgtctatctattttaaccagcgcaaaaagatttcataacttaacaaacatgctaaatgaaggcaccctttcagaaaaactaaaacaagtagatagatacgaccagtttttatcatcaatcccaatcgatgaagttcatcggtcgactagcattgaacacctacgtgaattatttgtcaatttggcatctatattgaaaaggtttagatactcgaactatccagttccaagatttattattctgatggacaaagtctcccaagaagttatagatgcattactaaacagcctctcaaatatctttaagttggattatggttcttttttggccctgtataaaaattcaatccataccatagaagaatgggatttcattgtgcaagatatcaatcttttgattagagaggatctcaggaagaacgcaccgcatgaattactatcacgaaaactgatattcacaagcgaacccgtaaaagacattttaaatcaaattttaacgacacgtaacagatttttttcattagccgaaacgttaaaggctatatcctcctctacttatcatgacgaaatacagaaactgtacgaaccatttcaacagatagacgatatttctacaaatttcaaagtgaaattagaacaatccgagcgtcaatatagtaaaagcatgtttgatttggagacaaagttgcaaagcttgctagcaaatgttgttgattccaggcgcaggccaattgaaaaattaagccatctggttaaattcaagccattgatggaattttgccctcgaataaaagtaaaagtacaagagaatcagcagatattgttaactgagataaaaaaagaaatactgcaattagaagttggattaaacgctttgcctgaaatattgcaactggaagaattgaataatattcctcccatatctgcaaaaatatcttactacttaagagtccaatcccatattgacaaaatagtccaatatctggaagttctctttggttctagttggagtgatacactagaaggacgtttgatatctgcgtcgatactgcaactgagaaaggacacgaatcctcaagaggtttttttgcagtggttgaataacttccctgaacaaataacgacaaaccttttgattatgcctgttttgaaactgataagaaatagcaaggatagttatgaattaaaagtaaatttcgattttgtcttagctgctgcttataaagagttgaggaatttaacctacatggagtttcaagtgcctagccatgtggcgcgtattgcgagagcttatatgagcttatattcacgagcaatcaccctagttgaacttattcaaacgtttttttcagtcaataaatcactttcggaaaatctttatacaaacgtttttttgaagaagagagttcaaaccgtatggacgttattgcaacagttcttggaaacatcgtgggaatcgttacacgaggttggttcgactaatcaggaaacatcatgctcccctcacagcctggacgcattagaaaaagtgatcggcgatgttatttttgattaccaaatcttaaaaaattcagaagctcagtttgccaaggaattctctcttctgaatcattttgaaggcactgctagcgagttctataaattggaaaaggtaataggtaatattcaggccatttttgaagatttttctgccaagggtcttgctggcgtaagtaagtatatccctgggtttaatgatttgattattaacatactactggaaaaggcgtctataaacgtaaagagtcttcgtttccctaagcacacatttaagcttaaattcgacaagggtaaaataacaccatcaccgtccttaaatgaaataaagggatctctactgaaagatattgagattcttttgaggacagttactcaaattgagttgctgcatgattcgggaaatcctgtttcaacgaccttgacatttgatgcagttgtgatcaagctggaaggtgatattaaaaaatctttgaacgagattcaagctttgtatcttaaaatcaatgcatacgtcaaagaatggcaaaaaatgggcttcctttggaaaattacggagcaaagtcttttggagacaatcgataacagcactcaaaaatgtcttgatatcttaacggggcttcttgattccaagtccagctttgatcaacttttgagtcgaaatatctttgcgacaaatttcgagatccaaacccaagaaacacatagttgtatccgctcaaaaatcaacatttgggtctcatttgtcagcgaacatcttttgaaactatatgaccacgatgctaggcaattagatgaagatatgaatagggatagagaggctctggaagagatggacataaatttttcttctttaaaaaatataaccataataattgaggctgtcattatgaacaaaaggcgcgccattgaacgagaagcacaaattaagctactgagatcggtcacaaggacacttacgaaacttagagtggaatttccgccaaaatttgtttacatagagcagcttgacattgattttggtacgctaagagaatgtttgggtcgtgtggaacaagagatgcaaaaacaccgcgtgttgattgctcaacggttggagcaagaagtcgaaaacattgatgagctatcgcggtctctgaatgaaagttggtcagttaggaaacccgtatctccaacattaactcctcctgaagcgcttgaaatcttgggcttgttcaataaatcactgtacacattgaagacaagagtggattgtgttacagatgccgcaaagatgctacttattcctgttattttaaaggatcaactagtacggactgtggatgaggttaaacaatatacgctagtttggaaaagtattgaggatctttggaaaaatttacaaaaaactgttgaaacaccgtggtgcaggatagatatactgtcgcttcaaccacagctaactgatcttcttcaaagcgcgaatgagcttcccagagttgtcaaacaatttgaaatattcaagtcgttgttttcgcaaattaacattcttagttctgtaaatggggttttaattgaattaaaggacccggctttaaagcctaggcattggaacatgatatttcgtgatatcggcaaaaggcaaatgcaaaagaatttagttgatagattcgaattccctctcaaagatgttatgctgctaaatttgacgctaaatgaggtattggttacaaaaattatacaaagagcacaaaaggaatttgtaatagaaaaatcgctgaacaggatcaaaactttttggaaagaggctcagtatgacgtaagagaacatccgagtggaatcaaacttgtgggtgagtgggatgtactagaacaagcttgtagagaagatttggaggagttaatatctatgagaacttcaaactactacaagatttttgagcaagattgtttggatttcgaatctaaactaacaaaattgtctgaaattcaggtaaattggattgaagttcaattttactggttggatttgtatggaatccttggtaaaaatgcggacattcaaaacttcctcccccttgagacctctaaattcaacagtttgaccaatgagtataagataatgactacgagagcgtttcaacttgacacaacaattgaagtaatacatatcccaaatttcaacacaacattaaaattgacaattgattctttaaagatgattaaatcgtcgctatcaaactttttagaacagcaaagaaggaaattcccaaggttttactttctgggtaatgatgatcttttgaaaatcataggatctggaaagcactacgatcatgtttcgaaatttatgaagaaaatgtatgggagtattgactctatagttcattctggggattgcataactggtgtgagatcgctagagggagaagtactagatttgaatcaaaaaatcaagctgcccaactcggttcaagctcaagagtggttaagtagcttggacacagaaatcaagttaagtgtctttagtcagtttaaagagtgtttgaacgaattcagaaatggtgttgatatggaagctattatgcccaattatatatttcaagcaattcttctcgcagctcaagttacatggacagaacagattgaaaagtgttttcaaactaatgagttctcaaaatacaaggaaaagaccaggaagaaaattaaagaattattggataagttaggcaactcttccaaaaatacgagaaagaaaattgaatctttactggttgaatatttgcattttgataatactatagatgagctcaaaaagtgttcttctgccgaagaagcgcaattattgtgggcaaaggtccaaaagttttatcaaaaaaaggatgctcaggatgattttgattcgatttccatatctcaaagtaactataccttacagtataggtttgagtatattggaattccagaaagattaatttatacaccattacttctcaacgggtttgccgcacttacagattctttgaatcagaagtatggtgggtgcttctttggtcccgctgggacaggtaaaacagaaacagtaaaagcatttggccagaatctcggccgtatggtggttgtctttaattgtgatgactcattcgattatcagattatttctaggctactggtaggtattacacaaataggcgcatggggatgtttcgatgaattcaataggctggatgagaaagttttaagtgctgtatctgccaatattcaagaaatacaaaattctttacaagtcgggaaggtctatactgcacttttagaagaagaaacgccgttaagtacgcatacagcagtatttattactttaaatcctggatataatggaaggtcagaactaccagaaaatttgaaaaagaatttcagagaattttctatgaaatcgccccaaagtaatactatcgcagaaagcatattgcaaattttggggtttgaagacgctaaatcactggcatcgaaaatagttcgatttcttgccctgttggcctcaaaatgtagtccaatgaagcattatcattttggtttgaggacactaaaaagtgtactgagaaattgcagccctttgagtgaggaattcggtaaacaggaaagaacattagtggaaagcttaagaagagcgattttgccatcattaaacgatgccgatgaatctgtatttaacgaaggattattggaagtatttggctctactggagaagtcttggaatcggaggcttttgttcgatgctggaaagatatttgtcaaaagaacaatctttcaatatctgaggagttttcaaaaaaatgtttgcagtttttttatatgcagcaaacacaacaggctctgatatttgtgggtaacgcaggctgtggtaaaacggcaacgtggaggacggttattgataccatggccagttttgatggtcgtgctaatattgtacatgtcattgacacaaaagtcctcgcaaaggaatccatatatggtagtatggttaaagcaaccctagaatggcgagatggactttttacttcgattctacgaagggtgaacgatgatcccacaggaactttcaaggactcgagcgtttggatcgtttttgatagcgatttggatccagaatatgtggaagccatgaactctgtacttgatgacaataaaattctgacgctaccaaacggcgaaagacttcccatcccttcgaaccttcatattatatttgaaacagacaatctcgatcatgctacgcctgcgaccataactcgatgcggtttactatggtttccatttgacgtatgttctatatctctcaagatgaattgtttgctcagtagaggctttgaagtacttgataataaaatatccatgttggggctcgataaagtaagggctgcaatctcagatgcttttaatatgggttctctagccagcctttttacaagcgtagataaactagatcatattatggggatcagatctttcaacaaactggaaactgcattgcagttaattgtttattttgtctcgagttataggcaatggctcgataatatcgacgattataagttgaaggacgttgttgttctagtaataaagcagtcattactatattctctagctggtgactcaactaccgtatcccaaacgacttttatacaagatataaacagttattttggatgtaacgatcaggaatcgccggattactccgatgtagttattacaaaggacaatttggattttacttctcttacttcccaggttccttcgattgttttagaggcacatgatgtcatgaagcctgatattataatccctacaattgatacaatcaagcacgaaaaggtgttctatgacctattaaattcagagagagcaattattctttgcggcccccctggatctggtaaaacaatgattatgaatagtacgctccggaagtcatcgcgatttgaagtggttggtattaatttttccaaagataccacaacggaaaatatcctgtcaactttgcaccgtcatacaaactatgttactacatcgaaaggccttactttgctgccaaagtcagatattaaagaattggtactgttttgtgatgagattaatttaccaaaactggataaatatggttctcaaaaggtcacattctttttaaggcagctaatagaaaagggagggttctggaaaacgccagaaaacaaatgggtcactacagagagaatacatatcgttggtgcttgcaatcccccaactgacccgggaagaatttccatgtcggaaaggtttacacgtcatactgctgttctttattttggttatccaagtgagaagtctctatttcaaatttacgaaacttattacaaggccatttttaagttagcgccggagttcaaagtatatgctgaggccttcgcttgtgcttcagttcatttatattacgaatgcaaaacttattacagcactgaccttcaatctcactacattttttcgcctagagaactgacacgtttagttagaggtgtatacgtagcaattaataatgggccaagacaatctatgagatcattattaagattgtgggcatatgaggcctggagaatttttgctgataggctggtttcaatagaggagaaaaacagctttgaagaaattctctacaaaacagtcagtgaattttttcccagccaaaatttgggtaatatagcttcaccttctcttctcttttcgggtttattaagccttgatttcaaagaggtcaaaaaattagaccttgtaaacttcattgaagaacggttcaaaacattttgcgatgaagaactagaagtgtcaatgattatacacgagtctatgattgaccacattttgcgtattgatcgtgcgttgaggcaagtacaaggtcacatgatgttgatcggggccagtaggacaggtaaaactacattaacaagatttgttgcatggttaaatggtttaaaaactgttcaaccaaagatccatcgtcactccactctcgatgattttgacattactctgaaaaaagctctactagattgttcaattagagaaactcgtacttgtttgattattgatgaatccaacgttctggaaacggcgttcttggaaagaatgaatacgttgcttgcaaatgctgatgtacctgacctgttccaaggtgaggaatatgacaaactgttgaacaacctacggaacaaaacaagagctcttggtcttctattggatacagaacaagagctctatagctggtttgtgagagaggttgctaaaaatcttcacgtggtttttacaatttgtgatcctaatgacaacaagtcttccgcaatgataagttcaccggctctgttcaatcgttgtatcattaattggatgggtgattgggacgtgaatacaatgtcccaggtggccagtgttatagtggaacgtataccaatggaatttacggactatgaaacacctaaggtcaataacgagttgatgtctaaaaaaccataccaaactgtaagagatgttgttatcgatattttagtacgttttgacggtaacttttataaagataccaaagcttacccacgatcgcctgggtattttttggacggtttacgtgctcttgagaattttgttctatcaagatatcaagagttgaaggaaaaccaaagatttgttaatgttggcctcgaaaaattaaatgaatccgttttgaaagtgaatgaattaaataaaatcttgtcaaagaagaagattgaacttacagaaaaggaaaaggaggctaggaagacattggataatatgttaatggagcagaatgaaacagagagaaaacaggaagctacagaggaaattaaaaagatactaaaagtccaagaagagaatataaggaaaagaaaagaagttgtcatgaagagtgtccaggagatagagcctaccgttctcgaggcgcaacgtggcgtaaagaatatcaaaaagcagcaattgacagaaataagatcaatgcagaatcctcctttcggtgtaaaaattgctatggaggctgtttgtgccatacttggttatcagttttacaattggagagatattcaacagtttatcaggaaggatgacttcattcacaatatagtacattacgacacaaaccttcatatgaatcctcaaattcgaaagtacatggaagaggaatttttggcagaccctaaattcacttatgaaatggtgaatagggccagtaaggcgtgtgggccattatatcaatgggttaaagctcaaataaactttagtaaagttttacataacatagatcctctgagagaagaaatgaagaggatagagtttgaatcactgaaaacaaaagccaatttgcttgctgctgaagaaatgacacaggatctggaagctagtatcgaggtatcgaagcaaaaatacagcttgttaattagagatgttgaagccataaaaactgagatgagcaaagtgcaaactagtctcgacaggtccacatctctggttgaaagtttaacttttgaaaaagagagatggttaaatagtacaaaagaattcaagaagacgagtcaagaactgattggcaactgtgtgatttcgtctatctatgaaacctattttggacacttaaatgagaaggaaagatttgacatgctgagcgatctaaaacatttattgaacatctgtggcgtcaaatacgatttgaattatcgattcatcgattatctggtaccgctagatgaaaaaatgaagtggattgaatgtgggttaaataagaacgattactttttggaaaatatgagcattatcatgaattcaaagaacacagtgccatttcttttggaccctagctcgcaaatactgacagttatttccaattattatggcagtaagacagtgattctcagtttccttgaagaagggttcgttaagaggctagaaaatgcaattagatttggaagtgtagttataatccaagatggagaattctttgatccgattatatcgaggctaatttctaaggaattcaatcacgccggaaataggattaccgtagaaatcggtgatcatgaagtagatgtttctaacgactttaaattatttatccattcttgtgaccctagtgctgctattccaatatttctcaggtctagagtaaggttaattgattttgtcacaaataaggaaagcatagaaacgagagtttttgacatcacgctgatagaagaaaatgaagaaatgcaaaaacaaagggaagagctgataaaattgaatagtgagtataaaatgaagctgaaagatctggaaaggcagctattggaggagttgagtaattcacaggggaatatgttagaaaatgacgagttgatgataaccttgaaccatctgaaaaaagaagctataaacattgaaaagaaattgcgtgaatcagaagcatttatgcctcagttcgataatctggtagagaaatactctatcataggtaaacatagtgtcagattattttccatgttggagaaatttagtcagttccattggttttacaatattgccatagcgcagtttttatcgtgttttagacgtgtctttgacaaaaagaacagcaaaacaagggcaagtgggacgagagtggatgaaattctctggacattataccaagaagtatacagccagttttctaccactcttgacaaaaaatataagatgattatggcaatgacgatgttttgtatgtacaaatttgataatgaaagtgaagaatataaggaagcggttctagccatgattggaatgctttctggagatgggagtagtgtagaagaattgagtatgaatattaatgatgatttgaatccattattacagtacatcaccaccaaatcgtatatatctgcagtacactggtttagaaatgaacttttcgtccaagaatgggatatcatggatgtagtaacaaagtcgagaactaattatttcactatggcaagcgagagagacgttgacggcacgtttaaggtagtggaattggcgaaggcctcgaatcaactgttgaagatcatccctctgggctccatcgaaaatattaactacgcacaagaagagatatcaaggtgtagaatacaaggtggttggctacttttacaaaacgttcaaatgtcgatgtcttgggtgaaaacgtatttgtacaagcacattgaagaaacacaatcaacagacgagcaagagacgtttaaagtattcgtgtcatgccatttatccggtgagaagctaccacctccattattacaaaagaccgataggttcgtatacgaggagattccagggatattggatacggtcaaagacttatgggggactcatacctcgacggataaatctggaggagcatggagcgcatattgtatgttcctattgtcatggttccatgctttgatcactgccagaacccgactggtgccccatgggttttctaagaaatactatttcaacgattgcgacttccaattcgcgctggtctatttaaaaaacatgcttgcgaccactccggccaacaatgtgccctggacgcaagtgcaggaccacatcgctacgatcgtatacggaggaaagatcgatgaagaggaagacctccaagtggtccggaagctttgttcccacatattccgcagcacggacgatctgcagatcgttcctggggtacgaatcacacagcctcttctacacgaaagcgatgaagaagaacgggcaatactcaccaccatactgcgtgatacagtcgagcctgcagattcactaagctcgtggctccaactgcaaagggactcgattctggactacgaacgtatccaggcgaaagcagtggccggctcgacaatacagcttcttcgagacatatag

SEQ ID NO: 4645 - DNA, 1815 bp, Saccharomyces pastorianus
atgcttcgtttctggatctcacaaaaacccatattcagacctagctattgtcttcgcggaattttcatcaagaaccattgccgtacaccaattacgaagatgactgaaactactacaaaagcaacatcaacagtgcagcagcagactgctgacaacaaaagactgtcctccgctgttgcggatcctgccaagcaaaagaagaccaaaaaacccaagctgagaaaatacaaagccaagaaggtcgacccaacttcccccatgggtgtcttagaatttgaagtagacgatttgctaaaatcccaaaatttatctagagatgaagtcttgaacgatgtcacggcgattctgaacgatacatctaaaatcgacggccccattactgtgcaataccatcgcatggtaaaaaacgtcaaagtcttggagattacctctaacggcaatggtctagctttgatcgctaatcccgttgaaccagaaaagaaacaagtggtcatcataccctttgggttgccaggcgacctggtaaatatcaaagtttttaagacacacccttactatgtcgagagtgatttgttagacgtggtagaaacatctcctatgagaagagatgatttaatcaaggataaatactttggtaagtcttcaggaagtcagttagaattcttgacctatgatgaccagttgaaattaaagaggaacacgatcatgaacgcctacaaatttttcgcaccgaagctaaactctgaaaagcttttacctcactttggtactaccatagcgtctcctttacaatttggttatagaaccaagattacacctcatttcgatatgccaagaaggaaggcgaaagaactaacagaaagacctcctctagggtttggtcaaaagggcagacctcaatggagaaaagagactttggacgttggtggacatggttcaatattagatatagatgagtgcgttctcgccacagaggttttaaacaaaggattaactaacgagagaagaaagtttgaaaaagaatttaatagttataagaaaggcgccactattttactaagagaaaacaccactattttggatccctcgaaaccaacattggaacagttaacagaagaaggctcccgggatgaaaacggcgacataagctacgttgaggtcgaggataaagagcacaacgtcaagttagccaagacatgtgtcacaaattccagacaaattgtcactgagtatgtagacgggtatactttcaatttcagtgcgggtgaatttttccaaaataataatgccattttacctgtggtgaccaagtatgtccgcgacaatttgcaaattccaaacaaggatggcaaaaacgaaccaagattcctagtggatgcttattgtgggtcaggtcttttcagtatatgtagctccaaaggtgtggataaagtaattggtgtagaaatatctgctgatagtgtttctttcgcagaaaaaaatgcaaaggcaaatgatgtggaaaattgtaggttcatagttggtaaggctgaaaagctttttgaatcaatcgatactcccaatgacagaacctcggtcatcctagacccaccacgcaaaggctgcgacgagttgtttttgaagcagctagccgcatataatccagccaagatagtctacatttcatgtaacgttcattctcaagcacgcgatgtcgaatatttcctgaaagaaacagaaaacggatcatcttataagatagaaagcattagagggtttgacttctttccacaaacacatcatgttgaaagtgtgtgtgtgatgacgagagtttaa

SEQ ID NO: 4646 - DNA, 1680 bp, Saccharomyces pastorianus
atgtgtagaaaactagccattgtcacactactgtactccgcggattatttaccgggcgtgtttgctcttggtcatcaagttaacaaactgttaaaggaagcgggtaggaaagatagaattgatgcatgccttgttgtgacaactcccttattcaatgacattttgagcgatttggccaaagatcttttgaaaacaatatacgacgatatcgtacttgtaaaccctttggaatgccaagatgaaagtattcagagaaacagtgaaaatctagctcttttggaaaggcccgaattgtcgtttgctctaataaaggcaagactatgggaactaacccagtacgaacaagttctatatttggattcagacactttacccctgaaaaaagactttctaagattgttcgacattatgtctaaacaaactaagttacagattggtgctgttgctgacattggctggccagatattttcaatagcggcgttatgatgctgataccagatgctgatactgcatctgttttacagaactatgttatcgaaaatacttcaattgatggtgctgatcagggcattttgaatcagttttttaaccaaaactgctgcacggatgagctgctcaaagaaagctttccccgagagtgggtacagttatcatttacatataatgtgaccacccctaatcttggttatgaatcttcacctgctatgaattattttaaaccaactatcaaactgattcatttcattggccaacataaaccatggtctctgtggtctcagacaaactttgttagaaacgaatacaatacccaatggaatggagtgtacgaggactttaagcaggaaaacaaattggtagatgacgtctcgaagattgatatcagtgattttaatgaggacaataatgttcaaacagcatctcaagaaactattccgcaaacagcatcttcaggggctattcctcaagataatgatttttctactgaaaaggaagtcgaaacaatagacacaaagcaagaagacaccagagtccagctcaataagccagctcccgttcctgttccactgaatttcactgaatggttgacaactttcataaacaaggataatgtgaattcccaggcaatgaacaaaatgcacgaacacgaaggaaatgatagtggttttgataaagacgacgctaaatcagatgaagacatctacgtgaataacagcgacgctaaaccagaccaagaaagtattgcggataaaaacgacgctaaatcagatcaagacggccatgtgaataacaatgactctaatccagaccaagagagtcacgcggatgtcacacaagaccctattacttataaagatgacatatcagaggatatagaaccgcctgtgcctaccgaagacgacgtgaaacttctggaacaggatgaggagggttacgatgaattccttctagacgtatgcgatgcagatgcgatcaacaacgaagaaggagaagatttcgatgtaggaaaagtgggaaggagtgttgaagatgcactcgaaaaagagaatccgacagaggacgaacccaaaaattcacctcaagaaatgccgaacttcaggttcgactgggaagattctgattacctatcaaaagttgaaaggtatttccctgatgacgtctttgaatatgcagtagaatga

SEQ ID NO: 4647 - DNA, 2205 bp, Saccharomyces pastorianus
atgtctgctgccgctgccaagtctgttgctcacgtgcctcaggcgtcccgacggtacaagaattcgtacactgggtttgtgtacgatatccatacgtttttttacgatctttccgtgttccttttcaacatcctattcacaatcttcttcagggaagttaaggtgcgtggtgcgtacaacgttcccgaggtaggggtgcccaccatccttgtgtgcgcccctcacgctaatcagttcatcgaccctgctctggtcatgttccagacacggcagctgaggacgtccgcgggcgagtcccggtccagaatgccgtgctttattacagctgagtccagtttcaagaaacggttcatttctctttttggtcatgctatgggcggtatccccgtgcccagaatccaggataatttgaaacccgtggacgagaacctggaaatctacgctccagacttgaagaaccacccggaaatcatcaagggccgctccaggaacccgcagaccaccccggtcaactttacaaaacggtttactgccaagtctcttcttgggttgccaaactacttgagtaacgctcagatcaaggagattccggacgatgaaaccataatcttgtccgccccctttaaaacctcaaaggcaaaggccgtggagctcttgaacaacggaaccactttcaagtacgccgagaaaatagacaacacggagacctttcaaagcgtctttgaccatttacatactaagggctgtgtggggattttccccgagggcggttcgcatgatcgtccttccttgctacccatcaaggcgggcgtcgccatcatggccttgggcgctgttgccgccgaccctagcatgaaagtagctgtcgtgccttgtggcttgcactacttccatagaaataagttcaggtctagagccgtcttagagtacggcgaaccgatcattgtggacactaaatatgggcagatgtataaggattccccccgtgaaaccgtctccaagctgttaaaaaaaatcacgaactctttgttctccgtcactgagaacgcgccggattacgacactttgatggtcattcaggctgcaagaaggctgtaccagccgctgaaagtcaagctgccactgcccgctattgtggagatcaacagaagattgctttacggttattcgaaattcaaggatgatccaagaattattcatctgaaaaaattggttcacgactacaacaagaagctggatttggtcggtctgaaagatcaccaagtaatgcaattgaaaaccaccaaatgggaagccttgagatgttttgtgactcttgtcaccagactgatcaaactctctgttttcgccatactgtccttaccaggttctattctcttcactccaattttcatcatttgtcatgtttattctgaaaaaaaggccaaagagggtttaaagaaatcactggtcaagatcaaaggtaccgacttgctcgccacttggaagcttattgtggccctagtgttggccccgattctttatgtcacctactcgatcttactgatgattctggcaaagaggcaacactactttcgcatctgggtcccaaataacccgtttttacaattcgtttacttttacgcattactggttttcaccacttattcctctttgaagacaggcgagatcggtatggaccttttcaaatccttaagaccacttttcgtttccattgtttatccaggtaagaagattgaggaaatccaaactacaaggaaaaacctaagtcttgaattgacagctatttgtaacgatttggggccattagttttcccagattacgacaaattggccacagagatcttttccaagagagatggttacgacgtctcttccgacgtagagtcgagttctagtcacttgagtggtcaaactagaagtcgttcgtcctccgtgcattctatcggctctcaattctccaatgcgctatcaagagtgaattcaagaggctcgttgactgatatccccattttttctgacgcaagacaaggtcagtggaagagtgagggggaaactagtgaagacgaaggcgtgattgacgagaagacggctgagactacgcagaattcggatctcaacaaagaaaatggtcggaatgtagacatctcttccagaattgcttcattagtgagacaaaaacgagaacacgaaaagaaagagtaa

SEQ ID NO: 4648 - DNA, 648 bp, Saccharomyces pastorianus
atggctcaagtcgtagagcttcccccacacattcaactttggatagatcaagatgaatgggatgcatggaaacagcggactgaccccgtacttcatatagagttacgccgttgggcggacatactagtagtagctccgttaaccgcgaacaccttatcgaagattgctctggggctttgcgacaatcttctaacaagtgtcatcagagcttggaatccaagtttcccaattcttttggcgccttccatggtaagtagtaccttcaattctatgatgacgaaaaaacagttgcaaacaataaaggaggaaatgtcttgggttactgttttcaagccctctgaaaaagttatggatataaatggcgatattggacttggtggtatgatggattggaacgaaattgttaacaagattgttatgaaattgggaggatatccaaaggataacgaagaagatgacgaagatgaagacgatgaagaggaagaagaagaagagactgaagacaataagaacgaaaagaacaatgatgaagatgatgatgacgacgacgacgacgatgatgatgacgacgacgacgacgacgacgacgatgaagaagaagaagatgaagacgaggtagaaactccagttttagcagataagcattaa

SEQ ID NO: 4649 - DNA, 879 bp, Saccharomyces pastorianus
atgaccgccatcgcttctactaatgggaagcacgacccggatcatgcaagcaaccaacctatagagtgcccaagattttcccgtggacagaaggaaattgtgcttgaccacgaatatatcaaagggaaggactcgatagttaactctcccgtctcgggaagacagtctgtgagccctacgttgtcgaatgctaccgcaactactacaaaatccatcatgaacgccataggaacttcaggtgctgtggtaagtaatactccggaacctggtttgaaaagggttcccgctgtaactttcagtgatctgaaacaacaacaaaagcaggacagcctgactcaactaaaaattgaatcagaaaaggctaaaactccgaacaacggctcggtatccactccggcctccgtcgtcggcagcaccgcagctataccgaacagcagtgccactccgagaacagtacaggtacctggttccccgcttgttaacgaaatgaaagatcctacacctaagctggatagtactattagtatacttgaccctattaagcctgacaaaatcgccgcctcgtcgacgccgataaacaaggaaagcgatgaagttaccgctataacccccactcataccacagtttcaaacgaagattcaataagtaacatttcgatgcaaactcatgcacgatctacccctgaagatactccagtaaagcaatcagtcattccttccattattcccaagagagaaaattccaagaacctagaccccaggttgcctcaagacgatgggaaattgcacgtactctttggtgccacaggttcattatccgtatttaagatcaaaccaatgataaaaaaattagaagaaattacggtcgtgataagataa

SEQ ID NO: 4650 - DNA, 96 bp, Saccharomyces pastorianus
atgttagtcaaatccggaccatacagcacggttacgtcggtttccttgttccagttgatagagagcgggtctgacttggagttctgcaaaccgtaa

SEQ ID NO: 4651 - DNA, 1746 bp, Saccharomyces pastorianus
atggagaaggaaaaggcatcccatgcgagccccagtattggagtcaacgaatttgtcgtccaaggggaaatatctatagatgattccgaaagatcggtcaagagtgatagcatcagcataagtcaggatgaagatgacaagacagacactcaagataatactagcatactgtccgcaaaaccattctcacaaacagatttagcaattgacgatacgctattaggtaaaaacccaaaatatgagaaactcttcactgaaaagaggaaacgtcgaagaccgcccaccacaagcagcagaaactcaatgaactcggaggacagcgaacaaaagaatcacatgagtggaaaactttaccacattaaaatcttactaggctcggatctaaactcgttaagggattcgttatggataataaagatttctacagaacagaacatcgaaaaaactatagcaagaagttttgctgatttctactggttgtaccaccaattacaaaacaatcattggggaagagttatccctccaccaactaggtccaatatccttgtggagaaggatgagtttgccataaaccatcttttcatgatacgtaataatgaaaagtatgatccaattttcaacttcaggccggaatatatcatatcattacaactgatgaggatgataaagcacatattcaacgataatgtcttacgtttggattctaactttatagattttctcaattgggatgatgctattcctgcagattcacagatgattgttgatgatagcatccttaagggtgataaagtactaacagcatcgtctcaattccgcgaactaaaagagtttcaaaagcaatcaaaaagaaccgaatcaatgacaaattcccacgcttccatcataccaatgacagcgctcactgaagtttacataagccctacgaaattattctctagaaaagattatcaacgacttttccaacctcaaagtaccgacaacaatgtcagtaacaatgacccattgattcaagagtggattcccaagagtaagtctttattcaccagcttatcatttgggtcaagtacgcccgcataccaagaaacatccgctggaatccaagcgtgtcatgactggataactttatgcaaggagcggtggagacagttactgtaccatgtgttagaatacatcgtggatgaaacagtaaaggaaaattctgtaataaatgaattcactgattgtcttaagcagatgtcctcggaagaactcattagagcaaactctgaattattttcaaatttttccgcactaaatgaatcctttctgcaaaattttaaacgtgcttcacagcaagatattttgagacttgtaatattgttcgatgaaaatgtaagattttgcgaatcgtttgaatctatcttaaatcaaagattgaaattaggtagaattctaagcattatcgaaacggatctagaaaaaaaaaaaagttatcttgacaagttatctcataataatgacaaggaccctaaagtccgtatagcagaagacgaattccgtattgtatcaaaaaggtacagccatgtcaagcaaaactgggatgaaatcatggaaaaaattataaatgaacgaaaattctttgaggagagacaagctatcgaaattgacaattgcttcaaatcgataaaggattcaaacacggatgagaaaaggaagtacttgcaattatggaaggattttaaattgaacgaaaaaagagattaa

SEQ ID NO: 4652 - DNA, 1038 bp, Saccharomyces pastorianus
atgctgcgtaatatcaccaagttaaaaggacttggaaatagagttcatggacaatctctgaagccaccattatcccgggttcagttaacacgaagttactactccagtaatggatcttcatatcgtcgatttaataacgacgactattccaaaaaatcatcttttaaagagcttatcctcgataagtcatcaagaaaatacttggccttattttttggtggatgttccctgttttatttcacacatctcgataaagcaccagttagcgataggtcccgatttatttgggtttcacgcccattggagttgaccatcggaaactatacatacaaatcaatctggagacagactcagcaggaaattctacctccacagtacccgttaaccgttaagattgagaatatatttaagaagattgttaaagctgcttataaagaccccagtgtggataactctttgttagacggaataaaatgggaaatacatgtggtcaacgattcaactgcctcaccaaacgcatttgtgctgccgggtggtaaagtgtttatattcagctctattttgcctatctgcgccaatgaagatgggatcgccaccgtattatcacatgaatttgcacatcagctggcaagacacacagctgagaacttatcgaaagctccaatatattctatattagggttagtattatacactgttactggagcaaatgttttcaataacttgctattagatgggttcttgcgaatgccagcatcaagacaaatggagactgaagccgactatattggcctgatgattatgtcaagggcatgtttccaaccacaggaatctataaaagtgtgggagagaatggcaaactttgaaagaaatctgaacagaggaaatgctgtgaatatggagtttctaagtacacacccggccagtgttcgcagaatagaaaacatgacgaaatggttgccaaaggctaatgaaatatatgagcagtcggattgtagcagtataggtaattactataagagctttttcgccatgtaa

SEQ ID NO: 4653 - DNA, 789 bp, Saccharomyces pastorianus
atgttccttaaaacgcctagttgggaaacggtcaatgagacacccaaatcaagagttctgacgataaacgagctaatctcgcccggtttagatacagagtctaaaagaattttggccactcctgcaaggcggtactgtaagacttcggtaactgaattgcaggagtctcctacattcgagcacccatccgaggacgccgaaagccctgcctaccaatacaatccacagtttcactttcacacaccaataacccccagaacgcccaggtttgaacatgcaggaatttttttctctccaacgcctccactgatctctcccacagccgtggctgaggaagacaataacggttccctgggtgagatttcacaaacattgaagacaagactcaactgtgctagggataaggtatcgaaagaacatgaaggccacttttccgcgaagaaaaactcaaattctaccaatgcgtatccagctttgatccctcctcctttaactgaaaagatacgaaagggttcatatagcaacaaatttgcctctaagcatagacgatgttactctttagatgaatctaaaaaatttttaagttctttagaagactcatccgcgcatgaggcgtttctaaaagcaatttcgtctaaacacgccaaaaacgataatgtggagaatgtgaatgcctcgccgttacgttggtcttcgcatcgaagagcgcagagtatacagggcgactctttacatgactttgccaccattgataccttgttgaaaatgtcttcatcaaaagagaattga

SEQ ID NO: 4654 - DNA, 246 bp, Saccharomyces pastorianus
atgtttcaaaacatcagagaactgaaaataccgttcgaaacagaaaagcaggctagtatagccactaaagtgctttctccagacccaattctgaaaccacaggatttccaagcagactacagctccgaaaacaatgtcatgcttgcccggttcagaagcatcgacgatagggtgctacgggtgggcgttagcagtgttattgacagcatcaagaccattatagagaccatggatgaactgtcttag

SEQ ID NO: 4655 - DNA, 1077 bp, Saccharomyces pastorianus
atggcgaatactacgtctgtcgcagtcggttgtgcggtgggtatacccattggtgtgggtattatagtagcagtagtgttttggtttaacctacaaaaaagatataaggaggaagagaagaacgataaagaattggagagagcaatatacgatgaaagtggttttgtatcctttgacaattttggacccttacgagacagtaaagacgatgcaggattaaccagtgcggagttgaaaaatcctgatcacacatcgggttcatcagaaggatctgctcatccagaagagaaaaacgatggtaaatcacaagaactagagcacccgctggccaaaaaaaacagtaaatactatgttccagcatatcgtagaaaaataaatttactgcaagtacgaagtaataactacaataataaagccaagcagaaatctatcgtggatttaccgagtatgaacaacagttccaatgtctcactgtcatcctcccaacagcacataacgaaaagacaaatcagtgtttatgatcagatggtccctgtcattgctgatgaaggagcgaattttttttcagacccttcgagtgataacgctaatatcaataatgtccaaaacaaaccttcagtggtagaacttaaaaataatgctcgccaatctagtaatgagaatctaataaaaaatttacaaaaccaggactttggttcgtattacccaagaagagcttcatcctcgaatttgaatggcaatatatcaaatgcatcgtttcatacaagggattcctccataacatctgtaaacaaagtggatgcactagaggatgtatttgcgacgcccaaaagtggagctttgtcacaattaccaagcacgttcgacaaaaataatgaagagtcagatgattgtcgttcagttaatgacgacaaggtagtcacaacggacaaagacaatggggacttgtataaactgcagaataattacgacatgagcaacattggggaaattgctgaggaagatcaatacgaaaatgaattcactaactattcacagagcaaaagagaattcatagaaagcttaaggcctaaatag

SEQ ID NO: 4656 - DNA, 1956 bp, Saccharomyces pastorianus
atgtttacagtcaactctaaattcgtggtcattgatgggtggctagtggacgttgtagagcgaaaaccggtcaatttcaggagccctgagataaggttgctaataccgaatgatgatgattatgagaaattattaaagcaagacttggtggattggacagaattaaagaaggattcccagtccattcttgtaggggtggattcagtggagttatttaagcatataaaattaagcttgcaagagttttttctcctagacgatgggaaagtagtcctgaagaggattcggagcaaatcgcattacaaagtgatcaagaagtttgctcagagatgctgcaggttatttttgccaaaatggggtacgatatatatctatccgatgatacaagatgaccgggtccggccagatggagttcttcagttttctttagatgttcagcccagtttagaatacccgctaatcgacataaacgtcaacaaccagtacattataatcgagggcttcctaatatacttaaatgaaaggagactctgtaagtggaacgataacaacttgagggattggataggtctaaaaacatggacttatttgagaaggctttacaatccaataagcctcgacatagtttacaacttgaactcgaactattattttgtgaaagatgatcagttctttcaaatcatggggaaaagggccttcgtaaggttctccaatgtggtgggaaacgacacgcgcgataaagtcccgttctatgtttgtgttcgaacaactaccacgaaagctacacatattgcttatattgtaacagatgtaacacaaatttccttcaatgataaaaaagatggtctaaaattcatcgtcagaaaacggccaatcatggaagatgtatattctgacgtgaacatttcagaattggaaaaccagctttttattgaagtgaaggttgtcgaaaatggtttctcaacttacatttttcaattagaaaaccagctcatgaaatttattaatgaagaggagaaaactaattacagggtcggcatgatatctggtgaagttctagatcagattcgcgactttcctgtatcgaaatttactatgtcattaattgccgcaggtgaagacagaaaatatatcgaactacttcaagaactagcaaggaggttagaaaaaatatgcatggaaaagacgttacgctcattggaggagataagagaaaagtttgatcaaaagtctggtatgcaaattggactcgaaatggagtattaccaaagcactgaagaatgtaaaagaaacctcgaagttatcaaagacgacgtcatgctcatgttagtgaagcggctaggcagtagatcggtacatgagtacggcttggtaagagaagagtatatttcacccaggtttttagcagcagatggatttttgatcgatttggcagaagagaagccaataaatccaaaagatccacgtctgttaacgctgctaaaggattttcagcgtgatagtattgcccgactcagtttgattgattgggatgatttcaaaaagtcccaaggtccaattccattacgagctcgaacgttgtttaaacattgcaggaaactaaataaaatttttacacaagatgcggactttaaattaaatttgccgccctcagaagtaaacttgacggatgcacagataacgatatcatatccctgcattcctatatttttggaggacaaaaacgttcggtacctgtatgaagacagctttattcctgggagtagaaccgctacaacaccttcatctgcaacgtttcaattaaattgcgaatggaagaaccgtttacagaatgacaccgaattacaactgcaagaaggcgttaagcgtatgcgacttttaacatcttacgaagaattaagatcgaaatacatatctgcttttgagaaactacgcgctgatgattacatcgactaa

SEQ ID NO: 4657 - DNA, 2529 bp, Saccharomyces pastorianus
atgaaccctgcattacgaaagaacgcaaaaccatcgtttgtttgcttgcgatgtaaacaaagaaagataaaatgcgacaaactttggcctgcatgctcgaaatgtaaggcttcatcatcggtttgcacttatgaaatggaaccaggtaaaacgaacatatctcccccaatcactaataatccgtacggcgacctcacgggtattactccaacatcgatgcccacaggcgcctcttctacatctaccctaacttcaagaaccaaggactggaaaatgaaaaactttgccatgaagctatggaatgtccatgacaagcttgtagtaatgaacaacatcaccattgttgataacccatttgctagtcataacatcattcaacaagatttatttgctaaggctttagccacttgcatacacggtaaaatactgattgatgttgaaaatcatcgtgaaaatgcccttactaacggcaaaagaagagaactgagcttaccaatcaatgatatcggacctttgtttttcgttgataaagccgtactgaagttcgttgatagcgcttccaaaacaactaaattatcgcctccaatagattttctatataacacgtatgactatgaacaaatgaatcctcaagaatgtaacgaaaaattctccataaacattcttttacaagagctttcccaatatctgcttagtagacatgaggttgacactttagtaatggacttttacaagacaatctatccggtatatccgttcttggaaatatcattatttgaagagaacttgaaggaatgcttacagctcaacgacttcaatggctacaacatcgtgctaaccgctaaggactccagaagaaatctggaaacaatcacactgctaaccattatactggccctttctcacagacgcttgactttaacgaccaacagtccctttaaagagtcttcttatgtgaaatcaaatggtttggcattgctcgctcataaatttatttctttgatgaacgtctttcaatacatcaatgaatacacgttttgctgtttactgtattttttcgtattaaggtacttaaatcccgatcaaattgacatgtatcccacccatggtgacttattgaacctaaagttcctcaacgatttggccataaaactaggtttacacgaagaaccctttcaatatacaagatatattagcgaaagggatgattatccaagacttttcaatttaagaagaaaactatggcttggtgtgcagtttttaaagtttcaaatatcaaccccggaaggggattctgatatattgagtttagaatatctgcgctcttttattaaaggtgatgaatcgttacctgaactatttgaaaaaaactaccattttactaataatttagatttatcattgatggctacatcagagaacgtttatcattttcacttgtctttacaagttctattaacttcttgcacccccataaatggcacttcgtatttgaaggaaatattggataacatcaacaatacaaaggattttttaaatcagaaatttccaattattttgaactctttggaagaaccaatactaaaaagcttgcacattagcattccatccttgttcgcaagttctgtaccatttgattttagtacttttgaagaaaacgagacctttatggctaatgttataggctatacttctacaatgaatgtctaccacagcctggcgttgtattttgagaaaaattacttcaaaaacactttagagtatgaaccatattatcaccgtttcacttttaccgctatgcaagattatttgacgttaatgaaattaatttcggaatatttcaacgggaatttggctcatttacgagaaccttatgggtttgttacccagacggttgttcgatgctcaatactgagattatttgcattccaagccactttactcgtaaaattatttttcaagaaagacacatgtagccaaccgtctatagtcatgggaatggagaatgatagaaacggaagagttattcaggttattaagagaatgatcaagctaatgtccttccacatgaaattgttgatcgaaattgttacctcaaaattggaaaacgattatctcggttcatttatatcagtatctatattcagatatatcatgtatttggtggataccgacgcactgtcttcacttatatccgactactggaagaacagcactaatttgaatgaaaagtatcagagaatccataagattgtgggcttgaaatgggggttggggagaaacaagtcgttttctgttgaatcaaagctaagtaatccgcaaaccttagcaagtcttaatttagatatcttagaagacttggaaaaactgatttccgaacatgatttttcgagaagctttagtggcaacgctgatcctttacaaaatgaagtcgatttcatgaattgtgacaatgaagccttaaatcaattgttggcaattgaccttgataggctacttggaatttttcccgacttaaccagcttttaa

SEQ ID NO: 4658 - DNA, 138 bp, Saccharomyces pastorianus
atggtttacgcctcctccaaggatgccttaagaagagctttgaacggtgtctccaccgatgtccaaggtactgacttctctgaagtctcttatgattccgttttggaaagagtcagcagaggtgctggttcccattaa

SEQ ID NO: 4659 - DNA, 537 bp, Saccharomyces pastorianus
atgtccaactcggtcgtcgaatctttggagggtagatgttatcgattagaggcgcttttaggcagcgggtatagcaataattccgatgtttcggtgcaattgagtagattgtacgtccaactgcacgatttatactgtcagggtcaaaagtactctcaaagcctgttgcaactcttggatgtgtttatagctcaaaatacggggagtacaggtactcctgatgatatccgtatattcactagctgttatgatgagatctatagtttatacactaaatttgatcaactgaatgatcaatatgtggagttttgtcaaacacgcgaaaattcattggatcagattacctttaaagatgccaaaatccagacccggtgtctaaaggaattacctggcctggtgaacaattgcaatgtaatgattgtgagatcaatggcaatcttaaatcgttttcttgattggaatatcgaagttaatgaatttttccaacttcaaaagaaaaaattattacatttacaaaagatgattgacaataagtaa

SEQ ID NO: 4660 - DNA, 726 bp, Saccharomyces pastorianus
atggctcccagacgaatcagtaattcaacaatgggcaaaccttctataacaatcacaacagcaaaggctattataaactcggagtatacgcttatcaagtcgcattccaaatataagcttcctacacattttgaaaagctcgatgcaggctctactaagggaagaactacagtagtaaagattttttatcgcagatttgtgaggctgaaaccgtttgtatcgaatgtgaaaatggtcagacagacgtacagcgattatcttcgatataaattcactaaagaagattacgaactcaaacgatacttggtgtttaatcctaacggtttgcaatcaaaaactagccccgagcctatgggcagcacaaaaggtggcgaaaaggtaatgcctatggaagaggtgcaaaaaactttgcaattcattttaaaaagctgttcatatctacccgaaacgaaggagcaaaaatggagtatcgcaagagataatacttattgcaggcaaatcttaaagaatattttaacgatgcaatatgaaaagtataggtcagtcctaaatagaggagtaggccatgatgagcttgatgtcaaattttctcatttaaggacaaaatccagtccgcctaccaaattaaataaaggtgataagaaaaagatcccagttttcaaaatattcagtgatttcgacacaacactcgtacaccttaatgaatcattaggcacaaggttataa

SEQ ID NO: 4661 - DNA, 750 bp, Saccharomyces pastorianus
atgatgaagataagcagcaggaattctgtgctgctggggcaacggttcttctcaacgggaggttcttggcgaggcggtgcgaacggcaccatgactggcatgatgaacaacgtacatcctttcaaattaagatttataccaaagacggcacccacggccacagaggcggcttcttcggatgcccagcattcgagtaagaaggctttcaaatttatagtctccaacaacggccccaccaaggaggccgctaaaagctcgaagtggtccagctatgcattcccctcggccgagaccatcaagtcgcatgaagaggccgttaggaagcagaaacaaaccgtcgacgagcaaatggccgctgctgttgccaagaacgactgtgcgtgtatggaagctccaaagaaaagaaaaagaacgctaaggcctcgcaaggcgctcataacgctgagcccgaaggcaatcaggcatttgaggggacttctggcgcagccggaacctaagctgatcagagtgagcgctagaaaccgtgggtgttcgggattaacctacgatttgcagtacatcagcgagccggggaagttcgatgaggtagtggagcaagatggcgtcaagatcgtcatcgactcgaaagccttatttagcataattggcagcgaaatggactgggtcgacgataagttggcctccaaattcgttttcaagaacccaaactccaaaggtacctgtggttgtggcgaaagtttcatggtttag

SEQ ID NO: 4662 - DNA, 366 bp, Saccharomyces pastorianus
atggtcaaattaacttcaatagctgctggtgtcgccgccatcgcttctggtgccgccgccgtcaccaccaccctagctcaatccgacgaaagagtaaacttggttgaattgggtgtctacgtttctgatatcagagctcacttggccgaatactactctttccaagccgcccacccaactgagacatacccagttgaagttgctgaagctgttttcgattatggtgatttcactaccatgttgaccggtattgctccagaccaagtcaccagaatgatcactggtgtcccatggtactccagcagattgagaccagccatctctagtgctttatccagcgacggtatctacactattgcaaactag

SEQ ID NO: 4663 - DNA, 1092 bp, Saccharomyces pastorianus
atggacacgcagattcaacgtgcaaaggacttgctcgcacagaaaaaatacgcagaggctgccaaacgctgccaacgaagcttggacactctgtcccagggagcatcgttgcccgatcctgaactgatcatcatcttcgcacaggctgtgtacaacatggaggtgcaaaactccggcaacctatttggggacgctctcacggcagctggcgatggttctgggtcagaatccgagtctgacgtgagccaggaggatgatgagggcgaagatggccaggcagacatgcccaactccaggatgttccagtttgaccaagaggaggaagacctgacaggcggggtcgaaggtggtgagagtgacaagagtggtgatgaggataccgaggaagaggacgaagagggcgtgatagaagagggagagcaatcggtcttgcaggtgctcgatgacttcaatccgctgaaggaacaagacgaggaaatcgaagacctctcacaactccgcaagtctgggttcgacgtctacttcgagaacgacctctacgagaacgcccttgacctactggcacaggcgttgatccttctgggacactcgtccctggatggcccacctccaaccgataaaaccaaatcgcgtatcggcgatgtgtaccttctgatgggtgacaccgagagggaggcggagatgttcagcagggccatccgccactacatgaaggcgctgggctactacaagacgctgcaagacgctgtcgaggtcagtgataagactatagaagcagagttcctcgtctgcgatgccttaaggtgggaacaccggatacctacagaggacaagctgaaaagattcaagcacgtcgaggctctactccagaactacatcgcctcgggtcccaaggacgcacagctgcagcaggcaaggctggcgcagatacaggacgacatcgacgaagcgcaagaccagcagcaacagcatgggcccaagagaccgttctcccagccaaccacctccatcggcttccccgcactcgacaagccccttgacggcttcaacgacctgtcccagctggtcaagaagaagcccagaaggcattga

SEQ ID NO: 4664 - DNA, 4899 bp, Saccharomyces pastorianus
atgggtacgtcaagtgaggtttctctcgcccatcacagggatatctaccactactacgtgtcgttgaaaactttttttgaagtcacaggtgagaatcgcgataggtcgaactcgacgagggctcagaaggccagagccaagctattgaagttatcgtcgtcccagttctacgaactgagtacagatgtttccgacgagctgcagaggaggattggggaggatgctaaccagccggattatcttctgcccagggcaaacttccacatgaagaggaaccaggctagacaaaagctggccaatctgtcacaaactcgattcaatgatttgctagacgacattctcttcgagatcaagaggagggggttcaacaaggatctggattccgcaccaccaccaccaccgctaccgcagccgacaaagcaagaggttaccaaggacagcgacgattccgtcaagacgtccactaactctcctataaatcaggtggctccgaacgtctcagtacaaccttctttggtcattcccaaaatggcttctatcgattggtcctctgaagaagaagaagaagaagaagaggtaaaggcaaaggccaaggaaccggagaatgagaaggcaaatacagctgagatagaggaggctaagcctgttttagaacctattgttacagaatctgttgtgcctgactctcaagtactggtccatgatatcacatcgatggtaaagactccaacaacagcacagaaaaactactgggacgtgaacgattctccaataatcaaggtagataacgacatcgataacgacaaggatgttgaacaactgaaaagccctgaaactccaaaccttgaagatgacaattctagttctgtcatggaagatagaatcaaagagctgacggatttgaacagcgatctgcactcccaaatagaagatttgaacgctaaattagcaaatgagatggaaaaggaaaaagaaagggaagaggggaaaggaaaagattcaacaaacaaccacactattgacgaaagttttcaaaaggagctgctgttattgaactctcaaattggtgaattatccattgaaaatgaaaatttgaagcagaaaatatcagaatctgaactatctcaaagaaagaacgacaatagtcacgaatcgaagattactgatgcctttattagcaagtactcttctagcgacggtcttattcccgttcaatacattttaaatgccaacaatctaataacccaatttactacgaggctttccacggtaggtgcaagcccctccactgcaatctctcataacatgggtaaggaactgttccaaatattatctcaactgtcgaaccttgtttcccagttgttattctcagcggacctcttgcagtataaagaccaaatcatcttattaaaggcgtctttatcccatgcgattacttccataagatatttttccgtttatggtcccgtattgattcctaagataactgtccaggctgctgtttccgagattagtttcgctatatgtaatctaattgattcagcaaagattaagtcagattccactgtcaataacaacaatgtgactagtgaaaatatccgacaaacgttggaatattcgccacaaatagccactaccccgatgaccccaactttccctgctgccccttcatcgacaatgaacatgaaaaaggagtttataaaccctcacgaatccgcattttttttaaacgatgtagaggaagaagaatctcctgtgaaaccattgaaaatcactcaaaaggcaataaatagtccgattatcaagccctcttccaatatgattccaacaacttcaagaaaaccttcaggaacgggcttgttcagtttgatgatcgattcgtcaaccgtcaagaacaacgctcataaagatgattacgataaatatgtctctcccataaaaccggctaccactgcctccaattctacgagaaagagtagctctgagattcctaaactaacgttacctcctcaaagcaatgtttattcgaccaccacgccattagaaaatcaaatccctgatattaaaattgagaatactgaagaaggaaaagaaaagagtaaaaatataacggatacggccccaacagtactgacttctagtattgctgataaactaaaacagtttgaacaaaaaccagaaaacaagctgttaaagaaggagaatccaacagcaagcgaacaatcaaagcccaacttgtctaacaaatttataagctcaatgaatgatgtgtccacagatgaagattcaacctctgatgccaacaacgataacgatgacgacgatgatgacgattctacttatatggcactgaaacaaaccatgaaaagagaaggctccaaaattgggagaaaaaatgatcgcgaatcctctgcgaaaaaaactgggctcgatatgaatgactctccggaatcggtaaagatcacatctccagaattggtcaggaagatcacgtctccagaaatgataaagaagactgtgtctccagaagtagtaaacaaggctggatcgccagtgttggctgagaaagttacgtctccagatgttttgaaaaaaattatgtttccagcagcagtaaaaaagactacatctccagaaatcgtacttccagaaacaacaaaaaaagtcacatccccagaagcaatagagaccacatcaccggaaccaatcagcaaatccgcatttcaaaaagcaatcagcaaatccgtacttccagaagcaacaaaaaagaccacatccccagaagtgataagaaaggccaaatctccagaagcaataaggatctcatcaccagaatcagtaaaagccacgtctccagaagcaataagaatctcatcaccagaatcagtaaaggccacgtctccagaagcaatcagcaaacccttctctccagaagcaataaaaaaggctacatctgcagaagcagtagagaagactgcacattcagtagtgttaaataatgatatgtttccgaaatcgattagtaaaactgcaccttcagaagcgttaagggatactggatccccggaagtgaaagaaaagaacgcgtctccacaagttttaaagaagatcatgtttccagtggcgattagtaaaatggcatctccagaagtgataaagaagactgcagctacagaagtggtaaaagaaacaaatcatttaccagaaattaataattcgtacacggaaactgctactttaatcgaacctgtcaatatgaatacagaagacatggccctcaacacttcgagaacaaacgttgatccaaatccctcatttaaacaagaggaggatgagaagaaaaaaaaggtttttaaccaagtaaaaaccactcctcagataatcggtaccgaaaaagaagacgacgaagaagacgattttaataacgttcgtaatgattacaaagcaaataatgtagctcagacacacgttgcccaagaagatttcaatgaaatacacaacggctataaggcgaagggcactactcagacgaacattcctcgggaagatttcaatgaagtacccaatagtttcaaggcgaaaggcactactcagacacacattgcccaggaaagattcaacaaagtacccaacggctatgaagcaaataacgcaggtcaaacatacattacccaagaagatttcatcgaagtaccccaagtagccagtggttacaaggcaaacggcaatgctcacacacacattgcccaagaagattttgatgaagtaccaaacggccataaggcaaaaggcaatacccagacacgtactgccgaagaagatttcaatgaagtacacaatggctacgaaccgaataatataactcagacacacgttgcccaagaagatttcaatgaaatacacaacggctataaggcgaaggtcactactcagacgaacattcctcgagaagatttcaatgaagtacccaatagttttaaagcgaagggcactgctcagaaacacatagctcagggagatttcaacgaagtacccaatggttatggggcgaataacgtagctcaaactcatattggcgaagagaatacacaggtgaaaaaatcaaaccatgtgccaaattcaaacaataaattggtcaacggagggaagccaaagttgaatgatggtgctctcaacagtgttagtgtgaggagtgtttcaggaagtatggcacatcatgaagaacatgacagtgacgacgatgattccagttatcaatttatccccatgagacatgaagggcaacagcgaaagcaagctgtaatggatgaaagcgaagaggacgaagacgaagacgaagacgaagatgaagatgaagatgaagatgaagacgatgacgaagacgacgacgaagacgaagatagtgattttgacgtagatacttttgatattgagaatccagataacacgctttccgagttattgttgtatttagaacatcaaacaatggacgtaatatccacgattcaatcgctcctgacatcgatcaagaaaccacaagccacgaagggcaacctgagaggagagtccaacgcgatcaaccaagtaattggccagatggtggatgcgacgagcatatcgatgcaacaaagcagaaacgccaacttgaagaagcacggagattgggtggtgcagagtttaagagactgttcgcgtaggatgacgattctatgccagttgaccagcgatggggtgttggcgagggatgacaacgacgaggactatgccgataagaacttcaagcaacggttagcagggatcgcgtttgacgtggccaagtgcacgaaggaattggtgaagaccgtcgaggaagccagtctgaaggatgagataagttatttgaattcgaggttgaaatag

SEQ ID NO: 4665 - DNA, 1005 bp, Saccharomyces pastorianus
atgtgctccaacggtattgccaggttcccgggctcccacatacaggccatcgccaggcagttgatccgatcggtgtgtttcttgcacgatttagggataatccacacggacttgaagcctgagaatatcctgatctgcgacgaaacccacatcgctcagaatttgcccccaaagactatccagtcactaagcaaaaggcgtcgtgaggccagtaaagggaaacacaaaatcttgaataacccagaagtcaaaatcatcgatttcggcagcgccatcttccactacgaataccaccctccggtaatatccactcgccactatagagctcctgagatcgtgctcggcttgggctggtcgttcccctgcgatatctggtctatcgcgtgcgtcctggtcgaactggtcattggcgaatctctttacccgatccatgaaaacctcgagcacatggccatgatgcagcgcatcaacggcacccccttcccgacagacatcatcgacaagatgttctacaaatccaaacacaaactgggaaactctccatcggacctgaactcgaccgtaataaagcacttcgataagaaatcgctgactttacaatggccggaaaagaacaaacgcggcgaaaccgtaaccaccgaaaaatcaatgaagagagtcttgcaatcatgcgatcgcctagacatctacatctccaagatcttgaagctggattacggtgacagcatgagcatcaattggaacctgccggcggaaaaaaattggtctttgataaattcaaaaatgctatggaaaaagcaaatacactcttcctccgctgcagccacggacagactcgacaaggaaactttcttgttctggtactggttcatcgacctgctgaggaaaatgttcgaattcgacccgacaaaaagaatcaccgccaaggacgcgctggaccacgaatggtttaacctgggcatactggatgacggtattgcaaattacaataatacccaaggttag

SEQ ID NO: 4666 - DNA, 3771 bp, Saccharomyces pastorianus
atgagtttccttgggtcagacgccagtacgactacaagaataaaggatagcggcggccacgaagtgccgtgcttacagcccatcgatgtggtggaatgcacttatgagcacttcagcgactcgcgggacaagctgtctctgagattgggcgatttagtctacgtactcaataaaggcactaatggctggtgggatggtgttctcatacggcattgcgccgacgatagcagccccttgatgttggatagaggctggttcccttgttctttcacacgcactattctacatgacccacgcaagaccttgtctgccgctggcgagttgggaaggtttcagtccgacattgacgtagatcccgatttgtcaggtcagtcggtcttaatcctaactctagacgagtttctggattattgtaacgatatcgaattccgagggccactggtctggtgtcccacccccacatgcgaacacggccagaagggtcacgagttattatactacaatcaggacttgaacgtctactgcaccaagctaccgtgcttaccgcagggcccagaacctgctttgggtttaccttcttcttcctccccaatatccgcttccaaagatacccgtaagaaaatgcccatcatgtgtgccaccgatttgttctaccttaatgataatgatgcccagagttggacagaccttactcgttcgatacactactatactaatctaacagaactggccctgctgagtaacgataggaaaggttttttagcctctttagatttactctccgtttacataacttatatccagatgactttcagaaatcttcatttagtggataataatttcaaaaaaattctgaaaaagctaatttccacactgtctaaattttcaataaatgcaaacatttggttcaattccactccctttaacgaaagagagagcattgttgcgcaggacgaatccaggaaaaatgatccgttcctacaatcggttttaaaaactttccaaaactttcattttctgcagcgtttactacacttcatctcggaacataatgagtttaccatactacctcaattgtttcctcgttttttcaaagattcgtttaatacaatctcatggaataatccgtttttgcagaagaacttcactcatcgtatgtctcatgatttacccaaggagatggttaaagccgttgcgggcgcttcaggaatagtagtggatagtattaataatatgccggtgtccagacaggacactccatcttcatctgcatcttcttatcacatgataagcgctacttcccaaagaaggagaagaagtacagctttctctaatgtatcaagaagttccagtgaatccgacacaatatggtctaaaaggagaaaaccgtaccccataaatgaggaaaccttaaatctattacaatccaggaaaacgcaacttgatatcaaattgagtcatatggttcaaagcgctaacgactacctaagtaatactgttaatttctcaaaaatgttgaactttgaaatgagttttaagacctataaggaagttagtgaaacggttcctattattgatattttggagaacttggatttgacaattttcataaacctgagagaactgggtgacaaggagcgagtctttgacgaagacgtcgatattgataatgaagataaagagtttttaaaccattctttatcgtcactatcacacattttatcggactattttgacatgaaacaatactttcatgatgtagtagtaaaatttataatggtcactcaacatttgactttagaggatccgtttgtgtttcatccaatgcaaaacgatttgtccactgggtattacgaattaatgactttttcacctctatcaaaagaaactattaagaataggaagaagaaacacgaccaatttgttcaagaattagaggaaaacgataactatcaacaagacgatgataatgttctacttttcaacaacttaatcaaccaagatgaagattcgaatgacctgagattcttcaatcttttccatatcttcaaaaattgctgcgacgattattctgatgttcttaaactagccattgaatcagtaaagcaattgattctcgaaagggaaaatatgctaaactatgctgctagaatgatgaaaaatgatattacagagttgttgttacaaggtgaagatgatggatatgaagcttacagtgataggggggctaatgacaagaacgaggctaacattgtttacatggattctaacactaaaggtgacgctgaatggcaaaaaggccaaacccttctaccgcggtatttgcaacgtgattttgataatgagttgatttggagctcaaataataggatcaaaggaggtactaaagatgcattggtcgcttatctaactaataatgaaaaacgggatacttggttcaatatcacatttttgatcacttttagaagtgttttctcaactacagagttatttagtcgtttgatcgctcgatataacttggtcccgccagaagatttatgttttgaagaatataatgaatgggtgacaaaaaagttgataccggtgaaatatagagttgttgaagttatgacaacttttctcaggcagtattggttcgcgggttattatgagcccgaacttgcgagtttgaatttgaataattttgcgcaactagcagtaaaggagaatgtgcctgggtccatggaactcttgaatgaaatcaatcgaaaattcaaaagtggcgatatgcagggaactactccgcttaaagcgcctgatccccaggtcccacataataatgttttgctcccttcttactctatcgcggaatccattttggctgttgatccggttgcatttgccactcaattgagtatactagagcatgaaatatattgtgatataaccattttcgattgcctgcagaaaatttggaaaaacaagtactcgaaatcttacgattcttccccgggcttaactagatttatcaactttgccaataatttgacaaattttatatcatattctattgtaaaagaagacgatataaacaaacgggctaagctgctctcccattttattttcattgcagaatattgtaaaaaatttaataacttttcatcaatgactgcaatcatttcagcattatattcttcacccatttatcgtctagaaaaaacgtggcaggtggtggctttgcaaactaaggacctgctacgctctctgaatactttaatggatcccaagaaaaacttcataaactacaggaatgagctgaaatctttacatagtgtaccatgtgtaccatttttcggtgtttatctatctgacttaacttttacggattctggtaatccggattttctagtcttagaacaccgtttgaaaggtatttatgaagaaaagaaatacgttaatttcaacaaaaggatcagacttgttgacatcttacaggagatcatatatttcaagaaaatccactatgatttcgttaaagatcagacaataattgaaagcatatgcaacacactagaagaaatccctcacatcgagaaacaataccaattatcattgatcattgaaccaaaacctaaaaacaaggccactgcgaattccgattcaagaggtaaatcacaacagaagttcgacgaaaacgaccctggcgaagaaaaagcacccgctaagaaggacagattcttaaaatttcaattgggcaaaacaaggaagaaacccacaaagctcttcaaatag

SEQ ID NO: 4667 - DNA, 1833 bp, Saccharomyces pastorianus
atgcacacctattgtttagaaagattgtgtacgttttttaatgcacggggtcgcaaatcagagtatttacaatatatagacacatttacggcaagtcacacgatgggtgcagccacggttttgaaaagggctaggaatttactagcaacgttcatagtatgctgctttatggcggtggtgcttgttctggcgctggcacgccatttcatcaacgagcacagggataccaggagttcttcgacgcggatcaaggtcagcgaaggcagcaaaagggccatgcaccatgaccacgtcttcacgaagaccaatgcctactcaacgccattcctcgatctggagcacgacaagaaaaacggcataatctacgaccacacaagaacagtgatacgcaaaaagaaccgcgacgaggagtcgctttctctgcacaagagccttttccacaagtttctgaaaaggctcatcttccggttcatcgaccaagacaaagatgacgagcaagtgacgcagggaaagtttaacaatagcaacaacgaaattgccaaccatgaaccgatctttgagaagatccccgtccattccgacaacccattgcagaagctaatcctgtcggaggacttggcgctggtgcccgatctaaactactatttcaaccagtacaatattcacatagaggagttcagaatagagactgaggacgggttcgttatagacctatggcacctggtgccgaagtacaccacggtagattccgagaagtcaagtcagaggaaaaggccacccattttgatgctgcacggtcttctacaaagcagcggctcgttcgcatccaacggccggaaatctttggcgtatttcctgtaccagtctggttacgatatttggttgggtaataatagatgcgggttcaagccgcaatggaatgatgcgaagctatcgaccccagattccaagtggaactgggaccttcgcgaaatggtcaagtatgatttgactctgctgatcgataccgttttggccaagacacaatatgaaaagcttactttgatctcgcattcccagggcaccacgcaggcgtttatgggcctggtcaatgaagatgagtttttccctcccggatcagggactaaagagtcgttctttacctcgaagatcgccaactatgtcgcgttggcccccgcagtgtatccaggccccttactaaaagaaaagttgtttttgaaactcatgacgaagggaatcgacaatccttggttcttcggggaaacatctttcttcgaaatcatgatgatcgtgagaaacctgtgcatcggtgaaagcttgttttcctttgtgtgttacacgatcttcaactacctatttgactggaacgataccctctgggatatccccttgagagatcgtcatttcttgttttctcctgtgcatgtttcggtgaaattgatgcagtggtggctgtctcctgacccgaataaggtcagtttcaagtttggctcgcacaagatgttccccgataacgtgaagtggttttcaggcgcatcggcgactccaaatatttacctgttcgtccccaagcaagatagactagtggatggagaaagattgatcaatcatttcgttaatgtcgaatcaagtgtcaattacaagatctggtacattgacgagtatgcacacattgatgtgctgtgggcacatgacgtcatcgaaagaatcggtaaaccaattttacagaatttgaataattactatttcaataaggagtctaatgtctttgaaagcgattgttcggacacggaggtggagacggaactagaaatggttgaagaaaaggcttga

SEQ ID NO: 4668 - DNA, 639 bp, Saccharomyces pastorianus
atgttattactaaccgcgtgctctcaaatttctacaggtgctatcggtaatttctcggtgactatcaccggtacttttgggttcgaccactatgaaacagcattactgcaattgcctattggtgccattacggctatgatcattcttatcacaacccaaatgttgtcttgctggggccgtatcactctcataaccacttctatgtacattccagctatcataggttgtattgttctcatcagtttaccattgtctcataagatcggtaacttgttcgcgctgtacttgctttacagtggttcatgtgtcattaccaatatttacatctggaattcatgcaatacctccggttatacaaagagggtgtttagaaatgctatcaccatgattgtatacaacatttcttgcattgtcgctccacagatgtttagagcatattctgctccacgttacatcccagcaaagattgccttattggtcactcaatgcgtttgtgttcctttacaattatacattggttacatttgcaagaaggagaacgaaaaacgtgacaaggaacaagaaggtcaagaaaaaaagaggtaccagtttttggatttgactgatattgaaaacagaaacttcaggtacatttactaa

SEQ ID NO: 4669 - DNA, 882 bp, Saccharomyces pastorianus
atgtcagaacgttccgtcgatattgagaaaaaggtcgctaccagcgacagctgctctgtgactacttcaaatgtcaacgtagaggacgcagatgttgctttaagatttttgaagcagaacggtctcgatgaaggctctacagtagtcgaggatgataccgtggcgggcgaagaggccaacttttatggtgctcatgaactgaaaccggaggtgctgaggaaggtggatctttacattttgccctttttatgctgtacgtaccttttgatgttcttggataaggctctactgaactacgctgcatccatgggaatcaaggaccatttgaaaggtgacgaattttctaatttgggtaccatcttttctgccgcttatattttcatggaacctgtggtaacgtacttgatccagagatttcctatctctaaaatcctgggttcgtttattaccatctgggggatcgtgttagcctgccattgtgcctgtaagtcgtacgcctcactgatgattgtccgtactcttctaggtctctttgaatcctcaagtgctgttggttgtatcgctattagcggtatgtactatactaagtctgagcagagtgcaagaatcggattctgggctacacaggctggtactggttacattgtgggtgggctgatttcttttggctttttacattaccacggtacttctttcacttcttggcaaattatgtttttggttgttggtttggtcaccgttgcattcggtattctgacgttcatatacttgcctgataacgtcactaatgcttggttcttgaacaaagaagaaaaaatccaagtggtggagcatatcagagctaaccaaacaggtttggaaacaaagaaattcaaaaagtaa

SEQ ID NO: 4670 - DNA, 300 bp, Saccharomyces pastorianus
atgaagacggttcattacaaagagatcacctaccaacaatatctccaattgcaacctgatcaacaggaaaaatacctggcactctgtcaaagagacttcgaacgagagactgaaaggatcgcatttgaacgtcaaggaggtgtgcctggtattgcaaggaaagtagcacaagaggaagtcgcttggttcgatcgtgtcacaacgtggtcatatatgaatgcatatattccaaaatataggagaaaaagaaaccttgtcaaaatcaatatgatgaaaatacccactgtacaagaatattaa

SEQ ID NO: 4671 - DNA, 1389 bp, Saccharomyces pastorianus
atgagtcagtgtggtcggcgccgtttaccctgttcttggttggcacacatgtatatattacgcatatgtatgtttaaagagctcttgctaagaaacacaaataagccaagaacgcaagaaagtaataacgcaatgtccgcctccctattcaacaacatcgaactgctcccccctgacgccctttttggcatcaagcaaagatacggtcaagaccaacgcaccaccaaggtcgacctgggtatcggagcctacagagacaataacggtaagccatgggtcctgccaagtgtcaaagccgcggaaaagcttatccatagcgacgaatcctacaatcacgagtacctcgggatcactgggctgccctctttgacgtccaacgccgccaagatcatcttcggtacgcaatccgccgccttgcaggaggacagagtaatttcggtgcagtcgctgtccggtactggagcccttcatatagccgccaagttcttctccaagttctatccagacaaactggtctacctgtccaagcccacctgggcaaaccacacggccatctttgaaaaccaaggtttgaaaaccaccacctacccctactgggccaatgagaccaagtccttggatttagacggcttcctgcgcgccatccaaagcgccccagagggttccgtctttgttcttcactcttgtgctcacaaccctactggtctggacccaactaacgaccaatgggcccagattgtcgacgccattgccgccaagaaccacgttgccctattcgacaccgcgtaccagggtttcgctacaggtgacctggacaaagacgcctacgccgtgcgtctgggtgtggagaaactatccacagtctctcccgtctttgtctgccagtcgtttgccaagaacgctggtatgtacggtgagcgtgtgggttgtttccatctagcgctcacaaagcaagcccaaaacaagaccatcaagcccgctgtcacctcccaattggccaagatcatacgtagtgaagtgtccaatccacccgcctacggtgccaagatcgtcgctaagctgttggaaacaccggaattgaccgagcaatggcacaaggatatagtcaccatgtcatccagaatcaccacaatgagacatgctctaagagaccacttggttaagctggccaccccgggcaattgggaccatatagtccaccagtgtgggatgttctccttcaccgggttgactcctcatatggtcaagagactagaagaaacccacgccgtttacttggtcgcctcgggcagagcctccattgccgggttgaaccaaggtaacgtggaatacgtagccaaggccattgacgaagtggtgcgcttctacgctactgaagctaaattgtaa

SEQ ID NO: 4672 - DNA, 1497 bp, Saccharomyces pastorianus
atgatggaacgtgaacaaattgtagaatatattcaggagacgcctattattcccagaagggtcattcaatattcggttccgaggcaaaccatcgcgaagcctagccctcacgtcgaaactttggtggcatctaatactttacaggacttgaatttgtcccatcatccggtcatccatgatcctttgcaaggtaaagagtattcaactcaaaaatactcaggaaagacgaacaaccaaagattaagtttcgaggagcatcaaaatgagcaatgccaaaactctattgggttgattaaaagagtgaacacttttttcaagaagaagtcgtcatcgagaaaaaatagtatcaaatcaactggcggtgtcaagccagatgatgaaattcagattccaaaacaacatgaaaaaaaagctgatccaccaccagcacagcccgctttaaggaacttgcctaaaaaacatgaggaaaatagtaaaagacatggcctgttttcttttgaagagacacctcccgtggaagtgccgaggcaggagtatccaaatgccaagaatttagcgccggatacaacatctcttagaagaaccaaatcgtcatctggcagttttgtctcgttagaactaagtaaagcgaagtttgctactttggagcctgcgccgttcaagaatcccactgaaagacaaaccccgcaacctcgtgaacaaaggaatgattctgcaacgcaaaacccaaatataacctcaataaaggaccaaaaaaaaaatcttcaaatggaacaaaacaggctaatcattgaaatcatacaccttgaaagcctactaaacgatcacaagaagggtgttccctacattactaaaaacaaatgtgaagaaaaatcaccccaaaaagataactccaccttggcaagggcaccatgctcaacgcctcccgatactaaatccctaactgaaagagccctttcctcttctctcagacgtgattctcttagcgacgggcccattatcgatctcgaaggttttgaatttgaaaagcatgatgatcctcttagggataaatggaatgctttgcagtctctggaaaacatctttgagtccaaattcgaatctgcgcccaaaccaatccagggagacgaattcgccgcgattaaagaaagaagatttcaaatagcgaagataagtaatctctgccttcaggtagaagaatctatcaaaagaaggcaagaattggagggcaaactaagagagaattcgcaaggtactgacggcgaactgcttttcttgatgatggaaagtaaaagaagacaaaaaactctttcagtagtacagctgctttccaagataatcagggagaaatccaaaaggcttaccgcagaagagcaaaacttcgtgaaccaaaacgaggtgaaacccctcatttcagatctttcagtcaagatcaataggttgaattccatcctagagatgaagaacacttgtatcagaaagctaagtaatcaataa

SEQ ID NO: 4673 - DNA, 624 bp, Saccharomyces pastorianus
atgaaaaccgccaaagagatagagcctagtgctaccataaaccaggatgaaattcctaaatccaaaatttttctatttgttgaaaaactatcaataatctctttctccgtttgttatggagtagacgttatgacgccatcattatattatctaactggaaagtacccaaaggtcattggctttatgcttgtgcagtctgccttggtttgtatgacgcttctcataaacctggtttatcttttcttattatggagaaatggactacttaagaagcagaataaaagagagccaaaaagatgttccaaagtgtcatgctctcaatgtaatgctagaaggcaatatccaagatggtttaagttgaagcatttgctactatcgctagcaacgctgacttttggaatttactcacttatcaagatagacttcttttttgagactgaccaaactgttgacttataccgactatcgcagctattcggctggcaactcagtgcaatttgtagtttcatccttcttaccttttatgggaaccagttaagtttacataatggacctcttcaagtgaatgacgatgacgatgaaaagaaagcagtgcttggaatgagagcggatcaacgggtttag

SEQ ID NO: 4674 - DNA, 519 bp, Saccharomyces pastorianus
atgtatgataatagcgactcagagcaagacacaccaatgcccaaccatagtggtatgttagaaattatcagtaactgtttgcgaaagattgaaaccaagtactggaaccaccttttcactaatcttaagatgacgccaagagatttattagctttatgcatagaagagaacgaggccaagatgcttggaatacttcttctggtgtttttgaactacgatgagaaagagatggtaaatgacttacatttcaggaagccagaggtggaaacaaaagacaacgaaaccacagatgattcatcgacaagatcttcagataaatctgttacaaacgtattaaaggatgaagaattgatgctaaaagttctagagctcctggtggcaagtgctgcaaatgctacggacccaatgaaagctaccgattcgtgggacatgtgcttccaattgatccgcttacttaaggaattggacaaagaaaacaatacgcgaatggtacagaaggctctcgagaggctcaagtga

SEQ ID NO: 4675 - DNA, 2223 bp, Saccharomyces pastorianus
atgcacttatggccgattagcccgcctcaattgcttaaaataccgccacgcaacacgaaactagacaatggccccataaacgacgataatatccttcagtcaatggctctacctcaggccaatgtcgttatcatactaactccaacgagagtgctcatttacaattttaagcctatggcgttggttgcaagtcatgaaagaactacggcttctctcaaagaatttggtgaaaacaggtccatgaaaagatctgctccatataatgatatcattgagggacttatttccaaaaaagattcacaatacttattgtggcatcaggggaagcttgtgttttacgttatgactgacaaaaattttcttttgacctaccaaattctaaaaaattgcacaaatgagataattttcaaagagtacggaatacctgttatagaacctcttttactcaacgaagaagaaatgaacagcggcgaatatgatttcaatacagacgatgatacacttacagtgtttgacaagaacaactcttcaaaagttatacagaatgggtttggtataactaaagagaagggtttcctacatttcctttccaatcaggaaaatatcgatgaacttccagtaaagaaattggaacttcgtttaaaagttgtcctgaaatttgattatgaaatcatagatatgattggcatcaagacgttttccaaggttggagatgggcgttatgaggaagttttgatagttctctttccccatggattgcaattattaacaatattggactttaaggtcagtaaaagttcgttagttgaagtaaagaacggaataaagaccatagtgtgtaataaacaactaatggttctatcacatgatcccgaggaaaaacaaaccatagtaagcattatagacatagacaagcaagccatagaagcaacaccattgttagacattccggaagaaccgttgacgtgtttcgaagttaacggaagattattgattgttttcaaagaaaagatagtatgctttgattcaaaaattaaaaaaataagctattcttggaaaccgccatttgtaataaaactttgcggtaaaattaatagtgaaattttgctcctcatttctgaggataataggaacattcatttttatacggaatttggaaacctcctgtttgccacatattttgaccaggacgactatgatgaagataacgatgatgagaacgttaaaagtgaagataaaaaaaaggtggccaagtatgaaatatctgattttgcctacctggacaaatccttgataacagtatctcgttctggagaataccaattttggaaattatgggaagaaatgaaacagacgcaattcgatttcaggaaccccaaatcctacgtattgaccaatacaaataacgatataatcatatattcaccagtggccagttcctctttgaacaacgataacttacaagtcatcaaacttcctacgaagactttcaataatcatatcgctttagtaaagattaactcctctttgaaactatgtgccacttatgtgtcgaacaaaaatatattgcttattcaaaatttggaaaccaatgtatggtctagttttgcagaccaaaatgtcttagatttgcattggttgggtgataactatttaatttgtcatatgaaaaatagcgatggctcaacaagtttggaatgtttacgaattccgcttcaggaggcgaataaggacatagaattgtcggattacattatctgggaatacaggattccagaaaatacgactgtgttcagtgtacatgttaatgccctatttcggtacaagctgttgaaaataaaatccaaggacaacgaaacttcagaaaagcaggcggaagctttatttaagacagcagaggttatcttagttactgatacccaaacaattgtttttgatgtaatttctactgtccacccaagtggtttgaacctcatcaaaagattttatcaatacctaaaaatcagtattccaattgatgtacaacctaacaagattgaatggataacgaatatgaaagatggtttgttattttttgccgataggaaaatcatgaaattatgcaaattgaatggaggaggctggcaaaccttgactttactaagtaacttcgaaagaatagttgatgttatcaagacgaaatattcctggtccagggcctcaattacgtcatatactctttag

SEQ ID NO: 4676 - DNA, 639 bp, Saccharomyces pastorianus
atgatatggaccaaagaaagacaaagcctgttagaaaagatgaataacacggaaaattataagatcgaaatgatcaaagagaatgaaatgttaagagaacaactgaaggaagcgcaatccaaactgaacgaaaagaacatccaattgagatctaaggagattgatgtcaataaactatctgatagggtaatgtcgttagaaaatgaactcaagagaatggagattgaactggatagaaataaaaaaagaaacgatacaaacttgcactcggcgggtacagtttcatcgtactccataccttcttctacggtatcaagcaactacggggtaaagtcattatcttcctcaatgccgttgaaagaagaggaagatgtaagaaaagaagacgttaacagtgaaagacgatcgagcgaatccatcggggatttaccacaccgtgtaaactctctaaacatacggccatacagaaacaacagctctgggataggaggcctctccgaagatttggacattgactttaacgatagttttgcctctgaagaaagctataaacgtgctgcggcagtaacgtctacactaaaggccaggattgaaaaaatgaaggccaaatcaagaagggacggcatgactaggacatag

SEQ ID NO: 4677 - DNA, 1923 bp, Saccharomyces pastorianus
atgctagtctctgcaatttcccttcaggctttcgagacaaattgtgaactactgtctaattttacaagtaacaatactaccgtactcattagcacagattttggttgtgagttagagcccgtagctatgagttactttggaggtaaatgtaagtgtgttctctccatttcatgcgaggtcgagtgcagacagctatcacttggctcttatgcattggtcaatgacgaccaatgtactattactttggggttaacatactgtgacgagaactttgaaacagacccctgtattttggaaaacacaaaggcagctttattggaactaaagggatccagtcgttcaaatgttaataggtttcttttggagttaaatgttacgaaatggataaagtctcagttgattttagattcaaaacaaatggccttgaaaatgtgggaagtgattattccaaagatttctttaaatattctttccattatttacgaacaatttgattatgacaaaatgttagaaaacaaatcaacggagattattttcagagacctagttcaagaactatttggaatttgctttgcacaatgtagtagtaaagtgactaaatttttacaagtaacaagccagggggaagaggaaataaatttttataaaattgtcaaatattgtgaaagtaagaaattgcaacttatcaattctactgcaaatgaacatcctgaatatttatctttgccttttgaaccatattgcttttatcaccggttcgaatatccggctcaaatccttcttcaccagccgattatcctggcaaagaagtacaatgttccatgttcaaatttaaacttcctgtatggattctacacgagattgctgacactaagtggactatcaataaacggaggccggtgtgaacatgcactgtcaatgctggacaacagaattggcggtggcatgaatgttgctgcgggaattaacagtggtcaagattttacagatggagataataaggatgaggataaaagcaaaatgacagtggacaaaaatactaaggaaggttcctatataagtttaactcaacgattttccatggtaagtccggtgagtggcagtgatcctgctttaccggcagacctaaaaacactatatttgggtgcagaatacattagcaattgcgacgcgaatttatgtagtgacgaacaaccactaaagtctcctgtcagggtggatatgggttataaagatcagtatttgacagataatgtaagacatacattcgaagaggcatacttggcaaatgaagatgacttttcctgtcttggaattgacgatagaaacactacgaaacccatcaaacccttagaaaaacttggaataattgctgtgccacattttattaagcggttttccactaaaagatcgagtaaagataaatcaaatgctatgaagagaccctacactacaagcagtttagagctgcaattgaggtctgatcatttcacgttcgctaaagaataccaagatttacatagacaattaaattatgaagcaaaaccgaagacgcagacagaactggattcgaggcgtcgaaactacgctgggctggaatcgcaaatgtggaaaattaaacaccgattcaatatccacaggggagcactaccacgccctcaaactaacccatatgagatactactagatcacatagaagttttgaacagtggcaacactggggatattttgagatttaccacaagtagatacggtggtgttgatacgtacgattctatcttgaaagatcagtctaagattatgagcgttttaggtaagcgttgtgcctactcacctccggctttgctcaatgatcaggatcatgatccagattacgatcacggccacgctcaagatccagaccacccgagtcatcaacactaa

SEQ ID NO: 4678 - DNA, 138 bp, Saccharomyces pastorianus
atgaatttattcttcgtcttcttcttcttcttcttctggagtgacttggtagaaggccaatctgtattcgttggtcttggtggagacgaatctgatccagtctctcaattggttcttcttcaagtacttcttggttaa

SEQ ID NO: 4679 - DNA, 996 bp, Saccharomyces pastorianus
atgactcctaagagagtagcccaattgcctgttcataatggagccacattgcctccacaagagataatcgatcttttcaagattacattcctcgaacaactgtaccccaaagaccaggacgaagaaaacaccccattaagtgagcagatacaggcagtgaaaactgacctttataatagagactacagtgccgctttcagtaatgacctgaaaagaatggcgtattgttgtcgttggtcaccctccagagccacaagttatgcttctgtattggctcattttccggaggttttgaagatcatcagatgtgaaactgaaagccaagactcaaacgtattatgcgttggaggtggcgctggaagtgagctggttgcattagcaagcatatttactttatcaagagacttttcgtccaagtttgcctctgctttgaaaattagcaatgaggaaaggaaagagcctgggaaactgaacatcgaactagtggatattgctgattggtctaccattatcggaaagctaacggccacgataaaatcgaagtggttatacgacggccgggaagcagaagcattcaatgtcaacttcgtcaacagagactgcctgcaaatgacacaaccacaggatatcaagatgtaccaaagccttaatctaataaccctattgttcactacaaatgaattattcacacagaagaaagtggaaagtatcaagtttttacaacgcttgaatgagaactgtgccccaggatgccatcttctcatcctagaaagcgctggtagttactcacacatcacgatcaatgataaaaaattcccgatccaattcctcatcgataccatcttagtgggtaatagaaaagacaaaaggacaacgagcccatggtctttaatatcagaaaacgacagcatctggtacagaatggatccaaagctcgactattctatcaaattagagaacatgcgcttcttctaccgtctctacgtcaagaactaa

SEQ ID NO: 4680 - DNA, 705 bp, Saccharomyces pastorianus
atgagacgtgaatataacgtagaatgtgtcaccggtaagccacaagtttcttatagagaatctatcactattcctgcagattttgactacactcacaaaaaacagtctggtggtgctggtcaatttggtagagttattggtactctatcgcctgtagaagatatcaccaagggcaacatatttgaaaccgcgattgttggtgggcgtatcccagataagtatttagctgcatgtggtaaaggtttcgaagaagtgtgcgaaaagggaccattgattggtcatcgtgttctaaaagttgaaatgttaatcaatgatggtgctattcatgcagtggattctaatgaactatcgttcaaaaccgctactatgtctgcgttccgcgatgccttcttaagagcgcaaccggtgattatggaacctatcatgaacgtgtcagtgacatcaccaaacgaatttcaaggtaatgtcatcggtcttttaaacaagttacaagcagtgatacaagacacagaaaatggacatgatgagtttacactaaaggctgaatgtgccttgagtacaatgtttggtttcgctacatctttaagagcttcgactcaaggtaaaggtgaattctcgttagaatttagccattacgctccaacagcacctcatgtacagaaggaattgatctctgagttccaaaagaaacaacttaaaaaatag

SEQ ID NO: 4681 - DNA, 1575 bp, Saccharomyces pastorianus
atgagtgttcagacaatgatgtgggtgcctcggagagtggttcgaggcggtgtccctttttttgttaactcaaagctgtgcttggggctctcaaggagatctttccacgggagctcaataactcgttctacatacgaggaggaaaaagttttagtggatgaaataaagcagcagctgacacctgccgacatcgaactatccaagaagctacgtaacattggtatatccgcacatattgattctgggaaaacaacttttactgaacgtgttttatactatacaaaaaggatcaaagctattcatgaagttcgtggtagagataatgtgggtgcaaaaatggattccatggaccttgaaagagaaaagggtatcactatccagtctgccgctacttattgctcttgggataaaggggacaagaactaccattttaatttgatcgatacgccgggccacattgatttcactattgaagtggagcgtgctttgagagtgctcgacggtgctgttcttgttgtttgtgctgtttcgggcgtccaatcccaaaccgtaactgttgatcgccaaatgcgtagatataatgttcccagggtgactttcattaataaaatggatcgtatgggttcggatcctttccgtgccattgaacaacttaactcgaaactaaagattcctgctgctgccgtacaaatacctattggagcagagtcgaccttgtctggtgttgttgatctaattaataaagtagctctttataataagggtgataatggggagatcattgaaaagggaccagttcctgaaaagttgaaacccctaatggaagagaaaagacaactgcttattgaaacgctggctgatgtggatgacgagatggcagaaatgtttttggaagaaaaggaacctactatagaacaaattaaagctgctattcgcagagccacaattgccagagctttcacaccggttttgatggggtctgccttagcaaatactgggattcaacctgttcttgatgctattgtagactttttaccaaatccttctgaagtgttgaatacagcattagacgtgagcaagaatgagactacggtcaacctagtccctgcggtacagcaaccgttcgttggactggcattcaaattggaagaaggcaaatatggtcagttaacatatgttcgtgtctaccaaggacgcttaagaaagggtaattatatcacaaacgtgaagactggcaagaaagtgaaagtggcgagattggttagaatgcattccaatgaaatggaagatgttgacgaagttggatctggtgaaatatgtgctacttttggcattgactgtgcttctggtgatacattcaccgatggtagtgttcaatactccatgtcatccatgtatgttcctgatgccgttgtttctttgtcgattacaccaaagtctacggatgtatctaatttttcaaaggctctgaacagattccaaaaggaagatcctacattcagagtgaagttcgatcctgaatctaaggaaactattatttctgggatgggtgaattgcatctggaatttacgtag

SEQ ID NO: 4682 - DNA, 2091 bp, Saccharomyces pastorianus
atgtggggggacagtatgcgcgagcctggtatgaccatggacaatgaattgaaggcagtgaagccgctgatggaagaggatggtgtggacggtgcgaggagaataaataagggtatgggcttccagaagtcttctaccgagcacctattgatttcgcctggcagagacggctcagtaccgttgaatgggttgaagtcatcgcctgcagatccgcacttgtcagatgtgaactctattctggaaaactcccgtattggtgatgggacggcgttgacgtctgtcaataatctcatcatggccacgtcggcgaatggtgagggtgatggtgatggtgatggtgctgatggtgatagtaagagaccgcctatctcgaattcttcgtcccggtcgtcattttttgacacagttttaagcacattttccttgaaatcagcttcacaggatacagttaccaatgaagccagagatacagaggttcggttcgcctccaaggaggctaatgagaagttccatcaaattttcaaatcgataccttctaaggcaaagcttgtcggggactatttctgctacttccacagagaattcccctaccaaggcaggattttcctttcggacacacatatatgtttcaattctactgtactaaactggatggcaaaggtgcaaattccattgaatgaaatcaagtacttggacaaggtgaccacgaattcaggtgccatttctatagagacgttaacaaacaaatatacattttccggattcatgtcaagagataaggttttcgaattgattacacgcatttggtcgaaggagaatttgaccaagatcaatgatgttatggaggtggatgaaaggatctccaagacaaagggcatgtcgccggcgccctcctccatattcaacagtgtttctacaaatgcatataacgatttcatatcgacaacgactacagaacccacaagcagagcttcgtacatgagtgagaacgacatgctcattgaagaagcaatcaggtctgtggacgattatatggggacgccaaaagcatcttcatcttcaccatcattgtcgtcatcgtcgtcgccaccatcaacatttggttcttcaacaacatattatcgcaggcccgtgtatagattgaagcaaaatgccccattccagtatgacgggccctttcatgtggatgaaacaatggacttcccgtataaacccgaggtaaacaacgaatatgtgctagtagaacgccaattcaatgttccaccaggcctgcttttcataatgatgttcaatgaggacaatccaatttttgaattgaacttcctaaaagatcaagactcatcgaatatttcgcatattgggacatttgaaaaagtcaacaaggacggacagcattacagaaatttccaatataccaaacaattgcattttcccgtggggcccaaatccactaactgccaagtgacggagattcttttacattgcgactgggaaaggtatataaacgttttaagtataacaagaacaccgaacgtcccgagtggtacaagcttcagtaccaggacgaggtacatgtttcgctgggatgatcaggggcaaggttgtatattgaaggtaagcttctgggtggactggaacgcgtccagttggattaaaccgatggtagagagcaactgtaaaaacgggcaaatcagtgccaccaaagatcttgtagagttggtcgaccagttcgtaggagagtatgtggaactaagcaaggaaagaacggatgcactcaatgcgttaccaagtgttgcgtcatttgggtcaccaaggaaaattgcgcccgagttggtactgcccgagacgaatactgacgctgcgggggaaaccccagaagtgagcaacgatagatggaggttcaattgggtgaacatagtgatactagtgctgttgacactgaatctgctgtacttgatgaaactgaacaagaaaatgaacaaaatgacaaaattgatgacgcataagaacgacgttaccgtgcaccggaatttattagatatacctgccgaggtgcaatggtcgaaacgaagagaccgcagtagattgtaa

SEQ ID NO: 4683 - DNA, 516 bp, Saccharomyces pastorianus
atgggtagatattcagtaaagaggtacaagactaagagaagaacaagggacttggacttgatctacaacgatctggccactaaggagtctgtgcagaagcttctgaaccagccattggacgaaaccaaggcggggctggggcaacattactgcatacactgtgcaaagtacatggagactgctatagcgctgaagacgcatttgaagggtaaggtgcacaagagaagggttagggaactgaagggtgtcccctacacgcaggaggtgtctgacgctgctgcgggctacaacttgaacaagttcttggaccgcatgaaagatatcacacactctgtgggtccagagaaggagtccaacgaggtcttactgaaagagcatttggacaacgccttggcgaacgttgccacgacagaacccactctgccgtgggcagccccagacgctgaggctgctgacgctgaggctgctgccgctgaggctgccccagtagaagccgagcctactgctcaaccataa

SEQ ID NO: 4684 - DNA, 399 bp, Saccharomyces pastorianus
atgatggaatctgataaccccttcagcacatcagaggcaatgatgaataaaaggaacgttggaggagcgagtgcgaatagcagagaagggtccagcaacggcggaggcctaccgctatatcaggggatgcagaaggagcagacggtttttgaaagaggtaacgctcaactggactacatcctggaaatgggtcaacaatcgttcgaggatatcatggagcaaaataagattttatccaaagtacaagaacaaatgtcaaatggcttcagaacgttgggtgtttcggaacaaaccatttcttctattaacaagagagtttttaaagacaaacttgtcttttggattgcattaatccttttaatcataggtatttattttgtcttaaaatggttaaggtag

SEQ ID NO: 4685 - DNA, 930 bp, Saccharomyces pastorianus
atgttcaaagaacctgatacggatactgtaaatcaaacatacctcgacgcagttttgaccccagaatcagggacgactacacaagcaatgacaccttccaccccacccagatcgagaggcactaggtatcttacacagcccaacgccaatgctggctctaacgggataatgcaaccgcaaaggacccctcaaaagccttcacagaacttggtccctgttactccatcgacagctagaccgttcaagaatgcaccattactagtgcctcccaatgcgagcatgggtatgacctccccattcaatgggcttaattcacctcaacgctcacctttcccgaaatcttcagtcaagagaacactatttcaatttgaaagccacgatgatgagatagtaagggaggaacagaaaccgttaggtcgtgtgaatagaatgctgtttcccactgaaggtgtgcagcaggatgaagaggaggaggaggaagtgttgctcccccccagcagacccacctctgccaggcagttgcacttatcactcgatagaaatgaacttgatgaagcgtacagaaagaagattattaaagatgtacccggtacgcccagcgacaaggtgataacgtttgaactggccaagaattggaacaactattccccacaaaacggaaccagtagccaagaaagcggagatgaggaagaagtcatcatcagatcagcacaagtaagtaaaaatccctttgcatcggaagaagcagccactcgggagattaggagtgaacgcaagaaagcattattaagagaaaaccctgatatagaagatgtgataacatatgttaacaaaaagggtgaagtagtagagaaacgaaggctcactgatggagagaaacgaaggttcaaaccaaaggcgttgtttcaaactggggatcaagagcattga

SEQ ID NO: 4686 - DNA, 816 bp, Saccharomyces pastorianus
atggccggtgtcgaagctgagaagatggctggtagtgcatcgtggggtgaattattttccactaaaaccaaggttttccagcgtgtgctgatgggtgttcttgttcaaatgttccaacaattgactggtaataattatttcttttattatggtaccattgtttttaagtctgttgggttaagtgattcgtttcaaacgtccattgtcattggtatcgtcaattttgcttccactttcttcagtttatacactgttgaaaagctagggcgtcgtaactgtctattgttgggcgctgcttctatgatggcttgtatggttatttatgcttctgttggtgtgactagattatatccaaacggtaagagtcacccatcctccaaaggcgctggtaattgtatgatttgtttcacctctttttatattttctgctacgccactacctgggctccagtcgcttgggttattaccgccgaatcattcccattgagagtaaagtccaagtgtatggctttggcgtccgcttctaactgggtatgggggtttttgattgcattttttacccctttcatcacctcagccattaacttctactatggttatgttttcgtgggttgtctggttgccatgtttttctatgtgtttttctttgttccagaaaccaaagggttatcactggaagaaatccaagaactatgggaagaaggtgttctgccatggaaatctgcaggctgggtgccttcgtctagaagaggcgccgattacgatttagaggatctgaaacatgacaataagccatggtacaaagccatgatataa

SEQ ID NO: 4687 - DNA, 180 bp, Saccharomyces pastorianus
atggcctttgaagaaaaagcaaagcccattgctccacagcaaccccaagctgctgatgaactggtgtcttcgttaagtaatgactcacacttaagcgcaccatctcaaaaattttccaatgacgaattgaaggctggcgaggtcgagcctgacatgtctcacactgagcctatggaatag

SEQ ID NO: 4688 - DNA, 123 bp, Saccharomyces pastorianus
atggaaatagacgatggtataacggtccgagagaaacttcgagatgtcgtaatgactattaataagcttcaggtagatataagagaaatgaaagaaatactaaccgttctagcaaataaataa

SEQ ID NO: 4689 - DNA, 987 bp, Saccharomyces pastorianus
atgtttaactttcagaattttactttaaactcgtttgaggattgttacggaaaagcttctgaaacgtcaagaatggaggaagaaaaattagaatcaaataacctgaatgcgtcttctttgaaaaaagtaaacaaaagtaaaaagagcgcttcaagatacgaccagaagaatgtatttagaaactcgatgactggggtgatacaagtgacgccgctgaaaccaacgaaggttatagagcaaaatattgactttgctaaaccgaaaagttttggcctccttcagtcgacacatactatctgttttagcaagaaaaatgcctctgtggatatgaagctgaacacgggtgctcaaaaccccaatgatatcaataatgatttgctccgtggaggagcattaacagacttgagggccaatagtaatgatgaggcggaaactagacaactgaggaaattccgatggtcgaataataaagacaaatgtttttgtgaaaagttaacagtcatatattgggctctcttacttgacacaacaaagcgggcaaataagagaagaccaattttgtgtcaccaggtcatagctgagtttttcaatagagtttataaggaaaaattaagggttcctataacgtcgagatacatcagagataatttagtcacttggacgactcaaggcaaagaattgcatgaaaaaggctggatagatattgctaaaactggcgatttccaagagcaatttagctttgctactataaaattatatgaaagtgcagaatgcggacgttttatcgcaagcaaggacaaggtttctaaagatggaaacacagaaaaatactgttcgtttcaaccagaagaagagtccattgatacgaccgatgaaactggtccagttacaacatggaaaagtacgaaagaagatcgaagagagttgattaggaatcaaattttggttttggacttgcacgatgaggaattttcgaaaacggtttga

SEQ ID NO: 4690 - DNA, 2025 bp, Saccharomyces pastorianus
atggcatgcatacagctttttttgctgtgttttattgtttctgtaaccagggcattttacttgccaggtgtggcgcccactacttatagggagaatgatgagattccattactcgttaatcatctaaccccatccatgtcctatcaacaccaagatgaagatggtaataatatttccggagataaggaacacttcctatactcttatgactattactacgacaaatttcatttttgcaagcccgaacacgtcgaaaagcaacctgaatccttgggttccattatatttggtgatagaatatataattctccattcgaattgaacatgttacaagaaaaagagtgtgtttccttatgtaaaaagattattcctgggaacgatgccaaattcatcaacaagttaatcaagaacggattttcccaaaattggcttattgatggtttacctgctgctagaaaagtccatgatggaagaactaagacagatttttatggcgctggcttcggacttggtttcgttgacgtaacacaagtggtaaatggtgacactgaacaaacacaaacgggcagtggtgagattgaatcggaaaaaccaaaaaccaccaacgaaggtatagaattggatgcccgtgaccaaggtcacaacatggtgcaaactcgtgagttttcatactttgctaatcatttcgatattcaaatcgaataccatgaccgtggtgaaggtaactatcgtgtagtcggtgtcatcgttaatccagtgtctataaaacgatcctccccaggtacttgtgaaacaaatggctccttattagaactggatgaagaaaatgataatgaagtttattttacctattcggttaaattcgaggaatcccccacttcatgggctaccagatgggacaaatatttacacgtttatgatccttctatccaatggttctccttaattaacttctctttggtcgttgtgctattatcatccgtcgttatccactcactactgcgcgctttgaaaagtgatttcgctcggtacaacgagttaaacctagacgatgacttccaagaagattcaggctggaaattaaaccacggtgatgttttccgttcaccaagccagtcactaatgctctccattttggttggttcaggtgttcaattatttttgatggtcacttgtagtattttttttgctgcattaggtttcctatcacctagctctagaggctcgttagccacggttatgttcattctatatgccttatttggatttgttggttcttacacatccatgggtatctacaaatttttcgatggtccatactggaaggcaaatgtgatcatgaccccgcttttagttcctggagctattctactagtaatcattgcactgaactttttcttaatgtttgtccattcttctggtgttattccagcaagtactttgttttttatggtattcttatggtttttattctccattccgttatcaattgctggttctctggttgccaggaagagatgtcactgggatgagcatccaacgaaaacgaaccaaattgcaagacaaatccccttccaaccttggtatctgaaaactctaccggctactttaattgctggtattttccccttcggttctattgccgttgaattgtattttatttacacaagtttgtggttcaataagattttctacatgttcgggtttctatttttttcattccttttattgacgttgacaacctcgttggtcactgtaatgatcacttatcattcgttatgcctagaaaactggaagtggcaatggaggggatttatcgtcggaggtgtcggttgcgccctgtatgtatttatccattccattctattcactaaatttaagttaggtggattcgttaccattgttttgtacttgggatattcttctgttatttcattgctatgttgtttagtaactggatcaatcggtttcattagcagcatgttctttattagaaagatttactcatccatcaaagtagattaa

SEQ ID NO: 4691 - DNA, 5712 bp, Saccharomyces pastorianus
atgggagatggtacaaacacctcgttcctcaaatttgaaacgaaattgaggtttacaaattttggccagtataaagatatcaataaaaaaagatcggaacagcgtagatacattacaatgaacgattcaccttatcacagatgtccttttcttcttccgctattttaccaagattctgatacataccaaaaactgtatggggctattgctccgtcgtcttcgattccaactttacctcttcctactttacctgatactatagactatattatcgaagatatcgtgggcgaatacgcaacacttctagaggctacaaatccatttaaggatttatttgctgaaactccatcaactgttgaccctttgaaagctagttttactgaagatgatgatgacgaagcagcagaccctttagaattcaaacctgtcgcttttacggaagagataaattatgaacgggacaactatgttattgatgtatcttatattctcctggatattgacccattgctatttgtctttaccaagagcctattagaacagttttattctgaagatatggtacaagtcttggacgatatcgaaattgggattgttaaacggttaagcaatcttcaagaaggaatcatctctatttccaacattgatgtccacgttgcctatttaaatctaatttggcaagagacaggtgaggaaggttttgagctctatttggacagtatcaactaccaaatgagtgaaaaatctctcgagaaaaacagaacaagtaaatcacttgacttagcagtcttggccaaggtaaagactgtgagagcaaccattaatcagaagaaaactccagagttgtctaaggatcgtccacctgcgctttcattaggccttgaaggatttgaagtgtggtcttctactgaggatagacaggtcaattcactaaatctgacatcatcggacataaccatagatgaatcccaaatggagtggctgtttgggtactgtagtgatcaggggaatctcatacaggaagtttttacatcgtttaatgccattcagtatacgagaactagtacgaagacagagcttatatcaaaacttacagctgcaagtgaatattataaaattagtcacgatccttacgtcataacaaagcctgctttcattatgagactttctaaagggcatgtacgcgagaatcgtagttggaaaattatcacacgtttgagacatattctaacttatcttccggatgactggcaaaataacattgataaggtgttgaaagagagaaaatatagttttgccaaagacgctaaaaacatcttcatgtccgtattttcagcttggaggaactgggagttttcagatgttgcaaggtcatatatatatggtaaattgtttttggcagaccctgcgaaacataaaagaaactcaattaagaaattgctaaagtgcaccatgggatcattttatcttaccgtttatggtgagggatatgaggtcgaacataactttgtggttgcggatgccaacttagtagtggatttgacacctcctgtaacaaatttgtcctcaaaccgagaagaaacgattgaaatcacaggaaaagttggttcggtgaaaggcaagtttagtgataaactgctcaaattgcaagatctcatcccgctggttgcagcagtaactgaagatgataaaagtgatccaaaagccgaattagcaaaacaattcaaaatgaataccgtattattagtagataaaagtgaaatacaactggttatggatcagacgaaagtaatgagtaggacagtaggtggtagagtcagtttgctatgggaaaacctgaaagactcaacaagtcaagcaggttcattggttattttttcccaaaaatcagaagtatggttaaagcatgcgtccaccattttaggtgaggctcagctttgtgacttttcaattttagctactacagaagcttggtcgcataagcccacgatcttggttaacaatcaatgtgctgatcttcatttcagagcaatgagcactactgaacaaatggtaactgctattactgaaatcaaagaaagcgttctgaaggttaaagaacaaattacgttcaagccgaaggcaaagaataagtcgcagtttgtcggcccaaaaattaatactgttttatcatgttacttttcaaatgttagttcagaaatcatgccgctttcaccgttttatatccgtcatgaggcgaagcaactcgatgtctacttcaataaattcggttcaaatgagattttgttaagtatatgggatactgattttttcatgacatcacatcagaccaaggaacaatatttgaggttttcttttggcgatattgaaatcaaaggaggattttctaaagaagcttattcgttgataaatgttgatgtttcaatatctatgattaaacttaccttctctgaaccgcgtcgtattgttaatagttttttacaagacgagaagcttgcttctcaaggtataaatcttttgagctctttgaattccttgttttctaccacagacctaacaaaaacgaagaaagaaacgcctacaaaaatgataaactggacattggataccaatattagttattttggtattctggtaccagtggcatccacttattttgtttttgaattgcacatgctcctactctcattaactaatacgaacaacggtctacttccagaacaaactagagtgacggggcaactgtctattgaaaatattctctttttgataaaagagcggtcattacctattggcctctccaagttacttgatttttctataaaggtatctactttacaaaggacggctgacacggaacagtccttccaagtcgaaagttcccatttcagagtctgcttatctcccgattctttgctaaggctaatgtggggagcgtataaagttttggacttggttcagtactattcaaaacgccatgcacctaatatttggaacattaaaatgttcacaggtaacagtaacaaaccaaaagaaatacctataaatttccgttccatacacattttatcttacaaattttgtataggttggttattccagtatggagcaggggatgatccgggtttaatgttcggctataatagattattttctgcatatgaaaaggattttgggaagtttacaattgttgacgcattcttctctgtttcaaatggtaatacttcaagcaccttcttttctgaaggaaacgagaaggagaagtacaatagaagtttcttaccgaatatgcaaatatcttactggttcaaacgatgtggggagctaaaggattggttcttccgatttcatggtgaagcattagacgtaaattttcttccttcatttatggatgttatcgattctactttacaatccatgcgagcatttcaagaattgaaaaaaaatatcctggacttttcccacgggtcagatatggaaaacagcagtcctgatgccgctccaaatactgaaactgcttcgaatagtttggctccctttcttgacaacattagatctgttaactgtaattacaagtatgatggtggtgtttttcgggtatatacatatgacgacattgaagctaaaagtgagccgtcatttgaactcaaaagtccagttgtcaccataaattgcacgtataagcacgatgaaagcaaagctaaaccacataggatcagaacattaatcactgttgatccaacacataacacattatacgcaggctgtgctcctttactgatggagttttctgaaagtttacaaaatatgataaagaaacatagtaccggcgaaaagaaaccaaattttacaaaatcttctacacaaaatgtcgattataagagaattttggatcaatttgatgtaggtgttaaacttacatcggccaagcaacagttaagtttgagctgtgaaccgaaagctaaggtccaggctgatgttggatttgaatcgttcttgtttagcatgacaaccaacgaattcgattctgaacagccactgggattttctttaactttagaacaaacaaaagcatctattaagcatatattttcaagagaggtgagtacatcttttgaggttggctttatggacctaacgcttttattcacacatcctgatgtcatcagcatgtatggaacaagtttggtgtctgatgtaaacgtcttctttaatgtgaaacagcttcaaaacttgtatctgtttctagatatatggagattcagtagcattttgcatacacgaccttcgcaaaggcctaataataaggaaattaatatgagttcactagcgccgaccagcaatctcgatgctggtgctgaaataccatggtgctttacgcttatttttacaaaccttagcggtgacgtggacttgggcccttctcttggtgttatttcgttaaggtcccaaagaacgtggctagctacggatcactatgacgaaaagcggcaactattgcacgcttttactgatggtattagcttgacttcagaaggtagactgagcggtttatttgaagttgcgaacgcaagttgggtatctgaagtcaaatggccactcgaaaagagtaaaaatactcacccgttagtctctacctctttgaatattgacgatgtagctgttaaagctgctttcgattaccatatgttcttaattggtactataaacaacatacgctttcatcttcataatgagaaagattccaagggtgtcctgcctgatttactgcaagtatcgttttcatccgatgaaattactctcagctctactgcactggttgccgcaaatattttggatatatacaataccattgtacgtatgaggcaagataataagatatcgtatatggaaacactgcgagattctaatccgagtgagtccaagcaaccgatattgtataaggatattttgagatccctaaaattattgagaacagatttatcagtgaatatttcctccttgaaggtccaaatctcgccaatatctttatttgatgtggaagttttggtagtaaggattggtaaggtttctatacgttctgaaacacattcggggaagaaattaaagacagatttacaacttcgagtcttggatgtctcagcagcactttctacttcaaaagaagagttagacgaagaaattggagcttctattgctattgatgattatatgcattatgcatccaaaatagttggcggtaccattgttgacgttccaaaacttgcagttcacatgacaactctacaagaagaaaagaccaacaatttagagtatcttttcgcatgctctttctcagacaaaatatccgtcaggtggaatctaggacctgtgaattttattaaagaaatgtggactacacatgtcaaagcgctggcagttcgtcgttcgcaaacagcaaatattgcgtttgggcagacagaagaagaacttgaagaatcaattaagcgagaagaaaacgcttctaagttcaactatattgcgcttgaagagccacggattgaagtgcctcaaataagggatctgggagaggccactccgcctatggaatggtttggtgttaatagaaagagattgcctaagttcactcatcaaactgcagtgatccccgtccaaaagctagtgtatcttgcagaaaaacagtatgtcaaaatactggacgatacgcattga

SEQ ID NO: 4692 - DNA, 807 bp, Saccharomyces pastorianus
  modified_base (4)..(37): a, c, g, t, unknown, or other
atgnnnnnnnnnnnnnnnnnnnnnnnnnnnnnnnnnngtgagttttttaatttcgtgacttctgaggaatatacaggtgtccttggtgccagggaggttggagaagtcgtgacaaagagctcggtggtggacttagcgcctagtttggattcagagtgtcaggatgacagtatgaagaatgatgctgaaggcaatgggcctgtgaaaagatctgatctgaaaagaacgaccaacgaaactgatatttggttcacattttcggtttggaacggtgctttgatattaccggaaacaatatacagtttcgatccctgtattgcattacatttcactgagctcgttgttgattttaggagctgcaattattatatggacataatggccgtgctaaatggtacatcaataaaacgacatgtttcaaggcaaataaatgaagtttttgactttatacgacgtaacaatggtgccgatgaacaagagcatggtgtgctttctgaccttaccattcacggacataggatgtacggattgccgccaacggaacccacctatttttgccaatgggatatcaatcttggtgatttgagcattgattctgacatcgagtttttaaaaggattttttaattctttctataaggtggggtttggatataatgacttggagaatatattgttatacgataccgagaccatcaatgatatgacctcactaaccgtgcatgctgaaagaataaaaatgagcctaaatgatccagtaatgaaatcgcatcaatcgttagtgcagaatcgctactgtttacgttga

SEQ ID NO: 4693 - DNA, 684 bp, Saccharomyces pastorianus
  modified_base (4)..(37): a, c, g, t, unknown, or other
atgnnnnnnnnnnnnnnnnnnnnnnnnnnnnnnnnnngtgagttttttaatttcgtgacttctgaggaatatacaggtgtccttggtgccagggaggttggagaagtcgtgacaaagagctcggtggtggacttagcgcctagtttggattcagagtgtcaggatgacagtatgaagaatgatgctgaaggcaatgggcctgtgaaaagatctgatctgaaaagaacgaccaacgaaactgatatttggttcacattttcggtttggaacggtgctttgatattaccggaaacaatatacagtttcgatccctgtattgcattacatttcactgagctcgttgttgattttaggagctgcaattattatatggacataatggccgtgctaaatggtacatcaataaaacgacatgtttcaaggcaaataaatgaagtttttgactttatacgacgtaacaatggtgccgatgaacaagagcatggtgtgctttctgaccttaccattcacggacataggatgtacggattgccgccaacggaacccacctatttttgccaatgggatatcaatcttggtgatttgagcattgattctgacatcgacgttttaaaaggatttcttaattctttctataaggtggggtttggatataatgacttggagactatatcgttatacgat

SEQ ID NO: 4694 - DNA, 804 bp, Saccharomyces pastorianus
atgtcctatgttctcgggactaacgaatttctttgcttgattttgcggctactcttagtaagttacgtggaagtgatccagaatggtgaaacaatctctagttgtttccaaccgttccataagaatgaaaactacggtacgataccttcagcaaacgaacagataacaccggttatctttcataatttgatcatggacatggtgttgcccaaggtggtcgccatcaagggcaacaaagtcacgaaagtgtcaatgaacctcattgacgggtttgactgtttctactccacggacgaccacgacccgaaaactgtgtatgtttgcttcacgctagtggatatacccaagatcttgcccatcagagtactgagtgggctacaggactatgattccaacgccacgaacgaattattgagttcgcatgtaggccagatactagactgtttccatgaagagctagtgaaataccgcaatcaaaccttgaatagctctggaaatggccaatctagtagtggtaatgggcaagacaccattagtgacattggagatgccaccgaagatcaaataaaagatgttatccagataatgaatgataacatcgacaagtttttggagaggcaagaacgagtgtctctactagtggacaagacttcacaactgaatagcagcagtaataaatttagacgtaaagccgtcaacataaaggaaataatgtggtggcaaaaagtcaaaaatattacgctgctgacttttacgattatactttttgttagcgctgtttttatgtttttctatttatggtaa

SEQ ID NO: 4695 - DNA, 930 bp, Saccharomyces pastorianus
atgactaatgataatggattcttgggagaggcaaataatgagaggtacaatcctggaaatagaaactttttggccgtaccagaaaactctatggtgcataacgataataaaattgatgatgtcagcaacgggccctttcctatctatgtccaagaattcactgaaaagcaaatcttggaagaagcatcaagggctcctcctggatccatgccatctattgattatccaaaatcaatgtttttgaaagggtttttttcagtacaaaccacctcctctaaaccgttacctatcgttcgtcataacatcatatctgttttaacaagaatgaaaattgaattcaaagaagtcaaaggagggtttatatgtgtccaacaaaggccacctattgcgacttcggtagtacctgcaataacgactagtgatgtgggctatgattctggaaaatcagtgaatctccaaaccagtttagacaaccaattatcaagcagttaccatagttcaacatccacagcatcaagaagtagctcgataaggcgccaaggctcttataaaaggggacagagtggtataccattgacgcctctcgcaggtagtacgcatcaaaggaactcatccatccctatgtctccaatttctggaagtcaaagcaacggtatatctgaagagctctcatccgcatcattggagtatattcaacagcaggatgatatcttaacgacgtcaagagtccaaaatataaatgacataaatggtcaattcgagcaaaacaacgtttacgataataaagaaaggcctccaattagatttgaaattcacatcgtgaaagtgcgtattgttgggttggcaggtgtgcatttcaaaaaggtttctggtaatacctggttgtataaggaactagcatcgtacatcttgaaggaattaaatctatag

SEQ ID NO: 4696 - DNA, 2319 bp, Saccharomyces pastorianus
atgcccgatccaaacacagccgattatttggtgaacccgaatttcaagacgagtaacagggactccgtatcaccagcacccgaagctttcaatggtacacgaattgccgcaccggctaccttacgcatgatgggcaaacagtccggaataaaacatgaccagcaacaaccaccattgatgcctcctgcggatgtcaaacagactaatggacaagcagatcaaagacaaagcgacgcagccgtttctgtcggcagtaataacaatagtacgaatgggaacatggaattcaggcaattccatagaaagtctctgggagactggcagtttttagaaaccgtcggcgcaggctctatggggaaagtcaaattagtcaagcactgtcaaacaaaagaagtttgtgtaataaagattgtcaatagggcttccaaggcttatttgcacaaacaacactctttacctccaccaaaaaatgaaaatgaactattggaaagacaaaaaagactggaaaaggaaattgctagggacaagagaaccgttagagaagcctccttgggccaaattctctatcatcctcacatatgtcgtttatttgaaatgtgtaccatgtcgaaccatttttacatgctttttgagtacgtttccggtgggcaactgttggactatattatccaacatggttcattaaaggagcatcatgcgaggaagttcgcaagaggtattgctagcgccttgcaatacttacatgctaataatatcgttcacagagatttgaaaattgaaaacatcatgatttctaattcgggtgaaatcaaaattattgattttggcctttccaatatttttgactccaaaaaaaaattgcatacgttttgtggttcattatactttgcggcaccggaattattaaaggcacaaccttatacgggaccggaggtggatatctggtcgttcggtatagttctttatgttttggtctgtggtaaagtaccctttgatgatgaaaactcaagcatactacatgaaaagatcaaaaagggtaaggtggattacccatcccatttatccatcgatgccgtttctttactgactaggatgatcgttgtggatccgttaaaaagggcaactttaaaaaatgtcactgaccacccatggatgaatagaggttacgattttaagactccatcatatgttcctaatcgtgttccattaacgccggaaatgatagacagccaagtcttgaaagaaatgcaccgtttggagtttattgacgatattgaggatgcaagaagatcgttgaatcaactgatcactgaaagagaatacatccaattttcacaggagtattggaacagattatccaactccaaaggattaagttcaagcttaaacaacaatcatttgaattccactgcaaaccaaaatccaattcaaactcagctttcaaacagccaattgacaaatgctactcacgaacaagataatagttttgatgatcccacttcagcatatcatccattattatcaatttaccatttggtatcggaaatggttgcacgtaaaatagctaagttacaaagaagacaagcgttggcactgcaagcgcagtcacaacaaaggcagcagcaccaatcagtatctaatagcaaagctgctttgacgaatacgtcacctgcggttatgaataaactgagaagtacacaaaaggaatcactttctaatactggtattttccaagtacctgcaaccccctcaccaggaacgtcaaataactctaattcaccaaagaaacccccattacgtgttatggttcctcccaaattaacagtacctgaacaagcgcatacttcgccgacatctagaaagagttcggatattcataccgaattagctggtgtcttaaactctagtcccggtcctagatctgtggagtatcaacaatgttcggcgtcaccagcttcagttgaagcccaagagaaaaatctaatcggtggaatctttagaaaattatctcaaagtgggcagtcccatcagcagaggcaacaagaaccactttccgaaagacaaccgccaacttatatgccgaaatcaaatgaaaattctatgagggtaccgaaaagtcatactcgtactatatcagattatattccaagtgttaggaggaacccttcctatatgacaaactctgttgatacaaaggagcgcaatactgttaaaagtaccgttataatacctccggcaaggtctgcatcacaaaagcaaagcagcaatctacctgctctacctcaggacgcggaattgattgtacaaaaacaacgataa

SEQ ID NO: 4697 - DNA, 1044 bp, Saccharomyces pastorianus
atgactgtggattacgagaaggaccccagggctagagaagctgttagtatttgggaaaagggtgtattgaaagaaaaagatgggtcgatgtcagatgccataaacttttatagaagtgcattgaagatccatgacaacgtagaaagaatttataggaaaaaattgcacgatgagtggtcattgcacaaaaaattgtcggaattatccgttctttctgaaagctcaaatgtccaggacacagcagataaagacagtgctcgtgctactgacgatgtcgaactccccccctgttggattttggaaatgctgcccaatgatattttactgagaattatcaaaaaggttgtgttgatgtccggtgaatcatgggtaaatttgtcgatgagttgttccactttcaatagactttgcttccatgactctatgcctttcaaaacctttgcgaagtacatatattccaaacagaagtatgatcaaatggcaatggaccttaatgggataagcaacgtaagtatgtttgaacaagaaatgtggcaaggggatgatatctgtatgttaaaggaaagaccatatatcaaatttgaaggtatttatattagtgtggtaaattacctgaggtatggttccaatgcagagggctcatcgtcccttttaaacccggttcacatgatcacctattatagatatctgaggttttatgagaacggccaatgtctaagattactcactacagatgaacctagttttgtcgtgaaacattttgccatagataataaacctaaacatagtgatacgtgttattggagtcttgggtttgattataattttggtcatttgaagattacaaggtcagacgaaaaatatacatttactgaagaatttcaaatcaagaatcaagacactaaaaggtatcaaaagttgaaatggctaagttccactgttgtggataaggagggaaatgcatctgattgttcgttgaggaatgagaaatcgttctatttttcaagagttaaatcttttaagggcgtcaacgcaaatcggtga

SEQ ID NO: 4698 - DNA, 117 bp, Saccharomyces pastorianus
atgtatccgtatagatatgtatatatacacgggaattgtgtcattttaaatggggattctagtttctgtgatttggtctttcagtttctcgtcccattccaactttttcttctgtag

SEQ ID NO: 4699 - DNA, 1947 bp, Saccharomyces pastorianus
atgaatttagattcagaaggtgaacaatccgaaggagatgctgatatgtctgacggaatgtctgatgacccagacaaacaggagactgacgatgaaaatgaggaagctaaacaagaagtcgataacgaagctgatgagccagattctgacacagatgctaaccaagatgagttagatgataatgaaaacgacgatgctcaagaggacgttgatatggcaaacgaggaggtcggagaaaacgaagaaaatgagtcagatgagcaattcatgtcagatgaagagcaattaaaacaagataaaaatatagaagaaaacaaagagaaagggggagaggagaacgctgaagggctcgatggtgttgaagaacaggcggaagtcgaagacatagatcaggaggctgctgttcaacaagactctggatccaaaggaactggagcagatgccagagatactcaggaacaagaagacatcggaggctcaggaaccacccagaatacatatgaagaagaccaacaagattcaactgagaacaatgaagactctcgtgaggaagccaaagctgccttaaaacagttaggtgacagtttgaaagagtaccacaaacgtcgtcaagatataaaagaggcgacatccaatggcgaagaagacgagagcgttgagaaaaagaatgagcgtccagacgaatttgaacatgtagatggtgcaaacaccgagacagacactcaagctctaggctctgcaacccaagatcaattagagactattgatgaagatatggctatcgacgacgacaacgaagaggaagaatccaacgaaaaggacttgacagaagacgccgatgccgagaaaatggatatcgatgaagaggatatgttacatgatgctgaagatcatgagacgaacaatgaagttgaaaataaaaaatcagggtttattggtgaaagaaaggaagaacaagattacggaagtgggttcccagatgaacatttcttagaggatcaagataatgaagacgaattagaagccctaattgaaaatattgatgatagtgcgcatgacgaaaacgctatcgcagaaccagaaagatcattagaagaatcccgccaattgtggcataagagtgaaatttctactgctgatttagtctcgcgtcttggcgaacaactaagattaattttggaacctactttagccacgaaattgaaaggtgattacaagaccggtaaaaggctaaacatgaaacgaattattccgtatattgcctcccagttccgtaaggataaaatatggttgagaagaactaaaccaagcaaacgtcaatatcaaatcatgattgcacttgatgattcaaagtccatgagtgagtccaaatgtgttaaactagcttttgatagtttatgcttggtctccaaaacattgacacaactcgaggccggtggtttgtccattgttaaatttggtgaaaatgctaaagaagttcattccttcgatcaacagttcagcaacgaatctggggcaagagccttccaatggtttgggttccaagagaccaaaacagatgttaaaagacttgttgctgaatccatcaaaatcttcgaacgcgctcgtgcaatggcacataatgaccaatggcaattggaaattgttatttccgatggtgtgtgtgaagatcatgaaaccatacagagattggtacgtcgtgcgagagaaaacaaaatcatgttggttttcgttatcatcgatggtattagttcaaatgaatctatcttagacatgagtcaagtgaactacattccagatcaatttggtaatccacagttaaagattactaaatacttggacactttcccgtttgaattttatgttgttgtgcatgatatcagtgaactacctgagatgcttgcactaattttgcgtcaatactttacagatttagcatccagttaa

SEQ ID NO: 4700 - DNA, 12783 bp, Saccharomyces pastorianus
atgtcccaagatagaattctgttagatttaaatgcagttaaccaaaggttagctctcttcgactctgcgttcccttctgatgctattgagaaacctttcaagttcaacagcaagaaatcaatatcagaaaatctaaacaaattagcagaaacattattacagagcagttccatcgtcggtcatgttttcctctacaaacacattttcttagaaattgtagcacgttggacaaccaactctgacaaaaaagactccgttgttgtaattgaacaattaggaagtatcgttacaatattcccatctgcaatgccattaatcgaagattatttagacagagaaaacgatcatttcattactgttctccaaaatccatcttcgcaaagggactctgatttgttcaaaattttattagcatattatagattattatatcacaacaaagaggtatttgcacgctttatccaacccgacattctatataaacttgtggacttgccaaacgaagaccaacaaaaccaggttattacgtttctaacgttgaaagttctatctttatacttggatatgggagaaaaatccataaatgatatgatagacatttacatcaaatcacacgatacactattgggctggtctaaggatgattctaaagtagattacagttttctcgaattgaatgaagctaaaagattttcaaatttttctaaattacccaatgttccagagtgttttactgtcgataaaaagcataactactttgttattgaatctcaggatctgaatagtaaggttacatccatctgcggtgtcattgtacctaagatccatactattcatgacaaggtatcatacccattaacacttgttcccactgaaaagacagtttcttccctccgtgagcttgcaaagagaattcagaattcgacaccaattatgcttgttggaagagcgggctccggtaagacatttctaattaacgagttaagtaagtacatgggctgccacgattcgattgtcaaaattcatttaggtgaacaaactgatgccaagttattgatcggtacctacacatctggtgacaaacccggtacttttgaatggagagccggtgttttggccaccgcagttaaagaaggtagatgggtgcttatagaggatatcgataaagctccaacggatgttttgtcaattcttttatcgctgctagaaaagcgtgaacttacaatcccatccagaggagaaactgtgaaggcagcaaatggtttccaattaatatcgactgttagaatcaatgaagatcattcgaaggaaaatgctaaaaaaatctataacttgaatatgattggtatgagaatctggaatgtcattgaactagaggagccaagcgaagaggacctaacacagattttggttcaaaaattcccaatcttgaccaacctcattccaaaactaattcactcttacaaggctgttaaaagtatttacttaaacacacggtttatttcattaaacaaaggtgcacatacgagagtcgtgtctgtaagagatttaatcaagttatgcgaaagattagatgccctatttaagaacaatggaatcaacaaaccagatcaattgatcgaatcttccatttatgatagtattttctccgaggctgccgactgtttcgccggtgctcttggagaattcaaagcttttaaacctattattcaagcaattggtgaatcattagacatcgcctcctcaagaatttctttgtttttgacgcaacatgtgcccaccttggaaaacctcgacgatagcattaaaataggaagagctctgttgcccaaggaaaagctaaacatacaaaggaaatcaatgaacagcacatcatttgcattcacaaatcattcgttgagactaatggaacagatatctgtttgcatacagatgactgaacccgttttactggtaggtgagacgggtactggtaaaaccaccgttgttcaacaactcgccaagatgttagccaaaacattaacagtaataaatgtctcacaacaaacagaaactggagatctattaggtggttacaaacccgtaaactctaaaacagttgcagttcctatccaagaatactttgaaactcttttcaatgccacgttttccttgaaaaaaaatgaaaaatttcataaaatgcttcatagatgctttaacaaaaatcagtggaagaatgttgttcggctttggaacgaagctttcaagatggccaaaagcattttgaaaaccaccgagtctgatgatgaagatgaaagcacgaaaaagaaaaaaagaagactcaacacccatgaaaaaaggttactactagataaatggagagacttcaatgactctgtaaagaaattcgaagctcaatctagctccattgaaaactcattcgttttcaattttgtcgaaggttcattagtaaaggctattagaaatggggagtggttattactcgatgaagtaaatttggccactgcagatactctagaaagtatttccgatcttcttacagaacccaactcacgtagcattcttctttcagaaaagggtgatgctgaacctataaaagcccatccagactttaggatattcgcttgtatgaaccctgctacagatgttggtaagagagatttgcccatgggcatcagatcaagatttaccgaaatatacgttcattcaccagaacgcgatatttctgatttactttccattatcgacaaatatattggaaaacacagtgttagtgatgagtgggtaggaaacgatattgctgagctttatctagaagccaaaaaactttccgataaaaatacaattgtcgatggttcgaatcaaaaaccgcattttagtattcgtacattaacacggactttgctttatgttactgatattattcatatttacggtttacgtcgttctctttacgacgggttctgtatgagttttttgactttacttgaccaaaaatccgaaagtattttgaagccagtaatcgaaaaattcactttgggaaggttaaagaacatgaagtccgttatgtctcagacgcctccttccccaggtccagaatatgttcaatttaaacactactggatgaaaaagggtccgaatgaaatccaaaatcaagcacattacattatcacaccttttgttgaaaagaatatgatgaatttggttagagctacatcaggtaaaagatttccggtactgattcaaggtccaacatcatctggtaagactagtatgattaagcatcttgcagacataacaggccataaatttgttcgtataaataatcatgagcacacagatttacaagaatatttaggtacttatgttaccgatgacacaggtaaactatcgtttaaggagggtgttttggttgaagcccttcgaaaaggttattggattgttttagatgaattaaatcttgccccaacagatgttttagaagctcttaataggctacttgacgacaacagggaacttttcattccggagacacaagaagtggttcatccccatcctgattttctcctttttgccactcaaaatcctccaggaatatacggaggccgtaagattctctcaagggcttttagaaatcgtttcctggaattacacttcgacgatattccacaagatgaattagaagttattctacgggaacgttgccaaattgcaccatcatacgcaaaaaaaattgtcgaggtttatcgtcaattatctattgaacgttccgcttcaagattgttcgagcaaaagaatagttttgccacactgcgtgatcttttccgttgggctttgagagatgcagttggttacgaacagcttgctgccaatggttatatgcttctagcggaaaggtgcagaaccccccaagaaaagatcactgttaaaaagactttagaaaaagtaatgaaagtcaatctcgacatggataaatattattcaagcctagaggataggtccctggaatccgtaggttccgtgacttggactaagggaatacgccgactatctgttttggtttctagctgtttaaaaaacaaggagccagtattattagtcggtgaaactgggtgtggtaaaactacaatttgccaattattagcgcagttcatgaatcgggaattgataactttaaacgcgcatcaaaatacagaaaccggggatatcctaggagctcagagacctgtccgtaataggtctgaggtccagcataagttggtaaaccgtctaagaattgttttagatgttgctaacgatgaggaaataaatcttcaagagttattacagctttactccaacatggataggaaaaatatacccgaagaagcccacattgaaataaagaaactaaaggacagtttgaatattctattcgaatggaatgatggtcctctaatccaagctatgaaaactggaaacttctttctactagacgaaatatcgctagctgatgattctgtacttgaaagactaaacagtgttttggaaccggaaagaagtttgttgttagcagaacagggatcatctgacagtcttgtaacggctgcagaagagtttcagttttttgcaactatgaatccaggtggagattatggtaaaaaagaactatcccctgcgttgagaaatagatttaccgaaatatgggttccatccatggaagacttcaacgatgtgaacatgataatttcctccaagctttcaaaggacttgaaagaccttgcaagcccaattgttaaattttctgaatggtttggtaaaaagttgggagggggaaatgcaaccagcggtgtcatttctttacgtgacatacttgcatgggctgagttcatcaataaggtatttcctaaggttcaaaacaagtcgacagcgctaattcaaggtgcatcaatggttttcattgatgctcttggcacaaataataccgcttacttggctgaaaatgaaaatgatttgaaatcgcttaggtcagaatgtattgtacaactactaaaactgtgtggtgaagatttggaaccacaacacgtaggtgctaatgacattaccattacgcaggatgacttgcaaatcgggatgtttaaaattccaaggctgccagatggccaatcctcctcctttaatttaacagcccctactactgcctcaaacttagtaaaagtcgttagggctatgcaagttcacaagccaattttacttgaaggtagtccaggtgttggtaaaacgagtttaataactgctcttgctgatattacaggaaataagcttacaagaatcaacctctctgagcaaacggatctagtcgatctatttggtgcggacgcacctggtgaaagaagcggcgagtttgtatggcacgatgctcctttcttgagagccatgaagaagggtgagtgggttctattagacgaaatgaatttagcctctcagtctgttttagaaggtttgaatgcctgtctagatcatcgtggtgaggcatatattccagaattagacatctcgttttcttgtcaccccaactttctcgtctttgctgcacagaatcctcagtatcagggtggtggtagaaaaggtcttcctaagtcatttgtaaatcgttttagtgtggtcttcattgatatgcttgcagctaatgatctcctcctgattgccaaacatttatatccaagtattgaaacagaggttatcactaaaatgattcagttgatgtccgctctagaagagcaagtttgtaaaaagaaactttggggtagttcaggttcaccatgggagtttaatctaagagatactttacgttggttaaagctactaaaccagtattcaatttgtgaggatattgatgtgtttgactttgtcaatatcattgtcaaacagaggttccgtaccattagtgataaggacaaggcacaagttcttattgaagatatttttggtaagttttcaactaaacaaaactttttcaagctcagtgatgaatatattcaaatcaacaacgaagtggctttaagaaatccacactaccgttatccaattgctcaaaatcttttcccattagagtgtaacactgcggtctatgaatctgtattgaaggcgatcaataataattggccattaatacttgttggtccttcaaattctggtaaaactgaaaccataagatttttagcttccgttttaggtccccaagtagacgtattttcaatgaacagtgatatagatagtatggatattcttggtggttacgaacaagttgacctaactagaaaaatatcatacattaccgaagatctaataaatgtcttaagagaaattctgtctatgaatatgaagttgccaccaaacactacggcaatcacggaaggtctcaatcttttagaacatttgctcaataatattatcacacccgacaaatttcaagatctcaaaaatcgtttcaacaagtttttctcgcatttagaggagcactccttattaaaagagattggccaaaacattgaggagatgtcagacgtcgtcaacaaggaagtttcggtcagatttgaatggttcgatggtatgctagtcaaagcagtggaaaaaggtcattggttaattttagataacgccaatctttgttccccttccgtcctcgatagactaaactcccttttggaaacagatgggtcgctacttatcaatgaatgtagccaagaggatggccagccaagagttctcaagcctcatcctaattttagattgtttttgaccatggatcccaaatatggtgaattatcccgtgccatgagaaatagaggtgtcgaaatttatatggaagaactaaactaccgctctaccaatttcgacagcctcactttgggatttgaacctaaagaaactgatataaagcccgtttctattgatcattgcatggaaaaaatgaatttaagcgaactgaaaacatcaatgccatttaaacacttcattccatcccatttgagtaagccatgcgcacttgcccaaatacacgatattatatcgttatcagatgatgatacgcttgtagaatctcttgcgggtgtgattccaatttcccggttgggggaaatcggtaaatggactaataatatttcgaacaataccgagtactcagaacaaaagattgcagagaagctttatgtttttataacatttttagccgatatggatattttacagaagaccaataatctatacatccccgcaaatctaaaactaaaagaggcattaggagtacaggccaagcaactaactgaagaggctttattgcttactttgaacggatacgttcttccaacaatcagcaaatactgcgatgagatcagatctccagagtcactatatttattatcgactttgcgtctattgcttaactcactaagcacaatgaaatctgtcaatacgaaatcaacgcatggtaagattgacgaattgacttacattgaattatcagctgccgtcgttaatggtcgtcacgtgaaaaatactcctcgcattccaatcttctcaattctttacaacctttcaaatgtcatatctgaaaatatcaagaatgaggaattattttgcgggcctaacaagtatcaacactattgggatttactagtaatcataaccgcagcattagaaacagccactaataaggatgaagcacgtctaagagtatacaaagagttaatagacaattggataacatctgcaaaggctgcgggaatggaaacatctccgtttagtgacatcaattcagagtttacggatgttttacatttatcaagagggcactcaataactttattgtgggaaacgtttagaaagaagtatccaacaacctcggaaagctggttagcttttgaaaagcttattatattatctaaaaaatttgacacggttcgactactacaattttctgaatcgtataactctattcaagatctgatggatattttccggcttttggttgaagacgttttggataataatttgacagagtttgaccttttagtgtcgaagctagaggatggtataaacgaattagaactcatttccgacaagtttttaaacaaaagaaagcattattttgttaatgaattcgacagcttgatcaggtacacattctcacatgactgcaccgagctgattaaagaacttgcacctgcttcatctttaacgacacgaaagctcacaaaacttgctatcaacaaatacaattacccaccgatctttgatatcctttggaccgaaaaggatgccaaattcacttctttcacttcttccatattttcgtctcagttccttgaagatattgtctgcaaatctaacaatttgaaaacattttctgggaaccagataaagcagtctattagtgatgccgagctcttgctctcttctactattaaatgttcacctagtttattaagaaatcaagtgaactgttataaagctatgctatcaacctggattggtagaattattgacatacacgttggtatggactgttcgaaattgacttcaaaagatatatgctcttctatggaaggaaaggctacttcggagacatgcgctaccttaacagaatatatactccccgctttagagttggctaagagttctgagtcattggaatcattaggagaggcatggattttgtttggtacaggattacttctgctttatgtaccagattctccatatgatccagccatacatgattacgttttgtatgatttgtttttcaagaccaaaaacttttctcagcagttggttaagaattggaaaaatgtccgtgaagtcaccagtggtgacgaagaaattctcacagaaaaacttgttaatgtcataagtgatgatgacgcacctcagtctcctagagtctatcgtgcgaatgtatctattgactgtctatttgacgagtggatggcgtttttaacctcaactatgagttcccaacagataaatgagttaatgagtgcttataagtgcaactctaatcaatcggatcgtcgattagagatgcttcaacagaatagtgctcatttcttaaatcgtctcgacagcggctactccaagtttgctgatttaaatgacatccttgctggatatatttacagtgtgaactttggtttcgatttgttgaagcttcaaaagtccacagatagggccacattccagatttctccattatggagtatggaccctatcaatatttcaagcacagacagcgtcgtgagtgcttatcgtgaactgtcaaaattcttcaaaaaaagtaccgtagaaaatagctcagtcgaaaagattttggtttacttcttaacactattcaaattccataagaaagacgtgctactaatagatgtattcagagctgccttgtatacgctatattcaaggtggtcacttagacgtttaagacaagaacaagaggcaaatgagaagtcgagtatgttcaggttcaacgatgattcagatgactatgaagccgatttcaaaaatctattccctgattatgaggataccgttttgataactgatgagaaggacggttctacctacgaaaacttagaagagacttacttccaagttgcagacacatacatctctgtctttgatagaaacaatagcgccaatttttcgaccgagttacgaaacggtgcaaaaataacgacaattttgaaagaagagttagtaaacaccaagatcgaatgtttaaagagtggaactttatcggctgtcattaacagacttgatgaagaaacccaatctttcaaaaatgcaaaagattttggaagtatagatttttaccacgatttctccatcgctgagttccaaaaagcaagtagcattattgagagcattctaaagtcagttttaaaattactggagcaatggccagaacatgcttctctgaatgaattgtatcgagtttctcaagagttcttgaactaccctgttcaaatacctttagctagacagctgcaaaaaattgaacaaatatatacgttcttagctgaatgggaaaagtacgcatcttccgaggtatctttgagtactaatgtgaaactgattactgaattgatagtttcgtggaggaagttggaactaagcacctggaaaggtcttttcaattcggaagacaaaaaaattagaaaatctattggcaaatggtggttttatttgtacgaatctattatcatatcaaacttcagtaatgaaaaggaggaaatcacggctaacactactcttttggtaagctcgttgaacctatttttcagtaagagtaccttgggtgagtttggtgccaagctggatcttgtggaagcattttacgaacatattcaactaattgggttcaaaaattctaaagtagaaggtttactccacaatacattaaaattttactaccagtttaaaccgttaattgatgaacgtatcaaaggagggaaaaagagtctagaaaaagaaattgacgatataattcttttagcaagttggaaggatgtcaatgttgatgctctgaaacaaagttctcgtaaatcccataacaacctttacaagattgttagaaaataccgtgatttgttaagtggcgatgtaaaaacaattatcgagagtggtcttgtattttccaaagataataagataaaattatctactttaagacagcatttttacgaagaccctaacctagagacttcaaagattttggttaaagaaattactagttggagctccagaccttcggcactaaggaacatcgacattgtagaagtgaacatgaattcttacctagaaaaaatatcttcgcaagaatttccaaattttggggattttgctttagaattttatgttgaagctgaaagattgcgtaaggaaaccccaggtgtttatacgaaggagaacaagaaggtattggcatatttgaaaactcaaaagagtaaggtcttaggtgacgcattaaaagaacttagaagaatcggtttgaaggccaatttcagggaagatattcaaaaagtccaatcttccactacaactattttggcaaacattgcttccttcagtgaaaaatatttgaactctgcggacacatttttcttcaaaattctcgatcttttacccaaactgagaaacgctgtatcaaatccaagtgatgatatccctatatcggctgtagaaagaggtatggcccttgctcaaagtttggtattctctttaattacggttcgccgtccactatcagagttcacgaatgactattctagggtgaacgatatgatgttggacctagaatgtttttccagctcaaagggagacattgttcattcctctatgggagcaaacatagacaatgttagaatatttgagaaatggttgccttctttactggattatgctgcacatactctgtccgttatttcaaggtattctacatcttcagcggaacagaaagttttattagatgcgaaatcaaacctatcgtctttcttcctccagtttaattcaagccgaattctcgattcttcattcattgagtcgtattctgcatttgaatcattcattaacaagttattaataaagcttgaaaaggcaaagacggcagagaacagttttgtcttcgatattattatatcatggattaagaaaaacaaatcaggatctattaaagatgaacaacttgaaggtccttctgtagaagaaattgaaaaagccttccgccgtattttcacatctataatactatctttccaaaagataatcggggatggttttgaatccatatctgaagacgatgatagatggctagctaatagtttcaagaagatcatgacaaacgtcaaactactaaggtccggacttgttactaaaaccatcgaagccgcattatctttattaaagagctttgactttacaactacgaaatcaatctacgtaaagtcgattatatcattcacgttgccagttattacccactattataacgcaatgaccgttgtgcttgataagtcgagaacatactatatcaacacaagtcatggtacctatattctgtcaacgatattgcatagtctagccaaagatgggttctgttctccagaaccaccatctgaagaggttgacgacaaaaacttgcaagatggtacaggtttaggtgatggcgaaggtgctcaaaataataataaggacgtagaacaagatgaagatttgacagaggacgcacaaaaagaaaacaaagatcagcaagacaaagacgacagagatgacgaaaatgaagacgatgccgttgagatggagagcgatatggctggtgagttagaagatatatccaatggtgaagacaacgaaaatgaagatgaaaacactgatagtgaagaggaagaattggatgaagaaattgacgacctgaacgaagatgatcccaacgcaattgacgataaaatgtgggatgaaaaagcaaacgaaaattcgaaagaaaaagataccgaacaaaacttggatggaaaaaatcaagaagaagatgtgcaagccgccgaaaacgacgaacaacaagaagataataaggaagaggctgaagaaaactcaaacacgcctgaagatggagacgaagaagtggagaacgatgaggatgctgaagaggaaaatgatgtcggcgagcaagaggatgaagttaaagatgaacaaggtgatgatttagaagctaatgttcccgaaattgaaactcttgatctcctgaagatatga

SEQ ID NO: 4701 - DNA, 780 bp, Saccharomyces pastorianus
atgacgggttatgtctccacaagatactacagggcccctgaaatcatgttaacgtggcaaaaatatgacgtcgaggtggacatttggtctgctggctgtatctttgctgaaatgatcgaggggaagcccttgttcccaggtaaggatcacgttcaccaattctctatcatcaccgacctattgggttccccaccaaaggacgtgataaataccatctgctctgaaaacactttaaaattcgtcacttcattaccacatagagaccccatctcattttcggaaagattcaagacagtcgaacctgatgccgtagatcttttggagaaaatgttggttttcgaccctaagaagagaatcaccgcagctgatgccttggcgcatccttatttggctccttaccacgaccccaccgacgagccagtagcagacgctaagttcgattggcatttcaacgatgctgacttgcctgtcgacacttggcgtgtgatgatgtattcagaaatcctagacttccacaagattggaggtagtgatggacagatcgatatatccgccacatttgatgaccaagtcgccgcagccaccgccgcggcggcgcaggctcaggcacaggttcagttacacatgtctacacattcccacaacggtgctggtagcactgataataaccaatccgacattactggtggcaataaaactaccgatcatatcgccacgaatgacaccattacggattacggcaaccaagctattcggtacgctaacgagttccagcaataa

SEQ ID NO: 4702 - DNA, 540 bp, Saccharomyces pastorianus
atggtactttcagctcctaaaaatatccaaaatgaggaactaatagccaaactcacaaacaaaaatatcgaagtggtaaacatgccattgaataagacagtagaattcaatacaaccataaaggccctcgatatctccattgattctgaactcgataatcttctgaaatggcaacgtatcagcggtagttacacagtcgccactgttgttggccgactagttaaggagactcttccacaagtcaataaccatcaaaagacagcttctaggagtaaactggtcttgaagccgttaaacggttcatcaagaagtcataaaaccggcgcattgtctattggtgatgttaggttagttcaactaaagaaacagttaacggaaaaaaactacattgcagaattcaaaggtgaaggtacacttgtcatcaatggaaaagtggcagtccgtaaaattaatgatgcagaaaccattattgatggtaccccctctgaactatttgatactgtcaagaaattggtaacagatatgttagcaaaaatttag

SEQ ID NO: 4703 - DNA, 2037 bp, Saccharomyces pastorianus
atgacgtataagttcagctgttgcgacgatgggtccggagctactgttggttcagtagtgcgcttcgataacgtcaccctgttaattgatcctggctggaatccatctaaagtttcatatgagcagtgtgtcggctactgggaaaaagtgataccggaaatcgatgttataatactgtcacaaccgaccgctgaatgcctaggtgctcactctttgttatattataatttcatttctcatttcatatcgagaatacaagtttacgctactcttccagttatcaatttggggagagtatccaccatagactcatatgcatcagcaggtgtaataggtccgtatgatactaacaaactcgatcttgaggatatagagaaatcgttcgaccacatagttcctctcaaatactcacaattggtagatttacgatcgagattcgatgggttgactttactagcatacaatgctggtgtttgtcccggtggctctatttggtgtataagcacgtattctgaaaagctgatctatgccaaaaggtggaatcacaccagagataacatactaaacgctgcttcaatactggatgcaactggaaaaccttcatccacgttgatgagaccatctgcaataattactaccttagacagattcggctcttctcagcctttcaagagacgttccaaaactttcaaagacacattgaggaagggtttgaattcggatgggtctgttataatacccgtagatatgagtgggaaatttttagaccttttcacacaagttcatgagttattattcgaaagcacgaagatcaatgcgcatacgcaggtgcctgtactcattctatcatattcaagaggaagaaccttaacttacgccaaatccatgcttgaatggctatctccaacccttcttaaaacatgggaaaatagaaataatacttcaccgtttgaaattggatcacgggtcaaaattatatctccaaaggaacttaagaagtacgtcggttccaagatctgctttgtatctgaagtggaagccttaatcaacgaagttataactaggataggtaattctgaaaagacaaccctgatattgactaaaccgaactttgaatctgcatcctgtctggataagatattagacattataaaacaagataaaagcgaccgaaaaagcccctctgaggaggataaaccatccgtttgcgatagttacatttcaatcgacactataaaggaagagcctttgagtaaagaggaattggaagcgtttaaattacagctgaaagagaaaaaaaagaatagaaacaagaagattttactattgaaaagagaatcccaaaaattggccaatggcaacacaaacatagacgattccaacgctggaggaacgataaacagccaagacatcttagcaggcgatgtagatgaagagccagtgacagaccgcatcacaggagaagacgaagatgaagaagaggaggaagataacgataatttactaagcttacttaaggacaattcccaaaagcctttggcaaagaaaaacactgaggcctctgtggacatcattatacaacaaaatgcaacctcgaaacacaaaatgtttcctttcaatcctattaaaatcaaaaaagatgattacggtactgttgtagatttcacgatgtttataccagatgacttagacaacactaatctaaatagcaggaaaaggccactaaaagatggcagcaaaagcatgggcaaggacagtgttgcaggcgatgaagacagcaaaaacgaagaagatgatggttacaatgtgggggacccagtaagtaaaaagaggaaacaccgtagttctcgttattcagggttcactggtgctgaagaaacggaaaattttgataatttggactatttaaaaatagacaagacactttcaaaaagaatagaatctacagcaaacatccaattgaaatgttccgtagtggtgttgaatttacagagtttggttgatcaaagatctgcatccatatatggccatcattaa

SEQ ID NO: 4704 - DNA, 1359 bp, Saccharomyces pastorianus
atgcaacagaaagcgatgttcatcgatttaattctcttccgtccaaaattagtggggcgctcactagagaacaaatttattcgtatcaaaccatgttcaggattcaagaaattactatcaaactgcgtactaatgattttgttcctccctccagaaaaaacagatcaccttcgccaccaccagtttatgatgcccaggggtaaaagaacgaatacccgtgaacagagatatagaaagaaattagaggatgaacgtatcaagttggttgagattgcgttaagggctattccttactttgttcctccggatgattacaaaaggccaacaaaatttcaagataagtattacatcccagtagatcaatatccagacgttaattttgtcggcctgttactaggtcctcgtgggcgtactttgagaaaattacaggaggattctaattgtaaaattgcaatcagaggaagaggttccgttaaagaaggtaaaaatgcaagtgatttacctccaggcgctatgaatttcgaggacccattgcactgtttgatcatcgcggattcagaagacaagattcagaaaggtataaaggtttgtcaaaacattgtcattagagccgtgacatctcccgagggtcagaatgacttgaaacgaggacaattaagagaactagcagaacttaatggtactctaagggaagataatagaccttgtccgatctgtggcctaaaggatcataaaagatatgattgtccaaatagaaaggttccaagtatccaaggcatcgtatgtaaagtatgtggtcaaacgggacacttcagtagagactgtaaatcatcatctcaaaggataagccgctttgatggaaacgtgtctgcaaatagtagtttaccaatacagaacaacagccaccacaataataatggtgcctacccagcccaagcggcaaaaaaatctcgttttggtaacagtgtaacggatggtcctcaaagattccccacctcatcacgctatgaaccaacaccctcaccacctgcgccacgccttccaaaccgaacgtacaacgggacgcccacgcctcctcctggtttaagttcaggtacgtttagctcaggagttccaggaatggctccaccaccatcgcgaaaccctctagaatcggaacaacccaaattggctctagcacctccgcctggaatgactacagtacaatcttcaattgcaccaccacctggaatggccaccgtacaatctcccattgcacgtcctccaggactaagtggccctccagggctttttagtaccacagacaatgacaccaacaacactaaacctccgggacttcaagggcctcctggattataa

SEQ ID NO: 4705 - DNA, 261 bp, Saccharomyces pastorianus
atgtcagaagaaatagtaaacgttccccccaacgtcaacctgtcgttatggaagaagaatgcaacagaaagcgatgttcatcgatttaattctcttccgtccaaaattagtggggcgctcactagagaacaaatttattcgtatcaaaccatgttcaggattcaagaaattactatcaaactgcgtactaatgattttgttcctccctccagaaaaaacagatcaccttcgccaccaccagtttatgatgcccaggggtaa

SEQ ID NO: 4706 - DNA, 552 bp, Saccharomyces pastorianus
atgaacatgcatccatcgccaaatgtaccggagagaacacaaaaacagattaagaacatccccttacctgaagggattcaccttttatcatcaaaggaaataatagatctaattcaaattcataaacatcaattggagttgtatgtgacgaagttcaaccctttaaccgaattcggtgagaaaataaatgcgttaaaggatgagtttaaacaactggaaaagagttttgaagatctacatggccaaagagataaggttcaggctcttctagagaactgcagattcgtagaatccaaatatgtggctagttggcaggactatcattccgagtttgaagaaaaatatggcgagatggcaatgagaaggaaactagagcaatgtacgaaaaatcttgacgaggaaagttcgcaattagaagcttccatgagaatcatcgagtcaccagatgggctggatcaattcatcaaggattatttaaatatacgaacacagtatcatttgaggagagaaaaactcgcaacttgggaaagccaaggtgaattgagatactag

SEQ ID NO: 4707 - DNA, 387 bp, Saccharomyces pastorianus
atgcggcggcaaatcttcaccaccaccgtacactcttacaataccactacggcggcacagtccagcaagtcgactacggtgccgagctctagcaccaagccggcccacaagagcattaccaacaagaagggtggtcacgcgggcggtcatgcgtctggtcacgggtcaagttctgggtcaagccacgggtcaagctctggatcaggcactaggtcaggtagtggtacaaatggtgtcgcaggtggtgtcgtaggtggtaccgtaggtagtagcacaggccaccgcagcccttccaaatcaggcactagctccgctgctctcatacgtcccacgttgcgcctgccactgctcgtatccctgtttcttcttaccgttttctattcatag

SEQ ID NO: 4708 - DNA, 702 bp, Saccharomyces pastorianus
atgttaagtacgtcagatccctttgccaagaagcaggatggccggggaagcgaattgggcaagagggcccgcggagacgagaacttcgtgctggccaacaagcagagtttctactcggttgagctggccctcggcacgccctcgcagaacgtcaccgttctgctggacacgggctcggccgacttatgggtctccagtaacgtaaacccgtattgcgggtccacgatgaattgcgaccagtacggcgtgtttgaccaggccaactcgtccactttcaaagccaacaactccgcgcccttctacgcctcttacggcgatggtacttttgccgaaggtgtgtttggtcaggacaagctgcattacagcggcggcctggacctcagcggcctgtcgtttgccgtggccaataagtccaactcgaccgtcggcgtgctgggcatcggcctgcccatgctagaagtgacgtactccggcaaagtcaccgtcacagacaagaaacgctacgagtacgacaacttcccgcagtttctgaaacgctctggagccatcgatgcgatcgcgtattcgctcttcttgaatgatgagtcgcagacctccggtagtgtgctgtttggcgcagtcgaccacagcaagtacctcggccagctgtacaccatcccgctgatcgacctctacaaggcccaggctaccagcgccccgtag

SEQ ID NO: 4709 - DNA, 372 bp, Saccharomyces pastorianus
atggccaagagtctgaacgctacgttttccaagaaactgggctactatgagtacgagtgcccggccacgagtgacaacgccactagcgtggtcttcgacctcggtgggttccacatcaacgcgcctctgtcagacttcaccatgcagaccaacgtcggaacctgcgtcttggcgatcgtgcctcagacaggcaatgcaaccgccattctcggtgactcgttcttgcggagtgcctacgtggtctacgacctagataactacgaggtttccctcgcacaggccaactacgcctccggcaaagaagacattgaagtcatcagatccaccgtcccgggcgctgtaaaggcccccggctacaacagcacgtggtaa

SEQ ID NO: 4710 - DNA, 438 bp, Saccharomyces pastorianus
atgaataggacaataaatgaagccatagaggctaccgaaatatggggggcagcttcagaattaacgaacaaggacgctaaaaattatctgagacaggaacaggcgtcacgaaagtctgcaaacacaggagacaagagtgagagagacgatctcgctgattcagtacaggaagcctatcctctagttagtgaagtggcagcatccatggaccgttcagatacttctgaagaacaccgttcagatacttctgaagaacaacgtacagacgaagccgaacaaagcacagacgaagctgaacaagagtccaaaagggcttacgctgagttagttgcaaccttgcaagccaagggtataccactgagcgtattagaccatccttcttttataagatggctcgaaaaatacaccggtgtctacagaagttcttggcatgggtag

SEQ ID NO: 4711 - DNA, 537 bp, Saccharomyces pastorianus
atggactccttagtcaaattcattgaagacttgggctacaatctggaagatttagcgactttatgcttagtccatttactagggtacaagaaattagaagagcccttgaaacgagagctttttctgtcggcgtggttcatgcaaggatgctctacacttccaaacatgcaaaggtgcgtcaagggacttgatgctaagctacacgaagacttgcaatacttcacagagatctacgactataccttccatttaatcttggatacaaatcgcaaggacgtagacacggacgaagcaattcaatattggacactgcttttccagccagaatatccaatacatatggaatcaggccttctagaggcatggttccgtttcctgcatgatgaagggaagagaacagtaacgaaagacgcatggcatatgctgctccaatttttcaaacaataccccacaatacagtcaatcattgatgactacaatgaagctgcagcctggcctttcattatcgatgagttctacgaattcctgcgggactag

SEQ ID NO: 4712 - DNA, 1584 bp, Saccharomyces pastorianus
atgcgaatcaccagtcacattgaggacgccagcgggcaaaccaacagaacaaaggacaacgctataatcatcacaacaaactcggcaaacggtggctacccattccctccaccgacgttgatatctcctccaatttcaaatacatcaataaatggttctccatctaggaagtaccacaggcagcgatatccgaacaaaagccccgaaagcaatgggcttaacctattttcctctaatagtgcatacttaagaacgtctgaactgctttcattttcccctcccaactacaatctcaatatggacggtttgagttataatgacaacaacaacaacaacaacgataataacaacaataatgacaagagaggtaacggcagtaacaatatatcccagctttttggaaaaacttccccaggcgggcttgatgtttcttcgcagataatcagtagcaatctgaggtcaccctttctcctcagcaacgataaagacagggacgaccaatacgacagtagtactttgacggctagaacacaactttcacccagccataggaaaaaggaatcagcaatttctacagtatctaccattccgcaactacaagatgatacagaacctcctcatatgcgaaatactcaaagtccgacggcaagaaatgaaaataatccactatcatcaaatatgctacctccaattccagggtccagcaataacactccaatcaaaaattctttaccacagaaacatttattccaacacactcccatcaaaatccaaaatcaaacgttaccaaaaattggccataacctaggcccccttctaaatgcaccagacttaacacaacatcagctggaaattaagacgcctatacaaaacaacagcccgaatggggacgaaaactacacgcgatcccgacctttcgcacgtggtatgaacactagccctaccttggatatgtcacctcctccaccagacgagataatagccaggacgacgcctatgaagattaccaaaaaaccaaccacgctgcctccgggcaccattgaccaatacgtcaaagagttgcccgaaaaactgttcgaatgtctgtatcctaactgtagcaaagtattcaaacgtagatacaacatcaggtcacacatccaaactcatttgcaggatagaccatactcatgcgacttccccagttgcgataaggcgtttgtgcgaaatcatgatttgataagacacaaaatatcgcataatgccaagaagtatgtttgcccctgtggtaagagattcaaccgcgaagatgccctgatggtgcacagaagtcgtatgatttgcgcaggcggtaagaagttggaacacttcattagtaagaaactcacatctcccaagaggagcgtatttggcagcccgcatgagaccagccccgtcaaagaaaccattgccagaaataaagatggtagcgttataatgaggatggaagaacagctgcgaaacgacatgcgggaacatgggttattggacccgacgccgccgtccacggcggagtacgaacagagtccacgtctcacaccctttaatgacagggacgaattttga

SEQ ID NO: 4713 - DNA, 813 bp, Saccharomyces pastorianus
atggataacattgcagatccatggtatataaatccttcaggcctagtgaaaggcccacaaaatggagagttttctcaacataacggtaacctcaattccaacttacaccaatcggacagttatcctttgaatagcgaaggtgctgaaggcctcgataacctcttaggtatggactactataacatcgacgacctgttgactcaagaattgagagatttggacattcccatagtgccctcccctaggacaggcgatgaccctagtgatagcaaatatatggagaggagctggaattttgctggtgacaacaacaaaccttcacactacagcaagaaatcaatggcttcgcacaagagaggtcccagtggtacagcaatatttgggttcctgggtcataataagacattgagtatatctagtttacagcaatccattttgaacatgtccaaagaccctcaacccatgggactgataaacgaaggggacaaccatacttcaaggcagaataatgaggatttcacccagatagaggaaaaagatggtgaaaataaccatttaagccaggtcttgttaaaacagcaggaagaactaagaattgccctagaaagacaaaaggaagtgaacgaaaaattagagaaacaattgagggataatcaattgcaacaagaaaaactacgaaaggtactggaagagcaagaagaagtggctcagaaattggtgtctaggacagcaaattctaatcccaaatgcgaatcaccagtcacattgaggacgccagcgggcaaaccaacagaacaaaggacaacgctataa

SEQ ID NO: 4714 - DNA, 1284 bp, Saccharomyces pastorianus
atgcacccagctgcatgtgccattgtacatctacacctccaaattagggtgtggataggcgtcgtcctctttaatgtgggtgcattttgcgacgtcgcgacaaataaagagaatgggcgatgggctgtgggagcaatgagagagaaagagagagttgacggcagcgaaaacgtaagtcggccaggcaggatggcgtttaagttatggtctttggatgaggagacgctatacgagcacgtgttcgagcggtacatgcagctggaggcccagtgtcgggagctgccccaggatttgggcattcaggacaaaagcagtggtgtattggagctggcgatcgagcctttgggggttgaagccagcaagaagaagaagcgagtgaggaggaggaacaaggccgatgctgccaaggacgattggggcgtcgctgtagacagttatcacgttcgggtggaacagtccatatctagcttgcattcatcccgagacaacgacaactccaccacagggtacgttgtgtggtccacgacaccttttttcatcaactggcttctgtatagtgctagcgctgcaccctttcgtcttggtacccaggtggaagtcgtccacgggccttcttgcgaggggcatatgcttgacctgcccaagctgatcaacctttccggcacagaccgcagcaagagaggcatcctggaacttggagcagggatatcgggaattttgcccgtggttcttggtaactttgtcgacgtctacgtctcgacggaccagaggggtattcttaacaagctgaaacataacaccttggaaaacctgtcgcagttgaccagaaggcagtgcgtgtcccggacgctacgtttggaaccgccgcccaccacaccatccgaaaccgccacattagagctgccatccaaacccacgttggatctggaagtgacggctctagactgggagaagatcaacttgcgggacgaaacgacacactcactgcatctggagctgtcactcttgggccggacaagctcctctgtgtacgttctcgccatggacgtgatatacaacgagtacctcatagaccccttcctcaagacgctggagcagctgaagtactgcttccagtccacctacaacctgaagttccacgccgtcgtggggctccacctacgttcgcaagacgtaaccaccctgtttttagaaagggcagtcatagagcacgacctcgccgtctacgatatcgttgaccaggccatacaagagtcccgcttcaatttttatctcatcacttag

SEQ ID NO: 4715 - DNA, 1008 bp, Saccharomyces pastorianus
atgctgggttcaaagcagttaatagaaaacttggtaagatttaaatttcataaaacaccatacacacggagttcaatatggccattcaaaagaaattcggcggtaataattttattgtttattggcatgaagggcgaattacgtgttctcttaactaaacggtcaagaacattgaggagcttttcaggagacgtttcattccctggaggtaaggctgatttttaccgagagacgtttgaggatgttgccagaagggaagccgaagaggagattggattaccacatgattctgagatcttacataatgaatttggaatgagattagaaaatctagtcatggatatgccgtgctacctatcaagaacattcttgagtgttaagccgatagtgtgctttctctacaagaataatttagatcacaatgaggataaatacaaggttcccttagacatcagtaagttttttggtaaactgaaccccggagaaacatcttctttattttcggtaccattgaatgatctaatcgtacatctattgccaaaagacgatgcggatgttaaaaactacagggcggaatattttgaacgtaaagagtataagcgtaattggggcggtgtaaaatggttaatcatgcattaccatttccatgtagccaataataacgaaatgccatggctgcaaattatagaggatctatcaagctcagacgaaggtggccttgatggggacaacgctattttcaaattccgggacctttggggtttgacttgtaaaatactatttgacgtatcatgtattgctaatggactgatggatgacaagttgagaaaagagttgggccatgaagatttgatagttggactgcatgattatggtaatcaaatgcagctaaatggaagaagtgagtgggagataggaatgataaacggtgacagagatttaaagtatagtgacgtgatacctgcatattatatgaaacatttgataggacaccgatcattatggtga

SEQ ID NO: 4716 - DNA, 774 bp, Saccharomyces pastorianus
atgtggcaaacagagtccggttctcacttgattgctcctttagcaggtgccgtcccaacgaaacccggttctgccactgtcccattctttggtattaacgcttgtatcatcgatcctgttacaggtgtagaactagaaggtaatgacgtagagggtgtccttgccgttaaatctccatggccatccatggccagatccgtttggaaccaccacgatcgttacatggacacatacttgaagccttatcctggtcattatttcacaggtgacggtgccggtagggatcacgatggttactactggatcagaggtagagttgacgacgttgtaaatgtttctggtcacagattatccacatcagaaattgaagcatctatttctaatcacgaaaacgtctcagaagctgctgtcgtcggtatcccagatgaattgaccggtcaaaccgtcgttgcatacgtttcactaaaagatggctacctacaaaataatgccgctgaaggtgacgccgaacatattaccccagacagtttacgtagagaattgatcttacaagttagaggtgagattggtccttttgcttcaccaaaaactatcattctagtgagagacctgccaaaaacaagatcaggcaagatcatgagaagagtcctaagaaaagttgcttctaacgaagccgaacaactaggtgatttatccactttggccaactcagaagttgttcctgctatcatttctgctgtggaaactcaactcttctctcagaagaagaaataa

SEQ ID NO: 4717 - DNA, 903 bp, Saccharomyces pastorianus
atgacagttaaggaacataaagtggtccatgaagctcacaacgtggaagctcgtaaggctcctcaacatttttacaatagtcaaccgggcaagggttacgttactgatatgcaaaattatcaagagatgtaccaagaatctatcaatgaccctgaaaagttcttcgacaagatggccaaggagtatttgcattgggacgctccatactctaaagttcaatccggctcgttggacaatggtgacgtcgcatggtttttaaacggtaaattgaatgcttcttacaattgtgttgacagacatgcctttgccaatccagacaagccagctttgatctatgaggctgatgatgaatctgaaaacaaaatcatcacatttggtgagttactaagaaaggtttctcaggttgccggtgtcctaaagagttggggcgttaaaaaaggtgacaccgtcgctatatatttaccaatgatcccagaggcagtcgttgctatgctggctgttgctcgtattggtgccatacattcagtagtctttgccgggttctccgctggttcgttgaaggatcgtgtcgttgacgcaaactctaaagtggtcatcacttgtgatgaaggtaaaagaggtggtaaaaccatcagtaccaagaagattgttgatgaaggtttgaatggagtcgatttggtgtcccgtatcttggtcttccaaagaactggtactgaaggtattccaatgaaagccggtagagatttctggtggcacgaagaggctgctaagcaaagaacttacctgcctcctgtctcatgtgatgctgaagatccattatttttattatacacatccggttccaccggttctccaaagggtgtcgtccataccactggtggttattcatcgggtgctgcttaa

SEQ ID NO: 4718 - DNA, 264 bp, Saccharomyces pastorianus
atgggtggtgtcgtggttacaaaggacatcataggttgccaaacagcaattgaagaatggggggtagcgactttgatagacaaatttgccactttaagagaactggcaaacttatttactgttcaacctgaattactagaatcgttgaccaaagaaggccacttagcagatattggaagggatattattcaaagctatatttccaacagagaggacttcaatcatgacaagttcatcaacagtgttaaactgaattttagataa

SEQ ID NO: 4719 - DNA, 2211 bp, Saccharomyces pastorianus
atgaactcattatatgagttggatcctaaatggaaaagactgttaacaacaaacaatttcttgggtggattaacggtcaatgagttcgttcaggagttgagcaaagatcatcgtaatgatatgttagccgatgctaacaccaagggtctttcgaataacgaaaaagaccaagatgcaattcgggaggccatttggaaacaattggaccccaaaccctacattagaacatttgaatccacattgaaggaactgaaaaacttgaacgaggaaaccctaaataaaaggcaacattactccgaccaagtagctacccaagaagtgatacattcagaaaacgtcataagtctatcaaagaatttacatgcaactctactcactttcgaaaaattggatgatcgtttaacaaatgttacccaagttgtttcgcctctaggtgataagttggaaactgcaataaagaaaaagcaaaactatattcaaagcgtggaattgatccgtagatataacgacttctattccatgggaaaatcagacattcttgaacaattaagattatccaaaaacaggaaattgaatttaaaatctgtgattttgatgaaaaatctactaattttatcatctaaactagagacgagttctataccgaagactataaatacgaatttaatcatcgaaaaatactctgagatgatggaaaatgaattattagagaatttcaactcagcttacagagaaaataactttaccaaattgaatgaaatcgccatcattcttaataatttcaatggcggtgtcaacgttattcaaagttttatcaaccaacatgattatttcatagacacaaaacaaatcgacttagaaaacgagtttgaaaacgtcttcataaagaatgtcaaatttaaagaaagtttaatagattttgaaaatcatagcgttattatcgagccctcaatgcaaaatttaataaatgatgtggaaagtgtaataaaaaatgaatcgaagattgtcaaaagggtctttgaagaaaaggccactcacgtgatacagttatttattcaaagagtcttcgcccagaaaattgaaccaagatttgaagttttattaagaaattctctttccatttcaaatttggcgtacgttagaattttacacggacttttcacattatttggtaaattcactaaaagtttaattgactatttccaactattagaaattgatgacagtaatcgagttctgtcaaccaccttggagcagtgcttttctgatttattttctcattatttatatgataggtccaaatattttggtattgagaaaagatcactggagacaattcttgtggagatgacatctaaattcactgtaaattatgataaagaaactaataaaaggatcctattagaaaagttcagggaaaaattatccacgaacgtagatgcatttatgcatactcctaggggcaatgcacactctcgtcaagattcaacgtcaaggagtaaactgtcacaattcaactcctttttgaaaactcatttagataaagatcatttgagtctcaaccgcacaaactctttatatggctcgttaacaaataactctacgtccacacaatatgacatggcaaacaacaattcgaatttaatgaacccaaacagcataatggatgatattgataataatccaaatggtcccaagaattattctttggatgacgtagattctatgttgaaatgcgttgtggagtctaccgcaagagttatggaactcattcctaacaaggcgcacctatacattttagaaatattaaaaataatgtttttgggaattattgactcatacatggaaattgcattagaagtggcctactggaaagtttgtaaaatggacgccaataaagcggtggcagtagtgaatttgaattttctaaagctcattgcaatgagcacaaagatattggatttgttatcaatttcaatcaagtccatcttcttgccactattgaataactcaccagaaataaaagctcaaattattgaaatgaccaattctcaaattcaaaagatggaaatgctaatcaatataattctacaagaaaccattgcggtgatatctacgaaattttccacaattctgtgtaaacaaaataagaaagattttataccaaaatctcaagatttgttagatcgacaagcttggatccggccataa

SEQ ID NO: 4720 - DNA, 438 bp, Saccharomyces pastorianus
atgacttccaaagtcaacagttcgttgtcgacatccggcgtcactcccacaatgaagaaaagactggcgtatcgcttatataccactttgtggtcgctgtattcgatgatgttgcacattttaggcttccttgctagaatcgtaggtgtcagattttttactatcttggccttttcactagcagacattgcagtataccatttctttaatctaatctttccttgtctagaaaccaatatcaaataccttaattgtgtcatctctgtgcttttgtgtgtgtttgtgtttgtaattactctcctggctctttcgttctcatcttcttttattcgttcagggccatttctggctttcttttggctgaaattgaaatacgcctcgttacccgactatattttcgtactaatacatactataaagagagatacacatagatga

SEQ ID NO: 4721 - DNA, 1803 bp, Saccharomyces pastorianus
atgaatagtcaagacttagaaactcaaccactgttgagatcaaacgcccaggaaaatcagcttctctgtgatgaagtgcgaatcaatgtggcacaaaagtcgataaataaggcccgtataagaagtatgaaacgcttggttacctatttggtaagtgtggttctaataggttcgcttggctttggtatagttcgatatattaagggacacgtgccgcccacagaggtaatagagaaaagtttagtcgatgtgacaaatttcaaattaatggaattccagcttgacggttggaaagatgatattcattctggtttaaacaatgacactgggaagtatttacaggtgtctatacactctcagatctggttcgattatgacaattggccagctgcagggaacgactccctgataaaaaaccaacgagattggataagacatgttaacgaaaaagtgctcaaaaccgtttgtatagatatgaataacgtgactacttttgacggagatctggaattcaaggataagctgggagacgttgttggcatggaccccatttgccttgatttgagtcataagaaaatcaatgacctgcaatttaaagttttggtcaaaccgtctatttggaaaatcataaaggtcatgaaaaaattctggaacggcgacttcgattccttgaatctaaagtctaacttggatatgattatctttaaggaaaaattcgggatgaggttcaatttgcggaaactgaatgacgaaatcttaaattggaatgatatcatcgattgggagaaactactgtcagagcctcttcaaagggtacgaaatatgatcgatacaatggcccttcaagattttacactaagggactccgattccgaagggttccatgccaacatgatattaaatccaataacgattttcaaaggattagattggcttcggcttccgcatggttcgacaattcctttcatcaattgggaaataaaactaccggactgtaacggcgaaccaactatcgcgattccaacattatcgtgctttaatgaaccgattaatttgcaccatgatagagacaatatagttgtctgtctacaaaatgaaatcgaaggacccctgcccgatgatttattatacgaagaatgtcccaataacagtcttacgccaatgagccagatggtcaatgcagttttgaacgcaaatgagaccattacatttgccgcaagaggccatgttattgacgatggcactaacgatgattctttgattcctgtcgacatgctggacagaattttgcaagagatctcattcatccccctaactacgaatgctacgtttaattccagtgaattgattcaagaattccaaatcaatgacctccaattacgattggcagcgcgcaagaagctcagtctcgtggggacattcgtgggtttcttcgatctatctttttacgagacacattaccgtgaccaggttagcatcgacaccatccggggacaaatcgacctgtaccacaacgatgtcaatttcctgaatttacccatgaaagattgggtcaactccacgtcgcgtatcctgcacgaccaagacacaggcaacacgctgatgcagctccaatttaaccttgagaacgacgacatggaaatcgtcaatagcctagaactaactcggacattgaacgagatccttttccagggcttcacagtaatccatttcaacgcaacaatcgatgcgtcactcacgacggcacttggcccttgggtgctcacggggttaaccggagagggtgatactttggtcacgtga

SEQ ID NO: 4722 - DNA, 2310 bp, Saccharomyces pastorianus
atgcctgtgtccggggataattcgaaggatcctgctagtcgggatccgaatgacgatagtaacggtcctggtaacgggtcctcgatgaacaacaatcagtacagcttgaacgctcccaagtacaacagccaaccgcagccggcctcccacacgtacctccctccgatgtcggtgaaaatcccccccatagccacaaaaccctcttcgatatacagtcttttacatcaaagttcccctcggccggagtcgccaaacccaatattgccgcctctcattggcagtggctccaactctcatataccatctcctacccctgcacagcctccgcctcctccacagccaccgcactctgctgcgtactcgatgtacccatcatcgatcagtctgaacagatccaactcgtctattttcccactgcctttcaaatcagaggacataatgaacagtaatccctctaccgcggccaagagaacgaacaccttcccctcaattcctgacaacactaagaaactgaaaaccagtcaagaaaaaagaatctcctccatctcaaggaggaatacccaagaaataatagctaaacagattgccgaaagcaacaagtccaagaccattgaagaatatgctcagattgtgaaacacgcagaaataaaagtcctgaacatggactcgcaaaccacctcaaaggcttctttacaattggcggaacaaaacagagaaagggaaaggcaagtgtttgcgctactctggttgatgaaaaactgtaagtcccagcacgatagttatgttccaagagggaaaatttttgctcaatatgcctcatcatgctcccaaaacaatctaaagcccttatcgcaagcctcattggggaaactgataagaaccgtgtttcctgatttgaccactagaagacttggtatgagaggccaatcgaaataccactattgcgggttaaaaatagctaccagtgaaaatggcactgcggcgattactaacaatagcaccccgtcatctctggcacaaaataatgacccgatatcgcccctatcatcaccctccccatcttcaccttcaccaacattaactgcagtcttatccccatctccatcgaatactaaatctgtttctcataccgcttcgccagttaagcagactaataacgacatcagtaatgaaccagaactgcaacacaatgatcaacctataacgaatgaacaaacaacaagaacaaagatgatggcggcggcaacagtatcatctgaagaattgagtttcgctgatgatctcgttgaaaaagttttcagctgcaatgataagctatcagataagtacaatactcaaatatcggccaatatagaacctccattgctgacatcatacaagttagaattccccaatattccgagaagtgcactcccggcagaaacggatgcggacgttatatcatctttagagtcgttgtaccacatccattgcaactccgtttatgaaagcatcaaatttttgaaaaccgatactatatcaaatgctttatctttctccaactccaattccatttcgcctacgatgtttaatctattcacttctgagccgttgattgattgggtaactaaatgcgacctaatcacatataccgaattaatcaaatttttttctcagtttataattcattcaaatgagatcagcgattctataattaaaaaattggaaaccgtgatcaaaatttatcccgaacaaattaacaaggccgctttagaattaccaaaaccgctggttcaaaagaaactaacaattataaacaattttatcaaattactcaaaaaattgatcaaacttttaaaatttattgtgaattttttaagaagtttccccattttcaaaaatggtatgaataatgactggcagaaagttgtaaatctagaagatatcttagacatgatgattaacgaagaagatgatgcgaattcagagacgaagacaataatgcagcattggcagaagttttgtcaagtgtttgttacaaagtttttgaattcctccatgcgtactagcaacgacccttcaatatccattgaatgcgaatcattgaaccaaatggtaaaggatttttgttattttatttccgaacaaaaccacttttcgtgcttaaaactaattgattgttatacaaggttcaggaatgcattaatcggtgatattagcttaaaatcaagtgaaaacctactatcatggttgtttctcaataatgttatgggccaattattgaactattgttttgaagttatcaaattcattaatactttaaaactctaa

SEQ ID NO: 4723 - DNA, 1716 bp, Saccharomyces pastorianus
atgaagacatcaccttctccaattgtaaacgataacgaacaaaagatgaaactggaggcgttccttcaacggttattattcccagagatccaagaaatgcccgcatcttcaaataatgaaaacactgctagaaatttgcaacagggaagctccggccaacagcagcagcagcatgtttcatttgacagtgttttccaagaggttaatgacgcttttcctcgcaccccattaaatctaaatattcccgtcgatgaacatgggaatactccattgcattggttgacttcgatagcgaacctagaactggtgaaaaatttagtcaagcatggctcaaacagattatacggtgataatatgggggagtcttgtctagtgaaagctgtcaaatcagtcaataattatgattctggaacttttgaggcactcttggattacctatatccatgtttaatcttggaagactcgatgagtagaacaattttacatcatatcattattacatctggtatggccggttgttcgtctgctgctaaatattacttagatattttgatgggatggatcgtcaagaaacaaaacagacccattaaaagtggtgataatggtgggaataagagcgataacgaaaaaggagaaaagagggattcaattctagaaaatctggatttgaaatggataataactaacatgcttaatgcccaggactctaatggtgatacttgtttgaatattgcggcaagattaggaaatatctcgatagtagatgctttattagactacggtgcagacccatttattgcaaacaagtcgggcttaagacctgtggattttggggcaggtacttcaaaattacaaaataacaacagcgatgacaaaaactctgatatggtgtccaaggaagattctgatagccaaaacgacggaagcaacaaaaaaataaggactcaactactgaaaaacccccctgaaacgacgtcgttaattaatgaagttcaaaatttactaaactctatctcaaaagactacgagtctgagacaatacaatataacgaaaaactagaaaatctccataaagagttgaatgaacaacgagataacttggctagttcaagagatcaattagcaagtgtaaaacaactgaaagacgaatactcattaatgcaagagcaattgactaatttgaagtctggcatcgaagaagaagaagcaaattttagggaggaaagcaaaaagctgggaattattacagacgaaagttcgggtattgattgggagtccagtgaatacgatgcagatgagccattcaaagtagagctcatttcagatttcttggaggaaaaactacaaacggactatgatggtgacatttccaaattgctagaatcagagtccaaagagcaaataatggaacaaatacgaaatcaaattccgatagaaaaaatcgattctatgctaccacctaccgttttactaaaagcaagaataaacgcatacaagaggaacgataaacacttaagcaatgtcttgcacacaattagtaccaaacaatcagaattagagaataaatttagaagagtgttgtccctatgtttgaaaattgatgaaaacaaagtggatgatatgcttgacggtttgttgcaagccatatcatccgaagacccgcaagatatcgataccgatgaaatgcaagatttcttaaaaaagcatgcttcgtga

SEQ ID NO: 4724 - DNA, 591 bp, Saccharomyces pastorianus
  modified_base (567)..(567): a, c, g, t, unknown, or other
  modified_base (578)..(578): a, c, g, t, unknown, or other
atggcgttggaagaagtggtgcgatacttgggacctcataatgagatcccattgacgctgactagagactccgagactggtaatttcctcctgaaacatttcctacctattctgcagcagtatcatgatacaggaaatataaatgaaacaaaccccgataaattccccactaatgaggaaagagatagattactggcgcattatgggattgttgtgactacaaacgaccaaggtgagttatggatagagttagagaaatgtttcgaactattgaacatgttaaatctgtttggcttgttccaggacgcatttgaatttgaagaggctgaaacagatcaggatgaagaggaccctgaacatattaaagaaacagagaacaatataaaaaacgagaacaccacaaatagtgccagtttcaaaaggatcaataatttacaagatacggaggtaaattccgatgatcaaagggaattgggctctccgttgaaaaaggttgaaaatagacacttctgcgatagaggcggaaagtggcacgactcctactgctgccacccagttaacacctantacaatgacgnaataaggagctag

SEQ ID NO: 4725 - DNA, 78 bp, Saccharomyces pastorianus
atgagatacttgaaacacgtctcaagaagattcaagaacggtttccaaaccggctctgcttctaaggcttctgcttaa

SEQ ID NO: 4726 - DNA, 543 bp, Saccharomyces pastorianus
atgatgaatggtactgaatatcaaacgaaacaatctcaacaattgcaagcacctcatacaggaccgcaatctccgtcatatgctaacagaaatttacaaaccaacgcctcacagcctttggcgtcatatccctctggccgcccattggtcaatataagaacgggcccattgaccactcaacctatgcatcagagcgggaactcgccaattaataatccccaatttccgcaacagcgtttcgctccctcacaacaatcgcaacaagcacaattgcttcctctgagaaacgatgtttaccggggcattaacaaccagaatccgttatacccatcacagcaacaaccccaaaatatgagatatccgaataataaagcaccaataaatagtagaggcccagcaccaataatacagcccaacatacaagatagccgctctaatcctcctataaagatcaataatcacacaaagccacgtgtcacaccaggcggattttcacagtttatgccacctaataacacatcaactaacccatattctaactag

SEQ ID NO: 4727 - DNA, 864 bp, Saccharomyces pastorianus
atgaaaagaatcttctctggtactaagtctccgaagttacctgctcccccaaaagtttacaagaacgatgacagtccatccgctccaggctctcctaaagtcgaccaagggcttcgaaatttaactgtatctgcatcaagattcttcagtagctcatcatccagtcctggaagccccacattgaatcttccccaagaacactctattaatggtgacatctctccagaattagtaccgattgttactttactttctgcgcaggctcacaggagataccactatggaattctcttgatattgcatgatttaaaaacggacggtacacctgctacccgtcaatgggaagagtgctatggtgtcctgttaggtacccaattggccttatgggatgctaatgagctttcaagctcgaagacaaataaagaggattcaaacctgaagaaaattgcatcaagacccactttcatcaattttacagatgcttcggtaagaagtctagatgcgaatgatgatgttaccagtacgggaggcaacaaaagtaataaaagtgatttagaaaatgttctcgttgtttccacaactttaaaaaacagatattttctaaaatttagaaattcagaatcgttcaaaaattggaatgcagcaattaggttaagtttattcgagttcactgctttacaagaggcttacacagggtcgtttctttcgagtagaggcgttaagcttggtgatattaaggtcgttatggcagatacaaaatttacctacgaagactgggttagcgtaagatttggtacaggtatgccatggaagcgttgttacgcagtgatttctccacaacccaacaagaaaaagagaaattaa

SEQ ID NO: 4728 - DNA, 1437 bp, Saccharomyces pastorianus
atgactactgttgtggatgcaaaggctttgtatgctgtatatccctcctctccgatattgattgacacttctaccataataaagttggaagggctggtttcttttgaaaaacatgaggaacctcaggagaccaacatcttcatcatgcctgaaaaacaccaaggtgttcctgggtatgatactattattcgattcttaatcccagctatgaatgctttctacttatatgggagaccaaaaggccttattgccaatagagtcgaccctggctctttactgtttgctttgccaacgctgcctcatatacattatttgcaagtggatgatgttgtatcgttcactaaagataagaactattcacattggaatgctgttgaatggagaagtaatatcgttcaattactacagaagaagctaaataagggttacaaaggctgtggcaccaagtccgtacctactacatcagccatggcaaaatccccagcaattagctcggtagagttgtttgatgggtacgattcacttcctgcaagccagttagagagcttagaaaaccctaatataaagactcgttccacattagcgtcaactgatgacgctgattcacctaactctgtgaattctcatgtcgcctctgcgaaacaaacccttttgtctgtgcctgacaactcctcaaaaatcagtgattctttatccactcaatccagcgctatcaccaacttcaaggatagctttaccactccaatgacatctgggatgctcaatcaagagaatacgaatagaagcttgacatcgggtctgaagattgaaatcacggattcgagtctcaaaagtacggaagaagtcgaagcggactcttccaacaacttttccacgacaccggaagacaagcatataccactggctaatgcgcctgacttatctgctctttatgacaaatactctacttcgccatttggtaaatccgaggctaatttaagtcctaagccacaaactttagatgtcaacgatcgaattgaaagcgaatgtagaagtccttatgagagatatgttggaacatccgctgaaagtaagatatttgaaataggtaatgtgagagaatccaagagcacaatcaacacgtgtctatcgtcacctgtaagggtagaggataatagatattcaagaaatgagtatatgggatcgttaggagagtttgaagagctttcccgaaagattagcaatatgggagtaggcaatatgtcttcagaggctctaaatgaaaaatcagaggataattctttagtaacggatttgaacttagacattagtactgattcacctaccaccttacctgatgaccaacgtaaactggattcggagaagcaaacgtatttgatcctgactatatggaacaaaaccaaatgctggaaacggaaagtaatacactacggatga

SEQ ID NO: 4729 - DNA, 741 bp, Saccharomyces pastorianus
atgggacaagatatatcagaaaccgatatggaaaatgtttgtgttttcgctcagagagtcgcttccttagctgattacagaagacaattatacgattacttatgcgaaaaaatgcacactgttgcaccaaacttatcagaattgattggtgaagtgattggtgctagattaatttctcacgcaggttccctaactaatttatctaagcaagcagcttcaacggttcaaattcttggtgctgaaaaggctttgttcagagctttaaaaactaaaggtaacactccaaaatacggtttgatttaccacagtggttttatttctaaggcctctgccaagaacaagggtcgtatttctagatacttggctaacaaatgttctatggcctctagaattgacaattactctgaggaaccatctaatgtttttggttccgtactaaagaaacaagttgagcaaagattagaattctacaacactggtaagccaactttgaagaatgaattagccattcaagaagccatggaactttataacaaagataaaccagctgcagaagtggaagaaaccaaggaaaaggaatcctcaaagaagagaaaattagaagatgatgatgaagaaaagaaggaaaagaaagaaaaaaaatcgaagaaggaaaagaaagaaaagaaggaaaagaaggacaaaaaggaaaagaaagataagaaggaaaagaaggataaaaagaagaaaagtaaggattaa

SEQ ID NO: 4730 - DNA, 126 bp, Saccharomyces pastorianus
atgagagttaaagagtggtatggctggcatttccccgaactggctaaattggtcccagacaactacacttttgccaagttggttcttgttatcaaggacaaagcttcattaaacgatgactcctga

SEQ ID NO: 4731 - DNA, 72 bp, Saccharomyces pastorianus
tccgaagagtgccatcgtctttggagatgtgatagtgcagcctttggtgcccaatcaggcctatacatatga

SEQ ID NO: 4732 - DNA, 558 bp, Saccharomyces pastorianus
atgatctcctcgataggcgcttccaactcgccctcgtttgttcattcgtccacagctgtcatggaactaatgaaattccaattggtcgataaaagataccgtttgactgaaggaatcaatcccgatataacaccacattataaattgccctcgttggaacatttgttattaaaaaggctagagatggataaaccagttggcgaacaattgacggatttgatgtcacaattggctatcccgagcgggtttctctttgaaactgcgatccctgaattacataggttatcggatgatatgatttactactccaacgaaaaggaccatcatgattccgcatggtatgcaaagagaatggctgtttcgagcacgtatatcggttcgcaattatttatggctcaagacaggtctcatgacttccgggagacttttgcttttgcaaaggacaaattacatagagttatgcgtttgggcgaatactacaataacactgaagagtttgcttggtatacattaatgtcgacggtcaatttagtcaaatctcaattagttagaggttaa

SEQ ID NO: 4733 - DNA, 189 bp, Saccharomyces pastorianus
atgttaggtcgtaacattgccaggaagagctgcgcatctcttcgtttatatcactcaaaccccatcgagcacgtcaacccgctccatattaagcctctaacttacgggaaacaatcgcctcaatataaagtactatcctggccttacaagaatacgttcccaaacatggtttcactgagagatccatag

SEQ ID NO: 4734 - DNA, 849 bp, Saccharomyces pastorianus
atgggcatccagatggccatcgccatgaggcacggcttcatatacagacagggcattctcgcgtactactacgtgttcgacgccatcgagcaggagatcgaccgtctgctgaatgacgctgtgtccgagaaggagctgcaggcgtctggtattctgaagcagttttggctcgaggacttcagacggtccacccagatctacaaggacctgaagctgctgtactcgaatacgttcaagagcacggagtcgctgaacgagtttctggccacgttcgagaaaccgccgctgctgcagcagttcgtcgacgacatccacgacaacatacgccgggagccttgcaccatcctctcctactgccacgtcctctacctggcgcttttcgccggcggtaagctgataagatcgaacctgtacaggagactggggctcttccccaacttcgagaagcttacgcagaaggaattggtcaagaagggcacgaacttcttcactttcagcgaactgggccccacggaggagacgcggttgaagtgggagtacaagaagaactacgagctggctaccaggacggagctgacggaggcgcagaagctgaagatcatcagcgtcgcggagggcatcttcgactggaacttcaacatcgtcgcggagatcggagaactgaaccgccgcgagttgatgagcaaattcagcttcaagtgtgtcacctacgtgtacgaggaatggatgttcagcaagggctctgcctccagaaaggccttcagcaccaccatgctgctgctgctctccatcgccgcggtctggatcctgtactactttgtaaggaagagttttcttagcgtagtataa

SEQ ID NO: 4735 - DNA, 735 bp, Saccharomyces pastorianus
atgcagcaactacaaagacaacaacaagagcaagcccagttacagcagcaaaggcaacagcaagaggctcagttacagcagcaaaaacaacaacaagaggctcagttgcagcagtacagattacaagaacaagctcaattgcaacaacaacaacaacaacaacaacccttgacacaaacgagaacaggcaaccagtccgtatcagataaatataacgacttaaacgttttgctggcaactggtaccggcgcagacacttttggtaacacaggggaagcgcgtattcccgcccaacacaccaaaacgggcacttttataaattctcaaggtacagggtataaacaggttgtcaatgaacctaagaacaacccattcttgaacagccaatacaccggtttaccaagtacaagcatcgtgcccgcacaaacaggttatgggtttggaaaccaaccaccaaatcctggcatgagttcccccccacaaaactccgctaacgtgaactactcccaacctcaacaacctcaacaacagcaacaacaacaaccacagtacactcaaaactaccaacaacaacaaccgcaatacacgcaaaactaccaacaggcttcttcacagcaactgcaacagcaacagctacaacaacaacagttacaacagcaacagctacaacaacaacaacagcaacaacagcagggatatgcccccgaccaaggtataagtttaattgatctttga

SEQ ID NO: 4736 - DNA, 675 bp, Saccharomyces pastorianus
atgtcgaaacagtttgttcgttctgcaaagaacatggtgaagggctactcgtccacacaggtgcttgtgagagacgccacggcgaacgacccgagaaccccgtcgatagacactcttgatgatttggcgcagaggtcttacgattccgtggacttcttcgagattatggacatgttggacaagaggctgaacgacaaggggaagtactggagacacgtggccaagtcgctgaccgttctggactatcttgttcgcttcggtagcgagaactgcgttctctggtgcagagagaacttctatgtcatcaagaccttgagggagttcagacacgaaaacgagtctgggttcgacgagggccagataatcagggtcaaggccaaggaactggtctcgctgctgaatgacgacgaaagattgcgcgaggagagaacgatgaatacgaggaacagaagggccactaagactgtgagacccagaccaagaagacaaagaacgagaagcaacccgtacgattctccccccacctaccagaatgacctggaaaaggccctggaggaaagtagaattaccgctcaagaggacgaactacgcaggaatgaaatggcccagtacgacgatgaagaccctgatttccaagctgctttgcaattgagccaaagaggaacgaggagttga

SEQ ID NO: 4737 - DNA, 954 bp, Saccharomyces pastorianus
atgtacgaggattccgatggggaaatgatagaaactacagaggaagatgaggacagcgtacttgaaccactatctcccataaacaacgatgaaatccagaatgaattggacaaggcatttgaaaaatacttccaatcagtacctgatccgctggatgacgacactcatgatgtggtgatggttgtagaatatgcatcggaaatcttctattatttaaaagagctcgaagtgaaatatagacccaacccgtattacatgcagaatcaagtagaactaacatggccattcagaagaactatgatagattggcttgttcagctgcattttaggtttcagcttctaccagaaacactatatttaacgattaacatagtggataggtttttatcaaagaaaactgtcactttgaatagattccaactagttggtgtgtctgcattgtttattgctgccaaatttgaagagattaactgccccactttagatgatctagtctacatgctagaaaacacatataacagagatgacattataaaagctgaacagtacatgatagacacattagaatttgagattggttggccgggccccatgccatttttaagaaggataagtaaagctgatgattatgattttgaaccaagaactttagcaaagtatttattggaaactacaatagtagagccaagattagtagcggctgctccgagttggttagctgctggtgcttattttttgagtaaaataatacttggttcgaacgattggtctttaaaacacgtcttttattccggctatacatccgaccaaataatctctttagcttcactgatattggaaaattgcaaaagtgcatctcgacgtcatcattcaatctggaaaaaatattccgatcagcgacattaccgctgttctcaaattgtagaagaatggattgtttctaaagagtcttaa

SEQ ID NO: 4738 - DNA, 159 bp, Saccharomyces pastorianus
atgtttgacgggcgcacagtacaacctccacggtctactttgacagatggcagtgacattttgaatgaaaatactgatcaagaggccgaaaactactttaccatgagttccaaaagagtacaaaggggccagagagacgacaggggagagtggctttag

SEQ ID NO: 4739 - DNA, 201 bp, Saccharomyces pastorianus
atgaagactaacttgagactggaacaattcaaaaaggaattagtactatatgagcaaaacaaattcaaggaatatggcatgaaaattgaccaaattgcaaaagagaacaaaaagttgtctaatgaaatcgggagattgagagaacgttgggatagtttagtagaaagcgccaaacaaagaagggataaacaacgaaactaa

SEQ ID NO: 4740 - DNA, 270 bp, Saccharomyces pastorianus
atgacagcaaaaattcaagaattagaacttttgatcgataaacggtcaccagaagaaaacagtatcggaatgctcaacaataatatgcttatcgggtctgttatcttgaataacaaaacttcgataaatggagtgggcaatactagaaactgggataattcaatatatcaaaattcattgaaccccctaaacgatcctattttgatttcaattttgaatcgcttgcaatttaatttgaataatgatatggaatcgaaggtgaaggagtaa

SEQ ID NO: 4741 - DNA, 153 bp, Saccharomyces pastorianus
atgacaccgatatggcgcttagggacctcgaaatggcaaccactttccaaccgaaatgaggccgccatcttgaaagccatggacgacaccaaattgaagaggaagcaacaaaacgaaaaacaaaagaaatctctttcgaagatgttctcctga

SEQ ID NO: 4742 - DNA, 1023 bp, Saccharomyces pastorianus
atgactagaccaaaggcttttttcgacatttccattggaggcaaacctcagggccgtatagtctttgagctgtacaatgacattgtgcccaaaacggctgacaatttcctgaaattgtgtaaaggtgacgctggtatggccaagaccaagcccgacgtgccattatcgtacaagggctccatcttccatagagtaatcaaagagtttatgtgccagtttggcgacttcaccaatttcgacggtactggtggtgagagcatatatggtgaaaaattcgaagacgaaaacttcgctgttaaacacgacaaaccgttccttctatccatggctaatgccggtccaaacaccaatgggtcacaggctttcataacctgtgttccaacacctcacttggacgggaagcatgttgtgtttggtgaagttattcaaggtaaaagacttgtccgcttgattgaaggccaacaatgtgatcaagaaaataacaagccaatgcgtgacgtaaagatcaatgactgtggtgtgctgccagaagattaccaggtaccggcggacgcggaagccaccccaacagaccagtacggtgacaattatgaggattttttaaagcaagacgaaaaagtggacttgactaaattcgataccgttttgaaagcaatcgaaacagtaaagaatattggtaccgagcagtttaagaagcaaaactattcagtggcctttgagaaatatgccaaatgcgacaaatttttgaaagagtatttcccagaagatttaccaaaggaacaaattgaaacaatcaatcagctgaaagtttccgtacctttaaacatctctatatgtgctttgaaactaaaggattataagcaagtactagtggctgcatcagaggtgttatacgccgaagcggctgacgaaaaggccaaagccaaggctctgtaccgtcgtggactggcttacttccacgtcaatgacaccgatatggcgcttagggacctcgaaatggcaaccactttccaaccgaaatga

SEQ ID NO: 4743 - DNA, 291 bp, Saccharomyces pastorianus
atgagtagtgttggcgagaattcagagtattacaagcaggcgctggaggagtacaaggacgtccaggaggacgaggacccggatgtgtgggatgcgaggatttctaagaccggatgctacgtagaaaacctagcattacagctgtgccatgctgaaactggcgactggagacagtgcttcaacgagatggcactatttaggaagtgctgggaaaacaacggcaacagagagcgtgtaagcacggtcgacatggacaactcgaccaataatggcccggacaaagagaaatga

SEQ ID NO: 4744 - DNA, 168 bp, Saccharomyces pastorianus
atgtgtctgccctctgcgtttttgcttcctctcccctcttctcatccatatttttcatatttgtttttcttttccttcttttttcaacatgacaatgtccgaaaaaaaggggtttcagccattgaaaggcagttgaaagcacttttaacagtggtgttaatcacataa

SEQ ID NO: 4745 - DNA, 339 bp, Saccharomyces pastorianus
atgacattgtccgaaatatcatccaagataaacataaaaccgcaaacaaagcagtgggattcatcgaaaaaggtggagcatagcgcgaatcaaccgctacagaaaagagccaaaataataacagtgacggaattagaaacacatttcgcaaatgttcgacaagcacacaacccgccactcgaaaacaaaaaaaaaaacgtcttgcctaagtcggcaaagcatgccgttcaacaagaggagagtgttacagacccgctatgctccatcctccctgcatactcggacgaagcaaatgtgagcgttcaagtaccagaaacgcctatatcaaagggcaagtga

SEQ ID NO: 4746 - DNA, 1710 bp, Saccharomyces pastorianus
atggataatgaagaagttaacgaagaatatctgaggtcactgttcaagaacgtccgtgtgcatgtagatgatcatctgacatcaggccatatatacgatgaagatgcatatatcaccttcggatgcttcctagccggcatacatcacaaattcagaaaacttcttgaactactgcttttgagacaagaggaaatgcatcgtaagaaaaactacgatcatattgatgataccgtgataccgttgctgctgaagcttttgtggtctcaaattcacgagcctgtctttcagtggttcgagtgctggttcttcaaaatcgtgcgattagacagcagacatcggttcaggctattcggacaattccataagaaaatggtgttctttttcaaaactacacatcggtattactatgatatcatcgaatgtttctttgcgagatatgatatgaattcagtggttccaccagacatttttacaaagctgaacttagttcaaggaacaaacaaaaaagtcgtattagatgcaacgaatccgttgaaattttctatcgtgatttcgtttcaaagatgtttgattaatataggttctacgcattcctacaaagcaatcctagacgaaccaaccgacaaacccaagagggttgaagacttcaaaaaatctattaggtacctaaccatcgcctcactctgtctcccatccgttggagatacttacctacaattagccaaaatttaccagaacaccggaaagctttcgtcatatctctttgaattggtacgaggttcattggtgaggattccgtccaagtatgcgttgaaaggtttaaaaggtctcatcttaattcctgatttccctgagaggaagcttttaatgaagaaattaaaaaaatctttatcaaaacatccaaaagggaaacgacttcttttcgaaaatcgtattatcttgcagcttctaacaacattagagcatatcatggttccagctttatcgagcgtatcctacacccctgaccgttggctgctaagagatcatttacaagctgctgtatcagaacatcatttgggacatacgaacgctatacttgagattttggctaccatgatgggattttttgactttatgtttacaaatgaagaaggaaaagaacaaaggaggaaactcaaatacgttaatttgagtaaatgtcaagtttcctttttggatttcagcttcgattttattgtcagtgtaatagatgtagtggtcaaacctgcatggcagaaaaatgtggagaattttcaatatctagcgattattcgtttgctaatatgctggattaagtcatatagatctattttacaatatgctcatcggcacaggaagttttgtacttcattggcctcattactcaacgatttgatgaatagtcccttgaattacccaaagtgcttatcgaaccataggccgagaagaacttattattttgaggaagacattatgtttagagagttctcttgtataaattttgcactaactgactttaacgacgatctcgtgtacaactcccccaacatggtaaacaatataatcggttgtcctttatcgaccgagaaaggatcactcaaagaagaaggtattttgcgaataaaagcgatcatattttccggtatgaaatttttagagaaaatgacaccgatattaaatggaacgtcagcaaatataccttcgacctag

SEQ ID NO: 4747 - DNA, 1818 bp, Saccharomyces pastorianus
atgagtttcagagctaagatctcaggtttcggtgctaaggtctcgaaaggtttgagatatctggaaattcctgttcaggatagggactccatcagttttttaaagaatccggatttgcagcctattaaggcggaaaatcaaacatggggtttctggtctaatttcgcatattggggggttatgtccttttccgttggtacctggattagtgcctcgtctgcattaagtgtcgggttaagttatccagagactattggtacgtttattgtcggtgatgtattgactatcgtattcaccttggccaactcgagtcctggttacgactggaaggtcggttacactttgactcagagatttgtcttcggtatcaatggttccgctttcggtatcatcatcagagtgttaatgagtattgtcaattacggttccaacgcttggttgggtggtctttgtatcaacatgatcttagattcctggtctcatcactatctgcatttacgtaacactttgtcctccagtgtcgccatgaccactaaagagttgatcggatttattatcttccacgtcctcactgccttctgctacctaatgaagccttaccacatgaactacattttgatttggtcatgtgtggccacctttttctccatgctgggtattgtgatctatttgacccaccatgctggcggtgttggtgacttgttcacgtccactgaatccaccgccaccggttctactaaggcctgggcttgggtctacatgatttcgtactggtttggttccgtctctccaggttccaccaaccaaagtgattactcgagattcggttcttcccaaaccgccatctggctcggtaccatctgtgctctattgattcccaccactttgattccagtctttggtgtcattggtgcttccacttccgaaaagctatatggtacacaattgtggatgcctatggatatttttgactactggttaaaggaaaactattcttcaggtgcccgtgccggcgccttcttctgtggtgtttccttcgtcatgtcccaaatggcctacaccatctctaactgtggtttcgctagtggtatggatttagccggtttgttgcccaagtatgtcgatatcaagagaggtgctatttttaccgcgtgtatctcctgggcttgtttgccatggaatttctacaactcttcgtccactttcttgactgtcatgagttctttcggtgtcgttatgactcctattatctctgtcatgatctgcgataacttcttgattagaaagagacaatactctatcaccaacgcctttattctaaagggtgaatactacttcagcaagggtgttaattggagagcaatcgtcgcttgggtttgtggtatgactcccggtttacctggtattgcctgggaagtcaataacaattatttccacaacactggtattgttaacttcttctacggtgattcattcttctcattcttgatctctttctttgtttactggggactgtgtctaatcttccctatcaagatcgttgtcaaacacgatgacaaggattactacggtgcattcactgacgaagaagcaagaaagaagggcatggttccattcagcgaaatttctgaagaagaaattgctgcttacacattaggtgaaggatacaccactggtcatgaattcagacctgacggatccgacgaagaagtgcctgaattggccaagactagctctgaaaacaccaacgagtttgaaatagttcaccaaaagcaagatgaaaaaaattcttccaccgccagtgaaagagccaactaa

SEQ ID NO: 4748 - DNA, 1293 bp, Saccharomyces pastorianus
atgtcactttcaacatcacatgctaatcaaaaattactgaagtccgtttcaagcggttctgaaatctccggaaccgaatcactacccattgtgatttcgcctttagccgagtttttaattaggagagcattggtgaaccctagattggggaactttttttattggtatttgaaatctgaatcagaagacaagccttatttagatcagattctaaattccttttggagtagattaaataaaaaatctcggaatatactaaatgatcaaatcagattaatcaacatacttcgagaatgttgtgaagtcattaaaaagctaaaggataccacagccaagaagatggagttgttagtacatttactagagacaaaagttaggccactagtcaaagtacggccaatttctttaccactagatccagacgtgttaatatgcgacgtctctcctgaaacatcgaaggtatttaaaagttctttgtcgccattgaaaataacatttaaaacgacattgaatcaaccataccatttgatgttcaaagttggcgatgacttaaggcaagatcagctggtagtacaaatcattagcttaatgaatgagttactaaagaacgaaaatgtggacttgaaattaacgccatacaagatcctagctacgggaccacaagaaggtgctattgaattcattcctaacgatacattagctagtatactaagcaaacatcatggcattcttccttatctgaggcttcactatcccgataagaatactgaactgggcgtacaggattgggtactagacaactttgtcaaatcctgtgctggttattgtgttatcacatacattttaggtgtgggagatagacatttagacaatttactagtcaccccagatgggcatttctttcacgcagactttggttacattctaggccaggaccctaaaccctttccacctttaatgaaacttccacctcaaattatagaagcatttggaggtgcggaatcatcaaactacgataaatttcgtagctactgctttgtggcatactcaatcttaagaagaaatgcgggattaattttaaacctatttgaattaatgaaaacgtcgaacataccagatatcagaatagaccccaatggtgccatcttacgtgtaagagaaagattcaatttgaatatgtctgaagaagatgccacggtgcatttccaaaatctaatcaatgacagtgtaaatgctttactacctatcgtgatcgatcacttacataaccttgctcaatactggcgggcttaa

SEQ ID NO: 4749 - DNA, 1209 bp, Saccharomyces pastorianus
atgtccctaaataacataacattttgtgtgtcacaggacctcgatattcccttgaaagtgaaaattaaatcattggaaggtcagaaacctcttttgaagccatcccagaaacttctgaaccctgaactttcattggtagcgtccaatgtgtttcctcatagcgatctagttgtatcattacaggtgttcgataaggaaagaaatagaaatttgacgcttccagtatactcaccgtatattccttttaaaaattctaggacttgggattattggttaactttgcccatacgcataaagcaattaacgtttagtagtcacttgcgtatagttttgtgggaatatgacgggtctaagcaagtctcattctttcaattggagacaagcattttcaatccggtggattgtgcgctaaagagagggtttgaatcactaaggttttgctatgatatcattgaccactgtgaagtagttactgataacaaagatcaagaaaatttaaatagatatttccagggtgaatttgcaagacttccgtggcttgatgaaatcacaataaataagctgagaaaacaacgtgaaaaaaggacctggcctcagggtatttttatactaaatctagagttccccatgttggaacttcctgttgtgttcactgagagagaaatcatgaatacccaaataaatatcccgactttgaagaacaatcctgggctgagcaccgacttacgagaaccaaataggaacgattctcaaaccaaaatttctttgggaaataaatatcactctactctgaaattttacgaccctgaccaacctaacaatgatccaatagaagaaaagtacaggagactagaaaggacgtccaaaaatgcaaatttggataaacaagtgaaacccgacatcaagaaaagagactacttgaataagatcatcaactatcctccaggcacgaggttaaccgcgcatgagaagggttccatatggaagtatagatattacctcatgaacaataaaaaagcgctcacaaaattattacaaagtacaaatctgagagaagaatcggaaagagtagaaatcttggagttgatggattcatgggccgagattgatatagatgatgctttggagctgttaggctcaacattcaaaaatctttcggttagatcatacgctgtaaataggcttaaaaagcatctgacaaggaattag

SEQ ID NO: 4750 - DNA, 591 bp, Saccharomyces pastorianus
atgttcccctttaagttgcttttggttggtagtttaattggcttcccattagtgaaaatccaagctaaaactcctagacaacggaacgaactctacaatccacccatttttaattttggattacagttaccacagccgattttaattctgattataacactaatttatagtgttatgagtacaaaaattctggcatcggggttggcgtattttatcattggattctatgtttataaatatcaattgatctttgcgacagatcatttgcctcattcgacagggaaagtatggcctttaatttatagaagaattatcgttggattgctattgttccagttgaccatggtaggtacactgacagggtttgaaggaggatgggttttgtcatcctgcctcttccccctaccagtgataacattatgtttcctatatgactttgaaaagaactacttgcctctatcgcaatatattgcattaagttcgattcgagagtacgaaagagataattctctggttagctccatcagcggcgaagaatcttatgcttacccttacgctgtgagtgaactagagggtccgatgctagactaa

SEQ ID NO: 4751 - DNA, 1515 bp, Saccharomyces pastorianus
atgtcatctcatattaaaaatctcatgtcggcagggtcgtatttcgatacactaccaaatgaggcccatgattttaggaaacccaccgctatggtagtaacgacgcaactaacgattgctaccttgttgggcctttttgccttactttcattctctattctgttgaagaagtggccaagattgtatgcaagcagaagatataaagatgagggaaatcttcgattaccatcctggaatcagtcaagtttatttggttggctggccgtcttatatagaataggggacgaacaaattttggaatatgcaggtttagatgcgtatgtgttcttaagctttttcaaaatgtgcattaagctagtttccattttctgtttcttttccttatgcgttatatctccagtgaggtatcattttacaggaaaaattgatgatggtaacgatgatgatgataaatctttcatacgtctagtgaaaagagttatggagggaagcggcgatgatgatggccactcagctcccgaacgtacgaatgtgtacctctggatgtatgttattttcacatattttttcacctttatagcaattaaaatgatggtcgccgaaacaaagcatgttgtgaatactaggcaagcataccttggcaaacaaaataccattactgatagaacaattagactgtcaggtattccaatagagcttcgtgattcggatgctctaaagacaagaattgaacagctgaaaattggtactgtgtcatcaatcactatttgtcgagaatggggtcccttgaataggctattccattgtcggaaaaaaatcctcagaaacttagaacagaagtacgcagaatgtccaagcgagctacgtactcgacaaccatcctcagagaattatcgtttaacaggaacacagcaaaataacgtgccttcacatgaaggaacaaccccatcaaacgatcacaatgaggacgatggtgtactatactctcaaatttctttgggagaaagaccgaaaatgaaaactggatatcgtggtatgttcggaaaggaggtggatgctatagaatatttagagcagcaactaaagtttattgacctagaaattacagaggcaagaaaggaacactactctgcaacacctaccgcatttgtgacaatggactctgtagctaacgcccagatggcggcacaagctgtgttagaccctagggtacattattttataaccaggttggcacctgcgcctcatgatattaagtgggaccacgtttgcctttctagaaaggatcgtttaacaaaagttattccactacagtatcataggactttcaagtttatttttggttattccagtgtcatacctagctactttactgaatttgaaaaccctttcaaaattctggccaagtgtgggaaagttgttgaaagaacatcaatgggccgccaacatcgtgaccggtttagtaccaacttatatttttactttgctcaactttgtcattccttacttttatga

SEQ ID NO: 4752 - DNA, 954 bp, Saccharomyces pastorianus
atgagaaaaattttgccaaaatttatagatgatgagctgaaagatcacgcaagagaggccaagcaaccaaaagcaggtgaagcatttacactgcaaacaagtactcaatcaagtgtactactagacaacaataacatgtcgcgcgttggtactatggtgttagggcctgcaggtgcaggcaaaagtacattctgcaattctatcatatcgcacatgcaaaccataggacgaagagctcatattgtgaacttggatcctgctgcagaggccaccaagtacgaatttactattgatattagagatttaatttctgtagatgatgtcatggaagagatggatttgggccccaatggtgcgttaatatattgcttcgaataccttttgaaaaatctggattggcttgatgaagagatcggggatttcaatgatgaatatttgatctttgactgtcccggtcagattgaactttacacacatatccctgttttacccaacatagtacgtcatttaacccaacaattgaatttcaacctttgcgccacatatcttttagaagcgccatttgtgatagacagttcgaaattctttagtggtgcactgtccgccatgtcggcgatgatattactagaactgccccacatcaatgtgttgagcaaattagatttgataaagggtgatattaataaaagaaaactgaaaagatttctgaatcccgatgcaatgctaatgatggaaaccgatggaatgaatcaagaatccaatcctaaatttttacgtttgaaccagtgcatagctaatcttgttgacgattttggtatggttcaatttctacccttagagtccaataatcctgacagtatagctaccatattatcgtatattgacgatattacacaatgggcagaaggacaagaacaaaaggagcccgatgaccaaatagatgtcgaagaatag

SEQ ID NO: 4753 - DNA, 4482 bp, Saccharomyces pastorianus
atgtcgaacaccccttataactcatcggcgccttctattgcgtccatgacccactcctctgtgtcaaggagccccaacatgcacacggtgaccacccccggcaccaacaccagctcgaactcgccaccgtctctacatatgtcttcggagtcatccaagaccaaaaggaagcgcaacagaatcccgctcagttgcaccatttgtcggaaaagaaaggtcaagtgtgacaagttcaggccccactgccagcagtgcaccaagaccggcgtggcccatctctgccactacatggagcagacttgggcggaggaggcggaaaaggagcttttgaaagacaatgagttgaaaaagttgagagagcgcgtcaagtccctagagaaaactctgtccaaggtccactcctcgccctcttccaactctttgaagagctacaacactcccgagagcagcaatttgttcatgggcaatgacgagaactccaccctcgtcaacaccaacggctccgtttcatctgcctcgcacatgcaacagcaacagcaacagcaacaactacttcatcaacaccagagccagcatcagcaggacttcgtcaagaacgcaaacgctaactcttcgtctctctccatctctaacaaatacgataacgacgagctcgacctgaccaaggacttcgatcttttgcacatcaagagcaatggtaccattcatctgggtgccacccactggttgtccatcatgaaaggtgacccgtacctgaaacttctatggggccacatttttgccatgagggaaaagctgaatgaatggtacttccagaaaaattcatattccaagctgaaatcaagcaagtgtcccatcactcacgcgcaagcgcccccctccgctgctgcggctgttgctgctgctgctgccaccagaacgtgtccagttgatcataccatgtttgcatccggaatggtggcccccaaggaggagagtcctgcacccaggaaatgtcccgttgaccacaccatgttcccttcgggaatggtgccccccagggaggaaactcctgtccagaagagatgtcccgttgaccacaccatgttttcggcaggaatgatgccccccaaagaggagatcccctccccatactcaacgagacccgtgattgaccacaacaataggcattcgatgaacccacctcaatcgaagtgtcccgtggaccataggaacttcatgaaggacccttctgccgatatggcaaatcttcctcctaaccccgctggtcgctgccccgttgaccactcaggcatgaaaaacaccgctttgccatcatctcacaatgccaacccacaccaccaacaccaacctcaacctcaatctcgttctcattctcactctcatcaaaggatgaaactggatagcttcatgacagaagctgaagtactcgcaacactttgtgaaatgttgcctcctaaacgtgtcatcgcgttgttcatcgaaaaatttttcaagcacctataccctgccattccaatcttagacgaacagaacttcaaaaaccacgtgaaccaaatgctttcactgtcatcgatgaatcatgccatcaacaacttcggcatgggcatgccatcttcctccgctttggaaaatcagcccatcacccaaatcaacctcccaaaactctccgactcttgcaacctaggtatcctgataataatcttgagattaacttggttatccataccctccaactcgtgcgaagtcgacttgggcgaagagagcggctcattcttagtgcccaacgagtcaagcaacatgtccgcatctgcactgacctcaatggccaaggaggaatctcttctgctaagacacgaaacaccggtggaggctttggaattatgtcaaaaacacctgatcaaattcgacgaactatctagtatttccaacaacaacgtcaatttgaccacggtgcaatttgccattttttacaacttttacatgaaaagtgcctccaacgacttgactactttgacaaataccaacaacactggtatggcaaaccctgggcacgattccgaatctcatcagattctattgtcaaacatcacacagatggccttcagttgcgggttacacagagatcctgataactttcctcaattaaacgccaccattccagtaactagtcaggatgtatccaataacggcaacaagaagacaaatgtcaacacgaatgccaatctgaataacagcacgtccgctaataccgccaatgccaatagcagatccggtagcgctgactcaagaagtggctctaaccctgcaaacaaaaaggaaaatcaggtcagcattgaaagatttaaacacacctggagaaagatctggtattatatcgttagtatggatgtcaaccaatctctttcattggggagccctcggttattgagaaatttgagagatttcagtgacactaaattaccaagcgcttccagaatcgattacgttcgcgatattaaggaattgattattgtgaagaatttcacccttttcttccaaattgatttgtgtatcattgctgttttgaatcacattttaaatgtttcattagcaagaagcgtaagaaaattcgaattggattcattgattaatttgttgaaaaacctaacctacggtacggagaacgtcaatgatgtagtgagctccttgatcaacaagggcttattgcccacttcagaaggcggctctgtagattcaaataatgacgagatatacggtctaccaaaactacccgatattctaaatcacggtcaaaataatcagaatttgtacccggatggtagtaacagaagtgtttctagtagcgatatagataaaaaattggatttgcctcatgaatctacaaccagagcattgtttttctccaagcacatgactatcagaatgttattatacctactaaactacattttgtttactcattatgaacccatgggtagtgaagatcctggtaccaatatcttagctaaggaatacgctcaagaggcattgaacttcgccatggatggttataggaactgtatgattttcttcaataatattaggaatactaattcattattcgactacatgaatgttattttatcttacccctctctagacattggacaccgttcgctacaattcattgtttgtctgattttaagagccaaatgtggtccactgactggtatgcgtgaatcgtcgattataaccaacggcacatcaagtggattcaatagttctgttgaagatgaagatgtcaaggttaaacaagaatcatccgactatttgaaaaaagacgatttcatgaaggatgtcaatttagactccggcgattcattagcagaaattttaacttcaagaatgctgttatttcaaaaattaacgaaacaactatccaagaaatacaattatgctattcgtatgaacaaatctactggattttttgtttctttgttagatacaccttccaagaaagcagattccaaatcgggcaacggtgcttttatgctgggcaattggaagcatccaaaggtttcgaacatgagtggatttcttgctggtgataaggatcaattacaaagatgccctgtgtatcaagatgcactagggtttgctagcccgacttccggtgctaacgaaagttctgctccaattcaaggtttaactatgcaaggtcccaacggtaggatgggagggactcagttacccccaatcagatcatataagcctatcacttataccagtagtaatttacgtcgtatgaatgaaactggagaggcagaagccaagagaagaagatacaatgacagttatgttgaaagcaacaatgatatagctagagcagtaagcccaaaacctgcaagtggattctcttcggtgcaaccactcttgtcatcgttctccatgaaccaactaaacggaaacgctattccaacggtaccatcactttctaatatcacttctcatatgggtgcactaccttcgttagatagaattaccacgagtcaaatgaatctgccggatccatccagagatgaagcatttgacacctccataaagcaaatgacacctatgacaagtgcgtttatgaatgcgaattctgtaatgtcaaactcaactctaaatggaaacgtaaatatgaatggtgctggtactgtgaatacagacacgagtgttaatggtagtgctttgtcgactttgacaagcccacaaggttcagatctggcatctaattctgcaacacagtatacaccggatttagaagatttcttgatgcagaactctaattttaatggattaatgataaatccttcaagtttagtagaagttgttggtggatacaatgaccctaataaccttggaaggaacgatgctgttgatttcctacccgttgataacgttgaaattgatggactagttgatttttatagagcagatttcccaatttgggaatga

SEQ ID NO: 4754 - DNA, 780 bp, Saccharomyces pastorianus
atgattgacgatgctaatgatttgattttgaataaaatcagacatgttcaattattcaacagtccaagtgaccgtgtcaaaatgattttccatccagaatttttgaacgcaaataatccaattcttggtttagactatgacgaattcgttcgtggttgccatttgggtgtcttcccttcatactatgaaccttggggatacaccccagcagaatgtaccgtaatgggtgttccttctatcacaacgaacgtctctgggtttggggcttatatggaagacttaatcgagaccaaccaagctaaagattatggtatttatattgtagatcgtcgctttaaagggccagatgaatctgtggaacaactggttgattatatggaagagttcgtgaaaaagacaagaaggcaaagaataaatcaaagaaacagaaccgaaagactatctgacttgttggactggaaaagaatggggctcgaatacgtaaaggcaaggcaattggcattaaggagagcataccctgatcaattcaaagaattggttggggaagaactcaatgattctaacatggactctttagctgggggtaagaaactaaaagtcgcaaggccgctaagtgtaccaggctcgccaagagatttgagatcaaatagtacagtttacatgactcctggtgatttagggaccttacaagaggctaataatgcggacgattatttctctttgggcgtgaatcctgcagccgatgatgatgacgatggcccatatgccgatgatagttaa

SEQ ID NO: 4755 - DNA, 1182 bp, Saccharomyces pastorianus
atgtcccgtgatctacagaatcatttattgttcgagaccgcaactgaggttgctaatagggtcggtggtatttactccgtgctaaaatcaaaggcccccattactgtcgcccagtacaaggacaattaccatttaatagggcccttgaataaggccacttaccaaaatgaggttgatatactggattggaagaaacctgaagccttttccgaggatttgaagcctattcaacatgctttgcaaacgatggaatctagaggtgttcattttgtttatgggagatggttaattgaaggcgctccaagagtgattctttttgatttggactctgtgagaggcttttcggacgagtggaagggcgatttatggtcattggtaggaattccctctcccgagaatgatttcgagacgaatgatgccatcttattgggctacacggtggcttggttcctaggtgaattggctcacttggattctcaacatgccattgttgcacatttccatgaatggttggccggtgtcgcgatacccttgtgccggaaaagacgtattgatgtagttacgattttcactacccacgctactttattgggaaggtatctatgtgcctctggtagtttcgatttttacaattgcttagaaaccgttgacgtcgatcatgaagctggaaaatttggtatttaccatcgttactgtatagaaagagccgctgctcattccgccgacgttttcaccacagtgtcacaaattaccgcttttgaagcagaacatcttttgaaaagaaaaccagatgggatcttgcctaacgggctgaacgtaatcaaattccaagcattccatgagttccagaatttgcatgctttgaaaaaggagaaaatcaacgattttgttagaggccactttcacggctgctttgatttcgacttggacaataccttgtacttctttatcgctggtagatatgagtataaaaataagggtgctgacatgtttattgaagctctagctcgtttaaactatagactgaaagtatctggctctaagaaaaccgttgtggcgtttattgtcatgcctgccaagaacaattcatttacagtggaggcattaaaaggccaagcagaagtgaaagccttagaaaacactgtagatgaagtgaccgcctcaattggtaagcgatattga

SEQ ID NO: 4756 - DNA, 1311 bp, Saccharomyces pastorianus
atggacttaaagggtacccagtcgcggttgaaaaggttattgagttttaaccgcaataagaaggaaatcactacatccgaagaatgctcaagtagcaaccattctgctaacggggattctcatgttggtaaattgctagcttcagccatggaaaaggttggtaaagaaggtgttatcactatcagagaaggtagaacgttggaagatgaactagaagtgactgaaggtatgagatttgaccgtggttttatctctccctatttcatcactgatccaaagtcaagcaaagtagaattcgaaaagccattgttactattgagtgaaaagaaaatttcttctattcaagatattctaccagccttggaaatttccaaccaaagcagaaggcccttattgattatcgctgaggacgttgatggtgaggcccttgctgcctgtatcttaaacaagttaagaggtcaagttaaagtctgtgccgtaaaggcccctggcttcggtgacaacagaaagaacaccattggtgatattgctgttttaacaggtggtactgtttttactgaagaattggacttgaaaccagaacaatgtaccatagaaaacttgggttcttgtgattctattactgtgactaaagaagacactgttgttttgaacggtagtggtccaaaggaagccattcaagaaagaattgaacaaattaagagttccatcgatatcaccaccacaaactcttatgaaaaggaaaaattacaagaacgtttggccaaattatctggtggtgttgccgtcattagagttggtggttcatcggaagttgaagttggtgaaaagaaggaccgttatgatgatgctttgaacgctacaagagctgcagttgaagaaggtatcctgccaggtggtggtactgccttagtaaaggcctctagagtcttggatgaagttgttgttgaaaattttgatcaaaaattgggtgttgacatcataagaaaggccattacaagacctgctaagcaaattatcgaaaacgctggtgaagaaggttcggttatcgttggtaaactgatcgacgaatatggcgatgatttcgccaagggttacgacgccgctaagtctcaatacaccgatatgttagccactggtattatcgacccatttaaggttgttagatctggtttagttgatgcttctggtgtcgcctcattattggctaccactgaagttgctatcgttgatgcaccagaaccacccgctcctgctggtggtgctggtggtatgccaggtggtatgccaggcatgccaggtatgatgtaa

SEQ ID NO: 4757 - DNA, 684 bp, Saccharomyces pastorianus
  modified_base (659)..(659): a, c, g, t, unknown, or other
atgttgagatcatccgttgtccgtagtcgttctacgttgagacctttattacgccgtgcttactctactcacaaagagttgaagtttggcgtagaaggaagagcctcgcttttaaagggtgtggagactttagccgaagccgttgctgctactttgggcccaaaaggtagaaatgtcttgattgaacaacctttcggacccccaaagattaccaaagatggtgttactgtggcaaaatccattgtcttgaaggacaagttcgaaaacatgggtgccaaattactacaagaagtagcttccaaaaccaatgaagctgccggtgatggtactacttctgccactgtcttgggtagagccattttcactgaatctgtaaagaacgtcgctgcaggctgtaacccaatggacttgagaaggggtacccaggtcgcggttgaaaaggttattgagtttttaaccgcaaataagaaggaaatcactacatccgaagaaattgctcaagtagcaaccatttctgctaacggggattctcatgttggtaaattgctagcttcagccatggaaaaggttggtaaagaaggtgttatcactatcagagaaggtagaacgttggaagatgaactagaagtgactgacggtatgagattcgaccgtggttntatctctccctattcatcactgatc

SEQ ID NO: 4758 - DNA, 111 bp, Saccharomyces pastorianus
atggtgaaaaatttcctttgtaacctttacaatgtggaagtcatgccgcgtagatgcaagacactactaagaaacgggcgttatgtggacaccgatttcgattctatgtga

SEQ ID NO: 4759 - DNA, 1950 bp, Saccharomyces pastorianus
atgacattgaaatcttcaaagaaacgtaaggggaggtctcgccattccaggaacaagcaaataacctcagcaatattgaccgaggaaggaataatgatcaagccgaaaacatcaagcccctacaattatgcaaatagaatggcagataagcgaagcagcactagcatagataataatagcagaacaagcttccagagcaacagtgataaaaatagtattttcgaaacggcttcccttattagctgcgttacttgcttaagcgacaccgatacgatagatcgatcggaaacatctacaatggatacgagtagagatgacctttcaggtgacccagaagttcattatccatcagtgaacggtcaactgccagcaaacactgttataccctatggacgaatcctggatgctagatacattgacaacgaatctttgcactatcatgatgcagtgtcctcgtccacttctccattgaagagcccatttaataacagtggacaggaaaacgttggtgacatagataccttccaatggcaagaaaggaaaagtaattcgttatcacgcaagagcaacagtagcagtagcattatttcttctagaccttcttctataaaattggtcgagattatattcgcaagaccaagacggcacgacgttgtacccaaaagggtttcacttctaatagactataagccacatccatctccccacatgaaagaagacgaagacttgattgaggaaatactaaagagaagttacaaaaataccaagagaaacaaatccatattcgtgatcgtcaacccgtttggtggtaagggcaaggctaaaaagctgtttatgacaaaggcaaagccactgttattggccagtcgttgctctatagaagttgtctatactaaatatcccggtcatgctgtagaaattgcacgagaaatgaatatcgacaaatatgatactattgtctgcgcatccggtgatggcatcccccacgaagtgatgaatgggttataccaaaggccagatcatgtcaaagcgttcaataagcttgcaattacccaaattccatgcggatcaggcaatgcaatgagcgtgtcgtgccattggacaaacaatccctcatattcaacattatgcttgataaaatcagtggagaccagaattgatttaatgtgttgctcacaaccatcttatgctagagagcatccaaaaatatcatttttgagtcaaacatacggtctcattgcagaaactgacataaatacagagttcattagatggatggggcctgcaagattcgagctgggtgtggcgttcaacatcatacagaagaagaggtatccatgtgaaatttatgtgaaatatgctgccaaatcgaaaaacgaattgaaaactcattacttagaatacaagagtaaaggttcattagagtatcaacatatcgccatgaaaaaacataaagaggaccgcaataattacaattacgacaatgaatacgacactgagaccgaagatgaagatgaaaacgaagacgaaggagaagaagaagaagattgtcctaatttttacggctctgtgaatcccagtaccgaccaaattacggaagaggatttcaaaataaaatttcctttggatgagggtgtgcctagtgattgggagagattggaccccaatatatccagcaatttgggaatattttatacgggtaaaatgccatatgtagcagctgatactaaattctttccagcagcactgccttcagacggcactattgatatggttatcacagatgcaagaacatcattgactagaatggccccactattattaggactagacaaaggttcccatgtgttacacccggaagttatacactctaagatcctcgcatataagatagtccccatgctggcaaacggtgtgttctctgacgatggtgaaaaatttcctttgtaa

SEQ ID NO: 4760 - DNA, 1500 bp, Saccharomyces pastorianus
atgatgtttttgccttttgtagaaaagctcttcgttagagatgccactaacgttgatctaattgttctccttaatttaacagaagatccaagagacaagtacaatcttggtatcatactccaaattctttgtttaaagtactataatcaaaatgttccttcgtccatcaaagacttcattcacggtttaactgtggcttcgtcatcttcaagcttaaattttattgaaagactgcagttttttttgttgtcttacattaatataatgataaactgtacaagcggtgtgtgggatggcactcaaggcattggtttagtgaacgagttatgccagtcatgccttagtttaggtttggatgatatcaatagatggcatatggacgaaagtcaggaaactaaggaaagcctcagatgtatttggttctggacattgttcttcgatgtttcatgttcatatgatgtaggtaaacctccattcatttctgatgattctttaaatctgaatgcatttactgtgcaagattctgagtcatcgggtatcaactccaggttcaaggcaaagagaagcaagttgatgcacgattttttaagggtttctcggttcattagtcgtgagattcataaaagacaaacaagtgaaaaaacccctgctttgttgttgttattgactagattcgtccaatcaaatttttcacctatcgagcactatacgaatccaatttactactccgagattgatccgtttgctataatgatcttatcgagagctctgtgtatgattactagcataggtaatatcgacatggtgattcgtcaaaatcataaaattatagacaagaacaaaatggttcagttcacactaatatcaatatcgatttgcgttaataccattttattcaattttgaaaaatcagccaacgaagaagaagacattttatttgaagggttgaaactatctactatcctaatcaatccgcttttgatacgaatagtatcggaagtgtatggcctggcattccataaactaacgtttagagaaagaggatttcttttcctcatcgatcttgacacaggaaaaagaatccaattcatcaaatacgaggaagaagacttcgatgaaatcttgaaaggattcgatgtcagaagtgacaagttcttaacattttctggtacaataattagattctatgaaattattgacacgttatttgattctagcaatagaaacaaagaaattttcagggctgtttctaagtcctaccaattaacttctactttagcatttgaacgtgtaagtagggtcttgttcgataaagcaactcaagcaagattgaatactgagaaggtctggttgaagaagggcattaacatggaacagttcagtgatctcatgattgaggaatttattaacgatgtttggaaggctttcaagcacatttcccaagatctctggtgtattaacaaaaaggaattctataaacaatacaattttgatatataa

SEQ ID NO: 4761 - DNA, 519 bp, Saccharomyces pastorianus
atgaccggggaaagaggcaaagaagagacaaacggggcacaatttgtcggcatggatgggttccatatgggtgcatcgtttggtactgaagggtcctactccggtgacaagaagggcaagaggaggaaggtcattaagtcgtgtactttctgcaggaaaaggaaactgaaatgcagtcaggccaggcccatgtgtcagcaatgtgtcattaggaaattgccacaatgtatctatacagaggagttcaactatcccgtgactaacactgtattgttcagtcaggtgcccaatgtagcattggtgcagaagattcagagtttacaaaacctattaacagaaaacaataacgataccggtgatgaatcgatgccaaacggaagcctcgataatccgctaaggtttctccgtacttctgttttgggggagaatggctcaatgtacgtatttggcccgacttcttggaaaacgctgtctttgttcgagccaaataaatttcaaacagagtttcaaagtttgtga

SEQ ID NO: 4762 - DNA, 2019 bp, Saccharomyces pastorianus
atgcccgtgtcttcgttgaactactgccacggcagaaagctgaaaccatctttgaaaattgcaaaaacaacttcaatttcttcgtttatttcttctgcgccatcgaactcgttttcccccgtggagaacacagcatctgcttcttcatctgcatcatcttcatcgtctggaaaatcagtaaggtttgctacacatttatatacggtcaaaaggttcaatactaaattagcgcccatctcaataccagaaagagccagcaatttgccagctaaatacatcacttctcaactctcgaaaagcacgcatagcagttatgttccattgatttttcctgttatcaatagtgaggaccacccctacagtttagacattttggattatagtgacctggagtacgacgacaaggatgatgaatatgacaatgaaagtgatgtagaggagggtgcaaagcttgtccttgatcgcaaccttcttaataagaaggaagatccgtgcctgggtgaagagaataaatttgacattgttgattggaaactcatcaatagtaatttgcacccattcaagagtaatggtgctgtgaatttagcagagttggaatctagaatattttcttacttgaacggtcaaaacatcaaagttcactcattagaattatccagtcctgtaagtcacgaagatttttgccacaataattttggtagctgccaattttcgggacttatatttgtcaataatttaaatttcgaaaaaaacatcgagatcaaattcactttaagtaactggtcagatatacattacatcaacgcacgtttcaacaagtcaattacttcgaaaattgacgaatttagatttgttatcgatttttctgcgttgaaattaaatttagtttcaaaaaacctaattttcgctaattcgaatgaaaaaaggaccgattgtattttaaatttgcaattctgttgccgctatgatgttaattatttgagcagtaagacattttacgataataatgactatagaaactatgaggtaacgatttctttgtccacaataattaatctcaatcgcggagtttcaaaatttccaaaacatgaatccaaacatgcctcgctcctgctaacagactgcagtgctggtgttcatatattgaaaaacaacgaaaatgtaaaaaaaccattaagaaaatttaacgatgatacggattattttaacgactcaccgttgaagcacaagtttcatcattcgttcgggagggaagctgcctaccaacaggaaggcactccaccaactacaagattagaaacgaatgacagtgaaataaaaccctttggcaacttggtcgaggcctcaacctctgatgcagatgaggatatagttgatggctcctatgatttatctttacaagactttaactactgggaatttacgaaccatgggcttggaaaggcgttagccgactcagatattttacagtttaaaaactactcgaaacccgaagcctttagtaggtaccctttaatagacaactcattcacattaagagcaggagatggcaccttacgtttaacagcacaagaacttgaagacagctcgagcgacggaaggaagagtactgtgacaagtactacattaaatgcgatgcaacaatatagtgatgaattcagagcctccttaagttatacaaatcatcggaatgactctactgataccttgatgaaaacaaacaacagaccacctatagaatcaacttctccttcacaattatccgtatcgacaataaaggtgaaagaaagcataccgccccaagagaacaccatggctgttatgatacgctcatctccagcgttttcgcctgtggataatatgcccccaccaccatttttctcaggtgataatatgagtgatagctctggggaatatgaagacacaatatcccttaactcaaaagaaattcgtttacttcgtgattgtttttcaaagtcagcatcgccatctccatcgcaatctcccatattcttataa

SEQ ID NO: 4763 - DNA, 243 bp, Saccharomyces pastorianus
atgtccctcataaatgatgccatgataacgaaaatacctgttattatctcattaagaaataatcataaaataatagcaagggtaaaagcctttgatagacattgcaatatggttctggaaaatgtcaaggagctttggacagagaaaaagggcaaaagtgtaataaatcgtgaaagatttataagcaagttgtttttaagaggtgattcggtcattgttgtgttgaagacccctgttgagtaa

SEQ ID NO: 4764 - DNA, 891 bp, Saccharomyces pastorianus
atgactcaaactccgactccataccctcaagtttcgcatatgttatcacatcaacaagcaccacaacctctccaaccacttcaaccactccaatcacagcaacaaactcaacagcaacaaacccaacagctgccacaacagcatatctctcccccacagcgtttttcagaaaaccatttcacgaatcaattgaacaataatatcatcaacaataatgctttacgatcaaaaatattttctaatccttcaaacgaaaacaagcggtcaaggcgcatcgaagatgcgaactttaatccaccgcaaatgagatcagagtatgatacaaatatcattccttcaattccaacatcaataacggatcattcaatgactgctaatgtcaaacaaactcgcaatgtctcatcttcaggtgatatactcttcagtaatggtgcccatgatatgatcaataatatttccacatggaccaataactctgttttggatgctttgaatagtaagtccatactacaaacaatctttccacaaagtcaagacccatcatctctccccatggataaacaagagcaacagcctgaaatatgtcccacaaataacgtgaatgctaacagctttcagcaaccacagaatgactcttcctataataggaatctgtttatgatgtctcaacaggatggtgatcagcagcaaaattttgaagtgactgaaaagaatagactgaaggtacaagcagaaacgaatacaactacgaatatgcattttgagaacgtagcacctactgccgctactgcggaaatcagaaaaaaacgttctaattgggataatatgatgacgtctggtccggtggaagatttttggacaataaacgacgattatggtttcttgacatga

SEQ ID NO: 4765 - DNA, 546 bp, Saccharomyces pastorianus
atggaggcaggcagaccaacagctaacttgcaaccaccgcagaatactaaccgcgagcaacctcaccaagaaacgatgatgaacacagcgtgtagaagatggatcagcggcacggcagtgccgctgatcaagaagagcaagttcccgccgcggccgcagttcaccccagaaatggaggcacaatgcacagaaaagttcctccacggtggcagaggccccggcggccagaagatcaacaagtgcaactccaaagtgcagttgcgacacgatgccacgggcatcgtggtcgagtgccaagaaacacggtcacgtgagcagaaccgccggcttgcccggctcaagctcgcgcgcgagctggccgccgcgtcgtgtgacacgatgccctccagagaggccgcgttgcagctgtggcaccgccaacagaaacacgcgcagcgccggcgcagtatcgcgaagcacgaacggcatggcgaggccgctcgtgctgaaaaagaggagcgcgaggcccgggaccaggaggcgctgcgtgaattattccgacggtaa

SEQ ID NO: 4766 - DNA, 939 bp, Saccharomyces pastorianus
atgcatcgatatataaagagaggacagtacatggatgaagaaattgggcgtccacggctggttgtacagacaaatagtatagcagaaacagacaaagagatgccgggaattagaaagaatgagaaaatcagttatcgtaccgtggggccctttttcattatacagttagtgaaacctgggaatttaaatgctttagagggagaagattatatttacctgggagaactgctggaattggcagacaaagacccacacgtgtatttcacagttttacaaagcagcggtaggtttttttcgagtggggcagacttcaaaggcattgcaaaggcacagggagacagtagcattgaatacgcatcagaaacaagcaaatggctgtccaattttgtcgctaggaacgtatatgttacagatgcgtttatcaagcattccaaggttttgatttgctgtttgaacggaccagctataggaatgagtgcggcgttggtggcattatgtgacatcgtgtacagtatgaacgacaaggtctacttgctgtacccatttgccaacttgggactggtcaccgaaggcggcacgacggtttcgctgcctctaaagtttggcgtaaacacggcgtatgagcacctgatgttcaataaaccattcaagtacgatacactgtgcgagagcgggttcataagcaagaatttcaacatgccatcggcaagcagcgaagagttcaatacgacggttttggaagagctgggacgcaaagtggaagggttgtatttgcccagttgcctgggaatgaagaaattgctgcagtcgaaccacattgactcactgaacaagatcaattcgatggaggtgaatgaatcgctgaagtactgggtggacggagagcctttgagaagatttagccaattgggctccaaacaaagaaaacatcggttatag

SEQ ID NO: 4767 - DNA, 1983 bp, Saccharomyces pastorianus
atgccgtcttgtagtacaagaaattccgcggctccaagtatcaagtttataccacgcgttctcacgctgctagcaatatgcacgttggtgtttggtctgccttcaaaaatgatatcatttgcctcccaagaatctctacacagaataaacagtcttcttcgaagccccgctaatcgggaggtggataaattcggaacatttttgaacccaaacaaaggcgaagatggcaaggataaagatcaccacaacattgatatcgatcccttgcttcgaagcccctctttaacgccagatcatcaactcctaaagattggtttacacggcgccataagttctgatttagagatctgtagcaacttgaccataaacgaagtcttgttgaaattccccggcaccaacgctgcagatgctgcagtgacgcaggctctttgtaaaggcatggtaaacttctttaatagtggcattggtggtggtggttatgtggtgttttctggtaaaagcgatgacgaccatttgtctattgattttagagaaaaggcacctgcgggctcgcataaacacatgtttgaaaactgttcattgtgctcaaagataggaggtctagcagtaggtgttccaggagaacttatgggtttataccgtctatatgaagaaagaggtagtggccaagtcggatggtatgacttaattgaaccagtggcgaaattaggaagcgggggttggcagatagatgaagtcctcggtgccagtttacggctatatgaggacgttttcttaacattgaaggaggattggtcatttgtactgaactctacccaaaacggcgttttgaaaaaaggcgattggatcaagagaccaatgctagcgaacatgttaatggaactggcccataatggttctgtagcgccattttatgatcccaaccactggattgctaaatcgatggttagtacgatagagaaatacaacggaataatgaacttggatgatgttgcatcatatgacgttcacgttacaaaaccactgtccacgcaaatccggaagggtgtaaactatattcctgacaacgacatgaccgtactaacaagtagtggttcgagctctggtgcagcactactttcagcattaaagataatggataatttccataaccaagaaggtggcgattatgtcgaagaaaacacctatcaattgctcgaaagcatgaaatggatggccagtgcacggagcaggctgggagattatgaaggggaaacgctgcccaaacatatcaaagaggtgttggacccggaatgggctctcaaagctgtggaaagcatcaggagcaactccctagacggcaagttcaagacgttggagaactggacactttacgatccagcatacgagatcaataacccacacggaaccgcacacttcagtatagtggactctcagggcaatgctgtttcgctgacgacgacagtcaatctgttgtttggttccttagtacatgaccctaaaactggggtcattttcaacaacgaaatggacgattttgctcagtttaacacttccaacagttttgaactagcaccctccatatacaatttcccggaaccggggaagaggcccttatcctctacggcacccaccattgttctatcagaactgggtatcccagatctcgtggtgggcgcctccggtggttcaagaatcactacgagtgttttacaggccattgtaaggacctactggtacaaaatgcctatactagaaacagtggcgtacccacgcatgcatcatcaactgctgccggaccacgtcgaggtggaaagcttccccatggtgggcaaatctactctacgtactttgaaagagatggggtatacgatgaaagaagtcttccccaagagtgttgtcaacgcagtccgaaacgttaggggagagtggcatgcagtgagcgattattggaggaaaagaggaatctcctccgtatactaa

SEQ ID NO: 4768 - DNA, 402 bp, Saccharomyces pastorianus
atggataggatgcagctgcccaaattggaagtggttgtgagtcccgatgaaggatactacaatcacggttccatcagtttcaacctggattttaacgaggtttacccaatcgaaccaccaaaagtaacatgtttgaaaaagatcttccatccaaatattgatttaaacggaaacgtctgtctaaatatacttcgggaagattggtcaccggctctggatttacaaagtatcattatcgggcttcttttcttgttcttagaacctaatcctaatgatcccctaaataaagatgcagcaaacctgttttgccaggaccaaaaaaaatttgcagaaactgttatattgaccatgtctggaggctcagtcgatcatgtcctatatgatgacgtagttcctcattga

SEQ ID NO: 4769 - DNA, 1347 bp, Saccharomyces pastorianus
atggggttcttgaaaacttcaagcacggaaaaggaaaaagggcaggagttattgcagaacaagctagccaaattaaacgaagagttttcacagctggccctcgagaagtcgaatataacaaaggaacttacttctttaaaaatatcttacaagcaaaaggaaaaaactgtaggttacttggaagagcaggttaaacagttcaatgagcaaaaggatgcggctgaaaagtcaacagagcagttgaaaaaagaaaatatcaaaattttcaatagattagagctacttaaaaaggaaaacgaaacattgcataacgatatcacaaagaatggtaactcttatgaagcctatttgaaggaaaacggcaagttatctgaaaggttaaatattctgcaagaaaagtataatactttacaaaatgtgaagagtaattcgaatgaacacatggattcgattaaaagacaatgtgaggaattaaacgtcaagttgaaggaatctaacaagaaaatactatctttagaagatgaacttaatgagtatgctaatattgttcaagacaagaccagagaagccagcactttgagaagattagtctcagatagtcaatctggtgatttgagtaagcaaaaggaactggaaaataaattggagtacttgactgatgagaagagtagactggaatcggaactgaatttacaaacgtcaggaaaagccagtgaattacaagaatggaagcgtactgcggccgagctaaaatcagaaatacacgcactgaagcttcgtgaaaaagaactgaagtcagaggtcaaggcactggattccgctaatagcgatattaggcgcaagacccaggccacgtcggatgattctaaccaactggaacaaatcaaatccaatttaaagcttgcgttatctaaagctgaggaaagaaattcagaattacaatcaaccaatgaaagtcttttgaatttaaataatgaactcaacaagaaattcgaccgactattgaaaaattaccgtttattgtcttctcaattgaatgctatgaaggcaaaacaacacagcgataattcgggaagaataagcagatctagttctatgagttcctccgctaatgggaatggcaatctctcaacagccagtgagtctcatttgcccatagaagagatacgatcatcaagctctttagaattagactccgaaaaaaatgaaaaaattgcatatataaaaaatgttttgttggggttcttagagcataaagaacaacgaaatcaattactgcctgtgatttccatgttgttacaactggacagtactgatgaaaaaagactggtaatttctttaaagtga

SEQ ID NO: 4770 - DNA, 1386 bp, Saccharomyces pastorianus
atgttcaaacaactgtcacaaattggtaagaacctgaccgatgaattagcgaagggtttagcggatgatgtgaacggagcctcatcgaatcaacaaactgaagatgacaagagtggcttacctaaagatatacaaaccaaattaaggaagtttgaaaagtacgaacagaagtatcccttgttactctcagcttacaaaaatgagaaacagaaatccgagaagtttgaggctattgaaaagattttggcagaaaatacacccatatcgaatattgatgatgcagttgatacgttgccagtctttttccaagatctaaataacaaaaataatcttttgaatgatgagatcaagagattaactaaggagaattctgaagtggtgccggaaagtacctcaggggacatactaaatgataaagaagaattcttacagaaagagcaaggatacaaaaacgatatacatggactagaggagaagatagatgctttaaaaaatgatttagctaccttgcagaaaggtaaagaggataccatattagagttagagagaaaagtagctgcattggatcagcttaaggaagagaaagataccaaagaacaggaagacagtgcgtgtttattcaaattaaaggaggagttggccattaaggatcgctcttttgaagaaagccaactaaaaataagagaactggagcaggaattggcgtctcataaagttacaatggaagaaaacaccgcgacgttaacggagttaaacacctctttaaaagagaaggaagaaaaactggaaaatctggaaaaccaatcaaaagagacgtcaaagacaatcgtgtctaatggctcgttgaaccaaaacgtaggaagcaacaacagaaggaagaaaaacagaaaggggaagaaaaacaagggaagtacgagtgttgatggcatcaatgaagaggaaaattttgataacctaattaatgctgaaggttataggaaactgaaggaagatttacaaacgatacaagaaaaacataaggattgtgaagactggaagcatcggtatgaagaaataaaaacaaaaatagaaagcgctagtggattggaagactcacagcttgaaaaattagagaaagagctcgaaaaactgaatgtagagttatctgaaactaagaaatctttaaaagagaaaaactccgaattagaagaagtaagagacatgctgaggactgtaggaaatgaactggtagatgcgaaaaatgagataaaagaatcatccagccagcaaaatgaagaagtaaaagctggtaaaatggagctcgatgacttgcgtcataagaacgcagcgatgatcgaggcttacgaaaccaaaaattcagaattcacagatacattggatcgttaa

SEQ ID NO: 4771 - DNA, 156 bp, Saccharomyces pastorianus
atgaaatcattccaggttttccgatttaaagttcgtaacgatactaactggtctatcaaacacttgaaacgattaggaatgaaggtcaagcattcaagattgtataagtcggtatcagaatgcaagaaaaagagctacttcaaatgcaaacattag

SEQ ID NO: 4772 - DNA, 1002 bp, Saccharomyces pastorianus
atgacgctggaagacgaccattggaatgtagttagattacgtaaattacgtaaggggaaagaaaaagaagaggaagaggaagaagaagaggaagcatcgaaatcggaaatatccttggatagtttgcacgagggcccttttgctgaggaggacgatgaagacttcgatgccgatgtcttatcgaacactagcagtgaagactcctcgcagatgaatcgtgtttacgatatgagaacgtccggtgaattaaagggtgctgctattgctgctgctgctacagctgccgatcaaaccacagttcctgctatctcagagtcgtttgacaccttgtctggctcaaagattggtggaacagtcttaccaagtttggaaggttcgagattaaaggatagtgtaactgcgacgtctatgagaagtgattcgatttcgcgaatggatgacgttatagataaatgcgagggcaagacaactaaactgaggatgtggcatgttatcatgttgacgtcgctagtttctatgactttttcgtacttggcccttgagtattttctgactggtgatgtatttgcaggcttcaaatcgcaacagttacttcggaataatgaaaggaaaatgttatacggtaacattgactttgtcaataaaaactcttatgattcaaccggcaactctttaagtcaatgggctccctcagggaagtactacgtcgatttcgacaaccatatagcgtatccattaaaggatgatgagataatggggtggaaaagatacaaggctgatcttgttattctttggtataccacaaaggccagaatgaaaaacggctggcataagagaatcgacaagttaaacggggggagaatgaagttacatgcagttctcaagaaggctctcacgtccacccgaaaaaatttgatgatatttcataatgaacaaaacaccattggcaaaagctattcacattatgtcgaaataagtataaccaattttctccacgtctaa

SEQ ID NO: 4773 - DNA, 756 bp, Saccharomyces pastorianus
atgatatcgatatcgggttctttcaggagaccggttactgctttgaactgtaatttccagagcattcgatcggttatatatcttcataagggtccaagaattaatggtttgagacgagatccagagtcgtatttgagaaaccctagtggagtgcttttcaccgaaatccaggtaaaggaatgccaggataaggtcagatccatactacaattacccaagtacggaataaatctctctaacgagctgattttgcaatgcttaactcacaaatcgtttgcacacggttccaaaccgtacaatgaaaaactgagtttgctaggttcacagtttttgaaacttcaaacatctatttactctttaaaaaacgatccgcccacggaaagccgcgagaatggaccactttccttgcagttcaataatttgggcacaaaatttgccaaggaattgacgtccaaaaagacagcatcggcattcatcaaatcacacaatctgagccctttcatattctggaaaatgaaagacccattgaaagacggccaaataaatggcgaaaccacgatatttgccagtgtcttaaatgcattcattggcgcgattttatccactaatggttcggaaagggcttccaaattcatcgatggaagtttactggataagggagatctccactcgttgaccaacattgctaatgaaaatgttgcatctacaaagacaactataccgataaaggaaaaggaaaatgaagctaccctgtag

SEQ ID NO: 4774 - DNA, 492 bp, Saccharomyces pastorianus
atgggggaagtacgagttgagctagcacgggcatcggcgctgtcaacgaacatggctgcggcagggcaacggttccccatcgtgagcgtctttgtcgacccatcaagacagaagggcaaagtggtagtggaagatggcaggaactgcgcgggttcgttgcccatcgaccatagcgtgatggtgggaattcgcacggtcggcgaaagactgaaggaagacgcagccgaagatgcagacgcgtatctgtgtctggattacgacgtctacttgacgcacgagccatgctcgatgtgctcaatggcgctggttcactcccgggtgagacgtgtgatcttcctttcgcagatggagcgtacaggatgcttaaagataaccagcggcgacggctactgtatgaatgacaacaagctgctcaactctaagtacgagggcttccagtgggttggcgaagagtatcccgtggggtctgttgacccggacgtatgttgctag

SEQ ID NO: 4775 - DNA, 204 bp, Saccharomyces pastorianus
atggtcaagaaggcaaacaatccactgaagattgattatcagaatgggctaatagaagatcggcttttgcagatacgaaatttcaaagatgtaaatacgcccaaattaagtatgtattttgaatcaccaactgcaattgagtttgagttactaactttcggatgtatacacgtatacattgtgcagtcacggtatggagtatag

SEQ ID NO: 4776 - DNA, 384 bp, Saccharomyces pastorianus
atggctcgtgcgtcaagtagacgtcgtaatccagacacagatacgcgtctgcatcttcggctgcgtcttccttcagtctttcgccgaccgtgcgaattcccaccatcacgctatggtcgatgggcaacgaacccgcgcagttcctgccatcttccactaccactttgcccttctgtcttgatgggtcgacaaagacgctcacgatggggaaccgttgccctgccgcagccatgttcgttgacagcgccgatgcccgtgctagctcaactcgtacttcccccatgtcgatcttatagtcgttcaatatctggtcgttggggttgccgttccagatcagcggccaatactttgcagaccatgcactgttcagctcctttgtgctag

SEQ ID NO: 4777 - DNA, 2631 bp, Saccharomyces pastorianus
atgaaaagtttgagcgaattcattcacgacaagcttgacattgattcagaaacaaacgcccttcatcacgatattttaaaatacggtcaatataatggccttaatgaacttttaactacgtgtttcatactaccaaattcaaagaaagtcacactaccgtccattgccggtgacttaaaccataagtctgtcatagaccaatgcataattcatcttttaacgggggacttctttaacaacgtgctgacatttggctatagaatagctagaaacgaaaatgtcgataacagtcttttttgtcattctacaaatgttagcgccactttgttgaaaagcagcacttggaaattattccatagtttgatcggtacccatgcgtttgttgatttgttaatcaattatacagtgattcagtttaatggtaaatttttcacgcaaattgtgggtaataggtgcaatgaacctcatttgccgcctaaatgggctaaaaaattgtcatcaccattggataccactctgcagattaagcaactaatggcaccaataacgaacaaaccatttctgcataggctcaaaataaactctcctaatatctttccttatggcagaatccttccatcgtcatcaaccattaataaattaacagagttaagagatgctgtcttccctccaaatttggttaaaattcctctgagtgtgaaaattcgaatcgatataactttacaaaagctattaaatagacataaacgtttgaattatgtttctgttttgaataacatttgcccgcagctgaaggaaaatacatcggaattacctcatctaaatttccaattaccgcaaggccaagttctgaaattcttaatcgttattctacaaaagctactacctcaagaaatgtttggttcaaagcggaacaaaagtaaaattattcaaaatctacactctttattaggtctgcctttaaatggtcagttaccatttggtgatttgttgaaaaaaataaggctaaaggattttcaatggttgatggtttctggtgtttcattcactaagcaaaactttgaaaattctaatctgttgatgattttttttgtttcttggctctttaggcacttgattcccaaaatcattcagaccttcttttattgcactgagatatcttccaccgtgaaaatcattttctttagacatgatatgtggaatatacttgtaactccattccttgcagagtactctcaaaaataccttactgaaaatactgtgtgcagaaaccacaacagttacactctgtctaattttaaccacagcaggatgagaatcataccaaaaaaaagtaacaatgagttccggattatcgcgattccatgtagaggtgcagatgaagaagaattcgcgatttacaaggaaaatcataaaaagactgtagctcctactcaaaaaatactcgagtacttaagaaaaaagaggccaactagcttcactaaaatttattcgccaacccaaatctcagatcatgtagaaaaatttaagcaagttctcctgaagaaatttgataatgtcttaccagcattgtattttatgaaatttgatgtcaagtcatgttatgattccataccaagaacgaaatctatgaaaataataaagagagctttgaaagatgaaaatggattttttgtgagatcacaatctttttttaatactaacacgggtgtactaaggctagtagatgtggtcaatgctagtagaacaccaaaacctcacgaactgtatatagataatgtgagaacagttcatttatctaaccaggatgttataaacgttatagagatggaaatgtttaagacgtctttgtggatccaagataaatgttacttaagagaagatgggctctttcaaggctcaagtttatctgcacaaatagtagacttggtgtatgatgatcttttggagtcctacgatgagttcaaagccagtcccaaccagaacacattggtcttaagaatagccgacgatttcctcataatatcaactgatcaacagcagattataaatatcaaaaatcttgcaatgcgcgggtttgaaaattataatgctaaagccaatgaagacaaaattataactgtgagctcccaatcaaataatgatattattatccagttttgtgccatgcatatattcattaaagaattggaaatctggaaacactcgagtacgatgaatgtattcaacgttcgttcgaactctagcaaaaaaatatttcgaagactaatatcgttatttaacacaagagtttcctataaaaccataaattataacttgaactcaaccgctactgtcctcatgcaaatttactatatcgtaaaaaacatttcggaaggctacaaatctgcctttaaggacctgcctattaacgacacgcaaaatgtacaattctcttcattcttgtcgtgcataattgaaatgacattggacatctgcccagctacgaaatatgatctttttactgagtatgaggtgcgatacactatattgagcgggttcctggaaaacctttttttgaacacatcaaaattcaaaaataatattgattatttgaaaggggagattcaatctctgcaagtgtgtatatag

SEQ ID NO: 4778 - DNA, 477 bp, Saccharomyces pastorianus
atgttggaaaatccttttacatttttttcagacctggttattgcacacatttttgaagataggcccccttttgacatgaatattaggaactttcttttgtatcagttcataaccctcctcaacaaagttttaaggatgaaattcgagcaagtatctcccgatgaattttctgagctttgcaagctacacagggcattatgcattgagtgcgttacagacgatacgtttagtaaaaacaaagagctcgttaatgaaaaagccgctttttcatcatctcttttgagaatagctgatggattttgggaacatagtaggctttcacagttggatacgcttaacaaaagcatgaatgtaccctgtcaaatcccacatactagtgttcaaaattcactttctgtgattgtaataaagataatagaggataatatagaacacattaaggcatctgaacctttcatacaattcaaaagtacttaa

SEQ ID NO: 4779 - DNA, 3120 bp, Saccharomyces pastorianus
atggatgtcgacgaaccgaagtctactgtgatatcagattccgaagcagccgatgaagaaattagcatcatatacagacccgaattcaatgaagattatctttgggcagaagaaagggctcaagaaacattggcaacccaatcgctggaaagcattcatgcgacatcaagcgtgaatctgttttctggagaatctgtttcccctttagcagcaactaatgagcaacagactccaggcttgagatggtctttgagaaaaaggaaggctattcaaaagatgccatatagtttagaaaggataaagcacaggcagttcttagaaggctatgatattaccggctttgataccatttcaaatcagttagttttaccagagaatacctttccagtggttgagcagcaaaaagtgccagttgcgaatagaagtaacagaactttggaggaacaagataacgatactacaaacgatatcgggttccaagaggatgcgtttggattagaaacctctgatagcgacgaggtgcaacccagaaaaagacatcgtaattctaatattcctaaccacgatagggccattcaaccagatgattctttggatgaaaatgaagatcttgccaatagaagttcacaggactctcaaaatgatgaagttatattcagaggaagagttttgaatgtaaaaactggttatcgtggggttttacccagggttgcttgggaaaagtcattacaaaagcagcagtcttcgaaaactacgaaaagaagggccgaactattacaccataagggagtggctaagcggaagatacacaagagtttccacaatgaagatgaagaacaagggttgttaaatgatcttattgcgccagatgacgaactagacgttgatgaagacatttctcatgacttgtacttgagaaatcccacaatagatcgtgaagctagtgaaaaggaaatgaaagaattaagggaatattatgaaaacaaatatcacgaagacgaaccattagcagaagcttctagttttgatatcaatggggaataccggaacgaaaccatatttgagttggaaaaacacggtcccaagagccgcttcccccgcatatcttacaaagaacaacctattatatatttaaactcacaacactcagatagtgggatcagtgaacggtacaacatttctgatgaagataatcaaagcataatatcctcaaactttgcaaaagagcataaagatggcataattgataagatgctagttaaagctaaaggaaagaggccatcttctggtttgaataagaaaacgagaagtgctacaaagtatcggtaccatcgcgaaaagcttggcaagtaccagaccacaagagctataaaagttggaaagagatcggcccgtaaatcacgctctatgtccattaaaaagtctataccactcagttcaaaaaaaaaacatgcaatagatgaatacgcttttgaagttttagaatcagaacccctaaaaatagaggaaagctcttttaacaatgcgccgaaaaaggagaagaagaagaagagatcaccggtatacccgagtatgtctacagattctgaattaagaccaaaattagtttttaatactgttgttgaagttcccacgaatcgatatgcctttacaaagtcaaaaatgcgcattcccagcgctagctatagcactgagtttaatgaggaagatctgaaccaagaatctcgaccaataatggctgttcttgactcgattttaatgaaaaaaccgtttgacccgcctgctgtcattaaaatcgagttgcctggcaagacatatgcattatccaaattgaatcctgcagatatatgcacatctctaagggatacttttaggatcatcatcgataaaggtgtcactgatacggaactaattcattttaacgaaagtcttattgcttttttggtgcatcttgatatgccagaactgttcgatataattagcgagtttcaccgtgaatttaggtcgaaagtcaatggcttaagaaaaaaggctaaaccaatccatttttttcaaattgcaacctgtcaattaatgtttctagaaatatcaagatataacaaaatttcaacggctttgaagttggaaatggataccaagcttgtggatcatattgtctccttttttaaactgctctctgtatgctacgattctgtcacgaaaaattcgatggaatatttgtatacgagttactatattctatcttctattgtcgatattatacataaaaaggagggtttatgggacttattgaaagaccatcccttttcccctcggatttcgctgttactggtcaatatatttccaacaaaagcatgctgctggcaggttctgaagttggatcctgagtttgaacctttgaattcggcatttcgattcatcaagtactgcattgaaacctgtaactggaacgtttctaatggtttgattctctctcttgatcgcatattcaaaaggagaagattctctgatttcgaagaagaatctattacatcgcagaacaataagatactatatcctccaacaaagcaacccatgcgccaattaacgtttaacaaatacttgcgcttactggcactgtgtgagctgtctagttccaatatacaacgagtgataccaatgagtgacatttctatacacgattcgatatcggttttgaagaatcgtctgaaccttttaattgttttggccacaaactttgatttgaatttggagaaacgcttccaagaactaacacgaccgttatatagtaaggactatttagactttcatacgccagatgcgctcaagacgataacagcatccattatgcaggccagcctttcatttttggaaattagtcggaacaagaattatcccttcaatgggaaatttatagtttcgttattcggtaaattgatactacaacaaccttctacatcgagaatcacggagaacttcctgaaggagttcatacctttagttggcaagatgaaaagaaaaggtttaaacatgcttaaaatgttgtactcttcactggtggccatgtctcaggaggaggttttcgaggcttcttctgttttgtactgcagttatatttga

SEQ ID NO: 4780 - DNA, 672 bp, Saccharomyces pastorianus
atgttcggttcaacttgggtccagaattaccttctccagtttactaagagcaaagctcaagggaacactagttggatagagtattactgtcgtgttggaaaattccttgtagatgcgggcgtatttacttggtggacattctttgcttataatggtctagatgctgcactaaattttcaacttgcgtttgactctctaattatcgatttctgcgatatagattcattcgaattgttgagaaaacctctctattcggttgcggctgatttactgctcaaatcccaggataactcattttaccaatttctttcaaatctattgaagaggggacatattatagctacagatttgatacctgcatccaatgagaaagaacttttaaaattggtatccatgttttctaaggcgttgcaaaaatactcataccaagacttattatctactcttttagccttagccaaaaaccattgtgaagatggagacatcagcagagattttttagcaaaatacctggaatttttgaacaaaaattgcttgacagagctaagaaacaaccagctttttattacgttaagaagagagtttggtgtatcaagtgatgaagatgaaaaatgtaggtttggaactccttcaatgaatcagggatatcctgtcgaaagttgcttttgttga

SEQ ID NO: 4781 - DNA, 234 bp, Saccharomyces pastorianus
atgagaaacgacattatccttatagtgtgtgtcagtattggcaaagttggtaccgttcatgttgaattcatcgaaaagatcgttgtcgtattcagcataattgacgactttagctcttttatgctgccttgtttgctgggccattgtaaaaatggggatgttatcatcctcgttggtcaatctgttgtgaaaattggagatataggcctgtgggataagctggttttggtgtga

SEQ ID NO: 4782 - DNA, 90 bp, Saccharomyces pastorianus
atgagagcaagggatcggttggcaaaggtgctagatgacaacgaggagaaagagcagccaagtggccgcgacagcaagaaggtcgtgtga

SEQ ID NO: 4783 - DNA, 90 bp, Saccharomyces pastorianus
atgagtgacaacacaacgaacgtgcatgaaactagagccaagtttgctgagacattgcaacctaggatcggtggtatactactaaagtga

SEQ ID NO: 4784 - DNA, 900 bp, Saccharomyces pastorianus
atgctgtgtctcttcgctggtatggtactttatttcgagacgttagtgaagtatttcgggcatcttgccattattgctatcctttgggggtattcgttattagacaaccatatcgaaggtacgttgagttcctcgccaactttagaagatattgcgagtttgatgaatcgggtgtccttgaagtcagatatactattgtctcccatggtaaaccttggaacgcaagatatccaaaggctgctatacactacagttatcttgtctccgatttatgttatgataacttggctgctcttgccaccaaggagcctcatgctgataatgggcctatttctcttgtcataccattctccctggtccaaagtggcaagaaggctgttatggaagtttaaagtcattcggttgctagtcttctatgttactggcttggatctcggtggaataaataaggatcaaggcatttttgctacagtccaaaaacaggtgaagaagttggcctcgacggaaaatgcaaacggggtgttatccaattctaaacccattcgttttacttatgtgttgtatgagaatcaacgtcgttggttaggaatcggatggaagcctagtatgctgagttatgaaagaactccatggaccgatgaattcttgaacgaggcaccctcgcctgaaaacttccatttgcctgaagaaaccagttctatggtctggagatgggttgacaagacatggaggttagacatgaccaatgatggggccattcaagtaccaaattctaaggcaagaaccgccgccgaaccctcccctgatgaagggtttatatattacgataatacgtggaagaacccagtaaagaagactcgttttctgaatacgcagaaggagaagatgggtgagtactgc

SEQ ID NO: 4785 - DNA, 657 bp, Saccharomyces pastorianus
atgttcgaaatggctttggacgccatctctgaacagacgagatttgaagtcattggtggctactactcccccgttagtgataactaccaaaagcaaggcttggctccatcttaccgtagggtgcgtatgtgcgagttggcttgtgaaagaacttcctcttggttgatggtggacgcatgggaatcactgcaacccacctacaccaggaccgctaaagtcctggatcacttcaatcacgaaataaatatcaagagaggtggtgtggctacagtcaccggcgacaaaataggtgtcaagataatgctgctggctgggggcgacctgatagaatcaatgggtgaaccaaacgtctgggcagacgctgatttacaccacatcctgggtaattacggttgtttgatagtcgagcgtactggctctgatgttagatcgtttttgctatctcacgatatcatgtatgagcacaggagaaacattcttatcatcaagcaactcatctacaatgatatttcttccacaaaagtccgcttattcatcagacgtgggatgtctgtacaatatctgttgccgaattcggttatcagatatattcaagagcacagattgtatgtggaccaaaccgagcctgtcaagcaagttcttgggaacaaggaatga

SEQ ID NO: 4786 - DNA, 1737 bp, Saccharomyces pastorianus
atgcctacagtaagaccagtaaggagaagtcatcaaagaaaaacctccaatatatctcctcccatgggagcggctcctccgctgtcatcggtcgctttatcgtcatctgccaaaatcccagtacaggctccacctcctccaccccctccaccaatgatgtcagctccggtacctagctcagatatcgaaaaacctaaaccacctatgggcaacgcatctgtatcgtcaccaccttcaagtgggctaccctttttggcggaaataaatgcaaggcgatctgagcaagggacagttactggtacttcaacgacaggagatcgatctgaaaagattaaggcagcttcacgtgcaccaattccaccacctgcaccacctgttcctactttgcatgcccctccattaccaccaactgcaccaccgccaccatcgctaccgaatgtgacatctgtatcatctgacaaagcagcatcagcgcctgttcctccttcaccacctccaccacctcctctttcttcgccttctatagcctctccatcaccaccaccaccaccacctcctccttttcttactgctgccgtacctacaccaccaccgcctcctcctccccctccagtagtgatagcaagtaagccgccggctccaaataagcagtccaaaaaccctgctactgcatcttcctcggccataacaccagggggggctttgcctttccttgctgagatccaaaataagagagatgacaggtttgttatcggcggtaatagcgaatacaccactcaagataaacaaggggatgtggtaaattcatctccgactaataacattaacacttcttctaatgcaccttctgttccttcgccaaagcaggccagccaaacaggcatgtcatttttggatgaaattgagtccaaattgcacaagcagacatcttctagtgcctctaaaacgccacatgccccaccttttgctatggcacctcccttgcctactagtggctctcctcctcctgcagtttcaccttcaactaagaccctctctggtagttaccacagccacaatgaagatttaagtgtgtcgagtatgaatacagcaaaggcaccaccactgccagcgcaagctccacctccaccagccccaccaatgatgccacataataataagaatattgcgccggctgcatctttattacatgatatgcttccctctcaaaattctgaaaagcctgcccctccgattgcagctgctccacccctacccactctcaatgcgccaagcctccctcaacagccgattcctccaccaatatcgtcaactcccctaagtgcgaccacatttcctggtcgtacggaaactagaccaactgtgagtagttctttaaaatctccaccgcctccgccaaatttggaggcaagcgcatcgaccaaagacggagcttcttctaatagtgacagcaaaaatctcaagcaaagactattttctacaggagaatctacgctgcatcacaagcataatactcatacaaatcaaccagacgttgatgtcggacaatacaccataaatggatcaaattttaacggggcacaatcaggacatgaaaagatagttatagatgattcaagattcaaatggactaatgcctcacaaatgcctagaccacgtccatttcaagccaaaacaaaattgtatcctagtggtaaaggtagcagcgtgccgttagatttaacattatttacgtaa

SEQ ID NO: 4787 - DNA, 279 bp, Saccharomyces pastorianus
atggttagtgctccagctcctcctcctcctcctcctccgccaacaatgggtggtggcaacgctccaaagccagcaaactctgtcatgcagggccgtgatgcccttttaggtgacattagaaaaggaatgagactgaaaaaagcagagactaatgatagaagtgctccaactgtaggaggtggtgtcgtctcatcaacatctgggagctctggtgccctcaacaacaatagaccctccatgtcggcccctcctatccctggggtggggcccccacagtaa

SEQ ID NO: 4788 - DNA, 360 bp, Saccharomyces pastorianus
atgtttgcgttgtggttgacatgtttcagcttaggtattccaccagccaaaataccactttactgtgggggccccaccccagggataggaggggccgacatggagggtctattgttgttgagggcaccagagctcccagatgttgatgagacgacaccacctcctacagttggagcacttctatcattagtctctgcttttttcagtctcattccttttctaatgtcacctaaaagggcatcacggccctgcatgacagagtttgctggctttggagcgttgccaccacccattgttggcggaggaggaggaggaggaggagctggagcactaaccatttttgtaatactttgtaaataa

SEQ ID NO: 4789 - DNA, 234 bp, Saccharomyces pastorianus
atggtacctctggcaatcttggttgggacacccaaagcttggaagaaagaagttttacctggttccataccggtgttaacagcagtgacccagatatcttctggagcaacggcaccagctctagctggggcagcaactctcttggaaaccataacgtccttgatttcgttcaaggattcgttagtgaaaatgaaacccacgttacccttcacaaaaggcaacaacttttcgtag

SEQ ID NO: 4790 - DNA, 93 bp, Saccharomyces pastorianus
atggacttgtattcttccaagtattctctcaacttagcaaagtattcagctttcttttcacgaacgcctcccatttcaaacttattatattga

SEQ ID NO: 4791 - DNA, 2019 bp, Saccharomyces pastorianus
atgactacaagaggtggtgtttctaaagcacagaagggtttacatttgaatgaagatatttatgctggtatgaatgctttgcttcgtggtggtcgtattaagcattgtgaatattatcaatgtggtaaaggtagagatttgggtttcggtactattttgaatttcaccacaaagattggtgccggtatgggtgaacaaatgttatctcgtgaatactactacttgggtactcaattacctgttgatcgtttcttaacattctattatgcgcatccaggtttccatttgaacaacttgttcattcaattatcgttacagatgtttatgctaactttggtgaacctgcatgctttagcccatgaatccatcctgtgtatctataatagaaacacaccaatcacagatgtcatgtatccaattggttgttataacttccatcctgcaattgactgggtgagacgttatacattatccattttcattgttttctggattgcctttgtccccattgtcgtccaagaactgattgaacgtggtatatggaaagccactcaaagatttttctgccatatattatcattgtcccctatgtttgaagtgtttgccggtcaaatttattcctctgcgttattgagtgatttggcaattggtggtgcgcgttatatttccactggtcgtggtttcgccacttctcgtataccattttctatcttatattctagatttgccggatctgctatctacatgggtgcaaggtcgattttgatgttactgttcggtactgttgcgcattggcaagctccattgttatggttctgggcatctctatcttccttaatttttgcgcctttcgttttcaacccacatcaattctcatgggaagatttcttcttagattacagagattacatcagatggctatcaagaggtaataataagtaccacagaaactcatggattggttacgttagaatgtctagagcacgtatcactgggttcaagcgtaaaacgactggtgatgaatctgaaaaggccgctggtgatgctaatagagctcatagatcaaacttgatttcttctgaaattgtaccatgtgccatttacgcagccggttgttttatcgcctttacattcattaatgctcaaactggtgtgaagaacgataaggatggtacggtgaactctgttctacgtattattatctgtacgctggctcctattgctattgatctgggtgtcttgttcttctgtatgtgtatgtcatgttgctctggtcccttattcggcatgtgctgcaaaagaacaggttccgttatggcaggtattgcgcacggtattgctgttattgtccatatagtctttttcattgtcatgtgggttctagaaggtttcaactttagtagaatgttaattggtgttgttacttgtatccaatgtcaaagactaatcttccactgtatgacagcattaatgctgactcgtgagttcaagaatgatcacgccaatacggctttctggactggtaaatggtatggtaaaggtttaggttacatggcttggactcagccagctagagaattaactgccaaagtcattgaactatctgaatttgcagctgattttgtgttggggcacgcgatcttaatttgccagttaccatttattattatcccaggtattgacaagtaccattctattatgctattttggttaaagccttctcgccaaattcgtccaccaatttattctttgaaacaaacacgcttgcgtaaacgtatggtcaagaagtactgcagtttgtacttcttagtattgcttatttttgcagggtgcattgttggccctgctgtggcttcgtctcacgttaaaaaccttggttccaaactgactggtactttccataacttggttcaaccaagaaatcaatccaataatgatacgggacaccagatgtcaacatataaaagtcactattacacaagtgcgcctcatctgaagacctggtcaactattaaatga

SEQ ID NO: 4792 - DNA, 792 bp, Saccharomyces pastorianus
atgatgacgcacgacgaagaattgtcgtacatcaaatatattaatctgggaaagcagataatcgtcaaagacaatatacatggctatctggttaacaaaatcgttttctttttaatgaatttgagacagaagaagggatgtgtgtattttgcacgctgtggaactagcgataaagataactacatgcatgatgaagaactaaacgatgaaggaatccattattcaaaagtgctcaaaagttttgtgctcaaaagaattgaacagaagagactggcaaagagaaactcagaatctttagttgaagtaatggatggaaactttgataaagatttgaagacatccttgatagtttggacaggtccgagaaaaagaacccacgacactggcctttttttttcaaaagaaggtattaaggttcagcaacgatctgaactgagacagttgaacccagggagtatcgccgatctcactgatgaccaaataatgaagaaatatccttcggaatatgcagaatcattgaaagacccatatcatttccgattccccagagcggagtcttaccacgacttagctgttcgtatggaaccattgttattagaaatggagcatacaagcaaggatatcctcattattgctcatgagtcaacgttgagagttttatatggctatttaatggcttgtacttgcgttgaactaccaaacttggacttcacaagagataaattggttgaaatttcatttagccccttttgcaatacggtggaactattggacatccctttaacagattaa

SEQ ID NO: 4793 - DNA, 726 bp, Saccharomyces pastorianus
atgtcgaatgtgctctctgatgacgaggagctcctcaatgggctaggaagtgagattataaagccttttaaacaaggtaatcatatggcaagaaccgtcaaaaggtgggtaagtaacaaaccttctaccacaacaggatctgtaaacatcaacgttgatggggtgcatgggccagtaaatacggaaagttatatatcccctggacaactttactccacggactcaggtaatctatttcacgctggaagaattctcgtcgtcctcgttggccttcccgcaacatctaagacattgttatctgtggcgattacgaggtatactagatggttaggagtcaggactaaatcatttcatttctcagagtataaaaaatccgccaaagatgtaccttctgattatttctgcgtagttccaaagtcaaaagagggggtagaatttaatgaaaaacttcgcaggcggatgttagacgacatacttttattttttaatggcacttctggtcaactggccatttatgatgccttgaatattcgtaagattgatagaaagaacttagaagcaaccttctgtgaaatcggtgttaaagtgcttttcatagaatcaatcgtatctgatcaagaaatcatgaataggaatatagcgctcgtattgcagtcgagcgattatagagacctttcaacggacgatgctgttgacgaatatatgaggcgtttagcggggatcctc

SEQ ID NO: 4794 - DNA, 183 bp, Saccharomyces pastorianus
atgctcattgtttgtcccagtttgtccatgacaaaggtggaaatggaagcagatgtttcagctacagtgtcagtggcgtattctaccatcgtggttaaagcggaaaaagcagaggcacgagcattgaactcgttgtctgctctattggctgcactgattaagccggccacgagagcaggatag

SEQ ID NO: 4795 - DNA, 900 bp, Saccharomyces pastorianus
atgtcgacgaacgcagactcagctggtaagaacatcaagtatccgtggtggtatgggggtgcggcgggaatctttgcaactatggtgacgcatccgctggacctgtcaaaagtcaggctgcaggcggctcccttgcccaagcctactctgttcaagatgctggagagcattctggcacacgagggtgtgctgggactatactcaggactgagcgctgctgtgctgcgtcagtgcacatacaccacggtgcggttcggtgcttacgacatgttgaaggaaaatgtaattccgcaggaccaggtgaccaacatggcgtatctactgccctgctcaatgttcagcggcgccatcggtgggcttttggggaactttgcagacgtcgtgaacatcaggatgcaaaatgactctgccttggagcccgccaaaaggaggaactacaagaacgctatagacggtgtttacaggatataccgccatgaaggcgggctcaagacgttgttcactgggtggaagcccaatatagtcagaggtatcttgatgactgcgagtcaggtcgttacgtatgacgtgttcaagaactatctggtcacgaagctcgatttcgacgaatccaagaactacacacacctgaccgcgtcgctgttggctgggctggtagccaccacggtgtgttcgccggcagacgttatgaagacccgtatcatgaacggcagcggggaccatcaaccggctttgaagatcctggccgatgccatccgcaaggagggcccctctttcatgttcaggggctggctgcccagtttcacaagactgggtcccttcacggtgttgattttctttgccattgagcaattgaaaaaacacaaaatgggcatgccaaaggaaatagaagataagtag

SEQ ID NO: 4796 - DNA, 108 bp, Saccharomyces pastorianus
atggaaataggtaagacgaatgatgaagcagcatcgaccattatatttcctaaattacctcttgacgcttgtgatgttaaatcgtcaataatggttggtatattgtag

SEQ ID NO: 4797 - DNA, 210 bp, Saccharomyces pastorianus
atgttttcgatggtttcctccacttcctcgtattctagttttcttttcttgttggtgccggaccatctgttcaacgactgttctaaacgtgggtcacctgagtttattattctttcatttactattacactgggacccctaaaccataatatttcacctttcgtctttttccatggtaacatctcttctcttccagatctcttggtttga

SEQ ID NO: 4798 - DNA, 894 bp, Saccharomyces pastorianus
atggcagtgaaacaagtggagattaaaaacaacaatatgggtgcagccacagataataacaacaataacaacaacaacaacaacaactactacaagcaaaccaagacagatgaggataacgttcaggaggagcaacatcagtcacggttacaaaatcagcagcaggagaaatcagaggatgtcggtgcagtaaatcatccaaaaactaatcaaaatattcataaaaagatggttgatgctctgcagcatgaaatgaatttgttaaaggaactgcatcatgaaaacattgtgacctattacggtgcttctcaggaaggcggaaatttaaatatctttctcgaatacgttcctggaggttcggtttcatccatgttaaacaactatggcccatttgaagaatcattaatcactaattttacgaggcaaatactgattggggttgcatatttacataaaaaaaacattatccaccgagatattaaaggtgcaaatatcttgattgatatcaaaggttgcgtgaagatcaccgatttcggtatttccaaaaaattgtcacctttgaataagagacaaaacaaaagagcttctttgcagggctcagttttttggatgtcaccagaagtcgtcaaacaatccgccactactgctaaagcagatatatggtccactggttgtgttgttattgaaatgtttactggtaagcatccgttcccagatttttcacaaatgcaggctatttttaaaattggcactaacacaacgcctgaaataccctcttgggctacacaagaaggaaaaaatttcttgagaaaagcgtttgaattggattaccaatacagacccacagctcttgaattactacaacatccatggctggatgcgcatataatttga

SEQ ID NO: 4799 - DNA, 1266 bp, Saccharomyces pastorianus
atgagtgaaggataccttatgcaaaatataggaggcactgatctactagttaatgatggaaaggcaaaggatctaccctttgtagagtcatttttggtagaaattggctgtgagaaatacttgaataaatttatccaatgtagtgttgtcacagaagaagaaatcaagtatttggacaaggatattctcaccgctctaggggtcaacaaattaggagacagactcaggatactaagaaaggctaaatcatttcagagaagcaaacgcattgaacaagtaaaagaattgaaaaacctcatggaaagggtaagttccctatctacttccacattgactatgaactcggacttggctcctgaaaaacactgtgttatattcattttaaacgatggctctgctaaaaaagtgaatgttaacggttgttttaatgctgactctattaagaagagattgatcaggagattgccgcatgaactattagccacgaattctaatggagaactcactaaattggttcaggattacgatgtatttgtactggattacgccaagaacgtgctacatctgctgtacgacgtagaattagtaaccatatgccatgccaatgatcgagttgagaaaaatagactaattttcgtttctaaagatcagactccaagtgacaaggccatatccacatccaagaaattatatctgagaacattgagtgcattaaaccaagtagggtcatcttcgtcgaacttactctctcaaaacaggacaatttctaataccaattcagaaggaaaactcaagattgacaataccgaaaaagacagaattaggcaagtttttaatcaaagaccccctagcgagttaatctcaaccaacttagcagggtacttccctcatacagacatgaaacgattgcaaaaaacaatgagagaatcgtttcgtcattcagctatgctaagcatcaatcaaaacagacctttgagcgccgaatcaaacaatgttggggatatcttgttaaagcactcgaatgccgtggatatggcactattgcagggtttggaccaaactagaataaataataagctcgacacaaccaaaattccgaagcttacacataaaagcgctgacagtaaagatgtcatatctgatcaattggaactgctaagtgttgaatctgatggagaagaagattatgatttccttggagaagacagcgaaatcgtttcgttaccaacaaaattgctacaccaagaactggttgaagggtgctga

SEQ ID NO: 4800 - DNA, 306 bp, Saccharomyces pastorianus
atgaactgtacaaatagtaattatccgaaacgtacacgacccacgaagatgccccaaaagccgcttaaagtcactaagaaagtcaaagacccacgtagggttacaaagaagcagaaaaacttaaggaaagctgctccgttgcaattgaaatctaaaaagaaatcattacaatatatgaagaaattaagaaagagctcctctcttacggaaactaccgaaagattggttgcaagtaaagtcggccacttggagctgttgaggggtactagaaaagaactggaaaagggcaaaaaagcttccaaataa

SEQ ID NO: 4801 - DNA, 147 bp, Saccharomyces pastorianus
atgacccgttcttctgttttagccgacgctttaaatgccattaacaacgccgaaaagactggtaagcgtcaagttttgttgagaccttcttccaaggttataatcaagttcttgcaagttatgcaaaagcatggtatgttttactaa

SEQ ID NO: 4802 - DNA, 1776 bp, Saccharomyces pastorianus
atgacaaagaggagaagcctctatatggttggttctaccttaacaatagatcatttacctccagaaatatggctgctcatttcgaggttactgcagacatctgatttgcacagcctatgcttaactaacaggaggctgtatttgacaatagttgccgatgaaatttggaaaaaacggtgctacgatcgatggattattcaggagaacttggatattttagccgataatgattacgatccaataccagtgtgtcagtggcattcttactatttacaaagagcaaagtgggaaaacaaaatattttctttattgtgggaattaaccatggagacgcagcctcaagctttcagagaaaaatactttcatatccttcaatttgagcatcacaaattggccacgttccttcacaggatcattaaacaaggttatatccctaataaaaggcggcttgatttacttacatatgccaattatctgttgaagaatataaggcataagtatgtattccctttattttatccaatgaatgccacagaactgaaagacttaaacacaatggcttcaagagatgcggaaatgatatacttaagactatccgccattgatacttctttttatgatttattggattccagagagtttgtcttgaatggcatatgttccagtttgcttcacaggtataaaaaaattgaaaagttcttggaattacgccctgtagacagagtttcaaagttgatttcaatgagtacggattatctcgactgtttttcacaactcagtgatatagaagatcaaatgggcgatagagatggggaaagagagctgcatagagaagacttcatgttactaagagtatactcccgagaaagtcgaggctataaaactattattctggcaatcatacaaactattgccaagagatataacgttgaatcgtatcttgcccgagatcatttggtagtcaccgaaccagatttcccaggtggtcaagctttcgtgactgtcaatgaagattttcagccatatatatttaataaggaagatctgataagcgtttggtctagtaattaccccaattcagcaaacttcgaaactgcagctctaccagcactgttagaaccaatatcgatacaacatctccttacggaattcttccgtgaattactacgatgcaagcccaggccatttgaagattatcctaatagagcgcatggattacgcgatatgtttccatatggaaaagtggaagttccaagggatgtaaccatgtactttgcattcatattcgatctttttgatgctatgtttgaatctggaatgacaagcttgcggggccaaatgttaagagacctattgaattacgtgaatgccaataatttcggcgatttaaatattatcattggacagaatgcccttgaagaaccgaatgattgctggtgcaataaaagagactacgtccttttagatgatgatgataaaatcgggtacttcttccaggatattgaaacccaggataccttatgtgctttaaatcaatataaggtagacgggaaagtgttcataacgacaatagatattttgggtgatataagagtccgcctagcagaggggctgatgccctttcgaggagattgtgataagttgtgggggagcttttccccagtggttccacgaactgactggggtctctttttcaaaggctacgacagtgaaaagcagagaatgcaactcagcgcttacacacaggagaggctctttgatcttatagataaataa

SEQ ID NO: 4803 - DNA, 711 bp, Saccharomyces pastorianus
atgcataacctgtttttgacatctatttcactggtcttctggctgctattgttggagcaattgattcctatggtgtaccgtcatggcctgttctggtccatctgttccgaagaagccttcgcaccaaaattggttactatctactatttgaactatttgaccaaattcttggaattggttgacactgtatttttaattttgaagagaaagaagctactgtttctacacacttatcaccacggtgccaccgctttgttatgttacactcaattgatgggtcgtacttccgttgaatgggttccaattttattgaacttgggtgttcatgttatcatgtactggtactacttcttaagttcatgtggcattagagtttggtggaaacaatgggtcaccagattccaaatcatccaatttttgattgacttggtctttgtttactttgctacctacacattctatgctcacaagtactttagtcgtatcttaccaaacaagggtacctgttatggtacacaggatgctgctgcctatggttatttgatcttaacatcttatttgctcttgtttatctccttctacatccaatcttacaaaagaagcggcaaaaagactgctaagaaagaatccgaagtatctggttccgttggatctggttcttctactggtgtcaagacttctaacaccaaggtctcttccagaaaggcataa

SEQ ID NO: 4804 - DNA, 333 bp, Saccharomyces pastorianus
atgaatactactacctctgctgtcgcagccgctgctgcggaccagttccaggctttgaactcttcctcattgggtttcttaaagtttcatattccttccatcgaaaatccatttggtattgaattgtggccgatcttctccaaggtttttgaatacttcagtggctatccagccgaacaatttgagttcattcacaacaagaccttcttggctaacgggtaccatgctatcggaatcatcgtcgtctattacatcgttatcttcggtggtcaagctatcttacgcgctttgaatgctaccccaatgaagttccactatggtttgacatgctaa

SEQ ID NO: 4805 - DNA, 141 bp, Saccharomyces pastorianus
atgcgtccaacggctacaaaaaacaccgcaacggcgaaaaatggcgcaattattggtcgcccggtcacctcgcacggtcgcgcagcgctactgggatcaacaatcaataaacaactcataacacgagccatcaagaggtga

SEQ ID NO: 4806 - DNA, 225 bp, Saccharomyces pastorianus
atgttcatgttgggcagggccgggtgggctgaggcggacgaggcctcaccattgtactgcctctcggctgccttgataaggttgtcgaatgacgaaatggggggcaacgtaacgtggttcatagcgctattgtttgcattactcatcgctcgctgcacatgccacacaaaaaacacacaccctgatacctcgaaaccaatgcactgccccagtacgcatcgctga

SEQ ID NO: 4807 - DNA, 1308 bp, Saccharomyces pastorianus
atggctcgtgttatgagttgtttattgattgttgatcccagtagcgctgcgcgaccgtgcgaggtgaccgggcgaccaataattgcgccatttttcgccgttgcggtgttttttgtagccgttggacgcatggcagtaccatctggagcaaagcaacggtataaagaagactggctggttggtcagcgatgcgtactggggcagtgcattggtttcgaggtatcagggtgtgtgttttttgtgtggcatgtgcagcgagcgatgagtaatgcaaacaatagcgctatgaaccacgttacgttgccccccatttcgtcattcgacaaccttatcaaggcagccgagaggcagtacaatggtgaggcctcgtccgcctcagcccacccggccctgcccaacatgaacatcagcaacggtagcgccagtgcgggcgcatcgtcgtcaatgctgagctaccagctgcttccgcactccaacgacgtgtcccgatcgaactccagctcgagctttctgccctccgcgcagcagccggcggatggatcgacttctgcatccgagacctcttcctctgcgtctccctcacgctccatatcaccgcctttgaagatggctgcaccttcgtctgccggtggtgctggtgctggtgctggtggcagtgccccccacagtatcaaaatcaacaagccaagaaagaagaagcaatgcccgatttgccgcaacttctatgctaacctgactacacacaaggctacgcatttgacgccggaggataggccccataagtgccccatctgccaccgcgggtttgctaggaacaacgatttattaaggcataagaagaggcattggaaggatgaaatactgtcccagtcaggagcgctatcgagccctgccaatgatgtcacgggcgggtctgtttcgcccaccgatgatgatacccatgaaaagatgacaccgatgaattccgtcacggattatgcacaattgaagtcgctgcaccagataaaggggacgttcaagtgtccattcaactccactttgatacaactagatatggacatgtatccgtacaaattcaagcctttgaatttcgagacctccaattgccaccaaaccggcgtgttctcacgttgtgacacattcaaaaaccatttaaaggctttgcatttcgagtacccacctggcactaagaaaaaggatagaaacatcgttcctggtagatgtaagcattgcgggctgaaatttgagaatgtggacgtttggctcaacgaacatgtggggaaacagtgcggatataaataccattaa

SEQ ID NO: 4808 - DNA, 321 bp, Saccharomyces pastorianus
atgacgaccacgagcgcctggcccaaaatcagaatgatggcgcacaccttctgggcaatctggaacaactctctgtcttgcttgttttcgagcctgatctgcaacagctgggtgccctgcaagaactggaagatcatcgacgacgtgatgatgggcgagacacccagctccagcagcgtaccacggttggaggccagcatggcacgcaaccagtacagagggtccgaggtttcactggacacgatcccgtacagcgggatctggcccaggattaaaaagatcagcagcgaaacacctgtccagatgagcttctggttgtaa

SEQ ID NO: 4809 - DNA, 198 bp, Saccharomyces pastorianus
atgagagagcaggctcaccaaattcaaaagaattttgttgaagtactcgatttattgaaggctaacgttaaggagatttattctattagcgaaaaagacagagagagagttaatgaaaacggggaagtttactacatcccagaaattccggttccagagatccaagatttccccaagagtcacatcgttgatttttaa

SEQ ID NO: 4810 - DNA, 3333 bp, Saccharomyces pastorianus
atgcgtaatcttattaccctaaataagggtaagttcagaccagtgacctctactgcggaagatgatgaagatgatttacctttagctttattggactctgtgtttgacacgttatccgatagtattacctgtgtacttggttccactgatattggtgctattgaagtgcaacagttcatgaaggatggatccaggaacatcttggcttcattcaacattcagacctttgacgacaaattactttctttcatccattttgctgatatgaaccagctagtgtttgtcttcgaacagggtgatattgtcactgccacttatgatcctgtcagtttaaaccccacccagactttgattgaaattgtgggtaccatagataatgggatagcggctgcacagtggtcctatgatgaagaaacgctggctatggttaccaaagatcgtaatgtggttgtgctaagtaaatcctacgaacctatatctgagtaccatttggaagtggatgatcttaagatatcaaagcatgtcactgttggctggggtaagaaggaaactcaatttagaggaaaaggtgcgcgggccatggaaagagaagcattagctagtttaaaagcatccggcttggtcggtaatcaactcagggatcccaccatgccctatatggtagattctggtaatgtgacgtctttggacacccatgaaaccaccatctcttggagaggtgattgtgattactttgctgtatcttctatcgaagaagtgcctgacgaggatgacgaaacaaaagtggtaaacagaagagcttttagagtattcactcgtgaaggccaattggatagtgcttctgaaccagtcacaggaatggagcatcatttaagttggaaacctcaaggttctttaatcgcgtccatccagaggaagaccgatcttggtgatgaggattcagtagatttaatcttctttgaaaggaacggtttgagacatggcgaatttgatacaagattgccattagacgagaagataaagagcgtatgttggaatagtaactcagaggcattagccattgttttagtagatcggattcaattatgggcatctaagaattaccattggtatctaaaacaagaactgtatgccagtaacatttcttacgttaaatggcatccagaaaaggatttcactttaatgttttctgatgatggatttgttaacattgttgattttgcctacaagatggcgcagggcccaacattagaaccattcgataacggtacatctcttgttatcgatggaacaaccgtgaacatcactcctttagcccttgctagtgcccctcctccaatgtattaccgtgattttgaaacttccggtaatgttttggacgttgcatgtagtttgtcaaatgaaatatatgcagctatcaacagggatgctttggtatttgcatccatacctagtattgaagaaatgaaaaagggcaagcatcccaaggtagttcgcgaattctttaaatctgagtttacaagtgaacttgactctttgagacaagtagcctttataaacgattcagttgttggtgttctgcttgacacagataacctttctagaatagcacttttggatattcaagatattactcaaccaacacttataactattgtggaggtttatgataagattgttttgttgaggagtgatttcgattacaaccatctggtatatgaaactcgtgagggtacggtttgtcaagtggatgcggaaggtcaattaatggaaattactaaattcccccagctagtgcgtgacttcagagtgaagagagttcataatatgttatcagaagatgataccaactggtctactgaaagttcggaattggttgcattcggtgtcacaaataatggtaagttatttgcaaaccaagttctcttggcttctgcagttacttctttggaaatcactgactccttcttgctatttaccacagcacagcataatttacaattcgtgcatttgaattctaccgacttcaaacctttgcctttagtggaagaaggtgtcgaagatgaaagagtgcgtgccatagaaagaggttctgttttagtatctgtcatcccatccaaggcttctgttgtactgcaagctacacgtggtaatttagaaactatctacccaagaattatggttctagctgaagttagaaaagatattgtggcaaaacgttacaaagaagcgtttgttatttgtcgtacacatagaatcaaccttgatatcttgtacgactatgcccccgagttgtttatcgaaaacttggaactatttattaaccagattgaaagagtcgattatctcaatttatttatttcctgtttgtcagaggatgacgttacaaaaacgaagtatagagagactctttattcaggtatctcaaattcatttggaattgaaccagcaccacttacagaaatgcaaatgtacatgaaaaagaaaatgtttgatcctaaaacttctaaagtcaacaaaatatgtgatgctgtgttgaacgttttattaaataatgtcgaatacaagaagaaatatctgcaaacaattatcactgcatatgcgtcccaaaatcctcaaaatctatcagatgcattgaaactaatcagtgaactaaaagacccagaagagaaagacttttgcgttacttatttatgtttcttgcaagatgttaatgtggtctacaaggtcactctatctctgtatgatgtcaatttagcattattagttgcccaaaaatcacaaatggatcctcgtgaatatttgccatttttacaagaattgcaagacaacgaacctttgcgccgtaaggtcatgattgatgactatttaggtaattacgaaaaggctttagagcatctttccgaaattgaaaaggaaaaagatgtttcagaagaagtaatacattacgttgaggctcatgaattgtatagacatgctctagcactgtaccgttatgattcgaagaagcaaaatgtcatttataacatttacgcgaagtacctttcatcgattcaatcgtatacggatgctgccatagcatacgaaatgcttggaaaattcaaagaggcaatgggagcgtatgaatcaggtaaaagatggcgtgaggctattaccattgctgttcagaaatttccagaagaagttgaaacagtcgctgaagatttgattacttccttaacatttgaacataggtacatcgatgctgctgatattcaactagaatatttgaacaacgttaagaagctgttactctatattgtaaggcttacaggtacgatactgcatgcctag

SEQ ID NO: 4811 - DNA, 192 bp, Saccharomyces pastorianus
gagcaggctcaccaaattcaaaagaattttgttgatgtactcgatttattgaaggctaacgttaaggagatttattctattagcgaaaaagacagagagagagttaatgaaaacggggaagtttactacatcccagaaattccggttccagagatccaagatttccccaagagtcacatcgttgatttttaa

SEQ ID NO: 4812 - DNA, 219 bp, Saccharomyces pastorianus
atgcggaagaacacgttagatatggtcagtgtcgggatcgtgtgtctcgtgggcatctacacaggcacgaagttctttgagcccatcgtgatcgatagattgcgcaaggacgggaacctgagatcggacgttcccatcccggactatgatagggacgggaacttggtgatgcccccaccgcctacaccgcctacacaatcgccaccaccggaacaatga

SEQ ID NO: 4813 - DNA, 852 bp, Saccharomyces pastorianus
atgaataatgagcttttcaataactcaagcctgaaagttccttcaaaagatgtaaaagttgttaacggagtcgggtatataaagagtgataggaatttctctcaagccaactctatttcgatacaagacggggatataaggacaaggcccacatcatcagcaacatcgacgaggcagccttctcgcatggcgaatggtatgagagttttctcatgtccgtatcaaatggggctacctgatggtgaaagtagtatgagggtggaagtgagaagtcgagatttaaagcagatatacagaaaggattatttatttcgatccggcagccaaaattttgacaaggtattcctagtcatggaagggaatatatcaagtttgagcaagatgcaaattgtaccacgaagaatacagctaaatttgttagaaacaacaacttatttatcacagggaatagcaaacgggaactattcatctttgaaactgattgaacttgatttgaatcagcctaaatccaataagccccttctgaacttgaatgaaatacgggagagttctgatggttccgtgtttgagtgtgagttacgattgagggatcatcctattttaagaaagctggtgtttaacgaggaggattacaggcaccgtgggaatagactttatagtttcaaaacatgcacaataaagagaatatttagtttccaactattgatcgaatgggaaattaatggaattaggaagcaatctgaagtaaatatcaacccggttcaagtattttgtcaaatacgagagcatgttgaggctgaaataccgcctagatatgtgctgccaccaacgtatacggagatggcgacttaa

SEQ ID NO: 4814 - DNA, 675 bp, Saccharomyces pastorianus
atggctccgaaagtcaaagtgtctctaaacccaccatataatggggatttttacagctctaatgatcaaatgtcaggagtggttaatcttcaattaaaaaaaccactgtcgataagaaaaattaccgtcatattgaaggggttctcagagactttgacaaagattgaccaagaatatatgtttcagcagaacggtatgatgatacctgggcaagataataggtccttccatactttgttaaagtttgaacagagagttttccctccagataatgtatggaatgctcttgatggatcttcaaagccgttcaaagttaaaccaggtgcgtatgactacagtttccagtttgacaagtttcctaaaaaacctgaatgcctgaaaaatcatactgcaaagacaatagcgtttgtgacaaggagcaacgcacggcttccacccacgttcaacagccattggcaagaattcaataagattgataatttggatctatatttttatgcgtttggaaaggtcatttatatggtacaggtgcaaatagagttgggaaaggcagcatcttggtttaaaccgttccacagattaatcagggaaatcgaaacatttgaatttatacctgatccgaagaaccttattatagaacccgatgaagatatgatgaagaagttgctggtttga

SEQ ID NO: 4815 - DNA, 1476 bp, Saccharomyces pastorianus
atggtgttccacaaggtgcaatcccagttagactacatagatatgtccgaatcattgagaattgaagcattgagagtggaagaaatgattaaatattcttttagtgaaaatgctaaggaaactttacaaccagaacatgaaaaacaaattaagctattgcaaggagaattacaaactatagaatataagagctgtgagatctgtgataatgatatcgaaaggtttttagaattaatgctaaagtacaaagaggcaacagtaaacctaatgcaagaaatggtcaaatctccttcaattctacatattctgaaagaaggaagactcgttgcgtttagagatacaaacgattgtctcaaactagggtttatatttaaagtttcgttaaaggatgccgtttgtgttattatgacgttcacaaaagcatttacactttcaaatggtaagccaaatcatttgatatactttccaaaagcagacgggtacagaaagaggaatttccccaagtttgagaaagccgatttttatatggaagaagtccctgtaaccgctatagaggtaatcacaaagcgcaaatttgccgctccattaggtaaagtaatgaagaaggatgccaccgctctaagtgaattcaaggccgaaatcagtaacattttagagggaaaaacactcaaagaagcaatcaatattgaaaagcaaggtttgaaaattcatcaaatactgctagaccgtacaaacattagagatgagatatttgaactaaaaagcatcaaatgccctggtttgagcgaacatattgttccgaggtacaaggcacatgctaccgaaaacaagatcaaagagttgtatcatttaatgtctgaccaaaacttaagtctactacctgattatgaaaagagactagctgttctaaaagatactggatttatcgatgagaatcataatgtgttattaaaaggtagagtggcatgcgaaattaattctggttatgaactggttctaactgagttaattttggacaacttcttgggaagttttgaacctgaagaaatagtcgccttactatcggtgtttgtttacgaagggaaaacaagagaagaagaaccccccattgtcacaccaaggctagcaaagggtaaacaaaaaatcgaggagatttacaaggaaatgcttggtgcttttagtacacaccaaattcctttaactcaggatgaagcggagttcttggataggaaaagatttgctatgatgaatgttgtgtatgaatgggctcgtggtttatcgtttaaagaaattatggaaatgagccctgaagccgaaggtaccgtggtcagagtcattacatggttggatgaaatttgtcgtgaagttaagactgcgtccattattattggtaattctacactacatatgaaaatgagcagagctcaagaattgatcaagagagatattgttttcgctgcaagcctgtacctgtaa

SEQ ID NO: 4816 - DNA, 2436 bp, Saccharomyces pastorianus
atgacgaagggatttaataccagctctatacaggaactatacacgtctttaaaggaaatcactaatggtgcagacgtggagcttttcgaagatcgtatcaccaaattagattttgggagcagtgacgatttaggacacgccaatgacaccataaaagacagatttttgaagccttcaaatgttcttccttggagtttattagatatggtccaagacgtcccaaaaatgaactttttagacgatcactctgataagttagactacaaggagctgttgaaaattcctaacccaattaatagaacatcatatcagttcaaaagaacaggcctagagggtaaaatttcaggctataaagaagaggtcaacttgaaggaaatcgctagtgccaatgcatcaaactcgctgtcaattaccagaagtatcaatcataaccaaaactcagtaagaggttccactgcgcaattacccttcactccaggcggtatccccatgaaatccgtcaaaaaaagctcggaacaaaatggcacatcagcaatggccaacgccaccaaactactgcacaaggatggtcgaggtttatttgacattccagatggcatggaaagaggtatcaatccagtggataccgttgttgataatgaggatcataacgaagaattgaaagagttgaagcaacttgacgaaatagataatgaactagacatcaagatggagatatacgaagcaaaggtgaagtcggaggaaagctccgataaaacactttccgaagaaattatagaggaagctaccgaagaaacaacaactaataacgccgaagatgcagagatcgatgaactattaccaattggtattgactttggcagaacaaaggcgatttctaagaatgtcaccgtaaagaaggaatgggctcatgttgtcgatttgaaccataaaattgaaaactttgacgaattaattcctaatcctgccaggacgtggccttttgaactggatacgttccagaaggaggccgtttatcatctcgaacaaggtgactctgtttttgttgcagcgcatacatctgctggtaaaactgtggttgcagaatatgcgattgccatggcacacagaaatatgacgaagactatttacacatcacctatcaaagctttatctaatcaaaagttcagagactttaaggaaactttcaacgatgtcgatattgggttgattacgggtgatgtgcaaatcaatcctgatgcaaactgtttgattatgaccacagaaattttaaggtcgatgctttacaggggtgccgatcttataagagatgtagagtttgttatttttgacgaagtccactacgttaacgatcaagaccgtggtgttgtttgggaagaagtaatcattatgcttcctcagcacgttaagtttatcttgttgtctgcgacggttccgaatacgtatgaattcgccaattggattggaagaacaaagcaaaaaaatatttacgtcatttctactcctaaaagacccgttccgttagaaataaatatatggaccaaaaaggagttaataccagtgatcaatccaaactcagaatttctggacgccaatttcaggaaacacaaagatatcttaaatggagacagtacaaagggagcccctccgaagacggatagtggaaggggaggctctacagcaaaaggtggacgtgggggaagtaatgctcggggcggaaggggaggccgtggtaattcgacacgcggaggtgctaaccgtggtggctcaagaggtgctggcgcaattggctcgaataaacgtaagtttttcacccaagacggtccttctaaaaaaacatggcctgaacttgtcaactacctaagaaagaaggaattgctacccatggttgttttcgtatttagtaaaaagagatgcgaagaatatgctgattggcttgaagggattaacttctgtaacaataaggaaaagtcacaaatccatatgtttatcgaaaaatctattactcgtttaaaaaaagaagatagagatttgcctcaaattctcaaaatcagatccttgctggaacgtggtatagctgttcatcatggagggttgttgcctattgtcaaagaattgattgaaatcctattttctaaaggttttattaaagttttgtttgccacagaaacatttgccatgggtttgaacttacctacaaggactgttgtttttagcagtattcgtaagcatgacggcaatggactgagagaactaaccccaggagagttcactcaaatggctggtagagccggtcggagaggtttagattctaccgggacagtcatcgtcatggcgtacagttctcctctatctatcactacattcaaagaagtaaccatgggtgttccaacaaggttgcaatcccagtttagactaacatataatatgatcgac

SEQ ID NO: 4817 - DNA, 2025 bp, Saccharomyces pastorianus
atggagcaacagacagaaaagcgttccattgtggaggacaacgattcaagcgtgaagagacaggatacttcctggtcgaaaggtgttgctcatcttaagcccgagtatatcgtaccgtttaagcaaaatgcacttcaagaggcccctgtttatgacgaagagatgtcttccgatagaatggtagaagaactgtccggtaacggtgggaacaataagaagaacaaaaaggggagaggtaagaagcgtggccaaaacaagaatagagataacagacaagtcaaggaacaaaatgccctgtgcccccgcttgatctatggagatgcgtccaaatgttcctttggtgatagctgtaggttcgtccacgatatcaatcagtatctttccacaaaaaagcctgaagttgaaagtgacatatttcctatatgcccggttttcagctcattgggatattgtccgatgggattcaagtgcagatttttgtcatcccatttaaacaagggagaaaatacacttatatcaacaagggacgtggatgtagatactcaaaccatctggtctgttaggggggaagtcaatcatatttcacctggaaagaaactggatctaataaagagaaggttcccattccctaagagtaacgaagtgttggaaatcatcgactctttccaacaggagttcagagactctgcgaagttagacgaggaagcagaaaccaagcccgtggaaaaggaacaaaagcaagaatctcaggagccaaaagcccaggaccaagttgctcaactggaagagagagaaaaagagttcgcggaacatagagcgaaacaacgtgaagtgtacttgaaatacaaggacactcgttactttgctcaagagaaaaagcccttggatctgcatcgtaaaaaaatcgtatcaccattaactaccgtgggtaatttaccataccgtcgtctaatgagaaaactgggcgcagatgtaacatactcagaaatggctttggcgattcccttgatccaaggtaccaattccgaatgggcgctacccaaggctcataagtctgaggtgcctggttttggtgtgcaagtggcttgttccaaagcctggcaggcagctaaggctgcagaagcacttgtcgattctgttagcgatatcagcgaaatcaatttgaactctggttgccccattgacttgttgtacagacaaggttctgggagtgcgctactggacaatcctgcaagaatgattcgttgtttaaacgcgatgaactatgtctcgcaggatgttcctatcacggtgaaactcagaacaggcacaaaagacggccatcctattgcggaaggtttggtgaaaagattagtcaacgagaccgacgtggcagctattaccttacacggtagatccaggcaacagaggtacacgaaacaagcggactgggaatacgtgggccaagttgctgatacattgagatctgcagaagcggaatttaaagaatctgagcaaggtaaggaatcacgagactccaagaatagaatccaatttgtcgggaatggtgatgtcaacaatttcgaagattggcaccgttatctagacgggaatgcgaacattgacagtgtcatggttgcccgtggtgccctgatcaagccatggatcttcgaagagatcgactctcaacagtacttagacaagacgagtactgaaagattagacatcttaaaagactacgcacaattctccatggagcattggggcactgatgaatacgggctttctcaatgccgtagattcttctgtgagttcatgtcctttttccacagatacattcctatgggcatttgcgagagatatcccgttcagttgaatgaaagaccacccaattggtgcgggagagatgacgttgaaactttaatgggcagcacggacgtcaacgactggatcaagctaagtgacatgtttttcggcaagactgatgaaagctttgttttcgttcccaaacataagagtagttcttttgccactagggactcataa

SEQ ID NO: 4818 - DNA, 1059 bp, Saccharomyces pastorianus
atgtccgtcatgcccgacccacatgctaaaatagcgataccaaagccaaagcttattactagggaaacggacccattgcacataataaagacgagaataacaacacatggtagacctgtgaacattgcaggcccaatggttcgctattctaaattaccgttccgccaattatgccgagattacaacgtcgatatcgtttattcaccgatgatattggcaagagaatacgtccgcaatgagcatgcgagaatctctgatctttctataaatgacaaagacgtcccattaatcgtacaagtcggtgtgaataacgttgctgatctactgaaatttgtcgagatggttgcaccttactgtgatggtgttggtatcaactgtggatgccccataaaagaacaaattagagagggcataggttgtgctttgatttataactctgacttattatgtagcatggttcgagctgtgaagaataaatatggcgacaaattaagacttgaaacgaagataaggatacacgatgaattggatcaaacggtcgaactgtgccggaacttatgtgatagcggcgtggattggattacgattcacggtcgtacacgtagaactagatcatcgcaatcggttaatctggatgcgataaaatacattatcgacagaatcgccgataaaaatgtgcccgttatagccaacggagactgcttcaaattatcagatctggaaaaaatcactaaatacaccggggcgtcaggtgtcatggctgtccgtgggttactaagtaacccagcactatttgcggggcatgatatctgcccgtggggttgcattgaaaaattctggtattgggctttggagtttggcggtttgccgtttcagctggcccagcatcatttatattgcatgtttgagagtatggagttgaagagatcccttttgaaggagatgatgaatctcaaaaattatatcagtttaatagattggtttgatgaaaacttcgacttcaagcgtcacggcgaagacggatttggtgaggctatcgagatcccttataaaaaatga

SEQ ID NO: 4819 - DNA, 213 bp, Saccharomyces pastorianus
atgggtaccgaagatgtccgtctagctccagaattgaaccaagctatttggaagagaggtgttaaaggtgttgaatacagattaagattgagaatttctagaaagagaaacgaagaagaagacgccaagaacccattgttctcttacgttgaacctgtcttggttgcctctgccaagggtttacaaaccgttgtcgttgaagaaaatgcttaa

SEQ ID NO: 4820 - DNA, 693 bp, Saccharomyces pastorianus
atgacttcgacctcaaaatatccgaaaaagaacattaaatataccttaacgcataccttacagaaatggaaggaaacgttaaagaaaattactcatgaaacgctgagtaatatcgacgattcaagcggaagcgatgagaagattgaggcgctattcaccgtggctcaacctcccgttacaacttcaaagggcatagaaagagacagtggggcttccatgtctcaagtagggatgggaggtgtcaacagtacattggaaatgaaacttactgacgagagtgaggaatctagttccgctaacaatgcaacaacaaccacaaccacttcccatattctgtcgaattctagaaaatccatacagagttttgaaaactataacgtggtggaagaacgcataaaactagcccaacaaagcaagaagccattttgtaatggtgaaaaactctggagacgaagaagacagctttggacacaacacaatgaacaagaaggaagcactggcgacgatggagctgctcacagggaagtctttcaagccatacctgaagaatactatgctcgtatttataagaaattggtcgtagatgacaagcctttaagagagccactaaacctggaagacgctttacaagtaattaatacaggctggacggaaacaaggaaatgggctaatgctgccaaaggcatgccgtaa

SEQ ID NO: 4821 - DNA, 324 bp, Saccharomyces pastorianus
atgtcaaacaggaccgaagagctggaccgattacttgacaatatagtcaactcaccaaatggaacagaagcttcgaagacgttagaagagattgaaaataatcaatcatatatattagacatacaattaaagaatttactgcgacttcacgatgactcgtttaagaacaaatgtgtgttacctgctaatgacatgttagagaggtataccccgtatctggggcgcgctgaagttttacaaaaagaggcagaacttgtggatagggatctccgaatcattgagatggcttaccaactcataaagaagaaccgtgagttgaaataa

SEQ ID NO: 4822 - DNA, 1737 bp, Saccharomyces pastorianus
atggagtactggcactatgtggaaacaacgtcttcgggccaacctctacttcgagaaaacgaaacagatatttttatcgaccagtctgtaggcctttaccatggcaagtcaaagatcttgcagagacagcggggcagagttttcttaacgtcacaaagagtcatatacatcgatgattctaagcccactcaaaattcgctaggcttggagttggacgacctcgcgcatgttgattattcgtctggctttttgaccagatcgcctcgtttgattttgttcttcaaggactcctccagtaaagacgccctggagaaacgcgcggatgcaatgtgtagcaatgtcgtttccacgtgggtctgccccatttgtatggtctcgaacgaaacacggggggaatttgctaaggacactctacctttacccatttgtgtcaattgtggcgtgccagcagattacgaactaaccaggtcttcaataaactcttccaatacaacaaacacaacgtccagtgatcaatctgggtcggactctgacaaaaatgtttgttccgcttgcacttttgttaatcatcctcaaataggtaattgcgaaatttgcggccacaggctacctaacgcatccaaggtacgatcaaaattgaacaaattgagaagctttcatgattctaggatccatatcgagttagaaaaacactcactgagtaaaagtaaaagctcacattcggcatcgtcagctgcgccgtcgtcgtcgtcatcaacagcaacacctacagaattcgtacagttaagcttccgtaagtccgatggtgttttgttctcgcaagccactgaaaaggctttggaaggcatacttcatgaaaaaaataagcacatctttaatcaaaacgtagtgtctgttaatggtatagatgtgacggagacggccaacggccacgattgtgataatgatgttctatttgtagagactaagctgagtaggatcggcatagcgagtctggaaaagtccagagaaaaccagctcttgaataacgatattcttttcaacaacgcattgaccgatctgaataaactgatgtcattggccaccagcatcgaaagattatacaaaaacagcaacatagcgatgaaaaagacgacaacaaacttccaggacgaatcaacaattaatgaaccgaaagccaaaagaccgctattgattcttgatagagacaaattcctgaataaagagttgttcttggatgaaatcgcgagggaaatttacgagttcacgttatcggagtttaaagactcaaacaacgacaacaacaatacgaactacatgattgtaaccttggtagatctatatgcaatgtacaataaatccatgcgtataggtactggccttatatcccccatggaaatgaaggaagcttgcgagcggtttgaacatctaggtttaaacgaattgagattagtaaaagttaacaaaagaattctgtgcctgacaagcgaaaagttcgacgtcgtcaaggaaaaactagtggatttgataaatgaaaaccctggttctgatcttttaaaattaacacaaatcttgagttctaataattcacagtcaaactggactttgggtatccttatggaagtcttacaaagttgtgttgacgagggtgacctactgatagacaaacaattgagtggcatttactattataaaaactcttattggccccctcacactcaaataatgaacgcataa

SEQ ID NO: 4823 - DNA, 501 bp, Saccharomyces pastorianus
atggaacgagacgatcttgtcaaactattcgcaatcaacgcattggcgcccgtccgttttgttcaagaactggcaccaagcaaacactctacgagacagtgttatattgtcaacatcgcaagtactctggggatactaacgccggccaaagtagcaggctatgcagcaagcaaagcggccttgatagccttccaccaatcgtacagctttgaattacaaaacgaaggcgtaacgaatatcaggacactattagtgacaccaggccaactgaacacagcgatgtttggaggattcgacccaccgcatcaattctttgcccctgtggtagacgtgaaccatctggccgccaaaatagttagttgctgcgatctgggccgcagggggcagctcaatgagcccttttattgtagttttgcccatctcttgatgtgcataccttactcgctacaacatatcataagaagcatctctcgcatggatcgttgtcttccggatgagtag

SEQ ID NO: 4824 - DNA, 618 bp, Saccharomyces pastorianus
atgagcacgcaatatatcgatgaaacagcatttgtacaagctgaagaaggtagaaataatttaatgttccctgatgaaaagcaacaggctcgttttgaacttggcgtctccatgatgatttacagatgggatgctttggatgttgccgttgaaaataactggggtggcccggactcttctgagaaaagggattggattacaggtgttgtagtagatcttttcaagtctgaaaaagtaattgacgtcgcttcaatagaagagacattgctgtatgctatggttgatgaatttgaaaccaacgtcgaagatgactcggctttaccaattgccatggagatcatcaacatatacaatgactgttttaatgtaaattataacaaagtggagcagttatacttagagtgggaagagaagcaaaagacaaagaaagcaaaaagagtcattcacgttgaaggcgatgatgatgatgacaatgacgatcaagacgacgatgacaacgaagatgaagatgaagagatggaagaagctatgcctgatttggtatcaactaaaccggaacccgttgtagatgatgatggttttgaactggttcaacccaagggaagaagaagacattag

SEQ ID NO: 4825 - DNA, 3117 bp, Saccharomyces pastorianus
atgtcgctttcattgaagacgataatacatctggtaaagccatttgcttgcacggctaagtttagtgcgaggtatccaattcatgttattgtcatcgctgttttattaagcgccgctgcctacttatctgtaacgcagtcttatcttaatgagtggaaactggattctaatcagtattccacgtatttaaccatcaagccagacgagctgtttgatagatgtacacactactacagatcacctgtatccgacacatggaaattgctcagctctaaagaagccgccgatatttataccccttttcattattatttatctaccataagtttccaaagcaaggacaactctacggcattaccttcccttgaagatgtcatctatagtgctgatcatacacgatatgtgttgagtgaagaaccaaagatcccaactgaactaacacctgaaggcggaacgaaatggaggttgagaagtaacagtaatttaattctggatctgcataatacctataggaacctcgtcaaggaattttcgaataagaccagcgagtttgaccaatttgatttgtttattatccttgctgcatatcttacccttttctatactctctgttgccttttcaatgacatgaggaaaattggatccaaattctggctgagcttttctgctttatcaaattccgcatgtgcattatatctgtcattatacaccacacagactctattaaagaaaccagcgtctttattaagtcttatcgtcggcttaccgtttattgtggtaattattggcttcaagcataaagttaggcttgcaacattatctttgcacaagttccacagaattagtatcgataaaaaagtaacggtgagtaatattatttatgaagctatgtttcaagaaggtacctttttgatccgtgattacttattttatattagctcgtttgtcggttgcgctatttatgctagacatcttactggattggttaatttttgcatattagccacttttatgttgatttttgatttgattttgtcagctactttctactcagctatattatcgatgaaactggaaattaacattattcacagatcgaccctcattagacaaacattggaagaagacagcgtttttccaacaaccgccgacatcatatacaaggacgaaactgcggcagagccaaattttctaagatccaacgtagctatactcataggaaaagcatctgttatcggccttctacttttgattaacctctatgtgtttacagacaagcttaacgacaccatattgaactccgtgaattttgactccacgatctattcattaccaaattttatcaattataaagatattgggaatctaagtaatcaagtaatcatttctgttctgccaaaacaatattacactccattgaaaaagtaccaccaaatagaagattccatcctgctggttattgaatctgttagtaatgctattcgggaccagtttattagcaagttactgttttttgcgtttgcagttagtatttctattaacatttatttattgaatgccgcaaaaattcataccggatacatgaattttgagccgcagtccaaaaaagaaggtgataacctcagaccaaaatcagcaacgattgaattctcggatacttatagtacacctgcttcttctgacccagaagccccagtaaccgataaaaatatctcaattacacaagaaattcaaaacaacgaatgcatctatgctttaagttcccaagacgagcctatccgtcctttatcgaatttagtagaacttatggacgatgaacaattgaaaactttgaataatacagagttgtcggatcttgtagtgaatggtagacttccattgtacgctctagaaaaaaaactagatgacactactcgtgcagttctggttagaagaaaggcactttctgttttggctgaatcaccagttctagtttcagaaaaactgcctttccgaaatttcgattacgatcgcgtatttggtgcttgttgtgaaaatgttattggctatatgccacttccagtcggtgtaattggtccgttaattatcgatggtgcatcctaccatattccaatggctaccaccgaaggttgcttggtggcatcagccatgcgtggttgtaaagctatcaatgccggtggtggtgcaacaactgtcctaaccaaggacggtatgaccagaggccctgtagttcgttttcctacgttgataaggtctggtgcctgcaagatatggttggattcagaagagggacaaaacatcataaagaaggcattcaattctacgtcaagatttgcacgtttgcaacacattcaaacctgtttagcaggtgatttgctcttcatgagatttagaactactacaggtgacgcaatgggtatgaatatgatatcaaaaggtgtcgaatactcactgaagcaaatggtggaagagtacggctgggatgatatggaagtcgtttctgtatccggtaattattgtacggataagaaaccagccgcaatcaactggattgaaggccgtggtaaaagtgttgttgctgaagccaccattcccggtgatgttgtcagaagcgttttgaagagcgatgttgccgcattagttgagttgaacatcgctaaaaacttggtcggatctgcaatggctggatctgttggtggcttcaatgcgcatgctgctaacttagttactgcacttttcttagctttaggccaagatccagcgcagaatgtagagagctccaactgtataacattgatgaaggaagtagacggaaatttgagaatatctgtctctatgccctcgattgaggttggtacaattggtgggggtaccgttttggaaccacagggcgctatgcttgatctcttaggggttcgtggccctcatcccactgaacctggagcaaatgctaggcaattagctagaatcatcgcatgtgcagtgttggctggagaactatctctgtgttctgcacttgctgctggtcatttggtacaaagccatatgacacacaatcgtaaaacagacaaaaccaatgaacaacaacaaacaagtaacaaaaacccttccttgtaa

SEQ ID NO: 4826 - DNA, 312 bp, Saccharomyces pastorianus
atgttgattgcctgtggtgctatcagtgcctataacgatccatcaaaatttgtgtttaaaagttacggctttgttctaaccaagagattggttatcaaaggggttttagtaacggattatgtggatgagtttccagaagcattgaaaaaactaagtgttttcgtaaaaaacggccagatcggcttggagaattctgccactcttgaagatggtagcgctgataattttaagaatgttcccttgatatggaagggtttatttagcggtgctaataagggtaaacttattaccgaagttattaaaaacgactag

SEQ ID NO: 4827 - DNA, 438 bp, Saccharomyces pastorianus
atggtcttggctaagcaatgggttctaaaaaatttaccggctcctggtatgccattcaattttaattttactgatcctgaatgcactttcgaactaactgagaaagaactctctccagaacaactaaagagcggtgaaatactattagaaatacattacttgtctaatgatcctgctcaaaaattttggatttcctcgatggataaaaattatgcaaaaggtgtccaacctggtgaaattatccctgcaagagggatagctaaggtcttggcttctaaaaacgaaaagtttgctcctggtgattatgtctctgcaaaaactggttggactacccacgttatagttcctcaatcggatattagagaagcaagaaagttgataaagatagggtgggaaaattgtggtggtatttatcagtcttgggtggtacttcattaa

SEQ ID NO: 4828 - DNA, 261 bp, Saccharomyces pastorianus
atgcaactacaggacaagaacaacagagaggaagaaccacgaagaatcatgtctaaatatgcttggtataccagagtcacagatacgctacatcgtctaacggtgctgacgctagttggtggtacgttatacatgtccggtggcttagcttacactttatacatgaatggtaagaagtatgaacaacaagtgacccagcaaaaggcactagaggaggacaaccagcagttacaaagccccactgcctctcctgtcgaataa

SEQ ID NO: 4829 - DNA, 1386 bp, Saccharomyces pastorianus
atgactgaactaaagaaacaaaagactactgaacaaaaagccagaccacaaaacgtcgggatcaagggtattcaaatctacatcccaacccaatgcgttaaccaatccgagctggaaaagtttgacggcgtttctcaaggtaaatacacaatcggtctaggccaaaccaatatgtcttttgtcaatgacagagaagatatctactctatgtccctaactgtcttgtcgaagttgatcaagagttacaacatcgacaccaacaagattggtagattagaagttggtacagaaactttaatcgacaagtctaagtctgtgaaatctgtcttgatgcaattgatgggcgacaacaccgacgtcgaaggtattgacaccctaaatgcctgttacggtggtaccaacgcactattcaattctttgaactggatcgaatctaatgcttgggatggtagagacgccatcgtcgtttgcggtgacatcgccatctatgataaaggtgccgcaagaccaaccggtggtgctggtactgttgctatgtggatcggtccagatgccccaattgtatttgactccgtgagagcttcctacatggaacacgcttacgatttctacaagccagatttcaccagtgaatacccttacgtggatggccatttctcattgaactgttacgtcaaggccctagaccaagtttacaagagttattccaagaaggctatttctaaagggttggttagcgatcccgctggttcggatgctttgaacgttttgaaatacttcgattacaacgttttccacgtgccaacctgtaaactagtcaccaaatcatacggtagattactatataatgatttcagagctaaccctgcattattcccagaagttgacgctgaattagccaagcacgattacgaagaatcactaaccgacaagaacattgaaaagacctttgtcaatgttgctaagccataccacaaggaaagagtcgcccaatctttgattgttccaacaaacacaggtaacatgtacaccgcatccgtatatgctgcctttgcatctctattaaactacgtcggctctgacgacttacaaggaaagcgtgtcggtctattctcttacggttccggtttggctgcttctctatattcctgtaagattgttggtgacgtccaacacattatcaaggaaatggatgttactaacaaattgggcaagagaatctctgaaactccagtggattatgaagctgctattggactaagagaaaacgctcatttaaagaaggatttcaaacctcaaggttccattgagcacttgcaatctggcgtttactacttgaccaacatcgatgacaaattcagaagatcttacgatgttaaaaactga

SEQ ID NO: 4830 - DNA, 963 bp, Saccharomyces pastorianus
atggccgaccaatgtgatgggttgcaagggttcctgttcacacattccctcggtggtggtaccggttcagggttgggttctctcctactagaaaacttatcgtatgagtacggtaaaaaatctaaattggaattcgctgtctacccagcaccccagttatccacgtccgtcgtggaaccttataacaccgttttaacaacacataccactttggaacatgctgattgtacctttatggtcgataacgaagctatttacgatatctgtaagagaaacctgggaatttccagaccaagttttgacaacttgaatgggttaattgctcaagtggtgtcatctgtaacagcgtccttaaggttcgatggttcgttgaacgtcgatttgaacgaattccaaaccaacttggtcccatatcccagaattcatttcccattggtgtcatacgctcctatcttgtccaataagagagccacccatgagtccaattccgtgtcagagatcacaaacgcttgttttgaacccggtaaccaaatggtcaagtgtgacccaacgaagggtaaatacatggctaactgtctactatacagaggtgacgtagtgacaagagacgtccaaagagccgtcgaacaggtgaaaaacaagaaaacagtacaaatggtggactggtgtccaacagggtttaagatcggtatctgttacgagccaccaaccgtaataccaagttctgaactggcttctgtggatagagccgtttgtatgttatcccacaccaccgccattgccgaggcttggaaaagaatcgacagaaagttcgacttgatgtatgctaagcgtgccttcgtccactggtacgtcggtgaaggtatggaggaaggtgaattcaccgaagctagagaagacctggctgctttagaaagagattatattgaagttggtgccgattcttatgccgaagagttttaa

SEQ ID NO: 4831 - DNA, 1665 bp, Saccharomyces pastorianus
atgataataggcaaagagggatgtgtcattcaaaacactgaagtgaaaaccgcagaaaatgaagaggcttatctagagattgagaataaatcagtgctagagactgaaaactcttcgccacgtaacaacaaagaaggagctttagcaacaatggttttaacggaatctgaagatgaagtaatgaagaccgaacaacaaaaatggcaaaacccaaactacttcaaatatccatggcaagagtatctcttcatcttcacttgtatgataagtcagctcctaaaccaatcaggtaccacgcaaactctttccattatgaatatacttgcagatagttttgggtcagatacaacctcaaggtcatggctgatggcatctttcccactagtctcaggttcattcattttaattagtggcagactcggtgacatatacgggttaaagaatatgctgttgataggatatgctatgattatcatatggtctttgatttgtgggctcaccaaatattctggtagcgatactttttttattatcagcagagcttttcaagggctaggaattgcatttattttaccaaacgtgctaggtattatcggaaatatctacatcggtggtacatttcgtaagaatattgtgattagtttcataggcgcgatggcgcctattggtgcaactttgggttgcttttttgcagggttgattggtactatgaacccaaaccagtggccttgggccttttatgcatacaccataacagcagccatcaatctagcactctccatatacgccattcccaataatataccaacaaatatccatcgattttctatggattggattggatctattttgggtgtaattggtcttattttattgaattttgtatggaatcaagctcctatttcaggttggacccaggcttatattattgtgcttttaatcatttctgttcttttcctcgtcgtgtttggcgtttatgagatccattttgccaaaagtccgttattgcctcaagctatcatgaaggaccgtcatatgattcaaataatgttatccttgttctttgggtggggttcatttggtatcttcacgttttattattttcaatttcagttaaatataaggcactacacggccttatgggctggaggttcttattttatgttcttgatttggggtattgttgctgctttactcgttggattttccattaaaagagtatcgccatcagtttttttgttttttgccatggttgcattcaatgttggctcgataatggccagcgttacaccagttcatgagtcgtacttccgtactcagatggggacaatgataattttgagttttggaatggatctttcattcccagcttcttccatcatcttcagtgattacttgcctatggaataccaaggtatggcgggatcattggtgaatactgttgtcaactattccatgtcattgtgtcttggtatgggtgccacagttgaaatgcagcttgacccagatgggaaacatattctgaagggttatagaggtgctcaatatctcgggataggattagccactttggcatgcataattagcgggctttacatggtcgaaagcttcataaaagatcataggacgaaagctgtcgcgaaagataattgcggcatgagctaa

SEQ ID NO: 4832 - DNA, 1005 bp, Saccharomyces pastorianus
atggatgaggacaaattagatgctagattagggtctatcagggactccttgcgaaagaagaccaaacttgcttcgagaaaagctaaggataccctagcacagcgagttattactaaatggaggtataggaagaaagcttatgacgggagctcaatactcccagaaaggtgcaaaaatcgtgtccaattgttcgacgatttagtacatgaaagctctagtgattttgctgggttccaattacatgactcgcgggccatgttggagcgaatatgtttgacccaaaattatacgagactcatgctcattgaatgggacgttcggtgggtcaatccgctaactttagcatcgaaaggttggaaaccatatcaaggacaatccagggcccaggcgatctttaagtgctgctgttgccacgccatcatgtcgatgcacttatcaaagaatgatgacagtaccgctgattacaacaggaagttgaatgaaaaaatatggcattcgaatgttatcaataatcatctagatcagtgtccgtggaaaagaaatcaattcgacgtgaacaaagaataccatttaagttcacaaacacttattatagacattgagagaatttatacagatattgagaagataacatccggattagaaatattcaatctgaaaaggaactcatcccgtatattttactatttgactgaaaagaacatgcaaaaactggccagttttttcaattgtaacgactattctcttcttggactgttgcttctcggttacacgaaattcgagaaagaggatttggtccagtgcacagcctgctttcaccgggcatctgtcaaaaggttggaacatacagattttaatggacatgctctgtggtgtcgatattacaacaaagaactgctgtccatcatgttgctggagttgattgatgagaaggacaatgcagctacaaaaatgaatgtagaggaaagactaaataaattagagattgttctacaaactttataa

SEQ ID NO: 4833 - DNA, 765 bp, Saccharomyces pastorianus
atggagttggctgagttggatccctctttgagaacgccgatagctccaaagataacgactacagtggtaagaagccaagaccaagaagaacctgcccttttcccaggcatgaatagtaatacaaatgacaaaattaacgatgaaaaagagcaactaagttttatcaatcccaaaactggtaaagttgaacgttctgaggcgatttccaaaaaagatttagaagaagttaaaagatttcagatactttacccttgctactttgacgtgaacagatcgcacaaagaaggtagacgagttcctaaggagctggcagttgagaacccgttagcaaagactatggcagatgccgttcgtgaactaggaatactatgcattttcgaaggtgaaaagtgtcacccacaagattttggtaatcctggtagaattcgtgtccttttcaaagaaaatgggcaattagttggtggagccactagatttaaaggtgggaagaggcaattgatgaaagctgttggcgaatacatgaaaagaaatccaactactattgaatgtttaagagaaattccatatggtcctgattttgataatattgaattcaggaaaatacctcgtgtaaagggtttcaagatgaacgaaatcgtcccactacacagcccgttcttaatgggtcatccgatgacaaaatctgtctacgacgctcctcaggtaactgcagcggagaaatcattcaaggcaccaaagaacaaatacaaagttgttagaagatga

SEQ ID NO: 4834 - DNA, 2616 bp, Saccharomyces pastorianus
atgaatccatctcaaaaggatcaactgagtacttgtccctcagcaaataaactgttgcaggtatttctaactcctatggactccatcgacttggccccaaatactctgatgaatattctcatttcgccattggatgccacaactaagattttgggagacaagatcttaggcaacctatattccagattgatgaataactcttttaagttatgcaaactcttgatttccatcagaggtagtaatcatgacctaaaaccaagcaacctggaaaaactgattttcatgaactcctcaaaattgatcgacgtttacactttaccaaattacgtttttttgaaagctcaaatcatagaactactaagttatttggtggaagcgccttggaatgacgaatatccgtttttgttatccttcttgggagaatctaagtcaatgaaatttttagaagaggtcctatctgatttgaattctcctgtacaaaattggggccttttacaaaatctttacattttcttcacgactttactagagagcaaacaagatgggttatcaattcttttcttaaccggccaatttgcctctaacaaaaacagtaatgatgaatcgtccatagataagaacaaatcaattttaactgttttacaaaaaaatgctctactgctagactcgatgcccgaagaggtcagttgtaaacttttggaaacaatcacatatgttttaaacacttggacaaattctaaaattttcatcaaagactgcaaattcgtggatatcttattgaacaaattgaagaactccaaaactttgtttcaaaagaaagaaaatttgactcgtgatgagactattcatcttattaagaaatacaaattagtctcgagaattgtagaaatttttgcattgtacatttataactcaaacgattcaaatgcaaaaattctaagctttttgaaccaagcagatttatttgagctagtcagtcattttttccaaattgatgggttcgataaaacgtttcatgatgatttgaatctcaaatttcaagctcaatggcctagtctggaattaaaatcatttcaaaaaattcccttgtcaaaaataaatgaaaacgagaatttcggttacgatattcaattattagatctagtattgaaaaatgaccctaattggtgcgaacctagcatcaaccagaactattttagaaaagaaatcgtcgatgcttcattaaatttacagtatgtgaattacgaaatatctactgcaaaggcttggggtgcgttaatcaccacatttgttaagaggagcccaaatccactaagtgacagctttattgacctagtggcgcatttcttacaattgaatattgaatttggttcagacaaacagctatttactcaaatatatttggaaaggattgaattggcgttttatatcttgtattctttcaagctatcagggaagtcactgaatgaaaggaaaatagttgaactattaaacaagatttttataattttcaaatctgatgaaattgattttataaagatgattggcggatctttcaaaaacaatttctatagacctctattaagatccgccctaatccttttagagttggtcactacgggtgatcattttatcgagtcagtatctgatcaattattggagttttttgaatcggtattcagcaaaggtgtttacttgatactatctaacatcttatgccagattaataagtgctctacaaggagtctaaatgcggaccatgccacacagattgccaacttggaggaaaatactcaagatttacttttattactatcgctgttcaagaaaatcacggatttgagtccttctaagaaattcaatgttatcttagcatcatctttaaatgaggtagggactttgaaagtaattttaaacttatattcaagcgcacatttggttagaattaatgatgaaccagtgcttgggcaaattactttgacttttatctctgaattgtgttcgattgaacaaattgccgatacatttatcaatagtggactgtatactgttttactggaaagcccactgtcggtggctatacagcagggagatatcaaacctgaattatcacccagactacataacatttggagcaatggtctgttgtctatcatcctattgttattgagtcaattaggcatcaaggttttacctgagacctgcctctttgtctcatattttggcaaacaaatcaaatcaacaatatacaattggggcgataacaaattagcggtatcaagctcattgataaaggaaaccaatcaattggttttgttacagaaaatgttaaacttactaaactatcaagaactgttaattgaatctaagaactctgatgataaggatagagtcgtagaactagtcattggtttagattcggattatgataagaaaagattaagtgcagcactaagcaaattcttgacgcatccaaagtatttgaattcgagaataatacccaccactctggaagagcaacagcttttggaagatgaaccaaagagactggaattcgtcaagggtataagcagagatattagaacattgcaagattcgctattcaagggcgcttga

SEQ ID NO: 4835 - DNA, 2226 bp, Saccharomyces pastorianus
atgcttataaacgtcttgaaccactcgacgaaacacaattttagcctagccatcccttgccgccgccagaagaaaaggactccaccagccatggctacacactcaattgggaatcccgctcaggaattatcctttacttacgtcgccaacttcatcaacgatgctgctgctgatgtttccgctgtggacgctagccaactggctcaaataagacagtttttgaagacgcatagggcaacgctcatccaaggtgtttcacagcctaagccggacgtagtcgcaccacgcggtgacaataaactgcgctccttaatcgcacatttactgcagataaacgtcgatgatgatccgtcgtttgctcattctgaggaccctggcctcgctgctaagctctttatatccgagaggtcgtccaaactacacatcctgtactcgcttctcgtccacccagatattgaccccgatgtacactctttctttgccaacgataagttcaacatagcggaaaggctgatctctttaatagcgtccatcatgcagacgtacgacactaccacggcgtcggtcttggagcaaggccggatcgatgatcaagacagtgtcacgttagattcactggttcaattgaagaatttctccgatttgaagcttgtgttgctaatcctacagattttaaacttgctcatccttaatacaaaagtacccgtaggaatcgtcaaccaatggtttcttcaatttcaaaatcaattcgtcgagtttatcagacacgtcggctctccggaaaaaaccatcgacacttcttcatcgcatttttataagtttcagaatttccaagacctgagttacctttcaaaaacgcttgtttccagaatatcgtccctaacaacaatcacgaccattttgatgctcgggctcaacaccgcagtagctcaatttgaccttcaatcacctttatattccgattcacgcactttcgaaaccatcaacgccgctttggaaaatgatttaacaaccagtatcgtgaacgaagatcccgttttccatcccatgatccattatgcttggtcctgcatactctaccatagactagcattgcaacaatcagaatcattggaaaatccagaaatagccaaatttgcgcaatttgccgaatcacgaaacattttccctgaattggacactttggcagaagtattatcgtttgatcccacctacactaccatcattacagtttttttggaattctctttgaacttcatccctataacagcatccacttctcatgttttcgccaagatagtttcaaaggccccaaggcaatttattgaaaatttcttgacgaatgacacttttgaagacaaactaagcatcctaaaggctaaattgccgctattaaacgaatcacttatccccttgataaatctatcattaatcgatacggaatttgccaatttcgaactgaaagatattaattcgttcgcgatctccaaaaatagcttaaacgacttggattacgatttgatagcagacataacagcatcatcttcgtcttcctcttcggatatcattatacctgatttgatagaattgaaatccgatttgctagtatcaccccctctagaaagagataattccaatagtttaatgtcaataccgaaatctacaaaggccaaaatactttccatcaaacaacaacagcaagaagataatggccagcagccacctattacttcaaacttgatcatctttctttacaaatataacggttggtctctagtgggtagaatattacaaaatctattacattcgtatacggaaaagggtacccaattggatcactcacaacatgaactgatgatatccataataaaattaattgctaatgtcgtggatccaaggacaaccttggagagatcaaatgaaatattatcaagcttgtcgagttctctagacactacaagcagcgctctaaataacgcgtcgatcattcaagtaatttttgagattttcgaaatttcactacaaaagaaggattataatttaatagtgaagtgttgcgaatttctgacaatgctcacaccaaattacccccatttggtctcttcttatttgaatagatcagaactattggataaatacgggaagacaggtctttccaatatgattcttggttcggttgaattatcaacaggcgattacaaattactattcaattgcttaaactaa

SEQ ID NO: 4836 - DNA, 207 bp, Saccharomyces pastorianus
atgttcacgaccccacgcgaaacggtgggcgggttcttggcggctacgtcgtcgcccggttgcgccgcacgcagcgccggcggctcgatcctcgcaccaaactgcgcttgggcgtcgatcgacacgtacgagcagaacccgtccgtggacgagaccagcagcgtcgagccgtctccggaccacgccaggtccgtgatcggcgagtag

SEQ ID NO: 4837 - DNA, 459 bp, Saccharomyces pastorianus
atgtatgggcgaccgagacaaaaccagaaacgcgcaaaaggatgctataaacgttgggtgctggaataccaactgtacgcacgttcacacaaacacacacacaaacacgcaaggatggacggatcaactacagtgttcatactggtcttggtgtgcattttcgtgttcaccgtgcagcgcaggaatgccaagcaggcgcccacgcccacgcgcaccgtgaaggacaccgctccgactcccacggtccttgccaccgaggagtcctcctcgccagagcctctgccagaagcgcatgccgcccagcgcgtgaacaggaaaagacccgtcaacaaggacatggtcgagatcgtgatgaccatggccccgcacgtgcagcaacagaaggtcgtgcaagacctcagggccaccgggtccatcgagcgcaccatggagaacatcttcgccggtaaactagactag

SEQ ID NO: 4838 - DNA, 1560 bp, Saccharomyces pastorianus
atgtgtggaattctattgcactattgtgcggaaaagcagccagtagacgatgaactaattgagtatccagaaggaacagaattcgccggcactacaagtatgaatgaatcttatattttcaataaaatcattccatatatagctgcaagaggtccaaattactcttctcttcgagtctccaaatcccaccaaacaagctggttctcttctgtcctatctttaagacaaccttttaccaagcagagcataaccgttgacgacagatattatctacaattcaatggtgagttgtacaataaagaaatatctgacggagacaatgatagtcaatatattgcctctttgttgcaggatttggcagaggatggggacgttattgatgttataagaatgttggaaggtgagtatgcttacactgtgtatgacgtaaagtcatcgaaattttatttcggcagagatcccattggcaggcgaagtctatcctacttggtcaattcaaacaatgaactatatgtagccagtgtgacaggagctattgaaggatttaaagattgtatagggggggttgtttacgaatatgacacccaagctaaattgttaaaggaaaaccagaagttacgtcctccatacgaagtgacacaaacggctgatttagaattaaagtcattaccagaaatatctaaaaatttatactctgtgctatatgaatctgtaaagaggagggtagagtcaatacatcctgcacatatagaaaactcacctattgcaatactcttttctggtggtatcgactgctcagtgatagcagcgttggtatgtcaaatattgaaggagaatgactataaaggtgggaaaccaattgtagagctattaaatgtgtcgttcgagaaccctagaacaggtctttcccccagtgatacagctgacagaaagctttccactaatagtacaaaagtattacgaagtttatatccggaaatcgatattaagctagtcgaagtagacgttccttatgaggaatatttgaagtggagaccctttgttatcgatttaatgtattctaaacaaacagagatggacttgtctatcgctattgcgtttttctttgcctcaaagggtaaaggcttccttagttcgcctcatggtgaaagaaaaccgtaccaacgtcaggggatagtcttgttcagcgggttgggagcagatgagctatacggtggttatcacaaatttgcgaataagccgcctcatgaactcgtggaggaactaacgagacagataaacaatatctatgagcgcaacttgaaccgcgatgataaagtgattgctcataacggggtggaggttagatacccctttttggatgaacatgttattgagttttccaccaatgatatccccattaattacaagataaacaaacttattcttcggaaagtggcttctcaatacttaaaactggacgagatagcagaagagccaaagagagctattcaatttggcgccaagagtgctaaaatgactaaagatggtaacaaacacggcacggatctattgaagtaa

SEQ ID NO: 4839 - DNA, 375 bp, Saccharomyces pastorianus
atggccaagggcaagtttgtagaatgcattgatgacatcaaaacagtttcccagccagaaaatgaaggacaaaagctactggttcctgcatctgcatcattatacatcccaggtaaaattgtggataataagaaattcatggtagacatcggaaccggatattatgttgaaaaaagcgccaatgcagcaattttgttctaccaaaagaaagtggaaaagcttaacaaggaatctgtgcaaattcaagatatcataaaggaaaagacccaatactctttgaccatcgaggcccagataagacaggctgctatcagacagcatgaagcgatgagcaagcagcaacaacagcagcagaaggatgctaccacagcctag

SEQ ID NO: 4840 - DNA, 330 bp, Saccharomyces pastorianus
atacgccaagctggccaatcggccgtcgatccttctggttcttacttcccttggaaagctaccgctataggaaaaggttcggtggctgcaaagacctttttggagaaaagatggaatgatgaattggaactcgaggatgctattcacatcgccttactaacactaaaggaatcagtagagggcgaattcaatggtgacaccatagaattagccataatcggtgatgaaaacccagagttactaggctacactggtattccaactgacaaaggtcctagattcagaaaattgacttcacaagaaataaatgatagattagaagctttatga

SEQ ID NO: 4841 - DNA, 735 bp, Saccharomyces pastorianus
atggtcgataacgaagccatctatgatatgtgcaaaagaaacttggatattccaaggccaagtttttcaaacttgaataacttgattgctcaagtggtctcatctgtgacagcgtctttaagatttgacggttcactaaatgtggatttgaatgaattccaaaccaacttggttccatatccaagaattcattttcccctagtttcatattctccagtcttaaccaagtcaaaggcattccacgaatccaattccgtctcagagattacaaacgcttgtttcgaacccggtaaccaaatggtcaaatgtgatcctagagatggtaaatatatggccacctgtctattatacagaggtgacgtggtaacaagagatgtccaaagagctgtcgaacaggtgaaaaacaagaagactgttcaactagtcgattggtgcccaactggtttcaagatcggtatttgctacgaacctccaactgctacgccaaactcccaattggcttctgtggatagagccgtatgtatgctatcaaacactacatccattgctgaggcttggaaaagaatcgacagaaagttcgacttgatgtatgctaagcgtgccttcgtccactggtacgtcggtgaaggtatggaggaaggtgaattcaccgaagctagagaagacttggctgctttagaaagagattatatcgaagtgggtgctgactcctatgccgaagaagaagaattctag

SEQ ID NO: 4842 - DNA, 1281 bp, Saccharomyces pastorianus
atgaaggcaaaaccaggtatagactcgatggactacctacatgtatataacaacaaccacggtcatgtccccagaacacccactggccaaccatgcctgtcgcctgttctccccccaataaaattggcgctagatcaacagcactcacagacgttcgggtatgctagcccccggtgcttgcccacacccatattgccctctatgagcatgaatgcggccgtcggttggtcacagcaggtcctcaccattcctgtccccatacgaagcagcacgcgaatgattcctatgatcacgccgatcgcttccccaagatcacgattcgaagtgacgaccccttcgccctcgctagccactgtcgccataaagctgccagatttgaaactgccaccttcgcctgtgcttgctacagcaaacagtgcgccaccgcagcccgttctacccaagattgtggttggaactagcaacagtgccgctgaaaggacaaacaatgaagaactggtcagaggaatacccgactacatcgactgtgcaataaccaggacacaattgagtaaggccagatctggtaaacaactaattgcatgcgcacaggcgtaccaccacccggtgaacgaaaatgagatagaaaacatcaataacatcctgaactttagagatttcatttttaaacaccccaaatcctccttcgagtcgctgtgtatcctatctttcgagcagttcgttagagtgtatgcattcatcaatttcatttataaaacgaaaaaaatcaataaaaacaagtatgaattcacttgcgagatgaatgttcacgagcaactcagtaataagcgcatccaaaggacgaggacccccgagaaatacaagatacacttgatttgtgaatctaaactcatattatccttcaaccatagcaccaagacggtcaaattcgaatccgtcaacggtggacattgccatcccatctcaaccaatcacgttatcaagccatcgctattcctgatgcactgcattaaacagtgtcatcagacggtaactgaccctacgcatctgaaactagcactgagagacgctttgaaatccctcgatcatgaaagaataggaataccgtatctgaagaaaagacaccttaaacagttgcaccaagcaacatcattatctaacgcttgcaccacgcccaaaaaacaagaagaccataccacactaagcatgcacacagggatcatccctacaggcaactttttcatgttcaatgcatccagtgatatatttcaaaggaactaa

SEQ ID NO: 4843 - DNA, 1101 bp, Saccharomyces pastorianus
atgccattgcctgttggtgttatcggtccattggtcattgatggtacatcttatcacattccaatggctactacagaaggttgtttggtggcctccgctatgcgtggttgtaaggcaattaacgccggtggcggtgcaacaaccgttttaactaaggatggtatgacaagaggtcctgtggttcgtttccctactttgataagatcaggtgcttgcaaaatttggattgattctgaagaaggtcaaaatactattaagaaggcattcaactccacatccaggtttgcacgtttgcaacatgtacaaacttgtttggcaggtgatttacttttcattagattcagaactactactggtgatgcgatgggtatgaatatgatatccaaaggtgttgaatattctttaaagctaatggtagaagaatacggctggggtgatatggaaattgtttcagtttctggtaattattgtaccgataaaaaaccagctgcaattaactggattgaaggccgtggtaagagtgttgttgccgaagctactattcctggcgatatcgtcagaaaggtattaaagagtgatgttgccgcattagttgaattgaacatagccaagaacttggttggttccgcaatggctggatctgtcggtgggtttaacgcacacgcagccaacttagtgacggctgttttcttggcattgggacaagatcccgcacaaaatgttgaaagttccaactgtataacattaatgaaggaagtggacggtgatttaagaatttctgtatccatgccatccatcgaagtcggaaccattggtggtggtaccgttttagaaccacaaggtgccatgctagacctattgggtgtaagaggccctcatgctaccgctcccggcaccaatgctcgtcaattagcaagaattgtcgcatgtgccgtcctggctggtgaactatccttatgtgctgccctagcggctggccatttagtgcagagtcatatggcgcacaacaggaaacccgcccagccagcaaaacctaataatttggatgccactgacatcaatcgtttgaaagatgggtccgttacctgcattaaatcctaa

SEQ ID NO: 4844 - DNA, 990 bp, Saccharomyces pastorianus
atggacgaagaatcccctgctgaagaagaagaagaagaagaagaaaaaactgaaaagaagaagaagaacaagggcaagaaagttgaaagcgagagtgaaagtgaaagtgacgaagacgatgaagatgatgacgaagacgacgagttccaagaatctgttcttttaactttgtctccagaaggccaatgccaacaatcattggacctaaccattgctccagaagaagaagtccaattcattgtgactggttcttacgctatctctttgagtggtaactatgtcaagcatccctttgacaccccaatgggtgttgacgatgatgacgaagacgaagaagatatttacgatagtgatgaatatgacttgacaccagacgaagacgaaattatcagtgacaacttggatgatttggacgacgaggaggaagaagaagttcgtattgaagaagtcgaagaagaagaagaagaagaagaagaggaagaacctaaaccagagccaaagaaaactaaaaaggaaaagaagagaaagcacgacgaaaaggaagaagaaaagaaagccaagaaagtaaaaaaggttgagttcaaaaaggatttagaagaaggtccaacaaaaccaaaaagcaaaaaggagcaagacaacaagcaaaagccaaagaccaaggtcttggaaggcggtattgtcatcgaagaccgtgccatgggtgacggcccacaagctaagagaggtgtcagagtaggcatgagatatattggtaagctgaagaatggtaaggttttcgacaaaaacaccagtggtaaaccattcgctttcaagctcggccgtggtgaagtcatcaaaggttgggacatcggtgttgctggcatgtgcgtcggtagcgaacgtagaatcgtcatcccagccccatacgcctacggtagccaagccttaccaggcattcctgcaaactctgaactaacattcgatgtcaaattggtttccttgaagaactag

SEQ ID NO: 4845 - DNA, 183 bp, Saccharomyces pastorianus
atgaccgacatgctaccattagctacctacaacttgaacgttgaaccttacactccggttccagccatcgatgtaacgatgcccattaccatccgtatcaccatggctgctttaaatcctgaagccatcgatgaagacaataaaccgtcgactctaagattatcaagagaagacctgcagcat

SEQ ID NO: 4846 - DNA, 834 bp, Saccharomyces pastorianus
atgacatcctttaacggtaacggcttcagtataacattattgaatgcaactaaggcaacaaaagcattacaatcggaatttcaagaagtcaagtcagtattggatttgttgaacgcctatacagacgcaccaggctggccaatttctgatttcgaaaatactcctgcaccatctgtcaacgaggatctgttacataacgaagttacagcaaaggcggttggtacctacgactttgacacctttgccaagtggatgaagagtggtgctaaacaagttatcgagagcgaaccacacatcacggaattagacaaccaagttggtgatggtgactgtggttacaccttagtggctggtgttaaaggcatcactgacaacctagacaagttatcaaaggatgcgttgtctcaagccgttgcccaaatctcagacttcattgaaggctcaatgggtggtacttccggtggcctctactctatcctgttgtctggtttttcgcacgggttgatccaagtctgcaagtcaaaggacgaacctgtcactaaggatatcgtggccaaatcgcttgagattgcacttgacactctatataaatatacaaaggcaagaaagggctcatccaccatgattgatgctttggaaccgttcatcaaggaattcaccgcatccaaggatttcggcaaggccgttcaagccgccgaagaaggcgctaagtctactgcaacattcgaagccaaattcggtagagcctcgtatgtcggcgactcctctaaagtggaagatcctggcgcagttggtttatgtgagttcttaaagggggttcagagtgccttctaa

SEQ ID NO: 4847 - DNA, 789 bp, Saccharomyces pastorianus
atggatagaaagcttgtatcggaggagctgcagttggaagacatgccctttttcattccttatgacacgaaagttaatgattttaatgaaatcattacacccgaattggatgaaattctgggtgaagctatcccagcagaattcagagaaaaactagataccagagcattctttgatgaaaatgatcctatgaatgcacatcttccagaattcaatggctgtcacatattcggatccgtcccagtgaatagggttagtggcgaacttcagattacagcaaagggtttaggttatttggattcacgtaaagcgccactggaagatttgaactttgctcacgtcatcaacgagttgtcgtatggtgacttctacccatatatcgataatccattggacaacactgcccagttcaacaaggatgaacccttaactgcttatgtctattacacatccgttgttccaacacttttccaaaaattaggggcagaggtagatacaaaccaatattccgttaacgattaccgttactcgagtaaagatggtaatactaaaagggtgctgggcatttttttcaagtacaattttgagccattgtccattgttgtttccgatgttcgtttaagcttcgtacagtttttagtcagattagtggcgatatgttcgtttttggtctactgtgcctcatggattttcacgtttctggacatggctctaatcaccgttatgggacccaaatggtcattgcgctatcaaccagatgctaaatctaagggtattttagataggtag

SEQ ID NO: 4848 - DNA, 345 bp, Saccharomyces pastorianus
atggcggagatgaacagaatacagtctatggatgaaaaagaggaaagcggccatgaatatgatgaccaggacgatgaagaaaatgaagatgagggtgaaggtgatatggaaatggacgttgaggagtcaaaagaagatacagaagttggtggggaaagtagccaacaagaagaaaacgatcgtcagagcattggtgaagaaacgacacgaggtaccgaagactttatagaagaccaagatacgatcagtgaagcggtggaggcaggaaacgaccagctggctgagaaacgtggcggtagtggaagtgattacagtgcgtcttcgtctgtcgaagaagcaaaatga

SEQ ID NO: 4849 - DNA, 843 bp, Saccharomyces pastorianus
atgcctctatctgaaaagcaaatcgacgaagtcaagaccaaagtttattatagtgaagtagacactccctttaacaaatatttagatattctaggaaacgcaactaaattgacagagagcattataaatggtagattatccaatgatgaaagtaaagctgaggctctgactaaagagaatatttcaaaattaaaagaaagtgcacagcttcgatttttgggcctgcaatcctcaatcgatacaaagaaagcagcagatgaaaattgggaaacatgtcaacaagataccctggccaaattggaaaacttaggagccaaattgcctgaattaaagagtatccatagcaggctgcttctacgtattggaaaattgcaaggtcttcacgattccgtaaaagtaatcaacagagaggtggaaggtttatcagaagggcgtacaagtctcgttgtaacacgctcagaatgggagaaagagcttggtggtgatttggttaagtttttaataaaaaagaattacttgaaactggttgattcggaactagaagggggcggtacagaagagagatatcgtgtttatgatgatttctctaaaggcccaaaagaattagaaagtatcaacacttccatgaagttggatatagataaagtgaaacaagaagtgtcatcctataaggagaagtggctaagggatgcagaaatatttggaaagattacatcaatttttaaggaagaacttttgaaaagagatggcttacccaagagggagcaggagaaaataatgatgacgatatatccgataagagtagaaaggaagaagattcaaggcaggatcgatgcggaataa

SEQ ID NO: 4850 - DNA, 123 bp, Saccharomyces pastorianus
atgttacaaaggcatagcagaaagagatttcaaccgaaaacagactcaaacgataatcgagctcgttcattggtggccgacaaacgtaatcaccaagacacagaggaccacgttctagaataa

SEQ ID NO: 4851 - DNA, 2064 bp, Saccharomyces pastorianus
atgcccaggtggacaaggcccatattgaatcacattttaccgaggaggccattcatccgcagtttcaacagcttccttttactcgaaaacacatctcactctaggctatcgttttccatgagcagtcgaggctttagatctaataactttattcatgcacaactgaagcatccatccatactttcaaaagaggatttagatctgctttctgattcagacgattgggaagaacccgagtgcatacagctagaaactaagcagccagataaaaacaatcctatcataataaatgatgatattctagcagtaaaaaaacccatgatggataagaatgtcatgaattttatcaacaaggacaatttctcgtcttggaatgatatacccaaacctagtatagctaagccacaacaactggctcctgagaactcatttgaacagagcagtcaaaaaaagtcagagtcgaaaggcttcaagaacccgttaagaccaacgttgaaaaaggaaccttcctttgaggaatttcagaatagttttttatcccaagagagaagtctggaaatgataaacgaaaacgaaaagaaaaaaatgcagtttgggcaaaaaattgctgttttaactcaaaggccaagctttactgagctgcagaacgaccaggaagatagtaactcgaatttttccaataatgtgaagattaagataccgatttgtttaagcaaagaacaagaaagtattatcaagttagccgaaaacgggcacaacattttttatacaggtagtgctggtacaggtaaatccattcttttgcgtgaaatgattaaaattttgaaaggcctctatgggagagaaaatgtggcggtcactgcatccacaggattggccgcctgcaacattggtggtataactatacattcgtttgctgggatagggttaggtaaaggtgacgcagataaactttataaaaaagttcgtcgatctagaaagcacttgaggcgttgggaaaatattggcgccttagttgtcgatgaaatatcgatgttagacgcggaacttttggataaactagacttcatcgccagaaaaatacggaagaaccatcagcccttcggtggcattcaacttatcttttgtggagatttcttccagttaccacccgtatccaaagatcctaatagaccaaccaagtttgcttttgagtctaaggcctggaaggaaggtgtcaaaatgacgatcatgctgcaaaaggttttcagacagcgtggagatgtaaagtttattgacatgttgaatcggatgagactaggtaatattgatgatgaaacagaacgagagttcaaaaaactttcaaggccattgccagatgatgaaattattccagcggaactttatagtactaggatggaagtcgaaagggctaacaactctagattgagtaaactaccaggtcgcgtacatgtgttcaatgccatcgatggtggtgctttggaggacgaagaactaaaggaaagattgttacagaatttcctagccccaaaggaattgcatttaaaagtaggcgcccaagttatgatggtgaaaaatgtggacgccactttagttaatggatcccttggcaaagttattgaatttatggatccagaaacatacttttgttatgatgcactaacaaatgacccatctatgccctcggataaattagagacatgggttgaaaacccatcaaaaataaaagcagcaatggaaaaggaacagaatgatatggaagaaagtgcagtagctagtcgaaaatcttcggtaaaagagggttttgctaaaagctctacagacgaacgtgtctctccattagattcctcggtttttgattttatgaaaagagttaaaacagatgacgaagctgtattagtgaatataaaacggaaggagcagcttatgcaaatgatacaccaaaattctgcgggaaaacggagattgcctttagtgagattcaaagcttctgatatgagcaccagaatggtacttgttgaaccagaagactgggccatagaagatgaaaatgagaagccgtag

SEQ ID NO: 4852 - DNA, 975 bp, Saccharomyces pastorianus
atgtgcgatcttctgtgggcagatcccatcgaagagtacgacgaagtcacggataaagacttgaccgaggaggacattgtcaactctaagacgatggtccctcacaacggtaaaatggccccatcgcgcgacatgtttgtcccgaactccgtaagaggctgttcgtatgccttcacttatcgtgctgcatgccatttcctgcaagaaactggcctactctcaatcatcagggcacacgaagcccaagacgccggttatagaatgtacaaaaacactaagactttgggctttccctctcttttgactcttttcagtgctccgaactatttagacacctacaacaataaagccgctatactgaaatatgaaaacaacgttatgaacatcaggcaattcaacatgaccccacacccttattggttaccagatttcatggacgtgttcacgtggtccttgccctttgtgggtgaaaaagtcaccgagatgctggtagcaatcttgaacatctgtactgaagacgaactagaagtagagacccccctaattgaagaactggttggcactgataagaaattgccccaggtaagccaaccaaaggaggccccgaaggccgccacgtcgactccgcgcaaatatacctccatcctggatgatgaacatcgaaggaaaaccttaagaaataagatcttggcggttgccaaagtctctaggatgtattctgtcctaagagaggaaaacaacaaagtccaatttttgaaagatcacaattccggggtattgccacgcggcgccctgtctaatggtatagaaggtctggacgaagctctatccacttttgaaagagcaagaaagaaagacttaattaatgaaaaattaccgccttcattagatgaagtgaaaaatgaaaaaaaaaaatattatgaaaaagtttgggaaaaagtacaagaacatgatgcaagtaaagaaggtaaataa

SEQ ID NO: 4853 - DNA, 552 bp, Saccharomyces pastorianus
atgtcttcagacgccataagaaacactgagcagataaatgctgctatcaagattatagaaaataaagcagaacacccggaatcgttcgcgactgccgtagattccaagctcgcttctgctgctgctgctgcttctgctgctgctgccaccgttgcttcttcttccacgcagcccacgagagacctcacacagtataccctcgataacggaaggaccgtggcgacgaaccatagaatcatgagcaaggtgcccgccatcacgtcccatatcccgacggatgaagagctgttccagcccaacgggttgcctcgtcacgaattcttaagagaccatttcaagcgcgaaggaaaactgtctttggcgcaggcggccaagatcatcaccctcgctaccgaactcttgagcaaagaaccaaaccttatatccgtcccggctccgatcactgtctgcggtgacatccatggccagtacttcgatcttctgaagctgttcgaggtgggcggcgacccggccaccacctcgtatctgttcttgggtgattacgtcgtatag

SEQ ID NO: 4854 - DNA, 1023 bp, Saccharomyces pastorianus
atgaccaaaaacccagtcactggtgttaagggtattactttagccgaaggtaatgaaatcttgaaacaaaccaaaaaaggtaagttgttgatcgttgacgaaaataataacttagtttccatgttgtcaagagcagatttgatgaagaaccaaaactacccattggcttccaagtctgccaccacaaagcaattgctatgtggtgcttctattggtactatggatgctgataaggaaagattaacagcactggtcgaagctggtttggatgttgttgtcgtggattcatctcaaggtaactccattttccaattgaacatgatcaaatggatcaaagagacttacccaagtttggaaatcgttgctggtaatgttgtcactagagaacaggccgccaacttgattgctgctggtgctgatggtttgagaatcggtatgggtaccggttccatttgtatcactcaagaagtgatggcctgtggtagaccacaaggtacagctgtttacaacgttagtcaattcgctaacgaattcggcgttccatgtatggccgatggtggtgtccaaaacattggtcacatcatcaaggctttggctcttggtgcttccactgttatgatgggtggtatgttagctggtactactgaatcaccaggtgaatatttttacaaagatggcaaaagattaaaggcttaccgtggtatgggttccattgatgctatgcagaaaaccggtagctcgggcaatgcctctacttctcgttatttctctgaaactgaccatgtgttggttgcacaaggtgtttctggttctgttgttgacaagggttctatcaagaaatttattccatatttgtacaatggtttacaacattcttgtcaagatatcggtcacacatcattgaccctattgaaagagaacgtcaaaaatggagaagtcagatttgagttcagaaccgcctctgctcaattggaaggtggcgttcataacttgcactcttatgaaaagcgtctacacaattaa

SEQ ID NO: 4855 - DNA, 507 bp, Saccharomyces pastorianus
atgactgctccaatggaccacaagaaagccttagaacacttgaagacatacagttcaaaagatggtctttcagtccaggaattgatggactccaacatcagaggtgggttgacctacaatgatttcttggttttaccagggctggttgacttcccatcttctgccgttagtttgcaaaccaaattgaccaagaagatatctttgaacactccatttgtttcttctcctatggacacagtcactgaagctgaaatggctatcagcatggctttgttgggtggtattggtttcatccatcacaactgtactccaaaggaacaagcttccatggtcaagaaagttaagatgtacgaaaacggtttcatcaactctccaattgtcatttctccaactactactgttggtgaagttaaggccatgaaaagaaagtttggtttctctggtcttccagttactggtatgttttttttacaattattccaatggtttcctaaaatattttcttag

SEQ ID NO: 4856 - DNA, 501 bp, Saccharomyces pastorianus
atgaagctctacagaataaaggaaacagatctagaggaatttgcatcctttctggatgaaggagctcttcagacaccaaaactgtccttcaaagattacttaagcggccaggccaaagtaccccaaccatctcaccaagttcgccataagaaccttacgaagtttcaaggtgaaacttttctcagagattggagcttggtttgcggccattacaatagagacgctaagtgtggtgaagtgggccccgacattattaaagcctttcaagaggaacagctgtttcctgaaaataatttagccataatttctcatattggtggccatgtttttgctggaaatgtcattttttacaagctatttaatggaggaaatactcaaaacaaactggactcattgtggtttggaaaaatctacccacacaatttgaggcttttatgtgaaagtttggaagatggaaagattattgatgaattgtacagaggcggtttatcaattaactga

SEQ ID NO: 4857 - DNA, 177 bp, Saccharomyces pastorianus
atgttacgcataaggattattaccttacatcaacgtgcactttttcatcgtggttttgaacgtgtcagcttgccagaacttcattctgccacccaacaagatcaaaccatatgttactgccaaaagctaaactcaaggctgccatcagcaacagatcatttggatccctcaaattaa

SEQ ID NO: 4858 - DNA, 3915 bp, Saccharomyces pastorianus
atggctgctagagataatgaactgtacttgtaccatctgacgttgcagaagcagacgaatttcgtgcactcgtgtattggccacttcgtggacctggacgcagggtccaataatggccagtcgcaactgtgcgttgccactgagacgcacttagagctctatgacacggcggaaggggagctgaaactgattaccaggttccagaacctgttcacgacgataacatcgatgaggtcgttggacttgccgcatgccgggtccacggcgaattcttccaattgccccactttcctagtgttgacatcagactctggtaatttaagcattgtgcagatcactaggcatgcaggcgcgttcaaattaaggacgttggtgaaccagccgttgaccaggaccactctgcggagggcctctccaatttcgtacatggaagttgaccctaatgggcgttgtataatcctgtcgtctgtagaacagaacaaactatgctttcttgtggactttgcacgagaactaaggatctcgtcgcccttagagatcatcagacctcatatgatcacgttagatatgaccgcatgcgatgtgaatttcaacaacccgtgctttattgccttggaaatggacagcatggctgcttcactctcggtacatttaatattttacgttttggagttggggttgaaccatattgttaagaaagctgattattcagtcaatccgtctgctaatttcattttgagtttaccggatttgtcgaagtataatataacaacctctctgaatgataataactacgatcgtgacgaagactctttgtttaatccctttgttgtaattggatttgaaaatcatatactgatcaaggacatgaacggtttctatagtttgaaagtacaaataccacaaagggccgctgcaagcaacctccagaaatctgtaacgatcatctcaggtattgtacagaagcttaaaaatgacttcttcgtactcctgcaatctaactacggtgatctttttaaattaaccataactccggacattaatgatagaaatagacctttggttaaattgagctattttgatacaatccaaaattccaaccaattacacatttttaaaagcggttatctttttgcactatctgaaatgaataacaactttcttttccagtttgaaaaactaggtgtagagaatgacctctccaagattctaacctcaaaagatccaaataaaccgctggttttccaaccatctaccaacctgcagaatttgagtatcttgtcccaacagttaaatttgaacccattaggtagctcccagatttcgaatgactcgcctttatctatcgttactcaacatcacacaaacagtaagctattaaccttaacaagcggtgtaaattactctaacctgatctccactaatttgccacccaacgcaacaaaattgtggttgatacctcatcctgcagccactaacaataacaacaacctcttgttcattagtttccctaaaaagacgatgatattacaaattgacaacgagtctatggaagaattaacccctgatgaagttgcacgttcgactttcaaactatctcaggacacgacgattcatacctgtttgatgagctcacattctattattcaggtatgcactacagaattgagacagattgtaccaattgataaaaccgggttctctaataaattgacatgggtgcctccagcaggtattcgtattatatgcgctacatcttcaaaaacccaattgatcgtatcactatcaaactacgagctagtctatttcaagatagatagttcctcgaactcattgattgagctgactacacatccagaattggacacattgccttgtaaacttgccgtcgagcaggatagccagcatagtgatttattagccatcgctgatgatgaaggtatgatcaaaataatgtctcttagagatcaaaaggaagatttcttaacagtaataagtttgcagttggctaacgaaaaagtctctgacatgatcatggttagagatcccttaactagattgctaaatttgcatgttggtttagtgaatggtgtctacatgagatttcacatacaagaaattgatggattgtttactgatataaaaagacgatttcttggtttgaaacccgttgtactgtcatatctgaataagatatctatgtccctaaatgaagaggaagaggaagagaaagaggaagaggaagaggaagatggaaatgaaaaaaaatggatttcatgcgttgtttgccattccgcttctacgtgggtaagctacacgtggaataacatgtggaatatacggccattaaacggccaaaatatgttaagctgctccaaatttgttaacgcagacgtacaaataaacggtgtttgttcgatttctaactcagggcatttaaacatcggccaggtttccggtttttcaacgtgggagaagtggtttcatgtggatgaagtaagtatcgaggaacaaggggacaagaaagaggatgatgctggtgaagaaagcgaagaagatgatgaagacgacgaggaagaaacattaagaatatccacattccaacctcgtactattttgtccttccccaataaaccgaaacatgctttgttcatcgagaatcataccgaagtaccacaatgccgtatatcattaaaaatcaatgacgattgcataaagcacgcaaattcagatcgctcatttaaactattagacaatgtgcattgcatctccgccacgataatagacttcgggaaaaaggtcgaccaccttgtaatctctactaaagacaatagattgatgacataccaagtattggtaaataaggacgaatcatctttcgacattgaattacttcatcaaacaaaaactttatcacaaatacattccatgctgaaatttaagaatcatttgctggccgccatagattccactattatcctgtatggcttaggtaaaaaacaattacttagaagatctgtaaccgaaacaccagtatcaataactaaaattgtatctatggatcagtggaattacgaaaggttggctgttggggatatacatgaatctgtcacgctatttatttggaatcccacagggaatgtttttattccaatggtggacgactccattaaacgtcatgtaacaactttaaaatttttggacgaggcaacaattattggtgccgataagtttggaaatgcctggactttaagatgcccgtcagagtgcgagaacatcatatcaagtcatgaggctagtgaattatcagacggcaccatcaagtacccattgaatttgatcaatttacaacagaggttacctaatacgtatgattgcaaattcaagtttgatgtactaaaccacctctacgttaatgatatcatcgtaaattttcatattttggacagcatctcaaattctgataggccaggttgtatctatatgggtttacaaggtactattgggtgctttattccattattatccaaggggaatgttatgaccatgaaaaagatcgagaaaataatgtcagaggctgatgatacattttatatggagtatgaatcaagaaaaaaaaataataatatgcacagtgaagatgacgaagaggaacccgccagtgtcgtgttacacaggcgaggtgatataattgatggaacgatatgcgaaggatcgtattccattgtaggcagagatcatcaaagctatagaagttattatgctcctgtgcgtatggttatcgacggtgacctatgtgaaaatttcttgagactttcactaaacgaacaagaatttttggccaaagatctgaaaaatattcaaatcaatgatataattcaaaggataaatgaagttagaacaaattatctttag

SEQ ID NO: 4859 - DNA, 141 bp, Saccharomyces pastorianus
atgtggggaggtggcaaaacggcaatagtaggattgtcgccccacacggcagagatgcgtctgctatatgagcaagccacgacgacgatgagctttagtagtttaaacgagggattggaacaaaagcagaataggcagtga

SEQ ID NO: 4860 - DNA, 864 bp, Saccharomyces pastorianus
atgttgacttggttgtacacggatttgcccgacgccatttcccccacgccgggaatctgcttgactaatcaattgtcaagagtattgattccgctggccagacacatggacctgcctgatattgccgccaagttggaacaagaagttcaagcgaattattccagtcttattgcccaatggcttttcttcgtcatgcacgtttttaaaattgcccttatcactttgtttctcaaactgggtattgccaaccctattagtttcaacccttacaagttatggactttgagagacatggcttctccttcttctaacagcaataacaagaatggtaagaaccctgcaggcgccagcaacggtgcgacagacttgaagacccttttacgttccgtaggttggattggtgctaagagagccacttatgacgattatcaaaccaactactacaactacgtcatcgaaaagatgggtggtccagttgctgcctacagggccggtgccatcaggaaagccgcagctccaggtattcaactggaagccggtgaaggtttccaaagtcgcttggaagatagattcactgcttctactttcacagctattgaaacagaacgtaaattcatcttaagcgaagaatactttgtagagttggaaaacaacttgaaaaaaattttggaggaatacgatggggatattggtaagatgaatgctgaaattagaaggttcagaaggtttggtatttacgaaccagatgaaaaattagccactttggttaagctcagaagggaaatcactgatgaaaaagaaaaaaaagcaaataaggatgccactcctggcataaaaaagaacgacttaaaaaaatccaaataa

SEQ ID NO: 4861 - DNA, 369 bp, Saccharomyces pastorianus
atggagatttacgttagactaaacgcagacgttgagcgcgactatgcgttccaggtgtcgaacgacgacaccatcaataacaagattagaaagattttcccctccaagacgggcctggcggacttaatggtgctcaggccttcaatcttccacgagaaaaaccccgtaaagttttataagtctatccatccaggatatctgtccgaaggtggctgtttgatgtttcattacgacgctgataacgaagagaatttggtggaattgaacgactccaagccgcttatcgaccagttgtggcctggccaactagttgttcctcagtggaggttgtctaaaaaaatatatggacgtttgctgccgtcatgttga

SEQ ID NO: 4862 - DNA, 180 bp, Saccharomyces pastorianus
atgttcaaaagtaatacattatgcgtagcgaccacgccatttacacattatactaacttcttctttgtttttccacttttttattcgcagatttataaattgaacaatgatttcaagcctgaaggtgttaaagacctttcaagggctttggtaaatgccattcaactaagaggtatatag

SEQ ID NO: 4863 - DNA, 486 bp, Saccharomyces pastorianus
atgatagcatccaccataccgcaatttccggaaacgaaagtatcgatatcgttctttgaacaagttggaaatgcagaagaaatacgcactaaaatgagcgatttatcaacatcttttgcatttgttgaccctaaattgatctgttcgcaggaacaaatatattccgctatttacaagactctagtagaagttaattacaacaggatgagaacaagaaatttgaattctgagtgtgtattgtgcctttcacccacttccaatatcagcgatgccttccaaaaatttggaattaaagacgattcaacagagcttatctgcctaaactttcacaataacaccagtgatttggataaagaacaactggccaacgaattatcttctatagtgaccggtgtagagatcgagtttaacgataagaatttatcaaggttttatgacgaaacactcataagaaaagtatgttcaaaagtaatacattatgcgtag

SEQ ID NO: 4864 - DNA, 465 bp, Saccharomyces pastorianus
atgaagtgtcagtttgaaagagaaatcttccaaacatacaaaaaattccaatggccgatttggctgatgtttttactaattataattagtaaagtaattgagaccaaattgaaaaattattataagaggaaggccaagatcgaaggactaattacgcaaactatggagaaactaaaagctcaaaagctcaaatcaatgtccagttcagaggagaatgcatatttgagcgtagtccaattacgtgacatcttcctttcggatatcgtggatttaaagtacaaaaaccaactatggtctcaagtagtaaagtttttagagcacaacaatagtaatattaaatccaatttgaccgaaatacgcggcgacattatgaaatgctgggaatggatagggccgttggagcccaatggtccaaatgatccactggaaaacaaatcattacccaaggatgaaacggaatcatag

SEQ ID NO: 4865 - DNA, 1584 bp, Saccharomyces pastorianus
atggaggaggaggaggaggaggagcaaaacgatgaggaggataacgacgacgaagatgacgtgtccatagccagtgctaataagtctgacacgaacgattttcaacgaaattccgttactagcaggaaaaggaaaggacctgattccgatattagttcaaaggagaataggaacaacgacgaaatcacagaggccttcaatatttcgtcatctgattcggatattgagaaagagtataagaacgcgaagaaacgtaagattgatcgtttgagccctcaagagcatggaagtcgttcagccattctggaaaggatttctgataagacaccaataaggaacgcgaatagaaagccaataagcatggaccacttcaatgattctatgacgtctagtggaacggaaaacgaaatatttataccaaacataaagcacaactcaaacgaggccgaagttgaagacgaaaggcaacaggccaccccgctaagtaaattaaaggtctcggcttcatttgcggataaattacctcaaaaggaggaaccaacaacaaaactggctccagaagctaagcaatcaactccatcacagagcgaaaagccgccctctctattctcatccgatgaatcaagctcagaggcagaagaggcgttgattccagagataaccactccgggacctgatgctactgatggaaatacaaaccatcatttggtggaggtgatagaaaatgatgacagcagtggaacggcatccgatggggatgagatcctcgtgcctacaaggatcgagaccccacaattggccacaactgaagacgtcgaaaagagcgaaaccagagttcaagagctccaggaggaaatcaatgaacagttggaaagcgatggcgaggatgaagccgacgcaaagcaagaaaaagattccgaaatagtcaaaaagagtgctccaaagaggaaaacacataaatgtaagagaattttcaagtttttgggcaaatctctacttgcaaccatcctattcggcgtattcatagtcattcctgccctattcgggctttggtatagggagcaaagactactagtaggttattgtggtcatgaagtgccatcacatcgaataaacgaagattcttctgatctcattcgaaatctggataaccgactacagaattataaacctgaatgtattccttgtccatctaatggaatttgctatccatacatgaaactgaaatgcaaaccagattacaaattggcaccatccaaatttgatttcttagaaatcattcctgcacaaggtaaatgtgtcaaagacgacaaaaaacaacaattagcatctgaagtagtggaaaaatccttggagttcctaagggctaagaatgcacaaatatcttgtggtgacgggaaaaacgatatcgaaagtggtatgacagaagatgatttatatcaaatattcaatgaagcaagggccccttggatccgcgatgatgagtttgaagatctttggactcaagtcattaaagatttaaccgaagagccagaaataatatggaggcaagtgagtagaatttatcttttacaaccttattga

SEQ ID NO: 4866 - DNA, 522 bp, Saccharomyces pastorianus
atggacaatgatttggagtatttaaaggccgggttcgatccgaattcggtgaaagtggctgccttgaggagaatattggtggagaacaacgtagagtttccttcaaatgccaggaagaatgctctcgtagggctgtttgaggagaagattaaaccgcaggtgcagcagttgcggaaaatgtatctgaacgttcaaccaagcgacgagggtattgtgaagatggaccatccttcttcttcctcttcttcagcatcttctactcgcaagagtagacggtcccgtggggaaagatcagcttctcctctggctaaacagttcaggaaaaataaaatattggacgatgtcagtgatgatgaaaatgatgacgaagttggtgatcttttgattatatctagtgatccaatgaggaaaacgaggaagacgaggaggaggaggaggaggaggatggatggatggaggaggaggaggaggaggagcaaaacgatgaggaggataacgacgacgaagatgacgtgtccatag

SEQ ID NO: 4867 - DNA, 738 bp, Saccharomyces pastorianus
atgccggctggcaaccaaccaagagaggtatataaagagacacaatctgccagaacattgccagattattcggtgcgtggcttcccacgtacattgtcttttacaattgcaatcaaccaaccacacatacatacaattacatacacaatggtcgctcaagttcaaaagcaagctccagctttcaagaaaaccgccgtcgtcgacggtgtctttgacgaagtctctttggacaaatataagggtaagtacgtcgtcttggcctttatcccattggccttcactttcgtttgcccaactgaaatcatcgccttctctgaagccgctaagaagttcgaagaacaaggtgcgcaagtccttttcgcctccactgactccgaatactcccttttggcatggaccaacatcgcaagaaaggaaggtggtttgggcccaattaacatcccattattggccgacaccaaccactccttgtccaaagactacggtgtcttgatcgaagaagaaggtattgctttgagaggtcttttcatcattgatccaaagggcaccattagacacatcaccatcaacgacttgccagtcggcagaaacgttgacgaagctttgagattggtcgaaggtttccaatggaccgacaagaacggtaccgtcttgccatgtaactggaccccgggtgctgccaccatcaagccagacgtcgaagcctccaaggaatacttcgaatccgccaacaaataa

SEQ ID NO: 4868 - DNA, 225 bp, Saccharomyces pastorianus
atgcaaaacccaacccactacaagattccagcttggtttttgaaccgtcaaaacgacatcaccgatggtaaggattaccacactttggctaacaatgtcgaatctaaattgagagatgacttggaaagattaaagaagatcagagctcaccgtggtatcagacatttctggggtttacgtgttagaggtcaacataccaagaccactggtagaagaagagtttaa

SEQ ID NO: 4869 - DNA, 525 bp, Saccharomyces pastorianus
atgcctcaaaagggttctggtagagcaagagtcggggatgctaactccccaacaagacacaatggtgctagggcactcgcaagaactgcaccaaacgattacaccacagagctgccatccaaagtatattccatggctttcaacaatgctttgagccaccagtataaaagcggtaagctgtttgttattggtggtaataaagtcgacttgatatcacccaccccggaaatagacttgaacgcgttagacatcttaaagacggacacacttgaggataaggagagttttgaaggagaagccatcttcaggaagttcttagaggagtttcaactaaagggcaagagactacttttcattactgacaaggcaagagaggggctgatgaaatgttctgacccatacaaacaaactgtggatgttatacagaaagagcttgttgaggtcaatgacatactgagagcacaaaccgtcttcattgaactggaagctcttgaatatttagcaattgcacaccaaaaagaataa

SEQ ID NO: 4870 - DNA, 336 bp, Saccharomyces pastorianus
atggatttccaaaccaacaagagactttgtgatgaaatcgccaccatccaatccaagagattgagaaacaagattgccggttacaccacccatttgatgaagagaatccaaaagggtccagttagaggtatttctttcaaattgcaagaagaagagagagaaagaaaggatcaatacgttccagaagtctctgctttggacttgtctcgttctaacggtgttttgaacgttgacaaccaaacttctgacttggttaaatctttgggtttgaaattgccattatccgtcatcaatgtttccgctcaaagagacagacgttacaagaagagagtttaa

SEQ ID NO: 4871 - DNA, 1716 bp, Saccharomyces pastorianus
atggcgggaatacgaaggcaatcgcgagtaaatggcgattgtggtggtaatctgggtatggatggcgcgttaataagttctgttacgtatgtgaggccgcgggaagatgcgcattattttgtagagctcactgagagacatttgctcgtgttcgagatgttgaattccatgtgtctcttggagaactatgaccatatgctgttatttttggagtgtcagttgggcaaatctcacaatctggcggtcatcccctttgatatcatattggttcttttcacgttatcaactttgtctgaatattataaagagccgatgttaagggcgaacgatccatataacgtaacgagaggaacattgagcaggagagctttgaaaatgctgcaaaaatatctcgtcattttaaaagagtttgatactgaagagttcaatctgcatgatttagaattgctgcgatgtcaatttttcctggcaatcgatacgctgacaccaaaaaagcaaaggtggacttttgataggtttaggagagtaaagtccgaaaatggggtggtttataaacaaaatgctagtgcagaccctgaccttgacccaagtgagactataaaaaacccttataggtcctatattagttgtctagagcaaactcacaccgttctgggaaatcgcttattgaatttgaaactaagcgagcccggggaattcatcaacatgattttatggacgctgtccaactcattgcaagaaagcacgccgctgtacctatcaagtcatgaaatatggatgcccttactggagatgatcatcgatctgtttaatgctagacaagattactttatacagcatgaaattacccgaagtacaggcaaggccttgttcattcagcgcttatcagagagtcctttggccattttctttgagtccttgaatacaatgaattttgccaatagattttctgaatacgtgtttctaaattgtgattacaaactaccgtcagacagttacgcgacaccggtccatcccatatatcatggcgaaaatagtatggttaatacatacattcccagatttgagtatagtcgcctgtacaaatcgcaaaaatcattagcactgcgaaggaaacttattggatcatgtttcaaactattattaaaggtaccagatggtcgtagattaattactccaagaatcgttgcggatgatatcatccagggaatctcacgaacgctcgcctctttcaacgatatcttgcagttcaaaaaattcttcatgaccgaaaacttgtcacaagagtcatattttatacccttattagccgaaggtacgctatccgagatatccaaagacacgcaagactgtgttattattctgacattggtggagaatctatcggatggcgtctcattttgcaatgaggttattgatctagtcgagctggattgttttgcatttaccgaacaaagtattaagatgtcatacgaagaatcattcttagttattgaaaaatgtgacgtatgcttactggtccttttacgatatcttctgcatttgattgatattgaaacaataacaggagccaagggagcactaagaatgttaaaagtaattgaaaaaaatgatttgaaaaggcagcagtgggttaaatcactggatttggaaattgaaccgcctttattgtatcctacggcttccaaaatgttcactgttcaccttaggatgtaa

SEQ ID NO: 4872 - DNA, 162 bp, Saccharomyces pastorianus
atgatgtcgccaagcccttcaatggtagctgcggtgcttgtatcgggctgctcgtccttgaagcagagcacggcagcgtctgcggccaactggctgatcttttcctggagggcgctggcccattgtgcggggtcactagagtacacttcgaggtacatgtga

SEQ ID NO: 4873 - DNA, 2247 bp, Saccharomyces pastorianus
atgggtaaaaagaaactaaagattttatccattttccaaagggactattatacaggaagaatttatattgaagcgccaaaacaatctgttattgagaagttttgtaatggtgttccagatatttacatttctcaaaaactgcttatccctgttcaagaattgcctctactgttaaaaccaaataagtctgatgacgttaccttggaagaaggaagttatgttcgtattaaaagaggtatctataaaggcgatctagccatggttgaccaaatcagtgaaaacaatttagaagtgatgttgaaaattgttccccgtctagattatggtaaattcgatgaaatcgatccaactactcaacaacgtaaatctagaagaccaacatttgctcatagggctccaccgcaactatttaatccaacgatggctttaagattagatcaagttaatctttacaaaagagatgaccgtcattttacctacaaaaatgaagattatatcgatggttatttatataagtctttcagaatccaacacgtggaaactaaaaatattcaaccaaccgtggaagaactggcaagattcggttctaaagaaggtgctgtggatttaacttcagtttcacaatccatcaaaaaggcgcaagctgcaaaggtcactttccaacctggtgatcgtattgaagttttgaatggtgaacagcgtggctctaaaggtattgtaacaagaactactaaggatattgccactattaaactaaatgggtttaccactcctttagaatttcctatttctactttgagaaaaatctttgaacctggtgaccatgtcactgttattaatggtgagcatcaaggtgatgctggtctagttcttatggtagagcagggtcaagtgaccttcatgtcaactcaaacaagcagagaagttaccattacagcaaataatctatccaaatctattgacaccacagccacatcaagcgaatacgcactacacgatattgtagaattaagcgctaagaatgtcgcatgtattatccaggcaggtcatgatatattcaaggtcattgacgaaaccggtaaagtgtctacaattactaaaggttctattttgagtaaaataaatacagctcgtgctcgggttgccagtgttgatgggaatggtaatgaaatcaaaattggtgatactatagtggaaaaagtaggttcgcgcagagaaggtcaagtcttatacattcaaacacaacaaatctttgtagtctcaaaaaagatcattgaaaatgctggtgtttttgtcgttaatcccagtaacgttgaagctgtggcatccaaggataatatgctaagtaatcaaatggatttaagcaaattgaatccagaaattgtttccaaaatgggaccaccttcatccaagactctccaacaacctattcaatctaggatgggccgtgaagtggcgcttggtaaaacggttagaattcgttctgccggttataaaggacaactaggtattgtgaaagacgttaatggtgataaagccacagtggaattacattctaagaacaaacacatcacaatcgacaagcataagctgacctattataatcgtgaaggtggtgaaggtatcacgtatgatgaactagttaatagacgtggtagagttccacaggcaagaatgggtccaagttatgttagtgcgcccagaaatatggctaccggtggtattactgcgggagcttccgcatctaccggtctgagcggtggtatgacaccaggatggagttcgttcgatggtggcaaaacaccagctgtaaatacacacggtggctcaggtggtggtggtgtgtcctcctggggtggcgcgtctacttggggtggccaaggtaatggtggtgcctccgcgtggggtggtgccagcggtggtgcctctgcttggggtggtcaaggtacaggcgctacgtctacttggggtggtgcttcagcttggggtaataaatcaagttggggaggtgcttccacttgggcttctggcggagaatctaatggtgctatgtctacttggggtggaactggtgacagatcgacttatggtggagcttccacttggggtggtaacaataagaacaagagtacaagagatggtggagcttctgcttggggtaatcaagatggtggcaacaggtccgcttggaacaatcaaggaaacaagtcgaactatggtggtaatagtacatggggaggtcattga

SEQ ID NO: 4874 - DNA, 180 bp, Saccharomyces pastorianus
atgtactattaccaccatagttcgacttgtttccttgattgttccaagcggacctgttgccaccatcttgattaccccaagcagaagctccaccatctcttgtactcttgttcttattgttaccaccccaagtggaagctccaccataagtcgatctgtcaccagttccaccccaagtag

SEQ ID NO: 4875 - DNA, 288 bp, Saccharomyces pastorianus
atggttaactgttccccttcggtatggagcaataaaactacgacaccacaatcatcttcgtatatatgtgctgaaatggtaaaagtcaagtccaagaacagtgttatcaagctattatccactgcagcgagtgggtattctcgttacatatcggtaaagaaaggtgcacctttagtcactcaagtcagatacgatcctgtagtgaaacgtcatgtgcttttcaaagaagcaaagaaaagaaaagtggcagaaaggaaaccattggatttcttacgaacagccaagtga

SEQ ID NO: 4876 - DNA, 642 bp, Saccharomyces pastorianus
atggattttgttaagggtgatttcatgcacatggacttcgaagaaaacaccttcgacagagtttacgccattgaagccacttgtcatgctccaaaattagaaggtgtatacagtgaaatttacaaggtcttgaaaccaggtggtacttttgccgtttacgaatgggtgatgactgacaattatgacgagaataatgctgaacatagaaaaatcgcttatgaaattgaattgggtgacggtatccccaagatgttccatgtcgatgtagccaagcaagctttaaagaactgtgggtttgaagtccttgttagtgaggatttggctgataatgaagacgaaatcccttggtattacccattgacaggtgaatggaaatatgttcaaaatctagctaacttggccacattcttcagaacttcttacttaggtagacaatttactacaacaatggtttccttgatggaaagatttggtttagccccagaaggttccaaggaagttactgccgctttagagaacgctgcagttggtttagtcgccggtggtagatccaagttattcactccaatgatgttattcgtcgctaagaaacctgctgaggttgaagcctccaccaagacttctaagaaagcaactcaatag

SEQ ID NO: 4877 - DNA, 1377 bp, Saccharomyces pastorianus
atgtctgtagaattcatagtcagtgatacgaaattgttaaaatcgataaaggtcaagttagagaatcaaggccttttcgttaaacccatttattccgataataatgcaaaagtcattaaatcttctatcagtgatccaaatcatccattagtaatcgaaattggcaatgtagcaggtgtcgaagctcgggtttgtggagacgataactttgaacataacgcagggaatttaggacacagtagcaacataaatagcatgatggaatttacaaaaggtttcttaagaaatcgcattaaggatgatgaagtttttttatcttgtctactagatcatctacccttgaaatacaccatatacccgccaatggttctgttcaataattctactgtaaggtcattcaatcatccagtctggcaagaagcattccaaaaagaatatgttgattcaaatgagttctatagcaagctattatgtttcatatcgcctaaaaatcctcacgataatgcggattcccattttaaagatcgatttttgacccacttggctataaataatcctatcattgagacagatatactgcggaggccattcaatatccaaccgctatatggggaactaatagataaagatgctcttaatgatgatgacgatacactatgggaaaatcctagccaagaacaattgggctcaagtatatggtgtagagttatacaaaacggtataacccaaatttggtcaccagttttcaccatgtttagtagagggaatatcaaggaaaagaaaagaattctcgccacttttccggatatttccaataacgatgtggttgatttatatgcgggtataggttatttcacttttagttacttgacaaagggtgccagggccctttttgcgtttgaattgaacccttggagtgtagaagggttaaagcgcggattaaaggcaaatggattccacaagagtggaaactgtcatgtttatcaagagtctaatgaaatgtgtattcaaaggatatctgaatttcaagctcagcatccagattttgagttacgtattagacatattaatctgggtctcttgccctctagtagacaagggtggccattagcgcttaagttgattcatttacagggagcttcctcgaccacagtgacgatgcatatacatgaaaatgtacatataaatgccattagagatggaagctttgaaagcaacaccatagcagagcttgaaagttttaatgaatcaatttcatcgaatgaaaactctgatataaaactccactttgtaaattctaagcttgagcggataaagacttttgcaccagatgtttggcatatatgctttgatgttgatattctggtgagtacataa

SEQ ID NO: 4878 - DNA, 1032 bp, Saccharomyces pastorianus
atgcttctcttatatcaaactgagaaatacacaatcagccataaaccaacaatgtccagtgatagcagttattatccaattaagatcgaaaaagctttgaacgacccaactctcttactaaaccatacatgtttaagggttaaggatccggcaaaaaccgtggagttttatactaagcactttggtatgaagttattaagtagaaaggattttgaagaagcgaagttcagcttgtatttcttaagctttcctaaaaacgacatatctaaaaacaagaacggcgaacctgacgttttcagtgcacacggtatgttggaactgactcacaattggggcagtgagaaggactcaagctttaagatcaacaatgggaatgaggaaccacaccgtggattcggccatatctgtttttctgtctctgacatcaatacgacttgcgaagagttagaatctcaaggtgtcaaattcaagaagagactctctgatgggagacagaaggacattgccttcgcactggaccccgatggatactggattgagttgattacgtattccagagagggacaagaatatccgaagggctcggttggtagcaaatttaaccatactatggtccgtgttaagaacccaaccagatctttggagttctaccaaaatgttttgggaatgaaattgctgagaaccagcgagcacgaaaatgccaaattcaccttatatttcttgggctatggtgttccaaagggagacagtgttttttcatgcgaaagtgtattggaactgactcataactgggggacagaggatgacccaaatttccagtaccataacggtaattccgaaccacaaggttatggccacatttgcgtaagttgtgatgatgctggcgccctttgtgaagaaattgaaatcaaatatggcgataagattcagtggtctcctaaatataaccagggcaaaatgaagaacattgcctttttaaaggatcccgatggatattccattgaagttgttccacatggtttgattgtttga

SEQ ID NO: 4879 - DNA, 3273 bp, Saccharomyces pastorianus
atgtcaatttaccatctgccaacgctactgaacccgttgattaacgctatatttaactgccctgaaccagacaaatcgccgttgaagaagcttttcgctaatttgcaaacccgtaggtttattcttctggcgcctccttcccacctcctgttgaactatcacgatgttaaaactaaactgccattacatgagctttgttataatgctgattttatcaactcccacatattgttaactactgagaactcttatataaacacgactttacgagacgatcattacgaaactttagatggtaagactgtagttattcaatggaaaaataatgtcattcacactttgaatggattctctctcaggcgaagacttaaaattttggatacgaaaatattacccaatttcaatgactactttgaaggggctgaatatttcgctatattatatatagatcagcctctaggttgcgaatttgttcctaacgactacttgcactgtttcaatagttatggggaaagtccaaaacttgcacgcaatgcacccaacttgctaatggatacttcccaactagaaagatcatcatttgagaatatattacatattcatccggcttggttaacacaactgggtcaattgttttccaattacagaagagttgctcctaatgacgatccttcgaagaaaatgtttgaagaacttgtagaacaagcatttgatggaatgaaatctgactcacttttcaaaaacttttctaacctttatgatctcatacacgactattttgagctgaatctttatgaagacatttggtccagacttacaatacattttaaaggctatgaagtagatactgataactgcgaatatttttcagtaaaccagctattaacagatttttactcaaaagactttgacagctttaagctaagtgacatcacttttattgaaaggcacgttagtgcagcgtccaagaattttcaaaaattgactttaagccattcctacgcagaaaaatctaagatattagttgagactttacaacaactatcaggaaccagtgatataagctcccaacaatcggatctgtcaaatggtttcaataatctgacaatggatgcggacaccctaataagccttttcgtacttgttgtttgcagaagcgaacaaaagcacttaagaagccatctttactacctacaaaatttttcgaataactccacctcatcaaaattcggaattttggggtatgctatctctacactagaggctgtggtttgctattttgaaaacttcaacaaaaatactaataacgtggcaaaggccaatttattgtgcaaaaaaaccagagacctattacacaaattgtcatgtgaaaaccccacaaacgaagtaaatgatctagcatcataccaggatatcttggcatacaggaatgagcaaggacaatccatcttatctatatgtataaccaataagaaaaacgacattttattagatgtcctttctgaatatgaaacactttttccaatagaggacattttggaagatgaaactattgacggttccacgctactcatagactcaatcaaagcagggaatatcgaggctacaaaaattcttatcaggattttgctgtttaattgcactgatgaagaattggttacgtatattaacaaaacggataaatatgcgcgttgtgtagcacattacctaactcatgaaatggatatactcaaaagcattggaagctatataaattggaagcaaaaaaactccagtgggcaaacacctttattttctatatttagaagttacgatcaaccaaattatgaagaaatggtgaaggtggccttcaatattgcaaattcttggtatcaaaaccacaacagttcatttggttattcagatcatacagacaacaaaggcaatagcttactacatgttctgaagacagacgtgtcaattcttttgcaactagctaagttgaatatcaacggagaaaactacaagggtttaactccattgatggtatacgtcaagtacaaaaggataagcaatattgacgctattacaaaagatcatagattaatactagagaaggttcaaaactccactttctttacttgttttgattatgcaaaggatcgtttggtactcagcaagataggagaaagaggagcaaatgattcaattttcggattgatttatcttcatactcttcggtatcataatttaaatgctacagtgaatgtgacatctgtttcaaatacagaggagcctttcgtaacaactgttatcaatatgaaaacaattcaaggtttgctacgttcaatcttgaaggacaatccatttacgtttttaccaatagataattatatcgatggaatttcgcatttaaaccgatctgatatgacaataatagggaaagcagatgtcagatccctactgcacaaattaactaactgcttcaacgtgcttctcttcttaaagaaagttccagaaaatttattcaccgacgaagcctctgttttgtactggatgcgtataaacacttccagaagaaatcagaaatcgcccagtaaagaaaatcccaaaacaatggaaccagaggaaattaatatgatacagagctttttacgtttcaattttgatgaaatattgtcattcaaagcgagcctgaatattttgagaaagatcttaatattccttagcttaaaatctagtgactttgaagacgcttatgccagccttctgaaaatgggtaggaaggtcaccaatgccaaagctgccgatgcttttacaacgagcataacaaataataaaatgtttagcgatttgtcgctagatgaattgctggagcatgtgcgatttttggaagaatgtaccgttcagctattcaaatccatccagacaatactgtttgatagaatcccaaactggtggaaacattacggtgaactcttgagtttgcacaaaaactaccggaaggcatttcctagtacagttaaaccaaaaagtacggctggtaccgctagtcatattccacttggcggttttattgaaaccaaacgcgaacagtcagagcagcggctgtctgttcaaatcaaggcttcttcaaaaatcctcaaagaacttggaagtgagatattttctgctcatgaaaagttggctgaagagttaagcaattacatggaattcaggaaagcatgtctggatcaacgtactattgtagcatttgctataaaaaacatcagcgttctccaagaatgtatataa

SEQ ID NO: 4880 - DNA, 1104 bp, Saccharomyces pastorianus
atgggttcttgggatccttctttgaacgctttcaccgatgtcaagtatctcggaaccaatgttaccaacggtaagccagttaacaagggtaagtgtattgccgggttcgacaacacaggtttcctgacagccacttcatctaccttgttcaaccagtttttgctacgtttgaattctaccggtttaccatcgttcatcgctaatctggccacggatttcttaaccgacttatccgaagctaatgatgacattgccatttacgctccaaatccattcaagggagcaaatttcatccaaaaaaatgccacctctggcattatcgactctgatgatctattcttggttgatggtggtgaagataaccaaaatatcccattagtgccattgttgcaaaaggaacgtcaactggatgccatttttgccttagataattctgctgacaccaacgactattggccagacggtgcctctttggttaacacttacgaacgtcaatttggtgtccaaggtttaaatttgtccttcccatatgttccagatgctaacacatttgtcaacttgggactgaacaaaaaaccaaccttttttggttgcgacgcaacaaacttgaccgatttagattacatcccacctttaattgtttacattccaaactccagacattcgttcaacggtaaccaaagcactttcaagatgtcttactccgactcagaacgtcttggtatgatcaaaaatgggtttgaggccgccacgatgggcaatttgacaagtgactctggattcttaggctgtgttggttgcgccatcatcagacgtaaacaacaaagcttgaacgctactttaccatccgaatgtagcaagtgtttctccaactactgttggaacggtacaattgacaataagtcagtctcaggtttaggcaacagtgacttttcctcttctgcctctctttctgcctcagccgctgcagcttctgcctccggcaaatcctcctctactaacaagaaaaatgcaggtaatgccttagtggactactccggattgagtaccaatacctttgttggtgtgttgagtgttatcagcgctgtttttggtctaatttag

SEQ ID NO: 4881 - DNA, 885 bp, Saccharomyces pastorianus
atgaagttgcaaaatttgttagcgtctgctacaattttgactgcattgacagaaaatgttgacgcgtggtcaccaagtaatagttacgttccggcaaatgtaacctgtgatgacgatatcaatctagttagagaagcctctgacttatcaacaaacgaaaccgaatggctaaagaaaagagatgcgtacaccaaggaggccttacattctttcttggatagggccacttccaacttcagcgacagttcgttgctctccactcttttcggtagtaattcctccaacatgcccaagattggtgtcgcctgttccggtggtggttaccgtgccatgttgtctggtgcaggtatgattgctgctatggacaaccgtactgttggcgccaacgagcacggtcttggcgggttactacaaggtgccacttacctggcgggtctgtcagggggtaactggttgacaagcactctggcctggaataactggacctctgtgcaagacatcgtggacaacacgactgcatccaactcaatctgggacatctctcactcgattcttaccccaggcggtatcaacatcttcaagactgggagcagatgggacgatatttccgatgatgttcaagcaaagcaagatgccggtttcaacatctctttggccgacgtatggggccgtgctctggcctacaatttctggccaagcttgtaccgtggtggccaaggatacacatggtctactttgagagaggctgacgttttcaagaacgcggaaatgcccttccccattacggtcgcagacggtaggtacccaggtaccaccgtgataaacttgaatgcgactcttttcgagttaatccattcgaaatgggttcttgggatcgacagctga

SEQ ID NO: 4882 - DNA, 159 bp, Saccharomyces pastorianus
atgggctgcttggtgttctccttcttctatgtctttttctttgtctgtgaaactaaaggtttgactttagaagaagttaatgaaatgtatgtagaaggtgtcaagccatggaagtctggcaactggatttcaaaggaaagaagagttccagaggaataa

SEQ ID NO: 4883 - DNA, 1608 bp, Saccharomyces pastorianus
atgcctgagctcgcgatcaatcctatcgagagcggttctcaagaactttcaattcactctacttcagcagtaaaaaagctagaaacagatgacttccaattacaagccaagtctgaaaacaatatcgccgaacttccacaaaagccaatcaccgcttactggacagttatctgtttatgtctaatgattgcatttggtggtttcgtttttggttgggacactggtaccatttccgggtttgtcaaccaaagtgatttcaaaaggagatttggtcagatgaagtcagatggtacttactacctttctgatgttagaactggtttgattgttagtattttcaatattggttgtgctgttggtgggttaacattgggacgtctaggtgatatttatggccgtaaaattggtttgatgtgcgttattttggtgtacattgttggtattgtgattcaaattgcttccactgacaaatggtaccaatacttcatcggcagaattatctccggtatgggtgtcggtggtattgctgtcttatctccaactttgatctccgaaactgctccaaagcacattagaggtacttgtgtttccttttaccaattaatgattacactgggtattttcttgggttactgtaccaactatggtaccaaagactactccaactcaattcaatggagagttcctctaggtatgaactttgcctttgctatcttcatgatcgctggtatgttaatggttccagaatctccaagatttttggttgaaaagggtagatacgaagacgctcaacgttctttggctaggtctaataaagtcacaattgaagatccaagcatcatcgctgaaatggacactattagggctaatgttgaagttgaaagactagctggtaacgcttcttggggtgaactattttctagtaagggtgccattttacctcgtgtcattatgggtattatgattcaatctctacaacaattgaccggtaacaattatttcttctactacggtaccactattttcaacgctgttggaatgaaagattctttccaaacttccatcgtcttaggtatcgtcaactttgcctctactttcgttgctttatacaccgttgataaattcggccgtcgtaagtgtctactaggtggctctgctttcatggctatctgttttgttatcttctccaccgttggtgttacaagcttgtatccagatggtaaggaccaaccctcttctaaggctgctggtaacgtcatgattattttcacctgtttattcatctttttctttgctatcagttgggctccaattgcttacgtcattgtttctgaatcttatcccttacgtgtcaagaaccgtgctatggctattgctgtcggtgctaactggatttggggtttcttgattgggtttttcactcctttcattacgagtgctattagtttttcgtatggttacgttttcatgggctgcttggtgttctccttctctatgcctttccttgtctgtgaacctaggttcgctttgaagagttatgactgtcttcaagtttcagctggaatccggcatgattccagcagacatccgagatataactgtatgatc

SEQ ID NO: 4884 - DNA, 183 bp, Saccharomyces pastorianus
atgcaattatacaaaaagttttatttgagggagatgagagatcgcgatgatcaacgagacactacaatggtattaactttatctcgatttcaaaaattgtttatgatgatttccacatttcacgacggtcaactgcgtttttcgaatgtttatcgattaactttgatgatatttcgcccgtga

SEQ ID NO: 4885 - DNA, 2685 bp, Saccharomyces pastorianus
atgacggctattggtaatatagatgatgcacttccagccaatacagccgcaagtaatgaaaatagcaaaactaggctaagagtccaaaaagcttgcgagctttgcaaaaagagaaaagtcaagtgcgatggcaacaagccatgcataaactgctctaaacaccagaaagaatgccgttatgatttcaaagcaacaaaccgtcgaagaagaaggcgacaagctacgtcacccatacagaacattaataaagaatatcccgaggccgaaggtgttttctctagagatacgtcagcaaatttaaacattccttcagactgcctatcctcgtctgctggaaactctccatattccaattcacattactctaatttacaatccacaataccatttatgagtgttaggccaaatcgtgcttcccacaccttcaattccacagtcaatgcgaatggtgataataacacaaatgcctttgttgaggatcacatggctaagctattattacaggtaggctcgaagctgaaaaatactgcgaatgaatcgtccaaagtcaacaaaaacagtgataataatgtgaacacaaacctggcgacaataaacgtggacagtaatcaagcaggaaatacgtctaaccgcaaatacgatatgcgtagttcttcagagacccttgatagtaacaacattaactctgagaaagacgagatgctcaactctcaaataatgagcatagttaatggccatgttgaatcaccctggcagacgttttctttagataagtataggttccacagacgttaccagaatatattaccctattaccttggtgcatctattttgaaggatatatcgccgcaggcgattgaatatgcaaacttaaagcgcccaagagtccaaaactatggttggaatttatctggtggccattatctgaaatacaaagaagactttagaaggcaggataaattcataaggcatgaatccaagtttttcaactttgatgaccctgttcatttatctttagtcaacaaattattaaggtattattttgatgaaattaatcctgttttcagtatcattcacgaaacaacattttggcaacaatacaagaataagtttttgcgacaaggcaaacaaaataactcatccgcgaagttatttacctcgatactttatctcatactgtctactacactacggtttaaagagggtcacctagataaccaggaaggagaagaaaagcatagcggttcctcctttaatggcactttcgaagaggaatccgttttgaacaaaaaaccattcatagaggagatgatgttcgaatatgcctattctataattaacacgttgacctttgaatgggagtcatttgaattgatacagtcctggcttttaatcgcgttctattttaggacctgttatagacaaacagcgtgttggaatgccttaagccaagcagtaaatatgtgtaatggaatgacattatatttgaacaagttccctgaaattcattccacgtacgatgaatcaaaagcatggcattgtttttggtgttgtttcataatggataaattaatcagtttccaaacgggccggttttaccagttgtcattacctgtaagtgaaatgttcgaacaaatgaatttagtaaagtcaaagaaatttttacaagatgaagatgactggttccataaagaaaccttccaaatgctagacctatccataatagtaacaaggtttttaaaaagggacgctcaagatttaaacttaagcgagactattcaactacggggtcaacttgctcagtggtacaatacttttatgacagataaggatattaatacgtatgataagaattaccacgggttctaccagcttcaaccgctcatgacatacctggacataagtctaacttttgaaatcagacaattattctgtttagtagctccttcctctaatgcaaatggtaaatccttagactatgcagtggacacccaattactagtgtcccattgccaaatggctgctgacaacctgactaacattacaaaaaggaacctattcttcgttccctggtggctaaacctgtcacaattattcacagtaaatttaatttgtatcatctatatgcacgcagggatcgccgtcacacaaagtaaagctatcatgcaaggttgcaatcaaatttggcgaactatagatagttccaagcctaaaaactctcccgcaatgctccctgaatgcttatggtgcttgaaaatgttgaaccatatgttctgtattcgattgagggattctgccttgcaattagaatcttcgcttggtacagatcatggcgatgatacccctaacaagaacaaatttgagcaattcaagaaggtcggcgatcaggatgcggatgatgaagctgagatagacgaaggaggagaagagaacgcagatgagagacaagaaaatccgctcaagcataatcgaaaagtacccccattgacaacaagatctcataatatcactaccttgaacgcctcagtggggatttctccagaaagtggtataccaaattctgttaaaaattccgggttgccttctgatgttcttgatgcaagcaataatataagagactctaccgacgttttcgatgatgatctattttctaatttgctatggtttgatcaaaattttgcctga

SEQ ID NO: 4886 - DNA, 372 bp, Saccharomyces pastorianus
atggtgagagctgtgaataaattggaaaataggttcggcgtaagttatccaatagtgagtgtatcttgcaagactaaggggggcatagaattgcttattgatattttaacaagaaacttcaaacacctgtctcaatcgagtgccgattcgagtccgattgttgtttccaaaagagttactgagatcctgaaaaacgacgtgttttatggtttggaggagttcttgaactctaaagactttgacaatgatatcgtcatggccacagaaaatctaagatacgcatctgacggaatagctaagataacggggcaggctattggaattgaggatattttggattcagtgttcagtaaattttgtataggaaaatag

SEQ ID NO: 4887 - DNA, 273 bp, Saccharomyces pastorianus
atggctcaattgactgcaattattgattttgctgatgataatagccaagaaattgacaatacggatatgatattccatggagtggaaaacaatatcaaacgtttacgggatgaaattttctctttcattcaaaaggtcgaaaaatcttcaatcttgcaagacgggatcagactagtattactcggggcccctaatgttggtaagtcatctttagtgaacaggttaactaacgaagatatatcgaacgttagtgatatcctggtactactagag

SEQ ID NO: 4888 - DNA, 156 bp, Saccharomyces pastorianus
atgaatgctttatttctcctgcggccacatttcgtttcgaatcctcttctttgcaaaagagcagtgaataggttgtccggatttacaaagcctgcaacttcacacctaccaacaatctatgcctgtctacgccagcaaaccagacctctgcaatag

SEQ ID NO: 4889 - DNA, 1137 bp, Saccharomyces pastorianus
atgaagccgttcccatacagtacgtggcattggagccgaaccattagacctctttcacggtgtttacccgggacttgcgttcttcagcaaagctcaagattgacctcaaaacgatacctgtaccactcaacgtcgaggcaacaacaacagggcttcctacccgaatccgagctcgcccaatacagagactactatcaaggcctgaagggtgcgataaacgagatacctgaaccagtggcctccaaatcgccttcattaataacgctccacaagagattacaactgcccaatgaattgacctactcaacgctatccagatgcttaacgtgcccctccgcaaagctgcccgataagattaacgatccttccaagggtgcggcctttatcaacactgtgcccacaaataaatatttggacaaccatggtctgaacatcatggggaagaatttgttatcctaccatgttaccaaatccatcatccagaagtacccaagattgccaacggtggtcttgaatgccgcggtaaacgcttacatatcggagatagtactggctcatattgccaaatactggggtatagaagtggaaactacatctgttttgtctcgttatttgaaaatggagcctttcgaattcaccttagggaagttgagattcttcaataattcgttgaactctaaggacggtattgaattaatcactggaaagaatttctcggagacaagtgcccttgcaatgagtgtgagaagtataatagctgccatttgggccgtgacagaacagagagactctcaagcggtttacaaatttattgatgaccatataatgagcagaaaattagatatcacgaaaatgttccagtttgagcaaccaacaagggaactggccatgctatgtcgcagagaagggctggagaaacctgtgtcgaaactagtcgctgagtctggtagactatccaaatcgcctgttttcatcgtacatgtattttcaggtgaagaaactctgggtgaaggttacggttcttcattaaaggaggcaaaggcaagagctgccactgatgccttgatgaaatggtactgttacgaacctcttgctcaacaggagccggttatcgaccctggcactgtcgtcgtctag

SEQ ID NO: 4890 - DNA, 1419 bp, Saccharomyces pastorianus
atggctatccctgaaaggtttatgaccaatgacaagggcacctttggtgaatacacagccagttcccgttggcccattattctacaaaatgctatagacgatttgactacgcaacaagaattggaaaagagtaacaccaccaagtttcaacaagctgagtctatcaaaactgggttgaggcagttccgccaagatgtcattgaccgtgttcgtttgagaccgttcactgaagaagagatcaagttggcaaacgtcccgctttcgttcaacgaatacttaaaagaacactccgaagccaattggggtgacgtcgaatggttattctccgaagtttacttgtacagaagagttaatgttcttttccaacgtgaatccgaatgggctgagtttgatatttttaacagactgaagcaatctacttttgaatcttcattccatggcgttgtggagttggctttaaggtaccaaaatttgttgccccaattgaaaaacattgggcagaactcggaagacaacgacgaggatttattgaaagtccttttcaaagaatttatagaaatttctttatggggaaatgccactgatttatctttgttgaccaatgccactttagaggagattaaatctatccaaggggccaaagcaagagcagaatctgagtctaaaattgttgtgaatgacaccgacaaggcatggggcgtattaactaacgccaaggccaatgctaatggcaaaccaattcgtgttgattttgttctagacaattctggttttgaactatacgctgatttaatgctagcagctttcctgttagaaagtggactagccaccaaatgtatcttccatgccaaggatatcccatatatggttagcgacgttatgttaaaggatttcgacatcttagtccaagacctgagagaccgtgaatttttcccaagtggccaaccgtcaacaaaggaatccagagcccttgatttctttgccaaggaaatgggcaagttcatttcgagtggcgagctagaatttcgtgaagattctttctggaccacggaactagactattggaatttggatacaaaagaaaccaagtaccatggttctgttttacataaagatttactaaattctaacctggttatcttcaaaggtgacctaaactatagaaaattgacaggagatagaaaatggccccgtaccactaaatgggagaccgcaatcggtccccttgctaccaacggtatcacgtctttgagtttaagaacctgtaaagccgacgtacaggtcggtttgcctgaaggtctcgatgctaaattgagtcaagaatgggaaaaggaaaatccaggtcgtggttcttggtggtgttgtagcggtaaatgggcagttatttgtttctgttctggtaagtcagacggaaactaa

SEQ ID NO: 4891 - DNA, 945 bp, Saccharomyces pastorianus
atgatttcattgcagaattgttgtattatcgacgttggaacataccatactgatatcattcccatcgtcgattatgcacaattggacaatcttgtgtcgtcactaccagtgggtggacaatctatcaatgaatctctgaaaaaattgctaccacaatgggatgaggaccagatagaatctttaaaaaaatctccaatttttgaggtgttgagtgatgatgccaaaaaactatcaaattttgattttggaaatgacaatgaggacgatgaagaaactttgaacgttgctgaaatcataacaagcggccgtgatacacgtgaagtcctagaggaaagagaacggagccaaaagactaaaagtgtcaaaaatagcgatttagaattcaacacattttgggataagaacggcaatgaaattaaagttggtaagcaaagatttcaaggttgcaataacttactcaagggtatttctaatcgtgtaggattgactctagataagattgacgatattaacaaagccagggctgtttgggaaaatatcattattgtcggcggtactacgtcaattccagggtttaaagaagctttgttagggcaactattgaaggaccatttaattttagaaccagaggaagaaaagctgaaaagagaggaaaaagctagatctgtgctacctgctacaacgaaaaagaaaagcaagtttatggcaagctctactgcgtttatcccaagcatagaatatgtgcagtgtcctacaataattaaactagctaaatatccggactattttcccgagtggaaaaagagtggatattctgaaattatatttttgggcgctcaaattgtttctaaacaaatctttacacatccaaaggatacattttatattacaagagaaaagtatgatatgaaaggcccagctactctttgggacgtgcaattttaa

SEQ ID NO: 4892 - DNA, 438 bp, Saccharomyces pastorianus
atgaaattagcctccccttcaaatcctaacttcttctataaggataacccccaatcttcgatgactacagcatcgtcagcattatcatttaaatttgaaccgcctccaaaactatctctaaatcacaaaagagtttctagtggttcgtcaataaattcaagtgaaagtacaggagaagaaaatttctctcccatattcagtaaatcctccatgagcagcaacagtaatttaagtacttctcatatgttattaatagatggcttggacaactcatcatattttagttttgaggatgacagaagcaccaaccggcaagcagatcaaggtgatgatcaaggcgaacaggattttacttttgttggttcagatcgtgaagattttcctagacctgctagaagatcgttatttccttctttccaaaacgatgagaaaaattga

SEQ ID NO: 4893 - DNA, 1032 bp, Saccharomyces pastorianus
atgaataatatatttcatggaaacaacgatgaatatgcaaacgaaggtactctgagctctcaaaaaatctccttgaaaagtccattcggtaagaagaagaacatattcaaaaatgtccagacatttttcaagtccaagagtaaacattcgcctgccaatgatgatttggttaatgaagaccatctttcattccataactctccactattgactggatccagtgatcatgaaatagatattccttcaccaacgataacacagttcgatcgccatggtgagcacgatgaaaatgaggatgatgatatagtattaaatatgcattttgcttctcaatctttacaaagtccaaccaggaattcatcgagaagatctttaactaacactaaagagaatgacctattaaataggatcaaatacccaagaagcccccagaggtccagctcattttcgagatcaagatcactatcaagaaaaacgagtatgaatagtagtagtaattccagcaagagggtacaaagacaggatggaaaaatcccaaggtcgtcaaggaaaagctcacagaaattctcacatatttctcaaaatttcacttcagtatcatccagtccactggctttcgattcgacaaaggaaaagtgttacgagtcatgcctggggaaaacacaaataccatattactatgatgaccaaatttcaaatgattttttccctcgtatatctccagaaacattgaaaaacatcatgcagaataatatatgccagccattttacaattcgtgttgtattgtagactgccgatttgaatatgagtatacaggcggccacattatgaattcgattaacatacactctagggatgatatagagaacgaatttatccataaagttctgcatggtgatactcacaataggaataagaacaacaacaatctaccaactctactaattattcattgcgaatttagttcccatcgagggccgctattggcatcccatttgagaattgcgatcgacaagcttgatccgccataa

SEQ ID NO: 4894 - DNA, 549 bp, Saccharomyces pastorianus
atggcgtggaatggcaacggctccagtatcagagtgctggaggagccaactactgtcggcaatatagtggcgatcaattcgaacggatccgtaagccggcctccatcggagttggtgcaagacgaacaagacgacgacgacgaagacgacgacgacaagtccagcgtagagcccccgacacctacacccactcccacgcccactacatccaagactaaagagaataccagcacgagcccaaatacaactacaaccacaaccacaactgccagacagaaacagcccatcaagtacatcgaaaacaagacccgcagacacgtcaccttctctaaaaggcggcacgggatcatgaaaaaggcatacgagctctctgtcctgacgggtgccaacatcctcctgctgatcctcgcgaactccggcctggtgtacacgttcaccaccccgaagctcgagccactggtgcgggaggacgagggcaagaacctcatcaaggcatgcatcaacgctcccgacactccaccggcacacgatcaacccgccaccaactga

SEQ ID NO: 4895 - DNA, 1047 bp, Saccharomyces pastorianus
atgacgcgtaatcaagatccatcgcttctattgaccagaatgccagagaaaagaaaacagaacataattagagtgatggatgaggagtcagacaatccgctattggccttcaatggttctaacgggcttcaaagtgaccccactataccgaatggcttagatggttcagtggccgatccgactatagcagacccaacggcgattgcatctaaaaagagaaggcctcaggtaaaactaacggcagaaaagttgcttagtgataagggtctgccatacgttttgaagaacgcgcataaaagaatacgaatctcctcgaggaagaacccttatgataacttatcaaatatcatacagttttaccagctctgggcacatgaattgtttcctaaggcaaaattcaaggatttcatgaagatctgtcaaacagtaggcaaaacagatccagttttgagagagtacagagtaagcctttttagaaatgagatgggcgtgagtttaaatgttgatacaggggaggctgagcaagagctagaaacacaagagcctatagctacagaacatgccgatgctacgaacgcggaactagttacagcggcctcactcaatatacaagataatggcaacgacgacaatggtgacgacaacgaagaagatgacgatatctatcacctttctgcgagtaacagaagaaagagagttctggatgaagaggagaatgatgcagcagtcttgggaactcaaggcctttcaagcgttaagaatataccgtctaaggaaccatatacagtactgaaaaaatttaaggaacaagggcctgctgaactgaacatagatgagaagaaactcttatcaagatggctagatgagcataggagtatggagaaggttttaatgactgaagaagatattcaactattacgaaagctggaagattgggagatgaacgatgcagaagtagcaatgacatataatgattttgtaacaggagaggatgattttgatattgaccaagatgagatagatgccatgaaagaaatgggattctaa

SEQ ID NO: 4896 - DNA, 624 bp, Saccharomyces pastorianus
atggcggatcagcttgtcgatctattgcggatgaaatatcatatccaagtgcaacagcacatacaagaaatggatgagaactttatgggtagattggataaagagggaacggttgctcagtacgtgaaattcaacgaaagatataagaaattgcaagagttatataaaaagtattcagaaggtacaaaaaagttcgaagaaagatttcaagatattgacaacaagcagcagctccttcttcatgagatgcaagaattgaattcactatcatcgagattaaaatacgatatgcggattttggaagtccgtgtgagagacattgaaagtagtgttgctcaatttgattctaaattgattgggttaaaaaattccctgcaggggcaaggtaaggccagtatatgctcggcgatggatcccaagaatgataaagagcaatacgataggtgcgtaaatgatctgatgaccactagtaacccctcttatgaagctctgtgcttgaagatgttgagccgccgttatttgacggatttgaagcacgatactatcggttggtttagatggttgtttggcaacagttctttgcatagaaatgtcaatgacgacgatagaagcatacaaatttaa

SEQ ID NO: 4897 - DNA, 1485 bp, Saccharomyces pastorianus
atgttggacactattactacagataccacagctggatggcttgaaaaaagtatgcaagattttgacgaaatctcccctcaaagggatgtacttgatgatgacttccttagtaaggaacacggtcaagataatgcaagtgcagattactacgacgaggtagacaatgaagggaccaattatagtggcagtggctattatggttactcggacgactcagagaccattgggctggcgagaaacgacacctcgggtcagtttccaccactagacagctttattttcccagattctagggctctgttcttgttggatttggccacctatactgatctgacttatgaagaaattatcatacacggcttcgaaatctatatagtggaacagtgggtcgcatgtagaaatttgtcaacattaatcacatcatacacaggaaactctcaagataccatatcaggaatcagggttgttttgccaaaggaaacacgcgtgtggcctggtaagtttaaacagtattacggagagttgatggagtttgcacggccaaaattcacgccaaaaggtactctttttattaccaatttatcgggcgtatcctttggcttgaacctattgcacgtggaatgcggagacttgaggacaatttggaaggatttcgaggttaatttcgatttgaaaaaccttcattgcggtggacgatcgggaaatttattatgtcctccgacgatggcgtcactcgagaagttttcacaactgttcagaattcccacgaatagttttatagcccaacatcctcaaatgatacagcagcagcagccacgtttgtctgcggaagagtacaagtttttcggcagccatcggaatgggatcagtagtggtaagtctcccgttgtggagatgataacgttggttcaaatctcattaagctacttcaattttttacacaaaaattaccaaacagatggtcttttatgcgaagataccaagcgagctatagatgagtggtgggaaatttacgggaaattgtatctcggaatggaaaaaccgaagaatgaatgcactctgggtccaacaacagtagctggtctaattagtttgatcctgtgttgctatttcaaacttatgattgaaaactgcatttcctccaaggatccatttgatgaagtggaatttttccaaggtgtctataatttccaaaaaaagcatggcctaaataagggaatttcaagagcttgtttgaatccaagaacattagaaaaactttttgaagtgacggcaaagatttctaacaaagacattttcaaactcaaaaaaatggtaaaatcaaccatacaagacattatagggaagggcaatcccattaatttgtcacacgatattctcacgacagatctagacacactcgttcataatattcacggaggttccgtgggaatattatggaaaggtaaaggtcaaccaagaaaaacatgtagtcgatatatctaa

SEQ ID NO: 4898 - DNA, 546 bp, Saccharomyces pastorianus
atgcctcacggataccaaagtgtggagaatattgaacatgatgaacatctggctcaacaacgacattcgacagaggggtttgagggaatggttatcagtgatatcaacagtgtcacggacggcaccaacgaaaacgttggtggtgatgaacatggttctaatggggtattcaattttggcgacgtcatgattcatcaagtgattcataccatcgagttctgcttaaactgtatctcccatacagcctcatacctgcgtctttgggcgctatcactggcacacgcacaattgtccagtgtgttgtgggacatgaccatatcaaacgcgttcagttctaaggattcaggttcgcctttagcggtgatgaaggtggttttcctgtttggtatgtggtttgtcttaaccatatgtatcttggtcttcatggaaggtacctctgcaatgctgcatgcattacgtttgcattgggtggaggcaatgtccaaatttttcgaaggtgaagggtacgcatacgagccattttcatttggtactataaccgagtaa

SEQ ID NO: 4899 - DNA, 2100 bp, Saccharomyces pastorianus
atgaaccaagaagaagctatattccgctcagcggacatgacatatgtccagctgtacataccattggaagttattagagaggtgactttcttattagggaaaatgggtgtctttatggtaatggacctaaataaagacttgacagcttttcagaggggttatgttaaccagttgaggcggtttgatgaagtggatagaatggtgagtttcttgaatgaagtagtagagaagcacgccgcagaaacctggaagtatattttacacattgatgacgaaggaaacgacatcgatcagcccgatatgctggaactcatcaatactatggaactacagtctttggaaagcgttaatgacatggtgaaggaaatcactgagtgcgaatctcgtgcaagacaattagacgagtctttagataatcttcggatcaaactaaacgatcttttagagcaaagacaagtaatattcgaatgctcaagatttgttgaagttaacccagggattgctggaagagccagaaatgctgaaatcgaacgagaagaaatggacgtggacgacttcaggctaaatccggatgatgtaagcgaaacattaagcgacactttttcttttgatgatggaagttcagagaacttaaatactccgagaaataatattattagaaaccgatcgaccgaagatctaagctttttagagcaaggataccagcatagatatatgataactggttccatcagaaggactaaggtagacgtattaaacaggatactgtggaggttgttacgtggtaacttaatctttcaaaattttccaatagaggtgccgttgttggaaggcaaagaaaaggtggagaaggactgcttcatcgttttcactcatggtgaaacactgctgaagaaggttaaacgtgttatagattctttgaatggtaaaattgtttctatgaatacacgttccagtgaattagttgaaactttaaacaaccaaatcgatgatctacaaagaattgttgatacaacagagcaaactttacacacagaactgcttgtcatccatgaccaattgcccacatgggctgccatgatgaaaagagaaacatacgtttataccacgttgaacaaattccagcaagaatctcaaggtctaatagcagaaggctgggtaccttctacggaattagttcatttacaaaactcgttaaaggattacatcgaaacattgggttctgaatacagtactgtcttcaatgtgatcataaccaataaactgccaccaacatatcacagaacaaataaattcacccaggcgttccaatcgatcgttgatgcatatggtattgctacctataaagaaatcaatcccggtttagccactgtagttacttttcccttcatgtttgccatcatgtttggtgatttgggccatggtttaattttatttttgattgcgttgtttttagtgctaaatgaacgtaaattcggggcgatgcgtagagatgaaatttttgacatggcatacactggtagatatgttttgctgttaatgggtgcattttctgtatatacagggctattgtacaacgatatcttttcgaagtctatgacgttattcaaatctggttggcaatggccccacacctttaggaaaggtgaatctattgaggcgaaaaagattggagtttatccaatagggttagactatgcatggcacggtaccgataatggattacttttttctaactcttataagatgaaactgtcgattttaatggggtatgcacatatgacgtattccttcatgttttcttacatcaactacaaatcaaaaaattctaaagtggacataattgggaatttcatccctggattagtattcatgcagtcgatatttggttatttgtcatgggctattgtgtataaatggtcgaaggactggatcaaggatgacaagcctgctccaggtctactgaatatgctaatcaatatgtttttggcaccaggaacaattgatgatcattatttcctggacaagccaagttacaagttgtactattgcttgcggcgctggtttgcgttccatggttgttgttatataaaccgttaa

SEQ ID NO: 4900 - DNA, 984 bp, Saccharomyces pastorianus
atgtacactattgcaaacagcatccggaccggaactcgccgcatgacatcaattgaagacatcatatcaaacccgcccctgctgctgcactcttcactgtcgcagctccgctacctcgtacttagcgaagggctccccatatccgaagacaaacagcagcagcgtacacgatgctacgtgtggacggtgctctcccaaacgtccatggagacctcaacgcagcggtaccttgcgctcttaaagctgggtccgccctccacgaccatataccagaaaatcaagaacgacacttccaggacttttcaaaccgacccgaatttcaggaatagagtctcggaagacgctctcatacgctgcctatcgtgctttgcctggcagacccagcaaagaaggcggaaggcccagttcaacgaatcctcctccaagacaacccgcattccggtgagcacctacgttcagggtatgaacgtgctgctggcccccatactctattcgtgcccgtccgagccgatggcataccagctgttctccaagctgtgttacgagataataccgacctacttgaccaagaacttgaacggcgctcagaatggcgctaagctacttgacgtttccctcaggatcatcgacccgaaactgagcaaattcctatcggacaacttacttaccgccgagatttacggaatgccctccatactcacgctttccagttgcaataaaccgctagaccaggtcattaaactctgggacttcatgttcgcgtacgggttccacatgaacatcctgtttgttgtagcgttcctggtgaaaatgagatccaaggttttcaggtcggactctcccgtaaacttattacgacagttcccggatttcgatgctgatgagatcatccgactgggggtggggtttattgccaagattcctgctcagatttacgatctgctggtggaccatttaactgacccggacatatatataccttag

SEQ ID NO: 4901 - DNA, 195 bp, Saccharomyces pastorianus
atgatgatgacctcagggcaggccgttaagtacgacggcgccatggactgtatgaggaaaatcgttcagcaagagggcgtctactcgctgtttaagggttgcggcgccaacatcttcagaggcgtggccgcggccggtgttatctcgctgtatgaccagttgcagctggtcatgttcggcaaaaaattcaagtaa

SEQ ID NO: 4902 - DNA, 465 bp, Saccharomyces pastorianus
atgtctcaaacggaaccgcagactcagaagtcgcatttcggcgtggacttcctcatgggcggcgtttctgctgccattgcgaagacgggagctgcccccatcgaacgggtaaagctgttgatgcagaaccaggaggagatgctgaagcaggggtcgctggactcgcggtacctgggcatcgcggagtgctttaagaggactgccgcacatgagggcattctgtcgttctggaggggtaacacggccaatgtgcttcggtacttccccacgcaggcgctgaatttcgcgttcaaggataagatcaagtcgctgttgagttatgacagggaccgggatggttacgccaagtggtttgccggtaatctgttttcaggcggggccgcgggcggtttgtcgctgatgtttgtgtattcgctggactatgctaggacaaggcttgctgcggatgctagaggggttcgaagt

SEQ ID NO: 4903 - DNA, 1749 bp, Saccharomyces pastorianus
atgccggacatcaccatcgacaagggcgaccgtgtccagctgtacctgaccaacgggatgaacaacaccaacacctcgttgcatttccacggtatcttccagaacgggaccaactcgatggatggtgtgcctttcttgacgcagtgccccattgctcctggcagcaccatgctttacaacttcaccgttgacgacaacgccggaacctactggtaccattcgcacacggacggtcagtacgaagacggtatgaagggtcttttcattatcaatgacagagaaaacttcccctacgactacgaccaggaactttctttgtcgctgagtgagtggtaccacgatttggtcaccgacttgaccaagtcgtttttgagtgtctacaatccgaccggtgctgaacctatcccgcagaatttgattgtgaacaacacgatgaacctgacatgggacgtccagccggataccacgtatcttttgagaattgtcaatgtcggtgggttcgtgtcacagtacttctggatcgaagaccataacatgactgtggtcgagatcgacggtatcatcactgaaaaaaacgtgacggacatgctttacattactgtcgctcaaagatacactgtcttggttcacacgaaaaatgacaccgacaagaactttgccatcatgcagaagttcgatgacaccatgctggatgtcattccaaaggacctgcaattaaacgctacgtcctacatggtctacaacaagtctgccccattgcctgagcaaaactacgtagactctgtcgacaacttcttagacgatttctacttgcaaccatacgaaaagcaggccatcttgggtgagccagaccatgtcattactgtcgacgtggtcatggataacttgaaaaacggtgtgaattacgccttcttcaacaacattacctataccacaccaaaggtccctacattgatgaccgttttgtcttcaggtgaccaagccaacaactcggaaatttatggtacaaacacacacactttcatcttggaaaaggacgaaattgtcgagcttgtgctaaataatcaggacaccggtacccatcccttccatttgcacggtcacgttttccagaccatccaaagagatcgtacatacgacgatgctttgggtgaagttcctcacagtttcgacgcagatgaccaccctgacttccctgaatacccaatgagaagagatactttgtacgtcagaccacaatccaatttcgtcctgagattcaaagccgacaaccctggtgtttggttcttccattgtcatatcgaatggcatttgttgcaaggtttaggccttgtccttgtggaagatccgtttggtatccaagatgctcactctcaacaaatcagtgaaaaccatttggaagtctgcaagagttgttccgtgagtactgaaggtaatgctgctgccaacacacaagatttaaccgacttgactggtcaaaatgtccaacacggcactattccttctgggttcaccaaaaagggtattatcgctatgacattctcttgtttcgctggtatcttgggtattatcacgattgccatctatggtatgatggatatggaagatgctactgaaaaggtcattcgtgacctgcgtgtcagccctgaagtcttgatggacgatgatgatgaagaacgccaaataaatgaagaccgtcattctactgaaaagcatcaattcttgactaaagttaaaggtttcttttaa

SEQ ID NO: 4904 - DNA, 336 bp, Saccharomyces pastorianus
atgtggacagaagtggaacttttgcaagacgttttaccatggaaggaaaataccttaagtttactcaaaggacgtcctccacataaattaagcaatgatacagaagacacagtaggtgatcatggcatgtccccagtacagcagacagagtttattttgcccatcaatatgtctcagtacaaggaaaactttcttacgctggagtgcttgagccaagtctttacacaattatgcgattcagtcactgagaggatacttttggccatcattaacgatgatggtacgattgtttattactttgtttataaaggggtacgaaaaccgaaaaggaattga

SEQ ID NO: 4905 - DNA, 300 bp, Saccharomyces pastorianus
atgtacaatgagaaagaagacagttacctttcttccggaaagcagaacagtgactacggctcctctaatataaatccatcagaaagaaaaagatcaatggaggaatccggaaataatgggaacttttctaataagaaattcaagaggggctcagaactaccagcagaagttcttgatttattgagtgtcatacctaaacgccaatattttaacactaatttgctagatgcacaaaagttagttaacttcttgaatgatcaagtagaaatcccagcaaccaatggcaccaaatcaggttaa

SEQ ID NO: 4906 - DNA, 1935 bp, Saccharomyces pastorianus
  modified_base (1886)..(1886): a, c, g, t, unknown, or other
  modified_base (1898)..(1899): a, c, g, t, unknown, or other
  modified_base (1909)..(1910): a, c, g, t, unknown, or other
  modified_base (1932)..(1932): a, c, g, t, unknown, or other
atgtctagttccacaacccctgatatattaagcccttctgtggacaaagccgtagtgcccagtgataatatacacgcagaagaattacgatttagagaaaaaattaaagaaaaccgtgctgacatcctatcatacttccaactcattcaatatttggaatctcaggagtcatacgctcaggtgagagatgtttacgaggaatttcataccacgtttccattttattcgcctgcgtggaccttacaattgaaaggtgaattggcaagagatgaatttgagacagttgagaaaatcttagcgcaatgtctttctggtaaattagaaaacaatgacttatctctttggtcaacatatttggactacatacgtagaaaaaacaacttgatcactggtgggcaagaagcgagagccattattgtcaaggcgttccaattagttatgcaaaagtgtgcagtttttgaacctaaatcatcatcgttttggaatgagtatctcagcttcctggaacagtggaaaccattcaacaaatgggaggagcaacagagaattgacatgttgagagaattttacaaaaagatgttatgtgttcctttcgataatctagaaaaaatgtggaacaggtacactcaatgggaacaagaagtaaactctctaacagcaagaaagtttattggtgagttatcggccgaatatatgaaagctcgctctttatatcaagaatggttaaatattaccaacggactgaaaagggcatctccaattaatctacggacagctaacaaaaaaaacataccacaaccaggtacgtctgatatgaacattaaacaattgcagatttggctagaatggataaaatgggaaaaggagaataagctgatgcttagtgaagatgtgttaacagaaagaatttattatgtctataaacaaggtattcaatacatggtattttctgcagaaatgtggtacgattactcaatgtatatatccgggaattcggatcgacaaaatatcctatatactgcgttattagctaaccccgactccccttctcttacatttaaattatcagaatgttatgaattggataatgattctgagagcgtttcaaactgctttgacaaatgtactcaaaccctgctagcacaatacaaaaataccacctccaatgtagatacaagtgacgatgataaaaatcctatcacagagcatgaacaagatctggtatacagacaaagagaaaaactaacgtttgtgttttgcgtttatatgaatacaatgaaaagaatatcaggcctatcctctgcacgctccgtatttggtaaatgtcgtaaactaaagcgtatattaacacatgacgtatacgtggaaaatgcatatctagaatttcaaaatcaaaacgattataaaacagcttttaaagttttggaactgggtctaaaatatttccaaaatgatggagtttatatcaacaaatacttagattttttaatatttttaaataaggactcacaaattaaaaccttatttgaaacatccgttgaaaaagttcaagatttgatccagttgaaagcaatttacaaaaaaatgataagctatgaatccaagtttggtaatttaaacaatgtttattcattggaaaaaagattttttgaaagattccctcaagaaaacttaattgaagtttttacaaatcgttatcaaattcaaaattcaaatctattaaaaaagctggaattaacctacatgtacaatgagaaagaagacagttacctttcttccggaaagcagaacagtgactacggctcctctaatataaatccatcagaaagaaaaagatcaatggaggaatccggaaataatgggacttttctaataagaaaattcanagagggggctcnnagaactaccnnagcagaagttcttgaatttatntga

SEQ ID NO: 4907 - DNA, 2772 bp, Saccharomyces pastorianus
atgtatatatatatgaactatgctagcaaaggcctcatgttacaatgggtagggtcgtacgatattcgaccacgcatgcttaaatatactcgatcacttcgcaccagtgctttggtaataaattctcaagtacgcttttacagagcaaagcgagcatcactgaagtctattcctcatatacctggaattataaacaagaacgttgtggaaccaaatgaaccggaaaaaatcctcactttgaaaggggaaacgcctgaggatgtcgagcgtaatttaattgctagcaaaaaattccaagagatcaacccattagacactattcaagaaacctttgtacaatatttgaaattctacaatggaaatacgtttaagagaagtaacaaaaacttaacaactttaaaaataaatctagaaaataaagacctggatactaccgcaaagatccgttcaatttttgactatttgttggaggaatgtgacctagaaataaagagatcaagtacaactggaataagtcagaaatccgatgaatcacaaaaaaatgaagaggacttggaagagtccataatgaatgacattttccaagcaacgcaggaagaagtcgaaactgaggagggaagcatatgtctaaagagtacaaattttttgcttgagattttaaaaagttttaacgaacggtttaacggcgttattaaaccaaaggaatcagtgacagaaatgattacattcgaccagcttgctcaggcttttgaagtcgtcaaattgataccggtggaaggaaagaagcaacgaggtatatacttagttggcaatttactatatggcactggtaaggttcgtttggatcctataaacgagtccttctatatcgaatccctattgtcatttggaaactacaagaaggcgtataacttattcattaccgctaaagacaaagtagatgaacggtggtggaatgaattaggactaatgatcgcgttaaggtccaaccatttgagaaactttaaaagacttttgattgagacagatatgaagtacccaacagcgcactcttacttaagtccaagagttattaaactgggggtacgaaaatatttatcgatcggtaacgttaatgaggcaaatgcattgactgatcgatttatcagattggcagaagaagtcggggttacgagaatgaacaatcagcaaatggagctcacaaaaaagtccagaaattttcaaaatgaggaacaggcgactcagtttttaaatgaattagaaataccatcagaccacgattatattagtattattgatttccatctttacaaaaaaaatatttctaaagccgcacaacttattagcagattcatggacatacctgacacgacacaagaaaacgtcacgtttttgattttgaagacaaaattaaatatgttaaaggattttgaaaatctgcgtaacatatttgaacacaatggaggttacgaaatatccacaaacaacctcaaaatattggaagaagcgtttgaaagtgtgattgcaaagtacaacactaaaaatccaatattcagtgacttgttgttcgacaatgtttctgctttaacgaaaagtattatattagcggatttcgtggaaagttttgtagcccagcataattctggagaatggatgaagcttgacagcgtttcacgttccaagaaattcaatggcttgttgaacattcttttaggtatgggacaagaagaaaaagcctacagcatcttaaggaagttagaagaatcgtcaaataaagcaaaagaggacccaaagttactttatagccaattttattctgaggttaacgcgtatcattatgctaaatttgttgaattttacagtctccaaatccaaaatatgaaatcacagaaaagattcttacttgacaaaaaggaatgtaaggaaaaagtgaatgcacttctaaaaagaatgcaggagttagaggttgttccaaacgcagtatttttgagagaaacacttgccttttatgatcgactatatgatttcaattcaagcttcgagattataaacccattactagagtccaagcaaagtgtaagttccgaatcttcgttatccgcttcagatccttcccacttttataaccgtcgtatcattacaaaaccgttatactatgagatttggtcagtttattgtcattattaccatatcctacaaaacaactctaatatattatcgaaaaaatcatccattgtgaaaaaattaatcaagaagcagataaaaatacatcccagttgtcatccaagaactttgtttcaaatgatgacgtgcgagggtgaaattttaccggataaagctttttataaattaataatttccacgtttatgaaaagcgaagactttgaagccattccagctatattgacaactctcacgaaaaagcatgatttggatatcgattatgattttagtgtatatatatcaaagggcttgaaaagacaatatctacgaaacataagcaatgctagcaaagatgcttatgactataaaaaccgaaagatgaaactgatgaataacgagtcgctcctgaaaagaattccacaaggcataaataaagatatgatgatatctcacttgataagggaaattttgatttatatcaagtggaaagaagatagcgattattgtagctttttgatggtggaagatgcctttagggaattaggcgctgagtctattttattgaaggagctgatcgaagatgtgaataaaataaagataaatgtctga

SEQ ID NO: 4908 - DNA, 561 bp, Saccharomyces pastorianus
atgaatatcaacccggcacagcctctgcatctccctcccggttggaaaataaacaccatgccgcaaccgcatccagcagctgcttccaaccacgcacctctaccgcctcagccgcaaaaccccgtggctcccaacgccatgccggcgccttcgtccgaccaaaaatacatccatcaatgccagttttgcgaaaaatcgttcaagagaaaatcgtggctgaaaagacatctactgtcgcattctcaacagagacatttcctgtgtccatggtgcttgagcagacaaaagaggaaagacaacctcttacagcacatgaaactcaagcacacgaactatttattggatgaattgaagaaaaacaacattatcttcaactacaacaattccaccactaccagtaataacgccagcagtggtagcggtagcgcggcggtggccccggggactgaagacggcaacagcttcgatccgaacatcaagactttaatcaatgatggcgtactgaacaaggacgacgttaagcgtgttttgaataaccttattgtcagtcataacaaatag

SEQ ID NO: 4909 - DNA, 474 bp, Saccharomyces pastorianus
atgcctcccagctcaggagcaagcgtgtgtttagttatggatccggagttgcaagccattagagaggccaggctggcccaattaaaaagcaatggtggcggcgccaatggcgacagaaatggcggtgctagtaacaacggaggtgacaattctgctcctgtaggtgcagctattgctagcttcttagagcctcaagctttggagaggttgtcccgcgtggcgttggttcgtagagatagggcccaggcggtggaggcatatctaaagaaattgattggcacgaacaatgtcacccataaaatcacagagaatgaaattgtctcaatattgaatggtatcgccaagcaacaaaactcgcaaagtaacaataagattatttttgaacggaagaatttcaacgaggacctaaattcgttcgacaagcccaatgccaagaatgactgcgatgaagatgatgacgatttctttgattag

SEQ ID NO: 4910 - DNA, 822 bp, Saccharomyces pastorianus
atggattcagatacgggtaggttcttgatttgttacaaatgtaatcaaacaagattaggatcatggtctcatcctgaaaatgcaagattaataatgacatgcgattattgccaaactccgtggcatttggattgtatacctagagcttctttcaaaaacctaggctcaaaatggcaatgcccattacattctccgactaaggtttgcaaaaaaatacactaccatcaagaagacgataattcaaattacaaggtttggaaaaagcagcgttcaataaataagaaaaatcaaatttattatcaaccgttgcaaaaaattgggtgccagaatgacggcaacatccaaattatgccaactattagtaataccgactacagttacaaccgagatttcaaaatcactcaaatagacgaaaattccatcaagtatgatttttttgataaaatttacaagtcgaaaatggtccaaaaaagaaaacttttccaatttcaggaggacttaattgataaattagtatcaaatgcatcacaaaatggcaatacccaagataataaaatcaaggatattgcctcattaatatacttccaaataagtaacgacaataataacagcaaaccagctgaaaaaaaaaataatctacaaaaactatgggaccttaaggaactgtcaaatgtagtggtaccaaacgaactaaattccatgcaattcaacgacttttccagtgatgatatcagaaatttactgtgtctgaaaaagattattgaatccaaaccaaaggatgaactcttaaaatttttagacatgaaagatccagacaactga

SEQ ID NO: 4911 - DNA, 471 bp, Saccharomyces pastorianus
atggacagcggcactgccaccactgtcaacagcaatatgatggataccaacaagaaggatgccagcaagtcgccttcacattgcgacagttcgtcgccctcagcatcttctctatcttcgacttcctccaaagagaaaaagcgtcctaagagacagtcctctcagaatgttaattatgatttgaagaggaggaaaatcattacttgtgacggtacagaaacgacgtttaaacaccagcacgataaccttttacttgaggacggtattatagaggaagaacctaaggaccttttggaaaaagattctaaaggtaatataatcaaactaaatgaaccctccaccactatggaggattcaaagacctccattactggattgccgttaaataaaggcccctctgaaaaaattaaacgagagtctctttggaactataaaaaaatgtgggaggccaatcaaataattcggaactaa

SEQ ID NO: 4912 - DNA, 315 bp, Saccharomyces pastorianus
atgtctaaaaattttaagagttcatcctttggtttggattcaataatctttttcagacacagtaaatttctgatatcatcactggaaaagtcgttgaattgcatggaatttagttcgtttggtaccactacatttgacagttccttaaggtcccatagtttttgtagattattttttttttcagctggtttgctgttattattgtcgttacttatttggaagtatattaatgaggcaatatccttgattttattatcttgggtattgccattttgtgatgcatttgatactaatttatcaattaagtcctcctga

SEQ ID NO: 4913 - DNA, 693 bp, Saccharomyces pastorianus
atgtttgaaaactgtgaaaaatggaggaaggattacggtacagacactatcttacaagattttcactacgaagaaaagccattgattgccaagttttacccacaatactaccacaagacagacaaagatggccgtccagtatattttgaagagttaggtgctgttaacttgcatgaaatgaataaggttacatctgaagagcgcatgctgaagaacttggtgtgggaatacgaatctgttgtcaatttcagattacctgcttgttcaagagctgctggccacctggtagagacttcatgtacgattatggatttgaaaggtatctctatttctagtgcatacagcgtcatgtcatacgtcagggaagcctcctacatcagtcaaaactattacccagaacgtatgggtaaattttacattattaatgctccatttggtttctctaccgcatttagattatttaagcctttcttggatcctgttaccgtttcaaagatctttattttaagctcatcttaccaaaaggaattattaaagcagattccagccgaaaacttgcctgtcaaatttggtggtaagtccgaagttaatgagtccacgggtgggttatacttatccgatatcggtccatggagagatccaaaatacattggaccagaaggtgaagctccggaagcgttttcgttgaaatga

SEQ ID NO: 4914 - DNA, 858 bp, Saccharomyces pastorianus
atgaggatgacaggttctcttagtggtgagtccttactgcatggagtaaaaagaatgagaataatattatgtgatacgaatgaagtagttaccaatctatggcgggaatcgataccccaggcatatatccaaaatgacagatatctctgcattcatcacgggcacctccagtccctcatgacttcgatgcgaaaaggtgacaaaacccaccacggtcactcgtatgcaattgtttcaccaggaaattcattcggctatctgggaggggggtttgataaagctctgtataattatttcggtggaaagccctttgagacatggttcagaaaacagcttgaaaatagataccatactgttggatctgcaacagtagttgatttacaacaatgcttagaagaaaaaaccatcaaatgtagggatggtataaggtatatcattcacgtcccgacagttgttgccccatcagctcctatatttgattcgacaaatcctcttaatacaggatttgagcctgttttcaacgcaatgtggaatgctttgatgcatgctccaaacggaattgatggtcttattatccctgggttatgcaccgggtatgcaggcgtaccacccgctattagttgtaaaagtatggcatttgcattaaggctttatttaatgggggatcttatgagcaaggaactaaagaatgtactcattatgtattatttacgatacccattccaacccttcttccccgaaagttgcaaaatagaatgccaaaaactagacatagatcttgaaaagttgaagtcatttgatgtagaaaaggatgctctagaagcgattattcctcgaaaaaaaaattcagatgtataa

SEQ ID NO: 4915 - DNA, 1617 bp, Saccharomyces pastorianus
atgatgctcatcactgagtttagcccttgcaaaacagcttcttggtacgatcacaagcgtagcagcaatcacaacatgtctacagccagacctagaataatcacttcgaaggctccgctattgcctcaacaaactaccccggaacagcgttactggcgtcaatacacctctgcacaattagtcaaagaacataatagtgttactcacatatctttcaatcctcaacaccctcacgattttgcagtgacctcatccactagagtccagatattttcctccagaactagacaagtgatcaagacattctcaagatttaaagatgtcgtttattctgcatcctttagaaatgatggtaagttgctatgtgccggtgatgctaccggtttagtgtctgtatatgatagctataatccaaggaccattcttctatctataaacgcatccacacaccctactcatgtcacaaagtttcacacacaagataataaagttttagccacggcaagtgatgatagagttaccagactttgggatatatctcacgcatacgaaccacaattggagcttaccggagctactgattacgttcgtacattatctttcattcctgctgctccacatttggttgctacagggtcttacgatggtttgattagattatatgacacaagatccagcggatccactccaatctattctttgaaccacgatcaacctattgaggacatcactgcagtttctccaactcaaatcgtctcgtgtggtggcaataacttcaaagtatgggacttgactagtaacaaaaaattatatgaacgtgggaatttcaacaaagcagttacatgtttggactacgtagagaattttgattctccaatgcaatctgcgttgatcgcttcttcactagatgggcatgtcaaggtatttgatccattagacaatttccaagtcaagtttggttggaaattttcaggtcctgtattaagctgtgccgtttctcctagtacggcccaaggaaataggcatctagtggctggtctatcatctggtctactagccatcagaaccaaaaagaaagaaaagcgagaatccaataaagaaattgcactaaccacatccaatacaaatgctaagagtaataacttccaaagaatgatgcgtggttcagaataccaaggtgatcaagaacatataatccacaacgataaggtaagatcccaacgtcgtatgcgtgcattcgaaaggaacataaatcagttcaaatggagtgaagcattagatagcgcctttgtcccaggtatggctaaggagttaacacttactgttcttcaagaactacgtaagcgtgggaaaattcgtgtagcactatatggtagggatgaatcctctttagaaccactactgaattggtgcttgaagggaattgaagatgtaaggtcagcatctgtagtggcagattggatcgctgtagttttagaattatacggtaatacgctagaaacttcaccagtccttcaggaattgatgatagatttgaaaactaaagttagacatgaaattcacaaatccaaagaagctcaaagaattgaaggtatgcttcaacttttgacgagttaa

SEQ ID NO: 4916 - DNA, 660 bp, Saccharomyces pastorianus
atggaaagccaaaccgtttcgatgaaagttattggcgtactagcgttgcaaggtgcctttttggagcacgcaaaccatctaaaaaagtgcctggctgctaacgactatggagtagggatagacgtcaggatcataaagacacccgaggagctggccaagtgcgatgctctcattatccccggtggagagtccacctcgatgtcgctcatagctcaaaggacaggtctataccctcacctatacaagttcgttcacaatccagaaaaggtgatttggggtacttgcgcgggattgatctttctaagtgcgcagttagagaacgaaaatgctctagtgaagacgttaggtgtgttaaaagtcgacgtaagaagaaatgcatttggaagacaagcacagtcttttactaaagagtgtgacttttccaaattcatccctggctgcactgattttcccgccacctttattcgagcccccgttgtagaagaaattttggatcctattgcggttaaaagtttgtacgaattgccaatgaatgggaagaacgtggttgtagctgcacagcaagaccataacatccttgtgacttctttccatccagagctggctgagaacgacataagattccatgactggtttatcagacaattcgtttctatttga

SEQ ID NO: 4917 - DNA, 516 bp, Saccharomyces pastorianus
atgagggaaaaaattgcaaaagtggaagaaattacaaaacatgggggcgatttcacactatacatatgttttccatacacatcgagaaacgatatcttacatacgattcaaggttcagttcaagattgtttgcaaaataaatcacaaagcaaaatagatattaaaaagtttaccaacaagatgtacatggatttttactctaataagtgtgaattactgatcagaactagtggtcatagaagattgtccgattacatgttatggcaagtgcatgaaaatgccacaattgaattcagtgatacgttatggccaaactttagcttccttgccatgtatctaatgattctgaaatggtccttcttttgcacaattcaaagatataatgaaagaaaccatacattatttgaaagggtgtatgaaggtgtcccctcaatactaaaaagaaagaagacttctatatcattacatcaatttcctaatccacctatttctgtgtcaattacaggcgaagactag

SEQ ID NO: 4918 - DNA, 489 bp, Saccharomyces pastorianus
atgaaagtgcctagtgttattcaaattcaattcgtagcattaagaaggctcctggcagagaccaaggagcagttttgctttgccataaaaaacaaactccggagaatattcgggtggattatgtcgttcagtctgttttcatggctttatagaactattcaaaactttttgataaaagtattaagcgtagggccggtacctgagcatgtctcctttatcatggatggtaatcggaggtacgccaaatcacgaaagttgcccgtgaaaaaaggccatgaagcaggcggattaacattactaaccttactctatatatgcaaaaggcttggtgtaagatgtgtatctgcctatgcattttcaatagagaattttaatagaccaaaagaagaagtagataccctaatgaatttattcacgataaagctggacgagtttgcaaaaagggctaatgactataaagatccattatatggctacaagaaagtatag

SEQ ID NO: 4919 - DNA, 249 bp, Saccharomyces pastorianus
atgaaaccacattctgggagtagcagtggagccgtacctctccccccacagaatgtaatttctcctcagcctgttcaaaatactgaacagcagaacaatggcactccaacaagtgtttccccagcagctaaccaagcaagttttggtgatggtttggctaatgcactagctgcgagagcaaacaaaatgagactagagagcgatggggaggaaggtgctgatgatgacgaggaggaagacgattggtag

SEQ ID NO: 4920 - DNA, 3318 bp, Saccharomyces pastorianus
atggcaatcttaaagagaggggctagaaagaaagttcatcaggaaccagccaaacgttctgctaatatcaagaaagccacttttgattcttcgaagaagaaagaagttggtgtgtctgatttgacacttttatctaaaatatctgatgaagctatcaatgagaatttgaaaaaaagatttcagaatgccacgatctacacctatattggtcacgtgttgattagtgtcaatccattcagagatcttggaatatatacagatgctattatggatgaatataagggtaagaataggttagaagttccaccgcatgtattcgcaattgcagaatcaatgtattacaacatgaaatcttataatgaaaatcaatgtgttattatctcaggtgaatcaggtgccggaaaaactgaagcggctaagagaatcatgcaatatattgcagctgcttcaagcgctcacacagaatcaattgggaagatcaaggacatggttttggctaccaatcctttgttggaatccttcggctgtgcaaagaccttgaggaacaataactcttcaagacatggtaagtatctggaaattaagtttaacaatcaatttgaaccatgtgcaggtaatattaccaattatttgttggaaaagcaaagagtcgtgagccaaattaaaaatgaaagaaactttcacatattttatcagttcaccaaaggtgcttccgacgcttataggcaaacttttggtgtgcaaaaaccagaacaatatgtttacacagcggctgccggatgtatatcagctgatacaattgatgatttgcaagattatcaagaaacactaaaggctatgaaggtcatcggtctcggacaagaagaacaagatcaaatattcagaatgttggcggcaatcctttggattggtaatatatcttttattgaaaatgaagagggaaacgcacaagtcagagatacttctgtaactgattttgttgcttatttactacaaatagatggtcaattattggtcaagtcactagttgagagaattatggaaaccaatcacggtatgaaaagaggatctgtgtaccacgttccattaaatatcgttcaagcagatgcggtgagagatgctttagcaaaagctatttacaataacctatttgactggattgttggcagagttaacaaatctttacaagcgtttcctggagctgaaaaatccattggtattcttgatatttatggttttgaaattttcgaacataactctttcgagcaaatttgtatcaactatgttaacgaaaagctacaacaaatttttatccaattgacattgaaatctgaacaagaaacttatgaaagagaaaaaattcagtggactccaatcaaatacttcgataataaggttgtttgtgatttgattgaggccagaagacctcccggtatttttgccgcaatgaatgattctgttgcaacagcacatgctgattccaatgcagctgatcaagcttttgctcaacgtttaaacctgttcacaacaaatccacattttgaattaagatctagcaagtttgtgattaagcactatgccggtgacgtcacatatgatatcgatggtatcacagataaaaacaaagaccaattacaaaaagacttggtagaactacttggtactaccactaatacatttgtagccacaattttcccagataacgttgataaagagtctaaaagaagaccaccgacagcaggcgataaaattataaaaagtgcaaatgagttagttgaaactttgtcaaaagcacagccttcttacatcagaacaattaagccaaacgaaacgaaatcccctaatgattatgatgaccgccaagtccttcaccagatcaaatacttaggtttgcaagagaacgtacgtatcagaagagcgggcttcgcatataggcaagtatttgaaaagttcgtagaaagattttatttattatctccgcactgttcttacgccggtgactatacatggcaaggtgatacgttagacgctgttaaatacattttacaagactcgtccattccacagcaagaatatcaattaggtgttacaagcgtctttatcaaaacacctgaaaccctatttgctttggagcatatgagggacaaatactggtataatatggctgccagaattcagcatgcttggagaaggtttctacaaaggagaattgatgccgctattaagattcaacgtactatcagagaaagaaaagaaggcaataagtatgaaaaacttcgtgattatggtacgaaagtcctgggtggaaggaaggaaagaagatccatgtctttgttaggttacagagccttcatgggtgattacctatcgtgcaatgaatccaaatccaaaggtgcgtacataaaaaggcaagtaggtattaaagagaggattgttttttctatacacggtgaagccttgcatacaaagtttggccgttctgcacaaagattaaaaaagtccttcttactatctccaaccacattttacattgtaggccagactttagttcagaatgctatgacttatacccaagattataaaattgacgtacggagtattcaagcggtcagtttgacgaatttacaggacggatggatcggtattaacatgaccaactcggctcaacctgacccattgatcaacacgtatttcaaaacagaactaataacacatctaaaaaaacttaaccataaaattcaggttaaaataggcccaacacttgagtaccaaaagaaacctggaaaattacatttagttaaatgccaagtcagtgaatcagctcccaaatacagcgacatatataaatctagcactatatctgttcgtcgtggtaaccccccaaattctcaagtacataaaaaaccgagaaataagagctcaatttctccagtgtatcgtactagtccctcggaatcaacgaaaagaactgcctcgagagttcccgcacaagcccaacgagttcctactgctccaacttcgagaaactccaaaaaacctgctccaccgccaccgggaatgcagagcagaggtaatgtgaaaagctccggttcagctcctgctccaactcagagaagtactgctgcacctgctgctatagttcaaaccaataggcagaccagcgtgccttccccacctcctccacctccaccggcttcaaaaccaaaggaacctatgtttgaggcagcctatgactttccgggttcaggctcaccatctgagctacctttgaagaaaggcgatgtagtttacattacaagggaagagccaagcggatga

SEQ ID NO: 4921 - DNA, 381 bp, Saccharomyces pastorianus
atggacagtgagaagagacgaggaaacacagccatgcagccaccatatgtgcagaagcgtttgaagtcgttaaatgaagtggaaagtcaactgtgctctatgttgcaagaggcgtcgcaggtgactttcatatttggtgaattgaaacgtggtaatgaatctgtaaaaccgcaatttgagaatcatgtaaaacagttttacgaattactagacaaatcaactacgcagttgcgcaaggaaataaagctcttggacgaaaacgttggaacaagactactacccattaacgttaacaagaaggccctaggtcaagatactgaaaaaatggaggagcagctagatttactatctgtaatactggacccttctcagtccaaataa

SEQ ID NO: 4922 - DNA, 300 bp, Saccharomyces pastorianus
atgttgtggaacttggctgctaagaaggctatgtacactttgtctgctcaagacgaagtcttctctttggctttctctccaaacagatattggttagctgccgctactgccaccggtatcaaggtcttctctttggacccacaatacttggtcgatgacttgagaccagaatttgctggttacagcaaggccgctgaaccacatgccgtttctttggcttggtctgctgacggtcaaactttgtttgctggttacaccgacaacgtcatcagagtttggcaagttatgactgctaactaa

SEQ ID NO: 4923 - DNA, 585 bp, Saccharomyces pastorianus
atggcatctaacgaagttttagtattgagaggtaccttagaaggtcacaacggatgggtcacatccttggctacttctgctggtcaaccaaacttattgttgtccgcttcccgtgataagactttgatctcctggaagttgactggtgacgaccaaaaattcggtgtcccagttagatctttcaagggtcacagtcacatcgttcaagactgtactttgactgctgacggtgcttacgctttgtctgcttcttgggacaagaccttgagattatgggatgttgctaccggtgaaacttaccaaagattcgttggtcacaagtccgatgttatgtccgttgacattgacaagaaggcttccatgatcatctctggttcccgtgacaagaccatcaaggtctggactatcaagggtcaatgtttggctactttgttgggtcacaacgactgggtttcccaagtcagagttgttccaaacgaaaaggctgacgatgactctgtcaccatcatctctgccggtaacgacaagatggttaaggtatgtgatatttttttttctatttttttccatggtaaattaagataa

SEQ ID NO: 4924 - DNA, 489 bp, Saccharomyces pastorianus
atgctcgagtggaggaaaattgtagaaaaggtcttctcttttggcatatatatggaacaaagatctttcatagctcggttcagaaaactgcaagcaaggtacattgaaacaccgttgagaatggctagttttttcgtcaagttatgggagagtgtgtttgaaccagggaccaccccacagttggtcatcgccacacacgcttctttcgttgcattgctgttgaccttgatgtggcttatttacgccacgcacggcaacattcacttctacgttctgttcggcatttctcttttgctctggatcactgttatctggttcattagcgaactatccttggtcaagttgaaagataacgatgaactggataaagttgccaacgaaaagaacgaaaccgaagcaacgaacgacactgataacaagcaagaaagcgggaacaccactggcagttccagatccgttcaaacgcattccaggtcgagaaaggcatag

SEQ ID NO: 4925 - DNA, 1833 bp, Saccharomyces pastorianus
atggtagagcttattcaggttgccttgccaaacgtcaagaaagcattagtcaataacatggagcaactgaatgaattgtttcctgattggaaccatttgttaactcctcaaactggtgatgaaggatttaatgacgccttgacgcttccaacagtaggacagttaaaaacttcgttacgtctggacaaaggtttcggttctgttgatagcatgtggaggactccaaggcatgctttccacgtatacttaccaaattctgctggtaactttgaaaccgtagtctccatcaatacatatgctggccaattattcaacgatatcattatcgatttagtagaaagtttggaatttaatagaaaggaagtggcaagacaagtaataactttggacctattctttaaagccggtatatttaccgaacctggtgaatctattgctcaattaatcgccacttacgaagaaaatccattagctcctacgttcaagatagaagatttggctattgaaactattttaggtcttattttcaaattacctagtgtttcccaacctttcgcgtacttttacactctgttagttgatatctgccaaaattctccaaaggcaattgcacctgtttttggtagagcattcaggttcttttataatcatttggattcattggactttgaactaaaattaagatacctggactggttttcaattcaaatgagtaatttcaatttctcttggaaatggaatgaatgggaagaagactccagtaaattcggcaagtatttttataatccaaaggtgaacttcgccaagaatctgatccaaaaggagctacggttgacttcaaacttctctgaagtggaggacagtttaccacaagaattcaagaaatatctggatacttcttacatcccaagggacgaattagtcaactattaccagtcactatttaatggttacaccgtggaaaaagaatcaattcgaaagaacgatttatatttcagacaagaaggtgtgcctatggaaaatactgtgcgtaaattattagattatacacataaagcaaatgattccagagaaatcactgaactagaaagtattctagaagagttaaagaatgagcatggttccataatttccgatttcaataaatttgtcataatattattagttcacgctgtggcagattctggtagtaggtctctatcgcacgcaaacaagtatattaatgatttgagagaagatctgaagaccatatttgacaagattgaattggatgctgaaacgaaagaatacatcataattgaagctgttctgacattctggaattctaatcctcaaacgggtttcctggtggcagacgccttcaaatatgcaggtttgattacttccaaaaccatttttacatttattttcaacgagactgatttgaaaaataacggtttggttgaagccactgctatcgaagctgtctttagaaacttatctcaacaaatttctgaagaaaacgaaagtggaaataattttgagtttgttttcgaaagattgtgtacaattgtcaacaacacaacagatttattgggtgtcactaataatgatgaaattgaaacgccaaatgtgaacaatgagatggatatcgacgatattgaagacgacaagttagatttgaaatggaagtatgttacagcaattgggttcgttaaaagtatattaagaagatattcctatgaataccgtaaactagcggatagattcattagcggcattgacaatgctattccacatgaaccaacaaagaaaacggttttaaactggatacaagaaacgagggaaatctaa

SEQ ID NO: 4926 - DNA, 819 bp, Saccharomyces pastorianus
atgagactgccaattttttgtcaattggtacggtgcgcgacagaaatgtttacttttgtggcactgagaagaggagaaagtaagagtgtttgctggataaataaccagaaatgtgttttatttattttactttcttcgctttgtttgttttgcatgataatcaatatttacctgatctatttaattgtgaatccatttcttcaagaacccgttctttcaaatttattcaaattactaacatacccaaattcaacatctttgcatatgattttacctttagactttgatgaagaagaaaattaccgtgattttaggcctcgcatgcctaagagacaaagaattcctcccgttgttcaattatgtaaggaaatgatgcccgatattcgtactattggggaatctgtaaaagcttttgaagacgatatcaaattcttaagtgaagccataatgaatgaatacggccatgaagactatttcaatgacgccttattgagtacttttaacgctgttgttgtggagcaaccacaaaagcaagctgccgttgctttgttaaccatggtcgtaaattcaaaaaataacgttgctgggaaaagtatcatcaattactttttcgaagagttacagaaatggtgtaaagaaacatttaatgaggagtttaacaatacttcaaatgaaactgggccatggaataagatcaaattgattttaagattcttatctattttgtcaccaatgtttttagttgatgaactgattaatatctacaaaaaactatttgaattgagtattgaattgtacaacctagatcgacggccgatt

SEQ ID NO: 4927 - DNA, 1887 bp, Saccharomyces pastorianus
atggtaaaaaggctgagaaaagaatttccattcaaaaagaattctaagcacagtaaagaattagaaaccgccatttcaaaagtgggtattagttcgaagacaaccgatttagaagctgaggatatagactttagtgtccaagtcattgatgaggataaatttaagagttcaattgagtacgaagaaggcgaaaacgaggaagaggaggaagaggaagaagaagggtttgaagagacattggctgaaggtcaaacagcaaatgatcccctttacgtgcttccactttattctcttttgtcaactaaggaacaaatgagagtgtttcaacagcctccgaaaggttctagactctgtatcgtggcaacaaacgttgcagaaacctcgttaaccattcctggagtgagatatgttgttgattgtgggagatgtaaggaacgtaaatttaatgaatcgaatggcgttcaaagttttgaagttgcttgggtaagtaaagcgagtgccaatcaaagaagtggtagagcgggtcgtaccgggcctggtcattgttatcgtttatattcttctgctgtttttgaacaggatttcgaacaattttccaaacccgaaattttaagaatgcctgtggagagcatcgttttacaaatgaaaagtatggccattcataacatcgtcaactttccattcccaactcctccagacagaggggctctttctaaagccgtgcaattgctacaatatctcggagcgcttgacaataaagaaaagatcagcgaagacggtaagaagatgagtctattcccactttcgcccagattttcgaagatgttgcttgtttctgatgaaaaagcctgcctcccttacattgttgctattgttagtgcattgtcagtgggagatccttttatcaatgagttcgaattaggaataaacgaaatttctagaaaaccaaaagaaaatgaggacatagatgaaaatgataaaaaaccagatgaacccataccagatatggaccccgaagttaaaaaggaattgcgtagcaaattttacaaaagcagggcacagtttagtaagttagacaaatacagtgatatattccgtttgctaagtgttgtaagtgcgatggattatattccaagggaacaaaaagaaatattcatgaagaaaaatttcttgagaggtaaattgatggaagaaatagtcaaattgaggaaacaattgatgtacataattaagtctaagacatccaaagaaaatattgctgtagtaataagaaatgaagacttaaagagtgacattcctagcgccatccaaataaaattattgaaacaaatgatttgctcaggttttgtcgatcatgttgccataagagcagatgctctatttccggatgatgctacgataacgaacaggaccaccatgattaacattccgtacatccccgttttgtctacaaggacacccaatatcgaggactgcttcgtctatatccacccgacctcgatcttgaataacctgggagaaatgcccccaaaatacatgctttatcattcattgcacttaggtggaaataacaagacaagaatgaacaccttgtgtgatatcgcaagtacgccattagcaaatattgcaaggaagggtcttctcttgacgtacagtaaacctttaactggccaaggtttgaagacaataaacttatcacccacggagcgttactgttatgtggtccctaggtttggatctacagtgaacaatgatatcaagattggctgggatctgaatcctatagcagtgcaccaaaagaagcaaaacggccaatggacagtcgtcaattttattactaggaaaaactttcaaagcgccacaagcgaaaataagattgagaaataa

SEQ ID NO: 4928 - DNA, 1905 bp, Saccharomyces pastorianus
atgggtacttatagaaagaggttcaatgaaaaggccaggtctggccatatggctaaactcaaagaattgaagagagttagaaataagcaattcaccagacaggatgaaaatgaagaagaggtagaaacaccggattcagatccatctcaaaatgagaaactagatgcaaatgtgaatgcggaaattctcaagcctctcactgaagaagaaaagaagctcaaaaaaagaaaactacaggagttgtttacaccaaaagaatcaaaagtttcgagattaaaaaagaaaagactagataagtttattgatcatcagttgaaaagagaggaaaggaaaactatcattgacaaacttcaagactacaagatagatacaagtttgttaacaagttctaagaaactaggtgaaggtagacaaactcaaaaggaagagttcaaagaagcgctaagtctagaacgtcaaggcaggggaaatgaacaaactgaggaaatattgtacgaagagtttgaaccaaaagcttgggataagcacgatgaagaggaaagccacgacgatgatgaagatgatttcgaggataaatttggtagtatggtgaagccagaagacaatacttccgaaaagaacaaaccttccagctttattgaccacagaccagctaaattcggtggttccggtatcggttttggattcagcaacgtaaagattgtaaataaagaaaacaaagctccaaagaagaagtacaattggagacaacttgtagcgatggaagagctaaagaagcatgggaaagatgatgaaatggattttgacactacatcggaagaagaaggcgatgatgacgacgctgaaggagaagatgaggagcagaaggaaagtgaaagtgaacaggaagaaagcgaaggtgaacaacatcaagcggaaccagaggacgctgatcaaaagaaccctgcaaatcaattcaaagactgggctaatcaggagatcaaaaaaatggaaggcagaggtcaagaactggttactcctactttaaacatcgactacaagccgataatcagagaagaagatttagatgatggtctcaaagaaacccatattccaatagacgagaactccactcgtaaagccttctatgtcaaagtcaacagatcagacgaaattcagaaaacaagaatgcagctacctgtatttggtgaagagcatgcaattatggaagccattcatcataacgacgtagtaattatctgtggtgaaactgggtctggtaagactactcaggttccgcaatttttatatgaagccggttttggtgctggggaatctccagattacccaggaatggtcggtattacacagcccagaagagtggcagctgtgtctatggccgggcgtgtgaccaatgaattaggtgaccatggtaacaaggtggcataccaaataagattcgactccacaacgaaggaagagacaaagatcaagttcatgaccgatggtgtcttactacgagaaatgatgcatgattttaagttaactaaatattcctccattattattgatgaagcgcatgaaagaaatataaatacggatattttgattggtatgctgagccgttgtgttgggttaagggctaaagagcataaagagaatccgatcgaacacaagaagttgaaacttatcatcatgtcagctacattaagagtatcagactttagtgaaaacaaggctttatttccaattgcgcctcctgtcttacaagtagacgcaagacagtttcctgtatctgttcatttcaatcgtagaaccgcgttcaattacgcagaagaggcttttaaaaagacctgtaagatccaccagaagcttccacctggtgctatattggtactggccaacaagaaatcacacatatggtaa

SEQ ID NO: 4929 - DNA, 1431 bp, Saccharomyces pastorianus
atggattacgatggaaacgctctggaagagtttgaaaataaattccaaaacagttacaaaccggccttgaaagtgactaaagaagggctgtaccagttagttgatattcgtgactcaagttgtcaaggtaaaataattaacgagaatagcacgtttaaagtatctttcttagagaaaccaagtttcgctatccaagataaccatcgtattactagattgacaaataatttattcgctaaagaagaagtatgtcaaggaatggaaggcactgttgatttggcgttatatggctcgcccccattcatattggaatacgatttgatggctcctaatggtcactttttcacaaaaaaaattcaagtaactaccaaatatgcttctttaaaactacctaatcaagttcctggagaatatataaccactattaaggccatttacgatggcaactatggcgaaactgataggcattttgaagagtacctaccagaacttgtaattaagcagacagtacatcctattcctgatgttacttttgctgatgggggtaaaaccttacgcgcgtgtgctgccaacttagaccagatctcattttcagaaccaattaatctgaaatttttgcaaggtgaaagtccattttcaattacatttagcgtttatcacgagagtacaagtagaacagatcaatataccatcggagaaattgactcggaaaactttttgttcgaaaagctatacgaaggcatgaaattaggtaaccatgcaataagtattgactctgtcgttgatgcaaatggatgcataaacaatgttataactggatcaagtaaccaaattttcgtttccattactgatgcgccaaagatccacttattagatccttccaacgaatattgtgtgggtgactatgtggcatatcaattaaatggtgtagctccatttatggtaaaatatgacttcaatggcgttcctttgaaatctaaggagcgcagctcccaatttattagattggcgtctgagccaggtgtcatatccatcaattcattacaagattcatcatcacaatgcatagtcgattttacgaaccctggtctgaaaagtgaatttaatgatttatcattaactatacacccaattccttcagtcactgtatctcaagggaattacattactgaggacattcgagaaggtgaccaggctgaagtgatattttcacttgaaggtacaccaccattctgcttaacttatgtaaggacagaagaaacagatggtaaacatggcaagaaaagatcccaggttgttgaaacgcacaaggtcactgatatatattctaatgaatacaaggtagtcacaagcttgcaaggtacctacgaagcgattgaaattacagatgcttattgctttgccaaaaatgatctcttcttcaataactga

SEQ ID NO: 4930 - DNA, 1998 bp, Saccharomyces pastorianus
atggaacacaggtataacgtgtttaatgacactccgcgaagggaccattggatgggccattctgcgtcagaatcaccatatccatcatatagtggccgtcccaatgttaacacaacacgacgttttcaatataatgacggtgaacctaacaaagaaaatccagttttacgttcaagcgaatttgaaaatgcagaaaataccaatttgagggatgaaaaacctaggatattcaagcgtgacagcaaagaccgctacaccagtgaagatgacagaaaggtcggttttacttcattgcccctgatatccaccgacgttttagagatttccaaacaaaggactcttgcagtggtgttgtttttaataattcaatgctacaaaatatatgatttgataatattaaaatctggcttaccaatacctggtttattgttcaagaactatcgatttaatttcatatccaaatacttcattgtggattccttatttttgtatattttaccatcctttaatattcctagactgacttttaagccatggatggtgtatctccaggtcttaacgatgacagcattgagtgtttttatatcaagtgatcatgaatttgttcttatttcattgattgtgacaacctggagaaaattctatacaaaggaattgagcgtaacaggctcatccatcaatcatcgtcgtattgttgactcttccgcccattttaagggtgctctgacaattaagatcctgcccgaaaataccgctatgttcaaccctttacatgaatcattttgtttgccaatggataccagtcttttcaaagttaactccgttaacattcctataagaataaactcaactgaagaaatagatctcattgaattagaatacagagatctttatacaaatgcagttgaacagcgttccttaaccaagaaagacttcaaagtcatcaataaccccaagacccttctgaagaaagatgattcgatcttaaaacctcatacaaacgattttgaggaggatagcactattcgttatttgagtttaacgcttcaggatattggattttatcaaattaaaaaaattgttgattctaaaaagctaaatttaaagatttaccaatcacacctaattattccacactgtccaattgcttcaattacgggaacggggggcaatgatagatgtataggtgactcggataatgtttcccttgagattcaaggtgtgcctcctatgaagctggcatactctaagatcgttaacggtcaaactttttcctttgtagactctagtttacaaccagaatacttcgaatcacccttacaatcaagtaaaccgagacaaagtttcacccaagatgaattaaatgatttgcaatggggtagaaatcaacctgttaatattgatttagactcctcaattacacaagacggtaaatacgcatatatggttgataaactgattgatggtttaggaaatgtgatggacttcacaagttttccagaagatctgaagaaacatcatggtttatcctataattttaatgttcatggaattccacgtgtggcgctagaagaaagatttgattctaagtcacccacaaaaagatcgattgccatagtattggaagaaagcaaaaactggggttcagacattccatatgttgttagcttatcctatgcagacacacaagacaaatcgaaaaaggaaatgaatgtcaccacgaaaatgttgactaaagtgtttcaggccgatcttccaggtacttacaatttagaatatattgaatccaagttttgtcctggtgtaatcgttggaaaatcaagtgttctggtgacaatgccagtcgcaccaaatatggaggttaaatcatcaccaattttggaccaatgtgtaggacaggtaggcttaaattttgagttgtcatttaccggtgctccaacctactattataatactaaaatttataagcttgaaaacggcgaaagaaaactatatgat

SEQ ID NO: 4931 - DNA, 402 bp, Saccharomyces pastorianus
atgataagggacgttatggtgtcgttgtgggacattggcggacaacggacattgaggccgttttgggataactacttcgacaagacgcaagtgatgatatggtgtatagatataagccttttggtgcggtttgatgaaaccatgcaagagttgagggaactggttaatagagacgaaagccgaataggatacgactgtgcagtcattatcgcactaaacaagattgacctagtggagaacaagaccgaactcggccgaagatccatattggtggagagcgtgctgaagtgtctgttcaagccagacatccgactagctcttgtccaatgtagcgggatcaccggcgagggcctcgacgacctgcaaggccggttggtagaattctcccgctttgcccaataa

SEQ ID NO: 4932 - DNA, 645 bp, Saccharomyces pastorianus
atggcagtcagaagtcgtaaaagaagcaacaagaaaaagactcttttgcgcacgagcgttgctcaagagaataatgcaacgtatttacttgccgcagaggaactgcatgaaagcagcatcgatctgaacgtaggcaccgaagcgccaccggtcgagcacctcgaaaatctcatgccagccaaggaattgaaccacctgagaaagcaaggattgcaacaattagagcctataaatgaacatgaaaacagcgaagacgaagagactatgaaactcgagtctgtgacaaaagactcaggtcccgtctccgaaactgaggtccaaaaactgctattgagctacgcctttacaagtggcctagtacaggaagaagatgaagaagacttacgtggcacactaaccacaatgtcgtccccatctgcgtcttccgtatcaacctatttccaagccttcatcgagaaaaccaagcaatttttctatagtttgagcttatatttgatagaaaaattccaagctttaaaaaacagcgtgtatgaggtgttttggatcatcgtcatttatataaattactggtttcccaatgtgggaaactatatgaggtatgtcaactgtcaatactctcccggagccgaatcttcactttactaa

SEQ ID NO: 4933 - DNA, 2163 bp, Saccharomyces pastorianus
atggacgattggcgtgagttcaattcagtgataaagtcggtacattgtaacgcaaaagacacaagccataaaattaacagcttggtggatttggcgataaagagtgaaaattctgccttcatcaaggccgtcttaaatttaaaagagaattcatcaaaaatagacggacagaaaagattcttgtggcttacttcaactgtcaattcaaagttttatccccctatatctatctcagaggcgtcaccactatcttggaatgaaaacgagtactgcgtacctggcagtgaagaattacaaagtcgctactctagtagaaccgcattgcgtaatgaaggagagtatatgggcgaaatagaacagtgccaagatgtgtcagactgttcgttagtagcttctctgattaatctcaggtctcgaaatttagaattacctccaattaaacagatatcaccaaatgaatatcaggtcaatctatgtttcaatggaagtagtgaaagattagtcacggtcgacacttcccaaattccaacttcagtgaatggtaaacaactttcgctaagaagcaaaagtatttcagataagattagcgaacttgcgctattactggttgtgcaaggtacatattcgaccgacggatcaaatatcagtatagatacttactacttgagcggatttttaccagagattatagggatagatagcttctcgtttgagaaattatggaagttctttaagtcgggtctttgtctgatcggtgttggtaccggaaatcgtcctaatgatttgatagaaccattgttagcaaatcatgattattctgtcgtcgacatcagacacgagtccggagtaatcaaactgcgggacccaagtaattcggcattaaatgttgaaattagctacgaacaatacttaaataacttcaaacaattataccttaattggaaccataaaaaattatttggatactcacaagctcttcatattagatacgacgtcacacgttataataaattcgccattatttcggataagcctttattccacatcgtaaataattccaaggagacggaaacagtttggatcttgctcgagaatcatttgtcaaaagaaggcaggaagaaaggtcgctcaatttcctttataaaccaagctcgagattgtataatttacccaattgaggtaccagctaataaaggcactgttcatgtcggattgcaactgatgaaattaaaattagctcccggtgctcaaacgctattgtattgtcattcaactactgacaacaactttagcattcatttgttctcagtcgtaaaggagatattttttcaaagactaaaagatatgaataaccttgttgccaaagtcagcttttctcatctttatggaatgggcaaaaagacctcttttgacacctgtagtttctttgaaaacccaacttttcaactggaagttcaatctgaaagagatcaacatattcttatggatgttacatgcgtttctaaaagctcgcaggattttgttaatattcaggtttattatttggacgattatgaactaatcaaaccaatcatgtttgataatcactatcagccggaacaaaatatcaaacaagatgtgcccatcttaaccaatactaaatacataattgtatgctcgacatatggccctccggtttcttcagagtttcaattggtggcctcgacacgtttgtcctctccatggagattcaagtctagtatcaatttacgcgagattaacatggcttacggttcttatccttatcagtgctatgacaagttttattgtaaagaaacctctaaaaaatttaaaattttgataagtttgcaaaatacaaaacacacaaccaacaaactctttatacgtgtggcacctgtagaatcatcggcacaattgaggatacggtgtaatgttttcgaaccagcatcatctctctgtgtttatgaatgtgaacattatagaaattgtccacctgggggtgtggttatacctgatttagaaatctcttgcattgacacgattgtattgatgattgaaagagatatgcctatttccaataagttagctacagaaggttcaatggctggattggagctatttgttggatctaatcaaagagctaaaattgaaaagttgaagtaa

SEQ ID NO: 4934 - DNA, 99 bp, Saccharomyces pastorianus
atggttacggaatactgcgctgtttttaccctactgttcgttttggcgctaattggacatacgttttatcgaagaagaacaaccggaaacttaaattaa

SEQ ID NO: 4935 - DNA, 1086 bp, Saccharomyces pastorianus
atggcttatgttttagtaaacgtcatgagaagaaaaacaccgatcagcaaaatgggtagtccgaaacgaagtgactatcttaaaagttttattggaggtaatgtggttgctctcggcgctggaacgccttatctttattcattttatgctcctcagctattaagcagatgtcgcattcctatttctacttcaggtaaactatcattctctttgacgatagggagttcattaatgggaattttagcaggtattgtcgtcgaccggagccccaaactttcttgtctgattggatccatatgtgttttcattgcgtacttgattttgaacttgtgctataagcacgagtggtctagtacttatctaatatcgttgagcttagtgttgattggatatggttccgtttcaggtttttatgcgtctgtgaaatgtgcaaatacaaactttcctcaacataggggcactgctggggcatttcctgtgtcactttatggtctatcaggcatggtattttcatttttatgttcaaaactgtttggtgaaaacatcgaacatgtgtttatctttttaatggtgacgtgcggtagcatgatcttagctggttacttttcattggatatatttacgaatagagaagaggaagacacaagcatcaagcaatgggagcttcaaaaaaccacagaaacgaacggaaatatagtgccattatatgacagtagtaagaattacataggttcgccagtgcgcccatcttcaccagccgttcatgaaaattatgcactaacagacaattttcaagaaacttcagaattttatggccttgaagataggcaactatcgaatcgaccattgttaccgcctttctccccacgtactaagtatgacatcgaagatgaggatattataaacagtgtagcagatgagagtaacggtgtacaaaaaagtatgaaatcacatgtgctacaaagcttaaagtcttcgacctttatttgttattacgtagtgttaggtatacttcaaggtgttggtttaatgtacatctattcggtaggatttatgatacaggctcaggcggtttccccaccttag

SEQ ID NO: 4936 - DNA, 384 bp, Saccharomyces pastorianus
atggatgaactatttattgctagacttctagatcgaaacaatagagaggcccatttgagcgaattattccaagacaatagtggcgcaattggtggtaacactatccaccatgacgatgctttactgaagaccctgacagtactgcaacaagaactgaaaagtaaggagcaagagatacggaagttgaaagaagttataggattgaagaacaagaatgccgagaggctaaatgacgaactcatcagtggcactatcgaaaacaacgttttacaacaaaaactctttgatcttaaacaagagcattcaaaattggtcaccaggtggttgaagaaagcagagagggagacggaagtcatggacagcgcgatgaatgagaggaaatga

SEQ ID NO: 4937 - DNA, 3090 bp, Saccharomyces pastorianus
atgacttccgtctccctctctgctttcttcaaccacctggtgaccaattttgaatgctcttgtttaagatcaaagagtttttgttgtaaaacgttgttttcgatagtgccactgatgagttcgtcatttagcctctcggcattcttgttcttcaatcctataacttctttcaacttccgtatctcttgctccttacttttcagttcttgttgcagtactgtcagggtcttcagtaaagcatcgtcatggtggatagtgttaccaccaattgcgccactattgtcttggaataattcgctcaaatgggcctctctattgtttcgatctagaagtctagcaataaatagttcatccattaaaacctgtttgtggtatccttcttctgtttctttgcgagcttcacttttgttattgttaacgctgcgaatctgcgcccctaatcatatacattctaacggaataacaggtcattgttcaagctcaaaatcatataagattcataaagaaaaagataaccaaacaccgttatcatttggcacatcaaaaacaattgctgttataatggatgtcgagcaacagagaaaacaacaacaactgcaattagggcaaatagagcaaatagagcaaatagagcaaggagaagaacaggaacagcaaggactacaagaatcgcaagagtcaaaagagggacagcaacaacagcaacagaaacagaaacagaaacagcaacaacaacaacaacaacaacagagcctatggaaatcttggtggcattctaatgctgaagatcgcatggatgtagcgataaacactgagtatctagctgagccagaaagaagttcttcctcttcaagaattcaagatgtgaacataaacaatggcaacaacggcctatggtccaaaattgcatcctttgcaacgtcaagatacaggaatgcgccaattattgttgacgataatactcggtattcacaattaaacatagaacaaattgatttcttagaaagtgaagctaaggatatgatttctaaaaaatcaaaatcttggtgttggttcgaagcgattccgcataaaacaacgtcatcaaatataattgattcctcagataccccgggaataataagtgtgtatggtacgggatctgctaagtgcccattaccattaaacaaatatcccggtgatggaaataatcccgggtacaacgtattcattaatgattctttaatcctgccatcagagagccctacagatttttttcatgttcaaccattaagaactaagatactaaataccatcaaaaactattacaacttcccaaacgaacagcatctttacctgagacagaataaaacagcattattaaaggacaaaaaagtcataataatatctgtggtaggagatttgccagaaaagtatgagcagcgctcattggaatcacagagatccgcatactacctttccaaaaagctatcccaaaatttgacacatgagcaacctgaaagaattttaactctatcattccaatgtccattgcacagccaagagttaatacctacttacaaagaatgtgtggagctactgaatcattgggcccatcttttcaaaagtgttgacgcggttttttttgtgggtgcttaccatagtgttccattgactttgttattagccaaatatattgttcagaatcatgaagttttagagttcgatgaaaacactactgtgggtgtattgagttttcagtcctgtctacaaggttatcgattttgggatcatagctccgactttgttaacaatagttacggtaatttaagctctaacacaaatatcaatgaaaatgataataacgaaaacgaattcaataatgattttactacaaagagtcagcagattaaagaaaaacagttatttcaaggcattgataaaagacaacaagaaatgctctccaaagtcaagaattataggaaaatagattctagtgaatccaaactagttcaagatgcattggactggcttttatttaattgggattcgtttcggctgacattcttcggtaaactctacgataattttatgacaatctctgaaaaacttgctatcgattataatcatcccaaaatcttgaggaacttatggtgtaacgggaagtatatgggtgttgacttaaaagatcctaacaatttaaacttcgataatggtgacgatgacactgataacagcaataacgatatccatataaaaactcctaattttgaatcgaaattgaaaattcccgccaatagacttttcgagctaactttgtggaatattctaatgctcacggaaaatttagggtataagcaattcatacctataatcaatttactaggtccgtttttcatttctagatcgtttaatgaatataccttaccgccaaatgtcaagaagcaataccagaacaataccaaagtttggcttcaagaaatggacaataaatggaaactaaatggtcctcaattcaaccacgaacaaagaaaaaatgaaaataccggttcctcatcaacgtctttactaccagaagatatctctactgtaaatgactttttgcagtttgtacagtatcagaatgaaaaggctccagattttgtgaaaatatactctgatatttacgacgacgatttggtctataaatgctttttgcacaatacgatttttacgaaaaacccactgagtcctaagcatttgtgtttaaatatagatctcgatactcctacgagcatattgaatactgttaatcaatatgatttggtctggaagattcatgattccttttccaaattgattcaattgaaaaacttaccacaacaagaggtgccacaggtattaaggctttccatctcattaaactgttttttggacagcattgcaactaaaaccggacctgtttttcaaagagacaacatagaggccttgagaagactaacggagatttggcgaacttatcaagactggtctccacctacaaggggtttgaagcatctaagggagattctgagcgttttagccatgtatgataaccccaagaatctaatcaatgatgtccggcgtacataa

SEQ ID NO: 4938 - DNA, 1092 bp, Saccharomyces pastorianus
atgatatcaggtcgttatattttgaagacagcgataatgatatggacactgaggaaagatcaacaccattttttgccggctttggtaataagatcaccgatgctctatcctatagaacagtgggtataccaagttcaaggattttcaccaattaattacggaaggcgaagtccatatggagttgttagactagctggttatagaagttcttatatacacatcaatgaacttgttgatcatttttttccgccagttagtcttgacaacgaagacttaagaagtaatacttccatggttcctggatctccacctaataaaacgctggataatgctgatgcagaaaatacttcaggtcacaaaactttgttcagaggtaaccaagaagagaaatttacagacgtcaatttttggagagacccgttagttgacatcgataacttatcggatatcagcaaaggcgacgatgaaagtactgatcaagatactgatatatcacgacaaggcagtggtagtagaagtaggacaaattcagccaaaaccatgaaggccagtaacgttccccagttacatgtcagcagcacaaacagcaatgaagccttagctgcttcgtcttatgtagaaaacgcctcgtctcatgatgcctctaaaagtagctcaacgtcgacgcccaataaatcctcaaaattcaaagaggatatagggaagcaaatgtatcttgaattaggctcacctcttgcgtcaccaaaaatgaagtacctggacgatatggacgataatgagtacaacgagagcagattcaaatcaaggagggcatcttcggccacagcaacgagtattggcaaagagttcaagaagttatcaatgtccagagccggttccccaacaagcagcgtttcaaaagtcagcgttctagacgacgtacactcacgtgaaaattcagacaccgagtcagggatggagccaggtgatgataattcgaaacgtaaacaattgcaacacacttctgcggacgataacgacaacgacttggatgcaagagtaagcgatgagtttgacgacgatgaattcgatgaggatgaattcgaagattag

SEQ ID NO: 4939 - DNA, 1647 bp, Saccharomyces pastorianus
atgcagtacgtaggcagagctatcgggtctgtttctaagacatggtcgtccatcaatccagccacgctgtcgggcgctatagatgttgttgtggtggagcatcccgatgggaggctatcgtgctctcccttccatgtcaggtttggcaaattccagattttaaagccatcacaaaagaaagtccaggtatttataaacgagaagctgagcaatatgccaatgaagctgagtgactctggggaggcctacttcgttttcgaaatgggtgaccaagtcagagacgtccctgaggagttactcgtgtcgcctgtgatgagcgcaacttcaagtcccccccaatcacctgaaacatccatgatggaagcagggaccgaatgtgacggtgagggagaaggtgaagataagaagcaggaaaagaaagtcttagaagagcctgatttcctggatattaatgaaacgggtaaatcaactgttaaaaacgacgaaaccacagcgtctgaatctcttactggatcctccgcgacaacgtcaccagatttgactaaagagaggaagcttgctgagcagcgaacaaagaatttccagcagaaattgaacaagagactcactgagattcatattccgagtaaacttgacaacaacggcgatttactactagacactgaaggttataaaccaaacaaaaatacaatgcacgacacggatatacaactgaggcaattgttgaaggacgaatttggtaacgactcggatatttccaattttatcaaagaagacaaaaatggtaatattaagattgttaacccttatgagcacctcaccgacctatcacctccaggttcacccccgacgatggcgacaagcggatcggtcctaggactggatgcagtagaatctggaacgaccttgaactcatcattctcctcgccatcaacttccgatacggaaagcgaaacgtcatttagcaaggaacaaagtagtgccagtgaaggcgccaacgagaaaagttctgacaagtcagaaaagaggtacatacgaaccataagattgactaatgatcaactgaagtgcttgaatctaacctatggtgaaaatgacttgaagttttcagtggaccacgggaaagccattgtcacttcaaaattatttgtttggagatgggatgttccgattgtcatcagtgacattgacggcaccataacaaaatccgatgccctaggtcatgtcttggctatgatagggaaagattggacgcatttgggagtggccaagttatttagcgagatttctcggaatggctacaatatactttatctaacagcaagaagtgccggacaagctgactcaacgagaagttatttaagatcaattttgcagaatggcagcaaactgcccaacggacctgtcattttgtcaccagatagaacaatggccgcgttaaggcgggaagtgatattgaagaaaccagaagtcttcaaaattgcatgcttaaatgatatcaggtcgttatattttgaagacagcgataatgatatggacactgaggaaagatcaacaccattttttgccggctttggtaataagatcaccgatgctctatcctatagaacagtgggtataccaagttcaaggattttcaccaattaa

SEQ ID NO: 4940 - DNA, 1512 bp, Saccharomyces pastorianus
atgcctgatttatacacagacctcaaaatcccacaattgaaaatctctgttaaacaaccacttgggttgttcatcaacaacgaattttgcccttcatcagacggtaaaacaatcgaaactgtaaatccaagtaccggggaggttataacctctttccaagccgccagcgaaaaggatgttgataaggcggtcatagcagccagaaatgcttttgagaatgtctggtcaaagacatctgctgaacaacgtggcatatatctctcaaacctattgaaactcattgaagaagaacaggaaacgttagctgctttggagactttagacgctggcaaacccttccattctaattctatgggagatttagctcaaatcatgcaacttacaagatatttcgccggatctgccgataagtataacaagggtgatactattccattaaattccgacaagcttgcttacactttaaaggttccattcggtgttgttgcgcaaatcattccatggaattatcctctagcaatggcgtgttggaaattgcaaggcgcgttagctgcaggtaacactctggtcatcaaaccagctgaaaatacttctttgtccctgctttatttcgctacattgatcaaaaaggccgggtttccagcaggtgttgtcaatattcttcctggctatggacaacttgtagggaaagctctagcatctcatatggatgttgataagatatctttcacaggaagcaccaaggttggtgggtccgtgttggaagcctccggccaatccaaccttaaggacgttacgttagaatgtggtggtaaatctcctgccctagtatttgaagacgctgaccttgacaaggctgttgactggatagcagctggtatattctacaattcaggacaagtctgtactgcaaactcaagagtctatgtccaaagttcaatttacgataagtttgtcaagaagttcaaggaaattgcaaagaaagactgggacgtgtcaggaaactttgatccctttgatgagaagtgtctcgttggtccagtcatatcaagtactcaatacgaccgtatcaaagaattcatcgaactcggtaaaaaagaagaaaaattgagcatgtttcaaactactgaattccccattgagcaaaccaaaggttactttatcccgccaacaatttttactgacgtcccacaatcgtctagattgttacaggaggagatattcggaccggtcgtggttgtcagtaagttcgaaaactacgatgatgctatgaaactagccaatgacacttgctacgggcttgcctctgctatctttactagagacgtgaagaaggcacacatgtttgctcgtgacatcaaggcaggaactgtttgggtgaactcgtccaatgacgaagatgttactgttccttttggtgggtttaaaatgagcggtattggtagagaattaggacaaagtggtgtcgatacctatcttcaaacaaaagcagtccatgtgaatcttggataa

SEQ ID NO: 4941 - DNA, 1689 bp, Saccharomyces pastorianus
atgtcattcaagtttctgataaaatcgctcgtactcggatcactaagtggacaaatacgtcgtggtgcgtcgtcagtgatcccccttgacagtgtgccctttgatgaagacggcgctgatgaacttaacatggatatcatgctgtttgcgtttggaaccctggtggtggtctatattatcatctgtatcgtctatttcctcacgaagcaaatcgctacacggctgataacagcgtattataacgaacacggtcctagtcaaagaatatctttgttcaatgattacgatgaaaacacgccccacgtccacagtagacggctcatggaaaatatgagtttaagatggcccaacaatttagacgatatcaatgaagttaaagacaagttggcacaactctcgcctgaagagcagttttattataagcaaggtgaagaatatatcaagcaaaatccgccttttctactcaaccagggactattacagcagtctgagaatgacagcccagataccaatagcgatgacccgatcatgaacgaccaaacaagacaatacattcaagaggagggagcctacgcttgggaattcaaaccaaatcctgatatgccgaaccatactgtcatcgtggaaagcaaaaccgaggtttcgttcctaaattataattacgatgcctccatatccacaaacttacccattccatgcatcaataaagtgtactactgtgaattcaaaatattcgaaacagatggcccgttaaacagtagcgccagtggtgacaacgcgtcgagaaatgtaatctcgttcggtctttccactcagccttacccatatttcaggttaccggggagacatcatcattcgatagcgtacgattcgaacggagccagaagattcaacgactcttttaaattaaatgatcagttaaagacgttgttcccggcgtgcgagaaaggagacattattggcatcggctacagatcacacagtggaacagttttttttaccaggaacgggaagaaactaaatgaaaaatccgttggtggccatattcgcggttggaagtttaaatatctatacccagtaattggctccaatgtgccttgtcaaattcacgtaaatttcggtacttatggcttcgtttacatcgaggcaaacgttaagaagtgggggtatgcaaaatcaaacggcatcaaactgccccctccctcttacgaagactacgggaaggacactctattagaaagcggcggcgaagacaatgattttgacgatgatctttcagatggcgacagtgacgctgctgccgctgccacccccaatgtcaatgacgacattattataagaaacggtgaaatcttaccgcctccaccgggattcgaattcaccatgtcacctcccactgggaaggaaattaccaatgaggagattaatctggactccttacctatgcagccgccaagttattcagatgatgaacatcatttgaagatagacaaaatcttaccagtccggcgcactattggaacaagcaaaaccttaatgaataatgaaccgttttacgataactctaatgatgataacgaagaaggtgacgatcacgataaagatcgcgaagggacttttagatttagtgattacgaaagcaggatgcatgacatagaactcggctttggcggcaatagcccggcttaa

SEQ ID NO: 4942 - DNA, 2073 bp, Saccharomyces pastorianus
atgaacagccaagtaaatgaggatgctatagacatcaatcttggtctctctttgcccacccacatttcgccagcagccggctctgagagcgccactggcagcaacgtcagcacacttcacaacgatgggcaggcgctaaatggcgatctcttgaggagttccacggcaaactcaacgccgacaggtgctaaccagcagactgaaactattggcgagaagctgaataacgaggagcgagtgaactcaaatccctctgcttcgaactcgaccattgcgggcgcaggacgtatgttgagtcagtctttgacaaacgactcgccttcgaatgagatatctactgaccagttgaagattttccaaagaatggatgagatgagcgcaagaatgattgagatggaggagagttttaatcagttgtccagcaaaatcgtggagcaaaactcgatggttctaaacttaaagcaagataactataaagtcttgaacaagttgaacatactacttaaactagtggcgcaaccgagtgtgcgcccaagctcgaacaatgcccagaataagcttgccgtcgatttgctaaattcgatatcagccgttagcggcgcttacttgcagaaaatgcaaaataattgttctggtaatcagcacaatacggagccacataccgggcttcccaacgcccccctcacttcgaaccatcattcaggtacaaacgcaagtattaatgtacagacgaacgccgcacacctaaacaaccaattttccaatgcattaacaacaattttgcccgatcagcggtccaatcgatataataatgcccaaaatataaatacactttcgcaagcaaacgcgaaacatttttcgaatccaggtgcaggtcctgtcccaaacgcacatgcgaaccagaaccaaccgcaaatccagaaccataatccaaattcaaatcagcaagtaaatcgctctcctattgctttccccagtgcttcaacggataaggcattcaagttgaatccgaatggaatcaaaaggcgtagaagaaatactcaaaacggcaacaattcgggcactaatattaatggtatgagttccattcaaaggcccataacaatgctgtctccgttgacaaattcccacaattctaccacgagtatgaattatacgccttcttccattcattcgagtattactagcgcttcaaattcgtttcatgatctaaattcgctgaacaatttcggcacaacggcagctttaaatttacctagtttaagtctcgataacacttcgtttcccacaaatccaaatggcgcatttcctaataccaacaacatcaacaatgcccaacagcctttatcattttctcagttaattaatcaagcaagtactacgtctgagctattaacgaacggtggcggcggcgtaaacacaaacattgtgaagagaaatagaagttctaccttaccatcgcactcgaaaccaatggagatgaaaaataacgttgacgacgatggttatcaagaagacgatgatgacggcgatgatgaaggcgatggacgcgataacgaagaagacagtactgctgaagaagacgaagtggatgacgagattgagaccgaggtcaagaaagtctctgccaataagcgtagaagaaatttactgcacaaaagaggtgattctctcaatggtagaagaaagcatcacgatgagccagcaggcagacacaactcaaacccaaactcaaacccaaacccaaactcaaacctacattacaggatactaaaggcacccactgacgtgaagacaatatgggaagagtatagcattggtatcagggggaaaccgtctatcaagtaccttgagtccaaatacggtaacaaatggaggctgaataaaaacaagaagacattttcaagacggaaaagactctacaagttcattttgaatggcatggacaaaggcaaaacagcacaggagatgatagagaccctagagaacaagaggctatacaaagatgacgaggacggggaagtaaaaaaaagaaccatcggctggttgcaagagagccttgccggactttag

SEQ ID NO: 4943 - DNA, 651 bp, Saccharomyces pastorianus
gctgcaggtgactctagaggatccccgtatggatcttctaacaagaacaagtcctcttacggctcttccaacaacgacgactcatatggatcttctaacaagaacaagtcatcttacggttcttctaacaacgatgacacttatggttcttccaacaacgatgacacttacggctcttccaacaacaacgatgattcgtatggatcttctaacaagaacaagtcctcttacggctcttccaacaacgacgactcatatggatcttctaacaagaacaagtcctcttacggctcttccaacaacgacgactcatatggatcttctaacaagaacaagtcatcttacggttcttccaacaacgacgactcatatggatcttctaacaagaacaagtcatcttacggttcttccaacaacgatgacacttatggttcttccaacaacgatgacacttacggctcttccaacaacaacgatgattcgtatggatcttctaacaagaacaagtcctcttacggctcttccaacaacgatgacacttatggctcttctaacaacaacgatggttcgtatggttccaacaataatgattcttatggttcatctaacaatggtggccgtaaccaatacggtggcgacgacaattactag

SEQ ID NO: 4944 - DNA, 624 bp, Saccharomyces pastorianus
atgggtttatttgataaagtgaggcaattcaccaacaacgacaataacaacgacaacaatagttctggcaacgatggtcaaaatgattatctctccaaggctgaaaatatgatcggtcaagatagactcgaccgtttaaagtctaaggtcggtgaggatagatttgacaagatggaatctagagttcgtgataagctttccaaaacttctttaagtgacaacagcgacaacaacaactcttctaacgattctaacaacaagtcctcctacggctcttccaacaacaacgatgattcgtatggttcatccaacaagaacaagtcctcttacggttcttccaacaacgatgacacttacggctcttccaccaacaacgatgattcgtatggatcttctaacaagaacaagtcctcttacggctcttccaacaacgacgactcatatggatcttctaacaagaacaagtcatcttacggttcttccaacaacgacgactcatatggatcttctaacaagaacaagtcatcttacggttcttccaacaacgatgacacttatggttcttccaacaacgatgacacttacggctcttccaacaacaacgatgattcgtatggatcttct

SEQ ID NO: 4945 - DNA, 732 bp, Saccharomyces pastorianus
atgccacataccgccttttggctagctttcctctgtgaatatatatacttctacagccggggcttcatagatcttgcatatgtcggatttaaagataacccagctcccccacacacatacagttcagatacgatggccatcaaacctacaaagagctttcaaaattgcctcgaggctgaagtgcctggttacaacgattgccccacagttttgttctccatcgaccctaatagcggtcccaaatccaaatcaaagacaagagcaaagacgaaaagatgtatgagcgggaaactgaccacagaggtgatggatctctacggaaacaccaaaacagccacgacgccgccgcccgtatcgaagaggccgcccgtaggccctactcaacaagaaccggcttctgaaattgtgcctgcaatgggccaaaacgatacccagtcacaggtggtgatgtacagtaaggacgatctgctgcttaagatcaatgatctttgtgggcctggctcaaagttggcctcgaaagagcaggatttttacaaaagaaaaatagactctaatattgccaagattttacacaccgatcacacgagaatggtgttgtcgcagatcttcgatgaaaatgacaagcaagcagccgtaaagaccatcaaacactggatggttaccgacacgaccatttctaattggtgtcctgctttcttaaaacttttcgaaaacagcgcccaaagaaattga

SEQ ID NO: 4946 - DNA, 2952 bp, Saccharomyces pastorianus
atgagcgaagagaaatcgcacaagatcagcataattgacatactaaacaagaagccacagcttgccgaaaagacacccttagacgatttcttcgaagatctagatgataatttaataactcccataaacaactttgagtttgactcggcgtctcgcatttcggtttatcaagccttagagtgttcagacaacaatgagtttgtcgtcatactattacaatacttcaaagatttgcacattcaagtacttggccagcaaaagacgcttatccaaaacaaaagtgatctgttgcctatctcattgcatgacatgaagtatgttgacgaactgattaacttactgatccttcacggtatcgacgctaatttgtctccaatgataaaaattccctttgattcgaaaaggctgaatgccttcagaaagggcgagaagagtacgcagtatgaaacacctacatcgcataatataaacagcggtacgttatctttagtagtaactgccttttatgatattcttactgatgaaatgtcttcggattatttgaaaaacataatcttaaagggcaatgcgtatgcgaacatcttcttaggtttgttatcactacatttgcaacagcccaaccacttctcattgcagatggtaacaaaactggaaaatgctcaagaaacgtatacgttgtttggaatgtatactttactggttgaaacaattcaagacgcaaaggcaagagaattaatactactaaagctaactactttatccttacgaagaccagaaaacggtctcatcagtttggttgattttatcttgggcgtaagagacgttgaggatattgatgttgagaagttcaatcgtgtttatcagattttgatgagcaaaccggaaacaatgacgaatttgcaatacttgactgaactgttcagacaaatatacgattgcctcacttttgtaaatagacccatcctcgttacctgtttgaacggattgatcctaaaattttacatgaggaataaaagaattgtccacgattttctatttcaaaagatcaattctgtcatttacaattgcccgttactcgaccattcggcaaaggaactgaacaacaccatgaacgtgcttatatcgctgtctaaaaactcatccgttgatttactgaatgatttagttaccattcatcccgatgcaaatggcgcctctggtcaatttttcttgaatttatggatatattccctttttttgaagaaagaccaaaacctcaacccactaagtattaatgaactgtctatatcgaacgataaaaatccaaatagtggacattcgccagaggaacccttttccaattattatcaggtcgtactatcactgttaaaatctctggtaatcgtaacagaaaactatcaaattctaaatatattgagccttaacttggtcaatttcgagcacgaaaaatggaagtttttaattgatctagacacacagctgccttatatatcagttaaaggccccaatacagtagagttgctctccaacaatgtatcgaaaagtacagagatatctcaattcttccacgacatggaccttgcagtggatttgtttatggaatttttggtattactaaacgatgaagagcaactaaaaaatctctttttggaaattttgaaaaggtgggttcaccatactaaggaaattggggaaaaatcttcacacgatttagacagcatatcagacgtggcagacaatgcgcttatactaatggacttgaagcttctggaacgcatgaacgatcagttcaaatcaaacattgtgaacaaggctaatgatgtacttatcgttattgatcaattgattgatattgttcaaggaaagcacgaaccgcaagagaaagaagttgattcagatgatgacgaagaagaggaagtgacggaagaggtagacctaactgaaaattccgctgtcaaaattatcttacaattattgtccactgtcctttcagaatcgtctagtagtacgttatttcaaaacagccatacattaaaatccatttccagaaaattgcaatctctcaagccaaaagtcccagaggcaaatacactgttagtattgatggatagaattctggttaacaagcacacaacagaagctgatggcgatacagaaaccgacatagatatggacactcttgatagagcgatgactaatttgaacgatcctttaattccgatcaaatcacacgggttaataaaactacgaaatctagttgaaaagaaatctaaagtgatcactgtgaagaaagtgctgcaaatacatctagactatttaaagaattcagacccatttatttatctcaacgtcattaaagggcttactgcattgtgcgaattagaccctgaaactaccatacctccccttgttgatttttatgcaaataagaggaacaaaaacaaattggacaacgtcttaaaagttggcgaagttttcatcaactacatccgatgtcaaaaccaactgtttcaagggaaatttgcttatttgattatagatatctgtctcgatatcgtgaggtccaatgataaaacgccgttggacaatagatggcgtatgtcatccatgtcaatcttaggtatgtgccttcaagttaatgcgaagggccttccagatcgaattcatgatatgctagattgtgcattcggaatattacaattagaacggccacataatcatcctgagggcaaagatgattctttcctgatgagaagaagtgctgtacacttgatacacgacctgttgtacagtacgggactcgacatgctcccccgtgaatacagttacgacaagttgaaaacactgttatcttacgtgcatgatcaagatgaagattacttggtctgcgaacaagtcagcaagctcttaacagtactaaatgaactgttcacaagttctctacacgtttaa

SEQ ID NO: 4947 - DNA, 684 bp, Saccharomyces pastorianus
atgttgaatataagtaccacaaaggcgttggacgtttatgcgcaaactgaacgtggcttgctaagcattccactgacttcttcagtaataatatatggattcttgcattacttaagtaatatttctaatgtgagtgctaatgcaatactattcaaatggatatacctcaatatcgtcaaagccgccggaaacaaatactacaaggggataggtttacccaagataatactctattcgaatttggccacattttgttataattttacctttaagagattcctcgacctaatgtacaaaagattgatccgtaaaggttccgaaaatttataccatggagactttgaaaatgctaaccatgtggtttctgttgatgagttctttattaaacgcagttggtataccgttttagcagaaaagatattatggccatttgttggtaaatgtacaggaggtcttctgctgaacatttttctttggatacaaaaaaggttaaaaattgaatggtcacctaattgttctccttcagaatttagaatgattttcaatattataggttgcggtactgcagccgtcagctggtcgagtctgaagctctacgctaattatagaagatgccaagaacttgaaaaaattaaccgttatgttgaagaaagttgcagtgaagttcaaacagattattcctag

SEQ ID NO: 4948 - DNA, 435 bp, Saccharomyces pastorianus
atggcaacattccacttcttcccatccttaaaaaaaaaaaggtgtatatgttggatatgcctagaagaatccacgtatgataccacatggctgctgcacacatgctgttgcaacctacaaatacataaacgttgctacattaagtggctataccaaatgcatgttgagcttttcctttcagacccaactaattcgccgaagggtgccgatctacccatcataaccagtcttaagtgcctagttgatgggcatcatgattttatgactactttctcattgactgaaatatgggacacacgacctatttgggggcagaaatcagtaccctttcaaaacgattacatgcttaatctgatgtctctttatactaaaagaaattatcatccaccttatgtaatgcttaatttggcgagtgtcccatgtacgacgacgagt

SEQ ID NO: 4949 - DNA, 1122 bp, Saccharomyces pastorianus
atggctgtaggtggtaataactggaacgtatggctacgaatgtcacgggtccagctcaggcagatcaccaaatcgcttgaccggacgctagtggggctgagccatgggagatttccccttcaatacaatcacaatatcttcaccacctggtggagaagtctatttgatgcttctattactttcagaagagcaaacagattcactgcttcaccgcttaccagaaggggtgtcgctgggtttgatcgtttgagacctgctgctcacgtcagtaggtttgccactctgtccagggttcccaaaggtgcccccaggggcttgtttaccaactggaatatggtcgcttcaactagattgctgggacagagagcttactctacttctagtatcaagttcacccaggaagccgtgaataatatgaccgtatccctaagatgtttcttcaactcattggatgggttggatcaatgttctcactcaacctactccaagactttccagcatgcgtctaatgctaaacaacaacaggtacatcctcaacctgttgcgttcaagaggctgtctcaaaaagatatcagtttcatccgtgatttggagttattcaaaataatgaagacccaaaatcaaatcattaacgaatccagcccattatttgccgaaaaatctggatcttacattgaattcactgttcctgaattcaacgttaatgaatcagcttctgtacccatgtcatttctagatcccgctttgttgggagacttgaatgaaaaaattacaaactacaacagtgacttgaaattgatgtacgacagcattgatatgatcttgaaaaattatggttcgttgcccacaacttttcatcgaaacaagatccgagtacacttcccaaactccaccgtggtcgaaacagagaaactggttgctggtttgtatattactacaggtattatatatgctgatgcttctctggacattactttggaagatgctaagttgaatgctttggttaatgatgacaaatctacaagcatgtggtctcttgttgacgaagcctccctccccgttagtactgctttttcacccgttctatcggaagcatccgatgatgattatgaatttatctag

SEQ ID NO: 4950 - DNA, 2199 bp, Saccharomyces pastorianus
atgaatgaaaaaaacgagaatactgaacatctgatgacgtctgatgaaaacactctaggagaacagcttgaaattccagcaacctctcatcctgaccaactaaaagagaatctagatgacatcgtttcgggaaacgagaacttaataatagatagcagtaacgaaacgaatttaaacaaggaagtagaggcattggccgcagggacaaacattggagtagatttgaatcagagcataaatgaccgtacttcgattgatggccttacagattcacatgatgctccaatcccaaaagaaccggaggtggagccacaggaagaagccccattaatatctgagaatctaagccagcaattagaaaatgaaagatcaaaagttgaaagggccctagaagcaatatcttccccttcattaccaccaagagataatgatgttggaagttttacacctgtgcccaccaaatcttcgtctcccccagtaccctcaagaaatacaaacgttcaagtctcccttgatcaacctcaacttccaccaaggcaaaaacttaatgcagaaactttacatttgaaagcaccccatagtagtgcggtgcctgtcagaccactaactaatacgtttggtaattcttcttccccagccccaccaattttacctcctcgtcgtatagaagatcctctagacttagccgctcaaaaggagcttttggcaagtacattcaaaagaaacatgctgttttacaaaaataaagataactcagtcaaaaatgatttggacgaaaatatgcttattttgagggaaaactttcagaaaattagtaccgatcgattgtctgaggaggatagctcattttggagaaaaactgtaaatgactaccaacagaccttacttaatgatagtgagagtttacacgttcaactagctcgtggaataccctctatttatcgtttgatagtctggcagttagtaagttatgcaaaatcaaagtcctttgagctgatatacgagacttatctaacacaggatgcaccatttgatgtccagaaattcgaagatcaactcaaggtgatagacactatatcatctacgaacgtaaaaagcataatcaacgtactaaaagcgtaccttctttttgactctgaatgtgaattttctatcgacatggtttatattgttaatatggttcttgcggtttgcaagaaagaaacagatgcgtttgggttattcgttcgcttgatgcaagtttatgatttaagatcattgtttttaccaagcgcccctgtgatcaatgttctctgctataaatttgatagactagtagaagaatcctatcccaaggtttataaccacatggttaaagaaggtattcgttcttctatgtttttgcctagttttttcacaacattgtttcaaaagtattcttccattgaaattcaaccacgtatcggtgatattatatttttagagggtcttgattccattatgagaattcctgctaaattattgtgtgaagcacaagatcaactattaaaaatgagtttcgaagaactgctggagtttttgaaagtaggtctattagatgcttatattaagaaggaaaccgatacggaaagtgatcctctttccttaaacaattgtatagatcaacttattcaagatgctatgacggaagttcaaatatttccaaaaaccatgaagaagtttgcttctgaatatgaggaaattcatagattagataatgagagagaagagcagtacaaatcaatcaccgaaaagaatttgcatttacagaagcatgtacgcaaattggaaaatgactatacgtcattaaacagagagcatgtgacaattgcaaacgaactagtgaaaaaccggttgaagatcgagtccgtattgaatgaaaacaatggatataaactaaaaatcttggacctgaagaaaacgttagatacagaaaaaaagaaacaagtttcaatcgtatatgttcctaatgatttgaaaaaggatttagatgaaacgataaaaaaaaatgcacaagtaatggacgaaaatttaaagttacaagataagatttcagagcttgaaaggatggctgaagcaattagcactgcaagcaaaaacggtgttttatttgagtattcaaatcctaaaaatcactctttgggcgctggttggtcgggatttaagaaagttttcaaatga

SEQ ID NO: 4951 - DNA, 246 bp, Saccharomyces pastorianus
atgaccccagccccaaagatctcttacaagaagggtgctgcttccaacagaaccaagttcgtcagatctttggttagagaaatcgccggtttgtctccatacgaaagaagattgatcgatctaataagaaactctggtgaaaagagagctagaaaggttgccaagaagagattgggttctttcatcagagccaaggctaaggttgaagaaatgaacaacattatttctgcttctcgtcgtcactaa

SEQ ID NO: 4952 - DNA, 672 bp, Saccharomyces pastorianus
atgcccatgggtaatgagataaactcaaacagtcaaacgcagatctttagtgttctcatcaatggcataatcaactcccccccatctctggtcgaagtctataaggagcagtatggtataatacctttcatattacaggtaaaggattataatgtagagctgcagaagaaactgcaattggcctctaccatagatctaacgaaaagaattgccgttaattcccgttacttcgaccaaaacgcttcttcatcaactgcctcttctccaggcacatactcatccggcgccaactatactccaatgagaaacttcagcgcacaatcagacaacagtgtattcagttccactaacatcgaccattcatcaccaatcactccgcatatgtacaccttcaaccagttcaaaaaccaaagtgcttgcgacagtactataagtgtaaacagcctgcctaatcagacccaaaatggccacggaccatcatcaagtaattatcaaaacatgatggtagatgaacggaataaagagaaccgaattcccaacccttcatctgctgaaataccacaacgggcaaaattcatgacaagtggtatcttccagaactcagctgaacttactaatagggcgtctacgatatcgctatcaataagaaaccaaaacacttcccaactgtaa

SEQ ID NO: 4953 - DNA, 987 bp, Saccharomyces pastorianus
atgaaccacacagaagtgaaagttggactaattgtcaccgcaaaacagacgtactacccaattgaactgtccaatgcagaacttttaacccattacgaaaccatacaggagtaccaccaagacatctctcagaatgtattgcttcagtcttccaagacaaacccagatatcaagttgattgaccagcaacctgagatgaatcctcatcaaaccagagacgccatagtgaccttcttgtaccagctctcagtgatgaccagagtaagcaacggtatcttcttccacgccgtcaggttctacgaccgttattgctctaagagagtggtcttgaaggatcaagccaaactagtggtgggcacatgtctttggttggcagccaaaacctggggtggatgcaaccatataataaacaacgtttccgtccccacaggtggtaggttctacggtcccaatccaagagctcgtatacctcgtctttctgaattggttcattattgcggcgggtccgaattattcgatgaatcaatgttcattcaaatggagagacatatcttggataccttgagctgggatgtttacgaacccatgattaatgactacatcctaaatgtcgacgaaaattgtttgatacaatatgaactctacaaaaaccagctacagaataataacaacggcagcaacaaagaatggtcttctgaaaaaagacaatctcaatcttccgaagacagtgatgccacagtggaagaacacatcagcagttctccgcaaagcactggattggatggcgctacaaccaccatggatgaagatgaagagctgaactcgaaaattaaattgatcaacttgaaaagatttttgattgatttgatttcttggcaatacgatttgctcaagttcgagctgtacgaaatcagcaacggcgtattttctattataaataaatttactaatcaagatcaggccatttctctctatgcccatgggtaa

SEQ ID NO: 4954 - DNA, 849 bp, Saccharomyces pastorianus
atggataatagcaagagagatgcgtcactgccgaataagagaccgctggaaaacataaggcccagcataagaaggcaagactatatcgagtatgattttgccaccatgcaaaacttgaacggaggttacatcaaccctaaggacaagattccgaatcccggttttggtgacgacgaagactttgattctgagtttgggtccaagaagcaaaaaacactacaggattggaaaagagaacaactagaacgtaaactgctgtatgaaaatgctccgcccccggaacatatctcaaaagcaccgagatgtattgaatgtcatatcaatattgagatggaccctgttttacacgatctcttcaagctgcaagtctgcaagcaatgttccaaagaccacccagaaaaatacgccttattgacgaaaacagaatgtaaagaagactattttttgactgatcccgaattgaatgacgaagagttgttccataggcttgagaagcccaatcctcattctggtacctttgcaagaatgcaactgtttgttaggtgcgaagtggaggcttttgcattcaaaaaatggggtggggaagaaggcttagataaggaatggcagcgccgtgaagaaggcaaatcgcaaagaagagagaagaagtacgaaaagaaaatcaaggaaatgagactgaaaacaagggctcaagaatacaccaacaggttaagggagaagaagcatgggaaggcccatgttcataacttcagtgcccccatcgatggaggaaccgatgaagacggatatcaaattcagagacgcagatgtacagattgcgggttggaaactgaagaaatcgacatttaa

SEQ ID NO: 4955 - DNA, 948 bp, Saccharomyces pastorianus
atgttgagcaccagtagcaatagacccatatctgctcatttaaccatccattacaaacctatccaggaggaagaagaggagaaaaggagcggtgccaggggaagcagtcgtcatgacgactgcttcgtggagggcgacaggtccctcactcccaacaggaaacacgagttcatcaagacagtgcttaacataaacgatgatgacagcgagttttcagacccctgctctccattcaccgggtcacaggacgccaccagcggcacgaatctgttcggagacttcttgtctaagagacagcagacgctttcgaactccatgaacattcacgatctttatcaatgcgtgcataacttgtcgccaagcgccgccgctaacactaaccaccagttcatagctaggaggttcagcgattcgcacatcccatctctgcaccaccgccagcagcagacgacgacatcgaagaatttcgtacaatctactaagaacattcaaaggatcgcgtcctacgcggcagattccgaccaaagagtcaagtatctgccaaactaccaccagtccgctccttctaccgcatcgtcagcggcgacttcaagggcggctaaaccaagaaaactccctgacgacgacaatacaaaatatgtacttcaactgcagctctcgtcgtcgcctcactcacaaccagcctcaccaccgcttcaaccggaccgacgcccttcttgctcttctttcacttgctcgtcatcttcctcctcctcagcatgttcatctatgtccgtctcagatccgaataacgtaacagcatatgaaacgaatagcgcccgccctcagttcccctgtggccagcctttggacatatcgagtccctgcacgagacatcaccatagaagaaattccatcgctgttaagtttgataaggcattatataaaaaacaacaaaatagcgattag

SEQ ID NO: 4956 - DNA, 6837 bp, Saccharomyces pastorianus
atgactgataaagaatttatctcgagtggaaagagaaggaggcttccgcatttggttaacgctagtgagacctggcacgcgtactgtcattcatattataccacattcacaattacttgcattcgattgggacagtacaagctcgcgttatatttggattcttatccagcctataatataacgggcagtctaatagttcatttgaaaagacagcgttctccatacagcagccgattctgttctcacgcatatagacattcatcccgtgtgggtttgcatctgcctttcaggaggaagtattcaagctgtgcccgccggaacatacacaaacaaagccgtttaccgcctcaattcatagggctaaacactgtggagacggccccatcttcgacgctaaaggactttgtcgagtcacatggtggccatacagtgacttcgaagattttgatagcaaacaatggtattgctgcggtaaaggaaataaggtctatacggaaatgggcatacgaaacttttaatgatgagaagatcattcaatttgtggtgatggccaccccggatgatttacaggccaactcggagtacattaggatggcagaccagtacgtagaggtgtcgggaggcacgaacaataacaactatgctaatatagatttaatactagacgtggcgcagcaaacaaatgtagatgcggtatgggccggatggggccacgcttctgaaaacccatgtttgcctgagctgctggctaattctcaaagaaaaatattatttattggcccaccaggccacgccatgagatctctcggcgataaaatttcttccactatcgttgcgcaaagtgctaaaatcccatgtattccttggtctggttctcatttagataccattcatatcgacggccaaaccaagctggtgtctgttccagaagatgtatatgcaaggggatgctgttcctcgcctgaagatgccttggaaaaggctaaatctatagggttccccgtaatgattaaggcatctgaaggtggcggaggtaaaggaattagacaagtagacgacgaggatgattttattacattctaccgtcaagccgtgaatgaatcccccggatcaccgatgtttgttatgaaggtggtcaccgatgcacgtcatttagaagttcagctattagctgaccaatatggtaccaatatatcgttatttggaagagactgttctatacaaaggaggcaccaaaaggttatagaagaagcaccagtaactataaccaagcctgaaacattttatgagatggagcacgcagcgattcgattaggtgagctcgtaggttatgtttccgcgggtaccgttgaatatttatattcaccgaaggatgataaatactattttttagaattgaatccaagattgcaagtggaacatccaaccactgaaatgatatctggagtaaatcttcctgctgctcaattgcaaattgctatgggcatccccatgcataggataagtgatattagaaagttatacggtttaaaccccacggggacttcacggattgatttcaaatctctgccaagacctaaaccaaagggacactgtatctcatgtagaattacgtcagaagaccctaatgaaggttttaaaccatccactgggaaacttcacgagctcaattttcgttctagccccaatgtttggggctatttctctgtgggaaataatggcgccatccattcattttcagactctcaatttggccacatttttgcaataggtaatgataggcaagatgcaaaacagaatatgattctagctctaaaggacttttctgtgcgtggagaatttaaaacacccgtcgaatacctcattgagctattggaaactgatgattttggtaacaataatataaccactggttggctggatgatttgattttaaaaaacctcagctccgatatcaagttggatcctatgcttactgttatttgtggtggtgcaatgaaggcatacgtctttacagaaggaataaggaacacttacttgaaactattgcaaagaggccaagttcctcccagaaacttgctgaaaaccaaattccctattgacttcattttcaataataagaagtatttattcactgtttcacagtcctctgaagagcgcttcgtactctctatcaacaattcacaatgtgaagttgatgtccaaaagttatccaacgattgcttactggtctctgttgggggtaaatctcatacagtttattggaaagacgatattggtggcacaaggcttttaatagattcaaagactacgttcttagagtcagagctcaacccaacgcaaatgatgtcacctactccaggaaaattaatgaaattcttagtttcaaatggtgaccatgtttctgctggacagccatacgcagaaattgaaattatgaaaatgcagatgccgttagtagccaagactaatggaattattgaactattgggacgacctggttccatcatcgaagcaggcgatgttatagcgaaattaaccttagacgcgccctcgaaagccaacgaatcgtctttataccagggagaattacctgctttaggcccaccggtaatagaaggtagcagaccaatccataaatttagaactttagtaagtagattggaaaagatccttaaggggtataccgagagtgttgaaataggagcctctttaaaggaattgataaaagtcttgagagatggtagacttccttattcggaatgggaatttcaagcctctgcagtgcgtaatagattaccaaaacaattgaacgagaaactagaaaaaataatcgagaactctgcctcttttcctgcggaagaactgcatgtgttgctgaaacgctacgtcaaagaatacgcggatgaccatgtaatatgcattgctttgcagccgctacttaatattgccaaaaggtattacaatggtttggataatcacgaatatgaagttttcttcaagctaattaataattatcacgctgttgagaaagcttttgaaagtgatgatgtggatgaagaaagaaatatattagacctacgcaataaagaatcaagtaatttgagaaaccttttgagcagaagtttatctcatgctaatttatccagcaagaacaagttgattatgtcgatcttgcgcgaatatgaaccgttgtgccaaaattcctctggtattgcgttaaaatttaagactgttttacaggatttggcaaccctaaaatctaaattgactaaacaggttgccgtaaaggctagatcgatgttacttagagattcactgcctcctatcaaagagagaaaaaagcatattgaaaaaatgctgcaattgcatgctaatattataggctgtaaacaaattaatgaagacgacatatatttatgcgtgaaaaattttgataacttaataaattcaaatttggcgcagttgcaagatttgtttttattcttcggacattcaagtacgtttttttgcagaattgcatcagaaatttacgtaaggtatgcctatggtccttaccatttgaagggattaaacagttacagagaaataccaaatgttttgatgtcatggcaattcgatttgcccagctcaaacgatggcatcgataaagaaataaattcttctaggctttcttgcatacccagcaaggattcgttgagaaagatcggttttcttgtaaacataggtgaatttgattctatggaaaagacgttgggtgtgctatacgaaaaggttcatgcctcgggatatgtttccattagtggaggaaactctctcattgtgaatgtgctctctccaatgcatttcaaaaatgaagaagatctaatcagcagggtgaagactaaccttcttgataataaaaagcgtttaagtgacctacgctttagtcgtatcactttcgtatttaccccagaaaatggttcgcgtgttaatttttactctttcgatggaatgacttataacgaaattcctcaaataagaaacatggatccgtcctacgaatcatcgatggagttggaaagaatgtcgaactataaaatcagacctctattcgcgtatgatagcaatgtacgcattttcgagggtataagcaaatttacgcccctcgataaaagatttttttttagaaaagttataaattcttcccttgttaacgatcagacaatcatcctcgggcatctagaagcagaaattgacgcccaggtacgtcgtatgttagagtatctggaagctatcgatacgtcaaattcggacctgaatcatgttttcttgaatttcaaagcaccttttaatacatcagcacgccatttcaaggacatcctagaaaaaaccctcaaaagtcgtgagagtaagttgttccaagaaagagtcacggatatagaaattcgagtattcatcaaatgcccagaaaccatgaaacccgtcccgcaccggttatttgcttctaataaatcaggatatgtgattaacattgaaacatataatgaagtaagtgaggaaaaaggtggtacaatattatgctcattgagtaagcaaggatatttcgatggggaatctgtctctttgccttacgctgtcaaggactggttacaacccaaaagatacaaagctcagtttatgggtacaacgtacgtctacgactttccaagtttgttccgtcaggctgccactcagcaatggaggagatattttccaaagcacaggttgaaggacaatttttttaagtggactgaactgatcgaacaaaatggaaaattaattgaggtaaacagggaaccaggtaataatgatataggaatggttgcttttgaactgatggttcaaacacctgaatacccaaaagggcgcaaaatggttgtgatatcaaatgacattactttcaacattggatcttttggaccgaaggaagattcgtttttcaataaagttacaaattatgcaagagaaaaaggtatcccgagaatatatttggcagccaattcgggcgctaaactcggtatagccgaagagctgattccgttgttccatgtggcatgggatgatccctccgatcccacaaaaggtttcaaatacctgtatttgacaccaaacgacatgaaacatctcaaagatactggaaaggaaaagtcagtaatcgtagaacacagaatggtttacggtgaggaaagatatattatcaaaacgatagtcggatccgaagaaggtttaggggttgaatgtctgcaaggatcgggtttaattgccggtgctacttcaaaagcgtacaaggatatatttacgatcacagcggttacttgtaggtctgttggtataggttcttacttggttagactgggacagcggactattcaagttgaaaataagcctatcatactgacgggagtatcagctattaacaaagtcctaggcacagaaatctatacatccaacttacagataggtggtacacaagttatgtatagaaacgggataacgcatttaacggccagtaatgacatgaaggccatcgaacaaatattgacttggttatcatatattcccgcaagaagagatatgagcatcccaattcttgaaacaacggatagatgggatagggatgtaggcttcaagcctgtcaagcaagtgccctatgagacaaggtggctgatagaaggtaagccgggcataaatggcgaatttcagtccggtctttttgataaaggctcgttttttgagacgttgtctggatgggccaaaggcgtaattgttggcagagcacgtcttggaggtattcctgtgggtgtgattgcagtgaggacgaaaactatcgaagacgtgatccctgctgatccagctaacctgaagtcatcagagttttcaatcaaagaagcgggacaagtttggtatccaaattctgcattcaaaacagctcagactataaacgatttcaactatggtgaacagttaccactgattattttagccaattggaggggattttctggcggtcaaagagatatgtataatgaggtgttgaaatatggatcgttcattgttgacgctttagttgactataaacaaccaatactgatatatatcccgcctttaggtgaactaaggggtggatcatgggttgttgtagatcccaccattaatccagagcaaatggaaatgtatgctgacgttgaatctagaggaggcgtattggaacctgatggagtagtcagtatcaagtatcgtaaagagaagatgatagagacaatgattagactggattcgacgtatggacatttgaggagaacgttgacagagagaaaattatcgttggagaaacaaaatgaccttactaagaggctgaaattcagagagagacagttgatgcccatttataaccaaataagtatacagtttgcagacttgcatgacaggtctactaggatgctggttaagggggtgatccgaaaggaattggaatggaccaagtcacgtagatttttatactggagattaaggagaaggttgaatgagggtcaagtgatcaaaagaatgcaaagtaagatctgcgacaacaagacagtaatgaagtatggtgagttgttgaaaatagttcagtcatggtatagccacctggacggaaacgacgatcgggcagtagcggaattcatagagaaaaataccaaggaaattaacaagaatattgaagagtatgaaatttcactgtttgttaatgaactaaaaaagaaatttgaagacaaaaacggaaacattgtccttaaagaattgactaaattaatagacaataagcggaggaaatag

SEQ ID NO: 4957 - DNA, 564 bp, Saccharomyces pastorianus
atgcgtgtagattccattgaattgtcagcattgatgtacatatgtaacttgttcgcccttggatatgaccgggatgtgaaaatacgaccttttacacaacagtattcgggtcaaacagagtttggcaatcagttgagggctttatcggcggatttgagtaaatttaatcaatgtgataatttgaatccactatggggggactttagacagtattcacccaacgctaaaaactttgataaaatcatcgtttgtagcgcatatttcatagatactgcagagaatgtttttgattatttggccagtattgaagcattaaaaggattctgtaaagagctacattgggttaatgtagggccattaaaatatggtaccaaacctttggtccaatttacaggagacgaattaaaacggctacgtgagattcgtggttggaaggatcttgtgcaaacgtacgaagttgattactctaagggactgaatggttatttgactgattatgagtctatgtaccaaggttactatggtttgcttaaattccattctgttttcgaaaactctgattag

SEQ ID NO: 4958 - DNA, 303 bp, Saccharomyces pastorianus
atggccagaagtggaaagaatccagacatacgatattgtgtgatgacacaggctagctccttgacaactaatatagttttggcccttgtagtagttttgatgactctactaaggcagaacaagtcgttgcagaagtggtttgtatcgaatgtggaaaagcttttgttaaagaaaaccagcacaacccaaaaagtcaatatctcgtcacctagtctgaaactagctagggatgaggaatccacgggtgcttatcagcccaattttcccaagctgagttctggaggtccaacgcttttcgaataa

SEQ ID NO: 4959 - DNA, 1365 bp, Saccharomyces pastorianus
atgcatgttagaggttttctacccaatttcttaaccgttcaccaagtggtttctgagaatcctatcgaatttaagccctctgacaaagtaaagaatgagaataaaggtatcactatcccagagttgattaagagggaagcccccgagttagctgatggtactactgacactctgtacggtttgctggtgaacggccatttacaaactgcatatggctctgttaggcgctttgaaaagatagataaagtcgaatataaaagaatggtaatcaaatacccacatgggggggaagggactgtagattttgctgtaaagaatacgagcatcaaaaaaacgaaaaaaaaagagaaggaatacatgccggcgaaccagccgatgtttgatatgaacctgaaactaaaatattcgtactatgctcctgacgatcccaaattgaagtctgccgatacgaagcctatgcttattcttcttcatgggttaacagggggctctagagaaagctatgtaagggctattgttcatgaaatcaccacaaaatatgacttcgaagcatgcgtgttcaatgccagaggatgttgtttctccgcgattacaacacccctattatacaatggtggttggactaatgatattaggtactgtattaacgatttaaggaaaagatttcctaataggaaattttatatgatgggattttccttaggagcatctataatgacgaattacttaggagaagagtcagatcgtaccaagatcgaatgcgctatttccatgagtaatccattcgatttgttccactcttcgtatttcattaataatacgccaatgggttcacatttctactcgcctgcattgggccaaaacttgctacgtatggttcgaaaccatatttctgtcttagaagaaaatcccaatttcaaaactgttcttgagcaaaatttggataaaatccgcacggttaagcaattcgacaatttgttgacgggaccaatgtttggatataagaatgcagaagagtattatagaaatgcttcgtcatataagaggataccgggaattagaactccattcgtagctgtgcatgctatggatgacccaattgtcggtagtgataatcttcccattggcccagtgaaatccaatccttacactctgctaatagagacttcaactggaggccacgttggatggttcaaagatagttccggcaaaaggtggtatacagagcctgtatgcaagttcttaaaggcattccatgatgaaattacagtaaaggggttgaaacctgacttagataaagcgaaactgccaaatcctaaatgtgagcctatagccacaactttctcctcaaaagcagttcagtga

SEQ ID NO: 4960 - DNA, 1128 bp, Saccharomyces pastorianus
atggtcgcaatgttctacatacgcgtgatactgtctttactattattgccgctgattttggcgcaggactactatgctatactggatataggcaaagatgcctccgagaaggaaatcaagtctgcatacagacaattgtccaagaaataccatccagacaagaatgctgggagcgacgaggcccaccataagttcattgagattggcgaggcatacgaggtgttgagcgatcctgaaaagaagaaggtctacgaccagttcggtgcggatgccgtgaagaacggtggcggcggtgcaggtgggcccggtggaggtgggttccatgacccttttgatattttcgagcgtatgttccaaggtggccatggcggacctggtggtgggtttggtcagagacagaggcagcggggcccaacaatcaaggtccacgagaacctatctttgaagcagttttattccggcacgtccatagagtttactttgagtttgaacgacgaatgtgatggttgccatggtagtggttccgccgacgggaaactggcccagtgtccagattgtcaagggcgtggggtcatagtgcaagtgctccgcatgggtatcatgacgcaacagatccagcaaatgtgtggcaggtgtgcgggtacaggacaggtgatcaagaaccagtgtaagacgtgccacggaaataaagttaccaggacgaacaaattcttccacgtcgacgttccaccaggcgcaccaagaaactacatggatacaagagccggtgaggctgaaaagggtccggacttcgacgcaggcgacctggtcatcgagttcagagaaatggacacagggaatatgggctaccgaagaagaggccacaacctgtacagaacagaagtcctctcggccgaggaggccctatacggtggatgggaaagaacgatagagttccttgacgagaacaagcccgttaagttatccagacccgcacacgcggtggtctccaatggtgagatagaggtcgtgaaggggttcggcatgcccaagggtagtagagaccacggtgatttgtacatagactacgtagtcgtcatgccaaaggcactcgcacacgagcgcaccatgctcaaggacgaactgtag

SEQ ID NO: 4961 - DNA, 5274 bp, Saccharomyces pastorianus
atgtctgaagaaaaaaaaaagtctgattcaagagcgcatcaacttaatctgacaactcccagaaggaagttgaaattattgtcatctctcctagacacacaagagaattcacgaactcaaggttcggacatacgacacaactatttaggctctaatagcaataaacacagagtagcgaagcctatccgatactcagacaaccgtggatccttttccaccaggcagaaccatcatgttcatgataaatcccttcataaagatagcacaaaggcattgagctgggtggactctttaatcaataggggtaaaagtatacttaatacactggaaaaggaagatactttgtttgaacaagaacttgaagaagaaagaaaacggtcccaacttcatgagtctttgatgaataagtacactggcggtagtaaaccacaccaacgattagtagatctcaagaagagccaatatggaactgatacttccttccaaaataatgatgaaatcccgttagatagtttcataacttctctttcaccagaggttgaagacgagacaccatcagatatcgagtctgatgaagatgaagagttggaagaagatcaatcgtcaatcaaaaatgacgatattggaaacagtgatgataacttgtttggagaagaaaatgaccacagtgatgcttcaataataatattatcagatgaagagtatgcagaagaagcagcaccccagggtgtattaaatgaagatgaatataatattcgggaggaagaacgggttgagaataaaggcgaagaacaaataaaaagaaacatgaattcggatgaggaattacctaccgaacctagcccctgtaattcaagtgaacatgagaattatccagagttagtggaggaagaatatttcagtgaatcagaggaaggtgatgatgtagaaagcagctcagaaaaatatgaggatgaagacgaggatgaggatgatgatgaagatgaggaaggaactgggcattcaatagacttttcaaaatttatgcaaccgcgaaaaggcaacattgtagcttcaaataccctaaaccagcaacctaaccagcatgaagctaatcacatgtattcagaagatgatgcatttgattgccgctcagcggatatctcggtaaacgatgaatcggaagatgaagaagaccaagctgcaagaactgatttattttcaaagagtactggtagtatacagtatcctgatgagaaaggattgagcggtaacgaactaacgagaaagaatgcatcaccagacagtgcatcagaaatggtccaagaaaccaaaccagaaaataatcgagcttttgaagatgagctcgttcacggaaaagaatatgcgctagaggaatcgaataaaattaacaataatgaagatcaaaacattaacaaggaagtctacaatatgagtgagagagaccatgcggaaaccggtggggaatccgaagaagatggaagtattcaaattgcttcagacgaaagtttctatgaagataagttcgaaggcgaaaattatgaggcaattacggaagatgttaaaaatagtttgacccatcaacagccaaattatgagtgttcaccagacagcttgtatgatattgccgctaaagctatgcttcaattgcaacaaagtgaaaactcgatgcgtactcaggaagaaaagaaaattcttgaatccaaccaaggaaatcctgacagtgtcaccgtatctgtcataccttcacaggaagctgaagagcaaacatttagtcaaaacagcatcgtttgcgaagttgatgatgaagatccagaaatcgacggagataatcttgaaacgtttagcgttataatggctgagaaaggttctgagcaaggttcgcagtctactaaagcgaaggatctagggtcatcatccgctataacagactctgtagttgatgaaatatcaatagtgaatgaagatactgtttattattctctggatgaagccgattctgtgccagagaatagttcaaatgctttagttttggaagtccaagcaaaggcttctgcatacgaggtaatattttcgggatctgtgtatagctctacttctgaagacaactcggaaataatgccagcaccggtagagtatacatcacccttcatgaacaacccatttcattcatcaaacgatgaatatgaaaataaaaataacatattaaaatcaactctagcggccttggcttcaaccgttgatcacaaagatctaaaaaccgaagaagacgaagccgtcgaactatatccaggatccaaatcagaaaacgttgatgcttttcacgagccgggacagaaaattgaacagaagagtggttcagacgaaactatagggggtgccgatagtggaaatgaagatccccacgatgaaaatacgaaagaaaatattgagcatgcctctcattctgaattgggttctgtcttgagaactaacggcgacaaatcgattgaagaatctgtagaggagagctacttctctgctatcaactataccaatatcatagaaccgccttcccctcaagagattattagagagtccacttcaaatgtggaaggagattcgaggcttggaatagaagatgcaaacgaaatagaaatttcaaccgatactgaagatgacatcaaaaagagtatagagcacaaacgtgatagcttgacccaaaatattttcgggactaatttatcgaaaacgtatgaaaagaatagtgacaacactgactctttgcctattgaaagcatcgcaagagatggtgattttgatgaaaatttacttgagaaacctacgaatgctgaaattgattataatataattgcccaaggtcagagtaaaagcgagagctctcaggatagcgcacatcaagaatatgccacgaggttgaaatcggattataaagctgttgattcaaggcataggcaagaggtaaaacatcaagaaaatcaagaaaatctgtctgaaggaaaacgtacggattcggaaacggaatgtgaagcaaataaagagagagccagtcaagatgttatccatgaaaaagtggattacaatttgcttgccacccaacataatgtggacaaggccccttgtgaaaatcatttcgaggaagacgttttaagtgtagaattgggacacgaaatcgctggtgacaaaggtaatgaaagcaaaacttctaatgtggaggtacaatatcatggcaatatagaacaaaaacaagaaacaattgacgcggactccactcgaggaataattgtaggagcaagtaatttcagtttgtctgtaaacgatcataatgagaaaataattgttgagggtaatgatcaagaagtgaaaataaaagatgcaggaggtcaggcaacaagcgttattcaggctaaacaagaagacaatccatttattgttgaaagcatcagtaacgatgtgattgaaaacgctagtaaaaactctgaaaatacggatatggaaacaatacaaaaagaagttttctttgaaggaaaatcaaaaaattttgaacactcacaagttgaggaagaaaacgacgatattaacgatactgccaactcggctttttctgacttaaaacaaggatctgatcaatcggtatccggggaaaatcttgagagcgatacgaaaccatgtttggaggtccagcattcaaatccagaacatgaacctattgaactgtcaaagccagtaaccgccgaatcaaacgtgttctcatcccccattcgtgcacttgagacagtagtgaggggggtgaagaatgtggtagacttggcagagttatttgtgaaaaaaattgatgttattgattccgaggctgaagacgcagctgatattagtaatggtaacaaagaagcttctgaaaacttggtttcttccaatgaatctaaagatacagaaagtacaaatatatcgataaatgatagcgatggagatgcaaaacatataactagggctaccctaaccgaggatattaccgcgagattatgtgataacgacgtcaatcatgtaaagtacatcgaaacgatgaaaagtagtcatgatgaagaagaactgggttatgctagtgatttgaaaatatctgaacaaaaatcagaagaagaagaaaaagaaaaactggaggagccattaaccgaatctacacaagtagaacagtataacgagaacatccgtcaccacgctgcggaagaaaagattgagcccatggttgatgagaaaccatcaataaacgttcacacaaataatctggacgatgttaaaagacagcaacttctcgagaacttgagcgatttacaaaactactctcaaagactttctgaaggctctagactgggcacaaatcaagagaagttagaaaaagtatatatgggtgattttgaaggtgcctcaactaaaaaggagattgaagaggaatgtgttggatctattgaagaagacagcgttcttgagttgaatttgagtacaccttccatcgaaagtgagggaaaactattaatgagggaggaaaagtcaatggatgccctacattccgagccagaagaggaagaactgtccgcatttgaaattcaaaggcctttagaagcggtagtttctggcgaaagtgatggtgaagaacaaatatttggaattataccatcgacggaccttccttctgatcctccatccgatacggaagagactacagatcttcacaataattcaaatacagaaagtatgcaggttgaaacaaactcatttgcatcaccagaagtatatgaagtatcctcggacacaccgattgaagttctagtgggaacaggtgacgcactactcaatttcatgtcagagaaagacagttgtgacgcaacagcgcctgtattagatgttgcctcggatgattcacccagtcataatgtaggcaatcagaccgacgaaaaccctgttgatatcaagataaatgaaggcggggagtctgaatcgcaagctgtagatatacctgttcaggtattcgttaaacaagaacgggaagaaaagccttcagactctaaacttgaaaaagaggaactaaagtcgaacgatggcgagagccttgatgttaaggaagccgaagaaatcagccttggagaaagcaaacctaaaccgaaaaagaagagccgtaagagaaactacaacagtagaagaagaaaaagaaaaatcacagaagatagtgctcctggtacaagaaacaagaaaagtagagggaaaggcggtagtaggtaa

SEQ ID NO: 4962 - DNA, 1563 bp, Saccharomyces pastorianus
atgctgacttcaataaacgtagttttgcgaatacagggagcaatggccacttcaaaaacattgcgatacgcacaagttgcttgtgcttgtatttggtgtcttttctccgctggcattgtatttggatttgctgctttgaagcccattttgatttcagaaggtgtttaccacgaattgtgtgatccagaagacggtgatggcttgctatgtaccgcccaagacctgaaattaaacttcatatttgctctgggtgccactgtaacgaacgtcatggctctgcccgtggggaagattctcgatatatatggacctcgtgtttgtggtttgatcggatcagggttcctattcctagcgtgtggtaatttcatttctgctagacatttgacgtctgtctgggacccctatgttgtgggttacacactgttggccattgcaggcccatttgtattcatatcatgtttccaattggccaatagcttcccacaaagatcggggactatattggctttattaacgggatcttttgattcatcatctgctttgtttttgatatatagactactgtatcagaattggtaccctgatctacgtgtttccaaatttttcactatttatttattggtgccgttgtttatccttgtctgccaacttactgtcatgccccattcttcctacaagaccgtaaaccacattgccaagattgctgtggaaggcctagatgaaaatggaaggcttattgagggcgatacaggatctaatatcattcctgatgagcaggagcgtcaagcgttgattgcaatggaggaggacgaagagggtaggacgcctaacgtcacaccaaggagaaggaaatcagtacttgaaacttatgttgaaggaaaactgcagaaaaaatccggaggtatatttggggtcctgcatgggaaatctgccttagagcagataaaaagtccgtggttttatttaatgcttttatttgcacttgttgccatgctaagaataaactattttatcgctaccgtcagaactcaagaagaatatctgttgaatgataggaagctcgcactaaaattgaactctattttcgatgtgttgcttccaattggtggcgttgtttctataccgttcatcgggttgctcttggatcatacagatactttaaccactcttacagtattattcactacttctactgccataggtatattcgggttgattccaaattctttcacctttaatctaatagggatagccctcctggtagtatatagaccattctattacactgttgtttccgactattcttccaaggtttttggattcgacacatttggtactgtttatggattactgtcttgtgtttgtgggattttcaacatgggccaaaatttattagataaatggacgcataccacattcaacatgaacccattccctataaatcttgtcttggtaattttcaccatcgtattttcactaaccattacattttttattagggcgcagatcttgcataagcctagggaagaaagagtactgtcctcagactatcaatctatttaa

SEQ ID NO: 4963 - DNA, 291 bp, Saccharomyces pastorianus
atgcaacacgagactaacaatagacaacatcggtttccgatcttcttatcagccaaggttgccagactagtgcttgctgccatcccgccagcacaacgaaacatgggcacgcagatccagtcagaaatcatctcagactacaataaggtcaagcccattgtgaaagtgacatacaaggacaagaaagagttggaagtcgacccgtcgagtatgaatttccaagagttggccaaccattttgaccgccactctaagcagctggacttgaaatatatgctggaaatgcactga

SEQ ID NO: 4964 - DNA, 477 bp, Saccharomyces pastorianus
atgattccactcgcaaaaatcatagccaactgtgataccgtcaggagtaaactaaaggatttacaagctttgaaaaaagattacatgctatttttacaagaaaaaaaggctaatgtacgagatgtgaaacgtgatttgttgggaatgcatttccaaaacttgcaaaatcaaatgaaaagggaacttccagttttcattactttaatccataatacggttgaatgtatcttactgaactataacaaagtttttttaaaatatctagaaataatcgctggtggaaaaaaatatctgcaaaaggatctacaaaacaaggctctcaatgattctacagagacaggtctagtcaataatcttgacatcctacaatgctactctaaatcacggtacatgacaaaacgcatggtaagaaaagactggcccttccttggagatcctagtggaagccgtgtcattcgaaaactatttgaactttga

SEQ ID NO: 4965 - DNA, 1542 bp, Saccharomyces pastorianus
atgttcaagacatcttataccttgtatgatttaaactatccaacaaatagttcactgacgccaataagagactacaaaaatgattatttccataaaaacgataataaactaccggagatagtgagaaaacccactagaatgttatcgaagcacgaaggcaaagttaatgacaagaaatctacaaacaaaagaccagcaagtcttgacttacattccatagtgaatagtttaaacagcaaaagaatatattctcctatcaacacagaaaaatttcaaagcgtggtcaggctggattcaagcccccacgttcccacttccgcatatggaggatgtaaattttataaagttgttcagaagttgtatctttctgagatcgattactacaatgttttattaactgccaataacgtatacagaaaagcattaaatgacgacctaagattcaagaacaagctaataaagtctgactcaagtgatgagttgttgctttttgggaatattgatactattgcttcgattagcaagatatttgtatcagcaataaatgacatgcttttggtcaaccaacgtgggaaaacgttagacgcaaatgattggggaaaaataaccactgatgctgagacccaacagcagttatattcagtttttgatatttcagaggcgtttgaacaacatttattaaggaccaggtcaacttatatgagttattttgttagccatcaaaaacaaatggaactatttacttcattgagggctaataaaagccatgtcttcaacatgtggtacgaacattgtttaaaggaaagtggttgcttgaaactagaggacatattggaaagcccaatgaaaaggctaattgaatggattgatacgttggaaacattacagagctgttttgaagatgtaatttcgttaaaattgggctcgaaattaagtcaagctagaagaaaatactcggtatttgctaataagttggatacagaggtttcggaatacaaaagcaactccatgtataacttcagtttaaccccgtcagagattatacaaagttatgatgaagacccgttttcgcatcttttaaagcctccagacaaccaaaataaaaggaaaagttatgcttctcgacacgggagtgatcccaataaaagtagggtcccttctctactttctggttcatcaagcttttattcggaagtttcgggtttagagactgttagtgatacctctagtatgccatttggaactgctccgttagaaatggacgaagaagaagagttttatactctggcagatcatattagcaaattcaaaaaagtatcaaaacatttgtcagacttacaaaagcatttattaaaaaacagtttttcagacattattgattccagtttacagagaataagtgcttggaaaaaggtaatcgaatgtgaggcacctttcggtgcatttttcgaacacgataatctaatatcgaccatgtgtttgtcatacatagataaactacatgaacagaaaaaccaagtaacaatcctaaaactgacataa

SEQ ID NO: 4966 - DNA, 714 bp, Saccharomyces pastorianus
atggccaacgagggtggaacacgttatgaaattatggctgacatcagtaaatatatcccgatggttgacgccatattaagtgcgtccaacccagatgaaataagtccgaagagggttagaaaagcccttcaaatcctattttcagttgatttggaccctcaaaggaaggcaatcaacgaattgatccttgaaaggtttggtgatatacaagaaaatcctagagttttggttccaaaggaggtccttatcaatcgagatcaggaattagcttcgaaactgcaagaagagggaggaagacctctaaggtcaacaaagaaaagaaaaagtaagactgaaactaaaccgaaaaagaagaaaaagaggactgaaagcactgactctaacagcatttcagtccgaaaagttcttttatcggctcctctacagaagtttctgggggccgaagaattgccaagaacacaagtggtcaagatgatatggaaatatattaaggagaatgacttacagaaccccgaggatcgtcgagaaatcttatgcgatgagaagatggtgcccatttttggtaaaaaaatgacaatgttttcaatgaacaaacttttaaccaagcacttgtttaatcctgaagaaattgtcaagcacgaagaaaaggaggaaccgatgcctaaaaaagaagtcaaatcggaagatgagctgcttccgaatgccaccgattaa

SEQ ID NO: 4967 - DNA, 123 bp, Saccharomyces pastorianus
atggtattcactaaagtgcataatgaaatgccttctagattttctgagcctgtggctcaactggttgacgataacattctaaagtttttaaaaaattttacaaatgacacattcgataattaa

SEQ ID NO: 4968 - DNA, 936 bp, Saccharomyces pastorianus
atgtcatctactactacagcgaacgtaatagagaagaagccagtctcgttttctaatatcctgctaggtgcgtgtttgaacctgtcagaggtcactacattgggtcaacctttagaggttgtcaagaccaccatggctgcgaacagaaacttgacgtttttggagtcggtcaagcatgtttggtcaagaggtggtatcctgggttactaccagggtttgattccatgggcatggattgaaggttccactaagggtgctgtgctattgttcgtttcggcagaggctgaataccgctttaagagtttggggctaagcaactttgcatcgggtataatgggtggtgtcacaggtggtgtcactcaagcttatttgaccatggggttctgtacttgtatgaagactgtggaaattacaagacacaaatccgccactgcgggtggtgtcccacaatcttcttggagtgtgttcaagactatttaccaaaaggaaggtatcagaggtatcaataaaggtgtcaatgctgttgccatcagacaaatgaccaattgggggtcccgtttcggtttatccagattagtggaagacggtatcaggaaagcgaccgggaagaccggtaaggatgacaagttgagcgcattggaaaagatcagtgccagtgccgtaggtggtggtttaagtgcttggaatcaaccaattgaagtcatcagagtcgagatgcaatctaagaaggaagatccgaacagaccaaagaacttgactgttgggaaaacattcaaatacatttatcagtccaacggtttgaagggtctataccgtggtgttactccaagaatcggtttaggtatctggcaaacagttttcatggtcgggttcggtgatatggcaaaggaatttgtcgctagaatgacaggtgaaaccccagttgctaagcattag

SEQ ID NO: 4969 - DNA, 441 bp, Saccharomyces pastorianus
atgagaatctttgcttcaaacgaagttattgccaagtctcgttactggtatttcttgcaaagattgcacaaagttaagaaggcttctggtgaaattgttaccattaaccaaattaacgaagctcacccaactaaggttaagaacttcggtgtctgggtcagatacgactccagatctggtactcacaacatgtacaaggaaattagagacgtttctagagttgctgctgttgaaactttataccaagacatggctgccagacacagaactagattcagatctatccacatcttgaaggttgctgaaattgaaaagactgccgacgttaagagacaatacgtcaagcaatttttgaccaaggacttgaaattcccattgccacacagagtccaaaaatcttccaagaccttctcctacaagagaccttccactttctactga

SEQ ID NO: 4970 - DNA, 120 bp, Saccharomyces pastorianus
atgatcttgccgttcttggggtcggtggcgtccagaacattggctctgtccaggcactggaagaacacgtccctggactcccagcacagcttccgctgcgaccgggtgttagggggttga

SEQ ID NO: 4971 - DNA, 810 bp, Saccharomyces pastorianus
atgaatggtgggtctgcgatcagcatagatgctcaaaaatttctgtccaatgtcctgtgtcccatgctgattggttacgggttaacagaatgtgtggccaacgcttgtgtggtagaacctgaccatttcttcgaattcggtgtcgccggtgatattgttggtaccatgacagctaaattagtagacgttgaagagttgggttacttcgcaaaaaataatcaaggggaattactactaaagggtgcacccgtcttatctgaatactacaataaccctgaagaaaccgccctcgctttgactgaggacggttggttccgtactggtgacgtcgctgagtggacttccaggggacaagttaaacttattgacagaaaaaagaatctggtaaaaaccctaaacggtgagtacattgcattggaaaaattagaatccatttacagatcaaacccttatgtgcaaaacgtctgtgtttatgctgatgaaacaaaagttaaaccaatcggtattgtggtacccaacttgggacctttatccaatctggccattgagttgggtgtaatgcattctggtgaagacgttgagtgttatatccacacaaggaaactacaagatgctgtttggagagatatgataacaactgccacatctcaaggtttgaacggtattgaattgttgtgtggtattgttttctacgaagaagaatggactcctgaaaatgggcttgttacatccgctcagaaattaaggagaagagatatcttagccgccgtcttgcctgatgttgaaagagttttcgcagaatgcggttaa

SEQ ID NO: 4972 - DNA, 1221 bp, Saccharomyces pastorianus
atgaccgaacaattctccgtcgaagtcggcaaagccgctaacgagcatgaaaccgctcccagaagaaacatccgtgtcagaaaacagcccatagtcagaccgttgggctcctccgcctccacgatgtacgaattcgccctcgagtgttttaccaggggtggcaagaagaacggtatggcttggagagaaaccgtcgaaattcatgagaccaagaagaccattgttaaaagggtcaacggcaaggataagcccatagagaagacgtggttgtactacgaattgtctccctaccaccacatgacctacgaggagatgacgtgcatgatgcacgacgtcggtcgtgggctgttgaaaataggtgtcaagcccagtggtggagacaagctccacatctttgcctccacttcccacaaatggatgaaaacattcttggggtgcctgtcccagggcatccccgtggtcaccgcgtatgacacgttgggtgagagcggtctgattcattccatggtcgagaccgagtcctcggccatcttcaccgacaaccaactgctagccaagctggcagtgcccttgcaatccgcaaaggacatcaaattcgtcattcacagcgaagccatcgatcccaatgacaagagacagagcggtaagctgtacaaggccggcaaggccgccgttgataagatcaaggaagttagaccagacatcaaaatctacagtttcgacgaaatcgtcgaactcggtaagagggccaaagacgagatcgaactccacttccccaagccggaggacatggcctgtgtcatgtacacttccggttccaccggtacgccaaagggtgtggtattgacccatcgcaacattgttgccggtatcggtggtgtgggccacaatgtctacggatggatcaactcttcagaccgtgtcattgcattcctgcccctggctcatattttcgaattgacttttgaattcgaatccttctactggaacagtcttctagggtacgccagcatcaagactttgacctccacttctacacgcaattgtgaaggtgacttggtcgagttcaagcccaccttaatggtgggtgtcgccgccgtatgggaaacaatcagaaagggtatcttggccaagatcggcgagttgcctagcttgtcccaaaagctcttttggaccgcttatgccctcaaggaaaaaacgtgccatgcagtgggtttataa

SEQ ID NO: 4973 - DNA, 2793 bp, Saccharomyces pastorianus
atgaaagactacaaatatgatgacaatggaaaattattcgaaggtaacggtagatttttaaaccaaaaaaacgtcaccatgctttatcacagtgcggttgctaatcaacagattgagctattttgcggtattttaccaaagctaaatacagacttactttcaatgctgctcctaaatacagactttcttttcagcgccttgtacaaagtttccgaagaaaccaatgaagagctctttaagtcatcattacagttggcgaaaagagaccctgaaattgctgatattttggcacatgctattttgcaatacgttcaagaccattttagccctactacaaaagagaaatacattagacataccgtagagttgataagcaactgcagtgatacctcttcaacgtttttccccactgatatgattgatctttttgtcaagtatgtcccaacgattgactacagatcgtctttggtgaacatcttaggcttaaacacacatttactcttcacggaggacaatcctcttgatttagcaagcatgcgaaaactgattaagcatgccctattcctagattcactactcgaagcattaccagaacatattaacaaccgtatcattgcatttatatcaacagtctctgaagcagtcacagattataattgtctttcagccgaaccaaatgattccttttacgatttcgagcatacttttttcaaacatggtaagataaattcagacttctctactgttatcgaaagcatcacgcatcctgccgatgaagatggatctctatttacgaatagtgttgcaaaaagtaatcttgtctactttttctattattcaagaatattatataaaattttgttgaatggcatggatacggtttcatctgcaaaactaaacgaactgttgccatcagtcgagaaacacattaccaaaactgtaaggaatcaaaaatcttctgataatgattacttgttatgcgctattcttctcttagtgttcaacagagcgaacgccaaaaatgaaatgaccaaattaagaacactgttggcgtctcaactaatcggaattagagaaaatgaactagtcgaccgcgaattcaaatcgttaatacttctgaataacttgctggatatatcagacgcaggtgaccaattcgttcctatcgcaccacaaagattaagcatggtgtttggttcgataggaaaatggctcgacagtgaccttgcctatgaacctagcttcattactgttaggctggcattgctagagttttttaccaagttactgaagtttgaaggggttagagacttgggtgtaacagcttttgaaatttctgaaaggttagttgctgattctctatcaatgtgccaacttgatgacactatgtttttattggagttgcgttcttcctgtttgaacttatatgatacattgagcacgtacagaaatgacaaagaatcaccagaatacagtaatgaaatctttgaaaatttaattgaattgattttccttaactatagtctagaacggaataatcaagtctccacaattttttacaaaaaattgtacaaaatcatttcctcaatgaaattgaaaagttcaaagccacaatatgaaaggatatttaacgctgtcttatacgataaggacactggtgaaaacatcaatcaatcaagacttttaacaagtattttgggatctttgatcgtggaaacacaacaagagatcataattgaatacgaattgaaagtccaaaaacaagctgcatcagatgaagataacggtgactctaataatgatgtgagctctaaattcaagttacctgaagaactgttactaaaagtgaccagtgatgtaccaaaagagtatctcgagtatgaagataaaaattcgtttatcaaatacttgtggttttggcatttgattttgatgtactttcaagatacatcttacaacatgaggcaattattcatcgaacagttgaaggaggccgatttaatcaataaaatgtttgattttataacggaccaaatagatttacaagatactgaattttggaaacaggttgatgttgatgaaatctcagggtatgacattgttggaaatgggttctcgccatataaggaagatatctttgcggagtgtaaaaaattgctgggacatacgctttatcaactatttaataacgttggttctttgacgaacacttggtggttaaacattaaagatagatcattgcaaagcgatattgaaaaattcgtctctcaatttgtctccccaattttaattgacaatgaattcaacgagatcaactctaagatggatcggctaacgtctagtgacgatgcgttaacgatcaaattgaataatattaccagtgaagtgaaagcaagttatttaattgatgaacaaaagttggagatctctttcagattaccaaagaactatcccttgacaaatattcaagttacaggtgtttctagagttggtataagtgaacagaaatggaaacaatggattatgtccacacaacatgtaatcattggcatgaacgggtccgtgttagattctttggagttgtttaccaaaaatgttcatttacaattttcagggtttgaggaatgtgccatttgttactctatcttacatgctgtggataggaagctaccttcaaagacttgtccaacttgtaaaaataaatttcatggggcatgtctttacaaatggttcaggtcttcgggcaataacacatgcccgttgtgtcgtagcgagattccatttagaagataa

SEQ ID NO: 4974 - DNA, 1809 bp, Saccharomyces pastorianus
atgtcgtttggtggaatcaacacgtttcagcagtataacacggatttaggactgggccacaatggtgttagaatatcgttaaactacttcgacggttcacccgacccaagtcttttgaattctctatcctcaaacgagttgaagcttatctttaaatctcttttgaaaagagatgaaactacaaaggagaaggccttgacggacctttctaatttaattgatggttttaaacaaaatggatatctttttgacgatattcttctcctttgttggtcgcaagtatatgctaaactgatcgttagtgattcaaagggtatcagactgcaatctcatcaaatcacgttgaagctggtcaaaactctcaagaaaaaaatatcgaaatttttaaaggattttattcctttaattcttttgggtacgtgcgaactagactacagcgtagctaaaccttgttgcaatgaattaatggattgcttcaataacgatccagcaaagataaatgctttgtggattgtctttcaagaacaactattggatttaatcaaggaaattgttgtgaacgaaaatgaagaaaccatttccgatgaacgctactcaactaaagaggaatccggatttagatatcagagaattatggcgagtgcggtgttgctgttgattaaacttctggttcacaataaagatatatccgaacataaatcttcttacaaggcaattctttctgatgagtcaatctggaaattattgaatctgaaaaacagccaaaatacaaagacatatgaatcggtcattcaactgatggatgttctttatataagcggttacatgggctcgcacaaagatacactcaagttatcgacaaagaagttgttcaaatcgttagcgcatgtctcgtcaaagaacatcttaaaagtatctccggtggttccaaccataataaatcttctatccactctagacagttacaaagacgggaaaatatggacatacgacaaatcctccaaagacaaattgatcggatttctgtcgatctcttgtactacgccatcgccagggtttttcaagagtatgttaacactatatacctcgactaaaaagcatgcatttcttgattatgatctcgcatggcttccaatttggcaaaaatcgattcaaaaacttaatgaaaagactttttttggtagaaacggtgccgaagttcttaatgaattctgggtaaattttttaaagtttgctaatgactcatctgaagaaaatgtgaaagagatgacggagtttgagattttgaacactttatctaatgggaaatccttggctgagttcacgtttttgaaccaaactctttgtgatgctcttccatctgataagtgggaaaaagaaattgaaagttttttcaaatcagacgatgaaacaagacagaaaaacgaatactacgaaaagaacatatttgctttactagttatcgccactaacaacaaatcagcaattatttccttgtttgacttcctttccgaattaattcaaacaaatccttcaaatgtccttaccagatatgaaggtatatttgaagtttataattactttctggattctgatatggattttttgggtgataagataaaaaaacttatgtatgatattccaacctgggttgaagaaacatcatatcaaaatcttgctggtatcatgacacattattcaaattctaccttttttgagaacaatgaagacgtaataacttcatttgaagattatttcactgttgcgtatactctcaatattccaaaaactataattataaacaaatag

SEQ ID NO: 4975 - DNA, 507 bp, Saccharomyces pastorianus
atgcagaattacctacaacttactcaaatatgttttcacacacgtgattttaaacatgcttgctatttgatttcacaggctaggaaaatgttggacacttctgataataggcaatggatgatgtactatatgacatccttgaagctagccgcaagaatgcatgaaagcgaacgatttagcaaaactttaaaagactggaactgcaatcaaagcgcaagtctaatcactccaggttgcattagacaaataaagggatttatgaaatatttcgagaaaaggtcagcttacatgtcaactacaactcccgttgacaccaaggagataaaagaccgaatcgacgaattggtggttagatatgcggactacaaattccaaggactagaaaacatgcgaaaattaacaaattttttaaaagaatggtttgatgaagaaattttattaaggaacatcgaacaaaatgaaaggaaaaaagagcttcttagggagcatgaaaagggagaaatatga

SEQ ID NO: 4976 - DNA, 4257 bp, Saccharomyces pastorianus
atggcaaaacgattatccaaccatcaagatgaactatttcgaattaaagagtttttgatagctaataatccagcaaagattaacgatgaaaataaaaacgatacattgaccaaattcgagcaaaattttggatatctggtccaatatattaaagatgggctaccggatttaaacgaatccacgaagttgattttcccggacactttctcgatttgtttgttaagaagtcaccaaatcattgtaagcaaaaagattgattctgaaaaatatttatcggttgtaagtaaggatattttaactgtcacgaatagtaacgctatctttgaatatgttcttgactattgggctgatggtggcgctccgttgacgaacgctttgagagatctcttcgggaaattactgaatttactaaaagttatatatcctatgtcagttttgaaggatattttatttaattggatgaacgagatattagaaataccctctacattacgtgtccaatactacttaattgatgcgctttcttctgactttgatctctactacattttagaaaaaaagccaaacttcatcgaaaactccttctctttgatgggctccgatttactagccaacccagtcggaaaatgtgttgttggcttactgataaacgtttataaaatgcattttaaagagaatgtgaattttatcgaggaatggatacaattgtggaaaaatccggctctgaaattcattcatgacagccggtataccaaatccataaatttgtatgttatgattccgttatttagaaatatgccgaatacagcttttacgagttttcttaaacagatgcctattaaggatccatcactcctgctttcgctattaaaaattgggcaggaactgggtatagaagaagagccatttcatgacaacaaatatgccacgatagagttggtcaataaacttctggagcaagatgaatttaaactccaagtatttgaaatactaactttttcgacgaaaaaatcgaagcccatccatccctatatttttaaaatcattgaacaacacttgaatgcattttttgtggatacagaacttgaacggagaaattacttttgtagttctatgaagcatttcatttttcgagttagagattgcacatattctttagccagagatgcgggaaagcttaaaaaggctgggaaatttcctgatgagcagaaggaaaaactaacccaagtagaagaatcgcgtgcctttttagcttggttatgtggttatatcaaacaccaattggcaccaggttctttgtaccaaagtaacgtaacagccctgaaacttttacgtatactaattaagtctggtattgataaagttacgccacatcagtttttggataaccaaaacaaaagagaatacccattttctattacagtcttgcaggacgttacatttttgagactacttactgatcttctagtcaataattttgccgatgttcgtgaattgtccaaggaattgttgtttgtgatgataagcgcagatgaatctaaacaatttctagacacaataaacacgaactctctagaaaggactgctgattcactattgaacaaatatgaaaagggtgatgcaggtgctacagtatacgagtttatttttactattactggttcacagagaagctttgttgaccgcacaattggaacattatcgcaaatgatacgagatttgcgtgatgacagtattggctgtgcagaaaattcaatcggcgcacactttgcggctctgagcgcagttctggataagtataactttcaagaaaatattcaggatacatccaacataatctccaaatcaatagatctcgtacttgcgaactgggaagccacgaagagtgtagtatgtcatgattcagcacacggtatattgcctgagaaatatattgattgcggggttccagatcaagtaataataagccatgcatttagagctattaaggaagcatctgccttgaccgaaactatattaaaaagataccctttaacgggtgatcaattaagctgtatcggcgatcttttcacacttcaactttcaaccattcgtcatagcggtgcattccaagctgttctacccggtcttaggacatattgtgttcgttgccagctcgaatctcccgcaatcttggaggagcttttagccaagagtatgaagtctttagaatctaaaacccaacatattacaagaaggtcgggaggcttgccctttttggtaacaaccgtcctaggtgcagaggtaactaaggggagacctttattgcaaagtaatttcaaaaaattattattcattgcaaagcttccagttcctccccaccaagatgaattcgacttaccccaggttaatgctataaattgtataaacgcgatatttgttgaaccaaagctctctgaacactgcacgccatttgtttctaatgctttagaaatagccttattgaactttgattgtgagatatgggctttacggaactgttcaattatgctgttcacctccttacaaaatagaatttttgggaaagtgggtagaagcgtcagtgcaaaattatttttcaccaagtattcaggtctgagaagtctactattagatattttaaacatttcggtttctcaaggatctagtgatgagaagaaaaactacaaagttgagagtattttcttaatcctcaacgtgttacttaggttgaggcccacaccaggttacactggattgaacgaatttcgtggtctggtttacaaatgtttatctaatgagaattggaagatcagagacatggcatccagagttttgaattcgttgtctgaaaatccagaagaagaaacaaggaaactgcttgatttggcatccactaagagacaaaaccagttgcatgcgcacttgctggctcttcagcacatagccccaccataccttgaagagaatactgatagtgagttaatccaaaaaatatttgaaaagaaaagcgagtttttagtgaataacaaatgtttcgttacacaaaaggcctacttagaattaacacggtctatattaggaaacaattgtggtacaccagaacctattctagaggactatattagggctctaagaaatgtatttacttctgagaataatgaatatgccatcaacggtagtaaacagctatatcttgctcaagtgctaggttttctcttggagtatgaggatagcgcgcattttgaagatatctatttattgggattgtactctccattttatgaagttcaacttaaaacactacagcatatggatacccattttgactggattacaatgagaagttcagagtttctcgaaacactacaagtactactccaagttgagaatttattgcccatggccaaggctttagttgtaaaaattctatcaagaaaggagggtgctctatccttatccacatctactcacctcatcgaaaaggataacagcgaagaaacaaaactctctgccatctcatcgctaagcgctcaattgtcttcaggaacatttaatcagatttggagtttgatgcaggaatttttctccgattcttgttctaaggattttaggctagcatctctgaactgtttagtcgcctatcctggtagtgacaaaaactttaagatattgcttcaattattcaactttttatgggacgatgattcagaaataagagaaaaggcttcattttatttgaataaaaactttattcaatctgaagattgggaatgcaataaaaatattggtgtaacaactcttctttttacgaggaagtttgctgaaacttttactggccctgacgtcatagaagagttgtggtcacagctgtttcaatatgtgaatgaatgtgatatttttgctgccgaaaaatcagcaacgaacattctctttactacagaaaaagacaaccagtttattaatgaacttgaacgggcaatgcgtttgtttgacattataaaattgactgcaaaagatattccagggcgttacaaggataagatatcctacatgaagaacactctactaaagcatttcaacaatgagaacatcagagactgtcccattggctggtgttctaatgctgaagttttttcaagagttacgttattgaagatattgattcagtgctacttttcttcagaatatctcagttttatcgatgaactaacaaaacattgtgttcatccattgatcattagtttttctcaatactag

SEQ ID NO: 4977 - DNA, 978 bp, Saccharomyces pastorianus
atggcagattgcgaccgggaccatgacactgtagctatgaataagctggtcgatgcacattgccatgttagtactgatccagaaagctcatgtggcggagacgacggagggtttcagggcacggtacgatgtgtgatgtcatcaaacccttatgactggagcaatttgaaaaaaatggccagcaatggcagacggaaggacgatatgtgcgtagggtttggcgttcatccttggtacagtcatctattttatgtgggggggcaacgcgataagctttcccactacgaaggcgtactggagtataaggacggagaccagttcgcccgtttggtccaggtgctgcctgagcctctagatcttgaagagtatatagcaagggagttcgacggcacactggttggtgtgattggagagatagggctggataagctttttagactacccgcaaacgggttctacacgcaaggcgagaaggccaggctaactacggtaaaagtcaaactgtcgcatcaggaggcggtcttcaggcggttctgtcagttggccagagacacacgtaggcccgtctccatccacgacgttaagtgccacgggaaactcaacgacatctgcaacgaagagctcttgccctgctcgtccgtcaagatatgcttgcactcgtacacagggtccaaagagacgctcttgggccaatggctcaagacgttctctccggaccgtgtctttgtgagcttgtccaaatggatcaacttcaagaacccagaagagggcaacggcctggtcaggagcctaccccccatgtgtatactgacggaaaccgacttccccattgacaatccagatccagcgtaccaagcagatcttactgagcagctgcaatatctgaacgctcaaatagcgcaggcatgggatgagggccatgattcctcacaggctacctcgcatgtgtacgacaactttcagaggtttattaaatag

SEQ ID NO: 4978 - DNA, 702 bp, Saccharomyces pastorianus
atgattgtgtggtacactgtgaagtgcaattcgttcagttgtttggcgttttcgaaggggcaggcacagcacaagacaacaatggcaagaccgattaacggaaacagcgaagtagaatcgagaggaagggtcctccagggcggtggttacgcaaataacaacaatataaacaacaacggcaacaacaacaacaacggcaatggaaacggaaacggaaacggtaataataacaataacaacagcaacaacaacaactcaaacaatgggaacgggcctggagccaacgggagagctaacgggaagcaaagactcacggcagcacagcagcagtacatcaaaaatcttatagagacgcatatcacgaataaccatgctgatctgcgcccaacaagccatccggtggattttgaagagtacacggatgcgttcctgaggaagtacaaggaccattttcaattggacgtgcccgacaacctcactctgcagggataccttctgggctctaaactgggcgcaaagacctactcgtacaagaggaatacacagggacagcacgacgcaaggatacacaagaaggatctcgccaacgtggtgagaaggcatttcgacgagcattccatcaaagaaacagactgcataccgcaattcatatataaggtgaaaaaccagaagaaaaaattcaagatggaattccggggctga

SEQ ID NO: 4979 - DNA, 1371 bp, Saccharomyces pastorianus
atgtccagcaagagcaacgatcactgcgttctgaggaaatggaacagttgcgctcacgaattggccgtgccctcagaggtccctgaacatgcgattacgaaattgcacatatacgatttcgacaatacgctgtttgctacggcgggccctacagagcagttatatacacgcgagctgttgggaaagctgacgtcaagtgatttgccgaatggcggctggtggaatgagccggagtttctgcaggctgctattgagatctcgaggagtaaacccagacggttttcatggaatgaagagatcgtcaaattggcggagggttcgtatcgggctaaggacaccctctctattattttaacaggaagggaagagaagaaattccacgagttgatacagcgtgctctggaaacggcaagaagccttaaggaatgttcaccggctgaatttaagttcaatgcggtttgcttaaagaaaaccggagtttcgaaatataccagtgaatataagaaggagctgatgcatgactttctggaatactacccttcgctgagggaactgaccatatatgacgatagagtgcaccaaatagatgcgttcaagtcgtttttcaattctttggacttgcctcgtttgcaatggtttgccatccccgtgccgccttttaccaaaccgctgcccaaggaacaagagcttgaaatagtgatggaaatggtcagaaaaaataacaaccgagtgtttgagtcttcgcaaaagtttgacttggcatggacgccgaaacagactggtttcatccttaccgtggcatcgcatcggttgctatcgatagaggttatgaaacttttcagaaaaaggagaggaagaaaccacaagaattttggcggaagagcgttcaagccaaaactatacgaatatcccatgtatataccctgtgcggaacctggcaatagcatccctgtgctcgaaaccgttaagatatggtctaacaatgacatctccacttttgattccgaggagaaagtgcaaagcactttaaaacagttccgtcagcaacagcctggaaaatgcatggttcgtttccaagtcaccgacatcgccataataccgtcaagtcattacaacaagagaaagcccttggaggtctatttcagggccataccggagccaaatagatacactttctcgttgttcccggaattcacagtcacgggtcatttttacaacaataacgtgattgaagatttagacgaggtcacagatcgtctgctgaacagcaaaacggctatccgctggactcctttagataaggccgttcctataaagaccttttttgggcaatatgccaagttcgcatctgtgccatatcccaacgattga

SEQ ID NO: 4980 - DNA, 2859 bp, Saccharomyces pastorianus
atgggcaaccaaacaactactgctactgcctcaaacacgtcgaccgagcaggtcgttacggctttggtcagtaacggtgctatctttcttgctttcatcatagccttcatactgctacgtatgaaattgaaaaggatatacgaacccaaatcctcattcaaccttatcaatgaagagaagaagccagaacctttgccaaagggtttgtggcaatggatcaagccactattgaaaaaatcggacaatttcatcatccagcaagccggtctggacggttatttctttttgaggtaccttttcattctttccgtttattgtgctgtatccctgctttatatctttcccattttattagctctcaacgcagctggtggaggtaatcttcaaaccggaatgaatcgattggcttatcagaacgttaagcaccgtggtcgatattttggccatattttttgcggatggattttcttttgggggtttctttacattgtatatagagagttgtacttttacacttctatgagacaggctgtattggcttctcctcgttatgctagaaaactggcctccagaaccgtacttttccaaactgttcctaagcaatacttgagtgaagaagaattttccaagttgtttgatggtgttaagagggtctggatcgccagaggttccggtgagatcgaagctatggtcaagaagagagacggtatggctttacagttggagggtgctataattagctacatgaaatctgcattgaaagaaatcaagaagttgaacaaaaagagtcctcaaatgtccgtgtctagtaatattgctgattatgttcctgataagaaaagaccacaccataaaattaacaagtttgccaaattcttctttggtaaaaaagttgataccataacctacattaaagaggagctaccaaaattgaacgcacaagtaaaggaattacaagcggatcatgaaagcgcttcccctttcaattccgttttcgtggagtttgaatcccaatatcaggctcaagtcgcctctcagattaccacgtaccacgctcctcttttcatgaccccagcacacgttggtattgaaccatccaatattgtttggtttaatatgagaatgttctggtgggaaagactaggcagaaaagttacttctgtttcggcgattgtcgcattagttatattatgggcaactccggtggcctttgttggttcaatttccaatatcacggctttgaccaaagaacttccatggttaaatttcatctatagactaccagaacatctaatgggtctattgacatctctggcaccaaccgtggcattagcactgttgatgagtttattgccagtgtttattagacatatggctgttgcgcaaggtgctccctctaagcaaattgtagaacatttcactcaacaagcttattttgcttttcaagtcattcaagtgtttttagttgttacaatatcgtctgctgctacatccacagtaagtgcgattatagaagatccttcaaaggccatgaatttattggcttcaaatttaccaaaagcttctaatttcttcatctcctacgttattttacaaggtttctccgtttcatcaggtgctcttttgcaaatcgtcccattaattattttctatctcttgggcgctcttttagatggcaccgtcaggaagaagtggaatcgtttttctggtttatcaagtatgcaatggggaacaacttttccagtttttacaaatatggcagtcatcattttttcttacgccatcatttctccactgattctattatttggcgcagttgcattcttcctattgtatgtcgcatatttatataatttgacttatgtctatcaggagtcaccagatgggagaggtatttactacccaagggctctattccaatctttagtcggagtatacatcggtcaagtttgtttgctgggtctttttgttgttggtaaaggttatggtcctatcattttacaaatcattggaatttgtgtcacagtcttcgttcatctgcatttgaacattgcatttgatcatctatcgaaagttgtacctgtggatacaatgaaaccgctagacggtatattagatactccttccttcaaaaatatctaccgaggagtaggacagggcaaagaaaagaagaacaattttggtgctaacatcaatatggatggaatcagagaattgcctgagtttccaatcaagaaatatcacaagaagactgattccgttattgaacaacaagtggataacagcttatttagcgaaaacacgtttgagtatcaatttaacccaacctatgatgcgaatgcaaatgggcacgttagaaatactgaaaacacaattgaagatgttccgttattagcagatggtgacacaatgaagatccctcctgcaccgtggtggaagagattcttgaaacctcacgtctattattcttataaggctgtgaaaagcagactgcctgaagtttatggtttggtcgatcctactgaaaaagttaatgagtttgatattgcacatgcttatgactatccagccgttagcgcagaatgtccactattatggatccctcaagatccttatgggttttctaagacattgattgccgatgttgccggcgttgtcgatatgtctgataaaaacgctacgatcgataaagactcaaagtttgaattacaagacatgccaccttcttacgaagacatcaaaagtgaaaatgcaaatgatacaatagatccaaaggatgattatgaaaccactagccaggaaaataatccattcgcagatccgaactataaaggagaagaaaaccgtccgacagtttag

SEQ ID NO: 4981 - DNA, 636 bp, Saccharomyces pastorianus
atggatagcaaagagtatcttatatcgtatggttggaaagaaggagaagcgtttaaagaaggcggtttaaagagaccaatactggtcaaacataaaagagataagaagggattgggtaacgcacccggtgggaacgatggtgaagcatggtgggaaagactgtttgacgggcatttgaagaatttggacgtcagcaccgactcaagtaatggtggtatcacatttactcaaaatgaagtagttgcatctgccgtatcgaaaagcagctcacctctatacagatggttcgtcaaaggggaaggtttgaaagggaccattggaaaccgtaatgtaaagaaaaaagccagtattgtgatatcggatgcaagtacaagtaaatcgaagaagaagagaagcagaggcgatgatgatgactgcaaggcaaaaaaaaagaagttaaagaaggacaaaaagagtaaagacgatatgaagtatgaaaaggagaggaaaaccaaaaaggatagtaaaaaagctaaaaaaagcaagcaaagtagtaatgaagataagaaatctaagcataaaaaggatagaaagattaaaaaacacaaaaaggaacaaaagtctgttggaaaacataaaaaggagcatatatcataa

SEQ ID NO: 4982 - DNA, 1632 bp, Saccharomyces pastorianus
atgcgtccagtcttcaaagagaaaatgagcgtacagagtacgggttcgccggtaattgacaaaatctcgacgaaagcagaggacaaagtagtagtttccacagaggatgaagacgtgacaacagttgcttcctcgaacaattcaattcaagcacccaatgactcgccatggcaagatccaacatatttcagttcttttgggagggaactaatgtttatagtcacatgtatgttagcgcaattgctgaatcaagcaggccagacgcatgcccttaccataatgaatgttctgtcaaagtccttcgattcagagtcggacaagcaggcctggttaatggcatcgttccccttggttgctggatcttttatccttataagtgggaggctaggtgatatttatggactgaagaaaatgctaatgattggttacgttaccataatcgtttggtcactaatctgtggcctttctaaatattccaataacgatgcatttttcattacatgtcgtgcgtttcaagggctggggatcgccttcatcttaccaaacgttatgggactggttggtcacgtttataaagttggttcaacgagaaaaaatctagtcattagtttcattggtgcatgtgcccccgcaggcggtatgtttggtggattgttcggaggattgcttgttaatgaagaccctgaacagtggccttgggtgttttatgccttcgcgattgcattttttcttaattcgattttagcttggtattctattccaaacaatataccaacaaacgttcatggattttcgatggattggactggctctgttcttgctgttattggattgatcctgttcaactttgtttggaatcaagctccaacagcaggttggggtacagcttatattattgctcttttaatagtctcggtaatctttctcgttgctttctttgtctacgaggtcagttacgctaaagttcctctactaccacatgcagtaactaaaaaccgccatatgattatgattttattggccgtatttttgggatgggggtcatttggtatttggacattctattacatgtctttccaactcaacttgaggcattacagtcctgtatggactggtggtacgtattttgttttcgtgatcttcggtacgatcgctgcatttatggttgccctaaccatcaagagagtaggacctgcctttttgttatgttttgctttggtggcatttgacgttggttcaataatgtttagtgtgctgccggtaaaacaaagcttctggaaattgaactttggaatgcaggctatcttatgctttggtatggacttgtcattccctgcttcatcgattatattaagtgatgggctcccaatggagtaccaaggtatggctggatcgttagtgaacacggttattaattattcagcgtccctctgcttaggtatgggagctaccgtagaacatcagatcaataaaaacggcaaggatttgttgaaaggttaccgaggtgctatatatctaggcgttgggctagcttccttgggcgttttgattagcttcacttacatgatggaaacattttggaataatcgcagagatcgccaaaaggatagcgttatatcggaaatgagttga

SEQ ID NO: 4983 - DNA, 441 bp, Saccharomyces pastorianus
atgggagctaaacgatattggaccgtaacatccccacttcgtcgatttccggatctgataaacgatctgcagatccatcgtcattgcaagaaaaagccgctatgtttcagccaagctcaaatcaaccgtctaatctggccaattcaatctcgagcagacattctgaaaacggcaagtcgtaactcatcaacatattggacactgaattatttgaagaggatgatgaaatcggacccggaaaaaacgtacgatgtaatgataacatcagtaccgcagaacggttttgctggatgtgtttttcctgacctatcgtttgctagggggacattgaaattgcatccaagcactaagcattatcccatgataggggatactgtaaaaaattgtaaaattttgaaaatcgattgcctagaaggaatgttggaacttgaaaaactgtaa

SEQ ID NO: 4984 - DNA, 2427 bp, Saccharomyces pastorianus
atggtagttagagggaatcatcaggcctttcttatcacaagaggcttccatacctatagaccctgtttaagggtcaccaacagaaataaacgacagcgaagcaagtacaaacagcaagaaacagcaccattcgactatgcgacattgtcaaaaaaagaccaagtcgaagacacagcaatagctagaccagttgaaaatgagaaagagatagaagcgataaatgaagattttttacacaggactaagggattggagcctgatattgaactaaaacagctatatcagattaaagaagagttcaataaacgttatagagataggtatgttgctccttcggaaagttggtatttaaactcctggcggtcattgacaaaaccaaagattccgtcctacggattaataaattcagatgttcattttgatacgaaatcgaaaagctcaaaacaaatggaatttcaaccagcccaactgatggaaaaccctttgaatgttggtgacctagttcttttaaaaaacagaccaaacgaattggcgatgtgtgtaagccttccgaatagtactatggatccgcgatacacatttgcgtctatcgatggatcgatgtcttttgcgactaaaaaccgtgtattgttaaggctccctcaaaaattacctactggaattaactcgctcgtccaacctgaaggccatcataaatatttgccaatcgggaccgtaaagaacttttccaaccaaacaaatattctcccgactgcggcgaggcaaatgataacaagtaggagtccggcacagatttccaaacaagcgtggaaagatttaccaatcactacgaaaaaattacaattacttcacaggtcattacaaaattatatgggcccatggcaaattccatttttcactttggttggattagtccaaaaactggatttgaataaagcgctggataataaagatggattaacctatttggctgatctagtgaacagttataaaagcgccgatagtgtgcccatgaactcggctacctttgtttccacatattgggccattgtacaacaacaggaatctaatctttgggggaaaatacacttgaatactgcgctgctctcccctacatcagttacaatcatccctttgaaatcccaacacttatactacgcacaggtaatagagaagctagaagctgacaactacaaggacatcgaccgatttgtaaagttggtgaacgaaagaaaatataaagatatctcatctttatacccttctgtcattcagctgctgaaagattttgccgcgggaaacttccacaataatggagttatagtcaccttaatctccaaaatatttagaaagatagaactctataagagttttgatataacaagagatatatgtcaagatctggtcaatgaaattttacccaataaaatgatcaatccgttgttactgaatatggatttagctttgcctgcatcttcgaaattggggcaatcacagcaaaagctttatgagttgacagacatagaaaacctgcaagcaagtaattccaatattaatggtgatagatatgattttggtgatcttaaggttttttgtatagattcggagactgcgcatgagattgacgatggaatctcgatagaaaaccacaaaaaggacggattgtacactttacatatccatattgcagatcctacttctttgtttccagaaagcactaatcttgattctcagggtattaccacggatgttctaaatgttgcattaaaaaggtcgttcaccacatatttgcctgatttggttgttcccatgctacccgagtctatatgtcgcttatctgatttgggaaagcaagggcaaaggacaagaacaatatcgttttctgttgacgttaaaattctccctaagagcactggagaacccattgaaattatgtatgatagccttaaaattcggaaaggtattgtgtcgaatttccctaaagctacgtataatgatgttgataggattcttagtatacctgacagcgaagcaccacccttcaaagaagatttggaaagcttgtttatgatttccaaattactgagggagcgacgtataaagaaaaacaatgctgttatctttggtgaggggtttaacaggggtctggtaacgctgacttctaatgatgaaggcgaactgactgaggtatcattttcagaccaagcggaaacatcatctaacgtcctagtgtcggaaatgatgatcttggccaatacgttagcgggtagattttttacagaaaacaaaattagcggtgtatttagatgttacaaacagctaccactggatgcgatagcacagcagcaatataattccatgataacaagtacgaagaaaggaatttttcccaagctagaagatatcactaagcttcatcacttttga

SEQ ID NO: 4985 - DNA, 513 bp, Saccharomyces pastorianus
atgaatgaatacacaacgccagagacgaatgttcaaaatggtgtccttaaagctatgtcgtttatgttcgaatatattggtgacatgtccaaggattacatatacttcattacgccgttgttggaagacgcgctcactgatagagatttagtccaccgtcagacagcctcgaatgtcgtaagtcatttggctctgaactgtgcaggtactggacacgaggatgcctttattcacctactaaatattctaatccccaatatttttgagacttcaccgcatgctattttgcgtattttagaggggttggaagcattgagtcaagcggttggtcctggtatgttcatgaactacatatgggcggggttatttcatccagcaaagaccgtaaggaagccattctggagagtatacaataacttatatgtaatgtatcaggactccatggtacctttttatcctgttacgcgggacaacaatgaacagtatgtagaagagctagacttaattttataa

SEQ ID NO: 4986 - DNA, 2370 bp, Saccharomyces pastorianus
atgagtcatcctgtgcagtttgttaaggctagtaattctgatggtagccaccggttgggtggtcaatattccattcctcaagatttgagagaaaacctccaggaagaagccacacgtactagtgaaaaggagaaggatgtgttacaagaaaagatggaaaccaagacagtgcacaatagagaggatgagtaccacagaaaaagattcgatttgaggcttggacctggtccagacacaaaagaaattacctccaagcaagatactcaaaacgctgtggttccaaggaaaagaaaatctcgatgggatgtaaaaggttacgaaccacctgaagaatctcagaaaacatttagcgaaaattccgacaatgtcttagttgatatagaaggagttaaagatttaatgtttttcaagccttctgaccataaatattttgctgaaattgtatccaaaaaacctatagacgaattgagcaaggacgagaagaaagaaagatcattcttgatgctacttctgaaaattaagaatggtaacacggcaagcagaaggacctcaatgagacttttaactgaaaaagcagttacgtttggtccgcaaataatatttgatcgactattgcccatattactggacaggtccttggaagatcaagaaagacatctaatgatcaaggccatagatcgtgttctttacaaactgggtgacctaacaaggccttatgcgcataaaatattagtagtgacagccccattgctgattgacgaagatccaatagttcgttccactggtcaagaaatcattaccaatttgtccatggttactggcttaacaaccatgctcacggtgataagacctgatatcgagaatgaagatgaatatatcagaaataccgctgctagggcaatggctgtagtggcaaaagccctcggtgttaatcaattgcttcccttcattaacgcagcatgccattcgcggaaatcgtggagagcaaggcatacaggtataaaaattgttcaacaaataggtttaatcttgggaataggtgtactaaaccaccttgctggtcttatgagttgtatcaaggacggcttagtagacgatcatgttccagtacgaatcgttacagcgaatactttatctacgctggccgaaaacgcatatccgtacggtattgaggcgttcaacattgcactggagccactgtggaagggtataagaagtcatcgtggtaaagtcttatcttcctttttaaaagccgttggctctatgatcccattaatggatccagagtatgctggctattatactacagaagcaatgaggataattaaacgcgagttcgacacacctgatgacgacatgaaaaaaactatccttttagtgttacaaaaatgtagtcgagttgaatctataacgtcaaaatttttacgggaggaaattgcaccagaatttttccaaaaattttggatcagacgtgtggccctagacaagccattaaacaaagtcgttacatacacgacagtagtgttagcagaaaagctaggctgctcgtatgccattgataaattattaaaaccattgagggatgaagctgaaccattcagaacaatgggagttcatgcggttacaaagatagtgaatttattggggacagcagatttagatgaaaggttagagacgcgacttattgatgcactcttgatagcatttcaggagcaggcggataacgactctacaattttcaaagggtttggggcagttactttatcgcttgacattcgtatgaaaccttttctggcacctattataagcacaattttgaaccacttaaagcacaaaactcctttgatccgtcagcatgcagctgatctgtgtgcgatattgataccggtcatcaaaaactgtcacgaatttgaaatgttgaataaattgaatataatactgtatgaatccttaggcgaagtatacccagaagttctaggttcaatcatcaacgtaatgcgctgtattttgagtgttatggttatagataatctacaacctccagttaaccagattttacctactttaaccccaatcttgagaaataagcacagaaaagttgaggtaaacactatcaaattcgtcggacttattgccaagttagcaccaacccatgctcctcccaaagaatggatgagaatatgttttgagctattagaactattaaaaagtacaaacaaggaaataagaagatcagcaaacgcaacatttggctttattgcagaggccatcggaccacaagatgttcttgtagctttattaaacaatttgaaagttcaagaacgtcaattacgtgtatgtacagctgttggccattggtattgtagctga

SEQ ID NO: 4987 - DNA, 465 bp, Saccharomyces pastorianus
atgttccggatgcacactgcttttcctaatcaacctggctcctttatcactaactattcattttttatagaattcggcgtggccttcactttcggtggttttcttttctttttgtttggcgtatttactttatttgatcgtgctttattagctttgggtaatattttgttcttaattggggtatttttaattattggttcacaaaagacatacatattctttacaagaccgaataagagacgtggctcgctcttcttcctagtcggggcctttatgattttgataaaatggacatttttgggctttataatcgaatcactgggtattgtgaatctttttggtgatttcttcggggttatcgtacaatttttaaggtcgatgccgatcattggtccatttctttctcaccctgctgtttctccaatagtagatagattagcaggtgtgagagttctgccagtgtaa

SEQ ID NO: 4988 - DNA, 1491 bp, Saccharomyces pastorianus
atgtttttcacagcgtattggctggaaaaaagtgtatatataataaacctatcgaatcttattcgaggcagagaatccgataaaacaaccacacccaattacgcaacgatgccgttgaagcgttctttaaaacaaccacttcaaagactatccgatttacaatcaaaatataatatatttacaagcatcaatacagcggcaaacaaggaacaaacaaacaaaccattaacgaattatgttgccagtatcaaagacaacatagtcactaaagacctcccaactacctgtgcctctcatatgcttgagaatttcaaatcaccgtatgatgcaaccgtagtaaaattgttaaagcaagctggagtacatattttaggtaagaccaacttagatgaatttggaatgggatctggaggaatacattcaataaggggggccgtaatcaatcctttatatcctcacgaacaaagaatgatcatgggcggttcctcctctggggctgctgcgagtgttgtttgtgatctagtggactttgccctgggcacagataccggtggttctgttaggttgcctgcgtgctatgggtccattttgggctttaaaccatcctacggacgtttgtccaggtttggcgtaatagcgtatgctcagtctttagatacagtagggattttgactaaaaagatagatgtattacggaaagtatttcaggtacttgataaatatgatgctaaagaccctacttcattaaatgatgaattgcgtggtctgatagaaaaaaatatgaaagctaaaaaatctttaaaaattggtattgtgaaggaatttaaccatgaaagtttgcccaatgaatttcaccaattatatccctcttttttggaaaagttagtgaatttaggtcacgaaatataccctgtatccattccgtcagtaaagaatagtttaccaatttactatacattatccccagcagaagcagcttcaaacttgtcgaggtatgatggtatcagatacgggtacagggattccaaacttgatataaaagacggcgttttatttgctcccaccaggttcaaatttggaagagaagtgaaaaataggattatcttaggtaattataatctttgttcggatgcattcaaaaataattttatcaaagctgaaaaactaagggtaaatttgattgacgagtttgacaggatcttcaaattcccgaatgttttgactgattctaaggggaatccggaaggcttggatatactattagtaccaacgtcatctaagcttcctgagaccataaagaaatttcaagaagaggaaagtaaatctccggccaattcttacatcaacgatgtctttacagtccccatgtcattagctggactaccgactttatcaatgcctttgaaagagaaaacaccaataggcgtacaaatagtgggccaatatggtgatgattccacagtgttggattttgtcgaatcaatatcatag

SEQ ID NO: 4989 - DNA, 345 bp, Saccharomyces pastorianus
atgaagtatccaaaaaattcgaaagagaaaagaaaatcatcgaaaacaaaagtgtctgtggggtatcaacagcttatttcttcttcattctaccgaataaacctctcttcttcttcttttctttctccccagtttcaacgtgctgttgtggttgataaactgcttgttcaccgtacatttggttggaagaagcacccatctgttgaggcataccgttcgcgtcataggccacagcagatccgaacatgggaaagtcaggtcttacacggaacccataggtgggagtctccaactgttgggcccagattgggtctccagagacagcatactcgaaacttcttatag

SEQ ID NO: 4990 - DNA, 1665 bp, Saccharomyces pastorianus
atgacacatattcccgaagttctgcccaagtccatacccatccctgcatttgtcgtcactacgttgtcttacctctggtactacttcaacctgttgatggtgcagattcctgggggccagttcgtcgtctcgtacatcaagaagtcacaccacgacgatccgtaccggaccaccgtcgagatcgggctgatcctgtatgggatcatctactatctgtcgaagccgcaacaaaagaagagtctgcaggcgcagaagcccaacctgtcgccccaggaagtcgatgccttgatcgaggactgggagcccgagccactggccacccccatcgccatcgatgagcaattgtggagagttgccgcgatccctgtcaccatggacatgccaatccagaaccacgtaacgatcacgaggaacgatcttaaggagacgtacaccaacgttttcaacctggcctcgaacaacttcctgcagttgtccgttacgcagcccgtcacggacgtggtcaagaccaccatcaagaactatggggtgggtgcctgtgggcccgctgggttttacggtaaccaggacgtccattacaggttggagtacgatttggcccagttcttcggcaccgaaggtgccgtgctgtacggccaagacttctgtgtcgccccatctgtgatccctgccttcacgaagcgtggtgacgtgatcgttgccgatgacgaggtttctctatcggtgcagaacgccctgcaactaagcaggtccacggtctactacttcagccacaacgacatgaactcgttggaatctctgttgaacgagttgaccgaacaggaaaaactcgaaaagctacccgccatcccaagaaaattcatcgtcacagaaggtatcttccataactccggtgatctggctccactaccggagttgaccaagttgaaaaacaagtacaagttcaggttgtttgtcgacgagacgttctccatcggtgtgcttggtgccacgggtcgtgggttgtccgaacacttcgacatggaccgcgccacgtccatcgacatcactgtcgggtccatggccaccgcattaggctcctccggtgggtttgtgcttggtgacacccccatgtgccaccaccaacgtattggttccaacgcctactgtttctccgcctgcttgcctgcctacaacgcaacgtccgtctccaaagtactagacttgatggactcgaacaacgactctgtgcagacactgcacagattgtccgcacatttgcacgaaagctttgcatcagacaacactttgcgcccatacttcatcgtgacgtcttcccccatgtccgctgtactccacttgcaactgacaccggaattcagatcccgcaagtttggctacacccgcgaacagctgttcgaaaccatatcggatctacagaagaagtcccacacaaacaagtacatcgaaccttacgaggaagaagagaaattactgcaagccatagtcgaccacgctcttgctaaccacaaggtgcttatcacaaggaacaccatcgtgctgaagcatgaaacactcccagtggtttcaagcttgaagatctgctgtaacgccgccatgtcccgagaggaactccaacacgcctgcgaaagtgttaagcaatccatccttgcttgttgccaataa

SEQ ID NO: 4991 - DNA, 696 bp, Saccharomyces pastorianus
atggcttgtggtgaaggtggcgaaccttccgttctgccctccgaagagtgttccgccatggaggactctttggaacgttgtctaggtttgatcgagtcgtgctacaactcccagtccgtctggtcctgtgttccagccactatctactgtaacaacgcccaactggctccttaccaacgtaccggtaaaaacgtttacgacatcagaaaggaatgtgaaggcggcaatttgtgctacccagcattgcaagacatcgacgactacttgaaccaagactatgttaaggaagctgtcggcgcagaagtcgaccgttatgaatcctgtaatttcgacatcaacagaaacttcctgtttgcaggagactggatgaagccctaccacacagccgtcacggaccttttgaatcaagatttgcccatcctggtctacgctggtgacaaggacttcatctgcaactggttgggtaacaaggcatggaccgacgtcttaccttggaagtacgacgaagaattcgctgaccaaaaaatacgtaactggaccgcttctatcaccgatgaggtcgctggtgaagtcaagtcctacaagcatttcacctacttaagagtcttcaacggtggtcacatggttccatttgacgtccctgaaaacgcactaagtatggttaacgaatggattcatggcgacctatccttataa

SEQ ID NO: 4992 - DNA, 738 bp, Saccharomyces pastorianus
  modified_base (679)..(679): a, c, g, t, unknown, or other
atgacaacgtcttgtactcttggccagcattcttgctggcttcttagttcttgctgcttgtacgatagctttatcgttggggcaggggccacccgcggggccttaaagaaggggccagtattaaaagctccagataagagctgcaacaaaaagctccgaacgtacccttttcttcttctcttcccttccgagtacaacaaagtaagagagaagaaacagtcaagagagaccgttttttgcactcaacccaaacgtactcccgctatgaaaccatttactagcttattatgtggactgggcctgtctaccacactcgccacggccatctcgctgcaaagaccgctgggtctggataaggacatcttgcgccagaccgcagagaagttcggattggacttggacctggaccatcttttgaaggagttggactccaacgtgctggacgcatggacagagatgaacgacctgttccccaaccaggtcatgagcctgcagacatcgaccaagcctaagttccccgaggccattaagaccaagacggactgggacttcgtggtcaagaacgatgctaccgagaactaccagctgcgtgtcaacaagatcaaagaccccaaaatcctgggcatcgacccggacgtgacgcagtacacaggttacctggacgttgaggacgaagacnagcactttttcttctggttttttgaaagcagaaacgaccctgccaatgacccggtcatc

SEQ ID NO: 4993 - DNA, 930 bp, Saccharomyces pastorianus
atgatgagcaatgcatgggataaactattagctcaaaatgaaccggtagcaaacgctaaagaaacctttgaaactacagtgatcatatactctccatcgaggaaaacattacaacaatttacaaccatctgttttccagaaggaacaagtccagcgctagatactagtctaattaattatgctacaataggatggactagtgattcagatcagtgctatactgtagatgtatacacgctaattaaaaatagtgccgatacattagatctactgaaaccttttcttcaagaaccgacctcgaaggttcactggctcatattgctagattggtcgttaaatgatcagaagctgtggttaaatgagctattcggtactttcaacaagatcaaacagtttaatgataataatgacatttccctatggtgcttaaacagtagtgaaatattcaatttacagagaaacactaccgcatggcaatcagcccatatagactttattctgcaaacactaagatccttttgtcatttcaatgaaagctcattgatctacgtagatgaagatagcagtgaagatgaagaagaagagacgcaaaagctcagatatcaggaaatcttgaaacgcatcattgaaggcagggatatcaaaagacatatcgaaatggtcaagcgtagcagaattgtaataccgaaaggttgtgattccatagggttaataaaaacaatagatgaaagatttgagcctagtgagttgggagatgatcagttcttggacaagtatgcggacttcgttcctgcgatagatgcaataagggataacgggaaaccatgccatgatcttgataagcttcatccgttatcttctttccaggtcgacattcaagaagagctaggcaagatgtttgcaaagcatagagagagttcaaaagtgtag

SEQ ID NO: 4994 - DNA, 162 bp, Saccharomyces pastorianus
ggatcagcttgtcgatcagaagtgggaagagagttaagccttagggaaagtcctgaccagaaactgtgcaaaagtagactggactatttatctggaaagataaacgctagtaacgctgtcattaataagtgtgaagaagaaataaaaaagttatctaagtaa

SEQ ID NO: 4995 - DNA, 3210 bp, Saccharomyces pastorianus
atgctatcatcggggaaatttaaagacaacgagtatgggaaaaaaagagtacagtattggccaatgggcaaacaccaggagcgtgcctatgggacaagcacgagcgtaattaaaggtatgaaggcttcgcttacgtttagtttctccgacatatatgctccttgtacaatttccaaggacatatacctcgagtacggcgataaaactgcaggcttatatggtgcagtcggattgcccacatacggccaggcgtgctcatccaaaaaaattgtgcgatgcgtcttggacgactcattgcccttctgcagtattgttctgcctgccaaacttttcgggtttgtagctactcaaccgaccgtagatttttgttatttcgagccaattcgtggcgatatgatacccgtgctggatagtgtgacttttatgatcaatgatctgctttactcgaagctaacgggcctgccccaagagatacagcaacaacagttcttgcactacaaatacggtatcaactccacggagactgtcgttcatgcccgagatatacttacatcgggtgtttgccaaattctaaattgttcacctttctcgcaggggcttgtggatttcaccaagacagaactgactttgatcaaggacgttgatcggaaattgaccacgaaaaaatatgctaatgaagacagcacatattctttacctaatatcgggacgaattccgctctatcggtcaggcttgagtcacttccatacgtaatctcgaaaaatcttcttaaaccacaaccccacgccagcgatgatgattcgatatacgcgtttacagatgcggaaactctattacgactggatgtcacgagtggatccttcataagaatctcccatgcaagttgcataaggctgattaaattatttgtttttctactgcccaatagcttcgaaaaaagttcaatatacgtaccacctaaagtaatggcaagcttttctgactgcgacactgtgacaatatccaagtcaaacattggctattcggacattcccatcgccaatgaagtttgcatttcaagggtgggcggctggcttcagtctcaaaaaagcttccaaaatattattttgaaagctttgaaaaaattcttcagcgatagtaaaaggattctttgccaaaatgatttgattccgataacattcgattccagcatggctgatcttaacataatagagaacgaagacgacgacaacaataacgatgacgatctaacccagtttgataagaacgactctgttgtttggttcgttgttacaagcgtaaaactggaaaacgtctctctggataatgcccactttgttattgatccccagcgtactaaattaataactacaaatattgtcaacaaaaagcctttgcctttaaacaagtgcgatctccaaagttattacgggtttgctaaaactttccactatgacatgcacatattcccctacataagacagttggttaatatattagagacctcattcgattgttctcaaagagggatatctctaaacacttcagtactactccattctactacaaacaatgtaggtaaagctacagcggtgcgatttgcttctaaacatcttggcgtacatctgttagagatcgactgcctctcattaactacaaatctgggccacttggattctacttccaaaattattggctatataagagcgaaatgggaaaacgtactgccttacacgtctcctgccgtaatttttttgacccacttagattcgattttgctcgatgtaaactccaatcaagatccagaggcaactaaattacaaaaatccataaactttgaaatgtctaaactcttggacgatttcacatctgagtttccaggaacgacgtttattggatctgtgaataatatagacaacattccttcaagttttaggtcgcatatgagatttgagattcttgttactgttccatctgaagcgcaaagattacacatcttcaaatggtacctatcttcatcggaactgaacaatgatgttaaacagaaaaccccgctatgctgcgcagataacatttccttttcttcactctcttcacattctgctgggctaactcctttagacatcaagtcaattgtagaaacagcacgaatgacagccacaacgcgtttttaccaagaaacgaagaagtccggatggcattcgcagtcaattttgatactgaaagaggacttatcaaaagctatatctaaggctagagacgaattctcagtctcaattggagccccacaaattcctaatgtgacatgggatgatataggtggtatcgacattgtgaaaggtgaaataatggatacgatagacatgcctctaaggcatcctgagttatttagctcaggtatgaaaaagagaagtggtatcttattttatggaccaccaggaacaggcaaaaccttaatggctaaagccattgcaacaagtttttctctaaatttttttagtgtcaaaggtcctgaattattgaacatgtatatcggtgaaagtgaagccaatgtacgtagagttttccaaaaggcaagagaggctaaaccgtgtgtaatttttttcgacgaaattgattctgtggcccccaagcgtgggaatcaaggtgactcaggtggcgttatggatcgtatagtttctcaattactagccgagctagatggaatgagtaccgatgccgatggtgttttcgtgattggagcaaccaataggccagacttattggatgaagcattgctgagaccggggagattcgacaagttgctatatttgggtataccagacaccgatgcaaagcaactgaatattttagaagcgttaactcgtaaattcatacttgacactgacgtgaacctcattgagttggcgacactgtgtccattcaattacacaggtgcggatttttatgctctctgttctgatgcaatgctaaatgctatgacaagaatcgcacatataacagagattaaagtctcacagcacaacgaaagtaccggtgcgaacatttcgacacgtcgttggtttgataagatagccacaaaggatgataccaaggttgttgttaaaatgattgacttcctgaaggcacaagagcggctcgctccgagtgtgtcccaggaagaactgaatcactaccaaatggtgagggccaatttcgaaggggtataa

SEQ ID NO: 4996 - DNA, 201 bp, Saccharomyces pastorianus
atgacagaacctgaagctttgctcatcttggatatctccgccagagagattaaccacttggacgaaaagctcctgaaaagaaaacacagaaaggccatggtacagaaccatccggacaaaggcggaagtccctacatggcagccaagataaacgaggccaaagagcttctccaagagagcgttttactaagaaagagataa

SEQ ID NO: 4997 - DNA, 993 bp, Saccharomyces pastorianus
atgagtgacaggttttcggtgactaagctttttcctaagtgtttgacgacatgcttatatatatggaccgcctacataacgctgacaagaatacatcaaataccaagctggtttctcacggtaactataattccgacattactggtagccttatatacctatttcaaagccatttcaaagggacccggctctcctttagacttccctgatttactagtccatgacttacaggcagcagaaaatggtctcgaacttcccccagagtacatgtcaaaaagatgtatgaccttaaaacatgacggaagatttcgagtttgccaaatttgccacgtttggaagcctgatcgttgtcatcactgttcatcatgtgatatatgtgtattgaaaatggatcatcattgtccttggtttgctgaatgcactggtttcaagaatcagaagctttttattcagttccttatgtacacaactttctacgcgttcttggtcctaatctactcgtgttatgaactcgggacttggtttcgttctggtagctttaatcaagaactgattgattttcacctattaggggtggcgctgttagccattgcaatattcatctctgttttggcgttcactgctttcagcatttatcaagtttgtaataaccaaacaaccatcgaactatacggtatgagaagatataggcgagatctggaaatcatcaatgacagctatggagcagatacacagttggaaaatatatttgacttaggttcttcaatcgctaattggcaagatttaatgggcatgtcatggttggagtggttacttcctatcgagacatgtaagtacaagaagtctaaacacacaaaagatgaaaagggtttatatttcgatataagaccggaagcacaagaaagattgctcagcagtagaggtctagaggatcgcctaatgagaagagtaaccccaaggccttcgttagaaactgacaggccctccgaataa

SEQ ID NO: 4998 - DNA, 258 bp, Saccharomyces pastorianus
atgtgggtcactgttgtcagacagggcaacactatcactgtgcagaccacattcgtccagcgtttctcctcccagtacgcaacagttgcttccccctccgcagggtccatcgggttgggctcgttgtcgggtactgtaggtgtcatcaaatctgcaatgaagaagaccgtttctcataacgaggctcagcacctaaatatgaaatcgtttacttcaactttgggcgggctattaacggttttaatttggttcttataa

SEQ ID NO: 4999 - DNA, 405 bp, Saccharomyces pastorianus
atgatgttgcgtcgcacgctatcactgtctctcgtttcgttgctgctctccctgtcgctgtggccggctgctattctggcagccatgaccacccaggttaccgtggaaacaaatgttgcggggtttttggtcactcagaccactatatgggaccctgccactgccactaccactaccgcggctgccgccgccgctaccactgcgacggcaaagacggggtctttcaccacggtgtttacaactaccaacatcaacggggtcaccgttgttctgacgcagaccgtcgacagagcaaccatgctggcaacttcgaccgctgcttccagctcagccactgctaagaccacgactacaggcaactgcctgtgtcttcctcgcttgcttcgggcgtgtacctgtccaccg

SEQ ID NO: 5000 - DNA, 1005 bp, Saccharomyces pastorianus
atgaacgggaagaatttgaaggttatttttctaggtcctaaaggtacatattctcatcaagctgcactgcaacaatttcaatccatacctaatgtcgattatttgccaacagcgtccatacctcaatgctttgatgaattagagagaaatgcaagcatagattactcagttgtaccattggagaactctaccaacggacaagtggttttttcctatgatctgttgcgggataggatgattcagaaagttttatcttcaactacctcagcagaaaatagtagaatcacaccagatatagaggttatagcagaacagtacgtgtctataacccattgtttaatcagtcccatcgaattgtccaatggtattgaatcatttggtaaatttcaagaagtaaaaatatattcgcacccacaagtttggggtcaagtcgatagttacttgaaatctttggcagagaaatttccacaagtcacatttagcagatctgattgttcttcaacgtctgaatcggtaaatcaatgtatgcagtcacagatcgacaatcaagacaacattttgcatgtagccattggtagcgaaacagcggctcgtttatacaaagcccaagtcatcgaacactcaatcaatgataagctgggaaacacaactagatttttggtcttaaggaggcggagagacacacgtctcaatgaagttggggacactaaattaccacaggtcaatctgttaacttttactacccgtcaagatgatcctggttctttagtggacgttttaaatgtactaaagactcattcgcttaacatgtgctctataaactctagaccgtttaatttaagcgatggtgatagaaactggcgatatttgttttttattgaatactacactgataagaacgccccaaaccataacgaacaattttataaagatatcggcggaaaatgtaaacattggtgcctctggggtacattccctagaagtgagatgtattactataaatga

SEQ ID NO: 5001 - DNA, 285 bp, Saccharomyces pastorianus
atgatgaaacaaccttcggaaagtacttccaatgaaaacggtcagtccttgtttgtcaaggaggatgctgatacttctgccggtggtagtccattacaacgaattttagagttttgtaaaaagcaatgtgatggcaaggacgcaaactcattcgctgttccgattccgttgatttctcaatctctaaatttggatgaaacgaccgtcagaaattgttgtacgactttgactgaccaaggtttcatttatccaactttcgatgacaacaacttttttgccttataa

SEQ ID NO: 5002 - DNA, 528 bp, Saccharomyces pastorianus
atgagtctaagaggcaaaacgttgttgcgcagcggcatgctgtactctagatgcattacaagaaccctgttgcctcgtgtaacctacaatttgtgtcgcactttccctagagcatcgctgtacaccagcgtcatcagatataatgagataaaaaaggacgataagaaagtgcatttggggtcctttcaagtggaaaagcccaagatgatgattgctttcacctgcaagaaatgtaatacgcggtcctcgcacacaatgtcaaagcaagcttatgaaaaaggaacggtcatgatttcttgtccgcactgtaaagtaaggcacttgatagcagaccatttgaagatctttcacgacgaccacgtcaccgtggaacagctgatgaaagctaacggggagaaaatcagccaagacgtgggcgacttggagttcgaagatattccagattcgctaaaggacgtcttaggcaaatacgccaagaacaacccagaacagacgccacacctgccccatccatcgaaaaaggactaa

SEQ ID NO: 5003 - DNA, 1257 bp, Saccharomyces pastorianus
atgtctcaatcccaaatgtcccctgaaaaagagcaagagttgacgtccaagatcctacatcgagctgaattagctcaaatgactcgtcagttaaagttgggtttaagtaatgttccttctgccaaaagaaaccaggattcaacggctaagaaaagaagtggtgatgatgaagatgacggggatgaaaacaagtctcttctggaagccatctcgcctgcgaagaagccgcttcacgatgatacgaataaaatggctgctttttcacctgtaaaatttatgggaaagccaaatacccccccatgttcacgccaacgaatatccgaagactgtccagagcaatcaaagtccagaaaggaggacaccccgtccaccccaaaggcttctgctcctccaataattttaccacactcctcatcacatcagcaacggtctaacgataaaattttcatgacgccaaaacgaaataataataacactaataataacaataacaataacagtataaggaaaaaagcatcggtttccaaagacttaccacaggacagtgataacaccgcgggggccgatcttttaatgtacttggccacaagtccatataccaagtcttcccatcatggcacaccaatgaacgtaaaaatgcctactacaccacgctcttctcattacgcgtcgcaacttaatatgaacggtaatacagggaatgctgctaacgatgcagtaaggttttctcacattaagccttcagcgtcttccccgcagtccaccttcaaaacaaatctcttatcgcatttctcgggtgattctctcatggattctccatcattatatctgagtaacaatagcggtaatgcccaggcggcattatcgccacagcagagaagaaagcccaccacgaacacattgcaccctcctaccaacgtgcctactaccccttcaagagagttgaatagcaccaatttcaacttactcaggacgccgaacttcaacatgggagactatctgcacaatcttttcagtccttctccaagagtcactcttcaacagaccacttcgagtatgtcaactgggatttcctcggcgccgctgactgcacctccatcatcctccaatgcttctacaataacagcagctgctatgtcaagtcatactacaaatgcctttctggacatgagtgcaaatggaatccccctcattgtaggacgaggtggcgaccgtatgggcgaaggagaatccattgatgacaagctcaccgactga

SEQ ID NO: 5004 - DNA, 216 bp, Saccharomyces pastorianus
atgaaaatactagtttacgaaccacagcaaagattatctccgagaagaattcttgcccatccattcttcgatgaattaaggaaggatgacgctttcttgccaagaggctacgccgaaccaatcaaactaccaaacttgtttgattttaatgattttgaattacaaatcttgggtgaattcgctgataaaattaaacctgaggaaattattgaatag

SEQ ID NO: 5005 - DNA, 912 bp, Saccharomyces pastorianus
atgtctacggaagaccagaatggagttcctcttcaaagggggtctgaattcattgcagacgatgtgacttcgaataagtccaacaacaccaggcgaatgctggtgaaagaatacaggaagatcggtagaggtgccttcgggaccgttgtacaagcatatttgaccccagataagaaaaattggctgggcccctttgccatcaagaaagtacctgctcatacagagtacaagtcgagagagttacagattttgagaattgctgaccatccgaatatcgtaaagttacagtatttctttactcatttgtcccctcaggataataaagtttaccaacaccttgccatggaatgtctaccagaaactttacagattgaaattaaccgcttcgttaccaataaactagagctgccattgaagcacatcaaactgtacacgtatcaaatcacacgcgggatgctgtatttacacggtcttggtgtgtgccatcgtgatattaaaccctccaatgttctagtagacccagaaactggtgttttgaaaatatgtgattttggctctgctaaaaaactagaacataatcagccttcaattagttacatctgttcaagattttatagagctccagaattgatcattggctgtacccagtacaccacccaaatcgatatttgggggcttggttgtgtcatgggtgaaatgcttattggcaaagctatctttcaaggtcaggaacccctcttacaactacgggaaattgctaaattactgggtcctcctgataaaagatttattttcttttcaaaccctgcttatgacggtcctttattttccaaaccactattttcgggctcttcccaacagaggttcgagaagtacttggtcattccggtccagacggtatcgatcttctga

SEQ ID NO: 5006 - DNA, 1251 bp, Saccharomyces pastorianus
atgtctcaacggaaacgctactcgctgaacgtcgtaacctctccgccgataccatcgtcggcacccagtgcaccgctacgaacgaacgagttaagttgggaaactgcctcgacaactggagttgcgtcttcattcctcccgagtgcccaccacggtggcacggtactgaatcccagtttgggaataatgaggtctccctcgctgagcaagtctggtgcgtttggccggtccggcagcagtggttccaatgcgatggtagaaccatccaatattaagctgctcttaataggggatgcgaacgtagggaagacggccatgatcctgagctactgccacgagctgatgacacgagctgaaatgtcacggtcggtgcgactgaagcatcagcagccgcagcaacgaggcataggcttgaagaaaaccgtggtgaaccatagactgagcatgaaggagaagaggaaacggtacagctccaatgattttgagaaggagtttaaagacgttgcttattttgccggtaaggccagcgagttcgggagctttgataccgatgaagataacggccaagaactggcggacccacatgagattataattgacactagaagtaccatcgggatagacatcaagacgaacctggtcaacatagacaaccggttcttcaacgtcatactgtgggacacggcgggccaggagcggtatcaaaatgctatcattccatcgctatacaagaagacgaacgcggtgatactgacgtacgacataacgaatgccaagtctttccagaattgcatggagctgtggattgtgcaagccttagaaaactttacttcccacgatttgtccagggcaagattctttctggtgggcaataagatcgacttgtataaggaaaggcaagtgactcattacgacgtaatgcagatggttcaagaaacgcagttgaaacatggtattgagatttcgggaaattttgaggtaagttgtaaatgggtcaatgttgtggaaaggacaatgaatatgataatactggatctggtcgaaaacggatgttttgaaaataacgatcccttcataccgaccgggacatctagcaatttgcatgaacaagaccaagaattccatgacacagtggaagaacccttccattttgctcggcaacgacaacaacagtccgaaaagaagactacagtagacatcacgaaacctaacgacgacaccaacaataaccaatctatatgttgcgtttag

SEQ ID NO: 5007 - DNA, 303 bp, Saccharomyces pastorianus
atgccaccacaagactctgaaggttggttctacaagcgtgccgcctccgttgccagacacatctacatgagaaagcaagtcggtgttggtaaattgaacaaattgtacggtggtgccaagagcagaggtgtcagacctttcaagcacattgatgcttccggttccatcaacagaagagttttgcaagctttggaaaagatcggtattgtcgaaatctctccaaagggtggtagaagaatctccgaaaatggtcaaagagatttggatcgtattgccgctcaaactttggaagaagacgaataa

SEQ ID NO: 5008 - DNA, 123 bp, Saccharomyces pastorianus
atgggtatcgatcacacttccaagcaacacaaaagatccggccataggaccgctccaaagtccgataatgtttatctaaagttattggttaaactatacacttttctagctcgtatgtactga

SEQ ID NO: 5009 - DNA, 201 bp, Saccharomyces pastorianus
atgggtccacacaagggtaaggccccaagaatccaatccaccggtagaaagttcgaaagagccagaggtagaaaaagatctaagggttcaaagtgtaatagaattctgattctctttttatcctttgcctatctctttctcgtttcgtatataccaaactggagaatcgggtttcttttcacgccatatgaccaattataa

SEQ ID NO: 5010 - DNA, 1926 bp, Saccharomyces pastorianus
atgacgaggagtaaagcacagttttcgccctcgaaagttgggcagaaaaaatataaaaacccaaaacgaatgcggaaatcatcctttacaaaaacccagaaaatgttcgaagtgttcaacgaaaatcgttcgcattttaataagtatgaaagtctcgctatggatgttgacgacgatggaactttcgggaattttgtgctgatggaaaatgatgaggggggtatcgacattcctgaaattgaggaagagacgtcaggcgatgatagaacgatacacgagtctcttaagaatggtaattctctggaagataaccatgacttcattgctttttcagagagttctgaagatgaggaagtagaagagaaagttgtggaagaaaaaagcgttcttctcgtacagaaccaatacgaaatctccactgttacttcacaaccacatgaaaatagcgacagcgtatgcaacatggagtatccttggattaagaaccatggccattcgagacaacgcggaatagcagattggttaactttagaaatcaaagattttgttcattatatttcaccaagcaaagccgaaatcaaatgcagaaacaagactatcgataaactacgcaaagcggttaaggaattatggtcagatgcagacttgcacgtgtttggttcatttgccactgatttgtatttgcctggttccgatatcgattgtgtgataaatagtcgtaatcgtgataaagaggacagaaactacatatatgaactagcgaggcacttgaagaatcaaggactagctataagaatggaagtcattgtcaggacgcgagtacctatcattaagtttatagagccacaatcacaattgcatatcgatgtctcattcgaaaggacgaatgggctagaagctgcaaaacttatcagagaatggcttagagattcgccagggctgcgtgaactagtgctcgtcataaagcagtttttgcattcaagacggttgaacaatgtgcatactggtggtttgggtgggttcactgtaatttgtctggtttattcattcttaaatatgcatccacggataaaatcaaacgacatcgatgccccggataatctgggcgtcctgctgattgacttcttcgaactttacggtaagaatttcggttatgatgacgttgctataagtaactccgatggctacccttcctatattcccaagtcgcattggaagactttagaaccgtcaagaggcagattttcgcttgccattcaagatcccggtgatccaaataacaacatcagtagagggtcctttaacatgaaggatatcaaaaaggcatttgctggggcatttgaattgctggttaataaatgctgggagctagattccgccacctttaaagatcgtgtaggaaaaagcatattggggaacgtaatcaaataccgtggacaaaagagagatttcaaagacgaaagagacttagtggagaataaggcgattctcgaaaacgaacgctaccataagaagcgtacgagaatagttcatgaagatgtgttcataaacgacacagaagaattgccggtagaagacatctacaaacttgatgagcctcttaaaaagaagcggaaggggaaaaaggacaagaaagaacgaaagacactagaaggaactctaccccctcccgcttccgaggtagcagtaaagaagagcaaacgacaacaccagcagaagacagtgaaccccagtccaaatccacatcatgacaatcccaccatagatgccttgatgggactttctgacaatgaagaagggtctgaccaagatcgaagagaaaacggcattcaaccggggcaagacgagaagcagccgttgaaaacgcagactgtggacgcgcaaaccagaagagactactggctctccaagggtcaggctctctaa

SEQ ID NO: 5011 - DNA, 399 bp, Saccharomyces pastorianus
atgaaaatcatggaccatatgtatccagtttacacgacaatactatcttccctgacacattcaaaagacttgaagagattcgaaaacaaaattaaagagtcaattgagaagattgtaacgcgcttgtcagatgagatcccgtccacatacttctttcaagatggagtggattgtatcattcaacccagccccattcataatttcaaaagaatgcattggttaagatacaccaagagacacaacacattctgggggaggagtataaataaagacgttcaagtgagtttcaatgacaaatatgttgttacaaggagtggcgttagatatacgcggtatcctactaatttgaatacacaactactggaaactgcatttgaagaatgggattattatgaatga

SEQ ID NO: 5012 - DNA, 840 bp, Saccharomyces pastorianus
atggaatatcatgcacttcgaaggttggttttgtattaccccacagtcattcggtgtggtccacttaggcataatatgacaagggtgagctgtaggaatatttctagtaagggtggcggacgagatgagaagggagattgtagtgaagacaatgatacctctaaggatttggggagagtgccatcaaagttaaaacggacgtataatggtggcaaagttgctgaagaggccgatgttcatgctaatccgttatcgcggcaagggaagcaattactagataccctaagttccgccaggccgaagatgactaccggttctaatttgcatttgctggttcccaaagttgcctctactgaccatattcccaaaagagaggtgaatacagagggcctgtttgccggctatcgacccttgtttttaggaaattcaagcttcccctccgatgtaagaaagggcaaaaacttccatgatttggacgaagttcttcccaatattcagttgattgatggttctgagaaggatgggaaacttaacgtccaggaaatcattgaagatttacaaagaactagcctgagagagagcattagtaatatggaacagccctcattgtcacataaacggaggcctgtgataccgtgggatgcatccataagtgggatggtctacaatgacatgccttttaaacatgtgcccaaaaatgttgtctcgaaactgaagccattcaaactcgtacgtgttgaaagaaagccaaattcaaggaatggcaaaaaaccgagtatgataaaactccagttccacaatcgaagaatcaacgatacgctggagtttgtgaatacgtga

SEQ ID NO: 5013 - DNA, 1656 bp, Saccharomyces pastorianus
atggccagcttggtgagcaataacttatggagacacggttcagaagggtccaatacctacggtagttgccatcccatgaaattaggctctggtgtgctggtagaattgcccttttttggagattctgcactatttgcagatgatataacattccgaagttattgttgtgaaactgtccccgtttacatatctacggcattgaaaaccacatccccctatcggtaccttgatgaagtgattaaagattggcaaactttcatccaagtaggtgattatgttggcggttcttctcagtacgcaatttatgccgtgattttgtgcataacgtccaactttgtcattactgtgtttcttactgtgatttgctgtatcaatatcagtggacgtgcttataagagaatcttacaattattaaggattgcctcgttcatagcctcgctaaacttgacaatcttcatcgtcaaagtactgcgtaaattagaaaatgagcataaccaatacggcattgttcgggctcattccattattcatttattctcagacgatatgacattcgttgttctggatttttttgctactttaatgttccaattttgtcaggttggtatagtcattaggttattccaaagagctcaggaaaagagaattattttttttgttggcgtggtcctagtaatgactgcaaatattttatgggtgattccgccgttttccaaccatgtgaaaggacataaaaaaaactggcaaattctgcgaccctttgtttatctattccgcatagctattgcgacgtcatacgcatcaatcgtcatctaccatatttggcagaagaaaaagttatggtttaaacttaatcaaatggggctgcttacgttattgacattcatcgtgttgcttttattgccagggttctttcttgctgatgtagcaaacttatggatatccgatttgggcgacgtgttcaacactacgtgttatgtcacttcaacagtgataacctgggaatggttggataggttgaacgttttggaaaggaaagaagaagcgcaaagcatcttggggaggcccatttttgaagaggaacagcaagattatagatttgcaaaatatgccttgagggttcaaaacgcattaacgagaagagaatctcatgaaacattaaatagaaatgacacatcgaatagttctgagatatgcgatttgcaaaccatatctcgctatgacccagaggatcaggtatccgaaggtaggagtatcgaccaaatacattttaacgataaaaaaacctataaggaactggcattcaagaaattgagtagtgctcgcgacaagattttatattttacagaccaaattgtccagaaaagtgtaggtcacaacaataacagcagtagctcaaaaaatgaggacaccaaacggcgaaaggcgatggtaagaaaacggttagggctggacagacctggtgtatacatttactcgacaaaagaagtggttttcaattcagaccaagactacgaagacgaagacgaagacgaggatgaagacgaggatgaagaccaggatgaagaccaggatgaagacgaggatgaagacgacaaccaagataatgacggcaactctacaactttgaccagtaacggtactagccattgttga

SEQ ID NO: 5014 - DNA, 408 bp, Saccharomyces pastorianus
atgggtcaagaagatagtgatatggaaatttttcaggtgatacagacattccccaagacactattgaaccctaacgagatatttgagaagattattttcaaaagaaggttcaatttgaataggctagatcaggatgaaatcgacagatgtcgaaaattcgttgcggcacaacgtctcaagtttaagacatatggtgagcttcttggaagcgcaacatcagaagcagaattgaccagtgccaatgtcaacacagatgccaaaggtacccacatcacaagtgatgcagttaatgaagcattatcttcagaagtgtatggattcaaaaagagcctagctggagttcattggaataacagcattaaggaaaaagttaagcaaatgagaaagaaaaaggacaggaatgactga

SEQ ID NO: 5015 - DNA, 399 bp, Saccharomyces pastorianus
atgttatgtgttaaagaatatattcctgaggtttggtcgtacattaaaccttccattgatcatcaccagcaaaataacaaaaccttctctccgtccaacaacaaagttctattcaatatgcaaaagaatgaatttttgtacaggctaccgccaattactctgtgtacagcgagctggttcatgagctgctttgttggaattgtgccgatagagacgacgctaagaatatgggattgtttattctacgaggaatcgcattttttgttcaagacctcgctggcagtgttaaagttgagtgagcacgaactttccaagacaaagcctcgtagcaattcgcttaaccattcttggacttctaacacgaaaccagagaaacggatcaatgggtcaagaagatag

SEQ ID NO: 5016 - DNA, 873 bp, Saccharomyces pastorianus
atggatgctgacgaattagaattaaaaaaaaacttaagaattttaaaaaaggaggagctgcttaaaaggaagctatcaaaagagagtaatgaccgaaagagagacgtcgcatacaagaacaattccaagactagctcaatatatatatcagatcttcccacggaaaggataacaaaagaggaactgacggaacagttttccaagtatggagtaataagaatgaatcgggatggtaaaccccattgcaagctatatgtgaacgataaaggtattcccaaaggagatgctttgattatttactctaaagaagagagtgtcacattagcaattgaaatgatgaatgagtcgaatttcttgggaaagaaaatcaaggtagagagagcccaattcgatgacagagagagtatcaatatagacaacaaggaaaatagtaccaaagcgccgggcgaatcagaacgaccagtaaaaagaccgaaaccaactaacttcaaagatgatggggagactgtagactataatgacgatgaaagcctggccaaagctgaccgaactgtggtacttgccaatgtgttcgatatttataaacagtacacacaagacgacatcaatgacataaaagaagatctgttggatggttttcaggaaattggccaagtggacaacctttctgtatctaccgataaaggaaaggcaactgttgttttcaagagaagtaaagatgccctagaatgttgtaaaaccatgaatggacgttattttgacggccaaaagttacttacattcatgttaggagacgattatgcttcagaaatcaatcgcgagagtgaagcaagtgatgtggaagatgatttgatagagattggcgagagataa

SEQ ID NO: 5017 - DNA, 882 bp, Saccharomyces pastorianus
atgttggctaaatcagcgaccaaagatattttgttccgaggcttattcaaatcgccggtatcgacgtttcaagtttgtcgttacgtctctctcttgggacaattaaagccatcagatggctctaccaaatctttcaaaagactgggtcgtggtccctctagtggtttgggtaaaacatctgggcgtggtcaaaagggtcaaaaggcacgtggtaaagtgaaatcgtggtttgaaggtggtcagactccaatttataaactattccctaaagttggatttaccaatgcgaatgccaaaccgttgaaggaactaaacctggaacgtattcaatggtttcatgataaaaacagactgaatttacaaccaggtgagattttagatataaataagatgaggaaaattggcttggtcactgggcctattaaaaacggtattaaaattctagcgagtggaaaatttcattacagtctaccaatttctatagaggcttcgagagcatccgcaaaggctattgaggccattgaaagagcgggaggtaaattcacagcacgatactacacaccgttgggtttaagggcacaccttaatccagaatggtttttaaaaaaaagaggaaggctgcctttacaagcaagacccactaaaagaaaagatattgattattacggtaaagaagagaaaagaggttatctaataatggaaaaagacaaacttttgaaagatatcgagaatgctcaaaagaatggttcaagacatttcttgagacagaacgtaaaaaagagttctttagaacttgaactagagaaattgtcttcagatcatgaatccgtgcctgtcatatctagatctaaagtcatgaatgtcaaagatctggagcagtag

SEQ ID NO: 5018 - DNA, 285 bp, Saccharomyces pastorianus
atgatattcttgcagttggttttcaagaagttcacaattagtttgtttatcagcttgaattccaacaaaaaggcatcgtggccttctggagactcgattttctccagttgcgaattcggtatgtattcagccaagaattcttgttcggagtatgtgaaaagcccatcagattggataccgatgatcagcgaaggctgctcgatggcggaaagtaccttcgtgatgtcttccaccctgtctctggctaggtcgtgcgtgtccagcttacgcgtaatggcaatgtaa

SEQ ID NO: 5019 - DNA, 3054 bp, Saccharomyces pastorianus
atgaagaaattaaatgatttaaggagggccttagctgaaattcaaatggaaagtaatgatatttctaagtttaatgtcgaagaacgtgttaatgagctatttaatgaaaaaaagtctttggctttgaagagattaaaggaactggaaaccaaatataagggatttggtatcgactttaatgttgaggagtttatagaaacacctaagaaatttaccgtaaatgaagaaaacgatgcggcctatccaagccttgaccctaaggcataccaaagcaaattagacgagattaatagaataacagatgaattgttggatttgcaaactcaggtcaaacaggaaactgaagaagacgaagacgaagaaacaaaatctttctcctccagctccgaagctgatgatgatgaaatatatcaagatgcatctccaactcaagaaagaagaagtgaatattcagagttatctgcaggatcaggtcccggatcttttcttgatgcgttgtctcaaaaatacgggactggtcaaaacgtcaccgcgtctgcaggtttgagagacagtcatggttcggggcacatgcctagcaatgtcgagaaatccttcataaacaggctcaggaagtctaccgtgtcttcagctccttatttagaagagttgacacaaaaggtaaataaagtggaaccattgaaccaaaacaaagatgaagacctattaacagaaaataacacaggggatgaaatctctatttcggatagggtgcggaaagatgttcagaaacacgttaaaaacaaaggtcggaagcattctgacgatacggaagaaggcgccacaacagatacaagttatgtgagtgattctgataaagaagttgaaggtgaaaatccttctaccacatcatcgacgcttcaccctcctcctcctccccctccactccctttgaatctgttcggtaagattaatcaatcaccagataatgaaaatgaaacagaaaacaatgctgctgctgctgctgctgctggagacgctgctgctgccgttccgccgccacctccacctcctcctcctcctcctcctcctatgggattatttggccaaaataatggagcaactcctccaccaccacctttaccttttgtattatcttcaactggtgcaggtgcaattccaccagctccaccgatgatgccagcttctcaaatgaaatcagccgtcacatctccgttgcttcctcagtcaccatcgttatttgaaaaatatccacgtccccacaaaaaattaaagcaactgcattgggaaaaaatagactctactgataattccatttggggatcaggtaaggctgagaagtttgcggatgatttgtatgaaaagggtgtccttgctgatttagaaaaggcctttgctgctagggaaatcaaatctttagccactaagcgaaaggaagatttacagaaagtaactttcttatccagagacatttctcaacagtttggtatcaacttgcatatgtactcttcactttcagttgtcgatttggtcaaaaagattttgaagtgtgacagagactttttacaaacacctagtgttgtcgaatttttatcaaaacctgagatcacagaagtatctgtcaatttagctagaaactatgccccatattctaccgattgggaaggcgttagggatcttgaagatgccaaacctccagaaaaagatccgaatgatctacaaagggccgatcagatttacctgcaattaatggttaatctggaatcgtactggggttctcgtatgagagctcttacggtagttacctcatatgaaaaggagtataatgagctgctggcgaagttgagaaaagttgacagagctgttggtgcgcttcaggagtcagataatttacgtaacgttttcaacgttattctagctgtcggtaactttatgaacgatacctcaaagcaagcacaagggtttaaactttcgactttacaaaggctgacatttatcaaggataccaataatagtatgactttcttaaattacgtcgaaaaaattattagattaaactacccaaatttcaatgacttcttaaaggagttagaacctgtactagatgtcgtcaaggtctctattgaacaattagttaatgactgtaaggattttagtcaatcaattgtaaatgtagagcgctcagttgaaattggtaatttaagtgactcttcgaagttccatccattggataaagttctgataaaaacattgcctgtactaccagaagcaagaaggaagggagatttattggaagacgaagttaagttaactatcatggagtttgaaagtttaatgcaaacatatggtgaggattctggtgataagttcgcaaagatttcattttttaagaaatttgcagattttataaatgaatacaagagagcccaatcacagaatttggccgcagaagaagaagaaaggctttatgaaaagcataagaaaatggtagaagaacagcaaaaaagggcacaagagaaagaaaagcacatagaggtcagagcttcacccgaaggaaatgaggaagaagaaacggaagacagacgtgctgttatggataaactattagaacagctgaaaaatgcaggccccgctaaaagtgatccttcgtctgctagaaaaagggctctggttaggaagaaatatctttctgacaaagataattcggcacaagtactcaacgacttggataatgaagatggatctattctctactctccggaagcctcaacccctgacacggatgcagcgatccatgctgaatcacctacgccgcttgccacgagagactttatgaacacttcagaagatttaccatcaccatcaaaagcatctgcattggaagatcaagaagagatctctgacagagcgagaatgctattgaaggaattacgaggttctgataccccagtaaagcagaattccgtactcgatgagcatctagaaaaattgagagctcgcaaggaaagagcaaacggcgagacgaatacaggcaacaagctaagtttcaagtaa

SEQ ID NO: 5020 - DNA, 2772 bp, Saccharomyces pastorianus
atgttgaagaattcgggctccaagaattcgaattcgaaggaaagtcattctaactccagttcaagttccggtcttttccaaaacctgaagcgcctggctaattcaagtgcatcgaatagtaatgtcaccgctccgaacaatgcatcagaacagcagtatcctcccgtgggacaggaaacgaccactacatctgcatcgtcctcgtcctttagaaggctaaatggaccatccaggtctacatccactgaagcaaggccactgaacaagaaagcgacactcaacacccaaaatttgtctcagtacatgaatggtaaaataagtaccgatgcgccaatatcgtcccagcatgcaaggtcgcattcaattcagtccaaatattcgtactctaagaggacctcctctcaggcgtctaataagctaacgagacaacacaccgggcagagtcattctgcggcaagtcttttgtcccttggctctttaacaaacttgagcaaattcactactcctgatggcaaaatacatttagagatgccctcggatccatatgaagtggaaattctgtttgaagacattatgtacaaaagaaacattttccaatctttatcaggagacaaacaagaagagctgatgggctacagtacggaaaagaaatggctgattgtgaaacaagatttacaaaacgaattgaaaaagattagagcaaacacgacttcctcttccgctgcttcgcgtacttcgatggcatcagaccaacatcccatacttacagctaattcaacactttcgtcgccaaaatctgttttgatgacaagtgcttcttctccgacctctactgtatatagtaacactctaaaccattccaccaccctttcaaccgtgggcacgtcaactccaaagggccataataataagaaaacaatggccgggggtttgaaaaagcaaccatctataaacagtatttatcgtggtgggcctgaaattaatacaagcgcgtccactcttcctggagacagaacaaacagaccaccaatacattatgtgcaacgcatcctggccgataagcttacgaccgacgaaatgaaagatttatgggtcaccttgaggacagaacaattagactgggtagacgcctttatagatcatcaaggtcacattgccatggctaacgtactaatgaactcgatatacaagacggcgcctcgggaacatttgacaaaagaattattagaaaaggaaaattcctttttcaaatgttttagagtcttatcgatgctttcacaaggtttatatgaattcagcacgcatagactgatgaccgatactgtcgcagaaggtttgttttccacgaagttggttacaagaaagatggccactgaaatttttgtctgtatgttggaaaaaaaaaacaaaaacaggttcgaagcggtcttaacagcccttgataagaaattcagaataggccagaatcttcatatgattcaaaatttcaagaaaatgccccaatatttctctcatctaacccttgaaagtcacttgaaaattattcaagcttggttatttgctgtggagcaaactctagacggaagaggcaaaatgggttccttggtaggagcatccgatgaatttaaaaacggtggaggtgaaaatgccattttagaatattgtcaatggaccatggtttttatcaatcatttgtgttcttgttctgataacattaatcagagaatgcttttaagaacaaagctggaaaattgtggtattttacgaatcatgaataaaataaaattgctagactatgacaaagtgattgatcaaattgaattatatgataacaataaactcgatgactttaatgtgaaattggaggcaagtaacaaaacatttaacgtggacttgaaagatccattatcgttgttgaaaaatctttgggaagtatgtaaaggcacggataacgaggaattgttggtgtctttagtacagcatcttttcctttccagttcgaaattaatcgaagagaatcagaacccctccaaactatccaaacagttgaaattaatggactctttagtgactaatgtcagtgttgcctcaacagccgacgaagaaacgaatatgaacatggccattcggcggctttatgatgctatgcaaactgatgaagtagcacgtcgtgcaatactagaaagtagaactctaacaaagaaattagaagaaattcaagcagagagggattcccttagtgaaaagctaagtaaagcagagcacgggctcgttgggcaattagaggatgaactacatggaagagatcgtatactggctaagaaccaaagggttatgcaacagctggaatctgaactggaagaattgaaaaagaaacatcttttggaaaagcatcagcaagaagttgaattgagaaaaatgttaactatattaaactccagacctgaggatggttttgatgtaagtaaaggaactaaagatataaactcaagtttaaactcctccgaaaaggcaaatattcagaaggtattacaggatggattatcgagggcaaagaaagattataaagatgactcgaaaaaattcggtatgacacttcaacccaacaaaaggctgaaaatgttaagaatgcaaatggaaaatatcgaaaatgaagcaagacagttggaaatgacaaactttgctgagtttgaaaaagaacgcctcgaacctcctatagagatcaaaaagcccaaaaggaagcataaaaacatacaatcaagaaatctttag

SEQ ID NO: 5021 - DNA, 879 bp, Saccharomyces pastorianus
atgatacaggtcaagcttaaaacgtgcctgaaaatgtgcattcaaagattaagatatgcacaagaaaagcaacaggcgattgcaaagcagtctcgaagacaggtcgcgcaacttctattaacaaacaaagaacaaaaagcgcattatcgcgtagaaacattgattcacgatgatattcatattgaactattagaaatattggaactatactgtgaattgctattggctagggtgcaggtgataaatgatatctccaatgaagaacagctgatcaaggagcatatggaagatggtattaacgaggctattagatccctaatttattcaattctttttgttgatgaagtgaaagaactatgccaattgaaggacttgatgacttggaaactagatgctgggtttgtcgctgggattataacggatcatatcgatgttcctgataaaatcgtgcaaaaatgctctccttcggtgccaaaagaggaacttgtcgacttatatttaacagaaattgcaagaacgtatgacgtgccttacagtaaactggatgattctctatcctcgtcctcttctagcatttctttaggctctactggtgctccaggagatgttaaagaaacagacgaagaaaagcccatactagccttagataatgacgagaatgacaccgcggatgctaaacaccctatcactatcaaaaagcctagacaaaatagtgagaatataaacaacgaactgaagattccaaaggacattaaaaaggaagtaattgataagaaacaacctgaaaaaaaaaccaccaaaaggaagaccaaaaaagaacaagaaaatgatgaactggacgagttaaagaaacgttttgatgctttacgtagaaaataa

SEQ ID NO: 5022 - DNA, 495 bp, Saccharomyces pastorianus
atgacaatggattttgacgattcactgactttagaagaacaatattaccaagacggttatcgtgaagggcaaaatgagaatttgaagcaaaacttcttggagggcaaacaatttggcctacaagtaggattccagagattcatcatcctagggcaaatgaaaggattgtgtgatgttgtagattcgtataattttcaaaatcctttgttcgaaaaaaatatccatactgttcgcacattaataaacggtttagaaatgaataatgatgatgaaaatgtgatagggttcgaaaaggtgttagtaaaactaaaaaataagttcaggacaattcttatagctcttcaacgattaattaaggatgaaaagaaaaaacctctaacatttgaaatgtttgaagacgtctcaagggccattgctggagatattaaaggttttgtagaagatgacgaaagtgccaaaacgaaaagtacacaagaccaagcccaatcatggtaa

SEQ ID NO: 5023 - DNA, 2298 bp, Saccharomyces pastorianus
atgatctttggactggatatggaagctctttttcatgataaagatgaaattatacgcgagttacggaaggatcctttgataattaaagatgataaccatataataaatggcaaagaattacaacaagagtctagcgatctattacaacaagaggcacagctggccaacgaactgaacactctggacaacttgaagatactatcgaatttattaacggaagttaaaaccaatttagaacttctagaactagaaaattgctactattcattgcaatctttacggcaaaaaatgcgtaacaatacagcctttctaaagcaaagctttaactttcagcagtcaatatcattatacgttgattcactacatttaaaacttgtcacggaactgtatgaaattcttacaactgggttttggaggattactgagaatactattcaatttacaccaaccgtcaaatggggcaaagacgaagtggatattgagtacaatacgtttatgggtttcgtgactcagcagtattttcctcaaggtggtctggatagtcagtcatggatcatttcagatatggacaatgctgactcccaggagcaagtaagagcaaagttgaatgtaattttaaaggattatgtgaatcttgccagtgttgtcaataagatcaggagctcaatttttatacctgggaaacaaatctcgcatgatgatgagaagaagatgcttaatttttctaaatctgcgtcgcatggccaaaacaccactactgtattagcaagtttcgaaacagtatgcgatttcatattgcacggattggccctgagagacatgcgaaccttgagttccgaattaggacatttatttaatacagaatttaccaaatttgtgaaaaataacgcatcaataattttagactccttagactcccctctcaaaactctagtctcttcggcgaacgacaaattgatcaaattagcctcagaaactaaaactgaaaactggttttactccggaaaggaaatacaagatctgttgatgaataagcagttatattataatctattgctagacaaaattctcgaatcgcatatcaataatataagagatattttcgaggacccaaataaaagttggaaaactttagaaacgatcgagctcaagcatgctcgtagtagcactaatacaacaagtgagaacaaagggaacagtggtatggacacaaaacaagaaaaaaaagaacatcatacttcagcacccaaggatgacgactggaattgggaggcggatgatgatgctgatgcatggggtgaagaaattgacgtagatatcgatgacgaggaagaaaaaccagccgaactgatggaagaagaaccagatgaagaagaagaaggagaaaatgcctgggatgaagcatgggcaatcgacgaagacgaaaacgttagtgacttttcctctgtaagtaaaataaaaccatcaaaagttcacaatataacacttaatgaagaccgcattgaagtgacacagttaccgaacttgtttttgacaatttcacagaatttcaagaactcttttgaagatagtcatgttgataagcaatactttgcatacaaatataatcttttgcaaacatcgtacatggctatgtgcactaataatcttttcaacaattggtatcaactttatgtggatatgaggtatctaatagaacaagatgaaaaactatacagaataaaggaattgacgagaaatttgttggaaactcgattaaatatgaagtatcgttttgtttctaggttaattgagcgtcagttaacagaattccgtgagaaagaaaagaatccatcatgggatgccatcattgagagcctactaccatatatctcaaaggaaatcatttatccgctagagaaaataaaaggtgaagaaagttaccgttatttattgtcattcctaaactttttgtataatgactgcgtgacaaataaaatcctaaaatggaagatcatctctgaggtcaattcggaaaatttaggtgagcttgtatctttactagttaacaatactgagatacaaacattagcggaagaacccggttataaagcgatgagagaaaaattcgccacaatgggcaagtttctacctttgcatttaaaagagatcatggagatgttttataacggtgacttttatcttttcacaactgatgagcttattcaatggatagagttgttgtttgctgacacacctctacgaagaaatgctattgatgacatccacgaaatcagagatgctggtttagaagattga

SEQ ID NO: 5024 - DNA, 3693 bp, Saccharomyces pastorianus
atgcccgtccaagggactgatcctaaaaagaggcaattaaggctgatatcggtggcattcaaggaagcgtctatcgattcaccttcctttcgtgcctctgtgaatttcttccaaaccagagtggatgcattagaggattgggtagagaaaacggtggacttttttgatcagaagtacaaggtgtcctttgaagattttcagcgggccaaagaaactctactatcacaattgttaccttctcctgtcctattaagtaacggttttgtcagcaaccaatcttttaccccccaactggtagacagttttaacaaggactactacgatttctcggtcaaactgttaaaaattgtaaagggcgatgattccagccattcaactgctttattggaactgatgactaatgcagttgaaccatacagaaatgtaagaaaaaattttgatatttaccaagggaaatatgacagcatgttggcatcataccaagctataaaggtttccagtaccagtttagaaccttcctctataaagaatgatgctttggagttatttgaagtccaaaaaagttatctgaaagcctctttagatctcataagcgctatatcagtagtaaaattaagcttagacaaatttatatatgagtcaatgaaggtactaaaatgtaagagcatccttgcaacgaaagattccggaaaaaaaatcgatttatctccttgtatgaatgactacttggacagttactccatatgggtggaaaattcaattgaaggctccaaagttttgaattctgacattattcatgccaaaaagcaagcctatggttacactctaaaaagaattaccccatccaacgacacgagtgaccataatatcagatcgctacattcttcaaaactaatatcgaaagatacagaggcaccttcaaaatcgcctgaaaaatttggatggctctacatgaaaacgcaagttggcaagccaagtagagagatatgggtcagaagatggtgctttttaaaaaatgccgtatttggtatgtttcttttatcgccctcgaagacctatgtagaggaaacagataagtttggtgttttccttactaatgtgcgttatgacccagaagaagataggaagttttgttttgaagtaaaaatctttggtaatagagtaacggatttacatggtaatatatcaagggatatcacgctggttttccaaacatccaatttccgagacttaaaatcatggttaaatgcatttgaattgacaaagaagtacgttatgaacttacagcataatagtcttgaatacgagctcgcgtttaaaagattttctccaaaatattttgaatttgcctctagtacgactacctctatagatcaattgataacaacttttgacaaagagaccgagtctttatatgatacattaaactgttcattatccgagtatgatattctgactttgggagaggagaaagtttttcaatttcaaatgcctacgacgccaatatctactaaaatgacacagttggctatattgtcaaacttcctcacaaagggtagttggtttcctaatgcggtgcttgtaaatgtatggggcaccacggattggagcgagtacactatattaccaagcaaaggaaagaagccttcttcacttttaacaaatgacggtaaaaggctaccgataagaaattctactgtatatccccattattattctaatgagttgaaggttcttgatctgcaattcaaatcacttgtcttttcaccggaccaaagattagagaagctacctgaagaacttttattattcaaatttgaagcattttggtgccccaacaaaagacaaaagttttcggcaacttgtttctgcacaaaggattatatttattgctacatgaactctatggagttcatctgtctcacgaacatcaatctagctgacattatttcagtagaaaccgataagacatcaaagaaaactttaaaattttatgatgccagcggcttacagatgaaggcaataatcttgtttactgactataaactcattgcctctaaattgcagtgccttttggaaaacaaggcttcaaaaaatccaaatggcaatgaagaaatattagtgaaacttgagcagatggagaaggattttcaagagaaaaagcaagaagaatcaaataaagcagaaaaagaagaaaattccaataataaggctatgaacagtatatccaaaatgataggatctcatgtaacgttttgggagatgcctgatgacgcatcttctttattgaacaggctcaaaaaacttcaaacagaatacacaactacatatgatcacgagtatgaaatttccagcaaaggattggttcatatattatttggtgacaagtcgggagcctttccaaaatgtctatttctagcaaaaaaaaatacgaaagaaaacatcaaatcgttttggcataaagaaaaagatgccaaggacagattacaattggttcgtaaaataccattccgattggatatgactgacaacttcttgaatactggaaaatatctcagagatagagaatccaaaccaatttttgttactcaaagaattgtcgatattgttgaaaacaaatattatgaaattgatttggatcccatttttattaaagtgccattttgtcatctactaagaatttcagtcaagtttgtcatatccgagtcatatgataccgataaccatttagaaattaaactgaatctgacggcaaatagttctcttctccatgttttgtacaaactagagtacattgatagtagaactggggaagtagtaaagaaattatctttggcggagatggtgtgccaaaactgggtattaaaatttacatatagcgaattcctactgataagaaaagtgatacggtactatttagagagaattggcaagcatgggaaagttattaaggctgttaagctatgcggtattttaggcgtttctaacagtaaaaatgaagaaccaaccggtgacaagagcgataaatttgagaaaagtgaaaagattcaatatgacataaagtattcatgcactattttgttcttaatattcattaaactgatggtttacaggattaccaatttaacatttgtattttttaggatattgattggtatcttattgttgtttgctgaaaaattctcgcatattaatcggaaaatggtaattgggttgttagcatctattatgtttagcgtgtttttatcaggaagagcatcagtttcctactggtccgtaaagagggctgaaaaaatattccaggatcgcctcggatcagataaattcacaatgaaaagagccatttacataagtgattcagatctactgaccaatcaattatcagttacaccggatagtcccatttttgaaaagttcagtgacggcagtttcactaaagattgccagtacagggaaacgcggaaagagttggcgatgaggaggaacgaactgttgatcgaattaaggatactgcaagacatggagaaacagctagtacagggtgactataaaaagtttttatcagacgaaattgataaatgttcgatggtgtcgatagaaatggctgatctttggtcgaatgacacacaattgcagaaatactgcctcaattgtgacgaagagcttagaaaattgggatcatccctaatatga

SEQ ID NO: 5025 - DNA, 1521 bp, Saccharomyces pastorianus
atgaagttactatcgaaggaaaaaacaattagaatactgaatatttcgtctgtttttgaaagtgaaccaatgtatttcaaagatcaaagtccctttatgaatgggtgcattgaactgaaaactctattggctccgagagaattattgaaattatgcaaaaaaattgagtacgaagaattgcaaagaatcaagcattttgataacggacccagaacaatagatttggatatcgtcatgtatttgaatagtgtcggggaggatgtactggtaaatgaagctgatttaaatataccacatcctagaatgttagagagaacttttgttcttgagccactatgtgagctaatatcaccacgttaccttcatcctgtgacagcagaacctatagtagactatctaaaacaaatatacgagaagcagaatgatgaagatactttatggaaattagttccgttaccttcccgtgataatacggaatctaggtttctgaaattcaaaacaataaccaccatcgatgaattaactggagaagcaaaaagaatcactatttcaccaacatatatcatgggtatattcaacgctaccccagattctttttcagatggaggtgaccattttactgacattcaaagtcaaatgaatagtgttgccaacatgtgtaaagaagcattgactttgcatgactacgtgatcatcgacattggagggtgttccactagacctaattctattcaagtatctgaagcagaagaactaaagaggacaatcccattaattaaatccatcagagagaactctaacttgccacaagaaaaacttatactctccgtcgatacttaccgttccgacgtcgctaaagaggctattgcggctggagtggatattatcaacgatatttctggaggatcttttgatagcaacatgttggacgtgattgccgaaaatccagaagtctgctatatcctttcacacattcgtggcgatatttcaacgatgaacaaattgacacattacgaggactctgccttaggcgattgtgttcaacaagagttcgtgaacaacactgacattcaacagttggataaactgaaagacagcacaacattaattagaaatataggacaagaaattggagaaagatacttgagagcaatcgaaaagggcgtcaagcgttggcaaataataatagatcctgggcttgggtttgccaagaatgggaaacagaacttacaaattattagacaaattcccatgttgaagaactactctttcatcatggacacacaagattctcatacctatataaacttcagaaacatccctgttctgctaggcccatcgcgcaaaaaattcattggacacattacaaaggacgtagacgcaaaacaaagggactttgccaccggaaccgtagtcgcatcgtgtgttggatttggtagtgacatggttagggttcatgacgtgaaaaattgttcgaagagcattaaattagcagatgctatttataaaggttcggaataa

SEQ ID NO: 5026 - DNA, 960 bp, Saccharomyces pastorianus
atgtcaaagctgttttctaccgttaattctgcaaggcataccgttacactgggcagtatgaaagactatgtgcatatcaagaagttagagatgaacacggttctgggaccagattcttggaaccaattgctgcctcagaaatgcctgttaagtttagatatgggcacagatttcagtaagtcagcggctacagatgacttaaagtactctttaaattacgcagttatttctcgtgatctgacaaaatttgttagcaggaggaaaaattggggctctgtttccaatttagctaaatctttatctcaatttgttatggccacatatgccggtgttgaatcactgaatttagaagtgcaagcagatacgatacacattagaagtgatcatatttcttgcgccattcaacaagacagacaaaatccagatcaaaaaaaatttgatgttgtgagaatatcagatctgaaaatgctgactttgattggtgttttcacttttgaaaggctcaggaagcaatatgtcacgttggatataaaattaccttggtcgaagaaggctgagttggcacccccagttcaaaatgtcatcgatgatgttgtgaaatttgtagaagcttcaaacttcaagaccgttgaagccttagtggaatctgtgacaggtattattgccaataacgattatttccaaaaatttccagaattgccaattgtagtcaaggttttgaagttaaacgcaattacggctactgagggtgtaggggtgagttgtgttagagagcctagggatatcaaaaccttgagtaccactgacaatgaacagccttgtggcgataatgagacttctaataccgcctttgatttaccttcattgcaaaacacatttgttgaggggaaagatacatggaaaacggctttcttagcatttggttcaaacattggagatcgtctcaagcatattcaaatg

SEQ ID NO: 5027 - DNA, 1197 bp, Saccharomyces pastorianus
atggctggaccaaatgggcgaatcaaccaagtgaggagaaagggtatctattctacaaagaggggaaatggtgataacttactgctaatgaaacgccaaggaaaacatggcatacaggaagctgagagtgacgaattatcgaatcacgaggcctcttctcccacgaagaagcgtgctaaagcagaagatattattgcagataggactagagtggtggaaggcatgtcgatggctacgtttgattgcagtaataaaattgggaagctgttttctgattccgagataaaagttgacaagagatcagaagaagaagaggaagtaggggacatttccgtatcgctgatacataatttgaaggacgaagacatcgagtctatcaagtgcagaaacaacaatcttttagacagtaaaaaactactattagaggcggaattatcagcagttgaagacaatcaaatcttttcgtcttcattccctgaaggaaagaaattatcgatacaaaactctttgagctccagagatcaaattgttaaaaagcttcaaacaaggaaagactacgtaagcaagtttaacctaccacctttgttattttcagacgagctgctgaatgaggtggaacccttcatgcctattgtgatggatatattgaagggacgggtctcctctgcctattacttcaaggcaaaaaatgcatacaggaattcccaaaaggcctatctgtcagtagatgagtttagaaaattgaacttaaacaaatttactgcgggattttatggattgaaaaggcaattgagggttggcgaagatattgctaagagatacagaagggaactgacacataaccaacctgcaacactgagatggtggggggtgacagatttctgcaattacgttttggcgccggaaattcttgcgtccttttgtattcgccaattaaatttctccagcagatctcattcaccaaagttgcaagataaactcagcgaaaaagcctactactacgaccccgaaacaagggtactagcatacgatttattcgaagatacgatcgagtacggccttatagtcgcagattctgatccaatagagcagtgggaaaccgctatagaggaagaccgtctgcaagaactgaagctcgatgtgcactactattctagcaagagatggcgacagcccgccaatggtgaggccaaatga

SEQ ID NO: 5028 - DNA, 960 bp, Saccharomyces pastorianus
atgaaagaactaaaggaacaacttgactctagactaaatgaaatgaacgaggaaaagaggaaacttgcagactcaaataatgaggagaaaaatttgaaacaaaacttagaattaatcgaattgaaatcacaacttcataatatagaagccgagatcaatgaattggatgttcaaaatgcggaagccgaaagagacaaatatcaagaggaatcattgaggctgagaactaattttgagaaattgagttctgagaatgcaggtaaattaggtgaaatgaaacaattacaaaatcaaatagattcactaacccaccaattacgcaccgattataaggatgttgagaaaagttatcacaaagagtgggtagaattacaaaccaggtcttttgtcactgatgatatagacgtttattctaaagcactagatagtgccattatgaaatatcatgggttaaagatgcaagacataaacagaataatcgatgagttatggaagcgtacgtatagtggaactgatatagataccatcaagattagatcagacgaagttagtagtacagtgaagggcaaatcatacaattaccgtgttgtaatgtataaacaggatgtggaattggatatgagaggaagatgttcggcaggccaaaaggttattgcgtccattatcatccggttggcattatcggaaacgtttggtgcaaattgtggtgtcattgcattagacgagcctaccaccaatttagacgaagaaaatatcgaaagtttagcaaaatctttacacaatatcattaatatgagaaggcatcaaaagaatttccaactcattgtcattacccatgatgagaaatttttgggccatatgaatgcagcggcatttaccgaccatttcttcaaagttaaaagagatgatagacaaaaatcacagattgaatgggtggatattaatagagttacatattag

SEQ ID NO: 5029 - DNA, 2568 bp, Saccharomyces pastorianus
atgagtgccatttataagctgtcaatccaaggcatacggtccttcgactccaatgaccgggaaaccatcgaatttggcaaaccactgactttgatagtcggcatgaatggttctgggaaaacaaccatcatcgaatgcttgaagtacgccaccacgggtgatctcccccccaatagcaaaggtggagtcttcattcatgacccgaagataactggtgaaaaggacattagagctcaggttaagctggcgttcacgagcgccaacggacttaatatgatcgtcaccagaaatattcagctattgatgaaaaaaacaactgccacttttaagacgttggaaggccaattggtcgctatcaacaatagtggcgaccgtagcactctgtctaccagatccttagaactggatgcgcaggtgcccctctatttaggtgtcccgaaggcgatcttggagtatgtgatcttctgtcatcaggaagatagtctttggccattgagtgaaccatccaatcttaaaaagaaatttgatgagatctttcaggcgatgaagttcacaaaagctctggacaacttgaagtccataaagaaagatatgtccgtagatatcaaattattgaagcaatcagtggagcatttgaagttggacaaggacagatccaaggcaatgaaactcaatatccaccagttacaatctaaaatagaccagtttaatgcggaagtgtcacagatcgaagctcaattaaacgaaattactgaacaatctgataaattattcaaatcaaatcaggattttcaaaaaatcttatccaaagtggaaaatctgaaaaactcaaagacctctataagggatcaagtggaaagattatcaaattccattgaaatcttagacttgtctaaaatggatttaaagaatttgttggctaatttctccaaagtcctgacggaaaagaatcatcaattgaaagatttggagatgaatatttcaaacctgaaaaaccagcaatcatctttgcaaaaccactccaattctcttatcagaagacagggtgaactagaagctcgtaaggaggcatacgaaaagaacctgagtcatctcgcctcattgaaagaagacttccaacagagatttcaacatctttcagataataacaacagcgacatggttaaaacaaatcaagagatgtcgcagttccaggttcgtatttttcaagatctatcgaacactgcagaacagtttgctaaagaaattctaataaaggagacaaatgtatcggaactggtaaaatcaataactgtagactcacaaaatttggaatacaataagaaggataggacgaaattaattcatgatacggaagagcttactgaagaagtgaggttgcttaaaaacttgtccactcaagacgatctcaatcatgaattggaaaacttgaatacatataagggaaagttacaggcctgggaaaacgacaataccataccgaaactaactcagaaaatcgaagagaaaaacaacgagatgataattttggaaaaccagatcgagaaattccaagatcgtataatgaaaacaaatcaacaagcagatttatatgccaaactggggctggtcagaaaatctcttaatgtcaagtcaggtgatttacagaatatcattgaaaaactacaaaaggatcctaaaataaggcagattttccccattacgcaagactttcaaaaatctgatttagaaatcgattttcaaaaattgtttatcaacatgcaaaagaatatcgctgtaaataataaagaaatacatgaatttgatagaaaatatactaatgccttgtacaattccaacaccatagaaaaggatttacacgataatctgcattcacaacaaaaagtgatacaactactaaacgaaaacttgcctgaagattgtacaattgatgaatataatgatgttctggaagaaactgaattgtcctacaagactgcgttggagaacctgaaaatgcatcaaacgactttggaatttaataggaaagccctagaaatcgctgaacgtgacagttgctgttacttgtgttcaaggaaattcgaaaatgaatccttcaaaagcaagttattacaagaattgaaaactaaaacggatgcaaatttcgaaaaaactttaaaagaaaccgtccaaaatgaaaaagaatatcttgatagtttaagattactggaaaaacatatcatttcactaaactccctgtgtcaaaaaatcgaaaacgctcaggaagctcttgataaagctaaagaagaaacaaaagcttctaaaacaaaactagatttactagaaacaaaatccacaactttaaaaaatgaaaaagaatttgcagaatctgaaattcgtccattgattgaaaagttcatttatctagaacgagaggttaaagaacttgaacacagctctaagacaatatctgacgagctatccatttataacaccagtgaagatggtattaaaactgtcgacgaactgagagaccaacaaaggaaaatgaatgattctttacgtgaattaaggaaaaacatatcatga

SEQ ID NO: 5030 - DNA, 699 bp, Saccharomyces pastorianus
atggagcctgtttatgagaaaagagacgcgtatattgatgaaatcgcagagttttggaagatcgtgctttcgcagcacgccagttttgcgaactacataagggcctcagactttaaatatattgatgctatagataagatcgaagtgaaatggctagcgttggcatccaaaacccgcgacaccagggacttcagcataacattccatttccacggcattgacggcgacttcaaagagcagaaaattaccaaggtgttccagatccggaagagcgaagacgatgaagaggacgggatgctgaccagtgagcccgtgactgtggagtggcccaagagttacgactcgataaacccatatttgatcaaagacaagcgcagcccggagggcaaaaagaagtacaggcagggaatgaagactatatttggctggttcagatggactgggctaaagcccgggaaggagttcccacacggggactcgctagcatcgttgttcagcgaagagatctacccattctgcgtgaagtactacacggaagcgcagcgggacctggaggacgaggagggagagtccgggctaagcgctgctgatgacgacgacgatgagggcagtcttggcgaggtcgacctgcccatgtccgacgccgattccgatgccaatgctgacgcggaacccagttccaagaagaggaaggtttag

SEQ ID NO: 5031 - DNA, 1524 bp, Saccharomyces pastorianus
atgatcagtgaaggccctaccaagttcgaaaaaaacacagtcatatctgtcttcggtgcgtccggtgacctggccaagaaaaagaccttccccgccctgtttgggctcttcagagagggctatctggacccgtccaccaagatcttcggctacgcccggtccaagctgtccatggacgacctgaagtcccgggtgctgccccacctgaagaaactgcacggcgaggccgacgatgtcaagatcgagcagttcttcaagatgatcgactacatcgcgggcaattacgacacggacgaaggtttcgacgagctcagaacgcagatcgagcggttcgagaaacgcgcccaggtcgacgtcccacaccgtctcttctacctcgccttgccgccaagcgtcttcttgaccgtggccaaacagatcaagagccgggtctacgcccaaaacggcatcacccgtgtcatcgtggagaagcccttcggccacgatctggcctctgccaacgagctgcaggagaacctgggcccgctgttcaaggaggaagagctgttcagaatcgaccactatctgggcaaggagttggtcaagaacctcttggtgctgcgtttcggtaaccagttcttgaacgctccctggaacagagacaacatccagagcgtccagatctcgtttaaagagcgcttcggcaccgaaggccgtggcggttatttcgactccataggcataatcagagacgtcatgcagaaccatctcttgcagatcttgaccctcttgaccatggagaggcccgtctcgttcgacccggagtccatccgtgatgagaaggtcaaggtcctcaaggccgtcgcgcccatagacacagacgacgtgctcttgggccagtacggcaaatcggaggacggctccaagcccgcctacgtcgacgacgacaccgtcgaaaaggactccaagtgtgtcactttcgcggcaatgactttcaacatcgaaaatgagcgttgggagggcgtccccatcatgatgcgcgccgggaaggccctcaacgagtccaaggtcgagatccgcctgcagtacaaggcggtcgcctccggtgtcttcaaagacatccccaacaacgagctggtcatcagagtccagcccgatgccgccgtctacctgaagttcaacgccaagacccccggtctgtccaacgccacccaggtcacggacctgaacctgacctacgcaagcaggtaccaggacttctggattcctgaggcgtacgaagtgttgataagagacgccttgctgggcgaccactccaacttcgtgagagacgatgaactggagatcagctggggcctcttcaccccactactaaagcacatagagcgtccagacggcccaacaccggaaatttacccttacggttcaagaggcccaaagggcttgaaggagtacatgcagaagcacaagtatgtcatgcctgaaaagcatccctacgcttggccagtgactaagcctaagcctgatgctaaaaaagataaatag

SEQ ID NO: 5032 - DNA, 927 bp, Saccharomyces pastorianus
atgttcttgaatttggtcaagaagtatggccttgtccccaaggatctatacggagatttggcttattccaccactgcttccagaaaatggaattcgctgttgaccaccaagttgagagaatttgctgagactttacgaactgccttggaagagcactctgctggcgactccgaaattgccattttgagggaggaaatgcaaatggagatcttcagattgatgtctttgttcatggacttgcccccagtgcaaccaaacaaagagttcacttgggaatatgtcgacaaagacaagaagattcacactatcaagtcgaccccattggagtttgccaccaaatacgcaaagctggacacttccaaaccagtctcattaatcaacgacccaagacacccatacggcaagctgatcaagattgaccgtttgggtaacgtcctcgggggcgacgccgtgctttatctaaatgtcgacaatgaaacattgtccaagttggtcgtcaagaggttgcaaaacaacaaggctgtttttttcggttctcacactccaaaattcatggacaagaaggtcggcgtcatggacgtcgagttatggaactaccccgccatcggctacaacttgccccaagaaaaggcctcacgtatcaagtaccacgaaagtttgatgacccatgcaatgttgatcactggttgccacgtcgatgagacgtccaagttgccagtccgctaccgtgtagaaaactcctggggaaaagactccggtaaggacggcctgtacgtcatgactcagcaatacttcgaggagtactgtttccagatcgtagtcgacatcgatgagttgcccgaagaattggccacaaaattcacctcgggtaaagaagaacccattgttttgcccatctgggatccaatgggcgctttggccaaatag

SEQ ID NO: 5033 - DNA, 231 bp, Saccharomyces pastorianus
atcggcgtcgacattctggaacaaagagctgcatcggacttgacgcaccaattggccaccaccgttctccagaactacaacgcccatgacgtgctcttgaaccagactaggctgctgcagcaggacaacagaatcttcaacaccctcgtctccaccgattctaccccgtcaccaaccaaaaaagctccggtagatgctggctatttgccgctaccaaccaattgcgtttga

SEQ ID NO: 5034 - DNA, 981 bp, Saccharomyces pastorianus
atgagcatatgtctagcgttaattgccacacctttcggtattaagtactctattactttcgtagcacagacaggcctaatcaattcatatcctgtaatgacatctgattttcaatttcccaagatagcttatccaggtaaactaatatgtccacaatacagtacagagaataaagatggtgaagatgtaatttttaactatgtttgcggtccagggacaaaactgcttcagtatgaacacaacgggacaatgttagaggctatcactgccaccttaattggtacagtgaaacgcgaggaagtgaagaatactgacgaagaagaagaagaaaaacttgaggtcgctgaccaatctacagaggaggaaaaatcagtggatgcgtcttccagtgaagtggtgaagagggttgtaaaatttatccgagtttcagttttgccgggggcagatgatgatggcagaactagcaaacatgctaataacgattttgccaataatctaccaaaggaaggtgatattgtgttgaccagagtgacaagactctcattacaaagagccaatgtcgaaattttggctgtggaagataaaccctctccaattgatagtggagttggtagtaatgggatgggaataattgccgctggtggcggttccggagcggccacgttctctgtatcgcaagcatcatctgacctaggtgagacatttagaggcataatcaggtcgcaagacgtgaggtccactgacagagatcgtgtgaaggtgatagaatgcttcaagccaggtgatattgtaagagcgcaagttttgtcgctaggtgatggtactaactattatttaactaccgcgagaaatgatctgggtgtagtgtttgccagagccgctaatggtgctggtggattgatgtatgccacagactggcaaatgatgacctcaccagccacgggggtgacagagaaacgtaaatgcgccaaacctttttga

SEQ ID NO: 5035 - DNA, 108 bp, Saccharomyces pastorianus
tcattatttcaagaggtccaaagcctcggcggtattgtaggtttaagcgaagtcgatttaagaggtactcacgataaactcatttacccagtaaactcagaaaagtaa

SEQ ID NO: 5036 - DNA, 1485 bp, Saccharomyces pastorianus
atgcagaagtggcttggactatggaaaatggattgcgtacagaaagtatcccacggtgtgttgccagcctcgtctgaggaccccgaaatttttacgaatagtgattatgtagtattaggagaaacatatcctgggcaagagcaagaagaaagtcctgaacagccagacccagacggcgaggcccgcagcgatacggttggtggtggctttttcagcagtctgtttggtagagatatgtcttcctacaccccagagtttcttttggatgtacgatcaagggtcaatttcacatatcggacaaggtttgttcctatagcaagagcaccggatggaccttcacctttaagtttgaacgtactggtacgggcaaatccgatcaatacaatagagaactacatagccaaccctgattgttttaatactgatattgggtgggggtgtatgataagaacaggacaaagcttgttaggtaatgctttacagacccttcatctgggcagggattttagggtcaacggtaatgaaagtttagaaaaagaatcagaaattgtgaagtggttcaacgatacgcctgacgctccattctcattacataactttgtttcggcaggttccgaactctctgataaaaggccaggtgaatggtttggccccgcagccacagccagaagtatacaagctcttatctacggtttcccgaaatgtggcatagatgattgtatagtctctgtttcctctggcgatatatatgaaaatgaagttgaaaaagtatttgttgagaatccagatagtaggatactgtttttgctaggtgttaaacttggcatcaatgctgtaaatgaaagctatagagaaagcatatgcagcattctaaattccgcatgctcagtaggtattgccggagggaggccgtcctcatcgctttactttttcggatatcaaggtaatgagtttttgtactttgatcctcatatttctcagccagctgtagaagacacctttgtagaatcgtgtcataccagaaaatttggtaaactacacctatcagagatggatccttcgatgctcattggtgttctaatcaaaggagaagaggattgggaacaatggaagctagaagtcatgggatccaccattatcaatatacttgctaagagaatggatgattttgatgtgagttgtagtatggacgacatagaaagtgttgattctaacttgatgaagaaggatacaaacaataatgaaaattacggagtgttagagggagattatgtagatatcggtgcaatacttccacacacaacaaacatagggggcagtgaagaggacgatggcttccaagacattcattgcaagaaccagaagattgttgttatggggaacacacacactgttaatgccaatttaacagactatgaagtagaaggtgttcttgtagaaaaggaaacagtaggtattcctagtcccatcaacgaaaaatgttag

SEQ ID NO: 5037 - DNA, 1146 bp, Saccharomyces pastorianus
atgttaccatctggtttagtcaacccacactgtcaaaatttattgggtaatggtgtcgttatccatgttccatcattttttaaggaattggagaccttggaggctaaaggtttgaaagatgcaagaggtagattattcgtttcttctagagctcatttggtctttgacttccatcaagtaactgacaaattaagagagttggaattatcaggccgttccaaagatggtaaaaatattggtactacaggtaaaggcattggtccaacttactctacaaaggcttcgagatcaggtttaagagttcaccatttagttaacgatcaaccaggtgcctgggatgagtttgttgtcaggtataaaagattactggaaacaagaagacaaagatatggtgatttcgaatacgatttcgatgctaaattagctgaatacaagaaattaagagagcaattgaagccattcgttgtcgactccgttgttttcatgcataaggccattgaagcaaagaaaaagatactggtcgaaggtgctaatgctttgatgttggatatcgatttcggtacttatccttatgtgacttcctcgagtactggtattggtggtgttcttacagggttaggtattcctccacgtaccattgatgaaatttacggtgtcgttaaagcctacacaaccagagttggtggaggtccatttccaacagaacaattgaatgaagacggggaaaaattacagacgatcggcgctgaattcggtgtcaccactggtcgtaagcgtcgttgtggttggttagatttagtcgtcttgaaatactctactctgatcaacggttacacaagtttgaacatcactaaattagacgttctagataccttcaaagaaattcctgtaggtatttcgtattctatccaaggtaaaaagttagatttattccctgaagatttgaatattttaggtaaggttgaggttgaatatgtaactttaccaggttgggaccaagacatcaccaaaattacaaaatatgaagagttgcctgaaaatgcaaagagttatttgaaatatattgaagatttcgttggcgttcctgttgaatgggttggaactggtccagcaagagaaagtatgttgcataaagatatcaaatag

SEQ ID NO: 5038 - DNA, 174 bp, Saccharomyces pastorianus
atggttaccgttgtattaggctcccaatggggtgatgaaggtaaaggaaaattggtcgatttactggttggtaaatatgacattgtagctcgttgtgcagggggtaacaatgctggtcataccattgttgtagatggtgtaagtatgatttccatatgttaccatctggtttag

SEQ ID NO: 5039 - DNA, 828 bp, Saccharomyces pastorianus
atgcccatcagaacaggtagtgatcacaacatgattcagccacccaattttgatgcgagctcgatgaaaatattggaggagctccaggaagggaggcaattaacgaatacacagcattttccagcacgcacattatatataaaattggctcttgattattctttctttagggacaatttattgaaatttcgtgctcacctgcatgaaataaaagtattcataagaataagcttcgatatcatgtatattgtgtgcaagatggaaaaggaacttctaagtctagtttatagtaatggaatagtcgatatatgcctgccgagatttatcttaagggaggaattgaagatttttgaaagctgcttttacactcatcatgacaaccgcttgcgtattctccaagaggagttttctcagctatttaaaaaaatcaaagtcaaagcttccattctttgttttagcattgaggagatgtccatgacaaatcaggaagcactacctcaaagctcgagattatttgaacttctaaaatgtaataacacaatgcagagagaagaactgcaacggagagatttcatactcaccaaagaggtaaagttgagcaagacgcaagtcaccttcctgattggaagtaggggaacaagaatagaaaccttgagaaaagaatcaggtgccaccataaaaataataccaattagcgagaaaatgaccatgcaggaaaggtttcatcctgaaaccgtccaacaaaccatactaatttcgggtgatctgtactcagttgcactagccattaccaatattgaatccgcattgtttgctataggactatag

SEQ ID NO: 5040 - DNA, 99 bp, Saccharomyces pastorianus
atggccgctttgcaaatcgaagacgcttctactgatgaattgagaaaggctgaagttggtttgaagagagttgtcaccaaggccatgtcttctcgttaa

SEQ ID NO: 5041 - DNA, 765 bp, Saccharomyces pastorianus
atgttcaagtctactttggaacctgttgaacaagttttgaaggatgctaagattgctaagtctcaaatcgacgaagttgtcttggttggtggttccaccagaattccaaaggtccaaaagttgttatctgacttctttgacggtaagcaattggaaaaatctattaacccagatgaagctgttgcttacggtgctgctgttcaaggtgctatcttgaccggtcaatccacttccgatgaaaccaaggacttgttgttgttagatgttgctccattatccctaggtgttggtatgcaaggtgacatgttcggtatcgttgtcccaagaaacaccaccgttccaaccatcaagagaagaactttcaccacttgcggtgacaaccaaaccaccgtgcaattccctgtctaccaaggtgaacgtgttaactgtaaagaaaacactttgttgggtgaattcgacctaagaggtatcccaatgatgccagctggtgaaccagtcttggaagctatcttcgaagttgatgccaacggtatcttgaaggttactgccatcgaaaagtccactggtaagtcttctaacattaccatttccaacgctgtcggtagattatcttctgatgaaattgaaaagatggtcaaccaagccgaagaatcaaggctgctgatgaagctttcgccaagaagcacgaagccagacaaagattggaatcttacgttgcttccatcgaacaaaacgtcactgacccaatcttgtcttccaagttga

SEQ ID NO: 5042 - DNA, 666 bp, Saccharomyces pastorianus
atgtcagcaaacgaattctactccagcggtacacaaggacaatacaatcagccaaacaaccaaggaagatctggaggctcttacgacaacaacaacaacaacaacaataacaacggaaatgagtacagtggcgataatgctaatcctaacggagaacgtggtctgttttctacccttgtaggcggcggtgccggtgcgtatgctgggtcgaaggtctcaagcaaccattccaagctaagtggtgcactgggcgcactaggtggtgcgttcctagcgaacaagatatctgatgagcacaagcagcacaatcagcaggagcaatatggccagcaaggcaactctaattatggcggatccaatcatcaccagcaacacaataacaatggcggttttggcggtcgcgaagaaggtcaaggtttcagaagagaaggaggccaaggcttcgagagaggtgaccaacagcgttacgggggtccaggtcctcaaggcccacaaggattcggaggcccaggtacacaagatttcggtggcccaggtcctcaaggtttcggtggcccaggtccacaaagtttcggcgggccaggcggccaaggctttggtggtccaaactcgcaagagtttggaggccaaaatcaccaaggattcaatggcggctcacgctggtga

SEQ ID NO: 5043 - DNA, 504 bp, Saccharomyces pastorianus
atgtatttgggttttaataacttcgagcagtatgcagatggtgctataaaccaaaatagaggtccagcattaaaagaaatatctgggaacattatcaattcagagggcgctgaatttgtactaccggataaagcgcttggaactcgcaatttccaagactgcgaaaggtttccgaaccgtttgagatcccgagaataccagaatgataatgatattacaagtgcctcaagtacgctgaccatcgaaaaattccagaaggacccaattggtactatttcaaaaagctggctgttactttcagacgcgctgcacaaatcatatgaagacttcaaaggcacgatcgtccagccaacgattgagaatattcaacaaaggaatttgtcggatgacctcaaaagatcattagtgcactttaatgaaaaaattcatgagatgtcccatttacccttgccagtattctcttgttttactggagaagacattcttccttcagagttcaattaa

SEQ ID NO: 5044 - DNA, 276 bp, Saccharomyces pastorianus
atgcatttgtttgataatagcagagatattgaaaatcgaaagagattgctatgtgctaagaaagtcgcaggcaataacaagtgctttgaatgcaagagtgccaatccacaatttgtttcttcgagctttggtatattcatttgtgtcaattgcgcaaaccttttgagaggtttagatgcaaacttgttctatgtaaaatctatcacaatggacagctttgaagaaaaggatatccgaaggtggaaaaaagtggaaattttagattgctgctttctg

SEQ ID NO: 5045 - DNA, 414 bp, Saccharomyces pastorianus
atgtcaataacagatttgaaggcatttggagagaggtttgcgaaatcgcagacaaaattgccagcagcgccggcaataacaaaatctatcctaccaaatttctttacggtcttcaaaacggcatcctccatctgtttaaaattacgaacgtcaacgtttgcgatgggcaaaactgcatcatcgtttttcaccaatcctgaaatctcttttgcagctttctgtgtcctttcctggtctcttccaacaatagcagctttgcaaccgagaagaaccaatgcttctgtttgcactcggcatatggttccagcaccgccagtgacaaatgccactttacccttaaataactcaggcctccacgaaccttcggtcacaaacttactatccagagtatttcctgtattcatggttttctaa

SEQ ID NO: 5046 - DNA, 246 bp, Saccharomyces pastorianus
atgttgaaatttggagaggaaagtcaatcagagcattcaagtttagaaaacggccttgaaggcgaaaatgatgtttcagtaaatataccatcagacggattggcttctaatcatttagaggatatcgatatgaaaaatgtcaaaagattacattcagagattgagcattttgacaatgatcctcattattccggtgaccagttagcatttaagaaaagcgtcgaccaaatgaatgcaagcacataa

SEQ ID NO: 5047 - DNA, 399 bp, Saccharomyces pastorianus
atggaaacgaagatcactgggttcactagacgttatacgttggacgatgaagcagttgaagaactcttacaactaacaaacacaaataaaagacagagaccaataacaacaagcgatggtgccttgataaatgacggtacagataccaatctaaacacaaacaatacccaaatgaaagttgacctaaatcctccaaataatattgcaccaattgacacagaagcggtaatacgccctttgaaagaagcctacgactctattgtttctgagaaggggcaaagaattatgcagttggagagggaattagaattacaacgtcaagagactcagtggctaagaaaaatgttaattgaagacatgggctgtgttagaagtatgttgagggatttacaaagatga

SEQ ID NO: 5048 - DNA, 957 bp, Saccharomyces pastorianus
atgcatcatcaatcgaagttagatgtatttataatcagagcttacaatttactttctaatgagtcagtcattagcggcgcatctctacaaagtgttacaaactcaccgcaaacagcaacaaataccccgtctggtatggtcaacggcatggttagtacagggattactaatccagcagggttagtggggtctgatggcacacctaatatcgatgagattattactagcaatggcaataatgctctggcgaaaaacaactcagacagtgctaatgcaacgccgaatggtaattcaagttccacctctgccataagcaataccagcaatcacactaacaacgggaacaacgcgagcactagtacggcgtccaatggaatttacacgcaggcccaatattctcaactttttgccaaaatatcaaaactttataatgctacgctatcatcaggttcaatcgatgatagatctacctctccaaaatcggcaatcgaactgtatcaaaggtttcaacaaatcgtcaaagagctagaactaagctttgaggccagtccttacgcaaagtatttccgccggttggatgaaagactttggcaaattaagtctgacactgaattagaaaatgacgagttatggcgtttagtctcaatgagtatattcaccgtgttcgatccgcaaactggccaaattttaactcaaggacgtaggaagggaaactctttaaatacatctactaagggttccccatcagagttacaaggaataaataatgggaatatcaatgggaataatggtagcataaacaatgcgaatagtatgaaaaacaactatgggaacaagaatgcatcaaccagccgaaccaaaaaaagaggtaccagagtggctaaaaatgctaaaaatgggaaaagcaataaaaacgctaataaggaaaggaatagcatgcagatgcaagcacattaa

SEQ ID NO: 5049 - DNA, 114 bp, Saccharomyces pastorianus
atgggctacaatacaatgaccaataatggatcacattcatggaaacgaagatcactgggttcactagacgttatacgttggacgatgaagcagttgaagaactcttacaactaa

SEQ ID NO: 5050 - DNA, 957 bp, Saccharomyces pastorianus
atgagtactccccaaccttctacaccaactttagaatggggaaacacttcagtgtctcaacacggttcttcattctttttgccttctgccgcatcaacagctacggtacctgtcaataacggtacaaatgccaatgctatttccaataatgtaactaccaacagcgcaaacacctccaccacactttccaacaactctcaacaacagatgatgcaaatgggtaatgcaatgaacgcttccatttcatcttcgaattcaatgcccccatacggtttgatgtcttctcaaacacaacatatgtcaaatatggttaacacttctgatattaatatcacgcctcaaaagcaaaacagattcatgcaacaacctcagccagagcacatgtatccggtgaatcaaagtggtacccctcaaaaagttcctccagcaagactaagttcaagcagaaattcacataaaaataattccactacctcattatcttctaatattacagggtctgcttcgatctctcgggctgatttatcactattggcgagaattccaccacctgccaaccccgctgatcaaaacccaccctgtaataccctttatgtcgggaatttaccatcagacgctactgaacaagaactaagacagttattttctggacaggaaggtttcagacggttgtcattcagaaacaaaaataccacatctaatggtcatagccatggcccaatgtgttttgttgaattcgatgatgttagctttgcgacgagagcattagccgaattgtatggtagacaattacctcgttctacagtaagtagtaaaggaggtataagattaagcttttcaaagaacccactgggtgttagagggccaaatagcaggagaggaggcactaataacccaaatcctaatgtaaatatgatttcaaactacaattctgatgtcggccatataaagaactaa

SEQ ID NO: 5051 - DNA, 351 bp, Saccharomyces pastorianus
atgcaaaactctgtttattttgaacaaaccgggtcatttgcgtccagtaatgacaatattgtgtcgagtaccacgaatacccacaatatttctcctagtcatcgttctagtttgaatctgaacaattctgcccttgcccacgatgcgtccggtaggggaagcggcagtggagatttgtatttgaatgacacaaattcacctttagcgatatcctctatgctaaatacacttgcccttggcaatacatcatgccacaggacatggcacgtaacaacagtaaccattattaacaatgacactattcagggcagttactgcttaacattaatcaaaatacctagggatttacca

SEQ ID NO: 5052 - DNA, 210 bp, Saccharomyces pastorianus
atgtccgccacatccctagtagaccagaatcaaagaggtaaaaaacttctccagctagagacagaatactcaaacaaagtcaagagtgtgatcacaggactacaactactgtgcacgaagggtcaactgcattccgtaaacggggtaaccggtcaacaagtggcccgctggtccgaattccccacttgttgccatcaaaccccagtttaa

SEQ ID NO: 5053 - DNA, 645 bp, Saccharomyces pastorianus
atgaataaagtagatcagattataggctacaagaagtgcgagggaaaactaccaaaggagaaacagataaccaagaacagatcgaaaggtgggaatgttgagcagctagataatggtaaaagggaaagagaaaacctgaaaacattcaacgaagaaagaaagaaattcttggagaggatgaacaaaagcaaaaagaaaaacatgacgaagagggagaaggaaaaaccaaaagaaacagaaaaagataactacaaaagagatgacaaaaagtttaaagagcaaaaaaagttaccagcaacaagggagtttcgtttcaaagaaccacattcgccaagtggttctcacaactttccggacgaaaacttgaaatcaaaatctcagtttggaggagatgttgagatagagtcggaaattgaaactaaaattatgatagaccaagctattcaaacatatggacctttgaatgtccagctgtcggaactttttaacgacaatattcttaacgtcactaaagagaatacctcttttttacaggacacagagttcacctcatgggaacgtcggtggtcaaattgtagtacaatcagtaatgcgactacaatctcctcagttccagatcctaaatacaagttcaacttcaacgaa

SEQ ID NO: 5054 - DNA, 783 bp, Saccharomyces pastorianus
atgctaggtttgggacaatccgctcaggcatattccgccaatgacgataccgagatgcagcagacagaagaaaaaatggctggcgttcccggctgtggccaggcacacgatctcgaataccctcatcacgataaccactcttcaccccatcaccaacactccggtatcctgccaagtgaatgttctggtcccacgttaaatactggtgctggcgccgttggtattccaggttgtggaagagtcaccaataaggtagtttctgaccgcgacaataacgcaaggtccactttagcaagttttgataccagtaacatgactgaggcaagaatgaatagcaagaatctgcccgttggttgccaaaacacatctatgccgcacttcgatggttctatggaccaacgtattccaggtgcaggttcgcctcgaagtgagcctcaccatattgacgcgtggagcaatatcccaaccttcggtgccggcactaacgaccagaacataatgcatccccaagcggcccctctagatagctacaatgagcacatggtgagagatgaaacaagcgacaattccgcttctttgtatactgttcatactcgcggttccccagcagacattccatctgctactcaaagaactgaaggaagaaaaaactatctgtatggaatgaatgatcaacattctgtgccaagaaactacgctacagataaagcggatccttcatcggttgaaacaagtgctgatcctgatatttccaacgtccaaagcgaaatcttgcgcaattag

SEQ ID NO: 5055 - DNA, 129 bp, Saccharomyces pastorianus
atgacaagtaaagcgtcgatttactttaatgtaatactatggttggtggcattatctgcattgataagatttattggttgttcattctatatgattgtcagagctttcaaaaagattacatcccgttaa

SEQ ID NO: 5056 - DNA, 462 bp, Saccharomyces pastorianus
atgtcggtcatatttttatggctgtatggcatttgcacgttatcgacattcatactttcattgggaaataaacctaaaagtacggaaaaattttatgtcttaacttgcgtcatttttgcgataatgatgatctatatgatattttgcagtatattcatgagtgtcaaatctttccaaaatattctgaaaaccgatacgatcagttttgagggtttgattactacagaagcctttagagatattgttatttcattgggttccacttactgtctgtacttgatcagctcaatcatttatttacagccatggcatatgttgacaagttttgtgcaatacattttgttaagcccttcgtatatcaatgttttgaacatctatgcattttgcaatgttcatgacttgtcatggggtacacagggtgcatggctgacccagtgggtaaaattaatactacggaagacg

SEQ ID NO: 5057 - DNA, 213 bp, Saccharomyces pastorianus
atgtttgaggtggtaatattaaaggactgtaattgcattttaaaagtcagcaatagctgttatgcgtatacagatgttccagatagggttccagagtttattcttcagagaaggcgttggttgaatggttcgtttttcgcgagtgttattccttctgtcatttttacagagtttggagcagtggccataactttggtagaaagcttcttttga

SEQ ID NO: 5058 - DNA, 1287 bp, Saccharomyces pastorianus
atggagaatggagaaaaccacagcgggatagatataactccctattgtgacaccggtgaagtgttcgaggccgacaggatacgagaagtatgggaaagggaagataaagaatggctgcaaaagaccaaaaacgatgccagtggatatgcatacccggcactgggcaaatcgccgtatattggtgagacgagtgatggcaggatggaaaagaaggttctgtgtcaagacatattttggtcatgcgacggtacctcgcttgtttctgtacataacgattttggcattaggcagtatttaataccggaggaaaacgatggcgacaacaaaaacaaagaactactgcttctactgccgttcagtagattcttcaagaaccaatccattgtttcgtgtgcagtacacccactatactcgctttatgatgaaccgtcgggcggagtggctaccgacaaaatcgcgattggaagcaagaactttcctttgcagctgtactccgtgatggacggacagtgcgttgcgaccttcgacacgacgaacgaaatgaatggagaatacgagactgcgtacagcgtgaaaatcgataccgaagcgcatatctataccggctcgcaccgaaacaaagtggccatatacgacatgaaccggcgggaagccgtgtggatgcaccgcagcagcaagaaagcgagcaagggaaggcacagcatcatctcgtgttttgaagagcagccagcgggagcggctgctcttccaagaggacccttactgtgcggtagctacgctaatgaactgttcctagtggacccccgccaccggcagccggtagcgataagccgcagtggccagaaggcggccatgggcgtcatccagatcctcactagcgtcaacgggcggtacgtgtatgtcactagacgcaacagcgataagatcagtgtctacgaccgccgggacctgcagcgcgaggtgagcctgctggcgctgcccttccgcgtccgccaagactctgccaagttcaaagcatgcgtggatgcgacacacgggctgagtatgggtactccgtggggggccgtgctgaattggggccacgacctggtggagttcggaggagtctccccgcatcagcgaagtgaagaacaggctgtagcttcccttccgccagagtcagaatggagcactggtcccgagtccatgggatttaccacgacggtggtgaagagttgtcctacagagcccggtctcttggcgctggcccacgggggcacgatctcactgggcaggctcagcggctaa

SEQ ID NO: 5059 - DNA, 120 bp, Saccharomyces pastorianus
ttgccagatgctgtaacgatcatcgaaccaaaggaagaagacccaatccttgccccatccgtcaaggactacagaccagctgaagaaactgaagctcaagctgaaccagttgaagcttag

SEQ ID NO: 5060 - DNA, 582 bp, Saccharomyces pastorianus
atggtcgctttaatctccaagaaaagaaagctagtcgctgacggtgtcttctacgctgaattaaacgaattcttcaccagagaattggctgaagaaggttactccggtgtcgaagtccgtgttactccaactaagactgaagtcatcatcagagctaccagaactcaagatgttttgggtgaaaacggtagaagaatcaacgaattgactttgttggtccaaaagagatttaagtacgctccaggtaccattgtcttatatgccgaaagagttcaagaccgtggtttgtccgctgttgctcaagctgaatccatgaaattcaaattgttgaacggtttggctatcagaagagccgcttacggtgtcgtcagatacgttatggaatccggtgctaagggttgtgaagtcgttgtttctggtaaactaagagctgccagagctaaagctatgaagttcgctgacggtttcttgatccactctggtcaaccagtcaacgactttattgatgttgctaccagacacgtcttgatgagacaaggtgttttgggtatcaaggtaagatcgacagctgatccgccataa

SEQ ID NO: 5061 - DNA, 927 bp, Saccharomyces pastorianus
atgaacttgacggtaagaatacctcaggtcagcgggctttccaaaactctactatttcccttgagtagacggtcgatacatataacgcctataaatttcaacaattcaagagggtctctatttggaagcatcaccgaaaacaagataaaggaagaaaaggagaacaaagatgaggatccgaacagcttttctaatagattggcggttgcttctgattccaccggagaggccgctgaagttgatagggactccataacgttgaagaacgataaattattacaacagcatatcatagcattgcagcaaccggagcaattagcatctgaaagcctcctttcacctttgaaaagagaaatatacaaagctaattgtgaacttaacaatgggttttacaaaaaagacacgattgtaaaactacctgattctaataagcgttataaattaaatttgacaagaaaagaaatcgaagtgctggaaccttccgtatatgttcaatcatacagaatcaaatcttcgatgaaaaaggccacccatttattaaggttattgggtgggctcgaagttatgaaggctatttcacagtgtcatttttcaaataaaaaaattgctcgcgaagtagcagaattgcttcaaaaaggaattgaagatggccagaaattgggtttgaagccagaggatttatacatctctcagctttggacaggcagtgatgggttttggcgaaagctcgttgaatttaaagcaagaacaagaattggtattataagtcacccttacattcacgtaagatgcattttgaaaacaaagagcgtcacgaagcaaagactcgcttatgaagcatccttgaaagagcagagaagggcaccatgggttcagttgggtgacaagcctatcagaggcgttacaggtggtgtatataaatggtaa

SEQ ID NO: 5062 - DNA, 249 bp, Saccharomyces pastorianus
atgactctgcttttttcgtcttcattgtctctcgtcttggaaatgaaaaatctgactaaatcatcttttgtagtgtcgaaagataaattaccaatccaaacaccatatttgctttcttctttttttttcttcgttgcagcatcatcggatgcggtttctactgtaacatctgttttggattcaccatcttgggcatctttcttaacatcaccagattttttcttttcagcgtcctctttatattcttga

SEQ ID NO: 5063 - DNA, 243 bp, Saccharomyces pastorianus
atgttgtacttcgcgttcaactcttccaaggtaatctttccccttcttaagagacgtttttgtttcttggataaaggaatagagctctccaagtcgatttcgatttcatcttcagcttttctctttttggttgggtcgagcaaagcttttttaatctgttcctcgtttttgttattggatacaatttgttcgcttgggacttcgatttctgacattttatatgaaactatgaaccactgttaa

SEQ ID NO: 5064 - DNA, 291 bp, Saccharomyces pastorianus
atgatctataatcctattcatttccaaaacaaagtcttggaagcacggagatatagtatatacagccaaaaaatgttaatcttaagtgtaaatcctttttattttgaatctttattttcaataatgcctaactcctgtcccattttaaccttatcaccaacattaaccttgaatttgaattcagttggtgcctcgaagcatagaacgacggtactgcccaattcgaagccccccatttcttcacctttgaccaaaggcataccccctaatattttacttgcattttcatag

SEQ ID NO: 5065 - DNA, 1074 bp, Saccharomyces pastorianus
atgctccatagcaaacaaatgtcgtctgcaaatcaatccaatggaacaactaacgcatctgtagaagtagtttccgaaaatggccctatgcccataaatgtgatgatgcaagaaggtgtaaaagctttgactaaaattctttctaatcagcttcaggacaggcaagctttccacaatgcccctcatgctatgcaattcgttataagaaacggtggaaaggtattatcaaatgcgcgactggaagaactcaaagatgcgcttcctaagatggattcgttgagtctagaagacgaacttgcaaaaatagataatcaaagtacgtaccatgtcaattctgcagatgataaggagactttcgaaagagaaataggacagattacaacgacaaataatactgactttataatagaccgtgatttgcaaaaaattctagatgacgatttgaaagatccagaacttcatttaaatggtgaagaagccgaaataatatttgattatgaaagccaagaactagatacaccagatggcataggggagaagatttctcaaatgatagaatccgtactgccaggaggatttggtactgaagagcagggaagattgcgagctgtaatgaatggagatgatttagacgttgaagaagaaattaacgaaactgatcgcgatattgcggatacagctggtttgcatggagacagtcaacatcctgcctcttcaaagaaacacaataaatctaagcactctaaaaaaaatgggcacgtaaggcgacatgactattatgatgaatcaagagaccataagagttgttgccctcaccatcattatgaaaatttatcgaaactgagaaactattactaccacgactttgaatacatatccaaaaccgacaaccgtactccggatttttccgttctggtaaacgaatcaaagcctatgtgtttattttgtgagtactacatggtatttggggaaccgccgcgtaatatgataaagtggtataatcgtacatttggctataaccggatgccgaacccgccaagggatgaacaagatagtaggaaaaggaatagatag

SEQ ID NO: 5066 - DNA, 855 bp, Saccharomyces pastorianus
atggtttccaattggctgttagcgagggacctctggcgaatgaacctgtccagggaatgtgtgttattgtcgagggtattcataaaaggtcacaggaagagattgaatctattgaggccacacattggttgtaacattttgttatcagacgataatctccttcatagtctatttgaaggtactccagcagcttttgaatattcagactctgtcaaaaatggtttccaattggctgttagcgagggacctctggcgaatgaacctgtccagggaatgtgtgttattgtcgagggtattcataaaatgtcacaggaagagattgaatctattgaggacacacattaccaagaacatattgtggatttgtcaggaaggctgataacatatacaagagacgctatacatgaagctttcttagattggtcgccaagaattatgtgggccatctactcatgtgatatccagacttctgttgatgtccttgggaaagtatacgcagttgtactacaaagacaaggtaaaattatatcagaagaaatgaaagaaggtactccattttttcaaatcgaggcccatgtgcctgtcgtagaggcattcggcttaagtgaagatattcgtaaaagaacatctggtgcagcacaacctcaattagtgttttctggatttgagtgtattgatttagatccgttttgggttccaacgacagaagaagagctggaggaacagggtgacacggcagataaagagaatattgctcgtaggcatatgaatgccatcagaagaagaaaaggtttattcattgaagagaaagttattgaaaacgccgaaaaacagcgtactttgaagaagaattga

SEQ ID NO: 5067 - DNA, 2829 bp, Saccharomyces pastorianus
atggttagagttgaatcagagacttacaaacgtttacaaaatgacccttcctgtataaggaatatttgcattgttgcgcatgtcgatcatggtaaaacttctctttcagactcacttctagcttcaaatggtattatatcacaaagactagccggtaagatcagatttttagatgctaggcctgatgagcaattgcgtggtatcacaatggaatcatcggctatttccctttattttagggttttgcataaacaagaaggttcggatgagcctttggtgaacgagcacttggtaaacttgatagattccccaggacatattgacttttctagtgaagttagtgcggcatccagattatgtgatggggctgtcgtattagtcgatgtcgttgagggggtgtgttcccaaacaatcactgtgctaagacaatgctggactgaaaaattaaagcctattttggttttaaataaaattgatagattaataactgagctacaacttacccctcaagaaacttatatccatttatcgaaagtcattgaacaagttaactccgttatcggttcttttttcgccaacgaaagacaactggatgatttatcttggagagaacaattagaacaaaatgaaaacgctgaatacattgagaaagatgactcaggaatttactttaaccctagcgataacaatgttatctttgcatccgctgtggatggttggggtttcaacatcggacaattggccaaattctacgaacaaaaactaggtgctaagagagaaaatctgcaaaaagttttgtggggtgacttctatatggatccaaaaacaaagaaaatcatcaatagtaagggcctaaaaggaagatccctaacacctctctttacgtccttgatcctcgaaaatatatggaagatttatcaaaatgtaatcatatcaagagattctgacatggtcgtgaaaatagcaaagactctaaatatcaagcttctaccacgtgatctaagatcaaaggatgacaagcaattattaagaacaattatgggacaatggttgcccgttagcacagcagtgttacttacagtcatcgaaaaattaccttcacctttagaatcacagactgatcgtttggatactattctggcttctgaagcagacgctgcagacatggatcccaaactgttggaagcgatgaagacgtgcgacagggaagggccagtaagtgcatatgtatctaagatgctttctattccgaaagaagaactgcctgttgaaactaatagggaagtttcgtccgatgaactgatggaaagaagcagaaaagcacgagaagaagcattgaatgctgcaaaacaagcaggtatagtagaaaacatggcgcagatggatttgaacgacaataccaaggatgatggcgatttttataaaagagcaaaggacaccgtcactactccagaaatgggagagcaaccaaaaccaaaacccttggttaacaacgatatctttcatgtcgtttcggagcctgctccggctttagatttaggctttgactatgaggaagatgatgatgctaatatccaagataatttcggcttagacttcgtaccaaccgatatagacccaaatgaccccctaagttccatgtttgaatacgaagaagaaggcacatttgcaaatgaagtcctccaagctttagaagatgtgaatattgaagaagatgatatatttgatgaaaaggaagaatcgctggtagcgttcgcaagaatatatagtggaacattaagggttggccaggaaatttcagtattgggtcctaagtatgatccaaaacgtcccgacgagcacattgagactgcagttattacacatttatatctgtttatgggtaaggaattggttcctttggatgtttgcccatcaggcaacatcgtcggtattcgtggtttagccggtaaagttttgaaaagtggtactttggtgcaaaagggtgttcaaggtgtcaatttagcgggggttaatttccactctactccaatcgttcgtgttgcaatagaaccagctaatcctgttgaaatgagtaaactggtacgtggattaaaattgttagatcaagcggacccttgtgtgcgcacatacgttgagaacacgggtgaacatattttatgtactgccggtgaattgcatttggaaagatgtttgaaggatttgacagaaagattcgcgggaatcgaaatcacacattctgaacctgcgatcccatatagagaaacattcttgtccgtttccgatatgatttcaccaaagaatgcgcaattggggaggggcgttcatcaattgctattgggtcaatataggattacgttcaaaacaatcccattgagcgataaaattacagaatttttgtctcaacatcaaaacagcattaaaaatattctgaaaacctccacctcaaatatcgaccctatcattgaaacaactggaggtgctcttttagataataactcattcttagctgcgtttgaagatgtaatatctaaggacggaaagagcggagatcttctaaaagggttcaaatcaaggttggcaggcctagggcccaacagggttggttgtaacattttgttatcagacgataatctccttggtagtctatttgaaggtactccagcagcttttgaatattcagactctgtcaaaaatggtttccaattggctgttagcgagggacctctggcgaatgaacctgtccagggaatgtgtgttattgtcgagggtattcataaaaggtcacaggaagagattgaatctattgaggccacacattggttgtaa

SEQ ID NO: 5068 - DNA, 564 bp, Saccharomyces pastorianus
atgaacttgataatagatcaacaggataacaagaaaaacaagaagacatcagggaagcgcaaaaacaatatagtcttggacgaagacgatagcaacgacggcattgaaagatactctgacaaatatataaaaaaaagaaaaataggtgtttccattgatgaccatccatataatttgaatctcttcccgaatgaactgtacaatgtgatggggatcaacaagaaaaaattattaactatctcgaagtttagcagttccgataacgttttcactggtacaggattgcaagatgaaaacattggactttccatgttggccaaattaaaggaattggctgaagatgcagacgacgtgacctccgctacgggcggtgctgcgacaaaggaaaactcagaaggtcacaaaacaggagatggtgatgatgatgatttggcagacgacgattttgaagaagatgaagacgaagaagatgatgacgattacaacgctgaaaagtatttcaataatggtgatgatgatgactatggtgaggaagaggaaccgaacgaagaagctgccttctaa

SEQ ID NO: 5069 - DNA, 129 bp, Saccharomyces pastorianus
atgagttcctatagaggcggtggtggtggtagaggcagtggtaataactatatgagcaacctgccctttgggttggttatggagatgtgggcaagatcatatcacggagttcccgactatagagatccc

SEQ ID NO: 5070 - DNA, 336 bp, Saccharomyces pastorianus
atgaagagatcagaaaatagaccgcaacagcaaaggaaaaaatttgaaggtcccaagagagaagccatcctagatctatccaagtacaaagactccaagatacgtgttaaactaatgggtggtaaactagttataggtgtcctgaaaggctatgatcaattgatgaatttggtcctagacgaaaccgtagaatacatgtccagtgctgacgatgaaagcaacaccgaactggtgtctaaaaatgcgaggaacctagggttgactgttataagaggtaccatcctcgtgtctttaagctccgccgaaggctctgatgtactatatatgcaaaactaa

SEQ ID NO: 5071 - DNA, 675 bp, Saccharomyces pastorianus
atggatccgttgcactgtgatttctcaatgctgagaatcagtgatcatgacttgtcacaagacagcactagagagccgtcactcttaaatttggcggaccgcacgattcaggaagaggggttcagcgatgacgaagacgaagatgatgggaactataatgacgacgacgaggaatatggagatgatgacgacattaatagactaattagtttggatgatagggagttccatctcggggctgcggacttcaatgaatacgggactgcattccataccaaaaaccccccgctatttaaaggtattaatcatgatgaatcaaggggtggattgtcgaaaaatacgcacagaatgtgcttggataacgctttgaaatgggctcctgccacggagcctatttcaagaaagagatatatcaaagattcgctgcgatgcattaagccattaacagaggaccacccatggacaggcaaggtcattttcaaaccagcgccaccaccggcttacgaaacgaataatctaccaataaaaatccacggccacgaaaatagtaaggatttaaggcatatgaaaaaccattatctaaagccttatctggtggggtcatgcgggctcttgaaaaccggtgctaaggtcttccactcttacgacaaaactgacgaagttacgattttatga

SEQ ID NO: 5072 - DNA, 1143 bp, Saccharomyces pastorianus
atgtccttcactgtctgcggaatgacggcggatcgtgacagtgggttgaagctttcgcagacggcatcttctggctctatgagtgaagagtttgtctgttctagcaacaccagcacctccattttagattatccgcttccgaaggtggcatttaaccatattgacagtataacagacgctgacacgggccttgtcaatgcaatgttggagccacgggccacggttgatgtcggtgctaccgacaataacgtgctgtattgcatagacccgtatcctgtggagcctccgtgctacgacttggccaatccgtcaaaagttatcagatatcccatctatgagcattgtcgtccgtgccccacttcagtgaaaccgccaagctatacaccgtcggtggaacactacactgtggtatccatgaaaatggagaagctctcgccctttgaaggcgctaactccaggctatggaacaactttatcttgcaactgaactccacccaaataaacttctactccatcgacgacgagttgaccaaggatataaagaattaccgaggcggtgatatgtttggccaccaccacttcaagggcggcagcgaccgtcaccatgcaacccggtctttattgactgcgttcacaggaaaacccacttaccaattcgataaatacgataaagaaagaatatgcaggatagttgctcaagacaaatcaaggtttctatcaaacgagtacctctgcagcagctactccctgcaatgcgcaaaagtcggcctacccatagattactcatcaagagacttcgttctgagaatgcgctgtgaaggactgcagttcctgctgcagttctcctatgtggacgaactgataaactgggcaatgtatttgaacatggggatatcgctctccttggatttggagctacgggagttgcccacttatagaagcgttcccagaagaagacacgcaagagcaagaatacctgccaacaaggacaaacaccacaataagaacaagaacaagaacaagaagaggagtaattcccactctcacgccccacctttgagaaaattcaacacctcctccgtttgccagttggtgctgttgccaacgaacgtccaaaaaacaaatcaaggtcaagaagcctaa

SEQ ID NO: 5073 - DNA, 1110 bp, Saccharomyces pastorianus
atgtttgccgccgttactggcgccctaatgttgggtggtgcttgcgaaagagcaagactattccccatgatggtgttcttattcttatggatgactgtcgtgtactgtccaattgcttgctgggtttggaacgcagaaggctggctggtcaagttgggcagtttggactatgctggtgggttatgtgttcatttgacttccggccatggtgggttggtctacgccttgattttgggtagacgtaacgaccctgtaacacgcaaggggatgcccaagtacaagccacattccgtgacctccgtggttctgggaaccgtgtttttatggttcggttggatgttcttcaacggtggctccgcagggaatgcctccatacgagcatggtactctataatgtccaccaacttggccgccgcttgcggtgggttgacctggatggtgatcgattatttcagatctggtagaaagtggaccaccgtcggtctatgttcaggtatcattgccggtctagtcggtatcactccagccgctgggtttgtaccaatctggtctgccgttgttattggtgtggtcactggtgcaggttgtaatctcgctgttgacttaaagggactactaggtattgatgatggtttggactgttactctatccatggtgtgggtgcttgtattggctgtgtgctaactggtatctttgctgctgattacgtcaatgccactgcgggttcctacatctctcccatcgccggtggctggatcaaccaacactacaaacaagtcggttatcaattggctggtatgtgcgctgcgctagcatggacagttactgtcacatctatcttgctagtgactatgaacgccatcccatttttgaaactaagattaagcgccgacgaagaagaattaggtactgatgctgctcaaatcggtgaattcacctacgaggaatccaccgcttacattccagaaccaatcagatcaagaacttctgcccaaacgccacctcctcatgaaaccatcgatgacaaaatcgttgctaatacagacgcagaaaagaattccacgccttctgatgtttcttctaccaagaacaccgaccatatagtataa

SEQ ID NO: 5074 - DNA, 3024 bp, Saccharomyces pastorianus
atgaagctttttccctttgacaagaggtgttttatttacaatgagatgatgacaaaactatctcaagataatttaccaataaaagtaagcttcaataaaactgaaagagaagccaagagcattttgaaggctttgagtatagataccatagccaaggaatctagaaggtttgctaaactgatttccacgaatccgttggcttcattggtgcctgcagttaaacagattgagaattatgataaagtctcagagcttgtcgtctacactacaaagtatttcaacgaatttgcatatgatgtattgcaatatgtactgttactacgtttaacttatagcagacctgctgttcaatttgacggtgtcaatcaagccatgtgggtacaacgattatcaatattcattgccggtttagccaaaaattgtcctaatatggacatctcaaacataatcacttacattttgaaaactttgcataatggaaatatcatagccgtttccatcttaaaggagttaatcattactgtcggtggtatcagggatctaaatgaagtcaacgtgaagcagctgttgatgttaaattcagggaaaccattgaaacagtatgcaagacatttgatttatgactttagagatgacaattccgatattgcatcaaaactaacctcatttttcaccgaccaaaacgctatctctgaaattattcttttgttatattctctgaatttaaaggcgaatacccaggactctcactacaagatcttgtccacaagatgtgatgaaatgaacacattgttatggtcgtttattgaattgatcaagcactgtttaaaagcagaagcattcgaagaaaacgttttgccatttgtagaattgacgaatcggttccatctatcgacaccatgggtttttcacatttggagagactatttagataaccaaataaacgaaaacgaaaatttttctattgagcaattggttgaaggggcagagtttgatgatgtcgatttaacaaagatttcaaaagatcttttcactactttttggagactttcgttgtatgatattcattttgataaatcattatacgatgaacgcaagaacactctctctgggaaaaatactgaccaaatgtcaaacagaaaaaaacactcagtccagaatcaaattaaagatgtcttagttaccggaatatctcatcaaagagcctataagaaaaccgcagaactcgtgtccgaaaagtcaaatatctggaacaaagattgtgaggacaatcaaatcaaagtcttcatacagaattgcgtggtcccaagagttttgttttctccttctgatgcacttttctcttcatatttcattttcatggccttcaatgcagaaaatttgatgtcaattctaaacacctttatctcctccaatattctaaaaacactgctgttctgctgtactagttcagaagcaggtaacttgggtctcttttttactgatgttttgaaaaaactagaagaaatgagaataaatggcgatttagacgaacaagcttctaggaagttatacgaatggcactcaattattacagaacaaattattgatctcttatccgaaaaaaactatatgtcaattagaaatggtattgaattcatgaagcacgttactagtgtcttcccaatactaaaaacacatattcagttggtttacacaaccttagaggaaaacttggtaaatgaagaaagagaggatattaaattaccaagtagtgcattaataggtcatttgaaggcgcgcttaaagaaagctttagaattggatgaattctgcagcttaactgaagaggaagcagctcaaaagaaaatctatgaagccgaattggaagaaattaagtgttatgagacagcttaccaaaatgaacaaaagcagttggctttgagaaagcaactagagcttaacaaatcgcaacgacttcaaaacgattcctccaaaagtgccaccagtaatagtacggaacttggtatcaacgacaaatggagctattcgcataatgagcccgcaattccaacaaagccttctagcagccaatggtcctattccaaagttacgaggcatttggatgatataaatcactacctggctacaaaccatttacaaaaggcaatctccttggtagaaaatgatagtgaaacttggaatttgaaaaaattgtcgaaacaaaatatgccaatttttgatttcagaaatttaactttagaaatatttgaaagatatttcagatctttgattcaaaaccctcagaatccggactttgctgaaaagattgaggcgctcaagaggcacatcaagaacatatcgcgtgagccatatactggcgtggccaactcccgctctgagacttttggtcccgaatataccaaaaggtcaagtaggtatggcgggagtaccggagccaaagatacatataataatgctaactataaaacttcaagcagtgatcgttctggcttgaaaaatagcaagccaagtaccagttatccacacaaaagatcggaattgcccaccagacctagcaaaggcaaagtttataatgacagaagcagaccagctagacaagctggtccggacagaggcgagagctttgatcagcaaagagatactcgttcacgtgaagactataagaaaactaactcacaacgtcctcaactaaggtttccggaaaagccatcacaaggaagtaatgataacaacaagaacacatcctaccaacaaacgccatcctacaagcgtgaaatgccttcagagaatgatgaaaagcccaataaaaggttcaagaaggatgatggtaacagaagcaaatttcagagacaagactatagaagtacaagagatagcggtagcaacttcagtgcaaataacagtagtagcaatcgtagacccaatgaaacccaaagatacaacacaaacagaaagagcaatacacaggctcttcctcaaggccccaagggaggtaataatgttagtagatatcaacgttaa

SEQ ID NO: 5075 - DNA, 1719 bp, Saccharomyces pastorianus
atgacaacacagacgcttctttcaagactggatgctctttcccggcaggtcatatctccaggtttactgaaccaggcaactattctaacggaggaaacaataacgaactggtctgaacgatcaaaagctctatgttcggactttattgcgctggaatcgaatgacgaaaaggaacattggctgaagattttatttatcgaattgtttgatttcataaatcaaggcgatgaaggttcccctctcaggctctccgatattgcactgtttatagaagagttggtgaacggtgacagaaaagggtcgcaggcttccctagtgggcaaaatgctcattgctgtttcgagttccgagcccaatataaaggacacgaacaccatatcattgtgtaagctgataccgtccctacatgaagagctgtttaaatttagttggatatcctcgaagttattaaataaggaacaaactactttactgagacatttgttgaaaaaatcaaaatatgaagtaaaaaaatataaccttttggtggaaaattcagtaggttacgctcaattggtagctttattgttattggcgtattacgatccagacaattctcttaaagttcatgcatatttggaagagatgtatcatattatggggaaatattctttagattccattcgatctttagatgtaatcctaaacgtttcctgtcagtttattactgaagagtaccaattttttatcgagtttttgcagaaatcggatttttggccctctaaccatgtggccgataattcgaattactctaccttaaatgtaggtggtaacatgattgcggctaacattatctcattcaatttatcccaatataaggaacaggttgataaggaaaatcaccagaagtatatggacatgtgttgcattttaataaacacagggtttatcaatttctattccatttgggataacgtaaagcctgatatggaatctctacaaaagtatacggaggatttagaaaccgaattagaagcagaatccactaaaggcatagaaaaccctttggctatggcagcagctttatcgactgaagatgagaataatgaggatactgcgcttgtgaaggatgacgataaggacaaggacaaagcctcagaaacaagtaacgaagcagacttgaaagacaagcagaaaaacgatactttatcatttggtaaaataaatttattagagcgtttattaattcatagttgtattactcctgttgtccacatactaaaggaacatccaaaaatactatatgttaatgaatccatatcaaaatattttggcagaatatttgaatatcttttagatcctttatacacgtcaaagacatctcgcgatgagtcaaacaacatggcgtctgctttaatggtaactcggatagataatggcatcctagctcataagccaagattgatccacaaatacaaaacacatgatccatttgaatcattcgaattgaatacaaagtatgtattttactactctgaatggaatagtgcccttgtcccttttgcatccattgatgacctatttgaaaagtcacatacatttttgtctatcattgggccctatttagccaacacccccacgctattgagcaagatctcacgtattggtgtagctgatattcagaaaaatcaagcactgagtttttgcaaagtacagttgacaagtgggtggattttgtaa

SEQ ID NO: 5076 - DNA, 1215 bp, Saccharomyces pastorianus
atgcgtggtggtgaaatcaaggaaactccatttttgttgcagacgtttgctgtattggaaaaaagacttgattttgccttatttagagctatgtttgcttcatccgtcaggcaagctcgtcaattcattttacatggtaatgttcgtgtaaatggtacaaaaatgaagcatccgaattatacattaaagcctggggatatgtttagtgtcaaaccagacaaagttcttgaggccctaggtgccaaaaaaccaagtttcgaagaaggactggcggttgataagactcaaattactttatggaataaatatgtcaaggaggcaaagacaaactcaaaagaagtttgggacaaaaagctgaaaaagctcgaaactatgtcagattctaatccaaaaaagcttcaattccaagaatttttaaaacaatacaacaaaaatttggagtcacagcaatacaatgctttgaaggaatgtacacaggaaggtatgttgagcaagctgttgaatgttgagaaagaaatgggtaagctagataacgaaccgttgtcgatagatgagctcaagaaaggccttcctgaaatccagaatcctcagttattgcaaagtgtccatagcgcttatcaagactttttcaactcaggcgaattgaaaagagaaaacctttttaaattgaaatcggaggagatatcttcatgggcagcagactttctaagtcttaacgaagccacaaagaaagaactatctgatggagccaaatcttcgattagatctggtaagaagacgttatcagaatgtgccaagttatggactaaagatataactgctcattttaaaactagaatgagcgatacctcgaatggatctatcgcgttcgaccccaaatgggccaaagacttgaagtatcatgatccacttaagacttctgaattggaaagcgacgagcaaaaggcacgtgggttaataaatttgccatggcaaaggaatcatgtttatggtagacaagacgccaaaaaaccatttttcacaccatggaagccaagaccgtttttatcaccttttgccattttaccacatcacttagaaatatctttcaagacatgtcatgctgtatatttgagagaccctgttgcgagaccaggccaatctgaagtcatttcgccatttgatgtccctgttcacgaacgtgcgtatatgtactacttaagaaacggtaaatga

SEQ ID NO: 5077 - DNA, 396 bp, Saccharomyces pastorianus
atgccaagaaaggccaatttgctgaaatctctggcaagaggacgagtacgtacttctttcaataagtacaatctattcaacttatacaaaaagggcagtgtggacttaaagtctaaatctttatatcaacagaaatggacagcaaagcaggaaacccgagcctatcatggtgaacatttgacagaaaagagatggcaaaatgctttcaaacctaagttagattcagtagctcagttggatgcttcatgcgtggtggtgaaatcaaggaaactccatttttgttgcagacgtttgctgtattggaaaaaagacttgattttgccttatttagagctatgtttgcttcatccgtcaggcaagctcgtcaattcattttacatggtaatgttcgtgtaa

SEQ ID NO: 5078 - DNA, 84 bp, Saccharomyces pastorianus
atgttcatcaatgatatcatttacgacataaccacatatttggatatttacgctttatcgattaagcatccaaaggagacttag

SEQ ID NO: 5079 - DNA, 978 bp, Saccharomyces pastorianus
atggcaccaaatttggttacattattagggttctgcttcattatcttcaatgtattaacaactttttactatgatccatacctgaatcaagagtccccccgttggacctatttctcctacgctattggtttgttcttatatcaaacattcgatgcttgtgatggtttacacgcacgccgtacgggtcagcaaggccctctcggtgaattgtttgaccattgcattgactcgatcaatacgactttatcgatgattcctgtttgttcggtcactggtatggggtatacttacatgactgtttttacacaatttacgatattgtgcagcttttatttaagcacatgggaggagtatcacactcataaattgtacttagccgaattctgtgggccagtggaaggcattatcactttgtgcatatctttcatctcggttgggattttcggaccccaggttgtgtggcacactaaagtggcagagttttcatgggaaagccatgtttttgaaattgaaactattcatttaatgtacgcattttgcacaggtgctttaatctttaatatcgctacagcacatggaaacgtcgtaaagtactatgaatctcaagatgaaaaatcttcagctccaggtaaggctgaagaaaaggttagagaagcgctcaagggtcttttaccattctttgcatacttcttttcgattttcactttggttctgattcagccagccttcatttctctgcccttagttttatcgactggcctttcgattgcgttcgtagttggccgcatgattgttgctcatttaactaagcaacccttcccaatggtgaactttccaatgtttatcccaaccattcaattgttcgcgtacgcatttatggtttatgttttagattaccagaaaggtcaaatagcctttgctctgggttggatggcgttttggtttaacccttgctattcacggtatgttcatcaatga

SEQ ID NO: 5080 - DNA, 120 bp, Saccharomyces pastorianus
atgttaaaggaagtcgtcgatcagtacaagaacttcaaagacagactatatatctttagagcagacttaaaaaatgatggcgacgaagaactatttttgttgagcaaatcgttacggtaa

SEQ ID NO: 5081 - DNA, 2040 bp, Saccharomyces pastorianus
atggaactagagcccagtctttatggaataatagaggcattggctcctcaattactgtcgcagacgaacttaaaggcatttgtatccgatgttgtcagtttgctacgatcccctaccaaatcagtaagtcaattgagtcctctgattgattttcataaactacaatcatcagactcgactgaggcaacaattatgtggcacaagattgaaaaatttctcgatgctttgtttgggatccaaaatacagatgatatggtaaagtacctctctgttttccaatctttgctcccttcacaaggcagagcgagagccacgcaaacttccaatgggctgaatacggagaacttggccaaccatgatcatttattaagtcccgtccgagcgccaagtatatacacagaagcttcttttgaaaatatggatagattttcagaaaggaggtctatgatctcttcacctaatcgttatgttccctctttgacttataactcagttactttaagacaactatcagatccctattatgttaacactatacccgaggaagatattcagaaattcgtgtcgtatactctactggccaccacgtctgcgctatttccgttcgatcgcgagcaaatacagattccatctaagataccgaattttgaaagtggccttttacatttaatttttgaggcaggtttaatatatcataatttaggctctaaagtagagaaatttagaatgtcaaatatctctccaatgaaaaaagcattaatcattgacatctcagaagagctgcgaaattacacagcgtttgtaaacaatttggtctcttcagggacagtggtgtcattgaaatcattatatcgtgaaatatatgaaaatataataaggcttcgaatatactgtagatttatggaacacttcgaggaattaagtggggacacctttttaattgagttaaacatcttcaagtctcatggagatcttaccataagaaatatagcagccaatctgttcgattcaatgattgctctttactacgagtatctaatgaattggctgaccaagggtctactgcgggccacctacggagaattttttattgtcgaaaacactgaaataagcggtgatgctgattttatttaccatatccccatagaactcaatcaagaaagagttccaaatttcataccgaaaaagtcagcatataaaatatttatgattggtaaatcatacattttcctagaaaaatactgtaaggagatccaatggacaaacgaattctccaaaaagtatcatgttttgtaccaaagcaattcttataagggaatatctactggattttttgacattataaatgaccagtactctgaaattgttaattacactaaccatgtcctaaatcaaaagtttcattataaagacgtggtgtttgcattaaaagatattctctttatgggtaaatccgattttatggatatgttgatagaaaaggctagcgatattctaataacaccgtcggattcattgccaaactataaactaacaagactcttacaagaagctgtccagctttcttccctaaggcacttgatgaataactcttctaatggttcggtcattgatggattagatgcgagagtgcttgatctaggacatggatcggtaggttgggatgtttttactttggactacatactacatcctccattaagtttagtgttaaacgtgaaccgtccttttggtagaaaagagtatctaagaattttcaattttttatggcgatttaaaaaaaatgattacttctatcaaaaggaaatgttaaagagtaataacataattagatcgttcaagaaaatcagaggttataatcccctcatccgtgacattatcaacaaactttctagaattagtatattaaggacacaattacaacagttcaactttaaaatggaatcgtattacttgaactgtattatagacgaaaattttaaaaagatgaccagaaaattgaactacacagaaaaaaaggatcaaaatcatttgatttaa

SEQ ID NO: 5082 - DNA, 912 bp, Saccharomyces pastorianus
atggccttgtttgacgatttgaaagcccggttgggtgaaaaggcgttcatcgtcactccggatgcccactggatagacacttttgagttgaagcgcaacagaggtaccgatgcgtctaacgggtatgacgaagaattacctgaagaggaacaagaattttctgacgacgaaaaggaagccctcttcaagaaaatgaaaaaacagcaacagcagcaacagagaaagaaaagggacaaccgcaagcagcccaatgatttcgacactacgaaagtgaagaaggcccgtcaaccaaggccaacaaatctgcctaaattggtgccaccaatgggcatgaatagtaatgggagcaaaggtgctgcgctgcaacatgggtacaaatcgagaaatgctcgtgaaaatactaagcatgatggcaatgcggcacctagccaaaaccgcccggctcagatgccagtgagacagcaatcaccaccaccaccacaacaacaacaacaagttcctgtaaataactacccatatctaccacagccaaacggtatgccatatcctccctacccccctttcccacaaccatccaacttccaatacccagctccacctttcggccaagtgccaccggcccaattccccaacgcagggccatataacaacgtgccacctgcgtacaacaatcttccacttccaattcaagctccgtttatgcaaatgcctcagggccaaccgccacatccatatggtgcgccttccatgggtcaaatgcagaacccgatgtatatgcagccaccacctcaaatgccacctcaagggaatggcaacttccaacaggtgatggaactgcaccaaatacttttgcagcaacagcaacagcaacagcaacagcaacacgagcatcaacaggagccacgtaattag

SEQ ID NO: 5083 - DNA, 297 bp, Saccharomyces pastorianus
atgtctttgttcaacgtattacatccgctattgaaggggtccaatagcttcaaaccaagattgaaccagtttttatttaacaatgtttccgcaatcacaataagaactctaatgaaaacccacaaaggtacagcaaagaggtggaggcgtaccggcaatactttcaaaagaggcatagctggtagaaaacatggtaatataggctggtcccatagatccttgaaagccttgagcggaaggaaaacagccaattcatcttatttaaaacatctaaaacgtttactaccttaccattga

SEQ ID NO: 5084 - DNA, 195 bp, Saccharomyces pastorianus
atgatgacagtgataataatgtatatgcaattgtgctatggttgtctaattttattgaacacaagcattaaggataaaaatttagtctggcccagagtcaatactatgagtagtttagtgaatccaactagtgaagataaggagctaaatgatatactggatcaattcgaaattacttccgatgtcgaagagtga

SEQ ID NO: 5085 - DNA, 1362 bp, Saccharomyces pastorianus
  modified_base (1271)..(1271): a, c, g, t, unknown, or other
atggagtgtcagagatgtcccgtaacagccaaaaccctagcgactgttttgtcgaggaaggaaaagttttgcgatgagtgcttcattaagttcgttagtactaagcaaagaaagcaaatgatgaaagatgaatttttcagaaacttgttcaaggtcgtatatccgctcgaaaaagaaggttctgttggaaaaatattgttgcccttgtcactttctgactcaggatccttagttatgctagatatagtccatgatttgttattggagcagaacaaacagcacaacaatcacacgggtttcactgtcgatatacttaccatatcaaccgaggacaatcttcctgttattaaagagcaaatgaaattactgatcaaggaaaaaatgctagaactgaatgaaatatccgacatatataaagttcacttcattgatataaatgaatttttcaatagcacatcgaacgtatcgaatttgatcatcgacgatgaaaattttgaaatttttgctaaatccaggtcggtgggtaatgaggataagttatctttgaaggaaatattaagcgaatattgtttaaacaactcatctagaactgacctaacgtcgattatgaaaacccaattaatcaaacattttgcatttgaaaatggcaacgatgctattttgtggggccactccatgacaaagctatctgaggtgatcatttctcttgtggtgaaaggtaaaggttctcaaatagccactttcttagactctgaatcttttgacacattggacaataagccatgtaattataaaaacttatatccaatgaaagatctactatcggttgaaatcgaaagtttcctgcaaattaaaaacatgaccaaattcctcatcaacgttgaagaaactaactccaaacccaactgtttagtttcgaagaaaccaacatcggcgatcaatcaacaaaaactaatcaagaacatgacaatcaatgaaattactaccaaatatttccaagatattcaaaatgattattcgaatataatatcaacggttttaagaaccgcagataaactagcagagcctaaacctagtacaacaaagacatcgcaatgtcaaatatgccaatctaaaatctatactaacccatcgaattggctggatagaattacggtcactacaccttatcctagagagaccaccgaggaagaacatttattcaagcagtggcaagattcgaaattaggaacatctcacactcattatgttgaattggttaacgaaataanaagggactctataaatagtgatgatgacagtgataataatgtatatgcaattgtgctatggttgtctaattttattgaacacaagcattaa

SEQ ID NO: 5086 - DNA, 1302 bp, Saccharomyces pastorianus
atgacttacggcggcagagatcaacaatataacaagactaacttcaattccagaggtggtgacttccgcggtgaaagaagctccgacagaaactcctacaatgacagaccacaaggtggaaactttcgtgggggtttcaacggtggtcgctccaactacaaccaacctcaagagttggtcagaccaaactgggatgtagaattacaaaacctgccaactttcgaaaagaacttttacgttgaacatgaaacagtccgtgacaggtctgatgaagaaattgctcaattcagaaaggaaaacgaaatgaccatttccggtcacgacatcccaaagccaatcactactttcgacgaagctggtttcccagattatgtcttgagtgaagttaaggctgaaggtttcgctaagccaactggtattcaatgtcaaggttggccaatggctttatctggtagagatatggttggtattgctgccactggttccggtaagactctatcttactgtttgcctggtattgttcatatcaacgctcaaccattgttggctccaggtgatggtccaatcgttttggttttgtctccaacaagagaattagctgttcaaattcaaacagaatgttctaaatttggtcaaagttccagaattagaaacacctgtgtttacggtggtgttcctaaaagtcaacaaatcagagatctatcccgtggttctgaaattgtcattgccactccaggtagattgatcgatatgttggaaattggtaagactaacttgaaaagagttacctacctggttcttgacgaagctgatagaatgttggatatgggttttgaacctcaaatcagaaagattgttgaccaaattagacctgatagacaaactctaatgtggtctgcaacttggccaaaggaagttaagcaattggctgctgactacttaaacgacccaattcaagttcaagttggttctctagaattagccgcttctcacactattactcaattagttgaagttgtttccgagttcgaaaagagagaccgtttgaacaaacatttggaagccgcttctcaagacgacgaatacaagactctaatctttgcttccacaaagagaatgtgtgacgatatcaccaagtatttgagagaagacggatggccagctttggctatacacggtgacaaagaccaaagagaacgtgattgggttttgcaagaattcagaaacggtggatcacctatcatggttgccacagatgtggctgccagaggtattggtatgttaatttttcattctttttga

SEQ ID NO: 5087 - DNA, 369 bp, Saccharomyces pastorianus
atgccaggtaacattgaagattatgttcacagaattggtagaactggtagagcaggtgctactggtactgctgtttctttcttcacagaagaaaacaaaggtttaggtagcaagttgatttccatcatgaaagaagctaaccaaatcattccacccgaattattgaagtacgacagaagatcttacggtggtcacccaagatacggtggtggccgtggtggccgtggtggttacggtggtggccgtagaggcggttatggtggtgccgtggtggttacggtggtggccgtggcggttacggtggtaacagaggccgttcaaactattgaggctaaacatctcactttgcactcctccgtctacaattaa

SEQ ID NO: 5088 - DNA, 342 bp, Saccharomyces pastorianus
atgtcggcgtcagatccggcttcaaaggcattcataaatgtccaattcatttcttctccgttagttagaaaagatgtattaccattcatcgtaattctccataccctcttttcaaatggcagattttcaccttctgctttcaacacctcaaatttgtcaatagcgcaacttccgtttcttataaaggtacctttatcatcaatgggctctttagcactggagaatttcaataaattcataccaagagctgatttagtggctgcatgtgtaacaatcataatcgtcttgatttctggaaatcttttttctaccctttcgatgaaaatgggccagaacttatga

SEQ ID NO: 5089 - DNA, 675 bp, Saccharomyces pastorianus
atgcctccatcaataagcaaaaggataaaaactttgtcggtaagcaggccagtaatatatggtaataccgctaagaagatgggtagtgttaaaccaccaaatgcccccgctgaacacactcatttgtggacaatctttgtaagaggtccacagaatgaagatatatcttacattatcaagaaggtcgtttttaaactccatgacacctatccaaaccctttaagatctatagaggcgcctccgtttgaactgactgaaaccggttggggtgaatttgatataaacatcaagatatattttgtggaggaagccaacgagaaattgttgaacttttaccatcgattacgacttcatccatatgctaatcccgctccaagtaccgacaatgaaaacgagaataacccaccaggccgtaacgctaaagacgcagaagttagttccgttttttttgatgaaattgtgtttaatgaaccaaatgaagaattttttaaaattctaatgagccgaccaggaaatgtcttaccttcaaacaagaccgatgattgtgtgtactccaaacaattggaacaggaagaaatcgacaagatagatattggcatagaaaaggttgatagggaaataaatgaattgaagcaaaagctagaaagcctagtaaaagaagaggctactcaataa

SEQ ID NO: 5090 - DNA, 1776 bp, Saccharomyces pastorianus
atgcttaaagacccatctcctaagtacaacccgttcaaggctcccaagatgtccagtaggcaatggccggacaaccaaatcacgaaggctccccgttggttgtcgaccgatttaagagacggtaaccagtcgctaccggaccccatgtcagttgagcagaagaaggaatacttccacaagctggtcaacatagggttcaaagaaattgaagtttccttcccatctgcatcgcagacggatttcgacttcactaggtacgccgtggagaacgctccagacgatgttagcattcaatgtcttgttcaatccagagagcatttgattaagagaactgtcgaggcattgtccggtgctaagagggccaccatacatacctatttggctacaagcgacatgttccgcgaaatcgtgttcaacatgtccagagaggaagccatttccaaagccgttgaggccaccaaactggtcaggaaactaactaaggatgacccttcacaacaagctacccgttggacatatgaattctcccctgaatgtttcagtgatactcctggtgaatttgccgttgagatttgtgaagctgtgaagaatgcgtgggaacccactgaggagaacccaattattttcaacctgcctgccaccgtggaagtagcctcaccaaacatttatgctgaccaaattgaatacttctctactcatatcactgaacgtgaaaaagtttgcatatccacacactgtcacaacgaccgtggttgcggtgttgcagccacagaactgggaattcttgccggtgctgatcgtgtagaaggttgtctctttggtaatggtgaacgtaccggtaacgtcgatttagtcactgtggccatgaacatgtacactcacggtgtcccccctaagttggatttctcagacttaacttccgtcctagacgtggttgaacgttgtaacaagatccctgtgtctcaaagagctccatacggtggtgacctggttgtctgtgctttctccggctcccaccaagatgccatcaagaagggtttcaatgtgcaaaacaagaagcgtgctcgaggtgagacgcaatggagaatcccttacctaccactagatccaaaggatattggccgtgattacgaagctgtcatcagagtcaactcccaatccggtaaaggtggtgccgcttgggtcatcttaagatccctaggcttagatctcccaagaaacatgcaaatcgaattctccagcaccgttcaagacagtgccgattccttgggcagagaactgaaatcagacgaaatatccaagttgttcaaagaagcttacaattacaacgatgaacagtaccaatctatcagcttagtcaactacaatgtagagaagttcggtaccgaacgcagagtgtttacaggtcaagtcaaaatcgatgaccaaatcgtcgatatcgaaggtacaggtaacggtccaatctcttctctagtcgatgctctatccaacttgttgaatgtaaggttcgctgtggcaaactacacggaacattccctagggtctggttccgccacccaagccgcttcctacatccacttatcctacagacgcaatgcagacaatgaaaaagcttacaaatggggtgtcggtgtctcagaagatgtcggcgactcttcagtaagagctatctttgctaccatcaacaacattattcactccggtgacgtgtctattccctctgtggctgacgctaaggcggagaataaaagtgctgcagcatcgggctcagcatag

SEQ ID NO: 5091 - DNA, 1230 bp, Saccharomyces pastorianus
atgtcgtccatagaccatggtgctttcacaaacgtagatatcacgtcaagtgagaataatgctgccagcggcaacggcgtagatccgctatctcacctattacgtagaacaactcatacaccgagccgctcttctcctttgagtaatgttgtgtccgctcaaaacacgtccaaacagcgacaaccggacggtaaaatcaacaatagcgacggttcaagtacggtccctaatataaccgttcctgactactccattattcctacatccgtgttggtaacgctgttgccaagagttaatgtccccaagggtgcgtacaactccttggtggcagcaggatttgataatgaccaaattgacgctattgccgctataatggcttaccatcatcaaaaaaaaacaagggaaaatagcagcagcaatcttaacaataatggtaacactagtaccaaccaagaggcgccccttctgaaaaacataaacgaacttttaaatgtcctgataccgtcttcctctaccgacatggccgcaacctcttcctcttcctcttcatcgtcgtcctcctcttcctcttccaatggacacggtgtagtagcagaagcctcttttctgagctctattttggaactaggtcttaaccatccgaaaagtaataatattcacaacgacagacagtctacgcgaaatgaacgtaagaattcaagggaacggaacaataataacgactacagtaataatgataatgcagcttataattcaagtcttaaccacagcaatgaaatcaccaagataagatctgaaccaacgttaaatgcaagcgctcctactcgcaaggacaacgccttgaaaagatcccattcaggtgatttgaacgaaagaaaatcgtacattaaagccaaatattctgatgacgaggacgacgaatacggtgacgccgacctccgtaaacataaaaagagacaacagatcaagaaagagctagaggatgacgatgaagacttgctaatacaatccaacaaatcacatcagaggaagaagttaaaggaaaaggaattagagtcatcaatacacgagttaagtgaaattgcagcatctttacaaaaacgaattcacaccttagaaacagaaaacaaattattaaagaatttggtgctaagtagtggtgaaactgaaggtatcaaaaaagctgaaagcctgaagaagcaaatccttgaacaagttcaaaaagaataa

SEQ ID NO: 5092 - DNA, 624 bp, Saccharomyces pastorianus
atgaaacaggagcatccccgtgaaggcgactcgtacaacgccgagtttataaacctcttcgggaaggacaccgcagcgcacggcagcagcagcaacaacaccgctagcagcaacggcatgggaagctctcacccgctggaccagtttgtagcaacagcctcgtcgtcgtcgtcgctggcggttggaaccgccaatacacagcccttgcttggcgatgttggcgccaggggcagtagcaacttgtatgaccatgcggtcacgccggaaatactgctggaacagctggcttacgtcgacaatttcataccttccctcgacaacgagttctctaatgtcgactggaacgtcaacaccactcacaacaacataaacagcaatggcacgagcactttcaacaccataaatgcgaatcctttcgatttagacgagcagctcgccatcgagttgagtgcatttgctgatgattcgtttatcttcccggatgaagataagcccagcaacaacaacaacaataacaacaataacaacaataacaacaataacaataataatgacaacaccgctgatgaagtgccgcatgcgaaccttttaagcaataacaggcagagaaccctcattttttga

SEQ ID NO: 5093 - DNA, 1002 bp, Saccharomyces pastorianus
atgaaacgtcgtgagttttgcccgctttcaagagatatttctatacgcgttttaaatactattctgtcagacaatgatccagaagaggcattacaagaagtttatgaatacttggaagacatcaggaataaagtggaggccaacaatatcagaattgataaatataaaattaatacgaggctttcaaaggatcccaaggcttatcctggtggtaaaaatatgcctgcagttcaagtagctctaagaatgcgcaaatctggtagagtggttaaagcaggttctgtcatcacgtttgttattactaaacaagacgaatcaggagatgatgaaaacacacccgcactctctgtggctgaacgtgcttatgcgttgaatgaagtgatgattaagggcaataatttaataccggacccacaatattatcttgagaaacagatttttgcacctgtagaaagattgctggaaagaattgacagttttaatgttgtacgtttaagtgaagcacttggtctagacagcaagaagtacatgaaaagagaaggtgtcaataataatggggatgatattaataacctgcaacctttggaaacaacgatcacagatgttgaaaggtttaaagataccgtaatactagaattaacctgtccatcatgcgatattcagtttccatttggtggcattgtatcctcgaatcattatcgaatgtcgtataatggtatccaatgtaagcactgtgaacagtcctttacccttcttcaattaactagtcagatagagcattctattagggcacacatttcattatattatgccggatggttacagtgtgatgacactacatgcggtattgttacaagacaactttctgtttttggtaaacgttgcttaaatgaaggctgcacaggtgtcatgagatacaagtatacagataagcagctgtacaatcaacttttatacttcgattccttattcaattgtgaaaagaataaaagcaagaattga

SEQ ID NO: 5094 - DNA, 828 bp, Saccharomyces pastorianus
atgaccatggctttacaagaaaatattaccaattgtatgatttcagcagaagtatcttatagaattcaattattgtcattaaccaaacaattgacgaatctagctggtaacgcttgggctcaaactttaggcggtacaagggccggtagaaatgagtatattttgttgcatgagttctcaagaaacggcttcattgtaccggataaagaaggtagcagggatagggctcagagacaaaagcaaaacgatgaaaactcggacgctccaactaatcctaagaaggcgaagtatcaaggtggtttggtttttgagcctgagaaaggtctgcataagaattacgtcttggttatggatttcaattctttgtatccatctatcattcaagagttcaacatttgttttaccaccgtggatagaaataaagaagatatcaacgagttacccaatgtacctccttcagaggtgagccaaggtgtcctaccaaggttattagccaacttagttgatcgccgtcgtgaagttaagaaggtgatgaaaactgaaactgaccctcataaacgagttcaatgtgatattcgtcagcaagctcttaagctgactgctaactctatgtacggttgtttgggttacgttaatagtagattttacgccaagccgcttgccatgttggtcacaaataagggtcgtgagattttaatgaatacaagacaactagcagaaagtatgaatcttctggttgtttatggtgatacagactctgttatgatagatactgggtgtgataattatgcagacgcgattaaattggtttgggcttcaaaaagttag

SEQ ID NO: 5095 - DNA, 2235 bp, Saccharomyces pastorianus
atgtcgtctaaaagtgagaaactagaaaaattgaggaagttacaagctgctagaaatggtacatctgtcgatgattacgaagacgccgaagcagatggtgatagattgtatgacgaggtcgatgaaaaggagtatatgacaagaaaacgtcaggaattgctgcatgacgattttgttgtagacgacgatggagtgggttacgtggaccgaggtgtcgaagaagattggagagaaaatggcaacgaattcagtgacgaagacgatgagcacagcggcaatcacaccagcaaagacgttaaaaggaagaaaaccgcaaaaaaagcgaaagaccaccctattacggatatgctacgaacccaacattctaagtcgacactactggcgcacgccaagaaatctcagaagaaaaatatctccattgatgaatttgatgacattcttggagaattcgaatccggtaaagtagaaaaaccaagaatctcattcccctccaaattaagggctaatttgaattcttcaccatccattgcattcaaatcatcggtgaaaagagttaatgacctcgacaattcaaatgatgatgccactagcgctaaaaaggttaaaattgatccagacacgagcactgaaaaatatttagatatcgattcttcacctctgaaatcgcaaagcagaaaacagcgttacaccaacgatgtacaagatttattggatgatgtggagaattctcccgtaacaaataataagaaacaagaaaaatcagaagatttgctagttggtagtccaccgtctacgcaaagcttggctgatgatgatgacagtgatgatgatattatactaaagagaaggaccatgagaagcgtcacggcaaccaaacgtgttaatttagattcaagaagcaatccttcaacttcgccattcgtcacggcaccagggacaccgattggtgttaatgctccaactccaagcagaccaccacgagttaacatagatactaccacgctttctgttagggtcaagaagaaagatgtagtagatcctgaaactgatactttccagatgttttggttagatttctgcgaagttaataatactctaattctatttggtaaagtgaagctcaaggatgacaaatgcgtatcggccatggttcaagttaatggtctatgcagagaattatttttcctgccaagagagggtaaaacagcggctgatgtccatgaggaaatcgttcctttattgatggataaatacggattagataatattcgtgccaaacctcaaaaaatgaaatactcctttgagcttcatgacatcccgcctgaaagtgagtatctaaaagttttactaccataccagacaccaaagtctagtcgagacactattccaccagacttatcaagtgacacattttatcatgtcttcggtgggaacgctaatatatttgagagttttgtcgttcagaacaaaattatgggaccatgttggctagagataaagggagcagatttcaacgcagttcataatgcctctcattgtgcgattgaagtttccgtagataaaccgcaaaatatcattcccaacacaacgaagacgatgccggatttgaggtgtctttctttatcggttcaaacattaatgaatccaaaagaaaataagcaagaaattgtcgcgataactttgtcatcttacagaaacatctcgttagattcacccattccagagaatattaaaccagatgacgtgtgtactttggtaaggccgcctcaatcaacaagttttccactaggattagcagcattggcaaagcagaaactgcctggtcaagttaggttatttaacaatgaaaaggcaatgctgtcttgtttctgtgccatgctaaaaatagaagaccccgatgttattattggtcatcgtttacagactgtatatctggatgttttagcccatagaatgcacgaccttaacattccaacgttcagttctattggtcgtcgtctaagaagaacttggccggaaaaatttggcagaggcaattcgagcatgaatcatttcttcatcagcgacatctgctctggtagattaatatgtgatatcgccaatgaaatgggtcaatcattgacacctaaatgtcagagttgggatctttcagaaatgtatcaagtgacatgtgaaaaggaacataaagcattggatatcaattatcaaaatcctcaataccacaaacgatgttaa

SEQ ID NO: 5096 - DNA, 189 bp, Saccharomyces pastorianus
atggttttcccaaccgaaattgtcggaaagagagttagatatttggtcggtggtaacaagatccaaaaggtcttattggactccaaggacgttcaacaaattgactacaaattggaatctttccaagctgtttacaacaagttgactggtaagcaaattgtctttgaaattccaagtcagactaactaa

SEQ ID NO: 5097 - DNA, 153 bp, Saccharomyces pastorianus
atgtcttctgtccaatccaaaattttgtcccaagctccaagtgagttggaattacaagtcgccaaggccttcattgatctagaaggctcttccccagaattaaaggctgaattgagaccattgcaaatcaaatctatcagagaagtatgttaa

SEQ ID NO: 5098 - DNA, 441 bp, Saccharomyces pastorianus
atgcaacaattcgtccctggctccttcttcattaacagactagttctcgtagctacttcgaagacatcatcaacaccttccccagtcaatgcactacactccatgtattttttggcaccaatggctctcgccacttgttttgcatcttcggcgggaaccatttcgtctacagcattttctttgatatgggcctcctgcctcaaatccttcttcaaacccacaagaacgatcggcgcgtcggggcaatatcgtaacgcctcgtcagcccattttgtccttgcgttgattagggactcagagttatccacggcaaacccaatcaatattatgtctgctttcgagtatgaaaatggacgaagacgttcatattcttcttgccccgctgtatcccaaagagttaaggacacttttattccgtctaccctgcagtcggtaacataa

SEQ ID NO: 5099 - DNA, 564 bp, Saccharomyces pastorianus
atggcagcacaattttccgtatatcctgtagatactttgaaattcagaatgcaatgtgctcccttggacaccaaactaaagggaaacaaactgttatttcagacggcgaaggatatgttccgggaaggtgggttcagattattctacagaggtgttacagttggtatcgtgggtatattcccatatgctgcattagatttggggactttttcagccttgaaaaaatggtatatcgctaagcaggcgaaggcattaaacttaccgcaagaccaggtcacattgagcaatttggttgtactaccgatgggtgcatttagcgggactgtgggggcttccgttgtgtatccaattaaccttttgagaacaagattgcaagcgcaaggaacatacgctcatccgtatgtatataacggctttagagacgtactagcgaagacacttgaaagggaaggttatcaaggcttattcaaagggttggttcccactctagcgaaagtctgcccggcggtctccatcagctacttatgttacgaaaacctgaaaaaattcatgaagctagaataa

SEQ ID NO: 5100 - DNA, 186 bp, Saccharomyces pastorianus
atgtgctcccttggacaccaaactaaagggaaacaaactgttatttcagacggcgaaggatatgttccgggaaggtgggttcagattattctacagaggtgttacagttggtatcgtgggtatattcccatatgctgcattagatttggggactttttcagccttgaaaaaatggtatatcgctaa

SEQ ID NO: 5101 - DNA, 1068 bp, Saccharomyces pastorianus
atgctgttgaaaaattgtgagactgacaagcagcgagatatacggtatgcgtgtttgttcaaggaactagatgtgaaaggaaatggtcaagtcactctggataatctagtaaatgctttcgagaagaacgaccatcccctgaagggtaatgatgaggccattcggatgctatttactgcaatggatgttaacaaggattcggttgttgactggagtgacttcaagaagtacgcctccaaggctgaatctcaaatttggaatggttttcaaaggatagatttagaccatgacggtaggattggtatcaacgaaattaataggtacttgtctgatttggataaacagaacatatgcaataatgaacccagcaaagaaattacaagtgaaaagataaacaaattctcgaggttcttcaaatgggcattcttaaagaagaaaaacaatattgaggcacaggattctgcttcccgcaacgatggtaacgataacgatcgtccgaagcaaccaactagttcagatccatacgttacatatgatcaatggagagatttcttattgctgataccgagaaagcaaggttctagacttcataccgcgtattcttatttttatttatttaatgaagatgttgacctatcttcagaaggtgatgttactctgattaatgatttcattcgtggatttggattttttattgctggtggtatatcaggtgtcatttcaaggacatgtaccgcaccatttgatagactaaaagtatttcttattgcaagaacagatctatcttcgactttattaaattcaaagacaaatttacttgccaaaaaccccaacgctgacataaataagatatcatcgcccttggcgaaggcagttagaagcctgtataaacagggcggaataaaagcattttacgttggaaatggtttgaacgtcatcaaggtgttccccgaaagctcaattaagtttggttcttttgaaatcaccaaaaaaataatgaccaggcttgaaggctgccacgacacgaaagatctttcaagttctccacttatattgctggtggtttag

SEQ ID NO: 5102 - DNA, 2676 bp, Saccharomyces pastorianus
atgacccgaattaaccagataaacgacatagatgttcaccgaattacatctggacaggttatcaccgatttaacaacagccgtgaaagagctcgttgataatagtatagatgccaatgcaagccagattgaaattacattcaaggactatggcctcgaatctattgaatgttcagataatggcgatggtatagatccttcaaactatgaatttttagctttaaaacattacacttcaaaaatttcaaaatttaaagacgtcgctaaagtggagacattaggatttagaggagaagcattatcctccttatgcgccatagcaaacttgagcgtcgtaacaacgaacctgccaccaagggcagacagattggaatacaatatggctggccatgtctcatcaaagacaacaacgtcaagaaacaaggggaccacaatacaggtttcacacttatttcataacctgcctgttaggcaaaaagaatttgccagaactttcaaaagacagttcaccaagtgcctcaccgttttgcaaggttatgcagttatcaattctggcatcaaactctccgtttggaatgtaacatcaaagggtaaaaaaaatctaatcctatcaacaatgagaaattcaagcatgaaaaaaaacatctcttctgtctttggtgcaaatggtgtgcgaggactcgaagaggttgatttagcccttgatttaaaccctttcaagcaaggagtgcttaggaaatacactgacgatcctgatttcttagatctcgactataagatacaagttaaaggctatatatcgcaaaattcttttggatgtggaagaaattctaaagacagacaattcgtttatgtcaacaaaaggccagtggagtaccatacctttttgaaatgttgcaatgaagtttacagaacatttaataacgttcaatttccagttatttttttgaacttagaattgccgactaacttggttgatgtgaatgtcactccagataaaagagtaatactactacataatgaacaagtggtcattgatgtgttcaaggaaaatctgattaattactacaatgggcaggagttggcccttcccaaaagaatgtgttcccaaccagaacagcaaactccgaaaagacatagaattgaattcaggacccacgttgctaatgatgaaaacatgacgcacaaaaccattaatcacagctatggtgatactggaaacaaatatagtgagtctactcttacatgccgcgataatgcacttgaagatgctgatcccttcacaaatactgctgataaaagcaaagatacgcaactaacctctataatggactacaagcatgaaattctgaacggtgaccccggttcagagtgtgacgcttctgttgaatcaccgcttgccttgaatgaggacaactcaagtacaccggctaagaaatcatcaagcgccagtgcgaaatttgacgatgttagtagtataaacctaggggaattttccaatcccgagcttcaacatttggttaacacaactaaaacatctaactctgaaaacgttattgaagagcgtgtttacttcgaaattgatggtgaaaagtttcaagaaaaagcaacgctgtcacaagataatggattggttttcgtggatgatggagctcaccgacagccagataaatgctgccatcatgaaagacagggtagtgctgactcggaacaagatgacgagaacgattcagcatatgcacagattgaacctgtcgaaatcaatgttagaacgcaattgagaagctcaagatcgctcaattcaaaatctaatcgctcaatatccaaagataactaccggtcattaagtgatggactatcacacagaaggctccaagacgaaataatagagtttaattcaagcacaaaaggacttagggaaatgataaaaaacgggagaatgatgagtagcattataaataaaagaagatcacaatcacacaaaaacttgattaaaaaggaaagagaactggagaactttgaagaaggggagaagtacttgacactaactgtttccaaagaagacttcaagaagatggagatagtcggacagtttaatttgggattcattatagtaaccagaaaaataggagataagtatgacctgtttattgttgaccagcatgcaagtgatgaaaagtataattttgaaacactacaaactgtaacagttttcaggtcacaaaaacttattataccacagccagtagatttaagtgttattgatgaacttacagttctagacaatcttcctgtttttgagaagaatgggtttaaactgaaaattgatgaagaggaagagtttggctcgaggataaaactattaagtttacctacgtccaaacaaacactttttgatttggatgacttcaatgaactaatacatttggtcaaggaagacggtggtctgagaagagacagcatcaggtgctccaagattcgatcgatgtttgctatgcgggcatgtagaagtagcataatgataggtaagccactgaacaggaagacaatgtctaaagttgtccataatctcagtgggttagacaagccatggaattgtccccacgggcgtcctacaatgagacatttgatggagttgcgtgattggaactcattctcgaaagactataaaatatga

SEQ ID NO: 5103 - DNA, 1089 bp, Saccharomyces pastorianus
atggctaccagcatggctccccatgaaaacaagcattccaagtatgaccgagcgactttccagaagacgtacagctccatgaaaacgctgtctctgaaccacttgacggccaaacagcacatgctgatggccctgtgcagggacatatcccttctaccgccattgacgtacatcttcacttcgctgcgaaaggcctggagagtctctatgcgcaccagcatcaaactgtacgagccgcaatcgctgagggatgccttcacctatttctggcaaaagcttaacagcgcttatgacaactactcatcgtctgatggatcccgccaagaagctgcgagcgacaacagcaaggactcgctcttgttatctgcattgactaccgccagggcgtccgaataccttctctgttcgctttggtgtgtggtgtctctatacctctcgtatgccattctcgactctttaatggtccgctggatcgttaaatactccaccgtggccgccattttaagaatgttctctatgtctttgatcatagtcaccttagagcttctattgctctcgtctttatctccagagctcgactattttctgcatacctggatacttattagttgtgtgctaacggccgtgtacatttggcaaagctatctaacttctgatctaaaatattttagaaacagggaaggtgatgtacaagaggataccagcgcccgagaagagtcagacgacgacgacggcgacgtcgacgccgatgaagactcacatgtcgtggcagcggatgaagacgcaatcgacgtccttccctacgacgctctttcagatgatagtgacggtcggcttttgccagtcaacaggccctcgagttcgcattcgcaaagtcccagaagatccaagaaatcctctaagaaagcattcaagttcaccaccaagagaactatagatttatataaaatcaccgtgctctgtgtcgtccccgtgggactggctagttttatcacaatgctcggtttacttcgaaacctattcatccaacgactggatgtagagcaattagaaagaatactgcatgaaatgcatccctcctccgcataa

SEQ ID NO: 5104 - DNA, 1092 bp, Saccharomyces pastorianus
atgagcatgaactctatagataatgagacttccaaaagcaccagtccaaattttgaaaatgcgggaagtagaaagtcctcccttcctcagaaggagtctctgtttggaaggccaagatcttataaaaacgatcaaaatgggcaattatcgctttctaaggcatcttccagaaaggggaagaataaaatcttcttcagtagtgaagatgaagattccgattgggacagtgtctcagatgattcagaattttatgcagacgaagatgacgaggattatgacgactataatgaggaagaagcggaccaatactatagaagacaatgggacaaacttttattcgcgaaaaaccaacaaaaccttgactcaagaaaatcatctgtttcctcgactaacaccattaactcgaacacatctcacgatccggtacgaagaagtctactgagtggactattccttagtgaagcaaataacggtagcggcagcaacaaccacaataatgcgcataacgaatttaattctagaaacgcttcaccgataccccagctctctcatagtaataccggcagccagccacaacagaatctagcgaatgctaatggcatgaaacaacaaaagccctctttgaaaacaagcaatgtgacggcccttgcatcgttatctccgcaacagggaactaacattgggcggttgccgatggaaattcaaaaggactttaagagtaatagtggatccaatcacccgtatgaatctaatgctcccctaacggcgcagaccatcttacccaccgccttatctacacacatgttcttgccaaataatattcaccaacaacgaatggcgatggccactggaatgaatcagcggcatcgcttcccgagacgtgagtcgatggatattccatccaaaaataggaacacaggatttttaaagacaagaatggaaatttctgaagaggagaagatggtacgtaccatatcaaggttcggcaacacaaatgctgcagacaataatgagaacggtgatgacggtgccgcgaagcagagtaaacaagaaacgctggaggccaccgaagatagtacagcacgaatatga

SEQ ID NO: 5105 - DNA, 522 bp, Saccharomyces pastorianus
atgtcacgagagacattcgacataccgaacataggtagcaacaagttcttaaaagtcacacctaatttatttacaccagaacgattaaatctatttgatgatgtcgacctttatcttacgttaataaaggcatccaagtgtgttgaacaaggagaaagactgcacaatataagttggagaatcttgaataaagctcttttgaaggaacataatatcaatcgacccaaaaagagagatggtgtgaaaaacatttactatgtcctaaacccaaacaacaagcagcaaataaaacctaaatctgttgctgtaaaacagtcaccattaaaaaatgccagtgtacctcccacaacagtaaagcagaacgttttggctcgacccatgacatcaccagccattgcacagggtgcccacgatagatacgtggataactccaatattacaaacaacgatgtgaaaaatgatttcatttcaagcagacaatactcaaagacctgcaggcatgcaagcttgcactgccgtcgt

SEQ ID NO: 5106 - DNA, 555 bp, Saccharomyces pastorianus
atgggtcgtttggcctccactattgccaagcaactattgaacggtcaaaagattgttgtcgtcagaactgaagctttgaacatttctggtgaatttttcagaaacaagttaaagtaccacgactacttgagaaaggctactcgtttcaacaagacccgtggtccattccatttcagagctccatctagaattctttacaaggctatccgtggtatggtttcccacaagaccgctcgtggtaaggctgccatggaacgtttaaaggtctttgaaggtatcccacctccatacgacaagaagaagagagttgttgttcctcaagctttgagagttttgagattgaagccaggtagaaagttcacgactttggctaaattatcctcttctgttggttggaaatacgaagacgttgttgccaaattagaagacaagagaaaggtttcatccgctgaatactacgctaagaagagagctttcgccaagaaggtctccgctgcctctgctgctgcttctgaatccgacgttgctaagcaattagcttctttcggttactaa

SEQ ID NO: 5107 - DNA, 1515 bp, Saccharomyces pastorianus
  modified_base (19)..(19): a, c, g, t, unknown, or other
  modified_base (47)..(47): a, c, g, t, unknown, or other
atggaaagctcaatttcgngacggatatgtcaatgttcagggacttngtctaaactagatcactcgcaaccaataaccgccgaaacgggtgcaccatacacgttgctaagttacggtcagaaatgggggatggtagcagtcctaaccatgtgcggattttggtcttcattggggtctccgatctattatcctgccttaagacaattagagaaggagttcaatgtggatgaaaacatgatcaacataaccgtggttgtgtatttaatgtttcaaggtatagcacccacggtttgcggtgggctagcagattgttatggtcgtagacctatcattctaggtggtatgttagtgtatgttgtggcatccattgggctagcacgtgctccatcatacggtgttatcatgtttttgagatgtgtccagagtattggtatttctcccacaatcgctattagttccggagttgtcggggatttcactttaaagcatgaacgaggtacttttgtcggtgccacatctgggttcgtcttacttggccaatgctttggtagtcttatcggtgccgtcctgaccgcaaggtgggattggagatctattttttggtttttgaccattggttgtggcacatgttttattattgcattccttattctaccggaaacaaaaaggaccatcgcaggtaatctttccgtcagacctaaaaggtttattaacagagccccaattttccttttgggccctgtaaagagaagattcaggtatgataatccggattatgagacactggatcccactattcccaaactagatttgacctctgccatgaaaattcttgcgctaccagaaattattttgtctttgttcccatcagggctgctatttgccatgtggactttgatgctgtcgtctatttcatcggggttatcagtggggccatataactatcgtttggtgattattggtgtctgttatctacctggtggtattggtgggttattgggttcctttttcacagggagagtcattgacatgtactttaagagaaagttgaagaaatttgaagaagacaaggctaacggctcaattccacaagatgctgaaatcaacatgttcagggtccgtttagtatgtcttctaccccaaaatttcttagctgttatagcataccttttgttcggctggagtatagacaagggatggagaatcgagtccgttttaatcacttcatttgtttgttcatactgtgccatgagtacactatcaacatcaactacgttattggtggatttatatccaaccaaatcatctacagccagtagttgtttcaactttgttagatgtagtttgagtaccatcttcatggggtgtttcgccaaaatgaaagcctcaatgactgtgggtggtaccttcacattcttatgtgcgttggtgttttgctttaacttcttgatgttcattccaatgaaatacggtatgaaatggagagatgacagattgctgaaacgtcaaacataa

SEQ ID NO: 5108 - DNA, 393 bp, Saccharomyces pastorianus
atggatttaacaggaaagtttttatacgatggtcttgtagtggcaactacattacatttaccaacagtggtaccgaagttagccgagaaggttcatggttcaaggcctattgtatgttatggccaattcaaagagaccttgttggaactggctcatactttatactctgatttgaggtttttagcgccatccattttggaggtcagatgtagaccataccaaagcataagaggaaagttacatcccttaatgaccatgaaaggtggtggtggataccttatgtggtgtcacaaggttatacctgcccctgaaccgatctcagaagctacggtggaagtcgagtctaccagtgctgctattggagaacacgatgctaaaaagcaaaaagtatag

SEQ ID NO: 5109 - DNA, 612 bp, Saccharomyces pastorianus
atggaggatgaatacaaagatattgtagaactagagggcttacttttagagcatgacccaaacttcactgaagaagatactctagaggctcagtatgactggagaaattctatacttcatctgtttttgagaggtcctaggcctcacgatagtgagaatattcatgaacagcaccaaatgcatttgaatgtggaacgtataagggtacctgaagtcgttttccaaccaacattgggtggacaagatcaagcaggtatctgtgaactttcagaaacgattttactgaaaaaatttggctctcaaccaggcaaattaagttccacttctctagacatggtgaataatgtatttataacaggtggcaactccaaagttcctggattaagagaacgtatcgtaagagagttcactgaatttcttcccgttggtaccaatttctcagtgaacatgtcttctgatccttcattagatgcctggaaaggaatggcagctttggcacaggacaaagaggagtacaagaaaacagtaataagtaagaaagaatatgaggagtatggtcctgactacataaaagaacataaactagggaatatgaagtatttcgaagactag

SEQ ID NO: 5110 - DNA, 1464 bp, Saccharomyces pastorianus
atgtccagcagagacgcttctttgactcctctcaaagcaatagtcatagacgaccctccgttgagacaggcaccagaaccatttgatgatgattcagcatacgatccacgcctacccattgctattgattttgggtccagcaaattaagagctgggtttgtcaatcaagctgcccccacccatatctttcctaatgttctaaccaaattcagagatagaaaattaaacaaaaatttcacttttgttggtaatgacactttgttagaccaagctgttcgttcgcaatctagaagtccatttgatggacccttcgtgactaattggaatttcaccgaggaaatcatggattacaccttccatcatttaggcgtatcgccaaataatggaatttgtaatcctatattgcttaccgagaggatggccaccgttcaatcacaaagagcgaattggtaccagctcatgtttgaaacatacaacgttccaggcgttacttttggaatagacagtttgtatggtttttataaccaaaatacaagcggaaacaagacaggcttagtcattgattgtggccatgaggatactaatgtaattcccgtagtcgatggtacaggtgtcttaacagacgcaaagaggatcaactggggtggccgtcaggcagtcgactatttaagcgatctaatggctctgaaatatccatactttccaacaaagctatcttatttacagtacgagacgatgtaccaagactattgtcgcgtttcaccaaattatgatgaggatatcaaaaacatccttactttagacagtctagacacaaacgatgtggtggtggaagcgcctttcacggagattcttcagcctcaaaagacagaggaagaattgcgaattcaagccgaaaagagaagagaaactgggaaacgtttacaagaacaggcacgattgaaaagaatggaaaaattagttcaaaagcaagaagaatttgactatttttcgaaggtaagggatcagctaattgacgaacctaaaaagaaaatactgtcggtcctacaaaacgctggttttgatgacgaacgtgatttcaaaaagtatcttcatggtttagaacaatctttgaaaaaggcccaaatggttgaagcagaagatgatagccacttagaggaaatgaatgacgataaaacaattcagaaatttgaactacttgatatcgcagacgaaaacctgactgaagaccaaataaaggaaaaaagaaaacaaagatttttgaaggccagtcaggatgctagacataaagctagggaggaaaaagaaagggtcgctaaagaagaagaggagaaaagactaaaagagcagcaatggcgtcaaacggatctaaatggttggataaaggacaaaagattgaagcttaataaactaataaagagaagaaaagaaaagttaaagttacgtgacgaagatgacaggaca

SEQ ID NO: 5111 - DNA, 429 bp, Saccharomyces pastorianus
atggctcacgaaggtgttgttggtggtgctgaatttggctacgacatcagcgccggctccatctcccgttacgccatggctctaagttacttcgccaaggactactccttgggcgctactttgaacaacgaccaaataaccactgttgatttcttccaaaacgtcaacgccttcctacaagtcggtgccaaagccaccatgaaccgcaagctgcctaacgccaatgtcaacatcgaattcgccaccagatacttgcctgacgcctcttcccaagtcaaggccaaggtctccgactccggtatcgttactttggcttacaagcaattgttgagaccaggtgttactttgggtgttggttcctctttcgatgctttgaagttgtctgaaccagtccacaagctaggttggtctttatccttcgatgcttga

SEQ ID NO: 5112 - DNA, 282 bp, Saccharomyces pastorianus
atgtcccccccagtctacagcgatatctccagaaatatcaacgatctattaaacaaggacttctaccatgccaccccagcagcatttgacgtacaaaccacaacttccaacggcatcaagtttgcattgaaggccaaacagccggtcaaggacggtccattgtccactgatgtggaggccaagctgaacgataagcaaactggtttgggtttgacccaaggctggtctaacacaaacaacttgaagacaaagttggagcttgctgacttgaccccgggttaa

SEQ ID NO: 5113 - DNA, 558 bp, Saccharomyces pastorianus
atgcatacggcttatttgcaaggcaagaaaatactagtccattgccaatgtggcgtatcaagatcagcatcattaattgtagcgtacatcatgcgatattatggcctgaccctgaatgatgcctacaacaagctgaaaatggtcgctaaagacataagccccaacatgggactcatctttcaactcatggaatggggggagatgttgtctaaaaactcgttagaggaagaaggagaggctattcgtatgcaacccgaagaagacgaaaccagcaacaacgaagcttcctcttccaccgcgaagtcctactcttctgtttcatacagaagtttccccatgctaatgaacccatcgtcgtcgccaaatgacagctccatcaactcttcggaggtcacgccaagaacccccgccactttgacgggagcaagaaccacgctggtcgaagaacaggatgaagaagacaagaagaggttgtctcaaacagcagacgcactagacccctccgttgatagcgagtctctatccaccgcatcggaacagatgatgctgctcccatag

SEQ ID NO: 5114 - DNA, 645 bp, Saccharomyces pastorianus
atgcaacttcattcaaataaacagcgtttggacagtaaaagtgacatagatttccggtcgaaatcaccgcgttctttgcaaaatagaaataccaaaaatttatctttagacatagcaacacttcatccgttaatggaattctcactgcaaagccagaatgatccaggttcagtaaagttcccatcgccgacgcctttgaatctgtccatgaagcccaaaaccaccatattggagaaattcccaacaaaaataagctcaagaccaataccaccaccgctacccttaaggcggagcgaggcttccatatacacactaccagcatctttgaaaagccggacagtttctccaaacttgtatacaaggacatctatggcgacatccatcgggaaacattcattatcatcgccggcatcatcattctcagaaaaaccccatctaaatagagttcattcgctatccgtgaagaccaaagatttgagattaaagggaattagagggcgatctcaaaccatttccggattagaagcctctaccccgacctctagcatatacgaaactgccctaggtaacagtgacctgaacaaattctctaatcaaaaaaacatgcaaacgacattgattttcccgaagaggagccagatttga

SEQ ID NO: 5115 - DNA, 1197 bp, Saccharomyces pastorianus
atgtcgaacgatttggaagactttgattctttactggaaaccaatttcgatgctaaacaatttggaaatgatttattgaaagttaccaataacatcaacactactactttagatctgaatacatctttaaaaaagctgaaatacgatcttcacgagatagattctagaatagaccaattggttaataacaaaccctcggagataatagacttgatgtatagaaatgaaaacgttaatttcactatagtcgatgaactgaaaccaagcttagaatatttaaacatgtcatatgacaggttaaaaacccaagttctagatccttatgaaagagctaggaaagtccaattggcactgagtaaagtttatcaaacatcctttcttcttcgaggtgctttggtgtacattcatttatcgaataaaataagtacgacgtccaatgtagcccaattaaatataccaacagctgtcaatctagcttcattgcactaccaattacaaataactctgaatgaaaatgaaaatttgaaatctttacagaaagtcaaattgctagatcaaaacattattactcccaacaagagagagctggtaacattcctgtccttacaagtgtcaaaagagtgtttgaactctattaagatcaaaacaaataaagaaacgatatctcagctagtccgttcattatttctactttcacctcaagaattcgtggctactataaataaaattattctttccaacgtcacaacaagctcgcagattctatcgagaactataaactctatcagagggttttccgaaacattcaaagaagttgtagagaaaagctataatatttacatcttagagacgatattgcgaaatatcaaaattgataataccaccacagccgcaaaacctacagctactaataagtcgcacctaggccatcttttatcagaatatactctaatgggaaataccaaatcaggctctggcacaccaagagatctgttttggaataaggttgcgtcatcttttagaaaagactttgaaatctcggtcaacagaggtggccctgtaggtaagtcactgctcaaaaataaagatttcatcattgatactataaggcagcatatgggtaaatcctgcgataatagcgattatcaaagctatttgaatttgatgttaaactcggtatctattatcgcaaaatga

SEQ ID NO: 5116 - DNA, 471 bp, Saccharomyces pastorianus
atgaaagtttcattgaaggagcctgaggaagaaatgattgaccaagaaaggcctaaagaatattactttgcaaactattctgaggttcaaaggcaacaatttctacagagcgctatagattacgatacgataatacaagaaaatgcaaagattcaagaggatgatctacgagtacttcataaatggtcgtactgccaaggtaaaataatgaatttgcacgaacacaatttggagatcgcatcacagcagcaaagggatctgaaaatcaaaaaaagaaggccaggccagaaacaacgtgtagctaaaaaattagctcttgaaagaaccaaagagcgtgatgccaaagctcgtgagataaagaaactgttaaagaaaaagtttcataagcgtggtggaaagaagaataagaaaaaagcaaccttaaacccactagttaacgctggcagcacccataaggttagggcaggatga

SEQ ID NO: 5117 - DNA, 1965 bp, Saccharomyces pastorianus
atgtcttaccagtggaacagcgcaagagcctccctagacctcaggaaaccacatcagcaattggcaggtgtgaagggctcggacccttccactttggcttatcagcagcagcagcagcagcagcaacaacatagccagaagatgcctctgtcgctgccttcatcgcttgcacagcggaactcgataccctaccccatcgatgccatcacttcagatcccaccatccaggcgcatttgagtgcgtatgaccaggatcgacagtactcggtgggcgttgctgcggcaagcagcaacataatatacccttccagctctaataatattccctcctctcaaactaataataacaacaatgaggccaccaacatgggctcattgaccgatacgtctattttgcctgtagcaagaacttcgctccaaactcaccagaaactgtataattctaaccaaagtgaccccagatcacctctggtgatactgatacccacttccgcgcaacccaccgagatactggctgctcggttctctgcctggagaagtgtcatccgcgccattgtggtgtatctgtctgaaactgcttccatacaggacgaaatcattaggcagcaactaagactgtcccatgctgtgcagttccctttctttagtattgaaaaccaataccaaccaacctccaatgaggacaagtccatgcagaagttttttctgccattgggcagtgggtccatacaggatttgcccacgatgttggccaaatatcatgagaatttggcctctttagcattgaagagttctaaagagttgaccagtgaaatcattccaagactagaagacttgagaagagacttattggttaagatcaaggaaataaagtctttgcaatcggacttcaaaaactcttgtagtaaagagttgcaacaaaccaaatatttgatgaaggccttcaatgaatccctgaaagactgtaaattaggcagcccgaagaatgaccctttcttaataaagttacaattggaaaaacaaattaaaagacagttggtcgaagaaaactatttacatgaggcatttgacaatttacaaaattcaggggctcagttggagaatgtcgttgtgatggaaatacaaaacgggttaaccagctatgcaagaatcattgggaaggaagctcaactggtatttgactctgtcatctccaaactagactccacactcttaaacaaaaacccaaatcttgaatgggataacttcattcagaaaaatacttccaatttcgtaccgccaaatttgccaatgaggaaattcaaagagatttcatacagcaaccaacacgacccattcactgtagaaatcaaatctggattcctagagaagagatcaaaattcttaaaatcatactcgcgtgggttttacgttctcaccccaagctttttacatgagttcaaaaccccagataggcacaagttttccgtcccgctaatgtctataccactagttgagtgcaccgtaactgaacattccaaaaaggcgaaatcagactccgaccaaggcaataacaaattcatactccggacgaattccaacgggttgatacacagaggccataactgggtattcaaagtggattcttatggcgatatgatggaatggtttgaaaatatcaaagccttatcaagcctacccaactacgatgacaaatgcaaatttgttaataaagttacgaaacaactcaaaactaaaaccaatgatgacgagagctctatgcaaaacataacggatgaccaacacacgagacctgatgacgtgagtagtagtttccccatgaactccatccctagattagacaatgtgacaatcacgaacaccacctcatccataccggagaccaatgattcacaattacaaaacagaattcctgaattttgtatcgaaaatgtagattctctaaggaaaatctaccccaagtaa

SEQ ID NO: 5118 - DNA, 636 bp, Saccharomyces pastorianus
atgctggctcgatcaagaagctggttgccatctggtttatttatatacaaatgcatatatccatatataggtagtgtgggtggacattccctgtgtagcacgccaatggaacatcccaactcaaagaagagctttggccagttgctcgcaaaaaagaccgcagtggtagatgcaaacaagacacaggtcaatatggactcagggactgccaaccggctgcggaagctgctacacagaaggaaaccccagtctccagtagtccaatctgcggtccaatgccgaataccaggccattacgtggatagccgagccacaccggccgctgggctcatacgcaatagcgtagcatcgccagcggtatccacgcttcacatcaacgaacggtacatccggtacgatatcaacaccaagcccttggtagtcgtgttggccatctccctcgtgtttctcggctgtctggtggtcctcaaggacatcatcctgcaatcctctcaaagcatcgtgagcgtggtcaaatggaagatcatcggggcacccttcgcaggttcccctcaaacaggcctgcttgtggggctcttgggcactttgttctcaccactttccgttgtctcatcgtggctgtccttcatcttttga

SEQ ID NO: 5119 - DNA, 1074 bp, Saccharomyces pastorianus
atggaatctccaaacatgacgtttgccactcctactttgattgcccacgacaagtccaatattgatgttatcgctcatgaactggctcattcttggtccggtaacctggtaaccaattgctcttggaaccatttttggttaaatgaaggctggaccgtttacctggaaagaaggattatcggtgccattcatggtgaacctacaagacattttagcgctcttattggttggagcgacttggaaaactccatcgagtccatgaagaaccctgaaagattttccactctggtgcaagatttgaacgatgacaccgatcctgacgacgccttctctactgttccatacgagaagggatttaacctattgttttatttagaaaatgttttgggtgggaaggctgaatttgatccgttcatcaaacactacttcaagaagtttgccaagaagtctctagatactttccagtttttggatactttatacgaattctttcctgaaaagaagggaattttggatgctgtcgactgggaaacttggctatataaaccaggcatgccaccaaagcctcacttcattaccgcattagctgacaatgtctaccaattggctgacaaatggattcaaatggcccaaaagttgaaaacttcagaagaattccggtccgaattcagcgccatcgacattaaagatttcaactcgaaccaattggtcttgtttttggaaactttgacacaaaatggtcactccacggaaaagccaaaggatttcgattgggccaaggcccctgtggcatccaaggttctgttagacatctaccaggacaagattgttaaatcccaaaacgctgaagtcgttttcaagatgtataaattccaaatctttgccaggctacaacaaacctacaaaaatttggctgactggttgggcaccgtgggcagaatgaagtttgttcgtcctggttacagactattaaactccgtagaccgtccgttggctcttgccactttcgacaaatttaaggacacgtaccatccaatctgtaaggcccttgtaaaacaggatctaggcctatga

SEQ ID NO: 5120 - DNA, 108 bp, Saccharomyces pastorianus
atgctcctattccccctccgcactcgtcattgtatcactatacaccagtgctcacttcggttgcaaggaaatcttactagaaaaaccagtattatcctacccacctaa

SEQ ID NO: 5121 - DNA, 477 bp, Saccharomyces pastorianus
atggaaaatatcaaaagcgagttccattcgtttcagtctaaactagcctctcttcgcacccctcaagaatttttcaatatcaagaaagtctccaaacctcaaaatttcggggaagtccaatccagagtggcttacaacctaaaatactactccagtaattacgggttgatcattggttgtttgagtatctacacattattgaccaatttattactactcttcgtcatcgctctggtcatatttggtattcttggtataaatagactaaatggcgaagacctggtgactccctttggttctttcaaaagcaatcaactatacaccggtttgatttgtgtggccgtaccaataggtttcttggcttcgccaatctccactttgttatggttgatcggtgcttctgccgtcagtgttttcggacatgcttccctgacggaaaagccaatcgaaactgtctttgacgaagaaactgtttga

SEQ ID NO: 5122 - DNA, 765 bp, Saccharomyces pastorianus
atgagtcggcagccttccccttacaagtttccaccaccgccctctgccaacggcttgccactccccactactacaaacgctcaaagaagagccaattctcccgccagaataggtgcatccgcagtggctgctttgactgagaacatttccataaaggaggaagacgtcgccacacgtatccctctaggtacaaggccacaagaatctccgttgaacaagaagcctgcctcacttcatagtcgcaatctctcgcttccaataggcaaatttaccaaccctaatatcccttcagcaatgacatctatactaagtttcaatagagaccagcagcaaccgcactcccaaacatccccacaacagcagcagcagcaaccacaacaacaaccacaagaccctcagacaagcagttctcaccctctactaaggaaacccggaatggttcagaaaaaacacaggcgtgcaagatccacgtcctcgttcggagtaatcgatttgagtatcattgatgaggccaaggaaaaacatctacaaaggtcgccatcccccatacgcttcaacacatcggtgacattgaccccacaggcccagccaaccgaagctcgtgcgaaggaacgaccaactctaccgcaaccaccacgtgaggcacgcgaactgcgcgatgacttggatgacagaacgtgtagtgaaagcagtagcaggaacgaaagccccgtcagaaccatcacaaaggacaactctgtaggcaagatcttgaatagcacttaa

SEQ ID NO: 5123 - DNA, 138 bp, Saccharomyces pastorianus
atgagtacttctaacagtcacagccagccagaaaagagtagcgatagcaatcataataatgcctgtaagaacaagtctctgctggagattatattcgggaccaatgtatcggaatgggaatttctgagaacgcattga

SEQ ID NO: 5124 - DNA, 1410 bp, Saccharomyces pastorianus
atgactaagttcatgcaatcaaccaaaaaaaaaatggaaacccatggagtcactaaaaccgccatggtcggcggtttggcatgtcaaaggaactcttttctttttgacgggttcaaaacggtggttgtatcctgcgaaccaaagaaagataaaaaaggcaaggccgaaggttatgacatcgaattacaagacaccattttggttcctgagggaggaggtcaaccgagcgattcaggcttgttgagaattgtaaagggaaacggtgattcatcgacaatcaacaaaagtgtacaggttccacatatttctcgttcaggtttacatgcaaaacatcacgtcaaggagcccattgagcctggtacaacggtggaaatagtagtagatgcagtaaagagaatggattacatgcagcaacacactggtcagcatttgttaagtgctattattgaacgcaaatatcaactaaagacaatatcttggtcaatgggtggtcttattactgagaaaaagtcaacattagaacccaatgactatttcaactatatcgagataaacagaaaattaacagaaggccaaataacagaaatatctgatgagatcaaccagtttattactaaatcacctcaagaaattactgtggtggaaagaattagtagcggcgtagatgaagttgatacatccaaaatacccgacgattatgacctgtcgaaaggtatactacgcacaattcagattggtgtcattgattctaatccatgctgcggaacgcatttagaatctacttctcagattggttccattctaattcttcccaaccagacaaccgtgagaggctcgaactcaaaggtttatttcatgtgcggaaaacgagtggctgactatgcaaactcagctaataaaactttgtcaaactccaaaagtttattaagctgttctgaatctcaagttccagaaaagatagaaatgcagggcaaaaaattgcaacaatcaaacaaaagagagcaatactggataaagaaattggcacacatagcgtctgaggagttgagaagttcactgaaagctagtgggaaaagaagagcttattttatggaagaagaattcggtacattagaactcttgttgcaaatttttaaggggatatctactcatttaaatggggaatttgaagcctacgagatcattttatgtggttatgaaaggcaaaccaatacgggttcgttgttaattctttctgaatctggtgagaaaatttcttctttggctagcaagctgggttcaatgctacaaaacctgaaaggcggtggtggtaagaaaggcggtaaatggcaaggtaaaatcacgtccatttcaaatgctgaattggctgccctaaccgattatttgactcatgaattcatagcccattga

SEQ ID NO: 5125 - DNA, 267 bp, Saccharomyces pastorianus
atgtttgtgagagaaccaagtgtggagacggtaacgattttcaaaggaactgggctacaattgtccaaagtgaacgggatagttgttttcccccaaaagtggaatcgaaggctttttgaacgagtggagtttatatccaatgacagaatcattgacgttgtgattaacgaagggttttatcgtggattccaagtaatattttaccttgcagcgattgtgcgtaatgcatccaaactgaaacttttatttccagtatgtatttattga

SEQ ID NO: 5126 - DNA, 228 bp, Saccharomyces pastorianus
atgtaccatgaacagtcgcaaaacctagtacatttggaaacagagcgcgagaagtctcattacttgtcccattgcaacgtcaagagacagtttggcagaattatcgaaaacgccaccgtgcaaactgcggtacagaatggccaattgcaagtgtacggtctgctgtacaacgtagaggatggtctactgcaaaccgtcagcacatattcaaacgccatcccaaaataa

SEQ ID NO: 5127 - DNA, 201 bp, Saccharomyces pastorianus
atgagcgctatcgactcctcttcaatcttcacactgagccacgactcaaatctacaagacattttggacgctaacgtcaagtgggcttcccagatgaacattgttcaaccaaccttgttcccggatcataatggtaagggcagtcccctcatacactttttatcggctgctccgattcgcgctacaacgaaaactgtctag

SEQ ID NO: 5128 - DNA, 1236 bp, Saccharomyces pastorianus
atggccactactactcatttgtcgccaatttttatacagaaaacttctcagtctacaccactaaacatgaatagttattctttggttgaattaagctcttttggatctgaaaactggtgtctaaagttacaaccttcttataagcacggacttctgacagggctgagcaacggtgagatatgtttgttggattggaataccggaaagccgttgcaaaagatcagagcaagcgagacggcaattaacgatatgaaggtcattgacagcgactttgttgcagggaatctaattagtagcgcctctattgactctgtgaaggttttcgacataagatcaaatgactgtgttgcaaaaattaacaatgagactaactctccttttctctctttggattcccgtcatggcctactagcttgtggtacagaattacatggtatcgatgctactatacatatctatgacgttcgcaaatgggatactccattaagatcgttggttgactctcatcatgacgatgtcacttgcattaagtttcatccttctgatgtcaatgttttgcttagcggatcaactgatggatatactaatatttatgatctgaaacaagatgacgaggaagatgctttacatcaagtcatcaactacgcgtcgatccactcctgcggatggctatctccaaagagaatatatactctatcgcatatggaaacattttcagttcacgaattgaatgacaaatctgacgagttgaaagagccacagcctttatactttggtgatattaggaaagcatggaattgtgattatgtagtagacgtctatcctggctttatcgctaccggcaaaactcaagagggtgcgggagagctacgcctgttaccattcaaagatgagaagatagatatagaaaatggagttgtaatcccacatgcacatggagatgaagtagtgagggatgtccttgtatcagcacaaaataccgatgttttatattcttgcggtgaggatggttgtgtcaaaatttggaaaaacaatctggggcccctaaatacaccggaaagcttctgggattattctgaaagaatgagtgttttagaagatgagaacaaagaagccccaacaagcctagaggagcctttgattattcaaaaagaatcggtgactacgaaacccaaaaaggaaaagcacaagaaaagtaagaagcattccaagaagagtcgttttaaaccttattag

SEQ ID NO: 5129 - DNA, 348 bp, Saccharomyces pastorianus
atgggccgttccacgctctgtccacggagatatgtttcgaccgcaacaccctcgttccctgtcttcgtcgtggccatggtcacggcaacgttgtttgctttggatacggactccgtgagcagtttggggttgttggcgaacatcccgtcaggaatgtccatggtaaatgaactatacgcccattttggagactatacggtagaggttctcggcggtgtcatgaagctggcgtcagccatcaacagagagggctggcagagggaaaagcacggtttcgtggtcccatcgagggaccgacccaacgaaacactgctaagcgttcacatgtatagttcagacctgttatag

SEQ ID NO: 5130 - DNA, 762 bp, Saccharomyces pastorianus
atggatggtatatttggaggattcgaggatttagttgttcctaggcttgaagagcatctcggtcaaaccgatctctcgttcggtggaaaattattaccagcattaaagatttgcgaagatggtggtgagagcggttgcggtggtaaagtctggattgctggtgaactgttatgcgagtacgttctcgagaaatcaaatgaccatttattgagtaagacgatacatggaaagaggccgttcaagaaagttttagaactgggtagcggtactggtctagttggattatgcgtgggattgctggaaaagaacaagtttcatgataataccaaggtgtatgtcacggatattgacaaattggtacctttaatggaacgaaatatacagctggataaagtccagtatgaggttctcgcaagagaactctggtggggagagccgctatcagcggatttttcacctcaggaaggtgatttgcaaactaataacgttgatctggttctggctgccgattgtgtgtacctagaaaaggcttttccgttactagagagaacgctgcttgacctcactaactgtatatccccacccgtaatcttaatggcttacaagaaaagaagaaaagctgacaaacagttcttcaacaagattaaaaagaattttgacgttcttgaaattacagattttatcaagtttaactattatcttaagcagaaaacccacttgttccaactcgttagaaaatgctctccacgcagcggggcatga

SEQ ID NO: 5131 - DNA, 933 bp, Saccharomyces pastorianus
atgattggccttatggcggatcaagcttgtcgatctcagttagactgtaatgaagaatgtgaagctttaaaacgcctaaaggaattgagagaagcatttggtattagcgaagtatctaatgagtcaacaaacaatgaactggatactctaaaaaagctagtatctgttgctacgacattcgaagaacttcagctgccattcactgagacagtactatcagtatacgcgaagcaagaacggtggtgtttacaaatcgagaatatcgtcaataagttaatgagcgataaaacacgttctagtttgcatttcaagcccatgaggcctcctcagcgtcattttattcgtgaattggcgaaagcttataacctatattctgaatctcaagatagagagcccatgagatctgtatttattaaaaaggaagataacaacaaaagcagtaggccgattttatcactggcagaagctttcccactatttgaatccttcaaagagttgcagaaagaacgcaaaatacaagaatttcaagcacgtaccacagcgaaactaatcaactttgaagttcagaatgcggaaccagaagtagaggtggccaagaacaacggatttttagttcacagcctggtgaaaggaaatggtgtcgataatttaaagagattcttcgaaccacatttaaagcatacgttagtagctaaacctcaatacttaattattgatgacggcaagactgcgctggtgtaccctgaaaactacgaagcggtatctgtaaacactgaacgcgacatggagcttttggttggtcatttcgactttatggccaaagaggttttcttggccgattctatttccctgcgctcgattgatgaagagcttgggagaagactagattccccagtagctcaagaagatagtcctgtaaaggaagagaactag

SEQ ID NO: 5132 - DNA, 2004 bp, Saccharomyces pastorianus
atgttgcaaacaaacgaacgggagtctgttggtttggagcagaatcaaaacgataatgacgttcatgaaccttacttaaatgatgagcatgtctctgacgtgaaagttagccacgagcaatctagcacctatgattcagaagaagaaagtgatgatgatatgcagtactacgagcgtgccattcaagaaattgccaagggcgattcgtatatttgtatgatttgtacggtggagatggattacacttgtcagatgtttgcctgtaagaaatgttatagagtattcgattacgcctgtataagagaatgggcattaaagtcaacggaaaagaccgtggataagatatggaaatgtccaaactgttatcatattggcaaaaaagttccgacaaggaacaggccgacatgttggtgcggtaaagttgttaatccggaccacaacccactggatcctaactcatgtggacaaacttgtaatgcccctacttgcgttcatggctgttccaagatttgtcatttagggccgcatccagaatgtacaagaatggtagaaattaagtgtcactgtggtaagcattcaaaaagcatcttttgctatcagtctaaagctatgaaaaaacattttgattgtcaagaaaattgtggactgcctctatcttgcggtattcataaatgtaaaaaaaagtgtcattcaggcttatgtgggccatgcccagaattaattaggagtgaagatagcgcaaatgattggataaaatgctactgtggtatccattctaaagatagtataaaatgttctgagacaaaatttccaaaatccggtagatcttcaaaggatgaaggtggaaatgagtgggtaggtgtgtttgcttgtgaggacattagaactgttgactacgcatgtcataaacattcctttatagaaccttgcataagccctcctacagtcaacggtaagaaaacctgcccgtttttacctagtatactgaagacatgcccctgtggtcggacagccctggaagaacttaccaagcctcgtaaacattgtactgatccaataccgacatgtagttcaaggtgctgtaaaccattaaaatgtggtaagcattcttgtcccttcacttgccacgacggtgcctgtatggatccctgcttacaaattgatagcgtcaaatgtgcatgtgagcaaagcacatttttagttccttgtggatttcaggaaaagccacattgcaatataaaatgtgagtcgctgatgtcatgccgcagacacagatgtattgatagatgctgtagtggtagaccatcggcactagaaagaaagaagagaatatttagatcgcaggatttgatggatgaatctcttgtggaagcgcaacatatatgtttaaagccatgtaatctaactctatcctgtggaagtcatcaatgccagagaaaatgtcatcccggaaaatgctcaccttgtttggaaagtgattcgaacgatttagtttgtccgtgtggcaaaacagtcattcctgcacccgttcgttgtggcactaagctaccactatgtaaccacgcatgtatcaaagttgtgcgtggtgaatctgagtgtggtcacaagccaatgccacatacctgtcatcctttagacctagcttgtccaccatgtacggagactgttttcaaaccttgtaaatgtgggaaaaaagataaagtgagaacagtttgtttccaaacagatgtatcatgtggtacaacatgtgggaaaccattgtccggctgtcatcatacttgtcaaaagacatgccatttaccagaaaattgccaaaaggtctgcaagcaaatatgtagacagaaaaggcaaaattgtgaccacacatgccccaaaccttgtcatggtaagagtgaatgtcccgatttaccttgcgccgcactagtgaaaattacttgcagatgtggtagaatagaaaaaaaggtcgcatgtggcgcacaaagtgatgcagctagcgtaacagaa

SEQ ID NO: 5133 - DNA, 1614 bp, Saccharomyces pastorianus
atgttgttaggtacaggttttattactcaaatgaacgactacggtttgtttgagtactctgattatattgctggattgtcaggcggaagctggatcttaatggatttggttgtccagaactttaatgtaaattctttgctcacagaatgggaccttgatgaagaccttttattgggcataccagaatttgacatttccgaagaagagattgttaccaatgcaaaaaaggagtatattgataacgatatcagtaagaaaaaacgtgaggtgaggaaaacgcaaatttcgagctttcctgaattttacgatcaggtagagctagctgtgaactcttttgaagaaagcccagaagaatgtagtttagtgaaaaggaatatgaatccattaacaagactgaagaggattttttttccaaataacacatttactgaaacagatgccaaaattggaaccttcaaaacagtactggatttttacaagaatttgcatttaaaaataaaacctaaaaaaatggaaggtttccaaatttcattcacagattattggggcaaggcgattattcaaaggctaagaaaaaattttgatgaggaccctaaccatacattttccttctcaaaacttgttcagtcgtcagcaaaattcaaggaatgcagtgtgcctcttcctatattcgttgcaaattgcaaaaatgggcttctttcaaatgttattttcgaatttacgcccttcgagtttggttcttgggaaaatatcctcagacttttcgttaggctgccctatctgggttcaaaaatagtttctggggaggccctaaaatgtgttaataattttgatgacttgggctttataactgcaacctcttcttcaattttcaataatgtgctaatttttatctggaatctggcctcccagtcttcgagagatgctatgaaggcgcttaatatggtcatgggaatatttggtctaggcaaggaggaaatgtttagtatttcgaaggactcttcgagattagagacagactatgccgtgtaccagcctaaccccttttatctttatcccaaagtggacaatgttttaactaacaaggaccatttgtacctcgtagacggcggtgaagatggtgaaaacatccctctcaggacattgattattcctgaaagggaattagacgttatctttgtcctggattctagctcagatatcgataactacccaaatggatctaaattgaaaaaaatatttgagaaattagatgaagaaaacattcattaccagttccccaaaaatataaaaagcctcactcgtcctgttgtgatagggtgtaatgccacgaaaagaccaggccgtgattcgtttttgccaattataatttatcatgcaaatgcatatcatcaatatgtatctaatacttcgacgttcaaaataacttacaatcagtctgaagttaataatatgttgcttactgggagagaagtgtttagcagtgactacgaccttcactataaaaattgcttgggctgtatattaactaaaagaacaatggataggctgcctaaaaaaaaaaaattttcgccattttgcttacaatgttttaaagactattgctactcatga

SEQ ID NO: 5134 - DNA, 135 bp, Saccharomyces pastorianus
atgcaaaggttcttcatcgtgattttagtactgttgacaccaggcctagcaacagctccatttcaggtacaatgtcctagctctccgttagtcagggaggcaaaagtaagttctatattctacggttatgtttga

SEQ ID NO: 5135 - DNA, 2037 bp, Saccharomyces pastorianus
atgatgtctacgaatattctagagcaggtcaagctatttctcaatcgaagagacatcctcggtgtattctataataaaacgggaaataccagtaccctagagcagaccactcaagactttgaagggtatgcgagtttaaactctacaacggttccaagaaccacctttgattccttggataaaatattacggaaaggtgatctgacgactccagtactgcttaagacaggtatcaaaatctttttttcatattcagtaagcaagtatgctgttctatgtttttgcaccgccattatgttgaataggctatctgtaatgtcttctctgagatcaaattccacaaatattcgcctgcccctttggtcaaaaactttacttcatttggtggctgctctgtcactgactagtgcattttcacaaatcttgggtcagatcggtttcataaacaaattgcatacagatgatatggatgcttatgcgttgagtgtttatttattaacaattttgtctgattgcattgagatttttgtttcttcaacgacaaacgctatcccattaaagagctccgatttttctatatggggtttatcattaaatctctatatcatatccaaactacccgcaaaggagcaacacatgggcgataatgtaaaactattagcagcagtctctcacagactaataactcatttactggagctactgcatttgagaacctataggttgtttgcagatgccattttaaatgtagggtttttcgcatcattcatcgctagagcctatttgaacggccttgatttcattaatatctgtctcgtccataattgtttccctagttttgcttatattttggttatcttgctggcatctgtaggcgatatttcgaaggctttattcaccggtaacctcttccgatcactatcatcaagatatcgaactttagcaaagtggtggaagtcaaatagttacaatggagaagaggaattcaatgaaattgctctctcattgtgcctttttttaacaacgaatgaccgtactgttttcaaaaagtctcacaaggattcccaaaaccccgttgacaaagctgctgctttgagtaacagttatatggttagtgggtatttgaaccaacttcagtcgactccagaggatatgttatctcacaaggaaatgactactgattctcagttaccaagtttcattactacatacttaggtttttttcaattggtaaaggcaatatctttgaactctttccagcttttaaaaggccttgtatggaataaaaacctggaaacaaacagagatcatgaatcgaaaggaaaaaaatcgaagaagaaagatttcaacagatacgttacggaaaaaaactacaaaaagtttctgtataaaccggatgtcaaggactttgactccggaagcgatcctcgatgccgggagctattgctccctgaagatgactcatcaaaggactacgttcctcctaaagaaaacgacgatagcatttcagatgaggaatttgacaacgatggtgaaagtcagttgattatggaagaaaaggaggcgttaacacgtctatcgaccaaccccgttggttcagataacgtaagggacctggcttggaatctctcaatgtggtccattttaaaatatgaaatggatgaaaataacaagattaagggaccattaacgagatctcagtacggcaaaagaaattgtgaaggtattttggctgatacagttattgaacgccttttacaccagaattctagtcatatatataaacgttcagaggtggaagaagataaagaatcagaattccagttcgatcttcctctcggtgattgcgatgaaatggataacattgatctcgcttgcctgatttgtaaagctaacaaaagaaacattgtaacttggccatgtagatgccttgctctatgtgatgaatgcagaatattgcttggctataaagggtttagtacatgtgtcagctgtgatagtgatgtaaagggttacagtaagctgaatatcgtttga

SEQ ID NO: 5136 - DNA, 327 bp, Saccharomyces pastorianus
atgtacaagggtgagaatgatgccgaatctcatgaaatagttctaaatgacaacaacatcgttgaagaacagttgggagaccatggaatcatctgtgtagaagacatcattcatgagattgctactatgggtgaatcgttttctgcctgcaactttttcctacaaccattcaaattgaatagagaagtatccggatttggttctttaaataggttgagaaagataaaacaaagagaggcagaatcaagaacccgtcagttctcaaatgcggctactgcaccagttatcgaagttgacattgactctttattgaccaaattaaattaa

SEQ ID NO: 5137 - DNA, 453 bp, Saccharomyces pastorianus
atgtcatctgcccaagaaagtaaaactcaagccttgaactccaacccagaggtccttttaaggaaaagaagaaatgctgatagaactagaatcgagagacaagaactagcaaagaagaaaagggaagaacaaatcaagaagaagagaagtaacaaaaacagatttgtcagagcagagagcatagtcgcgaagactttggctacatccagagaaaaggaaagaattaagagagtttcaatattagaagacaaaaaagctaagaatgagacacagcatattgcatctgaaaaagatttcattttaaaaatcaccgaaaaacctaagcatgttgagcaggaatctgccgatttgaaggaaagcgatgatgaagaagatgacggtttaaacagagaaaaaactacatacgatggcgaacctgctttactttttgttgtaagagtgagaggtccactt

SEQ ID NO: 5138 - DNA, 312 bp, Saccharomyces pastorianus
atggcaacttttgtttcacacaccgtcgcggcaatgatcattgtcccactaatgagcgaaatcggtgcaaacttgccctcaggtgatcattctagattactaatcattatagctgctttactatgttccagtgctatgggtctaccaacctctggtttccccaacgtgaccgcaatttcgatgattgatgaagttggtgataggtatctgaccgtgggcacattcattacaagaggtgtcccagctagtttattaagttatgttgttattgtcacagtaagctacggtctcttgaagtccatgggattttaa

SEQ ID NO: 5139 - DNA, 933 bp, Saccharomyces pastorianus
atgaaattctcacactcgttgcagttcaattccgtaccggaatggtctaccaagtatctggcctattctcaactgaagaagctgatctattccttgcaaaaggataagctgtacagcaacaacaaacaccataatgcgcagccccacgaggccgacgacgagagcctgccgctcttgtccgacgcatctccagatgaccagttctacatctccaaatttgtggctgctttgaaccaagaactgaaaaaaattgataaattttatatatctcaagaaacgggcctcatcgccaactacaacgagctaaaggacgatgttatggaactagagaacagcaacaaggccaaccagctgttcaaccagcagcagcagcatcaaacacagaacggggtaagaagcaggaagtccaagtcgcagcagcgtcagagaaggttcagtagtgtctcctctacggactcgaacccctccttgacagatatgtccatcgattccgcgcccgtcatccgtacccaggtctcaaacaccaccaacaacgcgaactctttgcaaaatctcgcctccacttcagcgtctctttccaacaccaactcggtctacctctcccccatcacccagcacaggttgtccttgaaaaagagattgatatccgtctacacccaactttccgagttgaaggactttatcgagttgaaccagaccgggttttccaagatttgcaagaagttcgacaaatctctaaacaccaacctgaagcagaactacctgaactacatcaagtttcactcgcacgtcttcaaccctgccacaataaacagaatccagcaccatatctccgagaccattcttacgtatgccaacttgaataaggatacccgccaaccctccaccacttttaacctggacgcggaccagatcctgatagtgagtcgtatt

SEQ ID NO: 5140 - DNA, 78 bp, Saccharomyces pastorianus
atgatgaatttagaaagaaaatatcagtccgccaagaccgataacaaaaattttatgaagctaagttccagccaatag

SEQ ID NO: 5141 - DNA, 1230 bp, Saccharomyces pastorianus
atggcaatggcaaacggcaatgccggcattattgctccctcgtcgggctctttgaccttccaccaactgatacacttgccgcccaagcaatggctccaattcctcgcaagccaaacatccttactcaaattcgtaataatcacctccattttcatcgcactattgactttcaacttaacaccattcaccactgattccttacagaaaaactgtttcgccatcttgatctatgcatctctgctgtgggccactgaaacaatcccccttttcgtgacctctttgatgattcccctgctcattgtagtgttccccgtcatcaaggacccagtcacctcccagcccatggcccctcgtgaatcttcccagttcatcttatcgtcaatgtggtcaagtgtcatcatgcttttattaggtgggtttactttggccgctgctctttccaaatacaacatcgccaaaatcctttccacccacattttggcctctgccggtacaaacccgcatttcattctcttaacaaacatgttcgtagcactctttgtctccatgtgggtttccaacgtcgctgcacccgtgctttgttattccatcatccaacctttgctaagaacacttccaaggaactgcacctatgctaaggccttaattctaggtatcgccctcgcctctaacatcggtggtatgtcttcccccatcgcttctcctcagaatattttctccattggcataatggacccttcgccatcttgggccgaatggtttatgattgcgttaccggtgtgtttcatttgtatcatggcgacttgggttctcttgatcataactttcccacccgaaccaaatgtgaaaatcctacaattgcatccatctcgtgatccgttcactttgacacaatggtttgtcagtttagtttgtattacaacaattatcctttggtgcctttccaaccaaatctctggtgtttttggtgaaatgggtataatttccatcataccgattgtggttttttttggtacaggtcttctaacctcagatgatttcaacaactttatgtggacgatcgtcgtcttggccatgggaggtacgactttaggtaaagcggtaagctcatctggtttattgtccacaatggcacacctaatcaaatcgcatgtcgaacatgaaccgatttttatcattgtgttgatctttggtcttgtaattcttgtaatggcaacttttgtttcacac

SEQ ID NO: 5142 - DNA, 5217 bp, Saccharomyces pastorianus
atggtaatattcattccttttccgattctcagttcggtcatatctttgcctttggtgaaaacagacagcttcccagaaaacacatggtgtcgcctaacggagctatccattagaggtgacttcagaaccactgtggaatacttgatcaagcttttggaaaccgaagacttcgaacacaacacaatcaccaccggttggttggacgatttgatcacccataagatgaccgctgaaaagccagaccccactctggccgtcattcgcggtgccgctactaaggccttcttagcatctgaagaagctcgtcacaagtacatcgactccttacaaaagggtcaagtcttgtccaaggaccttctgcagaccatgttccccgtggatttcattcacgagggcaaaaggtacaagttcaccgtcgccaagtccggtaacgaccgttacactttatttgtcaacggttccaaatgtgatatcatactacgtcaactgtcagacggtggtcttttgattgccattggcgggaaatctcacaccatctactggaaggaggaagtcgctgctacaagattgtctgtcgactccatgaccactctgttggaagtcgaaaatgatccaacccaattgcgtactccatcccctggtaaattagtcaaattctcagtcgaaaatggtgaacacattatcaagggccaaccctacgcagaaattgaagtcatgaaaatgcaaatgcccttggtttcccaagaaaatggtattgttcaactactaaagcaacctgggtctaccattgttgcaggtgacatcatggctattttgactcttgatgatccatccaaggttaagcacgctctaccatttgaaggtatgcttccagacttcggttctccagttattgaaggtaccaagcctgcttacaaattcaaatctttggtgtccactttagaaaatatcttgaagggttatgacaaccaagtcattatgaacgcctctttacaacaattaattgaagtcttgagaaatccaaaactgccttattccgaatggaaactacatgtctccgccttacattcgagactgcctgctaagctagatgagcaaatggaagaattggtctcgcgttctttaagacgtgctgctgttttcccagccagacaattgggcaaactcatcgacacggccgttaagaaccctgaatacaaccctgataagttgttgggacctgttgtggaaccattaacagatatcgctcaaaaatactccaacgggttggaagctcatgaacactctattttcgttcatttcttagatgaatattatcaagttgaagtattattcaatggtccaaatgtccgtgaagaaaacatcatcttgaaattgcgtgacgaaaattcaaaagacttggataaggttgccttgactgttttgtctcactcaaaggtctcggctaaaaataacctgatcttagccatcttgaagcattaccaaccattgtgtaaactgtcttcaaaagtgtcctctattttctctactccattgcaacacatcgttgaattggaatccaaggctaccgctaaggtcgctcttcaagcaagagaaatcttgattcaaggtgctttgccatccgtcaaggaaagaactgaacaaattgaacacatcttaaaatcatctgttgttaaagttgcctatggttcatccaatccaaaacgttccgaaccagatatgaatatcttgaaggacttgattgattctaattacgtcgtttttgatgtcttacttcaatttttgactcaccaggatccggttgttactgctgccgctgcccaagtctacattcgtcgtgcttaccgtgcttacactattggtgaaatcagagtgcacgaaggtgtaacagttccaattgttgaatggaagttccaattgccttcagctgccttctctaccttccctaccgttaaatctaaaatgggtatgaatagagctgtctctgtttctgatttgtcatacgtcgccaacagtcaatcatctcctttgagagaaggtattttgatggccgttgaccatttagatgatgtcgatgaaatcttgcctcaaagcttggaagttattcctcgtcaccaactttcttccagcggccccgcccctgatcgttctggtagttctgcatccttgagtaacgttgctaacgtttgtgttggttctactgaaggatttgaatccgaagaggatattttgttgagattgagagaaatcttagatttgaataagcaagaattaatcaatgctgccattcgtcgtatcacattcatgtttggtttcaaggatggctcttatccaaagtactatacttttaatggtccaaactatagcgaaaatgaaacaattcgtcacattgaaccagctttggctttccaattggaattaggaagattatccaatttcaacatcaagccaatattcactgataacaggaatatccatgtctacgaagctgttagtaagacatctccattagataagagattctttacaagaggtattattagaactgggcatatccgtgatgacatttctatcccagaatatttaacttcagaagctaatagattgatgagtgacatcttggataacttggaagttaccgatacttcaaactccgatttgaaccatatcttcattaatttcattgctgtctttgatatctctccagaagatgttgaagccgcttttggtggtttcttggaaagatttggtaagagattattgagattgcgtgtttcttctgctgaaattagaatcatcatcaaggatccacaaacaggtgctcctgtgccattgcgtgctttgatcaataatgtttctggttatgtcattaagactgaaatgtacactgaagttaagaatgcaaagggtgaatgggtattcaagtccttgggtaagccaggatccatgcacttaagacctattgctacgccttacgctgttaaggaatggttgcaaccaaaacgttacaaggcacatttgatgggtaccacatatgtttatgatttcccagaattgttccgtcaagcttcgtcctctcaatggaagaatttctccgcagagactaagctggctgacgatttctttacgtctaacgaattaattgaagacgaaaatggtgaattgactgaagttgaaagagagcctggtgccaatgctattggtatggttgcctttaagatcactgttaagacacctgaatatccaagaggccgtcaattcgtcattgttgctaacgatatcacgtttaagattggttcctttggtccacaagaagatgagttcttcaataaggtcactgaatatgctagaaagcgtggtattccaagaatttacttggctgccaactctggtgctagaatcggtatggctgaagaaattgttcctttattccaagttgcatggaacgatgttgatcatcctgaaaacggtttccaatacttgtacttgactagtgaaggtatggaagctttgaagaagtttgtcaaagaaaattctgttttgactgaacgtactgttaccaatggtgaagaaagatttgtcatcaagactatcattggtgctgaagatgggttaggtgtcgagtgtttacgtggttccggtttaatcgccggtgctacatcaagagcctaccacgatattttcacgattactttggtcacttgtagatctgtcggtattggtgcttatttggtccgtttgggtcaaagagctattcaagttgaaggtcaaccaataattttaactggtgctccagccatcaacaagatgttgggtagagaagtttatacttctaatttacaactgggtggtactcaaattatgtacaacaatggtgtttcacatctgactgctgttgatgacttagccggtgtagaaaagattgtcgaatggatatcctatattccagccaagcgtaacatgccagttccaattttggaaactaaggatacatgggatagaccagtggacttcactccaatgcctggcgaatcatatgatgtcagatggatgattgaaggtcgtgaaactgaaaatgggtttgaatatggtctattcgataagggatcattctttgaaactttgtcagggtgggctagaggtgttgttgttggtagagcccgtcttggtggtattccattgggcgttattggtgtcgaaacaagaactgtagagaaccttgttcctgctgacccagctaatccaaatagtgctgaaacattaattcaagaacctggtcaagtttggcatccaaattccgctttcaagactgctcaagctattaacgatttcaatcatggtgaacaactgccaatgatgatcttggccaactggagaggtttctccggtggtcaacgtgatatgttcaatgaagttttgaagtacggttcgttcattgtcgatgcattagtggactacaagcaaccaattatcatctacatcccacctactggtgagttaagaggtggttcatgggtcgttgttgatccaactatcaatgcagatcaaatggaaatgtacgctgatgtgaattctagagcaggtgttcttgaaccacaaggtatggttggtatcaaataccgtagagaaaaattattagacaccatgaacagattggatgataaatacagggaattgagatctaaattgaccgacaagagcttaacaccagaattacatcaacaaatctctaagcaattagcagaccgtgaaagagaactactgccaatttatggacaaatcagtattcaatttgccgatttgcacgacagatcatcacgtatggtggccaagggtgttatctccaaggagttgcaatggaccgaagcacgtcgtttcttcttctggagattaagaagaagactgaatgaagaatatttgatcaagagattgagcaatgaaatgaacgaggcttcgagattggaaaagattgctagaattagatcctggtacccagcctcagtggaccatgataatgatagacaagtggctacttggattgaagaaaattacaagactttggacgataaactaaagagcttgaaattagaaacctttgcccaagatttagctaagaagatcagaaacgatcacgacaatgccattgatggattatctgaagttatcaagatgttatctactgacgataaagaaaaattgctaaaaaacatgaaatga

SEQ ID NO: 5143 - DNA, 1596 bp, Saccharomyces pastorianus
atgagcgaagaaagcttattcgagtcgtctccacagaagatggagtacgaaactacaaactactcggaaagacacacaaaactccccgaccacttcatcggtctcaatacagtagataaactagaggagtcgccgctaagggactttgtcaacagccacggtggccacacggtcatctccaagatcctgatagcaaataacggtattgccgccgtgaaggagatcaggtcgatcagaaagtggtcgtacgagacgttcggcgatgacaggactgtccagtttgtcgccatggccaccccagaagatctggaggccaacgcggagtacatccgtatggccgaccagtacatcgaggtgcccggtggcacgaataacaacaactacgccaacgtagacttgatcgtagacattgccgagagagcagacgtagatgccgtgtgggccggctggggccatgcctccgagaacccgctgttgcccgagaagttggcccgctccaagaggaaagttatcttcattgggcctccaggcaatgccatgaggtcgcttggtgacaagatctcctcgaccattgtcgctcaaagcgccaaagtgccatgtatcccatggtccggtaccggtgtagacacggtccatttggacgagaaaaccggtctggtttctgtcgacgacgacatctaccagaagggttgctgtacctccccagaggacggtctggtaaaggccaagcgcatcgggttccccgtcatgatcaaggcctccgaaggtggtggtggtaaaggtattagacaagtcgagcgcgcagaagacttcgccacactataccagcaagcgtcaaacgaaattccaggctcccccatcttcatcatgaagttggccggcagagctcgccatttggaagtccaactgttggcggatcagtacggtaccaacatctccttgttcggtagagattgttccgtgcaaagacgtcaccaaaaaattatcgaagaagccccagtgaccattgccaaggcggaaacattccacgaaatggaaaaagccgctgtcagactcggtaaactggtcgggtatgtctctgccggtactgtggaatacctgtactctcacgatgacgggaaattctactttttggaactgaacccaagactacaagtcgagcatccaaccacggaaatggtctccggcgttaacttacctgcagcccaattacaaatcgctatgggtatccctatgcatagaataagtgacatcagaaccttgtacggcatgaacccgcattctgcctcggaaatcgatttcgagttcaagacccaagatgccaccaagaaacaaagaagacccatccccaagggccattgtaccgcttgtcgtatcacatcagaagatccaaacgatgggttcaagccatccggtggtactttgcatgaattgaacttccgttcttcttccaacgtctgggggtatttctccgtgggtaataatggtaatattcattccttttccgattctcagttcggtcatatctttgcctttggtgaaaacagacagcttcccagaaaacacatggtgtcgcctaacggagctatccattag

SEQ ID NO: 5144 - DNA, 684 bp, Saccharomyces pastorianus
atgggtgtcgacaataatgataacggatttgagtggtggagacgaaccatgcagtacaagactggtttaggtctgacgccggaggagaaaggccgatatgaggaagactctaaagctcgggccctgaagaaggaatgtcttcgatgctacgagcatcgagattggatgcttaagtactcccccacggtccgctttatggtgcaagcactcacaaagctgaataagggtagtgagagcaaattcgatgagtccaagatcatttgcgattactgtcccgattggaagagtggagggttccaccctgagctaggtatcctgttgtgtcagaaccggctgcgtgacaagtggcacttggaggacacgctgtcgcacgagctggtccattattttgacgatttgaaatggcaggtagattggttgaatttgaagcaccatgcatgttcggagatcagggcctcttcgttgagtggggagtgcagattttgggaggagttcaagagaagagggttcagcaccgggttccacgtggcaagaggccatcaagactgtgtgaagagaagagctacaatcagtgtctcaggtaaccccaactgtgaaagtaaggagcatgctgcgaagatcgtggacgaagtctgggatagttgttttgcagatacgagaccgtttgatgagatttacaggtga

SEQ ID NO: 5145 - DNA, 1281 bp, Saccharomyces pastorianus
atgaacaggacacagttgtgcatagaaacacaaagcagcagtcgcccgtttctcgttttgtccagcatgtctagttcaatctttggtcctttattgcgcgccatggaacgcgttaatttacttaatgcgccctaccaatcattgacgtttgaagaacagaaggccatgaccatttggcaaagagtcaaattttataactggagttttgaattatgcgccttgtttattttattcttggtgtatgcattctacaaattcggtaactccatcaattccaaacgtgggaaccggatcttccaatctttccattcatatttggccaacgacttgaagttctctcgtgtgggcttcaatattaacaactccaagatcttcaccgcagaacaccaaaacacatggttttcctcttttgccactggtagatccgccatcaaaagtgtcaatttgaacatacatttggtagctcgtagcaacccattctccatgtgcttggaatacctgcttggattcttctttgcaagtttgaaaagtaaacaattggaagaattcgtcgaaatcatcatcaaaccaaacggtatctacgtggctaacgaatccgcccacgctaacaataatgcgcaagaagtcttgagcaaatttaaatttgtcacttccattgtcaacaaagaatttatgaataaagctcgtgctgaaaactatttcctatccatcgcacacaccagcgaaaaccacaagctgccaaacaactacgtctacatgtctgatgttaaccaattgtcaggatttatgttacattactccaaaccctttgaacttttgtctcaagctggtaaccttctaaaatttataagtttcaccgatttgcctgtcgatgctccacgtgatgacaaagaatgggaagcttccttggaaccaagagccattattcgttgtgctgttcctcaaaatgataacgaattaaacttgttgaaccaaatcattgctctagccgtggaaatttacgatggatgcactcaagatttggtccaaaagtctccaaacacattcataactaacgatatcttgaagaggacaaccaatttgcgtcaacaggaattgaacaagattaagaagttcatgaaggaaaatgaattagaattggcaaaggaaaagaaaacagaatcggaaaaggccaagagacgtcaattaaaggcttccggtgaacaaggaaaagtcgaccaaaagatgaaagaaaagagagaaagacgtctaagaaacaagcaaagaacaagaattcaatag

SEQ ID NO: 5146 - DNA, 777 bp, Saccharomyces pastorianus
atgccattacaggtgtgtcatatttatagtgatcgaggtttcatcgtgataaagtcaatatcttcatggaataattgtgagggaggctctttagcagctctattggagcatggtcgtattgaagatgaaatggtcactcaggtctacacattacagttactggaaggtcttgcgtatctgcatgaatctgggattgttcaccgtgatgttaaacctgaaaatattctgctagactttaatggtgtcattaagtatgttgattttggcgctgccaagaaaattgctaataatggaaccagactggctagtatgaacagaactgaagacgcagacggtgagcatgaagaagacgctcacgcttcggattcaaaggcagcgaaaaacaacgaaaacggtctgcaagatatgatggggacacctatgtatatggcgccggaatcgattactggttctaccagtaaaggcaaatttggggcggatgacgtttggtcattaggttgtgttgtattagaaatgattactggtaggcggccatggtctaacctcgataatgagtgggccattatgtatcatgttgcggccggacacactccgcagttccccaataaagatgaggtatcctctgctggtaggaaatttttagagagatgtcttattcaaaatccttccaagagagccagtgcggttgagctgttgatggattcttggattgtacaaattagagaaatagcctttggtgatgattcttcttccacagatactgaagaaagagagtga

SEQ ID NO: 5147 - DNA, 1602 bp, Saccharomyces pastorianus
atgtcgcattcagactacttcaattacaagccgtatggcgagtccactgagaagtcaggcagctcgaagaagagacaatcttcttcctcttcatcatctaggataagatccgaaagtctagggcgaaataccaatactacgcaggctcgagtagcgtcttcgcccatcagtcccggactgcattctactcagtacttcaggtcgccgaacgcagtatatagtccaggagaatcccccctaaacacagtgcagcttttcaatcgtcttccggggattcagcagggccaatttttccatcagaatgccatatcagggtcttcaagctcatcggcaaggtcaagtagacgtccctccaatatcggtttgcctctaccaaagaaccctcagcaatctttacccaaactgtccactcagtctattcctgcgcataagaagtttgatcctagtaaaactgaaactgataattttaagaagccccttccaatgaatagtagtcaagacccattattaactacgcccacattggttatatcgccggaactggcttcgctgaacacaactaatacatcgattacgtctacaccacaaaacctaacgaaccaaagctctagtaagcatattgccactagatcacaaacaaacgcgtctgcaagtacttcgacgttgcaagatttggtcacaacaaacagctcgcaacggtccgtagcacatcacggtggaagcacatcgagtctccgaacgtataaaaagcaatacgtattgaacgaacagctgtatctgagaaaaatgagaaatcgtgcgaacgatgactattacacaagaggtatagtagcgtcgtccaattttgatgacgatgaagaaaaccatagcaataaaggcgaggatgaattagaactagaaatgaatgatctcctaaagatagagggtgatgataaagataatgatttcaattttggttataattttattacgtcaaacacaaagaataacgaaaatgtagttgcaatgagcttgaattatttgaaaggcaaattgaactggctcaggaatggtagcgacgataaggaacgcgaaataccggacgacgagtggaattacatgttaggaaccgaggatttattgtcaagattattgcaaaaccctatggtgaataatcggttcgaatggcaaactatgttgtctaaagtgttgaaaggtgatattgtaagaaatgaaaagaccaagattgcgaatcaaggaaagggtcccggcttcaatacgcagtattcagatgatatttggattgagttgaaggcatggatgaatgggagaaccgtggaggatcaaagcaaatctttaagtatcttcagaaattccactgattctgtattccaagaaataatggacttcagattggacgataacatgagcgctgaaaaggccggggagaccatcaagtcacttgtggacaaatattatagggtcctgaatctttggcctaatgtgaagagaatgcataacgaaaaacccattactaaaacagaagcattcagaaataggatagataccttgaacagttggctgaatttcaaattcaacttgacactaatattgcctacctga

SEQ ID NO: 5148 - DNA, 1356 bp, Saccharomyces pastorianus
atgtggaatgaactaaatttgtcctatttagagcaagatttggaatttttattgatgtttcccatgtgtctagtcaaagatatcatactaatacgcttatcctatgcaagaaaaatacagaatccaacactaatgatgattgaccaaatgatggacgatttcagcacttacatcaaattagcggtccagatgaaattcactgttgcttcttattgcaaagactggtttctaaacgtgaaaattgatcctgaatttgatcatactgttgtcgaagctttgcagtattttttctatatcttggaactaagaattttgaacagtggaaagaactcattcaagacctctaaagaaccagatttgctacttaaatactgggaaatgttcagaaatgttggctattacatcgatgatgctggtgaattaattgccactgagtttacaaaattgacacttcggttggtccacagattgcatgcataccttttacggcagcaaaatactcccccgaaattagatgatgaagcgggcgctgaaaaatggttgatccaaatattcgagatacttggatcaatgaaaaggaaacttaatagattcacaaatattttaacaaaagcattccaaaattttgttagatataagatagaagaccacaactatctattgagacagttgaaggaaaccggccactttcttatctactcaggggggtatctagaacaaaacggtacttatttgattggtagccccgaattattgggttgtaaagatgatgatatattgagaatcattaagaattcagacattggttgtgatttggtacccaaactagaaatcaataacagtctgaccatttataatgcattggatggcaaatggtactcaaactcttcactgggttcggatatttcaagtgatggtacaccattctactatgttaaaaatgagttaaccagccaacctagatcttacaacgggaatagggtcaaccgtgaaccggacttcgaaaatagtaagagcacagaagaagaactatacgaattagagacaagattgaattctcttggttatgtactggtgctgactccacaggaaccattgctatgggaaggtgaaatgtacaatctatcggataataaagtcatcaaagcggaagatttaaatttaaaagtgatttcaaactcaatagatctgatgtgtcaaggatccagttatgccctggagtatcaatgtgatagatttcaacaaattgctagcaactcagtttcctttttggaaaagaaatcttcttctgagactgtgaaaaataacctgcagagaataaataacgcttattcagatgcacatatagtgttttga

SEQ ID NO: 5149 - DNA, 615 bp, Saccharomyces pastorianus
atgctgtatatatccaaattaacatcaatattatctttagtttggctcttacccgagcgagaacaagttttgcggagcgaaaaatcccatataacgagggaatggcaggtcaagaagcaggttggtcaaagaggaaacaggctagtaagagccatgttgtcgaggttgctgtccagctcatggtgtgcgccctggaggcaggcgcagagaatgttttccaccaccgttccaatacaagccacgctgaaccaaatcaagagagggtccggccctccaagacgcaagaaggtgactacggccccacagctggaccagtgtccccaacggaagggtgttgtgctgcgtgtgatggtactgaagcccaagaagcctaattctgcgcaaagaaaggcatgcagagtccggctgtctaacgggaacgtggtgtcggcgtacatcccgggtgaaggccatgacgcccaagagcactcgatcgtatatgtgagaggaggccgttgccaggatctgcctggtgtgaagtaccacgtcatcagaggcgctggtgacctgagcggcgtagttaacaggatttcttcgagatcgaaatacggggccaagaagccaagcaagtcgtga

SEQ ID NO: 5150 - DNA, 456 bp, Saccharomyces pastorianus
atggtgcaaccagcacctctcattaccagggcgcccacaccaaaaatacccaacataccagctgttgcgcccaaggaggcaccctgcatcgtggcccccattagaatagaccaagtgcagggcaaatataacagccacgagcccacaggcttctcgagcctcatcagctctgcatacggaatccatttcttgggcaaccgggacacaaacggccccagtccgtccagtctttccttgcgtgccacctccagctccttcggagtgaacactggtgttaactccttcgacgacgacgacgacgacatgaacctctttctaccgatcccgttgattccagcaacaacgactccgccgctgcccacgatcgaccgccctagcaataaactatttctctgccaaacaaacattgctcgaccctacttccctacgaccgacactcccaccatagttcactag

SEQ ID NO: 5151 - DNA, 303 bp, Saccharomyces pastorianus
atgcaatatgaagaaggtgaaagagacatggtcgtactacagcataaattcggcattgaatgggctgacggaactaccgaaaccagaacagctactttagtcgattacgggaaggtcggtggctacagttccatggctgcaaccgtgggttatcctgtggccattgcaactaagtttgtcctagatggtacaatcaaaggtccaggtctaatagcaccatactcgccagagatcaacgacccaatcatgaaggaactaaaggacaagtatggtatttatctaaaggaaaaaacggtggcttaa

SEQ ID NO: 5152 - DNA, 1047 bp, Saccharomyces pastorianus
atgggtaagaacgttttattgctgggatctggttttgttgcgcaaccagtcatcgacacattagcagctagcaatgacattagtgtcaccgtcgcatgcagaacactagccaatgcacaatctttggccaaggcctctggctccaaggctatttctttggacgttaccgatgatgctgctttagataaggttttggctgacaacgatgtcgtcatctcattgattccttatattttccatccaaatgtggtaagaagtgccatcagaactaagaccgacgtcgtcacctcgtcttacatctcccctgcattgaaagaattggaacctgaaatcaataaggcaggtattactgtcatgaacgaaatagggttggaccctggtatcgaccatttgtatgcggtaaagactatagatgaggttcacagagctggtggtaagttgaagtcatttttgtcgtactgtggtgggttgccagctcctgaagattctgataacccattgggatacaagttctcatggtcttctagaggtgtgttattagccttgagaaactcagccaaatactggaaagacggtgagattgagaccatctcttcggaagatttgatggctactgctaaaccttacttcatctaccctggttatgcgtttgtctgttacccaaatagagattctacacttttcaaagagctatatcatattcctgaagctgaaaccgttatcagaggaactttgagattccaaggtttcccggagttcgttaaggctttagttgacatgggtatgttgaaggacgatgctaatgagattttcagtaagccaattgcatggaacgaagctttgaaacaatatttgggtgccaagtctgcttctagagaagatttggttgcctccattgactcaaagaccaactggaaagatgatgaagacagagctagaatcctatctggatttgcttggttaggcttgttctccgatgcaaagaccactccagggagtaaccctctagacactctttgtgggggatcctctagagtcgacctgcag

SEQ ID NO: 5153 - DNA, 477 bp, Saccharomyces pastorianus
atgtcactattagaagaaaaggacacagacgaatcaccaaaggctagaatcttggacaccgagagttatgctgatgcattcgggccaaaatctcaaagaaaaaggcctcgtcttgctgcgtccaatctggaggacttggtcaagactacagatgaggaatttgtcaagtacgaggaaaagcaagtcttagacgccacactggggctcatggggaaacaggaagataaagaagaggggtggacagccactgctaaggaagccattttcagtaagggccaatccaagcgtatttggaatgagctgtacaaagtcatcgattcttctgatgtggtgatacacgtcctggacgcaagagatccattggggacacgttgcaaatccgtggaagagtatatgaagaaggaaacgccgcataaacatttgatttatgtccttaataagtgtgatttggtacccacttgggttgcagtatgttga

SEQ ID NO: 5154 - DNA, 450 bp, Saccharomyces pastorianus
atgaagagaatcttcctgatcgattgtcccggtatcgtgccaccttccactaaagactctgaagaagacattttattcagaggtgtcgtgagagtcgagcacgttactcatccagaacagtacattccaggtgtcttgaagcgttgtcaggtaaagcatctagaaagaacctacgagatctcgggatggaaggatgccacggacttcattgaaattttggcaagaaagcaaggtagactactgaaaggtggtgagcctgacgagtgtagtgtttccaaactaatcctgaacgatttcaacagaggtaagatcccttggttcgttgttccacctgagaaagctgaggatgctaaagctaaggatgctaaagctaaggatgctaaagctaaggatgctaaagctaaggatgaatctaaacccaaggaggtgaaggttgacgagacagcataa

SEQ ID NO: 5155 - DNA, 1599 bp, Saccharomyces pastorianus
atgtcaacctcggaagcgccagaagtcaagttcgacaagcatttcaactggtggtccctactgggcatcgcgttctcattgagttgttcgtgggtcggtatctctgcgtctatggcggtcggtatcgccagtggtggcccgttacttattatctatggtttgataattgctgcattcttcagtctgatgtgcggcatctcgctgggcgattttgcctctatacttccgaacagcagtggtggttcgttctgggttctcaagatgttggaacaggaaccaggaacattgaaaactccagactacgaggacgcttctgacgatgatgaagaggtatttctggaaacctattgccaaacgtgcaacgtcgaaatctcttccagacttcagaaggccacttccatggttgtggggttgttgaactatttcggtgccatttttaccaccgccagtgtttgttcgtcattatcgatgagttgtattggtattcataaactgttgcacccggagtatgaactgaaacactggcatgtatttgtaggttatcagtgcattaatgccactttgacgcttttcaacgtctattcgtctccgttgccttacatctctcagtttgggctttacacatctcttttgtcttttgccatgacatttatcatttgtattgtttcaagatctaataacacagtggacccatggcccaaggcttcgaacgtctttggaaacttcgataatcaaacaggctggaattcctccggtatggcatttgttgtgggcttggtcaatccgatatgggcgtttgtcgggatagattctgctacgcacatgattgacgaagtcggttacagcaaatcgcgtttcttggttcctaaggtcattataaccaccatcgtcgtggggttcataacaagttttatttattgtgtcggtttgtttttctgcatcactgacaaaacggttgtcgtcgaatccattctacccattgtggaaatattttatcaagccacaggtaataggaatctcagcgtgtttttacaatgcatgtgcatcaccacaggttacgttgcaggtatcgctagcggtacctggcaaagtcgaatcttacaatcatttggtaaaagttatgcaccattttataaagaaggttcgctgggaaagaagtcactaaaaaagctggcaactttgacacctgggttcaaatctccattatacgctcactttttgtcgcagatctgtgttacaatcattggctgtatttttatgggatctagcactgcattcaatgcaataatcactgcatgtattaccttgctactcatgtcatatgcagttccttcctttatatttgtctttgttgtcaataaggaaaacttcacctgtagaatcgaaaacgatataaatggtattagccgacctaagactcgccgtatgtcaacgatcccccacattatctgcatcctatggaccttattttgcctaatattcttgtcgtttccatacacgttgccagtcacagcagggaacatgaactacacttcggttgtgtacgcagtagttttctgtattatcagcattgttgtctttcctgcttgcaggcaatga

SEQ ID NO: 5156 - DNA, 1650 bp, Saccharomyces pastorianus
atgctaattgctggtttaattcgttttttggactacactccaataaaaaagttaatcttcaagcaaaaactgatgaattatgtgaggggttatatcacgttaccaacccttttgaaaaagcatgcagaacctttttcatacctaaaagtgtttactggctatattcctactagattcgaaaccctggttattttgggatacctgatactccataccattttcatgtcttacaaatatcagtatgacccttaccacatcattttcccagcccataaagcagaagtggcacgattcgttgcttataggagtggtatactttcatttgcacatataccgctgattatcttatttgcaggaagaaataactttctacaacttatttctggtttgaaacacacttcgtttatcgtattccacaagtggcttggaagaatgatgtttcttgatgccgtgattcactctgccgccttcacaaactactacttgttttataagaaatgggatatggttaaagtaaaaacattctggaaatttggtattgcggctacttgtttagcgggaatgttgattttcttttccattgcagctttgagaagacactgctatgaaacttttatggccctccatatagtattcgctgctatgttcttgtatgcatgttgggagcatgttactagttatagtggcattgagtggatttatgccgcgatagcaatttggggtgtcgacagaatcgcacgtatcgttagaattgccctcttaggttttccaaaggccgacttgcagttagtcggttctgatttgatccgcgttacaatgaataaaccaaagaatttctggaaagcaaaaccgggtcaatatgtgtttgtctctttcttacgccctctgtgcttttggcagtcacatccatttacagttatggattcttgtgtaaaggatgatgaactggtcatcattttgaaggcaaagaagggtgtgacaaaattggtaaagaactatgtggaacgcaaaggcggccgagcttccatgaggttggctatcgaaggcccatatggatccaattcggctgcccatcgctttgataatgtattacttttggcaggtggatcaggtcttcctggtccaattgcccatgctatcgagctaggaaaaacaacagctgcaagcggaaagaattttgttcagctaatagtagcagttagagggtttgatatgctcaacgcgtgtaagcaggaactaatggttttgaaagatctgaatgttcatgttcatatctacaattctaagcaagatgcaactccaggtgtaccaatcagcccaaaagtatccaaaactgacgaaatagtgatagaggacactccctctgttgtcgataattcagagaaagctctttctgagaacgaaaatacggagcaacccctctctgtaagtggcacctccaatgtcgattttgaatttgccactttccatacaggaaggcccaacgttgaagagctgctgaaagaatccgtcactcactctggttcactcgcggtagtgtgttgtggaccacctgtctttgttgacaccgctagagatcaaaccgccagagccgtaattaaaaatccatcaaacgtaattgagtacttggaagaatatcaagcatggtaa

SEQ ID NO: 5157 - DNA, 387 bp, Saccharomyces pastorianus
atgatgtttttgacgtcatttataactatccttctgttcttccggttttccgctgcaaaagcacctcctagtaagacttctctggtaaatacccatgaaagaagatcaatctattcatgttatgtcggtttgcgtaaagagaattgggcatacaatgggtccgctatatatcgctatgagcctgcaattcaatcgatgctatattgtctctacgaagacacgttcgagaaagggtactcaaacaaaactctagagaagggtttcgaagaaatgagacagttttgctacacaccaaaatttctgaatatgactgatgccgaattttatacttcattgaataacggatcacactatattcaagaacaaccaaagccaccgtcaatgtaa

SEQ ID NO: 5158 - DNA, 1935 bp, Saccharomyces pastorianus
atgggaaatttaccgaacaaatctgctgcacccaaagggcccgagccatcaacgctacgcgctaactccgacttcgcaaagaagttaccttttcaagaccgccgcgacttcgaagaggcattgcgcggcttcgttgctacggtacccgatgccctggtgcctggcccaggcaccagcgagcgaccagcgtggagcatgaaaccatttgattttattaaggcaaatgaggccgcggatactgtgaaccctagtttatggagacaagctcaattaaacgcgatccatggcctcttccaggtgactgagcgtatttatcaagtacgcggctttgacatctcgaacatgaccgtgatcgaaggagatacatcgttaatcgttatagatccgctgtttacagtcgagacagctcatgcttcgctagatctttacttccagcatcgcccacggaagccggtcagcacagtgatatacacacatagccactcagaccattttggtggtgtgaagggcgtggttaacgaggcggatgtgattgctggcaaagtaaaaataattgctcccgctggattcatggagagcgcagttgccgaaaatatcttggcaggcaatgcaatgagccgacgctcccagtttcaattcggtatgctgctgcagcccggtgtccgaggactggttgacacaggtttaggaaagacaagtgcccgtgggacaaatacactaatcgctccgaccgtcaccattgacaattccaaagaggaacacactattgacggggtggaatttgttttccagcttgctctgggctcagaagcaccttcggaaatgctcatatatctaccgcagttccgtgtcttggacatggcagaagatgtgacgcactgtatgcacaacctttatactctccggggcgctgagatacgtgacggtaatttgtggtcgaagtacatagacgaggcacgtgtgtccttcggaaataagactgatgtgctcattgcacagcatcactggcccactgttggacgcgaacgcgttaatgatttattaaagaagcatcgtgatacgtataaattcatccatgaccagtcgctgtgcctactaaaccatggctacacagcggaagaaattgcagaaacgcttcgcatgcctgccagccttgagcaagaatggtcaacgcgcggctactacggtacattacaccacaacgccaaggcagtgtaccagaaataccttggctggtacgatgccaatccagcaaatcttaacccattaccacccgtggcatatgcgaagaaaaccatcgagtacatgggtggggctgacgcagtgcttgaccgcgcacgagaggacttcaagagaggcgagtttcgctgggttgcaagtattgcaaaccaagtcgtctatgctgaacctgaaaaccgggaggcccgcgaattaggtgcaaatgcccttgaacagttgggataccaggcggagtcaggtatttggcgttgcgcctatttggtaggtgctatggagctacgtgatggcgtgccggacattccaagcatcaccaaaaacattggcgacttaactaaagcggttagcaacgacttgttgttcgacttcctagctgtacgtcttgatgggaccagggctgaaggcataaattcagtcatcaactggcattttgccgatttgaacgaatatttcgtcatgtcacttgaaaactctgcccttacacacatcatcggtcagcaacaagaagcagacgttagcgtaagactgtaccgaggtacgctcgatgaaatcctgcagaagaaaacaactttcactgaggcggcgagtaacgacaaggcggtgattgatggcgacatctcaaagctcgaagaagtgttttctttgttggatagtttcgaactcatgttccctatagttgaaccaaggaagaaaaattag

SEQ ID NO: 5159 - DNA, 1665 bp, Saccharomyces pastorianus
atgacatacaaagaggaggatactcgcattgaggttgcgaaagatcaaacaaccgtccaaagtgaagataccctttctctaggtcattctgactcatcgatagatcacgtttatgataaagaggaatcgaaacgtaatcctttcttaaatcctgcagtcgaaaagtactactggaacttatatgaatctaccaagtatgagtgtcgtgaaagatttgatcctaacttcgaatggacaaaaaaggaagagaagagtcttttatggaaattggaatggcgcgtaacgctattagcttgctttatgttcgtggctttgcaagtcgaccgaggaaatttggcgcaagcggtagcagataacttactcgacgatttgaatatgaatacaaataactacaataccggcaatactatcttttatttgacattcttgtgcgcagaactaccttcgcagttgatctccaagagattaggtgcggatatttggataccgatccagatgactctatggtctctcgtcgctattgtgcagtgtagactcacaggaaagcattcattttatgcatgcagggcgctactaggccttcttgagggaggttttgttccagatttggtcctttggatgtcctacttctacactgcctcagaattatcaattaggttatcactcttttggaccactttgtcgttgacacagatagccacttcattacttgcttttggtatattgagattgagaggtcgtgggggaatggccgggtggcaatggttgtttttaatcgaaggtctattcactctagtcattggtatagcctcctattttttgatggttccgtctgttgttgaaactaagaaaccgtggaacaagaaaggatggttcacggatagagaggagaccatcattgtcaacaaaatcttgagagatgatcccacaaaaggtgacatgaataatagacagggtattaatctcaagatattatggcaaacaataaccgactattaccaatggcctgtctatttgattggattaatcgcgtatatgccagcgaatgtattaactgcatacttgacattggtattaaagagtattggctttaaaactctgcaagttaacttacttgctatacctcaatatgcactccatatagttctattactcggtattacctatttgacggagaggctaaacaacagattaggactatgtcttttgcagcctttgtatactgtaccgttactagccatcttgcgtttttggaaaggaactatggttgataaatggggaacatatattatcattacattgctcttgggaaatccatatatacatgctatttgtgtttcgatgtgttccaggaattcacactcaataaaaacaagaacagtctctgcttcattatacaacatgtttgttcaagccggtctgataatatcttcgaacatttaccaacaaagtgataaaccgctatatcgcaagggtaattcggttttgtttggcctttctctcgccatgtttcctttattgattggaagtaagtttttctatatacatatcaaccgtaagagagataaaatttggaacgcaatgtctgaagaagaaagggagcattatatgaatgtaactacggatacaggttcacgtagattagactttaggtttactcattga

SEQ ID NO: 5160 - DNA, 2127 bp, Saccharomyces pastorianus
atgagaacatcacacagataccacactagctctactgcaatgaaagatcagaaacctgagaaacagaagattaagaatgttaaacaagaaagacgcaaaaagtacgcagatttggctatccaaggtacaaataactcctcgattgcttccaaaagatctgtagaattattgtatttacctaaattaacttcagccaataattttcaaatgaacaaggataacaaattgctggaatactttaagttttttgttccaaagaaaatcaaaagatcaccttgtatcaacaggggctactggttaagattatttgcgattagatcaagattaaattccatcatggaacaattaccacaaaataaaaaagtagtcataattaacctcgggtgtgggtacgatccattaccatttcagctactagacactagtaacgttcacagtcagcggtatcatgaccgtgtttcttttttagatgttgattattctgatttactgaaatttaaaattgagctaatcaagtcgatacctgaacttgctaagatcattggtcttaccgaggataatgactatattgatactacaaattcggatgttctaaccacatccaactatcatgccagaccgtgtgatttgaacgattctgcaatgtttagcgcattactaaatgaatgtcaattgaacgactcgaatatcattaaagtgtttatcgctgaagtttcactggcatacatgaaaccggaccgttcggatagtatcattgatgcatgttctaagatggaaaatagtcattttgttattctcgagcaactaattccaaaggggccatttgaaccattttctaagcaaatgctggcgcatttcaagagaaacgattctcccttacaatctgtattgacctataatactattgactcgcaagttgaaagatttaataggctaggttttccctacgttaatgtgggagatatgtttcaactgtgggaaagtgcagatgaaatgaccaaaaaggaacttttagaagtagaaccgtttgacgaactagaagagtttcatttgttttgccatcattacgtcttatgccatgctacaaacaatagaaagtttacttttactcaagagtttgaatttgacagaccaatctccgagactgggttagttgtagatcgaaaatatcagctcttagaatatgaatgcccgatcgataggagatttggcgatgcagctatttgtggaaatgatatattttatgtgggaggcagtaacccatacagggtaaacgaaatattgcaattaagtatctctcacgataaaatgaatgtgcaaattattgaacccagaagcaatgaacttcccatagcaagaatgtgtcatactttgacatccttttgcggtggtagccagctactactcgttggtggtagaaaggcccctcatcaaggcctttctgataactggatatttgatacaaagacaaatgaatggttaatggttcagaagctacaacatacaagatttagacatagtgcatgcaacttatctgatgatagtgtcctgatctttggtggtgctacagacggaccggctatgctacgctacgatgtcactgaacaagcctttcaagacataacaccaaaaaacacgttcttcgaaaactcgctagtatcagcagggttggcgtttaatcctgtatccaaacaaggtgtcatattgggcggtggattcaaggatcagacgactgtttcagacaaagcagttgtatataaatacgatgcagaaaatgccacagagccaattactgtagttaaagagattcagcacccattactacaacgctatggctccaaaatcaaatatctttcttcagaaaagctgctgatagtgggcggaacgagtccttcaagactatttgaccacactaactccataatcacccttgatcttcagaatgagacggtaaagtctattcctatcccaatacacatttgggaggatcattccttaatgcttagcggatttaacttagtctccgcagcagaagacattgttcacattataggaggtggtgccacctgctacgggtttggttcagtaactaacgtgggtctcaagcttgtagaaaatggcaattga

SEQ ID NO: 5161 - DNA, 2904 bp, Saccharomyces pastorianus
atgaacgcccatacaggacctggcctttgcctaaactggcatcctcatcaagaatacattgctacaggtggtcgagatggaaaatgctgtctttggtatgttggtgataatgtcaataccagtgaaaatacagtggttaattacggatattcgccctcattgcacacaccaaatacaaccatgaataacaatagttcgttggcatttcctaaactaacaatcaacacagggtatccagttaccaaattaaaattcagacctacctatagtaagaacatatacaactcactattaggagtatcgtcaatgggtgacgaagcagaagtttgcgtttattccttagcaaggaagtacattcctagacatatccttttatcaggaacaccctcgctgggattagtgtggtgggatgataacttggtcttcaatattgataaggggactcgcattaatggttgggacattaacaaagagccaacggtgcttgaaaacttgagcaagaatacgaccacctggagagatttagacggaaatggattactctcggttgatcaagaagtgggctcatacgagctgccagaaccagagactaaaaccattccaaacaatacaagcaaaaagcatccaggtgcaataaaaaatacgaaaaatggcaattcggagggccagggcataataggaggaatcaaaaaaggttttagtcatacaggactaacaagctttgcaccagaaagaccacccactttaaaagcaggtccaacattcagtacaaagagtttaatgacaataacctctgcggcatcttctttcaatagctcttccgcatcattaacatctttaacaccacaatctgaaaatcaagaggaagttgccattgaaccgccttatatcatcactttagatataccccagattttcaataatttaagattaaccaaaatggatcatttgaaaaaaaaagacgcaactattgaaaggttttctgttagggattcaccagtaaacacttttaaatttctggctcggcagctcaaattttcatatgttcaagaccagaatggtgcagatgatgttaatgttgtatacaaacgtgatgagaaaaatgttaataatgataagaaagtgattggtgggcacgatgatgatgacgacgacgacgataaaataatcgagactcatttgttgaaaaagtataatttttcagaaaataatacgtgggccactctaatgaatgaaaaaagcagcaaaaaacaatccaagagaaactccaaaggctccaaggatttcgatgagaaggataccagatcaagtatatcttccatttccaccaataaacgcaatcctggcaaaatcagaaagattaacaagaacttagaagcagagctccagaagaaaatgcagacgtttctagatctaatatctattgcaacccacaatgcatcagtttatttgtcaataaatgatctacccaattttaaggtttggattctaataagagattctttgctttgggacttgaagtggatgacttcctctccagtatcatccgatgaagcatctaatatagatacaaacgaaagctctgattttgaatcaggggggaatccaagagctggaaaaaggtctcctgaggaagatagagaaggaacaagtggagcagattctctaatagaagaaagaccacaagcatttcaagctagttctgaggaaccaagtgatactgaaaaaaaaccaatctctaaacttggagagcagttgaaaaacacagaaagaatcacatatacacaaccaaatgaggaatccgatgaggtgttaagtagattgaaagaactacaaagccaactttcagagtctcacgggattatgggcgaggcaacaaatgacgatgccattatcgaggaagatgaggaagaggaggccgaacaagaagctgatcaagaacaggcgtatgacccattgataaaatcaacccgcacccatgcgtcgtctactgccaaaagtataccgatcctacagaagcgagaacaccgtaaatctttcatagatacgttcatgctacattctcccaacggctacaatgcagatactgacatgggaaatgacgacgataacatatctcccaggtttgtttacaacagtgtaagcccacgtagtaaagtgtcatcgttgcaaagcttcaccacgacaacctcccaactgggagctttcaaaaaactgtcttctcaaactgcaccagtgatcgggtcgcccgttcgcacgctgtcacaaccagatggtgttgacaggcaacaaccgtcttcctcattaacagaaaaactcgccaaatgtagacagatggcggacaacccgccttgggatactaaaaaactcatcaagcaactatacaaacaagccacagacactgggaatgtcgtgctaacagtgaatattcttttccttttccaaacgatatatcacgttacagaaatcgaaatcgcaaaggacgcaatttcacattttctgctgctgctccatagatatgagctgtttggaatcgctgcagacgtcttgaaatactgccccttcgaggatatcatgggatctgaaggtgatcagtcttccattagactctactgcgaacaatgcggcgagttaatcacgaacgaaagctccaaggacaaatttagagcggaagtgcagcagacaaacaacaagaaggtaatggaaaagttcggatactggtattgcgactcctgcaagaagaagaattcgctctgtgtcctgtgtgaaagacctttgaagaaactaaccatggttctacttccctgtggacacgagggacatttccagtgcatacaagaatggtttctcaacgagaaggaacgcgaatgtccgggcggctgtcccggtgttgcattcatctga

SEQ ID NO: 5162 - DNA, 1101 bp, Saccharomyces pastorianus
atgagctcgtctccccacatggagaatgcttcaatccttaagggaggtacctctataccaaaaaacaaaaatgtctctttgggcaagaacgagttacttggatcttcgtcaagcaacaattcgtcctttcgagtgcaccattattcgaatagtagtcagacacccacattggactctatacggagaactaacctaactcccactttctcttacagtaacgggatttatatgtctgaaagtcatgcacacagaacaagttcattcaacgataactacttggcctatgataagagtccctatgcaaagaaaacgagaagtgcgaacaacaagtcaaacatgaaggttaaaacaaaaactaattttaatattacaacgactacaaggaattcttccggactcatatacaccaccaaagtggataaggaattatccagtatagacaaagtgaatgatccgaacatcaatggtcttgtgtgtgcaggaaaaacacatttaggattctatcaattttcgccaaccgataggtctattaagtgtgtacatgatttcataagacctaataataatacatcaacaaagttgggaacgtccctactacccaaattaagcaagagaacaaggcagaataaatttagcacaattgcagatgtgaaaacggggttcaataattacaaaaactgtatcgcagtgtgtaacaattctacggcgatatctatatacgatctcaacaagagctcttcattagataatcctttgataacatctctatgtgaacatacaagatcaatcaatagttttgactttaatatggtagaatcaaaccttataattagtggtgggcaagacagttgcgtcaaaatatgggatttacgttctaataattccaaaagctcaaatcgatctgatatcaatataaacacagcgtctgattcaatcagagatgtgaaatggatgcctggttacaactttgcatctaagaatgaacagggttcatcgacgtacggcaattctaaaagcggttacaaatttgcatccatacatgactcagggtatctattgaagttggatcttcgtcaacctgctcaatatgaaaaaaaatga

SEQ ID NO: 5163 - DNA, 351 bp, Saccharomyces pastorianus
atggacgaattcaaccaaatccaccaatatatcaatcagcacgaagaaatcgatgccagcttgtttttcttcaacgttatcaatgttggtatcgtagaaccacattctttaaaccatagtcactacccttccacctgtggaagacaaattcgagacactattatggtcgttgaaaactttatcaaccactattcgcaaatgtttggttttgaatacatcgagtccgttaagctgtttttcgagaaattcgaagataaccatgaagaaactctagctgcattggattctgtagtcaatgatgaatttttcaacgatttacaagaattgattgaaaataatggattctcttga

SEQ ID NO: 5164 - DNA, 960 bp, Saccharomyces pastorianus
atgtgtggttcttctgattcggactctcacgatgggtacctgacctccgattataattcctcgaattctcttttttcactaaacaatggctacagctattcgagtgcgtctctcgacagagcgacttttgactgccaagactctgatcttcttggaaatcataagcatccaatgctgtctacagaggtaccgcgttttatttctaacgacgcgttacactctcccattacgttgaactacaaaagggacaatgacgatgttacgtatacgaacgcgaaagtaaataaattcatgattgttctgattggcctacctgctaccgggaagtccacgatttcttcccatctgattcagtgtttgaagaacaacccattgactaattctctacgttgcaaagttttcaatgcgggaaagataagaaggcagatcagctgcgccaccatttcgaaacctctgcttttagcaaatacgtcttcagaggacctgttcaatccgaaaaatactgacaagaaggaagcgtatgccagaatcactttacaaaaactgtttcacgagatcaacaacgatgattgtgacgtcgggattttcgatgccacaaactctaccattgagagaagaagattcatattcgaagaagtttgctcgttcaatacagacgaactctctacttttaacctcgtgcccatagtcttgcagatatcatgttttaatagggactttatcaaatacaatatccacaacaagtcgtttaacgaggactacttggacaaccatatgactagccataaggatttagcgaagagattgaaacaactactactcccaatttacacctttctccatggacgaattcaaccaaatccaccaatatatcaatcagcacgaagaaatcgatgccagcttgtttttcttcaacgttatcaatgttggtatcgtagaaccacattctttaaaccatag

SEQ ID NO: 5165 - DNA, 213 bp, Saccharomyces pastorianus
atgaagaaggttgaagatggtaacattttggttttccaagtttccatgaaagctaacaaataccaaatcaagaaggccgtcaaggaattatacgaagttgatgtattgactgtcaacactttggttagaccaaacggtaccaagaaggcttacgttagattgactgctgacttcgatgctttggacattgctaacagaatcggttacatttaa

SEQ ID NO: 5166 - DNA, 303 bp, Saccharomyces pastorianus
atgccaccacaagactctgaaggttggttctacaagcgtgctgcttctgttgccagacacatctacatgagaaagcaagtcggtgttggtaaattgaacaaaatgtacggtggtgccaagagcagaggtgtcagaccattcaagcacattgatgcttccggttccatcaacagaagagttttgcaagctttggaaaagatcggtattgtcgaaatctctccaaagggtggtagaagaatctccgagaatggtcaaagagatttggatcgtattgccgctcaaactttggaagaagacgaataa

SEQ ID NO: 5167 - DNA, 99 bp, Saccharomyces pastorianus
atgggtccacacaaaggtaaggccccaagaatccaatctaccggtagaaagttcgaaagagccagaggtagaagaagatctaagggtttcaaggtgtaa

SEQ ID NO: 5168 - DNA, 192 bp, Saccharomyces pastorianus
atgggtatcgatcacacttccaagcaacacaagagatctggtcacagaactgctccaaagtctgacaatgtctacttgaaattgttagtcaaattatacactttcttagctcgtatgttaaagaatattatgaatggccccagccaacatccatttctggttagaaggattctgttacacaaggtacaatag

SEQ ID NO: 5169 - DNA, 1971 bp, Saccharomyces pastorianus
atgagtgtagtgccaaaaccgaaacgttcttcggcctctacaatgtctgacgaagatgacaattatgacgatttcatgttatccgacgaccaaggcatggaatccattgaaatggaggaagaaactgatgacgaagacgaaaaaatgatccggctggacgagcagcaggaccaaaaccaagaaggcgagcaatataaacagcttatgcaggatacagtgggtaaggtcgacaaagaatgggatgcttgtaaagtactttttgaacggggccaaagtttcaaagaggacgaacaatacaaagaagctcgcgactcatttctaaaaatatattatagggaagaatttttgggtgatgaaagtattgacgtacttttgatatggaaattcaaatcattgaatgaaatactacgcttaggagcaccaagcttccaatttcaaagcaatggtacacaagacttggccctccaagttctagaggatacagcaaccatgtcagattttttacaaagaattgatttccaaatcgatgaaaaaatatttgaatcactttcagacacctttgagacactggcgcccaattgggaaagagtatttttatttgacgttgaaaaggttgacaaacaaaatatgatctgcaaaatagagttccaaaaaagcctcatggatcagtttcaatggatattaaaaaaatctgacaaaaatgataaattaaaaaaacttcagtgtatcatcagaaagaaattgcttattgcagttatttggcatcgaagattgactatgggggatatctttattcctgaagtttatttccaaatacaaaatctcgtatgcgatatgggatctgcttcttttgaggaggtgaatgatccagaaagtatttcaatactgctacagtactatatactggaatttatgaaaaacgcacggataaaaaatagaaacttgttcaagaagtgtattgactactttgacctgacgacatcaaaatcgcttactttctcccaacaaccaggatcaatggtaatattatatacttccaaggcagtttggattttagactcagattcagaaaacgatttatcctttgcattgatgaaatattatgaccggaaagaagaactgaaaaacatgtttctccagattttaaagcatttggaagagatggggaagttccgagaaagagatattgcttctttgtttcacaagtttgtgctcagcggctttatatttaccagcatgattttagaagcgataagtgctgataaaatcaatccctttgattttgaacaggtaaagattgccctaggcagcccaattgttcatgtattacaaactatctacaaatgtttcgcagaattggatttaagacaactaaatgcaaatatatctcgtattccagaattgtctattataatgaagaaaattattcaggatatttattatttagcccagacactaaaactatcgagaaaaattgcacagctttactcttgcatctcaataaatgacattattgatatgttacaagtaaacgagaataacgagatgacgagagacgatttattaacaattttaatgcgatcgataatgaaagacagatcagttttgtatttcaagctggacttgaccagcgatttggtttatttcggtaatgaaaacaaagtcatgttaccgagatgttccaaagaggaaattcgtttaacaagtacgtcaaaagaggatgggcctacgaaaaatgccaaactcatagatttcgaatatgtcaacgacgtcggaatttacaacaacccaacaaggataaagactaaatcttctaaagagttttttaatacattaagaaaatctagggaaattgttagattacctaaagtcagcaatcagtcaaatgagggggtatttttaccatcgtatatgagatttgccaccaaatacctggaattgactaaattatcctccaccaacctctcttag

SEQ ID NO: 5170 - DNA, 963 bp, Saccharomyces pastorianus
atgtatgatagattgaaggaagattgtcgtgcgggcgctgtgtctgggaaggatatggaagctatagagagagatatttatcgaactttccccgataacattcatttccacaaggaatcttttcagaggggggagcccgcgatgatccagtcgctacgtcgagtcttgatggcgttctctgtttatgacggggccatcggatactgccaatcgatgaattttcttgtgggcttgctgctattgttcatggacgaagagaagacattttggatgttggttataatcactggcaagtatttacctggagtgtatgaatccgatctggagggcgcgaacgtggatcaaggggtgctagtgctatgcatcaaggaatacttacctgaaatatggtcgcacatagaatcatcgtacataaacggcaacggcagtacgcgccagataccaaggccgaatccggaggagcagtatcttagtagattgcctacgctgactttatgtacagcaagttggtttatgagctgttttgtcggggtagtgcccattgagacgacgctgagaatatgggactgtttgttttacgaagagtcgcatttcttattcaaagtagcgctaggaatattgaaattaagcgaaagcgagtttttggagagcaaaagccaaaaactgttcaggcaatactcttcgtacacgtttggaggtggcaatgatgcagactcgagtttcaaaaggctgaaaaataagatcaagacacaggaggaggcggatatggagattttgcaggttattcagaactttcccaagcgtctgctgaacccgaacgaaatcttcgagaagatattgatgaagaagaagatttcattaaatagcattaatcaagagacaatcgatcgcggcagggagtatgtggcgatggagaggaacagacaaaggacgagtagccgcccaaaggggaaaaggaactaa

SEQ ID NO: 5171 - DNA, 177 bp, Saccharomyces pastorianus
atggcatatcccgagacttgtgatagatatggatttagtaagaaaagctattttatactacaggaagaatatgataaatggttggttgaatacagtagatacagcgagagaaggaaaaaaaatgggagaaccttttatcgaagaataaaatcaacctcaacaatgataacccgctaa

SEQ ID NO: 5172 - DNA, 780 bp, Saccharomyces pastorianus
atgtcaagttcttcgtctagcagtacatcatcagctccaaaaacgaccacgagcgcatcatcgggagtatcaataataacgtcgttcgaactaataacgagtatggttacaaataccattgtgagtacttctggcgaacaccaagaaacgatatttgttacgactacctctgtaatcgaaaggacgtctgcagtagctacggcagactcttcaattaacaaatccaattcgaactacaaaaagggcctaagcggtggagcaatcgctggtgttgtcatcggtgtagtgtttggtgtgatttttactatagcgattctgcttttcttagtatggagaagacgtaaatcggatgatccgttagacctggaagaaacaaaacatcatcagccttattcatttggcgacgaagatgccaatccagtaagacttcttccgtcatctggtacaactaattggatgagacatacgaggcgtgatacttcaggttctatcggcacgagcaatatgtacggtttatccatgaataacggtgggaattatagtagtcccagttcaaataatagtggaagtgtcctgaataacttagctggattgcaagacggagccgttcagaggcaaaatcttccgtcaacagttttcgaagagacaaatacactgaatagtgtgaatgaaaggtttagtgccaactcattacctgatatgatgatgagcgggcctttacaagtggtgaatccagataatcctgaattgactagtaccgcatcacataatcgagcgtag

SEQ ID NO: 5173 - DNA, 531 bp, Saccharomyces pastorianus
  modified_base (519)..(519): a, c, g, t, unknown, or other
atgcaaagagcatgcttctcaaatttgacaaatagaggaatttttaagttcagctatatccaatttatacttttaagtgttctatctcaatatcttttaaggctagtcagtgctgacttcaactatgaaggctgctataatgcagaggatgttcagtctgctggactatctctcaaaaactcatatctatatcaatcagtgtcctactgtcaaaatcaatgtcctgattctgctgtagtggcactgtttgatggatcagactgttattgcggagattctgtaactgtcttaagttctctaacaaaatctacagattcaaattgtgaaactaaatgttctggatggccataccaaatgtgtggcggttcatcctatatgaacgtttatgtcaatgctaaagtttctgtttcctccgttgaatcttcatctactacagaagcgtccaccatcccctatataacctcaacgactcgctcgagcacgttaaagtcacatcttcagccactgaaagatcgacgnccgattgccagc

SEQ ID NO: 5174 - DNA, 417 bp, Saccharomyces pastorianus
atgactttcataggactagcagcatattttgttatattgaccgataaactcaactcctacaaaagatttaataagacagttttctttatttcagtgtcggtagtttgttgttccttgccgctattaaccgctatcatcacgtttgatggactagaaaatctaaaagatagaataaaactaaacgcaatcacttgggaacttgtaacgctggtggtggcgtcaatgatctatgtgacaagatttcctgaatcgttgttcagacgaaatgaaaagggggaaggttggaaccattccgaatatctcttccacctccttatatccggtactgctttttatcacttctttatcttgattcaatcctatattttgatgcattcaagtttgaatcaacctgaactaattaatttcaagtcttaa

SEQ ID NO: 5175 - DNA, 270 bp, Saccharomyces pastorianus
atgtacagcatggcctctttgacgacagtagaacgaagcccagtcaagacggcaacggaaaagtatagcgatgcgtctggagaggttacttccaatacggatgcggaaacgaaagagactaagaagggatttgcgttccaggatttggccaaatggcaaaagcagtataaaaataaatccagcaggagtgagtcgctggtagcgttgatatatcttctgggctcgatgtcatccttgtctgctcatattcttctcggctttacttgggat

SEQ ID NO: 5176 - DNA, 387 bp, Saccharomyces pastorianus
atggtttggaatatttatgtacctataatcagaattaattattatgatctcttcgattttgcagatgagttgtttgagtttgcacctgtgttaagacccaatcccaaggcaacatgcgttttgggcaacccgttaaccaatttacttgttaacgggatagtggcgtgtttctttgaattttgttccttagcactaacgaaagtttcaaagattctactagatctgttcgtcttcgcactattcaccgattccgaaaatgaatcatgctttgatatagatgatgattggctgtgcggcctaggttttggagaggcaggttttgaagacggcgagtctataggtaacactctcccagatgatgacgttcttctttctgttattttttga

SEQ ID NO: 5177 - DNA, 867 bp, Saccharomyces pastorianus
atgtcagatgagaaaatagaccaaacagaagaggtggtgaaaagaacaccacctttgccaccggtgccggaaggtttgtccaaaaagcaatggaagaaaatatgtaaaagacaaaggtgggaggataacaaagtgaaatataatacggaacgtcgtgtgaagaggaagaggctacgtcacgagagaagtgcgaagatccaagagtacattgacaagggagaagaagtcccacgggagttggttagagagcctcgggtcaatgtaaaccaagtcgattctgggatcgagatcatactcgactgttcctttgacgaactgatgaacgacaaggaaatagtcagtttgtcgaatcaggtcacaagggcatattccgccaacagaagagcggatcatttcgcggaaattaaagtggcgcctttcgataaaagactaaagaaaagatttgaaaccgctctgcacgatacgaattacgacaactggaaccacttcaaattcctaccagacgacaaaattatgtttgaagacgagcacgtaagcaaggacaaaatagtgtacttaactgccgacacagacgagaaactagataggctggaaccgggcatgaggtacatcgttgggggtattgtagataagaaccgctataaggagttgtgtctcaaaaaagcccaaaagctaggcatcccaacgcggagactgcctatcgacgagtatatcaacctggagggtagaagggtgctgaccacgacgcacgtggtgcagctcatgctgaaatactttgatggccatgactggaagaacgcttttgaaagcgttttaccggccagaaagctagaggcagaaacagcatccacgaccgacgacgcataa

SEQ ID NO: 5178 - DNA, 744 bp, Saccharomyces pastorianus
atgggtgccgttctgcagaatttgctatctaccatgatcattcttgccgcgtactataccgtggccgatgtcattttacttggtcaatgtctatggtacgacaatgaggaaaaaccggcagtggaccctattcatctttctcctgctaacccaatgaacgaaaatgttttgcacgacgtcttcaacgaacagcagccgctgttgaacacgcaaggccaggcaaatcacattgatgaagaaatggctactccttcgtccaatggagacgttgctggtgacgatttgcgtaaagctaattcaagaaatttcgtgaaggacgtctgtattgttgcaggagtggttttcgtgggtgttgtatcatggtacgtgacctactgcttaaactacacgcagtctcctcccgtggaaaacctacctttgcccgttcccgaattagaaatcaactggttggcacaaatctttggctatctaagcgctatgttgtacttaggttcaagaatccctcaaatactactgaacttcaaaagaaagtcttgcgaaggtatcagcttcttgttttttctgtttgcctgcttgggtaacataacgtttattttctccgttgttgtcatctctctagactggaagtacttgattttgaacgcttcctggttggttggaagtataggcactctgttcatggatttcgtcatcttttcccagtttttcatttacaaagggaataaaagatttatactaaattaa

SEQ ID NO: 5179 - DNA, 1143 bp, Saccharomyces pastorianus
atggtttcatttcttgttagtatttcctctcttaattcttattcatttcctgtctcttatattgtaccaagcatacaatcaactatctcatatacaatgtctatcccaaaaactcaaaaaggtgttatcttctacgaatcccacggtaagttggaatacaaagatattccagtcccaaccccaaaggccaacgaattgttgatcaacgtcaagtactccggtgtctgtcacactgacttgcacgcttggcacggtgactggcctttgccagtcaagctaccattagttggtggtcacgaaggtgccggtgtcgttgtcgccatgggtgaaaacgtcaagggctggaacatcggtgactacgccggtattaagtggttgaacggttcttgtatggcctgtgaatactgtgaattgggtaacgaatccaactgtcctcacgctgacttgtctggttacacccacgacggttctttccaacaatacgctaccgctgactccgtccaagccgctcacattccaaagggtactgacttggctgaatgtgctccagtcttgtgtgctggtatcactgtctacaaggctttgaagtccgctaacttgtctgccggccaatgggttgccatttccggtgctgctggtggtctaggttctttggctgtccaatacgccaaggccatgggttacagagtcgtcggtattgacggtggtgaaggtaaggaagaattattcagatccattggtggtgaagttttcatcgatttcactactgaaaaggacattgtcggtgccgtcatcaaggccactgacggtggtgctcacggtatcattaacgtttccgtttccgaagccgccatcgaagcttctaccagatactgtagagctaacggtaccactgttttggtcggtatgccagccggtgctaagtgttgttctgatgtcttcaaccaagtcgtcaagtccatctccattgtcggttcttacgtcggtaacagagctgacaccagagaagctttggacttcttcgccagaggtttggtcaagtctccaatcaaggttgtcggtttgtctaccttgccagaaatttacgaaaagatggaaaagggtcaaatcgtcggtagatacgttgttgacacttctaaataa

SEQ ID NO: 5180 - DNA, 840 bp, Saccharomyces pastorianus
atgtcacgcaaatgcttaaatgctataactcagcaactttccatactcgaagaatttttaaacaagacacaaaatcaggaagctgggccaagcgaagtacacggaaggaaatgcgttgtgttacctgacgatgattttgaacccatggagtttttctctcatctaaaaactaatgcgcaattacgagatgttcacgaagcttataaggcatatgggaagcttctaaggaaatttgatggccgaaaggagcgagtggatgaatttctaaaagacagtaccccattgcccgaggctgaagatgcgaaacaggtaactctatctgagacggcggaagtagacaataaagggccaggaaatccaaacgatcgcacgttgcacgttgaagtgagccatgaagacaattcactccatttcacaatatataacaacacaacttcaacagtgccagggaattgcacatttgagttttctaactcagcctctgaggttttcagcgtccaaatgggaccacatgaaataggtatggatggacgaaaggaattgtggcatttccctgctcttcccactccgcttatcggttactctgtcaacatcataaatatagcgggagaaattattttttctggtaaatgcactgactcaagtgaggcgatcttagaactatcgccatcaacacactcagtgggcagtttccatactttacaagaccccgataatgtcttccgcgtagacgcgctttcttcatttgatgaatcaagtattatgagcacttccttttcagacgaagaggataattcaggggtttcattagaaagggcatttacttgggaagaaatatag

SEQ ID NO: 5181 - DNA, 318 bp, Saccharomyces pastorianus
atgagaattttagtagaaacgaaaacgttcgagttcgctgttatcgaccaatacaacaaatcaacttactcggcagcaaatacaaaggccaaaacaatcaagagctgtattgataaatttatcgaccagtttaatttatatgatgagcagcatgtattttggcaaccagcagaaaaaaagaacgctcgattgctaataaataacaatgactacggtcagttaggggaccatcctacatcgccaagtaaaatgcaacattatcgttggcgaagaagcactaaagaagtatgggttgaccgtatgcgcgccttacgatga

SEQ ID NO: 5182 - DNA, 1269 bp, Saccharomyces pastorianus
atgaccacaccaaagggccacctgttaaccgtttgcgatgaacacaataggctcaacctaatcatgcccagtttggatgcggatgccatctttgagtgcatggggcagtgttcaatgttgaatgatgccaccagaagcaagcacttgttttggcaaccgagcaataagtccaatgttcgaatattactgaacggtcaagactacggtcacttgttcaagcatttgcagtctcagatacattgcactatttatataggggaagaaacactaaaaaagtatgggttgactattactacgtactttgacaacttcttagacaagcgggtttctggagagaaagaaaactcgagtatagtatataatcacgaaacggccacatcgtccgaggccaagtcgtccgaggctacaaccacagagtctactgcaggtgtgatagtaccacgtgaatgtttaaacagcttcacagaacaactatcaagactggaagaatctctgaataaaatggaacttgagcaaaaggcaacaaccaccaccatccttgcaagcggggaacctgactacaaaataagcggcacgatagacataccagaagataaacccgaactggtacatttcttcacgcaattgaaaacagtcaagcaactagaagatgttttccaacgttatcatagttataagaacttactagacactttcggcggcaagatggaaaacattaacaactttctgcaacaagagactgtgatctgccaggatcccgagccccgaagtgatcgctcactacaagtgacaatgaaccatcgggacagttctttatacttccaactgtacaataacacgacttccatactggcgggcaattgcaaattcaacttcaccgggggtgaccatactcccgtcacacgcaccatcgatatgggcccacatgaaataggcataaaggaacgcaaggaattccgctacttcccgtacacacctgaactaatgaccgcttccaccatcgaaatagaaaatgagtacggagaagttatctttgtaggcaagcgaggcccgtcaccaagagtagatctaaaaccgcccacccgattgtcggcggagagtttacaggcctcccaagagcccttctacgacttccgaatcggcagactaccggaactggatgactccagcatcataagcacatccatatctctgtcttgtgacgacgaagacgatgagaatcgtacaatttccaccttcggtaaagtcctcacctgggaagaactgtag

SEQ ID NO: 5183 - DNA, 3375 bp, Saccharomyces pastorianus
atggacggtgtcagtatacttcctgaattagagtctccgccgatttccaaggatttcatggaaaactatgccacattagggaaaatgagaattacgagagaaagtgaaggccaaaaaggaaacactagccagaacttaatacgagagaggaaaattgaagacgacgagggaaacaaaataagtcaacaggacaaaagcgcaaaaaatactttaatagtcgaggagaacggaacgcttcgttataacccacaaaattcatcaacatcgaattcgcttttagttggtgatgacgaaactaatgataagcgccataagatgagctccaaggagggttcgtattcaaatagctcaatggagctacaaaaaaaatctagtaagaggtcatcattaccttttgtaagaatatttaaaagtcgaagggaccattccaatacttctggaagtaagaatgctgtcaactcgacgaacacaagaacaagaacgtcaaccttgcactcacctagtcaacgccataacaagaaaggcagcaaatttgatatgaattttgactttgatgaaaacttagaagaagaagatgacgacgacgatgacgacgaggaaggcgatgatatacactcgcaattttttcaattacacgacgattttgatacagaaagtgctggtcccagttcaattcacaaagactccaatggcacgtccaacaataacagcaacacttacaccaataacaagaatagcctcagtattcttgatgaccgagagagtcctgacggtacttcaggaagtgcttcaagattaaggtcgcattttcctgcgagtcaaaaaggaaaactgtttttaactgaaagcaaaaatgatgggccaaagtctgactcactaaacgtgagcaagggtacaaacggagatggaggcaccaatagaggcaatggattagatggaagggacggttcaacagaaacccaaagtaacgatatttcggatatggaatcatacattaatgagaaagacttagatgatttaaattttgacacagtcacctcaaatataaacaaaacagtatccgatctggggggacatgaatcagcaaatgaggaatctgcaaacgtaaacgcagattcacaaggcaatcacgctgatggaggtgaacgtggttctcaaagcctcgctggaatatctcctggctcatcatacgggaagtctcttttagggtctgaatattccggggaacaatatttgaataacgagacatcaactatagagagcggcgaaatgtctctcgattcagatgtacaaaccaatactttaccttcacattctataccaatgtccatgcaaaaatatgggatttatcatggcgatgatgattccacattgaataatgtatttgatagagctgtactgactatgaaatcatcaagaactcccaaagaaaggcgtgatacggttgcatcggttaaagaaccgacatccttggccagctccaataggaagttatctgttagctcgaacttaacctctacgaaatcctcacttcttcgtggacatggaagaacttcatcaacgaccagcagtgagcacatgaaagtcccaaagttttctgatggtggatcacataggcccagaaaaattaccttgacattgaagcaagaccatacccaatctaacctttcttccaatgcccacaagatttcaaaagacgggaacattgttattgaaaggaccacagactatctagaatccaagccaaaagcatcccagttatcaaacttgttcagtaaaaaaaagaaaagaacaaacaccaattctacggatgtgttggaatatttttcttttgtctgtggggataaagtgccaaattacgagtccatgggtctcgaaatatatattcaagcttcaaaaaagtataaacgacattctttcaccacaaaagtccggaaatcgtccacgatctttgaggtcattggattcgctttatttctgtactctactgagaacaaacctgataatttcgaacaagatggattgaccgtcgaagatatttccaatccaaataatttttccttaaaaattgtggatgaagacggtgaaccatttgaagataattttggtaaactggataggaagagtaccattcagtctatttcagacagtgaggttgtgctgtgtaaagttagtgacatagagaaatctcgcaatgaaatcgagacgcctttgccgtttgatattggtggtggcgtgattgatgcacctactctggacattaatagcactcatgatacgtccgacggtaccattaatcagttgagtttctacaaacctataattggtaacgaagacgatgtagataaggcgaatggctccaaggtcattgaggtaacagtatatctgtatcctaatgtgaatcccaagttcaattacaccactattagtgttttggtgacttcacggatcaatgatatcttggtaaagtattgtaaaatgaagaacatggatcctaacgaatatgcactaaaggtgctaggcaagaactatacactagatttgaatgatacagtgttgagactcgatggtattaataaagtagagctcatttctaaaaaggacgtaagggaattgcatttggaaaagatgaaaccaaacataaaaaagcctgttttgccaacaatccagagcaatgacttaactccgttgactttagagcctctgaattcatatttgaaagcagatgctggaggagccgtggctggagtcactgagaatgcgaaaaccgcatcaaagcctaagaggatttccgcgaagtacaaactgggtttagcaaagcaacattcatcgtcaagcgttgctagtggaaacggctcaactgcagggggtctagtgaatggtaatggattcttcaagaacaagaattcatcaaaatcttcattgcatgggacattacagtttcaccacttaaaccgctcacagagcacgatggagcacacacctgatacgcccactggggttggggataacaactaccaagacctatttaccggggcataccataagtacaaggtatggagaagacaacaaatgtcctttataaataagcatgaaagaacactagcaattgatggtgactacatctacattgtaccaccagagggccgtatacactggcacgataatgtgaagaccaagtcattacatattagtcaagtggttcttgttaaaaaatccaaaagagtcccagagcatttcaaaattttcgtgagaagagagggacaggatgacattaagaggtactactttgaggcggtgtccggccaagagtgtaccgagatcgtgactagactacaaaacttattaagcgcttatagaatgaatcacaagtga

SEQ ID NO: 5184 - DNA, 1641 bp, Saccharomyces pastorianus
atgatgtttattattcttagtgttattgtttgttatttgacccgatccggaaaagcgatctcttggtcaaatagctggtaccatcaagaagaggaagaagaacaggataatttgacaaccaaaagagcaccagcgagaccagacaggcgtgcaagcatgccagaagatacagagaaagacgggccatctagggccaaactgaatacgcaacgactctctgcaatgatcgattctttacacaatgagaacgacattggactatttcagcctccgacgacaacgacaacgaatgacaaggttgatcaaaccgatataggcaaaccgccatcacggctcctaagatcacctgccggtgatgtgtcgctagcgcttggtgacaatagatcaagcatgatttccaattattctggagttatccaagaaggtgtagaagtttcatacatagtcaagaaccaacaacaggacgaggagccttatagcaacaaggcgagtcctttgaaacagtctgtgggaagggaagatttgccacagttgcccatgttgccctcagaagcgacattgaccaaatatttggatgacgaccaaagtatgaaatcgagaaatggtgaagacgaagttgtgattaagtcagtaaccaatgccaagccggtggggaggttcaattctggtacgttgaagaagggcgaggctcgcgggtcattaaagctgctgtctaatcctcgacgccaggaaaaagttttgcgttcgtccataggttcaggcaatttggccagtgagagtggatcttccacttataacccaaagttccagcagtcgatccaagagcaattagaggaggacgacgatgcgaattctagcgacaaactttcgattgtttccagtgtgatacctgacttatctacaaagacaaacggcgtgccccaagagatgagcccaatacgttctgagacaaatgattataatccaaccatcccacctagaagcaaagatcgtcccagatcaagattgtttatccaagatgatgaaggtgaagacgagtttttggatggggaactactgccaggtccaccccaaaatgttggtcattttaaaaacctttcccagatttctaccgtcagtgaacaaaaatcagactcatactactcggcagcaaccagcatgcctccagcagaagaaacttacttgaccaggccactacctagcacgcccaatgaggatcacaaaggctcatcgaatttgaaacgagacgacacgttaaaggctgctcatacaacgacagagcccatccacactgtctcaagtgaccaagacgatgacatatacgaggacatcattgaggaaacacctaagaaaactaatcgcaagaaggatgggaagaaaaaactcaataacaagaaatccttgaaggagttgcgatcatttgatatcgatacactgaaccagctgttgaacgtgacaaagggtactttgattggatcagaatttgcgcaactggggatgcaattagaagagaaacgtgccctcgaaagactagtggactccttgtctaggttgacggcagacatggttcttgatcctgaccgttacgaagaaggattgaagagattggacaaagctacaaaggcccttgaagggttttga

SEQ ID NO: 5185 - DNA, 1863 bp, Saccharomyces pastorianus
atgaaaaacttaaatcaagataaatgcttcaaaaggaaagaagagagaaaaagagaatggcatcgaaagaaaaaaagcaaatactggaagacatatcgtgaaatgagttctaatgatggagcaggtaacgagttcaataccttattaaacaaagaaatcgaaactgcgaaggaattgaggcaaagaagggatgcgaacagaaatagtagcaagaatgagaccagcaccaaaatcaaagatgccagtggattcagattacgaatcatcgaaaccgatggacgaaagaatagaaagatagatccagaatatgaagtgacgattgatgggcccttaagaaagatcgtgccttatttcttcacttacaagacgttctgtaaggaaagatggagggatcgtaacttactggatgtgttcgtgagtgaatttagggacagggagcccagttattatgccaaaacgattgcagaaggcaaagtgtacttaaacgatgaacctgcgaatctggaaaccatcattcgcgatggtgatttgatcacgcataaagtacatcgccacgaaccaccggtcacctccaaacccatagatattgtgtttgaagacaaagacatactcgtcatagacaagcccagcagtatccccgtgcatccaacgggtagatacagatttaatactattacgaagatgctcgaaaagcagttacagtgttcagtacatccttgcaatcgcttagacaagcccaccagcgggctaatgtttttggccaagactccacaaggtgcagataaaatgggagatcaactgaaggccagggaagtcaccaaagaatatgtggcccgtgtgaagggcgagttccccgtcggtgaggtagaggtggacaagcccgttagatccatcaatcccaaagttgcactgaatgctgtttgtgaaatgggtgacgagaacgccaagcatgcaaaaactgttttccatagagttagctatgatggccagacgagtattgtaaaatgcaagccgttgacgggtagaacacatcaaatcagagttcacttgcagtatttgggattccccatagctaacgatccgatatactcgaacctggatatctggggcccggaacttggtcgtggtgggctcaagaactatgacgaaattgtcctgaagctggacgctattggcaagaacaaacccgcagagagctggatccatccgcacagcaagggagaatacctgctgggccgtcaatgtgaagaatgcgaggccgaaatgtacacggaccccggtactaacgacctgggcctctggctgcatgccttccggtatgagtccctggagagggacccggaaacacagaaaccgctttggagctacaagaccaagtacccagaatgggccctggagcctcatcgccaatacatggagatggccgttaaagaggctgacaagtgcgggccaacaaagactgcgttcagcgttggtgccgttcttgtccatggggaccaagtcctctccatgggctactcgagggagctgccaggaaacactcatgcagagcaatgtgccctgatcaaatactcccaagcgcatccggactgccccagcgtagttcccgtggggacattgctctacacgacgatggagccgtgctccttcaggctcagtggcaacgagccatgctgtgataggatcctagccaccaacggagccattggcactgtcttcgtgggcgtcatggagccggacacgttcgtcaaggacaacaccagtctgaacaaactggagtcgcacggcgtggactacatccagatcccaggctacgagcaagaatgtaccaccatcgccttcaagggccacaacgacgtctag

SEQ ID NO: 5186 - DNA, 1035 bp, Saccharomyces pastorianus
atgattcggtttacgattccacgtaacattacgatatctttacgttgtacgaggagtatatggtcattcactcaggcgcccacccgtagccatatttggtctactactttgaagggtgccaccgcaagtagaggaaaagcttcgacagtgacaagtagacaagtccatgatgggaagcattttttcaccacaccacagcagcaacaaacgaaatcagagggagctgaagagaaagagcaccacagcgtgaaagaggaggatctgaaaagtattggtcaagccatagcacaaaaacgacataaacgccgaaaacaaatatggtcggctatgttcggagggatatttggtgtgataataggatattcggtaatttataaagtgatatacttgaaagatcagagtttcataccattgttcccttcgtccaagatacgcaaactgagtgcaagagatttgaagaaaatcgacgcaaatcaagtgcaaagcctctccaaattgagagtgctggaaaaattgtccggccacgacatgatcaaagaacagtacggggtgccgttattggacaaagacggcaactcgccaagactgaacgaattcagcatgtggtgcgaagaccaagacccatgcgtgaccggcattgtaatggagccggacgacaaaagagcaagttcacacacctggtacagaattccctttgtttgcaaatggagaataacgcaccggccgataagcatacgcggcaccatcgacgatttgctgaaccgtattggactagagaccacggacttattcgagataatatcgcctgaaagagtgtacgggtcgttcaagtacgagtacccactgcagggggactcacacgcattgcacgtttggttccatggcgagctcgaattagacgatgattcgctgattgtatataatggaaaataccacgtggacgtcaaactccaagagatagacctgttcagacgtgaaaagaacggacaactagtacagtacgttctatacaaaaacgaagcgggcgacaagtaa

SEQ ID NO: 5187 - DNA, 156 bp, Saccharomyces pastorianus
atgaatggagcctcgttctttgcaacttcttgttttccattaactgtggcgctggatttggtcataaattggtcatcaggagaatcgattttgatttttttggaatcactcattatatttgaatctggcgatagcaccgacgctattgaatcttga

SEQ ID NO: 5188 - DNA, 1476 bp, Saccharomyces pastorianus
atgccaccatctccaccctctaaggaccaattggatgaattaatccgagaaatcaatcaatgggccattactaatggattaactatgtatccaccgaaattcgaagcaaatccatcaagtgcttcggtgtcaccggtaactgtctacccaactccaattcccaagagttgttatgatgaagccgttgaaatccagccagtgttcaatgaactatacgcccgtataacccaagatatggcccattctgattcttttttgtataaagagactgaagcattggctttatcggattccgaatttaccggtagactgtggtccttataccttgaaactttaaaaatggcagcaaacagaaagcaagccttaaagttaggtatatttagatctgattatctgatcgataaaaaaaacgataatgatcaaattaagcaagttgagttcaatacagtgtctgtttcctttgcaggtctcagtgggaaagttgatcgattgcatactttcttgaataaggcaaacaaatatgatatcaaagggccatactataatgaatctgacatgattgtttccgagtcagggcttctgctgtctaaggcattggccaaagctgttgagtcgtataagttacaacgagagaattcggtttctaatgaccctattgtagcgttcattgtgcagagaaatgaaagaaacgtttttgatcaaaaaatattggaactaaacttactggaaaagttcaatgtcaaatctattaggttgacatttgatgatgttcatgaaaaattgttcatcgataatgagactggaaaactatatgttaaggattctaagcaagaaatagcggtggtgtattacagaactggttataccaccactgattacacctccgaaaaggattgggaggcaagactattccttgaaagtagctttgccattaaagccccagatttacttactcaattatctggttccaagaaaattcagcaactgctaactgatgaaaacgtactaaataaatatgcttctaattctgagcaaaagaataacttgttaaagacattcgtcaaaatatatccgttggatgatacagatttgggtaaagaaggtaagagattggccctgactgaccctctgaaatacgtgctaaaaccacaaagggagggtggtggaaacaacgtttacaaggaaaacattcctggtttcttgaaaggtatcgaagaacgccactgggatgcgtatatcctcatggagttgattgagcccgaattaaataaagagaatgttatactacgggataacaaaccttatgacgaagctattatcagtgagttaggaatttatggttgtattttattcgacgacaaaatggttttagtgaacgaatttagtggctcattattaagatccaaagtcaatacttcaaatgaaggtggagtggcagcagggtttggatgcttagacagtatcattttatactga

SEQ ID NO: 5189 - DNA, 237 bp, Saccharomyces pastorianus
atggccccaaggagaacatatacgtatttgcaaagatatttcttactaagaggattcagtaagaaagaggctaagaatttccagtatgaacattacgcaagtttcatatgtttcggaatgtcggcaggcctgttggaaattataccgttcttcacaatcatcaccatttccagtaataccgttggtgcagccaagtggtgctcctctatattaagggaggggaagaagaaagagtga

SEQ ID NO: 5190 - DNA, 834 bp, Saccharomyces pastorianus
atgaagggaatcagtgagtccgtgggtagcacggattacttgcacctgtttctcctggtgattggatactacatgctgaaccttgcgtttgttgttttgtttgtggcgatactaacatgctcgacgctggtgttcatctacctgccattttttgggttcctggcactaccgatggcttacctgcaaactgttctcgtttccactaccatttgcaattcaatggtgaaaggtactgattttattcttttcacgcgtatatatggggtcacgtttgcaaggaagaaattaccagagttgagcaaagcttgtgaaacggtgagcttcacgccatttgtttacagaagatcgcatcggttgcgtggaattttttcaagacagttttatttcgtttctttgccgcagtttttcatctttgtcatctggtatgtctctatagcctttttctttcttttcctgatgattgtccccgtcgtgggacccattatagtcaacatgatgccatgcagtcctggaatgggcttctactatttcgagccctactttgtcgacgtgctacacttgaactcgcgtcaactttcagatgtctactacagaggctttgcaaaatggctcctgtactcgatgtcaagcggtctactagaatctatcccaatcttgagtggatttttcattggcacgaacgtcgtgggtgcctcgctgtggattattaaggagagaaacgatcaagaagatccgattctacctcctctcacccctgtgcagccgatagaacccgctgaagaatcccacgcccctccggttcaacaatccatttcccacgtgaacccgccatga

SEQ ID NO: 5191 - DNA, 339 bp, Saccharomyces pastorianus
atggtcttgcaagacgtcccaagagcacaagcagcaatgtcaactagagcacaacctgattggtactaccacagacatccatatgcgtcgactccactcgcggagggcgaggaaccgcagctgctccccatccaagaccaatcgggccataaggggtcgaaaacttggatggcatacaaggccccgatagtgcaatggtataagaatgcaatgctcgtcaagcatagtttctggcacgaccttgagtcgtgtcaccagatcatctggtacccttataaagtacgtacatacccaacacagtcatattattatttgttccgctttactaaccgcacatga

SEQ ID NO: 5192 - DNA, 192 bp, Saccharomyces pastorianus
atgtcgggactcttgaccattatttccaaggaccttcttagtatggtcagcctcactcccaatgagtttggagatatggggttatacgaaaatgcatgcggcgattcgttgggtacagcaacgaggtctgaacggtcatcatcactaaacgttgacgagaatgaatcaacggaggaagacgtatgttggtaa

SEQ ID NO: 5193 - DNA, 165 bp, Saccharomyces pastorianus
atgtttaataacgacaacatgtgtaaatcggaagccctttcaaacgagttattttccagtgctagattcaacaaaaacaataaattctccaattctgacttttctggattcagcttgttggtagcagcgttatctgttagcaccatcaatgaggcagctctttga

SEQ ID NO: 5194 - DNA, 1674 bp, Saccharomyces pastorianus
atgtttggcctacggcttcatgaactggtcggtagaccaattattaaattggttccctccttagcaaatatgatattatattccaataaaacgtatcccagtttaaacataaacttgccagaaaataaaggcttggtgttaactgaacatttctttagaaaaattgaagctgaaatgcaccataatattgactcattctatacctcaattggtatagatggctgccataaagatggtaatttaataaaggtagatatccaattacgtgtattgaacacgaatattatactgctatggatcacccattcgagagacgtagttattgagaattacactaccgttccttcacagctaccgatgttaaaggaaaatgaaattgatattgtcggtagtagaggtagttcgaacgcatcgtccaagaagtcttcagaaaagattccagtggaccttttgaggacaatgactaatctatcgattagctcttctgaaacgatttccaattccgacgacgaggtagatttaaatcaagtgaataaaaaactacgggagaccccgagtggtaatgtaaggaataccgaacttaatgaaaacaacaataacgacgatgatatgaccatggttgatgatcctgaattaaagcataagattgaactaacgaaaatgtacacacaagacaaatcaaaatttgtaaaagacgacaattttaaagtcgatgaaaagttaataatgagtataattgaaccgataaatggggaggaaatcaaagaagaaacaagtgcactgcttaaagaaggacccaaatcaagggcgacaaatgctactgctacgtatttgaccgttccagaaagcaatattggctcacaaaagcgcataaagaaattttctgattttaccattttacaagccatgggcgaaggtgcttacggcaaagtcaatttatgtatccataataaggagcattacattgtggttatcaaaatgatcttcaaagagaggattctggtggacacatgggtaagagatagaaaattaggtactataccatccgagattcaaattatggctacactgaataaaaatccacaagaaaatatcttgagattattagattttttcgaagatgacgattactactacattgaaaccccagttcatggagagactggtagtattgacttatttgacgttattgaatttaagaaagatatggtagaacatgaagctaagttggtgttcaaacaggttgtttctagtataaagcacttgcacgatcaaggtattgttcacagagacattaaggatgaaaacgttattgtggattcacatggtttcgtgaaattaattgactttgggtcagccgcctatactaaaagcgggccattcgatgtctttgttgggactatggactatgctgcgcctgaagtccttggcggttcatcctataagggtaaaccgcaagacatttgggcactcggggtactactctatactattatctacaaggagaacccatattacaacattgacgaaattttggaaggggaattaagatttgataatgcggaaaacgtgagtgatgattgcatcaacttgataaaaggaattctgacgagagaagttgataagaggcctactattgacgatatatatcaagacaaatggcttaaaatttag

SEQ ID NO: 5195 - DNA, 1575 bp, Saccharomyces pastorianus
atgtcacgtaaaacgaaacccgaaattttttcatgctcatcgcaatttttttcactttcttcctttagtcttaaactgttatatgtagctttcagtaattcaagacatttcgttgataaaacggttaaatattatcctacagactaccattacactaagattgaacgtgaaaatatgtcgtctgcaattgataatcttttcggtaaagttgacgagaaaaaagtagaatccgccgtggataaactattcagttcatcttgtggtcctatcaataaaatacaggtcaagagtaaaacccgtactattcttcctgattccaagaagagagaaagatccaccgaaaccagccaggagaaggtagaaaacaaggacgcagaagttgtcgaggaacaaactgaagatgccacccttccaaagccaaaaaaggtcaaaaaaactaaaaacagtgacgaagacgaaggtttagaggcccgttactatgccaaattactaaacgaagaatccaaggatgataaagctaaaacagtcagcggcgataaagcagcatcaacaacaaaatccaatgacctaaccacaccaaatgcatcagcagccaagaaggtagatttcaaagaagatgaattggaaaaagcagaaagaactgtttttattggtaatatactaagtactgttattacatccaaaaaagtctataaagaatttaagaaacttttcggtacaagtccagctgtcgaaactgaagaatccggtaacgatgacgaaaaagaagatgccaagaaggaaagctctaacccatttgccattgaaagtataagatttagatccatttcctttgatgaagctcttcccagaaaggttgcgtttgtccaacaaaaattccacaagtcaagagacaccgtaaacgcttacatcgtatataagaacaagtcagctgtaagacaaatttgctcgaacttaaacggtacccttttacaagatcatcatttaagagtcgacgctgttgcacatccagctcctcatgacaacaagcgctctatctttgtaggtaatttggattttgaagaaattgaagaaagtctttggaaacacttcgaatcatgtggtgatattgaatacgtccgtatcatcagagattcaaagacaaatgtgggtaaagggtttgcttatgtacagtttaaggacttgcaaagtgttaacaaagctcttttgttgaacgaaaaacctatgaagtctcaaaagcaagaagacgaagattcaaaaaaaccagccaagaaggcaagaaagttgcgtgtttccagatgtaaaaacatgaaaagaggtaccactgttggagctggcttagataaaaatggtttaactgattcacaaagaaccaaagctggtagagccaagaaggttttaggtaaggccgacagggcaactttgggccaggaaattaccatcgaaggtcaaagagccaaaaagggcgaaggctccacccacttaaagaagaggaaacaaagatctcctacaggtagagtgacgcagagatcgatagcattcaagaaagcccaagctgaaaaaacaaagaaatag

SEQ ID NO: 5196 - DNA, 1554 bp, Saccharomyces pastorianus
atgagtcaaagaagagctgttgtagcggttagcgtaaagcccaagtgctttaaattagagcctagacacggatcttcatcctcttcgtctccacccccatcatctccggatgaaaatacatcagaaatgccatctattaagctatccaagaactgggagttgcctcagcggctgaaacccggacgtaagccgaagtacaaacgtgctgaagcgttggctaacaagaagccgtcattcaagttaaaaaaggccccaacctgtaatcagaaagggcagatgattacagctgactatgagcacgaactgacgaaagatgatggagataaagaggtaaacacgattgcaagtggcgatgaaaacggtgttgataacgtagaaaaacgaaggaagcaaaatagagacgctcaaagagcatatagggaacgtaggacaaccaggattcaagttctagaggacaaagtggagaagttacaaaatttggttgacacttggcataagaaatacaaactgttggaattcgagctacgtgatacgaagaaaaagctgcattcatcgctagcgctaaatagcgaattacaaagaacgtcgccttggtttacgaatactcaatttcagcaaccacaatcaaatgcccaaaatttggcagaaaaccccgtttcgataacagaaatgatagagaatttcaagccaatgggtgctgtaaatctgaagaaaaggaaagccgatgaagctcctttaacatcacaaatttccacgatatcaacggaccagtctttatcagagattgaaacagttaatgaataccaatatcctagcagtaaacagtttagttcaaggaactcatctctcgacggccatacgagtccaccgtcgtctttatgtagtagcagcaccaacgcaaacaagaagacaaaattctgtgagaagaaacaaatggtagaaccaactgagtgttgtgggcaggacaataccattgcacccactttggctccgggatgttttgcaagtaagaaaataaaattggatggtaagagaccggtaccaacctgctgtaaagacaaagaaagagacaaggaaatcgatgatagtgagaacaaacccatcaccatagaggatgggtcatggatacctgggagctgtaaacaatgtagatcagaccctaacagtatgaatttctgccaatcgctttctaacagacgtagttcaagttgctgttctgccagtagttcagtgccagcgaatgccaataaacaacaaactgatatgaattatagtctgattaagttgcctgaaataggcaacgccaagaataccccatcggatgtggcttccaatgcaaatgactatataccaatcagttgcacatatcaaaaaattcgtcaacatatgcagaagaataaaagtctccaagaaccgatcaatacagatgatccggcctccgtctcgttaatcctggagaacgttgcttctggattgcgcgttagtggacagaaagtggagttacaaagcgtaaaggatgcgttacacaagatggataaacacgttttagaatag

SEQ ID NO: 5197 - DNA, 816 bp, Saccharomyces pastorianus
atgctgttggctaacatttccgtggcaagaaaaatttacgatgccttccctcagaccgcaatgctaagaagacacgcagctccaccatctactaatttcgaaattatgaatgaaatgttgaatacgaggaaaaatatgtcgatctcattggaatcatccaaggctctggcagattctttggacagatgtgtggaccccgaagacccatacttcaacactttggtccgtataatgtcaacacgttgtatgatggctgcccaatatttctattctggggcctattcctaccctgactttagacattatggtttagccgttgatatctatacacatttcacatccccaatcagacgttactgtgatgttgttgcacacagacaattggcaggtgccattgggtatgaaccattaagtttgactcaccgtgacaagaataaaatggatatgatctgtagaaacattaacagaaagcatagaaatgcacaatttgccggcagagcaagtatagaatactatgttggtcaagttatgagaaataacgagtccacagaaaccggatatgttatcaaggtgtttaataatggtatagtggtactagttcctaagtttggtgtggaagggttgataagactagataatttaaccaaggacccaaattctgccactttcgacgaagttgaatacaagctaacttttgttcctacagactctgacaaaccaagagatatttacgttttcgataaagttgaagttcaagtgaggtcagtgatggacccaattacaagtaagcgtaaggcagaattgctgttgaagtaa

SEQ ID NO: 5198 - DNA, 2256 bp, Saccharomyces pastorianus
atgtcggtatctgctgttgcccctagaagaaaaaggctggcggaaggcttgagtgtcacgcagaaagtgtttgttaggtcccgtaacggaggggctactaagattgtcagagagcactatctgagatcggacattccatgtctttcaagaagttgtaccaagtgtccgcagatcgtcgttcccgacgctcaaaatgagctgcccaaatttattctatctgattctccgctagagttgagcccacccatcgggaagcactacgtcgtgctggataccaacgtggttttgcaagcgatcgatcttctagaaaacccaaactgttttttcgacgtgatcgttccgcagattgtcctggatgaagtgagaaacaaatcatatccggtgtacacgagattgagaactttgtgcagggacagtgacgaacacaagagatttattgtgtttcataacgaattcagcgagcacacatttgtggagagactaccaaatgaaaccattaacgacagaaacgatagagccatccggaaaacatgtcaatggtacggtgagcatctggaatcctacggtataagcgttgttcttgttaccaacgaccgtttgaatagagaagccgccaccaaggaagaggactccaagataacaaccaagagtcttatggagtatgtcgagttgctgccaaatgcagacgacatcagagactctattcctcaaatggacgctttcgataaagaccaagaaagggacacattttctgacttcaccttccccgagtactattccacggcaagagttatgggtgggctaaaaaacggtgtcttgtaccaaggtactattcaaatatcagagtacaatttcctggagggctcggtgagtttaccgagattttccaagccggtgctgatcgtgggccagaaaaacctaaacagggcgttcaacagtgaccaagtcattgtggaactattgcctcagtcagaatggaaagcgccctcgtccatcgttttggactctgaacatttcgatgttaacgataacccagatatcaaagcaggcgatgacgatgacaacaatgaaccttcctctacaaccactataacctccgacaagcaacgtagactattggccaaagacgctataatagcccaaagatcgaaaaaagtccagcccacagcaaaagttgtgtacatacaaagaagatcctggagacaatacgtgggccagctagcaccaagctccgttgatttacagagcagcagtacacaaaacgtcttcgttatcttgatggacaaatgtcttccaaaagtcagaatcagaaccagacgtgctggtgaacttgtcgataaaagagtcgtcatctctatcgattcatggcccgccactcacaaatatccattaggacatttcgtaagagatctaggtacgatcgaatcagcgcaggctgaaactgaggccttattattggagcacgatgtcgagtacaggcctttctccaagaaagtcctggaatgtttaccatctgaaggccatgattggaaagctccagccaaactggatgatccggaagctgtttcaaaggatgcattactgacaaagagaaaagacttaagagataaactgatatgtagtatcgatccaccaggatgtgtagatattgatgatgcattacacgcgaagagacttccaaacggtaactgggaggtcggtgtacatatcgccgacgttactcattttgttaaaccaaatactgccctagacgcggaaggtgccgcaagaggtacatctgtctacttggtggataaacgtattgatatgttacccatgcttttaggtactgatttgtgttctctgaaaccgtatgttgatagatttgcattttcagtcatttgggaactggatgataacgctaatatcgtaaacgttgactttatgaaatccgttattaaatctagagaagcattttcgtatgaacaagcacaatttagaatcgacgataaaaaccaaaatgatgaattgacgtcaggtatgagagctctgttggacttgtctataaaattgaagcaaaagagactggaagccggcgccttgaatttggcatctcctgaggttaaagttcatatggatagtgaaacctcggatccaaacgaagttgaaatcaaaaaactgctagcaacaaattctttagttgaagagtcatgctgttggctaacatttccgtggcaagaaaaatttacgatgccttccctcagaccgcaatgctaa

SEQ ID NO: 5199 - DNA, 783 bp, Saccharomyces pastorianus
atgggaaactcaaacgcttctgaactcaatgacgaagaagacggcggtatggcatttgacaagagaaaatctacatctacgtattcggttattgaaagtgagagtggcctggcaagcggcagtattcctaataattacatgagaagtaacggcaataactacaatacgaatgataaagcggcactaatgaagagagagatttcaggcagtccatccttagcatcctcagattactcccaaagagacgttattccccatagaaacccttcaaggttattgaatgatatcatggagacttcgttcaatgaaccaaatgacaacggcatcaatcacatgtctcaatttaatgataaggataatctaacttcaatatcgcaaagaggggttaatttagaagcgtacaaccaaatgcctcaaatggtaggggggattcctccccagaacatgaggccttatgctggtcaaccacacacaaacccatcaatgtatccacaacaacaacaacgacaaccacaacatcagtataatttgtatcaaagaactatccctgttggtccagatccttctaatgtggttttacaaagcaatccttatttcaacattggcccaagccaaccaccacaacacagaaatccggttccaagatcgggttttgctccaaacccactaccaaatcagggcccaatagcgcaaggctaccaacctgcttataagaggagaatgcagaataagaatatgcccagagccaccacctctttaaataatccttatggctttaggtaa

SEQ ID NO: 5200 - DNA, 435 bp, Saccharomyces pastorianus
atgagcggttccataatttcctcaacgggcacactccccacatcactagcatccaatgagtccttcactctttactgtggaaacatgggtgttatgtttgaaaccaagccaactcaggcaagtgaatacgcaaattttttgcgggcggcttggggttgtggcagaggctatgaatctgcatttgcaacattgactaaaacacgagagatcgtacttcccttgcccacgacttcttcctcggactcgaacttactagattgtggctattcaacaaccattaacgctatggacgattcgaaatcgcctgttgacttttggaattgtggtagaacatatgctagagaatacgcattatccgacgcgttttcgttgagaccaactaatttgatacaatactttgtatttgctttactcattttgtgtatttttctgtaa

SEQ ID NO: 5201 - DNA, 1272 bp, Saccharomyces pastorianus
atgtggagagagaatatcttcaattccttcaagtacgtcaggttggcggcaaattcatcgttaaagggtcaaagtgacttcaagaaatttgagaaggcaagacaactaaaatctcacatcgacgccattagaagagactacacaagaaacttgaagagtaaagtcatgctagagcgtcaaaaagctgttgccatttatttgattgacgtctttgccctaagagctggtggtgaaaaatctgaagatgaggctgacaccgtggggtgttgttcattgagatacgaacacgttactttgaaacccccaaatactgttatttttgattttcttggtaaagattccattagattctatcaagaagtggaagtggacaaacaagtttttaaaaatctaacaatcttcaagagaccacccaagcaaccgggtcaccaattatttgaccgtctagacccatccatactgaacaagtatctgcaaaactatatgccgggactgactgccaaagttttccgtacttacaatgcttccaagaccatgcaagaccagttggatttgattccaaataaaggttctgtggcagaaaaattactgaagtataacgcagctaataggactgtcgctatcttatgtaaccatcaaaggactgtcaccaaagggcatgcacaaacggtggaaaaggccagcaataggatacaagaactagaatggcaaaaagttcgctgcaaaagggccattttacagctggacaagggtctcttgaagaaggaaccaaaatatttcgaagaaatcgaagatttaacaaaagaggatgaagctaccattcataaaagaattatcgacagagaaattgaaaagtgccagcggaaatttgttagagaaaatgacaagagaaaattcgaaaaggaagagttattgcccgagactcaactaaaggaatggctagaaaaagttgaggaaaagaaacaggagttcgaaaacgaattgaaaactggtgaagtcgaattgaaatcaacttggagttcagtggaaaagataaaagcacaagtagagaagttagaacagcgtattcagactagttccattcaattgaaggacaaagaagaaaactcccaggtttctttgggtacttctaaaatcaattatatcgacccaagactttcggtggtattttgcaaaaaatttgacgttccaatagaaaaaattttcacaaagactctaagggaaaaattcaaatgggccatagaatcagtagatgaaaattggagattctaa

SEQ ID NO: 5202 - DNA, 855 bp, Saccharomyces pastorianus
atgaccatcgctgctgcttcgaaagttaaacgtgacttatcttcagatgatgatgacgacgtcccactgtcccaaaccttgaggaaaagaaagatcgattccgccagttctgcttcttcccatgacgatgcagacccttatgacagtgatgaggccatctctaaaatttcaaagaaaaaaaaaaccaaaagaataaagactgaaccattgtcatcgccaccgtcgccaaaaaagaaaactacgacaccaaaacctaagaagatcaagaaggaaaatagcgatgtcaaggtaaaggcaactaagaagaaaaaagaacaaaagaagaaacaggaagaagaggaccaagaggcggaagaccaaaaattaaaggatgaagaggacgaatataaatggtgggaaaaggaaaacgaagatgacaccataaaatgggccacgcttaaacataacggtgtcatatttcctccaccgtaccaacctttaccatctcacatcaaactatactacgacggcaacccagtagacctacctccacaagctgaggaggtggccgggttcttcgctgcgttattagaaagtgaccatgccaagaatcctgtttttcagaaaaatttctttaacgatttcttacaggtgttgaaggaaaacggtggtaccctaaataacgttgaactaaaggagttttctcgttgtgatttcaccaagatgttcgactatttccaagtgcaaaaggaacagaaaaagcaattgacatctcaagagaaaaaacagatccgtttggagagagaaaagtttgaagaagactacaaattctgtgagttggatggcaggaaggagcaagtagggaattcaaagtag

SEQ ID NO: 5203 - DNA, 984 bp, Saccharomyces pastorianus
atgattcatattggtagagaagcgttcgaaatgtcaactttactagagaggactaacagcgtccaagaattaaagaagagagctgcagggaacacatccgcaaatcccgcagaagtcgcagaagcaaagaaagtgctaaagagagtctacagttgggacgaaattccagaatggcaaagagataatgactttattttgcatgggtacgtgaaggaaactagtagttttgttgatactttcaaaagtttattctacatgcataatgaaagtgtcaatatttattcacatttaatccccgcagtcgggtttctcacagttctgttgctagataaaacgactattacagtgtttgagactaccacatggcttgatcatatgatgattgacctatttttttcgggggcatttgcatgtttgatactgagtagttcctttcactgtttcaagagccattccttgagaattgctactttgggtaataagctggactatctcggtatttgcatattgattgtaacatccatggtcagcattttatattacggttactacgataaattccccgtattctgtttatttgcgcttattactctcagctttggtgttgcatgtagtgtagtttctttgaaagataagtttaggaaaagagaatggagaccttatagagccggactatttgtttgcttcggattatcttcgattgttccgatttttagtggcctttactattatagtttttcagaaatctggaatcaaattcaactattttgggtgctgcttggaggtggtttatatataatcggtgccgtcctttatgggatgcggttccccgagaaggtttatcctggcagatttgatatctggggacattctcatcaactcttccattttttggttgttatcgcagccttatgtcacatgagaggtgtgttgaatagttatgagttagtccatataaagatgcaaaatggaattgtctcatag

SEQ ID NO: 5204 - DNA, 2244 bp, Saccharomyces pastorianus
atgcgacacgaagatcagacagcttttaatcaagacgtatcaaatacatacgctatggcctccgaaaatccagatgtgcttctttcaaagttagttaatgtgataagagctgcatcttcattagctgcccaagatgttgatttttacagaaatctggatagagattttagtaatattttgcaatcaaaatcgaacaagcttactgaaatggtgaatggaatcgtccattctattgatgagcatcatgactctcttgaactaaaagaggaagaaataagtgatttatggaaagattttggaaatataatggacaacttgttggaaaagtcagatcattcgttagacaatttaaaccgcacttccaactccaataacagtgcggccgatctccaatacttgggtgatttttcaggaaaggactcacatccaacaaagagagttgagaaacctcagttgaagtttagaacaccaattgataacagtgaaagtcatccattcctacctttacttaaggagaagccaaatgctttaaagccgctttccgatagtttacggatgattgagactgaagaaaatagccccggtcattatcctcacccatatgagtatgaaattgaccaccaagaatacaactcaagtatccttcaaattaaacaagaaataccctccaaatcttgggatgcttcggaaccaatatggatagattcgaaggcaaagctcgattcaatgctagagcatttaaaaaatgcacaagaaatcgctgttgatcttgagcatcacgattataggtcatactatggtattgtctgcctcatgcagattagtactagggagcaagactatttagttgacactattgaacttcgcgaggatttacatattctaaatgaagtatttacagatccattaattgtgaaagtatttcacggtgcttttatggatattatttggcttcaaagagatttaggattatatgtcgttggtctgtttgatacttaccacgcctctaaggctataggacttcctaggcacagtttagcctatctgttggagaatttcgccaatttcaaaacatcaaagaaataccagctggctgactggcgtataagaccactctcaaaacccatgaccgcgtatgctagggcagatacccatttcttactaaatatatatgatcagctaagaaacaagcttattgaatctaataagttagccggtgttctttatgaatcaagaaatgtggctaaaaggcgttttgaatattccaagtataggccaataacgccctcttcaaaagtttattctccaaccgaaaaggagaatccttggagagtgttgatgtatcagtacaatattgctcccgagagagaggaattagtaaaagctctatatgagtggagagacgttatagcaagacgagatgatgaatcgccgagatttatcatgccaaatcagctgttggccgcgctcgttgcatatacacccactgatgttataggtgttgtttctctgacgaatggtgtaacagaccatgttcgtcaaaatgcgacaatactggccaatttgatcaagagtacactaagaagtatgaaggacactcataaggaaagcgctgcaattgtgtcgtctgagcttaagtccaatagcgcttcgttagaagctatcacagttcctcaaattcgtaacattatggatagattttcagtattttccagcaacagcgttacggaggatcgaagcatggatagtactgcatcttccattcttttaggtaagattttaccacatgaagagggtgatgttgtgtatgagaacagaggcataccgcataaagttgaggttgaagatgtgagaggccgggctcaaagattcaattctgcattagcagcgttggaagacatcaaatttgaggtagaaaagccagtcgacgtagaaaagagcgaaaaggtgaaaattgaaactacacctgagcctcaaactaaaaccgagaatcctgacgaaattattgttttgaagaaaaaacagatacataagaaggaggcagcgaaaaggagtagtgcggcagccgaagaagctgttgattactctaaaatgcctgatgtcttatccaataaaccagggcaaaataataggcaacagaggaaaagaagattcgatccatcctttaacgaaagtgagggaccaagagctccgaaaaagaaaagacctacgaccaggggtaagaacgtatcttttaaaaggtga

SEQ ID NO: 5205 - DNA, 780 bp, Saccharomyces pastorianus
atgcgtcaaaagagagctaagtcatatagaaagcaacttcttgtctacagtcacacgtttaaatttcgtgagccatatcaagttctggttgataatcagctggtatcagaatgtaatggttcaaatttcgacctaccgagcgggttaaagaggactttgcaagccgatgtaaaagtcatgattacacagtgttgcatacaggcattatatgagactagaaatgaaggtgcaattgatttggcaaaacaatttgaaagacgtcgttgtaatcactcttttaaagacccaaaatcgccagcagagtgtatccaaagtgtcgtgaacgtcaacggcgcaaataaacatagatacgtggttgcttcgcaagacatagatttaaggagaaagctgagaactgttcctggtgttcctttaattcatttaactagatctgttatgatcatggaaccgctcagtacagcaagtgctaaggcaagcaagatgaccgaagaacagaaattgtacaaaggcctcaatgacccaaacattgaaaaggcagaagcaaatagcaagggatccgagaaggaatccacgcccaagaaaagaaaggctggcccaaaggcccccaatccattaagtatgaagaagaagaagaaatctggtccatcagacgatgaggtgaaagacaaagatgatgcttctaaagacaaaaaaaggagaagaaggagacacaaaagcaatgctgatgactccgttgcaagcagaacaccggtagtgcaaaaacaatcagcctcagactag

SEQ ID NO: 5206 - DNA, 789 bp, Saccharomyces pastorianus
atgtgtggtggtacagacgcgtactctgtataccggattggatccgatacaagcagtgatagcgtaagtagttctgactctgatactcaaaccagttcttccacaacgtcttccacgacatcttccacaacgtcttccacaacgtcacaaacatctgactcaacccaaacaacatattctacttcaacatcacagagctcaagttccacgacgtcacaaagctcacaaaatgcaaacactttgacgacgagtagtactagttcccaatcacaagatgctacttccgtaatatactcaaccgctctccacactgagggtggttctacaatatttgtgaccaatacgattacgaaaagtgctcagaattcaggatctgccaccggtacagcagcatcagactcgacgagtggaaagagtacacacaagaaggccaatgtcggggccattgttggtggtgttgtcggtggtgttgttggagccgtagtaattgcacttggtattctattgattgttagacatatcaacatgaaacgtgaacaagatagaatggaaaaagaataccaagaggctataaaaccagtggaatacccagataagctatatgcttcttccttttcgtccaatcatgggccttcgtccggaagtgtcgaagaacagcatacgaatgttccaacggatactaatccgttcgatgactcaagaagaataagcaacggaacatttataaatggcggaccgggaggaaaaaataatgttctaacagtggttaatccagatgaagctgattga

SEQ ID NO: 5207 - DNA, 159 bp, Saccharomyces pastorianus
atgagactgaacaacaaattcagtttgcttttggctttattgcccgccttgtcgcaagcaagcacctacacgttggtggactgttttagctcactgccttccgacttttcacaagacgatacgtatgcctaccagacaagttcgtactgctatgaatag

SEQ ID NO: 5208 - DNA, 114 bp, Saccharomyces pastorianus
atggcaaccaaaggcaacttaaaaaggcaaacgaagcactcttcaacaatagcgctcattgaacctcgcggagaggcgacgccatgcgcagtttctcagtcgaaaccctcgtag

SEQ ID NO: 5209 - DNA, 462 bp, Saccharomyces pastorianus
atgcaaccttactcattgttcccaactttctggaagtttatgtatagagtttcaccatacacatatttcgttgaaacatttgttagtattctattacacgattgggaaatcaagtgtgatatgagtgaaatggttcccggacaacctatgacagggcagacttgtggcaaattcatggaagccttcattgaagaatatggtggttacttgcataacaaaaacaccttcaccgtctgcgcttattgtacgtacactgttggcgatgatttcctgaaaaatgaaaacatgagctatgaccatgtttggagaaactttggtatcgagtgggcttttgttggtttcaatttctttgcaatgtttgctggttattacttaacttacgtggcaagagtatggcctaaagttggcaaattcatctctaaggtaattccacatagaggaaaaaaatctgcacaaaactaa

SEQ ID NO: 5210 - DNA, 1578 bp, Saccharomyces pastorianus
atgccaaaatcacactctgtttcttcatcttcgtctagtatctctgctctcccataccaggtatcgccttcaagtaaggaaatagcattagcagattaccatgacaaaggacacatggaaacagtagagactcagaagcacgttatttcttggagaaacattaactacacagttggtgacaagaagctcatcaacaatgcatccggtttcatcagttctggtttgacagccttaatgggtgaatctggtgcaggtaagacgactttattgaatgtgttatcacaaagaatcgaatctggtgtcgttactggtgagattttgattgatggtcaaccactgacagatgaagattcattcaaaagaagtattggttttgttcaacaacaggatttacacctggatctattgactgtgaaagaatcattggaaatttcctgtattttgagaggtgatggtgacagaacttacttagacactgtttcaaaattactaaagtaccgtctgacatttggttgccgatttgaaccccactcaaaagaattgctgtccatcggtgttgaacttgttactaagccttctcttttattgtttttagatgaaccaacttccgggctagacgctgaggctgcattaacaattgtgaaatttttgaaacagctttcattgcaaggccaagctattttctgtactatccatcaacccagtaaaagtgtcatcagtcatttcgacaacattttcttattaaagagaggaggtgagtgtgttttctttggaccaatggacgatgcttgcggatatttcatgtctcacgacaacgcattagtctacgataaagagcatgacaatcccgctgatttcattattgacgccgtgggcaacagcaactcctcggttgaggaatgcggaatgacggaaggtttcacgttgaacaaggaagctaaaaactggggcacagtatgggagtcatctacagagaaaaagttagttgaaagagaaacagctaggttggaagatgatgctcgtgcctctggtgttgattacacaacatcactatggcaacagccttcatatttacagcaactaactctcattacgaaaagacaatatatttgtaccaagagagatttgacttacgttatggccaaatacagtttgaatggtggtgccggtttatttattggtttctcattttggaacattaagcataatattattggtttacaggatagtattttcttctgtttcatggctctttgtgtttcatctcctttgatcaatcagattcaagacaaagcattgaagacaaaacaagtctacattgcaagagaagctagatcgaacacctaccattggaccgttcttcttttatcgcaatgcattattgaattaccactggcacttacaagttcagcgttgtttttcgtttgcgcattcttttgctgtgggttcaacaatgctggctggagtgctggtgttttctttttaaactatatgcttttctctgcttactatgcaaccctgggtttgtggttgatctatactgctcctaacctgcaaaccgctgcggttttcgttgca

SEQ ID NO: 5211 - DNA, 1728 bp, Saccharomyces pastorianus
atgtcgatttcaaagtattttactcctgttgctaacgggtcacttactttcaatggtgcaaatattcaatttggttctgatgcacagagtgactctcgaaagacttatgataccgaagagagtacacctccttctgccaatcaattgaataatataacctttcaggcagaggctggtgaaatggttttggtgttgggtaatcccacatctactctttttaaaactttattccatggtaaaacaagtttatcgtactctccccaaggctcgattaaattcaaaaataacgagttcaaaagtttttccgataaatgtcctcaccagatcatttataacaatgaacaagatatccatttcccttttttgacagtagaacagacaatcgattttgccttgagctgtaagtttgatattccaaagggtgagcgtgatgaaataagaaatgaactactaaaggaatttggtctatctcatgtattgaaaactattgtcggtaacgattttttccgtggtgtttctggtggtgaacgaaaacgtatttctattattgaaacgttcattgcaaacggttctgtttacctatgggataactctacgaaaggtcttgattctgctacagctctagactttttggagattcttagaaaaatggcaaaggctactcgttctgttaacttagtcagaatatctcaggctagtgataaaattgttgataagtttgataagattcttatgttatctgattcctatcaaattttttatggtaccgttgacgagtgtctggcttatttccatgacactttaggtattgaaaaagatccaaatgactgtattattgagtacttgacttctattttgaattttcaatttaaaaacaagaacgttggaaacctatcaaactcatcgtcttctagcgttctcaagactgccgcaaaagaagtgaccaagtatacatataattctgatatggatttatatgaccaatggaaacactcttcgtattataacaatataaaacaacagattgcagagtctctaatcgatgactctattaaagaggtcgatccctctgatatttcacctatttttaatattccgttgaagaaacaattatcatattgtacaaagagagcttttcaaagaagtttaggtgataagacttacatgacagcacaattcatttccgtcgttgttcaatctttggtcattggttctttgttttacgagattccattaacaacgattggttcttactcaagaggttccttaacctttttctccatccttttcttcacctttctttctcttgcagatatgccaattgccttccaaagacaacccattgtcaaaaagcaatcacagcttcacttctacaccaactgggttgaaactctttcaaccacagtgttcgattattgtttcaaattctgtttggttgtcgtattcagcatcatcctatacttcctagctcacctacaatacaaggccgcaagattttttattttcttgctgttcctttccttttataatttctgcatggtgtcactgttctctttgacgacgttaattgcgccgaccatttctgtcgcaaatttgttcgctggtattttgttgttagctatagcaatgtatgcctcttacgttatctacttaaacaacatgcatccttggtttgtgtggattgcctacttaaatcctgcaatgtacgccatggaagctatactagcc

SEQ ID NO: 5212 - DNA, 678 bp, Saccharomyces pastorianus
atgctagcatcaccaatccctaaaggagagactctgccagtaaatttgacaaatgatgtcgagagagcttcgagaacgctgtttaaggcgttcgaaaattcgtacgccaatgattacctaatgaaaaaattctttcatattccaatagaggaaaaggtttcaagagcaaggataaatgccataatacattactatacgacatgctaccatgacttggacggtgaaatcgctgaggccaacgatttcgatgccgtaggtatatggagtcgtcctgggcaccacttgcctgccacattatctgacgatgagtcttttaataagattttttttgacgacttgactgcgagaaagcatgaagtcgtgcccgagggaatggactattactacctctatgccattgggaaaaaccttagtcaccctgaaatcagaggttcggttagaaagatactcgaagaatacaaacgcaaggcagacaaaaccaattgcgcccttgttctcgaggcaatttcagaacacgcgagatctgtctacgaatacttcggttttagaacctacctagagttccaatttggggctggggaagtaaactccgagtgcaaaccagacccacagggggaggggttcacggcctacctgatgctctaccatagagacgcagacaccgtctttcgtgcatga

SEQ ID NO: 5213 - DNA, 651 bp, Saccharomyces pastorianus
atgcgttctcaatcgtcgctaagcattatgcgtgtttttgctctgatcgcgactttgtttacttcatccttcttcgctcatgcattttcctccaactatgctcctataggcatttctttacctgctttcacgaaagaatgtctctactatgatttgttctctgatgaggatgtgctcgtggtcaattatcaagtcttgactggtgggaactttgagatagatttcgacattaccgcccctgatggcactgtcattgttactgaaaggcaaaagaaacactctgattttttactgaagtcgtttggtgtgggtaaatatacattctgtttgagtaataactatggtacttccccaaaaaaagttgaaataactctagaaaaagaaaaggaaactgtttcctctcaagaaaggaaagaggatattatcgccaataatgccatcgaagaaatcgacagaaacctgaataagatcatgaaaacgatggactacttaagggctagagaatggagaaacatgtacacagtaagctctacagattcaaggttaacgtggctatcattattaattatgggagtaatggtcggtattagtatagtgcaagctttgattattcaatttttttttaatagtcgccaaaaaaactatgtataa

SEQ ID NO: 5214 - DNA, 1788 bp, Saccharomyces pastorianus
atgtataattttgaccctgcagtggaggatatcaatccagagtttttggagaagagaagtgaagagaatataaatgcgagttctcttgggagtaaacaaacgaaaccaattttcatcacacctcacaaggatgaatctctattgaaggttgccaacgaacacaaaaaaaaatacatttcctcgtcaagttctatgacctcgatactttcccagttgcattatcttctttccaactttagaaagttgaacatcattgattcttcgatatctaggaacttccctcagaaaaattgtaattattcagaaagtgcatattttccatcaacagtcattttaagaaagaaaaaaaaaggcgtttgttctatcgattccgatcgaagtctggatagagaaatggttctctctgtactgggacactatcttgaagatttcctaacaaaaaattcgcctaacagtttacaagctgaaaactaccattattccagcatagacgaattcatcgtgagatctcaattagacgcctacgatccaaatctgcctggaactggtgtttttgatctaaagacaagggctgtttctgctataaggtatgatttgtcacatgtagagaataacaataatcaaactggatacgagatagaccgggtctatggcgaatttgaatccttggaaagggaatattttgaattgataaggtccgcacttttgaaatattctttacaggctagaattggtaaaatggacggtatatttgttgcctatcacaatatctctaaaatgtttggattccaatatctacctttggatgagttagattatataatacattcttcatgcaacaacaaatttgatagtttattagagcagaaagacgaaattatgaaaggcatatatggtgaagaagactacattttacgccacagtaggaacgacaaagagattgcctccttggtggctagtagagaatttaaaatgtcaatgaatttgtttagcaatattttgaagcatgttgagcaattactgaactcaaacactactagctgggaaatgtgtaaaataatgctcaaaaccgaagttgaagaaaaacagctgaaaaatggccgcttctttaacgagccagttctaaatatcgtagccctgccactaacatctgggtatgaggataaatcactactggtaaaggaggcttcgaacgaacaattgacagaagagctaacgaacattcgcctgtataatgaaaatcttttagaagagaacttggatatgttggtcggctttaaggtaaacgtcaagcatttctaccatcatcaccctagtactatgaatctgccaacatttgcttcgagaaagaaagatattctggaccccgatgcccgtgaatatatttctgacataatgaagcgagattggtataaggatatacgatccacacaaactccaaacttcttccatgcatcagatgtttccacttgggaagtcaattctacctttacagatatcatcgataagaaggagttgaggagtttatacctgaaatatctagatgttaaattaaaggcgttgaagaaccaagtccttacacgtcaggaaccagacacatcccgaaaggatgaaattataaatcgaatcaaaaaattgcaaacccgcaggaaacacggcagtagcacaagtcacaacaaatcatcaaattttggtccctcacgactacaaaccaagctgcgtgcatacgccaagaagggtgctctacgaaggaaactttgggaaagtaatgctaaattgcatgcgtaa

SEQ ID NO: 5215 - DNA, 525 bp, Saccharomyces pastorianus
atgatgagtttttatggctataatgtcctgtccaggcgtctctctgtccaagcctggagcataggtggcggtagtagaggcagccatcagcgatggattggccatacaagcgctgctctcatagatgctgtcaatgaggaaaccccacctgacaagttacgttccgacctacatagcgcccttcagatggttgatgaaatatacgatacaaatactgcggcagaggacgttaatgacaagggcaaggaaggtcgacaaaaatatacccgagagatggacaaggcctttaatttgcttaaaacaaacataaagaaggaagatagacaaattaaatatttgaagcctacaagagcacgaacgcgccctactagcgggtcatataccttccaaataaatgctcaaaaagttaagcatacattagtaccttacaatcgaaaaggtgctcataaaaacgaccataagccacctgaaatagcccatgggctgactagagtactatatcaacccttgtcgttacaaaattga

SEQ ID NO: 5216 - DNA, 2712 bp, Saccharomyces pastorianus
atgagtttttgcttagaaagcctcttgcatttttcagcatttctttcttattgcttaaccggaaaaaaaagaaaaggggtccccttttcaaaacaaatatgtgaacgagatagagatgcaaatctaatattgataacgagtagagagatcatcctagtttccatctatcacttgcttctcccttcatataaacaaccgatgttttcatcttcttctcgaccttctaaagagccattactatttgacattagactaagaagcctagataatgatgttttgttaataaaaggtcctccagacgaggcatcctctgtgttactatctggcactattgtcttatctattaccgaacctatccaaattaaatctttagcgttgagactttttggaaaattgaggttaaatgttccaacagttttgcaaactgctaatggtccatataaacgatactccaaattcgaaaggagtatatactctcatttttgggacgatttcaatataaagagttattttcaaaacttgtatgacaatcataataatggtaaaacaactatttctagtaaatcctcaacaaatttaacgactttgccaaaaaggacaagggctctttctagtacatctttaatatcaaataatggacaaacaagtacgaataaaaactatcgcaccttagtaaagggtaactacgagttcccatttagcgcaatcattccaggttcgttggtagaaagtgtcgaaggtctaccaaatgcagccgtcacgtatacattagaagctaccatcgagagacctaaacaacctgatttggtttgtaaaaagcatctaagagtcattcgaacattggcaacagatgcggtcgaattatctgaaacagtatccgtcgataactcatggcctgaaaaagttgattatacaatctctattccaactaaggcgattgccattggttcttccgccatgattgatatcttgattgttcccgtattgaaggggctaaaattgggtccaattaggattaccttagtagaaacttctcagtactgcggtagctatggagggattattaaccaagatagagtagtggccaagttgaaattgaaagatccattgaagcatatttcccaaataaagaagagaagaagcctgaatgaaaccaacgacgaggattttgatatgggcactggggagtttcaagacaaatgggaagttcaagccttattgaatatacctgcgagcttgtccaagtgctctcaagactgtcgaattttatctaatatcaaagttcgtcataagataaaatttacaataagtttactaaatccggatggccatatttcagaattgcgtgcggcattgcccgttcaattattcatttcaccatttgttccagttaatgtaaaaacgtctgatgttatcgagagaacgcttaagacatttggcccttcatatcaggccacaactcaaaacgatagttcatttagcaacaaaagatttatagacaatactgaagaagacgtcattttccaaagatttgtgtccgagttacaattgtcttcgatgcctactatagtaaatggttccaattcaaatgctcacaatccagacgcagaaacttcgactaccaatgatgcggctatggtagccagtctaatggttcctcctaactacggaaatcatgtttatgatcgtgtatatggtgaaacaaccaatcaaaacaaaatatcggcaccagtacccccagttgccagcgagtcacaagtccttgacgatatccaaaacttgtatatctcggatagcaacgatactaacaattctacttcggcacggaatcctgaaattagaatcgatgacggtaacccaaataactgtgattcccaagacaacagtgtcaataatagtagctcgaatttggttattaattttttgacggttaatgataacagcaacagcgcctccggaagtagatataataattacactactaatacaggactgaatagtccttcgttgaccccgagcttcgctcacttatcgagaagaaattcttatagtcggcaaacttcatctacatccttaaagaatgacttggagctttcgactttaagtagagtaccttcatatgacaaagccatgaaatccgacatgatcggtgaagatttaccacccgcttatccagaagaagaacttgattcacaacaaaacaagaaagtggagttagaaaggccgaaaattttacaccataaatctacatcgtctttattacagtttccaagttcaagcaaaacttccaataatgtaaaaagctcgtccagcaaaacccatttgtctcattctccattaccaaaaagtaacaatacctcctcggtatcattacaacaactgacaaggagcaacacggatagctccttcaatttgaatctatctttcgcggccccaaaaagcaattcggcaagtagacacttttcattcaatatgacaccatccttgactaattcaaatactgatagccaaaacaatctatactttagtaacgctgagctcgcttctgatgcggatcaagcaaggccggaggaaaactacatgggctcagtcgaaactcagagatcacgctcctcatcaattagaagtaataccagtaactcaccatctagacaaaagaccggttcattttccaacttcatggagatgtttacaagacgagaccgcgcatag

SEQ ID NO: 5217 - DNA, 2157 bp, Saccharomyces pastorianus
atgctcgctgccttacgacccaatcctcgaggttttcgctcgcgtaccccttccgtaagtctcttcgtaagactgacccactcctacataccgtggttttacgctatcgacgtgcccaactctaaaccatacttgcctacgtacaaggctttccaatctcccaaaaaattcaaaccgttttccattgatgactccaaccgcctggaaagggccagcaagcatcgggaacataaccccgtcttagtcaacgaagactacttgttcaaagtggacctctcgcacatggaactatcccccacatattgggagggccccacgtatcaggtacgaagaggcgtctggttcgactctttggaccaacccttatccagcgacctcacctctgaaatcgagggcttgtataagtctatcaagactgacaaaactgagggcgatgcgcttgcgacaccgtctgccgagttacaagatatattcaggctcaagggtaaatatccaatcgataaagaaaaccaaaaagagcggggaaaggaatccagcaacgaacacaatgatgaacccgttttcaagtttgttttgttcgtcaacaagcaaaccgcttttctattatcggatctagacggcggcaaactacaacttgccttcttgagatctaatctggctcaatctttacctctcaatgctacaaagattacaagatcgtacaagaggccagccaagaaaccctctgcaccctccaaagcagccaaccctcaggtccccgtagccgatggcagcggcaactccaagtcaaatagcctcgaaacaaaactggaaaagaaagtctccaatctttttaatgtgtcagatttcttgcaattgttcaacggcaatgcaaacaaggatcaagatgacgcaaagagcttagaaaaccaaatggaaagagactacaataacgccgatagcaacgagggtgccgatgctagtagcaagattaaaaacggccaaaattcaaacacaggccccaaggaaaataaaagtaataaaagaaatgtggataacctggtgctttgtgttcatggtataggccaaacactgggcaagaaatacgagtatgtcaacttcccgcacacgataaatttattgagatctaacatgaagaaaatctacagtaattctaagaggttacagtcgttaaacacagcatctaatcaccaaaataactgtaatttgcaggtcctgcccatcacttggagacattcaataagctttcaaactgacgctaaggaggagaatatcgagaaccaagaattacccactttgtcacaagttacagtaaacggcgtgttgcccctgcggaaactactagctgatggtctattggacatcttactgtatgtcgaaccttattatcaagaaatgattctccatcaagttacgtctcaactgaacaaaactttccgaacttacaagaaatacaatccagaattcgagggaaatgttcatttagtgggccattcgttaggcagtatgatcttatttgatattttatccaaacagaaaaaattcaaactagactttcaggtagataatctattctttattggatcaccaattggacttttaaagctgattcaaagaactaaaattggtgaccgtcccaaattccccaatgatttggagaaaaaactaaccatacaaaggccgcaatgcaaggacgtttacaacgtctatcacgtctgtgatcccatttcctatagaatggaacctcttgttaataaagaaatggcatactatgaacaagcttatttacctcattgtagtgaagcctatgacttgacttccaaggttttagagtttggtgaaaacatatggaaggacttacctggtactggcaacagcactaccaatgaaaataattcgcaatccaaggaaagatcatctaatgaaaccaagaccaaactatcagataaattaacaacaatgcttacggatttaaactatagtggacgtttagattatgccatgctgccaagtttacttgaagtggactttatatcggctattaaatcgcacgtttcttattttgaagaacccgatattgcagggtttatcatgaaagaaattttagccaagcatgaaaaagtttccgaaatatgcgcgaaaaggaaggcaaattga

SEQ ID NO: 5218 - DNA, 837 bp, Saccharomyces pastorianus
atggaagcctttagtaacgatgataacgagaacatcgatcgtgtagaggaagccgcattgaagtctgatcaaaactcgaatcttcttccagcagcctcaattgtgaagaaagaacaattctctggtttcgagagtctacttcctttgtcaagaacggactcgtcgctagtcaccgctgaagaactcaaagcatctttatgcctggaaaacattgaagaaaacaacactgataacaacgataacggagaagtcgacggtgacgacctagcttttaagctcaaaaattctccggtcaggagacatttccatgtaacacccaaaagaataacaagggtgagaactggtagggtttcgcacaatattattgaaaagaaatatcgttccaatatcaatgataaaattgagcaattaaggaaagcagttccaacattgcgagtagcgtacaaaaaatgtaatgatcttcccattacatcgagagacatgatagacttggatggcctagaaccagctacaaaactgaacaaggcgtccattttaacgaaatctatagagtatatttgccatttggaaagaaaatgcctacaattgagtttggctaatcagcatttatcaaatgacgcaagcgagccatttgttcaactttccgaaccaccccatcccgttaataataatagtggtaatgaacaaagacagaggcaaaatcaaaactggcaaaggcagcgaccacaacaacctttacataacatccaatataacggtccacatcaaaatgggctcgtgagtggcaataccaacagttcaaatgatctgaactttaacaacgcagaagatttttag

SEQ ID NO: 5219 - DNA, 375 bp, Saccharomyces pastorianus
atgttccaaagtaataactataatgtaccgccacaaaattataacgctaattccctgggccctcaagtgcccataacacaggcttactatgcgccgttccaagcgcctattcatgttcaacattctatgcctccagcatataaaaacaattcgtaccctataagtggccagtatgactcgtcgttccctagtacctcgagccatggctcagtaatggataccaactattatactgatactttgacttccatacccacaacagcgaccgacagtaccacgatgacgacagaaaacggcaatgctattgatagcgaagagtacatcgatatatggaagcctttagtaacgatgataacgagaacatcgatcgtgtag

SEQ ID NO: 5220 - DNA, 108 bp, Saccharomyces pastorianus
atgggcgacctgagtgataaagtcgccgttaaggttttcgattgtagaactgcccaggactgtaacgaagagcaggctgtaaacgtgactacaaaccaaatgtattag

SEQ ID NO: 5221 - DNA, 573 bp, Saccharomyces pastorianus
atgagtcatgacagttatgagatccatagcacagacgatgatgatgatgatgatgatgttttttgtgttaataatggtgacgttgataacaatactactgaggattacagtgaatcttttgatcgtaaggccctaacaagcagtactagttcattaccacggtcgtctcaaagaagcatatcggggtgcacaaaggttttacaaagatttagatattccaagtcatttagtggagggagtcctagcagacagccattattcccgcgcaatgtcaatcaaaaaagtaaaggaatggtatatgtcaatagaaagagagatgatggcgatgaaagtgctgatgataaaaacgtgagcatacaaaggccctcgctaaggaaaagcctcatgggtgccaaatcgcagagtatagtcattggtacgaagagtgtcgacgacagaaaattattcaattcgtcacccatcttgcatgaggggaacaagaaaaccgatattagggttaccaagccaagccaaagccggccggcggttaggtctgtgtccttgctttcccaatttgtttataaaggtaaataa

SEQ ID NO: 5222 - DNA, 627 bp, Saccharomyces pastorianus
atggtgatgtcttacttgttcgataaggacatggaaacatggcttctggtaagtgacggatggtgggcttatggttcccaatattgggatacaacaaatactactggcttgtcttctagtaaagcgaatacggacgcttttagtagtaatgaagctaacataaatgaaatggttagtgatattaaaaatgataaccaaagcattatcaactttatggaacgtaagacgaacgatgaacttaatagaaagagcaggattaagaatttacaaagatttgctaggacgatattgatgaaggaagggtttgagaatatggaggagattgttactttgtcacatttggaaaacaaaatactaacagctattaagttggaggaatctgaagaattttccaagttagtgatggtttattgcattcgtcttagcgaactgggatatatggaccgcctagatgatgttttccaatggttatataacgatgtgtctgtcagtcatacagacacaagatttgccgaagtaaatttcaggagggacctcttaaggaaaatactaattgcgtgcggtggtattagacaggttcaaagagtcaccacacgctacgccaaggaaatgaatataatatcttaa

SEQ ID NO: 5223 - DNA, 1926 bp, Saccharomyces pastorianus
  modified_base (1923)..(1923): a, c, g, t, unknown, or other
atgagactgcttaagtatccattggatattaatgacgagaaagtgaacaccctcgctgcccttggcccctatattatactagctggcagcgatggtcacgtgatggcgtggaagcaacagcaattagtcgataccgcctttgataaagccatgatcaaggacttgaagcctgaactttcatttcaagttgatcaggactctggcggtgatatattttttttaacaggggacctcgaagcattgtgtattgggtctgaacatcgtgtgtggagttattctggttggttcaataaagacacgactagtattaattccttagaacaaatgaagaagaaactaatgttcgaatgtaaatctccaagcaccataacagatgtgaaatacgacatacatctgggcatcatatttgttcttttaagtaatgaaaacaaggtactgctattccaccataaaagctcggaaaagctatcggaaatatctatggacaaggcgagcaaacctattacgggaataatagatccaaccggccagacctttaccattttgactgccgatagatcaattttggtctatcaagttaacaaaacaggtacacacaagcttataaataaactgacacaacatgtacagatgtatccattgcattacagaatttcaatgtcacctcaggcagatattttaccggtaataaactcggtcaaaggcgtaccaaataacgccaccagttgcactactttgctagacagaaataacaactataaagttatgaagactttggtgacaccctcttcaaatggttgcaaagttctcgtctattcaccagcatattatgagaagcccaacattaaaaaggccacgagtacacgttacaacctaatcgctacttccggctcaacggacggtaccgttttagtctggaacacgaagagaatgaaacctttgtttaatgcattacaggtttcaaaaacagcaataaacgatatgtcttggtcacaagatgggttaactttgtttgccatttcaaacgatacaacgctatacacatttgcatttcaagagaaggatttgggtgtggcgttaccgctagcagaaataaaaacattgcaggaattaaataaaaagctgccaaagctcgaggaaccagttccaacacaaacacccaaggatttccctgaaaatgtcaaactcgaagcatcttcaagtataatgtctatacccaacgacacgagtagaccaataacggggaagaaactgtctaaaaaaaagctaccttcaggtcaaactaatggtattaagactactcagagtacctcaatggaatttaacgcgccttcttatactgtgcccaaggacctaaaaagaaaaccaaaagaagcgactccgaatgacgctacaaacaatgttcctagtagcaagaaacaaaaaaaagaattgcaacccattgactttttggatacaggccttatgcttcccaatacatctttttcgaggattagactcgcaacaccgaaaatcagatctacgtttaaatattctccaattaataacccaaacttaattctcgaggtaaaaaatgggtctggcaacgaacaaaggccaacgatagtgaggcttacttcaaaagtacttgaccaggatcaagtattgttccaagattttataccaaagctcgtaacaatttgtacggcaggtgatactttttggtcattctgtagcgaagacggaattatttacatatactctgattcgggtagaaagctaatggcacccttaatactaggtgttggcattagtttcctagaagcatgtgggacgtacctactttgtttaacgagcataggggagctttattgttggaacatagaacagaaaaagctggcattccctacgaataccatctacccgttattaaatcgggtcctntag

SEQ ID NO: 5224 - DNA, 906 bp, Saccharomyces pastorianus
atggtaggttccctcctaacctggagtacaccaatctttttcatccacatgaagttttcactacagcaaataagaaacatgcatattaagcccataaagatgagatggttaacgggcggtgctaactacagctatttattgagcactgaaaacaaggagaactcttggttgattgatcctgcggaaccccttgaagtatcgccagagttaagtgttgatgagaagaagaaaatacatgctatcgtcaatacgcatcatcattatgatcactcaggaggaaacatagtaatgcacagcatcttgcggaaagataatccaggtcacaaagttgaaacaattgctggatccaacgcttctcccggtgccactgaaatacctcagcacatggaacagtatcaactgggcaacttgcaaataacatgcattagaacgccatgtcatactaaggattccatatgctatcatgttaaagatttgggaacatccgagcaatgcatcttcactggtgacagtctttttaatgcaggctgtggaaggttttttgagggaaatggagcagacatggacacagctttgaacaagactattttaagagccgtaggtgagcccaactggagtaacataaaaatatacgcaggccacgagtacacgaagggaaacgtcaaattcatcagggcgaaaatctaccacgctatgggggagaataaacactttgatgcactggaacagtattgccagagtaatgagtgcaccactggtcattttacattgaatgatgagctggaatacaatccgttcatgagattggacgaccctgcagttagagcagcagttggtgatactgctaaggcatatcctagagccacagtcatgcaagagctgagaaagctgaaaaacgctatgtaa

SEQ ID NO: 5225 - DNA, 387 bp, Saccharomyces pastorianus
atgatcaccgctttaatgtacttttcctccaaattgggaaaagcatcctttaactcctgcaatattgggttctcctttggcgcaggctcttcagacctgtttctggccggtaagggaggctgctcctcttccttttcctctccttcatctgttttctttgcagaaactgcctttgtatcatcattagcttcacagggggtttctccttctttaacattttgtggggtgctcttatccttgtctgcagcatcactatcttctttctcatcggcgctgagatcgacatctgtagtctttgcgatatcctcatcaatttgttttggagcttctttcttctcaactgaaggaatatccttgctatctttttcttccatggttccggtttga

SEQ ID NO: 5226 - DNA, 3066 bp, Saccharomyces pastorianus
atgggtgttccctcattttttagatggctatctcgaaaatatccgaagattatctccccggtattagaggaacaaccacaagtagtcgatggtgtcatattaccgttggattattctgcccctaacccaaatggcgagttagacaacctttatctggatatgaacggtattgttcatccatgttcgcacccagaaaacaagccccctccagagactgaagatgaaatgcttttggcagttttcgaatacaccaatcgtgtgctgaatatggcaagacctcgtaaggtacttgttatggctgttgatggtgttgctccccgtgccaagatgaatcaacagagagcgcgtagatttagaagtgccagggacgctcaagttgaaaacgaagcaagggaggaggttatgagacaacgagaggaggttggtgaaataatcgacgacgctgttagaaacaagaaaacttgggactcaaatgcaattacgcctggtactccatttatggacaaactggctgcggccctacgctactggacagcatttaaactggctactgatcctggttggaagaatctgcaggtgataattagtgatgccactgtgcctggtgaaggtgaacataaaatcatgaatttcatcaggtctcaaagagccgatcctgaatacaatcctaacactacgcattgtatctatggtttggatgcagatttaatctttttaggcctggctacccacgaaccccattttaagattttgagagaagatgtctttgcacaagataatcggaaaaggaacaatttcaaagacacgataaatatgacagaagaagaaaagaatttccttcaaaagcagaattccgaacaaccctttttgtggttacacatcaatgttttgagagagtatttatctgctgaattatgggtgcaaggtcttccctttacatttgacatcgaaagggctattgacgattgggttttcatgtgctttttctgtggtaatgattttctaccacatctgccatgtttagatgtcagagagaatagtattgatattctgttagatatttggaaggtagtgctaccgagattaaaaacatatatgacatgtgatggtgttttgaatttgccatctgttgaaacactattgcaacatcttggatctcgtgaaggtgacatcttcaagaccagacacattcaagaagctagaaagaaagaagcttttgagagaagaaaagcgcagaaaaatatgtcaaaaggccaagacagacaccctatcgtagctactgaacaattacaaatgtatgacacacgaggtaatttagcaaaaggttcgtggaatttgactacaagtgatatggtgagattaagaagggagctgatgcttgcaaatgaaggagacgaaaaagcaattgctatagttaaagaacaaagtgacaaaaataatgacttaatgaaggacattagtaaggaagaaatcgataatgctgttaataaagccaataaatccaattttagtcttgccgaagttatgaagcaaaagctaataaacaagaaacataatcttgagaaggataacgaagaggaagaagactctgctaagagtagtaaaaaaataaagccagaaaagactgagtctgaaagtgatcttgatacagagatcaaggctgaaattgaagccgatgtaaacgatagagatgacaccgagagtacggaagtgtcaaggtattcacctgctcgggatactctcatttccagtgaagctcctcaaaatggtgtctttgatacggacgagtatgttcggttgtttgagcctggctatcatgagagatattacacagcaaaatttcgtgttgctcctcaagatatcgacgaactaagaaaagacatggtaaaatgctatattgaaggtgtagcttgggtactaatgtattattatcaaggctgcgcttcttggaattggttctatccctaccattatgctcccctggcaactgactttcatggattttcccacttggaaataaaatttgaggaaggtacaccatttttaccctttgaacaattaatgagtgtcttgccggccgcatctggtcacaccctaccaaacattttccggtctttgatgtccgaacctgattctgagattatcgatttttatccggaggaatttcctatagatatgaatggtaagaagatgtcatggcaagggatagcgctactaccatttatcgatcaagatagactactaacagctgttcgtgcacaatatccttcactttctgatgctgaaagagcaagaaatgttcgtggcaggcctgtcttgttgataagtgacaagaatgcgaactacgagagattttccaagaagttatactcaaaagatagtaatgccactattgaggtaaaattccaacatttcaagagtgggttgagtggtattgtatcaaaggacgtggaaggatttgaattaaacgggaagatgatctgtccaattcaaggagggtcattaccagatttgtctactagtttgatattgaaaatgtcataccgattaattccattgccgtcaaagaacaaatctatcatactgaacgggttcattccatcagaacaggtactaacgacatatgatcttgattccgtaatgtacaagtatagtaaccaaaacaactctcgtcgctggaactttggaaacgatctgaagcaaaatattgtcccagttgggcccaaaggtattactcaatacaaaccaaggactggcggttatcgcgccttcttttattatgctgagcagaataggaacagtactcaacccgtcaacaactataataagaacagttacaatgcccaagctggtttcaataatagtagatacaacggtggtggtaacaacaacaacaataacaacaacaacaacaacaacaacaacaacaataataattacagcagtaattacagacaaaattctaggaacaataactattctggaaatagaaacggtggacagtacggcggcaacggttactcccggaataataaccaaagtcggtacgacaattccaggcgctag

SEQ ID NO: 5227 - DNA, 1182 bp, Saccharomyces pastorianus
atgtccaacgctacaaataatactttaggcagccttttgccacagatggaagcagcagcaaatagtgattccctttatggcgatatggtaccgaaccttcgttttaatgttacaatgattgtcatttggggtatactgctaggaatacaggtcatacaagttatcatgcgccaatactggttcacggtggcctttatatgtacaggtattttggaagtgataggctacgtaggaagaacgtgttcacattacaacgttgcttccttggatcctttccttttgaacatgatttgtttgaccattgcgcccgtttttaccatgggtggcatttactatcaactggcaaagcttatagaagtgtacgggcaccggttctcgttattgccttctccaatggcttattcatttattttcatctgttcagatatcatctctctggtggtccaagctgtcggcggtggtctttgtggtgtggcagttgtagatggcgactccctaaaaactggtaataatgttttcattgctggtttagctattcaagtcgcatcaatggccatattcatcatactttggggccatttccttttccgcatatatatatcagtaagatgggagcatcttaatgctaaactcatctcattcaaactcttaaagataccccaaaaggatgtcgattatttgtacagagaaaaataccgtgacttgaggcttgaacctaaacgttgggttttccattatttcaatctggcgatgaccgtatcagtactgaccatttttactcgttgctgttatcgtttagccgaactgattgtgggttgggatggctacctaataacccacgaatggtacttcattatcctggattccttgatgatggccatcgctacagtgactttgacaattttccatccgggatatgccttcaaaggtagaagcctttccattccaatcacaccgggtcacgttgatcctgaaactctgccacatccagaagacactgatgatattttggacggttcagattcaaatcagcttgatatcgaaaaagaagaactccaaataagtttgatgtatccaattaataccttcaagcaaataatgtctaaagtggccagtccattttcctctaaaaataaaaaaacaaatacaacagtacctcagcattcccagatgccaatctaa

SEQ ID NO: 5228 - DNA, 2055 bp, Saccharomyces pastorianus
atgccagcaaaatctggatcgaaaaatgacaggaaagcagtgcctccaaccgttttggctggagcagagcaaacaaatttaagcacgccggcaatgcccgatacaaattctacaggaccattgtcatctgtttctggcctcgatataaggaaatcatctagtcccagccgttctcacaccaagtcgattatgaacgttagtgggtcatctggcgccgtcgtcagtaatacacctgagccaggtttgaaaaggatacccaccgttactttcagtgacccaaagctcgggtccctcaggttggatatggagcagactccgtctggtcaggtgaccaggcagcctagtgagaagaaagcagcgtctgtacacattgcttcggataataacgaccaaggcaggacgttaggggacataaacacaaaaactccaaaggatggagacactcccgcttcttccttttcgactccaacctctatattatccaacaatgagggaggaaataacgtagccagcctgcttgcaaaaaaactgagtcttgctggtggagctgattccattctgaactcagacaatagttcggatagccctaaaaaggagcatccacatttttacgtggaagatcccttgcatacgccatctgttagatccaggtctaacagtactagtccccgcccctccatagtaatgaacacgttcaatccaataaatattgagcgggaggtctccatatcgaagaccggggagcccaccttgctggagtccgttttagaagaagccttgtctcccaatgcagttccaaacccattgaagaaggaaagcgttatgacgaatttagatccgaggttacctcaagatgacggtaagctgcatgtgctttttggggcaacaggctcgttgtctgttttcaagctgaaacatatgataaagaaactagaagagatttatggaagagataaaattagcattcaagttatattaacaaactcagcaacaaaattttttgcgatgaagtacatgaggaaaaacaagaaacctcacaacattaatgatacaaaatgcaataataccgatactaataccaataaaaccaacaatactaataccactactaatactaatactaataacaataacaataacaataacaacaacaacaacaacaacaacaacattaataatgctgctcttctggaatcacctagctctagaaatattcctttggacacagccgcttctggcctgaaaaatgcccaaaatgaggaagataatcccaaggtttccgatacaggatttccctcttcaatttgcagtggccgtacgttgagcaacgcttcaaacactgtatcacaacatcctcaaatcgagttgccaccacatatacaattttggacagacccagacgaatgggatgtgtggcggcaacggacagaccctgtcttacatatcgagctacgtcgttgggcagacatactggtcgttgcacccttgaccgcaaatacgttagcaaagattgcacttgggttatgtgacaatcttttgacaagcgtgataagagcatggaatccgacgttccctatatttctagcgccttcaatgggcagtggcacgttcaactctataatgactaagaagcactttagaattatacaagaagagatgccgtgggtaactgtattcaagccttctgaaaaagttatgggtatcaacggtgatattgggttaagtgggatgatggatgcgaacgaaatcgtgggcaagattgtggtcaaattaggcggttatcctgacacttctgccgggaaagagggagaaggagaggacgaggacgacgatgacaacgatgatgaggaagacgagaataggaagaacgatgcagatgaagatgacgataacgacgacgacgacgacgacgatgacgatgacgacgacgacgacgatgacgatgacgacgacgacgacgatgacgatgacgacgacgacgacgatgacgatgacgatgaagatgaagacgaagatggcggggagaatggcggagagggtcccgatcgctcttag

SEQ ID NO: 5229 - DNA, 2439 bp, Saccharomyces pastorianus
atggagacagcaacatcctcccctttacctattcaatcaaggagcaatagtgacaattctagtacaatagtgccgcatatgaacccttcattgcaaacgccattgaccatatcgacaatggtcaatcaatcaaactctagagaatttatgaagttaactccagtccgtatcagagattttgggtctcccttgaaaaacgtatccacaaatcaccgtttcttagactcagataatggtagtaatagtacggttgataacatgtataaagagaatttcaacctcatttcaagggaattggaaaagttactggaaaacctaaatgtgatatatcaaaatattgggtattctaatactgagatcattaacaaagagaagctcatattcactaccatatctaactctataaagcaatttttcgaacaagctgacgaagaattgaagagactgtccatagaaaatgaaattgaacaagatatcttaaataacatcctggaggtaataaatgacccaagcgggataaaaactattcctgatttatacatccgaaatgccattctactccaggaaagcaaaactgtaccacaatcgcctaaaaagcccctttcattgctgagcaaaaaggcagcactaggcactgcgaagaacttcgttttgggaaagtttttaccccaactacacaactacttgaaatctctagtcactctgaaaaaactcacacaatgcgtaaaagaaaatcttcaaggattgacaagagcagatagtgacgccctttcagcatttcctgatctggacatattaacaacgtatatgacacagatagaaagtactaaagatgatgtcaattcgtccatgaaatttatcagagataacaaaaaggatatcttgaagggatcggcattcaaaatcattgaccaagaatctgtgaaacacatgaatgagattataacagtttacgaggaggaatataaaaggaggtttataaccatactcaaaaaaaaggacatcattctatccatttctgaacaaatcgaaatgccgctgtcaacagtaacagataaaaattttgaggcagatttgagatcatatggagagaaaaaactcctcacatcagaaacgcctgacctatatcctgtggacggagaaataatgtctaaaattgacgcagtattgaagagaatggaagcaatccacagtgaaagaatgaacaaaaaagatcttttaatggaacagtgccaaaaactttggacaaagcttaaaatctctcaagaatatgtcaaatcctttacacatagtcactcaggtttttctacggaaaccttagacaagataaatatagaactaacaagactcgaactgatgaagaaaaaattgatcaaaaaacttatctcagactcctgggacaaaattagagagctatgggacacgctacagtattcagaacaaagtcggtctaactttatcatagtattcgaggaactgagaagaaacgctgcgactttgcaggaagacgaacttctcttagaaacttgtgaaaacgaactaaaaagtttagaagataaattgatactttataaaccgattttaggattaatatccgattttgaatctctacagaaagatcaggaatttttggaaaaaagctctaaagactcttctagactattatctagaaattctcacaaaattttactgaccgaagaaaagatgagaaaaaggataacaaggcactttcctcggattatcaacgatctaagactcaaattagaggaatcagagggtctattcgatcaaccatttatgtacaaaggcaggccacttccagaagtaattaacattcaacaacaagaactagaagcaaaatatccaagatgcagggtcagaatgcagaggtcaaaaaagggaaaagatgttgtaagtaaagaaaatagagttcagaaaactactcccaaaaccactcaaaactcaatcagaataccaacagatatagatttgaactcaataaatatgattcataaaacgccttccagaaacacggtgaggcagtttccaaaaagtggagcatctcgtgagaattcagttcctcgtcatatgcagggaacaacacggttatctagtcctaaaagaagaaatacaaaattactgccgccgacgataatatcgaagggctctagagggaactcacagaggcctgctttgaacagaggtaaatcgtctgaccttctgttatctcctatgctaaaccatacagtaaacgaatgtccagtaaaaccgcgtcaattatttctactttcattaaacaaagtcgacgcaaagggtagtcatattccacaactaaccaaagaaaaggcaatggagcttgtcaaacgatctgctgtccacaccggtaaggagaacataagaagccgacctgcaggcatgcaagcttgcactgccgtcttt

SEQ ID NO: 5230 - DNA, 1410 bp, Saccharomyces pastorianus
atgattaacattgaaactctttgcagttccccgaaaatatcaaaacaaagctttgaaatgccttctgacaaacacctgtttgtcttgatccacggattatgggggaactataagcatatggagtccatgaggacaaccctttccgctactttgaagaaggaagacgtcaaggatgatatgatatatttcttaccgaagcagaacgccatgtttaagacgtttgacggtattgaaatcattgggtatagaacattgattgaagtctgtgaatttatccgggactataaagatggaaaaatcaccaaaatcagcataatgggatattcacaaggaggattagtggccaggttcatgattggtaagatgttgactgaatttagagaactttttgaggacattgagccgcaattatttatcaccatggcaacgcctcacttgggagtagaattttataaccccatgggcacaacttataaaagtgtattatttgctactttaagggcatttggatccaccatcttaggcaaaagtgggagagaattgttcattaaaaattctaataacgatatactggtcagactgagtcaagatgagtaccttgaggcactttcgcgttttaagtggaggttggcctttgccaatgttaaaaacgaccgtacagtagcgttttatactgcttttatcacagattgtgacccattcattgattacgagaataaactaatgtacacttttgaggaaaaaattccaggatcggattatagcggcatattaccaaagattgttgatctaaatgctctaaacgttaacagccatgctcctaccaaaccaactaagacttataagaagtggcccaccattattcttatagtatttgtagctacgttttttgtcttccctgtagcactgattatgaatggcctgggaactgcgtatagtcatattgttacttgcaagtaccgtaaaatgatgtcaaatggtgcgtttcatacagcggtcagagggaagttgggattgacggaacagttgaaggggtatgttgcagatgcatatggttcaattttaaattctgctctagacacggacacaaataatgaggcaagtaacagcagcgctgtcaatgaagaggagcttccttggaaggagtttgtcgaaaaatactcgactatgaatgacggtgcttggaaaactggattcaaaaaattaccttttgatgacagccggaggacaattttggaaaatttgaatcagttgaaatggatcagggttccgatctacataaaggcagtaaatgctcatggagtgatcgtggctagaagggggctagacgagaacacagcagctactggaaaagcatgtgttgaattcacgggacagttgttggcgtacttgatgcaaaagagcaattga

SEQ ID NO: 5231 - DNA, 1908 bp, Saccharomyces pastorianus
atgaataacgtcgtggacaaaagcatgatcaagaaaagaggcaggcctcccatcaccaaagattatcccgatcctttacaaagccctatggcgcattcttcattgcaggtacagaaacagggccctcgcagtttcgctaaacctttgatgaaggtggggcagtgtagtccatctccgaataaaagaagactcagcgtcgaaaatcaccctaatttagtggccaccaccaagaagggcagatatagaggcgtcctgttatcaactcctaccaagaaatcaggagtgagcgggtttactccgatctccaccccatcttccaacgacagttataccaatacggtattctctgagtcaaggaaaactttcctacaaagttcgccgcccattatgtcgtcttctccaggcttccaaaagaagaatgaattcatattcccttcaccggaccaattcaaactttctttaaccattaccgaaagtgggaaggctgtcattgctggatcctcgccattctccccattgtcgaaactacctcattccttaatgaacagtaacgataaaaaattcttacttaatgaaagaattcataaaaatatcaagaaaactactcttaaatttgaaaagaaacgtattctttctctcttgaaacaaatgaagaacaataaagatttcaatatgtcttccgaaatacgcccaccgaaatcaagcagatctgatgtcgttgaaactgaactgcctaccattatagagacctcggcttctccagtaagtagcattagacataacaacgctttgttttctcgatctccacaatcaccgcccccaagcgcacaattcatgccaccatccacaccaaaaagttctttccaatttagaactggattcactcctaacgttgcactgaatcaggtgtctttaagcgatactttaccgaagcctacagcaaatggtcttaactcgaacattgtcggttccaacaacaataatcacaacggtagctccggtaataataacattgtagatgctagtgcattattaacgttgactaatagccctggaatgttcttgtcgccaagaaacaaaatgatgcccaaatctgctactctgtctagtgaacaacaggaattcgtattcaaattctcaggtggcgatccattattgcttaccgatgacgcagatgggaactggccggaaatgcttttcaacgtatctaacagtccaaaacgtcaaaaatgcttcaatacacctccatcgtggataaactttggttcaccagggctattcagcccaccaagaggtgccactatcatggtaaatggtaccacccccgcagccacatcggataacggtaatgtgcatagacaattacaagcccaattagaggcacaagtgcaagcgcaatcccaaaccaattctccggctcaacgacaacaacaacagcgccagttccagatgctccaatcgcacactaacatgagctcttccccaccgcagatcaacatagctctttcacctcaacagtctatggctagcagatcatctgggtacctcaataaagagaaaaccatgattggaacgacagatatactgggcaacgccaaaaatggaaatttacaacccccagcaaacctggttaacgctgctcatggaccttcgacgcccagaaatcaagaattacaattaccaactttaatcgagtgcactccgttaatccagcagaccatgaatggttctttaggaactaaatacataccagaaacctctgtttcaaatagcgttgcatcgaacttaaacgggttcactgctaccaaaacagtttccggttctaatgatttactaaagcagaatatgtatagtaacaaacatgacgatgctagaattgctttgaaaaaattaatcgatgatcaataa

SEQ ID NO: 5232 - DNA, 729 bp, Saccharomyces pastorianus
atgtttgctacaaagctaatcaagccgcctttaatacctaaagatatcaaggaaattaatgaaagactcttggccaacaacggaagtaaaggcttagtacaagatgtgttttttgttatcttaccccagattccgcccaaactaacatttatcttaactctattttaccaaattttagcggtccttcccatattattcgatccatcattcaaaagatttattggttcattaaccctttgtgggctggcttcatatttgtttggatggcacgtgcatgaaaaggctataatgctagttattatcccatttacattccttgttggatttgatcgtcgtcttttggttccgtttatgcttgttgcttcagctggttacgtttctttgtacccgcttcttttcaaagggcaagattactttatcaaaagtttatacacttacgtttggtgcataatttattttgcagctttcagaaaaactaccaaaatttcctcgagtgtggaaaggaggatatttttcttggatagattagcattaacgtacatcttttctttattaccaatggtaactgtactacagattttagacgaagtcaaatggagatactcgtttttgcaaaaattcgagttcttgggattgatggcatacagtgtttattgttcattgggcataatcagctcatggtttgccctatcgtggttatataattttgatgaattactatggcaataa

SEQ ID NO: 5233 - DNA, 1362 bp, Saccharomyces pastorianus
atggcttcaataagagatttaaagaaaaacgttgataactttgatccaacgacatccaaccatttcaaaatcattgtagataacaccaaaatagaaagggagagtggatcttcgatgttcaaaaagacaattcaaatggaaaattctctactaccatcatcatcatccttggcccttatagacacccctggggatgccagatttttcaacaaggaaaccattaattcaattttgacattcaacccagatgtttttacactagttattgattgcaactatgattcttgggaaaaattattagatggtccaactaacaagatttatgaaattttaagaatcatatcatacttgaacatgaattccacatacaaaaagcgattgattattcttttgaataaagcagattcgattggctgggacaaacaaaggttagaaatgattcaatctgaattgctgtatatgctaacggaaacctttcaatgggaaaccacacaattccagttcattccatgctccggtttgtcaggttcaaatttgaatagtgctaataacgtcgttaccaagtctaaatacaaatctgagtttgactctataaatgatgtacccgaatggtatgaaggaccaacatttctatctcatctgtattcattaatggaagccaatatgaataagatagaaactactttggacgagccatttactggtatagtgctgcataattctgttctcccattatccacagaaaacaacggtatatcgttcaagattttcatcaaaagtggatatattcaaactggtcaaacgattgagattcatactccatatggagaaaaaacctattatggcatcattacacagatgattaaacctaaaatgacgttgaggcctgatataaaaaatcgatcacccgttggtgtacactctgacattctagaaatttatgttaaaatacaccctacggatgaatttgcgaaaaagcaaattcacatttacaaaagcgatttaataatttctcctagaaaagcaaacactttgtcaccaaatttaccaaattctctgaagttattaaacctgcggtcaatgaaattgtcgatccaaacttgcgcgttcagtgaccctatagttttagattctgaattgatcctttaccatgatttaacatacactacaatcaagttagtgaagattgttggaactaacgctagttcgattaacccaaaccaatcactaactattgaggtcgagattatcgcaccaggctgtgccttaaacgtgattaattccaaatatgttacaaatgatgttgttatagcatcgtcagactataaaaccgttgcagtgggaaaaatcgcatgtcaataa

SEQ ID NO: 5234 - DNA, 384 bp, Saccharomyces pastorianus
atgtctttattagaacaattagcaagaaaaagactagaaaagtcgaaagacccctcaaatatagcccaatcacaaagtacttctaaaagtgcttccttactagaaagactccataagaatagagaagctaaaagtatcaatggcgaatccagaagaaaagacttgaagtctcttcttgcaaaagataggattacaaaaaatgataatacttcaaatcaacacactttcacattaagttcaaaactctctgctttaaggaaaccatataataatttagacacagaggcaaaaccagcaccttctaaaagcacggaaggtcaatcccctgtccaaagaaggtcgtccgatgtaaccgcgatattaaagatccatggaatgttctga

SEQ ID NO: 5235 - DNA, 174 bp, Saccharomyces pastorianus
atgagtggtggtagtttattgtatgcctctttcacagcatttgttggtggaggctcacacgatcatgacttgagcgtagaagaggaagttgttttaccccatgatgaatccatttatgtgttgctaggtgtgagcattccgttagtgatatcgttttgcatttctgaagactag

SEQ ID NO: 5236 - DNA, 2226 bp, Saccharomyces pastorianus
atgtctttgcctgcagatttagatacaaacatagattctgctgttcttaaagctattgaactaggtacgagactttttagatctggtgagtacctgcaagcaaaaaggatatttactaatgctttgaaagtgtgcgattcttattctcaagagcaaatcgtgcggataaggagcgcgcatcatttagatacttcaagacccgataacaaacggctttgtcatcccaaatacataaaaatactggacaatatttgcgcatgctatgaaaaattggacgatttaaaatcatgtctaagtacatcacaaagatcaattcagctagatcctgaaaatgctaaatgctatgtacgatgtgtgagaacgttcataaaattaaaggattggaaaagagcctataaaatgtgttctcgtgggctacaattaagtggtaacgctaactctcttttgagacaacaaaggcaattcattaagcaaaatatagcaaaaacccaggatatccagaaagtgaacaatggcgacagaaagtatatagatccgttaacagatgatgtaaaagtggaaaaaagaaaaaagaatagtcatgacatagcgggattgtcccgaccaaagaaattattgaagaatgatagccggaaaattgatttatttggcgatctaccaatagagttactacctatcataatccgtagtttttccagtaaagaacttattacattaacattggtttgtaataaatggagagataaaattctgtatcatttaagttgttttcgagaattcaactttaattcaattagtttcagaaatttcgtcaaatttatggattttttacgtcagaatttcactagaacttacaaaaaatacaatctttcacagctgaaaataagctctaaaatcgcttcagaggagttgagaattgcccagatgttatttactaaaatgccgaaatgcataaatttccaacgacttatactatcaatgacaacgttaaccacaacacaattctacaaactgatgatgggggaaaatagggaatttttttcgaaattaatggaactgtcgctcatgataacttatagacctgatagacaacatgaatggaaaattcttcagaattgctctcagttaaagaagatagaactaatctttgttaattccatgatatccattgccaatcggacaaatagcattggaagcggcggcagcttcagttcagtgaacggtagtgttaatgagatagtactagctgaggatcaaggcgaacaagaaattgcggaagaaaaaatagtttataatgagctagagaaaatgacgctgatatgtgacaagaaaaagattaagaacttcccacttgcttatgctctgctaaatgatggttttcctcgattgcaaaaactaatcataacaggtgtgacttttcctattaataaccgaggaatggtaacttttgagtggttatcaaattttccgattttgagagaattgtggctggaagacaacgacaactgtgaattaggtaaattcttgcaagtattgaaggactcgcacgtttggaaaagcatgcagaaattaacctttagagagaacaaactgtacacggtgaccgatttagatgaaagtttgccgattgctaatgatagtgaagtacaagctaggctgtattacggagaaaatcttgaaaatttggagacgttagacctaatgggaacgtcgataagcggatccgctttgacgaaattatgtgatcgggggtacttgaatggtaagaaattgaaggttttgaatattggcaattgccctaatatgcagttttctaaccactatgttaatggagcaaggatggtgttggacgtgaacgtggttttgaaaagactgttcagtttggaagagattaacttatcccatgcgagttcactaaatgacaatacaatgaaattattcattaccaacgtgccgttcttagaaaacttacataaacttgacatttcgcacaattttgaaatcacaggaatatcaatctacgagtttttgaaaaaattccagatggatcacgaagacgacacaggtggccagccattggcttacttgaatatcgacgggtgctcgcaagtgtctcatatcacggttaatatgctgcgagctcagaatttagtcaaacgagtagattgtgcttacgaaagggaagtatggaaaaaatttggagtcaattcatatgcgtattcatga

SEQ ID NO: 5237 - DNA, 1161 bp, Saccharomyces pastorianus
atggggcgcaaccaacttgcatctatcgaacatgaaattatggacgggtctgtcgataatgacatgcctatttcccgtctttcagagatgttcaacgtggaccacatcatcgcgtgtcaagtaaacatccacgtcttccccttcttgaaattctcaaatacctgtgttgggggcgaaatcgaaaaggaaatcaccgctcgtttcaaaaaccaactgacgaagatcttcaaatttgtttccaacgaaaccatccatctcctagacatcctgaaggaagtcgagttccatccctatttggtgacgaagctgaaacacctctttctacaacaatattccggtaacgtcaccatcctacccgatttgtcaatggtcggccagtttcatgaaatactgaagaatccctctcagctcttcctgttgcaccagaccacgttgggcgcaagatcgacatggcccaaaatggccatgattcaaaataactgtggccaagaattcgctttggataggacaatcacttttctaaaggagaaaatcatcatctcttcgtcaataagaaaccctttgcaattctgtcaggctcagctgggtgagcatatcaaatctctatcaataatggacgccgatttaccaggcgtcgacctagaagaatcctcttccaattcgttatccatcatcaagacgccgaagaagcattcaaagagaacaccccttcagccgttaccttctccatcctccattttcaataagagaaaactagattcttcatcaacttccccatctccacccgcattactggagggcacaaagtctttatcgatacatggtccaagacagaaggcaaactctttgtcatttgctattgactcttccagtttaaggttgaagaaatccccattgaagaatcaaccaccgcctccattcaaaaaaagatcatcctattgcaaccaaaatgtttcaccggaaacaagaataaataggaaaaaatctggtaccatttcctcccacgatgttcaaacaaactcagaagatttccccatccccgctattgaaaacggttcattcgataacacttaccttcacccaactaggttccctataaagggtatgtcgaccgcaacaaaggacgacttcatgaacaattctgatatcttccaaaactaa

SEQ ID NO: 5238 - DNA, 909 bp, Saccharomyces pastorianus
atgtctaacactctgccagtaacggagttccttctgtcgaagtactatgagctatctaacactccaaccaccaacgcaccgtccttcctcacttggctctaccacaagaccctgtcccgcaagcagctgctcatatccgacctatcttctcagaagaaacgcgccatctcgtacgaccaatggaacgatatcgcattgagacttgacgaagccactggcctttccaaatggaaagatatcgacgagtcgtccctatacaactacaagctgctgcgcgacttgacgctccagatgcgccatttgcgaacgtcccgcgaataccaccgcctgctgtacctgatcagaaccaaatgggtccgcaaccttggtaacatgaacaacgtcaatctctataggcactcccactccggcaccaagcagatcataaacgactacctgcaagagtcccaggcagtcctcaccgccctcgcccacgaatcagacatgaacgaccactatctcttaggtatcctgcagcaaacaagacgcaacatcggccgcaccgccctcgtgctcagcggtggcagcaccctgggtcttttccacatcggtgttcttgccgccttgttcgaatccgacctgatgcccaaagtgattagcggcagcagcgccggcgccatcgtcgccagtatattctgcgtccacaccacccaggaaattccctccctgttggcgaacgtgctcaatatggaattcaacatcttcaacgatgacaactccaaatcacccaacgaaaacctgctgatcaagatttcgaggttctgccaaaacggtacctggttcgacaacaagcccttgatcgacacaatgctgtcgttcttgggcaacctgaccttagagaggcttacaacaagacgggtaagatcttga

SEQ ID NO: 5239 - DNA, 507 bp, Saccharomyces pastorianus
atgaggaacaactccttttttgccaacgcgcacacgcaaatcctgcagaacatcatcgacttcgaacggacggcggccaaagacgacggctccgtcgtccgcacaaagatggaccaggcgcagaacttgctatgctatatgaacatgcagtccttcgcgccctttttgatcagcaacgtcaagttcgtgcgcaaacgcaccatccacatcgtgggcgcacgctcgaactggtgtccgccagaaaaccagctgtttttgcaaaagaccttgcagaactaccacctcgactccattccgggcgggtcccacctggtcaacatcgaggccccagacctcgtcatcgacaaaatcaaccaccacattcgcgagttcgttctcacgtacccgctgcagcccgcttgttcgctttcccgcttgtcgttcgaggaacgaatggccaagttcaaccaggcgttcgaatctttcaaggaccacgctctgatcaaaactaggaaccagaaactgtag

SEQ ID NO: 5240 - DNA, 639 bp, Saccharomyces pastorianus
atggcccagccgaagtcggtgtaccacccgccccgctcgacaagctccgcggctaaaatggaacatacattcaccagagaaacgaaaacggacagcgcaagctggccgcgcgcaccacgtgccacactgagtgcggcagaccgcctcgagctcgtctacgacgtgtacaccaacgcagagcggcaccgccaccctggcgccacaagcgtcaacattgtgtttctgcacggcagcggtatgagcaaggtcgtgtgggagtactacttgtcacggatcgtagccgccgacccggacggtcactacgcgctgcacaagctcgtgctgatcgaccaggccaaccacggcgactccggagtacgcaaccgcggcaagctgggcactggcttcgactggaccgacggcgcgcgcgacgtggccaagatagccgcccacgagttcagcggctacgaaggcgggacgccacccgcgctgaacgttgctgtcggccattccatgggtggtttccaggcgctggcctgcgacgtgttgcagcccaacctgttccatctgctcatcctgatcgagccagtggtcatcacgcgggtgcagcagcagctgctacagcagctgctgccaccggcgtctcccagatccctttag

SEQ ID NO: 5241 - DNA, 504 bp, Saccharomyces pastorianus
atgattacgaatcgagctcggtaccggggatcctctagagtcattgtcgttctgctcttgaaaaagcagtccaaactgatgatctccatcttctcttccagactcatctgggctgccctgtccaccttcttcatcatctgcatgatcagtgcccacatgttcaaccagatcagaaatacgcagctggtaggcgtcggcccaaagggcgaagtaatgtacttcttgcccaatgagttccaacaccaattcgccattgagactcaagtcatggttctcatctacggtatgttggcctcattggtcgttaccttggtcacgggcattccattcttgcgctctcatctgtatccaaacgcgaagaaagcatacttcattgacgctgccttggccaccttttgtgccttattcatttacatcttctttgctgctttgaccactgtcttctcgataaagagtccagcataccctttcccactattaaggctatccgctccattcaaatag

SEQ ID NO: 5242 - DNA, 627 bp, Saccharomyces pastorianus
  modified_base (616)..(616): a, c, g, t, unknown, or other
atgaattggctgtttttggtctccttgattttcttctgtggcgtgtcctcacactctgccctggcaatgtccaccggcaaactgctaaagctggcaaacaagtctccgaaaagaatcatccctttgaaggactcaagcttcgaaagcatcctgacgcccccccacgaaaacgcgtacatagtcgccctcttcaccgccacagcgcccgaggtcggctgttccctgtgtctcgaattggagtctgaatacgacaccatcgtggcatcgtggttcgatgaccatccagaaggcaaatccgcccattccaacacatccatcttctttaccaaggtcaatttggaggaccccgccaagaccatcccaaaggctttccaattcttccaactgaacaacgtccccagactgttcgtcttccagccaaactccccctccatctccgattacagcatcatcaatctctccactgacgccggggcggaaagaatgaagcaggtcatccaaggtatcaaacagctttcccaggtcaacgacttctctttgcacttacccatggactggacccccatcgtcacctccaccatcatcactttcattgtcgttctgctcttgaaagcangtccaaactga

SEQ ID NO: 5243 - DNA, 102 bp, Saccharomyces pastorianus
agtaaagatgacgtcaaagaacttactgaaaaagtggaaattctcacagctataattactgacttacttcaaaaattggatttaaaggataaaaaagaataa

SEQ ID NO: 5244 - DNA, 1701 bp, Saccharomyces pastorianus
atggtgtcatccaataacggtttgaatttacccatttcaaatgaacaatgtttgcccgaaaatactggatctcttgggtttgaagcccccactccgagacaaattttaagggtcacattgaacttgaagtatttagttgacgaaatcgtacctattgtatataatcccgctgaaatcgtttgcgatcattctgagattttgtcaccaaaggttatcaaattggcttataatgcatgcggtggaaaccccgatgacaaggccaacaaaagaaagtatcagtctgtcatcattttctcgcttttaaaagtttgtgaatggtactccaaactgtctaccatggaagtgcataacgctaagctttatgaaattaggaatttagctgcacagcaattatgtaaactgctaattgaacaagaggaaacaagagatttgcaatttctttttatgcagctgttattgcgccggtacgtgattaatgagaatgacgaggatcaagaccctttgaatgcgttggagttggccacggacatgcattgtactacagtgatagggtcgagtggatttcaacgttgtttaaaatggatttggagaggttggattgtccaaaatggaatggatcctaccacttttattaaggacgattcattggctgagatttctatagtttcgcacttcaacccagtaagactaaaggcaccaatatatcaaaattatctgcagatgactttttcgtttttgtttctggggctgtataccttggtggtaaatgggaaggactctgaaagggtgcaatcctttgatttgtgggaaactgtgttttatattttcaacacgggtttcatcttggatgaactggctaaagtttattatattggttatgctcacctatcattttggaacttattcaatgacgccacatacctgattatcaccttggcaatgggattccgtgcaatgagtgtaactcccctgaacgccaaatacacttcggaagattgggataaaatttcatatagggtactctcatgcgcagccccattcgtttggtcgagattgttactataccttgaatcacaaaggtttatcgggatcatgttggtgattctaaagcacatgatgaaagaatcgatagtattcttcttccttctgttcttaattatgatcggattcactcagggtttcttaggtttggactccgctgatggtaaaagagatatcacgggcccgattttaggtaatttgactattaccgttttgggtcttggaagctttgatgtttttgaggaattcgctcccccatacgcggcgatattatactatggttactactttatcgtttcggtcattcttctaaatatcttgattgcattgtattctactgcataccaaaaggttattgataacgctgatgacgagtacatggctttgatgtcacaaaagacgttgaggtatatcagggcacctgatgaagacgtttatgtctctcctttaaatttgattgaactgcttatgatgcctatattccatgtccttccatcaaaacgcgctaaggacttaagttatacaattatgacaatagtgtatagtccatttttgttgtttatttccataaaggaaactcgtgaggctagaagaataaagtataatagaatgaaaaggctaaacgatgatgcttatgaatatgatacccatgggatttaa

SEQ ID NO: 5245 - DNA, 1032 bp, Saccharomyces pastorianus
atgccaccaaagaaaggaaaacagccccaagtggctgggaagaagaaggaaaatgtcgacaagacatttggtatgaagaacaagaaccgttccaccaaggtccaaagatacatcaagcaggtgcagacacaatcggatccgaagaaggaagagatgaaactgttgaagctggaggagaaaaaacgtaaagaagccgaagaggctgaacgaagagcactgttcaaccctatagttgaccaaagaattcgtgcgggcgtggaccccaagtcgatggtctgtgccctgttcaagctagggaactgtaacaagggtgccaagtgtaaattctcacacgatttgaacgtaggcagaagaatggaaaagaaagatttatatcaagatacgagaagtgagaaggaagaggatacgatggataaatgggatgaagaaaagttgagagatgttatcatgtcgaagcacggcaacctaaagaccaccacggaaaaggtgtgcaaatactttatcgaggcggtggaaattggcaaatacggttggttttggatttgtcccaacggaggtgacatgtgtatgtacagacactctctaccagaaggctttgtactgaagaccaacgagcaaaagaggctcgagagagagtcgttggagaaacaaccaaaaatcacactggaggagttcatcgaaacagaaagaggcaaactggacaagtccaagctcacacccatcacagtcgccaacttcgcggagtggaagaagaatcacatcatcgccaagattaacgaggagatgaagctgacgagcaagaggaagccctcaggtagagagctcatcctgaagatgaccgccgagaacaggtcgttcgagtcagataacaccgtcgacgaagcggcacagggctccgcatgggatctgtccgaattcacagacgccttaaagaaggctgaccaccaggacgacagcggtatcaaggattacggtgacggtagcaacccgaccttcgacatcaagaaggccagccctgccaccctcgcataa

SEQ ID NO: 5246 - DNA, 549 bp, Saccharomyces pastorianus
atggctgtcatcctggcgttaatcatcgccttcatcccctgggttaaagccttattcgtcacttcggagcataccccaaagattaaacaggctccagacaatgcacccgctttagcgttcattatggactttacctcttatgtgggagctgcctcagtgccattcggtttaatcctattaggtgccactctgggtagattgaaaattgggaaactgtatccgggtttctggaaggctgctgtgatcttagtgttcattagacaatgtatcatgcccatttttggtgtcttatggtgcgatcgtctggtgaaagcaggttggttgaactgggaagacgacaagatgttactgtttgttactgcgataacttggaatttgccaaccatgactaccctaatctatttcactgcgagtttcacccctgaagatgaaactgaacccgttcagatggaatgcacttctttcttcttgatgcttcagtatcctctgatggtcgttagtttaccatttttggtgtcttatttcataaaggtacaaatgaaactatga

SEQ ID NO: 5247 - DNA, 1236 bp, Saccharomyces pastorianus
atgacacatatcacgctaggacaagccatctgggcctctgtcagaccaatcatcaagatctacctgattattggtgtgggcttcggtttatgcaagatgaacatcttgaccgtccaggccacgagatccatctctgatatcgtcttaacggttctgcttccttgtttatcgttcaataaaatcgtagcaaatatagaggataacgatattaaaaacgtcggtatcatttgcctgtcgtctgttctgcttttcgccactggccttgggttttccttcatcgttagaagtgtgcttcctgtccccaagagatggcgtggcggtattcttgcaggtggcatgtttcccaatatcagtgatttgcccattgcttatttgcagtccatggaccaggggtttatcttcacggaagcggagggtgataaaggtgtcgccaacgttattatcttcctggccatgtttttaatctgcgtcttcaacctgggtggcttcagattgattgaaaatgacttcaactacaagggcgatgacgatgaggaaaatactttgatcgatcaagatcaagactcaacccagcagctaaaaccacccgttgagggcggctcttcttcttcatccaaccaagacattttgaaagagccaaatgaatccactgttccaaatagttcacaagcaagctacatttctgagaaggagagtaaacaggaaaaattttcagctaccgctcccaaacctactcaagctgtgttcccaacagcaagtaacatgagcatgaattcatccgcggtagtgtccatcgatagcattacacactctctgcacacaacccgcatggatacacagtcctctgaccaactaaataaccccacttatagaactaggagtcaaccaatcgcatataccactgaatcaaccacaggcaatcgcaagaatagccgcaggaactccattactggctctttacgttccgtggatatgcgtgagctacccgctgaagatatgaatgatttgattcgtgagtactcaaacgttgaccggtacggtaagagaaggagaagttctcttagctctcaaagaccgtcttccatcatggggaaccaggcagacaacgctttttctcccaatctgtctagaacctccactatacaaagagtgaaggcttctaatctaacaagaatatactcagatgctactgtcagtaagaaagaatcgatacttcaggatcgacgccgattgcag

SEQ ID NO: 5248 - DNA, 5037 bp, Saccharomyces pastorianus
atgaatgtagtatttgtcgccttgattttgattatagaacagtctattcccatagaaagcgtgtattgcagtgaattgggcttaatggatttttctattcctccgaccttacctctagacctgcaaagtcgattgaatgagttaattcaagattataaagatgaaaacctaacaagaaagggttatgagaccaagagaaagcaactactggatatatttgaaatttctcaaatgaggccctatacccctcttcgatctccaaattcgagaaaatcaaaacgtttgcacaagagaaatcccagtctagcatcatccacaatatccactccaacctctatcgataggcgacattccatatatcgtgttacaaccatgaactcaaattccgcaaatggtacccctaggagacgcagtaaaaggtatgctgcttctttacaatcatcattgccaggttctgctgatgaaaaggctttagggaaggacaccgtttataatcctatgattccgctattgccaagacacattgagcctgaaatcacgtccggtggggacacaacaatgacagattctttgccattgattttgagaggacggttcgaacattgtgatggccaaacagcaatgattagtataaatgctaaaggtaaagagacctttattacatgggataaactttacttgaaagcggaaagggtggctcatgaattaaataagagtcacctttataaaatggataagattttactgtggtacaacaaaaatgatgttattgagtttaccattgccctactgggttgttttattgctggtatggcagccgtccccgtttccttggaaacatattccctgcgtgaggttattgaaattatcaaggtgacaaattctaaatacgttttgatttcaaacgcttgtcataaacaactagataatttgcattcatcttcaaatcattcaaaagtcaaactggttaaaaatgatgttttccaacaaataaaatttgtcaggacagatgacttgggtacgtacacgaaagcaaaaaaaagctcccctacttttgacatacctaacatttcatatatagagtttactagaacgccattaggtcgtctgtcgggtgttgtcatgaagcataacattctaataaatcaatttgaaacaatgacaaaaatcttaaactctcgatcgatgccccattggaaacaaaaatctcaaagtattaggaagccattccataagagaattgcgtcaacgatttcaaggtttgtcattttgaacagtttagaccccaccagatcaacaggtttgattatgggtgtccttttcaacttgttcacaggtaatcttttaatttctattgatagtagtatattgcagcgacctggagggtatgagaacactatcgataaatttagagctgatattttattgaacgatcaattgcaactgaagcaggttgttatcaattatttggaaaatccagaatccgcattttccaggaagcacaaaatagattttagttgcatcaagtcatgtttgacctcatgcaccactatagacaccgatgtgactgaaatggttgttcataaatggctaaagaatttgggatgtatcgatgctccattctgctattctcccatgttaactttattagattttggtggcatattcatttctaccagagatcaattagggaatttagagaactttcccattcataattcgaaactaaggttgcagaatgagttgtttataaaccgtgaaaaattaaagcttaatgaagtcgagtgtagcataacggctatgattaacgcatcaagttcttttaaagattatctgaaattggaggcatttggtttcccaattcctgacgtcacgttgtgtgtggtcaatccggatacaaacacgttagtccaggatctcactgtgggtgaaatatggatttcttctaaccatattaccgatgaattttatcaaatggataaagtgaacgagttcgtattcaatgcaaaacttaactattctgaaatgtttacgtgggcaaggtacgaaatgcctagtagcgaatcgcaagctgttaccgagcaattggatactattttgaatatttgtcctgctaacacctactttatgagaaccaagcttatggggtttgttcataacggaaagatatatgtgctttcgcttatagaagatatgtttttacaaaataagttggttagattatcaaattgggcacacacatcaaacctattacatgtcaaaaaacccggccagccttctacaaatatcagtaaaccagtagttgaagaaattgtcaaatctgcgaatacctcagctttgagtgttgaagcattttctgaatgtaagaggactgtcgaatcccattacttgcagcaaattactgaaacaattgtaagaacagtaaatactgtttttgaggttgctgcatttgaattgcaacatcataaggaagaacattttttagttatggtggtagaaagctcgctggctaagacagatgaagagagtaaaaagaatgcagcaacagatactaccttggtgtcgtttaatgagaaacagaaaataaaagtggaagcgaaaatgaacgacttaactgaccaaatcttcaggatcctttggatttttcataaaattcaaccaatgtgcatcttagttgtaccaagagatactttacctaggagatactgttccttagaattggccaatagtactgtagagaaaaagttcttaaacaacgaccttggtgcacagtttgtaaaatttcaattcgacaatgttatcttagattttttgcctcattccgcttactataacgaaagtatattatctgagcatttatccagattgagaaaaatggctctgcaagaagagtacagtatgaatgagcccggctatcgtaccgatggtcccgttgagtcaaaactggctctgcaatgtagcggtgtcgattatagagaagagtctgttgacaccagaagccatactaaacttacggatttcaaatcgattttggagatcctggaatggaggatttccatttatgggaacgaaacggcgtttagcgatggtactaattcaaatatggccaattcctcaagtaataacgataataatgtacataaaaaggtttcgtgggcgagctttgatagaattattgcaggcttcttaaaaaaaattgtgggatcaaaaaacctgctaaagcatggtgacagtgttgttgtcatgtgtgaaaactccgttgaatatgtggcaatgattatggcatgtttattttgtaattttttggtcattccgttaccaagtattaaagaggttaccgtagaggaagatctgaaatttttggttagtattattcagagttacaaagtgaaaaggctttttgttgacgctaaattgcacactttattaaacgataataataccgtaaacaaatgcttcaaaagatacaaaagtttaatgcccaaaataacagttttttcaaaagtcaaggttaagaatgcattaacgatatctatgtttaaaaatgtattaaagcagaaatttggggccaaaccaggtaccaggatcaatatgacaccatgcgtcatatggataaacacagaatatgatgtggcgtcgaatgttcatgtgaccatgacacattcgtccctacttaacgcaagcaaaataatcaaagaaacgttgcagttaaggaataatagtccacttttttccatatgttcacatacaagtggattggggtttatgttcagttgttttttgggcatttatgcaggtgctgctacatgtttattcagtctcacggatgtgctgattgatcccaaggaatttttaattggtcttcaaaatttaaatgtgaaagatttatatttgaaaatcgaaacgttttattctttattggacagagcctccaatttaatcgagggatctaaaaatagaaaggaaactttaaattcaaacaagaacaatacttctagttctgtcagaggagatgtttttaaaggcgttcgaaatattatgattcctttccccgataggccaagggtttatacaatcgagaatattttaaaacggtattcaaatatctctcttgcttctacacaaataaactatctctaccaacatcatttcaatccgattatctcgttaagatcatacttagatatccctccaatcgacctatatcttgatcccatttcactaagggaaggtatcataagagaggttgatgtaaacgatatgacaatgaatggaggaacttacatcagggtacaagattctggtgttgttcccgtgtgcacagatgtttctgtggtcaatccagaaaccctgttaccatgtgttgacggagaatttggtgagatttggtgctgttcggaggcaaatgcgttcgattactttgtatgtaatggctcaaagaacaaactgtacaaagatccattcattaccgaacaattcaagagcaagatgaaaagtgagatgaataatacattgagctatctaagaacaggtgacttgggtttcatcaaaaatgtcagctgtactaattcacaaggagagattattggtttgaacttgttatttgttttaggaagtattcataaaaccattgaaatcttggggttaacacattttgttagcgatttggagagaactgttaaagaggtacacgctgatattggtagttgtttgattgccaaggcaggcggattgttagtatgcttgattagatgtaaggaccgccacaaccctatcttaggtaacttaacgacattgattgtttcagagctattgaataagcatggtatcattttagatttatgcgcatttgtgaagactaaaggcctaagttcgaaaaactccagtatgataatggatgtatgggcaaagaatagggcgtcgataatgcaagcttggttcgatcagagtattcaaatagaagcacaatttggtatcaactatggtgagaatatttcgatatatttactatcagattacgaaaaggacaatatataa

SEQ ID NO: 5249 - DNA, 2628 bp, Saccharomyces pastorianus
atggatttttctattcctcctaccttaccactagatctgcaaagtcggttaaatgagttaattcaagactataaggatgaaaatctaacaagaaagggttatgagaccaaaagaaaacaattgctagacaaatttgaaatctcccaaatgaggccttataccccgcttcgatctcccaattcgagaaagtcgaagcatttgcacagaagaaatacaagtcttgcatcatccattacgtcgttacctaattcaattgacagacgtcattctatctatcgtgtcacaactataaactcgacttctgcgaacaatactcccagaaggcggagcaagagatatacagcttctttgcaatcgtcattgccaggttccagtgatgaaaacggttcagtgaaggatgccgtttataatcctatgataccattactaccaagacacactggagccgaaaatactagcagtggagactcagcaatgacggattctttaccgctaattttacggggacgctttgaacattatgatggtcaaacggcgatgatcagcataaattctaaaggcaaagaaacgttcatcacatgggataaactttatttgaaagcggagagggtagcacatgaattgaataagagtcacctttacaaaatggataagattttactatggtacaataaaaatgatgtcatcgaatttactattgcattattaggctgtttcatatccggcatggcagctgtaccagtctcattcgaaacgtattctctgcgtgagatccttgagataattaaagtaacaaattcgaaatttgttctgatttctaacgcatgtcatagacaattagataacttgtattcatcatcaaatcattcaaaagttaaactggttaagaacgatgttttccaacaaatcaaatttgtcaagactgatgacttagggacgtacacaaaggcaaaaaaaacttcgcctacctttgatataccgaatatttcatatatagagtttactagaacaccgctaggtcgtctttctggcgtcgtcatgaagcataacatcttaataaaccaatttgaaacgatgacaaaaattctaaactcacgatcaatgcctcactggaaacaaaaatcacaaagcatcaggaagccatttcacaaaaaaattatggcaaccaactcaaggtttgttatcttgaatagtctggaccctactagatctactggtttgataatgggtgtgcttttcaatctttttactggtaatcttatgatatctatcgatagtagtatgttacaacgacctgggggctatgaaaatatcattgataaatttagagccgacattttactgaatgatcagctacaattgaagcaggtagttattaattatttggaaaatcccgaatcagctttttccaagaagcacaaaatagatttcagttgcatcaagtcatgtttaacctcatgtaccactatagataccgatgtaagtgagatggttgttcataaatggctgaaaaatttaggatgtattgatgcaccattttgttattctcccatgttaactttattggactttggtggtatctttatatctataagagatcaattaggaaacctagagaactttccaatacataattcaaaactaaggcttcaaaatgaattgtttataaaccgcgagaaattgaagcttaatgaggttgaatgtagcataactgctatgattaattcatcaagctccttcaaagattatcttaaattagaaacatttggcttcccaattcctgatattactttatgtgtggttaatccagatacgaatacgttggtgcaagacctcactgttggagaaatatggatttcttctaaccacatcaccgatgaattttaccagatggataaagtgaacgaatttgtgttcaaagcaaaactaaattactccgaaatgttttcttgggcaaagtatgaaatgcctactaacgaaaaatcgcaagcagttactgaacaattggataccattctaaatatttgtcctgcaaatacctactttatgagaaccaagcttatggggtttgttcataacggaaagatatacgtgctttcactcatagaagatatgtttttacagaatagattaatcagattacctaactgggctcacacatcaaaccttctttatgccaaaaaagggaatcaatctgctcaacctaaaggtaacactggagcagaaagtactaaggctattgatatttcgagtttaagtggcgaaacatcttcgggatacaaaagagttgttgaatcccactatctacaacagattactgaaacagttgtgaggacagtaaatacggtttttgaggttgctgcatttgaattacaacaccataaggaagagcactttttagttatggtggtagaaagctccctagcaaaaaccgaagaagagagtaaaaatggcgaaacaacagatactactttaatgaaatttgcagaaacacagaggaacaaattagaaacgaaaatgaatgatttaactgaccaaatttcaaattctttggattttcataaaatccaccaatgtgcatttagtgtgccagaatattacctagaatttgtcccggaatggcatagc

SEQ ID NO: 5250 - DNA, 360 bp, Saccharomyces pastorianus
atgtgggatgtaggaggacaacaaagattgagacctctctggagacattattttccagccaccaccgcacttatctttgtgatagattctagtgctagaaaccgtatggaagaggccaaagaagagttatatagtatcataggtgagaaagagatggagaatgtagtactgctggtatgggcaaacaaacaagatttgaaagatgcaatgaaacctcaagaggtttccgattttttagaactggagaaaaatttgaaaaaccaaccttggtgtgtcatcggtagtaacgccttatccggacagggtcttgttgaaggattatcctggatttcgaacaacacaaacgttccaaagaaataa

SEQ ID NO: 5251 - DNA, 111 bp, Saccharomyces pastorianus
atgggcaattcaatttcgaaggttctgggaaaactatttggctcgaaagaaatgaaaattttgatgctaggcctggataggctggtaagacaacaatattgtacaaactaa

SEQ ID NO: 5252 - DNA, 153 bp, Saccharomyces pastorianus
atgtctgctccacaagccaagattttgtctcaagctccaactgaattggaattacaagttgctcaagctttcattgaattagaaaattcttctccagaattgaaagctgaattgagacctttgcaattcaagtccatcagagaagtatgttaa

SEQ ID NO: 5253 - DNA, 276 bp, Saccharomyces pastorianus
atgaactcaccaaaagctctgttttttggaatccctggaaaactatcacataattgtaacctcaaactcaccaacaagacaaattgccccacacagatgatgaaacctgataaaaatgcgttgaaggggaaattgtcacggattaaaacaatgaatgcaaactggattattcctagcaaaaccaaaaagaaacaaaatatatcaattagttttagtttaggatttttttcaatctgggcaaagtacgccttcttggaagtcttgaatgcttcttga

SEQ ID NO: 5254 - DNA, 378 bp, Saccharomyces pastorianus
atggctaagacatcgaaagcaagcactacatcatctgcggtcataacagattttcaagaagcattcaagacttccaagaaggcgtactttgcccagattgaaaaaaatcctaaactaaaactaattgatatattttgtttctttttggttttgctaggaataatccagtttgcattcattgttttaatccgtgacaatttccccttcaacgcatttttatcaggtttcatcatctgtgtggggcaatttgtcttgttggtgagtttgaggttacaattatgtgatagttttccagggattccaaaaaacagagcttttggtgagttcattgttgctagtttgatcttgcatttcgtttgtttacattttataaattaa

SEQ ID NO: 5255 - DNA, 606 bp, Saccharomyces pastorianus
atgagtctactaatggacgggtaccatcgatttgtgaatttcgtaagccaggaagattactatacgcaatccactggcggtagcggctgtgcgccggaacaagaacttaaaaatagctctattgtctctttgtcggcgctaggcgaagaaaaggtgccacgagtaaggaaatacaatgaaggaaaacctaaccgaaccggagcggcgatggtcttccaggagacttctacaaacacagccgctgaatcacagagcagctgcgcttctcgcccaagcgaatccacgtactccaccagcactgacagtaacagcaccatttgcctcaatatcaccaataaacgtctcaaaaaaacccacaattccagttttttcaactcgggaaaggacctactgcaaagattaagctttgtgaaaaaacgcaagtctttcaaacaatcttcaacttcgtacaacaaccatattagaaaccacctgaaaagagctaagcagtcatccacaataacaacatcgtcgtcgccctcatcgtttccccccacagcaacgggactgaacgaaaaaagcgttgaaaatggctttaaaaagcttaacctacaggacactgcttaa

SEQ ID NO: 5256 - DNA, 207 bp, Saccharomyces pastorianus
atggcgagtgttccgagcttatgcgacatactgataccgctagaaaagagtgatcacaaagctcactcaattcaacttcgaaagggccctcacgagggtgtccgctctccgtacactgatcacaaagctcactctattcaacttcgaaagggccctcacgagggtgtcgctctccgtacactgtacagaggttttataagtttttga

SEQ ID NO: 5257 - DNA, 162 bp, Saccharomyces pastorianus
atgaatgatgttattcaccgtagcaaagacggctctgacagaagcatctccagtgtcctcagatacaccaataccccacatgttagtggtagcatgatcatttttccttatataggaaaggtttatgaacgatgcggcttgagtggcggaaccagaacctag

SEQ ID NO: 5258 - DNA, 642 bp, Saccharomyces pastorianus
atgaaggaaattgactttgacacctacggttgtgacgaagaagatttaaataaggaagataatctcctcgccgcacaatttttgaacaatttacgcttgaactcgcccttggcgatattgccaaatagtgccgctgacagcgaagtcgaatccacttgggatgacaatgggtggggtgaaaacggtgatactaacgattccatgacaaacggcagaacgaaagcatctcccaagtcaaccagtcgtatggccacagcaaccacaaacacacaagaggtctccgggaaaccagttaaagttaacaagagctggaatgaagaattgaacgataacgactggttgcaggacgaaagcgatccatggaatgtgcctgaggatcgtccaaaaccgcaggtctcggttttagggaaaaaagtggcacctagtgtaaagctttcaattaagaagaagaaaacgacgattttagcgccaaggggcggcagaaccaatgtcaccaccactgctactgcttctaaagcttccacatcaaacaaaacaacaagaagcgaattcagcagtgcccacaaccaaacaacaaagaaagccagtgcagatagttgggatgatggtgcagatgcagacccttgggatacggactggtga

SEQ ID NO: 5259 - DNA, 1620 bp, Saccharomyces pastorianus
atgaacttctcaagtatcttcaagtccatttctaacttccaatttccatacaccatccaggaaactgccaccaatgaaacagctctctggcaatcttttgatggaataaggaaggcagattcattgcccgtgactgcttttaaagccaaaaggacaccagaaaacgcatctttgatcttgaatgctgtacacaaggccaaaattttaaagattccagggctttgtactgtgttagaaacattcgattcagatcctcaatctacattcattgttactgaacgagttattccgtttccttgggatgatctgagctgcttatcccaaaacaaatttggtatcgaactaggaatatcacagttattaacaactttgggatttttgaacaaatttgttcttggtacactctcgaaagattcggtatatattaatggtaagggagagtgggtattgtttggactagaactctttgcaagcaaggagggtttaagtgcttttgagtttgctagcaaagctagaacatattaccaacttcatggctcacaactgcctagtgaggatccaaatacgattgattcaatgaaattgggtttcttgataaaggatcttatgggtccttcttctcttccaaaggattgggtggttcatgttaatatgatcctagaaggaagggccacgatcgagagcttcacaaagaggctagaaaatacagaaacttggcgttctaatcctttgataaacttctatcaagatttgaaggaattgcatataaaggacccacgtggaaaattgactgtaatgtcaaatttagaaaatctgtacttggagtcaagagagatttttcgcaacctgacacctgggatgatcgaaaatttcattattccagagctatgtgatatcataaaattgttgatatcacaaagcatggctagcaccagcagtaatgtggccacagacttcaacgcatcacataaacttgtaccattcctagcaataatcttggatttgacttcagaaaccaacactttcccagttggattcaacgatcttattacccaaagtttcaaactaactgatagacaagtaagatttcttctattgatatatctacctaaactaatagaaccattgggtaagtcagaggtctccggtaaaatatacccatatttcagtcagggtttaacagattctgatgccaccctcaggttgcaaacattaaagacaataccatgcattgtaccatgcttgactgagagacagctgaacaatgagctgctgagatttcttgcgaagacacaggttgattccgatatcgaaattcgaacatggactgtcatcatcataagcaaaatttcgacaatactatcgacttctgttggtaatcgttcgaatatcttggctacagcatttactaagtctttgaaagatccccaagtgaaaccgagattggccgcactttatgggttagagaaatcaatcgagttgtttgatgtgaataccatcgccaacaaaatcttaacggttattgctcctggtttgttggataaaagccccttggtaagagataaagcaaaaatgttatttgaaatgtatctgagcaaactggagaaagaggccaactga

SEQ ID NO: 5260 - DNA, 2832 bp, Saccharomyces pastorianus
atggatgggcccaaacaggaactaattgggaacaacactggacattcgagcaatacacgtctgacagatccggatactgaaaaactactagccatgcctcctccatctgcgcagtttctgagcagttcgcaaacgggacaaaatcaaaatcaaaaccacgcattaggccatgctgaggagcagcgccaggaccatggacagggaccgacccctgctcagaaccaaggccaacagcaacaatcacacctacaacagcaacaaccaagaaacgagtctatttcatattacacgaatttcaaccagccacgatactctacagatgcgtcgattacttcatttttgaacatatctgacaacgtagcaggtaccggagcacccagtactggtggcacattttcgaatcttccacggctttctacctccagtactcatcaagcgccagacctgtctcagatcggacgcggcttttccattgtaaacaacctttttccacaacaacttcagcagcaacatctacaacaacaattgcaacaacaacaacaacaacaacaaccacagcagcaacctccattcaaaacaccttctttttctacgggattaacgggaaattcttcccaattccagtttctacaaaaaagtgatggttcttctcaaccaacttccaagagaaactctgtttatcttggacccaatgatggagctgattttgaattttttaacatgcagcaatcacaacaatcgcagtttcagcctagtagtaggagagaatcaaatgcaatgagacccccacttttaataccaactactaacgctaaaattcaatcgagcggctctaatgctaacggaaatataaacgtaaacgctgattacgattcatttttcaacggcaatacaaacagcaatagcagcaatcccaaccagaatccatattttctaagttcaagaaataattccatgaagtttaatccagaagattttgatttccagttcaaaaggcggaattcttcagttagaggtactttagatcatggtaaccagaacgccttcatacctgagtcaagactaaactctcttactgttagcagcaaacccagcaatggtccccctgccaatagtgatactattatcgataacacaaacgacagcaaaagcaacgaaatcactaatgaagatggaaataataacaataataccaacatgaagcacgatgataatgataatgatgacagtagtattaatcctacatccagtactaatatcccaaaccaagatgaccacaaccttgtttccgccaataatgcaagcaatagcagaaaagacttaaaggaaatagaacagagacttcgaaaacatttaaacgatgaggatagttactcgagtacgatagcaagaccattagataaaaattctgaaatagttgaaaataatgaaagattggaccaacatgtggatgaatccagtatgcaaacggacgtgaacaaaaaaatgaaaaaagatgagtctgccgtattcattaagaatgaggtgccccgcaacgattcatcaataacaaaagggaacccagtatcggacgaaagcgcatcaataattcacttttctggcaaagaacctccaatgactgacatggcctcaataagtgatgaaccggctaacctgataggggccacaaaagtcgatcaattaatgttaatcattcaagcaaggaagaaaggatttactgaaaaggtgaacactacacaagatggcgacttattgttcaaccagacaatggacatattaccacccaaaaatgaactagtggggggtgtagaaaaaccaaaaggggtacacaatacacggactattaagaaacacgaatgtccttattgccatcgacttttctcacaagcaacacatttggaggttcacgtacgttctcatatagggtacaaaccattcgcttgtgattattgtggtaagcgttttacccaaggcggaaatttaagaacacatgagcgattgcatactggtgagaagccatattcatgtgatatttgtgataaaaagttttcgagaaaagggaacttagctgcgcatttagttactcatcaaaaattgaaaccttttgtttgcaagttagaaaactgtgataagaccttcactcaattaggtaatatgaaagctcatcaaaatagatttcataaagaaactttgaatgctttaacagccaaattagctgatatgaatccatccgaaaatattccacatgaggaacgacaactattggaatactttgcatccatttataaaaattcaaacagaggaatcaaaggtaggggaaaaggtgtaggaacgaaaaaatcaacaatctcctcaccagaaagccattctgcaagcataattctgagtgctaatacgaatgctaataatgctattactgctgagagcactgataatattaataacccagaaggcaacatcgagagcaacaataacaattcgggctcgaataccttaatttcacctactcaaaaagatatgggaaccctacaatcccaatatgttcacagcaacttcaacaattctatgaacagctcaaacccctctaatcaacccataataaactacaactacactacactacctcattctagattaggaagtagcagctccagcaatactaataataacaacaacaacaatcttcctgttgcatcggtaggtcctgctccaggtgttttattggcgccagccgccaataatgactttggttttaacttggaacagtctactgataacgggagatctcaacaagaacaagtcagatttaagaacatcaactacaagagctaa

SEQ ID NO: 5261 - DNA, 276 bp, Saccharomyces pastorianus
atggctttacaaccaaatgaaattggagaaattgttcaaggtttcgacaacccagccggtttacaaagcaatggtttgcatatccaagggcaaaagtttatgttgctgagagcagatgatagaagtatctatggtagacatgatgccgaaggtgttatttgtgtaagaacaaagcaaaccgttttaatcgcacattatccaccaactgtacaagccggtgaagccactaagatcgttgaacaattggctgattacttgatcggtgttcaatactga

SEQ ID NO: 5262 - DNA, 525 bp, Saccharomyces pastorianus
atgttcattccaacatccaccagttcgaaaatacatcagaagttgagtaaagctgttgtaagaaagaaccaaaggcaaaaccaaggtcctggtacatatattatcaatatggatccggaagtagaaaaaagagaactggaaaagaaacaaagccaaatcctaagagacagaaggaaaagacaactcaaagaaaaagagaaacaagaatctccagatgttggttttgaaactgcattcagaaaacagagctcccctactgcatatggagccaccagaagaaacgagtacgaagaagacgactttttagtcgacgatgatgaagaagagggtgaatttgatgacgatgatgacaacgaggaggaagaagaagaagaagaagaagtcgacgaagacaatgcggcacgcttaagaaacttaaaaagagaaggtgcggcaatgtatagagaggaaggaggagatgacgaaagtaacgagagcaagagaagaagggttgccgtcatcgaggacgatgaagatgaggactag

SEQ ID NO: 5263 - DNA, 717 bp, Saccharomyces pastorianus
atgtcatctgaaactccggtagatcaatcgcagaatgagcaggctgttggcgacttaggagtaactcctaataatacaattgaagaaaaaccagatgtcacacaagataatagcgatgaaaaaaaaaacaaccaagacgaagaggaagaagaagaggaagaggcggaattagatgacctgtttggagatgatgatgatgatgatgatgatgatgatgttgataatgacgggaaggggtcagagaatgaaaatagtaataatgataaaagtgggaatagcgatgaggaaagtgccaaccatagagaacatcacagagaaagtctcggattggacgatgatgaagcagaagaacaagctatgtatacacgtaagttttatggtgaagatgccaatgacttttctgaccaagatgaggccgcacatactttcaaagaagagaatgtagaacttgttagacatattattccaagtaaggctaatgtaaatgaaacggtgtctcataatgaaattttttatgccagaattccgaactttctaacgattgatccagttccgtttgaccctccaagctttgaggccagcgttaacgaaagagccaataattcaacctctaaggaagaccaactggatgaccgtcttatcgatgaaaacacagttcgatggagatattcccgtgacattgaccaacacgtcttcacagaatcgaatacacaaatc

SEQ ID NO: 5264 - DNA, 738 bp, Saccharomyces pastorianus
atggaagagtacggggatgtcaaacgtacagtcgccgtgacgacttttcctactattttgcaagtgcaaattcaaaaagtttattacgatcgtgagaggttcatgccatttaaatctattgagcccttgccgttcaaggaagttatttacatggacagatacgctgatacagataaccttactttgttagccaaaaaagaagaaacagaacaattaaagcaaaaattgaatgatatgaaaaacagacaaagggaactgttgaatcgtgatggatcaggattaacaagaaaggatgcattcttagaaaccgttaaattattagaatcaagtattgtcgaaaacacggttttgaataccgaagataagaaaaacgtgataaagacgttgaaaaacaaggttactaatattgacaatgaattgatgagtttatacaatgatataaacagtttggaggataaaataagccatcaatttgacgatttcaaggaatacggatactcgctattttccgttttcattcatcgaggcgaggccagttatggtcattactggatatatattaaggaccgaaaccagaacggtgtttggagaaaatacaatgacgaaaccatcagtgaagttccagaagaggaagtttttaatttcaacgaaggcaataccgcgactccttatttcctggtatatgtcaagcaaggacaagaagccgacattgagcctttgaaaagaatcttggagtag

SEQ ID NO: 5265 - DNA, 3045 bp, Saccharomyces pastorianus
atgccaaaagaagataatgagcttcaaaatgcaatcgaggatgatcaaaatcaactatccaattacgaaaaagaccatactgttgacaaagctaatactatagatgactgtccactatatgaaacaagcacaagtcaacagtcaactagtgtggacgttgacgatgggaagcatttactgtatctaaatattgccacctatttacctttgaagacttccgacaggcttttggacgatatactttgtgataccgcttttcttaattcgacagatccacgtgtaatagaaatgggtctgaaaacctccggtattttaaagaagtctatgctttcctactcgaactttagaagcggaatccgtccaaatgcattaggctctttaactgatcaagtggtccttcaaaccaaaactgaatacgattctatctcgtgcccacaatacaacaagatacaagtcttacaggccgtcattttgaatccttcattgaccgaacagcaaattgcaggttttgatgatattgttaaaattcccatttatcatctgaaagtcactgtgaagattcgtcaagaattggaacggttgaaaaagcacgtgggtgttactcaatttcatgcactcgaccgtttgcatgaacatgacttagtagatttgccaacttttgattcttctgacccaaatttaaaggattatggtatctatgtttccgatgacacgaataaactgatcttagttgaaatcttcaacccagaatttaattcacctgaagaacgcgacagctttacaactgccgccattcaaaaaagatacaatgatttgtgtctagaaaacgaatcattgaacgagaatgaaataccatcccagcctgattgcttctacacactctttaaaatattcaaaggacctctggcaaggagaagtactgctgaacctataaagactattgactcaggaaatttagttttaaacacacacttgaatcctgagtggttaacatcgaaatatggatttcaagccagctcagaaattgatgaagaaacaaacgaatcatttactgaatatgttcctcctgatatggtggattatgtaggtgattggaaaatcaggaaaattcgtgaatcatatgtgagaaagtgtttacaacttatattctggggtcaattatccgcttcgttattggcgccgaattcccttttgaaaaacaccaaaagtgtcaagggattatcttctatacaaacttctttttctatattaccgtggtttcaattgttaggagaatcaagagcaagaattttactaaattttaacgaacaggctcattcgcccctggacgcagaaccacattttattaatctttccgtttcacattattatactgatagagacataatcagaaactatgaagcgttatcctctttagatcctgagaacattggattatattttgacgcattgacttatattgcaaataggaagggcgcctatcaaataattgcttattgtggaaaacaagacattattggtcaggaagctttggagaacgctttaatggttttcaaaattgacccaaaggagtacaatatcgccgagttaaatgaagcgactttactgtctatatataaatttgaaacttctaacaagaacaaagcaacttccaatcatctaacaaatttgaaaaatgctcttagactgctggcaaaatatactaaatccaacaaattaaagttttacgtcgaccatgagccatacagagccttatctcaagcatacgacacacttgcaattgatgaatcagttgatgaagatattataaaaactgcatattcaattaagattaatgattcaccaggactgaagttggattgcgacagagcgctttacacaattgcgatcagtaaaaggagcctcgacttattcaattttttaacagatgaatgtccacaatttttaaattattatggtccagaaaaacttgattatcaagaggcattaaagcttttgcaagtcaacgaaaatgcttctgacgaaacaatactgaaaatttttaaagggaagtggtttgacgaaaatgtttatgagccggaccaatttcttattttgaaggcagcgttgactaaaatcagtatagaaagaaattcaaatctaatcaccaatttcctactaactggtagagtagatccaaattctttgcctccagaaaactggccaacgggtattaataacattggaaatacctgttatttaaattctttgctacaatactatttctctattgcgcccctaagaagttatatattgaattaccaaaaaacaataaacaattttaatgaccatctttctaatagtggccatgttcgaagaattggtggaagggaaatcagtaaaagcgaagtagaaagatctattcaattcatacatcaacttcgcaatcttttctatgcaatggtgcattcacagcaaagatgcgtaactccgtcaaaagaactggcctatctagcctttgccccaagtaatgtcgaagtagagtttgaagtggaagataaaaaagaaagcaaaggcaccacaaatttgaaagaggaagaaccgcgaggtgcaaacgttataaccgaacaaaatccgaatttaattgatttggaagtggatgaaaaccttaacggtgatgtcgaaaaacatcagaacaatgatgaaaaagccgaatcgaatgatgatgaaatagttatgagcgacgatgccccagatttggcttcacctacgcgtgtggcaaaaattagctcagatcaattggagaatgctttggagatgggtagacaacaagacgttacagaatgtatagggaatgtgttgtttcaaatagaaagtggttcagagcctattagatatgatgaagacaatgagcaatatgacttaatcaagcagctattttatggtactaccaaacaatgtattgttccgttatctgcaacagataaagtccgtacaaaagttgaaaggttcctctcgttattggtaaatattggtgatcatcctaaggatatttatgacgcatag

SEQ ID NO: 5266 - DNA, 702 bp, Saccharomyces pastorianus
atgctgtctcgaatttcagtcttcaggccagctagccggagtttctctgtcctgtcatcattaatgataacagaacccactttaacaaagcttgccgaaaaaccagaacatgctgtcaagtccgagaacttatccgacgcacaagctgccttcttggatcgtgttattcgtgttgaccaagccggtgagttgggtgcagactacatctacgctggccagtacttcgtattggctcatagatttcctcatttgaaacctgtgttaaagcacatgtgggaccaagaggtacatcatcataacacgttcaataacttgcagctaaaaaggagagttaggccttccttattaacgccattttggaaagtaggagcctttgcaatgggggctggtaccgcattgatttctccagaagcagcgatggcgtgtactgaggctgttgaaacggtcattggaggccactacaacggccagttgcgaaacctggccaaccaattcgatctggaaagaaccgacggaacaaagggtccgagtgaggaagtccagtccttgacttctaccatccgacaattccgggacgatgaattagagcatttggatacagctatcaagcataattcttacatggcaattccctatacagttatcactaagggtataaaaactatttgtagagttgccatctggagtgctgagagaatttaa

SEQ ID NO: 5267 - DNA, 2739 bp, Saccharomyces pastorianus
atgttgcatagagaaataaataactctagtagcagctttggggcagaaagtgaagcattcccacttgaggtgccgaacgtaagctatataatatccgcagaatttcataataagctgggccctatagtgaaatatcagtatccaaaaagtattccaggatttaggcagtcattgtatagagaatctaatggctatacgtcggtgtctacaaacttggcaagtcttatgatcccgagcagtatagaacaaaaccctggtaagccagaccttacaacatttactctttactataacaggtctactcaatgttaccaactttttccggtaccgaaagacacccgtttgaacccacatcaacgtgaccagtcacatagtagaagttattacgatgttgaaaataattatgatgagaagaacaaaagacacaccattgttatagaagacaatacattagaatcccaaaagtcctataacaaccaggaaatgataaacaacgacactttgttcttcattaatgtggccaacgctgttctggatacctcaaacgatcgaggagctgtcattaaatcgattgccatcggcacaccactgaaaaccttcttcgcatttaaaagcattctggtatctatactagatctgtacatgacagcatcgtcccaagctgtttctttaggcttactcatcgattgtttcgaaatgctgaacagtatcgatctctctttaattaataagatacactccaaagcaagtacgcaagatgtgttacattccatttgtgacgaatctgtcatagctagaatattcatggatcttgactccaccctaaagagactgtttcacataggtggatccaacaccaacgacagatacggtaacatcataacatttgatgaccagttcgttcaatatcattttacgaagtttaagcccacgacactcccgttatatgtgttaaaaattccgttacagttcaacatggtgaagagcaatcctatctatattgagaatgattaccatgcagtagttttaagatttctgaacaaattcatcccctatcttcttaaagccggctcaaaatctaacaagtggaagttagttatcaactcaactaaactgaataaagaagatctttgtgctttcattctatcattggctaatataaccgctacttatgctggtgactcgcagccatatttcaaaggaagcgcaatgttggtatttcctttcatggatatatcgcttgttgatggcttacgagcgtatttaacgtcaaatatcgattttcttggatcttttgcaataattgggaccgcgaatccgattttccggtaccaaatagatatttgggactattactacgatatggatgcagacatattttatgaaagtggtagaactggaaactacaaaccaactccgagggtagaacagaagaatggatccaaaggtttaaaaaaaatgtttaacaagcctcctcattcttcacctcactctttacctcattcttcacctcattcttcacctcattcttcacctcatgcagttgctcaaaatcaagcgaacttgggccaaaagtttatttctcttctcatcggtgaatatcatgatagtgatactatgatgagtgtattgagaaggctgaatgttcttcaactagaaagtcttcttaatgctaccaaaaagcgagaatcatcgtttgatatagcactgaaagatgaatatatcgtgacctataaagactttttcctttttccggagtttttcgactattttacattgcattgtattgaattattatctaccttggatagctgtctcctcaacttgggaagcacacgccaattatttacaatagagcaaacttactcgcaatttagtcaaatattttctattgttaaagaattgtttcgtatggtgtccataaacaaaacaaatgttgagaagtttttgaatgcttgtttaaactattctccatctagaatattaccactagctgaactacagacagatactttttccaaatggagcttcgaaaaagaagtaaatcgaagatttaataatttcggtagccacatgggtaccgaaaatgacacgcatggcgttttgttttcttcgatagatctcttcacacatatttacagttttgatattttggcagttttcttaacatttactggcaaggacgatgagcgggaactgctaaatacgaaatccatggccaaaaagaggacatctttttctctgatagctcaatcgtcttcgttaaaacagcttttacaaatgactacaagatccaacgcaaaaaattcgaggactaatgggcaggaattcggaaatctaaaggagtcttgttatacaaatgcatcgtcaattgtttcccctaaactgaaggcttcccctctactagaacgaacagcaacaaaaatcagttataacattacgcttttactttttaaactagaatgtcatcctgtaggtaaagttctattaaagaaatatcttcacaaacaattccgtgaagcttatgaagaattgaaaacacggtatgttggtgcaaataaggattctggcagtggtgaccgaaggaatgcttcttctgttttgttatcatcaccatccaccagagatttaatttcgttatcttctaatagaactggaatgctgaataatttgaaggaaatgagtgaccagagagaatctatggatattgaaacaggatcttttcggaacaattattga

SEQ ID NO: 5268 - DNA, 828 bp, Saccharomyces pastorianus
atgatgcacaatccctttgcctcgaagaacggcaacaaaccaggcaacaccaagagaaccaatagcgttcttatggaccccttgacacctgcggccagtgtcggtgtccaaggtccactgaactaccccattatgaacgtcaatccatcgatccgtgactataacaagtgtctccctcaaaatacggctctaagtcctatatatcctataaatgagcccacaactaggttgtattctcaaccaaaaatgagaactctcgggtctacaagctctttacccaacgataggagaaacagccccttgaaattaacaccaagatcctcgttgaatgaagatagtttatacatcaagcctagaaattcacttaaatcaagcatttcgggcacctcaatttcctcctccttcaccctggtttccaacaacccggctcctattcgctactctcaacaggggctgcttcgttcattgaataaagcagccaattgcgctccggattcagcaactccattggacccctctgtcttgacgggtcctactcctaaaaacatggacaatctacccattgtttcttcaaatttaataaactctccaatgaacgtcggacacggcacaagcatatcgaacccgcagcctacatcacatatggaactaccgcaaccatcgttgcccacaacaaacgtcactaaaagcaatgacgagactgatactatcagaagatctgggagtggtgtttattccttattaaataacgatgatagcagttcagccaatgctaatcctaaaggtaaaggggaaaccacaccagtatctaagaaggtcaggttgtga

SEQ ID NO: 5269 - DNA, 1920 bp, Saccharomyces pastorianus
atgaagagtttgcccaattcagaacctagcacggctccacttaacgacgaaatagatctaaacgacccaaccgcaactatcgtgatacatccaggctccaattctataaaaattggttttcctaaagatgaacatccaatagtggtcccaaattgtgtagcagtgcctaagaaatggttgaatatcgataatgaccagaatgaaggaaatatgttcttacaaagaaagcagtcagaagagttcgagagcataaagtcagaaatggaaaagaattttagagaacgtatgagatactacaaaagaaaagtaccgggaaacgctcatgaacaagtagtttctttcaatgagaattctaaacctgaagtagtttcagtaaagaatgacccctctccgatagaatggattttcgatgattcaaaactatactatggttcagatgcactaagatgcgtcgacgaaaagttcgttattagaaagcctttcaaaggcggcagctttaacatcgactcaccgtattataaatcgttggcagagttaatctcggacgtaattaaacttttggaatacgctcttgattcagaaactctaaatgtaaaacctaccaaatttaaccaatacaaggtggtattagtgataccagatgtgtttaagaaaagtcatgttgaaacctttatcagagttctactgactgaattacaattccaggcagtcgccattattcaagaatcgttagccacctgctatggcgccgggataagtacttccacatgtgtggtgaatataggtgccactgaaacaaggattgcttgcgttgacgaagggacagttttagagaacagtgcagttactttagattacggtggagatgacatcacaaggctcttcgcccttttattactgcagagcgattttccgttacaagattggaaaatcaactccgaacacggctggcttcttgctgaacagttgaagaaaaattttactactttccaagacgcagatatagctgtgcagttatacaacttcatcaaccgctctccgaatcagcccacggaaaaatacgaattcaaattatttgatgaagttatgctggctccattagcactattctttccacagatttttaagttgatacgtgcttcatctgacaaaaactccagcttagagtttcaattacccgaatcacgtgatcttttcactaatgaactgaacgattggaactccttgtcacaatacgaaagcaaagtgggagacctgtattgtaatttgaatgacgatcttaagactttaaataaaacattggatgctcataccatgattgaccaacttcaagataagcctgaaaaatacgggagcacttccaaagaaaatttaacacccttagaaaaggctatcattcaaagtataacaaatgcttctgtaacagcagatgtcacaagaatgagttccttttattcaaacattcttattgttggtggtagttccaaaattccagctttggattttattctaactgatagaattaatatttggagaccttctttgttgagttccacatcattcccacaattttacaaaaaattgaccaaggaaatcaaagatttggaaagtcattttgtcagtgcacctgaaaagacagaagaagagaacaaacaaatcctacaactacaaattaatgaaaaagtgttgacagaactcgatgaacaacatcaaattattgagcatcaaaacggcaatgaacatcttttcccaatcagtattattccgcccccacgtgatatgaaccctgccttaataatttggaaaggtgctagtgttttggcgcaaataaaacttgtcgaagaattgtttattacaaataatgattgggatgtccatgggagcagaatcttgcagtataaatgcatcttcacttattaa

SEQ ID NO: 5270 - DNA, 498 bp, Saccharomyces pastorianus
atgcctagaagttgggcagtacgcaatgggctgctggccgacagcctcagaaggacagcagctggcgcgcgaaacatgtcacaggaagaagcagaatccagtatggtctacgaagagcccattgatattccattagaggacgatgacgaggacgaaatggaggaagaggaaaacattgtgcgtttgagcagccaggcggaccaggacaatggtgataatgactccgatgatagcgtcgataacggaatcggatccgagacgcccagaagtgtcacgggtctttcggctgatccagagacgctgcagaagaggaagaagaagaggaagaagaggaagaggaggaggaggaggatgataacgatggtgacaatgacaatgacgatgagaatgacaacgacgatgagaatgacaacgacaatgatggagaaagtcccaaggataagagggcacaacctactgctcaagccagtaagcggtacaaaaaatatcccaagttag

SEQ ID NO: 5271 - DNA, 1008 bp, Saccharomyces pastorianus
atgttatttatttcctcgaaaagtgacaaaaagtcgaataatataggtatgagtgaagagtgtattgaaaatcctgagcgaattcaaattgatgctgactcaatcaagcaccaaaatcgagtaaatttgaaagaattgataaatccaaacaagggcgacaattctgctttgcttatactgaatcaaaagattgatattcctaaagaactgttttacaagatctggaaacttcatgacctgaaaatatgtgcagatggcgcggcgaatagattatatgattatgtaaaggacgatgaatccataaggaccaaatatctccctgattatatcattggtgatctggactcactatcagaaaaggttttcaactactataaggaaaaaaatgttgttataattagacaaaccacacagtattcaactgattttactaaatgtgtaaatttaatttctctacatttcaattcaccaaagttccattccttgatatccaacaagaacgctcttcagtcaaatcatggaattgagttagaagagggtatccatactttatacaatagtatgaccaaatccttagttttttcgcaagtgactccaataagcttattggccctaggaggtattggtggtagatttgatcagacgatccactcaataacgcaattatacaccttatccaaagaggcgagttattttaagctgtgttacataactgtaactgacttaattttcttaatcaacaaaaatggaactttaattaagtacgacccccagtttagaaattcttgtataggaaattgtggattgttacctattggagaagctactgtgattaatgaaactcgaggtttaaaatgggatgttaagaattggcccactagcgtggtcaatggaagagtgagcagtagcaatagatttgtcggaaaggaatgttgttacattgacactaaagatgacataattttgaatatagagatatttgttgataaattaataaactttttgtga

SEQ ID NO: 5272 - DNA, 108 bp, Saccharomyces pastorianus
atgctttcagtattatttattcctataattctgcttttgctgctgtcttccccgttaacactcactatggtatccttctttaaagcagtaggtgcaaccatcttgtag

SEQ ID NO: 5273 - DNA, 1866 bp, Saccharomyces pastorianus
atgttagccacacattcacagacccctataataaggcggtccttgctttcaattacaagtcatctcgtaagacatcatattcgcgcttacaccgtcgttaaccatggaaatttccagtctttggtaccacctcgtaagggttcgttgcccgtgaggtgtttgatggctcaacggttcatgcggtcatttccgacaaatgataagttcatggccaaggcttccaatatcgaaaccattctgctaaggaaaaataatgagcgagagtttaagcaaacacttttggcagatgccaggaattttcaacagaggttcaagatcaacttaaagtggatccttataaaaaacaacaggccgttttcccttaacgaaataagcattatcgtatcgtggctgcttttatcgcaggtgttgtggctcatattgagcactacaacttttatttcgttctatctattcgttatgaactccgcgttcagtcaggaatatatccatgaaaaaaaaatttatgagtcgctgttgaaatttctgttgaagggccataaccgctccgatggaggtttgcagattagtttttcagatgacaagccgtcaactgttgctttgtctccagattgggagtcaaactcaataacaataaaaaagctaaacgttaaggatgaaggcctggatatggatttaaagtttcatcacatcaacttgactgtttctctgaaaaactggctattcggtaagggtatgatatcgaatgcttccatctacggtattagagggaccttgaatctgtcaaattttattaacctaataaactcttttcaggacgatcgtaagactgaaaatttcttaaaatcttcaaacaatattgaaataacggactcagagattcttttaaaacaatctcgtagtagcccagagacgccaatgttaaaatttgccatttataatctatctttaccacgattaaggttaaaccatttcatctcagatgttttgagcgccaagacattctctggttcagtaaacaattctcttttcaatttatttaagagacaacaaaagttaacagcagttattgaaaatagtaacaaaagtaagatggtaacatcaaaattcgattttactaataataatcacgaaaatgacgaaaaggtaactcaccaggatgatcctaactacataacgacgttaagattaaactttattaacgtcaatgacttgaaattcaacggtagcagtaaattcaactggttaaaagacgggcaagtggaaattttggccgatgtaatgctaacgaactccacctcccaactatcatcagaatccaaatatgctgtagtggatttaaaggtcacttgtaaggatctgaaaacaacttttcctcaagagccaccaatgttatcaacgggtgacagcattgtttcgctggatgaattgaaacctcttataatgtatatcaattcatatgaaggaatggttaatccaatattgaaagatttcgccgaaaacgaactgctgaaaaattccatagtctggagctctcccaatgtctcgatcaataggcaaagaaaatcatatcctttaactacaaaggtaacttctaattccaccaaagaaatcattaagttccataatcagcccaattcggatgccaatgaaatagtgttgcgctgtaagatggttaaaaacctttccgatttgcaactggttaatatcaatcaaatattagaccaaatcaccatggaattatatgttgatttgaccaaaatagtcgatgattgggaatttagaaacaaaaacgactggatgaaacaatggggtaccacctttgcatcacaactactgttatttggatttggcgctatggtttaa

SEQ ID NO: 5274 - DNA, 2091 bp, Saccharomyces pastorianus
atgctcttacaacaaaaattaatgcctagcttaatcatggatcagcccttggatgatgaatatgatgacgatcttttagaaggtatgacacgtttatttgtggaagctggtgaagcttggtccgttttcatttctaaaaatcctgaattttttaaaccaatggtttcagtgttattgatgttaacttgcaaaaatggagacttagatattgtttcttatacatttccgttttggtttaacttcaaacaaaacttggttttgccaagatatcaaaattctaaagaggtttactccgacatttttgtcaaattgatcaatggtataatcactcatttacaatatccatcaggccaattctcatctaaggaggaggaagataagtttaaagattttaggtatcatatgggtgacgttttgaaagactgtactgcagtagtagggacctctgaggccttatcacaaccactaataagaattaagtcagccataacgaacaacaacaactggcaagtcatggaagctccattattctccctgagaacgatggccaaggaagtgtctctaactgaaagcaccctgctaccagaaattatcaaaattatttgcagcttgccggagcaacccaagatcagatacgcgtcaacactggttcttggtagatatactgagtggacagccaagcatcctgaactattagagatccagttacagtatatttttagtggtttccaactacatgagggttcgacggatatgcaaagtataattaccgcatcatcgcatgcattaatgtttttctgttcagattgttcaaaattattaaccggatacatcgatcagttgattaacttttttctcaatgtacagaattcggtcgacatcgaatcgcaatttgaattatgccaaggcctgagtgcagtgataaacaatcaaccaacaactgaagtttctacgatatttcaaaaactattagacgataatctgaaccaaattgaaactttggttcctcaatggaaggcaaattcgatgttggtcgctccacagattgctgataagattgatttgctctatgcactatttgaagaattaaaaccacgatacaattatccgcagcagggatcggaacccttattacctcaaatggaattcatctggaatgcattaagaaccttattggttgacgcaggtgcaatgacagatagcattattgtggaaagagttgctaaactgctgcgtagagtcttcgaaaaattccatgtattttgtgagccactattaccatctgtggcagaatttttaactcagggctattcaaccactggattcggttcatatttatggtgctcaggttctcttattgttatattcggggatgatgaatcattcccaatatctcctgatttgaaaaatgcaatttggaagtttgctttatctcaatgcgaaacctttatcctaaatttcaatgagttcaacaagacacaattgaatgattatcatgaggcaatcattgattttttctcattgatttcggatttaattatgttctaccccggcgagtttttaaattctacagaattgctaaccccagtattgaacgtttccctggaatgcgttagcaaattggacaattatgatgcgtatatatgtattttgcgttgcttagacgatatcatatcgtggggattcaatactccaccaatctccaccgtatccattgaagttgttccagctgaatggagaaaacaagttattaacgaagtggtaataccacatggtaatcggttgatcgtagtactgttcataggactggtaaccacttttgaaaataccgcccattcagacgccattagctgtattgtaaagtgtttgagaatattaacggaggcgaacaacaacgattccacaatatgcatcgaatggatcttcaaagtggtggagcaactgggtcaggtgaccgtcaaggaaagagataatttggtacaggctgtggtcgaggggttgaactcgagagattacaggaaggttagagaggggatcagaacttttgttggatggtatttaagaaagaacgtcaattcaagattcgaatga

SEQ ID NO: 5275 - DNA, 786 bp, Saccharomyces pastorianus
atggacaacttccaagtacctgatatccaaaccgctttgcaatgcatctcttccaatgcatcacaagacgataaaaataaggcgctccaatttctagaacagttccaacgatcctttactgcatggtcagtttgtaacgaagtcttaactaagccagatcccacgaactcacttttggagctaaatatttttgctgcccaaactttaagaaataaagtcacgtacgatctatcacaacttgaaaataatttgttacaatttaaagactctctgttaaacatattagtatctcataaccaaaaattaattataacgcaactgaatgttgcacttgcacgtttagccatccaatttctagaatggcagaacccaattttcgagatcatttcattgctaaattcatcaccatccatattgttaaactttctaagaattttacctgaagaaacgttggacatcgcctccactccacttacagaagtagaattcaattccagaatccatgaattaatcgatcccatagccgaagacgtgttgaagtttctaatctcatgcatagaccaattacaaagtacaaactttaacactaactcatctccgatttcattagagcagattttacattgtttgaattcctggtcatatgaattcgccatcgaacagctgttaaccgttcagccattggtatccctagtgttcgagaccatttccaacggtaatgaaaatgacatggaggcatttgatgctgctattgattgtttatgcgttattttaagagaaagctga

SEQ ID NO: 5276 - DNA, 573 bp, Saccharomyces pastorianus
atgatcgaaaaggcaggtagtcatggtatagtacgttctgagactgcacgtgaaggaagggagaaccaagtttattctgccattactggtgcaagattggttgctggctgcatctgtttgactcccgacaagaaggaagttcttatgatcacttcttctgcacataagaagagatggattgtgcctaaaggaggtgttgaaaaagatgaacctgattatgaaacgacggcacaaagagaaacttgggaagaagctggttgcgtgggtaaaattgttgccaacttgggtacggtggaagatatgagacctccaaaggattggaacaaagatataaagcaatttgagaccgcaagagatgatcctgaagtagcaaaacatccacctagaaccgagtttcatttttacgagttggagattgaaaagctcattgaaaagttccctgaatgtcataaaagacacagacaactatactcttatgcggaagccaaaaaacacttgataaacgcaaaaagacccgaattgctagaagccctggataggtcctctattattaaggatgttagtgataagtag

SEQ ID NO: 5277 - DNA, 2514 bp, Saccharomyces pastorianus
atgcttattttattttttgactttcctttgactttttttctccattgttaccttaacgaagagggacaaaacgaacaaacaaaatactattgcaaaaggagtgttcaattgttgtattattattggtttcatctcaaaagagcaaatatcattaactggcttaaaaatcagcacttctctatgacaaccgatagatctgctattcaattaattgatgaagagaaagcttttcatcagagcgcattacaatattttcaacaatgtattggaaatcgtgatgtcggtctagattatcatgttatctctgtgttcggctcccagtcaagtggtaaatctactctgctcaatgtccttttcaataccaatttcgatactatggatgcgcaagtgaaaagacaacaaactaccaaaggtatttggctggctcatacagaagaggttaatacgactattgaagttagtagcgatcgtccagatattttcgtactcgacgtagaaggttccgatggttcagaaagaggtgaagatcaggatttcgaaaggaaagccgctttatttgccattgcagtatctgaagttcttatagttaatatgtgggaacaacaaatcgggctgtatcaaggtaacaatatggcgttattgaaaaccgtttttgaagtcaatctatctttatttggcaagaatgacaacaatcacaaagtactactactctttgtcattagagatcatgtaggagttacaccgctttcaagtttaagcgattcagttacaagggagctggaaaaaatatggtccgaactaagcaagcctgctggttgcgaagactcaactctgtacgatttttttgacttacagttcattgggttggctcataagctgctacaagaagacaaatttattcaagatgttaagaaattaggtgattcatttgtaatgaaagggaccgacagttattatttcaaacctcaatatcatcacagattaccattagatggttggactatgtatgctgaaaattgctgggaccaaattgagcacaacaaagacttggatctcccaactcaacaaattttggttgcaagatttaaaacagaagagattgctagcgaagccctagaagaatttatttcaaaatatgatgaatccatcgcgcccttgaagggtagtctggggcctttaacctcgcaattagtagcattaaaagaagagtgcttaagcaaatacgatgaacaggcatcacgctatgctaaaaatgtttatatggagaaaagagaaagcttgaatggagaactaaacacacacatttcaggcacaataaatgagtttttagagacactaatggaaaaattatgggataatttaaggttggagatatcttccagagacaaagcatccacttcctttgtcgatagtttggctacaggcaggaccaaagtcgaaagtgactttaatgaatcagtcggatccttcaaaaagttggagttattatcatcagataaagaaatcatctccaaattttctaatgaattcgaagaaaaaatcaagcagttgcgtgacgccgaattgaaagctaaaattaatggtatcaagaaaaatctggttccagaactaaaggatcatgtaattcatttactttcccatccatccaaaaatgtttgggatgatataatggacgattttgaatccaccattcaaagtaacctttccccatatgagatctccaaggctgaatatgattttaaggtcggactatcagatgatgaaaacgcagcagtttacaaaaatattaggattttggcatggaggactttagatacaacagtgcatgactatttaaagatagacacaattgttagtatattaagagacagatttgaagatgtattcagatatgacaccgaggggtctccaaaattatggaaagcagaagaagaaattgatggagcattcagaatcgcaaaagaacacgcgctggaagtctttgaagttctctcacttgctgtaacctctgacaacgttgagatcatgcctgatgtaccaattgctgaagaagatagtagcgagggcaacgaaatatatagggataacgagggtatatttcattctcgtcgctttgcacacatcttgacagaattgcaaaaggagaatgttttagaccaattccgcagacagattaacattactgttttagactccaaaagatcgataattactacaagaacacatattccaccatggatatacattttgttagttgtgttgggatggaatgaatttgtagcggttataagaaaccccttattcgtgactcttaccttggtctttggagcaacctttttcgtgattcataggtttggcttatgggggcctgttgtcaatgttgtccaaagcgctattggcgaaacaagaagtactatcaaggaaaaattgagaaaatttgtcactgaagaccacgaagtaaaagaatcttttgaaatgacggatttttctaaagacgaacaaaaaaaagaataa

SEQ ID NO: 5278 - DNA, 93 bp, Saccharomyces pastorianus
atgggcataatttcgacctgtaaaggttccaacggaaaccgttcgccatcgactgaaaacaaaccagacttgatttttggtatgattttgtaa

SEQ ID NO: 5279 - DNA, 1062 bp, Saccharomyces pastorianus
atggggtctcaagatttggctagtttagttggcagattcaagtacgttagggtcctggattcgaaccctcacacgaagaccatctcattattgggcagtatagacgggaaagatgccgtattaactgcagaaaagacacatttcatattcgatgaaacggtccgtagaccttctcaaagtggccgtagcacacctgttttctttcaccgtgaaatagacgagtattcctttttggatggtatcacggacttgaaagaactgacttcaaatgacatctactattgggggctgtctgttttgaagcaagacatcctacacaacccaaccgcaaaagtcaatttgatttggcccgcctcgcaattccacatcaagggctacgaccagcaggatttacatgtcgttagagaaactcccgaaatgtatgctaatatggttgttcctttcatccaggagatgtgtacgagcgaaaggatgaagtgggtcaacaatattctttacgagggcgctgaagatgatagagtcgtctacaaggaatacagcgagaggaataaagacgacggatttgtcatcttacccgatatgaagtgggatgggatcaacattgattcgctatacctggtcgctattgtgtacagagatgatatcaaatccttgagagacttgggtcccaagcatagggactggttgatcaaactgaataaaaagattaagacgattattcctcaacactatgattataatgtgaatccagacgaattaagagtttttgtccattaccagccctcctattaccacttccatgtccatatagtaaatataagacacccgggtgtgggcgaagagagaggcgcggggaaaacaatgttgctggaagacattatagaagcgttgggtttcttgggccctgatggttacatgaagaaaactcttacgtatgtcattggtgaaaaccatgaattatggaaaaagggcttcaaggaagaagttcaaaaacaattagagcatgatggcattgctactagccctgaaaagggttccggcttccacgctagtttgagttga

SEQ ID NO: 5280 - DNA, 162 bp, Saccharomyces pastorianus
atgcattttcacctcattttttacttgaatgaagataataagaacgcgtgcctgagcgatgactctttaaccgatcatcacggaaacaacaacccgtttataagtactttcagttcatcccctcccattctttcgcaagaagttgatcgatggcggctttaa

SEQ ID NO: 5281 - DNA, 552 bp, Saccharomyces pastorianus
atggaaatacgcagagagagacttcagcaaatagtcaagcttgattgcagcgaagacgatgaaatcagtgatctataccttcacatagtacaaatgtttgggagtatagagaaaaccacaacgggagatgttacgaaattgcagctactagacgacgttgaaatagagctaacgctaaacagcattgttatcgagtggacaaaggactcaatggtaagtgaaacggtcgccgatagtataataataatgactcttggattacaaacgaaaaagaagaacgtactgtctgaatcaaaactagaagagagagacagtaatgcttggaaagtccatgaattacaaaacttatttcaagaacaattcggagattgttttagtgccgaaacagggcaggaagaaggtgtagggaatggtagtgtgaccataggaaagagcaaagctatagtcgacttctctaccatgaagctgatcgattgcaattcgaatccattaagagggagagtggagagtatactcagcattgggcaaaaactaacaaccccattgtgctga

SEQ ID NO: 5282 - DNA, 1542 bp, Saccharomyces pastorianus
atgtacgaaggcgataataatgaatttggaaaggaggtgccggcttcatcaagtagcaatacttcaagatcgcataaaaaggttactgattcgactatagaagaactgaatagtatggttgaagaaatgatggttagtgaaccagagaacatcaaaacttccgtgaccgaaacagaaacgttcgaatcattgaccaaatttgaccaatataaaccagctagtataaccgatgatgatttgcaaagtagtcattcaagtgctattcattcactaaagttaagttcaaatacaaacgattcatatacagacagttccaaagtaaatactgataaaaagatggtagaccctagaaagatttcagaacaatccattgtcaatgacgattcatcttcctattattccccaaatattgatggcttgccaacttcaagaatgccaagtcagccaacatttttgaactctgatccacagaaaacattagcgaacgaccctcgcctggatatgttacaaggtaatggtggaaatctcatccaacaaagaatgccaaaatcatcacctgaaagcaacttatctccaattcatcagcatcgccatcagaacagtcgcccggataggataactccagtccaatcgccacatagcgcactaattccacctttgggagtgcaaaaaataccttatccgccagcaagatctccacagcttccttcaaacccagcgggatttagacagaatatgtcaaactccccggttggacacaaagagtctgcttcacctgtaataaatcaaccacctaatgcttaccaagaacaatataatcatcctcttcaattacaaaagaatcgtcattctccaaacgatattactccgcaagagttgaaatatagaaatcaacaaacaaaggatttgcctgttccacaacaaatggtgccggtgaaacagacgatgtcgtatgcaccttctaacataccaccacaactaccaagggaacagatgaactcgcctattcaaccgcaaatgaaaagctatcaacagcctgtaaatacatactacgtaggccgttcaccacaacatcaagtcataggaaatgtctatggaaacggccactcaggcattgcccaaatgccggatgaaaggtggggcaatccctcgcaacaaatggggcccaaaggtattcgccctaatcagtttcaacatccacaacaatacgctaataggtatgctccacaagcccaacccacgccaccagcagaatactacaatgggccacaacctaatatgcaagcacctcttatggtgccacaaataatttcacctcaccagccagcacattactcagctggcggaaacagacgcagttatccacacagcatgaatcaagctaattatgctgcacctgctcagcctacaggagctcctaacagtgagttttacttgccagaagctccccaaggaagcagactacatggtgggaatattaacaagagacaagagagaaaaaaattatatgataacatcagaagcggtaactttggcatataa

SEQ ID NO: 5283 - DNA, 1278 bp, Saccharomyces pastorianus
atgaacgatatggcaaagcctttacccactcctccgactccagaggtcaggaaaagtcgatcaaattcaccaaggaaagcccacaaaacaggctcaagcccaaacaagaacgttacgaatggaaaaaaaacagctgagttaaataggaaaagtacaaatgaacatgatgttgacgatgatgaatttgagtttttccacgaatttagccgggagaaagtgaaaggcgtcatacattcaattactgctgagctcaaagaaaagggtccagatgttgaatttttaatgataccatttagagaggaacaaacgaatgataaactgttgacattactgaatcagctattcccgttagggaacggacaacccgttaacgaaaggaagcaacaaaaaatcatttccagggctgatgtttggacactttttcaatgtttgaaatacatatggtgcagactaccgaattcagaagttataggctggaaatcgtatatggaattcaagtttagagaagaggagaagaaattcccacaaaaatcattcttagaaatcatgcctcaatgtttggcctctccgaatcatgcatctatcgtttatgattttttcgatctcattatttcaatttcatcgaattctagagtcaataaaatgagtgctaggaagatttcaaagatgtgcgcaatttgggcatttaacaaacaaaaaccaaaatctgatgttcaagattatgatttcgaatcaggtgccataagatcatctgcccccaacaactccatacaggatggactggaccagtggatccctggttcggatgccatattccatctgcttttagcatttttgaggagttttgttcctcaagatctcgaatcagcgaaactgccgcgcgcactaaagagtttactgtttaataaccagtatcctccgaaggaatcaacggcttatacgtcagaaacaatcttaaccattcccttagtgactttgaaaacagacacgttttccagaaagccctggcaattactggaacgctgcaatgatcttttagactttactgaccatgatgccttcgaagcaagagaagactatgctttactaaagtctctattcagaaaaaaaaacactgtagagggaattagtaggaaaatgtcacaagaatcaagaagactaatgaaagccatgtctactaaacactcaacatttcaagcaggttgggcccctagaaaatgcatagagaatatacctcacttaaaagaatgcattgaagttaagaggcttgatatcgat

SEQ ID NO: 5284 - DNA, 171 bp, Saccharomyces pastorianus
gcacctcaaccagacactgtggaaacagtcccaactccatatattcaaggaacttatcacacagtgattagtaaggacgtgctgggcataaacaaacataataagaacatacactcgtttgagcaaaaaatatctaaatggaatcccctaactatctacgaaagaaagtaa

SEQ ID NO: 5285 - DNA, 1215 bp, Saccharomyces pastorianus
atgtatcctggcaggggaaattacacatacaacaactctaatgataatggtgggtaccagcgccccatgggcgcccctcctaaccaacaatttgcacctccaccaggccctccgcctagggactacaacaggcccacgtatccacctccacaattccaacagcagcaggcacaatctcaattgaataacgggtacaacaatccaaatatggacgcttccaatatgtatggtccaccgcagaacatgtcgatgcctccaccgcaagcgcaaaccatacagggtgtagatcagcaatatcagtactcccaatgtaccgggcgcagaaaggcattgattatcggtatcaactacataggttcgagaaacgcgctgcgtggctgtatcaacgatgctcacaacatctttaattttttgactaatgggtacggttataatccagatgacattgtcatgttaacggacgatcaaaacgatatggtcagggtcccaaccagggcaaatatgctcagggccatgcagtggcttgttaagggtgcgcagcccaatgattctttgttcttccattattccggtcatggtggacagacggaagatttggatggagacgaagaagatggaatggatgatgttatatatccggtagactttgaatctcaagggcagatcatcgacgatgaaatgcatgatatcatggtaaagcctttacaacagggtgttagactaacagccttgtttgattcctgtcactcaggtacagttttggatctaccatacacttactctaccaagggggtcatcaaagaacccaatatctggaaggacgtcggccaagatgggctgcaagctgcgctttcgtatgctacgggaaacagggctgcgttaatgggatctttgggctccatattcaaaactgttaaaggtggcatgggcaataatgtcgatagagaacgtgtcaaacaaatcaaattctcacctgcggatattgttatgttgtcgggttctaaggataatcaaacttcagcagatgctgtggaagatggccagaacacaggcgcgatgtcgcatgcctttatcaaggtgatcactttacaaccacagcaatcgtatttgtctctgctacaaaatatgagaaaagaattagctgctaagtactctcaaaagccacaattgtcatcgtcacatcctattgatgttaatttgcaatttattatgtag

SEQ ID NO: 5286 - DNA, 141 bp, Saccharomyces pastorianus
atgccgttcaggtcatgtacgctgagcgccttccctgtcgtgtacttttctgcggtagcgtcagccaagtggctcgtgacgaacgtccagcctcccatttcttgcgacttggtgaagaactccagcggcttgtcaacgtag

SEQ ID NO: 5287 - DNA, 105 bp, Saccharomyces pastorianus
atgctatgtgaaggctatttacaggcgaggatattgtctattaacagtgcagtggccacactcacgttgagcgagtctacaatgcggtcgggatcccgctcgtga

SEQ ID NO: 5288 - DNA, 2184 bp, Saccharomyces pastorianus
atgccaatttttgggcaaagaattagatctacgaagccagcaataaaccgagtagagatgggtaaagtttctaaatcaacgaaaaagtttcaatcgaaacatttgaagcacaccctcgaccaaagaaagaaggaaaagaaccaaaagaagagaatccaaggtcgtcgtggtaataagactgatgaagaaaaagccaatgctgctggtactaaagaattccaacagttgaaaaaagcttctaaggaggaagttttcaaagacatgtctgtggaaaacttctttgaaaagggtattgaaattccaaaagagaataaaaaattgaaaaagaaacagactgccaaggatgaatctgatgaggactcatcttccgaggaagaagaggacatgggacaaagcatggcaaagctggctgaaaaggatccagagttttacaagtatttggaagaaaatgataaggatttgctggattttggaggaagcaatccattggatggaattaacggtgaagatgaagatgctgaagctggcaaaaaaatcactgaaacatctgaacaagttgagcatgtaaaagagaaggttgcgctttctttgaagttggttaaacaatggaaaacacaattacatgattcgccaaacttgaagctattgaggaacattgtcagtgctttcaaggtggctgtaaatttgaataaagaagaaaacattgaagactacaagtacgcaattaccgatgaaaaggcatttcacgaactgatgtttatggtcttgaaggatgtaccacacgcaattcagaaaatggccccatacaagattgttaaaggttcaagaactttaccaaatggaggtaccgtttcaaaaatgtcgtccattgtcaaatcgcatgctggttctctattgatcttattgaacgatattaccaataccgagactgctgctttaattttgcattctgtcaatgaattgatgccttaccttttatcatatagaaggatcttaaaggaacttatcaaatcaattgttgatgtatggtcgacaacgagagaattggaaacacagattgcttcttttgccttcttgataaacaccaccaaggaattcaagaaatccatgctagaaacaactttgaaaaccacttactctactttcattaaaagttgtcgtaaaacaaatatgcgttctatgcctttgattaatttccaaaaaaattcagctgctgaactgttcggtattgatgaagtcgtcggttaccaaatcgggtttgaatatattagacagttggccatccatttaagaaacactatgaacgcaacgactaaacaatcaagcaaagttaactctgctgaagcttacaaaattgtatacaactggcaattttgtcattccttagatttctggtctcgtgttttatcatttgcatgtcaaccagaaaaggaaaatggccgtgaatctccactgagacagttgatttatccattggttcaagttactttaggtgtaatcagactaattccaacgcctcaatttttcccattaagattttacctgattaaatcactaattagactttctcaaaatagtggcgtattcattccaatataccctcttctttctgaaattttaacctcaactgctttcactaaggcacctaagaaaagtgtcaacctggctgcttttgactttgatcacaatatcaaatgtacacaagcttatctaaacactagagtataccaagaaggtttatctgaacaatttgcggacttattaggtgattattttgctctatattgtaaaaacatcgcatttcccgaacttgtgacaccagtgattatctccttgcgtcgttatatcaagacttcgattaacatcaaattcaacaaacgtttatcaaacatcgtcgaaaaattaaaccaaaatagcgcatttattcaagacaagagatctgacgttgaatttgggccaaacaacaaatccgaagtttcaagattcttgaacgatgtagcttgggagaaaacgcctttaggttcatacgttattgtgcaacgcgaagtcaaagaagaaaaggctagattaatgagagaaagtttggaagagcaagacaaagaaaaagaaatggatgaagtcaaactgttaagagatctcgaaagtgatgaagacaacgaagacgttgaaatgtcagacgcttag

SEQ ID NO: 5289 - DNA, 1662 bp, Saccharomyces pastorianus
atgtctgttcatatcgccactgatggtggtagaatttgtagacctttaatcatcgtgtccgatggtcaatcccttgttaaggatactcatgtacgccaactactagatggagaattagattttgatgactttttgaagcttgggttggtggaatatttggatgtcaacgaagaaaacgattcttacattgcattatatgaaaaagatgttatcccttcaatgacacatctagaaatagagcccttcactatattaggtgccgttgctggtttgattccatatccacaccataaccaatctccacgtaacacatatcaatgtgcgatgggtaagcaagccattggtgctattgcatataaccaattcaaaagaatagacacgctgctatacttgatgacttatccacaagaaccaatggtcaaaaccaaaacgattgaattaatcgactatgataaattacctgctgggcagaatgctacagttgctgtcatgtcatattctggttatgatattgaagatgctttagtcctaaacaagtcgtctattgatagaggctttggtcgttgtgaaactcgtagaaagacaacaactgttttgaaaagatacgcaaaccatactcaagatattatcgggggtatgcgtgttgacgaaaacggtgaacctatatggcaacatcaatctttgggtcctgatggtttaggtgaagtgggtatgagagtcaaaagcggtcagatttatatcaacaaatctgttccaactaattcgactgacgctccaaatccaaataatgtgaacgttcaaactcagtacagagaaactccggtcatatatagaggtcctgagccttcccatattgaccaagtcatgatgtccgtttctgataatgatcaagctttgatcaaagtcctcttaagacaaagtagaaggcctgaattgggtgataaattctcatctcgacatggacaaaagggtgtttgtggtattattgtcaaacaagaagacatgcctttcaatgatcaaggtattgtgccagatattattatgaaccctcacggtttcccatcgcgtatgactgtgggcaaaatgatcgaattgatatcgggtaaagcaggtgttctgaatggttccctagaatacggtacttgttttggaggttctaaactggaagatatgtccaagatcttggtcgatcaaggttttagttattcaggtaaagatatgttgtactccggtataacgggtgaatgtttacaggcatatatcttttttgggccaatttattatcaaaaattgaagcatatggtcttggataaaatgcacgcaagagcccgtggtcctagggctgtcctgacgcgtcaacctaccgaaggtagatccagagatggtggtctgagattaggtgaaatggaaagagattgtgtcatcgcttacggtgcctctcaattattattggaaagattaatgattagttctgatgcttttgaagttgatgtgtgtgataaatgtgggttaatgggttacagtggttggtgtactacttgtaaaagtgcggaaaatatcatcaaaatgactattccatatgctgcaaaattgctattccaggaattattatccatgaatattgccccaagattaagactggaagatatatttcagcaataa

SEQ ID NO: 5290 - DNA, 1080 bp, Saccharomyces pastorianus
atggttgatgcaacgaaaagacggaaaacccatgtccataaacatgtgaaagacgaagcgtttgaagatttattgaaaccagtgtataaaggtaagaagatcaccgatgagattaataccgcccaggataagtggaatcttttgcctgcattcttaaaagttaaaggtttggtcaaacagcatctcgattcgttcaactatttcgttgatacagacttaaagaaaatcataaaggcaaatcaattgattttaagtgatgtcgatccagagttttatttgaaatatgtcgatattagagtggggaagaagtcctcttcttcgacaaaggactacttgacgccacctcatgagtgtagacttagagacatgacctattccgcacctatttacgtggacatagaatataccagaggtaggaatattatcatgcataaagacgtagaaattggcaggatgcccatcatgctaaggtctaataagtgtattctattcgacgccgacgaatcaaaaatggcgaaactgaacgaatgcccattggatccaggtggttatttcatcgttaatggtaccgagaaagtcattcttgttcaagaacaattatctaagaatcgtatcattgtagaagctgatgaaaaaaagaacattgttcaggcttccgtcacttcatctacccatgaaagaaaatccaagacttatgttatcaccaagaatggtaagatttacctaaagcataactccatcgcagaagaaattcctatcgccgttgttctcaaagcttgcggtattttatcagatttagaaatcatgcagttggtttgcggtaatgacagtagttatcaagacctttttgctgtcaatctggaggaatcttcaaaattagacatttatacacaacaacaagcattagaatacattggcgccaaagtgaagacgatgagaagacagaaactgtctattttgcaagaaggtatagaagccattgcgaccacagtcattgctcatttgaccgtagaggcccttgactttagggaaaaggctctatatattgcaatgatgacacggagagtggtaatggccatg

SEQ ID NO: 5291 - DNA, 543 bp, Saccharomyces pastorianus
atgaaggaggaattacgtcaatgtaattccaggtatcaggctattaaaaacgctgttggcggtaagaaattaacaaacgtcatgggctatttggaaaacgaatcgaactcgcaaaaggagacgctcggtatgtctaaattactattagaaagaggttctgaggctatttttctagacaaaaggtgtaaggtgctatcgttcagactaaaaatgttgaaaaacaaatgccattcaactattgaaaaggaccgttgtccagaagtgtttctatccgcagttagtgacaagttgacttctacagcggttctattcctcaatgttgaattactgagtgattttttctataactttcctatcgaattggacaggaggttgacgttgttgggtgatgagcaggtagaaatgtttgctaaagaggacccaaagatttcaagacacatcgaattacagaagaggaaggaattactagaactagctttagagaaaatcgattctattttggtcttcaagaaaagctataagggcatttccaaaaagttgtga

SEQ ID NO: 5292 - DNA, 1770 bp, Saccharomyces pastorianus
atgagcacctttactccattaaggatcattccaagagtggcaaacacctgcattctaataagaactaaggcaagcccggtacgacttttgctcttgaaaagacaactctcgactcatccagcgatactgtatggcccaccttacatcaagaaccccttgatccatctacacagccgcataaacaacgctcatggaacaacgcgtgcaaatgctgtacactttatggttaccaagaggtcgatatcaagctttcccaaaatagttgccaaattcatcagactaccgatatatgtaggtggcggaatggctgctgcagggagttatatagcctataagatggaagaggctagttcgttcacaaaggataaactggaccgaatcaaagattttagtaaatcgatgaaggagaagtttaatgaaatgtttcctggtagtagttctcaaaatggaagtagtggaattgatggcaatgtgcccactgctacattaattgctgccgcatcattagatgacgaccaaagcaagaaagaaaatgattcaaatgacgatgatgacgaagatgacaatgaaaatgatgctatagataccactcaagacgaaatgttaaacttgaccaaacaaatgattgaaatcagaactattttaaataaagtagattcttcttctgcacacttgaccttaccatctatcgtcgtgattggctctcaatcatctggtaagtcctccgtattagagtcaatcgtcgggaaagaatttctaccaaagggttccaacatggtcacaagaagacccattgagttaactttggtaaatacccctaattctaatatcgtgacggcagattttccaagcatgcgtctctacaacataaaggattttaaagaggtaaaaagaatgctaatggaattgaacatggccgttccaacctcagaagccgtttccgaagatcctattcagttaacaatcaaatcatctcgcgtcccagatttatctttagtagatttacctggttacattcaagtggaggccgctgaccaaccaatagaattaaaaaccaaaattcgcgacttatgtgaaaaatatttagctgcacctaatattattttagcaatttctgctgctgacgttgacttggccaatagctctgccttgaaggcttccaaagttgcagaccctaagggtctaagaacgataggtgtcattactaaactggatttagtggaccccgaaaaagccaggagtatcctaaataataagaaatacccactaagcatgggctacgttggtgtgattaccaaaacaccaagcagtatgagcagaaaacacctgggtcttttcagcgaaggaccttcttcatcattgggcgatttattctccaaaagacagcacaatcaggacacaggtgatcagaatgtcaatggtatgaagcaaatagtctctcaccaatttgaaaaagtttattttagagagaacaagaaatattttgccaattgtcaagtttccacaaaaaaattaagagaaaaattaatcaaaatcctggaaatatccatgtcgaatgcattagagcccacatccacactaattcaacaagaattggatgacacttcatatttgttcaaagtagaattcaatgataggcacttaactcctaaatcatacctattgaataatattgacgtactaaaattagggattaaagaatttcaggaaaaatttcacagaaatgaattgaaatcgattctaagagccgaacttgaccaaaagttctag

SEQ ID NO: 5293 - DNA, 663 bp, Saccharomyces pastorianus
atgacatgtgccttgtgggatataccgaaagcgaaaagagtgagagagtattccgatcatttgggtgatgttttggcattagccgttcccgaagagccaaactcagaggtctcctccaatattttcgctagttgtggctcagacgggtatacatatatatgggatgatagatccccatctgcggtacaaagcttctacgttaatgacagtgatatcaatgcacttcgctttttcaaagatgggatgtcaatcgtaacggggagtgacaacggtgtgataaatatgtatgacttaaggtcagactgctccatagctagtttctctctctttcgaagttatgaggagcatactcctacttatatggcagccaatatggaatacaatagcactcaatcaccacaaactgtaagatcaacaacttcgggcttcctggataaccagggagttgtttctttagactttagtgcatcaggaagattgatgtactcatgctatacagatctcggctgtattgtgtgggatatattaaaagcagagattgtagggaaactggagggtcacggcgggcgagttaccggtgtacgctccagtccagatggactagctgtatgcacaggttcgtgggattcgactatgaaaatctggtccccaggttaccaatag

SEQ ID NO: 5294 - DNA, 594 bp, Saccharomyces pastorianus
atgactgcatatcaaatggattcaacagcgtatgccaatagtgtcactcagcaatatactcagccgcaaagtttaactttacatgatatttcagctgtagaggatgaaatacaaaataaaatagaggctgccagacaagagagtaagcagcttcatgcgcaaataagcaaggtcaagcataaaatacaggacgcaaacctattccaaatggccaataaactggcgccgctaaccaaaaataaaatcaatttgaaaccgaatatggtactaaaaggtcataataataagatctcagactttcgctggagtcgagattcaaaacatattttaagtgcaagtcaagatggcttcatgcttatatgggacagtgcttcaggtttgaagcagaacgctatcccgttagattcacaatgggttctttcttgtgccatctcaccatcaagtaatttggtggcgagtgcaggtctgaacaataactgtaccatttatagagtttcaaaagaaaatagagtgcaacaaaatgttgcatcaattttcaaagggcatacctgttatatttcggacattgaatttacagataactcgcatatataa

SEQ ID NO: 5295 - DNA, 459 bp, Saccharomyces pastorianus
gatagctctccagttttggagggtcaccatagtaagcctcttttatctatcgatacagacccaggagtcactggggtagatacctcatcgctaagcaagggaggctcttcgttgtcccccgataaatcatcgctagaatcgcccacttttctaaggctttcgacggattcaaagccattcagttatcaagaaccgctgcccaagctttctaggtcatcttcatcaacatcaaatttgtcactgaatggaagttcacagacatctttgccttcacaactcgagaataaggataaaccaacatcagacactaaataccttttcgcctccaagccactgggattgaccattgacacttctggcactagcaacactacatcgcagagtgaaaatggtgcaggtggttccgcgtcaaaccctccaaaaagtccaagcataacggttaatgaattctttcattaa

SEQ ID NO: 5296 - DNA, 240 bp, Saccharomyces pastorianus
atggcaaaccaaaagcagatgagaacacaaatattgatcactgacattcccagagagaaattcgacagtaaatggcccacccagttggaaaaaaccttatttacggagcagtttcctaaattacagagtaatctgcaatactacacaccattaccgtttttgaacagaattgtaattatctttgacaatgaagagactctagaggatccccggtaccgagctcgattgtatcatgtcata

SEQ ID NO: 5297 - DNA, 1083 bp, Saccharomyces pastorianus
atgaaattactaacatttcctggtcaagggacctccatttccatttccattttaaaagcgataataagaaacaaatcaaaggaatttcaaacaatactgagccaaaatggcaaggagtcaaacgacctgttgcagtacattttccagaacccttccagccctggaagtatagccgtctgctccaaccttttctatcaattgtaccagatactctcttacccttccgattctctggaacatgcccagagaagcacgttcaaaaacgatatacccagcagaagggacaacgaacaatgctatctcttgggtcactcgctgggtgaattaacctgtttgagtgttaattcgttattttctttaaaggacctttttgatattgctaattttagaaacgagttgatggtgacatctactgagaagtacttagtggcccataacatcaacagatctaacaaattcgaaatgtgggcgttgtcctcgccaagagccacggatttgccacaccaagtacagaaattgttgaattcccctaatttactaccgtcttcacaaaacactatctctgttgcaaatgccaactcagtgaagcagtgtgtggttaccggcctggtggatgacctagagtcgttaagaacagaactgaatctaaggtttcctcgcttaagaatcacagaattgactaacccatataacattcccttccacaatagcaccgtattgaggcccgttcaagaaccactatacgactatatatggaacatattgaagagaaacggaacgcacacgttgacagaactgaaccatccaataataggcaatctggatggtaacatctcttattacatccaccacgcgttagatagattcgttaaatgttctagcaaaacggtgcagttcaccatgtgttacgacaccatcaactctgcaactccagtagagattgataagagtgtttgctttggaccagggaacgtgatttacaatctgatcaaaagaaactgccctcaggtggaaaccatagaatacacctctttggccaccatagatgcatatcaccacacgactgacaacaatgaggattga

SEQ ID NO: 5298 - DNA, 513 bp, Saccharomyces pastorianus
  modified_base (6)..(6): a, c, g, t, unknown, or other
  modified_base (14)..(14): a, c, g, t, unknown, or other
  modified_base (16)..(17): a, c, g, t, unknown, or other
  modified_base (26)..(28): a, c, g, t, unknown, or other
  modified_base (38)..(38): a, c, g, t, unknown, or other
  modified_base (49)..(50): a, c, g, t, unknown, or other
  modified_base (80)..(80): a, c, g, t, unknown, or other
  modified_base (82)..(82): a, c, g, t, unknown, or other
atgcanagacatcnannggtccagcnnntaccttgggnaccaaaatggnnactggttttgaaaagaaaaaactggtcaananaaacgaaaggtatcactgggttgtacaagggtgtagaatccaccatgtggagaaacgctctctggaacggtggttactttggtgttatcttccaggtgagaaactccatgcctgaggcaaagacaaagggacagaagactaggaacgatcttatcgccggtgccatcggtggtactgtgggtacgatgctgaacactccatttgacgtggtgaagtccagaatccaaagtgtgggcgcagttgacagtgttgtgaagaaatacaactggtccctgccttcgctattgatcatataccgcgaagaagggttcagagcattgtacaaaggtttcgtccccaaagtgtgtagattagctccaggtggttcgttaatgttggtggttttcaccggcatgatgaatttcttccgtgagctcaagtacgggaactag

SEQ ID NO: 5299 - DNA, 567 bp, Saccharomyces pastorianus
atgtcatcagatccaaacgcgaagccattgcccttcatatatcagttcatatcgggtgccgtcgccggtatatctgagttggctgttatgtatccacttgacgtggtcaagacaaggttccagctggaggtgaccacacctgcagcaattgcagcaggcaaacaagtggagaaatacaatggtgtcatcgattgtttgaagaaaatcgtgcagaaggagggcttcagtagactctacagagggattagttctccaatgttgatggaggcgcctaagagagccaccaagtttgcatgtaacgatcaatatcaaaaaatgttccagtcgctattccacacgaatgaaactacgcagaaaatctccatcgcagctggtgcctcagcaggtatgacggaagcggcagtaattgtgccctttgagttgatcaagatcaggatgcaagacatcaggtccagctaccttggaccaatggactgtttgaagaaaactgtcaaaaacgaaggtatcactgggttgtacaacggtgtagatccaccatgtggagaacgctctctgaacggggatcct

SEQ ID NO: 5300 - DNA, 393 bp, Saccharomyces pastorianus
atgcaagacggaggggttcctcttcgtcttgtaatccttgattgccgccttgatggcgtcttctgcgagcatggagcaatgcagcttcaccgggggcaggctcaattccttggcgatctctgtgttcttgatcttgacggcctcgtccagcgacataccacgtatcagttcggtcatgtaggaagaggacgcgatggccgacccacagccaaaggtcttgaacttgacgttctcaatgatgcccgacttgtcgttcacttggatctgaagctttatcacgtccccacaagctggggcgcccacgatccccgtgccgacgttggcctgggacttgtccatggatccgacgtttcttggatttgtgtagtggtcaattaccttgggatggtatag

SEQ ID NO: 5301 - DNA, 984 bp, Saccharomyces pastorianus
atggcttacttggacaagactggagagacaacgctactagccatgtccaagaacgggtccttggcctggttcaaggaaggtattaaagtcccaattcacatcgtgcaagaaatgatgggtccagccaccagctttgccagtatccattcgttgactagacccggtgatttgcctcaaaaggatttttcattggcaatatctgacttcggcatttctagtgacaccgaaaccgttgtcaagtctcaaagtaacggggatgaagaagacagtattttgaaaatcgttgacaatgctggtaaacctggtgacatcttgcgtactgtccatgtcccaggtaccactgtgactcatactgtaaaattttttgacaaccatatctttgcatcttgttcagatgacaacgtcttgagattctgggacactagaacctcggacaagcctctatggattttgggtgagcccaaaaacggaagattgacatcgtttgactgttctcaagtctccaataacttgtttgttaccggtttcagtaccggtattatcaaactatgggatgctcgtgtagcggaagctgccaccaccgatttgacttacaggcaaaatggtgaagaccccattcaaaatgaaatcgcaaacttctatcatgcaggaggtgattctgttgtcgatgtccaattctccacgacttcaagttctaaattcttgactgttggcggtaccggtaacgtttaccactggaacaccgactacactctgtcaaactatgaacccaaggtcagcaacacagctccacaagatgccactgaaatatcgcaaacaaactctttggaattcttacacaagggtgggagcagaagatctccaaaacatgtcggaagaagaaacgctactgcttggcatccggttatcgaagacctggttggtacggtcgacgatgatacactagtcagcatctacaagccatacaccgaggaaagcgaataa

SEQ ID NO: 5302 - DNA, 195 bp, Saccharomyces pastorianus
atgtctaagaaagtctggaaatcgtccgctccttccacatatgaacatatctctagtttgagacctaaattcacgtctcgtgtagataacgttcttcaccagaaaaaggccttgaccttcagcaatgttgttgtcccagataagaagacgaacactctatcctcgagcgttatctattctcaaggtagtgacatc

SEQ ID NO: 5303 - DNA, 165 bp, Saccharomyces pastorianus
tctctaagtcacgtgccattgcaggataccttggaaccggtgaaggactacggtgacgcttttgaaagtgccgagaagacctcattgagcccaaaatttgtttaccaggtgaaaccgtttccaaaatggcttacttggacaagactggagagacaacgctactag

SEQ ID NO: 5304 - DNA, 126 bp, Saccharomyces pastorianus
atgtggggtaaggtcaccagaacccacggtaactctggtgttgtcagagctactttcagaaacaacttgccagccaagactttcggtgcttctgtcagaatcttcttgtacccatctaacatctaa

SEQ ID NO: 5305 - DNA, 1056 bp, Saccharomyces pastorianus
atgacccttgtcttaggcatcaatcaacaacataataaggagcatttgaatgcattgacccaagatgtaaaggaagagacattggaaaatattgcgcatgaggggaaaaatactgatacagatgaccaaaatacaaccgaaccatctgataacggcggtggaagaataggtcgcgatttgccatttgaatttggtaaacgtagcctaactgaggaatctgaagtttgggatcataacgcttgggataatgttgagtggggtgaagaacaggtccaacaagcagaggaaaaaatcaaagaacaattcaagcatcctgttcttgattttgacaaaaagttgtataacgagaatccagcacgttattgggatattttctataaaaacaataaagaaaacttttttaaagataggaagtggctacagattgaattcccgattttatatgcatctaccaggaagggtgctgatcctgtcacaatctttgaaatcggttgtggtgcaggtaacacttttttcccaatattgaaagataatgaaaacgaaaacttgagaatcatagctgctgattttgctccaagagcagtcgaactagtcaaaacctctgaacaattcaactccaagtacggccatgccgcagtgtgggatttggccaaccctgatggtaacttacctgacggcgtcgagcctcattccgttgatattgcagtgatgatatttgtctttagtgctttggctccaaaccagtgggaccaagctatggacaacctccacaaaatcttaaaaccgggcggtaagatcatattccgtgattacggtgcttatgatttaactcaagttagattcaaaaagaacaggattctagaagaaaacttttatgttagaggtgatggtacaagagtctactttttctccgaagaaaaactgagagaaatcttcaccaagaagtacttcctggaaaataaaatcggaactgatagaagattattggttaacagaaaaaggcaactaaaaatgtaccgttgctgggtgcaagccgtttttgatgttcctcaataa

SEQ ID NO: 5306 - DNA, 786 bp, Saccharomyces pastorianus
atgggtgttgcagatttaatcaagaaatttgaaaaattctcaaataaagaaggcgaagctaccgtcgacactggtagcccttcagagcaggccaaatcagacggcgagactaaggatgcggaacaacaagaaggcacttctgcttctcaagaagacgcaagtgagcagcacgaagatgtaccaatagaagaacctgaaactatccacgaaaaagaagaggaggctcccaaaggccaaggtgttaaccccaacgccggtgaaggaactgatgctcaagaatctaaggaaagcgaagaagctagcaaccaacatgctgcaagtagcgttgaggaattcaatgccgacgaagaaaacttggctgaacaaactaagggaactgttgatcctaagcaggaagaaagcgagcaaaatagtaattcggaagaaggagctgccaacgaatccgtatccgcaccagttaagaaggactctcaatctgaaaaagatgccgatatcgaccaagttgatagcgaggaagctcaaagtgacgaaaatgcttctcagcaagttgatgataactctacaaatgccgcaatttctaataacaaggaaaaggaaaacaagaagaaaaacgaaaagaagaatgacaccacctctgatgccaatgctagcgccaatggcagtgacaatgcacccagagataacgccgacaacgacacaacgtcatcaactgactccgcagttcaagaagtgaacaatttggaagtcgttgatgacccttgtcttaggcatcaatcaacaacataa

SEQ ID NO: 5307 - DNA, 1485 bp, Saccharomyces pastorianus
atgataatcaggaatccattaagaatgatcggcaaaacctatcatgatgctgttaccgcattaaattcgttacagtccaattatgccaatatcatggctatccgccaaacaggtgatcgtaaaaacatcatgacattattggaaatgcatgaatggtccagacgaattggttactcttcatcagactttaataaattgaacatcgttcatattaccggaacaaaaggtaaaggctccacggccgcatttacttcatccattttgggccaatataaagaacagcttcctcgtatcgggctatatacatctccacatctgaaatcagtgagagaaaggataagaattgatggtgagccaatctccgaagaaaagtttgccaaatatttcttcgaagtttgggaccgtttagataaaacaacgtcttcattggataaattcccacacatggtcacaggaagtaagcccggctatttcaaattcctcacattactttcgtttcacacttttatacaagaagggtgtaaaagttgtgtctatgaggtcggtgttgggggtgaattggatagcactaatataattgagaaacctactgtctgcggtgttaccttgttgggaatagaccatactttcatgctaggtgacactattgaagaaattgcttggaataaaggtgggattttcaaacctggagcaccggcttttactgtcgaagaacagcctcctaaagggttggaagtgttgcaagaaagagcagaggaacgcaaaacaacgttaacagaagtacctgtattcagacagttgcaagacgtcaagctcggaattgctggggacttccaaaaaagtaacgcatctctcgccgtcatgttggcttccgaagtcttaagtgcatgcaaaatattaaacaagaaaatttgttgtaacccagatgcaccacttcctgaaaaatttatagatggtctaaaaagcactaagtgggaaggtaggtgccaagttcttgaaagagggaaagacacatggtatattgatggagcgcacaccaaagatagtatggtggcagcttctacatggttcagagaaactgttcgctcttcgaacaagaagaaaattcttcttttcaatcaacagagtagggacgctaaggctcttatagacaatttacacgcatctgtttctccggatgtcaattttgatgatgtgatattcaccacaaacgtcacctggaaatcaggttcatacagtgccgatcttgtttccatgaacacttctcaagaagatgtagaaaacctgaaagtccaagaattattggctaaggactggactgaaatcgacaaaaatcatgctcgtgtacatgtgactccgaatatagaaacagcaaacgaattgattgaaaaatcatacgattgccctgttgagatatttgtaaccggttcgttgcatctcgttggcggattgttggttgtctttgatagactagatgaaaagtga

SEQ ID NO: 5308 - DNA, 195 bp, Saccharomyces pastorianus
atgacaccaccgtcttggctccatcgtcatctgcagcagccagtatcggcgacgacggctcgaacaacaagggcgccaacatcagatcattggaccaaacctcgacttcttccaatggttgcgtcccgatcaccaagttcgtcaccgtcaccaaggagcccatcacccagtacgttacagtcactcccaatatga

SEQ ID NO: 5309 - DNA, 537 bp, Saccharomyces pastorianus
atgccagttaccaaatctttatctaagttgcaaaagaacctttccaagaagggcaaaagcgttgcggttcatccaaaaggtagaaagttcgaaagactggtcagggccactatgcgtgaagataagatcgccattaagaagaagctgcacaacgataagaaaatccacgaactgactcgggtcaagttcatccaagacgtggtaaactccaatacattcaaggaccagccaatattcgaccacgcccacaccagagaattcattcaaagttttattgaaagagatgatgtagaattagacgaattaagaagcaaaagaagatcaaacagaccaccaagcaccagacaggtgcagctacaacagaggagggagcaagagctaaaggaattccgtggagggtttctctgtcccgatttgagtgatgcgaaaaacatggagtttctaagaaactggaatggtacattcggtctcttaaatactttgagattgataagaatcgatgacaagggtaaacaagtcttggggggcaatgaataa

SEQ ID NO: 5310 - DNA, 1881 bp, Saccharomyces pastorianus
atgccccacgggtctggaacaaaaggtgatgtggcgattgctcaatatatccaggattcctttgagaataatggattaaaattggttaaaaaaatggaatatatggcttacgctaattatccaggaaatgtatcgatttcttactatgatgacaaacatgaaaaacatgatttaaaattatccagagaaaacttcaatcccttgagctccaacgggaaactgtccaaaatgagtctaatttacggagacaaaggtaccacaagtgatttgcagacattaaaagactcaaacatcatagaaaatggaaaagattatatactcctgttgcaatatgacgaaatagtaagccagcaggtattaatagcccagagatttggcgctaaaggtataatattcatatctgaatcatatggtgagaatatagacattgtccaaccaaagcctgtaggcctaccacaatactctacaggagatgcgttaacacctggttggtttggctctgttttggacgaaatagacgccaaggactcaaaaagtttagctcatattcccacagtgccgatatccagtaggcaagggcaagaactactgtctcttttatcttccgatggaataactttcggtggtggtaacgaggaacatagaaatagtgggaaaatcggtgatttaattgttgatttagatttggagacaaatgtaagagaaagacactccgtttgtgatatcattggtaagattgaaggtagggagcaaacagataaagctgttattattgccgcgtctagaaacaccatcaattctggagctgcttaccccagctttggtacgtctgcgctattatccgtattacagctatttcaagaactaaagtataagtatgattggaaacccttaagaaacatttacttcatttcattcggtggttcggaattcaactacgctgggtcttctgagctcattgaacaaaagctaacaccattaaaagatgaagtttactctttcatcgatattagtcagttaagcatacctttcagtacggaaactgataacggtaacaccagaggaatattgaacattgagacacatcctttattaagtaagtttttcaaaaacaaggaggggcatctaaattttgatgtatctgttgaaaacgtacaacattatggtgactggactcccttcctggcgaatggtattcctgtatccgtactatcttctggtctcacaaaaaaccgttcgttgccagttggaacttcggaagatacctttgagcacttcaaaaagtatttggaagatgaacagaaccaagaatcgatcagtgatttgttagtatatatactacacattacagcgaaactggttgacgacccattattacactttgacataacgagttatgttgacgacattgatgaacgactacaaaagctggagcaagcatatcccgggaaactagactacaactcagtgattaaaggtttgttgttctggaaaaaaattggtaacgaatggacttcatggactcaaggttgggaaaacatagtctggtcacacggtgatggcatagagccttctttactttcaattcacagatggacatggaataagaaattgaccaatattggtagaaggacgtgctctcctgcaggtctgccaaatagatcattttacaaaaacattttatttgggccaacactaatgcaggaagccagctctggtagcaacgagggtgtggacttttggagttttcctggcataaaggatgccattcatgatgacaattggaagagggcgcaagagcaggttgacctcatcggtaacgtgctacatcagtcagctgcattattcgtagaggagactaatgacatcggttataaataa

SEQ ID NO: 5311 - DNA, 426 bp, Saccharomyces pastorianus
atgaggagcaattatcaaccggtggcgaatacggacgctgatcacgaaaacactatacccacagcatcttcttcgcatactttgttgctgaatcaagattttgatgatttccaggccaactctaataaccataacaacacagacactaatacaacgcccccacctgagcccccttcttatgaatttgatatagaggatcctcgtaacgaccttcataaaagatcgcacttgcaaagagtttccatcggatttcaagagcgaatcctggaacccttagtagagaatatcatacatccatttttccaaatcttaaaattcattcaagacaaagcggattattatctgagtaaagtcggaaaccccttcatacttcgaagattattttacatcgttctaatgtcatttgttgcatattacattttgtga

SEQ ID NO: 5312 - DNA, 858 bp, Saccharomyces pastorianus
atgtcaagacaagcttcattcaaagatccatttagtggaaatcagcaggatcacaacccttccaccaccgacgacgatgaagaccgtaatcgtgacgacgacgacgacgacgacggttacaaaccctcaatcgcatctatccaacccacatatttcaagaaaaagaacgctcttattctggacccgctaaactgtaataaatcattgagtaaactctttagagatttatcccgtcgttcatggcaacattccaaaccaagagaaccaatgggtatcttcattttaccagacgaaacctcgttcgtcagagccaataacctgaacacatacatggatgcaaatagatttgtcttgaaaataaaatctcaaacaatgttcactaaaaatatacaaatccaatccgcagccattggtgctgatgccatcgtagaccctaaatgtcagatttcggcccacagtaatgtcaaaatgtcggttgtcggtacccaggctactattggttccagatgccgtattgctgggtctctcttgttcccaggtgtccaattaggtgacgaagtcattttggaaaactgtattgttggacccatggccaagatcggctctaagtgtaaactcaccaattgttacattgaaggtcattatatcgtagagtccaaaaataactataaaggtgaaacgttggccaaagtttatttggacgaggatgaggataacggattggtatatgatgatagtgtcatcgcgggtgaaagtgaagattccgaggatgctgatagtgacgaaagaagcgatgaagattctgatgatggtgagtatactgacgagtatgaagatgatgggctgtttgaacgttga

SEQ ID NO: 5313 - DNA, 864 bp, Saccharomyces pastorianus
atgcccatccaagcttttatcttctgcggtaaaggttccagcctggctcctttcacacagcctgatttcccgtttcaagcgcagaacgatgacagcgctgctactgccaacagcgacaagctcaatgagtttgccaagaatgctctaggtgcaggtgtcatcaatgagttcatgcaacattctacgcgcttgcccaaggctcttttgcccattggcaacagacctatgatcgaatacgtcttggattggtgtgaccaggcggattttaaagagatcaatgtggtggcaggtgttgacgaaattgaattgattgaaagtgggctagccgcgtttttgtcccttagaaagcaacagttcgaattgatttataaggcattgtcgagttccaaccacagtcaccacttgcaagaacctaagaagatcaatttcattccttccaagaccaattccacaggcgagtccttgcaaaaagagttactacctagaatccacggcgacttcgtactcttgccttgtgattttgtcacagatatacctccacaaatcttggttgatcagttcaggaatagagatgataacaatctagcaatgactatctactataagaactccttggatagtaacatcgataaaaagcaacagcaaaagcaaaagcagcaaaaaatttttactgtgtattcagaaaatgaagactcggagagacagccaatactattagacatctactctcagagggacgttaccaagactaaatatttacagatcagatctcatttactgtggaactacccaaatttgaccatatctaccaaattgatgactcctttatttacttttgctcttttgaaatttgccaattgctaa

SEQ ID NO: 5314 - DNA, 1002 bp, Saccharomyces pastorianus
atgtctttacaacacgaaagggttaccattgcaccactagtcttactatctgctttagaccattatgagcgtacacagacaaaagagaacaaaagatgtgttggtgttatcttaggtgacgcgaacagttccaccatcagagtcaccaattctttcgccttaccattcgaagaggatgaaaagaaccctgatgtatggttcttggaccataattatattgaaaacatgaatgacatgtgcaaaaaaattaatgccaaagagaaattgattggttggtatcatagtggtcccaaattacgggcttcggatcttaaaatcaacgaattgttcaaaaaatatacccaaagtaacccattattattaattgttgatgttaaacaacaaggtgttggccttccaacagatgcatacgttgccattgaacaagttaaagatgatggtacttccacagaaaagacatttttacatttaccctgtaccattgaagctgaagaagctgaagaaatcggtgtggaacacttattgagagatgtgcgtgatcaagcagcgggtggattgtccatcaggttgactaaccagctaaaatccttaaaagggttacaaagcaaattaaaagatattgtcaaatatctggacaaggtcattaataaggaactaccaataaatcatactattttggggaaattacaagatgtctttaaccttttaccaaaccttggaacacccgatgaagacgaaatgaatatgcaagatcatgatacaattaagatttcaaacaatctacaaaaggctttaaccgtaaagactaacgacgaattaatgatcatatatataagcaatttggttagatcaattatcgcatttgatgatctaattgaaaacaaaatacagaataaaagaattcaagaacaaagaataaaagataaacaatcaaaagagtctgacgatgttgagaatggtgacaaagagacgactacgccttcaacccaagaagagaaataa

SEQ ID NO: 5315 - DNA, 423 bp, Saccharomyces pastorianus
atgctttccgcagagtatgacatcaggctggaactatacatatataagaaattgaaactacagaaattgctttgtgatgaattggagaaaatctaccaatatttcttgattgatgactggttattgttgcaaggtatactcaaaactgaaggtggaacagccaaagttgttttaagtgataaagaattggtcaattgtgtactcgaaaggaagctttatcgtaaggacgaagacttaaacaaaatggttaatgatacttcagggcaaaatatattgttaaaaagattgtttctttattggtcattgaggtacgatgacactatttcatttaacggagaacatacattcagcgaaaaatggggagtcgataatatttcactcttgaaatataatatagagctggtgatcacaaaggacatctga

SEQ ID NO: 5316 - DNA, 900 bp, Saccharomyces pastorianus
atgtatactcggctcattatggtacggaggtatacaacatcaaccatgaccaaaagctatccgtcacgattaaaacatttagtaaagacgccactttatgaagccttggacaaccaatataaatcagggaaattgcagatagcgcagggtgccgactggaatgccaaaacaaccacttcttattctccagagcttttgaccgaaaccctaaactccactcgatctttaccaatgacaaagttccctaggcaagaaatcttgaaacaggtggaattggatccaaaagttggccaatggaggaaatttataacaggttggtttaggatagggttgtatctcttgaaaatgtacaaatcagggattcaggacacttttaaagtttattggagtacaagacacgtgaaacgtgaatttgacataaagaatggctctttggccaaactggtccgtgaaatagaaatgagtgaagtgaatatcaagctgtcctcctcatcgctatccaaaaaggcggatgttaaggttgcttcaataccgttttcaattaaccggaaacagctggtggaattgatcagaagagatcaaatttggaaactaccggtctttttcagtttggtattcatatttgaggagatgagtgcgttaatattcacattctttccacgtgtttgcccatataactgtttaactcccggtgggtacaagaagctctccaatgtttatattaaggaaactacgggatttaatgacaaccgtggtctgggtcctttaaagtttactaagcaagggaatattaagtatgaaccaccgtatgctattccaattgagaacgtatacagtttcctaaaatgctttccgcagagtatgacatcaggctggaactatacatatataagaaattga

SEQ ID NO: 5317 - DNA, 309 bp, Saccharomyces pastorianus
atggctcatagagcccccataccgaatcccacagattcgaattttaaatgccttttaacgctaaagggccatctttcatgggttagagacattttcatccgtggtcagtatctgttttcttgtggtgatgataaatctgttaggtgttgggatttaaacactgggcaatgtttacatacttggaacgatttgcattcagggtttattaattgtctggatatggatgtagactacgactccaatattttaccaagacaaataatggttactggtgggttagatagtaagtctagtgtctttatgaggtaa

SEQ ID NO: 5318 - DNA, 315 bp, Saccharomyces pastorianus
atgcaaaaggaggctgaagccgaaggtgacgttgatgactttgatactgccaatggtgaaatgaacttgacaagaatggcaactttaagaactatggaaacagacccttcgaccgggggagctgcaggtgaaaggttagcattacacagaactcatacacagacaaaccaatcctcattcaaacacgagggcacacaacgccaacaaaagccaaacgagcccatctccaatagtctattctcagctgttaaggataccgaagatggctattcatatacagaaatgacaactgatgcctctgcaagaattgtctag

SEQ ID NO: 5319 - DNA, 684 bp, Saccharomyces pastorianus
atgtcttctcccaacatcgaagctaactctaatacccaaacaggtgaacaccttgtttctaaatccgcgaacaagaacagccaggattcatcatcatctacaagctcgataatggaagatgaaaaaatgtcaaactcgaatgcagattcgaccgatagcaacgatgaaccgattgacccaaaagatctagactgggatgggcttgatgatccggataacccacacaactggccctcttggaagaaatggtatgctacgatgtcttccgcccttctttgtttggtggttacgatgggtagttctctttacgtctcctccgtaccagaattggtagctaggtaccatgttagccagaccttggccctttctgggttaactttctaccttttgggtctagcgacggttattggcgctccattgagtgaagtattcggtcgtaaacccgtctatttgttctccttgcccgcatcgatgctcttcactatgggtgttggtttgtccaatggtcacatgagaatcattttacccttaagatttctatccggtgtctttgcctcccctgctttgtccgttggttcaggtaccatcttggatatcttagatgtcgatcaggtctctgtagccatgacatatatagacctatctccatttaaggggcccgttttatcaccaatcatggcaggg

SEQ ID NO: 5320 - DNA, 897 bp, Saccharomyces pastorianus
atgcatgtaaacgaaacctgtgtgcaagaaactagttcatcttgctgttgcatatctaaattagagggcaccataaacgtcaaccaaattgccaggatgagtgacagaaagaaagttttaatgctgcatggctttgttcaatctgataggatattttctgccaagacaggaggattacgaaaaaacctgaaaaaactgggttatgatttgtgctatccatgcgccccacactcaattgacaaaaaagcactctttcaatcagaggctgaaaaaggtatagatgcggccaaggagttcagcacgtcagcaaccagtgatgaagtatacggatggttctttagaaaaccagattctttcaattctttcgaaattgatcaaaaggtacttagctacttgcatgactacgtactagaacatggtccattcgacggtataattgggtttagtcaaggtgccggccttggtggttacctagtcactgatattaacagaattttaaatcttaccgaagaacagcaacctgccttgaaattttttatctcctttagtggttttaagctagaagatgaaacataccaagaaagttacaataagcccattcaagttccctctttacatgtaaggggggaattggatgcagtggttggagagtctagagtgctggcgctatacgatgcatggcccaaaaataaaaagacgttattaattcatcctggtgcccatttcattccaaactcaaaaccttttgtgtcccaagtctgtaattggattcaaggaacaatcaacaaagaaaatcaagagcaagaagatcaaccggaaacggaacagaaacagtttgacaaaccccagttagacgatgatttgctggatatgatcaattcgttaggcaagttgtag

SEQ ID NO: 5321 - DNA, 456 bp, Saccharomyces pastorianus
atgagatcaaatctttaccaggacattaggtttgaccggtccacaggtaaagccactgatacctctgttataagaaagcgttaccaatttttagacgaatatagggaaaatgaaataggtgaattacagaaagtactaaaagatcgaaaatttctatctaaaatagaccaaggagatcgtgaagaaatggaacaaaggttgaaaagtatgaaatctagactacaatcgatgaaaaacaaagacctcgagcgtaacattcttaaggactatgaaaacgacttgaataaagacaataatacaaggtatcatttgaaggagtccgagaaacgtaaagtggtacagaagtggaagtttgatcacatgaagactaaacaacgtgagaaggttatggaaagaaagaggaagaaaagattgggtaaggagttcaaacaatttgaatttcataatagtaagtaa

SEQ ID NO: 5322 - DNA, 327 bp, Saccharomyces pastorianus
atgagagtatttaacaaaagaactgggcagagcaaagtaaagcaccaggaagctgaaatgtcgtattactttaaaaatttgaagccggatttgaattctgatggagaggaagatgacggggagtcattggaggaaatactggccaaaagaaataaccaagtggccgaggaacaagaatcaagcgacgatgagttaaaaacgttgtctttcagctctttaaaaaaagctgagacgttgatggacgaagaggattcgaaggataaaaagccaatccacagaaaacggactgccactgcatacaaaaaaaaaagctttgacgaaaaataa

SEQ ID NO: 5323 - DNA, 714 bp, Saccharomyces pastorianus
atgtcagtagaagtcgctaaaggttcatcgccattcgcgttctatgccttttaccagctgtattctcatttgaatccgggggaaacatctaatctttctttaaaagaaattgcaaaaaatctatatcccgactttaaaatagactacaacgaaaaaacgtcattgttcataacttggaagaaaagatcggataagcaccataatgggagctcaacccaagagaactatatgctcagaggttgcattggtacatttgcgaaaatgccaatagcgtccggtattaagagatattctttaattgctgctctagaagataggaggttttctcctattcagaaaagagaattaaccgatttaaaatgtagttgcaatattctgggccatttcaaaaccattttccaaggcggggataatccaagcggtgacatttttgattgggaactcggaaagcatggtattgaactgtatttcaagcacccgaaaacaggaacaacatgcagtgcgacttttctacctgacgtcatgcctgaacagcactggagtaaagaggacacgtttgttaacttgattgaaaaagcaggatactggggtaatattagcgacgtaatggatagttttgaaagttatttcattgaagtgataaggtatgaaggtgacaaaagttctataacttttgaagaatttgagaggcaactagacaatgtagaagcttga

SEQ ID NO: 5324 - DNA, 456 bp, Saccharomyces pastorianus
atgtcagactgggatacaaacactattatcggtagcagagccagagccggcggttcaggcccaagagccaatgtcgccagatctcaaggacaaatcaacgccgcaagaagacaaggtttggttgtctccgtggataagaagtacggttccaccaacaccaagggtgacaatgaaggccagcggttaaccatggttgaccgtgagacagatattgtcaagcctaagaaaatggacgccaacgtcgggaaggccatttcgcgcgccagaacggagaaaaaaatgtctcagaaggacttggccaccaagatcaacgaaaagccaaccgtggttaatgattacgaagccgctagagccattccaaaccaacaggttttgtccaagctggaaagagccctgggtatcaagttgagaggtaacgacattggttcacctttgggtggtccaaagaagaagtga

SEQ ID NO: 5325 - DNA, 1284 bp, Saccharomyces pastorianus
atgaacaacgtggaggatttcgaaaaaatccagcacgaacgactaccgacgctgtatgaagtactgatacagaggacgtcgacgcctgttgatctctggacgttttacacgtttctttcacagttcccatatgccatcaactacttggacttctgggttgacctaatggcccacacccggctttgccaaagctacgtcgaaatggtaaggaagtctctggcgagtttcccacaagaagaacagcatgacgggggcggctctgcgaccacctacaacctgctggacgcactaatagaagagggtcacttggacctgcaaacacccgagaacctcctacaaaacggcaccagcgacgtgccattctcacccaaattaaaccaaatgctggggaactggaaacatcaatccggcataagccaggacgccctccaaaacgaagacatggcactgatcgtagacgagatcctgaaaagacgctcgcaacaagatggcgtgccgcaaatcactacaaaacaactgcttcacagcgcaatggggctctgtaccacctacttgatatcgcccgagcaaagcgagcgatacctgagcaacatcccggcggaaacacggacccgcattttagaagacatacaggttgaacgaaggtacgacgccaccattttcgacgacgtcaagactctgacataccagtttctagagatggactgcttcccgaaattcctgagccgggttgccctgcacaacatccacgacgagatttccgactggcggttccactccgttggcgccaccaacgagaagaacagccgctcccggggccagacgcacatctcccgctctccgttttccaaccacacatccataagccggattggcctcggcttactatggttgggcattgggttctggatcggatacgtgctgatcttcctggcatacggccgtgccatccgcgtggtcactgtggtgccatttgcgctgggatgctactgcatcgtgtgcggcatgtaccaggtggatatcgtgtactcctggtttggcgtcacccaaagactgctccacagacacaaaaacagcaacgacaatgctggcgccgccactgacgcggatcacgtgccgggagtgctggcgatgttcggcggcaagagccggctcaccagcgtgcagcacccgttcacacgccggctgttgcgcaagcgcggattgtggtgtctgctactcgtggcgggtgccacggccgtgcttacggtgattttcagctgcgtaccgggtcgtcgtgtgtga

SEQ ID NO: 5326 - DNA, 762 bp, Saccharomyces pastorianus
atgaacaccaacttggttgctgaagttaccaccaagaagccgttccatgtctctgcattgcctgacaaggccagagcaaatgtcgctcttattgattgcggtgtcaaggaaaacatcatcaggtgtctggcaaagaggggcgccgacgtgaccgttttcccctacgactacagaatccaggatgttgcgtccgagttcgacggtattttcttgtccaatggcccaggcaatccagaattctgccaagccaccattgcgaacgtcaaagagctactaaacaaccctgtttacgaccgtatccccatctttggtatttgccttggccaccagctcttggcccttgcttcgggcgcttccacccacaagttgaaatacggtaatagagctcataatatccctgccatggacttaaccacgggccaatgccacatcacttcgcaaaaccacggttatgcagtggatcctgagactctacccaaggaccaatggaaaccttacttcgttaacctaaacgataagtcaaacgaaggtatgatccatttgcaaaggcctattttctctacccagtttcacccggaagcaaagggaggtcccatggacaccgccattttgttcgacaagttcttcgacaatatcgaagcttatcagtccgattctcaaaaaaaaaactcaatttcacaaaaaacagctcataagggtgatagatctcaattgcgaaattttaacgttacaaaattagctaaggaaagagtattgttctaa

SEQ ID NO: 5327 - DNA, 240 bp, Saccharomyces pastorianus
atgtcttcttcccaaataaaggctacttttgccattcaaaacggtccttccttcgaagccatctccttcggcgcaaacaagtctgtcgctggtgaagccgttttcaccacttccctggtcggttatccggagtccatgacggatccttcctaccgtggtcagatactagtcttcactcagcccttaattggcactacggtgtcccatccggcgatgcccgtgacgagttcaatctactga

SEQ ID NO: 5328 - DNA, 195 bp, Saccharomyces pastorianus
atgatagcagctggcaatcggcgtcgatcgaaatgtgaaagagagcggcgaagggaagttgacttgatcaattcaggaagattggtcaactactatgaaaactcatacgcctcaactttattacaagattgcaatattcccgcatggctaaaactaggcatatacaagagtagtgatttcggtttgcaaaagtga

SEQ ID NO: 5329 - DNA, 582 bp, Saccharomyces pastorianus
atgataagaaactatctaggacgaagatggctcaataattcagcaattcaagcatacatcgaacaaaattctgctgtcgctcattcgacggttttccaaggaaatctctatgagtatacggtgatgagagaactatctgaaaaattgcgaatgactaaattagagaaagttggtggcgcccatgatgggggagtagatgtgaaggggagctggccagtagattacatttatgcgaaaacctcattggtgatgggcaatttagaaacaactaatactataaagagaacgcactcccaaaatggtttcgttttaaaaccactgaaatatagaatatttgataatacttttacacccttgaaagtactggtccaatgtaaagccttcactaaatcaaagctggccccgaaagaattccgtgaattagtaggaacattcatctcactggtatccaatagccagcgcaataaaactgtctgtattatgtgctctcctcatttgcttacaaaagatactctgaaacttatcaataatattgcgctacctatgatatatttgcggatcgaaatgctgaaagagagcggg

SEQ ID NO: 5330 - DNA, 864 bp, Saccharomyces pastorianus
  modified_base (75)..(75): a, c, g, t, unknown, or other
  modified_base (125)..(125): a, c, g, t, unknown, or other
atggaagaacgtgttaagaccgctgccgaagtttccatgggtactgaaatcactcaacgagagttagacaacatnaacgctttagctgaacaaatcgttgattttgctgcttacagagaacaatngtctaactacttgtccgcaagaatgaaggccattgctccaaacctaacccaattggttggtgaattagtcggtgctagacttatcgctcactctggttctctaatttcccttgctaaatctccagcttctaccattcaaatattaggtgccgaaaaggctttattcagagctttgaagaccaagcacgatacaccaaagtatggtttgctataccatgcttctctagtcggtcaagccactggtaagaacaagggtaagattgcaagagttttggctgccaaggccgctgtctcattgcgttacgatgctttggctgaagatagagacgattctggtgacattggtctagaatcaagagctaaggtagaaaacagactatcccaattagaaggtagagatttgagaaccactccaaagattgtccgtgaagccaagaaggtagaaatgacagaagctagagcttacaacgctgatgctgacacagctaccactgccaaggctgattccgattccgactccgactctgactctgatgacgaagaagaagtaaaggagggaaaaaagaatgaaaagaaagaaaagaaggataaaaagagaaagagagacgaagatgaagaatctaaggattccaagaaatcaaagaaagacaagaaggaaaagaaggagaagaaggaaaagaaggaaaagaaagagaagaaggaaaagaagtctaagaaagagaagaaagagaagaaatga

SEQ ID NO: 5331 - DNA, 546 bp, Saccharomyces pastorianus
atggcttatgttttaactgaaacctctgctggttatgctcttttgaaagcctctgataagaaaatctacaaatcttcaagcttgattcaagatttggatagctctgacaaagtcttgaaggagttcaagattgctgctttttctaaattcaactctgcagctaacgctttagaagaagctaactccattattgatggtaaagtatcctcccaattagaaaaacttttggaagaaattaaaaaggataaaaagtcaaccttgattgtcagtgaaaccaagttggcaaatgctattaacaagttgggcttaaacttcaacgttgtttccgatgccgttactttagacatctacagagcagttaaagaatacttgccagagttattgccaggtatgtcagacaatgatttaagtaagatgtcattgggtttagcccattccatcggtcgtcacaagttgaagttttcagctgacaaagttgatgttatgattatccaagctattgccttattggatgatttagacaaagaattaacacatacgccatga

SEQ ID NO: 5332 - DNA, 549 bp, Saccharomyces pastorianus
atgaaaatatctattttcccctttaaatcagtggctcatttcaaagaataccaagtcattggtcgtcgtttaccaactgaatccgttccagaaccaaagttgttcagaatgagaatttttgcctcaaacgaagttattgccaagtctcgttactggtatttcttgcaaagattgcacaaggttaagaaggcctctggtgaaattgtttccatcaaccaaattaacgaagctcatccaaccaaggtcaagaacttcggtgtttgggttagatacgattccagatctggtactcacaacatgtacaaggaaatcagagatgtttccagagttgctgccgtcgaaaccttataccaagacatggctgccagacacagaactagatttagatctattcacatcttaaaggttgctgaaattgaaaagaccgctgatgtcaagagacaatacatcaagcaatttttgaccaaggatttgaaattcccattacctcacagagtccaaaaatctgctaagactttctcttacaagagaccatcaaccttctactaa

SEQ ID NO: 5333 - DNA, 1029 bp, Saccharomyces pastorianus
atgtcagctaatcaaattagaagcgaatttaatacaaatcctgtaaaagatacaacagaacaagaaaaaatggggagtctcgagcttgataaagtacacaaaaacccaatcgaagccagtcagcctttacaacaacaagaagatgtaaatgaaaatattaacgacgttcaaagcaataaagttaaaagaggtaaattaaaccttaaaactgttgatcatgtgggggcctacccactaatacaacaaacagaggaggtagcaaagaaggtagctattacaaggattgttttagctcagacaaagcctggtattgataaggtaataatttcaaagcctgttcaaactgtagccccagtcattaactttttcgataaagtggctaactcaactctaaacaccgtagaacgcgttgttccatctttaaaaaccaaaacttatcaaaggttaggtgaagaaatagcactaccatatactctaacaaagaagtatggaaagcaattcaaggacacaactacaagaaccggagacaactacgtttaccagcctgtccatggaaggttggtaaaattcagaaagtactataatgaaaaatatatagacacaaaaggcaagcctttaataagaggacaccttgatcctgttttactaccagttaacaatgcatttgaaaaaacaacggtgagatatctacccaaaggtcaaaaggttccaagtgatactttttgctgcgagtttaatagagggctagccttggattacaatttcatgacaagagcaatctctgctgtcggtcaccaggttgttgatgttgcaaaattaccatttgcttacggatgccatgccaactctgtttataataaaaatctagacaaacaagaagatttaagaatgagaaatgttttgaaaggtacctgggggacggtaaaagatctagaacatgagttttgggtttctgttaccgataagagcttatttagatttttcgctaccaaatcagaggaggaagatttaccacgtttagtacaatag

SEQ ID NO: 5334 - DNA, 780 bp, Saccharomyces pastorianus
atgactgaaggatataacgattaccacaatattgtaagccccggcttaagcttcgataatgactgcttttcggaacatgaatcggttagtccattaagtgacatatcttcaataatctccacatctcctgatgttgaaaagctcgattctatagatcctttcggcgttgacccttttgtctggaattgcaaacctcttgtcaataaggaagcattggagttacataggatgattcattcttcatttcctatgaaccccccaaaatcaaataatgacaccccattactattaccaatacaaaaagacagacagtctccaattggcagtcctacttttaaaccaagcaaatatgagccttctcaccggttgctgaagcccaaaaaaccaattctaacgatacccaccaaatctctcaacctcatagtgagttcatcacgaggctcattaaatgatgccactatttttgctaccgagataaattcatccatgagtagtgaagaaaacaaattaccaacaatttctactacctgggaaaagcttacaattccagtaaattcttcaatcaaggaaaaatacaagaagctcaaggaccaactttatgggcataacagtaattttggtgaagatgaagaaaacgaagaggaagggcttcctgatgcggcggtaataagaggttacgaattcgagtcagaaagttgcgacgatcaaaagttaagcagcgaactggagactacgaaagactataaaaaagtcaaatgggcaccagttttggaacaataa

SEQ ID NO: 5335 - DNA, 747 bp, Saccharomyces pastorianus
atgttgattggttacggtttaactgaaacttgtgctagtaccactatcttgaaccctggtcatttcgaattaggtgttgcaggtgacttgactggctgtgtcactgtcaaattagtcgacgttgaagaactgggctattttgctaaaaataaccaaggtgaagtttggatcaaaggtgccaatgtcacgcccgaatactataaaaacccagaggagacttctcaagctctaacttccgatggttggttcaagactggtgatatcggtgaatgggaaaaaagcggtcatttgaaaattattgataggaagaaaaacctggtcaaaacaatgaatggtgaatacattgcccttgaaaaattggaatctgtttacagatccaacgagtacgtcgccaacatttgtgtttacgccgaccaaacaaagaccaaaccggtaggtattattgtcccaaacaatgctccgctgacaaaattggccaaaaagctaggtatcatgaaggaagatgaaagctcgatcaacattgaaaactacctacaggagccaaagttggttaaagctgcctattccgatcttttgaagaccggcaaagaccaaggtttagtcggtattgaattgctagcgggtatagtattctttgacggtgaatggactccacaaaatggctatgtcacctctgcccagaaattgaagagaaaagaaattttgaactctgtcaaagatgaagttgacgccgtttacggctcttaa

SEQ ID NO: 5336 - DNA, 1242 bp, Saccharomyces pastorianus
  modified_base (1127)..(1127): a, c, g, t, unknown, or other
atggttaatcaatatagcgtgccagttggcccagccgccaacgagcacgaaactgctccaagaagaaactgccaatctgctcaagagccgcttgtaaggccgcctaatacgaagtgctccaccgtatacgagttcgcgctggagtgtttccagaagggtaaaaatcacaatgccatgggttggagggacgtcaaggaagtgcatgaagagtctaagacgataatgaagaaagttgacggggaggagactccagtggagaagaaatggatgttctatgaactttccaaataccaatataacactttcgaccagttaaccgatattatgcacgatgtcggtcgcgggctggtgaaaatggggttgaacccgaatgctgatgacaaactacacctgtatgccgcgacttctcacaagtggatgaaaatgttcttgggtgcgcagtcgcagggtatccccgtggtaacggcttatgacactttgggtgaaaaggggctgatccattctttggtgcaaacggggtccaatgctatatttacagacaactctttgctagcatctttgattaaaccggtccagtccgcccaagacataaaattcataattcatttcgactccatcgatcccgaggacaagagacaagacggtaggatataccagtctgccaacgacgccatcaacaagatcaaagaagttagacctgacatcaagaccttaagtttcaatgaacttttgaaattgggccaaaactcccgtaacgaaatcgacattcatccacctagtgcggatgacctttcttgtatcatgtacacctcaggttctacgggtgaacccaagggtgtagttttaaagcattcgaacgtcgttgcaggtgtgggtggtgcaagtttgaacgtcaccggcttcatagataccaaggaccgtgttatttgctttttgccattggctcatatctttgaattggtgtttgagctattatccttttattgggggtcctgtattggttatgccaatgtcaaaactttaaccaagaactctgtgaagcattgccaaggtgatttgcaagaattcaaacccactatcatggtcggtgtcgccgccgtttgggaaacagtgagaaagggaatctntaaccaaatcgacgatctacctttcctcaccaagaaaattttttggactacctataatgccaagctaaacatggaacgtttccgtataccaggtggtggaatcttgggtaattaa

SEQ ID NO: 5337 - DNA, 1533 bp, Saccharomyces pastorianus
atggtgggtcttttcatcattaccgtggtaggtacttatactatagttgaattgtggaacctattaactgaaaaatctgtatcctggaaagcttacatttaccattggttggcaagaatttttggattaatcgttatacccgtttttgtgtttctattgtgcttcaagattcatttcgatttgctatacaactcaggtccaggcgactataccatgccatcgttattccaagctagtctgaatggcacaaccgtaggcaagggaccccgtgatgttgccctaggatcttctatcatctccatcaagaatcaagtgttgggaggagctttattacactcccacgttcagccatatccagaaggctctgaacaacaacaagtgaccacctatggttatggtgatgccaacaatgaatggttcttccaaagagttaggggcgctgcaccctggactgaggctgaaaatgctacactagaatttgttaagggcggtgaaatgtataggataatgcatcgcctcacaggtaagaatttgcacacccatgaaatccctgcacctattgtaaagagcgaatgggaggtttctgcttatggcgacgttgatcttggcgatcctaaggataattggatcattgaaattgcggagcaagtggggaatgaagatcccacactgttacatccgttgtctacgtctttccgaatcaaaaattctatactgggttgttatttggcccagtcaggtaaaaatttgccagaatggggttttagacaaaaagaagtagtctgtttgaaacatacctccaagagcgataagagaacatggtggaacattgacactcacgaaaatgaattgttgcctgaaccaaaagattttgtatacccgaaggcctcatttttaaaaaacttcatttatttgaactcagcaatgatggcaacgaataatgccttggtaccaaaccctgaaaagttcgacgctatgacttcatctgcttggcaatggccaaccttgaatgtcggtgtaagactatgtgaatggagtgaaaaatccgttaaatactttttgttaggatctccaggttctgtttggccctcaagcattgcagtctgcgctctaataatacatatcacgttcttgattttaaaatggcaaagacaatgtgttgtcctacctgatccaattaaacgtgacaagttctttatggccgctttttacccattgctcgcatggggtctgcattttttgccatttttgatcatgtcaagagtcgtttacgcccaccattatttgcccactctttactttgcgctaatgatcctaacgtactattttgatacaattaccaagcgctggactattactaatacgggcagatcactgaggattggggcttacattgcgtacggatcattggttatcgctgggtttttttatttctctccatttagttttggaatggacggccctatggaagattacgcttacttggcatggctaccttcgtggcaagttgtcgaagatatacgtaacacatag

SEQ ID NO: 5338 - DNA, 702 bp, Saccharomyces pastorianus
atgccgtacagagtggcgactggctatagtgaaaatgtcacagacgatgatttgaaatggagaaggccaatgttgaaagaggaattcgagaaccatgacaatttctggatggatgaggccaacctaaatgaaaaaaataaaaaggggcaattagtgtcccgcttggaacctatagtcatgcccattgtttttacgctactggggatgttcactagaatgtataagattgggtttaatgaccatgtagtttgggatgaagctcattttggcaagtttgggtcctactatctgagacacgagtattaccacgatgttcatccgcccttagggaagatgctagttgggctctctggttatttggctggctacaatggttcttgggatttcccatctggggaggtctaccccgacaacatcaactatgtcaaaatgagattgtttcaagcaatgttctcttcactatgcgtacccttggcatattttacggggaggactgtcggattttccaggctgagcgtttggctatttaccacgttagtagctttcgaaaattcctatgcaactttaggtagatttatccttttagattcaatgctccttttctttactgtctcttcttatttttgtctagccaagttccataccatgagaaatttccattttctggcagatggtggctatggttatgtcttactgggctga

SEQ ID NO: 5339 - DNA, 1434 bp, Saccharomyces pastorianus
atgatcgtaaaggcgttggtagaggaagtaagaataacaagaacaagcggaagcagtataaagatgtccaactcgcagcagatagcccagaacgcccgtaaggctgggaacattttaaagaccatctccaatgaaggaagatcagatattctatacaaaattcacgatgctttgaaggctaatgcacatgccattgaagaagctaacaaggttgatttggcaatcgccaagcaaaccagtctagcagactctttattgaaacgtttggatctattcaagggggacaagttcgatgttatgttacaaggtgtcaaggatgtcgccgacctggaagaccccgttgggaaagtgaaaatggccagagaactagatgatgggttgaccttgtaccaagtcactgctccagtaggtgtcttgttggttatctttgaatctcgtccagaagttattgctaatattactgctttgagtatcaagtcaggcaatgctgcaatcttaaagggtggtaaagaatctgtcaacactttcagagaaatggcaaagattgtcgataataccattgccaaataccaaagtgagaccggtgttcccgttggttctgtacaattgatcgaaaccagacaagatgtttccgatttgctgaatcaagacgagtacattgatctagttgttccccgtggctccaacgccttggtgaggaaaattaaggacaccaccaagatccctgtgttaggtcatgcagatggtatttgctcaatctatttggacgaagaggccgatttggccaaggctaaaagaattagtttggacgccaaaaccaactacccagctggttgtaacgctatggaaacgttgctaattaacccaaagttacctaagtggtgggaagtcctggaaaatttaactttgaaaggtgacgttaccgtccacgctacaaagggcttgaaaactgcttacttcaataaactaaatgaacatggtgcattgacagaagcaattcaatccaagaccgttgatgctgatgaaaaggtggattttgatagggaatttttatccttagatttagctgctaagttcgttggatccacagaagaagccattcaacacataaatacgcattcttcgagacataccgatgccatagtaacggaagacaaggtgaatgctgaaaagttcatgaaaggtgttgattcatctggtgtctattggaacgcgtcaactagatttgccgatggtttcagatacggttttggtgctgaggtgggtatctctacctccaagattcacgctcgtgggccagtcggtttagaaggtttggttagctatcaatatcagataagaggtaacggccaagttgcaagtgactacctaggtgctggtggtaacaaggcatttgttcacaaagacttggatgtcaagatgatctcattgtga

SEQ ID NO: 5340 - DNA, 4692 bp, Saccharomyces pastorianus
atgattctgcgattctcgcattcaaacccgagtttgaatgaacgcgatgcctgttcgtcagagcatccgactagcgagacgcatccttacgaaggtctcgatgaggctgcccagaaagaaatcagagaactagcacgaacactaacgagccagtcctcactgctatctcaggataagaacgttgctagggtaggagacccgaatacgataagtgcagcgtgttcttcctcttccaaagagtccgttttcgctaaagacatcaaaggtgtcaaccctgtattgttgaatgtcaacgatcctggctacgacgagtcgctggaccctcggtctgacaacttctctagtgtaaggtgggtgcagaacatggcccaggtctgtgaaaatgatccggatttctataagccattttcgttgggttgtgtgtggagggatttgagtgcttccggcgactctgccgatatttcttaccaaggaacatttagtaacatgcccgtcaaattgtttaagctggtttggagatgcatgtctcgtcgtattttctgcccggaagacaataaaaatatgaaagatagttctacttttcagatcctaaagcccatggatggctgcattgacccgggggaacttttagtcgttctcggaagacctggtgcaggttgcaccacgctactgaaatccatctctgtaaacactcatgggtttaaactctctccggacaccaaaatttcgtacaatgggttttctaccaaggaaattaaaaacaattatcgtggtgaagtggtctataatgcggagtcggatatacatgtcccacatttgacggtgtttcaaaccttatacaccgtggcaaggttgaagaccccaagaaaccgaatcaagggtgtggagagagatacgtttgccaaacacaccaccgaggtggcaatggctacttatgggctatctcacacaagaaacacaaaggttggtaatgatttcatccgtggtgtctctggaggagaaaggaaaagagtatccattgctgaagtgtccatatgcggctcgaagttccaatgctgggataacgccactagaggtctggattccgcgactgcattggagttcatcaaggctttaaagacgcaggcctcaatcacaggttccgcggcaactgtcgccatctaccaatgctctaaaaatgcttatgacctgttcgataaggtttgcgttctttacgatggttaccaaatcttttttggccccaccaagctggctaaacaatacttccaaagaatgggctacatttgtcccgaaagacagacgactgcagactttttaacttctattacaagcccttcagaaagaatcgtggatcaggacatggtcaatcacggaatcatgatcccgcagacagcctgtgaaatgaatacgtactgggtacgttcagaagaatacaagcgattatcaatacaagtgagcaaccacttggataaagattcctccctgcaaagagaacaaatgaagaatgcacatattgccaagcaatctaagagggcaagaccttcttccccctatacggtgagcttctttatgcaagtcaaatacttgttgtatagagatttttggagaattagaaacgacccaagtattcaattgttcaccgtcttgagccatgcaataatggctttaattcttggttccatgttttacaaagctatgctttcctccactacagcgacattttatttccgaggcgcggctatcttttttgccatcttatttaatgcattctcatcacttttggagattttctcattgtttgagacaagacccatcacagaaaagcataagacttattcactctaccgtccaagtgcagatgcgttggcttctacgttttcagaggtccctacaaaactgattacggcaataacttttaatatacctttctattttttggtcaacctaaaaagagatgctggtgcgtttttcttttactttatgatcactgttgtgaccgtttttgccatgtcacatttgtttagatccattggctcggtatcaaaaactttgccccaggcaatggtccccgcatctctgcttttactagctatcgcaatgtacactggattcaccatcccaagaaccgaaatgctaggctggtcggaatggatttcatatatcaacccgttagcttttctttatgagtcgctaatggttaatgagtttcatagtagggatttcccatgtgctgaattcatacctagtggttccaattatacgaatgcaacaggtaacgaagtaatttgttctactctcggagctgtaccaggtaatacttatgtgaatggtgacgatttcattcaggcaagttttggataccagcataaacataaatggcgaggatttggtatcggattggcttatatcatattttttttatctctttatcttctgatatgtgagtataatgaaggtgcaaagcaaaacggcgaaatactagtgttcccacatagcgtggtaaaaagaatgaggaaaaggggtcaaacgatggaaggttcacctccgacaacgacacttggtactgagaaggacctggagatgaatagtgattcaagtgtcactgataaaaggttgttgcatgattcagattcagcggtgattggaaatagtggtgctatagcaaagcaaaaccccccttcgacgtcttcttcatcatctccgtcctttggaaatagctccagtaaaagcaatgagattgaattatctaaatcgcaagcagttttccactggaaaaatttatgttatgatattcagatcaaaaaagaaaagagaaggattttggacaatgttgatggttgggtccgacctggtacattgactgctttaattggtgcatccggtgcaggcaagacaactttgttagactgccttgcagaaagaattacgatgggtgtaattacaggtgatgtgtttgtagatggaagatatcgggatgagtctttcccgagatcaatcggctattgtcagcagcaggatttgcatttgaaaactgctactgtaagagaatcgttaagattttctgcatatttacggcagcctgataatgtttccattaaggagaaaaacaaatatgtcgaagaagtcataaaggtactagagatggaattatacgcagacgctgttgtaggagaacctggtgaaggcttaaatgtggaacaaagaaagagattgaccattggtgtagaactagccgcgaaacctaaactactggtgtttttagacgaaccaacgtctggactagattctcaaactgcatggtcaacctgccaactaatgaaaaagttgaccgctcgtggtcaagcaattttgtgtactatccaccaaccatccgcccttttaatgcaagaatttgacagactattgtttttacaatctggtggacgaactgtttattttggagaactaggaaaaggttgtaaaaccatgatcaagtactttgaagcaaacggtgcacataagtgccctccggatgccaatcctgctgaatggatgttggaaatagtgggtgcggcaccaggaagtcacgccaaccaggattacttctccgtttggagaaattctgaagaatataaagaagtgcaaagggaattggattggatggaaaaagaattgcctttaagaacagaaagttcatcaaatgaggagcaaagggaatttgctacttcaacgttttatcagatcaagttggttagtttccgactattccaccaatgttggagaacgccattctacttgtggtccaagtttttcttagcagttgtgtgtgaactgtttataggctttactttttttaaagcaagcgcatctttgcaaggcttacagaatcagatgttggccatttttatgtttactgttgttttcaatccattactacagcaatatctcccactctttgttcagcagagggatctttacgaagcaagggagagaccatccagaacgttttcttggaaagcatttattgtgtcgcaaattctcgtcgaggttccttggaatttactagccggaacgttagcttactttgtctactattatcctgttggattttacgagaacgcctcctatgcaaaccaattgcatgaaagaggtgctctattttggttgttcgtatgcgcatttttcgtttatatcggttcaatgggcctattagtgatttcatgttttgaaattgctgaaaacgcagccaatatcgcatcagtactgtttatgttgtcgttatcattctgtggtgtctttgctactccaagtgttctaccaagattttggatcttcatgtatagagtgtcaccactgacttacctcattgacgccttgttgtctgttggattggccaatgctagggttgtctgttcagagaaagaactcttgactatgattccacctagtggtatgacatgttcagaatacatggacccttacatccaatctgtggggacaggataccttgttgacgggagctcgatgaccgaatgccatttctgtcgatttagttacacaaatgatttcctggccaccgtaagctcctcgtattctcataggtggaggaattatgggatttttagtgtttacattgtctttaactattgcgctggaatatttctatactggctggcaagagttccgaaaaatagcaaaaaattaaaaaaatga

SEQ ID NO: 5341 - DNA, 3801 bp, Saccharomyces pastorianus
atgggcagcacgatggttaggtctaaatggttggtgcaagttgtgcggcggctgccgccgccgccgtgtttgcggtggtctcgccgctgctacgccacgaagaagagcagcgcagaggcccccagaatcaatcccgtggggattcagtacttgggtgagtcgctgcaccggcaggtgtttggcagtggtggaggtggtgaggaggctgatcatggtgacaaacttatagagctgtcgaagcagtcgctgagggaccacggtttgtgggggaagaagacgctcatcacagagccaatagcgtttcccctgcccccgctgcagggtcaatcgctggacgagcacttccagaagattgggcatttcaattcagaaccctacaagagtttttgtggcgacaagttcacacaaatggtgcctcgaccggcgcaatggcttcgccagcccggctgggtcaagtacgttcctggagcggctcctgtcgaggtgccgtatccggacgaagagctggttgtgttcgacgtggagacgctgtacaatatctcgcactatccgacgctggccacggccctgtcgtcaacggcatggtacctgtggtgctcgccattcatatgtggcagcgaggaccctgctgcgctgatacccatgaacacgttgcggaaagagcaggtcgtcattggccacaacgttgcgtacgacagggcacgggtcctggaagagtacaatttccaggactcgaaggcctttttcttggacactcagtcactgcatattgcgtcgtttgggctttgttccaggcagcgtccgatgttcatgaaaaataacaagaaaaaggagacagaacaagagacagaagcgcagtcggagatctccatcgaagattacgacgacccctggttgaacgtgtctgctctgaactcgttgaaggatgtagcaaagtttcactgcaaaatcaaactggataaagccgatagagatttcttcgcagcaacggacaaatcgacgataattgaaaacttccagaaactggtcaactattgtgcgaccgacgtaacggccaccagccaagtgtttgataaaatcttccccgtttttttgaagaaatgcccccatcccgtttcgttcgcaggtctgaaatcaatgagcaagtgtgtcctacccacgaagttgaatgactggaacaagtacttagacagctcggagtccctgtaccaacaatccaaagtggaaatagagtcaaagatcgtcgaaattatcaaggacattgtcctcttgaaagaccaacctgatacgtatcgcaaggacccgtggttgtcacaattggactgggcatccaaacctttgagaatgaccaaaaagggcgttcccgcaaagtgtcagaaactccccgggttcccggaatggtacaagcaacttttcccttcaagggacaccatagaaccgaaagtcactatcaaatcaagaatcattccgattttattcaagctgtcctgggaaaactcccccgtgatctggtcgaaggaatctggatggtgctttaaagcatcgcaggaccaagtagaagcgttcaaggcaaaaaactatgtcttagcagatagtgtatcccaagaagaggagcaaatacgatcgcgagatcaaggatcgtcatcattatcaacctcgacggacgttcttttcaaagtgcctcaccccaatggacccgattttaattgcacaaatctcttgacgaaatcgtacaatcattttttcgaaaagggcgtactgaagtcggaatcggaattggcacatcaagctttacaaatcaactcttccggttcatattggatgtccgcaagggaaagaatccaatcccaattcgtcgtgcccagctcgaaattccccagtgaattccgctctttaagagcaaaaccattaccaaatagtgcttcggcagatgacattgcaataattataccaaaaattgtacccatgggtaccgtcactagaagagctgtggaaaatacttggctgactgcgtccaacgcaaagttaaacagaataggttccgaattgaaaactcaagttaaggcgcctccaggttattgtttcgttggcgcagacgtggatagtgaagaactgtggatcgcatcgttagttggagattccatttttaatgttcacggtggtaccgccattggttggatgtgcttagaaggtactaaaaatgaaggtacagatttgcatacaaagacggctcaaatcctgggttgttctcgtaatgaagctaaaatcttcaattacggtagaatttatggtgccggtgctaggtttgctagtcaattgttgaaaagatttaacccatctctcactgacgaggaaacaaaaaaaatcgctaataaattatacgaaaatacaaagggtaagacgaaaagatcgaaacttttcaagaaattttggtatggtggctccgaatcaatcttattcaataaactagaaagcatcgccgaacaagaaactccaaggactccggtcctaggttgtggtattacctattctctcatgaagaagaatttaagggcgaattcctttttaccttcgagaattaattgggctatccagtcatctggtgttgactatttgcatttgctttgttgctctatggaatatatcatcaagaaatacagccttgacgccagactctgtatttccatccatgatgaaattagatttttggtcagtgaaaaggacaaatacagggctgctatggctttacagattagtaatatatggacaagggccatgttttgtcaacaaatgggtataaatgaactaccgcagaactgtgcctttttctcaatggttgatatcgattcagtcatgcgtaaagaggttaatatggattgtatcacaccatcaaacaaaactgccattccacatggagaggcaattgatatcaatcaactattaaccaaaccggatagtgcgttgggcgatccaaacactgaaatcgatagccaagtatcacaatacacatacacattcagagaacctgtattcgaggagtacaataagacatacacagcagaattcctaaaatattttctcgcaatgcaagttcaatcagataagcggaatgtcaatcaactggaagaggaatacctgcgggagtgtacatccaaagaatacgctaaggatggcaacactgcggaatacagtctttcagactatctacaggatgtgaaaaagggcaaaagaactaaaatacgtatcatggggtctaattttttagatggtaccgaaaaggctaataccagccgacgaaccgacccctctgtcaatatgcacgattatggttcgcttcataaaattgctaatgattctataacgccccaagagcaacttgtgaaggacaaggaaagggagaaaaaggtagacggttcaatcgaagagaacaagaggacattgacgaagaaaaagaagactacatccatggacaggaaatacaaacgagtttatggtggcagaaaagcatttgaagcgttttacgattgtgcaaataagccactggactacgctttagagaccgagaagcaatttttcaatattcctgtagatggggtaattgatgatgttctgaatgacaagactgactatagaaagaggccattgcgagcaagggcaacatcatcatcaacacgcaagaccgcaaaggaagcaccactaaaacaacaatcggtacacaaaccaaacaccaaaaaaatgggtgtacttgaactggaaagggacaatactttaccaaagggtaatagccaaaaactgcattag

SEQ ID NO: 5342 - DNA, 297 bp, Saccharomyces pastorianus
atgagcgctttgatatgtagcaagttgataacgatgcagtccggcttgcacatgatggtcgggataatatcgatggaggagttgtcaattttcctcaaatctctggggaaaagcgagtgctcagttaaaaaggaccatttggagaacttctcagacattgagatgatgttcccctcggaattgaacaccgtgcatgaaatgaacagcgagtcggaaggtgagatgggcttcaacgacagcaactgcttccgcaagatggtcccattggtctttgcagtggtggccgtatcagaatag

SEQ ID NO: 5343 - DNA, 1587 bp, Saccharomyces pastorianus
atgttcctcttccttggtgcagcccagtatgcctttttttactcttttttttttttttttttttttagttttttttttggcagcattattagaacaatagggctcaagatcgcacctgagtccccattattaccgtgtacgccttcaaaagaaagccggtcttccatcaagcatctcatgagtcggcgtctactggtgcgttccatatctggttttaaactgctgtcgagaataactcttgcgaggcctttcagagcgttccccaggcactattctgatacggccaccactgcaaagaccaatgggaccatcttgcggaagcagttgctgtcgttgaagcccatctcaccttccgactcgctgttcatttcatgcacggtgttcaattccgaggggaacatcatctcaatgtctgagaagttctccaaatggtcctttttaactgagcactcgcttttccccagagatttgaggaaaattgacaactcctccatcgatattatcccgaccatcatgtgcaagccggactgcatcgttatcaacttgctacatatcaaagcgctcatagagcgggacaaggtctacgttttcgatactacaaacccatctgcagctgcgaaattgagtgtgctcatgtatgacttagagtctaagctgtcctccaccaaaaacaactctcaattttatgaacatagggccctagagagtattttcattaatgtcatgagcgctctggagacagatttcaaactgcattcacaaatctgtatccagatcttaaatgatctggaaaacgaagttaacagattaaagctaaggcatcttttgatcaaatctaaagatcttacgcttttttatcaaaaaacactattaataagggatttactagacgaactactggaaaatgacgatgatttggcaaacatgtacctgaccgtaaaaaagtcccccaaggataatttctcggacttggaaatgcttatagagacttactacacccagtgtgacgaatacgttcaacaatcagaatctctgattcaagacatcaaatctacagaagaaattgttaacatcattctggatgcgaatagaaattccttgatgctgttagagttgaaagtaaccatttacacattgggatttaccgtagcatccgtcctacctgcattttacggtatgaacttgaaaaacttcatcgaggaaagcgaatggggctttacatccgttgtggcattctccatcatgtctgccctgtacatcaccaagaaaaacttcaattctctaaggtcagtgacgaaaatgaccatgtacccaaattcaaccacaaaccctaattctttccccaagacatcaatatccacttctgtatcaagtaaactacgcaaaaggcgaaactggtggaaactgaccaggcaacggctggcaatattgctttacggtagtaactattacaatgccgcgatgtcgaacaacaagggaaataaaggcttcttgaaattgaagaaatttaatatggaaaatgacttgaaaagtaaacaagacagagatatgatttggaaatggttaatagaagataagaagaattga

SEQ ID NO: 5344 - DNA, 363 bp, Saccharomyces pastorianus
atgggtcatgacagcatcttcaaaccaatcaaattccaaaacttaacccgattcaaaaagatttgtcaattagtaacgcaatgggttgccgaaactttgggcgagggaggaccacatgagaaggatgttaaattatttgtgaagtatgtggtcaaactttgtgactctaatagagttcatttggttcttcaattatcgaatctaatatcaagagaattaaatctccgagcctctttaaaccaggatcgtactggcttccaaaaatgggaaaaaatcctactcagtgttataattccacttttaaacagaaataaacacacatttcaaactgtacgcaaactagacatggactttgaaatatga

SEQ ID NO: 5345 - DNA, 2568 bp, Saccharomyces pastorianus
  modified_base (880)..(926): a, c, g, t, unknown, or other
atgagtgaaaacgatggtcttgtagacttactggatagtgatttagaatattctgtagaaaaagaaacccctgtgaagcatagtattactcaatcaagctttaatgactcgcacttaacttcaaaaactggcggcacaaatgcaaagtcgtttctctctttattaagtgatgattcgttgatcgaatatgtcaacgaattatccagagcgaataagaacaatgcccatttgatcaccggtaccccaaaatttgttactcaaaaggttgactgtgaaaatttacatacagaccttgaccgtcacgaagacttgctcatcgctcagagcaatatcgaagttaaaccaaatgataacagtgaaaatgagatcgataagaacaaagtgtatagtagggaaacctactttcaggacaaggcgcaaggacaaagtgtacaagaccaaatattaaaaaatcaatataaaggcctaatttccagtcaaaattgtaacttgttcaaaaattgtgtcatctatataaatggctacacaaaacctggtagattacaactacatgaaatgatagttttacatggtgggaaatttttgcaccatctgtccgcaaagaaaagaattactcatatagtagcttccaatttaccattgaagaaaagaattgaatttgcaaattacaaggtagttagtccggattggataactgaaagtatcgaaaaaggaagattattgccttggcaaaattattctttaacagcccaacttgatgaacaacaaaaaaaactggataattgtaaaacggtaattcctttcccgcctgagataaactctaatagaacacctgcttatgttagctccgcgttactgccaataaaaccatcatcatcgnnnnnnnnnnnnnnnnnnnnnnnnnnnnnnnnnnnnnnnnnnnnnnntccggactttctcaattcttattttgctcactcgcgcctacaccatctttctacatggaaagccaatctaagaagtaagtttttgaacgaaaacattaacaactcaatcaggatcaccaacaaggacacttacacagtatttcatattgatttcgattgtttcttcgcaactgttgcatacctttgtaggagcgcttgtttcctatcatgtgattttgagaaagatcctatagtggtgtgccatggtaccaaaaattccgacattgctagttgcaattatgtggcaagaaagtttggaattaagaatgggatgtgggtgtcacaagcagagaatctgctaccaaacggggtcaaactaatttcactaccatacaattttgagcaatttcagtcaaaatccgaagccttttaccgaattctcaaaaacttaaacatttttgacttgataatacccatatcgattgacgaagctgtgtgtgtaaaaaaaactccaaatgatatcccgaatagttacatctcaaattccgagatgtgcaaggaaatacgccgcgaagtttttaaagagaccaatggttgcacggtaagtattggatgttcagattctttgatgctagcaaaattaactctgaaaatggggaaaccaaatggttataacattacattcagaaacgatatttcggagcaattttggtctaatttcaaactggatgatttacctggggttggatattctgttctttcaaaattagaatcaacgttcaataatccatcttttttgagtgatttgagaaaacgttatactctagattctttgaaggcaagtgtaggttccagattgggtatgaaaatacatcttgcactacaaggccaagatgatgaagaaagtttgaaaatgctatatgacccgaaagaagtcttacaaagaaagtcgttatcaatcgatatcaattggggtatcaggttcgaaaatatagctcaagtagactcgttcatcgaaagaggctgtcagtacctgctaatgaaattaaatgaaatcaacaaaaccacatcacaaattacactaaaactcatgaaaagatgtaaagatgctcctattgaacctccaaaatatatgggtatgggaaggtgcgattcattcagccgaggcagcaaattaggtattccaacaaatgagtttggaattatcgctacggaaatgaaaagtttgtatcgaagtttagcttgccctccaaaggaattaagaggtgtcgctttacaattcaacaaattggtcgatatggattccggcaacaaccagccaaaactgagactaccatttaaaacgattgtgacaaataaagcatttgaagatttaccagaagatgtgaaaaatgacattaacaatgaatttgataaaagaaattatatgaaaaacgaatctgggttagcttctaatataccaagttccaaaaagaaaaggagtatatatttgaaaacatcaaacagaaacgacttgcccagcactgtggaagaacaattcatgaatgaattaccaacgcaggttcgagaagaagtgaggaatgatttgagaattcaaaaaaaatccatcagacgaaattgggaaacttacaagaaaagatcaaaagaagggaagaaaacctga

SEQ ID NO: 5346 - DNA, 1566 bp, Saccharomyces pastorianus
atgccaaagacgcaatcggccccaagtacaccaacaccaacattaatgtcagaatcaagattgcagagactagccaacctgaaaatagggaccccgcaagagcttagacggacctctattataggcaccatcggaccgaagacaaatagctgcgaggcaatcaccgctttgaggaaggctgggctgaatatcattcgaatgaacttctcccacggctcctatgaattccaccaatcagtgatcgacaatgccttggaatcagaacagctgttccccggaagaccactcgccattgctctggacaccaagggccctgaaatcagaacggggcgcacctcggacgaccaggacttccacatcctcgtagaccaccagatgatcttcaccacggacgcaaagttcgaacactcctccaatgacaaaattatgtacatagactacgctaatttgacaaaagtaatcgtgcccgggaagttcatatacgtggacgatgggattctgtcctttaaagtgctgcaaatcatggatgattccaatataagggtccaagctctcaattcgggttacatctcatcccgtaaaggtgtcaatttacccaataccgacgtagacttgccccctctgtccgcaaaggatatacaggacttgcaattcggcatgcggaatggaattcacatggtatttgcctcattcatcagagcccctgaagacgtcttgaccattagaaaagttttgggccctgaaggccaggacatcaaaatcatctccaagatcgaaaaccaacaaggtctggataattttgacgcaatcctgcaagtcacagatggtgtcatgatagcaaggggtgatttgggtatcgagatcctggcaccagaagtgctggccattcagaaaaaactcatcgcaaaatgtaatgtggcgggcaaacctgtcatttgcgcgacccaaatgctggagtcaatgacctacaacccaagacccacaagggctgaagtctctgatgtcggaaatgctgtgttggatggtgctgattgtgttatgttgtctggcgaaacggcaaagggcgattacccagtcaatgcggtcaagataatggcggccacagctttaattgcagaaagcactattgcgcatttggctctatatgatgatctcagagacgccactcctaagcccacctccactacagaaaccgttgcagccgctgccactgcagcgattttggagcaagatggtaaagccatcgttgtattatccactacaggaaacacagcaaggttgctctctaaatatagaccaagttgtcctatcatactagtaacgaggctcgcaagaacggcaagaatcgcacatttatacagaggtgtttttccatttgtctttgagccaaaacgcttggacgactgggctgaagacgtgcacagacgcttaaagtttggcgtggaaatggcgaggtcttttggaatgctcgaaagtggtgatactgttgtttccatccaaggtttcagaggcggaatcggacattcaaacaccttgcgtgtttctactgttggtgaagagttttag

SEQ ID NO: 5347 - DNA, 1536 bp, Saccharomyces pastorianus
atgataggacgaaaagataacagggaaagcgagggccaaatggaaccgtttggcagttacaatcttacaaccaaagatggtcttcagatggacacgaccggtgtagctgctgctcatttggaagttaacgtgggcggttgtcgcacagaacaggtaatacccatactgaagcatcaactcgtaaaggtgggaaggaataacaaagaatgccagcttgttttgacacatccgtcaatttcttccattcattgtgagttctggtgtgtattttttgatgaagatagcattcccatgttctatgttaaagattgttctttgaacggaacatacttaaacgggctgcttctgaaaagagataaaacgtaccttttgaatgattctgacaccattgaattatctcaaggaaatgaagaaaacgaccataaaaaaatacagctggtttttatgatcaatgacgatttacagtcctccatggacccaaaacttttggatcaaatgggcttcttgagagaaataaatcaatgggaaataacaaataggatagttggtaacggtacttttggtcatgttttaattacacataactcaaaggaaagcaacgatgatatttgctatcatcctgataattatgctgtcaagattatcaaactgaaaccaaacaagtttgataaagaggccaaaatccttttaagattggatcatccgaacattattaaagtctatcatactttttgtgacaggaataaccatctttacatttttcaggatttagttcctggtggtgacctcttttcttatttagccaaaggcgattgtttaacttccatgtccgaaacggaatcattaataattgtctttcaaatcttgcaagcgttaaactatcttcacgatcagggtattgttcatcgtgacttgaagctagataatattttgttatgcacccctgagccatgtactagaatagtcttggccgattttggtatagctaaagatttgaactctaacaaggagagaatgcataccgtagtagggacaccggaatactgtgctcccgaagtgggatttagagcaaacagaaaagcctatcaaagcttctcaagagcggctactttagagcaacgaggttatgatagtaaatgtgacctatggtccctgggtgttattacacacattatgttaacgggtatttctccgttttatggtgatggttctgagagaagtattattcaaaacgcaaaagttggcaaactaaactttaaattgaagcaatgggatattgtttcggataatgcgaagggttttgtcaaagaacttttacaaactgatgtaactaaacgactaaatggtaaacaaagtcttgagcatatttggatcgcaaaacatttaagtcaattggaaaggttgtattacaagaaaatactgtgcaataatgaaggacctaaattagaaagtatgacttcagattggaaaagaaagttacccaaaagtgttgtcatttctcaggtcgtaccaaaaaagaagaaagttttgaagtga

SEQ ID NO: 5348 - DNA, 1587 bp, Saccharomyces pastorianus
atgtctaccctttttttgataggaatgcatgagattgaaaagtccgaaacaattgcacggaaagaagacttatttgatagaatagttgagcttcaagacttggactctttaatgatcaatttgtataaggatagggtctcgcctttccccaacgctcataattttgagactggcgtgtccttggttctgtatgatccttctaaactccaattacctgtgcggcaactggatgttttgttcaagcgatttttcccatcttttaatattagcgcgatagatcctacacacgaggagaatctacagcctcttaaaagcattgggcgtgaaaatagcatctgcggtaacaggataacaaggatcaatcattggatgtatcatcaccatgacgacacttcagacggttttaccaaagcaaatttcggtacgaataatgaaaataccctgccaactcaagcatgccaagcaaatatttatacattattattgcatctgaattattccaaagcacaacatttacaaaaggcatctgtgccaaggttgatacggaacatcgagttcatgtctttcttatcggagccaatagaaaaactttctcaggacaaatcgtattactggaacattttatcgacttggaaattttgtgctttatcgttaagcactcaagaattgatttggtgcgggttcacacttatcaaaaagttatctaaagatgcaaacgtactcattgcagataacaaacttctactattattatttactttggagtcgtcctaccaccaagttaacaaattccataatttcaggcatgccattgatgttatgcaagccacatggcaattgtgtacatatcttcttccggataaccctgtgcatacgttgttattgtgtatggctgccattggtcatgatgttggtcatccagggacaaataaccagttgttgtgtaactgtgaatcggaggttgccgaaagtttcaaaaatgtttccatcctggaaaatttccatagggaattatttcaacaattattatcagatcattggcctcaactgttagctatttcgaagaaacaatttgatttcatctccgaggccattttagcgactgatatggcattgcattctaaatatgaggatagaataacgcgcgaaaagccaatgaaacaaattactttaatatctttaataatcaaagctgctgacatatcaaatgtgacaagaccattgtctatatcagcacgttgggcatacctaattaccttagaattcggtgactgtgctcttttggaatcatttcataaagatcatcgtccagagcaggattgctttggtgattcatataagaacattgatactgcagaagaagatttggactccattcaaaatatgttaacaagtgtgactaatgctgatgacattattaaagaacacccgtatattcccaatggccaaatatttttcatcaatacgttcgctgaagtattttttaaagcattaagtcaaaaatttccaaacttgaaatttttaagcgaaaacgttgaagccaataaagagtattggatgaaacacacaaacaagaaacaaaaatag

SEQ ID NO: 5349 - DNA, 2181 bp, Saccharomyces pastorianus
atggctaccgaaacatttgaagatatcaagctagaggacattcccgtcgatgacattgacttttccgatttagaagaacagttcgaagttactgaagaattcaatttcgatcaatacatcgtggtcaatggtgccccagtcattccgtcttccaaagttcctgttttgaagaatgcgttgaactctttgttctccaaggctggtaaagttgtcgacatggacttcccaattgatgaagccaccggtaaaaccaaaggctttcttttcgtggaatgtggatctgttaacgacgccaagaaaattattaagagtttccatggtaaaagattagacttaaaacatcgtttgttcctctacaccatgaaggatgttgaaagatataactccgacgatttcgaaacggaattcaaagaacctgaaatgccatctttcgtcccatcaagctctttgaaatcctggttgttggatgacaaggtcagagaccaattcgtattgcaagatgatgtcaaaacaagtgttttctggaactccatgttcaatgaagaggattccttagtcgaatctagagaaaattggtctaccaactacgttagattttctccaaagggtacctatttattttcttaccaccaacaaggtgtcactgcatggggtggtccaaattttgaccgtttgagaagattttatcatccagacgtaagaaattcctctgtttctccaaacgaaaagtacctggtcactttctccactgacccaattatggttgaagaaggaaacgaattctctccatttactaagaaaaatgaaggtcatcaactatgtatctgggatattgcaaccggtttgttgatggcaactttcccagtgatccagagcgaatatttgaaatggcctttggtcagatggtcttataatgataagtactgtgcccgtatggtcggagacagcttaattgtacacgacgccaccaagaacttcatgccattagaagccaaggctttgaaaaccactggtattagagatttttcttttgctccagaaggtgttaaattacaaccgtttagaaacggtgatgagccttccgttttgttggcctactggacgcccgaaaccaacaactccgcttgtactgccactattgttgaagttcctcgtggtagagtcttaaagaccgttaatttggttcaagtctctaacgttactttgcactggcaaaaccaagccgagttcctgtgcttcaatgtggaacgtcatactaaatctggtaagacccaattcagtaacttacaaatttgtagactaactgaaagagatattccagtcgaaaaggttgaattgaaggatagtgtatttgaatttgcttgggagcctcgtggaaacagatttgtcacaatttctattcacgaagtcgttgatatgaattatgccattccagcaaacacaattagattctacgctccagaagccaaagaaaaaactgccaagaacgttatcaagaggtgggacttggttaaagaagttccaaaaacttttgctaatactatttcttggtccccagctggtagattcgttgtcgttggtgctttggtcggaccaaatatgcgtagatctgacttacaattctacgatatggactacccaggtgaaaagaacatcaatgacaacgacgatgtttctgcttctttgaaggacgtcggccaccccacctactctgcagccaccaacatcacttgggacccatccggtagatatgttaccgcttggtctagttctttaaagcacaaggtcgaacatggttacaaaattttcaacgttgctggtaacatggtcaaagaagatgtcatcggcggatttaagaacttcgcttggagacccagaccagtttctatcttgcctaattccgaaaagaagaaggttagaaagaacttgagagaatggtcagcccaattcgaagaacaagatgcaatggaagctgacactgctatgagagatttgatcttgcaccaacgtgaattattgaaacaatggaacgaatatagagaaaagactggacaagaaatggaaaaatccatgaactttaagatctttgacatccaaccagaaaacgccagtgatgatttcatcactatcgaggaaattgttgaagaagtcattgaggaaaccaaagaaaaggtcgaatag

SEQ ID NO: 5350 - DNA, 219 bp, Saccharomyces pastorianus
atggttatgttctcattcataattgtttgggcttcaatatcaaagaatattgtattatttaggggaaagaaagcagcttcaaaatacgatgcagaaaattgtgaatttctcacacaagtcaataaagctgacgtcttcaagtatttagtggatatatcgaagggttccgaaaacagttgcgacgcattattgagtagtgtgaatgagttcgaaacctga

SEQ ID NO: 5351 - DNA, 651 bp, Saccharomyces pastorianus
atgaaagggaggtattttaatggtgggcgtacaacgaaaaacttgccaatgagttatgataaaaaagcagacgtcacctctttagatgaggatttgagacaactaaggcaaagcaagttcttacctgaagcgatccaacatattaaaaaatggatatttgaatcagtgctaacagaaaccgccccccctgagcaattactgcagtgcctgaaagatgggacagtcctttgtaaattagcaaacatattgtatgaagcagacacaaaagaagcaaaccatattaatttgaagagctctaaaatgccatttgttcaaatggaccaaatttcccaatttctatcgtttgcaagggcatacggtgtgcctgaagatgaattgtttcagacggttgatttatatgaagataaggacccagccatcgtttatcaaacgttaaaatctttatctcggtacgctaacaagaagcatccagacaggtttccagtcttagggccacaactatcgacgaagaagccaagaccaccagtcaaatctaaaccacaccatctacaatgcagtactggatggagcacctttgagtatggttatatgaaaggcgcttctcaaggaagcgagggcgttgtattaggccaaagaagagatatcgtttaa

SEQ ID NO: 5352 - DNA, 2466 bp, Saccharomyces pastorianus
atgcacacgaatatgaatgagcaggaggaagacctgtcgagccagctgggaaatctaacgatacactcgcccatgaagttacatgcacgctcgaaaatgcacagtaataagggcaaagtgttcaaggaatacgagagtaaccacgacttccacgattcagactttacctcgcaattcgtagagcctacaatatccgagtccgtgaaaaagcctccaacgatgactattttgaacaactatagcacggtcaatcagaaagtgccctcaggattctccggtaccaccgctacatcgcaccaagaggctcaatggaagcactatttccctggaatcggtagtggcactaccaatgttgccgctacagacaaggtacctgagtcggatctgatagtaagcgacctggtcaaggatttatctggtgtgctagaaaccaacacctttaaaaggcacctggatatgaagaacaaaactaccacaacgcaagtgcatgaaaaccaggatactatcaacatctcacattcaaaagatttcttcaacggcgaaaaactgtcatcattttcagatgacagcgattctgggccagcagctgaagcacatgacgtatttgacggtatattaaaaaaacaaaaatcgaactatctgatcgggtcctctacaaacagtaacaaggccaagaagaatggtttcgaacccgatgcctccaattcgttcaatttttcgtcttcgtcatctatgtcgtcgtctcagactcaatccggtggaaaaccgaaattatcgaagaaacccccactaaacaccatatccccgggccaattgggataccagttcaaccatacgcacggtgcatgggacccgcctctaaaccagggcttagacgtgtcaagttcacactctctggacaatacttcttctaatcattcacagttgactacggtggtacctacaagagataccaacacgaaggacaaagcggcttcgattctaaataaaaaggcttatgacttcgtcaccagcaaacgagacaaccaccaagaaaaaaaaatgcaagaagaagatcaggaaaacaacgacgataccccactggacacgccaaaattcaacgatctttttacaagaaatggagccggaacaaagggtaaaaagcaagtgcccagctctcgttctatctccaactccaacctgctggacaaccataagaaacttagaaatttccccaacgaaagggtcgaagatatcacgtcgatttccgaagtggatacttcattcaacgaaactgaaagacaactagtatcgatcttaaccagtaagctgtccagaaccccggctcacgattccaactgggaaaaaatcctgaagtttgacctctccaagtgcaaactgaaaaacgtttttggcctgcaaagactactgccgaacttattgacggtgaacttcaatgacaacgaactgagcaccctagagggaactccatcgggtgtggtgcagctgttctgctccaataacaagatatcaagcgcacactgctcgcttgtggggttcgcggatctggaatgcctggatttatcatacaactacttgaacacaagcctgaaatttctgtcgccctgtcgccacttgcaagagataaacctctcatataactctattcagtcgctagagggaataggcacatcgcgcatcaaaaaactgaacctttcaagcaacgacatccgcggcatcatcgatttcgcgcaactgatccagaccaacaacgccgccatgggcggctggtcgaccgtcgaagtcctggacttaagtgataacaacatcacgggtgtcaggaacatcaactgtctgccccacttgaagattttaaacttgaacggcaacccgctggtctccatcgtcgaagcagccacccacaccgagaactcagcactaagagctctttccatcaaaaacaccggaggcgcgctgtccaagttacaaaactacaagctcaacaaccaataccttttcccctaccaaaacctaaagatactaagagtggagtcattcgcgcaactgagcaaatggcgaaaatggccctcctctctgcaaaccctggagatcaacggcggctcggcctcgtccctgccccactttccctctctaaggcccacaaacctgtattccctaacaatagccaacctcagagatctcacgcaattgcccgtgaatctgtccaacgagctgccgtttctgcaagaattgcggctgccgggaaacaacctacagaacgcccatcacctgacaaactctctcccatgccaatccgtaaagttgctcgatctacgaaacaacccgatcaccacgccatgtgaccgcactagcacaaacctgtacgagcttgccggcctatgccagcgccaatgtcccatgctggtaaccctctggcttgatgacgccccggctccgacctcggctccggccgccacgaacccgtaa

SEQ ID NO: 5353 - DNA, 222 bp, Saccharomyces pastorianus
atgttccaccaatcggaggagaccgaacacaagtatcgtataagagatttggcctttggtcaatttcaagggtcatggcatcaagctttttcattgggtgtttcttcgactaatgtgaagggaatgaacattttgatttcttcaacgaaaaatgtcgtgggtagtcaagaattgttggaggaactttgtgctatgtacaaggctctgcttttaaatccctga

SEQ ID NO: 5354 - DNA, 1404 bp, Saccharomyces pastorianus
atggaaacagaagaaagccaatttagcagtataacaaaaatcatcaatccaaaaactctaatgaatacctacagtgaaaaaacgtctcttgttcaagatgaatgtcttgtcaagatgatacagaatgggcattcccggcgtatgggatctgtggaagatttgtacgctgcactcaacagacagaaattgtatcggaatttttcgacatattcagagctgaatgattactgtaccaaagatcagctcgcattagctctaagaaatatatgtttgaaaaatccgactctcctacatattgtattaccggcaagatggccagatcatgaaaagtattaccttagctcagaatattattcacagccccgtccaaaacatgattatatttcggttttgcctgagttgaaattagatggtgtgattctcaacgagcaacctgagcacaatgccctaatgaagcaaatactagaagaatttgcgaatagcaatggatcttatactgcaaaaatctttaaattgaccaccgctttgactataccttacactgggccaacaagtccaacttggcggttgatttgtctcccagaagaagatgacacgaataagtggaagaaatttatatttgtatccaatcactgcatgtgcgatggtagatcctcaattcacttttttcaggatctaagagatgaattaaacaacataaaaactctgccaaagaaattggactacattttcgagtacgaaaaggattaccaacttttgagaaagctcccagaacccattgaaaatatgatagatttcaggccgccatatttgtttattccgaagtctcttctttctggttttatttacagtcatttgaggttttcttcaaagggtgtttgcacgagaatggatgagatagaaaaaagtgatgagattgttacagaaattatcaatatttctccatcagagtttcaaaaaattagaacgaaaattaaattaaacattcccggtaagtgcaccatcactccgttcttagaagtttgttggtttgttactctccataaatggggcaagtttttcaaaccactgaagttcgagtggctcactgatgtttttatacctgcagattgccgctcattgctgcctgaagatgaagaagtgagagctatgtacaggtacggcgctaacgttgggtttgttgacttcactccatggataagcaaattcaacatgaacgacagcaaagaaaatttctggccacttattgcacattatcatgaagtaatttccggggcgataaaagacaagaagcatctcaatggtttggggttcaacatacaaagcttggtccaaaagtatgtcaacattgataaagtaatgcgtgatcgtgctcttggtaatcacgtgggggcactttgttga

SEQ ID NO: 5355 - DNA, 2058 bp, Saccharomyces pastorianus
atgtatggcaaattgcccttggttatgactgactcatgcatgggagtgtttggtgaagttacctgggagtataccagtgatgctttatacgcctcaccggtatgtacttatgaaccagcattgcaatcgtttttgtattgcatttatgatacattacatgaaaagggtcattcgaataaaacatttgaaaaagcgttagatgctgtcaaagaagactgctcatactatactgatacacttcataatatgactacttctgacttttacgataccctaaacaacggaacgaagtatatggtgcaatatgttgaaggtagtgccaatcttacataccctgttgaaatggatgctcaagcaagggagaatttctatcattcttaccatggtttctacgctaattacgacatcggccatacatatggtggtattatatgtgcctattttgtgggtgttatgatttttgcaggaattcttcattatatgaattatactcggtttaaaactaccctcttcaagcaaaagattgtgagatatgtgaggggatatgctacgttacctactataggaagtaagcatgcgtcagccatttcttatctcaaaatattcacaggctttgtacctacaagattcgaaggtattattattcttggataccttgtactgcataccgtttttttagcatacgggtatgagtatgatccttacaatctaattttcgactctcgtagagagcaagttgctcggtatgtggcagataggagtggcgttcttgcgttcgcacactttcccttaattgtcctttttgcaggaagaaataactttctcgaatgcatctctggtgtgaaatacacctctttcattatgtttcataaatggctgggaagaatgatgttcctcgatgctatgattcatggtgctgcctataccagttatgaagtattctataagtattgggaagcaagtaaggcagaactatattggcaatttggagtggctgcactttgcttagctggtatgatggtttttttttctttggcagtattcagaaagtttttttatgaaacttttttgtttcttcatattgtccttggagcgctgtttttttatacgtgctgggagcatgtagtaacactaagtggtattgaatgggtatacgccgcaattgcgatttggatcgttgacaggcttattaggcttgttagactatcatactttggttttcccaaagcctccttgcagttagttggagatgatattattcgagtaacagttgaaaaaccaacaaggctatggaaagccaaacctgggcagtatgtttttgtgtcgtttttgcatccactatatttctggcagtcacatccattcaccgttttggattcaatcaccaaagatggcgaaatggttattattctgaaagaaaagaagggggtaacaagacttgttaaaaaatatctctgtaggagaggaggtaacgcattgatgagactggctatagaagggccgtacggctcttcgtcaccagttcataactatgataatatcttgctacttaccggagggactggattgcccggtcccattgcccatgcgattaaacttggaaaaacttcagcagcagccggaaaacaatctgtaaagttagtgattgtagttagagggtttgacgtacttgaagcttataaaccagagctgttgtgcctaacagacttgaatgtgcaggttcacatctacaataccatgaaagttccattgttggattcaagcgatagtttaagcacgtctcaaaaggatgaggaaggtgatggaaaaggcggttttgtagaaacaagtctagacaaatcatccagtccctttgagtttgattgtgccgtttttcatcatggaagaccagatgttgaagaagttttgcgtgagtcaacagaactaagtggttcactggcagtggtgtgttgtgggcctcctgtgtttgttgacaaagtaagggaccaaacagcaaaggctgttttggaaaattcatcaaaagcaattgaatactttgaagaataccaaagttggtaa

SEQ ID NO: 5356 - DNA, 864 bp, Saccharomyces pastorianus
atgtttcacctagctcgccaaaaacttactgatgagaaccattataaaattgaaaagacacgaagaaagcaaattcccgaacctcttcattttaacagagaaaggaatttgccgattgccactatatttggcaagagagggtttttcgtattcccaagcgtacaatcttatgacatgttcaaacggacaaacttcaatctcagtgttcttgatgcggatggtgtaggcgttccgctatttcacattgtacaaaattacaacattataggtcaaatcgtggggaagtcatcaaattttactattttcaggtacgttttacaaagagcgcaagacccacctttgtataccaaatgtaaggttatttgcgaagataaggcctttcgtttatgcaagataccattttgtgagatctactctcaattaagtttccgagatactaagtacgaatttttctatccctccagaagtcagtctgttaacaactaccaaatggttaggcaaaataattttcgtgatttggatgtttgtttgaatggtatgaacttccgttggcatgtgaaagttctaagcgatcattaccgattgacgtatctagatgaaaacccccccagcaataatcaaacaaatacacagaagcaatctcaaagaaaaaccgactctcctgattttgtacttggtcactacaaaagagattattccaaccttctccccaggtctatagcaaaagcctccaatcttatcattggagagaattcaagacatgactgccttggtatcagttctgttccagaattgacagagatgcttgcctgccagggagctctagttgaatacttagaacacatagaaaggcgtaataattga

SEQ ID NO: 5357 - DNA, 1188 bp, Saccharomyces pastorianus
atgcctgctgctataagacatgaaaaccgcgagataggaaccgcaacgaaccgaactgctggcagtattcttaacggtggtagtaccagcgctgtagcggcgtctacgccgaagagaaccaagagtgctcgaaggaaaacgttcaagtgcacagggtacgacgggtgtgcgatgtccttcactagggcggagcatcttgcacgtcacataagaaaacacacgggggaaaagccgttccagtgttctgcgtgtttgaagttcttcagtagagtcgacaatctgaagcagcaccgggagtcggtgcacgcacataaacaactccatcctgcggacccacatcagcggaaaccgtcgtcttcgtctatgtcctcgtcttcttctgcgtcttcttcgtcggcgtcctcttccacctcatattcggaccatccttccaggaaaactaataccgccggcaccagtataggaatgatggcggagaacgagaggccgccgcaaatcattcattctccgccggagttcatcactaacgcgagaagcatcccgcccatctcaccaggtgccacctacagcgcgcaacagcagtatttcggcgctacttctccgcaacatcaacagccgccggcggccttctactacccgtcccacccggccgccttagacagctactaccagtatccgcttcccagcaacagtactgctgttaattacctgccctctatgcaggtgcaatacccgctgaacgtgaacccgaatgcagcgggtcctccgcccgcagaggtaatgctatcgtctttgcctccgagatctgtaccaaatgtatctttcaaacatcctgactcggccgatttccaggctcgcagaatcatggataactataattttagatcaaataatactacaaataccactaataccactaataattcatttcccgcgccatattgtgcaccaaacctgggcaccgaagcaaaaccagtaattttccaacagcatcaccaaccattccaacagcaatcgtatgacaacaaccctaatgaaagcataaagaaagccggcaacgacaagggtaaaagcccctctgacgacgacaataacgacggcaaaaagaggctggagactctaacagactcggaccttttgatcaataccaacaagaaaagactcagcgtcgattacatactgacataa

SEQ ID NO: 5358 - DNA, 1782 bp, Saccharomyces pastorianus
atgtcgctgttcttgtacttccagtccgtcgccgtcgtcgcgatgcaacacgttgatagcgtcccacccattgctgcggcgtggtcggaaaacctggcttggtcgatggggttgatccgtatcacattcatgcagaagattttccgttggtacgtggacgcgaccgggggctctgcgtcactgtatttgacagcgacaacaatgtctgtgctcacgcagagaggcctggactacctaaaagccacctccatctacaagagggccgaaaacgtgttgtatggtaacgcaaacactttaatcttcagaggtatcaaaagaatggggtaccgtatgaaaattgaaaacaccgcgatcgtctgtacagggtttactttctttgtattatgcgggtactttttagctgggtttatcatggcctgtaagtatggtattgagctgtgcataagatgtggctgggtacgaagtgaccggttttaccaattcagacagaattggaagtccgttttaaagggttccttattaagatacctctacattggatttacgcaactgaccattttaagtttttgggagttcaccgaaagagattccgcgggggttatagtcattgcatgtttgtttatcatcctatcatgcggattgatggcttgggctgcatacagaacgattttctttgctagcaagtccgtggaaatgtacaacaacccagccgccttattgtatggtgacgaatacgtcctaaacaagtacgggtttttctacaccatgttcaacgcaaaccattattggtggaacgccgtcttgatgacgtacgttttcattaaggcgctattcattggatttgcacaagcttctggtaaaacacaagcgttggcaatttttatcattgacctagcatatttcgttgccatcattcgtaataaaccatatctggaccgtccaacaaatatcgtcaacatctttatttccactgttaccttggtcaattcgttccttttcatgtttttctcagacttattcaatcagaactacgctgtgtctgccgttatgggttgggtgttcttcatcatgaacgccgctttctctttattgttattattaatgatcttaacctttacggcaattattgtattttccaagaatccagactcaagattcaaaccagcaaaggatgacagagcatctttccaaagacatactatttcccacgagggcggtttgaataaatccgtggctaacgagttaatggctctaggtaatgtggcaaaggatcatactgaaaactgggaatacaaattaaagagtcaagaaggcaaaagtggcgaaaatcttttcggcgtcgaatacgacgatgagaaaaccggttccaactcagataatgcagaaaatagtagtaaagagactactcgtccgactttctccgagaaagttttacgttcattatccatcaagaggaataagagtaagcttggcagcaatagaaggaaaactcccgtgaaggtagcacagaaagagccatcaaccggcagtacaaactcttcgcctatcaacaaatcataccccggtatttcgcatatgaggcaagaatctgaggcaaacaatggtctaataaacgcctacgaaaacgaagaattcaatctgatggaaccaaacgtgccagaagatgcaaccagtttcaatcaaatggacattatgccaatacgagatatgagtttgaacagcatgccaaatacccaagacgttaccaaaaaggcaaatattctggattctaattatttgtag

SEQ ID NO: 5359 - DNA, 486 bp, Saccharomyces pastorianus
atgagaggattttcaccgctacacagcggagcaaacacagcgccgaggatgcaagcactactgacagtatggtatctgataagcgcatgtctggtggcaccagtggcagccaagaaaaggacgctgacggcgacgtcgctggtcacgtgcatggagaattcacagctatcggccaatagcttcgaggtgtcgttctctccagacgacagagcactgcattatgatctggatatgaccacgcagatcgattcatacatcagcgcgtacgtggacgtgtacgcgtacgggttcaaaatcataaaggaggacttcgacgtgtgctctatgaactggaagcagttctgccccgtgcacccaggtaacatccagatcgactcgatcgagtacatcgcgcagaattacgtggacatgattcccgggatcgcgtaccaagtgccggacatcgacgcgtacttgaggcttaacatttacaacaacgttagcgag

SEQ ID NO: 5360 - DNA, 1071 bp, Saccharomyces pastorianus
atgtgtgattctggaaaaatactatgtcagcagcagcaaacattttcaccggatcaatatttggctatgtcaattaataggttaacttcaagccgactcccaagcctcctaacaaaggctactttttcttacccaagagcctatttgcatgagacgacggtttttttgcaaaataaaggagctacccaagattcaccagaacttttagcaaagagttcacatctgaactcaaatccgttggatggaagcaataaagcacctgtaaaaagcacgcaaacaaaattacctttagctcatagcaagtatgagtcgtcgaagtacgaacttcccagatggaaagaagcgctgggtgagctggtaattcgtacgtttcgtctagatatggatagggtcagagcaggacctgttgctgggtcttactattatacactttgtaaaaatcaaggtttacaatatgaagacgaaccgctatcagagactgctaagtatttttatgaggatttaaagctacctcgtactttttcacaatggtttcaaattactgcattgcacgagtggatgctttttgtacgtatgagagctatgcccttcaaatacggcagaaactatcaacaaaaactagtggatagaacattctctgatattgaactaaggttattcgaagaaatgaaagtcaattctggtagaattgctgaccaatacttgaaagactttaattcacagtttagaggcgcggtgtttgcgtatgacgagggctttgctacagatgatcccacgcttgctacagcagtttggagaaatctattcggtggcagaaaagatattgatatgctacacttagaatctgttgtggggtacattcactcccaactatacgttttgagtaggctatcggatagagaatttgctacaggtaaattcaaatttgttcctcctggggtaaaagtagaaaagctaacaccacaacaagaagaggatttgaaggcaaaaaccattgcaaaatatgaggctcaagataaagaccccaacactttaccaagtgaaagaagtaaactgtcgtacacaaattag

SEQ ID NO: 5361 - DNA, 1923 bp, Saccharomyces pastorianus
atggctaaggataatttgaccagtttaatttctcaattgaacattcagttgtctcaagatgagcattctcaggtcgaacagacttgcttgaaattgttgaattcaggctgccaagacccagcagacgtatttagacgttgtttggtggctgttattcaacaagataaataccaaagagccttgcactatttgaagaagttcgaacacattgatgagaaattcggtcgcaaatttgcgttagaaaaattgtacattttttacaaattgaatagttccgacgaatttaactcattgtacagacagattgtcacagatgacctcgatactgtactgaaaaaaggaatcgagtcactaagaggcatcttacacgtgagggcacagtactgttacaagaatggtttgtatgaagaggctttcaaaatctaccaacatttagctagtcacaacgatagggaccaggacagtcaaatcgaattggcttgtaacgaaagggttccactatcggtagtaccagaattaatgaacagatctccgttagtgaccaccatagacgaatcttcctacgatttattgttcaacgaatcatttatcctgacatccttaggtcaatacgatgagagcatcaaaatattggagaaggccctacaagcagccacggatgaaggttataaaaacgatatcaataccatcaatttacaattatcctttgttttgcaaatgaagggggaaaccacgaaaagcaaagagatattaaaaagcttattaaaggaactagaagcatcttctccattttatttgatctgtcaaaataacctgaacgcattcgttgatttatccaaatataacaccaattttaatctactgttgagggaattaaacgtggagaggttaaacactttcaattcacagaccttcacatatgagcaatggtcgaacattcaacgtaatatactatttctacgtctgttcaataatggtaaaattaattcccaaggttccattctgtcaaaaactgctcacaaatattctgagttagtggataatgtcactttggaaagttacaagacgcaagccaagaaactttatcatcatgtcacaaagagtatcttaagtggcacagagggtagtgtaattggtttgttactgctagctattcaattgttaataatagaaaaggaatgggaaaatgctatcagaataagtgaactattcttgaatgagagttggaaatcatcttttgaaaactttgacgattcacaagcaattgtatgctacattttatttgaactatacaagattaaagggagaaaccattcaaagagtatcttattaaaaaaattagattctgtaagaatgcaattgaagggaaaaacccaagaaaacataccattctggaagcacgttgggttcgaactattgtccataggcaacattaaagaatcgaaagctttactcagggagctctcaagcttcaataaagttagcgaagatgaactagtcaacagaattgtctcatccaattctttggatatagcgcaaggcatagatttggtgagaaacattgatgttaaagaattaattcaactaggtgtaaaacctttagaatcttctgtaaagaaaaataaggccactacaattaacaaagtacaaaagaggaaaatcctagaactgaaaaagaaaagaaagactaagcgtgtggacaaattcctacaaagccgtgacgcttccaaattgcccgatcctgaaagatggcttccaataaaggacagatctacatacagaccaaagaaaaaacaacaaggcgggaaacaaacccaaggtggtgctatgaacaagaagtctgaacaagcccttgatatatcaaagaaggggaagcctgctgccaataaaaaagctaagaataaaaagaaggctcgtaaataa

SEQ ID NO: 5362 - DNA, 129 bp, Saccharomyces pastorianus
atgtggtcgtgtttcaactttttttcttcctctccttttcctcgttgcaccaaaaatttctccagaaaaagaaatttaaacgtgggttggggtgacaaaagtgaagacaaccactggagaaggcgctga

SEQ ID NO: 5363 - DNA, 324 bp, Saccharomyces pastorianus
atgaagggtcagccgagcattccgagagagtctaggaaagaaaaacaattcattcagagtattcaaaatcaagtgcagcggggaaatccgaaaactgatttaaacattaaattgattcagcgagagtttgcgaatgaaaactctcaaattttggatttcataaaggaactgggggatgccaatttgctagagtatgagttaacacaagaagaaaaggacgtactttttggtacccctgaagataatactagaaacaactataaaccaaactacagaaacaggaatgctaattcaaatagaggcaatttttctaggaaaaggtaa

SEQ ID NO: 5364 - DNA, 732 bp, Saccharomyces pastorianus
atgcattacaataattttggaaacgggaataacgatggacagcctaggcttcccaagcccacatactcaggaacattatcagatgattatgacgaatcaaaggttaaaaggcaaaagacggagcctactctgaatgtaggtttttcttccaatttgtattcgaatactccatattacgaaaactcctggaataccgattataattctcaacttcatactttcactccccataatcaatattaccacccattaccgcaatcgacccaatacaaatttcaaaattcttcaagttatacgcaaaatggaatacatccaacgaaccacgatacacggtatccacatcatccagagataccaaagcaaccatcactatattttgaagccgctcctcctcaaaaccgtaatactaactatcgtacgtcaattagctatgaagatgtcacaataccagttgcaaagaaaacgaaactagtcaaacaagaaaagaacatgaatgctacaggtactagtgaaaaaaatttaaagcctacaagtcgggttccagcttcacttaaattcgaggaaaacataataaagaaaaaagattttccaagctctaatgtccaagacagccttgattctgaactggatgaagacgaagatgagcagcgacaagaaggcgaaggcgcaggaaaggtggttgtggttcctgggacttctatcgcattagttactgacgatgatattacaaag

SEQ ID NO: 5365 - DNA, 390 bp, Saccharomyces pastorianus
atgaacgataatacttctctaagtacgccgaataaagaagacgatcagaaaaagcttagagaaccagaagaaaaaaatagaagtactaaaaatatcaatggagttctcataagtaaggctaataacaaagcactccccaataaaaatccgccagttcacaataaagcacatagtaagaaggctatctcgccgggaagaatcaggaagcacaaagctacaacatctcccacgaaatcacatttgaagagtaagaaaaaagatatttcagaaagcgcgattcctaaagagaacaagggcacattttatcaaggtgccattgttggttcattccttggggctgctgtaacaaccgttctgagtaacctggcagtaaaggcttttcaaaattag

SEQ ID NO: 5366 - DNA, 360 bp, Saccharomyces pastorianus
atggctcagcaacagcaacagcaacctcacgctcaacagcaattggttggtttaatccaatcaatgcaaggccaggctccccaacaacagcagcaacagctgggtggatatgcttcgatgaacccatcgcctcctcctatgaataattacaatggtcaaaatatgtctgcaaaatctccagtcccacctatgccacatcaaggccaacccctgcagcaacccccacaacagcaacaacagcaacaacagcaacaacaacctccacatcagcaacaacccccacaacaacaacatcatcagcaacctgctggaaataatgttcaaagtctattagatagtttggcaaaactacaaaaatag

SEQ ID NO: 5367 - DNA, 1974 bp, Saccharomyces pastorianus
atgtcagaagaaaacgataacattgaggttcaagatgttccctctcccgaacagtctatgggtagcgactctaacgaaaacgagtcgatgaacaacattaacgacgatgagcagagcgaatctaatgatcaggaagaagaacaggaagccgaaagagaggaagaaaatgaagaacaacatgaactggaagatgtaaatgatgaagaagaggaagaaaaggaggacgcagaaggggaggaggaggaggacgagaatgaagaaggagaggaggaagatcaaggaaatggcaacagttctgcagaattagatagttctagcgaagacgatgatgacgaggaggaggaagatgcggaggaagaaagcgataaacctaaagatgatcaagcagagagcactagtatgaatggtccaaatgaagaattacaaacagaacaaactggcgctgatacagctgggaacgaagtaagtggtgaagaaaatgagaatactcaatcagttaacatggaaaatgttaattatgagcttctacagaagcaagtcaaatatatcatggacagtaatatgctaaatctacctcagttccagcacttaccacacgatgaaaaaatgtctgccatcttggcaatgctaaattcaaactctgatacagctcttttttcacctgtgcaagaagctcctgtcgcgacggctggaaccatggccccagcccctacaggtagtgccaaaaacatcgaccaaagaaaacctccattatcggatgctcaaagacgtatgagattacccagggctgatttgtctaaaccaattaccgaagaggaacacgaccgttacactgcttacttgcatggtgaaaataagattacagaaatgcataatattccacccaagtcaagattatttattggtaatttaccacttaagaacgtgtccaaggaagacttgttcagaattttctctccatatggtcatatcatgcaaataaacatcaagaacgccttcgggtttattcagtttgataatcccctaagtgtaagggacgccattgaatgcgaatcacaagaaatgaacttcggcaaaaaattgatattggaagtttccagctctaacgcccgtccacaattcgatcatggtgatcatggcaccaatagcagttccacgtatatttcttctgctaaacgcccattccagaccgaatctgccgatatttacaatgatgataacggtgctaatttcaagaagtccaaaagacacacaccttcatgtgttatatatgttaaaagaaccgcggaccgtacttatgccagtgaggtatttaacagatttagggatggtaccggtttggaaaccgatatgattttcttaaagccaagaatggaattaggcaaaatgattaacgatgtcgcatatgatggtgtatggggtgttgtattagtcaacaaaacgcataatgttgatgttcaaactttctatagaggttcacaaggcgaaacaaaattcgatgagtatattagcatctctgctgaagatgcggttgcaatttttaataatatcaaaaacaatagaaatagttcccgtcccaccgactaccgtgccatgaaccatcaacaaaatgtatatggcgctccccctcttcctgtgccaactgcgccggctgttgtaccacctcctcaaccgaactattaccaaaattacggcatgcctcctccacaacaacaacagcagcaacaaccttatggccaatcatatggaatgcccccaccatctcacgaccaaggttatgcggcacaggcccaaatccctatcaaccaaaactacggtcgctaccaaagttctgtgtctgcgccaccacctccacaacaacaacaaatgcatcaagggtatggtcgttatcaaggtgctccacccccaaagactaacttaccaaactccaatggatcagacaacaactattgtctgctattcaaaatttgcctc

SEQ ID NO: 5368 - DNA, 771 bp, Saccharomyces pastorianus
atgtttgggaatacacaagttcctccggttttagcatttgctcttgggacactaggatttttattaccgtttgatttcaaagaacatagaagagttttccaagaggtaattagctccagggcgaaatgcttacatagaacgagattagaatgtcatttgaaaaagaaaggtaacagttcgtctatcgtaacccatgccatgaacgatatattcttacatagaggtaactctccccatctcactaacctagatatttttattgatggtgaatttttaactagaaccacagcagacggtgtggcattagctactccaacgggatctacagcatattcattatccgcaggagggtcaatcgtttctccattagtacctgctatcttaatgaccccaatctgtccacgttctttgtcgtttagaccattgattttgcctcattcatctcacattaggataaaaataggttcaaaaatgaaccaaaaacctgttaaaagtgtggtgaacctatctattgatggtatacctcaacacgatttagatgtcggcgatgaaattcacgtcataaacgaagtcggcactatttacattgatggtactcaactcccaaccacgaggaaagctcagcctgaattcgagaattcgaaaaaaccaagaagatctgggatatattgtgtggccaagaccgagaatgactggattaggggaatcaatgaacttttgggcttcaattccagctttagacttatcaaaagacagagtgacaatgaatga

SEQ ID NO: 5369 - DNA, 372 bp, Saccharomyces pastorianus
atgttcccgagactgaaattgaaccacccaatgaggtggtctagaatctatagtacacttgattcacatgccataagattgacgagcggctcaaaatttgtaaaaataaagcctgtatatggcttgaggggtagttcatcagcagatttcgtgtcccctccaaattccaaattacagtctttgatctggcacaatccgttacagaatgtttatattacaaaaaaaccttggactccgtctacaagagaagcgatggtcgaatttataacacatttgcatgagtcataccctgaggtgaacgtcattgttcaaccagatgttgcagaagaaatttctcaggatttcaaggcccccttgaggatgttcctttag

SEQ ID NO: 5370 - DNA, 195 bp, Saccharomyces pastorianus
atgtccgaacaagaagagatacaaaaaagagataaaccaggtgatcaaccggcgaagtcagtggtcagggaaggtgatacacgtcctcaagactatgaaagtatcttggaaaagttgctaggagcattagggcgtttctttgggtcatggttctcttggctgacaacggatacgtcaagtacggagacagcttaa

SEQ ID NO: 5371 - DNA, 648 bp, Saccharomyces pastorianus
atgctgatcgtgagtttatatctgagcgccttgttacaacaatcagcggtcgctgcggcaattgccacatcagccggaggccccaataacttgggtaacagaactgtttatctaggcagtttgcctaaagatgttaagattgaagaaatatgtaacgcggttcgtggcggcttattacagagtataaagctcttgaatgatcgctacgtgtgcttcgtcaccttcattgatcctactgctgccgcgcagttttatgcgatgagttctttgtatggattcacagttcagaaaaaacgttgcaaagtcggctggggcaagcactccggcccactgcccaatgctcttgccttggcagtcagtaacggcgcgtcaagaaacgtttacgtgggtaacattgattttgctagcgattccttaaatgatgaacgtatcttcacggaaaccaatttgagaagtattttccaacaatacggggaagtagagcaaatcaatttcttacctgagaaaaactgttgctttattaattataccaatatcagcaatgcaattctggctttagacaagatcaagtccaacccatatttcaaagatctcaaaatcaattttggtaaagacagatgcggtaacgtgccccaccaatctcgttaa

SEQ ID NO: 5372 - DNA, 1089 bp, Saccharomyces pastorianus
atggtggtttcttataataataataataactcactacctccttttgcttcttctgatgactctaccatgtaccagcactccaattcttccggtcattatcgagacccttatttgaatgatcagcaagcctttggtgatgctacgtaccctatgaatggcggttttactcttttgccatccgactttacgcgggatccaaacgattctttcctttatgaaaatagtggtttcttggactaccatccaattcaacagcaaccaccacagtttcaggtgagccagcaaaccgaatcgcaacagcgacggcttctacaagagcaaaattttggaatgggcaacgaaaatattcaaagcaacaaccattattttgaatatgaaagatcttctaatgaagtttccccgttcggcgatgaaaatccaaatgcggtgtctgatagcatttctcccattgttagggcaaccgccaccgctgtaaccaacgcaaatgctcccttgtcagtaaattcacaagccaacaatcctttgaattttacttctgctccaaccagaactgtctatttaggtaatgtaccaccacatctgacagtaaaagaacttttagatcatgttaggagcggtgtcgtggaagacgttaaaatcatacctgaaaagatgtgcgcattcatatcctttgtcgatgagagtgcagcactattgtttcattcggatgcaattttaaagcgtttaaatattggtgatagagatataaagattggttggggtaaaccaacccgcattgatcctattgtggctgcgagaataactaccgatggtgcgacaagaaacgtatacattggtcgtatgacagtcgaaggtgaggaatctcatttatctgaagagcaattgagagccgatttacaagagtatggcgaaattgattgtataaaaatcatcaaagaaaagggaattgcctttattcattttgcatctattctaaatgctataaaagtggttacgaatctaccaataagaaacgcatattaccaaaataagagaatattctatgggacagatagatgcgcgtttatcaccaaaacgcagaaacataac

SEQ ID NO: 5373 - DNA, 1185 bp, Saccharomyces pastorianus
atgtggatcatcgacggcggcggcactgtccaccctggtccacggcctgaacaccctcggtgtcagcccgcgcgacatgatcagcatcctgcaggccatcaaggccgcgggcgccctgcaagccgacatgatgataagttgcctaatgataccaaaaatatgaggcaatctaagctgggtcaaactataccgaactcccaacttgctctccccaccgctactagcatcgataacaaagacaacattgtctctcaacacaacttctcgacctctatgtcgagcttaacgaacaacttgagaagagcagttcctgatagttttcatggctcgtcacgaataaataatattttccataagaaaagcagccagaatttactcttaaggtctaataataccggcaaaaatccatctgcttcgaactccccattggttaatgaacactccatttcaaatacgaacgccaacggaaatgtaaatggatcttccgattctggtgccaagtttaatagtttcgcccagtttttaaagtcagatggcattgacgctgaatccagaacacaaagaaagctatggctacaaagagaaaattccattatggatttaagttcacaaaacgacgggagtgactccatctttatggcgggaaacattgatgcgaaaagagagtttgaaagaatatctcacgaatactctaatgtaaagaggttttataacccattagacgaggcattattaagagttgaacctacaatggctgggaacactaataacattggaaaaaaaagccataacgatgggcaatcgattactccctccaatggtacgccagatcataaaggcaaagacgatttacttttcgctaattacgagaagaagtttgatgacctttacccacaccttggaaacgccaaaattcaagcagtgttgtccaacatatggaaaaacgaaagtttcctatttaataaagatgtcaatccgattagcaagaacaaggcatcgagcacaagccacagcataagcaataacggtctgcagaacacacgcaatctattgagaggccctatggggtctaccactacattgccccatcagcgcgttattaactctttacagccgactacaagagcggtgaaccgcagaatggagaatgttggctacatgcacgcacagtcacaacaaagataa

SEQ ID NO: 5374 - DNA, 1701 bp, Saccharomyces pastorianus
atggtgcacagaggaagaacattaaaatcagacaccgatataacctctcccaatggatcagcagtaccacatcagtcgaagccctttagacagttctcgactaggtcaagagccaagagtaatgcaagtttcaaaggcttgcgcagggttttaactcatgatggcacactggatagcgattatttcaataaacataatatttctcaaaaatgcaaaagttcagacgctcttttcagaaaaagaactattagtggattgaacatgacggcgttgacaagagtaaagtcaaatcagggcaaaagatcggcatcctttcatagccctgtgcataatacattaattagcccgaaaagcggtagccactctaattccgcaagtagcggctttggcctaaaaccacgaagaagtaaaagtacacagtctgttctaagtcttcgagatgcacaggaaccagataatagtggctctacaactgatgaagaggtcgaatgcttttcggaggatgacgcagagaatgagaaaataaatagtgataaaataagaatcaagcataatgctcctcaagagaaagaaagtagcccacatctaatcgataatgaattacaaccatcagagcctatttacgaacaagaagaagagaaacctctcaatcaacagaataaaaaccatagagctatatccctaccgctaccccatttaacatccactgactactttggggaatctagccgctctgaggaaccccaaaatgatgacaatatatcgtcaagttcaacagaaacaaaacttaatgtgaatcacgttatcaacgaagaggagcaatccagcacaagaaagaacaccgatggcgaaacagaacatccccccaaaatgaacagtccactaatggaagcagacgataaaatctcacatacaccatgtaaggcgaatgaagaaagaatcctcgacattggcaacacattagcggtacataagagtagtgaaaagccaagcaatttggatgagcattttgaccaggaagatcacatcgatgctcctagaagtaattcttcaagaaaaagcgacacaagttttatgtccttgagaagacaaagttctaaacaacgccaaccgctaaacgaagaagaagatctaataaaacctgatccggaaaacatttcttccaatgacatcaacggaaaggatattgaaggcgctaatccattagaaaattatgcacctgacatgattctttcccagtccactggagtagaacgtaggtttgaggatttatcttctattcaaaactcacttgggaaggaaattcaaaatccagaagatcgtttgaattcggatggtactttcgatgacctggatgatgataagttgcctaatgataccaaaaatatgaggcaatctaagctgggtcaaactataccgaactcccaacttgctctccccaccgctactagcatcgataacaaagacaacattgtctctcaacacaacttctcgacctctatatcgagcttaacgaacaacttgagaagagcagttcctgatagttttcatggctcgtcacgaataaataatattttccataagaaaagcagccagaatttactcttaaggtctaataataccggcaaaaatccatctgcttcgaactccccattggttaatgaacactccatttcaaatacgacgccaacggaaatgtaa

SEQ ID NO: 5375 - DNA, 1260 bp, Saccharomyces pastorianus
atgctgcaggtcaccaccactgccactacttcgaacaacatcttgacgtcacctccttcctaccgtgaatcaaatttttcttccccatcttcttattcgttttcttcctactactcgtccgctacatctgtttcttcatcgacctcttcgtttttgaaatcatcaggattgtcatccagggttaagtcaccttcatcctccattaaaccgggttccttcggtacaccttcctctccaacatcagaggcttgtagtcataggtctagcgcaaacactgtatttttgaagcggaactctcatgatacttcttcaagtgaaggtcttgatattgatattgccattgaaaaactgttaaaggttggtgaatcaagagacattacgaagaattctaagaaaaagagctttccgttccactcatgggagattcagttgatttgttatcatgcaagagaaatatttttgaatcaacctactttattaagattgcaagcacctattaaaattgtaggtgatgttcatggacaatttaatgacctcttaaggatcatgaaattatctgggccaccatcagacactaattacttgttcttaggtgattacgtggatcgtggtaaaaattcactagaaaccatactgctattattatgctacaagatcaagtatagagacaatttctttatgctaagaggtaatcacgaatctgcgaatgtcacaaagatgtacggtttctatgatgaatgcaaaaggcgattgaactcaaaagtgtggaaaatgttcgttgatgtctttaacactttgcccttagcagccattatccaagacaagatattttgtgtccatggaggtatttcgcctgatttacatgatatgaaacagatcgaaagagttgcaaggccgactgatatacctgaaaacggattggttacagatttactatggagtgatccagatgcccaggtttccgattggtcggaaaatgatcgtggtgtttcgtataccttttctaaaaggaatgtcctcgatttttgtgctaaatttaaatttgatttagtaatcaggggacatatggtcgtggaagacggttatgagttttttgccaggaaaaaactcgtcacagttttttcagcgcccaattattgcggggaatttcaaaattggggggcagtgatgagcgttacgacaggtatgatgtgtagttttgaattgttaaagccgcatgtaataaagaataagaaaaaattaaacaaaaagaaagtttaa

SEQ ID NO: 5376 - DNA, 384 bp, Saccharomyces pastorianus
atgagaagaagcccgtctaaatcaaacaacaacttcgcagtaccgaattgctcaactaattcaaattcaagtcagcaacaattaacaactccttcagatgagctcaacagtaacgaacctaatgaccctgatgatagtaggtttctacctactatcaagaaattcaataataaacattctataaacaatcacagcactttagcatccgccgcaaaaaacaacaacaacaaaaggactagcaatgataacatgccgttccccgggcagaatgctcataaacagaaaatatacaccaatgaaaatataacgagcttgtatctagatttcgatgtttcagtgaccaaagctctttcttctccacaactgctcccagttatcaatacc

SEQ ID NO: 5377 - DNA, 1353 bp, Saccharomyces pastorianus
atgctgtgtgactttttctatccgcaattaggtggagtggaatttcatatatatcatttgtcgcaaaagctaatagatttaggtcattccgtgatcattattacacatgcttataaagatcgagtaggcgtacggcatctttcaaacggtctgaaggtctatcacgtaccatttttcgtaatttttagagagactactttcccaacagttttttcaactttcccaataataagaaatatccttcttagagaggagatccagattgttcattctcatggtagcgcttccacatttgcccatgaggggatcctgcatgccaatacgatgggattaagaactgtcttcacagaccattcactttatggtttcaataatctaacctcgatttgggtgaacaagttattaactttttctttgacaaatatagatagggttatctgtgtttccaatacatgcaaagaaaatatgattgttagaacagaattgaaaccagatattatttccgtgattccgaacgcagtggtcagtgaagattttaagccaagagaccctgataataacagcgagagaaagcagggtaaagataagatagtgattgtagttattggaagactctttccgaataaagggtctgatttgcttactcgtatcattccaaaagtttgctccacacatgaagaagtagaatttatagttgctggtgatggtcccaaattcattgattttcaacaaatgattgaaacttatagactgcaaaaacgtgttcaacttttgggatccgttgctcatgaaaaggtaagagatgttttgtgtcaaggcgatatatatttgcatgctagtttgacagaagcatttggtacaattctagtagaggctgcatcctgcaatttactgattgtaacaacccaggttgggggtattccagaggtgctacccaatgatatgacggtttatgccgaagagacatctgtttcagatctcgtccaggcaacaaataaagctatcgacattataagaagcaaaactttggacacatcttcttttcacgatagagtgtccaaaatgtacgactggatggatgtagcccaaaggacagttagtatatacaccgatatttcttctacttcttccacagatgataaagattggatgaagatggtggcaaatctttacaaaagaaagggcatttgggctaaacatttatatctgttatgtggtattgtagagtacatgcttttttttattctagagtggttatacccaagaaatgaaattgatatagctcccaaatggccgaagaaaacaaaatctgacgagggagtggaagtggaagcgaaagcaaagaagatctag

SEQ ID NO: 5378 - DNA, 306 bp, Saccharomyces pastorianus
atgaacccaaacataacgacaccgccaccaccacaaccttcagtggttcccgggggaatgaacatgcccggcgtgccccaggggccaatggtcatggcacccactctacaactgccaccggacgtccaatcgcgcttgaaccccgtacaactcgagctgctaaacaagttgcatctgcaaaccaagttgaacgcggagtacacgtttatgttggccgagcaaagcaactggaactacgaagtcgccataaaggggttccagggtagcatgaatggcatcccgagagaggcattcgtgcaattctag

SEQ ID NO: 5379 - DNA, 846 bp, Saccharomyces pastorianus
atgtttccagcaatgatgaagctagcttctacagaacccagtttagtagtggagagtgtgaatcttgcggataaccaactaaaggacatttccgcaatttccacattggctcaatcgttcccaaatttgaagaatctttgtttggctaataaccaaattttcagattcagatcactggaagtttggaaaaacaaattcaaagatttgagagagctcctcatgacaaataaccccatcactaccgataagttgtaccgcactgaaatgttaagactattccccaagttagtggtgctggacaatgttattgtaagggacgaacaaaaactgcatagtgtctattcgttaccaatgaaaatccaacagtttttttttgaaaatgatgcgttggggcagtcgtccacggattttgcaaccaactttttaaacctatgggacaataacagagaacaattgttaaatctgtactcaccacaatcccaattttctgtctccgtggactccacaattcctccatccacggtagcagactctgatcaaaccccgtcgtttggttattacatgccatgttcacgcaatatctccaaagtatccagtgagaaatccatccagcaaagactatcgattggccaagagtccatcaacaacatattcaagacattaccaaggacgaaacaccatcttcaagaccagcccaatgaatattccatggaaacgatcagctatcctcaaatcaacgggttcatcattactttacacggtttttttgaagagactggcaagcctgaaatggaagccaagactctagaggatccccggtaccgagctcgaattgtatcatgtcat

SEQ ID NO: 5380 - DNA, 399 bp, Saccharomyces pastorianus
atgagcgggttccataatgtgggaaatatcaatatgatggcccaacagcagttgcaacaaaacagagtaaaagtcagtataaggaactggcagaatgctacaatgaatgatttaattaatttcataagcaggaacgctcgagtagctgtgcttgacgcccatgtggacggaccattggttgtcggttttgtgaattcaaaggctgaagccgaatcgttaatgaaatggaacggtgtccgttttgcaggtagcaatttaaaatttgagcttttggatggcaatggaggttctgctggaacttcagacactatttcgtttctaaggggagtattacttaagaggtatgatccccagtcgaaactattaacctgggggcattgcattctgaccctgaactaa

SEQ ID NO: 5381 - DNA, 1074 bp, Saccharomyces pastorianus
atggaggttgatttaataacacgtttggttaatcgtgggctcaaggaaggaggtaagcaggatccggcgaattcccttcaagataaactgcttctcctcaataagtcattgttgacacaacgcctttctgataaagacatcttggaaggaatgaattctgtatctgtgccagtgaatgttgttattccccgagatataacgtctcaagaagagaaacagaaagttgagctgcaacgtcgaaaattagagaatattgatctccatcctagtagcaaggtacatattgaggaacttctacgctctttaaacatcgatacgaataagcatgaagagatctacagggaggtttcactttacctacagaaaaatgaagacagtaagaattcgatgggcccctcgcaacatgaccatgtagacatcgatctaaattctttgaaaaaatatttgcaaaatattgaaaagaaggcataccagaaaaatgtcattgataaacgaaagaaaaatcaaactcgtatctatgaatggagcgctgattctttctctgaatccgtaccgttgacagcaggaaacattttatttaagaggagacccagccgcccattaaagcacttagcaaatagaataagcacatttttgaactcaaacaaaagaggaaaaaaggtcggtaatggcgagaaaaccatgaaagggagtaggctactgttgcattcattggatgacaataaggacatcactgtgtctgccgaatttgactatggtttcttcaacatcaacttcacagacttattcggcgtcatcaacgcctctggatatccaccagagagagtattagaccagatcaatgacattgagctaaaaggttggaaatgcgtagggaacttgtatgataatactaaaacgatagttttccaaagtagcgatccattattcaaagaggaaggaagggcttctaaaaggccgtctactgctcgcaagacaatcatcatttctatcacaacttcaatagtctcactttatgcatattatagataccgtctttctcaactcaaagaggctaaagttaactcatcttga

SEQ ID NO: 5382 - DNA, 267 bp, Saccharomyces pastorianus
atgagtgtactatatatatctccactactaacaaaaacaaaatgcttagcatctggagtagatgtgcgctggataagatttgtatcgcatgcaaaaggtggtggtacgaaaattgcagaccataatatgtctcgagtatttgattcaaagatcctcaaatcgggacgtatcaaagccttcaaacatgcagtatatcaatctgccgtaggtaaaggcaaagctaacttctccccaatggaggttgatttaataacacgttttggttaa

SEQ ID NO: 5383 - DNA, 1926 bp, Saccharomyces pastorianus
atgtggaatgctgaaaaaagctctacaaaactgaaaactgtaatctcttactggctagcaagagctcggataaatgtacagttgctgagaaagcaagattatattgctcgaaatattgaacaggcaagattaattggtattgatttccattccgtttactacagagggtcgcaattcaaagtagagtcgtttctaattcgaatttgcaagtcagaaagttttattctcctctcaccaggtaagaaggaggttcgtcaacaaaaagcacttgagtgtgtacctttagttatggagccggaatccgcattctataaaagtcctttagtagttttggattttcagtcattatatccatctattatgattggatacaattattgttattcaacaatgataggaagagtaagggagacaaacctaaatggcaatgaattaggagtgacgaaattttcattaccgagaaatattttgacattactaaaagatgatgtaactattgcacctaacggtgttatttatgccaaaacttctgttcgaaaatcaaccttatcaaaaatgttaaccgatattctagatatcagagtaatgatgaagaagacaatgaatgaagttaacggtgacaatagcagtctaagaagacttctagataacaaacaattagcacttaaattattggctaacgttacctatggttatgcatcagcatccttttctggtcgaatgccgtgctctgatttggctgacagcattgtccaaacaggtagagaaactttagagaaagcaatagacattattgagagagacgacacgtggaatgcaaaagtagtttatggtgacacagatagtttgtttgtatatctacctggaaagactgccaacgaggcttttcatattggtaacgctatggcagaaaaagttacccaaaacaatccaaaacccatttttttgaagtttgaaaaagtgtatcatccctctatactggttagcaaaaagagatatgtagggttttcctatgagaaaccttcccaatcccttccctttttggatgctaagggtattgaaactgttagaagagacggtattccaggacaaaaaaaaattgttgaaaaatgtatacgactacttttccaaacaaaagacctatcaaaaataaagagataccttcaaagtgaatttctaaaaattcaaactggtagggtgtctactcaagatttttgctttgccaaagaggttaagttaggagcgtataaaagcgagaagactgctcctccaggagcagttgtcgcgagtagaaagattaatgaagatcatagagcagagcctcaacacaaggagcgtgtaccatacctggttgttaagggcaaacagggacaaattcttagggaaagatgtgtatcgcccgaagagttctttgagaacgaggatttggaattagactcggaatattacataaataaaacgttggtgcctccccttgataggctgttcaatttaattggtataagtgttggcgcttgggcccaggaagtagaaaaatccaagaaaagcaatacatccgggaaaaaaagagaaaaactagaaataataggaacctctttaacgtgctgtaattgcggagaagagctaactcaagtacgtccatcgcagctttgcgatgactgtttagcaaaaaggagtttcacaacatcatcgcttctaatagagaaattgaagagagaaaaagaatacgaaaatttgaaaacagtgtgtagaacatgcacatatcgctacactttggatgcaagcattgagagtgaccatatcgccagtgaatgtaaatcctatgactgcccgatattctattcccgtgtcaaaacagagaattacttgaaagataaccaagctgctaagagagaaaaagcgttggtcttcttgaatgactggtga

SEQ ID NO: 5384 - DNA, 2454 bp, Saccharomyces pastorianus
atgtcgcaagaccagaacgacagagacgagaaccatacggttgatatcttctctaaaccaaattcagaatattttagaattcagctaaataactatgacttctatatggcacaacctacctcactagaccggtcgcatggtgaaagcctgcctctaaatcaattttctcaggttcctactattcgtgtgtttggtaatacatcctcaggccatcaagtattgtgccacgtccatggtgttctgccatatatattcatcaagtatgatggctatatatctgacacaagtacactaagacaccaaagatgtgctcaagtacataaaatgctggaggaaaagatcaaagcatctttcaatagaaaaaaagatgccaaacagaattcaaccaacgataaactcggaaatctcacttatgtcgcaaacgtgtctgtcgtgaaaggcgtaccattctatggctaccatgttggttggacgttattttatagagtttctttgctcaatccatcctgtataaacaggctttctgaattagttagggacggcaaaatgtttgacaagaggcttgaaatatttgaatcgcatatcccttacttgttacaatggaccgctgatttcaatttgtttggttgctcgtggataaacttggacaagtgctattttcgctcacctgttctcaacaatatgctggacatagataaactgacatcaaacgatgagcttcaattacttttggaccagcactgtaactcacctaataacgtacttaatagaaaggactttcctcgcgttggaaatgggttgattgagttagacattttaccacagttcattagaaatagagatgaactacagcatagagatttacatcacgactttaaggaaaaattgggagatacttctgatatactagtcaagccgtatgtatcatcgactaaagcaatgatgaatgaactgatcatgcaacgaaaggcattgtcattaagtaaatacaaagtgacttcagaaatgaatcgtctcgtgaacgaccacgaatggcagtcttctaaggaatttgaagcattttacaaaaaagcgcaacataaactcagcacttttgatggtcaagtacctaattttgagactttcatagacgaacatcagaaattttcagacatcaaaaagccgtttgaagcattacctgagatgtggccaagccttccacagactgtaattaccaactctagtgtagagcacaaaaacgaagagcagcccgataccttacttacagtgtatgagaccatgaatattgagaatggccaagaaggattaacagaaaactgcaataaggtcgaacctggcccacatgctttggaaagcatagagactttagagcatacggctaactctttaggcgatcaaatagcttctctgagcacggtaaagttttcaatggacagtattctaacacaaaatatggcaagaaaaaggaaattgaggatgctcggttctgccgagaggatttctccagagaccagaaaaaagaaaaagactatgaccccagatttgcaccacagagaaaactattttgcttatcgggtgcctccatttggttatcgaaatattctcgatgaattggaggcagaaggattcccgaaaatggaatatcaagagccttttttttcaaatcctgcagacctagaaaataaaccttacgcctatgcggggaaaaggtttgaaataacgtcaacacatttatcagcaagaataccggtccattttgaaggcgaacccatatccatttataataaacccactttcgatatgttttcctcctggaagtacataagaaagccacctagatttgatgaagtagcaaaatggtgcaaagaacacggatctacagcaacgaaaagtattcagtcacagatagatttgcagacacctcataataaatttttatacaaatttgctagtgatgcctccgtcaaagagaaaagaaaaaacaaaacactgtatgattctctgacacatttgacgcttgaaatccacgttaacaccaggggggacaaaaatccagatcctctaatagatgaagtctccatgattatatggtgcctcgaagaagaaacctaccctttagatttggatattgctcacgaaggaatcatgattgctcacaaagaaaatatggatagtaatttccccactcaaattcaacagtgtgttggcaacattccagtcatgttttatgaaaccgagtttgaaatgttcgaagcactgaccgatttggtattattatttgatcctgacattctatcgggttttgaagtacacaatttttcttggggttatataatcgagaggtgtcaaaaaatacatcagttcgacattgttgaagagcttgcccgagttaaatataaattcaaaagcaaacctcgggatgattggggatatgcacattcttcgggattttag

SEQ ID NO: 5385 - DNA, 369 bp, Saccharomyces pastorianus
atgttctaccgaagtgtgaaaccgttatgggacacgatcttcaaatttcaaaatccaggcccatcggaacagctatcaatttcagatttatttcacattaccaaaactgttggaatttatttgagaaatgtaagcgaggcaaatgatgccagccccatcgaaaatatactgtttatgaattacattcaaaagttgattttgatgctagaaactatactttcgttcaaaaataacgaagacaaaggtagcgaaagctgtttcaataacggaaagttcattgcgggtatgatattaaacctagtcaaaggtaccgaatatttgacaccagaagagaccaaactagagacgctagcaaaactgtttttttaa

SEQ ID NO: 5386 - DNA, 1221 bp, Saccharomyces pastorianus
atggattacgaaaaaattttgttcgggttgcaaccgattctaaatgcttctacaattaaagatgttccaatgaacgatgtttacctaggaagttacttaattgtaattgaccaattggccgtttcattgagagaaccgaacaatagaaatgttgttggaaaaactggtttgctagcaaatctggtgcggattctagaacaagctctggatcactgccttcacgatgagaatacctcagataacgataggctagcattcttcaaaatcgtttctgagctgatcagatgtgttgccaatgcgatgattgacaatgatgataatagagacgttgttctatccgtgggaaagaacatactgttttcttattatataggtggaatactgaaattgaatcaaatatcccttgacgacacggacgatagactattaaatgacctgcaaatgagatcagttgcactattaagaaatttttgtactggaggtgaaaggtatatggaaaaaatagctaccttcatcagaggtccaatatttagtatgttaaagacgacacagtatacctatctggcgtcgtctgatcaagttacattgggaacggagctactgagtgagctcttaaagttccactacaaaaatgttcaaattagcgatttgttctttttgagtcagtacattaaaaaaatctcctctaaagtgcaaaacattgaactaccaccaatagaagatgaagcgctcgtagccagtaccgaagttcaacagaacctcgctaatgaggaacgtgatgatgaaaccaatatcaaccttgcattggtattggacctatcaacatgtttggaaactattgtagcaaaggatgaagatataaacttctctggtgaagaagaggttgttttgaacatacaaaagaacatactcgcatcattagactgtttggcaccgaaaactttcaataataaactgattgtaatgagaagacttgtatcgtgtgctggaaacatatctgctaatttgactacttcaaacaaaaaggagcagcctttgtgcatcgaaaccatcaagaactccacaaatagttacactttggctgcatctttgattattctatctaactcaattgcatgcaaagccgacgctgatgctctgatgaaactcgtatcctttggtgagttaattcaagctggcagtatattcaaggacccagtgcaatatcaagggtttttagat

SEQ ID NO: 5387 - DNA, 873 bp, Saccharomyces pastorianus
atgacaccggtaaacaacagaaattcctttatttctgtatcagagagtgttaataatgctgtcactcgcaacagcagtgcgtactctagatcaagattggtaagatcgaaaccctcaacttccttaaatgcaatcgcgagacaaccatcaattgtagtagaaaatagagtaattccattatctatgaatcgattctcaataaaggaagaagacgaatatgtcatagacacaacttctatgagggaattatccccggttaatagtgtttcctcatctgactatgaccaaaaatcattagcaagccattcagatcacgcggatgcaatggaaacaatagaagcaatagacgaagacgaaactggaaatagcaaaagcatacaagaagacaacttgaagagcgaaagtgtctccaatgatgtgagttacgatttgatgaagcattatttgagcacagtcattgcgcaaagaatcatgctccgggtgcagattgcgcgtctacaggattctaaagacgctgtttatatgaataaatctgctgaaacaaactcgactatctatgaagatctcgtcgactccctcttaattgaatatcaggcggatggcaattcctcccaaatacttgatgatgttttaatgagagatgaggatgaagaagaagaagaagaagaagaagaagaggaaaaaggggacgttttagtggaagaaatagaccagttagcaaacttaaggccgatagaaaaagaaagaaatttgagcattactttgagatcaccattcgccatgttaaactctgcctattctaatagcataatatcgttgcctacaggggctgtcaagaggtcattgactcttcctgttggcataaaaatataa

SEQ ID NO: 5388 - DNA, 798 bp, Saccharomyces pastorianus
atgattatcagatcaccaataagaacaaagaccaaatcattcagaggcgaccaaatagattttaaatttccgtccaccgaaagcttaccaagaggaacaatggaagaatatcacctaaacaatcaccaccttttgaacaatactttaggtggagaaaatccagtcacacacgatgaagacgccacctctcaaattttatctgactatacatccgcatccaatacaaatacaaattctggctactcctctaatggatactattcatttgctaatatctccgacaacaccacatcatctccacgaattattgtcaacccaaatgaagccactaacagattgacatcctcagactctaacaaaagcgactattttgcttcccatgatgtacaaaacgatgattctttacattatagtagttcaagtgtggtaagaaaccaattacattcgatggaagttattccagagggaaatgtaaccggctcagtatcgtcagctttccagaccattccaactgcagagaacgtttcctacaacatcgcatcgtcatcggcatcatcgatatcgtcaaagggaacgacacccaacggaacgctgcagccaacgcaggaggctgaaaccataatcaatccgaaattggagaaacatgaagaagttattaaacaaaaaaagccagtcccagaatgtaaaaaaaagctaaacagagttcctaccataaaacaggtcgggtctttaaaatcttcaaattctagatacaattctagtgccagtagcaggtcaactagcgctcgtggcagctaa

SEQ ID NO: 5389 - DNA, 2754 bp, Saccharomyces pastorianus
atggttaatcttaccggatcttcgaaagtggagcaaaacaatatcaagagcattattggatcatcgtataaccgactttacagccagtttacttcagacgagcttacagaggtaggtaattataagattttaaaacagataggagaaggaagttttgggaaagtttatttggcacttcataggccaactcaccgtaaagtttgcctgaagacaagcgataaaaatgatcctaacatcgtcagagaggtattctaccacagacagtttgacttcccttatattacgaagctctatgaagtgatagtaacagagactaaagtgtggatggcgttggagtattgcccaggcaaggaactatatgatcatttactttctttacatagaatatctttacttgaatgtggagaattgtttgcacaaatatctggtgctgtctactacgcacactccatgcattgtgttcacagagatttgaagctggaaaatatcctattggataaaaatggtaacgctaagctaacggattttggttttacaagagaatgcatgacaaagacaacactggaaacagtttgtggtacaacggtttatatggcgcccgaattgattgagcgaaagacatatgacgggtttaagattgatatatggtcattaggggtaatactttatacattaattacgggatctttgccatttgatgatgatgatgaggttaagactaaatggaaaattgttaatgaagaaccaaattacgattctaaattaattcccgacgatgctaaagatttgatatcacgattattggctaaaaacccaaaagaacgcccatcgttaccacaggttttacaccaccaatttttacagccatacggttctgtagttctagatcaaacagagaaaacgctgagcaggcaacgtagtggcggaactcatttcaaaagcaaattagagaggcgattacttaaacgcctcaaacaatcaggtcttgatactctggcaattaaacaatccattctaaaaagaaagtgtgactcgctttctggcctatggctacttttgctagcacaagagaaaaagcaagaaacctgtaaatatccgaagagaagcaagtcggtgttatcagtgaaaaaagtcattgacaatgccactcataacgatgatagcaacatcgatagtgggatgcttaagcctccgcttgaactttctagagctacttcactgagtaaaatgcttaacaaaggttcagatatcgtaacatcgatgactccggttagcagaaaaaagtcgaaagactcgacaaagatcttacgtcctacactttccaaagcttccacacaaagggcttacactcaatctatggtaaactctcctcgaaagtccaataattttctacaaaaagtttccagttttttcaagtcaaaaaaaaatcttaataataatatgaataacaacatttattcaggaactcgtgaaggctcggtcgcaagcaccaaaggtgcttccattccgggatcttttccaaagaaaaaaagtaactctccccagaaatcaaggactgatgtaggcgcagattttataaagataaactccaaggagtcattaaaaaacaacttagttggcaccgctgcgttgcagaaagctaccattctattagataataatgaggtttctgaaaaagcgatggaaagcacgaacacaactacaggattgctattaaacgaaagcattcgaatagaagaaccccgtctcaaacggtttaaatcatccatatctagtgatatttcccaaacgtctactggcaactatgacagcgaatctgtggagaactccaggtctgtttctctggatgggaaggtttctcccccaccaattcggactcgaccattatcagagatatcacagatttctaatgacacttatacttctgaatattctactgatggcaacaattcgtcattcaaaatttccgatacgatcaagcccagctacatccgtaaaggttcggagaatacgtcacaatattcagcttcatccgaaaaaatgacaaatggctacggtagaaaattcgttaggagagatttgagtattatatctacagcatccagtgcatctgaaagaagttcaagaacggattccttttacgatatcacaacagcttctccagctataaacgctgaaaatagaggcagtagaagcaataattcaaaagagtctgttttgcctagatttgggacccaaagaccttggacgggcaaaagggcatatgcgacatctcgtcatggtaaaaccgccaggcgttcatctaaaagaggacaattcaaaatacagtcttccaataccgattccatcattcaggaagtgagctcatcggaagaagaagaccataatgttctcgataagaagcgaacaggtttaccaacacccgttttacagaacaaaggattagcgggaaatggactagatgagcatgatgaagatggtgatgacgagtatgccattcatactgatggggagttttcagtaaaacctcagtattctgatgaacttattgataaacaaaatagtttgtcgaatgtaaaagctgtggcaactaaacgttctttgagtgaaggtagtaattggtccagtaagtacttggattcagatggtaatcgccaacgcatatctccaatggtggaggaaaacggcgaaggttccgttgggtacgtagcggatagtagtgtcgatggtgaagaacctaaactattgttataa

SEQ ID NO: 5390 - DNA, 879 bp, Saccharomyces pastorianus
atgaatgagattagacaattgatttggaacggtgagctcaatgtgctggtttctattgatccctcatttctaatgaaaggaagcccgaaagaaatggcagtactaagaataagagtgccgagagaaacgtacttgatcaattatatgccgctaatttgggataggatccaagattttctatcctttgatccgttgaacgagaaagaaaagtatttctggtttgaacataatgggaggcccatacgatggaattatcctgttggcgttttatttgacggattggttgcaagcaacgctacttttgccaccccttctgaaattcacctagaaaatgcaatcaccttttttagagttcatttggtcatgggggaatcgttaccgtcaaccgtaatccccatcttaagtagcagtaaccaagccgaaaaattctggtttcatcagtggaaacaagtctgttttatactaaatggctcctcgaagggtatcatgtctttgtcggtaaacgaatctcggaagttttggagaagtgtcattacaaggaattttcatgacttcacagaaatttctaataagataagcccatcaagaccgcggcatgttccgattattattcaaaaccacaaagatttgggaaccggggggatctcacaaccaactatccgcatggctggagtcaatcccacactgagggatatcgaagaagaagtctttagcgctaaggaaataatagatgctgaaagttatgtgatcgtagcccaaggaattgaaattccttgggacactgcactgcttgatttgtacctcaaatttagaagttttgatgggtttttatatataactcttgttcctaaaatttcagtgacaaaaatctttccctga

SEQ ID NO: 5391 - DNA, 126 bp, Saccharomyces pastorianus
atgtggggtaaggtcaccagaacccacggtaactctggtgttgttagagctaccttcagaaacaatttgccagccaagactttcggtgcttctgtcagaatcttcttgtacccatctaacatttaa

SEQ ID NO: 5392 - DNA, 462 bp, Saccharomyces pastorianus
atgattgcgcccaaaaatgtgaatatgccaaatataataggttctattaccttttatacgaaattaattttaaaaattatactatatattagtcttttctattctcaaaatgtaataatatttatagtaataaaagagaaaacgatgttaaagaggatacttatacaattaacaaatttaaatgttagatgggtacaagaagattctgacagaagcaccgaaagtcttggctggcaaattgtttctgaaggtagctctaacaacaccagagttaccgtgggttctggtgaccttaccccacataactctaatcttagaacctctaatttccttggaagctctgtaaacgtaggcaatacgcttacccaagtagaattgagcatcttgtggagtagcgacaccttcgatcttgatcaaagagacatttgggttgttgactctcttggatctttggtaggataa

SEQ ID NO: 5393 - DNA, 1995 bp, Saccharomyces pastorianus
atgaaaacgtcatgcggctctccctgctatgcagcaccagagctagtggtaagcacaaaaccgtatgaagctaggaaagcagatatatggtcatgcggtgttatactttatgctatgctagccgggtatttgccgtgggatgatgatccaaagaaccctgagggaagtgatatcggaagactttataattatatctgttctacgccattgaaatttcctgattatattcttcctatacctcgtgacttattgagacgcatcttggtttcggacccgaagagaagaataaatttgaaacagatcgagaagcatggatggttgaaatctcattcttcatttttatccataacgcccgatgaatgggataaactacacaatacgcactctgtgttcagattagagaagccgaaagcaagatatggatccagaccacaatcaagctgttccacttcatccatgggttcaaggagtgataagagagactcactaataatcgattctactttgcttacattcccagccccaccccaagaatcacagaatcatataataaccagacccacttctattccttctgaccaacggatttcacctattagaagatctaatagacacaatagaagcaactccgccgcttccattgctttacaagcagtggtaaatgcggatagagaatacgttttaagccatgaacaatcactaccttcggcgcaaaaaacaaggcagctaactgtaggaaacatatctcccagtctgtcacctccatcagttgtcaattcaggagatgttatggtggaatccacgcagctcaaaagaaatacaacttccggtaataatgtcacattatacttagaaaaagagcttcttggtacagctcaaacaaacaaggttcacctaaataacgcaaattcctcacaaaacgatcagtataacaaacctaaaacccaaaatagtctcaaatataccaagaacttcgaccgcacgtcatcttcatcccatactaaacctagaccaacttcctaccatcctggctcatacacgaagacttcctacaactcgaatagactttctatagaagaggctagcgacaagaccaaaagcaccgcctcatcgcaaacacttaatcaaagagaaacgtctccattcgactccgcaccttatcttgcaccagatacgtgcataacttcatgctcctctattgaaagctctccgaaattaattacaaatggatcattctcattagcaaaaccatcagttgatttacaaattgtttctggtgatttaatcaagtacaaaggagacgcagaaggagcaacgagaacatacgatgaaaaatataaacaaagacgcaaaagcttaagatacagcggaatattcaatgatatatcatgcgatacagtcactgaggaatctgacgatttaaaggtaccggagtcagctgttgcacaagctcaagaacaagagactttagacacgacaaaggcgggcaatgcaaatcaagatgctttaatttcagtaaaaacacaggttaatctttccttagagagatcgctaaatgaccaggttaatattaacttagagagatcactaaatgaaacagaatctgtaaagaaacgtttcagttttttttctttatattcctacaatacttccaagtctagtttatattcatcgatagattctaagagaaaaccttctccaccttcacagaggcgtccaaaaaaagacgatactcatatcaacccgagaacttcatcgacgaccacgtcaaatgtaccaacatctcataaattgaaaagcgatcaatccctacaaacaatcgctcaagatgaacgtattccagaacttaagaaagctgtcagaactgagagggcctccataatggtgtctgaggtcagaaaggcaaatacagataataaagaaaatcaatatccagaacagtcaactgcaaaaagagtactaggatttttcaaaagaagaagcatgagagtttaa

SEQ ID NO: 5394 - DNA, 312 bp, Saccharomyces pastorianus
atgtcgtacactaataaacgccatacatactacgaggggattacgagcgacccgtcgagcacatttcaatatacgcagcgaacggatgaacaaaggcgaaaacatgtaacgtttggtccttacatcctaggatccacgttgggagaaggagaatttggaaaagtaaagcttggttggccaaaaaatttttcaaacaattctacctcagcttttgatttcccaaaacaagtagccgttaagcttatcaaacgtgataccatatcaaacgactacaagaaagaagtaaaaatatacagggaattaatgctctaa

SEQ ID NO: 5395 - DNA, 138 bp, Saccharomyces pastorianus
atggtcactgacaataaaacacctgagatgaacgtgacgaataatgttgaagaaggcgagtttataatcgatttgtatagtttacctgaaggattattgaaaagtttatgggactatgttaagaaaaatactgagtaa

SEQ ID NO: 5396 - DNA, 831 bp, Saccharomyces pastorianus
atgggtctcatcatttggggcagaaagggccgcggaaaatcgccactttatgaattcgactccaatgagttcgaccctcaagtgcttttctccacgggcgcgaagactctagaatttatggacgatcagaaccagccgaacggtgggtctgcatttttgtcatcttctcgccccagccatttcgacaatcaagcatcttctacagatacaacctctaaaaaccccgccatcacacaatctatcgtggatgctgccgttgcggcctcgatgaataatagcggctcaggccccagctccgctcgcagcaacagtaacactggcaacaataatggtagtatcgggttaaggaaaccaaaggcaaaaagaacctggtccaaagaggaagaagaagcgcttgtggaaggtcttaaagaagtcggtccatcatggtccaagattctggatttatacggtcctggtggtaaaattactgaaaatttgaagaacagaacacaagtccaattaaaggataaagcgcgcaattggaaactgcaatacttgaagagtggtaaaccgctccctgactatttgataaaagtcacgggtaatttggaaaaaatctacaaagcaaagaagaaattctcgcaatctccaaactcatctagtatcatggaacaaaatttatctcaacgcccctcatcttcaggtgcttctgctaataacgatgacacccagtctcaccgggatgattctcatggtcaaagcaatgataatatgccgtctaatgggcttttcggaacaagcacatcagacaatactgggtttgatcctcatctagaagatgggatgtaa

SEQ ID NO: 5397 - DNA, 804 bp, Saccharomyces pastorianus
atggactcgcaactgcccaataacaatgaaagcatgaatcgcttcaatgacatcatccagagcctgcccgcgagaactagactaacaatatgctcactttgcctgttggataacatctccacgcagttgttacggtttctgatcctgaatgccaactcccccaacatcatcgcagtcctaaccgatcagaccgccttcctgagctctggcgaaacagaaatatttcaaacgctggtcaagcttttcaagcagattagaatgatctaccacaccaggtcccctttgctttcggtccacgacgtggcgcccggcttgtggttccctaactcaccccctccgctcatactaagaggccacgaggctttcatcatcactgccatcagaaaggccaacctgctgactttcctgttgacatcactgaactgtctcaactacggattcgagctgctgcagtcgattttccttgatattttctgtccgaacacaaacactgtgggtaacagttcgttggaacaaagcgggaagttcctgaaatcgcaggccatcctttacctcgatctgaaaacacaggcctatattgccgggttgaaagagtttcaggacgaggcaaacgaaatatccctggagaaaaagcaagagctactggacttaattttcccatctaacctagccgatattctcgtgcgaagaagaaccggagattctggagacatcacacttttaactccatcggaaaaggacttcgttgaaaggtgtgatcgtcgtagagaaaatctgaagattgttcaggatttcaactcttga

SEQ ID NO: 5398 - DNA, 1701 bp, Saccharomyces pastorianus
atgctctctgaaacaagcattgaaatgagatgccagaattgccacttacctttgcaattagatccgtctttggaaggtcttagtttgacccagcgaaatctactactgtcaaacaataatattgcaactacaacgaatgaaaataccatttccaacaaagaaggagatgctaatgacaattgcgtatttcagataccagaggacagactgaagcggttagaagagattcagaacataaaagatttgggtttagtcgatgacaaattgactacagattcgtttgtctttttaaaccacgatgatgataataacgcttatgataaaaatgacattaacataaaccgtcaaggtgatgattcagacggcgatagtgacaagaatgtcaatagtgatgcctctggccgaaacagctcttttcgagatcatgaagaagaggaacaggagatcaccgatggagatgaaaaccaacaattacaattaaactccaagactttgtccacccaagtcaacgcaatgactaacgtgttcaacatcctttcatcccaaacaaatatagactatcctgtttgtcaggaatgctgcaatctgctaatacatagactgaaaagtgagtatgatgatgcaatcaaggaaagagacacttacgctcaatttttatccaagctagaaactcaaaacaaagaaatatcaaacgccattactcacaagcaatattccaacaatattttggaaaacaaaaatttacaagaggaaaaacaagagctattaaagcaattattgcgtctggaaacgatggataatgatttagatgaagagctaagtcatttgcaagaaaggaaaatccaactacaaaacgaaaaactacaaaaattgagcgatcagaacttaatggatttgaacaacatacagtttaataaaaatctgcaatcgctcaagctacaatacgaattgtctctaaatcatctggacaaattgagaaagatcaacatttttaatgctactttcaaaatctcgcataatggaccttttgccactataaatggactgagactgggcagtataccagaaacagtggtgccttggaaggaaatcaacgctgcattaggccaattaatccttttgttggccactataaataaaaatttaaagataaacttattagactataagttacaaccaatgggttcattttccaagatcaaaaaaagaataagtagcaacgttgaaaacaataataataccacatcagacagtcctggcggttggttaattctacctgtctataacgatgaaaattttaacctggggaaaattttccataaagagacaaagttcgataaatcactagaaacaatattagaaataataatacaaatgacacagcagctttctacaatagcgtcgtccttttcttctcaaacacgtttatcaaatcaagacgcctcttcattaaatattaacggtaacactaataatgatgcttccatcctggaattgccctacatgatgaataaagagaaaattaatgggctatctgttaaactgcgtggtagcaacccgaatcttgaatggacaacggctatgaagtttttactaacaaatataaagtggttgttggcattttcttccaatttattgtccaagtcaatgactttaagccccgcaaacgatgacaatgatatcaacactactggcaattga

SEQ ID NO: 5399 - DNA, 375 bp, Saccharomyces pastorianus
atgtcatggacattctccaacgtaataagcgtttgtttcaagatcatgtcggctaccgtgctaccgatatgtggtagtgccgtgacatcccatctacgtagtaattcctgcttgacgccggtttcctcatttttgaagacgtccagcccacaacttgtcactttaccagattcaagagcgtctaagagggaatcttcatctatgcatgtgccccttccgacgttgactatcctgacaccatctttacacatcgccaaagttttacggttgattatatcatttgtggatggtgttcctggtagggacaaaacaatcaggtcagcatttttccaagtgtctggatcatcgagatcagagtggtacatggcatcgtaa

SEQ ID NO: 5400 - DNA, 1833 bp, Saccharomyces pastorianus
atggcatttttaagatttgcttttagaaactcttggaaatattatagccagtcaacgcgacatttgcataaaataccattgagaaacctgataatacctacgtctactgttttttatttaacacacgatacgatttcaaggcaatgcagcttgatatacaatgactctctgaggccggatcccaaaggtgacactttcgaaatgggtttgtacatatcttccgagaatgaactgcaagagcaaattaaatcttttaggtctactaaaataaccgaatcacgcgataggctaatgcggtgcttaagaatcttgtggttcggtttcaatgataaaattgttgagcctgtgtgcacagtttttagatttttagagatttctgctattttcttacccattctgttgctataccccatatcgtggttcggtcataaactaaaagttaatgatacgagtataactgaaactcggggttctctgatttggtgccaattgcttcgtaaaggattggaattggctggtccaagttttatcaaactcggtcagtgggcaggctctagaactgatattttttcccatgccctctgtcatgaattgggcaagcttcatagcaatgtgtcggcacattccttacgtttcaccctaaaaaaattgtgccaagcattagaagttgataaggttgaagatgccttcgatgaatttaaccataccccgattggggttggatccatcgctcaagtttatgtgggtgaactatctcaaaaatatattgacaaatatgacaatatccaaattggtaaggatggcaaccgttggtgtgcaataaaaattttacatccgaacgtaagatctcaaatacgaagagatttgaaaataatgacattttttgctgacacaattaactggattccaacaatggagtggttatctttaccaaatgaagtagagcaattttcgattttaatgaatatccaattagatttgagaattgaagcgttaaacctacaaagattcaatgaaaatttcaagaactctattcaggtaaagtttcccaaaccatttcttcccttatcaaacagagacgttatgtttgaagaacatgtatatggtctttccatggaaaaatttctatctacaaaaagggagcttgatgatgttgaactttgtaaaaaggtcagcgatccctttgttgacgcatttttacagatgttaatactcgatgattttgttcatgcagatttgcatcccgggaatgtcataatcaggttcgtcaagacaaacaaatacgggacaaacattatatcttctgaacatgattctttccagattacgcacgcgttaaggaaaaagatggataattatcagagtaaagactttgttgatgaactgaagtctattttaacgaattacacgccccagatttgctttatcgatacaggaattattacggaattgaatgaaaagaacagaattaactttatagcgctattcaatgcactggcaagatttgatggttataaagcaggtgagttgatgattgaaagatcaagaactccagaaacggccattgataaagaagtgtttgcttttaaggtagaaaagttagttgataaggtcaaacaaaggaccttcacactaggaactgtatcgattggtgatttgcttgatcaaatgttaagtatggtaagatcccatcacgttagaatggaatccgattttgtttccgtggttgtcgccattttactgttggagggtattggacgacaattagatccgaatttggacttatttgaaaggttcgtattttatgcattgattaatggttttgaagaatga

SEQ ID NO: 5401 - DNA, 489 bp, Saccharomyces pastorianus
atggcctttctggcacaagcaagacaagtagtcatggaaaaccacagtaggaagccccatggcgtgaaggaccaatcggtaaccaagcccatctctttagatggcagaacaggtgaagtaattgttagaaagtctacaggaaaaaccaagatacgcaaaggccagacagaagaagaatacgagcagcagttgcaacactatttccaagttgaaaagggccctgtacggacagatattggctggatggacaaagtggatcctctgacccagatacgaaatggcgagtatgacgtctccaataagcaccagcgacaagtactcagtggattctgccaccgtttctactaccaacgcaagtatgagcaatgtctggacctcagcagctacttgttggggctcttcgaacccttcaacgtgaagaacaaaatgaagcgtgagttagaagagttgaaatatatgatcgagcagtgtcgtaagcaggtgttataa

SEQ ID NO: 5402 - DNA, 2112 bp, Saccharomyces pastorianus
atgcctgcaggtcaacattttctttcaaagatgagtactccatttggtttagatttaggtaacaataactctgtcttggctgttgctagaaacagaggtattgacattgttgttaatgaagtctctaaccgttccaccccttctgttgttggtttcggtccaaagaacagatatttgggtgaaactggtaagaacaagcaaacttccaacatcaagaacaccgttgccaacctaaagagaattcttggtttaaactacggtcacccagatttgaaacaagaatccaagcactttacttccaagttagttgaattggatgacaagaaggttggtgctgaagttagatttgctggtgaaaagcacgttttctctgccactcaactaactgccatgttcatcgataaagtcaaggacaccgccaagcaagaaacaaaagctaacatcactgatgtttgtattgccgttccagcttggtacacagaagaacaacgttataacgtcggtgatgccgctaggattgccggcttgaacccagttagaatcgtcaatgatgttaccgctgctggtgtttcttacggtatcttcaagaacgacttgccagaaggtgaagaaaaaccaagaattgttgcttttgttgacatcggccactcttcctacacatgttccatcatggctttcaagaagggtcaattaaaggtcttaggtactgcttgtgacaaacattttggtggtagagacttcgatttggctatcactgaacattttgctgatgagttcaagtccaagtacaagatcgacatcagagaaaatccaaaggcttacaacagaattttgactgccgctgaaaaattgaagaaggttttgtctgctaacactactgctccattctctgttgaatccgttatgaacgatgttgatgtatcatcccaattaactcgtgaatcattggaagaattagtcaagccattgttggaacgtgttactgaaccagttaccagagctttagctcaagccaacttgactgctgaagatgttgattttgttgaaatcattggtggtaccacccgtatcccaactttgaagcaatccatttctgaagccttcggaaagcctttgtctaccactttgaaccaagatgaagctattgctaagggtgctgctttcatttgtgccattcactctccaactctaagagttagaccattcaagttcgaggacatccatccttactctgtttcttactcttgggacaaacaagttgaagacgaagatcacatggaagtcttcccagccggctcaactttcccatctactaagttgattactttaaaccgtactggtgacttctcaatggctgccaactacaccgacatcacacaattaccaactgacactccagaacacattgctaactgggaaatcactggtgtccaactaccagaaggccaagactccgttccagtcaagttaaagttgagatgtgacccatctggcttacacactattgaagaagcctactcaatcgaagatattgaggttgaagaggctgttccattagcagaagatgctccagaagatgccgaaccagaatttaagaaggttattaagaccgtgaagaaggacgatttgtctattatcgaacacacttttggtttggaagctaaaaatttgaatgaattaattgaaaaggaaaacgaaatgatcgcccaagataaattagtcgctgaaactgaagaccgtaagaacactcttgaagaatacatttacaccttgcgtggtaagttggatgaagaatactctacctttgcctctgatgctgaaaagaccaaattgaaggatatgttaaacaaggctgaagaatggttatacgacgatggtttcgattccatcaaggccaaatacattgctaaatacgaagaattagcttctctaggtaacgttatcagaggtagatacttggctaaggaagaagaaaagaagcaagctttaagatccaaacaagaatcctctcaaatggctgctttggctgaaaaattggctgctcaaagaaaggctgaagctgacaagaaggatgacaagaaggataccgaaggtgatgtcgacatggattaa

SEQ ID NO: 5403 - DNA, 1353 bp, Saccharomyces pastorianus
atgtcttctgaagaacaaaaaaggtttgcaaaagcagaattgatggctcaaaaattgctggaagaacaacaaagacaagaagaagaaaaaaagagaagagaagaacagcgcaatctaaagaaagagaaaaaactaaagcaaaagcaaaagaaggaagaagataaattgaaaaaaaagaagaaggaagacgggaagttagaaaaagagaaacaaaagaaattgttaaatagtatcttgagtgaagatacagagtcctcctcgcccactgaaagccctgtcgcctcttccggtaccaatttagcaccctgggctaacaagcaagcagacgatactgtctctaatcaaatatcttctgctttagaagatctgaagaagaaaaacacattaaagaaagagaagaagcctagtcgtactcaattagaccgcgaagaagcattgaaattacaaaaggaaatactaggttcaacgcaggctcaaacaacagctcataccgcttctgcctggggtataaagccacaacagcaaccaatcaagcttgacatcaaagaagaattattgaaaggctctaaaagtgcaaagggtctgccaacagttaacaagaagaaaatgagtaaggatgatgatttccaatcaaactctactttcattgaagaacagaaaaagctgtgggaacaagttcaaaagaaatccaagaaatccaaccgcattacctcgctcgatgatttcatttcaaggacgccttccccattatcttccgcggccaattcgtcaaatcctagtaatgcgtggaccacggtttcttctaagagtactaccacttcgacaacttcagcggcccccgtgtccgtaaatcaaccaaggtcatacattagtcctgataaactacgttctgtaggaggagcagccagtacaataaaaactaaggcaaacgggaagggtaagcaaatcggctcatctactagtatccctaacctgaaagcccgtcaagttaaagtatcacgagctcctgcctatcccggtaatgcttcggtttctaagcgtcaagaatttttgaagtggtgtcggtctcaattgaagttaaactcaggcgttcaacccgacaacgttttagaaatgttgctgagcttgccaccaggtcctgagtctaaagaaatcattgctgacaccatatattcttatagttcaaccatggatggtagaagatttgctactgattttaccaaaaagcgcttagaatgcgaagaacaaatcagcgatccattaagctggagcgaagtattaactatgcccgaaggtagttctgaagattgggaattccaagtcgtttgtaagaagaaaggaagacgcttctaa

SEQ ID NO: 5404 - DNA, 813 bp, Saccharomyces pastorianus
atgaatcctctgaactctctagtatttgatctccagagtatcaagcttgcagacgcaaactcagatacaactacactatcaaatagcaacactccaatgatgaacaatacagctcctctacaaaggacctcctctcttttggattccattggcatccaaagagggtcgtctccatttgtaccagcaagcgttaatgctgttaatggtgccggtgctgttccaatgaatgcatatggtgctgaaattgctggatctggcccacagatacctgttaatcaagacaacagcggtgcgttcaacgtggcgtctaatttgcatgtgagcactagcagtgcttctcttaacaacaatcagccgaacgcgttgccgaatatgggttcttatcttttcaattcagcaggacttgcctctaacgctggcaaccaacttccaccgcctggtatagaatcgcagtggaaatacgttgactcgaacggtaacatccaaggcccctttagtagcaacaatatgtcacaatggtatcaagcagggtatttcaccccgaccttgcagatttgtagattagcaacatctatcgagccatttggtgtgagtgatcagttcatcacactgggtaaattaactaccttagttaacaactatcaggacccatttaccacttttgattttattgcaattacggcattaagtggtgttccatctgtcacaccaattgcgccagaaaaccaaaaggttgaaacaaaaaagttaaagcctactgctgatgtgcatagtgatgactttacttacgaagaaatattaaatctcaagttt

SEQ ID NO: 5405 - DNA, 1500 bp, Saccharomyces pastorianus
atggaaataggcagtgattatataaaagagtctgcaactctgcttgcctgcttaggttgcatcattttggactatttactcgaagactgcaagctatcaaagaagttcgtggcctgctattatattaaaatgtttcgctcgggctattatcctactgtcactccaagcaactggggctataacggcactgttaaacacgtgctgggggagaagggcactaaggcgctagccttcaaaggcgccaagcgtcaggtacctcttgatgagtttgtggccaactacgttcccacgctaaaggatggtgcgaatttcagattgaacagtctgcttttcagcggctacttacaatcattatacttattgagcggagatctttccaagaaattcctggtgttttatggtagagaaattttggagtttccagacggcggtatttgcactgcagattgggtcatgcctgaatggaaagaacaatattctttggatgccaaacgggcaacctttaacgacaagttgtttacaaaagacgagcaagccactcatccaaaagactggcctcgtctgcatccaaggacgagatacctaacctcagaagagcttgaaaaatgtcattccaagggggacgaatgtcctttagtggtgatacttcatggtcttgccggtgggagtcatgagccttttattaaagccctatccgaggatattacaaaagtcggcgacggtaaattccaagtggtggtgcttaattccagaggctgtgcaagatcgaaggtcacaacccgtagtctcttcaccgccttgcatacagatgacgttagggtttttctgaaccgccagagagccagatttcctcataggaaattatacgctgtagggacttcctttggagctgctatgttaacgaactacttgggccaagaaggcgacaactgtccattgaacgccgctgccgctctatcgaatccgtgggatttcgtacacacttgggataagttggcccatgattggtggtccaaccatatattttctaggacactgacccagtttttaacaagaacggtcaaagtaaatatgaaagaattacaactgtctgaaaaagttgaagcgtcacacaaacccacggttgagaaaccggtcttctttacatatacccaggaaaacgtggaaaaggctgaaaaattcacagacatgctagaattcgatagtcttttcactgctccttcaatgggcctgccagacgggttaacgtattatagaaaggcaagctcggtaaatagattgcccaatattaaaattccaaccttaatcgtcaatgcaacagatgacccggttacaggcgcaaacgtcatcccatacaaacaggctaaagagaacccttgcgttttattatgtgagaccgacttgggtggtcatctggcttatctcgataacgaaaacaattcttggctaagcatacaaactgcagagtttttgaataaatttgacgagttagtgttatga

SEQ ID NO: 5406 - DNA, 825 bp, Saccharomyces pastorianus
atgtcagccgtagatcaaggtagcaatgccggagtcagtgtcaatgccgggtcggccgttgccattgcaaatcttttacgcaaccataaggagctgaaacaaaggcagggcctgttccaggccaagcagacagacttcttccgttacaagagattcgtcagagcactgcactcggaggagtatgccaacaagtctgcgagtcagccagaggtgtatccgcctgtaccttctagcaagatcgaagaccaacttaaatcacgggaaatcttcattcaacttataaaggcacagctggtgatcccagtgaaaaaactgcacagccaagaatgcaagcaacatgggttgaagccaagtaaggacttcccgaacttgattgtgtcgaacaaggcacagttggatgccgacgagtacttcgtttggaactacaaccccaagacctacatggactacgtgatcgtcattggtgtcgtgtccatcatactggcccttgtgtgctacccgttgtggccgcagtccatgagacgtggttcatactacgtgtctctgggtgcctttggtctcttggcagccttctttatcgtcgctattgcaagattgattctatacgttttatcactggctgtctacaaagacgtgggcgggttctggatcttccccaacctgttcgaagattgcggtgtgctggagagtttcaagccattctacggattcggtgaaaagactacctacagctatataaaaaaaatgaaaagaatgaagaaaaagcaagccaagagagaaactcataaaaagaaagctatcgacgaaaaaactgtccaaaactag

SEQ ID NO: 5407 - DNA, 525 bp, Saccharomyces pastorianus
atgaagcaaggtgttttgttgccaactagaatcaagttgttgttgaccaagaacgtttcctgttacagaccaagacgtgatggtgaaagaaagagaaagtccgtcagaggtgccattgttggtccagatttggctgtcttggctttggtcattgtcaagaagggtgaacaagaattggaaggtctaactgacactactgttccaaagagattgggtccaaagagagctaacaacatcagaaagttcttcggtttgtccaaggaagatgacgttcgtgatttcgtcatcagaagagaagtcaccaagggtgaaaagacttacaccaaggctccaaagatccaaagattggttactcctcaaagattgcaaagaaagagacaccaaagagctttgaaggtcagaaacgctcaagctcaaagagaagctgctgccgaatacgctcaattgttggctaagagattgtctgaaagaaaggctgaaaaggctcaaatcagaaagagaagagcttcttctttgaaggcttaa

SEQ ID NO: 5408 - DNA, 1455 bp, Saccharomyces pastorianus
atgcaactgagtgaaaagaaaaatggccagcagggcacaattgatccagaattagacgatgaagaagaggaagaagaagaaatatatcaagactggtcacaagtcgcatcgctggtgaataaaaatgctgcactttcactcccaaggaggggcgaaaaggactacgaaccagatggtactgacctacaagaagtgcttttatatagggcaagaaaggcaatgtttgataccatatctgactcgataagaggcaccactgtaaaatctcaagttaaagggtattacgtaccacacaggcaccaagcagttctgcccaaacccaaaggtagtttcatgcaaacaatgggaagggctgataattcaggcgaattgtggcttgagtttcacgaatttgtttatttggcagagaggggtaccatccttccttactataagttgcagagtggctctaaacatgaaagttctgattacgacgtcgaaataatgcttagtatggaagacttatattcgctattttcaacacagcacgagatggacgaatatttcgtttttgctcatctaaaaagactcggttttataccaaaacagtgccgtcaagatatgggcgtcacaacttcctattatccatcatcgacacgacaaaacaatttacatataataagttcgagattcttttcactgtttaaaatacagcaaatatcgctcttcagcgggttcttttatcgtaaatggaatttttttttcctgaagtatagaacatcgccacaactatatcaaggactaaatagacttatccgttccgtgactgtgccaaaaactagagatgagttgtggtactcaagattcagaagacaacaagaaagagggaaaatagaggtcccactgactttcaatgtatggaaaccgtgtgctaattttaagaagaaaaatcctggcctgcccgatttccaaataatcgtttacaataagaatgataaatctcagcatttccctacttgtaaagagctacgatctatatttgcttctcttgactataagttcgaatttttgaatgaagtcaaggacgatctcgattgggatgccaactcttatgtcgaagggatatcacgaagccaatataacaccaagacggcgtcaaaatctcgaaatgagaagaataccttgccttcaaaatctttaacaaaatttgattctcagaaagagacagttaagcccaattccaaaaagaaatcgaagacatacccaccccatatacagcaaaaacgtaggcttaaggcggggtaccggagtttcattcttgcgattatggataacggtttgatcagttttgtcaaaatgtccgaagctgattttggatctgaaaatgtatggtatacacctagctctcaaagtaaaccagaacgaaaagtaaatggtggaaaggcgatcaaaaaagcaactttgaacaaaacgtag

SEQ ID NO: 5409 - DNA, 897 bp, Saccharomyces pastorianus
atgagaaaattgtgtaatcatccagctttggttctttcaccaaatcacccgcaactatctcaggttcaagactatttaaagcaaactggtttagatttacacgatattattaatgctcctaagctaagtgcattaagaacgttactttttgagtgtggtataggcgaagaagatatggacaaaacgtcatgtcaagatcaaagtttccccatacagaatgtcatttcacaacatagggctttaattttctgtcagctgaaagatatgctagatatggttgaaaatgatctattcaaaaagtatatgccttctgtaacgtacatgaggctagatggtagtgtcgacccaagagacagacaaaaagttgtccgaaaatttaacgaggatccatctattgattgtctactgttaactaccaaagtaggtgggctaggcctaaatttgactggtgcagacacagttatttttatagagcacgattggaatcccatgaacgatctgcaagcaatggatagagcccatagaattggccaaaaaaaggtggtgaatgtttacagaattatcaccaaaggtacacttgaagagaaaattatgggtttacaaaaattcaaaatgaatattgcttctactgtcgttaaccagcaaaacagtggattagcatccatggacactcatcaattgcttgatctttttgatcctgatagtgttgcttctcaggacaatgaagaaaagaataataatgattcacaaccagccaagggaatggaagatatcgctaacgaaacaggcttaactggtaaagccaaagaggcacttggtgaattaaaggagttatgggatccatctcaatatgaagaagagtataatttagacaccttcataaagactttacgataa

SEQ ID NO: 5410 - DNA, 147 bp, Saccharomyces pastorianus
atggtcagattggactctgaaaagcatgttgactttgcgccaacctctccattcggtggtgctagaccaggtagagttgctagaagaaatgccgctagaaaggctgaatcttctggtgaagctgctgaagaagctgacgaagaataa

SEQ ID NO: 5411 - DNA, 444 bp, Saccharomyces pastorianus
atgtttcaacgtgacttcagaaagcacggtgccgttcatttgtccacctacttgaagatctacaaggttggtgacattgtcgacatcaaagccaatggttctatccaaaagggtatgccacacaagttctaccaaggtaagaccggtgttgtttataacgtcaccaagtcttccgttggtgttatcatcaacaagatggttggtaacagatacttggaaaagagattgaacttgagagttgaacatatcaagcactccaaatgtagacaagaatttttggaaagagttaaggctaacgctgctaagcgtgtcgaagccaaggctcaaggtgttgctgtccaattgaagagacaaccagctcaaccaagagaattccgtattgtttctactgaaggtaacgttcctcaaactttggctccagttccatacgaaaccttcatttaa

SEQ ID NO: 5412 - DNA, 2559 bp, Saccharomyces pastorianus
atgaattttctggcccaagctatgtcaggaacatttcaagggtcgaataacaagataaaacgtaatgtaaggacacaaagtgtgccatcagcttcctataatactgacaaagaaccatatggaccaaatactaaccaattaaacgtcctactttctcaattggaacagcaaacaagtgttgatagtaccagcacgagctcaaacttctattccattgcacaatatattctacagtcatatttcaaagtcaatgtagactctctaaacactttgaaattggtggatttgatagtggaccaaacttaccctgattctttgacgctaaggaagctaaatgagggagtgtcagcacaaccgtacgattattttaatacggtttctcgtgatcctgatatctctaaatgtccaatatttgcattggccatatatttcgttatacgatggagtcatcctaatcccccaatctcaattgagaattttactacagtgcccttactagatgcaaacttcgtttctttaaattctaacccattactttatattcaaaaccaaaacccaaacagcaattcaagcgttaaagttctgaggtcacaaacgtttgaaccatccaaagaattgcttgatttagtatttccgtggctgtcgtatttgaagcaggatatgcttcttatagatagaacaaattataagctatattctctctgtgaattattcgaattcatgggtagagtagcaattcaggatctccgatatttaagtcagcatcctctattgttacccaacattgtaacatttatttccaaatttatacctgaacttttccaaaacggggaatttaagggaattagttccatcagaaacctaaacaatgatgctacagattccctaaacaacgctacaggaatagagaatcaatttctaaacccttccgcagaggaaatgaatcaaaaagttgactcgtattttatagaattgtcgaagaaattaactacagagaacattagattaagtcaagagattacacagcttaagtcggatatgaattctgtaggtaatgtatgtaatcaaattttgcaattacaaagacaactcctttcaggtaatcaagcatccgtatcgaagtctgaaaactatgcatcttccacaggtggggggatattgatattggataagaatagcatcaattcgaatatactgagcaatttagttcaatcgatcgattcgagtcactcaaaaccaaactcacaaactcaaactcaaactcaaactcagcaaagggactcgaaagggcaatcgcagggccacagccaaagtatcagtagtcctgccctagcacccattaatatgtttccgagcctgagtaactctatacagccaattttcaacaccttggcaccgcagccgcaagatatagttcagaagaggagactaccgttaccaggttcaatagcgtctgcagcaacgggcagtcccttttctccatcacctatcaatgaatcgccctacagtaaacgatttaagctggacgataaaccaacgccatctcaaacagctcttgattcgttacttttaaaatcaatctcgagtccaaggttgcctctttcaacattggctaacacagctgtagctgcgaattccgcggaatccctccgttcacctcaacaatatcagccttccccagattttgtagtcggtggtagttcaagttcaacaacagacaataactctaagaagattactgaagattctccttcaaaacttgccgagcgaccacgtcttccaaacaatgattccactaccagcatgccggagagtcccatagaaacaactggggacgatgttgctaaagaactgacatctatgtcaaagacttcagcgccaaatgagaatagccccgagccgaaagattttgacaaagatagcaatggcggtactccatgtagtacagatgttggaaaactagtgcccatttccactattaatggttccactgaagccacaaattcaacctgtacgatgacaaaggtatccccatcgttctcgcaaaatgcacccaaatctgaaatgatgaataaaaaaggatccaaagcaggaccaaatgaggccatcaaatataaattgtctagggaaaataagacaatatgggacttatatgcagaatggtatattggtttgaatgggaaatcttcgataaagaaattaatagagaactatggttggcgaagatggaaagttagcgaagattcccattttttccctacaagaagaatcattatggattacattgaaacggaatgtgaccgtggcataaagctcggtagattcacgaatcctcaacaaccgagggaagacataaggaaaatcttggtcggagatttagagaagttcaggataaacaatggcctgactttgaactctttatcattatattttagaaacttgaccaaaaataacaaggagatttgtatttttgagaattttaaaaattggaacgttagatcaatgacagaagatgagaagctcaagtactgcaaaagacaacataacacaccttcatag

SEQ ID NO: 5413 - DNA, 2343 bp, Saccharomyces pastorianus
atgacacaacctataagcaaaacaggaaaggcattacatataaaggaactccgaaagacaagcaatacttccttagagattatggcacatgagaagttcgttatacctgagaacttcacgttggcacagtctttgcaattgctttattccgtcgtcaggagtcaatacaaaaatttagcaacccaaattgacaatggtgaaggtaataaagaaccagtcatctatggaaaaattcacaaaaatctagatgctctactggtatacgtcaatgagggcctacggaaaattgaaaggacatatgttctaaagaaaggactaggaaaccttgtggttgatcatcctgaattgaagagcgttattgaagatttccaaatacttggccaagacatcaggatttcacgtcgtcaaacagaaaaactcatgaccgaggggaacagtagttcttctctctcatcatcctcgtctgttttgggtcttaagacaggaaacagtctacgttttccaaaactttggaaaacgggttccaagaaggataagctaaaagaagttgacgaaaaggaggcaagaatcaataaacaggcagataatatcagacgtgcaagaaagttggaagaagaagaaaaattagaagcgaatcgtcagtatgagaaggaattagaactccaaagggaaaaattgattgagttaaaagttaaggaaaaagtcgaatatgaagtggcacaaaaactagaggaggagagagtcaaaagagatgaacaacgcaagcatagggagcaagcggaaaagaaacgtatatcaaccttaaaacatgataggaaaacaaattacaaatcaagagctagccttgataatccctctttaaagtcgaaatatgtcggaaagattgataacgccgtaagcaaaagaaggtcgcttgatgtttcacgaatagccaacgaaaaaacgtgcactccagtacgaaaatcaatggaagcaacagatataggaatggctgcacaattagcctggtctcagtatcaaagtggggcaaatcaaacaaaaatgagtaataatggcttacctactaatgaaccctcaatacggtataaatcaactcaacctttaaaaaaaagatatgattacaaaaagccaatggtcaatcgaccgatcataaaatcacccactttcaataggcaaaacagtaaaccttcaaggagttcgtctacaaatgcgcacttaaaatcgaataaagccaacggcaataaagctaccggaaagaatgaaccaaattcggtgcctacttcaccaatacttgtttcggagactgcaacatttaccgaaccgaggccaagacgttccaaaagtgctacacctgatagggaaagctctggaagtttatccatggatcccaaaaaagaagacatattaaagtccgttcaaggagtagatcgaagcgcctgcgaacagatccttaatgaaatcttggtaacagatgaaaaagtatattgggatgatattgcggggttaagaaacgctaagaactctttgaaagaggccgtggtttatccatttttacgaccagatttattcaaaggtctcagagaacctatcagaggtatgcttttgtttggcccacctggaacaggtaagacaatgatcgctaaggcggttgcaacagaatccaactctacattcttcagtgtaagtgcatcttctttactatcgaaatatctcggtgaatctgaaaaactgattagagcattattttacatggccaaaaaactgtcaccttctattatcttcatagatgagatcgattcgatgttgactgctcgttctgataatgaaaatgagtcgtcgaggagaatcaaaacagagcttctcattcaatggtcttcgttatcaaatgcgactgctcaggctgaagatcaaacgaatatgcttgatagcagagtacttgttttgggagccaccaatttaccttgggctattgatgatgcagcaagaagacggttttcgagaagattatatattccccttccagattacgaaactagactatatcatttgaagagattaatggctaagcaaaagaataacttggaggatctggattatgaattaataacaaaattaacggatgggttttccggttctgaccttacatcgttagcaaaagaagcagcaatggaacctattagggatttaggagataagctgatgtttgcagatttcgataagattagaggaattgaaatcaaagactttcaaaattcgttagtgacaataaagaaaagtgtatcgccggaatccctacaagaatatgaggattggtccaataaatttggtagtaccggtgcttga

SEQ ID NO: 5414 - DNA, 285 bp, Saccharomyces pastorianus
atggattcgaatgtttttaccactatttttggagatattgttttcttatgctctctcatagacaccagatccgaaactaaactcagaaggctttcatgcaagagggtagatgatgaaagctggcctccacatctattgacgtctataatctcacccattgcaaggctttctccctctgcatctctggataaatcggatttcaaatctggtttatttaattctcgaaggatcaagttgatcgccttcagatatttcacaaatctgggtatgccggccaaactctga

SEQ ID NO: 5415 - DNA, 1554 bp, Saccharomyces pastorianus
atgtacagtagttatcacaattataataagtttggactaaatgaccttataagctctccggcttctctagcaaaaaaagtttcatgtgggttgataattggtctctctctatacataatcgcccccaatttacatgcgcttgtctttggaaattctcagcaaagaatcggaaaatatacgacggtcggtttgataaataatggaaatgattgttttataacttcatcgcttcagagtttggccggcatacccagatttgtgaaatatctgaaggcgatcaacttgatccttcgagaattaaataaaccagatttgaaatccgatttatccagagatgcagagggagaaagccttgcaatgggtgagattatagacgtcaatagatgtggaggccagctttcatcatctaccctcttgcatgaaagccttctgagtttagtttcggatctggtgtctatgagagagcataagaaaacaatatctccaaaaatagtggtaaaaacattcgaatccatcttcaagtcaaaaatttcatctcaacaaaatgatgcgcatgaatttacgctacttttgttacaaactttacaagaagaacactcgaagttagttgaatatactaaatatatgtctgattcgaatgtaccaaaatttccgtttcagggccaaacttccaaatttttgacttgcttacaatgcaacaggacatcaaaaccatcatatcaagagtcattcattcgtgaactgatggtaccacaacaatcatcagagaaactagcgaagattctggcgaacgatgaaacggaaatcatagaagactactcatgcttgatttgtcaaatcagggccatcctaaaccatgaaaagtatagaaacttcaaaaattgttcacaggaagaactgacaatattagatgccttaagaaattatgcgaatgatgcttcaattaacgaagacctaccaatagaagttgaacagtacatcaaacattacgcaaaagataaattgcgtacatctaatgtgaagagtaaagtcataaaaaaagatgtagtagttcaactgcctgaaatcttggtaattcacttatcaagatctacatttaatggaatgacatataccaggaacccctgtaatgtgaaatttgaagaaacgataaaacttgcagaatacgcatccatcgagaatggaacattagcaaaatacggacaaatcgagtatgatttgaaaagtgttgtgaagcacactggctctcattcacgcggccactacgtttgctacagaagtaagggtgatattctctttgacagtgaagttgattcttacgtagaaagcgcatcaattatcattgataatgatgttgaagccaagaaccacattcaaaccattacatctatgaagaactgcaacggaaaacgaaggtacaaaaaagttaaaagtgctctaaagtatccttattggcaaatatctgatgctaacataaaggaaagtaaaacctcaacagttctaaacgaacagaagtatgcttatatgctatattacgaacgtgtaaataaataa

SEQ ID NO: 5416 - DNA, 1254 bp, Saccharomyces pastorianus
atgaaagcgttctcccgagtactatcaacgtcgaaagttttccaatatagaccacacaacaacatcagtcttcgagcggtacggcatttccgctcaccggtcccttcttatgacttttctagacaaacccccaagacggacccagacaatacagcagcaatgctgctacagaaaaacctgatccaaagaaataatatgctttacggatatgggtcaggcacaatacgatgcactttgctcgactctgttgggcgagccaagtccccatcagtagaaataaaacgcgaagatctggtttcgaaacatggactattacctagagatctacgtaaaattgaaaaatcgaggaaaaacgatttggtccctagtttactcgtgcgagagaattctatattgattagtttgcttaccgtgaaagccctaatcaagcctgacatggttatcattttcgattccaccggtagcgggataaccttaaactcagaggctcacaagaactttataaacgatatgaaattgaggctgaaaaatcaagaaacaaccgaactaaatagcgacccgctgccttatgaatttagagcattagaaaccatattcatttctgcattatccaacctcacaagcgaaatgaaggtactcctaaccatatgtaaaggcgtcctccaagacctggagttcagcataacgagagataagctgaggttcttgttaggtcagaataagaaactgagtagcttcaataaaaaggccgtcctagttagggatatgctagacgatttaatagaacaggacgatttgctttgcgatatgtacttaaccgatagaaaagaaggcagaataagggtccaggatgatcatactgaaatcgaaatgcttttggaaacgtaccataattatgtcgatgaaatagttcaaaaaagtgaaagtgccatatcagacgtgaaaaccacagaagaaatcataaacatcattctagattctaacagaaaccaactgatgctgctaggaatacggtatgctataggaatgctctcgttgggaggtgctctatttttaggttctatttatggtatgaacttggagagttttatagaagagagcaattacggctacatggctgtctttattttcgggctaatatctactgtttggctttacggaaaaggaatcagacacctacataaactacaacgcatgacattactaagcaaagtcaaaacagaatctattcatgaaccgccgctgaaaaaatag

SEQ ID NO: 5417 - DNA, 978 bp, Saccharomyces pastorianus
atgacttacaagacagaagaatatcccggagcatctggaaggaaggtagacaagaaatgtctcgacttgcacccggactacaagtacatcctatggacagatgagatggcgcacgaatttatcaaggaagagtacccttggttcctggacacttttgagaactacaagtaccccatcgaacgtgccgatgccatccgttacttcatcctgtcccactacggtggtatctacatcgacttggacgacggttgcgaaaggaaactagacccattactggctttccccgcgttcttaagaaagacctcccccatgggtgtctcgaacgacgtcatgggttccgtacccagacatcctttcttcttaaaggctctgaaatccctgaaacactacgataaatactggttcattccttacataaccattatgggctccaccggtcctttgtttttgagtgttatatggaaacaatacaagagatggggtattcctaagaatggaaccataagaatcctgcaacctgcttactacaagatgcatacctactccttcttctccatttccaaaggttcctcgtggcacttggatgacgccaagttaatgaaagcattggagaaccacattctgtcgtgtgtcgtcaccgggtttgtctttggctttttcatcctatatggggaatttgtattttattgctggttatgttcaagaaactccagcaatgttaccaagaattggaagttcggctctttcaaagccagggtcgctgcaaccctaaactcactaggacaaagacttaaatcgaccaggggcagtagcgacactacaaataacaccgcctcgctatcgaggcagcagaaaagactaagaaaggactcgaatacaaacatgatgatactaaactcctcgagaaacaacaacgatgtctacgatctagagaaaaatgacccttcaaaacacctgctaggaaatgacgccacataa

SEQ ID NO: 5418 - DNA, 903 bp, Saccharomyces pastorianus
atggatgcttttgataacatgtctgtattaaatcgtccgagcgccaacgcaagaagaagctcccaatcttcaaacgaaatgtttgcacctcagattcaagatcttcaaaacataccaagatctttcaatagtaacagtaccaacttaaacttgccaaaaaattacaatgctgctaatcaactccccttttcgtctcatcaacagaagatcattatggagcacctcctaataacgaaaaacaattctcaacagcagaaggactactctcacgtgccatgcaaatttttcaagatgggcaattgtcaagctggctcatcgtgtcccttttcccactctccagacatcatcaactctgcgaacaatttaccttgtaaatactttgcgaagggcaactgtaaattcggtaacaagtgcgttaatgctcatattcttccaaacgggttgagaatgaacagcaaagggcctatcgaaattgcgccttcttcgcacaataattacttctctcactccagatccgcttcgttctccacttacatatcacctccaatgtctgctaatacagacatcgcatattctgcgtccagtacaaactatttcgctccacaatacccgctctccccaccccaaaagagccctgaggccttacattcggattttttttctcctccctcttcttcttcgtcatacgtcaactacaattacagtaacactaccaccaacactagttcctactcccctgtgtcgtccaatatctggcaagaacaaggccagaccgcattgtcaaactctaatgggagtcagaataccaggtactgcacaagccctgcaatccaagaagaatcagacaatgaaattgaagagatgttaattcacgacttcaatgcacggtgccgccaagaatga

SEQ ID NO: 5419 - DNA, 696 bp, Saccharomyces pastorianus
atgggtttaaggattggcgcgcgtgacgttcctttagatctttctgcagaggttgacattatcgatttttattgggatgtcatcttatgcatggagtctcaattcatattgagcagtgacctcacaacgaaggatgaatcaaacaagcaaaaaacttttgctaaactgttaaaagacaagttagtaggcgaaatgaaaactacgctgaaaagactgatttataccgaaaacaacaagcaacatgcaaacggcaatgataacgacggttacaactggagaaatttaggctcacaatattttattttataccttcctttatttacacaggagttgatttggtgtaagctcaatgaaaattatttccatgttatactgccatctttattgaaaaataagagtattcatgataacgatagcaattatatcaacaaagattggctgcttgctcttttggagctgacgtctaatttagatcagaacttcaggttcgaatacatgaagttgagattatatatattaagggacgatttaatcaataatgggttggatcttctcaaaaacttgaattgggttggtgggaaactgatcaagaatgaagatagagaaattttgttgaattcgagtggtgcggccacggactctatctcacatctattaggtgatgaaaattttgtaattttagaatttgagtgttaa

SEQ ID NO: 5420 - DNA, 324 bp, Saccharomyces pastorianus
atgagcaggggcagaggttcgtcttcaccacgcacacgcgaagctgaacccgatgaagacgacgaagagggcactgacttggccattgaggacggagccgtccccacgcccaccttcacgacgttccagcgcagtctgcagcagcagcaatcacccacccttctccagggcgaaatccgactctcgtcccatatctttgcctttgagtttcccgtgagctcgagcaatgttgataagagaatgtttatgagcatatgtaacaaggtatggaacgaatcaaaagaactggctaaaaagccatcgcatcacagaaaaagcaaatga

SEQ ID NO: 5421 - DNA, 2991 bp, Saccharomyces pastorianus
atgtctcagcccatctttagcattatcaagaaaagataccttgctaagcatgcgtatcaaaagacattgaacttgcccaagacaaaatttccaaatagatcaaatttagatactacattgagggaattaataccgaagtcctctcaagaagtttataaggagcaactagacagtttcttcaaggaattttcaaaattgagtacagtggatgataaattgaagtttgtcaaggagaggttattcatcttgcacgatgggccgccctatgcgaatggcgatttacatctcgggcatgctctgaataaagtgttgaaggatattattaataggtaccaactttcacaagggaaatacattttttacaagcctggttgggattgtcatggattgcccattgaaactaaggctttaaaggatttaaatgcgcagcagatcgatttaatatcacctctaaaagtcagatcactggcgttaaagcatgcacaaaaggcaatgaagaaacaaaggcaaaccttcgaacattttgccatcttaacagattgggaaactccatacattacaatagataaagattatgagaataatcaactcaagacctttaaggaaatgtttgaaagaggattgattaaaagacagaataaaccagtttattggggtacagaaactagaactgctctggcagaaggcgaattagagtacaacgaaaaccataagtctgttgccgcttatgtcaaatttcccctagtaaaagaatctgaagcagatttacgcaagaagctaggaatcactggtggtttgcctatatattgtttgatttggacgagtactccgtggacgcttttctcaaaccgagcaatatgtttcaatgaagacttttcttattctctattgcgcatcggaaaagaacttgtcattgtcgagaccgattccataggcaagttagatcagccaagtggatcatgtacagtcatcaagcaatttcaaggtacgaacttacatgggctgtactaccagaaccgtttactaaatgataagatttgtagacccttattaaatggtgtacacgttaccagtggtactgggacgggtttagttcatactgcgccagggcatggacaggatgactatctgatcggtattcaaaacaatctcgagatttattctcctgtggatcatcagggtcgttatcaactgagcgaacttcctgagtctgtaagatctatcttgaaggatgaagaagacacatcaatcggtaagcaagttttagacgtagaaactacgaaagtcattttacaaaaattaaacgacttgaacttactccataaattccatgattacacccattcttatccgtatgactggagatccaagaagcccgtcataattagagccaccccgcaatggtttgcggatttacatgatgtgaaggatttggctttggaaagtatcaaacgggtcaagttttatcccgaaagaggacactcaaggctttcctcttttatcaaaagtagaaacgaatggtgtatttctagacaacgttcatggggtattcctattttgagtttttacaagaaggatgagccggatactattttgatgaattctgaaactttggcgcatgcaatgaaaacagtcgaaaaaaagggaattaacgcatggttcaacggtaaagatgatgacatgaaagagtggttacctcaacaatatcacggagtggcgcacgaatattgtcggtcccaagataccatggatgtgtggtttgatagtgggtcatcatggaacataatcaaagacttctatgagaaaaggttaaaattaacaaaattaccatctcccttatatcaagtttgtttggaagggtctgaccaacataggggatggtttcaaagttcactattaacgaaagtagcatcaagtaatgtacccgttgcaccatatgaagaagttatcactcatgggttcaccttggacgaaaacggtttgaaaatgtcgaaatcaataggaaatacgatttctcccgaggcgattattcaaggcgatgaaactcttggattgccagctttgggtgttgacggtttaaggtatctgatagcacagtccaatttcaccactgatgtagtcgccggtccgactgtgatgaagcatgtaggagaagccttgaaaaagatcagactggcatttcgttatctgttaagtaatttacaaaaatctgaagattttaaccttttgcctgttgaacaattacgtcgtgctgatcaatttgcgttatacaagatgaacgaattgctgaacactactaaaaaccactaccaaaaccacaatttttccaaggttctaattgctttacaataccacttgaacaaccatttgtcagcgttttattttgatatctcaaaagacactttatattccgatagtatatcttttttgaaaagaaagcaagtccaaactacgctatttcatgtattgaattcatatagagcgattcttgcgccaatcttacctgttatggtccaagaagtatggaaacacacacctgaaagatggttacaaggactaggactgactaatatgagtccaatgcgtggaaagtggccacattttgaagtgtgcccagaaatcaacgactcctttgaagagttcgaactgaaaattttggagctgtttcaaaaagagtttaagaagttgaatcaagaggaaggtatcaccaaaactacacaaactcacgttactgttttcaccgatcattccctcccatccagttccagcgagctttgcgacatcttgcaagcatctgctgtcagtataatgaaaggtattagtggcaacagcagcttaccagccattgaattgggaaacggatcgaagttgcaaatcttggtcgaacagagcaaacagcacgtttgccccaggtgctggaaagcaaactcagcggaagaggatgaattatgtgacagatgtggagaggttgtgagcgaactcgtaccttaa

SEQ ID NO: 5422 - DNA, 1170 bp, Saccharomyces pastorianus
atgccatgtatggatccaccaagagacgatactgctcaaactgttagcgaagctagacacttgggtctaagagttaagatgttaactggtgatgctgttggtattgctaaggaaacttgtagacaattgggtttgggtaccaacatttacaacgctgaaagattaggtctaggtggcggtggtgacatgccaggttctgaattagctgattttgttgaaaatgccgatggtttcgcagaagttttcccacagcataaatacagagtcgttgaaatcttgcaaaacagaggttacttggttgctatgactggtgatggtgttaacgatgctccatctttgaagaaggctgatactggtattgctgtcgaaggtgctaccgatgctgccagatcagctgctgatattgttttcttggcccctggtctctctgctattattgatgccttaaagacctctagacagattttccacagaatgtactcctatgttgtttatcgtattgccctatccttacatttggagattttcttgggtttatggattgctattttaaacaactctttggatatcaatttgatcgtttttattgctattttcgcagacgttgccactttagctatcgcttatgacaatgctccttatgctcctgaacctgtgaaatggaacctaccaagattatggggtatgtctattattttgggtattgttttggctataggttcttggattactttaaccaccatgttcttacctaatggtggtattatccaaaatttcggtgctatgaatggtgtcatgttcttacaaatttcattgaccgaaaactggttgatttttattactagggctgctggtccattctggtcttcgattccgtcgtggcagttagcgggtgccgtcttctctgtcgatatcatcgctaccatgttcaccttattcggttggtggtctgaaaactggactgacattgttactgtcgttcgtgtttggatctggtccattggtatcttctgtgtattaggagggttttactacatgatgtctacgtctgaaacctttgaccgattgatgaacggtaagacattgaaggagaagaagtctaccagaagtgtcgaagatttcatggccgctatgcaaagagtttccactcagcacgaaaaggacagttaa

SEQ ID NO: 5423 - DNA, 132 bp, Saccharomyces pastorianus
atgaaatcgttatccacccattgttttttctttttaccgttaaccataattattgactcatcaatgaataaccaattcaaatcctttgttctctccgaaatgtgggattcaaagaggctattatatgtgtag

SEQ ID NO: 5424 - DNA, 567 bp, Saccharomyces pastorianus
atggttaacggtaaaaagaaaaaacaatgggtggataacgatttcattttatgtaagattggtatgactagaagaaaaacagtggactcgaggcttttagaatggcaaaatacgtgcaagcattcaattataaatctgacgccagaaaaggttgataaattatatcaactgaaactgcaaagtaagtccaagaatgaaagaccaaaaaagggattacacatttcgttatcaaacttacaaaaaaaaatggaaaaacttttcattgatgataagtgtgattcacccaaacctcgctattcgaaactccagccatcaagattccgttcttacaaagacggtggctactttattgacggaaaaggttcaatgaagttatcagatattgaaaatgctattcacagatttttatggaagaaatacggaaaagggttagtttattgctatggatgtgatccaaccggtaagaaaaggcataccgaatggttcaatgtaccggtattagaactaccatctgtgttaacgaccatcgattctttttgccgtaaaggagaatgcccattacgatga

SEQ ID NO: 5425 - DNA, 750 bp, Saccharomyces pastorianus
atgaaagaattgaaacatgagaacatcgttagactttatgatgttattcacacggagaacaagttaacgttggtgttcgagttcatggacaatgatttgaagaagtatatggattcgcgcacggtaggaaacacaccaagggggcttgagttgaacttagtcaaatacttccagtggcaactgctgcaaggactagcgttctgccacgagaacaagatactccaccgtgacctgaagcctcaaaacctattaatcaacaagaaggggcaattgaagctgggcgatttcggtctagcccgtgcgttcggtattcccgtgaacacgttttccagcgaggttgtcacactatggtaccgtgccccagacgtgctaatgggatccaggacgtactccacctcaatcgacatatggtcgtgtggctgcatccttgcagaaatgatcacgggaaaaccactgttcccaggtaccaatgacgaggaacaactgaagctgatcttcgacatcatgggtacccccaccgagtcactatggctggcagtcacgaagctacccaagtacaaccccaatgtccagcaacgaacacctagggatctacgccaagtcttacaaccacacacgaaggagccactggacgggaaccttatggacttcctgcacggcctcttgcaactgaacccggacatgagactgagcgcaaagcaggccctgcaccacccttggtttgccgagtactatcagcacacctcataa

SEQ ID NO: 5426 - DNA, 1113 bp, Saccharomyces pastorianus
atgactggcgataaactaacgatcaacgaatacgagagattggggaagttgactgttgaagacagccccgtcaaggatggcattaggggattgcgaaaaggtgattgtgtggtggcattttctaaaaaaaaaatcctggatcttaaactaaagattgagaaagatactaatttgaaagttgcagtgatttacggttccctgcctcctgagactcgtgtccaacaagcctccttgtttaatagcggtaattacgacatcatggtggcatcagatgccattggtatggggttgaacttgtctattgatagagttgtttttaccacaaacatgaaatacaatggagaagaattagcagagatgacgtcttcgcaaataaaacaaataggtggccgtgcaggcagattcaaatctacatcagccagtggagacgttcctcaaggctttattaccggtttcgagtcaaaagtcttgaaaagtgtcagaaaagcgatagagtcccccgtggagtatttaaaaactgctgtgacgtggcccacagacgaaatatgcgcccaactgatgactcaattcccaccaggtacatcagccagtaccctgttgcaaactatcgcagatgaactggagaagagctccaacaagttgttcactttgtccgatctaaagaacaaactgaaaatcatcgctttattcgagcacatggaggacattccgtttctggacaagctgaagctcagcaacgcacccgtgaaggatatgcctatggtcacaaaggcttttaccaagttctgcgagacaatagcaaagaggcacacaagaggtctattatcgtaccgattacccttcaacctgctggactacaagtgcatacccagtgagagctactccctagaggtttacgagtcgctgtacaacataattacgctatacttctggttaagtaaccggtacccgaactacttcattgacatggagtctgccaaagacatgaagtatttttgcgagatgatcatttttgagaagcttgatagattaaagaaaaatccctacgcacgcaagccgtatgcctcgacgagagaccagtggctgccctcgggaagaagagtacatacataa

SEQ ID NO: 5427 - DNA, 1014 bp, Saccharomyces pastorianus
atgcttgctagccattgtatagcagtttctccactccgatcctttcggctattctttgtcatcaacaaagcttactaccatcatggatccaaaaatatagatccattcaatgacaaaaattggatcgtcaaaagacccaaatttcttaatctacctaaaaatgaacactcaaaactagatactttcgaatttacgttcagcaagggtgaaaacggcaatgtttatttacaggattcgtcattcaaagataaccttgacaaagccatgcaattcatctataacgaaaagttgacatcattggacgctaaacaagtgccaataaagaaccttgcatggttgaaattaagagattctatatattcacaactaaaacacacaagtaaacaacccccagcctgtgtccctccattaagtgaactcatacatctttcctgtccaagtaatttaattccactactgatgaactgtaataaagtcaacaactccatctggaaggcgattttgaaaaacggccagagcaatgatgtcagcactttggacaaattcatttatatcctacagcaaacttttgaccacacgtatgaacaagagatattgcctatgatgacgaatacagatgatacagatggcgctcacaatgtcgatataacgaacccggctgaatggttctcagaagcaagaaagatcaggaggcatataatcatgcacattggaccaacaaattcaggcaaaacatatagagcactacagaagttgaaatcagtggatcgtggatactatgcaggaccattgagattattagcgagggaagtatatgacagattccaaaacgaaaaggttagatgtaatttgttgaccggtgaagaagttatacgtgatttagacgataaaggaaatccagccgggctcacttcgggtaccgtagagatggtgcccataaaccaaaaatttgacgttgtcgttcttgatgaaattcagatgatgtctgatcgacaagcttggatccggccataa

SEQ ID NO: 5428 - DNA, 882 bp, Saccharomyces pastorianus
atgattttcaatagggtcattgtaactgagaagggcttaaggtataataatgagactggttctatgccgtcaaaaaaggcattgatttctatttccaggggccacggtactttaggccgtgatgccacctgggatgagttccccaatggtagattcggtgattccagatctcctgcatatggtgagatagatggttatgggccatccatcaaagtgagtaaaaacagagcacttgaactgtgggggacgcccgaggcagttggtgatttaaaagatattttcatcaaatatttggaaggctcaactgatgcgattccatggtccgacttgggactatcggcagaaacggcgttgattcaagaagaactcattcaattgaattatcgcgggtatttgacgttggcatctcaaccagccacaaacgctacattgagcagtgacaaaatattcggatgggggcccgcgaagggaaggttgtaccaaaaggcgtttgctgagatgttcattcacagacagcaatgggaaaccaccctaaagcccaagctggaccattacggacgtaggaagttcagctactatgcgggcgattcttccggctcatttgaaacgaacctggatccgtatagttctagtgttgtgacatggggcgttttccccaacagtcaagtgaaacagactacaataatcgaggaggaatcgttcaaggcatggagagatgaggcgtttagtatctggtctgaatggggcaagctgttcccaagaaacaccccagccaatattcttttaagacaagtccatagagattactgtcttgtttccattgttcaccatgatttcaaagagacagacgaactatgggagatgctactagaccaagtgtaa

SEQ ID NO: 5429 - DNA, 3339 bp, Saccharomyces pastorianus
atgtcccagctattttatcagggtgattccgacgatgagttgcaagaggaactaactaggcagacggttcaagcatctcaagattctcggaacgaaaataaagatgagagcatcgaagccgatcaccttgatgaggtgaccaatgagggctttaagcttttagacgaaggtactgtgctgtacccactgataccgaatgaaccagatgacacggaaacgtccaagcctaacatagatgatattaggccagtcgatattcaattgactttaccattatcatttcaacaaaaggttgtagagagttcgttgattactgaggatgggttagttataatgggaaaagggttaggcctgctggatatagtttccaatctgttacatgttctagctacaccaacctctattaacgggcaactgaagagagcgctggtcctggtgctgaacgcaaagcccatagataacgtgagaatcaaggaagccttggaagagttatcgtggtttaccaatactgagactgacaaagatagcaccagtttggaggatgatgacggtctttttgaaaggccatttagcgtagttaccgcagactccttaagtgtggagaaaagaaggaaattgtacatttccggtggtatcttgagcatcacctccagaattctcattgtggatcttttgtctggtattgttcacccgaatagggttacgggtatgttggtactaaatgcagactcacttcgacataagtcaaatgaatcgtttatattagagatttatagatccaaaaatacttggggtttcattaaggccttttctgaagcaccagagtcatttgttatggaattctcaccccttaagacgaagatgaaagagttgcggttaaagaacgttttattatggccgcgattcagagtggaggtatcttcgtgtttaaatgctatcaataatgaagcatcacaaaacaaagttattgaagtgaaagtatcatttacgaattctatgtcccaaattcaatttggattgatggagtgcttgaaaaagtgtatcactgaattgagtagaaaaaatcctgaattagcattagagtggtggagtatagaaaatgccctggatgtaaattttatcagatcaattgattcagtaatggtaccgaactggcaccggatctcttacgaatcaaaacaactggttaaggacatcagatttttacgccaccttttgaagatgctggtatcctccgatgctgtcgatttttttggggaaattcaattgagcttggattccaacaaaccctcagtgtcccgaaaatatactgagtcgccgtggttattggtggatgaagcacaactagtaatatcttatgcgaagaaaagaatctttcacaaagaaaattataatctggaggagaatccaaaatgggaacaactaatacatatactagaagatattgcatatgaaagaattaataagggcttacaaggacctaccctaattgcttgttccgataatgctacctgtttacaattagcaagagttttgaattcttcaagcaaaagaaggggaatgcgtgaggtgcttttaaataagctgaaatggtatagaaaacaccgggaagaaacgaaaaagctggttaaggaagtccaaagtcaagatacttttcccgaaaatgcaacattaaatgtcagctcgacattttctaaagaacaagtggttacaaagagaagaagaacgcggggtgcttcgcaggttgcggctgttgacagactgagaaattcagggactaatgtggatatggaggaagttttggaagaccagaagttgactgaagaaatcaaaaaggaaaatagtgataaaccgcatgatggactggaagaaagcggtataaatgatgaagaagatcttgtaaatgattcgaaaatatttgagctacaagaacaagaaatcaatgaagcttttattcatgataacgataacgaacttgccaatgaagaaatagagtatgcggaagaacttccgaaacatgtatctgttcacttcaataaagaattatgggccgaacattgcagtgagtatgagtatgtcgatcgtgaggatgaaattttagtctctactttcaagagcctcaatgacaactgcttattgcaggaaatcatgccttcttatattataatgtttgaaccagatatctccttcattaggcaaattgaagtttataaggccatagtacaagaattacaaccgaaggtgtattttatgtattatggtgagagtattgaagagcaaagccatctgaccgcaattaaaagagaaaaggatgctttcacaaagttgatcagagagaatgccaatctgtcgcatcactttgaaacaaatgaagatctttcccattataaaaacttggctgacagaaaattaaaactctcaaaattacgaaaatctaacactagaaatgcgggtggacagcaaggatttcataattttactcaggacgttgtcattgtggatactcgtgagttcaatgcttcattgccaggtttactctttcgatacggaattagagtccttccttgtatgttgactgttggtgattatgtgataactccggacatttgtttagaaaggaaatcaatttcagatttaattggttccttgcagaataatagattagcgacccaatgcaaaaaaatgctgaaatactataaatatcctactctgttaattgagtttgatgaaggacagtcgttttctttggaaccattcagcgagagaagaaattataagaataaagacatatcaacggtgcacccgatatcaagtaaattatcccaagacgaaatacaattgaagctagctaagctggtattgaggttccctactctgaagattatttggtcttcttcgccactacaaactgtaaatataattctagaactgaaattgggccgtgaacagccagatcctagtaatgcagttatattgggcacaaataaaactagaccatatgtgaatgacaatgtgtcggggggcttaaatgatggcgataatgagtccaaatataagaagttgctggacgttccaggagtgtcaaagattgattacttcaacctacgcaaaaaaatcaagagcttcaataaacttcaaaagctttcgtggaacgagattaatgaactgattaatgacgaggatttaacggatagaatatactacttcttgaggacagaaaaggaagaacaggagcaagagatcaaggattctaattcggaattgcttgccaagaacatgaatgatgatgctttaaatgacgatgacggtgatgatgacgtgctggatgcatttatgtaa

SEQ ID NO: 5430 - DNA, 1467 bp, Saccharomyces pastorianus
atgacagatatcgtagctgtttacgacgttctagtggtcgggtgtggtcctggcggctttgccgcggccactcagtcctcgcaggcgggactgcacacggcgtgtgtcgaccagcgggcctcgctgggtggcacctacctggtggacggggccgtgccctccaagacgctgctggacgagtcgtacttctaccgactgttacagcagcgcgagctcttcgagcagcgcggcgtgcggctgccgcccgccagactcaacatgcaggtggcacaggccgccctaaagcagaatatagaacgtttgggcaaagtttataaatccgagctatctaaatataatgtcaccgtgtataatggtacggccgctttcaaaaccccgcaccgcgtcgaaattgtacagcacggcgaaagcggtcttattgtggaggcgaagtacattatcgtggcgacggggtctacgatcatccagtgtcccggcgttgccatcgatgaggccatggtggtctcgtctagtaaggccctctcgttggactatgtacctccgcggttctctatcatgggcggcggaaccataggcctggagatcgcatgtatattcaataatttcgggtcccgtgttaccatcatcgagtctcaaagcgagatctgccagaatatggatgccgagctggcgtctgccaccaagaggcttttgcagtctcaaggaattgtcttcctcttagataccagagtgcaatgcgcggagagggatgccgccgctcaactaaatgtcacgctgttggacaaacgctcgaagaaaaatttcgcgcaccagtgtgatgtgttgatggtgtcgattggcagacgtccccttctggagcatttgaacatctccatgatcgggttgagtgagcaggatttcgtggagaacgtcgatgagcaaacccagagcttatcgaaattccctcacatcaagcccatcggtgatgtcactttaggccccatgctggctttgaaggcggaacaacaagcctcacgggccattcaatctatactctctgcgggttctgtagagacttcgaattttaacttcccgccgaacgtgctgtattgtcaacctcaagttgcatgggtcggatacacggaacagcaattggtttcctctcatatcccgtaccaaacgggcaaggctttcttctcgcagaacataagatataacactttgatgccacagaaggacactgctgtccccggcttcattaaagtcttggtgggttctcgcgacttgaaaatactgggcgtccacataataaacagcgacgcaaatgaactgcttccgcaggcgtcgatggctgtgtcgcttggccttaccgcgcatgatgtttgtaaagtggctttcccacacccgagcttatcggagtcgttcaagcaggccacccagttcgcaatggcgactgccgctttaccgagcataaatgtccgggaataa

SEQ ID NO: 5431 - DNA, 105 bp, Saccharomyces pastorianus
atgtttcaattcgatcctgacgtagacactaaatgggcagaacaggaggatatggacagcacgtttcagcgcagaacctcactagattacgggggctatttttaa

SEQ ID NO: 5432 - DNA, 978 bp, Saccharomyces pastorianus
atgactaccaaccatgatttttatttcgcgcttctccgcatttccatattacagttactgaaggcccagggatttgacagggcaaggccgagtctggtggatgttatgaccaatctttacacaaagtttctgaatttgctagcatcagaggttagttctattgcccaatcgaggtgtgatcaggacgatacagtggctttgcaggatataactctggctctggaaaatttgggcatcgttaagcctacagatgtcctggatgtctatgatgagaaccctgaattatcaagttcacggggaatggaaaagttcaaggagtggtgcttaagtgctcaatcgagtgatgcacgaataaccgctttacctacagtggaattattgcagaatgaagaaaaagagtcaaatcctctatcggcaataccagactacctcaaccagttacaacaaaacaaaggtgtcaaacagaagttggaaacgaaaaataaaaagacagagctgatagaagatctgataaacaataatggattggatgactggattaaattagtggtggcgagacaacgaatcaacttgattgaaagagcatccaaaaaagactctcaaaacgtgatggctttgccacatattgggggctataaatcttcacttttaagccatccacaccatagtacgataaacaacgaagacaggctaccttcaaccatgactcccagagatgaggacgctttaacagaaatacgagataatccacttgtaacaagcaagctgccgataatgaggaccgaaaatagactggaaaacataactctgtcctttgagaatgaggagctcgaaccattgacgaaactgaagatcccaatcaaacacctcatgacgatagtgatgtggataattctaaaggagataacaaaagttcagcaggatcacctcataatgatgactatgatatatcaatgtttcaattcgatcctgacgtag

SEQ ID NO: 5433 - DNA, 651 bp, Saccharomyces pastorianus
atgaatagcatgaacagaaaagtccgtggtaaaaaaggaaaattaaagaagattcaaagaaaatatgccgatcaagatgagcatgaacgccttttgcgtttagaagctttgggtaccttaaaaggtatcgagaagcaacaacaaaagaggaaagatgaactaatgaaactagaacttagagaagacaaaaagaatagacgcgaaaagcaaaagaatttacaggctttgaagtttagtaaaaacgaaaaggcaaaggttagttatgatagacatatggccgaactaaaaccatctctcgataaggacgatgtagtcattgatattgtgcctgtgtttgctccttggcctgcacttcaaaaatataaatataaggtgaaaattcaaccgggaagtgcaaagaaaaccaaaactttaacggagattttacactattttaagagtagacaggttgatagttcttctaatgacaaggaaacggactggccaaaagaacatgaaatgattaaaagcttgaaggagcaagacctggttcttctgctgtgcgttgataaattaaaaataacgattgctggtcaaaaatccaccaagaacagtggcggctcacaaaagggcaagaaaagctccaaggcgggcggtaagaaaagaaaataa

SEQ ID NO: 5434 - DNA, 2349 bp, Saccharomyces pastorianus
atgaaacaacgaattagcgcgttagacttacagctgctggccagagaactgaaacaaaatctggaaggttacagattgagtaacatttacaatattgccgactcgtcaaaacagtttttactcaggttcaataaaccggactctaaattaaatgttgtggtggattgtggcttaagaatttacttaaccgaattcagtaggccaatccccccaactccttctgggtttgttgtcaagctgagaaaacatctaaaagcaaaacgactaacagctttaaagcaggttgaacaagacagaatccttgttttgcagtttgctgatggtcacttttatttagtgctggaatttttcagtgcagggaatgttattcttctggatgaaaacagacgaatcatgtccttgcaaagagtggtcttggagcatgaaaatagggttggtgaagtttatgaaatgtttgatgaatcactttttgccacagataatgagaatatcaaggagtattcggaaagctctaaaacagaatacacttctaaccttgttaatgaatggatagaagcagctcagagcaaatacgaatcagatgctgccgttattaaggaactaaacattgagagtaaaaagtgttcgaaagaaaagaaagtcagagttcattccatccataagctgctgctttcaaaggtccctcacttgtcttccgatttactttcgaagaacttgaaagtatttgatattgacccttcggaatcttgtttagcacttctaggtaagacagacacactagcaaaactgctaaatgttacccaatcagagtataatgaacttttatcaacatctgatagcaggggttatattttagccaaaagaaatgaaaatttcaatcccgagaaagattcagcggacctcgaattcatttttgatacattccatcccttcaaaccttatatcagcgatccagacaacaaatatttcagcatcgttgaaattgaagggttttacaataaaacgcttgacaaatttttctcaacaatagaatcttccaagtacgccctacgtatccaaaatcaagaatcacaagcacaaaagaaaatcgatgatgctcgtgctgaaaacaatagaaagatacaagctttactgaacgttcaagaatcaaatgaaagcaagggtcatctaataattgaaaacgcctccttaatagaggaagtgaagcttgctgtccaaggtttaattgatcaacaaatggattggagcactattgagaaactaataaaaagtgaacagaaaaagggaaatatgattgcacagcggataaacctgcctctgaatttgaaaaagaacaagattagcgttaagctcgatgtgtctaaggatcaggaaggtaccgcttcttcggatgaaggcaatgactcagagtccagcactagtgaaagttctagtgattcagattcagatccagaagattcaagcgatctaagaaaaaaaagtgcgaaaaatatgaaaaacaaggagtccatcaatacgctaaatgtcacaattgaccttggtttatcagcttacgccaatgcctctgaatatttcaatatcaagaaaacaagtgctgaaaaacagaaaaaagtggagaagaatgttgggaaggctatgaagaatattgaagtcaaaattgaccaacaactaaaaaagaagctgaaagaatctcacagtgttttgaagaggattcgtactccctatttttttgaaaagtataactggttcatttcaagcgaaggatttttggttatgatgggtaaaagtccagcagagacggatcaaatcttttctaaatatattgaaaacgatgatatttacatgtcgaatagttttgatacgcatgtatggatcaaaaatccagaaagaacagaagttcctccgaacaccttgatgcaagccggcatattatgtatgtcttcaagcgaagcttggtctaagaagatagcctcctccccgtggtggtgttttgctaagaacgttagtaaatttgatagttctgataattccgttttgccggaaggtgcgttccggttaaagaatgaaaaagatcagaaccctctaccacctgctcaactcgtaatgggcttcgggtttttatggaaagtgaaaataaatggaaatgatgaggatgaggatgaggatgaggatgagggagtagaagaaggagaaaacagtgatggcgaaattatcgaatcattagaagatgaggatgacaacgaggatgatactacaaatgatagtgattttgaatttgtacagcgaccgcgagaaacgaaatacgaagacgaagagaacattgtgccacactatactatccgaaagtaa

SEQ ID NO: 5435 - DNA, 1785 bp, Saccharomyces pastorianus
atgtcaattaaaggcacgatgaagctcttaagggatttgctggtagataggaaggagtttgagaactggaagaacaatttagcatgggctcgggatggtactttatatttaacaacctttccagatatcagtattggccagccaaaatttactagggacgtgaataacaatagtaagaatttgttccatgtcaaagaatgccccttagaatttgaaaacaaactggatttcgagctggcacaacagaacggtttgctgaattcgcagccagtctcctatcccagagtctgtaaaccatcaccgaccgatgattggatagctgtattaaccaataatgggaatatttctgtatacaaggacagtaaaaaccttatcaatattgactcaccaggcgatttgagccgcagaatttaccattgctttgagtggaatcctaatggttcttcaattgcagtcggtaacgaagatggtgagcttcagttttttggtattcagaagaacctagaaaccactccagaatttttgtttgaatatagcttaaaattaagtgatgctggctcaagagattgggtcacccatataacgtggtgcgatgatattctcatagcggcgctttcaaataattctgtattctccatcacatttcccactccctccaaagatcctgtatccaaattattacaaagtgcttcgagaagaaaaattactgatttgaaaatagtggactacaaagtaattttaacctgtcctggatatgttcataggatagatttggaagattattcaatttcaagcttaaaaacaggatctccagaaaacttttatataatcccactgaggtacgaaaaagagagtacggtattactgatttctaataagactagttataaagttcttttaggagacggactcaatatgacggtagataatattattgcgccttatttggaaaaaaaattcaaaaagtggagcactatttggaatgagttcaacaattatgaaacatctgtggtcattcatggcgtgtctctctctccagatggatattcagtagcaataatatataatatggaacgggtggcattcaaatacaaaatagcctcagaacaatctttctgtataatgttcgctccattatatcaatcttggagaatttctgaatatgctgatggattagcgtggtaccaaacgtaccatatttatgacaaatcaatgcctcgacttccagacaatttcagtgcagataagaaattgctaaatggaagctaccctattagtctggatttcaaatcatacctcatagctttggtaaaaagtgaagagatgagatccataatgtttttgaatatgacaaatgaggtcccatcacttttatcatttcaagaagcattgtacgagtatgtcgcgaataaaacatccgagctaacaaacaactttgatttagcctgcgtattgtctttagcaaagatactgaacagacaagcgccgattactaatggaaagttaacaatgaaaagcggtttacttgaggaagatttcgacttagagagcttcaaagctgaccctgaaattgtaacatctacaaccaataatacgtggaaaagatgcggtgtgactctacttccgatactcactacgcaagtaaaaatatgtcccgtgagtaaaaaaagagtactggatataaaacgagatgacgtcaacaattatggctggttcacaagaggtctactagagacatttaatgacaaaagcatatacagcggaacgacgctggaaacaatttaa

SEQ ID NO: 5436 - DNA, 1815 bp, Saccharomyces pastorianus
atgatgtttttgtacgctacatgggctttgagaagaaaaagcggagaaacaaggttactgcttggtgtgtcgggtctagttatagtcttggcctctattatctgcgcatccggctttttaactctttttggtttaaggtcgacattgatcatagcagaggttataccattcctagtcctagcaattggtatagataacatttttctgattacgcatgagtatgataggaattgcgagcaaaagccagaatactcaattgatgaaaaaatagtcagtgctatagggaggatgtctccttctatattgatgtcattgctgtgccagacaggttgttttttgatagcagcctttgttacaatgccagcggtccataattttgctatatactccacggtatctgttatgtttaatggggtgctgcagttgacagcgtacgtgtcaattctgtctctctacgaaaagagaaccaagtataaactagttacaggaaatgaagacgctacggaatcctctttgaacaacttttatcttaagattctgattcacaagaagatgattttaggagcatttttggcttggtttttaacctctctggttttcttacctggaatcgaattcggattagaccaaacattggccgttccacaggactcttatctggttgactattttaatgatgtttatcgctttttaaacgtaggcccaccagtatacatggttgtgaagaacttagatttaactcaaaggcaaaaccaacaaaaaatatgtggtaaatacactacctgtcagaaggactctttggctaatgttttagagcaagaaagacacagatcaacattaacggagccattggctaattggttagatgactatctaatgtttttaaaccctcagctagatcaatgctgtaggttaaagaagggaacagatgaagtttgtcctccttttttccctagcagaagttgtgaaacttgctttcaacaaggatcttggaattacaatatgtcagggtttcctgaaggtagtgagtttatggagtacttgagcgtatggattaatgcaccaagcgacccctgtcctctaggtgggcgcgctccgtattcaacttctttggtgtataacgaaacaggtgtttctgcttcagttttcaggacagcgcatcgtcctctgagatcccaaaaggactttattcaggcctatgatgatggaattaggatatcagcctctttccctgaattagacatatttgcatattcaccattttacattttctttgtgcagtatcaaactttgctgccattaacgttgaagctgatagttagtgccatcgttctgatcttttttgtttcttctcttttcttgcggaacaaacgaaactcattcttattggccttggttgttactatgatcatcgtagatattggtgctttgatggtgcttttgggtatttcactgaatgctgtaagtttggttaatttgattatttgcgtcggtttagctgtggagttctgtgttcatattgtaagatcgtttacagtagtaacaagtgataccaaaaaagacactaattcgagagttctttactcactgaatactgtaggcgagtcggtcatcaaaggcataactttaaccaagtttattggagtttgtgttctagcattcgcccagtcaaaaatatttgatgtattttatttcaggatgtggtttactctggttattgttgcagcaatgcatgcccttttatttcttcctgcattgttgtcattgtttggtggcgaaggctttagggacgattccatagacgcagaagattaa

SEQ ID NO: 5437 - DNA, 1392 bp, Saccharomyces pastorianus
atgaatatactatggattgtggcgctaattggccatctgatccagctcgttcaggcaactggcctttgtgcaatgtatgggaattgcgggaaaaagtcaatatttgggaacgaactaccttgtcctgctcaacctagctttgaaccacctctcctttcagatgaaactagtaaaattttggttgaagtttgtggtgaagagtggaaagaagttcgtcatgcttgttgcaccaaagatcaggtcgtggccttaagggataatctgcaaaaggcccagcctttgattgcttcatgcccagcatgcctcaagaatttcaataatcttttttgccacttcacttgcgctcctgaccaaggaacgtttgttaatattaccaaagtagaaaagtcaaaagaagacaagaatattgttgcagaactggacgtttttatgaattcatcatgggcgtctgtattctacgattcatgtaagaacatcaaattctctgctaccaatggttatgcgatggatttgattggaggtggtgccaaaaactacagtcaatttttgaaatttttgggagatgcaaagcctatgctaggaggatctccctttcagatcaattataagtacgatttgccagagcaggaaaaggaatggcaagaatttaatgatgaagtttatacgtgcgatgatgcccaatataaatgtgcatgctctgactgtcaagaatcttgccctgatttggctcctttgaaagacggtacttgtaaagttggttctcttccatgtttctccttttctgtggtgatattttatactgtctgtgcactttttgtagctacgtggtattgcttcttcaagagaaaggaagggagagcgctgattgtagatgacgatattttaccggagtcggcttctttggatgactctaatacaaatatatttgagagctttaataacgaaacaaattcatttaataacaaattggccagtgctttctcgaaagtggcacaattttccgtccaaaatccatacaaaatattagcagctactgcccttagtatctttgcattcggttttatcatctttcaatacggtacccttgaaacaaatccaatcaacttatgggtaagtaagaactctgaaaaattcaaagaaaaagaatattttgacgataattttgggccattctatagaacagagcaaatttttgttgtgaatgaaacagggcctgttctatcgtatgagacacttgaatggtggttcgatatgaaaaattattacggaagagctacaatcgccagaaaatattggataccaagacttttgtttcagaccaacagaagactctacctgcgttatagaatcctttacgcaatactttcaaggagctttgccggagaaggatag

SEQ ID NO: 5438 - DNA, 1119 bp, Saccharomyces pastorianus
atgtctgcgagtgatttcaagcctgaaacatggactttgaatgccaacgaagctttaaaaatttctatagttggtgaaaacgcgattcaatttttgccattattcacgtatccaatctatggcgattctgaaaagatttatggctacaaggatcttgtaatccaccttgcatttgattcgatagcattcaaaccatatgtcaatgtcaaatactcgtcaaaactaaatgatagcgatgttagtaatgtggaggaaaaactgctctcgtttttaccaaaggatgacgtgattgtcaaagatgaagctaaatgggtggattgttttacggaagaacaaacaaattataacctaccagaaagtttttgtaaagtgtctgagtattcactaaatggggaagaatttactgtatataaaacaaatttgcttgacgattttgcaaagaggatgcatcgtcgtgttcaaatcttttcaattctatttattgaggcagccaactacatagatgagaacgatccaaactgggagatcttttggcttttgaacaagaaaacaaaacaattagttggatttgttactacctacaaatattggcattacctgggtgcacaatcttttgatgaaagtgttgacgacaaattcagagctaaaatatctcaattcctcattttccctccctatcagaataaaggacacggctcctgtctttatgaagccatagttcaatcttggttgagtgacagaagcatcactgaaatcactgtcgaggatcctaatgaagcgttcgacgatcttcgcgatagaaatgacctccaaagactacgaaaactaggttttgttgccgcgttacgagagcactcggaacacgcgtttttagaatcaaatagaaggtctttcaaactagaagaaaggcagttcaatcgacttgtagaaatgattcttctttccaacaagtctccatcatttgagatgaaagtgaagaaacgactttttatcaaaaattttgatgctctcagtggcacagaaccagaagaagcaaaggaagccctgatgaactcatttgttctggtgaaagatgattatatgcgtattataaaatcagtcgaagatttcaaagcctag

SEQ ID NO: 5439 - DNA, 1446 bp, Saccharomyces pastorianus
atgctgcacagatctataacgagcacgtatgtgcgcaggagactctttagttcaactacaatcataaagtcgtctgctataactcttaaagaagctcttgaagaagttatacctcaaagaagagatgcgatcacagaattcaaggctgtatatggggacacagtagtcggaccgattaccatttcctcaattctaggaggaatgagagggaatcagtcaatgttttggcaaggaacatcattagatcccgaacacggtataaagttccagggtctaacaatcgaccaatgccaaaagaggttgcctggcacaggtattgatggtgataatttcttaccggaatcaatgctgtggctactattgacaggtagtgtacctacacttgagcaaacaaattctttaaaaaaagaactagcgtttcgcggaaggaaattaccccaggatacagagaaagtgctgttatgtttacctagagaaatgcatcccatgacccaacttgcaattgggttagcgtctatgaataaagggtccgtatttgctacaaattaccaaaatgggttaatagggaagaaggacttttggattgacacccttgaagattctctaaatttgattgcttctcttccactcctgacaggtagaatatattcaaatatcacaaatgaaggacgttcattgggagagtatagtgaggatacagattggtgttcaaatatatgctctttgctcggaatgaccaatggaagcaagtcttccaataagtgtagtctcaattcccagcaatctctagatttcgtcaatttgatgaggttgtacaccggtatacatgttgaccacgagggaggcaatgtttctgcacacactactcatttggtggggagtgcgttaagtgacccatacctcagctactcatccggcataatggggctcgccggaccattgcatgggttagccgcgcaagaagtggtgagatttttgcttgagatgaattcaaatatttccagcgtcgaacacgaggaggaaatcgaagactatctttggaaagttttgaactcaagccgtgtaattcctggatatggacatgcagttttacgaaaacctgatcctcgatttacagcaatgcttgaatttgcgcaagccaggcccgacgaattcaaaaatgacgaaaatgttttattaatgcaaaagctgtcggaggttgcgcctaaggttttgctaaagcatggcaagagtaagaatccgttccccaatgtagactctgcttccggaattttattttatcactatggaattaaggaactactattcttcactgtaatttttgggtgttcaagagctataggacctttgacccaacttgtttgggatcgcgttttaggcctaccaatagaaagaccgaagagtttgaactttaaaggtctcgaagccctcacaaaggtgatatag

SEQ ID NO: 5440 - DNA, 1707 bp, Saccharomyces pastorianus
atgctgttcaatagatcgacttcaagaacgctaaaaaagttggtttcctccccaggtaagtcgttgcgagcatactctagcaaggcaaaaagtaccgaggattttttatcgtcagaatcagcgaaagtagaaaaatggtgggcttcaaggagattccaaaatgtttctcgtccttattccgccattgatgttgtgaagcaccgaggcagtctgcccgcaaatacttcagtttacccttcatcgcatcaagctcgaaaactgttcaatttattggaggaaaacttcaagaggggtacgccgcttcatacgttaggggtcattgatcctgtacagatgagtcagttagcccgttgtaaaaaaattaaagtcgcttacatttcaggttgggcttgttcttctacgttagtagggtctacaaatgaagtttccccagattttggcgactatccatacgatacggtgccaaatcaagtggagagaatattcaaggcacagggattgcatgatcgaaaggctttcctagaggcctccatcaaaggctctgtccctgttgattacttaaagccaattatcgcagacgcggacatgggtcatggtgggccaacgacagtgatgaaagtggccaaattgtttgcagagaagggagcagccgctattcaccttgaagaccagatggtaggtggtaaacgatgcggccatctcagcggagctgttctggtacctacagcaacacatctaatgaggttaatctctactaggtttcagtgggatatcatgggtacagaaaatttagttattgcaagaaccgactcttgtaatggcaaattgttaagttcaagtagcgatccaagagatcatgaattcatcaagggtataataaaagaaaacgtagtgccttggagtgaaaaactgattgaaatggaaaataagaaggtttctaattctacaatttctgccatggaacaagaatggtaccatgaaaatgaactgtttacatttgaggaagctttagcaaaaagtttaacgtcaggcgaatttgaaacttacaaagcaaagaaagaagatcttatgacgaataagttaaacagaacatatttaagcctgagagagatgaaacttctggcccaagaagtcgcgccatctaaaaaagttatttttgattgggacgctccaaagacgaaagagggatattacatgtttaagggttgcatagaagcggccatcagaagatctttagtatttgcaccatactcagacttgatttggctggagaccaaaacccctgatctagagcaagcacgttcgttttcaagtgaaatccataagtttttcccggctaccaagttagtgtacaatctctctccaagtttcaattggagcgcgcacggattcgatgacaaggcactaaaatcctttatttgggacttggcaaaagaagggtttacggtgcagttagtttcccttgccggtctacattcggatggggtatccttctgggagttggccaacaactttcaaaatgacggaatgaaagcatacgtcgaacaggtacaaaggcgggaaaaggaaagtaactgcgatgtactaacacaccagctttggtctggcgcagaatatgttgattccttgatgaaagtagttcaaaacggggcttcatcccaaactttaagtacgtctggcgagagcttcaccgaaacacaattttag

SEQ ID NO: 5441 - DNA, 576 bp, Saccharomyces pastorianus
atgtattcaggtgctactggtgaagaactcagagcagatatttatgtcggtgttgtttactatcaaagattacgtcatatggtcaacgacaagttccaagtccgttccaccggtcctgttaatagtttgactatgcaacccgtcaaaggtagaaagagacatggtggtattcgtgtcggtgaaatggaaagagatgctttaattggacatggtacctcattcttgttacaagatcgtttgctaaattcttcggattacacgcaagcatctgtttgtcgtgagtgtggctccatcttgaccacacaacagagtgttccaagaattggttcgatttcgacagtttgttgccgtcgttgttccatgagattcgaagatgcaaagaagttgttaaataaatcagaagatggagaaggtgttttcattgacgattctcaaatttgggaagacggacaagggaataaatttgttggtggtaatgagacaactacagtggctataccatttgtattgaagtacttggattctgaattatccgctatgggtataagattacgttataatgttgaacccaaatag

SEQ ID NO: 5442 - DNA, 555 bp, Saccharomyces pastorianus
atgagcaaagtgattaaaccacctagccaaaccagaacggcagatttccgcactctggaacgtgaatctcggttcattaatcctcctaaagataaatcggcatttcccttattagaggaagctgtccggccacatattggttcctttaatgcattaactgaagggccagatggaggtttgttaaatctaggtgttcaggacattggtgaaaaagtcatatttgatgggaagccatttgattctgaagatgaaaccgccaatagcagctaccttggaaataagctttctgttagtgtggaacaagtttccattgcaaagcccatgtccaacgatggtgtttcttctgcagtagagagaaaagtttacccaagtgagtcgagacaaagacttacttcttatagaggtaaattacttctaaagttgaagtggtccgttaacaatggtgaggaaaacatgtacgaagtaagagattgcggtggtttaccagttatgttacaaagtaacagatgtcacttgaacaagatgtccccatatgaattggtacagcataaagaa

SEQ ID NO: 5443 - DNA, 585 bp, Saccharomyces pastorianus
atgctacatcatatggctggctatccgctcctaaagacccccttgcgaattccaataaagctgaaaagcgtgttggttgacgattgggagtatgtaacgaaggataaaaaaatctgcaaactgcctgctgatgtgacggtggaacagctattaaataagtacgagcatgaagtaagtcaagaactagagtcgccgggatcgcaatcgcagctgagcgaatattgtgctggccttaagttgtacttcgataaatgcctgggtaatatgctcctatatagattagaaaggttgcaatatgacgagatcctcaaaaagtcaaccaaggaccagaagccattaatacctatcaaagtttatgggcccatccatctgttgaggctgacaagtgtcctaccagaactaatatcatctactacgatggatttacaaagctgtcaacttttgattaagcaaactgaaaactttttaatttggttactaatgcatatggacgaatatttcaacgacaaagatcccaaccgcagtgacgatgctctatacgtaaatacatctagccagtacgagggtgtagctttaggtatgtga

SEQ ID NO: 5444 - DNA, 612 bp, Saccharomyces pastorianus
atggttgatttggaacaagaatttgcgctcggcggacgctgcctggcgttccatggtcctctaatgtatgaggccaagattttgaaaatatgggatccatcttctcaaacttatacaggtgttcctaatgacaagccggggttcaactcgcaaacaataaaggagacacaaccacagaatttgggggaggacgaaagcattccagaggaaatcatcaacggaaagtgttttttcatacattaccaagggtggaagtctagttgggacgagtgggttgggtatgataggatacgggcctataacgaggaaaacatcgcaatgaagaaaagactagccagcgaggcaaaggaagcaaagaaatcgcttctcgagcagcagaaaaagaagaaaacttctactagtttgggcggatccggcagtggtgggaaaaggaaaggtgatggccgtgcaaatgccggtataagcaagagtgtgtcgcaaagttcgttagcgtcctccatgagtggaaagaaaagcggaagaagctctgctaattctcttcatccaggaagttcttgcgctcatcgtcggatcaaaacggacacgatgatcgacggccgattgccagctgct

SEQ ID NO: 5445 - DNA, 144 bp, Saccharomyces pastorianus
atgatctaccaaaaaattgttgctccattgactgacagatatattttgagagacgttagcaagactgaaaaggacgaaattagagcctctgttaacgaagcttcaagatccggatcaaagactacaggttcttctgtccattag

SEQ ID NO: 5446 - DNA, 1227 bp, Saccharomyces pastorianus
atgagatatttggtgagaaaaaaaaaggacagaagtttaccactatttgaagtagcttccaagagcacaagtggtcctgccattagagaagaagtcgttaataacaccattgacgataatttattggcttacacctcaaccaaagaaaagaataaaaacatcccgttttctgaatcatttacgatcaagacgaaactaaactttcccaaatactccgaaatcgacgctaccaaaaccacaaatttacctacttatggtattgacctttttgatccaataaaagattcaggtcaagttgaaagcacttctaacaatagcaatatgttgggctttctaatgggtcattcaaataagacctctaatatgccccacaaacttcaaccagaagagggccataataattttaaagatcaaggtgtgaacgaagtaacaactttacaaactagctccaatgtccccgttcaattctatacgcgactgaacaaaccaagacgtggtttgtatttggacagcatgcattttaaaaatattcaatgctcacataaattagaaattgttttgagagttagtaaaaccgacgacagtaacccacaacttacaaggcattacgaaataattgtcgatacgccaatatatttgatttcagacttgtgcaatacttccaatattgacttacccacgtacgatatggccactactgaatcatccaaggttctaccaccaactttcgaagaggcaacgtctgtctcagcatcaccaagatcctccttatcttattatcctgacgatatttctatgcaacaactacatctttccaggtcaacttccttggcaaacggttatctgtcgaagatacattcgaaagcaacaacggtctcggaaacatttaatagtgccccgtttcaaggccagaaagatcaacaaccacatgttttaaggaccgaagatttttcaccgcaaatgacaaatgcagaaaatacatacaataatatggatggcttactttcgcaagacatcttggaacagagaaatgtttctacactattagagggggataataccactacgatggattttaataagaatatattcacaccacggggcaatccttgtacccttattagtaacgatgacgattataatgatattgataatgataaagacgggcctggtccaatagttcatccaggtactgaaccgccaagatacgatgagatttcctcctga

SEQ ID NO: 5447 - DNA, 2226 bp, Saccharomyces pastorianus
atgaacgttgtttctaagtcgagtttcgcagacaaagaagcaaagccgattatgcagtctcccgttcctatagtgattgcaagcagttcagacaagagagatgtcggtccaacagtcactgcgaatgaaaatacaaatgcgagtgatacgttgcaacgattgaccaacaacaaggaaactacctcttcttacctgtctccgccgaaaacaacagtaattggtaatagaagaagatcttccagcgttagaagcgccctttcggccttttttggtgctggtaccagcccgacatccaatgtggacgattattcgaacccggcaacccataattataccactgctccgccgttgtcgtccaggtttagaggaaatagtctctcctctgacgttcctagtaatacctatactggcaccggttcttaccaaccgcagagacataggaattcggtgccgtacaccgccattgaccaattacatacaagacaagatacgggcatgagaagggaatcggatcctgttgctttgaagaaatttaccagcggcaacaatgggacattgaaaccgcttatgtcacatcgatccgaatctggctcttcttttgttggtaacgtattatcggactatttgacagatcgcggtttcattaagcagaaactattatataataagaaaaatgtgctggacgtttccattgcgacaagtgcagaatctgttttcttgccgactacaaaaagtaacgaaacagagtatttgtcactgattaatggctctttagaccgtgcgcaaacacaacctctcgtggccactaataccgtcgggaatgaactctctcctttctcccctggcatggacaccttgaatgaaaacaacgatttgtcgctactttcgttacctacacagcggcccattcctgcgaacaccgcaaatatagacagcactgggttctcgaatatggccggtaacacatcatcaacctctaataacaacacaacagatacggattctcttggttcgaatcacaatatcgtaaacaatacaggacaagtgacgcgaaacacgcattcgcattcacgtcctcgatcgcgttctcgctcgacagcttggaatactcagatgccctccttcagctttgccttaatattttgcttgaataggccagccacacttacggacatcaaagtggaacttacttcaaatgtgagaatcgtatggtttaacggccttcctccggccaaaagtgtcaatgaagaatgctataacataggtgctctagattggaccttgaatgcggataatttcaacctcttcataccgcgggatgccaagtctctcgtcgatatcgttgagaaccattcaaataccaggagattaaaagtgctgcagaaattatcgatgaggaaacgccattccttctcgagcaaaaccatgcttaaagaaaatatactgaataaactaaattcgtccgatgcttctaacaaattaaatgccggtgtatatatatttaccattcccattatccttgccaatcatatccctgaatcgctatattacccatcggcaaaggtctcttacactttaagattagcaacaagactagaagatgaacattcacaagtaaacacatcacagccgcatcctacttctctctcttcttctgtggatccacattcgcatacctactgtgatcctaacgaaaattcaagagccgatgataccattgaaggggaaacatacaacaccgatagcaaatcccgtagcaaaactccatttccttcttcatggctgaaaaacgttaaaggccgcttaaaattgaatagttctaatggtggcattgaatgtgacagcaatggttcactcaccgctgctgactctgcgtcacaaagagccgacttaaattccttggtatattcagagtatccactccatttagtgagaactccgcccgaaatatctatcaccacagcaaataaaccactttacataaataaagtttgggagaattctctctcttatgagatttcatttgctcaaaaatatgttcccttgaatggtgaaatcccgattactatcaaggtagcgccattagtgaaaactattaccgtgaagagaattcgggttagttgcagagaaaaaatatccttcagaagtaaagactaccagcacgattttgaccaattagacccattagctggggatccatacaacaccgatagcaaatcccgttag

SEQ ID NO: 5448 - DNA, 1443 bp, Saccharomyces pastorianus
atgacgctgaacaggaaatgtgtcgtgatacataacgggtcacatagaacggtggccgggtttagtaatgttgagttgccacaatgcatcataccttcgagttatgtcaagagaacggacgacgcgggaaaggcaaagtttatattcggaacctatgacatgatagatactacagcggagaagcgcagtgacgacgaggtctatacgttgatggacagccaagggttgccgtacaattgggaagcattggagttgcaatggcggtatatgtacgagactcaattgaaagtttccccggaggaattgccactggtgatcaccatgcctgtcaccaacgggaaaccggacatgagcatattggagcactattatgagctggcgtttgacaaattgaaagttccagttttccagattgtgatcgagccgttagcgattgccttgtcgatgggcaagagctctgcgtttgtgattgacatgggtgcgtcaggttgcaacgtgacccccatcatcgacggtatcgtggtgaagaatgccgtagtgagatcgaaattcggcggcgatttcttggatttccaagtacacgaaaagctagcccccatgatcaaagaggaaaacgacatggaaaacatggcagacgaggggaaaaattccacagatgtttggcacgatgccaacacgtggatccaacaattcaagtccaccatgctgcaagtgagcgaaaaggatttgattgagttagaaagatattacaaggaacaagcagaaatatttgctaggcagcaggagcagttgaagcagatggaccagcaactccagtacacggcattaatggggagccccaacaacccattgctacagaagaaaaactttctattcaaacctttaaacaagaccatcaccttagacttcaaagattgctacgagtttgcagagtacttattcaaacctcaactgatatcggacaaattttcaccggaggacggcctggggccgctaatggcgaaatcagtgaagaaggccggcgccagcataaactcaatgaaagccaacacctctgccaacccgaacgggttgggcacaagccacatgcacgccactgctggcgacaatgccaacggcagcagcagcaacaacatatcgccagaacaagtctactcgctactgttgacgaacatcatcatcacggggtcctcatctttgatcgaaggcatggaacaacgcataatcaaggagctgtccattaggtttccgcagtacaagctgactacattcgccaaccaagtcatgatggaccgcaagatccaagggtggctgggcgctgttacaatggctaaccttccctcgtggaacctaggcaagtggtactccaaggaagactacgagtcgctgaaaagggacggaaagcaatcgcagcctgctaacgcgagcgccaacacaaactag

SEQ ID NO: 5449 - DNA, 1497 bp, Saccharomyces pastorianus
atgcctgcggttacctacagagaagcaagacaaagtgcaccggtgatttcaataatgggggcaactaagattttaatggacagtacccatttcaatgagatccgcagtataatccgttcgaggtccgtggcatgggacgccctagccaggtccgaggaactaagtgaaattgatgcgtctacagccaaggcactagaatccattcttgtgaagaaaagcaacggcggtggtgactactcatcatcgtcgaacaatgcagactctgagttcaaagtgaacggcaaaacgttgatgccattgattcacttgctttccacttcggacaacgaagactgcaagaaatctgtgcagaacttaatagccgaattgttgtcgtcggagaaatatggcgacgacacagtgaagtttttccaggaggaccccaagcaattggagcaactgtttgccgtgtcgcttaacggggacttccaaaccgtgctgatttcagggttcaacgtagtgtcgcttttggtgcaaaccgggctgcacaacgtgaagctggtggagaagctgttgaaaaatgacaacatgctcaatatcttgcagaacattgagcagatggacacgtgttatgtgtgcatccgtcttttgcaggaactcacggtggtaccagagtaccgcgacgtgatatggttgcacgagaaggagttcatgcccacgctgttcaagatcctgcaacgcgccacggactcgcagttggccacgcgcatagtcgcaacaaactcgaaccacctggggatccaattgcagtactactccttgctgttgatctggctgttgaccttcaaccccgtgttcgcgggcgagatggtccagagatacctgagcgacttcctggacctgttgaagctggtcaagatcacgataaaggagaaggtctcccggttgtgcatatcgatcatcttgcagtgctgttccgtgcgcgtcaagcagcacaagaaggtcgtcaagcaactgttgttgctcggcaacgccttgcccacggtgcaaagcctaagcgagagaaagtactcggacgaggaactacgcgatgacatcaacaagctcaaggaaatcctggaaaacgagtaccaagaactcacctctttcgacgaatacgtcgccgagttggactccaagctgttgtgctggtcacctccacacgtcgacaatggcttctggtccgacaacatcgaagagttcaagaaggacaactaccgaatcttccgccaattgatccagctcttgcgggcaaaggtccgccagggcgacgtcaacgcgaagcaagaaaagatcattctccaggtcgcgctcaacgacatcacccacgtggtagagcttctccccgagagcatcgacgtcctcgacaagtctggcggcaaagccgacatcatggagttgttaaaccatacggactcccgcgtgaaatacgaggcgctcaaggccacccaggccatcattggatacaccttcaagtag

SEQ ID NO: 5450 - DNA, 399 bp, Saccharomyces pastorianus
atgtggaggggcgtgctcaccgcaaccgtctcgggtctcggcgcgtgcgtatataaggtctctggttcttcattaactgaactactctctcgtgtcttctctcttaccttgttcttgtataatataacatcaagcaagcaagcaaacacaaacaagctatctctccactctcacaaaacaaacactcaatcaacaatggtcgcctttttagaactaacctcagccgtctctcaacctttcgtcatcccttctctttccccagtgtcgcagccaagctcgagaaagaactctgacgtcagcgccgacgacttgaacctggcaatcgccaacgctgctctgttgggcgctgccgcccccaacaacgcacaccccagaaagaactctttgacgctgttgtaa

SEQ ID NO: 5451 - DNA, 651 bp, Saccharomyces pastorianus
atggatgaacacacagggaggcatgaggccccggaagaagcgcagcaagaacggaaagaaatgggtcaactagtcaagaggagccatgctatcaggatcatcgcagcgctgggcattgtcgggctgtggatgtttttctcctcgaacgaactatcgatcagcacgccaagcctgatcaagacggacgctggcgccaaggaggtacaggaggcggcagctttgaagaatgaggcccggctgaaggagattgagcagcagacgatcatgccgctgatgggagacgagaaggtgaagcaggaggtgggccgggcgtcgtggaagtacttccacacgctgctggcgaggttccctgatgagcctagcgcggaggaaagagagaaactggccacgttcatcgagctttacgcacagctgtacccgtgtggggagtgttcgtaccactttgtcaaactgatcaataagcacccgatacagacgtcgagtaggacggccgcggcgatgtgggggtgccacatccataacaaggtgaacgagttcctgaagaaggacatctacgattgtgtcaccatcctcgcggactacgactgcggctgcagcgacgacgacggcaaaagagtatcgctggagaaggaggccaaacagctgggctag

SEQ ID NO: 5452 - DNA, 300 bp, Saccharomyces pastorianus
atgatgaatttttttttaaatagggctaaaagaactaagaaggttggtatcactggtaagtacggtgtccgttacggttcctctttgagaagacaagtcaagaagttggaaatccaacaacacgctagatacgattgttctttctgtggtaagaagaccgtcaagagaggtgccgctggtatctggtcttgttcttcttgtaagaagactgtcgctggtggtgcttacactgtctccactgctgctgccgccactgtcagatctaccatcagaagattgagagaaatggttgaagcttga

SEQ ID NO: 5453 - DNA, 1404 bp, Saccharomyces pastorianus
atgtttcccaatagcatagtaaggaccaggaccggtctttatcgcttatattcaacccttaaagctcagcacgtggaaatcaacggtgtgaagtatacgacaaaccccaagatatgcaacgttacagactcaataatcaatctaacagataaagcattacatttaaaggaatcacatccggtaggtattcttcgtgatttgattgagaagaagttaatcgacaaatcattcaagacctttaataatttcagaccggtagtcactactatggaaaacttcgactctttagggtttcccaaggatcatcctggaaggtctaaatcagacacctattatataaatgaaacacacctgttgagaacacatacttctgcccacgaattggaatgctttcagagaataaagaataatatagatggcagtaaagccgggtttctaatatctgcggatgtttatagaagagatgaaattgacaaaacccattatcccgtattccatcaaatggaaggggccaccatttgggagcgaacggaggccaaagatggctcaaaggaacctactcatattgttaagatccgcgatgatattaaatcggttgaagatcaactgaagaaggaaaatgttaagataactgtcagcgatgacactttacccttgaaagaggataatcctaaacaggaatacatgaccgatttggaggtagatttatgttcccaacatttgaaaaggtccattgagttagtcgtttctgaagtcttcaacaaaaaaatcaccagtatggtcgaaagtaaatcaaacgatatacctaaacagttgaaagttcgttggattaacgcttatttcccctggactgcaccatcatgggaaatagaagtctggtggcaaggggaatggctggaactttgcggttgcggattgattcgtcaagacgtgctacttaaagcgggctataaaccttctgaaaccattggatgggcctttggtttgggcctggaccgtattgctatgcttcttttcgaaatacctgacattagactgctttggacatctgatgaaagatttttgaaacaattttccaaaggttcgattagctctttcaaaccatactccaaacatccaggctcatttagggacgttgcattttggttgccaatggataagcctgatgttcatcaggttcatgaaaacgatttaatggaaataatcagaaatattgctggcgatttagtagagagtgttaagctagttgatgatttcactcatcctaaaaccggtagaaaatccttgtgctatagaatcaactatcaatcgatggatagaaatctaacaaacgctgaagtcaacgctttacaagatacggtttgttctaaattggttgaagaatatggtgtaagactaaggtaa

SEQ ID NO: 5454 - DNA, 267 bp, Saccharomyces pastorianus
atgtatcctctctgtctgacgttcctgtgcggatccgtcttgcacacaatgcacccgattggtgcactaggtgtgctactcttgacgtccacagcaatgtacgtcaattcaggccattggtttaagaaatacctatatacatatatcgaatacggctctgataagtccgcgtctatcagcttcttgatgcttgcaaactgctcttcgttgcgtatgtccaatggtttgtacactatttccatggttgcgcccagcacctctctttga

SEQ ID NO: 5455 - DNA, 78 bp, Saccharomyces pastorianus
atgaaccccatcccttcatacaggttcagcgccgccacattttctacctctgtctctagcataatctcgtcgcagtga

SEQ ID NO: 5456 - DNA, 1197 bp, Saccharomyces pastorianus
atggatgtatgcagggcctcaagaatgaatcgcatgctcacggacaacaccagggctctgaatgtgccccccagtctcgctccccctcaggagaggaccattttcgccaaggagaggatatccattccagggtactatgagatcatccagtttctgggcaagggcgcctatgggaccgtgtgttctgtaaagttcaagggccagaatccacccgctaagattgcagtcaagaagatcagtaacatctttaacaaggagattcttttaaaaagggcgattcgcgagttgaaattcatgaattttttcaaaggtcataagaacatcgtcaatctgatcgacctcgagattgtctccagctcgccctacgatggactgtactgctaccaggagctgatcgactacgacctcgctaaagtgattcactcctccgtgcagctatcggagttccacattaaatattttctttaccagatcttgtgcgggttgaagtacatacacagtgcagacgtcatccatcgggacctgaagcccggaaacatcctgtgcactttgaatgggtgcctgaagatctgtgatttcggtctcgctagaggtatccataccgagtttttccaatgccaaacaacaaattccgctgtgcagccccatataaccaactacgttgctacgaggtggtacagagcacctgagctgcttttgtctaaccaaccgtacgacaagtccatcgacatctgggccgtcggctgtatccttgcggaattttatgcccggaaacctgtcttcatggggcgagattccatgcaccaggttttcgagatcattaaagtattgggtacccccgaaaaggaccttctaatcaagtttggcaccattaaagcctggaatcttggcaaaaacagcaacaaccctgtatataaaaaaatcccatggtctaatatgttcccctttgcgtcgcacgaagccatagacctcatcgaatcgctactccattgggactccacgcacaggctgaacgtggaacaagccatatcacatccgttcctaactgatgtacggaaaccggacgacgaaccagtgtgtctacaaggccccttcgacttcacttatgaatccgagttgagttccatgtccaaattaagagaccacctgattaaggaagtcgatgatttcaaaaccgagctattctcatctctgtaa

SEQ ID NO: 5457 - DNA, 3195 bp, Saccharomyces pastorianus
atggatcacctaaaaccgatacaaaagggaagaagacgtggtctttccattaacagtctttcagagactcagcagtctgctatgaatagttctctggaccaccttcaaaacgatttaagcaggatagatatccaatggaatagagttctttcggataacaccaatcctctggaactagcacttgcgtttttggatgatacatctgtgggactaggtcacaggtacgacgaattcaatcaattgaagtcacaaattggcagccatttggaagacgttgttaatgaacacagccaagtctttaacactaacgtggcatcttatgggaaggtcgtaggctccattatgcaggctcaagaacaaaccttaaatctgaaaagatgcttgaaggaagcaaatgagaagattaccacggacaaaggatctttacaggaattgaatgataacaacttaaaatatacgaggatggttgatgtcttggtcaatattgaggagctattgcagattcctgaaaaaattgaagagagcatcagaaaggaaaatttctatcaggtacaaattctattagaaagaggattcatactaatgaacaacaagtctctaaaaacagtggagattttgaggcctataaaccaacaactagaactacaagagcacttgcttttcaataatctgattgaagagattcatgacatcatgtactccaaatctaacaagacgaatttcactcaagtgacaaataatgatattttcaagatcataagtgtgtcccacaacggtttcaccagcttggaaaattatctttataacatagtcaatatagatattatggagcatgctaaggctataaataaaaacctcgagcaattcatccatgaccagtcattaaataaaggggaagtcatgctgcaagagaatattgcatctcattcatcgttggcatcatctcggaaccaagaaaacgaagggtttagcagaattggattcttgttaacgatcatcaataacattaataagctacctattgcattcaacatcatagcagagagagccaaagaggaaatccataatatcattgtgaagagtacagattctatacgtttgaagcatccttctttgctcaaaatggccagtagcttgaaaaatgataatcagttcggtctgcccgtacaagacatactttccattattttgagagaatgtttttgggaaattttcctaaagttactttatgctattcagtgccatcgcgttatttttgaaatgtcaaacgttcttcaaccaacctcttcagcgaaacctgcttacaagttcgataaaatttggaccaaactattagacgaaatagagttgctacttgtaaggtacattaacaaccctgggttgctaattagtagtgctaatggaagtgataaaacaataaatggcacaaccaataaagcccctaatttacctaaaaggaaaaatcccaaaattttttcgctggaacataacattgaggataactcttctgcaaaggaccaagcctttgaattaaaagctttattgaaagacatttttcctggattctccgtttcttccaacatggatttggattctatttatgtcaaggatgaatcatttgagcaagatgaaccgttagtcccaccctctattttcaatatgaaagtgattttagatccgtttttattatttacacagtctacatcaacaattgtgccaactctcttgaatgaaagtgttgttccgtcattgacctttttccatgattatgtgaataaaagttttcttccaagaattcaaatgactctgaattatctattcacaattgaagtagaatctaacaatccatacgcgttagaatcatctgacgaaaaccataacatattcaaaacagcactagatttccaaagactattttacaacctgctgaatgttttcaatacagcaaacactttcagaacaaagatttcatattgcattttggaccttctggaccatttttgcaactactactcaggactattcaataatctaatcggcacttctgacaggcacttgagtagaaaaattatcacaatatggctacaaaatggcactttgatggatcaggagcaaatgattttgaatggagatgaaacacttttcaatgaagaatccaaaggattatttaaggacataccttgtttttatcaagccggcaaaggtttaagtaaatctgatttattcaataacttgaccttggatacaatcctgcggttttcttccactgtgatatggatcttaaattggctgccaggtttgaagaaagccattaatattgaggaattaaaccaaaagcctatgttggatgccgataaattaagaagcaactggtcgttttctgaatcaatgaatctgaatgttttaaacccaaataccaacccaacctcattgggaaatttaaagattttattggatgacaaggcttccaaaaaatttgatgaaactgttgacggattcaaagcgttgaaatttaaactaatgaccatactaaggctcaatattagagccttgtgtatatatgacattgggtcattttttcaaaataccaagatttggaatatggatgtgggcagtattgaattagatcaaaatatagcttcattaatctctgaattgagaaggactgaaaacaaactaaaacaacaattgtcagaaaaggaaaaaaacgcagtgcttattggtcttgatataattaacaattacgccttaattaaaggcgctaactccataaaagtattgaacaataacggaatcaagaaaatgttaagaaacgtaaacgtcttacaacatgcttatagaaatctttcttcagagccatccaaaattaatatgaacattacaatgaacttctattctctatgtggttctaatgaaactgaattgttcagatatgtggaaaggaacgaactatcgtattgttccatcgatgatttgaaaactatactaagattgcagttcagtgaagaaatgcaacgtcaattgaagagacaaagcactaatgccaccaaaggctccataaaaccttctaacaagagatatactgaagctctagagaaactaagtaagctagaaaaagaacagccgaaatcaggagcacagtcgaaaattgaacagcttaaaaagagtttgaaaacagaccatactacgaaatag

SEQ ID NO: 5458 - DNA, 228 bp, Saccharomyces pastorianus
atggtaggaccgaaccctttgaaaaacgcactaataccttctttagcatataaggtctttgctacactagaaatagaattaccgaatttgggcttttgtaaattgtcagtttgcatgacagatttaatgacatccaatggatataccatcaaccataaggcggtaccggataatgcaccaaaaatgcatagtttccatgtaggaatgtcccttctttccaggccatga

SEQ ID NO: 5459 - DNA, 462 bp, Saccharomyces pastorianus
atggccagtaagtgggatcaaaagggcatggacatcgcgtatgaggaggctgagttgggctacaaagaaggcggtgttcctattggcggatgtctaatcaacaataaagacggtagcgttcttggacgtggccacaatatgagattccagaaggggtctgctacgctgcatggtgagatctccactttggagaattgcgggagattggagggcaaagtttacaaggataccactttgtacacgactctgtcgccatgcgacatgtgcactggtgccatcatcatgtatggtattccacgctgtgtggtaggtgagaacatcaacttcaagagcgacggtgagcagtatttgcagacccgaggccacgaagtcgtagtcgttgacgatgaaagatgtaagaagattatgaaacagttcattgacgagaggccccaggactggtttgaggacattggcgagtag

SEQ ID NO: 5460 - DNA, 921 bp, Saccharomyces pastorianus
atgtacgtaaatagagcagggaaaatggactgcaagatattgatactcggggccggcggccttggctgcgagatcctgaaaaacctggcaatgttgaagttcgtcaaagagattcatatcgttgacatggacaccatcgaactgaccaatctaaacaggcagtttctttttcatgatgcagatataggtaagccaaaggcccaggtggcagcccactatatcaactcacggtttcctcaactccaagtcgtaccgcacgtgcgggacctgaccactttgcactcgagtttctacaagggctttcacttcatcatctcggggctggacgccattgaaccccgccgctttatcaacgaaaccctcgtcaagctcacgatgaagtcaaactacgaaatctgcatccccttcatagacggtgggaccgaggggcttaagggccatgtgaaaacaatcatcccgggcatcactgcatgctgggagtgctccatcgataccttgccctcgcagcaggataccgtgcccatgtgcaccatcgccaacaacccgcgctgtatcgagcatgtcatcgagtacgtctccacgatacaacatcccgagctcgacatagaatccacagcggacgtgcagtccctcttggagaaatgttatgaaagagctacgcgatttagtatctctacggaaaaattatccacaagctttatcctaggcgtaatcaagagtatcatacctagcgtcagcaccacaaacgcaatggtcgcggccacatgctgcatgcagatggtaaagatttacaaggatctcatcgatctggaaaacgacgataactttactttgatcaattgctcagaaggttgttttatgtatagtttcgaattcgagcggttacccggctgcccggtttgctcttcaagtcctgactga

SEQ ID NO: 5461 - DNA, 648 bp, Saccharomyces pastorianus
atgataacagccactaatacccacttaaactacaatcttgcaaaggcaaggatccggccccccatcgtgaatgtgaataagcaacagctagatatgcaagctaaactgtttttgaccagactatactttaggcttccccgtaccagcttccgtcagttccctgcgagaggtttcccactacagaaaagtttttactccgatctggccactaaagagtctttgatttcaccagagagaataataaataaaacacctgggttgaacttatctatctctgaaagagcgtcgaagagattagctgagatttgtcgtgatagtaaagaaaatctaagaataagtgtagaaagcggtggatgtcatggtttccaatataatctaacactagaacctgcgttcaagtcagatgaaaggagaagcgccagaaatgaagaattttcagatagtgttgacggtggtgattccaaggacatagtgtacgtgttacccgaagacaaaggtcgagtaatcatcgacaataaatcactagagattctaaataatactacactgacgtacacaaatgagttgattggatcgtcattcaaaatcgtcaacggtagactaaaaagcagttgtggctgtggaagtagttttgatatcgaagactag

SEQ ID NO: 5462 - DNA, 1161 bp, Saccharomyces pastorianus
atgtcaaacaacacaggaccacatgcaagaaagatgctgaagcgatcttctttgatatatctatcgtgcatcttaattgtatgcataccgatacttttgcatatataccggcctccaaacagaggagatgaacacgtcaccattcagaataaagaaaaggcaatcacgtgtcccaaagaacggaacaccgaagagttgttttgcgcagtgaccaacccggtcactggatcatacatcgatctatcacaactttcatcaactccaaacaagttaagagacggtcaagaacagaaaaccgggaagaataaacatgaatcctccaagacgaaatggtccgtgagaggttggggctacgacaccaactttacattggggatctgctccagccccgttggcgagactgagattcaacaactgtctaacctaacgggtgcattttacgtggaccatgaagatgaggatagcttggtgtcgattggtgatttcagtacagaacccgtgctagttggtggctcgtccatcaagaaactgactttgaaatacgaaaacggctcgatatgcccgaatggtaaggacaagaaggcgaccttgttaaatttcgtctgtgacaaagagatccagtccaaggcgcagatagcgtacattggtaacctgcacaattgttcctatttcttcgaagtgcgcagcatctatgcctgtcctacatcgaacaagaaaaacgaagtcaacgttgtgggcatcttcatcgggatcttcgccattttcttcttggtcgagtttgccggcagaagatggatctacgctaaattgaacagacacttgaaaaacagcgacgagctgaacgaaatatcgccgtctttggacgagcaacctcactgggacctcatagaagacggatctcgctggagcagattcttcagcggaatcgccaagtcagcgagaaggttcaccaagtcgctggtgagccctctgttcggaggcaggaacaacggtcaaggcggcatccgactaaggacgtctccatctgcctcctcctctagccttgccaacagagagttcttcagagacatggaggcacagaacgaaatcatcgacagcctgggcatcaacagccataccacagaaagcgaccacccgactttggcaggccagagcgtttga

SEQ ID NO: 5463 - DNA, 1350 bp, Saccharomyces pastorianus
atggggcgctttagtaatggagggagtataacgagttctctaactttatctgatttcaccttacgtaatcataaaaagggcattacagcattgcagattatcaaaatgccatcagtttctaaggtgtcagtcctgctatctggtgatagcgatggcctctttgtcatctgggacttggtgactaaaaggcccattacgtgtacacaaatcaaagatcatccacacattatagcgttccaatgggtgggtagcaccgtactgtctattctctgcaaagattccatgctacgaatgttcaagctggaagcatcagccttattatctacggatttagtggttggggaacgtcagtttaataaaacgacgggtttgcaatgggcccaaatttatgaaatgcctgtaaatacattaaattttgcgaactttattatggattctcaagtcgagttaaaagatgggaaggataacgaatcgtatagacttatctgctgtcatactaacgattcagaagctatagatatataccagataatgcaagatccaaaattcaaactacaaagaccttttgataatattaatttccccgaatttttaaagaagcaaagccttctagaaatatttaacgtacccaaggactccaagttcggtattataatgaagttggccaaattaaatgatatcatatttttaggttttgaaaatggatttataatggggttcacaaccacttttgatgaggaactccagaagggcgttgcggatttgatccatatttccaatgaccattacccaaacccaatactaaatatgtgcattagcggggatgaactatatagttgttccacggacggtttcataagcaagcacaagttttcaatagaccttttaacacggcctgcggcagaatacattaaaaatgacacattactgattaaatgttctagtactttgaaagcaagcagaccatctagaatcgatcttcccctaaagaacataagtcacatcgatgtaatatcagacgattacttagtcgtgagtaattggtcaggcaaaacaattgttataaatgagtatacttcagaagtcttgcaaacttttgtgaagacaagaaacaacttggtcgccaacgacagttctatcggagacttaacgaatggtaacaactcaaataccgaatccagcttgaaatcgaagaactataaagtggggtcgatgatcgggctaaaatcttttgatgtgcaatcagatggtttgaaagtgggggaactcagacgcatcaaaaccttggcaaaattcagttggtgtattattggttatgatgacggtaccataaaactcaatagactatag

SEQ ID NO: 5464 - DNA, 492 bp, Saccharomyces pastorianus
  modified_base (29)..(74): a, c, g, t, unknown, or other
atgttaataatagttgaaagagtgaattnnnnnnnnnnnnnnnnnnnnnnnnnnnnnnnnnnnnnnnnnnnnnnccgaacaatgaggtttaacccataccgaattgctttgccatttgtcgcatttgaggatcttgcatcattttcatcatttcattcatatcaggcattcctccacccattccaccgcccattccgctacctccaagcatattcatcatgttttgcattagaccgggattttgtttcagtttttgttgtgcttgttgcatcatttgtggcgatacttttggcatacctggcatattgggcatacctggcatacctggcatatttggcattccaggcatcctggcattggctccgggtgcacccggttgttgttgtgttgcagtttgtgccattctcgccatcatttgctgttgcattaatatcatttccacttcaaatacggatgtacctgaacctttggccacacgaaccattctggtag

SEQ ID NO: 5465 - DNA, 1098 bp, Saccharomyces pastorianus
atgaagccttcaccactaaagattgtccaaatatttggtgctttattatacgtcctcaatttacatcaaactcacccaattttccaacaacagtgtctttctatatctgttaaatggttcgccacaactttattcaataagatcttgaaagataaaaagaagagatcgctatccagggcacacgctatccagattagattaaatctctcgactctggaatcatggatacaaaacaatgatttctgtgttcctaagccggtgcttattgatgatttcatgtggcagcgctttccaatgactttaattcgcgatgttggtgagatagatctttcagatccaatacttagaaatgtggcctcttacaaacctgtaaacaaggatgataaagattggatatacgatatgtcgaactcattattttactatcagtcattccacagaattgcacaaattcaccttgaaccggtgttccaattgttacaatggttgcaagtggctacaacactcgacagcgaggattcattgatatcaacaatgaatttattgccagggctcacaccagttcaattactgaaatctatggagaagtataattatgaactaaatgaaagtaaattcaattctaaattgagaaaatttttgaacaacaaaattaaagatgacaaaatgagcaaattcaatgcgtatctgcaagaacacgaaattccatatttagtgctgccaacgatcgcagaaatgacagatttgtattcaaaaggtcctgattcgcatactttccaaccatttttaccaggtagtattcaagatgacttgtatgaaattcatgatgtaaacactaaacaaagacaggatgaaccacaaatttctcggagcgactcaaacactttagactcttctgacaatgaagacgggactgaaatcgaaaacagagaaaataaagacgatgtaggaaatagtgaaaaggcttatggaggatctgaacgcagcgtggtaaatggaggtaacgatgattattttaaagaactaaatgttccatcttctaccgctcaacgtcctgcttggtcaaataatgatgacatggaacagaatccgtggtag

SEQ ID NO: 5466 - DNA, 1434 bp, Saccharomyces pastorianus
atggacagtgtatgggacgatgctagaattgaagacagcacgatggaagaaccagtgggttcatcccatgctcaggagaaagttgcgctaataaagtcgacgttacttaaactggagcaggaagatatattggaaggcgacccctgggtacaattggtcaggctgattagcgatgaggaacgtgacgaagagttcaccacgtttaaagattacttgagcgaagtgaggaacgttaatgacaaatctattacgggcgtagctttaattcattatatcattgtgtatgaccgtgcagactacatcgagctattacatgggaactcaagtggcgtgaaactagacttgaacctttttgatgacgttgtgggctacacgccgttaatgtggggcttttgtctgcaaagaaggaactgctgcttggaattggtcaatgctttcgacgagataaagttcaatttgactaataaggctgggctgtctgcatgggatatggttcctccctattcgccactttccgaattcttggaacaaaacaatatgtttcgatatcgtactgaaaaccataaagtgccgcaaatatctccaccaaagggctcttcttttctaatgactaataacgacgatgccgctaccaaggaaacgtttgataatattgacttgcaggtagctgggctcactttatcttctgctgcagatgacaatctcttcctggatacggacgataaggacaaggaccattctcaaagaccttctgcttttatcgatccaacatatacagaagattatcatggtacttttaattttgataaattatctaccgatcaatatttggagttttcagattttgatatccctcaaatcttgaacctactaatatcccttcctcaaaaggaacctcatatgacaacatacccagcaggtttaatttaccaatgtactagatatgctgaccacaagataaaatctaaatcgttggtggagtcgctgatcaatctctctttaacgaagatactgattagtgtttcatccaatggggtggcaggattagtctccacagatgcttctttacaggccggtgacattgtgttacaatcatattggttaagttgcctgtcattcctctattattatctttgcagggatgaatcatttttcaaaagacatccgagtgtgttacaagagctgataaacaccattcattccataatcatagagctaacgtcgtctattcattccaggctgatttctttgatagattcaacattactagcatacacgaactatacaagatgtcaaacagaccttatacaaaagagactggaactttttcaagaagagaaagcaggccaagcttttattaaaggaaaagaatacaaaacaattgaagaaacaacaaaaaaaagaacatcagccacaaggccaagatcaggataa

SEQ ID NO: 5467 - DNA, 885 bp, Saccharomyces pastorianus
atgaaggagtgcccgatttgttttgagggcgaccaagacggtgaccagtttggatgcttagaagtttgcagacatgagttccatctgaactgtataagagagtggcacaagtatagcatcgacttgaagtgtcccatttgtaggaccgaatccagccaccttaacgtcggtgacggccaacacgcagtctctgtagatttggagatggggtttatgatcaaacatgctcttgagcatgcagaggccagaaccaccggcggcgaggagggagaggaagaagagcaggaagagcaggaagaggaagaagaaggggaaatgggtaccctgagtgagatgctacaagacggcctggtcatagacgccatcaaggtgatacagtgcggcatttgcggagacacagatgctgctcgactgaacctgtactgccaagactgcgatgcgatataccacgaaacatgtctacgtggactggcatgcgaggtgggcgaacgcaatgcatggcatgagtgcaccgaatgtcggtcccaccagctgcttgagctgcgcatggggtgcgtcagcgaggaccaggtcaccagttatgactcgagagactatatgatattcgccggagaggtccgggacaagcacagcgtccagacagagcagatgtatgacagaatacgacacgccaagcatagcatccagacgcacgtgcggcgagcattggaccagtacccgctggccctgcccagggacacctacaagaacatcaatcagcacgtctcccgcaagctctaccgcttctctgacaacaagtacctgcccaaccagcatgactacgactcgttggcccgcaccgcagtccacgcagagctcttcccccactaccacgtcgatatatag

SEQ ID NO: 5468 - DNA, 2835 bp, Saccharomyces pastorianus
atggatcgagaaatgacaatagtagagagtggcaatcatctcggtgcctcttcaccagctactgatatgcagatcacgatgaactcacccctaataaatgaacacgaaataaaaggtaccacggaaagcataacggaatcttcgggaaatgaagtaccgatggaagccaaacaggcgaacagtccccatatagaaacgggagaagggctatccaaaagccctgatattagtatagaaaaagagatagggaaccctataacagatgaaaacggaaatctaaaattggaacttccagataatctcgataatgcagacttttccaaattactagaattcgatgcgaaaaatgatgaagctttgtttaactcgaatgatctattatcccaaacaatgaacactgtaaatgaaatcaatatcgacggtattcctgacgatcacaatgaggaagttacaccaaaagatagtaccagtatagaggcagtgacttctcatggtgatgaaaaggagaaaacccaggatacttcgggagcaatgaaagttgaagaaatggaaggttttgaagaatccagcataaaaacagatcaaccaacagctgacgccatttatgcccagaagaatgaatcttcagcagaagaaaatgatggtacaccgccaacgataattattgaaaaggacaatccactccatacaagaaacaattcgataacaccgataatgtttcagcagcacgaactattagcacaagcgtcccaacacagcgttactgaaaacaacagcactgacgcggaaacttttgaacgaaaaccaagcgagccgtctaacgagaatttacctctgcccaatgaacaaccgactatttttgcgtacgcgagactagattttcaaagttttacattctatgtgcaaacattacatgcaataattggtaggaggtctgagaatgacttttcccacaaagttgacgttaatcttggcccttcaaaatcgatttcgaggagacacgcccaaatattttataattttggaacaggaaggtttgaattatctataatcgggaaaaatggggcctttgtagatgatatttttgttgaaaagggcaataccgttcctcttcgtaataggacaaaaatccagattgggcaaatcccatttcaattcattttaccagagcaagaacgcaacgaggatagtaagagtccagaaaaccctgatataacagaatctgaaataaaactaaaagacccaaagaaaaacgagcttaaatcaaaaaaaaaggtatccactgggacaaagcccaagaaaccacaagcaaagccggcggttaagaaggacaaaaagccaccgaaattaccaaagaaagtttacacattggaggaaatcccactggaatataggacgaagcctaccatatcttattctgctatgctgaccacttgcatacgaaagtactcgaccgccaaagggatgtctttatcagaaatatatgcagggataagagagctttttccctattacaagtattgtgctgatggctggcaaagttcggtaagacataacttatcactgaacaaatcttttagaaaagtttctaaagaaggtaaagggtggctatggggtctcgatgaagaatatataactgagagagaacgccagaagaaaaagcaaagtgagatggctatagcgaaagcgcatgctgcgcaattaaagctcgagcaacaacaacacagacagcagcaagtaccatctcaaaagggcaaaaaagatatcgtttctcaaaagtcacctgtaccagccagaaaacaaaacatttctcaaactcttgcagcaaacagggctgcctctaacaagaaaaatacagcgagcgataaccaaaggacaatgaagtatctgcaagaacagctagttatcttgacacgagatcgaaagggattatctaaacaagtgatcgctgcaattttaacgcaagcccttgcaatgactataaatcaagtaacacaagcagcaaagaacaaggggattacaggtaatccacttaccgctttgatggacaagaatcctcagcatttgaatctaatcttagcagctgctgttaatgctgcaactgcaaaagtcacaaaaggcgaagtaaaacaattggtaaatcctgaaactaccgccgctctagcagccaaggctcaaaattccaaaccaataactcagccaatagtacaaacgccgaatgtgccagaaagacctgcaccacagccatctgcatctgcttcatcacattccatcaactacatgcatgataaaccaccaggtccttttgacccatcttcattatctcgtttttttcaacctagacaaaacgctagagttgcatcccctgcgacagctccagttccagtaacaattgcgcagagtatagatttaccgcctaagcctacaccgacacagaatagtggtggtgagagcgaaagcggttccagcagcagcacagcatccagcagtgaaagcgaaagcgacagcgacagctgcagtgacgatggtagtggcagtggaagcgatggtagtggcgatggtagtagcactagcagtgaaagcgaaagtgatagtgatagtggaagcgaaatagatgagaaagaagataaaggccaaagcgaaaatgctagacacaatgataccgaggatgatgttgtgcataataacgatgggagtagcaatggtcatgacactttagagactgatgaagagggccatgattctaaaagacgaaagattgacgaagagatcgactcagtgaatatagtttccgaggagaatggaggcacggatagtaacattaacatatcgtaa

SEQ ID NO: 5469 - DNA, 354 bp, Saccharomyces pastorianus
atgcctgaatgtgtgtttttcagcaaaaacgggtactgcacgcaaagtccagactgccaatatctacatatagatccagccagcaagatacccaaatgtgagaattatgaaatgggattctgccctctagggaatacttgccccaggcgacatattaagaaggtgttttgccaacgatatatgaccgggttttgtcctctgggtaaagacgaatgtgacatggagcatccacagttcataataccggatgaaggtagtaaattaagaataaaaaaagatgatgagataaataccagaaaaatggatgaagaaaaggagaggcgtttaaatgctatcatcaacggggaagtttaa

SEQ ID NO: 5470 - DNA, 345 bp, Saccharomyces pastorianus
atgagtttaattcaccttgatacagcaaagtatccttttaaatttgagccctttctcaggcaagagtactcgttttcactcgatcccgatagacctatatgtgaattttacaactcgagagaaggcccaaatcgtgtcccagagggcccctatgtcctaaaaagcacgtattacccattttccaaaataaaatcgtttgcaggcattggcttcgtggattatgcaagaagaatgaccaatgtgaatacttacatgaatacaatcttcggaaaatgcctgaatgtgtgtttttcagcaaaaacgggtactgcacgcaaagtccagactgccaatatctacatatag

SEQ ID NO: 5471 - DNA, 1062 bp, Saccharomyces pastorianus
atgtatgtaaacggtaactatcaagcatacagaagaaagcaagtgagagccgtcatgtcaaacattgtgggtatcgagtacaaccgtgttacaaatacaacttctacagattttcctggcttttcaaaggatggggaaaatgagtgggatgtggagaagtttaagaaagacttcgaagttaatatttcatctctagacgccagagacgctaattttgacttaatcaacattgatacatcaatcgcaaatgctttccgtcgtattatgatttcagaagttcctgccgtggccgctgaatacgtatatttttttaataacacatctgtcattcaagatgaggtcttagctcatagaataggtttggtcccattaaaagttgacccagatatgcttacttgggttgacagcagtttgcctgatgatgagaaatttactgacgagaatacagttgttttgagtttgaatgtaaagtgcacgagaaatttagatgcaccaaaggattctacagatccaaagcaactatataacaatgctcatgtctacgcgcgtgatctgaagtttgaacctcagggtagacagtctaccactttcgctaattgtccagttgtcccagctgaccctgatattttactagctaagctaaggcctggtcaagaaatttcattgaaggcgcattgtattttaggtgtcggtggtgaccatgctaaattttctccagtttccacagcctcttatagactattgccccagatcgatatcctgcagccaattaaaggtgaatctgccagaagatttgaaaaatgtttcccaccgggcgtcattggtattgacgaaagttcggatgaagcatacgtcaaagatgctagaaaggatacagtttctagggaggttttgagatacgaagagtttactgataaagtcaaattaggaagggtgagaaatcattttgtctttaatgtagagagtgctggtgccatgacaccagaagagattttctttaaatctgttagaattttgaaaaataaagctgagtatttgaaaaactgtccaatcactcagtga

SEQ ID NO: 5472 - DNA, 1356 bp, Saccharomyces pastorianus
atgccgttgaaaaagcaaaaggaacttaaaagaaaggctgccgcatctaaacaggaattctcttggaattcattgtacatgaaccaagacgccgttttaggtagtgtggctgccaaattaggtttagaaaagtcccagttgattgatgcagagaattcaaattcagcagttaagcaagcgctggctgaagcccatgtgattggtgacgttaggaaatactttgaatctaaaggtctcgaattgaccaagttctcgcagctgaaatcgacgaaccaaagagatgatagagtaatactcgtgaaaaatttcccttacggaacaactagagaggagctcggcgaaatgtttgtaccatttggtaaactagaaagattgctcatgccaccagctggtacaatcgctgtagtccaatttagagatgcaacatccgcaagggcagcgttcactaaattatcatacaagagattcaaagatggtattttatatctggaaaagggacctaaggactgtttaactaagcccgcagagtcggatgacttagttgatgaagcttctgcaaaggaagaagaagcgccagtcgaaataaagccttcgttgaacgatctaatggaaacaaacaaagatactaatgaggagacatcagccacccatgacgaagatgttatcgatggtccaaccgtctcaatttttatcaagaatttaaatttcactaccaccaatcaagatcttacagacagattcaaagtatttactggatttgttgttgctcaggtaaagacaaaaccggacccaaaacatcaaggcaaaactttgtccatgggtttcggttttgtggaatttaggaccaaagaacaagcaaatgctgtcatatctgctatggatggcaccgtaattgatgggcacaaaatccaattgaaattatctcacagacaagcatctcataacaataatacgaatgttaaatccaagaagaaaagcggtaaaattatcgttaagaatttaccatttgaagctacgagaaaggacgttttcgaattattcaattcttttggtcaattgaaatccgttagagttccaaagaaattcgataagtctgcaagaggttttgcatttgtggaattcttattaccaaaggaagcagaaaatgctatggaccaattacaaggtgtccatttgttaggccgtagattggccatgcaatatgcagaagaagatgcagtggatgcagaagaagaaattgctagaatgaccaagaaagttagaaagcaagtcgctactaatgaaatggcagctttaagaaacaaaggtggtagaaagaagttagagcttgatgatgaagacaatgaaggcttttag

SEQ ID NO: 5473 - DNA, 3444 bp, Saccharomyces pastorianus
atgtccgactatttcacgttccccaagcaggatagcggtgacgtgacgaaacagtcggggactccgtgctctactcggaactcttcaaggaatttggagctgccgaagaattaccgatccttcgggggcagtaacgatgagctggcgtctatgtactctggggattctcagtatctgatggatatgatacctgactccttaacgcttagaaatgtgcccacattcggaagtccggccaatctctcaccgtccgatggaccggatgccaaggatggctcggatgtaaagctcgatgactatatacttcctaagtcagacctcagatcaccttatcatgtcaacgtgcctatccctaagaaagcgcccaagggagaggggaaggtgaagatcaaaccgaaggctaaggataaggctgaaacatccgatctggaggcggaaagcgcttttgaagattccccggaatttgttagggaatttccgaccgatattttggtcgatagattccacaagtggaagaaaatacttaaaagtttgatcgcttacttcagagaagctgcctattctcaagaacagattgcaagaatcaattaccaattaaagaattctgtgaaattcgctttcctcacggatttggaagaaggatcgaacaagctggtcaatccaactgtctcgaaggtgcctgccaagaaacctcagccggtccttttggctctcaaaaaaaatgacaacaaacttcagttagatgtggaggagccacaacccgttcagccagaactcccagagcaagtaacctctgcctcttctggtttcatgaagtttggatctggatccattcaagatattcaggtcattttgaaaaaataccatttatctttgggtaatcaacaatacaagatttcaaaggagatagtagcgtctcttgttcccaaactggcaggactgcgtaaggacttgagcgctaaaattaaagaaatcaaagaattaaacggcgatttcaggactaatataggtgaacatgtcaaaataacaagtaggcttttgaacaagtatattgcctcggtgaaatttgttgatagaacatgtgacgcggataataaacaaaaggaaaaactaaaaccaaagcacgacccatatcttttgaaactgcaacttgatttacaattgaaaagacaattgctggaagaaaactaccttcaagaagcgtttgtgaatctgcagacagctgcactgcaattggagaaaatagtttactcgaaaatccaatgtgccttacagcgctactctgccttaattgattcggaagcacgtttaatgatcaaaaatgtgtgccatgaattgcagcaaggtattttatccagaccaccggcgctagagtgggataatttcgtcgctcatcatccaacttgcttgatgaatctaaaatcgaatgacccgttaccacaacccagaaaactatctgacattgtttatcccaacatgaaatcgccgttggccaaatgtatcagagtaggatatctattcaagagatcagaatcatcgaagggttttacaaagggttattttgtgttgactacaaactacctccacgaatttaaaagcagcgatttctttctagagaacaagccccttcgttcaaaaaacaaggccactgaatactctagcaatagctctgccgataaaaacggcactgctaatggtaatcggccatccagtaatgggacgcaagatttgaaattaaccaaaactaggaagggaatgacttcgtccaacctacatccagtgtccagtttatctttgaacgattgtagcttcattgaaagtactgacatgatcttcactttaagaggatatgccaattatcacttttcggaggatccatcacttacaacagattcaagtgccgtttctaatgcaagtacactgtctacaaagaaaaataagcatcaacggacgccttctactctttcaattgtgtccgttccaaaattcttgaagggcacatctaagtcaaaagaacaaaaaaaggttaagggaaactcttcggaaactaaggattctagcattaataacaagacaaataaagacaaaaatgttgaatggactttcaaaatttgttttgctagttctgaaccaactcctgaagaattaaagacttttaaaaaatgggtccaagatatgaaatcccttacaagctttaacaatactttggagagatccaactttattgaagaaaaggtgttgaaaagtagaagttacaatagtgggaagaactcccaaagctccaaactcaccacggctactacagcagtagagagctttgttaacctctctgaaaaggcaacgccatcttcttctgtctatatgctaaacactaagagggcaaaccgtcctcggtatattgatatcaatggtgcaaatacgaatgcgggtgctatgaactctgtatataggtcaaaagtcaatactccagccattgatgataacggtaatctagccatagtaggagaaagaaaaaacagtgctccgcaaaatgccatgagttccgcattcacaatgccttcctcatcgcctcattcgcctcgttctgggacacataacctttaccaccattcagctgacaatttggcagcttctcctacccaaaaggtatcgccttttggagaagtacctcaggtagccgttaccagtcacggaacggaagcgatcatttcagcaagtgcgtattctgatgacagtcataaatcatctcgtgcttccagtgttccttcgattgtcaatcagcgaaggacatctttaccatcattattaaagaatgtacctggtagttcacccagttgtgtgccactggacggcaatgcaaacggatattttggaataccactgaactgtaattcagagtcaagaagaggatccgaactctcagcttttgaaaaccagtcgcctttgtatgaagaaggtagaagtcaaaatttcagcaactctcgtagaagctctgccggctatatgccccagcagtatcctccaaaggtgaagctgaatgattcggaattaaatcacaccaacccaggtatgtcgcaatcaaatccggattcaaaccactcaccgaaatctaaagatattaaaccaccttacaacagcctgaagaagacatctagtgccggaaacgttccactagtgcgtaccgaatctaatgaaaaacctttttattcaaataaaaacagaagtagtaatagtgtatctgtgtctaagaatgaggctacgaagacgcatccaataagaacgcacagaaagaacatctcatttggttctttgaacagcgtaatgaacaacaagaagaattcaagccaagcttctgaaaaaagtagaagaacttcatctaccggtattgaagaagcagatgaagaagaggaccatatcaagctgaatcaatccttatattcttag

SEQ ID NO: 5474 - DNA, 921 bp, Saccharomyces pastorianus
atgcgcattagttatttgatgactattggaaatatcgaacattcctttatcagtagccttttcttggtaacgtctgggatttctgttaaattgggtttggcagaatcactgtaccaaaagctacttataaatgtcccaaagaagggcgtcaaagtaggctgtaaccgacatattaagcatgtttctccaattgttacgaacttcgaaaaatggtctgataagcggaaaaagttatactttaaagatgagaaggaaatgatggaaaagaataatttggggaattttgatctggaaaataatgtgtacggcaggctcttagcgtccccaatgagggcagaaaagatctcaaaacttaaatcttgtagagagttactaattccattaaaagtaataccaatggttggaaatgatcagcatgctgaaaacagcatgctaaaactggcacccatactagattattccaaaccgtacaaaagttcatacatattgaattcagcttctattgtgcgggacaatttagcagctgcaacatcttggttcccactttcaatattacaaggttccgcctcgagaaaacttgttgtgaatacggcaacattcctatcagaatacgacgttcaactgcgggaacttataatatcaagactttcagaaataaaaagcgttgggccttcttcaaaagacagtgttctacttatatataacgaaacaagcacaataccaattgaagtacaacgtgttaaaggtgccgatggattggaatttacgcagtcgattttcaacctgggatgtcttcaaacgtttgcatcagaaccaatgataaataaagacgtaattaaggagggtatttacctggacgccaacaatgacaaggacctcatcaaacacctttacaggtttgtattgttctcgctcgggtag

SEQ ID NO: 5475 - DNA, 2247 bp, Saccharomyces pastorianus
atggttcataatattgagttgaaatttgacaataaaataagacatcatcttttggaatatgcttccactgcttttgaaagaaaatctatgaggttttctttgacttataagtccgtaactatattaaaagagttgctaggaaacgtcttaactggtgtcaaaacatctgttgaagactacggttccatgctcgaggatgatttggctagtaattcggaattcatcgaacgttttgaagaacttatcagggacgttccaagcgatgactttgattatgttgataattatcttttcagattaatttcccctcaagtgcagattaaatctgacgttgaaaggaatgcggcagttattttggctgctagggatatagaaataggcattatcgatatagtacaagtgtatggaaaatctgggaaaagaattccggttgacgttgatactattgtagaaacccgatatacagctatttcaaaagatatacaactgttcacgttattcaagaaagatttggaaggtcctgaaggtcggttcttccataaaaatggatacgggttagataaagagtccgatatatggcccccctggattcccctagaaatgtgttttgacggatctctattagataagcatgttttcctgaagcgaagatcaatgttcttaacatatgttgctcctaatcccttattttttagtgcaaataacacgtcagctttttcctgtgattcgagatttcgtatcgcctttccaggactggttctaacatctgattgtcaacagtactgtgcagtatatgcaatcgcagaggatttgttatccttcggatcatctttggacgagaagattgtaaagctttctagggttttgtttactgacgaggttaggaataacctggagaatcttgatgtatccgttgttacaacactacaagatagaattaaagagttatattatacacgggcatatctaaaggttcatgatccaaacttgtttaggaaatcaggtcaggagttaacctttgacattcaaactagtacattgaaattgacactccttatgacggcaatcaaaaaaacgtatgataagatggggagtgggaagaaagcgaaacagaaaaaattgaggtggcaagttggaacagatgaattgatttgggagttgtatgatgaaagtaagaccccttttgtaaccatcggacttggaccttctaccttcattcgttctgagacatctgacggcgccaatagtaataaaatctccatctcctcactgcaatgttttaatcaacaggaaaatcctgttttcactgaattgctggctccattttttgaaaactcgtcctataataaagacgcctcaatggtagagattttttggattatgggtccgtcagttggagggatttccgatttgcaagagctggttgtttccttacagccactgattttcaagatggatcataaaacatctgtaaaactaatgaattatctttttccaaagatagaacaaactcccacagaggccactcctccaaatcttgtgccacgaagttccactagttcattctttttatcttccacaggtatgcgtcgcagtttttctaatggctcctcatccacgtatgatgctaaagatgttgattcctgggacttgcgcagtatacgaagcaacaaaggaggcgaaaaaaagtataaaggcgatcacaggaaaatatcagcgtcactttttatgcagcctgattacaacattaatgaaatggttaagagatctgggacatttttcaatgtcaaatctattataattcgaaaaactctaatgtccgtgtgttataaaggctctcatagtctcttatccgatgttaataatttaatcgtcaaagtccctgatttaaagtaccataacaaattgtggtcaagagaagagtttttcacggccttgaagagagacattgtcaggattgttttacagcacttagggaatattattggtaataagtttttacctcacaagaaagagaataagaagaaaacttctatggaaatacataggctattaagtccaagttccgaaggtcatgaagtttcacatactgttgaagcccaagggcacccgaattcatttaattactctacatcctcatcaaatgtcaggtcaataaattcagatgaagcatgtgatgaaattgatgtaaatgatgaaattcggcctttttaccctgttgtaagtagcatttcaaacaaaaaatga

SEQ ID NO: 5476 - DNA, 5283 bp, Saccharomyces pastorianus
atgtttatgattccgtggtcccaaatttgggatatttctaaacttggtttgatatttatgcttttcatcataacagttcagaagattacaagcttgctcatatcatggattttaacactacgaaattccgcaatacgaaagatctcatttgggtacttttttggtacttcaataaggcgagcgttcatcctaacagattttgctgaactatctattggcaaggtaaatctgcggataggttggagacctggatttgtcttccataatattgatttgaaattacttaagaagttttccggagctgcagaccattcgacaagagactctaagacatatttcgatcctgagaaccaaacgtttacctttgttatcaataaaagaattctatcaatattgaagctagtattcccattctccatattcctccatactttaacattgacgatgccaaatggaaagacatacaaactaaacctaggctctataacgatatcacacccacgcgatgatactatcaaagtggaggcatttttacatgattttactcatcctgaaacaaaagatactttaaaccatactggtttttttgtcgtatgtaaaattgcgaaagaagatgaaaaacatagcaaaagttcaaaagttatactgagaaactggaaatcgagccttaaaataaacgacgtttgttggcatcttccagaagaaagaggaaacaccccaaacttaaatgaatcggattctcacaacacgagcgaagaagcggaaacactcgcctcatatcgcaagatgctgaagccttttcgttatcccttaaaaactttgaatatcctggaccttaaggtagaaaacgtcaagttcatgtataaagaaaaattcacgatccgcatatcaagtgctcaggtttacttagaatcgatttccattttaaacaacgtatccgctttggagcttttacctttgaataaatctacatggggggattttgaactatcactatctgcaaatgctgttgttatagatatcgacggcaatactgcgattagaattccctttggaaatatcgtgttaacatcagatatgttattgtcttttttggataatgtgcccttgcaaaaaacaaagctgacgtccatttttaacataataaatccttcggttttccttactctacaccaagtattagaaattcttcatttggtagacaaatttgataattctaaggcctcatcaagcacaagcacaaacagtatgtcattgaatattctagactttgatattgatcgattccccagtttcaacttcgaattgatcatgtcaaatttcgtttcgaggctacatatatcaaatgaggagaacgtgacatttaatgttttcagcatgcatgctttatttagccgaaacaatatgtccatgtccgcatcgaggggaaagctggtgtcgatacgtcctaattggccgtttgccaagacagttccggattccaatcaactatctaactatatcaagattgtaggtacatcactttcttatctaagaattccaacagatgataatgctagcccagtatccataccggtctgtggttttgaaagattagacacattcttggatgaattttctaattccaaactaattgttcagtctacactaagacattcgtacgttagcctcgataatgtcgaagttttacacactttaagccgcgcctttgatacgatttattctttaatatcaagcagagaaaaaagaaatgaaactcatgaagtacaagactataaaatggaaaacatgggtaaagtaaagaataattttaaatgggcattgaaactgaggctaaaagacatttcgtgctcgttgttgattgctggctttcttccacggatcttggatcctgaggaggctgaaaactttaacttgtctgacgtaacaagaggcgctaaagttgtgctcacagaatccatattgttagctgacaaccagggaaaaaaattcactgtagtagatgcatcgatataccgtgttgcggatggtatgagttgtgaatcagctcctgacggcattgttcgattcacggacttagtactgagtttaaacgacttgaacgaaattcatttttcacttccaaagataaaacttaaggtggacgtaaatattatttggcttttgttctacattcaaagcatatggatgaaattccgtcctagttctaaattgagtaatgcttcgacgagtggattaaagtgggttgatatcttggataggctaacagtggatattgggaagattatcattgaactaaggcttccgcataattcagaagtgctactaatattagaagacctaaacttttcaaatctcactaagaaactcacgatcgcatctttatctgcgtatgtggtgtctgtctatgttaagcatactaaagtgtatgtttctttaattaatattaatgactttgagctgaatgttttaaaacttattgaaacgaaatccgtggccatatgctcttcttcaattcacttccacaccgagtaccattttagaatttatatgataactgataacatcgttacattgtataaatcgttcaagcaaatcaaactggcattctcaaccttgcatgaatttaagaggttgtatccgcaacagcaatttcctaaaagtatattaagtttgcacattcgttctcaagactttctgattgatattgaagaagatccttttgagcaagaattgggattgattttaaaagttggtgttctagagcaacgtgaaagattaaaaaagttggaagagtttaaggaaaaactatcgacatacgaagatatgaatgtacgtttaagatcactgtatgacacctcacgaggtcaaactttttttccggatttctatgcaaacgataaagaatatgaagaaaaagcttacctcatgctgctagaaaacttttcgacatcatggatcgctagatacaggaaggcgaaactaaccttctatggtatgccctatcgtgttatcagtcgtgaggagcttggcacaaaatatcaattgtttactagacagaagactagtacagttgctaacttggttgtgagagatctggattttaaattaggcgacccttcctttcctttaaataactacatggactttctttacgagtatgggaagaaagttccaaaaacctcgaagtacactttgttgattattcttggcctcgaaattagaagcaatttatgggagttgcggctaagagattaccccatccctgctatatcttttccggatacatttacaactggtgatgttgtatttgctgagaatatgccagcaccttgtgctcttcatactgtttatgtcccttttgttaatgcagcggagaaaagcccttataatgatgcgaataccatatatggttcgcacatcattcgtactattaactcagtcaaaacgtatttcaatatcaggtcaatggttacatcttcttcgtctgctaggataacgtgggggaaatctctgcagcccggttatgagtctttaatgctttggtttgacttcttgaccaaacctctcattgatccatctaaaaagctaggattttgggacaaattcagatacttggtacatggtaaatggatatatgaattttcagatagcagtgaaatgcatttaaacataaaaggttctcatgatccttataaaatcaccgatgatggtgcaggtctagctttctgctggtctggtggtactacgatttatgttcataattccgcagaccctaaagaatttttgaagattaaatcccgaagatttcaattggcagtgccagattttgccaagataaataagtttgataaagtcttcatgaaactagatggaaaggtaatttggacattgggcttgctttttgagcaaggtgatatatcaagggcaggggatgaagagagatttcttccggataaaccacactatgaaattcagctaatgaacccagatggagtagcagatttggatcatcatgatacttataaaggattcagaacctccttcatccacatgtcatttggtgtgtactcttcagaacatggatctataaacagcctttatcttgcgccgtacgctttgactcactttctaaaatggtggaacttatttcatacgtatacgtctggtcctattagacaaggacgtttgttcactgatttacttcaaaacaagacaaaatttgggcgcgcgttatttacaatagcgtaccagctacatttaaagcgattaatggtcacacatatttatcgacacattaccacacaatatgatcttgaaaaagatagcaagattacttttactggtttaaaaggaagatttgattctttaaagatcgacttacatcaaaaacgaattaaattgacgcacacggaccagaagttaaataaatcgaaacctgtatggaagcttaaaatgtccaggggtgagattgattgtgctgaagcagatattagaattttatccacggtgtttgatcaaaaagctgtaaaagaaatcctcactactggtctcgatggtatactcgaagacgagccatcccgccctatgtccccacgagatgtggagtctttacgtgaatcagactggtatgattttgaagattacatagatttaaatcaggtatctctgggctcctcacttccgctcaagttagaagcaatacctttgttgtactcgcctaggatatcttacttcagaaaagtaaatgacgatggttatgtgctagcttgtcctttcggcactgaagaatcacacaattgtttgattggcaaaaatcatccagaattaacgcaagaaaagttagcaactgaaaggaaacatgaaatagaagtgcaactgaaaatcttaatgaccacattggacacgatggaatctaaagaaaaaggagggtcggtgagtacaaaatcagaacaccgtgcgaatgaaacaaaggcggagatagccgaactgaagcacagattacacacagtcaacactattttaagtgatttaaaaatcgcagaagctattccggaaataaaagtcggtgacgacgatgacagctccagttccagctcacttactgacatggatgctaattttagaccacgttcggggctccgactaggatatcattattgcgaactaatactgttgaatcgtgtgtatctaatgagaagaggcgctactatgcaagttgagtccccttatgacaacagggtcatggttcataatattgagtggaacatgaccataagttag

SEQ ID NO: 5477 - DNA, 459 bp, Saccharomyces pastorianus
atgacgacatacgacatacccgacatgcttgagcctgaagtggattgtgtaccggctgaactcatggttgcagagctccccatcgacatgcctgccatcgagctacttcccatcgacatgcctgccatcgagctgcttcccatcgacatgcctgccattgagctgcttcccatcgacatgctcgccatcgatgccatacttgaagccaatgttttgcttgcactggacatcgcatccatactcatcgaagccatgctcgacgctaccgtcttcgatgcactagacatcgcatccatgttcattgatgacatactcgaagctatagctttggttgcactggacatagcgtccatgctcatcgaggccatgctcgatgctaccgtcttcgatgcactagacatcgcatccatattcataccgctactactcatagacatgctattcattgttagaccgtag

SEQ ID NO: 5478 - DNA, 918 bp, Saccharomyces pastorianus
atgtcgtcatcaagtaacagtagttcctcaggatcgtctatggatatggacatggatatggatatggatatggggatgaactattatctgactcccacgtataaaaactaccctgttttattccaccatctacatgcaaataccagcggcaaggcctttggtattttcttattgattgtcgtggctgctttcgtttacaagctcttgctttttgtcagttggtgtctcgaagtacactggttcaagaaatgggacaaggagaataaatactgcacgttaccttcagcaaatgctaaggatgacggcagaaactatggaacggagaacaactttgaaatccagggtttgcccaaattaccaaatttgctaggtgacatattcgttccttctttaatggatctcttccacgacattattagaacgtttttagtatttacctccacaatgatcatctacatgttgatgcttgctacaatgtcttttgttttgacatacgttttcgcagtcatcaccggcttagccttatcagaagtgttttttaataggtgcaaactagccctgttaaaaagatgggatattcaaagagagattcaaaaaacaatgaactgtcctggttttggtaactgccaatgtggcaagcatgccagcagcacacctgatccaattgccgttgccgataccacgtcagctagtgatcaaagtactcgcatggaaaaaaacaatctgtctgaggttgctattgcggaaaataaccaaacgaacacacctgcacaagaagacggatgtaactgcgccaaagtctccagaaaaaaccaagaaaacatcgaaagtaacattcttgaaagttccaagttgcaagaacagtctgggaacatggatcagaacttacttccagccgaaaagttcagtcataattaa

SEQ ID NO: 5479 - DNA, 453 bp, Saccharomyces pastorianus
atgaatagcatgtctatgagtagtagcggtatgaatatggatgcgatgtctagtgcatcgaagacggtagcatcgagcatggcctcgatgagcatggacgctatgtccagtgcaaccaaagctatagcttcgagtatgtcatcaatgaacatggatgcgatgtctagtgcatcgaagacggtagcgtcgagcatggcttcgatgagtatggatgcgatgtccagtgcaagcaaaacattggcttcaagtatggcatcgatggcgagcatgtcgatgggaagcagctcaatggcaggcatgtcgatgggaagcagctcgatggcaggcatgtcgatgggaagtagctcgatggcaggcatgtcgatggggagctctgcaaccatgagttcagccggtacacaatccacttcaggctcaagcatgtcgggtatgtcgtatgtcgtcatcaagtaa

SEQ ID NO: 5480 - DNA, 222 bp, Saccharomyces pastorianus
gcggctcgcataatacgactcactacagggatcaaacactggaactatgttccggaatacaaaggcgccaaattcatccccattcccagtggttcttctatctctaaggtcaatgaaaactttgatgaaaagaaaacacaacttaccgacaaagagttcaaagccattaacgacttcttggctactttccacactgttggcgataggtacgaattcaattga

SEQ ID NO: 5481 - DNA, 231 bp, Saccharomyces pastorianus
atgtccgtcactgaattgagaaacgatatccataagttagataccggttatggtctgatgagtttgacctggagagctgagcccattcctcaatcgcaagctttcgaagcgatgcacagagctgttgagttggccagagaacgtggacacaaggccttcttcaacgttggtgagttttacggcccggacttcgttaacttaatatttgttcgcgacttctttgcaaagtag

SEQ ID NO: 5482 - DNA, 945 bp, Saccharomyces pastorianus
atggctaatattgcagtgtaccctttggatctatcgaaaacgattatccaatcgcaagttgctcatcctgatgcaagtgagcctgataatgtcgacaataagctggctaagaagaggtataagaatgtccttgactgcatgataactatattcagggaaaaggggttttttggtctatatcaaggtgcgacggttattacagtggccacatttgttcaaaatttttgctattttttttggtacactctcattagaaagtcatacatgaaaaataagctactaagaccgcaattgttgaaaatgcatgctagttctggcacaccttccacaatcgaagaattggctctgggagtggtggctgccagcatatcgcaaatcttcacgggaccaatggccgtggtggctacaagacaacaaactgtccactctgtagagtccgccaagttcagtaatgtcgttaaggatatttacaatgaaaataacggagatttgactgcattttggaaaggtttgagaacaggtctagctttgactataaacccgtccattacatatgcctcatttcaaagattgaaggaggttttctttcatgatcattctaacgatgtgggcaatctctcagcggtccagaattttgtattgggcgttctttccaagatgatttccacgttaatcacgcaacctttaattgttgccaagacaatgcttcaaagtgcgggttcgaggttcacttctttccaagaagcgcttttgtatttatataaaaacgaagggttaaaatcactttggaaggggatccttcctcagctggcaaagggtgtaattgtgcaaggtttgttgtttacatttaggggagaattgactaaatcgttgaagaaactcattttcctgtactcttcattcttccttgaacgcaacggacgccataggctggtttctacttga

SEQ ID NO: 5483 - DNA, 321 bp, Saccharomyces pastorianus
atgcaactagagtttgattctgaaaaattgagaaagaagtctgttatggattctgccaaaaataggaaaaagaagaagtctaaatccggtgaagactccacttcacgcggatcttcagtacaaactctatacgaacaagctgccgcaaggaggaacagagctgctgcacctgcacaaactaccactgattacaagtatgctcctgtaagcaacatcaacacagtgcctacgaacgcgagggccgttggtgttggttccaccttaaacaacagtgaaatgtacaagagattgagttcgagattaaacaagaagcacaaataa

SEQ ID NO: 5484 - DNA, 675 bp, Saccharomyces pastorianus
atgagtgctgcggatcaagaacaatttacagtgatggaagccacgcctgatgatggtacagctttcctgcatgagtcggttttgaatggtgaggacgaaactacaaaccacactgatgacagcgggcgtcaaggagtcacagaagatggcccaaaggacacaggcgacttgggtgagcaaggcagggacgatgaggataatatagaggaaaacagccgtgtagaggcggcagagaggaaacgtaagcatatcagcgcagacctctcggatgatgaattagaaaaggaggcacataataaccaaagttctcaaccagcggtagaaaatagaattaatatggatagggattctagtgccactccaaccagtagacaggaattggaagaaaaactggatcgtattttgaagaaacccaaagtgagaagaacgaggagggatgaagacgatttagaacagtacctggacgaaaaaatcctaagacttaaagacgaaatgaatattgcggctcaactggacatcgacacgttgaacaagagaattgaaactggcgatacttctttgattgccatgcaaaaagtcaagctattgcctaaagtagtaagcgtactgtcaaaggcgaacttggctgacactatattagataataatctcttacaagtgtccggatatggttag

SEQ ID NO: 5485 - DNA, 252 bp, Saccharomyces pastorianus
atggaacattatcatccaaatgtcgccaccttggccaaggtcttttctcaaccatttaaaaagctgagttacaacatggaagatttcttggattggagttacgattcattactcagtgcggaatcatcaagaagattgaaaactcttcctactttagaatttgagacgtttggaagtgtattcgataatgaagaaggtgatgaagaatcatcatcacaagataacgtttacttgcctggggtagcatggtga

SEQ ID NO: 5486 - DNA, 129 bp, Saccharomyces pastorianus
atgataatgttgcacaatccagctttcatttccgatccattccagatccctgagcaagtcgaccatttgacgaatttgaaagacagttacgtggatccatacaatgtaactgaatccgatccggaactg

SEQ ID NO: 5487 - DNA, 861 bp, Saccharomyces pastorianus
atggatctggaatctacacattttgcatctaaaaaagacgctccatttttccctaataaaacattcaggaaattgattattgccctatggtcctcgaacatgggcgaactagagagtgccaggaactccggtgcgtctgaaaacgtaatcataatagagttcaccgaaaaatactataagaaattcgcggacatccaatactatttccaatcagaattcaaccagctcttagaagatccggcttaccaggagctacttcttaaaaacgtcggcaaatggttgacactggcgaaccatgatgaacattgttccagtgcgaatgtagatttggaggtgttcgtaccaaacccaccgcaagccattgagaatgactctaagtacaagtcgaactttgaaaaaaactggctctctttactgaacggtcaattatctcttcaacagtacaaaactattttgttgatcctacataagagaataataccccatttccacaccccaactaaactgatggatttccttactgactcctacaatttacaaaactccaataacaacgccggtgttatccccatcttggccttgaatggtcttttcgagctaatgagaaggtttaacttggagtacccaaatttctacaagaaactttatcaaatcataaattcagatctaatgcatgtcaaatatagagcaagattcttcagattaatggacattttcttgtcttcaacgcatctatcagctcatttggtcgcttccttcatgaagagattggcgagactcacactggaatccccaccatcggcaattgtgtccgtgattccctttatttacaacctaatcagaaaacacccaactgtatga

SEQ ID NO: 5488 - DNA, 216 bp, Saccharomyces pastorianus
atgccactgctaatatcagaaatcaaagatattgccaagaagctgactactgccaccgacagaaagcagtataactctattattaagctcgtcaatgaacttgtcattccagaggatgtctcccaattgaaagatgaagagacggaaagaaatttgaggttcttgatcatgtcgctgttccaaatattcaagaagttgtttctcgtagcgatttga

SEQ ID NO: 5489 - DNA, 72 bp, Saccharomyces pastorianus
atgtatgaagggacgtctttccactcagggaagtactccatccccatactggacgtagaccaccagttgtag

SEQ ID NO: 5490 - DNA, 183 bp, Saccharomyces pastorianus
atgtacgtcacttttggcggcgtgcagggcctgacagcgggtacaatcatgggattcctgataggcgccatctacagatccggactgttttctatgtccacctggatcccactttgttgcgcagtggttcagatcctttttgacgtggtcctgggctactcaatggtcggttctatcatgtga

SEQ ID NO: 5491 - DNA, 1059 bp, Saccharomyces pastorianus
atggaagaactctgccatcgcccgaagaacacgggagaatgttatagaaaaaaaagggaatcttcttttttttttttaaaaaaaaactgcgatagatcagatagtctattaattttttcagtgtatatttttttttggaaaataaaactattctttataagaaatattaatgcactgcgccccttgtttaatcagcagaccaagcttaacatagcacaccatagaatagaaatacatttgatggctaccgcatgcattttccaacctaaccttctcaaggttaatgcatctgatgagccctccaatatgatccgcaaaagaagaagaatacaacaatcacaaccaggatcattactccgagagaacaaacttcaacctcaaatctttttgcggaacctaaatcactgttacatactatcactttataaagaaatcacgtgccaactcattggagaaatccttcaccaaaaaatatccaagatatggggaaaagtatacataccgtcttatgaactaatatcagatattcatggaaaccagctttatgtggagcaaggcgtggacgaaaataaactagtctcggaaatattgaagagacttaaccctaaccttattgattcagaagccactcaaatgttatttgacgattaccatttagaattatcacacacaggggacggtatctgcatatccagtttaaccgatcgttttcataaagagttttctttcaataatgcagtcactggtacattcagactctgtgggacgagtgtacgcgccgatagcagcggaacggtatatggtgttatgcagattgaaattcctatcgatgagaatacgtcacaagccgagcatacctttagtgggctctctacttttcacattcagacggacgaacccaatgatacagaacaagaaataagagcctttaatttgagtcgacagaatcaagaaaatataattagaagggagattacaagaagattgaaaggacatggtgagctttacaaccatcgcaaaaacatgcgaagcgcttcttcaagaaaagcaaaaaaataa

SEQ ID NO: 5492 - DNA, 90 bp, Saccharomyces pastorianus
atgatttccagatgtctgggcaacaaatggccgaacaagccaacaggccatttttccaaggcttcctgcataacagtgtggttggtataa

SEQ ID NO: 5493 - DNA, 84 bp, Saccharomyces pastorianus
atgatagatatacgagacaaaagatcaacatccttggggaatttctttgcaacatcttgcaagaagaaccaattaatatcgtaa

SEQ ID NO: 5494 - DNA, 549 bp, Saccharomyces pastorianus
atgctcttaactattgtcaaccaatatctagaacaaaagcaaaaaatacgtatagcgctgcatcgagaagaaatgaacggtaacagcaacaatagagagcaattacaacaagagttgggcgccacacaggaccaggtggcctcgattattgagtcgtttgtcgaattaggcgtctccatttatgacttccctggtactcccgaggccagcaagggaatgatcaccaatttacaaagaaacgtggaccgtttgtacaagttgaatgtgagaagcaacgacccccagtcaagtctgtctaaggtcgacattcccttggaagttgtgcagtacattgaggacggtcgtaatccagatatttacacgagagaatttgtcgaagctataagaagatcgaaccaataccagaggggcaagatgcacggcttgaagcagttaagagactcgctggctgataagatcgtggatgaatttcccgagttacagaagcccgtcgaggatatcataaagaggacttctcctattgatgattcttccactgctcatcaataa

SEQ ID NO: 5495 - DNA, 1518 bp, Saccharomyces pastorianus
atggcgaagagtaaaaaacaatcagatgtcgttgattcaacgaatttccccattttagaactaacatcttcaaaaactcccattttccagtctattctacatcccgaactcccaataatcataacgggattcggtactggtcatatcgtctgtcaccgttataacccagctgagttgcaattgggtttaaatcgtagacgtaaacttgacgctgcagcattggataacgacccaaagagtaagtccaaaacaaagaaaggtacttgtctctggactagattagacatagatgtagagaatggtactttaaaatctgtcgaaacagaggacgaagaacaacaaatggagcaaagcgaagccttgggcgtggagacactttggaagaccagaaggcataaaggtagtgtgcgtgccatttgctttgatgcgaagggtagttgtatcttttctattggtactgataacatttttaaaaaagctgatactatgaccggtaaagttattaaaaaggtgaacctaagttcattatttgagtccgagaagaagaagaatgacaagtttaccaaactatgcatatctcaaactcatccgtttatattgataggtgacgaatctggtgacgttcatgtgctgaattcgaacaacttgactttaaccaacacagtccattcaatacattttggtgactctattaatgatattttccattttgataaaaagtccgtatacaaattcatctccttaggccagacaacgttagcatattttgatgtccgtgacaaagatgccaaaccaaacacagcagaaaaccaggacggcaaaatcatggttagtgacgatcaggaagatgaagtcctttgcggttgtttcgttgatcccgaagaggcagatacgcttttatgcgggatgggcgaaggtatcgtcaccgtttggaaaccaaataagaatgacttggtagatcaaatgagtcgtataaaaatcagtaaggatgaaagtattgattgcattgttcctactttgcaagatgataattgtgtctggtgtggttgttccaatggtaacatttataagctgaatgccaaattggggaaagttgttgaagtgagaaatcataacagccttgacgaggtcaatttcttggatttagattgcgaataccgtgttgtttctggtggtttagaaaacatcaagatttgggaattgtcaaatgatgacaaaaaggaagaggaatctttagagtccgatgaggatcttgccagttcagatgaaaacgacagtgatagtaacagcgaagatgacagctccgaagaaagttctagtgaaactgaagtcacgcttgtcggactatcgaaagaagagttattggatgagctggacaaagacttgaaccaacaagaagagtttgcagaagaaaaggagtccaatcaaaagagcaataaaaagagaaaattgatgaaagaaaacagtagaaaaaaggaactttacgaacatggaataaaaaaatttgatgatctgtaa

SEQ ID NO: 5496 - DNA, 1038 bp, Saccharomyces pastorianus
atgactgaaggaaaattaagtgaggatgaaattgcgctgtacgatagacaaattcgtctttggggaatggcagcacaagccaatatgagatcagcaagagtattgctaattaatcttggagccattggctccgaaatcagcaagagtattgtacttagcggaataggacatttaacaatattggatggccacagagtaactgaagaagatttgggctctcaattttttgtcggctctgaagatgttggccaatggaaattggaggctgccaaagacaggatccaggacttgaatcctcgtgtagaattaaagtttgacaagcaggccctacacgagaaagacgagatttttttccagcaatttgatttagttgtagccacagaaatgaaggctgatgaggcaattaaagttaacaagttaacccgaaaattaaacattccgttatatgttgctggttctaatggactatttgcatacgtttttattgatttgatcgaattcgtctcagaggatgaaaaattacggagcataaggcctactgtcgttggccctgtttcaagtaatcgaagtatcattgaaatcaccactaggaaagatgaagaagatgaaacaaaagtttatgagcgtatcaagaccagaaatagctacaaatctttggaagaagtactatgtacagccactctgaaagaaaaattgacacgaagacagctaaaaagggtcaccagtattttgccattaacgctcacattgttgcaacaggaactgaatgaggggagtgagaagatagggtttgaattactgaaccgagaggcagctgcatggtgtgggaaactgggtgtccctatggcaatattgaatgacgaatatatgcaacaaattatcaatcaaagatatattgaatttgctcctgtcgcagctatcatagggggaaccgtcgcacaagatgtcattaatatcttgggtaaaagattgtctcctctgaataatttcattgtgtttgatggtgttactttagatatgcctatttttgagttttga

SEQ ID NO: 5497 - DNA, 1284 bp, Saccharomyces pastorianus
atgggcaaattggtcggagataatgggaataagtctccatgtgaagctggacgagagcccatggcgatgtcacgatctcagagcaccgattctttgaatagtttaaattctaccaggagctcatcgagcaacaggccaaaaacgtatttttgtgactatgacggctgtgataaggcattcacgaggccttcgattttaactgagcatcaatcgaccgttcatcaaggtttaagagcatttcaatgcgacagttgcgcaaaatcgtttgttaagaagagtcatctagagaggcacttgttttcgcattctgatacgaagccattccaatgttcttattgtggcaagggagtgacaactcgacagcaattgaagcgccatgaagttacgcataccaaatcttttgtttgtcccgaagatggatgcgatctccgattttataagcatcctcaattaagggctcatattctatctgtccatctacacaaattaacctgtccccaatgtgataaaagtttccagaggccctacaggctaaggaatcatatctccaaacaccatgatcctgaagtagtaaatccttatcaatgtacttttgctggctgttgtaaagaataccgtatatggtcgcagttgcaatcacatattaagaacgaccatcctaaactgaaatgtcccatttgcaacaagccttgtgtgggggaaaatggtctacagatgcatatgatcattcatgatgaatcgttggtgactaagaactggaaatgtcatatttgttctaatacatctttctcaagaaaacacgaccttctcactcactaccagtcaatgcatatggatgaggatgttcccttagaattgaaatataagacccccgatattcaacaattagttcaggagcaagggattcatcttagcgatgaagacgtcaccagcgaacaagatgatggcaaaatatccaataggttaaggaaacgaagaaagctcaatgaaaacaacaacttcgtctttttgcaaaatgaaataaacctagaaaagcagttggagtttggtgaagatgggttgagtcttctactgaattctgttggaagaaagcacaagtgtttttacaataaatgttatagaactttcaagacaaaggaaaaatacgataaacatatagataagcataaaatacatgaactgaaactgaaaatcctacaagaaaaagaaggcaaggaaatgatagagaatagtgacgaaaaccagcgggacctgaaaccaactacgatactgagtgaggaataa

SEQ ID NO: 5498 - DNA, 216 bp, Saccharomyces pastorianus
atgaccaaatatgaaagagcaagaattttgggtacaagagctctgcaaatttccatgaatgccccagtttttgtagacttggaaggtgaaactgatccattgcgtattgccatgaaggaattggctgaaaagaaaattcctttggtcattagaagatatttgccagatggttccttcgaggattggagtgtggaggaacttattgtggatttgtga

SEQ ID NO: 5499 - DNA, 1503 bp, Saccharomyces pastorianus
atgaaagttgcatatctacagttcctttttttgaacatatcgctggttaaggctgtgctgcagcaatctgatttcacgctgagaaacgattcgtattgggaagaatttgaaggatacgtggatacaaagcatctaaacgagaagtggatcaccagtggtgctaccaatgagaaaggtgctaaaatttatggtgcgcaatggcgaatctcgcagggtccattgcaggggtctctcccaaataaaggactcgtagttcgtacaaataatgcagcagctatgataggacacgtcttggagactcctgtgaatgtctcggatacggatactttagttgttcagtacgaaataaaggtggaaaattctttgacatgcggcggtgcgttcattaaattggtatctagtttagtggatacagatgcattaaagagttattctccaggtaaagaaggcgtagaattagtgtttggtccggattactgtgttccagacaccaacggtgtgcaatttgctatcaataaggttcacaaaatcacacatcaatcagagttgaaatacttacaagaggcacctttatcgagattgactgataattcacaatcacatttgtatacgctaataatagacgaatatactcagtctttgcaaatccttattgatggtaaaatcgccatggcaagagaacgtattaaagacacgtcaaaggatctttttaagccacccatttcaccacttttggttgttcctaatgtttcggtaacgaagcccaatgattgggatgaccgcatttggatcgcagatcctgctttagtaaaacctgataattggaacgaacacgaaccgctaatgattccggatccaaacgacgcaaaaccattggaatgggatgaatctatttctaaatatatactcgatcctgaggctaagaaaccccattggtgggaagaggctgagcatggcgaatggatcccacccatggtaaaaaatcccctctgtaatatagaacatggctgtggtcagtggaagtcaagactaataaagaaccccaaatacaatggtccctgggaacctaaccaagtcataaatcccaattacatgggagaatggcaaccgccagagattgaaaacccactgtactacgaagagaagcatccattacgaatcgaaaatccaatcaacggtataattttcgaattttggagcggatctcctaacatgatgataagtaacatttatttgggtaaaaacgtaacggaggcgcaaatcattggaaataagacatgggtcatgagaaatcgtgcctcaaggcgtctcgacgattcttcagagcgcaagttcatgaacaccagattaggtggtctacaagatactcttcacagcgaaacggtgtccttcaattttttcgatcgcatcatcgactgcattctggaatctccaaaatcagtacttactattgccgtcgttctccttgcgacgctgtctttttggtatataattcttatatag

SEQ ID NO: 5500 - DNA, 108 bp, Saccharomyces pastorianus
atgaacttgcgctctgaagaatcgtcgagacgccttgaggcacgatttctcatgacccatgtcttatttccaatgatttgcgcctccgttacgtttttacccaaataa

SEQ ID NO: 5501 - DNA, 369 bp, Saccharomyces pastorianus
atgacatcggcagatttcaattcatggtccaaaaccatgaggtccgaatctgtagtgtctataagtactgtattctttggggaatatgaaggtgatgacgaaaagtctcttgggatagtaattggtggtaaaacgtcttgtataatgggtatgaattcagctttcgttaaggaaacaattagacttgatttaccaacgccttcgtcaccgcatatcaccactcgaattgtttctttagtcattgtgacgtttggttgtaccgttctcgaatcgccctttggtgttgtatttgtttttatttgttcattgtttgaattttgtttttggtttaaaagcaaaaatcattatggtaaacttgacagtaactaa

SEQ ID NO: 5502 - DNA, 1350 bp, Saccharomyces pastorianus
atggtatctatagagatagttcagcaatggaaggccaccaaatatattggtataattgggctaggtgacatgggcttattatatgccaataagttttcagatgctggatggaaagtcatctgttgtgacagagaagatttttatgaggatttaaaagaaaaatatgcatctgccaaatttgaggttgttcaaaatgggcatttggtatccagaagaagtgattacatcatttatagtgttgaagcatccaatattaataaaattgtcgaaatgtatggaccatcctcgaaaattggtgcaattgtgggaggccaaacaagctgtaagctgcctgagatcaaagcttttgaacagcatttacccaaggattgtaacattattaccgtgcattctcttcacggtcctaaagttaatacggaaggtcaacctctagtcattataaaccacagatcacaacaccctgagtcttttgactttgttaattctgttatgtcatgtttgaagagtaagcgggtttacttgacatacgaagaacacgatattattaccgctgatacacaagctgtgacgcatgctgcatttttaagtatgggatctgcatgggccaaagtaaaggtttacccttggactttaggtgtgaacaaatggtacggtggcctggaaaatgttaaagttaatatttctttaagaatttactccaataagtggcatgtttacgcaggactggccataacgaatccaagtgcgcatcaacaaatccttcaatatgccacaagttcaacggaactttttactttaatgcttgataataaaaaacaagaacttactgaaaggttactacaggctagaaagtttgtgttcggaaaacacactggcctcttgttattggatgatacacttttagagaaatattcgctatcgaaaaacactgttaatgacgacgctgattccaagccattgccaaattctcatttatcgctgttagcgattgtcgactcgtggtatcaacttggtattaatccatatgaacatatgatttgttccacgcctctattcagaattttcttaggtgtgtcggagtaccttttcctaacacctggtctgttagaacagacaatcgatgcagctattcatgatcaatcgttcagaaaagatgatttagaatttgttatttcagctagggaatggagttcaattgtgtccttttctaattttgagttatacaagaaacaatttcaagctgtacaagaattctttgagccaatgcttccagaggctaaccttattggcaatgaaatgataaagactattctaagccattctaaagaaactttaacgggtaaatattaa

SEQ ID NO: 5503 - DNA, 636 bp, Saccharomyces pastorianus
atgtacgggttaacatgtcaaggcgcgaagttacttgcgtgcttcagcgccaatacgtatgccgtttattcctacagtagaggttactgtatcctcaacttacctaacatgaactgttacagaggagtcttcaaccatttacagtgcttctgtgtgtcatcacaagcaagaaagacgttgctgcaatatccatttatatttatcatcatgccttctctccgagacttaacaatagagagaaacaaaagtttaagtcagttaagagcccgtattaacaaggctaacaagctaagcacaaccgagtttggtgctccctttttgaaggctttagatggaactgttaacggccatgtacttcaaccgtcaccgtcttctgattcattgagcactattgaacaagaaattagtcatatcgaaatgggtgaggaagaccagcattcacacatttctcttcagagagatcagcaaacagtacgcattggcaaagtctctgaaactggcgacctcaaagctaagctcgcgtctgctatggaagagctcgaaaagaaaactgatgaaacgatcaatagcataataaggaaaaggttactacaaaattccaattacgaacatgatacaagcactggaccaggctaa

SEQ ID NO: 5504 - DNA, 147 bp, Saccharomyces pastorianus
atggtcagattggactctgaaaagcatgtcgactttgccccaacttctccatttggtggtgctagaccaggtagagttgctagaagaaacgccgccagaaaggccgaatcttccggtgaagctgctgaagaagctgacgaagaataa

SEQ ID NO: 5505 - DNA, 672 bp, Saccharomyces pastorianus
atgtcacaatccaacggatcacttgtgccagaaggcaaccaaggctccctccaagaagatgttaatcctgatttcaatggagtacctggccaagctttagatgctgtacgtatgcggttggctcaattaactcattcattgagaagaatcagggatgagatgtctaaagctgaactaccgcaatggtatacactacaatcacaactaaacgtcacattgtcgcaactcgtgtccgttacatctaccttgcaacatttccaagaatctttagattcaacggtcgtttatccattgcctaaatttccaactacttcgcatgaaagtttgatcactacacttttgagaaaaaagaacattcctgaagtagatgaatggatgaaatacgctagagaaacatccggaataacgacaaatttgttgaaggatgaagaaatacagaagctattacaacaggacaaagacataacaaactgggcacgtaatacgtttggaaacgaatttgaaaaacacgatttcaaacatgaagaggccctaaatgaagaggatgcttcactccttgtacgagataccaagccatcaaaaccttttaacgttgacgttattttaaagtttacacatgcaggagaaaaaccaatttcgatagatacgacgccgaaattgactactggttga

SEQ ID NO: 5506 - DNA, 693 bp, Saccharomyces pastorianus
atggaggacaagcaggttccaccgattcgggtgaaggtgagcgacatggatccgggctatgaaagcaaattcaacagccgggaaccgagcgcccagccggcaaagctggaattcaagcccggcaaaagaaaaatcaaaggatctccagactccacagttgctaccgccgccgctaccgccaacggcccgttgccggccccggaggcttccaagaagctaaacacgccgccgacgagcaactcaccggccgctggcaccaccaccaggagcaacaccgcctacgaaagaagcgtcaacggcagcagaatcacaatgcactctaacctagtacccactgagacgcaggatgtatcttggtctgagatcgacaccctagatgatgtgaagaacatggctaaagagcctatcatcaacgacggattcccgcaggatttcgagaacagacttacgcagatgcgacgctcgcacgctcagctgctgcgagtaatgagagaaagaaatgagcggctaaaacacgccaagcccgacctctccacgaggatggcagccccccctgagaagggccagcgtggtacttccgccaagggccccaaacgcgaaccggaacaggcgattgatgacccggaagtagcgttcgacggcgagaaatacgtgggtcagattgtcgataccatcaagagactcgaccagtga

SEQ ID NO: 5507 - DNA, 3207 bp, Saccharomyces pastorianus
atgactgctccagaagaatacttggagaaattgaaaccgtttcaagttggcgtaccttcacgcgatcctgagtcgaataaagagcgttacttattgaaggatgctaacaataaaaaatttgatctagaaggcacaaccaagagatttgagcacttattatctttaagtggtttgttcaaacattttattgagagtaaggctgctaaggatcctaagttcaggcaagttttggatatcctagaggaaaataaagcaaatggtaagggcaaaggcaaacatcaagatgttcgcagaaggaaaaccgagcacgaagaagatgcagaactactaaaagaggaagactcagatgatgatgaaaatatcgaattccaattcagagattctcccggctacgtgaatggccaattgagaccttaccaagtccaaggtgtcaactggttggtatctttacataaaaacaaaatagcaggtattctcgctgatgaaatgggactaggtaagaccctgcaaaccatttcgtttataggttaccttaggtacattgagaaagtgcctggtccgtttttggttatcgcccctaaatctacattaaataattggttgagagaaatcaatagatggactccagatgttaacgcgttcattctacagggtgataaagaagaaagatctagtctaatccagaagaaacttttaacttgtgatttcgatgttgttgttgcttcttatgaaattattattagagaaaaatcgcctctcaaaaagattgactgggaatatatcatcattgatgaagctcatagaatcaaaaatgaagagtcgatgctttctcaagttttgagagaattcacttcacggaataggttgttgatcactggtacgcctttgcaaaacaacttgcatgaactgtgggcactgctaaactttctgttaccagacatcttttcagattcacaggattttgatgattggttttcctctgaaagtgctgaggatgatcaagataaaattgtcaggcaattacacactgttttacagccatttctgctgcgtcgtattaaaagcgacgttgaaacatctcttctacctaagaaggaattgaatttatatgttggtatgtctaatatgcaaaagaagtggtacaaaaaaatcttggaaaaggatttagatgcggtcaatgggtctaacggtagtaaagaatctaaaacaagactgttgaatatcatgatgcaactgagaaaatgttgtaaccatccgtatttgtttgatggggctgaaccagggccaccatataccacagatgaacatttggtatacaacgctgctaaacttgaagtcttagataaactgttgaagaaattgaaggaggaaggttccagagttttgatcttcagtcaaatgtcaagggtattagatatcctcgaagattactgttatttcagagattacgattactgcagaattgatggttctactgctcatgaagatagaattcaagccattgatgattacaatgcgccagactccaagaaatttgtttttctgttgacaactcgtgcaggtgggttaggtattaatttgacatcagctgatattgttgtcctgtacgattctgattggaatccgcaagcagatttgcaagcaatggatagagcacatcgtattggtcaaaagaaacaagtcaaagttttccgtttggtgacagataattctgtggaagagaagatcttagaaagagctacccaaaaactgagattagatcaactcgttatccaacaaaacaggacttcttcaaaaaagaaggagaataaagctgattccaaggatgctttattgtccatgattcaacacggtgctgctgatgtgttcaaaagtggtacctctactggctctgctggaacgccggaaccaggttcagagggaaaaggggatgacattgatttggacgagcttctatcgaaatctgaaaacaaaacaaagtcattaaacgccaaatatgaaactttaggccttgatgatttgcaaaaattcaatcaagattcggcctacgaatggaatggtcaagattttaagaagaagactcaaaaggacatcattagtcctgttttgctcaaccccaccaagcgtgaacgtaaggaaaattattcaattgataactattacaaagacgttctgaataccggaaggtcatcaacgccatcgcatccaagaatgcccaagccacatgtcttccattctcaccagttacaacccccacaattgaaagttttgtacgaaaaggaaagaatgtggacagcgaagaaaactggttatgtaccgacgatggatgatgtaaaggttgcatatggcgatatttccaatgaagatgaaaagaagcaaaaattggaattgctaaaactatctgtgaataatgctcagccgttaactgaagaagaagaaaaaacgaaagctgactgggaatctgaaggattcactaattggaataaacttgagtttagaaaattcatcacagtatctggtaaatacggtaggaactcgatccaagccattgcaagggaattggctcccggaaaaacattagaggaagtgcgtgcttatgctaaagcattctggtctaatatagagaggatagaagactatgagaaatacctgaaaattattgagaatgaagaagaaaagatcaagcgtgttaaaatgcaacaagaggccttgcgccgaaaactttctgagtataagaacccattttttgatttgaagttgaaacatcctccttcctctaacaataaaaggacgtattccgaagaagaggaccgttttattcttctaatgttattcaaatacggtttggatagagacgatgtgtatgaattagtgcgtgacgaaatcagagattgtcctctttttgaattagacttttacttcagaagtaggacacccgtagaattggccagaagaggaaatacattgctacaatgtttggaaaaggaattcaacgcaggaattgtactcgatgatgctactaaggatagaatgaagaaggaagatgaaaatgggaagagagtaagggaggagtttgcaaatgaggtcgccgataaaaaggacgttgatgtggcggaaagcaagaaagccaaggttgaagaaacatcgaatcttgaaaccgagcaatttgcagtaaaggctattgcagaaaacgaaactgctcgttaa

SEQ ID NO: 5508 - DNA, 531 bp, Saccharomyces pastorianus
atgagttcttcctcctgtacagaatcgtcttcttcgggctcttgttcttcttcgtcttcttcgtcttcttcgtctttttcgatttctgcgccctcatcatcatcttggtgcggttgtagctcttctttggcaacttgttggtcatccaagtcaggttgccttcccagttgccccttcttgtcatgtatgctatttttctttaattgtttgataacgtcttctaagaatctgaaattttctctcttttccacacattcttcaatagaagccaaacttagtcgtagacttgatttgcccctcgagttcagctgcgctaataccagtgattcctccaccaggttctgcacaaataactctgcagcaaacgcggtcgccgatactgctgcattagatgtaataacatactccggatcgcatttggcaatcttcttgactttggatatcgggaaggcaggcgccttttctctaactagatcggacatttcttgcggtactattgatgggttgcctgtcttttaccagttggtctga

SEQ ID NO: 5509 - DNA, 273 bp, Saccharomyces pastorianus
atgatttgggcgggcgttcaaaagcaaacttgtagcgggagtcgcgattcactaagcgtagcatgtagtgcgtggtccaactattatcgtgtggacgcccctgcgtccgatgaacctatcgcatcttatatgacgaaaatgttggaagatgaggttcagtgtccaaacgtggaaaataggaccacctcagagcgtctccacctggatatggaagtgccagagtcgaaatctttctggacttcattaaaggataaactcttctctaaaaaatga

SEQ ID NO: 5510 - DNA, 594 bp, Saccharomyces pastorianus
atgctcaataaatatatcgtaattgcgtcatccgtccttgcgactttgctctctacagcatccgcagtcgatttggatgccctgcttctgctaccgggggtcgagtcacatgacggcagtaatactgtgttttctaatagcgatttctatcagacgtcttttgtcgagtccattgctcctgctatcgtcaacagctccgtgatcttccacgatatgtctcgtggtgtagtcattggcaacgtcaagagcagagtaagtgtctccaacgaagatacttattacgactgggttcagtaccagatggtgagaagtggtgattggggaacagaatggtctcctgtctctgactgtatctggagggacgagaaggacaaaagcgacgacacgccaaataagtttcccatctcagtgccgtttagctggacgtccgagtattctattgtcgactacgacaaggatgctaacgatgacggcctagacatggggctcatcaaatcgttgttgaacaagaagaattggcaccaaatgaacgaaaccgtctccgaatcgagtattatggtggcaccgatgataaagccatacaacgtggtctaa

SEQ ID NO: 5511 - DNA, 990 bp, Saccharomyces pastorianus
atgccggtacgaaaccaagctggagcaaagaagatgagaaatattattatttcggatttcgatgaaacaattacaagatatgatacaatcggtatcattgcaaaattgccgtacctaataaaccccgagttgaaacctgagtggtctcattttaccaaaacttatatggatggattccgtaaatacaaatataatggaacgagatcactaccattgctatcttcaaacgcgtccttaacattatcacattcaaatttcgactgtgtattcaaagatgaattggaatttcaaaaatataacagaactattgagttaaatagtgtaaacgagatttcaaaacaacaacttttcaagtcaattactttggaacaaatgaaacaatttgccaaagagcaaaatcgtgagatttgcctattgagaggcggtttcaaccaattttgttcctccgttattaaaaattttcaagatgatttttacattttatcaatcaattggtcaagagaattcatatgtgaaatcattggtaacaaagaggtcaatcctgatcatgttctttgtaacgatttgaaagtgtctacagaaaaaagacctcctacttacaccggtgaatttgactgtggattattgacaggctctgataagatcaaatcactaaatgaaatactaggtatgaccgagacgcacaacaatggcaatgagactcgctgctactggtatataggggatagtgaaacggacttgttatctgtattacacccatctataaacggtgtattgttgatggaccccgtagaaaacccctccaagttcttgaggattactgagcaaatcatcggtgtgccaagtgacaaaatcacaagatttcaaactgataacgctttgggctggttaaagttctgtgaaaaggaaaatgggatgtttgcctacctcgtgaaatcttgggattcgttaaaagatttgatcgcgcagacatcgaatagtacgtgttaa

SEQ ID NO: 5512 - DNA, 3072 bp, Saccharomyces pastorianus
atgattcaaaactcagctggttatcaatcacttaataccacggctccgatgaccatgcatataaaaaaccagaagaaaatctgtgctcattgtaacaagcaagttgtacaagatagccaacgaacgaagacgacgttgaaggcgctgggtaaatactaccatgaaaactgctttacatgtcaagactgtaggaagcctttgaaacccaagtactttccattccaagtgagcaagacgagtgaacctatcttgctatgtcaatacgattattttagaaggcataatttgttatgccacgtatgtgatacaccattacgtggcttatattatactgcattcggttacagatatgatgaagagcatttctcctgtacaatctgtgctactccctgtggtgtaaaaaaatgtttcatgtacgaggaccaattgtattgtaagttccattttttaaagtatttctccaaacgttgtaaaggctgtgaatttccaatatcagatcaatatatcgagtttcccaaaggtgaagaaatacattgttggcacccagaatgttatgggattcataagtactggcatgtaaatctggctgctgacaccgttggtttacagtatgttcccaagctagagtatagccccaatgcgaaggacaatgatttaaatccaacggctcacgagttagataaacaaatgcaggcatttaactttattttatctaaaacatggtcggttttataccgttttgaggaagaagcagcttcgtgcatttccgatatgtttcaatacctaacaagtaatgaccaattgaaaggtatagaatctacagccttattggtgctgaaaattgaatgtctctttaaagggctcgacactctgaacctatcaaccaataataacatgaccatcggccacgaatcagagtgcgttgacaacaatgcaatggctatcaacaaatacagcaaatttcccaaaaacttatccacaaagataatgatatacttacaattgttgagaaagttggggacagaaagcaagaacgagactattacaatatcgtctttcatgtccgttattactggactggctcattttctaaagctactgactagatttggattatacacaagcttagaaaacaacaaaaaaattcgctcggtaaatcctttgttaaaatttttgagggaagtggaaaagaatgagcttttcgaagagaatccatttcaattcatcaagacgcctgttaacgctacagatagttgtgctggttgcaacaaatatatacaagaggaatgtgttcaattctatgagtataggtggcatatagcctgtttcgtctgctcctcatgccaaaagaaaattaatccgatgagcttaacagatcccactttcaataaagagaagaaaagaatattatgttctcattgttcgatcaatgatcctgcttccgtaccgggcttcagattcgtcactaagctggcgcagctaatttttctcttaaaaattgccctagttaaatcaagaactgttatgttgaaatcgagagcctctaataaagccggcagtactcccttacagagtactatgctgaacgaacaaacctacattaggacattgaatgacattaaacgattaagatcaagaagagaaagcgtccgagttactcataacaaacaacaagccagaaaatcagtcatattggaaactacagaaacagacttaaatgatccaacgaaacaaggagataacaagaatctagtgattcaaacagatgatctgtctgttaatcagcaagttagtacgcgtgaaaatgtttttagtaatacgaaaacgttaacgttagacgatatttctcgtattgtagccgctgaacaggcaagagagttaaggccaaacgcatttacgcactttaaaaaattaaaggaaactgatgacgaagcttccaatatcgctcccaaaaaaagtggagtctattattcagaactgaatacaacggagttatcgataatcaaggccatcagtttatcattgttaactagcaaacacttgatatccaaaatggacccctattttaataatttagaatctatgattttttcaaacgaaaagcaaatattggcaggtagcttctggaacaaaatgagagttatgatgagcatggaacccaaaaaaaccatacctaaaactgtctttggtaccccgttggacatactatgtgaaaaatggggtgtcgattctgatttaggtgtaggtcccgttaaaatcagaatccccataataattgatgagctgatatcatctttgaggcaaatggatatgtcagtggagggtatttttaggaaaaatgggaatataagaagactaagggaactaaccgctaccattgacagcaacccaactgaagcacctgatttttcaaaagaaaatgcgattcaattatcagctctgttaaaaaaatttgtaagagaactgcccgatcccattttgtcaactgatttatatgacatgtggatcaaagcttccaaattcgactcagaggatgagaaacagcgcattatgttgttgatatattccttgctgccttcatacaaccgcaacttacttgaagcactgttatcatttttgcattggacatcttctttctcctacattgagaatgaaatgggatcaaagatggacatccataatttgtccactgtgataacacctaacatcttatacttaccccataaggaagcatcgaatgacaatgcttcagaagaaccagaatctggattagttgactcattcgcccaaaacaaaggggaaaattatttcttggctattgagattgttgattacttgatcacccataatgaagaaatggcaatggttccgaaatttctggtgaatctcttaagagaggtgcagtcgcagaagttagataactatgagtcgattaacaatcatatttctcacatattggaaaaaaaaacaatcgattattcagaatttgatgtaaagagtcctgtcaccgtcaaagattccactactatggtcgtgcaaagtgaaataaacaaaacagaaaatgatacgtag

SEQ ID NO: 5513 - DNA, 930 bp, Saccharomyces pastorianus
atgactgcacaaaaagaagcaccagtaaagataaccaacaaagacattgctcaggagttcttgaacagatatgacacatttttgttcgattgcgatggtgtcttgtggctaggttcgcatgcgctaccatacacccaagagatcttgaatcttttgaaacagttagggaagcaattgatctttgtgactaataactccactaagtctcgtttagcatacacaaagaagtttgcctccttcggtatcgacgttaaagaagaacaaatcttcacttctggttatgcatcagctgtttacgttcgtgattttttgaagttacaacctggcaaagataaagtttgggtatttggtgagagtggtattggcgaagaattgaaactaatggggtacgagtctcttggaggtaacgattcgagattggatgtaccattcagcgcaagtgaatcaccatttctggtcgacggccttgataaggacgttaattgtgtgattgctgggttagatacgaaagtaaattaccatcgtttggctgttacactacagtatttacaaaaggatactgtccattttgtgggtacgaacgtagattccaccttcccacaaaaggggcacacctttcccggtgctggttccatgatcgaatcattggcattctcatccaatagaagaccatcttattgtggtaaaccaaacatgaatatgctgaataccattgtgtcagctttcaacttagacaaatcaagatgttgtatggtcggtgataggttgaataccgatatgaaatttggtgtcgaaggtggattaggcggcacactattagttttgagtggtattgaaactgaagaaagggccttggaaatttcagctgactatccaagacctaaattttacattgacaaactgggtgacatttacaccatgattcaataa

SEQ ID NO: 5514 - DNA, 1029 bp, Saccharomyces pastorianus
atggtggagatgacagctggaccatggtatattagacaacgtgacacagatctactcgggaaattcaagttcatacaaaaccaagaagatgcgagattaagggaagctaccaacggtacggcaaattcccggtggtcgctgggcgtcagtgtaaaacctcacaatgactgcagaaaccggtacgtcaacatcatgccgtttgaaaggaaccgcgtccacttgaagactgtatccgggaatgactacattaatgcgtcctacgtaaaagtggatgtccccggacagagtatcgaaccgggatactacattgccacccagggtccaacgaggaacacttgggaacagttctggcagatgtgctaccacaactgccccttggacgacatcgtcattgtgatggtgacgcccttggtcgagtataacagggaaaagtgtttccaatactggccccgtggcggtgaaggcgatatggtcagggttgcaccgcaattgcaaggccccggtgggttcagggacaggtccgagtttccttgcgatctgcagatagaattcttgagtgagcgcaaagtgaaagacttctacacggtcaccgatatcaagttaacgccctcagaccccagtgttgggcccgccaaaactgtgcatcacttctacttcgatctttggaaagacatgaacaagccggaggaagtcatacccatcatggaattatgcgctcattcacatagccttaattctcgcgggaacccgatcgtagtgcactgctctgcaggcgtaggaaggacggggacgttcattgccctcgaccatctcatgcatgacacccttgacttcaaaaatatcacacaacccctaaggcgccctgaagagtatccagaagagtacacacgagacctaattgagcagatcgtgttgcaattgcgctcgcagagaatgaagatggtacagacgaaggatcagttcctgttcatctatcacgccgccaaatatcttaacagcctctctgtcagacaacagaaagctaaataa

SEQ ID NO: 5515 - DNA, 447 bp, Saccharomyces pastorianus
atggtctctaaacctttttgcactagggatgatccgcctccttcggacttgatgaaccctcttctgagatcacccttctcactgacgaaattcccagcagctaagggaccactggaaataacatgtgtgttatttaaatatttggccattcgcctttgttgtccaccattgccgtttactcttttactgttactgttattgaagtttttcttgtctctcttagggccctcctctagcttcactttagatgcggcagcctctctctcctccttagattttctagcgactgcttttggcttaaactttaatgaaggctttgcaggtcctccggtagatgaagaatcttttaatgacggcaagcgcccattgcccttattgctactcatgttttactggatgatataccacttaaagcaaaccaaaaaaaatgcgttagatgtattttaa

SEQ ID NO: 5516 - DNA, 5373 bp, Saccharomyces pastorianus
atggaccttatccaggggctgatacagcagccaaaagtccaatccgcggacgaaaccattccaacactgtgtgatcgggtcgaaaactccactttgatcaatgatagaaggtccgctgtgcttgggttgaaggcgtttagtcgtcagtatagagaatctgtgattgcatcagggttgaaaccgttgctcaacactttgaagcgtgattatatggacgaagattcagtgaaggcgatcttagagacaattttaattcttttcattcgaggcgatggtcatgatgatctaactagaggatggatttctcaacaatcgcggctgcaaaatgggaagtatccttcaccattggtgatgaaacaagaaaaggaacaggtagaccaattctcgctatggatcgctgatgccttgacacaatccgaagatttaattcatttacttgttgaattttgggaaattgacaatttccatatcagattgtatacaattcaattgttagaggccatgatggccacaaggccgttgaaggcgagaagtgccttgatttcgttaccaacaagtatttctactatggtttcactgttagatgacatgcacgaacccattagagatgaagctattttattattgatggcggtggtcaacgattccccccatgttcaaaaattagttgcttttgagaatattttcgaaagattgttttccatcatcgaagaggaaggtggattaagaggctcccttgttgtcaatgattgtttgtctttgattaataacatcctcaaatacaacacctcaaaccaaactctattcctggaaaccggcaatttgccaaaactggcacacttattgagtgaaccaatatctcaagatgaaggctttttctggaatgaccaaagaataataaatataaacacggctttggatattgtcagtttaacagtggaaccgggaaacactgtcacctctcaacaccagaacgtcttattcgattcaagcgtcttgatggttgtattgcgtctggcattttttcacaacatccccaaaagggttagacctattgcgctcttaaccgctgcaaacatgatcagaagtaacgaatatgcgcagttggaatttagcaaaattgacgttccttattttgatccttcattaccaacaaacgctaccgcaaatgacggcccagttaaattagttcctgtgatagatattttgatcaattggatgctttatgctaattctgttcatacattcgatacaagggttgcgtgttctagattattaaaggcttatcttatggacagtttcgacattcagaaagatttcttatcacatcaagagcaattgtataaccaaccttcaacaacaaatagccacggtgctaaagagaacgatatttctgaaaacgttgatgaagaagaaagtgcaaatgaagagaacatatcagacactaagggtgtgagccttctcaaggcaaacttatttgaagttttactaaattatgatacagaattgaatttaaacccttttaaattgtttttcacaactgatattttcatgtttctattccaacaggaacacaaatcgagtgaagaactacgtgaaattacaagaaacgttactatcggtaataaccttgacgacgaagaacccttaaaggctattcaaacaataagtgaactattgactacttcccttactgctgctgacatcagaattcccatctcttatttgactttcttgatatattggctatttggtgattctaaggctaccaatgattttctgtcagataaatcggtaatcaagtccttgctctccttttcttaccaaatccaggatgaagatatcactattaaatgtcttgtaacaatgttactgggtgttggctacgagttttcatccaaagaatctccatttccaagaaaagaatacttcgaattcattactaaaagtttaggaaaagacaattatgcttcccgcatcaaacaatttaaaaaggattcttttttctcagaaattgaccaaaacgaagatagtatactgactccggagcttgatgaaactggtttgcctagagtgtatttcagtacttatttcatacatttattcaatgaaaacatgtatagaatcagaaccgcattgtcacacaacccagacgaggaaccaatcagtaaaatttcatttgaagaagttgaggagctacaaaatcaatgcgcaaaactgaaaagtgaactaggatccttgcaagctgaaaccaagaccacgaatgaggatctcactgaaaaattggagactttatctaaagaacatgaagaattaatagaaaaataccaatcactaacctcttcacatgtgtcattgaaagaaaacgtttctggtttagaaattgaactaaaaagtattacggaatccttaaatgaaatgaccaattcaagagatgcgctcgaaacgaaggataaagagaattattttgccttacaagagtacaaaggcatgattcacaaacaggaggaggccattagaattttggaaaaggaacttgaaaccatttcttctcaaaagaagaaagcagaagatggtataaacaaaatgggtaaagacttattcgctttaagcagagagaaacaagcggtggaggaaaaacagagaagcctacaaaaggaaaaggataaaagtgatagtgatcatcaaaaagagaataaactgctaaaagatgagattactagaaaaataactgaaataaagacactaaatggaaacctagtaaaaacaaaaacccagtacagtgctttgtcagaagaaaaggaacaaacttcgaaagaacttgtcgagtacaaatcgcggttccaaagtcatgataatctggttacaaaactaacagaaaagcttaaatctctagcgaataattatagggacttgcaagccaagcatgaattactaatgaaatccacagaagaaaccaagagtgaaagtaacacgcaactatccaacctgcaggacgaatatgattatttatcacgggaaaaggaaaattttcaaactgaaaaagatcatcttacagatgatattaaagaattaaaagaaaccatttccagattagaacacaaaaacgaagaaactatctcaaagtacaattctgaaaaggatgagtatgagtcacaaattaaccagttgagagaacagttgaaaagcgcaactaccacacaggatgacaatgtgaataaaatttctgagttatccaaagatattaaaaacttggaaacgacactggaaacttgcgaaaattctaaacatgatctccaaacaaaacttgaagcttcagaaaagactttggcggaaatgcacgaaaacgaggagcacttaaaggaagagaaaaatcaactggaaaaagaggtcgctaacaccaagaaacaactcaatactttgcgtggcaattttgagtcattagaaagcgaacacaaagattcgatatctcaagtgagagagtatgagaaacaaatcactgacaaagaaaaggaatataataaaaatatttcaaaactgaacgacgagatcagggctattcaacaagaaaatgaagcactatgccaaaacaacgacaatttaaagaacgaaattgaagaagttaaacaaaccttggaagaacagttaaacttgaaagagtccaggatggaagctttaaattttcaaatacaagatctcaaagtaaagaaccaatctagtgaagccgagttatcggagtcggtgaagaataaggaaattgaaacagaaaagatgatagaattacaaaaagaatgtaactccagaaaagagaaaattagtgaattagaagagaaactgaaaactttagaagtaagaaattctcataatttagaactgctaaaagaatcagaagaggctgaaaatgaattaaaagaggctaaaaaggaattggaaattagaacaaacgaggtaaaaaatcaatcagagaaaatcgcgaatttagacaagctcaacgagaaaacaggagctgagctatgtcggttgaaaaagacatttactgataaaaaaagaaacttagaagagcagttggggaaactaagaaacgaaataaaaatcaaaagccaagcatttgaaaaggaaagaaagttactcaatgagggttcatcaacaattacccaagaatattctgaaaagatcaacatgctggaagaccaattaaataaaatggaaaatgagagcgaatcaaaaacaagactaattgatacaagtaggagtgacctggagaaagccactttgagccatgatgaaattttagaagaaaagcggaatgagattaataaaatgaaagacgaaattctctcatacaaagaaaagataaatgaagcaaacacgaaactactatcaacggaacaagcacatgaaaatgggttaaatagtttgaaggaacaacttgaggctattcaagaatctaaatccgaggttgaaaggaaattgaaggacatggaggaaaaatctgctcacctcaaatcagatttaaaaaaatcaaaagaaactgcgaaagacttaaaaagtgacattgaaaacaatgaaaaaagaatagaacttttagtaaagagtgggaaggaatctgatgagaagtttaaacagtataaagaaattagtcaggtagacattaaagagttgcaagatgaaaagactgatttggaatctcaaatcgtagaattcagaaaaaaaatcgaagagctacaagtgaaactgaaagacgaagcagaatctaacagtaagatagagaccatacagcaagagctaactaatgcttatgagaaaataagagttaatgaagaagaaaatgtattattaaactccaaattgaaaaatttagaatgcaatttaagagataatcaagacgagatacagagcactaaggaaaagaacgaatcattggattcttacttgaaagatctgaagcaggagttgactgacgctcaacaaaaggctaaagaatgcgaagaaaagagtaaaacggaaattgaacaacttcaagcagaagcgtctcgatctcatgaaattgccaaacaacttgaattaaaatacagtaaccttgcaacggaagagcaaacttggaaaagaaatgaagaagctatcaaaaaatccactgactctcaaaaaactgaaattgaaaaattagttgaagagttggagagattgaattcagaaaacgcacagttaaaagaagcgaatgaagatcgctcggaaattgatgacttaatgcttttggttaccgatttggacgaaaagaataccaaatatcgctcaaagttggaagacttaggtgttgagctcagctctgaagatgatgacgaagatgaagacgatgaagacgaagaagaatag

SEQ ID NO: 5517 - DNA, 423 bp, Saccharomyces pastorianus
atggatcagaaagtgtggctgagcttcacgcatgatagtgatattctgaactatttgacagccgtcggattggttgacgatactagaaatctatcaactgcccacgttccgtttcgcgatcatgcctaccataaatcgtggtatatcccgcaaggcgctagaatatatactgaaaagatccaatgcgttaaggatttctacatacggtatgtggtcaacgatgccgtggctcctatcgagacttgttcagatggtccaggattttcctgcaaagaaaatcagttttacgagtatgcgaaagagagacttgaaggcctaaatttctatgaagattgcagcgtttccaatgttagcccccaaagagaattaagcttttattgggattggaatacaaccaggtataacgcgtcgttggtagactaa

SEQ ID NO: 5518 - DNA, 816 bp, Saccharomyces pastorianus
atgttcatgtcactggcctatgccattttatgtgcatcgctaactgatgcagccgctatcccaactggcagtttggcagatgctgaccagatcggctctcagcaaaggttttttcccttcttaggcggctctggaccatatttctcatttcctgctaattatggcatccccgcagacattcctgtaggttgtacgctaacgcaggtgcaaatgattggaaggcatggcgaaaggtatcctaccaatagtgaggccaagggcatttttcagacatggtacaaaatatccaattatacaggtaagtataacggaccgttgtcgtttctgaattacgaatatgagtttttcatttcccatgaaagtgacctagaaatggaaaccaccttggaaaactcgatggatgtgctgaacccatatactggcgaaatggatgcgaagagccatgcaagagaattcttggcaaaatatgggcagctagtggagaatcgcaccagcttccccatctttacctcaaattcaaaaagggttcatgataccgcccgtttttttatcgacgggctgggcgataacttcaacgtatcattgcaaacaatcagcgaagcttcatccgctggagcaaatacattgaccgccaagagctcttgtccgaactggcgttccaatgtcaatggtgacatactttctgagtattcgagtgaatatttagaaaatattgccaatcgtctaaacgaggaaaataaagggcttaatttaatcaagagcgacgcaaatgcattattttcttggtgcacttttgagcttaatgtaaagggctaa

SEQ ID NO: 5519 - DNA, 918 bp, Saccharomyces pastorianus
atgctattatatgacgatgataattacagttcttcgtcggatagcgaacaacagtttattgaagactcccagtataagagcagcgatgacgaagaagaggaagatagtgagaaccaagcggtagatgataaccaggacgaaggactatcactaaggagaaccttatcattaggaagggatgaatctaccagttctttatatgaccttgcacaaccacgttcttcagaaactcctttatctcaggccaagaaacctactgatttcatgaaaggaagaactgacgaaaacaaagatgcacagcaggctgttaggccatatccattaaaacgtaattcctcttctggaaatttcatattcaattcagatagtgaggaagagagtagcagcgacgaggaacagaggccgatgctggtgaccaaccagctgactaaccaagacgcttcaataaataatgcaacatctaacccggtaaatattccaacgcaaaagaaaataccaccctcaaagcaacaaaatgcatcagatagctcacagagctttagaattgtaaataatactccttcacctgccgaagtgggctcaagtgatgttgccatagaaggttacttttcccccaggaatgactccattaaatctgtcgtttcaggaggaggtgtgatggaccagcgggaccaaccagaaattgacactttgtccaaaggatttgaggattgtcatatagataacacggataggaccaaggacaagaacgctgatagcgcccatgccgcaggaaaagaaacttttatggcagattcaagcaacgaaagtttacagaaggtgatgcataacgcaaagggtttggcaagcaagtacttacatccatggaaaaaaaccgatggtaaacaacgagaaaacagcagcagtactgacagttga

SEQ ID NO: 5520 - DNA, 2130 bp, Saccharomyces pastorianus
atgtcaacaaatttagcaaattactttgctggtaaaaacgattttgaagatgagcatgtaaatagaaatgctaacgaagagattagtagcaaaagcaatgacaatgttgctagtaacgataacgacaacgacgatgaagatatgggaccctcaatatcgatggctgttcaagcaaaaagcgatgatgaattccataaatcaaccttcaaccttaaaagaacaaggtcgatgggcctactcgatgaatatatcgatcctactaagaaactgttgggaaggtcagacgatttatataatgacgacaatgaatactacgacaacacatctgatgttaattcatcaggtagttcttcagatgatgattacgataatgactatcacgaccactcaacttctgtttctccacctcctgcagataatgatagctatttacttccacaggatgataatgacgtagtagtagagcctgaaagacatgtagactatctatcccatcaatggaaggagtcagaaatttctaattcttggaaatatattattttgaagaaaaagaaaagggacgtagatttggtaaatgctgctaggttagagaacgcatcatggagaacatgggcaaaggcgagaaacaatttaaaaacagtctctcctgaagtggttaactggtcaaaggactcagacgtcacgtggctgtatgggcctatcgtacgtgattctgaagttaatgttcaaaaagaggaggagcacgatttggaaagaggttatggttcggatgatgaaaatttcaaaagaatgacaaagcccactaagaaatcaaagtcaccagccgccgctcctaaaccaatattgaagaaaaggaccgtcacggaaattatagaggacaatgctttatggaaactaaacgaggcaagaaaacacatgacagaaatgaagcatgcatcagttataatggatcccaacggaaataaaaacgttcacgacgattttgatgctttggctgctcaagttaacgcccaatattatcattatccaaaaaagtcaaacagtaacgtaagtttgaaaagccaaccttcagaaaaaacagacaaaaaatcttccacgataccgaactcctcggggggcaatccaaatgagaacgataacaggggtatagagacttcaaatttaaaatctgctcttcgtggtaaaagaacgccgtcacttccacaagcagataaaagcattcttaagaataacactaatgacaatgatattgactacttagacgaaaacgtggactcgtctttacactctaaccttcaccaactttattcatcgaaatctggattgaatagagataacgaaaaccattcggtaggattgtcgtcaatattaacatcaagcccaagcgaaaaacccaacaagcccactaaaaatagacatatacattttaatgatagagtggaacaatgtatggcgctacgatatccagcatctcaatcggatgataatgatggagacaaggaacatattgatgctaataacaatgctaatgttactaccataaacaataacaatactccaatgttaggctcctcaaatggctccgcatctaattatcgtaatgccggtgctagtgatgatgatatgtcatcatcatcatcatcatcttcttcatcatcatctcactcggaagatgaagagcatggtggtctttacataaatgctggattttcaaggaggtctgattctggaattcactcaccactaacagataactcctctataggttcatctttcacctcgagatctcatgtgcgtcctataataaagctacttcctgacacaactttgaattatggatccgatgaagagtccgacaacagcgaattcaacggttatggtaatgctgtctcacataatgtcaatacatccagaggttatgattacatatatgactataattctgtttacactggtgatacttcaagctttatgccagtggattcatgtgatatcgtagatgtgccagaaggactggatcttcaaacggctattgccgacgacaatgcatcgacttacgagtttagcaatgccgttcagtccaaaaacaacaaaactacacaagccaatcaattccccgctaatgataat

SEQ ID NO: 5521 - DNA, 405 bp, Saccharomyces pastorianus
atgggtatcaacccaactttcatcttcggtcacccacaaatgatgtctccattagccaaatactcaagagatcaaccaggtctatgtgaacgttttgaagtctttgttgctacaaaagagatttgtaacgcttacactgaactgaatgatccatttgaccaaagagcacgtttcgaagaacaagctagacaaaaggaccaaggtgacgacgaagctcaactagtcgacgaaacattctgtgacgctctagaatacggtttaccaccaaccggtggttggggttgtggtatcgatagattggccatgttcttgaccgactccaacacaattagagaagtcttattgttcccaactttgaaacctgatgtattaagagacgaagttaagaaggaagaagaaaaataa

SEQ ID NO: 5522 - DNA, 363 bp, Saccharomyces pastorianus
atgtcccaacaagataacgttaagtccgccactgaaggtgtcgctaacctacacctcgatgaaaccaccggggaaatggtctccaagtctgaattgaagaagcgtatcaagcaaagacaagttgaagccaaaaaggctgccaaaaaggcaactgcccaaccaaaaccagcttctaagaaaaagacagacttattagccgatctggatccatcgcaatatttcgagactagatcccgtcaaatcaaagaaatgagaaagacccacgaaccaaatccatacccacacaaattccacgtttccatttctaatcctgaatttttggccaaatatgcccatttgaaaaaaggtgaaacctttacctga

SEQ ID NO: 5523 - DNA, 1650 bp, Saccharomyces pastorianus
atggaccaatatactataccaacagacctagattcgttacctaccgcttcacccccgccttccgtccatcaggcgtcacaacaacaacagctctctcccatattggctaacaaagcccgctctccattcgataacagaagtcagagtcaaaatgataaggctttagaaacgtcttcggtgaagcaggtagcgattcctatacacgcaatcccttcatctgaatcgggggaattgtcaaaactccaaaacgatacagttgagacattacctgaaataggatcatccaatagccgcaagaagcatactcatataatcatactaaaatctttaaatgcgacatttgaaaccaaattccttgtcgtaccatttaaaccggacgggttaaaattaggtcgaccagttaccaataacttaaacaagaatggaaaaacttcagcatccaaaagagatttgttttcacaacaagtaaggccagataacggaaacttcgattccagagtcctttctagaaaccatgcttgcttaagttgtgatcccacaacggggaagatatacatccgcgatctcaagtctagtaacgggactttcgttaatggagttaaaattgaccaaaatgatgtagagttgaaagttggcgatactgttgatttaggtaccgacattgataccaaatttgaacatagaaaaattagtgcgtacgtagaagagatttcggtcattcctttgatgaatacagtggctgattcgacgagtttgatggcgaagaagcaggaatttgctaataaggacggtgatatttcgaccgatataaatggaataaaattagacagagcgcatcttactcaacacatcccgctacgatctcatttaaatgagaattatacagaagctggtgtaacgtctgccacaacagcccaaagggcagcttttgaagctgccatgttcggagatgttaataatatagaactagatgacgatatcctaggattagaaaccgaggttctcagtgggattttcattaacaattctgccggaacaagcatgaacttaataaatatgataaagacgttaactactgaattatctttagaaagtcaagaaatggaaaaactacactccatgcaaaactttgtgacaaattataccgcaaacttggattctataaacaagcatatgattgaaatgaatgagaagcatctactcaagctaagcacggccttacagaaaactctttctgaaaacaatgacgcactactcaaagaatctgaagatcagttaaaagagatgaatcaacaaaacaacaaaatcaaatttgcatgtagtttgaaagaaaagcaaaacaatgaaatacttgaagatctagaaagtgaacttaaggatctgaacgtccaaatagaagaagagagacaaaaaaattcgactttaaaacatagtaattcaagcaataatatcaataacggaaataacaccaaagccaagtcagaagatttaaaggaagacacaaaagatagtcaagagacgttagttagtactgaagaagtaggcattgtcgagagcaataaaccaaaagtcggtaaaggaatgcttttcgggattattgctatttcatttggattagctgcaacagctgttaagcaattgccgcattaa

SEQ ID NO: 5524 - DNA, 183 bp, Saccharomyces pastorianus
atggcggagctggaaagaagaagaaggcctcctccgcaactgcaacattctccttacgttagggatcaatccatctcgccaggaatgacaaagactccgcaaacttcaccgccgaagagggctatggggagaacgagatcaactccagaagtagcgggtccagttcaatgcagacatggacca

SEQ ID NO: 5525 - DNA, 990 bp, Saccharomyces pastorianus
atgctaggacgttctatgctaggttctactgctgcaaggtcagtgagatgtcaacgtcgtggaatattcctccctacagccgcaatatacagcttgggttcactagtgtttggtaagaaagcaagattggcagatgccatggagcgtggtgatttacataacaagaacgtagactatgcgaaagaggctgaagaacgcaccgagtcacgtattatggctctggctaatagtagaccaatgaagccccggtacgaaggccatgtccccctctatcggtatgagaagctgctactgttcgcgatatccggctggaactcattcttccatcctgaagatggttataacattgttcagctgggtgaggcgactgccctgccagtctttcttgagaatttgaagcaaacaatgctcagtgatccctcggggaggcgtatcctgaaggagcaacccaatattacggcggacattttacacatggataagctagccaagttgccgcataacacttttgggtacgtttactatcaatggttgaaaagggagaatgtttctccagacaccagagcgcctgtcaaattcatcgatgatcccatgcacgcgtatatctttaagaggtatagacaatgccatgatttctaccatgctctaaacaacttgccgattatcattgaaggggaggtcaccataaaggctctcgaaggtgccaatttaggggttcccatggccattcttggtggtatccttgcacctttgcggctaaaaaaggcgcaacgggaaaggttatacaacacatacctcccctgggccatcaggacaggactaagttgcaagccattgatcaacgtgtactgggaagaaatgctagaaaaggacgttgatgccttgagaaaagaactgcaaataactcctcctccagatctaagagcgatgaggaagaagcgtgcagcccttaaaaaggagcttgacgtcaaatacaatacacacgtgtga

SEQ ID NO: 5526 - DNA, 1257 bp, Saccharomyces pastorianus
atgggaatacctggcttattaccactattgaaaacaattcaaaaacaggtaaccctaaaaaaatatgtgaaccaaacattggctattgatggctatgcgtggctacatagggcttcttgtacgtgcgcttttgacttagtaatgggcaagccaacaaacaaatacttgcaattttttattaaaaggttgcaactattaaaacggcttaatattacaccatatgtagtttttgatggcgattcactttttgtaaaaagtcacacagaaatgcaaagaaagaagagaaggttagaaaatgaattaatggcaaagaaattgtggtcggctggcgacagactcaatgcgatggaattcttccaaaaaagtgttgatgttacacctgagatggcaaaatgcattatagactattgccaggtacattcaattacatatattgtcgccccatttgaagcagatgcgcagatggtttatttagagaaaatgggtcttatacagggcattatatcagaggactcggatttattagtgtttggctgtaaaactctaataactaaactaaacgaccatggagaagctctggaaatttcaagagacaattttacatctttaccagagagttttcctttaggtgaactaagtgagcaacaatttcgtaatctagtctgcttagcgggctgtgattacacaagtggaatttggaaggtaggtctgatcactgcaatgaaaatcgtaaaacagcactctgctatgaaagacatacttgcgcaaatggaacagacagataaatttcggctaagcaaaacgttcaaacaggaagttgagtttgccaattatgcgtttcaatatcagagagtgttttgccccctatcaaaccagattacaacattaaaccatatcccacagcctctcataaactgtcgtgccgaaataatgaagatcataggatgtattggctctgttgttgaaaaaagatcaggaatacgaaaagatatcattgacactaaaaacattgatcacaaagtttatgaaagaatagccaaaggggaactgaacccagtagatataacttctaagcttttaaatagagagaaaaaattaagaataagaaacccactcagggcaaatatacttgtaggtcggtccgaccttctcaaaaaggtacccagacagttgactgtaagaacacagagtggaacgtttaacgcggaaattccactcgagagtaaagaggtttctttgtatattcaagcttattga

SEQ ID NO: 5527 - DNA, 1068 bp, Saccharomyces pastorianus
atgggaaagaaaaatagaaagggaaaagagaatagtacaaatagaaattttttccgaaaggtagaaaatactaaagattccagtcctaatctgtgcactgcatcccaaatctgcacaaccggtgtagaaaaagaggctagcccaacgattgatgtatcgcttgtttcaaagaaagatggaagcacgaaaacagaaagcagtgtttgtttcgattatccaactataggcaatttagtttcttctgtggaaaaactgtatattttaaaagaattagaggccgcgttcccagacataggaaaaaccataatcaaagctattttgattgcctcccaaggggttttggaaccggcgtttaactctttactttacttttcaaatccaacggaaaacacagctttcgcactaccaatgaagcctataagtgcgcaagaggttagtaaaattgaaattccagatatattacagtatgaaatactggacgatttcgaaaatgaagcctcatcagaagaaatggaaggtcaaatgtacacgtctgtaacattcacaaacactgagccggaacagagctctgtagtaaatcccacccatactgaaagaaaggccaaaccaaaccgaggagtggctgaatcgacaagaaattcgaccatggcagacgagcacagtgcaatttcatcgaaggaaaaaagtgtgcgtcttgaagaaaagaagggcataaatggtttaacaggagccgctgtgaaagccatttccatcgctaaaaaaaaaagcgaaccatcgaacaacttgtttgacattttagattgtgacgagtctggcgaagacgaagagcaggacattaaagtccacatatcaaatcaagaaaacaaagacgcgggaactccagagaggccggtctcgaaaaagacgggcggcaaaactcaatccgatgatattacaagcaagccgccggttgagactagcaacgacggagggtacaaatctcccttcggcactgatagctgtgattttttccctatcgatgcaaaaaatccaaggcaggtgaattccagcgcagggaacaagatgtag

SEQ ID NO: 5528 - DNA, 1254 bp, Saccharomyces pastorianus
atgcttccaattaaagtactaccaaattcattcagtttcgtatcaagattgcaaattcgatggattagaactaatttgttagtgatgaattctaaggtcggagatgactcttcgagaggtaaggtagccgcagagaagaaggccaataaggacagtagtccaatggatacgaaaatcaaaacaatgaagacgctcacgaactcgaagaatccaacacgttatttgagacgaagttttgtaccaaaccacagaaatgaggagagagaacatgataatttaaaggatgtattgagcaaaaagtatttgaagatggaaagttgtactactattactacaggagaaggatacaaccttaaagaatgcgtcaggttcctaaaaggtcaaggatataaaccgacaaacttgataaccggtgaaatcgttacatttaggtaccaggataatggccataagggagatataatgattctgggccaaaatggatctattgtgagttggggtttcggtgaatctaccgttagagacaaaatagtgcctttagttgaaggagcaagtataaatccgttggctaaagaagatttcgagacagaagatatggactacgtggaattagtaaagaaacaagatgttgaaaggtttctcagcggaaacaatggggcgaagccaaaatttgtggacgaaagctttctttctggggatttgatactaatcaattcgttagatgccgatcaaggaatgttagataaggcagcgttttccagtgggctgtctagaagcactaatttggctgtcctggaagaagctatggaaaaacacatatcaaaaacgagaacaataacggaaaatatttctaaagggacgaaattgaatttaaaatcaaatgatgcattaaaatcaataggccggctctttttaatcagagggaaattgaatctctactccgaactgattgaaactcctgatctttattggagtgaacctcagctagaagtaatttttaaaaatgtgtcgaggtacttagacattggcccacgaataaacattctgaacagtaaactggattactctacggatgaatgtcgagctcttatttctcttctaaacgaaaggaatggtgcttttttggaatggattattatatatctaattgccttcgagctatgctttgaaatatatcatttttaccaaagatactattctcctcagtgtatagagacgaagagtaatgatccgaatgttaaagaaaagaattag

SEQ ID NO: 5529 - DNA, 765 bp, Saccharomyces pastorianus
atgcagattctgtctcgaggaaaagcaaaagctcaagataagaaagtaaacaccatgactagcaagaacagactgcccaccccatcggaaaaagctgacggtaaggaccacgacaaggtttgcgtcctgaacaaggccacagatatcagaagagcggcagagactttggccgtagccttccatgactcaaaggcgttcgattatatttcgaagaaattcttcaatatccccatcacggaacacgtgtccaaggatagaatcaatgccaccattgcgtactacgcgtcgtgctatttggactcaccccatggtgagatctccgaagtcaacgatttcgacgccgttgcattgtggagtctgccacctcacgtccccaaggtactgagcaatgatcctaagttcaataaggacttcatcgaagacttgagtgaacgcagaaagcaagtcattccggaaggtatcaactattattacctcttctgtatcggtaagaatctgaacgagaagagcatcaaaggctcggtaagaacgattttcgaagaatacaagaaaagggctgacgaggataactgcgctattgtgcttgaagccattgccgaacatgctagatccgtctatgaatacttcgggttcaagaattacaagacttttaaatacggcgagggtgaagtcgattccaatggaaattacgaccctaacggtgaagggttcactagctacttgatgatataccacaaagacggtgataaagtcctgagaggataa

SEQ ID NO: 5530 - DNA, 333 bp, Saccharomyces pastorianus
atgcgtgacggtaatgctttttatagggcctcgtcgatttgtaactttgccagtttccaattcttcagacattctttgatccatgctttgaagctagctgcgaaaagtttcaagatctttccaatggtcaaattaatatggttatatgtatgcattaagctgttgtatgacgaattgttaatttctagcatgtctgatatacagattgatagacaatctttcaatttggataaatcttggttcaactgtttgatctgtttagatctttcttgttcagtcaattgtttgatttctaatttattgagattcattgttggcgtagacgtttcatag

SEQ ID NO: 5531 - DNA, 2694 bp, Saccharomyces pastorianus
atgaatttgctagcgcagaagcatcatccgggcataataaagttgtattacactttccatgatgaagaaaatctgtattttgtactagattttgctccagggggagagctactttctttgctacataggatgggcacgttcaatgaattatggacacgacatttcaccgtacagttggttgacgcattagaattcatccattcccacggtatcatccatagagatttaaaaccggaaaatgttcttttagataaggacggtaggctaatgatcactgatttcggtgctgcctctaccatagactctagtctgagcgataactcaacccgatgcaattccgacagtaacagtgtaaacgacaaccaaagttgtgcttcgtttgtcggaaccgctgagtacgtgtctccggaactgcttctttataaccaatgtggttattgctcggatatatgggctctaggctgcatgatatatcagttccttcaaggacagccacctttcagaggggacaatgagttgaaaaccttcgaaaaaattgtggctttagattatccttggggccccaacaaacgtctcaataacactacttcgccgatcaatccactcgcaataaacttggtacggaaaattttagtggtagaggttaatgaaagaatctctctctcggtgataaagaaacacccgtattttgctaaaatagactggaatgacaaagtcaagatatggaggggaatttggcaaaacccacagggacaactaatacaacagtctactggagtaccctctagttcaccacaacatgtgctacccatccggcaactgcatgtgattgacaccccagcaagaaatatacagatcactaaacaaaaacgtaagaaaccgacaaaaatttccagcaccactagcagtatagtagtatggagaaaaaggcttggtatatccacaggcaaggatgatttgggtaccgtcccatccactgctcccacaattattgtccctaatgacagcaaaatttcaaccgctacagtgacacatttgagctcgaattctgctccaccggcaagttcccaacccattcaagctcaaacgaaaagaacgcaacctactgctcctaatagaataccccccaaagttctaataaacagtgctaatataaaaaataagccaactccgcgacagaaggctattgtaccaacaccattaacaccaccaacacaaccaacaccaccaacacaaccaacacaaccaacacaaccaacacaaccaacacaaccaacacaaccaacacaaccaacacaaccaacacaaccaacacaaccagctcctctagcgccgccgtctgttccgtctgcacctctggcaccaccatcaacacaatcatcattatcggcaccatcggcaccatcatcgatacagtcatcattaccagcaccatcggtactatcaacccagacaaagcaacaggatatggtaccaactctagatgtgaaaaatacgatcgatccctctactctcaaacaagactatgtctttatatatggaattccatatgaagccgaagggcctgccatgtccttgaatagctataataaaattgataacgatttgataacgtcactagttacacagtataaagaagaattaaaaagctctaagatgtttttacagttgttgactttgaaaaaaaatggaatcttgagctacaggaacgcaggtcaagaagatcgcgataaccaaggcaatatggaccaccaaatggctaatattgaggattcggatttatccatgtatgattttgaattcaatgaattgtcgagaaaagggtttttaatcttagaaaaatacaagaataagctatggtttatctcactgccctcatattcaatattgtctaaaataccatttaatgctgagaaatccttgacaataaatgacaatgaaaattgggttgattgcttctttagagcaagacagctcctagaggaaaagcaaattcttgataaaattagtaatgtttcctttgacagcaaagtgtctaacgaaacgacatcgcctccgccaacatctaaaaaggatcacacaccaagcataagcaatggtgtaacaccgcctgcctacgatacaaaatacggaagccagaacaatgtacgacaaaataataacgtaaagcaagaagcgttttcccacatagccactactggcaaagacaagcccagtgtaaattcagcttccgccattactcacccaagggttttgtcaggcaatagcaccaataaaagcacaagaaaaacaatcgcaggatcgccaaagagtgctccttctgctaatgcatatagcaatactacaactccaatatcgggcaaccggtctactaatgtaacgaataatagacacgctcctttactatctaagagacagaacctgcctacatattccaattcatctcctacagtcaggtctcaaatcaaatcagcgggtcaacgacaaccaacgccttcgccgccactttcacccatggaatattcagccgtgaaagagaaatattcagcaccttccaacatggtgattagtagcagtaggtacgaggttctgcatactcttaataacagccaaacaaattttgatagggagatagctagtagaggtgcatcggctgcatttaaaagtttacaaaagaataagaagaaaaattag

SEQ ID NO: 5532 - DNA, 144 bp, Saccharomyces pastorianus
atgacatctagaaaaaggtctccgcacgatttcatttttaaagaggagctgggccatggctcttactccactgtattcaaggctgttgataagagaagtccgaacaagatctacgccatcaagtatgttcgaagaagcacataa

SEQ ID NO: 5533 - DNA, 501 bp, Saccharomyces pastorianus
atggtagttggaatttgtgagccgatggagggagagcagctttacttggcgctctggacctttatatacgaaagatccatgaagaaagtgcggcgggccccttttgcgaaggggcccgagatatcgcatcttagtaataataatactattgggtgtggtactagtataaaccaagggagcagtgatggccagcacagcaagggtgaaaagatatcaacggaaatgagtgctaagtacccgacaacgatgagttgccgagaggcgttcgatcagctgacgagttgttactcgatcggaggtcaatttagaaactactatagacatggggatttcacatcatgtgacaagcaggtatcaaaattcaagttttgcatcgtccatggcagcgaccctgtgaaagtgcaggaatggcacaaggaacaagtttccaacaacaagacactgcaaaacagcaccggcatcatctggcaggagaaagagaccgccgtgaagaagaagtga

SEQ ID NO: 5534 - DNA, 402 bp, Saccharomyces pastorianus
atgatacgaaatgggaaacaatcaaagaagagggacggagaacaatcaacggtaaaggaattagagcaatgtcagtcaataaatttgttaataaagttttgggagaaatattttttgtttaaagggccgaaatcacctattatgaatttcgaaatattctctcaaattggtaaaattcaattcgaaataaagggcttactttatataatagtcatttctttatgtgattctaatagacttatggtcaaggatattactgttttacaaaagacaggtggaaacataattaccaatgcggaagctaccatcaaacttaatgacaaatatcagaacaataaccaaatgtatatttatcaggtgatggatgatattataagcgaactaacaaacaaaacaaaataa

SEQ ID NO: 5535 - DNA, 717 bp, Saccharomyces pastorianus
atggagaatgcgaatacaaatgattatgagactgttctaagagacattgaagattcggttgctattaggagcgaagaagttttagataaacaggaatcaagactcaagcatactctgcatgaaattacttcaagcattttggcaataaatgaagaaaacgaatttattaacccctacagaactaacggagttgaggacataggagaagatgagtcatttgttaatcctaaaatcttaacttcgaaaatcaaggaactcaataaattgatggagttattaaaattgacttacctagaacaggagacgctagactatttcttaaggtttactttgtcttcggcgaacccactacacctgaactcagagaacgacccccaaattgtggtgttgagaaaaagggttgacgatttaaaacaagagatttcagacgttcatgaaagtaagatagaagagataaaaattgagattcaagagacgagccacaattttgctgtaaagcaagattcgacaaatgagctttatttagagacaactgctgacattgatagttgttggagttcactaaacgaacttaaatatttaacaaattacgacgaaaatctctcggaagacaaagatctcgtatcaaaatcaagtgattcagatgatgttgtagaggagacgtacgtgaaatggacaaaatctgctttctttacaaaaagcaagagcaaaaattaa

SEQ ID NO: 5536 - DNA, 351 bp, Saccharomyces pastorianus
atgcccagttttccgttcccgttcacaacaccgccttgcctcctcaggttcgttagctcgttgatcagcacgttattttgtatttcgttcgtcagctttaccagcgatattcgaagattgttcccgatcatgttaattcctccaccgttcttgaccagttcttcatttttgttcgagatcagcgtatgtatcagctgcaacaccaccagctcactcacctccgtatccatctgtacttcactttcttccggtgccttctgcactcatggctctcttcccacaccaaagcttctttatttattttctttttttttgtctattctacacatcgaaaaaaccacgttaaaatga

SEQ ID NO: 5537 - DNA, 363 bp, Saccharomyces pastorianus
atgatcgtgttgttggggctcttgaacagtttttggaagtttcctgtcttgctctctagcttattcagcacggtgtccctgtacagtttcaacagcttttctcttttggggtccatagcatgtcctccatgggttgtagtcgtgcctatcacggcacctccactcttgcctgtgtgcgattgcgattgcgattgcgttgtaccgctctttataccgttcttctggatctcgtcctccatcgcccttatctgttcagtttgtgctctcttgaattcatcgtacttgcccactaggagtttctcaatatcatgcatctctaggccgtgcaggcttaactgcccatcgttcagcgttgtcctgtag

SEQ ID NO: 5538 - DNA, 546 bp, Saccharomyces pastorianus
atgtgtattctagtagacgcaatgaatgtcaaggagccgttagtcaattttttgaaaagcgtcttgaataacgtaaacttagcatttcagtacagaatcagtcgatttcatttgcagctgttgcaggagaccaatgtcttgaggttcatacacagaagaatagagaggtggtttggactggagccaaagaccgaaccgtccccctatataaagggagaagaggaccaagttatctgtagagttgaccactacattgagtgttccaaatacgagttgattgacctcaaggcaaaggaaatacagatgcattacgagaagatggttttcgagatgacacaggaattaaaaggtgacaaaagggtattctctctcatagctcaaacatatcaaagtagcggcgcagagagggttgagacaggggtcgtttcgagaaagcatgagcgacgatatagtgccaaggaaatccagacaattccgctaaggttcaagcctatacgtttgaaaagaagaatacagccggtgaatgaagaaaaaattgatgattaa

SEQ ID NO: 5539 - DNA, 1377 bp, Saccharomyces pastorianus
atgggacaaatactatccaaccctgtaatcgataaagagaaccactccggcgcggactcgctgaccgcgttcgggctatgtgcaatgcaagggtggcggatgtcgatggaggactcgcacattctagagcccaatgtcatgacgaagtcggacaaggaccacattgcgctttacggtatattcgacggccacggtggcgcgaaggtggcagagtactgtggcaacaggataatggacatcctactggagcagaagtcgtttcaaaagggagacctgccaagggctctgattgacactttcctacacacagacgtgaagctgttgcaggacccgatcatgaaaaacgaccacagcggatgtacggccacgtccatgttggtatcgaaatcgcagaatctgctggtgtgcgccaattccggtgacagcagaactgtgctggccatagacggcaacgccaaggccctctcgtacgaccacaagcccacgttagcaagcgaaaagtcgcgtatcgtggcggcagacgggttcgtggaaatggatagagtgaacggcaatctggcgctgtcccgcgccatcggcgacttcgagttcaaatccaacaccaggttgggccccgaagaacagatagtcacgtgcgtgcccgacatcatcgagcacaccctggactacgacagagacgagttcgtgatcctggcctgcgacggtatctgggactgtttgacctcccaagactgtgtggacctggtccatctcggcttgcaagagggaatgactctcaacgaaatatcctcccgcatcatcgacgtatgctgctcaccaaccacggagggaacaggcatcggctgcgacaacatgagcatcgtggtcgttgcactgctgaaggacggcgaaaacccggcaacctgggccgatcgtataaaggccaagccccgccactccaccatccgctccttcgcggacaagagaagaagggttttcagctactacgatttctccaagagtaatgacgaacaagtctttgccgtcaccacgaaaaggccccaggacaagttcaccagggaccacgaggctgcagtagccgccgtgactgccgcggatgcggacgcggacgcggatgccatggaaatcgacgacacagacgcggacacagacgcagaaaacctggacccttcaagccagtctaagcacaccatcgacctggcgtcgctcgaggccctgctaggtgccacaggcggcgttaagacagacggcgccggcaacaaagtcacttacactcttcccccctccgcgctgtcgcaactgcttcaatcgatggggcaggatcctagcgccctgatggaagccgccaacaaccatggcgactcgcagccgcagtga

SEQ ID NO: 5540 - DNA, 2844 bp, Saccharomyces pastorianus
atggaaatgaatgtactagaatacaacagagtaaaacaaaagaacgaacaaaaggcaataaagcacgagcgcattcgccacccacaccagctcgcccaggcacccctcatcccttcttccacaatgaacatgcaagacgctaataaagaagagtcgtactcaatgtatcccaagacctcttctccgccaccacccacaccaacaaacatgcaaatccccatctaccaggcacccatgcagatgtacggctacacccaagcgccctatctatatccaacgcaaatgcccgcgtactcgctcaatatggtcacccaaaaccaggcgatgtatcatcagaatactagcccacactacctgcctcctcaaaacaacatgaacaccgggagcgccaatggcaacaacagcataaacaagaagaagtggcactccaacgggcctgccaacaacagcaatggccagaacgccaattcaaacggcaccggtgtgaattacaacaaatctcacaactaccaccacaactactcaaacagccatatccccatgatgaacggcgcaaacaacggcagcaacaacacacccgtcaagaagcaggccaattcttccagcaccaatggctcgaccccctctccttcatacaactcctcgccgcagtatgacttattcaagttcgatgtaactaaattgaaaaacctcaaagaaaactcgtcaaactccattcagctgccactgttcatcaacaccacggaatcggaattcgctgcggcaagtgcccagagatacgatctaaacttgaagtctttaaacttggactccaaaagtttggaagaacacactaaagaaaagagcaccacccatcaccaaagggaaagtcacacgatatcaaaaaacggcgaagaaactgaggcagaagtggaatcagaaatagataaagaaaccaaagatagagacgataaaaaaccaccagcgagcaaagataaccgcgaacataaaaggaaagtagaaccaaagaaagacgacaccgagaaggaacaaggtgaagaagctattttggaggcgccagtccctaccgtttcgcctcttgtggaaaatgaggagttagaagagatggctgacgaagataccgccaaggcgtcgtcgtcacctacactccctactgccaaatcttggtccgccattgcctcagacgcaatcaagagcagacaggccagtaacaagtcagcctcgggttccaccatttcctcagcttccgcttctacaacagcaacaaccacgccattatcgacagcagccacagcaaaaaccaattcttcgctatcatcaaagcaacctcaaagaaaggacaaaaaatacgtcccaccttccactaagggtatcgaaccactaggttccattgcattaagaatgtgcttcgatcctgatttcatcagttacgttttgcaaaacaaagacaccgaaaataagattccattacattccatcattccaagaggtataatcaatagggccaacatctgtttcatgagttctgtattacaagtcctactttattgccaaccgttcatcgacgtattaaacgtcttgagcacacggaacacaaattcaagaataggaacctcatcatgcagactattagatgcctgcttaaccatgtataaacaattcgatatggaaacgtatgaaaaatcattagaaagtgcaaatgaaaatgaaaagtctacagagacagattcaaagaaaccaatcaaatctaagaatttccaacacaatgctaccgcagaggctgtcaaaccggatgatttttacaagactttgtccacaatttctaaattcaaagacttacaatggggccatcaggaggatgctgaggagtttttgactcatttattagatcagttacacgaagaattaatattcgccattgatggtttaaccgacaacgaaattcaaaacatgttgcaaagcatcaatgatgaacaattgaagattttcttcatcagaaacttatcgcgttatggcaaggcggaattcattaagaatgcaagtcccagattaaaggaattgatagagaaatatggcatgattagtgacgactctaccgaagagaacggttggcatgaagttagcggtactagcaaaagaggtaaaaagaccaagactgcggccaagagaactgtggagattgttccgtcaccaatttcgaaattgtttggtggccaatttagatccgtactagatataccaaacaacaaagaatctcaatcaattacactggatccattccaaacaatccaattggatatttcagactccagcgtgaatgatctggaaactgcattcaaaaaatttagcgaatacgaactattaccattcaaatcctcttcgggcaatgatgtcgaagccaagaagcaaacatttatcgacaaattaccccaggttcttttgatccagtttaaacggttttcattcataaacaacgtggataaagataacgcaatgacaaactataatgcatacaatggacgtatcgagaagataaggaagaaaatcaaatatggccatgaattaattattcctgaagaatcaatgtcttctataatgttgaagaaccacgcctcaggcatcgccgatagaaattataaactaactggtgtgatttatcaccacggcgtaagctccgatggcggccattacacggcagatgtttatcacagtgagcataataagtggtacagaattgacgatgtaaatattattgaactggaagacgatgatgttttgaagggtggtgaggaagcttctgattcaagaactgcctatattttaatgtatcaaaagaaaccttaa

SEQ ID NO: 5541 - DNA, 708 bp, Saccharomyces pastorianus
atgacagcgaacgagaaacaaataacacgactgctcaaacccctaaggcttttgttattgggagcgcccgggtccggcaaagggacacagacttcaatgctcttgaaacaaattcctcaattgtcttcactttcgtctggtgatattttacgtcaagaaatcaagtcagagtctacattgggccgcaaagctgctacttatattgctcaggggaagttactgccggacgacctcataacgcaattgataacgtttcgtctttcgaaaatgggatggttgaagccgcccgctacatggctacttgacggattccctcgaaccaccgcacaagcttccactttggatggcattttgaagcaacataataccgacttgaacctagtggtcgagctagacgtgcctgaatccgctatactcgaaagaattgagaacagatatgtccacgttcctagtggaagagtgtacaatttacaatacaatcctccgaaagtaccaggcttagatgatattaccggtgaaccattgaccaagagactcgatgacaccgtggaagtgttcaagaaaagactggaagaattcaaaaaagctaacgagcccttaaaagtgtattacaaaaagagcggacttctctgcactgtatcaggggaatcttcagacatcatattccccaagttgttgaacttaataaccagcaaatttggccaatag

SEQ ID NO: 5542 - DNA, 231 bp, Saccharomyces pastorianus
gtaaacgacggcagtgccagcttgcatgcctgcaggtcaaataatattcaatcatcgatcttccaaccaatcgaagagcatggcaaggtttttgggtctgggtctgggtctgcaactgggactgattccagtacagaaaaagtgagcgatcctaatcatgataggcatagtaataatggaaatgaatccaatctaggctcagagcaagaaacagatatagaggaagattaa

SEQ ID NO: 5543 - DNA, 2001 bp, Saccharomyces pastorianus
atgaaacagccagttgaaacgatttgtgacggtctcacaagggcgttccatgaggagagggatgattctgtctctttagtaactataattgatatgtataacaagcaggtgaactctgaaaactcccttgaagaaaaagaacactatttagaggtcctgttggaattgttgaaggaggattctgatgttgtgaaagagattggttgggatcttccaaaaagtttattgaaatttttttcaagtaagaacgttgatgcaaagaagcatttggcgctaagtcccattgtttctagtgtgatgaattgcttctatgagctagctacaaatgggaaccccaaagagtgcctactgattgcttgcgaactggtatcgagtcttagtatagacttggctgaagaagatgaatctaatgaagagaccgcacactcacttgattctattaaggatgaagctacaaatcatgataatgaaatggcggatatttgtctgaagactgaaatttatgcagccaaggattcagtggaatttatacctaacttgaaaatttacgctctattcgaacttatgagttcaacgttgaaacgcgttgacactttgtacccatcaaaatttctggctatggcaatttcagcaattgtcaaatacttgaaaagtaatattgaattcatggatgatgtatactttatcttacgcagagtttacagtttttgcgtaacctacgttgcccctcagccatcaaataatcttactaatggtattgatccaagtgatcttgaaaaaatctcaaaagatgaatcaattttgcagaaaaagctattagcaaatctaagtgtgcttgtaatcgaaaactgtctgaagaaaacaccagggaatattgataaagtatactataacaacctgatggataagaaaacggatacaagtgaacatagtaccccaatcggaaacatatgcaatcaatactacaagtatgttgtttcgttgggtgttgatgtgaagcaacttttcgaggaatgtctggaggaatccaaacgtatatatgatgttgttctctcggattcccaaacctctataactaagtccaaagaagaaatcaaccagctagtatacgaattatcctatgcgtaccaaaccaagaagttggctcttgagaagaatttagagcttgaccaatatggagttataatcctgtccgcgatatattactctagcaatggtgtgcatttgttgtcacaagttgatatccaaaattcaatatatttgtatctacgatgtacgaccgcttcattattctcagaaacatatgacaataaatttttggaaagcgcagtacgttattggttatgggtatccataactaggacttctataaaagatataaaagccagtttagagctacttccagaacacattaacacatccttcttacaaatgttgttaatgaaaggttgcaacgaaccaaatagcgagaccaaactaactgaacttacacttctgacgagaatattgtgtttgatgcctgaagacacatcattttcatttatatttgaaacattactgcattgcccatacataacggttaaaattgctgtccttgacattctaaaggatatgatgattaaatcgccagagacttgcgatagtagcacatccactcctgtacctgagggaaatgataatacgccaataccgccaagactacccccaaggccctacatttctatcaatgaagaccgtatggcttccatccatagcattgctgagatgagcttttccactgccaggcaaaggaaaagaacacaaggtgatttaattctggtgttaacttacatgaacttttttgttagtttaagaaataaatgggatttgggacttttgacacttgtaaataatgagatttcagaagcctttcaagaagagggtgagcctgagctgggattcataaacatcgccaatgattccttgagcacgtatatagaggaaattagcaaacgcctataa

SEQ ID NO: 5544 - DNA, 801 bp, Saccharomyces pastorianus
atgatgagcccggcggcaaggaatcttcttgctaggagattataccacccaaatttgaaaagggccccaccaacctctttgcttctgaagcaaaaaatacgtctagctcaaaataccaataacgcttcaaatgaaagccccatatcgttctcacatacaatgtccgaggtatttagtgttctgcaaccgaatgcacctgatccggatgaagacaaaacaatcggcttggaacgtgaactcctattaaccgaacgtctaaataatgatgaacttagcggaatcataaataaacatttccatccatcatcaacaaatagcaaccgattgatagatacggacgttctattacaaaatttccccaagctgaacgaaagtgatttagagctattaaactttgctatagatgagaaaccccaaaaggattggcacgatctacagtacgattttattcagttatggtataccaagtcattcggcttccttggacctcgatcccaattcatcgagaccaactcgccttctccattgaagtcccagttcttgcagcttccattgtttgagtacaactggctactcttacaaaacaagaaagatataaatttatcgcccactgatttaaagaaactgatcaagatttatcggttagatgacaaaaaatttacttggaaaagtatagatccattcagtaaagtcataatatcgctcgtcatctgtgtttcagtctttgtgtggtgtgatgagagtgcaaaacaaaaaaatgagaaaccatccgctgaaaacactatcgtagtgtctgtgtag

SEQ ID NO: 5545 - DNA, 534 bp, Saccharomyces pastorianus
atgattcgtatattatcaatgatccggacttttacaaatgatgataggttcgtcaacaacgttttggacgttaagccaggtttggccattggtagcaaacattggacttcatacatattacctcaatttttgaaattattaccatcaagagaaaaattcactattgttgcggtagccaaattttggaccaagttgctcaataacaagaaatataatcaagaagaactgacgaccgtaagacaacaaatttcctctatgggacaagatctggcgtaccagactatgtatggtttattccacacacaaaggtcagatttgaacagttacacggatttgctaagagctttggtagctaagttcccaattgaggcaaaagattggctggtcgttgtcctgcctcaaatatgtaataaccctgcaggtcatgaaaaattcattaataaattgctcattacaaggggaagtagagcggcggggaatgttattttgcaatggtggttggactgtagtacgcttccaaattatcaagcatag

SEQ ID NO: 5546 - DNA, 207 bp, Saccharomyces pastorianus
atgtctgatgttatgaattttgttttaagacacgtccccaactgtgagattggtacatctttgccatattttgtttacctactggaaaatctagtttcggaattcagaactcaactaacatcgcaagagtttgatttcatgtttgaaaagattcttctagcttattatgattcgtatattatcaatgatccggacttttacaaatga

SEQ ID NO: 5547 - DNA, 1959 bp, Saccharomyces pastorianus
atgagctccattcatgaggttgttgctcttattgaagaattgtattctcctcatcccaagcatgatgttaatcagattcaacagagtttacaatcaatccaaaaatctgagcaaggattccatctagctactgagctattgtccgatgagaagtattcagcgaatgtcaagtacttcggtgcgttaactttgacagtgcaactaaatacgctgggcgaaagtaactatgaaactctatggaatgtcttcaaatcgaatttaatgtacttggctaaattcagtacactgtacgtttccaatccgcacatgtacgggcagtctctaatcattattagaaagctaatgtcgaatctgtctttgatttttaccaaaatcaacgatccgcaacttaatagtacttgtgatgaaaatgttattaagcaatggaacaatcccataaatacatttattcagctcatgtcgcttcataatcataacattcaagacgatcaactattcctcgaatcaatcaattgtcctgtcacttacgaacaactatcccacttcgccagcctttctgaaaaacataacgaattagtattgacttttacagaaattatcgtggaagatttgaccaaattccaaacgaagagacattccatgtcccaaatccatgaaatagtccatgaacacctttacatttcgaccatggcattgatcaacctgaatttgactgtaccggtcatctttaattcaactgtgtttgactgtattaccgcctggattaactatatttcattgaccaggaacgtatcttcgagcggtagaatggatttatcggaaattttccgaaacctgattaatttaatgtatcagtctactgaaggatcggatggctacgataatgctgaaaagatcctgacgattttcggtaatattttcgctaatgatcctctgctaatgagttacgatttgagacaagaaattgagtgcatttttctaggtgtagtaagacctgattctgtaacaacagattcatcgaataaaaacttttggatgttgcaatacatgaattatttagttaccaatgaattgttttcggaattgaaagaattgaccatttgtatcgtcgatttcttacaaattaataccttagacgtttgtaataaactattcacaaatattcaaacgaataacaacggtcaagttcaaaatgaatttatccaagaatatatcaaagtacttttgcaattaaccaatttccccttgacgcctgttctacaggaattcttttctgtaagaatggtcgatttttggttggatttatctgatgcttataccaatttggctactgaaactttgaggccagattccattgaattatctaaacaaattttccaacagttaattaatatttacctgcccaaaatatcgttgaatgttaaacaaataataatcgaggaagatggtgaaaatacttccacgaacgaattcgatgatttcaggaacgctgtttctgatcttgcccaatctttatggcagattttgggaaatgatagtttaacgaatgtcctaatcaatggtatgggccagataccagctgcaagtgaggattcactcatcatcaaggcttctgacactctgttccaaattgaaacgatgtgttttgtgttgaatcctatattggttgatatgaccttatcggaaagcccatggattaagaacattgttagttcaaataaatttttcaatcaaaacatcatatcagttttccaaactgggtttcaaactaacgccaacacaaaagttggccaaattttgaagcttgatattgtaagaacaagcacaacgttaatcggtaccttagcagggtactttaaacaagagcctatccaattgaacccatacgttgaaacattatttcaagttttgcatacttgcactaattttactagtaaaaacgagcaagaaaaaatttga

SEQ ID NO: 5548 - DNA, 1263 bp, Saccharomyces pastorianus
atgggtaagaatattacagttgctcatatccagtatgactttgatgctgtcttggaagaggagcatgaaaatgatgatggcttttacatcaacgtagacagaaacttgaatgaaatcaaggaatacagaataaaagtgctagcaaataacgagggcgtagatgcaggcgaaaaaaatagttttgagaagatcaattctcatctctatatggcacaactgaacgggcagaaatttctgttcaataccatcaagaaagattattccaagatgttcgagggtgcggattatactgctgtagattcgatcaaagttccgacgaagcagttcatattaggtactacagaaggtaatattaaagtactggattcgaattttagcttggaaagagaaatcaaccaggcgcacgctggtgagataacaaaattaaaattttttccaagtggtgaggctctgatctctggttcgcaagatatgcaggtaaagatatggtccgtaaaagatggttccaatcctcgctcattaatcggacacaaggcgacaattacagatattgctataatagaccgtgggaggaatgtactttctgcctctctggatggtaccattcgtctatgggaatgcggcacagcatcgactgttcatactttcagcagaaaagaaaacccacatgacggtgtgaatagcatagccgtattcgtgggaacgaaggagcaactgcttgagagtccagatattaaaaaaagagatctagagtttggaacatacggtaagcatgttattgcaggccacgcttctggagttattactgtacatgatgtcttttcgagaaggcaaattactcaactcccaagcaagttcacatcttcatgtaattcgttggcgatcgacgtgaatgatccgaactatatttacgcaggctatgaaaatggaatgttagctcaatgggatttaagatcaccagaacacccagtcgatgagttctctattaatgaaggcgttcggataaatagtgtttgctttgctgatgaatttttgcttgtctcttctgggcttgacactagtattaaatttgatattactagggatccaaaaagccagcatcccgtaattgcatctaaagcgcctatatttttagtctccgatgataacgaagttaatcagttttgctacacgccgcacagtgaatcacaaaaggaggtgatcacagttggtaaacataatttctttgcattgtataatttgagtagtgatgtttttatataa

SEQ ID NO: 5549 - DNA, 1377 bp, Saccharomyces pastorianus
atgttatgttggtctaagtcggtggattcaaataactacaccaacgcttacgtctccaacatgaaggaggatttaaaaatgaagggtaatgattacgtttatacttcaactattgctaatgtcggtgccattgtttttcagttaccatttatgtacttgttgccaagattccccgctcatataattttaccggtaatggacttgggttggacatggtttacatttgcttgttatagggcaaaaacgttggctgaattgagagcatacagatttatcctgagtgccttcggtgcagcctactacccagtatcacaatatgttttgggctgttggtatgcccccgacgaaatcaactcaagagtttgcttattcttttgtgggcagcaattggggtccgtgacctcgggtctcttacaaagccggatattcaaaagtttgaacggcgtgcatggtctggctggttggagatggatgtttttgatcgacgccattgcaatttcgcttccaacagctattattggctttttcgttattcccggcataccatccaaatgttactctttattcttgactgatgaagaaatcagaattgcaagagccagaaataagagaaaccaaatcaaagacggcgtcgacaaaagtaagctagttccactttggagcagaaagctttggaagaaagttttctgcaccccagcattttgggtgcttgttatcttcgatatgtgctcatggaataatatgaccgcctatagtggttcatatacattgtggttgaaatctaacactaagtactctatttctcaggtgaacaacctgagtgttattccggcttgtctagggtttgcgtacgtgatcttttgtgctatgggtgctgatatgtttagatgcaaatggatatttatggtatttgccgctattatgaataccgtttcttgtggtctgctaatcaaatgggatatttcctccaaggctaaatggtatgcatttttcaccacgtatttcagtgttgctgcgtcaccatgtctatggtcgtttataaacgacttcttgagattcgatcctcaagtgaaagccgttacgtggatcgccatttattcattctctcagtctacttacgcctggatccccacgttggcatggcctactgtggagtcgcctcgtttcaagaccggttacaccgtaagtttaattttcggtgccatttacggtttatggacatttgttgttttgtttttctacaagaggaacgaaaagaagcacgctctaggaaatggtatcatcttatatgatagtagtaagggcgaagagctcccagaatttgtaaaaaaagatatgaaggaaaaagacggctactactatctaagacgatcctga

SEQ ID NO: 5550 - DNA, 789 bp, Saccharomyces pastorianus
atggactttttaaacgatactgatctggatttggccttgccagtaaccgctgaaatatccaaggagctgtttgcaacagagattgagaagtaccgtgaatctcaaaatgacggggccgatatggctgcgtttgatatcgataagtttttagtagaaaagaatttccactacctccctcttgacgcacttattagagatctatctggactttcacaaaaaatggtacaaacactattagaacagataacaaccaattatgatgattatttgtctttctccaatacatatactgatgaagaaaataaaacgctgttgaacttggaaaggacgcagagcgaccttcaaaaattcatgactcaattgggtcatttggtacaggaagacatcaccaatagtcaagagatcataaaggatgtcttggaatacttaaagaaattggatgagatatacggttcattacgcaaccattcacacttgacagcagcactttcgctgggaaagaagctaagtaagtctcttcatgaaatgtgcggcatagaaccgctagaggaagaaatatgttctggcttgattgaacagttgtacagtttagtcacgacgtcacgtcgaatattgcattcgtttgttgattcgaactcgccatatgctcatcacctgcgtaatgattaccaagatcttctgcaagaatttcaaatatcattgaagattttaactgaaaagtgtttggagaacccatcaagctgccagaaactgtctttaacactagtttccatattaaagatcacataa

SEQ ID NO: 5551 - DNA, 222 bp, Saccharomyces pastorianus
atgaatcaactgcagtccttttcatccatttacaaaacttttttcaaacgaaacgcagtttttgttggtactatctttgctggtgcctttgttttccaaacagtatttgattccgcgatcacttcatggtacgacaatcacaataaggggaagttatggaaggacgtaaaggctcgaatagccgcaggcaatggtgacgatgatgatgaagatgatgactga

SEQ ID NO: 5552 - DNA, 1176 bp, Saccharomyces pastorianus
atgggagcaaaaatctatcctccccctattattgagaatcctcttagcaatattttgagagcgaagattctatctgaaatttcacctcctctatctcaatacaacactttttacagctacaatcaggaattaaaaatgagttctttactgaaaaaaattcatagggtttctcgtaatgagaacaagaaccccattgtcgatttcaaaaaagcaggggacttatactgtatacgtggagagttaggtgaaggaggctatgccactgtctacctagcagaatctagtcaaggacacttacgagcattaaaagtagaaaaaccagcgagtgtatgggaatattacataatgagccaagtggaatttaggctgagaaaaagttttgttttaaagtcgataatcaatgccagtgctttacacctgttccttgatgaaagttaccttgttttaaactatgccagccaaggtacagttttagatttgatcaatttgcaacgagaaaaggcaatggatggaaatggaataatggatgaatatttgtgtatgtttatcactgttgaactaatgaaagtgatcgagaagatacacgaagtagggataatacatggtgacctaaaaccagataattgcatggtcaggttagaaaagcgtggcgaacccttaggggctcattacatgcgtaatgggaaagatggatgggaaaacaaaggaatttatttaattgattttggtagatcattcgacatgtccttattaccgcctggaactaaattcaagacaaattggcaagctgatcagcaagactgttgggaaatgcgaacaggtaaaccgtggagttacgaagctgattattacggattagctggtgtcatacattcgatgcttttcggaaagttcatagaaacgattcaacttcaaaatggaacatgcaaactaaaaaatccactcaaaaggtactggaaaaaggaaatatggggcgttgtttttgatttattgttaaacagtggtagagtttccaaccaaactttaccaatgactgaaaagattgttgagataagaaatctgatagaaggccatctggaacagtacgcaaaagatcacttaagaaatgttatactccatgtcgaagatgaactatcgcatttacaatataaggggaaaccctcaagaaggctctaa

SEQ ID NO: 5553 - DNA, 1728 bp, Saccharomyces pastorianus
atgaattttgatttgggttcaactgtacgaggaaatgactcagataaagctgcatcttcacaatcaaaaggcgttacctcatctcagaaagagcagtatagtcagttgaatcaaaggaagatagcttacgaagaacgactactaaatgaattggaagatatggacgatcctctggatttgtttctggactatatgatatggatcaatacaaactttattgaagttgattcaacatcaggtcaagaagttcttcgaaatacaatggaaagatgtttggtttatatacaggatttggaaacctacaagaacgatcccaggtttttaaaagtttggatctggtacgtcaatttgttcctgagcagtaactttcgcgaatctgaaaatacatttacgtatatgtttaagaaaggaatcggaattaagctctcgctgttttatgaagagttttctaagctattacttaatgctgaattttttctagaagctaaaataatgttagaactgggcactgaaaacaattgccggccttatagtagattattaaggtcactaagccactatgaagacagactccgagaaatgaatatttttgaaaacgaacacagcatatcagattcaagaaaaagactgatagaaagaatagactatggaccggtgccatttttcattcgcaaattttcaacttcatcattgatggctgatgataaggagaaccaggtccaaccccagttgctgtctaatatagatgtccgtaagtgtgctcccagtatacaccaagactctgttaccgctcctggttttaaagctgaaatcggaaagcatgaatatcatgaaatagtcgacagtaattacttggccggccaacatttagaaaatgagaataagagaatacctatatatccggatgcaaagcaatctagtgatccaatctacaaactgattaatactcctggaaggaaacccgagaaaatagtttataactttaacctcatataccccaagaacaacgaagaatttaacattgaagaaatactggccaaatcaagaggttcttataagatgaagcccaaattcactactcaaggtgcgaggaatgctgaaaattgtttcgataatgctgccggtgataaaactaacaagaagcggaaactggaagtgctgaaagagaagcaacagcaattaccaccatcccaaccacctactgtaccgaaagccacacagattgaaattttcagggatgaccctggttctaatcaaggtacgcaaaataataataaacaagtactagtgcaaaccacaacttccattttacctctaaagtccgtgtctgatggaaatttcgcacatgacacaccaagtaagactttcttaggcgcccatggttcacgttcgccgaccgtaaccgccttttcaaaagacgccatgaacgaggtattttccatgttcaatcaacactattctaccccaggtgcattattagatggtgatgataccacaacaagtaaattcaatgttttcgaaaactttacccaagaatttacagccaagaatattgaggatttgactgaaataaaggttcccgaagaagagccgacgtcacagaaactatcgccaaatattggaactcctgacaattctggaagagtacaagtcagcacgacacacgcagaaagaggggactatatgacgcccataaaggaaacgactgaaataatgcgctacctctga

SEQ ID NO: 5554 - DNA, 108 bp, Saccharomyces pastorianus
atgtacatatacatccttttcgctccattatgtcaaggtatgcacggtgatggagaaaaatatgtacctttggaatggctatccacttgggatatggcggttcaatag

SEQ ID NO: 5555 - DNA, 2007 bp, Saccharomyces pastorianus
atgagtaaagccaaggtaacagggttttcgtcaattgatgctgacgatgaaagtttacgcgaacgtcacgtaaagccattatatgcagatgacagcaatgcccaagatgaacagctggatgcccttaacgaattagaaaaagagcataagggaaaaaaatacagagattttaccatgctggtaatcataagggatatcataggaccgctgctattaactatactttcattctatctaagattcaagcgcatagatcaaaacaatcacgttgtctgggatgaggctcatttcgggaagtttggttcatactacatcaaacatgaatactaccacgatgtacatccaccgctaggtaagatgcttattgcactgagtgaatggatagctggattcgatggacagtttgacttctcctctaataatccataccctgaagaggtgaactttaaggtaatgagacaattcaatgcctcattcggtgctttgtgtaccccggtggctttctttactgccaaatggatgggattcaactatttgactgtatatttaatcgctacaatggtaactttggaacactcctatattgttctgtcaaaatttatattgctggattctatgctactttttttcacaatgacaaccttcgcctgtatggtgaggctgtacacgttaagaaaacagcaaatgacgagaaagtggtctctatggatgctattgacagggttatcaataggctgtgtttgttctgtgaaatgggtcggtttatttatcacagttgtagttggtctctacacatgtatagaattgtttttgctttactgtgatactaccttgcctagagtaaaatactataaacactggcttatcagaatcattaacctgatagttattccgtttcttatctatctctactgcttcaaaatccattttgtcctattgtacaagtctggtacaggcgactctacaaccaacacgttatttcagattaatttggagggaactcaaatcaaagttggtcctcgtgacgttgtatttggatcagaattaacaataagatcacatggtttaagtccgaatctgttacattcgcacgttcaattatatccagagggttccggtcaacatcaaattactgggtatggatttgccgactctaataacgtttggaagtttgaattttcaagatcctctggatcgcatctggacattaacgggactctaaacggcgaaatagttccaatagtggatggtacggaagtccgtattacccataaaaatacaggatccaatcttcattcccatgaagtgccttctcacgtctctaggggaaacttcgaagtttcaggctatggatcacaagacgttggggacgccaaggatgattggattatagaaattgtaaaacaaatggattccccaaatcctgactacgcagatgaagatccagacaccttgcaccctgtttctacctttttcaggttgaggcacaaggttttgggctgttacctggcttccactgggctaacatacccagcttggggtttcaaacaggctgaaatcgtttgcaaggattcatggagtcatagagataaatcaacttggtggaatgtagaggaccattggaacaataatttagaaaccccggaagattatgttcccccaaaatctaatttttggactgattttgttttgaccaacttcgccatggcttcgtctaataatgcattagttcctgatgaagacaaatatgacagtttatcgtcaagtgcatgggaatggccaacattgcacaaaggactgcgaatgtgctcgtgggcaggttatatcgataggtattacttaatggggtccccattcaatacatggatatctactacatgcttactcatatttccgttcatcatcatttctgtgctgtatcgatggagaagacaaacgctttatctttcagacgatcaaatctggaaagtgaccattcaggtatttttccttttatctcctggatga

SEQ ID NO: 5556 - DNA, 2682 bp, Saccharomyces pastorianus
atgctgaaagaaagagatggtcctgaagacttgaagaaaacttctttcaaggggttcaaagatttgaatttcgaaatcaaaaagggtgaattcatcatgattacaggtcctatcggtactggtaaatcttcgctattgaacgcaatggcaggatcgatgagaaagactgatggtagaattgaagtaagcggtgacttgttgatgtgtggttatccatggatccaaaatgcttcagtgaaagataatattatatttggttctccattcaataaagaaaagtatgatgaagtcattcgtgtttgttctttgaaagcagatttggatattttacctgctggtgatatgaccgaaattggtgaacgtggcattactttatccggtggtcaaaaggcacgtataaacttggccagatcggtttacaaaaggaaagacatatatttgtttgatgatgttctaagtgctgtagattcccgtgttggtaaacacattatggatgaatgtctaactggagtactcgcaaacaaaacaagaattctagccacgcatcagttgtctttgattgacaaagcctctagggttattgttttaggtaatgatggtgatgttgatattggtacagttgacgagctaaaggcccgtaatccaaccttgataaaccttttacagttttcttcccaaaattctaaagaatcagaggatgaagaagaggaaaaggtcatcgttaatgaattggagcatctaaaatatgaagctgaagtgaaggaactaactgagttgaaaaaaagaactacccaattatcacaaatttcaaacagtggtgaagccgttgtagatggtcacactagcacaaaagaagaaagagcagtcaacagtattagtctgacagtttaccgggaatacattaaagctgccgtaggtaaatgggggttcgtcgcgcttccagtatatttcttttctgttgttggtaccacattttgtacacttttttcttctgtctggttatcttattggactgagaacaaattcaagaataaatcgcctagtttttacatgggtctttactccttctttgtttttgccgctttcatattcatgaatggtcaatatacaattctttgtgctatgggtatcatggcatccaagtggttgaatttaagagccgtaaagagaattttacatacaccaatgtcatacatagacacgacacctttggggcgtatcttgaacagattcacgaaggataccgatagtttggataatgagctaaccgaaagtttgcgtttgatgacatctcaatttgcgaatatcgtcggtgtttgtgtcatgtgtattgtttatttgccatggttcgctattgcaattccattccttttgattatttttgttttgatcgctgatcattatcaaagttctggtagagaaatcaagagactagaagctgtccaacgttcgttcgtttacaataacttaaatgaagtattgggtgggatggaaacaatcaaagcttacaggagccaagagagatttttggcaaagtcagatttcttgattaacaaaatgaatgaggccggttatcttgttgttgtcctacaaaggtgggtcggtatattccttgatatggttgctatcgtatttgcgctaatcatcacattgctatgcgttaccagagcttttcctatatctgcagcatccgttggtgttttgttgacttatgttttacagttgcctggtttattaaataccattttgagagcattgacgcagacagaaaatgatatgaacagtgccgaaagattggtttcgtatgcaactgaattgcctttagaagctgactacaaaaaaccagaaatgactcctcccgaatcatggccttcaaaaggtgagataatattcaaaaatgttgattttgcttatagaccgggtttaccgatagttttgaaaggcctgaatttggacattaaaagtggagagaagattggtatctgtggtcgtacgggtgccggtaaatctactatcatgagtgctttatacaggttaaacgaattggctagtggtgaaatattaattgatgacgttaatataagtcagcttgggctttttgatttacgaagaaaactggccattattccacaagatccggttttatttagaggtacaatccgtaagaatttggatccgtttgatgaacgtacagaaaatgagctatgggatgcactagtcagaggtggcgcgattgccaggaaagatttaccagaggtcaagttacaaaaacctgacgaaaacggtacgcatggtaaaatgcacaaattccatttagatcaagcagtggaagaagaaggctccaatttctcattaggtgagaggcaattactagcactaacgagagccttagttcgtcaatccaaaatattaatcttggatgaagctacatcttcagtggattatgaaacagatggtaaaattcaagcgcgtattgtcgaagaatttggagactgcacaattttatgtattgctcataggctgaagactattgtgaattacgatcgtattctagtgttagaaaagggtgaagttgcagaatttgataccccatggacattattttctcaaaaggacagtattttcaaaaacatgtgtttgagatcgggtattgtagaagaagacttcgagaacagattttag

SEQ ID NO: 5557 - DNA, 1767 bp, Saccharomyces pastorianus
atggtcgctaaaatgaacgacatagtttcggagtccggaaagaataaaaaagaccagaacgtagttctgttccacaagggctccgcatcctcagacgtgagctcagatgtggggaaagactcttcgtctttttgggacgacaaatctttgctgcccacaggcgagtatatcgtggataaaaataaaccgcaaacgtatttgaacagtgatgatatcgaaaaagtgaccgaatcagacatctttcctcagaaacgtttcttttccttcttacattcaaaaaaaatgcctgaagtaccgcaaaatgatgacgaaagaaaggtgtaccctatgttccatacaaatatcatatccaacatgttcttttggtgggtgctgccgatcattcgagttggttacaaaaggacaatccaaccgaacgatctcttcaagatggaccccaggatgtctatagagaccctctatgatgattttgagaaaaacatgatgtactattttgaaaaaacaaggaagaaatatcgtaaacagcatccagaggctaccgaggacgacgttattgaaaatgcaaaactgcccaatcataccgtttttaaagctttgctatttacgtttaagaggcagtactccatttcagtgctgtttgccgttttgtctaattgtacttctgggttcaacccaatgattacgaagaggctgattgagtttgttgaaaaaaaagcaatgtttcataatacacacgtaaatagtggtgtcggttatgctattggtgcatgtataatgatgttcgttaatgggctaacctttaatcatttctttcatagttctcagttgacaggtgtgcaagcaaaatctatcttgactaaagccgctatgaaaaaaatgttcaatgcttctaattacgcgagacatcgtttccccaatggtaaagtcacctcttttataacaacggatttggctagagtggaatttgccctgtcttttcaaccgtttttagccgggttccctgcgatcttggcaatttgtattgtcttattgattgttaacttaggccctattgcactggttgggattggtatcttctttgctgggtttgtaatatctctttttgcctttaaattaattctgggtttcagaatcgctgcaaatatttttactgacgcaagagttaccattatgagagaagtgctaaacaatttaaaaatgatcaaatattatacttgggaagacgcttacgagaaaaatattcaagatattagaggtaaggaaatttctaaagtaaggaaaatgcaattatcaagaaatttcttaattgccatggccttatctttacccagtattgcttcactggtcacatttctagcaatgtacaaagttaataatggaggtagacagcccggtaacatttttgcctctttatcgttatttcaggttttaagtttgcaaatgtttttcttacctattgccattggtacgggtattgatatgatcattgggctgggccgtttgcagagtttgttggaagctccggaagatgatccaaaccatatgattgaaatggaaccttccgctgactttgatccaaaactggctttaaagatgactcactgttcatttgaatgggaggattatgaattaaatgatgccattgaagaagctaaagatgaagctaaagatgaaggtaaaaaaaacaaaaaaaaaaaaagcgtaaagatacatggggtaaaccaaccacaaacgacaataaagcaaaaagattggacaatatgctga

SEQ ID NO: 5558 - DNA, 726 bp, Saccharomyces pastorianus
atgatgaacgttgcatatttgaaagtattgacctatgaggaaattgttaatgcgggtcctcttgttggttcggtgctatttaccaaactttttggaccacaaattggtggtaaattcatttccttttccattgcgatctcggcagcttccaatattttagtcgtcatctatagtgtatcgagggtaaaccaggaaattttcaaagaaggttacctaccattcagtattcatatgtccaaaaactggccattcgatgcacctttgccatccatttctctatgtggctttataaccatcgcatggatactaattttgcctaaagagggcgaatccttcaactatctcgtatcaatggatggttatggtaaccagttctttttgctactagtcggactcgggctatttgtttggaggtccaaacataaacacgaaacgccccagattcgtgcgcccacttttggtgtcttggcgattatcgtattatcattatacatgctggtggccccatttttggcagacaccagcttgaacagagttggtttcttaccaccttaccaaatcatgtcattgctagtgatatttgcatgctttcttttttggttcattaagttttttgtactacccaaactttaccattacaaacttctgcccaaaattacttatctgcacgacgggctcgtggtaacagaatgggttaaaaagccatatttacatacacacttatag

SEQ ID NO: 5559 - DNA, 696 bp, Saccharomyces pastorianus
atggaaccgttgctctttactagtgggaaagcgagtctctcacaagatgctttcatagatgtagaagttggcgatatttccactaaatatggtgctacaaattcaggatcattcagttcgatggacacaatggaagcgcaagcgataaaggcagaaacgactaggtttcttgaggtaccgcaaggtagacatctaggtgtgttttccacggttatcttgtttgtttcaaggataatgggatcgggtatatttgcggttcccagcgtgatcttgttgaacacaggtggtaataagctgatatattttgcgatatggattttcagcgctatgattgcgtttgccggattataccttttcctagagtttggttcatggataccgaaatctggaggacgtaaaaatttcctcgagcatagtttcaagaagcccagacttttaatcagtgtagtgttttcatgctatagtattttgaccggttacgcattaacgggctccattgtgtttggcaagtacgttttaagcgcgtttggagttacggatgactcgtggtccaaatacgttagcatatcctttattgtcctagcggttctcattcacggtatctctgtgaggcatggggttttcatacagaatgctcttgggggtttgaagctgctcatgatagttttaatgtgcttgccggactatacaccctga

SEQ ID NO: 5560 - DNA, 1737 bp, Saccharomyces pastorianus
atgaatgaactaccattgaaaaggacagttgtggatagaattgatcctccaaaaagtaaacacacagtgctttactacttgggcatgtatttcggaatcggttttattcaggcactgctaggtggcaccaaaacctttgcaactttttttgctggtatccaagcctcccggaagatatttgatgatatgctagatttagttttacatgccaaaataaggttttttgacgtaacaccgatcggccgaatcatgaatcgttttgctaaggacatcgaaggcgtcgatcaagaattaaccccttacctagaagtgacaatgttttgcttaatccaatgtacgtcaataattttcctcatcaccataatcaccccccgcttcttaatagtcgccgttgttgtgttcatcttatattacttcatcggaatgtggtatttaacagctagcagggaattaaaaagaatcgattcaataacaaaatctcccattttccaacatttctcagagactttggtaggtgtttgcacaatacgagcctttggggatgagaagagatttatcttggagaacttggataaaatagatcaaaacaatagagccttcttttacctatcagtggctgtcaaatggtttgcctttagagtcgatattatcggtgcgtttattgttttggcatctggatctttcattttgattaatattaataatattgactcgggtcttgctggtatttccttgacatacgccattttgtttaccgatggagctttatggttggttcgattatattcagcgtttgaaatgaacatgaattctgtggaaagattaaaagagtattctagtatcgagcaagagaactattttgactataataaagaccatatacaggagctccagcagtcttcatggcctgaacatggtcagatcgaagttaaaaacctatcattgcgctatgcattaaatctaccacccgtaatgaaaaacgttagttttacagtggaacctcaaagtaaggttgggattgtgggaagaacaggcgctggtaaatctaccataatcacggcattatttagattactggaaccagaaactgggcatatcaaaatagatgggtgtgatatcagtcaaatcgatctagttactttacgtcgtgccattactatcatccctcaggatcctgttttgttcacaggtactattaaaagtaatgttgatccatatgatgagtacgataacaagaagattttcaaagttttggcccaagtcaatttgatttccgcaggtgatattgaagcagcacagaacatgggggagaattctattaccgttcgtaataagtttatcaatctccaaaccgaaattactgagggaggtcaaaacatttctcaaggcgaaagacaattgcttttcattgtaagatcattgttgcgtgagcccaaaattatattactggatgaagctacttcctccgttgattacgaatctgacaatttgatccagggcattataaggaacgagtttcataagagcacaatattaacaattgcacatcgactgagatcagttattgattacgacaaggtacttgtcatggatgcaggtgaagtaaaagaatacgaccatccctctaacctgttgaaaaacgagcaaagcatattttctagtatgtgtcgggatagtggagacctggagcttttgaagcaactagccaaccagtcgcgtgagagatctacgcagtag

SEQ ID NO: 5561 - DNA, 3102 bp, Saccharomyces pastorianus
atggttcgggattctgcaattatccgaagtaatgacccattttgggacattgatgactttactcgatttggaagagctcagttattgaatttttacttgccatgggcaattataatatccattgccgtttatgaaatctaccggtgtatcacgtctcgcaataagaaacttcctgagcctggtctagttaatgaatatttgtatggctctcagcaacaagaagtaggagaagaagaagatgagagactcctgcaaagtcattatgccccggttctttacgttgataggaaggaaaatggagaaatattgaaacaaagacatttcgatataaaggatatagatgtaaagaaaatcgacgctaagaaccacggtggactaacatttaagaatcccaccactgcggaccatttcagaaagttgttcgagatcgtattggtatttttacaagtaatcagcctttccgttttaagagtaacaaacgttaatacagaattaactaatagagatatatccgttttacttttgctgtggttattactactttctctaactctcagaagactctataggccaacagaaaaccactggaacacctgcttcgctgcctacacagttatttggatatccacttggtttccattacgttccatgtatattggccatatcaacgatacacctacacgcattttctacgtttttgaatttacaattatttcgattttacagctaataatgcttacctctccattcaaagacaatcagctcataatgtacaccagagataattctatacttccttccaaagaacacatatcctctattttgagcctcatcacctggagttggattactgactttatatggcacgctcagaaatataccatcaaactaaaggatatctggggcttgtcaatggaagaatattccgttttcattttgaaaagattcgcgaaagggaatgatatgtcaaccaaaaatggcttaactgtatcattattcaagttctttagatgtaatttaatcgttgaattgctatggattgcagttaatagtatcgttaatcttttcccaaccattctaatgaaaaaatttctggaaattgtagatgacccaggcgaatctgtatcatctatgaatttggcgtggctttatatctttgctatgttcatctgtagattaacaatagcaatttgtaattcacaagcgcaattcattgccgataagatttgcttgaaaataaggaccattcttataggagaaatatattcgaaagctctgcgtagaaaactatttacagctcccaaaaacaatgatgatacaactagcgtctctgcgaacctcggtactataataaatttgatttccattgactctttcaaagtgtctgaaatttcaacctacttctttatgacagtgcaagccataattatggtcctaattgtggtaggattgcttttcaagtttttgggcatttctgcctttgcaggtatcttaattatcttgatgatgtttccgttaaacttcaggttagctgagttaataggtaagtttcaaaaatcggcactacaatgtaccgataaaagaattgccaagttaaacgagtgcttacagaacatacgaatcgtgaaatattttgcatgggaaaataacatctcaaaggacattaagctaataagacaaaacgagttaagatttttactccaaaagtctatggtgtgggcactaagttcattcctttggtttgtgacaccaaccttagtcacaggtgttacttttgccatctatatatttgttcaacaccaggaattaaatgcccctcttgcgtttactactctttcacttttcactttattaaagacacccttggatcaattgtcaaacatgctaagttttatgaatcaatcaaaagtgtctctagacagaatagtcaagttcataaatgaggacgatacggaaaagtataaccagttaactgtatctccagacgaaaacaagattgaatttaaaaacgctactttaacgtggaatgaaaatgacacagaaagtacaatatttagattgtgcgatttaaatatcacatttcaaattggcaaactgaatttgattttgggttcaacaggttccggtaaaagtgcactattgatgggcttattgggtgaattacacttaatcagtgggtctatcaccgtgccaggtttagagccaaggcacgatttgatacctgatcataatggactaaccaattcctttgcatactgttctcaaaatgcatggttactaaatggcacagtaaaaaacaatataatcttcaacggtgcctatgatgatgttaggtacagaaaggtgattgatgcctgcggactgaaacgagacttggaaattttaccagctggtgactcaacggaaattggtgaaaaaggtataacgttatcaggagggcaaaagcaaagaatttctttagcaagagccgtttattcgaatgccaagcatttgttgttagatgattgtttgagtgctgtagattcacacaccgccgtatggatctacgaaaattgtattacaggaccaatgatggaaaagaggacatgtattttggtcacccacaacgtttcattaaccatcagaaaagcacattttgcagttattttggaaaatgggaaagtgaagaatcaaggcgctatcaagaaacttgaaaaagagggcatattcaaagaagaaattgctcagatgccttatgagggcaatagggccgaaaaaagcggtaatgaaacaagtgatcttcaggaaagcacttcacaaaaaactaaagcagatacggaggacacaaaatttggaggggatctgattcaaaaaggacaattagtaaaagatgaacaaaaatcaaacggcgccataagtctagatgtttataaatggtatctgaaatattttggaggttggaaagctttaaccgccttgctcactctttatgttattactcaagtactatttattagtcagtcctggtggatacgatactgggtgaacgattccaaaccccatatagaaacttccggtttttcgatgaatgaactaccattgaaaaggacagttgtggaatga

SEQ ID NO: 5562 - DNA, 132 bp, Saccharomyces pastorianus
atggatattgatttagcatccgatttcgaagatgaaccaaatgcacatgcaaacacaaacgctgatcaagatatttttttcgacatcgattatagcaaggatacgaaaaatgatcttggacgcaatacataa

SEQ ID NO: 5563 - DNA, 1413 bp, Saccharomyces pastorianus
atggcaaaccgaaatatgtgtgaaccgtggctgctgctagtatggctgttgctgatctgtaacgtggttcgggggaatcaagaaaccataagccaaaaggatcacgaggtctgttcagggatgtattccaaggaggattacaacgggaaagtggacccctttatatcttttactttgaatgaactgtcactcgatggtgaggacgataacgatgaaggaatcagcgtggctgtatttgattttcaggactatgagcacattggtgtgcagttacctaatgggggcattcagtacatttgcgatgactacgcattagatttgggtctgtgcgatgcttcatccaaggggcaattcatcatccaaaagacggccatcgacccgctaactgataaggaacacaaattaaccagtccaatattgacgttcactcaacaagaattgggcatgcacgacaagacgtactcgatcaataaaaccggttattattgtgtaactacgtcgtctttcgcctcttccaaatcgaagttaaaggccacggtaaatttcagaaacgcttatggtcagctgaatgcttcagaagcatacaagctgcccatttatgcctttttagctattgcttatgctgtatgcacgctaatatacgcttggttatgttggagacatagacatgaattgctacctctacaaaaatacattttagttttctttgttttcttaacagctgataccattttcgtttggacgtattatataattgagaatcaaaagggaaactctagcgtagcccttcatatctacatgattttcatatcgatattcagtgccggtaagatgactttcacatttctccttgctttgttgatatcctttggctacggtatagtgtatccaaaattagatcgtacattactgagaagatgccagatgtttgctgcgtttacgtttgccgtatgcattgcattcctactccaaaaatattcgcaaaatcccgagtctttgtctaatttgattttgattactgctattcccctggtggtatgtttgtttgcattttattatttgactctctcttcaatgagcaaaacgatggcttatttgaaggaacaaaatcaagtggtcaaattaaacatgtacagaaaattgatcactttgtgttatatttctttgtttatactattcttaggcttactcgtctcaactttcgcctatgttgggatggacaccgttgacatgattgaacaatattggaaaacagaattcttggtcacagatatttggcccacttttgtttatttcttggtctttgccgttttcgcattcttttggagacctaccagtacatcctatttgttagcatgttcgcatcaactaccaaccgatatggaaaatgtatccgaatttgatacttgctga

SEQ ID NO: 5564 - DNA, 312 bp, Saccharomyces pastorianus
atgagcgcaaatatcaatgaagtaaaatgttttgaactaatatcctgtctcaagcgggaaccacaattttctgcgagtgaaacgatcaaagagagcgtccttaaaattacgttggcatcctgttgttccagcctcttctctataagatccatgacctcctgcccattatcttcaggatcctctttaaccaaatcacaaacatctagaatatactgccagttatcagttcttaatttaggatctgtcgcccttaatacggcatttctcatttctgtcatggatgatgacatcttgactgaaggcttactatga

SEQ ID NO: 5565 - DNA, 642 bp, Saccharomyces pastorianus
atggagaacttgaatccagctgaagttttcggtaacatcatggtagaatacccatacgtggagtgcacagattcttccgttcttggactgacctacttccataagttttttgactataaaaaagaggaaatatctacatgtatcagaatcgctattgaatacatcaagaagtctcaactaccagagggaggttggtatggaagctggggtatttgcttcacctatgcaggtatgtttgcgttggaagcactacacactgtgggagaaacatacgaaaattcctcgacggtgagaaaaggttgtgatttcctggtgagcaagcagatgaaagacggtggttggggtgaatcgatgaagtctagtgagttgcatagttatgtggatagtgaagactctctagtcgtccaaacagcatgggcactgattgcactgctttttgctgaatacccgaaaagaaaggtcattgaccgaggtattgagcttttaaagcatagacaagaagaatccggagaatggaaatttgagagcgtagaaggtgtttttaatcattcctgtgcaatcgaatacccaagttatagatttttgtttcccataaaggcattaggtatgtataccaaagcatatgaaccagatagtttttga

SEQ ID NO: 5566 - DNA, 1440 bp, Saccharomyces pastorianus
atgacagaattttattctgaaaaaatcggtcttccaaagacagatccacgtcgctggagattaagaactgatgaatcaggccgagaaagctgggaatacttgacgtctgagcaagcagctaacgacccgccatccactttcacacaatggcttcttcaagatccagactttcctcaaccccacccagaaaaaaacaagcattcaccagacttttcggctttcgatgcctgccataacggtgcatctttcttcaaactcttgcaagagcccgattctggtattttcccatgtcaatataaagggcccatgttcatgacaattggttatgttgctgtgagctatattgctggcattcaaattcctgaacatgaaaggatagaattaatcagatacatcgtgaacacggcacatcccgtcgatggtggttgggggttgcactccgtggacaaatctactgtttttggtactgtactgaactatgttattttgcgtctgttaggcctatcgaaaaatcatcccgtttgtgtcaaggcaagagatactttattaagattaggcggtgctatcggtgcgccacactggggcaaagtttggctaagtgcattaaacttgtataaatgggaaggtgttaaccctgctcctcctgaaacttggctacttccgtactcattgcctattcatccaggaagatggtgggttcatactagaggcgtttacattccagtcagttacctgtcattggtaaagtttgtatgtcccatgactcctcttcttgaagaattgaggggtgaaatttacgtcaaaccatttgataagattaacttttctaaccacagaaacactgtgtgtggagtggatttatattatccacactctaaaattttgaatattgcaaattgttttgttgtattttacgaaaaatacttgagaaatcgattcatttattccttatccaagagaaaagtttacgacctgattaaaaaggaaattgaaaataccgattctttgtgtatagcacctgttaatcaagcattttgtgcccttgttaccttaattgaagatggtgtagattcaaaagccttcaaagatttccaatacagattcaaggatgcattgtttcatggcccacagggcatgaccattatgggaaccaacggtgtgcaaacttgggactgtgcatttgccattcaatatttttttactgctggtctggcagaaagaccggaattttataacacaattgtctccgcttataaattcttgtgtcgttctcagtttgacactgaatgcgttcctggtagttttagagacaaaagaaaaggtgcttggggtttttcaacaaagactcaaggttatacggtttctgactgtactgcagaatcgatcaaggctattatcatggtaagaactctccggtctttagtgacgtacatcatttga

SEQ ID NO: 5567 - DNA, 1200 bp, Saccharomyces pastorianus
atgtcatctttaccgaaaatggagcccaactctcacgcaccaactgaagttgacattcaaaaaaacaaagaagactcgatcgtaagggaaaatgaaaatatacctgctccattggggactgtagtccaattattgtttggttcgaacacagattatatgaaaaaaactatcactagagataaaaacaacgttaacgtggagacaataccaacattctcgccttcattagccgatggcgccacacggcactatgagtacatcaagaaactaaacaattccataggacctaaacaaacgaaatgtttgttgactgagaccattgaacatatggacatcaatgactatgttttagtaaaccagtcaacaagatcccctgatgttccatccggtaacaattttacagttgaaagtaaaatatatttatgttggggacaacacgatactacaaatatgaccgttataacaaaggtcagctggacaagcaaatcatttttgaagggtcccattgaaaagggttctgtagagggccaaaaggcgtctgtcgagttcatgatttctgaacctaaggatattattaatgcagcccaaaccgcaagaccagtgaagaggaaaacgaagaatcatggcaaacataggcccgtccacaataagattgagcagaaaattcctgaaagtcaaaatacagagaaggataaagataccttcacgtatattttggactttatccaagacaacattaatttggatatatttatgaatcctcaaaaactgaccttgattgccggtatagctattatgtgcttttggcttcttggtttcaagcctttcaaaagtcaagaaaatttccaaatcatcaagccggggaggatgcttattgacggtcaggaatataactatgtgccaagttttggaaccctatatagttcatatgaggacaaaatattgtctggcaaaagaaagacgagtacagattacgagaagaatgttaacccggtcactggaagagaaagggatatttgggactggatagataacagaggaaacagcgtattacctcaagagcatgcgacgctgggaaacgtcgatagacacacgttacagcagttggtagaaagtgttagggtaacagaattacaactagaacatatgaagactatgttggatgatatcaaaatggacaaagataatttttcaccttga

SEQ ID NO: 5568 - DNA, 2034 bp, Saccharomyces pastorianus
atgcccaaggacgcaaagaaaaaacaccattggggcaggtccttgctaagctcaattgggctgaaacgtaagcacaagaaggagcacacctcgtcaagtgacactaagcgtccggagacaaactatgccagaacttcgcatggtaacggaagtagagccgaagctgcacaatttatgagtggaaataagaacttggatatcccgaaaccacccattactgaaaggtttgcagaatcgccggccaagggctcccagaaggcggactcctccttagcacctagccaaggcgtattcaatattccaatcgtcatagatcctatggagacaaacaggctgaacaaaacgaacacaagcctaactctgggctcgtctaagggtcgctatgcgaatgaaaatctaaatctaaatccgaattcaaattctatgcaaagcttgtctccccaggcaattgaaagggaaagggaaaggccggagaaagaaaggcgaaaggaaaccaatcgtgctgagaaggcgactccggaaagccacaaagcacatactgcctttgaaacttttctttcgtttgctcgtaatgccgttaaccacgtccccaaaataaatgtagaagaagctgatgatagcgctggttccaagaatgaaccaaagcacctgaaaaagaacccgttgcaggtttcaaggaccacatctgaaaagagtactaatggcaaatacgcacaatcgctacaagaaagtgatgatccctttttgaagaatttagataatgtacttgcagcgtccgcatcctcaccgcggatcaaccaacagtctgatacgactacaaccgaaaccaagaacaaaccctctccatttggtaaattcgcatttaccaatctgaaaaatcacgtgcattcgagtttgaattccaattcgctttcaaggtcaaactccaaagacgacatttcttcagacagagccaataaggatttaaatgattttgctagcagagtcactttcgaacccattagacactctgatgataaacctattccaggagaaggaaatttgaaattggaacatttcaacgactctcaagcaacctttgaagagccattaacagaatactctgatttatccgcaggggaagatggtttcgataccgacgacataccgctgcaggacgacgtacgggatagcaatgaaaatgaggtggaaaagagacctagttcaaggaaggactcttccaaattgtcagcagtttcttcccctacagtagacgatgtaaggccaagaagaagagtcaaatcaatgataagcgcagcaaatgcttatcaaaatgggcgccatgattttatacagaaaagactctcttctctttcatctaatggatttacaaaaaacgactcggacaatgaagatcgtgaacccagagtgatgtccaagaagtttctcaccaggaggtcattttctccaggtaacattagtagtggaatgagagtattgccttccacagctttaaaatattcgttgaataaagtaaaaaatagcactgatatcgcaaacaccataataccaagaccaagtatttcgaatggtcatacctcttcaggtatgcgaagaagttctagcaaaagcttttcatcaacgccttatagtattgttgaaccatctggcgaagacggcaatcgacgcaatattgaaataaagggagtcgaatatgcaagtgaaaagaaaaattcagaattccatacaattttcaaagattctggtgtgaaccccgatgaaagattaattgcggatcatagttgtgccttgtcgagggacatcctttcgcagggcaaaatctatatatcggatcaccatattgggttttattcgaatatcctcggttgggtgagcactgtttttataccattcgagactattatacaaatagaaaagaagactacggcaggaatattccccaacggaatcgcaattgacactttacatacaaagtatagttttgccctgatgaatcccctaatgatttttatcaaaatcattaagttaaggtag

SEQ ID NO: 5569 - DNA, 642 bp, Saccharomyces pastorianus
atgagttttagaggaggtaacagaggtggccgtggcggtttccgtggcggctttcgtggtggacgtgctggtggtgctagaccatttcaacaaggtccaccagacagtgttctagaaatgggtgctttcgtacatccatgtgagggtgatattgtttgtcgttccatcaacaccaaggttccatatttcaatgccccaatatatttggaaaacaagactcaagtcggtaaaatcgatgaaatattgggtccattaaatgaagtttttttcactatcaagtgtggtgatggtgtccaggctaccagcttcaaagaaggtgacaaattctacattgctgctgataaactattacctattgaaagattcttaccaaagccaaaggtagcaggcccaccaaagccaaaaaacaagaaaaagagaggtggtgccccaggtggccgtggtggtgccccaatgggccgtggtggggctagaggtggtttcagaggtggtgatagaggtggtttcagaggtggtttcagaggtggagctcgtggtggtagttcattcagaggcggatctcgcggtggtagctcattcagaggcggttcccgtggtggttcccgtggcggtttcagaggtgatcgtggaggcagaagatga

SEQ ID NO: 5570 - DNA, 318 bp, Saccharomyces pastorianus
atgtgctcgaggagatcatgcttgggaaaaagagcattcgaagaagtagttcccttcgaaacatttattgcaccggagatgccttcccgaggaagttggcgtattgcatctaaacaaatagagctgctgttgttgctcgatgtaatgaggacttcgtccatcgagcatgtcgacgaagatgagggtgactttagcctctcgatcctattagtcgctatggatagtttgctctctattggcagagccatccttaacaaacaaactgcaaatgctgaatcagggaaagttgtggcttcgagaaacagcgacttcttgtga

SEQ ID NO: 5571 - DNA, 1560 bp, Saccharomyces pastorianus
atgaaccttcccgtaagtgaaaacatctctttgggcactaacatgaataagtttgacgagtttattgagtccaacgagaaagatttagagacggataccagtacacgaagcagcatagcttccatgtctcccgtggtgaaacctggaccgaaaatccatcctgctggccacaatggatataagccagaacatcatcgtacatccagtgctggaagtatgcattcacaaaggctaatgacgcctactagattaaatgaacaagatcatcccctacaaaccaagccgggtgccagaagggtcgtaacccgtcattcctctgtatctatgccaaatgccatcggtaagaggagatctctcattcaacctatggttgtaccgactacgccagaatctcaaagtaatatatcttttggaaatccattgacctattctgatggctctcatggaattccggtagaatccaccactttactttctagtgaacaagcaatgggaggtagtctccggcattctcgaaatggtagctcacaatctgttaatagtttggcaactcccagcatgcccacaattggtgccgatgtgagtgcgcttttacaagccctcgctacaaaagagttagaacttttagaatgtaaacaaaaggttgaaggtctgaagaagcaaacccagtatgaagaacaaacctattcccgtcgtgcgcgtgaactacaggaactgaaacagcaagtctctaaacatttggacccgtcccaaaacacaccagtgaaagaccgtaacttttcaccagcactccaaaatatacctatggaatctcggtttgaaaatggtggcaacggaagctttacaaattctgcaaggcctcgacaagacaaaatatctccgaatgcgaaacagtcaggatccgtgtccccacaaggcgttcaggacacgcacccaggaagtagctcagcagatctttctaaacagtctctctggagtaaaccattggctttattcaaccagtttgatcagatcattcagcatgaaattgagagaacccttaactgggacgaaaaaagtccaggtccgccagagccacagcaaccgccatcgactggcaaccacgattccacagtacgacatcacattagtgaaccttcagagactgatcaagaagcttcctcacaaggctctgtctccagatcgctatggagctttgtcagcgacgtcaaggcaggtttgttggggatagaggaagaaaatgatagtgatgttactaacgataacagaaatggccttgtaaataagagcggtagacagtatgaacaaaagcagtgtatacctaaagtatcagactggtcacaaccagaagaaagtggtgatgactctagtctaggtatgaaaaaattcaagacgatagataagttcaagacagctgacgatgaccgtgaacatcgagcacaagcaaggaaaagaaaaacgggcactaacaaactacaatttgttggggacaattacaccaatgacacgagggaaggtagtccctctacacaaaatccggtcgaaatggcaaatctttga

SEQ ID NO: 5572 - DNA, 3198 bp, Saccharomyces pastorianus
atgcattcacatactacgccgttcacgcccgaatactcgaatgagttactgcgaagggtccgagacctgtaccacgaagatattaagcattattatccgcagttgaagctggagaagctgttagacctgctggaacatactgagtacctgatcgagttatatctggaatcgatgcgccacgataggcccaatgatgcgctgacggcattcatcattgggtgctactacgtgttcctaatcatcccacaatcgttgcagtttcagacacgaaataagtcctacagcatttacagtgatctaaagaagatgtacgagaacgaaatgaacatgactaacgtagtgctcatggtgaagaaagaaatcggagtggttctggatgactcggtcaagcacgttgtcggtattgagcacaggatcaccaagaaaagggcgttttctgcaccaggcattgatctctcagaccaattggcgtcactatcactggacactgtaggttcgcggggacatctccataagacctcgtctacagaagaagatgcggaccaatcttcgccggtttggactgcaccaaacctggagcctaatgatcaattgaaactggctctattgcccgaagtagtacctacaccagccttctctggatcagcaagaaagacgagtactccaatgagacaatctgtgctactggaagacgtgccctacatttacaacgataacgaaaacacatccgcatcatcagatcaaccgtttggtgaaatcaccgcagataggtctgtgactcatcggaaggactcctaccattccgtttacatggtggatagcgagacttttaaaagtgataatgacgatctcttgaatgtcgaaaccgatgggttcatccagagtttagaaatcttacaaaagcaaagtataatcactgcacctgaattgtttactattttatcaaatcagagtgagagtgaaaagcttctacttattgatttaagaataccacaaaggtcttcactaaataacatcgtggcaccgaatttggtgaaaatcgatccgaatttgctatgggacaagaaggcgaatacacccatttaccaagatgacatattggagcatttactgaggggaaatgaaaatttcgtaaaccgtaataaatttcaatacatcgtttgttattcagatgtgaagacttttatggcgatgaattttgactattcatttattttcttctatttgctgctgacttctcaaaagacgcgtttgaccactgtacctactgccctgctaggcgggtatgagaaatggaagaaaactctacacacgtacgcccagcagtaccacattactatcgatgattacttgtataggccctattcccaaaaggtacgtcatcaaccacagcaacagcaacagcaacagcaacagcaacaaccaagctcccaagattcctcttctagtaaagaatcatctgcaaaaattcccgaacctccttcttggaaacctcccgatttacccatacggttaagaaaacgccctccaccaccactacctgtaacagtgcccacaactccagaaaacccgcctcctctgccccccaagataatggttcatccacacgataactcccaacttcgacaaccaccaataccagcaagacagcatgtgaaaaagcagcaactcaactccaatgaaatcattcaaaggaagagacagcagcaacaccagcattacgaccaacaattgctccagccacagccacaaagagtataccatataccaactattgaacaaagctctaatgtatatgtttcgctttcaattacaggcctgagaaacttgggtaacacttgttatatcaatagtatgattcagtgcttatttgccgcaaaagtatttcgtacactattcatttcgtctaactataagagctacctccaaccttcgagaggcaataggttgcattctccaaaactttctaattcactaaacatgcttttcgataagatgtacttgaacggtggttgttcagtcgtcccaacggggtttctcaaggtttttaaccaattacgtcctgatttgagaattcctgacgaccaacaggatacgcaagaattcttaatgatactcttggatagactacatgatgaattgtccaatcaaccacatgtggcaaacgattatccgaacctattattgtatgatgcagatgggctaaaggttttcaacaaagaatataaacactggtttgataaaaatgtaatcggaaacggtatatcgcctattgatgatatttttcaaggtcaaatggaaaacagtctacaatgtaaaaggtgcggttatacgacttttaattatagtacattctatgttttgtcactggctatcccaaggcgctctacgagattaagcaaactcggtagacccaatgaaaagagagttaagctagaagattgtatcaacatgttcacaagcgatgaagtgctgtccggtgaaaatgcctgggactgtccgcactgtggacctacatcgtctaactctctatctgcatccgcatctgcattagaaaatgattctaacattgttaagagtaaaaagaagaaaagtcggtttttcacgttgcatacaagatcaaagcgtcgtcatcttgatttttttggagacggtactaatgagagcactagtaataatcctgtaaactttgaacgcgaaagatcgaggtcacccttcaaaatgctgggtggtggtaggaaaagatccaattctaatacgccgctggctaatagcagtaatgacgctaataattttaacgattacaaaaatagaaaattgaccacagtgaaaacgataaattttgtgactttaccaaagattttggttatccatctctcgagattttactatgacttgaccaagaaaaacaacactgttataacataccctctgatactgaacataatattgaaaaacaatgatactatgaaatataggctatttggggtggtcaaccacacgggtacgttaatcagcggccattacacgtcattggtgaataaagacttagagcataatgtggatattgggcgttccaagtggtattattttgatgatgaagttgtcaaggcggacaagaatcatggctctgacaagaacttgaagatctcgagtagtgatgcttacgttctgttttatgaacgggttaacgcttag

SEQ ID NO: 5573 - DNA, 1698 bp, Saccharomyces pastorianus
atgacgtcggtagtaacagatacgctgtcagacaatgaatttgaggacgaactcacggaaagtatgcggtcttacaataaagagcatgcagagaagttggctttacatagaacgtctagtgtgaaaccagagccggagattacagcctcaccccactcgcggttttctcgttctttgaagatcgtgctgatagctcaatgtgctttcactgggtttttctccactatagcaggtgccatttactatcccgttctgagtgtcattgaaagaaaattcgaaatcgacgaacaatcggttaacgtcactgttgtagtgtactttgtgttccagggacttgcccccacgttcacgggcgggtttgcagattcattaggtaggaggcctgttgtgcttatcgccattcttgtttatttcggtgcatgcattggcctggcttgtgcccagacatatgctcaaattatcgtgctaagatgtctacaagccgcaggtatttcgcccgtgatagccattaatagcggtatcatgggcgacgttactacaagagccgagcgtggcgggtacgttgggtatgtggctgggttccaagtgctaggttctgcatttggtgcgcttatcggtgccggattatcgtcgaggtggggctggagagccattttctggtttctagcaattgggtcgggcgtttgtctcctggcatcctctctgatattaccagaaacgaagagaaacatttcgggaaatggctctataacgccaaagtcatacttcaataaggcgcccatcttggctttacgagtgataagaaaaacgcttcatttggataatccggattacgagacgttggaacagcctacacgactgaacttactggcgccatttaagattttaagagcttacgaaatatgcatattgatgctagtggctgggttacaattcgccatgtacactacacaccttacggcactatctacagctttaagcaaagaatatagcctgaacgtggcccaagtagggttatgctacctgccctctggagtttgtactctaatcagtattgtcaccgccggtaggtatttgaattggaattacaagcacaaattgagagaatatcgaagttggttagaccaaaaaagatcggagcttttagaggcacacgataacgatccgaacgtggcacaacaaatcatagaggacgacccccaatatactttcaatatctttaaagcaagattacaacctgcgtttgtcaccttggtcttaagtagtagtggattctgtgcctatggctggtgtattaccaccaaggcccccttagcagccgtcttgtgcatgagtgggtttgcatcgctcttttctaattgcattttggccttttccactacacttattgttgatttgttcccttcaaagacatccactgccaccggatgtttgaacctatttagatgcatcttgtccgctgttttcatcgctgcattgagcaagatggtggagaaaatgaaatacggaggcgttttcacattcctaggggctttaacctcctcgtcatcaattcttttatttattctcttaaggaaggggaaagaactggcctttgagaggaaaagacaagaacgagagactaccaaagatgtcaaactccttgaatcaaaggaaaacacaacgtctgaccctcttgtcactgatgaagaagaatga

SEQ ID NO: 5574 - DNA, 222 bp, Saccharomyces pastorianus
atgtctttagtcaaagaagaagatgactccaatgatgtagtttctttactttcatccttcaattgcaacctacttacttcatctcgcaaagactttatttcctgcaataatccaccacgtgtgaaagattccttagcgagcttcgccactaatggattttcatccaacctcttgttttttacagaaaataattttaaaatgttcaacatttcttcaacatga

SEQ ID NO: 5575 - DNA, 2682 bp, Saccharomyces pastorianus
atgaaagctgaaaaaacattggatgaatacttcaaggaagtcttttgtaaatgtaaaatatttgcaactaagcttctatccgttcatgaagctttgtttcagacaaataccaaccttctaagaacctttaagtgttacgttaactccttcaaaactgttagtgaatataatttcaaagatctattaaggaacatacagcaacatacagagaaatatttacaaataatcaatgaaaaggctgataagttttcccacgaggagaaagtagagttcaaaaaactcaattttgaattctatttggtaaatttccaaatttgccttacagaaaatgacttggataccgccaagatttacacctcaaaggtaaatatcactgaaaactctaaatacatggacgcagatttgctgattgaattatgcagaatgatctacaatgctacagttctgttgaaagaaagtgatgtctctgggactcagcaaatagataaaaatattgtctattttttaaaggatgtggagaagtacttagagctgcctgtggaaaacttgaaagcccatactgactatagtaatttgagatactcagttttgatattcatgactaattgcttgattggagaatacccacaaacttcagaattcgaagaatgtgaccattatttaagtcttttacaaaacgaatatccgaacaaagtggaccctttcatattagcaattaaactgattaatcgaaaagagattacaaatccggcagaaactatggaagaaattttaatgcggatgataatgtcagtggatgtcacgttaaattttcaaacagttatggcttcgatcaatgatctttcaaaaattgacactaagctgtctatagtgtgccttgattatttgctagtcaataagctgcattctaaaaatgatacgaaattattagaaaaagccatatgttctagatttttgattacgacgcaatctaaaacaatgaaagattcagaaatagcagaaagcttagatgatttttgtacccaaattgaaagaatggtatcagagcctctttctaaacataccatctcttgtataataactttattatggaatacagggaaaaaattagagaagatggagaactacgttgagtcgattaaattttacaaattagctctcaaagatattataagccaaaactattcggatagagggaaagttcaaagagctctacaagctgtatataacaaaattcacgattattctagcacacttaaaatttaccaacatatggatgaagaggacaaagaatctccattgtgccaacttctaatactgcaatttttcttagcaaatgataacgtggacgaggcgcttatgtgtcttcagaagataaagttatctgaagacgacaaaagtacaaatgctcttatactagctgtagcagagtgtaaaagaaaaacagatttgtcagttcaaggtcttctcatgctttttgagaagttacagtcgaagaatagtccgcagaacatatcaactacatcaaattctcagacattaagtctcctaaggtacactttacagatgattgttaaggtttcggaagaggaatccatagaaacgtttattaattatttgccgacagtagaaaaactcttattgaaggcagttgaattccttaaaacagttaaattactgaaagaattaccgtcagacgtagagaaagatgcaatttatcaacagtccgtgactataaatgaaatagaatggtttgcctcgttctcatataatgtcgccgtgaaatgtttaactgatgagttgtgtgactctgtttctcaattcccccaattttgtatccagtttattgatctcataccaattcaagattttactttcccaaaaatgtatcactttacatattggaaatttaaatctctaattttacagttagtaatagccaaagaagaaattgtcaatgactgccactcaaagcatcaagacatatatgaaagatctggtgaattggtcgacaacataaactctatgaagaaaagttcagaattcaaagatgggtcttcttcggaagatactaaaacaataaatgaatgttttttggaagcactaacaatacatttggaaagcgctttgataacgagtgatcaaaataaaattttggacatattaaagaaaacagagttttaccgtgatagccacgtagatgcattattggttgatatctcgtcaaatatggaagatttaccaaggggacttcttgtggaagtaattgaaactgtcctaggtaggaatataggctgtactgaaataaaggaacaagagctttgtctctggctacaaattttattggaaaatgcaatcaatctgaatcatgaagtcgagcttcgtatattagaaagggttttaaaaactttggttgcaaaccaatcaagctttcaagatccagatggcattcttcagacagaaatagaaaccatagctacctattgttggaacatcggtgtcaactgtataattaaggaaaacaaaggtaaaggaattgcttggtgtaaacactcaatgggatatgcaaacttggtcaacaagggtttgcaggagcagttatactcattatgggggtctttagcaagctccgccaatattgacataaatagtgccgttaacgagacgcatttacccatttag

SEQ ID NO: 5576 - DNA, 495 bp, Saccharomyces pastorianus
atggaaacaaacaacaaaaaaagggtatacgactcaaggtcgcagatgaacaaaatccaaagcattaacgataaagaactgcaaagtgggattcttagcccgcatctttcctggcataatgaatataaggataatgcctatatatacattggaaatttaaacaaagaattgacggaaggtgatatcttaacagtattttccgaatatggagtacctgtcgatataacactcagtagagatgagaatacaggagagtcacaaggttttgcgtatttaaaatatgaagatcaacgatcaacgattctggcagtcgacaatttgaatggggttaaaattggtggtagggcccttaagatagatcatactttctataggcctaaaaggaatttgcaaaagtaccatgaagccgtacgacaagaactggatcaagatataatgcccaaggacaacaatgaaaaatctgttgcgctgacaaagaaagaccgatcaggataa

SEQ ID NO: 5577 - DNA, 1005 bp, Saccharomyces pastorianus
atgggtacaaactctgctggtgaaaccacctctggatgccatcccaaaactatcacaactactgtgccatgttcaagcggtacaggtgaaagcactatttccccatccaccactggcacaccagctaccactcccgtaacatcaatgatctcaactactgtcgttaccactgaatattcaacaagcacaaaaccaggtggtgaaataacaactggattcgttactaagaatatcccaaccacttacttaaccaccattgctccaactccagcagtaaccactgttaccaatttcacaccaactacaatcaccactactgtttgctctatgggtacaaactccgctggtgaaaccacttccggatgctctgctaagactatcaccactaccgtaccatgtacaactggtgccagtgaaaacaccgcatctccagctaccactcctgtaacctctgctgttccaaccaccattgttactaccgaatacactacaggcactaactctgttggtgaaactacatctggttacatcaccaagtcagttccaactacctacttgaccactttggccccaagtgcacaatccgctcctgcaaccactgctaccccaaccacaatcaccaccaccgtctgttccgccggtacaaacgctgctggtgaaattacatctacatgctctgctaagactattaccacatctgcaagtgaaagcgaaaacactgcttccccatctgtagctaccggttcaaacggtgacaagaactacgaaactgtcgccactgcaaccaacccaagtacaatcaagacaagtgcaacatctcaagccgtcgcttctggtgtgtctccagtcgttacatcaccatccctaaccggaccagtccaatcagcttctgcttccgctactcactctgttccttctgtttcaagtacgtatcaaggtgctgcaagcatgaaggttcttggaaactttatgtggctactagttgctcttccaattgtagtttaa

SEQ ID NO: 5578 - DNA, 2541 bp, Saccharomyces pastorianus
atgtctctagagccaacagataactcggtgaaggtaaaagaaagcggtatattaatgaaaacgccaacaagattcacatttgaaaaaaaattacacactccaccaagcggtgatggtgatattgaaagatcaccacctaaaaaatttttaagaggtttgtctggaagagttttcagaaaaacgccagatcttaagaaccaacaagaaccgaggtttggagatgtggaagatagccagtttaccccgaattttggtctaatgatgtccaagaggggcaatatacctaaaccacttaatctttctaagccaatatctcccccgcctagtttgaagaggacagcgggatcagtagtatctggcctttcaaaaacaggtcagttgaccgctttacactcaccagttaatattgtatgcaacaacaaattcaacataaaaggcacaaatttgacaagtagtttactccgagaatcgatttctgattccaccacaatgtgtgataacttttcagatgtcaatttaatggttgtggatgaagactactgcatcgatggagattcatgttatgaagaagattcgccaacattcataatgaatttggaaagaaatataaagaagtgcaattctcaatccggtccaaaaagatatgtaggggagaaatgcttgatctgtgaggaaaatatcagttccacatttaccggcgaaaaagttgtagaatctacatgttcacacaccagtcattataattgttatttgatgttgtttgaaaccttatatttccaaggcaagtttcccgaatgtaaaatatgcggtgaaattagtaagccaaaggacaaagatattgttccagaaatggtatctaaactcttaacgggcgcaggcgctcgtgataatagcccatcatcggacatgcaacagcaatggattgatttgaaatccgcgagaagcgttactggtgggttacctcagtttaccccacgtgaacaattgattcgtacggcagatatttcatgtgatggattcagaacgccacaattatcaaacagcgaacgctttgaatctgctagttacttggatagcccattattgagctcgccattcatcaatgaaccaatttttactgaacctctcagtctgggaggtgatggatgggatgatcatgatgaaacagatgaatgcgcggttgaagtatggtttagtacaacggaaaaggaagatttgatggtcaacgtgaagttcccagaaacagatctgaacgatgatgctattgatttagagattttacaagatgtggactatatgaacggccaagagccggaagaaagaggaaaactttggaaagagagcattgaccaatatatcgaaactaacgtggacaaaaataaacaattcggcaatttgatcttgtttgacaaaataatgtattctgatgacggtgagcaatgggtaaacaacaacgttgcaatactattcaccaaattcttagttttgttcgattacgaggacatgaagattttgggtaagatccccagggaccagttttgccaggtaatcaaattcaacgagaaggtattactttgtaatttgaaaagcaccaatatacctgaaatatacttgagatttagtgaacattgcgaaaaatggttgctcgcaaaatggaaatattgcttggaaaatgcgtcgctggaggggctaccattatgtgaagttgtcacgacagtagaggagcttcttcgtgaggacataatatctgcatttagagtgcctctcggtacggtagcagcgcattccaataaccttcaactgccatggaaaaaatcgcaaaaggaaacgccattgaagcttatagtttgtttgaacgtgtcacacgctgacggaaaaggttaccgcaagagagtcgtgggtgccattaaccaaatcttgaatgaactgaacgtagatgacttactgggtatagtggtgaccggaagagacggtaacggccaggctggcccgtttggtactttcatggggatgataaacaaaaactgggacggatgggcaaccttcttggaaaacctggaaaccgttggtccctacgtgttccaagatgaagaacaagaatatagagtcacactgcaaacttgtgccaggctagcctccacgagcgcgtacgtagatacgaacgaccacactcggattgaatacgccaaacaaatcatggttttcaataatagggaagttcatgaaacgggccgtgaccaaaagttgatgaacaccctagacatgttgtctaacgatttaaaatacgaaacttcacaacatcgcatggccggcatacaacagttcctgaaaaaattgcacagtaaaagctatcttaacgtgactttgtgtctaccagaatcgacatccaagaaaatgtatttgggagacatggccgcgggcgaactacaaacgcgcttggtccaagataagcacccgcattctaactttgtagagttggaatggtttgatgtcgcgaaacagcaaagaatttgcaagacccttgaattatcatacatttag

SEQ ID NO: 5579 - DNA, 105 bp, Saccharomyces pastorianus
atgattcacctgaggcttggaacccttggcggtggtggtggtggtgatctccacggtgccgtcgtcgtagtaaattttctcagtcttgacagtgttaggttttga

SEQ ID NO: 5580 - DNA, 237 bp, Saccharomyces pastorianus
atgcgaaccttttcacggggttccttttcgtttaattttgttaatgatgataaccaaagatgcatagttcaactgattgaacatactatcgaaatgaagataaaaatttccatcgaaattagtctttcgctcctatctgaacactacaaaagaaacgaatcttgtattagtaatatgctcgttattggagatgggccgagaggcggagccattgtagagcgattttgtacgtcttga

SEQ ID NO: 5581 - DNA, 729 bp, Saccharomyces pastorianus
atgtcttctgaagataccttgatacactctgatgacccacgccatcctgcaaatctcatctgcacgctctgcaagcaattcttctacaacaattggtgcacaggaactggcggtggtatctcaataaaagaccctgaaacaagccattactatctggcaccgtctggggtgcagaaggagcaaatgagacctgaggatttgttcgttatggacgctcaaactttggactacttgcgtgctcccaaattatacaagccaagtgcgtgcactccactgtttgtagcatgctatcaaaagaaagacgcaggtgctataatccatacgcattctcaaaatgctgtggtgtgctctttgatctttggtgatgagttcaggattgcgaacatcgaacaaatcaaggctattccgagcgggaaagtggaccctgtgaccatgaaacctatagcactgtcgttttttgacacgttgaggatccccatcattgaaaacatggcacacgaggacgaattgatcgatgacttgcacaagacctttatcgattatccgaacacatgcgccgtgatagtgcggaggcacggtatcttcgtttggggccccgccatcgacaaggccaagatattcaacgaagccatcgattatttgatggaactggctataaagatgcacaaactgggaattcctcctgactgtggcattggggaagagaagaagcacttggcagggccataa

SEQ ID NO: 5582 - DNA, 4263 bp, Saccharomyces pastorianus
atgaatgatagaacaattgaaagtgtattggccgtggatccggctacaatgatcatcaaggagtgtattaatctctgttctgcaatgaagaagcaatccagagataaatcgcgaactagcgtaactgcactactaggcggtgggagtgatatgtttataaaccaaagcgagtcatttgttgacagtttccataacttagcgaattccgaacaccatgaccctctgatatctggcttagtcgaactacggttgaagatcaataatttgaagggttcggatgaaataaatgctctggaacttttggacccatttttgcaaattgttagcgctagttcggtatcgggatatatcacttctttagctttagactcgttacagaagttatttacattaaatgttataaacaaagcgtctatgaatattcaaagtgccatcagagaaaccgtcgttaccttaacacattgtaaattcgaaacttcaaagcaatcatcagatgactccgttttgttgaaagtcgtaatattattacgttatattgtgatttcttcctttggagactatctttctgatgccataatctatgatgttctccaaaccacactctcgttggcgtgcaatacccagagaagcgaagtcttgaggaaaacagccgagattacaattgcgagaataaccgttaaattattcacaaagttaaagctattggaaccgcctacaaaaactgaaaaatatattaacgacgaaagctacactaataatgatttaaaggatgatgttataggcactaccgggtctgatgatgagttgatcagtactgatgatgataatgctactgacaatcataaaaacaaggacctcattgatcctttaaccaaacaccaagataaagatgcacaaaaagggaagaaagacgacgaaattgaaccaaattacggaatatccgttatcaaagactatttagggctactattatccttaataatgccagaaaatagaatgaagcatacgacttcggccatgaaattatcgttacaattaataaataccgctattgaaatatctggtgacaagttccccctctaccctcgttcatttaacttaatttctgatccaattttcaaaagtatcgtatatttattacagaactcaacccaacactctcttttgcaagccactttgcagctgttcacgagtttagtagtcattttgggcgattatcttcctatgcaaattgaactgactttaaggaggatattcgagattctagaggataagaagggtgccgatgatgcgaccaagcagaaatcacctgctctgaaggaattgattatcgaacagctttctatactatggattcactctcccacttttttcttacaaatgttcgtaaactttgactgtaatttagacagatcagacctttcgatcgacttcataaaggcattaacaagattttctctaccagcagccgcaataactacttctaacaatgttcctccaatttgtcttgaaggaatcgtttcacttattgacaacatatacaacgatttacagaaaatggacaagaaagactttgtgaaaaacgagaaagaaattgaaactttaaggcagagagataggaaaactgaatttataatgtgcgttgaatcattcaatgaaaaggcaaagaaaggtgtcccaatgttaattgagaaaggttttatcgaatcagactctgatgaagatattgcttcgttcttatttttgaacaatggacgtttgaacaagaagactattggtctattactttgtgatcccaaaaaaacatcattgttaaagaaatttattgacttatttgacttcaaaggtttgagagttgacgaagcaattagaattttacttacaaaatttagactacctggagaatcccaacaaattgagaggattatcgaagcattttcatcaaagtattctggtgatcagaatatcgatgaaatagaggttggggaaggacactttgaaagcaatatcacatctgtggcagaagatgtcactattcctgtgcagcctgacgcagactccgtgtttgttctaagctattcgataattatgctgaatactgatttccataacccccaggttaaggagcatatgtcctttgaggattattctaacaatctacggggttgttacaacggtaaggatttccctcgctggtacttacagaaaatatacacgtctatcaaagtaaaagaaatagttatgcccgaggagcaccatggcaacgataaatggtttgaagatgcctggaacaatttaatatcttcggcatctgtgatgacggaaatacaagaaggcttcaaaaatcccatttccaaactagttcaaactgagcttattcaatatgaaaaggcatttttttcaaacgtgggtgaaattatcacaaaaactttattcagcatattcacaattgcttctaatgatcaaatatcctcgcgcatcttggaaaccataagcagatgcactttcatcaattcttacttttctcttgatcaatcatttaatgatattattcttcgcctaggggaaatgacaacactggcgtgtacgaacacaaaagagcagccgtcagacgctgaaagtatacctttagtggaaatatttgtcgaagataccgagtcgaaaatatccgtcagttcccaaagtataaagctcggagaaacgttcaagggacaactatgtactgtaacttatttccaaattattagagggataagtgatccaacagtcatttcttccgaattgtggactcaagttgtgcaaatcattttgagattatttgaaaatttaatgatggatttgaatttaaagttctttgaaaacttccatacactcctaaagcttccagaattgccttcaccagaaccagatgttgcgatccgcaaggcgaagatgagtagaagtcttttgtccacctttgcgtcttacttgaagggtgatgaggaaccttcggaagaggacattgacttctccatcaaggctttagaatgcgtaaaggctagcagagcgtttagctcagtctttgaacatagccaaatcataactcctcagcttgtggaaatacttctttcttcgcttgtggttgacaaaactaatgaaaattctcagtattttgagcaggagcttcttcttttactagaaatatccatcattttggtatcggaggtttgttatgggaaagactttggcccattaattgccgatcatgtggtcaatatttcaaaccttgacggactctctaaagagtctattgcaagatgtgcttcatataagatgttcttggtgtcaaagttgaacaatccacagaatattttgattgatctaataaaacatgactttttggtcaaaaatgagatatttaatgcgaagtattacgaaagcgaactggggaagcaactactgtgtgatctgttcacacattttgaaatgctaaaatatgatcaggaaattctcaaggatgtaaaattttggaaatttgtaaggaagcttatgtcaaacgaaggcaaccgattgatagtatatcaatttgtagagaaatacattcaaaatggtgaagtatttttaggtgatgggaacttcatgcacatattgggtctgcttgatgaaatgtcgtgtgctggcgccatcggtagtaaatgggaacaaaactctggaggttcagtcgaagatggaggtcaaccaccaaaaagtagcccctaccgttccgttgttgatatttccagccgatctattaatattactgcagatctgctttcaaacagtaagggaagggattatacacttagtaagactgaaattatagctgctattcaaggcttggcccatcaatgcctcaatccttgcaacgaattaggcatgcaagcattgcaagcattagagcgccttttattatctccgacgaacaagcttcgtatgggagaagttgctctagatactttgatagaaaccggactcctgccgatttttgaattggatgaaattcaaaatgttaaaatggaacgaattactgacattttatccgtaatttctaagatttttttgcatgaactggcaaaaggtaacacaaataacgaaacctttctgagggttctgaacgtattcaacgagtatgtagatgatcctacagtggaaaggcagttgcaacaattgattatatccaagagagaaattcaaaacgaggatacgggtgctgacgtaacattgcaaaaaaataccgaaaagtag

SEQ ID NO: 5583 - DNA, 294 bp, Saccharomyces pastorianus
atgaaaatgacccaggtgtttgatattcttttctcattgacttcgggacagccttatacggaaacttacctaggttctttggtcgtggacagtttacaagacagtaacaaccctattggttcgaaagaagcaagcgaaattctggccgggctgcagggaattctaccaatggaaatatctgttcatcaagtggacggtggattgaaagtttacagatggaacagcttagacaaaaacagattctccaaattactggaaatttacaaactaaaacaacaagatgatgatgtttag

SEQ ID NO: 5584 - DNA, 1584 bp, Saccharomyces pastorianus
atggctgctgtcggtgaagttggtgttggtgtggccagcgaagcaagctcagagtgttgtgatatgagcggtaaggagaataacagaagaagaacgccgctgcgtgtgccggttatagacctggacagggtttccgccgaagaccagctgttgccggtggtgagggccgttttgcagcagcacgatacgttcctgttgaagaactatgccaacaaggcggcgctggacgagctgctgggggcgcttgcgacgactgacctgcccgacacgagccaagggttcgatgcgaacttcacaggcacgctgccgctcgaggacgacgtctggctggagcagtatatcttcgacaccgatccgcagttgcacttcgaccgggcatgcaagaacgagtcgctgcgatcgatttacgccagactgttcaagctgggcgtgttcttcgcgcaattgtgtgtgaaaggtgtggtctcgagcgctgagttgcaggactgcatctccagcacgcactgtgccacgaagctcactcgttacttcaacgacggtgacagcgcacagaacggcttggacccgagtgccacgatgcttcccaacggcgacgatttccagtaccaatttgagagggactacgtcactttactgccgacgggtgtgttgaccgtgttcccctgtgccaagggcctcaggtacaagccctcgacgatggcagccactgacaactcttgggtgaccgtcgatgagcccgactgtctgctgttccacacggggaccctgctggcgcgctggtcccagggaatgcacacgacttcaccgcttcaggtagaccctcgtgcgaacgtcgtgtcgttgaccatctggcctccgctgacgacgccgatcaacgatgaaggcaccattgccagccacttgctggagcaacagatcaaaacgttcccgaaggtcgctcagcagtactacccgcgagaacagaatattctgaaactgcaagatgctatgaagttcgtcaagaagctgttcagcgtgtgtgagaccatcttgtctttgaatgctctctccaggtccaccggagtttctcctgagctgcacgttttgctgcctcagatgtctaacatgatgaaaagaaaaatagtgcaagatgacgtgttgaagctgttgaccatttggtccgatgcatacgtggtcgagctgaactcaagaggcgagttgacgatgactttgcccaggagagacaacctgatgacgttgacgaataagtccaggacgttggccttcgtggagaaggcagagtcgtggtaccaacaattgatagcttccaataacgacattattacagatatacccgtcttcaagataaataaaagaagagcaagcatcaacatcaaaaccattatgggcagcaagacgcaaacgaaaaattccaactccaatgcgcttaacaactctaaatacctatcgaataagaaggaaaacttcttttataaagagaaaaccctgattcgcaagccaaccttttggaccggctacgtgaaagggagagacgttcagctgcactgctttcgcaaagacaaagacattaccagcagtttctag

SEQ ID NO: 5585 - DNA, 1725 bp, Saccharomyces pastorianus
atgaaatacgttattgtttctggtggtgttatctcaggcatcggtaagggtgttctagcttcctccacggggatgctactgaagacgcttggtctcaaagtcacttctatcaaaattgacccttatatgaacatcgatgcggggacgatgtctcccttggagcatggtgagtgttttgttcttgatgatggtggagaaactgatttggacctcggaaactacgaaagatacctcggtataaccttaagcaaagaccataatatcaccactggtaagatatattctcatgttatttccagagaaagaaaaggcgattatttgggaaagactgtacaaattgttcctcatttaactaatgcgatccagagctggattgagcgtgtttcaagaattccagtggacgatacaggcttggaacctgacgtctgtatcattgaattgggtggtactgtaggtgatattgaaagtgcaccttttgtggaagcgttacgtcaattccagttcaaagttggcagagagaactttgcgctaatccatgtctcattggtgcctgttatccatggcgaacaaaagaccaaacctactcaggctgcaatcaaagatttaagatcactgggacttatccctgacatgattgcctgtagatgtaccgaagaactaagcgcagccacgatcgataagatcgccatgttttgccacgtggggcccgagcaagtagtcaacgttcatgatgttaactcgacgtaccacgtacccctgctgttactgaaacaacgcatgatcgactatctacatacaagattgaacttagaaagtgttccattgacttcagaggacaaggaaaggggatcccaattgttggccggctgggaggccatgaccaagagcctggatgattccgacgatgtggttaagattgcccttgttggcaaatatacgaatttgaaggactcgtacttatcagtgacgaaatcgctagaacatgcaagcatgaaatgtcgccgccaattagaaatcctttgggtggaggcaagtgacctggaacccgagacccaagagctggacaagaacaagttccacgagtcatggaacaaactcagctccgccgacggcatcttggttcccggtgggtttggctcgaggggcatagaaggtatggtccttgccgccaaatgggcccgtgaaagcggtgttcccttcctgggagtgtgtcttgggttgcaggttgctgccgtcgagttttcccgtcatgtgatgggccgcccaaacagcagctctacagaatttttggacgagtcgctattaaaacctgaggaccaagtagtcatatacatgcccgaaatcgacaaggaacacatgggcggaacgatgagactggggttgaggcccacgatcttccaaccaggctcggaatcgagccggataaggaagctgtacggcggtgctagcgaagtacacgagagacaccgccatcggtacgagattaatcctgcgttggtggacgagatggagtcacgtggccttgtttttgtgggcaaggacgaaaccggccagcgttgcgaaatattcgagttgaaaggccacccttactacgtgggggcccaataccatccggaatacacttccaaagtgttggagccatcgaggccgttcttggggcttgtggctgcagcctccggaatgcttgacgagttggtccagggcatgaacaccatgaatgaataa

SEQ ID NO: 5586 - DNA, 240 bp, Saccharomyces pastorianus
atgtgggagtcgtggctgtttttgaagatgtttgcgcaggacagcgtggcagtgcgcagaatgcaggtcaacaagtacgtgttgggggtgatcgtgtgttcactgggcgcgagtgtgatgagtgagtttgcccagagcgtggtgtcgcgtggacagagggtgtttgacgtgaacgatatcgtgtgcaatttctggggcagtctgcttggtgtcggggttgccttctaccaggaccactag

SEQ ID NO: 5587 - DNA, 876 bp, Saccharomyces pastorianus
atggttcttggtcatgaatcaagtgggcaggttgtggaaattggtaatgctgtcacaagagtcaaagttggtgatcgcgttgccattgagcctggtgttcctaaccgttactctgatgagaccaaggaaggaagatataacctttgtcctcatatggcttttgctgctacacctccaattgacggtactctagtgaaatactatttgtctccagaagattttctcgtaaagcttcctgacggtgtaagttacgaagagggagcttgtgttgagcctttatcggttggcgtgcatgccaataagctggctggagtccactttggaaatagagtggttgttttaggagcaggccttgttgggttattaactggcgcagtcgcacgtgcgtttggtgccagtgacgtcgtctttgttgatgtgtttgacaacaggctagacagggcaaaagattttggcgccactcatactttcaatgcatccaaactctctgctcaggaattggcagacgaagtcaaagaacttttggggggacaaaatgcagatattgtctttgagtgttccggagcagatgcttgcattgacgctggtctcaaagtcaccaaagctggaggtaccatggttcaaatcggcatgggaaaaaactacacgagcttttcaattgcagaagttagtggtaaagagatgaagttgattggatgcttccgttattcgtttggtgattaccgcgacgcagtaaagttagttgcttcaggcaaggttaatgtaaaagcaatgataactcacagattcaagtttgaagatgcaggcaaggcttatgatttcaacattgctcacgttggtgaggtggttaagactataattacgggtcctgcctga

SEQ ID NO: 5588 - DNA, 342 bp, Saccharomyces pastorianus
atgttattcgtgttgatagcatatatcaaaaatgtaagagttgcaccaatgaaattggaacacaagatgcactacatttcaactgttattagcgagcaagaagttggcgctaatggatgggaccaaatcgcaaagaaaatgaatgtgtattttttcgaacagaaactttacgtggatcaagagtttttttttgacggaactgattgcaaatggttctttgatcataacttctctagttctctatcttcaaagaagtctatgtggcttttgccattgaatgctgaactatggccatacattaaggaagcgcaatcagcctgtggcgaagaatctctagcgtag

SEQ ID NO: 5589 - DNA, 342 bp, Saccharomyces pastorianus
atgttattcgtgttgatagcatatttcaaaaatgtaagagttgcaccaatgaaattggaacacaagatgcactacatttcaactgttattagcgagcaagaagttggcgctaatggatgggaccaaatcgcaaagaaaatgaatgtgtatctgttcgaacagaaagtttgcaagagtcaagagtttttttttgacggaactgattgcaaatggttctttgatcacaacttctctagttctctatcttcaaagaagtctatgtggcttttgccattgaatgctgaactatggccatacattaaggaagcgcaatcagcctgtggcgaagaatctctagcgtag

SEQ ID NO: 5590 - DNA, 393 bp, Saccharomyces pastorianus
atgggtgctaccgaagaggaagttcaacacgagggcgcttacaacccagatacaggtgagatcaattgggattgcccttgtttgggaggtatggcacacggtccttgcggtgaagagttcaaatcagccttttcatgctttgtctattccgaagcagaaccgaaaggtattgactgtgtcgaaaagtttcaacacatgcaagactgtttcagaaagtaccctgaacattatgaagaccaattgaaggaaacatcggacgatgaagaaacccaagataaagcaaaggtgaacactatggaatcagctcctaatgtctcaagtgcaaaggagaatgctgagaaaaaggccgaaaaatcagatgtcaaaaaggaatcattggatgaaaaggcttaa

SEQ ID NO: 5591 - DNA, 402 bp, Saccharomyces pastorianus
atgcttcgcaatatagtcgctagaaatgcgtgcagacacaggccgtcgattcaggtggctaggggattatgccgacaccaaacaaggcgtttgatggcctcgtcccctcaatttggtaaaagctatgactctaagcaagagaagacagcaggttttataatggggattctgtctatggctggtgctttgtatttcataacgcccaacaggaagcctctctttgcttcaaggaaggtggaatccgataaaaccgctgaggaagaaatttcgagaggtgaagagcaatcacctgacaacggaaacggtgacgaaagtcagactgaagctggggctcaattaggtggtgaccaaattggtgcctccaaagtggctgaagatgtgtgtattgcttgtcctagctga

SEQ ID NO: 5592 - DNA, 2259 bp, Saccharomyces pastorianus
atgaagctaggacagtaccacacccccctgtcgaaggggtccatctggtcaatactttccgtgtgcatactgtttatgttcaccgtactaatactgattattgtcgctacaacaggctccaccgcagactacaagcccttgaccaatatatatatcggcgaagccgatatcaaacacatcaacgtgagcaaagtgattccgcagatcggccccatcttgaccatactggggtccgctttgacggctccgaacagctctttggatgcgatttttggcgccctgaaaaacattgctgacacgccagctctgacgccgctgttgacgctgttgtccaacgctgaaaacactacggtaaccatcgagtcgttgaccgagttggctcccctagccatcagcggaaatcccgcctccagcaccaagcagctggcggaaataaacgggctgctgaagtactcaaacaactccactgaaaccttggatggcttggccagattggtttccgcgtcgctgtcttcggccagctcgagctcttcaagcgactccacctctttggtcctggacttgctacaggattcggacaaccctcaaaactccacagacgctttgctcactctgaataatctgacaatgactgaaaaggcgcagttgttgcctgttttcaagctattcgcactgtccacgaacaaaaccgctacaatgacggcgttggctagcttgatgaacaccaccatcccccccacgttggctcaaacgctattgacccaactacaaaacacaatctcggaaggcggttccctgaacagcacgtttagcagtttgcaacagctagtgcccagtgctgacgcgggcgcttttaacgcagtacaagtgctgctaaacgaaacaacgtccacgaaccaaaccttaagcaccttgactgacttgctggaaaaaaacgtcactcagtcatcatcggcaaagagggcttttgccgccttgacccagctaatggatagttcgaacaattccacgatggtgaccacctcggtgcaatccttggctgctgtgactaataccacccaatccacgcagcagctcgtcggtttggatgacgtgataagctcctctaccgacaccaatgagacgttgtccatcctgtccgaattacagtccgatttatcgggtaattcgagcactacgcagtacatcccatatctgtttaatcttctaggtgcatccagtaacccgaaaaccacgttttcatccttggtgacgctaacgtcatgggctcaagaaaaccctcagacattcatgcccattttgaaaatattagccgaagccaagtctgttgaaccaatctcccccacgaaattagacgctttgacaccgaatattttggagtacttgaagatcccagtttacttccgtctatccattttcactctctgtcatgccaacctcaaacacaaaatccttgattgcagcgcttcacatgctgttcagaacttagacttcaggacaattatctacgacgcactgattgcctccgatttccagccttacttgaacgctctgaatattaccgcagacgacctatacttgcaagggaagttgctgcgcagggaacacgagtacgtgcctgccgtgaagtccgttctggctatgaacctattgacaatcatcttcgctttctctaccatcgttttcaccatattattgtacttcgacaggtacatgattagacaagcattatggctcatcaccgtagccctatacgcttgtgttggtttattcacagggttgggagctactataatcgccgttatgatcaacatcataaaaagtggtaccgcggatgataaatttggcgttgtattcaaggctagtcctgcttatatgggattaacgtgggcagctttcgtattagcagttatcgctactataatgatgatcagcgcgtggtggacaaacaggataactggtcgctacgtatccagagctacactagacaaaaatggcgaagcctacgtgtatggagatggcgctgccgtcccagctatcactgtcgctgcagatacaaatctggaagatgacgatagtgacgtcgaaaagaatggcaatcgtaacgaagttactgctatcgacggtagcagttctgcaaacaacactgacgtcataagaagtacaagcgatgaaatggaactacatcatgcaggcgtggttccgaacgtccccaatgaatcaacaacggatgccaataaccagcgagtgataatttga

SEQ ID NO: 5593 - DNA, 738 bp, Saccharomyces pastorianus
atgccttccttcaaagaagtatctattagttttatgaaaaaaggtaaaataaaaacaggaaataaacagatatcaaaaacagaagcgctgatgagcaaggttgtaacggacacagtgatcataacctcaggtaggtgtgatgttgttgataatgacaatgtggaacgaatccagggttggttatctaagtatattttaacgaagttccaaatcaacgaagatgaaccgctacagttgatcgttttaaaaagattcaaaagaatactgttaatctgccccagtcatgacttatctcaacatgttatggctgcatctcatgcttcggaggtggagaagctcaactttagttactctttacaagatggatataacaatttagccaaagaacacttgaaggtaccagagagcgaaaaaatgtttctgatttcacctccagcgtcaccaccgcctgaatttgactttagcaagtgtgaagatgcaccacagagacacgttcagagtcatatacagcagcagcagcagcagcgaatgaaagcgggccacctgttgccaaacaacccagatgaagacagtaacggtactttcacgttgttgaaatcaaaagtgggcgctatcacgattaacaggtgtcccacaaatgaagattgcggaaataagcgattagtggatcatgttaagacagctctcccaccaaaatccatatttgacagtgatgacgatgaagggacaacatgttga

SEQ ID NO: 5594 - DNA, 888 bp, Saccharomyces pastorianus
atgcaattcaaagcagttcccggatattttgctgcttatcccaatgacggttttcaaggattggactccacgaaatacgatcatttgcgattgatcaatcataatgattggaaagaactatacgacgctctacccaaagatacccaaaattgtcattataagctgctgattctagccaggcacggccaaggctaccacaatgctgctatatcgagatacggcatggagaaatgggacgcacattggtcattactttctggggatgaatatggcgaatgggttgactctagattaacaccattgggtaaagaacaagttagaagaacaggaaccaatgtactgctaccgatgataaagcagctagatatgctacctcatgttttctttagttctccaatgagaagatgtcttgaaacattcatagagtcttggacaccggtattgaatgaaactcaaaaaccaatgagcgaaaacaaaatttccacacgtattatagaaagtcttagagagactctgggctcccatacatgtgataaaagggtcgcccactcaatgactgttggtgagtatcaagattttattatggattctggtcacactgtacattggcactatgtcactgattattctgaagaagatgaattgtggctagttaatcaccgagaaaaaaaccctgaactagatatgcgtacgcaagatggattatcccagctatttggcccactgtcgaccgaagaaagatttatctcccttacttgccattcaggcgtcatccaaagtgttctgagaaacctgaagcatcctccgatttacaacttagagacaggtaaagttgttggtgttgttgtcgaagtgccaactaatatagaaggtcagacagaagcttga

SEQ ID NO: 5595 - DNA, 495 bp, Saccharomyces pastorianus
atgtcacaattttattctcttacaccaacggaccgagatggcaatcagttcccctttgctcccttgaacggaaaagtggtactgataatcaatgtagcgtcacattgtgcgttcacgcctcagtataaagaattagagtacatatacgagaaatacaaaaccagcggcctggagatcatagccttcccttgcggccagttcggtaaccaagagattgaaaaagacgaagcaattaataagttttgtcagaacaagtttggtgtaaccttccccatcttgcacaaggtttgttgtaatggcccaaagcaagatcccgtttacaaattcttgaagaaatcagtaagcggaaaatttggcataaagatgattaaatggaattttgagaagtttttgattgacaagaatggtcaggtggtcgagaggttttcatgcatgacgagaccgctagaaattgttcctcttatcgaagagctattgggtcaaccacgaacgtaa

SEQ ID NO: 5596 - DNA, 2724 bp, Saccharomyces pastorianus
  modified_base (1161)..(1181): a, c, g, t, unknown, or other
atgttctttgtcgacgataagggactgcaagctccattaacagtaagacgagcaatggccacggtcaggcggacgatatcccaggcctccatggcgctgcccttccagctgcgactggtgcacaagaaatcctggggccatcggctaagggacttcatttcccgctttctgaagtcgtgcaagccgattgccaagtacatcttccccaacttcattgtggtgcactacatgtacctgattacactgaccatcatcgggtccatcctgctgtacccgtgcaggaacacgccgtacatcgacgtgctgttcctggccgctggatcgtgcacgcagggagggttggccaccaaaagcaccaacgacttcaacctgtaccagcaaatagttgtgtacgtgctcacgtttctgtcgacgcccataatcattcacgggtttctggcctttgtcaggctgtactggttcgaacggtactttgacaacattagggacttctcaaggcagaacttcaagctgagaaagaccatgacactgcagcaaagagaactgtccagtggcagcggcaacacctctcggaatagaagtttcaaagacaacctgtttcgtgggaaattcgtttcccgggaagacccgcatggaaccgctacagacatgcccatggattctcccgccgtttcctcttccaaaagcgaatcctcctccctcggtagtcacggctcacccaaccacttctctcgaagacgccagctctctgacgttgacccgacagatatttacaagtcgataatgatgctgcaaggacaaaacgaaaaggccagctcagactccaccgcttcctcccacaacgaaccaaacgggcctgcctttgtggttcaagagcgacacgagagaagatcaccgacgccaccaccaccgcacgcgacagaacggcaacactcttcatcaaccgttggggaattgaacaaactggcccagaccatgagctttcagaaattgcttcgcttgcagagaaacgaaggcgaatacgacgccgccgacgcctctcacaagtccatggtcaccaagaaaaggagcatatcgaggacacaatcctataatgctccgagacgtacaccttcaccggcacctgaaacatcaagccaagtgcgccaagatgacgagagnnnnnnnnnnnnnnnnnnnnnccagccgactccttcatcttccgttgacgaagaggtaagcttctacccacaagagtctttaaacttacagtttcaggcacacccgcctaagccagaccgccgtggcagcaatacgcaacatcccttaacaagaacgatgagcactaattatctttcctggcaacccacgtttggcagaaactctgtatttattgggctcacaaagcaacaaaaggaggaactcggtggagtggagtatcgtgctttgagactattgtgtaatattctcgtggtgtactacatcggattcaacattctggcatttgtcatcatagtgccatggatatgtgccaggcacaagtatgcagagattgtcaggcaaaacggaatctccccagcctggtgggggttcttcatcgcaatgagctcattcaccgatttgggtttggctttgaccgctgattccatggtctcttttgataccgcaccttatcctttgattttcatgatgcttttcattatcattggcaatactgggttcccgatcttgttgagatttatcatttgggtaatattcaaattctcgagagacttatcccagttcaaggaaagcctcgggtttttactggaccatccgcgcagatgctttacacttctattccccagtgcccccacatggtggctatttctaactttgatagtcttaaatgccactgattggatccttttcataatcctggattttaattccactgtcgctaagcaagtttccaaaggctacagagtgctcataggtcttttccaatctgtgtgcacaagaaccgctgggtttaatgtcattgatttaagtaaactacatccatccattcaagtgtcttatatgctgatgatgtacgtctcggttctacccttggcaatttcaatcagaagaacaaatgtttacgaagaacaatcgttgggactgtacggtgatgaacaagacaccgccaatgacaccactgacgaagacggtgcgaaggatgatgaacaaggtgacgaaagcgaacagaacgacgctataccaccaaaaccaaaaccgaaaaaatcgtccccaaaatcgtttataggcgcccatttaagaagacagctatcatttgatttgtggttcttattcctcggattgtttataatctgtatctgcgaaagtcggcatatcgaagacaccaatgaacccgagttcaacgtcttcagtatattgttcgaaattgttagtgcttatggtacggtgggcttatcgttgggttacccaaataccaatacatcgctttcggcgcagttcagtgtattgtctaagttggtaataattgcgatgctgataagaggaagaaacagaggactaccatacactttggatcgtgccatcattttaccaagtgataaattggaacaaattgatcgtttgcaagatatgaaagctaaggggaagttattagctcaggtcgacgaagatccaatgactatttatgtcaagaaaagatctcacaaactgaagaaggcggccaaaagactctggaaaagacgttag

SEQ ID NO: 5597 - DNA, 2457 bp, Saccharomyces pastorianus
atgatgcgtatgttgaaagaatgtggtgtcgatcctatgcaagtgcggggcaacatccctgcaacaagtgaagatgagccttgtgacccaagaaaatatgattcagtcgcatctttgggccaagtggggttgctaccatatgacggtttattagcagactatttagttcaaatagggcattcaatgaaaccttcagcttcagatgtcaaaagtttagaaaccccaccagacatacatgaagagcaaaagaagtttccaataaaccccatcaacgaagataacaacgctttattaccagaaaccggtagtccgatgacttccaacgcgagagctgaagaactgcaccaatctaataaagagatcagcgcattggctgctatgaaagaaagtagttttaactcttttttgggagactcgtcgggtatatcatttgcaaggttggtattcacagccactaatttccgacaagattcgggagatgacatacttgatgaagacattaagcaaagggagcagaagtataacgaatacgcggaggcggaaaacaatccccagttcgatccattagaactcccccctcgtcatattgctgaaaatatgatatccagattttttatagacactaattcacaactgcctttgttacatagagaactgtttttgaaaaagtactttgaaccaatttacgggccctggaatcccgatattacattggcttctgacaaaacgaatattaatacagattttgaaattccaatcacgagtaccttcgctgcacgtaccgatccaaagctcgaaaacaatgacaataaaattgaaatatattcttctaaggatgtcccgtggtatgaaacctggaagtttttacaaaaagataacatgagttcagttattgaactgccaacaaaactccatataccttatttttttttaaacatcatttttgctgttggtcacgctacgcaagtacttaagtcagatatcactattgtggctacatataaaaggcgtgctaccaaatatactacatctttattctcatcttcagacagactggaagcattggcaggcactatgttgatggtaatttactcgataatgagaccaaatattccaggtgtttggtatactatgggttctgtactgagattgactgttgatttaggattacactcagaaaaaatcaacaaaaactatgatgcatttacgagagagattcgcaggcgacttttttggtgtgtttattccttggatcgacaaatttgttcttacttcggtagaccctttggtattcctgaagaaagcattactactagataccctagccttctggatgattcgtttatcacgctaacgaatttagacgttgatgattattcagatttgcctaacccgaatccgtcctctaaggttattgccttggccatgtataaaatcagaaggattcaagccaatatcgtgaggatactttacgcacccggtgcagaattgccaaggaaatttaccgacctcgagagttggcgaattgagacctataatgaactggaacattggtttcaagtggacgttcctaaaaatttcgatataatgaattgtaaattcaatagcatttggtttgatttgaactatcattactcaaagagtattctctacgggctttctccgaagtgtcctactttaaatgaaacggccttccgaattgttctcaagagcacaaagggcacaatagatgtcttttacaatctctgtgtcaataaaaaaattggttatacttgggtggccgttcataatatgtttatgacaggtatgacttacctttatgtaaacttctattcaaaaaacagcataaatgacacccatgaaaaagtggccgagtacactgagaaagtgttgacagttttaaagaatttaataggtttctgcgaatctgcaagaaattgttatactagctacaaaattttatcatcagttgtgatgaagctaaaatttatgcaatttggtgaagataatgcaaccttctcgggcgcaaatactctaactgctcaaacaaagggcactttcaatcatagtccttatataaaaaaagcgaaaactcttgattttgatggcgacactttcgatcataagggattggaaaagactgctattgaagacagaccgtcattagatatacctttagaagagtttttcactgtattagaaaagtacaatatttctcaaactgatgcgccagacgtaaatgaaaataattcaactataaatgacggcgatcctttaaatatacctcctgccgtgaataaccaaatgaatagcaataaccaagatattatggacatcctttttcaggtcacttcaggatctgtatgggacgaattttttgtcaaatccggtaatgcaaatgaagacgattatgatttcaacaagggaagtaatgctggatccaacggtttgatttga

SEQ ID NO: 5598 - DNA, 1875 bp, Saccharomyces pastorianus
atgtgctcacaccataccacgtcaaagataaccactatcggggatatttcaattctgacaaccttaggatttagaggtgaagctttatttcttttatcgaatttgtgtaaccaacaaggctcaatgcaggtggagacgaaaaccgtaggcgatgttattggtgaaaaatggttaattgatggtggaggtgctatcacgaatggaaagcgatataagatatcttgtcccgttggaaccacagtaacactaagaaagcttttagggggattgcgagcgagatatcttgaaatatcctcgaaaccaagaaaaacacttgatgagctgacctatctgataaaccattactccttaattcatagaaacattcgattttttttctcacttgtatcgttacgaaaaaatggttctgtagagcgtaagcaaacacaagagactttagactccaaaatttcaagagcaagaagcttatccttactggtaaggttgaagaagcctgtaccagtaaatttcatagcagaggaaaagttagtcattgatgaaaaaatggctttagatctggttttaccaaaaatggtaccagcatcagatgttattaacataaagaagcggctaagattcatatctatcaacgaaagggctttgtctttaaatttggagacggggaaagctgtttctaagctgctgtcgtcactttacaagaacgcaaatctactagaacctatggtctggtttattaatttgaactgtgatacgaaactaattgacgttaacattgaaccggagaaaaatgacgtgatgatcagaggctttgaaacagttcttaaaaaattagaactgaaaataaaactgctattggaggaaaagcttgacccatgtacaagcacagcatatgatgaaaacgtacagtccttggccaataaaagaataactcctacactggagattctcgcacctgacgtggagaatgaaacaatgaaaagttgtggtaatggtacaaatgaggagaaaggtggcaacgggcagaataacttaaaatcgataatacctacttataacgacgaacccaatttagaaaacacaactattgttgatgctacaccctcgcctacaaagatcgaaaaaggtgaatttcttgaccaacaaactcaggagagcctttcaaactgtaaaatcccgagctccagatctctggcttctgaagatggtaccaactggcgtcacaatttgcaagaggatttaagtgaaagcaatgaagtggcgggagctggctcctcaacattgccctcttctttgacttataattatatagaaactatcccagaaaatgaagatctagagctctccaaagatgcatctatttccaatcctttcatgattacgaagataagaagtgttaataggaaactaagtgaagactcgcataaagctaaaaatggtaattgcgacggtgccgaagcaggaaaaatacgtgagaaaatgcaattgtcaagcacaacagaggaagaatcgtttagaccgcaaaaaacatatagcaaaagaactgacggcgtgaacacgaaaactgattcagacgacttgaaacaaaagaatattgataaatatgcaaaaaaagtgtcacacttacacaatagagtaccgagactcatacaattttctgaatataccaacaaccttgtctttgattggaaacacagcaaacctccagcgcacaacaccgatagctttgccaaagatgctctatggttacgttccagagatgaacccactaatccttctttcagcctcttgcaaggcttgcgaacgcgtgtgaagaaacgaggacgcactgaagccacagcaaacggctggtgcctcttcacgccagacagttcttga

SEQ ID NO: 5599 - DNA, 1272 bp, Saccharomyces pastorianus
atgcaagggtacgtacctcccagccagcggctattccacgccagacacagaataactagagatgatttgaaagatgagcccctgcacatggggtccaccgattggacgacgatcctcgacaccgcggtagataaggactcgagcctcattagctacacagtccccataatagataattttgccattcctcgagccaattcgctggagagccccgcagcgtccacacgaaacaatagatcgaccgtgtactcttcttcgtcttcctccgtttcttctgtcttctcagatggtctatttacaccgaatcccaataagaactcatcaggatcatcctctttggtgatcagaccgcaaaaaaatttgagtgtagattcattgatccaggaaaacaagaggaaaatcaacgacgagaaagcatcgctgtcactgatcgccaataataataacgaaaccttatccactcatcccgacctatccatacaaaatctgatcaggtcacagacaaagagaaatatcttgaacctgaagtttcaaaatagaaacttattcagaagagaactgaagctagaaaaattttgggataatttgagaaactaccatacctctggtgtcgatggtggtttgctactagtaattagaaagcacaacttatattggtttggaataccgaatgatttccgtcttcccatatacaagagatgtttataccaccatatcgaacaagatgatgctacatctttcagccagcacaggaaaaatcccttgtacttagcaataaggaattgttgtaataacgaagagcaagaaactttatcccgggcaatcttcataaacctgataaaaaacgtcacttggttgaacagtcgtttaagtgatgataaggaccgtagggatgtttacactattatcgagagcaagttttaccaaaatttccctaatctgtactaccacttgaaagataaattgcaattgaatgttataacggattttatcaagcctgtaataagaaatttcataatcaatgcactgaacaagcataagctagatggtattggtttggagctattggatattttaatagtgaccacttactacggacgtgacgaaatcaacgtctttttaatggacacatttatcttacatctattaaaacagtgtcactttaagttttttgttgataacatctctgaagtgatcatgcagatttcaaagattaattgtgacctggtcattctgctagaagatctgaggtcccgaattgatttggtttga

SEQ ID NO: 5600 - DNA, 339 bp, Saccharomyces pastorianus
atgcttgatggtaaaagtagtaactctgttgaaaacactttcaataataattggagtagcgaagtggaaaaatacgaagagcagtatgatgatgtagagtacatcgcattctctgagcccctggatatggatccggcgcaaggtgaagacgtaattaaagaggattgctggtattttagtatggatgtaggccaagagcttgagttcgaaagacaaaatcaggagggccacacaacaaaggcgaagaaatacaaccccttctacgtaccatcgaaggtagtgcgggaaatggtcagtaaagcaggtgtcgaatggcagagtatagccaagccaaattga

SEQ ID NO: 5601 - DNA, 390 bp, Saccharomyces pastorianus
atgaaccggttggaagggaaaattatggcaaatgacgtcaacccactgctcgccaagatgaacaaaattgtggagaatgagcgtgaactgtttgagcacttaagacaggtgcttgatcttaaaaaagcgggaggaaggctggacctgggcgatgacagttttcaagatttcctgtcgatgaacgcaaacctagacaaactgataaaggagcaacaaaggctccggctagattccaagctgtatggcgagcggggcggcggcggcggtagccatagcaagatcttctccaagataattttttggctggtcccgttgattttttctatgatcacgttgacgtactatatgtttagaataaaccaagacattaagaaagtcaagctttcgtag

SEQ ID NO: 5602 - DNA, 699 bp, Saccharomyces pastorianus
atgaatctgatcaatggtttaatatggctgtacatatgcatatgtatagtgcaggccaaagtcacatccaaggatgcattgaaatggaatagagaattttcgttgcccaacttactaggattgaaagatccacaaaaggaactttcgcagtggtcgttaacaaacaaagtcaagcttgaagaaggcaggtttatcttgacccctgagaagaatacaaagggctcgctttggatgaagcaagattacaaaatccaggaggcagtgacagtagaatggacgtttagaagtattgggttcagaggcagtaccaggggtgggcttgcgttttggttcgaacaggggaagtcaggagatggtacggaggtgtttggtggaagctccaagaaatttgatgggttgatgattctgttacatttagatgacaagttaggcgaaagtgtgacagcatatttaaatgacggagccaccgacttcgacgctaagagcgcttcgcattttgcgtcatgcctatttcaataccaggattccatggtaccatccacattaaggttgacgtatgacccgcaaaacaatcacttattgaagttgcaaatggacaatagagtgtgcttccagacaagaaagatcaaattcatggataaggccccgttcagaattggggtgagtgctgtaaacgatgcatccaaagagtcgttttga

SEQ ID NO: 5603 - DNA, 696 bp, Saccharomyces pastorianus
atggagatcctgggctactacaagctgctgcgccgggcgagcgcgcgtgcgagctcgcgcagggcgggtgacggagaaggcgcgcagcccattgcgtacgaaatgagcagtgggtgggtcgcgctggagacgaagctcagcgaagccgccggggaagccgcaggcgagccccccgcaaccgaggaaggagacgccgaggcggagtccgagggcgctctcatcgactacgacagctggcggcgcaggtgggaagcgatttactcgcacagccgcatcgcggagataaggccgctgccccgccacgcgctgcccctgtcgcgcagtgcggcgggggcgttggagcgcagcgtacggcgctacacacgcgtgctgctgtggtgcacggaggcgcgcgcacgtgacctgcacgtgcttccgcggtgcgtcgcgcaaacgctgcgcaagtgggaactcgactacccgcgcgagggcaagttgttccgcaccagggaaatggcgcgcttgtttctgcagagtcagctatcaagacgggatccacccccacccccacggcaccacgatcaggtccccgatcacgacgatgatgtcactgcaagtgaaagtggaagtgaacccgaacgggacgaaatcgacgacgcggacctgatccgatccgcactacatgaaaatcggctgctgaaatggttatctatctaa

SEQ ID NO: 5604 - DNA, 117 bp, Saccharomyces pastorianus
atgggttggacattgagaataaaaatgtgtatgctttcttggtttatttctacttcacctctaaaagaatactgtgtggggtggaagaagagaaatttacaaagaagtatcctctaa

SEQ ID NO: 5605 - DNA, 1482 bp, Saccharomyces pastorianus
atgagaggttttaaattagatgccatacttacacacggagtcaggacattagcatcaatgggtggcgaaattatcactttacaagccggtcaatgtgggaaccatgttggtaagctactctggtctcaattggcgaaagagcacgcgataggcaccgacgggctctcgcagcttcctgattcaagtgcagatagagatgatgatacaaaaccctttttccgcgaaaatagcaggaacaggttcacaccaagggctatcatgctggattctgagcctagcgtcattgccgacgtggaaaacacgtttcgtggatttttcgatcctagaaacacctgggtggcttctgatggctccagcgcaggtaattcgtgggccaatggctacgacatagggacccgcaaccaggatgaaatcttgaacaagattgataaggagattgactcaactgataatttcgagggtttccagttgttacactctgtggcaggtgggaccggctccgggctagggtccaatctcctggaagcattgtgcgatcgatatccaaagaagatacttacgacttattctgtgtttcccgcgagatcttccgaggttgttgttcaatcctataataccattttggccttgaggagattgatagaagatagtgatgcaaccgtggtgtttgataatgcttcattgttgaatatttctgggaaagtatttagaaatccgaatattgatttacaacacacaaaccagttgatctcggctataatatcttcagtaacaaacagtatacgattccctagttacatgtattcgtccatacagagtatctattctaccttaatcccctctcctgagctccatttcctaagtcctagtttcacaccatttacgtcagattacatacacgatgatatagcacataagggccactcgagttatgatgttatgttggatttgttagacccttctaatcctcttgtttccaccggcatgaataacccaacgtatttcaacgtttataacacaatcatcggtaatgtggaacctagccaaatatcgcgtgcgatgaccaaaatacaacaacgtctgaagttcccctcgtggtcttcttctgccatgcacgttaacattggaagaaggtcgccttatttgccctcacagcctaatgaaaacgaagttgctggtatgatgctaagcaatatgtccaccgtagtgaacgtctttgaaaatgcgtgcaatactttcgataaagtgtttgctaagggcgcctttctgaataattataatgtaggtgacttgttccaatccatgcagaacgttcaagacgagttcatagagtccagagaggtagtacaaagtctaatggaagactacatggctgcagaacaagactcgtacttgaacgacgtactcctggatgatgaaaacatggttggtgaattagaagaagatctagatgccgacggcgatcataatctagcatattaa

SEQ ID NO: 5606 - DNA, 144 bp, Saccharomyces pastorianus
  modified_base (11)..(12): a, c, g, t, unknown, or other
gatggcttagnngcggatcagcttgtcgatctcgtggaggccggtctagaccccgaagcaatccgagagcttacgcagaaatggagagagttactcaatcaacaaactcaagaagaaagtagtggtagcgaggatgaagcgtaa

SEQ ID NO: 5607 - DNA, 432 bp, Saccharomyces pastorianus
  modified_base (374)..(374): a, c, g, t, unknown, or other
  modified_base (390)..(391): a, c, g, t, unknown, or other
  modified_base (404)..(404): a, c, g, t, unknown, or other
atgcctccacaagaatacgctatttttacagatataccagtgacaaaagcgcaggttgaacactgttcttactcatcgtggtctacattatttcctaaatacgtaccgaaatctaaaataataaaatcattaccaaagaaattcattcagtatttggaacaagatggcatcaagctaccccaagaggaaaactcgaggtcggtttatactgaggaaataataaggaacgaagataatgaatacagtgactgggaagacgatgaggataccgccacggaatttgtccaggaagtggaaccgttagtagatttcccggatttacaccagcagctgaaggatgctatgagcgaacttggcgcggttgctcccaagtntgaattggtcagcacnncaagagatgctancgtggatcgacgcctgattgccagctgc

SEQ ID NO: 5608 - DNA, 375 bp, Saccharomyces pastorianus
atgggcgctaatacaagaaaaaattcaacaaagagtgtcggtttagatgagattcatgaaatcttgggtaaagacggcgatgacttgctatccgtggacaatataaacgactacgatacacaaggaaatcattcaattgaagataccgacgccgacattttagcatcgttaaccgctcctgttcagtttgataatacactggacagtgaaaacagtaactctatgtggagaaggagacagagtatggtagaagcagcagctgaaaaccttcgttttaccaagaatggtttatttagtgaaagtgctttagctgatatcgagggaattatgggtaatgacaccaaccaaccattcgagttcaacgatgtcttataa

SEQ ID NO: 5609 - DNA, 1650 bp, Saccharomyces pastorianus
atgtctgattttgatatgcctttctatgaagatccaaaatttgctaatctctattactatggtgatggttcggaaccaaagttgtctttaagtacatcattacctctaatgttgaacgatgaaaaattatctaaattgaaaaagaaagaggccaaaaaacgtgagcaagaagaaaggaaacaaagacgaaagctttataagaagacgcaaaaaccaagtacaaagaccacttccaatgttgataacgatgaatatatcttcgacgttttctttcaatccgatgatgaaaacggtgacaataacaacgccaagaaaaagaataagcataaatcggaaaacaaagacgctaccaagcataaggataaaggcctacgcttaatcgaaccgaacgataaatcagaaccgccattacaccatatgggccagggatccaggatgtctgactcttctgatgacgaatatgataacattttattggatgttgcccacatgccctctgatgatgaacacagtgaatctgaagcatcccatgatgctgatacagatgaggaattaagggcactggattcagatagtctggacatcggcacggagttggatgactattgcgaagacgacgacgatgatgacgacgacgacgactccagcgttacaaatgtgttcattgatattgatgatttggaccctgattcattctacttccattacgacgacagtgatgactcttcctctgtttcaggctctaactcagatcagaagaatcaagacgaatccaaagattgtaaacatgatctactggagactgtagtgtacgttgatgacgaatcaacagatgaagatgacaatctaccacctccaagttctaggtctaaaaacattggttcaaaggctaaagaaattgtaagttcaaacgttgttggactccgtcctcccaagttaggtacgtgggagactgataacaaaccgtttagtatcatcgatggcctttctaccaagtcattatatgctctaatccaagaacatcaacagcttcgcgaacaacatcaaagagctcaaactccagacatcaaaaaagaaggtagcgctaacagcaataatgctacccttaatggggatgagttaacacttaatgaacttttgaatatgagtgaactggaagacgattcaccatcccatacagacgatatgggtagtaatagtaatggaaatagtacagtcaataacaagagtactaatggacatgctgcggattggtacgaggtccccaaagttcctttatctgcatttagaaataagggcatcaacgcatatgaagaagatgaatatatgctacccacaaattccaatagaaaggcgcccattggctatcttggcaatgaaagaacaaggaagaagattgacaagatgaaagagttgcaacggaagaaaaccgaaaagaaacgacagttaaagaaacagaagaagcttctgaaactccgaccggacagagaaaaggcgaaaaaagagcaagaaactatgacgttgccattaagcgtcagcggacatgataccgccattaagaacaataacagtaatagtgatataaatacgggaacggatttcaacaacaatgaaaatactctttggaatatctgcaaactcataacctga

SEQ ID NO: 5610 - DNA, 690 bp, Saccharomyces pastorianus
atggtaggcaaaaaaagtcctcgaaaaagtacggtgaaccatagcacacactccggtaaactaccggcaaatatcaaaagactcataaaaaagggtgaatctaaaatgaatttaaaacagtcaccgcctcctatgctagggacaacaaggccaaggcgatttagtctaatatactcttcagaatcgtctctgagtgacgtatcggattccgacaagaataaaagtacaaatcaacataacaataaaaagaaagcaaagaacatctcaaataattctcaaggtaagaaaagtaaacttatacaaaggcaatcggacaatgatgaagaaggaactgaatcctctgattaccaagttataacgaatgatgaagagagtgaaaacacagcagtaaaagacagcgaagaagaagacgataacgatgacgatgaagatgatgatagcgacagtgacagtgatagtgacagtgatagtgagacgagttccgatgatgaaaatatagattttgtcaaactaacagcccagagaaagaaaagagcaatgaaagctttatctgctatgaatacgaataatacaactgccttttcctctcgcgataacagcaataaaataaaatctactacaacatctcccagtaagcaacagccacagccacaaccacagcaatcgcaagcgcaagatcgacaagcttga

SEQ ID NO: 5611 - DNA, 393 bp, Saccharomyces pastorianus
atggttgaaggtgattttgttaatgaacaaacaaacgttgtctcgcaaagctcaaacttcctgtgcgctgagcgtcacggcgccaaagccagtataggggacgaaatattaaagctgctgctaaagatcctaaactcggacgaaaccgtcgctcaaggtgtgcatacgcatgttgcggggtctccagatctatcagacttcggtttcgaaaatgaacaactggaaaatgtactcgccgtactcataatatcgtttattattgttgttgtcggggtgttgttactagggttgattggaatgatattcatatccttccgctcaaccagtagtagtgacaagcagctgcaatgcgacgacgaggaaaagcaagtgcttgctggaaaccagccctaa

SEQ ID NO: 5612 - DNA, 1938 bp, Saccharomyces pastorianus
atgactagttcagaattaacgaatgaccaaatcatagatctcataacagattataagaattttaaaagaattatagaaacttccgtgtctaaaggtaatcgaagaagaaactcatgcggcggcaataacaacaatctatcaaagttatcagatacgcagttttggcagctagcgacggatgtaaacaatgaactgatgaagagattgacaaactcgaacgtagatgaagatgatcatggtttgaaacgaggtaaagcgcaatcaaaactatcccgactgaacgactccaagttcgataacttgatctatgacatcttcacggaaattgaagagaggaaactgcatgatttgaacaagatgagtcattttgacacaatgggtaagggcgagttcaatttttattttaatgattcattatttgagtcgattaatataaacgataactgtataagtgcaagcggtatcgtgcccatggaagcgttccgggagttgcgttcacaattcgtactttactttcaaaatacgctccaccaagttcaccccacagatgcaactgcacctttaccaattcttctagaaactgtattcaatatagcaagcctaatcaacgaagttttaccactcctgttatcgccttcattaccggagcctttagaaaaggaaatcgtgtacttgaaaagtgccctgtcacatacaatcacttcaacaaggtattaccttacgtttggggacctagtaccacgtattgtgattcaatcatctatttcagaactaatttttgcgttttgcaatatcgttcagattgtcaagatcaaacccacttcaccaccacatgttgcattgcctagtgaaaagaaattggatgatggggaaactgcgatgaaaccattgaagattattgaaaaactgaaaaatgaggaagttggtaaagaagctttaggaaagggtgctggtgatctcgacggttcttcatcccccggaaaagtcagtacagtagaaccggggaattcaatggatgaatcaaaaatcaacacaccgcagccgatttccagcattagcaaaactgatgtagttgttaatggcaaatcgcatcaaataaatgaagcggatgattcctcgccatgcaatagaaagatagattcaaagttggttttaaacctaaacaatcccaaaaatccatcaacagtcaaaaataagttgtcttcgcgagatgatttgaatgtttcaagccctctcgataaggtgctaccatcaatcggtcaatctcgacaacatcaccggttgtcaccaccgaattcacacatcatcaacaagtcaccggcagaaacgacgaagcataaagagattttaagtttttcagatgtacctgaatcaccaactgcagccaggatgagacgatttaaagaaaaactacaacatttcggctctagctctggccttggtttcaggatttctacttcagatgaagacgtgaaaaattcagaagtaaagaaaagcacgcccaagattagtacaggtgaacttctagaatttgtagagggtaaaacaaccattgtggtcccaatggtccagggcattttaagcggtatccaagattctaaatctaagaattttgagggcgcaaggccgatatcagcattatgtcaagattccgtcaagttaactcccatattgaaaacgatgattgatatgactacagaggtaatgacccaacagaattctaaatcatatttgaacaagcacgctaactggatagttaaagggctaacggactgctcgaaaaggctaacaagtttatgcagtggtgtacacaccctcttaaagttcagcgataaacatttctatcaaaaattagcgggtatcctgttcgatgtggtcaaatgcgctaaggaattggttaaatgcgtggaaaaggcgagtggccgcgtagcgctgtag

SEQ ID NO: 5613 - DNA, 864 bp, Saccharomyces pastorianus
atgaggcatctcatacaactagaagccatatatgctcaaaggattgccgatccactagcgtataaagagcagcagcagatactgatgtttaggaagagagtagtgaagaaaagccctgacaatgaaaaaggccagaagaagaggcaaaaaatcgacttcagcaatgagaagccggtcgctagcgatcatggtgatgacttcgttgacagtatcccctcagcaaaagctggaactgccaagaggcttcggccctcaggtccggatgagaacagtctatctagacgaaacgaggatttgggtaagtacactctgacggtcaacgacgactctacaaaggaagacctattgaactcggagagaagagagctgactgagaaagtcaggaaagagcagtccaacgacagcaacgagctagcattgaatatgagtggcaaaaaggcccggctagctaaacagattaaccaaccgtcgaatatccggaccacggtgcttatggacttccagcctgatgtttgtaaagatttcaaacagacagggttttgtggctacggagatagttgtaaattcttacattcaagggatgatttcaagactggttggaagttaaatcaagaatggaatgtagatgatgaagactcgcggaaggacgcattggacttgggcaagatccctttcaaatgtgttatttgtaaggagaattacaagtcacctgtggtcacaaactgcgggcattttttctgtgggtcgtgctttgctatagagatgaagaaaggtaccaaatgcttcatatgtggcaaggaaacgcacggcagtgccaaagtagctgccgatttgcaaaaaatattgggcaagaggaaggtgtga

SEQ ID NO: 5614 - DNA, 3069 bp, Saccharomyces pastorianus
atgggcatagctcttttgacctcttcttctgtacttctttctagaccgcccctctctcaattggttcgtttcgcaccaatcgctctaggttccattgtaagacgctttaaaccgctcacgtgtacacctcgctactatactgcaaccccttacaggatgactaccaatttcaagacgtttgatctggagtttttaaaaccggacttggacgacagatcgtacaggttcattgagttgcccaataagttgaaggccctgttaatccaggaccctaaggctgataaagcagctgcttcgttggacgttaacatcggtgcctttgaagacccagaaaacctgcccggtttggcccatttctgcgagcatcttttgttcatgggttctgagaaatttcctgatgaaaatgaatattcgagttatctgagtaagcatggtggctcgtccaatgcctacaccgcgtcacaaaacacgaattacttctttgaagtcaaccatcaacatctgcttggtgcgttggacagattctcagggtttttctcgtgcccccttttcaagaaggagtctacagataaagaaatcaatgctgttaacagcgaaaataagaaaaacttacagaacgatatctggagaatctaccaattggacaagtctctaacgaacccgaaccacccttatcataaattttccacggggaatatcgagactttgggtgaatcgcccaaggaaaatgggctaaacatcagagatgagttgctcaaattccataaagacttttattccgccaacataatgaagctttgtgttcttggtagggaagacctagacaccttatccgaatggacctacaatctgttcaaagacgtttccaataacgaccgtgaagtgcctcactacgcagaatctattatgcaacctgaacatttacaaaaaataattcaggtcaaccctgtgaaagatctgaagaaactagaaatttcgttcactgtacctgatttggaagagcattggaaatccaagccaccaagaatattgagtcatttaatcggccatgaaggctctggttctttgttagcacatctgaaaaaattaggctgggctaatgagctgtctgctggtggacacaccgtctccaaaggaaacgctttttttgcgatagacatcgatttgactgatgatgggttgacacattatcgagatgtcattgtcttgatctttcagtatattgggatgttgaaaaattcgctaccccaaaaatggatatttaccgaactacaagatatttctaatgccactttcaagttcaagcaagccggtaacccttcttccactgtttcgtctttggcaaaactcttggaaagagattatattcctgttgataaaattttagccatgggtttattaactgaatatgagccagatttaatcactcagtacacagacgcattgatcccagaaaattctcgtgtcacgttaatttcaagaggtttagacactgattccagcgaaaagtggtacggaactaactacaagatattagactatccggaagatttgttaagggacattaagtcaccagttttaaacccggcgctgaatttaccacgtccaaatgaatttgtctcgacgaattttaaagttgataaattagatgacgtaacgccaatagatgaacctatgttattgttatccaatgggatgagcagattatggtataagaaagatgaccgattctggcaaccaagggggtatatttatttgacattcaaattgccccatacgcatgcgagtgtcatcaatagtatgctgtccactttatacatccaaatgatcaatgatgcattgaaagatctacagtatgatgctgcttgtgctgatcttcgtatttcatttgtcaagactaatcaaggtctcgatatcactgcgtccgggtttaatgaaaaactgatcgttttactaacaagattcttgcaaggagttgtctcttttgaaccgaaaaaggatcgttttgaaattttgaaggataagaccattcgtcatttgaaaaatttgttatatgaagttccctattcgcaaatgtcaaactactataactcattaataaacgaacgttcgtggtcaactgcagaaaaactggaagttttcgaaaaattgacatttgagcaactgactagcttcataccgactatctatgaaggcgtgttttttgaaactttggttcatggtaatgttaagcatgaagaagcaatggaagtggactctttgattaagtcattgattacaaataacattgataatttgcaagtctcaaacaaccgcttgagatcctatttacttccaaagggtaaaagctttagatttgaaacagatttgaaagatccgaagaatgttaactcttgtattcaacatgtcacacaattggatgtttattcggaggagctgtctgccttgagtggactgttcgcacagttgattcatgagccatgttttgatactttaaggacaaaagagcaattgggctatgttgttttcagttcgagcttgaacaaccacggtacggcaaatatcaggatcttaattcaatcagaacataccaccccttacttagagtggagaataaataacttttatgaaacatttggtcaaactttgaaagatatgacgcaggaagactttgacaagcataaagaagcattatgcaacagtctattgcagaaattcaaaaacatgagtgaagaaagcgccagatatacagcagcgatttatttaggtgactacaatttcactcatcgtcaaaagaaggctaagctagttgccgatatcacaaagcaacaaataatagacttctatgaaagttacataatgggtgagaacgcatcaaaattaattcttcatttgaagtcacaagtggaaaacaaagagctcgatgaaagtgaattggacgccgctaaatatccaagtggccagttgatcgaagatgttggttcattcaaatcgacactatttgttgctcctgttcgtcaaccaatgaaaaattttgaggttactgcacctgctcaagctgaaaagtag

SEQ ID NO: 5615 - DNA, 5778 bp, Saccharomyces pastorianus
atgtcccaagaggattcgcagcgctggctgcctacggatcaactaatatatggtgtgcttgtaaaatcttttcttcccttacaaaggcatcctaaattagtgtatgcgaatagcaattatgcaaacgtgtatgttggtgccgaaatttacgtcttcgaagaatctgtggatgggaagtggtgtagagcgtaccaatgtttaaggccctttcctgaagaattcatatcaaacatgaattcttcaaatgatgttttacccgatgtaaaaccaaaggtggtgatacttcctaggaaatttatacatttcaatcctaaaaaagccgttagtactatgccatttttcaaagcaccaagcgccgaggattttaaacccttgataagtaaagaatgtgaatcgccttccttttgtgacagcctttatgtcagttcacctgatgaaatatccactggtaaaccgagaaaagtaccgagacctccttttcccttctttagataccaaaataggccctttaaagatgaaatgggtcccatactatctcttatttcttcccatgtttattcgatgtattcaattggtgagtttgctatatatagaaaaatgataaaattgtattatgacctggatatcatacgatttaggttgtcaatggatttgaccacggaaagggagaaagttaatctcataagagcagcaacctctttacgaactaagattgcaaaatttttgtcttctacacataagaaaaataaacttctctctaattctaccccaaggaaccctgatccatatggttttgaaggaatatttgctagagatatcaataccggtgaactgcttacatatgacatcgaaaaactaagaactctagtatcatcttcgatgttttgcggcttgactaacaacttccctatgctaaatgacacagatttagagtgtctgccgtcggccaatgaaatatttggtacagttagatcaagtattctggtcaacttgaaagatctggcatgggatccatccatatcaaacccgaattaccaagagctttctatttgtgtatatttaagaactaaagaggaggttcttaccgagtcattcaccatgacaaaatcgtccaatatggagtatgcactggatgaaattcccgcaatgctattcaagaacatcctagagacgataatacaaaaacataaaatatacttagtggtagtcctgaaggaaacagtggcaatttcggctagtaatcctccagaaatttcatcatatgatgtatccacgcatgaatcaagcgtacattatccgttccctcctactaattcacctgctgagaataagatagattatgtgaaaaagggcttagctgcgggagtgatcgacatatctccagttttcaaattttacaatggtccggctgtctcaaataaagctcagaggttcaacctttatctttattgttctgattctttggagtccactcaaagttataacctttcaaacgatgacgacttaggttggggtgatctcacaaagaggatcattgatgattcatctgagggaatctctgttaatcctagagcagtttctttatcggtaacagttaaggaaattataggtaaagaagatggagacaaattacattcgacgtccctagtacccataagaactattcctacttatttttacgacaccatgtttagtcaatcagagagaatctatttgaatttggggagagtgtcgctttgtggactcgcaacatcagatacgaccatcgagaacgttactgttcaaatatcttgtagaaacaaaaatgtaaagttttgcaaaaacagacttgaagagagaacggggaactggaagtttgtttcagtgcatccaaacgaaagcattggagaagcaataagaatcgaaggtgtcgagaatatgagtgaggatgaaacattaagggtacttgtgtatttgaatgggttcttaatggcaaaatcaaacatccatatcaagaaaaaggatgaaatattagaatatagaaagggtactatattccagataatgtcatctcgttcagtccccctaattcatctagagctcgaagcgtcttattttggtcgaaaatataatgtaaatccagccattgccaaatttctggtccttccaatcaaagatgttgaatttgaccaaaaactcaaaaaaaatttcgcgattgtattaagagatttaaacaatatttcatttaatgacctattgaaacattttgactccattttggcgcactatttgatgctcctcgagttcgttgatagagcctgtgataaacggggtgttccttcaagtttacctaatgttgtgtttagtgagtttgtgaaatttctagatttgatgttaacgcaccaagaaagttcgagatattggtttaatagactgtacaaaatggttttatcgagagagctagaatgtcctaatgttgcaccgatactaataaaacacatgaccaacatctttgacagaagccattccacttggactagaacaggaacggcagtgtgtcggactattctataccttatggtgttagtaattgggtcatctcactcagacgaaatacctgattttaatcgattttttcaaagtttacacaattttttgatgcttagcgatgattcaattatggcaaatcagatcttattaatcgaggcattccctgccatggtacaaacaatgactaaccattgtgatgcagaggacttggttcgttttgcgattggattatttgaatgttgtcaagaaaaggaaaaggctcaaaaaatatattccaaatcactttcacctagagaagaagaatatttgaatgcaaaatttacttgtctttcgaagataattaaaaaaaaagttcttaagaaatatttactcaggacggaaactgtgaataagctgaggttacggttcttatctaaatgtcttgagtgggtgcttataccgtatgctccagatgaggacaaacgctttcatgtagaatccttgcggctagctaatacagttttaattacaataattgaagactacaaaattgacatgcttcagcgaaacttaataagattattaccatatttatgtaggacctttactcatttgagaaggtactgtaagaaagcacgtctaatgcggcctcggagagtctttagcatgcttttccccaatgttatgccgtgtaattatattccagtcgattcgattgtgaatgatgagattgttgtagaggttcttttagaattggccattataatatgtgaaataacgaaaattgcatcatgtacatttgcttcgtaccaatcatttgaggaaataacaaacttgtgcgataaagactttcttttccaatcgaaattctacttacgaaatttatcaaatgaacatgtttacacgataacgaatacaatttacctactttttaagcaggagtggttcccagggatgaaatggcttggtgtatctgcattgttaggaagatcgtccttagtgttgcttaatttgtgcaagaattacatcatagaaaataattcaccttcctctttgaacgggtctgaggaacaggttgatatgcgactttgggcagaatactccaaagcagtactactagtttcaaatcataaaagcgcctccctcacaaaattagctataacgccacgcaaggccgtttatttgatatcaggggacttgaaaaaaacttcagcatatatactaaacgactgttgggatgctttagctactggacattataatgccagttacgccaaaaaatttggtttaggggccttgagtgattgtcaatttgaacttttcgttcacaatcagtttctaatacgtgagatttttatttttgccttccatagacacatagatgctactagaatatgttgcaaaatactatggggactaggattaaacttttggagaatatttgggtctctacaaccagctttaaatgcatgcattccggagctattcagtgcataccaaattgggaaacttcatttaaatgattacgaattggagagatttgtctcttgtctattttttatgatacatattccagattcagacacattttttccagcatgcatgaacgttttaaaagatttgcttggttttttacacattgtaaatgaactttacaagattcctaatcaagaagaatttgatgacgatcgaacagcacgttatatagaaatgttcgagtatctgttagaggccaacaggccagaattgtttcataaaatgatttacgatttgtttgtccactttgttcagaaaaaggattttgttcaagccgctttaagtctggaacttttggcaggtacatacgcatgggattctaatgacacactggaagcgataccatttccgccgctgccagaacaatcttcgtttgaaagaaaggaatatttgcttaaggaatctgcacgaaatttttccagaggtcaaaaactagaaaaagctttagctgtatacaaggacttgattaaggcctatgatgagatcaactatgacttaaatggtttggcttttgtacacgaccaaatagctggtatttacaccagactgcaatctattgatagactggttccaacgtatttcaaaatttcgtttatgggatttgggttcccgaaatctctaagaaataaatcgtttattttcgaaggccttccatttgaacacattacgtccatgcacgataggcttttaagaagttatcacggatctaatatagtgcactctcaagaagaaatagatatgctattgatgaaccctccactggggaaatacatccatgttgcttccgtagaaccgcgtttgagcatatccgatgactacaatagtagtgacaaaaaaagctctattaataacaaagtacgcatgtacattgaaaacaggaacttgaggaccttcagtaattctcgacgcttaccaggagcaaaaggcgttactgacctgtgggtagaagagtatacctatcatactacaaacacgttcccaactttgatgaatagatcagaagttgtcaaagttactaaaaacaaactttcaccgctcgaaaatgctatacgttccctagaagttaagatacaggaattatatgggcttgaaaacatgtgccataaaactctaaaagatcacggagatgtgaccaatttatttagcgagctttcgacaaatattaccgggacaatatcagccccagttaatggaggcatatcacaatacaaggctttcctcgaaccgtctacttctaaacaatttagtgcggatgatctagcaaggctaacatcagcttttgatgaacttgttgcagtattaggtcgctgtttgtcgctgcatgctgagttattaccttctaaggaactaaaaccatcacatgagcttttagtgcggcttttcgaagagaactttgcagaggaaatagaaagatacagccgcgccaacgatgaagccatcgctaccagggacaagaaggtgaaggctcgtatactttcttacaaaagtacttccagaaggtcctgtctttctggaagggatcatcataccatagggtctaatcacagccagtttttccaagatcagagtgattcctttggcccgaacagcttactttttgggaaatatttaacaagaacagtatctcattcgtctactacgagtagcataaataaaagtggaattgcttccgcaaatggaagctcctctttaacagggtcacatccgaacaccagtacagagccccagcaataa

SEQ ID NO: 5616 - DNA, 618 bp, Saccharomyces pastorianus
atggaacttaaagaacaaataccaaatgacctcctacaactgataaaaagttccaagtacgtccatgtagcgacatgttcatcaaagtgtataccatcggtttccttgatgcattatatattcgtttcatcagcagaaacttttcataaacacgagtatggtatagattcagatcgtaatgattacattatatttacggctttcgaaaaatcagtaaagtttcggaatgttatagagaacccaaatgtcgctttattatttcatgattggattactgctaaaaacttaacccttcgaaagaaaagtatacatgacgagaaatgtttctctggacaaccaggatctgcaaagttgaacgattttttacgagatttaaaccaaaatgaactgaatcaagtaagtgccaccattaatggtattgcggatatagtcgaccctgatagtgaagaatccacgtactataggcggttattattaaaagctaacccagatgcggatatttttattctgggcgaagagactgccataattaaagtcagaattcacaaaattaaagtgtctgatatggaaaataatacatcagtttatggtcaaaccgcaaaactcggttcaacgtag

SEQ ID NO: 5617 - DNA, 3399 bp, Saccharomyces pastorianus
atgctcactcttttgcaacagtttcaattggttttagttttgttttgcttggtacttatgatacgatggtcgatagctgattttcttttgggatttcttttcagcatcttcatatttggttacctcgtactcttcagatctttacctgacccaccagagcttcagccaaaatttgttggccttgtgcctgaaaagccaaatgctgtgaaggtagagagagaattgagatcagctgaagaattgataagtgaagggaatgcgcaaattggtaaagaattggagagtattgttgacttgatcattaaggacttcgtagagtcctggttcgcgaaaatcgaccgaagtgctgatgctgaatttctgaaagtcatgaagtggaaatttctacagacgctcctagtagtaaaggggaaattaatgaagaacgatagtgccagtttaattgttttgaaactgttacctatattcaataaacacttcagtactttctgtgacgcaagagaagctgtattgagcgatttgactcttgaaagacaaaaagcagctaatattgatctacaaattgctgtagaatttaataaaaactacaagttacataaatcattatcattgaaacccaatgctcttgagaacgaaattgaagagtccataaggaaatctgtgattggacttctcccatatattttcgataacaatgagttggattcactgtttgttttcacgttaatgacagaagtgctcactacatgcattatttccccactaatcatcaaacttagcgatccagataattggaacttgaaaattgttagcatttcacagaactactttgaagagaaaaataaagttcataaaataagaagaatgctaagcaaagaattacaagaccataggaatgcgatcaatgacgtcacaaataaaaacgtacgagattcctccaacgaaaagttggaactcagtgttaattatacggggaaacagttcgagcattacctcaaccggcttgactctatgacagatataagtgacatcaagtatgttgcattctcattagctctcaagatataccaattgaaagatattgagcatttaagcaaagaagacttgaaatacaagaaacgtttattactctccttgaatttaattgaatcaaaatcatcatattccgattcgggaaccaaaaccgaaaacgaaagaactgtaagggacagcaattactcagacttgaatatggatagtagaatagttctaaaggagatgaatttattttttagcgcgatcacgttaagagaaattatagatgacagcaagtgcctcccatttttcaagtcgtttttaggaagtgtttctaaatcccagggtagcacgtttttagagtattcgcaaacaattgagtcattcaaaaatcccttagaggatgccacatctgaggatataatttctggatattctggaattaacaatattcagctacaagaaatttcttcgaaattttttcaaaacgataacttacaaaatatgaaattgctggatgagggattggtaagaaacgtgatccttttcacaggttctttgcatatgaataacgacgaagagacatttattctagctcgaaaaagtgttcttttgctacaagcagaagctataaaatatctagacgataagcttttaccattatttaagagttcgcctttcttcctcaaaatgttatcaacaccagacattatttcgactgacatatacgttcattttctaaccatgagtagcagtgataacaacgcaaaacaaaacaaagctataagggagactacaaagatagattttatgaaccctgttagaatttttgcaaaccctggcattacagacgctttagacaatatagtaaatggatctgatttaaagctagataaagcaaaaaaaagcgcaaacccacaatattcacaattgtttggatcagataacaataatatcttcaaagataaactctttgacgatgacaatgacaacacctctgaattttacctcgccgaggatcagttggatttaccgcatagtgtaggaaaatctagcacctccagtaaaaattgggattcgatccatagtcaacactatggctcaaataattttagggataatatagcaagtttaactatctcaattgaccaaattgagaaagaactagaattgttaaggcatctaattctgaaggcagatttaaccaataatcaaacgcagttaaaaattttgaaaaaatcacaaaggaccttattaaaagaactagaaatgaaagagctcctgaaacagcaatatatggttcaagaaaatgctaacagtttgttcagaaagactaaaatttacatcaggtcttactttagtgagggttctagtaaaagtctaaccgaaataacgtactatatcataaacattcatcattttaataacgggcaagtaagttcatgggatatggcaagaagatttaatgaatttttcgatttgaacgcatacttgaaaaaaaattataagcctttgatgaaacaattgcaagatctgtttccatcaaaagtaaaaatgtcgttgaaacatcacgtcacaaagacattacttcatgaagaaagaaagcaaaagctggaaaaatatttgagagagttgctgtctatttctgaaatatgccgagatgatatttttagaagatttttaactgatcccgcttcattcagactagacaaagactatatgcatgatgatgtattggaagaacggcctcatgagttgaatagcagtagtaatagtacgagtaacagcagctctgttgtagatctacaaaccagcaaagacgacgaagaattgaatttttacgaagatgaaagacacttttttactgattctgggtatcctttctattcgcaaaacaaatcttttgttaagcaaatatgcgatctatttatttcattattccaactgaataaagcgaattctggctggttaagaggcagagctataatcactgttttacagcaacttcttggcagtaccatcgaaaaatacataaaggtcagtattcagaaattgaggtcagaggaccaaacgcttgaagccataatcggatttaagaatatgctatggggtgataatggcttgttagaaaggaaaagaaatgaaacaacagagccagtaagaacgaaaggtgaaaagttaaggacagaaaaggatgctttaacgagccttcaaaggcttttcgccgagatttgtgggcgtgtagtcggtctaagagactcccatgaagctgctggtcgagttcatgccatgctccaaaatccttacttaaatgccagtttattattggaggcgcttgatgcagttttattagatatcatatgtactgatgaacatgaaaactaa

SEQ ID NO: 5618 - DNA, 195 bp, Saccharomyces pastorianus
atgagaaattccggacgcggtaactatagcaataacggtggtatgaacggagcttcaaggggaagaggatccggtagaggaagaggattcggtagaggtacgtacaacaatcgcggcggtcgtggcggacgtggcaacaatggcggctactccaattacaactctaattcaacagatacgtctcaacgatcatga

SEQ ID NO: 5619 - DNA, 1827 bp, Saccharomyces pastorianus
  modified_base (1509)..(1542): a, c, g, t, unknown, or other
atggtcttgcagtgttctggatcctctctaatcagccgggttttttttaacgaagatggaaaggcacgggatgtctatgcatgtttctatccaggaacgaataacaatacgtctaataataatggtactacgaagaaaatgtctctcgaagagtttctggggaatgacactctaggcgagtcggtatgggacgaggaggacattaacttggatgctataagcaacaccacgaatatcgatatcctgaaacaaaccaaggctggcggcgagcatcaacgcgatggccatcagcaaggcccgcatggcagtcaagggcctatgggcagatcgcgtttccccaattctgcatccttcggtggtggaaacatgggagatttcgcaaaccatcaccacccactgcagcagcagcagcagcagcagggccccccttacattgttaagttctccgatttaccaccgagattttccaacttcgacattgaagatcttttccaggcaaagtttaccaagtttatcaagttcaaattgttttgggaggtgaacaagaaccctagtatttcgactttgaagtcaggctcggtctttgaccagaatttcaaacatgactcgaaagtggcatttgtcgaattgtattcatctcgtgatatggacaagattttgaactattggactactccgttgaaggaaatttaccatatcactatagcgcccgcggaatttgatgatttcaaagactacagtgcaaaggtgaaattgttgacagacctcaaagacgatgccggcaaaccattcattgtcaagacccagagatcaaaatccaatccttttggaagcgccaggcccgttgatacacagtccaagattttggacatcgaagagaaaatggaaaatttacacgtggaagatacaacaactttgagagcatctttggtctccgacagtgatggcaagtccttggcaacaccagctcctacaacggcagcaacagcaggcggcaagatcacaatcttgaaaaaacagccacttacgggcgaagaatcaacttctacaaccccgactccaaaacctttgagctattcggaagtggtggagagatctgtggtcaacgaaacttcgaagaaaagtactcccttaagcaagattggtactccagcttcagatttacaatccaccgataaatcagacaactttgaaggggacgatagacaaggttctgagaaatacgaaaatgataaaatccaatcggacgcctcaggtggtaatggcatagatgcggatactggtaaacaatttactttcaagaacgtggaaagagaccaaaacacaggtagaaccaagtacaacggtaaccaaaataatagtaataatggcaatttcagaggaaataacagatatcgcggaggtgctaacagcggcaattatagaggtggtaacagtaatcgtggtaatcgtggtgggaatcgcggtggtaattcttacaacaacaataataacactggtgatgatgannnnnnnnnnnnnnnnnnnnnnnnnnnnnnnnnnggctcaagatatcatgatcgacagaacaatggagatggagctgtgaactcagagtcgacggcagatgccacagggcacaacagcaacgacttttcaaactcagtatccaatacacaacaatactccatcttcaaaccagctagcgggttccttggccaaagtaataatgattctatgagaaattccggacgcggtaactatagcaataacggtggtatgaacggagcttcaaggggaagacgatccggtagaggaagaggattcaataaaagtacgaacaacaaa

SEQ ID NO: 5620 - DNA, 777 bp, Saccharomyces pastorianus
atgtttcagcggtttttgagcatttgcatagacgagttcccggagaccctcgattatacgggaagggacgaaaatggcaattccaccactacagtcctgcacagacagatgatgtacgtgcccgaagatgacgacgacagcattgacacactcgggtgcatgaactacacgttgcacaaggccgactgcgaccagacactgcactcgtgcgtgcagctggtggacgagcacctgggcgccaagtaccgccgggcgtcgcgcaccatgtacggcaaccggctgccgtggaaggcgaacaagctcgcggagatgaaaagcgccggtttgatatatgtctgttactggggcaacgacgtgcaaggcgtgcgagcgctgggcgcgtttgtctccttcatgtacacggaggagacggggctcgtcgagggtgatgccgcgcacgaggtgagcgtgcccgtgatctacctctacgaggtgcacgtggcctgcgcgcaccgcgggcgcaggctcggccggcggctgctgacaaactcactgtgcgagggcgtggcccggcgcgtccggcgcatgtgcgacgactttttcggcgtcgcactcaccgtgtttggcgacaacacacgtgcgcggcggttgtatgagtcgctcgagtttcagcgtgcacccgggtcacccgtaccgatagccgcacctccgccccgtgtgacgcgacgcggccacggggcccgggcccttgtggcgcgcgatcccctctattacgtatattgcctgcacctggcgtaa

SEQ ID NO: 5621 - DNA, 1791 bp, Saccharomyces pastorianus
atggcatatttggaatacacgttattgaacaaatctaaaaagagtaggaaaacagactggataagctgttacctagcaaattgtcccatatccgagaattcccaggaaattcccaatgtgtttcaaattcaatcttttttggctccagttacgacgactgacacgattaaattcataagacatttgaaacagtattgtgagcagcatgctcgtgatagcccaactgaagattttcagtctatgattcaatgtctcctggttgcttcattggatatcaagcaaaaatttcaagcaaggaagattttaaagcaaatagttgtattcacggataatctagatgaactagatatcacagacgaagagataaatgtactggttgaagaactaaacgcaagaattgttttgattgactgcaggaaagatagccaagatgataggaaacaatcaaattggctgaagttagtagaagccattccagattcgaaagtatacactattaatgagcttcttattgaaatcacttctcctgcgacgagtatagttaaaccggtaagaattttttcaggcgagcttaggttgggagctgatatattgacgacacaaacatcgaatccaaagggtagcgtggaggatgcaaattgtttgtgcttcagagtagaggcatttcccgccactaaggcaatctctggactcaatcgaaaaaccgttattcagactgaagattccaacaagcaagtaaaatacttaggggttaaatccataattgaatatgaaattcataatgaagaaaataacaagagcgccattgcgaatgatgaggcggagccttcttacacttcagcaatcatctctaaagattcggtaacaaaggcgtaccgttatggtgcagattatgtagtgttgccatctgttctagtcgaacagactgtatatgaaacatttcccgggatggatttaagagggtttctggatagagaggctttgccaagatattatttaacatctgagtcttctttcatagtggcagatacaagacttggctgtctatctgacgcaatggcattcagtgccctagtggatgttatgttagagaataggaaggttgctgttgcaagatacgtaagcagaaaagacagtgaagtgaccatgtgcgccctgtgtccagttttaatcgagcaagaagataacgaaagaaaagtcgttagaagccttatttcgtgtagattaccatttgcagaagatgaacgagtaactgatttcccaaaactactgaataggacaactacatctggggtgccgttaaaaaatgaaacagatgaggaccagatcgatgaccttatgggtcagtttgtggagtcaatggacacagacgaactaccggaaatcccatcctataactactatcaatccataaacaacgtgacgacagacaccactctccctcttcccgctttgaaaaagggacaagacgcaaacaaagacgatccgcttagaatacccacagtgttcatttatagacaacagcaagtgttattggagtggattcaccaattgatgatcaatgactcgaaagaatttcagatcccagaactgccggactcactgagagagaaaatcagcccctatacgcacaagaaattcgatagcaaggaattagcgaagattcttcgaatcaagaaatcggacaaactaaaccttacatcagacttaaaggatcaattggaaagggaaaaaattccagacttggaaacactattgaagcgtggagagcaagacaacaaggagcgttag

SEQ ID NO: 5622 - DNA, 135 bp, Saccharomyces pastorianus
atgtcaagcgaatcaacaactttcatcgtggatgtgtcaccatcaatgatcacaaatgaccatgtctctaaatctatgggctatttggaatacccttctttgaccaatcttaaagagtacgacaccgatggataa

SEQ ID NO: 5623 - DNA, 363 bp, Saccharomyces pastorianus
atgcctcaatgcgctatcctaataactccatggcacaacctaagaaaaaataaggctatgaatcctggtgaagtatcgtttaaatctctgaggcaatgcaggaaaatagaatgcggaacaagagataacaaaacactgaataggttaaccaaaacgagggtagaactattcgataatgtagaggccacacttaatgaggcaaagaaaaccaaaaatggtgacttttttgtcaaacttatagagtctaatagacagaatcttattggggaagaaaagcaaaggaagttagcgaaaaagaatcaaaagaagaagagcaaacaacatgacgacggctttcttgatgatagtcctttaacagcttaa

SEQ ID NO: 5624 - DNA, 315 bp, Saccharomyces pastorianus
atggtttatttttacgaatcaaaaccaacggagtattcaataccctaccaaattattaccggtagggacaaatttgaaaacgacctattaatcaaatggagttacaaagagttgaattatgtttggtttcatgctgataagtattcgagcggccatatttatctaaagctacatgaaaacgaaaaaacaatcgatgatgtaccgcacgaagtatacatgactgcttaccgctatgcaaatctgaatctattcaaggaaataaatgcctcaatgcgctatcctaataactccatggcacaacctaagaaaaaataa

SEQ ID NO: 5625 - DNA, 1269 bp, Saccharomyces pastorianus
atgtacgagtactgttcagttataatcaagaaatattctagatacacgattccctctctcgccccaaaagggttcagttccgttcttgaaccccctcatatagacaaatggcagcatctttccgttaactgtactctccaattcaaggttttattagaggattccggacaagttgctctccaagttattcttaataactcgacttttttggaacatattcggctgccgctagggagcaatcatgattcgatacaattctcatgcaaatgccctataatttcctgtaaatatatatctgaagagtttggacccaaagtgttgaaaaggttccagataaacttatcaaatgaaatggatttcaaccgaattgtcatttctttgaaaaatttaagctttattgtgaagaccgccaaaacctccattgctcgaaacacaatgataaaccagacatcagatttcagtaacagtaaaaaaggtaattttaatgaaaacaataatgctggcacttacagaaactccagtgtgcagtttcagacacagaatatggtcatggatttcagtcaaatttatcaggaaaagtgcgcaagggaactaaataactgttcaaatatcacatttccaatgactaaccttcctatgacacagcaaaattttccaacaccagaggcaaatgtagagcatttttcacaagaccttaacacgccatcggctacacaaaccattccaattgcaccagaaccattaagtgtaaaacttttggaagcttctccacctttatcgaataaatcaagacattctcctactacaaagaaagaaaacaggaatacagctatctcttttgatctactttcaaaaaaaggcgctatcttgcataatggtaatgatacattgaatgtggctgatttaccgaagaaaaggcagagcacagaagacctggtacaaattcgaagctctgctaatgtagttacaaccctaggaacatcatgcaatctggtaaaaaagaacgcgacaaagcaaaataaggaaaaggtcgataataagttaagtgactcccaaaacgtagcgcatacaaacgaataccagaaaaagaaagaaattcctttatgtggcccaattaatggattggagacaaaaatgaccttgatccaagaagaaatgatggctgcaaaaaagactagcagagatccgccaagaaaaatatctaagcggctaataaaagaaaagttaaaggacgaagagtttatgaaatgggtatgtacgaagatttga

SEQ ID NO: 5626 - DNA, 1185 bp, Saccharomyces pastorianus
atggtccctcatattccagtatcaaaccctgtagaaaattctcatccaactggaataatgtcttcaatacctcctacaaatcagcagttcgcttcacaaaatcagccatcaatgttccctgatcaacagcgattttttcagtatcaagtacaacatcaaaaccaaggacaagcgccatctttccaacaaaatagatctgctaggtttgatgacacaaacgcaatgaaattatttcttcaacaacaagcgttgcagcagaattcactacaacaaaattctggaaacccaaattaccagccaaatgcgcgaagtaataccggtgaagagaacaccctcatgaataataccgttacgaattataatagtatgttgcaagaacgtatacgggcacgattcaataaaatgaaggcaattcctcagcaaataaatgaccagaatactgctgcaagcccagttattaacgacctaacttctcaacagcaatatatgcacatgatgatgcaaagattggctactaatcaacaattacagaatggcggttttccttccgaggttggtcgtataccgcccaataacaacaacgtctcattgcaaggaggaactatgggtccccctggtatggacaatacggccatacgacagactagccagcttggtccaaaccccatggttaatatgcagcctttatatcaaaatgctacttccggaatgcatgcgtacgcaccgcaacaacagtttcatgtgccacagcagtacaaagctaatgcttctataccacataatgatcctactgtcggtttccctccatcgcatagtaacagtaacacaaccacgatttcacaatcgttttcgaaacatacctcaagttctagcgcgactcctaatataactgttgctacacaaccaaaacggaagcagcgagtaagtaagccgaaagttaaggaatcaaggaaaagtactgccgcgcaaaaaacctctaaatctaagaaaatcgagcaaactggtgaactggcaaatgctaacttcattaacgttgtttctaaggctgaaaatagtggaaaagatatcacaaaaacgcacaatgccgactcacaccagcagtcccacggttcctttactatagatgcagaaaattttgacttcttcaacatgggtgatttttctcccgatttaatggacggttag

SEQ ID NO: 5627 - DNA, 1239 bp, Saccharomyces pastorianus
atggataaaacatccaatataaatacaaatgagcgctctgatagtattgaattcggttcagccccaaataataaaggcttgaatggccacaatcccgtgcaacttgacggagattctccagtgtttgtttcggatgcaatggcaaagaattccaagcaattactatacgcccatatctataattacttgattaaaaacaattactggaattctgccacaaaattcttaagcgaagcagatcttccactatcgagaatgaacgggtcccccttgggtcaaacaaatgatctgaattcgaatttaaagcatggcttaatgaatgttgcttataaaggtgatattgttggcaaggatggattattaccctcgaaaatgctgatggatgccaaagacacgtttttactggaatggtgggaaattttccaatcgttatttaacggtgatctcgaatccggccgcgaccagaaacacgacattttaagagagagaatagttccaattctaccagttaatgcgaaagctaatatttccccgcagttctcgaatatcccgccaaatatagtcccgccaactcagaatagcttctcagtaacggaggaaaactttagactcaacgatggaaataacgctaacttgaatgaccaagctaatcgaaatgtgtcggaaagatttatatcaaaaaccgccggtaattacgataagaccaagaacaggaactttgcagtcgataatacaaataacgagattacagcgcagcaatacgcagttttcaaccttcaaggtcattttaatgatttacattcaccaccaccacaaccgcaaccgcaaccgcaaccgcaaccgcaaccgcaaccgcaaccgcaaccgcaaccgcaaccgcaaccgcaaccgcaaccgcagccgcaaccgcaatcagaacctcaacctcaaccacaaccacaaccacaactgcaaccgcaaccccaatctcaaccaccacaaccacaaccacaactgcaaccgcaaccccaatctcaaccaccacaaccacaatctcaatctcaatcccaaccccaatctcaaccaccacagcctccaacacaaccccaatcgcaacagcaacagcaacaacaactgcaacaactgcaacagctgcaacaacaacaacatcaacaacagcagcaacaacagcaaccccaatcgcaacagcaacaacaacaacagctgcaacaattgcaacagcaacaactgcaacagtag

SEQ ID NO: 5628 - DNA, 624 bp, Saccharomyces pastorianus
atgtccagttttgtttatgtcccctcagaggtgttaaagacaagattacagctgcaaggacggttcaacaattctttttttcaatctggttataattattcaaatttaaggaatgccataaagacagtaatcaaagaggaaggtgtcccctctcttttcttcggttacaaagctactttggctagagacctaccgtttagtgcattacagtttgcgttctacgaaaagttcaggcaactagccttcaagattgaaaacaaagacggtaaagacgaggagttgtctatctccaacgaaatattgactggtgcatgtgcaggcgggctggcagggataataactacgccaatggatgtcgtcaaaaccagagtacaaactcaacaaccgccaagcgcgagcaataaagcatattcggtgtcgcatccacacgtcacgaacggtagacccgtggcactttcgaactctattttattgagcctacggacagtttaccaatctgagggagcactaggcttcttcagcggcgtgggccctagattcgtttggacaagtgttcaaagtagtataatgttgctcctgtaccagatgacgctgcggggattgggcaacacattcaccaattga

SEQ ID NO: 5629 - DNA, 591 bp, Saccharomyces pastorianus
atgaactcatggaacctgagttcttcaataccgatagtacatacacctcatgaccatccaccagcacctgaagggaaagcagataaaccaaatagtaaccaaggagatgacttgccacacgaaaaaacgaccgattcggagggcggattaagccccatatggcattgcgtcatttctggtgggattggtgggataataggagattctgcgatgcattcactagatacagtcaaaactagacaacaaggtgcgccgaatgttaaaaaatacagaaatatgatctctgcatatcgtaccatttggttcgaagagggtgttagaagaggattatacggtggatacatggctgccatgttaggctcgttcccatccgcggcaatcttctttgggacctacgaatataccaagaggaccatgatcgaagattggcatattaacgacactatcacacacttaagtgcgggatttctgggtgattttatttccagttttgtttatgtccagttttgtttatgtcccctcagaggtgttaaagacaagattacagctgcaaggacggttcaacaattctttttttcaatctggttataa

SEQ ID NO: 5630 - DNA, 1116 bp, Saccharomyces pastorianus
atgattgatccagagtattatctaaaaaataagaatgtagaagacataactgttgtttctgattttgaagttttggctacttttagatacgatcctggttttacacgctgtttatcttcaaaaaacaatatatttgagtgccctgctgttgaattgggtttaagagacgatgaaatcaagcaacagattatcaaggaggactattcgtgttatttgcgagtaaacgaggctagttccggtgcagaccttctcaaagatattcaatctcctaatgtctggaagcagtgctgcaaagttattgagtgctatcggaaaccagaaattttacaggttatttatgagagatttttcttgttagaagaacagtaccaaagactaaggttagctttatctttctttagaattgatttgaatatatctctacatgactttttcaagttactaattgaaactctggttgattgtaaagaaggtaccgtagaatacttcgaaaaagtgcaaagtatgatcagtgaaaaacaatgctacaaaatgcgggttcttgtttctaaggtagggagtattcgaatggaggcagtgccattacctatgacgcctatatttgaactgaccaaaagctgtgacaacgcttccaactattttattgaagcaatgctaaacggatttttggatcgtggctcaataaattgggacgtcgttattgcatctgaaccaataaataagtccgttttcaccagttttaaaacaacatcaaggggtcattacactagtgcaagaactcacatgcaaaccgccattaataaggtgaaagggacggaaccatcttcccctgtctctcagtgtgagattttactttctaataaatctggacaattgatggaaggttcgataacgaacgtggcaataattcgtagagactttaacggtaacaagaaatatgtgacaccaaaattgacaagtgggtgtctatgtggtacaatgcgtcattatttattaaggctcggtcttatcgaagaagacgatatagagatagaaaagttggctgttggtgacgaggtgctactcttcaacggtgttatgggatgtataaggggaacaattagaataaaaacttaa

SEQ ID NO: 5631 - DNA, 1554 bp, Saccharomyces pastorianus
atggaatggtctgtattgttaaattttatgaaaagactgttgctatcaacttcgaataataccaagaatgccgttatactaaattaccaaacactattgaaagaaatcttaaatactaacaatgttccacctggtatcttaaaggactgttgcgagatattcaccgagtatgacatcacgtatagcgacctctcaatcagtgcttccaacaaaactgaatacgattgcatatacgaactaatcactgggtttccctccctctacaaattagttttcgaatatgatgcaatgacggatgaatttgtggaaaaagtactgcttctgtttaattctgctataaaatatcctcttttgcctgagttcgtccaagataaaacgaagccctcttctatgcaaaaggccatattgtctggtcttgacatctttgcgaccaaagatttcaaagataccgaaattttgattcttctgcaattaagtacgatatcagtattagcttttgatactagggaaaaaatagcgaacaaacttggaccaaaattgcccaaatcgtcacttaatagactacctacttttgaggcaatcagttatatggcatgcacaaacttaagagctaaagtagcaaagatagttcagtttgatgtatcaacattgaaagcaaagcacgttttaagaatactgaaaaacttgactgaaatcatcaaacggaagtctctcattgcagggtcagctaatgatgaaattcctatatgggttcttgcttccaattgcttcagtgatttatcgagcaaaattttcaaatcactccaaggagatgcggggaatcaacttaaggataacttttgtgatttattcataaatgtaatcaccactacattacaaagaattaacccagaaattgataaccaaactgagatagatgatttgaatgaatactctaaatatcgggagatcttcttaggcaataaaatcattgagcttttcagtgaaaggcagttagacatatttattagtgctgtttggaactgctcgtttttgtacgaatttgatgaattggaaaatgctctaatgagaggttgtgatacactagccgagttttcatccaagttatctgcgtttgatttttcaaacttatttggatctaccactaatcctccatttctgaccaagtacaaatgttctttagaatgtttacaagatttggtaaagtttatgctaaactcaaacgaaaaattgagaaagttaacggcaccttacctctctgctaggatagccctagttctcaggagatatatatcagatgaatacttgattgggcgtgcacccataccaaaactgcgcaagattgaactcactactttgttaaatggattgtgcgagatattcagggttattttaagtaaagattcggccctagcgaacaaacaaattggggttgaaaatttagaaaggttaggcccattgattttaagaacaattccggtgtctcacaagatggatggattacaagataaagttttggaactctcgcttgatttcaccaaactagtaatctag

SEQ ID NO: 5632 - DNA, 2331 bp, Saccharomyces pastorianus
atgactatgaacactgggggatttacctccatgcaaaagcaactcgaagcagaattgcgttcactatcgtccgaatcaaaaagaaggaattcggccattcgccatgctagtgataaatccgtcgagatcctaaagagggtacataatttcgatgagttagaaaggcatccggattttgtgctgcctttcatactggcgtgccagtcgagaaatgccaagatgacgacactggctatgcaatgcttgcaaggactgtcaaccgtcccatccattcccaggagccggctgtctgaaatcctggatgcttttatagaggccacccatcttgccatggaaattcaactaaaagtcttacaagtggtgccaatttttttcaagacgtacggaaagtttatctatggtccgctttgtaagaaattgctgctgtgctgctcaaatctgctacacgtacccaataaagcacccgtagtggtaggtactgcaagtgcaactttacaacaactcattgatgaaatatttgatagactttccattgaatctgttgttgacgataagcagttcgaagtcctgataagtaacaatgaaacaaccaaagttaacgtttatagatacgatgctaacaaactgtttaataatatttgttccctgaacgaggtaagtataagcggacccagtaatgatggggatatcttattggatatcggagacatcccaatagactacggattagaaatccttgagtccatattaaagaatagtcagaagaatcttttagaatgcggagatttacagtatctactaagggtgaaggccattcccttgctgctacgttgcatatcatcttccaaacatttttccaccgctgtgaggagttgccgttgcttgaagttattgataagaaaggaatacctaagtacactcgaattagaattagaagtcattttgtcgttactgattcatggtatctccgtcgaatcgaacttatctgcttggcagagagtcctatcattggaactttttaaagatttgtctcaagatactgagattgttaatactctctatatggactatgacaattactcagataagaagcacgttttcaaataccttttaaaagagtgcattggcctactgaactctccagagtatattactttcttaggttcatcatcaatcgttcaaaagatggattctcccctgataaccactgagaattcaatggtcaaaacaagatttatgcatcttttggacaagtctaacgctccgtccatcaacattacctacattatatcgctaattctcggaatctgtaacaatttgtgtgaaggcttgagcaattctgctctggacagctctcctcttgagaagaaaatgggggacaaacaacacaacggagaattagaaaatgactcgaccatagtaaaggtttatagcggcctattttctggactctatgagatcaacaagttatttctatattcgacttctttagagacatctattttccattcggtggtaagagctttccaaaaattagctcatagtgccggtgttttgtcactcgaggaaaaacttagaaagtgtatgaagttgttttcgattttaatagtaaataatgtaatatcgtcaaatcgggtcccttctaatgatatgagcaggctagtaaaaagtcaacaggtaagagaaatatccgggtcaagggtcttgaataatcctggtgaaacaatttcttctccaacgacaaaagatttaacgaaagaaattggagattcttccaaagacaaggaaacgaaaaggcaattgcaccctagaaacatcagtccaaggcaagttagtttactcagagctttggtatcgttatcggtatcattaggtcccgtttttgattcagaaagctggaaatacactttcttaacctggcaatggatatcgtactacatatatggcccatctgctgattttaaagaaagcttttactctgaagatattccaccacctccagtactaagtaaatcggatgtcacatcaattgaaagttctctaacaaaatttttcgaaagtacaagcaattattcttgttcaacatttcagttggtattaacgagattaattttggattcaaaaaataccctaactttagaacaaactaaccttaacttggacaacgatattggttatcatccattagatgctgggaatgaaattatgccatgcatttataacaaggctttttttgtcaacaaaatcggtgaactagcgacttacaactgtaagaaattccttgcaggaaaaaacggaaaggagctttggaattactttctaactatatga

SEQ ID NO: 5633 - DNA, 789 bp, Saccharomyces pastorianus
atgatcaaactaatatcaaatcgtgagatggataatgattcattacgcttgtacagcgtgagagtattcacagaaattattaaaaaggctactaacgaggttggcaactctgatgatcaagaggataaggtccagcaattcggtaccttagaaaacctaattatcgatagtttgatggaaacaataaactcgatcaaacaattggatgtaggtaggcaagaaatatataacggaacaatcaatgtggaatctgatattcttttccaactgctattgactttgaaagaaattttaaacgagttcggtgagttgctgatgaactcatggacaaatattttcaacattatcaattcacccttcgagtggacagtcgaagacacaaacctatccatgaatgaggacatagacgattcatctttgtttgaaggtatcgttcagaaacacaagaacatgatacaggtatcttacgatgttttcaaactaatttctgacgattttttacaaagtttgccaatgaacgttatcaagtgtgttattgacacacttgtcaattttgtaactcagaagaggaatctaaatatttctttctcttccattagtcaattctggctagttggagactatcttagagtccgtttcagtcccgatacgttagatttagatgacgaaaaacgtaaaaaattttctgaaaagatcactaatcaaaaactaattgaaatcattacgtctgatacgtcgcataattgggagctttatgacggactatggatataccttctgaagaattag

SEQ ID NO: 5634 - DNA, 1770 bp, Saccharomyces pastorianus
atggggaattatcttatcgaaaaaggtatggaggaaaccgtcaaggctacgctggagacgctatcgctcatagtttacgccagcgagggattactcaattttgtcattgacttgtatctaggcacgtatgcctgtttgatagttagcgcggtggatgggaccgtagatgtcgccactaataccaccgagaagttgatcggtttggtcaatgagacgatttccagcgtcgccaatgaactggataatgggttggatgacatctccaagataatcaataaagtcatcagcgctgcatccaaagtagaggattttttcaccggagatgatgatgacgacagcaacatgacctcatcaattaaaagcgtcaatttgaccatatccgccctgcacaatttatatattccttcgtcaatcaacaacaaactagaggagctgtcagcaaagacgccagactttgctcaagttaaaaacaccacgaagaacttaatctctgttccattcaatgaagtgcgcaagaacattaaagccgtgaacgccagtaaactaatcggcgatacttcggttttgtacgtaccgcccgtttctgtttccaatggcactgggatatgttcctcgaataaaccagagattatagctttttacactgtcctaggacacgcactgaaaataactaccatagtatgcatcaccatattgatatgctttgctattggggctatgataccagtcgcatggaacgaaatcaaactctggaaacggctttgcaacatgagaagccattacatgctgagtaggcaagattcgtacacatcgttttccagcgagaatactcacgagttgaagaatccatttgccgaccccccttcacctcccaacgacgaatatgatgtcattgcaagctaccagcaatgctttcacacctggaatacaagaatcgcgtgctggatgtcgaagcttgtgaccttaggaagatcaccagagaacatcaaacctgagactagaaagaagattgaatgggtggtggcctatatgacatccgaaagagcactgtgcatcctaggaattggcttattggggatcctggtgtgcgggtgccaatttgccatgatatctgtgttgcaacataagataagccattcactagcatccagtgacgatagcagtatccagaatttacttaagtccagcagtgcagttgatatagaaaaccaaatgagcctttggagcgttcacactaacgactacctcaataccaccgagaccaatatcaaccaggaggtctttggatggatagacaccacgacactttcgataaacaatacggtggccaccatgatctccgacatagacaccactctagcagatgtgtttaatgggacactactatataacccgatgaaaacagtggtgggatgcgtcattgagaataagctatacactatagagaaggcaatgacatggattcacgacaaggctcaattgcaaatcccaagagtcaatggaactcaaatcaagcaggccttgacaaaagaggcaagcaacgctaccatggccgctgtcagctcgccttccacaaacacagcaagcttactggagaaccttgcagacgatatgagagaaggccttttgaaagttcttcgtgcttactaccgcataaccatgagagaactcacagtcgccttgattatcctgggtgtgtggcttctgcagctgcccatagctctggtcatcctgggactacgcctccacaaggctcatctttgtttctag

SEQ ID NO: 5635 - DNA, 1635 bp, Saccharomyces pastorianus
atgagcgaatgccaacaggttggtatcggtattgatataggctcatcgagtgctagagttggcatatataattatcacgataatgttttgttagaaatggcacaagaaccagtaccatactaccacgattcttcaaggaaatcatggaagttttggcaaaaatcaactgaaataattaaagcacttcaaaactgctttcaagagttaaaaattaaccaatataaagttagatcgtgtggtgtttccgcaacatgttcgttagctatctttcaaaaagatcttacaaacgatacattgataccttatcccaatgaagataatgtaatattttggatggattcttccgcagtggatgaatgtcaatggttaaatgcagagtgttcccaacagcttttggattatttgggtgggaagttcatacccgaaatgggaattcccaaactgaagtatttcttgaacgaacactcccataagcaagacaagcaatttcatgtccttgatctgcatcaatatattgcatatgaattgggtcgcttataccattggagcactgataaagtttccgtacgagaaaacaataatggaataggcaatgatggagaggcatctggttggtcatcgtccttttacaacgacattataaaattgccttcaaatgtaacaattggtctcgcaggccttaattccaacaactcgtcctcgacaactacggttcgtagttgtatcgacagttatgcgagttggtttgcagtttcttccccaaatttggaggcttcattgtttatgatagccggtacttccacatgttacatgtatggctctcccatcactactaaaaaaattcctggagtatggggaccctttgatactatacttgaaagcaatggtaactattctgtctatactgctggtcaatcatgtactggtaaattgatagagcatttgttcaaaagtcatccggctgccagagaaatactaaagagtggcgaggatatttatcaagtattggaaaaatccattcaggacattgaaaagaaaaactgcaaatcaattcatatcctagcgaaacatatgttcttttatggtgactatgagggaaataggacgccctttgcagatccacagatgagaggttcattcatcggcgaatccaccgatacttcaattttaaatcttacatacaaatatgtttctatgctagagttcttgtcatttcagacaaaattaattattgatacttttcagtgtcaaaactcagatgtaagaattcaagaattaagagtatctggtagccaagcaaagaacaaaagattgctgtctttgatttcactggttaatgacggaataaaaattaagaggccaaatgagaatattgatctgatgggtgtaacgggtgcttatatattaggaaaatctgctaacgaaaagaagcagattatcgacattataaaggagagggatatcaatgacgacagcgaggagttcgtaccttttagtgcatacctagttggaaatgatagtacaatggtaaaaagattactttgtactaaatataatatacacttggatatggcaaaacaacagcaacaataccacaagcttgtcgacgaagctctgagcgttacaatcaactaa

SEQ ID NO: 5636 - DNA, 1278 bp, Saccharomyces pastorianus
atggcggaaggtcattttagatggaagccaactaacttgattaagaaagtgttgtgtttacctatgagaaaaaccagaaatgacataggtttgaagctggatgtttcatatatcttatccaacctaatggtgtgctcatacccggtaagcacatatccaaaactactctataggaacagtttagatgacttaatattgttcttgacagtatatcatggaaaaggaaattttaggatatttaattttagggccgagaaagaggatggcgactacaaagataaggacttggtggaaattgctgccaaatatgaagtcagagatttggaaatccaagaaatacgttcaacactcgtgaatgatggaaagataccaatatcacccattgatctagaaactaggactttagtggaagaagaagcaaataacgtgatttgtgaaagaatcggttggttggatcattttcctcctccgtttgaactgctagaagatatcatagataggatagaaaactatttgtctgcttcgaagataaaagtagcagttttacattgtcgaatgggaaagggccgatctggtatggttaccattgcatatcttatgaaatacttacaatgccctcttggagaagcgagattaatattcatgcagagtaggtttaaatacggcatgacgaacggtgtcaccatcccttctcaactaaagtatttgagataccatgaatttttcatcactcacgagaaagctgttcaagagaatatttcgaatgaagcagtaaaattcaaattcaagtacagacttgctaaaatttcatttatccaaccatcaagcttggtctcgtccaaatctgctatagtaactacaaatatccagcattacagtgatgacaggaatattttgataacccgaaaaacattgtattcagacatgatggcacacgaaaatggcgatagcatggctttcacctttgataacgaccacttgaccctcgaaaatgatcttcgtattgaattcactttgggcacaaagaagtccaaggcagcgaatggtatcatgtcttgggcatcgtacgcaagttgttggttaaacatttacctagaaactttaatgcaaataatcaaggatgactctccgtcagattacttcctggtagacaaattaaagaagaatggtaagttctttacgatcatcaactggcaagacttagatggttttggtgaacttagcactcacggcttaaagttatttcaagcattgagactagaatgggaaaccacatag

SEQ ID NO: 5637 - DNA, 1215 bp, Saccharomyces pastorianus
atgcaagcagtttctgcatctgtacaggtttttgtttcattcattattggaaatattgctgagtgggttggatccattaaattcgttatagtgatactttatttcttatcatttgtgggtaattttctttattcatgtgggggcgctgtatcattaaacaccttgcttggtgggcgcattatttgcggcgcagcgtctgcttcaggcgcaatagtcttcagttacattacatccattactccagatagggctgttgtgttcaaacttctatcaatgtacagaacagcagccggaatttgtatggcgctggctcaattagttgccattttttttggatattgtgacttcaaaattaaaggataccgcattacttctttcaacgcaccaacgtttgcctccagctttattattcttgcgatatgcttactcctaatagtggttttagaaaatcctgaagtaaaatttacgaaactacagaatcagagttttcttagtgctctgaaacagttttttagtgttggaagaaaaagacttattgcctgtttaatcttattatggagcatgttcttatcatcatttataataagtgaagtggtttactttatgccactatttttaacacttaaaatacactgggataccaaatttcaaggcatagcatttatggtcgcgtctatattaggtgtggcgggaagttattttgctccaaaattgatcaatattcaaactatcttcagaaaagccgaagaagacgatttgaacgagtcagagacgattgaatgtgaaaaattaggggtagaaaagaaagattatctctaccgtaatcaagtttttttgtcaatctctgcattacttatttcactggtgggacaagctttcatggttggagcatcggaagctttgaaatataaattaatgccgcccacgaactctggtatattttttgtagcagggatgtcgattactttgttgggatatatctttttgacgtccagcattccagcaattttttccacctacattgatccagagctgaaggttctgttgatgcctttaattggagccatatctggggttggtaagttagtagcacccattgtgttagctgctctttataaaacaaaactaggacttccaatcgcggttggatttggtatgatgttggtagctatttcgataccactactattttggctaagaaagaaaaggtattaa

SEQ ID NO: 5638 - DNA, 1854 bp, Saccharomyces pastorianus
atgattggaccagatagactcaagaaaaaggccgttagtctggcttgtactgtttgtaagaaacgaaaattgaaatgtgatgggaatactccatgtggtaggtgcaataagctaaagacgcccgaaaaatgtagctattgtactgatagaagaaaagataagagaaagatccaaaacggctcgagggttttcgtgtttaagaatcaaaatatcagtaacgagaacaaatttttggaaagaaacgaagaacgtagtgaagatcttctttccgataagactagaatagaaacagcagaattggagccagatataccagaatttgaaacaactgggatttcggctgctgatacaggtatatgggacaattctcttccagcagattttaactttaatgatttcagtactgaaggtgcaggtattgatgactttttgaaactactgggagatagtttctttccaatgaggcaagaaggcacatcatactctccatgtgccacagactccaacattcttactagtggtgtaactggagtgactgagagtgaaaactatactatcaatcgatctcatttgatcaatatcctttttgaggacgagtctcacgctccaccaggaatatcgaaaaaacatcttcttgatttggaactccgatacggagatttagaatctatagaaggaagcagtgatgaaaagtttctgcttgcaacctcattgtgccttgggtcgttaactatccgaaagagggagttactaaatcaatcgagctccgatgattatcctcttttatcagagaatggtatcccaacattgacggcagatgcttataactattatacttttgcaaaggcgttaatccccgatctgctgccttctcccacaatcgatggattttgtggtcttgtcctaatggctaattttatgactatgatgatatctttagaaggtcaactatatttgagtataaatgctttgcagatcgcggttgctttgaacttaaccaatggagaaaaatgcaaagaattacttgaattaaatgccgacggagttggtttgattttactattctggaatatttggtgttcgtcttgcatgttaacaagtttccacggaagaagaccttttattactctagaagatatcacgacgcctttaccttgtgaactgaaactcgacaataaaagatccgaactttcaatacaattcatgcaattaagaattcagttagctgcaatacaaggcaggattttcaagcaactgtacatttcgggtccgacaaataaggaccagtttgtaaggttgcaaaatgagcttgaagaagtttcaattcaaattaataggttgaaaagctgtcccgtattcgaagaacgtcttttctatagaagtcgggtgttaatgttagagctatcgagttttaaagctcagacgtcttttctattatatcacccgtacctaatttgtgcaaagtccttagaagcagtgaatgctgcaaaatcaataattcatgaaatctggagtcattacacaaaacagtttcccaaaaatgaaaaagaaatcatagaacatttggattggaatttctgttatcctttcaggactgcatcactgacgttatgcgtttcatgtgttatacttctaagatatacgcaagctataaaatttctggaagatagtgatttgttcgaatatgttttagcaatagagatattacaagatttaatccaattactcccgattgaacaaaagcttactgatttaattaaagcttcaagtgaaccaaaaggtactacaataggctcgaacagtgatagtttcgttgagttttggggatgtatgcttgattggaactcatcttaa

SEQ ID NO: 5639 - DNA, 1425 bp, Saccharomyces pastorianus
atgacgatgatgaaaagacctctagaggaagactcggaccataatgaaaccaagaaactgaaaccgagagcggcatacccttccatccttgggaaagataaagcaacgggcaagttcatattccccgcgatcagcaaagacgacgtaatgaacgcaagactgtttctgaaaaataatgatttgaaaacgtttttggagtttttcctgccagcggaagtcaactcgatctacatttatttcatgatcaagttgttagggttcgatgtcaaagacaaagaacttttcatggcgttgaattccaacatcacctccaccaaagagcgcaagatcaatgggatagcgacattaccacacgcggatattgacaataaagacgggttgacagacccccttgagaaaaaacatgccgtgaaattaatcaaagacttacaaaaagccataaataaagtccttagcaccaggcttcgattacccaatttcaccacgatcgataacctcaccgccactttgcataatgcaaagaaaatcctggttttaaccggtgctggggtttcgacctccttggggattccagatttcaggtcttctgaaggtttttactccaagatcagacatctcgggctggaagatccgcaagacgttttcaacctggatatatttttacaagacccctcagttttctacaatattgcccacatggttttgcccccggaaaacatgtactccccgttacacagttttattaaaatgttgcaagataaaggcaagctactaagaaactacacacagaatattgataacttggaatcgtacgcaggcattgatcctgataaattggtgcaatgccatggttcatttgccaccgcatcttgcgtgacctgccattggcaaatcccaggtgaaaggatatttagcaatattagaaatctagaattaccactgtgtccgtactgctaccagaagagaaaacagtatttccctcttacaaacggcaataacacgatgccaaataccaattccagttcacccattttgaagtcttatggtgttttgaaaccagacatgacattctttggtgaagccctgccatccagatttcacaagaccattcgtgaagatatactggaatgtgatttattgatttgcataggtaccagtttgaaagtggctccagtctctgaaatcgtaaatatggtaccttcacacgtacctcaaattttaattaatagagatatggtcacccatgcggaatttgatttgaacctgttagggttctgcgatgatgtagccagtctagtagccaagaaatgccattgggacataccacacaaaaaatggcaagatttaaggaaaatcgattacaactgtatggaactagataaaggtacatatgagatcgaaaaacaaccacgaaaaaaaaaatga

SEQ ID NO: 5640 - DNA, 2160 bp, Saccharomyces pastorianus
atgaaggtcatccagcaacagcaaaatgccaccaagaacgacgctatcccaccatctgctacgcccaatgccgctgccttccctcaacagcaacaacagaatgcaaactccaaattatatcaaatgcaacagcaacaacaagcccaggcgcaagctcaggctcaagcgcaagctcaagcgcaggctcaggctcaggtgcaagctcaggctcaggcgcaagctcaggctcaagcgcaagctcaagcgcaggctcaggctcaggctcaagcacaagctcaggcacaggctcaggcgcaagctcaagctcaagcacaggcccaggcgcagcaacagccccctcaacagccacaaactcaagcacaacctaacccactacacgggctgacaccaactgcaaaggatgtcgaagtcattaagcaattgtcgttagatgcttccaagactaatctaagactgacggatgtaacaaattctttatccaatgatgaaaaggaaaaaataaaaatgaagttaaagcaaggtcaaaaactatttgtgcaagtgagtaattttgcaccacaagtttacatcattactaagaacgaaaacttcttgaaagaagtcttccagttaagaattttcgtcaaagaaatcctggaaaaatgtgctgaaggtatttttgttgttaaattagacaccgttgacagactgatcatcaagtaccaaaagtactgggagagcatgagaatccaaattttaaggagacaagctatcttaaggcaacaacaacaaatgtccagtaccaacaacaacaataacaacaacaccgctaatgctcctgttaccggcaataacaataatgcgaacaatattgctactcagcaaaatatgcaacaatcgttacaacaaatgcaacatttgcaacaattgaaaatgcagcaacaacaacagcaacaacaacaacaacaacaacaacagcagcagcagcagcagcaacaacaacaacaacaacaacatatatacccttcctcagcaaacggtccatctaattacccaggaatggctaatgcccccaataataatagcaacatcccttacatgaaccataaaaacacctccagcatggatttcttgaactcaatggaaaatactccaaagattcccgcgtctgctgcagcgactccatcactcaacaaagcactcagcaacaaggccaacaacagaaccaagtccaacacgatacctgctactagcatttcatcaacgaataagaagctttcgatatcaaatgccactagccaacaaccgactcctagatctgcttcaaatactgctaaatccactccaaacacgaatccttccccattgaaaagtcaagctagaattggtacgccaaattccaataatattaagaatgcacaatctcccatgggtgtacaaccatcctacaacactagcaccatagaaaatgcattcaaaaaggaagaacttttgttaaaagatttagaaatgaggaaatcggaaatttcttctcgtttcaagcaccgccaagaaattttcaaggattctcctgttgatttgttcataagtacaatgggtgactgtctagggattaaagatgaagagatgcttctttcttgtgatattcccaagtcggtcgttgatcacaccaatggttctggtaaaaggaaacctacaaaggcagcacaaagagctcgggatcaagattctgttgacgtttccattaaggacaataagctaattatgaaaagcaaatttaacaagaataacagatcatactcgatcgggctgtctgacgttgctgtaattttcaagggtatcggcggcaactttaaagatctgtctactttggtctattcatcatcgccatccacttcttccaatgtggattttactaattttaagaagaggaaggcaagtgtattagaaataagtcctcaagattcaatagcgtcggtgctatcgccagattcaaatataatgagtgattccaaaaaaatcaaaatcgattctcctgatgaccaatttatgaccaaatccagcgccacagttaatggaaaacaagaagttgcaaagaacgaggctccattcatgacttctgctgctgattcggagcaattcaacgtatgggattggaataactggacaagcgccttttga

SEQ ID NO: 5641 - DNA, 1167 bp, Saccharomyces pastorianus
atgtcttctgctcccatccacgacaaggacaccttgtccaataccgagcgtgcaaagaatgtcaatggtctgctccaagtgctcatggacatcaacactctgaatggaggtagttccgataccgctgataagataaggattcatgcgaaaaattttgaagcggccttgttcgccaagagctcttcaaagaaggagtatatggacagcatgaacgagaaagtcgccgtcatgcgcaacacatacaactccagaaaaaatgctgtcagtgctgccgctgctaacaacaacatcagccccgtggaacacataaacaccatcaagaactccggcggtaacgccaacaatatgaacgtcaacatgaacctaaaccctcagatgtttttgaatcagcaggctcaggcaagacagcaggttgcgcaacaattaagaaaccaacagcagcagcagcaacaacaacagcagcagcagcagcaacaacaacaacaacaacaacaacagcaacaacaacaacaacaacaacaacaacaacaacaacaacaacagcaacagaggcgtcaattgactccgcaacaacagcagttggtgaaccagatgaaagtggctcccattcctaaacaactgttacagagaatccccaatattccaccaaatatcaacacttggcagcaagtcactgcgctggcccaacaaaagctattgactcctcaagatatggaggctgcgaaggaggtctacaagattcatcagcaattattgttcaaggcaagattgcagcaacagcaggcccaagcccaggcccaagcgaatagtaacaacatcagcagcggaaacgccaacggcatcccgcaaaatggcaatattaacaacaatatgaacattccacaacagcaacaacagcagatgcaggctcctaacacaaacgcaaacacaagccccttacaacaacaacagcagcagcagcaaccacagaacaccgtaccaaatgttctaaatcagattaatcaaattttttctccagaagaacaacgtagcttattgcaggaagccattgaaacttgcaagaattttgaaaaaacccaattaggcaatacaatgacagagcctgtaaagcaaagcttcatcagaaaatacatcaaccaaaaggctttgaggaaaatccaagcttaa

SEQ ID NO: 5642 - DNA, 1992 bp, Saccharomyces pastorianus
atgagcctacccatcagcaagctgattgagcagtatcgctccacgcaggataatgacctcaagtacatgctcttgaggcagaacatcgaaatcaccgatatagaggatgaaatggttcctctggttagggacttgttgctcccgatattggtggaggagcaagacatggagattctgaatttagtagcatttcacgtcttcccctgtttggtcctttctttaataaagagtaaggctaacgcagccgctacacagctgggatgggtaacgagcttggtatgtgaccccatattgaacgagagtatggttcatgaaaatcgatcgttcattttgattgagacgctaagaaatattttgcaaaaaatcgaaagcgcttctcatctcaattaccgtcatccagtgaccaattcatttgagtttattactaaattcatcgtcgaaatgaaaaggcatatgcgtgagattgatgaggcccagctctcgcactccctttctgaaggcaacatgctaatttacatagagtcgctaaatctattgttgaagttctacttcttttcagatacgacacatccttcgctaacgatctcgttgccatttgatattttgaatgacatttttactattgcgcaggattattcgactacaaacacaaacgagagtattgacaggataactgagaaactactgttaacgtccacccaattgacgcatccattggacctagaaaggctttgctccaagattgactttaaaaccctattagttatttcacgaatatggtacaaattcggccccatgattaatgcgctatttaccgagcgtctattaccaggcctgttatctcccacgtatgcggaagaaggatacagcgtcgaaggcattttggaaatgatccataatttctacccgttctactctattcgtaggctaaaggataataaatgtctattatctgattctacagtcgcccttctaagaagaagtttgtttgacatactaaacacgttaaatcgatcatttacagtagcgcacaatgagaaagttgatgattaccaccgagtggacgataacgatgacggatttatctctgacaatgatcctgagcagcaagcataccttgatgaattagtatcggacaatgatgatggagatctgtatgagcaagaaactgatgatgatcgagctgatgatgaaaacttcgaaaaaagtgaggagacaacgaaggatctcacccaaataaacgaaatcctttccatttttgctgaattgcactatcctcaggaggagcgtttccccaaattgttggctgagttacagagcaaaattagcatagattcatctttgattggcaaaattctttctcaagatgcatgcgaatcgctcactcctggcgggaatgagattgatctggacgaaattttaaatgaactgaaatccaataagttcgccagaaaaaacgatactctttatacactaacccgttgcctttcatcaaaactttcttcagatttgtctgtattgcaattatcaatagaagtcgttgatcagttattggttaaaaatcattccgataatatcactagaggtgagcaattccagctgatcaaattagtactgcctcacctgaagactaacaaatcctttattgatacattgaaagcaggaaactttacccaaaagattgatgaaggcgtgactttgagaacgatgatcctgtctttactactgcaactactcccactggactattccatgttaggcgaggtcctgcccactattgcaaaatattctgtcaaggacaaggatttgacggtaagggatttatctttacaactactgaatcaaatcctaagcacacattataaccacttaatcggtattgattgggactggtacagcaatgatttttatcaggttttgcaagaaacttgtattaaaaaggatgtcgataccgaactcttacatcaataccccccttattctcacatttaa

SEQ ID NO: 5643 - DNA, 1377 bp, Saccharomyces pastorianus
atgtcctctctttcaccatcgccgcccgccagtcgatctggctcgatgggttccggcgagtcttcgtcttcatctttgccttcgccttcgttacagacggagaggctaacgcacatcacgagcctggacggccaagacgagcttcttggccgcatcagcaagcagctgggtaggtcgcggaagatcgcgtgtctgactggggctggtatctcgtgcaacgcagggattcccgatttccggtcctccgacgggctgtacaaccttgtgaaagaggaatcctcgcagtattggtcgatcaagtccggcagagagatgtttgacatttcgctgtttcgagacgactttaagatctcgattttcgccaagttcatggaaagactgtactcgagtgtgcagttggcgcggccgaccaagacgcaccggttcatagcgcacctgaagaacaggaacaagctgctgcgctgctacacgcagaacattgacggcctcgaggaggacatgggactcaccatgtccagcaagaagccgtctttgccctcgttcagctcgcactggaaaaacctggatgtcgtccagttgcacggcgacttgaacaccctgtcgtgcaccaagtgcttccagactttcccctgggataggtactggtcccgctgcctaagaagaggcgagctgcccctgtgtccgcattgcgaggcgctcatcaacaagaggctgaatgaagggaagcggactctggggtccaacgtggggtttctgagaccgaacatcgtcttgtatggcgagaaccacccgtcgggtgagctgatcacgcagggcctgaacctcgacatcctaaggggcaatccggacctcttgatcattatgggcacgagcttaaaagtcgatggcgtgaaacaactggttaagaaactaagcaggacaatccacgaccgtggcgggctgatcatcctcgtaaacaagagccccatcggcgactcgccttggcacggcatcatcgactaccagattcattcggactgcgaccggtgggtctcgttcctcgagtcccagatcccggacttcttcaagacgcaagaccaagtcgataggctaaggcagttgaagagagaggccagcgacctgagaaagatgatgaaggctcaaaaggacccgatcaacacgccccccactacccctcttagaaccgcactgcagcccgctgcacacgcccacaacgagttgaacatgcgaataaagtcactgaacaaaataaagaggaaactactgtctccggagaactccagtgaagaagacgaggaggaaaccgcggattccaagaaacgcgccaaaatacgaccaacaccagcggcggacgttaaatgttcattgacccagtag

SEQ ID NO: 5644 - DNA, 906 bp, Saccharomyces pastorianus
atgtttatacaaagaaaaatgaacaaccatcctttgaatttccaaccaatattattttctcatccgatgactagagatagcacaacgcaaaaaaatatgacgggtaaagatttcaccccaactcatgcagaattcgtcaaagaagagaacaagcctgatttgcattctattccggtgggctcgccgaacgttattctaccacaaattcagctcccaaagattgcaacactcgaagagccagcatttgaaagcagaacaggctcgataacggatcagtctgccaggagaaattcggtcaacgtagggaccttgtgtgacgatgctccgaacttttctggctcacatgtcccaaggccggtggccgtccaaaatctaattcctccatctttaccaagattgaacgcgtatcaatttaggccccaactcatagatggtaattcaaacttccaattcaaccctaaccactatactcccgcatctgtcccacctcatacatcatacgaaccctcctacactacagcatctacgttcgccaacttacctgcggcttcttattttccttcaaacagcacaccaacaacaagaaaaaatagcactactatgaactctcttactgaagaagcacgtcgtgtctctgtttctctttctgaaccggtatacaacgaaggtgaaaaatataatcttgatggtcaattaattggtaagacaggtaagccgctaagaaatacaaagagagccgcgcaaaacagaagtgcccaaaaggcattcagacatcggcgtgaaaaatacatcaagaatcttgaagaaaaatctaaaatatttgacggcctggtgaaagaaaatgacgaactgaaaaaaattattgatttactaaaagcaaaattaaatgaagaaaaacaaggatga

SEQ ID NO: 5645 - DNA, 2505 bp, Saccharomyces pastorianus
atgaaaaggataagtgatgccttattagaaaattttcaggtcgctgacgcaacgccgctaagtgataacggaaatgctaatggcacggctggtggcgacggcggcggcgatggaagtaacgctgcaagaccaacatcgtctaatggcaataagaagagaaataaactcataaagtcgtgcggattttgtaggagaaggaaacttcgttgcgaccaacagaagccaatgtgttctacatgcatttctagaaacttagtggattgtcaatacgctgaagagttcaacaagagcgttgaaaaaaaagccatctatggaactttttctaacgttgaattacttaagaaaatcgacgatttggaaaataagattcgtacgctagaaaacaacagaaataccaattcgcctacgaacttcgtgtgtagctcttcgaatttttcgcttttgaactctacgacttgtggaggatctactgaatctccggaccctttaccaaacggtgtcataaatccatacgctgatcgctactacgtacaatgtaaacattcaggtaggtcgataatatatggcccaacctctatgaggacacagatttccagtactaattgggggtttattgcaaaatataaacaattatggaccaaagttaaagtggagaggaacatatggaagaaaaacaatcaaaagacaatgtgtagagaattgtgccttttaaaggagtcaagctgggaacctggcccactgcttgaacaaatatacaagtttttaccaacgtatgagaaaatcttttcaatcatagaccacgtctttgatgatgaagtgatcaacgagtttaatattatcctagacaagactaaaattaccaaagattatatagattactttatgccaggtaaagaagccttaccaaatggcgagagacccatcgtttacatcttgtccaactcaaagaacaattactataaagctgcagtgatactaatgatcctttgtctaaggtatttctatgggaacatcccagcacctctagaaaagcttctgattttcctgaacggtacctccacggagaaagtattctatatcgaacgtgcccaaatgttgatactgctattttaccaccgtgaacttcactcatttggcggggatggttctcatctgctcaatataaacgagttgttatttgctacagtcaccacattaggattgcatctagacattaggaaaattttcaagggcgaagaacaatccatgggtagcctggaaagtttggagaatatctggttcatggcaatactgatcgactacaccatgtcttcccacattggtaagcctttgatgatcaacaagttttatctagacgaaacgcaggagtactgtgttttgaacgatcagagtaaaacttatgaggggaagctgaaaagatacttgaaaatggcaagatccatgttatttgctctttacgatagagaaaagttccccgatttgaaacttttttccaagcaacttattagttttgtagaagaagaactcggaccactgggacattacacggacgaaaaccttgccgtggaggtccccttaaaggaaactagaattatatgcatggcactgggcctaatattatcattctatgcgttggtgcactctgtgttgaaagtcaggacctttgaatccaaaaacaatacgtttcaattggttctgataaatttttccatcattgtgaacaccacgatccgatgcttcctcattgataaagaacggtatccggagtgcttcaagccttcgtacccgcatttgccaccaaccatggcgatgtcgatgggccttagagcggggcttttttcaaaaactttagtgttcttttgttccttgatatttttcaagctgacgctttttgaaaatgggatatgcctgtccaacgatatggaatgcgggtggtcggatttgaccagcataaccgttcccttagacaaagacttgtcgatgggcacggcgatgaaactatacaccgagatttccggccgtttatttaatgcgggggataaacttctggtacgcactatgcacaattcaccgcagtttataatagaattggccatcgaaaggacttcaagaaccattcttggaaatgttctggagttcagaaaaatgaccgaggaaacgtggctgtcacaaatcagacaggaactagatccgctgccgacagaactaagaagcgagcaagaacagcatcaccaacaccacgcgcctttgaacagagaggcgtctcttccacaggagccgggctctccggctccgccatccgctccttcgacggatccgaccactgtaccttcacagggtgatgataagaatcctacaaagagtcaatcagagatcattcagatgttgaccgacgagttctggaccaactataacctgggctgggaagaactgataaaccaatccgagttttccactatgttcaatgacatcgaaggcagcactgctgaaccaaagggatggtaa

SEQ ID NO: 5646 - DNA, 450 bp, Saccharomyces pastorianus
atgggtttgtattcgcaagtcctcgatagctccaggggaatgcttctcaataataattcaaatggcttcttcacggacggagtctccagaggggatgtactgtgcggtgagcaccattctttcgacaagggacttttcaagacaaccatacgagccctcagctacagcatcaagctggggctgagaggcacccctgagcccaaagaaacggtctccatttttcaaagcgaagacagcccatgcgaatacgagtactatgcggtttgcatggcgttttcttggttcatattcggtctctttatagcttgcttactgctttctattacattgctactgactgcacgatatcatggcggcaataatagcagcagcggaatagaatcagaagcacctctagccaatatcaacgacgaggaaaagcagcagcagttctccgatatagccttataa

SEQ ID NO: 5647 - DNA, 1638 bp, Saccharomyces pastorianus
atgcctaaagtggatttgaacttgaagctaaacttgcatacaaattcaactctgaacttgaggataaatatacccccacctaatgattcaaacaaaatattcctacaatctttgaagaaagatttgatccattattcgccaaattccttacagaagtttttccagtttagtattccttccgatttagtttctaacgattctactctacccaactggcttagatactactcgacaaaagaaaatgaaaaggcaattctgaagaaaatttttgacagttttgaaacccttgagaactttgaaatgcgaagattagaaaagtgtttgaagttcaagaaaatgcctcctctgcaacaaaagcaacaaccgcaacagcagaaaataccaaacaaattagacaattcaaaattgtattctttaaccagtttgcaaaggcaatacaaaagcgttgagaaaaggaatgtgcaaaacaataggaacttgaaagtagttataccaaagctcaacacttcatcttcaccatcaccatcaccatcaccactatcatctgacgacactataatgacaccaataaacgattatgaacttaccgagggcattcaatcattcaccaaaaacaggtattccaatatcttaccttacgaacattcaagggtcaagttacctcactctcccaaaccgtctacagaaactgacgtacctacaaccaacttagtatcttattcgccgaaaacggatgattcttacccaatgtgccccatagggtcaaaaaaccatccctgcaaacttaacgactatatcaacgcaaactatttaaaactatcacaaataaatcctgatttcaagtacattgctacccaagcgccactaccctctacaatggatgacttctggaaagtcataacgttgaacaacgtcaggataataatatcactgaactcagatgatgaattgaacttaagaaaatgggacgtttactggaataattcatcatgttctaactacaaaattaaacttcaaaacacctgggaaaatatttgcaatatcgatggatgtgtattgagggtatttcaagtcacaaaattaacccccgaaaataatagcctcaaggagaatggccatgatggtaacactactgccaccactatgcccgcatctcatccgtttattgtctaccaattacaatacaagaaatggttggattcttgtggcgtggatataaatgacattattaaactacacaagatcaaaaactctctactgtttaaccctcaaaaattcgtcgcaagcctacaaaaggatatttataagcctaacttaatagacgataagaacagtgatctccgccttgacacagtgaattcatccccattattagttcattgctcagccggatgtggaagaacaggcgtttttgtcacgctagatttcttgctaagcattctttcgtcgacaacaaatcgctccaacaagatcgatgtttggaatatgccccaagatcttatctttatcattgtaaatgagctgagaaaacaaagactttcaatggtacaaaatctcactcaatatattgcctgttatgaggcattgctaaattatttcgcactgcaaaagcatgttgaacacgggtcatctccttga

SEQ ID NO: 5648 - DNA, 234 bp, Saccharomyces pastorianus
atgacctcccctgttatatcagaaaaaaaccatttacaggtcgaacaagcaagaacgcctgctcaaatgcccgcatatagaggtgaaactataaacttgtccaacctttctcaaaactcggtcaaaccgtgcacagatttggacgaccctagcatacgacgtaacaactccgacaaacgtccaaagtgctgctgcttgatctatctacaggtcctactgcatcttcatctgtaa

SEQ ID NO: 5649 - DNA, 2778 bp, Saccharomyces pastorianus
atgtctacctccactcattcccacaaaaggaaaaacagtcatctattctcgcaaaggaaaagttcgaattcttccatggacaagccgttcttctctgatagcaataatgagaccaatatggattctcaagccaatgagaacgaaaacaccattgacgtgagtagaccgagaaattccacaatagatgtcaccgacggtcctcaaacgccgtttcttcaagaacaccactcaatggccccacaacgagaaagcttcgagtttaatgacattgagaaccagggcgttacgcattcgttctttagtgtcaactctattcgccgtccttggggagaatggtctttaccagagaaaagatcttatgttctactctttgccttgatagcactattaattttgtttttaatggttatcttgatacctacgaaatttacttttagtaaaacaacgcccgcacaaacgtctccagcaggttctggattgaataaacgttccttctccatcgaaaacgtcttgaacggagatttttccattccagaagatactttccatttcattgccccacctcaaagcttgaaaagtcatgactcagatcctggtttatactttactacaaaggaaattgatggacagacgcatttcattgcgaaacagttgtttgatgacacttttgaagtgaatctaggtggaaacagatttcaatatgaaggtgttgaattcaccgccaatagcatccaaattaattataatctagacaagcttatattcggaaccgacatagaccctgaattcagacattcttccaaaggctattattggattaaggatttgagtacaggtactatcgaaccgattctaccaccggatgaagcagctgatggaaatgtacatggtttattgaaactgtcctatgcccatttctcacctgcttacaattacatttattttgtctatgagaataatttgtttctgcaacaggggaattcaagatacgccaagaagcttacccatgatggctcaaaagacatatttaatgctaaaccagattggatatacgaggaagaggtcctcgcgtccgaccaagctatatggtgggccccagatgactcaaaagctgtttttgcaagatttaatgacaccggcgttgaagatattcaactaaaccactatacgaacacgaaggaaccatatctttccagttctaaaataaaatactctaaaccaggatctaaaaaccccaagtttgatttatttttaatcaacttacagaacgaggtactttattcagtcaatacgggtggtcaaaaggattccattttgtataatgggaaatggattagtccagattcatttagattcgaaattacggacagaaattccaaggtgttggacgttaaagtatacgatgtaccgtcttctaaactacttactgtgagaaccactgattcgaattcgttcaatggatggattgaaaagaccaaagatatcttaagaattccaccaaaacccgaatccgaaagaacggagtacggatatatcgatattcacgcggacaataacgggttcaatcaccttttttattatccaaccatctttgccaaagatggcattcaattgactaaaggaaactgggaagttactgggaacggtataattggttacgaatatgaaacggataccgtattttttacagccaatgagattggaaccatgtcacaacacctttatagtaccagttttaatcctgcaactataggcaaacttcaagttatgcaaaatccatctgataaatatgatttttatgactttgaattgagctctagtggaagatatgccatttcaaagaaactaggccccggtgcaccagtgaaagtagctggaccgcttacggaagtactggatcttaccaatgctaacggcgattcggtggtgcagctgaccagggatcgaaaatttaaagagacaataaagggttacgatctaccaattaccagttacaagtcaatggttctaagtgatggtattgaaataaactacatcgaaattaaaccagcaaacttagatcccaagaagaaatatccgatattagtaaacatttatggtggcccaggatctcaatcattcaccactaaatcgtcgcttgcattcgaacagtctgttgcttcaggattggatgcaatcattctccaaatagaaccaagaggaactgggggtaaaggttggagtttcagatcttgggctcgcggtagattgggatattgggagcctagggatattattgaggtcaccaagaaatttttacaaaagaacaaaccacatatagacgaaaacaaggtcgcaatttggggttggtcgtacggtggctttgttagtttgaagaccgtagaattggataatggtgaaacattcaaatacacaatggctgttgcaccagtaacaaactggacactgtatgactccatctacaccgaaaggtatatgaatcaaccatcggaaaatgaagagggttattttgacatatctactattaaaaattacaagtctttcgaatcgctgaagcgactctttgttatgcacgggacctctgatgataatgttcatattcaaaatacgtttagatttgtcgatcaactgaatcttttgggattggccaattatgacatgcatatttttcccgattcagatcattctatcagacaccacaacgctcaaaagattgtattccagaaactgtactactggttaaaggatgcctttgacggccgctttgataatacataa

SEQ ID NO: 5650 - DNA, 723 bp, Saccharomyces pastorianus
atgactgagtgggatgattgtgctacgatgattgatatcatcctctctgatatgtatttgaaaacggttacgactaaaagggtaagaatagctttaaaagacgtatttatgattgacgtcgaatcacaggggaaagccattaatgagttaataagaaagcgcttggatcttataaaagcaacacccccccctgaaaggtccctcgaagatttattgaaggaaaatgctactttggcaatgaaactcaccaaggaattaagtgtaaacaaaaaatcattagaagaagaagaagaagaagaagaagaagaagaagaagaagataaagatagcgcagttaggcaaaaggatgttcaagagagaaaatccatgcctaaaaagccgcttatctctacacgaaaagttactttgtcggaaccattggcggatttgttaggagaggcccaattaactagaacggatgttgtacgaagaatttgggcatatattaaagagcataacctacaaaatccgaataatggaaaagaaatactaagtgacgaaaaattggagttaatattcggtaaaagtactgatatgtttcagatgcacaaacttctggtaaagcatatgacagaccctgataaaacaagcgattgttccgaagcaatcagcaaaactgaaaagcccagcgcttcagagcaatccgatacagaaggacatcaatacgacaaaaatgggagctag

SEQ ID NO: 5651 - DNA, 2484 bp, Saccharomyces pastorianus
atgaaaacgataagtaaccttttgacagcaattttttctagtacaaagccgaaattctctccagttttatctttttattattcgagtatacttgatgatccagtaatggaattttaccaggcacaggccactgccgtcaaaaaatattggataaaagtatttaaaagaaccctttttaagacagcggaaaaatattttatctcgcttctgcaagacatgttaaaaggtaatacagttgaaattcaaagcgtccataaccttgtggagacaattattgacgccataaaggcaatccaaaaacgctatagtaaaccactattggatgaaatatcgttacctagacaatgtgcagtttttctctgtgaagtgtacggttcagactcattaaaattaataaaaactgctgaaaaaagcagcgtgaaaatgaccggaaaaggtttgggcccaatggacgcactggatatgtacgatgtattgaaagagctaaggcagatttacattcaggtaaagccaaaggggacatgttttttcaatcttgaagattattttatcaaatatctagctcagttatgtgatgatgtaagccttaatgttcaaaaagtcatcaaaacttctctcaaaaccgaaaactggcaacccataaacgatcaagattatttcagtaggtcagtcttggatatatttaaaatgataaatgaatcaactggcatgcttgagaaatttggctgggaaaatgaggtgcaactagcacaaatgatcacgatggttttgaaggccttttcggatggcctattatcatattcagcacaagtaatgaacatgatagagagtgatttacaggagggtgatgagccttcttactctttagaaagctccgactctcaatcgtcgcttaatcttagtgtttcaagttataccagtccgaatcatgaacgatcaagaagtagtagattatttgaagatttgaagaatgcggttaaatcaactccaaaaattgtggcaccagccccgtatcagttcaagaagcgtacgtgcgtgctactcaacgaccttgataaaacactgtttttgttagaaagttttgaagaaaaagtagatccatcaagaatatcatctattatcgcccaatatcaatcctctcgcaaatcagaagataatataaaactgttagatgatcagaatatgaaacaagtgtacacccttaggattattggtgccgacaacgttaaaggtttcagtaaaacagggctttcaaattcttatgttttgatgagaaacataactttgcaacgagagatagggacaaccaagactgtttcaaggtcagttactcccaaatgggatgaagagtttgtattcgaatcgccttttggtaagtcgaacgatattgtgttcactatatggcaccatccacatagtagattgaagaacctggctgaagacgacttatgtgggaaagcaaatatgaaactttctccgagaaaattaaaggatgatgggtttcctctcgacttttcgctcactttaaacccacagggaacgctgcattgtcaagtttctctggaaagcgaaaaaatagatgccgtttcttccatgggaaaaatatacagatcattcagtaggtcaagagaccgtgcaataaatttgatggtcagcaaattctctaattttattgcctttgcgttttcaaggactacattgaaaacagtttgtggtcaccatggcaccacacttgcatctgatgaagcggtgtatgatgcaatattaccattgtttgactatttaaatgcgaacttgaacattctggcctctgagctttctcaaaggctactgtttatggtaatgctgagagcttggaacctagttttagagaatgctgacttgcttcttttaccatctctgaacagtgctaaaaccaatatattaagatcagccaagaaatctctctgggaaaacaccatttcaagtacaaaaacggtatcaggatacggccgtccattaacccaagcagaaattgaaacaatttttaaatggctcggcgcactatgtatagatttttttcataacaaaggagaaggcccccctcttgcagaactaaagaatgagtattaccaaaacatattactggttccagctttctatgataaaggcgtatccgaactgaaggaagaggttgatcgattagttcctgtttatgaagagtatttgaaatggttttatttgaagaagactccgattacttttactaataaatcagtcggaacaatatccagaaaaaaatctctagcggctaatatcatgaaagaacccaagcagcaactagaacgagacgcagaggtaatgaacatcatattaaggattttgattgcaaaaggccagcacgattatgttcatcgcatcttgcacgatagaagagaccttgttaacactatgaaaaatagaagagccgtaagaaaagcagtcggttctaccggaaaaaaataa

SEQ ID NO: 5652 - DNA, 90 bp, Saccharomyces pastorianus
atggatcgatttggaacgggcgaaaaagtcagctctcacaaaaatcgtctcataccggaagatgctaaagcgtattcgtccatctcataa

SEQ ID NO: 5653 - DNA, 981 bp, Saccharomyces pastorianus
atgaatcgaacagtctccacaccttcatcgtctgtcactgatgtgtctgctgatataccatcaatacgtaacgtcattaatgtcgatgtacctgcatcggacgtctatctttatacactaaaactgattatactagactacattaatgaaccacggtttagagacacatcattacaatcaaatagaacagatacacgaagagccctatccgacaaaacaaataatccacaggtacagcatgaaaagagaatactgattgataagcaagacgacatgtctgaacatgatatagtacaggcaacattacgaatattaaagggaaagttagcacaaatttcaggcaataagagcttggcgccggatgagatgcattggaagagtattgtcaagatgtactatagcatgcttgattcctctactgccgatgcattttccaagatgagtcaaatggaagaagttgttggttatttcacgaacgtggctagcaacgaattaaaaaagttgactgttggtagctcacgtgacgagttgtttagcgaggtagcgtatttcatagaccttgtgatcgatatacttccagacagttgtgcagggattataaagagattgctagattacaagatcagtctcagaaagggtgagacggcaggaaggaagaaaaaagttacctcaccggcacctatgccccaatatagaagtgtttctggcggcacgagcaatagtaagcaaccttcgttcaaagtccaagatatttcacacatgtcatattttacgcaactatttgaagtagatgaaacaaagcttcaaaaagatgtaataaccgctaaggacgattccacaaatcctatattttgcggtgaattgagatacttgaggaaaaaaattaagaaagaaactggattattgactgcttcagatttttcagatgacagagactatactctatggaagaattatgacttcttgaaatcgccaacttga

SEQ ID NO: 5654 - DNA, 519 bp, Saccharomyces pastorianus
atgaatatcgtatcggaacacatcgggcgtaagatagttggagtgggggttgatattgtgcatttgccaagattcgctcgcctgctagaaaaatattctccattggacccagctggccgtttgactttcaaaaagatcgcacaaaagttcatgcatgagaaggagagggctcaccttagaaatcttctcaatgaagaacaacatctgagtccaagcttgtacaggtatatggcgggtatttgggctttgaaggagtgttcattgaaggctttgtgctgtcatatttcgaagcacgatctgcctcctgctcaagtagtatattccagaatgttatataaaacgcagaacagtgcgggcgtcccgaaattagagtatgacaaaatgtttgagcaagagtatccaaaatatcaacagttctccaaaaaatatggctcctttttttctacacatgaatttcttgtatcattgtcccatgataaagactacttaatagcaatagtaaatttggtggaaagataa

SEQ ID NO: 5655 - DNA, 495 bp, Saccharomyces pastorianus
atgggggacagcaacaagcctatccactttgagtttcccaaaatcttcgtgatgttggtaagaaccgttgctcaaacaattgaatcggaatctggtttcctacagccggctttggacatcattgctaccataccgacagatacccaatctagaaaaattcccattagtttggttgtgggctgcaaacaagaagactctttgaaatcagcttcgtccttggcctgttattactacgccatccccttagctaaaagcagacatccaaatctcaaatcaggtaaggatagtgttgtggggataccgctattggatactaatgatgacagagttcgtgatatgacccggcggttggcgacaataatatccgagaagttcaatagaccatgttatgtaacgtggtcatcatcacctaacgaagattcatctgtgctggtcaccagccatctatatattttaaagaagtgtctcaatctcctaaaagcagagctcgggtaa

SEQ ID NO: 5656 - DNA, 1386 bp, Saccharomyces pastorianus
atgactactttagatgttgcagagagaaataaaattaaaaatgaagaattcaaaatctggaagaaatcaataccttctttataccaacatatttcaagtttgaagcctaatttcagctcaaacgtcaacgacacgtcaacaacacccaaaagtttagtcttcactaacgacaaagcttgtgacaaagctaaggggactttaaccgcaccgcttctatattcccaagggagtgagatttttgaagtggaatgcgtaatgccacttggacttcattataaaaagttagaaggcagtatagaaatattaccacaaccagattacaccacggagtctctaaaagttgaacagactgttctaacaccaaaatgggaatttaaaggtgaaaccattgaaaaaatgatatatgttgataacagtgaaataaatgtaaaagtgatagccctctccgccaatggttctttggcatggttcagggatggagttaaattacctgtttatacaatgttggaagcgcccagtcctctcagtacagcatcatgcggagaacatgatggtaaaccaaatgttgattttgcaatctcaaacgactcaaaaacactggtagtaactaaaggaactatacttgatagtgaaagtgctacgttcaagataatagataactcaagtaaaataggagaagttgttcgtacagtgtctgtttctaatataaaaaccatccaagcggttaacttcttgaataacaacatatttgctacttgctcagatgacggtgttataaggttttggggaactgaagcaggtgaggagcccctatggatattaaatgattctttagacggaaaatcatgttgctttgccgtatcgccctttgttgataccttattcgtaaccggaacaagtagtggagccatcaaagtttgggatctccgtgcggttgtttcctcgatggacgctgctgttggtccgaattccaatcaagaacacaataaagtcaatgagctatttaaagtccatcatttttacagtgagcgagtctctagaatcgaattttccgccatttcacctacagagatgataactgttggggatcttggaaatgtctatcattgggattttgagccagttttctccagctataccgaaacaagtgaggagttccaaggtacgatagccgatgaagtagaagcagaaagcatgacattttatcacactgaaggctgtagaagagaaatgggggaaaacgacaaggtcaatactgttgcttaccataattctattgaagacctggttgccacagttgatagtgatggtttattaactgtgtataggccgtttacaggaaagattcatggagatgaaacgaagcttgaaatggcaacggactag

SEQ ID NO: 5657 - DNA, 2439 bp, Saccharomyces pastorianus
atgagaaagttacccaaaaaagatgttttgacaataaacttggctcgtgatttaaatgagatagtcaccagactctccgagtcaaatacagggtggctggcaaaaccaaaattaagcagcgtctggggacagctagacaagtcttttaataaatatatcggaggggacgacattgatgcactgagtaaaaaaaacgataagaagaaggtatttgacggattcactcctggatcctcggctaattcatcaacggttgaccttactcaaacatttacccctttccaaactcaaggtaattctcagagctatgtggatacgacggctctcttgcatagtgcttataacggaccaaatcacagtcttctgcattcaaagcctcctcatgggtcaaagggcttggctgagccaaacctaccttatgtacacaggattggcgacagtttacagggatctcctcaacgtgttcaaagtacacaatatgcttctatagaccctcaaatgacttctttaaggagagtaagaactgatcaacacgcaagcgagaaggcttttgaaggtctgccaatttcgggccaaaagttatcatcttacgctcctcaacatgggcataatcatagcattccgatggaaaaatccgactcaaatgctacttctatgtttacagactttgcgcctccgccaaaattcggaagagtttcttctaattacatgtctagtccagatttaataagaagggagtcaattatatctacaggctctgattttcttccacctcctaaagttggagcacctgttagaaataattcttcacaagggtcacttatgtattcaccgagtgtagaggctttacctatggaacccctcattccttcagatcatgaaataccatacaacaattctagtagcaaacgtcccgatgaaaccacacttgaccgagaatatcagacatcagagaataatagcaacacagatcaaaatacactaaaagatttcacgggggcagcaggtgaaaccaggggtaccgaagtaccagatttagaggatgaaaaggttccttccaccatggagactgtcagtcagcatacttctcgaactaatcccgttcaacttgcaggcgaagaagcaattagcaagtccctttcacatactcaaccggtaactgaaggttccaatgagggcacaaatgtcgacaatgctataccttcaaatgacaatggggaaagtggcacaggactaccagaacatgtaacaggaccggtgtcatctacatacctaccctctgtgaaaaccgtatcagaacaaaataaccttgatagcgccccggctattcaggaacaaatcgttgctgagagtgttattattacgacacccaaacctatggaacaacatgtatcgcctccaaagctaataagcactaaagctactaaaatgcattcgtccccatatatgccccaagatcttggcactgacgtagacactgaagtaccaactatccctgaagcatcaccagcaatatccgtaagagctcctctagtaagaacttcagcagcatcgccgtattatcctttagccaacagagcaaatgaaaatgcattgtatgggatatctgaaacggtgtctcaatcacaagttagcaacgatgttcctacagagaatagattcagtccaatcaaaaaagctgaagttgttgagagagaggattttgaacctactattaggaaggcttcagccaatcagtataaggctttcaaaccactagagtcggaggtaaagaaatataatgatgttattgaggaagaatccgatgatgagaatacctctgctgacgatggaaagaacacaaaggataaaaagaagaacaacgacaacgcaaaaaaggaatcaaactctagaaacgataatattgatgacaagtccaatagttggtttggttggttgaagaaagacactggtgacaagaaagtttataaggccaagttaggccataagaacacgctatactacgacgagaaattgaaacggtgggtaaataaggatgcaacagaggaagacagacaaaaaattgtcgaaacttcagcaccacctcctcccccaatcgttaaacgcaaagacgctggaccaaaaacaaagccacgttcgggccccatcaataatactgtacctccaataaatgctacttcggtaatcccaaacaatccaattactggagaacccttgtcaattaaatcacctcctcctctttcttctggaggagtcaataccgaaaattctccaccaccatcctctcctatatctaatacttctggcgtaaacctgactggtagaaaggccaacggtctagatgatttgttaagtttgacaggagggcctaaaccagcaagtacaagaagaaagaagaaatcaacaagaggttatgttaatgtgatgaacaacatataa

SEQ ID NO: 5658 - DNA, 450 bp, Saccharomyces pastorianus
atgttcctttcaaaattcaaccttataaggtcatgctcacccatcttccgttcaacgacccttcttcgtcatcaaactcgaatgtttttgagtacagaaataagaaaagctattcaagacgctattgaatctgccccagtggttctcttcatgaaaggtactccagaatttccaaaatgtgggttttcaagagcaaccatagggttattaggaaaccaaggtgttgatccagttaaatttgcggcttataatgttctagaagacccggagctacgtgaaggtatcaaagaattttcagagtggcctactataccccagctgtatgtaaataaagaatttgttggcggttgtgatgttattacaagtatggcacgttcaggtgaattagctgatttattagaagaggcacatgccttggtacccgaagaacaagaagccaaggataattga

SEQ ID NO: 5659 - DNA, 345 bp, Saccharomyces pastorianus
atgaagagattttatattatcaatatatcaacggtgttgacattaaggctttcaaaagtgggcacacatttcattacttccaaaagtggtataaattcatttcacgatggaataacctctgagcttagcttgaaggatagcaatttaaatgtgaaaacactgctcgcatatttgcccgattttaaaagtcatgaacactgggaaaaactttcaccgaccatttcaaaacaacttgtatgctgtttagtcgatggaaggtacggagatactgttctcggaagcaaaagatcaattggtgacattcttttgttggctgaacttaaaaattcatttattgataattag

SEQ ID NO: 5660 - DNA, 423 bp, Saccharomyces pastorianus
atgaagagaataatttataaagtcttcgtaggcttatatgaacgcgttggtttaggtaaaaaatttcatccaagttatgatataattttaattataggcggttcttcaaacaagttaggcattgaaatctgtaaaacctttatcgaagattatcacacgaaggttataaatgttgatacagtagataatatcaatgagaaagaaataaagaaagagagtagtaaattttacacttttattccgtgcaaagatttcagcaacattgaatatcttgaagaatccctactggacgtgcagaagttgaaaatatatcccactatactcatcaacaatatgcaagagggtatagaatcaacttttctaagggaagatcagtttccaaagcttaatgaagaatcattgtgcgaattcgaaaaaatcgtg

SEQ ID NO: 5661 - DNA, 753 bp, Saccharomyces pastorianus
atgtcgtgcaatcctggtgacccagacggtcctctttgcacggtgagtgtaaaggatctcttccaaaatgtgagtcttgagcaaactccaagtttcaataagcgattcgttgaatccttttggaaggcttttaaacggcctgtggtttcaaaacctcatacaatgaagacatcaagccacagcaaggagctgagaaaaaaagaaggtgtcactttgatgccacctgtcccggaaacattactccataaatttaacttctggagcaagactctttgttcccccattagcaggaaacaagatgaaacagaagcagacgagacgaaagagaccaaaatcgttattaatgaaaaacagatccgggattcaatatcttgttatccagatgaacaaaaagggagcgttgtgttttgctacttgcctgaccttgtactgtattacacaccgccgatgaaagtgactggaaagccatgtcctataaagaaaagcccttgggaatcgatggagatccgataccaaaagttcatctatccgttagaaaaattagaaggacaatttgaggaagtccccttcagaccttggtttctcgctatgcgcttgaaagagctctacagatgctttgaaagatcatttagtaatgcggcaaatagaggtaaggcaaagttattgcgaggaaaacgaagaacaaagaaatcgtaccacaaaaccgttgatttggtttcgatgaagatttccacccaccagcattcccactaa

SEQ ID NO: 5662 - DNA, 1194 bp, Saccharomyces pastorianus
atggtgaagaccacgttctttgcgtgcttgccccccatctctaggtgccatttcctttccacactacactacactacactactcctgtctgccgcgatgtctgttccaaccgctgccgttgcttctgctacgacagacatgtctgtcaagaagatcgctgcccacttgaaaagccatcccggcgctgaagtgatctttatggttggtgcaggaatatccacgtcttgtgggattcccgactttcgatctccgggtactgggctgtaccacaacctggcaaggttgcgcttgccgtaccccgaggctgtgtttgatgtcgactttttccagtcgaatcccttgcccttttacacgcttgctaaagaactgtatccggggaacttcgagccttctaagtttcaccattttttgaaattgtttcaagatcgaaacctcttgagaaggatatatactcagaatatagacactttagaaagacaggccggtattagggatgatctggtaatcgaggcccacggcagctttgctcactgtcattgtattgagtgtggcaagatattccctcaacatgttttcaagtctaagctgagcgaagaccctatcaaggattttgtcaagtgcgatgcgtgcgacgaactgataaaaccggcaattgtcttctttggcgaggacctgccggactccttttcggagacctggtctaaggattccaaatggcttcgtgaaaaaaccaggacatcaaacaaatccaatcaagaccaggaacctcttgtcatcgtagttggcacttcgctagccgtgtaccctttcgcctctctgcccgaagaaattccccggaaagtaaagcgagttttatgtaatttggaaacggtgggggattttaagactaacaagcggcctacggatttggtagtgaatctttattctgacgcgtttgcagaacaactcgttgaagaattaggctggcaagatgatttcaataagatactccgggctcaaactgtaatcacagataatcttaaagaacaattgcttgatattgtgcaggatttggaagatttaagtctgaccaagactgaagacgaacattcaagggacaaagatacgcaaccgcaaactaaggttcacaaccaggaagaagatgcagaggaagaagataagtcctccacgaaaaatagtagtgataacaaatag

SEQ ID NO: 5663 - DNA, 303 bp, Saccharomyces pastorianus
atgcccatggccgccattttcttgaagaacaagttcatcgcctggttttccctgattcagagtttgcacttctacctaaacaccgacgaagacatcgtcgctgcccaaaaggagactaagtcggcctcccccatggaccagcctcctgcaatcaagcttctcatgagcaccatcgggattgtcgtttgctacatgaacttggtcttccctcaacaattggctccgccaaagcctaccgtttcaaaggacgaaattgaaactgtgatcgaaactaccaccaaagtcgagacccaaaccgtctaa

SEQ ID NO: 5664 - DNA, 117 bp, Saccharomyces pastorianus
atgtggtcagaaataacttggagaaagaggtttttcttttacaagaaagattcaaaaggtggacttcaaagcacaaagatactggaaagactcaagtccttaacagcaactgtgtaa

SEQ ID NO: 5665 - DNA, 354 bp, Saccharomyces pastorianus
atgtctccactggaatctttcaatagttttagcttgttttctagattatcaatgttcaagttcctcacacatacaactttttcacgtccattcgtatactccgccctcagtagcgggtgtccagactttctcaacacttcaaactgtatccatggaaattcctggccccatttgtctagcctctttgaagtcaaaaacttcctcatgccttctgaagatcctccccagttgcagtactgcaaagtaacctttttgcatggaaacacaaatgctcccaccccgttacgtcctatggaatttcgagcaatagctttaacaaccatccttgtctatgggccctctgatgctatttga

SEQ ID NO: 5666 - DNA, 243 bp, Saccharomyces pastorianus
atgtacataccaaagggtatatttaatttacatagacatatcactctaaaattcgacattggaaggaggttgagagaattggttggaggacctatcttgagaatcattttgatagttttgatagccacctctgttgttttggtagttatttctgttttggtagccacttcgttggccacctcttcctctgtttcccctattacctctgtaattgccgccacggccacgaccacgacctcttga

SEQ ID NO: 5667 - DNA, 1422 bp, Saccharomyces pastorianus
atgagcgacagaggaggggtaaagcagtccggcagtacaggaaccatgcgtcgaaacggggtatggcaggagttcaagacgcccgcaggcaaaaagtactactacaacaagaacacgaaggaatctcgatgggataaaccagatttcaagaaggcactcggtgtgcaaaacagtgcaaaagcgcctcaggcagagagaaagcccatgtttgcattggagctgatcgactattggtacttgataatatgcaatgatggtacaaagttctactataacggcgaatccaatacgtctaaatacgaaatcgacgaagagggcgctggccagtgcgcagcgttggtaaaatcgttggacaaggaaaaactgaccctcttaatcggcatagccagagggtacaacgtaagagaggaggacgtggaccagatctttaaatcactgaacgaagagatcgatctattcaaaaaaaaccaagtggaagaagaagacgaaaaagaggacgagccaaacgaagaggcgggtgacgcagaggcagaaacaccacctcagacaaattccgcagggcttgtcagcgggtatggctcgtcctcagaggaggaggaggaggaggaggaggaggaggaaccggcgaacgaagatacagatataatcgacgacctgaaccagatcgattccggcgacctcaacgagcgcggcctgtttttccagctgttggacaggtacgagctggacaaattctccacgtggtcattgcaatgcaagaaaatcgagaacgatccggatttctaccagattagcgatgccgcggtccgcgaaagcctcttcgaagagtggtgcgccaaggaaagcggcagcggcagcgaaagcgaggacggcgctgacctgctggagccaacaaagttccactacttagcgcagatagtcgccaaagcggagatcgcgcccgactgcattccgcaggatatcaggaagcaacagagggcgctgttcaaggcgtacagggtcaaggagtacgtgccgtcaaagcgggaccaggaccggttcgtgtcgcagctattgttctattacaaaacgttcagtttggaccagcgaagggagatcttccaggaatttctgcgggatcatgagcgagactttgcatgcgcggtgcaaacgttgcgccaagacaagggccttatcagccgttggcgggcattactcgcagcaacggccgctgatggtgccagcgtagaggacgcgctgctgaggatcgaacaccggtgtggcgtgggcgccatagccttggcggatccgcgctactacgtggtgggtattttggacaagaccgcgggttgggtgcgatggctagccgccgagggtggaccccgcagccgggtggccccggctgcggatgcgggtgcggccgcggggccgtgtggccgataa

SEQ ID NO: 5668 - DNA, 690 bp, Saccharomyces pastorianus
atggttgtgaccggagtagaggttgcagaacttgtcactacagaggatgaaacagcagaactggttacgtcagaagaagtgatagtagagcttgaagcagagctggtcacgtcagaagatgtggcaactgagctggagacagcagaagatgtaacaacggagctagttacattagacgagttaattgaactaatgatcgtggctggagtagaggttgcagaacttgtcactacagaggatgaaacagcagaactggttacgtcagaagaagtgacagtagagcttgaagcagagctggtctcgtcggaggatgtggaagcagaacttgagacaacaaaactggagacaacagaactggagacagcagaggatgtggcaacggagctagttacattggatgaggtagtagaactaatggttgtgaccggagtagaggatgtggtggatcccgttgtgacctcagtagatgggacactggatgagctgacgccggttggtgttttaacttcaattatggtttcaaccgttggtaaactattgagtcctgtgatagtagatgtcttagtgtctgtcgttgtatacacaccagtccatggttccgttgtggttgtcagaatgccagtaattgtgttgttttcgggattcgtaacatcacaattcgcttgggccaggttattgtcaaaagaatag

SEQ ID NO: 5669 - DNA, 288 bp, Saccharomyces pastorianus
atggcagctgtgcacttatacataatttcattcacagcattgatgatatcatcaacgagcgagataggtgggtaccccaaatgctccgtcagtattgacgtcgatctcattgtcggtgccgacatagcttctctggtcgttcgagttggccttttaccgtctgttgatgaagatgaagatcatctatgtattcacttttttattatttaccttttttatttacgcgtaatacaaatttctcaaacgtttcaaaaagtaacgagacaaagtaatatgatatggcaataa

SEQ ID NO: 5670 - DNA, 597 bp, Saccharomyces pastorianus
atgcaaaatgctcaaactagacggtcttccacagactataaagctggcggtgcacgtggtgcaagtggtaacaacaaggctggtatgaacaaaaggtctctggcagatgttgagggagcagagactgtgttgggtcacaaatcctcggtggaaactaaaccgaatgtgcgatggcaggcttctcatagcaatctggctgcgttgcatgacaaggagcagaggtacgaggcggagcatcaccatgctcgacataagcttcatcgccaagttatcccagactacacttctgcttcaaccgcgatgtttagtgactgtatgttcaacataggaccagagaaagtgcgaagtgttagcacgatgaatccatcaggactttcgccaaaacaccctttcaatatgggtgaaaagtttaaagggcccttcccgcagcacactgtagcctcgaagactcacgatggcggggccattattacagaccatttcccctctcttcggcagctgcagccccagcagcatccggcacatcgccactacaagcacaacgacaaggacggcttgaaatcaccttctcaatcctttgtgaaggaacaaaaagac

SEQ ID NO: 5671 - DNA, 402 bp, Saccharomyces pastorianus
  modified_base (294)..(386): a, c, g, t, unknown, or other
atgaacttacaacaggatttcgataaagagaatgccgaatcgttcgaatcacgtctaactgatactataaatacaaacgttgccaaattacaagagttagaggagagaatggcattttgtaaggagagattggtcgccagaaaggaaacgatgaggaaaatggaaagccttctatctttggagagctctttgatgatttccaagaaaaatctaaaattcatgtacaaataccggaacgaggctcttgacctggtttccctggtcgtcatcgttgtgatatgctacgttttttannnnnnnnnnnnnnnnnnnnnnnnnnnnnnnnnnnnnnnnnnnnnnnnnnnnnnnnnnnnnnnnnnnnnnnnnnnnnnnnnnnnnnnnnnnnncgcgtataatctgtaa

SEQ ID NO: 5672 - DNA, 174 bp, Saccharomyces pastorianus
atgcttctgcgaacccctttagtgataataatggatttgaaaatgacggctttggaaacacagaaccgtttattgaaaacccattcgccgatgatactaggaacgctcataaagccaattcctcaagagacgactttacatttgatttgtgagttgtggagacaaataacatga

SEQ ID NO: 5673 - DNA, 894 bp, Saccharomyces pastorianus
atgctcactgccggcagtgaagttggtgatgggcacgcccacggccacggcgtcttgcgggaacaactgggcatgcgtgcccctgccaaacgactccacggtgccctggcgcctgtcccagacgtggatcgaggtccacatgcagcggacctcgagtccgagccttgcttcttgctgctcgagctggaaccctgcgggcaggcgaccggatgcgtgcgccatgcggccgttcttgtccaccacgaccaggaagtccttgcccatggccacgtagtccacggccacagaccccaaatcgcacaccagcgtgggctctaccaccgaccggcacttgcgcgcctgcagctgacacttggtgttgctgccccagccgtatacttgcgggccctgcaccaccacgaagttctggaagcacccgtatactgctatgcggccatctgccgggtccagaaccggcagatggcgctgctcgaactcgtaacgaccgcctcctcgctgccatacatggccacgtgtgtcgaccacgaccgttgtgtcccagccgcatgccacgtccactaccggcgccggcacctcgatgggcgtccaaccaggcacctgctgcagggcagccgtgccctgcagctcacctcgcctgttatccccacacccggccagagttccattgctcatcagcaccacgctgtggttcccaccgcacgctatcttcgacactttactctcacctgccaggacggacctctgcggcgtgtccacgtcctcgtcgtgcgccagtcccagctgaccctgtccgttggacccaaacgcatacacacagctcatcactgccctcctgcagcagcctgcaacagctcctttctgtgcttcttcttcgtgatgcctgttgtatgttaa

SEQ ID NO: 5674 - DNA, 279 bp, Saccharomyces pastorianus
atgacaatggatgccatgttgttccagcaccaacctccactggtgtcactgcaaccactgtttcttcaaagtcttacactaccatcactgtcactcactgtgatgacaacggctgcaatgttaagaccgtcacttctgaggctcctaaggaaacttcagtcaccactgccactaccattgctccaaaatcatacacaactgccactgtcacccactgtaacgacaacggctgtaccgtcaagactgtcacttctgaggctccaaaagccactacagtag

SEQ ID NO: 5675 - DNA, 219 bp, Saccharomyces pastorianus
atgtccgttctctgcagcaccataggttgtcgactctttgctgcgctggccagctttaaaggcgcctttagatcattcaatgataggccaccggcatcatctggccatgctttcacaaacgcgccaacgccaagtgtaaaccccaccgtgggtaagattactgctctattgaccagtttaaacaaaagtggtattattctagccattttggatgcatga

SEQ ID NO: 5676 - DNA, 921 bp, Saccharomyces pastorianus
atgccgtttactcatagcagcaaggcaaagaggccgaaattcctactaaatttgcagatcaaagaactggtgaatatccctcaatcttctgggttttgctacacgaagtggcgcctgaaggatggaacagggacctcaggacataagacagctctggatggagagcaccaatccgcgtcgactcagagtagaggtacaacgcaacacgtacacgtgcagcatcatagggcacagtggaattactcattagacaagccaattctcgtcaagcttcacttagacaaaaatggaaaatttctgaagaaacccttagtactggaggtatttttcgagtttgctgatgggagctccacgtcaaatttgaattccagtcccaatgttaaagtgaagaaaaccaccaattctaacgcaactgcgctaatggctattggtaacaactcatactcccaaaaggtaacgggcaagctactcttggggacagtggacatagacgttgcagaatatgtcaaggaagacgaaactccaactacaaatagattcttactgaagcattcaaaggtaaattctatcattaacgtgtcactgcaattaaaactgataagaggctcctatgaagatttcaaggtttcaaaatcggttactaatgaccaactcgctaattttcgaccgggaataaacactatactggacaattcatccgaattgtccactcctacatcaacaacgaatcaaacgtcaaccaacaacacctccccaaatacggacggtagcggtaacggcacttccgtaccaaaaccaactaacaatggggcacgaaatggtacaagtattaaatcaccgacatctataaacactaagagtaacggagcaacaactaggacaggactgtccacgacgatatcgtcttcgatgaccccgtga

SEQ ID NO: 5677 - DNA, 1047 bp, Saccharomyces pastorianus
atgttgcggtttgctcggtgctactcattggccagaagtaaagctacgcaagttcagagtacggtcttcaagccggaatatgccttgaagtgtggattagagattcacacacaattgaacactggaaataagcttttttcacagtctaccaatagtgccacacccttggcggatgtgcctaaccaccacaccagcttctacgatgtggctttgccagggacgcagccggttttgaatttggaggccattttgtttgccatgaagctgtcgctgtcattgaattcccaggtgaatatggtgtcgcagtttgatagaaagcactacttctacggtgaccaaccccaaggttaccaggtgacgcagcactacaggccgtttgctcgaggcgggaaggtcaatctgtccagggaactcgacggcatcgacgagtcgtccaaggacattagcattgcgcaattgcagatagagcaggacacggggaagtcgcactacacagacacaggcaaagatgttgtcacgctggtcgacttgaacagatcgaacgtcccactcatcgagttggtgaccaacccagattttagtgatatcaaacaggtcaaggcgttcatcaagaaataccagaatttggttcgtcatttgcacatatcttccggggatttggaaacgggtgccatgcgggtggacgttaacttgtcgattaacgaatttgctcgcgtggaactgaaaaacctgcctaacaccagctctatcatcaatgccatcaagtacgaataccaacgacaagtcgagttgatctccaggggcgaaaccgattcactgctggagcctgagacgcggggctggacaggctcttccacagtgaagttgagaagcaaagaaactaccatcgattacagatacatgcccgatccggaattgccgtatatcaatcttgctccggatattatcagtggcgtggcggcatcaatgccggaattgcctgatgacataatgagaatgcttatgcagaagccattccagttgtccttaaaggacgccaagatttaa

SEQ ID NO: 5678 - DNA, 201 bp, Saccharomyces pastorianus
atgttggaaatgaatgacgtggacgtggtcaatgggaatatccttaattccctggaatggttgatttgcctctacattgaaagaatattggtcgataccaatagtaacttcaacgggaacagatgtaaatggtacgctattcatcggttgtccaacaattcacttcacactcacatttggtattcaatatatggaagttaa

SEQ ID NO: 5679 - DNA, 672 bp, Saccharomyces pastorianus
atgatggcactaagaaaatccatcaataacagaaatacagcaactgtaaaatatattgtatcactaagtgcattgagtgtaaattgttgcatctctacaaaaaaagaaatcaaaagtatacgtacctacataattatacaatcttttttcttctttttgttttgcttatccttcttgtccttcagaagtaaattatttgatttccttcgttcaagattggttccggatggacttctaccggcaccacccaagttatccatattcaatagctgcccatttggctttatctccgtcgactgtccagcacctttttgtggtgttctgataggcgaaggacctttcttaacattgttattcatattgatttgcaaaccctgtggctcagaatctcgtttggaatttccagtaaaaaatgtctcggactttgaagaaacggttgagcttggcttcgcaaacgacccttcgttgcctaatccattgtctgtagtagagaataagtttaaagtgctgacacttttattctttttatgttgtttcttactggcagcggcaattccaccttctctggaacctagcttattaatcgccctcttgtcatttttttcagcagccttttcgtaccatttccatgcgtattccaagttacattcgcaacctttgccatgttcataa

SEQ ID NO: 5680 - DNA, 2040 bp, Saccharomyces pastorianus
atgtgcgttagtctaaataacgatgcctgtggggccttgcgaagaagccacgatggcccttgcagcgaaggtgaaggtgtacttcgtggcagtaaatcgatgcccgttggcgagcaagatctattacagtctcccgggatgattaacatgtgtgaatttttgcaagacgatgaagttgttgacgacgagaaatccgtggtacatgttgctacaacaatttctgcggagacaagtgtggaaagcgtagagtccaatcagtccaaaaaggctgatcagaggtatcgtcacattgcgttagatattttggaaggtactttcatagagataccgtataaggaatacgcaaacttcttggggagtgaaggcaaccaccgaattttaactgagtttataaaattattggatccccttccactatcgttattggaggctctttccaatttatcgaatagtatctatttcatcgcagaagcgcaaaatattgaccgaacactggagtgcttgagtaaagaatggatacagtgtcatccggatacccattggaaatcaagctataagttgtgccacattgttttattttctttgttaatattgaattcagatctgcataacgattttcaaatcgaccataaaaagactaaattttctatggttgcattcatcaacaataccctgagagcattgagagaagagagcgaatatgaagaattggaaatctgtgccggcgaacatctgatcatcgacgaactttcagaatactacaagttgctgaatgagacccctttaccgctgcttacggaatccgaaacatcaatcgctacatccgagtacgaaccttctttgaacagattctctactttgggatcgcgagaatatagtatatcaaatctgcgtggtatggcctctagttctacaaccctatatcccagagataatcaaaactctataagagaagtgagcgcgaaatccaacaggaactttcataataataagcccatgcagacgctatactgtaaggaaccgtttgacgatgatttagtaagcgacagcggttctagttggtttgttgacggtctggtttcaattagcaaaaagtcactaccaaacagattctttaagagagacagagatcaagaaactacaccaaaagtgcactctaaaagatcgttttttgggtggcttaaaccatcgaaaagtaaaacgtttattgaccacacatctcgtacaacctctttatcgtacttaagtaaggattccgaatgggatagagtgaaagtacaaatcagagaaggcagaatgcttattttcaaaataaagcaaaatgtgaaggatatccaccaatccaatgggacaaacagcactgctattgactattacaaagaaattagtagttcttattttgcttattcgctatttgaagctgaagcacaagtggtgcaagataatataattatcggctgtgaagcagtaaacataaacaaaaatgcgaaaaagaaaaagggaaactttactgtaatcttccctgaagacatcaatggtcctgaaactgtcttagagtttcaaaccaaagacattgcagaatctcataaattcacgcagtgtatcaacttctgggcgggtaggatttcgcccgtgcccatgacacaattcgaactagtgtccaatgaagaatatgggtggagtgacaaagtctttaccgatcttacgtgctttgatttaaagcaaaccactataagcgaatggaaaccactgctaggcctggaattattatatgaagactcaaaggatatggagactaaattgaaggataggttggaagaattgatggatttcaccaagcagttgggagtatggatagacaggcacaacgaaatcaaggacaagctagttgaaatttggagctttgatgagaattgttttgaagtggttatgaataattggaactccaaatatttgtacatgaatacccaatacaagaagcgactaacttatttagaagctttacagaaagccatggagtctgtcccgctagacatttga

SEQ ID NO: 5681 - DNA, 705 bp, Saccharomyces pastorianus
atgggctcaacgatgttggatgatgtggatgataacatgatgggtataaagtcccttcacctgtacgagctgctaaacaatgtagtgaaaattggcgacaaaacacagttgatgacggctggtcccgaggaagttttgcccgaattgattcaacatatcaccgatacgataccgtttgacctattcataaatctcaagaacgggacaagcgatgccaggagactcattggtaggctgaatggcttgggcaagtttctgaatgataatttcttgcaaaaacatatattcccatttactatacttcggatatgcgagttgtgctatgatccattcaagtactataagatcaatgagttagacaaatttgtaaatgcgttggaaaagtgctgtttggtcactactagttggcaagagcccgaaaacattgacgataagaaggaagaagacgccgatgggaaggacatcaaaagtcaagaagacgtctcgctgatgaagatcccgtggatggatgaagaaactactgaccagctaactccctttattagagaaattgattcgataatgagcgtcaatctaggctatgatgatgaagaagatgaagataatgaagaaggggaagaggaaggattttttgacggcgacgagaatgaggaacctgaaagtaagactaagcataatattctattaaaagacgaaagactctag

SEQ ID NO: 5682 - DNA, 1137 bp, Saccharomyces pastorianus
atggcgttacttgattccgatacttcatcaaagacaatacaaaacagcacagacaccacttcgcttaccggtgacaacgaacgttcttctacagaacgagacaaaaccgccaatgattccgccagtatcgtttctagcagctcgcaaaaaagagaaaatgaccaggaaagtgataagacctcttcaaagaataacgggaaacggcccttgtttcaaagaatcgttgaattcctgcaagttgatccagagtccattgaaccaactaatgagaatcctgaagagcccataagaacgttcaaggagctccgaaaatccttattatccacatatttgtacaacggggagttgaggcctatagaggctaagagaagaacatggacctggaaagaatacactttcttttggatttctgaagctttcaacattaacacatggcaaatatccgctactggtctacaacttggcctgaactggtggcagacctggatttgcgtttggacaggatacacttttgtcgcgttgtttttgattttatcttcaaaaataggcaacaattatcatatatccttccctatatcatcacggatatccttcggtatttatttttccgtttggatcgtcatcaatcgtatcattatggcgtgtatttggacatccacactagcttatattggtagcgaatgtgtccagttgatgctgaaggctatcttcggtactgatttaaacaccagaatcaaggacaaaataccggacccgtatttgaccaactttgaatttatgtgttttatgatcttctgggttgcgtgtctgccattcttgtggctgtcgaccgatagcttgcgttatgtctttgttgtaaaatccattatcgccccatttgcagcatttggtcttttaacttggaccctttgcaaatccgagggtcgtttggcattaggttccttgagtgatactaaacttatcacgggcaaatccgttttggcatggtccgtcattgaagctatcatgagcagcataggaaattttgctactttgattctaaacgccccagacttcacgagatttagtaagacttacaggtcagccgtttattcacaattttttgctttactcttttgcatgccattatttcactga

SEQ ID NO: 5683 - DNA, 2037 bp, Saccharomyces pastorianus
atggctagaagaaagaattataaaaagggaaacaagaagacctttggcgctcgtgatgactcgagagctcaaaagaactggtctgacttggtaaaggaaaatgaaaaatgggaaaaatactacaagaccttagctctcttcccagaagatcaatgggaggagttcaagaagacatgtcaagccccactacccctaaccttcagaattacaggctctagaaagcatgctggtgaagttttagatctgttcaaggaaagacatctacctaacttgactaatgttgaatttgaaggtgaaaaaatcaaggccccagtagagctgccttggtatccagaccaccttgcttggcaattggacgttccaaagactgtcattagaaagaacgaacaatttgcaaagactcagagatttttagttgttgaaaatgctgtcggtaatatctcaagacaagaagctgtttcaatgatccctccaatcgtgcttgaagtaaaacctcatcataccgttttagacatgtgtgctgctccaggttcaaaaaccgcccaattaatcgaagccttacacaaggatacagatgaaccatctgggtttgttgtcgctaatgatgccgatgctagaaggtctcatatgttggtccaccaattgaaaagattaaacagtgctaacttaatggttgtcaaccatgatgctcaatttttcccacgtatcagattgtacgaaaactcaaagaacaagaatgacattttaaaattcgacagaattctttgtgacgtgccatgttctggtgatggtaccatgagaaagaacgttaacgtctggaaagattggaacacacaagcaggtcttggtttacatactgttcaattgaatattctgaatagaggtttgcatctcctaaaagatagtggtagattagtttactccacttgttccttgaatcctatcgaaaatgaagctgttatagctgaagcactaaggaaatggggtgacaaaatcagattggttaattgcgatgataaactatctggtttagtaagatctaagggtgtatctaaatggcccgtttatgatagaaatttgactgagaagaccaagggagacgaaggcacattggaaagctttttcgcgccatctgaagaagaagcctctaaattcaatttgcaaaattgtatgagagtttatcctcaccaacaaaacacaggtgggtttttcatcactgtttttgagaaagttgaggaaaaaattgaacaagaggctactgagaaattatcctcagaaactccagccttggaatccgaaggacctcaaacaaagaaaataaaggtggaagaagttcaaaagaaagaaagattaccacgtgatgctaacgaagagccttttgtttttgttgacccacgacacgaagctttgaaggtctgttggggcttttatggtgttgacaacatctttgacagaaatacttgtctagttcgtaatgctactggtgaaccaaccagagtagtttatactgtatgtccggctttgaaggacgttattcaggctaatgaagacagattgaagattatttattccggtgtaaaattattcatttctcaaagaagcgatatcgaatgttcatggagaattcaaagtgaatcactaccaataatgaagcatcatatgaaatccaatagaattgttaaagctaacttggaaatgctaaaacacctattgatcgaatcattccccaattttgacgacatccgtccgaagaacattgacaatgattttgtcgaaaaaatgactgttttaagctctggctgtgcgttcattgatgtatcaagaaatgaccctaccaaggaaaacttattcttacctgtatggaagggtaacaagtgcattaacttaatggtctgcaaggaagatacccatgagctattatacagaatctacggtattgatgcgaacgccaaggttgctccaaaacctgaagaaaaagaagaaacgacggaaactcctgctgaaactcctgctgaaactcctagcgaggctaaatga

SEQ ID NO: 5684 - DNA, 606 bp, Saccharomyces pastorianus
atgccagttgaaatgtttgcgatgaacacagctgggagggagcgatgtgtgttaggagcagcaaaaggtgacggtcagggcgacttgagattctgtgtgtgccagcgaaaacgaaagaaaataatggagaagaaaaccccacacttgcctcccaccagtgagcagatcctggagagatctacgaaaggagccacgttcctcatgatgggccagctgtttaccaagatggtgactttcgtactgaacaacttgttgattaggtttctgtcgccaagaattttcggcatcactgcctttttggagtttatacaaggaacagtactgtttttcagcagagatgccattcgtttgtccacgttgaggatctcagactctggtaacggtatagtcgatgacgacagcgaggactaccaggagacgcactataagtccaaggtgttgcagactgcggtcaactttgctcacattccgctttggattggttcccgctgtccagtggtcttaccgcatggcagtatagaaacatcaatgcgtatttcatcacgctaccatttttcacgtggtcgatctttcttatttggctcagcattattgtcgaactgctga

SEQ ID NO: 5685 - DNA, 594 bp, Saccharomyces pastorianus
atgttgaactatgccgcgagatcgagattcgaaagcattgcggtgaccaccgggtgtattgtcaattttttagttgtttacgctgttcagcagtctcgctacccgatgggaattgtcactgcagatagtgacaaggaaggtatcgctatactggcgtttgcattgggaaaagtgactcattcgatcaccttattagcgtgttactactgggactatcacaagaatttcaaaccaaagaaattgttcagcactaaattgacgaagataaaatcatctgagagtaacggcataaagaaaaattactcgaaaaactcatcttatttcttccaaaatgatatcttggagcattttaaaaaagtatatttccaactatgtttcaagcatttgttgacagaaggtgataagctgattatcaactccttatgtactgtggaagagcaaggtatctatgctttactgtccaactacgggtcgctactgacacggttattattcgcacccatcgaagaatccctgcgattgtttctggctcgtctgctgtcatctcataatcaaaagaatttgaaactagccattgaagtcttgtcaatttga

SEQ ID NO: 5686 - DNA, 1986 bp, Saccharomyces pastorianus
atgatactcattcatggactatatgccatttggatatttctactcttttccttggtcaatgcgaagggattttcccccagagtaacaaagactatttcggaatattcggtcggtttatggagttttgatgattctaacactctacttagaacgcaagatgattccttggccattagttttgatgctggggaaaaatgggaaaagattaatgagactaaagaaggtgtcgaatggatatatatggacccctttaatgggcacgacagagccattgcagcgccactggtcgaaccatacttctacatgaccgatgatcaaggtaaatcgtggaaacttataaccatagaggattctgaagaggagtctttgattcgtggttgcgaaatatctactcatcccacaaacaacgaatatcttattgcaacttgtagctactgtaaagaaggagagggcggcgacatgagcgatgagcattggtttgataaagcttacggatctagtgatggtggcaagtccttttctgagatcaagacttctttggaagggaacgagaaaagtctttatagcatcgctcgttgtgacttcatcaaatctagcaaagattctgacttgggtggcaatgacgcctcaataatttgtctttatcattattatgatctcgctgaacgtgatattaaaagtactattaccgagtcgcaactgtttttaactactgattggggtaaatcggtcaaagaattcgatcaatttaaagataaaaccgttgattcatacgaagtgttgaagtctcacgtggtaatcttgacccaaggtgatagatacaataagatgtcttttgtggatatatggatatccaatgatctgtcaacttttcaaatggcccacctgcccactcaactaagacattctgtccaggaagggatttctgaagactctatcggaagaatcgtcttacctatatctagagaaacgaatgatgacgaaaaagacaagtccagcacgtcagaaatcctaatttccgaccctcaaggttttaagtttacccccattaaatggactgatatggaccaatttggatatataagtcttgctcaacctgatttcttaaagggaacaatgattgcatcgttttccccttcatttagcgatcacgatggaaaaggcaaggaccagaaaagtaagagaaaagccaaaatatccgttgataatggtacgacatgggcaaatttgaaagttgttgatccagagaatgcagactcatttggctgtgatattaccgatcccgagaattgctcgcttttccctatgttatatgagctagaagacttaactccttctgcggggatcttaatgaataacgcttttgttactgatggtggaaggggtgattggggagatcaaagaacctttatttccagagatggtggcttgagttggagagtagcattcaattcttcttctttatttgctgttggtgattttggcaatgtaatagtatctgtgccagaatactctgaagaagacggtgatgggatttctaaattctattattccttagatcaaggtaagacttgggccgagtaccagttgggggccacgattttctctacgtggctgattaataccacgccagatggatcaggaagcaaatttgttttgtacgggttcagccaaacgggcataaccgatccagaatatctaacctatgctattgacttttcaggtgcctttgatggaaaaacctgtgaagatgataaagatttcgaagactggaatctggccgaagggaagtgtgtcaatggtgttaagtacaagtacaggagaagaaaacaggacgcccaatgtttagtcggcaaagtgtttgaagatctaaagctgtatgaaactagtacatttttgtctcatgatgatggacagacaacaaaaaagtttgacactaagaatgagaacattgtcgaagctatctccaacccatacttcaattaa

SEQ ID NO: 5687 - DNA, 288 bp, Saccharomyces pastorianus
atgaaactagtacatttttgtctcatgatgatggacagacaacaaaaaagtttgacactaagaatgagaacattgtcgaagctatctccaacccatacttcaattaacaattttgacatcgaggataaagcttctgtggctcccgaacaagaacacacgtcatatacggatcaggctgccgccagcgatattccagatgcgttgccggcacgcagtgaagaagacgcacacaagtctgacccagcagctccactcaacgagaacgattgggggatatatcttgtgtag

SEQ ID NO: 5688 - DNA, 2256 bp, Saccharomyces pastorianus
atgcctgcaccaaaactcacggagaagccagtctcttccaagcaagtacaggagaccatgagtgccagtgccagtgccagtgccagtgccagtgccagcacggccaaaggcgccaagacggatgaacaggaatatgtgtacaaggagcctagtgcgattaaaaaagtgctttactccgttgcgacgtggctgctttacaacatcttccactgtttctttagagaaatcaaaggccggggcagctacaaggtcccgcagcaggggcccgtgatttttgttgctgcaccgcacgctaaccagttcgtcgaccctgtgatcctgatgggtgaggtgaagaagtccctcaacagacgtgtgtccttcttggtcgcggagaactcattgaagcagcccgccatcggctttttggccagtttcttcatggccatcggcgtggtcagaccccaggataatttaaaaccggcaagaggcactatccgcgtggacccagaagactacaagaaagtcattggccgcgacacgcacttcttgaccgactgcgcgccaagggggctcattgcgctgcccaaatccatggggttcgtagagatccagtccatagagagtgatacgtgtttgactttgagaaaggagttcaaaatggccaaggccgaggtcaagaacactgttctcaacggcaccgtctacaagtatgccgacaaggtcgaccaatcttgcgtttaccacagagtcttcgagcacttggcacacaacaactgtatcgggatcttccccgaaggcgggtctcacgatagaacagacttgttgcccttgaaagcgggagtggcgatcatggctcttggctgcatggacaagcatcccgacgccaacgttaagatcgttccatgcggcatgaactactttcacccacacaagttcagatccagggcggttgttgaattcggcgaccccattgacataccgaaggaactggtcgccaagtatcacaacccggaaacgaacagggacgccgtgaaagagctgttggacaccatatccaagggtttgcagtccgtcaccgtaacatgttcagactatgagactttgatggtcgtccaggcaataagaagactgtacatgacccagttcgccagcaagttaccgctgcccctgattgtggagatgaatcgaagaatggtcaaaggttacgagttttacaggaacgagccggaaattgcggaactaacaaaggacataatgtcgtacaatgccgccctaagacactataatctgcccgaccatctagtggaggaggccaaggtgaatttcgccaggaatcttgggcttgtcttcttcagattaatcgggctttcaatcctcttcgccctagcaatgcccggtattattatgttctcacccgtgttcatcttagccaagaagatctcccaggacaaggctcgcaccgcgttatccagatctacagttaagataaaggctaacgatgtgattgccacatggaaaatcttaatcgggatgggattcgcccccttgctttacatcttttggtccgttctaatcacctactttctcagagggcaaccgtggaacaaaatctacatcttttctgggtcttacatctcctgtgtcatagtcacgtattccgccttgatcgtaggcgacattggtatggacggtttcaaatctttaagacctttagtcttgtctttaacctctccaaggggtctacaaaagcttcagaaggaccgtggaatcttggcagagaaaatcatcgaagttgtcaacaactttggaagcgaactattccctgatttcgatagcgccgccctacgtgaagaattcgatgttcttgacgaagaagaagaagaagaagacagaaagacctctgaattgaaacgtaggaaaatgttaaaaaagcaaaaaattaaaaggcaagagaaagatttgccatccttcagtgacaaaaatgaccacgatgacatttatgaacaccataatcaagattcagatggcatttcgttggtcaatagcgacaactccctctctaatatcccgctattctccaccaccttccaccataaatcagagatttctttggcttcaacatccgttgcgccttcctcgtcatctgaatttgaagctgaagacgaagccctcgaagaaaaaaatgggttggctagtaagattgcacaagctgtgctgaacaagagaatcgacgaggatgctgcaagggaagaagaagaagacggagaagcgtag

SEQ ID NO: 5689 - DNA, 150 bp, Saccharomyces pastorianus
atgggcgattggaagggcagcgacagctggcctgcgccagcaagaaaaacgtcgtgcgtctccagggcggtcttgcactccaacgtgcggtggaagtggtgggcaaagtcgacgctggagagggcctccagctgctgcttcggcacgtag

SEQ ID NO: 5690 - DNA, 1227 bp, Saccharomyces pastorianus
atgtttcaaagatccggggctgcccgtcacagcaagttacttttgcctcgaaagtgccgctttaaatcctcatttgcagtcgctctcaatgcagccagtagattggtaactcccaagattctttggaataatcctatttccctagtctcgaaggaaatgaacactttggcgaaaaacatagtcgctctgattgggtctggccatccgctgcttaacaaagttactagttattactttgaaacagaggggaaaaaagtacgtcctctattagtcttgctactatcgagagcgctttcggaaatccccttaacagaaagaaaccatttgaagattgaccgtgcagatgttcctgaggacccaatttactccaagccgggccaaaatcaactctttcagcgtcccgtaagtagtatttcgccacttcatatacttcacggtattaaaccactaaatcccctgacgaaaggtccggaacctttgctagaaaaagccttcgataaagaaagaggcatcttacccaagcaaagaagattggcagagattgtagagatgattcatactgcatccttgcttcacgatgacgttatcgactattccgatacaagaagaggaaggccaaccggcaacgctgctttcactaacaagatggctgtattggctggtgattttctcttaggaagggcgacagtatcaatttcgagattgcataaccctgaagttgtggagctgatgtctaatagtattgcaaaccttgtcgaaggcgaattcatgcaattaaagaatacatccatcgatccagacacagatactattgaaaatggccataaactgcttccggttccctctaagaaacttgaagttaaagagcacgaatttcgtgttccaagtcgtcaacagggactacaattatctcatgaccagctaatagaaactgcgtttgagtattacatacacaagacttatctgaagacagctgctttaatttccaaatcgtgtagatgtgccgctatattatctggttcaacaccagccgtcgttgacgaatgctatgattttggtagaaatcttggtatatgttttcaacttgtagatgatatgcttgattttacagtctctggaaaggacttaggcaaaccatcaggtgcagatttgaaactaggtattgctacagctccagttttatttgcatggaaagaagtccccttagtgagggttaatgcggccgcg

SEQ ID NO: 5691 - DNA, 312 bp, Saccharomyces pastorianus
atgtctgctaacgattattatggtggtgccgccggcgagaaggccgagtactcccgtccctccaacccccctccctcctccactcaccaggcaacacccaagagcgtgggtacccaccgcagcaacagcagcagtactaccagcagcaaccgcaacagcaacagcagcccggatactacaatcaacaagggtacaaccagcaggggtacaatcaacaaggatacaatcagcaaggatacaatcagcaagggcaccagcagcctgtctacgtccagcaacagcctcctaaaaagggcaatgaaggttgcatga

SEQ ID NO: 5692 - DNA, 717 bp, Saccharomyces pastorianus
atgtcagtgacttgtgaggatgacatagatcgaatcataaagtttgttgctgactgcaatgccaagtttgaaaattcaaagtgcgatataagagaatctgcccttggcgggttgggcgtctttgccaagtccgacattgcgcagggcgagacaatattgacgctgaataagtcctcaattttctctgcatctaacagctccattgccaatttgttatgcgataacgatattgacggtatgttggcgctaaacatggcatttatctacgaaatcacagttttcaagaacactagtcattggtactcctttctgcgaaccatccggttccacgatgataaaggccgcttgaatctaccgccaagcttttggagtacaaatggcaagaaacttttgaagggaactagttttgatactttattcgatgctttggcaccagaggatgaaatcatacaaggatttgaaaccgccgtaaatctggcacacaactggaatgaagaatttggattggaggtacctgcagaattcttccacattgatgagaagcagcgtgaaaaagattataaattgaagctagaaaggttcatttcggtggcatacacgttatcgtcaagggggtttgaaatcgattcgtttcatgaaacagcgctagtccccattgcggacctgttcaatcaccatgctacaaaacctgatttgaagttttgtatcgttgtatga

SEQ ID NO: 5693 - DNA, 507 bp, Saccharomyces pastorianus
atgtgcaaacacctgatagcggaggaattcctggaagcaaaggaacaagagaagcatacgcctgcgacgggcggtacaggtactgctactattgacgataacttaatcaataggctcgaaaataatttggaggacgcatgctctaataagagcgcggatgacgaagacgatgatgatgatggtatactaaacccagacgaatgcgttgacttggtgctaaagaacgatgtaagccagggtcaggaaatatttaattcatatggcgagctgtcgaacgtttttctattggccagatatgggtttaccatacctggaaaccaatatgatattgttcatttgggacccgattttttggaaattttcaggaaagatgacaaacaccaggagaaagttaagtggtggagccaagtcggccatggattgttttctgcatggtacgctcaaatgcgccaggaagaagatgagacgaacagaacgaagcggggatcctctagagtcgacctgcag

SEQ ID NO: 5694 - DNA, 450 bp, Saccharomyces pastorianus
atggagaaaccatcctttttggaccaagagccgccggcaggttacgtaccaggtattggtcgtggtgctacaggattttcaaccaaggaaaagagaagggtctttgatgataatggaggcagaaagataccaaaacgataccgcgaagacatcagctctaatcaagaacgtcaaactgaaaacgacgaagatgaggaagctgcaaaagtatttgaaaagcttgagctgaaattagcacaaaaaaaaaagaaaagaaacaatggaaataacgataacgatgaagctgatggctccgctgtgaaaacgcaatttgcagacctgaaagaatcattaactactgtaactgaggatgaatggatgaacattccagaagctactgattttacgagacggaacaaaagaaatagaatcccaagagcaactaaacagaaagacttatgccgcacctga

SEQ ID NO: 5695 - DNA, 1128 bp, Saccharomyces pastorianus
atgaattacatgacttacgattatgatccccaacattgtttggaaacgtcctttaataatttggcgtttcacccgcatcaacaatcacaacagcaagggttatatgaagctggagaaaggaatgatgccaggccgggactaatgaacccgttaggacagtccaataaaatgaataataccatgattcctcaaggttcatcggctaatccattaggaggacagcataacttgaatagttcggcaaacttcaacatgcctacatcaatgaatacctacaactatcagaatgtaccacaggcgccagctagaaatgctatgaaccacaataacatcatgagtggggcaactgctaacgattattggctggatccaatgagtaatatgtcgaacaataacaaagaggccaacggaaatcccaacgactcgatgtcttcgatgtccaatatgactgctaaaacttcgatcaacagcacggcgttcaagaactcatttgttcctttcaatcatgtagcaactcttccaatgactaacgtaaacagcaatgagacgaattcgaacaaagacgaaagaatggaaactatggaagtgaaactacaaataaaagaaagccaaattgaatcgctagagaatgaaattcaaaaattaaagaaaatttttaacgaaggcttaaattacaaacagaacgaatacaagtatgaaaaggaaaactcccatataccccaagcttttgagttgcctgcttcattagaagtgatatttagaaagctatcatcatcacttcattcaaaagagaaagagctagcagatacaaaggagaatttagagagtatattaactgcactggctctaaacccaacaaattcagtgaccaaatatggaagatacgatgcagaatccattgctcacaaaatggtggtaaggctagagaatctaaccaatgaaaacaaagaaatggccaagatgttggcctatggcaggtcaaaagaaactcaaatcgagctacagttgtctaaaaaagaaaatctagaattaagggaaaagatagcattcttagagacccagttggctatgaagataccttcaaaagaaataccgacctgcagcatgcagctgcatgcgtcgtttaca

SEQ ID NO: 5696 - DNA, 1440 bp, Saccharomyces pastorianus
atgccattatcagaagactttggatcttctggtaagaaagaaacctcgccggattccatttcggtacgttcctttagtgctgggaacaaccttcagtcattgacaagtgaaaaaagttattccagagactcaaccgggaacgacaaacttatacatagatttgtggactcatttaagagggcagaaagtagcactacaaagaccaagcaaataaacaagaacacttcagatttagaagaggatgttcattcctttacgtcggactccgacttgaaaaagtccatgaaatcccgtcacgtcgtcatgatgtcgctggggacaggtatcggtacgggtcttttggttgctaatgctaagggtcttcattacggtgggccagccgcattggttatcggctatgttttagtttcctttgtcacatatttcatgattcaagctgctggtgagatggctgtcacttatccgactctaccagcaaatttcaatgcatactcctccatattcgtctccaagccgtttgggttcgccacagtatggctttactgtttccaatggctaaccgttttacccctagagttaatcaccgcatccatgacagttcaattttggaacgataaaatcaatgctgatattttcattctaatcttctttgttttcttacttttcgtccatttctttggtgtgaaagcatacggtgagacagagtttattttcaactgttgtaaaattttaatgatagcgggcttcatcattctttccgttgtcattaactgtggtggtgccggaaatgatggttacattggtggcaaatattggcgtaacccaggtgcatttgctggtgactcttcggcttccaggttcaaaaacatttgctatattttagttaccgcctatttttcgtttggtggtatggaattatttgcattaagtgttcaagaacaggagaatccaagaaagtcgacccctgtggcagctaagagaagcatataccgtatcctcattatctaccttttaactatgattttgattgggttcaatgttccgtataatgatgatcaattgatgggatctggcgggtccgctacacacgcatctccctatgtgttggcagcctccatccatggtgtcaaagttgttccacatattatcaatgctgttattttaatttctgtcatttcagtgtccaactcctccctatatgcgggcccaagattaatgtgctctttggcccagcaaggctacgcacccaaattcttagattacatcgacagagagggtagaccattaagagctttaattgtgtgtagtatttttggcaccgttgcgtttgtcgcagcctcgtccaaggaagaggtcgtgtttacatggctagcagccatcgcaggtttgagtgaactattcacctggacttccatcatgttatctcactttcgtttatag

SEQ ID NO: 5697 - DNA, 2754 bp, Saccharomyces pastorianus
atgttgtctagagtatctttattgagaaactcaagagcctttcagcaggccaaatggcgcacttatcgcttccaggtttcgccaactgtacatgcttcatactaccacatcctgtctggtgggaaacttgctcagtctattcgtgaaaaggctgatgacgaaataaaatccattaaattgaaacatcccaatttcaagcctactttgaaaattattcaagttggaggcagacccgactcgtccacctatgtgagaatgaagttgaaagcttcgaaggatagtggcgtggactgtgtcatagagaaatttccaccagaaataaccgaactcgagcttttgaagagaattgccgacatcaacgatgacgaatctattcatgggctgttaattcaattaccattgcctcgtcatttggatgaaacaacaatcacaaatgctgttgactacaaaaaagacgttgatgggtttcatagatttaatgctggtgaattggccaaaaagggtggtaaaccatactttattccatgtactcctcacggttgcatgaagttactcgaagaggctcatgtcaagttagatggaaagaacgccgtagtgataggtagatctagtattgtcgggaacccagttgcctcgttattgaaaaatgccaatgcaacagtaaccatttgtcacagtcatacaaagaatgttgctcaggtagtttcccaggctgacataattgttgcagcttgcggtatgcctcaatacgttaaaggagagtggatcaaagaaggtgccgtagttatcgatgttggtattaactatgttcctgataatagcaagaaaagcggacagagattagttggtgatgttgaatttgactctgtaaaggaaaaggcatcttacataactcccgttcctggtggagtggggccaatgactgtggctatgcttgtttctaatgtactcttagccgcaaagagacagtttgtggaatctgaaaagcttccaactatcaatcctcttcccctacacctgaaaacaccagttccatcagatattgatatttcaagagcccaaagcccaaaacacatcaatcaagtggccgaggaattgggtattcactcacacgaactggaactgtatggccattataaggcgaagatttctccaagtatcctcgaaagattagaatctcgtgagaacggtaaatacgtccttgttgcgggtattaccccaaccccattgggtgaaggtaaatccactacaactatgggactggtgcaagccttatctgcccatttaggcaaaccttccattgcgaatgttagacagccctccttgggccctactttgggtgttaaaggtggtgctgccggtggtggttacgctcaagttattcctatggacgagttcaacctacatttaaccggtgatatccacgctattggggccgccaataacctgcttgcagctgctattgacaccagaatgttccatgaatctacccagaagaacgacgcaacattttataagagattagttccaagaaagaatggtaagagaaagttcaccccatctatgcaaagaagacttggaagattaggtatcaataagcaagaccctgataccttgacgcccgaggaaatcaacaaattttccagactgaatatcaatcctgatactatcacaatcagaagagttgtcgatatcaatgacagaatgttgagacaaattaccattggagaagctgctacagaaaagggcctcacaagaactactggatttgatatcactgttgcctctgaattgatggctatcctagctttatccaaaaacttgcacgaaatgaaggaacgtattggacgtatggttattggtgccaattatgataatgaaccagtaactgtagaagacgttggttgtactggcgctctgactgcattgttacgtgatgccatcaaacctaacttaatgcaaacgttagaaggtacacccgtaatggtccatgctggtccttttgctaatatttctatcggtgcatcgtcagtcattgcagacttaatggcattaaaacttgtaggcacagtcaagaacccattaaacaccaaggacacccatgaacctggttatgtggtcactgaagcaggatttgattttgccatgggtggtgaaagattctttgatatcaaatgtcgttcctctggattagtaccagatacagttgtcttagtcgctacagtaagagccttaaaatctcacggaggtgctccaaatgttaagccaggacaaccattaccaaaggaatacacagaagaaaacgttgatttcgtcgccaagggtgttaataacctggtcaagcaaatcgaaaacatcaaaactttcggaataccagttgttgtagcaatcaacagatttgaaacggactcacaagcagaaatcgaagtaatcaaaaaagctgcattgaacgcgggagcatctcatgccgttacttctaatcactggatggaaggtggtaaaggtgcattagacttggctcatgccgtggtcaatgcaacaaaagaaccaaaaaactttgaatttttgtacgacgtcaacaactcaattgaagataaacttactagcatcgttcaaaagatgtatggaggagcaaaatcgaagtttcaccagaggcccaaaaaaagattgacgcttataaggaacaaggattcggtaatcttcctatctgtattgctaagacgcaatactcattgtcgcatgatccatctttga

SEQ ID NO: 5698 - DNA, 81 bp, Saccharomyces pastorianus
atggatgctgcacaactaaaaagtcaaatacaacaataccttgtggaatcaggaaactatgaattgtatgatacagcataa

SEQ ID NO: 5699 - DNA, 528 bp, Saccharomyces pastorianus
atgaatccgggcggtgaacaaacaataatggaacaacccgctcagcagcaacagcagcagcagcagcaacagcaacagcagcagcaacaggtacaacaacagcaggctgcagttcctcaacagccgctggacccattaacacaatcgactgcggaaacatggctctccatagcttccttggcagaaactcttggcgacggtgatcgggctgcaatggcgtatgatgccactttacaattcaatccctcttccgcgaaggcgttgacctcactggcccacctataccgttccagagacatgtttcaaagggccgcagaactctacgaaagggctttgcttgttaaccctgaactatcggacgtatgggctaccctgggccattgttatctgatgctggatgacttgcaaagagcttacaatgcctaccaacaagcgctatatcacctcagcaaccccaacgtaccgaaattatggcatggaatcggtattctttatgacagatacggttccttggattatgctgaataa

SEQ ID NO: 5700 - DNA, 2142 bp, Saccharomyces pastorianus
atgggtgaatggcagggcgccaaagaggcctacgaacatgtcttggctcaaaatcaacatcatgctaaagtgttacaacaattgggctgtctttacggtatgagcaatgtacagttctacgaccctcaaaaggcattggattatctcttaaaatcattggaggcagacccttcggacgccactacatggtaccatctgggcagagttcatatgatcagaacggactacaccgctgcatatgacgccttccaacaggccgtcaacagagattcaagaaacccaatattttggtgttctatcggtgtcttatactaccaaatctctcaatatagggacgctttagacgcttacactagagctataagattgaatccttatatcagtgaagtttggtacgatttaggtaccctttacgaaacctgtaacaatcaactatctgatgccctcgacgcttataaacaagctgcaagattagatgtaaataacattcacatcagagaaagattagaggccctaaccaaacagctggaaaatccgggcagcaaatcaaatggtgctccttcaaacgcttctcccgcaccaccccctgtgattttacaacccaccttacaacccaatgatcaaggtaatcccttgaatgctaggatttcagctcaacctgctaacactgctgcatcaatggttcaacaacagcaacatccagctcaacaaaccccaaccaactcttctgccacaatgtacactaatggagcttctccacaattacaagcacaagcacaagcccaagcccaagcccaagctcaagcccaagctcaagcccaagcgcaagcccaggcccaagtacaagcacaagcacaagcacaagcacaagcgcaggcccaagcacaagcacaagcgcatgcccaagcacaagcacaggcccaagctcaagcacaagcacaagcgcaagcccaagcgcaagcacaagcgcaagcacaggctcagcagcagcagcagcagcagcgacaacaacaacaacaacaacaacaacaacatcagcagcagcagcagcagcaacaacaacaacaacaacagcaacaacatcaacagcagcagcaacagcagcaacaacagcagcagcaacatcagcaacagcatcagttgcaggctttaccaagacaacaacagcaacaggccgttcctgtacaaatgttgaacccacaacaaggccaagcttatgtcacccaaccaaccatcattcaagcacaccaattacaacctttctctgcgcaagctatggaacatcagcagagttctcagttgccatctcaacaacaactacagtctattcagcatcaacaacatcttcagccccaacctcaggctccacaacctttaattcaacacaacctggaacagaactctttgccccaaaagagatacatggaaggcgccattcacaccttggtagatgccgccgtatctagtagcactcacccagaaagtaatagaaattctcctcaccaactaccacccgccatatcgaatcaaacctctgcagtaataactccgagcattgaaccacgatcaaagaagcaaagactaaattcttcaggttcaaatatcagccagttagtaaatactgcttcttctatcgaggagaattcaacgcctgagacgactaacccacaacctgcagtagcagaatctgatgttcctgtacaagaggagatacccacaaaggcaagttcaatcccttcaacaatccatgctcaagaactctcacaagaagccactaacaacgaacagattactaaaacatcttctgctcctcctcccatggaatcgtctaacgtggaggccaagccagctaatgtacaaccgactttatcgtcagaaaattcaacgacgaaagggaatgaagaaggtactgctgagacaatcaaactttcgactactactagccctaccgaggaaactccagtagaagacgacgtgggacgggacactaaagagggaaacggcactccaacccaaccagttgcatcctctgccgaggaaacagaccctacagctgctgtggaaactgaaccacaacaagatgaatctctcgctacaacggcaacggtaattaagcctacgttggaaacaatggaaccgtaa

SEQ ID NO: 5701 - DNA, 201 bp, Saccharomyces pastorianus
atgtttccgcagtcgattgtgttaatgggtccagcggctgttgaggaactgcagcctgctgttgttgtacctgttgctgctgctgttgctgttgctgctgctgctgctgttgctgctgagcgggttgttccattattgtttgttcaccgcccggattcattttttcttttttaccagtgttcgtggttgctgctggtgtag

SEQ ID NO: 5702 - DNA, 111 bp, Saccharomyces pastorianus
atggctttttgtatactagcgtgctttgtggagacattaagcggcaattccaaacttggaattctaggtagatctaatgtaaattcatctgctattaccggcggtgcttga

SEQ ID NO: 5703 - DNA, 189 bp, Saccharomyces pastorianus
atgcatatgcaaactggaccctttgtatatatatatacgctatgtataaaagaagaagaggaacgcccgcaaacttccacacacaaacttccacacacgcaattgcagtatttcctatggagctcggaaacaggagcgcagcctatgcaaacaactattgatcttcctgttttcatacacacaatgtaa

SEQ ID NO: 5704 - DNA, 819 bp, Saccharomyces pastorianus
atgacttttgtacagcagtttcaagaggcaggtgaaaggtttaagtgtctcaatggccttttatgggttgtttttgggcttggtgtcctgaaatgtacaactttatcgttaagatttttagctctcatttttgaccttttcgttttgccatcagttaactttgataaatacggcgctaaaaccggcaaatactgtgttgttactggtgctagtgatggtattggtaaagagtttgctaaacaaatggccaaacggggatttaatttggtattgatctcgagaacccaatcaaaattggagactttacaaaaggaactggaagacaaataccatgttattgtgaaaattctggcaattgatattgcagaagatagtgaatctaactacgaatccatcaaggaattgtgtgcggaattaccaattaccgttttagttaacaacgtcggccaatcacattccattcctgttccatttttagaaacagacgagaaagagttgagagacatcataactatcaacaacactgccacattattgattacacaaattgttgtaccaagaattacggaaaccgtcaaagctgaaggtaagaaatcaggccaccgtggtttagtcttgaccatgggttcattcggtggattgattcctaccccatttttggctacgtacagtggttctaaatctttcttgcaaagttggtctaactccttagccggtgagttatcaaaggatggtatcgatgttgaactgatcatttcttatttggttactagttccatgtctaaaattagaagatcttcgttgattattccaaaacca

SEQ ID NO: 5705 - DNA, 837 bp, Saccharomyces pastorianus
atgaaaaaggaactgaaatttctcataatagcaaatgtcgtgctacttttctccataatacactatacctttgatttgttgacgttgtgtatagacgatgcctccaaagatgcgttattagacgaagagctgaacccagtcaaggaccctaattcaaagttcaatgaaactcacccacaactgataccgaaaattatacatcaaacgtataaaacagagaacatccctgaacaatgggtaaaaggcagacagaagtgcgttgacttgcacccagactacacctatattctatggacggatgaaatggctgaaaatttcatcaaagagaaatactcatggtttctcgatacattcaagggttacgaatacccaatcgagagagcagatgcaatacggtatttcgttctttcgcattacggtggtatctacattgatctggatgatggttgcgaaagaagattagattctttgttgactgtgccggcattccttaggaaaacctctcccacgggtgtgtctaatgatgtgatggggtctgtacctagacacccatttttcttaaaagtcatcaaatctttaaagcactacaacaaaaattggtatgttccgtatatgaccatcatggggtcgacaggccccctttttattagtgtcatttggaagcaatataaaagatggtcgaacacagccggtgacgatgcagtaagaatcttacaaccggcagattacaagatgcacaccaactcgtttttctccatatctaaaggttcttcgtggcatacgggtgatgctaatttcatgaaagttctagaaaccacattttatcctgtgtggtaa

SEQ ID NO: 5706 - DNA, 1770 bp, Saccharomyces pastorianus
atgctaaatcgtgctattactaataaatatggattttcttttcatcttaggaggtttgtccactcaaatgataaatctcttgatgaactttctactttctctttgaagaacagccacacgcatgatgtttccgtcggtgattcgagcagtgttttgagtgattccgacatcgacaagattaataatttggcattttgtgattataccagtgcccccaaagaggcaaacactaaggaaggtacgttgttggatgagaaactagccaatgtcaaaaacttgttcggagcagaccctgaaaatcgggcatttgtcaattacaagctccctcaaggcttaaaaaatccctacattgatattcagttgaaccaattaaaaaggaaaaggctatctgtcacacagttatgtaccacccaaaactggtgtgaattaagaaacttttacgatttttactcccaaaatttgtctagtcagctactagatttgaagttccagatccagaagggtaagaagattcataagtcactggaagacgaaactcatcccgaattaaatcagtataatagtttcgtacaggatttccttcccctgaccaacttggctatggatatcgacagtgatatgaacactttgctggataattggtgtagttcgatcagcagattaatctctttatttaccagtggtggtggccattcaagagaaatcatttgtcatggcttcattaatatccaaaacggtaagctagtaagagatttgaccaaagacggaaacacctcagaggaaagcgttataatatcaggcatcattgatcacctgacttttagaaacaagcgtaatcatcaagtgcagaaacgtacaacaggtctcgaccgggaagatcaaagttgggatagcatccttgctaaattactatcagacctaccaaccttgaaatcaaacaatgaaattgtcatctctgatatcaagaccaggtcagtaccgaaaatgccttccattgagtcggtcgtacaatcgtctaaattacagacaatgtattataagtattttctttcccatttaagccaagatatgacccaaacctatcatagctttttaatcaatgcccagagaagagggctcgatgttgacgcgcctatagattctacgaagattctaactttcatattgacaaacccgcttttcgctaatgacatggatcacctcctggatggaaaaccgatacactttgccccatttgataacgacaccaaaaaacctagtacattcgatatgacggcatttaataatttgctcgatcaaggttccacatcctttaccataccaacagaacaagaggaagacgatttggaaccaacaaaatgcatatctttacaagactataaacgtttttatacaaaatggaagaccccaataactctaaaatattttgccgcaagactgtcacagatttattatattgtcggaaatctcgtttccaatgacctgatgatagaatactattatcataatgataacttccataataccatattcccgtatgatccagtgaaattggaaaaacacgctcatgatgtagcaatggtttggttcggtcacagagatatgaatccaattgaacctgttcagaaaaaattcaatctatactgtaaatattgcgactacaaacacgtctgttcttggaagaataaaaacgagcttaaactggctgatttgggcaaagaattacaaaaaatcattctcgattcaaaccaacataatttaagttcctaa

SEQ ID NO: 5707 - DNA, 792 bp, Saccharomyces pastorianus
atggaagccagatatacagacccttcaaaactaccaaaaggtactcctgtaactattgccaaatggaactttactggagttaatgttcctgaaggtcaagattctgttcccgttaaggtaaagctaagatgtgatccatccggcttgcatattattgaaagtgcttatactttagaagaaattacagttcaagagccagtacctttaccagaagatgctccagaagatgctgaacctgtgtttgaggaggtcactaaaacagtcaagaaggatacactgggtatgacagtggaaacgtttggcttgaatccggttgaactgaacaatctaatcgaaaaagaaaatgaacttacaaaccaagataaactagttgcagaaactgaggatcgtaaaaatgcccttgaagagtatatttacactcttcgtgctaaacttgatgatgagtattctgattttgcatccgatgcagagaagaaaaaattgaaaaatgcgctagctacgactgaagattggttatatgacgacggtgaagattctaccaaggcaaaatacgtcgccaaatatgaagaactggcttcgttgggtaacgttattagaggaagatatttagcaaaggaggaagaaaaaagacaggcgttgagagcaaatcaagaaacctcgaagatgagtgatattgctgaaaaattggcggctcaaagaaaggcgcaagccggaagtggcgatgatggcgaaaacactgacgaaaacatggatcttgattatctatatactcgacatttagcttccgtttag

SEQ ID NO: 5708 - DNA, 1161 bp, Saccharomyces pastorianus
atgagtacaccatttggtttggatttaggtaacaataactcggtcctagcagttgctagaaatagaggcatagatattgttgtcaatgaggtgtctaataggtctaccccatccttggttggttttggtccgaggaatagatatttgggcgaatccggtaagacaaagcagacatcaaacgttaaaaataccgtggaaaacttgaaacgaatcattggactgaatttcagggatcctgaattcgatattgagaataatttttttacatcgaagttagtagaactgaaaaatggcaaagttggcgccgaagtcaagttcggcggtaaaacacacactttttcggctactcaactgactgctatgctcattgacaaagttaaacataccgtccaacaggaaacaaaatcaacgatcactgaggtctgtcttgctgtccctgtatggtattctgaagaacagcgttataatatagctgatgccgctagaattgcaggtttgaatcccttaaggattgttaacgatgtcactgccgctgccgtatcatacggtgtgtttaagaatgatctaccgggccctgaggaaaaaccaagaattgttggtttggtggacattgggcactctacctatacttgctccattctggatttccgcaaaggtgaattaaaagtactaggtaccgcttacgacaaacactttggtggtagagattttgatcgtgcaatcacggaacatttcgctgatgagtttaaagccaaatacaagattgatattagacaaaatccgaaggcttacaatagaatcttaaatgctgccgaaaaattgaagaaggtactctctgctaacaccaatgcccccttttcagtcgaatctgttatggatgatattgacgtttcctcacagctgactcgcgaagaattagaggagttagtaaaacctttattagaacgcgtgacagatccaatatctaaagccttgtcccaagctaaattgactgttaacgatgttgattttgttgaaataattggcggtacaacccgtattccggttctgaaacgatcgatttctgatgcctttggtaaaccattgtcttccactttgaatcaagatgaagcggtcgctaaaggtgcggccttcatatgtgccattcattctccgacttga

SEQ ID NO: 5709 - DNA, 198 bp, Saccharomyces pastorianus
atgggaagatttcgttgggattatccagaaaactctgtatctggcttttggggcgaaacaacctcgaccatcgactggtgcgaagagaactatgtggtctctccatatattgcagaatggtcaaacactctcacaaacagtgtgtttatactttcagccgtatatacaacctactccgcatacaagaacaagctggag

SEQ ID NO: 5710 - DNA, 171 bp, Saccharomyces pastorianus
atgtccagtaactccttcactaacttcaaattggccactgaattatcagcttggtctaaattgcaaaaaatttacgaatcccaaggtaagactttgtctgtcaagcaagaattccaaaaggatgccagcgtttcgaaaactaaacagactttcaccaatacgacgttctaa

SEQ ID NO: 5711 - DNA, 1878 bp, Saccharomyces pastorianus
atggagccaatcgaagatctactttcagagcttactgatgcgttcaaaactcaaaaggaggaccttattgcgctggtaacactaatcgatatttatagtgaacaagttgaccaggaaggcacgtttgatgagaaggctaaattcattgaaaccctaaggggattgttagaggagaatccgaccattactggtgaaattggctgggatgtacccaaaggcctattaaaattcttgtcaaaagagaatatcgatgtaagcaaagtattatgtgttaataatattattcacggtgtaatgaggtgtttctatgtaatttcgattcatggagaaccaaaaaaatgtctggttactggtttggaattgctttcagccctttctgttgaagatgtttctgaaaacaatgatcaacaaaataaagaggagtttgtcaatgagcaagctgctgcgccagctcctgcagaaacggttactaaaagttctgatccgagcgacagttcttattatggtgaaaggaaaaacataaaggaattctttttaacgttgaaagcttacattctatttgagtttattggagcgaacctcaaaagaatctccactttgtatccttcaaaatacctaggagctgctgtggcaacgattgagaaattcgtttatgaccacgctgattcatttgaagacgcacttttccttcttcgtagggtttatacattttgcaggaattacatttccccagacacgccgaaagatatacagttaaacgcacaatttactcaagaaatgcttgataaagtagtagagaaagaaagcgagttacaagtgagacttttacgtaggctctgcacatttggaatttcgtcgcctatcaaaactgtcaacaccaatcctgatacaaaatactactgcgcactaaatcatcaaaagtttcaaccaacggtatattacaccgaactgcttgagttatattgtaggttttatcaactggcgtattcgcttgatgttgatataaaagcagaatttcagaacgtattaaaagaatgcagaataatttacaaatctgtaccacaagagactgacgctgttaatgatgaagcgaagttggtcatggaaagaatggtatataaactagcttatacttttgaagtacaaaaggctgcaaaagaaaggagcgttggcttagatcttaatggtattgttttgttttctggtatcaattatttagagaccaatgaacatctggtacagaaaattacaatcacggatgccatttatctttacttaagatttaccaccccttcattatattccaaagtgtaccatagtgtagcagttgaatctgttaatcgttattggctatggtatgcaatcacaactgagtctttggaaaatgttaaaacggaactcaaaaatctttcagtatttgttacaaaagctttgttgcaggttctacttattaagaattgtgttcaagtcaatcgccagttacgaatgataactttcaccctcctcacgagactactatgtttggttcccgagaacgttgcatttgactttattttggatgttctcaagatatgtcccttcccattgggcaaaacatctgtattgtgtatcctaaaagatctttcaaggcaacgcgtttccaaaagagatgataatcctgaaaccagttcaatcagtgaaggactgtcaaagctgggaatcaatgaagatcaaaagcccaagaaaagaaacatcaaatattatattcaattagatccttccaaaatggtagctgtccatgaatgctgtttacgaactatccacgactcattcactacagacgctaagaaaggcgagatattgttgttatcgacttatttgattttctcatcgtactga

SEQ ID NO: 5712 - DNA, 219 bp, Saccharomyces pastorianus
atgacacagtcgtcatcgtccttaccatttgtagttttttttccagcatctgcactatacctgaaactcttccatcgttgtgccacctgttcagcgacctcagatctctttcttttggcaccactcattgatcctctttacactgatcgccatctgacttcttgtcatcgttattcttgtccgggctcatcatattacctatttttttccttttcataa

SEQ ID NO: 5713 - DNA, 1581 bp, Saccharomyces pastorianus
atgatgttttcgacctcgtcctcttcaataaattctgacatttcccaggtgctatcggaaaatattccaagtagatctactaccctcactagagactctacacaaaaccgaataagtgaagactgggatagcgaaggcttcaccgataagttgcccaagaaattgattcagttgaagaaactgaaaaacggcggtactacgattaaaaaggctaaggaggatttcgaatattgttacgattcattacggctgtacgaaaacccatatgtaacttcttctgtagataaaaaaagtggttacagcattgaactacgcctagatgacaagtacaaaacgttaatgttttcagatttgcaactgaataacgattttccattgtattacgattcctcattggaaaatataccaagacgcaatgaaagagaagccgtcacgcctttacaaataaagggaaaaattagaatacatattgacagagatgaccaggcgcttttaatcacttctcaatcaatttctttaaaatgcttcactaaagaatacgcgtgttttgttaattcgcaaataagtgaaaattccagcaatagacaaataattaagcaattaaaccatacagattttttcgagtcttccacttaccccaaacaacaattaaaagtcatacatcattcattgagtgacaagaaaattcttctagcaaaaggcacgtatgattacccatttacatttacacttcaagccaacacttttccggccacgttctcttccttctttggcaagacacatttccgaatagaaagttcgacttcgataatgagaataccaagtaaacctaaaggttttctcacttttctaaaaaatgagaatattacagacaaggttattttgacagaagagattaaggttaaaagagttttgccttcaacaaatatgctcaaatatgaaatgttccagctacgatcatacaacacagcaaatgatgtagtgatttctgttattggaaattccaaattaattgagatcggcacgcctttccaaatgatcctgtcgatcgtaaaagccgattcttctatcgatttacatgaaacctctttgacagtagcacaaagaatggcaatacccagtattgatttaaaaagcaaggatatattgccggaaccctatattaagaaatctgaatacctcctaaaaaccgtcgaaagtcaaagttttgattctgacaaaacagtatacgggttttgctttgacgacgttgttattccaaactacaccgaaggtctaccgagctggttcaaaacgttttactgcgaacctagttcattttatcccaattatgttgctctcaaagttactcatttacttttgttccgaattaattatagcaggattgaaatggtagaaggagtggaagtaaagaaaaattatcgcataacagtaaatttcccggttttgattggtgatagtgatatctcaaccagttctctgttgcccaggtatgaaaaattcgagaatattagcgatttacaagatgatcctccattatattcgatggtaataggtgaagacgtagatcccttaaattga

SEQ ID NO: 5714 - DNA, 1623 bp, Saccharomyces pastorianus
atgagtctcttgcaggtgtcacctttaccgcagatcaaggacgttgtgctaggagataccgttgggcagggcacatttgcctgcgttaagaatgcccatcttcaaatggatccctctgtaattctagctgttaagtttgttcatgtccccacttgtaaaaaaatgggactcactgagaaggacatcacaaaagaagtggttttacaatccaaatgctctaagcatcctaatattttgagacttatagattgtaatgtatctaaagactatatgtggataattatggaaatggctgatggtggtgacctctttgataaaattgaacctgatgtgggaattgatactgacgtaacccagttttattttcaacagcttgtcagtgctattgattatatgcatcggaaatgtggtgttgcccatcgagacattaagcctgaaaatgtcttattagataaaaacgggaacttgaaactagctgattttgggcttgcttcccagtttaaaagaaaagacggcacactacgtgtatccatggatcagaggggctctccaccttatatggcccctgaagtactctactccgaagcgggtttttatgcagatcgaacagatatatggtctattggcattctcctatatgtattattgaccggccaaacgccctgggaactaccgtcgttggaggatgaagattttgtcttcttcatacaaaacgatggaaacttgaactgggggccttggtcgaagatagaatttactcatttaaacttactccgaaagattttacaacctgacccagttaagagggcgactttggaagctttgaaagcgcatccctggatatcacgtagagtcgtatttgctggggatgacggcctctgtaatgatcctgacctcctagctaaaaaactcttttctcacctaaaggtttcattaagtaatgagaattatttgaaattcacccaagatgtaagttccaacagcaggtacatttctacgcagcctgtcggcaatgagttagctgaacttgaacatgattcagtgcattctaaggcaatagcgaatactcagcgtgcattttccatatatgattcgaatatgaatggtaacagtgatacctgcatgacacaagaggctaaatggacgcaatttataagtaatgatatggccgccttgcaattccattccgacgaacatgattttaccaaaccatttcaaaattgtttacagttcaatcccaataagcttactaaattttacacttttcaacctatggatattttgctgccgattctagagaaggctttaaacttatcacgaattagagtgaaaccagatctttttgcaaattttgaaagattatgcgagtcattaggctacgataatgttttcccacttatgataaacatcaagacgaaaagcaaaggtggttgccaattatctggtagtatttccatcatcaagattgaaggagacttgaaaaatgttggattcgaaaggaaaactggtgatcctttagaatggagaagattgttcaagaaaatttctaccatttgtagagatattatcttacttcccaaccaaataaaagaggaacccaaaaatacggtgattatgcattga

SEQ ID NO: 5715 - DNA, 468 bp, Saccharomyces pastorianus
atgagaacggccgtacggcagttgctggaagcaactgcttgcgtctccagagaatgtctcctgataaaaagaaaccacgaaatacgaagagcaagaaagcgcctactcagtgactggtacaggctgggtgctgacgcaaaccaggatacccttttggtagtcgcaaactctgcttggaggtttctcgccgtttggcgaccgttcgtaacctcaatccaacacgcaaccaaagaattgtttaagcaaatcgcctattaccttcttcatagcaacgtcgacttccaaagggtcgcggcactaatccaggtcataatgggggaggaccatttgcttttctccatggatgaggtcctaaaagaggtagtagaaatacaacaatacctcgataaaatgctcccgctcgacacccaccaatggcaaaagccatccccctttgagtctggaaacctgaaaactacgcattcataa

SEQ ID NO: 5716 - DNA, 348 bp, Saccharomyces pastorianus
atgttgtcgttagtctttgacttttctgtctcaatctgttctcgtactttggagtccctcatctggtccttgaccagtccctcggcttccagagtggacctgatcttcttgttgtccaggtcttgtttgcttgcctcatttagcagtgtcggtatcattgtttcactgcttttgtttaacctctccacttgtaacttggttcttttcctctcagcagtgctgattggcctctttttttgctgcttcttgccaacaccaccgttcttgccctggctcgtctttctcatgctgctcttgcccattttcttccttctgaatgtctttggtactctgttcctttttatgtga

SEQ ID NO: 5717 - DNA, 210 bp, Saccharomyces pastorianus
atgagaatccggttgcggtctcgagcatcagggatgattttctcccaggggcccaagttagccaattgccaatctgtgacaaatgcatcatctgaaaaaactgcttggacacaactcgtccttagaaaaagtgaaatgaagacacacaccagggccgtacacgttatcttcattgttgtgtatggggcagtagtggggtgtgaacgctga

SEQ ID NO: 5718 - DNA, 141 bp, Saccharomyces pastorianus
atgaatcaatacttgtttggtaatgatgtatggaatactccgtactatttttactgtgataaggattgtaacgatttcttcagaaccattattaaaggaaagaattccgttatgcaggtggatcctactgaaaatttatag

SEQ ID NO: 5719 - DNA, 1437 bp, Saccharomyces pastorianus
  modified_base (1342)..(1401): a, c, g, t, unknown, or other
atgtctttatcatcaaagttgtctgtccaagacttggacttgaaggacaagcgtgtcttcatcagagttgatttcaacgtcccattagacggtaagaagattacttctaaccaaagaatcgttgctgctttgccaaccatcaagtacgtcttggaacacaacccaagatacatcgtcttggcttctcatttgggtagaccaaacggtgaaagaaacgaaaaatactctttggaaccagttgccaaggaattgcaaactttgttgggtaagaacgtcactttcttgaacgactgtgtcggtccagaagttgacgccgctgtcaaggcttccgctccaggctctgttatcctattggaaaacttgcgttaccacatcgaagaagaaggttccagaaaggtcgacggtcaaaaggtcaaggcttccaaggaagacgtccaaaagttcagacacgaattgagctctttggctgatgtttacattaacgatgccttcggtaccgcccacagagctcactcttctatggtcggtttcgacttgccacaacgtgctgccggtttcttattagaaaaggaattgaagtacttcggtaaggctttggaaaacccaaccagaccattcttggccatcttaggtggtgccaaggttgctgacaagattcaattgattgacaacttgttggacaaggtcgactccatcatcattggtggtggtatggctttcaccttcaagaaggttttgcaaaacactgaaatcggtgactctatcttcgacaaggccggtgctgaaatcgttccaaagttgatggaaaaggccaaggccaagggtgtcgaagtcgtcttaccagtcgatttcgtcattgctgatgctttctctgctgatgccaacaccaagattgtctctgacaaggaaggtattccagctggctggcaagggttagacagtggtccagaatctagaaaattattcgctgccactgtcgcaaaggctaagaccattgtctggaacggtccaccaggtgttttcgaattcgaaaagttcgccgctggtaccaagtccttgttggacgaagtcgtcaagagttccacttctggtaacactgtcatcattggtggtggtgataccgctaccgtcgctaagaagtacggtgtcaccgacaagatctcccatgtctctaccggtggtggtgcttctttggaattattggaaggtaaggaattgccaggtgttgctttcttatctgaaaagaaattctttcctcacttcacgctaaaaatgatagtttatttttttcttttctctttcctcacttctagactaaaaatgatagttaagattttgattnnnnnnnnnnnnnnnnnnnnnnnnnnnnnnnnnnnnnnnnnnnnnnnnnnnnnnnnnnnnaagatttttattagatctttcctcacttcacgctaa

SEQ ID NO: 5720 - DNA, 648 bp, Saccharomyces pastorianus
atgcgctataataattatgataactctggaaattcttttgtaactaaagtagttaaaaaaacagacataaagaaaatcgtattagaaaataaggacattggcggctggaaactaaacggtaagaggaaggcctataaggaacgtggaaaagtgtttgtaagctgttcatttattgaagtatctctttctcagataaacattgtggatattgaaaaaaaattccaaagtgcggagcaactaagaggcataacaagggacatgcttaatgagaaggattgttcctcacatgaaatagctccctcaaagaattgtgcaaatactacccgcggctctgaaagagttacctccagcggtggaataaaaacttttagaaacagtcagggccaaggccaaggtgatgatgggtctactacttcttcaaaaagacatactaaaacccccgcaagccgcccaaaaagagaaaaaagacaaactgttcttccaaacggtgagattaaagaatgtgccagatgtagagacacttggactattcagtggcgaagtggtcctgcacaaaatagggagctttgcagtccatgtggactcgcgtatggtaaaagaataaaaaaggaagaagacgagagaaaggggcaagcaaggaccagatga

SEQ ID NO: 5721 - DNA, 1233 bp, Saccharomyces pastorianus
atgagtagatatgagcgagatcgaagtcccggtcatgaccctgatatcgtgaagggttcatactcccaaacgtcccttaggtcactacatgaattaaattacaggcatcctgccggtataagcgggcttaactctgcaggaagtccgcagcagtcggtggcatccttatcgcaaatgcggctggaaagtttaactaaagataaaaattgggaggaagtggaagactttggtctggaggagttaagagacggatttttcgatgctgcatttactaaaccagataacaaaggcagatatccggacagtgccatcggagacgatgatgatacagcaaggaaaaaattgcagtcaagttttagtaatgtttttcacgacgtgtggacggctgtctataagccaatcatccgtttcccaagggaccttagggagaactgcgtatccttattcaagtttttcatcgcctattttgttgcaatagtgatttgcgtcatcaggccgtcaggtaaatgggttggccacgaatttaggtattttcttcctattgctgtactcatacaccatccggttagaaacgtcggtgtccaactggaaatgactttaagttccgtaatcggcgcaagttttggcctcggatggtccgctttggctttgtatgtgtccacagcgacgaaaccagccgctaactaccagggtgggattctattccaaagtctcaccatggctctttttttggccgtttggttaagatctatttatcgccgttttttctatgttgctgtctcgttctccctgtctattattttcacccatacggtccgattggtctcgtctaagaaagatttgcaatggcaaattttttgggatttcggaatctcttacttgtttggcctcctgctatctctcttggtatgtgtatgcgtatctccacacggtggcaatgccgagttgatggagcactacacggagtgcctacaaaccacaaagtcttttttaatggcattagttgatacagacttggttaatgacaaggaaaaaatataccaagcacaagtgaaaatggtgaaaactttgaacattgacctgtctcaaggttttagagatttcgttaaccaattgacgatttctaggtttgaccttcaatctttgaaaaatttaaggaattccctaaccgcgatggaaacttcgttaagagtattgcccttgcccccaagatttttagtgatattgagttga

SEQ ID NO: 5722 - DNA, 2787 bp, Saccharomyces pastorianus
atggacaccttcgaagaaccagaatgtcctccacataaacctcgtgcatttgtaaaatcaacgaaagagtttgaggattatccaaacaacgcaatcgttcctgtccagttcgtgtcgcttttaacttcaatacgattgactgaaacaaaatgtttgttgggattttctaattttgaaagtgggaaagatcaggcgaaacaatgttacacagtcaagttaaagttcaaagacaaaaatacagaaaggttagcaagaatgacaatatccttggtttgtcgatatttcgacatcgaattaccagatttagatttggacacagaatcatgctctacatttatactggaggatattcatttcgaaaggctgtgctttgcgagctgcaaaaccttatacgtgtcgcaacacgggaactacaccctatttttggaagacatcaagccattggatttagcatacgtcataaacaccttatcaaaagggcctaaaaactgtagcaacggagtttctttatcggcaccaaatgtagggccgaatttgaaggaatccctcgcgactattttcgacaatttgattacaatgaacagagatcagaaaaacagttttaagtttgtgaagttgatacactatgatacagaggtcaaagagtttatccaagaacgacaaaggcttctattacggaaatcaaagcccaacccagtcgatcccttttttgttccccacagattgggcgctgcttctcttgaatcgcagaatgaattcaactcgcagcttatgacgctcaatgtagatgaagaagttacaaacacgagcagcacaagagacgacctggatgcgcactcggaccccattgaggattctgacgtttcatcatcctcttctacgggcacgtttctaagctctagatcgtatatccagtcgcagactcctgaaaggaaaactaaagtacccaacgactggccccaccatggttcagaaagaaaaaaaagaaaactgtctttcacggaccgtacggctccttcatcacaactcggtatcgattatgaacggctttccatggccagcttaggctcgatggaaagattcgaggggaagtttgtcgggatgtacccgcccgagttccacagtgtggatgaatttaagcattgcactctaaaactgtatttcacaccattgccgctatccgcgggcttggaccgagtactggtaccgggtgtgaactgcctcgagatcatactccctaccgttgaacgaatccgtgacctgtttggtagtttgaactgtcaaagcgacaagatatcagcgattctattaatggacaaaccgggtctggttaccgcagagattgaacggattctgtgggacaatgacgaaaccgttagtcccggcttggcggtctggagcttgaagaatatccgcactgacgcccatgcgcacccgcccgcgccactagcatcattaccgtcaaacccgcctcgattgaagatgcgggaactggccaagaaggaccccaccatcgaattccgtgagttggcgttgagcgcgttcgataccaagttcgtcaccatgttcggcatggtggtgtcttgctcctttgacaagcctgcgttcgtctcgtttgtcttcaccgattttaccaagaacgacatcacccagaactacctctacgacagatacctggtggactacgaggccaaactggagctcgatgaaggcttcaaagccatcatgtacaagaaccagttcgaagtgttcgactcccgcatcgagaaaatattcggcaggcgccttaaggatctgcagaacggcaatgacgaaaacgtgtcgcagcacgggatagtatgcaggatgaacatgaaagtgaaaatctacaacggcaagctgaacgccatcgtgcgcgaatgcgtaccgatcccgtacgcccaggtaaacaccctagcgacgcccacgcagttcgagcatctgcagtcgttctaccagcgggcattcggcagactcggcgagtctgccatctcccgctacttcgaccagtacactacgtttttccccatacaaagaaacaagcaccacctcgccgaactgcaacccgccgcggcaaaacacagcccagaaccggcaccgttacagaccgcaccacccctcagggaagagtacatcccggacctgaacgcagacgtcgagtccttcgacgtcgagttcactgacatcttcccgctcctccactctttgacccgcggccgctcactgcaaccgcagccgcacaagaaccacacgctgtacagctgcgagggccgcgtcgtcgccatcgagtgccacccaacggacctctgtttccacatcacggatgaacttacgccctcgcaaacccgtggcccggatccgcaacgtgtgctgcaattgcacatcactactcccaagaacctcgcgtactttttcaaccgcacaagcgctttcctacagagccaggacctcgacggaagacacgcacaactggcgcagtttctgggacaccgattcaagttcaacataacctcctcgcggttgctgctgctgctgccgccggcagcagcagcagcagcagcaacagaattgcagatctggtgtcccatcgaatgcactttccaggaattgcagcagcagcacgcctacacggccgcagcagcagccggttcagggagccctggcggaattaacgctgatccaccgcgcctacttgccgcgctagatggcgtcaccgtgaaaagggaggacgccgatgacgccgtgaccgccgggttgtccgcctcgtga

SEQ ID NO: 5723 - DNA, 363 bp, Saccharomyces pastorianus
atgcaggatgaacatgaaagtgaaaatctacaacggcaagctgaacgccatcgtgcgcgaatgcgtaccgatcccgtacgcccaggtaaacaccctagcgacgcccacgcagttcgagcatctgcagtcgttctaccagcgggcattcggcagactcggcgagtctgccatctcccgctacttcgaccagtacactacgtttttccccatacaaagaaacaagcaccacctcgccgaactgcaacccgccgcggcaaaacacagcccagaaccggcaccgttacagaccgcaccacccctcagggaagagtacatcccggacctgaacgcagacgtcgagtccttcgacgtcgagttcactga

SEQ ID NO: 5724 - DNA, 996 bp, Saccharomyces pastorianus
atgagtatgtcaagcaaaaacgagaacaaaataacggtagaacgaaaggtgtcgacggattttggccaggcttttcaactccaagggcttgggtccaatttaagatcgattcgctccaagactggtgccggtgaagtaaactatattaatgctgctaaatctgtaaatgataaccaactgcttgcagagatcggttacaagccagaattgaagagacagttttccacattgcaagtttttggtattgcattctccattatgggtttactgccatccatcgcgtctgtcatgggtggtggtctggacggtggtcctgcatccttgttgtggggttggtttatagctggttttttccttttacttgttggtatttccatggctgaacatgcaagtgccattcccaccgccggtggtttatactattggacatactattatgctccagaaggttacaaagagatcatttcgtttattattggttgttcgaactctctagcattaacagctggtgtgtgttcaatcaattatggtttggctgaagaaattgccgctgccgtcaccttgaccaaagatggcaatttcgatgctacaagagggaagctttacggtatatttgctggggcagtggtactcatgggtatttgtacatgtattgcctccgggggcattgctcgtttacaaacactgagtatagtttccaacgtgtttatcattgtcttattattcattgccttaccaatcggtaccaaacataatataggaggttttaataatggtgattttatattcggaaagtttaaaaactttagtgactggaataacggctggcaattctgcctagctggttttatgcctgcagtttggacaattaattcatttgattcatgtgttcatcaatccgaagaagccaaagatgccaaaaaatctgttccgattggtataattttatccattgttgtttgttggatcttaggttggtttattattatctgttga

SEQ ID NO: 5725 - DNA, 1869 bp, Saccharomyces pastorianus
  modified_base (1833)..(1833): a, c, g, t, unknown, or other
atggatcctaatcggaatagctctagtgaaacactacgccaagagaaacagggtttcctagacaaagctcttcggagggtaaaaggcatagcactgcgacaaagcaatagggacaaagactctaaagccgatgatgtgccgattagtatacaaactccaacagacttacagccgcaggattttgataggcagtcttatgtattgtccgtgcttacggacgacatttccaccattgataataactcagtattattttcagagcctccacagagccaatctatgatgatgtctatatacgtaggtgtatttgttgctgttggtggctttctgtttggttacgatacaggtctgatcaatagcatcacttctatgaactatgtgaagtcgcatctagcacccaatcacgattcgtttactgctaaacagatgtctatcttggtgtcatttttatcgcttgggactttttttggggctctgactgccccttttatatctgatacgtatggcagaaagcccactatcatttttagtacaatcgtcatcttttctattgggaactccttacaagtgggtgctggagggcttaccttattaatcgtgggaagggtcatatctggtattgggataggagcaatttcggcagtggtgccattgtatcaggcagaagcaacacacaaatcattgagaggtgctattatttccacttaccaatgggcgatcacttggggtttattagtgtcaagcgcagtgtctcaaggaacacactcaagaaacgatgcgtcttcatatcggatacccattgggttgcaatatgtttggtcatcgatcctagctattgggatgttttttctaccagaaagtccgcgttattatgtgctaaaggataaactagatgaagccgccaaatctttatcgtttttgagaggtgttccggtccatgattctgggctactggaagagctggtcgaaataaaggccacttatgattatgaggcatcttttggtacctccaattttgtagactgcttcatttcaagtaaaagtaggccaaagcaaaccttaagaatgtttacgggaattgctctccaagcatttcaacaattctcaggcatcaatttcatattttactacggtgtgaattttttcaataagacaggggtcagtaaaagttatttggtttcatttataacttacgctgttaatgttatcttcaatgttcccggtttattctttgtggaattttttggtaggcgtaaggtcttggttgttggtggaataataatgactatagcgaactttattgtcgcaattgttggttgttccttaaaaacagtagcggctgcaaaagttatgattgcattcatatgtttattcatagcttctttttctgccacttggggtggtgtcgtttgggtcatctctgcagaattgtatccattgggcgtgaggtctaagtgtaccgctatatgtgctgcagcaaactggcttgtaaattttatttgtgctttaattaccccctatatcgtggacactggctctcatacatcgtcattaggcgccaaaatattttttatttggggctctttgaatgcattgggggtaatggtggtttatttgactgtttatgagacaaagggtttgacactagaagaaattgacgagttatacagtaagtcatcttcaggtgttgtttcgccaaaattcaataaggatataagagaacgtgcattaaaatttcagtacgatcctttacaaagattagaaaatggtaagaatagtctcattgctgcacaaaacagttctgatgaccaaacaccaaggactctagagatnccccggtaccgagctcgaattgtaatcatgtcatag

SEQ ID NO: 5726 - DNA, 333 bp, Saccharomyces pastorianus
  modified_base (17)..(50): a, c, g, t, unknown, or other
atgaatacatttagagnnnnnnnnnnnnnnnnnnnnnnnnnnnnnnnnnntttacataatatgaagagtctatatataaatgtaggtatgaaaggagctagaagaaacgaaagggaaaacctgatatgtttctatgtgcttgtatttggagtgttcaaatttgttgatttttcacattgtctcttttccagtttagcacgttctaaggcttctctttttaaattcttatcctcctttatcttggatttaatctttttacaccagtgtctgaatttatcgtctttggatgctgttgcatattttagtataaggtcgtggtgtaacattcattaa

SEQ ID NO: 5727 - DNA, 1677 bp, Saccharomyces pastorianus
  modified_base (1586)..(1638): a, c, g, t, unknown, or other
atgtctactaaggttccatctaacgccacgtttaagaacaaggaaaagccccaagaggtccgcaaggccaacatcatcgctgcgcgttccgtggcagatgccatccgtacttcgctgggccctaagggtatggacaagatgatcaagacgtcccgtggggagatcatcatctccaatgatgggcacaccattttgaagcaaatggccattctgcatcctgtggctaggatgctggtggaagtctctgccgcgcaggacacagaagctggtgatggtactacctccgtggtgatcttgaccggtgctctcttgggtgctgcagagagattgttgaacaaaggtatccatccaaccatcattgcggaatccttccaaagggccgccaagagatccgtcgacattcttttggaaatgtgccataggatctcgttgagcgatagagatcagctagttcgcgctgcaactacctctttgagttccaagattgtgtctcagtactcctcatttttggctcccttggcagtggactctgtgttgaggatttccgacgaaaactccaagaatgtggatcttaacgatattaggctggtgaagaaggtcggtggtaccatcgacgatacagaaatgatagacggtgtggtcttgacccaaactgcaatcaagtctgccggcggtccaacaagaaaggaaaaggcaaagatcgggttaattcaattccagatttctccaccaaagcctgatacggaaaacaacatcatcgttaatgattacagacaaatggataaaatccttaaagaagaaagagcatatttgctgaatatctgtaaaaaaatcaaaaaatccaagtgtaacgtgttgttgattcaaaaatctatcctaagagatgctgtaaacgatttggctcttcatttcttagcgaagttgaacattatggtagtgaaggatatcgatagagaggaaatcgaattcttgtcgaagggtttgggctgtaaacctattgccgatatagaactgtttacggaggatagattaggatctgctgatttagttgaagagattgatagcgatggttccaagatagttaagctgaccggcataagaaacagcaatgcaagaccaaccgtttccgttgtcatccgtggtgccaacaacatgattatcgatgaaacagaacgttctttgcatgatgcattatgtgttatccgttgtttggttaaagaaagaggtttgatcgccggtggtggtgctccagaaattgaaatctctcggagattaactaaagaggcaagagccatggaaggtgtacaagcatttatttggcaagagtttgcctctgcattagaagttatcccaacgactttagctgaaaacgcagggctaaacagtatcaaggttgttacagaattgcgttctaaacatgagaatggtgaattgaacgatggtatatctgtcagacgatccggtactacaaacacttatgaagaacatattttacaacctgtactggttagcacaagcgcaatcactttggcttccgaatgtgttaaatcgatcctacgtattgatgatattgcattcagtcgttnnnnnnnnnnnnnnnnnnnnnnnnnnnnnnnnnnnnnnnnnnnnnnnnnnnnnatagtgtacttttctattaaacaaaaacataaaacataa

SEQ ID NO: 5728 - DNA, 705 bp, Saccharomyces pastorianus
atgaagacaagtaaaaaagtttccaagaaaagaacgctgaaaaaccttcacggcgccttgaaagggctattgaaagaatccagcaagaaaaatgaggccaagatacgaaaacgttctgattacggttctgttccccaagtgcacgctccgattatcgaaagaggggcaaagaagaggatgcacaataagaacttgcggccaatcgctgaaaaaaatggccacatatacatcatgtccaaggaaaatcaggttatccccaagctaagcgacgacgaagtcatgcagcgccataaacgggcagacgaaaacatgaaggaagtatggtccaacattataaacaaatatgagtcccttgaagaccaaggtgatctggtggacctgaaaacaggcgagatcgttgaagataacgggcatatcaagcaactgactaccaacgacactaccaaagataaaaaaacgaggtacacaagcgtcctcagggacattatcgacattagcgacgaggacgacggcgacaaagatggagagtacaccatatgggcagacaacagcgagtcaagcgattttgatacggatgtggatgtggatgccggaaacggccaagaagaagaggaagaggaagaggagccggagactgacgcagacttcaagggttacgaagccaagctgtcaagaaaaataccgagagacttaacacagcagtag

SEQ ID NO: 5729 - DNA, 1194 bp, Saccharomyces pastorianus
  modified_base (1141)..(1142): a, c, g, t, unknown, or other
  modified_base (1154)..(1155): a, c, g, t, unknown, or other
atggatgcagatttagacgtcccaatgcaagatgctgtcaccgaacagttgacgcccacagtgtctgaagacatggacatgaacaataatccgggagataataacgaagaggaattttctattgaagacttaaagccaggctcctcgggcatagcagaccataagtcgtccaagccacttgaactaaccaatacgaatataaaccagctcgaccaatggattgagcaccttggtaagtgtgagccattatcggaagacgatgtggctcggctatgtaagatggcagttgacgtgttacaattcgaggaaaacgtcaagccgatcaatgtccccgttaccatttgtggtgacgtgcacggtcaattccatgacctgttagagctgtttaagatcggcggcccctgcccggacaccaattaccttttcatgggtgactacgtggatagaggatattactccgtcgaaaccgtctcctatttagtcgccatgaaagtcagatacccgcatagaatcactatactgagaggtaatcacgagtcgagacaaatcacccaagtatacgggttctatgatgaatgtttaaggaaatacggcagtgcaaatgtttggaaaatgttcaccgatctgtttgattatttccccattacagctttagtagacaacaagattttctgtctacatggcggtctttcgcccatgatagagaccatagatcaagtcagagagctgaacagaatacaggaagtgcctcacgaaggccccatgtgtgacctcctatggtccgatcctgatgatagaggcggatgggggattagtcccagaggtgcaggcttcacttttggtcaagacgtcagtgagcaattcaatcataccaatgatctatcactaatagcaagagcccatcaactggtcatggaaggttatgcctggactcatcaacaaaacgtagtcaccatctttagtgctcccaattactgttatagatgcggtaatcaggcagcaatcatggaagtggatgaaaatcataatagacaattcttacaatacgacccatccgtaagacctggtgaacctagcgtcagtagaaagacaccagattacttttatacatatatgcttcataatatatatatatatatanntagatatatatnnatttgcgtggcttttctcttttaccattttcatagttaa

SEQ ID NO: 5730 - DNA, 504 bp, Saccharomyces pastorianus
atgtctgcaaatagcgaatttcaaagcgtcaccgaatcggccacagccccaaccacgaataatccatatggccccaaccctgcggattacctttccaacgtcaagaatttccaactgattgattcaaccctaagagaaggtgaacaatttgccaattctttctttgacactgaaaagaagatcgaaatcgccaaggccttggacgacttcggtgtggactacatcgagttgacctctcccgtggcctccgaacaatccaagaaggattgtgaagccatctgtaaactaggattgaaggccaagatcctaacgcatatccgttgtcacatggacgatgccagagttgccgtggagaccggtgtcgacggtgtcgatgtggttatcggcacttccaagttcttgagacagtattcccacggtaagactgaactacttggccagagtgcgcgaagtcttgagttgtcaattcagggtttgaatcggatcctcgaaattcgtcaatga

SEQ ID NO: 5731 - DNA, 861 bp, Saccharomyces pastorianus
atggagctaagaagtagacggagtgttgaggcttaccttgtcacacctgaagaaccagcgaagagtgcgcaggagccaaacatggaacctaaggagccgttcaccgccaaggaagaaagaagcgagactacaagtgtatttagccccgcttactctgatatcgccgctactgatacgaccagaaaaaccgatgatagcgaatactacaattttactagtcatttcatgccttccctaaaaaacactagagagctggaaggcacaatacttaatcttatacagaagattaaggaaggggatgacgaaactttggttagtgagaaagatcttatactgaacgttctcaataggtccttaacatccacttcacactggatgctgcaggcccagctatcagagttaagagccacttcagaaggcaggtatgcagtggaaacaaacctgttgaaaaaagaggttgagtttttgaagaataaaaccccgaaaaccggtgagaatccaggtctttcagagttgatattacccaacgaacaacctcgtaaacgtaaaatgtcactaccaggaccagtcttgaggcccttttccactgatgcccgattggaggctggacatgaatctgtaaccgatcaatcatggaaatccaaagttccaagacttcctcatactgctcccagaccatctttgggcgttttcccacaaaagccgtcatcagatataacgaagagtgagggaaatgaaggaactggctcactggaactagtggaaaacactaaatttcatccaagaatgagaagaacgagtgataacccatccaccaaaggagtacgtaagagttttccatttggagaaaaaggaagctaa

SEQ ID NO: 5732 - DNA, 621 bp, Saccharomyces pastorianus
atggatgcaactaccccgttattaaatgttgcgagtagccattctactcgcaacccaaaatatactggatggagggctgcaatgcatgatttagagtacattttgaaagcatcccctttgaattttctattagtgttcgttcccttagggttagtgtggggacatttccaattagctcatacatggacatttgttttcaacttcttggcaatcattccattagcagctattttggctaatgctactgaagagttagcttctaaggcaggtaacacgatcggggggcttttgaatgctactttcggtaacgccgtggaattgattgtttctgtcattgccctgaagaacggccaagtaagaattgtgcaagcttctatgttgggtagtcttttatccaatctgctactggtccttgggttctgctttatctttggtgggtacaatagagtacagcaaagattcaaccagactgctgctcaaacgatgtcgtccttgcttgccattgcatgtgcatctttactgattcctgctgcgttcagagctactttaccacatggtaaggaagacgcctacattgatggtaaatcttggagttgccagaggtactcgattataatctaa

SEQ ID NO: 5733 - DNA, 2583 bp, Saccharomyces pastorianus
atggctacgaacttggcgtctttaaaaccaccgtttaaggtgaaggctagatatggttggtcgggccaaaccaaaggtgatttaggatttttggaaggagatatcatggaggtcacaagaattgccggctcttggttctacggcaggttgctaagaaacaaaaagtgttctggatatttccctcataattttgttatattattagaagaaaggctaaactcaaactctctatcagaaaacagtagacaatcttcaaaaagagcagaaaatctagagacttcaaataaagttgttattccaccggttccatcaaggttttcttttgaggagtcaagaaccaagaaaaagttatcttcatccgtaccaaactccccaaaaagaccagctgattcattgacaaaggttagaaaggcgagatcaaaggaaataataaacgaagaaagtatttataatacccaatcctcacggcatcaaaacaactctgcaccaaatctacctatatctaaccaaaccaagcccaaggtacgaaagtttgaagattccttgaagaacccattaccaccgttgccaccattacctgatttgagcaatatgagaagaacagatagaagaacgccaaagaaatcacattctgccaacgatctcaatttagctcgctcttccagagagtacaactactataaagataaccaaaagttttacgacggatttattccagaaaagagatcttctttgggggaagattctatttcgtcaggcttattttcaaattctcagtacctggatgactcggtatgtagcagtgagaacagttttgcgttaatgagtgatttcagtgctactagtgctggaagttttgcaaggcacaaatatgctcagtcgttttctgattcgttgcagagatctcaacatgcatttacttctacaaacaaaggcgatgatcaacagcaatttagtgattctaattctagttcaagaaacggtaaaatgggcgatatattgagaaaaataatcattccaaagaggagtaccaataatgcatccagctcaatatcttcaccacagtctccgaaagcatatcccaaactaccagacatccaaaatttgaacctgtctgcgacacccaatgaagctcgtgactggattgccgtgaaatgtcatttaaacagagcaagaactctgacaaaatatgagaagcatccgaggtatatgagagcactcgaagaaaatcgagatttagtcttgcatcctcaagattccatttataacggcttaaacactaatgaagtcaaaggtaatacaaaacctggtttggttgatgtggaactggctgcgttaaacatagaatatattgataagatgacttggaaacgatgtgttaaagacggaggcatgacattagattcttgggctcaaacaacgttttcagcaagatactcaactgttttggaaaaattgagaggagtgtacattttttgtacggaaatgtttgcactaactgatgacaatggatcctcagatttctcttcagaacctgaaaacttggggaaaacactatttaaaaagcattgcacaccgtatgaattaacttggctcttcaaaaaattagccaattcactgggaatcatttgtgaggttgttataggtttcttaaagacaccaagtgcggtgaattgggaattcaagtataaccattgttggctaagggtattggttaacagagaatggaggtttattgatgttattctaggaaatacaactaatccaattcatgaatttgttaataacagaaaaattaaaaaagctgaaaacagttacttcttgatggctccattagaaatgatttacacacatataccacccagggaattcgaacaacacattgtccctagcattgatcaattgtctgcgttatacctaccgttagtctttccatcgtttttcaaaaatgagttgaagttatataagtttagcactgctttgtcttttttggaggattctgaagtttacgaatgctctttggaaattcctaatgacgtcgaggtgtttgcatcagtggttatcccaaccgataatgaagaaatttcaaatgcgtataggaatatggaattagcattaactcaaatcaaaaagcaaaaagcagattccggcaggagagttgctctcatcaaagccattttgccacccggtgtaagcaaaggttcactatacgtacattctggtgtgagaggtacacaaaccagtattgctaatattcatccactgtccatgatgatcccgttaacacataagggaaatgatatgaaatacgaatttttagtcaagattccttcagaaagcatccaaaaagtcgaactatacattgttgaacctcagagcagacatttgtttgctgataatgattactcattcgaaattatccaaagtccttctgatggtattatatacaccagtgacgaaggaccaaaccagaatcggagacagccgatggcggtgaagtcaccttcagggaagagttcacgaactagtaaaaagcgacccccattttccttacggcacctggaagacaagcatcaaggttaa

SEQ ID NO: 5734 - DNA, 711 bp, Saccharomyces pastorianus
atgtcggctatacgtgaagtcaaatacttacaggaaatgcaacatccaaacgttattgaattgatagatatatttatggcttatgataatttgaacctcgttttggagtttctccctaccgatttagaagtggtaataaaagacaaatcaatactgttcacaccagcagatataaaagcatggatgctcatgactttgagaggagtctaccattgccatagaaactttattttacacagggatctgaaaccaaataatttactattttcaccagatggccaaatcaaagtggcagattttggtctagcaagagccatacctgccccacatgaaatcttaacgagtaacgtggtgactagatggtacagagcaccagagcttttattcggggccaagcattatacatctgctattgatatttggtcagtaggggttatatttgcggaattaatgttaagaataccatatctaccaggacaaaatgacgtagaccaaatggaagtcacatttagagccttgggcacgcccacggatagggcttggcctgaggtttcttcctttacgtcatacaacaagttacaaatatacccacccccttcgagggatgaattgagaaaaagattcatcgctgctagtgaatatgcgttggattttatgtgcggaatgctaacgatgacccacaaaagagatggaatgcaattgagtgtttag

SEQ ID NO: 5735 - DNA, 645 bp, Saccharomyces pastorianus
atggatatcgctgtgggagactcattagataaatgtggtagagagctgggatttaaaggaacgatgattgctagagagatggaaaggtttataaatcaagaccccgaggacaaagattcaacattaaagctaaaaatgcccagtccattgaaaaataaagtaggcaggaaaaacttgctatcattttcattttcatcattcattacagcattaagaatcagtctaagtaaactgggtaaaagtcacatcagcgacctgcctgaatgtgaaatacgatcaattgcatatcaagtacaggagtcaatattcgaccatgtcattgacaaattaaagcaagttgttaagttgcaaccggaaaaattccgaaacgtcaatgaatttgtatgctctggtggagtgagtaataaccaaagactgagaacaaaattggaaaaagaactgggtaaaacgaacccaactggttttaccaatttttactatcctccaatggacctttgtagcgataattccattatgattggctgggcgggtattgagatttgggaaacgctaggcttggctagtgatttagatatatgtcctattagacaatggccgttaaatgatctattaaacgttgatggttggcgaaaacacctgctgtaa

SEQ ID NO: 5736 - DNA, 1152 bp, Saccharomyces pastorianus
atgactgacactaaacaactattcattgaggctgatcagacccaacttttccaaaactgggatggtttgtctcccgaagaccaacaaatattgctatcgaacttggaaaaaatctcttccaaaaaggcccccgcaaaattactcgaagattgccagcatgctatcgaattttcacaagcaaactcatctaaagatgctgatgtgaacgttcaaccattaccccatacctcttatgaatcgttaattggaaacggtgataacgaggatgaatatcgccaagttggtctagaagccattggcaaaggggaagttgccgtgatcttaatggccggtggtcaaggtacccgtttaggatcatctcaaccaaagggctgttatgacattggcctaccctctaagaaatcccttttccaaatccaagctgaaaagttgatcaggttgcaagaaatggtcgaagctaataaggtggagattccctggtacattatgacatcgggtccgactagagcagctactgaagcgtattttgaagagcaccagtattttggcttgagaaaggaacaaattacttttttcaatcaaggtactctgcctgcatttgatctgactggtgaacatttcttaatgaaagatccagtaagcttgacagaatcaccagatgggaacggtggcctttatcgtgccataaaagaaaatggattgattgaagattttgacaaaagaggcgtcaagcatgtttatatgtactgtgtcgataatgtcttgtctaagatggcagaccctgtattcattggatttgccattaagcacgggtttgaactggcaaccaaagccgtcagaaaaagagatgcacatgaatcagttggtttgattgcaactaaaaacagtaagccttgtgttatagaatattcagaaatttctaatgagttggcagaagcagaagatgaagaaggtctgctcaagctacgcgcaggaaatattgtcaaccattattacctagtggatttgctaaaacgcgatttgggccaatggtgtgaaactatgccataccatattgcaaagaaaaaaatcccagcctatgacagtactactggtaaatactcgaaacctacagataccaaacggtataaaattagagcagtttatatttga

SEQ ID NO: 5737 - DNA, 168 bp, Saccharomyces pastorianus
atgacagtactactggtaaatactcgaaacctacagataccaaacggtataaaattagagcagtttatatttgatgttttcgaaacagtgccactcgataagtttggttgtttggaagtgacagagttaaagattttcgccggggatcctctagagtcgacctgcagc

SEQ ID NO: 5738 - DNA, 189 bp, Saccharomyces pastorianus
atgattacattggggacagggtccaccttcaatggatgctttctttccatattccagtcagccatggtcttgctcaactgctttattttttttgcaaagacaggatcatcgaaaaaagaaagaagaaaaagatctgtgcatattatgcaatacacttctgttcctttttctattgttctcgagtattaa

SEQ ID NO: 5739 - DNA, 2232 bp, Saccharomyces pastorianus
atggctgactggaatatggaaagaaagcatccattgaaggtggaccctgtccccaatgtaatcattaaacgcggccctttaaggtctttcctggtaaccaagccttccgaagatctaagctcattgaggagcgttacctcatccaaggaaaagtttttggttgcttttctgctggtatttgcagctgccgtaagactacacaatatctctctaccaagtagtgttgtttttgatgaacatcgaattggtaattctgtttctcattatctaaaaaaaactttcctcgccgatttcaatcccccattagtttcaatgctgtacagtggtgttgcttccatattcgggtacgatggatctttttctttcttccatattggggttgaataccctagcaatgtaccatacattgccatgaggtttttctctgctactttaggtattctgtcggttttggtactgtacttaacactacgagtgtctggtgtaaagattgccgttgctgctatttgtacggtatgtttcgtaattgagaactcttttgtgacattgtctcgctacgctttgttagagggaccttttctctttttcattgcatgtgccgtttatttcttcaggaaatcggaactttatttgccaaactcgtgcaaagcaaataaatcgttgattgcttcgagtattgccttgggttttgcggtttcttcaaaatgggctggtctctttactatagcgtgggccggtgtcattgttctttggagattatggttcatgattggtgatttgtcgaggcctattggcccttccatcaaatatatggtatttcaaattacttgtttgttgagtattcctgctttcatctacattttggttttttttatacatatcaagacattaagcttaaatggaactagtagtagtttctttcctgctgagttcagaacatccttggagaataataatgtccttaaagagacagtagcagaagtaggtgtaggctctgccgtttcattgaaccatattggaacagtagggggttacttgcactctcatcttcacaattacccagcaggttctatgcaacaacagattactctgtatcctcacattgaccaaaacaataaatgggttattgagctcgctgatcatccaaatgaaaatatcacaagtttccaaaatttaaccgatggtaccataatcaggttgagacatctcagaaacagttgtagattacattctcatgaccacaaacccccagtctctcaaaaggcagattggcaaaaagaagtgtcctgttatggttatgatgattttgatggtgatattaacgatgattggatcattgaaatagacaaaaaaagatcagcacctgggcctgctcaggaacgtatcagggccattgagaccaaatttagattaaaacactatcttactggttgttatttgttttcacattacgaaaaactgccagagtggggatttggtcaacaggaagtaacatgtgcatattttgcaagggaagacttaacttcatggtacatcgaagaaaacgataatgaagcaccattaccaaacccagaaaaggtctcatatgcaaaaatgggcttttggcaaaagttcattgctattcataaattcatttccagtgcaggcgacagtttggatttgagttatgtctattcatcagaaccgaaaacatggccttttatgttacgtggtattgacttctggaatgagaagaacaaggaagtatatttcttaggtaacgctgtattatggtggtctgtcacaggttttatctgcatgtttattgctggagtggcaattgaacttcttgcatggaaactaggcacaaagatactgcaagatgcatatattataaattttcactatcaggttatgcaatacttattaggttttgccctccactacgttcccttctactttatgaaacataacttgtttctttatgattacataccagcctactattttggtatcttagcgtttggtcatgcattagaccttatttcgacttaccttttcaacaaaaaaagccatattggttatgtcattgtcattatttttatgttagcatgtttctatttcttttatgatcactctcctttaatttatgcctctgaatggacaagcggcttatgcaagagatccaagtggcttggaagctgggatttctattgtaattcgttttttcctacatatagccattatgaataa

SEQ ID NO: 5740 - DNA, 1293 bp, Saccharomyces pastorianus
atgcagcagaggttaggaagatccatagccagggccaaatttataaacacgacattgttaggaaggaagagaccagtcatggagagagtcatcgatataactgattcggatttaggtgaagatatccaaccgttaatgaaagaactggagacagatactaccgcagcacgccacgaaactctacaaagcatattagacatattcgatgcttgtgagaatgaagaggagcccactcttacaaaggattttcacaagatgtatttgaactttgccatcgagactccattacctccacaaatgacagctctcgatgcttcacaaccatggatgctatattggattgccaattctttgaaagtgatgggtcaagattggctcgcagatgatgtcaaaagaaaaatcgtagataaactattcgctataagcccttcaggagggccctttggcgggggtgtcggccagttatctcatctggccagcacttatgctggaattaacgcattggccctttgtgataatatagacagctgctgggacagaattgatcgaaagagtatttacaaatggcttttatcgttgaaagagcccaatggaggattcaagacttgtttggaagttggagaggtggacacgagaggtgtatattgtgtcttgagcattgcatcgctattaaatattcttacagatgaactttcagaaggcgtattgaaatatttgcaaaattgtcaaaactatgaaggcggattcggaagttgtcctcaggtagatgaggcacacggggggtacaccttctgtgctacagcaagtctggctatcttaaggtctgcaaatcaagttgacatagaaagactaatggaatggtgtagtgtccgccaactgcaagaagaacgaggattttgtggaagaagcaacaaactcgttgacggttgctacagtttttgggtgggtggctcagccgccattctcgaatccctggggtatagccaatgctttagtaagcacgctcttcgggagtacatactatactgttgccaggcggaagggcagccagggttaagagataaaccagggaaacactctgatttttaccatacaaattattgtctattaggactagcaataacggagagttcgtacacttgtgccccaaatgatcctccacacaagataaaatgtattcccaacagtcaagtcgagtcgtctgaacttactgatatcaaccccgtttacggtctacccatagagagcatagagagatttattgatcattttgaatcaggtccctattcgtag

SEQ ID NO: 5741 - DNA, 249 bp, Saccharomyces pastorianus
atggccgagtcgaatctacccttgctgaactcatcacggatgaacgcatgctgggcggccaagacctccaagaacgtgaacttcacgccgtggtctctgagcgtcttcctgatcaggtcacggccctccgggtccacatgggtgtccgaagtaccgaagatcagaaccatttcctggtcgttgcccagctccttcgaaacacgttccagtgagtcgtcgttctcgcccagccccaaggttctcgagtga

SEQ ID NO: 5742 - DNA, 2100 bp, Saccharomyces pastorianus
atgggctccgtctcacataatcaattttatgagtgtggatccaaaactttacctcaagacaaattctcgatcgaaaagtatgaaactcaattgttccaatcgctaaacagatttattggtttcataaatagtgctgataaatccgttggcagtaaagagcaaaacactaaattttgcaagacatcctccaatttccttcgcttgaagctactgacgattttgcgacaatggtgtgattgccctcaaaataagtataccgtagaaaatcgagatgttttaatccaatggtgggtgacgctcttgaattttttgaactctgacacttctcttcaaatggacgctacccttgagttcagcttaagcatagaattgacttcggtgtgtctcgagtgtgttagcagactaacgactatactaataatactacctattcatcctcatagagatatggaagtttattcgcatcaccttttattaaccattcattgcataacaaataaactgattttaatttccaagaacactaaaaaactaagtcgtacagagagtaatgataagtcatctacaaatgacaaaaaactgcaacacctcaacaggtactcttctttattacgatcatttattgggaaactgaacgcatacgcatttttttatttaccggaagagttacattttgatacgattttattgttaaccgtttctccgcagatatcttcaagtgttcaaacatgtttgttcccatggaaaaacaggcattatacatttactagtgatcaagaacaaattattcgttctgaaacatttgaaaataaagataccaaattcttcaaaattatcgtgtcttacattaaaaacgattttatacttatgtcgttctattggcactactggtatattatacttcaatttattaaaattcccgattcaaattttgaacttgggaaatcgacattaccatgcatacctgggtcagaaattctcttaacgcatgtaacaactagatttttgaattcagatttgaacaaattcacacggatcatcaagcaaacaccgaatccgagaattgtgaatgatagtttaacagagtctcatccaaattttagagcgctgagtggtaataacaacgccttgattacttctgaaaagatcaatgattacatattttccaacttcaaaacaatcaagttatgggaatgcttgagaagcctttcaggttgcatttccaaagaggaccactttgaatatctagaaaatatgctatccttgcacgagtcctcattggtagattatgtatcgactatttcagcatacgattacgttgcggcaaacgtcatttacaataagattttacaatttattgttttccagtttgaaactttaccttctttaaaattcattcaatgggggccgtggtacaatgggcttttgagtatgttgaagactaaaaatgttaattgtcagaccgtttcactgttgtgccttttcaacgtatggaggcatgtatcttttgaagaacgggaagagataactaaaagattactcgaagacttttgggtatctctaacctttgacaatgaatttcctttgattagaatcttattcatgaaattgttggttttcaaaatcgttccaaatattcaagactctagcccaagtcttcaagaatccggcgttataagatcgttaccgtataaaaaaattagagaattagatgaagagttatcatcaaacaaagaaagcctgcttttaatgcagcactattatttaagtgatattgtggcgcacagaaaaaacgctctgattttcaatggtaattcacatttgatgatggtcccccaaaagtcaaatacagaggatcagttagtctataagataaaccacgataaaaaactaagaatagaaaagtttcctacagttagttcagtggcaaatacaaggccaaacgtaattttgaaaaatggcaaatacgtttatgacgttttggatgaaatggcaagtaaagccgcctatttacttgccgaaaagaaaactaaactgagtttaaaaaaaaatcataaaactatagacggtagtgaagacgatcaggaaggcgaagggtga

SEQ ID NO: 5743 - DNA, 450 bp, Saccharomyces pastorianus
atgttagtacgagacatagccgccgaggtctttcttgatcaacttcttttgtttgttttccgcgttccctcttttcgctcgtttttcgccactgcgcccgctttatatacaaaatccattccgaaagaaagcgcccgaaacaagcgccaacgtcgtccattttgccaccgtgtcactgtacacgggccacgacacgtcagcgtcggtcgcgccacgcagagcccaagagcgtctttggatagccttcacttaactcatgtatttggacagtcctctaacgtgtgtcttttgcgtacatgccggtctgcacgatcgcatttgcccctgcatctgccacgtcccttatgcgtgttgctttttggcgcgtccatccctctcagccttgttgacgtggcactcttttggcctctctcactttttttttcagcgcagggcgtcaccctgcgctga

SEQ ID NO: 5744 - DNA, 465 bp, Saccharomyces pastorianus
atgccaaacatacaacacgaagtaatgaatgaaaacgagtacgataattttgatgatttggatgaccttttagatgaagatcccactaaactggatgaagcagagcccgatgatgtgcaagcgaagggttctgtgtacaacgatagtgaaaacaaagagaagaatgccgaaagtaaggacagtgatggcgtacaggtagctaatgaatctgaagaggacccagaattgaaagaaatgatggtagatttgcaaaatgagttcgcaaatttgatgaaaaataacggtaacgagaataatgtgaagacagaagattttaataaactgattagtgctctagaagaggcagctaaagtacctcgtcaacagatggagcaaggatgtagtagtttgaaaagtaacagcactgataaagggaccctgaatggtagcaatccgggatttaaaaacattgtttccatacgctag

SEQ ID NO: 5745 - DNA, 354 bp, Saccharomyces pastorianus
atggatttacagaaatgggaagctggtatcccaggcaaagaaggtacaaactgggcgggtggtgtgtacccaattacagtcgaatatccaaatgaatatccttcaaaacctccaaaggttaaatttccagccggattttatcatccaaacgtgtatccaagtggcacaatatgtttaagtattttaaatgaagatcaagattggagacccgccatcacgttaaaacaaattgttcttggggttcaggatcttttagactctccaaatccaaattcccctgctcaagagcctgcatggagatcattttcaagaaataaggacctgcaggcatgcaagcttggcactgccgtcgtt

SEQ ID NO: 5746 - DNA, 2505 bp, Saccharomyces pastorianus
atgtctaaccaaatatactcagcgaaatattcgggggttgatgtttatgaatttattcattcgacagggtccattatgaaaaggaaaaaagacgactgggtcaatgccacacatattctgaaggcggccaattttgccaaggctaaaagaacaagaatattagagaaggaggtgcttaaggaaactcatgaaaaagttcaaggcgggtttggtaaatatcagggtacatgggttccgctaaatatagcgaaacggctggctgaaaaatttagcgtatacgaccaattgaagccactatttgattttacacaaactgacggttctgcttctccacctccagccccaaaacatcaccacgcctcaaaagtggatagaaaaaaggccatacgaagtgtgagtacttctgcgattatggaaacaaagagaagcagtaagaaaagtgaagacaaccagtttcaaaatagtaaaatactgggaaatcctacagctgtaccaaggaaaagaggtaggccggttggttctacgagaggaggcaaaagaaagttaggagttggtttacaacgctctcaaagtgatatgggattccctagaccagccataccgaactcttcaatatcgacgatgcaattaccctctattagatctacagttggaccacaatcaccaacgctaagtatccttgaagaagaaagacaagactctcgacaacaacaacaacaacagccaaacaattcggcccagtttaaagaaattgatcttgaagatggcctgtccagcgacgtggagccccctcaacagtttcaacagaattatagccatggaactagttttgcacctcaacaacaatcctccttgatacaaactcagcaagcagaatcaatggctacctccgtatcatcatctccttctttacctacctcgccgggcgattttgctgacagtaatccattcgaagagcgcttcgccggtggtggcacatctccgattatttccatgattccacggtattctgcaacttcaagacctcaaacttcagacatcaatgataaagtcaacaagtacctttcaaaattggtcgattactttatttcgaatgaaatgaaatcaaacaaatctgtaccgcaagtgttattgcgtccacctccgcatagtgctccttatatcgatgcccccatcgaccctgaattgcacactgcattccactgggcatgttccatggggaatctgcctatcgccgaggcattatacgaagcgggaactagtattagatcgaccaattctcaaggtcaaactcctttgatgagaagttcattattccataattcgtatactaggaggacgttccccagaattttccaattgctacatgaaactgtatttgacgtggattctcaatctcaaacggtaattcatcatattgtaaaaaggaagtcaactacaccttccgcagtttattatcttgatgttgtgctatctaaaatcaagaatttcttcccacagtatagaatcgaactgctactgaatacacaggataaaaacggcgacaccgcattgcatattgcgtctgagaatggagatattgttttcttcaacacattggtgaagatgggtgcattgaccacaatttccaataaggaaggattaacaccaaacgaaataatgaaccaacaatacgagcaaatgatgatacaaaatggcacgaacccacactccagttctttaaacacggacttgaacctgcacgttaatacacagaatagtgatatgaaaaacgatgttaattcaatggtgatcatgtccccgatatccccatcggattacataacgtatccgtctcaaattgctacaattatatcaaagaacattcccaatgtggtgaattccatgaaacaaatggccagcatatataatgatctccatgaagaacacgataacgaactgaagaatctacagagaacgctgaaaagtatatcaaagacgaggatacaagtacatttaaagacactagaggttttgaaggatagtagcagagacgataacgacggggaaataccgaaggggaatgcggacttcgagactctaacttatttacaacagcgtaatgttgaagaaattaaaaaaaagcttataaggtataataagatgattaaacagaaactagaatacagacaaacagtcttgttaaatgggttgatagaggacgaatctcataccatcgcgaacagtgcagacggtgacgagagtaatctcctggaaaagctggagctagctcagaaactaacacttttacaatttcaaaggaggaaacgattgaggagtttaatggagaaatttgaagacaattccaagattcataagtatagacggattatcagggaggggacggagatggatatcggagaagtggacggttcgttggatgtaatactacagacattgatagtcaataataataaaaacaagggcacagacccgagtaccacgaacacgaacgaccgtgcatag

SEQ ID NO: 5747 - DNA, 345 bp, Saccharomyces pastorianus
atgaccattccacacatgaatcacgctgtatcgaagaatagcaagaataaggtttcaaatacagtaagctctacccaggatcaaaacgcggtcaagaaacagcccgatgaggtcgtagatagtggagaacctttgcctaagaaattaaaagtgccactggcgggcttctcgatggcatccaataaggctgacaatcgagaatacgctcaggctgcagtcgggcaagtagcatcaatggagcttaaaccagctagtgacatggatcccacagcagtgtcagcagcgtcagcagcgtcaatgtccaatgaggttttgaaaccggaaactccccaggggccaataata

SEQ ID NO: 5748 - DNA, 1284 bp, Saccharomyces pastorianus
atgatcatcaagggatcatccctgaatcctaacacatcgataaggtcgtccttaccagaagaaaagacaaatgttctccgagaacttaataccaccaccgtcaaccaactattggggctgccaggaatgacatccaccttcacagccccacaactattacagttaaggataatagctataaccgcctctggcgtgtcgctccttgccgggtgctttggaatgttctttctttccaagatggataagaggagaaaggtttttagacatgatctgatttcatttttaataatttgtgactttctaaaagccttaattctaatgatttatcctatgattattctgatcaataacagtgtgtatgcagaacccgcattttttaatgtactgggttggtttacagcctttgctattgagggtgcagatatggccataatgattttcgccattcattttgctgtgctaatatttaaacctagttggaaatggcgtaatagaagttccggcaatatggaaggcggactatacaagaaaagatcttacatctggcctattactgctttaataccggccattttagcgagcttagccttcattaactataataaactcaatgatgattctgacactaccgttgtcttggacaacaataactacaatttccctgattctcccagacaaggcggttacaagccttggagtgcatggtgctatttgccacccaaaccatattggtacaaaatcgtattgagttggggtcccagatactttattattgtttctattttcgccatttacatcagtatttatgtttttgttaccagtgaaagtaaaagaatcaaaaaacaaattggagatttcaatcataatccacaacaagaggaagaggaagagaaagataaaaaaaaactgctaagtttgggccatatggggaaagttaggtggtatcttaaaagttatcttaaatcgccattgttacgttttttaaagaacctgagaaattttttcaccatatctctggtagagccaggtgaggaaacaacagatgattcaagtagtagtggcacttttaatctcggccaaaacttgcatgaattgcctgcatatacaggaagcaatgaaaacatccccattaatggtagagtacggttgcttgactataacactactaagccggctaataaatccaagattataatgcctgcaaaccaagatttagagaaaaatgatccgtttgactgctataatgacctatcagtaaatcccctaagttttacgatggaacca

SEQ ID NO: 5749 - DNA, 1140 bp, Saccharomyces pastorianus
atgcagattataagcctgaaaccagatttagagaaaaatgatccgtttgactgtaataatgacatatcaataaatcccctaggttttaagatggaacaagaggagcgtgatgcagcttttggaatggaaaatggaagactggatacaagaaagagttcaatgctggaacaccagactttttcttgcttgaattccttagcatcacccctcgaagcgttaaatcataataataatgatgatgattgcaacagtagaaacaacaagaacaacaagaacaagaacaacaataaaaatactactaccactactaataatactaataataccaataatactaataataatgctacaactaataatattcctcctgcttttaatgaagcattcgtccaaaataaagatttttcgcacaatagcattagcgatacaatcagggacgacaatttaaacgttactgatgtacaacgacactttcaagctcaaacttataaagatatgaaaaagcgcaggtcacaaattcagaagaatctgagagccatattcatttatccactatcatatattgcgatttggctttttcccatcattgcggatgcgttgcaatacagctatgaaataaaacatggacccactatgtgggtgacatatatcgatacttgtgtgagaccattaagctgtctcgtcgacgttattgtttatctgttcaaagaaaaaccttggaattattcatgggccaaaacggaatcaaaattccttactgaaaaatttgttttaaaaggcgagcttggcgaaaaggaaattttgaacctttgctatagtaaatggggcaaaagaggttggtattaccgtggaaaatggaggaaaagaaagtgttggagatattctacaagcaccacaaagcgtattatgtggtttatccaacgcttttttgaacagttatttgagttaaaatttcactttgattttcacgacaactgtgatgattttgaatattgggaaaaatattattcagccaaggaatcagcgataagaacgcacagatcagatgagaccaaacaaatggcagtgatagatctcttcagacaaactcacgggaaggagcagaccaggcgaaagacgataaaggcgcgaagaaagtga

SEQ ID NO: 5750 - DNA, 1248 bp, Saccharomyces pastorianus
atgctagcgagatacctgggcttactggcacgaagaggcactgcgccatacaaaccacagcgattgccggccaagtttgacaatgtcatagtggcgatgtcatctggtgtggattcttcggtagcggcagcactatttgcgggggagtttccgaacactcgaggaatttacatgcagaactggtcggaatcgcaatctctggatgatcctgggaaggaaccgtgctacgagaaagactggaaagacgtaaaccgcgtggctgaacatttaaacattacagtagacaaggtcaacttcgagcaagattattggattgacgtgttcgaaccaatgctaaaaggttacagtgaaggatcgacgcccaatccggatatcggctgcaacaagtttgtcaagtttggtaagctaagagagtatctggatgagaagtatggcgttaataactattggcttgttacgggtcactatgcccgagtcatgcaagaggtggaaagtagacagtcattccatttactaaaaagtatttacaagcccaaggatcaaagctattacctttcccaaattgacccggcagttttatcgtcgttgttgctacccattggccatctgaccaaacctgaagtgcgagatctagcaaaatacgtgggcctccctacagcagcaaaaccagattcacaggggatttgcttcgttaataattcacagcatgggaaattcaagaacttcctcaagcattatctgcccagtttaccaggaaatataataaccatcgatccggagtccgggagcaaaacaccgtggggcaaacacgatgggctgtggtcgtacacgataggacagaaagtcggcttgtctatgccgcaaggtgacccaaactaccagggatcctggtttgtcagtgaaaagctgaagggaaccaacgaaatcgtgatagttcgcggaagagacaatgctgcgctgtacaaggataccatccggataaaaagctttgcgtccatgtgctcgaaggaggacaccatcaaggctctacaggatacaagtgccctgacattgcaattccggtcactacaagacccgatccagatcaaatcgtgcacgttacgagaccctgctacgggcaccgcagaggacctcgacataacaatagaactagcctcaacgcaacgtgctgtggccccaggacaatcctgctgtctctatattggcgatagggttcttggaagtgggcccatctcctgcgtgaaataa

SEQ ID NO: 5751 - DNA, 129 bp, Saccharomyces pastorianus
atgatgtttgtggttttttgttctttcaaccaactcgcccgatatagggtcaatttcacaagaggggacggataccagccaatcattctttaccacttcgttcatcaacactctttgttttgggtctaa

SEQ ID NO: 5752 - DNA, 183 bp, Saccharomyces pastorianus
atggtggtaccccagttaccggaaccaatgacggtgaccttgaaaggcttttcagcggccttcaaagaaacagaagaagaacttctctttctaccggcgttcaaatggccagaggttaagtttaatctatcagcagcagcagacatctttgtattattattattattttgtgtggagagttag

SEQ ID NO: 5753 - DNA, 399 bp, Saccharomyces pastorianus
atgaccggtgccaaatctaacatgagcgagtattcctgttgcacattgaatcctttacctgttcccgtacctttatcactcttgatagcagacaaactgtcatccgccgaagctatgggctgctggagtcccactctttgctttatttcgttaatctcttcatctacttcagagtttcccttctttgtggtagatgttggcacggcagcagttccccttgacgatctaccagctatattatccctaccaacactaaataactgtgggggcttctcctcttcctttgtctctattgccagaaagttcgcattctgtgctataaagaaaactaataacaatagtagcatcgttatgcttaaaattctagcatttctcttattggaaagtatcatgatatag

SEQ ID NO: 5754 - DNA, 291 bp, Saccharomyces pastorianus
atgacaccgtttagctggaccgcatcactaacgttttcaggcgtcaacccaccagccaatatgaattgtaggaattgcgaattttcatgcttcgtagcccaatctgaaatagagttccaatccaaaagttcacctgtcccaccggcctccgaatcaaataggggagtaaacagatgggatttctctggaggcgtattcagtagtatgtcacagtctctagggaacacaagccttttaataacgggcaacccgaggaaatcttggtattcttgccacggctcatcgccgtga

SEQ ID NO: 5755 - DNA, 1221 bp, Saccharomyces pastorianus
atggtatcaccaacaaagatgctgattaggtctccattaaaggaaacggacacgaacctgaaacataacaatggcattcctgtatcaacggcaacggcaacggcccatttgaacgcgctccctaacgataacaatggcaacaacaacactaatgaatccttcccgaagaaaaggtcccttgagcgcctcgagctccaacaacaacaacaacacttacacgaaaagaaaaaggctaagctagaaagggccaggtccattgaaggcgctgtccaggtgagtaagggtacaggcttaaaaaacgtcgagccaagggtcacacctaaggaattactggaatggcaaaccaactggaaaaaaatcatgaaaagagactctcgtatctatttcgacattactgatgacgtggagatgaatacctacaataagtctaagatggacaagcgtaaagacctattgaaaagagggtttctttcattgggcgctcaaatcactcagttcttcgacactactgttacaatagtaataacaagaaggtctgttgaaaatatatacctactaaaggatacagacatcttatccagagctaagaaaaattatatgaaagtttggagttacgaaaaagctgctagattcttgaaaaatctcgatgtggatttagaacacttaagtaaggccaaatctgcttcgttagctacccccacattgtccaaccttttacacaacgaaaaattatacggccccacagacagggaccccagaactaaaagagatgatatacactatttcaaatatcctcatgtttatctttacgacctgtggcaaacttgggctcccataataactttagagtggaaacctcaagagttggcaaacttggacgaattgccttaccccgttttgaaactgggctcatttggaagatgtccctttataggtgatagaaattatgacgaaaattcttacaagcgcgtagcaaaaagatactcgagagataaggcaaacaaaaaatatgcattacaactccgtgccttattccagtatcatgctgacacttttatgaatacgtcttcagttaacgaccaaacgaaaaacttgatatttattcctcatatgtgtaacgactccaccaaaagtttcaaaaaatggatgcaagaaaaggcaaaaagtttcgagaatgatgagaaaaagaattggatgatgaggtattcaagatatccatga

SEQ ID NO: 5756 - DNA, 720 bp, Saccharomyces pastorianus
atgatggatttagacaaaatcatagcatcattgagagagggaaaacatatccctgaagaaactgtttttagactatgtttgaattctcaagagcttttaatgaatgaaggaaacgtagcgcaagtcgatacacccgttacaatatgcggtgacatacatggtcaattgcacgatctactaacgctttttgagaaaagcggtggcgtagagaaaacgaggtatatatttctcggtgattttgtagatagggggttttattcattggagagttttttacttttattatgttacaaattacgatatcctgacagagtcactttgatcagagggaaccacgaaactcgtcaaataacgaaagtttacgggttctatgacgaagtagtaagaaaatatggtaacagcaacgtctggagatactgctgtgaagtgttcgattacttatcattaggggcaataataaataatagcatattttgtgtgcatggtggactgtcaccagacatgaccactgtggatgaaatacggacgatcgacaggaaacaagaagtcccacacgaaggtgctatgtgcgatctattatggagtgaccccgaagatgttgatacatggtcattatcaccaagaggtgctggatttctttttggtaaacgagaagttgaccagtttttagagaaaaacaatgtagagtttgatgccagggcacatcaattagtgatggaa

SEQ ID NO: 5757 - DNA, 549 bp, Saccharomyces pastorianus
atgaaattctccactgttttgttatctgccggtttggcctcgaccactttggctcaattctctaacagcaccgctgcttcttccactagttcttctagttcctccgtttccatcacatcttctgccacctcagacgctgataacggtactaccactgctatcccaacagatgctccaaccaccgctctaccaaccaacggcaccaccactgacgtaccaccaaccacatccgaagctccaaccactcaacttccaaccaacggtaccaccagtgctttcccaccaacctcatctctaggtccaagcaacaccactagtactcctccttacgacccatccacttcctacaccactgactttaccgtcgtcactgaatacactacctactgtcctgaaccaaccactttcactcagaatggtaagacttacaccgtcactgaaccaactacattgaccatcactgactgtccatgtactattgaaaagccaaccactacctcaaccactgagtacactgttgtcactgaatacactacatactgtccagaa

SEQ ID NO: 5758 - DNA, 288 bp, Saccharomyces pastorianus
atggaagcaccaaaagtgcgttttttgaccaagatatatcatccgaatatcgatagattgggccgtatatgcctcgatgtgcttaagactaattggtcccccgctttacagatcagaaccgtgctattgtccatccaggcattgttggccagtcctaatccaaacgaccccttagctaatgatgtcgctgaagactggatcaagaacgaagaaggcgccaaagccaaggcacgcgaatggaccaaattgtacgccaagaagaaacccgagtcatcggccactgtataa

SEQ ID NO: 5759 - DNA, 417 bp, Saccharomyces pastorianus
atgcaaacgcaagtgcaaatcaagggacctgtaagaacaaacagaacactcaacgatagtagtaataacgaccttgctgtctccctctataaagcaactccgtatcacaataccgccacagcgcaagaaacaacgagatatatttccttgaagcacaaaacgccatcccttcccttccccttgcccttgcccttgccgacgccctttcccctcaaagtctttttttctttttctcaccccggcgtcaccatcccctcttggcgccggggcaattcccggggcaggggggaaggaagtgggccaccaagcccctttgcccgccaggcccgtgcggcgtacgttccgggccccatggtgcggggtaccgccgtccggcgtgatgcgccctgcaaaaacatctatatctttaacatatga

SEQ ID NO: 5760 - DNA, 897 bp, Saccharomyces pastorianus
  modified_base (833)..(889): a, c, g, t, unknown, or other
atggcatctttggaacattgtagcaaaaagggtttggtcactttggaaactgtagattcatatgttggtaaatctcacaaggaaggtgagttgattgctagacctggtgtgtatgtcagagatttcgctcaagtccatattcttaaactaaagaccgcaagacaactattaaccaagattgatagacaaggtgtttacccattcaagttatctcatttatcctccaacttcccattcgttgatgaaaacgaagaagaacttcagaatctaaagaaggatttgagatcatttagacttggaatgagtgaaatttccaacaattacttatgtgtggaaagtccaatacaaattgctagatggattccatgggaccatattttgaaggccactaactcaaacggtaatttgagttatgatgccactactacattaacattacctggtcatgaattgcctttaccaaaattgggtgtttcagctatcaaacttaaatccttattaaattcaactaatgaatctatttctttaccagttgcacgtgaatgtaatactgtcgtattgtgtgacgccagtgtaagtacaaccgacagaccagaattattgagattaactggcggttccaagacttgtcaaccaagttggattcactcccaacatgaattgaaccctgaagactcaattgttcaaggtatctttcaattggctactttggctaaggataagagatttgggcttctattgaaggaaacacaaccaatgaagcagaaaggtgtcacatcaaatgttgaagttgaagaaacgatgaagatgttaggaactcttacactcttaannnnnnnnnnnnnnnnnnnnnnnnnnnnnnnnnnnnnnnnnnnnnnnnnnnnnnnnnaattataa

SEQ ID NO: 5761 - DNA, 525 bp, Saccharomyces pastorianus
atggctctagctatctcccacgaggatactcagattttgttaaaagacaagaatgtactacaggactcggtcttgaacaaatacagaacagctgggcaaatcgcacaaactgctctgaaatatgtcacctctttgatcaatgattcgtaccataccaagactgctcagcgtcaactatctgtctcagagttatgtttgttgacagattcctttgtgctgactcgcttggaacagcactacaaaaacaaagtcaatgaaagaggtattgctattccaactaccatcgatattgaccaaatttccggcggatggagtccagaaattgacgatacacaaaacttgttaaactggaacaaaaacaaagattccacattttcatcttccgtaactggtatcttgagagcaggcgatctggtcaaaattacgttgggtgtccacattgatggttacacttccgaagtttctcataccatggttatttacccagtcgatgaagccaatctactcctcaacaactggacatag

SEQ ID NO: 5762 - DNA, 3741 bp, Saccharomyces pastorianus
atgacagccaagatggaccatcttcttagcgttgttgaagacgacgtgaagtatgcgcagagactgagcagttttagctcaccacaaaatgccagtgtcaaagtgttcactattcctcgacactccttcacggcctttaggttgtcttatatttccccagtagagctttctgagtgctcaaaggtgactttattgggcggtattccaaaacaatggtacgccgaccaaaataatcagttgtggaaacttataactaaatttccacttcgaagggttaggaagcaatcccgaatgctgagaagatacggctataaaacgatatataaaaaaaatgcggagaaaatcccttctgcctcacatttaagaaggcattttacgtggtcatatgaaggcaatacatcaacctgtgatagttattatcttagtgacccaaccgctgagagagatagggctagttcgagccctgtaaaagctagtgagtgtaaaatggttccgcccagaaggagccaaagctcctcagataaggcaccaatgcgagaagatctatcgaaagttacgtgtgcacaaggcccggggaacaacgattcaaaggctttactgttgaatgagacggcacagcatgggataaccaagtcgattccagaaaagaaggattacaaaggaatgactagaaaatctatgctggggttctcaactctgaatcaaggcgacgaacagcatagagaaagcccgcctagagaagacaattcagaatcgaacgaaagagcgatttgctcctcagtagagaggtttagggtcacaggtatcgacgataacagggaaccttctgaagacactttaagatactctggtcatagtataaatgcagctacaaatcggctaaatccgaataaaaaaagtttctttgatgaggtagagcattttagtcatttggatgacttgagtgatgacgtttcaactactcaggccatcgataatctgccattaaaccagagtgagaaagtagctcttgatgcgctacaaactatagaaaagaaggctctctcgatagagaaaactcctcggaattatggcaattatttcgatgatgggcggaagacttccattgttttccaaagcacgaaaagaaaaataggtgaagaaattggcagagcggactcaagcaagtttccattttttagtgtcttgcccccctatccaactcaattgacactggaagagaacgttatacatgatagattagcttctaagcattcccgtcatataagaaagcgtgtctattatgctagaaacaaaactagctgcaagctcaaagacagttttggagctgttttgggcgcaacaaattcccttacagcaactgttcgaaaaagctctggccagattctcaaaaaagaaaaaatgctggtattggtaaaagaggccatacaaaataaggtaccacttcctaacttcacagaaaacgaatgtttcgatacaagagtcagtgaacggtggaaggaatatattgtcattgcaaggtcaacaggaaggtatgatccccctattgttttacagttttaccgtcatcgccatattccagaaattgaagatattagccatgtagatcaaaaatatcatcgtaacccattggatttttttctcacaagaaactgcatcgtgcaattttatagctcactcgataagacaatatccattcaaaagcccgatgaacggttaggtggattcgtagacgaaaacatcgaaagtcaggagggactaaagcacttttcccccattaagatttttattttaagatgtaacagtatacgctcatctggtttgtggtataagttttttcttgatactttgaatcgtcaattattcacaccaaccatcaatttgagaatcccacaaactgaaatctcaatcaaaattaatctgaatgaagaatcattccaaaaattacgagccttaggaaaacaagaacaagataaactaaaactctgttttctcgagaaaggttatagaatttttcaacatcctattttgcgatttttcacggttgctatcttagaaaagttaaaattggcacgatatgattctttgattaaaaaatgggatgtagaaaatgctatactgggatgtgctttgaagagatatgatagattggaatggattccatgtgatggagactccctaatgacaggaatatatgcattttgtcagtctcatttgattcagtacaggccaataacaaattattcaagggaaacaacatctacaaccggagatattttggaagaagtttcaccgatcgaaggctttttgattagattgacagacaaatatggatctctgagaacaaaatttggtaagtttatcattacgacatcttatttttttacgtgcgataatttactgttttcgatgaaggcgtatagggcaactcccccgctacctatagatgcgatgattgatgaagatagtacggaaaaggaaaaagaagaggtttggaaacagtggaaaacacttccagaagcttacaaccaacaaccctatcccttaacctcggatagccacatagaatggatgaattgccaaactacgcaagatgaatatgactctagggatttttatgcgtttcactgctttcatagaaggattgaccaaatgctcaaaacagacactatgattgatttgtcagaagtaaaagacatataccaaggaacaactgatgactgcgaaggtgataaaataaaatacggtgtttacaaagaagcaagtgagcttttttggcacaaaagctacagtgccgaagatgtttcccgatctgttataaatattgaaacctcaaacggtctcctattgaagcttcttgcttcatcagcaacagttgcagaacaatgggtcacgcaattgaaaaagatgtcacattactggaaaaacaaacagagagaagatacaaataggttgctaagaataagacgttccaatgccaatcttttaatgcttaatggagaggaggaaacgagaattggtgagaatacattacgctggattattgaaaacggccgtgcagatgaacatacttttaatgctaacggaatatcgctaagtaggcctctgattcaaaaggggcctttatatcaaaaaccacacaaacatgctgttttttcaaaatattacgtagttttgatatctggttttatcattttgtttcattgctttcataggtcaactacgggttttgccaaggaggttctggaatatgctcattacatgactattccaattgatgattgttatctatactcgggaactacaaccgagttggatcttttgaaaagagatcgtacttttgatgaaattaatttaggatctcataccctgcctcgagtttatggagacggatggagatcggtggaagacgaaagttcacgatgctttacactttggtttggaacaagacgtgctatttccagcaatccctcgccaaagaaagagaaggaaaaggaatactcaaagttttcgggtggacaacataactttgttgatccaccttcggctctagaaatcgatctggactactccgagaggctaaatattacagataggattcattacatcaaaaagttgggtgtaagcgggaaatcgatggtcttcatggcaaggtcaaggcaagaaagagatatttgggtaatgtccatatatgatgaacttgaaaggctgaggagaacagcttccttttcgaacgagtga

SEQ ID NO: 5763 - DNA, 2109 bp, Saccharomyces pastorianus
atggttttttcgtatgagcactatatgaatttgcttttccatttggatcacagtaaagagacggtgcctccagaaattgcgaagagaatagtttccaatgccatagctccagtgataacagtaacttcaaccccactttttgacaaacatatccaagaggcatatagtgttgactctctgtacatgctgttacgattctttggtggatgtgtttctgatagagatcaagcaaatgaaggaaaggttgaacaggatgaacaaaatgcaagtgcctcgataaagtcgtcttcaaaaaaccaaaatttagaagtgcctggtgtgttaaaaaggggaaaccgcagtagatcaaacagtctctttcagagagattcaacccaatcgcaatatgtcaggtttacaagaccgttgggggatctgatcgaaacaagagatacaaatgacatgctgtttaattatcattctttggaagtatttctagataactatctaaaattagtagcaaggaacactgatgaagaagtcccccatgatcttttaaaaaagtcgatttatcatagttttttttcgttagcaatttcctccacaaataacttatcgccttacgaaacctttaatcatccgattctttctttgattgctttagatatatcacgtggagaagtatatgaggacgcaagggatcttttagtgaatttcaaaaatctcaatcacaataccgaaaactttcctattttcatgaatacgaatgaaatgcttccagtttttttactatgctataatgacgaatctcaagaagagtttgaaaagtgtcaggctttggccaaaaaacttaaaaagcagctgtttgtggagagtattttattgcctctctggaaggattctttcgttggcgctgaaaactcaaatatacaattgcatcaaccagttatgtcatcgcttgaagaaatcctcttttttctacgggttccaactcaaacaaaactttcactacctttgataaatacaatctacgatatgcttgattatttggtttatgatttaatgataccatttatgaagaggaaaatttcattttgggaagagacgattttacagccaagaaaatcgttgtttaatggtgcaaaatttttcagaaaatttatgaataaagcccctgtcaatggcaatcaccagcacaactctctgacgagagatagtcaaggaaacgagtattttgcatcttcgtcttctgaattcttaatgagaaaattagcagattggtctatgatgttatccgacttcaaaactgcttattctacgtatgaatcacttatggatgatttggatgcgtttcccaaatatttggcttcgtgcattgagtggtgcgcagtatcattgctgatgggtgcacaaagtatagttacagtgaaaatgatcaaaaatgatataaatccactgattgagagagctttggccacatatgaaaattgctctcaaacgcagcgccataatagcaaagagctgacatcttcaagcgtcgtggaaccggtacgttcatatgagacgcgttgtatgatcttggcgtctgagttgtttttatctttaagcgatacgtggacttctacaccttacgctattcaatatttggaaacaattctagatgaatgtaagttggggccttgctcacaaataatggtttgggaaagactcagtgactgttacaatttgagagtcgatcctagagttaaacatagagttggagttatgaaaaagagcattaagaatactgaggatctccgaaatgatgacgagtatgatacgtgtcatttcacagaagaagacatattatcagaagggttaacaagaagacgtaaagccgcttactttaggttgatagcggccaaaaaatgggcggaacaaaaacaatggagacaggtatcctggtgtttaaaggatatcgaaaacacgtattcagagatcgattttttacatggtaacggtttaatcttgagtaatttgaaaagccagctaaatttaaaggatgtcgattcgcaccgacaccgactgaaaagaatcctacgaagacgagcatcaatttcattgaatgaacatttttgtatagaaatgtaa

SEQ ID NO: 5764 - DNA, 411 bp, Saccharomyces pastorianus
atggacaaaacctgtctggtgaaagtcaaaggcttttggtctagctgttgtggattaccaatgtttgcgtttatgatgttattgaacggtaacgaatttgagcttctttttagttcctcctttagttcgtcggcccttgtggggatagcgcctcttacagcatactctgctttggtgacgcttgcattcaagtccttcttagtgagctttgcagcaggcttgaaatccaaatcctttgtagtaaagacacttttcaaatccttttggtgtgtcatcgtcatgtgctattgcaatgtgttggcagttttcaggtataaagttactgtggtggcttttgccttgattcttatcttttatgctcttgttgttatttcggcaaaaggagaaaggaaatattggggtattcactaa

SEQ ID NO: 5765 - DNA, 1098 bp, Saccharomyces pastorianus
atgaatgattacttcatcgattataacccacgcttcccaatatttgctattagagtagtaaaaggccttgccattcacagagtgtcagaccacgctagacttgcagtaattcctattagaaatatagctttagtggcgaattacaattgggacgtttccactggtaaatttctgtcaattttcttcaaggatggaaccattaggattcacgatatttttaaagacggtagattagtctcatttttaagaataccgagaacaaatatatcaagaggtatatgggaccgaattccattaaaatatgaatctggtcatcgaagttttgcctataatgtaatcgatgtattaccaaaattaattcgattcgtcaaggattctaaaagagtaactattgcaccttacactccaccgaatagtctatggagaggtcccgatgaggatgatcctgaaaatcgtgataaattagacattcacgtaatatttaatgaaggaaacgacaaaatcacagttttttttaatggtgactacgctattcttttgccagtaagtgattttgagaacgagaagatccttaaatcggtagttaaagtacaggatggtttttatcgttgcttatataatgatggaactgtatcaactttaaacttggaacggctattacagagcgaaccatcagtggacttattgcgctatatgatggtaataaaagagcttataggttacttgctcgcgcatatagagtttattaaccgggaattaacaacgccgtatgtggatttcctcaaaagaatatgtgatgaagcctatgggtatagtaagctgaagtcagaactagaatgtttatttttattaggagaagttccatgcgatttagacgattggttatgcaatgcagtgggtgagaagaatttcaaaagatggaaagttttgggctgcgaagcttaccaaaagactgttcaggtttttactttggcgtttgtgcccacatgtgaaaggatcattatttttgtccaaaaagtaaaaggtgtattagaagccttttctattcaagatgaatctgacaataatgctgatttaacagcagttgacttctattaa

SEQ ID NO: 5766 - DNA, 417 bp, Saccharomyces pastorianus
atggaagaacttagaagggcgctggcgctagtaaatagtcaaggagttgagtttatggcgtttgtgaaagacaaagaccacgttagaaacgaaccgactggaaaccatttcttttcagagagttttgtatcatcttcaatcgaaaaggaccctccactggcatttgacctattggtacacaggagaagaataactgtttatgaaacaaacatcgagcccatgatagccttgccgctagatcgaccagtactagtccataactatctatgtgctgcattcaagttgttgagacagctgccttgcaaggcaatcgctaagctgtggataaaaataatagagccaaggaagaagacgaggttcccgtaccctacagcggatcctcagaacgcgacacgctgcccaaggatgtcgacatag

SEQ ID NO: 5767 - DNA, 426 bp, Saccharomyces pastorianus
atgcccggtgcagttgacttcaaacatgtcaataaaagacccgcctcgggcactgaaatatccagatttaaagccctagaaaacaccaactacgctgtcgacttaggcagatcgaagggattttccttagttggtattgaaggctctgatattgtagacggtaataagttgttgacgctaggtctagtgtggcaattaatgcgcagaaacatttccatcactatgaagacattatcttcgagtggtagagatatgagtgattctcaaattttgaaatgggctcaggaccaagtcacgaaaggtggcaaaaactctacaattagatcatttaaagatcacggtttatcaaacgcacatttcctattggatgttttgaacggaattgcaccaggctatgttgattatgatctagtcaccccttggtaa

SEQ ID NO: 5768 - DNA, 456 bp, Saccharomyces pastorianus
atgatctggcaaattattagaagaggtctgttaagtaagatcgatatcaaactacatcctgaattataccgtctactggaagatgacgaaactttggaacaatttttgagattgcctccagagcaaatcttattgcgttggttcaactaccatttaaagcaggctaagtggaatagaacggtttctaacttctctaaagacgtttctgatggtgaaaactataccatcttactgaatcagttggatcctacgttgtgttctaaggcgcctttgcaaactaccgacccactggaaagagcagagcagattttacaaaacgctgaaaaattagaatgtagaaagtatttgaccccaagttctttggtcgcagggaaccctaagttaaatctggcctttgtagctcacctgtttaacactcatcctggattagatcctattcaagaagaggaaaactga

SEQ ID NO: 5769 - DNA, 288 bp, Saccharomyces pastorianus
atgacgttatcactcaatacaccacttggtgtccattgccaaccactgaagctccaaagaacaccacatctccaggtccagcaccaactgaaaatccaaccaaacatggttcttccgtcccaactgtcacctcttacaccggtgctgctgtcagagccttgccagctgctggtgctttgtttgccggtgctgccgctttgttgttgtaaacagtttaacatttttcaaaaaaaagtcaagtattttttccaatacagtttacacaatatattctttcaattccattag

SEQ ID NO: 5770 - DNA, 219 bp, Saccharomyces pastorianus
atgattgttaaagtgaagacgttgactggcaaagaaatttctgtcgaattgaaagaatcggaccttgtgtatcacatcaaggaacttttggaagaaaaggaagggattccaccatctcagcagagacttatattccaaggaaagcaaatgtatgtgaaagtttacgtaatcgccaattacatttcttctgtttgtttttcaaattttactaacgattaa

SEQ ID NO: 5771 - DNA, 204 bp, Saccharomyces pastorianus
atgccatttttggttaacgataatatctctaaatcagttttcaaatttttcaaagtttccttgtcattattccaagatttttctgtccttttgttcgattctcttagttgcttacactccatatccaaactagttaacttagcttccaaatcccagttgaggtctttggttgagtctatctccctcttaaaggaatggttttga

SEQ ID NO: 5772 - DNA, 114 bp, Saccharomyces pastorianus
atgaaaacttcaagaagcaccacgacagaccaggtttgttgtccatggctaacgccggtccaaacaccaacggttcccaatttttcatcaccaccgttccttgcccatggttag

SEQ ID NO: 5773 - DNA, 162 bp, Saccharomyces pastorianus
atgcaagataagttagacggatactatgcgaatgtactttcaaatgctgggaaagacgaggatacgactgacgattacgacaagaccagtgatgaagaaaatctagaggagatactggcggaactagataaagaactagacgatgatcgacaagctgatccg

SEQ ID NO: 5774 - DNA, 699 bp, Saccharomyces pastorianus
atgaaccggtgcgcctgtctgagcaactcgcccaccaaacacaccacagtggtcgtcccatcaccggtaatctcgtcctgggcggccgcggcccgtgcgatcagcacggccgtgggcgattggatctgcatttcggttagcagcactttaccgtccttggtcaacttaatattgcccgccccgtctacaagcatcttcagcgtaccctttgggcccaggttggtctccaacacggactgcagaccctcggcagaggtgacgttcaccttcaacgcggcatctcttctcagcgactcggccttgggattcagcaattgcaacgacatgattgtacagtactactcttgtgatcttttgttatcgctgctttgctttgctctgctctgctctaccgtgctatacaaaatccattcctgctatgtacagttcacttttgtttctgcgcaaagggaagcgaaaaatttgccaccggcccagtccgccgtgccgagcgacccacggcccgtatcagcggcccgaacacccacacccccgacataccggccgaccgacgatagccggccgcagctgccgctgctgagtcacgctcgcgcccacgggtgctgtttgatctctgcggttttgccccgcgcaggcgtggtgtgtgggctgcacggggcgtgggtgcccgccgtggttgccatgattaccgtctcgtag

SEQ ID NO: 5775 - DNA, 1623 bp, Saccharomyces pastorianus
atgtcgttgcaattgctgaatcccaaggccgagtcgctgagaagagatgccgcgttgaaggtgaacgtcacctctgccgagggtctgcagtccgtgttggagaccaacctgggcccaaagggtacgctgaagatgcttgtagacggggcgggcaatattaagttgaccaaggacggtaaagtgctgctaaccgaaatgcagatccaatcgcccacggccgtgctgatcgcacgggccgcggccgcccaggacgagattaccggtgatgggacgaccactgtggtgtgtttggtgggcgagttgctcagacaggcgcaccggttcatccaggagggtgttcacccacgtatcattactgatgggtttgagatcgcgcggaaggagtcgatgaagtttctagatgagttcaagatcagcaaggcggatctccccaacgacagagagtttttgctacaggtggctcgttcttcgctattgaccaaggtagacgcggatttgagtgaagtgttgaccccgattgttacggacgccgtgcttagcgttcacgacgtggaggcggacaacctggacttgcacatggtggagataatgcagatgcagcacttgtcgcccaaggacaccacttttgtcaaaggcctggtcctcgaccacggtggtaggcatccggacatgcccagccgcatggagaacgcgcacattttgattttaaacgtgtcattagagtatgagaagaccgagatcaactcgggcttcttctacagttccgcggaccagagagacaagctggccgccagcgaaagaagatttgtggacgccaagttgaagaagatcatcgacttgaaaaacgaggtctgcggcatggacccgcacaagggcttcgtcatcattaaccagaagggtatcgaccccatgtcgctggacgtccttgccaagcataacattctggctttgagaagagccaagagacgtaacatggaaagactgcaattggtcaccggcggggaagcacagaactccgtcgaggatttgtcgcctcagatcctcgggttctccggcctggtctaccaaaagaccatcggtgaggagaagttcacatacgtcacggaaaacaccgaccctaagtcttgtaccatcttgatcaaaggttccactcactacgctcttgctcagaccaaagacgccgtgagagacgggttgagagccgtggcaaacgtcctcaaggacaaaaacatcatccccggtgccggtgcattctacatcgcactggcaagacacttgaagtccaccaacatgaacaaacttggcgccaagggtaagacaaagaccggtatcgaagcctttgcggaggccatgcttgtgatcccaaagacgttggtgaaaaactccgggttcgacccattggatgtccttgccatggtggaggacgagttggacgacgcccagcactctgacgaaacaaggtacgttggtgtagacctaaacataggtgactcgtgcgaccccactatcgaaggcatctgggactcctaccgtgtcctaagaaacgcaatcacgggggccacaggtattgcaagtaacctactattatgtgatgagttgttaagggctggtagatccacttga

SEQ ID NO: 5776 - DNA, 384 bp, Saccharomyces pastorianus
atgatatattcaccttgtctcgtgatgacgcccttgaccgtcggtgaatcgttttgtttgctgttttcgttgggaataccattggatatgggcatcttaaatatctggtcactctctagcatttccagacatttggagaaattgtcaatgatgttaggcagttgtggtttaacaatctcttcgatgacccatgaacattctgccatggcatctttatgctcatcatactgggcagctgctccaaacctgtcatttggatacaactcaacactcatattgctatccgaacggctttacttgtgtttgctgtggctgcttgtacatcttcattcattgttcaaacagccccgaattgttccattcattcattctgtatatatttaa

SEQ ID NO: 5777 - DNA, 1224 bp, Saccharomyces pastorianus
atggcaaacatagaaaagccgaataacaacacgggatttcccggtttcgacctgaactcgtattttgccaacgacttcaataacatcaaacaagaaacggaaatggaaatggaaaccgataattccccggatttaccaatgtcttcgtctgcttcaagagaaaactcaaacactttctctgtgattcagagaaccccggatgggaaaatcatcaccacgaataataacatgaactcaaaaatcaataaacaactggacaaattgcccgaaaatttgaggcttaatggtagaacgcccagtgggaaactaagatcgtttgtttgcgaggtttgtaccagagcgttcgcaagacaggagcatttgaaaagacattataggtcccacactaacgagaaaccttacccctgtggtctttgtaacaggtgcttcaccagaagagatttattgatcagacacgctcaaaagattcatagtggtaatttgggtgaaacaatttctcaaaacaagaaatcatccagaacaatcatcaagacccgtaaaaactcggcgtcttcagttaaatttcaaacccctaattacggtacttcagataatctcaatacgttgaactgcgccgccaatacaagaagaaaggcaaatcccagcgcactggcaaaacgtaaatatttgaaaaaactcacccgcagagcctcctttagtgctcagtctgcttcaagttatgccgtatcgaatcaatccgaagtggatcaacaccatccaaaggatcgcgtccaattctccacacctgaactagtaccattggatttgaaaaaccctgaccttgactccacttttgatgcgaatttgaatctagatttagggctgaacttgaattcaggtgtcaacatggcattgaatcattccgattcctccgcttctacaatgaacttggattacagattgcccgaatccgcaaacaattacacatattcctcttcctcgccaaccgctgcttacgttggtactaattcgaactcaaagaatgattttttcaatgacgcaaatttattgtcgtcatcatactggataaaatcttacaacgatcatttattttcggtctctgaaagcgacgagacctctccaatgaactcggagtcaaacgatagtaaattgatcatccccggtttgaaatcaactctcaaccaatggaatgattcaaggtcctcttcttggaccgccgcttag

SEQ ID NO: 5778 - DNA, 129 bp, Saccharomyces pastorianus
gaaccactggtcttgaaatgcaatcacctcaattatgtattccacacagaatcaaaagaatgggtgatccaaacaattatcaacgaggatactggtttccactacagtgatagtgaggatgatagctga

SEQ ID NO: 5779 - DNA, 3900 bp, Saccharomyces pastorianus
atgtcaggtcggttggttcaatggaaaagttctccggatcgggtcgtccaaaatacctcatcaagggcacctccttccccttcagccagaagtagcgatatgaatgaagtaaacgttcccgttgatacgtcggaaatccaggctgaagcaacaaacagcgtcgaaggaagccctcattcaaacccgaatccagtcaagtttatgaacactaatgatatttttcaaaaatcactgaggttgctcgatgagagtccacatcatgatgaggagttgaatattgaggtaggagacgatgaccaaccgaatactaatatattgcgtaacgaaagaactcctgaccttgaccgaattgctaattttttcaagaccaaccgaactcctggtaaagaaaacattttaacgaaatatcaaagttctgatctagaagacacacctttatcatcacgaaaaaaattgactttccacaatccaactattccgttagaacctcaaatgcctaagaagttaaggtcaaacaccgaattctgctcttatagaaaagaaggtactgaagaaactgacacatcattagaggtaacggaggctgatgccacatttttacaagcggcagagctctctgccgacaattctaattgctcacctgaagaaagtgctagatgcgaacaacatgaagacgatttacgtcaaagtagaaatatagacaaaagatgtactgagaatacagagttaattagatcgaataactcaatagattcaagcaaaaaaaacggaatccccaaggatggctggaccacaagaaatgaaagcgaagtgtttaaaaataacggagatgaaacgaaaaataaggcggaagaggcaacgagaagactgaccgaaaatgattcagcgaacgatttaagagaacgtggaagccaagtgatacaaatccatgaatgggaaccagaaattaacgaaacgaaaaagagcctcaacgtttcgagtgaagaaaacaagacgaacaactcatatatcaatattgaaacaagtgttgcatctggtacgccttcacagaataatttagaggaggaaggacctcatgctaacaatctaagcaatgagacaccgtccgagagatgggttttccgatattcaaaaaataaggaattcaatagcaatagatcaacgcaaatagtcagtaatcccaaaacacaagagatggcgccggaggatctgtcaatcaatacgcaacgattacctaaagggtatgatattgatgcaaacaatgaattggagacacagataattgtttcttccctttcacaagggctatctgctcagaaggaacctgtgtttcagtctactgagcaggctgaagaaatcaaaactcaaattatcaactctccggaacaaaatgctttaaacaccacgttagaaactcctggtagtatttctcgaatcagttttgaacctattctagaagttcccgagactagttcaccctccaaaaatacactttcaaagccatcgaactcttctcccatttcaaagggaaaagacacattcaatgtgtacggtaaagaagtagacacaaacaacgtcttttcaaatgatattcagcgttctttggacgccgatattggagatggcaatactatgaccggttcctcagaatataatgcacggaaggaattgagtgatagagtatacttacaactttcagggaagcagaagtctgacttaggaagcgatgaaactcacagcgtgtcccaaaacgaacttgatacgaaaagggatggcaccattatgagcgaggccgaactaactcaggaattacctgaagttgaagaacaacaagacctggacacttcaccaaagaatttggaaagggaggagcgatctacaatagagaaaacaaaccacaaagaagattcgcttcaaatctacgctgataatacacaaattaatgtgaatgaacaaggcgacatggaactgcagacggttgaaacttcggctagccgagaaggtaaggaaaagagctcacaattaaaaagaaatcttatgcaattgttcccaaatgactcacaagagatagtttctaatggaagaaggataaagcgacgccaaaaggatacaatagaaatcgccgaagaagaagaaaaccgaagtactaagacatcacccacaaagcgttcaaaaataagcactgattttgtagccactcctgctaaaggagaagcttatagtagcaatgaatttcaaggaggtgttgaagaatctgaaagatattataaagaagcctcctatgtgttccctcaaggaatcaaaactgaggatagtagtttcttgtcgaaagaagacattatatttgggaatgcagtatggtgtcagtattcatggaattataaattttatccgggcattttattggatattgacactaatcgggacggttattggatttattttgagacaggaagatctttaaccaaagaggaagatatctactatcttgatatcagaataggagatgcagtcacttctgatggaaatgaatacatagtggtaggtctagaatgccgtagccatgatcgcgatattataaggtgtattcgaggatatgacaccgttcatttaaaaaagaaaaacttgagtgggtcgctgggaaaaaggatcctagttaaagcgctcagctctataagtcttgatctaaacgaatggaccaaaagagcaaaaatcatactagaagacgatgaaagaaccaaaggaaacgcatatagatatctgcggcatcccattagaggaaggaaaccaatgaccaacgtgatatcaccaaaaaagctagctaatgacgaaaaggggaaaagagcgcataatagagtgcacaatgatgaacaattgagctatgaaaataatgaacttactaaaaaaattactaaaaattcctcgtcagaaaacgaggccttccctaacctacttttttctttgggagaagtaaaaagagggaatatatttgataggtgcatatttgttttgacaagtttatttgaaaatagagatgagctgcgccaaatcatcgagtcacaaggcggcacagtaatcgattctgggttttcctctttgtttgatttccctcatccaccagctaaatttctggttgatagagaccgtatagagaatacacgagagttggacctaaaactagcttggaaacctgactgtcaattcgctaattataggtttgcttgtctaatcacgaaacggcatttaagaagcttaaagtatttggaaactttggcattgggatggcctacactacactggaaatttataagcacatgcatcgaacgaaaaaaaatatcgccacatttaatttaccaatatttgttaccttcgggggaaagtttccggttatcattagattctcaatcaaagggagggatcgttaaatctaacaacattttctcattttataccaggtttttgcgaggatgtcacctacaaaatcaaatagacgggatggcaaatatgctgaatggctatattgttattatatgtggtagttcggagttggatagttttatcaaatttgtttttgcttgtttaagtgcaaataaaatgtttaccattgatttgccgaatattgacatagagaatacagaatcactgtcaaacttcttggcttctttagtttctcggataggatcggcaatatctgataaaaatttaaaatttctcatatatgttaacgaaaataatggaaagactcaaatgcgacttctcgaaaaattgagaaaccaactgtctttgaaattcaatcacctcaattatgtattccacacagaatcaaaagaatggttgatccaaacaattatcaacgaggatactggtttccactacagtgatagtgaggatgatagctga

SEQ ID NO: 5780 - DNA, 333 bp, Saccharomyces pastorianus
atggataaatatactgctttgattcacgatgagaatttttcaactcttacattgaatgtctcgagataccctaaaagtttggcatattgggagaagttactgaactatatagtaaaggcttcggcaccaatatgcaagtccactgagcctcaattattaaagttaatacgatgtacttattcttctatgctgaatgagtttccctatctagaaaactactatatcgacttcgcgctactggaatacaaactagggaatgtttctatgtctcataagatatttcagcgcggattgcaagccttaaccaaaaactaccagatggtcaagtcatta

SEQ ID NO: 5781 - DNA, 243 bp, Saccharomyces pastorianus
atgcgttcaagaagaaggggagtagcgtatcatcatagtaaaccaaaaggaccactttcacaaggacagtatcccatagcatctaatgagggacaaagaaggaagctcaatagtcctgaggcgtttcaatcgtttgacatctggaaaaatttggatagaataagaacaactagaaaggatgtggaacaacttatgaagggcagcctacttatacttcctgtgagaacacaagataaacagcaa

SEQ ID NO: 5782 - DNA, 345 bp, Saccharomyces pastorianus
atgacatggcattcttctgtgaccaacgaaaccaccacagactctacacctcctatgccttccacttgtttggtaactgtggaaacgcaggatccacaggtcattccttgtatgcttagtaaaccttgtcttgtagttgcggttgtagtatccttgtcatttagtatctcgcagtcgaacccacaatcttctattgtttccttgatagaatcagtagtcaccccattatcgtatgccacctggcactcattcgtcactaaactaatatcacattttgtcacccccgctaaagctcgtagctgcgtggtaagcgtgttcacacaggcgctacatgtcattccatga

SEQ ID NO: 5783 - DNA, 1296 bp, Saccharomyces pastorianus
atggccaaaagaagaccaaaaaagagaactcatgcgcaggttgtacctgagcaggaaaaaggtattccaaaatcaatggtcattagagtcggacaaacttctttggccaaccactctttgaaccaattagtaaaggattttcgtcaaattatgcaaccacacacagctataaaactgaaagagcgtaagtccaataaactcaaggattttgttgttatgtgtggtccattaggtgttactcatctctttatgtttacacaatccgaaaagacaggtaatgtttctttgaagatagcaagaactccacagggtcctactgtgaccttccaagtgatggattattccctagggaaagatatcaaaaagttcttaaaaagaccaaaatcattgaataatgatgacgtactaaatccaccattgctagtcttaaacgggttttccacatccaagaaatccgatgaagacaatcaggatgtaaacgtagagaaggtcgttgtttccatgtttcaaaacatcttcccacctttaaatccggctaggacttcattaaattctatcaaacgtgtattcatgatcaacaaggacagagcaacgggcgaaatttccatgcgtcactacttcatcgatattagagaggtagaaatttcgagaaacctgaaaagactttataaggctaagaataatttgagtaaaacggtgccgaatttacatcgaaaagatgacatttcctcattaatcttggaccacgatttgggtgcctatacatctgaatcagaaatagaagacgacgctattgtgagagtggttgataaccaagacgtcaaagcaaagcaatctcaaaactcgaaacctcaaaagaaatcagcagagacaaaggatgctaaagaggaagaagaagaagaagacgcagaaatggaggagcccaaacgccaagaaccttcccaactaactccacgtaagaaggctatcaagcttaccgaattgggaccaagactaaccttgaaactagtcaagatcgaagaaggaatctgttcaggaaaagtgttgcatcacgaatacgttcaaaaatcaagcggagaaattagagaattggagaaaagacatgctgcaaagatgagactcaaggaacaaagaaagaaagagcaagaagaaaacatcgcgaaaaagaaggctgtcaaagatgctaagaaggaacgtaagttggaaagaagaaaagctagggcggcagaagagggcgacggtgaaaacaaggccgatgctatgagtgatgactcatcttcgtccagcgaagattaa

SEQ ID NO: 5784 - DNA, 354 bp, Saccharomyces pastorianus
atgctggactatggtaggctggcatacgacgtcacaagaaagcatacgtccttccctttactcgctccaaaacggcacaataatattggggagagagggaacggcattgaagcttatactctaacggtcttcggcccattcattctcacgtctgatggcggcttcctcctctggggtgaagtcgttgacgatattaaacgtccttcttatttcctcgggggacctgcctctgatcatttcggcaacaactttgcagcccgcgtccagcaacggcttgatgttaaggtagtttgccgccaggatgatttcataaagcatctcttggtccactttcaaaaactccctatcccatga

SEQ ID NO: 5785 - DNA, 4356 bp, Saccharomyces pastorianus
atgaccacacctcgtaaatcacatacgaaaggcagcaaagttgatggcgaacaggatttggcggacttgaagtttaaatatgacctgctgacgaatgagctgttccatttaagggagtttatttcactagtggactacgatccaacgcatttcaacgactcggaaagtttccacaaatttcttaaggatacacacttgtcgttggaggagggacgagaagagcctactaacggccttgaggatacaattatagctgccaatctcactcataggaggcgtaacctcaggacatcaacagttgtcagttcagatgccattaacgagaaaaaggacgatatagaactgaagctggaaactatcgcgcctttggttcgaaataaatgtgaagaactgaaaagtaaactgaacgataatttaaacatcaaacacgtggtaccacaaaagagaccaatattgcattcaaagaaaagagaagctcccaaagcttccaagttaaaaactgaaaaaaaggaagagatatcactatcacttgtaaataaagatgaacagaaacataaccatatcgcaaaggtagaagagacttccgaaaacttcacaataaactatgcttctgactcctccgacaacgctagtgaacactacagtgataatttctatttcaccacatcatcagaagaggaagacataaaaaagaaaagaggcagaaagagaaaaagaccaagaataaatttaacggtccatctcccaaaacaaacgataacaaatccctcccatgtaattaagccggaatataaaaacttgcatgaatacatgaattccttcaaatctttagaagaagatttaacgttggacgagtataatcaatatatcgatgaacagaaacaaatgttgttgagaattaaaaaaggaatcgaaagtggtacattgaagtatgacaaagaaacagactcactgcaacctttaacatcaaaggaaattaaaattattttagcgtataaaccagacccaatctcatatttttataaacaacagaatctgcaagttcaccgggaccatttgattaatcaaggtgttcacatgagtaaattgtttagaaattcgacaaaggcaagaatagcaagagctaagaaagtctctcaaatgatcgaacagcattttaaacatatagctggcgcagaggaaagaaaattgaaagaagaggaaagacataaaaagggtctagcaaggttcgctgttcaagccgttaaaaaaagatggaacatggctgagaaagcttatagaattttgaggaaagatgaagaagagcagctaaagaggattgagggtaaacagcatttatctaagatgctggagaagagtacacagctgctaggtgctcaactaaaccaaacaaatgaagatggaaaagagggcaatttgtcgtctaattcagacgatatatcgagtgagagtgatattggtatggatgatgaattgtcaacatcctcttctgatgatgaagaagtgggtgctgatattgagttggataataacaaccaagcctcaacagaagccactccaacagatgagtccttgaatctaacacagttgaaggaaaaatacgaacatctgaatggttcgtcgacagtatatgactcgagtaatgcagacggaaagtctcccttattggacgaacacgacgatgcaaatagtgaaagttctgtaatgacaggagaggaaacgtctgaaaactcctcatccgaaaacgaaagccaaaaagaaaccgaggatagatctgatgatagaaccccttctgtcgggctaagtgcgttgtttggtaagggtgaagaatctaatgaagaactagatcttgatgacagtgaagactttgcaacgaacaactcttcctctgcagagagcgaggaggtcgatcaaagagatgaagcagataatttgggctctaatgcagataatgtagagaaagttgaacataccgagactggagatggaaccgatgtgaacgatgttgaagaagaagtccccaaaaaaatagaagaagaacaattatcagtggtggacgtaccagtgccatctttactaagaggaaatttgagaacatatcaaaagcaaggtctaaattggctagcctcgctttacaacaatcaaacaaacggtatactagccgatgaaatggggctgggtaaaactattcaaacgatttctctgttagcatatttagcgtgtgaaaaagaaaattgggggccacaccttattgtcgttcctacatctgttttattaaattgggaaatggaatttaaaagatttgctcccggcttcaaagttttaacatattacggctctcctcaacagcgtaaagaaaagagaaaaggttggaacaaaccggacgctttccatgtgtgtattgtttcttaccagttagtggtccaagaccaacactcttttaaaagaaaaagatggcagtatatggtattggatgaagctcataacatcaaaaactttagatcgacaaggtggcaagctcttttgaacttcaatacacagagaaggttgttgttaactggtacgcctttacagaataaccttgctgagctgtggtcattgttgtattttttaatgccacaaacagtcattgatgggaaaaaagtatcgggatttgcggatcttgaggcatttcaacaatggtttggacgccctgtcgataagattattgagaccggtcaaggctttggacaagacaaagaaacaaagaagacagtggccaagttgcatcaagttttacgtccatatcttttaagaagattaaaagcagatgtcgaaaagcagatgccggctaagtatgagcatattgtttattgtaaactatctaaaaggcaaaggtttttgtatgatgatttcatgtctagagctcaaacgaaggcaactctggccagcggtaacttcatgtctatcgtcaactgtttgatgcaattgagaaaggtgtgtaatcatcctaatttatttgaagtgagacccattttgacctcgtttgttcttgatcattgtgtggcttccgattataccagcattgaaaaaactgtagttaatctcttcgaaaaaagcaaacaattcaaacagattgatttggattttatgaacttagtttttgctaataatgatcacgacttaacttcctatcatgctgaggaaatttcgaaactaaaatgtgtcaatgattttattgaagaggttgataaactgaaagaaactaataaacaacttcaaaaggaatacgaaaacacttcattgaactttcaagacgcaaatcaatacttccaatattctaagcaacggaaagttgaaggaacacttggtatgctgaacttcttgaaaatggttaataggctaaggtgtgataggagaccaatatttggtaagaacttgattgagctattgaccaaagatgatatgattggatacgagaagccacggatcattgatggcgggttgataaaacctttgcaaaccagactgttggacaataaaaagatcatcgatacctttgcagttctaacgccaaacgccgtctcattggatatgagaaagttaacgctaggattaaacgatgacagtttattagatgataacaccaagtcggaggtagtggagaattgctttggagtggccaacccactacatcaactacaaaccaaactaacaattgcattccctgataaatccttgcttcaatatgactgtggtaagttacaaaaattggcaataatactacaacagctcaaggacaatggccacagggcccttattttcactcaaatgacaaaagttttggacgtcttggaacagtttttaaattatcatggttacttgtacatgagattagacggtgccacaaagatcgaggaccgtcaaatcctaacagagagatttaacactgattccaggactacagtgtttattctatccagtaggtcaggggggttaggtattaatctaactggtgcagacaccgttatcttttacgattcagattggaatccagccatggataaacagtgtcaagatagatgtcatagaattggtcagacccgggatgtgcatatttacagatttgtcagcgaacataccattgaaagtaatattctgaaaaaggcaaaccaaaaaagacaactggacaacgttgttattcaagaaggtgacttcaccaccgactatttcagcaagctttccgtaagggacctactaggatccgaactacccgggaacgctccaaatgaggacaagccactaatagcagacgcaggcatggctgccgaggaccccaaacagctggaaaaactattggcgcaagctgaagaatga

SEQ ID NO: 5786 - DNA, 408 bp, Saccharomyces pastorianus
atggcaaaatgtatatgccggagttatcaagggtctttagcccagatggtcaattcatcgttgtataaacatatgggcagcgcatccccatatcagatattgcctattgtaagtttgcgttctttatctacgaaaggttttcttttggaaagcgaaaagaactgtttgaaggctacgcaaattcgtgattttgaacgattgatgccatattccagcaaacacgaatcttcgaaaaacgttcaaaagcgtttatacgagctccgacaattgaagactgtattatgtgagacgtttggagtaacagagtatgcttctttttttgaatctttacgacatgccttgcgttccaaagatctttcaaaccctgaaaagacgaaactgctctatgatgtaatcttgaatcaacat

SEQ ID NO: 5787 - DNA, 318 bp, Saccharomyces pastorianus
atgtgtcttttccctagtagtttactttctaacgcacgctcaaaccggtcttttttcaattggtgttctctaacttcttgctcttttaaaggctgtgacattggtacgtcctttttcaaatcattaattaggtttcttttacggtttttatcgatattgcctgaccttgaactcggcggtatattggccttgatttctgggaaactgacatcgaattgcgaagcttcgctaaacaacctggtagagtcaatggtatcatcaatgcttattcttcgcattttcctcgccgggccttcgttttcgtcatcgtcattatag

SEQ ID NO: 5788 - DNA, 471 bp, Saccharomyces pastorianus
atgccacaaagaattgagcttacatcggaaccagtgagaagacctcagtcttccggaagttcattgatcagaaagatccaaagagcatgtaaatccacattacctgaaccagatttgggtcttaatctagacatagccgattttatcaactcaaagcaaggagctacaccaagggaagcggtcctgacgattggaaaactaataaataatggcgacacccaaacggctgtttttgccctttctctactagatgtcttagtaaaaaactgtggctacccactgcacctacaaatatccagaaaggaattcttaaatgatctggtaaaaaggtttccagaacggccgcctttgaggtactctaaggtccaacaaatggttctcgaagctatcgaggaatggtaccaaactatctgcaaacacgccagttataaggatgaccttcaatatatagtgacatgcacaaattattga

SEQ ID NO: 5789 - DNA, 522 bp, Saccharomyces pastorianus
atggtagaagctattaaactgaatgatttaaagaataggaaaagaagaaatacagaagaagaagaaaatggcagcgaggaatctgaaatcgatataagtagtaccgattcagaaaacgaagaagagccaaatggggaagaagagatcgtgaatattgatttcgacttcttcagtggtaacccagatgttgatttccacgctttaaagaatttgtcacgtcaactctttggacctcaagaaagtaccagaattcaactgagcagtctggcagatttgatgctaggctctccaactaccacaatcaaaacagatggcaaagaatctgatccttattgttttctttctttcattgacttcaaagctaaccgcaatagtgactatgcaaaatacttacagaaagtggacatgagactgtctacgttttttcaaactatttcggatagcggcaacaaaaactgtgctttggtcatcagcgaaagactaattaacatgccaccggaagtcgttcccctttatacaaga

SEQ ID NO: 5790 - DNA, 276 bp, Saccharomyces pastorianus
atgtcggctcctagcacacatacttttgaagtgcatctattaataatcgtgctcaaaggaggatatagcctgactgcctcaaaaagaaatgcattcaataaaggtaagtccgctaaggctttcgaatcagtgacactttctacttcttgcctgagactgttctgccattcgtttgaatacttagccaaaagatacaacgaagtgttgaagagcagttgggggttttcatggccagcaacgaggataatgacgatgttatcggataattgtttgtag

SEQ ID NO: 5791 - DNA, 2466 bp, Saccharomyces pastorianus
atggtctcactaagtataaaaaatgttctgctcctcatatcattaatgaatgcaattgcagcttataccaatgatacttcatactcatatttatacactagtggaatagatagtacgtcgtcgtattcaataaatgggatatacagtactgaatccagcaataatgaaaatggagaaacatcgagccctgaaaccaccacattggctggccaatatagtgaaagtgaaagggtatcaacgaatgaaggacaaagttctaccatttctcaacaacttacctctgctgctgtcaccgtacgaagttcggactttatgtcgaagtcaacgatagtagcgacagcaagtagtagtagcgttcccagaccgattcaagctaccagtgaagcaccatcactttcacaaattcatagttatgacacaaaacctgtttcaagatcattactttcccaatcatcgagtagttcatatacatctgatgccacagcagtaccgagaggaacaaatccaataataacgacgaccttttcatcttccaaaggcgaaataataccaactcaaacttctgccgccagtcgcacagctagtcttgcgcaagtggtacctgagtcctcaaaactttctcgtacgaccttaacgacaacaacccatgtttcaaacggtgaaacaacacaaactcaattttttagcacaataacgtctatgataccaactgaagagtacactatagacgaattctctggagactacatcaccaacgaccctggtggggaattgattgtggaatactcatctagccaaaccgctacaattattttatcttccaaaggtgaaactatatcgaccaaaacttcgagcaccagtaacgctgccagtatttcgcaagttgttaccggggcctcacagctttctcgtataacttcaaccataacaacacaaagcgcaagcataacgcaaacccagcctttcagcttaatttcatctataaaattgactcaagtgtctagtacgagtgaatgggagacctccgaaaatgacggcggaattttcaccaaataccctaaccaggaattaattgtagatgatccgtctagcttgtctcttaaaacaactgtatcatcttcaatgaaaagtcaaagtgaacacactgaatctaattcaatcacgaaatcttcgacattgaatcaaaattccatagttaccagtataccgtacgctgaagcttcaactttgagcacgattccttctgtgtcttcgtacacatcctccccagccgcagttggtccttctgcttcttcatacacatcctcttcggctgcagctgcagttggtccttctgcttcttcatacacatcctccccagccgcagttggttcttctgcttcatcatacacatcctctccagctgcagttggtccttctgcttcttctgcttctccatacacatcctccccagccgcggttagtccttctgcttcttcatacacatcctccccagccgcggttagtccttctgcttcttcatacacatcctccccaaccgcagttggtcctttttcttctactcaaacgatttctccatctttctacacccctttttcacctgccactacttatgcttctggattgtcatcagtacagtctctgttaacatccgtcactgttacgccagtaatttcaatacatacaacgtcatcttcatcccaacaagtttcttctacaccatataaaacaatactccaatccatatctataagctcaatttcaagtgacgctacgttttcaagtccagtttctatcatcagtataacctcttttgcttcaaaccgggtcgaaacttctccgctaggttcatctactcaatccagctccacttacgtggccgagtcgtctaaaagtaacatacctctaacgcagctccctagtggttcagaagcgtcatataggatgactaatcagaataccgcgagcaatgatcaactcacaacaacaaggcaatcaaatctcccatattcttcctctaagaaaacattagataatgaatttttttcggcaacgtttcaaaccaatcctacaggtttgactaagtcggataccttatctacctcagcatccggtagctcgacgcctcaattagtggcaagcggtgtttctgactcgtcgattgatctgggatcccatatcacgtcgttatatcactccgcctcctcaatatcttcaaaaaagtattccaaagagacaaatattatcactaaatcattttcaaatacacaaggaagtgtcacaagatcaacaacaacatatcaatccagtaggcagtctagaatatctacagcaaagaccactgtaaatacccagaatcatgttttaacaaccacctcttcatccaccttttcaaaatcagcgaactcgatagctggctcaatcagtttatcaaataagttgtcaaaaaccacaactgacagtcgg

SEQ ID NO: 5792 - DNA, 1092 bp, Saccharomyces pastorianus
atgcctatcaaaataagaccctcagaaaatacagtgcctacatttccaaagcggagaagaacataccaagcttgcatcaattgcagatcaaggaaggtgaaatgcgatcttggccctgtcgataaccctcatacaccaccatgcgctcgctgtaaaagggaactaaaaaggtgtctttttagttccaacagagaagcaatgcataggttatcgcccagcatgattaatataacaagtaaaaatgcctccagtaagagtgaacaaggggtaccaaatgagtcgataagtccgactccatcagatatgactttgtcgggaaagaacactcataatgaaacgttatttaaatcagatggtatgaaatggaaacttgaactttcatccatgcagaacactttagaatttttagcgcaagcggctggtaccgtggctaaagaaggtgcgaaggaagttataaaagatgagtccacaacaacgccatatgtaaactctttgcactcatcatgtcaaccgtccacagatgaaggattaaaacggctttcaggatgtgtaagtgctgcttctgacaccccagacgaaaatttaacggttgcacttgctaccaccctgaatgctaataaaacaacttcacagttaatagaagagattggtaaagttagaccaacacccacacgaaaaatagaggactttgaatatatcggtccagctaatctgctcaccaaagaagaagcaattgatttaatcgaagcatttttcctcacgatgcatccgttctttcctaacatcccattccaattacacgatccaaaagaattggcacaataccccattttgttctgtgcgattttaactgtttccgctcgctatcatcctttcgatactctggggttagataatggagaaaatggtgcaaggcatgttgaagttcacgataaattatgggtgtactgccaaaaactgatatctcaaacaatttgggcagaagctagcacaagatcgattggtactgtgcttgcatttataatttccacggaatggaacccaaggagtattcactgcaaatggtctgactacgcaatgatccagaactaa

SEQ ID NO: 5793 - DNA, 486 bp, Saccharomyces pastorianus
  modified_base (449)..(449): a, c, g, t, unknown, or other
atgtcatggatgctaacggggtccgcagtaaggctcgcacaggatatggggtttattgaaaatagttcaaaaatatttatagttactcatatctctgaaaccacaagcgcaatgaatatgaaccaaaggtctttactagcagaatcatttagtgtcttgaacctaaacttagaaaggtttgacaatgatggaaatgaaaataatgagaactatcttaggaatgaaaagttctatctagatgaaattctacctaatgatgaaagtaaagagaggtggaaaaaggttttagaaaatttagaagctgacaacgacaacgagaaatgcgttctgacagattgggaacgagagtttttgaacgatgaatacgttctatattactccaataagaaggacgatacgaatttggcacaaaataatatgccaccatttccgctagactctagaggatnccccggtaccgagctcgaattgtatcatgtcatacgt

SEQ ID NO: 5794 - DNA, 1278 bp, Saccharomyces pastorianus
atgccaccatttccgctaagattctcgtttgctcaaagagcaaagatagagataattcggatcctttccattgcatatgagaccatctattgcgaaaagaataagagaaaactggcaactactgaccaaaggcacaacctatctgtactaagtgttttttctcccttgatagaaggctggcttagcaactacagagaggttcttgtacctctttctgatgttccattttctttagcgaatagaaagaataaaagacaagttcttaacaacatcgataggataaatggcgaaagtattattacagattttaattattgtcagctttacattttctcacttgcattacaagtggatgggaagataagcagactaaacatgagcgaaattgttaagagcgccaggtatgtagaattagcatacaaatctgctaaagaaattttaagctctgcaaaaagggtctcaagacaatgcatgctgaagtacatgcccgttagatgggttatacgaataattagatcaattgcctttatagtgaagtgttacctaacactcactggcagtgaaatagcaacaaatcccgatgccagaaacattctgaaactaagtgcaatatctgtcgatgaaacattcgatctcattcgcgacaccgcagtaactttgaaggaggccacacccgatgagctacacctttgccaaaggtatgcagccatattaatgtacttgtgtacagaaatgaaacttcgaaagaaatcccatttagaacgaccacccacatcaagaactggtatagcccccttgaaaagcaatggcgattcgccgttagaaggagcaaacctggctaaagggccagcgtttggaaaagctgctggcacgagtaaggcagagagtattttcgatcctttagcgaagacttctacagaggcaacatgtgatgatccgaataactcaacggagttaccatttaaaagtggcctaaattcctttgtggatcgaactagcgatattactgcaatgttactgaataatgagcttttccaaggcccatcgttatctgaagaagtcacagattggtttagtgctagtgaagacattgggctggagttcgtagaaccgtggacagagctaatcgaacaacgatacatgcaatgtggtgatggtgataacaacaatttcgagaatttatatacttattcgcgaatagtaatgacactgatactgacactgatagaccagcccctcacacataaaattagagaaaaggaatgtttaattagataa

SEQ ID NO: 5795 - DNA, 132 bp, Saccharomyces pastorianus
atgggtgcacaaggtttattgaacaagaacgggactccaataaagaaggtggccaggccaggcagaaaggtcgacgctaaggccaagaataaaaggactgcgctgaacacggcagtcctacgggcgttttga

SEQ ID NO: 5796 - DNA, 462 bp, Saccharomyces pastorianus
atggacaccatagtcgatgattccaattatgactggctattccaattattgaatgcgttgactgttggtgattttgacaaatttgattcattgataaaagttcaaatttccaagattccagtattagcagaacatgaatcctttttacgacaaaagatttgcttaatgacactaattgaaacagtttttgtcaagaatattagaatgttgtcttttgatgatatctccgaggcaacccatttaccaaaggataatgttgaacatttagtcatgagagccataagtttacgcctattaaggggctgtattgatcaggtaaacgagttagtaaccatctcatgggtccaaccaagaattataagtggtgatcaaatcacaaagatgaaaggaagactggtagaatggaatgatcaagtcgagaaacgacctgcaggcatgcaagctggcactgccgtcgtttac

SEQ ID NO: 5797 - DNA, 129 bp, Saccharomyces pastorianus
atgtttgataaccatgaacttgacactgtattgagtacacttcgcatggaagcagaaccttctttccaccctttgttcgaagagtttgaaaaatttatgaacaaaattatggttcagttgtctgaatcc

SEQ ID NO: 5798 - DNA, 954 bp, Saccharomyces pastorianus
atgtttaataatcatgaaattgacaccatattaagcactctccgcatggaggcagatccctctttgcatcctttattcgaacaatttgagaaattttatgaagagaaattgtggttccaattgtccgaatccttgactaaattttttgatgatgctaaatctacaccattgaggctcagattatatgataacttcgtttctaaattttatgataaaatcaaccaattgtcagtagtaaagtatctacttgcctctttgaaggattctaaggatttcgatgagtctttaaaatatttggatgatttgaaggctcaatttcaagaattggactctaaaaaacaaagaaataatggatcaaaagaccatggtgatggtattttgttgatagatagcgaaattgctagaacttacctgttaaagaacgacctcgttaaggcaagagatttattagatgatttggaaaagacattggataaaaaggattccattccattaaggataacaaacagcttctattctacaaattcccagtattttaaatttaaaaatgatttcaattctttctactacacaagtctattatacctttctaccttagaaccatctacaagcattactttagccgaacgtcaacaattggcctatgatttgagtatctcagcattgttaggtgacaaaatctataattttggcgaactattacaccatccaataatggaaactatagtcaacgattccaattacgattggcttttccaattattaaatgctctaaccgttggtgattttgataaattcgactcattgataaaagttcaaatatcaaagattcctatattggctcaacatgaatcatttttacgacaaaaaatttgcctaatgacctccttgaaccagttttgtcaaactatcaggatgtttccttcgacgatttccacaggcaaccactaccaa

SEQ ID NO: 5799 - DNA, 1278 bp, Saccharomyces pastorianus
atgtctgaagctcaagaaactcacgtagagcaactaccagaatctgttgtcgatgccccagtcgaagaacagcaccaagaaccaccacaggctccagatgctccacaagaaccacaagttccacaggaatctgctccacaggaatctgctccacaagaaccaccagctccacaagaacaaaatgacgttcctccaccatctaatgctccaatttatgaaggcgaagaatcccacagtgtccaagactaccaagaggcccaccagcaccaccaaccacctgaaccccaaccatattatcctcctcctcctccaggtgaacacatgcacggtcgcccaccaatgcaccaccgtcaagaaggagaactctcgaacaccagattgtttgttagacctttcccattggacgttcaagaatccgagttgaatgaaatctttggtccatttggaccaatgaaggaagtcaagatcttgaacggcttcgcgtttgttgaatttgaagaagcagaatccgctgccaaagccattgaagaagttcacggtaagagttttgctaaccaacctttggaagttgtttactctaaattgcctgccaagagataccgtatcaccatgaaaaacttaccagaaggttgttcatggcaagatcttaaagatttagccagggaaaatagtttagaaactactttttctggcgtcaataccagagattttgatggtaccggtgctctagaattccctagtgaagaaatcttggtcgaagctttggagagattaaacaatattgaattcagaggttctgtcattactgttgaaagagatgacaatcctcctccaatcagaagatctaacagaggtggcttcagaggtcgcggcggcttcagaggcggcttcagaggtggcttcagaggcggtttctccctagaggcggttacgacggccccagaggtggctttggcgccccaagaggtggctacggtggctattctagaggtggctatggtggctactccagaggcggttacggtggctctagaggcggttacgacagtccaagaggtggttacgatagtccaagaggtggctattccagaggtggctacggtggtccaagaaatgattacggtcctccaaggggtagctacggtggttcaagaggtggttatgatggtccaagaggcgattatggccccccaagagatgcgtacagaaccagagatgctccacgtgaaagatctccaaccaggtaagcgattttatataactggaaaaaaattttaa

SEQ ID NO: 5800 - DNA, 96 bp, Saccharomyces pastorianus
atgtccgcttctgaattctacgcaaaggagattaagagtgcatttaagcaatttactgacttccccatagagggagagcaatttgaagattttttg

SEQ ID NO: 5801 - DNA, 1137 bp, Saccharomyces pastorianus
atgtcgaagtccagatattatttggagcaatgtattcccgaaatggatgatctggtggaaaagggacttttcaccaagaatgaggtttccttaatcatgaaaaaaagaaccgattttgaacataggctaaactctagaggttccagtattaacgattacgtaaaatacattgattatgaaaccaacgtcaacaagctacgtgccaagagatgtaaaagaatcttacaggctaaaaagactaacagtctatctgactggtccattcaacaaagaataggttttatttatcaaagaggaacgaacaaatttccacaagatttgaagttctgggccatgtatttgaactacatgaaggctagaggtaaccaaacatcatataagaagattcacaacatttataaccagttattgaaattacatccaacaaatgtggatatatggattagttgtgccaagtacgagtacgaagttcacgctaatttcaagagttgtagaaacatcttccagaacggtttgaagtttaatcctgatatacctaagctatggtacgaatatataaagttcgaattgaatttcatcactaagttgattaacagaagaaaagtgatgggtttgatcaatgaaagagaacaagaactagatatgctaaacgaacagaagaatactgagaccaatgatgaagagaaatctcacatgcaagttccatcaacaggcgattctatgaaggataaattgaatgaactgcccgaagcagatataaacgtgttaggtaatgcagagactaacccagcgctacgtggagatattgcattgactatttttgacgtgtgtatgaaaactttaggtaaacattacattaacaagcataagggctattatgccatttcagactctaagatgaattctgaattgaacaaagaagcgttgaattacttgtttaatcaatcaataaaatatatccaattatttgatgaattcccagatttagaaagagattatcttatcaatcacattttgcaattttggaaaaacgatatgtacgatctttcgctccgtaaggatttacccgagttgtatttaaaaacagtactgattgacaccacgttaatttccgatacatgccagtccaagacctga

SEQ ID NO: 5802 - DNA, 369 bp, Saccharomyces pastorianus
  modified_base (365)..(365): a, c, g, t, unknown, or other
atggtagcacaagttcaaaaacaagccccagcttttaagaaaacagcggtagtcgacggtatcttcgaagaaatctctttggaacaatacaaaggtaaatatgttgttctcgcctttgtgccattagccttttcatttgtctgtccaactgaaattgtggcattttccgatgctgccaagaagttcgaggagcaaggtgcccaaattctatttgcctccaccgactcggaatattccttactggcgtggaccaaccttgctagaaaggacggtggcttgggtccagtcaatgttcctttattagccgacaccaatcattctttgtccagagactatggtgtcctaattgaagaagaagtattgcnttga

SEQ ID NO: 5803 - DNA, 1602 bp, Saccharomyces pastorianus
atgccctctaccacgttgttgttcccacataagcacatcagggcattgccaggcaagatgtacgcgttcttcagacagcttgtcagtggagtagtaatatccaagccagatttgagtctgcgtttctcatccgaaagtggcacgaaattggaggatgaggacgaggaggacgaggaggacgaagaagacggaaacatggtcgccggtctgtttccaaagtcgaacaacgtagatcgctccctgaacggaggttcctccgtcatcccatgctccatggatgctagccacctgaacactccaatatcgatgacgctatccccggaaaatcgcattaaatgcgaagtgaatgcaaagctgctaccggggtccaagctggagcaagaagccgggattttggtgacgtcgtctagcagtgcgtcgagttctccgctaagtgcgtcaggctccaccccggagcactccacgaaggtcttggaaaacggtgaagaggagttcatctgccactactgcgacgccacctttaggatcaggggctacctcaccagacatattaagaagcacgctatccaaaaggcttaccactgtcccttctttaactgttctacacccccggaccttagatgccacaattctggcgggtttagcagacgcgacacttacaagactcacttgaaggcaagacacgttttgtactcgaaaggcgtcaaaccacaggaccgtaacaaatcttcaggccattgcgctcagtgtggcgaatacttttccgccatcgagaatttcgtcgagaaccacatcgaatctggcgattgtaaagctttgccgcaaggctataccaagaaaaatgagaagagatcaggcaaattaagaaaaatcaaaacctccaacggtcattcccgtttcatttccacttcacaaagtgttgtggagcccaaagtgctcttcaataaagacgctgtggaggccatgacaatagtggccaacaacagttcgggcagcgatataatatccaagtacggcaacaataagctaatgttgaactcagaaaactttcaaatcgacatacccaagaggaaaagaaagtacaccaagaggaagcagcaacagcaccctgattcagcaataacatcatcaaccgacaagaaccaacaagaggccctggacgccatctcatctgccgcagtattttcacatttcgactcccatcttctcgagcccgtcacttccaattcatcagaatcttctgcggaaattatggcccacagtaagcaaatgaaaaatatcttgattgatataaacagcttcacaaacgagcagcaacaaccacagaatgttcctacgttcatgccactggatattgaacagtcctcttacgacctgaacgacatggcaatgtcgtatccgatcacacccgcacaaaacagtcataacagttcacagtataccaatgcaaagatcactcaaatattacagacacaactggacccagaatatcttagccaaagccatataagagaaacgcagcaatatttggacttttataacgataattttggatcgcagtttcgagtaaataaacacatgaggaaaacggaaaaaaagtaa

SEQ ID NO: 5804 - DNA, 696 bp, Saccharomyces pastorianus
  modified_base (602)..(658): a, c, g, t, unknown, or other
atgaatagagatcaaactgtgaagtatcaagagcgaaacctgcggcaaaagtacaatatgctacacgcattaccggcgttaaaatctaaagcgctctcaggactatattatagaaacttccataattctgtgaaacgatatcaagttgtattgcccgaacagctaattagtgggaaattttgtcctcattgtggatgcgtttatgttccgaattttaatgcaactctccaagccacaaccagcactgaactagatgattcggcaaaactcaacaacgaaggtaggcagacatcaaaaaattgtattgaggtcagatgtttgaattgcaaagtgtgtgaacaatttgattggaaaactgaactagctggacaagccgtcgaaggagaacccaacccaatgaccaatggtataagtgctagaaaaattcctcaggaaacggaaaaactgcagaagtcgaatacgaagaacaaaggcagtagtggtaaggacagatccaaaaagaggaagctgacttcactaacaaatcttttgtcgaagaagaaccaggagaagaaccagaaaaaaaatataagttcatcattatcattagagagttttatgannnnnnnnnnnnnnnnnnnnnnnnnnnnnnnnnnnnnnnnnnnnnnnnnnnnnnnnncgcacacacacaaacccaaacctatatggtggaattaa

SEQ ID NO: 5805 - DNA, 474 bp, Saccharomyces pastorianus
atgtcgtacagcggaataggactcaaatcggcgaaggggtcatcgacgtcgggccacgtgcagcgatcgctggccagcaacacagataggcgcagggcacagggcagtcaacggcagcgcgacaaggcaattaacaagcccacccacagcagggtcaacaagccccttgcagtgcagaaggagatgagcacccacatggagaaacgtgagattgaggttcaggtcagcgagctgcgtgactggctggaggatgacgaatcgctctcggacgagcaaataaacgaacagtgtgagacattgaggaacaagctgactaaggagtggcaggagcaacaacgagtctcttctttgtatacctcccgcaaggcgcggctaaatgaagatcctccagcagcagcaacaacaagaatagcagcattgacgataacgataagcttcgcgcgtggggaaaacaagaggcatttaattatataa

SEQ ID NO: 5806 - DNA, 2334 bp, Saccharomyces pastorianus
atggacattaacccgaatgccccagtgaatcccatacgaaatgatttaccgatgactagtaaaaatgaaacaggttccggcagggtacgtaatagcatccgttctatcatcaatcatcctgaagacagtcccaaagttaatgaagccaatggaacaaatgaagcaagtgaagcaagtgaagcaaatagccctcaaagtattaatggcaacaagaaacctcgaaagaaaagaaaaacctttagttgcgatacctgtaggagagtaaaaacgagatgcgactttgaaccttttatcggaaaatgctataggtgtaacgtcctgcaacttgattgttctttgtctaaaaacaaagataatgaaatcatgaacaccttacgtgaggatggtttattgaagaagattagctctattaattccaatattgcttcgttctctcactcaagcagagacgtttcgaacgaaagccaaagtagtgctggaagaaacgaaatgggcatgatcaataattatgtaatcaatgaaagactttcttcattagaagatcatataaaatctctacaccagaaaatggactcaataattacatcaacaaagttctccaatagcagcgatgctagaaacagaaaagaggacagaagaaactcagaaaatttaaacaatacaaacgttgctaccagcggggaagaaatacaaaaatcagggaaacatagcaaagagagccttttcttgaatgaattcaaactgaaagaatctcctttgaagttattggacgatatcgatgaaaggttgtttccgtctaaggccacatccaaggcagcaatgctagccggacaacaaagaccgtatgcagtggcaagagtgaattttctccacttttatgaggaccatcaggaattatgtcataaactagccaaagagtttttagtcagatcacatttctggattattccaggtggaagaaaagaaatagatgtggaatatgctcattcgcacttatttatcacgagtgtttttaccatcattgccatgagttttgctgacaatgataaatatgcagaggaacaagagatattatatccattggtagagagactcttaacgaacaccttaactatgtttgaaaagttaaccgcatttgacattgaagctatactgtattgctgtatgttccatatatctcgaaaggcgaagaggtataggcaattaaaattcaattctctagtcttaagcaattttgcactcaatagtttgctacatgtgattgatttttatcaaataaaagatagagttttagtaaaggaagaatataactcggaagatctttatcatttaagaattttgaactctttaaccgcatgctatttagaatattcaattagttacggagatattagggaacaagacggcatgttgaaggagtttaataaactcgtagcaaagttccctcaagctaatttcggtgatgatatcaaaatcagtgaaataaatctgggcgatatcgtgaacgggatttttatgaacctcaaagattattttatacaatgcttaagtgagttcgataacggcatgtatggtactggtgaaactgcttttgtttttgttttcgcagaattaaattattggttgaagaactgggaagagctgttaacgaaagatgggggaggcgtattgttgttcacgttcgatttctatcatattatgatatgccgtacttttatctcagaatttccttctaccttaagaagcaacaagaaatttttaaagctgatcctcaacacaatgaaagaacattcgttttcacttttgaaaggattcctaaggctaccacctacattaataagaggggctcctatttttacatgccatcaactggtttacgcatgcttaacactatgtgactatctctattggttcgatatttctcaacgtcaacaactcttaagtctttgtacaaaagtatattggcacttgagtaccataggggagaaaatgaatgaggctactgataatgttggaaaaattatcaaatctataattgatacaagtaaaacccgtgttgatgttggtaattacccattatctccgcaagaaaataatgacattgatacgattttaacggccgctaacaggtccatagaatcaacgagttcacatggagtgaaaccaacaaactcctttacaaacaatggtactttgcacgaaagttcatccaatagtcatttcatgatacctgacgttgatcaatttaattcttttgaagatttttttcaagacttttttgacagtttaaagccgaattcccagaaaatgtttaccaatgataataaggcctaa

SEQ ID NO: 5807 - DNA, 405 bp, Saccharomyces pastorianus
atgtggtcaatgctttgtgccatttggaaatccaaaggcgcaacatcatcggcatcgttatcgttttcttcttcttcttcttcctcttcttcttcctcttcttcaaatgcaacgtgctttgcgttcgtactagatttaggtctgatatctaaagcagcatccacgtcttcgtcttccaaaggcggtagattattaatgccttgcttattgccaccgacccaggtgccagacgcaccttctatttccgcaaataatggagtatcggtttcgtctttagctctcttgtttatgtttttcagaagattggcaatcaatttaggatccaacgaatcatacaggtcctggcgttcgttcattatttgctcatcggtcatctcctgcaagactttgatattttcttcatga

SEQ ID NO: 5808 - DNA, 1233 bp, Saccharomyces pastorianus
atggaaaacctactacccccacctcctccacaatcgaaagagttttccactcccccaagaaatagacatcgacacaagagatcctttgctatatctggagattttgaatttttgaaacagctgactcctgctcctgctttatcttctgcatacgactcacccacttttgaagatttgtcgacaataacaaatagcacaaagctgacggtacctaacgagtcggcattgatatgttctccgagcccaaggttttttattaatggagaatctacatatacatcaccaattaaaggagtgccggacgctatcattaatttagatgatgtatttaccgatgatccaaaaatgttcaaatcgcaccgaaagacgaaatctgttccggtaaaattagacgatttctattctttccataaaggtagttccgtaccagaattaactataaatgaagaaatggatgaagatgaaattaattctcaactattgggacccataaaaccatcttcaacctccttgtctacatgcatggataaaaataagacgaggccactggaaaatgctaaaagttacaattcattaaaaattcaagcacaaaagcagagatactattattctacaagatatttgcccttaagcagcgatgaaagacccacagattcgcaaactttaacgaagcagagttctattacttccttattttcttccagatccattactcctgtatcctgtaatatcaatactgcaggcagaattaatgcaatcaacggcaatcaccttgatgatgttctttatgatctagatacccctgcatcaaagttaatccagggtgttgataatctacaaataacttctactgaaaggattagatcgaccccgcaatcgtcttcaatgaaaaattgttttcctgaagatggaaaatacatcaatggctttaactttcaatctcagaattacgatatagcatctctcactgaagatttcgacccaataacatcattgtcttcctctattcttgattctgaaagacaaagcgtcgatgaagaagaaagcatcccagaagaaatcctactcggagaacccctgcatgtatacaatgaaatttctaaatccggcgaagaagtcatttttccgacaaaacaagaatctgtgtccactgacaggaacaggagctcggccagccgtatgaaaaatatccttgaagaccggagattcaattttggccaatgtttcgttaga

SEQ ID NO: 5809 - DNA, 1443 bp, Saccharomyces pastorianus
atgtcttcttctcctgttgttgttatcggtaccggtttggccggattggccactgccaacgaattggttaataaatataacattcctgtgactatcctcgaaaaggcatcttccattggtggtaactccatcaaggcctccagtggtatcaatggtgcctctactgagacccaacgccacttccacattgaggactcgccacgtttgttcgaggatgacaccgtcaagtctgctaagggtaaaggtgtccaagcattaatgggcaagctggctaccgactctcccttagccattgagtggctgaaaaatgaattcgacttgaagttggatctattgtcccaactgggtggtcattccgtggcaagaacccacagatcatcaggaaatttgcctccaggtttcgaaatagtttctgctttgtccaacaatcttaaaaaattggccgaaactaagcctgaattagtcaagattcatctagatagtaaagtcgtcgacatccaagaaaaggacaactccgtttccgctatagtttacgaaaacaaagatggtgaagagcacttaataaccgcttccaacgttgttttctgttctggaggatttgggttttccaaggaaatgcttaagcaatatgcgcctgatttggtggacctgccaacaacaaatggccaacaaactaccggggacggtcaaaggctcttacagaaactcggtgctgacatgattgatatgaaccaaattcaagttcaccccaccgggttcattgatccaagtgatcgtaactccagctggaaatttttagctgcggaagccctcagaggtctcggtggtattctattaaaccctgccaccgggaaaagatttgttaacgaattgaacacaagagacgtcgtcactgaagctgttcaaaagcaatgtccccaggacgataatagggcccttttagtcatgggtgaaaatatgtacaaggatttgaaagataatctggacttttacatgttcaaaaagcttgtacagaaattgacactatcccaggtggtttctgaatacaaacttccaattactgccgcacaactgtcccaagaattacaagcatactcttctttcgccactaaggctgatccattcggacgtaccgtgattctcaatgaatttggtaccgacgtgaccccagaaaccacggttttcattggtgaagtgacaccagtggtccatttcaccatgggtggtgctaagatcgacgtcaaggctcaagtcattggtaagaacgacgaaccgctactgaagggtctatacgccgctggtgaagtttctggtggtgtccacggtgccaatagactaggtggttcaagtttgttggaatgtgtggtctttggtagaatcgctgcagaatccattgctaatgacgacctgcaggcatgcaagcttgcactgccgtctttacaa

SEQ ID NO: 5810 - DNA, 222 bp, Saccharomyces pastorianus
atgatgcacgtttgttccttgttggtaagcttggaagttgtgaagtcgttgacacagtccgtgaaacacctttctactaagttggagtataaacgcatgaaatccttcatttgcttttgttccaccactttctggaactcttgttgttctttagaattcaatgcgtccatctctgcggtcctgtcttgttctttttttggtcttagttgtttgaatgtctag

SEQ ID NO: 5811 - DNA, 126 bp, Saccharomyces pastorianus
atgacaagcaactctaccattatcaattataggaaagggttcattttttctttccattcattcttctttttttcctttcgttttgagtcctccttaagggcatgttacccgggcaaggaagaataa

SEQ ID NO: 5812 - DNA, 1572 bp, Saccharomyces pastorianus
atgctaaaacaaatggcagagacacaaatgagctatgaagttggagacaggcttaaaataggtggttactgttgtacagtcaaatttatcggtgccattaagtcatggccttcagtcaaagcttacggtgtggagtgggacgatcctaaccgtgggagaaattctggtacagtagatggtatacactattttgatgttaactatcccaattcaggatcatttctgaaggaatcgaagattaagactctaggcgtacgaagaatcaacttcttcgaagcgttgttggaaaagtacggatcatcaagtagtgacattcgaagtttatccattggtagtaagaaaattgagagtttgggattcgagaagttggatgcaaagaataaaaatctaaagaagttgagaaaaataacgttgcgagactcagatattgcaacactctttcaaaatcagaatgaattagatattatagtacgagagtgcacgagcgtcaacgatttagatctgtcgctaaatttgtttaccaatgtaggttctttatgcaagtttttggagcccttaaaaagcttgcggacccttgacatatctcaaaacaaacttttaagtggttggggtgatttggggagatatgatctatcgcatattacaaaattacgtttgtcgtcctgtgatttaagttgggagcagataggtaaactactcaaaaattttaatgtgttgaaaatgttggatttgagctgtaacaagctaacctacgtgggaatccaaaatttgatgactgtagtaacaccctctctggaagagttaaatataaccggaaataatctcgaatcgttcccagagcatttagcacatatggctttaaaagatttaaatatttccaataacaacatctctaaggcattacctattgttgttcaatccattgaaaccttagatttatccgagaaccattttaaagtgcgaagtagaatagatgatctgaatatcgcatttccttcattaaaaaatattcgtttgaatggtaatgacttgaagtctgacgaaagcagcgctgacatcgaagaccaggcaactttctatgaggtattggcaagatttgaccatgtcatggtgctaaatggatcaatatgtgacagaaaaacaagaagagaagccgagatgtatttcatctccaaggttttaaacagtgaattggactatgatattagtctgccacgttggaaaagactaattgagtcgtatggcattggcacaaatactttaagcttgaataaaattaaggagagacggaaatctcttgtgttgaaaataaaagttacgtcagttgagggatcagatagcgatttagaactttcaattcttcccagcttcacagtaaggtatgtgaagagcataatctgccggaaactgaaactagatatattaagggtcaacctgactcatgaaaactgtaaagggatgctaaacgaaattacccataacttttgtccagtttcagattttagtgtagtagaaggagatattattcatgttcacgttgccagtaaatgccaagaatcaaaaaaacattaa

SEQ ID NO: 5813 - DNA, 1215 bp, Saccharomyces pastorianus
atgaactccatgcaaggcagcttccccacggataacgaccgaagaccctttaagtgcgagatgtgctccagagggtttcatagactagaacataagaagagacacgtgagaacacatacaggcgagaaaccgcacaaatgctccttccgaggctgtccgaaaagctttagtcgaagcgatgaactgaagagacatttgaagacgcatgcaaggactactcaaaggctgccacgcaagcggaaatctaaaagccttcaaagggttgctgcggacactacggtctccgcttctacgactttcaatgacaccagtggaactttggacactagcataggccgctctgaaatttcgcctattattgtttcggttgctcagaactccagtaatttggatagacgaacgttcaataatggttacggtgttgtgaaaacgcaaacaccagggactctgattccagtagtaggcattcaaacaagttctcatctggttccagcggggcatctgattccgaacaaccactccagcacgtctgtgacctctattatgtctatgtacccttcgacttcttcacttcaatacctaaacaatggggattctaacagctgtgcatccataccgtatatggagttatctagcagctctttggcgttaagtgaggtatcttcagagtcctcagtgttttcgaaatctcggacaacctcgactgccctgagtagtctcgattcgttagccaattctagaaatcaatcgagtaccttgctgctttcgcaaacctcgctgccaccgaagcaactcgctagaccattatcaacaacattgagccctctacaaaaagtaataccggccattagtgcagaggaaactgaaatcgtaagacccatatccacttcaagcagttcaacttccttcacctcttctgtatacgacgacacaacggccaagcatatgggcatgggtctgtttatagacaactcacagacagcacacgacgcttacaggagtggtcacatgcacacagcaagaacggtctccagaggaaggctacatgcgagagcggaatttcacatatccggagatgaagaggacaatagagtctccaattctgaatcaagagaaccagctacaatccctaaaatatcgttgccacccatagggtgcatgttgcagcaaatcgacatcttcaacaatgatgcccctactatcgctaaatactaa

SEQ ID NO: 5814 - DNA, 1035 bp, Saccharomyces pastorianus
atgttggaagaaggaaataatgtttacgaaatccaggacttggaaaagagttctcctataataggctcgagcgtggagaacgagaagaaggttgccagctcagaaacctttaccgcaacttctgaagatgaccaacaatacattgttgaatcatcagaagctactcagctgtcacgtttccaaaggttctttgccagcctaaatgctgagacaaagggtgtcgaaccagtcacagaagacgagaaaactgacgactctatattgaatgctgcatccatgtggttttcagccaatatggtcattgcagcatatgctctaggtgccctaggtccaatggtatttgggttgaatttcggtcaaagtactttggttatcattttcttcaatattataggtttagtgtctgttgcattcttttctgtttttggtgccgaattgggtttaagacagatgattctttccagatatttggtcggtaatgttacggcaaggattttctccttcattaatgttattgcttgtgttggttggggtattgtgaacacatctgtttccgctcaactgttaaacatggtgaatgaaggctctggtcatgtctgtcctctttgggccggttgtttgatcatcattggtggtactgtgcttgtgacattcttcggttacagtgtcatccatgcttacgaaaaatggtcatgggtgcccaatttcgccgtctttttggtcattattgctcaacttgccaaatcaggaaagttcatgggtggtgaatgggtaggtggttctactactgcgggtggtgttctatcttttggttcatctatttatggttttgctgcaggttggaccacatacgccgctgattacactgtatacatgccaaagaaaacaaacaaatacaagattttcttttccttagttgctggcctagcgttccctctatttttcactatgatacttggtgctgcctccggtatggcggcccttaatgacccaacttggaaggcatactatgataaaacgccatgggtggtgtga

SEQ ID NO: 5815 - DNA, 150 bp, Saccharomyces pastorianus
atgacagcaaactgttgttgcgaaacagaagtgaagttttttaaatattgctcaacttctctctttgtactgatattgttcagtagttggataacagtggacctagtagccgaagagtcgtcagtagatgaaatgcatctctttgagtag

SEQ ID NO: 5816 - DNA, 2700 bp, Saccharomyces pastorianus
atgagggacagtctgccttgcataaacgtccttcccaccgaccgcacttcaatagtttccgatactagtactctgataggatcagactcaaatgcattcccgaaacaacctccccataacagtcaccacaacagtatgaacagtaacatatatcatagccccaaggccagcagccctttggtgagctataagatgtcatctcctgtgcttttgaagagggcgactgcacccgtactcccaagttttaagcccaaagagcagcgatatagtaaaccacaaggttgctcgctaataactgctgtggaactgggcaagcttatcgacactttaccgcgagaagaagtgcttttactggacgtgagaccgtttaccgaacacgccaaatccatcattatagactccattcatgtttgtctaccttctacgcttttaagaagaaagaattttaccttttccaaactcctggaaaatttgactcccagtgagcaaactatgttgagaggcaaactctctgtagacaaccttcgcattatcatttatgataacactgcaaaccaaacagaaagctctgtctctttgccttgctttggcattgcttccaagctagtagaattcgacactgaagccaaaaaaacagtatccgtactgatgtgtggcttttctcaatttaaaattatatttccagaccatatcaaaacaagtgtcaataacgcagattgcattgcttccttcgaacctaaaagtcccaagatcaacccttacagtaaagtacacagcacagttccgcacataacggcaactactccgttgtcgtccccgcaaatgaaccttaggttaaacgtccctgatgataatagatcggaccactcaagcctttccaactctcccaccccacgtaatattctcgcagactcccccatatcttcatcttctcccatatccgccctattcaaattccaactaccggcgcctcaaacaaatatcaatcagatattcaaattctcgcaaaacgaagaaataatggacctggaaacatacttgagtgcagttaacatcaaagaagaacatgaaagatggtgcagtaatgattccgcaaagaattccttacaaaattttcaatttccaaagaaacaagcttcccgtaccatggacactaataaagacaaactaggcttccagatcaaatatgaaaaaatgcgcaaaatctatagacaagaagatattgattctataatacctgaatggttccaacacctgatgacaatctctaaaattgaacttgtctcccaatttcagaaattggatttcttagagaaaagacgtctgaaccattctttatcctttaaaaaacaggataacacgtttgtaattgatgaggcttcaacatacctcgagaaatcgacctccacgtcctcttctattatcatgcctccaaaattccctgacgtgggcaaagtacaaaaaagatcacactctcaaccaatattcactcaatacagtaaatataaatctatgttaagtcttgaatcagactcggactcggactcagatgacgttataatttcatcaggcgtcgaactgggcgccaagaacaggtacaaggacattttcccctatgagcattcaagggtaatcctaaggaaaggttcgcaatcatcaataaacactaaacgctcgcattccacacccgatggtggtatcctggacaattacatcaacgcgaattatttatctctgccaagattatccattgagcaaaatttgacattcccaacagcaactgccacagcaagaagagtccgttatattgcctcacaggcgccgatgccttctaccgtacacgatttttatacatgcatactgaacaatggtgtcccattggttctttccttaacaaacgatttcgaaaatggtattgaaaagtgttatcgttactggcaagaaggtaattataacgggatccaggtcaaattactagaaaaaaaaatattaagaatgcccaatagtaacaatacaagggcaaaaacgaagattatgaaagatagcgatttcttttcagccaacaccaaaggtgatgatgatggcgatgacgatgatgactcaatatttatcagaaagatccaattaatttatcatgatcaagaaaaaccctatgaggtgttacagattcaagtgaaaaattggcccgacttaggcactttgctcaatccaacctcgatcgtgcaagcaatcaacataaagaaccacataataggtgcattatttgcaggaaaattttatcaagacgatcaacttcctacgatattggtacattgttccgcaggttgtggaagaaccggcactttatgtacagtggattccatcctctcgaatttcgaaatgtttgaagctttacaaaaggagttcattaaattaaaatatccagcaaaattgtttgatccaatttcttggataatcaatatttttagaaagcaaagaatatccatggtccaaaacatcaatcagttcattttcatttatgactgtttgttattttattttagattacgtcttaatgatataacagatacaaaggtcgatgataaaaattgcaatgacaatatatcattgacctcgctaaatgacgaaatcaaagatttgaagattttggagacgtttattaacgataaactgaacgacctccacaataagaaagcttga

SEQ ID NO: 5817 - DNA, 291 bp, Saccharomyces pastorianus
atggaaaacttagtaaatcttttctccttctgttgtttgtcattcttcagccaggaaccccaagtgtacttaaagaaagcatccctctttggatcgttatcgtctgttagttttgtaaacacttcatttggtttaccggaaatgaatcttttagtggtaatgggggtattagtgatacatttgatcgtacctactcttttggaaatccttgctacacacctactggaggagccaataacggttgatctaatcatgattggcctttgtcacgttgtcttactggatgtttga

SEQ ID NO: 5818 - DNA, 1233 bp, Saccharomyces pastorianus
atgtcaaacatcgatattaacaatctacaaaactcattccaacaagctatgactatgagtggctctgcaggcgccgtttgtacctcaccaactcaatcttttatgaacacagtcccacagcgtttaaatgccgtgaagcaaccaaaaatcttgaaacccttctcaactggtgacatgaaaatcttattattagaaaacgtcaaccaaaccgcaattgcaatctttgaggaacaaggataccaggtcgagttctataaatcttcattgcctgaagaagaattaattgaaaagattaaagatgttcatgccattggtatcagatcaaagaccagattaagttcaaatgtactacaacacgccaagaatttggtttgtattggttgtttctgtatcggtaccaatcaagtcgatttagactacgctactggtaaaggtatcgcggtcttcaattctcctttctccaattcaagatccgtagctgaattagtcatcggtgaaatcattagtttggccagacaattaggtgatagatccattgagttgcatacaggcacatggaataaagttgctgctagatgttgggaagtgagaggtaagactcttggtatcattgggtatggtcacattggttcccaattatctgttcttgcagagtctatgggtttgcatgttctatattacgatgttgtcacaatcatggctttgggtactgctagacaggtttccaccttggatgaattattgaacaagtctgatttcgtatctttacacgtacctgccacttcagagaccacaaaaatgttatctgctccacaatttgccgccatgaaggatggctcttatgtcattaatgcttcaagaggtacagttgtggatattccatctttgattcaagccatgaaggccaacaaaattgcaggtgccgctttggatgtttacccacacgaaccagctaagaatggtgaaggttcattcaacgatgacttaaatagctggacttcagaattagtttcgttgccaaacattattctgacacctcacattggtggttctacagaagaagcccaaagctcaattggtattgaagtggctacctcattggctaaatacatcaacgaaggtaattctgtcggttcagttaatttcccagaagtggcattgaaatctttgtcttatgaccaagagaacactgtgcgtgttctgtatattcaccaaaatgtaccaggtgtttag

SEQ ID NO: 5819 - DNA, 231 bp, Saccharomyces pastorianus
atgcatctgtatttcctttgccttgaggtcaatcaactcgtatttggaacactcaatgtagtggtcaactctacagataacttggtcctcttctccctttatatagggggacggttcggtctttggctccagtccaaaccacctctctattcttctgtgtatgaacctcaagacattggtctcctgcaacagctgcaaatgaaatcgactgattctgtactgaaatgctaa

SEQ ID NO: 5820 - DNA, 258 bp, Saccharomyces pastorianus
atgtcattagctatgtccttttcgttagccattgcagtgcccgctcctattgtggaggtcgtgtttgctcgattgaaaaaagacattattccctacctctctttgttctgttgcctgtacttaaattttatatgcagattaaggtgtatgatctttgattttagatatatgcgtgatgatacttactgcagttcagactcacccagttgtacaatctcgtcgaagtgcaatttttttcagcgcttgatactaatctaa

SEQ ID NO: 5821 - DNA, 1404 bp, Saccharomyces pastorianus
atgagagtaagaccaaaaaggtgggtcatgatgcttatggccgtaacagtcgtgatactcatcttccgaaatcagttctattcatcccgaacgcgacagcagaatcaagagcccttgtctgcccaaaacaatccttattatgacgggtggataacaccgaatctgtataaaaagggcgatcccttggaactaattgtaaataaggtggaatccgacttgacccaattaccatacgcgtactatgacttgccgtttacttgtcctccaactatgcataagaaaccacttcacttatccctaaatgagataataagaggagataggaaatgggaaagcgattatattctcgcatttggcgaagacaacgcttgccaaaccctatgcgcccgaaaaactaccaaagagggtatgcagtcattagataagctggtcagagagggttacgtcgtacaatggctgattgatgacacgctaccagcagccactacgttcatctccactacggatcataaaaaatactatgcgtccgggtttccattaggtttcgtggatcccgatactggcaaaacgtatttgcataaccacgtaatgctagtgattcgtttccatgctggcaataatgatcaaaataccattgtagggtttgaagtatatccaaggtccgtatctgattattactgtcctggggcctcgaaaaattacgaacagtacgaaattgtggtccctgaagacgaaaatgaacttacttttctaccatttacttattctgtatattggagggaagaattcgaagttgattggaatcacaggtgggactattttttgaattcaggcgagttgtccaacgagaagagtgttcaattccattggatgagttttgccaactcaatggggattgtattgtccatttcatttattaccattgttatttacatccaagtcatgcatagggataagaaaaacacggattccaccaaatatctgataaacatagaaggtattgaagtcgataacttggaagacgacaaatatggcaagaactctatttatatggtgaccaaggattggatacaaaacggtaagccgaatctgtctggtttaaaagtattaatcgtactagtctcgtttggtgtacaatttctgtttactgtaataggatcattgacaatatcttgttcaatgaacaaactacataacgttaggaatagcgtgattactatggctatattgtgttttgtccttggcgcattcatggcgtctttcgtcggaacaagattgagcatagtaacaaaaagaagaagcattgatgtcaactatcttgatgatagcaaaaacttcaaaaattgtaataagtttagccccgtttttgccataatttgcgggtccagtttaccaggattgtga

SEQ ID NO: 5822 - DNA, 222 bp, Saccharomyces pastorianus
atgtcggtgtcatccaagataagaccccctcctcgcaaggacacacgtatggccactgaccattccttcaatatgaagaacttctatgctgatccgttcgctatatcttcaatatcgttggccctcgtctcatgggtcatcgccattgcgggttccatctcttctgcatccactaaagagtccttcccacgtatcacttggtgggggatagtctatagtttc

SEQ ID NO: 5823 - DNA, 180 bp, Saccharomyces pastorianus
atgggtatcagagcgtatctccgatcgtctctttccagaacttcgatgccgttccgcagcactgtgtcaagaccattggcgtccatcacgctggtgccggcgctgtcattcagacttaacagtagattaatgaccttttccaattcttttaacttgtgcttatactccacctgtaactga

SEQ ID NO: 5824 - DNA, 276 bp, Saccharomyces pastorianus
atggcgatgttgttgccgctcaaaagcattctgccgtggtgttgcatgaccttcttgttcttggtctcgtcctccgggtcgatgagccactcaacagcgtcctccagtatgacgttgacgaagtcgtcgaagccgaccagcgtgccctcaaattcgcggttcgactgcagcacgatcagcactctctggttgattgttttgtctatgacctccaagggcaaaatctccggtagactcattgtgtgcttctgtgtgtgtgtggtttgccctgcatga

SEQ ID NO: 5825 - DNA, 2265 bp, Saccharomyces pastorianus
  modified_base (1895)..(1964): a, c, g, t, unknown, or other
atggaaaattctggtcatagacttagtatatcacaggtatatcaactagctcacgaataccgagaccatgcatactctgttgcaagcaagatcagttccgaagaggagctgaagcagtattacaccctgataaatatgtctatccggatgtttcaaatgctgaagggaaaatgcacgctctccgtcgtggaggatagcaagatcacgtttgagatggtggagttactaatacatgagacgcataacttcgatttagccgagttgtacatttcaagtttgaaggaacggttgcaaacgcaccagaacagcatgtgtgtggtggaagaggtcatgcattgcgagtttttattagtacacgatctaccattgatgagagatacgaagttccattacaagattgcgctaagaaactgtaatgagttagtgcagtacatgacgagtttaaaggacgaagtctaccaaaattgggcactagtattccagtatgttggggtggcactttgtatcaaactgaaacagcaccgtagggtgaaaacgagtttcgctgggttgctctcgcaatgcggggataagtcacaatggaagtggttcctgaacttgtgctacgtgaactacttactgaacgagagattccccatccctgaagctgcaattgaagagttgagaagcacggagttggacacggtgggacccaggctatatgcatggaagttggcgttgaacatggtgatccaagtttacaaagacgggaacattacagagcatctaaacgagttcaagagatttttcgatgtgaacaagcagtcgttggtcaatgatgaagacaaagggtgcatgatcagtattgcacctggggtgacgttgaaagtggacctgccaataattttccactacaaggaactgaaaaatattctgttgttactgcaaagcgtaagctacatcgtgaactgctacgacgggaaggggaacttctcgaggaagtttctgcccaaagtgcattccacgacgcagaagctgatgaagactatcgggacaggcggcgtgtcgatgaacgagctggactcacgggtccaaacgtacaagagcattcttgatttctgcgacttttacaaagtgtgggaggaaatactgctgaatggcgccgtggttgaggcggcggcggcgtcgtcgtcgtcgtcgtcgtcgtcaaatctgggaccctctccggcatacacaaagttactgcaagcgatgaaggtccaatttcaaggcggggggggtgtggaggagtacacgcgcctggcgcagtctggtggcacgtcgagcgaagtaaagatgatatcgctgctaaattgctacaccgtgcaagcggcgaaggtgagccggtgtccgggagacaagcaggcccagctcgtggagcagtgcaacaaggtgtggcagcaggtggagaggctgctgcgggagacggacctgcagttcaacccgatatgggagtgcacggtgatgattctgtggctgttcagccacttcgagcccttcagttggaacccgctgccgtgcagcgacaaggagcgggccgagtacatgtcgaagcttcgcgagttctactcgagcaacaagtttgccagtggcggtggtgccgtggacgagcggttcaagctcaagaaggcgttgctgctgcaggtgctggtgaactacctgggcgggcggatgctcgaacacgacctggaggagatccgcgggatctccggcaagtgctttgacatgtgccggcaccagggcgggatggacaaagtgcagtacgtagtcgggatatggcatctcatgaactgcacggtgggcatgcggggcaaagacgttgccctcacgaacgcgaagctggaggcgctggtgaagcaaatcaccagtggcgagcnnnnnnnnnnnnnnnnnnnnnnnnnnnnnnnnnnnnnnnnnnnnnnnnnnnnnnnnnnnnnnnnnnnnnntacaatttcgccttgttttacttttctacaacgcctgggcaggggactttttgccgcctggcacaagaatggcgatgttgttgccgctcaaaagcattctgccgtggtgttgcatgaccttcttgttcttggtctcgtcctccgggtcgatgagccactcaacagcgtcctccagtatgacgttgacgaagtcgtcgaagccgaccagcgtgccctcaaattcgcggttcgactgcagcacgatcagcactctctggttgattgttttgtctatgacctccaagggcaaaatctccggtag

SEQ ID NO: 5826 - DNA, 1386 bp, Saccharomyces pastorianus
atggctaacaaagagatcaattttttcaagggacacccaagctcgaggctgctgcctcgagatgaggtagttcgggcgaccgcggccgtgctgggtccggagacccgagagtacgataacgacccctataataggcatccgctgacgtacgggtcggacgaaggtgctctgtgggtgcgggagcagatctgcgggttcttgaatgaccaggtgttcaagtttgagggcggggcccccgccaggacgcagccagactacttgaatctggataacggcgcctcgtacggcatgctgaacattcttttacagacgacgttgccgcacaacgggtataccaggcaggcgttcatcatcaccccgacgtacttcttgatcaacgactgcttcacggatgccgggttcaacggcaagctgaccgcgatcaacgagaagggccacgactcgatcgatttcgagtcgttgctggccgcgctggaccaccacgaggcggctgccgaggccagtggcggctcgaccgcgatcatccagggctcgaagctcaccaagaagatctacaagtacgtcatgtactgcattccaacgtttgcgaacccgacgggcaacacgtactcgtccgaaaccagacgcagactcatcgacattgcccggaagtacgacatgctggtcatcaccgatgatgtgtacgacatcctggactacaccacgcccgccgaccaactgccctcgccacctctgagaatggtgcatctcgacagggtcaccgcggctccgggcgaggactcgttcggtaacacggtctccaacgcgacgttttccaagctgattgcgcccgggctcaggttcggctaccacgagtcgatcaacgcgaaccttgccagacagttgtctaagggtggcgccaacgtctccggcggtacgccctcacagttgaactcgatgatcgtgggcgagctgctgcgtagcggtgccgcccagagatgcatcgcgtacttgagatctgtctattccgagagagccgcagtgctgaccgcggcgctcgagaagtacatgccgccgggcacggagatccctcccttgaacggcggctacttcagctggatcaccttgccaccggcctacgatgccaaggaaatcgccggtgttctggcgcagaagcacaacgttatcctggccagcggctcgaacttcgaggtcgtcggcgacgagaagaactggggccagtcctcgttcaggctgtctatcagcttcctcgagccggaccagatcgaaaagggcatcgagttgttcggcgttgtttgcaaagatcatgccgtggccaataatatactatgtaaaaaaggaatatatgtatatatctacacacacgcagtgccgggcagagggtaa

SEQ ID NO: 5827 - DNA, 543 bp, Saccharomyces pastorianus
atgcctattataggggtcgttatcgtactctcgggtctccggacccagcacggccgcggtcgcccgaactacctcatctcgaggcagcagcctcgagcttgggtgtcccttgaaaaaattgatctctttgttagccatttacgtttgctacttcttctacctgttactgtactctttctttctttctttctccttctactcaagtatcaatctcgaatcctcttctctttatcaccacctcggcatccgtcagcggcagcccgcgataacactgccgaaactccgctagaacgcgtcgcgcctgcgctgggccgggcacatgccacaggaccgcgctcaacagtagcggcagcgaccattcgttcttcacgaccagcggttgccgcccaaacagcgccagcgcggctgcctgctcctgcggctgctgtagctgggcggctacgcccaccgccctggccaactgcgggaagtcccgcagccgcagtggcggctgccccggcagcgtgtccatctcctgcaagaacaccttccacttctcgctaa

SEQ ID NO: 5828 - DNA, 444 bp, Saccharomyces pastorianus
atgcaccattctcagaggtggcgagggcagttggtcggcgggcgtggtgtagtccaggatgtcgtacacatcatcggtgatgaccagcatgtcgtacttccgggcaatgtcgatgagtctgcgtctggtttcggacgagtacgtgttgcccgtcgggttcgcaaacgttggaatgcagtacatgacgtacttgtagatcttcttggtgagcttcgagccctggatgatcgcggtcgagccgccactggcctcggcagccgcctcgtggtggtccagcgcggccagcaacgactcgaaatcgatcgagtcgtggcccttctcgttgatcgcggtcagcttgccgttgaacccggcatccgtgaagcagtcgttgatcaagaagtacgtcggggtgatgatgaacgcctgcctggtatacccgttgtgcggcaacgtcgtctgtaa

SEQ ID NO: 5829 - DNA, 201 bp, Saccharomyces pastorianus
atggttgtcgtattctgtatcatcgttaaaagtgaattcttcagcctcttcgcgtttacttttgggtggttcgtcattaaaactaactcgtggccgactgtattcattagctggtacgccatcattgacatggggaggcccgatatgtgtatcttcgttgctactattctcttcaaactgaaacgtatcttcgaacggtga

SEQ ID NO: 5830 - DNA, 759 bp, Saccharomyces pastorianus
atgcaaaaaaaaaaaagacctatcgacaaaggtggaagaagagcaaggatgttcaagaaaactatattagggcagttgagaaggtatacaaatggtgttgtattcaaaacggccttaaaacctaaaagaaaatggattccatggaccattttcggcggaagtttccttgggggatggtacttaacgcaacatatgacattcatggatcttctcgcttattggaaatatgatgctctgccaaaaaatgcagatgaagtggtcaagtatcatgcaaatttgaatcaacgtttgaatggtttatctattgtgaaacaattagaggaagccgggtttgtacaagtgattgcccctgaagagaaaaacttgttagtgtcaaaggcattgaatacaccaggcgggattgccataccaccaagaatttattatagtccaagtagacgtgaaactatcgggatataccatttaggtatgaagctaacaggttatccctttttaattcatggtggaatcctagcaacagtaattgaagacttaatgaaagaagccattagactggaaaaggggacagaaaatataaatcaagaaacgaaggatctgagcgtttcatacaagttcctcacattagccaatcagtttgttgtggtaagaacaacagatctcgagaaatatggaaacaagactaaactaaaggcagaattgatggaccaaagtggcaacagaacgttagtcaaagcgattgctacattttctagtcaatag

SEQ ID NO: 5831 - DNA, 2571 bp, Saccharomyces pastorianus
atgtcgtcctcatccagttcctctgagtcatcgtctaatctatcgaggccaaactcattgaacaactctatggtttccatgaaaactgaagaccacacaggattatatgaccacaggcaacaccccgatttgttaccagttcgttaccaagcccccggattgaagcgacaggaaatagctaagctcgctgctcccagaaagcagaagaaggcagcgaaacatgaagatcataaggaggttgagattacacctgatagagatcgaatgaatcctgaagatgcagaccctgaactgaatgaaacagctgctcatcatcagctgagagcctctgcgatttcgacctcaacttctaacgtgaggtcatctagattagcatattccatgccgcgccaagtccagctttacgaggcgagtagtaataaccgttcgtccaacgatataagtataaaacgtaattataatacgccattatctaccacttattcaagcaacaaacccaagttaagttcatcttcttccataggtactgtaataaaagttcataaagcctcagtacttcttgaaaatccgctggaaatgaaaattgacattcattgcaagcaggcaaagcccaagaagagaacatcccccagaacatctacgcattcatccattgaccccatggctgtacttgcaaaaagcgcatcgcaacaatcaggagatgatccacaggaaagaaaaccagtacacacaaacactagagcctcttttgatagcgatgtttcccagccctcgagagaatcacaagagacggaggaagatgtttgtttcccgatgcatccgcaactgcacacgagagttaatggtatagatttcgatgaaatagaagaatacgcccagttcgcgactgcagaaaagaaacagtacctggccagccttcaagggtccaatgaacaaatggttggtaatatgtctcatgatattggatttacaagctctacttccacttcaaggtcctcggcagccctcaaatacacacctagaatttcgcagactggtggatatagtaatagtaccaatgaagcagacatttgtaagaagaaggaagacgaggatgaagatgacaaatctggaccacgtcctggcgtatcatttggtaaaaacaaagttgaagaagaagacgacaaaattccatcccataatccagcatatttgtcatacgagaatacagattttcaaattcccaacaggttttcatttttctgttcagaatctgatgaaaccgtgcatgctagtgatattccgtccctggtgtgtgagggtcagtcattctatgaattgttcagagggggggaaccaacttggtggttagattgcagttgcccaaccgatgacgaaatgcgttgcatagcaaaggcttttggaattcatccattgacggcagaagatattagaatgcaagaaactcgtgaaaaagtggagctttttaagtcgtattattttgtttgtttccatacatttgaaaacgacaaagaatcggaagatttcttagagcccattaacgtttacattgtcgtttgtagatctggtgttttgaccttccattttggtccaatttcacattgtgctaatgttagaagacgtgtaagacaactacgagattacgtcaacgtcaattcggattggttatgttatgccttgatcgatgatatcacagatagttttgctccggtcattcaatccatcgaatatgaagcagactctattgaagattctgtattcatggctggtgacatggacttttcggccatgctgcaaagaattggtgaaagtagacgcaagacaatgacgctaatgagacttttaagtggtaaggccgatgtcatcaaaatgtttgccaaaagatgtcatgatgaagccaacggtattgggccagcgctaacatcacaaatcaacattgcgaatttacaagcaagacaagataatgctaatcacactaataataacagctatgcaactttaccaaacaactatgtgctcacaacttcacaaccaagaggggatattgcattgtatttaggggatatccaagatcatttgctcacgatgtttcaaaatttgttggcatatgaaaagattttctctagatcacatgcaaagtatttggctcagttgcaagtagaatcatttaattcgaataacaaagttacggaaatgctaggaaaagtcacgatgttaggtgtaatgctagttcctttgaacgttatcaccggtctgtttggtatgaacgttccggtgccaggaggaaaaagtacaactgtttcgtggtggttcggtatattgggtttcttgattttactgggcattgcaggttggctcttagcgaactcttggattaaaagcatagatcctccatccacactaaacgaagctgcggaaagcggtgccaaatcggtcatatccagttttttgccaagaagaaataaaccatttaacgatcgttctaaaaacgtcaatgtaagagctggtccttcaaacaggtcaattgcaagtcttccagtaagtatagccgctatgattgagtaccaatga

SEQ ID NO: 5832 - DNA, 1854 bp, Saccharomyces pastorianus
atgtctggtgaagaggtagagaaatttgctaacgtcgaggaaatagactcttctccaaaagaagaaattggagctacatttatagtacctaagttacttatcaaagagcatgaacgggttatactcaaacagattctacagattctaaaccaagatgaattactacaggctccagtagacagattcccttacaggagacttgagttaccaaagtacacagatcagtcgaagaccagagacgcaacaaacacttcttatataatggaacaaagggatgtatatggtgagaaaaagataggattgaatggtgaactgtttggtggcagacactatttgttcaatatgtttacctttgcagctagtggaaacattcttctcacgcttttaaaagacgttattaaagtactgtaccaggatgatttgaaatatgacgaacatgagtttatcgatcagcatagtcaaattttggtaaaagaaactacagaagatcaaacgaattttttaatcacgcacggaattctccccaaagggtctgttggcccttttaagtatataactgccaaatcagcgtttgtcgaatttggtgcctctgttatcgttggtggccagcgtatcgttgatgattattgggaaacgttagccaaaaagcaaaacttatcatcacaccaaagagtattcaaattaacaacaaagttaatctcaaaaatatcacttctacgcccctcgtttcaaaataatgaaaaggataacgttaaaaaaatcggtgagaattctgacacaagcggaagtacaatttcaaactataaatttgaatcaccatacccaatcgtcacagaacaaccgtcagcagagatcagagaagcgtacattgaaaactttgccaaaggtgagcacatttccgcaattgttcctgggcaaagtatcagtggaacactagaactaagtgcccaatttagagtaccgcgttatcatagtaaaaactcatttcaacaatccttgcaaatgaaagcaatggatatacccattgggaaacatgaagaactactagaacaatatgaaactcaaacgcctgatggatccacatcaacttctctgcccaacaatatcccgtctgttaatcctagtaataaacccatcaagcgaatgctgagtagtattcttgatattaacgtgtcatcatcaaagaacaagaaatctgaagaaaacgaaatgataaaacccataaacaaaggtttacttaaaaataatacgtcgctaaatataaatggctggaaatttgaatcgctgcccttaaaatccacggaacactcaggaaaccagcagtattatagaggattgccattatacgaaaaatctgcgctcctggaaaggttaaaacagctgacgccgaacgaaatcaaagaattagagcacttacacgacgctgtttttgttaatacaggtttacaaaatgttagaaaagttaggacaaagaaatggaaaaaatactggcagtataaagcaggtattccaattggtttaaaacgttcccaggtggatgagttcaaaaaccaatatttgaaagacgtgttggagcagacgagtgtcactacaacgtttaacgaggtaacgaatatggataaaacattaacgacgaaaaggataccaaacgcaaatttcttagggaactgtaatgtcaaagggttcgatcctccatatatttaccctcgtctgaataaatcgccacaaaacaaccctgaaaacaaagaaactctcaagccagaaattgatgtgtcaaataaaatttctgcctcaatgatgacgacaacaatggcgaccaaaacgggcacttttccaacctcaacaatggaataa

SEQ ID NO: 5833 - DNA, 2316 bp, Saccharomyces pastorianus
atggacgtactggcagaaagcgtggagggcacattgaaaaatttgcagggcaaaagagacttccttgcagagcaaagggagcattacattgatataagaagtcggctggttagctttaatagtgatgatgatgatgatgatgaaggggctaagagtcagggtacggtctttggtgatattataatatcagcgagtaggatatacttgagtataggctatgaatattatgtagaaaagaccaaagaagaggccactacatttgtggatgataaattgcgactaatagagaacgctattgaacagtttgatatgaagatacaagaagctctgacaaccttagataatttgaatggtctagacaatgaagtcagtaacgagcaaggggagacgggaaatgaggaaggtttccttccctcgatagagattagagaagaattggatgaggaaggaaatgtcacaagcagctctgtcactcctacaacgaagcagccattgcagtcaaatatcaaaaaagaggaaaaggctctaacgtctcaaaataaacagtctacaaacgaaaagaaaccaagctcatttgaagacaatttaaagggcaagctatccaaagagaagaaaccaaactcattcgaagacaatttaaagggaaagctatccaaagagaagaaaccgaactcattcgaagacaatctaaaggggagattatccaaagaggccgccgaaaagagggtggtagagccatcgaaagtggacacagaaaacgtatatacgtttgccgatttagttcagcagatggatcaacaggacgaattagacgacggttcaattggtgccgatgacataaactatgattatgatgcttttgaaaactctaattttgaggtcaaggactatgaggacgacgatgaggatgatgaggatgacggttatgtaaaccattcaattatacctggttttgaagcgcaatcttcatttctaagccaaatccaacaattacgcgcacagaatcagcctcaagagcataaacagaaatgtactgaaggaaataagccattgaaaccaattttaaagaagtcctccgctgatgaagagcctgcgaagaaggaaaaaacgaaacgagtggggtttgcctcatctttagaaatccacgaagtggagaacttgaaagacgagactaaaaagcagacgcattccttcaagatccccatgtatgacatgataaacaaccaggaaatcatggggcctgccaacgaaatggcgtcggaccaattcgatggtgatttgcttgccaagatgttgggtgtgcaagaagctgatgaggtccatgacaaatacaaggacaatgtggcaggccaggagaagcatgaagaggaaacgagcagatcgaacaagaaaaccaggatttccagattcaagaaggatagagcccccaaaaggccagactcgctgttaaattgtggacctgtggagagggagccagttgtgagcgacatagtggagagacgcccggtcgtgaacgatgttatagaaaaggagccggttgtcagcgatataacggaacgggaaccaacggctggcactagcagcaaatctgacggtgcattaaataagaaagacttgaaatcattacaaaagccaaggtcatcgagatttaaaaagaagaaatttgatcccaagatattcgacgatataagtgacgacgaacccgaagtcaaccccgaacccagacgaactgccgatgtgcaggagaaattcccttcaaagatccaggaggcgtccagagcgatggaccaggcaggcgcgaccgcagaggataaaccggtcagaatcgcgaacgtcgactaccacgccctggggggcgacatggatgacatggtcaaggcatactcgctggggatatacgacgacgacctggaggaggatccgggcactgtagtggagaagctcgaggatttcaaagagtacaacaggcaagtggagttgctgcgtgacgaaatccgggacttccaactggagaaccagcccgtggcgacggaagagaacgacgagaacgacgaacacgatggcaagatcatggtggatgttgttgagcgtgaggttcctgaaagctacgcggacgaggaagacgaagtggcattgcatccggatcgattgcacgaggcggttgcgatcgagtaccgacgcatgaaggaaaccgcagcgtcgaaatggcagtcatcgcccacgcaagctgagggcgagctggagcccatcgatgagtttgggaacccagtgaagacgagtcggttccggtcgcagcggttacgcatgtgcgaatga

SEQ ID NO: 5834 - DNA, 1050 bp, Saccharomyces pastorianus
  modified_base (619)..(658): a, c, g, t, unknown, or other
atgctactactatttagaaacggtaagttattggtgaaaataaagtggtcgtcaaaggaggatgacgaggaggtgtccaggaagttgggaaaggcagaagcattgtgtaaggggcggtgggcgcccccatccatgtcgttcagcaggtcggagtgcactatcgagtgcgtctccacatcatcatcatcatcatcgtcatcatcaaacacgttctcgaacacggacgcgccgttaagattcatgtccgaaaggaagaactgctggttgtcagtgtcatcggtctcgttgttagtcgtcgccgccgtagtcccggcaaagggcgaggcagagaagtccaaggcagagttggaatgctgcataatgcggttaatgtgctggaacgacgtgcgattgtgcaggcgccaagaaaggttcaaaatacgatctgagtctggcaatattttctgcgcgctcgagtacagattccaaatatcgttgtttaaattcagatccgggtcgagattcggggctctgttcttgctcataactttactgtctgtagaaaggggagggaaagaaagggaaaaaacgggaaagaaagggaagggaaaggagatgactcactgccgtgcaccgtgtnnnnnnnnnnnnnnnnnnnnnnnnnnnnnnnnnnnnnnnntaatatgcccgaaagagagtgactttgcaacaacgtatgatatgatacgatacgaaacgatacaatcgatgtggccgctacaagcaaaaacgccggaaaagcgaaggaaagaaaacgtgcatgctcataccgggcccatatatatgtggctggtggtgcggacagctttgtgtggtggctgtagtcgttgcttgcagcacaaaaacgagcgcgatgcgtcggacgagagagctgttatcttatcttatcttatctgcttcttatcagcccgggctcccgctttgttgacgttggcgggtgggtgtttgatcgcccgttatcggccgggccaatcacgcagggacccacacaccgagcgcttgcggtcacgtgcgatcgatctcggcggctaa

SEQ ID NO: 5835 - DNA, 285 bp, Saccharomyces pastorianus
atggcagctataactaaacagctttttctattattttatcgttcttgctcatcaaagtatcctttcattaaaaatctccaccgtcaaatccgccgtcaaatccgccgtcatagccaccgtcgaagtcaccaccattgtcatcaccgtagtagttgttttcgacatagacattatcttggtcgtggttatcaaatgcattttccagcatggctccacccaataaaccagcaccaacaccgagtagaccacccatcatggcgttgctacgcccaccacttttcttag

SEQ ID NO: 5836 - DNA, 441 bp, Saccharomyces pastorianus
atgaccccctttacaacaacccttacagccttgctagctgtgacgataaacgcgctgcagaccaaacactcatgtgaagcacttgcagatgaatgccttgatgtagcgttatcgtcaccatcgtacataagcattgaaggaaacactaccagcgaacaattgatgcagggggttgattctggggagcctcctgctgaagacttttcccttgatcgccaaattgcaaagcttttagcttcctacgacgggtctgtctcgacggtgggtaaattcaactttagcggtcttgagaaagcagaggtagccaatatgcttaaagcattcatcgattgctactacgagtccagcgaaaacagtacgtgccttaatgacaatttcgaggaacgcttgccaggtagcctattggacatgacggatcggaacaaatcgttgccagcgtag

SEQ ID NO: 5837 - DNA, 177 bp, Saccharomyces pastorianus
atgatggtcgatcccttgtatagcggcgggttgacaaaaccattctgttcgtctggattacgaccaataacggtcagttgcgtagtgatatcgaaagttgacaattctgtaaggtcgaccattgttgcgaattttgatagttgtgccaattatgtgccaagattacaaagcgtttaa

SEQ ID NO: 5838 - DNA, 1206 bp, Saccharomyces pastorianus
atggtcgaccttacagaattgtcaactttcgatatcactacgcaactgaccgttattggtcgtaatccagacgaacagaatggttttgtcaacccgccgctatacaagggatcgaccatcattcacaagaaactttctgacgtagaaagcatgaaaggaagatttttttacgggacagcaggttctccaaccatcgcaaatttggaagatgcttggactcatttgacgggtgccgctggaacagtgttgtctccatctgggcttggctcgatcacattggcattgatgacccttgcgaaggccggcgatcatatcctaatcactgacagtgtctacgtgccaacacgcgtactatgtgatggtttactggccaagtttggtattcagaccgagtattatgacccatcggtaggagaggatatagaaaaacttctcaagcccaatacaagtgtcattttcctcgaaagtccgggctcaggaaccatggaaatccaggatatcccagccttggtttctatcgcaaaaaaacatggaataagaaccatcttggataacacatgggcgacaccacttttcttcgacgcccatgggcatggcattgatatttcactggaagctgggacgaaatatttaggtgggcattctgactttctccttggtctaacctctgctaatcaagaatgctggccactattacggtcaacttacgatgcgatggctatgttaccaggtgccgacgattgccagctggctttgcgaggaatgcgtactttacatttaagattaaaagaggcagaaagaaaagcgctagacctagcggcttggttgggaaacagagatgaggttgagaaagttcttcatcctgcatttaaagattgtcctgggcacaagtactggttacgtgattacaaaggttcctctgggttattctctatcgtcctcaaagatggatttacaagagctggtctggaaaatatggtagaaaagatgaagatttttcatcttggattctcatgggggggttatgaatctttaattacgcctgtgaaaccagccaaacaaagaaaaccccacaactggcctcatcgcggttttgctttacgaatccaagtgggcttggaagaactatcagacttgaaaaaggaccttgaattaggatttaaacgtttagcagcagagatatccatgaacccattacaactttag

SEQ ID NO: 5839 - DNA, 1704 bp, Saccharomyces pastorianus
atggatacaaaagagccatctctcaatacattcgtcaagagacactctgagacacattttgctaatatcaaatatggatactatgtcttggtaatatcgctagtttacctcgtggggttggtacttctaagagcgtttgggacaagaacggctggcaggtcaggatcacaactcaggaataaagtcatttatcggatctatagcatagatcctgcaattcatttggctatattgtttctcgcactcctggctcccttttactatcattactccttgaccacacaaactgctgtttatttgaaaagactgggaagactgagttatgcattagttccattaaacctattccttactctaagaccaaattggatattgagaaaaaattgcgcctacactgatttaataccgttccataagtggttctcacgttttattaccgtgattggtttgcttcatggcattttcttcatcgttaaatgggccatggatgatactgtttccttgaagcagaaattgattttgaaaactttcaatcttgtcggatttttagtatcaattttgatactgtttttgctaatttgctcaatcgggcccatcagaagatacaattatcgcctgttttatattgtgcataatttggttaaccttgcattcatcttgctcgtccccatacattcaaggcccggtgtaaaatttcccttcctcctactgaattgtattctattatttttccacattatcaatagagtaatattcgcaaaaccactaatcctcttgagtaagaattcaaattacacgaagacaaatttagtccacgtaaaattaccaagagcagtcattccagatttctttgagcctgggtctcatataagaatcagcccctacagaataattaatccgctttactggttattgccatcccacccgtatacgattgcctctttggcagaggacagttcaatcgacctcatcataaaggagacttcaacaatcgagggagctagtcaaatagagtctcttcgcagcaatccgaaatcgttttatttagaacaagaaacttcctatactctcgttggttgttatcctccctctgtacctgaaaaatgcctttctcaaggcacaaacatagccattgtgtgcggtgggtctggtatatcttttggcctaccagtatttaggtattttttaaacaaggaggatgtgaagtacctgaaaatcatatggttgataaagagtcgttccgaatatgaacttgttttgaactacttggaggcaaatgacataaattttgaaaatgcatcgtccaacaataagaagtttttaatatttattagtggaaattatcttgtggaaactcgaccaaacgaagcccccaatattgaggatgaaaatccagactatgaaatggggtctttcactaatgaagatgaagacctttcaatctccaatttcaattcacaaaatgcgtacagcaacggcaatactccagagacaagtcatagtcctacggccaagaatgggaacttgattgaagtaaaatcaaagcatagttttactcttcacaaggaattaagagaatttcaaaatggaaactcaggaaaggacaaggatcaaacatggttgttttcatgcggtcctccgtcgtactacgtgactcaggaatactgtcatggggatcctctagagtcgacctgcagcatcagc

SEQ ID NO: 5840 - DNA, 1029 bp, Saccharomyces pastorianus
atgaaccactccatagtaaccgatgacgaagttcgcgagttcttcttaaattgttcctcagagacagttattgaatcaatcgctgacttgcatgagtcattgagactctattctgaaaaccatgggatactgcccaatagaatattcaaaacgctgggtgaaaacgatgaggattcgaagatatcccacatattcatgccagttgtaagtagagatttttctggaataaaaatcttgattagtaacaacaataaaaacttccagggtgtaattaatcttctagaacccgaaacaggaaaattaaatggctgctttgaagccaaacaaattactgcgataagaactgcactggtgtcatgcattggtttatataagcaactgtcggatcctcatcatggatggtttaagtttgaagatggcatttgccagttgacatgtttcggtactggtctgcaagcattttggcacatttacgtatgcattaaaatattaatgtcggaagcctttaaaaggtctttaaacgctatcaaagttaacatactatatcacaagaacaagatggatttggcttgcttaaaatcattgagtaaatcatttggaaatgaactaaacatagattttaaccaatatcaattggggaccggcgaagatcataagagcccaaaagcaaatgatgctgtttctagtagtgatattatttttggttgtctgcctacatcgacaccgaacttgtttttgaatcaactgacaaatagcaagaattctaacgagccaaaacacacttacatctcgctaattgggagttataagccaataatgcatgaatgtgataaagatttagttgatgtgttcaagtctagtgatgaaaatgtccgtattttagtggattcaagggagcacacacttttagaatctggagaattaattgattccgaaatcaaccccgataacgtcattgagataggtgaactagattcaataaaagatatcgttttagatctacacgggaagagcacaaaagattattaa

SEQ ID NO: 5841 - DNA, 120 bp, Saccharomyces pastorianus
atgaacaggatcagtgattgttctttgtccttccttttcctttgcctcttcctcttgttcttctcactccactttttctgttttacccgtaaacacgttacaccgtacgctcccacttaa

SEQ ID NO: 5842 - DNA, 153 bp, Saccharomyces pastorianus
atgaaatacatccaaactgaacaacaaattaacgttccagcaggtgttactgttagcatcaagtccagaatcgtcaaggtcgaaggtccaagaggtactttgaacaagaacttgaagcacattgatgtcactttcaacaagatcgacagctga

SEQ ID NO: 5843 - DNA, 1386 bp, Saccharomyces pastorianus
atgttgagggaggcagtaccccttttaaacaaaatatacgaaagagactctaggttgcactttttatccacagaagatagttcagcttattgggaaaactctgacaaacagtttttgaatttgagattttatgaagaactgcaagagtacgaagatttgtatagagaacgtttagaacaagaggaggaggaggagaacatggaaaaggacttggattttgggactgaaaggcgctcgttcaagtctttactattgaataaaatgaaaaagaggctcaagtcgtcattacgttttcggaaattggaaatccttttagatttaccgttctttattccttttgaagaaagagtggacttgttttacatgttcattgcacttgacaaaagacgattatctttagatgatgatcacagcctaatgaatacgtttgcaccttgggcttcgactggtatgagaaaacagtctgctattatttccagagaaaatgttttagatgatgcctttaacgcgtttaactctataggagaaaggttcaaagcatcattagatgttacatttgtcaatgaatttggcgaagaggctggtattgatggtggtggtatcactaaagaatttttgactaatgtaactgaagaagggtttaaagattcaaagcacgaattatttcaaacaaacgatcattatgacttgtatccttccgtcgtatatgacgcttcgaaactaaaatatatatggttcctcggaaagattgtaggcaagtgtctatatgaacatgttttgatagatgtgtcttttagtgatttcttcttaaagaaattgctgaactactcgaacggattcttatcttccttttcagatctcggaagttatgattcagtactgtacagtaatttggtcaaattattgaatatgtccgcagaagaaatcaaatctttggatttaacgtttgaaatcgatgagcccaacagccctgcgaaagtggttgatctgattccgaatggttcgaaaacatatgttacgaaagacaatgttttattgtacattactaaagtaacagactacaaattaaataggagatgtttcaaacctgtttcagcgtttcacggaggattaagtgtaattattgctccacactggatggaaatgtttaattctatagaattacaaatgttgatatcaggtgaaagagacaatattgatttaggtgacttaaaagctaacacagaatacgggggctatacggaggacgatcagacaattgtggacttttgggaggttttgaatacgttcaagtttgaagagaaactgagcttcttaaaatttgtcacatccgttcctcaggctccgttacaggattcaaggcattggatccaaaattcggtataa

SEQ ID NO: 5844 - DNA, 1188 bp, Saccharomyces pastorianus
atgttaaacttcactggtcaaacgaggagaaggaatgtcaatttaggaaatagaactcgaaatacaaaaaaggatttactggaaaagactaaaagggagcgagaaagaagagcccaagataaacttaaagaggacgcaagtagaactattcaaaagtatgttagaagacattttgcaaacgtgagatttttcaagacagcttttacgaatgcgcaactagttcatatgataccagcttacgggggcaaattgatcaattatatttcccgagatgatctgcaacaattactgatcctatctcatgatttcttgtccacctaccctagccctttgggtaattcacagctattgagtttgttaaagctatatcaagatgatacactagtgatgcaaactataagcgatttaaacatgaaatacccaaccattgacgagtttttagacagtgtatcgacctttttgcgccaaacttccgtatcaagttattctgtgactttaaagctagcagatattatagagatgtggggagtaatggacacaaatgcttcgctaaatattttttcaataccaataggacgctatgaagagcaaccatttgcattagatttctactgccttctcgcagaaagaaatcttctgcccaaatatatcgactcagacccgacattatgggataacatggcgaaggcatattcacattccagggaaaccggtcaaaaaaatattgcaaaactgctcatccctaatttcagtcactatgtttcttcatcaatcttgcctaatgacaacgactacgtattaaagttttatgaaaaggcatttatagatgaagtgataactgctacaaaagactatgtttccgacgaaggccacgttagaaacctaatgcgttatattgcaagttctcccaatcaaagttgtaagaactccgttctgatcactttactttcaaataagaactttgtcagaagactctcgtgggaattctttcacaccaagttcagtgctaccaaaacggaagctaatccgctcttttcagttttagcacaattaatcgacatgcaccttttgatatcgactgatcgggaattattggatcatgagtcagtaatacctattgaaggagttgaaaaaattcacatctattttgaaggatttttcctttcgacaatattggggattacttga

SEQ ID NO: 5845 - DNA, 102 bp, Saccharomyces pastorianus
atggttggaagcatttcttgtataatgagagcacttcaagaggcatctataaataagaccccgttgcctcaatttatgccaagtgcaagaaatcgctcatag

SEQ ID NO: 5846 - DNA, 2763 bp, Saccharomyces pastorianus
atgtcgcttaagcttaaattaatcaagttccagaagttatggttgtattattttccctgtgacagaactcttacgaagagaatatgtaaatctaccgttaattctacagtggccttcatcttttgcttgattcctgagatcagaaagcatctgggtgctgctcctgcgatgctgcctatgatttctgttattgttcatcctggaagaagggtgggaggcacgattcatggtgccatctattgtacaacgggtttgatatttgggttggcttacgcaatctttggcaggtttctggcacagcgatgcttggggagttcttgggacaagttaacagaggctcaacagcatatgtctaattacaagagatacgaagctgggttggcaattttggctgtttttgaagtgattatgcttttattccacggttggatgaggtctgtttcccattattatttcggtatcgtatttccactattcgtcgtagtccatttcgcttttatggatcctttaaatgaaacggcgggtactattgccaaagcttatagtgctcctttctacctgggtattgcgatgtcgatattttggaaccttgtattgtttccagaatgggggactacttacttaggtaacaccaccattgacaccttgaatgaacttcacaaatccatcgattattcaatcaatttctttattgcagtggatccacataacgatagtcagttgtacagtagggaccccgtttcactaggtaagcttctaaaaatgaaaacatcaattgcttcaaaagtaagcaattgtcgattggtcctccatgaatgtatttatgagttcacttatgcctatatctcgcctactaaactgaaaccgattatctccactttggaaaatttaacagtttacattaatgggcttgtcaatacatgtcaactagaattcatcttattagctcggaatgataacgagctcaagtctgacgatgttgcagcattaacgcttccgaaaaataaagaaatcagttttgcaaatgctgaaaaattgttaaaagttattgacaagttacatccagtaatttatagcttacatcgaacaatgagtgaatgtatgtatatggcgaagttggtacttgctcatgcttttgatgtgaaggtttcaaaagttcactcttgctcgatgtttaaggacggtaacttcccgactttcaacaataacgctaataatcttccaaatgatgttgacatccaaaacaagattaatgatttaaagaacgcattagaggaatgtaaatcaaaattcaagtcagaaatgttaggatttgatattgacattatgagtcccagtgatgaaatgtttttactctcaagttttttactaaacttcaggcaaactgcgaactcaactttgaccatcatggagtccgttaaagatattttagtaaagagacagatacaagagaagaaaggttggctgagaggcaaaaggctttggtttttagtattgactaactacgagacgttctctatttggttgaaaggtgacagaaactcggtgacagaaaatgatacattaaagggcacttttaatgcagccactaatggttttgctcatgatacggtcattagaaggccagattacgaagagaatcagcttttgtctcaaaaagtttcttcaaacaaaaattttccaaaatatgacgcttctctggatctgccaataacaagtgaaccaaagaaaatttcttcttcttcctctgcttcttccttttctcctgccttgtctttgactaaaacatccacattcgtgactagaaagagctccaaaaagcgcactagattttcatttatgtcattgctgatttcagttgacgatttttgcaaagtatcacgtcctcatttcagatttgctttccaagtagcgattgcattgatgctagcctctttccctatgttcattccaaagacaaggcactggtacatagattaccgtggtacctgggttggtttcgtttgtatactttgtttggagccttccgtaggtgggaccttctgggtcttcttccttcgtgctgttggtgttatttatggagcagcctgggggtatttatcttatgttgctggtgttaaccaaaccaatccatatctggaaactgtcattacagtgtttggtgctgttcctgggttttactatttactaggttcaccctatgtgaaggctgcaatcattgaaatcattagtatctatattgtcatgcttgcggcaatccttccctcccaggatgatattctgacaagttttgccaagagatgtttggccgttgggtacggtgggggagtggcgctgatagttcaggttttctttttcccattgaaagcacgagaacagctgaatgaagagatttcgtttgtatgtggttgtatatcggaaatggagcttctttatgccactgggctggagggagagcaggttgctaacagtatgaccgaagataaatataaaaggattgagaaaatatcaacaagtgctaaagaggcattggcgcgcgctacagcttacaaagggttaaccagacaagaaccgagattgaagggtgaatacaccgaattagaaaatgtcttcactcaagtgatatttatacagaagcaaattatagaaaggatagatacaatttctctgttaagaaaacaaatggaagtgcagttattgaagagtttaccagtcttgtctacccatacagacgtcaaatggttggaagcatttcttgtataa

SEQ ID NO: 5847 - DNA, 759 bp, Saccharomyces pastorianus
  modified_base (741)..(741): a, c, g, t, unknown, or other
atgcttttagtgtatagtcgtattagaaactacgtgccgtcttctttatgtcgaatatgtatacggtataattccggttcgcagaacagatggctgaataggcaattgggggatccatacgcgaaacaagccaaagtccaaaacttgaggtctagagctgcattcaagcttatgcaaattgacgacaaataccgactttttagcaaaagcaagccggagcagaggatattagatcttgggtatgctccgggggcctggtctcaagtagcacatcaaagaagctcgcccacctcgatgatactaggtgtcgatattttaccttgtgaaccgccgcatggtgtgaactctatccaggccaatatactggccaagagaactcatgacctaatacggcttttcttttcgaaacattttcaactgaacaaacacgatgagttgcataaagatcatggttactttcagaatatgctcgaggaggaattaacccatttgaaagatactgatttataccgcgagattttcactactgatgacaattacggcgtttcaagtacgaacagcacgctaagagaactggaaaacttcccaattgatgtaattataagtgatatgtatgaaccttggccccagacagcgggattttggaataacattactaatcaagcttattttaggatggcgaatacttctggtgttagcataagagaccattaccaatccgttgatttgtgcgatgccgcngttggtaacgggctatag

SEQ ID NO: 5848 - DNA, 930 bp, Saccharomyces pastorianus
atggtgttatacaagagaaagcctatactgcttcctgatccaaagcctctaccattggatttgaacgtgcaagtatggcatattgaagaaaccggagaatggtttcctagttacgaagaatttctggataggtttgatttctatactcgccaccattttacttgtgaaatcactggtacttcgtgcttaacttttttccaggccttggatagtgaggaaacacaattcaaatacgttgaagacagattcccattgaaattaagagaacccgtagcacgattcttgcatttcaacgggataagaagattggacgcattggtggagaaggtttatgcaaggttcaaaaatgatttcttccctggtgaaattgtgtatctacgtaagcataaagacgcttctacaacaaattcaaattcacaacaagatactccccagcctgatgagttgcctgagaacaataacagcagcaatcctaacttacctcagtaccaatatcaaaaacggtatattatcaaagaaaaagttcaattcaatgcaacgataaatccagaaaccaaagaaatagcgatgcctgcccataccaaatacatgttgatagaagaatctacctgcagcaataaatcatttatagttgaccaagggcagatttacagggatcgttctactttcactaaacacttaatcaaatgtttttttaagatcactttacaaagggcttcttcaaagatgggtgcaccttggtgcgttaaacctgaatatttagcaatgtatggtttgactatggattggccgaatgatatgctaaaatacaaagatgatgaaccttccactgttgcaaaacgtttggatagtgctaatgtttcaccaccagaaaacggtaagagtaaacgtcaaagtaaatcatccaataaaacaattactccacgatga

SEQ ID NO: 5849 - DNA, 816 bp, Saccharomyces pastorianus
atggatgatttggcattgccatatcagcatccaccaagaatctttccaaacctaacgtgttataatgagaaattggaatgcgttctagttggttctattggaagctccaaattattcacatcttttggaaagctattacaagtctatcaatttttgaacacttttggctcaaggatttacttatctcacttcagtcttgaccagttcatcacctctctgaaatgtacggacgcatatgagttaaaaggtgaagttgtctatgtaaacataaaggctcaagcaactgaagaacgagaaggaaagggtagcagctcactcttgaaaacagaaaaagaggaaagtgttgaggaacatgctgaaaaatcaagcaattggcaaagaaatccgttcatccgtgaaatgataatgaaaagaaattccaataatgttgaatacaagattatccatgacgatccagcaacagacgatatacttgataatgtcaatcacaatgggtccgccttactcattgaagtttttactgcattattgcgtctatttatcaacgaagatggtgattggaactgtattgttgttgaagattggataatatataataaaggagtactgtcagaagcaaataattctagacaagggcagatgacgcagcagcaaaacggcaacagatattttctgcaagatagggaaaagccggataactcaagtcccacacaaaaagtagaaagacttataggtgaccgtagtgttgaaagtgcatccaactctaaatctgaatctgaggctgaatctgaatctgaagaggttgacctcagttgg

SEQ ID NO: 5850 - DNA, 600 bp, Saccharomyces pastorianus
atgtctagcagatggttaaacgcgatacattacctggtgtgcccggcgacggtgctgccgggatacctcataaacgcgtacggctgcggcgcggcgttgcaggaaacgctgaacaaggacggactggtgaacgctgtgttcgtgaagaagggatggttctggacgtcgctgcttgggtggtggtgcatcatacgctacctgcccacgccgtccgcgggcgccagcggcagccgccgcaggcgcatggcgcactcgttcaggcgctacgccatcctgacggtgtggtggtacgtgttcaggcgctacgccatcctgacggtgtggtggtacgtgttcacgcagggcatctggttcggcgtgggcccgatcatggacctggtgtttgtatacacggggggccattgccactacgacgtcttcgacgcagtcggtcacgtgaaccgcgacttccagggctcggagactcggacgcagcgcgcgctggcgctgatccgcgacgtgctcacgctgcacggcggcgatcacgtgcacggccagcaccagcagcaccacgctgtgggaccgctcggtcgggtcgatcgacgcccgattcgccagctg

SEQ ID NO: 5851 - DNA, 981 bp, Saccharomyces pastorianus
atgtctcaagaacagtacacagaaaacttaaaggttattgtcgctgaaaagttggctggtattcccaacttcaacgaagatatcaaatatgtcgcagagtatattgttttgttaattgtgaacggtggtaccgtcgaatctgttgtagaggagctggcaactctattcgacagtgtttcgaaagatatactagcaaacgttgttcaaacagccttttttgccttagaagctttacaacaggcagaaagtgctgagaatatcgtatccaagattagaatgatgaatgctcaaagcatgggccaccgggatgccacccaacatctactacgtcgacaacaacagcagcatcagcaacaacaacaacagcaacaacaacagcaggaggtacaacaacaacctcagcagctacaacaacaacctcagcagctacaacaacaacctcagcagctacagcaacaacctcagcagccacagcaacaaccagacgcacagaacgcaatgcagatagagcctcagggagttccaactcctatatcagctttctctggcgttgtgaacgccgctgatgcaccccaattcatgcctattgacaatagccagcgttttactcaacgtgggggaggtgctgtcggcaagaaccgcagaggcggtcgcggcggaaaccggggcgggcgtagtggtaatgcgacacgtttcaatccattagccaaggcccttggtatggctggtgaaagtaatatgaatttcgttccaaccaaaaaggaagggcgttgtagactatttcctcactgccccctaggtagatcgtgtccccatgctcatccaactaaagtgtgtaatgaatatccaaactgcccaaagccttcaggaacttgtgaatttttacatccaaacgaagatgaagaattgatgaaagaaatggaaagaactcgtgaagagtttcaaaagaggaaagctgatcgacaagctgatccgccataa

SEQ ID NO: 5852 - DNA, 1719 bp, Saccharomyces pastorianus
atgatgtttagaaggagcgcggtgaagccgttgagaacggtacagttgggcgtgagcaacgctcttagagccggctcgataggtatgctgggtcgtcatcttaccaatacggttctgaacgaacgtgcgtatcattccaaccaaggtggcggtaggaagccatttgacggcggtcaggacaagaagaacaaatgggttaggcaggggaagaacaaggccgttcgagaagaattgaaagtggatccggcgtctccatggcgccacgagcttctttcgttcgacgagtgtgtctcatctgctctgaagtactctactaccccgctgcagaacacttacaagagaatggacaacaaacaattgaacacacatccgtcgtttgccctgttttgggattccatgggtagagcaatggaattgtactattctctgagagaatcgcctgacttcaatgcgtaccgcgtatcacggctgattcatttgttacacaatggcctgaggtcgactagagatcaactggtcaagctaagtaggaaacctgattatgactcgcagtctttccataaggaaatgataaactttttatgtaactccttaaaagacatctctgatgacgtcttggcgaataaggtttctgttaacggatacggtgcgactcatcttctgacctctttcaaagaattgtcttttaacgatgactgtattcaaatatgggaaacggggaagacttcacccaatgaaactacatctgaggcattcaaagaagccaaagtagttgggtttatgctaccattactttacgcaaaaaaccagtctttaaccgagcctaacgaactgtacaaccaagttattcagtcgaaagaatttacccaccctaacctttatagcgggttgattaaggtgttcattaaggctgaagattatgaaaaagcgttgtcactcttcggtcggttatgtgagaaagcagaagtacggaattacggttatttgattgaaacgcatttaagctttattagtgattctaagaatttaactctggcagaaagtttttttgataaaattatcaatgacgaaatgccatataaaatcattttacaagtttccacggtgaactcgtttctgcaaaatatatggaaaggggagaatgattttgactacgtctacaagatttgggaaaaagccgttcgattctatggtagcactgttaatcccggaatcctgtcttcattgaacaatacgtttttcacaattttctttgaaaacttcgttaacgacaaaatcaagggctttaacaaactgcaggaaatcataatgttctacagcggtgtcaagaaaattgacgaaccatttttcaatgtaatgttgactaaagctactacttggcatgaacgtagcataatcgattttatcgataaaaactatactctctaccatattccaaggactattatatcatatagaatattactgaaatcactcggaagcatagacgacaccaccaacgaggagattttgaacaaatggctggaactagttaagaagttagatgagttaggccaacagtacatagccaatgcagacctatccgcgttgagagatgcaactgtcgtttggtcgcaacaaaagaaggatgaaaaggagctcattgctaaatctgaatcaacagcaactacaacaaccgatttaaagattaaagatcctttggaatccttgcaaaaatga

SEQ ID NO: 5853 - DNA, 396 bp, Saccharomyces pastorianus
atgagcttgttgcttgtggaagtatctcataccgaccttaccgaagtaacctggatggtatttatccatgttaattctgtgatgatgttgaccaccggccatacctctaccaccgggatgctttctgtgcttaccgacacgacctttaccggctatataaaaaataaaacattgtatgaaatacaattttttaacttgttagtaaaacgtgtttctgatttggatgttttgttttcctgcaaaaaaagaaaccgtggtaactctctttttcataattgcgctcttctctacaccaatttgatacgacaacatagcgatatacctttcagcaatttgttgaaaaatacagctcttgctgcccacaaaatgtgtaaagagtatgactatactgcataa

SEQ ID NO: 5854 - DNA, 3165 bp, Saccharomyces pastorianus
  modified_base (461)..(520): a, c, g, t, unknown, or other
atgttcaataaaagtgtaaatggcggtttcacctttggaaaccaaaatacatcgacaccgacttccacaccagcacagcccgccaatgcccttcaattccctcagaaatctaccggattatttgggaacgccaatgctaatgcaaatgcaaatacttcaacacctagcccttctggtggtttgttcaatgttaattccaatgctaatactttaaaccaacaaccgcctagtaattcgctattcggcaatagaccaacacagccatcaggtgggttgtttggtggcacaagcgatgctacctctaaaaacaccggaagtttatttggaaataacaactccacagtaaatccaacgggctccacaggcttgttcggtaacaattctacagggtccactgcacaaaacggcggcctatttggaaatgctgttaatacaggttctaatgcatctaccggtggttnnnnnnnnnnnnnnnnnnnnnnnnnnnnnnnnnnnnnnnnnnnnnnnnnnnnnnnnnnnnctggacaaagcggtggtttgtttggaaagccagttgcgaacactaccaactctactgttgggtccgggggcctgtttggaaacacatcctcaacgaattcatctacaggattatttggatctaataactcgcaaggaccagcaggcctgttcggacaaaagcccaatgttccagccactgggacagggctgtttggaaataataatgcagcttttgcgcaatctgctgaccctaccggaaacatgtcaaccaatccatacggtattaatgtaagcaatgtgccagtgtcagtcactaatatgccaagatctattacatcttctctgccaaatagcgacggtaaatcgggtgtatcatctaaaccaattgagaatagaagaacatattcattttcttcgacaaactcagctaaacctcctctgccacgcgcatcagaatcaagtttagttagtaaattaagcaccagactaaaaaccaatcagaaaagtgcgacccccaatggaattttctcaccatcttataacaaaccgtggttgactggaacgagtttaaactctttagtaggcgacatttcatcttctaacccaaatactatgaactcgagtgaaaacaccgactgtatggctaacggattcaactttttatcctcccaaaagaccgacctattcgaattacgtaagttgaaaatcgattctaacaggagcgctgcaaaaaaactgaaactgctatcagggagtccagttaccacgaaagggtatatttttcaggacgaacaatttccatttaaagatgagtcaatagccaaaactaataagggaagtaacataaatactaaagaaaacaatgataatgatggcggtcacttggatggaaaggaccaaacaaatgatccgtatactaaacgagatgacagtggtgtaaaaagtgaaacgtcacaaaattctgattattggtgctccccttcaccagaacaattggagcttttatcattgaagcagttaaccgctgtcccaaattttgtcataggaagaaaaggctacggttgcattacgtttaactatgaagtagatcttaccgctttcgtcagagattttagagaagaactatttggtaaaactgtaatattccgttcatctaagacagttgaagtttatcctgacgaagatactaaacctccggttggatacggattaaatgtccctgctactattaccttagagaatgtctaccctgtggataaaaaaactaaaagaccaatgacggatactttgaaatttgcggaatttcaaattttcgacaaaaaactcagaaacatgagagaaatgaactttatatcctataatccctttggtggtatttggacattcaaagtcagccattttagcatttggggcttggttaatgaagaagatgcggaaatagatgatggagattcggagaaggataacaataaatttgagaatcattcaaaaaaggtacgcacactagcacaatctaagcccttaaatgaagagatgattgttaagacaaatggcacgtccggatgtttagccgataaagaagactctattattgaagaaaaagcatacgaacctaatgtatctgaggcagactttgagagaattgaagtttctcctacactggatgtttctaaagattgggtagagcaattaaccttagctggttcctcattacgctccgtgttcatgacttccaaagaattgtccaaaccctgtcaagatgaaatagatttactatttgcggaattcaatgacgaaatagaaacggaaaaaagcatcgtgaaagagagaaagtttactgctccctacacatttgccaacttttcgacaggctcgatgctattaacaaaatctacctctactgaaacgggtgtttctattcagcgcttaccaaatgagttgaaacgagactttttatttagtgatctgtacttggacaggcaaattgaaaaagttaccctaaaatcaagagattcaaactcatacccatacgttgttgagagttccctgctcttcaaggacgtcttgaattatatgaaagtcacttccaaggactatagcttatggaagctttcatccatcttgtttgaccctatttcttacccatacgaggtcaacaatgttgaagcgaaaatagcattactgaaaagagaaagacatcatcaactaacctcgtggattgttggtcaaattactgccgaagttaacgaaaaaattaagagctcttccaacacaatcgaacaaattttcttacacttgatgttgaatgatgttgtaagcgcctctaagttagcaattgaatccaagaatgcacatctaagtgtgctaatatcctatctaggctcaaatgaccctagggttcgtgatttagcaacactgcaattacaaaggtggtctactggtggtagtagtgttaacaaatacgtctcgagaatttacaaacttttaagcggttcaccctttgaaggtctattttctttaaaggagcttgagtatgaatttagttggttatgtcttttgaatttgacattatgtttcggtgaaatagatgagtattcgttagaagctctcgttcaatcccatgcaagtagatttctccccttgtatgatccggtggtttgtttt

SEQ ID NO: 5855 - DNA, 276 bp, Saccharomyces pastorianus
atgaaagtttttgaagactatctaaggtttatattagatgatgtggaaacatcgaaaacggtcgactcgttgattaatggtatgaagatattttacgaagaaaataagcataatcgtgaagttcctgcatgttgtaatgttatgtctgaaaagatcgtttcgaaactcttaaaaaataacagccctatcatgaacgattccaagagcaaattgcttgaccttcctttagggcaacccgaaaaggcatacttaaagagcgaatttgccaaaatttaa

SEQ ID NO: 5856 - DNA, 279 bp, Saccharomyces pastorianus
atggagttcgttagttgtattaccatggttaatgaaaaagaggaatatagggaagatgctgaaagtggtctctgcaaaatccagatcgaggaagatgccgtgttagaagcgatggatgaagctaagctttcaaaattaaaggtggacagcttgttagtgagcgagggtacagagattttttccaaaactggtttgggaattgatgactgtgcgagtctttattggagaaaatatcaatgtagagtccaagacatatgtgtggtacgtatgtgctcataa

SEQ ID NO: 5857 - DNA, 579 bp, Saccharomyces pastorianus
atgttgactggacataagatatatgttgcctcgctagataataagattacattttccaaatggacgtgtagaatacaagataacaaggtatggaaagtggttatggaattggaatcatcggcgattataagaaaaattgcagaatttaatttatgcccagttaaaaatggggaagctgacttatttgcaatggctgataaactgtatcaagatatttgttgtgtcaacgattcatacagaaacatgaagaaaagtgatttgcgtaatagaagccgagttaaggaactagttcaagaaagggaacttttggataagcttttggaagaacgtgataacaaaacgagagctattgtggtgaccctattgaatgagaaaaagaagaaaatacgagaactgaatgaggttttgcggcgtaataatattaaagtgtgtggcgatgatattccagattctgaactcattaatacggaagtggcaaaaccaatctctgagttaaactctccaggtaagaggttgaaacgaagaaggatgatggaatcccaaaatctaaatgaaaagttgggaattgcaaccagatga

SEQ ID NO: 5858 - DNA, 300 bp, Saccharomyces pastorianus
atgatatcttcaatagcagtggaggacgtagtgctcccctcggtacgatcattggtgaaaatatcattcggttgtaagattttctcaatgtcgtcatcattcaagcttggtaaagactctatacgggaagcatcgctgatgtttgactcattggtcgccccagtatttgcaatattgttcatggcgccaataatacagctgttttttcctttgaactctttgtttattcgttaccacactatcgtaatacacacctatctctttgcctttctctgccccagtgctgcagatgctcactga

SEQ ID NO: 5859 - DNA, 177 bp, Saccharomyces pastorianus
atgtgctcgacggcctcgctgtccgggcgaatttcgcggtacaacagccggcgcagcttgctgttgtactgcgcgaacacgggaccctccagcagcaggcctgcagcgggagccctcgggatgtgtttccttgtcgcggcgacgaggtggtcgcgcacgacactgggcggcaactga

SEQ ID NO: 5860 - DNA, 291 bp, Saccharomyces pastorianus
atggagaagaagaccatatttgttacgtgcggcgcaacaatcccgttctcaaagctcgtttcgtgcgtgctaagtgatggattcacccgagaattagttgagtatggatttgtgcgtcttatcattcagtttggaaggaacttcgccactcgattcgaccagctggtgcaagaacgtggggggaaagtcgagcgcacggacatccgaatcccggatgacgagttcggttgcgatggcaatgtaagcccgatactctctgatggacggaacactagaagtcattgggtatga

SEQ ID NO: 5861 - DNA, 126 bp, Saccharomyces pastorianus
atggacggaacactagaagtcattgggtatgatttttcggccaaagtgcaaaaaatcattggcgatttctcggacctggtcatatcacacgctggaacaggctcgatactggactctcttcggtag

SEQ ID NO: 5862 - DNA, 219 bp, Saccharomyces pastorianus
atgccagatttttgcagctctgatttgaattccttcattgcatgccttaaatctttgtccattagaatcttgatcatttgccatggcttcatcgtgttctcttcagtggcagaagtcccatctaaattaacaagttttttctcgatcattatgttactaacctcttctagtttctccagaacgttaggctttgagtttatttcgtccatgagtttttga

SEQ ID NO: 5863 - DNA, 453 bp, Saccharomyces pastorianus
atggcagcagtgacacccgatcgcgtccgcaaaaatacaacacagccggccatgacgacagacgcccagcgggaccgtgtcggtccggcctggcgggaaactccggggcggcatatttcgtttgcttacctgcccagcttagctatcgtgatcaagcacctgggtgatttttggctctttgtccatttgtgctgctccgcctttgtttcagcgagagagcactgccccccgacttcgggaaaatctggagtgagtagtagcggaggccctgcggcgttttcctccggaaaaacttgtgagcagaagaagcaacagcaaaattttacaacaggcgggacgagggaaagtggggaagagcaagcagaaaaaagaaaagaaaatagtgcttctcggataatctatttattatatcttttcatcgcagcatccattaccaaagacgacgtggagtaa

SEQ ID NO: 5864 - DNA, 111 bp, Saccharomyces pastorianus
atggaggcgatcattcccgcagacgtcaagttagaggacttggaagtgacgctggccaacaacgagaacgaggtgagagacaacgtgtccaagcagcatcgacgccgattg

SEQ ID NO: 5865 - DNA, 1155 bp, Saccharomyces pastorianus
  modified_base (198)..(220): a, c, g, t, unknown, or other
  modified_base (260)..(319): a, c, g, t, unknown, or other
atggtcccccctcatttattagctcaaaatcatatggcgatgatgaataacgccaataacaaacaccataaccgtaacaataataggtcaaatcataataacaacgataatggtagtaactatgcttacaacaacaaggacggaagtcgttccaacactggtaaaatgaaaaacatgaaaaatggttaccatggctannnnnnnnnnnnnnnnnnnnnnnctcacaataataacaacggtaataccaatagcaataacannnnnnnnnnnnnnnnnnnnnnnnnnnnnnnnnnnnnnnnnnnnnnnnnnnnnnnnnnnnatgctgaaaagcagcgtaaaattgaagactcttcgagattcgcggatgcggtgctggaccaatacatcgggaatatccattcgttgtgcaaagaccaacatggatgtcgtttcttgcaaaagcaattggacattctcggcagtaaagctgcagatgctatctttgaagaaaccaaagaatatactgtggaattaatgactgattcatttggtaattatttgattcaaaagctattagaggaagttaccacagaacaaagaattgcactcacgaagatatcctcgcctcattttgtcgagatttccttaaatcctcatggtacaagagcattacagaaattgattgaatgcatcaagacagatgaagaagcacagatcattgttgattctttacgtccttacactgttcaattaagtaaagacttgaatggtaaccatgttattcaaaaatgcctgcagagattgaaacccgaaaacttccaattcatttttgatgccatttgtgaaaactgtattgatattgctacccatagacacggatgttgcgttctacaacgttgtttggatcacggaactagagagcaatgtgaaactttgtgtaataaattattaacccttgttgataagttaactttggatccatttggtaattatgtggttcagtatgtaattactaaggaatctgaaaaaaaaaaatatgattacacgcacaaaattgtacatcttttgaaaccaaaagttattgaactttcaattcataaatttggatcaaatgtaattgaaaattttgaaaacaccgatagtttcggaaccaatgatttgggaaatcttaaataa

SEQ ID NO: 5866 - DNA, 1404 bp, Saccharomyces pastorianus
atgtccacaaaggatttgaaagaagaaatcgatgatgtgccatctgttgttgaccctgtcgtctcagaaacagtcaattctgctttagagcaactacaactggatgatcctgaggaagtcctcacccctcatacttttccaaatgaaagccttcaaaatccgcagttcgccaacggccctccctctcaaatgttccctcatcctcaaatgatgggtgggatgggctttatgccttattctcaaatgatgcaagttcctcataaccacaatccctttttccctccccctgatttcaacgaccctactgtaccattgaatacttcgcctttgaacggaggcgccccaccattgttattcaacagcgactctcatcctttccaaatgctctcttccaatgcagcagcagcaggacaaaccccaaacacactggctaacgatagttcgatgaagatgctacctactgcatccgctgatccgttatggattccttcaaatgtcccaggctctgcatctgtggccattgaagaaacctcggccactttgcaagaaagcttgccatccaaggatggggagtctaaatctagttcttttagaagacaaacattccacgccttgtcgccaactgatcttgttaacgccgccaataatgtaaccttgtcaaagaattttcaaaccgacatgcaaagtttctccaaggctaaaaagccatctgtaggggctaacaatactgcaaagactagaactcagtctatctcttttgataatacaccttcttcaacatcatttatttcctcagctaaaaatgtttctgataaattatcagatttcaaaattgaagaaacctccaaagaagatttaataggcaaggtaacttcgggtaaaaaggacagcagccctacgacttatgctgcagcatacccttatgggggacccttgcttcaaccaaatcctattatgcaaggtcacccacacaatatatcttcacccatgtatggaatcaggtctcctttccctaactcttatgaaatgggcgcacaattccaacctttttctccgattttgaatcccgcaaatcacccacttaactcaaactctcccattcctttgactcattcgccaatccatctaggtccagttttaaaccctaattcacaatctgtcgccttcttagatttcaaagataataatggcaagactggcactgataacgacaagatgggtccaaatgtgagaatggactcgatgaatcctacccttggaccatccatgcaaccattccacatgttgcctccccaacaaaacactccaaccaacccctccttggctatatggaaccccacctcccttcaacggaatggtcccccctcatttattagctcaaaatcatatggcgatgatgaataa

SEQ ID NO: 5867 - DNA, 498 bp, Saccharomyces pastorianus
atgacctctaagaacggtgtccatatcgaagcagattctggagccgaaacgactatggactcaaacggttttgtaatgagtttggccggcagggttcgcaaaccgaggtcgaaagtcagcaaggcgtgcgataattgcaggaaaagaaagataaaatgcaacgggaagtttccctgcgccagctgcgaaatatattcatgcgagtgtacgttcaccactcggcatggtagcagacgaataaataattttcaaaagacaaacttggagggagcgacgattcaagtgaaagaggagactgactccagttctagttctgttcccaatcctcagttgtgtgcagatggaccttgctcaatagaccagccggagaaaaattatgataattgtaaaatggacggaggcagtagtagcaactgtagtaacaaagacgacgcggagtccaataagaatgggttttatgacgatgacagaaaattccggccactctgggatctttac

SEQ ID NO: 5868 - DNA, 363 bp, Saccharomyces pastorianus
atgaaactctttaaggaagattggcaactctctcaattttggtacagtgatgaaacagccgcaatcctaggagatgccctattagaaggcgctgatgaaaacactgtcatcgcgatagtcagtgccccatcggtttacgctgcgatccaaaaaaaacctatcagtgaaattccaacagagcatatttacctgtttgaattcgacacaagatttgaattgttggctggaaaagatcacttctttttttacgactacaacaaacctctcgaatttagtgataaaatcaaaggcaaggtcgatagattactaatcgatccgccttttttgaacgaagattgccaaacgaaatgtatgtattattag

SEQ ID NO: 5869 - DNA, 147 bp, Saccharomyces pastorianus
atgtccgaagttatagccaaggtttattcaaccacaagaattacaacatttcttccagagcattctaatggtttaagtaacgaatttaggtgttacgcaaacttcgagtgtaaatcttggacatatgcttctgaaccttcctcgtga

SEQ ID NO: 5870 - DNA, 222 bp, Saccharomyces pastorianus
atgttagatctttcttgctttcacacgatatcatgtatgaacacagaaggaatattctcattatcaaacaacttatttacaacgatatttcatctacgaaggtacgtcttttcatcagacgtggcatgtcagtacaataccttcttccaaactctgttatcagatacatccaagagtataatttatacattaatcagagcgaacctgtcaaacaggtattag

SEQ ID NO: 5871 - DNA, 357 bp, Saccharomyces pastorianus
atggcatgctgcacatgggtagagatacgaggcggctcgagcttgttggtctgccgggtggttctcatagcggtgttgttgacgctgccgttacatgtattttcacaggagttggcccaggccaactccacaacgtcaagcacagctccttccgccatctcgctttctgcgcttgattcatccacgtttaccgtcgcaacatcgagcagcctaagtctatcgacgacgagcgtagcctctgtttcgttcacttctttcccacagtcctctttaccccttactattttgtcgacttcgtcttcatcgtcttcgtcatcttcgccaaccgctataacagattcgtcttcgtctagttaa

SEQ ID NO: 5872 - DNA, 312 bp, Saccharomyces pastorianus
atgtctacaactaatggttttgtgatggtgttgctgatggcgctcctctattggacaagtctccttcctgctacaaatatcatggcaaattcaaagtttggatacgtgaggcagttcgaaacgcacgatgctattttaccccaatgttacatcgtggtaagaatagatggtaaaaaatttcatgaattttcaaagttttacgattttggtaagccaaatgacgaaaacgctctcaaattaatgaatgcatgcgcgaagaaccttgttcttaaatatacaacagatatgatattagcgttgtggagaaagtga

SEQ ID NO: 5873 - DNA, 618 bp, Saccharomyces pastorianus
atgatgttgaacaaagcgaggattctcgcacggtatggaatgacccatgcgaagcaaaatactgctcgaacaacgggcttcagtattgtgactccatcgatccatcccttccattctatggcgaagatccaactacagaaacaaggtccactggatctttcttatgatgtaatcaagagtgatacgcccagaaatggcaatgtcgagaagccgggaccgcccattattatactacacggcttgttcgggaacaaattgaacaaccggagtatcggccgaaacctcaataagcgattgggaagggacgtgtacctgttggacttaagaaaccatgggtcctcgccgcacagccccgtacacaattacggcgcgatgtcagaagacgtgaagcatttcatcacaaaacacgaactgaacacccaggatgggcccattatagtgggtcactcgatgggtgggaaagtcgccatgatgctggtcctgaagaacccgcaattatgctccatgatggtctgtatagagaatgcgccagtgagtctacgccccaatatccgagttgtcgagtacttcagagcgctgcccaaaatcgagcagaccacggaagaccatcagaactta

SEQ ID NO: 5874 - DNA, 114 bp, Saccharomyces pastorianus
atgaacagtgctggccgtgtccagcgttcgtgtgtgggatcaagaggccatgccgcaatctcgcctttcacgatggcgtcttttcagcgtgcacaagcgggatgcgctgcgtga

SEQ ID NO: 5875 - DNA, 2043 bp, Saccharomyces pastorianus
atgtcatacaacgatcccaacatgaatgaccagcataacaataatgctaatggggatggtgacggtaattacccgacgtatcaagtgacacaagaccaaaatgcgttcgatgagtatggccaaccgatttatacacaagaccagttgggtgatggttattacgatcctaatgaacaattagttgatggtacacaatttcctcaaggtcaagatcccactcaaactcaaggcacttataacaacgatgctagttactataaccagcctcccaatatggtaaacccatcttctcaggatggggagaatttctcggattttagctatggtccccccactagtggttatcctaatgaccaatacacaccttcccagatgagctatcctgatcaagagggttcttcagggacctccaccccaaatatgtacgggaacggtgcagcgaatggtaatggacgctattacgaccctaatactattgagatggctttgccaaatgatccgtatccagcttggaccgcggaccctcagtctcccttacctgtcgaacaaatcgaagatatctttatagatttaacgaacaaatttggttttcaaagagactccatgagaaacatctttgaccattttatgactctattggattcgagatcttccaggatgtctccggatcaggcccttttatctttacattccgactatattggtggcgatacagccaattataaaagatggtattttgctgctcaactagatatggacgatgaaatcggtttcaggaatatgaaattgggtaagttgtcaagaaaagcaagaaaggctaagaagaagaataagaaagccatgcaaaatgctgcacctgaagatgccgaagagactttgaaccagattgaaggcgataactctttagaagctgccgattttagatggaaatcaaagatgagccaactatcccccttcgacatggctcgccaaatcgctttatttctattgtgctggggtgaggcgaatcaagtcagatttactccagaatgtctttgtttcatttacaaatgcgcttctgattatttagattctccacagtgccaacaacgtcctgaccccttgcccgaaggcgatttcttgaacagaatcattactcccttgtattgctttatcagaaaccaagtttataaaattgtggatggtcgttatgtgatgagtgaaagagatcacaacaaaaccgtcggttacgatgacgtaaaccaactgttttggtatccggagggtatagccaaaatcgttatgggagatggaactaggctgatcgatttgccagcagaagaacgttattcaaaattgggcgatatcacatgggatgatgtcttctttaaaacttataaagaaacccgttcctggttgcatctagttactaacttcaatcgtatttggatcatgcacatctcagtgtattggatgtactgtgcttataatgcaccaaccttctatactcacaactatcaacaactggtcaacaatcaacctttggcagcttataaatgggccacggcggcactaggcggtactgtggcatgcataattcaaatcgctgcgaccttatgcgaatggtcatttgttccaagaaaatgggctggtgctcaacacttatctcgaagattctggttcttatgcatcattcttggtatcaatttaggtccgattatcttcatttttgcctatgacaaggacacagtatattctaccgctgctcatgttgttggtgctgtgatgttttttcgttgccgtagcaacggttgtttttttctcggtgatgccactaggtggattattcacatcctatatgaagaaatctacaaggagttatgtggcttcacaaacttttaccgcatcttttgctccattgcatggcttggacaggtggatgtcttatttggtttgggttaccgtatttgctgcgaaatttacagagtcttatttctttttgattttatcattaagagatccaatgaggatattgtccactacttcaatgagatgtacaggtga

SEQ ID NO: 5876 - DNA, 1413 bp, Saccharomyces pastorianus
atgccactaggtggattattcacatcctatatgaagaaatctacaaggagttatgtggcttcacaaacttttaccgcatcttttgctccattgcatggcttggacaggtggatgtcttatttggtttgggttaccgtatttgctgcgaaatttacagagtcttatttctttttgattttatcattaagagatccaatgaggatattgtccactacttcaatgagatgtacaggtgaaaaatggtggggtaacaagatttgtacacttcaaccaaagattgtgttgggtttgatgattgccacagacttcatacttttcttcttggatacttacttgtggtacattgtcgtcaacaccatcttctccgtcggtaaatctttctatttgggtatttctatcttgacaccttggagaaatattttcaccagattgccaaagagaatttattctaagattttagctactaccgatatggaaataaaatacaaaccgaaagttttgatttctcaaatttggaatgccatcatcatctccatgtacagagaacacttgttggccattgatcatgtacaaaaattattatatcatcaagttccatctgaaatcgaaggtaagagaactttaagagccccaactttctttgtctctcaagatgacaacaatttcgaaactgaatttttccccagagattcagaagctgaacgtcgtatttcatttttcgcccagtctctgtccacaccgatccctgaaccactaccagttgacaatatgccaactttcactgtgttaactcctcactacgctgaaagaatattattgtctttgagagaaattattcgtgaagacgaccaattctcaagagtcactttactggaatacttgaaacaattacatcctgtagagtgggaatgttttgttaaagatacaaagattttggctgaagaaaccgctgcttatgaaaataacgaagaagaaccagaaaaggaagacgctttgaaatctcaaattgacgacttgcccttctattgtattggtttcaaatctgctgcacctgaatatacgttgcgtactagaatttgggcttctttaaggtcgcaaactatatatcgtaccatttctgggtttatgaattactcaagggctattaagctattgtaccgtgtggaaaacccagaaatagttcagatgtttggtggtaatgttgatggattggaaagggaattagaaaaaatggccagaagaaagttcaaatttttggtttctatgcaaaggttagctaagtttaaaccacatgaactagagaatgccgagtttttgttgagagcgtacccagatttgcaaattgcctacttggatgaagagccacctttgagtgaaggcgggggaaccaagaatttattctgctttaattga

SEQ ID NO: 5877 - DNA, 366 bp, Saccharomyces pastorianus
atgccattatactttgggcaaaacagtgccatcgccaacgtatcttggaatggagagaatttccaagaagtaaaatcattttgtcattggcatgaagcagagcgaaatataaaccaaaactcggtaacacttttaggggatgatgctaacttgtatttcgccaagaattatttactgggatcactggaatctacagttccaatacccgaggttcaaggccaggttgaacaaatagatacgttttttgaaacaaatgactcacagttatatgacaaatatggtgaaatgacaaataatatacagtacattacgccatcttttggccctgtgttcaaagatcgacaagctcgatccgccataaggcca

SEQ ID NO: 5878 - DNA, 345 bp, Saccharomyces pastorianus
atgtttgccgcgcatttagataaattcaaccttagaagaccgtacacatgcccaataaagcagtgcccttggaaaatattaggatttctgcaagcaacaggtttaagaagacactgtgcatctcagcatagaggagagcttgatgtagagatggagaaatcgctaaatttgagggtggaaaagtatccagggctcagttgtccattttctatttgccagaaaacatttaagaggaaggatgcctataagaggcatgtagccatggtgcataataatgccgattcgaggttcaataagcgtttgaaaaaaattatgaacagcatctccaacaataaaagtaaatag

SEQ ID NO: 5879 - DNA, 111 bp, Saccharomyces pastorianus
atgtccagtgaaagagcttgcatgctatgtgggatagttcagaccacgaacgagtttaatagagagggttgtcctaactgtcaagggactctagagatcccggtaccgagc

SEQ ID NO: 5880 - DNA, 2427 bp, Saccharomyces pastorianus
atggctgtcggtcagaaaaagtatatatgctcgttttgtttgaagccgttttcgagatccgaacacaagataaggcacgaacggtctcatgcgggcgtgaagcctttccagtgccaggtctgcaaacactcttttgttaggcgcgatctcttacagcggcacatcagaaccgttcatagatctttcctcttatccaattgtgcgtccgttgtggatagcaaggccgaggaaactgtgtctcttggcatcgatgctgccgattcggcttcaacacgggacatcaaactagaaacattggtcaattcaatgatcaaggtcaacagcgggcttattaatatccactatcacaaagtcaaagtcgagagaacagaccagcaacagcagggcttttccggtgagtgttcttcttcttcttcttctttgaaaaggaaaaaatcccccttcaaaccgaccaaaaagcagctagaaacctctattagcgcaaagattttgcaagaatattctctagagtttacaagttcaagagaaattttgaccttctttaaaatcggtgtaaagcatttggtagagaataatatctttcaggattttttctcggacttgttttcctcattgcaggacaatgaactgatcgagggattttggatccgcaggccctttggtctcataatagcgtgtctggggatggctacctcgttgaaccaggactctcaggaattatggtctatttgttgtaccaacctgtatgccagctctcctctagacgacgaacgcagcggcaatcaagagagagagcagcacgtcattttcgctctgatcctattctattctcttttggtaatgttggaaaacaatctacctgtttcaaattcgattaagaatttgaacgttttcaccatgcttcaaagtattctgaaattatttgctgtcacctccatcaccaccaccacatcctccaattaccattatctaaatgcttctggaaatgtatggttcatgttcaacctttgggccaacatcttgcgcgattcaaacaatttcaacaacgattctttgcaaatttttaactggttctcaaatcaagaattgtccttgtctaccccgctaaaggactttttagacaaagagccgccaattgtgacaactgatttagctttgaggcaaatcaacgttttggccaattatgcttacgtccacttcataataaagaaaaattttgctctcgagttgcctaatgtatttaaggtgcacgatctgctaatatacataaacgagtgcttcatagcacagcaaccgattgcgtcccgaattagtgtgaactcgccctattttgcaaccgttctgagtgccaaaatcacagaatgcaaatccaaaagtcattggttattatgggaaactatttggtttgatttcgttgataatttgactttgaaaagcggggctgggcggaacatgtggtttattgataactttcctcaagtgtccggctcctgttttctgcaccagtcctcctctcttatcgaccagactttaatcactacaagcttatccatcgtctcgatgcttctgaagccaaagtctttcagcctcgcgtctttaaactcaagaaacgtccaattgattacagacattgcgactttccaactgaagctgttttcatccgaattgattgcaagttctgacgtttctccatctcaagtatcccaactgctgatgaaccctaatactgagttgttgttgtatttctggtacgacaccatttacatacaacgccaagactgcttgtctcctagagagaacgaagagttcgaaaaggtggaaatgttcattaatgattacataataactcaccggaagaacttagtaacagattcgcattcaatcctgtttgatttctggtcagactcctttatcgcataccacatcctgttacatgctattgcgacttctctgaaagacaatattctctacccttacttgatttactctcctcatttaaatgacaaaacaaaggctttgttgactgatatatctaactggtcatgcttcgctcttcagcagcccttccgtaaaacttcaagaggttccttatccgttgctgctgatgcgagatcacaatcaatcacatcgtgcttaccactctcccccaattttacaaggagagaatcaaaccacaatagaattcttttacctcctttaaacatcaaagctattgaaccaatatcaacaagtaactacacctacttgaattcgggccctcaacatcaaagagaacaaaaaccgttaagaaacgcagacagtaacattaattctaatatccaaacaattttgattcctcctcaggtagacaaagaatcacaaaaattttccgttggaaatgaaaataaccaaagcaaaaatattgaaattattggccaaataaaataa

SEQ ID NO: 5881 - DNA, 1275 bp, Saccharomyces pastorianus
atggacatagatatcaatgcttgggaagaccaattgaacattatatactccaaattttctggcttacgagaatcagtaatttcattaactttaccgaaaaactattatgcgaaagtgttagaaaacggatatagtgaaaacccaactttcgataccagaaatcttaagtcggtaacgtatcatgcttgcatagtaacagaattgcttcattgctttttgcaaccatttttcaatatgcctacggaatcattactttcttccttctcttttgtcaaagaaagtcatccgcccaactcgttgttggactctttgacagacttttcatgcttggatatatcatcaacagtgcttggcaaaatcagttctttaattgaagaaattaacataaacgactccctaaagtcagatttcatattatactgtaacgattacacacagtctaactgcaatgagttgacttcgatactttcattcgactgcagtagttactcaactttgcaaaataatttggaaaatttcgtaaatttggttccgttcttcaagtcaatcaattctcatctgaagaatgaatcactcactgactctgattttcgattgatcattactgtggaggaaactttaaaaactttcgagcaggcaattgagtattttgcttcttctgccccattaaagttcacacataccttggtttttattataagccttgaaacttatttggcagaaattatacgaaactctacttttgccaaagcaaaaagaccttttgaaaaaatcttatcaaaaatttcaaaggttaaagaactctatctacatgatgatgtcaacttaattggcgcatttttgtacccatcaatattccaaaataaaaacctactaatcgaaatcttcgacacaatatccatcaacaaaattatcgataaagttactaaaattgcccttaaatacctgcaaaaattcatcaatataacaaatttccagtcttccaataattgtaaaaacgacggtccgaatttccgtgaaaagctcatatctgattatgaaactattttcatgaatgggtctcaagaaattgagtttttaaacaacgttaaggtgagtttaccagaatccgaagatcttttgttctcacagatcattcgggatgacctgttacgctatattaacagaattacacacgaactgcccaatgcataccacgactacttgaatgagaatgatattagttttgatggctctcactttacgaaaatcgaattacctgaagagaacatttca

SEQ ID NO: 5882 - DNA, 1023 bp, Saccharomyces pastorianus
atgaacactacattgggtgacttacacgaggatctagtcactttagaggataacgaaatcattgatacaactgagcattcaactcattcgtcttcgcaatcaactagccatggagaagaagaaaacgaagagggtggcattgaagatgtagaaactatagaaaaggacggcagcaagcgtctccttaaaaaaatccatccagaagacgaaattgtaaatgatggatctaatatatggatccccgttcaaatgctaaagaaaaatatagccaagttctggtctcacttcctcgctattgataaggaattaacgagagttaaatgcaaacattgtggggaagtgctaacaaggaatgatccaagtttaacaaagactttcagatttcatataaaatcgaagcataatattagcgcaaataagaacttttattccatgaatttcactgtgaggaattccattcttacagatagtaattctcatgcgagaaactcacttcagcccaactaccgttctttgacattcaattcaaactcaattcgtaagtgttatgacattaataaattacaaaacaatacttttctttcctttccgcgactaatagccataattatagcttccgaagggttgccactaaatttctctgagattgagtcattcaaatttttagtatcaaaatttcacaagacccctcccctgacaacaaccttgataaaagagtccgttatggaactatctaattcaatagatgagttaattagaagatctgcttcaaaaagtgatgcgtccttgcctgtaaatattcaattatccgataccaaaaactcagattttcctgtttatttacagtatacggaggatattcgagcacaactaactagtctaaacctatcctcactcgtttctttgaacttcacagaactagataagacaagatcgttattttctttacaagtgtcgataataccaataaagtttcgaaaattttaccgttatctatttttgtacgtaaaggaatggacatag

SEQ ID NO: 5883 - DNA, 195 bp, Saccharomyces pastorianus
atggcattcatttgtggtgatactgattgtagtgttccccaaactgtggtaccgttctttaactcgatggtaacttgctcattacgcagttttttcaaaaagttgaccagcttcataacctcaacttggataatctatcaacgtttcctgctaatttggcaatcctctgtttcaagactatttcaatgttcttga

SEQ ID NO: 5884 - DNA, 546 bp, Saccharomyces pastorianus
atgaaaaaaaacaggttccacggtattgtaaaggctacgagtaacaaaggcttcggctgcaaggaaactcgcatacatcgcaccggctcacacatatacacgcagggcactatggacacgctattcaactccacggagaaaaacgcccggggtataccgcaagctcctttcatcgagaacgtcaaggacatcatcaaagatccgagcgactttgagctgtgcttcggcaagttccaggaacggctctctaagtacaagttcatgcaagagtccaaaatggccacggtgaagcaattgcaaacccggatcccagacttgcagaataccctgaagatatgccagagcctgcgcaaccacagcgaggatggcgacgaggacgctgagcctatgcttctgcactaccaattgaacgacacgctcttcacaaaagcccaggtcgacatacctcaggaccgtggagacctgaaagtcgggctgtggctgggcgcggacgtgatgctggagtaccccgtcgacgaggccatcgagctgttggggatcctctag

SEQ ID NO: 5885 - DNA, 264 bp, Saccharomyces pastorianus
  modified_base (258)..(258): a, c, g, t, unknown, or other
atgaatagaagcagcagggcatttcaggtaccgaacaaggtcattactaaggaggacatcacccccctgtccagatcgcacgtgaagaagacggaccctcgcgaggtcacagatggcgatgacggtctcgccagtgcggtcgaggccacgcctatcattatcaccactgctcgttcgatagatactgccggttcattatctaagaagtccacgggagacgaaggcgcccaggagacgggcgttgaccaagacaacaancggtga

SEQ ID NO: 5886 - DNA, 477 bp, Saccharomyces pastorianus
atggttgctaagaagagaaacacccttaggggcaaagcgtctacaagaaacgctcaaagaattggagtatccggggcggaagatgtccatgaggatctaccgtatgacttggaatcggatccaaaagcctttttgcatcaaccaaaggaaaccaagaaggagaaactgctcaataagcaaaacacattcttgtcacagctgaaaggaagacccatgtctgatgtcggtgtgagcgctaattttgacggaatttccaaatcctctgttagacgtaggaaaaggaaactaagagaggaattaaaaccaaggatgcaagatctacttacttctttagagcaagaaaaggatttgcaaagcattataaaagaaacaggcgtggctgtggatggtaacaatgatatcaatatggactccaagataagaatcgtagatacaaaggaaatgcgcccgaagaagctgctgagccaggatccataa

SEQ ID NO: 5887 - DNA, 1671 bp, Saccharomyces pastorianus
atggctacaagtgttaagagaaaggcttcagatccaaacatcgctgaagggcacaagaaacgttctacacaggcaaacacaattgatagcgcgccagaaggagacaaccacaatgccccagtgaccaatgaccctctagttcccgaacaagaaaatggtgacgataacggcgcttctgatgatagagatatcaccgcgaagaacactacttcccgtcgcaacggaagagccaccgcaacagagtctcatgacattcatattgctagagaaaccgcggaattgttcaaatctaatattttcaagttgcaaattgatgaattattggagcaagtgaagttaaaacagaaacacgttttgaaagttgaaaaattcttacacaaactttatgatatcctccaagaaatccctgattgggaagaaaagacactggctgaggtagactccttcttcaaaaataagactgtttctgttccatttgttgaccccaaacctgtacctcaaactacaaattataaattcaattacaagaaaccagatatctctttgattggctcttttgctcttaaagcaggtatttatcaaccaaacggctcttctatcgacactttacttacaatgcctagtgaaatgtttgaaaagaaagatttcttaaatttcagatgcttacacaagaggagtgtttatttagcatacctaactcaccacctatcgatatccttaaagaaacataaactagattcatttttgcagatcgagtactcatattttgataatgatccacttttaccgatcctaaggatcttttgttcaaagccaacaagtgattctccatctgaatataacttttacaaaaccagattctcaatcaatttagttattggtttcccatacagagcctttgaaccaaagaaattgctacccaatagaaactgtattagaatagcacaagagagtaaagaagtgtctttaccagctactcccctttataacttttcggtgctatcttcaacaacacatgaaaactatctgaaatatctatacaagaccaagaagcaaacagaatcattcatagaagctactgtgttgggtagattatggctacaacaacgcggattttcatccaagatgtctcattctggttcattaggtggatttggtacttttgaatttaccgttttaatggctgcattattaaatggtggtggtgtcaatagcaacaagattctgcttcacggcttttcatcctaccaactatttaaaggtgtaatcaaatatttggctacaatggacttatgccacgatggccatttacaattccattctgacgcagagaactcttctagttcgttcgcttctaaatatatcgatgaaggcttccaaactccaactttatttgataaatccaccaaggttaacattcttacaaagatgaccgtttcctcttatcaaattctaaaggaatatgctggagagacattgaagatgctaaacaatgtcgtccaagaccaattctcaaatattttcttaactaacgtcagcagttttgataatttaaagtatgatctatgttacgatatacagttacctttaggtaactacaacgacttggaagcttctttggctgcgacatttggctcaatggaaagagttaaatggggatcctctagagtc

SEQ ID NO: 5888 - DNA, 780 bp, Saccharomyces pastorianus
  modified_base (689)..(753): a, c, g, t, unknown, or other
atgaaaaggctttctgaaagattaaccttgtcccaatataagggtattcaaatgaatttcgcgaatttgagaaacagcgatccaaacggtacacatttgcaattttttgtcgcctccaagaacgatccaagtggtattttatactcatcaggtattccattgcctatcgccacaagattaacagcattagctaaggtagctgtgaacttactacaaacacatggcctgaataaacaaactatcgatttgttattcacacctggattaaaagattatgattttgttattgacttgaggacgcctgtaggtttgaagtcatcgtgtggtattctttcaattactgaattcaagaatatcactaatgaccaggcgccatcccaatttccggaagatttaaatgatttgagtgaaaaaatggacccaacatatcaacttgtaaagtatttgaatttgaagtataaaaacagtttgattttatcaagtcgtaaatatataggtgtgaacggtggtgagaagggagatagaaatgttatcacagggctaataaaacctctattcaagggaccgcacaagtttagagtaaatctggactgcaacattgttcctgtggatgacgataatgttgttttaaacaaagaagccatattccatgagattgctgcatttgggaatgatatggtggtaaaatnnnnnnnnnnnnnnnnnnnnnnnnnnnnnnnnnnnnnnnnnnnnnnnnnnnnnnnnnnnnnnnnnaaaacaattttaaactggcagttttaa

SEQ ID NO: 5889 - DNA, 1266 bp, Saccharomyces pastorianus
atgtcaaatcccacagaagctgatcgtatgaacgccctcgaaagaaagaatgaaggtaatgttttcataaaagagaaacactttttaaaggccattgaaaaatacacccaggcaatcgatctcgattccacacaatctatctatttttcgaatagagcatttgctcatttcaaagtagataacttccaaagtgccttgaatgattgcgatgaagccttaaagttggatcctaagaacatcaaagcttatcatagacgtgcattatcttgcatggcactattagagtttaaaagggcaaagaaggatttgactgtgttactaaaggcgaaacccaatgacccagccggtaccaaagcactagctacatgcgatagatttatcagagaagaaagatttaggaaagccatcggaggcggcgaaggtggaactaaagtcagtctatgccagactttgaacttgagttcattcgatgccaattctgacttgaccaactacgatggtcccaaattagaatttgaacaattgcatgacgagaagaacaacttcaacggtggcgaaatcaagaatatgtcgcaagaattcatctcgcaaatgattaacgaccttttcttgaagggcaaacttcttccaaagaagtatgttgcggctattatctctcatgctgataccttatttcgtcaagaaccttctatggtagaattagagaataaatctaccccagatattaagatatcagtatgtggtgatacacatggtcaattttacgacgttttgaatttattccgcaaattcggtaaagtaggtcccaatcacacttacctgtttaacggtgattttgttgatcgtggctcttggtcctgtgaagttgcgttgttgttttactgtttgaaaatattatatccaaagaacttctttttgaatagaggaaaccatgaaagtgataatatgaacaagatttatggttttgaagatgaatgtaaatacaaatattctcaaaggatattcaacatgttttcacaaagttttgaaagtttaccattggctacgctaattaatgatgattatcttgtaatgcatggtggtctaccaagtgatccttcagcaagcttgtctgatttcaagggtattaacagatttgctcaaccaccaagagacggtgcatttatggaattattgtgggcagatcctcaagaagctaacggtatgggtccttctcaacgtggtctaggacatgcatttgggcctgatatcacagaaaggttctaa

SEQ ID NO: 5890 - DNA, 1275 bp, Saccharomyces pastorianus
atgcaacttctacattatgagcaggacagaaaatccgctgttcaaagaacaaggctatctgttcttgtaacgtctatggtagctctgttgataccctgtcatgccgtactcgtaccatggctggatgacgacccatttgaagaggctcttataggcgtcaacgatgattcgtggaataatggtatactttcaaacacgctcccgctccatccatctgaagttactgaggataatagaagtctggaccaaaaaggcaatgtgccacaatatgttatcgataatagccctttgatccacctatacagtgaagaaaaatattggccagccgatatcaaggattttgtgaaaaaattccaattgcgggaccatactggcgaaaacattatcaaagagagcctccatgacttaagtgatttacaggagtcttattcagtagaattacagaatggaacgtatgaccggataccgagcgaaggtacttacatgacaagtttggacgattttggcaaggatccgaagtggttgttgggagaacaaccggaatatggtacgggccacatcaagaaggcacccgccattctttttgttgtcgataaggggaatggctgggtagatgcattttggttttacttctacccattcaattggggtccctatataatgggttctggaccatggggtaatcacgtaggagattgggagcactctttagttagattttataaaggggaaccacggtatctttggatgagtgcccatggtggcggtactgcttataagtttgaagccattgagaaaatcaaaagactacgccgtattgatgggaaactgacaaacgaagccatcaagaaacctgtaattttcagtgcaagaggaacgcacgcgcattacgcatcagtaggtcagcattcgcacgatgttccgttcttctttatgccattgagtgattttactgacagaggcccattatgggatccttctttgaacttttatgcgtatactgttacagtgggggaaactataaccccatgtggtgttgaggaaaccgaaatggggctagactggctttctttcaagggttcttggggcgataaacaactaactgcaaaggaccctagacagaaatggtgccctttccaatggaaatacattgatggaccaagaggcccattgttcaaaaatatggaaagagtttctctatgtcagcgattcaaatggtggaatttttggaagggttgtcctgcaagaaggtatattaaaagaggcgaagtttag

SEQ ID NO: 5891 - DNA, 222 bp, Saccharomyces pastorianus
atgcattcgtttacattcccaattgctcattgcccttcttgcccttacccatcctctttttccctaccattaggccggccttttttcccaaatgggtacttgtttttacgatcttcagctggaacgtggagacttgaaacttggtgcctcttatatttaaagactactgagcttctttgtttcaccgtcccacttctaggaattttttttcttgtagtctag

SEQ ID NO: 5892 - DNA, 564 bp, Saccharomyces pastorianus
atgagtgacctttatgaagacgccgaaggaacagacatgtatttatttctcgactctttttcagaaatagatgacacaagttgcaatgaagaagaagacgatggaacaagtctctttaacggtgatagtataatgtcaaatagttgtaaaaagaatgcacggttattttctctgagctgcaatggcgcagatgaaaatgaaaatatcgttaaaagtacagtgtcgcctagtttaaagttgggggaaccaagacgaaaaagaaaacatttaagaagtgtgggcctaatggccgagaattcaaaaaattatattgccgaatcgagcataggtaccggtcaagtatatggtatgcaacttaatggcagtagtgacgcgattgaacaagagcaggacagtgtcaggccgtgtgggtgccacaaatccagagtagcaaaatgcttcaaagagctagaaactgaaagtttggaaaacggcaatgagaaaaagagcctattttatagagatattaatgagtggtgtaaaactatgaagttaataaaaccagggaaatttgcgtaccactga

SEQ ID NO: 5893 - DNA, 294 bp, Saccharomyces pastorianus
atgaatgttcaagatagaagaaggttactaggcccggctgctgccaagcctatggcatttagttacactactggtggtgaagtagagaagatttcaacgaatacgccacccaaatacagcgaaggtgaagagatactttctttacatacgggattcatcgagaattgtaacggacctgctttggtagaagccagaaactcaaagcatcagacgtcattaattaccgctgtatatggtccacgttccattagaggttctttcacatcgcagggtaatataactgggatcctctag

SEQ ID NO: 5894 - DNA, 93 bp, Saccharomyces pastorianus
atgacaccaccgacgggttcgaattccttctttaaccattcatcatcgatggaccatgatagtctaccgacgaagatagtggcaggttcttga

SEQ ID NO: 5895 - DNA, 522 bp, Saccharomyces pastorianus
atgtctttctacaaccccaatgataatgctaacaatggtggtggcttctaccaaccgtccgcacaatttgccgtgcctcaaggatctatgagtttccaaaatactgtggactcttctaataccggcaatgacaacaatctgggtgttgcccctgatcctttacgggtgggtattctacatgctctttctacaaaggggtatgcgcatgaacctccattgttggaagagattggcattaacttcgaccatattattacaaaaaccaaaatggtacttatacctatacgttttggtaatggtgtaccacaagaaattttaaatgatgcagatttggctgggcctgtcatattctttttattatttggtcttttcctattgatggctggcaaagtccatttcgggtatatctacggtgttgctttatttggtactatttctttgcacaatttatcgaaactgatgagcaataacgacacttctatccaaacgacttacaatttttcaatactgcgtctatcttag

SEQ ID NO: 5896 - DNA, 138 bp, Saccharomyces pastorianus
atggcaccaccgacggctaaggtcaaaagatgtctcacagatagctctttgcttaagttggtgttgttgatatcttcttgttgtacgtcatcaccaccacggaagcgttccgatgatgtgacatcgtttgtagtttga

SEQ ID NO: 5897 - DNA, 1008 bp, Saccharomyces pastorianus
atgagtgagagagaaaataatatcgaggacgggaagccgctatatatcgagaaccctgcactagaagcagctgctgcattcaccggcgggatggatggcgcgtcgtactgtaaccggcgttttgctgagggccttagccactcttctgagtcagcagagtcattgaaagatttccgtcctggtgaggtagcctcatcaaagtcgtccaaagtggagggaggttctaacaagaaagggaatggtggtggcgatggtgctcccctggaaagaataaaaactggtctcttttctccgaggttacgaaaacagagagaaaagatactgttgaaattcggtgtcaacaactttctcattgcatgtctctgcatctctctcatatcgatttactggggggccagttacggaacaaaccgttacttctttaaagtgaaaaatattgttgtgctacaagatgtttcatctaacagtactgtgcagtcgatgtctgccatcataccgacgttgttagcatctgttcctggcacatggcgcatatataacacagcgtcgttgaacgagaaattcggatcgacgaattccgatgagattgatgcgaaagtggtggatttgatttatgaagagaaatattggttagcactaaacgttaaaccaaatgccacagacaccctgtacaattctttaattactcaagatgtgaactcgctattcaattcttcagatttttttcaatccgtgtatgaaagtggtcgtgacccattaagtgtaagagcaactattctacccttgatgcagaaattggaggccttgtttcagcaatactacacgaaggagtatcttccctcattgatgagcaacgtcactactacttacaacgacgccagtataaacactcagaactgggcaagtgcaggtcaactgttatttgattacaacgaccatcgccccttcactgaccgtatcctaatggcccctttacaagtgacctgcaggcatgcaagcttgcactgc

SEQ ID NO: 5898 - DNA, 1065 bp, Saccharomyces pastorianus
atgatgcctaactctaaagcaccgcaacaagttgctgctcctctgaaggtaatagacgtggttgaccatgcgctaaagagtcgactcttgggtggcagcacgttccattcggggtttgatagcttggattccgtgctgaacttgcaattcagactgcattatcatgtccttgggtctagggggcttgcaaagcccgtttgtgaagttttgttgaaggattgcaaaaggctggagaagaacctaggtatgatggaggaattgaacgactatcccgaggtcgcaaggctgatcgagaaggtcctgttcaattgttttggcacacttttcttctacttaggccaattccaggaatcgcagcgctgtttgctgcattctttgaaaattcacaatagtaccgtggcacaaaatatggcactactggaacagtacgaccaatttttgattctggaaaacttatactatcgtggtctactctctcaggacgttaaaatcatgcagaacatcttttataaggaactgttggcccatgtgaatacgatccctccggagtcaaatggccttcttttcgaatacagtaatatgattgtcgccaagttgaggtttaaccaacttcaagacttggcggaaaatttcaaagctaccgttgacagtccctttatcctttttctctacattttaaaggagtttcaatcatcttctcagaaacatactgatagcgacgatatttttttgaaaatgggtcagcatgcattatcgaaggcgaagtttcctagtgcaaatgaaggcaataataaaaacttggagcattttaacatctttttacagtactatttcaaattcgcttatgtggaaaatataaaagttaatcccggttggtatagtttcatcgtctcttctatggagaggacttttcaaagtattgacatttccaaaacggcaatgattctttttcaaaatctaagcaaaaacaatagcaacgacgaaatcaagcaacaatcactaaaaagagaatcaatactaaattttgttaactttgttaaatataacgacaatactaccaactaa

SEQ ID NO: 5899 - DNA, 141 bp, Saccharomyces pastorianus
atgaacaataacgttgaggagctattacgaaatatccccctttacaacaaatatggcaaagatttcccacgagaaacagtaaccagattacagatgcctgaattcaagctaccaccattacaaccaacagggacttgttag

SEQ ID NO: 5900 - DNA, 162 bp, Saccharomyces pastorianus
atgcccagggatccattgattggtattgtgggtaagccatcttcagggaaatccaccacattaaattctttgacggacgcaggtgcggcggtaggagcatttccctttaccacgatcgagccaaatcaggcaaccggctacttgcaagttgagtgtgcttgc

SEQ ID NO: 5901 - DNA, 162 bp, Saccharomyces pastorianus
atgtccttaccagctacttttgacttgactccagaagacgcccaactattgttggctgctaacactcacttaggtgctagaaacgttcaagtatgttgcaccccattgccattatatagaataaccgttggcgcgattgaagatacgttaaggaaaaattga

SEQ ID NO: 5902 - DNA, 318 bp, Saccharomyces pastorianus
atgaagggctctagtaaagctattaagctggtgctggaacacttgcaatcgacaggaagagtacttggaactgtggaaacaaaaacttctgctggaataaacgaaaaatcagcttttagtggtggtcatcagcaactgcaggtgaagaaacctttgatcttacagtatagaagctataacccatatttggtcaggaagactttgtgtcaattttgccggagaatcaatacaaaaaccgcggccaatttaccatgggctgactttcaactaatcaaggtgagggaccctaatattttcaatcaagatcgacgccgattg

SEQ ID NO: 5903 - DNA, 1335 bp, Saccharomyces pastorianus
atggatgttcgtcaacctataagagaggccaccaataacagaaggaagccgaagtttctaagcgtttcgtttaaccaagatgattcatgtttcagtgtagccttagagaatggattccgcatcttcaatactgatccattgaccaacaagctatcgaagacgtttaaggactctttggccaatcagtccaggggtaccggaataggctatacccggatgctttatcgtacaaactacattgccctgatcggaggtggtaagagaccgaggcatgccctaaataagctaatcatttgggatgatcttttacaaaaggagacaatcactttgaagtttatgtcatccataaaggacgtcttcctttcaaggatccatatcgtagtggtgctggagaacaccatagaaatcttccaatttcaaacaaacccacaaagaatctgccccattctggatattccttccaatgggtctgtagactatgtggtctgtagcagcaaacatcttcaatcgcagagctcatcgcatgcgcagtccaagattgtcgaaatcatcgcgtttccttcaaataagtgtataggccaagtccagatagccgatctatcacaattaaagcataattctcaaaacccaacggaatctgcacttttgcctacatccatcatcaaagcccataaaaaccaaatcaagttggtcagattgaaccatcagggcaccatggtagccacatgttccgtccagggcaccctaataagagtattcagtactcacaatagcactctgatcaaagagttcagaagaggcatggacaaggcagacatttacgagatgcgttttagccccaacggtagcaaattggccgcattgtcaaataagcagacgttacatatctttcaaattttcgaaacgaacaatactgaaacaaactcgcatgaccattcgcatgataatggcacaagccatcccctaaagaattatataccgaagggtctatggagacccaaatatttggactccgtgtggtcaatatgtaatgttcatttgaaaaacccagtgtttgacgctcatcgaagtgctaatagcaataacgcggcacacgatgatgaattttataaggacaggtgcaagattggctggtgccaagataccaacaatcaagaccaggacgattcgttggtactggtgtggcaaaactcagggatatgggagaaatttgtcattttggaccaggaacaagaggaaacgtccaaaacgcattattcactaaatgaaagtttcagaaacagtgattcgaaaccaatgcacgaagcaaccagatgggaagtggttagagaatca

SEQ ID NO: 5904 - DNA, 1251 bp, Saccharomyces pastorianus
atggctaccccacatttaaattacagatataactccagaaactcaaacaaaaagattacttccagcggaaacgcggtagaagttgaccgtttcattccaaagtcagtgtcaagaaatgcatataagtccattccgatgttgaacgggtttgatataagctactcagagctttgtgagaaatctccttcacctgagcggctatcgtcccctgaattcttcaacgaactgagaaatacgggccactacgaatcaataagtgccattaacgaatattccatgtcaagcatatctagttcttccgaaagccaggttactagaagtgaaagtggaagagtttcaaggaaagatgatacgaaattaactaaagaacagaagcatcatagaaaaaatattgcccattcacttggtttccaattacctgaccgtgtctttacattcgaatccgcgaacactgaaacccaggaaaagagccagataatgaagaattgcctagcctcaagaagtagcatcggaatacaaacaacgttcgattttagtacattatcgccggatgtcgcccgttattatattgctaattcaaacttaagaacggtgtcgccgccgaaaagctttcaaagacctgtcaaaagagtcaaatcgcacattccttatcgtgtattggatgcgccttgcttgagaaatgacttctattcgaacctaatttcttggtcaagaactacaaacaacgttctagttggactgggttgttccgtgtacatttggtcagaaaacgacggggcagtgtccatcttagatcatcaatatttgagtgaaaaaagtgatttggtgacatgtgtttcattctgtccttataatagctattttatcattggcacaaaatttggtcgtattcttctttatgatcaaaaagaattcttccattccaccaaaaaggaccaaaaggaaccagtctttgtttttcaaacagaatctttcaagggaatatgctgcttagaatggtttaagccaggcgaggtatgtaagttctttattggagtagaaaacggcagtgtaagtctattcgaaatcaagaatttacatttccctttgaaaaaatggaacaaaagacaaaagtatgaggaagaaaatttgattggactaaagctccaatctacatatcaagctcaagcacaacaagtttgtggtacgtttttgaaagcttgcacaaaagtttttacatacccttatcctaacatcacgcattttttttag

SEQ ID NO: 5905 - DNA, 486 bp, Saccharomyces pastorianus
atgttttcaaattcttctcttactttacgaactttaccatcatcatcatcttctttcttttcctcttctccctctttggcggttaattcacctatatcgttattgtcgttatcatctttttttggttcagcgacatcttcatcttcaacattttcgctttcttctacctttgcttcttctgcttctgcttcttgttcttgttcttgttcttgttcttcgtcgttcttttgttcggccttggtttcttgctctacttggctgattttctctgtttctatggcctcagctgccacttcagcggagcttaaagtttcattaggtgcgctcgtggcatgctttggaatttcgccattttggatagattttgcgtttacactatcaatatcttcatcttttatagattcgtcaccaaaagtagaaggttgctcatttgccactggcgcctccggtttattttgcgcgccaggcatgtatttttgctgttga

SEQ ID NO: 5906 - DNA, 1230 bp, Saccharomyces pastorianus
atgctatccgaacacacccgtactataattaaagctactgttccagtcttggaacagcaaggcactgtcatcacgcgtactttttacaaaaatatgcttgctgaacacacagaactactcaacatttttaacagaactaatcagaaagttggtgcgcaaccaaatgccctggccaccactgttttggctgctgccaagaacattgacgacctgtccgttcttatggatcatgttaagcagattggccataaacaccgtgctttgcagatcaagcctgaacactatccaatcgtcggtgaatatttactgaaagccatcagggaggttttaggtgacgctgctacccctgaaattattagcgcttggggcgaggcttaccaggctattgctgatgtcttcatcactgttgaaaataaaatgtacgaagaagcttcatggtcaggttggaaaccgttcgaaattacggctaaagagtatgtttcctctgaagttgctcaattcactgttaaaccaaaggtcaattccggcattgacttggcaattttgccaattactccaggtcaatatattactgtaaacactcacccagttagacaggggaatcagtacgacgccttaaggcattattcactctgttctgcttctgccaaggacggtttgagatttgcagtcaagatggaagccgctagagatgattatcctgcaggcctggtctctgagtatttacacaaagacgctaaaatcggggatgaaataaagctaagtgctccagctggtgattttaccattaacagagaattgatcaaccagacgaaagttccattagtactattatcctctggtgctggtgttacaccaattttagccatgttggaagaacaggttgaatgcaacccggaaagaccagtttattggattcaatcttcttacgatgaaaagacacaagccttcaaaaagcacgttgatagactactagccagatgttcaaatgttgagaagattattgtccatactaacactcaaccgatgattgatgctaaattcttaaaggaaaggacacctgcacatgcagatgtgtacacctgtggctctttagccttcatgcaagctatgcttggacatcttagagaattggaacaccgcgacgacatgatacattacgaacctttcggtccaaagatgtcgactgtcaatgttaagagagtagacttggaaaatacgatttattaa

SEQ ID NO: 5907 - DNA, 1635 bp, Saccharomyces pastorianus
atgtcttcatcgtatgccaagcttgtgaagggggcgaccaagataaagatggctcccccaaaacaaaaatacgtggaccccattctcatgggcacttcgaacccccgtgacttccaagagattacagacgccttggacgtaaggttgtcagatacggcgtggaccattgtgtataaggcgctggttgtgatacacctaatgatccagcaaggcgaaaaagacgttacgctaaggcactattctcataacttgagcgtgttccagttaaggaaaatctcgcatacttccaaatggtcttccaacgatatgaaggcgctgcagaagtacgatgattacttgaagatccgttgtgaagagtatgggaggctacgtatggaccacgtacgagacaactattcctcgttaaaattgggcagtagagaccaacttaccatggatgaagagttggaccatgtagagtcgttagaaatccaaataaatgctttaataagaaaccgatactctactccggatctggaaaaccacttgctactgtatgcgttccaattgctagtgcaagatctgttagcgttatacaacgccctcaacgaaggggttattacactattggaatcattctttgaactatccgtcgagcatgccaagagaacgctggatctttacaaggattttgtggacatgacagagtacgtggtaagatatttgaaggtaggtaaagccgtcggtttgaaaattcccgtgatcaagcatatcaccacaaaattgattaaatctctggaagaccacttgagggaggaaacaaaaagacagagaggtgagcctcttcaacaacaacaagacaggaagccatcttctaccgttagcaatacaaccaattacgatagcaacactggtaatagatccatagcgcaacagaagctggaacagataagggaacaaaagaagcttttggagcaacaactacaacagcaacaactgctgatttctcctaccgttccgcaagatgcgcacaacccgtttggctcgcaacaacaagatgtaaataatgatactttttctttcgagccagcacaacctcaactggccgcccaaatcccacaacaaaccggtaacccattcttgatacaacaacagcaacagcaacaacagcaacagcaacagcaacagcaaccagtccaattggccggcgcacccacgatgctgcaacaagcgcaggtaccagtagcatcgaatttgaatggccagcaaactgggatgtatgcctccaatctccagtataccccaaatttcactgggtcaggatttggtggctatacaactatcgatagcaacccaatggcaaacaccatggagccgacgaaaacaggctctaacaatccgttttcgttggagaatatagtaagagaacaacaaaaacagcctaatgaatccttgaacccatttacgttgcagcaagctcagactaccccgattcttgctcaacatcaaacagttaacccatttcaagcacaaaacatgatgacagcaccaatggggacatacatgactggttcaccggctgggcaagttcagtatgcttccaccggtatacagcaacaacaagctatgcaagaccaacagactgggtatgcatga

SEQ ID NO: 5908 - DNA, 177 bp, Saccharomyces pastorianus
atggtccacgccgtatctgacaaccttacgtccaaggcgtctgtaatctcttggaagtcacgggggttcgaagtgcccatgagaatggggtccacgtatttttgttttgggggagccatctttatcttggtcgcccccttcacaagcttggcatacgatgaagacatgattcagtaa

SEQ ID NO: 5909 - DNA, 2232 bp, Saccharomyces pastorianus
atgggtagaagaagcagagctgctatgctcccaacaaatattattcttttgcagaatttggtaaaacgtgatccagagtcctatcaagaggagtttcttcaacagtatgcacactatgaatccttgagggacatatttatgctaaacggtcttaccggtggtgattctgccgccgctactaacgggctggttgtaggaaatggttcatctacaatggcagggagtaatggtaccactatcagcacttcaacctctcaacttattgaattggttggttttgtatcccaagtttgttcatgtttcccacgtgagactgcaaactttccctccgaattaaagcagcttctattggaacatcacaagtcattgccatttgaattgaaggaaaaaatcctaagttgtttaacaatgctaagaaataaaaacgtcattaccgctgaggaattgattcaaagtttgtttccattgctggtggcctactcttcccatggtaattcccttggtgccaattcacatgctaaggagttaagaaaaatcatctatacgaatttaatatccttattgagaagttgtaacactagtggtaagaaccagaaattaaacaaatccacacaagcagtttgcttcaatctgttggacaaaccagattctcagggtgtttgggctacaaaattaactagagaactttggagacgtggtatttgggatgattcaagaactgtagaaattatgacccaagccgctttacaccaggatgttaagattgccatgtcaggtgtaatgtttttcttagatgctgatagagagcgtgaagagaattttgaagaaaaatcggatgatgaagatggattcgatttggatgcgttaaagcataaaatgcaagtcaacaaaaaatcaggtagacgtggtaaaaagctagaaaatgccataaaaactgttaaaaaaaagcagaagaatggtccaggtactccacaaggttacttgaatttcagtgccatccaccttttgagagatccacaagggtttgctgaaaaactattcaaagaacatctttcgggtaaaacgaaaaacaaattcgacctcgaacaaaaaatatctttgatgcatttactatcaaggctaattggtacacataagttgattgttttgggcatttacacattcttcttaaaatatctaactccaaagcaaagggatgttactagaattatgtcagcatctgctcaagcatgtcatgaccttatcccacctgaagttataaacgtcatggttagaaaaattgccgatgagttcgtatcagatggtgtcgccaatgaagttgctgctgctggtcttaataccatcagagaaatatgttctcgtgcaccattagccatcgatgaaatcttgttgcaagatttggtagagtataagggatctaaagctaaaggtgttaatatggctgccaagtcgttgatagcgctatatagagacgttgcaccggaaatgttgaagaagagagatcgtggtaagaatgcggccatggaagttcaaggagccagaagagaaggtaaagattcaagaagaccacaatttggtgttgaaaacaatgtccaagggattgctggtattgaactactagctaaatggaaaaaagaaaatggtgacgaagatgaggatgaggatgcagaggctaactgggaagtagatgccggcggccaagacggagaagtcgatggtgaatgggtcaccatggacagtgacaaagaatacgaggtcaatatggaagatagtgacgaagaaaaggataaagctgacgaaaaagaaatagattccgacttggaactaagcggcgacgatgaagataaagaagaaaagaagaaacaagaaattatggacatggatcctgaagctgccttccgtgaaattgcttccacccgtattttgactcctgccgattttgccaagctacaagaattgcgtaatgaagacagtgttgctaaaattatgggtgttcacaagcaggacagacgtgaagagctagtcgattcaaacacactaactggtcctatcagatacaagcagtcacgtgaagaaagattacaaaaagtgctggaaggtcgtgaaggtagagataagttcggtagtagacgtggtaagcgtgacaatgttcgttccactaccaatagagaaaaggaaagaagaaagaattatgtcatgtccattcacaagagatcgacgccgattgcagct

SEQ ID NO: 5910 - DNA, 696 bp, Saccharomyces pastorianus
atgtcaaaggcagtaggtgatttaggtctagttggtttggccgtgatgggccaaaacttgatcttaaacgcagcggaccatggttttaccgtagttgcgtataatagaacacaatcgaaggtagatcggtttttagctaacgaggcaaagggaaaatcgataattggtgctacctcaattgaagatctggttgctaaattaaaaaaaccaagaaaaattatgctcttgattaaagccggtgctccggttgatatcttaataaaggagcttgtaccccatctggataagggtgacattatcattgacggtggtaactcccattttccagactcgaacaggcgctacgaagaacttactaagcaaggtatcctctttgtaggttctggtgtgtctggtggtgaagaaggtgcccgttttggtccctcgttaatgcctggtgggtccaaagaagcttggcctcacatcaagaccatctttcagtccattgctgctaagtccgatggcgagccatgctgcgaatgggtgggacctgcagggtcaggccactacgtcaagatggtacataacggtatcgagtatggtgatatgcagttgatttgtgaagcctacgatatcatgaagagactgggtggattcaccgataaggaaatcagtgaagttttcaccaagtggacgtcggtgtctgactctttctga

SEQ ID NO: 5911 - DNA, 1173 bp, Saccharomyces pastorianus
  modified_base (793)..(793): a, c, g, t, unknown, or other
  modified_base (1155)..(1155): a, c, g, t, unknown, or other
atgggtgttcattcattttgggatattgtaggcccctcggcaaggcccgtaaggttggagtccctggaggacaagaggatggcggtggatgcctccatctggatctaccagttcttgaaagctgtccgtgatcaagaggggaacgctgtgaaaaactctcacattaccgggttctttagaagaatctgcaagctgctgtactttggaatcaggcctatttttgtttttgatggtggtgtgcccgtattgaaaagagagactatacggcaaagaaaggaaaggagacagggaaaaagggacagtgcgaagtccaccgctaggaagctgctggctttgcaattgcaaaatgcctcgaacgatggtgccaagaaacccgttcaacatagtagcagtggtgtccaaattttcaagcctcatgatgaatgggacttgcccgacataccggggtttaaatacgataaagaagatacgagggtggattcaacaaagactttcgagaagctgatgagttcgatagacaacgatggattggaagacattgatttggaggcaataaaccccgcgtccgccgaatttgaagaacttcccaaggccacccagtatttgatattatcgtccttgagactcaaatcgagactaagaatggggtacacaaaagaacagttggaaacgattttcccgaacagtatggatttttcaaagttccaaatagatatggtcaaaagaaggaattttttgactcaaaggcttattcataccacgggtacccgagatggtgaagcttcttcaccanatggcgaagtggttaacagaatatctggtcaaaaagacaaagagtacaagttgactaagactgatactggatggatacttgggctgggctcaagcgatggttctgaagtgcaaaaggcaatcgtaatagacgacaaagattcaggtgcactactacaggagttgaatggtagtgttggaaacggtgacgtacttcaatgggatagttcacaggaggatacgcttaaagttttgcgagataaacctactgacacaatgacaacaccgcaaaagaaagaggacagtcgactggaggatgacgaagacgagtttgacgaaggtgagtgggaagatgtggagcttaaacataaggacgtcaaaccnaagaagattttctattaa

SEQ ID NO: 5912 - DNA, 1035 bp, Saccharomyces pastorianus
  modified_base (956)..(957): a, c, g, t, unknown, or other
  modified_base (968)..(969): a, c, g, t, unknown, or other
  modified_base (978)..(978): a, c, g, t, unknown, or other
  modified_base (1002)..(1002): a, c, g, t, unknown, or other
  modified_base (1031)..(1031): a, c, g, t, unknown, or other
atggaatccattgactctcacgattctacttctgcgaagaaaaagcatgttctggtgaacaaagagcacgagttgaactctgatggccatattaactctaactctgactcagttagtcgtgctcacgatggtgcaatcccccaattatctggcaaatacgacgccctgagacaaaacaaaagtttggtcatcaagcaaaccgaaattattggcaatgcctacaaaaaatggtacttccaggcgattttgctttttagtgcttttgtgtgtggttacggttatgggctagacggtaatatccgttacatttacactgggtatgctacatcttcctatagcgaacattccctgttatctactattaacgttatcaatgccgtagtcagtgcagcttcgcaaatcatatacgccagattatccgatgtctttggtagattatatcttttcattagtgccatcattctttatgttgttggtaccatcattcaatctcaggcttatgatgttcaaagatatgctgctggtgcgatattctataacgccggttatgttggagtcatcttaattcttttgattattctatccgatttctcctctttaaaatggagactgttataccaatttgcgcccacttggccatttattatcaacacttggattgccggtaacgtcacttccagggctaatcctatcgaaaattggtcttgggatataggtatgtgggctttcatcttccctctatcatgtattccaattgtcctgtgtatgttacacatgcaatgggtcgccagaaagacttccgaatggcatgctttgaaagatgaaaagtcttactaccaagaacacggtttcgccaagattttggtacaattgttctggaagttagatgtcataggtgtcatcctgatgggttgctcccttgggttgcatttcttggttcccattgactttggctnnggtggtgtcannagacccacnttggagatgactcaagagttgatngcggtcccatttgtaacttggttttgttnttga

SEQ ID NO: 5913 - DNA, 222 bp, Saccharomyces pastorianus
atgaggcggtctacgacgttgttggactggtcaatccgccttgtttcgttctggatatactcgtcagcgtcagcgatgggagcgggggcatccgtagtggagttagcgatgtcgttcttcacgctaaatagcagattgagcctgttgcgctcctgctggatggaggacctgatgttgcggaagctcttccagtggtcctgcaggatctccttgtggcgctga

SEQ ID NO: 5914 - DNA, 222 bp, Saccharomyces pastorianus
atggcctccagctgcgtgtctattgccttctcttccccagtctgttctgagctggtggtctgcgcgaacgtggagtacttcgagaggagagactccgtctgggtctcgagcgagatggccttgcccctgatagttatgaaagatggttgtgagctcatgtggtgcgtcgggttgcgtgcgtgcgggcttctcgattgggggccatacacgtccttattgtag

SEQ ID NO: 5915 - DNA, 1113 bp, Saccharomyces pastorianus
  modified_base (1070)..(1070): a, c, g, t, unknown, or other
atgttctatgctagtgtgattggctttacttcaggggccgagtgcagcagggtgctaacagctgcaagcttatttatatactgctgggaaaatagaatgatcagatacctaggctcacaaggacaaatgcgcatgcggacgtcgaagatgggtacacagctaaagatgtggttgatgtgttgtgtgatgtgcgtcagctgggtacgggccacacagtctatatgttcttcgcagaatacagcgacgacggacggggtacgagagcagttccaaagcaatggatggtgttcgaacaagtgttcaggccatcaatttgccatagtgcagggatatatgtgctggtgcagtgacactgagcccagcacgcagacttcggttagcgactgtagtgggacttgtcccggatacggctacgaagattgtggtagtgaggatgatagccttttcggttacatatacctgggacagacgccgttgagctcagtacaaagcgtggaaacgtcgacgatggtgagcgcatctagccttgcaagctcggatgatagcactacgagtagtagtagcacgagcactgtccccacttcatcgagcacaacaacctccagcacaagcacgagcattatctctacgccatccagcacatttacaacaagcacgacttcatcaagcacaacgccaacaagcgcgacctcgtcaagtacatccacatcgagcacgacatcatcgagcactacctcctcgagtgcgacatcatcaagcactacctcctcgagtactacttcctcaagcatcacctcctcgagcactacctcatcaagcactacctcgacaactcctacttcgacaaccacaatattatccagtataactcaatccagcacgacggagagctctgtgactacaacggcatcccccacattatccactataacgtcagtgaacctgcagacatcactgatgtattctgttataacggtgacttccgtgcaaaccaaggactcaaacgtctcggaattcacttcgaggtatttcaccacaacaaggatagtaacacagatttatccctccgncgccactgaaacagccacctcggtaacaaccactacatctgcc

SEQ ID NO: 5916 - DNA, 1767 bp, Saccharomyces pastorianus
atggtagacgattcaagctatcttactccacacgaaactgcgctggcagtggtggccacctctatgaaaaaagcgaggcttcagctggacacattggtagtaaactccatactgggcggtattctcttcagtagtggttcgttcttgttggtggcaatgcattccgatgatcctggtatagtcgcgcaaaacccaggtttagtgaattttataactggtgtaacctttgccatagggttattctacgtggtaataatgggtgctgatcttttcaactccaatattctatttttctctgtgggagttatgagaggagcggtcactatttatgatttaataatctcatggcttgttagttggttgggtaatattgctggctcacttttcgtttcatacctttttggtcatcttacaggcattagttctcaagagctctggatgaagggctcgaaacaaatcattgaacaaaaagcctcattctcattcattcaaactttcctgaagggtattgcggggaacttctttgtctctttggccatttaccttcaattaatggcaaagcctattcacgtcaagttcattgtaatgtcacttcctatcattacttttgtatccatcggatttacgcatgtggtggctgatatgtctgcatcatttattgccatgctcaacggcgcaaatgtttccgtaggtgaatacatttggaaactactgatccctgcttctttgggtaacattgttggaggtgtctttttcagtgcagttgttccattctatttacatttggtggttgtggaacgtgatagaaagagactatccttgccagaatacgaggcaagagacgaacaaccagaattgaatatggattcaagagttgtcagaataccaaaacatgaacttaaggaagaaagggatggcgacgatgacgatgatgacgacgacaccactgcaactggtggcgacattgaagacctgaatgaaaaggattccacatccttatttaataaagcacatgacggttcgagtattttgactgggaggagcctaaactcgttcttatccataccttcatcggcagtaacctcaaagaatgctaccatagagtcaaatttgggagagcccatatcattcatacctatacccaattctaccacaaattcctcgcatttacagttacggcacaaccgctcaactaaatctattaatagtcgccattctaaaaaataccatagtattagatcaccacccggtgttttccctgtaagagggatgggcgaaccgttagagagagagaaaaccattgaaaatgcaacctatgatccaaaggaagataagcattttttggaacgagctgaaactcacaactctacctttgtgaaaaataataaagagaatgataacatcctaaggttagtaaaaactgaacaaaatcgggaacagaacgagtacgaggaaaacggtggatacaatatcctggagaataaaccagggaccaggttagaaaagatgatcactcattttgcagaaggttttccttcaaaagaatcgactccaccagggctacctagaacgacacaagacactttcccttataacgcccctgcttcgtctcccgcatataccggcaacattcactcactgaaaagggtcaatagtaccactttgggcgggttgtttagggcagtttcgagagagtttcatacaagcaaagatgcagaattttcaaatgacctactcaaaaaaacttccactgctcccaaactatag

SEQ ID NO: 5917 - DNA, 333 bp, Saccharomyces pastorianus
atgacagaggaggaagatacacgtgtaaattggatgggatcatctagtgaaacaactacattgtcgtcgtcctggcttgtgtccccgattttggcaggatccatagatttatatccgtcaacttcactggcggcattgccgtcattctgtaaggcattgacgttcagagtccccgtggtcctaggcaatcgtaatccgtcaccgccgttgttattggacccagcagccttgtcactattgctggcaccattatcaagagtgtgcgtgcctggtaatgccgctatagaaggtggatcattgctcatttctttttgcttgtcgagggttttataa

SEQ ID NO: 5918 - DNA, 693 bp, Saccharomyces pastorianus
atggctaggaaaactaattcaaagaaatccacacctgcgaatacaccaaccaagcaaaaaaagaaggttgctgaaaagaaaccttccacgattattccaaaggaaagagtgactaaatctgttgatgaactaataaaatacacctccaagtcccaagaaagcgacaaggaagaagaaaagaatggtaagaaacaactgttggaagatgatgaggcggaattgaagaaagatttacaactaatcgtagtgaataataaatcatttaccggtacttctaaatccttcaaattgaaattgctgaatattaagcattctctttataagccttggaaagaagccagtttgaccgctgtcaaagattttaagattctattgatcttgaaggattctgacatcaaaaaagtatcggaagatgatttattcgataaattagactctgaaggcatcaaaattgacgaaattatctgcggtaaggatttgaaaactgtttacaaagcttacgaggctagaagtgctttcatttcccaattttctttgatcttggccgatgacagtatagttacatctttgccaaaactaatgggtgtcaaggcttacaacaaagtggaaactactccagtagcaatcagaacacaagcaaacaaggaattctcattgaccactttgacgaacaacattaagaaggatatttaa

SEQ ID NO: 5919 - DNA, 387 bp, Saccharomyces pastorianus
atgcagggcaacggcttgaaatggcagctcgtgcgccgtgacctgaagtgcggcgactatgcgcgcatgaacgcgctcgtgcaactcgtgctcggtgacctcttcgccgggcgggtacttctcgaagcagtgcacgtgcacccacggcatttcgttgttaccgtcttcgcgggcgtattcggcaaagatgccgcggaagttgcccaagaacgagatggcgctgtcgggcaggttcatgacatagtgactgattcgagctgggatcggcacttctttgaagcgcggttgctgttgttgttgctgctgctgctgggaccggtggcgtttcctggcgggaacagggatcttaatcgtgccgtcttcttcgttcttgatccattgctgtaa

SEQ ID NO: 5920 - DNA, 195 bp, Saccharomyces pastorianus
  modified_base (184)..(185): a, c, g, t, unknown, or other
atgattcggtcccatcttccctttgaagtgtcacaaaggttaaaggaactattgggagaaaaatttactgttccaaacgttgttatagattcctggtttgataaggtctacgcttttgcatgcatattcactttcatttgcatacggattgcagagcggaagctttctactaagaaaagttatnntgttgaatag

SEQ ID NO: 5921 - DNA, 729 bp, Saccharomyces pastorianus
atggacaacggacgcctacataaaagaaagaatccagattatgagcataacatagaacaaaatgtgcaaatactaacacgattagaggacgagccaaatggagaaaactcaactttcaaggcacagttgatggaaaagattgcttggtatcaattatcgctggggaaattagagacattgctacatcagtctccgcaggtaaggactttcaaaaaagtctttgagattggttttaccgtatactgtcttcataaactaataacaacttttctgaaaaaaatacctcacatcatataccactcgtttaaatatcctgatgactacgaatatgagaatttcagtgaaaacgcggcatcggaccctttagcaatcactattgcaaacattttggactttttattctttagattcaattatcaacatgatctcgactctttgacaaaacaaatatcgttgtttttgtcaatttccctttttctttgttgtctctctgcggtcagtaccaccatctcatacgttgtgactcttttgcctgtaaagttccaaattcttgcgctctttgccatgcaaaatgatgatactggttatgtacttccagaatatgttgataactctaattataaggggaaaggggggagctcctcccaccaacagaaaggaatatctttgataaagaacttggtggtatcagagctaactggtgtttacgttttggccacttcgttatga

SEQ ID NO: 5922 - DNA, 195 bp, Saccharomyces pastorianus
atggccgccctatccgggctggccactgtttcaagtttatactataattttttggttatatggcataagctacgtagcacttcaatgtcagaccccaactttagaaatataaacaacaacaataacagtaaatccctattatggacaacggacgcctacataaaagaaagaatccagattatgagcataacatag

SEQ ID NO: 5923 - DNA, 87 bp, Saccharomyces pastorianus
atagtgacaagtatcgctttgtcaattcttattgcaattctaagctatatcaatatcgggccatttcaatacacgagaaatatttaa

SEQ ID NO: 5924 - DNA, 477 bp, Saccharomyces pastorianus
atggaggcgcttattatgtttttagtgctttccgtatccggagtgttcatgtacaagtggtcctacgaacagctctggttcaaagtgggctctctatttgacatcatatcaacttcctcgaggaaagaggcctattctttgacaagcaaatgggaaaccagcccaaatggaaacgcgtccaatatgggcaatttcatcaataagttttacacagaatattccttgccctctcataaagtcctacaatctctgcgagttcttttttcattagcgatgatgacatatacggtaacgatagaaattatactatggcaaatcaaggtagctgatatggaaaaggaagtcacctttataacgacttgggtgtggcccttgacagctatcattctatcgttcatattaatcttactccagccattcttcattattatatccttattgaataagttttacaatgacaagtttgatatcgaccga

SEQ ID NO: 5925 - DNA, 213 bp, Saccharomyces pastorianus
atgaacatattactacatcttcaggcctcatataattactacagctcaagccaacgcaccatcatgagctatttagaaacacaattaaccaaaagacaggaacaaataaaggaatatcaagaaatgaacagtagtctgactaagacattcgaactgatttctgcagaaaaggaaatgtatgtaactcgttttggctcaccagcagtaagttaa

SEQ ID NO: 5926 - DNA, 498 bp, Saccharomyces pastorianus
atggaggatattgagaagataaagccgtacgttaatagtttttcgaatgcgttggatgaactgaagccagaaatcgaaaaactaacgtccaaaccgttggatgaacagctgctgctgttgtctagtgagagggctaagctagatttaactaaccgctatgcatatgtgttgagctctttgatgtttgctagtatgaaggtcttgaatgtcaaagacatgtctcccatactaaatgaactgaaaagagtaaagtcgtacatggacaaagccaagcagtatgacaataagatatcgaaatccaatgagaagtcacaagcggagaaggaaaaggctaagagcatcatttccaacgtcttggacggtaataaaaaccaattcgaaccctctataagcaagaataacttccaagggaagcatacgaaattcgaaaacgataagccggcagccaatgactctagaggatccccggtaccgactcgaattcgtatcatgtcatag

SEQ ID NO: 5927 - DNA, 858 bp, Saccharomyces pastorianus
atggtatctcctagcgatcccacgacttatatgaaatatgacgaacccataatagatttcgaagaacctcgactaaatgaaaacagtacaaatcctaaagcgcatggctccacccagcaaaataagcaacatcaaatgtattcaaataactttcagcaatcttatccgaatggcatggtcccaggatactatccgaaaatgccatacaatcctatggtaggagatccgctacttgaccaagccttttatggtgcagacgatcttttctttccttctgaagggtgtgataacaatatgttgtattcacaaaatgcaaattcatggaatgttttacctcctcaagctatgcaaccggccccaacttatgtaccccgaccatacacaccaaattatagatcaacacccgggtcagcaatgttcccattcatgcagaattcaaactcaatgcaatggaatgctgcagtctcgccatacaattcaagagcgccatctactactactaaaaactatcctccgaatacgttttatcctcaaaatgttaaccaatacccccggcgaagaactaccgggatgaagatttcgcaagggaatgcttcaacgaacagcaaacaatccataagcaaatccgcgaaaatttcaaagcctctccatattaagacaagtgcctaccagaagcaatacaaaataaacctggaaaccaagactaaaccaagtgatgaagacctcactcatccggaaaagcataaagaattttcgatgccaaccccggattcgaatactttggtaattcagccagaggagggtagagatgattcgtctgatgcagaaatgggtgagtgttctaaaaaatctacctga

SEQ ID NO: 5928 - DNA, 1188 bp, Saccharomyces pastorianus
atgaaagtccaactaaccaatagtagaaccgaggaaatcttaaaggctcgaaccgatactgaaaataacgaagtaagcaaagctactccagacgaagttgaagaatcactaagattgatcgatgatttaaaattcttcttagctacagcgccggtaaattggcaagaaaaccaaattataaggcgatattacctgaacagtgggcaaggttttgtttcttgtgtattctggaataatttatattatattacaggcacagatattgtcaaatgctgcctctatagaatgcaaaaattcgggagagatgtggttcagaagaaaaaatttgaagagggtatattttcagatttaagaaacctaaagtgtggtatagatgctactctagaacaaccaaaatctgagtttttatcatttctgttcagaaacatgtgcttgaaaacccaaaaaaagcaaaaagtatttttttggtttagtgtggcacatgataagttatttgcagatgcactggaaagagatttgaaaagggaaagtctaaatcaaccttctaccaccaagcccgtcaatgaacccgctttatcattctcatatgattcttcctctgaaaagcctctttacgatcaactgcttcagcatttagattctagaaggccgtcgagtgcagtaaaatctgacgattcgcccacaaagttagaaaatgaagattttaaggatagcggtttagtgactgtgacaaaccagccacttttagatgttgatctcatggataacacagtagcagcttcccctcaaattaatgacttcacacctcaaaagttgatcatagaacccaatagcctggaactaaatggtcttgcagaagaaccatctcacgttttatccaagaatgctgttaagggcggggacgaggaagatttccctctcgactatttccctgtatcggttgagtaccctacggaggaaaatgcgtttgacccatttcctccacaagcttttacgcccgctgcaccttccatgcctatgccatatgacaacatgggtgaaagagagtctatgcccgtgaattcccttcttaatagatacccatatcaattatctgtggcgcccactttcccagtgccagcatcttcatcaagacagcattttatgactaatcgagatttttattcatccaataacaataaagagtaa

SEQ ID NO: 5929 - DNA, 582 bp, Saccharomyces pastorianus
atgtcggaacccgaacatgctcgccaaatccccctagagggatctgctactgtgagcacgaactctaactcttataacgagaaatcaggcaactctaccgcacctggcgccgccggttataacgctccacatggtggtcctcccaaggacgaactggaagagctacaaagagaagctaacaaccagttggaaaccaaatccaagtcagatttgctgttcgtgtccatctgctgtttaatggtggctttcggtgggttcgtctttggatgggacactggtacgatttccggtttcgtcagacaaagcgactacattaggcggtttggaaccactcgtgctaacggtacaagctatctttccaacgtcaggaccggtttgttagtgtctattttcaatattggctgtgccattgggggtatagttttatctaggctcggtgatatgtatggccgtaaaatcggcctagtcattgtggtcgtcatttactccgtgggtatcgtgattcaaattgcctccatagataaatggtaccagtattcattggtaggatatcttctgtttagtgttggcgtatcacgtgtg

SEQ ID NO: 5930 - DNA, 306 bp, Saccharomyces pastorianus
atgaacgacaagatatccgttttacctcctgaacccattcagctgcttgacgaagacactacagagcctgaattcgaagttgactctcagcaggagaatgaagagccagtcattacatctgacagcaatagttatggcagccgccgaagcaccccaattactagagcaagacctagaaggagcagctctatcaatgcaaactttagtttccaaaaggcactcgtcagtgattgcaccataatgacggagaccacggaacgaagtttgccgtttggaggatcactgttcttcttgaacccaacttga

SEQ ID NO: 5931 - DNA, 2454 bp, Saccharomyces pastorianus
atggctctgccaatagagagcaaactatccatagcgactaataggatcgagaggctaaagtcaccctcatcttcgtcgacatgctcgatggacgaagtcctcattacatcgagcaacaacagcagctctatttgtttagatgcaatacgccaacttcctcgggaaggcatctccggtgcaataaatgtttcgaagggaactacttcttcgaatgctctttttcccaagcatgatctcctcgagcacatagatccccttccagctcatccaccaagctatcattcagttaatccaaacaaagaggtgcgctttccgacgtttagcgataccgcaccatgtcccaaaacctctttacctcctttgtacgcaccggcagtaaacgagttgaccttagtatcgttaaaattggagagactttctccctatgaactgtccagtaacaggagttggaagaattttcttttagagattaattcaacccagttaaatttttatcatattgatgattctttgacaaaacatattaggaactattcgagtggagaaacaaagttcgaaaaagagaacaggaacaacaccgaatcttcccatcgcagcgatcagtcgcagcatttgcatcaccgcttgtttactctgcctacgagatctgcgtcagatttcaagagatcggatcaggaacgcatctcttttagagttaaacgcgaccaatctcgttacttaaccaacgaggccctttacaagtcattcaccttacaaaacgcaagatttggtataccaacggactataccaaaaaaagctttgtgctgagaatgtcgtgtgaaaatgaacaatttttattgaagttttctcatatagatgacctgatagactggtctatgtacttgtctatcggtatatcagtatcgttggatttggaaatcagggaatatccagactaccgagtagtccctagaaggagaagaaggagaagaagaagaaggagaaggagaaggagaagaagacatactcaaagaatagaaagctcgatgggctcattttcgcaacgattcattcgttccaattctaggccagatctagttcaaagatacagtaccggatcaaatactaacaacaatgctaatcttagagaacgttcgaacactttcacaaccggtctactcgattattactgctacggcttgtcaatctcgtctgacgctttatcagcgtcttctggtgtatcgagagaagtcactgatagtaatacatttgaattatctagatcttcatctggatgctcagtctctcgttcaattgcatctagaagcctaaaatttaaaatcaagaatttttttaggcccaaaacttcttcacaaacagaaaagcttcacagacttaggtcaaactcaagtaacctgaatagtgtaattgaaacagaagaagaggatgatcggtttgaacttaatggaggaaacaatttagatcatcgtgtttcagtaaaaactgtaagtacggtggaacttccatcgtgtatagaaagagccgttcctccgcctcaaatacaaccattaaggcgcgcaattagcgaagaggtggttcctattgggttcccgaatagtgctacagtcaataaaatggcttctccgattcctgagttagtcgatactacacctactagtgagcaatcatttgtcgatggctgtgaaattatgctacaatcacaaaactcagttatgaaagaggaattacaaagtgttgtttcgactttggcagttaatgaaaagaatggggtgccgattagagcagcttctcgaagtccttcatcatatgtgtctgaaatggcctttgatggtgattttacgacggatttgtctcaaagtagtagatcagtttctctcgcagagagtaactctcaggtgaatggacacgagagtgttagtgggactgatgacgaaagtgatgacgatagtgaagatgatattaacggtagccatgttcatggtagtgacaatgattatccaagcttaatggaacagagaatgagaaatagaaggcgggcatcttctactttaagctgtttatcaaatattccgtatggaactgacgatgtaaaatggaaaccacccgttaaggaggtctcaagaagacgttatttaagagattctttgaagtgcatcaaaccatttttggatagcaatgactgcttgggtaaagttatttatatccctgttcctggtcctgctttccgaactagtaatacggttcatgtttgcagtagtcatggtttggtaaagaatcacttcttaaagggttatatcgttggacctacagagttaatagagcttaactgtaaaaacaagagcgcaattgctgggatagcaaaagacgtagaagatgaagacgaggacgatggcaatgatgatgattgcaataccggtgatggtgacgatgatgacgaggacgatgatgatgat

SEQ ID NO: 5932 - DNA, 405 bp, Saccharomyces pastorianus
  modified_base (363)..(363): a, c, g, t, unknown, or other
atgttacagatgaatccgttgtggagttgtgttattgtggttctggcagccattattggggtcactgccattcagggaccccaggaggattatagtaagtatggtgtttataggttcacttttgaggacagctctgcgttgtttagggacgtgatcgcacctttaactgacgattatgatgtatggacgaggagtaataaattcattgatattaagttacctaaagacataggtgagcaggtaaaggaaggacgtctgatcatagatgacatgaaccaactaatacaagatacgatgcctaatagacatttgatggcacatgaccaggcagtgtttgagaatttgcaggagtttttcttcaancgaggacctgcaggcatgcaagcttgcactgccgtcgtttac

SEQ ID NO: 5933 - DNA, 1581 bp, Saccharomyces pastorianus
atgactgccggttctactgcccctctcgactatgtctctttaaagaagaagtttcagccagttctttccaagcgggtggaaaacaggcacttgaaaagtttctggaatccctccaaactgcccgatggcgtcatcgagctggctggtgggatgccccatgaaaagtttttcccgatcgaggccattgacttgaaaatatcgaagacgcccttcaacgagaacccaaaatggcacgactcgttcaccacggcgcacttggacctggagtctcccggcgaattgcccatcgcccgttctttccaatacgcggaaactagaggtctgccaccgctgctgcattttaccaaagacatggttgccaggattaaccgcccagccttctccgataagacggattcaaactgggacgtgatcctgtccggtggctccaacgactccatgtataaggtcttcgagaccctctgcgatgagaccaccaccgtgatgattgaagaattcactttcaccccggcaatctccaacgtggaggccacgggcgcgacagtcgtccccatcaagataaacctcagcgtggacaggcagtcacaaggcgttgacgtcaactgcctgtccgaactgctagaaaactggtcgacggggccctacagccacctgaacaagccaagagtcctctacaccatcgccacgggccaaaaccctacggggatgtctgttccccagtggaaaagagaaaaaatttacgagttggcccagagacatgacttcctcattgtcgaggacgacccctacggctacttgtatttccccccatttgacccggaaaatccattggacaacccttaccaatccagcagcgtgaccaccgaacggtacttgaatgaattcttgatgaagtcgtttttgaccttggataccgacgctcgtgtcatccgtttagaaactttctccaagatatttgctcccggtttgcggctctcctttatcgttgctaacagattcattttagaaaaagtcctggagttggctgacatcaccacaagagctcctagtggtgcttctcaggccattgtctattccaccataagggcaatggccgagtccaacatgccctcctctcttccattaaaagagcttatgttcgagagttggatgcaatggatcatgcagatcgcttccaaatacaatcataggaaaaatgtcaccttgaaagctttgtacgaaactgaatcttaccaagccggccaattcagcgtcatggaaccctccgccggcatgtttatcatcatcaagatcaactgggcgaacctcggaaaccccgaagacataccacaacagatggataaactggacgaagtcttggtgaaaaacggtgtcaaacttgttcttggttacaaaatggccgtttctttagagtattcaatgcaacattcggatttcttgaggctaaccatcgcttatgcaaaagatgataaccagttgattgaagcctccaagagaattggtaacggtatcaaagatttttttgaaactaccgttaagaaaaaaatgacctgcaggcatgcaagctggcactgccgtcgt

SEQ ID NO: 5934 - DNA, 501 bp, Saccharomyces pastorianus
atggggacgactgtcgcgcccgtggcctccacgttggagattgccggggtgaaagtgaattcttcaatcatcacggtggtggtctcatcgcagagggtctcgaagaccttatacatggagtcgttggagccaccggacaggatcacgtcccagtttgaatccgtcttatcggagaaggctgggcggttaatcctggcaaccatgtctttggtaaaatgcagcagcggtggcagacctctagtttccgcgtattggaaagaacgggcgatgggcaattcgccgggagactccaggtccaagtgcgccgtggtgaacgagtcgtgccattttgggttctcgttgaagggcgtcttcgatattttcaagtcaatggcctcgatcgggaaaaacttttcatggggcatcccaccagccagctcgatgacgccatcgggcagtttggagggattccagaaacttttcaagtgcctgttttccacccgcttggaaagaactggctga

SEQ ID NO: 5935 - DNA, 195 bp, Saccharomyces pastorianus
atgaaggtcagttatttcattctcatattagttagtatattctccatggcacaggcatcttctctatcatcaacattcgtaacgttccccaagtctgacacagtttcagcaggaggagcaacacattatagaagatgtcaacgacagtacgtggtagcaatcggcggctacatcccacatgagtacagccggatc

SEQ ID NO: 5936 - DNA, 309 bp, Saccharomyces pastorianus
atgaatttcaattttattacaatcgttaatattttattttttctattctccttaaccgatgccaacaacaacggggaagcagtcaaactctttacttccaatggcgttgtctacagttatgctgtctacaccaaaacacttgcgcctgcaagagttgtggtcaaaacaatttcctatacaactaccagagtatatccagtcactttggcaaattcagttgtctcttctaccactgaaaaaataacagaggtttcaacaatatcaacttcggaacaatccagtgccactcaacagaggggatcctctaga

SEQ ID NO: 5937 - DNA, 486 bp, Saccharomyces pastorianus
atggacaattcagaatttctttggaaggtgttgcggatacaggagctgcgaaatgtcaacgagcattttttggtcaattgtattacagtagatacgagtaggctggtttcacaagtggacaagctgctgaaagctggagacaatggtgtcgacttcattgttcagcagctacagctattgataaaggatgtgtacagacaattacgaagaagccaaggaatggtgccggaaccttctctggcagttaatttgaatttcaccattttgaaattctcagttgcttactgggacattctattgcagaggtcattggatttgatgcctgaagttcccagaagagatgttcagtattttatcaccgaggtcacctccgtagagaggattcggtatgttgagaccaaccaaaacttcaagaccttcaaaaatcaccagggtttggttcgggacagtgtagaaatggacgagttcattgattatgaaacttaa

SEQ ID NO: 5938 - DNA, 3267 bp, Saccharomyces pastorianus
atggcggatcaagcttgtcgatcaacttcagaacctccatttccacgttataggcatgttgcttctgcatacgctacagacaaaaaccaaatatatgttatcgggggacttcacgatcaatctgtgtatggcgatacatggatactatcggcctttgacgatgccaccaagttttcaactactacgatagacataagtgagaccacaccgccaccaagagtaggtcatgccgccgtcttgtgtggtaacgcttttgttgtgtttggtggtgacacgcataaagtcaacagggaaggtctaatggatgacgatatataccttttaaatgtcaattcctataaatggacagtcccagccccggtcggaccacgtcctttgggaaggtatggtcataagatttctattattgcaacaacccaaatgaagacaaaactatacgtatttggtggccagtttgacgatacttatttcaatgacctcgcagtttatgatttgtcttcttttagaaggcccgattcacattgggatttcttgaaacccaagacctttactccaccgcctatgacgaatttcacgatgatatcatatgattcgaaactatgggtatttggtggtgacacattggaaggtttaataaacgatgtatttatgtacgacccagcaaagaatgactggtctacgattgagacgtgcggtgaaaagcctcctcctgtccaagaacatgctactgtagtttacaatgacctgatgtgtgtggtgggtgggaaagatgagcatgatgcctatttaaactccgtttattttttaaatttgaaaacccataaatggtttaaattacctacatttgctgctggaattccgcaaggtcgctccggtcattcattgacgcttttgaaaaacgataaggtgttgattatgggaggcgataaatttgactatgctagggccgaagaatccgatttacatacttccgattttgatatgcaaagaggcacgattatttacaccctagacctgacacgcataaaagacctttgcccgggcgtaatggatgttttaaacgagaccaccgtcaacagaaataatagtctcgaattgacaacgccggtgaccccaacatctcatcaaaatagaaatttaaatatggtaagttcagctgcacagtcatcctccgctccatcgcctgcaatgagaactcctttagataccgatgacgttaatagaggaatacacaatcgaggtatttctgcggagtctcagagtcaaaggcctcaggtaaactctgaatatcatccaattggggaagcaaacattttgactccgtacgttcctccagagaactcgcaaacacccgtcatgaaaacaacctcgagtaaaccctttgagacaccgattatcgagaaaacgcctgacatatctgagcccattgaaccgacaaatggacatcagcgaactatatcttcaaactatggaaataacctcactccttcaacacaaattaaaaccagctcttccccagtagtagagacactgttaagcagcaatactaaaacgcttcagaatagttatacagaagagacagaaattcatgctgataatgctagtctaatagattctacgctacctttcgagcaacagataaatggaaacaatctgcgggcgttagtgacgggaaagacagaagacgcagctaatgttgttgcggatgacgatgatgaaattggtgtagcccaaatggctagttcgccatcaaaagatcagtttaaaataaatcattacaatgaatctttggaattatcgaaaaatgatactaagatcgataaattatctgaacccgtggatatcatgataaagaaaagcgataatgtcgaatacgatagcgaagctgctaaccgtgatatcgagactgaccatcatgacatcgagacaagtagaaaaagagacgtagtggccctaattactgaggcttcctctaatgttaaaattgaaaaatcgaaaaattctacagaggcaacaaaaattcctgagagtaaagaaaatgcgcctgaagttgtcgatagagcgctatttgaaagattaagatctgaattacaaactttgaacaatataacacatgaaaaggcactggaagccgggactcacataaaggcattggaaacggagctatggcgactaaaatctcaaaatagcactggggtgtctaaagaaatagacgagctggattccgttagactacaatcgaagtgtgaactattggaggcagataaccattctttggaagacaaagttaatgagttggaagctttgataaatagcaaatttttagacatggaaaatctaaatgaaattcttcaatttcaaaatgaaagaatcaaattgctggaactagaaccgaatcacaaggagaagctagaaaaattacagatagaatacgaaaatttgaggagagaaaatgaacgtctgaaaaatgagagtaagcaacataatgaagatattattaaacaggttacaagttattcttcgcaactagctttattaattaatcattggaaagaaaacaaagttaactcttcattcctttcatcatcttcttcattgttatccgtatcgtctaaccaagaggaaaacggtgaaaaatctataaagaatgagggcgaaccctacagtgatcaaaatcgtcatcatcgtgtagtaattagcaaactaacaaacaggttggatgatctgttagaaaaaagtcaagagctgaccgtatcgaaagaaaagctatcctctgaatatcatgctttaaagatggagcacagctcactgagccaagatgtattggtgaaggaaaatgaaatcaaaaagatacaaaacgattatagagaaagcattagctcggttaataatgcaagtaaggctttagtagtctcacaaagagaattagaaaagtataaaagcttgaacaagaaattaattgacgaattggatgagttgaaattcaagcacggccatggtaatcgaaattctgaggatggtttcgaaagtaccaacgagggttctaacgatgccagtaacaataacaatatcagggagaatcaatttaacatcaagataaatgatttgaaggccgagcttttcatcacaaatcaagaaagagataacttgaagagtgaagtacttgagctgaagaagaggttactcaatttagaaaacggtactaatgacgttaacgagaacgatggcagtaatttgcttaagggggatcctctagagtacctgcag

SEQ ID NO: 5939 - DNA, 441 bp, Saccharomyces pastorianus
atggccggattcagcttcgccaagaagtttgctcataaaaaacatgggaagacaccttctgatgcatccaactctgaccaatctagagaagcttcgctgtcaactcctccgagtgagaagtttttcactaagcaggaaacgcctcaaaaaggacgtcaattctcacaaggaaatcatcctaacgccaataagacaagttcgccccctatgtttgccagaaagcagcaaggagaatcaaggatccaaccgactgcagctccaccgcaacaacgtaacgtatcaggaccatctaccactcttcataagcaagcttcaatgcagaaagaatataccgtgtggaacaggatcaaacttcagaactctccatttccacgttataggcatgttgcttctgcagactctagagatccccggtaccgagctcgaattgtatcatgtcat

SEQ ID NO: 5940 - DNA, 351 bp, Saccharomyces pastorianus
atgttcaatttccttttcccgtgtagctggttcttaattgtggtggtgttctcgaatccatcgatgtctgagggaggcggtggtggtggcggcaaagcagcctctaaaggtggctcgataggtacttcaaagtcacctggaggtggtggaggaggaggagggggaggtgggaagaatataccatcactatttggtggctgtattgaagaattgtttggttcttcaagttcatatccaggtggcggaggtggtggtggtggtaagtcttcgtgttcttcaaagccaggaggaggcggcggtattccactcatcttttttctatctcctttaacgcaaaataaaatgcagtaa

SEQ ID NO: 5941 - DNA, 696 bp, Saccharomyces pastorianus
atggctgtctctaaagtttacgctagatccgtctacgactcccgtggtaacccaaccgtcgaagtcgaacttaccaccgaaaagggtgttttcagatccatggtcccatctggtgcctccaccggtgtccacgaagccttggaaatgagagatggtgacaaatccaaatggttaggtcaaggtgtcttgaacgctgttaagaacgtcaacgatgttgtcgctccagctttcgtcaaggctaacttggatgtcaagaaccaatccgctgtcgatgacttcttgttgtctttggacggtaccgctaacaagtccaagttgggtgctaacgctatcttgggtgtttccatggccgctgctagagccgctgccgctgaaaagaacgtcccattgtaccaacatttggctgaattgtccaagtctaagacttctccatacgttttgccagttccattcttgaacgttttgaacggtggttcccacgctggtggtgctttggctttgcaagaattcatgattgctccaactggtgccaagaccttcgctgaagctttgagaatcggttccgaagtttaccacaacttgaagaagttggctaagcaaagatacggttcttccgccggtaacgtcggtgacgaaggtggtgttgctccaaacatccaaactgctgaagaagcttttgacttgattgctgacgct

SEQ ID NO: 5942 - DNA, 1305 bp, Saccharomyces pastorianus
atggacatcagcgccacttgctatgggtacatcgataacgaggaagatctggccctgattttccagggcgtttttgatgaacaattgagatgtgtcgaacgaaggccatatgaagcagagaaggctaaattggctggctcaggaaatatttttgttttcagcgaagagaaatcaggcatcaaaagatggactgatggttattcttggtctccctctagaatttcaggaaaatttctagtgtacagggagtataatagactcggccccacacaaaatcccaagctgtatgatatctgtgatcaaaacatctttgagagatccaatcgccaatacttttatactgggttgctgaaaaaaacgttctctttgaagttcggcacagatcaaaccaacagcaacaagatggaaactttccatattgttgcttattacacagaaaaggatattctccaaggaagtttgaaaagaccttcagagaattcttttttcgacagatttcaaccttcagaaaaactatcagatgctctgcaaaaagtagctgttggcaatggtagatcaaatccgtctaagaataacgaaaggggcggaagcagagcacaaagatcggggatccaacggtcattgtcgtcttcttcgtcccataatgatctcacgagaaataatactaacacctcacgaaatagttctgccagtgtgtcctcttttgttgatggcaggggtccaattcagactactcccaatttaaacaacgccactgtagatcagtaccagcagcagcaccaacaacgacaacggcaacaacaatacgccctgccaatttacaagcccatagagcaacaaaaccaactacccttcccatacacaccacactcaataggcatatataatgctggcgctcaatctgggttgagacgcacagtctcacagtccatgatctactataacgcttatagcccatgtctgccgcaaccggttccggtacctggggtagcacctccactgatgtattcttctagtaaattcaacgcaatacagtaccaaagtggcgatccgtactacccaagacaaggaccgggacacatgagttcttctgctcctattccttcaaatatgatgcctcctgtatattcaatgctaccacataattattcacaacagcaacagcaacagcaacagcaacagcaacagcaacagcatcctcagacatccccagcatccgcagcatccacaacaacagcatccgcagcatccacaacaacagcatccacagcagcgacaggattcccaggagcgaacaggttcaac

SEQ ID NO: 5943 - DNA, 177 bp, Saccharomyces pastorianus
atgagctccaatgttctccaacctcccaatccaaatgctgcccctattacaagaaccgaaaatgtggagaaaatatgcattttaccagcacttcgcatgagtgttccacctcctgtacagtatccagatgttcttgcaccaaaaaaaactcatcaaggccacaattcattcgattaa

SEQ ID NO: 5944 - DNA, 189 bp, Saccharomyces pastorianus
atgggagttaccaccatcgatgatgatgtcgcccttttccagaagtgggacaatttccttgatcaaggcgtcgactggagcaccagctttaaccaaaagcatgacctttctaggtctcttcaacttggaaatgaaatcttgaatggaagtagcaccaatgatagacttacccttggcttcgttagctaa

SEQ ID NO: 5945 - DNA, 678 bp, Saccharomyces pastorianus
  modified_base (501)..(584): a, c, g, t, unknown, or other
atgtctgttattccagaaaacgccaacgtcaccgtcttgaacaagaacgaaaagaaagccagagaattgatcggcaaattgggcttgaagcaaatcccaggtatcatcagagtcactttcagaaagaaggacaaccaaatctatgctatcgaaaagccagaggtcttcagatccgtcggtggtaactacgtcgttttcggcgaagccaaggtcgacaacttcactcaaaagctagctgctgcccaacaacaagctcaagctagtggtatcatgccatccaacgaagatgttgctaccaagtctccagaagacattcaagctgacatgcaagctgctgctgaaggcagtgtcaacgctgctttggaagaagaagatgcaggtgaggtcgacgccggcgacttgaacaaggacgatatcgaattggttgttcaacaaactaacgtctcccaaaacgaagccatcaaagctttgaaagcccacaacggtgatttagtcaacgcnnnnnnnnnnnnnnnnnnnnnnnnnnnnnnnnnnnnnnnnnnnnnnnnnnnnnnnnnnnnnnnnnnnnnnnnnnnnnnnnnnnnaggggtacgtagttattctaatgcaaatcactttctttgtccttctcggggagtgcaggctgtgcatcttgcttggcctgcttggcttcgatga

SEQ ID NO: 5946 - DNA, 309 bp, Saccharomyces pastorianus
atggatatcggatcacaagcaataggaaccaggaatcctcagaccagcaaagtcagtgtggggaatgaaagcccttctgccaacaacgagagcaacacaaataaagatataaatagaaatagaaacaaaaataaaaatagaaacagaaacagaaacagaaacagagatagcaagaaagaagataagcctaattctataacggggaatcaggaaggacaaaggggaaaactgcaaacgaaaaaccgaaaacgaaaagacaacaatgaaccaataaaagaatacttagaaacccaaggaatgacgagataa

SEQ ID NO: 5947 - DNA, 5028 bp, Saccharomyces pastorianus
atggaggacagaatatcagaatacctgcacgtgccatccgaatcgcttcgaggcgtgaactattctatattaaggaccctatgcaagaaaatagacaaatttgaactttctgaagaagaagtaacaaggctcaatgttttaattgatgagatcaagtcgcagtactatacaaggatatctaaacttaacgaaatactggctaagtcgtctgaggagaaaaatgtatccaacaaagaatcggatcgtttgcatagcctattaaaaaatgaacgttcaaaatgtgcgcggaaaatagatgcgttaaacaagcaattgaatgcgagcaaagacactattaaaaaactagatgatgagagaggtatgaaagaggaagcggcagtttcccaagctgaacgtgaaaatgatgatccagcaaggaacgctttaagcaatgaaaataagctactacgaagaaagctgttggagatggaaaacatactacaaacatgcaaatctaatactctgtcattgaaattgaagtatgaaactgtatcacaagaaaaggacctaatactacagaacaaaaagtggattcaagagcaattgtcttttcgtgacgagaaaacgctagttgatgaagttacaaaaacagttcatgtacagaatctcgaagaaaaattaaaccgaattcaaaatgattatgaatctgtttctaccaataatctgtttctagtagctcaaaataaacaattatctcattcaatgggagagaaaatattggagattaaaaacctaaaagataccgtaaatatagaaaaagctgagttctccaaagaaatgactttacagaaaaatatgaacgacttgctccgctcgcaattgacctcgcttgaaagaaattactccttgagaacaatagaaaaagataatgatgatccttgcaaaaatcccgaacattccaatgtgatagatgaactaatagataccaaattaaaactagaaaagtcaaagtatcaatgccagcggttacaggatatagttgcagattgcattgaaaaaaatggagccgcttttgataatacacatattgccgacccctccgttagtggcttagtttctgatatcaaaaatttgaaaagacaattgataaaagaaagaaatcaaaaattccagttacaaaaccaaatggagagttttatcatggaattagaacgcaaaaccccagaactgatctcatttaaaaagagaacagaattattggaacatgaactcaaacattccacggatcttttagaaacgatatctcttgccaaacggaaggatgaaaaggaactaatctcattaagacagaaacttaacaattgtgagtcaaatatacatttgctggtgaaacagcgcctggatttggcccgtcaagtgaaacttcttcttctgaatatatctgccgtccagaaatcggcgtcgccactatcgaatgatgaactaatatcattgaaaaaactattagaatcacaagatgtaccaaacgaaaaggattcacagacaatcattactgaacggttagtcgaattcaataacactaatgagctccaagaaaagaatatggaactcttaaattgcgttcgtgttttggctgataaattagaaaattatgagggaaagcaagataaaagtctagccaagctagaaaatcgaaccatcaaagaagcaaaggacgcaataattgaactggagcatgtaaactcaacattggaatcacgtataaatattttatcaagggaacgcgattcatacaaattattaacctcagccaatggtaacaaggatcatgcagacgctgccaaaataacagaagcagttcatttgaagataattaaagcacttgaagcggagctttcacttacaaaaatagaaaactccgctgttgttcaaaagttaaacaaagagcttttaccctgtaaaaaattacaatccgatggacaaatatcattacaagaactttcaaattttaagatcttagctattgagaaggaaaatcttttacagacaagaatagatgacttgaagactaaattggaaaaacaaagatcgagcggaccatcaagtacacagggcagcataggtagtgaggaaacaaaagtttcacagtataaaaacaaaattgaatctttgatgtgcgaaatatctaatttaacgaaaaagactattgaccttggatgtatgaaggaatctttaactagggatttggaaagatgttgtaaagagaaaatgcaattacaaatgaagctcactaaatcagaaacaagtcaaaatgaacaaaaactcaaatctgactctaagcaagtccaatatgatacaataataaaggaattggaaaaatcctgtcaagaactaaataatagactactcttaaaggtgcaagaaatagaaacactacaaacatccaaaaactcacagcttaaatgggctcaaaataccattgatgagacagaaaagaatatgaaactcgtttccgcagatttaactgaaaagaaaacaacaattagaaaactctcatcagaaatgaaggacattgagaatgaattgcaaaagaccaaactccagtataaattcctgaataacattagtgatgttaacacactagaaatggctttaaaaaaagaattggaacgtactcaaattgagttgaaggatgcccattctcagattgaaacttacgaggaaataatctcaacagacgaaaatgcactcaaagaattgaacgatcaactaacgaaaacaaaagaagaattaagagtcaagactcaatcgctcgataaagaaaaaaatgcaagggaagaagaatcatctttcttgcgcagagaacttgatgaatttaggggattacaacccaaactaaaagaaggcgctttacgtcttgttcaacaatcggaaaagctaagcaatcaaacacaaaaaatccaagcaatgaataaaaaaatcgataaaatgaccacgattgtccaggtgtatcaaaaagaacagacatctcaacatcaatcggagctaaaggcaaatgaagacttatccgcactagttttgcgtcttgaaaacgaagtgattgattaccaaacggagctgaaaaaaaccaaatcgtcattgcacagcactcaagaattgctagataaacatgaaaggaagtggatggaagagaaggctgattacgaaagagaattgatatctaatatagaacaaacagaatcattacgtgttgaaaattcagtgttagtcgaaaatatggatgatggtactggcgaaagtaacggtgataaagattatttaaggctagtttcattattttccagtctgcgtcatgaaaggaatactctggaaacaaaactaactacctgtaagagagatttagcacttgcaaagcaaaagaatgccaatttggaaaagaccgtaaatgatatgcagaaaactcaccccatatcgcgcaaggatgtccaatgttctaccgaaattattgacgagtttgaggatattatgaaagaaataactcaagttaacatcctaaaggaaaacaacaccattttgcagaagagccttgagagagttacagaaagaaatgaagcaatttataaagagtacactaatttgcaacatgaactatctcgactacaaggtgaacttgtgcaaacgaaagagcaaacttctgttaatgctaataaggttttagtctatgaaagtgaaattgaacaatggaaacagaggtttcacagcttatctcaacaacagaaagaggcacacaaagaagaaactgaaaagctatttaatgagattagcgacatgaaggctaaacttctcaatgcccagaatgcaaatgctgacttgaatgataaattcaataggttaaagaaacaagcgcacgaaaagttggacgcttccaagaaacaacaaactgccttgactaacgaacttgatgaattaaaagatatgagaaatgaattggaagagagtttgcgtagtgaagaatctaaagtccttgaactggaagcgaaacttaagaagcatggagtacaagcagaaggcgtttcaaaaaatcaagaagacgatacttccaatccattaatcgaagaaattcaattacttaagagggaacttcaagtgtttaaagaaaccagtgactcttctgacattattgagagaatgaaagaaattatggaggcagagaaggccaagaccattgaagaaaaggcaactgagtttgaaaggaaactagaagaaattacgggaaaaaatagcggaggaaaggtagacaacggtgaaaatattgaggaactgaagaaacaatggctcaagcaatatgaagaagaaacagtgagaagaattaaagaagcggaagagaacttaaagaaaagaatcaggttaccaagcgaagaaagaattcaaaaaatcattagcaagcgtaaggaagaattggaacaagagttccaaaggaagttagaagagaattcaggttgctttacattgtctagcaacaaaaaggaaaacgaaataagtgttgaagacgaactatggaatagcccctcgaaggggaattcggagaagccttctattgttaccaaattaataaagcagaaaaactctatacttcaagaacagctaaagaatgccaaaaatgggttaatctctaatgacagtcgcccagctagttcaaataaagaaaatgacatcccagataacacagcagctgataacaaggtcccttcagcttttaatttcggaaagcctttattcccttctaatatatcatctttccgaagctttaaaaatccgttcacccctgccgctactagttttaacacaggtgtttcattaccggcatttagtatccaacctgcctttgcagtcgatgcaactgttgatacagcgggcccaaatgacgacaacaacaatgaggcaaaaataatagaaattgaaaacaattcattaaaacgaccaatcgacggtgaagtaccctctgataccgattccaaaaagataaaggaaagctcagacaatgactaa

SEQ ID NO: 5948 - DNA, 297 bp, Saccharomyces pastorianus
atgccaagtttagaacaacaagatattgctgataacttaatggagcgccagaaacttccttgggagaaactaaatggcagtgaaataaaagctgcttggcatatatcttatggtgaatggggacccagaagagcagtttatagagggggtgatgttgagcttattactaaaggtgtcttttgggggttaggcatctcattgggccttttcagtttgataaaaatattggctaaccctgatactccaaagacgatgaacagagaatggcaattgaagtttgatgaatatttaaaataa

SEQ ID NO: 5949 - DNA, 1248 bp, Saccharomyces pastorianus
atggctgagaagtcgatattcaacgagcctgatgtggatttccatctcaagttgaatcagcaactatttcatattccttacgaactactatccaaatgcgttaaacatactcaagcaactatatataaagaaaccaaatttttacacgaacatatcagtacgctgaacgaaatctttgagcacaatgatgtcgagcatgatagattagcactcgcaaaaataaacgaactgatcagaaaaattgaccatatggaaaagttcttgaatattcaagctaaatcacattgcgaaattctaaatagaatcaagaaaagattggagtttttccatgaactgaaagatatcaaatcccgaaacaatgagattccacttaatgaaaataacccagatatgagaaataaactgattcggtggtatcaaagttacacaaacattttgattggcgactacttaactaggaataacccgatcaaatataattcagagacaaatgaacactggaattcaggggtagtgttcttgaaacaaacccaattggaggatctcatcgattatgatgttctcttggaggccaataagatttccacatcattattaaacgaccacgatctcttacccctaatttcatgggtaaatgaaaataaaaagactttgaccaaaacatcttctatgctagaattccaagcaagactacaagaatacattgaactattgaaagctggcaactatatcgatgctatcatttgtttccagaaataccttttaccttttatagagagtaatttcacggatttaaaattagcatctggacttctgatatttatcaagtattgcaacaagcaaaaaccaaattcatcttctgggtctagacttgatactgaagatatcaaatcaaaaaacctaccaatgaataaagaccaaatatttcaacatttcttccataaatgtctaccgagggatacttctgacccagagacgaatacaactgattacgataagagctcgttgataagttcacataatggtgactttgaaaggtacctgaagttattagacgatgaacgatggtcagtattgaacaatttattcttgaaagatttctattcaatgtatggaatatcacaaaatgacccattgttgatatatttgtcactaggtatatcgtccttaaagacgagggactgtttaaatccttcagacgatgaagagagaaatgaaggaacagaaatcacgggtacaccagaaaat

SEQ ID NO: 5950 - DNA, 267 bp, Saccharomyces pastorianus
atgaatttattcggaattatagctttaaaagtagtctgtggaaattcctctatcctcttcaaccacccccatcgttggggaaagctaggcggttcatcgctaggttcaacagggccattccaaactctttcaaaaaacttttgtatggggtttttcctctttagtaataaccatttgggcttgctgccttcgccttcctcttcgttaggcacgttttccacgtcagcgtttgaaaggtcccgcaatggtatggactcagttctctga

SEQ ID NO: 5951 - DNA, 219 bp, Saccharomyces pastorianus
atgatatacctattacgccctcacgtgataacgatccgcacaacgtcgaagaacccgcacccgcataccgtgggaccttcaggagaaggtcttctgtatttgaaaacatttcaagaacaattccctgggctcatgcaactgactttcaaaggccaacagttaatactgtggatgacagatcacctgaaacggacagtgaaagtgagatggatagtgtga

SEQ ID NO: 5952 - DNA, 579 bp, Saccharomyces pastorianus
  modified_base (498)..(498): a, c, g, t, unknown, or other
atggatggtgactctgacattgatgtctctgggttaagagatggactgcataaggtggcaaacgaagaaacagataccaccgccgccaacgatgatgtgccatatggcgctacttgccgtatatgtcgtggagacgctaccgacgataaccctctttttcacccttgcaaatgcaagggctccattaaatacatgcatgagtcctgtttgctggaatgggtagcttcgaaaaatatagacatttccaaacctggcgcggatgtgaaatgtgacatttgtcactatcccattcaattcaaaacaatctatgcagagaacatgcccgagaagatacccttttccttactattatccaagagtattttcacattttttgagaaatctcgtttggctataactattgggctggctgctgtattatacataattggtgttcctttggtatggaacatgtttggtaaattatacactatgatgctagacggatcttcgccttancctggtgacttaatgaagagtttaatatacggttacgatcggactctagaggatccccggtacgagctcgattcgtatcat

SEQ ID NO: 5953 - DNA, 117 bp, Saccharomyces pastorianus
atgtcacatttcacatccgcgccaggtttggaaatgtctatatttttcgaagctacccattccagcaaacaggactcatgcatgtatttaatggagcccttgcatttgcaagggtga

SEQ ID NO: 5954 - DNA, 90 bp, Saccharomyces pastorianus
atgtcagagtcaccatccatgtctttcacacttctagtttccttgattcaattggtagcggacgcagtcttgacccggaagatgtactaa

SEQ ID NO: 5955 - DNA, 684 bp, Saccharomyces pastorianus
atggaatggaatggaagaaaaaaaaaaaatcaaacatgtgtatatacatatatcaacatcgcaggcagtactcacttgcccatgttccgcctcttgatgtcattcagcagcttcagcgacttgatttcgttgatgtcgttgagcttcgccttccagaactcgttctccttgttcagctgcgcgatgcggtcgcgcagcttgttgatctgcacgttcaggccatgcagcttgttcaggttctcgaagttcctctgcttcttgcgcacgcggaaccgctgcgacgcctccgtgttcttccttcttcgctcctgcttgatcttgtccagctcgttcacgggcgcctcttcctcttcctcttcctcttcctcttcctgtgccgtggccgttgccgttgccgccttcccctttttcggctcgcgcagcttcttgaattgcgacacgtcttggccgctgtttatcatgcctatgagctcctccgcgttgccactgctaaccagtagcaatgatagtagacgcgagcccagctccgagtcgttcgagatcaggctctgtagatgttcggatagattgttcacgttcatgttcacgttcatgtccatgtccatgttcatgctcatctctgcgtgcggtgccggttcaagggcggtccttgtctacaagacaacaatggcactcgtcccgtaa

SEQ ID NO: 5956 - DNA, 840 bp, Saccharomyces pastorianus
atgtcttttgtaataattttcacaaatccatatacacataccatgcaaaaaccaattatactcgcttatttggtcctctcgctactgttcaactcagctttgggttatccaactggacttgttccaagaggatcctcagagggaactaattgtaattctatcgttaatggctgtcccagtttagattttaactggcacatgaaccaacaaaatattatgcaatatactttggatgtgacttctgtttcttgggttcaagacaacacctatcaaatccaaattcatgtcaagggtaaagaaaacattgacctaaaatacttatggtcattgaaggtcattggtattactggtccacaaggtactgttcaattatacggtgttaatgagaacacttacataattgacaacccaactgatttcacagctactttcgaagtttacgctactcaagatgttaacagttgtgaagtctggatgcctaatttccaaattcagttcgaatatttgcaaggtaatgcagctcagtatgcaagcacttggaaatggggtactacatctttcgatttgtccactggttgtaacaactatgacaatcaaggtcattcgcaaacagacttccctggtttctactggaacatagactgtgacaacaactgtggtggttcaaaaccatctactactaaatgtaccaaaaaccataccccagaatctagcacatcttcaccaagcactacatcaaccgctgcttccagtaccgaatcttcatctactccagctgcaactccatctaccgaaacctctacatccactacttcaacttcaactacatgcacagataaa

SEQ ID NO: 5957 - DNA, 477 bp, Saccharomyces pastorianus
atgatacaacgaataattttttttttgcactcattggttattaatattgtttttagaaatatactgctatgtaataatcgtattctattatttttttatagattaagaatgtttatgtgctatatatatatatattacagatgggtttcctttgtgttaattgttacatttttatcattgacttcattcatttctatagtttggttgtcagccgcacttggttcctcttttaggttcgaattgtcgcctttgagttctgctaatgaatgctcattgggggacctttccgttcctatagatgtttcgtttgctacgacacttgttgaatcttgtctgggttcgtgtatagagctcaagggtggggcattcatttgtgtactggagttcacgttcgcaatggaattaactcttggcgaagacgtattagatgctgggtgtttattcatatgcgaaggtgtaacgttcggtgaagagtga

SEQ ID NO: 5958 - DNA, 318 bp, Saccharomyces pastorianus
atgtctttagtaagatttccattaagaaccaggctaataagaagtcttagtcccatgagattaacggttagaaccgtcacatcgacgagtgcaggtgctaaggcaaagtcaagatatgataaaacgataatcaagccaatacttttagtaatggtgtttggatcgatattaaactcagtcatagttgaaaagagaaaagctcaagatatggaaaggaagtaccacttaaaggccaacaaattgaaagagttgatacaaagggttaatgacaataacggaaaagtggattttgacgcagatgacgataagatttggtaa

SEQ ID NO: 5959 - DNA, 234 bp, Saccharomyces pastorianus
atgataggccacgttgagccacttgtacagcttcagccacgccatctggctcctaccacgagaaccattgaacacaaagtgggtgatcttcctccacacgtacccagccagcacggtcaccacatacaaggtgcgtttcctgcatcggaaagctacaccgctcagcgcagacccgtacgtgtggctggaaccgtgctgcgacaagaaccttgtcgcacacacaaacaccagtga

SEQ ID NO: 5960 - DNA, 186 bp, Saccharomyces pastorianus
atgtcctttatgtcattactcgaatcttctatcacgccatccttcttttcagcaagcttattgttatccttctccacagaattaatagctatatcgggagtgtttgtctcgttattcgaaacagagctctctgtttcgccaaacaagttatcgctatcattatggtcttggccgaacaaaacctga

SEQ ID NO: 5961 - DNA, 192 bp, Saccharomyces pastorianus
atgtacgtgtgtgtgcgtgtgtacacatacgcgtgtgtatacgggcgagggcgcgcgccggtgcatcgttgcgccgatatgtgtagagcaacgtcgtactcaacgccttcttcgctgcgctacaccccttttccccttctccttttctttgttcttggtatctatcgaaatgcacctgctcgccataattaa

SEQ ID NO: 5962 - DNA, 468 bp, Saccharomyces pastorianus
atgagtataattagttcttggttacttgtctctattatttgcttaactacttctattgtaacaaaattgcaagctgctggagttactacccatctattttatttaacaagaggtgctcccttaagtttaaaggaaaactattatccttggttgaaagctggttctttctttccggatgctttgtactcatgtgcaccttcaaataaggattggtctgattttgcagaattcactcattggcccaatttcttaatgattgcagtatcttattggcagcagaagtatggtcagaactatcgacttcggggatctcagggctcactcgcactaaagtcatttttaataggggtattcactcatcagatagttgatgtttcctggcattcgttagttaccgattatagaatgcacgggctaatccgagttctcagcgaaacagatgtgatggagatattgaactgttcatag

SEQ ID NO: 5963 - DNA, 228 bp, Saccharomyces pastorianus
atgatgggctcgacgactgcgacttgtgccaagaatgcgaccgggaaacaaacttcctcacttgaaaccatcactgtttttttcttggtctttctatatataaacaaaagcctctgtaaagtttttttttctcgcatatcaaacgcgcctatcttagacataacaacaacagccagcggccgatgcctgcgtaatacatatgaacaagtacttccagaagagcattga

SEQ ID NO: 5964 - DNA, 615 bp, Saccharomyces pastorianus
atggttaagataaatgagaaagcggccccttctgggtctagttctcaaacagggagctcgaagcgaactcaatcgggtttagctcttgatggtgatagcaactaccaaaccccgggcaattcaggtgacgaggtcagcaggagtgcttctggttcaggccagttcacttttagagcagacccagatgcttcccaaaatgacaacaagaatgtaagatttacgagtaatgcagatgatgcagaaaatgacgcgtcctccaaatttacagaaactagctctaattccaggagcaatgatgagcaagagggcgacggagataaacctcgtcgtcgcaaaaggaaggctaaggtatcctttacacatttgagaaacaacggtgaggatggagacgatgagactttcatcaaaaagataataaacaatttaactggcaatcaggggggcttagtccctgggctagcgccagtatcgtcagacagagaaaataataaagatgatgaaaactcccaaaaagaagatatccccttatctgacctaaccgatgcgtccaaaattgtgaacgtgcacgacggtgaccataagaaaactgagagcaggagactagaaaatgcttga

SEQ ID NO: 5965 - DNA, 423 bp, Saccharomyces pastorianus
atgtggaaacagagcgtgtacagatggaccagagtgagagcaggtgctggtagtgcttgcagtggccgattgagtgcaatttggctcgggaggaaaaacctgtccacggcaacattttctttgccgaaagtgagaaatataggtatcattgcccacatcgatgctggaaagactacaacgacagagaggatgctttattatgccggagtcttgaaacacattggggatgtggacactggcgacaccatgacagattttttggagcaagaaagatcacgaggtatcaccattcaaagtgctgcaatttcattcccctggagagattcctttacagtgaatctgattgatacgccaggccacatagactttacattcgaagtgatcagggcgttgaaggttattgattcatgcggggatcctcta

SEQ ID NO: 5966 - DNA, 594 bp, Saccharomyces pastorianus
atggatcggatgggggcaagtttcaatcatacagtcaaagacttgatgaggaaatttatgcaaggcacaactactaaaccagtattgataaattttccctactatagaaaaccgctaactggcagcgattatgttttccaaggtgtcatcgatgttataaatggaaaaagcttaacatggaaccaggaggatcccgacgcgattgttatcaatgacctggatagtgattctcttgagcaatacaaccgttgtagagaatcaatgatagagactttgactgaatatgacgaagaattggtccaacattttctggaagatgcagaaggcgattattcaaaagtatctgcacaatcgttaaatgcctctataagaaaattaagtgtgcagaataaggtcgtgcccatattatgtggtgcctcattcaaaaatattggtgtacaacctttactggacgctatcgtaactaccttccttcacccatcgaagctcagtgcctcagtaacgatgaatattccagtaagtacgatcctaatggtgtctagtaatacacaaaatattgatgcgttgcatacagtcatacagtcgcagctgtcg

SEQ ID NO: 5967 - DNA, 1716 bp, Saccharomyces pastorianus
atggtattcatagctgtctctatctctgttacagccttccccgtcttatgtcgtattttgaacgaattgcgtttaatcaaggatagagcagggattgttgttcttgcggcaggtataattaacgatatagttggttggattctactagcattgagtattattctttcaagttcagaagggagtccggttaatacagtttacattctgcttatcatattagcgtggtttttaatatatttttttcctttaaagtacttgctaagacggattttaataaaaactcatgaattagacagaagtaaaccctcaccgctagcgacaatgtgcatcctattcatcatgtttatttctgcttatttcacagatataattggagttcaccccatttttggtgccttcatcgccggtctggttgtgcctagagatgatcattatgttgttaaactgacagaaagaatggaagacattccaaatatcgtgttcattccgatttattttgctgttgccggtttgaacgttgatctgactttgctaaaccaaggtagagactgggcttatgtttttgcaacaattggtattgcgatatccactaaacttgtttctggtaccctcatggctaaacttagtggcttgttctggagagaatctgccgctgctggtgttttgatgtcctgtaaaggtatcgttgaaattgttgtcttaactgttggtttgaatgcaggcattatcagtaaaaaagtatttggtatgtttgttctaatggctttagtttctacttttgttactactcctatgacgctgcttgtttatccagattcttaccgagaagaagttcgtaaatacttggcgaaatctgagaaaggtgacgggacagtgagtgtatctaactctgaaagtgttaataaatctgaatttaatacgcaattgaattcattgacagatgttagtaaatatagcattggtgaattggtcactgtaataaatactacagaagcgatttctccgtctttgaaattattgaattacttatctttgggatcttcccctaaagccagaagtagcaggcagaaaaatgagacttccttgagcagaactacaactgctactgattctacatcaaaatcgaacacatttaaaatcaaaaaaatggttcacatttggtctaagagcattgacgatatagacacaaacttaagtgttatagatgaaaattcaggggcatttgaagggatcacagccttaaaagccatccacttacggttgctcactgaacgcactactgatctgttgcaatcatcttccttatataatgacgatccgcattttactgcgaataccgattcattattgcaaattttcgatattttctcacatctaagcaacatgccattttcgagtgaagtaatattctctaccacacgggaaaaagcagcgaatattgcaactataaaaatgaatcctacggatttggtattattgcccttgaagggcgcctcatatgagtatagaggaagcccagttcttactgacgaaaaatatgtaaactttgatcatatttattctcatcttttaggtttgaacgagctatcgtctgcctttttcaaatctattttccagacactcaaagccaattttgctattcaaatttcaaatacttatggcagattgaacgctgatcgtttcaagaaaaagcggtttagtttgttgcttgcaaaa

SEQ ID NO: 5968 - DNA, 297 bp, Saccharomyces pastorianus
atggcaaacactattgggggcgttttatcaggtgtgaacccgttccattacaacgctagttcaccattaacgctattcctctttcaggcatgccttatattattggtgtgcaatttggtccatatccccttttcgatgatgaggcagcctaaggttatctctgaagtcatagcaggtgttattttagggcctaccgtatttggccaaattccaaactacacgaagacaatattcccaccatcatcgatcccggggttgaatttaatcgcgaatttgggtataatattgtttatgttc

SEQ ID NO: 5969 - DNA, 120 bp, Saccharomyces pastorianus
atgtttagggtattcagtgcatttggatcaagaaatactcaatcttctggtgaggaacagccaacaaagacaaagcaaatcttacaacaggccaatgacttcgagattgctttgaaagga

SEQ ID NO: 5970 - DNA, 162 bp, Saccharomyces pastorianus
atgacgctcgtggtgtacctaactctgttttcctccactaggagcctcaggttcttcgtgatcggtatcacatcgttcaagaactgcagatggccatcggtcgactttaatatcgtggcggagacgtcgtcgtacgacagcgtgatctcgtcggaaggatga

SEQ ID NO: 5971 - DNA, 363 bp, Saccharomyces pastorianus
  modified_base (261)..(324): a, c, g, t, unknown, or other
atgaagaattcggtagcaaacgctgtggctacgaatgcgtcgtctgaagtgtccatgtattccggatcattcttggctatcctctgtactttttccacaggcagctggagcgaacaaggcggtggaacccccgtttctatactgctattgttctcattcattgtgttggtctctgcgctgacctctggacgagctgtcttggatagtcctcatttgctctctcttgtgtcttttttttttttttcactctttttccctgcnnnnnnnnnnnnnnnnnnnnnnnnnnnnnnnnnnnnnnnnnnnnnnnnnnnnnnnnnnnnnnnncaagggtatacacagaaatctagggtctgggaaccatga

SEQ ID NO: 5972 - DNA, 759 bp, Saccharomyces pastorianus
atgaaggtaggaataacgaaattctttctcttaatatacctatttttggtcactactgttttagccatcagcaacaaaacgttgctcgaatttgagaatacggaggccaagctggtcaattcgttaagagttctagatactaacccgcgcaactccacgtctgctgacaaaagaatatctgacattgagacgcaaatgaaggaaataaagactatgtacggtagtcattccttcatcctgaagggattgaacggcatactaaaccacaaggtaaacatgctggcaagggaggtacaaattgagggagaaaacagtaccgtatttgaaacggaaacaacaaaagtggccaagggactacatcgggccattcacatatctcccttcaagtacataaaaaagttcaagacaatctcgactgagaagttggagcgtattctgaaaaaatacgatcaggtttccaaaaaggatggtgacttgacggaagaccaaaagaaaaagaaggaggtgctagcgcgagtcagcagagttgtagccgcaacaacgattgaggcaggcttggcgcaaggtgtagtcgatttgtgtatgacagtgacgaccagcctctgtttgatatcagtccagtataggaggcctagggtttatcatttggttaatgatcgtataccaagctttgacttaggaacctctttcttagcttcgttttccgccacttcagtaatttgtttagtctcggactgttgtatatgtgtaatcttctaa

SEQ ID NO: 5973 - DNA, 150 bp, Saccharomyces pastorianus
atgggagaaattatccctcgaagtctaccagcaacatatttcactggatcccatttcatatcttgtttcttctgtaagtctgtgaccttgctaagcgcagtattcttgaaagaaactaccactgcacgattaactgaatcacctctttga

SEQ ID NO: 5974 - DNA, 1371 bp, Saccharomyces pastorianus
atgtcacttagattgccacaaaatcccaacgcgggattgtttaaacaaggctacaatagttactctaacgccgatggccaaattattaaatcaattgcggccattcgcgaattacatcaaatgtgtttgacttctatgggaccctgtggtagaaacaagatcattgttaaccatctcggtaaaatcattattaccaacgacgcggccaccatgctaagagaactagatattgtccatcctgcagtgaaagtcctcgtaatggcgactgaacaacagaagatcgacatgggagacggtacaaatttagtcatgattttggctggcgaactattaaatgtgtccgaaaaactgatttcaatgggcttgtctgccgttgagattattcaaggttataatatggcaaggaagtttactttgaaagaactagacgaaatggttgttggtgaaattactgacaagaatgataaaaacgaacttttgaaaatgattaaaccagtcatctcctccaaaaagtacggatctgaagacatattgagtgaacttgtttctgaagctgtatctcacgttttaccagttgctcagcaagctggagaaattccttattttaatgttgattctatcagagtagtaaagattatgggtggatcgctttccaattctaccgtcatcaaaggtatggttttcaatcgtgagcctgaaggccatgtaaaatcattatccgaagataaaaagcataaagttgcagttttcacttgtccgcttgacatagccaatactgaaacgaaaggcactgttttattacataatgcacaagaaatgctcgatttttctaagggcgaggaaaagcaaatagatgccatgatgaaagagattgccgacatgggcgtagaatgcattgttgcaggtgctggtgttggtgaattggcgttacattatttgaatagatacggtatactagtcttgaaggtaccaagcaaattcgaattaagaagattatgtcgcgtttgtggggccactccattgcctagattaggtgcgccaactccagaagaattaggtttagtggaaactgttaagacaatggagataggtggtgatagagtaactgtgttcaaacaagagcaaggtgaaatttcaagaacatctactatcattttaagaggtgccacacagaataatttggatgatattgaaagagccattgatgatggtgttgcagccgtcaagggactaatgaagccatcaggcggtaagttgttgcctggtgctggtgctaccgaaattgaattgatttctaggataactaagtatggtgaacgaacacctggattgctacagttagctataaaacagtttgccgtgggcttttga

SEQ ID NO: 5975 - DNA, 1773 bp, Saccharomyces pastorianus
atgtcagaactctttggagtattgaaatctaatgctggcagaattattttgaaggacccctccgccacttctaaagatgttaaagcatatatagattcagttatcaatacctgtaagaatgggagtattacaaagaaagcagaactggacgaaatcactgttgatggtttagacgccaatcaagtttggtggcaggtcaaactagttcttgatagtattgatggtgatctaattcaaggaattcaagaactcaaagatgttgtcacgccttctcacaatctctctgatggtagcaccctgaactcatcatccggggaagaaagtgaactagaggaggcagaaagtgttttcaaagaaaagcagatgctctctgctgatgtttctgagattgaggagcagagtaatgatagtctttccgagaacgatgaagaacctagtatggatgacgaaaaaaccagtgcagaggcagctagagaagaatttgcggaggaaaaaagaatttcttctgggcaagatgaaaggcattcttcacccgatccttatggtatcaatgataagtttttcgatctcgaaaagttcaatagggatactttagctgcagaagattctaacgaagcttctgaggggagtgaggatgaagatatagattattttcaagatatgccttcagatgacgaggaggaggaggctatttattatgaagacttttttgacaaacccacaaaagaacctgtgaagaagcactctgacgtaaaagattcaaaagaagatgaagaattggatgaaaaagagcatgattctgccatggataaagtgaaattagacttatttgcggatgaggaagatgaaccgaatgctgagggagtgggagaagccagtgacaagaacttatctagtttcgaaaagcaacaaatagagattagaaaacagatagaacaattggaaaacgaagcggttgccgagaagaaatggtctttgaagggtgaagtaaaggcaaaggatcgtcccgaagatgcattgctcactgaggaacttgaattcgacagaactgcaaagcctgttcctgttataacaagtgaggtcacagaatcattagaagatatgattagacgaaggatacaggacagtaactttgacgaccttcaaagaagaaccctgttagacatcacacgtaagtctcaacggcctcaatttgaattgagtgatgttaaatcctcgaagtcgttagcagaaatatatgaggatgactacacacgcgctgaagatgaatctgcattaagtgaagagcttcaaaaggcacattccgaaatatcagaactttatgctaacttggtatataaattggatgtgctttcatcagtgcacttcgttcctaagccagcaagtacttctttggaaattagagttgaaacacccactatatcgatggaggatgctcaacctctctatatgtcgaatgcctcttctttggctcctcaagagatatacaatgtcggtaaagcagaaaaggacggagaaattcgcttgaagaatggtgttgcaatgtctaaggaagaattaaccagagaagataaaaacagattgcgcagggctttgaaaagaaaaagatcgaaagctaatttgccaaatgtaaacaaaagatctaaaaggaatgatgttgttgacactttgtcaaaagccaagaatattactgttatcatcaaaagggtgaaaagaaagatgtttccggtaaaacgaagaagagcagatcaggaccagatagcacaaatataa

SEQ ID NO: 5976 - DNA, 1557 bp, Saccharomyces pastorianus
atgcctgctcctcacggtggtgttttacaagacttggtcgctagagatgcgtcaaagaagaaagaactgttagccgaagcccaatcttcagacatcttagtgtggaacttaaccccaagacaactctgtgatattgaattgattttgaatggtgggttttctccactaactggcttcttgaacgaaaatgattactccacagtcgttacagactcgagattagcagacggcacactatggactattcctattacactggacgtcgatgaatcattcgcaaaccaaataaaacctgacacaagaattgccctataccaagatgatgaaattcctattgctatcatctcagtccaggacgtttataagccaaacaagtctatcgaagctgaaaaggtcttcagaggtgatcctgaacatcctgctatcaactacttgtttaacgaagctggtgaatattacgttggtggttcattagaggccattcaattacctcaacattatgactacccaggcttacgtaaaaccccagctcaattgagattggaattccaatcaagacaatgggaccgtgtcgtcgccttccaaactcgtaacccaatgcacagagcccacagagagctgaccgttagagccgctagagaagctaatgctaaggtcttgattcatccagttgtcgggttgactaaaccgggtgatatcgatcaccatacccgtgttcgcgtctaccaagaaatcatcaaacgttatcctaacggtatagccttcttgtccttgttgccattagcaatgagaatgagtggtgacagagaagctgtatggcatgcgattatcagaaaaaattatggtgcttcccacttcatcgttggtagagatcatgcaggcccaggttcgaactccaagggtgtcgatttctatggcccatatgatgcgcaagagttggttgaatcctacaagcatgaattggatatcgaagtggttccatttagaatggtaacctacttaccagatgaagatcgttatgctccaattgaccaaattgacaccacaaagacaaaaactttgaacatctcaggtacagaattaagacgccgcttaagagttggtggtgaaatccctgaatggttttcatatcctgaagtggttaaaatcttgagagagtcaaatccaccaagacccaagcaggggttcgccattgtcctaggtgagtccctaaccgtttcacgtgaacaattatcgatcgccttattatcaacattcttacaattcggtggtggcagatactataagatcttcgagcatgacaataaaactgaattactgtctttgattccagattttattggttctggttctggtttaattattccaaaccaatgggaaagtgaaaaggactctattgctggcaaacaaaacatttacctattagactcatctagctcagctgatatcaagctagaatcaagtaacgaattaatttcacatattttcaaaaagtcgtttatggcagatactataagatcttcgagcatgacaataaaactgaattactgtctttga

SEQ ID NO: 5977 - DNA, 357 bp, Saccharomyces pastorianus
atggcaggcgatgaacttagttatgaggagttgctggatcacattttaaataataaacctatacccaatatcgttgaagtaccaaacgttactctagatgagagtttaagtagttcgccttcactgaaaccaagaacgaggccttgggaaagacagcagcagcagcatcagtccggtaatgatgcccgacagcaatcacaagaggttaaaacaaacgtgcctttggattttgatcaagagagcttggaaaaaatgacctcaccatcaaagctgtctgaatgctacgatatacaatccaagctgggaatgaattttgatgatgatgactacaacagcaacgataaagttgatggctag

SEQ ID NO: 5978 - DNA, 1389 bp, Saccharomyces pastorianus
atggaaacggatgccgaatattgtaggcgcaaagatatacacgacctttccagtgtggtcggtggtgcctgtaatcaaggtgttccgggtgctgactcagacctagttgacagtgagaaggaacaagtggccgattccgtggaagactttcaaccgggttccatacatgccaatggggcctcatcaacagcagctcaggcagcagcgctggccccatcttctcccggcgctggtgatgaaggtggggtgcccgtgcagaagactcccaccaggtttttctcacccagtttgcaaggccaaagaaagaaagtctttttaaagttcgtctttaccaactgcctgctagctattctttgctttacaatttttgttttgttttggggggctctctacaatacagaaaaatatgtgcataaggtcaggctgctggccgtcatccaggagcctcctgtcgtggccctggacagcaacaattcgatggccgtgccatccatctcatccgcactacccaccttcatcggcgaggtgccttgccattgggacgtttacaacgcttccgcgtttcagactagattccacgtgaactcctccgaacagatcaatgacaaggtcatcgatttgatttacgacgaaaaatactggttcgccatcaatattaaacccaatgccacagagactctctttgagtcgctgatcaacgacaccgccccctattttaattccaccctgtttaaccaggtcgtttacgaaagtggtagagacccaacgaatctgaaatccacgatattgccgtttgcccaagaaattgaagaatactacggagccttctatacgttcaactacttaccgcaattcctgactaatataacactgatggataactacaatttgaccagcaacctcacacatattaccgcggcggggaaatacaactacgaatactatgaccacaggccgttcaccgaccgtattgtgttggcgcccacccagatcggtgttatttattgtctgctgttaacctttttccagttcctgttatatggcccattgcacgcagaaatggcaaaagtgctaaggcctgccaacggtataatttaccgtatcgccatgtcatggtctacctttttccttgcatccttattcttttgcacaatttctgccatcttccaagtcgacttcaccaagtctttcggcagaggtggcttcatggtgtattggatgtccacgtggctgtttatgcttgccgctggtggagctaatgaaaacgcggtgatgcttgtcatcaccttgggcccacaattccttggattctgggtcctatcgttcgtcattttaaacatcgctccatccttctttaccactggcagtatacaacaatgttacagtacg

SEQ ID NO: 5979 - DNA, 519 bp, Saccharomyces pastorianus
atgtcgctcacttctccgaccttgagcttgaaggcggcgtcctcgaaactgggctgcatctcgcccctgccgaaccagcccaggtcgccgcccctcttgtacgaagagcagtcggacctctccttagccagcgcctcgaaggagttggtcttggaagcgtcgtccagcctcgtgaccagggtctttagctcgtccgtggcctcttgcttggatatggtgatgttctcggaccggtgcgaagcaggtcttctcgagtcctggtgcttgatgaggatgtgcagacaccttacacgcattgggtggtctttcagatactcgtgcagctgttccttatccgtaccctcgggctcctcccactgcgagtgcttcgtgtccgggttgaagaagtactctcttttcttggacttgctgtacctgacagtccacggcgtgggcaggccggtgctggctgctgcgtcggatggcattgctgtgtggttgctgctgtgtggagagtcgtgtggaggtaaaagctggtag

SEQ ID NO: 5980 - DNA, 435 bp, Saccharomyces pastorianus
atggtctcccagtgttgcagcgagtcgtgctccttagaccgctgcacggcaaacaggatcatcgaggtaaagatcagcttgtcgtgctggtacgcactaacctgcttgtggatgaagttccggccgttgcgcaggttctgcacatggtacgtgatcttggcccgcggatcgccacccttgatgaagtacgagtgcaacgaagtggggaagaagttgagtggcacggtgtacaacgacgctagcagcgattgcgacaccagcgtcccgccaaacgtgcccttggaccctacaggcgctgccggcaggtaccgcgttacaaagctggtaggcgacagcgggacaagctctagtattttctccaggttagacatggccatcttggaaacgctcattgttggtctggttctctcttgttctgtcttggtgtcgtggtag

SEQ ID NO: 5981 - DNA, 207 bp, Saccharomyces pastorianus
atgaataggttagtgttcttgtcgaagccgtccaagcttgctatgagacactggccgtcagtcttgattataacgacccttttattcaggtattccttgagtattggtgacattgagcttggtatctgccttgtccccttgtcttgtctggtcttgtcttgtcttgtcttttccctgcagcctgcgtataggctcatcttaaactag

SEQ ID NO: 5982 - DNA, 1086 bp, Saccharomyces pastorianus
atgaactctttagcaaataacaagattggtggtggggataacgaagttcactcggcgagaaagagaagctatcacgaggaacaaaacgtcaacgaggccagaaagaagcagagagaccaaaatctgctgtcacaagaaagcaatgacggaaacatcgactcggctctattaagtgaaggggctactctaagagggacccaaagccagtatacaggcgggctagcgtctaatcatgatgagaaggaaagtgatgaagatccttccgtagcggaagctgcagtagccgccaccgtcagttacacagacttaattcaacgtcacgaagatgtgtctgacgttcatatgcccaagcaaacaagtactgataacggggacaaggattccatgaatgaaggaagagcaacaaattcgtcaaacgaaggggccaagttgagcgtctctctggaggggatggaatcctcaccaatagagtccacacaagactccaaaaatgacatgctcataccattgcccgaacatgaacgtagacacgaacacgaagaagaggaagaagaggaagaagaggaagaggaggatgatgacggtactggtatgaacctcaagaaggacatgaatatgcagtcgggccgtcgaggaaaaaaacctaccacactggccacgacagaggaatggaaaaagcaaaggaaggattcccacaaagaagtcgaaaggcgtcgccgtgaaaatataaacaccgccatcaatgtcttgagcgatctgctccctgtaagagagtccagcaaggctgcgatactggcacgtgccgcagaatacatccaaaaattgaaagagactgacgaagcgaacattgaaaaatggacattgcagaaattgctaagtgagcagaatgcatcgcagttggccagtgcgaacgagaagctgcaagaagaactggggaacgcatacaaggagattgagtacatgaagcgcatcttacggaaagaaggcatggagtacgaggatatgcacagccataagaaaaaggagaaagaaaggaaggccccggaggtgataacgtccatgaggcttgaaagcacagatacgtag

SEQ ID NO: 5983 - DNA, 4407 bp, Saccharomyces pastorianus
atgcgcgaaactactgtggactctctgctgaaagagatagataacgaaatggaacaaacaaagtgcaatgccatgcagaagactgttgaggggggttcccgtgactggaagctgccattgcaggatattggcgacgagaccatggaaatgctggtaaaacacaacactaggtcgaattctcatgcgacagaaaaggctagtcgcaagggacaatcatcatctaggaagtctgatatctccaatgaaagttttggtttggacctcttgcgtacaaactccgagcttggagagccttcggatacagtgtttcagaaatcacctaaaagttttgccgtcaatggctcaccttgcccaacgagttctcccaaagtcctcaataatttgaaaaatatggcccacgatatagacgacctgacacgcgaagacgaaaaacctgcaagacgtgatagctcttccttgaaattcacattgaaatccactcaaccgctgctctcatatccggagtcgcccactcacagaagttccattgaaatcgaaacaaactacgacgacgaggaagaagaggaagatgcagacgcatatctggcacaatcgcctcaaatattacattctccctcaaggatcccgataacaaacgcggtatctatcaacaagttcaatctcgatttatcgttgggtgccagtgggcttaacaaaaggttggcgtctggtgactctgcagacagtacagaacacgagctggatacaaaaacaatccctgagttaccataccgtatgccatctaccccggaaatgacggctgtcgaggatgaatgccctggattaccatatattgtcaagaaatcgcttctgggatcaaggtcggctacggcttctgtggaagacctaaatatctcaacgagcctcctagaaacgagtgaccgtattgatgctggcatcacgtccaatgcagatgctatcatagagaaggatctagtggaagatttacagtacaatgctaaacacatctatgatgcattcgatgaagagagacttcttggcaaaagttacgaaatgaatcatgatccttcttcccataataacgtcactacgcccaaccagggtgtctctaatgaagctggtaaaagtgctgaacgagagttatcagccgctaatcaggacctctcggaggaaacctccctgttacatactgaatctaaatttggtgatactcaatcaaatgatatgcttactgtagacgacatatacaatactaaagcagatatctcaacatctacaaagccagaggaaagtctagttaatgagaatgaagaaacagtacaagaagatcaaagtatgcaaaaccctcgactgataaataaacacaatgaacaaccaacagctctcaaaaatgatgtggcagaaaaggagtcaatcgaatcaaacgacaaaaatgaatcattcacgaactctgaagatgcaattaaccacgagctcgctcatcttggggagcaacaccttattcagaacgtaacgtattcagaagatagcgaaacacatgacagccaaatagatcttgatcatgtagagactggtacagtaaatggcctaccaaatgggagcaaagatgaaaaaattaaatcatcgttgtcaagtgaacacatgctggcgattcaggataattatggtgaagatagagccgatgaaaaggaagatgaacatgaacatgaacatgaacatgaacacgaacacgaacacgaacacgaacacgaacacgaacacgaacacgaacacgaacacgaacacgaacacgaacacgaacacgaacacgaacatggaaacattcaagaaaagaaagagcaggaacaggttccaattttaccgccattgccaaggtgggaagcaattcaattcagtgagccattcgctgatgaaaacgatacctccaatgattccatggatttaacaagatcgatgaaaccttcagattatatctctatatggcatatacaagaagaagaaataaaatatacttcaccagaatccgttgccaactctcagttttcacaccagtcgtctattaccactgcatccacagttgattgcaagaaggagaatgcttcaacatctttcaaattcaagcccagaatagtaagtagaagtaagatctataatccaaaacatagagtatcgtcgttgaactactatgacagcgaagattacgttttgaacaatagtgaatggaacgcattggatcctatgagaagaaacacaataatctctaaaaagattcaagataatattagggtacaaaagcgtctgactccatttctaagtcctaccatcatggaatctcaagataaaaactccaacttccaaaaccatatttttgaagaagaacaggatgaaaaagatgaacgggagaaggaagaacaggatgaaaaagaacaggatgaagaggctgctctgtcaaatattcaactgagtgagcaagatattacaaccaacattaatccagttggacaagatttttcaataaatactcaagagggacccgaaacttctgttcgtgaaataaagaacgtaggcgatataagtttcgataaaggtgatttgctgtctctatccgttggtgaggaattgggccaggattttgctaattttctagacgcattagaccacgactctacatcattcaatcatgcgctaaatgaggcagccggtttcaacagggatgattcgaagaaaagcttcagttctctttgggagaaaaattatgaactgaaacctcccccttcagtaagaaatcaatctattgcgccagatgtactccaaaaactattggaatcagatgctaaaagtgacactgaattgaaaagcgataacgaagaagaagtcaatgtggtacatatgggtctaggtattgggacgctgaaaacacccgtcaaagatgtatcggttgcattagcagcaagcattagagggtacgaagcaagttttagcgactccgattctcattttggagagatgatcaatagtgacgttatgactctaaacatgtttgatgattttgaagaggacgaaatgagtcctggcactccaactggtggcataagcccagtcaagcgccatattagtagcccatttaaggtgatcaaggctggaaataaatcaaattgtgacgaaataaatgtcaagactgaagaagagccagagacagccaagctaacgtgtactgacagcttagagtcagctacacctccgccagtaatagaaacaaaagaggaaatggagacccaacttgaaggaccaggggagaccgaggaagaatttccagatttgggaacactttatttaactgtgaagggaatttctacgcttgcgctgtacggtaccaagagccacagagccacattttccattgtttttgataatggggaaaatgtcatccagacttcctgggaatcacttccatatgatggtaatattaggattaataaagagttcgaattacctattgacttcatgaagaacaaagactcttcctcagtctcttctggagaaagcagttataaaaaatgtactatcacactgaaatgtaaatatgcgaaagccaagcatgaactagtagaagtagtagatagggtaccagtcggaaaaagtttctttggtaagacaaagtacaaatcggagaagagatatgtgcaaaaaacagcaaaacaagatgaatgggattacttgtttgcacaagatggttcgtttgcccgttgtgagtttgaaattgatgaagagtttttaaataatgctgcattcagtaatagtcatatgcgctatgatatgataaataaatggagccgtattgcagatggaattggcggctcagctagatttcatgaactaccacgcaaaccgcctcataaagtagcttcgttggatgtggaagcatgcttcttaaaaagaacttccgcttttgaacaatttcccaaaacattgtcattagtaaacaagattatttccaagtacaagttgcaaaaaaacatttacaaagaagggtacttgttgcaggatggtggtgatttaaacggaaagatagaaagtagattttttaaactacatggttcgcaattgtctggctatcatgaaatctcgaagaaagctaagatcgacattaatctgttaaaggttacggaagtgctatgcaacgaagacatccaaaccaaagatggagaacgaaggaatttcacagagtgggtattgtttaacgaatgtttccagctggtctttgatgatggcgaaaggatcacattcaatgcagactgctccaatgaggagaaaaacgattggtataataagttgaaggaagttgttgagttaaatgccttccaccaaccttgggtaaaaaattttggcgaaatactggctacatag

SEQ ID NO: 5984 - DNA, 315 bp, Saccharomyces pastorianus
atgcaactgcctggattaattcaaattctatcgatgaggacgaggatggtatgcctcacgctactgatgtatcagaccgactctatgaggtatcgcttagctagcgcacgtttgccatctcaccttgcgggttctggtgcggatcctctccgcagtataggcgtgttccatacgtcggctgtccttactgctctgcctaccagaacagtttacacaggaggaaatgcaggtggtgacccagcactaaaagaacaaatctacgtgggtgttccttttccccactgcatagccgttatgccaaaatttggttggtaa

SEQ ID NO: 5985 - DNA, 255 bp, Saccharomyces pastorianus
atggcctcgagccattcgtcgacctggtcctctgccaagggctcgttggccggtgctcgcagcgaagactggaaacgagcagtcccgagaccgctctgccacaatagacgtggcctgcacaacaaatgtctcctcgcagaatgcagcattgtgtgtgtatgctctttgcctttattgggtgatgcccgttggtggatagcatgtatatatatatatatatatatatgtactataccacgcaaattgaacctctga

SEQ ID NO: 5986 - DNA, 474 bp, Saccharomyces pastorianus
atggcgacgagctcttcgcccagacgcacggcaaagtcgctggacacccgctggttggcgctctgcacgatccagttccaagcaattctgtttctctgtcttttgttcaacggcacggggatgaccgaggccttggccacacccgtgttaaaagtcttggtgagcatgagaggggccaagtcgtccagcgccctttccagagcctggatcggatcctgccgggtctggcagtacaccaggtacaacgccttagacagcatggactgcgctttctccttctttccgtggcgcatgatcatgttggtgatgtggtccagcgtcgggtccttgcgtggagggatgggcacggacttcaacgcctcccactgctccagctgctccgtggtgggcctggtcttggcctctgtgtgcgggccatgcaagaggtctatcttggattggcctgggggcgccagcgaagtttccggcaggtag

SEQ ID NO: 5987 - DNA, 591 bp, Saccharomyces pastorianus
atggcacaagcctttaatactacaaatgttacttttttcagagtagcatttttattcacgatcgcgtttttttgtttgaagaatgttagttcgattttgcaaaattcatatttcctagtcttgacagaagctatgaacttgccacaattaacattgtcacgttacaacggccaactgggtctttttgctcttctttttgtcctaaacggtatccacgatctgattccattgttagaaaacaatgaaaaatacttccaatctattgttccgctaagattattattttttttcatcttaacaggtgtttcatatctttgggaatcaaatttatacatccacaacaacgctgttttcatctactgttttgtagaggtttggataaatttccttttgtataatgctgttagggaagaaaaaaatgaacaattcaaaagagcgaatcaatttatgcttgctgaagaggacgttgaagaaccccaaccatttgttgtgaaaacagaaacgactgaaattatcgaaataaccaatgaagaagaagaagagggtgatgatgatgatggtgatgatgttgatgaaaaagatggagaataa

SEQ ID NO: 5988 - DNA, 396 bp, Saccharomyces pastorianus
atgaagacaaacggaaaaagtgccagcaacacgaatgaaaatgtccacatttatttcgagcggccgcgggtcatatgcataatgcaagcgccccttggcccaacgcgactggcgacctccgaaacgggccgttgctttcaaaggttatttcccgcaagggaagttgcgcgtctagttgtctattgttgccgtgaccgcgtcaccgcctcgcagagaatctgcgcagtgcaacgccatgacgcaggatctgagtattgcgactttccccctgtagtcgccgccctagtagtcgtcgttcggagtgactatgcgggttgtccttgctgtagcgattgtcgctgcacctgctaccgttactgctgctgctgctgctgctgctgctgtggcggccagtaa

SEQ ID NO: 5989 - DNA, 195 bp, Saccharomyces pastorianus
atgaataaagaaaacgagtctactcgaatgattattaattcacacttgtggggtcctcaagattcttgtgggactttcgaaaagaagatggaatatcatgcgaatgctgctaaaagtgatgcggttatattcttggacagcctctatcatgcagccagtgcaaatcatgatatagaagatagaatcaatgggtaa

SEQ ID NO: 5990 - DNA, 111 bp, Saccharomyces pastorianus
atgttctgtgacatgggagaaaactttctgaatgaacagaattatttattggctggaaacgtgatcaaaaaatgctctagcgattttcaactgaactccagcattatctag

SEQ ID NO: 5991 - DNA, 945 bp, Saccharomyces pastorianus
atggcagaacaggtcaaaataatatacggaagctttcctcttaatcttttgcaacggtcagatatcgatgagatatcaactattttggagaaagcaggagtaaaagatatagatactgcacggatctacccagatagcgaaaaaatccttggcgaattccgggttccaagtagatttactattcatacaaaggctagcggattttcagctggatgtttaacaaaagataacattaataagtctattgaagagtcgttgagcctgctaggcgttccaaatgttgaaacatattttttgcactcgccagaccctgaaactcctattgaagaaactctcggcgcaataaactctctgtatgaacaaggtaaattcaaaaagtttgggttatcaaacttcgcaacggaggacgtgaagcgcatccacgaatatgcaaaaagcaagaattacgtcttaccaacagtgtatcaaggaaactataacgcgttctcacgggcgattgaggatgatctttttcccttgttaagagagttgcatatttctttctatgcgtattcaccaatcgcaggagggttcttggcgaaaacgccggaacagatattgggggggaaatcaggccggttcgacaagagcaatcatattgggcagctgtatttgaaactttataacaggcctgctcttatgaaagggctggaagaatggaacaaactcgccgagaagacaggtatatctaggttcagtttagcttacagatggattgctcacaactcttctctaaagagggaatttggtgacgctgttatcattggaggacggtctcctagtcaggtttctggtgcgttggagtccatttccgaggggcctttagaccctgaaacggtaaagaaaatcgatgaaatttggcagctagttaaagatgaagcaccattaaataattacgcttactag

SEQ ID NO: 5992 - DNA, 1206 bp, Saccharomyces pastorianus
atgcttctgtctgaaatagctcccaaggatctgagaggtggacttatttcattataccaattgaacatgacctttgggattttcctaggctactgtagtgtttacggaacacgtaaatacgacaatactgcacaatggagaatacctattgggttatgctttttatgggccctaattatcatcattggtatgttaatggttccagagtcaccaagatatctaatcgaatccgaaagacacgaggaggcacgtacttccattgccaagataaacaaggtttcaccagaagatccatgggtacatggagaagcagaagaaattattgcaggtgtgcttgctcagagggaacaaggggaggcctcatggaaggagcttctgtcggtgaaaaccaaagttttccggcgtttgattaccgggatacttgtgcaaacgttcttgcaacttaccggtgaaaactactttttcttctacggaactaccattttcaagtctgttggacttacagatgggttcgaaacttcaatcattctgggtacagtgaatttcttctctactattctcgctgttatgggtgtagacaacatcggtcgtcgtaaatgtcttctattcggagcagccgggatgatggcctgtatggtcatattcgcaagtgttggggtgaaatgtctttaccccaatggcaatgacggcccctcttccaagggagccggtaatgctatgatcgtgttcacctgtttttacatattttgttttgctacaacatgggcacctgtcgcttatatcgtggttgccgagtcgttcccctcaaagtttaaatctagagctatgtcgatttcaactgcgttcaactggttatggcagtttttgattggtttctttacaccatttatcactggatccatcaatttctattacggttacgtgttcgtgggatgcttggtcgctatgtttttctacatcttctttttcttgccagaaacaattggattgtctttggaggaaatccagcaattgtatgaagaaggcgtaaaaccatggaagtctgcatcttgggttccaccttcaagaaggggtgacacctccgaagaggcccaggttgaaaagaaagactggaagaagtttttgaagatctcgaaggggtctttcaacttgcattcttcaccttggaagagcaacattgctatcaacgttaaagcacctcgatag

SEQ ID NO: 5993 - DNA, 1158 bp, Saccharomyces pastorianus
atgggaacaactttggctacaaactgtgctttagaaagaaacggcgaacgttgtgcctttattactacaaaaggattcaaagactctttgttgatcggagatcaaactagacctgatattttcaacttgaatatcaaaaaagtgtcgcctttatacgataccgtagtcgaaatagaagaaagagttacattggaagatttctcagaagacccttactttatcaaatcaactcgtaatgacaaagagggaattttggaaggtaatagtggcgaaatggtacggataattaaaacaccggatgagtcaagtgtaaaatctgttctacaagtactttacgctagtggaatcaagtccattgcagtagcgtttctgcattcatacacttttccagatcacgaacgaattgttgggaatattgccaaacagattgggtttcaccatgtttcgttatcttctgaagtttctccgatgataaaattcctaccgagagctcacagtgctgttgcagatgcttaccttacgccagtaatcaaaaaatatttaagtagcatttccgcaggattgtgccacgctgaaaatacccatattcaatttatgcaatccgatggtggactagtagacggggaaagattttccggtttgaaatcaatactatctggccctgcaggtggtgtcataggttattctagtacgtgctttaataaaaaaaataatattcccttgatcggttttgatatggggggcacatccactgacgtaagtaggtatggtgaggggaggctagaacacgttttcgagaccactaccgcaggaatcatcatacaatctcctcaacttgacattcacactgtagctgctggagggagttctattttattatggaagaatggattatttaaagttggtcctgattcagcagctgcagatccaggacctgcagcatatagaaagggaggacctttaactatcacggacgcaaatctctttttaggacgtttagttcctgaattctttccaaaaatttttggacccaatgaagatgaatctcttgatttagaaaccacaactttgaaatttaggcagctgactgatgaaatcgataaagacctcgattcaaatttggcaccggaagaggtcgcgtacggcttcctcaagtag

SEQ ID NO: 5994 - DNA, 3495 bp, Saccharomyces pastorianus
atgctacagcgaatatcatattccctccatcgcaggctcctgtctggtctgctgcgtgccaagcactacccgctcagacgggttctattcccactcatcctgctacagatcatcatcatagcgttcatttggtcgaactcacctcaacgcatcgcggccgatccagacaacggctatctacagagcgacgacgacgactcgtggtatggccgcgtggcatcttcgttcgccttaaaagataaccgcgagatccagaccgccaagaagctgtacgagaacctcaagtttagcacccagcccagatgggccagcgagtacacactgcagaatgacctgctcaccgtcaaggtgggcccgcaaaagggcaccaagctctcatccgtcgacgatttgaagttctacgacttcgacccgcgactcacatggtccgtcattctgaaccatttggagaacagcaacgccggccaggaaaaacttcccttttcctggtacgactggacaagcttccatgaactgaacaagctcatctccattgaaaaaaccgtcttgccctgtaacttcctcttccagtccgccttcgacaaggagtctcttgactccatcgagaaagagctgagcgaaccgctgttcctgtacgatagactcaagtacaaccaaaaactgtggtacagggccgccagaaaacttgacagaattaaagaaaccaaggagctggacaagcattgttccaagctgttcaccccaaagggcaagggctcccctaaggacttgaagttcaacacgcagttccgtataaaggagctctacgacaaggtcaggcccgaagtttaccaactgcaggccagaaactacattttaacctcgcagtcgcatccgctgtccatctcaatcatcgagtcggacaacgccacctaccaggtgcccttgcaaaccgacaagtctaagaatttggtgcaatctggcctcctgcagaaatacatcgcagacaacgtgaactccaccaacaagcggaaaaagaaacagaaccaggacgtcgagttcaaccacaactcgctctttcagaaattcgtctcggacgaacaactgaactcccgttacaagctcgacatgaaggaaacagacaaatccactttcgacaaggacttggtctacctgtctccctctgacttcaggttcgatgcctccgagaaaatcgaagatttagaatcactcaagatgctccacccgaacgagttttcagctcacaacgaaaactatttgaacagtttgaaacgctctataacaacgaatcctgccttgcaaaaaaaattcttctacgaggccggcggtgtcaaacagtataaaggtatggggttccatcgtgacaaacgattctttaacggtgataccctgatcaacgacaaacaggaataccaggcaaggttaaactcgatgatcaggactttccagaaacttacaaaggccaacggtatcgtatcttggctgtctcatggtacgctgtacggctacctctataatgggctggctttcccctgggacaacgatttcgatctgcaaatgcctatcaagcatctgcaattgctcagtcaatactttaaccaatctctgatcttggaagatccaagagagggcaacggccgttatttcctcgacgtcagcgactccttaacggtgaggatcaacggtaacggtaaaaacaacattgacgcaagattcatcgatgtggacaccggtctatatatcgacatcaccgggttggccagtacttccgcccccagtagagactatttgaactcatacatcgaagaacgcttgaaagaggaagagttggacattaaacacattccggaatcagacggcgagaccgccaatgtgcccaagcaattaaatgatggattggtcaatatggccattctaaacatcagtgaactgaacgattatatcacaggcgaggagaataaaaaacataaaagagtccccaccgataccaatttgaaagaccttttgaaaaaggaactggaggaattgcctaactccaagacaatcgaaaataaactgaatccaaaacaaagatattacatcaatgacaaactcagactttataattgtagaaacaatcattttaattctttcgacgaattgtctcctctaatcaatactgtgttccacggtgtacctgcgttgatcccccacagacacaccaattgtttgcataacgagtatcacgtccctgatagatatgccttcgactccttcaagaatacagcttacctgcccgaatttagattctggttcgattatgacggcctaaagaaatgcagtaatatcaattcgtggtatcctaacatccccagtatcaattcatggaaccctaacctcttaaaggaaatttctaccaccaaattcgaatctaaacttttcgactacaataaggtctctgaatactcttttaaaaacttgtctatgaatgacgttcgtttgatttatagtaacatcccaaaatcagggtttatcgaggtcttcaccaacttgtacaattcattcaatgtcactgcatatagacaaaaggaattagaaattcaatactgtcaaaacctgacattcatcgaaagaaaaaagctcttacaccaattgcggattaacgtcgctcccaaattaagctctcctgcaaaggatccgtttattttcagctacgaaaaagccatgtggagaaagttatcagaatccatgaaccagactgtactagaccaagtcactaatatggttcacgaagaatacgttggtaaaattattcacttgtctgagggcttgaaatgcaagaactttacgcttttcaatattacattagatggaacgggctcacttgtaaacgataatactgatgactttatccccgttagcgacgctaatgtaaatccagtagattttaaatctggtttaaattttaccagtaacacctttttggatctgaactccttcgggctcgatctttttgctccaactttatccgatgccaataggaaaggtgttttgatgtttgataaagatcctattatcatatacgaagatattgcgtatgctaaagtagttgagaaaagaaagaagaaggagaaggaagataagaagaagaaagaagaagaggagaagaagaagaaaaagaaggaagaagaggagaagaagaagaaggaggaagaggaaaagaagaaaaaggaggaagaggaaaagaagaagaaggaagaggaaaataagaagaaggaggaagagggggaaaataataaagaggaagacaagaagaaagaggaagaggggaaaaacaatgaggaagagaaggagggaaaaaataataaagaggaagaagataagaagaagaagacaagaagaagaaagaggaagaagacaagaacggaaatcaatgaacactctcattcccaaagcttccacaattacacatttgcattatatatttattaccttcattacttgactccattgtga

SEQ ID NO: 5995 - DNA, 543 bp, Saccharomyces pastorianus
atggctaaaggattcaagttgaagcagttgctatcgcaccacaaagaagttcaaaaagctgataagcttgagaatgacttaaagatgaagaaatcccaacaactgaaaaaagaagagccaaccgttatctcagccactgatttggaaaaaatcgaagagcaaaagaagaacgctgttgctaagaaagaaccagctgctgatgtcgaagaataccaaagtcaagccatgtcaaagaaagataaaagaaaattgaagaaagaattgaagaagatgcaagaagagaaggcaccagaggttcagaaggatgcctccgaagaagaagaggaagaagaggaagaggacaagaaggaagactcgatcttgaaaagttggctaagagtgattccgagtctgaagatgagtctgaagaagacgaggaagaggaaatcgtcgctgaagaagaagaaaaagaagaagaagaagaggaggaggaagatcaagacgttccattgtccgatgttgaaattgattctgatgcagacattgttccacatcataaactaa

SEQ ID NO: 5996 - DNA, 348 bp, Saccharomyces pastorianus
atgaagcacgctttcgaaagggtacaactgccatggaaaaagcattccttccaagagcaccaaagtatcacagccacaaccaatacagatgaacagatcaaggacatatatgatgataccgagagagaattagctttttacaagcaatcattaaatgctgtcgtagttgcacgtgaagaattgaaacgactaaaggtcccattcaagagaccattggactattttgctgaaatggttaaaagcgacgagcacatggacaagatcaagggtaagctggtttatgaggctagtgacaagaaggcacgcgaagacgctagaagacaaacgacaattaaagaagttcggtaa

SEQ ID NO: 5997 - DNA, 120 bp, Saccharomyces pastorianus
atgaggctagtgacaagaaggcacgcgaagacgctagaagacaaacgacaattaaagaagttcggtaagcaagtccaacatgccactctgcagaaacgtcaactggaaaagagagacaca

SEQ ID NO: 5998 - DNA, 348 bp, Saccharomyces pastorianus
atgaccaaattacgaattgctgttcagggatgttgtcacggtcaactgaaccagatatacaaagaagtgtcacgactccacgcaaagactcccattgatttattgattattttaggagatttccaaagcatccgtaattctcaagatttcaaatcaataagcatacctcccaaataccaaaggtttggtgatttcatatcatactacaacaatgaactcgaagccccagttcctacaatttttattggcggcaaccatgagtcaatgagacacttaatgcttctaccacatggtggttatgtagcaaaaaacatttactatctgggttattctaacgttatatggtta

SEQ ID NO: 5999 - DNA, 750 bp, Saccharomyces pastorianus
atgctcacgtcgagcgtaccgccattattagttatagtgtgcggcgcggcaggcactgcaccattcgccgattcgctgtttacctgcagtggtgggttcttcagcagaccgccggcagtcccacttgatttcctgcttctgcttctgctcccgctgttgctgccactaccactgccactgccactaccactgccactgccactaccatccgttaagagtgaatcagacgcgtgcgaggttcctgtgccgcctcccgtgactgcattgccgttgttgcccttcatatctgcgatgcttacacgtcttatgctattcgccatccctttttcttctctcttctctctatctcttctaatcattcattgttcttctacgatagcctcacgagcacaatattgcgggaaaaagtggtggtgcgcttgccgggtagcggcgggcagtaggttatcaaagcctaatgataacggctatagcaactatccaaaacgaaccaccagcaaagcagttctagacgtactactttggcctcggaacacaggtccgagagtagggataagttgtcataaccgcctggcgccagatgccacgctcgccgatgattgtagtggggtcacggctatgagggcggggtggaccaatcacagcgcagaacgcggcgccgagcaaccgcagaaccaagggatccgggcctctgccattggttgtttgtttgcgcaaacccgttatatattctgggatcttcgaccttga

SEQ ID NO: 6000 - DNA, 990 bp, Saccharomyces pastorianus
atgccaccaaaagagaactgggaaaaatataaggcgcctttggaagacgatgacaaaaaaacagatgatgacaagattgtacccttaacagaaggcgacattcaagtgctgaaatcatacggtgctgcaccatacgcagctaaattaaagcaaacagaaaatgacctaaaggacattgaagccaggatcaaggaaaaggccggtgtcaaggaaagtgatacggggttggcaccttcccatctttgggatattatgggtgatagacaaagacttggtgaagaacatcctttacaagtggctcgttgcacgaaaatcattaagggtaatggggagaatgatgactccacgacgaataacaataacgatattaatagcagcaacaataacaacagtaatagtaatcaagagtctgcagatgcagatgaagatgacgaagatgctaagtacgtgattaacctaaaacaaattgcgaagtttgttgtcgggctgggtgaacgtgtttctccaacagatatagaagaaggtatgcgtgtgggtgttgacagatcgaaatacaatattgaacttccattacctccaagaatcgatccatcggtaaccatgatgactgtcgaagaaaagcccgatgtcacttatagcgatgttggtggttgtaaagaccaaatcgaaaaactaagggaagtcgtcgaactgcccttattatctccagaaaggtttgccgctttaggtatcgatcctccaaagggtatattgttatatggtcctcctggtaccggtaagacattatgtgctcgtgctgtcgctaatagaactgacgctactttcatcagagtcatcggttccgaattagtacaaaagtacgttggtgagggtgctcgtatggtcagagaattattcgaaatggcacgtaccaagaaggcatgcattatattcttcgatgaaattgacgctgttggtggtgctcgtttcgatgacggtgcagggtggtga

SEQ ID NO: 6001 - DNA, 372 bp, Saccharomyces pastorianus
atgtccgatgtgtccggattttccatgagttctagtgccattgcacgtacagagaccatgacagtgcttgacgaccaatacgaccaaatcatcaacggctacgataactatgaagaagaactagaggaggacgaagaacaaacttaccaaccgtttgacatgacgacggagagatctgatttcgaatcaatgctcgatgatttcttggacaattacgaactggaaagcggtggccgtaagctagctaagaaggataaagaaattgacagactaaaggaagcggcagacgaggtgagtaagggtaaactgtccctaagaagaaatcgtgagagacaggaaaagaagaagctggaaaaagtaccaacacgctaa

SEQ ID NO: 6002 - DNA, 405 bp, Saccharomyces pastorianus
atgaaccctgcactaagagaagtcttggaagcattagaagatgaagcatatgttgttaatgacgatattgtagttgaagaccccaggaaatctaatgctgagaaaagggcaggagccaagaaggatgatgatgacgcagaagatgatatttttgcccagcttttaggaagcggtgaagcgggagatccagatgagtttgaagacgaatttgatgaatgggatatcgataatgtagagaattttgaagatgaaaattacgttgaagaaatggcacaatttgataatattgaaaacctggaagacttggggaatatcgattatcaagccgatgtcagaagattccaaaagggcaaatccactttggagaagctaaattcggacgacgagttttccatgcaggtttag

SEQ ID NO: 6003 - DNA, 576 bp, Saccharomyces pastorianus
atgtgtaacttgcaaccaacgttgctacactccctcgatattgcgtttcgtacaaattcatcattagacccatccaataccgcaaacggtatagtgtgcacttttttttttgaatattcgtacgtaattagagataaagcatcacataagagcttctcgtcgcttatcccgacgttggtaatagcacaacaaattttgttttggcgaggaatcaagtttgcaggatcccatttgccacctagtccggtttctataatgcaccactggcaacatttcttggcgaaatatacgaatgctatacttgttagcagctcaatggtgttacactgtaaatttaaagattcgtctagttttataaggctgttcgcaatctcagaatactctttcaaagaaatggattcattgttaacgctgatagcttctctatcgttaagcaagaaagaagtagtatatctaccaaccaaaaccttctgccgctgtggttccgtaccctgtaatatggatgttaaaaatgtagacactgtttccttaccatttgttcctgctatatgtattattttcaaactgctcatatag

SEQ ID NO: 6004 - DNA, 741 bp, Saccharomyces pastorianus
atgttttggaaaaaggatccaagcgttacttgggaaagaaaacatatcaacaacattgactttagctatctgaatgtagcaataattggcggtactggtggaattggacgcgccataagtagagagttggcgcaacgggatgccaaggttactgtcgtcgggcaaacgttcaaggacgaagacttggctgacaagattaagtttgtcaaggctgacttgagcttagtatcagaatgtaagcgtatttctcacagcgatgagattccttacgagaagctgacacatttgattttcactactggtatcattgcttcacgccaaagacaagctacaagtgagggattagagaaggacatggcggtgagttatttgagtagatatattatattccatgacgttgccaagcgactaggcaccaatagaacgaaaaaagatgacttgccaaaagtattcatcgccgggttcccaggcaatggccaactgggggacccagatgatttgaactctgatgagaaaaattacagtgcctatgccacacacacaaacacggtagctgccaatgaatgcttggttctcgacgctacggacaggtatacgaacatagacacttttggtttgaacccgggcataatcaaaacgaatatccgcagtaatctccttggcagcaacacctacatcgccgcattgcagaatggatcattagttggactttccaaagtgcagagacgtatgccaaaatga

SEQ ID NO: 6005 - DNA, 213 bp, Saccharomyces pastorianus
atgatctgtactttgattgtaagccctgccattgaatctcgcagcgggacaatgttcagtaacaagggagatgccattttgcccacgcctggtttgacgaaaaatgttgtcgagaagttcatggaaaattcggaactgttggtggaaaaagctctgcagaatcaaagccctcccacctccagtaacgaaggaatatatacgggtagtttataa

SEQ ID NO: 6006 - DNA, 213 bp, Saccharomyces pastorianus
atgaaaatgcggcatcccaaatatactggagcagcgcagagcaatgtgcccagaccccaagatgccatctctgtcaaaattactttgacaataggaagccatgcaggcgatgaatccaacggtcacacgacacggcgtgccaagcttgtggaaagaaatcttcgcatccaaagcatctgggccaccaaaacgcgtacaagcatacgcttttaa

SEQ ID NO: 6007 - DNA, 1440 bp, Saccharomyces pastorianus
atgagagagcaaaaaccagaaaaaagagaggtaagactaacagtgatctttagtgctcatattaaaataagggttacaaggacggtgaaaagtggcaaagagagcgtgatgacggacggaaaagcaaactcagttcagaatatgaacggaaaacagggagctaacttggcctcatctttgcctactacacaagtaccggtttcgatattgactaacaaggagaaaagcaaaaaccttcacgatgagtcaaatgtggaaggatctaacaacaacgacgatcaatcgaggtctaattctaatagaagaaatatttataaaaacgactttagtacgaatttgagagacttttgttttgctgatttgaaacagagtagcgaaagaaccagagatggccatgatatatatgttaacacgaatgtgccatcgaataacggccagcaaaatagcttctcaccttctttgccttctgctgtttcattcacggtgccagaggtggaaagaatgcctcatcatagatattcaatttcgaataaacccgggaaacagcaaatgcagcaacaagagcaacaacaaaaggaacaactacaggagaaactgcgtcaagaaaaacaacaagagaaagaggtgaagcaaatacaagaagaagtgcagaaaaaacaaattgaaagacaacaactaatagaaaaaaaggaaaggatagcgaatgtcatatttaaggagaagacaaccaaagacgatgggaactgtaataaaactcccgtaccagatggagcagacaaatgtgacgatgaagtggactcaccttctatggagaaaaattctatcgttcacatgcctggtgattttatttatttcaatcctaagcccaacgcttctaaaccgatggacgccaaggcggcacaattagtggctaacagcagctctatgcataaaaataaggaggttattgcaccacccacgggaccacgtgtgccctttacagagtttttccaaaaggaggacgacaaaaagttccatatcttgattggcgccacggggtcagttgctacaataaaagtgcccttaattattgacaagttattcaagatatacgggccggagaaaatttcgattcagttgatagtgacaaagcccgcagaacattttttgagagggctaaagatgtctacgcacgtcaaaatctggagggaggaagatgcatggatatttgatactgtaaacaagaatgacgctaacctaaatctgaaccttatattacatcatgaactgagaaaatgggccgatatttttctaatcgcgcccttgtctgccaacacgttggctaagttggccaatggtatatgcaacaacctgttaacttctgtgatgagagattggtcaccgttgacaccagttttgattgcacctgcaatgacacttttatgtacatcaaccccatga

SEQ ID NO: 6008 - DNA, 309 bp, Saccharomyces pastorianus
atgggtggcatgagagaatggacagacattgtggagattgtgaggaggagaataaacgagataagaaaagccagggatgaagagacgggagacaaagagcaagaacaagaagaacaggagggtattaacaacgggaacgacgacgaagaggaagatgaagaagacgatgacgaagaggaggaggcgactcgaaacgaaacggcctcggatgagagcgatgatgatgatgatgatgatgatgacgacgatgacgacgacgacgacgacgacgacgacggagacggcgacaaaggagaggggggggactga

SEQ ID NO: 6009 - DNA, 990 bp, Saccharomyces pastorianus
atgagtaattcactggaggagcgccttcgtgccaattcaagcgcttttgatggtttattggctttaattcctgccaaatactattacgatgaaacaagtcaagatcaatggaaggccaagaagaaaactaaagtacaaagtaaaagtgacaaagtgaaaaaactggatcccgaacaacgtgatgatgaaacatccagtgctctagaagttatgaaaaagaaggaaaaagatgccaagccagtggtattgcctggcgaaaaactcaagctcatgcagaagcagaaacagaagcagaaggaagcagcagtagaagaagagcaggactccaagctagaggtaaaacaggatggtcctataatggcagcattagaagaagaggaagatatcaaggtaatctttgatgatgaaggaaacgaaataccattagaatctgagaaagacaccaaagaagttagtaagattaacgaaaagaaaactatcacagaagaagagaagttacaaaagaagaagaacttggaggctttgcgttctaagttacaggccagaatctcagatatgaagactaaaaggaaagcgcctggttctagagaagctattcttgctcaaaggaaacgcaaggaagagctaaagaagaggaagcgccaagaaaacgaacaggaacaggaacaagatgaaaatggatctgattccgatgtggacgaaatcgatagtgatttggaaaacaattcgaaaagaaaattcaagaaggccaaaagggactcagagattaatgcagatggtgtgatgtttcagaatatcatatttgatgacggtgcgagaaccacgtcagacctacagagattgagaaaggctggtagaacgaaaggcccatccaagaacgacgctaaatcccaattaaaactgatggaagccaagagagaaacaaatggaagccaaggacgaactagaacaaatcaagttgaaggaaaaggaaaagtggctataggctga

SEQ ID NO: 6010 - DNA, 219 bp, Saccharomyces pastorianus
atggctactgcgttatatactgcaaacgattttatattaatctctttacctcaaaatgcccaacctgttatcgcccctggttccaaaaccgatttgtggtttcacgagagtttaattggcggtagagcatttgtttctgattttaaaattcccgaattcaagatcgggtccttagatacattaatagttgaatcggaagagctttctaaagtagatacc

SEQ ID NO: 6011 - DNA, 1260 bp, Saccharomyces pastorianus
  modified_base (1181)..(1182): a, c, g, t, unknown, or other
  modified_base (1218)..(1219): a, c, g, t, unknown, or other
atgacagacgaaaaaagactggaggatttgaggtccaaaatcatggagtctataggaagatcagacaaggattctgtgggagttgagaataaaagatccaacacaaataatggttatatagatgcacattccaagagacaaagaagcgatggtaagcttccgactgcgccaaaaagcagagatgcccgatattcccgcagtaacggactacagtcttcagctattgtgaacgcgaatcgatctacttatgaccaatcaagggctggtcctcatcgccaaggtcaacgagatgcattagggagatcatacaatagagaaaacagatataatactcacggctctgttccacaatggaacgacaattcctttagcagacaaagggatgaaagaagaggaagaagcgaaagatcagatagaagagacaggaacggaaatgaaaactacggtcgttttgggaatcaaaggaaaaatgacggtcgtaagttccacgatgaccatgaaaaaatgcaagtacaaactaataggcacgatatgaactataatgctcaaaatgttatttaccccggctcagcgtttgattctccggcttactataacatggcttcctctaaggcaaattcaagactcattatctcgggtttatctcacagcagcaatacccgcattgtagcggatttgaaagctttgctagaaaattatgttgcaggcttgaaggaaactgagaagaattcggaggattttgaaattacggaattttttattggtgaaggaagccccaaccatgtcattgtcgagtttagctcccagatatgtagtactatggttttggcttgccgatcatttttcaaagcgaaacttggtgatgttgaattagattggaggaggccaaacgaatacgttcaacaactggatcatttggttgggttttgcagaggtacggtaatcgctctagagaatttagaaaatgtgaaggaagctaatgatgataaaatgaaagagttactcgcgtcatttaatatagcaaacggtgcttccaaactgcttttttacaactgctctctcggtgcaaataatactgacaaagaacccgaatttaccaaatgcgtcctattattgtttgaagtagtcactcccagaatatttcgtagaataaatctaacaaccatttacaagtggttcannagccgaacgaacggcaagaacactcgcaagcttacnnatcgatggattcacgtttcaaagactatgccaaagtcttga

SEQ ID NO: 6012 - DNA, 228 bp, Saccharomyces pastorianus
  modified_base (15)..(15): a, c, g, t, unknown, or other
atggcttttgaactngtttggacccatttggatttgaaggatgagacattcatcacagaggtcaaagaaactttaaagtatactgtaaagggaatagaagtgatcaagatatgtcaaccgggtgtagattacagacttaattatgacaacctggtcgtaagtgctggtaatattatatcaagttcaaaacattggaagcgcaaaaacgcctggaaaactacgggcacg

SEQ ID NO: 6013 - DNA, 1767 bp, Saccharomyces pastorianus
atgtctacacaatttaggaagtcaaatcataatagtcatagcagtaaaaaactaaatcctgcgctaaagtccaaaatagacacgcttacagaattgttccctgactggacgagtgatgatttaattgatatagttcaagaatatgatgatttggaaactataattgacaaaattacatccggtgcagtaacaaaatgggacgaagtaaagaaacctgctaagaaggaaaaacatgaaaaaaaggaacaacaacatccatatgtcccccaacaacatttgcctaaccctgaagatgatattacatacaagagctctagtaataacaacccttctacttctacaaagcataataccagtaacaattattctcaggtcagaaataagaagaaggtgcaagcaacacgagctcatactactggaaagcacgtcaatatcgacaagggaaagcccgttccttccaagcctgtctcaaatactacatcgtgggcagcagccgtttctgtagataccatcagacatgacgttcctcaagatacaaatactaatgataatgaagaagaatcagaagaagaagaagaagaagaaaaagaaaaagaacttgaacagaagcaagcacaggagcaagaagaacagcaactgcaagaagaacagcaactgcaagtagaacaagaaaacaaagaagaacacaagcatacagaacaaccttcattaatgtcaaagaaggcttctgagccaactacctcccaaccaaagaagatgtcatgggctgctattgccacaccaaaaccaaaagctgttaaaaagacagactctcctttggagaatgttgatgaaatgaagaaggaaataagtgaaattaagaaggaagaacaaaaggcggaatctggtccagaacaggccaacgaaacagaggccgttgaaaaggaggaggaagatgaggaggaagccgaaagagcagaattttccgaagaatctagtgaagaagaagtcccagaattgaacgaagaagacgaagaggatgaagagaatgaattagaagaagaaaaagtagtttctccagaggaaaatgttgaagtcattgaagaaagagttgaagttactgctgtcgttccagaaccttcgggagctcaagtaaataccgtttcgcaacaagagcaacaagagcaacagcagcctgtccaaccacaaactcaacaagaacaactatctcaaaactactacactcaacagcaacaacaacaatacgctcagcaacaacatcaactacaacaacaatacctatcccaacaacaacaatatgctcagcaacaacagcaacagcaacaacagcaacaacaacctcaatcacaatcacaacaacaacaatcacaacaacaacaacaaccacaaccccaatcccaacaaagtccacaaagtcaaaaacaaggaaacaatgttgctgcccaacaatactatatgtatcaaaaccaattccctggttattcttacccaggtatgtttgactctcaaggatacgcttacggtcaacaataccaacagcttgctcaaaacaacggccaaaccaccggtaatgctaatcaatataacttccaacaaggttatggtcagactggcgccaacaccgccgctactgctaacttgactagtgctgccgctgccgccgccgctgctgctgccgctgctgcttccccagcctcagctcatgctcaacctcaacctcaacaacaacaacagcaacaacaaccatacggcggatcgacaagctga

SEQ ID NO: 6014 - DNA, 483 bp, Saccharomyces pastorianus
atgtctagcaaacaagaatgggctaactcggccattcaaagtgaatcgagtggaagatcactcagtaatgtcaacaggcttgtaggagaccaacaatcgattaatgatcgtgcgttatccttgctgcaaagaacaagagcaaggaagaacctgtttccaagaagagaagaaagaagacgatatgaaggtcctcaggacgacgtagaatttgaggcagattatgaggatcatgcaggaaatctcgaaacggaaacagaaaacggagatgaaactgaagtagaagcagatgtgtcaacggttaagcaaactcactcgtacgccttagatagatatgttagacaaaaacggagacaaaaacaaaggcagcagggcttgaagcgtgtggaaaagaaatatagtcctagcgaattagctctctacgaaattcgaaaataccagcgttctacagatttactaatctctaaaattccatttgcagattag

SEQ ID NO: 6015 - DNA, 1440 bp, Saccharomyces pastorianus
atgtttaggcaatcaaagagaagaatcgcttccaggaagaacttcagctcgtacgatgacatcgtcaagagcgagttggatattggcaacgtaagcgctgctaaccaaataattttaggttccactttgtcggaagaggagaagacactgtacgcaaagctgcacgagtccaaattatcgttttacgatttaccgccacgcggcgaaataaccttggaacagtttgagatttgggccatcgatcgtctcaagattctgttggaaatcgaatcctgcctttccaggaacaaatccatcaaagagatcgaaaccataatcaagccacagttccagaaattgctgcctttcaacacagataacttggaagacaagaaaaaggattattactctcatttcattttgagattatgcttttgtcgttccaaagagcttcgtgagaaattcgttagagcggaaactttcctgctcaagattaggttcaatatgctgacctcagccgaccaaacaaaattcgttcaatcgttagatctgcctttactacagtttatttccaacgaagaaaaggcggaattgtcacaccagttgtaccaaaccgtctcagcttctttacagttccaattgaatcttactgaagaacaccaaagaaggcagtacttccaacaagagaaattcataaaactaccgttcgaaaacgtgatagagctagtgggtaaccgcctagtgtttttgaaaaacggctatgcttatttgccgcggttccaacagctgaatttgctatccaatgaatttgctagtaaattgaacgaggagctattgaaggcctaccagcatcttccaagactgaacgaagatgacaggttgctgccaattttaaaccatctttcgtcaggatacacaattgcagactttaaccagcaaaaggcaaaccaattcggtgaaaatgtagacgatgaaataaatgcacaaagtgtgtggtccgaggagatcagctcgaattatccattgagtatcaaaaacttaatggagggtttgaagaaaaaccatcatttgagatattacggtaggcaacaactaagcctgtttctaaagggaattgggttgagcgccgacgaagctttgaaattttggtcagaagctttcacaagaaacggcaacatgacgatggaaaagttcaataaagagtaccgctacagttttagacacaactacggcctcgaaggtaacagaatcaactacaaaccgtgggactgtcacaccattctatctaagcccagacccggccgcggcgattatcacggatgcccattccgtgactggagccacgacagactatctgcagaactgcgttccatgaaactcacccaagcacaaatcataagtgtcctagattcgtgccaaaaaggcgagtacacaatcgcttgcaccaaagtattcgaataa

SEQ ID NO: 6016 - DNA, 306 bp, Saccharomyces pastorianus
atgtgtcttggtatgcttcttagtagacattgtgatatgcttggtgggtttgcgcggaagatagtttgtaaaatcggaggagaacagagccttttaacggtgatgatgagtgaaagagcagaaattgtactttcaatcagaaatcaaatacattctctcactaggcacctctggaaacactctgttgtttatttaggtttatatactttattcagactagaaaaggaaaaaaacaaaaacgggccgagcccagaaggaaccgcgtcaggttgctcgagaaggggcgggggagaaggaggggggtga

SEQ ID NO: 6017 - DNA, 657 bp, Saccharomyces pastorianus
atgttgcaatttaaattggttttattaggtgactcgtctgtaggtaagtcttccatcgttcatcgttttgttaaggacacgttcgacgaattacgtgaaagtacgattggtgctgcttttctatctcaatcgatcaccattcatccaaatgatggtaatgaagcgaatgcaaagggcgtcgttgtaaaatttgaaatttgggataccgctggccaagaaagatataaatcattagcaccaatgtactatagaaacgccaatgcagctttggtggtttacgatatcactcaagaagattcattgcaaaaggcaagaaattgggtggatgaattgaaaaataaagtaggcgatgacgacttggtcatttatttactagggaacaaagtggatttatgtctagggacacctgatgctgaaataagccaagaatcaaacgaagatggggataatgaacaaaaggtaagagcaatcagcacagaagaagcgaaacaatatgcacaagaacaaggtttattgtttcgagaagtgagtgccaaaactggtgaaggtgttaaagatattttccaggagattggtgagaaattatacgatctgaagagggacgagatcttgtccgagcctaatagacagattcatcgacgtaataatgccaggtag

SEQ ID NO: 6018 - DNA, 1548 bp, Saccharomyces pastorianus
atgtttctggactattctggatatgaggctcttactgaaatcaattcttcctttgggaagtatgttctgctattacatcaatttgaaagttgtcagagattgaaagatcggctgcaaatgctgaaggatttaggtaaagaattcagcatattcgaagggttacgtgtgggagactttaaggaatccaaaagcatggttcatagattctataccatggttatttctttaaagcaaattatggaaatcgggccattaattagacgcagccccgctgtgttaattgtagaatttggaacatctatagaagactgtcttgatgaattagacccattgcacccactcaataaggcctacattttcatttataaacaatgggcctattaccatcagtattatgtaattgaaaaaataaagaaggttattattaacatggctccggtagaagaagatgattggagtatccttcacaaggttatttactctgatgggttccctgaaagacgatataaaaataagaaatacttgggtgacatttatattccacaaccattcatgaaaagcaaaaaaatcacgaccatttccaagttttcccagatttctaaaatttccaacgtcaaggtctacagatttcacactacagtagtgagtgatccttctaaactgagcaaaaataatttgaaagttcaagagcttggcgataaagattttcctaatcttatatggaccctagaacctgaaaacttttatgttgatatgaaaccctacaaggagcaccgagaaagaaagaggcagagagaagaagcggctaggctaaagttgttggaacaagaaaaagggagcataatactggaagaaaaaaatgaaagaaatggcaatgaaatcaaagtacttcccggattgaaaaatatcatgaaaacccctcttgccaataaagttgttaacatctttagtaattatgcggctgctgtaacaggttatactcaagctattgaaacagacgtaaacgacataaacggaagcactcaacagaaagatggtgacataccagaattgtcaaatggtaaattagcccaacaatccaggagccagatccaagccggtccaaagacacaaacaaataattcacctttgcaagcagaattccggaataacgatgaaaataacatatcgtggaacacaactatgcaggatatagatccaatttatatgaacgaaaaatgtatcagagtttggagaaaggagcagcaaatgctaggattggaacgggctagaacctttgatacgagactccagaaagatcctatcgcagcaaacaatgaaaagtttggaaagccgggaaataatccaaaaggacgcgccaaatctcaacgcattaaaatcaaaacatcgaatacggcatccactatcatcaataaggatgagctgaccgtaaatagtcatagaatagaaacacatggcctagtaagagaatacttcaaggcaaaattcagtatatcatctaaaggaagcaaacgaggtgagaaaccggacagcaatacacttatataa

SEQ ID NO: 6019 - DNA, 1554 bp, Saccharomyces pastorianus
atgtctggttctttttggaagttcggtcaagattactcgatagagtcaccggtttctaaaattctaaatagtgcctttattaagatcgataaagaccaggacgaggatgtacccactagcgcgattgaagaacacgttgacaccggtggaaacgaaccttccactgatggattgattcctgaaaaaagtattggtgacgagggtgacgacaaggaggaagaaaatgctctaccgaccacggaatctgaatatgagaattataagcctaatttagaggttctggatgatttgctggatgatgatgaactatacacggaattaatgtgttccaacttcaaacttctaatatttttgaagtatcctgaagttctatcaaaattgatagaatatgttaccaatgaaaaggttctcgacgaagcaccggatagtatcgcaaagcctgaaataattgaaggcgtaaatgatcaacccattttgatagatcatggcgaaaggaaggaaagtggggaagctgaagaagcagaaaatgatagcgacaatgattctaacgacgaaagaagcgttaattccgaagagacaagcattactttacctccagaatctgaagaacagttggagactagaagagctagaatagcagcagagatcttgtcggctgatgtatggcccatatctgcagcaataatggagaacagaaacctgctcagtaggttatggtcgatactagatcatccagctccgttaccaatacctgcttctacgtactttatgaaaataaatgagagactccttgacatggatattacaggaatgttagggtttattttgcaccgtggtaatttggttacgaggttcttaacgcatgttgacaacccttccttgatggactttcttttaaaagttatctcgacggataaaccggattctcctacaggagtcattaagatattaaaagcacaagatttaatacctaaacttctagatcaccttaatccggagtacggtgtctctacacaatcagcagcgggcgatttcattaaggcatttgttacattgagcactaactcgagcaatgaactcgcttcaggaataggtcctaacgaattgacaagacaattggtatcagaggaaatgatggagaaattaatcaaaataatgttaaaaggtggcacatgtttaagtaatggagttggaatcataatagaattaatcaggaaaaacaattcagattacgatttcatccagttagtatacaccacgatagaaagtcatccccccaatgatcgagatccaattcatttgacacatttggttaagttatttgctaagcatatgcctgattttgctaagatgcttaacgagactaagttgccaataatggaaatgccgtttggtgagattgaacctctaggctttgaaagatttaaaatctgcgaacttattgcagaactactacactgttctaatatgacattactcaatgagcctaatggtgagttgattgctgaagagcgtgatatggaaagaactataagaattggaaaactcggttga

SEQ ID NO: 6020 - DNA, 1086 bp, Saccharomyces pastorianus
atgtcaagggtgtcgacggcgtgtggaactcacatggcccaggcggatggatcgatagtggaagaggcggatggtttgcatacagtcccagacgaattagacgaacaggaagtgttgcagcaattgcctgagaacggcaacacttccagcagcttgcaaagagaaaagaggagaactcccaatgacaaggagactgagaggaagcatgcgttgcccaaatcgtttgtagacaaaaatatgagcgacgtgtcacccaaccactcgctggaccatcttatgctatccagtgatcgcaatccccgcagggggtctgccgaggaaggtcccagccgcccccataaccatctccacagtagcaacaataatattcattccaaacgaaactccaaaagggaggagtcgaagagtccctcgaggcacccttctccggcggcttacacgcagcagcagttcaatggctggaagaaagagtttggtcaagctttcaaaaaaatatctgccattggtagactaaggtcttctgtgaatcctgctacgcccactggcagcggtcatcgccacaaccagcatcaacaagtgaatgacgaagacttgtacacacagagactggcatccgaccttctggactcactattgtccgggtgcccggcttcgttatttgcaagcacacagttcctgagagatgaacacggtaagagaagggcgcccatgctgttagctaagctggacgttagagtatctcctttgaaaagtgagaataactttttggaccttacaaacggtaatcaccaccaccaccacaataacaacaacaataatagcagcaacaatatcacccccaacaccaattctgatagacgaccttcattgccaagaagatccagcattatgagcatttcttctaacgtagccgaatacatgtatggcagaaacgaaaattcattgtttaggatacacttggaatacggcattgatgataacagactcaaatggtctatcgttagaagctataaagatatcaaatcactacaccataaattgaagatcgtcgcgtttcagcaatctaccattagcaactttatagtg

SEQ ID NO: 6021 - DNA, 792 bp, Saccharomyces pastorianus
atggtgcttagtgattcgttgaaactgccctcgccttctctttctgctgctgctgctgtcgtggacgactgtgatagtgaggaccaccccacgtgccagaactgcttcaccgttaaaacccccctctggagaagagatgaacacggtactgttctgtgtaacgcttgcggccttttcctgaaattgcatggcgagccaaggcccattagtttgaaaactgacactatcaagtccaggaacaggaaaaaactaaacaacaatgccagctctaactctaacacccacactaacgacccaaataaaatatttaaaagaaaaaaacggctgctcacaactggtggaggctcgctgcccagtaataacccaaaggtatccatcttggaaaaattcatggttagcgggtccatcaaaccactgctgaaaccaaaggaagcactgcccagtgctaaagactaccccatgcagcggggaaaatattctttggaacccagcgagcccagtgggaagaactacctctaccaaatcaacggttccgatatatacacgtcaaatatagagttgacaaggctacccacactgtcgacattattggatccgtcccccttctcagatcctactataccggagatagagctgacttggaagctgcacaacgaagaggaagtaatcaaattgaagacgaagataagcgaactggagctggtgacagatctatataaaaagcacatattccaacttaacgagaaatgcaagcaactggaggtggagcttcactcccgagctccaatctag

SEQ ID NO: 6022 - DNA, 423 bp, Saccharomyces pastorianus
atgttttttcagcccctcaatgctcttaatctttgtgcaagtttgtcttccttttcgtcgtcaacattaacctctttcgcctttatctctggaacattgtccagttttgcactttgcttcaattccatgccattttcgtcagcaactttgctcattagttcatccaccttatcgttgtccaccagcatggcatccgaattcacacccatatcttcatatacgttaacactggtgtccaaatcttcgaattgctgttcgaacttgtccattatcatggttatctgttggaggttcatattctgtaacgccttatccatgcctttgcaaacttgccccattgatgctgacacctgcctcatcgtgacggcggtttgtacccttgatgcgaccgaatccacccgtgatgcacttcaacagttgtaa

SEQ ID NO: 6023 - DNA, 519 bp, Saccharomyces pastorianus
atgccgttctcatcagccactttgcccatcagttcatccaccttatcattatctactagcatagcatccgaattgacgcccatatcctcatacacattgatactcgtatccaggtcttcgaactgctgttcgaacttgtccattatcatggtgatttgttgtaggttcatattctgcaacgccttgtccatgcctttgcaaacttgccccatggatgcggacacctgtctcattgtgacggcggtttgcactcttgatgcgacagaatccactctggatgccagtttcagtagctgtaaccgctcgtttttcttccttatagcattggacgcgtatatacgggagatctcctcattttcgttgagagcacgtttaagtttgttggtttcttgtttctcctccttcgacgccttatttgcttgcttttgcagttgttttgaggtaaactttagttggaaaagcgtattctccaagcctgcggcggaattacgtgacatttctatgggataccggacctaa

SEQ ID NO: 6024 - DNA, 912 bp, Saccharomyces pastorianus
atggcagaaagtctagacagatgtatagacgatatcaatagagcggtggactccgtgtccacgctgtatttcaaaccgccgggaatatttcataacgccatcctgcaaggaaccagtgacaaggcaagtctcaggaaagacatcacaaggctgatcaaagactgcaaccatgacgaggcttacctgctgttcaaagtcaatccggacaaacagtccgtgtcgcgtagagacggtaaacagggagtgttcgactacgtgaacaaaagagacaccaatatgaaaagaaatagaaggctgggcaaaccgggtgaaaaaccaatcattcatgttcccaaggaagtgtacttgaacaaggatcgtttggatttaaacaacaagagaaggaagacaggcgcaacgggcggtgttggcttgaacaacttcatgttcgacaccgatctcataggttcctcgcttatttctaattctagctcaggtacattcaaagcattatccgccgtgtttaaagatgactcccagatccagcgactactgtatgccttggagaacgggagtgtgctcatggaagaagaatccaataaccaaagacggaaaaccatctttgtggaggacttccccactgatctaattctcaaagtcatggcagaagtaacagatttatggccgctcacagagttcaagcaagaatacgaccagttgtcccacaactacgaacaactgtcttccaagctggggttcatcaaaaaggaggttctgcttcaagatgaccgtttaagaaccatgtcacagtaccatccttcctcatctcatgatgttgccagaattatccgcaaggagaaggacgaaatcaggcggctggaaatggagattgcagacttgcaagagcaagaaaccgctcccatgcaagagtag

SEQ ID NO: 6025 - DNA, 705 bp, Saccharomyces pastorianus
atggcggtgcttatccgggtgccaccggattctatcgcggcggagaagctctatacggttagctgccaccagcgggatgctcatcgcatagaaccgttctacgctgcgttcgctgatctggtcgacgctggcggctgccagcgtcggtgtgcctggcagcggcagcacggttggctcgcctttgggccggcgccagtactggcggatggctcgttctgtttcagcttcagtctcggtgactttagcctggtcgaaggcagaggcatctatcccgtcctcgccctcgccctcgcttgtgctttcgccctcgttctcgatctcgatctctcttttctgtttcaggcggtccctctcgctctcagtggtgacacacttgtaacccgctatgctttcaccgtactcgaaaagcgcactgccatgattcgccggacttgtgcgttgtcgtttcttttttggccggttctgcggactctccatagccaccggcaccagccgtatagtaggtttctgtttctcttcgccatggcgctgcgtttgcttcacgggcgtgtcaccaagatggcctacgccttcgaggctcttggcctggacttctctcttgctttttctaacaaagactggccgggcgtatttcttttcggcgtcattgtcgtcatcgctagtcacgtagtcgtcgttaccactcatgccgttggtcttggttaa

SEQ ID NO: 6026 - DNA, 5658 bp, Saccharomyces pastorianus
atgtctgatcaaaatgcttcaatgagaagcacacaaaatgatggagacacaggcgaaaggctaaatgccattgcctctttttttgattgttctttagaacaagttaaatctattgatagcgatatcgtaacacacttgaacgataaacttttacaatttaatgagcttaaatcagaaaacttgcaaatcactgtctcatttgatgaattaaaaacaaactctgcgaaaaaaattagtagtttgaaaacagagatggagagtgttttgaggcaaaatgatgaaatccgaaaagaaagaaatgacacttctgccaaattcgagtctctacaaagagaaaagacacagctatcgaacgaattagagtcgatacagagaaaggcaaatgacttgaacgaagagaaaaaggaaattcaaagcagccaacagcggactttgaaaatactggacgaaagactaaaggaattagaaatggtcaaggccgaaaataaccgctgcgacaatgaatgcaaaaaattacgatctactatattagaattagaaacgaaacatcaatcttatatttctagtgatctgaactctaagtctcagctagaaagaagaacgcaagagctaaatctactgcagtcaaataaagattggctggaaaaggaattgtcgtccaaaaatgagcaatatctttcatacaggcaaaaaacaaacacaataattacagaaattagaaatgatttaaatcgtttacggaatgatttccaattagaaaaaacaaataacgatgtcttggggcaaaaaaacaatgagctatcgaaagatttacaagaaaaacttttacagattaaaactttatcagattcttcggatagtgaaaaactcgacttttctgcagagattactttaaaacaacgtttaatagaccttttggaattacaattgaatgcagtgaaagaagaattaaacaatacacgagaatccaactattctgacgtagcctcaaatgactcgaaacggctcatatttgaaaatgaaaagttacttaaagatttgcaatcaacgaaacaaaaattaacacaatgtgaaaatgagtaccttcgcctatcatctatcacaaaagaggcaagtaaagaagacaatgtcttgacttctaaatctaatggagacttcatattattgaggaagcaattaattaaagaaaagcgtgctaaggaacatcttcaaaaccaaattgaatcatttattgttgaattggaacataaagtaccaattatcaactctttcaaagaaagaacagacaccttggaaaacgaattaaacaatgctgcattactactggaacatacatccaacgagaagaatgccaagattaaggaattaaacgtcaaaaatgaaaaactggcggaatatgaagatgaaatccacatattgtccaaacaacgtcttgatttatgtcgtcaaattcaatatctcttgatcacaaattcagtatccaatgactctaagggacctttacgcaaagaggaaatcaaatttattcaaaacattttacaaaacgacgatagtgctacaactgaatcagactcgcaaaaaattgtaacggaaaggttagttgaatttagaaatattattcagttacaagagaaaaattcagaattgttgagagtaacaagaaacttagccgataaattagagtcaaatgaaaataaatctaaacaatatcttaagaagattgaaaccaaaactataaatgaagctaaagaagcgatccttaccttacaaagccaaaaagcacagttagaatcgaaaatccacgagttagaaaaggaacgagaaaaatttaaggactggactttggatcaaaaggcttcacctaataactcgataatacaacaattaactgagactaaaagagagctagaatcccaaatccaagacttacaagcccgtatttctcaagttaccagagaatctaccgagaatatgtcacttttgaataaggaattacaggacctatatgatggcaaaagtagcctatcaattgagctaggaagggaaaagtcatctaggatattggcagaagagaggttcaaattactttcaaatacgctagatttgactaaagcggagaacgaccaattacgcaagagagcagttaatttacaaaatgccatctcaaaacaagattcaaagacccaggagacacttaatgagtacgtttcttgcaaatcgaaactaagtgttactgaaacagaattatccaatttgaagtcagagcagacactgaaaatcgaattagaaaaaaacctaagacgagaactaagtgaactttcttctgagaaaaacagtttacatataatggtaactcaattgcaaaccctccaaaaggaacgtgagaacctattagatgaaattaaaaaatcttgtcaaaacaaaataggtatattagaaaatgcgcaaaatgaactaaaaaccgaagctattcataaagaccaatacattaaacaactggaagaagataatgacacaaaagttgaatggtatcagaacaaaattgaaactttgaggaaagatcatgaatctattatgaattctttaaatgaaaagcaaattgaggttgagaaattgcagtatgaagtcaagtctttagaaaaggaaatcgaagaaaacaagattcgtttacatacttacaatgtactagatgaatctgttaacgatgattccttacgcagagaactggaaaagtcgaaaataaacttaactgaagcttattctcaaatccacgaatacaaaaagctttacgagactgctgataaatctctacaggaaatgacatccatacaagatgaatctaataaaacattttctaatcaaattcaaagtttaactgatgaaaagaccactttagaggataaagttttccttctgaaagagcaaatgtctaatttgaataatgaattagatttacaaaaccaagccatggaaaaagaaaaatccgaattcaagaaaaagatttctattttacaaaataacaacaaagaaattgaagcggtcaaatctgagtatgagtccaagttgtcgaagattcaaaaggatcttgaccagcaaactacatacgctaatactgcccaaaataactatgaacaggaattgcaaaaacacgcagatgtttccaagactattagtgaactaagagaacaattacatacttacaagagtcaagtagaaactttaaacctaacacgtgaccagtttgaaaaaactctaaaggaaaacgaaaacaattggaattcccaaaaggagtctttattagaacagatagatctatacaattcacgaatcggagatctctcatcacaaaataaactattgtacgatcaaattggattatacaccactgcgggcaataaaggtgccgacacaaaaagtggacctgctttgaataatgatattttaaccacattacgtcgtgaaagagacattctcgacactaaagtcgcagtagctgaacgagatgctaaaatgctaagacaaaaaatttctttgatggatgttgaattacaagaagctcgtacgaaaatgtgtaattcaaaggccgaaaatgaaaaacgttcctttatcattgaacaacatgatgagattatggaaaagctaaatcaattgaacttattaagggaaagtaatacaacgctgcgtaatgagctcgacaattccaatagtaagaacaaggaacttcaatctgaattagatcgactaagggataatattgcgcctatcgaggctgaactagccgccctaaagttttccattcaagaaaaggaacaagaaatcagactaactaaggaagaggttcatcgttggaaaaaacgctcacaggatataatggaaaagcaccaacaattgagctcaactgattacgaaaagctggaaactgagatagagagtttgaaagcacgactcgaagataaaacgcaacaaggtgctgattcggaggaaaagtttaacagattaagaaggcaagctcaagaaaaattgaaagcgtcgaaactttcacaggacttattgattgaacaactaaatgagttaaaagatgccaaacttgcattagaaaagtcatttaacgatgccaatgcaagaattcaagagttggaagatgcaaaagtagcagaaaataggaatcagttaaatatgatcaaaaaattacaggaagatacaaaagagaactctaaagaactcgaaacaaagttagaagaaaacacaatttcctatgactccacggttaagaaactaaacgaagaaatttgtattttaaaagaagaattagaaaagcaaaggcaaatccagcagcagatccaagctgcggcaggaacaggacaagaagatttatcgaaggtcgttgagtctatgaaaagatcatttgaagaagagaaaattaagttcattgaagaaaagaccagagaagttaatcaaaagatacgagaatttcaagaggctcaagaagcccaagaagcccaagaagctcaaaacaaggttattcaaccaagcaacatcaatatagatgaaataaaaaaacaatgggaagcagagcacgacgaagaagtttcgaaaaagatccgtgaagctgaggaagctctcaaaaagcgcataagattacctacagaagagaaaatcagcaagataattgaacgcaaaaaagaagacttagagaaagagtttaacgaaaaagtggaggaaaggttaaagtcgataaaccagtctggaaaaatggaagatacatttcaaaagcaactggagagtaagatccaagagaaacaaagagaactagaaaacgaatacaacagaaaactgcaggaaaggttaggggaacttccgccttctgctatcatttctcttgatgataaagatcagttacgggcagacgttgaggcccaattgagggaggagttcaacgacgaattgcagagtataaagaaaaaatcttttgaagaaggcaaacaacaagcaataatgaaaacgacccttttagagagaaagcttgccaagatggaatcccaactttcagaaacgaagcaaggtgtcgatagccctcccaaacatataaacaaaatgcccaatccattgttagggttacctagaaagattgaagagaattccaattctccatttaatccactgctgtctggtgaaaagcttctgaaactgaactctaaatcgtcctcgtctggtgtgtttaatccttttacttcgccatctccgaacaagcctttgcaaagagatgaagcagaacgagagcctttgagcaacgaaacagacccgccgactcatttggcacccagtttcaatattcctgctccacagggtccgaattcctcgtcttctacactgtcaaccgatacaaatgacgaggaacgcaccgttaatgagcaggagggaaataatgtatttgatggaattggtcaattacaagacaaaaaagcacaaggaaaaggggaatacctcattgaagcagcaggtgcatcaaaggacgagacaaaatttaacaaacgtcctattgacgaggttggagaattaaatgatgatgatgatgaaattgacacagattctatgaatgaggcaaagaagatcaagattgatgatgaagaagaaaaggaagaagaaggtagacgttaa

SEQ ID NO: 6027 - DNA, 1836 bp, Saccharomyces pastorianus
atgacttcctctactggatactccagcagtgtgccacaccatctactgagtgtacattgcgatgcgacttccactaccgactactccagcagtgccgccacatctaccgagtgtaccacttgtgatatgacttcctctactgaatactccagcagtgccgccacatctaccgagtgtaccacttgtgatatgacttcctctactgaatactccagcagtgccgccacatctaccgagtgtaccacttgtgatatgacttcctctactgaatactccagcagtgccgccacatctaccgagtgtaccacttgtgatatgacttcctctactgaatactccagcagtgcttccacatcatctactggatactccagcagtgccgtagtgtcatccactgaatctaccagcagtgccgccacatcatccactgaatctaccagcagtgccgccacatcatctactggatactccagcagtgccgtagtgtcatccactgaatctaccagcagtgctgccacatcatccactgaatctaccagcagtgctgccacatcatccactgaatctaccagcagtgctgccacatcatctactggataccccagcagtgccgtagtgtcatccactgaatctaccagcagtgccgccacattatctactggatactccagcagtgtcgtagtatcatccactgaatctaccaacagtgccgtagtgtcatccactgaatctaccagcagtgccgccacattatctactggatactccagcagtgtcgtagtatcatccactgaatctaccaacagtgccgccacatctccggtatctaccagcggtgcttcatcgtcgttcaccaaagtcagcactactagttattctaaattgcctgtgcatagtatttccccaatatatccaagtaatcaaaccacgacaactagttttgttacccccccactgatttcttccaagtcataccaatcatcagagtcatctgaatcatctactgactccaccacttctaccacatcagaactcaaatcctctactataaaagcaaaatctgctagtacctccggatcatctactgactccaccgctagctcttccacatcaatcgttaactcttcaactaccggttcttcgcaaactactgatttaacgattagttcctctggatcatctactgcaaccagtgcccgtagcacttctatcactagttccgaggatcaaaaacccacaatgtcttcaacctttactttgcccaactctgattcctcaaaatcttctgagtcattcaaatctgttccatctaccagcgcatccaccgaaacttctcgtagtcaaacgaaatccgttatcacccccaccacttactccagcagtaataaaaatactccagcttctgcttcaatctcttcctcattcactactatttccactggtgctactatatccagtagtaaaactgactccacaagtctttccactgggtccagcgaatctggaagtaaaattggtgtttttacttcttcctctgcttcatcttccaaatcacaagaaacaaccagtagtgatgtcacttccggaccttaccaggatcgtactactatccaaagagccactcctactgctacaaaaacaaatgaacaaactacattagttactgtaacttcctgtgaatcccatgtgtgtaccgagtctgtatcatcggctatcgtatctacagccacaactacggttagtggcgtggctacagaatacactacatggtgtcctatgtctaccacagagccaacaaaacaactacgtgattacagttacttcttgcgaatctgg

SEQ ID NO: 6028 - DNA, 1059 bp, Saccharomyces pastorianus
atgtctcgtcattacatattttcgacggtactcgccttcctggctctagttaatgtaacttcaggaagtactgaggcatgtttgccatcaggtgaaaaaaaaagcgggatgaatattaatttttaccagtatacgttaaaggattcatccacatactctaacccagaatatatggctcatggatacgcagataaggaaaagttaggctctgttagtggccagacaaaaatctcgattgactataatattccatgttcatctgaaacttgcgattgtgacgacgaatcttctgacgacaactcttccgagatcgtactaatgaaacgtggaaataagccttgttccgataccgcagctcttgccaagaaacgtgatgatgtcgattgtgaccagggtgctgcctactggagttcagatctgtttggtttttacaccaccccaacaaacgtaactgtggaaatgacaggttactttttagcacctaaaacaggttcttacacgtttggtttcggtacagtagatgattcggcaatcttatctattggtggtaatgtcgcatttgattgttgtaaacaagaacagccccctgttacgtcaactgattttacaatcaacggtattaaaccatggaatgcagatgcccctaccaacatagagggatcagtgtacatgtacgctggttactactatccaatgaaagttgttttctctaatgctgtttcctggggtacacttccaattagtgtgacattgccagatggcagtactgttagtgatgacttcgacgggtatgtctattcctttgaagatgacttgtcccaggccaactgtgccgttccagaccccccaaactataccactacaggaataatcaccaccacaacagaaccgtggaccagcgcgtatacaacgacagacactcagacctctactgttacaggtcccaatggtttaccaacggatgaaaccatcattgaagtaaaacaccaacaagtgtcagctcttcaattgccacatcgtctgatgcaaccagttctgctaccacatcctctgacgtga

SEQ ID NO: 6029 - DNA, 1716 bp, Saccharomyces pastorianus
atgacagatattgagtttggccaacctcttcccagtgatctaaagtatgcggtttcatttggtattcccacatgggattcagcgataggatacgcggaaaaggaccctaaggtaataagcagaatggctacaggatacccgagatactttccacagcctcctatccaaaaactttgcaaatacttcattaacaaatttggacaaccttcagaggattgccgcccttttccctctttgaatatagcctcgaaatgtttagaatttgtgaagtcagttgtcggacccgaaagtagagctcatcttgaagtggagacaatttcatttgaagtaggtgcgaagaataagcccaatgaagatggtaagttcactgtggcaatcgcagctatcttagcctcaggtgaggagttcacacttgttagagagtattggaaattaagaggtgaatgtgtatccagccgactagcatcctctcttaaccagttacttgacgccactaacttgacatcaagtgagacacggcatgaggttgaggccagaatctttctagccgagaaggaaggagacgacgcaaagagtctattaaagagaagaatagctgagaaccatttcaatccatttgacttaagaaaagaaggcgccgatccaaaagaggtagatgtcaacccggaaaacgatattcatctcgtatcaagtggaatgtcagcaatttttacaactcgtaagttgcttacattttgggaagaaaagagagcttttgagtacgccctgaacaaggacagttcgaaaaaagaaattttaccgtgtaatacagctgccatctttggctttccgttcaaagatacacaagtaatcatggacacatttggaaaatgtcagttctttggatttggagactccagagatatcactgagttacaaagcttcttagagacgagcaagcaacgtatccttgctgtgttcgttgagaccccctcgaatccattactaaatatgccggatttgaaagaattaagaagactggcggatgcatatggattctttattgtagtcgatgatactataggggggctcaacgttgatatattaccttacgcagatgtggtctgcacctcgcttactaaacttttcaatggctctagtaatgctatgggtggctcgattattttaaacccaaagtcttctctgtactcaagtgcccatgagtactttgaaaataatgaatttgaggacctgctatggtgtgaggatgcggtagtccttgaacaaaattctagagactttcaagagaggacactacgcgctaatataaacacagaaaaacttttgaatgaggtactctttcctgaggaagggaaaatatgcaagaaaatatattatcctactgtgagctccaaggagactttccagaattatgaatctgtccggaataagcacggcggttacgggtgcttgttttctatggcattttacaacgaaggcgaagccaaagctttttatgattctttgagagtgtttaagggaccttctaacggaactaattttacgttagcatgtccatatgttcatttggcgcaccattcagaattagaagaggtctccaagttcggagcagacccaaacttaattagggtgagtgtgggtttagaagatactcagtggctgctggacgtgttttcaagcgcgatagatgttgttagacgctccagagatttatga

SEQ ID NO: 6030 - DNA, 513 bp, Saccharomyces pastorianus
atgatagagtatgaagagtggcaaagacaactaagatcattatatggttcccagattttccaaaattgggctctttgtcaagaaattcgtctagttgatgataaaaatgcagtctttctatgtttggagcctactcacaagcttcaagaaagcactaagattatagaaaacaaatcattggatcatatagaactatatcttacgtattcaaaaatttatagtgaacccttactgcttttacgaatatgggaagaaaaaagttcagaagatatattaatgaccagattaatgtttccctgtaaggtcgaatctttactgggtgtcgagggcaagttccagctggggttagacactttcatcgatataggaaatactgcttggtactctttccatccatgtgatacgtcaagcatagtcggtgaccaggaagcattcaggccaacttacttaagacgatggaccagtattttcgtatttagttggttaggctatgaggactgtagttatacttag

SEQ ID NO: 6031 - DNA, 291 bp, Saccharomyces pastorianus
atgtcgggaaatccaggaagctcgctgagcgcattgagacccacccccccagaaagaggctcgttcccactagaccacgacggcgattgcacgaaacacatgcaggagtaccttaaatgcatgcagctggtgcagaacgagaacgcaatgaactgccgcttactggccaagaactacctgcgctgccggatggaccaccagctgatggatacgacgagtggtcacacttggctaccggagacacccccagcactgtcgatcgacagcttgatccgccataagccaatcatg

SEQ ID NO: 6032 - DNA, 123 bp, Saccharomyces pastorianus
atgaagatcaaaactattaaaagaagttctgatgattacgttcccgtcaaaagcacacaggaatctcaaatgcccaggaatttgaaaccctggaattgcattcctttcgaaaagggctcgtga

SEQ ID NO: 6033 - DNA, 93 bp, Saccharomyces pastorianus
atgttcgctaaaccctttgtaggtcagttgggggacggtcacagagacggtgtctatgctattgccaagaactatggtaatttgaacaaactg

SEQ ID NO: 6034 - DNA, 1491 bp, Saccharomyces pastorianus
atgaaattaggtatcattccctatcaggagagtaccgatattgtatacaaaaatgcttcccaagatcagcaagaacaaaagagacccaatttaccacagttagacgtaacgcaccaagtcgaatcatcagtccaaaaaacaaatattaaatttgtacgcacagaggatatcccactgaatcgaaggcactttgtgtataggccgtgttctgcaaatccgtatttcaccactttaggttatggttgtacagaatacccgtttgaccattctggaataagcgtgatggatagatcagaagggttatcaatagctcaagatagaaatgacttggttagtgttcaggaccaatacggctggcgttcagcaagaagcgacgtctgtatcaaagaagggacgacatattgggaagtggaagtgattcatggaggcaatgacaagcccacaccaggagatgatggttcagtaagtgaagtgcaaaatggttcatatgaaaagagacgcaagcaagtgaatgacaccccccatctacgattgggggtttgcagaagagaggccagtttagaggctcccgttggattcgatgcgtacgggtatggtgttagggatatttcgttggagtccattcatgaggggaaactgaactgcgttttgaaaaacgggttgccattgaaggaaggtgataaaatcggatttctattgaagctccccagcattcaaacgcaaattgaacaagctagagaatttaccaaaagaagaattcttgccttagattcacatatggactcaatgaatgaaccgtggaaagaagatactgaaaacgggccttcgaggaaaaaattgaaactggagacaacaaacaaggaattccaaagggcgttactagaagacattaaatatgatgatgttattcgcgaccaaatcgccatcaggtacaaaaatcagttattcttcgaggccactgattacgtaaaaactacgaaaccggaatactattcttctgataaaagagaaagacaggactactaccagctggaggagtccttcttggcaatatttcaaaacggtaagtacatcggcaaggcatttgaaaacctgaaaccgtttttaccaccattcagtgaactacaatacaatgaaaaattttatcttggatactggcaacatggtgaagctcatgaagacaccaatgaaaaaggtatacccagcgcaaagaaaagaaaacagcaaaagaagaaaggtttaattctcagaaacaagtacgtacataacaacaaactaggatattatccgacaatcagttgcttcaatggcggaacagccaggataatcaccgaagcagataaattagagtatttgggtcaaatccaatcgaactattgtgctggaaagaatttacaagttaacacattggatacactatacaaagaacaaatagccgaagacatagtttgggacataatcgacgaattagagcaggctgtttcaatttga

SEQ ID NO: 6035 - DNA, 1602 bp, Saccharomyces pastorianus
atgtggacacggatctcatatcaaatgtttaagtggccatatgaatctattcgtggtatacaaaaccaaaccacaaaaaacattccattatcttatggttcagggctaatatattgtcccgtttgcaattccttaagtaattcatttctaccgaaactaaatgaccctaacaagaaagcagctaacgcttttttcaagtgtactaaggatcataaagataacatagaggaagatgttgaactgttgagctctatttgtattaaagcagcaatgatctttagtgatctacaaggagtaaaagtcacgactatcgatgatgcatacaaagttgttaataatgttttaatcaacaccgtagcaaatacagagctaagactaaggtcttatagggaacatggaaaaatagtggacttgaacaagatatccagtcaatgcgttttgaccttacgactactttgtgaactgaaatcgttccttcataagcaatgcgtcgagttaaaaacatttgtcgacgaaatccctagtaaaatatggaattggaacgaatttttaatagaaggtaataatatggatttgctcctgtatatgagccaaaatttcgataatactgatcgaggaaggatcgcgcaaccacccaccctttgcgtttatgaaatgttcaagagaaggtttcaccaacttttacttctacttgcaagagatatgatgagagtaaatttttacaaggactgccaaaataaaatcaagctatcatcaaatcgatccggcgagccacacacaagtatgttgtatttatttgagacttttaaaaagtacattgaccttttcaaaccagacgacattgagtttgatgttacgagcttagaaaagagcaaaaactttatatgctcgttgttactagagtcgttaaccatcttttgtaggaaaacgtacttactatttcgtatccagtacgaagatgatgacaacgatggcgacagcacgactaaacaagatgaaatagagcaaatcttccattatttcaaattacccaatttagctcatttcctgaaggattttttctataacgaattaactcaaaacatcgaaagatacaacgatggtaacgataacttaagaatccaaaaagtcatatatgacatggtgcagaatataaactcaagatcatacccgtccccagaaaaaattcaactaatcaaactcccggtaaatctctccaagttttcccttgacaacgacgaaatatcgaataaatgtgataaatacgaaaccggagtgtgtttattgtgcggccaaagatgtcatatccaaaaaagcatagcactacaaggttacttacagggagaatgtactgaccacatgaaaaatggatgcgaaatcacatcttcctacggggttttcttaatgaccaggacaaacgctatatatctgtcatacggcaaaagaggtacgttttatgcagcaccctatctgagcaagtacggagagaccaacgaagactacaaattcagtacccctgtctatttgaatcaggccagatacgagtatctggccaatgagattgttttcggcaacatgatcccgcacatagtgttccgacta

SEQ ID NO: 6036 - DNA, 4050 bp, Saccharomyces pastorianus
atggaggattctaatctggctataaacaatatcagggacttcctcacccagctcccgaaactcgccaaatgcgagtacaacgaaaccactagttatctgctatggaaaactttgaatctacgccttaagaataatgataaccatgtcgattggccctctctcgtctccatcctcaattccgaggcttggacaagtgaagcgtatagagacatactaaatggcaaacagtggaaaacactagagttcgagagtgaccatcgcccactggataacatacacacaggaacagcatgcacacgtttatgtttcccctctgagacagtctactactgttttacatgctctacgaatccactatatgaaatctgcgagctttgttttgataaaggaaaacacatgaatcattcttatgtagccaaagtggttatgcgcccggaaggcagaatatgccattgtggtgatccctttgccttcaatgatccaagtctagcattcaaatgcatgaacgaactgaataatgtttctggttttagtgaaactaatgacgatattgatgacgaaaacgttgtttccttattgaattatgtactggattttttaattgatgtaacggtttgctacaaggaggaggcagaaaccaactctggtgagataaaaacatcttcccccacgaatcctgtcaacgatgacacaacggataatcaagaatacgaatcgttggtcaacgatgacaattctgcattttttgacagcaattggtctaatacaaagaaagagccccgcgaggaatgggctatccaaatcgaggacgaagaatgtaacgtacactatatggacctagcgtctataataaccaaaacattgaacgtgcctattgagtatgccatttctattaccagggctctagaagactcccatgatgtagtaactgtgctccaaggtgaaaacttttttgaaatgaatagaatagctgaagggtttcagaaggaaaacataaaagtttacgtacggaaaatgagtggtatatttaatagaaaactaacggacgatttaacgaactggctgtactctatgtgcttcaagtcgaccgaatcattgcaaattaaatattttcttcggatttccatgctcgatgtttggtattcgcacttttctaaaatgagagctagtccttcaaactcaaaccctgatttctctaaaataaacttattaggtggatttctactatcgaatgaaaatagtaatgggtcctggttcaaaccttggccactagaacatataaacgatgagaaaatctcgaaaatattaaccaaatacaatgatagattaaccaatgcacattcgccgaactcggtgagtcatttttacagtttttatggatcaagattccaatatatcattataaattccattaacattctgtcgagaaagtccaagttcaaaatgttaaagatcataacgtcattattttccttaagggatgagagtagaaaatttcttgccgctcagtatatcgacatttatctctccgttctctatgatgccgtggcttcagacgctaaagaatgccaggtaactctaatgagtctcttgggacaatacactttccaagaccccagcatagcaaatatgactataagctctggatttatcgaaagaaccatcaggttcgcctttactctcatggcattcaatccggaagacttgatgtcatacttacctatatctttatacaatgggttcaaattacctaccgaaaccatacgaaaccggagaacaatcatttgcttcaaagatctttgtacgattatgtcagcaaacacagttccagaagagcttctatcgaacgacgcgattttcaatgcaataattgaatccttttctgaattcaataatgtgcttcctttaaaaagggaaaccaaagaacatgtggaagttgaaaattttgacttctctgcgttctatttctttttttcgtcgattttaattatgatagatggctacgtacgtagtatatcgttggtaaaagacgcgactttccgtaaacatattgttctcaagctattggatgttgctcagaatagggaatttgagtcgttaactcactcaagaaaggccatagcatctgataacatatcaactagtgaaactgacaccaacaaagcaagtttatctactgttagagaaactatatgtaactacgttgcagaaacgatcgattaccaagtgggggtgaacacacaatattttttcaatccaatgtcgtatttattcaagttcgtcattcaatggagccaatgtggtagatatgagcctcttcctacatatttaacaaactacattgatttgtacgaggttttccaagataagcagaaagctttgcacatatcagaatcggctttatctaccctggttctgatcgggcaaatcaatgttggcttttgggtaagaaatggtactccaatcactcaccaggccaggatgtatacgaaatacagcatgagagagttcacttacgttagtgacatctttaatgtccaattcagcatggcaatgtgtaatcctgatgaactaatggttacatatctttcaagatggggattaaaacattgggcaaatggtgtaccaatgtacgattatcctgatgcagaaactaccatagctgttgtcaatgaatgcattttgttactgattcaattgctcacagaagtgaggtcgttggtcatgaaatcctctaaagaggggtttgaaagaacatttaagtcagagattattcacgccctctgctttgacacatgctcttacgcacaaattaacaattgcattcccgagcatattaccaagcacccttcatttgacatatatcttgaaaaatacgccaactatattcctccaataagtttaactgacaacgggactttttcattgaaagaaaagtacaaagacgagattgatccttattatataggactctcttctagtagaaggtatgatgtagagaaaaatatcaggctgaacatggccaatttgaagaaaatgaaatatgaagacacttttgtaccagcgaaaaaagtcaaggatttattaaagagcactttctattcaggactttactcaatatcgtcagcaaacacctttggcttgtttttaaaaaatacacttgagcatatcatcaaatatgattacgaccacttactaccaagagttgtccatttgatacatttatgcgtggttaataacctaaatgaattcatgggaatattgtggcatgaatatgcaattgtagacacagagttttgccattaccacagcattggttctatactgtattactgtctgttgaaggatactttttcagactcgcatggcaagatcagggaaatttttagatacctaatggaaacagcgcctcatgtcaatgtaagcagttatttaaaggaacaaactacttcgtatacgccgggtatactatggcccacgaaggaagataagagtcacaaggataaagaatttgaaagaaaaaagcatcttgctagattaagaagaaaaaaaataatgaagaagctagctcaacagcaattaaaatttatggaaaacaatagcgtggacacttctgaaatcagtacacccaggactatgtcacctagtttatcgccttctagggtagatatagataataataacaagtcaatgagtagttgctgtgacgatgactgtgcattttgcaagatgtcaaaggacgatgatgtttttgtttacttttcttatcaagaacgaaacatatgtgatcatggtattgatttcacaaatccgccagacattaacagaataagttcccagcttagcggtaagcatccaagaaacagtatgattcaggaagacacgtatgaagatgatgtatcgagattaaaattgaccaggtgtgaaccagtattaagagcatgtggacacggatctcatatcaaatgtttaagtggccatatgaatctattcgtggtatacaaaaccaaaccacaaaaaacattccattatcttatggttcagggctaa

SEQ ID NO: 6037 - DNA, 231 bp, Saccharomyces pastorianus
atgtatgaagtatactgtggaaatgcggtttcgaaatcctccaaaaataccaggaagaacggcatatcagcatctgcagcggcggacctggccagtgtattctcatctgcactggacgttattgcctgtgcaccagagcaatggctgaccagcaagcctaatgagaagaggtttttaaaggaatataaagcagcagtaaatctcattggcgctattcttcttctagtgtaa

SEQ ID NO: 6038 - DNA, 2454 bp, Saccharomyces pastorianus
  modified_base (2284)..(2317): a, c, g, t, unknown, or other
atggaagctatttcacaattacgtggtgttcctctgacacatcaaaaagattttagctgggtctttctagtggattggattctaaccgtggtagcgtgtttaacaacaatattctacatgggaaggatttatgcatatcttataagttttatattggagtggttattatggaaacgagcgaaaattaaggtaaacgtggagacagtacgtgtttccttgctaggtggccgaatatactttaaacatctttccgtgattcacaaagattatacaatttcaatcttagaaggtagtttaacatggaaatactggcttttaaattgcagaaaagcagaattgatagaaaatgaaaagaactcctccggaaaaaattcagaacttccatgcaaattcttattggaatgtgaaggtttggagtattttatctataacagaacagaggcgtatgataatgttataaacttattgtccaaggacgaacgagataaatttgaaaaataccttaacgaacattcgtttcctgagccttttagtgatggaagtagtgccgataagttagatgaggatctgagcgaatccgcgtatacatcaaattctgattcatcaataataaacgatagggactaccaagaaacaaatattggtaaatatcccaaaggtctaaatttttttccacttgagcttaaattaaatcgtggttctctattactaggaaataaattcacgccttcagtcatgattttaagttatgaaaatggtgaaggtataatagatgttttacctccaaaagagcgattagacttgtacagaaacaaaacacacttggaactcaaaaatttcgaaatttccattaaacaaaacattggctacgatgacgctatcggattaaagttcaaattggatacgggaaaggtttcaaagctatggaaaacatttgtacgagtgctacgagtagtcgccaaacctgttataccgacacgacgtaaaaagacagacccgtcagatgatgctttttttcagaaatggaaaggcctttctctttataaagcctctgcaggcgatgctaaaacaagtgatttagacgatattgaattcgacttcacgagtcatgagtatgctaaattcacatctattctaaagtgtccaaaagttacccttgcatatgatgtagatgttcctggtgttgtgccacatggcgcccatccgacaatacctgatattgatgggccagatgtgggaaataacggggcaccaccagattttgccttagatgttcaaattcatgggggttccatctgttatggaccctgggctcaaagacaggtaagtcatctacagcgagtcttatcacctgtagtatcaagaactgctaaacctatcaaaaaactcccgccaggttcgagaagggtgtacactctttttagaatgaatattttaataatggaagataccacttggcgtattccaaccagagaatcaagcaaagaccctcaatttttacaacactacaaaaaaactagtgaagagtatagaccttttggatggatggacctccggttttgtaaggacacgtacgcaaacttcaacatcagtgtgtgtccaacggtagaaggttttaaaaatgactttaatgttcatttcgtggacactgaaatcaggtcaagtgttaatcatgacattttattaaagagtaaagtttttgatcttaatggggacatcgggtaccccttaggttggaatagcaaagctatatggataatcaatatgaaatctgaacagttagaggcctttttactacgagagcacatcacattagtcgcagatacgctttcagacttttccgctggcgaccctacgccatatgaactttttaggccattcgtctacaagatgaactgggaaatggacggctattctatttacctgaacgttaatgatcacaatatcgttaataatcctttagatttcaacgaaaattgttacttgtcacttcatggggataaattaaccattgatatcacggttcctaaagagagtatcttgggtacgtacacggatatgtcttacgaaatttcaactccgatgtttagaatgatgttaaatacacctccatggaatactttgaacgaatttatgaagcataaagaagtaggaagatcctatgactttacgattaagggttcgtatcttctgtactcagagctagatatagataatgttgatacgctaactataaattgtacaagcaacagtacagtacttcattgttacgggtttgttatgnnnnnnnnnnnnnnnnnnnnnnnnnnnnnnnnnngtgagttttttaatttcgtgacttctgaggaatatacaggtgtccttggtgccagggaggttggagaagtcgtgacaaagagctcggtggtggacttagcgcctagtttgattcagagtgtcaggatgacagtatga

SEQ ID NO: 6039 - DNA, 1698 bp, Saccharomyces pastorianus
atggccttattggagaaattgcatcgaagggttgttgacatgggacttgtcccgcgtgtcattgctttattgcctgttatttccacgttatgtgccctgttcgggttcatatctattgctattctgccaatggatgggcagtacagaagaacttatatttctgagaacgctttaatgccatcgcaagcgtacagctacttcagagaaaccgagtggaatattttgagaggctatcgctctcaaatcgaaaagacggtaaacatgacttctacggaaaggaacaatataatgggctcctggttgcaaggatttggtaccaagactgctatttatgagaatgatcagtatggagaaacgctatatggtgtaatgcacgcacccaggggtgacgggacagaagcaatggtgcttgccattccgtggtttaactcagagaaggaattcaatgttggtggtgcatcgttgggtatttcattagctagattcttttcacgttggccggtatggtctaaaaacattatcgttgtattcagcgaaaatcctcacgcagctttgagatcttgggttgaagcataccacacttctttagatttgactggtggttccattgaggctgctgtggtactagattattctagtgcggaagatttctttgagtacgtagaagtatcctatgacgggctaaacggtgagctgcccaatttagacctggttaacgttgctatatctattattgaacatgaaggtatgaaagtttctttgcacggactaccctatgatcaactaggtaacaatgattttttttcaaggtttaaaatactatgcttaggaataagagattgggcgttgtctggtgttaagaatccccacggtaacgaagcattcagcggatggagaatccaatctgtgacgctgaaagctcatggacatggtggtcatgatattaccacatttggacgtataccggaagcgatgttccgctcgattaacaatcttttagagaaatttcaccagtcattcttcttttatttgctgttagctccacgccaattcgtttccattagtagttatttgccaagtgctgtagctttatcggtcgcatttgcagtaagttcattgaatgcatttatcaacaatgattatgccagtatatccttattttcagagtataatttgatagcggtattggtttggttcatatccatggttgtgtcatttgttatatcgcaactatttctttcggtactaccagctgggttgttgatgactattagtttagcaatctgcttcttacctatagcactatctggaaaagtccatatatcagaaccgctatcataccgattaaaaaacgttgcatttttatatttcagtttagtatcaacatcccttttgatgataaactttgctatggctttactgatcggtactctagcattcccaatgacatttatcaagactatttctattaaagcatccgctgagtccgaaacgagcttaggatcaaacatctcaataaaaaccgagcccaacgatgaaatgcagctcaatgagcattataaagaaggaatatccgagaaaaaccaacaaagacaaaaattgaagaatttatcgctattaatcttaacaaacccatttatttcgataaccgactctagaggatccccggtaccgagctcgattgtaatcatgtcatac

SEQ ID NO: 6040 - DNA, 90 bp, Saccharomyces pastorianus
atgcaattctctactgtcgcctctttcgccgctgttgccgccgttgcctctgccgctgctaacgtcaccactgctactgtcagtgaataa

SEQ ID NO: 6041 - DNA, 291 bp, Saccharomyces pastorianus
atgaccaccaacgaggaattcattaggacgcaaatattcgggacggttttcgaaatcacaaataggtacaatgatctgaaccctgtcgggatgggtgcgttcggactcgtttgttcagccacagacactttgacgtctcaaccagttgccattaaaaaaatcatgaagcccttctccaccgccgtgctggccaaaagaacgtaccgtgaactgaagctactgaaacacctgagacatgagaatctgatttgtctgcaggacatatttctttcgcctctggcagatatataa

SEQ ID NO: 6042 - DNA, 2412 bp, Saccharomyces pastorianus
atggatgaaaaagatgaaccagtaatttttggtgtttgtcttgtcgactttcatcataagaggggccctgaaatagaattctggtatggattacctgaggatactcaaaatgcggatttatggccaaatctacctttccaggcgcttcctgatggttctcactcttttgaagagacattcacttacttcacgttgctatatgacgaaaagaagcaaagaagtcctcccaacggtgccactgatttatctgaggacggagtcaatgataccacgactttatttgctatatcctgctcgagacagataaagagcgatgaattgcttgttaaggacaaagatataactcgatctactgtgcagaaggcaattgtggtcatctcaagacaaccaattttcggccaaattaaagacaaactgagcatagtgaccaatgcttttttcttacagcatgattttggagatacgaagatagttcagtcattatgtgaaaatttaaagtccatatacacgcctgtattgttgggcaggaacgctgaaaaccgtctctatgttggattgtgtttaaggaaaattctacacgatttcaagaagaacgttttagtgctgctaaaatcaatcttacttgaacgaaaaataatagtttatggtaacgatgtggaagttctatgtaatctacaatttggattgattagcttaattccggacttaatgtcaaatttacaagattctggaagtccgcaattgttccaggatgtttctaaactaaaggtagctgactcattcaaatcaagtaaccgagaatcagtgctaaggtttttgggtttccccttgccaatttttgaagaaggtggactattctcaccctatactccgttacagcagatgaatgacataaagtcaaaacgtactatgttttttatgatcggaagttctaacacgttactttccgaacgaaaggaggaattgtgtcacatcttcgtcaataccgatgactctaccgtggaaatcctggataaatccctagcttctattcttcaactatcaagccatgataaaaaatggatcgattcaatatcggggattgtgtcagacacgtggaatgaaaatgatgatgaaacgccaaagaattctcagtttgaaggaagtgaagattttattagatggcaatttgaagactatttaacagggctactttcaagtgttaaactaaatgattatttggagttgcataaggaaaatgaacaagctttgaagactatacctgaagatatgctgagttccaatccaatacacttattcaattcgaactgggtccatagttggaaggaaacccaaaattttcaaatatttaatgcaagaacagatgataggttatttgatttgtttcctccaaagcatatttacaatggcgctgacacattgtctctattacagcaaagatttttgtccacatttcataatttaaaaaggagcaccagtaatacttcaagtgataaaaatggacatcaaagtgaagaggattccaaagaccaggaaagcatcaaatcgaaaaggcctactgcacaaaccgctgtaaattccgagaagaacacagagaagccggcaactcatctatggaattcatggaaggaatattttaacaagtcaaagaatgctactaatggcgacatcaccgaatccacagaagatctcaaaaatagaggcaaaacaggaaatgccatagagaaagcaatgattggcttgggtttacattatacgccagaaggggaaacaagccaagaggaggaacaagaagaaatcgatgaagatgatgatgatgatgatgaagatgataaagatgataaagatgatgaagatgataaagatgataaagatgatgaagatgataaagatgataaagatgatgaagatgataaagatgatgaagatgatgaagatgatgaagatgatgaagatgatgaagatgatgaagatgatgaagatgatggagacgataaagatgatgacgatgaagaagatgatgaatctaataattcaagtgaaagttataatggtagcgagacacacaaaagcattcaaggcactagtaacgatgatggtgaaagtagcgatggtgcggaggacgacaatgatgatgaagacagcgtggaggacaatggaaggagaattgaagatgatgaagcccatggcagtgaaaacgaaaaaaaagccgaagtactatccaaagagaggaattcaagtgaaaaaacaggtgagaataaagctgatagtgcacaagacaatgaaaacaaacatgtcgaaagtaaagaattgcatgttgataatattgaacgtactgttcataagacaaaagaagaagataacggttctccttataccaatatagattcctttcaatctggcgaaaattag

SEQ ID NO: 6043 - DNA, 849 bp, Saccharomyces pastorianus
atggactctttagaaccggaagcagtcaacacgcatgtctccgcagagcagatcctgcgggatgtatacaagaagggccagaaggcaagaggatcgaccaatattgacatattagacttggaagagcttcgagaataccaacggaggaagagaacagaatatgagggttatttgaaaagaaatagactagacatgggccaatggattcgttacgcgaagtttgagattgaacagcgtgacacgaggcgtgcaagatctatttttgaaagagctttactcgtagataattcgttcatcccgctttgggtacgatacgtcgacgctgaattgaaagccaaatgtgttaatcatgctagaaatctgctgaatagagccattagtacgttgcccagagtggataagctatggtacaagtatatcatagtagaagagtcattaaacaatatcgatatcgtacgatcgctgtatacaaagtggtgttctttggaaccaggtgtcaatgcatggaactccttcgttgatttcgaagtaaggcagaaagagtgggctcgcgtgagagatatttattctaaatatgttatggtccatcctcaagtgaaaacgtggctaaattgggccaagttcgaaagcagacatggtaacgccggatttacaaggaatgtatattgtctagctttagacaccgtggctaatcttcaaagtttacaagacctgcaggcatgcaagcttgcactgcctcctttcaacgccatatatatcactttttattctatttctgtttctttatttcactcttctctctctccgaaaaaaaaaaaaaaaaaacccttcgtcctaaaaaaaaaaaac

SEQ ID NO: 6044 - DNA, 174 bp, Saccharomyces pastorianus
atgttgaattttgaaaaacaatttggtaatttaaactctatcgaagaaactatcagttataaaaggaaaatggactatgaagcttcattaagtcgtgacgcatatgattatgacacttggtggttgtacttgatcgacaagcttgatccgcacataatgccaactccctgccgt

SEQ ID NO: 6045 - DNA, 729 bp, Saccharomyces pastorianus
atgtacgctaaattcttgatacgacaggaaaacgtatcaaaggcaaggaaaattatgggtaaagccatcggcctttgtcccaaagcaaaaacttttaaaagctacatcctattggagatgaagttaaaggagttcgaccgtgtcagaaaaatatatgaaaaattcattgaattccagccctttaatttgagtatttggatcgaatacgcagagctggaagagaatttaggagatgaagacagagtgagaggcgtttatactattgcattggatgaaaattcggagtttctcacaatggaggcgaaggttgagctacttcaaaagtacataactttcgagactgaatcacaggaatacgagaaggcaaggacgctttatagaagttatttggagctgaatgaattttctgttcaaagctggatcgaatttgccatgtatcaaagttcaaccccaacggatcagcagttatccgatttagcaaaactccaaagtgagaatgtagatgaagatattgaatttgaaattactgacgaaaataaaatggaagcaagaaaaatatttgaagaggcaatcttgttcttcaaaaacagtggtgatagacaagggagaatgtctattttagaagcattgaaagactacgaggaaacatatggtactgagctcgataaagaaaatgttagcaagaggttccctaaaatagtcaaaaaacaaagctggaagatggtatag

SEQ ID NO: 6046 - DNA, 570 bp, Saccharomyces pastorianus
atgtatacaaccaagttttataggcctttgcgcggagtgagaagctttcattcctcaattgtcagaccgtttacaatccccttcttgccaaagatacctcaaaaacctgggggggtgagcggaacagcgaacgattcctcttatatgttacctgaaagcagagctcacggttcatatcattggattgtagagcgtggcctctctttaatggttcttccattgattatggttcctttggtcactacaggtcctatttctatttttgctgatacgtttctatccttggttctgctgggtcactgccatatcgggtttcagtcttgcattatagattatgtttcagaaagagtttatggcaaggtgcatcactatgccatgtatttattgagtttaggcacatttttatcactagttggtatatataagttagagagccaagaagcaggtcttattgggtctctaaagccttctatgggaaagcgaaccggtcaaaaagaaggagaaaatagtgactggaaagacgatatagttcacctcacgcggcctctttttttttttgagcgttgttaa

SEQ ID NO: 6047 - DNA, 1329 bp, Saccharomyces pastorianus
atgacgaagattaaagtggctaaccccattgtggagatggacggtgatgaacaaacaagaatcatctggcatttgattagggaaaaactggtcttgccctaccttgatgtggacttgaaatactacgatctttccgtggagtaccgtgaccagaccgatgatcgagtgactgtggagtctgccaacgctactttgaaatacggtgtggccgttaaatgtgccactatcacgcctgatgaggcaagagtcgaggaatttcacttgaagaagatgtggaaatctcccaatggtaccatcagaaacattttgggcggtacagtgttcagggaacctattcttatccccagaattcccaggctcgtgcctcaatgggacaagcccatcattatcggaagacatgcattcggcgaccaatataaagctacagatgtggtagtccctgaagaaggagaattgagattggtttacaaatccaaaagtggcaagcatgatctagatttgaaagtatatgagtatcctgaaaatggtggagtggcaatgatgatgtataacactacagattccatcagggggtttgctaaggcctcttttgaactggctcttgaaagaaagctgccattgtactccactactaaaaacaccattctgaagaagtatgatgggaaattcaaagacgttttcgaagccatgtatgccgaagcttataaagataaatttgaatctcttggcatctggtacgaacaccgtttgattgacgatatggtggcccagatgttaaaatctaaaggtggttacataatcgccatgaaaaactacgacggtgatgtggaatcagatatcgttgcacagggatttggttctttggggttgatgacgtccttgttgattactccagacggtaagacatttgaaagtgaagccgcgcatggcacagtgacaagacactttaggcaacaccaactagggaaagaaacttcaacaaattccatcgcctccatcttcgcgtggacaagaggtattattcaaaggggtaagcttgacagcactcccgacgtcgtcaagttcggccaaatcttggagagctccacagtgaacacagtacaagaagatggaatcatgactaaggatttagcattgattttgggtaagacggaaagatctgcttatgttaccaccgaagaattcatcgacgctgtggaatctagattgaagaaggaattaaggccgcgtcttctgacgttacgtataattatcccatctatttatttatatattcttcttccctttttcattgatattttctggtatttttattttcgtaaattgtga

SEQ ID NO: 6048 - DNA, 927 bp, Saccharomyces pastorianus
atgtcagtaacaaatgtagccactagggtagttgctacggcgagagattttgacaaagttggattagggatcatcggatactatcttcagttatacgcggtggaattgatactaagtgaagatgaacggtcgcaagaaatgactggactagccacagggctgctggatacgattgaagggttcaaaaaggaagttagcggtgaaactcaagcagaaaacagtgacaagagtatacaagtcatgaataccctaatacatgaccaagaaaaggctaaggtgtacatgctcaattttacaatgtcactgtataatgagaaactaaagcaattgaaagacgggccctgggatgttatgttgagaaggtcgctttggtgttgtattgacttattttcgtgtatattacacctttggaaggaaaacataaatgaagcaaatgtaagtgctttggagaaacgaataaaatactgtaaactttatttgagtaagctagccaagggtgagattggacctggagatgagaaagagctggattacactgactttatagacgacaacgaggagacaaaggatgaggaagttgatcatttgataaacaatttgaaaactgatgacatcaaaacagaaaaagagtgttgggaagaccaagtaaactctgatgagccaggagacgacgtacccgaatacattgacgattccgatagcatagatggagaagaaccgaaacgcggcaagagtgaggggtcgtatatacatgacagcaaaccggaagtcaagcaaagggaggtgccgccgccttccccatcaccggcgcacaaatcgtattcaaaagacgagttggccaacatcatggataagtccagtaagattgagcaaatccaaaagcttgctaaatacgctataagtgcactaaactacgaggacctgccc

SEQ ID NO: 6049 - DNA, 2070 bp, Saccharomyces pastorianus
atgatacgtcttttcaatggtccaaacatgttgcgaaggcaattctcatcatcaagggcactatacttgactaaaccgttaattagacccatagtgtacccaaagataagggcaagaccgactatacctcacaggaagccattgatgtttcaaacaattcgtttccagtcaagccctacaaatggaaagaagtctgctagctctggttcacctactttaaaactatccgatgcagattcaaaatcatcagggttcaaagatatcaaacggttgtttgtattatccaaaccagaatccggatacatcggacttgctcttcttttaattcttatttcgagttcagttagtatggctgtaccctccgtcataggtaaattattagatttagcttcccacaatgacgacgaagaagacgaggaagaaacaaaagataacaagctttatggtctaaccaagaggcagttctttacagctctaggggctgtgttcttaatcggcgcaatcgctaacgctagtagaataatcattttgaaagtcaccggtgaacgactagtcgcaagactaagaacaagaacgatgaaagctgctttagaccaagatgcaacatttttagataccaatcgtgtcggtgatttaatttcaagactatcgtcagacgcttccatagtggcaaaatctgtcacacagaacgtctcggatggagcaagagcaatcattcaagggtttgttggttttggtatgatgagtttcctctcttggaaattaacttgtgtcatgatggttctggctcctccattaggtgccatggcgctgatatatggtagaaaaatacgaaatttatcaagacaactacaaacttctgtaggtgggttaacaaaagtagcagaagagcagctgaatgctacaagaacaattcaagcatacggtggtgagaaaaatgaagtccgccgttacgcaaaagaagttagaaacgtctttcatgtcggtctgaaggaggctgttacttctggtttgttcttcggaagtacgggactggtgggtaatgcagcaatgttatcgttattattggtcggaacgaatatgattcagagcggtgctatgacagttggtgagctaacaagttttatgatgtacgctgtgtataccggaagctcactatttggtttatccagcttctactcggagcttatgaaaggtgccggtgcagcagctagagtgttcgaattgaatgatcgtaaaccgctaattcgcccgactattgggaaggatccagtgtctttggcacacaaacctattgtctttaaagacgtatcgttcacatatccaactcggcccaaacatcaaatctttaaggatttgaatatcactataaaacctggtgaacatgtctgcgctgtaggtccatcaggaagtggtaaatcaacgattgcctctcttttgctcagatattatgatacaactgcaggatcgattgatttcggtgatgaagacattagaaactttaacctgaggaaatacagaagattgatggggtacgtgcagcaagagccactacttttcaatggcactattctagacaacattctctattgcattccacctaaaattgcggaacagaaagaccgtgtcgcacgtgccattgggcaagctaactgtaccaagttcttagccaatttcccagatggtttgcaaactatggttggtgctagaggtgcacagttatctggtggtcaaaagcaaaggattgcattagctagagcattcttgttagaccccgctgttctcattttggatgaagcaacaagtgcccttgactctcaaagtgaagaggtcgttgccaaaaatcttcaaagacgtgtaaacagagggctaacaacaatatcgatagcacatagactttctacgataaaacacagcactagggtcattgtactgggaaaacacggttctgttgtcgaaactggttcattccaagatttgatttccattcccagtagtgaattaaatgccctacttgctgaacagcaggatgacgaaggaaaggaagaaacagcaacctcgaaaaaataa

SEQ ID NO: 6050 - DNA, 570 bp, Saccharomyces pastorianus
atgaaaaccagttccatattattcgcttcattagcttctctagccactgctcagaaggattccggctccttagatgaccaggtctctgacaatagttcccaaaaaagctcgagccctcagaagtctgcagcatccgtctccgcaaacgcccaggaaagtacgtctaaagcagcgtctacaacggcgagcctggtacaaaccagcaacgtcgtcagcaatacctacgctgtggctcccagtagcactgtagtgaccaccgacgcccagggaaaaacgaccacgcagtacctgtggtgggtggcagagactaattcagctgctaccacgacatcaaccgcgtccgtggagcccaccagtgagacgtcagggaaaagtcttagctctgcctcctccagcataacaacatcaacagacggaccaatcaccgtagtaaccacttcaaactcgttaggcgaatcatacacgtccaccgtttggtggctaccatcatccgctacattgagcagcacggcttcttcaagtggatcagcgtcacatcagcatcagcgtcagcatcaggctctaaggtag

SEQ ID NO: 6051 - DNA, 132 bp, Saccharomyces pastorianus
atgctaggaagggcattgcgacctgggtggctgggtattaccagagcgacagcgaggtacccgatctgcgggacctgcgctaacagacgacttagaggatccccggtaccgagctcgattgtatcatgtcat

SEQ ID NO: 6052 - DNA, 147 bp, Saccharomyces pastorianus
atgcctgccatgcaagagggtattctgagctcaatgacgattatgacgatgatgacgacaacaacaacgaggatcagcagcacggttagcgagccgttggccggctcgagcatagtgatgcagctggactctgtgatgagaaagtag

SEQ ID NO: 6053 - DNA, 1329 bp, Saccharomyces pastorianus
atgaagaacataatactgcaactggtgcccgttatcggcagtatcgggtttaccctcggagaattgtacaaaccaaaaaactctataccctgctctacaaacaagcattgtcccgctgagtggccatgctgttcaccgtataatgaatgtggagcaggtccaatgtgtgttggcggctgtgatgtgaggtcttcttttaatgaggagagctgcacacctatacctgctttggtgcccaatttggaggtcaagtttgtcagcacaccaaaggttcccaaattcattgcgaactatcaaccaaggccgccgatcaaggaggacaatgtaccaaaaaaggcgaataccaaagtaggtatcatagagggggaactcaattctaagagaatcatacactatgccaaattcttaatcactcccgatgtaaaagaagctgaaaaaatgctggatgattttgattttacacatagtggttatacctcaattgagccaagtacgggaaacattttattggccatgcccaagaaaactaccggaagtttagtcacaacaacaagatcgttcttgtacggaaaagcaagcttacgaatgaaaacagcacgttcaaggggggtcgtcactgcgtttgtcctcatatctgccatcggggatgaaattgattttgaatgcctgggcggtgatctaaccatggtgcaatcaaactattactcccagggacaattagactatactaaaatgcaaaggttccctgttggaggcgacacttgggcgacttaccacacgtatgagattgattgggatccggatagaattgtatggtatgtggacggcaaacccgcgcgcaccgttgtaaagaaggacacatgggacccagttaagaaggtatacaggtacccacaaactccgatgaggctggaagcagccgtttggccaggcggctctgaacacaatgggcctggaacgataaattgggctgggggccttatagactgggagaattcgcctgatataatagaaagaggccagtttacggcgcaggtcgatcaaatcaccgtaaaaccataccggaataaatttacagaacaagtgcagcattgcttgaaagcgaagaaaaatgcaaccgccatcctcgacaaagatctatcgaaagtggtcgtatcgtacaagaagcaaaacaaaaccgcacaatacgacgattcgtccctcgaatgggattgttttatcactccgagagtaaatgactggctgagttctggaaaaatgcgcgacattaataatagtcgcagtgataatggcttagtaaagcatttgcatacgtacactgacctctga

SEQ ID NO: 6054 - DNA, 1530 bp, Saccharomyces pastorianus
atgagtatagacgtcgattatcaattttttaaaaaaagtttaagaaaagagtttaagaaaacaacaaagatcattttaaagttacaagaatacgatggtaacgtattgagagattttctggctctctatataccatacaacgcagttttttataaccttgttattatgcaaaaggggtcatctttgagaattcaaaccaattatctgttcaaactagaattgagcaagattttaaactttaatcttgcaatgggcccaaaacatattatcaagatactgaaaaaagagaaggtcgacctggaaacgataaaaagactaaaattggtgctgtatataaaattattccaaggaatatttagccatgtggatgaaaactataacctggcattccaatcgtttcgctggtgtttacaattcattgcgtactcaaaaagagcaaaattatttacaagcattcaaggtgaacaaatttggaaattttatgaactttgtgaactatttgtgtccttactgtgttgccattgcttcctgattgatttgaaagagaacaaagaattggtaggcgataatctaaaaaactttataaaacgacaaaactccggctgttcccatgactttgatttgaatgaggaaaagaaatcgctccaatggcatcggacattggatgagatagatgttattgacgcattatactgcactagtttcgactcaatggataagtgtactctcgaattttcaaaagctaatgagaactttgtgttaagtcagtttttccagcattgtgcagaaattgaggagatgctagccatcttgaaaagtaaaatttgggagtgtgagagtgacgaattcggtttcaagattgggttgttaataaacaataaccatatgaatgaaatgattcaaaaaaacattttgtcgataactttcaaacttgataaggatcctcaaattatatgttgcttaaataaaattttacagggtttattactttcatcaggggttcaattcaaagttatccaattcttttacgtattaaaactatactatatgcaagatgatgaatcctcagaagaaaccccatccagaatggataagttgaccattgaatgcctgactattgttgagaacctgattgatgcctgtgacaaccctgatgaagtatcggattttcaactacccaaagtacttttaacctctatgcaaggaaaattacttgttgccgaaaaaacttttgaaggtgatgacgcttcagaaactattgatggttaccatcctcatatttatcagtttaaacatcctaaaatattgatagataaaatgaaatcaaaatttaaggagaaattgcacctagattcatttcaagatcaagaaacagatgactactggattgagtactggaaatactgctatcaggataatataggaaatatacctgaaacgttgtcatatgcctacgaagccttcatcgaagccggcacttcagcagaaaattaccgctctgtttcatattttctgtttcttagcatctga

SEQ ID NO: 6055 - DNA, 243 bp, Saccharomyces pastorianus
atgattgaatctctggttgatctgggcattaaccccaacgaattcccgcataagtacgtcactggcgaattgtcggacgatattcccatggatttaaacgtaggtatgttaaattcatccttaagagtttctggatattttttatccaatttcaatgcttcttccatggcttacttggttgtttgtcaaatgcttagaattaaaagtatatttatttataatatatgctgtcttattttgtag

SEQ ID NO: 6056 - DNA, 435 bp, Saccharomyces pastorianus
atgcgttgctcatcggctctcttaagctttccatatgcgtttggccgccgggcacaggtatgctggttaaggctgcggcaggaatgcacttatgcggcgtgcggccacgtctgtggcgggcggtgggtggtagacggcaggcacgggcgccgagaccgcgatgcgcatacggagagagcggtcatatgcagttacgggccgctacatggatgtcttagcgcggtcataaacttgcagcagggtattcttacagccattcgtcttgatccagtacttcctgtacttttcgactatgtcagatacgacttctgccctggaggcgtgcccatcgcagatttttttcaggtcttgctccatctcacggcgctggaagggctttgcgaaggagtcttcgaggccgatggcctcgaagccgtgcacgagggaaacgcctag

SEQ ID NO: 6057 - DNA, 1389 bp, Saccharomyces pastorianus
atggtcgctgctttatcatacctgcccaccgagcttatcgagaggatattcgagtttacagtggcggagaccgcctcgcaggagtggctgtacaatttggttacattgatcgacttcacagtttcttctgggggcgagaccgctataatgaacacgtttttaacaaattacgtcaagaagaacctaacggttttggacctgacctgcgagactacacagaaatcaatacggcagtttaaatataaatttttggggaagcttttaccctacattgatctggatacccaatatatcagactttctgatatagagactgcatctggtaagatccagagttcgaagatcgagaaacttatcgttatatttgacgaatcttccgatttggccagtatagacgcttttttccccttagccaattctaatttgaaaataaccgagttcatattttgtatccatgatctgaagagttcgttctactcgcctctggaaaaactgcacaaagcgaacatcgtgtcgaacatcgatatcaacacattgtacctagattctctagattcgaatgtttattcagatcaagatttctttggaatttttgactccaacattttccaactgattaataaagacttccgaaatttctttaccaagactaatcaaaaggggaatggaagacctccgatttgcaaaaaagtttgctttccctttgtggaaactttaaatttagattatatggctctggatttatttttcaattcgattctacgtaaactaactgccagaataaaaagttttgaaagaaataacgaatttgacgtgagcgaaaacttgaatttgaattcgacaacgacgatgtcatctttgattatcaaatcgatcttacgacaattcttcaacgatttccacataaactttcccaatttggtcactttgaatttcatcaagacttccactttccaaaaccgcaaagaggttactcagtgctgcaatttcatagattcatcgtcatctgtactgaacaaatgtttgagcgaaagtatttcgataaattttctcttccaactacactctttgaaaaattggtcattgcccaagatcaaggaatttaccggacacaaattcaagtacgacgaaaccacttcttcaggctcaccagagagatatattaaatcgttaagagggaacataaaaattttgcaagacatggcgattagcgaaaccaatgatggtacctgctatttcagagtgaagttgattcctgaaggtgtggagaaaacccaaataatcaactggataccctacgcttcttcattcgtcgatgacaccgccaaccaaagacaccgcctgagaagaccaatgatctgtttgaaaaacaactcattgaatccctga

SEQ ID NO: 6058 - DNA, 474 bp, Saccharomyces pastorianus
atgagggaagatagacagaaaagaaaccgtgaagatagtgctgatgaaaaaaatataccgcctcgcaagagatcgaaaactggctcaacagatgacgaaacagctagcacgaaattacgttctgccgtgcccaaaggctataaaatgatggaaaaaatgggctataaagaaggtgaaacactaggtaagaacacgaatgccctcaaagaacctattaaggtaaaaattcattccaagaaacaaggtatacgtacaagtaagcctactacacgcacagcaaatgacatacagacaagcgaacaggcatttaaagaacgggaaagtaagaagaagaaaaataagcagttagaaaaagtttggtacaacatgcagaaaactgcttttgaaatgacgggtgactctgagttatacaatccaggcgaggatccgagagactttaatgtactatggagatcatatgtgatacttgaatga

SEQ ID NO: 6059 - DNA, 2328 bp, Saccharomyces pastorianus
atgggtcgtccaaggaaaaatgttagtcaagagaaaattctacagttgaaaagagaactggagcttgccggtaacaggacggacgttttgctacaagacaaaaagggccgttccagatcgtgtcttctttgcagaagaagaaagcagcggtgcgaccataaattgcccagttgcacggcctgtctcaaggccggcatcaaatgtgtgcagccctccaagtattccacgtccacctcgaatagcaacaccaatagcaacacccctacagctggcactgtaccttcaccttaccctatattcaaaaatgagctgcaggatagcagtattggcgctggcgctggcacctctttgaacgatataaccataataaaacccatttccgccggccacacgaacatcgatgtcgctggtgcgaatgctcccaagaaaatcatgaagtctgcgaccaccactttcaatccgaatctaatgaagccagacaaggaccagtataccatgttcttggagaaaaaactgaaaaccctggagaccctgctggatctaccaccgggatgtaaccagtacaacaacaagttggcccaatacaggagaatttcgcacttactgagcgacaatggccccgactacaccaggccgccgaatgctaatatggtcatactgccgctgccatccccttcaaacaagcaactggaaaatagtaacgtcaccggcggcaatatcgggacggccgcgaccgatgtttcgaccatcacaaacaacataaacaacaataacgccatttgccaatcggtcagcctgttgaacgaccccttggagtcgctgaatttcaccaagtgtattttcgccaagtacaacttgaaaaaggaattcttgatgtatgaccccatatttgaactggacgaaaagctgtctcgttccttcttggacacgttcttcaccagattgcaattcaaatacccaatcttggatgaacgtgagatttacactttctacgatcactacctccacaacaagattgtcatcccgccttcttctccctccacgtcatccaccgcgccatcttcaaattcgcattcttactcggagatagaattccatttcctctccggtagaatgtggctggtcttcagtatcagcgcctacttactgatgaccacaggtaaatacaagggtttcccccctcatcggtacttctccaccgccatccgtcacatcaccaagtgtgggctgcacttgaactacgtccaacaaatcgaattgttgaccttattggtcctctacatcatcagaactgatagagattccctgatactgtacgacattatcaaagatgtcatgggaatatccaagaaaaaactgcatctaaatcaatggtatcccaatgatcccttcgcaaataaaaaactacggctgttttggtgcgtatatcttttggaaagaatgatttgcgttgccgtggggaaaccgtataccatcaaggaagcagagataaacctgcccctttttagcaacgactccttctatacaaatggtgtacacgcagcgtctgcggccccatccgccaaggaccacggtgtgcagtttatcaatcaatctttgaaactgcgcagaatcgaatctcagtttgtggagactttgcaactcctaaaaagcgattctaaatcagtaagacagtccaatgatcaattacccctcgtgcaaaaattctttgaagatttggagatttggaggaaaagttattctactctcgatgtgaaaaattttgaaaatgaaactctaaaactttattactataggtccgttcggctattgatccagccttatttggaattttttgctccggaggatagactattcagagaatgtcaagcagccgcgggtcagatatgtcaattatataaaatattccatcaaaagacccttaatggccactccacgccagcagtacataccgttttcgtggccggtgtcactttgatttattgtatgtggttggccaggaactttgatgaccaaagaaggaagaaattgggcgacgcttcgaaacacacgagacctttgataagtgcaagtctcttctctacaatggatgatttaagagcttgctccgtttgtttatacgtcatgacagaaaggtcgaactttgcaagaacttttagagacacttttgatcaactaatgaacgctacggtgggcaacttgatcgaaagatgtggtccagattcttctgaattgatcttcatggcgagcagtataactgattttgaacaatcaagacacaatgaaggccaacagactgttttcgacaaggctatttccttccacagc

SEQ ID NO: 6060 - DNA, 480 bp, Saccharomyces pastorianus
atgccacgggcatcgtggtcgagtgccaagaaacacggtcacgtgagcagaaccgccggcttgcccggctcaagctcgcgcgcgagctggccgccgcgtcgtgtgacacgatgccctccagagaggccgcgttgcagctgtggcaccgccaacagaaacacgcgcagcgccggcgcagtatcgcgaagcacgaacggcatggcgaggccgctcgtgctgaaaaagaggagcgcgaggcccgggaccaggaggcgctgcgtgaattattccgacggtaaccgcaggcgaagtgacaaaagcgaagcggaaaaatttgaaattaataaatttttcagctgcgggcacccaagctggctaggaggcctggtcacgaacaaagcactgcgacaacaatacacggaagttcctgctgctgcacattctgcacgtcgtcagcgagatcgcaccgtgtggtgcttatacgccaatcttagtttgtag

SEQ ID NO: 6061 - DNA, 339 bp, Saccharomyces pastorianus
atgtttttcaaagacatagatttctgcaaaagtggccctgaatacgagttaaagctccgcaaacacggccagaaccgctgcgggcttattttggcaggaaagaatcgcaccagcgacacacgccctaaccgcatcatcattgacttactagattgctacgtcccacctgcctgcatatgcgcacgcacatcttctatcccgatcattgtcagccaaggcccatgcatatatgtatatatacgtgcacaacacactaattaccgtgcggttttttttccccggaataccatcgcgcacgctcatgtgaaagcatatggaggcaggcagaccaacagctaa

SEQ ID NO: 6062 - DNA, 936 bp, Saccharomyces pastorianus
atgatgatgcggttagggcgtgtgtcgctggtgcgattctttcctgccaaaataagcccgcagcggttctggccgtgtttgcggagctttaactcgtattcagggccacttttgcagaaatctatgtctttgaaaaacattcaactatcagagctatcgtcaccgccgttgctgaaggaaaaggaaaaggaaaaggatgtcaagacttcgtttggtctgttggacaggttttcggaaaacttcatcgcccagggaaacgggttgaaacccactacttctcagaatcaactggacacaatcaagttttatcagttgctgcgtgagaggggcagcttctcggacgaacagtgtaaaaacattatttctttgctcttgcaactgttgaataacgagttctattctaactacaatgagttgtttcttagagatatggaactgaacaagcagtctcatctgttcagttccctggagactgaactgaagtttgccatccaaaactccagggacacgcagctaaatgagcatcatttgcaactcttgaaacttaagagagagctgaactccatccatgacgaactgaacgaagttataataaactctctgcaaaaggacgctaaactagagttcaataaccagaaactggagaataccctactgtataagcatatcaacctgaggttgaacgactcttccaacaagattcaaaccaagatactgggcgaaatcaggtcccacatcgaaaatttaagatggcaaacaacaagaagcggtctcttaatcatactggtccttgtttgttcgattatgatcggagtaagtgcgtcgaaaaaggaacacgcggtagtaccacaagaaccgacagaaccggaagagccagaacccccactaccggatcaagttccaacaacactctcctccgagaccagcttgaaataa

SEQ ID NO: 6063 - DNA, 153 bp, Saccharomyces pastorianus
atggcacatcgaaaagcactattaaccctttgcggtaatgaaaacaatcgtctggtacgacacccgctgcggcaaattacctttcctcaaaaacctcactttgatataatgacgcgtaaacgaaaaaaaaaaagcggaagccggaaaatgtag

SEQ ID NO: 6064 - DNA, 105 bp, Saccharomyces pastorianus
atggctagagaaatcaccgacatcaaacaatttttggaattgaccagaagagctgacgttaagaccgccactgttaaaattaacaagaaattgacaggccggtaa

SEQ ID NO: 6065 - DNA, 531 bp, Saccharomyces pastorianus
atgctctccagcatcttgaacagagtaggcttgggcaagggagccgcctgcagcctgacttttgacaggtccagcggatgcgtcaccatagttgcaaagattcccgccgcacccccataccaccacggatacttgatgttcttaccagctgagtctgcgttcgtcgacatcccgatgttgagatatgatggttttcctaagcccgctccggatattactactttacaagcaagagaaacgtacctctacacacaaacatgtatatatatatatatataccccaagcccgcggcccgattactacctgccccacctcctgcagcgatctcgctggccaaagaccaagccttgcagcccttctataccaagatagatacgagaagcacagcgaagagggccctttccttggcacaacgatgcgacgcgacgctatctcagaccgctctcactatcgcaattgagctccaacaacagcagcggacgcgctgttgtgcgaaagaggtcacgcattttgctggcaagcgagattaa

SEQ ID NO: 6066 - DNA, 1260 bp, Saccharomyces pastorianus
atgtcggattccatttttgaacagcctttcgtgtactgtggcgtttgccatagaagaacttctcatggagacccattgagattgacttcatgtgctcatattctttgctcgcagcattcgccggtgacatcgaaagtgtgtcctatatgtcattcaaacgatatatctataattaagcttgtagaatgtaaacaattgcccaccgatattaggatattttttgaaccattgccaccccttttagagacattgtacaatgtatctcaatttcaattgaaggggctttcgaaccaatgccaatactaccaaaaccactgtctgaaattgagggaaaaatgtgcaaggcagcagcaattgttatatcaagctaaagtagaactggattctatggcaggactgaagaaaagaatacaagaattagagacagtattaaaacacagcaatatgtcaccggtatcaatgggcatcatgtcgacgaaaaataatcatcaaagtcactaccagcctcctcccacagttgatttgacaatcgacgataatagcctagaagaatttgaagccaaatcgtttatccagaaactgaaaaaaaactcctctttgagaaatactgcaaaaaataataatggttcatctaccccatctataaaccatcatgtgaataaaaatcaatctctttacaccgagacgttgaaaaatccaaataataatagcattctatctcctaatttgaatccaaatgcaaaccataacttgcccaacatttccactattgcagaatcgaccaatctaaaccgattttcgtattcccctgtacatgttggaaaagactttaatggcaaaaacccaaacttcaatactcccacaaataatggctctttatcttctaagaacatatcaagattatcttctgcttcttttcaaccatcttcctctttgtcttcatcatctagtaggcttattttaccaaatagtaatcttgaagaattgcatcatttaaatactccaatgacgagtacttccactcagtttccctcagctttggaaaaattgaaaataacaaggaaaagaaacaatactattagtggctcgaatagaataacgcaaaacttaagctcgcatatgagaagtggtggtcttgcattttcgtcttcatccaactctttgcaacaaagtaagctacaaaagtcgaattcgctaaggcgatccaattcaactcagcagttgtccaatacgcagctcaaaaatgacatttctcaacct

SEQ ID NO: 6067 - DNA, 1281 bp, Saccharomyces pastorianus
atgtcgcaaataccgatgaactctactggcacaacaaactcatcatctcgtatgactaataataatttgaataacaacaataacaactacaatcaacacaataacatgaccgccaatactaaaaatgcagctcagaaaagaaataatgcacaagctcataatggcaatacgactaataacacttctatgcatgccaatcttgaaaacaacatggattccaactctataatacgacaatctcagcatcctcaacaccagcagaatataatacagcaacaactgcagtcaaattctgtcgccaacacatcaggagccgtgccggcaccaagtacgatagcttcggcagcgacatcgtctacaaccgcaaatttgaacgctatatctttaacaggggctccaaatccgaatttatcgatggccaatcattctcaacagttacatttgaacgggaacttggtggacgcagtttctactaatgatgtgtttttaagaactaattctccgtcaagacatgccccaaacaataaattaacgaatctaaacaacaatactggaattaacattaacaacaataacaataataactcacacaataacaataataataatatcaacatgggtaacaagaatattatggtgaatcgtcctcacacttttaacaactactctctcaacaaaacgtcaagaacatctattccaaaccaatcaagaaaaattgatcctcaccaaacagatttgtcccccttagttctcgttcaagatattgatttgagttttatggatgatgacattttaggacctggtaaccacaaccctatgaactctaacgtaaacacggcggcaaaccctcataattacaatactttccatccctccatgcatacaaaatcttctcaaaacatggtggacgaccaagatattgacgatatcgacgatgatgatgatgtagatgatgatgacgatgacgatgacgatgatgatgatgcagaaaacggatcagcatctaatgcaaaatcggtgcataataacaactacaaactgcctcagcaagcttacatagatgaccctgccagaaggctttatgtcatggatcatgaagagcaaaaaccattcaagtgtccagtcattggttgtgaaaagacttataaaaatcaaaacggtttgaagtatcatagattgcatggtcaccaaaatcaaaaattacacgagaatccagatggtacttttagcgttatagatccagattctacagattcatttggtgatggaatgggatctgct

SEQ ID NO: 6068 - DNA, 525 bp, Saccharomyces pastorianus
atggatttcacaacaatgaccatgacgagcaatatggctgctagtgccactacaacggctacgcctacacatacatcgatgaattcttcttcaaatcccaacattgatatggattctaaccagcacacaccttctatcttaataaataataattcagattcttctaatgcgaagactacagatttcaacggcatcaataatattcaccaaaaaagcgtcacgagcaataatacaaataacgtccatttgtactcgcctaatataatggaccagacactactaactccgcaagatattgctaaattacggagagagtccatagcccattctcaagggatgggcggtgtttcgtgggggtccattagcgttggttcttggttgagagatgagattatcagccgtagaagtagtattgtgcctccttcagcaaacagtgctgtcgctgctgctgctgttcccccgccgtttctaccactgctaccaacactttacaaatccaacaacctactaagagaccttctgtga

SEQ ID NO: 6069 - DNA, 123 bp, Saccharomyces pastorianus
atggccattgttcaaaccctttcttgtaacagaccccaccgtgcctttgtttcagcggtcccttacctgaagaaaaagaaatgtcttccagaaacgaatgggaaggcaagaaaaaagaaatga

SEQ ID NO: 6070 - DNA, 1968 bp, Saccharomyces pastorianus
atgaacacaaaaatactcctcccgatttgtgcttttttgacacttacaacgtttttattaacgattattgccaccgcgggttctacttcgaactataaaccactaacaaacatttacatcggtgatgctgatatttcaaaaattaatgttaccaaagtcgtgccacaagtcggcccagttttaacggttttgggttctgctttgactgctccaaacactacggtagataccatcttcggtgctcttaaggcaatcgcctctaccgaagtcttgtctcctctgttgaacttgttatcccatgccacagataccgcaacgacattgtcgtctctaacaaaattggctccaatggctttaacagggactaacgctggtaccaccgcagccttttctgccctcgatgaattattgactacttctacaaataccactgaacttttggatggctttagtactttgatgtcatccatgtcgagcaatagttcctctagttcgcttgctatggcaaacactgtcttaactctattagctgattccactgacccggtagccaccactgaatctctaattactttgaataatatgacttctgccgaaaaagtacaactgtccccagtatttgaattattcgaaacttctaagaacaccaccgctacattagaagcattaggaactattatgaactccactattccatctacaatggtttcttcattgtttaccagtctggaatctgcacttgccaagggaagcaatgtcactaccacaatcacatctttagcttcgcttgttccttctagtttgcattcagctgttcaagctgtcattacattatttgatgaaactacgtctcaaaatagtacgttgacggttttgagcactatgatttccgaaaacatcaccgaatcaccttccgctaaaacagctatggctgctttgactagcttattgggttacactacaaaccagactgagctactttcatctgttgcaagtttggctgtttccaaagaggccgcttcttccacgaatcaattagtggcacttgacgaaattctctccagcagtgctaacgcatcagctgttgtgtccatggttccagctttagaatcacaattggccagtaacaccgctttgcttcagtacgttccatatctgttcagtttactatctgcctccagtgacccagcattgactttctcatcgttggtcagcattaccaaatgggctgaaaacaatactgctacatttttaccaatattcaaaattttgaattccgctgaaagtgtgactgcaatcactcccgaacaattgaaggaattgactccatctattcttgaatatttacacattcctgtcgattatcgtctatctattttcacaatgtgccgtgctcacagtaacagaacaatgtattcatgtagcaaatcacatgccgttcaaaacatggatttcagaggaattgtttacgacaatatcattcaatcagactttaagccttacctggaagctttaaacgttagtaaagccgacttacacctggacggtgaattgcaaaaaagagaatatatgtatgttcctgccgttagagctgctttagccatgaacttgatgtgtatcatcactgctttcttcctaatgttatactttatcctattgagtagacgtcctacaattagccaaaaacaatggttagtgttgggatttatttccggttgggaatgtattttcagtggtttgggtagcgctatctttagtgttatcgttggcattatgaaatccggtagcaaaaaagataactacgatgttgttatcgctggatcttctccattcttcggtttaatgtggtctggatttgtatttgccgtcttggtattcctctatatcgcacacagttggtggatgggcagaaggcaagttgaccccatggaagctgaaatcaatgtccaagaaagcgactctacatga

SEQ ID NO: 6071 - DNA, 1275 bp, Saccharomyces pastorianus
atggaattaaatcaggtgttagaaaagaaggaagaaatttcacagtacttggccagtctggtcgggctgcatgagaaagcgttgtctgacgtagactctgcttcccgagttacaaacatccggaaagacatcaccatttgccttaatgatttatgcagagtcaacgatctcttagtatcccatgatggtctcttgaagagggagattgcttcattgctccacgacaagcaagacctactagacttgaacgagagagagcgtcttctttggaaagaacgggaatcgtggcatatcgagcaagaagtagataccgctcacgtagactatgttatcgacaagaacgccatcatctccatttcctcgcattacaggacgtcactaaacaaatatatcgagtcagtgggggcagaaaatacaaccttatcgtctacggctgatctgaatgacaagatcgaagacacacagaacacggactcttccgcaggtcaaatgctatgcaattacaaactgctgcagttatctcataggcaagccaaatcggaaataacaaaactagaaaacttattaagagacttcaaaaaggatgacaagttcatcgagcaggagctgaaaagtcaatctggacgaatacgctctgaaatcggcaatatcgatttccatttatccaagatcgaagagtcgaaggttcaactaatgaagaagatagggttcgagtcacctttaacgcaggaaaaatcactatcagagaggttgttcaacctgagattgtcagacactgatgagaattacaatgaaagggtgactattaacaaaaagaattttgttcatatgaaagacctcatcgaattgaaaattgatgatttgcaagaccaattaaccaaaaacaaaaacgagtcttccgcgttggtagcacaacgtgatttatggctcgattctcaaagaaaagtggcggatttggagaacgaactgataactaagctccggagtagcgcaggttctaagttatcgcccagtggtatgactggtatgatcaaatccacgatacaatacctcaatgaccttatcgattcatccaatgaaaaactcacgacaactttaatatccaacgaaagagacgtactcttcaaagcttgtgaggagctgaacacccaaggtccttcggcccctcagggcaatagcaatgcaacaccttctcgacctattgacatacgaaaacacagcaaagacccaaaggaaaattcaagtctaaggcagccaacacatccccattcttag

SEQ ID NO: 6072 - DNA, 312 bp, Saccharomyces pastorianus
atggcagtgaccctggttgacggcggagtaggcactgaggaagtccaggtattgcttaccctctgggtcccacacgtgcgcacccttggccttgtgaaagaccacgggcaaagggtggtagttgtgggcggagtacttgttttcccattcgatggtctgcttggaggagagggtggcgttagacattgcggtgtggtgtgttgctgtggggggagggagggtgtggagggaagagactcgtggaagaccaacagcagcgttgggcgtggcccgctcttatatatgctagcgagtcagcgagtcagccgctaa

SEQ ID NO: 6073 - DNA, 1344 bp, Saccharomyces pastorianus
  modified_base (1270)..(1309): a, c, g, t, unknown, or other
atgtctaacgccaccctctcctccaagcagaccatcgaatgggaaaacaagtactccgcccacaactaccaccctttgcccgtggtctttcacaaggccaagggtgcgcacgtgtgggacccagagggtaagcaatacctggacttcctcagtgcctactccgccgtcaaccagggtcactgccatcctcacatcatcaaggccttgaccgagcaagcgcaaactttgactctgtcctccagagcgttccacaatgacgtgtacgcagaattcgccaagttcgtcaccgagtttttcggcttcgaaaccgttttgcccatgaacaccggtgcagaggccgtcgagaccgcgttgaagctcgccagaagatgggggtacatgaaaaagaacattcctcaggacaaggccatcatccttggtgcagagggtaacttccacggcagaactttcggtgccatcagtttgagtaccgactacgaagactccaagctgcacttcgggcccttcgtgcccaacgttgccagtggtcacgccacccaccagatcagatacggccacgcagaggacttcatccctattctggagtccgccgagggtaagaacgtcgccgccatcatcctggaaccaatccaaggtgaggccggtattgtcgtgccccctgcagactactttcctcaggtcgccgcgttgtgccgcaagcacaacgtgttgttgatcatcgacgagatccaaaccggtatcggcagaaccggtgagttactgtgctacgaccactacaagaccgaggccaagccagacatcgttctgttgggtaaggccctttccggtggtgtgctaccagtctcatgtgtgttgtcctcccacgacatcatgtcctgtttcaccccgggctcccacggttccaccttcggcggtaacccattggcctcccgcgtcgccattgccgctctcgaggtcatccgcgacgagaagctatgccaaagagccgcccaactgggcggctctttcatcgccaagttgaaagctctacaagaaaagtctaacggtgtcatctccgaggtccgtggtatgggtctgctcactgccatcgtcatcgacccctccaagactaacggcaagaccgcatgggacttgtgtctgctcatgaagggccacggcctcttggccaagcccacccacgatcacatcatcagactggcccctccactggtcatctccgaagaagacttgcaaaccggtgtcgaaaccatcgccaagtgtatcgatctgnnnnnnnnnnnnnnnnnnnnnnnnnnnnnnnnnnnnnnnnccttatattttatttatatgtacctacgtacctga

SEQ ID NO: 6074 - DNA, 468 bp, Saccharomyces pastorianus
atgaacgactctacagaaccccccaacgtacaaccagataatattaacaaccaggatactgctttaccaaaggcaacctcaccagaaaacccgagcctaaataacaaagtgccaagccttttcaaattagccgcccaatggcaaataaataatccgcaggaaaacattcaaaaccatatcatggagaatgaagtgcttcagagaatcaacgagattaccagtttgataagagaatcctataaagacctttccaaccaagacggaatgatgtccaaggaaccccaagaaaagttggattgggacctcttttgtaccgttcctgtgaatattatcgagcagtatacaaaggatatggacgatattttcgggaaaatggaaaagttgtccaaagtacgtataaccaaacagacaaacaatactcaacaatgttcttttttactaataacaatttcatgcctattttcgtaa

SEQ ID NO: 6075 - DNA, 573 bp, Saccharomyces pastorianus
atgcctattatgttggaagactaccaaaagaactttttagagttagccattgaatgtcaagccctgagatttggttctttcaagttgaaatcaggtagagaatcaccatatttcttcaatttaggattattcaataccggtaaattgctttccaatctagctactgcgtatgcaatcgccatcatacaatctgatttgaagtttgatgtaatttttggtcctgcctacaaaggtatcccactagctgccattgtttgtgtgaaattagcggagattggtggctccaaatttcaaaacattcaatatgcatttaacagaaaggaagccaaagatcatggtgaaggtggtattattgtcggctctactctagaaaacaaaagaatattaataatcgatgacgtcatgaccgctggcactgccattaatgaagcattcgaaattattggaaatgctaagggtcaagttgtcggctccatcattgccctagatagacaagaagtcgtgagtactgaagataaagaaggtttgagtgccactcaaaccgttagcaaagatacggtattcctgtcttga

SEQ ID NO: 6076 - DNA, 402 bp, Saccharomyces pastorianus
atgtctaccatgaatttcttattatccacaattttacctgggatgtataatgatgcagatgcaggaaccagtagcttttgtccttcattttctggctgggaaactgttttgatgtcatcaatgcattctacaaacttgcccttggccatggacagtgcttgcaatgattgtgtgaaatgctgcaattcttggtcgaactgttgtttcacagcagttaattgctcgggattcagcttggttaaatcaactatttggaaatacgcatgtgtacataggttagtaaaagaatttggtggcaataccaatgagggggtagaaatgttcacatactcttttgggaggacatggtttggtttgagtgtgctctttcttactttaattttagcaagatttttcaactag

SEQ ID NO: 6077 - DNA, 2520 bp, Saccharomyces pastorianus
atggcttttaaatcatttaagtataacatatattccaaaggttaccatcgttctgccgctcaaaagaaaaacgcaacttcttttttcgatagttcctaccagtatctaagacaaaaccaaggtttggtaaactcggatccggtactacatgcatctcatctacatcctcatccggtcgtagtagcgaatgttaactataataacgttgatgacgttttgcacttgcacgacctggattccccattaaacatcagcaccaaccctctaacgcacgatgaactgctttacaaccaaaacgtttctcttcggtcattgaagcaacagcaaaacaacaacaatgctaataatagcagcactcaacatagatactattctactggcccaactgttccagccaaccagtacgattctttgaactttagttctaggaatttccaagatttacaatcaaaacaacaacctccaccagtacaaaagcaacagcaacaagagtataatcttctggaagacgaaaacacatttgtatggaaagaagacactgaaccgtgtctgaacacttccacatatttacaaactcacattgatgaaattaatcgttgttatgaacagaataattacaacaaaatcaactcactgtatcagtcgctcaaaagaaatggtatagttccacccttggaaatctttacaaaagttttagactctctttgtaaaaggccattggataataacgatttagataataagatgtacgaattattaacgtgttaccaagatatgatcaataacagaatgaaacctcctgatgaaatttacaacatcgttcttttatcgcttttcaaaggctcaattttggcctatcaattcaaaaatccaaacggtagtgatttctataaaattgccatagaactattcaacacaactaccaatgatcctaaacagaagagcgaagtcaagttccgtaacttctccaaggacgtcttggattataacctcttagcgatgaacatttacccaggccatatcagcttatcaaaagctcaacagattatcaaatcttctccagctttcatcaaggattcattttattttattgcatgcttttcatacgccaaatcaacaaatgataaattggccattaaggaactttatgaagattttagactatctatatcctcttctgcctcaaaccaaactttattcgataaccagtttgaaatctatagcgtgattctttctagtttcattgagactggcgaggttgagttggctaccaatcttttggatgatttggtttcgaagattcagaattcaaatggtctagcctccaacatttctttgttgctatcaaattttttaatctcaatgagtaagattgattcttccaaagcctatgaaatttggtttaaattccacaaactagactggatacctgaattttcttatgaattttatttgattttcatggcaaatagtttccaggattggaatctgaccaagaaaatttatgattatattttccccatgaaaagaagtttatctccattgaaaaagcaaaaattatcggattatctgctatatccaatgggtgctgaatccattataacgtctttactagattactctctccagttgaaagacaacgagattatcatgaagattttggaagagtccgttatcaaaaacttttcctttgatattggtatttatccattcattttcaattatttaagagaaatcaaatgtggcgacgagtatctcatgagatttatcgactcacacgctgaatttttcgaaaagagtgattctgtcagcaaattccaatttttgaattcgatagttgataatttccaatcacaatcattattgaacagtatatcccacgcaaagtttttcatgaatttagtgaaggatttcaatctggaaaattgtgaaatcgtcaactataatgggttgataacatgtattcataactttgttaaagcgccaaagacaataaaagactttccatacattctagaaattcatgccgttttgattacgaaattgtttgactttgacacttacccaatactacaaaacaatagcgatgaaactctattaaactttagagaccagattgaacatcagtttcgaattttgactcaaaacttttatagattgaatttggacccaaacttactagctggtgttgtttcccaggccttaaaaatgattaatctcgacgaagttactaatggccaagacttgttgagattctttaatcatcctggggattgggacaaatcttatccattgtccttgggttccttcattagaaattcttgtaaggctggtataagagagtttactaaactaagcaaggaaggatattgctttgattatgatacatacaaagcgttgatagtcaatagagctattaacagacagattattgacagatgcatagaaatatgccctgatacaaccgaattgaaatctcttgttaatttgataatttccagattcctggtagagaattga

SEQ ID NO: 6078 - DNA, 729 bp, Saccharomyces pastorianus
atgataaaattgatcaaaaattgcgaatctttatcaaatttcattagagtttgtgatttcccagaaaaattcaaaagtattgccattcaagctgaaaacaaaaatgctattgaactgatttacgaaaaattgtttgacagtggaaactatgctgatattttgaggtataacaatgttgtacctgttcttaatttagaacttttactaaaatcatgcattagatatggtgaatttaagaaatttgaaagccttttcaaaaaatttaacgataaaattaacgaatcatccaagattgatattcagttagagtatctgatcaataagaatgacttggaaggagcattggaactattcgcaaaaactccaaaggatttaagaactcctcacaagaccatggacctatatacttttgcattatttttggacagtttcaatagagacatcacgtattatgaaactccagagaatacattacagttcgccaatattttatccagccaagcaagctatataaatttgctgtccacttacaatctaattgcccattcagatcaactgatgagctttaacacaggtggaatggccagtaaggtaaagaaggaaatcttaactcaaatgctgaacaatctgtatgattccgtgagattattgtcttctagcatagagaccgacgaatccatgaaacgaaacatggagagaagaaagtacagaattactgcagatctaaag

SEQ ID NO: 6079 - DNA, 1917 bp, Saccharomyces pastorianus
atgaagcaatctggcttggttttgcaggaccttccacctgaaattttgataaacattttttctcacttggacgaaaaggatttattcacactacaagaaatctctacacatttccagcaactaattcgcgatgaagaactgtggaaaaacttgttcaagtctagaatttatactacacatttccctacgttttcccagtccaccaaatttagtgtagaatacatcgaaagaactcgtggtcttcataattggaaacataacaaagccataagaactaaatataccataactccgactcgtaactgggaccagcctagcatagaacgtatagtattcgattacccacgagttgctgcttacaacgatggtataattaccatcttgcaattacaaaaccacaagagacagaagaagtttaaaaagctaatttatattccatgtacgactccacagggatgctccaccatggactttaacatcaatgccgctgtttttggcaggtttgatggtagagtgtttgggaaactgctaagtaacaaatcatacttgacgcctgtgatggaatttattggaagacatagttcaggtgtcactgccatttgtaattcagagtcctgggatacgtcgagagaagactggtgtgtgagtggttctgaaaatggtgaaattatttggtggtgtgaaaacaaacttgttaagatgtggaaggtttgcactagggtgatttggaaattggccttttttaaagattggaccttgatcatggatgatgaaaaactttacgtcatctatcaaatgcgtgaactacacagcatagacattccaagggacgcggacgatcaaccggtaagtgtacgattcttcaaaatggattttggttccatgaccttggtattggctgatctgaataatgtttatacaatatcggtcaacccgaatggtaattttggtaatttgagaaaattagccattccagaacaaatatgtgccatagagatagatgaaaagacctcgcaaagagaacagaactggcaatttgccggtgacgacggctgctacatcagtcttttgactactgcgaataccatttacattatcaatataagagatctttcaacgacgggtttgaaagtccaatgcagaatcaactttgacgaacaagtttatgtttcgcaagtgaccaacttaattgttgtcgtggcactaccaaacactcttcaaataatgaacatgatgaccggtgaactgattaagtccgttttgaagaccgacaaatttcctgagtttttgaaagtttcgcaagataaaatcgttatggggagcggtaatgtgttgaattatttattatttgtttcaagcgattcaaagaaaaaacatcattccagtaagagtaaaaatgcaataagtaataaatggaatgaaaccttgaacaccgagttacaatattatgacgaagctgaagaccttagaaggcaaagacaatcagaaatatcaagattaatccacgcatatggtggagatttagaacctttaggtgacaccgaagaagaaaatgacattcagttaagaattgcgctcctggaatcgcaagaagcacaagcgcgaattgacgctgaaactgggccacagattgaggatgatgaagatgaacaactacagagagctttggaagagtcccagaggttacatgaaacacagatggataacttggctgatctatccattacttcgagccaaggagaggatgatgctgaagatgacgaagagtttcttagagctattgaacaatcaagattggaggacgaaagaaggagacaagtcagaaatagcaatacaagccgacgaaatggacctttaatggatgaaacatctactacaaatagcggttcatccggcgaagtcttcgctgggaacacc

SEQ ID NO: 6080 - DNA, 975 bp, Saccharomyces pastorianus
atgccgctgctatccaaaaaattgaaactggtggcgaaaccaattgcctatgtttctaggttttcagcaaagcgcccaattcatataatactggtgtctttgatcatatccgcatttgcctatctatccgtcatccagtactatttcaatggctggcaactagattcgaacagtgtttttgaaactgcgccaaataaggacaccaatagtctttttcaagaatgttctcactactacagagattcctctttgaacggctgggtgtcaataaccccaaatgaagccagcgacttgtcaacccctcatcactactatctattgaacctaaatttcaacagcccaaatgaatccgcatccattccggacctatccaataccgtttttgacaaggaaaatactaaatacatcttacaagaagatctcaacgtatccaaagaactttcctctactgatggaacacaatggagattaagaagtgacagaaaaagtcttttcgacgtaaagacgatagcatattctctctatgacgtgttgactacacatatagctcaagcagacccattcgacgtccttattatcgttaccgcttactttatgatgttttacacaatattcggcctcttcaatgatatgaggaagactgggtcaaatttttggttaagcgcttccacagtggtcaattccgcatcttctcttttcttggcgttgtacgttactcaatgtgtcttggggaaagaagtttccgctttaaccctttttgaaggtttaccgtttattgttgtcgttgttggctttaagcataaaatcaagattgctcaatatgccttggaaaaatttgaaagagttggattgtcaaaaagaattactaccgatgaaatcatttttgaagccatgggtgaagaaggtgcccgtttgattcaagaccacttgctttgtatcgttgccttatcgggatcctctagagtcacctgcagc

SEQ ID NO: 6081 - DNA, 849 bp, Saccharomyces pastorianus
atgtcagccaaatcgttcgaggtttcagacccagtcaattccagtcttaaggggtttgccctcgctaatccttctataaccctagtgcctgaagagaaaatccttttcaggaagactcaatccgagaacattgccttgatctccggtggtggtagtggtcatgaacctacacattctgggtttattggtaagggtatgttgagtggtgccgttgtcggtgaaatatttgcgtccccttctacaaagcagattctaaacgcaattcgattggtaaatgagaacgcttctggtgttttgttgattgttaagaactacactggcgacgttttgcattttggtctatctgctgaaagggccagagccttagggatcaactgtcgtgtcgctgtcatcggcgatgatgttgcagttggcagagctaaaggtggtatggttggaagaagagcattggcgggtaccgttttagttcataaaattgtgggtgcctttgccgaaacgtactctagtaaatatgggttggatggtactgctaaagtggccaagattatcaatgataacctggtgaccatcggttcctccttggaccattgtaaagttcctggcagaaaattcgaaagcgaattaaacgacaaacaaatggaactaggtatgggtattcataatgaacctggtgtaaaagtcctggatccaattccttctactgaagacttgatttccaaatacatgctaccaaagttattggatccaaacgacgaggatagagccttcgtggatttcgacaaagatgatgaagttgtcttattgatcgacaagcttgatccggccataaggccaattcaactgcacgtc

SEQ ID NO: 6082 - DNA, 267 bp, Saccharomyces pastorianus
atggcgggcaccttgctcatgattctatggttcgtcgccacggtccttccgttatcgagggtatactgtgtgaggtctctcgtgggctgcgtggaagaagaagcaacggtggcagcagcagcagaagcagcagcagcagcagaagcgagcttggaatctacggcagtcgcgaacgattccgggtgttctgctttattttctataatcttgatagcagcatttatctgctcagtgtttcttatggcgtctgaagacatggcggattag

SEQ ID NO: 6083 - DNA, 129 bp, Saccharomyces pastorianus
atgattgagcatataaaaaacagtctcgttaccaaatggttgaaccgggtcttgcacacgtcgctgaagatagcgtggtacgtgtaccgtggattcagcaactccctaggcgtctgtatcatttcctag

SEQ ID NO: 6084 - DNA, 768 bp, Saccharomyces pastorianus
atggaggccaacgaggcagctagcaaagaacaagagtacgttcacaacgtgtacaatgagatagcgccgcatttttcgcagaccagatataagccatggcccatagtgacgcagttccttcagacccgtgccatgggggccatcggcatagatgttggctgtggtaacggcaagtacctcggagtgaaccctaacgtatacatgatcggttcggatcgctcggatgggctcatcgagtgtgctagaggtatagacccggcctacaatctgatggtggcggacggattgaacctaccgcatagggacggtacgttcgactttgccatctcgattgccgtagttcatcactggtccacgagggagagacgtgtcgaggtgatcagacacatcctgtcgaagttgtgccggggcggtcaggcgcttatctactgctgggccctagagcagggcagctcccgcagaggctaccacgagggaatggagcaggatgtttttataccctgggttctccccaaggacaagcccaaacttacaccagctgccaaggctaaggccaaatcaaagccagacttagccaacatcccgcccaaggagcgtgcccagtacttgcaacgttggagggaaaaccacggacagcaagagccggcgacacgcatgaaagcccacagagcaagcggacagaaagtgagacggacacataaccggaggaatacaagagcgcaggggccgccaggaggcagccaatgggggccaaagaagggaaaaagg

SEQ ID NO: 6085 - DNA, 369 bp, Saccharomyces pastorianus
atggtggtgcctccgcgtggggtggtgccagcggtggtgcctctgcttggggtggtcaaggtacaggcgctacgtctacttggggtggtgcttcagcttggggtaataaatcaagttggggaggtgcttccacttgggcttctggcggagaatctaatggtgctatgtctacttggggtggaactggtgacagatcgacttatggtggagcttccacttggggtggtaacaataagaacaagagtacaagagatggtggagcttctgcttggggtaatcaagatggtggcaacaggtccgcttggaacaatcaaggaaacaagtcgaactatggtggtaatagtacatggggaggtcattgatctctag

SEQ ID NO: 6086 - DNA, 1725 bp, Saccharomyces pastorianus
atgcaattacagaatatattactagctacctcgctagtgtctggactctctctcgctgcagactcgtcgtcaagcataggtggtggttacgctccatcaaaaatttcttgtcccgatgatggcgcttctttagtgagaaatgcctctggtttgtctactgatgaaaccgaatggttgaagaaaagagacgtatacaccaaggaggccttacattctttcttggatagggccacttccaacttcagtgacaattcgttgctctccactcttttcggtagtaattcctccaatgtacccaagattggtattgcatgttcaggtggtggttaccgtgccatgttaggtggtgctggtatgattgctgctatggacaaccgtactgacggtgccaacgagcatggtcttggcgggttattacaaagtgccacttacctgtcaggtctatctggtggaaactggttaacgggtactttggcctggaataactggacctctgtgcaggaaattttagatcatataagcgaaagcgattctatttggaatatcacgaaatccatcgtgaatccaggtggctctaacataacctacaccattgaaaggtgggaatccattgcgcaagaggtacaggccaagtctgacgctggctttaacatttctttgtcagatttgtggggccgtgctctttcttacaacttcttcccaagcttaccaaattctggttctgccttgacttggtcttctttgagggatatcgacgtgttcaagaacggtgaaatgcctttaccaattactgttgcagatggtagatacccaggcaccaccgtgataaacttgaatgccactcttttcgaatttactccattcgaaatgggttcttgggatccttccttgaacgcgtttaccgatgttaagtatctaggtactaaagtttctaatggtaagccagttaacaaggatcaatgtgtctccggttacgataatgctgggtttattattgctacttctgccagtttgttcaacgaattttccttggaagcttctacttcaacatactatacaataatcaacaattttgctaacaggtacgtcaacaatttatctcaaagtgatgatgatattgctatttacgcaccaaatccattcaaggacactaattttgttgaccgtaattacacttccagtattgtcgatgccgatgatttgtttttagttgacggtggagaagatggtcaaaacttgccattagtcccactaatcaagaaggaacgtgacttggatgtggtctttgctttagatatctcagacaatacggatgatatgtggccgagtggcgtctgtatgacttacacctatgagcgccaatattctaaacaaggtaagggaatggcttttccatacgttccagatgtgaatacttttgttaacttgggtctaactgacaagccaactttctttggttgtgacgcacaaaatttaacggacctggagtacgtgccacctttggtcgtctatattcctaactcaaaacattcgtttaatggtaacacgagtaccctgaaaatgaactacaacatcactgagcgtcttggaatgatcagaaacggttttgaagctgcgacgatgggtaactttaccgacgactctgaattcttgggctgtatcggttgtgctatcataagacgtaagcaagaaagcttgaatgctaccctgccatctgaatgtact

SEQ ID NO: 6087 - DNA, 1305 bp, Saccharomyces pastorianus
atgaagaaccaggactcaaaaatacgaaagatctggacacacccgataacagagtacttgaagtctcaatggttcttcttctgcctggcaattttaattgttattgcaaggtttgccccaaattttgcaagggacggtgggctaatcagaggccaatatagtattggttacggctgtgttgcttggattttccttcaaagtggattaggaatgaagtccaagtccctaatggcaaatatgttaaattggaaagcccataccactattctaatcttgagttttttaatcacctcatctatagtgtatggattttgctgtgcagtaaaggctgctaagaatccgaaaatagatgactgggtacttattggtctaatcttaactgccacttgtccgacgactgtagcgtcaaacgtcattatgactacggatgctggcggaaatgatcttttatgcgtttgtgaagtgtttataggtaatcttctgggcgcatttattactcctgcattggtccaaatgtttactggccaagcaccgtttcaatacggcaatcctgctaccggaaacggtataggtgctctttatggtcgtgttatgaagcaagtcggtctttctgtcttcgtacccttgtttgtggggcaagttattcaaaacgtttttccaaagtatactgcatattatatgggtttcttgaaaaaataccatatcaagattggatcctacatgcttttgttgattatattcagttctttttcaacagccttttatcaaaattcattcgcaagcgtctcccatgtttgcatcatatttatctgttttttcaatttgggaatttacattttcttcacaggattgtcatacttgtgtgcaagaccttggtttatcatcaagctttttccacacgaacccattgatggcaaatctacaaaactataccgttactcttatagccttttcaggccattttattattctaaggatgatgcgatctgcatcatgttttgtggtcctgccaaaacagccgcgctaggtgtatcgttaattacatcgcaatatgccgataaaaaagaacatttaggtaaactgttggttcctctggtgttatatcaagctgagcaagtgatgactgcaagcttattcgtcagtttgttcaaaagatggttacgaaaggacgacccatcaaatggaagtgagtcttcctctacaagtggaaatgaggagcctgacctggaaaagaatatttcaatggaaactggtcacaatagaactgtcccttcaaaaacgattgcatttcaagactcaaaataa

SEQ ID NO: 6088 - DNA, 1056 bp, Saccharomyces pastorianus
atgttttcaaaaactgatgaaagtgaggaaaaacacaagccggtcaggtgtaaagtaaatccgtctgacttggcatcgatttcacctttagttttgggtggtgcagtgctgaaccaacagtacaccgatgacccagaatccatccctttggaagacatgatcaaatacgccttcacacacggcataaacgcaattgacacttccccttattatgggcctagtgagatcctttatggcaaggcactaaataacctgaaggatgacttcccccggaacacttacttcatatgcacaaaagtaggccgcattgctgaggatgatttcgattattccagcgaattcgtcaaactcagtgtacacagatcatgcaaaagactgaacactacctatctcgatctggtttacctgcatgatgtggaatttgtcgcgttttcacaaatcttggaagcactcaaggaattaaggatcttgaaaaatgaaggcgttataaaaaattttggcctatcagggtacccaatcgacttcgtcacttgggtagctgagcattgttctgcgaaggacaacgatatcggttcattggatgccgtactatcgtactgtaacctgaatttgcagaacaaccaattactaaagttccgcgaaagactactacaggctgccaacttgaaaatggtttgcaacgcatctatcttgagcatgtcactgctaagatcacaggaaacaagggagttccatccctgttcgcaagaactgagagaatgcgcatccaaggcggctaaatattcccaagagcaaaatatcgacctagccgacttggcgacaagatacgcaattgcagaatgggtgggcaaggggcccgttgttcttggagtcagcagcatgggcgaattaaagcacgccttggacaactacgaaaacgtaaagtccaatggcaacaaattgtctcccaaagaccaaaggctagcaagttttattcagaacaatattttcaaagaacacttcaatgaagcctggccgtccggcattcctcatccagaaatgaagaaagtctcttaa

SEQ ID NO: 6089 - DNA, 1503 bp, Saccharomyces pastorianus
atgtgtgtcattaggatgcagtcccgcagatggtatcctgcattcaaaaggattcccctcttagtggatagtcaaaaaatcatcaaacatgaagtacctcatccagatgaaatacttcacccattctaccagccagctccaatagaacagtttattgcatgtgctacggaatacaatccaagcttactcgatggcaaaaaagtagttccgtcaatcatacaacacccaataaagcaaaatagcgtgttagtggatagcaaattagaatttactgatgttaggggtgtaaataaatggttactagatttcatttcgaagcgacaacagcagaagatgctggttcataaacctctggacaaggacaccaaattttctcaacttccgtttttatcttcttctgatatatccagaatatcaagccttgaagatacactattaagcattagagatacagatgacttggaatccagcgtcgagaccgtaaacaatgagttgcaacgtatctttgagcgtgaagataagcagtctaagttgttttgtgaaaatatacttgttcatttgataaaccaccatgggaattccgttcagaagcttatattgctaatgaatctcactcgggtacagttattctcacgtttggatcaactgaaagccttggacattgttatgtatcatacactttgcaaaattagaaccatcggcaatctgccatataacacctatttgatcaccacattggaaagtttattaacgtcaatcaacgatagattttttcccagatgttgtgaagattcattacatccaattgtaatcgagcagctgttatcatttttcattgaatcaagaaatttaaacgaaagtaagatttttttgagtcatttgataaaaaaaggcattttgcccaacacaggcgctataaatggatatctgaagagtgtggacgagcattttggtaggacttccaattttttggatataaaattcaagttcgcgtttataacagatcttgcaccaataatacaaaaccatgaggtactaccgctatttaaattcttgatacctatgtgcagacattttgatgaactgtactctctgttgaatactattcgaaaatcagacaactccaagcaaatcatggacagcatactatccatacttattaagaaggtacctacatttaccaacgacccaatggttaactcagcaaacttgtgcacgcttttgaacttagtaatcccactatatgaacagagcctatccagtgaatttgtggaaaaattcatactagctttcgctcttcaaggaaactgtactatgatggccaatatgatagatgaatatgagatcacattaactcacaaacggcaaatgcaaataatgagcgctctagccaaaaatgagaaaaaccacatttcgaagcatacagacgctataggttatagtaaagaattcaagaagtacttcttggagaactatttatctctaacaaaaccgaagagctga

SEQ ID NO: 6090 - DNA, 1086 bp, Saccharomyces pastorianus
atgttgaaagaagcctcagctagtttgcgagaagctattatcgaagggactgtactcatagtgaaaaggctattgcgacggtacccggatttgctgaccaatatcgactcagagaatggatggagttcactgcactacgcctcgtaccatggaaggtacctgatatgcgtgtacttgattcagttgggccacgacaagcacgagctgatcaaaacgttcaaggggaacacgtgcgtgcatctggcattgatgaggggacacgaacaaacgctgcatctccttctacagcaatttccgcagtttatcaaccaccgcggggagaatggcagggcccccatccatatagcgtgcatgaaaaactactaccagtgcctgagtctattgataggggtcggggccgatctctgggtcatggataccaacggcgacacgccgctgcatgtatgcctggagtacggcagtttgaattgcatgaagatgctcgtcaacgaaggcgaggtgtcgttggacgacaacgtcaaggacaagggtaactggaagccgcttgatgtggcgcagacgttcgaagtggggaatgtatattcaaaagtgttaaaagacgtgaagaagaagggggtaccgctgggcaccggcaagaaacccagttcgttcaggactcccatcttgggcgcgaaagcagctttcgaagacggaccttctccagtgctaagcatgaactcaccgtattcgctctattctaacaacagcccgctcccggcactaccaagaggaatatcgacgcacaatgcgagcgtcactggagggaccaaccgcagaagttccatccaaaatcctgtgttcaacccgcgcaagccgtctttgtccacggacagtttctcgtcaggctccaattccagccccagggccagagtgaacagcaagagcacggcgggagggtcacccatgaaggagcaggtaccggagtcgctgcgacacagtgtaacgccgacgagcccgcacaacaacattgcgctgatcaacaggtacttgctggcaaacaaaagcacgagaacttactatagaccgcaggtgcagcgaataacgaca

SEQ ID NO: 6091 - DNA, 894 bp, Saccharomyces pastorianus
atgatagcttctgaaattttcgaaagagatgtgcaagatccattttgtcaaggttgtgattatgaggacgaaacagtggtaccaaactttttaggttcaaacgattttgtaaactctaaattagcttcctttagtttcgaaaactctttaaagaataactactctcgtaacaacagcagtaataattcgaacagacataacagtttcccccatatcattggtcatcatttgagaaaaatcaaaactgctccacatcatctatctagtttcatcccgccaacttcagcaaacacttccaatgaaacaattcgtcccgctccaagaagagtaagagcaaatagcagtactcttattcaccaactgtgtagacagtcaaccagacagtcttccttaggtgacacagcaaatacctgtattgaacataaacgctcaaagcctaggtccagacactcgtcctgctacggtataccaacacatctttacgggttagaaaagtacgtttcgtctgaattggattcgctggcagcaaacaacgatcagccaaatgatactactctcccatcagcatctgcttcgacctcgacctcgaactcaaattcgtatttgaatctcaattccaactggaatgtaaaccctgtttccaactctaccgcatgcccatcgtctaatcttcccaatgaaaaaactaatcgattaaaattgatttctcatggaaaaataccatcaaataacatcgcaagccatagcggaaacttcgcccattattctaaagaacgcacggcagctaatttgagaagagaatccacttcgatgctttcgtccggctcctcttcatctcccttgcagacaagaaataattcgtattctaactctggtaaaatcgtcttccaatag

SEQ ID NO: 6092 - DNA, 2667 bp, Saccharomyces pastorianus
atgtttaggagaagaacaacggcagcagatatggaacaagcgaacccgacagctttagcagctgcagcaagtatcggtaaattattcatgaagaaagagaatcagccagaaaataagccaaaatcgacctatcgttcggcttcgatgacaaacatgaggaaaccttctgcttccaaaagagtgtcttccatttccagtacatcgtcagagtctacgcgagggaacagtcaaaatcgtcctaggaagctgaatagtctcaaccaacgctcgtcagtggtgagagaaagtggctcaaatctgcccttgcggacgggatcacagtccaaaaccagttcacatgatcgaacttcgagtcttcccaaccagagaggccaatcgagcagaaacaattctggtttgcaacgccgtaactcgaaaataaaccaaagagtaagctacgacgaggctcagcgtacgttcaaagattttggggggccacaggctagaggcgttttaaccaacaaacaacgttctagtacccacggtagtctcgcccctttgaaaactacgcgaaaatatatacccggacctaacgggctaattgcggttgatgttccagttgaaagaccagataacatttctggttcattaagacgttcaaattcagcccacagcgacttgaatgtcagaaatggttcgttattgagaaaaaaaatttcgcaagaatctttacattcacaaccaaaaagaacttcttctttaaggaactcatcaaactcacaaacaaaacaagacaacgagcctactcaaaatggaaaagtgccaaaaaaccgtcctcttattgaaacacaggttcgtgaagaaaccgatcaggaactaaagctggaaaactccagctcttctggatccgaaactgtagtcaatggagagaataattcagaaaagcccaaatcaccggctaatggaaaggacaatttaagcaaactgatagatgaaaacattgagttaaaaggctttattgaaaaagaggaaaaggagaaaattttgaaatccgacgaagaacacgttattgcgcataagccagctaaacaagagaagttgaatgataaacactcagcagttgtagatgataaatctccttactctgacaagatagagactgcaaaagagacatcaagaaaaaaaccaaatcatgtactagaggaacactatggttctaaagctgaaaagccccaaggacaacttaaaaaattggaacatactatttctgacgatagttcatctgttcaaagattggccgaaaaagacagattggaaaacggtgatcgtaacttaacaagcgatacagttatatctcccacgcaaaacctcaatgaaaacgctaattcaatacaagatcacattattccaaaagctatcaatacaacacacaagactgaaaaaatggacagctcttcggatgaattatctccttcaagcacctactctacacacgaaaattttgatgacagtaaggatagaaatatcgatgcagtagacaagaaaactcaagaagcaataaaaccaatcacttcccaggaaaataatggacagaaacaagcgaagccaacaccctctttggctcaatatctaagaacctcaaatacctatctatctccaaaaaatccaccgaaacaaattgaaacagaaaagcttcttaaaccagaaaatccaatggcgcccgccaccaaagttgttacacccatcaaatctgccttaaagaaatcatcagggatatctaatcacaaaaattctgtgtacgctgagagctcccctgcaaatggtgcatatctgtctcttacaactgctgaaaatacaaggctgaatgcccaaatgaccgtctctgatagtgtatcgcgcagaactagtgtgaaacgctcttccataaaaagacctcaatcagtgggccagtttagaaacaacagatcgagttcaccttctcccccagagaaaataagcagtaagcgccactctgctatacctttaggaactccggagaaaggtaaatcaaaaagaagttcggtagtagcttcttttcctaaagccatatcacaaactcacaattcaaccactgtaccagagcccaatggccaaaaaagcaaattgaaaagcgaagttagcggaaagctcaatgatgcaagtatgaagaaaggaccaccgggcccacagaatagtaagcctgcaacaaaggatatgaacagtatcttatatcctaaggaaccacctgcccgcaaatctagttttgagaaaacacgaagcaatgagtctcatcttggattcaaaaagctatccctaagaaacagtattatggaagatgataccagtgatggttatagcggccaagcgagccagaataatgcaaaccgaacggaagcagcacaggagttttttaaaaatctgggttattcctccagatttgcagattcagactccgacaacgactcccaagtttttagtcaaagcccttccaaacaaaaaggtggaacagaagaacataatactaacagcgacgagaagactagtagcggtaataatggtggcttttcattggttcagagcacgagcaagaaaaaagaggacgacatgggcccaccgcgcctttcacaggctaatcacgataacggccactattgcactccccatattaaa

SEQ ID NO: 6093 - DNA, 201 bp, Saccharomyces pastorianus
atgacaaaccgccagccgaaggacgggcgcttaaatccgccgcgcaaaaagaggcccgcagggaataagttggctttaccggaacttcgccagacaacggcggaggacccttgcattgcctggaaagagctttcgcttactcactgtcgccgtgttttcctttgttctgggccgggagccgctggcctcttccgcggatga

SEQ ID NO: 6094 - DNA, 459 bp, Saccharomyces pastorianus
atgggtgcctacaagtatttagaagagctgcaaagaaagaagcaatccgatgttttgagattcttgcaaagagtcagagtctgggaatacagacaaaagaacgtcattcacagagccgctagaccaactagaccagacaaagctagaagactaggttacaaggccaagcaaggtttcgtgatttaccgtgtcagggttagacgtggtaacagaaagagacctgttccaaaaggtgccacctacggtaagccaactaaccaaggtgtcaacgaattgaaataccaaagatccttgagagctaccgctgaagaaagagtcggccgtcgtgccgctaacttgagagtcttgaactcttactgggttaaccaagattctacttacaagtacttcgaagttatcttggtcgaccctcaacacaaggtctatcagaagagatgcgcgttacaactggatctgtaa

SEQ ID NO: 6095 - DNA, 120 bp, Saccharomyces pastorianus
atggttcttttttttacttccccgtcctcgtcatctttgtatagcctcttgttctctagggtctctatcatctcctgtgctgttttgcctttgtccatgccattcaaaatgaacttgtag

SEQ ID NO: 6096 - DNA, 333 bp, Saccharomyces pastorianus
atgattcgtatggttcatccaacaagaacaagtcctcttacggttcttccaacaacgatgacacttacggctcttccaccaacaacgatgattcgtatggatcttctaacaagaacaagtcctcttacggctcttccaacaacgacgactcatatggatcttctaacaagaacaagtcatcttacggttcttccaacaacgacgactcatatggatcttctaacaagaacaagtcatcttacggttcttccaacaacgatgacacttatggttcttccaacaacgatgacacttacggctcttccaacaacaacgatgattcgtatggatctt

SEQ ID NO: 6097 - DNA, 726 bp, Saccharomyces pastorianus
atgctgcaggtgactctagaggatccccgtatggatcttctaacaagaacaagtcctcttacggctcttccaacaacgacgactcatatggatcttctaacaagaacaagtcatcttacggttcttctaacaacgatgacacttatggttcttccaacaacgatgacacttacggctcttccaacaacaacgatgattcgtatggatcttctaacaagaacaagtcctcttacggctcttccaacaacgacgactcatatggatcttctaacaagaacaagtcctcttacggctcttccaacaacgacgactcatatggatcttctaacaagaacaagtcatcttacggttcttccaacaacgacgactcatatggatcttctaacaagaacaagtcatcttacggttcttccaacaacgatgacacttatggttcttccaacaacgatgacacttacggctcttccaacaacaacgatgattcgtatggatcttctaacaagaacaagtcctcttacggctcttccaacaacgatgacacttatggctcttctaacaacaacgatggttcgtatggttccaacaataatgattcttatggttcatctaacaatggtggccgtaaccaatacggtggcgacgacaattactagattttctgatctgcttcaccaaaaaaatattatatcttttagtaagttatataatatgtatatatctgtgtag

SEQ ID NO: 6098 - DNA, 2142 bp, Saccharomyces pastorianus
atggcagaagtctctaaaatgacattaaagatcctttacacgttggacaacggatccaatggcagttatttagcacgctctaagactccaacacaggtaagggtggctaatattcccaatccctttttagcggcttcgaatgagcatacagagttaagaattggcgcaattcatttgaaaaccatattacatgaaatctacttgaattctcctgaagtacttgatcatgactctttaaaagatggacatgactacaacctgtattatcgtgatatttgtgagatggatgagccactagtaagtctgggccttctttctaagcttcgaagaaagttccataagattcataagagtacttatcaacacacagaaaacagtataagtgaggaggacgaaaacgaagaggacgaacaaattatagaggaggaggatgaagacgaatctttcatagtgacgggaagggtttgctcaaatttttcagcgctgctaaggagatcgtatagcaacgcctcgagtaaaaacggaagaaccgtgagcaatcaaaccccagaagaaacgttagaggttaaactaaggttctctaaagtcgtggctcatactagaaccactgccaacagcgctgcgaattctcgaaggccaagtattcaattgcagtcgtcctctttgccatcgtcagcacttccgtttccttcaagaatgcagcctctttcaaaagcaaaccaaataaaaaattcaagaaatgcaaggaccacaacaacaataaataatacaggcaatgcgactttggggcgtagacaaacaaaccctatgcctgctccaaaggctgttagaacacaatccttacctatttggaacctcaaaccaaattcaatcaacactggtttcccaagaaactcaattgcacataaaatatatttagcggatagaaaaacagaagctcaccaacaaaatcatccaaaccaacatcaaagtgtggcttatgaaataaacactttgcaaaatgacaatacaattcagaagacgaaaattgacgattcggtaagcaaaaggtttgacttcatgctcaacaaaaaaaagcccactaaaaaagtgtcttctacaacagtaacggcaagaaaaccgacttcaataggcccaaacttaaagcaaacagcaaagaatattgacaaaagggcaactgccaaggtcaaaagctcagattccaaatatcccaccaagtccatattaccaggccagaaacgatcatctgtggcagagccattaagcgacgacgtggattcgattttgcatgacatactatcaggtccaatcaatcaagaacagaaatcccaacagaaacaaaagcaacacaagacttctgcggtgaatgaaaatgacaaagagaatattccaccgcaacgtgtaacagaaaaggagaacaagctttacgatgagttagattttagtgccggttttcctatgagagacttttcagacatagtattcaaagatgaaattggatggttgtccaattttgatttcttcgaatcaccaacttccttaactggttcacacttcaaccagcaaaatataaagccctcttctacaacacctagggatccgaacacatgcaatactgttactttggaaaatgaagatgatgttggtgaggtagatgaaacgcaaaataataaaattccattgaccagtgacgccgataagacttccccaatagactcattgtctataccgttgattgagctcagtcactcaagttcagcagtaaacatacggcacacatcattgaaggaaggttcgatgccgagcggagtcgatagcagtaacaatacaccctgcgataatgatactaaggataggaaaacaccgataatagactccgacaattcaaaagctcagccaatgcttatgaatttctcaaccccagcagatcagctaggttctgataataatgttgccaccgtaaagaagcttgtcagcttgccagaaggacaacaacttaagagatctcatgaaactctggaagaagaggaggaggaggaggaggacctgaaaaagcaaaaggctataccctcttcgccttgtggaatgtacaattaccatcagcctgagtgcataggcttatctgacgatatggttaattaa

SEQ ID NO: 6099 - DNA, 972 bp, Saccharomyces pastorianus
atgcctgaccgatccaagaccctttccaatgaaaagtcttctcgtgaggatgctgtcaccaaaaactccgatattgatgtagttcgccaactgggaaatttacacatctcaaaaaccactaagctaccaaaaccaccaaatttgcctttcaaaaccgcaaaaaattcgaggattctcatggagttccatgaagatgtctgtaaattggtatggactcatcttgctcatattcgtaagccatcaatagctcacattgaaatagaaatgaaattcggtataatcacagataaaaaaactcgtcgcaggataatacattctaataaaccctccgttgttcagaactgtagaggtcgcttggtatccaatgtttcctcggaaatgtttctaaaatttcaagatttcttgcctttaaatccaaatagtatggataccactgctttaaacaccgttcaacagacacacacgtatacaaaagactcgatatacagcgttaatgatctttcaaaaactgatagactagcttcatggcgttgttcggaggacctgaaaaacaaaggatctaaacgtacgtttattaagaagacccgtgtcaaggattttctcattcattatcctcatagttcattagatgctaaaatcagtatcagtcttgaaatacctcaaattgagactttagccgttttcagaagtaattctgttctacaaaggtataaagatcgttctacctacagatttggtaatgagatacccttacacttggatatgacaagagttatcacgaaacggagcggttcttctcatcaatccacgactcacgaagtggagatagaaatggatcctgtctttaaaaagacagtctctaccaatgataaagagagctttgacgaatacatgaattcgtttttacatacaagcgatctgatacgtgagcggctaaacgggaagggacataaaaaacatgaaagatgctaa

SEQ ID NO: 6100 - DNA, 4242 bp, Saccharomyces pastorianus
atggtaacgaaaccgtcgcataacttaaggagggaacacaagtggttgaaagaaacggcgactttgcaagaagacaaggagtttgtgttgcaggctattcaaaagcatatagcgaacaagaagccaaagacaaattcgccaccgattacgccgtctagagatgtgtatggagcagggacaatgaacctgttaaccagccttcctggatctggttccactagcaccgttacgaaacagcgcgaggacacgcacaccctatcaaacgacacggaatggctctcctaccctgccacatcgaaccaatataccgacatccccatgggagatataccggccagcacaagtatcgtatcgaacccaaggacacccagcggttcgaaaacacacaacaccaatatgcttcgaccgcccatggcgagttctcttgtcgaaaatagcagcagtagaaacatggatcgcagaaacaataccaacgacgtgattgatagtacaagcacgagcaaacagatcgagaagcatcaagacaggatagagagagatatagttggacttcaggactcattgattactaccttgaaggagcaatcaaaattgttactccaaaaatgtagtataattgaatctacatcattgtcagaggatgccaaaaggttacaattgagtagggacatacggccccaattatccaacgtatctatcagaatagactctttagaaacggaaatcgcacaaattaagaaagacgcactttcgaaaagtcaaactaaagttcacagccaggttccctcacaaaacaataatattatatcaagtattttacccagtccattagacaacaacctatctttcaaaagcacaaatctggcaaccactactgcaaccgctgcgactatggcagtatctgcccgtgcagctactgcaactttcacgaaaagcccaaaaactaatgctaataatgataaccacgatgatgacttaattcaggtgctagacgatgaggatgatgatgatgcaaataacgatcctaccattatcctacaaaaagggttagtcgatataccgcaaaacaatactccaatttctccttcaccgccacgtctggatatgaccacagaagaacaagatgagcttacaagaagaagaaatatgcgttcaagagaaccagttaactatagaattcctgaaagagatgacccctttgactatattatgggtaaatcattgagagaggattgcccagaattcgaaagagaagaagatgaactcacaatggaggctgaagatgatgatcattctagttatatgactactagagatgaagaaaaggaagaaaatgatttgttgaaccaaagtgattttgattttgtagtgaatgatggtcttgaggccacccaggatactgattaccatgacaatctggatgggtgtgcaaatattaaagaagatcccttagaagacgatactaggtccacaattactttatcacagaataaaaatgttcaagttattttatcttccccaacaacacaaagtgacatatccagccgtcaaaggcaaacagatgtggagcatattgatttactggaagacgatttagaaagggatgcaattttggatgatagcataagtttttccttcggtaaccaaaacttacctatgtcacattctgatttagagttaattgacagtgaaaaggaaagtggtgaatacgatgaagataacaacaacaacaacaactttgaaaacctatcagatagcgatttagaaagattcgacgaagaaagagaaaatagaacccaagctgcagatattcaggaactggataatgacctgaagatcataacagaaaggaagcttacaagtgatcacgatctgcaatcaccctcttggtctcctacgattaaaagagaaagatcgaacgctagtcaaaaaaaaggcgaggaagatgattttgatgacgatttttcactaagtgatatagtgagcaggtctaaactgacttctaaggcgaaaggtccaatttatccgtggtcggatgaagttttataccgcttgcacgaaatatttaaactacccggctttagacctaatcagttagaggcagtcaatgcaactttacaaggtaaggacgtttttgttcttatgccgacagggggtggtaaatcgctttgctatcaacttcctgcagtggttaaactaggcaagacgcatggtactaccattgtcgtttctcccttaatttctttgatgcaagatcaagtggaacatttgttgaataaaaatatcaaggcaagcatgttcagttcgaaagggaccgccgaacaaaggagacaaacctttaatttgtttattaatgggttattggatttggtttatatatctcctgaaatgattagtgcttctgaacagtgtaagagagccattagtagactatatgcggatggaaagttggctcgtattgttgtagatgaagcccattgtgtttctaactggggtcatgattttaggcctgattacaaagaattaaaattctttaagagggaatatcccgatattccaatgatcgctctaactgcaactgcaagtgaacaagtaagaatggatatcattcacaatctagaactaaaagatccagttttcttaaagcaaagttttaacagaactaatttgtactatgaagttaaaaaaaagaccaaaaataccattttcgagatctgtgacgctgttaaattgagatttaaaaacgaaactggcattatatattgtcattctaaaaaatcttgtgagcaaacgtcagcccaaatgcagagaaatggcatcaaatgcgcctattaccatgcaggtatggaacctgatgaaagactaagtgttcaaaaggcgtggcaggctgatgaaatccaggtgatttgtgctaccgtcgcgtttgggatgggtattgataaacccgatgttaggtttgtttaccatttcaccgtgccacgaacattagaaggctattaccaagaaactggtcgtgccggtagggatggcaattattcatactgtatcacctatttctcgtttcgagatatcagaactatgcaaacaatgattcaaaaagataagaatttagacagagagaataaggagaaacatttaaataagttacagcaggtgatggcatactgtgacaacgtcacggattgtagaagaaaattagtgctatcttacttcaatgaggattttgattctaaattgtgtcacaagaactgtgacaattgcaggaatagtgcaaatgtaataaacgaggaaagagatgttacggatcccgccaaaaaaattgtgaaactggtggagagtattcaaaatgaaagagtcaccataatttactgtcaagacattttcaaaggttcaagaagctccaaaattgtacaggctaatcacgatacattagatgaacacggccttggtaagtccatgcaaaaatcagaaatcgaaagaattttttttcatttgatcactatccgtgtcttacaagagtattctattatgaataacagtgggtttgcttcgagttatgtaaaagttggacccaatgctagaaaattactcagtggaaaaatggagataaggatgcaatttacgatatcagcaccgaactctcgtccatcaacatcttctggccatcaatcaaatggggataatacgccagctatagctcaaagatcaacaactcttggggagaatacagctgttaaccctgcacgctttattagcgcgaaagaacacctaagatcgtatacctacagtagttcaacaacggaatcatcacatcctatatcattaaaaaacaataccgaattacattcgacccaagaactaaacaatctacgaatgacatacgaacggttaagagaattatcattaaatttaggaaatagaatggttcctccggtggggaactttatgcccgactctatcttaaagaaaatggcgacaattttgccaatgagtgaatcggcttttgcatctttgggtccagtagaggacaaatattgtcggaggtttaagtactttaaagccacaattgctgatcttagtaacaaaagatcaagcagagaacatgaaaaatacgataccatattaaatgaagagtctgtcaatagaatatccagttcaaccaatcaagttatctccacaacaggaacacgatctaggttttttggcgctaccctagtgaagttaaggaaaatgaacaaataa

SEQ ID NO: 6101 - DNA, 1050 bp, Saccharomyces pastorianus
atgtcagaatttagagcgttcagtgctccagggaaagcattactggccggcggatatttagttctggacccgaaatatgatgcgcttgtagtcggtttatcagcaagaatgcacgctctagcctatccttacgatttattggagaaactggacaagtttgaagtgcgtgtgagaagtaggcaatttaaagacggggagtggtcataccaagtaagccctgaatcaggcttcattcctgtttcggtaagcggatctaaaaatcccttcattgaaaaagtcattgccaatgttttcaattactttaagcctaacatggatgattattgcagtaggaatttgttcgtcatcgacattttttctgatgatgcttaccattctcaggaggacagcgtgactagacattatggtagtagaaacttgagtttccattcacacaggatagaagaagttcccaaaacagggctgggctcctctgcaggtttagttacggttttaactacagctttggcctctttttttgttccaaacttaacagataatgtggaagggtacaggaaggtgattcataatttgtcacaagttgcccattgtcaagctcaaggtaaaatcggaagcggatttgatgtagcggctgcagcgtatggttctattagatatagaagatttccacccaaattaatctctgatttacctgatattggcaatgtcaattatcctgacaaattaactcatttggttgacgaagttgattggaatattaccattgaaagtaactgtctaccttcaggattggccttatggatgggtgatattaaaagcggttcagaaacggttaaacttgttcaaaaggtgaaaaaatggtatgattcacacttaccagaaagtttagaggtatataccgagctggatcacgctaattctaggtttatggatgaactatctaaactggaccgcctacataactctcatgatcattatagcggccaaatctttgaggctataaaaaaaatgactctagttgccagaagtattcggaaatcacagacgtga

SEQ ID NO: 6102 - DNA, 300 bp, Saccharomyces pastorianus
atgggcttgttttcattcgacagcggcaagaaggattctcaaccccctaacacccggtcgcagcggaagctgtgctgggagtccagggacgtgttcttccagtgcctggacagagccaatgttctggacgccaccgaccccaagaacggcaagatcataggtgcccagtgtccggcggagaacaagaagtttgaggagaactgcgctcacagttggatcaagtacttcaaggagaagcggatcaccgactttcggagggaggaggccatcaagaagatcgagcaggaagcccagcagtag

SEQ ID NO: 6103 - DNA, 291 bp, Saccharomyces pastorianus
  modified_base (92)..(112): a, c, g, t, unknown, or other
  modified_base (207)..(208): a, c, g, t, unknown, or other
  modified_base (243)..(243): a, c, g, t, unknown, or other
atgcctctagagtctatatgggccgatgtccttgacgaagaaccagtaaagaaacagaagccaattcacagacggaataacgataacaaaannnnnnnnnnnnnnnnnnnnnggaggaacagcgacaacaagccaaacaacaacaaaagagacactgaaaccaagacaaatcacaataaaagaaacaatgaaacgaagacaaagaanncaaatcaagatacgcctgccagacagaagaatcgnctcgtaaccaggggcagacttcactacaaacgaaccattacggtgaat

SEQ ID NO: 6104 - DNA, 1206 bp, Saccharomyces pastorianus
  modified_base (1182)..(1184): a, c, g, t, unknown, or other
  modified_base (1186)..(1186): a, c, g, t, unknown, or other
atggcttttcaagatcaagacctattaatagtattatcatatacttccaaatttcttaatcaaaatgacttgttaaacttgagcctggtgtccaaacaagtgcataatgtagttgccataccctcactttataacaacattcacattactagaaatcctgtgttgaggacggctaaatggcttttggaaggggggaaaacttatgtgagtggttatcgatcggttttgaagactggagataagaacgacatattcgtatatgacagagttgaaaggttattggaagcatcgcatttaaagcttataaagcagataactatagacaacgatatcttccaccacagagaagaggggctgcagctgttacaaagactggtcaatgaaataactgacttgaacgtggttgaaattcttgatattaaagatccaggattatttgaggtgtgttcaaaaaaatatcacgatttaacaagcctaaagaagcggatagtacgtgatgaagctgcatttaaaagtttcaaatcattggaaaatctcaagagtttagaatgggacttacctgcgtcactggatctacaagatataataacccccgagatcggcgggttgttaacaagaaaattggatggaggtgagctggcaatcaaggatgaagcgtattcaagcttaagagtttttgattactttgatttttcaaatattcgttttaagaaccttcgccgtttgaagttcaatcatgttcacaaacaaagtgatgcagatacagtttccgtaaggttggcttcgcatgctttgaaggatgtggttaatctatccaaccttaaagcccttgaactagaattttcttgtgaggtagacgactgtaaatgtgatgatgaattcctccagagcatagcaggtgaccttgtttccttgacaagtttaggactcatcgaaaagacattcgtcaaacaaggacatcactatatggatgaaaactgggatttggtcattaataaatttattttaaatttacccaatgtgggtcaaaacttgcgggttttgagcatacgacatgatcctcctttaaacggtaaaggtatcgatacagtcgacggaaacctgcttcgtcgtaagaagctttacgagacagtgcttccgacctgcaggcatgcaagcttggcactgccgtcgtttcaaccnnncnaaaaaaaaaaattaaaataa

SEQ ID NO: 6105 - DNA, 435 bp, Saccharomyces pastorianus
atggttcttgttggtaagcaacctcgcagcctcttcgtcagtggccaaataaccaatcaaatactcgtcctccaggatttcgtacgcggattcgctgtgttcatgtacatcgctgtctttcattatctccgtgatgtccttaccagcgtagtccaagatgaactcctcaccaccggggtgctcgcccaaaaacctggtcacgtcataaatctttctgttctgataagtaacccagcaatccttggcagtgttgtgttcttctaccgtcttcttagaaaacagctccagtgtcttggaagtattgctcgacatcttcgtagttttgttctatcactattccttacagctcctcacgcaaagaataggaaagtgttctcgaacaatagacacaatagctgctattgccaactatcatctgttcttatatggttgtaa

SEQ ID NO: 6106 - DNA, 2718 bp, Saccharomyces pastorianus
atgcccagtacacccaacgatagcatgttgcgtatgaaatcaaacaacaggacagcagctattcaaagagataaacggaagtcagaagttttgatcgctgctcagtcccttgataatgaaattcgaagcgtaaagaatcttaagagattatcgatcgggtccatggatttgttgattgatccggaactagatataaaatttggtggcgaatctaacgggagaaggtcatggtccggtgcgacttcgagttctacgtcaacaccgaatgtcacaacaagcatgaataatacgcgatatagcgatcgaccgccattagaaaaattgcatgtgctaaatagtgcagacacagaaccctataataagagtagacaaggcaactatacaggtcataaaaaagtcgtccattcaccgtcaagaaagttgaatgctaatgcactaaaaaacaacttattatgggtccctgctaatcagcaccctaacgttaagcccgataattacttagagcttgttcaggatactttacagaatatacgactaagcgacaatgacgataatgataacaataataataatgaaagcgatgaggcgcccggagaaacagaatcatatggtaataaggagaatttaaatgtggttaatgtgaacaggggcatgccaaggcatgggaatgcttcactaatacgaagaccttcaacgttgcgaaggtcatacacggaatttggtgatagtggagacgacatcggacaagaagacgacgattccatgactgtaaataaagtgaaggaaagaactcccagaataagagaaagaccaatatcattaagagatattactgaagaactgacaaagatttcgaatagcgcggggctgacagatgatgatgccataacattagctagaacacttaatatggctggttcatattcagataaaggagatggatcaaggcccaaagattcagaaaccaaatatgaagaagaaaatgataaagttaccggctcacaaacggaaacttcggatgatgttgaatatgcctccaatatgccaatcagcagtgactcaagttggccagaacgatcatctctgaaaagaagcagattcaatacttacaggattaggtcacacacagaagagcaggaggaagagcaggtattggaagaaacaaaaaacgaggacgtgagccgtttgcatttggctgagaatactttagaaatgggaataaattcgcccaaatcacctttcaagcaggaagacgacgagtctgaccctatgagttcacctgggtccatcggtgattttcaagacatatatgaccattatacacaatctagcggcgactgggaaaaggaaatgggaatagaaaaggacaaagcgctggaagttggtaaggttgaagacgtctcagtcgaacaagagttggaaccacaagaagaaccaacggagacaattgtgtcagctgccacagaagatagcaaggagactaaacgccatcgccgaagaaatggatggacatggttaaacaataagatgaataaggaggaggatactggagaaagccaaagggatgacgagggtgaagaagatgtggagtcgcaaagaatggaacgcgacagttccaagaaacatcacatttcgatgttcaatggcagtgagaagaccgaggcgataaacaaagaggaagcgaacaattccaatgcatccacgtccacttctcaaacaagacagaaaatcgagaaaacattcgccaatttattccggaggaaagcacatcacaagcatgaagcggcgccattgccgtcattgccaacaccaaacaatgacactgcgcacgctcctgaaacgaaactgaagaaactagccagcaaaaatgggagagagccaaccgagcctattgtgctacacaatcgccctcaccacaaccgtcaccatcagggccgtcacggttcccgagaaataaacatgaagggcactagcaatacgcaaatgcaatcgcaattacagccccaaccacaactgcaaccgcagtcacagcagccgcagctgcagccgcaaccacaaccacaaccgcaattgaagccgcaacctcagccattacagttacaaatgaagggagagtccagtggaccaggaatagcaaacaacgaagaaagcgatgccgagagtttgcccaagctacaacctgccatcagcgtaagtagcaccaagagcaactcaagagactgcgaagaagcggacaccaagaagaagaacaaggaaaagagaagcaatacgaccaacctctcgaacggacagcactccaagcatgctcagaaaaaaacgggccatgagcagaaggaccaaacagcggctctagcggacccaccggcctcaccagctcctgctctgagacatacatccgtgttacccccaagaaagctgaccttcgcagatgtcaagaagtccgagaaaccaaacgccccggtccagttcacggacagcgccttcgggttcccgttgcctctgctgaccgtctccacggtcgtcatgttcgaccaccgcctaccgatcaacgtcgaaagggccatttacaggctaagccacttgaaactgagcaactcaaagagagaactgcgcgagcaggtcctgctgagtaacttcatgtacgcctacctgaaccttgtcaaccacaccctgtacatggaacaggcgggccacgacaaggaacagcaacagctttga

SEQ ID NO: 6107 - DNA, 1458 bp, Saccharomyces pastorianus
atggacgaagaaattcttctttcattgtctcaaatcaataaagatgttagaaaggaaaacaaatctgtcagaaataggcttcagagcatccttttagataataggtttttacgagagcgagttcttcccctttttcctcattttccaatagtacccaacgaaagatgtggtttgtggtattgtgaaccttcaagttttaaacaaacgagttactttaagagcacagatggtcatgtcaatcaatgggattttagcacccgtagactgaactttcatttgttagaggttatccaagaaaataaaggtattataatagttgatagtacgagaaggggaaaaaagatccccgatgctttaagtaaaactgtgccaatatggtgtgcggtgttaaatacgataatgctacaggaaactgaagaaaatgtagatattgataaagttctatacgttccacctgaaacagttcccaaatcagaatatgatatgatcaaaagaaagatacctgaattagtcgacaaactccaaaaattgaatgttatagactccacgatgttgaacaaattgtttaagggtaagatactacggcctatatgggttcatcctggctcttcattactaaaccattctgtcgattatttcacaggcgaaatagaagagcaggaaacctgggaaactcctgaagaccaaaacatcatacctatcatcttgtgtacagtgagctaccaagcacaagatggtgtggataaaagatacggatttacctatgttcagggtgcagctgatgatcatgagctctggtctttcggattagattccgaaatgttttggtctcatatagactacttgggcgatgcaaataattcagatgaccagctgtgtggttacatcacagatcagattgctaaaaaactggaacatcaactttccatacaagataaaggcggcctagacgacattttcgaaaacattgataaaattacgaacgaaatatccttaggaaaggtaatccaaggcttgactatcaacgagaagctggaagaagaattaaaggtgcagtatgaaaaagtgataattctcagcaattcggtggccattgctgcacaaacagacagtgtggaagtaggcaggacggatccatttatttcagtatacaaattacaaagtggggacaagaagagttcgaaagctttacgaaccactttcccgatgattcatcaagaagtgcaaccagtctttgtaaatccgacgataggaatgaagccgatactcatctgttgtaatacgggcacagatatgtcaattggtgtaattttgagtatcctttgctcccaatataacgaagaatggatcctcacgtcggagttgccggtagttaacaagatcataataaggaaacacttgacaaaactgatctctcatttacatggtcgtaacgttaatcccatccgggctaactaa

SEQ ID NO: 6108 - DNA, 1614 bp, Saccharomyces pastorianus
  modified_base (1543)..(1593): a, c, g, t, unknown, or other
atgacacaagacgaaaaagttaaaaccttagcctcagatgctagctatgcttcagaagcggaaactaataagcccgttaaagacttaaagcagcaaattgatgatacctcgaagaagcaaacaagaaagaagggaaataaaggtaagaaatcaaaaccggaagtgacacccgaacatattgctaaagttcgtgcggaaagggatgccgtgagaaaggctaagagagattcattgttggctcgaggtattgatccagactgcccaccagaattgcatttcatcaagaggcctttcctatcgttacatgagaaggagccagtgacggggtttagatttaagctgatgacttacaattgcttggcgcaagctcttattcgtaggaaattgttcccagatagtggcgatgccctgaaatggtacagacgttctagagttctattaaatgaattcaagcattacaatgccgatgtcatctgtttgcaagaaattgatcatatccagtttcaaagcttttggaaagaggagtttaataagttgggatatgaggggcaataccataggaattctacaaagaatcatggtgttgctattatatggagaagagacatgtttcagcaagtggataaaatgctaattgattatgacaaggaggtttcgggaaatatccccacaagaactacgacaaataatgtgggtttggtcttggctttgaaattctctgaaaaagtactgtcgaacttaggtaaagcatcatcaaaaaaacgcggtattctgattggaacttcgcatttattttggcatccgttcggtacttatgaaagaacaagacaatgttatgttgttctaaagaaaatggaagagtttatgcaccgagttaacgttttgcagaatgaaaatgacggagatttatctcattggtttccttttttctgcggtgactttaactctcaacctttcgacaccccatatctgtctatgacttgcaagccagtgcattatgagaacagagcaaagaccgttattgaatgtagtacttcatttaaattttcaaaagtacgggatggtgaagagggtgcagatgaagaagagggtgggaatatcgagaaatttggtaaagatcaacctgagagccccgttccaaaggattttcatgctaacgaagagcaaattgaactggtggatgagatggcacaacttcacaactcattggatatgagagctgtttcgttatattccgttgcctataaaaacgttcatccaggaaatgcaggtcttgataatgataggggtgaacctgaaatttccaattgggcaaacacttggcgcgggttgttagattacctatttcatattaaaaaatgggacctacaaagtaactgtcaaaaagtggatagtcttaacgactttgaaaaagacaacgaaatcaaaatcagagggtttttaaggatgcctcctggtagcgaaatgacaaagcatggacaaccccacgttggagaatatgcaagtgatcatttgtccatggtttgcgacttagagctgcagnnnnnnnnnnnnnnnnnnnnnnnnnnnnnnnnnnnnnnnnnnnnnnnnnnnattaaacggttttgtaattga

SEQ ID NO: 6109 - DNA, 1005 bp, Saccharomyces pastorianus
atgaacgtgatagatttaagtgacccagctattagtgtagattacgacagtttgattggcattgacgatgaagaatctcaagaagtttttgaaaatgaagtgaaggaagacgcacaacaagaacaacaagaaggcacggtcttaacaaatgataaggtcattgttgagcccaaacgtgacattgaaagcttgagaaaagtcatcagagagcaattactgttcgatgtgttcaggaataggcaatcggatcataatgatgaaagaaaagttatcagcaataaagatgctgagagtcgacaaggaaaactagatagaataaggaaagaattgaaggagctggaaacggaagatccgtctcttgaaaggcgaaacgaaattagagagttatgcaaattgcaatcaaagttagcgatgcagtcatcaagcacgtttgccaatttggagaaagagctcatcggggacagtgaaagtcaacctatcacgatgctccccgatatatcacttgacatgaccagtttcaaaagattgcaaaagctagaccagagaatatccgggatggaacgttatgttggtgttccaggaattctagaaggtcaagaagatggaaaatcagtgtataatagggtgaatgaactctacagaaccatacagcttctacaagatgatgacaaggaaggagaaaagctgcgaaagttccaggatagattgagggaactaaatgagcaatttgaaaactcgctgttgggtaaaaaaatccagcgagaccagaaattaggtgatgaaactgtgaacaaaattattacgcctgaaagcaaaataaaagaaataaacgacatgtatgctatgtttaaacagtatcgagattcgctgccgcaattgactgagagaatgaaggctctaaacaaaatgaacaataaagtggtggatgtgtacgaaacgacaagaaggttgaactcgcaaatcacaagtgtccgggaacaagaacaagtatggttaaagacttaa

SEQ ID NO: 6110 - DNA, 924 bp, Saccharomyces pastorianus
atgtctggtatgtttgagcctgcacctgaaccttctactgagttaggccttttaagggttctctctaaaacggctagtgttaaagcctctcctctaatcctgggcgggatgtcgattggtgatgcgtggtcaggatacttgggctcaatggacaaggaacgcgcttttgaactacttgatgccttttacgaggcaggtggaaactttattgatactgcaaatacttatcagaatgaacagtcggaagcttggatcggtgaatggatgaagtcaagaaagttgcgcgaccaaattgttatagctaccaaattttctacagattataagtggtatgaagtaggcaagggtaaaagtgccaatttctgtggtaatagcaagcgtagcttgcatgtgagtgtcagagactctctgcgtaaattgcaaactgattggatcgacattctttatattcactggtgggatcatatgacttccattgaggaagttatggatagtttacacattcttgtacagcaaggcaaggtcctctatctgggtgtgtctgatacacctgcctgggttgtatctgcagcaaattactatgctatttctcacgggagaactccttttagtatctatcaaggtaaatggaatgtgttgaatagggactttgaacgtgatattattccaatggcaaggcactttggcatggcacttgctccatgggatgtaatgggtggtggtaaattccagagtaaaaaatctatggaagaaaagaagaagagtggagagagcttgcgttcctttgatggtatttccgagcggacaaagatagaggtcaagatgagtgaggtattgtcaaaggttgctgaggagcatggtactgagtctgttacggctattgctattgcttatgttccaaagcgaggaatgtttttccattga

SEQ ID NO: 6111 - DNA, 612 bp, Saccharomyces pastorianus
atgaataaacttcttctaccgctagtcggcgtcctctcgctgctcagcttaacacatgctcttatacaaacacaaccagtgcttcaagatctacaaatagcagatagctataccaagaccaaggaatgtacggacccagatcattggttccttatagaaggtcagctgctcattcccaagggtagttcaagcagtatatcatttcaagtacctaaggaatttgggtcgttccctcaagagtctttcgctgtggaatataattccaacaaggttgccacggtatcgtgtccagaccagtcaacgaacaactttacgatttctgtcctggacaacactctagaagaactaaacacaacattcaattttctagcacagcttaccccagacgccaagtctgaaattataaacccaaaaaccattgcatacagtttctactcatctgaaggtgatgtatttaacgacagcatcaactatgccgctaagaacatatctgccgtaacaacggatggtggcatatacacaacaaataacactgcatggtttactgttgatctaaccaatgtcaacttttcttacaccacggttcttttacttctcaacctcttctcgtcc

SEQ ID NO: 6112 - DNA, 213 bp, Saccharomyces pastorianus
atgcggaacatggtttctcttttattgctcccaacaatatacatgcgatcctttgtttcatatagcgtatatttacccatcacaaatttggaggtctttctctgcttggacccagaagtagcaatcacgcccccaccaagggaatggtccattgcgtcattattcatctcttccttgctttcctttgctttggcttattttattgtgatttaa

SEQ ID NO: 6113 - DNA, 387 bp, Saccharomyces pastorianus
atggcaagatgggtggcctctataaaagcatccaggatttcagacagccggctcctgggaatggatgggacggttgacagtccttgcaagcattgcatagccagtgtcgtcatcttggcatttctcgactggcacgccagtatgaaaggcagcacaaaatccggatgcctttctaactcatcgaaattatgtaccctctttaggatctcgacggatttatcactagcatggcgaatggccgaattccttctttttgattcggacgatagtgaacgcaattctgcttcgagttgcttttgcatggaggtaaatcccccagtgttcatagtcatatgttggtatacagcgaactcaattagcctattctctctgaaactacttgtataa

SEQ ID NO: 6114 - DNA, 798 bp, Saccharomyces pastorianus
  modified_base (616)..(616): a, c, g, t, unknown, or other
atgcaaaacgaccagcagaggctctctctacacaacagggcggtcttcacacatccatacaagaggcttggaggagcgtttccggtgaaatcaccgtctgtgcccaatttccacgacagagtccatcctggacacagctccagtgatccggcactcgttaatgatgactctatactaagtgatcaccccactgttgaacggagctgtttaggtcaagtttccccctctgaacacgatgggaacttgagcgttattgatttgtatggagatgaagtagagtctcagcgtgtcgacgacgacgacgacgatgacgaagatgatgacgatgatgatgatcaggatgccacacacagcgatgacctagatctgctccctggagaaggcggccagcacatcgaattggacgatgttactgctggcactagcaaaagtgctagcgcggatggtgtaaacaagacacattttgaccggtacggattcaagaagcaaaataactacatatcagaatccgagtatgataggtggtggggatactactctcaatactgtgtccgtcgtaaacacaaatggcagttgctgttagagaaaagtggtttaccagttactgacgattcanccgcacgattcccatccaagagcgaacgattgaccaggtatgtcagaaagggtattccagcggaatggagaggacatgcatggtggcattttgccagaggacaggaaaaactaaacaagaacaaaggtatttactcacaagttctgccaaaaatgaaccgattaagaaacagaaccccatga

SEQ ID NO: 6115 - DNA, 567 bp, Saccharomyces pastorianus
atgcaaggaagggatacctcaacaagacggattcagggaaggatgtcaataaatacgggcaagaaaagcaaagagaaccttccatgggtcgagaaatacagacctgaaacgctggacgaagtttatggacagaacgaggtgatcaccacggttcgtaaatttgtagacgagggcaagttgccgcaccttttgttctacgggcctccaggaaccggtaaaacctctacaatcgttgctctggcgcgtgaaatatacggaaagaactactctaacatggttctggagctaaatgcatctgacgatagaggcattgacgtggtgaggaaccagatcaaagacttcgcctccacaagacagatcttctctaaggggttcaagttgatcatactagatgaggcagacgccatgacgaatgccgcgcagaacgcattgagaagagtcatcgaacggtacaccaagaacacacggttttgcgttttggccaattacgcacacaaacttactcctgcgttgctgagtaggtgcacgcggttcaggttccaacctatgccccaggaggccaaatga

SEQ ID NO: 6116 - DNA, 618 bp, Saccharomyces pastorianus
atgtccgggtcgttgaagtcgttagacaagaaaattgcgaagcgaagacaggtgtacaagcccgtgctggacaacccgttcacgaatgaggcgcatctgtggccgcacgtgcacgacctgccattgatctggcagctggtgcagtcttccatcttgaacaagctggcgcacatgcaatcgaaggaggagtacccctgggagctgtacacggacttcaatgacattgtgcagtacttgagcagcgaccgcggaaacagcgatcccgtgtacctgtttgtgtgcaacaaggaccccggcgtgccgctcgtgctcttgcagcagatcccgctgctatgctatatggcccccatggccgtgaagctggtgcagctgccccggagtgccctggccgctttcaagacggtttctaagtacgggctgctgctgctgcggtgcgatgacagggtcgacaggaagttcgtgtcgcaggtcaacaagaacgtcgacccgttgcagtttccctggctgagcgcagtcaagtaccagccaacggcagtcaagttgctgaagaccaccgtgcccatgtctccaagactaaacagaagtagatgcaattacccgcgtagcttgcctttctag

SEQ ID NO: 6117 - DNA, 222 bp, Saccharomyces pastorianus
atgtcctttggaatcttcagttcgttgtttatattctcactattttgtctaggctttttgatagtgatagggtgtttagcatccgcggtgtcattctcgtcattatctaaggctagtatgggcttttcttcgtctgtttctttaacatctcctggagcaccagtagagcctaaagaaatgctagaagaggacgaggatagagaatcatccagtttactgtaa

SEQ ID NO: 6118 - DNA, 2463 bp, Saccharomyces pastorianus
atgaaagtgaggaaatcaatcatcttatgcctctggtgggtcctctcggagcccctcattgtactatcgcagcatattccattgaaagaccacacaacacgacaatattttgccatagagagtaacgaaacactgtctcgcttgggggaaatacatcccaactggcaatatgaacacgacgttcgtgggctactcaaccactatgttttttccaaagaggtattaagtctgggtaaaagatcgtcattggaagagcttcaagaaaacaacgatgaccacatattatcagttcacgatctatctccgcgtaatgacttattcaagagactgcctatccctgcccccccagtggattcaagcttgttaccaataaaggaagccgaagataaacttagcatcaacgatccacttttcgaaagacagtggcatttaatcaacccaagattccccgggagcgatataaacgtcgtggatttatggtacaacaatatcacaggcgccggcgttgtggctgccatcgtagatgatggccttgactacgaaaacgaggacttgaaagataacttctgtgccgaaggctcgtgggatttcaacgataacaccaatttgccaaagccaagactggctgatgactatcatggcacaagatgtgctggtgagattgctgccaagaaaggtaatgatttctgtggtgtcggagtaggttacaatgccaaaatttcaggtataagaatattatccggtgaaattactacagaagacgaagctgcttcattgatatatggcttggacactaatgacatatattcctgctcatggggtcccgcggatgatggaagacatttgcaaggccctagcgacttggtaaagaaggcattggtgaaaggcgtaacagagggaagaggctccaagggggctatttatgtttttgcaagtgggaatggtggtgctcggggtgataattgtaattacgacggttatactaattccatatattccattactattggggctattgaccacaaagatctgcaccctccttattcggagagttgttctgccgttatggctgtcacgtattcatcaggatcaggtgagtatatccattcaagcgatatcaatgggaagtgtagtgatagccatggtggaacttctgcggccgcccccttagcagccggtgtttacactttgttgctagaggcgaatccgagtctaagctggagagatgtacaatacttatccatcttatctgctgtgggactagaaaaaaattccgacggagattggcaagacagcgctatggggaaaaaatattctcatcgttatggttttggtaagattgatgcctataagttggtcgaaatggccaagacctgggttaatgtaaacccccaaacatggtattacttgccgacactatacgtttccaaatcaacaaactctacagaggagaccttagaatctgcgataaatatatcgcaagagagcctcaaagagggcaattttaagagaactgagcatgtcacggtcaccgtagatatagatacggatttcagagggaccacaactgttgatttaatatcaccagcgggaatagtttcaaaacttggtgttgtgagatcaagagacgactcgtcaggcggattcaaaggttggacatttatgtctgttgcacactggggtgaaagtggtgcgggtgaatggaaaatcaaagtcaagactacagtaaatggtcataagattaatttccacagttggagattaaagctttttggtgaatccatcgacccatcaaaaacagaaacgtttgtttttggaaatgacaaagaggaagtggagcctgctaccacagaagggtctatatctgcatcctctaccggcacaggctcaacatcctccaccggcacaggtttcacagccactaccgacacaggttccacggccactactggcacaggttccacggccactacctcgctcggtgtagaatcttcagccgctgctactagtataactgccatcacagaccctgattcagacccaaacactcccaaaaaactctcctctccaaatcaagccatgcattactttttgaccatatttttgatcggtgctatatttatggtattatactttatgtttttcatgaaatcaagaaggagaatcagaaggtcaagagcggaaacttatgaatttgacatcattgacacggactccgaatacgattccaccttagataacggtgcttccggaattattgagcctggggaagcggaagactttgatttcgatctttccgatgaagaccaccttgcaagcttgtcttcatctgaaaacggcgatgctgaacatacaatcgatagcgtgctgacaaacgaaaatccattcagcgaccctataacgcaagatcccccaaaagacagtagtgaggaaacagattctaatggcttacaaggaccgtag

SEQ ID NO: 6119 - DNA, 453 bp, Saccharomyces pastorianus
atgaagtcgaattctaaacgtctactaaactttttatacaaactgtgctatagtgtttctattcaggcctccatctcgaatagcattcctgaacatatgcacaaccttgtgtacatggttggccatcttttggtctgtatgctggttgggacaattgtcttgtcacccgatattacattacctgcccttgtcacggacccgcacctgctacatctcttcagctttccgtcatttatttctgacgtactcaattggtcgcaggttacgtcgtcatacagtagtttgctgaaagatctagagcttctacagtttttaggtagttcatcagtatcaataatcagtcccttctccaagggttgcaaaagatggaatatttcaggattgaaaaactctgtattggatatctttaaaccactggtatctgcaaaatacactgcagccgcattggcgtga

SEQ ID NO: 6120 - DNA, 1035 bp, Saccharomyces pastorianus
atgtttaagagattttccaagaagaaagaggttcctgaagagccaaaaaatttaattgagattgacaagccaattaaggacttgcctgcctcggtatctattccagaggaaaaaccacttaccgatgaacaaaaaaaaatgtacaaggacgttctgaaatacttcagtaatcctgacttgaaaatctacacaagtgaaaaaaatagatcagaagaagaagtcaagcccttagaggaggaggaaaaagcttggttgacaagagaatgtttcctgcgttacttaagagccaccaaatgggtcttaaaggactgtatcgatagaatcactacgactttggcatggagaagagaatttggcatcagccacctcggagaggaacacggtgacacactgaccgctgactccgtggccgtagagaacgaatccggtaagcaagtcattctgggttacgaaaacgatgctaggcccatcctgtatttaaaaccgggcagacaaaacacaaagacctctcacagacaagtgcagcacttggtctttatgttggaaagagtcatcgatttcatgccagctggccaggattctctagctttgctaatagatttcaaggagtatcctgatgtgcctaaagtacccggtaatagtaagattccacctatcggtgtaggtaaagaagttctgcatattttacaaactcactatccagaaaggctcgggaaggcgcttttgacaaatatcccttggttggcatggacattcttaaaattgattcatccatttatcgacccattgacccgtgaaaaactggttttcgatgaaccatttgtcaaatacgtccctaaggacgaactggattcattatatggtggggaaatgaagttcaggtataagcatgatatatattgggcatctttggtggatgctgcccgcgaaaagagagatcttttttccagacgttccaagcctcgcggtattgtaggtaagcgaaagcgaattagaagtctcccgattactccttacccggaaatcagcaagtaa

SEQ ID NO: 6121 - DNA, 2175 bp, Saccharomyces pastorianus
atgtcgttaccgggtacaccaacgacttctccaaccccgatggatgaggatattgaacagactgtctacgttaacactgagcccaaaagagtaaaggtatacatccttgaaaacaacgaatggaaagacacaggaactgggttttgtattggagaggtagatgaaaacaaactcgcatatcttgttgtctcagacgaagactcaccaactgaaactctattaaaatctaaattagaaggaaatattgaataccaacgacaagaagaaacacttatcgtttggaaagacttgggcgggaaggatatagccttgagttttgaggaaagcatgggatgtgatgccctatgtgaattcatcgtccacgttcaaagaaacatagaatcgaatatttctttggtcaccgttaaatctagcgacaatggactcggatccgttcatgacattataacaggccccgtgacattaccctctaattgctctgagcaaaatggccaaacattactagaagctctaagaatcttgaatgaaaacacctcttttgattttttgaaaaacgagaccatagaatttattctccagtcgaactacgttgatacgttgatttctcatttccataaagcagaagaagaaaaaataccgaaggacttatttctattaagtaatattattaagactttgatactttacaatcaaagggatatactggaatcaatggtcgaagatgataggattatgggaatagtaggtatcctggaatacgacactgaatatcccacatcaaaggctaaccatagaaaatatctgggttcaaaggggcccaattttaaagaagtcattccacttgaaaacgaagacctaaaaataataatgaaaaaatgttttcgattgcagtttttaaaagatgtggtactagtacggtttctggacgatcataactttaatttaatctcggaaatcgtaatggatttagaaacatgcatcatcgactttcttcaagtggggactttcttagataggctgatagagctttatgatactgatatcattccagatagctccgtagagagagaaaagttcgtacaaaaacgtaaagacggtatcagattactccaacaatgtgttcaaatgtccattaatttagacgcgcatgaccgttccaagttttataagacacttgtccgaaagggtctattcaaagtcttagattatgcatttcacatggaaactgatagtaacgttcgcattttggctaccgatactatcattaccatcatcgagcatgacatattgctgattcacaacgttcaaaatgaaaactctttcaaacaacaacacaaattggccccggatgacaaatgttctacacgaagcaattcacaggattacaactccagcactgactccaagctattattaatactttcaacgattcttttaaccgacaaaagtcccgggttacgcgaacaagttgtgcaagcgctaaacacgttgcttcacccagaaggatgtctcagtaatggtgaaggttcgtatgatatcatgagtagatccaacaacgaatcaaaaaatacctctgaagacttcccaaatttcggttatggattgaattcggattcaattaatttggacaattacaactacaataatgaagatatgaataatctagacgcaacagagtctgaatcagagtttcaaattatggaatatttcaccaatttttacaataaaattgctccaatactatttgggcgactaatcaaaagagatgccacaacagaaatgacagaaatgaatggtaaaataaaaaagactcagaaagacgatcttttgttgattcatttagtaaaactggtatcatttatttgcactgagcatgaccgcgttttgtctaggagattcatactagaaaatggtatactagattctgtcagcaacctcatcaaaggtaaccatatactgcaactaaggctaacagcggtaaggtgtattaaaaatatcatatgtcttgatgataaatactatcatcgatacatgatttccaaaaatctgtatgcaccaattttcaaactcttccaggagaacatagacaaaaataatcttgcaaattcatgcattcagatttttgtcgatatcataatggagtgcagatacatcgacctgcagcatgcaagctgc

SEQ ID NO: 6122 - DNA, 882 bp, Saccharomyces pastorianus
atgtcatacaaaaagtttgtgttttttattaaccttttctttctactaggtgctacattgttgacattttttttgatattggcaggcgccaaaaacacgggagttttaaagaatttttattggttccaggcatccacgtcgggctttaactcagcaccctccttgaccagatggtataactacaactggtgcggctggcagggtggacaggctgcaaactgctcttccaagatggctgcgcagccgttttcccccagggacaattttggtagttccaccctcatgccctccacctttttgaacgacagaaatacgtattattacctatcaagagtgggctgggcaatgcttttgatcgcgctcttcttcttactgatcacgttggtgtctgttattgtcagcttgatcaagtatacaagacctaccgcctcgttgacgacggcgatgagctggatcactctgttcttcatgaccctttccgcttgcctgtacactggttgttacgccaaagcggtaaaggcatttcaccaccaggatcgcggggctaggctgggccccaagaactttgggcttatttggacgacagtgttcttgttgataggaaacgccgtttgcgccacagtcatggcggctacgtacaggaaaaatgagtacatctacgaccgcagtttcgcttccactaagatgacggactcacagacatcgaccccggatgcctccgcgtacccagcaaacgaagtggtctctactcctgtccccgtcccggaagttcaacagcctcagccttcccgtaacggcagatttttcagaaagttgagaacaaagaagagaactatcaccactacaggcgatgaacctgatcgacgccgattgccgctgcta

SEQ ID NO: 6123 - DNA, 1749 bp, Saccharomyces pastorianus
atgagtaaccaaaataaccgatcaagaaacgaatatcaagcccacccggaagatgagtcttcctacgagctacaaaacaaccatagtgggctgtttcagccttcaaatgaagaattaataaacagaaatcaaagatacacgaaccataatacaagtatggattcgttcacgcccgtacaatctttacaattcccagaacaatcccgacaaacggatctgcagtacaacaatcctattaataataacggtaatgagcaagacatttacggtggtttcgttaaccactatcgtcaacgtccggtaccagcaacggcagaatataatgacgttttcaacactaacaaccagcaaccagaatcattacaacacgatcataataacaacatcataccctcatatccgcttccgtcgataaacgtgattcaaaccaccccagaacttatacataacggcacacagccgatagaatcccccaccgaaaggccgtactttaacgaaaacgattactactataacaataggaactccagagcatctccgagtattgcttctagtggggaaggctacgcggatcaagaagctagacccatcctggatcaacccgaaaataacatgaacaatggcaatatcccacaataccatcgcaaggacgaaaacctggcgtatcataacggttatcatggagtagatcctcagcagtactatgatgatccggaagctggctatatcgatcaaacgggggatgactaccagattaactcatacttgggtagaaacggcgagatggtagatccttatgactataacaatcatttgacgcctatggaacgtagcggatacttgcctgatgatcacagatctttgaatggtggagaggatgaggtggatagtgtgaaaagcggatactctcacagagaccttggtgaatatgacaaggatgacttttccagagatgatgagtacgacgatttgaacactgtcgacaaattacaattccaagcaaacggtgtgcctgcatcatcttcggtatcctctgctggatctggagaatcgaatttgataggcagtaatgataacttagttggaaatagaatgcttaaaagaagtggtactgaaattagaaagtttaagctttggaacggtaatttcgtcttcgattccccgattagtaaggctttattggaccaatactcaaccaccacagataatgcaagtaccttacctaatgagtttaaattcatgagatatcaagctgtgacttgcgaacccaaccaacttgcagaaaaaagctttaccgtcagacagttaaagtacttaaccccgagagaaacagaattgatgttagtagtaacgatgtacaatgaggaccatatcctgctaggaagaactttgaaaggtgccatagataacgtaaagtatatggtaaaaaaaaaaagatcaagcacttgggggcccgacgcatggaaaaaaattgttatttgtatcatttcagatggtcggtctaagatcaatgaacgttctttggcattactaagttcattaggttgttaccaagatgggtttgctaaagacgaaatcaacgagaagaaagtagcaatgcatgtttatgaacataccacaatgattaatatctcagatgtttctgactcaggtgtatcgtcggaatgtaatcaaggcaccgttccaattcaattatggtctggtttgaaagaccaaaaccaaaaaagattactcgctagatggcattga

SEQ ID NO: 6124 - DNA, 1173 bp, Saccharomyces pastorianus
atgactcaacaacttaactctgatgatatgcaagaacaattgagtgctactgtcaaattcagacaaattttgtccagagaacaccgtcctccaattgatattgtcatccaagctggtgtggttccaagattagtagaattcatgcgtgaaaaccaaccagaaatgctacaattggaagctgcttgggctttgactaacattgcatcaggtacatcagctcaaacaaaggtcgttgtggatgctgatgctgtaccacttttcattcaactattatataccggctccgttgaagttaaagagcaagctatttgggctttaggtaacgtcgctggtgattctaccgattatagagactatgttctacagtgcaacgccatggagccaattctaggccttttcaactccaataaaccatctttgatcagaaccgctacttggactttatccaatttatgtcgaggtaaaaaaccacaaccagattggtccgttgtctcccaagccttaccaactttagcaaaattaatctattcaatggacactgaaactttggttgacgcttgttgggccatatcttacctatccgatggtccacaagaagctattcaagctgtaatcgatgttagaattccaaaaagattagttgaattactaagccacgaatcgaccttggttcaaactcctgctttaagagctgtgggtaacatagtaactggtaatgatttacagactcaagtggttataaatgctggtgtcttatctgccttaagactactactaagctctccaaaagaaaacataaagaaagaagcatgttggaccatctctaatattacggcaggtaacaccgaacaaatccaagcagttattgattcgaacttaatccctccattggtcaaactgttggaagttgcagaatataaaactaaaaaagaagcttgttgggccatttctaatgcctcctcaggtggtttgcaaagaccagacatcatcagatatctagtatctcaaggttgtataaagccgttgtgtgatttgttagaaatcgctgataacagaatcatcgaagttactttaaatgccctagagaatatcttaaagatgggtgaagccgataaagaagctcgcggtttgaatattaatgcaaatgctgactttattgaaaaagctggtggt

SEQ ID NO: 6125 - DNA, 414 bp, Saccharomyces pastorianus
atggtggaaaagaagctggaggggttgcgagagtatgaacgaaaaagaataccgacaaaggggagtggtgtgtctaatcgttaccaagacaattcgttcaaagtatcgacgccaacaaagtcatatatgtcttcgaatagcacttcgctaccccatatcactgatatagagacccccattaatatcttcgaggatgaaggtaaaatggaagcaaataaaaatgttttacactttcaagagcaagggcagctgacttcgtttcagaaattacagtctgagattgaaacaaacacaaggaaacttgatatgattatagatttgttgaaggacgatacggtcggaagggaggaaaaaaaagtggccgatcacggaaatgtaactttgggaccgggaagtgacaaggtggtgggatag

SEQ ID NO: 6126 - DNA, 2394 bp, Saccharomyces pastorianus
atgtcgtcattaaccagactattgcaggaaaaacgaaaaaacgaagcctcaaattcgtcaccgagaacttctgctgatacattgaccacaacgcccgagtcacatcctcttgacgctcagacaaggaataagagtagtagtcacattgcaagcgatagtaacagcagcaatggagaacgtaacagggccactatgccagttcctggaagcgttacaacggttacacaaatatactcggaggaagattcgtcatcaacggccggttcttcactagacgaaagaaatcagttttcttccagttttcttaattccaattttgcccacactgcctcattatatggcacaagtgcacaaagtaaagatagatttgggtctttgataaatgaccagggggctgctggactttcctcgtatggtggttcttctcttgccccacaaaatagaatcacgagtagactatccgctacttcgcacacttcgggaaaggtcattccttcattgtcttcgagtattccttactctgtcccaaattctaacaaagacaacaacagctcgaatagcaacagctcctctttgtcttcatcatggctcgaaacatatgcaggcggtttgcccagtaatatttctgcgatcgattctaatgttatatcttccccaaaagtagatagtgtcgagccccgcttcattatttccaaacaaaaacttcagaaagcatcgatggacaacaacaacaataccactgctacccaagcaaggtctatttcacgttcaggttcattttcttcacaactgggaaatcttttcttttctaaaaactcaaaagaatcctcaaacccaaactctgctggcatgacataccccgccaattctaatggtccatccacgagtattaaaaattctaatgttgcaaatggctcaactgctatacctaaaccaattcgtgcaagacaaagtagtatttattctgtatcgaggcaaccaactggttcctacacagataacttgtacggctctccatcttctgttcatgaccatttacccccaagccaaagcgttccaagatcgcaacattcttccatcggtgatttaaaaagattcttcaaaaagagctctagcagtaatctgtcctcgaacaataacaacgctattccaaatggatctcctgtgtctaccgggatggctgttccatcgcattctcattcatcatctcattttgcagcaggaaactatccttcctctaacagctataatggaaatggggacactatttattctcacgcacatggttctgcagttccgttttcaaagagatacgtcaagacgggagaagatttaggtgctggagcaggtggttccgtcaaattagttcaaagaatcgtagataaccaaatttttgcagtaaaggaatttagaactaaatttgaaaatgaatcaaaaagagactatgttaagaagattacctctgagtactgtattggtacgactttaaatcatcccaatattattgagacaatcgaaattgtatatgaaaatgatagaattttacaagtaatggaatactgtgagtacgatttgtttgctattgttatgagtaataagatgtcgtacgaggagatttgttgctgctttaagcagatccttactggtgtgcaatatttgcatagtatcggcttagctcatagagatttaaagctagataattgtgttataaatgaaaaaggtgtggtgaaattaattgatttcggtgcagctgtggtattttcatatccattttcgaagaatcttgtggaagcaagtggaattgtcggtagtgatccatatttagcacctgaagtttgtatttttgcaaagtatgatccacgtcccgtagatatttggtcttcagcaattatcttcgcctgcatgatattaaagaaatttccatggaaaatccctaaattgagagataactcctttaaactattctgttcagggcgtgattgtgactccttgagtagcttggtaacgagaactcctgatccaccttcttatgacgagtcgcactctccagaaaaaaagaaatctgagggctcttcaaataatgtatcagatcccaataatgtcaatattggaccacaacgactattgcattcattgccagaagaaacgcagcatattatcagccgcatgattgacctggcacctgcatgtagaggaaacattgatgaaattatggaggacccttggattcgtagcattagcatgtgtcgaatggttgaagatggcctagcgttcaaagtggttgaaggagatgaccaccatcacacgcaagttgatcaaagtgaagcgcatattgcaggtttagaaaagaaaaagaaaaaggataaacaaaacaactatcaagtaagcgtctaa

SEQ ID NO: 6127 - DNA, 537 bp, Saccharomyces pastorianus
atgtcggcggctattggcggagaaactgggatgttagatgtgggaagacactgtgcttattgcaggcagctggacttcctgcccttccactgttcattttgcaacgacgatttctgctccaagcatagactgaaggaagaccatcactgtaaatggttgctggaacaagaagcgtcttctaagaacaatgaaagagcaactatgagccagagtggtataggctcaaaaaacgaggcgtatatcaagagcctgttaccagaaagagcacatgttagagtgcagatggcggacaataatcgggaaccaaagagagacatcaacactgctaaagttagttccagtttaaattcaaagacgttggataagatttttaggttttttcagaggaatgagaaaaggaagaatagcagtaaatccaaaaagacgttcggctcctcttcgaataaaatcattcaactagcgaacctcaagaaaatggtaaaggtgatacgaagattccgtcacaaaatagaatatatatttggtgctactcggtag

SEQ ID NO: 6128 - DNA, 318 bp, Saccharomyces pastorianus
atgataacaacaagaacacatcctaccaacaaacgccatcctacaagcgtgaaatgccttcagagaatgatgaaaagcccaataaaaggttcaagaaggatgatggtaacagaagcaaatttcagagacaagactatagaagtacaagagatagcggtagcaacttcagtgcaaataacagtagtagcaatcgtagacccaatgaaacccaaagatacaacacaaacagaaagagcaatacacaggctcttcctcaaggccccaagggaggtaataatgttagtagatatcaacgttaattttgaacagtccacatag

SEQ ID NO: 6129 - DNA, 138 bp, Saccharomyces pastorianus
atgaggtatcgaataaccgcagaactctacgtctgggttcttcattatgatgtaacgcagagcgttgcccagtgtgtggtcttcttcaacaatctggaaagaggcgctggttccgtcttcagacgtggcctgtgttaa

SEQ ID NO: 6130 - DNA, 177 bp, Saccharomyces pastorianus
atgaattccacggcacatgtagattttcgggagattttatcaccaattggtctaaatactaatccatacgattctgaaactatcgctatacttctaccttgttgtttggatatgagtattttcattgttacacgtttttttataacgttttattctttgcgtgctcctcctctttga

SEQ ID NO: 6131 - DNA, 195 bp, Saccharomyces pastorianus
atgtcctggaaatcccatttggaattgtttaaacaaaaaaagtccacagcatatattttgttgacggtcttattaggaatcggttgggccgttttagatttcccggtaatagtcgctataaatataagaccttcaagttcaataagaccaatgaacccgaatatttcatggctggagagtctttggaaaccatga

SEQ ID NO: 6132 - DNA, 357 bp, Saccharomyces pastorianus
atgagtgtggaaggaaaaagaacaaggaacgggtcgcatcctctccgggcagtaagcgggttcaccaccaagggctacatacatgcgttggtggattccacgtcgaactcgaactcgaactcgaactcgaactcgaactcggacagcagggtacccctggtgcaaatatcagatgactctcacataacgcacgatagctttaggctgtatacagaccagcgcgaggcttcgcacttgaggaaccgtaacatcaacggggcagggcaggtggacaacaccgacgttatggaccagttctctcaatggtccagctacaaaagaagctcatcccctcacaataccggtgagaacctatcc

SEQ ID NO: 6133 - DNA, 1452 bp, Saccharomyces pastorianus
atgcagcataacacgtcattatatgactctttaaacgttaccactactgcatcgacaccggaaatcaaaaaagcctacagaaacgctgcattgaagtaccatcctgataaaaataatcacactgaagaatccaagcggaagtttcaggagatatgtcaggcatacgaagtcctcaaagacaatcatttaagatctctttatgaccagtacggtaccacggacgaagtgcttatccaagaacagcaccgggcacaggcgcaagcacaagctcaagctcaagcgcaggcgcgacagcagcagcagcagcaacaagccagcgtattcaattcatccgcaggctttgacacgggaggagtgacttttccggacctgtctccaggtaatctttttgcgcagttcttcaacagctctgccagcgcctcctccaatggttctaaaaataacttcagcttcagccttaatggcagctctacgcccaacttcccattcggcaacggcggaggcatgagtaatttgcaatctccaccatcgaaatacggttccgatgatgatggacatcatttacatagaggtcccgatatcaaacacactttgaaatgcacattacgggaactctacatgggaaaaactgcaaaattgggcctgaacagaacaagaatttgtcacgtctgtgaaggacatggaggcttgcagaaatgcacgtgtaaaacatgtaagggccagggtgttcaaacgcaaaccaagcgtatggggcctttggtacaaagttggtcacaaacatgtgctgattgtggaggtgccggtgtatttattaggaacaaagatatctgccaacaatgccagggccttggtttcatcaagcaaaggaaaattctacaagtcactgttcagccaggtacaagtcacaaccagctcatagtgctgacaggtgaaggtgacgaaattattagcaaaggaggcggtcatgaaaaagtcataccgggtgatgttgtcattaccatattaagactaaaggatcctaaattccaagtcactgataactgcaacctaatctacaagaaatgtaaagtcgacttgatgatcagtttatgcggaggtatcgtttacatcgagggacatcctagtggtaaattaatcaagctcgatatcatacctggtgaagtacttaagcccaattgcttcaagactgtcgaaggaatgggtatgcctaagtttattaatggagttcgaagtggattcggtcatctgtacgtcaaatttgatgtgggctatccggagagactggagcctgaaaatgccttgaaattacagaaaattctggcccaagataaatacattcaggctgaacaacaagcctcagaaaccacggatgctgactgctattgcgatttggaaaaatcctaccacgctgtagaagaacacgtactaagcagtcttgaggccccgatatga

SEQ ID NO: 6134 - DNA, 792 bp, Saccharomyces pastorianus
atgaaactatctgctactgctttgaccgtcgcttcattgatcggttctaacactattgtttccgctttaccatacgcggcggagattggatccgattgcactaccactgcccacggatctcaccagcacaagagagccgtcgctgtcacctacgtttacgaaaccgtcatcgtcgattccaatggccaaaccgtcacccctactgtcactgggacttcttctgcggtttcttcaaccactaccttggttccagaatcttccgctgttacatcttctaccgaggccaaatcttcttcttcttccgcaactgctaaaaaagcacacaccaccacccttacttcctcttccaccccagcaacatcaacctctcaagaaacctccaccacttcctctaccacttcagtcggcgcgactacaacagcctcgactacttcttcaagcggaaccagcagcatatacggtgacttggctaacttctcaggtcccaatgaaaaattccaagacggtactattgcctgtagccaattcccatctggtcaaggtgttattcccattaactggttaggcgaaggtggctggtccggtattgaaaacactgacacttctactggtggctcatgtaaggaaggctcttactgctcttacgcttgtcaaccgggcatgtctaagacacaatggccttccgatcaaccctctgatggaagatcaatgggtggtctgctatgtaagaatggctacttgtaccgttccaacaccgtcaccgactacctgtgtgaatggggtgttgatgcg

SEQ ID NO: 6135 - DNA, 918 bp, Saccharomyces pastorianus
atgcctcgaatatctccatcgctgctaaaaaaggcctcgagtatacggcccggcttgcaccttttgatccctgagtgtagaagtctccaacaagccacactcgagtacaaatggcttagtgaagaactgcctccagaaaaatccatcctgtgggcctgtttacagagatacaaccatgtcccattacagtacatcttgggttcgcaaccatttggtgctttggacattatctgtaagccaggtgttcttataccaagatgggaaactgaggaatgggtgatggagctaataacaactataaacaattcaacactcttcaaccatgagactcctttgcatatttgtgatacctgtactggaacagggtgtattgctcttgctttgaatcatggtataccaaattctaccttcacagccattgatatctcgaagaaagcgattgacttggtcaaactaaatatactaaagaacaaagtgggcaaaggcaggcttatacaacgaaatatattaacttcaacccctagcaatgttcctccacttcatatagacatacttactggcaatcctccctatattcgaaagcgtgattttaacagagatgtcaagacctctgtaaggctgttcgaaccgaaactagcactagtgggtgagcttgaattttatcaaaatctagtagaacactggctatcaaaaaccgattccttcttttatgagattggcgatactggtcagtttgattatgtagaaactcgtattaaaagcgattctaagctgagccaaagttggtccatcggcttgaaatatgactctaatggtaaaccaagggttgtatatgggttcaaaaacaactccaaaggagccaggttacttccgctctttggacctgcaggcatgcaagctggcactgccgtcgtttac

SEQ ID NO: 6136 - DNA, 576 bp, Saccharomyces pastorianus
atggaaccgttgacgactatagactttaatcaacacgtcattgtgcggttgccgtccaaaaactacaagatagtggaactgaagcccaatacttctatatcattggggaaatttggtgccttcgaagtaaacgacattatcggatatccatttggtttaacatttgaaatattctatgacaatgaagattctactgccgttgagaaaacagattccaagccaaaaaacaaaattccaatcgggaaggtaaggttactgtcacaagaggttgaggatgaaagcaatgataaagatgatagtcatagtgaaccgccattgtctactaaggaaaaatcagtctctgttgaattatctaacattaacagtagtgccaccaatcagaatttggttaacatgggtagtaaggctcaagagttaactatcggagaaatcgaacaaatgaaacaagaatctttatctagtaaagaaatcattgacaagattatcaagtctcacaaaagcttccataacaagaccgtatattctcaagaaaaatatcttaacagagaagcaaaattcgcaaaatattcacggtga

SEQ ID NO: 6137 - DNA, 1671 bp, Saccharomyces pastorianus
atgggtagcagacgtcataagaacaagcaagccgctccaccaactttggaggaattccaagctaaaaaggacaaaaaggctaatagaaagttagaaaaaggaaagagaccttctgccactcaaggtaatgaagtttccgatagaaaaaagaagagatcgaagccattcaagaaatccagaaaacaagaagaagaggttgtcgaagaagacaaaaacttgccagaagttgatcttgaagctctgtctaaggccagaaaatcattgtttgacgatgacgaagacgctgctgaagcaggatctgatgatgaagagctaaaagatgagtttgacttggaacaagaatatgattacgatgaagacgaaggtgacgaggctcacccaatattctcagatgacgataatgacgaaggtgatcttgaagaattaaatgcacaaaacatggaagctctctccaagaaattggatgaagaagaggctgaagaagctgaagaagccgaaatggaattagtggaagctgaacaaatgcaaccaagagctgatgtcttgccaaccgaagaacaagaagaaatgatggctcaagaacctcctaatttaacctctaccagaacaagaatgatcgaaattgtcaaggtcttggaaaatttcaagaccctcggcgcagaaggcagatccagagcggaatacgttgacaggcttctaaaagatatctgtgaatattttggttatacaccattcttggccgagaaactgtttaatttattctcaccagctgaggcgatggagtttttcgaagctaatgaaatcgctagaccaatcaccattagaactaatacgctaaagactagaagaagagatttagctcaaacgcttgtgaatagaggtgtcaatctacaacctattggttcttggaccaaggttggtttacaaattttcgattcccaggtcccaattggtgctaccccagaatatttagcaggccactatatcttgcaagcagcatcatcctttttaccggtcattgctttggaccctcatgaaaatgaacgtattttggatatggctgctgcaccaggtggtaagaccacctacatatctgccatgatgaagaacactggttgtgtttttgctaatgatgccaataaatcaagaaccaaatctttaattgctaatatccaccgtctaggctgtaccaacactattgtatgtaattatgatgctcgtgagttcccaaaagttatcggtggctttgatagaatcttattggatgccccatgttctggtactggtgttattggtaaggatcaatctgttaaggtttcccgtaccgagaaagatttcattcaaattccacatctacaaaaacaattgcttttatccgctattgactccgttgactgcaactccaaacacggtggtgtaatagtatattcaacatgttctgttgctgtggaagaggatgaagctgtcgtagattacgcattgagaaaaagaccaaatgtcaaactagtcgaaactggtttggccatcggtaaagaagggtttactagtttcagaggtaagaagttccatcctagtgtaaaattagcaagaagatactatccacatacttataatgtcgatgggttctttgttgccaaattccaaaagacaggtccatctacgtgtcgatga

SEQ ID NO: 6138 - DNA, 438 bp, Saccharomyces pastorianus
atgctaacaaaaatggcgcctatgatagcgcctacagcaatatacacggttccattagtcttatgggcagcgttcagtataaacgggttccccaaagtagaaggcggtgttatcgtcggagcaattagcgatgacgacgatgtcttcgaactggaaagcgcggtgttcaatgacggcaaggacttggaagtcgtgtgggacgctatttctgatgcagaggctgacacggtagttgaactagccgtagtgctggttagtttgggaatgtctcttccgacaagtgagacagatggtatgaaatttttcctgaccatctttgccgatgttctttttgaaatttgcaggaaggaaaatcttgctgtagtacaatctcaaatgtcttatattatcaaagatcttctgctaatgcatctccgctgctgtcaaagatggttttga

SEQ ID NO: 6139 - DNA, 261 bp, Saccharomyces pastorianus
atggaaggagagaggaaaagccaattaaaatttaaaaggaataaagtttacaacaaaaaaagacgatttctttttttcaatgctttacggacttttcaaacagtttcttcgtcaaagacagtttcgattggcttttccgtcagggaagcatgtccgaaaacactgacggcagaagcaccgatcaaccataacaaagtggagattggcgaagccaagaaacctattggtacggccacacaaatcaaaccggtgtatagttga

SEQ ID NO: 6140 - DNA, 156 bp, Saccharomyces pastorianus
atggtttttaccaactcagacaattcttcgttattgtcctctttcaaaataacgtgttccatggtatccataaactctctagaacaaacttctttaataaatggtgttccaccattcttaacacatatatttgtaagtttccatgaagacaattga

SEQ ID NO: 6141 - DNA, 270 bp, Saccharomyces pastorianus
atgcaacgcatcgaatccttagggctgacccttctagaccttaagacatcagaaatctctaatgctatgggaagatcgaggtcaccattcggaatgctttcgctagtggctttttctattaacgtgtccaactcacctggcgtactgacggacattctgtttttagatattctactgactatccatcaatttggggcgggaggtattcgaatatttttacaccttttatttccattccctgtgttgtatatatattttagataccattga

SEQ ID NO: 6142 - DNA, 507 bp, Saccharomyces pastorianus
atgagctccaacaatggtgttacgggcaagctatcaagcagagtcatgaatatgaagttcatgaaattcatgaagaacgacgacgacgaaagttcaaattctaatacaccatcaaacgccaattcagacacagaatccacagaacagaaatggaaacagtttggtcgagataactcagagtgggatctcaatagttgcaatgacgatgtgaaagaagactcaggcaaggaaaagaaaaaagtaaaaaaactagtgtataagaagcgacctcatctcatagtctccaatgttgggtacagtgaattgcgaaaatcggaagacctgataaccggaagaaaaacttttggcagcaataccgacgaagccaatcccaagaagagaaagcttgaagaaggcgaacaagaagaagaaaagggaaaaggctatgatcaaaaaaaggaagccgcaggaaaacaagacgaaggagaggatgactacgacctggataattattcaaggatagcatga

SEQ ID NO: 6143 - DNA, 720 bp, Saccharomyces pastorianus
atgcctgcaggtcgcattgggtggcttaagtttttagctgaagactgtgatccgacagatcagagggtgtttaggtggtgtgtaacgtcaatggaatttgcaatgcatatggtcagtggttggaatgttctagcgcttgatgactgtcaattttcttctttaaagcaaaaaatctcagagtgtatgtcactacttatctcccatttcgatataataggtgcccgctccatggaagttgagaagattaatcaacaagctagatcaaatcttgatttagaagatgtgttcgatgacgatatgatgttgcaagtgaactctgagttccgtgtacagagtatcatagaattggaagaaaaaatcaaaaaaaatccacaccaaactggtaaagtgatagatgacagtgataaaggtaacaagtatcttgtttccttggcatcctccatctccaacgtatctatgagatggcaaaagaggaattttgttggaggtggtacttttggaagagttttttctgcggttgatttggacaatggtgaaattctggctgttaaagaaattaatattcaagacagtaaggcaatgcaaaagattttccctctaatcaaagaagagatgagtgtcttggagattttgaatcacccaaacattgtttcatattatggtgtcgaggttcatcgtgataaagtcaatatcttcatggaatattgtgagggaggctct

SEQ ID NO: 6144 - DNA, 615 bp, Saccharomyces pastorianus
atgcactatggagtggacccaatccttagattaagtttagcggtctccatcatatctataatttattttttgattattagggttttaccagttttgttgattttggtaatggaaatcattttgtctatcctgtggttctctgctttcgtaactttggcttctgattttggtcctatgtcatgctcaaatatgccatgcggtatgatttataatccgtatcataataggtctggacctaatacttacatgccatgtccaaatgtgccccgccttatgaattccagctcggtttcttgtagaattgctaaagctaatattgttctagaagccattatgtttatactatttctcgcaaccacatatgtctcctatctcgcagttgtattgcaagctagacaacgtggttccaatactaggtctatcttaaaggcaatctgtaagactagtgttaagacgttgcgcagaaccaccctatacctggagagctattttgaggaagatgaatctcttttagatcttgaagctgaccaagcggaaaaagttgaaattgcagacgatggagagccagcttataatgagaaaaacgttcaatctgaatcagaggactttgaataa

SEQ ID NO: 6145 - DNA, 1116 bp, Saccharomyces pastorianus
atggcaaatacaatcaaggtcgaaggatacccgtccatggaatggccgacttctttagatatcccactaaaggcctcagaagaattggtcggtattgatttagaaacggatttgccggatgatcctactgacttgaagactttgttggtggaggaaagctccgaaaaggagcattggcttaccattgctctagcctattgtaatcatgggaaaaccaatgaaggcattagactgattgaaatggctttagacgttttccaaaactctgagagggcttcattacacactttcctaacctgggcccatttgaatttggcgaaaggtcactctcttagtgtggaaacaaaagaacacgaacttacgcaggctgaattaaatttaaaggatgctattggatttgaccctacgtggattgggaatatgttagctactgttgaattatactaccagcgcggtcattatgataaggctttggaaacctccgatctctttgtaaaaagtattcatgccgaagatcatagatctggtagacagtctaaacctaattgtttatttttactcttaagggcgaaactattataccaaaagaaaaactatgtggcgagtttgaagatttttcaagaattgctagttatcaaccctgtgttacaacctgatccccgtataggtattggtttgtgcttttggcagctaaaggatcctaagatggcaatcaaatcatggcagagagctcttcaaatcaattcaaagaacacaagcgcctcaatcttggtattattaggtgagtttcataattctctaaccgattctacaaatgatgaagtcttcaaagaaaccttttcaaaggcattgagcgacttaaagaatattttctccgaaaatcagaataatccagttttgttgacgttattacaaacataccactactttaaaggtgactttcaaactgttttggatatttaccatcacaagattctaaaaatgagtcccttaatagccaaaaccgtcctttcggaatcttcattctggtgtggtagggcacattatgcgttgggcgactatcgcaaatcattcattatgtttcaagaaagtttaaagaaaatgaagataatttaa

SEQ ID NO: 6146 - DNA, 207 bp, Saccharomyces pastorianus
atgcatggttccataatgtggtttctgcaaatggcacagttgtcaacggctatatcccacgaccagaacgccaccgctgtccattttttaatctcgaatcttttttttttggtctctaccggtgtattttgttgctcattctgcgtggaaacttgcgattcgtcttcatctacttccattctgtcaccttcgttgctcattctgtag

SEQ ID NO: 6147 - DNA, 129 bp, Saccharomyces pastorianus
atgaacgacatggaacgcaaccaaatgttgccaatttgcgtctcccagttaaagaaaaatatcgataagggcttggaattcgtgcatcgagatctgcttcatcttaatgagcatcggaccgaagcataa

SEQ ID NO: 6148 - DNA, 870 bp, Saccharomyces pastorianus
  modified_base (773)..(774): a, c, g, t, unknown, or other
  modified_base (786)..(786): a, c, g, t, unknown, or other
  modified_base (808)..(808): a, c, g, t, unknown, or other
  modified_base (823)..(823): a, c, g, t, unknown, or other
  modified_base (832)..(832): a, c, g, t, unknown, or other
  modified_base (849)..(849): a, c, g, t, unknown, or other
  modified_base (867)..(867): a, c, g, t, unknown, or other
atgccccactcagttaccccctccattgaacaagactctttgaaaatcgccgttttaggtgctgccggtggtattggccagtcgctatcgctgcttttaaaggcccagctgcaataccagttgaaggagagtaatcgcaccgctactcacatccatctggctctttacgatgtcaaccaggaggcaatcaacggtgtcactgctgacttgtctcatatagatactcctatctccgtgtccagccactcccccgcaggcggcattcaaaactgtttgaataacgcttctatcgttgttatccctgcaggtgttcctagaaagccaggcatgacacgtgatgatttgtttaacgtgaatgccggtatcattagccaactgggcgattctattgccgagtgctgcgatctctccaaggtctttgtgcttgtcatttccaaccctgttaattctttagtcccagtgatggtttctaacattcttaagaaccatcatcagtctagaaattccggcattgaaagaaggatcatgggtgtcaccaagctcgacattgtcagagcgtccacttttctacgtgagataaacattgagtcagggctaactcctcgtgttaactccatgcctgacgtccctgtaattggcgggcattctggcgagactattattccgttgttttcacagtcaaacttcctattgagattaaatgaggatcaattgaaatatttaatacatagagtccaatacggtggtgatgaagtggtcaaggccaagaacgnngtaaaggtatgntgctacctttattcgatggccncatgcgcggttatanagtgtgttngtccaatttgtttcttntgttatgtgggtaacatntga

SEQ ID NO: 6149 - DNA, 783 bp, Saccharomyces pastorianus
atggtttcattgactacaatagagcaaagcccagtcaaatgcgagacaaccactgagaaagagagcaatgatactagggggacagattcgaacgagaatgcagagacaaaagaaacaaagaagggttttccattccatgacttggcaaaattgcagaaacagtacaaaaataaatccagtaggaacgagtcactagtagcactaatatatctcttgggttcgatgctgtcattttgtctcctaatatttttcacggacttttatttgatacctttgttccccaccaccactacaatgacagactacattgtattcaatttttatttattgaacgtttttgtattttgtatggtgcatttcatttatcacttcgtcaaaaatatttctctacaacaacatctcgaacattggcagaagttttcgtatttatcgaatatcaacttattgatatcatcacaaatcacaattctttattatctattctatgattacgtgtttttcttcaaaatttttacccttttaatgaacttcataggattagtggcatacttttttatattgacggacaaactcatttcctcgaaaagattcaataaaacagttttcttcatttcggtatcagtagtgtgttgttccttgccactattaaccgcaataatcacctttgatggtttagaaaatctgaaagagaggataaaagtgaacgcaattacgtggggacttgtggctttggtagcggcatctatgacctgcaggcatgcaagctggcactgccgtcgttta

SEQ ID NO: 6150 - DNA, 291 bp, Saccharomyces pastorianus
atgaatgaggatagcgacagggctcagttgaaagccagactgtgggtccacgtagagacacgactacaacaggctctgtgctcccaggatgccaaatacacaccgagattcatcaactctttgttagaactagcgtatttacagctaggggagatggggagcgacttgcaggcattcgtggagcacgctggccgagatgtggtcgacaggagcgatctgatgctgtacctgaggaagcagccggaattgcaagagcaagttcaacaagacgagaaaactagaactacttga

SEQ ID NO: 6151 - DNA, 135 bp, Saccharomyces pastorianus
atgctaacctttactatcttgctacttttactattatctgtgatcttcctgttcgactgcttcgtctttttaccagaagcagggccgccttttgaggctaacaatgcttgccagttcgatgaaagtgccatttga

SEQ ID NO: 6152 - DNA, 540 bp, Saccharomyces pastorianus
atggtgtttgaaaaggaattattagttgcaactcaggcagtgcgcaaggcgtctttattgaccaagagaattcaatctgaagtaatttctcataaagattctactaccatcaccaagagtgacaattctccagtgactacaggcgattatgcggcacagacaattattatcaacgccatcaagagcaatttcccggaagacaaggtggtgggtgaagaatcctcggatgggttgagtgattcgtttgtgtcaggaatcctgaatgaaataaatgccaatgacgtcgtctacaataaagaatacaaacagcgtgatttccagttcactaatgaccagttcccgctaaagtctatcaaggatgtcagacaaatcattgatttcggcaactacgcaggtggcagaaaaggcaggttttggtgtttggaccccattgatgggaccaaggggtttttgagaggcgaacagtttgcagtatgcttagcattaattgttgatggtgttgtccaacttggctgtattgggtgcccaacatggtcttga

SEQ ID NO: 6153 - DNA, 1380 bp, Saccharomyces pastorianus
atgggtcaagatgaagtttacctgaaggtaatcagcacttcaggctcgaattctgaaaagaaactggccaagcgagtgcttgacctaatatctagggggaagcattgggttctagtcacactgctgctttctaatgttataaccaacgaaacattgcctattgttttggacaggtgtcttgggggtggttggcaggctgtagtgtcgtcaactattctaattgtgatcttcggtgaaattattccgcagagtgtctgtgttaaatacgggctgcaagttggggcattcttctgcccctttgttcttgtactgatgtatctgatgtacccagttgcatatccgatcgcgactctcctggactatatgctgggtgaagatcatggtaccatgtacaaaaagtccggcttaaagactttggtcaccttgcataggaccatgggggtggaacggttgactaaagacgaagttacaatcatctctgctgttttggatctaaaggcaaagagggttgaggaaatcatgactccgattgaaaacgtgttcacaatgagtgccgataccatcctagacgacaaaactgtcgaaaaaatcttcaactcagggttttctagaatcccaatttttttgcccaatgaaccaaacaacttcatcggcatgttacttgtcagggtgcttatctcctacgatcctgatgactgcctcccaatctcccacttccccctagccacgttgccagaaacttccccgaacacatcttgtttgaatattctgaattacttccaggaggggaaagctcacatgtgcgtcgttagtaaagagccgggctcctcgcatggcgccattggtgttttaactttggaggatgtcattgaagaattgatcggtgaagaaatcgtggacgagtctgatgtctttgtggacatgcatcagcatattatgagacaacaaccgggacccttgagcaaaaggcacattacttcctatttgcatcatttgtacactagttctcacaaggagcacaaagctgctgaccaagctgatgaatcgtctccactcttgtctccatccaattctaatcacccatccgagcacccacagcaagatttgaataataagtcttggaagcagaagtcaaatgatggttacgataggtccaacgctgtattgtctccaactccacaagcgacggaacatggcaccatcataccttcaaatctagcgtccaacccgttgaacgtaaataatcttttgttaccattaaaaagcctgccaatgttccgaaaatcattactacacacactcctcattctagcaaagagccttctccagcaccacactcaaatgataaatcactctccgccgaagaacaacaactattaa

SEQ ID NO: 6154 - DNA, 654 bp, Saccharomyces pastorianus
atgactgctcatactaatatcaaacagcacaaacactgtcatgaggaccatcctatcagaagatcggactctgccgtgtcaattgtacatttgaaacgtgcgcccttcaaggttacagtgattggttctggtaactgggggaccaccatcgccaaagtcattgcggaaaacacagaattgcattcccatatcttcgagccagaggtgagaatgtgggtttttgatgaaaagatcggcgacgaaaatctgacggatatcataaatacaagacaccagaacgttaaatatctacccaatattgacctgccccataatctagtggccgatcctgatcttttacactccatcaagggtgctgacatccttgttttcaacatccctcatcaatttttaccaaacatagtcaaacaattgcaaggccacgtggcccctcatgtaagggccatctcgtgtctaaaagggttcgagttgggctccaaaggtgtgcaattgctatcctcctatgttactgatgagttaggaatccaatgtggcgcactatctggtgcaaacttggcaccggaagtggccaaggagcattggtccgaaaccaccgtggcttaccaactaccaaaggattatcaaggtgatggcaaggatgtagatctaagattt

SEQ ID NO: 6155 - DNA, 1041 bp, Saccharomyces pastorianus
atgactgttaccatcaaagaactgactaaccacaactacatcgaccacgaattatcggccacgctggactcgacggacgcgttcgaagggcctgagaagctgctggaaatctggttctacccgcacaagaacgccatcaccaccgccaagacgctgagagatgttgccatggacaaatggatcgagatcctgaagctggtcaagtgcgaggttctgtccatgaagaagacacaggagctagacgcgttcctgctgagcgagtcctcgctcttcgtcttcgaccacaagttgacactgaagacgtgcggcaccaccaccacactgttctgtctcgccaagcttttcgacaccattgagcaggagttgtcgtggaaattccaaaccaccccggacggcaagtacgcaccattcaaagtgttctactcaagacgatgtttccttttcccctgcaaacaagctgccatccaccaaaactgggcggacgaggtggattatctcaaccagttcttcgaccatggaaagagctattccgtgggcagaaacgacaagagcaaccactggaacctgtacgtcaccgagacggaccccagcatgccccagggcagggagtacacggaagacgacgacgagaccttcgaagtgctcatgaccgagctagacccgcactgtgccaacatgtttgtgtgcggcccggacacatccacgcctgcccccacagaagcgaacgaggacaagggccacaacttgggctatcagatgaccaagaagaccaagctcgacgacatctacctgaactcctcccaggattcagacgcatcgttccaccatgacgcgtttgcattcacgccatgcgggtactcgtccaacatggtccttgcagaaaaatactactacaccttgcatgtgaccccggagaagggctggtcctacgcctccttcgagagtaacatcccggtcttcgacatctcccaagggaagcaagacaacctgaacgtcctcttgcacattctgtccgttttccagccaagagattctcgatga

SEQ ID NO: 6156 - DNA, 1572 bp, Saccharomyces pastorianus
atgacatacccgataaagtcagcaacttctgctgacatctcatatcctaaaaatacccctttggtgggcctgtccaagccgccatgcctttaccaacatacgtcttcctccgttgattcattctcgtcaacgtttagtgatgatgaccgttcagacctcgttgctgtacccaacgaatcgccgcatgcattttcgtataaccccatatctccaaactcattgggagtgaggctgaccatactaagaaggtccttggaaataatggtcaagagtcccgacattttacaagagttaaagaaaaagtctcccgtaatagcataccctacctcgcttaagcatacaagaaacttaaccgaggccaccgcactgccggattaccgagaaccatctaaatggccctctgttgttccagcggtgtccaatatctcatccgcctccaaaagacctgcggttcaaagagctgcctcattgatggtgctaacagataacgctgctaccaacaagctgaatccagaaaagtcagaattggagaatttattgtttttgttgaatctagcactggaaaataactcgtttgaaagggcttccgatttacacatgttgtcgttattaaacatcaacaagctgagctttgattcggatattcaaaaatcagaaactctgaaaaaagctttactagatagtttagctgaaccgttttttgaaaactataagaaatttcctcataaagactctggtgtaagttcacaatctaaccaacatcgggaacaccaagacgatatagtttctttagcagatatcaagccacaacaagattatagccgcatacttcatcccttcacatctgcgaaaaattctggccctgaagccgttttcacctgttctcaacaatatccttggaacttcaaggctgccaacgatttggcatgtttaacattcggtatatcgaaaaacgtcatcaaggcactcacattacttgacctaattcatacggatagtaggaaatttgttctagagaaaattatgaatgcagaagaagaaaatcaagaaatcgtatttaccggtgaaaccatacctattgttcagccaaactcaacaagtgataacaaattaccaaacttgatttgggcatcgttgtgggccaagcggaaaaacggtttactggtctgtatattcgaaaagacaccttgtgactatattgatgttatgctaaacctcacggatttttcagtggatagtattgttgatataacggggtttttaaagaactttaatgaacagcaacagcaagaatcatcttccccaacgtccacaaaaaaaacagtgaaatttgcaaatgaaattcatgacatcagatcaataagtcattcattgggtaaactgatcgatgatgtacgtttcgggagagtattttccgcagatgatgacttattaccattacctatcagagtggcaaaccatatcaatgaagaaaggtatttcacattaaatcatttatcagaaaatataccgtgcgctgtaacaacttctgtattggaaatgaatcaagttaaagatcgacgccgattgcca

SEQ ID NO: 6157 - DNA, 552 bp, Saccharomyces pastorianus
atgtcatcctgctcaaaaatggcttcattgatatcaaattttggagcaatttctaattctcccgtgtggggtaaaggtggcaacaaagtcagttcttccttactattacctttgtcgccacggaagcccatttcttcatgtaaattaggagtggatagtgagaggttggtggctgatttatccatatcgtgtagcatatccaagttatcgtgcagatcgatattggacgaagacgaagatgaagacgagattcttcctaaaacacgaggcgaagaacgatctatttgggtgagttcgtcatcatttgcctcctcttctttgatattgtgcaaatgcgtggtaacagtcgtcgaactcgatgtgggtgtggcgcttttgggcatcgtaggcagggtagtactgttatatgcagtggccctgttagagccagagttcctgtatctgggtggcgagttgtcttggtggtccatactaaatatcgttaacttttttatttcttttttttatttcttttttttttttttttttttttttgatttcttctatcaataa

SEQ ID NO: 6158 - DNA, 510 bp, Saccharomyces pastorianus
atggctttcactaaaatcgctttactagcagctctcgcagcttttgcttctgcccaaactcaagcagaaatcgacgaattaaacgttgttttgaacgatgtcaaaagtaacattgctgactacatattgttatctcaagatccaacttctggtttctccttggccaatatgccagctggtgttttggacattggtttcgagttggcttctgctactgacgactcctacaccagtttatactcagaagttgacttcgctgccgtcgccactttcttgaccatgttgccatggtactcctccagattagaacctgagattgaagccttattagcaagtctttctacttctgctgtcacttcttccgttgctgccacctcatctgttgtggcctcttctgctgttgccagctcttccgctccaaccacttcatctgctgttgtctcttctgccgccagctcttctgctgctgcttctcatctgcatgctgccagctcctctgctgctgggatc

SEQ ID NO: 6159 - DNA, 330 bp, Saccharomyces pastorianus
atgagccgtggggtgggaggaccgagcagaacagaacagaacagaacagaacagtcgagtgtgttattatacaaagatcaagagacgagtctcggaaccaggaagaagcacatacgccaaccactgtttcttcttgttcttccttcacacgggtcttgtcttgcgcatattctcttcccgcttttttcgtccctgcgcttcccgcggctacgcgcagtggcgagccgggctacggccgtttctgtggcgggtacccctcgctcgcgggtaaccgtccgggctgagacatcgcgcgcgacggccgccgtgtgcgattaccgcaaagggtaa

SEQ ID NO: 6160 - DNA, 510 bp, Saccharomyces pastorianus
atgggtattcagggtcttcttccacaactaaagcccatccaaaacccggtgtcattacgtagatatgaaggtgaagcgttagccatcgatggctacgcatggttgcacagagctgcctgttcatgcgcttatgaacttgcaatgggaaagccgactgacaaatatcttcagtttttcataaaacggtttagtctgctgaaaactttcaaaactgaaccatatttggtgtttgatggggatgccatcccagttaaaaagtccactgaattcaaaagaagggataagaggcaagagagcaaagccatcgctgaaagactatgggcatccggggagaggagaaatgcgatggactattttcaaaagtgtgttgatataactcctgaaatggcaaaatgcatcatagactattgcaaacttaacggtatccgttacattgtggccccgtttgaggcagactcccaaatggtgtatctagagcaaaagaatattgtgccaggggataatttctga

SEQ ID NO: 6161 - DNA, 678 bp, Saccharomyces pastorianus
atggtttgtctatctggttgtgattataccaacgggatccccaaagtaggcttgattacggcaatgaaactggtcagaaggttcaatactattgaaaggattattctgagtatacagcgagacgggaaactgactattccagaagcatacatcagtgaatacgaagcggcagtcatggcgtttcagtttcaaagggtcttctgccctattcggaagaggatagtgagcctgaaggaaattccttcacacttaaaggataccgaaagtaagagacaaaagttatatgagtgtattggtcatgttatacacagagaaactcaaaaaaagcaaattgtgcattttgacaacgacatagaccatcatttgcatctgaaaatcgctcaaggagatttgagcccatatgacttccaccaacctttagcgaacagagaacgtaaactacaattagtatccaaatcgaatttagaattcgggaaaggcgataacaacggcacggaagttaaggtcaaaccaatagaatcgttttttcaaaaaatgcaaagagtggatcatgctcccaaaattgtagccaactttcataacataaggcaagtggaagataaactgactagaactatcaagcgtaggaagttaagtaatgttgctgtagttcaagaaactttaggggcgcacaagtaa

SEQ ID NO: 6162 - DNA, 2205 bp, Saccharomyces pastorianus
atgtcaggagttagtcgtgatgagagcatgagaagtacctctgatggggtgggtaatcaaacacaggttctggacagcgaattggatagtgagtttgtggttgaaactttcatcgaagctatcaaggacggcgatttgaaggtggtgaaggatgtggttgaaagcggggccattgatatcaacaatgactgcattaacgagcttccgggcctgcattgggcctgcatcaaaaataggttttctatagcaaaattcctcgtacgcagaggtgcgaatcttaaccaaacagcaggccccgagagggctactgctctgcactgggccgcgaggtatggtcacgtttatatcgttgatctacttctcaagcatggggctgatccgacgcttatagatgggcaaggcctaaacattctgcatttcagtgtctacagttccaatattatgcttgtagtttacgtcctctatttcgttgtgagcaacgataacaatgtcgatatagattcgaaagattacaacagtagaacccccctgctgtgggctgcttaccaaggcgattttctcactgtggaacttctactaaaatttggcgctactgtcgcattgacagataatagaggattcaatgcgcttcattgtgccttggttggaggagaccaaagggccatatgcgatttgatactaagtggcgcaaatttttacgaaagaaataaccagaagcaagactgtttcgatctagctaaagggataggaacaaaatcactcttcgaacaggcactgcaacaccatgggtatgacaaacttggaaatcaaaaagaaaaaatattcaagaaaaattcgcactcacagttgatgatatttttgtcgcctttcgcacttatgatttatacttattcgatttctttaattctttctcccccactagccatcgttctttctctcctggtgattgttgttaccgtgaattcactgaaaaaatttgtattaccgtcgcttacaagaaaaaacatttacaaagtttctctagcaagaacgccctttttcagtggcctctttgtttccactttctgcttcttgctattcatttgggtgaagaaactgtacccatatagcgtgtttgactatacagcaaaagacgcacaacttttggttacttcccttttcacatttgtactattcctgaaattggtgaggtcggacccaggttgtttgaaaatggacgatagtactataccggtacaagaaacgataaaacagttaattcagtcgagaaaatatgacagaaataacttttgcgtcgaaaccttagaaagaaagccattaagaggtaagtattcacttttcagtggagccctggtggccagatttaatcattattgtccatgggtatataacgacattggtttgaagaatcacaagctttttatgttttttgcttttgcggttcaatacgagatgtttttgttcatgtggttgtgcttagagtattttaaaaagaccaactatatttacgaacaagttgacgaatattcaagatgtactttcctgaaaaatgagaccttgtgtaaaggttccaattatgatccctctactttctttttattcatttggattagcgtgaacttcgtgtggttggggggtatgttggttgtccaatgttttcaaatattaaagggaattacaagtcccgagttgtacgctttaattaaggaggaacgcaaggcggaagctctaaatctgataccattcgaaaaccctatattttccatcccaaatggtaagaataccgatacggtgtctgatgacccaattgcgacgactgtcacacatacaatctccattgatagtttggaaccaagacacaggcgctatgccgttttcaatgcatgtttttcgatggttggcttaaatcagtgggttgttactttcaaggaaatgataggcatctccaaccttttacgcggcaacagtaaaccacgccataaccattcgctgcttcgaaacttcttagtgactaatcactggaagacaaacttggccgatttctggttaaacagtgatgtaacagcgcccttatggcagcggtttttttattcctcagatacctcgaaggccatgctaggtggcgttgaagttgactattaccggttatacgagcttcctgctcgagaaggagaaccaataagttcaaactcggagttcgtttaa

SEQ ID NO: 6163 - DNA, 1074 bp, Saccharomyces pastorianus
atgctgtgggtaaagtgtgcttcacctgggctccgaatagcacggaagcttcatacagtaaacaaaaagagtaatatctccaagatatttttggctacaggtggtttactagcgacaggagtgataggctgctatctaggttatagatgctttaaaggcaaggacaacaactctgagttatctccatctcatttcgttaaatatgaaatttcacacaagcaagacatcgattcatcgcattttttactggagttaactccactaattaggcagaatgtaaatatgtggtcactgatgactgcagaaaacctatggtctgttgaagtcaaacaaccggaagtcatggtggtccgtagttatacgcccctaccgcttcaatttaacccagtttcaaaagaattggaaatcttgaaagacggtgacaatgctgatgggaaattatgtttttatatcaagaagtatgaaaacggagaggttgcaagatggctgcaccaacttcctaaggaccatgtgattgaaataagaggcccatttattgattatgagtttccgcatttgccgaatgagtccaaaagatctcgtgagtgtttatatacgagcagaagcaataccgaaatccccaatgaagatgaggattcaaaattcacttatcagccctatgacataatgatgtttacagccggtactggaatagtgaccgccttacaattgctcttgacagaatcaccattcagaggcagtatcaaattattccacacaagtgaaaatattcagcaactggggcctttaaattctattcttttgaaactccaggcgtcaaacagggtccggttacaagtttttgaatcagataagcaaacaagaaataaaatattagaagatatcgggaaagctatacctagaccctcttcatataaaggtaagctgccattctctagtatcagtggtagaggctttgagcctatattggcgttggtgtgcggtccagaaggttatattagtagcatatctgggagaaaattggatcttgactctagaggatccccggtaccgagctcgattgtaatcatgtca

SEQ ID NO: 6164 - DNA, 507 bp, Saccharomyces pastorianus
atgtctattggagagccaaccatgaagggtgatcgtttgaggcaaaacatggcagtgacaaagaaggcaaagttgaaaaaaagtgacgagcctacaaagacgtcaaaggttaccgcatccgagaaaggtgaggaatctaagcgctattcgttatggaatttctggataagcacattatttttgaagttgttgttgattcctgattattttagcaccgactttgatgttcatagaaattggctggcaatcactaataaactccctatgagcgaatggtattacgagcatactagtcaatggacgttagattatccgccattttttgcctattttgaatggtttttatcccagtttgttcccaaggttgttcgcgatgatggctgtttggacatcgtaaaggtggggaaatttggtttaccaacaattgtctttcaaagacttactgtcataatcagtgaattcttctatttgctgtcctccaaatatacattaatacaacaaagctaa

SEQ ID NO: 6165 - DNA, 621 bp, Saccharomyces pastorianus
atggatgccatgttaacaaaaatctgtcaagactcgattttacaaaaagataaagattttcttctgttcttaaccagtgataattttagttctgactctaaaagtagggcgtacacaaccggatcaggcgctattaatgatagtaatgacttatcagaaattcgtataagtgaaataaagctgctaggcgcagaagacgcagccgatgtattgaaaaatggcggtattgatgctgagtcacacaaggggtttatgagtatatcgtttacgtcgctacctaagtataatgaaacagatgaattcttcattgaaaaaaaaagaaaattggatgaattggaagacagcttgaaaaaattgggcaaatcgttggagatggtcgacacttcaagaaatagtcttgctgcatccactgatgaattctctggcatgatagaaactttagcgtctttaagcgtaagtgaacctaattcagaactgttgaataattttgctaatgctcatagaagcataaagagctctcttgagagaagctctttgcaagaaacgttgactatgggtgtaatgctagatgatatattaggggatcctctagagtcacctgcagcatgcactgcactgccg

SEQ ID NO: 6166 - DNA, 1524 bp, Saccharomyces pastorianus
atgggagtcagatctaaatcaaaagaaatgcatgaacgagaccacacttcagatagctccagtctagtaacctcgctgatgaaatcctggagaatatcatcggtgtcttcgtctttttctaaaaagccatcattgtacaaaatgaacaccagcgaatctaccagcttgccatcaggttacacgtcgtctgctgatagagatagaagaactagcgacggtaatttcgaagccatggccaagcaaaaggcaagaactaggcgcacctcgaattcctactcgcctctaagatacgtgagccccactttgagcactgcaagtaacgatagtccccgacccgccctactcttacgccagcatcaccagcgtcatcatcaccatcagcaagcccaccataatagcagtagcggcagcgtaaacaacagcggcagtaatagcatagaaccgaacaggaagaatgatcgatattttaaagatttggatgaagattggagtgccgtcatcgatgactataacatgcctattcccatgctcactaatggtgggttcggtacccctgtggctccaccaaatactttgtccagaaggtccacatcctcttcaactaattcggtctccaatatgggaccctgcacgatgcgtaattcttcctcttctttcacataccctcaattaccacaactacaaaaagaccagtcgaatgattcgaaaaagacccagctggagattgaaaacgaacgggacgttcaggaattgaactccatcatccagcgtatttcaaaatttgatggaattttaaaggataaaacaatcataaatcaacaagacttgcgacagattagttggaacggtatcccgaaaatacatagacccgtagtttggaaacttttaataggttacttacctgtaaacaccaaaaggcaacaaaatttcctgcaaaggaaaagaaaagaatacaaagatggtttgaagcatacattttctgatcaacattcgagagatatcccgacttggcaccaaatagagatagatataccaagaacgaaccctcatatccccttgtatcagttcaaatccgtacaaactagcttgcaacggatattatatctttgggccattagacatcctgccagtgggtacgtgcaaggtattaatgacttagtcacaccgtttttcgaaactttccttacggaatatttaccgccttctcaaatagatgatgtggaaataaaggacccttctacatatatgacagatgaacaagtaacagatttggaagcggacacgttttggtgtctcaccaaactgctagaacagattactgataattatattcatggacaaccaggtatactgagacaagtaaagaacctgagtcaactagtgaaacgaattgatgccgatttatataatcatttccaaaacgagcatgtggaatttatacagtttgcgtttagatggatgaattgtctattgatgagggaatatcaaatgggcactgtaataagaatgtgggacacataccta

SEQ ID NO: 6167 - DNA, 321 bp, Saccharomyces pastorianus
  modified_base (272)..(317): a, c, g, t, unknown, or other
aatcggcgtcgatcagagggaggaagtagtgcacagaagttgtcttcaaagcatataaattttgataaattcgacgactctgatgaagaagaagaagaagaagtagccaaagccataaaggcacgaaagagaaagacgttgaagaatttgagaaaagactcagtgaaaagagggaagttcaaaattcagttactaccaacgacacaggattctaaagcattgccaccaaagaaagaatcatcaattataaattcaagagatcgttggttgannnnnnnnnnnnnnnnnnnnnnnnnnnnnnnnnnnnnnnnnnnnnnataa

SEQ ID NO: 6168 - DNA, 672 bp, Saccharomyces pastorianus
  modified_base (623)..(668): a, c, g, t, unknown, or other
atgggtaagggacacgttaagttcgatgaagatgaaagtgcggccaatgcggctgctatcactgataggaaggatgacatgcaggtaatatcaaagaacgatgagcaaatacgcatggatagtgacgaagaaagtgacgaggatgatgctccacaagaagaaggactgcactctgggaaaaatgaaatagaatcacgttttactgaaagggaagaggccataaggtcggaacaatcacagttgaagtctaaaagaaggaagcaaaatgaactttacgctaagcagaagaaggtgataaccgaggcagaggtggttgaagagacaattgctgaactccccgaagaactactagataatatagatcagagggaggaaagtagtgcacagaagttgtcttcaaagcatataaattttgataaattcgacgactctgatgaagaagaagaagaagaagtagccaaagccataaaggcacgaaagagaaagacgttgaagaatttgagaaaagactcagtgaaaagagggaagttcaaaattcagttactaccaacgacacaggattctaaagcattgccaccaaagaaagaatcatcaattataaattcaagagatcgttggttgannnnnnnnnnnnnnnnnnnnnnnnnnnnnnnnnnnnnnnnnnnnnnataa

SEQ ID NO: 6169 - DNA, 159 bp, Saccharomyces pastorianus
atgctgctgtcgtcgcccacgaagaagcagcagcaccggcccgtggcggcgatgggcgccgccacggaaacggaaacggaagccgaagccgagaccgggacccccgcggacgagacggagccggagtcggataccgaggtggaggtggagacggtgtag

SEQ ID NO: 6170 - DNA, 813 bp, Saccharomyces pastorianus
atgtctttttttgacatcgaagcacaaacctcaaagaacaagtctcaaccagaaccagaatcctcaacaaatcagaagaccagagaattaagcgatttgatagaaaggttcgccgaacaatcacgaatactggagaaggaatgcaccaaaataggctccaagagggactccaaggagttgaggtacatgatcgagacagaattaataccgaactgcactagcctcagggataagatcgaaggcaatatcgtaattcatccaaatggaaaactctcaggtgacttcaggaaccttaaggcaaaaaaccagtccttacagcaatcgtataatcaaagaaaaaatttgtactctttgaaacccgctgttcaaccggcaacctccaggggaaggaacgacgctcacccgcgaaccgaggccatacgacaagatcctgagtccagctatatctccatcaaagtgaacgaacagactccgttgctgcacgaagaagaacagcaccaactacagctgcaagaagaacaagaacaaacacaagagcaacaaaaggaacaacagggattgtcccaggaagaactggatttccaaaccatcatccaccaagaaagatcccagcaaatagggcgcatccacacggcagtgcaggaggtgaacgcgatttttcaccagctgggctcgctggtgaaagaacaaggcgaacaagtgaccgatatagacgaaaatatctcgcacttgcacgataacatgcaaaacgcaaacaagcaactgaccagagcggaccaacatcaaagccaacggaataagtgtggcaggtga

SEQ ID NO: 6171 - DNA, 324 bp, Saccharomyces pastorianus
  modified_base (246)..(246): a, c, g, t, unknown, or other
  modified_base (286)..(286): a, c, g, t, unknown, or other
atggttgctttcactgttgaccaaatgcgttctttaatggacaaagttaccaatgtgcgtaacatgtccgttattgctcacgtcgatcatggtaagtccactttgaccgattccttggtccaaagagccggtatcatttccgctgctaaggccggtgaagctcgtttcaccgataccagaaaggatgaacaagaaagaggtatcactatcaagtccactgccatctccttatactctgaaatgtcngacgaagatgtcaaggaaatcaagcaaaagaccgacggtnactccttcttgatcaacttgatcgatccccaggtcacg

SEQ ID NO: 6172 - DNA, 1095 bp, Saccharomyces pastorianus
atgtttaacataaatttgctttcaacgccttcttctagagaaccttctcctcaaggcgactcgtccccaacgtcttctgtaaaatgtaagagggatagagacactttttccagctcacagaacgaattcgacggcaaagtgtttggagtttctttggaagattccctgcgagtcgcccacgaagaggtggccatcgaacaaaacattcacgaatctgagttcattccgatattaatagcgaaaaacgggcaatatttgaaagaaaatgcattagacacaatcgggattttccgtatcgcaggtagcaataaacgtgttaaagaactgcaaagtatatattccaaaccatctgatttcggccgaaattttgaaggctggagtgatttcaatgtccacgatatcgcaactgtattaaaaagatacctgaacgcattaagtgaacctttagttccattagcattatacgatgtcttcagaaatccaattctgcaaaacccccaaatagacgaagggaagaaagaaatcatcgaggactacaaagacatctacatgctcttaccacaaccaaacagacacctaatactatatttagttgggttgctgagtttgtttgcgaaaaacgaaaagaaaaacttgatgcctgcaagcaatttagcggccattgttcagccatcaatactttctcatcccaaacacgaaatggacccaagggagtatgaagtctccagaacggtcatcgagttcctcatcacgcacgcttccgacataataccaaatgaagcaaagtcaaacaaaaacgccagccccaattcaggaatggtggcgaagtttagcaacgtagttgttcctgaaatggccattgactccgatgacgaagagcccccaatgccttcaatagataaccacatgctgccgaagtcacgtgcgcactccgactcgaacaatttcatcctgcagcctgccgtatcctgcagccccaccgacctcgacaagaacggcctctctgtaccaagaacatacaacgggaagaaccctgagtgcagaatccctttcgcccaaactcggcaaattgcttggcggccgcagcagcaataa

SEQ ID NO: 6173 - DNA, 348 bp, Saccharomyces pastorianus
atggtagttaacccgttcacgaagatggggcttacatcacaaaactcccaatttatgggaacgtctgctgcactaaagatttttttcactgatttagaaatttccggaccgataccatcaccttcgatgaatgagactgtgtatcttcccgtggaaggatctggcttaccagtgtatcttccgatggaaggttgcttgacggtagacaaaaaccttctcgaggtgtttcttagaaaagtgtttctcaacattattattatctgttatagtaatatgttattcgctcctgctaatgctgctgtgcgtattctcaccgagttagttctagtacgaataagggatttgtga

SEQ ID NO: 6174 - DNA, 183 bp, Saccharomyces pastorianus
atgttcaactgcctcacaaaactcgtgatattggtatgcttgaagtacgtggccagggctttactgaaccgctccacgggcttgatcatgaaggacagaccggatggagaccaccatatcaagtcgtgcaacgagtcgtcctccaggatctggtacaacttatggataaatatcgcattttga

SEQ ID NO: 6175 - DNA, 1059 bp, Saccharomyces pastorianus
atgaacgaagaggaaatggcatccgcttcttgtggtcttgctgctgcagaaacagcaactgcagcagccaatggcggcgccgaggggagcgacattcccgaggacgccaagaaacatggctcgaagacgctggtagggcctcgacctcctcaaaatgcgatatttatccataagttgtaccagatcctggaggacgactcgttgcacgacttgatatggtggtctccatccggtctgtccttcatgatcaagcccgtggagcggttcagtaaagccctggccacgtacttcaagcataccaatatcacgagttttgtgaggcagttgaacatttacggcttccacaaggtgtcgcacgaccatactagcaacgacaccaacagtggcgacgatggtaataccaacgatgatgtcaacgcaaacgacgataacggtggtaacaagaacagcagtggcgaagaaacgaccggcgccggctcgcaagagaaggaaaagagcaaccccaccaagatctgggaattcaagcatagctccggtattttcaagaagggcgatatcgagagcctcaagcacatcaagagaagggcttcctcgcgcatcaacagcaggaagaactcgagtaaccagaactacgatatggactctagtataagagcaagaccctcttctgcgcaagacccggcttcaacttccagcgccttcagtacctacatcccgcaaattccgggcgccagcagctctatccctgaatgtttctctcacgtgccttatgaaaacgcaaaccacggcccgttagaattcaataacccggatgcacaggaaacgagcagaccgcttagtttccaggacgaaactctcacccatttgaaggacatcaatttcgatatgatcaaaattatagagtctatgcagcacttcattccctgcagcacagtttctgttcgcaaagtttcaccttcaagaatgtcagcaaaaaaaaatccgaaaacatcattaaggaccaccaaaaccaactcaagatattcgaaaacgatatgctcactttcaagcagcacgtga

SEQ ID NO: 6176 - DNA, 1140 bp, Saccharomyces pastorianus
atgccggaagatccaaattatagcgactcctatggagaaagccataacagcaagccgaacatggtgtctccctataaagattctttctttaaagaagtgaccccttctaagccaaatgtgaggtttggtaacgatgatgttaatatttttgaccaaaggaaaaaggtgaatgaaatcaacaaaaatagttgtattaaaaagagtattccaccttcaacgaatacaaataacacaccaaacaagtctagcatgaagtctccaaaaggcaaaaatactccgaagtctgatttcgattataaaagtcaatttgaatcaaacgacgaaacttttaaagatgtgaatgatgcagtcaaccgttgctatgcactttgtaacattcccactaagcatgtatccataaacagtatctctgatctggcacagacttttgaaacacttgctgtaggaataactcatgaaacgaataggaaagctgaatgtgaacgaagcaaaaacgcaatagattcattgtactaccatgaacagctggaaaaaaaagaacttaatgaaaaaagcctccagatggcaattgatcatttgctgatagtaacaaaacaaaatttaagacaagctgatgatacaaacaaattgaaagaaacagaagtgcttaaaagtttttttgaggagattgaagaggttgatgataataaaatttcgattaacaatctagagcaacagttacttgaagaaaaaaaggcaaacaatattcttagaagggattactataaacttcaagaacgtggtagacgcttgtgtcacgaatttcaagatttacaaaacgattatgcacaacaagtcaaacaaaaggagtgtgagttgcagaaacttaaaaatgaaaataaaacgttactcaacatgaacaataatttgaaagcagagaaaacccaattttctcaaaaggagaaacaatattttcaaaaatatacatatatagagaaatacatgacccatgtcaaagaagaatatagtaagaaggaggacgaatgcgataaattgaaatttattattgataacaacgtgaaaaagatagaacgcctagaaagagcacttcagatgccaattattactccaaacagttttctaacggcaccatccaggaag

SEQ ID NO: 6177 - DNA, 1488 bp, Saccharomyces pastorianus
  modified_base (1055)..(1086): a, c, g, t, unknown, or other
  modified_base (1445)..(1445): a, c, g, t, unknown, or other
atggtaatagaatctgctactgctacactgtctccatcaaagacaataccgtcatttccccatggtaatctaaccaaaagcatgtcggacaaccgtatacgtcgtccgtccgctcctcccattagaaaactaaagtcttctttgaagatagcccatagcgatcttccttcaagatccaagtccgatttttttctaacttcacctgaaaagaacgttcgatttgctattgaactaacaaccgtcaaaagatttgataaaaacgcggagccaagttcaatctcgaatgagaactcgcccaccttatctcctgtcgacaactatacggccactgatgatattcaattattcagtagtgatgactgttggttcaacgactcttcattggtcactaacctgctgaaaaatgaaaagaagtttcgttacatgaattctttaaataacatgttcaagttagatctttatgattccgaggacgaagatgaggaggatggcggcatcgaagaacatagaaacgttcaagccggttatgactatacgtatgattcgataacgtccaagaaagttccctcctataataaaccagtgggttcatcagatgcttcctcccttgcttcgcaagcgactaatatctgtgattggaagcttcactgcacagacttggtttcctttacacaaacatctcccctattcactaaaacgctatctacctccgatctacacgaccagctatccaattatctaaatggccaaaatataaagctgcactcactcactcaattagatcatgactcaagtaaaattgtggggctgctatacgttaaaaatttgagttttgaaaaatatctggaaattaaatttactttcaactcgtggaaagatattcattatgttacggccaactacaacaaaacggttaatgctgatatcgatgaattcaaatttattattgatttaaatagtttgaagtatattttactcatcaaaaaaattatcaccatggaaaagaatacaagcagctgtccactcaacattgaattatgctgcaggtatgacgnnnnnnnnnnnnnnnnnnnnnnnnnnnnnnnnggtaaaaattatcaccttttcatgactaccttcaagaagggcggtgaaacgaaggaaaagattccagttgtcgtcgagcctgcttctcaaacagatgcagccatgtcgccgaaggaaatgaaagcaaggttcgtctcctcgaatcccactctttcaaggtttttacctcaatcaagaaagttcagcgaggatacagattactataatacatctccattgaaacatctttatcataatgatacgacaagctgggttaagcccaagagattgaacgttgttttagataaacttgaaaatgctacccctcctcctccttcttctgctttggctaacgacaccgccagaactggtaaaataantaaagataagaacaatgtgctcgccccaccaaccggccagtaa

SEQ ID NO: 6178 - DNA, 2268 bp, Saccharomyces pastorianus
atggacgaattgcccaccacaccggtcaggcttataataggagagcctcagcaacgcgaacaggaatcaggtaacagtttgcaacagcataagcaaccagtgtctcactcggattcacatgccgtatcagattcgaattatgaatttagctcccccggctcttcccaatttattatacatccccacgaaccattgagtaagaagagagaatttccagaagatttagaccggtcgattgattatggtagaacaccaccccgtaacagcaatactaataataatccgttggaaaatattgatataaacaaaatgtttgacgatactaagcccgctgcgggtgctacccgtgtcgatgaaactgaagattcgaatggcaagcacgtctttgctttgaatgattcgcctatcagaattgaaatgtcctctccagaaaagcaaagtgataaaagttctaatgaaggtgaggaaaataaacacaacggccatgtcaataaaaagctaaaattacaattggaatcggtacctgacctaaaacgaagctcgaccgaaaatggtactaataataaggaagagattatgtcatctccaatggcaattgatatgattgacaccaacgtaagtccaaataagttcattttaaatgatgggattgcacgaaatgagagcttcagcatcaacgctgacaaactcaatttagaaaacgatattaatgacaaacaagaagaagaagactttataaaatcaaacactaacaatgtcggtgataacgatgttgattgcgacaaagaacatgaagagggaagtgacataacaaattcgcatataaacaggctcaccccgctatatgaaacttctgcaaggaacttgaataacgacggagaggacagaaaccactacgataatgacagtcaatttgatattagacatgacaactttcagattgttgcaaagagaaacgaggaactaacagatcaaatttatcagttgaatcaaaacttgaattctttgatttccaaaaacgagtccgtatcttttcagtatgagaaattaagtaaaaatcatcaacatctaatagattcatcaaacgaaaaaattgaaaggttaaatacagaaagagaaaatggcattatcaaagtggagaagttcaaaaaaaggatcaaagaactgaatactgaaattaaagtattgaactccaatcaaaaaatactacaagaaaaatttgatgactcaataactgatttagatcaattaaagaatgaacatgaaaagactgttaataattttcaacgaaatgaaaagcttttgaatgacaagaacgtagaactggaaaacatgaaagaggaattaagtatcaacctcgacaaactatccgaatcacaagtaaatataaatgatttgagttctcgtgtagcacaattgaatgataagatcggagatattcataacactttagactccaaggaagacgaattgaacaatttgaaattgagtctaaaagaaactttatcaatgtctaaagattttgacgatgcagaccttataacacaacttaatgaactaatatctacaaagaataccttacaacaaaaactaagtgatttaggtagcctgaatgatgataatttaaaaaacttaaatgacaaattaacggaaaataaaaacacactaagtctaaaagatgcagagataaattctttgaatagtgaaataaatgaactaaagaaacaaatcgatttgaaagatgaagaattcaagacatggcataacaactatgagaatgtagaagatgaagccaagatacgcagtgctgaagttacggaattgaataaagacatcgaagatttgaaagaatccaagttacagttacttgaaacaatttcagaattagagaataaagtccttaaagttgaaaatggatataatttggagaaggagaaatttgagaaaacttcattagagttagaaagtttacaactgaaaaatagtaacatccaagcagaacacattaaggagttagagaatcttcatgagaatcttgtctctctacaaaatgaactgggcatatcgtcggacagaataacaatactaacaaaagagaatgagacactcaaagagcaaaatagcagtactagtagcagtgtcgctgtaagcaacaatcaaaagaataaagatgatgagcatattaagtcgttagagagacaaatccaagattggaaggaaaagtacgatatgaaagaaaaggatacaaatcaaaggttaaactattag

SEQ ID NO: 6179 - DNA, 783 bp, Saccharomyces pastorianus
atggatcatttaatagaaaccactttcagagtaaaaacccagcaggtaatcataccggatcagaaaatagaagaggatgaggttccgttgcgtcggtggcagatggagctcatcatgctagacgcaaaaggtaacgaagtagaggctactataatatctaaatgcatataccatttgcatcctagttttaaaaagcccagaagaaaactgaattcatcaccctttcttataaaggaaactggctggggagaatttaacctgcagattgaatgcttctttgtagacgatgccggaaaatttaccattgaacatgacttaacgtttgaggataatgcgtatgcaattgattatgctgttaatattccatgtggatctcaaattcttagaaatgagctatccaaatattttcatctaccgcaagaaattgtgagccagcaagaagaggaatcgctccgtatggctgatttatcctggattaaaaccctaactttcattgacgaggatgtgatgacggacgttgttcaaatggtattgagcgaccctgcagtacaaaacgcagtcgaaaaccatcctagaagagaacagttctttatgttcataactcaactacccgatgaactgctaatgaaggtccagaagtttttaaagaagttaccaaatgatggagctgctgaactagacactacagtttccgatttggatgcgactagttttccagaacttaaaaacggatttgttaatcgtaagatccgtggtggaccaaataccttgaagccatcgtga

SEQ ID NO: 6180 - DNA, 2490 bp, Saccharomyces pastorianus
atggtcaatatttccgatttttttggtaaaaataagaagcctgcaaggtcctctagacctatagggaaagcaagagcatccaaaccagaggttattgacctagatgaagagtctgataaagaaccgagccacgaaacacctaaaaaagcccttgcaaataagataattgatatatcagagactcctgaatcagataaaaaactacctattccctcaataaaaaaggcaccttcgctagttacaaagccacccagtgtaaaaaagaatcaggcttttgctaaaacttcagatagcaatacagacgttacggctcaagacgtactggacaagatcccttcactggatttatcaagtgttcatgttaaagagaatgtcaagtttgatttcaaaaatgcaggaacaaatgtggactcagatgctattgcttctgaggtaagcgattttcctgaaggacagccaaattgtttattaggcctcaccattgtttttacaggtgtattacccactttagaacgtggtgcgtctgaagcgctagcgaaaagatatggtgcaagagttactaaatcaatttcaagtaaaacatcagtagtagtgttaggtgatgaagcaggacccaaaaaattagaaaaaatcaagcagctgaaagtcaaagccatagacgaggaaggcttcaaacagttaattgcaggaatgcccgctgatggtggtgacggcgaagctgctgaaaaggctcgtcaaaaattagaagaacaacatcatgctgcagccaaagaagcgcagttactggtcaaaaaggaagaagaaagagctaaaaaactggccgcttctagagtaactggtggccacgttaagaaagatgatatgattagggaagaggataagttgtggaccgtgaagtatgctccaacaaatttgcagcaggtttgtggtaacagaggaagtgtgaccaaattgacaaactggttggccaattgggaaaattcaaagaagggtggatttaaaaacgctggtagggacggttctggcgtttttagggcagcgatgatctacggtccgcctggtatcgggaagaccactgctgctcatttgattgcaaaagaactcggatatgatatcctcgagcagaacgcgtctgatgttcgttctaagactttgcttaacgccggtgttaggaacgcactcgacaatatgtccgtcataggttatttcaaacacaacgcagaacctcagaatttgaacgggaagcatttcgtaataattatggatgaagttgacggtatgagtggcggtgatagaggtggggttggtcaactggcgcagttttgtcgtaagacgtcaacgccgttgattctcatttgcaatgaacgtaatctaccaaaaatgagaccttttgatagagtctgtctggatattcaattcagaagacctgatgccaacagtatcaaatcaagattaatgacaattgccatcagagagaagtttaaattggagccaaatgtcattgatagacttatacaaactacgagaggtgatattcgtcaagttatcaatctcctttcaacgatatcaacgactactaaatgtatcgaccatgaaaatattaacgagatctcaaaggcatgggaaaaaaatattgctctaaagccttttgatatcgcgcataaaatgttggatgggcagatatattcagaagtaggttccagaaacttcactttgaatgataaaattgcgctgtattttgatgactttgattttacgcccttgatgattcaagaaaattatttatctacaagaccgagcgttttgaaacctggccagacacacttacaagctgttgctgaagcggctgattgcatttcattaggtgatatggtggaaaggaaaatccgtagtagcgagcaattatggagtctattgccattgcatgctgtcctttcatctgtctatcctgcatcaaaggttgctggccatatggcaggaaggattaattttacttcttggttgggccaaaattctaaatctagtaaatattatagattgctgcaagaaatacactatcacacaagactaagcacatctactgataaaattgggttaaggctggattatttaccaactttcagaaagaggctactggacccatttttaaagcaaggcccggatgcaatttcatccatcattgaagtgatggatgattattacttaactaaggaagattgggattctattatggaattttttgtcggacctgacgtgaccgctgcagtcattaaaaagataccagcggcagttaaaagtggatttacacgaaaatacaatagcatgacacatccagttgcaatttataggacaggtgcaacaatcggtagtggcggtgctactgccagcaatagtacccctgattttgaagatgtggttgatgcagatgacaaccagttcccgcagacgatgaagaggctcaggatagtggtacggactgaagaaggataa

SEQ ID NO: 6181 - DNA, 129 bp, Saccharomyces pastorianus
atgtgtcatgctattgtattttcgtgtaaatccacttttaactgccgctggtatctttttaatgactgcagcggtcacgtcaggtccgacaaaaaattccataatagaatcccaatcttccttagttaa

SEQ ID NO: 6182 - DNA, 753 bp, Saccharomyces pastorianus
atgacccattggcagcagcagctacccttgacagatacacaaaagaatgagctcgataaaagcgtattgcgatacttgaattggaactataagcaaacagtacagcgtgaccgtggtcaggattacgagagtattcggaacaccatcgtaactctgtctaagtttctgttagaacccgtggaccagcaagaattttcaaacgacaacgacgacaacaacaacaacgaaggtatagcggatgttgatgaactactactgccaagaaaatggaactccatcgtcagactgcagcggaaaattattgacttggaacaaaacacagaggctcttgtatcccagattaacgatttaagctcccaagtagcagaactatcacaatcaatgcctctcgctagtagcggtgccagcgctccaaacgttttgaaatgggtaccaagaagctcaccaaactattcggtcaacgtagaatcgtccattacgtccataaagttacatcccaatctaccgatagtgttcgtagccacggaccatggcaaactatatgcattcgatctactgaactactccatccctttggcgtctttacaaactcacacaaaggcaataacttccatcgacgtgttgtttactaactttacgaatgcgaacactaaaaaccacttactggtggctactgcatccaaagacctgcaaatccatgttttcaaatggatctccaacgaatacaaatttcaacaaatcagatccctatag

SEQ ID NO: 6183 - DNA, 159 bp, Saccharomyces pastorianus
atgcttcttcgagttctgctgtgggtgagggtgcacgctcaggtatcacacctttggctcttaagatatcattccattcgctatcttcagattcgtccacctggacctgaaacattggctcgttttgcattgcggcgcctgggtttggtgctttgttaa

SEQ ID NO: 6184 - DNA, 471 bp, Saccharomyces pastorianus
atgaataaggaaataagcctttctattgaggagacaaatgccatacgggcaaaattaggtctaaggcctatcccggtcggggaagagaacgacgtgggcaatgaatcattgtcagtggaagaaacaaacaggcgaagaatttctcttgggttgaaacctatggtctctcaagcaagtacacacagctcccccactactgttcatattgccactaaggcagatgcacttcgagagaaaataacgaagtttcaaaagactaacatacctttaagagaggcacagatttttgaagagcctggagccaatcacgactgctcgtggctgaataatgtgaatgccactgcgacctcaatattaaaggaacccaaaactcacaaaggattttcccaaggtgaaggtaagcgaaagagggtgaagatgccgatctgcataatgttcgagtatcgtataatattaaggaacttggtttaa

SEQ ID NO: 6185 - DNA, 378 bp, Saccharomyces pastorianus
atgaatagagatagaaaacaaaagaggatgaatttaaacgtttccagtttagatattgaagaagaggagaaagactcgctcacagacattcctctaacgattggagcagaacagggaatcatgaacatgccaacaactaaatctccaaaactgctaacaggaaaaataaaagtaaattttgatgaaatgaataatatttcagacgaagatggtggagactttaagccggtaaagataagaaaacgcaaaatcaaggactcaaaatcaagtaaagtgaagaagataaatatcgctcctaaaatggaagctgttaaactaatagacgaagatgagagtttgtcttggatgggcgaggaacaaccagtgaccataataaac

SEQ ID NO: 6186 - DNA, 462 bp, Saccharomyces pastorianus
atggaaaataacgatggcactgccattttaaacactgggttagaaccacgtgctgaagttacccagcgattgcctttcaaaactaatcaagatgcagtaaaggaagctagtcctgcaaacggcgtaactagtagcagcgatgaagacgcacatgtacctgttacggaattacacttgaaatcacacgaatggtttggcgattttataacgaaacacgaagttccacgcaaagttttccattcgtccattggttttatcacattgtatctatacactcaaggtattgattataaaaaggttctatggcctttaatatacgcattcgtcacattgtttatttttggatttgacaagataaactggccctttttcaatatgctttattgtaagacggtggtgcttatgaggacaacgagattcccgtacacggggtatgtgctactcctgggtggtgttccttaa

SEQ ID NO: 6187 - DNA, 303 bp, Saccharomyces pastorianus
atgacgggcagccttggagacgatgacgaaaagtgtgccatacttgtgctggactgctccggctgcggctgtgcctgtggcgtagactccttaatcatcaccttgtcaccaccggaatttctccttcgcccacaaaggctcctcgagaacgatggaggcaaaagggtacagtttcttgacccaggattctccatcctattgatgagcaaatccattttccctctaacgaataaacctaaaaaaacagcaaatgcaaaaatgaaagtgatagagagctgcttttcttcgaaaagtagagtttga

SEQ ID NO: 6188 - DNA, 525 bp, Saccharomyces pastorianus
atgatgtcgtccttcatagactcaatcaaatcagcgtctctctcaagagacctgacaatggccttgggctccaacaacttcaagagcgcctccacgatcaatgactgcaagatgggcttgtacttgtccctgttgccggcaagacccgccaactccttcttggtctcttcgaatatcccgtccagtgattgttcacgggcggaaaggaccttcaaacgcatcttgttggctatcgtagacttagtgatttgctgcgatagcgtggccttcttcatcttgctcttgaagttaccatcgatgttgttggtctcgtttctcacgatgttagtcttctcaatttcgtactcttggtcggccttcaactggatttccttagccttctcttcggcctcctttctgatgaaagcctgcatcttgttcaattcatcgtttacttggttgggtgtcaaagcagtgatagcggaggacatgctgtatcgttgggtgcgtggcctgtgtgtgttctgtgtcttctttgcgagttag

SEQ ID NO: 6189 - DNA, 393 bp, Saccharomyces pastorianus
atgctgctcgtgatgattgctttcaatgtagcaataatattgtttgctaccgctctggcgaaccaaagatattgggctcaaacgcttgtgttaatcactataatgccttgggcactagagttgtcctctacagcggctacagtggtcctgagcaactcaatgcctgataaggatcaggatttagcagcttcttcaataaacactgtagtaaattattctatatcgattagtttaggaatctcaggtaccgttgtttcccaagtgactgagaaatcgaagagtgttcttacggagtattgtagctgtttttattatcaaaataaaagaaaaaaaatggttaatgctttgaaacgctatttgaaatttgtaatctctagaaacattcaaagttga

SEQ ID NO: 6190 - DNA, 270 bp, Saccharomyces pastorianus
atgtgtttattctataaattgcttttcggtagcctttttcttagacttcacaaatgtgctcgatgcatacactgcagcgacataaatcccaagcccgctcaacccgatacccaagtaccaagaacaacggtatcctttcagagcattggatcctccgtcattaacttgagactcaattgtacctgcaacacccagtccaatggatatcgaatagttcactaccgtattgaccaaagatgctgcaaggccttgatgctcgtgtggcattga

SEQ ID NO: 6191 - DNA, 1452 bp, Saccharomyces pastorianus
atgctacgagtaagttttaccccgattaaaacgatcggctccttcgtgccaggctacaataccaccggctaccatgcggccaagaaaactttaggacttaacccttacagcaccggcgcctccatcaactcttgtaggctcctgcattcttcaaaactgtcaaataagaggctggcggaggataaatataacgaagaacttctttcaaaaataaatgcacagaatgaaccggattctaagcaagatcacgacgggccaataccaaaggaaagtacttcttcctctgacgagtcgttactacaacatgcacatggtcatagccatacgcatttgcatgctaatccgctgctgtcgctcaacatacagcaaattaaaaagaatcctggggtgaggataacatggataggactagcatcaaacgtgggcatggctgtagggaaatttattggagggatcacgttccattcccaggcgttgctggctgattccgtgcacgctctcagcgatttagtttcagatgtcttgaccctgttttccgtccactatgcgtctcgtaaaccaacttcagactacccttatggctatggaaaagttgagactgttgggtctcttgcggtatctacaatattgactatggctggtatatctattggttggtcctcgttatgtgccatcgtggggcccattattccgcatacaatcttggagtcctgggctggtttgatgggggagtcgcattcccaccctcaattagtcacacagcaggctactaatgtgaacgctgtatggattgccgcaggttctattttgatcaaagagtgggtatttcaggcaacaaaaaaagttgccatccaaacacactctaacgtactaatggcaaacgcttggcatcaccgcgtcgattctttaacttctttggtggcattagtggccattacatctagttatttttttaatattcaatcactggataatctaggtggactcgtggtatctggtctgattataaagaccggtgggcaaggcatattatcttcgttgaaagagttggttgatcaatccataccatcaactgattctcgttatctggacattgaaactgtaatcaaagacagcatcagcggtttgaaaactaatttggattttgaggggccactaagcgtcaaagacctcaccatattagcttcaggccctaatcttcgtgctaccgcaacgctggaagtgccaactctacattcggggcaagaagttgggattaaatttttagagaacatcattgcaaccataagagaagatctacgttcaaaagtgccaaatgtggggaagattgacatcgagtttgttgatgcgaagtccgcctctaataaggatctagaacaacgccatagtaataattcaagccacactcacactcattccaaccgggctgatgatcatagtaagggacattag

SEQ ID NO: 6192 - DNA, 210 bp, Saccharomyces pastorianus
atgtccaatctattaaacaaatttgctgacaaactgcacggtaacgaccatgacgaacgttatgaaggcgacaacgacgatgagacccgggatcaacgccaccaagtgcatcaacagagagagttcagaaaccagggttccaaggcggatccctacagcgatcaaaaccagggaactttcctcaacaacagcaagcacaatccggtctag

SEQ ID NO: 6193 - DNA, 726 bp, Saccharomyces pastorianus
  modified_base (652)..(707): a, c, g, t, unknown, or other
atgtctaagattacttcttctcaagtcagagaacacgtcaaggaattgttgaagtactccaacgaaaccaagaagagaaacttcttggaaaccgtcgaattgcaagtcggtttgaagaactatgaccctcaaagagataagcgtttctctggttctttgaaattgccaatctgtccaagaccaaacatgtctctttgtatcttcggtgatgctttcgatgttgacagagctaagtcctgtggtgtcgacgccatgtccgttgatgacttgaagaagttgaacaagaacaagaagttgatcaagaagttgtccaagaagtacaacgctttcatcgcttccgaagtcttgatcaagcaagttccaagactattgggtcctcaattgtctaaggctggtaagttcccaaccccagtttctcacaacgatgacttgtacagtaaggtcaccgatgtcagatctaccatcaagttccaattgaagaaggttttgtgtttggctgttgccgtcggtaacgtcgaaatggaagaagatgttttggctaaccaaattttgatgtccgttaacttcttggtctctttgttgaagaagaactggcaaaatgttggctccttggtcgttaagtcctccatgggtccagctttcagattgtacnnnnnnnnnnnnnnnnnnnnnnnnnnnnnnnnnnnnnnnnnnnnnnnnnnnnnnnntaagaagatcgcaatttag

SEQ ID NO: 6194 - DNA, 798 bp, Saccharomyces pastorianus
  modified_base (440)..(498): a, c, g, t, unknown, or other
atgctaaagaacgatagattagccactttacaaccaacatggcatccaacttctgaagaattggcaatcggtaatatcaagttcacaactttcgacttgggcggtcacattcaagctcgtcgtttgtggaaggactatttcccagaagtgaatggtattgtcttcttagtcgatgctgctgatcctgaaagatttgatgaagcccgtgttgagttagatgccctgttcaacattgctgaattgaaagatgttccatttgtcatccttggtaacaagatcgatgctccaaatgctgtttctgaagctgaattacgttctgctttaggcttattgaacaccactggttcccaaagaattgagggtcaaagaccagtcgaagttttcatgtgttccgttgtcatgagaaatggttacttagaggccttccaatggttatctcnnnnnnnnnnnnnnnnnnnnnnnnnnnnnnnnnnnnnnnnnnnnnnnnnnnnnnnnnnnttcaacagctttgtaataatcaagaaattacatagagggtgcactacctacctttctacgtacatcatttgtatccagaccattcaatataatgggttgaagtacaaatatgttacatgtaaaatatacatacatatatatatatatatatatattaagaatttatcttctcatcttgcgtggacgagactcgtcgtcaccatccatggttgttcttttaccattcttggcaaaatattctttcttcttttctttgtccttttgtgcctttttttcttccatcttggccaatttttttag

SEQ ID NO: 6195 - DNA, 2655 bp, Saccharomyces pastorianus
atggttttactcaatagaaaagaagttcaacttgatggaagagagctggccacagataccactgatagaaacacatgggaaataaaagaaaccggtgaacgtataagtggttatgacaattatttgaaaagattggagttttatggaaaagaaatatttacttgtgaagttactggtagaaactttatttcgtattttagggcattaataagcgagaaagagcaccgaaaaaatatcgaatcccttttaccaaaagagttaagagaggccatagcaaattttgccaattttaactcaacaaggaaggtttcagctcttgtagataaaacatatcggcgattcagcaaccggttcttcaatggtgaaatagtatgcttgaaaaattcccaagaaaaaaatttgcttctgcctaatccagaagaagaagtccaatcaggattccagggtacccacattgacaacactttgtttgttatcagagatgtgtttccatcaaaagagatcatagatagtgaaactggggaaaatttagctccaatctcgtcattacatattatcacggaatacccaaatcagcaacctaaggggagggctttcattgcaggccacgatcagattaaaagaccaatctcgcgcttttcaaagtttttggtggcctgttttctcaatgaaatactggtaaaagtatccaataaaaaatacgctccatggagggtgaggcagaagtatgtaaaaacatataatgtgaacccggcatgccctccagaaatggtgaattatttaccagacgaggtggaaacagctacctgcaaagtatatacaccgttaaccataccgctagaggaagatgttgatccagaaaggtcaccatctaaaatgcgaaaaattagttgcgagatttcaaccaaatttcatgatatatatggcactgcgacctccactgatcacaattctttgcagtcgattttcgatgacagacatttgccgtttacaggaccaccgaccccattcaagagtattcgctatttagatagttcgctagaatacaaaactgccgacacgcaatggtatagagagtgtgctcaattttcaatagaaagattactcattgtataccgttttttaaattctttcgggccctttattggtattacacattttaactttgatgaacttctaacaagcatcaaatgcaataatccggaaattcttgtagatgaatttgtgaaaatttcctttgctgatgttgacagcgaaggaaattctagaaggggtaagaaaccgcgaagagacaagtatggtcgagacactaaaggcaatatatgtcaacgggaaacggctaacattcgtaatccaaatgggagttacatcctacttagcaactttacaagaaaccaagaggtgagaaaatttatcacagataaaaacaccaacttttttaagtgctcgatatttaaaggtgagcctgttaaaaatgacgttattgatgtatccccttataataaagcagctaatctctatattgaaatagtctgttctttactatgcctgataatggataaaagaggtgattggacttgcaatgttatggaggaatggattgaagaaaaggagggaagggaagaaaaggacgaaacgattgttgaccaaattgtagaaaaatgtcttaatcatgaaaaaactaactgggctgaacttctatctgataggaaatttgaaggcggtaattggttaatctgtttgctgggggtacttcaagacacaatgcatgttgcaatctatactgatatcaccaaacgttttacagaaaaggtggtaccgtcagccattaatttcgacaatttggggagggaattatggcaaaacttttgcaagaatttatctacaagagacaaaattgatatattatgggttcttgtggatctagtttctaatttttcgagctgtgttaagcagttggtagatgagatcccttttctacaccatgggatccgatcagaattagatagtgttaaaaatgaatatcatatatcgaaagaacagctgaaaagtgtaactgaggagctcaatcagcttcatagtaatccattgagggagaaatatgcattaaacgagtgtgaaagtaaagcaaatgaacatggggaaaaaatgtcacgcttatcaaaagatatttcatatctagaggcaaaactaattgaaagcaatttcgaaagattagagatgttaggcaaagatagatatggaaatcggtattattggatggattcgaatggttcacctttatttactggttggtcgggtcattgtcattataactgctgtttcttgtgggttcaagggccctctgaagacgatgcgattttttacttggatatcgacagagcctctttgaggaaatggaaatcattagcaaaaacaagtgactgcgcccatgcgacaaaggaggttttttcaatgaccagatcgtcaaacgggtcttattttcacacaggtgatggtgaggatgtaatgatgattgattcgaatggaacattgctcctatctaccgctccatcccatatacacaggaaaataatagcagaaactcctgaaggactgttactctctccccaacagtggataattcttaaaccgaagtggaagatatacgcttgt

SEQ ID NO: 6196 - DNA, 450 bp, Saccharomyces pastorianus
atgagtatattaaaagataaacatcctttgagtattgagaagcttgctaaaaacctattcagagtacacaaggatgaaatcactgaagcactcatgaaagacgcattttctcttggagaatatgaaagagcattttttgagaagcggcatgaattactttatcctttagattttcatttggaagagttaagtacatttgatgatgaatttgttttcgaaaagaaaatagaaaaacaagaggatatccttacgaagctcttgaactaccgaaggcataggcatattgattacacggcacactgcaggacaaaacttcaaaggtcgaaagaggctgcatatcttaatgctcaggatatattaaaagatataaaccgtcatcttttctcaaggcatgacagtatcgctgtagatgactcggaagatggtcataggaaagaatcttttatttga

SEQ ID NO: 6197 - DNA, 1770 bp, Saccharomyces pastorianus
atggatggttttagtttagctggagcagtaagtgttggtactttaatcgctgcatatttatattttggcgggaggttttctatagcgctggtgatcttagtgggctatggtatttattgtaatgaggctggtggtcaggtggaggagaaagtgatttctagcccagaaaagaagaaatcatgctgtagcgataagaaaaatgcagatggtgaaaagactggtggatgctgctctgaaaagaagaaaaatggcgccggtggtggtggatgttgttcttcgaaagacggtaagaagaaaagcggaggtgggtgttgttcttctaaggatgggaagaagggaaaaggaggagggtgttgttcctcgaagaaaaaaactagtaacgacgaaaacgaaaacgttgacgttgttcctcaagttcaagaatccaaaaacttccctgtgacagtagattttacggatgtattcaagaaacccgctaagaagagatctggaactcccaaggtgttttccaagaataactcatcaaaatccaaaataggtaaaaaattaagtgtttcaaagaaaattggtcaggatggattgattaagactgctcttactatctcaaacgaaacgcttttgagttcccagatatatgtgctgtatagttccttgcaaggtgcagcttccaaagctgcgacgaccgttttcgataaactaacaggactatatgaattagttaacaaaccaaaacttttgaaccttgatgacctatccgactttgatgactattttgtggacgttcccgctgaaaatgccctatatgttcttgttttaccctcttatgatatcgattgtcccttggactatttcctacaaactttggaagagaatgctaacgatttcagagtagatagttttccactgcgcaagttggttggttatacagttcttggacttggtgattctgaatcatggcctgaaaaattttgttaccaagctaagagggctgattattggatttctcgtttaggtggcagaaggattttccctcttggtgaaatctgtatgaaaacgagcggaaatacaaaaattgaggaatggacttcattgttagcggagacgttgaaggatgatgaaccgatcatttatgaatacgacgaaaacgcagattccgaagaagatgaaggagaagaagataacggtagtgatgaattgggcgatgtggaagatattggcggtaaagataacaacggaaaattttcgagtgccgatgaaatcaagcaaatggtagcgaaagatagtccaacatataaaaatttgacaaagcaaggctataaagtcatcggttctcattcaggtgtcaagatctgcagatggaccaagaacgaactacgtggtaaaggatcgtgttataagaagtcgcttttcaatattgcgtctagtagatgtatggaattaacgccttctttggcatgctcttctaagtgtgttttttgttggagacatggtacgaatcctgtgtccaaaaactggagatgggaagtagatgaaccagaatatattttggaaaatgcccttaagggacattattccatgattaaacagatgcgaggtgtgcctggtgtcattgcggaaagattcgccaaggcgtttgaagttcgtcactgtgccttgtctcttgttggtgaacctatactttatcctcatatcaacaaatttgttcaattactacatcaaaaggggataaccagttttcttgtgtgtaatgctcaacatccagaagcctga

SEQ ID NO: 6198 - DNA, 585 bp, Saccharomyces pastorianus
atggtggaatgtttagaaattttgaaaactgtgcaaaatcatcaaaggacggttttcagattaactttggtgaaaggttttaatatgggtgacgtcagtgcatatgctgacttggttcaacgcggatccccatgttttattgaagttaaaggagctacgttcagtggttcatccgatgggaatggtaatcctttaactatgcaaaatattccgttctatgaagaatgtataaagtttgtgaaggcatttacagcggagttacagaggcgtggattatattacgacattgctgccgagcatgcacactccaactgtttactgattgctgatactaaattcaagataaacggggaatggcacactcatatcgattttgacaagtttttcgtactattaaactcagggaaagatttcacgtatatggattatttggaaaagacacctgaatgggctttatttgggaacggtgggtttgcaccaggcaacgtaagagtgtacagaaaggataagaagaaccaaaataaggagaaccaagataaaagctcctcttcttcctattccagttcaaacaacaatatttattaa

SEQ ID NO: 6199 - DNA, 375 bp, Saccharomyces pastorianus
atgtggtatgattggttatatatgaatgatttattttatattatacatcgagagatatcgccttccggcgtcagctacttagttcatggacttgatcaacttgttgatgaattcttcacggttaccgaaagaaccaccttggacaaagtgcttgaactttcttgggacaccccaaccaccagatgggttggacaacttgaatggccacaaaaagttgttggcttgcttgaagtgtgggccaacggtgatgatttcgtgaatcaaatcgtcaatagacaagattccgtacttacccaagttagcttcaatgatagcgttgtcggacaatgggactctttgcttgttgatcttaccgaaacctctcttgtagactaa

SEQ ID NO: 6200 - DNA, 2784 bp, Saccharomyces pastorianus
atgacttctttatatgctccagggacagaggatattaggcaaaggctacgtccctttgggtttttctttgaaaaatcattgaaagatctgatcaagggtattaggtctcataacgaaacaccagaaaagctggaccaattctttaaacaagtattaagtgaatgccgggaagaagtgaactctccagatctaaattctaaaacaaatgcggttcttaaattgacctatttggagatgtatggctttgatatggcatggtgcaactttcatattttagaagtcatgagcagtaataaacttcagcaaaaacgtgttggttatctaggtgcctcacaatcattttacaaagattctgatattttaatgcttgccaccaatctactgaaaaaagacctgaaatatgatggaaacaatgatgtcgtgaaggttggaattgcattaagtggcctttctacaataatcaccccctcattagcaagagatatagctgatgaccttttcactatgctgaacagcactaggccatacataagaaagaaggcaataactgccttatttaaagttttcttgcaatacccagaggctttaagagacaatttcgataaatttgtttctaagctggacgatgatgatatctctgtggtctctgccgctgtgagtgtcatttgcgagctttcaaaaaaaaatccacaaccgtttattcaactttcacccttattgtatgaaatcttagttagcattgacaacaattggattattataagattactgaagttgtttaccaatctttcacaagtggaaccgaaattaagagcgaagcttttaccaaaaatactagaattgatggatagtactgtcgcgacttccgtgatctacgaatctgtcaattgtattgttaagggaaatatgttagaagaagatgacttcgaaactgcaatgacctgcttagagaggctgcacacattttgtgattctcaagatccaaatttaagatacattagttgtatattgttttacaaaattggtaaaatcaatacagattttatttctcggttcgatcaactgatcatacgcttactatccgacgttgatgtctccattaggtcaaaggcaattgagttagtcgaaggtattgtcaatgaagataacctaaaaccaatcattcagacattgatgaaacaatttgtggatgaagatgtggtcattctacaagccggtaatgtcgtgtatgaaagatcaaaaagaatccccattataataccagaacattacaagatcaaaatggtcaacgttattatatccatttgttctggtgacaactattccagtgtcaatgactttgaatggtacaatgcagttataatcgatttagccatgctttgtcaagaaatatctgacaagactcttggatataaaattggagaacaattgagaaacttaatgataaaagttccctcaatgagggaagtaactattaccaatatcataaaacttatttcagaggaaagtattaacagacagttgcctaccataatgagagagtgtatttggtgtcttggtgaattttctgcgcttgtggagaatggtgatgacttgataaaagtaatgattggtaacaccggctactattctcacagtgtacaggaggtgttgattttagcgctcctcaaaatattcagtaactggtgtaacaatgttcaagaggataaaggcattgaagttgaactgatgttaaaggaactaataaagttttttgaaaacttatctttttcaagtacatttgaagttcaagaaagaagcgttgaagttttagaatttctaaagctaagtttagaagctttagaggaggactcagacggtctgccaatgttactaagtgaagttctaccaagttttttcaatgtctatgaactggcaccaatcgcgcgtggtactcaatcaaagttggaaatagatgaggccattgatttagagactccatttttaactaaggaggaatgtgatgaattgttaaatgatcagaagattgactcgatgggtagtgacctgatttcggatacatcaatggacgagcagggtgatccagaatatattgattattcagatacatcgtatgaagaaaaggagaaattgaacgatcatgacaatccgtttgagattgagagaaaaaaagagcgcatgacaaatccttattaccttgatgaagaagatgaaggaaacgctgagaaatcaaaagatttattagttttgagtgaagatgatagctctaaaactaagccggagactatcagattaaatagacaggataatgacttgaaatccttgagcctgtttacagttgaaaacggtgaggaaaagaagagcaagaagaagaagaagaagaagaaaagagtccaggtcttatccgaccaacctgttgttgaaatcacctcgaagaagaaggaagtttctcccaatccccatggcaatgaaacatctaccacatctactaagatagacaaaatcaatctgaaaatgcgttccaaacttgaaaattttgacttttccaatttcggaacatcgagtaattcggtaaaagaatcacagcaaggaggtgaccttaaagaagatgatgataaagaattaaaccgttcggaaggcaaactcaatgaacacggaaataaaaatgattttagtgatgctgaggaggttatagtcattaagaagaagaagaaaggcaaaaaatctaagtcaaaaattaaacaaaaatcaaaaaaggaaaattctccagaatcaaaagaataa

SEQ ID NO: 6201 - DNA, 357 bp, Saccharomyces pastorianus
atgtccggcggtgctgagccgcatattgttgctcaatacgcttatgtcttgggcgaattggagagacgagccaaggccggtaagcggttggcctttgtccatctggtcgagcctcgtgttaccgacctgaccctggatgaaggcgaaggggactacgatgaaggtagcaacgatttcgcttactccatttggaaaggccctattgttaaagccggtaactttgcgttgcacccagatgccgtcaaagaaaaagtcaagcgtgacagaacgttgatcgcttacggcagattcttcattgccaaccccggacttggtggaccgtttggaaaagggtctgccattgaacaagtacgatag

SEQ ID NO: 6202 - DNA, 714 bp, Saccharomyces pastorianus
atgccgatcaaggtcggtaacactcagcttgcgcaccgcgtggtcatgcctcccttgaccaggatgagggcgagccatcccggcaacgttccgaacaagcaatgggctgccgagtactaccgtcagcgtgcgcagagacccggcaccatgatcatcaccgagggtactttcatctctccccaagccggtggctacaacaacgcccccggcatctggtctgacgagcaggttgctcagtggaagaacatcctcttggccatccacgacaaaaagtcctttgcctgggtgcaactgtgggcccttggcagggcgtccttcccagacgcgatggctagagacgggctgcgctacgattctgcatcagatgcagtgtacatggaggacacggccaacgccgcaaaggtcccagcacacaccttgaccaaggacgatattaagcagtacgtcaaggagtacgtacacgccgctaagaatgccgttttcttggccggcgctgacggtgtggagattcatagcgccaatggctacttgctgaaccagttcttggaccctcgttccaacaccaggaacgatgagtacggcgggtccattgaaaacagggcccgcttcactctggaggtcgtagatgctgcgtgtgtggccatcggccacgacagggttggcttgaggtttgtctccctacagcgctttcaacagcatgtccggcggtgctga

SEQ ID NO: 6203 - DNA, 2163 bp, Saccharomyces pastorianus
atgagttggaatattgagaagctggactctattgtcacaaagaggctcaaatctcaagtttacgcagtttcattagcatcagcggttagagaaatagtccaaaattctatagacgcacatgcatccaatatcgatgtcacaatcgacctctccagtctgagttttgctgtttacgatgatggtactgggttgagcccggatgatctgaataagttgggtactagaaatcacacttcgaaaatacgaaagttaagcgatctaacaacaataaatacttatggttttagaggcgaagccatatacagcatttccgacatctcgaaattgtttatttgctccaaaactaaggattacaactctacatggatgagaaagttcccgtcaaaaagcgttatgttaagtaaaaatatcaagccccaggtggatcctttttggaaagtccagtcttggagccaaagaaaatcaggaactgtagttattgtcgaagacatgctatataatttaccggttcggcgtcgaatcctaaaggagcaaccttcctttagaacctttaacgcattaaaggcagatatgctacagattttagtagccaatccattggttgcacttactgtatcgtatacggacgaatccaaaggccacacggacgtccttttccgttcaaagaatataactgaagaattaacaaaacaccagagaatgtctcaggtattgagaaatgtgtttggggcaataataccgccagatatgctcaaaaaagtttccttaaaatttaatgattatcaaattgaaggtattatttctaagataccgattcgattgaaaagcctacaattcatattcattaatggtaggcgttatacagatagtatattccagacatacattgattctttgtttcagcagcaggacttcggagacagcaatttcagtttacttaagaccaaaaccgtgaggaaaccttatcgatcccaccctctcttcatttttgatctacgttgccctcagactatcgatgacctattacaagatccggccaagaacattataaaaccttctcatgttcgtacaattgaaccattaattatcaagactgttcgttctttcctaacatttcaaggctatttaccgcccgataaatcagataagtcgttggaaatagtcagctgctcacaagccaatgtaacatccatcagcagacaaagtcaagtgagcaaatgtggtcaggtcttagattccaaaatgaaaatggcacggattatcgtaactccagggacatctgttgccaataaatataaagtaagcaaaactacattgagttctgaaaggataaacaaaataagactttatggtcagaaatcgattttgcgaagcaagctttcttcgaggcattatgatacaggcgtcttacaatattgtgataatatagaaaacacaatagaggacctttccatttccagatctgttttggctaattatgaggtgattaatcaagtcgacaagaagtttgttctcatacgatgctccggttcatctatctacaaaaccccaatattgatattagttgaccagcatgcttgtgatgaaaggataaggttagaagatttacttcacagtctactctcagaagcactaactaggaccttcgtcacacaagatttgactgattgctacatagaaattgatcgtaccgaagctgacttattcaggcattatcagtgcgaatttaaaaaatgggagatcaattatgaagtaactaatggcacactagaaacgtctcttttgataattaaatcgctacctgaagtgctggcatccaagtataatggcgacaacaattacttaagaatggtcctgttgcaacacgctcatgacttaaaagacctcaagaagcttcccatgaacctaactcgtttagaaagccacactttaactgataggttatattggtggaagtacgcaagttgcatcccaacagtgtttcatgaaatccttaacagcaaagcgtgcagatctgctattatgttcggagatgaattaagtcggcaagagtgcattattttagtcaacaagctttctcagtgtcaaaatccattccaatgcgctcacggtagaccatccatggtccccattgcagagttggatcaaaaaaatgaaacataa

SEQ ID NO: 6204 - DNA, 1053 bp, Saccharomyces pastorianus
atgctggatattcccaccgatatagacggtgcttcgcttatcatatcgtccggaatcaggatattgcccttcttgggcgttcttgaagggagttgctggggagggtccgcttcgaatttatcaacggcaaacgacactcttttcaacgaaaccgtagataaatccttcactgagagagcgggagaaggtaatgctgaaggggagggagagataggagtgggcggtttactcacggtaggagatgctaccttcggggaagaaagctccttcacacgagggattgtgttgatgttgttaccgttactggatggttccttcttagatgagttatctacaggtgcggcggtattgaccgcgggcaatgcttttttgactgcagaaacagtggaaggggcagatcttttgccaaacagagacccgaagatcgatcgtttggatttttcgctccctgacgagttgctcctcttgatattggcatttgacaaagaagagattggtagagggagctttcccttggcaggagaaggggttccggttgcgcttatgtttgaatttgatagccttggcttggacgagaccacagcattggatatggaagtggagcgtttcttcttcacgagagggacgctagccttgctatcgtcaccatttatcacatcatcggcatctccatcgtctgcggccgccaaactggtacggccactactgctaacaggagtaaggagcggcaagttctcagtgcctgatccaaacccgcttccatcgccgtcagtcaagttcgacttctcgttatttgaaagggccgcattcgatatggacgaagacctcgcacgcggcttgctgttgctgttgttgctactgtccaccacctttggtgcagaggcagatgaagacggcctcgacggctttgtattcaccttccgcctgctcttacccttgtacagccagtccacgggcacatcaaactcggtgttcgttatcatgacctggttagtatcaccacttcttgcacttccttgttgcagaacctatgtttccgctttttttctataa

SEQ ID NO: 6205 - DNA, 216 bp, Saccharomyces pastorianus
aatcttgatttttttttccttcctatctttttcatcctcttccctcttcctcttcctcttcttcccttgcgtttctacccctcttcccttattacagcgaaaagaaaaggaacacgccgatggcagactcaaagaaacaaacaaacaagcaagcaaaggaaaggaaaggaaaggaaggggagccgagaccaaacagctagcgactccccaccttag

SEQ ID NO: 6206 - DNA, 1089 bp, Saccharomyces pastorianus
atgtcctccgtagataacagacctttgccgttcatataccagttcacagcgggcgctattgccggtgtctccgaactactggtaatgtacccactggatgtggtgaagacaagaatgcaattgcaagtcaccacaacaagcaagcccggtgtggctgccgtgaaggctgtaggggagcattacacgggtgtgatggactgtttgaccaaaattgtcaagaaggaagggttctcgcgtctatacaaaggtatcacgtcgcccatactgatggaagctccgaagcgagccattaagttctcgggaaatgatacgttccaaacgttttataagaagcttttccccacgcccaatggggaaatgactcaaaaaatcgctatatgtagcggtgcgtccgccggcgccgtggaagcgtttatcgtggcgccctttgaacttgtgaagatcaggttacaggacgtgaactcgccgttcaagacgcccattgaagtcgtgaagaactgtgtggtgaaagggggcgtcctgtcgcttttcaacgggttggaggccaccatctggaggcacgttctttggaacgccggttatttcggtatcatatttcaggtccgaaagatcttgccggcggctacgacaaacacggagaagacaagaaacgacatgattgctggtgccatcggtggcactgtcggatgtctattgaatacgccgtttgatgtggtgaaatcgaggatccagagaagctccgggcccctgaggaaatacaactggtccctaccctcggtgtttgtagtataccgcgaagaagggttcaaggcattatataaggggtttgcgccaaaagtcatgagactagccccccggtggcgggttgctgttggtggtcttcaccaatgtcatggatttcttcagagaagccaatacggcaaaagtaatggtctgtccggcctcatcctcgtctactacgtctacattatctatatatatatattcttgaaaaataaaaagtgctcgcctttactctctagatcaccttctacgcgcctgcacaagataaagcatggagaagaaaagaaaaaagtctggattgtgtag

SEQ ID NO: 6207 - DNA, 1020 bp, Saccharomyces pastorianus
atgttgctgaatagtttttacagttttttacaactaccgattttttcgaatggcgcaaataaggggatagaaccaaactgtcccatagatattccattgtcatgctctaataaaacagtaataaacaactcatgctgttttgaatatcctggtgggatattcttgcaaacccaattctggaattactttccaagcaaaagcgatttgaatgaaacggagttggtaaacgaactaggtcctctaaattcgtttacaattcacggattgtggccagataattgtcacggtggttatcaacagttttgtaataggacgttacaaatcgatgatgtttactatctgttaaatgaaaaggaatttaacaataataacgacacatctttacaaattcccggcaaacaattattagaatacttggatttatattggaagagtaataatggcaaccatgaatctttatggatacatgagtttaataaacatggtacgtgcatcagcacaataagaccagagtgttatactgagtgggaggctaataacgttgacaagaagagaaccgtttatgattattttagaataacctataacctcttcaaaaaactggacacgttcgctattttgaaaaagaacgatatcgttcctagcgttgataaaacttactccctggaacaaatcgaatctgcgctaagtaaagagtttggtggtaaacaagtgtatataggctgtgatagacacaatgctttaaatgagatatggtattacaaccacttgaagggttcgcttttaagcgaaatgtttgtacctatggattcgcttgccattcgaacaaattgtaggaatgatgctgttaaatttttccccaaagggtatgtaccaccttttaggagaaggcctaataagggggaaagctacagaggcgtcattcgtttatccaatatcaacaatggcgatcaaatgcaaggctttttgatcaaaaatggtcactggatgagccaagtacacctgctaattacgagttaa

SEQ ID NO: 6208 - DNA, 249 bp, Saccharomyces pastorianus
atggacgtgctacctgacggaaatactatagactttgacgcactggccaacatgtttctaattaagtataaagattttatactatcgaaattcaagaaaactgaacccgtagaaaatataaagtttcaaaatttagttcgttcaaaccagttggcagaagggctttttggacagacacaacacctctgttcgatttatgacaacccctcgtggcactctgttgtcttagagaccttagatctggattaa

SEQ ID NO: 6209 - DNA, 573 bp, Saccharomyces pastorianus
atgacatctatgggcattcaagggcccaatggagaagagtctaaatttcaatgtggatctgttgaggtctatgaatgtaaccagtgtcgcaatgtcacgaggttcccacgctataatgatccaatcaagctgttacaaaccagacagggtagatgtggtgaatggtgtaacttattcactttgattctaaaatcatttggattagaagttcgttatgtctggaatagagaagaccatgtctggtgtgaatatttttcgccatatttaaaaagatgggtccatgttgattcttgtgaacaagcgtttgatcagccgtatatctactcggttaattggaacaagaaaatgagttattgtattgcgtttagtaaagatggtgttgttgacgtcagtaaaagatacattttgcaaaacgagctgcccagagatcaaattaaggaagaggagctaagttttctgtgcaaattcataaccaaaagactaagatttacattaaatgacgaagagatataccaactagcatgtcgcgatgagcaagaacagatagagttgattactgggaaggcaacatga

SEQ ID NO: 6210 - DNA, 261 bp, Saccharomyces pastorianus
atgaagcaaggtgttttgttgccaaccagaatcaagttgttgttgaccaagaacgtttcttgttacagaccaagacgtgaaggtgaaagaaagagaaagtccgtcagaggtgccattgttggcccagatttggctgtcttggctttggtcatcatcaagaagggtgaacaagaattggaaggtctaactgacaccactgttccaaagagattaggtccaaagagagcgacctgcaggcatgcaagctggcactgccgtcgt

SEQ ID NO: 6211 - DNA, 4086 bp, Saccharomyces pastorianus
  modified_base (4018)..(4018): a, c, g, t, unknown, or other
atgacacctgaagctaagaaaagaaagaatcaaaagaagaaacaaaagcaaagacaaaaaaaggctgccgaaaaagctgtccacaataaagaattacacgaaacgccagaaagtaccgttagcattgactttgacaatgattcggtgaatccaacaggatctgacatgactccggaatccgatgttcttccagtctcatcgtctaccaatatttctaacgataacgatacgcagccagaagtacttgaagttaaagagttgcatgatgaactgcacgacgaatcttgtcaacatgatataactgcggacacaagcgacttagccaacagttcaatgattgaaagtaactcctctattatccaaacagaaccaaatgtgtctcaagaggacacaaaggactcgtacggttttcctttgaatgaaatgtcatttgatgaagttgctgttgagtctaacgacactaacgagcatgcccagaagacaggtatatcagacatgagagaggagtcttcttccgaaaataactacgaacattatgacagtgtaattattacatcgaatgatagtacttcttcacatcctaatcattttctctcttccaatggcaatatcctttctccagaagttccatctggcaatacgccagcacaagatatctctcttgacacaacagatagtagaaaacttgaatgccattacggtgataaagatacaagcttgcaatcaagtcatgaactttctgaagaccttttcgaagaagaagacgactcattaaaacaacaggcgcatgtgccgcctgaagaggaaaaggaggatacaacagacgaaaaagatacagaccatttgttcgggtctgatacagtatcatttgaaaatgtaattaagagttctggggatgatgcttccgaactttttcaagataacgaaaataatgaaaaacttccttgggaggaagagctttcccaatcaaatggtgttgaagaacaaccctttggtcagaccatgagtggatctcaagacgtggcggaaatttcagaaagacacaatgaagtgttgtcatgggatgaagagtcgaaagagtctaatggttatatggacaacatccaaagagatcaacaatttgaagaaggttctgaaaaaagctctgaaaaaatcagtacacaaggctccaacattcaaaacagttactacgcggataaacttgagattgaagatgacaagtcagcagataaaggaaactccgagcttccatctgccagtgaaggtaatattgaatcggacaatgacaatcgggatggaactggaagcttgtttgcacagagtaccgaaaggccagaagaagtattgccgtgggaagcagacgataaaaacaccgaagtgacaagtgaatctcatgaaaatcatgaaggcctattcgcctctaccgaccattacgataaacttccttgggaagtttcagagaaccaaatatcatcaggaaatacagaaaatagcatgcaagctagtactgagggaattcctgagaaaaagttttcatttttagaagaagacgatgatctcttggacgatgacgatagttttctggcctcttctgaagaggataattccgttattgatagcagcaatatagcagacttagaagtagaaccggtcgaagaaagaagagcctcaaagtatgaaccctctaacgaacaacatactaagatactccaaaaacaagccctgttgaccaatactgctggcattgtcacacctcaacaatttcatggtttagcgaagagtgcttcaaatggtcctggtcgacaaaccagtataccatctgtagttacgcctagtcctccagttgtgaaagtcaaccattccatcaacaaaatcaatgaagagaaaaagaaatccgatgcttatgattttccattagaaattattcctgaaagttctaaaaaaggtcatgcaaaaccagttggtgtaccaactcaaaggtttggttcagcgcaatcttttagctccttggaaaagccaattccacagagtagaaaaagctctccaacaattaattttggcgatccaaagaggccacccgttatcccattaggaacccaggtgcctcgctcttccagaactaactctggcgcctcacagtcgcctctcaattatgctttcccaaatccttacaatcttcagcagcaacaacagccctctagccaaccaagggttcctttaccaaatgtgaacctaccgcttccaatcttacaggtagagactactgcttctgttccaccgattcgagcaagaggaattagtaacgcctctatagggagcacaacatcttttggtgcgagacgttcaactcagtatggagtcaataccgcattatctccagtttcaccatatggccaagctgcaataaacttaccgacagcgaacaagtatgcacctacttcacccgcgacgcaacaaggtcaatatccatccattgcacagagccttggcggtccagttgtaaataaccctaattttgtgaaaactcatagaggtcatacaagttctattagttatactccaaaccagaatgaacatgcctctaggtacgcacctagtaaccagcaatcttatcaaacaccccacgctccacagcctgttgctcctggtgccacaaatctaaattatcaaaatcaacctagaaattcctatgttgccccagtgattcctaacgttcaacctgttgcctcaatgattcctaacgttcaatctgttgctccaatgatttctaacgttcaacctgttgccaacatgaacgctcctatgaacactcagccacctatgggaccatccgccaccattcaagctcctatgaacatgcaactccaccagatcgttgagaaccctgcgaacttgccacctcctacaaacataccgccaataggaattacacgtcaagctatgaacaatgctccattggttcaaaaagcaaaagatgttatggtgattgacaacgaggctatactacatcgtcaatttcccgtttttcactggagtcctgcaaataaggttgtgtatgcggttccatctgctccagatcaatctcaatatatgatttcgtcaagttctgtacaggagatcaaagtgataccgattgatcaaatagttaaaccgaatgacatgctcaagagtttcccaggtcctttgaacactgccaagttgaaaaagaaggatttgacaaaatggatagaaattacagcgaaggccatctctgagaaaaatcaattagccgatatgactatatggctgttattggaaatgaagctttccgatacgataagctggaaaaatatttcaaacctattatacaattctgacgagctttcggtttatttatcacaaccctttccagactctgagctggttccgaactcttacaggctagatgtaagctgccaaatgagagtcctggcgttcttacaaacaggaaatcacgacgaggctcttcgtttagccttgagcaagagagactattctattgcactattgatcggaagtttgatgggtaaggataaatggtccgaagttattcaaaagtatttatatgaggagtatactacagggccaaatcatcaaaaggtaatggcaaattttctgttccttatttttcaagtatttgttggtaattctaaaatggccgtggaaaatttttatgctaacaaagaagctggccaatgggcattaggaaactggaagagcatcgttgctgctgtgctgatcaatatcccagcgaatgttgaagaagcgacatctataccacctgtcgttcttgaatttttgatagaatttggtatctttcttaccaaaaaaggaatgactctggcagcccacacattgtttattatcggtaatgtaccactttcagagcaaccagtaatggcagattcagacgtagtattccatagtattggaaacccaagtactgttgaaagtgtcctatggtgtgaaatttatgagtatatattctcatgcgactctnaactcaaagggttccatcgattttgccacagaaagtatacatgcatccatttacaggaacaagcttga

SEQ ID NO: 6212 - DNA, 4638 bp, Saccharomyces pastorianus
atgacatcacgagtttcgagactggaccggcaggttatattaattgagacggggtccacccaggtggtccggaacatggccgctgaccaaatgggagacttggccaaacaacatcctgaagacattctttcgctgctatccagagtataccccttcttgctagtcaaaaagtgggaaacgcgtgttaccgcagccagggccgtgggaggtatagtggctcatgccccttcttgggatccgaacgaatcggacttagtacgaggaacaaatgaaggttctcccttgaacaacgctcaagtgaagctagatcatgaaatgcaaataaaactggaggaggcaacgcaaaataaccaattaaatctgctccaagaagatcagcatctgaattctttgactgattggaaattaaacgagattttgaggtcaggtaaagtgcttctggcatctagtataaacgactataacgttcttggtcgagcagatgacaatataaggaagcagaccaaaacagatgacatcaagcaagaaatacctacatacaatacgttcgacaaggcgaatgaaaataagaataacgccaacaagaaatcggcaagaatgctggcaatggcgaggcgaaagaagaaaatgattgcaaaaaacacttccaaacatcctgtagatataacggaaagctcggtttccaagaccttattgagtgagaaaaatatgacgagcactacagcatcttcacctacttcttccacaactggtcagccaaatcccaagctggaaatcaccgaacaaacagatgacaataaactgatgatagagtccacagtgagacccttattggagcaacatgaaattgttgccggtctagtttggcagtttcaaggcatatacgaactacttttagacaacttaatgagcgaaaactgggagataagacatggcgctgccttgggtcttcgtgaattagtgaaaaaacatgcccttggggttagtagggttaggggaaggactagagacgaaaacgatataagaaattctaaaagcttagaagatctggcgtgtcgtcttcttacggtttttgcgttggacagatttggagattatgtctacgatacagttgttgctcctgtacgtgagtcaatcgcacaaaccctagcagcattattaatccatttggacaataatttgtccattaaaatcttcaattgtttagagcagctggttttacaagatccaatagaaacaggtctacccaataaaatatgggaagcaactcatggtggactcttaggaattcgttattttgtcagcattaagactgatttcctattttcacatggtttactagagaatgtggtacaaatagtactatatggtctaaatcaaaccgatgatgacgtgcaaagcgtagcagcttcgattctaaccccaataacaaatgagtttgtcaaactaaacacatccaccatcgatacactggtgaccactatatggtcattgctggcccgtttagatgatgacatttcatctagtgtcggttctattatgaatcttttggcaaaactgtgctaccatcaagaagtgctagatatattgaaagataaagccctagaacatccttcagaatggtcatttaaatctttggtaccgaagctgtacccatttttacgtcactcaatatcgtcagtaaggaaagctgtattaaatttattaattgcatttttatcaataaaggatgactccaccaagaactggctgaatggtaaagtatttcgtttggtattccaaaacattttactcgaacaaaatccagaactactgcaattatcattcgatgtttacaccgcattgttggaacactataaggtcaagcacactgaaaaaactttagaccatgttttcagtaagcacttacaaccaatactgcaccttctaaacactccagtgggtgagaagggtaagaactatgcgatggaatcgcaatacattttaaaaccttctcaacactaccaattacatccagaaaagaagcgttccatttctgaggcggcgacggattcagacattccaataccaaagagcaatgaacatatcaatatagatgcacctatgattgcgggtgatatcaccttgctgggactggaagtaatcctcaataccagaataatgggggcaaaggcatttgcattaactttgtcaatgtttcaagactctacacttcaatctttttttgccaatgttttggctcgttgtttagaattaccattctcaactccacgcatgttagcaggtataattgttacacagttttgttcttcttggttacaaaagcattcaaatgaagagaaactaccttcattcgtatcagagcttttcagtcctctaatgaacaaacaattaacaaatcgcgatgaatttcctgtctttagggaattagttccaagtctaaaggctttaaggactcaatgtcaaagtttactggctacgtttgttgatgtaggtatgctgccccaatacaaactaccaaatgtggcaattgtggtccaaggcgaaacagaagctggcccacatgccttcggtatagaaactgctgaaaaagtgtatggagaatactatgataaaatgttcaagtccatgaataactcttataagctgctggccaagaaaccgctagaagactccaagcatcgggtgctaatggccatcgatgcagccaaggagtcagccaagcttcgtacaggtagtattctggccaactatgcatcctcaatcttattgtttgacggcctccctccaaaattaaaccccattatcagatcccttatggatagtgtcaaagaagaaagaaacgagaaattacaaaagatggccggcgaatctgtcgtacatttgattcaacaactattagagaataacaagattaatgtttccggtaaaatcgtcaaaaatctatgtgggtttttgtgcgttgatacttctgaggttcctgatttctctgtaaatgcagacttcaaagaaaaaatattgacactaataaaggagtctaattcaattgccgcccaagatgatatcaatctagcaaaaatgtcagaagaggctcaactcaaaagaaaaggtgggttgatcaccttgaaaactttatttgaagtcctcgggccttccattttacaaacattgcctcaattgaaatctattttattcgattcgttatgcagtcatgaaaacgtagagatagaaaaaattgacagagaacagggccaaaaaatagtggactccttcggtattttaagggctctgttcccatttatgtctgcttctttacgttccgatgaggttttcacccgtttccccattctactgacattcttgagatcgagcttatctgttttccgttattcggctgcaagaacttttgctgatcttgccaaaatatcttctgtggaagtaatggcttttaccattcgtgagattttacctttaatgaatagtgctggctctctatccgatcgccaagggtccacagaacttatttatcatttgtcactctccatggaaaccgatgttttgccttatgtgatttttctaatagttccacttttgggtcgtatgagtgattcaaacgaagacgttagaaatttggccacaacaacatttgcgtcaattatcaaactagtccctctagaagctggtattgccgatccaaaaggtctaccagaagaattggtggccagcagagaaagggaacgtgattttattcaacaaatgatggatccatccaaggccaaaccattcaaattgccaattgcaattaaggctacattgagaaagtatcaacaagatggtgttaactggttggcatttttaaacaaatatcatctacatggaatattatgtgatgatatgggtttagggaaaacgttacaaacaatctgcgttattgcgagtgatcagtatttgcgaaaggaagattacgaaaaaacgcattccgttgaaagcaggccgttgccttctctaataatctgtcctccatcgttgactggtcactgggaaaatgaattcgaccaatatgctccgtttttgaaggttgtcatttatgctggcggtccaactgtcagatcaactttgagaccacagttgaaagatgccgacattattgtcacatcatatgatgtcgctagaaatgacctcgcagttttaatcaaaacggaatacaactattgtgttttagacgaaggacatattatcaagaattcccaatcaaaacttgcaaaggctgttaaagatattacggcaaatcacaggttgattttaaccggtactcctattcaaaacaatgtcttagaactatggtctttattcgacttcttgatgccagggtttttaggaacggaaaagatgttccaagaaagatttgctaaaccaatcgctgcgtcgagaaatagtaaaacgtcatccaaggaacaagaagctggtgtactagctttagaggcattgcataagcaagttttacctttcatgctaagaagattgaaggaagacgtcttatctgatttaccacccaagattattcaggattactattgtgaattgggcgatttacaaaaacaactgtacatggatttcgccaaaagcaaaaaaatgtag

SEQ ID NO: 6213 - DNA, 912 bp, Saccharomyces pastorianus
atgtgtactcgtgaattacttacagtcgatgtggaaatgaaagttggattttttactattgatttcacgaaattgctagccgcgagttggaacaaaaaccggcacatcaaaaatagttcaatgaggaacaaatactcaacacataaactatatcgatgcgtaattctaaaggatcaccttcaaaaagcaagccgatattccaagatctgtgacttcatggatgatctcaaaaaaaaaagctcagtgcgaaggcaggtgacgaatgaagacgatgaacaatatggcggtaacagtctgcacgaactacccaggacaataccaaatgtgaatccctataccagaagccgagggtttcggccatcttactcctcccaaggacctgcaacgagaagcttgttcaacaacttttacaaccgttcaagtgccaatacggtaggaaatgacacgatagacactgatagtgttagttataatggtgtttccaaatttagaagaaatagcgtagatatacccctgcaaactcacaatagactggaagtacgacctatagttgacagacaagattatctatggaggggaataaacgcccttgatgacgttaaaagacaggcacaagcaacagagttgtacgaccagtttccacaaggttttgagaacaaactgatgcggttgaggcaagcgcatagcaaactacttcaagtattaagagaccgtaatgctaaactagaggaagagcaacgtcgtgaagtggcagtcgcaacggccgctgccatgatgacaagaacaccatcacccacgggcaaatctgtgggcgacgaagccactagcaacaacatacacagtagcagcgcgactagaaatccaaatgggccaaatgtcgatcctgaagagggaaagtatgtcaagaattag

SEQ ID NO: 6214 - DNA, 300 bp, Saccharomyces pastorianus
atgtggcgcaccagatcgaaacggcgctcgcctcatctccatgggaaaaaagctggcagcaaagagaagaacgagctcaaatcaaaagccaaaaaaaaaaagagggtggccgcgccgcggagctgtgagaagatatgcatccgctttctatatcgcttttggtttcgctgtcggtttcggtttcggtttggcctttggtcatcggtaatgttggtggtgctaagatctcctctcgaaaagtggtatgtgcaacctggtcggtatatcaccgaccatgtgggcactatcgtaatattttga

SEQ ID NO: 6215 - DNA, 579 bp, Saccharomyces pastorianus
atgcatgcgaggcaggcgttgggctttgcttataagcaacggtttcgccacttgatatacgaactgttctttacatctgtttcgtgctggggctaccattacgtttgtttgcttttttgcggtttccggtttgcgatctcgcactatatagatcaaacgcagtttaaggaatcagcaagcctcgtaaggattgtgcatcaggtgcaggtatacatacagagaacaagaggacagaaagtgagaatggctgtgtcagagcgtttgagaacagcaggcgagagtacgtctgtagctagagcgtcgtacccgactggagatgtggaagcggacacgaagagtggcagcagctgcagcattaggagtccggtagacggaagtttaactggccaggaggcagagttggatccgagtccaggggagggggaggaggaggagaaggaggaggagctggttgcagaccatgcggacggtgaggcagttgctacgaggaagaggaagttccagccgttgaagaaccccaagaaagtcacggaaaagaagcaaagtcccggcgccgctgaacttgtcggagagcaataa

SEQ ID NO: 6216 - DNA, 525 bp, Saccharomyces pastorianus
  modified_base (520)..(520): a, c, g, t, unknown, or other
atggggaaggccagttccaggcagtccatacaggtgaataataacactggcgccaactacgggaaggcacccatgccctcggcgggtatgatgaccgcaatgaacccttacatgcccatgaaccgctacataatgtctccgtattataacccgtacggcctccctccgccccacatggcgaacaagcccatgatgacgccctacggttcgtacccatacccgatggctcctcggacctccgttccctttggcatgcaggccagcagcgctaggccctacgaggagaacgaatacggtgccaccggctacagaaataaaagagtgaacgacttttcggactcgccattgagtggcacagcttccgccgggaaacccaggaggtctgaggaaggctcaggcaactccagtgtgggctcgagtgcaaatgccagccccacacgccaacgcacagatttgggccctgcagacgtgattcatgcagaggaatatcacttcgaaaggatcgacaagcttgatccgncctaa

SEQ ID NO: 6217 - DNA, 204 bp, Saccharomyces pastorianus
atgataacaaacgcaaatccacataatttaccatcacgctttcttggaatagtagcttcaacaacagtaccgtatctaccaaaaatctttttcaatttggtgggatcacggcagctccatggcatattcctaatgattaacttaggcttaccctttagcatagagtcttcatcgtcaacatcatcctcattttcgtttttctga

SEQ ID NO: 6218 - DNA, 1896 bp, Saccharomyces pastorianus
atgtcttctagtggtgcaaagccataccgagagaagcctgcagcgaacaatggtgcttcgtcctcgtcttcgtcttcgtcttcttctacatcggcctcgccatcgcctgcagccgctccacgtaaggccgcagccgtgcctgctgctaacgactccgactccgatgaggatattgatggattgattgaagaattgcaatcgaactacggagagagcgaagaatccagtgaagaagagaagcatactgatgaggcccacgctggtcaaagggtgattcccgaaaaggacctttcgacagatcccgcctatggtctgacttcggacgaagtcaccaggagaagaaagaagtacggtttgaatcaaatggctgaaaacaatgaatctttagttgttaaattcatcatgtttttcgttggcccaatccaattcgttatggaagcagccgccatcttggctgccggtttgtctgattgggtcgatttcggtgtcatctgtgccctactactgttgaatgcttcggtcgggttcatccaagagtttcaggccggttcgattgttgaagaattgaaaaagactttggccaatactgcaacggtcatcagagatggccaattgatggaaattcccgccaacgaagtggtccctggtgagatcttacagctggaaagcggtacgattgctcccgcggatggtcgcattgtcactgaggattgtttcttgcaaatcgatcaatctgccattactggtgaatctttagctgctgaaaaacactacggtgatgaggttttctcctcgtccacagtgaagaccggtgaggccttcatggttgtcacggcaacgggtgacgacacctttgtcggtagagcggctgccttggtgggccaagcttcgggtgcccaaggtcatttcactgaagtcctgaacgggatcggtatcattttgctgattttggtcattgctactttgttgctagtttggaccgcatgtttctacagaactgatggtatcgtcagaatcttgagatacactctaggtattaccatcattggggttccggtaggtttgccagccgtcgttaccaccactatggccgtcggtgctgcttacttagccaagaaacaggctattgtccagaaattgtctgccattgaatccttggctggcgttgagatcctgtgttccgataagactggtactttgaccaagaacaagttgtctttgcacgatccgtacactgttgaaggtgtttctgctgatgacctgatgctaactgcttgtttggctgcttccagaaagaagaagggtttggatgctattgataaagctttcttgaaatctttgattcagtatccaaaggccaaagatgctcttaccaagtacaaggtcttggaattccacccattcgaccctgtctctaagaaggttaccgctatcgtcgagtctccagaaggtgaaggaattgtctgtgttaaaggggctccattgttcgtcttgaaaactgtcgaggaagaccacccaatcccagaagatgtacatgaaaactacgaaaacaaggttgctgaattggcttccagagggttccgtgccttaggtgttgctagaaagagaggtgaggggcactgggaaatcctaggtgttatgccatgcatggatcctccaagagatgacactgctcaaacaattaacgaggctaggaacctgggtttgaggatcaaaatgttaaccggtgacgccgttggtatcgccaaggaaacctgtagacaattggggctcggcagcaacatctacaatgctgaaaggctgggtctaggtggtggtggcgacatgccaggctcacaactggctgattttgttgaaaacgctgattgttttgctgaggttttcccggcactataa

SEQ ID NO: 6219 - DNA, 660 bp, Saccharomyces pastorianus
atgtccattagagaactataccatgagaggacttccccatttatatcactggaatttttcccaccaaagaccgagttagggacaagtaatttgatggaacgtatgcatcgtatgactgccctagatccgctgtttatcaccgtcacatggggagctggaggcaccactgcagagaagactctggcattagcttccctggcacaacaggcattaaatataccggtttgtatgcatttaacttgcacgaacactgacaaaaccatcattgatgatgcgctgaatagatgttatagtgcgggaatcaaaaacattttggcacttcgaggcgatccacctattggagaagactggctagattcacaatcaaatgagtctcctttcaagtacgcagtcgatttagtccgctacatcaaacaaagttatggggacaaattctgcgtaggggtcgccgcctatcctgaaggacattgcgaaggcgaggcagaaggtaacgagcaagatccattaaaagatatggtatatttgaaagagaaggttaacgctggggcagattttgtaattacacaactgttttacgatgttgagaacttttatcttttgagtattgttcgtgaacaatatcgcagattacctctgttcctggattatgctatcagtctt

SEQ ID NO: 6220 - DNA, 129 bp, Saccharomyces pastorianus
atgaaagtgaataaaatttacttatatagtaagaaagaaaaaatctgcacaaaagaacatgggtttaaatctttaattaatgaaaattttccaaaaattttcttttttgcctctaaagagaacgggtaa

SEQ ID NO: 6221 - DNA, 1830 bp, Saccharomyces pastorianus
atggagcaaccaccttcgtcgatgcctcctcaaaatgacactaagaagaaggggatactttccttttttcagaacaccaccactataaagagcagccttggtgtaagcaagtctgcgaggaatgagaccaatgtcattactttggatgaccctaatgaggctgctgttgaagagaggagaaatgctttgagcactactaaggaatccgcaaaagaaacgaacgctgtgtctgagacggctaattcagaaagtcaacatacagacgacaaaatcgtgcccacaaagatgtcagaatctactatgggaagcacagagcaattacaatccgacgagactgcatcagttgcaaaaagcaaaagctcttcgccatcctccagaaaagaactgtccacaataagaaaagagcaaatcagaaaggaaaaggaactaaagaggcaacaacgtgaacaggaaaagcacagaaaagaatcattacgtctagaagagaagcgcaaaaaagaactcaaggcagaagaggagaaacagaagcgtgctgaattgaagaagcagaaagaagaagaaaaacgcaagaaggaggaagccagattggaggctaaaaaaaaaagagaaatggataaattgaaaagagaggaggacattcggtcaaaggaaaaggccaaagaaagagcacaatcccgtattggtaatttctttaaaaaggtaagcgattctaacatacccgtggtggaaaaatcagattatgagaaatttttcctgccattttacgctaaagatggagtcaaaacttgcgataagtggaaattaacaaaattacagctggaaaatagtaaaagaaagatagatgacgcactattgaatagcaatactgccaacgacgacgaacttttaagttggctaaagtccaaaaaggtggccagaggtcataagatcaaatgcagggccgttgaggttctacaacaaatgacactgaaagaaaagactgatgacgagcttcatgctctacttgcacaagtcccacacaaatacataaaattctacgaaaatgtgaggcccccattcattggaacatactctgtggatttcactttgccagcaaataatcctttttccacggacggtacaggattcaattacgattacgattctgatgtggaatgggctaacgaagacgaagaaggtgaagttgacaatctggagagcggcgaagaagaagaggaggaagatgacgaggatatgcccagtgagggagaattcgacgggtttctagacacggaggaaaatggcgacgttgatggtctatccggcgccaagagaaaattcgtaggcccactcataccaacaatttgtttaaaatccgactttgaaaacatgtcggatgaaaataagcgatattttcaatcactcaaagcggaagttctcatagaaacaaccgtaccaatagatcctttcaaagaccccaggccaccacccttgccgtccaaacgaagcaatcccgagctacaaacaccgaactctagtcaatctcaaagtcccgagaagaaacagaaaacaataatcacaaactcgaaggacttgcttcgactttttgatggcattcaagatagcacgttctcgctaggtacagtaaccgaaatagcacaaaagaacttgccacagtacaataaacaaacgatcaagaacacgattaaggaatacgccataaggggctcagggaagggtgatttgccccgaaaatgggagatcaaagacgtggcaaactgggaaaatctccgagcaaatgagactacaccaaatccatctacatgcctcgaccaaattaccagtatatag

SEQ ID NO: 6222 - DNA, 330 bp, Saccharomyces pastorianus
atgaacgtggccagtttctctctttcctccgcgctaggctcatcagggaacctcgccagcagcgtgtggaagtacttccacgacgcccggcccacctcctgcttcaccttctcgtctcccatcagcggcatgatcgtctgctgctcaatctccttcagccgggcctcattcttcaaagctgccgcctcctgtacctccttggcgccagcgtccgtcttgatcaggcttggcgtgctgatcgatagttcgttcgaggagaaaaacatccacagcccgacaatgcccagcgctgcgatgatcctgatagcatggctcctcttgactagttga

SEQ ID NO: 6223 - DNA, 462 bp, Saccharomyces pastorianus
atgcaatattttttacttttgtatttgaacatcctgagaaatatattgtggcatattctgccattgtttctgcttggggtttttttagtttggatggaaaaagggtatagatacaagaagaacatacaaccgtcaagatgcacgagaattaggtgctctcgttgtgatacaaagaagaaacatcccaagtggtctaagtataaattttgcttgcagtttttcttgttatatgtttctttagcctcatttaatatattcattcagtggcaacctataggagatgagatatttcataaagaagagcttggacgggtcccactatacccatttctctttggtgccgcactgatccatttattaacgttccatctatttaaggagtactatctgcataatggacctcttgaaacgaatgatggtggtgttcccggtgaaaagagggcagcaaccaagaaatattaa

SEQ ID NO: 6224 - DNA, 255 bp, Saccharomyces pastorianus
atgatgaaaagtattggagaaggcagtgctaaagtcactatcacagagaaggatgaagctcctccaccactagcgatcagacttactaccaaagcaatgagatggatatttttggtgaaaatgctcgaacactcaattgtaccagatgcaatattttttacttttgtatttgaacatcctgagaaatatattgtggcatattctgccattgtttctgcttggggtttttttagtttggatggaaaaagggtatag

SEQ ID NO: 6225 - DNA, 294 bp, Saccharomyces pastorianus
atgtacgtaaccaaaaagatcgggaaactgtttatatatgaatcacgcatctctatcagtctacgttcgtaccttttttggcttttcgagaaaatttttcatttctcgaagctcttcagagatcgcgagcggaacggaaaacgccgccggtcttcccgaaagaaaaaaaaacgaaagagagataatagcggtgggaaaacggaaatcccagcgggtacccggcgcggggatatagtgcacgtgcttttaggcccgctggcaggccgggtaacgagagctgctctggtaatctga

SEQ ID NO: 6226 - DNA, 819 bp, Saccharomyces pastorianus
  modified_base (801)..(801): a, c, g, t, unknown, or other
atgacgaccacatcaacgcttactggaagcacatctttgtcgagcacagcaacggcttcgacttcggcagttagaggtaccgacggatgcgtggtttgcgataccggggcatcgtgccctgattgcccttcaggcgaatactgtgttatgacttcattaacgtgcgacagctgttccaccttctcttgtgtcaagcagcccagctcacaactaaatggtttaaacagtacttccactagttctagttctcatagttctaacaaaaatggagagatcattggagtcacactgggcgttatcggtggtgtagtggttattgttttggtgacgttattttttatcaatgagaaatactggaagcctagaaggcaaagaaacaaggctttgagattagaagagggatcgcgaaattatgggaacgaagacgaatactttgaggacgaagatgaagacgacgatgatgatgatgatgaagacgacgacgacgacgaagacgacggggacatgagaaaggatgaaaattacaccaagttcaatgcgccattggttcctccaaacctcaacgcccccggaaatagaagttctacatccactacgcgcacaagggcctctaatatcctgcccattgcttacatccccggtgtgacaagcgcactgactgctgagaagttgcagtcaaagctacgttcgagcgctaagagacaaaacgcagccggcgacattagatcacatatcacgttgggctcatccatcctagatggcctagatgaagagtacgatgaccacaacttgggcgcaaancagggactcggaagataa

SEQ ID NO: 6227 - DNA, 420 bp, Saccharomyces pastorianus
atgggtaaagagaagtctcatattaacgtcgtcgttatcggtcatgtcgattctggtaagtctaccactaccggtcatttgatttacaagtgtggtggtattgacaagagaaccatcgaaaagtttgaaaaggaagccgccgaattaggtaagggttctttcaagtacgcttgggttttggacaagttaaaggctgaaagagaaagaggtatcaccattgatatcgctttgtggaagttcgaaactccaaagtaccaagttaccgttattgatgctccaggtcacagagatttcatcaagaacatgattactggtacttctcaagctgattgtgctatcttgattattgctggtggtgtcggtgaattcgaagccggtatttctaaggatgtcaaaccagagacacgctttgttggcttt

SEQ ID NO: 6228 - DNA, 120 bp, Saccharomyces pastorianus
atgtcacgccaccagttcgacttaataatgtgtttgaaacagcctggcacacagataggccttctttgcgaaaaatgtgatggaaaatgccccatctgcgactcttacgtaaggcactaa

SEQ ID NO: 6229 - DNA, 552 bp, Saccharomyces pastorianus
atgagcagcttaaaaattacagatagaaaagaagtacctgttagttttagcgagaaaatcgatgagttagtacagaaagaatttgcaagaacggaaaaagagtgtgttcatcccgaagtacgagatataattgtcaagggcaagggtcccggtaaaagtatcaagggacttccagaggaattgtacaataaatatttacaacagtgtcataatgaaaagaagcgacatttggatgatgatgatgatgatactttttttatgcaagaatacaaacgccaatatcccaggatagatacttctagatacgtaccgcacgggactgctgacgtcaacttattaggaataacggactcctacttaaaacatcaagaattaactttaagcacgcttctgccgcggactgtgtcgaaccagtggataatcaataatgatcaaattcaacaaacggctgaaatagttgaggagatgagcagtcagcaaaggaaacagatacataacctggaaatatacagacaaaagctgcaacaccgatacgagtcttcgtctttataa

SEQ ID NO: 6230 - DNA, 990 bp, Saccharomyces pastorianus
atgtctcgtattattgtgaagggtttacctgtctacttgacggacgataatttaaaagagcattttacaaagaggttgcgtcagaagcactctcatcaagctgtcagtggcagcggtccagacctcataacggatgttaagattcttagggacagaaatggggaaagcagaaggtttggttttatcggttaccgtaatgaggaagacgcctttgacgccgtcgactatttcaatggcagttttgttaatacttctaagatagaggtttccatggccaaaagttttgcagacccaggagttccgcagcctatgaaggagaagagaagggaagcttacaagagattcagagagaatgaggaaaaactgcttcaggaacaaaaccaaaagaaggcgaaactagacgataataagcacaccaacatcgatgaagagattcgtaagaacaagcatttacaagagtttatggaaacaatgaagccaagttcacaagtaacatcgtgggaaaagataggcattgacaagagtatagaagacaaaaggcaaccacaacaaccaacagaagatgactcccatgtacaggggaactctttattggcacatgctttggctttgaaaggagatgataaagacgaagcaccaagactggttattgagcatgaaagtgatgacgagtattctgctttcaacaacaacaaggatgaaggtcaagacaatgaaggagaggaagaaaagatgataagtctagataatttggagaacgccaacgcaaccatgggcaatgatgatgatgatgataataacgatgaagcggaaaacgagaaaaggagaagcctcgcccaaaatgagcaggtctctgattttgactggttcaaacaacgtcgtatcagaattaaagaaagcgagggagaagcaagagataagttggccgcagccgctgctgaacaaatgacaacggcgacgctgaagaagagacacaaccagaaccagtag

SEQ ID NO: 6231 - DNA, 171 bp, Saccharomyces pastorianus
atgcaggtaggatttttttctcctactctggtaaaggttttctttgcttcggaaattagaagtttatcagcaaaatgtctaaagactcgtccttgttgttcagcaacatcttctttcaatctcgatgcaatgatatccttatccaaatcaccagcatcaaagttattgtaa

SEQ ID NO: 6232 - DNA, 672 bp, Saccharomyces pastorianus
atggaaaaatataccacttggagagataatggtactgggatagctccgtttttaccaaacacagtcaggaagcccagttcgatggcgacagcgtgttcaatggtcatactggcagtgaaagctgttgttgcgctaccattgattctaatatatagctttaccaagcagaatgtgctgctcggtctaatattgaagctcgtattcagttggaaggaagaagtaagtgtacagggcatcaagaaacgtgatgtggaaaaatccaaacactacccacagaagggaaacctttatatttgcaattgtacttcacctttggaagccctgtcagcagtgctgttagcgcagggacccgtgtcgttgttggtaccatccaacgatatcgtatacaaagtttctgtgaaggaattctttgatttcatcctagcaggtgggttagatatcaagctttacggccacgaagtcgccggactagaccaattgagcaacactgtaaatttcatgttcgccgaggggacctcgtgtaatggtaagagtgttttaccttttagcataagcgggagaaaattaaaggaattcattgatccttcactggccacaatgacccttgcgatggccaaagataaaaatttgagctgcagaccatccagatcaagaccaacaaaactgccataa

SEQ ID NO: 6233 - DNA, 666 bp, Saccharomyces pastorianus
atggcattgaataatttcacggcacccttctgggcaatctttctaagcgttgtttctttttcaagtacttttctgacatttccagattttccttctcccgccgtaatgggaataatatcccgttttctagcttttcctaacagcttctttttttcggctagcatttcctttttggccttgtattctagcttttctgtttcagtttgtttcagcacttttttatttctggccatgatagggtcctttctgtcatatgccttcaagtgcgatgacagaatagcattgacggcagtagagaagtcagcagaaccatcgtcatgcttacttttcttcgatttcctttttcttgggaaatcttcatcttcttctacttcagcgccgtcctcattgtcatctccagatgatttgtcatccgaattgtcttgttcacttgcttcctcttcttcttccgatgcagcctctttttccagtttttttttcaactctaccttattttttttgtgcccatcctctgcgtctcttctagttctctttttctgtgtagcttttactgtattcttaggtcccattataaactactgtgctgagtttttttcaccttacacacttattcaactacagtactacttcaacacattattatattttatgggcatcgattcttaa

SEQ ID NO: 6234 - DNA, 207 bp, Saccharomyces pastorianus
atgaaacctgttgtatccactggcaaggcatggtgctgtaccgtcctatcggcgtttggtgtggtgattctttccgtgattgctcatatgtttaacacaaaccatgaatcctttgtaggatcaataaacgatcctgaagacggacctgcgtatgttatatcctttcttataccctttctgttttcgttaccttccacgatctcttaa

SEQ ID NO: 6235 - DNA, 108 bp, Saccharomyces pastorianus
atgttatatcctttcttataccctttctgttttcgttaccttccacgatctcttaaatcttcctcccttactaactatcattgtaaataccatctccgttgtttatag

SEQ ID NO: 6236 - DNA, 1971 bp, Saccharomyces pastorianus
atggatttactacgtattttggatacgaaaccaatacccacaattgtcgatgccactaccttgggcatatcaggcaacacctccggtgattattggctaccaactacaatgtcgctttaccaaaaggaacttacagatcagatagtgtcactacactattctgacattttgagatattttgaaacttcgcattataaagaggatgtcatcctcgagtctatgcggactatgtgtctgaatggttcactggtagcaacccatccgtacttattgatagaccattatatgcctaaatcattaatcactagagatgttcctgcacatttggcagagagtggtgggaagttcaacgttttgagagatcttataaaccttgttcaagaatatgaaaccgagacggccattgtctgcaggccaggaagaacaatggatttgttggaggctttacttctggggaacaaggtacatattaaaagatacgatggtcattccatcaagtcaaagcagaagcctaatgatttttcatgtactgttcatttatttccttctgaaggtttgaaattagtacagcatccgataaaatctaaggctcggtttgatatgctgatctgtttagacaccacggtggacacaactcataaagatatccaatacatcttacaatataagagagagaagaaaggtcttgaaaagtatgctccggttgttagattagtagccattaattcgattgaccattgtactttatttttcggtaaaaaattcgataagaatagtagagaatacttggagaatgtcactgcagctatggtaatcctgagggaccgtttaggtacgctaccaccggatttgagacctatttattcacaaaaattacattacttggtagactggttagaaaccccaacagtaccgtggcccttaccagatatttatccattaaagcaatacacctcgatggatgtagaaagatctttgttaacagaagttcatttcaaaaaatcagatgaccaattagaagacgcctttgctaactattcaaaaaaaagagggcgttgtgggcctaataaatcatcatcgcctaatgctgttggaatcgaggatactgacgctccatgtttctattccaccaaaagattgaagaatgattattacacaaatccattgaaacaagatatgactcaattaacaggtatcaccactgctgacaactcctctggtgtaaattatcatttatcgagtggaattataacacataaattgatccagtcaatgggggaaatatatatggatatttgcttgcaaaaacaaaagctaaacgactactcgtgtctgaacgctttacaagatgatcatttacaattcttcttgaacaaagatgaaaaaattgttaaagaatatgatggggcagtacgaacgaatagtgaaaacttaaaaaagtcccacgaactagaagttggaagcagctctaagttatcccaaattgaaacattagagaaagaaattgaaattctgaagaaaaatttagcggctcaaggtgaaagattcgccaaattagaagaattattcattaaaactattaatttacaagatgagatcgagaaggaagacagaataaataaatcaaaagatgctgaaagggaatatatggaacaagaaattaaaagagcaggtgatgctataagagaaaatggcgaagagacaagcaagcttggtaataatagaagagaattagaaaatgaactgaaattgaaacttggagacgctgagactatcaaggaagaactgcgggagaagatttcccttctaaaaggggaaattaagcttgaaaatgatttgaataaagagttagtagaacaattgtccaagacaatggaaaatttagaaaatttatcaatatcaagagtacgtactcagaatggtaatatgaagaaaaaacccaaaacgaaaaaccaggtagtatataagtaa

SEQ ID NO: 6237 - DNA, 25 bp, Saccharomyces pastorianus
aagacggtcttaacggtgccatcat

SEQ ID NO: 6238 - DNA, 25 bp, Saccharomyces pastorianus
gaaaagcagtccaccatcaagatta

SEQ ID NO: 6239 - DNA, 25 bp, Saccharomyces pastorianus
gatatttccgaactcagcaactgca

SEQ ID NO: 6240 - DNA, 25 bp, Saccharomyces pastorianus
tccaatggacatcacgctgcatgag

SEQ ID NO: 6241 - DNA, 25 bp, Saccharomyces pastorianus
cacgccgctaaggacagtatcgaat

SEQ ID NO: 6242 - DNA, 25 bp, Saccharomyces pastorianus
ggatacgactacactttcgactgct

SEQ ID NO: 6243 - DNA, 25 bp, Saccharomyces pastorianus
gttgcagtgacattgccgtctcaga

SEQ ID NO: 6244 - DNA, 25 bp, Saccharomyces pastorianus
atgtctgacgtttagaggcaccgcc

SEQ ID NO: 6245 - DNA, 25 bp, Saccharomyces pastorianus
gttgccaaggccagacacatgatca

SEQ ID NO: 6246 - DNA, 25 bp, Saccharomyces pastorianus
gaatgcttccattcaatgtctgacg

SEQ ID NO: 6247 - DNA, 25 bp, Saccharomyces pastorianus
gacttcgaggcggtgatccaggcta

SEQ ID NO: 6248 - DNA, 25 bp, Saccharomyces pastorianus
aagaggtcgtccaggcgattcacaa

SEQ ID NO: 6249 - DNA, 25 bp, Saccharomyces pastorianus
aaaggtagttcagcttcggttcttg

SEQ ID NO: 6250 - DNA, 25 bp, Saccharomyces pastorianus
gccagacgcctaggtgtcgagattt

SEQ ID NO: 6251 - DNA, 25 bp, Saccharomyces pastorianus
aatcaccggttcgattggctatgtc

SEQ ID NO: 6252 - DNA, 25 bp, Saccharomyces pastorianus
cgccggccagatagtggtctctgaa

SEQ ID NO: 6253 - DNA, 25 bp, Saccharomyces pastorianus
gcagtcaagctgtcaggcttccaaa

SEQ ID NO: 6254 - DNA, 25 bp, Saccharomyces pastorianus
aatccgtggaagcactacgtggttt

SEQ ID NO: 6255 - DNA, 25 bp, Saccharomyces pastorianus
agctactttcgatgcctccttaaaa

SEQ ID NO: 6256 - DNA, 25 bp, Saccharomyces pastorianus
taaggagtccaacgtcaagattctg

SEQ ID NO: 6257 - DNA, 25 bp, Saccharomyces pastorianus
tttgaccctaggaagcacggcgaga

SEQ ID NO: 6258 - DNA, 25 bp, Saccharomyces pastorianus
attccagccaatgaacgtcactctt

SEQ ID NO: 6259 - DNA, 25 bp, Saccharomyces pastorianus
gcagagatttgtcaggttcgtcatt

SEQ ID NO: 6260 - DNA, 25 bp, Saccharomyces pastorianus
gtagcaattctagccacatcctatt

SEQ ID NO: 6261 - DNA, 25 bp, Saccharomyces pastorianus
ggttgcgcaagttccaatgcatact

SEQ ID NO: 6262 - DNA, 25 bp, Saccharomyces pastorianus
gatgccctgcctcgagaaagtgact

SEQ ID NO: 6263 - DNA, 25 bp, Saccharomyces pastorianus
gtaagtctgtccaagggctgtctat

SEQ ID NO: 6264 - DNA, 25 bp, Saccharomyces pastorianus
gaaagtgactcttcggccaaagaca

SEQ ID NO: 6265 - DNA, 25 bp, Saccharomyces pastorianus
aacgaatcattcaaccgggtcatca

SEQ ID NO: 6266 - DNA, 25 bp, Saccharomyces pastorianus
ggatgcgttctataactctgggaat

SEQ ID NO: 6267 - DNA, 25 bp, Saccharomyces pastorianus
tggcgctacgatcgttcctgaagat

SEQ ID NO: 6268 - DNA, 25 bp, Saccharomyces pastorianus
tgacgaagtggttcttttggtccct

SEQ ID NO: 6269 - DNA, 25 bp, Saccharomyces pastorianus
tttggtccctacgagtcatactaac

SEQ ID NO: 6270 - DNA, 25 bp, Saccharomyces pastorianus
atcgaggacccaatcgtggcggaat

SEQ ID NO: 6271 - DNA, 25 bp, Saccharomyces pastorianus
gacgtttctactttagccaaccctg

SEQ ID NO: 6272 - DNA, 25 bp, Saccharomyces pastorianus
aaaggacatcggtccatttgccgcc

SEQ ID NO: 6273 - DNA, 25 bp, Saccharomyces pastorianus
cacttatttgaatccttatcccggt

SEQ ID NO: 6274 - DNA, 25 bp, Saccharomyces pastorianus
aagcgatcaattaggcgacgtttct

SEQ ID NO: 6275 - DNA, 25 bp, Saccharomyces pastorianus
cggtagccgcatttgtggtcttaaa

SEQ ID NO: 6276 - DNA, 25 bp, Saccharomyces pastorianus
accgctgagatagaagccgccatca

SEQ ID NO: 6277 - DNA, 25 bp, Saccharomyces pastorianus
tgaagaagtcaaatcctcccacgca

SEQ ID NO: 6278 - DNA, 25 bp, Saccharomyces pastorianus
aaacacttggttttcactgtcagaa

SEQ ID NO: 6279 - DNA, 25 bp, Saccharomyces pastorianus
atcccggttattacttcacaggcga

SEQ ID NO: 6280 - DNA, 25 bp, Saccharomyces pastorianus
ggacatcgtctatcaaccgctgaga

SEQ ID NO: 6281 - DNA, 25 bp, Saccharomyces pastorianus
aacgagttcgtcctctttcaaacag

SEQ ID NO: 6282 - DNA, 25 bp, Saccharomyces pastorianus
ttccgtgacgataccttcggcaaga

SEQ ID NO: 6283 - DNA, 25 bp, Saccharomyces pastorianus
tgtacaacctacatctgccgttatg

SEQ ID NO: 6284 - DNA, 25 bp, Saccharomyces pastorianus
atccggatgttcgttaccaaccaat

SEQ ID NO: 6285 - DNA, 25 bp, Saccharomyces pastorianus
tcacctgtactttggcattgcttca

SEQ ID NO: 6286 - DNA, 25 bp, Saccharomyces pastorianus
gaaagacgaccgtgtgtccttcatc

SEQ ID NO: 6287 - DNA, 25 bp, Saccharomyces pastorianus
gaggaaggccgtcatggacaccaat

SEQ ID NO: 6288 - DNA, 25 bp, Saccharomyces pastorianus
ttactactattcaccattgtcacct

SEQ ID NO: 6289 - DNA, 25 bp, Saccharomyces pastorianus
gtgttcgctttgttcttactactat

SEQ ID NO: 6290 - DNA, 25 bp, Saccharomyces pastorianus
gtcgggacttccaatcaatcatatt

SEQ ID NO: 6291 - DNA, 25 bp, Saccharomyces pastorianus
tggtaactttctgtctccacaatac

SEQ ID NO: 6292 - DNA, 25 bp, Saccharomyces pastorianus
agatgagcttttcgtgaaccaccca

SEQ ID NO: 6293 - DNA, 25 bp, Saccharomyces pastorianus
ggaggcttttttgggcagatcgttc

SEQ ID NO: 6294 - DNA, 25 bp, Saccharomyces pastorianus
gaagctgcactggatcctggtaaaa

SEQ ID NO: 6295 - DNA, 25 bp, Saccharomyces pastorianus
tgtattctccaacgatcaagccaag

SEQ ID NO: 6296 - DNA, 25 bp, Saccharomyces pastorianus
aacaccccagggttgccagaagaag

SEQ ID NO: 6297 - DNA, 25 bp, Saccharomyces pastorianus
tctctgctctttcacgctgatgaaa

SEQ ID NO: 6298 - DNA, 25 bp, Saccharomyces pastorianus
gagtcgttctcctatttggtttcgc

SEQ ID NO: 6299 - DNA, 25 bp, Saccharomyces pastorianus
aagatgccacatgcaacccgatgaa

SEQ ID NO: 6300 - DNA, 25 bp, Saccharomyces pastorianus
ttggtttcgctcctggacaaattca

SEQ ID NO: 6301 - DNA, 25 bp, Saccharomyces pastorianus
aaacagctctcatcttagggtctac

SEQ ID NO: 6302 - DNA, 25 bp, Saccharomyces pastorianus
ctaccattggtatttgtggcctcca

SEQ ID NO: 6303 - DNA, 25 bp, Saccharomyces pastorianus
tccacgatacttcgctgtacgacaa

SEQ ID NO: 6304 - DNA, 25 bp, Saccharomyces pastorianus
accgtcatggacaagctgctctaca

SEQ ID NO: 6305 - DNA, 25 bp, Saccharomyces pastorianus
gggtctgcgcagatcaaccgaattc

SEQ ID NO: 6306 - DNA, 25 bp, Saccharomyces pastorianus
ggaacatccactttgctcctggcaa

SEQ ID NO: 6307 - DNA, 25 bp, Saccharomyces pastorianus
gtctgttcgtgttcttcgagatgtc

SEQ ID NO: 6308 - DNA, 25 bp, Saccharomyces pastorianus
atgtctccgcttaaggtcatcaaca

SEQ ID NO: 6309 - DNA, 25 bp, Saccharomyces pastorianus
aggtgtttccggacattgccacgca

SEQ ID NO: 6310 - DNA, 25 bp, Saccharomyces pastorianus
ggtccggcttcatcctgaactgtat

SEQ ID NO: 6311 - DNA, 25 bp, Saccharomyces pastorianus
gtacgacaagacatccgacctgaac

SEQ ID NO: 6312 - DNA, 25 bp, Saccharomyces pastorianus
gtcaatcacctgagcttcggcaagc

SEQ ID NO: 6313 - DNA, 25 bp, Saccharomyces pastorianus
agaccgctcagttcagtgccacgta

SEQ ID NO: 6314 - DNA, 25 bp, Saccharomyces pastorianus
ggaattctaccgttcccaagaactg

SEQ ID NO: 6315 - DNA, 25 bp, Saccharomyces pastorianus
cacaccgtctcttatgtcaaacaga

SEQ ID NO: 6316 - DNA, 25 bp, Saccharomyces pastorianus
gctgcccctacacacttaaagaaaa

SEQ ID NO: 6317 - DNA, 25 bp, Saccharomyces pastorianus
attagcttgcgtctatccgaatacc

SEQ ID NO: 6318 - DNA, 25 bp, Saccharomyces pastorianus
gccgccacagattatttctcagatc

SEQ ID NO: 6319 - DNA, 25 bp, Saccharomyces pastorianus
ctcgtccactcaatattctttcaaa

SEQ ID NO: 6320 - DNA, 25 bp, Saccharomyces pastorianus
aagatcaacttcatccacggattgt

SEQ ID NO: 6321 - DNA, 25 bp, Saccharomyces pastorianus
gctacaaaatttaccgatgcgctca

SEQ ID NO: 6322 - DNA, 25 bp, Saccharomyces pastorianus
agattaatgcccatcagacccatag

SEQ ID NO: 6323 - DNA, 25 bp, Saccharomyces pastorianus
gtacagtaacatctttgcccaatcc

SEQ ID NO: 6324 - DNA, 25 bp, Saccharomyces pastorianus
agacccatagtcagtgcacactcat

SEQ ID NO: 6325 - DNA, 25 bp, Saccharomyces pastorianus
gtaagccagttatctgtgctaccca

SEQ ID NO: 6326 - DNA, 25 bp, Saccharomyces pastorianus
tgtcttcccattcgttttcgaaaag

SEQ ID NO: 6327 - DNA, 25 bp, Saccharomyces pastorianus
ttacttgccaaactacgatgacatg

SEQ ID NO: 6328 - DNA, 25 bp, Saccharomyces pastorianus
agaaactgtactccaaagccaacct

SEQ ID NO: 6329 - DNA, 25 bp, Saccharomyces pastorianus
ttatctgtgctacccaaatgttgga

SEQ ID NO: 6330 - DNA, 25 bp, Saccharomyces pastorianus
aacccaagaccaaccagagctgaag

SEQ ID NO: 6331 - DNA, 25 bp, Saccharomyces pastorianus
ttgaagcccgtatcaacttcggtat

SEQ ID NO: 6332 - DNA, 25 bp, Saccharomyces pastorianus
acttgtacagaggtgtcttcccatt

SEQ ID NO: 6333 - DNA, 25 bp, Saccharomyces pastorianus
aacgctatcttggatggtgctgact

SEQ ID NO: 6334 - DNA, 25 bp, Saccharomyces pastorianus
aaggctatcattgtcttgtccactt

SEQ ID NO: 6335 - DNA, 25 bp, Saccharomyces pastorianus
catccaaggtttcaaggccggtgct

SEQ ID NO: 6336 - DNA, 25 bp, Saccharomyces pastorianus
taattcaaacgttctcaccggcgaa

SEQ ID NO: 6337 - DNA, 25 bp, Saccharomyces pastorianus
aacatctcggtaacatcttggtggt

SEQ ID NO: 6338 - DNA, 25 bp, Saccharomyces pastorianus
tgtggcaacctacccgagaattact

SEQ ID NO: 6339 - DNA, 25 bp, Saccharomyces pastorianus
agagcaatcctgaacttacccatta

SEQ ID NO: 6340 - DNA, 25 bp, Saccharomyces pastorianus
ccggcgaaccgttggtgcaatacca

SEQ ID NO: 6341 - DNA, 25 bp, Saccharomyces pastorianus
gcaataccaggcgttcaatgatcta

SEQ ID NO: 6342 - DNA, 25 bp, Saccharomyces pastorianus
aaaggactacaagagctcgcgcaag

SEQ ID NO: 6343 - DNA, 25 bp, Saccharomyces pastorianus
aatccagtcactaccgcaattttgt

SEQ ID NO: 6344 - DNA, 25 bp, Saccharomyces pastorianus
agagtaattgcttgtcacccatcag

SEQ ID NO: 6345 - DNA, 25 bp, Saccharomyces pastorianus
aattttgattcgtcgtcaacccaag

SEQ ID NO: 6346 - DNA, 25 bp, Saccharomyces pastorianus
ggtggtatcatcacactcacatgat

SEQ ID NO: 6347 - DNA, 25 bp, Saccharomyces pastorianus
gtgtcaagcaccaacctcagtatgt

SEQ ID NO: 6348 - DNA, 25 bp, Saccharomyces pastorianus
ttgctatacagaatccccaacgcgg

SEQ ID NO: 6349 - DNA, 25 bp, Saccharomyces pastorianus
tggaggcctcgtccagaaggtacat

SEQ ID NO: 6350 - DNA, 25 bp, Saccharomyces pastorianus
atacctgattttaccgatccggtgg

SEQ ID NO: 6351 - DNA, 25 bp, Saccharomyces pastorianus
gaacacagttcctttgacccacttg

SEQ ID NO: 6352 - DNA, 25 bp, Saccharomyces pastorianus
ggtacatgcctgcagtttatgcttt

SEQ ID NO: 6353 - DNA, 25 bp, Saccharomyces pastorianus
ggatccgtttgaacaagtctccacc

SEQ ID NO: 6354 - DNA, 25 bp, Saccharomyces pastorianus
agtctccacctgacattttgatcaa

SEQ ID NO: 6355 - DNA, 25 bp, Saccharomyces pastorianus
gggtggtatttctatcacgaacaca

SEQ ID NO: 6356 - DNA, 25 bp, Saccharomyces pastorianus
catctcgtccggtcaagattggaat

SEQ ID NO: 6357 - DNA, 25 bp, Saccharomyces pastorianus
acttgattgatgtcctggaggcctc

SEQ ID NO: 6358 - DNA, 25 bp, Saccharomyces pastorianus
gaagggccaaactgccgccggtgtt

SEQ ID NO: 6359 - DNA, 25 bp, Saccharomyces pastorianus
ccggtgttgctgtccgtctggaaga

SEQ ID NO: 6360 - DNA, 25 bp, Saccharomyces pastorianus
gtctggaagatccttctggccaaca

SEQ ID NO: 6361 - DNA, 25 bp, Saccharomyces pastorianus
gggactccaatatgtactgttaaaa

SEQ ID NO: 6362 - DNA, 25 bp, Saccharomyces pastorianus
gttgctagatctgattggctactgt

SEQ ID NO: 6363 - DNA, 25 bp, Saccharomyces pastorianus
cgattcatttactgcataccaagag

SEQ ID NO: 6364 - DNA, 25 bp, Saccharomyces pastorianus
tgccgtaatgttgtgtttcgatgtc

SEQ ID NO: 6365 - DNA, 25 bp, Saccharomyces pastorianus
caaccatcaacctgttccagaagtc

SEQ ID NO: 6366 - DNA, 25 bp, Saccharomyces pastorianus
aaatcatcaacaagcgtggtccaat

SEQ ID NO: 6367 - DNA, 25 bp, Saccharomyces pastorianus
agatctctggatactttgaaggaca

SEQ ID NO: 6368 - DNA, 25 bp, Saccharomyces pastorianus
aatgccgacattatctatcacttat

SEQ ID NO: 6369 - DNA, 25 bp, Saccharomyces pastorianus
aggactaacaatatcttacggaggt

SEQ ID NO: 6370 - DNA, 25 bp, Saccharomyces pastorianus
ggccaatgggaaacacagcaaggat

SEQ ID NO: 6371 - DNA, 25 bp, Saccharomyces pastorianus
ggaggcactattacaaaaactgaag

SEQ ID NO: 6372 - DNA, 25 bp, Saccharomyces pastorianus
gacattactgagtagttcattacga

SEQ ID NO: 6373 - DNA, 25 bp, Saccharomyces pastorianus
gaaacgttctccgaattcctgaaga

SEQ ID NO: 6374 - DNA, 25 bp, Saccharomyces pastorianus
cgtggatagtgaaagcaccagttca

SEQ ID NO: 6375 - DNA, 25 bp, Saccharomyces pastorianus
ggaagctgtcaaactagatatcgaa

SEQ ID NO: 6376 - DNA, 25 bp, Saccharomyces pastorianus
gttactaggcgatggcgagacagaa

SEQ ID NO: 6377 - DNA, 25 bp, Saccharomyces pastorianus
aggccagtccgctgaatctagtata

SEQ ID NO: 6378 - DNA, 25 bp, Saccharomyces pastorianus
aaacctatagacgacacaatgacat

SEQ ID NO: 6379 - DNA, 25 bp, Saccharomyces pastorianus
gagacagaaggccagtccgctgaat

SEQ ID NO: 6380 - DNA, 25 bp, Saccharomyces pastorianus
gatgaacaaaacttcctctacgcct

SEQ ID NO: 6381 - DNA, 25 bp, Saccharomyces pastorianus
agaaaaccccaagccaacgaagatg

SEQ ID NO: 6382 - DNA, 25 bp, Saccharomyces pastorianus
gaatggcggtgaaaccttggctata

SEQ ID NO: 6383 - DNA, 25 bp, Saccharomyces pastorianus
tgaaatcatcgagcgctctgacagc

SEQ ID NO: 6384 - DNA, 25 bp, Saccharomyces pastorianus
gaggtctaattccttacaagcttcc

SEQ ID NO: 6385 - DNA, 25 bp, Saccharomyces pastorianus
gcgccctcaccaaaggtatcgagta

SEQ ID NO: 6386 - DNA, 25 bp, Saccharomyces pastorianus
aacattgtacctggattcggaatca

SEQ ID NO: 6387 - DNA, 25 bp, Saccharomyces pastorianus
gtataagtaactctccctcagtgaa

SEQ ID NO: 6388 - DNA, 25 bp, Saccharomyces pastorianus
gaagccggcggtgttacactatcca

SEQ ID NO: 6389 - DNA, 25 bp, Saccharomyces pastorianus
gagtaagattcaccggtgtgccacc

SEQ ID NO: 6390 - DNA, 25 bp, Saccharomyces pastorianus
tacaagcttccactatgaccctaaa

SEQ ID NO: 6391 - DNA, 25 bp, Saccharomyces pastorianus
attcaaactgctattcgatttctgg

SEQ ID NO: 6392 - DNA, 25 bp, Saccharomyces pastorianus
gatttcgatgcagctatgcttcaat

SEQ ID NO: 6393 - DNA, 25 bp, Saccharomyces pastorianus
tggtatgctttgaaccctgcacaaa

SEQ ID NO: 6394 - DNA, 25 bp, Saccharomyces pastorianus
gcacgtttgcaacccctagtggtga

SEQ ID NO: 6395 - DNA, 25 bp, Saccharomyces pastorianus
gtggcttcgacgcacaaggcttagc

SEQ ID NO: 6396 - DNA, 25 bp, Saccharomyces pastorianus
ttcaattcaaattccacggtacagt

SEQ ID NO: 6397 - DNA, 25 bp, Saccharomyces pastorianus
agatcatgctcaccaacgatttcga

SEQ ID NO: 6398 - DNA, 25 bp, Saccharomyces pastorianus
gatgcgcgttctaaccttattcaaa

SEQ ID NO: 6399 - DNA, 25 bp, Saccharomyces pastorianus
gaagtacaaacccaccagcaagaac

SEQ ID NO: 6400 - DNA, 25 bp, Saccharomyces pastorianus
gagccaaaaaccgacgatgcgcgtt

SEQ ID NO: 6401 - DNA, 25 bp, Saccharomyces pastorianus
aaagtgtcaagctcctacagttcaa

SEQ ID NO: 6402 - DNA, 25 bp, Saccharomyces pastorianus
aagtttactctagttgccatccctg

SEQ ID NO: 6403 - DNA, 25 bp, Saccharomyces pastorianus
gaaagccgctttagttactaaccag

SEQ ID NO: 6404 - DNA, 25 bp, Saccharomyces pastorianus
ttctgcgaacccctttagtgataat

SEQ ID NO: 6405 - DNA, 25 bp, Saccharomyces pastorianus
gtacgaaccggaaacataccatgtt

SEQ ID NO: 6406 - DNA, 25 bp, Saccharomyces pastorianus
gccgcatgtccagcaatttcagaat

SEQ ID NO: 6407 - DNA, 25 bp, Saccharomyces pastorianus
acatacgtatgggtccggtgtgttt

SEQ ID NO: 6408 - DNA, 25 bp, Saccharomyces pastorianus
attgtcttaccgatttttgccttag

SEQ ID NO: 6409 - DNA, 25 bp, Saccharomyces pastorianus
ttcccacacgctaacgtttcaagag

SEQ ID NO: 6410 - DNA, 25 bp, Saccharomyces pastorianus
atccctggatccttcttattttggt

SEQ ID NO: 6411 - DNA, 25 bp, Saccharomyces pastorianus
gtgagttgcaagatgcttctgcgaa

SEQ ID NO: 6412 - DNA, 25 bp, Saccharomyces pastorianus
tataaccgattcaaggccgcatgtc

SEQ ID NO: 6413 - DNA, 25 bp, Saccharomyces pastorianus
ggtgcttacggtgacaagccattga

SEQ ID NO: 6414 - DNA, 25 bp, Saccharomyces pastorianus
atagcgatagcgacagtgacgatga

SEQ ID NO: 6415 - DNA, 25 bp, Saccharomyces pastorianus
gcactaaggctaaacgtccaaaggt

SEQ ID NO: 6416 - DNA, 25 bp, Saccharomyces pastorianus
aaaggcattacgttggtgtggcacc

SEQ ID NO: 6417 - DNA, 25 bp, Saccharomyces pastorianus
ataacggagagacgtttggcgctaa

SEQ ID NO: 6418 - DNA, 25 bp, Saccharomyces pastorianus
aatacgtcgacgtgaacgatctaga

SEQ ID NO: 6419 - DNA, 25 bp, Saccharomyces pastorianus
gacgtaagaagaccgctagcactaa

SEQ ID NO: 6420 - DNA, 25 bp, Saccharomyces pastorianus
gaagcatcaagtgccagtgaaagcg

SEQ ID NO: 6421 - DNA, 25 bp, Saccharomyces pastorianus
aatggttagccgattctgataaaga

SEQ ID NO: 6422 - DNA, 25 bp, Saccharomyces pastorianus
gacaaggatagctccaagagacgta

SEQ ID NO: 6423 - DNA, 25 bp, Saccharomyces pastorianus
gacaagccattgaacgtggacgaaa

SEQ ID NO: 6424 - DNA, 25 bp, Saccharomyces pastorianus
aggttcaacctgactgtggactgga

SEQ ID NO: 6425 - DNA, 25 bp, Saccharomyces pastorianus
gaaatgagactttatccgggattga

SEQ ID NO: 6426 - DNA, 25 bp, Saccharomyces pastorianus
agcgatttattcatgttgcggacca

SEQ ID NO: 6427 - DNA, 25 bp, Saccharomyces pastorianus
gtgtacctttcggacttgtcagcaa

SEQ ID NO: 6428 - DNA, 25 bp, Saccharomyces pastorianus
aagctggttacaactactggtgaga

SEQ ID NO: 6429 - DNA, 25 bp, Saccharomyces pastorianus
tcgagccaggcgatcttttaacttg

SEQ ID NO: 6430 - DNA, 25 bp, Saccharomyces pastorianus
gagattcttcttaccaaaagctcca

SEQ ID NO: 6431 - DNA, 25 bp, Saccharomyces pastorianus
ggctttaagttcatcggttgttcaa

SEQ ID NO: 6432 - DNA, 25 bp, Saccharomyces pastorianus
gacgcttggcgtttgatcgagccag

SEQ ID NO: 6433 - DNA, 25 bp, Saccharomyces pastorianus
ttcaaaggtttaccgacgcttggcg

SEQ ID NO: 6434 - DNA, 25 bp, Saccharomyces pastorianus
agtaaacccactggtaggctgcgtc

SEQ ID NO: 6435 - DNA, 25 bp, Saccharomyces pastorianus
ggtctacatttcgttccatttgtca

SEQ ID NO: 6436 - DNA, 25 bp, Saccharomyces pastorianus
ttgtaatcggctgctaccagtactt

SEQ ID NO: 6437 - DNA, 25 bp, Saccharomyces pastorianus
gtttcgtcttatacgctggtttcat

SEQ ID NO: 6438 - DNA, 25 bp, Saccharomyces pastorianus
gccggcattgtatttcgcattgatc

SEQ ID NO: 6439 - DNA, 25 bp, Saccharomyces pastorianus
aatgcggccgtattatgcgtttcgt

SEQ ID NO: 6440 - DNA, 25 bp, Saccharomyces pastorianus
agagtcacgtatgttcaccactact

SEQ ID NO: 6441 - DNA, 25 bp, Saccharomyces pastorianus
attcatggccactgtagtcatccta

SEQ ID NO: 6442 - DNA, 25 bp, Saccharomyces pastorianus
aatggtccaggtccaaatgcggccg

SEQ ID NO: 6443 - DNA, 25 bp, Saccharomyces pastorianus
gctcgagccaaaacttccgttattt

SEQ ID NO: 6444 - DNA, 25 bp, Saccharomyces pastorianus
aattcgactatttggcttcttccgc

SEQ ID NO: 6445 - DNA, 25 bp, Saccharomyces pastorianus
atacgttgacttgaccaatccatcc

SEQ ID NO: 6446 - DNA, 25 bp, Saccharomyces pastorianus
acaccttcattcacagacgtcattg

SEQ ID NO: 6447 - DNA, 25 bp, Saccharomyces pastorianus
gtggtcaccacacatttacactggg

SEQ ID NO: 6448 - DNA, 25 bp, Saccharomyces pastorianus
ttttgaaacttcagcacgtctccag

SEQ ID NO: 6449 - DNA, 25 bp, Saccharomyces pastorianus
gaagactatttgaaccgcgctatga

SEQ ID NO: 6450 - DNA, 25 bp, Saccharomyces pastorianus
aaaacttctcgcacaatttggccct

SEQ ID NO: 6451 - DNA, 25 bp, Saccharomyces pastorianus
tgactacatatggttctccacgcac

SEQ ID NO: 6452 - DNA, 25 bp, Saccharomyces pastorianus
gtatcggagagttgccattcaccaa

SEQ ID NO: 6453 - DNA, 25 bp, Saccharomyces pastorianus
gacacaacgctcaattccagacagg

SEQ ID NO: 6454 - DNA, 25 bp, Saccharomyces pastorianus
aggccgcgttcaagtacaccaagag

SEQ ID NO: 6455 - DNA, 25 bp, Saccharomyces pastorianus
tgggatcccaaattcaacgacgtga

SEQ ID NO: 6456 - DNA, 25 bp, Saccharomyces pastorianus
gacaacgtcgcgctgtttttgaaac

SEQ ID NO: 6457 - DNA, 25 bp, Saccharomyces pastorianus
gatccagatcatggccacgttgaat

SEQ ID NO: 6458 - DNA, 25 bp, Saccharomyces pastorianus
ggctatcggcattctattgtatacc

SEQ ID NO: 6459 - DNA, 25 bp, Saccharomyces pastorianus
ttgcacgaccaaggcattgtccata

SEQ ID NO: 6460 - DNA, 25 bp, Saccharomyces pastorianus
gtactatagattatgctgcacctga

SEQ ID NO: 6461 - DNA, 25 bp, Saccharomyces pastorianus
tgattgtggactctaaaggcttcgt

SEQ ID NO: 6462 - DNA, 25 bp, Saccharomyces pastorianus
gccgtttgatgtgtttgtgggtact

SEQ ID NO: 6463 - DNA, 25 bp, Saccharomyces pastorianus
atcgatttcgggtctgctgcatatg

SEQ ID NO: 6464 - DNA, 25 bp, Saccharomyces pastorianus
gatcttttcgatctgattgagttca

SEQ ID NO: 6465 - DNA, 25 bp, Saccharomyces pastorianus
ttattatatcgaaacgcccgtgcat

SEQ ID NO: 6466 - DNA, 25 bp, Saccharomyces pastorianus
aatcgttgtgtaccgaagaggccca

SEQ ID NO: 6467 - DNA, 25 bp, Saccharomyces pastorianus
tgcatatgtcaagagtgggccgttt

SEQ ID NO: 6468 - DNA, 25 bp, Saccharomyces pastorianus
tggccgacgacggtgttccaaacat

SEQ ID NO: 6469 - DNA, 25 bp, Saccharomyces pastorianus
gaatatatccctatcctagcagaac

SEQ ID NO: 6470 - DNA, 25 bp, Saccharomyces pastorianus
gcgacttgtgtctttcatggttatg

SEQ ID NO: 6471 - DNA, 25 bp, Saccharomyces pastorianus
ttgtctccaggttcacagtactatc

SEQ ID NO: 6472 - DNA, 25 bp, Saccharomyces pastorianus
attggtgccgcgacgaaatcatttc

SEQ ID NO: 6473 - DNA, 25 bp, Saccharomyces pastorianus
ttatcagattctttgctacctgcca

SEQ ID NO: 6474 - DNA, 25 bp, Saccharomyces pastorianus
tagctaagtcctacgctgtgatagt

SEQ ID NO: 6475 - DNA, 25 bp, Saccharomyces pastorianus
tacctgccataaccgagctagctaa

SEQ ID NO: 6476 - DNA, 25 bp, Saccharomyces pastorianus
ttttaccctctttggaagcactatg

SEQ ID NO: 6477 - DNA, 25 bp, Saccharomyces pastorianus
ggtgcccgtggtgtcattagatgtc

SEQ ID NO: 6478 - DNA, 25 bp, Saccharomyces pastorianus
tgggataccgtttactccatcagag

SEQ ID NO: 6479 - DNA, 25 bp, Saccharomyces pastorianus
aagtatatcttgtccacgtgccaaa

SEQ ID NO: 6480 - DNA, 25 bp, Saccharomyces pastorianus
aatcctgcaagaccagcatctgggt

SEQ ID NO: 6481 - DNA, 25 bp, Saccharomyces pastorianus
gatttgttgaaattcctgccaccag

SEQ ID NO: 6482 - DNA, 25 bp, Saccharomyces pastorianus
atagacgaactgttggtcctgcccg

SEQ ID NO: 6483 - DNA, 25 bp, Saccharomyces pastorianus
agctgattcattctgtcgggttcca

SEQ ID NO: 6484 - DNA, 25 bp, Saccharomyces pastorianus
gatgtgccggctacgatagacgaac

SEQ ID NO: 6485 - DNA, 25 bp, Saccharomyces pastorianus
aactggctacctagaggactctgga

SEQ ID NO: 6486 - DNA, 25 bp, Saccharomyces pastorianus
gtcgggttccacacaagaaaggcca

SEQ ID NO: 6487 - DNA, 25 bp, Saccharomyces pastorianus
aggagagccccgaattaaacgcaga

SEQ ID NO: 6488 - DNA, 25 bp, Saccharomyces pastorianus
gcaagaccccggaccaaacaagaat

SEQ ID NO: 6489 - DNA, 25 bp, Saccharomyces pastorianus
cgcagatgctgcttctttggacgaa

SEQ ID NO: 6490 - DNA, 25 bp, Saccharomyces pastorianus
tcgggaggacccatgacatttccat

SEQ ID NO: 6491 - DNA, 25 bp, Saccharomyces pastorianus
gacgagcttacggttacctacagag

SEQ ID NO: 6492 - DNA, 25 bp, Saccharomyces pastorianus
ggaacttttcatcgatcagcagcaa

SEQ ID NO: 6493 - DNA, 25 bp, Saccharomyces pastorianus
aacgggaattgcgtcatcatcctcg

SEQ ID NO: 6494 - DNA, 25 bp, Saccharomyces pastorianus
gacagggagctgtacaggttccaca

SEQ ID NO: 6495 - DNA, 25 bp, Saccharomyces pastorianus
ttacaaggatgaaccctcgcagccg

SEQ ID NO: 6496 - DNA, 25 bp, Saccharomyces pastorianus
acgttgtcccagtccatcgggagga

SEQ ID NO: 6497 - DNA, 25 bp, Saccharomyces pastorianus
gatgcgctggtgtcccggtacaata

SEQ ID NO: 6498 - DNA, 25 bp, Saccharomyces pastorianus
gaacctcatcgataataacggccgg

SEQ ID NO: 6499 - DNA, 25 bp, Saccharomyces pastorianus
agatgaggagccgtttccctcgaag

SEQ ID NO: 6500 - DNA, 25 bp, Saccharomyces pastorianus
ctcgaagcatgctccttacaaggat

SEQ ID NO: 6501 - DNA, 25 bp, Saccharomyces pastorianus
gaagaccctacatctgcgtgttaga

SEQ ID NO: 6502 - DNA, 25 bp, Saccharomyces pastorianus
tttcgacgcatggttgacccacaga

SEQ ID NO: 6503 - DNA, 25 bp, Saccharomyces pastorianus
accgtgacgcccttggtggtggtat

SEQ ID NO: 6504 - DNA, 25 bp, Saccharomyces pastorianus
gacctggtcagaatctccgttggta

SEQ ID NO: 6505 - DNA, 25 bp, Saccharomyces pastorianus
tggtggtatgatctccttcagaatc

SEQ ID NO: 6506 - DNA, 25 bp, Saccharomyces pastorianus
taaggaaaacatcgtcgccgtcaac

SEQ ID NO: 6507 - DNA, 25 bp, Saccharomyces pastorianus
tatacgagcgtctgcaattcttgca

SEQ ID NO: 6508 - DNA, 25 bp, Saccharomyces pastorianus
gacgtcgttgtcaagcaacaccgtg

SEQ ID NO: 6509 - DNA, 25 bp, Saccharomyces pastorianus
aaattgctgagttcttggctgccga

SEQ ID NO: 6510 - DNA, 25 bp, Saccharomyces pastorianus
aatcaaaggtggtgccgaagccgcc

SEQ ID NO: 6511 - DNA, 25 bp, Saccharomyces pastorianus
attcttgcagaacgccattggtgcc

SEQ ID NO: 6512 - DNA, 25 bp, Saccharomyces pastorianus
gacttgacttatgcattttcgtcat

SEQ ID NO: 6513 - DNA, 25 bp, Saccharomyces pastorianus
aacggcggcgctactacatgaaaat

SEQ ID NO: 6514 - DNA, 25 bp, Saccharomyces pastorianus
aatgacgtaccagagccgatggccc

SEQ ID NO: 6515 - DNA, 25 bp, Saccharomyces pastorianus
gggttttttgatatctgctgggaca

SEQ ID NO: 6516 - DNA, 25 bp, Saccharomyces pastorianus
gggctttgcccaacggtgagaagaa

SEQ ID NO: 6517 - DNA, 25 bp, Saccharomyces pastorianus
atggcccgtgactcagtggctgaga

SEQ ID NO: 6518 - DNA, 25 bp, Saccharomyces pastorianus
gaaaacaatattccgattcttcccg

SEQ ID NO: 6519 - DNA, 25 bp, Saccharomyces pastorianus
atacgacttcaatctctattccatt

SEQ ID NO: 6520 - DNA, 25 bp, Saccharomyces pastorianus
acaattccatctttaccggtgtttg

SEQ ID NO: 6521 - DNA, 25 bp, Saccharomyces pastorianus
acgtcattacgcgataggactttaa

SEQ ID NO: 6522 - DNA, 25 bp, Saccharomyces pastorianus
aatgtaccgaacctgaactcggttg

SEQ ID NO: 6523 - DNA, 25 bp, Saccharomyces pastorianus
aaacttgtacttaatcccagagcat

SEQ ID NO: 6524 - DNA, 25 bp, Saccharomyces pastorianus
gacgatctaagacggcaagctcatg

SEQ ID NO: 6525 - DNA, 25 bp, Saccharomyces pastorianus
ggtgcgttcaccttttacgaattgt

SEQ ID NO: 6526 - DNA, 25 bp, Saccharomyces pastorianus
ccgagaattggagctgtggacgtaa

SEQ ID NO: 6527 - DNA, 25 bp, Saccharomyces pastorianus
agggattccacagagttattttgca

SEQ ID NO: 6528 - DNA, 25 bp, Saccharomyces pastorianus
ggcagttcactttgtttctagcatc

SEQ ID NO: 6529 - DNA, 25 bp, Saccharomyces pastorianus
tttctagcatctatggccggcgtgg

SEQ ID NO: 6530 - DNA, 25 bp, Saccharomyces pastorianus
acagattccgtgaggtttgtgagtc

SEQ ID NO: 6531 - DNA, 25 bp, Saccharomyces pastorianus
tccaagaaggtttttcacgtctact

SEQ ID NO: 6532 - DNA, 25 bp, Saccharomyces pastorianus
gtttgtgagtcgaaccattgcgtat

SEQ ID NO: 6533 - DNA, 25 bp, Saccharomyces pastorianus
taatcccagagcattcagtgcagag

SEQ ID NO: 6534 - DNA, 25 bp, Saccharomyces pastorianus
tccccttatggaggtctaaaactag

SEQ ID NO: 6535 - DNA, 25 bp, Saccharomyces pastorianus
ggactagccactgttggtgtcgctg

SEQ ID NO: 6536 - DNA, 25 bp, Saccharomyces pastorianus
gtgtcacagtggctaagatatctat

SEQ ID NO: 6537 - DNA, 25 bp, Saccharomyces pastorianus
ttaagctgggagtgccctttacccg

SEQ ID NO: 6538 - DNA, 25 bp, Saccharomyces pastorianus
tgagttcagcctttaatatgcataa

SEQ ID NO: 6539 - DNA, 25 bp, Saccharomyces pastorianus
atagcattctagaaccctgggagcc

SEQ ID NO: 6540 - DNA, 25 bp, Saccharomyces pastorianus
tcatgtttaagaacctccccttatg

SEQ ID NO: 6541 - DNA, 25 bp, Saccharomyces pastorianus
tgtgggtatcacaagtatgctactt

SEQ ID NO: 6542 - DNA, 25 bp, Saccharomyces pastorianus
gtcgctgctagtgggctgctattga

SEQ ID NO: 6543 - DNA, 25 bp, Saccharomyces pastorianus
tttacccgctctattggactagcca

SEQ ID NO: 6544 - DNA, 25 bp, Saccharomyces pastorianus
gggagcccaaggtagccaatgatgt

SEQ ID NO: 6545 - DNA, 25 bp, Saccharomyces pastorianus
ctgatgcatccgcacctgaaatgaa

SEQ ID NO: 6546 - DNA, 25 bp, Saccharomyces pastorianus
taagtgttgctcaagtcctactcat

SEQ ID NO: 6547 - DNA, 25 bp, Saccharomyces pastorianus
aagtcctgactggtggtaatttcga

SEQ ID NO: 6548 - DNA, 25 bp, Saccharomyces pastorianus
gcgttggtcaattcggtgcatgcat

SEQ ID NO: 6549 - DNA, 25 bp, Saccharomyces pastorianus
tatcactttgcctgcattcagcaag

SEQ ID NO: 6550 - DNA, 25 bp, Saccharomyces pastorianus
ttatgctccagttgctatcactttg

SEQ ID NO: 6551 - DNA, 25 bp, Saccharomyces pastorianus
aagacgactctctggccgtgggtta

SEQ ID NO: 6552 - DNA, 25 bp, Saccharomyces pastorianus
gattatgatcgtcgtcgtcgttata

SEQ ID NO: 6553 - DNA, 25 bp, Saccharomyces pastorianus
gcttttgcttctccaataactacgg

SEQ ID NO: 6554 - DNA, 25 bp, Saccharomyces pastorianus
gatcgattttgacatcactgctcct

SEQ ID NO: 6555 - DNA, 25 bp, Saccharomyces pastorianus
gcgtgggccagtacagcttttgctt

SEQ ID NO: 6556 - DNA, 25 bp, Saccharomyces pastorianus
gactctaacggtatcctaaacgtct

SEQ ID NO: 6557 - DNA, 25 bp, Saccharomyces pastorianus
cctaaacgtctctgctgttgaaaag

SEQ ID NO: 6558 - DNA, 25 bp, Saccharomyces pastorianus
aggtgctgctccaggtggcttccca

SEQ ID NO: 6559 - DNA, 25 bp, Saccharomyces pastorianus
gattaccatcaccaacgacaagggt

SEQ ID NO: 6560 - DNA, 25 bp, Saccharomyces pastorianus
tagtaagattaccatcaccaacgac

SEQ ID NO: 6561 - DNA, 25 bp, Saccharomyces pastorianus
gaaactgaaagaatcgcttccaaga

SEQ ID NO: 6562 - DNA, 25 bp, Saccharomyces pastorianus
tatcgaaagaatggtttctgaagct

SEQ ID NO: 6563 - DNA, 25 bp, Saccharomyces pastorianus
cgccgtctccaagaaggccgaagaa

SEQ ID NO: 6564 - DNA, 25 bp, Saccharomyces pastorianus
gtatcctaaacgtctctgctgttga

SEQ ID NO: 6565 - DNA, 25 bp, Saccharomyces pastorianus
gaacaagctgacaaggacgccgtct

SEQ ID NO: 6566 - DNA, 25 bp, Saccharomyces pastorianus
aaggacgccgtctccaagaaggccg

SEQ ID NO: 6567 - DNA, 25 bp, Saccharomyces pastorianus
tttagcttttctttcaatggtgcaa

SEQ ID NO: 6568 - DNA, 25 bp, Saccharomyces pastorianus
gatttcaacgttcctgtgacgtcta

SEQ ID NO: 6569 - DNA, 25 bp, Saccharomyces pastorianus
ataagcctgcgagatcttcgtcctt

SEQ ID NO: 6570 - DNA, 25 bp, Saccharomyces pastorianus
taaagctccatcttccacatttagc

SEQ ID NO: 6571 - DNA, 25 bp, Saccharomyces pastorianus
tcgtccttacgctcaaacgttgtag

SEQ ID NO: 6572 - DNA, 25 bp, Saccharomyces pastorianus
aaggcggcgagcttgaaactactca

SEQ ID NO: 6573 - DNA, 25 bp, Saccharomyces pastorianus
aaatgtatcgaatagctccgctttc

SEQ ID NO: 6574 - DNA, 25 bp, Saccharomyces pastorianus
tccgctagccaaagagttcgttttt

SEQ ID NO: 6575 - DNA, 25 bp, Saccharomyces pastorianus
ggtagactcttctccgatagaacca

SEQ ID NO: 6576 - DNA, 25 bp, Saccharomyces pastorianus
aacagcgttcaaaagatgccaccat

SEQ ID NO: 6577 - DNA, 25 bp, Saccharomyces pastorianus
gtagtagccgaaacatctcccgaaa

SEQ ID NO: 6578 - DNA, 25 bp, Saccharomyces pastorianus
ttgattgtccttacagttacctgcg

SEQ ID NO: 6579 - DNA, 25 bp, Saccharomyces pastorianus
ggtgctgagcgtaaatgtttccata

SEQ ID NO: 6580 - DNA, 25 bp, Saccharomyces pastorianus
gacgacgaccatttagttgttcatc

SEQ ID NO: 6581 - DNA, 25 bp, Saccharomyces pastorianus
ggtgattacactttcattgcactag

SEQ ID NO: 6582 - DNA, 25 bp, Saccharomyces pastorianus
tagtcttgccagctcaagtttctgc

SEQ ID NO: 6583 - DNA, 25 bp, Saccharomyces pastorianus
gaagctaccttcagagatgcgtcag

SEQ ID NO: 6584 - DNA, 25 bp, Saccharomyces pastorianus
agttacctgcggctggcaaatgaaa

SEQ ID NO: 6585 - DNA, 25 bp, Saccharomyces pastorianus
gcgttctatttttataccactggtg

SEQ ID NO: 6586 - DNA, 25 bp, Saccharomyces pastorianus
gtgcgcaagatttcggtgtcgtaat

SEQ ID NO: 6587 - DNA, 25 bp, Saccharomyces pastorianus
aacataaggtttgcatccagcccga

SEQ ID NO: 6588 - DNA, 25 bp, Saccharomyces pastorianus
accactattgacatcttgcatgcca

SEQ ID NO: 6589 - DNA, 25 bp, Saccharomyces pastorianus
ggctaactttgttcgatgaccaagc

SEQ ID NO: 6590 - DNA, 25 bp, Saccharomyces pastorianus
taaacattgctagggctcaagccga

SEQ ID NO: 6591 - DNA, 25 bp, Saccharomyces pastorianus
gtgataccaacaatgcaagccctaa

SEQ ID NO: 6592 - DNA, 25 bp, Saccharomyces pastorianus
cagctgctggcttaacgaaatttat

SEQ ID NO: 6593 - DNA, 25 bp, Saccharomyces pastorianus
atatcctgcctgttccaatgaaaac

SEQ ID NO: 6594 - DNA, 25 bp, Saccharomyces pastorianus
acaattgcttggagttgacgctaat

SEQ ID NO: 6595 - DNA, 25 bp, Saccharomyces pastorianus
atgggcggtcaatcagctgctggct

SEQ ID NO: 6596 - DNA, 25 bp, Saccharomyces pastorianus
atgactttaggatcagagcacgcga

SEQ ID NO: 6597 - DNA, 25 bp, Saccharomyces pastorianus
ggctgctattagtttcttgaaggtc

SEQ ID NO: 6598 - DNA, 25 bp, Saccharomyces pastorianus
gggacgtaatgccaacttcatcact

SEQ ID NO: 6599 - DNA, 25 bp, Saccharomyces pastorianus
gttgccaacctacacagtttgaatc

SEQ ID NO: 6600 - DNA, 25 bp, Saccharomyces pastorianus
agagaccaacgaaatcatcctagtg

SEQ ID NO: 6601 - DNA, 25 bp, Saccharomyces pastorianus
aattttcactccttcgaccaaagct

SEQ ID NO: 6602 - DNA, 25 bp, Saccharomyces pastorianus
aaagggcattatcattgctgacacc

SEQ ID NO: 6603 - DNA, 25 bp, Saccharomyces pastorianus
gcagagctggccgtaagactatatt

SEQ ID NO: 6604 - DNA, 25 bp, Saccharomyces pastorianus
ggaacggtgcctcctacaagctagg

SEQ ID NO: 6605 - DNA, 25 bp, Saccharomyces pastorianus
gaaggccgttctttgttggttcaca

SEQ ID NO: 6606 - DNA, 25 bp, Saccharomyces pastorianus
ggacgaagtgttaaccccagactct

SEQ ID NO: 6607 - DNA, 25 bp, Saccharomyces pastorianus
ggaaatgcctcaagacatcgtcgac

SEQ ID NO: 6608 - DNA, 25 bp, Saccharomyces pastorianus
tggcaccgtgcacagcttgaagcag

SEQ ID NO: 6609 - DNA, 25 bp, Saccharomyces pastorianus
aagatctgtcccacagggtggcaga

SEQ ID NO: 6610 - DNA, 25 bp, Saccharomyces pastorianus
atcgtcgacagaaccagggccaagt

SEQ ID NO: 6611 - DNA, 25 bp, Saccharomyces pastorianus
ttccactttcgagctgctacaggat

SEQ ID NO: 6612 - DNA, 25 bp, Saccharomyces pastorianus
agtgctgatggaccaaccgtactct

SEQ ID NO: 6613 - DNA, 25 bp, Saccharomyces pastorianus
acgccgtactatatgtcacctgaag

SEQ ID NO: 6614 - DNA, 25 bp, Saccharomyces pastorianus
ggtcattgggttgcgtaatattcga

SEQ ID NO: 6615 - DNA, 25 bp, Saccharomyces pastorianus
tagccaagtccctcgaaaccagtat

SEQ ID NO: 6616 - DNA, 25 bp, Saccharomyces pastorianus
tctccgctatccgatatttggtcat

SEQ ID NO: 6617 - DNA, 25 bp, Saccharomyces pastorianus
gaaaccagtatccagttcgcaacta

SEQ ID NO: 6618 - DNA, 25 bp, Saccharomyces pastorianus
ctaggtgactttgggctagccaagt

SEQ ID NO: 6619 - DNA, 25 bp, Saccharomyces pastorianus
aaggaacagtttacacacgccgtgg

SEQ ID NO: 6620 - DNA, 25 bp, Saccharomyces pastorianus
aactacatatgtgggcacgccgtac

SEQ ID NO: 6621 - DNA, 25 bp, Saccharomyces pastorianus
gaaatgtgagactatccccgagtat

SEQ ID NO: 6622 - DNA, 25 bp, Saccharomyces pastorianus
ttgcaaaaggtacccagcgtcacgg

SEQ ID NO: 6623 - DNA, 25 bp, Saccharomyces pastorianus
accaggttggtggtgactcggttct

SEQ ID NO: 6624 - DNA, 25 bp, Saccharomyces pastorianus
aaatccgcgatcttctagaccaaac

SEQ ID NO: 6625 - DNA, 25 bp, Saccharomyces pastorianus
gatcaatttgttgccctattttatg

SEQ ID NO: 6626 - DNA, 25 bp, Saccharomyces pastorianus
cagcgtcacggcagcaattggcagt

SEQ ID NO: 6627 - DNA, 25 bp, Saccharomyces pastorianus
aaaagacgaccacgcaaatccgcga

SEQ ID NO: 6628 - DNA, 25 bp, Saccharomyces pastorianus
tctgccattgaactgccgattgatc

SEQ ID NO: 6629 - DNA, 25 bp, Saccharomyces pastorianus
caagatatgttcactccccggtttt

SEQ ID NO: 6630 - DNA, 25 bp, Saccharomyces pastorianus
cggttctgatctgccaactatgtga

SEQ ID NO: 6631 - DNA, 25 bp, Saccharomyces pastorianus
tccccggttttgaaactcttgcaat

SEQ ID NO: 6632 - DNA, 25 bp, Saccharomyces pastorianus
gccactattttcaagcttcgttcaa

SEQ ID NO: 6633 - DNA, 25 bp, Saccharomyces pastorianus
agcaacactggatcgagtgccacag

SEQ ID NO: 6634 - DNA, 25 bp, Saccharomyces pastorianus
ctactacaatcactctcacacgaga

SEQ ID NO: 6635 - DNA, 25 bp, Saccharomyces pastorianus
gaacgatgcgttgatccaagtttaa

SEQ ID NO: 6636 - DNA, 25 bp, Saccharomyces pastorianus
gaggctcgatatagggattggacaa

SEQ ID NO: 6637 - DNA, 25 bp, Saccharomyces pastorianus
ccaaccttacctttctgaacgatga

SEQ ID NO: 6638 - DNA, 25 bp, Saccharomyces pastorianus
gaacgtacgtttactgcacctcaga

SEQ ID NO: 6639 - DNA, 25 bp, Saccharomyces pastorianus
gaacgatgaaccgacacctactaca

SEQ ID NO: 6640 - DNA, 25 bp, Saccharomyces pastorianus
gaaaaccttcctctatcagcgaaaa

SEQ ID NO: 6641 - DNA, 25 bp, Saccharomyces pastorianus
agagcttactcgattccaaccttac

SEQ ID NO: 6642 - DNA, 25 bp, Saccharomyces pastorianus
gagtgccacaggaaccattactgat

SEQ ID NO: 6643 - DNA, 25 bp, Saccharomyces pastorianus
ctagaattgacccttacgcagcgag

SEQ ID NO: 6644 - DNA, 25 bp, Saccharomyces pastorianus
ttgatacttcacaatctacccctat

SEQ ID NO: 6645 - DNA, 25 bp, Saccharomyces pastorianus
atccccgtaactgcccaatatattg

SEQ ID NO: 6646 - DNA, 25 bp, Saccharomyces pastorianus
ggaagtcaaaaacgcacactgccca

SEQ ID NO: 6647 - DNA, 25 bp, Saccharomyces pastorianus
tgggccaaactatgaatgacgctat

SEQ ID NO: 6648 - DNA, 25 bp, Saccharomyces pastorianus
gattacgcaaccacgatgggccaaa

SEQ ID NO: 6649 - DNA, 25 bp, Saccharomyces pastorianus
gattcgcaacggtaaattccaagca

SEQ ID NO: 6650 - DNA, 25 bp, Saccharomyces pastorianus
gtgaacacatgtacgccaaacctgt

SEQ ID NO: 6651 - DNA, 25 bp, Saccharomyces pastorianus
gtaattgacgaaagcgccaccggaa

SEQ ID NO: 6652 - DNA, 25 bp, Saccharomyces pastorianus
gaccccaagttaactctttacaatg

SEQ ID NO: 6653 - DNA, 25 bp, Saccharomyces pastorianus
gagtgctattgctcaaggaaccata

SEQ ID NO: 6654 - DNA, 25 bp, Saccharomyces pastorianus
gatgaactacttggcggtatcgaaa

SEQ ID NO: 6655 - DNA, 25 bp, Saccharomyces pastorianus
gggcctcttaactaaggatcctgaa

SEQ ID NO: 6656 - DNA, 25 bp, Saccharomyces pastorianus
gtgccaatcaccattttcaggcgat

SEQ ID NO: 6657 - DNA, 25 bp, Saccharomyces pastorianus
agtacaaatatttcagggcctctta

SEQ ID NO: 6658 - DNA, 25 bp, Saccharomyces pastorianus
taaatcttcgtgtcaagccaccata

SEQ ID NO: 6659 - DNA, 25 bp, Saccharomyces pastorianus
atgaggttttcaatgccatcctaac

SEQ ID NO: 6660 - DNA, 25 bp, Saccharomyces pastorianus
accattcttccgcaacatcaatttt

SEQ ID NO: 6661 - DNA, 25 bp, Saccharomyces pastorianus
gggccaagagatgccgctgaagtta

SEQ ID NO: 6662 - DNA, 25 bp, Saccharomyces pastorianus
aatcacccgaagacacatcatattt

SEQ ID NO: 6663 - DNA, 25 bp, Saccharomyces pastorianus
catctgttttaaccactggccaaca

SEQ ID NO: 6664 - DNA, 25 bp, Saccharomyces pastorianus
ttacacccttgccatctgttttaac

SEQ ID NO: 6665 - DNA, 25 bp, Saccharomyces pastorianus
gtacaccggaattcatggcacctga

SEQ ID NO: 6666 - DNA, 25 bp, Saccharomyces pastorianus
ttcaagccaggttaacggtctgcgt

SEQ ID NO: 6667 - DNA, 25 bp, Saccharomyces pastorianus
cggtctgcgtgactcgttgaataga

SEQ ID NO: 6668 - DNA, 25 bp, Saccharomyces pastorianus
cttatttcccgtttggtgcaacagg

SEQ ID NO: 6669 - DNA, 25 bp, Saccharomyces pastorianus
gacactgttttcgagctgggcggac

SEQ ID NO: 6670 - DNA, 25 bp, Saccharomyces pastorianus
tgggcggactccctgaacactaagg

SEQ ID NO: 6671 - DNA, 25 bp, Saccharomyces pastorianus
gatttattttgcagcctttgccaaa

SEQ ID NO: 6672 - DNA, 25 bp, Saccharomyces pastorianus
agaatggtgctcttcgtgtgtttcc

SEQ ID NO: 6673 - DNA, 25 bp, Saccharomyces pastorianus
tttttgccacttgctttatgacgat

SEQ ID NO: 6674 - DNA, 25 bp, Saccharomyces pastorianus
tgggttcaactgcatgcttcactct

SEQ ID NO: 6675 - DNA, 25 bp, Saccharomyces pastorianus
aacgtgtgccgttctggagctaatt

SEQ ID NO: 6676 - DNA, 25 bp, Saccharomyces pastorianus
gaaagattgccgtttgccgttttct

SEQ ID NO: 6677 - DNA, 25 bp, Saccharomyces pastorianus
gagttattgaacgagccaccacgtt

SEQ ID NO: 6678 - DNA, 25 bp, Saccharomyces pastorianus
gtgggccatcaggatccaatgacga

SEQ ID NO: 6679 - DNA, 25 bp, Saccharomyces pastorianus
tcgtttctccaatgggatcgcctaa

SEQ ID NO: 6680 - DNA, 25 bp, Saccharomyces pastorianus
gtgtcgaatgtctcttcaccagtaa

SEQ ID NO: 6681 - DNA, 25 bp, Saccharomyces pastorianus
gtttgcttctaacaacagcggccag

SEQ ID NO: 6682 - DNA, 25 bp, Saccharomyces pastorianus
gatttactatccattcagcagttga

SEQ ID NO: 6683 - DNA, 25 bp, Saccharomyces pastorianus
gggcaagagccacatcagtcaacga

SEQ ID NO: 6684 - DNA, 25 bp, Saccharomyces pastorianus
gggatgccaccatacgaaattcaaa

SEQ ID NO: 6685 - DNA, 25 bp, Saccharomyces pastorianus
agtaaacggctcatcacaagggtat

SEQ ID NO: 6686 - DNA, 25 bp, Saccharomyces pastorianus
gctgacagttcgaacgcttttttca

SEQ ID NO: 6687 - DNA, 25 bp, Saccharomyces pastorianus
gattattgagcacaccatcacctat

SEQ ID NO: 6688 - DNA, 25 bp, Saccharomyces pastorianus
atcgggttcaactgcgaacgccaat

SEQ ID NO: 6689 - DNA, 25 bp, Saccharomyces pastorianus
tacgggcaaaagtcaatcgggttca

SEQ ID NO: 6690 - DNA, 25 bp, Saccharomyces pastorianus
atccaagcgagtttgcgaaccaggc

SEQ ID NO: 6691 - DNA, 25 bp, Saccharomyces pastorianus
tagggacatcgcattattccagcct

SEQ ID NO: 6692 - DNA, 25 bp, Saccharomyces pastorianus
cgagcagctgcgcaatagggacatc

SEQ ID NO: 6693 - DNA, 25 bp, Saccharomyces pastorianus
caagcgcctttcgacatagatgact

SEQ ID NO: 6694 - DNA, 25 bp, Saccharomyces pastorianus
caaatctagcggtagctcgatggct

SEQ ID NO: 6695 - DNA, 25 bp, Saccharomyces pastorianus
tcttcggtgctgtcgcagtttgaga

SEQ ID NO: 6696 - DNA, 25 bp, Saccharomyces pastorianus
gaaccaggctcagggtggcgctcaa

SEQ ID NO: 6697 - DNA, 25 bp, Saccharomyces pastorianus
gacttggcattcgatctggacggta

SEQ ID NO: 6698 - DNA, 25 bp, Saccharomyces pastorianus
cttgatatcggtgtacggcctggac

SEQ ID NO: 6699 - DNA, 25 bp, Saccharomyces pastorianus
gtaagtccgtcccaattgtcaagaa

SEQ ID NO: 6700 - DNA, 25 bp, Saccharomyces pastorianus
taaacgatattccaggctcctacac

SEQ ID NO: 6701 - DNA, 25 bp, Saccharomyces pastorianus
agtaatgcccacattggacagtgcc

SEQ ID NO: 6702 - DNA, 25 bp, Saccharomyces pastorianus
ggtttagtgcaggactatcctccat

SEQ ID NO: 6703 - DNA, 25 bp, Saccharomyces pastorianus
ggaaggtgaacatttcgccatcgaa

SEQ ID NO: 6704 - DNA, 25 bp, Saccharomyces pastorianus
gaacacactattctgttgcatgcga

SEQ ID NO: 6705 - DNA, 25 bp, Saccharomyces pastorianus
tgtcgtaacctttgcgggcacaata

SEQ ID NO: 6706 - DNA, 25 bp, Saccharomyces pastorianus
gaagccggtatcgatgtcagactga

SEQ ID NO: 6707 - DNA, 25 bp, Saccharomyces pastorianus
aatacgacaacttgctggctgccgt

SEQ ID NO: 6708 - DNA, 25 bp, Saccharomyces pastorianus
gtagaggttatgtcacttccggcgg

SEQ ID NO: 6709 - DNA, 25 bp, Saccharomyces pastorianus
aaggatgccacttacacgggtatca

SEQ ID NO: 6710 - DNA, 25 bp, Saccharomyces pastorianus
tatgatgcagtcagcaggacgaatc

SEQ ID NO: 6711 - DNA, 25 bp, Saccharomyces pastorianus
caatcaaactggctcaagggaacaa

SEQ ID NO: 6712 - DNA, 25 bp, Saccharomyces pastorianus
cagcgcagatatactatcgatggaa

SEQ ID NO: 6713 - DNA, 25 bp, Saccharomyces pastorianus
ggtagtgtggaaaacgctcaaatga

SEQ ID NO: 6714 - DNA, 25 bp, Saccharomyces pastorianus
atcgtaaacaagaacaaccctgctg

SEQ ID NO: 6715 - DNA, 25 bp, Saccharomyces pastorianus
gacgaatcaacaggagggagcttct

SEQ ID NO: 6716 - DNA, 25 bp, Saccharomyces pastorianus
aaccgcaggttttttgcgtcagcaa

SEQ ID NO: 6717 - DNA, 25 bp, Saccharomyces pastorianus
ttgaggagctcgtgtaggctttcaa

SEQ ID NO: 6718 - DNA, 25 bp, Saccharomyces pastorianus
gatggccaagcttctaaactcaata

SEQ ID NO: 6719 - DNA, 25 bp, Saccharomyces pastorianus
agggagcttctatctgaggcagaga

SEQ ID NO: 6720 - DNA, 25 bp, Saccharomyces pastorianus
gtaggctttcaaggtcctctttaag

SEQ ID NO: 6721 - DNA, 25 bp, Saccharomyces pastorianus
tagactgctacccattccagaattg

SEQ ID NO: 6722 - DNA, 25 bp, Saccharomyces pastorianus
atagatctgggcatcgctttcgacc

SEQ ID NO: 6723 - DNA, 25 bp, Saccharomyces pastorianus
ggtgttgccgcaagttctattgtcg

SEQ ID NO: 6724 - DNA, 25 bp, Saccharomyces pastorianus
tcgattgttcaacaggtgagcctat

SEQ ID NO: 6725 - DNA, 25 bp, Saccharomyces pastorianus
gactcttttcctgatccaaatgact

SEQ ID NO: 6726 - DNA, 25 bp, Saccharomyces pastorianus
tccagaattggttcccttcagatta

SEQ ID NO: 6727 - DNA, 25 bp, Saccharomyces pastorianus
cgctttcgaccagggtagactgcta

SEQ ID NO: 6728 - DNA, 25 bp, Saccharomyces pastorianus
gaaagagtctatgccttactaagaa

SEQ ID NO: 6729 - DNA, 25 bp, Saccharomyces pastorianus
attcatgggtaatgtcgccagtcaa

SEQ ID NO: 6730 - DNA, 25 bp, Saccharomyces pastorianus
taagcgtcgagtctagtgtacagga

SEQ ID NO: 6731 - DNA, 25 bp, Saccharomyces pastorianus
agcaagcaacagatccgtcgaattt

SEQ ID NO: 6732 - DNA, 25 bp, Saccharomyces pastorianus
cgacctcctcgttatctaaatacaa

SEQ ID NO: 6733 - DNA, 25 bp, Saccharomyces pastorianus
gtatgcttatactttgcaaggccat

SEQ ID NO: 6734 - DNA, 25 bp, Saccharomyces pastorianus
aattagtccctgatgatgccactgc

SEQ ID NO: 6735 - DNA, 25 bp, Saccharomyces pastorianus
tttgatctgttgctgtggtggttct

SEQ ID NO: 6736 - DNA, 25 bp, Saccharomyces pastorianus
gcaaggccatgagcattcttccaat

SEQ ID NO: 6737 - DNA, 25 bp, Saccharomyces pastorianus
gagcattcttccaatgattcttcag

SEQ ID NO: 6738 - DNA, 25 bp, Saccharomyces pastorianus
gaactagcatgccagttacaaccga

SEQ ID NO: 6739 - DNA, 25 bp, Saccharomyces pastorianus
cagttgttatattccatgacgagat

SEQ ID NO: 6740 - DNA, 25 bp, Saccharomyces pastorianus
gatcaatcaatcctgtcaacgtagt

SEQ ID NO: 6741 - DNA, 25 bp, Saccharomyces pastorianus
actaaccgtggctatgaatttggat

SEQ ID NO: 6742 - DNA, 25 bp, Saccharomyces pastorianus
gctagcatgcgatcctcaacattat

SEQ ID NO: 6743 - DNA, 25 bp, Saccharomyces pastorianus
ttggacaccaagatctattctgagt

SEQ ID NO: 6744 - DNA, 25 bp, Saccharomyces pastorianus
gaggccatcgtcaaggagcatttcg

SEQ ID NO: 6745 - DNA, 25 bp, Saccharomyces pastorianus
aggtgacttaaacgccattagaggc

SEQ ID NO: 6746 - DNA, 25 bp, Saccharomyces pastorianus
gttgttataacctcggatgaagcca

SEQ ID NO: 6747 - DNA, 25 bp, Saccharomyces pastorianus
gacaccattgactttgaggccatcg

SEQ ID NO: 6748 - DNA, 25 bp, Saccharomyces pastorianus
gttggaagccactgacgacgttcta

SEQ ID NO: 6749 - DNA, 25 bp, Saccharomyces pastorianus
gaatctgcagttcaatctggtcaag

SEQ ID NO: 6750 - DNA, 25 bp, Saccharomyces pastorianus
gacggatccaagacggacccaattg

SEQ ID NO: 6751 - DNA, 25 bp, Saccharomyces pastorianus
tcgctgactggcctattttgggtaa

SEQ ID NO: 6752 - DNA, 25 bp, Saccharomyces pastorianus
cattagaggcttaccagaatctgca

SEQ ID NO: 6753 - DNA, 25 bp, Saccharomyces pastorianus
aaggacgctttaccatcagtcactt

SEQ ID NO: 6754 - DNA, 25 bp, Saccharomyces pastorianus
gagctttgagaatcgaaaccggtaa

SEQ ID NO: 6755 - DNA, 25 bp, Saccharomyces pastorianus
cgtcacaaaagatccgctaccggtg

SEQ ID NO: 6756 - DNA, 25 bp, Saccharomyces pastorianus
cgaagcacattacggccaaacgttg

SEQ ID NO: 6757 - DNA, 25 bp, Saccharomyces pastorianus
gcacattacggccaaacgttgggta

SEQ ID NO: 6758 - DNA, 25 bp, Saccharomyces pastorianus
cattcaagcaatggttcgaagcaca

SEQ ID NO: 6759 - DNA, 25 bp, Saccharomyces pastorianus
gttcgaagcacattacggccaaacg

SEQ ID NO: 6760 - DNA, 25 bp, Saccharomyces pastorianus
ttcgaagcacattacggccaaacgt

SEQ ID NO: 6761 - DNA, 25 bp, Saccharomyces pastorianus
tcgaagcacattacggccaaacgtt

SEQ ID NO: 6762 - DNA, 25 bp, Saccharomyces pastorianus
tcgaacaatgaattggtcagaacca

SEQ ID NO: 6763 - DNA, 25 bp, Saccharomyces pastorianus
aaaagatccgctaccggtgccaagc

SEQ ID NO: 6764 - DNA, 25 bp, Saccharomyces pastorianus
cggtgccaagcgtgctcaattcaga

SEQ ID NO: 6765 - DNA, 25 bp, Saccharomyces pastorianus
ctcgctgatgattgacgtcgttttt

SEQ ID NO: 6766 - DNA, 25 bp, Saccharomyces pastorianus
atgtcgacgtatgacgagatcgaaa

SEQ ID NO: 6767 - DNA, 25 bp, Saccharomyces pastorianus
aaatcaaatgttcacgtacccctgt

SEQ ID NO: 6768 - DNA, 25 bp, Saccharomyces pastorianus
aaatatacctggacgacctgtttga

SEQ ID NO: 6769 - DNA, 25 bp, Saccharomyces pastorianus
gccctagttgctcgctgatgattga

SEQ ID NO: 6770 - DNA, 25 bp, Saccharomyces pastorianus
aaaggaagacctggctgagtactac

SEQ ID NO: 6771 - DNA, 25 bp, Saccharomyces pastorianus
ctggacgacctgtttgatggtgaaa

SEQ ID NO: 6772 - DNA, 25 bp, Saccharomyces pastorianus
gtggagacaggttccaaatatacct

SEQ ID NO: 6773 - DNA, 25 bp, Saccharomyces pastorianus
ctgtccctgtggagacaggttccaa

SEQ ID NO: 6774 - DNA, 25 bp, Saccharomyces pastorianus
aggatatgacctttgagccggaaaa

SEQ ID NO: 6775 - DNA, 25 bp, Saccharomyces pastorianus
aaatagctgtttgccctagttgctc

SEQ ID NO: 6776 - DNA, 25 bp, Saccharomyces pastorianus
aagatctcccagttcgattcagtga

SEQ ID NO: 6777 - DNA, 25 bp, Saccharomyces pastorianus
gtttggttctatcatctggtcatac

SEQ ID NO: 6778 - DNA, 25 bp, Saccharomyces pastorianus
gtaacatcggccaatggacctcagg

SEQ ID NO: 6779 - DNA, 25 bp, Saccharomyces pastorianus
atatcgtacttgacttcatcggcgg

SEQ ID NO: 6780 - DNA, 25 bp, Saccharomyces pastorianus
attttgagtcattccagctcgctga

SEQ ID NO: 6781 - DNA, 25 bp, Saccharomyces pastorianus
ggtcatacaattactcacactacta

SEQ ID NO: 6782 - DNA, 25 bp, Saccharomyces pastorianus
gtgcatacgttaccaccgtaggcga

SEQ ID NO: 6783 - DNA, 25 bp, Saccharomyces pastorianus
gggacaatccaagtgccaatgctag

SEQ ID NO: 6784 - DNA, 25 bp, Saccharomyces pastorianus
tatcgattacttaacctgcagaggt

SEQ ID NO: 6785 - DNA, 25 bp, Saccharomyces pastorianus
gtaggcgactacgttgccaattaca

SEQ ID NO: 6786 - DNA, 25 bp, Saccharomyces pastorianus
gctgattcatggtggcggtgcatac

SEQ ID NO: 6787 - DNA, 25 bp, Saccharomyces pastorianus
ttgacgctttgcaattgaccgataa

SEQ ID NO: 6788 - DNA, 25 bp, Saccharomyces pastorianus
ttggcagccttcagatgatgtcatc

SEQ ID NO: 6789 - DNA, 25 bp, Saccharomyces pastorianus
gtggacgccgatgggttcaagaaca

SEQ ID NO: 6790 - DNA, 25 bp, Saccharomyces pastorianus
gaacgtggccttcttgtatgacatg

SEQ ID NO: 6791 - DNA, 25 bp, Saccharomyces pastorianus
agtaaggtccgtctttgtcatcgac

SEQ ID NO: 6792 - DNA, 25 bp, Saccharomyces pastorianus
caagttgattggtctttccgtggaa

SEQ ID NO: 6793 - DNA, 25 bp, Saccharomyces pastorianus
aacttccatgactacctgggcgatt

SEQ ID NO: 6794 - DNA, 25 bp, Saccharomyces pastorianus
gaagacgttgagtcccaccaaaagt

SEQ ID NO: 6795 - DNA, 25 bp, Saccharomyces pastorianus
gaacatcaacgacggctctttgaaa

SEQ ID NO: 6796 - DNA, 25 bp, Saccharomyces pastorianus
ttagactgatctttacttacccctc

SEQ ID NO: 6797 - DNA, 25 bp, Saccharomyces pastorianus
acacctgtatgcaccactgaagttg

SEQ ID NO: 6798 - DNA, 25 bp, Saccharomyces pastorianus
gaaaaccattactactcacaacata

SEQ ID NO: 6799 - DNA, 25 bp, Saccharomyces pastorianus
gttaatatacatctacagcctgaat

SEQ ID NO: 6800 - DNA, 25 bp, Saccharomyces pastorianus
gttttgcctgtactggaatatccaa

SEQ ID NO: 6801 - DNA, 25 bp, Saccharomyces pastorianus
aaacaacgtcgatctagccatagta

SEQ ID NO: 6802 - DNA, 25 bp, Saccharomyces pastorianus
gagaagacctcgttgcatcacaggc

SEQ ID NO: 6803 - DNA, 25 bp, Saccharomyces pastorianus
taccaaaggtgctcgtaccaaaaag

SEQ ID NO: 6804 - DNA, 25 bp, Saccharomyces pastorianus
gaacgaaccaaactcttatgcagga

SEQ ID NO: 6805 - DNA, 25 bp, Saccharomyces pastorianus
cgtgcctgaccaaactttaccaaag

SEQ ID NO: 6806 - DNA, 25 bp, Saccharomyces pastorianus
gacgatgtactttttggtcattgcg

SEQ ID NO: 6807 - DNA, 25 bp, Saccharomyces pastorianus
gaagattcaccatggaaccgatagt

SEQ ID NO: 6808 - DNA, 25 bp, Saccharomyces pastorianus
gcatcacaggctagtccgaagactc

SEQ ID NO: 6809 - DNA, 25 bp, Saccharomyces pastorianus
gataggtctggtcccattgatttat

SEQ ID NO: 6810 - DNA, 25 bp, Saccharomyces pastorianus
taatgcttcatatttccatggtgct

SEQ ID NO: 6811 - DNA, 25 bp, Saccharomyces pastorianus
gaggaggtatttgcggtcaccacca

SEQ ID NO: 6812 - DNA, 25 bp, Saccharomyces pastorianus
cttcgatttccatgacttttcggat

SEQ ID NO: 6813 - DNA, 25 bp, Saccharomyces pastorianus
atgagtatctccattgttgcgctac

SEQ ID NO: 6814 - DNA, 25 bp, Saccharomyces pastorianus
gcaagaccgtctaaaccatcacaga

SEQ ID NO: 6815 - DNA, 25 bp, Saccharomyces pastorianus
taccgagttaggcagtagcgccgct

SEQ ID NO: 6816 - DNA, 25 bp, Saccharomyces pastorianus
aagctctactagaagccgggatcca

SEQ ID NO: 6817 - DNA, 25 bp, Saccharomyces pastorianus
agacatgttagcctccttgagcaat

SEQ ID NO: 6818 - DNA, 25 bp, Saccharomyces pastorianus
agcgccgctccatcaaaattaactg

SEQ ID NO: 6819 - DNA, 25 bp, Saccharomyces pastorianus
gagatcgacgatcttgataccgagt

SEQ ID NO: 6820 - DNA, 25 bp, Saccharomyces pastorianus
gcccgtatatgactcccagaagact

SEQ ID NO: 6821 - DNA, 25 bp, Saccharomyces pastorianus
tatttctaggcgtccatctttggtc

SEQ ID NO: 6822 - DNA, 25 bp, Saccharomyces pastorianus
gggacacactagtggcattcacaga

SEQ ID NO: 6823 - DNA, 25 bp, Saccharomyces pastorianus
gatcatcctttaattctcatgctcc

SEQ ID NO: 6824 - DNA, 25 bp, Saccharomyces pastorianus
attctctcttccttgtcgaatggga

SEQ ID NO: 6825 - DNA, 25 bp, Saccharomyces pastorianus
aagaggaagacatcgacccactaca

SEQ ID NO: 6826 - DNA, 25 bp, Saccharomyces pastorianus
gaaatttccattgtcctacctaaca

SEQ ID NO: 6827 - DNA, 25 bp, Saccharomyces pastorianus
gacgcagcgaacataccagtacaat

SEQ ID NO: 6828 - DNA, 25 bp, Saccharomyces pastorianus
atctttggtcgtcagcccgtatatg

SEQ ID NO: 6829 - DNA, 25 bp, Saccharomyces pastorianus
taaatcctataacctctccgaactg

SEQ ID NO: 6830 - DNA, 25 bp, Saccharomyces pastorianus
ttcgcaaacaagcatccgtggtcta

SEQ ID NO: 6831 - DNA, 25 bp, Saccharomyces pastorianus
agaattcagaagtcccaccagaaag

SEQ ID NO: 6832 - DNA, 25 bp, Saccharomyces pastorianus
gagtgatttctttcaaaataccgtt

SEQ ID NO: 6833 - DNA, 25 bp, Saccharomyces pastorianus
tccgtaaccgtgaaaagcttcttag

SEQ ID NO: 6834 - DNA, 25 bp, Saccharomyces pastorianus
gaaagccacacaacgaagaacaata

SEQ ID NO: 6835 - DNA, 25 bp, Saccharomyces pastorianus
gagtccgaatataacgcatcaaata

SEQ ID NO: 6836 - DNA, 25 bp, Saccharomyces pastorianus
gcgaatataactccacaggcagtga

SEQ ID NO: 6837 - DNA, 25 bp, Saccharomyces pastorianus
gacgaagcaccggagctaagtttaa

SEQ ID NO: 6838 - DNA, 25 bp, Saccharomyces pastorianus
gtgtgttgcaaaaaatccgtaaccg

SEQ ID NO: 6839 - DNA, 25 bp, Saccharomyces pastorianus
gcttctgaatcatattgggaactct

SEQ ID NO: 6840 - DNA, 25 bp, Saccharomyces pastorianus
gcgaacaataccatacaaccagaaa

SEQ ID NO: 6841 - DNA, 25 bp, Saccharomyces pastorianus
gggaactctgtttcacactcaagaa

SEQ ID NO: 6842 - DNA, 25 bp, Saccharomyces pastorianus
aaatcactaagccattccggactag

SEQ ID NO: 6843 - DNA, 25 bp, Saccharomyces pastorianus
gaattccgttaacccattgctaaga

SEQ ID NO: 6844 - DNA, 25 bp, Saccharomyces pastorianus
actctttatacaatcccgcagatca

SEQ ID NO: 6845 - DNA, 25 bp, Saccharomyces pastorianus
aacgcgttccggtagcataccagaa

SEQ ID NO: 6846 - DNA, 25 bp, Saccharomyces pastorianus
aacaccttcgtcaagaattccttct

SEQ ID NO: 6847 - DNA, 25 bp, Saccharomyces pastorianus
aaccttaatggttcatcctcgacag

SEQ ID NO: 6848 - DNA, 25 bp, Saccharomyces pastorianus
agaacggttcgttgtcttcacagca

SEQ ID NO: 6849 - DNA, 25 bp, Saccharomyces pastorianus
atctttatctcaagcacagccatca

SEQ ID NO: 6850 - DNA, 25 bp, Saccharomyces pastorianus
gttcattcgaacttttcctaccaat

SEQ ID NO: 6851 - DNA, 25 bp, Saccharomyces pastorianus
gacgaatcgatgttgtctgcgcaca

SEQ ID NO: 6852 - DNA, 25 bp, Saccharomyces pastorianus
gaattccttctggttattcagccaa

SEQ ID NO: 6853 - DNA, 25 bp, Saccharomyces pastorianus
gttattccattcacagcatcgagca

SEQ ID NO: 6854 - DNA, 25 bp, Saccharomyces pastorianus
gggctgcgttattcgatatacattg

SEQ ID NO: 6855 - DNA, 25 bp, Saccharomyces pastorianus
gtaagacgcatctttctagctcctt

SEQ ID NO: 6856 - DNA, 25 bp, Saccharomyces pastorianus
gaacgtcgggtggaagtacttgcaa

SEQ ID NO: 6857 - DNA, 25 bp, Saccharomyces pastorianus
actggcactgcctacttaatgaaca

SEQ ID NO: 6858 - DNA, 25 bp, Saccharomyces pastorianus
gcgatatcctctgccattggtgtaa

SEQ ID NO: 6859 - DNA, 25 bp, Saccharomyces pastorianus
catgcttcatcacttacggttgtag

SEQ ID NO: 6860 - DNA, 25 bp, Saccharomyces pastorianus
gctccttccaaatcatttccagaga

SEQ ID NO: 6861 - DNA, 25 bp, Saccharomyces pastorianus
tatttggtttgcgatatcctctgcc

SEQ ID NO: 6862 - DNA, 25 bp, Saccharomyces pastorianus
aataagcgacccgttattccattca

SEQ ID NO: 6863 - DNA, 25 bp, Saccharomyces pastorianus
atgctaactggcgactatttggttt

SEQ ID NO: 6864 - DNA, 25 bp, Saccharomyces pastorianus
agccggactcctactacatgtataa

SEQ ID NO: 6865 - DNA, 25 bp, Saccharomyces pastorianus
atgcagttttcctaagtgccatcgc

SEQ ID NO: 6866 - DNA, 25 bp, Saccharomyces pastorianus
aattttgccggattcttgggttcag

SEQ ID NO: 6867 - DNA, 25 bp, Saccharomyces pastorianus
gccttaatatcgttggccatttgcc

SEQ ID NO: 6868 - DNA, 25 bp, Saccharomyces pastorianus
ttgggtgctaacttgtctggtaact

SEQ ID NO: 6869 - DNA, 25 bp, Saccharomyces pastorianus
atcatcgaagtttaccacggcgcta

SEQ ID NO: 6870 - DNA, 25 bp, Saccharomyces pastorianus
aaaggctacgtcaacattttccact

SEQ ID NO: 6871 - DNA, 25 bp, Saccharomyces pastorianus
ggtgtcatttctgctgattacttca

SEQ ID NO: 6872 - DNA, 25 bp, Saccharomyces pastorianus
tcagtgggcatttccgtacctatta

SEQ ID NO: 6873 - DNA, 25 bp, Saccharomyces pastorianus
gtcggataccttgttgcagcattga

SEQ ID NO: 6874 - DNA, 25 bp, Saccharomyces pastorianus
gatatgaccgcattgttgcccaagt

SEQ ID NO: 6875 - DNA, 25 bp, Saccharomyces pastorianus
taaaggtgccgtgtactcgttcgac

SEQ ID NO: 6876 - DNA, 25 bp, Saccharomyces pastorianus
gatcatgccttttttggacaaccaa

SEQ ID NO: 6877 - DNA, 25 bp, Saccharomyces pastorianus
gtatgagccaggtaccgacggtaga

SEQ ID NO: 6878 - DNA, 25 bp, Saccharomyces pastorianus
gaatatccaacatcttctatacggg

SEQ ID NO: 6879 - DNA, 25 bp, Saccharomyces pastorianus
tgattactcgatcaactctcgttat

SEQ ID NO: 6880 - DNA, 25 bp, Saccharomyces pastorianus
aagcctttgaagtacctgtccgtgg

SEQ ID NO: 6881 - DNA, 25 bp, Saccharomyces pastorianus
gtgacgggctggaaatcctcatcgt

SEQ ID NO: 6882 - DNA, 25 bp, Saccharomyces pastorianus
gctatccataaactcagctgccagg

SEQ ID NO: 6883 - DNA, 25 bp, Saccharomyces pastorianus
ttatgagcccaaggtctttgactgt

SEQ ID NO: 6884 - DNA, 25 bp, Saccharomyces pastorianus
tggcgctgcagcttctttgatcatg

SEQ ID NO: 6885 - DNA, 25 bp, Saccharomyces pastorianus
tactacgttcacaccattattgctg

SEQ ID NO: 6886 - DNA, 25 bp, Saccharomyces pastorianus
ttgccagtgtgatttgttcgagtac

SEQ ID NO: 6887 - DNA, 25 bp, Saccharomyces pastorianus
gtatttgccagtgtgatttgttcga

SEQ ID NO: 6888 - DNA, 25 bp, Saccharomyces pastorianus
gaataacaagaaagccaagtactat

SEQ ID NO: 6889 - DNA, 25 bp, Saccharomyces pastorianus
aatgtttatgtcatcgcctacaatt

SEQ ID NO: 6890 - DNA, 25 bp, Saccharomyces pastorianus
tatgtcatcgcctacaattgatttc

SEQ ID NO: 6891 - DNA, 25 bp, Saccharomyces pastorianus
tcgagttttttcacagaataacaag

SEQ ID NO: 6892 - DNA, 25 bp, Saccharomyces pastorianus
gattcttctatgataatccggtgat

SEQ ID NO: 6893 - DNA, 25 bp, Saccharomyces pastorianus
gtgtgatttgttcgagtacatttta

SEQ ID NO: 6894 - DNA, 25 bp, Saccharomyces pastorianus
gataatccggtgatcgagttttttc

SEQ ID NO: 6895 - DNA, 25 bp, Saccharomyces pastorianus
caatgtgggtatttgccagtgtgat

SEQ ID NO: 6896 - DNA, 25 bp, Saccharomyces pastorianus
gccaagtactattgcaatgtgggta

SEQ ID NO: 6897 - DNA, 25 bp, Saccharomyces pastorianus
gggcccgtgaaaaccacattccata

SEQ ID NO: 6898 - DNA, 25 bp, Saccharomyces pastorianus
ttgattcctggtggtttcggtgtta

SEQ ID NO: 6899 - DNA, 25 bp, Saccharomyces pastorianus
ctcagtaccacccagaatatacgtc

SEQ ID NO: 6900 - DNA, 25 bp, Saccharomyces pastorianus
gacagtcactcagcagaattctacc

SEQ ID NO: 6901 - DNA, 25 bp, Saccharomyces pastorianus
tttcttgggtttggtggctgcctcc

SEQ ID NO: 6902 - DNA, 25 bp, Saccharomyces pastorianus
gaagaatcatccctactatatcgcc

SEQ ID NO: 6903 - DNA, 25 bp, Saccharomyces pastorianus
tgaaatccgcgaaagacaccgtcac

SEQ ID NO: 6904 - DNA, 25 bp, Saccharomyces pastorianus
cttatttccaaaacgacaccgagtg

SEQ ID NO: 6905 - DNA, 25 bp, Saccharomyces pastorianus
gaattctacccagacatcgacgaaa

SEQ ID NO: 6906 - DNA, 25 bp, Saccharomyces pastorianus
tacggcgatgcttctgaaatccgcg

SEQ ID NO: 6907 - DNA, 25 bp, Saccharomyces pastorianus
atgtcgttgtcttcatgccggaaat

SEQ ID NO: 6908 - DNA, 25 bp, Saccharomyces pastorianus
aaaagctggtaccaaattgcctggg

SEQ ID NO: 6909 - DNA, 25 bp, Saccharomyces pastorianus
agtcggattgcgtagctttaagaat

SEQ ID NO: 6910 - DNA, 25 bp, Saccharomyces pastorianus
caagcacgagtatgcgccaaggttt

SEQ ID NO: 6911 - DNA, 25 bp, Saccharomyces pastorianus
gcagagtacccgttcgtaccggtgg

SEQ ID NO: 6912 - DNA, 25 bp, Saccharomyces pastorianus
agacgatcccgtgaagaatttctac

SEQ ID NO: 6913 - DNA, 25 bp, Saccharomyces pastorianus
tattaaccctattgctaagagattc

SEQ ID NO: 6914 - DNA, 25 bp, Saccharomyces pastorianus
tacaattcggtaagtacgggctacg

SEQ ID NO: 6915 - DNA, 25 bp, Saccharomyces pastorianus
gtatcaggataactgcacagcaact

SEQ ID NO: 6916 - DNA, 25 bp, Saccharomyces pastorianus
gagaatgcaaagaaaccgtccaaga

SEQ ID NO: 6917 - DNA, 25 bp, Saccharomyces pastorianus
tgtacaaacgttgccgtctgtgtta

SEQ ID NO: 6918 - DNA, 25 bp, Saccharomyces pastorianus
gagatacgtcagacctttgaccaat

SEQ ID NO: 6919 - DNA, 25 bp, Saccharomyces pastorianus
tgatcatgaacgtcaacgtgccctc

SEQ ID NO: 6920 - DNA, 25 bp, Saccharomyces pastorianus
gataatcccgagtatgtgatcatga

SEQ ID NO: 6921 - DNA, 25 bp, Saccharomyces pastorianus
aagtatgcacttgaccttagcacaa

SEQ ID NO: 6922 - DNA, 25 bp, Saccharomyces pastorianus
gaaaacagctatcggtgtgaccaca

SEQ ID NO: 6923 - DNA, 25 bp, Saccharomyces pastorianus
gtttggcaaatgttacctgtaagac

SEQ ID NO: 6924 - DNA, 25 bp, Saccharomyces pastorianus
atagcacactatttgtctcaggtat

SEQ ID NO: 6925 - DNA, 25 bp, Saccharomyces pastorianus
gtaagacaacgacagctggtcccct

SEQ ID NO: 6926 - DNA, 25 bp, Saccharomyces pastorianus
gctgctacgatcaagccccataaaa

SEQ ID NO: 6927 - DNA, 25 bp, Saccharomyces pastorianus
gttggagaacattgagcgacgctct

SEQ ID NO: 6928 - DNA, 25 bp, Saccharomyces pastorianus
ggaactttggttgcctaatgaaaat

SEQ ID NO: 6929 - DNA, 25 bp, Saccharomyces pastorianus
gcacaattcattggccgttggagaa

SEQ ID NO: 6930 - DNA, 25 bp, Saccharomyces pastorianus
aaatcctgtacgatcatggtgtaag

SEQ ID NO: 6931 - DNA, 25 bp, Saccharomyces pastorianus
tattacctgatgatattgactggca

SEQ ID NO: 6932 - DNA, 25 bp, Saccharomyces pastorianus
ctttctttttgtctgacgagtgcaa

SEQ ID NO: 6933 - DNA, 25 bp, Saccharomyces pastorianus
aaaacaaggatttcaccacgctggt

SEQ ID NO: 6934 - DNA, 25 bp, Saccharomyces pastorianus
gttgaaaccggccagtgatataaaa

SEQ ID NO: 6935 - DNA, 25 bp, Saccharomyces pastorianus
agtaccaaatttgcgcattgttgaa

SEQ ID NO: 6936 - DNA, 25 bp, Saccharomyces pastorianus
cattgttgaaacagtcgactccttg

SEQ ID NO: 6937 - DNA, 25 bp, Saccharomyces pastorianus
tcaccacgctggttagttggaagca

SEQ ID NO: 6938 - DNA, 25 bp, Saccharomyces pastorianus
ctattggctcatggaatgtttccca

SEQ ID NO: 6939 - DNA, 25 bp, Saccharomyces pastorianus
aatttcaacctgattgtgacccaat

SEQ ID NO: 6940 - DNA, 25 bp, Saccharomyces pastorianus
actggcattttgtcggtggtttgca

SEQ ID NO: 6941 - DNA, 25 bp, Saccharomyces pastorianus
gagcatatcttgcaacagcgcagat

SEQ ID NO: 6942 - DNA, 25 bp, Saccharomyces pastorianus
gtgccgacttggacgtaggttacct

SEQ ID NO: 6943 - DNA, 25 bp, Saccharomyces pastorianus
tatatttccaggcagcattcgtaca

SEQ ID NO: 6944 - DNA, 25 bp, Saccharomyces pastorianus
cgggttcaccccagacataatgatt

SEQ ID NO: 6945 - DNA, 25 bp, Saccharomyces pastorianus
aggtggtactacttcatcgagatat

SEQ ID NO: 6946 - DNA, 25 bp, Saccharomyces pastorianus
tgaagagcctgtctatctccacaat

SEQ ID NO: 6947 - DNA, 25 bp, Saccharomyces pastorianus
aagtgtgtaacgaatccttcctcct

SEQ ID NO: 6948 - DNA, 25 bp, Saccharomyces pastorianus
atagaggctcgtatgcacaaatcac

SEQ ID NO: 6949 - DNA, 25 bp, Saccharomyces pastorianus
agtgacctacagtactttgcaagag

SEQ ID NO: 6950 - DNA, 25 bp, Saccharomyces pastorianus
gactggaccgtgtttcggagcatat

SEQ ID NO: 6951 - DNA, 25 bp, Saccharomyces pastorianus
gcgtatccacaagcctctttgatta

SEQ ID NO: 6952 - DNA, 25 bp, Saccharomyces pastorianus
ggcgtgatcgtgtacctcagacaag

SEQ ID NO: 6953 - DNA, 25 bp, Saccharomyces pastorianus
ctggacctgggcgttgcaaacatca

SEQ ID NO: 6954 - DNA, 25 bp, Saccharomyces pastorianus
gtgagccctcgagcaacattcaagg

SEQ ID NO: 6955 - DNA, 25 bp, Saccharomyces pastorianus
atcatacgctagtccggatacactc

SEQ ID NO: 6956 - DNA, 25 bp, Saccharomyces pastorianus
aaacaggtagaacacgtgccgctcc

SEQ ID NO: 6957 - DNA, 25 bp, Saccharomyces pastorianus
agaatgggccacctactgacggagc

SEQ ID NO: 6958 - DNA, 25 bp, Saccharomyces pastorianus
aaaacgcctggagtgcccgttgcga

SEQ ID NO: 6959 - DNA, 25 bp, Saccharomyces pastorianus
gagacttctcgctaggcaaggccat

SEQ ID NO: 6960 - DNA, 25 bp, Saccharomyces pastorianus
tgagcgagtgcccatggtgcctata

SEQ ID NO: 6961 - DNA, 25 bp, Saccharomyces pastorianus
gcaggctcattgcatgcgaccgtga

SEQ ID NO: 6962 - DNA, 25 bp, Saccharomyces pastorianus
aatctgcaggacttgggcgctgaca

SEQ ID NO: 6963 - DNA, 25 bp, Saccharomyces pastorianus
gaagctgcggaactcactggtcaat

SEQ ID NO: 6964 - DNA, 25 bp, Saccharomyces pastorianus
gcatcggtgcatccacgatctaaat

SEQ ID NO: 6965 - DNA, 25 bp, Saccharomyces pastorianus
aaagcccaaaccgttcatgcagaag

SEQ ID NO: 6966 - DNA, 25 bp, Saccharomyces pastorianus
ttacattctaagaccaggccagcag

SEQ ID NO: 6967 - DNA, 25 bp, Saccharomyces pastorianus
gaatgacatcgcagccagggcaagg

SEQ ID NO: 6968 - DNA, 25 bp, Saccharomyces pastorianus
gttgtccagccatctcaaacaagac

SEQ ID NO: 6969 - DNA, 25 bp, Saccharomyces pastorianus
aactgcgccaggaacgagttctcag

SEQ ID NO: 6970 - DNA, 25 bp, Saccharomyces pastorianus
gaacacgccgttgtcaaagcccaaa

SEQ ID NO: 6971 - DNA, 25 bp, Saccharomyces pastorianus
gaagccgaactttttaatgcccact

SEQ ID NO: 6972 - DNA, 25 bp, Saccharomyces pastorianus
aggccgtcacactcaattcaataca

SEQ ID NO: 6973 - DNA, 25 bp, Saccharomyces pastorianus
gtacatcctaatgctcaccgcaatg

SEQ ID NO: 6974 - DNA, 25 bp, Saccharomyces pastorianus
atgagaaagattatcgccgccgaag

SEQ ID NO: 6975 - DNA, 25 bp, Saccharomyces pastorianus
acatcttgagaggtgttgccggtgc

SEQ ID NO: 6976 - DNA, 25 bp, Saccharomyces pastorianus
caagaagggtggtgctcgtcaattc

SEQ ID NO: 6977 - DNA, 25 bp, Saccharomyces pastorianus
tgccggtgctttgtcattgatgttt

SEQ ID NO: 6978 - DNA, 25 bp, Saccharomyces pastorianus
tcaacgggttagtcgatgtttacaa

SEQ ID NO: 6979 - DNA, 25 bp, Saccharomyces pastorianus
ctgctgactctaaatcctccaagaa

SEQ ID NO: 6980 - DNA, 25 bp, Saccharomyces pastorianus
atggttcgccggtaatttggcatcc

SEQ ID NO: 6981 - DNA, 25 bp, Saccharomyces pastorianus
gtttgtacgattccttgaagcctgt

SEQ ID NO: 6982 - DNA, 25 bp, Saccharomyces pastorianus
tgccggtgctggtgttatttcaatg

SEQ ID NO: 6983 - DNA, 25 bp, Saccharomyces pastorianus
gccgaaggtgtttcttctctattca

SEQ ID NO: 6984 - DNA, 25 bp, Saccharomyces pastorianus
gtttgtctactctttggattacgca

SEQ ID NO: 6985 - DNA, 25 bp, Saccharomyces pastorianus
gaacagctcaacaaagttatccaag

SEQ ID NO: 6986 - DNA, 25 bp, Saccharomyces pastorianus
attggcgacaagacttcaaaaacga

SEQ ID NO: 6987 - DNA, 25 bp, Saccharomyces pastorianus
gggcaaacagctgcattgtcccatc

SEQ ID NO: 6988 - DNA, 25 bp, Saccharomyces pastorianus
agaatctatactgtccgaactgcca

SEQ ID NO: 6989 - DNA, 25 bp, Saccharomyces pastorianus
tgtgcccgcacaccagaatctatac

SEQ ID NO: 6990 - DNA, 25 bp, Saccharomyces pastorianus
attgtcccatctgcaattggcgaca

SEQ ID NO: 6991 - DNA, 25 bp, Saccharomyces pastorianus
tcagcgtgtgccctatcaagagaaa

SEQ ID NO: 6992 - DNA, 25 bp, Saccharomyces pastorianus
tcgttcgtccccattgtatgtggta

SEQ ID NO: 6993 - DNA, 25 bp, Saccharomyces pastorianus
gactcttcatacgattctgtgcccg

SEQ ID NO: 6994 - DNA, 25 bp, Saccharomyces pastorianus
ataccgctgcttcctgtgttctggg

SEQ ID NO: 6995 - DNA, 25 bp, Saccharomyces pastorianus
gaactgccacaatttcagcgtgtgc

SEQ ID NO: 6996 - DNA, 25 bp, Saccharomyces pastorianus
tccggaatacgaccaatccattttg

SEQ ID NO: 6997 - DNA, 25 bp, Saccharomyces pastorianus
cccgctaggctacaagacatggatt

SEQ ID NO: 6998 - DNA, 25 bp, Saccharomyces pastorianus
gttgagcaagatcccgttccttctt

SEQ ID NO: 6999 - DNA, 25 bp, Saccharomyces pastorianus
gaacgcttcatactgggcattttcc

SEQ ID NO: 7000 - DNA, 25 bp, Saccharomyces pastorianus
ggatttcaccataaacgccgttgag

SEQ ID NO: 7001 - DNA, 25 bp, Saccharomyces pastorianus
aatttcagactccagattatccgct

SEQ ID NO: 7002 - DNA, 25 bp, Saccharomyces pastorianus
tatccgctgaaggtttggctaaagt

SEQ ID NO: 7003 - DNA, 25 bp, Saccharomyces pastorianus
aaatcctgtcacgattcattctctc

SEQ ID NO: 7004 - DNA, 25 bp, Saccharomyces pastorianus
gaatgaactcaattacccgctaggc

SEQ ID NO: 7005 - DNA, 25 bp, Saccharomyces pastorianus
gagtcttcagaatcgtcatcgtctt

SEQ ID NO: 7006 - DNA, 25 bp, Saccharomyces pastorianus
acttcgaaacaaacagcgccatctt

SEQ ID NO: 7007 - DNA, 25 bp, Saccharomyces pastorianus
gagacgtgcagttttccagaaagta

SEQ ID NO: 7008 - DNA, 25 bp, Saccharomyces pastorianus
gaaagtagtggacgcacgtgaacaa

SEQ ID NO: 7009 - DNA, 25 bp, Saccharomyces pastorianus
gagatggtagacatcacatctacaa

SEQ ID NO: 7010 - DNA, 25 bp, Saccharomyces pastorianus
gaatgtaagcacttctggttggaga

SEQ ID NO: 7011 - DNA, 25 bp, Saccharomyces pastorianus
gctcaagcagaagctagcagaccta

SEQ ID NO: 7012 - DNA, 25 bp, Saccharomyces pastorianus
acatctacaagaaagccaagctgac

SEQ ID NO: 7013 - DNA, 25 bp, Saccharomyces pastorianus
ccaaatcgatacgtgcaagcagtca

SEQ ID NO: 7014 - DNA, 25 bp, Saccharomyces pastorianus
gaatcgaaatcgaggtcgacgagaa

SEQ ID NO: 7015 - DNA, 25 bp, Saccharomyces pastorianus
agtcatctaaatgccaagtctatca

SEQ ID NO: 7016 - DNA, 25 bp, Saccharomyces pastorianus
ctatcaagagacgtgcagttttcca

SEQ ID NO: 7017 - DNA, 25 bp, Saccharomyces pastorianus
gaaagccaagctgacgaaaaaatcc

SEQ ID NO: 7018 - DNA, 25 bp, Saccharomyces pastorianus
agtcttgtcacattgggcttgctta

SEQ ID NO: 7019 - DNA, 25 bp, Saccharomyces pastorianus
aaggaatttggaacgcatacagtga

SEQ ID NO: 7020 - DNA, 25 bp, Saccharomyces pastorianus
gtgtctaagtaagtacccacattta

SEQ ID NO: 7021 - DNA, 25 bp, Saccharomyces pastorianus
agtgcagatgaagtactcgctgaaa

SEQ ID NO: 7022 - DNA, 25 bp, Saccharomyces pastorianus
gacttacgcgtggtacactactacg

SEQ ID NO: 7023 - DNA, 25 bp, Saccharomyces pastorianus
taacgtggtccctataccattcaaa

SEQ ID NO: 7024 - DNA, 25 bp, Saccharomyces pastorianus
gggaccatgcgaatttatatcaaag

SEQ ID NO: 7025 - DNA, 25 bp, Saccharomyces pastorianus
taaaaccatcggaaagggaccatgc

SEQ ID NO: 7026 - DNA, 25 bp, Saccharomyces pastorianus
gttcccgatatcgacttacgcgtgg

SEQ ID NO: 7027 - DNA, 25 bp, Saccharomyces pastorianus
actacgccacacagctgtgtctaag

SEQ ID NO: 7028 - DNA, 25 bp, Saccharomyces pastorianus
tttgagggcaatatcgttcccgata

SEQ ID NO: 7029 - DNA, 25 bp, Saccharomyces pastorianus
tatgccagaaccaaggtctacccta

SEQ ID NO: 7030 - DNA, 25 bp, Saccharomyces pastorianus
ctgaccgaaggttggctacgtttgt

SEQ ID NO: 7031 - DNA, 25 bp, Saccharomyces pastorianus
ggttagtagagtatacgccgaccta

SEQ ID NO: 7032 - DNA, 25 bp, Saccharomyces pastorianus
tcaaaaggtcagtgttcgtcgccaa

SEQ ID NO: 7033 - DNA, 25 bp, Saccharomyces pastorianus
caaggtcgtggttgattcatttgtt

SEQ ID NO: 7034 - DNA, 25 bp, Saccharomyces pastorianus
tatttctaccggttcattcccaatt

SEQ ID NO: 7035 - DNA, 25 bp, Saccharomyces pastorianus
gtttaactgaaccaatcctttcaag

SEQ ID NO: 7036 - DNA, 25 bp, Saccharomyces pastorianus
acgtttgttgttgattctcatgtga

SEQ ID NO: 7037 - DNA, 25 bp, Saccharomyces pastorianus
acattacctctagctcaaaacgtta

SEQ ID NO: 7038 - DNA, 25 bp, Saccharomyces pastorianus
attaccgtccgtcatttagaatcca

SEQ ID NO: 7039 - DNA, 25 bp, Saccharomyces pastorianus
gatcttgttgatgaggaggctgacc

SEQ ID NO: 7040 - DNA, 25 bp, Saccharomyces pastorianus
tgaacacgtcagtacaagcccggag

SEQ ID NO: 7041 - DNA, 25 bp, Saccharomyces pastorianus
gaggacatcctgatatcactgcatg

SEQ ID NO: 7042 - DNA, 25 bp, Saccharomyces pastorianus
gtgccaaggtttcgaaggacgccaa

SEQ ID NO: 7043 - DNA, 25 bp, Saccharomyces pastorianus
cactgcatgctctgggctttgagaa

SEQ ID NO: 7044 - DNA, 25 bp, Saccharomyces pastorianus
acatccaggaaaacggcgggcacgc

SEQ ID NO: 7045 - DNA, 25 bp, Saccharomyces pastorianus
gtacaagcccggaggacatccagga

SEQ ID NO: 7046 - DNA, 25 bp, Saccharomyces pastorianus
gagtgtgtaagcgagctcatctcct

SEQ ID NO: 7047 - DNA, 25 bp, Saccharomyces pastorianus
aagtacagacaacagcaggcgctga

SEQ ID NO: 7048 - DNA, 25 bp, Saccharomyces pastorianus
agcggcagccaacagcagatctcca

SEQ ID NO: 7049 - DNA, 25 bp, Saccharomyces pastorianus
gtgctgaagatctacctggccaagt

SEQ ID NO: 7050 - DNA, 25 bp, Saccharomyces pastorianus
atggctgcccatcaacaacgtggcg

SEQ ID NO: 7051 - DNA, 25 bp, Saccharomyces pastorianus
cgtattgggttctgaccattgtcct

SEQ ID NO: 7052 - DNA, 25 bp, Saccharomyces pastorianus
gaagacatctaagaccttggccaat

SEQ ID NO: 7053 - DNA, 25 bp, Saccharomyces pastorianus
aggtgacatccttccagacgtattg

SEQ ID NO: 7054 - DNA, 25 bp, Saccharomyces pastorianus
attgtcctgtatactctgatttagc

SEQ ID NO: 7055 - DNA, 25 bp, Saccharomyces pastorianus
gacagcaaaccactcgattcatttt

SEQ ID NO: 7056 - DNA, 25 bp, Saccharomyces pastorianus
gactttatcttggtatcctcgaaac

SEQ ID NO: 7057 - DNA, 25 bp, Saccharomyces pastorianus
gaccttggccaatcctggtaaaaag

SEQ ID NO: 7058 - DNA, 25 bp, Saccharomyces pastorianus
gtgaaacctaacacggctaacgttg

SEQ ID NO: 7059 - DNA, 25 bp, Saccharomyces pastorianus
aagtcttcggaattaccagagccaa

SEQ ID NO: 7060 - DNA, 25 bp, Saccharomyces pastorianus
taacgttgccatcccaaaattcgaa

SEQ ID NO: 7061 - DNA, 25 bp, Saccharomyces pastorianus
gagatctcgaggtgattcaagcaat

SEQ ID NO: 7062 - DNA, 25 bp, Saccharomyces pastorianus
gctgcacattctaagattgtccgat

SEQ ID NO: 7063 - DNA, 25 bp, Saccharomyces pastorianus
atggctctgataatgcacatcttaa

SEQ ID NO: 7064 - DNA, 25 bp, Saccharomyces pastorianus
atttcaagatcgattacaccccacc

SEQ ID NO: 7065 - DNA, 25 bp, Saccharomyces pastorianus
gtaacgaacttgactgggcacactc

SEQ ID NO: 7066 - DNA, 25 bp, Saccharomyces pastorianus
ccccacccatgactttgaaatctat

SEQ ID NO: 7067 - DNA, 25 bp, Saccharomyces pastorianus
attgtccgataacgatggctctgat

SEQ ID NO: 7068 - DNA, 25 bp, Saccharomyces pastorianus
accatgataggctgtgtcaatccat

SEQ ID NO: 7069 - DNA, 25 bp, Saccharomyces pastorianus
ataccgcaattgctagcggccgatt

SEQ ID NO: 7070 - DNA, 25 bp, Saccharomyces pastorianus
ggagaagcattacgccgataccatg

SEQ ID NO: 7071 - DNA, 25 bp, Saccharomyces pastorianus
ggcacactcaaaggctccagagaga

SEQ ID NO: 7072 - DNA, 25 bp, Saccharomyces pastorianus
aacagccactggtctatttctgaga

SEQ ID NO: 7073 - DNA, 25 bp, Saccharomyces pastorianus
gtgctagcattctgtacgttactga

SEQ ID NO: 7074 - DNA, 25 bp, Saccharomyces pastorianus
tcaaagaccatggaactcctctgtc

SEQ ID NO: 7075 - DNA, 25 bp, Saccharomyces pastorianus
agccgacatcctgggctacttttga

SEQ ID NO: 7076 - DNA, 25 bp, Saccharomyces pastorianus
gggaatgttactctgattgatctaa

SEQ ID NO: 7077 - DNA, 25 bp, Saccharomyces pastorianus
aaatgctgccgttttgtaagtgtaa

SEQ ID NO: 7078 - DNA, 25 bp, Saccharomyces pastorianus
caagccttggtatttttgtacttat

SEQ ID NO: 7079 - DNA, 25 bp, Saccharomyces pastorianus
gctcccacgtttcgaaccatgaaga

SEQ ID NO: 7080 - DNA, 25 bp, Saccharomyces pastorianus
ctgtccagatgtcccaagattgatt

SEQ ID NO: 7081 - DNA, 25 bp, Saccharomyces pastorianus
gattactgtcaagcgttgtccattt

SEQ ID NO: 7082 - DNA, 25 bp, Saccharomyces pastorianus
aaattggcacatttgctcgatccag

SEQ ID NO: 7083 - DNA, 25 bp, Saccharomyces pastorianus
gaagtttgttatctcagccgacatc

SEQ ID NO: 7084 - DNA, 25 bp, Saccharomyces pastorianus
tggtaatggccctccacaatcaaga

SEQ ID NO: 7085 - DNA, 25 bp, Saccharomyces pastorianus
accggtggtgccttaaatacattca

SEQ ID NO: 7086 - DNA, 25 bp, Saccharomyces pastorianus
gaaaacgggcggtattgcaccatta

SEQ ID NO: 7087 - DNA, 25 bp, Saccharomyces pastorianus
tcaacgtcggaggtgctatgcaaca

SEQ ID NO: 7088 - DNA, 25 bp, Saccharomyces pastorianus
gtaatgcaatgatggcccaacctca

SEQ ID NO: 7089 - DNA, 25 bp, Saccharomyces pastorianus
cagccccaatctcagttcggtttaa

SEQ ID NO: 7090 - DNA, 25 bp, Saccharomyces pastorianus
atgaacactttcaataccggcggcg

SEQ ID NO: 7091 - DNA, 25 bp, Saccharomyces pastorianus
ggagccatgagtactttcaacgtcg

SEQ ID NO: 7092 - DNA, 25 bp, Saccharomyces pastorianus
attcaatgctcaacctcaaatcaca

SEQ ID NO: 7093 - DNA, 25 bp, Saccharomyces pastorianus
aacaccggtgctatgatgccacaaa

SEQ ID NO: 7094 - DNA, 25 bp, Saccharomyces pastorianus
aaatcacaggtggattccagcccca

SEQ ID NO: 7095 - DNA, 25 bp, Saccharomyces pastorianus
tgggcactttggaggaatttgttaa

SEQ ID NO: 7096 - DNA, 25 bp, Saccharomyces pastorianus
atacgcctcatcaacaacaatcatc

SEQ ID NO: 7097 - DNA, 25 bp, Saccharomyces pastorianus
attctgtaaccactcttctacttcc

SEQ ID NO: 7098 - DNA, 25 bp, Saccharomyces pastorianus
gaagctcgagcttaattgccatatc

SEQ ID NO: 7099 - DNA, 25 bp, Saccharomyces pastorianus
caacaacaatcatcgcagcaagcta

SEQ ID NO: 7100 - DNA, 25 bp, Saccharomyces pastorianus
tcacccttaaagctatcatctctgt

SEQ ID NO: 7101 - DNA, 25 bp, Saccharomyces pastorianus
gtgccatatacccaagatgtgccag

SEQ ID NO: 7102 - DNA, 25 bp, Saccharomyces pastorianus
ggaattctttgacaatcgttctttt

SEQ ID NO: 7103 - DNA, 25 bp, Saccharomyces pastorianus
gttgaactctggagaagtgccatat

SEQ ID NO: 7104 - DNA, 25 bp, Saccharomyces pastorianus
agggcttctcacttaagcagcggca

SEQ ID NO: 7105 - DNA, 25 bp, Saccharomyces pastorianus
gacaacaatctgtgcctaatcaaat

SEQ ID NO: 7106 - DNA, 25 bp, Saccharomyces pastorianus
gcaccgtatggattcgtttatgtct

SEQ ID NO: 7107 - DNA, 25 bp, Saccharomyces pastorianus
tacgctaccgcgattgattttatga

SEQ ID NO: 7108 - DNA, 25 bp, Saccharomyces pastorianus
tggccacacgccattcgttatggat

SEQ ID NO: 7109 - DNA, 25 bp, Saccharomyces pastorianus
ggccttattcgttcaagtcctagac

SEQ ID NO: 7110 - DNA, 25 bp, Saccharomyces pastorianus
tctatcccagagaaccttgctaata

SEQ ID NO: 7111 - DNA, 25 bp, Saccharomyces pastorianus
aagagggcgattttagctgttaacg

SEQ ID NO: 7112 - DNA, 25 bp, Saccharomyces pastorianus
atttgtaccctatggaaagatggcc

SEQ ID NO: 7113 - DNA, 25 bp, Saccharomyces pastorianus
gaaggagagcccaggtacgctaccg

SEQ ID NO: 7114 - DNA, 25 bp, Saccharomyces pastorianus
taggtgcaccttctatcccagagaa

SEQ ID NO: 7115 - DNA, 25 bp, Saccharomyces pastorianus
gcatgcattcaactactggccttat

SEQ ID NO: 7116 - DNA, 25 bp, Saccharomyces pastorianus
gagacttactattcaagggcagttg

SEQ ID NO: 7117 - DNA, 25 bp, Saccharomyces pastorianus
aacaaaaagaccagaatcatcccaa

SEQ ID NO: 7118 - DNA, 25 bp, Saccharomyces pastorianus
aaaagaccagaatcatcccaagaca

SEQ ID NO: 7119 - DNA, 25 bp, Saccharomyces pastorianus
caaaaagaccagaatcatcccaaga

SEQ ID NO: 7120 - DNA, 25 bp, Saccharomyces pastorianus
aaaaagaccagaatcatcccaagac

SEQ ID NO: 7121 - DNA, 25 bp, Saccharomyces pastorianus
gataacaaaaagaccagaatcatcc

SEQ ID NO: 7122 - DNA, 25 bp, Saccharomyces pastorianus
acaaaaagaccagaatcatcccaag

SEQ ID NO: 7123 - DNA, 25 bp, Saccharomyces pastorianus
aaagaccagaatcatcccaagacat

SEQ ID NO: 7124 - DNA, 25 bp, Saccharomyces pastorianus
ataacaaaaagaccagaatcatccc

SEQ ID NO: 7125 - DNA, 25 bp, Saccharomyces pastorianus
taacaaaaagaccagaatcatccca

SEQ ID NO: 7126 - DNA, 25 bp, Saccharomyces pastorianus
catgtctattctaaactcctttgtt

SEQ ID NO: 7127 - DNA, 25 bp, Saccharomyces pastorianus
ccagacaccggtatttctcaaaaat

SEQ ID NO: 7128 - DNA, 25 bp, Saccharomyces pastorianus
tgtctattctaaactcctttgttaa

SEQ ID NO: 7129 - DNA, 25 bp, Saccharomyces pastorianus
gctgccaagaaaacttctacttcta

SEQ ID NO: 7130 - DNA, 25 bp, Saccharomyces pastorianus
tattctaaactcctttgttaacgat

SEQ ID NO: 7131 - DNA, 25 bp, Saccharomyces pastorianus
atgtcctctgctgccgaaaagaaac

SEQ ID NO: 7132 - DNA, 25 bp, Saccharomyces pastorianus
aaatccatgtctattctaaactcct

SEQ ID NO: 7133 - DNA, 25 bp, Saccharomyces pastorianus
ggtgaactggctaaacatgctgttt

SEQ ID NO: 7134 - DNA, 25 bp, Saccharomyces pastorianus
tctattctaaactcctttgttaacg

SEQ ID NO: 7135 - DNA, 25 bp, Saccharomyces pastorianus
ctaaactcctttgttaacgatatct

SEQ ID NO: 7136 - DNA, 25 bp, Saccharomyces pastorianus
ctcaaaaatccatgtctattctaaa

SEQ ID NO: 7137 - DNA, 25 bp, Saccharomyces pastorianus
gtacctgttggtaccaattctgcca

SEQ ID NO: 7138 - DNA, 25 bp, Saccharomyces pastorianus
gataaacatcagactgcccaagata

SEQ ID NO: 7139 - DNA, 25 bp, Saccharomyces pastorianus
gtaccacaatcgaagggccttggga

SEQ ID NO: 7140 - DNA, 25 bp, Saccharomyces pastorianus
ttagctgatgtttgtatggtacctg

SEQ ID NO: 7141 - DNA, 25 bp, Saccharomyces pastorianus
gccagtatatctgactttgttgcgt

SEQ ID NO: 7142 - DNA, 25 bp, Saccharomyces pastorianus
taaaaagtactttacacagtgccgg

SEQ ID NO: 7143 - DNA, 25 bp, Saccharomyces pastorianus
gatgggtttgatcggtgaaattcat

SEQ ID NO: 7144 - DNA, 25 bp, Saccharomyces pastorianus
atctgactttgttgcgttaattgaa

SEQ ID NO: 7145 - DNA, 25 bp, Saccharomyces pastorianus
gttggtaccaattctgccagtatat

SEQ ID NO: 7146 - DNA, 25 bp, Saccharomyces pastorianus
gggtacgtcagagttcacactgata

SEQ ID NO: 7147 - DNA, 25 bp, Saccharomyces pastorianus
acagtgccggtaccacaatcgaagg

SEQ ID NO: 7148 - DNA, 25 bp, Saccharomyces pastorianus
atcatagttgaaaaggcgctccctc

SEQ ID NO: 7149 - DNA, 25 bp, Saccharomyces pastorianus
gaaaggcttgtcctcatacggctat

SEQ ID NO: 7150 - DNA, 25 bp, Saccharomyces pastorianus
aagagctcttggtgcttgtagccca

SEQ ID NO: 7151 - DNA, 25 bp, Saccharomyces pastorianus
gggctggtcttgctaccaatgagca

SEQ ID NO: 7152 - DNA, 25 bp, Saccharomyces pastorianus
aaggcgctccctcaattggagatgc

SEQ ID NO: 7153 - DNA, 25 bp, Saccharomyces pastorianus
cattttggagtctatgggctggtct

SEQ ID NO: 7154 - DNA, 25 bp, Saccharomyces pastorianus
tgcggttgggcaccacaccaaatat

SEQ ID NO: 7155 - DNA, 25 bp, Saccharomyces pastorianus
acaatgggactatccgtgcggttgg

SEQ ID NO: 7156 - DNA, 25 bp, Saccharomyces pastorianus
taaacacgagttacttgcttgggtt

SEQ ID NO: 7157 - DNA, 25 bp, Saccharomyces pastorianus
ggaactgacccgcatcgtgtcgatg

SEQ ID NO: 7158 - DNA, 25 bp, Saccharomyces pastorianus
gcagaacttcctatgaatcagctac

SEQ ID NO: 7159 - DNA, 25 bp, Saccharomyces pastorianus
taaacatttgcttcccgtacacggg

SEQ ID NO: 7160 - DNA, 25 bp, Saccharomyces pastorianus
gttctcattccacaaatccttttta

SEQ ID NO: 7161 - DNA, 25 bp, Saccharomyces pastorianus
ggagttccacctttagacttgttga

SEQ ID NO: 7162 - DNA, 25 bp, Saccharomyces pastorianus
agtcattggcgatctttcattattg

SEQ ID NO: 7163 - DNA, 25 bp, Saccharomyces pastorianus
gcatctctatactgcgggagttcca

SEQ ID NO: 7164 - DNA, 25 bp, Saccharomyces pastorianus
gagttcgggcccatacggatggcat

SEQ ID NO: 7165 - DNA, 25 bp, Saccharomyces pastorianus
gaactattagattgcctatggccag

SEQ ID NO: 7166 - DNA, 25 bp, Saccharomyces pastorianus
ggcatggatcctattaaagttctca

SEQ ID NO: 7167 - DNA, 25 bp, Saccharomyces pastorianus
tactgtgtttgcgttctctattgaa

SEQ ID NO: 7168 - DNA, 25 bp, Saccharomyces pastorianus
gacatccaataagggcgtgcgcatt

SEQ ID NO: 7169 - DNA, 25 bp, Saccharomyces pastorianus
atcattaatgactttagcgcacgaa

SEQ ID NO: 7170 - DNA, 25 bp, Saccharomyces pastorianus
attacctaccgtacaataccttctg

SEQ ID NO: 7171 - DNA, 25 bp, Saccharomyces pastorianus
tattggcttgcgttttggataccct

SEQ ID NO: 7172 - DNA, 25 bp, Saccharomyces pastorianus
tacacctttggtacttggccgatag

SEQ ID NO: 7173 - DNA, 25 bp, Saccharomyces pastorianus
attcctatatccagggccattattg

SEQ ID NO: 7174 - DNA, 25 bp, Saccharomyces pastorianus
ttagcaaaatctacccatcctacaa

SEQ ID NO: 7175 - DNA, 25 bp, Saccharomyces pastorianus
gattactaatgttttccgccttaat

SEQ ID NO: 7176 - DNA, 25 bp, Saccharomyces pastorianus
tagcctcttttataccattacacct

SEQ ID NO: 7177 - DNA, 25 bp, Saccharomyces pastorianus
agacttctctgtattcctatatcca

SEQ ID NO: 7178 - DNA, 25 bp, Saccharomyces pastorianus
gcaatttgctttccattgttgtcag

SEQ ID NO: 7179 - DNA, 25 bp, Saccharomyces pastorianus
gaagcccctagtatggattaccaga

SEQ ID NO: 7180 - DNA, 25 bp, Saccharomyces pastorianus
atggtatgtctttttgctcacgtcc

SEQ ID NO: 7181 - DNA, 25 bp, Saccharomyces pastorianus
ggtcctttatgtccaattttttcat

SEQ ID NO: 7182 - DNA, 25 bp, Saccharomyces pastorianus
ggactgttctctaccattcggtggt

SEQ ID NO: 7183 - DNA, 25 bp, Saccharomyces pastorianus
aataggctatacgttcactcttcca

SEQ ID NO: 7184 - DNA, 25 bp, Saccharomyces pastorianus
caccaacggccattgttgccaaaga

SEQ ID NO: 7185 - DNA, 25 bp, Saccharomyces pastorianus
accgagtttggtttggcagcttacg

SEQ ID NO: 7186 - DNA, 25 bp, Saccharomyces pastorianus
ggtgttgatgactataccgtcttga

SEQ ID NO: 7187 - DNA, 25 bp, Saccharomyces pastorianus
agaaggctcgctacatggtgttgat

SEQ ID NO: 7188 - DNA, 25 bp, Saccharomyces pastorianus
atattgtcacatgtgccaccaacgg

SEQ ID NO: 7189 - DNA, 25 bp, Saccharomyces pastorianus
aagttattcttgagggtggccgcct

SEQ ID NO: 7190 - DNA, 25 bp, Saccharomyces pastorianus
gccgccttcctgatttaggacctaa

SEQ ID NO: 7191 - DNA, 25 bp, Saccharomyces pastorianus
aatacaggtgtcttctcggactgtt

SEQ ID NO: 7192 - DNA, 25 bp, Saccharomyces pastorianus
aaaagcctgcatgtgtggtaacaag

SEQ ID NO: 7193 - DNA, 25 bp, Saccharomyces pastorianus
aaatgacattcctgatatagcgcct

SEQ ID NO: 7194 - DNA, 25 bp, Saccharomyces pastorianus
gagacttcacatatcgggttggcaa

SEQ ID NO: 7195 - DNA, 25 bp, Saccharomyces pastorianus
gggttggcaattaccatgcgtcatc

SEQ ID NO: 7196 - DNA, 25 bp, Saccharomyces pastorianus
aagctgccatattgggccatgtaga

SEQ ID NO: 7197 - DNA, 25 bp, Saccharomyces pastorianus
atcctttaccactgaagttcttaat

SEQ ID NO: 7198 - DNA, 25 bp, Saccharomyces pastorianus
aaaggtcttggagtagactacccag

SEQ ID NO: 7199 - DNA, 25 bp, Saccharomyces pastorianus
gaatccgcccaacgcctgaaaaaag

SEQ ID NO: 7200 - DNA, 25 bp, Saccharomyces pastorianus
gagagcagctgcatggtttagaata

SEQ ID NO: 7201 - DNA, 25 bp, Saccharomyces pastorianus
gacagcattcttgctttatgggcta

SEQ ID NO: 7202 - DNA, 25 bp, Saccharomyces pastorianus
ttatgggctagctctacgacacggt

SEQ ID NO: 7203 - DNA, 25 bp, Saccharomyces pastorianus
atctccggtttaatctacgaagaag

SEQ ID NO: 7204 - DNA, 25 bp, Saccharomyces pastorianus
tggtgtcaagcgtatctccggttta

SEQ ID NO: 7205 - DNA, 25 bp, Saccharomyces pastorianus
agcgtatctccggtttaatctacga

SEQ ID NO: 7206 - DNA, 25 bp, Saccharomyces pastorianus
tcaagcgtatctccggtttaatcta

SEQ ID NO: 7207 - DNA, 25 bp, Saccharomyces pastorianus
gtgtcaagcgtatctccggtttaat

SEQ ID NO: 7208 - DNA, 25 bp, Saccharomyces pastorianus
gcgtatctccggtttaatctacgaa

SEQ ID NO: 7209 - DNA, 25 bp, Saccharomyces pastorianus
gtcaagcgtatctccggtttaatct

SEQ ID NO: 7210 - DNA, 25 bp, Saccharomyces pastorianus
tgtcaagcgtatctccggtttaatc

SEQ ID NO: 7211 - DNA, 25 bp, Saccharomyces pastorianus
tctccggtttaatctacgaagaagt

SEQ ID NO: 7212 - DNA, 25 bp, Saccharomyces pastorianus
gtatctccggtttaatctacgaaga

SEQ ID NO: 7213 - DNA, 25 bp, Saccharomyces pastorianus
ggtgtcaagcgtatctccggtttaa

SEQ ID NO: 7214 - DNA, 25 bp, Saccharomyces pastorianus
tgaagacactaacttggctgccatc

SEQ ID NO: 7215 - DNA, 25 bp, Saccharomyces pastorianus
gaagacactaacttggctgccatcc

SEQ ID NO: 7216 - DNA, 25 bp, Saccharomyces pastorianus
aagacactaacttggctgccatcca

SEQ ID NO: 7217 - DNA, 25 bp, Saccharomyces pastorianus
ctgatttgagattccaatcttctgc

SEQ ID NO: 7218 - DNA, 25 bp, Saccharomyces pastorianus
aggtaccgtcgccttgagagaaatc

SEQ ID NO: 7219 - DNA, 25 bp, Saccharomyces pastorianus
gatttcaagactgatttgagattcc

SEQ ID NO: 7220 - DNA, 25 bp, Saccharomyces pastorianus
gtaccgtcgccttgagagaaatcag

SEQ ID NO: 7221 - DNA, 25 bp, Saccharomyces pastorianus
agactgatttgagattccaatcttc

SEQ ID NO: 7222 - DNA, 25 bp, Saccharomyces pastorianus
taccgtcgccttgagagaaatcaga

SEQ ID NO: 7223 - DNA, 25 bp, Saccharomyces pastorianus
tcaagactgatttgagattccaatc

SEQ ID NO: 7224 - DNA, 25 bp, Saccharomyces pastorianus
ggtaccgtcgccttgagagaaatca

SEQ ID NO: 7225 - DNA, 25 bp, Saccharomyces pastorianus
caaagccgtcggtgacaacgatcca

SEQ ID NO: 7226 - DNA, 25 bp, Saccharomyces pastorianus
gaaactcacgaatcttggaagcaat

SEQ ID NO: 7227 - DNA, 25 bp, Saccharomyces pastorianus
aaccgactggaaagtcattgccatt

SEQ ID NO: 7228 - DNA, 25 bp, Saccharomyces pastorianus
tattccaccagctgctccaaaggaa

SEQ ID NO: 7229 - DNA, 25 bp, Saccharomyces pastorianus
ggacatcatcaaggaaactcacgaa

SEQ ID NO: 7230 - DNA, 25 bp, Saccharomyces pastorianus
gctttaggtgtcatggctttgttag

SEQ ID NO: 7231 - DNA, 25 bp, Saccharomyces pastorianus
gaagatccaaatgaaagccacccag

SEQ ID NO: 7232 - DNA, 25 bp, Saccharomyces pastorianus
tacggtgctttaccacaaacctggg

SEQ ID NO: 7233 - DNA, 25 bp, Saccharomyces pastorianus
taattgccggcaagtcttctgacaa

SEQ ID NO: 7234 - DNA, 25 bp, Saccharomyces pastorianus
ttcccaggtctattgagagctacca

SEQ ID NO: 7235 - DNA, 25 bp, Saccharomyces pastorianus
gaacagaaagtacgctttggacatc

SEQ ID NO: 7236 - DNA, 25 bp, Saccharomyces pastorianus
gggtccccgccgtgataaatgcgat

SEQ ID NO: 7237 - DNA, 25 bp, Saccharomyces pastorianus
gaaccgcgatgagcaatgacaccat

SEQ ID NO: 7238 - DNA, 25 bp, Saccharomyces pastorianus
gaggccaacgtgtttgcgcaggaca

SEQ ID NO: 7239 - DNA, 25 bp, Saccharomyces pastorianus
gaagatcatcaacgttacccacacg

SEQ ID NO: 7240 - DNA, 25 bp, Saccharomyces pastorianus
aaatctccaacatcaatttcacgcc

SEQ ID NO: 7241 - DNA, 25 bp, Saccharomyces pastorianus
gacagagttgttttgccttgttagg

SEQ ID NO: 7242 - DNA, 25 bp, Saccharomyces pastorianus
gcgttttccaccgattcaaactgga

SEQ ID NO: 7243 - DNA, 25 bp, Saccharomyces pastorianus
gaatcgttctagacctgtttaccac

SEQ ID NO: 7244 - DNA, 25 bp, Saccharomyces pastorianus
aatggtgcctgtgtgtgaatgcctt

SEQ ID NO: 7245 - DNA, 25 bp, Saccharomyces pastorianus
ataaatgcgatctgggcgctcgggt

SEQ ID NO: 7246 - DNA, 25 bp, Saccharomyces pastorianus
tgtttaccaccactacacaaatcgt

SEQ ID NO: 7247 - DNA, 25 bp, Saccharomyces pastorianus
gactctttcatgattgttgttccat

SEQ ID NO: 7248 - DNA, 25 bp, Saccharomyces pastorianus
gcacaacgctgacttatttgccgat

SEQ ID NO: 7249 - DNA, 25 bp, Saccharomyces pastorianus
gactgccatgggttgttctaactta

SEQ ID NO: 7250 - DNA, 25 bp, Saccharomyces pastorianus
gccaagcctggtgtttagaagccat

SEQ ID NO: 7251 - DNA, 25 bp, Saccharomyces pastorianus
aagccattcctagcgaagtttccca

SEQ ID NO: 7252 - DNA, 25 bp, Saccharomyces pastorianus
tatgggtattcatcaggctccctta

SEQ ID NO: 7253 - DNA, 25 bp, Saccharomyces pastorianus
tgcatttctatccaccattgttgag

SEQ ID NO: 7254 - DNA, 25 bp, Saccharomyces pastorianus
tttaactcccgaacaggctgcggaa

SEQ ID NO: 7255 - DNA, 25 bp, Saccharomyces pastorianus
ggctcccttaaatgcgactggtgaa

SEQ ID NO: 7256 - DNA, 25 bp, Saccharomyces pastorianus
ggctgtttggccatttgagaccata

SEQ ID NO: 7257 - DNA, 25 bp, Saccharomyces pastorianus
gattgcctctattagccattttgac

SEQ ID NO: 7258 - DNA, 25 bp, Saccharomyces pastorianus
ggacactgaatttccaggtgatcta

SEQ ID NO: 7259 - DNA, 25 bp, Saccharomyces pastorianus
aggctttccatccagactctaaaat

SEQ ID NO: 7260 - DNA, 25 bp, Saccharomyces pastorianus
ttatctgccggttacacagcaagac

SEQ ID NO: 7261 - DNA, 25 bp, Saccharomyces pastorianus
gtttcgctgtcgaacctggtagata

SEQ ID NO: 7262 - DNA, 25 bp, Saccharomyces pastorianus
ctaaccaaccatacttacttcaatc

SEQ ID NO: 7263 - DNA, 25 bp, Saccharomyces pastorianus
acactggtgatttcttatctgccgg

SEQ ID NO: 7264 - DNA, 25 bp, Saccharomyces pastorianus
gactgctggtgaagccacaccatta

SEQ ID NO: 7265 - DNA, 25 bp, Saccharomyces pastorianus
agaatgaaccaacgcttgtcgccaa

SEQ ID NO: 7266 - DNA, 25 bp, Saccharomyces pastorianus
gcctcatagagacaccatcgacggt

SEQ ID NO: 7267 - DNA, 25 bp, Saccharomyces pastorianus
gtacagtatactttgaatgtcgcca

SEQ ID NO: 7268 - DNA, 25 bp, Saccharomyces pastorianus
caaaaatgtcattcccacgggtaag

SEQ ID NO: 7269 - DNA, 25 bp, Saccharomyces pastorianus
taacacacatttactcccatcagaa

SEQ ID NO: 7270 - DNA, 25 bp, Saccharomyces pastorianus
cgttggctgcttatttgtgtggtat

SEQ ID NO: 7271 - DNA, 25 bp, Saccharomyces pastorianus
cggatgcccagtcaacaacatttta

SEQ ID NO: 7272 - DNA, 25 bp, Saccharomyces pastorianus
aagtgtctcagatggcgctatgaaa

SEQ ID NO: 7273 - DNA, 25 bp, Saccharomyces pastorianus
ttgtgttatttctttcctgttcccg

SEQ ID NO: 7274 - DNA, 25 bp, Saccharomyces pastorianus
gtggttcattattctgtgccgctat

SEQ ID NO: 7275 - DNA, 25 bp, Saccharomyces pastorianus
ggtgcgccagctataagtgtctcag

SEQ ID NO: 7276 - DNA, 25 bp, Saccharomyces pastorianus
ttgtttgctcggactactttgttgt

SEQ ID NO: 7277 - DNA, 25 bp, Saccharomyces pastorianus
tggcgttgtgcatctgtccgtggaa

SEQ ID NO: 7278 - DNA, 25 bp, Saccharomyces pastorianus
ttgtttgcctggttttatcgccgaa

SEQ ID NO: 7279 - DNA, 25 bp, Saccharomyces pastorianus
gtgtggtatagctccttgtttgcct

SEQ ID NO: 7280 - DNA, 25 bp, Saccharomyces pastorianus
atttgctgtctgttcacatcatcgt

SEQ ID NO: 7281 - DNA, 25 bp, Saccharomyces pastorianus
tcttgcaattgcaacggctcctggg

SEQ ID NO: 7282 - DNA, 25 bp, Saccharomyces pastorianus
taaaagcagctacgcgtcctaggat

SEQ ID NO: 7283 - DNA, 25 bp, Saccharomyces pastorianus
gaaatgccacaaattaacagcggta

SEQ ID NO: 7284 - DNA, 25 bp, Saccharomyces pastorianus
aaatggctctgctttattgggcaag

SEQ ID NO: 7285 - DNA, 25 bp, Saccharomyces pastorianus
ggtatatttggtgttccttggaaag

SEQ ID NO: 7286 - DNA, 25 bp, Saccharomyces pastorianus
gggattgcttaccaacttgctttga

SEQ ID NO: 7287 - DNA, 25 bp, Saccharomyces pastorianus
taggatccttattcactcttgcaat

SEQ ID NO: 7288 - DNA, 25 bp, Saccharomyces pastorianus
agactcggatctattaatttgctgt

SEQ ID NO: 7289 - DNA, 25 bp, Saccharomyces pastorianus
gggcaagtgcgtattacttcctagt

SEQ ID NO: 7290 - DNA, 25 bp, Saccharomyces pastorianus
catcgtttggtggttcaagtcatgc

SEQ ID NO: 7291 - DNA, 25 bp, Saccharomyces pastorianus
gacctactcctatcattactctagt

SEQ ID NO: 7292 - DNA, 25 bp, Saccharomyces pastorianus
ttgattggtactttggtgctgcctt

SEQ ID NO: 7293 - DNA, 25 bp, Saccharomyces pastorianus
gattgtcgttgtcactgctacaaga

SEQ ID NO: 7294 - DNA, 25 bp, Saccharomyces pastorianus
gtagatggatcaactccaccgtgca

SEQ ID NO: 7295 - DNA, 25 bp, Saccharomyces pastorianus
cgtcatttttgccattgtctctaga

SEQ ID NO: 7296 - DNA, 25 bp, Saccharomyces pastorianus
gggtgatacaagaaccatcgctggt

SEQ ID NO: 7297 - DNA, 25 bp, Saccharomyces pastorianus
tagcgattatccttggtttgcccgg

SEQ ID NO: 7298 - DNA, 25 bp, Saccharomyces pastorianus
gtgctgcctttagctatttgcttta

SEQ ID NO: 7299 - DNA, 25 bp, Saccharomyces pastorianus
gatgttgaggactttccccaagaga

SEQ ID NO: 7300 - DNA, 25 bp, Saccharomyces pastorianus
ccaccgtgcacaacctttttgagtt

SEQ ID NO: 7301 - DNA, 25 bp, Saccharomyces pastorianus
aggttctactttctcaacgccgtag

SEQ ID NO: 7302 - DNA, 25 bp, Saccharomyces pastorianus
atcagccttaccaaagatcatcacc

SEQ ID NO: 7303 - DNA, 25 bp, Saccharomyces pastorianus
gaccctaaatactcaatcagcctta

SEQ ID NO: 7304 - DNA, 25 bp, Saccharomyces pastorianus
gtatctatttgatcaacttgtccga

SEQ ID NO: 7305 - DNA, 25 bp, Saccharomyces pastorianus
gattattccattcagtgttccttta

SEQ ID NO: 7306 - DNA, 25 bp, Saccharomyces pastorianus
ggaagtcgaaatcattaactctatg

SEQ ID NO: 7307 - DNA, 25 bp, Saccharomyces pastorianus
ttgctaaccaatcctggactccaaa

SEQ ID NO: 7308 - DNA, 25 bp, Saccharomyces pastorianus
ttattgaattgttgaaatccggcca

SEQ ID NO: 7309 - DNA, 25 bp, Saccharomyces pastorianus
tgttcttattaaccgctaagccatg

SEQ ID NO: 7310 - DNA, 25 bp, Saccharomyces pastorianus
aatccggccaaagagttgctaacca

SEQ ID NO: 7311 - DNA, 25 bp, Saccharomyces pastorianus
caagtactccccaggtgatttgatt

SEQ ID NO: 7312 - DNA, 25 bp, Saccharomyces pastorianus
gaaagactttcccacatgtctgaag

SEQ ID NO: 7313 - DNA, 25 bp, Saccharomyces pastorianus
aatgcaggcacatccggtgtttcaa

SEQ ID NO: 7314 - DNA, 25 bp, Saccharomyces pastorianus
tggaatgtcaaaacagcctgtcact

SEQ ID NO: 7315 - DNA, 25 bp, Saccharomyces pastorianus
acttccaagggttactgggtcactg

SEQ ID NO: 7316 - DNA, 25 bp, Saccharomyces pastorianus
ggtgctaccaaagtcatttctgaat

SEQ ID NO: 7317 - DNA, 25 bp, Saccharomyces pastorianus
aaagaccctcagtgtcattcgtgac

SEQ ID NO: 7318 - DNA, 25 bp, Saccharomyces pastorianus
ttctgtcggaggcaaatccagtgct

SEQ ID NO: 7319 - DNA, 25 bp, Saccharomyces pastorianus
aatccagtgcttcaattgctcgtaa

SEQ ID NO: 7320 - DNA, 25 bp, Saccharomyces pastorianus
ctgtcactttaccaacgtcattaca

SEQ ID NO: 7321 - DNA, 25 bp, Saccharomyces pastorianus
tatcttcaaaggcttgacttccaag

SEQ ID NO: 7322 - DNA, 25 bp, Saccharomyces pastorianus
attcgtgaccgtgacaatttcgacg

SEQ ID NO: 7323 - DNA, 25 bp, Saccharomyces pastorianus
ggtgtttcaaagatcgtctcacaag

SEQ ID NO: 7324 - DNA, 25 bp, Saccharomyces pastorianus
gtactccggaatattgtgctcctga

SEQ ID NO: 7325 - DNA, 25 bp, Saccharomyces pastorianus
gtcggaaagcctccatacacaggta

SEQ ID NO: 7326 - DNA, 25 bp, Saccharomyces pastorianus
tatcgggccaagcatatactcaaaa

SEQ ID NO: 7327 - DNA, 25 bp, Saccharomyces pastorianus
gtgctcctgagatattatcgggcca

SEQ ID NO: 7328 - DNA, 25 bp, Saccharomyces pastorianus
tatcagctcggtgagcaagtctcca

SEQ ID NO: 7329 - DNA, 25 bp, Saccharomyces pastorianus
aaaactgcgactggtattccctggg

SEQ ID NO: 7330 - DNA, 25 bp, Saccharomyces pastorianus
attccctgggatgtctgttatatga

SEQ ID NO: 7331 - DNA, 25 bp, Saccharomyces pastorianus
cagagttcacctcgatgtcatatga

SEQ ID NO: 7332 - DNA, 25 bp, Saccharomyces pastorianus
ttcacggaccattttatctttagga

SEQ ID NO: 7333 - DNA, 25 bp, Saccharomyces pastorianus
agtattagaacaagccccttcacgg

SEQ ID NO: 7334 - DNA, 25 bp, Saccharomyces pastorianus
tacactcaattatcggtactccgga

SEQ ID NO: 7335 - DNA, 25 bp, Saccharomyces pastorianus
aacttgacatgtgatttgaaccctg

SEQ ID NO: 7336 - DNA, 25 bp, Saccharomyces pastorianus
gggttcgtttgccaacttatactat

SEQ ID NO: 7337 - DNA, 25 bp, Saccharomyces pastorianus
gtcaagccaatatatttccatgcct

SEQ ID NO: 7338 - DNA, 25 bp, Saccharomyces pastorianus
gtagacactgtactatccacaattt

SEQ ID NO: 7339 - DNA, 25 bp, Saccharomyces pastorianus
ttaagtccatacacctacttgacct

SEQ ID NO: 7340 - DNA, 25 bp, Saccharomyces pastorianus
atcacttctatcacagtcaagccaa

SEQ ID NO: 7341 - DNA, 25 bp, Saccharomyces pastorianus
ttgaaccctgtgtttcttccacaag

SEQ ID NO: 7342 - DNA, 25 bp, Saccharomyces pastorianus
agattttgggcactccatcccagga

SEQ ID NO: 7343 - DNA, 25 bp, Saccharomyces pastorianus
aagtttacaagctcccatctatctt

SEQ ID NO: 7344 - DNA, 25 bp, Saccharomyces pastorianus
tggttcttcacagccttggcaagca

SEQ ID NO: 7345 - DNA, 25 bp, Saccharomyces pastorianus
ttgacctgccctgtggaagatctta

SEQ ID NO: 7346 - DNA, 25 bp, Saccharomyces pastorianus
ggcggtttgatcttccctgataagt

SEQ ID NO: 7347 - DNA, 25 bp, Saccharomyces pastorianus
attattctccattcgtcccattagt

SEQ ID NO: 7348 - DNA, 25 bp, Saccharomyces pastorianus
tggtcacttggttcgacatcgtttt

SEQ ID NO: 7349 - DNA, 25 bp, Saccharomyces pastorianus
gttcgaatccaacggcattgacggt

SEQ ID NO: 7350 - DNA, 25 bp, Saccharomyces pastorianus
gacctgttgaattttccactggacc

SEQ ID NO: 7351 - DNA, 25 bp, Saccharomyces pastorianus
tacagttaaactttcggacctagct

SEQ ID NO: 7352 - DNA, 25 bp, Saccharomyces pastorianus
aatgttaacaccacctcagatgagt

SEQ ID NO: 7353 - DNA, 25 bp, Saccharomyces pastorianus
ggacacagtcctttatgccagagat

SEQ ID NO: 7354 - DNA, 25 bp, Saccharomyces pastorianus
aacaatcttctatttccctgatgac

SEQ ID NO: 7355 - DNA, 25 bp, Saccharomyces pastorianus
gacgtctacgggttcgattattctc

SEQ ID NO: 7356 - DNA, 25 bp, Saccharomyces pastorianus
aagtgttccatccatttggctggtt

SEQ ID NO: 7357 - DNA, 25 bp, Saccharomyces pastorianus
aaggaactcgaccacagaggcttca

SEQ ID NO: 7358 - DNA, 25 bp, Saccharomyces pastorianus
gaatgaccccagagaaacgttgcca

SEQ ID NO: 7359 - DNA, 25 bp, Saccharomyces pastorianus
gaggcttcaccatctattccaattg

SEQ ID NO: 7360 - DNA, 25 bp, Saccharomyces pastorianus
tcccgctggaggtcgagttctggca

SEQ ID NO: 7361 - DNA, 25 bp, Saccharomyces pastorianus
tagagattccgtgtccagattactg

SEQ ID NO: 7362 - DNA, 25 bp, Saccharomyces pastorianus
aatcactttctcctctgcggaattg

SEQ ID NO: 7363 - DNA, 25 bp, Saccharomyces pastorianus
ctctaagatcggtgcgtgggcctca

SEQ ID NO: 7364 - DNA, 25 bp, Saccharomyces pastorianus
ccattgatctcttcaccaagtggtt

SEQ ID NO: 7365 - DNA, 25 bp, Saccharomyces pastorianus
tttaagacaagaccccgtggctcta

SEQ ID NO: 7366 - DNA, 25 bp, Saccharomyces pastorianus
ggaaggcccgtgatattgctacgaa

SEQ ID NO: 7367 - DNA, 25 bp, Saccharomyces pastorianus
acgcggcaattgtgttcttctggaa

SEQ ID NO: 7368 - DNA, 25 bp, Saccharomyces pastorianus
gaatccatctccttgttgtacaatg

SEQ ID NO: 7369 - DNA, 25 bp, Saccharomyces pastorianus
gaaaggtgccttgatttgcggtctc

SEQ ID NO: 7370 - DNA, 25 bp, Saccharomyces pastorianus
caaaggctacctgtgatatgctcgc

SEQ ID NO: 7371 - DNA, 25 bp, Saccharomyces pastorianus
ggcaagctgtctgttaaccctaata

SEQ ID NO: 7372 - DNA, 25 bp, Saccharomyces pastorianus
gaccccttcttgtttgacaggttga

SEQ ID NO: 7373 - DNA, 25 bp, Saccharomyces pastorianus
catgcttttgccattcattcctaaa

SEQ ID NO: 7374 - DNA, 25 bp, Saccharomyces pastorianus
aagctcccgctgagtatttgactac

SEQ ID NO: 7375 - DNA, 25 bp, Saccharomyces pastorianus
gccctgatcggtgtcatcggtatga

SEQ ID NO: 7376 - DNA, 25 bp, Saccharomyces pastorianus
agcaaagcactcatttggccctgat

SEQ ID NO: 7377 - DNA, 25 bp, Saccharomyces pastorianus
ttctggttttcattgctcggcgcaa

SEQ ID NO: 7378 - DNA, 25 bp, Saccharomyces pastorianus
ggcgcaattttctttggcacactac

SEQ ID NO: 7379 - DNA, 25 bp, Saccharomyces pastorianus
aaggagtacttgagcgacttccatc

SEQ ID NO: 7380 - DNA, 25 bp, Saccharomyces pastorianus
ttgtcacttgtgacccggcaagaga

SEQ ID NO: 7381 - DNA, 25 bp, Saccharomyces pastorianus
tcgccagcggttttgaaggagtact

SEQ ID NO: 7382 - DNA, 25 bp, Saccharomyces pastorianus
tgtcttctaagcacggtatcactct

SEQ ID NO: 7383 - DNA, 25 bp, Saccharomyces pastorianus
tgtactttgggttcagcaactgtcc

SEQ ID NO: 7384 - DNA, 25 bp, Saccharomyces pastorianus
atctcgtacttcttcaacagggaaa

SEQ ID NO: 7385 - DNA, 25 bp, Saccharomyces pastorianus
gatcttctcggcaagttttccatat

SEQ ID NO: 7386 - DNA, 25 bp, Saccharomyces pastorianus
ggccaggactacttggtggaccact

SEQ ID NO: 7387 - DNA, 25 bp, Saccharomyces pastorianus
gtgtggctaaacgacttgtcttcta

SEQ ID NO: 7388 - DNA, 25 bp, Saccharomyces pastorianus
tccatcttgggactgacgggcacgt

SEQ ID NO: 7389 - DNA, 25 bp, Saccharomyces pastorianus
atgtcaagagctacgtgcctgcaga

SEQ ID NO: 7390 - DNA, 25 bp, Saccharomyces pastorianus
gtatattgaaagctggtacctatcc

SEQ ID NO: 7391 - DNA, 25 bp, Saccharomyces pastorianus
attcgaatacactttggccaaccaa

SEQ ID NO: 7392 - DNA, 25 bp, Saccharomyces pastorianus
ctctattttctacaatgatccagtg

SEQ ID NO: 7393 - DNA, 25 bp, Saccharomyces pastorianus
gaacctgccgaaaaaccgatcttca

SEQ ID NO: 7394 - DNA, 25 bp, Saccharomyces pastorianus
gatccagtgtcttctatatcatttg

SEQ ID NO: 7395 - DNA, 25 bp, Saccharomyces pastorianus
cattgaacagtctccatcatttggt

SEQ ID NO: 7396 - DNA, 25 bp, Saccharomyces pastorianus
ggtacctatccaaagatctctattt

SEQ ID NO: 7397 - DNA, 25 bp, Saccharomyces pastorianus
agacgcaaacgtcccaacagattta

SEQ ID NO: 7398 - DNA, 25 bp, Saccharomyces pastorianus
aaggttacgctgctgagatttctgc

SEQ ID NO: 7399 - DNA, 25 bp, Saccharomyces pastorianus
gctggtgacatgatcaaccgttact

SEQ ID NO: 7400 - DNA, 25 bp, Saccharomyces pastorianus
tgctgatatagttaccattggtgat

SEQ ID NO: 7401 - DNA, 25 bp, Saccharomyces pastorianus
gacaacgtcccatgtgcacagaata

SEQ ID NO: 7402 - DNA, 25 bp, Saccharomyces pastorianus
tatccaatattgcatcttccggttc

SEQ ID NO: 7403 - DNA, 25 bp, Saccharomyces pastorianus
atgtaaccgttcctaagctaccatt

SEQ ID NO: 7404 - DNA, 25 bp, Saccharomyces pastorianus
ttccggttccaaatcacagtctagt

SEQ ID NO: 7405 - DNA, 25 bp, Saccharomyces pastorianus
aagcccggccttagtcttaacatgg

SEQ ID NO: 7406 - DNA, 25 bp, Saccharomyces pastorianus
gatttaagctccgttcctttgtata

SEQ ID NO: 7407 - DNA, 25 bp, Saccharomyces pastorianus
ggcatggttcagttttgcattcttg

SEQ ID NO: 7408 - DNA, 25 bp, Saccharomyces pastorianus
gattagttccctctgcaagcatgaa

SEQ ID NO: 7409 - DNA, 25 bp, Saccharomyces pastorianus
ggccactatagtcttaacgatcctg

SEQ ID NO: 7410 - DNA, 25 bp, Saccharomyces pastorianus
atgaccacatcttccaatacaatct

SEQ ID NO: 7411 - DNA, 25 bp, Saccharomyces pastorianus
gatttttgttgctgctaagcccggc

SEQ ID NO: 7412 - DNA, 25 bp, Saccharomyces pastorianus
ggtcttatcccaccgttatctataa

SEQ ID NO: 7413 - DNA, 25 bp, Saccharomyces pastorianus
aaaatatcacccttttgaggcctca

SEQ ID NO: 7414 - DNA, 25 bp, Saccharomyces pastorianus
gcaggtggtgttggactgatcctaa

SEQ ID NO: 7415 - DNA, 25 bp, Saccharomyces pastorianus
gactataaagttgccgctgctgata

SEQ ID NO: 7416 - DNA, 25 bp, Saccharomyces pastorianus
gcgggtctattacaagctctcactg

SEQ ID NO: 7417 - DNA, 25 bp, Saccharomyces pastorianus
ttatctataactaggctctcaccca

SEQ ID NO: 7418 - DNA, 25 bp, Saccharomyces pastorianus
actttacgcctatatcactgatcat

SEQ ID NO: 7419 - DNA, 25 bp, Saccharomyces pastorianus
gaagatgttcttgcacgagttttag

SEQ ID NO: 7420 - DNA, 25 bp, Saccharomyces pastorianus
ggcgcacatgctattgcagttgctt

SEQ ID NO: 7421 - DNA, 25 bp, Saccharomyces pastorianus
gacacttttgaaacgaccttggccg

SEQ ID NO: 7422 - DNA, 25 bp, Saccharomyces pastorianus
atatcttgatatatgccgctgcagg

SEQ ID NO: 7423 - DNA, 25 bp, Saccharomyces pastorianus
gatgaactggtgtttcagctcgaaa

SEQ ID NO: 7424 - DNA, 25 bp, Saccharomyces pastorianus
ggatagtcgttgatcgttatttgga

SEQ ID NO: 7425 - DNA, 25 bp, Saccharomyces pastorianus
tcacgacgagtgatcgttgcgccag

SEQ ID NO: 7426 - DNA, 25 bp, Saccharomyces pastorianus
acaccacctcagacagtcgtaaggg

SEQ ID NO: 7427 - DNA, 25 bp, Saccharomyces pastorianus
gagtaacatacccatccatgagtac

SEQ ID NO: 7428 - DNA, 25 bp, Saccharomyces pastorianus
ggacattccttcatatttgacgtta

SEQ ID NO: 7429 - DNA, 25 bp, Saccharomyces pastorianus
tgctaaacccattctgtctaaagag

SEQ ID NO: 7430 - DNA, 25 bp, Saccharomyces pastorianus
gttgcgccagcgtcgcacttcagaa

SEQ ID NO: 7431 - DNA, 25 bp, Saccharomyces pastorianus
aagcaactgccagaggactcgaatt

SEQ ID NO: 7432 - DNA, 25 bp, Saccharomyces pastorianus
gaaatgtacggatcacaccacctca

SEQ ID NO: 7433 - DNA, 25 bp, Saccharomyces pastorianus
cgcttgagtagggttcgatctgtaa

SEQ ID NO: 7434 - DNA, 25 bp, Saccharomyces pastorianus
ctccacacagttgaattcgtccgat

SEQ ID NO: 7435 - DNA, 25 bp, Saccharomyces pastorianus
aaaaaggacgctgcagactgccaac

SEQ ID NO: 7436 - DNA, 25 bp, Saccharomyces pastorianus
taagcagtgtgcttcgggtcgaccc

SEQ ID NO: 7437 - DNA, 25 bp, Saccharomyces pastorianus
agttcaggccattcgacgtttatct

SEQ ID NO: 7438 - DNA, 25 bp, Saccharomyces pastorianus
tccgatgacgaagatccgggttttc

SEQ ID NO: 7439 - DNA, 25 bp, Saccharomyces pastorianus
accgctgtggctactgctattatca

SEQ ID NO: 7440 - DNA, 25 bp, Saccharomyces pastorianus
aggagctggttcaaggcgcataaaa

SEQ ID NO: 7441 - DNA, 25 bp, Saccharomyces pastorianus
tatccgtgacgtgccaagtaatatc

SEQ ID NO: 7442 - DNA, 25 bp, Saccharomyces pastorianus
gactataaccgtgtctacattgcca

SEQ ID NO: 7443 - DNA, 25 bp, Saccharomyces pastorianus
ggttcgaacccagctctggttatag

SEQ ID NO: 7444 - DNA, 25 bp, Saccharomyces pastorianus
attgccagtgatactgcgaccgctg

SEQ ID NO: 7445 - DNA, 25 bp, Saccharomyces pastorianus
tgggactccaacacaggcggccttt

SEQ ID NO: 7446 - DNA, 25 bp, Saccharomyces pastorianus
aagggctcgctccatggcaagatag

SEQ ID NO: 7447 - DNA, 25 bp, Saccharomyces pastorianus
ggtatcatctacgttccattgggat

SEQ ID NO: 7448 - DNA, 25 bp, Saccharomyces pastorianus
gcgtggacggtgacagacctcccag

SEQ ID NO: 7449 - DNA, 25 bp, Saccharomyces pastorianus
gacctcccagcgtgtcagagttaaa

SEQ ID NO: 7450 - DNA, 25 bp, Saccharomyces pastorianus
ggacgacacaattgctacgttagca

SEQ ID NO: 7451 - DNA, 25 bp, Saccharomyces pastorianus
gctgatttcagctacaagatcctaa

SEQ ID NO: 7452 - DNA, 25 bp, Saccharomyces pastorianus
aagatagccggcctgtttgtttcgg

SEQ ID NO: 7453 - DNA, 25 bp, Saccharomyces pastorianus
gatgatgtcaatgggtcgtgtgctt

SEQ ID NO: 7454 - DNA, 25 bp, Saccharomyces pastorianus
gattactacctgtttggaatccccg

SEQ ID NO: 7455 - DNA, 25 bp, Saccharomyces pastorianus
gagtggaaaaccttctgggactcca

SEQ ID NO: 7456 - DNA, 25 bp, Saccharomyces pastorianus
gacgctgtgggcttcaatttcgata

SEQ ID NO: 7457 - DNA, 25 bp, Saccharomyces pastorianus
aattggagccgattgggtgcattct

SEQ ID NO: 7458 - DNA, 25 bp, Saccharomyces pastorianus
ccgtgttgatctattggcccaggag

SEQ ID NO: 7459 - DNA, 25 bp, Saccharomyces pastorianus
ctgtatgttgattcccaatgccatt

SEQ ID NO: 7460 - DNA, 25 bp, Saccharomyces pastorianus
attttgccaaagtcaacgccgagag

SEQ ID NO: 7461 - DNA, 25 bp, Saccharomyces pastorianus
tgccctggcggtgacttactaaaac

SEQ ID NO: 7462 - DNA, 25 bp, Saccharomyces pastorianus
cgccgtctggtccacttgtaaagta

SEQ ID NO: 7463 - DNA, 25 bp, Saccharomyces pastorianus
tatagaatccccaacgtgctagacg

SEQ ID NO: 7464 - DNA, 25 bp, Saccharomyces pastorianus
gccgagagtctcatgttgttgtttt

SEQ ID NO: 7465 - DNA, 25 bp, Saccharomyces pastorianus
aagcattccgggtacctgtttatcg

SEQ ID NO: 7466 - DNA, 25 bp, Saccharomyces pastorianus
aatcatttgaatcgcctgagcccga

SEQ ID NO: 7467 - DNA, 25 bp, Saccharomyces pastorianus
gggttactacactatcggccttggt

SEQ ID NO: 7468 - DNA, 25 bp, Saccharomyces pastorianus
ttgatgaccactacgttcaacttgg

SEQ ID NO: 7469 - DNA, 25 bp, Saccharomyces pastorianus
tgttggttgattgccgcttgtgtcc

SEQ ID NO: 7470 - DNA, 25 bp, Saccharomyces pastorianus
tgattctgactccagccttaaggaa

SEQ ID NO: 7471 - DNA, 25 bp, Saccharomyces pastorianus
gttggtatgaccgaagtcttcaccg

SEQ ID NO: 7472 - DNA, 25 bp, Saccharomyces pastorianus
aacatgtcggcccagttgcagaaag

SEQ ID NO: 7473 - DNA, 25 bp, Saccharomyces pastorianus
aaggatatcgccaatgttttcatta

SEQ ID NO: 7474 - DNA, 25 bp, Saccharomyces pastorianus
ttgattttatccgtcttgccagttc

SEQ ID NO: 7475 - DNA, 25 bp, Saccharomyces pastorianus
gcttttgtggttgattgcctaccca

SEQ ID NO: 7476 - DNA, 25 bp, Saccharomyces pastorianus
attggctagctatctgggtcttgaa

SEQ ID NO: 7477 - DNA, 25 bp, Saccharomyces pastorianus
aagtcttcaccgtctgttggttgat

SEQ ID NO: 7478 - DNA, 25 bp, Saccharomyces pastorianus
gagccgaatacatctctgccaagaa

SEQ ID NO: 7479 - DNA, 25 bp, Saccharomyces pastorianus
acgtcctcacgatgatgggttccaa

SEQ ID NO: 7480 - DNA, 25 bp, Saccharomyces pastorianus
aacttcaggtgacagggactctaca

SEQ ID NO: 7481 - DNA, 25 bp, Saccharomyces pastorianus
gagatggcattcctggaaatcgcaa

SEQ ID NO: 7482 - DNA, 25 bp, Saccharomyces pastorianus
ggtaagaacttcgaacactggagat

SEQ ID NO: 7483 - DNA, 25 bp, Saccharomyces pastorianus
gttgcctaacactgtgaatttccct

SEQ ID NO: 7484 - DNA, 25 bp, Saccharomyces pastorianus
gcaagtgtcttttctcatgtggcga

SEQ ID NO: 7485 - DNA, 25 bp, Saccharomyces pastorianus
gaatttccctcgtgatgatgctgat

SEQ ID NO: 7486 - DNA, 25 bp, Saccharomyces pastorianus
gatggtttaaatacggccgcgaacg

SEQ ID NO: 7487 - DNA, 25 bp, Saccharomyces pastorianus
ggccgcgaacgacataattgctttc

SEQ ID NO: 7488 - DNA, 25 bp, Saccharomyces pastorianus
tgatgctgattataccgtcggtgaa

SEQ ID NO: 7489 - DNA, 25 bp, Saccharomyces pastorianus
catactgaatgccatcgaagagttc

SEQ ID NO: 7490 - DNA, 25 bp, Saccharomyces pastorianus
ggtgcacatacccactacaaaggaa

SEQ ID NO: 7491 - DNA, 25 bp, Saccharomyces pastorianus
aagacgtagcgggaaatcaaatggc

SEQ ID NO: 7492 - DNA, 25 bp, Saccharomyces pastorianus
tctcacgattttcagcctaagtttc

SEQ ID NO: 7493 - DNA, 25 bp, Saccharomyces pastorianus
ctttgactcattttgtcttcatgtc

SEQ ID NO: 7494 - DNA, 25 bp, Saccharomyces pastorianus
tatttaatggcatcctttgactcat

SEQ ID NO: 7495 - DNA, 25 bp, Saccharomyces pastorianus
ttttctcacgattttcagcctaagt

SEQ ID NO: 7496 - DNA, 25 bp, Saccharomyces pastorianus
aaactcgatggtgcacatacccact

SEQ ID NO: 7497 - DNA, 25 bp, Saccharomyces pastorianus
ggcatcctttgactcattttgtctt

SEQ ID NO: 7498 - DNA, 25 bp, Saccharomyces pastorianus
tgtcttcatgtcttttttctcacga

SEQ ID NO: 7499 - DNA, 25 bp, Saccharomyces pastorianus
cgaagagttcatcgaaaagctttat

SEQ ID NO: 7500 - DNA, 25 bp, Saccharomyces pastorianus
ttatgtgccgcagatttcatcgctt

SEQ ID NO: 7501 - DNA, 25 bp, Saccharomyces pastorianus
atgtaccggctgctcattgaaacgc

SEQ ID NO: 7502 - DNA, 25 bp, Saccharomyces pastorianus
caaaacatgggcaacctttccgcta

SEQ ID NO: 7503 - DNA, 25 bp, Saccharomyces pastorianus
gatgctgagttatctctctgtcatt

SEQ ID NO: 7504 - DNA, 25 bp, Saccharomyces pastorianus
gtcttcaaccatttatgtgccgcag

SEQ ID NO: 7505 - DNA, 25 bp, Saccharomyces pastorianus
acagatcatatatacgccccattac

SEQ ID NO: 7506 - DNA, 25 bp, Saccharomyces pastorianus
gaactataactttgtcttccacgac

SEQ ID NO: 7507 - DNA, 25 bp, Saccharomyces pastorianus
ttgggtgccctacacatacgcagaa

SEQ ID NO: 7508 - DNA, 25 bp, Saccharomyces pastorianus
tatgttctgcaatcacttaccgtca

SEQ ID NO: 7509 - DNA, 25 bp, Saccharomyces pastorianus
ctaccatcgagtccacatttcaaga

SEQ ID NO: 7510 - DNA, 25 bp, Saccharomyces pastorianus
tgccatagtggcgtctacagatcat

SEQ ID NO: 7511 - DNA, 25 bp, Saccharomyces pastorianus
agttttgactcagatgcgacctacc

SEQ ID NO: 7512 - DNA, 25 bp, Saccharomyces pastorianus
attttgtttgcagtgacggtgcccc

SEQ ID NO: 7513 - DNA, 25 bp, Saccharomyces pastorianus
ctataacccaccatctagctggata

SEQ ID NO: 7514 - DNA, 25 bp, Saccharomyces pastorianus
gacgtcaatacgtccgttgatgagt

SEQ ID NO: 7515 - DNA, 25 bp, Saccharomyces pastorianus
gatcgcgaacactatttcgtctttg

SEQ ID NO: 7516 - DNA, 25 bp, Saccharomyces pastorianus
ggtccaacaaatcctccttataaga

SEQ ID NO: 7517 - DNA, 25 bp, Saccharomyces pastorianus
acggtgcccctgatgtgactggatt

SEQ ID NO: 7518 - DNA, 25 bp, Saccharomyces pastorianus
tttatggcttgtggcagtctcgaga

SEQ ID NO: 7519 - DNA, 25 bp, Saccharomyces pastorianus
gctctacaacttaccacatgcattt

SEQ ID NO: 7520 - DNA, 25 bp, Saccharomyces pastorianus
actggattgcacgatcttgatgaat

SEQ ID NO: 7521 - DNA, 25 bp, Saccharomyces pastorianus
ggccagaatcttggacttatttggt

SEQ ID NO: 7522 - DNA, 25 bp, Saccharomyces pastorianus
attccttggacatccggattttcgg

SEQ ID NO: 7523 - DNA, 25 bp, Saccharomyces pastorianus
aatagctgattcgatttcacagttg

SEQ ID NO: 7524 - DNA, 25 bp, Saccharomyces pastorianus
gggaacagtttgctcgtaaagtaca

SEQ ID NO: 7525 - DNA, 25 bp, Saccharomyces pastorianus
atttggtgccactactgcggaaaac

SEQ ID NO: 7526 - DNA, 25 bp, Saccharomyces pastorianus
gattggagctgggttctgatgataa

SEQ ID NO: 7527 - DNA, 25 bp, Saccharomyces pastorianus
tgatgtttccagtaggtccttcttc

SEQ ID NO: 7528 - DNA, 25 bp, Saccharomyces pastorianus
ggtgttctacgtattgatcgttcca

SEQ ID NO: 7529 - DNA, 25 bp, Saccharomyces pastorianus
aacaatcaccacacgaaagggctta

SEQ ID NO: 7530 - DNA, 25 bp, Saccharomyces pastorianus
acagatctgtagatgtttctcacat

SEQ ID NO: 7531 - DNA, 25 bp, Saccharomyces pastorianus
gaggtgtacgattccagtcaagtat

SEQ ID NO: 7532 - DNA, 25 bp, Saccharomyces pastorianus
gattttcggctgcttcatttggtgc

SEQ ID NO: 7533 - DNA, 25 bp, Saccharomyces pastorianus
aaaacccacaaaagctcattcgaca

SEQ ID NO: 7534 - DNA, 25 bp, Saccharomyces pastorianus
gacaggacagagaacacgccatttt

SEQ ID NO: 7535 - DNA, 25 bp, Saccharomyces pastorianus
gggaaatgcgactttccagtcaatt

SEQ ID NO: 7536 - DNA, 25 bp, Saccharomyces pastorianus
ttctggccacctttcaagacataat

SEQ ID NO: 7537 - DNA, 25 bp, Saccharomyces pastorianus
aaaatcacatctgtccacacgaggg

SEQ ID NO: 7538 - DNA, 25 bp, Saccharomyces pastorianus
agaatcgccgttgcataatgttaac

SEQ ID NO: 7539 - DNA, 25 bp, Saccharomyces pastorianus
aagaggcttcgccagaatcgccgtt

SEQ ID NO: 7540 - DNA, 25 bp, Saccharomyces pastorianus
atcgatcatatccagccagacgtat

SEQ ID NO: 7541 - DNA, 25 bp, Saccharomyces pastorianus
cattaccgtacccacgcgaataaga

SEQ ID NO: 7542 - DNA, 25 bp, Saccharomyces pastorianus
acgccatttttgtaagatctgctcg

SEQ ID NO: 7543 - DNA, 25 bp, Saccharomyces pastorianus
aagatctgctcgactgggtttacca

SEQ ID NO: 7544 - DNA, 25 bp, Saccharomyces pastorianus
attggtgacattaactcccatcttt

SEQ ID NO: 7545 - DNA, 25 bp, Saccharomyces pastorianus
accgctagcacttctgttgtaactg

SEQ ID NO: 7546 - DNA, 25 bp, Saccharomyces pastorianus
agattgagttccgaaatcgccgccg

SEQ ID NO: 7547 - DNA, 25 bp, Saccharomyces pastorianus
tcccatctttccgactatttaggtt

SEQ ID NO: 7548 - DNA, 25 bp, Saccharomyces pastorianus
gaaaccgccggtcaaactgccgaat

SEQ ID NO: 7549 - DNA, 25 bp, Saccharomyces pastorianus
aaggcagtttcttcttccgttgctc

SEQ ID NO: 7550 - DNA, 25 bp, Saccharomyces pastorianus
gtaactgcatccaacgctggtcaaa

SEQ ID NO: 7551 - DNA, 25 bp, Saccharomyces pastorianus
aaatccctgctgatgtcttgagcgt

SEQ ID NO: 7552 - DNA, 25 bp, Saccharomyces pastorianus
atcgctttcgttttaaccgctattg

SEQ ID NO: 7553 - DNA, 25 bp, Saccharomyces pastorianus
aaactggactacgatgccatcacca

SEQ ID NO: 7554 - DNA, 25 bp, Saccharomyces pastorianus
ggtaacagcggtttccaaatccctg

SEQ ID NO: 7555 - DNA, 25 bp, Saccharomyces pastorianus
gcgttatttttcctagtttgccagt

SEQ ID NO: 7556 - DNA, 25 bp, Saccharomyces pastorianus
tttccagtctttcccaattgtttat

SEQ ID NO: 7557 - DNA, 25 bp, Saccharomyces pastorianus
ggcagacctttgctttgttttctaa

SEQ ID NO: 7558 - DNA, 25 bp, Saccharomyces pastorianus
gggtgcatcggatttgttgccacta

SEQ ID NO: 7559 - DNA, 25 bp, Saccharomyces pastorianus
ttagattcagagacgccatggccaa

SEQ ID NO: 7560 - DNA, 25 bp, Saccharomyces pastorianus
aatgcctattgtcttgtttgcctat

SEQ ID NO: 7561 - DNA, 25 bp, Saccharomyces pastorianus
gtcatcggaaaacctgaacggctca

SEQ ID NO: 7562 - DNA, 25 bp, Saccharomyces pastorianus
tacgtcccgccatcacttatagaga

SEQ ID NO: 7563 - DNA, 25 bp, Saccharomyces pastorianus
atttctcttatctttgggtgcatcg

SEQ ID NO: 7564 - DNA, 25 bp, Saccharomyces pastorianus
gggctcttggcttgcagttattatt

SEQ ID NO: 7565 - DNA, 25 bp, Saccharomyces pastorianus
agtttgccagttttgggtcgccatc

SEQ ID NO: 7566 - DNA, 25 bp, Saccharomyces pastorianus
aggagaagctactgctggttccgtc

SEQ ID NO: 7567 - DNA, 25 bp, Saccharomyces pastorianus
gaacttggacactccagtcatgggc

SEQ ID NO: 7568 - DNA, 25 bp, Saccharomyces pastorianus
aaagcactttttgtcttctgcacaa

SEQ ID NO: 7569 - DNA, 25 bp, Saccharomyces pastorianus
acgagtcctctatgaagctacctta

SEQ ID NO: 7570 - DNA, 25 bp, Saccharomyces pastorianus
aattccggttcaagctcgcacacag

SEQ ID NO: 7571 - DNA, 25 bp, Saccharomyces pastorianus
gaaacactgcacgaactgaacttgg

SEQ ID NO: 7572 - DNA, 25 bp, Saccharomyces pastorianus
gtcattgtctaacgagtttgctcaa

SEQ ID NO: 7573 - DNA, 25 bp, Saccharomyces pastorianus
cttagacgctccaagaattccggtt

SEQ ID NO: 7574 - DNA, 25 bp, Saccharomyces pastorianus
taaaggactaccattcggccataaa

SEQ ID NO: 7575 - DNA, 25 bp, Saccharomyces pastorianus
aaaatccacgtccagtcggtcaaag

SEQ ID NO: 7576 - DNA, 25 bp, Saccharomyces pastorianus
atatcttccatattctcccaggata

SEQ ID NO: 7577 - DNA, 25 bp, Saccharomyces pastorianus
aatggtggtgctctttatgatccaa

SEQ ID NO: 7578 - DNA, 25 bp, Saccharomyces pastorianus
gtttctggtgaaatcccatcttctt

SEQ ID NO: 7579 - DNA, 25 bp, Saccharomyces pastorianus
gaggctacgcgccaagacgccaatt

SEQ ID NO: 7580 - DNA, 25 bp, Saccharomyces pastorianus
acaatgatttgtccttgctgccatc

SEQ ID NO: 7581 - DNA, 25 bp, Saccharomyces pastorianus
gattacccaggtgtcgatgctgata

SEQ ID NO: 7582 - DNA, 25 bp, Saccharomyces pastorianus
gactgttccgaagttgaagcctaaa

SEQ ID NO: 7583 - DNA, 25 bp, Saccharomyces pastorianus
gtgttgctgttccagttgatatctt

SEQ ID NO: 7584 - DNA, 25 bp, Saccharomyces pastorianus
gccaattaacaactggtcctggtaa

SEQ ID NO: 7585 - DNA, 25 bp, Saccharomyces pastorianus
gtgtgttgactttgactgttccgaa

SEQ ID NO: 7586 - DNA, 25 bp, Saccharomyces pastorianus
gttatcactttaccagattacccag

SEQ ID NO: 7587 - DNA, 25 bp, Saccharomyces pastorianus
tcagcttccccagaagtgttgctgt

SEQ ID NO: 7588 - DNA, 25 bp, Saccharomyces pastorianus
aaggctactgtttccccagataaag

SEQ ID NO: 7589 - DNA, 25 bp, Saccharomyces pastorianus
agcacaccaagtctcttaccaaagg

SEQ ID NO: 7590 - DNA, 25 bp, Saccharomyces pastorianus
agaagttcgtcaacagcgttaccaa

SEQ ID NO: 7591 - DNA, 25 bp, Saccharomyces pastorianus
agtagcccaactccgtaatcaaaag

SEQ ID NO: 7592 - DNA, 25 bp, Saccharomyces pastorianus
gctgctaagaaacctactccattcg

SEQ ID NO: 7593 - DNA, 25 bp, Saccharomyces pastorianus
gaaagaacgcttgtcaggtaccaaa

SEQ ID NO: 7594 - DNA, 25 bp, Saccharomyces pastorianus
ttaccaagaggctatcgcaagacgt

SEQ ID NO: 7595 - DNA, 25 bp, Saccharomyces pastorianus
aagaactcgcagaagctggccgtaa

SEQ ID NO: 7596 - DNA, 25 bp, Saccharomyces pastorianus
aaatggaggaagctgccgctgctaa

SEQ ID NO: 7597 - DNA, 25 bp, Saccharomyces pastorianus
gaacttggccatggtctttgacgat

SEQ ID NO: 7598 - DNA, 25 bp, Saccharomyces pastorianus
gcttcaacctctgctccaaagaaaa

SEQ ID NO: 7599 - DNA, 25 bp, Saccharomyces pastorianus
aatttctcgatgacgctggtagggt

SEQ ID NO: 7600 - DNA, 25 bp, Saccharomyces pastorianus
actacctcaacttattcagttctcc

SEQ ID NO: 7601 - DNA, 25 bp, Saccharomyces pastorianus
agtccggattcccatttatcagatt

SEQ ID NO: 7602 - DNA, 25 bp, Saccharomyces pastorianus
ggatatcctgagctgttttgacaat

SEQ ID NO: 7603 - DNA, 25 bp, Saccharomyces pastorianus
cgaattgtcacgcagttgtcctaac

SEQ ID NO: 7604 - DNA, 25 bp, Saccharomyces pastorianus
cggccctgcgggatctggtaagaca

SEQ ID NO: 7605 - DNA, 25 bp, Saccharomyces pastorianus
gtctctattaatacacggccctgcg

SEQ ID NO: 7606 - DNA, 25 bp, Saccharomyces pastorianus
gatggccgtttgctaattatgacaa

SEQ ID NO: 7607 - DNA, 25 bp, Saccharomyces pastorianus
gataacaccttcagagacgcatata

SEQ ID NO: 7608 - DNA, 25 bp, Saccharomyces pastorianus
ttgtcctaactttaatgtcggtatc

SEQ ID NO: 7609 - DNA, 25 bp, Saccharomyces pastorianus
tctcctctaaacattctcgttatcg

SEQ ID NO: 7610 - DNA, 25 bp, Saccharomyces pastorianus
tgaaatgggttcttccctatttttg

SEQ ID NO: 7611 - DNA, 25 bp, Saccharomyces pastorianus
gacaattcctttgctctcttagaag

SEQ ID NO: 7612 - DNA, 25 bp, Saccharomyces pastorianus
atgcgggttcgttctggaacacttt

SEQ ID NO: 7613 - DNA, 25 bp, Saccharomyces pastorianus
tggacgacccctttaatgattcaaa

SEQ ID NO: 7614 - DNA, 25 bp, Saccharomyces pastorianus
gaattctacctacttcgactgagga

SEQ ID NO: 7615 - DNA, 25 bp, Saccharomyces pastorianus
ttggaaacacctcaaccactggatt

SEQ ID NO: 7616 - DNA, 25 bp, Saccharomyces pastorianus
gaacactttacttccactgctaagg

SEQ ID NO: 7617 - DNA, 25 bp, Saccharomyces pastorianus
tttgagttcgtctgttccattgcaa

SEQ ID NO: 7618 - DNA, 25 bp, Saccharomyces pastorianus
actacccaattccaaactgtcgatg

SEQ ID NO: 7619 - DNA, 25 bp, Saccharomyces pastorianus
caaaaggcctgcttgatgcgggttc

SEQ ID NO: 7620 - DNA, 25 bp, Saccharomyces pastorianus
gattctttgaacatggacgacccct

SEQ ID NO: 7621 - DNA, 25 bp, Saccharomyces pastorianus
tacaaggtaggctagcaccatacta

SEQ ID NO: 7622 - DNA, 25 bp, Saccharomyces pastorianus
gtaccaatcttcctacttttctcaa

SEQ ID NO: 7623 - DNA, 25 bp, Saccharomyces pastorianus
aatctcatcacggaggcgttttcga

SEQ ID NO: 7624 - DNA, 25 bp, Saccharomyces pastorianus
ttcgaactatgctcaaggtctaccc

SEQ ID NO: 7625 - DNA, 25 bp, Saccharomyces pastorianus
ggaagttgttccaaggtctgctgca

SEQ ID NO: 7626 - DNA, 25 bp, Saccharomyces pastorianus
gtctgctgcagagccacagttacaa

SEQ ID NO: 7627 - DNA, 25 bp, Saccharomyces pastorianus
gaagactcccttaatctacgctaaa

SEQ ID NO: 7628 - DNA, 25 bp, Saccharomyces pastorianus
aatgtaccccagacctgctgaagac

SEQ ID NO: 7629 - DNA, 25 bp, Saccharomyces pastorianus
ttctcaacttctattatcatcaccc

SEQ ID NO: 7630 - DNA, 25 bp, Saccharomyces pastorianus
atatcctctctccaaagtacgaacc

SEQ ID NO: 7631 - DNA, 25 bp, Saccharomyces pastorianus
agtaccaaagactatcccgcataca

SEQ ID NO: 7632 - DNA, 25 bp, Saccharomyces pastorianus
aagccactggtactaaccgggtcat

SEQ ID NO: 7633 - DNA, 25 bp, Saccharomyces pastorianus
cggatcatttttagcttcgttctta

SEQ ID NO: 7634 - DNA, 25 bp, Saccharomyces pastorianus
gcaggtgttatctccatgtatgatc

SEQ ID NO: 7635 - DNA, 25 bp, Saccharomyces pastorianus
aggttggctgccgatgctaaatcat

SEQ ID NO: 7636 - DNA, 25 bp, Saccharomyces pastorianus
gggttcatgccttcagtagttggta

SEQ ID NO: 7637 - DNA, 25 bp, Saccharomyces pastorianus
ttgggttattcgattctctcaagcc

SEQ ID NO: 7638 - DNA, 25 bp, Saccharomyces pastorianus
ggctgcggtgccaatattctaagga

SEQ ID NO: 7639 - DNA, 25 bp, Saccharomyces pastorianus
gacttccggtcaagccgtcaaatat

SEQ ID NO: 7640 - DNA, 25 bp, Saccharomyces pastorianus
aatctgacggtattgctggactgta

SEQ ID NO: 7641 - DNA, 25 bp, Saccharomyces pastorianus
ttgggtggttactacaggtgcttca

SEQ ID NO: 7642 - DNA, 25 bp, Saccharomyces pastorianus
tgttcatacccattggacacggtga

SEQ ID NO: 7643 - DNA, 25 bp, Saccharomyces pastorianus
ggttctttcttacaaagtgcccctg

SEQ ID NO: 7644 - DNA, 25 bp, Saccharomyces pastorianus
agttgaccacagttagtggatacca

SEQ ID NO: 7645 - DNA, 25 bp, Saccharomyces pastorianus
attgccaatattctaggtgaagcta

SEQ ID NO: 7646 - DNA, 25 bp, Saccharomyces pastorianus
aaacagtcctgagcgaagacaagtc

SEQ ID NO: 7647 - DNA, 25 bp, Saccharomyces pastorianus
acacaaatttcactcattctacagg

SEQ ID NO: 7648 - DNA, 25 bp, Saccharomyces pastorianus
ggcggtgaagtcattgccaatattc

SEQ ID NO: 7649 - DNA, 25 bp, Saccharomyces pastorianus
ctatgtgctaatgggcggtgaagtc

SEQ ID NO: 7650 - DNA, 25 bp, Saccharomyces pastorianus
agacaagtcgcacggctatgtgcta

SEQ ID NO: 7651 - DNA, 25 bp, Saccharomyces pastorianus
aatgaaatccaaacagtcctgagcg

SEQ ID NO: 7652 - DNA, 25 bp, Saccharomyces pastorianus
cactcattctacaggttctttctta

SEQ ID NO: 7653 - DNA, 25 bp, Saccharomyces pastorianus
aaagtgcccctgttgagttgaccac

SEQ ID NO: 7654 - DNA, 25 bp, Saccharomyces pastorianus
tcaaaccggttctcagtacaggcgt

SEQ ID NO: 7655 - DNA, 25 bp, Saccharomyces pastorianus
aacaacagtgctactgatgccgctc

SEQ ID NO: 7656 - DNA, 25 bp, Saccharomyces pastorianus
aagaacgccacgaacaattccaagg

SEQ ID NO: 7657 - DNA, 25 bp, Saccharomyces pastorianus
tgttgccatggctgacccggtaaat

SEQ ID NO: 7658 - DNA, 25 bp, Saccharomyces pastorianus
ttccaaggcagctgaatcttcatct

SEQ ID NO: 7659 - DNA, 25 bp, Saccharomyces pastorianus
ggcccagtaagatctatttctacga

SEQ ID NO: 7660 - DNA, 25 bp, Saccharomyces pastorianus
aacggcaatgctcctgatgcattca

SEQ ID NO: 7661 - DNA, 25 bp, Saccharomyces pastorianus
agggcttccgtgactaccgagcaaa

SEQ ID NO: 7662 - DNA, 25 bp, Saccharomyces pastorianus
gtcaccatcgcgatgctggagtgaa

SEQ ID NO: 7663 - DNA, 25 bp, Saccharomyces pastorianus
actgatgaccattcgagggcttccg

SEQ ID NO: 7664 - DNA, 25 bp, Saccharomyces pastorianus
atacggtgttgcaggtgccactcta

SEQ ID NO: 7665 - DNA, 25 bp, Saccharomyces pastorianus
gccttgaggcgcaccatggaaaaat

SEQ ID NO: 7666 - DNA, 25 bp, Saccharomyces pastorianus
gttgtcccgcaccaagtgataatga

SEQ ID NO: 7667 - DNA, 25 bp, Saccharomyces pastorianus
gaatgggaatttacgagtctctcta

SEQ ID NO: 7668 - DNA, 25 bp, Saccharomyces pastorianus
gtctctctattgatgctcgaatcta

SEQ ID NO: 7669 - DNA, 25 bp, Saccharomyces pastorianus
ggaactaacgtttgcgctgttaagc

SEQ ID NO: 7670 - DNA, 25 bp, Saccharomyces pastorianus
acaaaggatgcccaggctgccttga

SEQ ID NO: 7671 - DNA, 25 bp, Saccharomyces pastorianus
tggctcactgtatacctgcgaatgt

SEQ ID NO: 7672 - DNA, 25 bp, Saccharomyces pastorianus
taaagccggactggattatcgtaat

SEQ ID NO: 7673 - DNA, 25 bp, Saccharomyces pastorianus
tcacgttgtcttttggttcgttgtc

SEQ ID NO: 7674 - DNA, 25 bp, Saccharomyces pastorianus
agagccgttctatacgacttgctgg

SEQ ID NO: 7675 - DNA, 25 bp, Saccharomyces pastorianus
gaataaggcgatcttccatttggaa

SEQ ID NO: 7676 - DNA, 25 bp, Saccharomyces pastorianus
tgatcatcctgtcacactgggtatg

SEQ ID NO: 7677 - DNA, 25 bp, Saccharomyces pastorianus
gatcgttcgtgatttgtctcaactg

SEQ ID NO: 7678 - DNA, 25 bp, Saccharomyces pastorianus
gactccatcatcctattattcgaag

SEQ ID NO: 7679 - DNA, 25 bp, Saccharomyces pastorianus
gtgatatcggttcaggatccgtcat

SEQ ID NO: 7680 - DNA, 25 bp, Saccharomyces pastorianus
tggaccaacccgtagatttgacatt

SEQ ID NO: 7681 - DNA, 25 bp, Saccharomyces pastorianus
atacgattcaaccttatccttacca

SEQ ID NO: 7682 - DNA, 25 bp, Saccharomyces pastorianus
ttaccatcatccgaattctccaaga

SEQ ID NO: 7683 - DNA, 25 bp, Saccharomyces pastorianus
gtatggatttgacctcgctaagtaa

SEQ ID NO: 7684 - DNA, 25 bp, Saccharomyces pastorianus
gaccgtatagcggagtattccctga

SEQ ID NO: 7685 - DNA, 25 bp, Saccharomyces pastorianus
tttggagatcggtgtcgaagccttc

SEQ ID NO: 7686 - DNA, 25 bp, Saccharomyces pastorianus
agactatccagtgaagctcctgctt

SEQ ID NO: 7687 - DNA, 25 bp, Saccharomyces pastorianus
gacgtgacctttggccaagtgggaa

SEQ ID NO: 7688 - DNA, 25 bp, Saccharomyces pastorianus
aatggaaggccttgaccgcggatga

SEQ ID NO: 7689 - DNA, 25 bp, Saccharomyces pastorianus
tactcggtgagaaatggaaggcctt

SEQ ID NO: 7690 - DNA, 25 bp, Saccharomyces pastorianus
atatcgttcgttccgagaaccctga

SEQ ID NO: 7691 - DNA, 25 bp, Saccharomyces pastorianus
gccaagtgggaagaatactcggtga

SEQ ID NO: 7692 - DNA, 25 bp, Saccharomyces pastorianus
agagaggcttgtcggcctacatgtt

SEQ ID NO: 7693 - DNA, 25 bp, Saccharomyces pastorianus
gaccgcggatgagaaggtgccttac

SEQ ID NO: 7694 - DNA, 25 bp, Saccharomyces pastorianus
gagaccagagatatcgttcgttccg

SEQ ID NO: 7695 - DNA, 25 bp, Saccharomyces pastorianus
cgagaaccctgacgtgacctttggc

SEQ ID NO: 7696 - DNA, 25 bp, Saccharomyces pastorianus
atgttcttcgccaacgagaccagag

SEQ ID NO: 7697 - DNA, 25 bp, Saccharomyces pastorianus
acgaaactaaggctcaggctgacaa

SEQ ID NO: 7698 - DNA, 25 bp, Saccharomyces pastorianus
gttactcttacggtcaagacctgac

SEQ ID NO: 7699 - DNA, 25 bp, Saccharomyces pastorianus
aatctgtcggtgctaacttgttcaa

SEQ ID NO: 7700 - DNA, 25 bp, Saccharomyces pastorianus
cgacacctatgtcagatatgtcatc

SEQ ID NO: 7701 - DNA, 25 bp, Saccharomyces pastorianus
ggtgtgcatacgaactgaactccag

SEQ ID NO: 7702 - DNA, 25 bp, Saccharomyces pastorianus
agcaacgtcaccaaattgtccttct

SEQ ID NO: 7703 - DNA, 25 bp, Saccharomyces pastorianus
tttaccaagatggtccaggttacga

SEQ ID NO: 7704 - DNA, 25 bp, Saccharomyces pastorianus
gatatgatcaaatctgtcggtgcta

SEQ ID NO: 7705 - DNA, 25 bp, Saccharomyces pastorianus
gtcagcaacgtcaccaaattgtcct

SEQ ID NO: 7706 - DNA, 25 bp, Saccharomyces pastorianus
gatatcttcagcaaagacgaattgg

SEQ ID NO: 7707 - DNA, 25 bp, Saccharomyces pastorianus
aagacctgacctcattttaccaaga

SEQ ID NO: 7708 - DNA, 25 bp, Saccharomyces pastorianus
aactgaactccagaggttacagtga

SEQ ID NO: 7709 - DNA, 25 bp, Saccharomyces pastorianus
gagtgccatctgactaatacatgct

SEQ ID NO: 7710 - DNA, 25 bp, Saccharomyces pastorianus
ttccaaccgttaccaaatgcgtttg

SEQ ID NO: 7711 - DNA, 25 bp, Saccharomyces pastorianus
gagcccattattgctatcatccatg

SEQ ID NO: 7712 - DNA, 25 bp, Saccharomyces pastorianus
gtagatttcttggtcgattcggatt

SEQ ID NO: 7713 - DNA, 25 bp, Saccharomyces pastorianus
tgtccctctagatcctaacacatat

SEQ ID NO: 7714 - DNA, 25 bp, Saccharomyces pastorianus
tgtgttgccccaatctttaaaggta

SEQ ID NO: 7715 - DNA, 25 bp, Saccharomyces pastorianus
aaatgcgtttgagacctatggtgta

SEQ ID NO: 7716 - DNA, 25 bp, Saccharomyces pastorianus
ctatttgctgctaaaccgtttgtcc

SEQ ID NO: 7717 - DNA, 25 bp, Saccharomyces pastorianus
gagatcaatgctttcccagatttca

SEQ ID NO: 7718 - DNA, 25 bp, Saccharomyces pastorianus
aatgacgttttcttagcggcagtaa

SEQ ID NO: 7719 - DNA, 25 bp, Saccharomyces pastorianus
tgtaaacaggctaaacttccaaccg

SEQ ID NO: 7720 - DNA, 25 bp, Saccharomyces pastorianus
tgcttctcgtacaccaaactggaca

SEQ ID NO: 7721 - DNA, 25 bp, Saccharomyces pastorianus
ttttgcctattgtcacaggatcgaa

SEQ ID NO: 7722 - DNA, 25 bp, Saccharomyces pastorianus
tgtggttttcacgaaactgtaccgt

SEQ ID NO: 7723 - DNA, 25 bp, Saccharomyces pastorianus
ttccagtcgcaaacgttttcaccaa

SEQ ID NO: 7724 - DNA, 25 bp, Saccharomyces pastorianus
gatcaagcctttccaaaaatactct

SEQ ID NO: 7725 - DNA, 25 bp, Saccharomyces pastorianus
agattcaccatcaaaaacggcaccg

SEQ ID NO: 7726 - DNA, 25 bp, Saccharomyces pastorianus
aacgaatacggttgcttctcgtaca

SEQ ID NO: 7727 - DNA, 25 bp, Saccharomyces pastorianus
gcattacccatatattccagtcgca

SEQ ID NO: 7728 - DNA, 25 bp, Saccharomyces pastorianus
gattttattactacgtgattcctat

SEQ ID NO: 7729 - DNA, 25 bp, Saccharomyces pastorianus
aaactggacacatatgcctctccat

SEQ ID NO: 7730 - DNA, 25 bp, Saccharomyces pastorianus
gttctatgctcactatcgctgacaa

SEQ ID NO: 7731 - DNA, 25 bp, Saccharomyces pastorianus
taccgaatttggtttcattggttgg

SEQ ID NO: 7732 - DNA, 25 bp, Saccharomyces pastorianus
gtatggaccccgcaattagatatat

SEQ ID NO: 7733 - DNA, 25 bp, Saccharomyces pastorianus
gtaaacaacgtatggaccccgcaat

SEQ ID NO: 7734 - DNA, 25 bp, Saccharomyces pastorianus
attcatactgcgaactcacacatgg

SEQ ID NO: 7735 - DNA, 25 bp, Saccharomyces pastorianus
ccaataatgctgtgggtttgtatcc

SEQ ID NO: 7736 - DNA, 25 bp, Saccharomyces pastorianus
tttgtatcccagtttccaatcacta

SEQ ID NO: 7737 - DNA, 25 bp, Saccharomyces pastorianus
gaggatgcctgagttgaaagccaat

SEQ ID NO: 7738 - DNA, 25 bp, Saccharomyces pastorianus
gaacaacggcttcgcttcattgata

SEQ ID NO: 7739 - DNA, 25 bp, Saccharomyces pastorianus
tttgaacgtcaaatccgcgcaggat

SEQ ID NO: 7740 - DNA, 25 bp, Saccharomyces pastorianus
gaaatacgcccatttgaacgtcaaa

SEQ ID NO: 7741 - DNA, 25 bp, Saccharomyces pastorianus
caagagggccattttccaattagaa

SEQ ID NO: 7742 - DNA, 25 bp, Saccharomyces pastorianus
atcctcgtggattggtgcagtgttg

SEQ ID NO: 7743 - DNA, 25 bp, Saccharomyces pastorianus
ccaccaactatttgactcagctagc

SEQ ID NO: 7744 - DNA, 25 bp, Saccharomyces pastorianus
gacgaaatgctatcgccaagttcta

SEQ ID NO: 7745 - DNA, 25 bp, Saccharomyces pastorianus
agcggtaaaatctcttcaatcctcg

SEQ ID NO: 7746 - DNA, 25 bp, Saccharomyces pastorianus
gctacataacttgatatccctgaaa

SEQ ID NO: 7747 - DNA, 25 bp, Saccharomyces pastorianus
tcagagtattctgtcgtctaacgaa

SEQ ID NO: 7748 - DNA, 25 bp, Saccharomyces pastorianus
caagcccttgatcttttcttacaaa

SEQ ID NO: 7749 - DNA, 25 bp, Saccharomyces pastorianus
ggctcgatttcgtctacaaactgga

SEQ ID NO: 7750 - DNA, 25 bp, Saccharomyces pastorianus
tcagctagctgttattaggttccaa

SEQ ID NO: 7751 - DNA, 25 bp, Saccharomyces pastorianus
ggtcggtagataatcccaccaacta

SEQ ID NO: 7752 - DNA, 25 bp, Saccharomyces pastorianus
gctgaaggctgtagggctcgatttc

SEQ ID NO: 7753 - DNA, 25 bp, Saccharomyces pastorianus
tcctccttggaaactgtgtctattt

SEQ ID NO: 7754 - DNA, 25 bp, Saccharomyces pastorianus
tgacctctcgcgttcaaatacactt

SEQ ID NO: 7755 - DNA, 25 bp, Saccharomyces pastorianus
tggcctcgccgattgaacagattag

SEQ ID NO: 7756 - DNA, 25 bp, Saccharomyces pastorianus
tggttagatccgcacctgtaaatgg

SEQ ID NO: 7757 - DNA, 25 bp, Saccharomyces pastorianus
agtgaattcatttttggcctcgccg

SEQ ID NO: 7758 - DNA, 25 bp, Saccharomyces pastorianus
ataagctcccaaaacgttgacctct

SEQ ID NO: 7759 - DNA, 25 bp, Saccharomyces pastorianus
ggaccctgggactgtatcaaaaaat

SEQ ID NO: 7760 - DNA, 25 bp, Saccharomyces pastorianus
atggtgctacgtttgtcacatttga

SEQ ID NO: 7761 - DNA, 25 bp, Saccharomyces pastorianus
atacacttccactataccagtacta

SEQ ID NO: 7762 - DNA, 25 bp, Saccharomyces pastorianus
ggttcgggcccacaatggttagatc

SEQ ID NO: 7763 - DNA, 25 bp, Saccharomyces pastorianus
gcacgggctagggacgtatttcctt

SEQ ID NO: 7764 - DNA, 25 bp, Saccharomyces pastorianus
aacagttcggcgactacctagacga

SEQ ID NO: 7765 - DNA, 25 bp, Saccharomyces pastorianus
tcacctatccgggtttttgtcaata

SEQ ID NO: 7766 - DNA, 25 bp, Saccharomyces pastorianus
gtgcgtcttacgatgggttttacta

SEQ ID NO: 7767 - DNA, 25 bp, Saccharomyces pastorianus
agggttctactatcaccaagacgcg

SEQ ID NO: 7768 - DNA, 25 bp, Saccharomyces pastorianus
gcaactggagctggtaccttcaatg

SEQ ID NO: 7769 - DNA, 25 bp, Saccharomyces pastorianus
ggtcccggacgctttgttgatggaa

SEQ ID NO: 7770 - DNA, 25 bp, Saccharomyces pastorianus
tagccttcttgtcttctagttggaa

SEQ ID NO: 7771 - DNA, 25 bp, Saccharomyces pastorianus
gttacccactacatcgagcacggat

SEQ ID NO: 7772 - DNA, 25 bp, Saccharomyces pastorianus
cctctttcagacagcttttcctaat

SEQ ID NO: 7773 - DNA, 25 bp, Saccharomyces pastorianus
tgaagcttacgcagtgactcacaaa

SEQ ID NO: 7774 - DNA, 25 bp, Saccharomyces pastorianus
aacacccggagattagcacgtattt

SEQ ID NO: 7775 - DNA, 25 bp, Saccharomyces pastorianus
agaatcttatactgttcctccattg

SEQ ID NO: 7776 - DNA, 25 bp, Saccharomyces pastorianus
ttggtcatgatgcagctttctcgtc

SEQ ID NO: 7777 - DNA, 25 bp, Saccharomyces pastorianus
catgaagtatgtcgtgcctggcaac

SEQ ID NO: 7778 - DNA, 25 bp, Saccharomyces pastorianus
gtcaccactgtcaaggactacgatt

SEQ ID NO: 7779 - DNA, 25 bp, Saccharomyces pastorianus
agtcaatctacaccgggatggccat

SEQ ID NO: 7780 - DNA, 25 bp, Saccharomyces pastorianus
gctttctcgtcgcttagacatggag

SEQ ID NO: 7781 - DNA, 25 bp, Saccharomyces pastorianus
agatccatcttttcggtaagcctgc

SEQ ID NO: 7782 - DNA, 25 bp, Saccharomyces pastorianus
aaggctgcctctttgttcggtggta

SEQ ID NO: 7783 - DNA, 25 bp, Saccharomyces pastorianus
gaagagacctttcaaggctgcctct

SEQ ID NO: 7784 - DNA, 25 bp, Saccharomyces pastorianus
attgctatcagctggatggtctacc

SEQ ID NO: 7785 - DNA, 25 bp, Saccharomyces pastorianus
tctcccgtcaagagcgctttggaac

SEQ ID NO: 7786 - DNA, 25 bp, Saccharomyces pastorianus
gggctattgcgggaccaacaaccat

SEQ ID NO: 7787 - DNA, 25 bp, Saccharomyces pastorianus
cataatgtggccgatcaactttgat

SEQ ID NO: 7788 - DNA, 25 bp, Saccharomyces pastorianus
tgcgcccatacagcgatgcaattgt

SEQ ID NO: 7789 - DNA, 25 bp, Saccharomyces pastorianus
agattagacacctccaacctggatg

SEQ ID NO: 7790 - DNA, 25 bp, Saccharomyces pastorianus
gaaaattgcccttggcttccattat

SEQ ID NO: 7791 - DNA, 25 bp, Saccharomyces pastorianus
gatgtgtccggtggcaacgagtaca

SEQ ID NO: 7792 - DNA, 25 bp, Saccharomyces pastorianus
gaagtaccgatgttcctgggctatt

SEQ ID NO: 7793 - DNA, 25 bp, Saccharomyces pastorianus
gagaccattgttacttcgacacgaa

SEQ ID NO: 7794 - DNA, 25 bp, Saccharomyces pastorianus
tggctcttggccatggcaacactat

SEQ ID NO: 7795 - DNA, 25 bp, Saccharomyces pastorianus
gcagatcacatggtttagctcaaaa

SEQ ID NO: 7796 - DNA, 25 bp, Saccharomyces pastorianus
cgagtacattcgttctgagttgaga

SEQ ID NO: 7797 - DNA, 25 bp, Saccharomyces pastorianus
atcgacttcgtttactcctgatgaa

SEQ ID NO: 7798 - DNA, 25 bp, Saccharomyces pastorianus
atcgagttcgtatggttatcagcag

SEQ ID NO: 7799 - DNA, 25 bp, Saccharomyces pastorianus
gaatctttgatctttgccatgaagg

SEQ ID NO: 7800 - DNA, 25 bp, Saccharomyces pastorianus
ggaagcgctgccaaatcgagttcgt

SEQ ID NO: 7801 - DNA, 25 bp, Saccharomyces pastorianus
aaactacccagttcttgatgaatta

SEQ ID NO: 7802 - DNA, 25 bp, Saccharomyces pastorianus
ggatatgtttggttcaggtcttcca

SEQ ID NO: 7803 - DNA, 25 bp, Saccharomyces pastorianus
ttacccaggatcttatgtttcataa

SEQ ID NO: 7804 - DNA, 25 bp, Saccharomyces pastorianus
gaaggattacattcacagcgatttt

SEQ ID NO: 7805 - DNA, 25 bp, Saccharomyces pastorianus
aatttgattcaactttacccaggat

SEQ ID NO: 7806 - DNA, 25 bp, Saccharomyces pastorianus
tcaggtcttccagttattgcattaa

SEQ ID NO: 7807 - DNA, 25 bp, Saccharomyces pastorianus
caagttcaggactggatctgccaat

SEQ ID NO: 7808 - DNA, 25 bp, Saccharomyces pastorianus
aagtcgttggaagcatctgttattg

SEQ ID NO: 7809 - DNA, 25 bp, Saccharomyces pastorianus
gcattgtatcctttgttacacatgg

SEQ ID NO: 7810 - DNA, 25 bp, Saccharomyces pastorianus
tggtcttagacaaccttcctcaaag

SEQ ID NO: 7811 - DNA, 25 bp, Saccharomyces pastorianus
aaagcaccaaggctccagaattgga

SEQ ID NO: 7812 - DNA, 25 bp, Saccharomyces pastorianus
actcaagcacaaatcagcctggtcg

SEQ ID NO: 7813 - DNA, 25 bp, Saccharomyces pastorianus
gtggcacaagtcacaggtcatccaa

SEQ ID NO: 7814 - DNA, 25 bp, Saccharomyces pastorianus
gattacttatatactctgcacgatt

SEQ ID NO: 7815 - DNA, 25 bp, Saccharomyces pastorianus
aaacggttcctcaaacacagatgat

SEQ ID NO: 7816 - DNA, 25 bp, Saccharomyces pastorianus
tgttgtcgttgccacttctttgaac

SEQ ID NO: 7817 - DNA, 25 bp, Saccharomyces pastorianus
gaaacgctgtggtatccttgaagaa

SEQ ID NO: 7818 - DNA, 25 bp, Saccharomyces pastorianus
atcatgtggcccgtgttgtcgttgc

SEQ ID NO: 7819 - DNA, 25 bp, Saccharomyces pastorianus
attgaaaccctagcccacttgagag

SEQ ID NO: 7820 - DNA, 25 bp, Saccharomyces pastorianus
atgtcctttgaagtgctagccaccg

SEQ ID NO: 7821 - DNA, 25 bp, Saccharomyces pastorianus
gcgtcaactggttcagaggtctcca

SEQ ID NO: 7822 - DNA, 25 bp, Saccharomyces pastorianus
gatggcgttccaattatgtcctttg

SEQ ID NO: 7823 - DNA, 25 bp, Saccharomyces pastorianus
gattctctatcttgccagatggcgt

SEQ ID NO: 7824 - DNA, 25 bp, Saccharomyces pastorianus
gaggtctccatctctatagacgcgg

SEQ ID NO: 7825 - DNA, 25 bp, Saccharomyces pastorianus
accatctgtagtggccttgtcaaga

SEQ ID NO: 7826 - DNA, 25 bp, Saccharomyces pastorianus
gagagctattcccaacatgcatgtt

SEQ ID NO: 7827 - DNA, 25 bp, Saccharomyces pastorianus
ccatgcctgacttttacacgtttga

SEQ ID NO: 7828 - DNA, 25 bp, Saccharomyces pastorianus
atccggatatcattctagcgtcaac

SEQ ID NO: 7829 - DNA, 25 bp, Saccharomyces pastorianus
gaagtatgcccatcaatccttcggt

SEQ ID NO: 7830 - DNA, 25 bp, Saccharomyces pastorianus
agcaaatccatgctctaagcactat

SEQ ID NO: 7831 - DNA, 25 bp, Saccharomyces pastorianus
atcgaggtttagacgtgtagcaggt

SEQ ID NO: 7832 - DNA, 25 bp, Saccharomyces pastorianus
gcagtcagagattcggccaagaaat

SEQ ID NO: 7833 - DNA, 25 bp, Saccharomyces pastorianus
cttcctctcaggcagtcagagattc

SEQ ID NO: 7834 - DNA, 25 bp, Saccharomyces pastorianus
taaagagacgttagccaggattcaa

SEQ ID NO: 7835 - DNA, 25 bp, Saccharomyces pastorianus
gaagccgtcgctagatgaaataaaa

SEQ ID NO: 7836 - DNA, 25 bp, Saccharomyces pastorianus
agcaggtctaccaagtgtggacgat

SEQ ID NO: 7837 - DNA, 25 bp, Saccharomyces pastorianus
ggatcgtatacctcatttagtcaca

SEQ ID NO: 7838 - DNA, 25 bp, Saccharomyces pastorianus
gataaactctacaaacctgcgggca

SEQ ID NO: 7839 - DNA, 25 bp, Saccharomyces pastorianus
gtcacattcaaggaggtacaggtat

SEQ ID NO: 7840 - DNA, 25 bp, Saccharomyces pastorianus
ggcaatccccgttattatcagcggt

SEQ ID NO: 7841 - DNA, 25 bp, Saccharomyces pastorianus
aagtgttattgagccatctttcggt

SEQ ID NO: 7842 - DNA, 25 bp, Saccharomyces pastorianus
caagaaattggctccttttgtatct

SEQ ID NO: 7843 - DNA, 25 bp, Saccharomyces pastorianus
ggatcgttccgtcactttgagagaa

SEQ ID NO: 7844 - DNA, 25 bp, Saccharomyces pastorianus
ggttcccctatccaatcataaagat

SEQ ID NO: 7845 - DNA, 25 bp, Saccharomyces pastorianus
tttagttgcccctacaaaggtcttg

SEQ ID NO: 7846 - DNA, 25 bp, Saccharomyces pastorianus
ctgttaccaccgaagtttccaagat

SEQ ID NO: 7847 - DNA, 25 bp, Saccharomyces pastorianus
tacaaaggtcttgctggttccccta

SEQ ID NO: 7848 - DNA, 25 bp, Saccharomyces pastorianus
acaatgccagaggtgtcctttcttt

SEQ ID NO: 7849 - DNA, 25 bp, Saccharomyces pastorianus
cgatgaattaggtaccccattcggt

SEQ ID NO: 7850 - DNA, 25 bp, Saccharomyces pastorianus
tgtgattgaagccatccgtaatatc

SEQ ID NO: 7851 - DNA, 25 bp, Saccharomyces pastorianus
gtcaccattgacttcgaatcagcta

SEQ ID NO: 7852 - DNA, 25 bp, Saccharomyces pastorianus
aaaactttcatctcgcaaagcgcct

SEQ ID NO: 7853 - DNA, 25 bp, Saccharomyces pastorianus
catcctatcccggatttgacagggt

SEQ ID NO: 7854 - DNA, 25 bp, Saccharomyces pastorianus
tatcaacgtcttgccctcattgagt

SEQ ID NO: 7855 - DNA, 25 bp, Saccharomyces pastorianus
tgatcgtcaactacacaacaagggt

SEQ ID NO: 7856 - DNA, 25 bp, Saccharomyces pastorianus
gtgtccaaccaattgtacgccaagt

SEQ ID NO: 7857 - DNA, 25 bp, Saccharomyces pastorianus
agattaatgaagtccgccatcggtg

SEQ ID NO: 7858 - DNA, 25 bp, Saccharomyces pastorianus
gaagccctttccatcgaagacaaat

SEQ ID NO: 7859 - DNA, 25 bp, Saccharomyces pastorianus
ttgtccacgatttacgaaagagctg

SEQ ID NO: 7860 - DNA, 25 bp, Saccharomyces pastorianus
gatgcccaacgatgatatcacccat

SEQ ID NO: 7861 - DNA, 25 bp, Saccharomyces pastorianus
aggatcacggtgacgtgtccaacca

SEQ ID NO: 7862 - DNA, 25 bp, Saccharomyces pastorianus
gccgtcgtcggtgaggaagcccttt

SEQ ID NO: 7863 - DNA, 25 bp, Saccharomyces pastorianus
aagtacgtcagttttctctccgata

SEQ ID NO: 7864 - DNA, 25 bp, Saccharomyces pastorianus
atgctggactcctctgataatatac

SEQ ID NO: 7865 - DNA, 25 bp, Saccharomyces pastorianus
gaatgctgtattccatggtcctgga

SEQ ID NO: 7866 - DNA, 25 bp, Saccharomyces pastorianus
gctcccctattccaacgataatgaa

SEQ ID NO: 7867 - DNA, 25 bp, Saccharomyces pastorianus
tgctattgcgttccaaccgttgata

SEQ ID NO: 7868 - DNA, 25 bp, Saccharomyces pastorianus
atattcttttgatcaagctccccta

SEQ ID NO: 7869 - DNA, 25 bp, Saccharomyces pastorianus
agaaatttgaaactcgtgccctcga

SEQ ID NO: 7870 - DNA, 25 bp, Saccharomyces pastorianus
aactttcagattctacctcttgtgg

SEQ ID NO: 7871 - DNA, 25 bp, Saccharomyces pastorianus
atggatcctagaccagtacgatgtg

SEQ ID NO: 7872 - DNA, 25 bp, Saccharomyces pastorianus
ataatgaagcacaccccatgctgga

SEQ ID NO: 7873 - DNA, 25 bp, Saccharomyces pastorianus
aggatatcctacaagacgcaccgca

SEQ ID NO: 7874 - DNA, 25 bp, Saccharomyces pastorianus
acgcttacacttactgttcatctag

SEQ ID NO: 7875 - DNA, 25 bp, Saccharomyces pastorianus
accgtacactgctatcattggactg

SEQ ID NO: 7876 - DNA, 25 bp, Saccharomyces pastorianus
aacagcagcattttctgccggtaac

SEQ ID NO: 7877 - DNA, 25 bp, Saccharomyces pastorianus
attggactggtttcatgcttggcaa

SEQ ID NO: 7878 - DNA, 25 bp, Saccharomyces pastorianus
atttgattaccgcatctcagttaat

SEQ ID NO: 7879 - DNA, 25 bp, Saccharomyces pastorianus
atgattcagggctataccgtcttct

SEQ ID NO: 7880 - DNA, 25 bp, Saccharomyces pastorianus
gaacgttctacggtatggcattaga

SEQ ID NO: 7881 - DNA, 25 bp, Saccharomyces pastorianus
ataccgtcttctttcctaaattgtg

SEQ ID NO: 7882 - DNA, 25 bp, Saccharomyces pastorianus
gattcattgcccaaattgccttttc

SEQ ID NO: 7883 - DNA, 25 bp, Saccharomyces pastorianus
atggtgtacccatttacgctgtcgg

SEQ ID NO: 7884 - DNA, 25 bp, Saccharomyces pastorianus
ggctctagtgagtcttttacaactg

SEQ ID NO: 7885 - DNA, 25 bp, Saccharomyces pastorianus
gcgtgctcgattccactagtggatc

SEQ ID NO: 7886 - DNA, 25 bp, Saccharomyces pastorianus
tttgatctaaaatccagccgcgtgc

SEQ ID NO: 7887 - DNA, 25 bp, Saccharomyces pastorianus
tgaccaatcccagatccatagtgac

SEQ ID NO: 7888 - DNA, 25 bp, Saccharomyces pastorianus
tcccgaggtccatgtcagagtcaag

SEQ ID NO: 7889 - DNA, 25 bp, Saccharomyces pastorianus
tcatgctatcaaattacggttcggc

SEQ ID NO: 7890 - DNA, 25 bp, Saccharomyces pastorianus
aaaggtgtgatcatacgcccaatat

SEQ ID NO: 7891 - DNA, 25 bp, Saccharomyces pastorianus
acggttcggcaactgcagcgacaaa

SEQ ID NO: 7892 - DNA, 25 bp, Saccharomyces pastorianus
agtcaagaccggtgtttccactcta

SEQ ID NO: 7893 - DNA, 25 bp, Saccharomyces pastorianus
agaagaggatgctcccgaggtccat

SEQ ID NO: 7894 - DNA, 25 bp, Saccharomyces pastorianus
agaccactaggccagatcagctaaa

SEQ ID NO: 7895 - DNA, 25 bp, Saccharomyces pastorianus
taaccgccatttttctgtaacgacg

SEQ ID NO: 7896 - DNA, 25 bp, Saccharomyces pastorianus
atacaggcacgtgatgttgcccaag

SEQ ID NO: 7897 - DNA, 25 bp, Saccharomyces pastorianus
atcggactattttaactcggaggtg

SEQ ID NO: 7898 - DNA, 25 bp, Saccharomyces pastorianus
tcaaggtcactccatcggactattt

SEQ ID NO: 7899 - DNA, 25 bp, Saccharomyces pastorianus
ccagtctttgggttgggagcactac

SEQ ID NO: 7900 - DNA, 25 bp, Saccharomyces pastorianus
ttgcccaaggccatgctcaaggtca

SEQ ID NO: 7901 - DNA, 25 bp, Saccharomyces pastorianus
aaagagctcgcgtgctggagttcca

SEQ ID NO: 7902 - DNA, 25 bp, Saccharomyces pastorianus
agcactacgagtgccatgcgccaga

SEQ ID NO: 7903 - DNA, 25 bp, Saccharomyces pastorianus
tcactatcacactttccagggcaga

SEQ ID NO: 7904 - DNA, 25 bp, Saccharomyces pastorianus
ggaccctgcgcatactgacggagga

SEQ ID NO: 7905 - DNA, 25 bp, Saccharomyces pastorianus
agggcagaaagctcactgaccagga

SEQ ID NO: 7906 - DNA, 25 bp, Saccharomyces pastorianus
tccccgcggtactcggacgataatt

SEQ ID NO: 7907 - DNA, 25 bp, Saccharomyces pastorianus
gaagaccacctaatggcggttacct

SEQ ID NO: 7908 - DNA, 25 bp, Saccharomyces pastorianus
ggacattgcttatttcgtacagtaa

SEQ ID NO: 7909 - DNA, 25 bp, Saccharomyces pastorianus
agttgctattgatatctctctgcca

SEQ ID NO: 7910 - DNA, 25 bp, Saccharomyces pastorianus
gacagcaattagattcggacattcc

SEQ ID NO: 7911 - DNA, 25 bp, Saccharomyces pastorianus
ggacattccagtttctacatgggtt

SEQ ID NO: 7912 - DNA, 25 bp, Saccharomyces pastorianus
cgtaaggttccattgcaagagctag

SEQ ID NO: 7913 - DNA, 25 bp, Saccharomyces pastorianus
acgcctgcttaactattagcggatt

SEQ ID NO: 7914 - DNA, 25 bp, Saccharomyces pastorianus
atctctctgccaaatggacattgct

SEQ ID NO: 7915 - DNA, 25 bp, Saccharomyces pastorianus
atgctttttagccacattctcacat

SEQ ID NO: 7916 - DNA, 25 bp, Saccharomyces pastorianus
ttacctctctagttgctttcgccaa

SEQ ID NO: 7917 - DNA, 25 bp, Saccharomyces pastorianus
gggtgctgtcttgatacagtcagaa

SEQ ID NO: 7918 - DNA, 25 bp, Saccharomyces pastorianus
atctactttgctacttgaaatcggt

SEQ ID NO: 7919 - DNA, 25 bp, Saccharomyces pastorianus
aaaaccgctcgatatttttgatcaa

SEQ ID NO: 7920 - DNA, 25 bp, Saccharomyces pastorianus
gagtcctgaacaactatctactttg

SEQ ID NO: 7921 - DNA, 25 bp, Saccharomyces pastorianus
ctcttgtgtttagctgtgtcatgtc

SEQ ID NO: 7922 - DNA, 25 bp, Saccharomyces pastorianus
tctgctgcatttggtattgagtcct

SEQ ID NO: 7923 - DNA, 25 bp, Saccharomyces pastorianus
tcagcctacttgtcacacatagcga

SEQ ID NO: 7924 - DNA, 25 bp, Saccharomyces pastorianus
ttatctttgttacctctttctgctg

SEQ ID NO: 7925 - DNA, 25 bp, Saccharomyces pastorianus
acatagcgagttcaactacctggaa

SEQ ID NO: 7926 - DNA, 25 bp, Saccharomyces pastorianus
aagttaaccctgtttgtgtgttcag

SEQ ID NO: 7927 - DNA, 25 bp, Saccharomyces pastorianus
tctctttcgaaatcatcagcctact

SEQ ID NO: 7928 - DNA, 25 bp, Saccharomyces pastorianus
gcaagtatcgttttgccgtactgtt

SEQ ID NO: 7929 - DNA, 25 bp, Saccharomyces pastorianus
aatcaaatcgatgcgctgggcggat

SEQ ID NO: 7930 - DNA, 25 bp, Saccharomyces pastorianus
gctccctagtcctgaattttgtcaa

SEQ ID NO: 7931 - DNA, 25 bp, Saccharomyces pastorianus
agaaggctccatcacagctcaaggg

SEQ ID NO: 7932 - DNA, 25 bp, Saccharomyces pastorianus
acaaggaccgtggtgcgatgtgcca

SEQ ID NO: 7933 - DNA, 25 bp, Saccharomyces pastorianus
gcgtggcgcactcaaggtattgcaa

SEQ ID NO: 7934 - DNA, 25 bp, Saccharomyces pastorianus
tagattcgacttgatatcctgctcc

SEQ ID NO: 7935 - DNA, 25 bp, Saccharomyces pastorianus
atatcacagtgtgggctctttcgag

SEQ ID NO: 7936 - DNA, 25 bp, Saccharomyces pastorianus
tactattgcctgtaccagttgcaga

SEQ ID NO: 7937 - DNA, 25 bp, Saccharomyces pastorianus
atcgattgggctcatactgctaaac

SEQ ID NO: 7938 - DNA, 25 bp, Saccharomyces pastorianus
gccaccgcatgattgagttcctgaa

SEQ ID NO: 7939 - DNA, 25 bp, Saccharomyces pastorianus
acagaagctcttcgcatcgattggg

SEQ ID NO: 7940 - DNA, 25 bp, Saccharomyces pastorianus
agagcttctgtagcagtgattcgtt

SEQ ID NO: 7941 - DNA, 25 bp, Saccharomyces pastorianus
tgcgaagagcttctgtagcagtgat

SEQ ID NO: 7942 - DNA, 25 bp, Saccharomyces pastorianus
ttctgtagcagtgattcgttgcaat

SEQ ID NO: 7943 - DNA, 25 bp, Saccharomyces pastorianus
gcagtgattcgttgcaataccttga

SEQ ID NO: 7944 - DNA, 25 bp, Saccharomyces pastorianus
ttcgttgcaataccttgagtgcgcc

SEQ ID NO: 7945 - DNA, 25 bp, Saccharomyces pastorianus
gtgattcgttgcaataccttgagtg

SEQ ID NO: 7946 - DNA, 25 bp, Saccharomyces pastorianus
agcccaatcgatgcgaagagcttct

SEQ ID NO: 7947 - DNA, 25 bp, Saccharomyces pastorianus
atgagcccaatcgatgcgaagagct

SEQ ID NO: 7948 - DNA, 25 bp, Saccharomyces pastorianus
gcttctgtagcagtgattcgttgca

SEQ ID NO: 7949 - DNA, 25 bp, Saccharomyces pastorianus
cccaatcgatgcgaagagcttctgt

SEQ ID NO: 7950 - DNA, 25 bp, Saccharomyces pastorianus
atcgatgcgaagagcttctgtagca

SEQ ID NO: 7951 - DNA, 25 bp, Saccharomyces pastorianus
gtgcccttgttaccaatcgaaactg

SEQ ID NO: 7952 - DNA, 25 bp, Saccharomyces pastorianus
aaatctggctgataatctggtcaaa

SEQ ID NO: 7953 - DNA, 25 bp, Saccharomyces pastorianus
cgacatactatcagagcctatacgt

SEQ ID NO: 7954 - DNA, 25 bp, Saccharomyces pastorianus
ttatctggtgaattggctgatcatg

SEQ ID NO: 7955 - DNA, 25 bp, Saccharomyces pastorianus
acaagaatccatgggcccgttaaga

SEQ ID NO: 7956 - DNA, 25 bp, Saccharomyces pastorianus
gaggtcataatactatcattggcta

SEQ ID NO: 7957 - DNA, 25 bp, Saccharomyces pastorianus
gaaagcggccgatgagttaggtatt

SEQ ID NO: 7958 - DNA, 25 bp, Saccharomyces pastorianus
gcagaatactgtgcccttgttacca

SEQ ID NO: 7959 - DNA, 25 bp, Saccharomyces pastorianus
gaaatagcgtcaaactccttgagaa

SEQ ID NO: 7960 - DNA, 25 bp, Saccharomyces pastorianus
actggctgcaaaaaacggcgtttca

SEQ ID NO: 7961 - DNA, 25 bp, Saccharomyces pastorianus
cgggctctgagggtgtttctataat

SEQ ID NO: 7962 - DNA, 25 bp, Saccharomyces pastorianus
aactacaagagcttcggtgccactt

SEQ ID NO: 7963 - DNA, 25 bp, Saccharomyces pastorianus
ggcgtgtaaagttatttccattgta

SEQ ID NO: 7964 - DNA, 25 bp, Saccharomyces pastorianus
gccaatgttaaatacgtccaagaaa

SEQ ID NO: 7965 - DNA, 25 bp, Saccharomyces pastorianus
aaccaagctatcgaactatctgcag

SEQ ID NO: 7966 - DNA, 25 bp, Saccharomyces pastorianus
tgcgcaattcgtgaccgggtttggt

SEQ ID NO: 7967 - DNA, 25 bp, Saccharomyces pastorianus
aactatctgcagaagctttagccaa

SEQ ID NO: 7968 - DNA, 25 bp, Saccharomyces pastorianus
tggtgcaatgctacgttataaggtt

SEQ ID NO: 7969 - DNA, 25 bp, Saccharomyces pastorianus
ggacaagtcgtacgccattgacaaa

SEQ ID NO: 7970 - DNA, 25 bp, Saccharomyces pastorianus
gatgctgtcactgaagaacctttga

SEQ ID NO: 7971 - DNA, 25 bp, Saccharomyces pastorianus
aagtcttctgaaggtgcgcaattcg

SEQ ID NO: 7972 - DNA, 25 bp, Saccharomyces pastorianus
ggttaactttgagcaactacttgat

SEQ ID NO: 7973 - DNA, 25 bp, Saccharomyces pastorianus
actgacggcggttcccatgggatta

SEQ ID NO: 7974 - DNA, 25 bp, Saccharomyces pastorianus
cattgtcggatcttgcgttggtaac

SEQ ID NO: 7975 - DNA, 25 bp, Saccharomyces pastorianus
atgcctattgcaaatctgacgtctt

SEQ ID NO: 7976 - DNA, 25 bp, Saccharomyces pastorianus
aggattaggctctttggccatccaa

SEQ ID NO: 7977 - DNA, 25 bp, Saccharomyces pastorianus
aaggatatcgttggtgccgtcatca

SEQ ID NO: 7978 - DNA, 25 bp, Saccharomyces pastorianus
gttgacctagcggaagttgccccaa

SEQ ID NO: 7979 - DNA, 25 bp, Saccharomyces pastorianus
ttgtcttggttggtatgccggctca

SEQ ID NO: 7980 - DNA, 25 bp, Saccharomyces pastorianus
aagagccaatctaattcccggtcaa

SEQ ID NO: 7981 - DNA, 25 bp, Saccharomyces pastorianus
ttactatttctggtgcttgcggagg

SEQ ID NO: 7982 - DNA, 25 bp, Saccharomyces pastorianus
ttggctagcctatctgatgttccag

SEQ ID NO: 7983 - DNA, 25 bp, Saccharomyces pastorianus
tgccccaattttgtgtgcagggatt

SEQ ID NO: 7984 - DNA, 25 bp, Saccharomyces pastorianus
acaagctacacaatgttgaccctca

SEQ ID NO: 7985 - DNA, 25 bp, Saccharomyces pastorianus
gcaacaacatctggaggcgggccta

SEQ ID NO: 7986 - DNA, 25 bp, Saccharomyces pastorianus
aagctccatcctttcaaatcagatc

SEQ ID NO: 7987 - DNA, 25 bp, Saccharomyces pastorianus
gctttggtcgttttcaatccgttat

SEQ ID NO: 7988 - DNA, 25 bp, Saccharomyces pastorianus
cactccaagtgatcgaatccgtcga

SEQ ID NO: 7989 - DNA, 25 bp, Saccharomyces pastorianus
aaagctggtgttctatcaagggatt

SEQ ID NO: 7990 - DNA, 25 bp, Saccharomyces pastorianus
gcatgccattgctaaagctttggtc

SEQ ID NO: 7991 - DNA, 25 bp, Saccharomyces pastorianus
tacgagattaaagcccacccaatac

SEQ ID NO: 7992 - DNA, 25 bp, Saccharomyces pastorianus
gctctacttctaaagtctatgtcgt

SEQ ID NO: 7993 - DNA, 25 bp, Saccharomyces pastorianus
gttgaccctcaactgactaatgaag

SEQ ID NO: 7994 - DNA, 25 bp, Saccharomyces pastorianus
agcagaatcgatcatgcatgccatt

SEQ ID NO: 7995 - DNA, 25 bp, Saccharomyces pastorianus
gactttacggttttcatccagttct

SEQ ID NO: 7996 - DNA, 25 bp, Saccharomyces pastorianus
aatcaatcatacaactcgctcgagc

SEQ ID NO: 7997 - DNA, 25 bp, Saccharomyces pastorianus
atatcctactgttctgggctgacta

SEQ ID NO: 7998 - DNA, 25 bp, Saccharomyces pastorianus
tcatccagttcttcctttatgcaag

SEQ ID NO: 7999 - DNA, 25 bp, Saccharomyces pastorianus
gatcctgtacatctatctccagcaa

SEQ ID NO: 8000 - DNA, 25 bp, Saccharomyces pastorianus
gagtgcggtactatacttgggctct

SEQ ID NO: 8001 - DNA, 25 bp, Saccharomyces pastorianus
attaatctccctgcacaaattttgg

SEQ ID NO: 8002 - DNA, 25 bp, Saccharomyces pastorianus
aaaatcctgcgacggtgtgtcgttt

SEQ ID NO: 8003 - DNA, 25 bp, Saccharomyces pastorianus
tgggctctagggttcctcaaattat

SEQ ID NO: 8004 - DNA, 25 bp, Saccharomyces pastorianus
tcaggtgtaatatttgccgggtttt

SEQ ID NO: 8005 - DNA, 25 bp, Saccharomyces pastorianus
gagtatgagccacttcttccaagaa

SEQ ID NO: 8006 - DNA, 25 bp, Saccharomyces pastorianus
taacacaatgcactctttcgaagaa

SEQ ID NO: 8007 - DNA, 25 bp, Saccharomyces pastorianus
gttgtagcgcccttaacacaatgca

SEQ ID NO: 8008 - DNA, 25 bp, Saccharomyces pastorianus
tttcgaagaatcctcactgcgtctg

SEQ ID NO: 8009 - DNA, 25 bp, Saccharomyces pastorianus
gagtagaagcctgttgtagcgccct

SEQ ID NO: 8010 - DNA, 25 bp, Saccharomyces pastorianus
gattacaacgacaacatcatcagag

SEQ ID NO: 8011 - DNA, 25 bp, Saccharomyces pastorianus
gattctacgaaagatctgccaactt

SEQ ID NO: 8012 - DNA, 25 bp, Saccharomyces pastorianus
gagtccattgttcacaaacatcaac

SEQ ID NO: 8013 - DNA, 25 bp, Saccharomyces pastorianus
aacgttgaacgtcaatgaaactcga

SEQ ID NO: 8014 - DNA, 25 bp, Saccharomyces pastorianus
tgcgtctgcaagaacatagcttcat

SEQ ID NO: 8015 - DNA, 25 bp, Saccharomyces pastorianus
caagctacaaccaaaccctcaaaat

SEQ ID NO: 8016 - DNA, 25 bp, Saccharomyces pastorianus
aagtctcaacgcaattttacaattt

SEQ ID NO: 8017 - DNA, 25 bp, Saccharomyces pastorianus
aacgatcaccgtattagagccattg

SEQ ID NO: 8018 - DNA, 25 bp, Saccharomyces pastorianus
gctgcgactcttccagaatttactg

SEQ ID NO: 8019 - DNA, 25 bp, Saccharomyces pastorianus
cgatgagccatttgctgcgactctt

SEQ ID NO: 8020 - DNA, 25 bp, Saccharomyces pastorianus
ttggagcgcctcgtcaaggagtgca

SEQ ID NO: 8021 - DNA, 25 bp, Saccharomyces pastorianus
cattaggttccaacggtgcgccaaa

SEQ ID NO: 8022 - DNA, 25 bp, Saccharomyces pastorianus
aagtggaaacgcatcctcatttacc

SEQ ID NO: 8023 - DNA, 25 bp, Saccharomyces pastorianus
aacaatgcatgcttccaatggtgat

SEQ ID NO: 8024 - DNA, 25 bp, Saccharomyces pastorianus
ggtgcgccaaacttgaagattccat

SEQ ID NO: 8025 - DNA, 25 bp, Saccharomyces pastorianus
ttattgacggcatattccccattag

SEQ ID NO: 8026 - DNA, 25 bp, Saccharomyces pastorianus
gaatccagttagaatctcctctagt

SEQ ID NO: 8027 - DNA, 25 bp, Saccharomyces pastorianus
aagaatctaccttgaccctaacgat

SEQ ID NO: 8028 - DNA, 25 bp, Saccharomyces pastorianus
gatgatgtagttcccattttgttga

SEQ ID NO: 8029 - DNA, 25 bp, Saccharomyces pastorianus
gtaacgccagttatggtaccttcca

SEQ ID NO: 8030 - DNA, 25 bp, Saccharomyces pastorianus
aattcagacttcagacctggcggcg

SEQ ID NO: 8031 - DNA, 25 bp, Saccharomyces pastorianus
aggtgtgggattacagccccgtact

SEQ ID NO: 8032 - DNA, 25 bp, Saccharomyces pastorianus
ttatgttctcacactacaagggaca

SEQ ID NO: 8033 - DNA, 25 bp, Saccharomyces pastorianus
gggaacgtgcctttatattcttatg

SEQ ID NO: 8034 - DNA, 25 bp, Saccharomyces pastorianus
ggcggcgtcaagattgcgtttgtta

SEQ ID NO: 8035 - DNA, 25 bp, Saccharomyces pastorianus
ggtaccttccattgtcgaacatctg

SEQ ID NO: 8036 - DNA, 25 bp, Saccharomyces pastorianus
tgaaaaacctactcttccatatccg

SEQ ID NO: 8037 - DNA, 25 bp, Saccharomyces pastorianus
acaatgttcttgttctgccttattt

SEQ ID NO: 8038 - DNA, 25 bp, Saccharomyces pastorianus
gaatccgaacacgttaatctggctg

SEQ ID NO: 8039 - DNA, 25 bp, Saccharomyces pastorianus
gataacgattatgtcgatccagaaa

SEQ ID NO: 8040 - DNA, 25 bp, Saccharomyces pastorianus
gatataattcctttacagagacctt

SEQ ID NO: 8041 - DNA, 25 bp, Saccharomyces pastorianus
gagagactcgcgtggctaaaaagac

SEQ ID NO: 8042 - DNA, 25 bp, Saccharomyces pastorianus
gacaaagctaaccaagcggcacaga

SEQ ID NO: 8043 - DNA, 25 bp, Saccharomyces pastorianus
ataggaatgcccaacttgccaaaca

SEQ ID NO: 8044 - DNA, 25 bp, Saccharomyces pastorianus
atgaggctgcattttgacaccaatt

SEQ ID NO: 8045 - DNA, 25 bp, Saccharomyces pastorianus
aacaacgagctcctacaatcgataa

SEQ ID NO: 8046 - DNA, 25 bp, Saccharomyces pastorianus
acattccaggtttgaggtcgccaca

SEQ ID NO: 8047 - DNA, 25 bp, Saccharomyces pastorianus
acaggcaaagagcaggtgactacta

SEQ ID NO: 8048 - DNA, 25 bp, Saccharomyces pastorianus
aacgaaagtgatacgcatgctgagc

SEQ ID NO: 8049 - DNA, 25 bp, Saccharomyces pastorianus
aacaaattcgcctcaatgcaaaaag

SEQ ID NO: 8050 - DNA, 25 bp, Saccharomyces pastorianus
gaagtgagtccgctacaatcagtta

SEQ ID NO: 8051 - DNA, 25 bp, Saccharomyces pastorianus
ttgggtcaacatttttgggcagatc

SEQ ID NO: 8052 - DNA, 25 bp, Saccharomyces pastorianus
gttgtcgcaaatgatccagcaataa

SEQ ID NO: 8053 - DNA, 25 bp, Saccharomyces pastorianus
aaaccaccgattgttgttgtcgcaa

SEQ ID NO: 8054 - DNA, 25 bp, Saccharomyces pastorianus
ggtcgagattcgcttgcaaattcac

SEQ ID NO: 8055 - DNA, 25 bp, Saccharomyces pastorianus
gcgagaatatctaagggtcctggaa

SEQ ID NO: 8056 - DNA, 25 bp, Saccharomyces pastorianus
gacagcactaattgatgatcctgga

SEQ ID NO: 8057 - DNA, 25 bp, Saccharomyces pastorianus
gagattcggcggttcaaaaatgcaa

SEQ ID NO: 8058 - DNA, 25 bp, Saccharomyces pastorianus
gagcaccatgttgagtatgcaatat

SEQ ID NO: 8059 - DNA, 25 bp, Saccharomyces pastorianus
agaaccactatttcgcatcctgaga

SEQ ID NO: 8060 - DNA, 25 bp, Saccharomyces pastorianus
acgtatgcgcaatcgctggacgcga

SEQ ID NO: 8061 - DNA, 25 bp, Saccharomyces pastorianus
gtgacgaaccttctgttggtgtaaa

SEQ ID NO: 8062 - DNA, 25 bp, Saccharomyces pastorianus
agaggctacttcatcacccaagagg

SEQ ID NO: 8063 - DNA, 25 bp, Saccharomyces pastorianus
tggttccacaacatatcagattaag

SEQ ID NO: 8064 - DNA, 25 bp, Saccharomyces pastorianus
ataccacctgccactatagaaacat

SEQ ID NO: 8065 - DNA, 25 bp, Saccharomyces pastorianus
gaagccgccttagtggtcaatataa

SEQ ID NO: 8066 - DNA, 25 bp, Saccharomyces pastorianus
gaatctgttgcaaagttcccagaaa

SEQ ID NO: 8067 - DNA, 25 bp, Saccharomyces pastorianus
gatgtcattccaagcgaatccaact

SEQ ID NO: 8068 - DNA, 25 bp, Saccharomyces pastorianus
aactcaccacgagttggttccacaa

SEQ ID NO: 8069 - DNA, 25 bp, Saccharomyces pastorianus
ggaagttgaactgccattagatgat

SEQ ID NO: 8070 - DNA, 25 bp, Saccharomyces pastorianus
gattccatgggtaggccacagcgta

SEQ ID NO: 8071 - DNA, 25 bp, Saccharomyces pastorianus
aattagtaccttctataccacctgc

SEQ ID NO: 8072 - DNA, 25 bp, Saccharomyces pastorianus
gtacaggcgttgacacatggtccat

SEQ ID NO: 8073 - DNA, 25 bp, Saccharomyces pastorianus
acatcgtatcctacatcgtgatctg

SEQ ID NO: 8074 - DNA, 25 bp, Saccharomyces pastorianus
cacgtgcgtttggtgttccattaag

SEQ ID NO: 8075 - DNA, 25 bp, Saccharomyces pastorianus
ggtacagagcgccagaggtcttact

SEQ ID NO: 8076 - DNA, 25 bp, Saccharomyces pastorianus
aggtgatttcggtctagcacgtgcg

SEQ ID NO: 8077 - DNA, 25 bp, Saccharomyces pastorianus
tggtgccaagcctagatccacaagg

SEQ ID NO: 8078 - DNA, 25 bp, Saccharomyces pastorianus
actagcatacgaccctattaaccgg

SEQ ID NO: 8079 - DNA, 25 bp, Saccharomyces pastorianus
agagcctacacccatgaaatcgtta

SEQ ID NO: 8080 - DNA, 25 bp, Saccharomyces pastorianus
aaggtattgcgtactgtcactcaca

SEQ ID NO: 8081 - DNA, 25 bp, Saccharomyces pastorianus
aaggacctgtcgcaagtggtgccaa

SEQ ID NO: 8082 - DNA, 25 bp, Saccharomyces pastorianus
ggcatatggccggacattgtctact

SEQ ID NO: 8083 - DNA, 25 bp, Saccharomyces pastorianus
aattgatctcccatattcacgacgg

SEQ ID NO: 8084 - DNA, 25 bp, Saccharomyces pastorianus
aaagctgctgtcattttcaactcaa

SEQ ID NO: 8085 - DNA, 25 bp, Saccharomyces pastorianus
tgttttcgaattttccatgccaagt

SEQ ID NO: 8086 - DNA, 25 bp, Saccharomyces pastorianus
gacggtggtactcaagactatttca

SEQ ID NO: 8087 - DNA, 25 bp, Saccharomyces pastorianus
ggatctcttcgaaatcttaaccgct

SEQ ID NO: 8088 - DNA, 25 bp, Saccharomyces pastorianus
gtggctctgcttacaaccaagacat

SEQ ID NO: 8089 - DNA, 25 bp, Saccharomyces pastorianus
aagtgacactagtggctctgcttac

SEQ ID NO: 8090 - DNA, 25 bp, Saccharomyces pastorianus
agctatctggctgctgaacgccaaa

SEQ ID NO: 8091 - DNA, 25 bp, Saccharomyces pastorianus
gcccttggtgatgttaccttggcat

SEQ ID NO: 8092 - DNA, 25 bp, Saccharomyces pastorianus
atctcctttgctgcttctgacggta

SEQ ID NO: 8093 - DNA, 25 bp, Saccharomyces pastorianus
gaaggtatcccagcttaccgtgggt

SEQ ID NO: 8094 - DNA, 25 bp, Saccharomyces pastorianus
atccttattttcctcctggtgggtg

SEQ ID NO: 8095 - DNA, 25 bp, Saccharomyces pastorianus
gctcctttgatatccaagacctggt

SEQ ID NO: 8096 - DNA, 25 bp, Saccharomyces pastorianus
tgggcatccttattttcctcctggt

SEQ ID NO: 8097 - DNA, 25 bp, Saccharomyces pastorianus
agaaggctgctcctttgatatccaa

SEQ ID NO: 8098 - DNA, 25 bp, Saccharomyces pastorianus
ccgacaagaaggctgctcctttgat

SEQ ID NO: 8099 - DNA, 25 bp, Saccharomyces pastorianus
aagaaggtagacaaggccgacaaga

SEQ ID NO: 8100 - DNA, 25 bp, Saccharomyces pastorianus
aggctgctcctttgatatccaagac

SEQ ID NO: 8101 - DNA, 25 bp, Saccharomyces pastorianus
aaggccgacaagaaggctgctcctt

SEQ ID NO: 8102 - DNA, 25 bp, Saccharomyces pastorianus
tggttgggcatccttattttcctcc

SEQ ID NO: 8103 - DNA, 25 bp, Saccharomyces pastorianus
caagacctggttgggcatccttatt

SEQ ID NO: 8104 - DNA, 25 bp, Saccharomyces pastorianus
tatccaagacctggttgggcatcct

SEQ ID NO: 8105 - DNA, 25 bp, Saccharomyces pastorianus
gaattacaagatgctgcgctgttag

SEQ ID NO: 8106 - DNA, 25 bp, Saccharomyces pastorianus
gcgctgttagtcttcgccaataaac

SEQ ID NO: 8107 - DNA, 25 bp, Saccharomyces pastorianus
tattcggccctattggaggtgctac

SEQ ID NO: 8108 - DNA, 25 bp, Saccharomyces pastorianus
ataaacaagatcaacctggcgcatt

SEQ ID NO: 8109 - DNA, 25 bp, Saccharomyces pastorianus
tggtcaccacgaaaccaaccattgg

SEQ ID NO: 8110 - DNA, 25 bp, Saccharomyces pastorianus
attttcagctcaatgttcgacaagc

SEQ ID NO: 8111 - DNA, 25 bp, Saccharomyces pastorianus
tgagcgcaagcgaagtgtctaaaga

SEQ ID NO: 8112 - DNA, 25 bp, Saccharomyces pastorianus
ttgggatcttggtggccaaaccagt

SEQ ID NO: 8113 - DNA, 25 bp, Saccharomyces pastorianus
aggtgctactatgcagatactgccg

SEQ ID NO: 8114 - DNA, 25 bp, Saccharomyces pastorianus
atactgccgcagtcatatttgtggt

SEQ ID NO: 8115 - DNA, 25 bp, Saccharomyces pastorianus
ggtctattgtagcttcaagtgccat

SEQ ID NO: 8116 - DNA, 25 bp, Saccharomyces pastorianus
atggcaacccttttttcacattcaa

SEQ ID NO: 8117 - DNA, 25 bp, Saccharomyces pastorianus
gcggcatatcatctactttcaacaa

SEQ ID NO: 8118 - DNA, 25 bp, Saccharomyces pastorianus
tgtttgtctccaaattctcgtttcc

SEQ ID NO: 8119 - DNA, 25 bp, Saccharomyces pastorianus
aaagcgatcgatttcatgggcagga

SEQ ID NO: 8120 - DNA, 25 bp, Saccharomyces pastorianus
ggtttcaagatttactttcccatat

SEQ ID NO: 8121 - DNA, 25 bp, Saccharomyces pastorianus
gatgacgacagtatacacgcagtaa

SEQ ID NO: 8122 - DNA, 25 bp, Saccharomyces pastorianus
caaaatcacaattcccactgtcagg

SEQ ID NO: 8123 - DNA, 25 bp, Saccharomyces pastorianus
caggaccgtttcgatgacacatttg

SEQ ID NO: 8124 - DNA, 25 bp, Saccharomyces pastorianus
aagatcgtcgttatcctcggatgga

SEQ ID NO: 8125 - DNA, 25 bp, Saccharomyces pastorianus
atttcccagagctaataggcacctt

SEQ ID NO: 8126 - DNA, 25 bp, Saccharomyces pastorianus
agacttcaagtcttatttcccagag

SEQ ID NO: 8127 - DNA, 25 bp, Saccharomyces pastorianus
acaagtttctagatagtgcccataa

SEQ ID NO: 8128 - DNA, 25 bp, Saccharomyces pastorianus
cttcgttaagtcgacaacaccatat

SEQ ID NO: 8129 - DNA, 25 bp, Saccharomyces pastorianus
caaaagcatagaagtcctggacgaa

SEQ ID NO: 8130 - DNA, 25 bp, Saccharomyces pastorianus
tgggctgccacttccaagatcagaa

SEQ ID NO: 8131 - DNA, 25 bp, Saccharomyces pastorianus
gcacccatcgttgaagactttaaca

SEQ ID NO: 8132 - DNA, 25 bp, Saccharomyces pastorianus
tgcccataaacatggatcatcttat

SEQ ID NO: 8133 - DNA, 25 bp, Saccharomyces pastorianus
caacggtcgtacgtctaagcgagta

SEQ ID NO: 8134 - DNA, 25 bp, Saccharomyces pastorianus
tcatcttatgtggtagttttgggca

SEQ ID NO: 8135 - DNA, 25 bp, Saccharomyces pastorianus
gagtaagaaagcacccatcgttgaa

SEQ ID NO: 8136 - DNA, 25 bp, Saccharomyces pastorianus
aactaaagagagcaccaacggtcgt

SEQ ID NO: 8137 - DNA, 25 bp, Saccharomyces pastorianus
aaagacgctggcattgggctgccac

SEQ ID NO: 8138 - DNA, 25 bp, Saccharomyces pastorianus
gctgtctatcaacgcatgaccttga

SEQ ID NO: 8139 - DNA, 25 bp, Saccharomyces pastorianus
ggaactttgaagaccgtgggctcaa

SEQ ID NO: 8140 - DNA, 25 bp, Saccharomyces pastorianus
gaggaactgcccaatgattggcatt

SEQ ID NO: 8141 - DNA, 25 bp, Saccharomyces pastorianus
ggtcatcaactatgagaagctgtct

SEQ ID NO: 8142 - DNA, 25 bp, Saccharomyces pastorianus
tggagtacattattactgccctatg

SEQ ID NO: 8143 - DNA, 25 bp, Saccharomyces pastorianus
gggtatactcggattcatcttggaa

SEQ ID NO: 8144 - DNA, 25 bp, Saccharomyces pastorianus
tctggagatttaccctagttcgaaa

SEQ ID NO: 8145 - DNA, 25 bp, Saccharomyces pastorianus
ttatcagtgctctggtataccattc

SEQ ID NO: 8146 - DNA, 25 bp, Saccharomyces pastorianus
gaaagaatttttgccgatactacta

SEQ ID NO: 8147 - DNA, 25 bp, Saccharomyces pastorianus
gctactttaaggctattctggagat

SEQ ID NO: 8148 - DNA, 25 bp, Saccharomyces pastorianus
gtataccattccactagctttcaag

SEQ ID NO: 8149 - DNA, 25 bp, Saccharomyces pastorianus
tggagttttcaatctcttacacgag

SEQ ID NO: 8150 - DNA, 25 bp, Saccharomyces pastorianus
gcattccctgtggactatcttttag

SEQ ID NO: 8151 - DNA, 25 bp, Saccharomyces pastorianus
gttaccaagtatccactgatgctga

SEQ ID NO: 8152 - DNA, 25 bp, Saccharomyces pastorianus
tgtctcctcagctggttggcaaaca

SEQ ID NO: 8153 - DNA, 25 bp, Saccharomyces pastorianus
gatgctgaagcattagtcacggcag

SEQ ID NO: 8154 - DNA, 25 bp, Saccharomyces pastorianus
taagtggatccacgtacccttcaat

SEQ ID NO: 8155 - DNA, 25 bp, Saccharomyces pastorianus
agagcccctattgaaacttgtctcc

SEQ ID NO: 8156 - DNA, 25 bp, Saccharomyces pastorianus
gactgagtttccgtgggccaacaga

SEQ ID NO: 8157 - DNA, 25 bp, Saccharomyces pastorianus
ttgcaggtactttcacccgaggaat

SEQ ID NO: 8158 - DNA, 25 bp, Saccharomyces pastorianus
cttctaaatttgtcacctgtgtcat

SEQ ID NO: 8159 - DNA, 25 bp, Saccharomyces pastorianus
gtaacgttgactcatgggtttccta

SEQ ID NO: 8160 - DNA, 25 bp, Saccharomyces pastorianus
aatccggctctatggttggcgacga

SEQ ID NO: 8161 - DNA, 25 bp, Saccharomyces pastorianus
acagcagcatgcaccgcgatatatt

SEQ ID NO: 8162 - DNA, 25 bp, Saccharomyces pastorianus
acatcgtcccacaaggtaacttcaa

SEQ ID NO: 8163 - DNA, 25 bp, Saccharomyces pastorianus
tcccaggtctccacggatcaagata

SEQ ID NO: 8164 - DNA, 25 bp, Saccharomyces pastorianus
atcgtcaatcgcactgatttcagtc

SEQ ID NO: 8165 - DNA, 25 bp, Saccharomyces pastorianus
gcaagaaggtggtgcggtacccctt

SEQ ID NO: 8166 - DNA, 25 bp, Saccharomyces pastorianus
tcggcatagccgagcccatgaagag

SEQ ID NO: 8167 - DNA, 25 bp, Saccharomyces pastorianus
gatggagcagtaccgacagatattc

SEQ ID NO: 8168 - DNA, 25 bp, Saccharomyces pastorianus
gatgaacgacagacacccattggaa

SEQ ID NO: 8169 - DNA, 25 bp, Saccharomyces pastorianus
aagcattgggagaccacacagcgcc

SEQ ID NO: 8170 - DNA, 25 bp, Saccharomyces pastorianus
ttgggaggacgtctatcctggcacc

SEQ ID NO: 8171 - DNA, 25 bp, Saccharomyces pastorianus
aaatggctcaattcataacgtctaa

SEQ ID NO: 8172 - DNA, 25 bp, Saccharomyces pastorianus
tgtgctcaagaggtatccccgttat

SEQ ID NO: 8173 - DNA, 25 bp, Saccharomyces pastorianus
ggcatgcaaggtgaatccgttccaa

SEQ ID NO: 8174 - DNA, 25 bp, Saccharomyces pastorianus
gatatcggatcttttgggcatgcaa

SEQ ID NO: 8175 - DNA, 25 bp, Saccharomyces pastorianus
tatggcccatataggattaacaccg

SEQ ID NO: 8176 - DNA, 25 bp, Saccharomyces pastorianus
aattggttgctggtccattgttatt

SEQ ID NO: 8177 - DNA, 25 bp, Saccharomyces pastorianus
atggcaccagcggtcaggttttagt

SEQ ID NO: 8178 - DNA, 25 bp, Saccharomyces pastorianus
gttgttcgaaacagccaagcagttg

SEQ ID NO: 8179 - DNA, 25 bp, Saccharomyces pastorianus
tagtcgcagatatgccatttggtac

SEQ ID NO: 8180 - DNA, 25 bp, Saccharomyces pastorianus
cgtctaaactttccattccaacaat

SEQ ID NO: 8181 - DNA, 25 bp, Saccharomyces pastorianus
ggtttatccaagaactgtgctcaag

SEQ ID NO: 8182 - DNA, 25 bp, Saccharomyces pastorianus
gaaatttcctgcagagttccgttta

SEQ ID NO: 8183 - DNA, 25 bp, Saccharomyces pastorianus
tgtcgcggtgagcagtttctttcga

SEQ ID NO: 8184 - DNA, 25 bp, Saccharomyces pastorianus
tctttcgaaacattggtgcggctat

SEQ ID NO: 8185 - DNA, 25 bp, Saccharomyces pastorianus
attgatggccttcggtatgacctgg

SEQ ID NO: 8186 - DNA, 25 bp, Saccharomyces pastorianus
tgttacgttttcttactacctcgag

SEQ ID NO: 8187 - DNA, 25 bp, Saccharomyces pastorianus
tttgttgtgctcttggttttttcct

SEQ ID NO: 8188 - DNA, 25 bp, Saccharomyces pastorianus
ggtgcagcaatacttccatgacata

SEQ ID NO: 8189 - DNA, 25 bp, Saccharomyces pastorianus
agcactgctctcttattttctagtt

SEQ ID NO: 8190 - DNA, 25 bp, Saccharomyces pastorianus
gttattatgccttcagtgttacgtt

SEQ ID NO: 8191 - DNA, 25 bp, Saccharomyces pastorianus
agtagccatgctgttaggatctcaa

SEQ ID NO: 8192 - DNA, 25 bp, Saccharomyces pastorianus
ctagaaatcggtgctgcttacgtct

SEQ ID NO: 8193 - DNA, 25 bp, Saccharomyces pastorianus
tattgccatggctactgacagtgac

SEQ ID NO: 8194 - DNA, 25 bp, Saccharomyces pastorianus
tttggtgttttcagcagcagccaca

SEQ ID NO: 8195 - DNA, 25 bp, Saccharomyces pastorianus
tttgtctggtgtagtgggccattcc

SEQ ID NO: 8196 - DNA, 25 bp, Saccharomyces pastorianus
cattcttggctggtatgctgtttct

SEQ ID NO: 8197 - DNA, 25 bp, Saccharomyces pastorianus
gttcttcatttttgctcttctttat

SEQ ID NO: 8198 - DNA, 25 bp, Saccharomyces pastorianus
taggcgaccgttcacaaatcagtat

SEQ ID NO: 8199 - DNA, 25 bp, Saccharomyces pastorianus
gcatcgtttatgttttcaccagttt

SEQ ID NO: 8200 - DNA, 25 bp, Saccharomyces pastorianus
gcagccacatctcttgcgataatga

SEQ ID NO: 8201 - DNA, 25 bp, Saccharomyces pastorianus
tgctgtttctggtgttcggttataa

SEQ ID NO: 8202 - DNA, 25 bp, Saccharomyces pastorianus
aaattccgtgagctagcatcgttta

SEQ ID NO: 8203 - DNA, 25 bp, Saccharomyces pastorianus
tatttgcagtggtctagccgtggta

SEQ ID NO: 8204 - DNA, 25 bp, Saccharomyces pastorianus
gtcaagagactcctatggttcatct

SEQ ID NO: 8205 - DNA, 25 bp, Saccharomyces pastorianus
agacattacaaaaactcctgggatt

SEQ ID NO: 8206 - DNA, 25 bp, Saccharomyces pastorianus
atcctccaatggctgttatatgaac

SEQ ID NO: 8207 - DNA, 25 bp, Saccharomyces pastorianus
gtatagctacgtacccacatgaagt

SEQ ID NO: 8208 - DNA, 25 bp, Saccharomyces pastorianus
aagtgctggtcttgcaaagtttgta

SEQ ID NO: 8209 - DNA, 25 bp, Saccharomyces pastorianus
gtacagtgggttgaccccacattta

SEQ ID NO: 8210 - DNA, 25 bp, Saccharomyces pastorianus
gaggagggcctattttcaatgtaca

SEQ ID NO: 8211 - DNA, 25 bp, Saccharomyces pastorianus
atggtgccaaagatcaggaagtgct

SEQ ID NO: 8212 - DNA, 25 bp, Saccharomyces pastorianus
agtgcttcgtatttgggatctgttg

SEQ ID NO: 8213 - DNA, 25 bp, Saccharomyces pastorianus
ggttcatctcatggctgctgcaaca

SEQ ID NO: 8214 - DNA, 25 bp, Saccharomyces pastorianus
ggatctgttgaaggtatcctccaat

SEQ ID NO: 8215 - DNA, 25 bp, Saccharomyces pastorianus
ggtgctatctggaacatcaactctt

SEQ ID NO: 8216 - DNA, 25 bp, Saccharomyces pastorianus
gttttctctggtaacagaccaacca

SEQ ID NO: 8217 - DNA, 25 bp, Saccharomyces pastorianus
atccgatttccttttggccgctcaa

SEQ ID NO: 8218 - DNA, 25 bp, Saccharomyces pastorianus
attttgttcggtgaaccagctacta

SEQ ID NO: 8219 - DNA, 25 bp, Saccharomyces pastorianus
ggtatctctacccacgatgcttcta

SEQ ID NO: 8220 - DNA, 25 bp, Saccharomyces pastorianus
gaagtcaagtccgaaggtgccaccg

SEQ ID NO: 8221 - DNA, 25 bp, Saccharomyces pastorianus
gaattagacaactcctccggtatct

SEQ ID NO: 8222 - DNA, 25 bp, Saccharomyces pastorianus
aagctgaagctttgatggttggtaa

SEQ ID NO: 8223 - DNA, 25 bp, Saccharomyces pastorianus
aagttgattccatccgatttccttt

SEQ ID NO: 8224 - DNA, 25 bp, Saccharomyces pastorianus
ttccaacttcttcgctcaagctgaa

SEQ ID NO: 8225 - DNA, 25 bp, Saccharomyces pastorianus
tactccaccggttccattttgttcg

SEQ ID NO: 8226 - DNA, 25 bp, Saccharomyces pastorianus
aagcgccgagccagatgagccattc

SEQ ID NO: 8227 - DNA, 25 bp, Saccharomyces pastorianus
ggtgccgatcattcggtccgtgtat

SEQ ID NO: 8228 - DNA, 25 bp, Saccharomyces pastorianus
tccacgggtgactcggtcagattat

SEQ ID NO: 8229 - DNA, 25 bp, Saccharomyces pastorianus
atgagccattcatcgggtacttagg

SEQ ID NO: 8230 - DNA, 25 bp, Saccharomyces pastorianus
tacttaggcgacgttaccgcgtcaa

SEQ ID NO: 8231 - DNA, 25 bp, Saccharomyces pastorianus
gaacgccatatattctctgtcttat

SEQ ID NO: 8232 - DNA, 25 bp, Saccharomyces pastorianus
tagtggcatcgttctacaccaagaa

SEQ ID NO: 8233 - DNA, 25 bp, Saccharomyces pastorianus
accgcacggctatggtcatgtgatc

SEQ ID NO: 8234 - DNA, 25 bp, Saccharomyces pastorianus
ttatttttgggccatactgcacctg

SEQ ID NO: 8235 - DNA, 25 bp, Saccharomyces pastorianus
gttgttatgtatttaccgggtccag

SEQ ID NO: 8236 - DNA, 25 bp, Saccharomyces pastorianus
gtttctccggatggcaggtggttat

SEQ ID NO: 8237 - DNA, 25 bp, Saccharomyces pastorianus
taggttactaccacattccttacac

SEQ ID NO: 8238 - DNA, 25 bp, Saccharomyces pastorianus
tatcaaaacgctatggacctctact

SEQ ID NO: 8239 - DNA, 25 bp, Saccharomyces pastorianus
ggacaagtcgcgcattcattggttt

SEQ ID NO: 8240 - DNA, 25 bp, Saccharomyces pastorianus
tggcacttgccttgtttgcggacaa

SEQ ID NO: 8241 - DNA, 25 bp, Saccharomyces pastorianus
aagggtactctacttgccatttctg

SEQ ID NO: 8242 - DNA, 25 bp, Saccharomyces pastorianus
ggagtactttaaacgaccagaattg

SEQ ID NO: 8243 - DNA, 25 bp, Saccharomyces pastorianus
acgatgttttccaattcatgagcat

SEQ ID NO: 8244 - DNA, 25 bp, Saccharomyces pastorianus
ggacctctactatggattttgtcaa

SEQ ID NO: 8245 - DNA, 25 bp, Saccharomyces pastorianus
aaaggacaactctcaaaacccgcag

SEQ ID NO: 8246 - DNA, 25 bp, Saccharomyces pastorianus
aaactgtccaacctgtccaaaagat

SEQ ID NO: 8247 - DNA, 25 bp, Saccharomyces pastorianus
ttacgggtacgtcttgaatgtttat

SEQ ID NO: 8248 - DNA, 25 bp, Saccharomyces pastorianus
gtcaaactctcagaattgtctcttt

SEQ ID NO: 8249 - DNA, 25 bp, Saccharomyces pastorianus
aaaatcgctccaagaatcgacgcag

SEQ ID NO: 8250 - DNA, 25 bp, Saccharomyces pastorianus
caactgcatcgcaagcttctatgtt

SEQ ID NO: 8251 - DNA, 25 bp, Saccharomyces pastorianus
gcagacctggttaaccttccagatt

SEQ ID NO: 8252 - DNA, 25 bp, Saccharomyces pastorianus
gatattttcgcgttgatgctgaaga

SEQ ID NO: 8253 - DNA, 25 bp, Saccharomyces pastorianus
ccggacctgtaccatatgttaccaa

SEQ ID NO: 8254 - DNA, 25 bp, Saccharomyces pastorianus
ggttcattccttatttgttgttctg

SEQ ID NO: 8255 - DNA, 25 bp, Saccharomyces pastorianus
gatacagccacgtttgcaactgcat

SEQ ID NO: 8256 - DNA, 25 bp, Saccharomyces pastorianus
agccatccgtagcacaggtttcaga

SEQ ID NO: 8257 - DNA, 25 bp, Saccharomyces pastorianus
aaacatctatgttgcagacctggtt

SEQ ID NO: 8258 - DNA, 25 bp, Saccharomyces pastorianus
atcgacgcagatgactttaagctac

SEQ ID NO: 8259 - DNA, 25 bp, Saccharomyces pastorianus
atatatcgccttccatatttcccat

SEQ ID NO: 8260 - DNA, 25 bp, Saccharomyces pastorianus
ataggctgtctagtactgtccggtc

SEQ ID NO: 8261 - DNA, 25 bp, Saccharomyces pastorianus
ttgttagcgccaatcacttgtcgat

SEQ ID NO: 8262 - DNA, 25 bp, Saccharomyces pastorianus
gatcataaacccaacaagcgtgctg

SEQ ID NO: 8263 - DNA, 25 bp, Saccharomyces pastorianus
gtacggctctttggtggtatcgata

SEQ ID NO: 8264 - DNA, 25 bp, Saccharomyces pastorianus
tgcccggccatttcatttactacat

SEQ ID NO: 8265 - DNA, 25 bp, Saccharomyces pastorianus
tcgcgatgaattttatgcccggcca

SEQ ID NO: 8266 - DNA, 25 bp, Saccharomyces pastorianus
gggatatccctgtggtgacgagatt

SEQ ID NO: 8267 - DNA, 25 bp, Saccharomyces pastorianus
gtcttacaggtctccggatcataaa

SEQ ID NO: 8268 - DNA, 25 bp, Saccharomyces pastorianus
cttttactcttggtgatgctggtca

SEQ ID NO: 8269 - DNA, 25 bp, Saccharomyces pastorianus
gagcattaaacagccagtcgcgtcg

SEQ ID NO: 8270 - DNA, 25 bp, Saccharomyces pastorianus
gagacccgtgatgagccaaagtgta

SEQ ID NO: 8271 - DNA, 25 bp, Saccharomyces pastorianus
gtacctaaacgtttggcatttgatc

SEQ ID NO: 8272 - DNA, 25 bp, Saccharomyces pastorianus
gagactggctgacatcgtagacata

SEQ ID NO: 8273 - DNA, 25 bp, Saccharomyces pastorianus
atggtaccatggacactgatcaggg

SEQ ID NO: 8274 - DNA, 25 bp, Saccharomyces pastorianus
ggagattcagatatgggcacgccaa

SEQ ID NO: 8275 - DNA, 25 bp, Saccharomyces pastorianus
aagaggattcaccatgttgcaattg

SEQ ID NO: 8276 - DNA, 25 bp, Saccharomyces pastorianus
tatgccaggaccaagagacccgtga

SEQ ID NO: 8277 - DNA, 25 bp, Saccharomyces pastorianus
gagagaatacatcgcctatgccagg

SEQ ID NO: 8278 - DNA, 25 bp, Saccharomyces pastorianus
ggactctaagttctcattcggccaa

SEQ ID NO: 8279 - DNA, 25 bp, Saccharomyces pastorianus
attagactatctcaagctctggcca

SEQ ID NO: 8280 - DNA, 25 bp, Saccharomyces pastorianus
aacgattacgtggtgcaggcataca

SEQ ID NO: 8281 - DNA, 25 bp, Saccharomyces pastorianus
aaacattcagccagcatttgcatta

SEQ ID NO: 8282 - DNA, 25 bp, Saccharomyces pastorianus
gcatgaatttgttgccttgatgatt

SEQ ID NO: 8283 - DNA, 25 bp, Saccharomyces pastorianus
aaagattactgctctcgtgatcctg

SEQ ID NO: 8284 - DNA, 25 bp, Saccharomyces pastorianus
gaatctttgcaatttaggctgaccg

SEQ ID NO: 8285 - DNA, 25 bp, Saccharomyces pastorianus
aggctgaccgtattaaaatctggga

SEQ ID NO: 8286 - DNA, 25 bp, Saccharomyces pastorianus
gatcagaatctgatgcaccctcaga

SEQ ID NO: 8287 - DNA, 25 bp, Saccharomyces pastorianus
acatcacatgttcagtttccgggac

SEQ ID NO: 8288 - DNA, 25 bp, Saccharomyces pastorianus
tatggatcatctctccaagctggac

SEQ ID NO: 8289 - DNA, 25 bp, Saccharomyces pastorianus
agaattatgtttcgctggttgttaa

SEQ ID NO: 8290 - DNA, 25 bp, Saccharomyces pastorianus
cttttcctgggcttgtgatgctaaa

SEQ ID NO: 8291 - DNA, 25 bp, Saccharomyces pastorianus
gttgacgacaaccttgatatggaca

SEQ ID NO: 8292 - DNA, 25 bp, Saccharomyces pastorianus
cgctgcctctttgtttttagacaaa

SEQ ID NO: 8293 - DNA, 25 bp, Saccharomyces pastorianus
taccctagctacttctgcactagaa

SEQ ID NO: 8294 - DNA, 25 bp, Saccharomyces pastorianus
gcaaagacgttacctggtaccctag

SEQ ID NO: 8295 - DNA, 25 bp, Saccharomyces pastorianus
tgtcttgtcccgtcgaacaggatat

SEQ ID NO: 8296 - DNA, 25 bp, Saccharomyces pastorianus
tggagacacccattgctagatgatt

SEQ ID NO: 8297 - DNA, 25 bp, Saccharomyces pastorianus
caagtgtacttgtgaaccaggcaaa

SEQ ID NO: 8298 - DNA, 25 bp, Saccharomyces pastorianus
gacttcttcagatcggatgcgtaca

SEQ ID NO: 8299 - DNA, 25 bp, Saccharomyces pastorianus
ggacgagtcaggaggattcttctac

SEQ ID NO: 8300 - DNA, 25 bp, Saccharomyces pastorianus
ggagagtagacaccgatatcacatt

SEQ ID NO: 8301 - DNA, 25 bp, Saccharomyces pastorianus
atatgggttcattctttccgtaagc

SEQ ID NO: 8302 - DNA, 25 bp, Saccharomyces pastorianus
caccatccagatttcatgtcttgtc

SEQ ID NO: 8303 - DNA, 25 bp, Saccharomyces pastorianus
taacgtcaatccctctatccatgtt

SEQ ID NO: 8304 - DNA, 25 bp, Saccharomyces pastorianus
agtgctaccgttggctctgtaatca

SEQ ID NO: 8305 - DNA, 25 bp, Saccharomyces pastorianus
aagatatgtctggttgtcgccacat

SEQ ID NO: 8306 - DNA, 25 bp, Saccharomyces pastorianus
aaatacggctacattccttacattc

SEQ ID NO: 8307 - DNA, 25 bp, Saccharomyces pastorianus
ccttacattcctgtcaactggcaaa

SEQ ID NO: 8308 - DNA, 25 bp, Saccharomyces pastorianus
ggatgattttcaccgctatttttgg

SEQ ID NO: 8309 - DNA, 25 bp, Saccharomyces pastorianus
atagcaaaggcctcgctagctttaa

SEQ ID NO: 8310 - DNA, 25 bp, Saccharomyces pastorianus
atgttgctcgccacagctatcagta

SEQ ID NO: 8311 - DNA, 25 bp, Saccharomyces pastorianus
tatcccgttccgtttggcatgtcaa

SEQ ID NO: 8312 - DNA, 25 bp, Saccharomyces pastorianus
tactcgagctctctttcactaaaga

SEQ ID NO: 8313 - DNA, 25 bp, Saccharomyces pastorianus
ataggcgccttgaagctgctaatga

SEQ ID NO: 8314 - DNA, 25 bp, Saccharomyces pastorianus
ctagcgctagaagatgccgtggtaa

SEQ ID NO: 8315 - DNA, 25 bp, Saccharomyces pastorianus
aaacgcatcgtcaattccaactggg

SEQ ID NO: 8316 - DNA, 25 bp, Saccharomyces pastorianus
gaaatcgacgtccagcgcttgctag

SEQ ID NO: 8317 - DNA, 25 bp, Saccharomyces pastorianus
aattatgacctgcataccggaccac

SEQ ID NO: 8318 - DNA, 25 bp, Saccharomyces pastorianus
gatcagcaacttgttctcacagatg

SEQ ID NO: 8319 - DNA, 25 bp, Saccharomyces pastorianus
aggttcggcaaccagcagctagtaa

SEQ ID NO: 8320 - DNA, 25 bp, Saccharomyces pastorianus
taggcgaccgtctgcagattcttat

SEQ ID NO: 8321 - DNA, 25 bp, Saccharomyces pastorianus
tggactgggctaaacgctgcacgga

SEQ ID NO: 8322 - DNA, 25 bp, Saccharomyces pastorianus
agaagaggcatcaggctcctagcgc

SEQ ID NO: 8323 - DNA, 25 bp, Saccharomyces pastorianus
gattcttatctcgaccaacggactt

SEQ ID NO: 8324 - DNA, 25 bp, Saccharomyces pastorianus
gagctatgtgacttctacttcggcg

SEQ ID NO: 8325 - DNA, 25 bp, Saccharomyces pastorianus
acactagcaaaactggtcgccacaa

SEQ ID NO: 8326 - DNA, 25 bp, Saccharomyces pastorianus
gaaatcatcttcttcggcatccatc

SEQ ID NO: 8327 - DNA, 25 bp, Saccharomyces pastorianus
agctaatgcagctaccggtaccgct

SEQ ID NO: 8328 - DNA, 25 bp, Saccharomyces pastorianus
gtaccgctcagtcgtcaactaatgg

SEQ ID NO: 8329 - DNA, 25 bp, Saccharomyces pastorianus
ggtcgccacaaggtctcatagatta

SEQ ID NO: 8330 - DNA, 25 bp, Saccharomyces pastorianus
ggtagcgcttccatgtcgaaatcat

SEQ ID NO: 8331 - DNA, 25 bp, Saccharomyces pastorianus
agagtcgtccaattccgcatcggca

SEQ ID NO: 8332 - DNA, 25 bp, Saccharomyces pastorianus
aactgatcggtgtagtctcattgac

SEQ ID NO: 8333 - DNA, 25 bp, Saccharomyces pastorianus
gacttgccgtcattttatttcggtc

SEQ ID NO: 8334 - DNA, 25 bp, Saccharomyces pastorianus
tatggattgtgcaaccgccagagtc

SEQ ID NO: 8335 - DNA, 25 bp, Saccharomyces pastorianus
aattctcactctcctttaatgacgg

SEQ ID NO: 8336 - DNA, 25 bp, Saccharomyces pastorianus
aaaatcatcgacacacacagttcaa

SEQ ID NO: 8337 - DNA, 25 bp, Saccharomyces pastorianus
aattgggtctattgcgcagttgaaa

SEQ ID NO: 8338 - DNA, 25 bp, Saccharomyces pastorianus
ggacacagttcaaagttagcgacga

SEQ ID NO: 8339 - DNA, 25 bp, Saccharomyces pastorianus
gtaggaggctatctcaactcggatt

SEQ ID NO: 8340 - DNA, 25 bp, Saccharomyces pastorianus
tataaataattctttcgcacccacc

SEQ ID NO: 8341 - DNA, 25 bp, Saccharomyces pastorianus
gcaagtgatgcttctgtggaccaac

SEQ ID NO: 8342 - DNA, 25 bp, Saccharomyces pastorianus
aaatatcggagaactttggacacag

SEQ ID NO: 8343 - DNA, 25 bp, Saccharomyces pastorianus
attgcgcagttgaaaccatcggttt

SEQ ID NO: 8344 - DNA, 25 bp, Saccharomyces pastorianus
tcaatgtcacaaccttttgctatgg

SEQ ID NO: 8345 - DNA, 25 bp, Saccharomyces pastorianus
gtggaccaacaactggacagctcag

SEQ ID NO: 8346 - DNA, 25 bp, Saccharomyces pastorianus
ggacagctcagctagtagcacttat

SEQ ID NO: 8347 - DNA, 25 bp, Saccharomyces pastorianus
gaagaaaaagatcctccacctgcaa

SEQ ID NO: 8348 - DNA, 25 bp, Saccharomyces pastorianus
tgaaaggctccgtaaccgtcttgcg

SEQ ID NO: 8349 - DNA, 25 bp, Saccharomyces pastorianus
cgtatacgagtgtgtcatcccggac

SEQ ID NO: 8350 - DNA, 25 bp, Saccharomyces pastorianus
tgattgcggcagtcttgggcagcta

SEQ ID NO: 8351 - DNA, 25 bp, Saccharomyces pastorianus
ggcatttcacacacgagtcgcggac

SEQ ID NO: 8352 - DNA, 25 bp, Saccharomyces pastorianus
aagtgtatgtgacccacggcggtaa

SEQ ID NO: 8353 - DNA, 25 bp, Saccharomyces pastorianus
agttcatcgggatctcggcatttca

SEQ ID NO: 8354 - DNA, 25 bp, Saccharomyces pastorianus
agctacgtggtgaagcggttcccca

SEQ ID NO: 8355 - DNA, 25 bp, Saccharomyces pastorianus
ttgggatcctcctgtactttggata

SEQ ID NO: 8356 - DNA, 25 bp, Saccharomyces pastorianus
agtacttctgcctggtgatatttca

SEQ ID NO: 8357 - DNA, 25 bp, Saccharomyces pastorianus
ggctcatttatgaacaccgtccagt

SEQ ID NO: 8358 - DNA, 25 bp, Saccharomyces pastorianus
agaggtttgcttaaggccgccatca

SEQ ID NO: 8359 - DNA, 25 bp, Saccharomyces pastorianus
gagatcgtcgcccaagtcatggaat

SEQ ID NO: 8360 - DNA, 25 bp, Saccharomyces pastorianus
gttccttactctgctgaagatgcca

SEQ ID NO: 8361 - DNA, 25 bp, Saccharomyces pastorianus
gagtcactggtgctgatgttcctac

SEQ ID NO: 8362 - DNA, 25 bp, Saccharomyces pastorianus
aggatttctctgcttggtatggttc

SEQ ID NO: 8363 - DNA, 25 bp, Saccharomyces pastorianus
ggtgcccaacattcgcaggatttct

SEQ ID NO: 8364 - DNA, 25 bp, Saccharomyces pastorianus
gttgaaagtccttgttccttactct

SEQ ID NO: 8365 - DNA, 25 bp, Saccharomyces pastorianus
gaagtcgtcaacttgcgtgcaatta

SEQ ID NO: 8366 - DNA, 25 bp, Saccharomyces pastorianus
atgttttgtcgccagatttcactct

SEQ ID NO: 8367 - DNA, 25 bp, Saccharomyces pastorianus
gaagatttcgcctttccagatgctc

SEQ ID NO: 8368 - DNA, 25 bp, Saccharomyces pastorianus
tcaattctctttggaagccgccgaa

SEQ ID NO: 8369 - DNA, 25 bp, Saccharomyces pastorianus
agggtttcttggttctcacgggcag

SEQ ID NO: 8370 - DNA, 25 bp, Saccharomyces pastorianus
actggatggtatactgctgtcgcac

SEQ ID NO: 8371 - DNA, 25 bp, Saccharomyces pastorianus
attttgtcgacaagctgcccaagac

SEQ ID NO: 8372 - DNA, 25 bp, Saccharomyces pastorianus
aaccacagggcgtcattgttcttat

SEQ ID NO: 8373 - DNA, 25 bp, Saccharomyces pastorianus
aagccgccgtcgtcttgaagaagaa

SEQ ID NO: 8374 - DNA, 25 bp, Saccharomyces pastorianus
gaagcatcgcaccaaatgacctcga

SEQ ID NO: 8375 - DNA, 25 bp, Saccharomyces pastorianus
gaaaacgtcacactgggctatgcca

SEQ ID NO: 8376 - DNA, 25 bp, Saccharomyces pastorianus
agaacttgtttccttcctgaagaag

SEQ ID NO: 8377 - DNA, 25 bp, Saccharomyces pastorianus
gaagaagcaccttgcagccttcaaa

SEQ ID NO: 8378 - DNA, 25 bp, Saccharomyces pastorianus
accgccaccggtaagatccagagaa

SEQ ID NO: 8379 - DNA, 25 bp, Saccharomyces pastorianus
aaagatctcgcctattgaactggat

SEQ ID NO: 8380 - DNA, 25 bp, Saccharomyces pastorianus
gttacgctcttgcaattgttccaga

SEQ ID NO: 8381 - DNA, 25 bp, Saccharomyces pastorianus
gcaactgccagatagtagcactcct

SEQ ID NO: 8382 - DNA, 25 bp, Saccharomyces pastorianus
cattcatccaaccaagcacttaacg

SEQ ID NO: 8383 - DNA, 25 bp, Saccharomyces pastorianus
ccttccactctttttcaacgatatg

SEQ ID NO: 8384 - DNA, 25 bp, Saccharomyces pastorianus
gtcaattattcctggcggttacgct

SEQ ID NO: 8385 - DNA, 25 bp, Saccharomyces pastorianus
gttgcttcagaaccttatacgttgt

SEQ ID NO: 8386 - DNA, 25 bp, Saccharomyces pastorianus
gatgcaatcaacaaaggccttcaca

SEQ ID NO: 8387 - DNA, 25 bp, Saccharomyces pastorianus
aagattaccgttcgcttctgatact

SEQ ID NO: 8388 - DNA, 25 bp, Saccharomyces pastorianus
gcaaatcctggcaatgacgacacta

SEQ ID NO: 8389 - DNA, 25 bp, Saccharomyces pastorianus
tagcactcctccaaaagataccgat

SEQ ID NO: 8390 - DNA, 25 bp, Saccharomyces pastorianus
atacctgccgtaatatgcccttggg

SEQ ID NO: 8391 - DNA, 25 bp, Saccharomyces pastorianus
gaacttcgtcatccctaacgtaagg

SEQ ID NO: 8392 - DNA, 25 bp, Saccharomyces pastorianus
tcgatcatcatacaggacccggtgg

SEQ ID NO: 8393 - DNA, 25 bp, Saccharomyces pastorianus
gaatgccgttctccaccagaggaat

SEQ ID NO: 8394 - DNA, 25 bp, Saccharomyces pastorianus
ataaaccgctttccagcagaccgaa

SEQ ID NO: 8395 - DNA, 25 bp, Saccharomyces pastorianus
aactcggtcaaggagtccacgggct

SEQ ID NO: 8396 - DNA, 25 bp, Saccharomyces pastorianus
gaacttccagatggagtctccacaa

SEQ ID NO: 8397 - DNA, 25 bp, Saccharomyces pastorianus
tgttggtagaccatagccacccgaa

SEQ ID NO: 8398 - DNA, 25 bp, Saccharomyces pastorianus
cacccagttcaactctgtgttggta

SEQ ID NO: 8399 - DNA, 25 bp, Saccharomyces pastorianus
aggcccgaacaatcatctgtcaatg

SEQ ID NO: 8400 - DNA, 25 bp, Saccharomyces pastorianus
agaaggatctccgtatcgtcaaccc

SEQ ID NO: 8401 - DNA, 25 bp, Saccharomyces pastorianus
acgagtctttcgtcgggaacgtcat

SEQ ID NO: 8402 - DNA, 25 bp, Saccharomyces pastorianus
agatcaccgtgtcgccagatgaaat

SEQ ID NO: 8403 - DNA, 25 bp, Saccharomyces pastorianus
agcgtgtactcgctcattttgcaga

SEQ ID NO: 8404 - DNA, 25 bp, Saccharomyces pastorianus
atggagcataccctttcgcccttac

SEQ ID NO: 8405 - DNA, 25 bp, Saccharomyces pastorianus
ctggatctgaaagcgctggacgaaa

SEQ ID NO: 8406 - DNA, 25 bp, Saccharomyces pastorianus
gtactcgctcattttgcagagaaaa

SEQ ID NO: 8407 - DNA, 25 bp, Saccharomyces pastorianus
gacaacagcacgaccaacagatcac

SEQ ID NO: 8408 - DNA, 25 bp, Saccharomyces pastorianus
tcgcccttacaacaggaagtgctaa

SEQ ID NO: 8409 - DNA, 25 bp, Saccharomyces pastorianus
aatcaagcagctaaaccactcgcag

SEQ ID NO: 8410 - DNA, 25 bp, Saccharomyces pastorianus
ttggtctggtgggaacactgctgaa

SEQ ID NO: 8411 - DNA, 25 bp, Saccharomyces pastorianus
gaaagcgctggacgaaacaatcaag

SEQ ID NO: 8412 - DNA, 25 bp, Saccharomyces pastorianus
tacaagcagctttcgctggatctga

SEQ ID NO: 8413 - DNA, 25 bp, Saccharomyces pastorianus
atctgtcaatgctccagagggccta

SEQ ID NO: 8414 - DNA, 25 bp, Saccharomyces pastorianus
gcaacatttggtatctctgcgttga

SEQ ID NO: 8415 - DNA, 25 bp, Saccharomyces pastorianus
gtcgattcccaatctgcagtacaat

SEQ ID NO: 8416 - DNA, 25 bp, Saccharomyces pastorianus
gatccaatggccaagttacgcaagt

SEQ ID NO: 8417 - DNA, 25 bp, Saccharomyces pastorianus
agggcctaccatacagatccttagt

SEQ ID NO: 8418 - DNA, 25 bp, Saccharomyces pastorianus
aatggcaagtcatctgccctgacag

SEQ ID NO: 8419 - DNA, 25 bp, Saccharomyces pastorianus
gaccttttgcaggatccaatggcca

SEQ ID NO: 8420 - DNA, 25 bp, Saccharomyces pastorianus
gactccaaggaatccgtagccgggt

SEQ ID NO: 8421 - DNA, 25 bp, Saccharomyces pastorianus
tacgcaagtttcttcgtgtgggcta

SEQ ID NO: 8422 - DNA, 25 bp, Saccharomyces pastorianus
gcctgttttcagtggattcatcaaa

SEQ ID NO: 8423 - DNA, 25 bp, Saccharomyces pastorianus
aaggatcgcgtatgtagcgcacgat

SEQ ID NO: 8424 - DNA, 25 bp, Saccharomyces pastorianus
aaacaacgcttcaactcagtctttg

SEQ ID NO: 8425 - DNA, 25 bp, Saccharomyces pastorianus
ggtgaacagccaactttaatcccaa

SEQ ID NO: 8426 - DNA, 25 bp, Saccharomyces pastorianus
acatcaatccgcgatagcttctcaa

SEQ ID NO: 8427 - DNA, 25 bp, Saccharomyces pastorianus
gatagcttctcaacgtctacgattg

SEQ ID NO: 8428 - DNA, 25 bp, Saccharomyces pastorianus
ttcaactttaccaattccagcactt

SEQ ID NO: 8429 - DNA, 25 bp, Saccharomyces pastorianus
atcaaagagacctgttcttcccgaa

SEQ ID NO: 8430 - DNA, 25 bp, Saccharomyces pastorianus
gatcttcctagtacagctcaacatt

SEQ ID NO: 8431 - DNA, 25 bp, Saccharomyces pastorianus
cgtctacgattgatccaggcagtaa

SEQ ID NO: 8432 - DNA, 25 bp, Saccharomyces pastorianus
aaggtttgccgccatgtatgttaat

SEQ ID NO: 8433 - DNA, 25 bp, Saccharomyces pastorianus
gaactttctccttgctgttcgaaag

SEQ ID NO: 8434 - DNA, 25 bp, Saccharomyces pastorianus
gacctgtgttctcaagcaatacctt

SEQ ID NO: 8435 - DNA, 25 bp, Saccharomyces pastorianus
aacaagggcagattttatccggaag

SEQ ID NO: 8436 - DNA, 25 bp, Saccharomyces pastorianus
aagcttgtgatcctttgcaaaccaa

SEQ ID NO: 8437 - DNA, 25 bp, Saccharomyces pastorianus
tttatattaacgacctgccccaaat

SEQ ID NO: 8438 - DNA, 25 bp, Saccharomyces pastorianus
aattatacttgttgatcgaaggtca

SEQ ID NO: 8439 - DNA, 25 bp, Saccharomyces pastorianus
gacacggatgaacccaaattatact

SEQ ID NO: 8440 - DNA, 25 bp, Saccharomyces pastorianus
gaccattcatctaatgagcacgcta

SEQ ID NO: 8441 - DNA, 25 bp, Saccharomyces pastorianus
aacgacctgccccaaattgtaagat

SEQ ID NO: 8442 - DNA, 25 bp, Saccharomyces pastorianus
gcaaagctatgcgtgataatgaact

SEQ ID NO: 8443 - DNA, 25 bp, Saccharomyces pastorianus
gagggatccattatcttttatgcca

SEQ ID NO: 8444 - DNA, 25 bp, Saccharomyces pastorianus
gaagcggaatcatctgcgcatattc

SEQ ID NO: 8445 - DNA, 25 bp, Saccharomyces pastorianus
aagagcctacattagagggatccat

SEQ ID NO: 8446 - DNA, 25 bp, Saccharomyces pastorianus
ggtaaggtgatccattgctgttgca

SEQ ID NO: 8447 - DNA, 25 bp, Saccharomyces pastorianus
aaagtctgtagactcctgagcccca

SEQ ID NO: 8448 - DNA, 25 bp, Saccharomyces pastorianus
gcacgccgacgtgcatttggcgaag

SEQ ID NO: 8449 - DNA, 25 bp, Saccharomyces pastorianus
gggttccaccatcttttagtgtact

SEQ ID NO: 8450 - DNA, 25 bp, Saccharomyces pastorianus
aaagagatgtctccggattgcccct

SEQ ID NO: 8451 - DNA, 25 bp, Saccharomyces pastorianus
attgctgttgcatgtggacgcttaa

SEQ ID NO: 8452 - DNA, 25 bp, Saccharomyces pastorianus
tttataggacagatcggcacgccga

SEQ ID NO: 8453 - DNA, 25 bp, Saccharomyces pastorianus
agcaatgctatcaacgaacgctatt

SEQ ID NO: 8454 - DNA, 25 bp, Saccharomyces pastorianus
agattacttcaagacgctctccaaa

SEQ ID NO: 8455 - DNA, 25 bp, Saccharomyces pastorianus
actccttgagatattccacgccaat

SEQ ID NO: 8456 - DNA, 25 bp, Saccharomyces pastorianus
cggccaaatctcttacgtcaacgaa

SEQ ID NO: 8457 - DNA, 25 bp, Saccharomyces pastorianus
agacgttctgtaccactgcaacgaa

SEQ ID NO: 8458 - DNA, 25 bp, Saccharomyces pastorianus
aatactgcagcagctttgctcttgc

SEQ ID NO: 8459 - DNA, 25 bp, Saccharomyces pastorianus
tcttgccaagacactacactttcat

SEQ ID NO: 8460 - DNA, 25 bp, Saccharomyces pastorianus
aacatggcttcgtgtctgttcaaag

SEQ ID NO: 8461 - DNA, 25 bp, Saccharomyces pastorianus
ggaactcgctgaccacagaattcgt

SEQ ID NO: 8462 - DNA, 25 bp, Saccharomyces pastorianus
gacgatccggacatcaacatggctt

SEQ ID NO: 8463 - DNA, 25 bp, Saccharomyces pastorianus
tagagtgtggttcctccagcaacta

SEQ ID NO: 8464 - DNA, 25 bp, Saccharomyces pastorianus
acttccgaactgcatgtcttggtca

SEQ ID NO: 8465 - DNA, 25 bp, Saccharomyces pastorianus
atgcggagttgttcgaagaccctta

SEQ ID NO: 8466 - DNA, 25 bp, Saccharomyces pastorianus
gatcttcgggatcctgtggttcaac

SEQ ID NO: 8467 - DNA, 25 bp, Saccharomyces pastorianus
gaagttctctatgtatccgctgatc

SEQ ID NO: 8468 - DNA, 25 bp, Saccharomyces pastorianus
tgataatcggcgagctgtcgtaccc

SEQ ID NO: 8469 - DNA, 25 bp, Saccharomyces pastorianus
gcgtgaaagtgatcggcaacctcct

SEQ ID NO: 8470 - DNA, 25 bp, Saccharomyces pastorianus
ggccctgtttgcaacgtacgtgtac

SEQ ID NO: 8471 - DNA, 25 bp, Saccharomyces pastorianus
taatgggcggctacgtgttcgcgac

SEQ ID NO: 8472 - DNA, 25 bp, Saccharomyces pastorianus
aactcgattatcttctacggcgtga

SEQ ID NO: 8473 - DNA, 25 bp, Saccharomyces pastorianus
tgatcagtctcagtctcaccatggg

SEQ ID NO: 8474 - DNA, 25 bp, Saccharomyces pastorianus
atctccatcctgaacgtcgtggtga

SEQ ID NO: 8475 - DNA, 25 bp, Saccharomyces pastorianus
tacgtgtacaagagagtccccgaga

SEQ ID NO: 8476 - DNA, 25 bp, Saccharomyces pastorianus
gcagttctgtggcatcaactcgatt

SEQ ID NO: 8477 - DNA, 25 bp, Saccharomyces pastorianus
acactgtggcagtatgtgcgcgacc

SEQ ID NO: 8478 - DNA, 25 bp, Saccharomyces pastorianus
atgggcgtgtccttcttgctagtca

SEQ ID NO: 8479 - DNA, 25 bp, Saccharomyces pastorianus
ggtgctaatagttaacgttgcttct

SEQ ID NO: 8480 - DNA, 25 bp, Saccharomyces pastorianus
agagtttgttatcttgggcttccca

SEQ ID NO: 8481 - DNA, 25 bp, Saccharomyces pastorianus
atggtgttacattccccatcatgaa

SEQ ID NO: 8482 - DNA, 25 bp, Saccharomyces pastorianus
ggcgctgatcctgtttacaatttct

SEQ ID NO: 8483 - DNA, 25 bp, Saccharomyces pastorianus
aaagtcaggtttactgggctacaag

SEQ ID NO: 8484 - DNA, 25 bp, Saccharomyces pastorianus
acgttgcttctaaatgcggtttcac

SEQ ID NO: 8485 - DNA, 25 bp, Saccharomyces pastorianus
ggcgaattctgccaattgaactatg

SEQ ID NO: 8486 - DNA, 25 bp, Saccharomyces pastorianus
ggcttcccatgtaaccagttcggta

SEQ ID NO: 8487 - DNA, 25 bp, Saccharomyces pastorianus
aatgcggtttcactccacaatataa

SEQ ID NO: 8488 - DNA, 25 bp, Saccharomyces pastorianus
ggtgaaaccttcaagtttgaccaat

SEQ ID NO: 8489 - DNA, 25 bp, Saccharomyces pastorianus
gaagttaacggaaacggcgctgatc

SEQ ID NO: 8490 - DNA, 25 bp, Saccharomyces pastorianus
gataccattcgttcactagatttaa

SEQ ID NO: 8491 - DNA, 25 bp, Saccharomyces pastorianus
atcatggctcacgatttacgttcga

SEQ ID NO: 8492 - DNA, 25 bp, Saccharomyces pastorianus
gttgtctacaacctttccaagatat

SEQ ID NO: 8493 - DNA, 25 bp, Saccharomyces pastorianus
gattttagtagctctttccgtgatg

SEQ ID NO: 8494 - DNA, 25 bp, Saccharomyces pastorianus
tagccgatctagctttcgaaacgat

SEQ ID NO: 8495 - DNA, 25 bp, Saccharomyces pastorianus
ttccgtgatggacttgacagacttt

SEQ ID NO: 8496 - DNA, 25 bp, Saccharomyces pastorianus
gtctgctgcatgtatgacggtgcca

SEQ ID NO: 8497 - DNA, 25 bp, Saccharomyces pastorianus
tcgccgagcagcctattgattttag

SEQ ID NO: 8498 - DNA, 25 bp, Saccharomyces pastorianus
taatggtcgcattcacgaagccggt

SEQ ID NO: 8499 - DNA, 25 bp, Saccharomyces pastorianus
acgaagccggtgttgtcggtatcaa

SEQ ID NO: 8500 - DNA, 25 bp, Saccharomyces pastorianus
gacggcagagtttggttgtctacaa

SEQ ID NO: 8501 - DNA, 25 bp, Saccharomyces pastorianus
tgcattaccataccaaacggtcgat

SEQ ID NO: 8502 - DNA, 25 bp, Saccharomyces pastorianus
gaactatcacatataccgagccgta

SEQ ID NO: 8503 - DNA, 25 bp, Saccharomyces pastorianus
atggcacaaagctttcttgacgttt

SEQ ID NO: 8504 - DNA, 25 bp, Saccharomyces pastorianus
ctccacctacaaccgtattcattaa

SEQ ID NO: 8505 - DNA, 25 bp, Saccharomyces pastorianus
ttttaagattgcctttctctccacc

SEQ ID NO: 8506 - DNA, 25 bp, Saccharomyces pastorianus
atttcttattagagaccgtccgtca

SEQ ID NO: 8507 - DNA, 25 bp, Saccharomyces pastorianus
cgtacgtgaagccacaattgccgga

SEQ ID NO: 8508 - DNA, 25 bp, Saccharomyces pastorianus
gagtctcagaaattcatcagtctaa

SEQ ID NO: 8509 - DNA, 25 bp, Saccharomyces pastorianus
tgacgtttgcacagcgttacaagaa

SEQ ID NO: 8510 - DNA, 25 bp, Saccharomyces pastorianus
ttcaaaggctttttattcccgctgg

SEQ ID NO: 8511 - DNA, 25 bp, Saccharomyces pastorianus
tattcccgctggtcgaaacgggttg

SEQ ID NO: 8512 - DNA, 25 bp, Saccharomyces pastorianus
ccgcacattctcatcatttcatggg

SEQ ID NO: 8513 - DNA, 25 bp, Saccharomyces pastorianus
gatgtcgtctgtgaacaaatcgcta

SEQ ID NO: 8514 - DNA, 25 bp, Saccharomyces pastorianus
actacgatgccaaatccgttgctga

SEQ ID NO: 8515 - DNA, 25 bp, Saccharomyces pastorianus
ttgcctgctggctctaatggtttaa

SEQ ID NO: 8516 - DNA, 25 bp, Saccharomyces pastorianus
tatccttcccagtcggtttcaagaa

SEQ ID NO: 8517 - DNA, 25 bp, Saccharomyces pastorianus
gaacactgtttcgtcatcttgagag

SEQ ID NO: 8518 - DNA, 25 bp, Saccharomyces pastorianus
tactctgaacgtcgctgtggatgct

SEQ ID NO: 8519 - DNA, 25 bp, Saccharomyces pastorianus
ttaatgatcgattactctcacggta

SEQ ID NO: 8520 - DNA, 25 bp, Saccharomyces pastorianus
ggtatccccaccgaaggtaaagctg

SEQ ID NO: 8521 - DNA, 25 bp, Saccharomyces pastorianus
tatcaccgatgcttgtataggctgg

SEQ ID NO: 8522 - DNA, 25 bp, Saccharomyces pastorianus
gcacagggaattagcctccggttta

SEQ ID NO: 8523 - DNA, 25 bp, Saccharomyces pastorianus
gtgtggacccggattatattaccag

SEQ ID NO: 8524 - DNA, 25 bp, Saccharomyces pastorianus
gaccgttgaggcgttcgtcaaagct

SEQ ID NO: 8525 - DNA, 25 bp, Saccharomyces pastorianus
atgccctggtcgttgttggagataa

SEQ ID NO: 8526 - DNA, 25 bp, Saccharomyces pastorianus
caaacctggctttgggctacgtgta

SEQ ID NO: 8527 - DNA, 25 bp, Saccharomyces pastorianus
ggaaactaatcatgaaacccttggt

SEQ ID NO: 8528 - DNA, 25 bp, Saccharomyces pastorianus
gtaacattctacctgcgggagtcgg

SEQ ID NO: 8529 - DNA, 25 bp, Saccharomyces pastorianus
ggccatcttcaaggctcattgggat

SEQ ID NO: 8530 - DNA, 25 bp, Saccharomyces pastorianus
gtcggtctgcccaatgatagcggta

SEQ ID NO: 8531 - DNA, 25 bp, Saccharomyces pastorianus
agaaatgtccaaggccatcttcaag

SEQ ID NO: 8532 - DNA, 25 bp, Saccharomyces pastorianus
gacactggacgaagttgcattgggt

SEQ ID NO: 8533 - DNA, 25 bp, Saccharomyces pastorianus
aaaattgcgtccttttatgccctgg

SEQ ID NO: 8534 - DNA, 25 bp, Saccharomyces pastorianus
cacggctttccccaagatttgaaag

SEQ ID NO: 8535 - DNA, 25 bp, Saccharomyces pastorianus
tcacgagccctgcattcgattcgag

SEQ ID NO: 8536 - DNA, 25 bp, Saccharomyces pastorianus
gggcggatttcttcgatctaggact

SEQ ID NO: 8537 - DNA, 25 bp, Saccharomyces pastorianus
aatgcgcaaaatccacacggctttc

SEQ ID NO: 8538 - DNA, 25 bp, Saccharomyces pastorianus
tacaatggcaaatcaacccggcgtc

SEQ ID NO: 8539 - DNA, 25 bp, Saccharomyces pastorianus
gaatccgtttatattgcatgcatct

SEQ ID NO: 8540 - DNA, 25 bp, Saccharomyces pastorianus
gaacccgttttacaagatcaccgat

SEQ ID NO: 8541 - DNA, 25 bp, Saccharomyces pastorianus
gaaatcgaattcaccaatgcgcaaa

SEQ ID NO: 8542 - DNA, 25 bp, Saccharomyces pastorianus
aactcggcaaacagcagtgtggcaa

SEQ ID NO: 8543 - DNA, 25 bp, Saccharomyces pastorianus
gcatctttagatatcgttgaggact

SEQ ID NO: 8544 - DNA, 25 bp, Saccharomyces pastorianus
gtcatgattcatggaaactcggcaa

SEQ ID NO: 8545 - DNA, 25 bp, Saccharomyces pastorianus
gagaagtatccgtttcagtattata

SEQ ID NO: 8546 - DNA, 25 bp, Saccharomyces pastorianus
atatacgatggtgtgtctagggaaa

SEQ ID NO: 8547 - DNA, 25 bp, Saccharomyces pastorianus
gattctttacaggttgatgggcagc

SEQ ID NO: 8548 - DNA, 25 bp, Saccharomyces pastorianus
tgactaaaaccatatacgggctatt

SEQ ID NO: 8549 - DNA, 25 bp, Saccharomyces pastorianus
ttcaatccgtgtagaaactctgatt

SEQ ID NO: 8550 - DNA, 25 bp, Saccharomyces pastorianus
gaaactctgatttcttcaagtgaca

SEQ ID NO: 8551 - DNA, 25 bp, Saccharomyces pastorianus
ttggtatcgtaatagtcctttggac

SEQ ID NO: 8552 - DNA, 25 bp, Saccharomyces pastorianus
ggtacattatgagcacagtagctat

SEQ ID NO: 8553 - DNA, 25 bp, Saccharomyces pastorianus
aacacaacactgacattgaagctga

SEQ ID NO: 8554 - DNA, 25 bp, Saccharomyces pastorianus
gttgatgggcagctgcagaaatact

SEQ ID NO: 8555 - DNA, 25 bp, Saccharomyces pastorianus
aatactggcacgatactaggtacat

SEQ ID NO: 8556 - DNA, 25 bp, Saccharomyces pastorianus
caagacgtgaggtttggtggccatt

SEQ ID NO: 8557 - DNA, 25 bp, Saccharomyces pastorianus
tggacccagggagccaaagtcaact

SEQ ID NO: 8558 - DNA, 25 bp, Saccharomyces pastorianus
gattgtcacataggcgactcgatag

SEQ ID NO: 8559 - DNA, 25 bp, Saccharomyces pastorianus
gaaccaatgtggcttcgtggaccca

SEQ ID NO: 8560 - DNA, 25 bp, Saccharomyces pastorianus
tacaaggccatgtagacaccgtcgc

SEQ ID NO: 8561 - DNA, 25 bp, Saccharomyces pastorianus
ggagatattctttctgattgtcaca

SEQ ID NO: 8562 - DNA, 25 bp, Saccharomyces pastorianus
acgtcgacgacctttcaaatggcgg

SEQ ID NO: 8563 - DNA, 25 bp, Saccharomyces pastorianus
accgtcgccaaaatcgtctcaagaa

SEQ ID NO: 8564 - DNA, 25 bp, Saccharomyces pastorianus
tagatgggacttccctgactgtaac

SEQ ID NO: 8565 - DNA, 25 bp, Saccharomyces pastorianus
aatgggatatgtctcactgccactg

SEQ ID NO: 8566 - DNA, 25 bp, Saccharomyces pastorianus
actgccactgagtttgacactgagt

SEQ ID NO: 8567 - DNA, 25 bp, Saccharomyces pastorianus
atacactccaaactgcaagatccta

SEQ ID NO: 8568 - DNA, 25 bp, Saccharomyces pastorianus
ccaatacttggaacggcacagagga

SEQ ID NO: 8569 - DNA, 25 bp, Saccharomyces pastorianus
gaatcgtttgaacagatgcttcgag

SEQ ID NO: 8570 - DNA, 25 bp, Saccharomyces pastorianus
gatattcaaaaaccgagggctgacc

SEQ ID NO: 8571 - DNA, 25 bp, Saccharomyces pastorianus
cacagaggagggaaacgaatcgttt

SEQ ID NO: 8572 - DNA, 25 bp, Saccharomyces pastorianus
aagagacatactatccaatacttgg

SEQ ID NO: 8573 - DNA, 25 bp, Saccharomyces pastorianus
gaactagacgcatatatacactcca

SEQ ID NO: 8574 - DNA, 25 bp, Saccharomyces pastorianus
agggctgaccagtgcgttgatagaa

SEQ ID NO: 8575 - DNA, 25 bp, Saccharomyces pastorianus
gatgcttcgagacagagttgccagt

SEQ ID NO: 8576 - DNA, 25 bp, Saccharomyces pastorianus
gaaacaacttagtgaagcagcaggc

SEQ ID NO: 8577 - DNA, 25 bp, Saccharomyces pastorianus
acagagttgccagtgtggtgaaaga

SEQ ID NO: 8578 - DNA, 25 bp, Saccharomyces pastorianus
aagccggcagcgacgatgatgaacc

SEQ ID NO: 8579 - DNA, 25 bp, Saccharomyces pastorianus
tcgacaagctgggtgtgcagacaca

SEQ ID NO: 8580 - DNA, 25 bp, Saccharomyces pastorianus
tgactgcggtgagacaacatatgtt

SEQ ID NO: 8581 - DNA, 25 bp, Saccharomyces pastorianus
gtccttcttgcccatattcgacaag

SEQ ID NO: 8582 - DNA, 25 bp, Saccharomyces pastorianus
tacagtaacaacacagcagcgggca

SEQ ID NO: 8583 - DNA, 25 bp, Saccharomyces pastorianus
tccgagttttacgatttcacaagct

SEQ ID NO: 8584 - DNA, 25 bp, Saccharomyces pastorianus
cacaacagcgtgtctggcaaaccga

SEQ ID NO: 8585 - DNA, 25 bp, Saccharomyces pastorianus
tgtatcgtctgtaatttccaaggca

SEQ ID NO: 8586 - DNA, 25 bp, Saccharomyces pastorianus
gatgaaccaccacaggagtacttat

SEQ ID NO: 8587 - DNA, 25 bp, Saccharomyces pastorianus
gcaagacctgaagcccgaggtgata

SEQ ID NO: 8588 - DNA, 25 bp, Saccharomyces pastorianus
gagacattgtaagatcccctacgaa

SEQ ID NO: 8589 - DNA, 25 bp, Saccharomyces pastorianus
aacaagcggtcaaggtggttgcatc

SEQ ID NO: 8590 - DNA, 25 bp, Saccharomyces pastorianus
ttgtggagcgtcttggatgccaagc

SEQ ID NO: 8591 - DNA, 25 bp, Saccharomyces pastorianus
aggtggttgcatcatcgtgccctgc

SEQ ID NO: 8592 - DNA, 25 bp, Saccharomyces pastorianus
aggccgtcgatcataccgctaagga

SEQ ID NO: 8593 - DNA, 25 bp, Saccharomyces pastorianus
ctgccggaacatcgctgaatctgaa

SEQ ID NO: 8594 - DNA, 25 bp, Saccharomyces pastorianus
tatccaagctggttgtggagcgtct

SEQ ID NO: 8595 - DNA, 25 bp, Saccharomyces pastorianus
gacgcccaagcactcgaagacaagg

SEQ ID NO: 8596 - DNA, 25 bp, Saccharomyces pastorianus
cgacgagtcgtgtcttttacaacaa

SEQ ID NO: 8597 - DNA, 25 bp, Saccharomyces pastorianus
aaagcggtaaggacgcccaagcact

SEQ ID NO: 8598 - DNA, 25 bp, Saccharomyces pastorianus
ttggatgccaagcaggccgtcgatc

SEQ ID NO: 8599 - DNA, 25 bp, Saccharomyces pastorianus
ggccgtagatggttatcgacgagtc

SEQ ID NO: 8600 - DNA, 25 bp, Saccharomyces pastorianus
tatcgaagtttctggcaccatcggg

SEQ ID NO: 8601 - DNA, 25 bp, Saccharomyces pastorianus
atgaaccatcattgacagccgataa

SEQ ID NO: 8602 - DNA, 25 bp, Saccharomyces pastorianus
gggacttgtcatttggagatacctt

SEQ ID NO: 8603 - DNA, 25 bp, Saccharomyces pastorianus
agtgggactttcatgggctgccaag

SEQ ID NO: 8604 - DNA, 25 bp, Saccharomyces pastorianus
tagattacctacacaccacagacat

SEQ ID NO: 8605 - DNA, 25 bp, Saccharomyces pastorianus
gggtcctctttgatactttcacaac

SEQ ID NO: 8606 - DNA, 25 bp, Saccharomyces pastorianus
ttctggcaccggtttagtgggactt

SEQ ID NO: 8607 - DNA, 25 bp, Saccharomyces pastorianus
cacagacatgctaccattggcgaac

SEQ ID NO: 8608 - DNA, 25 bp, Saccharomyces pastorianus
agtcttagagttaggttctggcacc

SEQ ID NO: 8609 - DNA, 25 bp, Saccharomyces pastorianus
atcatatttgttgccgatccgatct

SEQ ID NO: 8610 - DNA, 25 bp, Saccharomyces pastorianus
attcacctcagcacccagaatgggt

SEQ ID NO: 8611 - DNA, 25 bp, Saccharomyces pastorianus
tcattaagggtccacttttcctcaa

SEQ ID NO: 8612 - DNA, 25 bp, Saccharomyces pastorianus
gaagacgctacttctagggaagcta

SEQ ID NO: 8613 - DNA, 25 bp, Saccharomyces pastorianus
cggagatacgtatacctattttcaa

SEQ ID NO: 8614 - DNA, 25 bp, Saccharomyces pastorianus
agatacagacggtgatccggcggac

SEQ ID NO: 8615 - DNA, 25 bp, Saccharomyces pastorianus
atacccacttggttgcagttggaaa

SEQ ID NO: 8616 - DNA, 25 bp, Saccharomyces pastorianus
ggtaaaattcatctgggccaagtgc

SEQ ID NO: 8617 - DNA, 25 bp, Saccharomyces pastorianus
gggaagctacgccttcattaagggt

SEQ ID NO: 8618 - DNA, 25 bp, Saccharomyces pastorianus
agaggtcaccgcgaaggacgacttc

SEQ ID NO: 8619 - DNA, 25 bp, Saccharomyces pastorianus
gatacttcagtgctaccggagatac

SEQ ID NO: 8620 - DNA, 25 bp, Saccharomyces pastorianus
aaacatgaattgatgcctcccgatt

SEQ ID NO: 8621 - DNA, 25 bp, Saccharomyces pastorianus
cacgcttggctgcaaataccactat

SEQ ID NO: 8622 - DNA, 25 bp, Saccharomyces pastorianus
gaattccggttttcagatttgtcag

SEQ ID NO: 8623 - DNA, 25 bp, Saccharomyces pastorianus
ggagtgtctagatccgcaacagttt

SEQ ID NO: 8624 - DNA, 25 bp, Saccharomyces pastorianus
aagacccgctttttcatcgattaga

SEQ ID NO: 8625 - DNA, 25 bp, Saccharomyces pastorianus
agatcacaccgtgctattaccttga

SEQ ID NO: 8626 - DNA, 25 bp, Saccharomyces pastorianus
gtgcactgcatggtcggagtgtcta

SEQ ID NO: 8627 - DNA, 25 bp, Saccharomyces pastorianus
gcatgagatggcttcactgtgattt

SEQ ID NO: 8628 - DNA, 25 bp, Saccharomyces pastorianus
ggcccagagctggtaccacgattga

SEQ ID NO: 8629 - DNA, 25 bp, Saccharomyces pastorianus
cagccgagtttattctttgtatacg

SEQ ID NO: 8630 - DNA, 25 bp, Saccharomyces pastorianus
atttggcaggcgcttacgtatttgt

SEQ ID NO: 8631 - DNA, 25 bp, Saccharomyces pastorianus
aaaggccgtttaccctgtgagatca

SEQ ID NO: 8632 - DNA, 25 bp, Saccharomyces pastorianus
aatcctgttttactcaagtccttag

SEQ ID NO: 8633 - DNA, 25 bp, Saccharomyces pastorianus
tgtcaaattcagtggccctggtaat

SEQ ID NO: 8634 - DNA, 25 bp, Saccharomyces pastorianus
atcactgagcttgcgaatatcgacg

SEQ ID NO: 8635 - DNA, 25 bp, Saccharomyces pastorianus
cagattcctaatttttactcaccat

SEQ ID NO: 8636 - DNA, 25 bp, Saccharomyces pastorianus
aagagtgtcactatgggcatctcca

SEQ ID NO: 8637 - DNA, 25 bp, Saccharomyces pastorianus
gcatctccattaggttggttccgga

SEQ ID NO: 8638 - DNA, 25 bp, Saccharomyces pastorianus
atcgacgagagcatcactgttcaag

SEQ ID NO: 8639 - DNA, 25 bp, Saccharomyces pastorianus
tgactgacgatgaactccaaagatt

SEQ ID NO: 8640 - DNA, 25 bp, Saccharomyces pastorianus
tggtcaaagccttcattatctatga

SEQ ID NO: 8641 - DNA, 25 bp, Saccharomyces pastorianus
aaaggatattcgacgctccagcagt

SEQ ID NO: 8642 - DNA, 25 bp, Saccharomyces pastorianus
agcagctaaactctcaaaaccactt

SEQ ID NO: 8643 - DNA, 25 bp, Saccharomyces pastorianus
ggttccggagcaaagcgtcgagcaa

SEQ ID NO: 8644 - DNA, 25 bp, Saccharomyces pastorianus
aattttgagttgaagccctatgtta

SEQ ID NO: 8645 - DNA, 25 bp, Saccharomyces pastorianus
aataaaagagtaccgctgaccacca

SEQ ID NO: 8646 - DNA, 25 bp, Saccharomyces pastorianus
gccctatgttaatgctaatgttcca

SEQ ID NO: 8647 - DNA, 25 bp, Saccharomyces pastorianus
gaagcacgacttcaaagggttcagt

SEQ ID NO: 8648 - DNA, 25 bp, Saccharomyces pastorianus
caaagggttcagtcgtggtcccttg

SEQ ID NO: 8649 - DNA, 25 bp, Saccharomyces pastorianus
gaacctacgtaaccccagatatagt

SEQ ID NO: 8650 - DNA, 25 bp, Saccharomyces pastorianus
ttcagtaagacctcctttaacgctc

SEQ ID NO: 8651 - DNA, 25 bp, Saccharomyces pastorianus
tggtcccttggatcctgaattacaa

SEQ ID NO: 8652 - DNA, 25 bp, Saccharomyces pastorianus
aaaagctcacctattgtacaattca

SEQ ID NO: 8653 - DNA, 25 bp, Saccharomyces pastorianus
aatgttccacctttgaagcacgact

SEQ ID NO: 8654 - DNA, 25 bp, Saccharomyces pastorianus
taacgctcttactagaccttggaag

SEQ ID NO: 8655 - DNA, 25 bp, Saccharomyces pastorianus
ttggcagtgccaactttcccattat

SEQ ID NO: 8656 - DNA, 25 bp, Saccharomyces pastorianus
tcagttttcgtattgatcaccggga

SEQ ID NO: 8657 - DNA, 25 bp, Saccharomyces pastorianus
agccatcccacatcatttgcaaaat

SEQ ID NO: 8658 - DNA, 25 bp, Saccharomyces pastorianus
atcaccgggatctggtttgctgata

SEQ ID NO: 8659 - DNA, 25 bp, Saccharomyces pastorianus
aaagttatccctatcgcagctgtca

SEQ ID NO: 8660 - DNA, 25 bp, Saccharomyces pastorianus
gttgtttgtctgttttgttctctta

SEQ ID NO: 8661 - DNA, 25 bp, Saccharomyces pastorianus
gttttgattcagttggtcgctaaga

SEQ ID NO: 8662 - DNA, 25 bp, Saccharomyces pastorianus
aagctatatctggttcatctgcccg

SEQ ID NO: 8663 - DNA, 25 bp, Saccharomyces pastorianus
atccatatcgcttcttttgttttga

SEQ ID NO: 8664 - DNA, 25 bp, Saccharomyces pastorianus
acaacctttgactttcatcacttac

SEQ ID NO: 8665 - DNA, 25 bp, Saccharomyces pastorianus
atccgtcttagggttgatcactatt

SEQ ID NO: 8666 - DNA, 25 bp, Saccharomyces pastorianus
gaatatcgttaagctctgagtccat

SEQ ID NO: 8667 - DNA, 25 bp, Saccharomyces pastorianus
gagtccattctgtataaccattcgt

SEQ ID NO: 8668 - DNA, 25 bp, Saccharomyces pastorianus
gaataaatggctcggcacatcgctg

SEQ ID NO: 8669 - DNA, 25 bp, Saccharomyces pastorianus
ggtgtcccacaactacttcatggaa

SEQ ID NO: 8670 - DNA, 25 bp, Saccharomyces pastorianus
gtgcccgcaattagacgtcaatacc

SEQ ID NO: 8671 - DNA, 25 bp, Saccharomyces pastorianus
ccacccttggtgtatgttttctatt

SEQ ID NO: 8672 - DNA, 25 bp, Saccharomyces pastorianus
gcgggtttgctgacacgctcaagaa

SEQ ID NO: 8673 - DNA, 25 bp, Saccharomyces pastorianus
ggtcatggcgcctttaaattccatt

SEQ ID NO: 8674 - DNA, 25 bp, Saccharomyces pastorianus
agagcctccgaagccttacaaaatg

SEQ ID NO: 8675 - DNA, 25 bp, Saccharomyces pastorianus
acagcgttatcactagcgggtttgc

SEQ ID NO: 8676 - DNA, 25 bp, Saccharomyces pastorianus
gtacgattgcaagccagacaccagt

SEQ ID NO: 8677 - DNA, 25 bp, Saccharomyces pastorianus
atgctgccgccaccagacggaagtt

SEQ ID NO: 8678 - DNA, 25 bp, Saccharomyces pastorianus
gacccctccgagttcaacaagtttg

SEQ ID NO: 8679 - DNA, 25 bp, Saccharomyces pastorianus
aagttgagcggcaatgagtcatggc

SEQ ID NO: 8680 - DNA, 25 bp, Saccharomyces pastorianus
gtcatggccgaaccaggactcatat

SEQ ID NO: 8681 - DNA, 25 bp, Saccharomyces pastorianus
ttaagcgagctaaaaacgggccatg

SEQ ID NO: 8682 - DNA, 25 bp, Saccharomyces pastorianus
accaggactcatatccgcctgagga

SEQ ID NO: 8683 - DNA, 25 bp, Saccharomyces pastorianus
gtatttcgagaacttcttctcattc

SEQ ID NO: 8684 - DNA, 25 bp, Saccharomyces pastorianus
gccttggaaagcttcaccgatgata

SEQ ID NO: 8685 - DNA, 25 bp, Saccharomyces pastorianus
gaaatggctacgattctgacccgaa

SEQ ID NO: 8686 - DNA, 25 bp, Saccharomyces pastorianus
atagcatggaggcagacatctctga

SEQ ID NO: 8687 - DNA, 25 bp, Saccharomyces pastorianus
gaaatcgtttactgcaatgagacca

SEQ ID NO: 8688 - DNA, 25 bp, Saccharomyces pastorianus
tatgattttcgctatcgttgtggcc

SEQ ID NO: 8689 - DNA, 25 bp, Saccharomyces pastorianus
catccttcttgagttctagttccat

SEQ ID NO: 8690 - DNA, 25 bp, Saccharomyces pastorianus
ggttctaatttgcatccatcggatg

SEQ ID NO: 8691 - DNA, 25 bp, Saccharomyces pastorianus
gatcttaccttcatgctttcttttg

SEQ ID NO: 8692 - DNA, 25 bp, Saccharomyces pastorianus
gagcattctcgcttgaattcatcct

SEQ ID NO: 8693 - DNA, 25 bp, Saccharomyces pastorianus
gatcctagtggtccttggttctaat

SEQ ID NO: 8694 - DNA, 25 bp, Saccharomyces pastorianus
atgacccaatcttccttgttgtagg

SEQ ID NO: 8695 - DNA, 25 bp, Saccharomyces pastorianus
tcacgcagctgggttctgtatccat

SEQ ID NO: 8696 - DNA, 25 bp, Saccharomyces pastorianus
cgttgtggcctctataagtccatta

SEQ ID NO: 8697 - DNA, 25 bp, Saccharomyces pastorianus
tgtatccatcccattgatcctagtg

SEQ ID NO: 8698 - DNA, 25 bp, Saccharomyces pastorianus
tatgctgtgttgagtttgcccgtaa

SEQ ID NO: 8699 - DNA, 25 bp, Saccharomyces pastorianus
atcgatttacacacagtctcattag

SEQ ID NO: 8700 - DNA, 25 bp, Saccharomyces pastorianus
aaatcttacgcaatactcatggtcg

SEQ ID NO: 8701 - DNA, 25 bp, Saccharomyces pastorianus
gaaagtgtacaacctaacagcacaa

SEQ ID NO: 8702 - DNA, 25 bp, Saccharomyces pastorianus
tataaaatttataccaccggatggg

SEQ ID NO: 8703 - DNA, 25 bp, Saccharomyces pastorianus
tattttatccgggttgaccattggt

SEQ ID NO: 8704 - DNA, 25 bp, Saccharomyces pastorianus
ttcgtatatgggacaatcagccagt

SEQ ID NO: 8705 - DNA, 25 bp, Saccharomyces pastorianus
atcagccagtggcatttctgtggaa

SEQ ID NO: 8706 - DNA, 25 bp, Saccharomyces pastorianus
ggttgggcaaagattccgatgaatt

SEQ ID NO: 8707 - DNA, 25 bp, Saccharomyces pastorianus
tcgaaagctctaaaaaggtgtccca

SEQ ID NO: 8708 - DNA, 25 bp, Saccharomyces pastorianus
ttgataaagctactcctacgggaac

SEQ ID NO: 8709 - DNA, 25 bp, Saccharomyces pastorianus
gatggagaatttactccttctaata

SEQ ID NO: 8710 - DNA, 25 bp, Saccharomyces pastorianus
gattcctaagaatgtcacctcaaaa

SEQ ID NO: 8711 - DNA, 25 bp, Saccharomyces pastorianus
gtgagtacgagtttccaattcattg

SEQ ID NO: 8712 - DNA, 25 bp, Saccharomyces pastorianus
attttacacacatcacatgcggcga

SEQ ID NO: 8713 - DNA, 25 bp, Saccharomyces pastorianus
gaggcggctactgatatggcgccct

SEQ ID NO: 8714 - DNA, 25 bp, Saccharomyces pastorianus
ggacttctaggtgcattcattactc

SEQ ID NO: 8715 - DNA, 25 bp, Saccharomyces pastorianus
aaaacacgccgtggttggctgtcct

SEQ ID NO: 8716 - DNA, 25 bp, Saccharomyces pastorianus
aaaaccagataccacgcaggccgag

SEQ ID NO: 8717 - DNA, 25 bp, Saccharomyces pastorianus
taccacccacgtatgatgaggcggc

SEQ ID NO: 8718 - DNA, 25 bp, Saccharomyces pastorianus
gcaggccgagcatcgcagcgagcaa

SEQ ID NO: 8719 - DNA, 25 bp, Saccharomyces pastorianus
ggcgccctcttactatggaatggac

SEQ ID NO: 8720 - DNA, 25 bp, Saccharomyces pastorianus
gcagcgagcaagatataccacccac

SEQ ID NO: 8721 - DNA, 25 bp, Saccharomyces pastorianus
ctggtcctttatctgctgtttatga

SEQ ID NO: 8722 - DNA, 25 bp, Saccharomyces pastorianus
ttttagcctatggtggtgctgcttt

SEQ ID NO: 8723 - DNA, 25 bp, Saccharomyces pastorianus
aattatctgctgctattacgacggt

SEQ ID NO: 8724 - DNA, 25 bp, Saccharomyces pastorianus
ggttcttgactttaccaattgccgg

SEQ ID NO: 8725 - DNA, 25 bp, Saccharomyces pastorianus
aagttaatcttacaatcaccctcaa

SEQ ID NO: 8726 - DNA, 25 bp, Saccharomyces pastorianus
tcacggtgccaacgatgttgccaat

SEQ ID NO: 8727 - DNA, 25 bp, Saccharomyces pastorianus
gtattccgacttcaactactcaaat

SEQ ID NO: 8728 - DNA, 25 bp, Saccharomyces pastorianus
gaatcatccgatgttcctgtatggg

SEQ ID NO: 8729 - DNA, 25 bp, Saccharomyces pastorianus
agctactatgtctttcgctcacggt

SEQ ID NO: 8730 - DNA, 25 bp, Saccharomyces pastorianus
ttacgacggtcatggcaacccaatt

SEQ ID NO: 8731 - DNA, 25 bp, Saccharomyces pastorianus
caccctcaagaggtttctcgattga

SEQ ID NO: 8732 - DNA, 25 bp, Saccharomyces pastorianus
agggaccgctaatatctctaatcaa

SEQ ID NO: 8733 - DNA, 25 bp, Saccharomyces pastorianus
aaggcgtccctgcaattgaattggc

SEQ ID NO: 8734 - DNA, 25 bp, Saccharomyces pastorianus
agtatcgctacctcattagggaccg

SEQ ID NO: 8735 - DNA, 25 bp, Saccharomyces pastorianus
tattgcttgtggagggtcttctaac

SEQ ID NO: 8736 - DNA, 25 bp, Saccharomyces pastorianus
gggtcttctaacaccgtacaggatt

SEQ ID NO: 8737 - DNA, 25 bp, Saccharomyces pastorianus
cacgtcttcaacacttctctaagga

SEQ ID NO: 8738 - DNA, 25 bp, Saccharomyces pastorianus
cgcccgcaaatataacaccaagtct

SEQ ID NO: 8739 - DNA, 25 bp, Saccharomyces pastorianus
gagacaagaggctgccacgtcttca

SEQ ID NO: 8740 - DNA, 25 bp, Saccharomyces pastorianus
ggctgataacttcatctttccggaa

SEQ ID NO: 8741 - DNA, 25 bp, Saccharomyces pastorianus
ttactgaaccggcatgtggtgcctc

SEQ ID NO: 8742 - DNA, 25 bp, Saccharomyces pastorianus
aggacgtcatagagacctgtctgaa

SEQ ID NO: 8743 - DNA, 25 bp, Saccharomyces pastorianus
aaatcatttgcatccagaacagata

SEQ ID NO: 8744 - DNA, 25 bp, Saccharomyces pastorianus
agcatccatccgtaatcaaatcatt

SEQ ID NO: 8745 - DNA, 25 bp, Saccharomyces pastorianus
caaaggcttctatcacatatatggg

SEQ ID NO: 8746 - DNA, 25 bp, Saccharomyces pastorianus
gattcattcagttctaggacaacga

SEQ ID NO: 8747 - DNA, 25 bp, Saccharomyces pastorianus
gatcaatcgttagttggcgggttta

SEQ ID NO: 8748 - DNA, 25 bp, Saccharomyces pastorianus
ttatcatatctgaggatttcgttca

SEQ ID NO: 8749 - DNA, 25 bp, Saccharomyces pastorianus
gcgggtttaagcatccatccgtaat

SEQ ID NO: 8750 - DNA, 25 bp, Saccharomyces pastorianus
atcgttcacgaactcacaaacagat

SEQ ID NO: 8751 - DNA, 25 bp, Saccharomyces pastorianus
aggaggatcatcatcttcaccatac

SEQ ID NO: 8752 - DNA, 25 bp, Saccharomyces pastorianus
tggacaatgagctggcgaggataca

SEQ ID NO: 8753 - DNA, 25 bp, Saccharomyces pastorianus
acggcgaaggagatgttgcagattt

SEQ ID NO: 8754 - DNA, 25 bp, Saccharomyces pastorianus
gtcccattcccacaagctgttaaga

SEQ ID NO: 8755 - DNA, 25 bp, Saccharomyces pastorianus
gatgatatggcttgtgacgttatta

SEQ ID NO: 8756 - DNA, 25 bp, Saccharomyces pastorianus
agatcggaaatttcgtcaccaacaa

SEQ ID NO: 8757 - DNA, 25 bp, Saccharomyces pastorianus
aagaaagtctatactccattcccac

SEQ ID NO: 8758 - DNA, 25 bp, Saccharomyces pastorianus
tccgccgagtcgtggaagactgtat

SEQ ID NO: 8759 - DNA, 25 bp, Saccharomyces pastorianus
gaactggctaacgaagattggtcaa

SEQ ID NO: 8760 - DNA, 25 bp, Saccharomyces pastorianus
ccacctgctcaactacctagaaagg

SEQ ID NO: 8761 - DNA, 25 bp, Saccharomyces pastorianus
gcttaaaggaagtccgccgagtcgt

SEQ ID NO: 8762 - DNA, 25 bp, Saccharomyces pastorianus
tgttcaccccatctatcatatcaaa

SEQ ID NO: 8763 - DNA, 25 bp, Saccharomyces pastorianus
cacactaaaggctttggagcttcta

SEQ ID NO: 8764 - DNA, 25 bp, Saccharomyces pastorianus
catgggccccttcaaaggcttaaag

SEQ ID NO: 8765 - DNA, 25 bp, Saccharomyces pastorianus
ggttacgctgaaggcgatgccatct

SEQ ID NO: 8766 - DNA, 25 bp, Saccharomyces pastorianus
gtgtccacagtccttgacgccaagt

SEQ ID NO: 8767 - DNA, 25 bp, Saccharomyces pastorianus
ttccccgcatggctgggcattggat

SEQ ID NO: 8768 - DNA, 25 bp, Saccharomyces pastorianus
tgttgttctttaaacgccgtgcttt

SEQ ID NO: 8769 - DNA, 25 bp, Saccharomyces pastorianus
cgtcctgtccaatatgctggtcaaa

SEQ ID NO: 8770 - DNA, 25 bp, Saccharomyces pastorianus
acaccctccaacaactctaaagaga

SEQ ID NO: 8771 - DNA, 25 bp, Saccharomyces pastorianus
gaacaagcacaagcaccagcgaaaa

SEQ ID NO: 8772 - DNA, 25 bp, Saccharomyces pastorianus
aaagagaacggcagcgccgtgtcca

SEQ ID NO: 8773 - DNA, 25 bp, Saccharomyces pastorianus
gtgtgttcacttcagtgttgttctt

SEQ ID NO: 8774 - DNA, 25 bp, Saccharomyces pastorianus
gacgccaagtgggacatcgtcctgt

SEQ ID NO: 8775 - DNA, 25 bp, Saccharomyces pastorianus
gttcggcatcggtgtgttcacttca

SEQ ID NO: 8776 - DNA, 25 bp, Saccharomyces pastorianus
gatatctctttgatgtccaatggcg

SEQ ID NO: 8777 - DNA, 25 bp, Saccharomyces pastorianus
acggtattcatgacctagtgggcca

SEQ ID NO: 8778 - DNA, 25 bp, Saccharomyces pastorianus
gatattacggttacttgtgggcaga

SEQ ID NO: 8779 - DNA, 25 bp, Saccharomyces pastorianus
aagggttatgcttccttcggtcaca

SEQ ID NO: 8780 - DNA, 25 bp, Saccharomyces pastorianus
gtccaatggcggtactttatccaag

SEQ ID NO: 8781 - DNA, 25 bp, Saccharomyces pastorianus
gtcaacggtgccttattcactttaa

SEQ ID NO: 8782 - DNA, 25 bp, Saccharomyces pastorianus
ggaagcaccttctcaaatgttggaa

SEQ ID NO: 8783 - DNA, 25 bp, Saccharomyces pastorianus
cccgtggtggtcttcgtgatattaa

SEQ ID NO: 8784 - DNA, 25 bp, Saccharomyces pastorianus
agattcaatggtcccggatctgttc

SEQ ID NO: 8785 - DNA, 25 bp, Saccharomyces pastorianus
gaattggtgcatctatcatcgcatt

SEQ ID NO: 8786 - DNA, 25 bp, Saccharomyces pastorianus
tactaaattcgccaaggatccccta

SEQ ID NO: 8787 - DNA, 25 bp, Saccharomyces pastorianus
tggatcccaaggaaaacaccggtga

SEQ ID NO: 8788 - DNA, 25 bp, Saccharomyces pastorianus
aacctgggcgtggtcgatgataacc

SEQ ID NO: 8789 - DNA, 25 bp, Saccharomyces pastorianus
tgttagattttttcgcagtattgga

SEQ ID NO: 8790 - DNA, 25 bp, Saccharomyces pastorianus
ctgtgttcaggtgcgtatggagact

SEQ ID NO: 8791 - DNA, 25 bp, Saccharomyces pastorianus
gatgataacctatacttgagtggga

SEQ ID NO: 8792 - DNA, 25 bp, Saccharomyces pastorianus
gaagagacccctggacaaaagtttg

SEQ ID NO: 8793 - DNA, 25 bp, Saccharomyces pastorianus
gttattcatggatctctgtgttcag

SEQ ID NO: 8794 - DNA, 25 bp, Saccharomyces pastorianus
gaatggtgtaagctcgttgttagat

SEQ ID NO: 8795 - DNA, 25 bp, Saccharomyces pastorianus
gtgaaatcggcagaagagacccctg

SEQ ID NO: 8796 - DNA, 25 bp, Saccharomyces pastorianus
tcacagccaatttagttcaagattt

SEQ ID NO: 8797 - DNA, 25 bp, Saccharomyces pastorianus
aagattaacgaacggctgaatggcc

SEQ ID NO: 8798 - DNA, 25 bp, Saccharomyces pastorianus
gaaaatttctctactgccactagaa

SEQ ID NO: 8799 - DNA, 25 bp, Saccharomyces pastorianus
gaagattgcatatcatccccgcaag

SEQ ID NO: 8800 - DNA, 25 bp, Saccharomyces pastorianus
ttaatctcgaaaccgggcttcctct

SEQ ID NO: 8801 - DNA, 25 bp, Saccharomyces pastorianus
gaaggacaccactaacggcgctgtg

SEQ ID NO: 8802 - DNA, 25 bp, Saccharomyces pastorianus
aagagttggtctttgtccctataga

SEQ ID NO: 8803 - DNA, 25 bp, Saccharomyces pastorianus
ggcttcctcttcatctgggctaatt

SEQ ID NO: 8804 - DNA, 25 bp, Saccharomyces pastorianus
agaaatcgccattttatcctggttt

SEQ ID NO: 8805 - DNA, 25 bp, Saccharomyces pastorianus
catcgcacctataccgtattgcaga

SEQ ID NO: 8806 - DNA, 25 bp, Saccharomyces pastorianus
gtttatctacccgattttgactcaa

SEQ ID NO: 8807 - DNA, 25 bp, Saccharomyces pastorianus
gaaggtctacggatggccatttaat

SEQ ID NO: 8808 - DNA, 25 bp, Saccharomyces pastorianus
ttgactcaacttcccctggataaat

SEQ ID NO: 8809 - DNA, 25 bp, Saccharomyces pastorianus
gaatttgacgaacgcccacaatgta

SEQ ID NO: 8810 - DNA, 25 bp, Saccharomyces pastorianus
aatgcacttgcaactaccgttggaa

SEQ ID NO: 8811 - DNA, 25 bp, Saccharomyces pastorianus
actttgttgtgcctactcatctcta

SEQ ID NO: 8812 - DNA, 25 bp, Saccharomyces pastorianus
agcccgcaacccattctataagaag

SEQ ID NO: 8813 - DNA, 25 bp, Saccharomyces pastorianus
atcgtgtaccttctctctaagatat

SEQ ID NO: 8814 - DNA, 25 bp, Saccharomyces pastorianus
acgacacttcgttccgtcatttgaa

SEQ ID NO: 8815 - DNA, 25 bp, Saccharomyces pastorianus
aacacaactacgctttctgtgccga

SEQ ID NO: 8816 - DNA, 25 bp, Saccharomyces pastorianus
tgggttgcatccaaaggtcttgatt

SEQ ID NO: 8817 - DNA, 25 bp, Saccharomyces pastorianus
cccttactactctttggtgaacacg

SEQ ID NO: 8818 - DNA, 25 bp, Saccharomyces pastorianus
gatatgagtctctcttcacggacga

SEQ ID NO: 8819 - DNA, 25 bp, Saccharomyces pastorianus
gtgccgatcccaagacctgatatga

SEQ ID NO: 8820 - DNA, 25 bp, Saccharomyces pastorianus
gatttggccttcaatttatctcaag

SEQ ID NO: 8821 - DNA, 25 bp, Saccharomyces pastorianus
cgagactggagatttggccttcaat

SEQ ID NO: 8822 - DNA, 25 bp, Saccharomyces pastorianus
cagttaaatcctgcacgcctgatgg

SEQ ID NO: 8823 - DNA, 25 bp, Saccharomyces pastorianus
gaatgcacgcatttgcaggtgatga

SEQ ID NO: 8824 - DNA, 25 bp, Saccharomyces pastorianus
atcggagcgggcaatagcgtagcaa

SEQ ID NO: 8825 - DNA, 25 bp, Saccharomyces pastorianus
caggcgatatggttgatttgtcttc

SEQ ID NO: 8826 - DNA, 25 bp, Saccharomyces pastorianus
atatgatgccaataacacgccaaaa

SEQ ID NO: 8827 - DNA, 25 bp, Saccharomyces pastorianus
tgtcttcattagtaacctcaccgag

SEQ ID NO: 8828 - DNA, 25 bp, Saccharomyces pastorianus
acattcttttgggtgaaccaggcga

SEQ ID NO: 8829 - DNA, 25 bp, Saccharomyces pastorianus
tgtaccattgcaacactcatcagtt

SEQ ID NO: 8830 - DNA, 25 bp, Saccharomyces pastorianus
aatggtcaatctctaccgttttcgg

SEQ ID NO: 8831 - DNA, 25 bp, Saccharomyces pastorianus
gttactgcggtatgatcctaaccaa

SEQ ID NO: 8832 - DNA, 25 bp, Saccharomyces pastorianus
ttcaaaggccttttccgaccaaatg

SEQ ID NO: 8833 - DNA, 25 bp, Saccharomyces pastorianus
ggatttgtatcgttccacgttcaaa

SEQ ID NO: 8834 - DNA, 25 bp, Saccharomyces pastorianus
tgtccccaactgacttattgactgc

SEQ ID NO: 8835 - DNA, 25 bp, Saccharomyces pastorianus
ttctttggaccacaagcatttgcag

SEQ ID NO: 8836 - DNA, 25 bp, Saccharomyces pastorianus
aacatttcttgccaactttcaacgc

SEQ ID NO: 8837 - DNA, 25 bp, Saccharomyces pastorianus
attggccatgtgttacatttccata

SEQ ID NO: 8838 - DNA, 25 bp, Saccharomyces pastorianus
tttcaacgccgaaccattgcaagat

SEQ ID NO: 8839 - DNA, 25 bp, Saccharomyces pastorianus
atttcgtcttgcctatgccagaatc

SEQ ID NO: 8840 - DNA, 25 bp, Saccharomyces pastorianus
aaattgctatgttctttggacgatg

SEQ ID NO: 8841 - DNA, 25 bp, Saccharomyces pastorianus
gaaagtttcgtttgctcatttcgtc

SEQ ID NO: 8842 - DNA, 25 bp, Saccharomyces pastorianus
cactctgtggtatctgttggactga

SEQ ID NO: 8843 - DNA, 25 bp, Saccharomyces pastorianus
caggagaaactacctcactctgtgg

SEQ ID NO: 8844 - DNA, 25 bp, Saccharomyces pastorianus
gaacagtttacccaaggtcgcaata

SEQ ID NO: 8845 - DNA, 25 bp, Saccharomyces pastorianus
gatgagaaatattaccaccccttaa

SEQ ID NO: 8846 - DNA, 25 bp, Saccharomyces pastorianus
aatctcatgttctcttgcttctagc

SEQ ID NO: 8847 - DNA, 25 bp, Saccharomyces pastorianus
gaaattcgaaccagtcatcccaaag

SEQ ID NO: 8848 - DNA, 25 bp, Saccharomyces pastorianus
taaaggatgaactaccaccctgcat

SEQ ID NO: 8849 - DNA, 25 bp, Saccharomyces pastorianus
ggactgactgtcttttcgaaattca

SEQ ID NO: 8850 - DNA, 25 bp, Saccharomyces pastorianus
gtccttcccacaccgtttagaaatg

SEQ ID NO: 8851 - DNA, 25 bp, Saccharomyces pastorianus
gggactgccatctaagtgcggaatc

SEQ ID NO: 8852 - DNA, 25 bp, Saccharomyces pastorianus
gataagttacctaaaccagcgtcct

SEQ ID NO: 8853 - DNA, 25 bp, Saccharomyces pastorianus
tgcgccgatcgtcccaattaatgat

SEQ ID NO: 8854 - DNA, 25 bp, Saccharomyces pastorianus
gacccgattccaagttaatttccat

SEQ ID NO: 8855 - DNA, 25 bp, Saccharomyces pastorianus
aagagtcacaccatcgggccagttt

SEQ ID NO: 8856 - DNA, 25 bp, Saccharomyces pastorianus
agacgaacgtttctccaacacaaga

SEQ ID NO: 8857 - DNA, 25 bp, Saccharomyces pastorianus
atctgggccatgatgttttctgtac

SEQ ID NO: 8858 - DNA, 25 bp, Saccharomyces pastorianus
tcgctaaacagtatattttccccga

SEQ ID NO: 8859 - DNA, 25 bp, Saccharomyces pastorianus
aaaggaatttatggccgccccatat

SEQ ID NO: 8860 - DNA, 25 bp, Saccharomyces pastorianus
ttatacgaatcactaacgccagacg

SEQ ID NO: 8861 - DNA, 25 bp, Saccharomyces pastorianus
gaaatctaatactgggacccgattc

SEQ ID NO: 8862 - DNA, 25 bp, Saccharomyces pastorianus
caagtatcatctgcgatctgggcca

SEQ ID NO: 8863 - DNA, 25 bp, Saccharomyces pastorianus
ataacatattttatccgcccttctg

SEQ ID NO: 8864 - DNA, 25 bp, Saccharomyces pastorianus
aaagagactgcatttcctggcatcc

SEQ ID NO: 8865 - DNA, 25 bp, Saccharomyces pastorianus
ggccttggaaacttctctaagcata

SEQ ID NO: 8866 - DNA, 25 bp, Saccharomyces pastorianus
atcgctgtacgatccgtggatgact

SEQ ID NO: 8867 - DNA, 25 bp, Saccharomyces pastorianus
catcatcaggtggttcggacccttg

SEQ ID NO: 8868 - DNA, 25 bp, Saccharomyces pastorianus
agcataaaattcatacccaccacta

SEQ ID NO: 8869 - DNA, 25 bp, Saccharomyces pastorianus
aacaccatgctttcacgaggagtcg

SEQ ID NO: 8870 - DNA, 25 bp, Saccharomyces pastorianus
aacgctccgcaagatatagacctag

SEQ ID NO: 8871 - DNA, 25 bp, Saccharomyces pastorianus
aggcctggaagacctttccgagtgt

SEQ ID NO: 8872 - DNA, 25 bp, Saccharomyces pastorianus
gagctgatcaactcgatatcccagt

SEQ ID NO: 8873 - DNA, 25 bp, Saccharomyces pastorianus
aaacatccccgaggtcaagcagagc

SEQ ID NO: 8874 - DNA, 25 bp, Saccharomyces pastorianus
ggaggcacaaaaccccatcatcagg

SEQ ID NO: 8875 - DNA, 25 bp, Saccharomyces pastorianus
gctgcagcagtaccgctccaaggag

SEQ ID NO: 8876 - DNA, 25 bp, Saccharomyces pastorianus
gagttgtcgttgctgcagagcctca

SEQ ID NO: 8877 - DNA, 25 bp, Saccharomyces pastorianus
gtacgacatcgtgattgaccagaaa

SEQ ID NO: 8878 - DNA, 25 bp, Saccharomyces pastorianus
cggagcgcgtgcagatccagaagct

SEQ ID NO: 8879 - DNA, 25 bp, Saccharomyces pastorianus
ggaacatccttgtggacctgcattc

SEQ ID NO: 8880 - DNA, 25 bp, Saccharomyces pastorianus
aacgagttgaaacacttgcccacga

SEQ ID NO: 8881 - DNA, 25 bp, Saccharomyces pastorianus
gttccagctgtcgagcgaggtgcta

SEQ ID NO: 8882 - DNA, 25 bp, Saccharomyces pastorianus
ggtgctatcgcacatcgagatcgac

SEQ ID NO: 8883 - DNA, 25 bp, Saccharomyces pastorianus
agaagcgtgtgtccggtatgttcct

SEQ ID NO: 8884 - DNA, 25 bp, Saccharomyces pastorianus
ccgctggctgctatcttgatcaaga

SEQ ID NO: 8885 - DNA, 25 bp, Saccharomyces pastorianus
aagattgccaaggacggctccggtg

SEQ ID NO: 8886 - DNA, 25 bp, Saccharomyces pastorianus
gacgacaactacgtgcttttaatga

SEQ ID NO: 8887 - DNA, 25 bp, Saccharomyces pastorianus
gggttcccctccagagaaatgctat

SEQ ID NO: 8888 - DNA, 25 bp, Saccharomyces pastorianus
tgacctgcatgtcactaccactgaa

SEQ ID NO: 8889 - DNA, 25 bp, Saccharomyces pastorianus
gtgaagatcagctacgacgacaact

SEQ ID NO: 8890 - DNA, 25 bp, Saccharomyces pastorianus
gaggacgacgaagctttcccgcgcg

SEQ ID NO: 8891 - DNA, 25 bp, Saccharomyces pastorianus
caagattgtcatgagcgggtccgaa

SEQ ID NO: 8892 - DNA, 25 bp, Saccharomyces pastorianus
caccagggcattgtcgatgtctacg

SEQ ID NO: 8893 - DNA, 25 bp, Saccharomyces pastorianus
aaccgaatctcaacatttggtcttg

SEQ ID NO: 8894 - DNA, 25 bp, Saccharomyces pastorianus
gtcgcgagactggacattggcaaaa

SEQ ID NO: 8895 - DNA, 25 bp, Saccharomyces pastorianus
cgatgtctacgattttagcgggttc

SEQ ID NO: 8896 - DNA, 25 bp, Saccharomyces pastorianus
tcttgattccaagagtcgcgagact

SEQ ID NO: 8897 - DNA, 25 bp, Saccharomyces pastorianus
gacagaactacatatgagcaccctt

SEQ ID NO: 8898 - DNA, 25 bp, Saccharomyces pastorianus
ggtggtcatccaatcaaaccttgat

SEQ ID NO: 8899 - DNA, 25 bp, Saccharomyces pastorianus
attccgcagttcctggcgacaaaat

SEQ ID NO: 8900 - DNA, 25 bp, Saccharomyces pastorianus
acggcaattttattctccaagacag

SEQ ID NO: 8901 - DNA, 25 bp, Saccharomyces pastorianus
taccacgataaactctacggcaatt

SEQ ID NO: 8902 - DNA, 25 bp, Saccharomyces pastorianus
aatgccatgctaggcgcttttgtca

SEQ ID NO: 8903 - DNA, 25 bp, Saccharomyces pastorianus
atgatcttccttgttgcgtggttta

SEQ ID NO: 8904 - DNA, 25 bp, Saccharomyces pastorianus
ttatcattaggtgggttgtccgccg

SEQ ID NO: 8905 - DNA, 25 bp, Saccharomyces pastorianus
gacaaaattccggtggtcatccaat

SEQ ID NO: 8906 - DNA, 25 bp, Saccharomyces pastorianus
cattagcgattccattaccacgata

SEQ ID NO: 8907 - DNA, 25 bp, Saccharomyces pastorianus
gagcacccttaacctaatcatgata

SEQ ID NO: 8908 - DNA, 25 bp, Saccharomyces pastorianus
aaaactcgctgatcgggttgcccaa

SEQ ID NO: 8909 - DNA, 25 bp, Saccharomyces pastorianus
aaggaggcacccaggatcaggctca

SEQ ID NO: 8910 - DNA, 25 bp, Saccharomyces pastorianus
acgatgagttggttgctgctttgac

SEQ ID NO: 8911 - DNA, 25 bp, Saccharomyces pastorianus
atgcgggtctttaccaaatgggcct

SEQ ID NO: 8912 - DNA, 25 bp, Saccharomyces pastorianus
actttgtaccagtccggatcactaa

SEQ ID NO: 8913 - DNA, 25 bp, Saccharomyces pastorianus
gtggccgctcaaacttcatggatga

SEQ ID NO: 8914 - DNA, 25 bp, Saccharomyces pastorianus
gaagtgctcaggatgacgccgccga

SEQ ID NO: 8915 - DNA, 25 bp, Saccharomyces pastorianus
tagatacctgcaactggtcaccgag

SEQ ID NO: 8916 - DNA, 25 bp, Saccharomyces pastorianus
aacagcaggtacatcgacagcgact

SEQ ID NO: 8917 - DNA, 25 bp, Saccharomyces pastorianus
ggctaagtgctccacggacgacgaa

SEQ ID NO: 8918 - DNA, 25 bp, Saccharomyces pastorianus
ggatgaccatgactcgtacaacgat

SEQ ID NO: 8919 - DNA, 25 bp, Saccharomyces pastorianus
aatacgcacggagccttgactgcag

SEQ ID NO: 8920 - DNA, 25 bp, Saccharomyces pastorianus
ggtatttagacagcccagtctctct

SEQ ID NO: 8921 - DNA, 25 bp, Saccharomyces pastorianus
gtctctctcataccaaatcatcatt

SEQ ID NO: 8922 - DNA, 25 bp, Saccharomyces pastorianus
gagaggctgctggaactgaacgaaa

SEQ ID NO: 8923 - DNA, 25 bp, Saccharomyces pastorianus
agcgccttcgtcaagcaacacaatt

SEQ ID NO: 8924 - DNA, 25 bp, Saccharomyces pastorianus
ggaccgtcacccaatgaggcattaa

SEQ ID NO: 8925 - DNA, 25 bp, Saccharomyces pastorianus
ttgcgtgcttctaaagaggactcgt

SEQ ID NO: 8926 - DNA, 25 bp, Saccharomyces pastorianus
tgcccctaccacaaacggaatattt

SEQ ID NO: 8927 - DNA, 25 bp, Saccharomyces pastorianus
ggtttgcacccagctattatgttaa

SEQ ID NO: 8928 - DNA, 25 bp, Saccharomyces pastorianus
tattttgacacagctcacaaccgac

SEQ ID NO: 8929 - DNA, 25 bp, Saccharomyces pastorianus
ttggaggcagtatgtcttggtcatc

SEQ ID NO: 8930 - DNA, 25 bp, Saccharomyces pastorianus
caacgatgagtttggtttacacgaa

SEQ ID NO: 8931 - DNA, 25 bp, Saccharomyces pastorianus
gatgtctactgctgacgttaacgaa

SEQ ID NO: 8932 - DNA, 25 bp, Saccharomyces pastorianus
gaagtggacttatccgcgttgacct

SEQ ID NO: 8933 - DNA, 25 bp, Saccharomyces pastorianus
gaagacattcacacgcatatgatgg

SEQ ID NO: 8934 - DNA, 25 bp, Saccharomyces pastorianus
acaggttccaagtcagagagcataa

SEQ ID NO: 8935 - DNA, 25 bp, Saccharomyces pastorianus
gcaagatttctacaggttccaagtc

SEQ ID NO: 8936 - DNA, 25 bp, Saccharomyces pastorianus
ggctaagccagtttccaatattgac

SEQ ID NO: 8937 - DNA, 25 bp, Saccharomyces pastorianus
gcgttgacctctgacttgatgtcta

SEQ ID NO: 8938 - DNA, 25 bp, Saccharomyces pastorianus
tgagtggacatataccaccccatct

SEQ ID NO: 8939 - DNA, 25 bp, Saccharomyces pastorianus
atctttcaccactttcattaatttc

SEQ ID NO: 8940 - DNA, 25 bp, Saccharomyces pastorianus
attccaatttccatgctaaacaccc

SEQ ID NO: 8941 - DNA, 25 bp, Saccharomyces pastorianus
gaagctctcgaaatgtccaacaaat

SEQ ID NO: 8942 - DNA, 25 bp, Saccharomyces pastorianus
ggttgacaacgcaggttccgtgttc

SEQ ID NO: 8943 - DNA, 25 bp, Saccharomyces pastorianus
gtacaatcattctttgcgatggtta

SEQ ID NO: 8944 - DNA, 25 bp, Saccharomyces pastorianus
atgcctgctggtccaagtgaagttc

SEQ ID NO: 8945 - DNA, 25 bp, Saccharomyces pastorianus
tgttcgcaaatgtatcgctcatagt

SEQ ID NO: 8946 - DNA, 25 bp, Saccharomyces pastorianus
tactaaccacactttaccaacatac

SEQ ID NO: 8947 - DNA, 25 bp, Saccharomyces pastorianus
agaaattcaagatgccgtccacgat

SEQ ID NO: 8948 - DNA, 25 bp, Saccharomyces pastorianus
aagctatgcaactgccacgtgtaga

SEQ ID NO: 8949 - DNA, 25 bp, Saccharomyces pastorianus
agagctgtcatgtgtgttgccaaga

SEQ ID NO: 8950 - DNA, 25 bp, Saccharomyces pastorianus
gcagatgcagattttgtggccagtg

SEQ ID NO: 8951 - DNA, 25 bp, Saccharomyces pastorianus
ggttccgtgttcgtgggtgcttaca

SEQ ID NO: 8952 - DNA, 25 bp, Saccharomyces pastorianus
ggaattattctcgaccaaaccacag

SEQ ID NO: 8953 - DNA, 25 bp, Saccharomyces pastorianus
acaggactcctcctcttcggaagag

SEQ ID NO: 8954 - DNA, 25 bp, Saccharomyces pastorianus
ggctcaagaccatccaaccgtggaa

SEQ ID NO: 8955 - DNA, 25 bp, Saccharomyces pastorianus
atgggccatatgacagccgagtgcc

SEQ ID NO: 8956 - DNA, 25 bp, Saccharomyces pastorianus
aacccaccgacagcagcgaagatat

SEQ ID NO: 8957 - DNA, 25 bp, Saccharomyces pastorianus
gcgaagatatcgaactcctgaagag

SEQ ID NO: 8958 - DNA, 25 bp, Saccharomyces pastorianus
gtggaatccttacccattttcgatc

SEQ ID NO: 8959 - DNA, 25 bp, Saccharomyces pastorianus
aatgggccaaggaacgcgagcaatt

SEQ ID NO: 8960 - DNA, 25 bp, Saccharomyces pastorianus
ggtggcagccttaacgaaaagtctt

SEQ ID NO: 8961 - DNA, 25 bp, Saccharomyces pastorianus
tgagcaactgcttgctgtcgtaagc

SEQ ID NO: 8962 - DNA, 25 bp, Saccharomyces pastorianus
agaccaattcgagttgcacaagacg

SEQ ID NO: 8963 - DNA, 25 bp, Saccharomyces pastorianus
aactcagtccaaccagcaacagtat

SEQ ID NO: 8964 - DNA, 25 bp, Saccharomyces pastorianus
aaccagaactctaactcgaactcga

SEQ ID NO: 8965 - DNA, 25 bp, Saccharomyces pastorianus
atggctagttcctacttgggcaaca

SEQ ID NO: 8966 - DNA, 25 bp, Saccharomyces pastorianus
caaagtcaagggtccggtggctcgt

SEQ ID NO: 8967 - DNA, 25 bp, Saccharomyces pastorianus
agcaacagggtcactcgggttcatt

SEQ ID NO: 8968 - DNA, 25 bp, Saccharomyces pastorianus
gcaacctctttcatgcattctgata

SEQ ID NO: 8969 - DNA, 25 bp, Saccharomyces pastorianus
ggtggcaaccagaactctaacggca

SEQ ID NO: 8970 - DNA, 25 bp, Saccharomyces pastorianus
aacgattctttcaacttctctggta

SEQ ID NO: 8971 - DNA, 25 bp, Saccharomyces pastorianus
caatccggtactttttcctcattgg

SEQ ID NO: 8972 - DNA, 25 bp, Saccharomyces pastorianus
ggccaacaccaatccaacgagtatg

SEQ ID NO: 8973 - DNA, 25 bp, Saccharomyces pastorianus
atggctcaatcttacctaggtggac

SEQ ID NO: 8974 - DNA, 25 bp, Saccharomyces pastorianus
ccaaaccgtgccatcattttaactg

SEQ ID NO: 8975 - DNA, 25 bp, Saccharomyces pastorianus
aaagacatccactctgttgttcaga

SEQ ID NO: 8976 - DNA, 25 bp, Saccharomyces pastorianus
gtcatctacaacactacaacggcta

SEQ ID NO: 8977 - DNA, 25 bp, Saccharomyces pastorianus
caattcgtgggtcgctttggaagcc

SEQ ID NO: 8978 - DNA, 25 bp, Saccharomyces pastorianus
taaagccggaactacctggtgagat

SEQ ID NO: 8979 - DNA, 25 bp, Saccharomyces pastorianus
ggtgctgctcagatcaattcgtggg

SEQ ID NO: 8980 - DNA, 25 bp, Saccharomyces pastorianus
aagccatgggtttgggcggtcatct

SEQ ID NO: 8981 - DNA, 25 bp, Saccharomyces pastorianus
acggtatcgagagtcccgacggcaa

SEQ ID NO: 8982 - DNA, 25 bp, Saccharomyces pastorianus
agacgaagccttcggttccgtgata

SEQ ID NO: 8983 - DNA, 25 bp, Saccharomyces pastorianus
ttaaaggcggacttcccagcttacg

SEQ ID NO: 8984 - DNA, 25 bp, Saccharomyces pastorianus
gcaagctcaattggtcttcggtact

SEQ ID NO: 8985 - DNA, 25 bp, Saccharomyces pastorianus
ttgccaccattttatctgctgctat

SEQ ID NO: 8986 - DNA, 25 bp, Saccharomyces pastorianus
atggttcagccccagatttgccaaa

SEQ ID NO: 8987 - DNA, 25 bp, Saccharomyces pastorianus
aaccaccattacctatctggtcctt

SEQ ID NO: 8988 - DNA, 25 bp, Saccharomyces pastorianus
acaaagttaaccctattgccaccat

SEQ ID NO: 8989 - DNA, 25 bp, Saccharomyces pastorianus
gaagcttcttgtattcctggttcat

SEQ ID NO: 8990 - DNA, 25 bp, Saccharomyces pastorianus
gattctgctgccatgattttagtca

SEQ ID NO: 8991 - DNA, 25 bp, Saccharomyces pastorianus
ttcctggttcattgggtttgttgcc

SEQ ID NO: 8992 - DNA, 25 bp, Saccharomyces pastorianus
aatggctgcgttcatggcactacaa

SEQ ID NO: 8993 - DNA, 25 bp, Saccharomyces pastorianus
caatgttttggcctcatcaagacta

SEQ ID NO: 8994 - DNA, 25 bp, Saccharomyces pastorianus
gacaagaacactgccttcggtttat

SEQ ID NO: 8995 - DNA, 25 bp, Saccharomyces pastorianus
ctccttagcttctttgccagacaag

SEQ ID NO: 8996 - DNA, 25 bp, Saccharomyces pastorianus
atgatgctttggctcattcttccat

SEQ ID NO: 8997 - DNA, 25 bp, Saccharomyces pastorianus
ggtccaaaaggtatcggtgccatct

SEQ ID NO: 8998 - DNA, 25 bp, Saccharomyces pastorianus
atctgccgagcatactacattgaat

SEQ ID NO: 8999 - DNA, 25 bp, Saccharomyces pastorianus
attgaatggatctcccgatcatcgt

SEQ ID NO: 9000 - DNA, 25 bp, Saccharomyces pastorianus
gtcaacggtttgttatctgccgagc

SEQ ID NO: 9001 - DNA, 25 bp, Saccharomyces pastorianus
ctatgtcgttaaggccgttgctgat

SEQ ID NO: 9002 - DNA, 25 bp, Saccharomyces pastorianus
ggtgagtctctattaatggcactaa

SEQ ID NO: 9003 - DNA, 25 bp, Saccharomyces pastorianus
gactagaaccattgctatccggtgg

SEQ ID NO: 9004 - DNA, 25 bp, Saccharomyces pastorianus
taacgtttcatttgcctatgtggaa

SEQ ID NO: 9005 - DNA, 25 bp, Saccharomyces pastorianus
aggaactttagcacctccattggta

SEQ ID NO: 9006 - DNA, 25 bp, Saccharomyces pastorianus
gatctattatccatttcgtcccata

SEQ ID NO: 9007 - DNA, 25 bp, Saccharomyces pastorianus
ctattcaagttgcagtcccagtgga

SEQ ID NO: 9008 - DNA, 25 bp, Saccharomyces pastorianus
aaagccttacacgtgttgctgatga

SEQ ID NO: 9009 - DNA, 25 bp, Saccharomyces pastorianus
ggtacggcattcaggcgctacggaa

SEQ ID NO: 9010 - DNA, 25 bp, Saccharomyces pastorianus
cgtttcagggacaagcatgccactt

SEQ ID NO: 9011 - DNA, 25 bp, Saccharomyces pastorianus
aggataccctttattgcccagtggt

SEQ ID NO: 9012 - DNA, 25 bp, Saccharomyces pastorianus
gcgtgctatgtattctctcgcagaa

SEQ ID NO: 9013 - DNA, 25 bp, Saccharomyces pastorianus
gaaacgtggcgcttaaggataccct

SEQ ID NO: 9014 - DNA, 25 bp, Saccharomyces pastorianus
gagatgcttcgaggctaccacttca

SEQ ID NO: 9015 - DNA, 25 bp, Saccharomyces pastorianus
gagcggttcagagtcctattcaagt

SEQ ID NO: 9016 - DNA, 25 bp, Saccharomyces pastorianus
ggaatcgctggatctgcaacgtttg

SEQ ID NO: 9017 - DNA, 25 bp, Saccharomyces pastorianus
tatgtagccagaagtaccctgccga

SEQ ID NO: 9018 - DNA, 25 bp, Saccharomyces pastorianus
acagtaccagctaaccctacaaaag

SEQ ID NO: 9019 - DNA, 25 bp, Saccharomyces pastorianus
gacgaacgcgttgttatctaaggat

SEQ ID NO: 9020 - DNA, 25 bp, Saccharomyces pastorianus
acgatgaacctatctgggtttcgcc

SEQ ID NO: 9021 - DNA, 25 bp, Saccharomyces pastorianus
gccagaacgtaatgctgttccctta

SEQ ID NO: 9022 - DNA, 25 bp, Saccharomyces pastorianus
ggcccattagtatatgttcttcccg

SEQ ID NO: 9023 - DNA, 25 bp, Saccharomyces pastorianus
gacactgcgcaaaacagaccggctg

SEQ ID NO: 9024 - DNA, 25 bp, Saccharomyces pastorianus
gggatgggcgtcttcaaaatacaga

SEQ ID NO: 9025 - DNA, 25 bp, Saccharomyces pastorianus
gactaaagcattgtcgccagaacgt

SEQ ID NO: 9026 - DNA, 25 bp, Saccharomyces pastorianus
aggatgtttcctatgcatatttgac

SEQ ID NO: 9027 - DNA, 25 bp, Saccharomyces pastorianus
gagtccgggattagataacgttaca

SEQ ID NO: 9028 - DNA, 25 bp, Saccharomyces pastorianus
tgggtttcgcccagtaaaattgact

SEQ ID NO: 9029 - DNA, 25 bp, Saccharomyces pastorianus
tcgacttattcggacccattggtaa

SEQ ID NO: 9030 - DNA, 25 bp, Saccharomyces pastorianus
aatgtggacgcgttttacgcgccga

SEQ ID NO: 9031 - DNA, 25 bp, Saccharomyces pastorianus
tgagagccatcgacacattcaacgg

SEQ ID NO: 9032 - DNA, 25 bp, Saccharomyces pastorianus
gatgctgaaccagatcttgtgcaag

SEQ ID NO: 9033 - DNA, 25 bp, Saccharomyces pastorianus
gaccgttataaccaagatccgcaag

SEQ ID NO: 9034 - DNA, 25 bp, Saccharomyces pastorianus
agatattaccgtgcacgttgatgaa

SEQ ID NO: 9035 - DNA, 25 bp, Saccharomyces pastorianus
atggccaaccgacaggtgttgctgt

SEQ ID NO: 9036 - DNA, 25 bp, Saccharomyces pastorianus
tggatccgttatttaccccacaaag

SEQ ID NO: 9037 - DNA, 25 bp, Saccharomyces pastorianus
tacgcgccgatgttgaactggattt

SEQ ID NO: 9038 - DNA, 25 bp, Saccharomyces pastorianus
tactgaaggtgtcaacccaggtgga

SEQ ID NO: 9039 - DNA, 25 bp, Saccharomyces pastorianus
aagatccgcaagaccctgaagaaga

SEQ ID NO: 9040 - DNA, 25 bp, Saccharomyces pastorianus
actttctatcctgcaatcgtcattg

SEQ ID NO: 9041 - DNA, 25 bp, Saccharomyces pastorianus
tgaagttagagaccctgagccagac

SEQ ID NO: 9042 - DNA, 25 bp, Saccharomyces pastorianus
ggcaattcgggcaaggttttcaagt

SEQ ID NO: 9043 - DNA, 25 bp, Saccharomyces pastorianus
aatgccgatggcgaatggatccagt

SEQ ID NO: 9044 - DNA, 25 bp, Saccharomyces pastorianus
ggcaccaggcaaagcaccaggcaaa

SEQ ID NO: 9045 - DNA, 25 bp, Saccharomyces pastorianus
agtacaacccaagtgctccgatttt

SEQ ID NO: 9046 - DNA, 25 bp, Saccharomyces pastorianus
gccaggcttccctactaaaaactat

SEQ ID NO: 9047 - DNA, 25 bp, Saccharomyces pastorianus
gaaagagctgttactgattccgcca

SEQ ID NO: 9048 - DNA, 25 bp, Saccharomyces pastorianus
gtaccctgaaaccacgactttctat

SEQ ID NO: 9049 - DNA, 25 bp, Saccharomyces pastorianus
tatccgccaggcacgaaagtcttgg

SEQ ID NO: 9050 - DNA, 25 bp, Saccharomyces pastorianus
gaaagtcttggcaaggtaccctgaa

SEQ ID NO: 9051 - DNA, 25 bp, Saccharomyces pastorianus
gaatgaccatcgtcttgcaaggcca

SEQ ID NO: 9052 - DNA, 25 bp, Saccharomyces pastorianus
aacaacttcggtggtcgtgtcgtcg

SEQ ID NO: 9053 - DNA, 25 bp, Saccharomyces pastorianus
atggccagaatctccttgctaggta

SEQ ID NO: 9054 - DNA, 25 bp, Saccharomyces pastorianus
gaaaccagctgtatcgtcgagcttt

SEQ ID NO: 9055 - DNA, 25 bp, Saccharomyces pastorianus
tgcccgccagtgagatcttaaggtt

SEQ ID NO: 9056 - DNA, 25 bp, Saccharomyces pastorianus
ggcactgccaagaactcctttaaag

SEQ ID NO: 9057 - DNA, 25 bp, Saccharomyces pastorianus
gagcacttgaacgacgtcaccaatt

SEQ ID NO: 9058 - DNA, 25 bp, Saccharomyces pastorianus
agaagcggtatgatggcactgccaa

SEQ ID NO: 9059 - DNA, 25 bp, Saccharomyces pastorianus
tgagccattcggtgttctagagtgt

SEQ ID NO: 9060 - DNA, 25 bp, Saccharomyces pastorianus
tactttgaagacctgctgttgcacc

SEQ ID NO: 9061 - DNA, 25 bp, Saccharomyces pastorianus
ttccgccttcttgaagctggttgag

SEQ ID NO: 9062 - DNA, 25 bp, Saccharomyces pastorianus
gtgttccattccatttgcggtgtgc

SEQ ID NO: 9063 - DNA, 25 bp, Saccharomyces pastorianus
acaggttctttgagcgtgtctccac

SEQ ID NO: 9064 - DNA, 25 bp, Saccharomyces pastorianus
gtggactactacgtggtcttgacgc

SEQ ID NO: 9065 - DNA, 25 bp, Saccharomyces pastorianus
ccatgcgcatgtcaagccttggtaa

SEQ ID NO: 9066 - DNA, 25 bp, Saccharomyces pastorianus
gaccctaatgtctctttccaataga

SEQ ID NO: 9067 - DNA, 25 bp, Saccharomyces pastorianus
gtgtctccactaccattatcaacat

SEQ ID NO: 9068 - DNA, 25 bp, Saccharomyces pastorianus
tgtatcgtcttgttgctcacacggg

SEQ ID NO: 9069 - DNA, 25 bp, Saccharomyces pastorianus
tgcccagtgtgtatgtcagtctcga

SEQ ID NO: 9070 - DNA, 25 bp, Saccharomyces pastorianus
ggtggcattatagggctcatctccg

SEQ ID NO: 9071 - DNA, 25 bp, Saccharomyces pastorianus
aaacaatggctacatgactccctgt

SEQ ID NO: 9072 - DNA, 25 bp, Saccharomyces pastorianus
ggaagccatggtttgcaccggtaca

SEQ ID NO: 9073 - DNA, 25 bp, Saccharomyces pastorianus
acacctctatttcttggacattcac

SEQ ID NO: 9074 - DNA, 25 bp, Saccharomyces pastorianus
aaaaggtatctggatctcgtctcgt

SEQ ID NO: 9075 - DNA, 25 bp, Saccharomyces pastorianus
tggaaacccttcataaccgtaatag

SEQ ID NO: 9076 - DNA, 25 bp, Saccharomyces pastorianus
tacctggtgcctacttatacttatc

SEQ ID NO: 9077 - DNA, 25 bp, Saccharomyces pastorianus
tggatctcgtctcgtgacaacaacg

SEQ ID NO: 9078 - DNA, 25 bp, Saccharomyces pastorianus
tagccacaccggttactgaagcaaa

SEQ ID NO: 9079 - DNA, 25 bp, Saccharomyces pastorianus
tttgccaacggattttaccaatcga

SEQ ID NO: 9080 - DNA, 25 bp, Saccharomyces pastorianus
agatcaagctattacattacgggaa

SEQ ID NO: 9081 - DNA, 25 bp, Saccharomyces pastorianus
caaatgtgataacggcatcgccctt

SEQ ID NO: 9082 - DNA, 25 bp, Saccharomyces pastorianus
aagagcctactcgttagatttggaa

SEQ ID NO: 9083 - DNA, 25 bp, Saccharomyces pastorianus
ggatacttcaatattctcccagaaa

SEQ ID NO: 9084 - DNA, 25 bp, Saccharomyces pastorianus
ggtgcttcaagcaacgccctaattg

SEQ ID NO: 9085 - DNA, 25 bp, Saccharomyces pastorianus
gtacttcgtgctgttattcttttta

SEQ ID NO: 9086 - DNA, 25 bp, Saccharomyces pastorianus
gatgggctgtattaggtggtctact

SEQ ID NO: 9087 - DNA, 25 bp, Saccharomyces pastorianus
ggccaattctactaatgtacttcgt

SEQ ID NO: 9088 - DNA, 25 bp, Saccharomyces pastorianus
gaagactacctgaattcaagttctg

SEQ ID NO: 9089 - DNA, 25 bp, Saccharomyces pastorianus
gatattcccgtattttggccaattc

SEQ ID NO: 9090 - DNA, 25 bp, Saccharomyces pastorianus
gtattatcactattctcgatcttcg

SEQ ID NO: 9091 - DNA, 25 bp, Saccharomyces pastorianus
attctcgatcttcgatattcccgta

SEQ ID NO: 9092 - DNA, 25 bp, Saccharomyces pastorianus
gccaccgtcatttccttagtattat

SEQ ID NO: 9093 - DNA, 25 bp, Saccharomyces pastorianus
agccctgacccaatgaacggtgctt

SEQ ID NO: 9094 - DNA, 25 bp, Saccharomyces pastorianus
actcctcacgccaaacagagatggg

SEQ ID NO: 9095 - DNA, 25 bp, Saccharomyces pastorianus
gtccatgctattctttattttttac

SEQ ID NO: 9096 - DNA, 25 bp, Saccharomyces pastorianus
taagtcgccttgatgtcgaagcttt

SEQ ID NO: 9097 - DNA, 25 bp, Saccharomyces pastorianus
tgatccgtactcatctacaagattt

SEQ ID NO: 9098 - DNA, 25 bp, Saccharomyces pastorianus
aacccgttggagtgcaattaatgtc

SEQ ID NO: 9099 - DNA, 25 bp, Saccharomyces pastorianus
tgaaacaacttcttacatacattat

SEQ ID NO: 9100 - DNA, 25 bp, Saccharomyces pastorianus
gttgatacacgagtccatgctattc

SEQ ID NO: 9101 - DNA, 25 bp, Saccharomyces pastorianus
gatctataatcccatttgctgttgt

SEQ ID NO: 9102 - DNA, 25 bp, Saccharomyces pastorianus
gagagagttcttgatccgtactcat

SEQ ID NO: 9103 - DNA, 25 bp, Saccharomyces pastorianus
agaacaacattctcagtatttacgt

SEQ ID NO: 9104 - DNA, 25 bp, Saccharomyces pastorianus
gaattaacagcccaacgtgagagat

SEQ ID NO: 9105 - DNA, 25 bp, Saccharomyces pastorianus
agaaaacgccaatagccgttcctca

SEQ ID NO: 9106 - DNA, 25 bp, Saccharomyces pastorianus
gaggaggacctttcagaattagatc

SEQ ID NO: 9107 - DNA, 25 bp, Saccharomyces pastorianus
gagccaatactctgtgcatgtactg

SEQ ID NO: 9108 - DNA, 25 bp, Saccharomyces pastorianus
gatatttggtaaacacttggcgctt

SEQ ID NO: 9109 - DNA, 25 bp, Saccharomyces pastorianus
aaggatttcttctccaataatggta

SEQ ID NO: 9110 - DNA, 25 bp, Saccharomyces pastorianus
aatggtatattgttggcagttccta

SEQ ID NO: 9111 - DNA, 25 bp, Saccharomyces pastorianus
tatggaaaacacacactgctaagga

SEQ ID NO: 9112 - DNA, 25 bp, Saccharomyces pastorianus
gacaaaagctttatggcccaggtaa

SEQ ID NO: 9113 - DNA, 25 bp, Saccharomyces pastorianus
acaagtgtccatcgtgtggccatta

SEQ ID NO: 9114 - DNA, 25 bp, Saccharomyces pastorianus
taatcggatggttaacgcctttggg

SEQ ID NO: 9115 - DNA, 25 bp, Saccharomyces pastorianus
ttgtacctgccaacgtaatcggatg

SEQ ID NO: 9116 - DNA, 25 bp, Saccharomyces pastorianus
actgtgtagggcagatacgtcatat

SEQ ID NO: 9117 - DNA, 25 bp, Saccharomyces pastorianus
tacaagaactccttcgccgaattgg

SEQ ID NO: 9118 - DNA, 25 bp, Saccharomyces pastorianus
actttggctggtcctgatggttcaa

SEQ ID NO: 9119 - DNA, 25 bp, Saccharomyces pastorianus
ctgatgacattcctgtggctactga

SEQ ID NO: 9120 - DNA, 25 bp, Saccharomyces pastorianus
aactgcctctgacgctgctaaaaga

SEQ ID NO: 9121 - DNA, 25 bp, Saccharomyces pastorianus
ggttcaagaactgcttctccattgg

SEQ ID NO: 9122 - DNA, 25 bp, Saccharomyces pastorianus
gaacgcacctgaaaagcctgatgac

SEQ ID NO: 9123 - DNA, 25 bp, Saccharomyces pastorianus
ctttgcctgatgaagtcctgactca

SEQ ID NO: 9124 - DNA, 25 bp, Saccharomyces pastorianus
tttgtcatatctagctcatcacggt

SEQ ID NO: 9125 - DNA, 25 bp, Saccharomyces pastorianus
aaagcagccggtgttttcgtcagta

SEQ ID NO: 9126 - DNA, 25 bp, Saccharomyces pastorianus
aagacaaaccaaacctgctgctgct

SEQ ID NO: 9127 - DNA, 25 bp, Saccharomyces pastorianus
gatcgagtacgatgccttcttgttc

SEQ ID NO: 9128 - DNA, 25 bp, Saccharomyces pastorianus
ctcacctagtgggatctgcattgtc

SEQ ID NO: 9129 - DNA, 25 bp, Saccharomyces pastorianus
tggtaacgtatctgcccatacatct

SEQ ID NO: 9130 - DNA, 25 bp, Saccharomyces pastorianus
gtagagtcattcctggttacggcca

SEQ ID NO: 9131 - DNA, 25 bp, Saccharomyces pastorianus
ggaatcgtcattctataccgtttta

SEQ ID NO: 9132 - DNA, 25 bp, Saccharomyces pastorianus
tgggttggctggtccattacacgga

SEQ ID NO: 9133 - DNA, 25 bp, Saccharomyces pastorianus
gaagtagcaccagccgtgttaaccg

SEQ ID NO: 9134 - DNA, 25 bp, Saccharomyces pastorianus
ggaccatttcccagattacgagcta

SEQ ID NO: 9135 - DNA, 25 bp, Saccharomyces pastorianus
tacacggacgtgctaaccaagaagt

SEQ ID NO: 9136 - DNA, 25 bp, Saccharomyces pastorianus
tgtcctgttacaatattacggctta

SEQ ID NO: 9137 - DNA, 25 bp, Saccharomyces pastorianus
tatttgtcccttgcatcgggtttaa

SEQ ID NO: 9138 - DNA, 25 bp, Saccharomyces pastorianus
aacgtggatgcccattcaggtgtcc

SEQ ID NO: 9139 - DNA, 25 bp, Saccharomyces pastorianus
gtctccatacattgccccggaagaa

SEQ ID NO: 9140 - DNA, 25 bp, Saccharomyces pastorianus
agaaccggcagacagctatggagct

SEQ ID NO: 9141 - DNA, 25 bp, Saccharomyces pastorianus
aggtgtttgtggttcgtctccatac

SEQ ID NO: 9142 - DNA, 25 bp, Saccharomyces pastorianus
gttagatcctgttccgtatagaagg

SEQ ID NO: 9143 - DNA, 25 bp, Saccharomyces pastorianus
gacccattttatctgaattacctaa

SEQ ID NO: 9144 - DNA, 25 bp, Saccharomyces pastorianus
agctgattgttttttcaagcaactg

SEQ ID NO: 9145 - DNA, 25 bp, Saccharomyces pastorianus
ttactttggtcattgccgcaggaaa

SEQ ID NO: 9146 - DNA, 25 bp, Saccharomyces pastorianus
tgcgggcggcgatttatttactttg

SEQ ID NO: 9147 - DNA, 25 bp, Saccharomyces pastorianus
gaggaattcgatccaagacccgtgg

SEQ ID NO: 9148 - DNA, 25 bp, Saccharomyces pastorianus
agctctgctgaaaaggatgacccat

SEQ ID NO: 9149 - DNA, 25 bp, Saccharomyces pastorianus
aaatgggtgtttgccacagggattt

SEQ ID NO: 9150 - DNA, 25 bp, Saccharomyces pastorianus
agcatcacagactactatcgctgaa

SEQ ID NO: 9151 - DNA, 25 bp, Saccharomyces pastorianus
cggttacactcgtttggcacaaatt

SEQ ID NO: 9152 - DNA, 25 bp, Saccharomyces pastorianus
gatgcttccaagttaccaagagctg

SEQ ID NO: 9153 - DNA, 25 bp, Saccharomyces pastorianus
tcaattaaggttttgcaccgacggt

SEQ ID NO: 9154 - DNA, 25 bp, Saccharomyces pastorianus
taagagagactgtgctggacccaat

SEQ ID NO: 9155 - DNA, 25 bp, Saccharomyces pastorianus
gacaagcctgctaaagatgcttcca

SEQ ID NO: 9156 - DNA, 25 bp, Saccharomyces pastorianus
ttgaagaccgaactaccacaattag

SEQ ID NO: 9157 - DNA, 25 bp, Saccharomyces pastorianus
tgagggtaccttatttcgacccaag

SEQ ID NO: 9158 - DNA, 25 bp, Saccharomyces pastorianus
gctgaagtcatctctaacctttacg

SEQ ID NO: 9159 - DNA, 25 bp, Saccharomyces pastorianus
gtgaagcagctagacggacccttaa

SEQ ID NO: 9160 - DNA, 25 bp, Saccharomyces pastorianus
gtgctggacccaataacaaagttct

SEQ ID NO: 9161 - DNA, 25 bp, Saccharomyces pastorianus
atcatgttctttgcgttgttcttct

SEQ ID NO: 9162 - DNA, 25 bp, Saccharomyces pastorianus
ggttcggtatcctggacgcttataa

SEQ ID NO: 9163 - DNA, 25 bp, Saccharomyces pastorianus
agaactcatatgtactagctcgccc

SEQ ID NO: 9164 - DNA, 25 bp, Saccharomyces pastorianus
gtacttggagttatcgtcgccttca

SEQ ID NO: 9165 - DNA, 25 bp, Saccharomyces pastorianus
ttgttcttcttattggcggttacct

SEQ ID NO: 9166 - DNA, 25 bp, Saccharomyces pastorianus
ggctcctccttcagttcataaattt

SEQ ID NO: 9167 - DNA, 25 bp, Saccharomyces pastorianus
aatcgccttggagaacacttttggt

SEQ ID NO: 9168 - DNA, 25 bp, Saccharomyces pastorianus
ttcggtttggctgtctgtactatga

SEQ ID NO: 9169 - DNA, 25 bp, Saccharomyces pastorianus
gcggttacctttttgttgctgtcta

SEQ ID NO: 9170 - DNA, 25 bp, Saccharomyces pastorianus
gttcgctttgactacttttgtgcta

SEQ ID NO: 9171 - DNA, 25 bp, Saccharomyces pastorianus
aacgttgtcgttggtcttgccatgt

SEQ ID NO: 9172 - DNA, 25 bp, Saccharomyces pastorianus
aagtggtgcccttacgagtggtgcc

SEQ ID NO: 9173 - DNA, 25 bp, Saccharomyces pastorianus
acattcacgggcctgagctcatttg

SEQ ID NO: 9174 - DNA, 25 bp, Saccharomyces pastorianus
tgcctcccatactgttatcgttaat

SEQ ID NO: 9175 - DNA, 25 bp, Saccharomyces pastorianus
ttgtcgtccaaaacctggtctttga

SEQ ID NO: 9176 - DNA, 25 bp, Saccharomyces pastorianus
actattcgccatttgcatactacat

SEQ ID NO: 9177 - DNA, 25 bp, Saccharomyces pastorianus
gcctacgaatccctattgatcaacg

SEQ ID NO: 9178 - DNA, 25 bp, Saccharomyces pastorianus
tcaacttgggcatatcactggagat

SEQ ID NO: 9179 - DNA, 25 bp, Saccharomyces pastorianus
aagatcctggctttgttcaatgtcg

SEQ ID NO: 9180 - DNA, 25 bp, Saccharomyces pastorianus
aagtgtactggtgctcttgggctca

SEQ ID NO: 9181 - DNA, 25 bp, Saccharomyces pastorianus
ttgtgtatccgatgacaggtctcaa

SEQ ID NO: 9182 - DNA, 25 bp, Saccharomyces pastorianus
gaccacgttcggatttgtcgtccaa

SEQ ID NO: 9183 - DNA, 25 bp, Saccharomyces pastorianus
aagatctcctgtttttcgagaccgg

SEQ ID NO: 9184 - DNA, 25 bp, Saccharomyces pastorianus
tttagcgccaactaccaatgcattg

SEQ ID NO: 9185 - DNA, 25 bp, Saccharomyces pastorianus
tgggcatccttaataacctacttat

SEQ ID NO: 9186 - DNA, 25 bp, Saccharomyces pastorianus
gatggtgagcactttcaagtctggt

SEQ ID NO: 9187 - DNA, 25 bp, Saccharomyces pastorianus
agcgtgtttacaagggtcttacaat

SEQ ID NO: 9188 - DNA, 25 bp, Saccharomyces pastorianus
gaattattagcaccatccctgagta

SEQ ID NO: 9189 - DNA, 25 bp, Saccharomyces pastorianus
aagagctccaggcttgcactggaaa

SEQ ID NO: 9190 - DNA, 25 bp, Saccharomyces pastorianus
gacagctcagttacatgggcatcct

SEQ ID NO: 9191 - DNA, 25 bp, Saccharomyces pastorianus
atatgggctcgtgacactccaagag

SEQ ID NO: 9192 - DNA, 25 bp, Saccharomyces pastorianus
caagattattcctggtatcgatact

SEQ ID NO: 9193 - DNA, 25 bp, Saccharomyces pastorianus
gaggtcgataagttttccgttgaag

SEQ ID NO: 9194 - DNA, 25 bp, Saccharomyces pastorianus
agcgtattggctccggaagccgtat

SEQ ID NO: 9195 - DNA, 25 bp, Saccharomyces pastorianus
ggaagcaccttaatagtctctcttg

SEQ ID NO: 9196 - DNA, 25 bp, Saccharomyces pastorianus
accaaacctatgttgcgtgacctcg

SEQ ID NO: 9197 - DNA, 25 bp, Saccharomyces pastorianus
gacgcccaaatgaatttgctactgg

SEQ ID NO: 9198 - DNA, 25 bp, Saccharomyces pastorianus
atggacgcactaaagctgtcggatt

SEQ ID NO: 9199 - DNA, 25 bp, Saccharomyces pastorianus
gcgttcctaggcgttcagtacaatc

SEQ ID NO: 9200 - DNA, 25 bp, Saccharomyces pastorianus
agcttagttgctgtagacgcccaaa

SEQ ID NO: 9201 - DNA, 25 bp, Saccharomyces pastorianus
ctactggatcatgttgaggagcgta

SEQ ID NO: 9202 - DNA, 25 bp, Saccharomyces pastorianus
atgatgggcttggtcagcgttccta

SEQ ID NO: 9203 - DNA, 25 bp, Saccharomyces pastorianus
gtctctcttgcggaagaccgtattt

SEQ ID NO: 9204 - DNA, 25 bp, Saccharomyces pastorianus
tgtcggattttattggaagcacctt

SEQ ID NO: 9205 - DNA, 25 bp, Saccharomyces pastorianus
catggccatgccttttgtttttaac

SEQ ID NO: 9206 - DNA, 25 bp, Saccharomyces pastorianus
caaaatctctttgtccggcggattc

SEQ ID NO: 9207 - DNA, 25 bp, Saccharomyces pastorianus
ttgattcaaatcgtgggtaccctat

SEQ ID NO: 9208 - DNA, 25 bp, Saccharomyces pastorianus
gggtaccctattctggatcatttca

SEQ ID NO: 9209 - DNA, 25 bp, Saccharomyces pastorianus
tatactatcggtgccctagctatgc

SEQ ID NO: 9210 - DNA, 25 bp, Saccharomyces pastorianus
atatctcggctttggatgtggttca

SEQ ID NO: 9211 - DNA, 25 bp, Saccharomyces pastorianus
atcatgctgccgacgatgtggaaga

SEQ ID NO: 9212 - DNA, 25 bp, Saccharomyces pastorianus
aaggtgtactgtgccaacgtcaatt

SEQ ID NO: 9213 - DNA, 25 bp, Saccharomyces pastorianus
gtcggttcgttaatcaagtccacct

SEQ ID NO: 9214 - DNA, 25 bp, Saccharomyces pastorianus
gaattaactgctggcaccactggtg

SEQ ID NO: 9215 - DNA, 25 bp, Saccharomyces pastorianus
gtaatcatgatctgccgtactggca

SEQ ID NO: 9216 - DNA, 25 bp, Saccharomyces pastorianus
atacttcaaatcacctgttttcgtt

SEQ ID NO: 9217 - DNA, 25 bp, Saccharomyces pastorianus
ttcgatttactggttccgggaatgg

SEQ ID NO: 9218 - DNA, 25 bp, Saccharomyces pastorianus
tgttttcgttactgactacccacgt

SEQ ID NO: 9219 - DNA, 25 bp, Saccharomyces pastorianus
gataaccagaaggagcttttgccaa

SEQ ID NO: 9220 - DNA, 25 bp, Saccharomyces pastorianus
taacgtatacgcaggctatcgaaat

SEQ ID NO: 9221 - DNA, 25 bp, Saccharomyces pastorianus
aatcatcggcggaagtctaagagaa

SEQ ID NO: 9222 - DNA, 25 bp, Saccharomyces pastorianus
aattggattggtacgtttccctgag

SEQ ID NO: 9223 - DNA, 25 bp, Saccharomyces pastorianus
actcccgacaatactgtggcatgtt

SEQ ID NO: 9224 - DNA, 25 bp, Saccharomyces pastorianus
atgaaacaaaactctactcccgaca

SEQ ID NO: 9225 - DNA, 25 bp, Saccharomyces pastorianus
tacccacgtgtttgcaaagcctttt

SEQ ID NO: 9226 - DNA, 25 bp, Saccharomyces pastorianus
tggttagccggcgaatacttcaaat

SEQ ID NO: 9227 - DNA, 25 bp, Saccharomyces pastorianus
cattattatctctaccattatctac

SEQ ID NO: 9228 - DNA, 25 bp, Saccharomyces pastorianus
gcttgtatcattattatctctacca

SEQ ID NO: 9229 - DNA, 25 bp, Saccharomyces pastorianus
ttggcttgtatcattattatctcta

SEQ ID NO: 9230 - DNA, 25 bp, Saccharomyces pastorianus
tttagttttcattctggtcggtttg

SEQ ID NO: 9231 - DNA, 25 bp, Saccharomyces pastorianus
ggtgttattttagttttcattctgg

SEQ ID NO: 9232 - DNA, 25 bp, Saccharomyces pastorianus
ttgtatcattattatctctaccatt

SEQ ID NO: 9233 - DNA, 25 bp, Saccharomyces pastorianus
ggcttgtatcattattatctctacc

SEQ ID NO: 9234 - DNA, 25 bp, Saccharomyces pastorianus
atcattattatctctaccattatct

SEQ ID NO: 9235 - DNA, 25 bp, Saccharomyces pastorianus
gtatcattattatctctaccattat

SEQ ID NO: 9236 - DNA, 25 bp, Saccharomyces pastorianus
atgactttaccaggtggtgttattt

SEQ ID NO: 9237 - DNA, 25 bp, Saccharomyces pastorianus
gtttggcttgtatcattattatctc

SEQ ID NO: 9238 - DNA, 25 bp, Saccharomyces pastorianus
ggagacgccgaagacaatgccaatg

SEQ ID NO: 9239 - DNA, 25 bp, Saccharomyces pastorianus
aactccgcgagcctgagaacagcga

SEQ ID NO: 9240 - DNA, 25 bp, Saccharomyces pastorianus
ttaacgactacactaccgatgacga

SEQ ID NO: 9241 - DNA, 25 bp, Saccharomyces pastorianus
gcagtatacgagctagcgctaccac

SEQ ID NO: 9242 - DNA, 25 bp, Saccharomyces pastorianus
gctaccaccagtgcagcagggaatt

SEQ ID NO: 9243 - DNA, 25 bp, Saccharomyces pastorianus
gatagaaactccaacgacggctccg

SEQ ID NO: 9244 - DNA, 25 bp, Saccharomyces pastorianus
gtatttcccgcagggttacatcgaa

SEQ ID NO: 9245 - DNA, 25 bp, Saccharomyces pastorianus
gccgtgtccacttcgtcattaacga

SEQ ID NO: 9246 - DNA, 25 bp, Saccharomyces pastorianus
actaccgtcatcgagaggcagcagt

SEQ ID NO: 9247 - DNA, 25 bp, Saccharomyces pastorianus
gccaaagaaatagccgccgtgtcca

SEQ ID NO: 9248 - DNA, 25 bp, Saccharomyces pastorianus
gggtggtcatgcagcaactccgcga

SEQ ID NO: 9249 - DNA, 25 bp, Saccharomyces pastorianus
gaagaagcttttactcttgttctaa

SEQ ID NO: 9250 - DNA, 25 bp, Saccharomyces pastorianus
tcatgactgcactttagagattctt

SEQ ID NO: 9251 - DNA, 25 bp, Saccharomyces pastorianus
aatattcttccatcacctcttcaaa

SEQ ID NO: 9252 - DNA, 25 bp, Saccharomyces pastorianus
ggccaagatgaaggctctctgttaa

SEQ ID NO: 9253 - DNA, 25 bp, Saccharomyces pastorianus
cttattcccgttctgtgggacaaga

SEQ ID NO: 9254 - DNA, 25 bp, Saccharomyces pastorianus
aagatcgctcttttaggtgctagaa

SEQ ID NO: 9255 - DNA, 25 bp, Saccharomyces pastorianus
ggtttgttgagtcctattatcctac

SEQ ID NO: 9256 - DNA, 25 bp, Saccharomyces pastorianus
tttaaccgttcgcttcgttgaatcg

SEQ ID NO: 9257 - DNA, 25 bp, Saccharomyces pastorianus
agagattcttgacactgcaggccaa

SEQ ID NO: 9258 - DNA, 25 bp, Saccharomyces pastorianus
gtagggacgatctgccggtaatact

SEQ ID NO: 9259 - DNA, 25 bp, Saccharomyces pastorianus
aatccttgacaggtgtacgaggcat

SEQ ID NO: 9260 - DNA, 25 bp, Saccharomyces pastorianus
ggtgctaacgcaacaagtgctctat

SEQ ID NO: 9261 - DNA, 25 bp, Saccharomyces pastorianus
tggtatttctttgacttgccaggaa

SEQ ID NO: 9262 - DNA, 25 bp, Saccharomyces pastorianus
gatttgagcctcaccaggctagtgt

SEQ ID NO: 9263 - DNA, 25 bp, Saccharomyces pastorianus
acaatggtgcctcacagtggtgctg

SEQ ID NO: 9264 - DNA, 25 bp, Saccharomyces pastorianus
aaatcaagcctttatcgagcgtgtg

SEQ ID NO: 9265 - DNA, 25 bp, Saccharomyces pastorianus
aggctagtgttgtactgaccgttaa

SEQ ID NO: 9266 - DNA, 25 bp, Saccharomyces pastorianus
agcgtgtggcccctgaagaatttaa

SEQ ID NO: 9267 - DNA, 25 bp, Saccharomyces pastorianus
agatgtcgacgagcttacctgagga

SEQ ID NO: 9268 - DNA, 25 bp, Saccharomyces pastorianus
tattgtcatccacccggtttggaga

SEQ ID NO: 9269 - DNA, 25 bp, Saccharomyces pastorianus
agtgctctatcgaaacctcagggtt

SEQ ID NO: 9270 - DNA, 25 bp, Saccharomyces pastorianus
tgaatcttccaagggcgtgatcacc

SEQ ID NO: 9271 - DNA, 25 bp, Saccharomyces pastorianus
aaccctgttcatgggaatggtcaac

SEQ ID NO: 9272 - DNA, 25 bp, Saccharomyces pastorianus
tatttccgcactattgaaccctgtt

SEQ ID NO: 9273 - DNA, 25 bp, Saccharomyces pastorianus
attggcggctttggctgcagttgca

SEQ ID NO: 9274 - DNA, 25 bp, Saccharomyces pastorianus
ggagaccgttgctaccatttaacaa

SEQ ID NO: 9275 - DNA, 25 bp, Saccharomyces pastorianus
gcaagcacacgttgagggtactcct

SEQ ID NO: 9276 - DNA, 25 bp, Saccharomyces pastorianus
taacaatatcacttctcgtgggcct

SEQ ID NO: 9277 - DNA, 25 bp, Saccharomyces pastorianus
gagcctacggttacagatctgcgca

SEQ ID NO: 9278 - DNA, 25 bp, Saccharomyces pastorianus
ttagccgaagcagcctcatcagtaa

SEQ ID NO: 9279 - DNA, 25 bp, Saccharomyces pastorianus
ctgaccgggatgtcaaggttccttt

SEQ ID NO: 9280 - DNA, 25 bp, Saccharomyces pastorianus
aagatccagttctatttccgcacta

SEQ ID NO: 9281 - DNA, 25 bp, Saccharomyces pastorianus
gtttactgaacaatgctgaccggga

SEQ ID NO: 9282 - DNA, 25 bp, Saccharomyces pastorianus
ggtgctattcatttcattctacgtg

SEQ ID NO: 9283 - DNA, 25 bp, Saccharomyces pastorianus
tagggtcgttaagcgcgcacatggt

SEQ ID NO: 9284 - DNA, 25 bp, Saccharomyces pastorianus
cgcacatggtggtgttgctgccaaa

SEQ ID NO: 9285 - DNA, 25 bp, Saccharomyces pastorianus
ggtgccactgctttattgtgttaca

SEQ ID NO: 9286 - DNA, 25 bp, Saccharomyces pastorianus
actgctacatttgctggttgtgcta

SEQ ID NO: 9287 - DNA, 25 bp, Saccharomyces pastorianus
tctcatgggtcgtcatttcgttgaa

SEQ ID NO: 9288 - DNA, 25 bp, Saccharomyces pastorianus
atttcttcatacttggtgctattca

SEQ ID NO: 9289 - DNA, 25 bp, Saccharomyces pastorianus
attgtgttgggtcgactactgctac

SEQ ID NO: 9290 - DNA, 25 bp, Saccharomyces pastorianus
tgggtactactgctatctcatgggt

SEQ ID NO: 9291 - DNA, 25 bp, Saccharomyces pastorianus
gaatcttggtgttcatgtcgttatg

SEQ ID NO: 9292 - DNA, 25 bp, Saccharomyces pastorianus
tgtttaccagaaagccgtccactta

SEQ ID NO: 9293 - DNA, 25 bp, Saccharomyces pastorianus
gcaggaagcgcaacaggtacgtaaa

SEQ ID NO: 9294 - DNA, 25 bp, Saccharomyces pastorianus
tgactgatggaaatgcactactgtt

SEQ ID NO: 9295 - DNA, 25 bp, Saccharomyces pastorianus
tattcctgtggcttttttgaaggga

SEQ ID NO: 9296 - DNA, 25 bp, Saccharomyces pastorianus
gcctgcttcaagttcagagacgttt

SEQ ID NO: 9297 - DNA, 25 bp, Saccharomyces pastorianus
cttctcattccctcatcaaaatcat

SEQ ID NO: 9298 - DNA, 25 bp, Saccharomyces pastorianus
actactgttcaagtgcggtaagcat

SEQ ID NO: 9299 - DNA, 25 bp, Saccharomyces pastorianus
ggctacatgaatcaaactttctcac

SEQ ID NO: 9300 - DNA, 25 bp, Saccharomyces pastorianus
cgtttacgtgtggtagcaagggcta

SEQ ID NO: 9301 - DNA, 25 bp, Saccharomyces pastorianus
aaattacgtatcaaccatttctggt

SEQ ID NO: 9302 - DNA, 25 bp, Saccharomyces pastorianus
atttctggttgatacgcctgcttca

SEQ ID NO: 9303 - DNA, 25 bp, Saccharomyces pastorianus
ttcgagagatttttattcctgtggc

SEQ ID NO: 9304 - DNA, 25 bp, Saccharomyces pastorianus
gacgaggcccatgcgttgaagctaa

SEQ ID NO: 9305 - DNA, 25 bp, Saccharomyces pastorianus
gatttgcgttcttggatgcaccatt

SEQ ID NO: 9306 - DNA, 25 bp, Saccharomyces pastorianus
atttcaagcctttgatcgactccgg

SEQ ID NO: 9307 - DNA, 25 bp, Saccharomyces pastorianus
gaacggtgtgttcttcaattcgcct

SEQ ID NO: 9308 - DNA, 25 bp, Saccharomyces pastorianus
tcgactccggctatctaacgtatta

SEQ ID NO: 9309 - DNA, 25 bp, Saccharomyces pastorianus
actacgactgtatccttcaacgaat

SEQ ID NO: 9310 - DNA, 25 bp, Saccharomyces pastorianus
acaggcaattatccaacgtcgctag

SEQ ID NO: 9311 - DNA, 25 bp, Saccharomyces pastorianus
gagacattgcggttctgatcattgg

SEQ ID NO: 9312 - DNA, 25 bp, Saccharomyces pastorianus
tgacggctattttaactctaaccaa

SEQ ID NO: 9313 - DNA, 25 bp, Saccharomyces pastorianus
gaagtttcttggaaccctattacag

SEQ ID NO: 9314 - DNA, 25 bp, Saccharomyces pastorianus
aatcttccacgatttgggttctgat

SEQ ID NO: 9315 - DNA, 25 bp, Saccharomyces pastorianus
taggtttacaaagaatcgcgtgggt

SEQ ID NO: 9316 - DNA, 25 bp, Saccharomyces pastorianus
catcccacccgagatcattaattgg

SEQ ID NO: 9317 - DNA, 25 bp, Saccharomyces pastorianus
acacatgctgattccatatttttga

SEQ ID NO: 9318 - DNA, 25 bp, Saccharomyces pastorianus
gctcttctgcagctttaggtttaca

SEQ ID NO: 9319 - DNA, 25 bp, Saccharomyces pastorianus
ggagcatttctttcccaataaggtt

SEQ ID NO: 9320 - DNA, 25 bp, Saccharomyces pastorianus
agctggacggcgataaaaatctcac

SEQ ID NO: 9321 - DNA, 25 bp, Saccharomyces pastorianus
aggcggataatacacatgctgattc

SEQ ID NO: 9322 - DNA, 25 bp, Saccharomyces pastorianus
gaaagaatccaaaacctgggcagaa

SEQ ID NO: 9323 - DNA, 25 bp, Saccharomyces pastorianus
acaaaccacttttgcccagatgcaa

SEQ ID NO: 9324 - DNA, 25 bp, Saccharomyces pastorianus
gatgacgatgattccgatttctcta

SEQ ID NO: 9325 - DNA, 25 bp, Saccharomyces pastorianus
tttttaaagggctcttctgcagctt

SEQ ID NO: 9326 - DNA, 25 bp, Saccharomyces pastorianus
gactttgattgtcatttaccacgcc

SEQ ID NO: 9327 - DNA, 25 bp, Saccharomyces pastorianus
atcacttttggtgtcctcatgatga

SEQ ID NO: 9328 - DNA, 25 bp, Saccharomyces pastorianus
ttggccatcacttttggtgtcctca

SEQ ID NO: 9329 - DNA, 25 bp, Saccharomyces pastorianus
atctcagatgaacagttgaacacct

SEQ ID NO: 9330 - DNA, 25 bp, Saccharomyces pastorianus
acagttgaacaccttggccatcact

SEQ ID NO: 9331 - DNA, 25 bp, Saccharomyces pastorianus
gtgtcctcatgatgactttgattgt

SEQ ID NO: 9332 - DNA, 25 bp, Saccharomyces pastorianus
gaacaccttggccatcacttttggt

SEQ ID NO: 9333 - DNA, 25 bp, Saccharomyces pastorianus
agatgaacagttgaacaccttggcc

SEQ ID NO: 9334 - DNA, 25 bp, Saccharomyces pastorianus
gccatcacttttggtgtcctcatga

SEQ ID NO: 9335 - DNA, 25 bp, Saccharomyces pastorianus
tttggtgtcctcatgatgactttga

SEQ ID NO: 9336 - DNA, 25 bp, Saccharomyces pastorianus
agttgaacaccttggccatcacttt

SEQ ID NO: 9337 - DNA, 25 bp, Saccharomyces pastorianus
gaagccgctttatctgacgctatgg

SEQ ID NO: 9338 - DNA, 25 bp, Saccharomyces pastorianus
atcgaagccgctttatctgacgcta

SEQ ID NO: 9339 - DNA, 25 bp, Saccharomyces pastorianus
tttatctgacgctatggccgctttg

SEQ ID NO: 9340 - DNA, 25 bp, Saccharomyces pastorianus
gaactttcactaccgtcggtgacaa

SEQ ID NO: 9341 - DNA, 25 bp, Saccharomyces pastorianus
tttcactaccgtcggtgacaaccaa

SEQ ID NO: 9342 - DNA, 25 bp, Saccharomyces pastorianus
gagaagaactttcactaccgtcggt

SEQ ID NO: 9343 - DNA, 25 bp, Saccharomyces pastorianus
agatcgaagccgctttatctgacgc

SEQ ID NO: 9344 - DNA, 25 bp, Saccharomyces pastorianus
cgctttatctgacgctatggccgct

SEQ ID NO: 9345 - DNA, 25 bp, Saccharomyces pastorianus
aagccgctttatctgacgctatggc

SEQ ID NO: 9346 - DNA, 25 bp, Saccharomyces pastorianus
atctgacgctatggccgctttgcaa

SEQ ID NO: 9347 - DNA, 25 bp, Saccharomyces pastorianus
gaagaactttcactaccgtcggtga

SEQ ID NO: 9348 - DNA, 25 bp, Saccharomyces pastorianus
gaagccgctttatctgacgctatgg

SEQ ID NO: 9349 - DNA, 25 bp, Saccharomyces pastorianus
atcgaagccgctttatctgacgcta

SEQ ID NO: 9350 - DNA, 25 bp, Saccharomyces pastorianus
tttatctgacgctatggccgctttg

SEQ ID NO: 9351 - DNA, 25 bp, Saccharomyces pastorianus
acccaatcttgtcctccaagttgaa

SEQ ID NO: 9352 - DNA, 25 bp, Saccharomyces pastorianus
agaactttcactaccgtcggtgaca

SEQ ID NO: 9353 - DNA, 25 bp, Saccharomyces pastorianus
aaacgtcactgacccaatcttgtcc

SEQ ID NO: 9354 - DNA, 25 bp, Saccharomyces pastorianus
tttcactaccgtcggtgacaaccaa

SEQ ID NO: 9355 - DNA, 25 bp, Saccharomyces pastorianus
gagaagaactttcactaccgtcggt

SEQ ID NO: 9356 - DNA, 25 bp, Saccharomyces pastorianus
agatcgaagccgctttatctgacgc

SEQ ID NO: 9357 - DNA, 25 bp, Saccharomyces pastorianus
atctgacgctatggccgctttgcaa

SEQ ID NO: 9358 - DNA, 25 bp, Saccharomyces pastorianus
ctccaagttgaagagaggctccaag

SEQ ID NO: 9359 - DNA, 25 bp, Saccharomyces pastorianus
acgctgttcgtggaccccataagag

SEQ ID NO: 9360 - DNA, 25 bp, Saccharomyces pastorianus
aaaccgagtgtgtgctagatgttac

SEQ ID NO: 9361 - DNA, 25 bp, Saccharomyces pastorianus
aagtcaagtcttgtggaggctattg

SEQ ID NO: 9362 - DNA, 25 bp, Saccharomyces pastorianus
gaaacactgtattgcgtgtcctaga

SEQ ID NO: 9363 - DNA, 25 bp, Saccharomyces pastorianus
ttgggcataacaccagaaggcctgc

SEQ ID NO: 9364 - DNA, 25 bp, Saccharomyces pastorianus
ttcgggttcacggacgattttcaag

SEQ ID NO: 9365 - DNA, 25 bp, Saccharomyces pastorianus
gaaggcctgccgtttaaaggaccag

SEQ ID NO: 9366 - DNA, 25 bp, Saccharomyces pastorianus
ggaaagttcaatgccaattcacata

SEQ ID NO: 9367 - DNA, 25 bp, Saccharomyces pastorianus
ggattttgcaatttgacgctgttcg

SEQ ID NO: 9368 - DNA, 25 bp, Saccharomyces pastorianus
gtacagtatacggacttcacataga

SEQ ID NO: 9369 - DNA, 25 bp, Saccharomyces pastorianus
gtggccatcactgtataaactgcaa

SEQ ID NO: 9370 - DNA, 25 bp, Saccharomyces pastorianus
gagacaaagagagctgccgcccaat

SEQ ID NO: 9371 - DNA, 25 bp, Saccharomyces pastorianus
ccagcgctgtttccaagtcatttga

SEQ ID NO: 9372 - DNA, 25 bp, Saccharomyces pastorianus
gaaaactttcaagccgatccattgg

SEQ ID NO: 9373 - DNA, 25 bp, Saccharomyces pastorianus
aacaagcgggttctgccaacacttt

SEQ ID NO: 9374 - DNA, 25 bp, Saccharomyces pastorianus
aaacttccaagaccagcgtaatcct

SEQ ID NO: 9375 - DNA, 25 bp, Saccharomyces pastorianus
ggcacacctttggaaaaccgtcgat

SEQ ID NO: 9376 - DNA, 25 bp, Saccharomyces pastorianus
gtaatcaagccccatgttcaacaat

SEQ ID NO: 9377 - DNA, 25 bp, Saccharomyces pastorianus
tggcgcgtcaggtacagttcaaagt

SEQ ID NO: 9378 - DNA, 25 bp, Saccharomyces pastorianus
gaaccagtctaagccggatcattta

SEQ ID NO: 9379 - DNA, 25 bp, Saccharomyces pastorianus
aaataccaaggtttcggcagcacac

SEQ ID NO: 9380 - DNA, 25 bp, Saccharomyces pastorianus
gattcttctcgtgcaggttaccaaa

SEQ ID NO: 9381 - DNA, 25 bp, Saccharomyces pastorianus
gagattggccctagttctacaaaga

SEQ ID NO: 9382 - DNA, 25 bp, Saccharomyces pastorianus
atgattcctcatcctcaatcaattc

SEQ ID NO: 9383 - DNA, 25 bp, Saccharomyces pastorianus
gaactctccagatttaccagaacgg

SEQ ID NO: 9384 - DNA, 25 bp, Saccharomyces pastorianus
gatcaaatccgaatcatcgccaaag

SEQ ID NO: 9385 - DNA, 25 bp, Saccharomyces pastorianus
tactggacagttcaactcttctcaa

SEQ ID NO: 9386 - DNA, 25 bp, Saccharomyces pastorianus
gaaaggatcttagccagacaacaaa

SEQ ID NO: 9387 - DNA, 25 bp, Saccharomyces pastorianus
ttagaagctcaatcggcaaaggaat

SEQ ID NO: 9388 - DNA, 25 bp, Saccharomyces pastorianus
gtcacctgttagacagatgggccag

SEQ ID NO: 9389 - DNA, 25 bp, Saccharomyces pastorianus
atcgccaaagtttatgaactctcca

SEQ ID NO: 9390 - DNA, 25 bp, Saccharomyces pastorianus
gccaacaatttgagaccagacacac

SEQ ID NO: 9391 - DNA, 25 bp, Saccharomyces pastorianus
ctcttctcaaaccttagccaacaat

SEQ ID NO: 9392 - DNA, 25 bp, Saccharomyces pastorianus
aagaatcatcttctactgctgcttc

SEQ ID NO: 9393 - DNA, 25 bp, Saccharomyces pastorianus
tatggtagtcaattgcctcatcctc

SEQ ID NO: 9394 - DNA, 25 bp, Saccharomyces pastorianus
gatactactggactaccacaacaga

SEQ ID NO: 9395 - DNA, 25 bp, Saccharomyces pastorianus
ttattggctaaagtgcctccaccgg

SEQ ID NO: 9396 - DNA, 25 bp, Saccharomyces pastorianus
ctgcttctgttttcccgaagaataa

SEQ ID NO: 9397 - DNA, 25 bp, Saccharomyces pastorianus
ctcatcctcgtccttcattaaataa

SEQ ID NO: 9398 - DNA, 25 bp, Saccharomyces pastorianus
cagggattccgcaggttatctttca

SEQ ID NO: 9399 - DNA, 25 bp, Saccharomyces pastorianus
aagatgtcagctttgccactagggc

SEQ ID NO: 9400 - DNA, 25 bp, Saccharomyces pastorianus
ggctgacttgtcattattggctaaa

SEQ ID NO: 9401 - DNA, 25 bp, Saccharomyces pastorianus
aaatgaacacgcacggccatggcaa

SEQ ID NO: 9402 - DNA, 25 bp, Saccharomyces pastorianus
gtgggtaatttaccgcctgatgcaa

SEQ ID NO: 9403 - DNA, 25 bp, Saccharomyces pastorianus
gttacaccactaatgagcgcactgc

SEQ ID NO: 9404 - DNA, 25 bp, Saccharomyces pastorianus
gcagcaattgcctttgccggactca

SEQ ID NO: 9405 - DNA, 25 bp, Saccharomyces pastorianus
atcaggtgggcattcctatgaccaa

SEQ ID NO: 9406 - DNA, 25 bp, Saccharomyces pastorianus
tgtaactcttcccaagcagcaattg

SEQ ID NO: 9407 - DNA, 25 bp, Saccharomyces pastorianus
acacgctatgctactaatgatcctc

SEQ ID NO: 9408 - DNA, 25 bp, Saccharomyces pastorianus
tactaccacccctaatgcagatgtg

SEQ ID NO: 9409 - DNA, 25 bp, Saccharomyces pastorianus
gaactggtgcttctatgggaacgaa

SEQ ID NO: 9410 - DNA, 25 bp, Saccharomyces pastorianus
gcaaataccccaaacgctgtaacgg

SEQ ID NO: 9411 - DNA, 25 bp, Saccharomyces pastorianus
ggaccagcatacttattctaccgac

SEQ ID NO: 9412 - DNA, 25 bp, Saccharomyces pastorianus
ccggactcacttttttgctattctt

SEQ ID NO: 9413 - DNA, 25 bp, Saccharomyces pastorianus
agatcctaacgctgacacacgctat

SEQ ID NO: 9414 - DNA, 25 bp, Saccharomyces pastorianus
gtcttaggtctatttatggcatcca

SEQ ID NO: 9415 - DNA, 25 bp, Saccharomyces pastorianus
gggatatcaaggaccgttcagcaaa

SEQ ID NO: 9416 - DNA, 25 bp, Saccharomyces pastorianus
tcactggcgctggattggcgtataa

SEQ ID NO: 9417 - DNA, 25 bp, Saccharomyces pastorianus
ttcgcgcttggtggtgtcttaggtc

SEQ ID NO: 9418 - DNA, 25 bp, Saccharomyces pastorianus
aagtccacctcaaaagaagccctat

SEQ ID NO: 9419 - DNA, 25 bp, Saccharomyces pastorianus
tggcatccatggcttatgacacacc

SEQ ID NO: 9420 - DNA, 25 bp, Saccharomyces pastorianus
gtatacgggatttggcctagaacaa

SEQ ID NO: 9421 - DNA, 25 bp, Saccharomyces pastorianus
tttcggctgcaattgatacgtacat

SEQ ID NO: 9422 - DNA, 25 bp, Saccharomyces pastorianus
tggtgctggttttgctgccttttcg

SEQ ID NO: 9423 - DNA, 25 bp, Saccharomyces pastorianus
gcaactacagctacggcttcaggaa

SEQ ID NO: 9424 - DNA, 25 bp, Saccharomyces pastorianus
aacagcaggttttttcactggcgct

SEQ ID NO: 9425 - DNA, 25 bp, Saccharomyces pastorianus
tgggccatcgggataatgttcttct

SEQ ID NO: 9426 - DNA, 25 bp, Saccharomyces pastorianus
gacccatacttgtcacctgaggttt

SEQ ID NO: 9427 - DNA, 25 bp, Saccharomyces pastorianus
tgatatgggccctaatttccttcta

SEQ ID NO: 9428 - DNA, 25 bp, Saccharomyces pastorianus
atgttcttctgcatgatcaccagga

SEQ ID NO: 9429 - DNA, 25 bp, Saccharomyces pastorianus
aattgatcgattttggtgcctctag

SEQ ID NO: 9430 - DNA, 25 bp, Saccharomyces pastorianus
ggatgcgtcacctcgaattataaac

SEQ ID NO: 9431 - DNA, 25 bp, Saccharomyces pastorianus
acggcattgtcggtagtgacccata

SEQ ID NO: 9432 - DNA, 25 bp, Saccharomyces pastorianus
agagcgctagacgtttgggccatcg

SEQ ID NO: 9433 - DNA, 25 bp, Saccharomyces pastorianus
aaagacctagtgacaagacccgcca

SEQ ID NO: 9434 - DNA, 25 bp, Saccharomyces pastorianus
gaaaagtacgatcccagagcgctag

SEQ ID NO: 9435 - DNA, 25 bp, Saccharomyces pastorianus
gcagatactggatatttcgcccttc

SEQ ID NO: 9436 - DNA, 25 bp, Saccharomyces pastorianus
agatgatcaccgacgacaacgagaa

SEQ ID NO: 9437 - DNA, 25 bp, Saccharomyces pastorianus
ttgctgaattacaaggccacttcaa

SEQ ID NO: 9438 - DNA, 25 bp, Saccharomyces pastorianus
aaggctaaaattaccgcttcagcta

SEQ ID NO: 9439 - DNA, 25 bp, Saccharomyces pastorianus
gaaaatcaacgtggagctaaccgtt

SEQ ID NO: 9440 - DNA, 25 bp, Saccharomyces pastorianus
ttgctttcttggaatttgacgccga

SEQ ID NO: 9441 - DNA, 25 bp, Saccharomyces pastorianus
caggttcattgtttttgtcggtagt

SEQ ID NO: 9442 - DNA, 25 bp, Saccharomyces pastorianus
gccacaaccggttcggataagcctg

SEQ ID NO: 9443 - DNA, 25 bp, Saccharomyces pastorianus
agcacgggactttgctgaaggaaaa

SEQ ID NO: 9444 - DNA, 25 bp, Saccharomyces pastorianus
gatattgccttattgcagcacggga

SEQ ID NO: 9445 - DNA, 25 bp, Saccharomyces pastorianus
agttcaccggaccaaattcgtctca

SEQ ID NO: 9446 - DNA, 25 bp, Saccharomyces pastorianus
ttgacgccgataaagatcgcagcgg

SEQ ID NO: 9447 - DNA, 25 bp, Saccharomyces pastorianus
attggtcatgttttccggtgttatc

SEQ ID NO: 9448 - DNA, 25 bp, Saccharomyces pastorianus
atacgtgctggctatttgtgtcttt

SEQ ID NO: 9449 - DNA, 25 bp, Saccharomyces pastorianus
tccgaaaatcaagggctggccgtca

SEQ ID NO: 9450 - DNA, 25 bp, Saccharomyces pastorianus
gccgtcattgcttcttctaacatta

SEQ ID NO: 9451 - DNA, 25 bp, Saccharomyces pastorianus
catcggttcggccatgatattatcg

SEQ ID NO: 9452 - DNA, 25 bp, Saccharomyces pastorianus
ggccaccacctttctaatgggtgtt

SEQ ID NO: 9453 - DNA, 25 bp, Saccharomyces pastorianus
ccatacgattaccaccttttattca

SEQ ID NO: 9454 - DNA, 25 bp, Saccharomyces pastorianus
tatcaaatcctgcatgacactccaa

SEQ ID NO: 9455 - DNA, 25 bp, Saccharomyces pastorianus
aaggccaatcgttattgccctgtgt

SEQ ID NO: 9456 - DNA, 25 bp, Saccharomyces pastorianus
attcagatctttgttccatcggttc

SEQ ID NO: 9457 - DNA, 25 bp, Saccharomyces pastorianus
attgccctgtgtgtcattgcattaa

SEQ ID NO: 9458 - DNA, 25 bp, Saccharomyces pastorianus
tagaaggctctcctatctgtcatca

SEQ ID NO: 9459 - DNA, 25 bp, Saccharomyces pastorianus
tttaccgccaattgttgccaggagc

SEQ ID NO: 9460 - DNA, 25 bp, Saccharomyces pastorianus
gagatgctaagctttaccgccaatt

SEQ ID NO: 9461 - DNA, 25 bp, Saccharomyces pastorianus
tacgggtgtcatagttggctccaca

SEQ ID NO: 9462 - DNA, 25 bp, Saccharomyces pastorianus
actattccatgcagtaccatcactg

SEQ ID NO: 9463 - DNA, 25 bp, Saccharomyces pastorianus
ttggctccacagttgggattatcat

SEQ ID NO: 9464 - DNA, 25 bp, Saccharomyces pastorianus
tgagtctacagggtcatcgattggg

SEQ ID NO: 9465 - DNA, 25 bp, Saccharomyces pastorianus
gagaaccaatgctaaacccgtttcg

SEQ ID NO: 9466 - DNA, 25 bp, Saccharomyces pastorianus
caaatgccccactaacttttactat

SEQ ID NO: 9467 - DNA, 25 bp, Saccharomyces pastorianus
ggaaacaagttccaacgcgtccact

SEQ ID NO: 9468 - DNA, 25 bp, Saccharomyces pastorianus
tatgcagcgcatccttattatggta

SEQ ID NO: 9469 - DNA, 25 bp, Saccharomyces pastorianus
aaaggccgtagttcaccaatcagaa

SEQ ID NO: 9470 - DNA, 25 bp, Saccharomyces pastorianus
gccgtgcaattcctacaggcatatg

SEQ ID NO: 9471 - DNA, 25 bp, Saccharomyces pastorianus
atttcgtaatcttgggctcatggtg

SEQ ID NO: 9472 - DNA, 25 bp, Saccharomyces pastorianus
aggaactaacgtctcaaatggctga

SEQ ID NO: 9473 - DNA, 25 bp, Saccharomyces pastorianus
tgcccctttgtcattggattcacat

SEQ ID NO: 9474 - DNA, 25 bp, Saccharomyces pastorianus
gagtaaaaccggagtctgcgctgcc

SEQ ID NO: 9475 - DNA, 25 bp, Saccharomyces pastorianus
gggaaccaagcctcgaaactactat

SEQ ID NO: 9476 - DNA, 25 bp, Saccharomyces pastorianus
taaaaatcacccgttcccaattgcg

SEQ ID NO: 9477 - DNA, 25 bp, Saccharomyces pastorianus
gcgttatcatggcatatcttggcta

SEQ ID NO: 9478 - DNA, 25 bp, Saccharomyces pastorianus
tgctatattaacaaggctgcccctg

SEQ ID NO: 9479 - DNA, 25 bp, Saccharomyces pastorianus
gaatcctgctagaagcttggcaaaa

SEQ ID NO: 9480 - DNA, 25 bp, Saccharomyces pastorianus
actgctactaaaggccattgtcgtt

SEQ ID NO: 9481 - DNA, 25 bp, Saccharomyces pastorianus
gaccctaagtctccataccaatgta

SEQ ID NO: 9482 - DNA, 25 bp, Saccharomyces pastorianus
gaatgccactatatgctgtctatca

SEQ ID NO: 9483 - DNA, 25 bp, Saccharomyces pastorianus
ataccaatgtatcatcctggcatcc

SEQ ID NO: 9484 - DNA, 25 bp, Saccharomyces pastorianus
atcgtgggcacctcttctgttagaa

SEQ ID NO: 9485 - DNA, 25 bp, Saccharomyces pastorianus
gatatttgcgatctgaatgccacta

SEQ ID NO: 9486 - DNA, 25 bp, Saccharomyces pastorianus
agaatcactcaacggtttcactcag

SEQ ID NO: 9487 - DNA, 25 bp, Saccharomyces pastorianus
tgttccgtccccattggtgtagaaa

SEQ ID NO: 9488 - DNA, 25 bp, Saccharomyces pastorianus
atgctgtctatcagaacgtgccctg

SEQ ID NO: 9489 - DNA, 25 bp, Saccharomyces pastorianus
gattgccgacggtgccaagaaaatt

SEQ ID NO: 9490 - DNA, 25 bp, Saccharomyces pastorianus
aggaagattccatggcttgcggtaa

SEQ ID NO: 9491 - DNA, 25 bp, Saccharomyces pastorianus
ataagccattccctatcagcaaaaa

SEQ ID NO: 9492 - DNA, 25 bp, Saccharomyces pastorianus
ctactcaacctctgtaagcggcaag

SEQ ID NO: 9493 - DNA, 25 bp, Saccharomyces pastorianus
aggacagcttcccaacatctcaaaa

SEQ ID NO: 9494 - DNA, 25 bp, Saccharomyces pastorianus
gagactttagcaagcctgacgtcaa

SEQ ID NO: 9495 - DNA, 25 bp, Saccharomyces pastorianus
agaactagaggctcaccagcgtgaa

SEQ ID NO: 9496 - DNA, 25 bp, Saccharomyces pastorianus
gattccacagaaactactccaaggt

SEQ ID NO: 9497 - DNA, 25 bp, Saccharomyces pastorianus
tgaagaacatgctcgtccacagatt

SEQ ID NO: 9498 - DNA, 25 bp, Saccharomyces pastorianus
aattgaccgtgctattgacagagtg

SEQ ID NO: 9499 - DNA, 25 bp, Saccharomyces pastorianus
gaggccagtagcaccctaaaatctg

SEQ ID NO: 9500 - DNA, 25 bp, Saccharomyces pastorianus
agacatatactcgacttctcagcac

SEQ ID NO: 9501 - DNA, 25 bp, Saccharomyces pastorianus
gcggcaaggatagctcttcaacctc

SEQ ID NO: 9502 - DNA, 25 bp, Saccharomyces pastorianus
tattgcaaatgctcagcggtctcgg

SEQ ID NO: 9503 - DNA, 25 bp, Saccharomyces pastorianus
gatacgaaccctcaacaagtggcga

SEQ ID NO: 9504 - DNA, 25 bp, Saccharomyces pastorianus
tatttgagaaactcgcatctgcccg

SEQ ID NO: 9505 - DNA, 25 bp, Saccharomyces pastorianus
gacggagctacaatcccagatggtt

SEQ ID NO: 9506 - DNA, 25 bp, Saccharomyces pastorianus
agagctccgtagttctatttgtcca

SEQ ID NO: 9507 - DNA, 25 bp, Saccharomyces pastorianus
gacaagctgttggtgatcggcgcca

SEQ ID NO: 9508 - DNA, 25 bp, Saccharomyces pastorianus
gaatgcgctctacctgacattgcaa

SEQ ID NO: 9509 - DNA, 25 bp, Saccharomyces pastorianus
gatttcaagactctccctacaaaga

SEQ ID NO: 9510 - DNA, 25 bp, Saccharomyces pastorianus
gtctcggtttagttcgtacgctgga

SEQ ID NO: 9511 - DNA, 25 bp, Saccharomyces pastorianus
gaaactgctgaagctcttgcaatca

SEQ ID NO: 9512 - DNA, 25 bp, Saccharomyces pastorianus
acggccaccattacgttcgaagata

SEQ ID NO: 9513 - DNA, 25 bp, Saccharomyces pastorianus
gggcggtgtcgtttacactattact

SEQ ID NO: 9514 - DNA, 25 bp, Saccharomyces pastorianus
tatgatagatttgtcacctgccttc

SEQ ID NO: 9515 - DNA, 25 bp, Saccharomyces pastorianus
ttccagatccccatttcaaacagag

SEQ ID NO: 9516 - DNA, 25 bp, Saccharomyces pastorianus
gtaaagcacctggaagagcaccctt

SEQ ID NO: 9517 - DNA, 25 bp, Saccharomyces pastorianus
aagatgcagaaaccggccagatgac

SEQ ID NO: 9518 - DNA, 25 bp, Saccharomyces pastorianus
aacactctctctagacatggtttcc

SEQ ID NO: 9519 - DNA, 25 bp, Saccharomyces pastorianus
aagggccagctatccaagatgtttt

SEQ ID NO: 9520 - DNA, 25 bp, Saccharomyces pastorianus
gaaatccgtgtacaagtcaccaact

SEQ ID NO: 9521 - DNA, 25 bp, Saccharomyces pastorianus
gatgtttttctgttttccagatccc

SEQ ID NO: 9522 - DNA, 25 bp, Saccharomyces pastorianus
aagagcaccctttgtttgaacgatt

SEQ ID NO: 9523 - DNA, 25 bp, Saccharomyces pastorianus
gaaggtaactattgccgatatcggc

SEQ ID NO: 9524 - DNA, 25 bp, Saccharomyces pastorianus
catggacttagttgactcggagcta

SEQ ID NO: 9525 - DNA, 25 bp, Saccharomyces pastorianus
gtcatatactccgttttcattcgcg

SEQ ID NO: 9526 - DNA, 25 bp, Saccharomyces pastorianus
ttttgggccttcgttggatctacaa

SEQ ID NO: 9527 - DNA, 25 bp, Saccharomyces pastorianus
taagcgtttctgacattaccatgga

SEQ ID NO: 9528 - DNA, 25 bp, Saccharomyces pastorianus
tgttggaccgtatcagccggcataa

SEQ ID NO: 9529 - DNA, 25 bp, Saccharomyces pastorianus
tgaagtgtctttgctgtccaacaga

SEQ ID NO: 9530 - DNA, 25 bp, Saccharomyces pastorianus
atctcatgtcccaaactatgctgtt

SEQ ID NO: 9531 - DNA, 25 bp, Saccharomyces pastorianus
ggctgagttatgctcggtcaacgaa

SEQ ID NO: 9532 - DNA, 25 bp, Saccharomyces pastorianus
atacctcactccaacaagacatttt

SEQ ID NO: 9533 - DNA, 25 bp, Saccharomyces pastorianus
ggagattcactcgaacttagctaaa

SEQ ID NO: 9534 - DNA, 25 bp, Saccharomyces pastorianus
acagctagtgggacctgaaccagat

SEQ ID NO: 9535 - DNA, 25 bp, Saccharomyces pastorianus
ggtttgtttgcctcgaaattgttca

SEQ ID NO: 9536 - DNA, 25 bp, Saccharomyces pastorianus
aatgccgcttggttggttttcgcca

SEQ ID NO: 9537 - DNA, 25 bp, Saccharomyces pastorianus
tgccgcttggttggttttcgccaac

SEQ ID NO: 9538 - DNA, 25 bp, Saccharomyces pastorianus
agttgggtgaggtcatcactaccat

SEQ ID NO: 9539 - DNA, 25 bp, Saccharomyces pastorianus
gcctcgaaattgttcagtaaccttt

SEQ ID NO: 9540 - DNA, 25 bp, Saccharomyces pastorianus
gtttgcctcgaaattgttcagtaac

SEQ ID NO: 9541 - DNA, 25 bp, Saccharomyces pastorianus
caagttgaagttgggtgaggtcatc

SEQ ID NO: 9542 - DNA, 25 bp, Saccharomyces pastorianus
ggttttcgccaacaaacaagatttg

SEQ ID NO: 9543 - DNA, 25 bp, Saccharomyces pastorianus
tcgaaattgttcagtaacctttttg

SEQ ID NO: 9544 - DNA, 25 bp, Saccharomyces pastorianus
tttgtttgcctcgaaattgttcagt

SEQ ID NO: 9545 - DNA, 25 bp, Saccharomyces pastorianus
cactgaaggtgttattttcgttgtt

SEQ ID NO: 9546 - DNA, 25 bp, Saccharomyces pastorianus
ggtttgtttgcctcgaaattgttca

SEQ ID NO: 9547 - DNA, 25 bp, Saccharomyces pastorianus
aatgccgcttggttggttttcgcca

SEQ ID NO: 9548 - DNA, 25 bp, Saccharomyces pastorianus
tgccgcttggttggttttcgccaac

SEQ ID NO: 9549 - DNA, 25 bp, Saccharomyces pastorianus
agttgggtgaggtcatcactaccat

SEQ ID NO: 9550 - DNA, 25 bp, Saccharomyces pastorianus
gcctcgaaattgttcagtaaccttt

SEQ ID NO: 9551 - DNA, 25 bp, Saccharomyces pastorianus
gtttgcctcgaaattgttcagtaac

SEQ ID NO: 9552 - DNA, 25 bp, Saccharomyces pastorianus
caagttgaagttgggtgaggtcatc

SEQ ID NO: 9553 - DNA, 25 bp, Saccharomyces pastorianus
ggttttcgccaacaaacaagatttg

SEQ ID NO: 9554 - DNA, 25 bp, Saccharomyces pastorianus
aatgcgtattcttatggtgggccta

SEQ ID NO: 9555 - DNA, 25 bp, Saccharomyces pastorianus
tcgaaattgttcagtaacctttttg

SEQ ID NO: 9556 - DNA, 25 bp, Saccharomyces pastorianus
cactgaaggtgttattttcgttgtt

SEQ ID NO: 9557 - DNA, 25 bp, Saccharomyces pastorianus
aaacgtggtgaccatcttcagcgct

SEQ ID NO: 9558 - DNA, 25 bp, Saccharomyces pastorianus
tgaccatcttcagcgctccgaatta

SEQ ID NO: 9559 - DNA, 25 bp, Saccharomyces pastorianus
tagcaagggctcatcaattggtcat

SEQ ID NO: 9560 - DNA, 25 bp, Saccharomyces pastorianus
cttcagcgctccgaattactgttat

SEQ ID NO: 9561 - DNA, 25 bp, Saccharomyces pastorianus
aagggctcatcaattggtcatggac

SEQ ID NO: 9562 - DNA, 25 bp, Saccharomyces pastorianus
cagcgctccgaattactgttataga

SEQ ID NO: 9563 - DNA, 25 bp, Saccharomyces pastorianus
tctatcactgatagcaagggctcat

SEQ ID NO: 9564 - DNA, 25 bp, Saccharomyces pastorianus
atcttcagcgctccgaattactgtt

SEQ ID NO: 9565 - DNA, 25 bp, Saccharomyces pastorianus
catggacggttatgcttggtctcac

SEQ ID NO: 9566 - DNA, 25 bp, Saccharomyces pastorianus
gtctcaccagcaaaacgtggtgacc

SEQ ID NO: 9567 - DNA, 25 bp, Saccharomyces pastorianus
ggctcatcaattggtcatggacggt

SEQ ID NO: 9568 - DNA, 25 bp, Saccharomyces pastorianus
atggcggtctttcgcccatgataga

SEQ ID NO: 9569 - DNA, 25 bp, Saccharomyces pastorianus
gagaggtaatcacgagtcgagacaa

SEQ ID NO: 9570 - DNA, 25 bp, Saccharomyces pastorianus
gatctgtttgattatttccccatta

SEQ ID NO: 9571 - DNA, 25 bp, Saccharomyces pastorianus
tctttcgcccatgatagagaccata

SEQ ID NO: 9572 - DNA, 25 bp, Saccharomyces pastorianus
gtttaaggaaatacggcagtgcaaa

SEQ ID NO: 9573 - DNA, 25 bp, Saccharomyces pastorianus
accatagatcaagtcagagagctga

SEQ ID NO: 9574 - DNA, 25 bp, Saccharomyces pastorianus
gaaggccccatgtgtgacctcctat

SEQ ID NO: 9575 - DNA, 25 bp, Saccharomyces pastorianus
tcagatacccgcatagaatcactat

SEQ ID NO: 9576 - DNA, 25 bp, Saccharomyces pastorianus
agattttctgtctacatggcggtct

SEQ ID NO: 9577 - DNA, 25 bp, Saccharomyces pastorianus
gagtcgagacaaatcacccaagtat

SEQ ID NO: 9578 - DNA, 25 bp, Saccharomyces pastorianus
gattatttccccattacagctttag

SEQ ID NO: 9579 - DNA, 25 bp, Saccharomyces pastorianus
gctaagtggagaaagaagagaacta

SEQ ID NO: 9580 - DNA, 25 bp, Saccharomyces pastorianus
agctaagtggagaaagaagagaact

SEQ ID NO: 9581 - DNA, 25 bp, Saccharomyces pastorianus
gaaagaagagaactagaagacttaa

SEQ ID NO: 9582 - DNA, 25 bp, Saccharomyces pastorianus
atgagagctaagtggagaaagaaga

SEQ ID NO: 9583 - DNA, 25 bp, Saccharomyces pastorianus
gaagagaactagaagacttaagaga

SEQ ID NO: 9584 - DNA, 25 bp, Saccharomyces pastorianus
gagaaagaagagaactagaagactt

SEQ ID NO: 9585 - DNA, 25 bp, Saccharomyces pastorianus
ggagaaagaagagaactagaagact

SEQ ID NO: 9586 - DNA, 25 bp, Saccharomyces pastorianus
aagaagagaactagaagacttaaga

SEQ ID NO: 9587 - DNA, 25 bp, Saccharomyces pastorianus
aaagaagagaactagaagacttaag

SEQ ID NO: 9588 - DNA, 25 bp, Saccharomyces pastorianus
agaagagaactagaagacttaagag

SEQ ID NO: 9589 - DNA, 25 bp, Saccharomyces pastorianus
gagctaagtggagaaagaagagaac

SEQ ID NO: 9590 - DNA, 25 bp, Saccharomyces pastorianus
cgtgagaaggagcaattgcgcaatt

SEQ ID NO: 9591 - DNA, 25 bp, Saccharomyces pastorianus
tacagcgtggagtggccgctagatt

SEQ ID NO: 9592 - DNA, 25 bp, Saccharomyces pastorianus
aagagccacagaggactactttgtc

SEQ ID NO: 9593 - DNA, 25 bp, Saccharomyces pastorianus
gaggactcctttgtcaagagagaaa

SEQ ID NO: 9594 - DNA, 25 bp, Saccharomyces pastorianus
ggttcagaggactcctttgtcaaga

SEQ ID NO: 9595 - DNA, 25 bp, Saccharomyces pastorianus
agagggtccggttcagaggactcct

SEQ ID NO: 9596 - DNA, 25 bp, Saccharomyces pastorianus
ttgcgcaatttgaaggaccagctgg

SEQ ID NO: 9597 - DNA, 25 bp, Saccharomyces pastorianus
tggccgctagattctactctgaggg

SEQ ID NO: 9598 - DNA, 25 bp, Saccharomyces pastorianus
gactactttgtcagacagcgtgaga

SEQ ID NO: 9599 - DNA, 25 bp, Saccharomyces pastorianus
aagcaacgaaagaagatcgactctt

SEQ ID NO: 9600 - DNA, 25 bp, Saccharomyces pastorianus
gctcattgcaactacagcgtggagt

SEQ ID NO: 9601 - DNA, 25 bp, Saccharomyces pastorianus
tttcatggagtttagccgtcttctt

SEQ ID NO: 9602 - DNA, 25 bp, Saccharomyces pastorianus
acgattcattcgtactcggagtaat

SEQ ID NO: 9603 - DNA, 25 bp, Saccharomyces pastorianus
tcttgatggtcttggtggtcggcaa

SEQ ID NO: 9604 - DNA, 25 bp, Saccharomyces pastorianus
attttgtttatgttcgcggtcacga

SEQ ID NO: 9605 - DNA, 25 bp, Saccharomyces pastorianus
gggcgactccaccttatattatggt

SEQ ID NO: 9606 - DNA, 25 bp, Saccharomyces pastorianus
gagtcgtgattatcagcatccgctg

SEQ ID NO: 9607 - DNA, 25 bp, Saccharomyces pastorianus
ggcgcgggccattttgcattgagtc

SEQ ID NO: 9608 - DNA, 25 bp, Saccharomyces pastorianus
taatgaacccgccttcttgaggttt

SEQ ID NO: 9609 - DNA, 25 bp, Saccharomyces pastorianus
ttcgcggtcacgaggacttgtttac

SEQ ID NO: 9610 - DNA, 25 bp, Saccharomyces pastorianus
gaggatgaccaagacgctgccaaga

SEQ ID NO: 9611 - DNA, 25 bp, Saccharomyces pastorianus
gagctggacgactggttcaatgatt

SEQ ID NO: 9612 - DNA, 25 bp, Saccharomyces pastorianus
taagagcgtttcaaaggcctcccac

SEQ ID NO: 9613 - DNA, 25 bp, Saccharomyces pastorianus
gagccaatatcttcaacatcctagt

SEQ ID NO: 9614 - DNA, 25 bp, Saccharomyces pastorianus
gaaggagattccctctgtattagaa

SEQ ID NO: 9615 - DNA, 25 bp, Saccharomyces pastorianus
gcgcttattgactttgctcgagaga

SEQ ID NO: 9616 - DNA, 25 bp, Saccharomyces pastorianus
ctagtgattcggattcacagcataa

SEQ ID NO: 9617 - DNA, 25 bp, Saccharomyces pastorianus
gaggctgctgctggacagcgcttat

SEQ ID NO: 9618 - DNA, 25 bp, Saccharomyces pastorianus
catgtatgcttggaggacggccgaa

SEQ ID NO: 9619 - DNA, 25 bp, Saccharomyces pastorianus
gaatgttgagcaaggctgtgctgac

SEQ ID NO: 9620 - DNA, 25 bp, Saccharomyces pastorianus
gggctcgtctagatttaggcatatc

SEQ ID NO: 9621 - DNA, 25 bp, Saccharomyces pastorianus
gggtacaccattgggctcgtctaga

SEQ ID NO: 9622 - DNA, 25 bp, Saccharomyces pastorianus
ggacggccgaattacctagtgattc

SEQ ID NO: 9623 - DNA, 25 bp, Saccharomyces pastorianus
aaattacagctatgcgactcactaa

SEQ ID NO: 9624 - DNA, 25 bp, Saccharomyces pastorianus
gagtttcttaacgattccaggctag

SEQ ID NO: 9625 - DNA, 25 bp, Saccharomyces pastorianus
gatggtggtctcaatacactgaaga

SEQ ID NO: 9626 - DNA, 25 bp, Saccharomyces pastorianus
gattctttgtgttttatactggaca

SEQ ID NO: 9627 - DNA, 25 bp, Saccharomyces pastorianus
agaatgccaagggtacagtccggat

SEQ ID NO: 9628 - DNA, 25 bp, Saccharomyces pastorianus
gtttccactttgacgtttcatttag

SEQ ID NO: 9629 - DNA, 25 bp, Saccharomyces pastorianus
gacagttcaatttcagcaggcgtta

SEQ ID NO: 9630 - DNA, 25 bp, Saccharomyces pastorianus
gtacagtccggataataccttatga

SEQ ID NO: 9631 - DNA, 25 bp, Saccharomyces pastorianus
gcaggcgttaggtgatttatgttcc

SEQ ID NO: 9632 - DNA, 25 bp, Saccharomyces pastorianus
gcggatccgaacaatgtttccactt

SEQ ID NO: 9633 - DNA, 25 bp, Saccharomyces pastorianus
actgaagaggaaattcggctacgac

SEQ ID NO: 9634 - DNA, 25 bp, Saccharomyces pastorianus
tggttccaacctatcgaccgatcta

SEQ ID NO: 9635 - DNA, 25 bp, Saccharomyces pastorianus
gttccagatataactcttccgctta

SEQ ID NO: 9636 - DNA, 25 bp, Saccharomyces pastorianus
gtaaatgtctcctcgatatctgaaa

SEQ ID NO: 9637 - DNA, 25 bp, Saccharomyces pastorianus
agaggtgagaccctttcaattaata

SEQ ID NO: 9638 - DNA, 25 bp, Saccharomyces pastorianus
aatgacattcccaactcttccaatt

SEQ ID NO: 9639 - DNA, 25 bp, Saccharomyces pastorianus
gatgaagagcctctaccgaaacctt

SEQ ID NO: 9640 - DNA, 25 bp, Saccharomyces pastorianus
gaacgatcattctcacagtaacaga

SEQ ID NO: 9641 - DNA, 25 bp, Saccharomyces pastorianus
tgtcattcagcccaccataagaggt

SEQ ID NO: 9642 - DNA, 25 bp, Saccharomyces pastorianus
gtagagtatcgaatttccaccctcc

SEQ ID NO: 9643 - DNA, 25 bp, Saccharomyces pastorianus
agtccttccgtttcataccatatat

SEQ ID NO: 9644 - DNA, 25 bp, Saccharomyces pastorianus
atgggagcgcattcactggttccaa

SEQ ID NO: 9645 - DNA, 25 bp, Saccharomyces pastorianus
gaaaggtcgccttatggtccgtgtt

SEQ ID NO: 9646 - DNA, 25 bp, Saccharomyces pastorianus
gattggcggcagatctacagacatc

SEQ ID NO: 9647 - DNA, 25 bp, Saccharomyces pastorianus
aagtatggaccaccgacgtggctgt

SEQ ID NO: 9648 - DNA, 25 bp, Saccharomyces pastorianus
ggtaacttccatgccttcattgtat

SEQ ID NO: 9649 - DNA, 25 bp, Saccharomyces pastorianus
tgaagtcaaagctgttgcccaacaa

SEQ ID NO: 9650 - DNA, 25 bp, Saccharomyces pastorianus
attgatcaacgccatcgtcggtcat

SEQ ID NO: 9651 - DNA, 25 bp, Saccharomyces pastorianus
ggtccgtgttagacgccgacaagag

SEQ ID NO: 9652 - DNA, 25 bp, Saccharomyces pastorianus
tacagacatcgtcaacgccgttgtg

SEQ ID NO: 9653 - DNA, 25 bp, Saccharomyces pastorianus
agagccctggatgccgaaggtacat

SEQ ID NO: 9654 - DNA, 25 bp, Saccharomyces pastorianus
aactggccattgatccgaagagaat

SEQ ID NO: 9655 - DNA, 25 bp, Saccharomyces pastorianus
gtcccactatctcagttcgacaaag

SEQ ID NO: 9656 - DNA, 25 bp, Saccharomyces pastorianus
aacgacgaacataacttggtgcata

SEQ ID NO: 9657 - DNA, 25 bp, Saccharomyces pastorianus
gaaatagaccctttgatcggaatca

SEQ ID NO: 9658 - DNA, 25 bp, Saccharomyces pastorianus
ggcggactcgccgatcgaagaaata

SEQ ID NO: 9659 - DNA, 25 bp, Saccharomyces pastorianus
gttggacacggccattggaactttt

SEQ ID NO: 9660 - DNA, 25 bp, Saccharomyces pastorianus
ctattcttttattactgggccaggt

SEQ ID NO: 9661 - DNA, 25 bp, Saccharomyces pastorianus
atctccacgttgatgtttttccaga

SEQ ID NO: 9662 - DNA, 25 bp, Saccharomyces pastorianus
gctgatggcgttggactgtttagac

SEQ ID NO: 9663 - DNA, 25 bp, Saccharomyces pastorianus
aaattacagccttcgctgatggcgt

SEQ ID NO: 9664 - DNA, 25 bp, Saccharomyces pastorianus
gtcagctttatagagccggcggact

SEQ ID NO: 9665 - DNA, 25 bp, Saccharomyces pastorianus
gttcgctggagttgcaaatactgct

SEQ ID NO: 9666 - DNA, 25 bp, Saccharomyces pastorianus
ttacggtgcgtgtctcgggatcgac

SEQ ID NO: 9667 - DNA, 25 bp, Saccharomyces pastorianus
ggagcaacatccagacggtgtcacg

SEQ ID NO: 9668 - DNA, 25 bp, Saccharomyces pastorianus
tggtaagtcctccacatgcgagtta

SEQ ID NO: 9669 - DNA, 25 bp, Saccharomyces pastorianus
aatcaagacggtatgggcccaacat

SEQ ID NO: 9670 - DNA, 25 bp, Saccharomyces pastorianus
aacagcattgtcgactggcatgtaa

SEQ ID NO: 9671 - DNA, 25 bp, Saccharomyces pastorianus
acaacatctcggatttcgccaagga

SEQ ID NO: 9672 - DNA, 25 bp, Saccharomyces pastorianus
ttgcacgcaagagggtaccacgact

SEQ ID NO: 9673 - DNA, 25 bp, Saccharomyces pastorianus
gtggctcgtatcactgcttgggaga

SEQ ID NO: 9674 - DNA, 25 bp, Saccharomyces pastorianus
acgctggagccactgttgagacaag

SEQ ID NO: 9675 - DNA, 25 bp, Saccharomyces pastorianus
ggattcgtacgaaccgcacatagtg

SEQ ID NO: 9676 - DNA, 25 bp, Saccharomyces pastorianus
aaatgacgtgtttccagagaggctg

SEQ ID NO: 9677 - DNA, 25 bp, Saccharomyces pastorianus
gacatagtgtccaacgtggctcgta

SEQ ID NO: 9678 - DNA, 25 bp, Saccharomyces pastorianus
caacgtaactccaccatgtttcaat

SEQ ID NO: 9679 - DNA, 25 bp, Saccharomyces pastorianus
ttcacaggaccatagagttctcgat

SEQ ID NO: 9680 - DNA, 25 bp, Saccharomyces pastorianus
tttaccaacattcccagcgtattac

SEQ ID NO: 9681 - DNA, 25 bp, Saccharomyces pastorianus
ttccagtcaccgtgggcagagacat

SEQ ID NO: 9682 - DNA, 25 bp, Saccharomyces pastorianus
gaacctatcgtgtctgttgatgggc

SEQ ID NO: 9683 - DNA, 25 bp, Saccharomyces pastorianus
ctggctcaccaaggacccaatgatg

SEQ ID NO: 9684 - DNA, 25 bp, Saccharomyces pastorianus
gtttcaattccatccagaacgatca

SEQ ID NO: 9685 - DNA, 25 bp, Saccharomyces pastorianus
tcatacgtgttttttgatccgcaaa

SEQ ID NO: 9686 - DNA, 25 bp, Saccharomyces pastorianus
gcaagcattagtaccgctgctcaaa

SEQ ID NO: 9687 - DNA, 25 bp, Saccharomyces pastorianus
agagttctcgatactttccagtcac

SEQ ID NO: 9688 - DNA, 25 bp, Saccharomyces pastorianus
acagcgtgtagccttgttccaagat

SEQ ID NO: 9689 - DNA, 25 bp, Saccharomyces pastorianus
gtttgaacccacgactctgtttgaa

SEQ ID NO: 9690 - DNA, 25 bp, Saccharomyces pastorianus
gtcaaaatgctcgaaggtcctgaat

SEQ ID NO: 9691 - DNA, 25 bp, Saccharomyces pastorianus
tctttccctatcacccatttataaa

SEQ ID NO: 9692 - DNA, 25 bp, Saccharomyces pastorianus
aagctgggagtgcaactttcgataa

SEQ ID NO: 9693 - DNA, 25 bp, Saccharomyces pastorianus
aggccacgtttgtttttgattccag

SEQ ID NO: 9694 - DNA, 25 bp, Saccharomyces pastorianus
aacaggcacgtatggcgggttcctt

SEQ ID NO: 9695 - DNA, 25 bp, Saccharomyces pastorianus
agtactgacggcagatctttcccta

SEQ ID NO: 9696 - DNA, 25 bp, Saccharomyces pastorianus
gattccttagatctttgcgtcatag

SEQ ID NO: 9697 - DNA, 25 bp, Saccharomyces pastorianus
gattccagtgctgaaccagacgtat

SEQ ID NO: 9698 - DNA, 25 bp, Saccharomyces pastorianus
gttccttttaggctgttacaatcaa

SEQ ID NO: 9699 - DNA, 25 bp, Saccharomyces pastorianus
gaagtttctcgacgaatctgtcaat

SEQ ID NO: 9700 - DNA, 25 bp, Saccharomyces pastorianus
gacccaaagcataatccattcctaa

SEQ ID NO: 9701 - DNA, 25 bp, Saccharomyces pastorianus
ataggcaagtttccaatgacccaaa

SEQ ID NO: 9702 - DNA, 25 bp, Saccharomyces pastorianus
atgttcggtaatcctatatcaccag

SEQ ID NO: 9703 - DNA, 25 bp, Saccharomyces pastorianus
aactcccagggtacaggctataggc

SEQ ID NO: 9704 - DNA, 25 bp, Saccharomyces pastorianus
gggtctgccaagtaccaacgttgta

SEQ ID NO: 9705 - DNA, 25 bp, Saccharomyces pastorianus
gacattcattaactcccagggtaca

SEQ ID NO: 9706 - DNA, 25 bp, Saccharomyces pastorianus
gcacgggcattgacacatttggtaa

SEQ ID NO: 9707 - DNA, 25 bp, Saccharomyces pastorianus
aactattaggcacaggcacgggcat

SEQ ID NO: 9708 - DNA, 25 bp, Saccharomyces pastorianus
aatgaacgcgtcatctatgccgcaa

SEQ ID NO: 9709 - DNA, 25 bp, Saccharomyces pastorianus
caggctacggatttgggaaccaaca

SEQ ID NO: 9710 - DNA, 25 bp, Saccharomyces pastorianus
aacagcaactatacttgacctcctt

SEQ ID NO: 9711 - DNA, 25 bp, Saccharomyces pastorianus
ttgctagccaagaagatcaccgatt

SEQ ID NO: 9712 - DNA, 25 bp, Saccharomyces pastorianus
aagttcgtactttggtctgctcgga

SEQ ID NO: 9713 - DNA, 25 bp, Saccharomyces pastorianus
acaacaagcgtatcctccattacaa

SEQ ID NO: 9714 - DNA, 25 bp, Saccharomyces pastorianus
tgttcctgttccatttccaattgaa

SEQ ID NO: 9715 - DNA, 25 bp, Saccharomyces pastorianus
aaagtgttccacgagttccgtcaag

SEQ ID NO: 9716 - DNA, 25 bp, Saccharomyces pastorianus
gacgatgaaactgttcctgttccat

SEQ ID NO: 9717 - DNA, 25 bp, Saccharomyces pastorianus
ggaatgatcgtttcaacctctacaa

SEQ ID NO: 9718 - DNA, 25 bp, Saccharomyces pastorianus
attgggtactgaaatcgccgccatt

SEQ ID NO: 9719 - DNA, 25 bp, Saccharomyces pastorianus
ttcgtgttattattcccatgccagg

SEQ ID NO: 9720 - DNA, 25 bp, Saccharomyces pastorianus
cgccattccagccacaattgataaa

SEQ ID NO: 9721 - DNA, 25 bp, Saccharomyces pastorianus
gataaatcattgtacgtggccgaag

SEQ ID NO: 9722 - DNA, 25 bp, Saccharomyces pastorianus
gataatggacgaccgactgatctcc

SEQ ID NO: 9723 - DNA, 25 bp, Saccharomyces pastorianus
ttactattccaactacacccaagag

SEQ ID NO: 9724 - DNA, 25 bp, Saccharomyces pastorianus
cactcgccaccattatcttagaaaa

SEQ ID NO: 9725 - DNA, 25 bp, Saccharomyces pastorianus
gcccggtccaatgtcatttttgcga

SEQ ID NO: 9726 - DNA, 25 bp, Saccharomyces pastorianus
caataggttccagctcgtaggtgct

SEQ ID NO: 9727 - DNA, 25 bp, Saccharomyces pastorianus
gttggctgcgggagcttattttcta

SEQ ID NO: 9728 - DNA, 25 bp, Saccharomyces pastorianus
tgaagaaatcaactgccccacaatc

SEQ ID NO: 9729 - DNA, 25 bp, Saccharomyces pastorianus
taggtgctgcttccctgtttattgc

SEQ ID NO: 9730 - DNA, 25 bp, Saccharomyces pastorianus
atttgaactgggatggcccggtcca

SEQ ID NO: 9731 - DNA, 25 bp, Saccharomyces pastorianus
tgcattcttcacaggtggtagccaa

SEQ ID NO: 9732 - DNA, 25 bp, Saccharomyces pastorianus
tgcaaagaggttgttcccgtcaata

SEQ ID NO: 9733 - DNA, 25 bp, Saccharomyces pastorianus
taagcgtgctatcaattaccaaatc

SEQ ID NO: 9734 - DNA, 25 bp, Saccharomyces pastorianus
gaaactcaaatctgttcgtgctgtt

SEQ ID NO: 9735 - DNA, 25 bp, Saccharomyces pastorianus
gaactttacgtttctacacatccaa

SEQ ID NO: 9736 - DNA, 25 bp, Saccharomyces pastorianus
cgtgctgtttattctggtggccaag

SEQ ID NO: 9737 - DNA, 25 bp, Saccharomyces pastorianus
gtttctaagagtatcaattcccaag

SEQ ID NO: 9738 - DNA, 25 bp, Saccharomyces pastorianus
ataatggcgctgatctagacggtaa

SEQ ID NO: 9739 - DNA, 25 bp, Saccharomyces pastorianus
tggtggccaagctggtgtctatgaa

SEQ ID NO: 9740 - DNA, 25 bp, Saccharomyces pastorianus
gatgcgcaagacaaaaaggcccgta

SEQ ID NO: 9741 - DNA, 25 bp, Saccharomyces pastorianus
ggctcgtaaacgtggtgtgcatgac

SEQ ID NO: 9742 - DNA, 25 bp, Saccharomyces pastorianus
gaagcaagacaaaagagcctcccgt

SEQ ID NO: 9743 - DNA, 25 bp, Saccharomyces pastorianus
gcctcccgtaaacaagctcataaga

SEQ ID NO: 9744 - DNA, 25 bp, Saccharomyces pastorianus
aaacgtggtcatggatattggcaaa

SEQ ID NO: 9745 - DNA, 25 bp, Saccharomyces pastorianus
acaacaaacgtcataccgagcgatg

SEQ ID NO: 9746 - DNA, 25 bp, Saccharomyces pastorianus
taaaggcagaccaccagcatatatt

SEQ ID NO: 9747 - DNA, 25 bp, Saccharomyces pastorianus
aatggacagcaaacccgaaagattc

SEQ ID NO: 9748 - DNA, 25 bp, Saccharomyces pastorianus
atatcggagccatcagggtccacaa

SEQ ID NO: 9749 - DNA, 25 bp, Saccharomyces pastorianus
caaaaagactttcagtcggtcgacg

SEQ ID NO: 9750 - DNA, 25 bp, Saccharomyces pastorianus
catcagctgaacttctaggccgtat

SEQ ID NO: 9751 - DNA, 25 bp, Saccharomyces pastorianus
ggtattccagttacctaccaggcta

SEQ ID NO: 9752 - DNA, 25 bp, Saccharomyces pastorianus
gtgagcccaccccaggtgtgaaaat

SEQ ID NO: 9753 - DNA, 25 bp, Saccharomyces pastorianus
tatggcagacgattcatcatcagct

SEQ ID NO: 9754 - DNA, 25 bp, Saccharomyces pastorianus
tctttcagagaagccaacccgtgag

SEQ ID NO: 9755 - DNA, 25 bp, Saccharomyces pastorianus
gattgaacgaattgctggacttgac

SEQ ID NO: 9756 - DNA, 25 bp, Saccharomyces pastorianus
atatcgtgtatttcttggttctttc

SEQ ID NO: 9757 - DNA, 25 bp, Saccharomyces pastorianus
acaagcatcactgggacgatctaca

SEQ ID NO: 9758 - DNA, 25 bp, Saccharomyces pastorianus
tacatcagtgatttagtcaaccaag

SEQ ID NO: 9759 - DNA, 25 bp, Saccharomyces pastorianus
atgagtggtcacataacgttgacga

SEQ ID NO: 9760 - DNA, 25 bp, Saccharomyces pastorianus
attgttcaccacacacgaattgatg

SEQ ID NO: 9761 - DNA, 25 bp, Saccharomyces pastorianus
tattccagaatcactctatcgagat

SEQ ID NO: 9762 - DNA, 25 bp, Saccharomyces pastorianus
caatttgagagttatttccgagtac

SEQ ID NO: 9763 - DNA, 25 bp, Saccharomyces pastorianus
ggaaaccagttttatctcatatcgt

SEQ ID NO: 9764 - DNA, 25 bp, Saccharomyces pastorianus
gtcaaccaaggtatcatatatgcaa

SEQ ID NO: 9765 - DNA, 25 bp, Saccharomyces pastorianus
atagaccagccaagattgtcaattt

SEQ ID NO: 9766 - DNA, 25 bp, Saccharomyces pastorianus
aatgatttgcacgttcttactgatg

SEQ ID NO: 9767 - DNA, 25 bp, Saccharomyces pastorianus
attccttggctagaggatccgccta

SEQ ID NO: 9768 - DNA, 25 bp, Saccharomyces pastorianus
tattgcagtatctgtcaactctaga

SEQ ID NO: 9769 - DNA, 25 bp, Saccharomyces pastorianus
ggactagacgtctctgcagaatctt

SEQ ID NO: 9770 - DNA, 25 bp, Saccharomyces pastorianus
ggtactacacgaacacctagtcaca

SEQ ID NO: 9771 - DNA, 25 bp, Saccharomyces pastorianus
agcgatcatgctccaataagttttt

SEQ ID NO: 9772 - DNA, 25 bp, Saccharomyces pastorianus
aattcaccggcttctagtaatacga

SEQ ID NO: 9773 - DNA, 25 bp, Saccharomyces pastorianus
tacgcctccgaacgaaaattcaccg

SEQ ID NO: 9774 - DNA, 25 bp, Saccharomyces pastorianus
atatatgcgctgacagtccggtact

SEQ ID NO: 9775 - DNA, 25 bp, Saccharomyces pastorianus
atgtcttgacccgtaaaggccatct

SEQ ID NO: 9776 - DNA, 25 bp, Saccharomyces pastorianus
agagtatcggatcctcctttacaaa

SEQ ID NO: 9777 - DNA, 25 bp, Saccharomyces pastorianus
aaatagtcacattaccggatcacgg

SEQ ID NO: 9778 - DNA, 25 bp, Saccharomyces pastorianus
caaagctgcccctaggtgatgtaga

SEQ ID NO: 9779 - DNA, 25 bp, Saccharomyces pastorianus
gtttacaatcttcaacctgacggca

SEQ ID NO: 9780 - DNA, 25 bp, Saccharomyces pastorianus
ggcaatacccaagccatgattactg

SEQ ID NO: 9781 - DNA, 25 bp, Saccharomyces pastorianus
atacgccttaagtcccaattactat

SEQ ID NO: 9782 - DNA, 25 bp, Saccharomyces pastorianus
ggtgccgcggaaatactgccaagtt

SEQ ID NO: 9783 - DNA, 25 bp, Saccharomyces pastorianus
gaggagcgtcaacaattcaatcttg

SEQ ID NO: 9784 - DNA, 25 bp, Saccharomyces pastorianus
atggcctaacgatttatacgcctta

SEQ ID NO: 9785 - DNA, 25 bp, Saccharomyces pastorianus
caatcttgatttgttgccagctatt

SEQ ID NO: 9786 - DNA, 25 bp, Saccharomyces pastorianus
ctacaacttctctacaatcctggat

SEQ ID NO: 9787 - DNA, 25 bp, Saccharomyces pastorianus
gatgtagagcctgcgtacctcaaaa

SEQ ID NO: 9788 - DNA, 25 bp, Saccharomyces pastorianus
caagttatagcccaacatctccaag

SEQ ID NO: 9789 - DNA, 25 bp, Saccharomyces pastorianus
cacatctccgtttggagcttatggt

SEQ ID NO: 9790 - DNA, 25 bp, Saccharomyces pastorianus
tactctcctacatctccaagttata

SEQ ID NO: 9791 - DNA, 25 bp, Saccharomyces pastorianus
tacagcttacggtggtgcggactac

SEQ ID NO: 9792 - DNA, 25 bp, Saccharomyces pastorianus
tacttctcctaactatagccctact

SEQ ID NO: 9793 - DNA, 25 bp, Saccharomyces pastorianus
tgcggactacggtgaagccacatct

SEQ ID NO: 9794 - DNA, 25 bp, Saccharomyces pastorianus
acatctccaagctatagccctacat

SEQ ID NO: 9795 - DNA, 25 bp, Saccharomyces pastorianus
tagtcctacttcaccttcatactca

SEQ ID NO: 9796 - DNA, 25 bp, Saccharomyces pastorianus
atcgccatcatattcaccaacatca

SEQ ID NO: 9797 - DNA, 25 bp, Saccharomyces pastorianus
aacatctccgtcttattctcctaca

SEQ ID NO: 9798 - DNA, 25 bp, Saccharomyces pastorianus
ggattcggagtctcttcaccaggat

SEQ ID NO: 9799 - DNA, 25 bp, Saccharomyces pastorianus
cgtctggttagttttcgctaacaag

SEQ ID NO: 9800 - DNA, 25 bp, Saccharomyces pastorianus
tttgcattccatcagaaaccgtcca

SEQ ID NO: 9801 - DNA, 25 bp, Saccharomyces pastorianus
acaccgagggtgtcattttcgttgt

SEQ ID NO: 9802 - DNA, 25 bp, Saccharomyces pastorianus
gaggcactattacagaaacaccgag

SEQ ID NO: 9803 - DNA, 25 bp, Saccharomyces pastorianus
tagatcccgtgtcggtgaagccaga

SEQ ID NO: 9804 - DNA, 25 bp, Saccharomyces pastorianus
aattagatctctgtggaggcactat

SEQ ID NO: 9805 - DNA, 25 bp, Saccharomyces pastorianus
taagttgttcagcaaccttttcggt

SEQ ID NO: 9806 - DNA, 25 bp, Saccharomyces pastorianus
aattaggtttgcattccatcagaaa

SEQ ID NO: 9807 - DNA, 25 bp, Saccharomyces pastorianus
ggtctttatgcttctaagttgttca

SEQ ID NO: 9808 - DNA, 25 bp, Saccharomyces pastorianus
ttctaacgatagatcccgtgtcggt

SEQ ID NO: 9809 - DNA, 25 bp, Saccharomyces pastorianus
gtgtcattttcgttgtcgattctaa

SEQ ID NO: 9810 - DNA, 25 bp, Saccharomyces pastorianus
cacagggttacgatatgtacagtac

SEQ ID NO: 9811 - DNA, 25 bp, Saccharomyces pastorianus
agaaagcgaagctcctagtgggttt

SEQ ID NO: 9812 - DNA, 25 bp, Saccharomyces pastorianus
taggctctgatgttttaccgttaga

SEQ ID NO: 9813 - DNA, 25 bp, Saccharomyces pastorianus
gtcaacacagaaccacagcctatta

SEQ ID NO: 9814 - DNA, 25 bp, Saccharomyces pastorianus
cagcctattacatttgaccttacca

SEQ ID NO: 9815 - DNA, 25 bp, Saccharomyces pastorianus
gtctccgccaagaaaaccgttgatg

SEQ ID NO: 9816 - DNA, 25 bp, Saccharomyces pastorianus
taccgttagaattcgctggtgacaa

SEQ ID NO: 9817 - DNA, 25 bp, Saccharomyces pastorianus
gcggaagatgaatccttagccaaat

SEQ ID NO: 9818 - DNA, 25 bp, Saccharomyces pastorianus
agaatctttaggcttaggctctgat

SEQ ID NO: 9819 - DNA, 25 bp, Saccharomyces pastorianus
acgatcaatacaaagtctccgccaa

SEQ ID NO: 9820 - DNA, 25 bp, Saccharomyces pastorianus
tacatcaagaaagcgggcattgccg

SEQ ID NO: 9821 - DNA, 25 bp, Saccharomyces pastorianus
gctaagtggagaaagaagagaacta

SEQ ID NO: 9822 - DNA, 25 bp, Saccharomyces pastorianus
agctaagtggagaaagaagagaact

SEQ ID NO: 9823 - DNA, 25 bp, Saccharomyces pastorianus
gaaagaagagaactagaagacttaa

SEQ ID NO: 9824 - DNA, 25 bp, Saccharomyces pastorianus
atgagagctaagtggagaaagaaga

SEQ ID NO: 9825 - DNA, 25 bp, Saccharomyces pastorianus
gaagagaactagaagacttaagaga

SEQ ID NO: 9826 - DNA, 25 bp, Saccharomyces pastorianus
gagaaagaagagaactagaagactt

SEQ ID NO: 9827 - DNA, 25 bp, Saccharomyces pastorianus
ggagaaagaagagaactagaagact

SEQ ID NO: 9828 - DNA, 25 bp, Saccharomyces pastorianus
aagaagagaactagaagacttaaga

SEQ ID NO: 9829 - DNA, 25 bp, Saccharomyces pastorianus
aaagaagagaactagaagacttaag

SEQ ID NO: 9830 - DNA, 25 bp, Saccharomyces pastorianus
agaagagaactagaagacttaagag

SEQ ID NO: 9831 - DNA, 25 bp, Saccharomyces pastorianus
gagctaagtggagaaagaagagaac

SEQ ID NO: 9832 - DNA, 25 bp, Saccharomyces pastorianus
gattttccaaaactcgaggtcgaat

SEQ ID NO: 9833 - DNA, 25 bp, Saccharomyces pastorianus
tgtgcctcacttgcgttagcgatca

SEQ ID NO: 9834 - DNA, 25 bp, Saccharomyces pastorianus
gaggctttatcttcttttctatttg

SEQ ID NO: 9835 - DNA, 25 bp, Saccharomyces pastorianus
attgcccatgatgaatttgccggta

SEQ ID NO: 9836 - DNA, 25 bp, Saccharomyces pastorianus
aataatggccatctgcgtaaatgca

SEQ ID NO: 9837 - DNA, 25 bp, Saccharomyces pastorianus
atcggtattttgtcgtgtgcctcac

SEQ ID NO: 9838 - DNA, 25 bp, Saccharomyces pastorianus
gatagtcaacacttagtcttgggtt

SEQ ID NO: 9839 - DNA, 25 bp, Saccharomyces pastorianus
tttgccggtaaacctgttgggctga

SEQ ID NO: 9840 - DNA, 25 bp, Saccharomyces pastorianus
gtagcattggcattcaacactcgtt

SEQ ID NO: 9841 - DNA, 25 bp, Saccharomyces pastorianus
aatgggtttgtacttcgattcgcag

SEQ ID NO: 9842 - DNA, 25 bp, Saccharomyces pastorianus
gggtgataaccttttccattagtat

SEQ ID NO: 9843 - DNA, 25 bp, Saccharomyces pastorianus
aacaagttcctccagggctagactc

SEQ ID NO: 9844 - DNA, 25 bp, Saccharomyces pastorianus
gcggaggacacgacaatcatggcaa

SEQ ID NO: 9845 - DNA, 25 bp, Saccharomyces pastorianus
gagagccattgacagtctaatccaa

SEQ ID NO: 9846 - DNA, 25 bp, Saccharomyces pastorianus
atattttacaaaccctatcaggcgg

SEQ ID NO: 9847 - DNA, 25 bp, Saccharomyces pastorianus
gagcattcaacacattgctgcagca

SEQ ID NO: 9848 - DNA, 25 bp, Saccharomyces pastorianus
gctgcagcaatgataccgttcatca

SEQ ID NO: 9849 - DNA, 25 bp, Saccharomyces pastorianus
gaggaaccttccacatacaacgctt

SEQ ID NO: 9850 - DNA, 25 bp, Saccharomyces pastorianus
gaccaatataaatttcgccagcggg

SEQ ID NO: 9851 - DNA, 25 bp, Saccharomyces pastorianus
aacgcaaaggtttccatgatcaaga

SEQ ID NO: 9852 - DNA, 25 bp, Saccharomyces pastorianus
agacggcacaagcttgagcattcaa

SEQ ID NO: 9853 - DNA, 25 bp, Saccharomyces pastorianus
gtagagttccgtttaatttcactgt

SEQ ID NO: 9854 - DNA, 25 bp, Saccharomyces pastorianus
gaacaattagctcacgtcaaggaac

SEQ ID NO: 9855 - DNA, 25 bp, Saccharomyces pastorianus
gggttcaggacattttcatcaagag

SEQ ID NO: 9856 - DNA, 25 bp, Saccharomyces pastorianus
aatagcctctcgcttatactcggat

SEQ ID NO: 9857 - DNA, 25 bp, Saccharomyces pastorianus
gtaatgccaagctgccaacaaactt

SEQ ID NO: 9858 - DNA, 25 bp, Saccharomyces pastorianus
ttaagtcgttgcatctcccgtaatg

SEQ ID NO: 9859 - DNA, 25 bp, Saccharomyces pastorianus
ttttcatcaagagggaacgtgccaa

SEQ ID NO: 9860 - DNA, 25 bp, Saccharomyces pastorianus
ttatactcggatggccctctaggtg

SEQ ID NO: 9861 - DNA, 25 bp, Saccharomyces pastorianus
ggaacgtgccaaggaagatttcttt

SEQ ID NO: 9862 - DNA, 25 bp, Saccharomyces pastorianus
gatggccctctaggtggttccggcc

SEQ ID NO: 9863 - DNA, 25 bp, Saccharomyces pastorianus
aggaagatttctttgccaggcaaca

SEQ ID NO: 9864 - DNA, 25 bp, Saccharomyces pastorianus
caaacttcagaatagcctctcgctt

SEQ ID NO: 9865 - DNA, 25 bp, Saccharomyces pastorianus
tccaagcgggtcaggtgcagcattt

SEQ ID NO: 9866 - DNA, 25 bp, Saccharomyces pastorianus
agatgccgaactacgtcgttatgaa

SEQ ID NO: 9867 - DNA, 25 bp, Saccharomyces pastorianus
gatccagttccatatatcactaagg

SEQ ID NO: 9868 - DNA, 25 bp, Saccharomyces pastorianus
taataacggtgctccaagcgggtca

SEQ ID NO: 9869 - DNA, 25 bp, Saccharomyces pastorianus
atgaagaccgccaagcgttctgtct

SEQ ID NO: 9870 - DNA, 25 bp, Saccharomyces pastorianus
ggtactactggcacagacaatgcta

SEQ ID NO: 9871 - DNA, 25 bp, Saccharomyces pastorianus
gaattaactgcgattgccaaggcta

SEQ ID NO: 9872 - DNA, 25 bp, Saccharomyces pastorianus
aagcgttctgtctcagatgccgaac

SEQ ID NO: 9873 - DNA, 25 bp, Saccharomyces pastorianus
caaggctacccaaggtttctctggt

SEQ ID NO: 9874 - DNA, 25 bp, Saccharomyces pastorianus
tcctgctatcttgagacctggaaga

SEQ ID NO: 9875 - DNA, 25 bp, Saccharomyces pastorianus
gctagattgtctatcctaaacgcac

SEQ ID NO: 9876 - DNA, 25 bp, Saccharomyces pastorianus
gcagtcctatttcgttccggtctgt

SEQ ID NO: 9877 - DNA, 25 bp, Saccharomyces pastorianus
aaatatccaaactcctctgctgcaa

SEQ ID NO: 9878 - DNA, 25 bp, Saccharomyces pastorianus
ctgttctcatctgatttcctactga

SEQ ID NO: 9879 - DNA, 25 bp, Saccharomyces pastorianus
ctgaatgtactgttgacgctactgg

SEQ ID NO: 9880 - DNA, 25 bp, Saccharomyces pastorianus
tgttgctactgtctttgctgcacag

SEQ ID NO: 9881 - DNA, 25 bp, Saccharomyces pastorianus
gactacgtctactattaccaacaag

SEQ ID NO: 9882 - DNA, 25 bp, Saccharomyces pastorianus
gggaagctccactagaaacgtttat

SEQ ID NO: 9883 - DNA, 25 bp, Saccharomyces pastorianus
gcacagtgtccgacttcatactata

SEQ ID NO: 9884 - DNA, 25 bp, Saccharomyces pastorianus
ataaggaacgccgactacgtctact

SEQ ID NO: 9885 - DNA, 25 bp, Saccharomyces pastorianus
tacatcacgattacaagccccataa

SEQ ID NO: 9886 - DNA, 25 bp, Saccharomyces pastorianus
ctatatgtcattgcgcttttcttcc

SEQ ID NO: 9887 - DNA, 25 bp, Saccharomyces pastorianus
tttgcgttcagtcattgttcattac

SEQ ID NO: 9888 - DNA, 25 bp, Saccharomyces pastorianus
tatccgatgagaccgtgtacgtcgt

SEQ ID NO: 9889 - DNA, 25 bp, Saccharomyces pastorianus
cacctggtgtgtttatgctatttta

SEQ ID NO: 9890 - DNA, 25 bp, Saccharomyces pastorianus
gacgccttaggcaacaccattagaa

SEQ ID NO: 9891 - DNA, 25 bp, Saccharomyces pastorianus
tacggtactcacaattatggtcact

SEQ ID NO: 9892 - DNA, 25 bp, Saccharomyces pastorianus
ggaccaattagactcatcatcagat

SEQ ID NO: 9893 - DNA, 25 bp, Saccharomyces pastorianus
tggtcactacattgcattcaggaag

SEQ ID NO: 9894 - DNA, 25 bp, Saccharomyces pastorianus
gacaacgtaaaccacagcgagctaa

SEQ ID NO: 9895 - DNA, 25 bp, Saccharomyces pastorianus
cgcccatcaactatgctaggtcatt

SEQ ID NO: 9896 - DNA, 25 bp, Saccharomyces pastorianus
tccgctgacatattctttgcgttca

SEQ ID NO: 9897 - DNA, 25 bp, Saccharomyces pastorianus
gaggaagatgctataccggctccgc

SEQ ID NO: 9898 - DNA, 25 bp, Saccharomyces pastorianus
agagagcaagcttaaccacaccaat

SEQ ID NO: 9899 - DNA, 25 bp, Saccharomyces pastorianus
gtaaaagcgcaatcaccaacaggaa

SEQ ID NO: 9900 - DNA, 25 bp, Saccharomyces pastorianus
tatacggctactttgtgctcctcat

SEQ ID NO: 9901 - DNA, 25 bp, Saccharomyces pastorianus
gatggctctggcgatgatagcacag

SEQ ID NO: 9902 - DNA, 25 bp, Saccharomyces pastorianus
acaccaatgtgctgaagttcgacct

SEQ ID NO: 9903 - DNA, 25 bp, Saccharomyces pastorianus
caagttgactaaaccgagctcatcg

SEQ ID NO: 9904 - DNA, 25 bp, Saccharomyces pastorianus
gatagcacaggtgtttcttctgatt

SEQ ID NO: 9905 - DNA, 25 bp, Saccharomyces pastorianus
gccgtggttcttttcattgcattat

SEQ ID NO: 9906 - DNA, 25 bp, Saccharomyces pastorianus
ggacaatataaccaggaccccaatg

SEQ ID NO: 9907 - DNA, 25 bp, Saccharomyces pastorianus
gaccccaatgattttgatttcgata

SEQ ID NO: 9908 - DNA, 25 bp, Saccharomyces pastorianus
gcattattgcctttgttttctggta

SEQ ID NO: 9909 - DNA, 25 bp, Saccharomyces pastorianus
aagcgtcctctagcaagtttagtac

SEQ ID NO: 9910 - DNA, 25 bp, Saccharomyces pastorianus
gtagcaaccaacatgggtctcactt

SEQ ID NO: 9911 - DNA, 25 bp, Saccharomyces pastorianus
gtacgaatgagtgccgtgctcggaa

SEQ ID NO: 9912 - DNA, 25 bp, Saccharomyces pastorianus
tgagaacacctactagacttcgtcc

SEQ ID NO: 9913 - DNA, 25 bp, Saccharomyces pastorianus
gggtctcactttaaatctttttcag

SEQ ID NO: 9914 - DNA, 25 bp, Saccharomyces pastorianus
ggaggtaccagcttatgggacatac

SEQ ID NO: 9915 - DNA, 25 bp, Saccharomyces pastorianus
tgtctggacctgacagatttgacct

SEQ ID NO: 9916 - DNA, 25 bp, Saccharomyces pastorianus
gtggtccctcaagaagtggtaaact

SEQ ID NO: 9917 - DNA, 25 bp, Saccharomyces pastorianus
aacagatggtcaagtggtccctcaa

SEQ ID NO: 9918 - DNA, 25 bp, Saccharomyces pastorianus
agacttcgtcccattgtagcaacca

SEQ ID NO: 9919 - DNA, 25 bp, Saccharomyces pastorianus
ataaacaaatctggctggcatctcc

SEQ ID NO: 9920 - DNA, 25 bp, Saccharomyces pastorianus
gcagtagtctaccacggctaacaat

SEQ ID NO: 9921 - DNA, 25 bp, Saccharomyces pastorianus
aattattgcccatgatcctacctag

SEQ ID NO: 9922 - DNA, 25 bp, Saccharomyces pastorianus
ttactacctatacttccacaacgat

SEQ ID NO: 9923 - DNA, 25 bp, Saccharomyces pastorianus
gagccatcgaagtttaccaattcct

SEQ ID NO: 9924 - DNA, 25 bp, Saccharomyces pastorianus
acagcaccattcgacactataaaga

SEQ ID NO: 9925 - DNA, 25 bp, Saccharomyces pastorianus
gctacatgtttaagagatgcccctt

SEQ ID NO: 9926 - DNA, 25 bp, Saccharomyces pastorianus
gctatatcactatgccaatcactgt

SEQ ID NO: 9927 - DNA, 25 bp, Saccharomyces pastorianus
aagaggcctggtgggctatatcact

SEQ ID NO: 9928 - DNA, 25 bp, Saccharomyces pastorianus
agatgccccttatgctggattatac

SEQ ID NO: 9929 - DNA, 25 bp, Saccharomyces pastorianus
aaaggcgctgagtgccggtatcgca

SEQ ID NO: 9930 - DNA, 25 bp, Saccharomyces pastorianus
aacgagtgccgtgttgtctgccagt

SEQ ID NO: 9931 - DNA, 25 bp, Saccharomyces pastorianus
tggaacgccctaacaacaacgccgg

SEQ ID NO: 9932 - DNA, 25 bp, Saccharomyces pastorianus
acaccgcgagtgtgaacttgaagaa

SEQ ID NO: 9933 - DNA, 25 bp, Saccharomyces pastorianus
gaatcggttcacatggcaacatctg

SEQ ID NO: 9934 - DNA, 25 bp, Saccharomyces pastorianus
aagaaactgatcctcacaccgcgag

SEQ ID NO: 9935 - DNA, 25 bp, Saccharomyces pastorianus
attgaacaactttctgactctttga

SEQ ID NO: 9936 - DNA, 25 bp, Saccharomyces pastorianus
ggcaacatctgcgagagagctaata

SEQ ID NO: 9937 - DNA, 25 bp, Saccharomyces pastorianus
ttttccgaatcttcaatcactttgg

SEQ ID NO: 9938 - DNA, 25 bp, Saccharomyces pastorianus
tggcatccatggttaaagaatccgt

SEQ ID NO: 9939 - DNA, 25 bp, Saccharomyces pastorianus
atatatgagaaattacgcccggaag

SEQ ID NO: 9940 - DNA, 25 bp, Saccharomyces pastorianus
aacaacgccggcaatggtggaaaat

SEQ ID NO: 9941 - DNA, 25 bp, Saccharomyces pastorianus
tgaccagttgcccagattttcgaaa

SEQ ID NO: 9942 - DNA, 25 bp, Saccharomyces pastorianus
agaccgttcttgacctggacaataa

SEQ ID NO: 9943 - DNA, 25 bp, Saccharomyces pastorianus
gaatgtagctgtcactgctgataga

SEQ ID NO: 9944 - DNA, 25 bp, Saccharomyces pastorianus
agactctgacacatctccattgcag

SEQ ID NO: 9945 - DNA, 25 bp, Saccharomyces pastorianus
gattgttgtttcttcattggtggac

SEQ ID NO: 9946 - DNA, 25 bp, Saccharomyces pastorianus
gcgctagcgggtgtacagactctga

SEQ ID NO: 9947 - DNA, 25 bp, Saccharomyces pastorianus
aaagtggtgcctgggagaccgttct

SEQ ID NO: 9948 - DNA, 25 bp, Saccharomyces pastorianus
gacaccgatatagatgctggcgcta

SEQ ID NO: 9949 - DNA, 25 bp, Saccharomyces pastorianus
tacgcgttccgacttgattgttgtt

SEQ ID NO: 9950 - DNA, 25 bp, Saccharomyces pastorianus
tggtattccaggtcctttactgagt

SEQ ID NO: 9951 - DNA, 25 bp, Saccharomyces pastorianus
gacaagccacccaatcttggaggta

SEQ ID NO: 9952 - DNA, 25 bp, Saccharomyces pastorianus
atgaatattcaaactgccactgcag

SEQ ID NO: 9953 - DNA, 25 bp, Saccharomyces pastorianus
gccaaagagacgatgccctgatagt

SEQ ID NO: 9954 - DNA, 25 bp, Saccharomyces pastorianus
aagtcgttgatcattccgtggagaa

SEQ ID NO: 9955 - DNA, 25 bp, Saccharomyces pastorianus
cgaagcttatttccgcgtttgacga

SEQ ID NO: 9956 - DNA, 25 bp, Saccharomyces pastorianus
aatggtctaattgtcacgtggtcga

SEQ ID NO: 9957 - DNA, 25 bp, Saccharomyces pastorianus
ggtgtttatactggccatcgtgggc

SEQ ID NO: 9958 - DNA, 25 bp, Saccharomyces pastorianus
tggcaagattacgtctcccatcaga

SEQ ID NO: 9959 - DNA, 25 bp, Saccharomyces pastorianus
tgtcttggtcatttcttcattctca

SEQ ID NO: 9960 - DNA, 25 bp, Saccharomyces pastorianus
aactgctccaggtcgacgtggatat

SEQ ID NO: 9961 - DNA, 25 bp, Saccharomyces pastorianus
gagacgatcacttccttgttgaata

SEQ ID NO: 9962 - DNA, 25 bp, Saccharomyces pastorianus
gtgggcaacaacatactcgtggacc

SEQ ID NO: 9963 - DNA, 25 bp, Saccharomyces pastorianus
ttcattctcatacccagtttcttta

SEQ ID NO: 9964 - DNA, 25 bp, Saccharomyces pastorianus
gtgagcttccaaatactccagactt

SEQ ID NO: 9965 - DNA, 25 bp, Saccharomyces pastorianus
cagacaggtgaatgacgcctttgtt

SEQ ID NO: 9966 - DNA, 25 bp, Saccharomyces pastorianus
taatacctgccattaatcctgcaat

SEQ ID NO: 9967 - DNA, 25 bp, Saccharomyces pastorianus
aacaccaaccgggatgccaataatg

SEQ ID NO: 9968 - DNA, 25 bp, Saccharomyces pastorianus
agaatctctgttcttcgaccatgat

SEQ ID NO: 9969 - DNA, 25 bp, Saccharomyces pastorianus
ttcaagcgcaacagattccaatcca

SEQ ID NO: 9970 - DNA, 25 bp, Saccharomyces pastorianus
gaggaggaccatctagttcaagaac

SEQ ID NO: 9971 - DNA, 25 bp, Saccharomyces pastorianus
taaccaatggtcaatctgcgatgat

SEQ ID NO: 9972 - DNA, 25 bp, Saccharomyces pastorianus
tggatactacggtcaacagcaacac

SEQ ID NO: 9973 - DNA, 25 bp, Saccharomyces pastorianus
gatcaattattgtctttaccagctg

SEQ ID NO: 9974 - DNA, 25 bp, Saccharomyces pastorianus
acatttgcccgacgacactaattta

SEQ ID NO: 9975 - DNA, 25 bp, Saccharomyces pastorianus
gagactcaaagtatctacccaacga

SEQ ID NO: 9976 - DNA, 25 bp, Saccharomyces pastorianus
gacccctttccgttgagaggagact

SEQ ID NO: 9977 - DNA, 25 bp, Saccharomyces pastorianus
ttatttacagcagttctcgcaccac

SEQ ID NO: 9978 - DNA, 25 bp, Saccharomyces pastorianus
gtcgtgacgctcatcagaaccatat

SEQ ID NO: 9979 - DNA, 25 bp, Saccharomyces pastorianus
gtagaccatctgatgggaccccttt

SEQ ID NO: 9980 - DNA, 25 bp, Saccharomyces pastorianus
tttaaggccacctccatgaggcata

SEQ ID NO: 9981 - DNA, 25 bp, Saccharomyces pastorianus
atgggtgccctctacaatgttgtga

SEQ ID NO: 9982 - DNA, 25 bp, Saccharomyces pastorianus
ggaaggtctacctacggtcaggata

SEQ ID NO: 9983 - DNA, 25 bp, Saccharomyces pastorianus
ttcattccccaagtccatcgaaaat

SEQ ID NO: 9984 - DNA, 25 bp, Saccharomyces pastorianus
aaagacgctcccatggtagaccatc

SEQ ID NO: 9985 - DNA, 25 bp, Saccharomyces pastorianus
caccacaatgatttctcccagttta

SEQ ID NO: 9986 - DNA, 25 bp, Saccharomyces pastorianus
gcatagtgaagttctgtgttccaat

SEQ ID NO: 9987 - DNA, 25 bp, Saccharomyces pastorianus
aaactatacaaacccacagccacat

SEQ ID NO: 9988 - DNA, 25 bp, Saccharomyces pastorianus
gtactctagactatggacacaatgc

SEQ ID NO: 9989 - DNA, 25 bp, Saccharomyces pastorianus
ggcagaagatccgttattcgtgtta

SEQ ID NO: 9990 - DNA, 25 bp, Saccharomyces pastorianus
agccacatgctgtcttagctgagcg

SEQ ID NO: 9991 - DNA, 25 bp, Saccharomyces pastorianus
ggattatgtcattaccggtgggaat

SEQ ID NO: 9992 - DNA, 25 bp, Saccharomyces pastorianus
gttccaactgtttagccagatctgg

SEQ ID NO: 9993 - DNA, 25 bp, Saccharomyces pastorianus
gtccatcaagattaacaccggctct

SEQ ID NO: 9994 - DNA, 25 bp, Saccharomyces pastorianus
ggtatgttcgttgtaaagtccatca

SEQ ID NO: 9995 - DNA, 25 bp, Saccharomyces pastorianus
gaactgtgacattttctacatgcgt

SEQ ID NO: 9996 - DNA, 25 bp, Saccharomyces pastorianus
ataatattcaagtcgattcgcgtta

SEQ ID NO: 9997 - DNA, 25 bp, Saccharomyces pastorianus
ttcagtctcaatggatttacaacgt

SEQ ID NO: 9998 - DNA, 25 bp, Saccharomyces pastorianus
attgacgaagctatgggccatcctt

SEQ ID NO: 9999 - DNA, 25 bp, Saccharomyces pastorianus
tgtacgtttgcttatgcggtttccc

SEQ ID NO: 10000 - DNA, 25 bp, Saccharomyces pastorianus
ctaatttctaatcttttggtgctga

SEQ ID NO: 10001 - DNA, 25 bp, Saccharomyces pastorianus
agtgcgggtgtcatactgtacgttt

SEQ ID NO: 10002 - DNA, 25 bp, Saccharomyces pastorianus
acgtggcgcctgaagttcttacaaa

SEQ ID NO: 10003 - DNA, 25 bp, Saccharomyces pastorianus
gaataccctttgtggtactccatct

SEQ ID NO: 10004 - DNA, 25 bp, Saccharomyces pastorianus
gcattttactctccatactgggaca

SEQ ID NO: 10005 - DNA, 25 bp, Saccharomyces pastorianus
ggccatccttggttcatagactcaa

SEQ ID NO: 10006 - DNA, 25 bp, Saccharomyces pastorianus
caagggccttattcaaacaactgtt

SEQ ID NO: 10007 - DNA, 25 bp, Saccharomyces pastorianus
aatcaaatccagttaggcccatggg

SEQ ID NO: 10008 - DNA, 25 bp, Saccharomyces pastorianus
aagttttcgcaattcctagacaagg

SEQ ID NO: 10009 - DNA, 25 bp, Saccharomyces pastorianus
attgcctaacactttgtccaagcta

SEQ ID NO: 10010 - DNA, 25 bp, Saccharomyces pastorianus
ttgatacggtcatcttcgacacagc

SEQ ID NO: 10011 - DNA, 25 bp, Saccharomyces pastorianus
aaactccttcatgggcgcgggtaat

SEQ ID NO: 10012 - DNA, 25 bp, Saccharomyces pastorianus
gatgccattgtgtgctggtgaaatc

SEQ ID NO: 10013 - DNA, 25 bp, Saccharomyces pastorianus
tgacctgaccacttttgtctgcgtg

SEQ ID NO: 10014 - DNA, 25 bp, Saccharomyces pastorianus
aggaatacgaccctgttgctgacgg

SEQ ID NO: 10015 - DNA, 25 bp, Saccharomyces pastorianus
gtctgcgtgtgcatcagtgaattct

SEQ ID NO: 10016 - DNA, 25 bp, Saccharomyces pastorianus
gatctcctacgacatggacgtcaat

SEQ ID NO: 10017 - DNA, 25 bp, Saccharomyces pastorianus
gtacgaagatttccacgtcatcaag

SEQ ID NO: 10018 - DNA, 25 bp, Saccharomyces pastorianus
gtcaattccatcatcgtcaaccagt

SEQ ID NO: 10019 - DNA, 25 bp, Saccharomyces pastorianus
agcatcgcctgttcattttgcagat

SEQ ID NO: 10020 - DNA, 25 bp, Saccharomyces pastorianus
agtaagaactaccacagcatcgcct

SEQ ID NO: 10021 - DNA, 25 bp, Saccharomyces pastorianus
caccggtagtcgctgaggagcctaa

SEQ ID NO: 10022 - DNA, 25 bp, Saccharomyces pastorianus
acagctacacaacaacgcctaaggg

SEQ ID NO: 10023 - DNA, 25 bp, Saccharomyces pastorianus
acgaagaatccgatttcctgaccac

SEQ ID NO: 10024 - DNA, 25 bp, Saccharomyces pastorianus
aaatccgccgctaattttgcgccaa

SEQ ID NO: 10025 - DNA, 25 bp, Saccharomyces pastorianus
tcccattcatcagctgaggcagacg

SEQ ID NO: 10026 - DNA, 25 bp, Saccharomyces pastorianus
aactggaacgttgacatgaccggtt

SEQ ID NO: 10027 - DNA, 25 bp, Saccharomyces pastorianus
aaaactattgggactgcaccggtag

SEQ ID NO: 10028 - DNA, 25 bp, Saccharomyces pastorianus
aattcaacttcttcgaaatccgccg

SEQ ID NO: 10029 - DNA, 25 bp, Saccharomyces pastorianus
ttgcgccaatggctcgtggtaacca

SEQ ID NO: 10030 - DNA, 25 bp, Saccharomyces pastorianus
accttctttgctgcttctgtatatt

SEQ ID NO: 10031 - DNA, 25 bp, Saccharomyces pastorianus
atgttcttacaccattacttgcctg

SEQ ID NO: 10032 - DNA, 25 bp, Saccharomyces pastorianus
tacttgcctgcttactacttcggta

SEQ ID NO: 10033 - DNA, 25 bp, Saccharomyces pastorianus
gccctaggccatgccttggatataa

SEQ ID NO: 10034 - DNA, 25 bp, Saccharomyces pastorianus
ttacgcgccatccttcttaatgcaa

SEQ ID NO: 10035 - DNA, 25 bp, Saccharomyces pastorianus
gagttacagcccacttatctatggt

SEQ ID NO: 10036 - DNA, 25 bp, Saccharomyces pastorianus
atgggctatgctgtattggtcacct

SEQ ID NO: 10037 - DNA, 25 bp, Saccharomyces pastorianus
tgtctggttgggattacggctgtaa

SEQ ID NO: 10038 - DNA, 25 bp, Saccharomyces pastorianus
aattcctacctctctacatttgaag

SEQ ID NO: 10039 - DNA, 25 bp, Saccharomyces pastorianus
taatagtcagttatgtcttccgtaa

SEQ ID NO: 10040 - DNA, 25 bp, Saccharomyces pastorianus
tatttgttgggtttcgccatccatt

SEQ ID NO: 10041 - DNA, 25 bp, Saccharomyces pastorianus
gagatttccgtcaattcaagctctg

SEQ ID NO: 10042 - DNA, 25 bp, Saccharomyces pastorianus
gaaggctaaatgctctacaatggta

SEQ ID NO: 10043 - DNA, 25 bp, Saccharomyces pastorianus
tgtacgtttaacagccaaaaggctc

SEQ ID NO: 10044 - DNA, 25 bp, Saccharomyces pastorianus
tttgatgctaccaacaatcctgaat

SEQ ID NO: 10045 - DNA, 25 bp, Saccharomyces pastorianus
ggcaagaatactcatctgtgtttaa

SEQ ID NO: 10046 - DNA, 25 bp, Saccharomyces pastorianus
aatcctgaatatgacgtttccagaa

SEQ ID NO: 10047 - DNA, 25 bp, Saccharomyces pastorianus
ggctcatagagcacgatccggtaga

SEQ ID NO: 10048 - DNA, 25 bp, Saccharomyces pastorianus
tgtcctatggctcacatggcaagaa

SEQ ID NO: 10049 - DNA, 25 bp, Saccharomyces pastorianus
tcaagctctgacaaggaatacccat

SEQ ID NO: 10050 - DNA, 25 bp, Saccharomyces pastorianus
attgctaatcagaatgtcctatggc

SEQ ID NO: 10051 - DNA, 25 bp, Saccharomyces pastorianus
gtttccagaaaagcgcccgagattt

SEQ ID NO: 10052 - DNA, 25 bp, Saccharomyces pastorianus
gagagttgaaggctctatctcaaat

SEQ ID NO: 10053 - DNA, 25 bp, Saccharomyces pastorianus
atacgcattcgtagacttacattta

SEQ ID NO: 10054 - DNA, 25 bp, Saccharomyces pastorianus
gagagcttgagatgtctaccataat

SEQ ID NO: 10055 - DNA, 25 bp, Saccharomyces pastorianus
tcaagattctttaaggcgcgatcaa

SEQ ID NO: 10056 - DNA, 25 bp, Saccharomyces pastorianus
tgctgagcgacctgctaatttccag

SEQ ID NO: 10057 - DNA, 25 bp, Saccharomyces pastorianus
aatttccagcaccagtatgggttta

SEQ ID NO: 10058 - DNA, 25 bp, Saccharomyces pastorianus
aattgatcacaccagtaccgagaag

SEQ ID NO: 10059 - DNA, 25 bp, Saccharomyces pastorianus
atcctcgtttgatccaattgcgtca

SEQ ID NO: 10060 - DNA, 25 bp, Saccharomyces pastorianus
agaaccaactcaacttgctgagcga

SEQ ID NO: 10061 - DNA, 25 bp, Saccharomyces pastorianus
gttcgatgcatctttaccaacggag

SEQ ID NO: 10062 - DNA, 25 bp, Saccharomyces pastorianus
acatggcttacttgatccagaagaa

SEQ ID NO: 10063 - DNA, 25 bp, Saccharomyces pastorianus
gaagctctacagatcctggcgaagt

SEQ ID NO: 10064 - DNA, 25 bp, Saccharomyces pastorianus
tggcgaagtccagttttcaccacac

SEQ ID NO: 10065 - DNA, 25 bp, Saccharomyces pastorianus
agcaccaaaagttttcaccactcat

SEQ ID NO: 10066 - DNA, 25 bp, Saccharomyces pastorianus
gagcccgttgagacaaacaccttta

SEQ ID NO: 10067 - DNA, 25 bp, Saccharomyces pastorianus
gacggtttgattttatcgagcgcag

SEQ ID NO: 10068 - DNA, 25 bp, Saccharomyces pastorianus
attatctccacaccagtatttgcag

SEQ ID NO: 10069 - DNA, 25 bp, Saccharomyces pastorianus
gaataaccctgttcgattatctcca

SEQ ID NO: 10070 - DNA, 25 bp, Saccharomyces pastorianus
tcgagcgcagctttacaggaatatg

SEQ ID NO: 10071 - DNA, 25 bp, Saccharomyces pastorianus
gacatcaatgccatacttcgttcgc

SEQ ID NO: 10072 - DNA, 25 bp, Saccharomyces pastorianus
aagccagtttatgcactcgatcgaa

SEQ ID NO: 10073 - DNA, 25 bp, Saccharomyces pastorianus
gacacgcgtaaaccgacaagccagt

SEQ ID NO: 10074 - DNA, 25 bp, Saccharomyces pastorianus
tgaacccgctggactcatacataaa

SEQ ID NO: 10075 - DNA, 25 bp, Saccharomyces pastorianus
ataagggaaccatcactcctgcaat

SEQ ID NO: 10076 - DNA, 25 bp, Saccharomyces pastorianus
gatacggctaacgatcatactgatt

SEQ ID NO: 10077 - DNA, 25 bp, Saccharomyces pastorianus
aacagctggctggttgcagaattga

SEQ ID NO: 10078 - DNA, 25 bp, Saccharomyces pastorianus
acgtctcaacgtatcaaaactcctc

SEQ ID NO: 10079 - DNA, 25 bp, Saccharomyces pastorianus
atggcaagtcgctcttcattcaaaa

SEQ ID NO: 10080 - DNA, 25 bp, Saccharomyces pastorianus
atcactcctgcaatcgatgttggta

SEQ ID NO: 10081 - DNA, 25 bp, Saccharomyces pastorianus
aactgtccatcttctgcattgaggg

SEQ ID NO: 10082 - DNA, 25 bp, Saccharomyces pastorianus
ggaagcatctatcacggtgccttaa

SEQ ID NO: 10083 - DNA, 25 bp, Saccharomyces pastorianus
aatccaaatatgacccattctccga

SEQ ID NO: 10084 - DNA, 25 bp, Saccharomyces pastorianus
gtgccttaattggttgtatcccgta

SEQ ID NO: 10085 - DNA, 25 bp, Saccharomyces pastorianus
ttccccactgatattcactcgagaa

SEQ ID NO: 10086 - DNA, 25 bp, Saccharomyces pastorianus
gccttcagggcgttgttggacaaga

SEQ ID NO: 10087 - DNA, 25 bp, Saccharomyces pastorianus
caagaagccgctggagtcgtacgat

SEQ ID NO: 10088 - DNA, 25 bp, Saccharomyces pastorianus
acaacttcatgggtcctgaggcgtt

SEQ ID NO: 10089 - DNA, 25 bp, Saccharomyces pastorianus
tcggattcctgttcgagcaattcaa

SEQ ID NO: 10090 - DNA, 25 bp, Saccharomyces pastorianus
tcggtacttcggacacccatgtgga

SEQ ID NO: 10091 - DNA, 25 bp, Saccharomyces pastorianus
gacgactcactggaacgtgtttcga

SEQ ID NO: 10092 - DNA, 25 bp, Saccharomyces pastorianus
aaatggttctgatcttcggtacttc

SEQ ID NO: 10093 - DNA, 25 bp, Saccharomyces pastorianus
aacaagctgtgttgcgacctgcttt

SEQ ID NO: 10094 - DNA, 25 bp, Saccharomyces pastorianus
agttcacgttcttggaggtcttggc

SEQ ID NO: 10095 - DNA, 25 bp, Saccharomyces pastorianus
ggaaactgagacttgacctgggcga

SEQ ID NO: 10096 - DNA, 25 bp, Saccharomyces pastorianus
acaagcgcggtcttttgattaacga

SEQ ID NO: 10097 - DNA, 25 bp, Saccharomyces pastorianus
gaatacctggccagaaccttggaca

SEQ ID NO: 10098 - DNA, 25 bp, Saccharomyces pastorianus
gaatgctcgtttgggcaaccgggaa

SEQ ID NO: 10099 - DNA, 25 bp, Saccharomyces pastorianus
gattctgatcgccatggactggact

SEQ ID NO: 10100 - DNA, 25 bp, Saccharomyces pastorianus
tagaaccaacttacatccatacctt

SEQ ID NO: 10101 - DNA, 25 bp, Saccharomyces pastorianus
acaaactggagctactgggcgcaga

SEQ ID NO: 10102 - DNA, 25 bp, Saccharomyces pastorianus
agaggactctgtctatgccatcggc

SEQ ID NO: 10103 - DNA, 25 bp, Saccharomyces pastorianus
aaagtgtcccgtctgcaaggcgaaa

SEQ ID NO: 10104 - DNA, 25 bp, Saccharomyces pastorianus
tccataccttgcaaagcggccagaa

SEQ ID NO: 10105 - DNA, 25 bp, Saccharomyces pastorianus
ttggcaatgtgtctctccatcagaa

SEQ ID NO: 10106 - DNA, 25 bp, Saccharomyces pastorianus
gattgctgacctacacatgggtgac

SEQ ID NO: 10107 - DNA, 25 bp, Saccharomyces pastorianus
aagtctaccacgagagctaatgaat

SEQ ID NO: 10108 - DNA, 25 bp, Saccharomyces pastorianus
gggtttagccatttcatttgtttca

SEQ ID NO: 10109 - DNA, 25 bp, Saccharomyces pastorianus
tatgatttgaccaacgaggccgatc

SEQ ID NO: 10110 - DNA, 25 bp, Saccharomyces pastorianus
accaagtcatcattttcgttaagtc

SEQ ID NO: 10111 - DNA, 25 bp, Saccharomyces pastorianus
gattcggtaccaagggtttagccat

SEQ ID NO: 10112 - DNA, 25 bp, Saccharomyces pastorianus
tgtgtccactgatgttttcggtaga

SEQ ID NO: 10113 - DNA, 25 bp, Saccharomyces pastorianus
attaaatgcttctaacttccctgcc

SEQ ID NO: 10114 - DNA, 25 bp, Saccharomyces pastorianus
aagaatcgtaaactagcccaactat

SEQ ID NO: 10115 - DNA, 25 bp, Saccharomyces pastorianus
catcaccgtccatggtcacatgaaa

SEQ ID NO: 10116 - DNA, 25 bp, Saccharomyces pastorianus
gaacgtattaacctggccatcaatt

SEQ ID NO: 10117 - DNA, 25 bp, Saccharomyces pastorianus
gaaaaacgtatctgtgtgtccactg

SEQ ID NO: 10118 - DNA, 25 bp, Saccharomyces pastorianus
ctgaggctgccaatgttccagttga

SEQ ID NO: 10119 - DNA, 25 bp, Saccharomyces pastorianus
gatcttggccgactctgaaatcgaa

SEQ ID NO: 10120 - DNA, 25 bp, Saccharomyces pastorianus
gacattttcgccaaggctttggacg

SEQ ID NO: 10121 - DNA, 25 bp, Saccharomyces pastorianus
gtatctgggctgacattttcgccaa

SEQ ID NO: 10122 - DNA, 25 bp, Saccharomyces pastorianus
gactttgactgaggctgccaatgtt

SEQ ID NO: 10123 - DNA, 25 bp, Saccharomyces pastorianus
tcgccaaggctttggacggtcaaaa

SEQ ID NO: 10124 - DNA, 25 bp, Saccharomyces pastorianus
tgtctcctccggtgttgctggtggt

SEQ ID NO: 10125 - DNA, 25 bp, Saccharomyces pastorianus
ttgtcttacgctgccttgatcttgg

SEQ ID NO: 10126 - DNA, 25 bp, Saccharomyces pastorianus
tggtgccgctgctccatctggtgtc

SEQ ID NO: 10127 - DNA, 25 bp, Saccharomyces pastorianus
tactgaatccgctttgtcttacgct

SEQ ID NO: 10128 - DNA, 25 bp, Saccharomyces pastorianus
agttgaaggtatctgggctgacatt

SEQ ID NO: 10129 - DNA, 25 bp, Saccharomyces pastorianus
gatttgatccgtgacaactctattg

SEQ ID NO: 10130 - DNA, 25 bp, Saccharomyces pastorianus
aaagcaaggcgctggttcagccaca

SEQ ID NO: 10131 - DNA, 25 bp, Saccharomyces pastorianus
cacattgtctatggcattcgcaggg

SEQ ID NO: 10132 - DNA, 25 bp, Saccharomyces pastorianus
ggccactcgggcgaaacgattattc

SEQ ID NO: 10133 - DNA, 25 bp, Saccharomyces pastorianus
aaagtcaccgttatcggaggccact

SEQ ID NO: 10134 - DNA, 25 bp, Saccharomyces pastorianus
gaagcctgaaacagagtcgctcacc

SEQ ID NO: 10135 - DNA, 25 bp, Saccharomyces pastorianus
gacaccgctgtcaaggaactacgca

SEQ ID NO: 10136 - DNA, 25 bp, Saccharomyces pastorianus
gaaccttgatttggtgcgcgcagaa

SEQ ID NO: 10137 - DNA, 25 bp, Saccharomyces pastorianus
aaatctttggtgttccagcttgaga

SEQ ID NO: 10138 - DNA, 25 bp, Saccharomyces pastorianus
ggtagcatcacgtctattgacacta

SEQ ID NO: 10139 - DNA, 25 bp, Saccharomyces pastorianus
attgacactagcatcttggagagac

SEQ ID NO: 10140 - DNA, 25 bp, Saccharomyces pastorianus
acttcggaaccgattctatttcatg

SEQ ID NO: 10141 - DNA, 25 bp, Saccharomyces pastorianus
tccccttgtatgatatcggtagagt

SEQ ID NO: 10142 - DNA, 25 bp, Saccharomyces pastorianus
acagtttatcttcatacggagtctt

SEQ ID NO: 10143 - DNA, 25 bp, Saccharomyces pastorianus
attgttaaagaagcactcgtcgaaa

SEQ ID NO: 10144 - DNA, 25 bp, Saccharomyces pastorianus
tgaccactactttctgtctcaatga

SEQ ID NO: 10145 - DNA, 25 bp, Saccharomyces pastorianus
gagaagcttttgttgtacctatacg

SEQ ID NO: 10146 - DNA, 25 bp, Saccharomyces pastorianus
tacaggatcgttttactgctcaaac

SEQ ID NO: 10147 - DNA, 25 bp, Saccharomyces pastorianus
aaacggaaattccaagctgattctg

SEQ ID NO: 10148 - DNA, 25 bp, Saccharomyces pastorianus
tacggagtcttgtcggatagccata

SEQ ID NO: 10149 - DNA, 25 bp, Saccharomyces pastorianus
gagggtagaaatatcgtcacgcact

SEQ ID NO: 10150 - DNA, 25 bp, Saccharomyces pastorianus
caagttgagcttgtgaccactactt

SEQ ID NO: 10151 - DNA, 25 bp, Saccharomyces pastorianus
gctgacagggacacctttcgattta

SEQ ID NO: 10152 - DNA, 25 bp, Saccharomyces pastorianus
gtttcaaagagggatccttccgtga

SEQ ID NO: 10153 - DNA, 25 bp, Saccharomyces pastorianus
ggacacggttttacacgatgggata

SEQ ID NO: 10154 - DNA, 25 bp, Saccharomyces pastorianus
tgaagacgttcaggccagcttggat

SEQ ID NO: 10155 - DNA, 25 bp, Saccharomyces pastorianus
tttgggtacactctactacaaccgt

SEQ ID NO: 10156 - DNA, 25 bp, Saccharomyces pastorianus
gaggattcgacgagctactctgaga

SEQ ID NO: 10157 - DNA, 25 bp, Saccharomyces pastorianus
tactcggatgattcagaccccattt

SEQ ID NO: 10158 - DNA, 25 bp, Saccharomyces pastorianus
taatctttatgacaggacccttcca

SEQ ID NO: 10159 - DNA, 25 bp, Saccharomyces pastorianus
tagaggtggagctcttgctactacc

SEQ ID NO: 10160 - DNA, 25 bp, Saccharomyces pastorianus
aaacccgttgcatctccaggtaact

SEQ ID NO: 10161 - DNA, 25 bp, Saccharomyces pastorianus
gatagtgtcataggcaaccttcccc

SEQ ID NO: 10162 - DNA, 25 bp, Saccharomyces pastorianus
gtcaaaaacgtctcacctagaagct

SEQ ID NO: 10163 - DNA, 25 bp, Saccharomyces pastorianus
aagagcttgcaaacttccgtaccct

SEQ ID NO: 10164 - DNA, 25 bp, Saccharomyces pastorianus
aattacacgatgcactattcaacaa

SEQ ID NO: 10165 - DNA, 25 bp, Saccharomyces pastorianus
tccgtaccctagtttattgctcttt

SEQ ID NO: 10166 - DNA, 25 bp, Saccharomyces pastorianus
cgaaagcattgtaagcctgacgcat

SEQ ID NO: 10167 - DNA, 25 bp, Saccharomyces pastorianus
gtaagcctgacgcatctggaaacta

SEQ ID NO: 10168 - DNA, 25 bp, Saccharomyces pastorianus
agtgccccacatgcaacaaagcgtt

SEQ ID NO: 10169 - DNA, 25 bp, Saccharomyces pastorianus
gaagaggtcgctagacaaactacaa

SEQ ID NO: 10170 - DNA, 25 bp, Saccharomyces pastorianus
gaggcactcgttgaagagcttgcaa

SEQ ID NO: 10171 - DNA, 25 bp, Saccharomyces pastorianus
gcaagaatgaggaagtgccccacat

SEQ ID NO: 10172 - DNA, 25 bp, Saccharomyces pastorianus
aagggctcaaacgacgaggcactcg

SEQ ID NO: 10173 - DNA, 25 bp, Saccharomyces pastorianus
tagtgtttgccattctggtggtcga

SEQ ID NO: 10174 - DNA, 25 bp, Saccharomyces pastorianus
atttttatgttctccatcctggcca

SEQ ID NO: 10175 - DNA, 25 bp, Saccharomyces pastorianus
aatggcacggtcattgctcaggata

SEQ ID NO: 10176 - DNA, 25 bp, Saccharomyces pastorianus
gaatgactctgttaccgctgaggct

SEQ ID NO: 10177 - DNA, 25 bp, Saccharomyces pastorianus
gtacctcactggcataactttgttc

SEQ ID NO: 10178 - DNA, 25 bp, Saccharomyces pastorianus
cattcttttgctcttcgttgattgc

SEQ ID NO: 10179 - DNA, 25 bp, Saccharomyces pastorianus
tgcagttaagcactacttctccgaa

SEQ ID NO: 10180 - DNA, 25 bp, Saccharomyces pastorianus
ttagtcatcgagctcttgaccatga

SEQ ID NO: 10181 - DNA, 25 bp, Saccharomyces pastorianus
gcctctaaggacgaccacggtgatg

SEQ ID NO: 10182 - DNA, 25 bp, Saccharomyces pastorianus
gaaagacgtgtacagagcttcgcca

SEQ ID NO: 10183 - DNA, 25 bp, Saccharomyces pastorianus
atgcatactcgggttcattcttttg

SEQ ID NO: 10184 - DNA, 25 bp, Saccharomyces pastorianus
ggccatccagtatttagaacaaaag

SEQ ID NO: 10185 - DNA, 25 bp, Saccharomyces pastorianus
aagattagggagaccttcagttaat

SEQ ID NO: 10186 - DNA, 25 bp, Saccharomyces pastorianus
ttacccgaagagaaatattttgcgt

SEQ ID NO: 10187 - DNA, 25 bp, Saccharomyces pastorianus
gggagaccttcagttaatgatttga

SEQ ID NO: 10188 - DNA, 25 bp, Saccharomyces pastorianus
aatccggccatccagtatttagaac

SEQ ID NO: 10189 - DNA, 25 bp, Saccharomyces pastorianus
ggatattttaaatgaacggactatt

SEQ ID NO: 10190 - DNA, 25 bp, Saccharomyces pastorianus
gatcttgatgaagatagctattctt

SEQ ID NO: 10191 - DNA, 25 bp, Saccharomyces pastorianus
aactaatccggccatccagtattta

SEQ ID NO: 10192 - DNA, 25 bp, Saccharomyces pastorianus
ttgacggcgcaagcaaataagaaaa

SEQ ID NO: 10193 - DNA, 25 bp, Saccharomyces pastorianus
tcaaaaattcattacctaaagacga

SEQ ID NO: 10194 - DNA, 25 bp, Saccharomyces pastorianus
aatcataacgatttgacggcgcaag

SEQ ID NO: 10195 - DNA, 25 bp, Saccharomyces pastorianus
atggctattgctccaattactggta

SEQ ID NO: 10196 - DNA, 25 bp, Saccharomyces pastorianus
aagtcatcatggacatgatcatcgg

SEQ ID NO: 10197 - DNA, 25 bp, Saccharomyces pastorianus
gacatgatcatcgggttctccctcg

SEQ ID NO: 10198 - DNA, 25 bp, Saccharomyces pastorianus
tggacatgatcatcgggttctccct

SEQ ID NO: 10199 - DNA, 25 bp, Saccharomyces pastorianus
atcatggacatgatcatcgggttct

SEQ ID NO: 10200 - DNA, 25 bp, Saccharomyces pastorianus
gtgctatggcctcctactggtggtg

SEQ ID NO: 10201 - DNA, 25 bp, Saccharomyces pastorianus
ggtgctatggcctcctactggtggt

SEQ ID NO: 10202 - DNA, 25 bp, Saccharomyces pastorianus
catggacatgatcatcgggttctcc

SEQ ID NO: 10203 - DNA, 25 bp, Saccharomyces pastorianus
gctccaattactggtacgatcaaaa

SEQ ID NO: 10204 - DNA, 25 bp, Saccharomyces pastorianus
aaagaaaagtcatcatggacatgat

SEQ ID NO: 10205 - DNA, 25 bp, Saccharomyces pastorianus
tcatggacatgatcatcgggttctc

SEQ ID NO: 10206 - DNA, 25 bp, Saccharomyces pastorianus
atatggtcgctcagatggttaagtc

SEQ ID NO: 10207 - DNA, 25 bp, Saccharomyces pastorianus
aacattttggagtctgccaccctaa

SEQ ID NO: 10208 - DNA, 25 bp, Saccharomyces pastorianus
aacttctacgaattccattgcgtcg

SEQ ID NO: 10209 - DNA, 25 bp, Saccharomyces pastorianus
aatgaaagatctgcttacgttacca

SEQ ID NO: 10210 - DNA, 25 bp, Saccharomyces pastorianus
cattgcgtcgatttttgcttggtca

SEQ ID NO: 10211 - DNA, 25 bp, Saccharomyces pastorianus
actgaacctgttcttgtctactaag

SEQ ID NO: 10212 - DNA, 25 bp, Saccharomyces pastorianus
gggtgatttagacaatactccaagt

SEQ ID NO: 10213 - DNA, 25 bp, Saccharomyces pastorianus
gtccaatctgatatcgttgcccagg

SEQ ID NO: 10214 - DNA, 25 bp, Saccharomyces pastorianus
gttgcccagggattcggttccttgg

SEQ ID NO: 10215 - DNA, 25 bp, Saccharomyces pastorianus
aagctcaatataaggccaagttcga

SEQ ID NO: 10216 - DNA, 25 bp, Saccharomyces pastorianus
tgaggctgctcatggtactgtgacc

SEQ ID NO: 10217 - DNA, 25 bp, Saccharomyces pastorianus
tgttcctctcacaccggtttggtca

SEQ ID NO: 10218 - DNA, 25 bp, Saccharomyces pastorianus
ttcctctcacaccggtttggtcaga

SEQ ID NO: 10219 - DNA, 25 bp, Saccharomyces pastorianus
atgtcgtgtctgttcctctcacacc

SEQ ID NO: 10220 - DNA, 25 bp, Saccharomyces pastorianus
gtgtctgttcctctcacaccggttt

SEQ ID NO: 10221 - DNA, 25 bp, Saccharomyces pastorianus
gttcctctcacaccggtttggtcag

SEQ ID NO: 10222 - DNA, 25 bp, Saccharomyces pastorianus
tcgtgtctgttcctctcacaccggt

SEQ ID NO: 10223 - DNA, 25 bp, Saccharomyces pastorianus
atggctcacgaaaacgtttggttct

SEQ ID NO: 10224 - DNA, 25 bp, Saccharomyces pastorianus
tctgttcctctcacaccggtttggt

SEQ ID NO: 10225 - DNA, 25 bp, Saccharomyces pastorianus
cggtttggtcagaaagtacgatttg

SEQ ID NO: 10226 - DNA, 25 bp, Saccharomyces pastorianus
tgtctgttcctctcacaccggtttg

SEQ ID NO: 10227 - DNA, 25 bp, Saccharomyces pastorianus
gattcggtaaaggttcccgccaatg

SEQ ID NO: 10228 - DNA, 25 bp, Saccharomyces pastorianus
gggtcatccatttagattccacaag

SEQ ID NO: 10229 - DNA, 25 bp, Saccharomyces pastorianus
tcagccactattttctcaggattcg

SEQ ID NO: 10230 - DNA, 25 bp, Saccharomyces pastorianus
gtacgttacatgttctttagaccgg

SEQ ID NO: 10231 - DNA, 25 bp, Saccharomyces pastorianus
gcagtggtcaacttctcgttacaaa

SEQ ID NO: 10232 - DNA, 25 bp, Saccharomyces pastorianus
gatcgccacatgtattgcacctgta

SEQ ID NO: 10233 - DNA, 25 bp, Saccharomyces pastorianus
gcaatcccctgcaattttcttcaaa

SEQ ID NO: 10234 - DNA, 25 bp, Saccharomyces pastorianus
gaagaatacgacaaccctgtacctt

SEQ ID NO: 10235 - DNA, 25 bp, Saccharomyces pastorianus
ggtcacggtacattcttaaacgcag

SEQ ID NO: 10236 - DNA, 25 bp, Saccharomyces pastorianus
gtctgggtacacacggttatctcaa

SEQ ID NO: 10237 - DNA, 25 bp, Saccharomyces pastorianus
tgcacctgtagatttcacgcaatcc

SEQ ID NO: 10238 - DNA, 25 bp, Saccharomyces pastorianus
agatgttgttgccatgtccttgtat

SEQ ID NO: 10239 - DNA, 25 bp, Saccharomyces pastorianus
gggtcccttgctatgttcaaattct

SEQ ID NO: 10240 - DNA, 25 bp, Saccharomyces pastorianus
gaatgcggaccacaactattacggc

SEQ ID NO: 10241 - DNA, 25 bp, Saccharomyces pastorianus
ggccaacggtccacgatatggtgaa

SEQ ID NO: 10242 - DNA, 25 bp, Saccharomyces pastorianus
cgccaacttgctcggtaatgtcgtg

SEQ ID NO: 10243 - DNA, 25 bp, Saccharomyces pastorianus
agacagacacgatctcactgggtgt

SEQ ID NO: 10244 - DNA, 25 bp, Saccharomyces pastorianus
ttcaatggaatacccgttgccttct

SEQ ID NO: 10245 - DNA, 25 bp, Saccharomyces pastorianus
gcttagtgcggcttcaaactatgca

SEQ ID NO: 10246 - DNA, 25 bp, Saccharomyces pastorianus
tagtatagccaacgtttgcgtcccg

SEQ ID NO: 10247 - DNA, 25 bp, Saccharomyces pastorianus
gttcacggctacacccgaattggga

SEQ ID NO: 10248 - DNA, 25 bp, Saccharomyces pastorianus
taatgtcgtgctatggtacctgcga

SEQ ID NO: 10249 - DNA, 25 bp, Saccharomyces pastorianus
ttttggatcccatcaagcgaaactt

SEQ ID NO: 10250 - DNA, 25 bp, Saccharomyces pastorianus
agaaccatgctttggtcaagtcctc

SEQ ID NO: 10251 - DNA, 25 bp, Saccharomyces pastorianus
ggaactccactgttggccaatggtg

SEQ ID NO: 10252 - DNA, 25 bp, Saccharomyces pastorianus
aaccagagaagttggccaccggctc

SEQ ID NO: 10253 - DNA, 25 bp, Saccharomyces pastorianus
ttaacgccggtctgtacattctaaa

SEQ ID NO: 10254 - DNA, 25 bp, Saccharomyces pastorianus
acaattgtactctttcgacttggaa

SEQ ID NO: 10255 - DNA, 25 bp, Saccharomyces pastorianus
gtcagaatcaccagatccgttgtct

SEQ ID NO: 10256 - DNA, 25 bp, Saccharomyces pastorianus
ttgtcagggtccgttctttacttga

SEQ ID NO: 10257 - DNA, 25 bp, Saccharomyces pastorianus
tcaagtcctccatcgttggttggaa

SEQ ID NO: 10258 - DNA, 25 bp, Saccharomyces pastorianus
cactccaaaccttatcgacagattc

SEQ ID NO: 10259 - DNA, 25 bp, Saccharomyces pastorianus
aagatcggcccagacgtggtcattg

SEQ ID NO: 10260 - DNA, 25 bp, Saccharomyces pastorianus
gtggtcattggtcctaacgtcacca

SEQ ID NO: 10261 - DNA, 25 bp, Saccharomyces pastorianus
tgcgcgcagttgaccttgttcaaac

SEQ ID NO: 10262 - DNA, 25 bp, Saccharomyces pastorianus
attctggcgctgtcgattctactat

SEQ ID NO: 10263 - DNA, 25 bp, Saccharomyces pastorianus
agcagcattgcattcgttgcatcca

SEQ ID NO: 10264 - DNA, 25 bp, Saccharomyces pastorianus
gtgggctctacgatattctgcatgc

SEQ ID NO: 10265 - DNA, 25 bp, Saccharomyces pastorianus
agggtcgctggtcggaatcatctac

SEQ ID NO: 10266 - DNA, 25 bp, Saccharomyces pastorianus
aaatggatcctgctaacgctgctgt

SEQ ID NO: 10267 - DNA, 25 bp, Saccharomyces pastorianus
gcgaaagtgtacgattccggctgta

SEQ ID NO: 10268 - DNA, 25 bp, Saccharomyces pastorianus
ttgttcaaactggtctcctcgaaga

SEQ ID NO: 10269 - DNA, 25 bp, Saccharomyces pastorianus
gcatgcatctcggttgtctacaagt

SEQ ID NO: 10270 - DNA, 25 bp, Saccharomyces pastorianus
gaagttactgtccacttatgcgctc

SEQ ID NO: 10271 - DNA, 25 bp, Saccharomyces pastorianus
atgggatctctaaccaacctgctgg

SEQ ID NO: 10272 - DNA, 25 bp, Saccharomyces pastorianus
agacaggtcctgtaggcagcaagcc

SEQ ID NO: 10273 - DNA, 25 bp, Saccharomyces pastorianus
tgggttttccctgaaggtaccagat

SEQ ID NO: 10274 - DNA, 25 bp, Saccharomyces pastorianus
ggtccgtgccttctgatgacatgaa

SEQ ID NO: 10275 - DNA, 25 bp, Saccharomyces pastorianus
gaacagattagaacccgtatgcttg

SEQ ID NO: 10276 - DNA, 25 bp, Saccharomyces pastorianus
aggaaatcggttactctccagctat

SEQ ID NO: 10277 - DNA, 25 bp, Saccharomyces pastorianus
gatgaaatacctcccatttttgggt

SEQ ID NO: 10278 - DNA, 25 bp, Saccharomyces pastorianus
cacctggttgtacggttactgccaa

SEQ ID NO: 10279 - DNA, 25 bp, Saccharomyces pastorianus
ttgtcccagtggttgtttctaacac

SEQ ID NO: 10280 - DNA, 25 bp, Saccharomyces pastorianus
gaggctctcaagtatgctactcttc

SEQ ID NO: 10281 - DNA, 25 bp, Saccharomyces pastorianus
atcttggaacccgtttctactgaga

SEQ ID NO: 10282 - DNA, 25 bp, Saccharomyces pastorianus
tgccttccatttggcgcaacaggga

SEQ ID NO: 10283 - DNA, 25 bp, Saccharomyces pastorianus
gataaatcggctgctttggcctcat

SEQ ID NO: 10284 - DNA, 25 bp, Saccharomyces pastorianus
gacatggaggtgtacccgcacaaga

SEQ ID NO: 10285 - DNA, 25 bp, Saccharomyces pastorianus
tcaaggccttgcatttcgaataccc

SEQ ID NO: 10286 - DNA, 25 bp, Saccharomyces pastorianus
atttgaccccggaagacaggcctca

SEQ ID NO: 10287 - DNA, 25 bp, Saccharomyces pastorianus
gaccagatcgctttattttgagcca

SEQ ID NO: 10288 - DNA, 25 bp, Saccharomyces pastorianus
tacaactccaccttgatcaacttag

SEQ ID NO: 10289 - DNA, 25 bp, Saccharomyces pastorianus
ttgccaacgtggctttgctagaaac

SEQ ID NO: 10290 - DNA, 25 bp, Saccharomyces pastorianus
aacaggcgtcttttcgcgctgtgac

SEQ ID NO: 10291 - DNA, 25 bp, Saccharomyces pastorianus
tcaaaggtgccttcaaatgccccta

SEQ ID NO: 10292 - DNA, 25 bp, Saccharomyces pastorianus
tcatcttcttccgaggacacgaaac

SEQ ID NO: 10293 - DNA, 25 bp, Saccharomyces pastorianus
aacgtcgacgtctggctgaacaaac

SEQ ID NO: 10294 - DNA, 25 bp, Saccharomyces pastorianus
atacccggccaagattactctggtg

SEQ ID NO: 10295 - DNA, 25 bp, Saccharomyces pastorianus
gtatttgactttctgacgctagccg

SEQ ID NO: 10296 - DNA, 25 bp, Saccharomyces pastorianus
gagtccaggcaaattacccaagtgt

SEQ ID NO: 10297 - DNA, 25 bp, Saccharomyces pastorianus
ggcaagatcctatgtgtccacggtg

SEQ ID NO: 10298 - DNA, 25 bp, Saccharomyces pastorianus
aaggatgtcgtcaccgtttggtccg

SEQ ID NO: 10299 - DNA, 25 bp, Saccharomyces pastorianus
cagcaaggtcgccagagagttcaac

SEQ ID NO: 10300 - DNA, 25 bp, Saccharomyces pastorianus
ttggtccgcaccaaactactgttat

SEQ ID NO: 10301 - DNA, 25 bp, Saccharomyces pastorianus
gagagttcaaccacgtcaacggact

SEQ ID NO: 10302 - DNA, 25 bp, Saccharomyces pastorianus
ggtggactatctcccgagattcgaa

SEQ ID NO: 10303 - DNA, 25 bp, Saccharomyces pastorianus
ataagtacgggtccaccacggtatg

SEQ ID NO: 10304 - DNA, 25 bp, Saccharomyces pastorianus
ttggtcggaccctgacaacgtagaa

SEQ ID NO: 10305 - DNA, 25 bp, Saccharomyces pastorianus
acagccgcagttcaggcaggcgtaa

SEQ ID NO: 10306 - DNA, 25 bp, Saccharomyces pastorianus
agtatattcaatgcactacctccgc

SEQ ID NO: 10307 - DNA, 25 bp, Saccharomyces pastorianus
ttcggtttgctatttctctacacag

SEQ ID NO: 10308 - DNA, 25 bp, Saccharomyces pastorianus
ggttatatcagactgctatcccaga

SEQ ID NO: 10309 - DNA, 25 bp, Saccharomyces pastorianus
ggtacgtcgtcctagcaagagctta

SEQ ID NO: 10310 - DNA, 25 bp, Saccharomyces pastorianus
tacggccaacggtgaggtcttcgaa

SEQ ID NO: 10311 - DNA, 25 bp, Saccharomyces pastorianus
gacaacgacatcgagggcttatcct

SEQ ID NO: 10312 - DNA, 25 bp, Saccharomyces pastorianus
gcggtgaatcaccactgtaccagtg

SEQ ID NO: 10313 - DNA, 25 bp, Saccharomyces pastorianus
atcccagactttcgacttgtgtcaa

SEQ ID NO: 10314 - DNA, 25 bp, Saccharomyces pastorianus
aactccaagccaattagcggtgaat

SEQ ID NO: 10315 - DNA, 25 bp, Saccharomyces pastorianus
cgaagtcgaagtgcgtctaggttat

SEQ ID NO: 10316 - DNA, 25 bp, Saccharomyces pastorianus
agaactgaaaagttgcaccagtgaa

SEQ ID NO: 10317 - DNA, 25 bp, Saccharomyces pastorianus
aaattaccatgctgctagattatac

SEQ ID NO: 10318 - DNA, 25 bp, Saccharomyces pastorianus
gaaacccatcatcagacaagaagca

SEQ ID NO: 10319 - DNA, 25 bp, Saccharomyces pastorianus
tatataggttacctcccttacccag

SEQ ID NO: 10320 - DNA, 25 bp, Saccharomyces pastorianus
acatgaaccctaagtgtgccgcttt

SEQ ID NO: 10321 - DNA, 25 bp, Saccharomyces pastorianus
tgccgctttggtgacagaactgaaa

SEQ ID NO: 10322 - DNA, 25 bp, Saccharomyces pastorianus
aaatttattgcaatgctggtcttca

SEQ ID NO: 10323 - DNA, 25 bp, Saccharomyces pastorianus
aagtgtgccgctttggtgacagaac

SEQ ID NO: 10324 - DNA, 25 bp, Saccharomyces pastorianus
gtgaagaaacccatcatcagacaag

SEQ ID NO: 10325 - DNA, 25 bp, Saccharomyces pastorianus
tggccacatgaaccctaagtgtgcc

SEQ ID NO: 10326 - DNA, 25 bp, Saccharomyces pastorianus
ccaccagtatataggttacctccct

SEQ ID NO: 10327 - DNA, 25 bp, Saccharomyces pastorianus
caattctttacccaacccatatttg

SEQ ID NO: 10328 - DNA, 25 bp, Saccharomyces pastorianus
ggcagatgcgtttcgagaattcata

SEQ ID NO: 10329 - DNA, 25 bp, Saccharomyces pastorianus
gacccatatggtgaaacgctacaac

SEQ ID NO: 10330 - DNA, 25 bp, Saccharomyces pastorianus
tgcagcgggagagcatgatcctatt

SEQ ID NO: 10331 - DNA, 25 bp, Saccharomyces pastorianus
gaacggactcgaattggcctgattt

SEQ ID NO: 10332 - DNA, 25 bp, Saccharomyces pastorianus
gaacgatattgcctgtcattgtatg

SEQ ID NO: 10333 - DNA, 25 bp, Saccharomyces pastorianus
tatcctggttggtatctgatcgatg

SEQ ID NO: 10334 - DNA, 25 bp, Saccharomyces pastorianus
taggtatcaggcacacagacccata

SEQ ID NO: 10335 - DNA, 25 bp, Saccharomyces pastorianus
cagccccttttacactgggacttga

SEQ ID NO: 10336 - DNA, 25 bp, Saccharomyces pastorianus
gggagattgcccacgcatttggcaa

SEQ ID NO: 10337 - DNA, 25 bp, Saccharomyces pastorianus
catcggtgggcggtgtcaacaattc

SEQ ID NO: 10338 - DNA, 25 bp, Saccharomyces pastorianus
gaccatttgtaatgttgacttctac

SEQ ID NO: 10339 - DNA, 25 bp, Saccharomyces pastorianus
cgtgtggtcactgagatgagcgtaa

SEQ ID NO: 10340 - DNA, 25 bp, Saccharomyces pastorianus
accgaacgagctaccaaaaccatat

SEQ ID NO: 10341 - DNA, 25 bp, Saccharomyces pastorianus
cagagtcttcaaacatattcgagga

SEQ ID NO: 10342 - DNA, 25 bp, Saccharomyces pastorianus
tcgaaacggtggatatacttgataa

SEQ ID NO: 10343 - DNA, 25 bp, Saccharomyces pastorianus
cgtaaatggtgtcatcgggaatatc

SEQ ID NO: 10344 - DNA, 25 bp, Saccharomyces pastorianus
ggatgtgtctttatacttgaccatt

SEQ ID NO: 10345 - DNA, 25 bp, Saccharomyces pastorianus
gtatgatacagttgagggcactata

SEQ ID NO: 10346 - DNA, 25 bp, Saccharomyces pastorianus
gacttctacaatttactgatgcaac

SEQ ID NO: 10347 - DNA, 25 bp, Saccharomyces pastorianus
caagtgattttggttttccatcaga

SEQ ID NO: 10348 - DNA, 25 bp, Saccharomyces pastorianus
gatgcaactgttgtgggaaaacttc

SEQ ID NO: 10349 - DNA, 25 bp, Saccharomyces pastorianus
gaagtcgctttggaagaacctcgtt

SEQ ID NO: 10350 - DNA, 25 bp, Saccharomyces pastorianus
aacacccgttttgatgcgatcttga

SEQ ID NO: 10351 - DNA, 25 bp, Saccharomyces pastorianus
atttgctaaaagattcggctccaca

SEQ ID NO: 10352 - DNA, 25 bp, Saccharomyces pastorianus
gaggctgctgccatgaacaagcgga

SEQ ID NO: 10353 - DNA, 25 bp, Saccharomyces pastorianus
gcgaagagcgttgcagcttacccaa

SEQ ID NO: 10354 - DNA, 25 bp, Saccharomyces pastorianus
ggcgttatgtttcgcttctctgaac

SEQ ID NO: 10355 - DNA, 25 bp, Saccharomyces pastorianus
aaactgatagaaactgccaccccaa

SEQ ID NO: 10356 - DNA, 25 bp, Saccharomyces pastorianus
aatggaagacttcgcggacaccttt

SEQ ID NO: 10357 - DNA, 25 bp, Saccharomyces pastorianus
aagaggcctactattcctgtaccgt

SEQ ID NO: 10358 - DNA, 25 bp, Saccharomyces pastorianus
taatctttctcttttggaacctcac

SEQ ID NO: 10359 - DNA, 25 bp, Saccharomyces pastorianus
ggacaccttttacgatgactactct

SEQ ID NO: 10360 - DNA, 25 bp, Saccharomyces pastorianus
aaaattccatttcctgaccatacca

SEQ ID NO: 10361 - DNA, 25 bp, Saccharomyces pastorianus
ccccgtatggtagctttcaaggcca

SEQ ID NO: 10362 - DNA, 25 bp, Saccharomyces pastorianus
gagaggattccaaagtctgccattg

SEQ ID NO: 10363 - DNA, 25 bp, Saccharomyces pastorianus
gtcggaagaccttcggatatgtggt

SEQ ID NO: 10364 - DNA, 25 bp, Saccharomyces pastorianus
tgagactcagatcggtacaccaaat

SEQ ID NO: 10365 - DNA, 25 bp, Saccharomyces pastorianus
ggtcatgtggttgcatcgtatatca

SEQ ID NO: 10366 - DNA, 25 bp, Saccharomyces pastorianus
cacgatgctggtattgttcattctg

SEQ ID NO: 10367 - DNA, 25 bp, Saccharomyces pastorianus
tgaaacccgcaaattttgtcttagt

SEQ ID NO: 10368 - DNA, 25 bp, Saccharomyces pastorianus
ggcactggttgccatgaattacaca

SEQ ID NO: 10369 - DNA, 25 bp, Saccharomyces pastorianus
tgttcattctgatttgaaacccgca

SEQ ID NO: 10370 - DNA, 25 bp, Saccharomyces pastorianus
ttatatggcgccagaggcactggtt

SEQ ID NO: 10371 - DNA, 25 bp, Saccharomyces pastorianus
aatacactactatctcgtcactttg

SEQ ID NO: 10372 - DNA, 25 bp, Saccharomyces pastorianus
accttgcgaatgtgtatgttctcat

SEQ ID NO: 10373 - DNA, 25 bp, Saccharomyces pastorianus
aggtcatactttttgggcgataacg

SEQ ID NO: 10374 - DNA, 25 bp, Saccharomyces pastorianus
gtggaggttattcaaaggccgattt

SEQ ID NO: 10375 - DNA, 25 bp, Saccharomyces pastorianus
gtcactttgttatcacagccaaggg

SEQ ID NO: 10376 - DNA, 25 bp, Saccharomyces pastorianus
gattcgggcgatttcttttcaagat

SEQ ID NO: 10377 - DNA, 25 bp, Saccharomyces pastorianus
ttcgccagtgtccagtacaaattgt

SEQ ID NO: 10378 - DNA, 25 bp, Saccharomyces pastorianus
ttcaagattccatattcgccagtgt

SEQ ID NO: 10379 - DNA, 25 bp, Saccharomyces pastorianus
gacctggaactggatatcgagaact

SEQ ID NO: 10380 - DNA, 25 bp, Saccharomyces pastorianus
aggccgattttttcaagatattgca

SEQ ID NO: 10381 - DNA, 25 bp, Saccharomyces pastorianus
agataagtctttccccgaagtaatg

SEQ ID NO: 10382 - DNA, 25 bp, Saccharomyces pastorianus
gtagcgctgtcgtttttcaataccc

SEQ ID NO: 10383 - DNA, 25 bp, Saccharomyces pastorianus
aggctattaccaagagactcacgaa

SEQ ID NO: 10384 - DNA, 25 bp, Saccharomyces pastorianus
gaaactagacaactgcgtggttact

SEQ ID NO: 10385 - DNA, 25 bp, Saccharomyces pastorianus
agacgtctggtcgatcgctattata

SEQ ID NO: 10386 - DNA, 25 bp, Saccharomyces pastorianus
ggtgtcaattatcttcattctatgg

SEQ ID NO: 10387 - DNA, 25 bp, Saccharomyces pastorianus
cgactgtttaccgaggagcctgaag

SEQ ID NO: 10388 - DNA, 25 bp, Saccharomyces pastorianus
cataccttgctcctgagctactaaa

SEQ ID NO: 10389 - DNA, 25 bp, Saccharomyces pastorianus
aaattgattgacttcggtagcgctg

SEQ ID NO: 10390 - DNA, 25 bp, Saccharomyces pastorianus
tcccctcttgtgaaattgaccctat

SEQ ID NO: 10391 - DNA, 25 bp, Saccharomyces pastorianus
agcttcaattcctttcgactgttta

SEQ ID NO: 10392 - DNA, 25 bp, Saccharomyces pastorianus
attgaccctatatcgggcgagttgg

SEQ ID NO: 10393 - DNA, 25 bp, Saccharomyces pastorianus
gtcgatatcccaaacggaattccat

SEQ ID NO: 10394 - DNA, 25 bp, Saccharomyces pastorianus
ttagctacccaatacgatgaatcgt

SEQ ID NO: 10395 - DNA, 25 bp, Saccharomyces pastorianus
tcttccaccgggtacgaattcaaag

SEQ ID NO: 10396 - DNA, 25 bp, Saccharomyces pastorianus
acttggaggttaaacgagcgtcact

SEQ ID NO: 10397 - DNA, 25 bp, Saccharomyces pastorianus
tcttaccagactccgaatctcttcg

SEQ ID NO: 10398 - DNA, 25 bp, Saccharomyces pastorianus
tgaatcgtcctgcttaatcgtgggc

SEQ ID NO: 10399 - DNA, 25 bp, Saccharomyces pastorianus
ggaagttcagtaagatcgctcttga

SEQ ID NO: 10400 - DNA, 25 bp, Saccharomyces pastorianus
agacctaagccgtgagatgatccag

SEQ ID NO: 10401 - DNA, 25 bp, Saccharomyces pastorianus
gcaatcatggcatcgtcttaccaga

SEQ ID NO: 10402 - DNA, 25 bp, Saccharomyces pastorianus
tcactatggctcttggcagggccaa

SEQ ID NO: 10403 - DNA, 25 bp, Saccharomyces pastorianus
attttatttggatcctgaatcggcc

SEQ ID NO: 10404 - DNA, 25 bp, Saccharomyces pastorianus
ttagacgctttgacgaggcacataa

SEQ ID NO: 10405 - DNA, 25 bp, Saccharomyces pastorianus
acgcgtcgtcttcggacggtagcaa

SEQ ID NO: 10406 - DNA, 25 bp, Saccharomyces pastorianus
gtggtgcacaattttcaagatcata

SEQ ID NO: 10407 - DNA, 25 bp, Saccharomyces pastorianus
tttgcgtgccaaatcatgaatctta

SEQ ID NO: 10408 - DNA, 25 bp, Saccharomyces pastorianus
gtctccatcaactccggtaaaggta

SEQ ID NO: 10409 - DNA, 25 bp, Saccharomyces pastorianus
gtaccgtctaacactactactacta

SEQ ID NO: 10410 - DNA, 25 bp, Saccharomyces pastorianus
gaaagactatcgtctccatcaactc

SEQ ID NO: 10411 - DNA, 25 bp, Saccharomyces pastorianus
aaagattgtattccgttgctctgaa

SEQ ID NO: 10412 - DNA, 25 bp, Saccharomyces pastorianus
aaaacatctatcatcacatcctaca

SEQ ID NO: 10413 - DNA, 25 bp, Saccharomyces pastorianus
gaaaccgacttcgtccgtgtcaaat

SEQ ID NO: 10414 - DNA, 25 bp, Saccharomyces pastorianus
tacaccattcagttcgagcccaagt

SEQ ID NO: 10415 - DNA, 25 bp, Saccharomyces pastorianus
gaaaaatagtgatctctcgctggag

SEQ ID NO: 10416 - DNA, 25 bp, Saccharomyces pastorianus
gaataccatccacagtggttcgtta

SEQ ID NO: 10417 - DNA, 25 bp, Saccharomyces pastorianus
gacgttatgacgatgccggtgatga

SEQ ID NO: 10418 - DNA, 25 bp, Saccharomyces pastorianus
gaccccttttgcgataactttgaat

SEQ ID NO: 10419 - DNA, 25 bp, Saccharomyces pastorianus
gtttcagaccagatcagagagctat

SEQ ID NO: 10420 - DNA, 25 bp, Saccharomyces pastorianus
acatttgctgccatggttagcccca

SEQ ID NO: 10421 - DNA, 25 bp, Saccharomyces pastorianus
acgggtgatcactgcaagctgtatt

SEQ ID NO: 10422 - DNA, 25 bp, Saccharomyces pastorianus
gagaagaccaaaaccgcggcatcgg

SEQ ID NO: 10423 - DNA, 25 bp, Saccharomyces pastorianus
ggttagccccaacagatacacgttt

SEQ ID NO: 10424 - DNA, 25 bp, Saccharomyces pastorianus
gaatgggccaacaaacgacgggaca

SEQ ID NO: 10425 - DNA, 25 bp, Saccharomyces pastorianus
cattcaatttgaccccttttgcgat

SEQ ID NO: 10426 - DNA, 25 bp, Saccharomyces pastorianus
attccttctgcttctacggtggtaa

SEQ ID NO: 10427 - DNA, 25 bp, Saccharomyces pastorianus
acacagtttgttcaacggagcgcag

SEQ ID NO: 10428 - DNA, 25 bp, Saccharomyces pastorianus
acttactccggatacagactgttca

SEQ ID NO: 10429 - DNA, 25 bp, Saccharomyces pastorianus
atctcgtattattttgcagtgcaac

SEQ ID NO: 10430 - DNA, 25 bp, Saccharomyces pastorianus
atatatgccccagacgacaagaaca

SEQ ID NO: 10431 - DNA, 25 bp, Saccharomyces pastorianus
agaatggtcgtttgtgggccaacat

SEQ ID NO: 10432 - DNA, 25 bp, Saccharomyces pastorianus
gatcccttgcaagataccctggaaa

SEQ ID NO: 10433 - DNA, 25 bp, Saccharomyces pastorianus
attaagtacacatgcgagcgccaag

SEQ ID NO: 10434 - DNA, 25 bp, Saccharomyces pastorianus
tcaccattgacattccagctgaaga

SEQ ID NO: 10435 - DNA, 25 bp, Saccharomyces pastorianus
atgtctatacacacttactccggat

SEQ ID NO: 10436 - DNA, 25 bp, Saccharomyces pastorianus
gagttgtgcccaaattgctgcattg

SEQ ID NO: 10437 - DNA, 25 bp, Saccharomyces pastorianus
atgcacagtaggtacttttcccgag

SEQ ID NO: 10438 - DNA, 25 bp, Saccharomyces pastorianus
gacgcagactcgttacttgaactct

SEQ ID NO: 10439 - DNA, 25 bp, Saccharomyces pastorianus
gcgagcatggatgccgttgatgcat

SEQ ID NO: 10440 - DNA, 25 bp, Saccharomyces pastorianus
gatcctcaaaaacgtagctcagcgg

SEQ ID NO: 10441 - DNA, 25 bp, Saccharomyces pastorianus
acaggatggcgatagtaccgacgaa

SEQ ID NO: 10442 - DNA, 25 bp, Saccharomyces pastorianus
agattcccgatgtttcaaagtttag

SEQ ID NO: 10443 - DNA, 25 bp, Saccharomyces pastorianus
ttacctgattctaaagcgagcatgg

SEQ ID NO: 10444 - DNA, 25 bp, Saccharomyces pastorianus
ggtccgttggtgttattcttttgag

SEQ ID NO: 10445 - DNA, 25 bp, Saccharomyces pastorianus
ttttcccgagtatagtgtcgctttt

SEQ ID NO: 10446 - DNA, 25 bp, Saccharomyces pastorianus
tttgcatgggttgggctttgaagct

SEQ ID NO: 10447 - DNA, 25 bp, Saccharomyces pastorianus
tggtctgaccactattggtgttttc

SEQ ID NO: 10448 - DNA, 25 bp, Saccharomyces pastorianus
tgattagtcttttcgtcgtttccga

SEQ ID NO: 10449 - DNA, 25 bp, Saccharomyces pastorianus
atagggtcgcttattctttgattgt

SEQ ID NO: 10450 - DNA, 25 bp, Saccharomyces pastorianus
tcattcggctactttggttacgggt

SEQ ID NO: 10451 - DNA, 25 bp, Saccharomyces pastorianus
tattttcaatcttttcgtcgctcct

SEQ ID NO: 10452 - DNA, 25 bp, Saccharomyces pastorianus
tcatacaccagttttctttagctac

SEQ ID NO: 10453 - DNA, 25 bp, Saccharomyces pastorianus
taagtggtatcatttcattcggcta

SEQ ID NO: 10454 - DNA, 25 bp, Saccharomyces pastorianus
gtagttctgagtataatcccttttt

SEQ ID NO: 10455 - DNA, 25 bp, Saccharomyces pastorianus
taatcctaaggttcgtgtcccatta

SEQ ID NO: 10456 - DNA, 25 bp, Saccharomyces pastorianus
gtcttggatttggttcactttcgtc

SEQ ID NO: 10457 - DNA, 25 bp, Saccharomyces pastorianus
taccttcgaagtctggtcttggatt

SEQ ID NO: 10458 - DNA, 25 bp, Saccharomyces pastorianus
gtcgctcctaactataccttcgaag

SEQ ID NO: 10459 - DNA, 25 bp, Saccharomyces pastorianus
gaatcctttcagatccaagttggct

SEQ ID NO: 10460 - DNA, 25 bp, Saccharomyces pastorianus
agagacctaacattattccaattat

SEQ ID NO: 10461 - DNA, 25 bp, Saccharomyces pastorianus
ctgttgatgctgaaactgttttcgc

SEQ ID NO: 10462 - DNA, 25 bp, Saccharomyces pastorianus
gaataccgtgtttggaatcctttca

SEQ ID NO: 10463 - DNA, 25 bp, Saccharomyces pastorianus
acaattgactttggaaccatacgaa

SEQ ID NO: 10464 - DNA, 25 bp, Saccharomyces pastorianus
gtctatgctgtcgaattttctcaca

SEQ ID NO: 10465 - DNA, 25 bp, Saccharomyces pastorianus
aagaaggttctatatctaggtgctg

SEQ ID NO: 10466 - DNA, 25 bp, Saccharomyces pastorianus
ggacgaattattcattaccccaggt

SEQ ID NO: 10467 - DNA, 25 bp, Saccharomyces pastorianus
gtattgactctactgttgatgctga

SEQ ID NO: 10468 - DNA, 25 bp, Saccharomyces pastorianus
aactgttttcgctagagaagtccaa

SEQ ID NO: 10469 - DNA, 25 bp, Saccharomyces pastorianus
gaaggtgttgtctatgctgtcgaat

SEQ ID NO: 10470 - DNA, 25 bp, Saccharomyces pastorianus
cagtatgctgtttatgtggcgtaga

SEQ ID NO: 10471 - DNA, 25 bp, Saccharomyces pastorianus
aataccggacgatttcactgggatg

SEQ ID NO: 10472 - DNA, 25 bp, Saccharomyces pastorianus
catcctgtggccatacatattgcgg

SEQ ID NO: 10473 - DNA, 25 bp, Saccharomyces pastorianus
gcgaacatttgttgcatcctgtggc

SEQ ID NO: 10474 - DNA, 25 bp, Saccharomyces pastorianus
ataccaaactttagcgagaccctca

SEQ ID NO: 10475 - DNA, 25 bp, Saccharomyces pastorianus
gatgatctggccaaaaccctggaag

SEQ ID NO: 10476 - DNA, 25 bp, Saccharomyces pastorianus
tatgccccgcggaatcgtgcaagaa

SEQ ID NO: 10477 - DNA, 25 bp, Saccharomyces pastorianus
gaccaaagcccagcaggatgaattt

SEQ ID NO: 10478 - DNA, 25 bp, Saccharomyces pastorianus
atattgcggcaggtgttacgccaga

SEQ ID NO: 10479 - DNA, 25 bp, Saccharomyces pastorianus
gctcatcctgataactatgggccca

SEQ ID NO: 10480 - DNA, 25 bp, Saccharomyces pastorianus
agtgcttcatttgataccacaccaa

SEQ ID NO: 10481 - DNA, 25 bp, Saccharomyces pastorianus
aaagagtgggactccagcagcccat

SEQ ID NO: 10482 - DNA, 25 bp, Saccharomyces pastorianus
agcttcggcggatgacagtttgtct

SEQ ID NO: 10483 - DNA, 25 bp, Saccharomyces pastorianus
tcgctcatgttagatttggcaccgg

SEQ ID NO: 10484 - DNA, 25 bp, Saccharomyces pastorianus
ggtaaacttctagcttcactgcaag

SEQ ID NO: 10485 - DNA, 25 bp, Saccharomyces pastorianus
ttggcaccggtcataatattcagta

SEQ ID NO: 10486 - DNA, 25 bp, Saccharomyces pastorianus
acggttccgaaccttttgatcaatg

SEQ ID NO: 10487 - DNA, 25 bp, Saccharomyces pastorianus
ggaactgctgccgtgccaacatcta

SEQ ID NO: 10488 - DNA, 25 bp, Saccharomyces pastorianus
gtgtctgttcatatagcaaaggctt

SEQ ID NO: 10489 - DNA, 25 bp, Saccharomyces pastorianus
aaacatgggcatggcgaggagctcc

SEQ ID NO: 10490 - DNA, 25 bp, Saccharomyces pastorianus
tgtgcaacaggaatactcgctcatg

SEQ ID NO: 10491 - DNA, 25 bp, Saccharomyces pastorianus
gaatacatcaagtccgtgaccggta

SEQ ID NO: 10492 - DNA, 25 bp, Saccharomyces pastorianus
atggacccaggttatgtaggcaaat

SEQ ID NO: 10493 - DNA, 25 bp, Saccharomyces pastorianus
aattgtcggctctgagttgatccaa

SEQ ID NO: 10494 - DNA, 25 bp, Saccharomyces pastorianus
aatcagctggatgggtttgacgata

SEQ ID NO: 10495 - DNA, 25 bp, Saccharomyces pastorianus
atgctccaagtattgtcttcattga

SEQ ID NO: 10496 - DNA, 25 bp, Saccharomyces pastorianus
attagacctggtagaatcgatcgta

SEQ ID NO: 10497 - DNA, 25 bp, Saccharomyces pastorianus
tcactgcagaggacttcaaacaagc

SEQ ID NO: 10498 - DNA, 25 bp, Saccharomyces pastorianus
gaaatcgatgctatcggtaccaaga

SEQ ID NO: 10499 - DNA, 25 bp, Saccharomyces pastorianus
tcgagacactagatccagcattgat

SEQ ID NO: 10500 - DNA, 25 bp, Saccharomyces pastorianus
ggtgcagatatccaagctatgtgta

SEQ ID NO: 10501 - DNA, 25 bp, Saccharomyces pastorianus
gcaggtttattagctcttagagaaa

SEQ ID NO: 10502 - DNA, 25 bp, Saccharomyces pastorianus
gatacgattccaacagcggtggtga

SEQ ID NO: 10503 - DNA, 25 bp, Saccharomyces pastorianus
ttgacgtatgatcacaaggcatctg

SEQ ID NO: 10504 - DNA, 25 bp, Saccharomyces pastorianus
tggaaatagtggctgtactgctgca

SEQ ID NO: 10505 - DNA, 25 bp, Saccharomyces pastorianus
ggcgactctcgaatagtactattta

SEQ ID NO: 10506 - DNA, 25 bp, Saccharomyces pastorianus
aaggcatctgactccttggaaatgc

SEQ ID NO: 10507 - DNA, 25 bp, Saccharomyces pastorianus
gagcctaacgaagctgcgaaagttt

SEQ ID NO: 10508 - DNA, 25 bp, Saccharomyces pastorianus
gaatgattcattccttaccattgat

SEQ ID NO: 10509 - DNA, 25 bp, Saccharomyces pastorianus
ttgcccgatgcagcttccaaagatt

SEQ ID NO: 10510 - DNA, 25 bp, Saccharomyces pastorianus
aggaagcccatttacaaccagcgtg

SEQ ID NO: 10511 - DNA, 25 bp, Saccharomyces pastorianus
atacggcaaatgttggcgactctcg

SEQ ID NO: 10512 - DNA, 25 bp, Saccharomyces pastorianus
agcggtaacgagatcactaggcgat

SEQ ID NO: 10513 - DNA, 25 bp, Saccharomyces pastorianus
aatacgttgggagttgcccgatgca

SEQ ID NO: 10514 - DNA, 25 bp, Saccharomyces pastorianus
gataatgcggctttcgactcaacag

SEQ ID NO: 10515 - DNA, 25 bp, Saccharomyces pastorianus
aagggcagccttcggatgcaatgtt

SEQ ID NO: 10516 - DNA, 25 bp, Saccharomyces pastorianus
taatgctcctactagtggcaccaat

SEQ ID NO: 10517 - DNA, 25 bp, Saccharomyces pastorianus
ccctccagctgacaacggtgatgaa

SEQ ID NO: 10518 - DNA, 25 bp, Saccharomyces pastorianus
agcaaacgtccccaatactggagat

SEQ ID NO: 10519 - DNA, 25 bp, Saccharomyces pastorianus
gtcagggtcagcaagggcagccttc

SEQ ID NO: 10520 - DNA, 25 bp, Saccharomyces pastorianus
tgtagccgctactcagagtcagggt

SEQ ID NO: 10521 - DNA, 25 bp, Saccharomyces pastorianus
tccaaccctctaaccaaatacaaag

SEQ ID NO: 10522 - DNA, 25 bp, Saccharomyces pastorianus
gatgttttcaggactcgataatgcg

SEQ ID NO: 10523 - DNA, 25 bp, Saccharomyces pastorianus
aacagccttcaatgcaccagcgaat

SEQ ID NO: 10524 - DNA, 25 bp, Saccharomyces pastorianus
atgatattaacataccctccgctaa

SEQ ID NO: 10525 - DNA, 25 bp, Saccharomyces pastorianus
gcatatgctgaagctgccgctgcaa

SEQ ID NO: 10526 - DNA, 25 bp, Saccharomyces pastorianus
atgcaagttcatcagacgctagaga

SEQ ID NO: 10527 - DNA, 25 bp, Saccharomyces pastorianus
gttcaaccagactcacaattgtgtg

SEQ ID NO: 10528 - DNA, 25 bp, Saccharomyces pastorianus
tggtggctttgcgacagttcaacca

SEQ ID NO: 10529 - DNA, 25 bp, Saccharomyces pastorianus
gaaattcttcatatctggtggcttt

SEQ ID NO: 10530 - DNA, 25 bp, Saccharomyces pastorianus
tcgactgttggcaaaagcaccctaa

SEQ ID NO: 10531 - DNA, 25 bp, Saccharomyces pastorianus
tgccgctgcaacaccaagtttgaaa

SEQ ID NO: 10532 - DNA, 25 bp, Saccharomyces pastorianus
gtgactcaagtaaatctgcctgcta

SEQ ID NO: 10533 - DNA, 25 bp, Saccharomyces pastorianus
tgtgactgccattgaagctttccca

SEQ ID NO: 10534 - DNA, 25 bp, Saccharomyces pastorianus
caaccacgttcctactgttgaacag

SEQ ID NO: 10535 - DNA, 25 bp, Saccharomyces pastorianus
ttgaacagttgcaaccaggtgtcgt

SEQ ID NO: 10536 - DNA, 25 bp, Saccharomyces pastorianus
gctaccgttcaaatggcggagattt

SEQ ID NO: 10537 - DNA, 25 bp, Saccharomyces pastorianus
gatcttgccagtacaaatacgggaa

SEQ ID NO: 10538 - DNA, 25 bp, Saccharomyces pastorianus
gtgaactcgccgaaaacatggctta

SEQ ID NO: 10539 - DNA, 25 bp, Saccharomyces pastorianus
aaaagtccgcctagtgtctggtgaa

SEQ ID NO: 10540 - DNA, 25 bp, Saccharomyces pastorianus
gacaccagctaaatacttcttcaga

SEQ ID NO: 10541 - DNA, 25 bp, Saccharomyces pastorianus
aagtgaagctcctttcctagaagaa

SEQ ID NO: 10542 - DNA, 25 bp, Saccharomyces pastorianus
gctaaacatgtcattggacctcaat

SEQ ID NO: 10543 - DNA, 25 bp, Saccharomyces pastorianus
gcggccgtaagcgatggtagtttca

SEQ ID NO: 10544 - DNA, 25 bp, Saccharomyces pastorianus
catggcttacttaccggattcaatc

SEQ ID NO: 10545 - DNA, 25 bp, Saccharomyces pastorianus
ggctttgagccgattgacgctgatt

SEQ ID NO: 10546 - DNA, 25 bp, Saccharomyces pastorianus
gatgtaataagcaacgcggccgtaa

SEQ ID NO: 10547 - DNA, 25 bp, Saccharomyces pastorianus
gaaaagtcacccacgaaagtagatg

SEQ ID NO: 10548 - DNA, 25 bp, Saccharomyces pastorianus
atgggtctcctgacgtgacaagaga

SEQ ID NO: 10549 - DNA, 25 bp, Saccharomyces pastorianus
ggatagagcttgatcccgagctaaa

SEQ ID NO: 10550 - DNA, 25 bp, Saccharomyces pastorianus
ggatccaaatatgcccaagagacct

SEQ ID NO: 10551 - DNA, 25 bp, Saccharomyces pastorianus
aactctggcctcattcaagcaggaa

SEQ ID NO: 10552 - DNA, 25 bp, Saccharomyces pastorianus
tgatcccgagctaaattgcgaagat

SEQ ID NO: 10553 - DNA, 25 bp, Saccharomyces pastorianus
gcaatccaaagatcacggctttcag

SEQ ID NO: 10554 - DNA, 25 bp, Saccharomyces pastorianus
gcaggaactgttgacaaaacctttc

SEQ ID NO: 10555 - DNA, 25 bp, Saccharomyces pastorianus
gcccaagagacctacaaatgcttat

SEQ ID NO: 10556 - DNA, 25 bp, Saccharomyces pastorianus
gaggatcaggcagaatgggtctcct

SEQ ID NO: 10557 - DNA, 25 bp, Saccharomyces pastorianus
ttgcgaagatccattgccaactctg

SEQ ID NO: 10558 - DNA, 25 bp, Saccharomyces pastorianus
ggtctccgctcttatgggtacgtaa

SEQ ID NO: 10559 - DNA, 25 bp, Saccharomyces pastorianus
atgggctggccttgctactaaggaa

SEQ ID NO: 10560 - DNA, 25 bp, Saccharomyces pastorianus
agacccacatcgtgttgaagcggaa

SEQ ID NO: 10561 - DNA, 25 bp, Saccharomyces pastorianus
acttggtgcttgtattcctccgatc

SEQ ID NO: 10562 - DNA, 25 bp, Saccharomyces pastorianus
tgagtccgcaactacattttgggca

SEQ ID NO: 10563 - DNA, 25 bp, Saccharomyces pastorianus
ggttaatgccagctatactctaggt

SEQ ID NO: 10564 - DNA, 25 bp, Saccharomyces pastorianus
gagtcaggctttttcttcgactaca

SEQ ID NO: 10565 - DNA, 25 bp, Saccharomyces pastorianus
gaacgttccagaggcccaatttcta

SEQ ID NO: 10566 - DNA, 25 bp, Saccharomyces pastorianus
ctccgatctcgttttttagcagttt

SEQ ID NO: 10567 - DNA, 25 bp, Saccharomyces pastorianus
agattctcgcttgggaaggtctccg

SEQ ID NO: 10568 - DNA, 25 bp, Saccharomyces pastorianus
atttggttgggctcctcatcagatt

SEQ ID NO: 10569 - DNA, 25 bp, Saccharomyces pastorianus
gtccgtttttggtcctcattatatt

SEQ ID NO: 10570 - DNA, 25 bp, Saccharomyces pastorianus
actacggatgccagcgtcaaaatca

SEQ ID NO: 10571 - DNA, 25 bp, Saccharomyces pastorianus
aacaaactcagccactcagtgaagt

SEQ ID NO: 10572 - DNA, 25 bp, Saccharomyces pastorianus
gagctggatgaattcgacaacgtct

SEQ ID NO: 10573 - DNA, 25 bp, Saccharomyces pastorianus
taccaccggccctagtagtaatacg

SEQ ID NO: 10574 - DNA, 25 bp, Saccharomyces pastorianus
gaggactctatttccagcaaatccg

SEQ ID NO: 10575 - DNA, 25 bp, Saccharomyces pastorianus
taaatcttcattggtccgtttttgg

SEQ ID NO: 10576 - DNA, 25 bp, Saccharomyces pastorianus
gtgaatggcacaaaccatccgacca

SEQ ID NO: 10577 - DNA, 25 bp, Saccharomyces pastorianus
gatttcgtctacctttacaacacaa

SEQ ID NO: 10578 - DNA, 25 bp, Saccharomyces pastorianus
aacgtctaccgccatttatatgcat

SEQ ID NO: 10579 - DNA, 25 bp, Saccharomyces pastorianus
taatgtctccttctaaatcctctac

SEQ ID NO: 10580 - DNA, 25 bp, Saccharomyces pastorianus
tactacctcttccacgtgagacaga

SEQ ID NO: 10581 - DNA, 25 bp, Saccharomyces pastorianus
ggacgctacctcagattgtgcatac

SEQ ID NO: 10582 - DNA, 25 bp, Saccharomyces pastorianus
ggtttgctaatcctatacatgtctc

SEQ ID NO: 10583 - DNA, 25 bp, Saccharomyces pastorianus
atgttccagttgtattacgtcggcc

SEQ ID NO: 10584 - DNA, 25 bp, Saccharomyces pastorianus
gttctctcctaagccctaaatttat

SEQ ID NO: 10585 - DNA, 25 bp, Saccharomyces pastorianus
ctgccatcagccaacgttattttag

SEQ ID NO: 10586 - DNA, 25 bp, Saccharomyces pastorianus
tattacgtcggccttggtttgctaa

SEQ ID NO: 10587 - DNA, 25 bp, Saccharomyces pastorianus
ttgtggtgttacacagcctgtttca

SEQ ID NO: 10588 - DNA, 25 bp, Saccharomyces pastorianus
aaccttgtcggtataatgctgcaca

SEQ ID NO: 10589 - DNA, 25 bp, Saccharomyces pastorianus
atatcgtcggtatggtgtgcgtgta

SEQ ID NO: 10590 - DNA, 25 bp, Saccharomyces pastorianus
gatctgcggtatacttcttaaacta

SEQ ID NO: 10591 - DNA, 25 bp, Saccharomyces pastorianus
agtgtcaatacttcgtcacgttatt

SEQ ID NO: 10592 - DNA, 25 bp, Saccharomyces pastorianus
tctggctgatatcgatttctctggc

SEQ ID NO: 10593 - DNA, 25 bp, Saccharomyces pastorianus
gagatgcctcttggcatatcacaaa

SEQ ID NO: 10594 - DNA, 25 bp, Saccharomyces pastorianus
gactgatatgctggattctatggct

SEQ ID NO: 10595 - DNA, 25 bp, Saccharomyces pastorianus
gagtcctcaaagacgctggcgaaat

SEQ ID NO: 10596 - DNA, 25 bp, Saccharomyces pastorianus
ggtacctccgagtgatgtttttatc

SEQ ID NO: 10597 - DNA, 25 bp, Saccharomyces pastorianus
gaatgccaagctacctatgtatcac

SEQ ID NO: 10598 - DNA, 25 bp, Saccharomyces pastorianus
gtttttatcgacgtcagagtcctca

SEQ ID NO: 10599 - DNA, 25 bp, Saccharomyces pastorianus
gatttctctggctctttggtacctc

SEQ ID NO: 10600 - DNA, 25 bp, Saccharomyces pastorianus
aagctcgacgacaaggtggccaagt

SEQ ID NO: 10601 - DNA, 25 bp, Saccharomyces pastorianus
ctcggatttgatcactgagctgaaa

SEQ ID NO: 10602 - DNA, 25 bp, Saccharomyces pastorianus
gatactctgtattctgaaattctca

SEQ ID NO: 10603 - DNA, 25 bp, Saccharomyces pastorianus
ctactaatgtatgacggcgatgcca

SEQ ID NO: 10604 - DNA, 25 bp, Saccharomyces pastorianus
gaataatacttcttcctctgcgggt

SEQ ID NO: 10605 - DNA, 25 bp, Saccharomyces pastorianus
cgattcttatatgacggtgaggcaa

SEQ ID NO: 10606 - DNA, 25 bp, Saccharomyces pastorianus
gattggctggacgaatttgaccgag

SEQ ID NO: 10607 - DNA, 25 bp, Saccharomyces pastorianus
acggcgctcgtgtgaaagttaactt

SEQ ID NO: 10608 - DNA, 25 bp, Saccharomyces pastorianus
ttatctgacagctgattcgccatta

SEQ ID NO: 10609 - DNA, 25 bp, Saccharomyces pastorianus
aatcgactttgcacgttctgtaacc

SEQ ID NO: 10610 - DNA, 25 bp, Saccharomyces pastorianus
tatacggtgcatctttactactaat

SEQ ID NO: 10611 - DNA, 25 bp, Saccharomyces pastorianus
gcaagagttcttgcacgattcttat

SEQ ID NO: 10612 - DNA, 25 bp, Saccharomyces pastorianus
ggataaattccgcataccaccaaaa

SEQ ID NO: 10613 - DNA, 25 bp, Saccharomyces pastorianus
gaaccaaccagagtctttgcagatc

SEQ ID NO: 10614 - DNA, 25 bp, Saccharomyces pastorianus
ccgcgctattcttgttgacggtata

SEQ ID NO: 10615 - DNA, 25 bp, Saccharomyces pastorianus
atcacggagtacatggaccacctgc

SEQ ID NO: 10616 - DNA, 25 bp, Saccharomyces pastorianus
tacagcatgactacgaggacccaat

SEQ ID NO: 10617 - DNA, 25 bp, Saccharomyces pastorianus
aacgaatcaatgcaatctcccaatt

SEQ ID NO: 10618 - DNA, 25 bp, Saccharomyces pastorianus
ggagcaatcgcagtggagctacaaa

SEQ ID NO: 10619 - DNA, 25 bp, Saccharomyces pastorianus
gcaaacagcaaagtacgtccacgtt

SEQ ID NO: 10620 - DNA, 25 bp, Saccharomyces pastorianus
taacggcgactatgattttgacaac

SEQ ID NO: 10621 - DNA, 25 bp, Saccharomyces pastorianus
gagcaactggctcaattgatcacgg

SEQ ID NO: 10622 - DNA, 25 bp, Saccharomyces pastorianus
gtctgtggatgctatgctttatacg

SEQ ID NO: 10623 - DNA, 25 bp, Saccharomyces pastorianus
aaatgaaaacctgggccgcgctatt

SEQ ID NO: 10624 - DNA, 25 bp, Saccharomyces pastorianus
gaaaattacattcaccgtattggta

SEQ ID NO: 10625 - DNA, 25 bp, Saccharomyces pastorianus
ggtcatcaactatgatttgcctgaa

SEQ ID NO: 10626 - DNA, 25 bp, Saccharomyces pastorianus
gaactggtcattctcgtgtgttgat

SEQ ID NO: 10627 - DNA, 25 bp, Saccharomyces pastorianus
gactctttgaccatcacacagtgtg

SEQ ID NO: 10628 - DNA, 25 bp, Saccharomyces pastorianus
gttcagcaagtttctttggtcatca

SEQ ID NO: 10629 - DNA, 25 bp, Saccharomyces pastorianus
gcagcgtctaactcaatctaacttt

SEQ ID NO: 10630 - DNA, 25 bp, Saccharomyces pastorianus
ggttgattggttatcgcagcgtcta

SEQ ID NO: 10631 - DNA, 25 bp, Saccharomyces pastorianus
aactttgctgtggtttcaatgcacg

SEQ ID NO: 10632 - DNA, 25 bp, Saccharomyces pastorianus
gactggaaattcgataccttgtgtg

SEQ ID NO: 10633 - DNA, 25 bp, Saccharomyces pastorianus
gggcacgtggtattgatgttcagca

SEQ ID NO: 10634 - DNA, 25 bp, Saccharomyces pastorianus
gatatccactgatgtttgggcacgt

SEQ ID NO: 10635 - DNA, 25 bp, Saccharomyces pastorianus
atggacttggatttagaacttgacg

SEQ ID NO: 10636 - DNA, 25 bp, Saccharomyces pastorianus
gaacgcttgtatcgcataatagtga

SEQ ID NO: 10637 - DNA, 25 bp, Saccharomyces pastorianus
cttgacgtaatttcacagttctgtg

SEQ ID NO: 10638 - DNA, 25 bp, Saccharomyces pastorianus
gtttccgactaccataaagtgctta

SEQ ID NO: 10639 - DNA, 25 bp, Saccharomyces pastorianus
gaccctgcagacctaagcggtactg

SEQ ID NO: 10640 - DNA, 25 bp, Saccharomyces pastorianus
agatgtcacgctggtcagtgatcaa

SEQ ID NO: 10641 - DNA, 25 bp, Saccharomyces pastorianus
ctcacagagtaagcagccctggatt

SEQ ID NO: 10642 - DNA, 25 bp, Saccharomyces pastorianus
aagtgattgtgccatgtttccgact

SEQ ID NO: 10643 - DNA, 25 bp, Saccharomyces pastorianus
taatgaatctaagggcgctgacgga

SEQ ID NO: 10644 - DNA, 25 bp, Saccharomyces pastorianus
aatacgaacttctatctcacagagt

SEQ ID NO: 10645 - DNA, 25 bp, Saccharomyces pastorianus
gacctatctccttctgttcgagagt

SEQ ID NO: 10646 - DNA, 25 bp, Saccharomyces pastorianus
actgaggcagctaacaacgaagatg

SEQ ID NO: 10647 - DNA, 25 bp, Saccharomyces pastorianus
gattccttaaggactggtcttgaac

SEQ ID NO: 10648 - DNA, 25 bp, Saccharomyces pastorianus
gagcattccctcttccgaaaggaaa

SEQ ID NO: 10649 - DNA, 25 bp, Saccharomyces pastorianus
aggccactggactgaggtaggaaat

SEQ ID NO: 10650 - DNA, 25 bp, Saccharomyces pastorianus
agagcatgttgagcattccctcttc

SEQ ID NO: 10651 - DNA, 25 bp, Saccharomyces pastorianus
gatcccgtatacaatgtcgctacaa

SEQ ID NO: 10652 - DNA, 25 bp, Saccharomyces pastorianus
gcagttcgccgaaacatcatactca

SEQ ID NO: 10653 - DNA, 25 bp, Saccharomyces pastorianus
aactggactgtggttagtgaacgta

SEQ ID NO: 10654 - DNA, 25 bp, Saccharomyces pastorianus
gtacaaagaaagacccatggccgat

SEQ ID NO: 10655 - DNA, 25 bp, Saccharomyces pastorianus
aggtcagtgataatcctactttcaa

SEQ ID NO: 10656 - DNA, 25 bp, Saccharomyces pastorianus
gccgcttctaaacctgattccttaa

SEQ ID NO: 10657 - DNA, 25 bp, Saccharomyces pastorianus
atgggtaccgtacatcgtcgatccg

SEQ ID NO: 10658 - DNA, 25 bp, Saccharomyces pastorianus
aaggctttccaactccagcaaggat

SEQ ID NO: 10659 - DNA, 25 bp, Saccharomyces pastorianus
taatagtagcgccatggcttctgtc

SEQ ID NO: 10660 - DNA, 25 bp, Saccharomyces pastorianus
gtgctttcaataaaccttccttcta

SEQ ID NO: 10661 - DNA, 25 bp, Saccharomyces pastorianus
gacacgtagtttctatgcttccgaa

SEQ ID NO: 10662 - DNA, 25 bp, Saccharomyces pastorianus
gaaccgtttgatccgagccattata

SEQ ID NO: 10663 - DNA, 25 bp, Saccharomyces pastorianus
gatccgtccatccaaagcgatgtta

SEQ ID NO: 10664 - DNA, 25 bp, Saccharomyces pastorianus
aaccttccttctatgtatttgccga

SEQ ID NO: 10665 - DNA, 25 bp, Saccharomyces pastorianus
gatgaagcgtcccaaggtcatagaa

SEQ ID NO: 10666 - DNA, 25 bp, Saccharomyces pastorianus
acatttgtggcgagtcagtctttac

SEQ ID NO: 10667 - DNA, 25 bp, Saccharomyces pastorianus
gaatcattagattgccttgccgaat

SEQ ID NO: 10668 - DNA, 25 bp, Saccharomyces pastorianus
ccaacgaatcgaacgctcatttgaa

SEQ ID NO: 10669 - DNA, 25 bp, Saccharomyces pastorianus
aacagatcattgcatgtggcgacat

SEQ ID NO: 10670 - DNA, 25 bp, Saccharomyces pastorianus
ggaattatgttctactggtgcggat

SEQ ID NO: 10671 - DNA, 25 bp, Saccharomyces pastorianus
taggaccgcaggatctgaaccgcat

SEQ ID NO: 10672 - DNA, 25 bp, Saccharomyces pastorianus
aatatgatgaactctgttggtctca

SEQ ID NO: 10673 - DNA, 25 bp, Saccharomyces pastorianus
gacaagttcttactgtgcatcactg

SEQ ID NO: 10674 - DNA, 25 bp, Saccharomyces pastorianus
gagaagtttggcctcgcattgccaa

SEQ ID NO: 10675 - DNA, 25 bp, Saccharomyces pastorianus
tggagaccgtttactgagatactac

SEQ ID NO: 10676 - DNA, 25 bp, Saccharomyces pastorianus
tagttccatggccttacagacaaat

SEQ ID NO: 10677 - DNA, 25 bp, Saccharomyces pastorianus
gattgctctggtttgacaagttctt

SEQ ID NO: 10678 - DNA, 25 bp, Saccharomyces pastorianus
gttggtctcagactgttcttgggaa

SEQ ID NO: 10679 - DNA, 25 bp, Saccharomyces pastorianus
atctacacgctatatggccacgtcg

SEQ ID NO: 10680 - DNA, 25 bp, Saccharomyces pastorianus
ccaggacactttgaccgaatacgat

SEQ ID NO: 10681 - DNA, 25 bp, Saccharomyces pastorianus
tacacggtaaagtcgctggctgttt

SEQ ID NO: 10682 - DNA, 25 bp, Saccharomyces pastorianus
gggtctgcagacatctaccaagtcg

SEQ ID NO: 10683 - DNA, 25 bp, Saccharomyces pastorianus
agaagttgtcaaggccctcggcgga

SEQ ID NO: 10684 - DNA, 25 bp, Saccharomyces pastorianus
tggaaggcattctgggaccgtaccg

SEQ ID NO: 10685 - DNA, 25 bp, Saccharomyces pastorianus
gagtcgctattatcatctacacgct

SEQ ID NO: 10686 - DNA, 25 bp, Saccharomyces pastorianus
tatcgaagctgctggtgggtctgca

SEQ ID NO: 10687 - DNA, 25 bp, Saccharomyces pastorianus
attatgaactctctatccactttgg

SEQ ID NO: 10688 - DNA, 25 bp, Saccharomyces pastorianus
gttttcgccgaattaaccaacatgg

SEQ ID NO: 10689 - DNA, 25 bp, Saccharomyces pastorianus
aatacgatgccttcctgtttggtat

SEQ ID NO: 10690 - DNA, 25 bp, Saccharomyces pastorianus
ggtttttagctatgccatggcctat

SEQ ID NO: 10691 - DNA, 25 bp, Saccharomyces pastorianus
aagattgggctaccacttcggtgat

SEQ ID NO: 10692 - DNA, 25 bp, Saccharomyces pastorianus
gatgacgcttctgaatcacacgtgg

SEQ ID NO: 10693 - DNA, 25 bp, Saccharomyces pastorianus
gttatgtgtttcatcccaaccttat

SEQ ID NO: 10694 - DNA, 25 bp, Saccharomyces pastorianus
agtctgtttgctaggtcatactcca

SEQ ID NO: 10695 - DNA, 25 bp, Saccharomyces pastorianus
ttaattgccggttgtgttcactcca

SEQ ID NO: 10696 - DNA, 25 bp, Saccharomyces pastorianus
caattgcttctaactttggtgctga

SEQ ID NO: 10697 - DNA, 25 bp, Saccharomyces pastorianus
ggagctgccattgtcgtatgtatca

SEQ ID NO: 10698 - DNA, 25 bp, Saccharomyces pastorianus
attagaatcgtcttcctcactatct

SEQ ID NO: 10699 - DNA, 25 bp, Saccharomyces pastorianus
tgttcatgtggatcatcgcttaccc

SEQ ID NO: 10700 - DNA, 25 bp, Saccharomyces pastorianus
agttgctagtccaaaaccagctgcc

SEQ ID NO: 10701 - DNA, 25 bp, Saccharomyces pastorianus
gttggtatgacatttcgcatcagac

SEQ ID NO: 10702 - DNA, 25 bp, Saccharomyces pastorianus
gggaattataccgtcagacaaccaa

SEQ ID NO: 10703 - DNA, 25 bp, Saccharomyces pastorianus
gattattactttggtcgtctcactt

SEQ ID NO: 10704 - DNA, 25 bp, Saccharomyces pastorianus
gcaacattcacgacaatgccatcga

SEQ ID NO: 10705 - DNA, 25 bp, Saccharomyces pastorianus
ctccacctcacaattcaagaacttg

SEQ ID NO: 10706 - DNA, 25 bp, Saccharomyces pastorianus
gtcgtctcacttcggccgaaaaatt

SEQ ID NO: 10707 - DNA, 25 bp, Saccharomyces pastorianus
ttaaacagtgattctccacctcaca

SEQ ID NO: 10708 - DNA, 25 bp, Saccharomyces pastorianus
atctttcttgttgattgtcctatta

SEQ ID NO: 10709 - DNA, 25 bp, Saccharomyces pastorianus
atcacacccgaaaactagcaacatt

SEQ ID NO: 10710 - DNA, 25 bp, Saccharomyces pastorianus
caattttgccgtattgattgcgggt

SEQ ID NO: 10711 - DNA, 25 bp, Saccharomyces pastorianus
aagacttacagagcataaccttaat

SEQ ID NO: 10712 - DNA, 25 bp, Saccharomyces pastorianus
tcaggcggctgctgcaaaacttgtt

SEQ ID NO: 10713 - DNA, 25 bp, Saccharomyces pastorianus
aaatcaggcggctgctgcaaaactt

SEQ ID NO: 10714 - DNA, 25 bp, Saccharomyces pastorianus
ggctgctgcaaaacttgttgccatt

SEQ ID NO: 10715 - DNA, 25 bp, Saccharomyces pastorianus
atgagacatcaacaaccgcatatga

SEQ ID NO: 10716 - DNA, 25 bp, Saccharomyces pastorianus
aaggaaaaatcaggcggctgctgca

SEQ ID NO: 10717 - DNA, 25 bp, Saccharomyces pastorianus
atcaacaaccgcatatgaactaccc

SEQ ID NO: 10718 - DNA, 25 bp, Saccharomyces pastorianus
gcaaaacttgttgccattttctctg

SEQ ID NO: 10719 - DNA, 25 bp, Saccharomyces pastorianus
atttatattcaacaggctcctccta

SEQ ID NO: 10720 - DNA, 25 bp, Saccharomyces pastorianus
caacaggctcctcctaaggaaaaat

SEQ ID NO: 10721 - DNA, 25 bp, Saccharomyces pastorianus
tattcaacaggctcctcctaaggaa

SEQ ID NO: 10722 - DNA, 25 bp, Saccharomyces pastorianus
aaacttgttgccattttctctgctg

SEQ ID NO: 10723 - DNA, 25 bp, Saccharomyces pastorianus
ggttgcccaatgtatctatgaccaa

SEQ ID NO: 10724 - DNA, 25 bp, Saccharomyces pastorianus
aaagcctggtgtcactgccatcgta

SEQ ID NO: 10725 - DNA, 25 bp, Saccharomyces pastorianus
atacggttgctctgttactgatgct

SEQ ID NO: 10726 - DNA, 25 bp, Saccharomyces pastorianus
tatgaccaactgaccgaaggcgaaa

SEQ ID NO: 10727 - DNA, 25 bp, Saccharomyces pastorianus
gagccgctgctcacgaacattattt

SEQ ID NO: 10728 - DNA, 25 bp, Saccharomyces pastorianus
gtttaaccgatgactcccaaagaag

SEQ ID NO: 10729 - DNA, 25 bp, Saccharomyces pastorianus
agagttggcatctggtctatctttc

SEQ ID NO: 10730 - DNA, 25 bp, Saccharomyces pastorianus
atttcctttctgttacaaagcctgg

SEQ ID NO: 10731 - DNA, 25 bp, Saccharomyces pastorianus
ccgacggtggtttacaagtcgccat

SEQ ID NO: 10732 - DNA, 25 bp, Saccharomyces pastorianus
actgccatcgtaggtaccggaggta

SEQ ID NO: 10733 - DNA, 25 bp, Saccharomyces pastorianus
gattgattgttctcacggtaacagt

SEQ ID NO: 10734 - DNA, 25 bp, Saccharomyces pastorianus
aaatacctcgaatgtcacttggact

SEQ ID NO: 10735 - DNA, 25 bp, Saccharomyces pastorianus
aaacaggtgatgatacgggctctaa

SEQ ID NO: 10736 - DNA, 25 bp, Saccharomyces pastorianus
aaattgctctaaggctgatccaaga

SEQ ID NO: 10737 - DNA, 25 bp, Saccharomyces pastorianus
gagcaattattcacatctcagttga

SEQ ID NO: 10738 - DNA, 25 bp, Saccharomyces pastorianus
agttgacatctatcacgtctcctaa

SEQ ID NO: 10739 - DNA, 25 bp, Saccharomyces pastorianus
ttatcaaccaaatcgccatcttctt

SEQ ID NO: 10740 - DNA, 25 bp, Saccharomyces pastorianus
gtctcctaagccatcattgccaata

SEQ ID NO: 10741 - DNA, 25 bp, Saccharomyces pastorianus
agtacccctatcatctgaagtatca

SEQ ID NO: 10742 - DNA, 25 bp, Saccharomyces pastorianus
gaaagggccatatccatgggccaag

SEQ ID NO: 10743 - DNA, 25 bp, Saccharomyces pastorianus
aagagatctgtatacggctgctaac

SEQ ID NO: 10744 - DNA, 25 bp, Saccharomyces pastorianus
agagggcaggcttttcgcacaagaa

SEQ ID NO: 10745 - DNA, 25 bp, Saccharomyces pastorianus
tggacggtaataaaatcgcccttcg

SEQ ID NO: 10746 - DNA, 25 bp, Saccharomyces pastorianus
acctccacatcgaaagcgtttatca

SEQ ID NO: 10747 - DNA, 25 bp, Saccharomyces pastorianus
tgcacctttaaagctgcctatcaaa

SEQ ID NO: 10748 - DNA, 25 bp, Saccharomyces pastorianus
gcagagttttgattccgacaccaat

SEQ ID NO: 10749 - DNA, 25 bp, Saccharomyces pastorianus
ggtgatctggtagcggacattcaat

SEQ ID NO: 10750 - DNA, 25 bp, Saccharomyces pastorianus
acaagagactcatcagggcctggga

SEQ ID NO: 10751 - DNA, 25 bp, Saccharomyces pastorianus
gcccttcgttcatgctaaatccaaa

SEQ ID NO: 10752 - DNA, 25 bp, Saccharomyces pastorianus
aaacccttgcccactagaagagagc

SEQ ID NO: 10753 - DNA, 25 bp, Saccharomyces pastorianus
caggctgtctactatgcacctttaa

SEQ ID NO: 10754 - DNA, 25 bp, Saccharomyces pastorianus
acgcgtccgtatccagttaatttgc

SEQ ID NO: 10755 - DNA, 25 bp, Saccharomyces pastorianus
aacattctattgcaggcgttgggat

SEQ ID NO: 10756 - DNA, 25 bp, Saccharomyces pastorianus
taagactgcctttgattttcgatat

SEQ ID NO: 10757 - DNA, 25 bp, Saccharomyces pastorianus
gaacccaaatacttgacaacaccca

SEQ ID NO: 10758 - DNA, 25 bp, Saccharomyces pastorianus
gtcaggccaccttgcaaggcataac

SEQ ID NO: 10759 - DNA, 25 bp, Saccharomyces pastorianus
ataccagacactgctgccagtttta

SEQ ID NO: 10760 - DNA, 25 bp, Saccharomyces pastorianus
aagcgtttctttcgatagttcatca

SEQ ID NO: 10761 - DNA, 25 bp, Saccharomyces pastorianus
ataagggctgtactcaacgatttag

SEQ ID NO: 10762 - DNA, 25 bp, Saccharomyces pastorianus
gagaaccgatcccaaaaacacatta

SEQ ID NO: 10763 - DNA, 25 bp, Saccharomyces pastorianus
caagagggtttactacgtcaggcca

SEQ ID NO: 10764 - DNA, 25 bp, Saccharomyces pastorianus
tgggacggtttctaatgacgattat

SEQ ID NO: 10765 - DNA, 25 bp, Saccharomyces pastorianus
gaccttgagcaacggcgcaagtata

SEQ ID NO: 10766 - DNA, 25 bp, Saccharomyces pastorianus
gctatcccaactgaatgccaattcg

SEQ ID NO: 10767 - DNA, 25 bp, Saccharomyces pastorianus
gaactattccaccaattgcacaaag

SEQ ID NO: 10768 - DNA, 25 bp, Saccharomyces pastorianus
ctttcctaccatcttacttgacaat

SEQ ID NO: 10769 - DNA, 25 bp, Saccharomyces pastorianus
tcgtggtattggtgggatcttcttt

SEQ ID NO: 10770 - DNA, 25 bp, Saccharomyces pastorianus
tgaactaccgttactttgaaacctg

SEQ ID NO: 10771 - DNA, 25 bp, Saccharomyces pastorianus
tccaaccactcatttgaactaccgt

SEQ ID NO: 10772 - DNA, 25 bp, Saccharomyces pastorianus
atgagtttaccagagcatgcctcct

SEQ ID NO: 10773 - DNA, 25 bp, Saccharomyces pastorianus
gacgaatacttctacatcacacatc

SEQ ID NO: 10774 - DNA, 25 bp, Saccharomyces pastorianus
acatcgtaaggaaactcgtggtatt

SEQ ID NO: 10775 - DNA, 25 bp, Saccharomyces pastorianus
gaaccccaggttctagagtcgaatc

SEQ ID NO: 10776 - DNA, 25 bp, Saccharomyces pastorianus
tgctctataccctcgtttcaagaaa

SEQ ID NO: 10777 - DNA, 25 bp, Saccharomyces pastorianus
agcatgcctcctggttatacgacaa

SEQ ID NO: 10778 - DNA, 25 bp, Saccharomyces pastorianus
ttcgttttgtccttcatgcaataat

SEQ ID NO: 10779 - DNA, 25 bp, Saccharomyces pastorianus
gagagtgcttatttcttccagctac

SEQ ID NO: 10780 - DNA, 25 bp, Saccharomyces pastorianus
atttgctgctaattacgagtggcga

SEQ ID NO: 10781 - DNA, 25 bp, Saccharomyces pastorianus
cttccagctacaaattaggtctgct

SEQ ID NO: 10782 - DNA, 25 bp, Saccharomyces pastorianus
gatgactaccttttacaagtgcgtg

SEQ ID NO: 10783 - DNA, 25 bp, Saccharomyces pastorianus
gtgtccctatgagttccctatagag

SEQ ID NO: 10784 - DNA, 25 bp, Saccharomyces pastorianus
gtccttcatgcaataatttgctgct

SEQ ID NO: 10785 - DNA, 25 bp, Saccharomyces pastorianus
gatagcggtgtatatacgttagcgt

SEQ ID NO: 10786 - DNA, 25 bp, Saccharomyces pastorianus
tagcgtgccgttcgtgtccctatga

SEQ ID NO: 10787 - DNA, 25 bp, Saccharomyces pastorianus
gtatatacgttagcgtgccgttcgt

SEQ ID NO: 10788 - DNA, 25 bp, Saccharomyces pastorianus
aaggaagttgacgatgtccttggcg

SEQ ID NO: 10789 - DNA, 25 bp, Saccharomyces pastorianus
agacctttacgtgccctaatagcgt

SEQ ID NO: 10790 - DNA, 25 bp, Saccharomyces pastorianus
ttcttccaaagttatcttgctgccc

SEQ ID NO: 10791 - DNA, 25 bp, Saccharomyces pastorianus
atggtcgggcattatgctttcccat

SEQ ID NO: 10792 - DNA, 25 bp, Saccharomyces pastorianus
caaggttgatgtgttctttggctca

SEQ ID NO: 10793 - DNA, 25 bp, Saccharomyces pastorianus
gttcttttcaacatccttgtcttca

SEQ ID NO: 10794 - DNA, 25 bp, Saccharomyces pastorianus
gctttcccatattcgtttcagacta

SEQ ID NO: 10795 - DNA, 25 bp, Saccharomyces pastorianus
agcgtgctcttttgtaggtctaatt

SEQ ID NO: 10796 - DNA, 25 bp, Saccharomyces pastorianus
acaagcttttacatggttggcggcc

SEQ ID NO: 10797 - DNA, 25 bp, Saccharomyces pastorianus
gtgcgatgttgaatctttcttccaa

SEQ ID NO: 10798 - DNA, 25 bp, Saccharomyces pastorianus
tgtcttcatggcacagttctgggta

SEQ ID NO: 10799 - DNA, 25 bp, Saccharomyces pastorianus
gtctaattggtttcgttgcttgctc

SEQ ID NO: 10800 - DNA, 25 bp, Saccharomyces pastorianus
caggcgcccagatattgcaagtatt

SEQ ID NO: 10801 - DNA, 25 bp, Saccharomyces pastorianus
gatgagttttccctacaatacttga

SEQ ID NO: 10802 - DNA, 25 bp, Saccharomyces pastorianus
aatcgcactacatcgttaatttcgg

SEQ ID NO: 10803 - DNA, 25 bp, Saccharomyces pastorianus
gaaggtggcgggtctcgtcttttca

SEQ ID NO: 10804 - DNA, 25 bp, Saccharomyces pastorianus
acaagctgtgcggttctggatacga

SEQ ID NO: 10805 - DNA, 25 bp, Saccharomyces pastorianus
atcctggtgttatgtatggctctaa

SEQ ID NO: 10806 - DNA, 25 bp, Saccharomyces pastorianus
aggaccacggtgttaccttgcaagg

SEQ ID NO: 10807 - DNA, 25 bp, Saccharomyces pastorianus
aagttcctggtacgccctagacaag

SEQ ID NO: 10808 - DNA, 25 bp, Saccharomyces pastorianus
gggtggcgaactatcatctttggat

SEQ ID NO: 10809 - DNA, 25 bp, Saccharomyces pastorianus
gggacccatccttttatggatccag

SEQ ID NO: 10810 - DNA, 25 bp, Saccharomyces pastorianus
gtttcattggactggacctgggacc

SEQ ID NO: 10811 - DNA, 25 bp, Saccharomyces pastorianus
tttattcagacacttccacgaccga

SEQ ID NO: 10812 - DNA, 25 bp, Saccharomyces pastorianus
acacatggcatctactccagagttt

SEQ ID NO: 10813 - DNA, 25 bp, Saccharomyces pastorianus
aagcatgccttttggcccagaggaa

SEQ ID NO: 10814 - DNA, 25 bp, Saccharomyces pastorianus
aaagcgcagcagacgtatatgacag

SEQ ID NO: 10815 - DNA, 25 bp, Saccharomyces pastorianus
gtcgttgttcttgttacacatggca

SEQ ID NO: 10816 - DNA, 25 bp, Saccharomyces pastorianus
gtatggacatttctttttcaggttc

SEQ ID NO: 10817 - DNA, 25 bp, Saccharomyces pastorianus
gaatagtggtgtgcatatctgtgaa

SEQ ID NO: 10818 - DNA, 25 bp, Saccharomyces pastorianus
tacgtcttgaggaccgtattaccta

SEQ ID NO: 10819 - DNA, 25 bp, Saccharomyces pastorianus
gaagacccagggatgtcgttgttct

SEQ ID NO: 10820 - DNA, 25 bp, Saccharomyces pastorianus
atttgaggtatgacccctgcggtaa

SEQ ID NO: 10821 - DNA, 25 bp, Saccharomyces pastorianus
gaaagcccggtaaatgttacctgca

SEQ ID NO: 10822 - DNA, 25 bp, Saccharomyces pastorianus
agtgtcttgatctctatagtgtctt

SEQ ID NO: 10823 - DNA, 25 bp, Saccharomyces pastorianus
tagaagaccctaacatcaactcgcc

SEQ ID NO: 10824 - DNA, 25 bp, Saccharomyces pastorianus
gaaatagtcatgtcccgttcgatga

SEQ ID NO: 10825 - DNA, 25 bp, Saccharomyces pastorianus
aaacgggtctgccattctacaagat

SEQ ID NO: 10826 - DNA, 25 bp, Saccharomyces pastorianus
tttcgtaatgcccacttccgaatca

SEQ ID NO: 10827 - DNA, 25 bp, Saccharomyces pastorianus
gacagcgatttggatgacgacgaaa

SEQ ID NO: 10828 - DNA, 25 bp, Saccharomyces pastorianus
ttccgaatcagcttacatatcccaa

SEQ ID NO: 10829 - DNA, 25 bp, Saccharomyces pastorianus
aacgtggacgctgctgttgactata

SEQ ID NO: 10830 - DNA, 25 bp, Saccharomyces pastorianus
ttgtatttctattctccaccaaagc

SEQ ID NO: 10831 - DNA, 25 bp, Saccharomyces pastorianus
gataatttctggtacgacagcgatt

SEQ ID NO: 10832 - DNA, 25 bp, Saccharomyces pastorianus
gaaacagcctcacaaggccgaggat

SEQ ID NO: 10833 - DNA, 25 bp, Saccharomyces pastorianus
atctgtcaagggtggtgccgatgtt

SEQ ID NO: 10834 - DNA, 25 bp, Saccharomyces pastorianus
gaaagttcacctctggcgatgtcaa

SEQ ID NO: 10835 - DNA, 25 bp, Saccharomyces pastorianus
gtggtgctcttgtcattgccaataa

SEQ ID NO: 10836 - DNA, 25 bp, Saccharomyces pastorianus
acttatccttctctaacttgacaac

SEQ ID NO: 10837 - DNA, 25 bp, Saccharomyces pastorianus
acttgacaactatcggtggtgctct

SEQ ID NO: 10838 - DNA, 25 bp, Saccharomyces pastorianus
acttctacctctgtcaaactatcat

SEQ ID NO: 10839 - DNA, 25 bp, Saccharomyces pastorianus
agcgctgccagttcaagctcaaaga

SEQ ID NO: 10840 - DNA, 25 bp, Saccharomyces pastorianus
aacacagtgggccagaccttcagca

SEQ ID NO: 10841 - DNA, 25 bp, Saccharomyces pastorianus
gatgtcaaggctgctgtttctgcat

SEQ ID NO: 10842 - DNA, 25 bp, Saccharomyces pastorianus
ttccaagacctcttccaaatctgag

SEQ ID NO: 10843 - DNA, 25 bp, Saccharomyces pastorianus
ttcagcatcgtctccaatagtgagt

SEQ ID NO: 10844 - DNA, 25 bp, Saccharomyces pastorianus
gaaaacacccagctagaggaacgat

SEQ ID NO: 10845 - DNA, 25 bp, Saccharomyces pastorianus
gtccttcaacaagacccttacattt

SEQ ID NO: 10846 - DNA, 25 bp, Saccharomyces pastorianus
tggaagaacttaacgacgtcggtca

SEQ ID NO: 10847 - DNA, 25 bp, Saccharomyces pastorianus
tactgaaccaaattgtcggaccaca

SEQ ID NO: 10848 - DNA, 25 bp, Saccharomyces pastorianus
ggaacgattaattggctccagtaat

SEQ ID NO: 10849 - DNA, 25 bp, Saccharomyces pastorianus
cagagagcagagatgtccttcaaca

SEQ ID NO: 10850 - DNA, 25 bp, Saccharomyces pastorianus
agccagttgagtccggccaattaga

SEQ ID NO: 10851 - DNA, 25 bp, Saccharomyces pastorianus
aatagtgatttcgaactcgcgttaa

SEQ ID NO: 10852 - DNA, 25 bp, Saccharomyces pastorianus
gaaatcgtcgctagttatcggcaac

SEQ ID NO: 10853 - DNA, 25 bp, Saccharomyces pastorianus
atcagggacccagatgagccagttg

SEQ ID NO: 10854 - DNA, 25 bp, Saccharomyces pastorianus
gtaaaacttcaattgaccgtgaggt

SEQ ID NO: 10855 - DNA, 25 bp, Saccharomyces pastorianus
gagtttgaccactatttccactcct

SEQ ID NO: 10856 - DNA, 25 bp, Saccharomyces pastorianus
gttacgatattctgagtttgaccac

SEQ ID NO: 10857 - DNA, 25 bp, Saccharomyces pastorianus
gtatggttgctcttttgtacctaaa

SEQ ID NO: 10858 - DNA, 25 bp, Saccharomyces pastorianus
caatgttttttgcacaccctggaaa

SEQ ID NO: 10859 - DNA, 25 bp, Saccharomyces pastorianus
agatggcggattacgtggtcgacct

SEQ ID NO: 10860 - DNA, 25 bp, Saccharomyces pastorianus
tgcccataagtttctaccagctgac

SEQ ID NO: 10861 - DNA, 25 bp, Saccharomyces pastorianus
accagctgaccacaacctatatgaa

SEQ ID NO: 10862 - DNA, 25 bp, Saccharomyces pastorianus
ctcttatttttcgtatggttgctct

SEQ ID NO: 10863 - DNA, 25 bp, Saccharomyces pastorianus
gccttggacgctcagttacgaaaag

SEQ ID NO: 10864 - DNA, 25 bp, Saccharomyces pastorianus
ttaaactccttacgtgtgcctcaga

SEQ ID NO: 10865 - DNA, 25 bp, Saccharomyces pastorianus
gtgtgcctcagaagatactgcccat

SEQ ID NO: 10866 - DNA, 25 bp, Saccharomyces pastorianus
tatagtgaatcgatgccagctcctg

SEQ ID NO: 10867 - DNA, 25 bp, Saccharomyces pastorianus
cattgtgtatggtgtggccgactca

SEQ ID NO: 10868 - DNA, 25 bp, Saccharomyces pastorianus
atattgtccctcaaaaatgcctgca

SEQ ID NO: 10869 - DNA, 25 bp, Saccharomyces pastorianus
tcaccagtcattccacttttgttat

SEQ ID NO: 10870 - DNA, 25 bp, Saccharomyces pastorianus
ttcaactcccgttacctgcgtttag

SEQ ID NO: 10871 - DNA, 25 bp, Saccharomyces pastorianus
tgggtactttcaccaaatcatttgg

SEQ ID NO: 10872 - DNA, 25 bp, Saccharomyces pastorianus
taccctgctactccgttaattgaat

SEQ ID NO: 10873 - DNA, 25 bp, Saccharomyces pastorianus
agattctgtatgtcagcgtctttga

SEQ ID NO: 10874 - DNA, 25 bp, Saccharomyces pastorianus
gttgtcgttgttgcataccctgcta

SEQ ID NO: 10875 - DNA, 25 bp, Saccharomyces pastorianus
tgaactgtgtccaggccaaggcgca

SEQ ID NO: 10876 - DNA, 25 bp, Saccharomyces pastorianus
agagagattgcagcgtattgccttc

SEQ ID NO: 10877 - DNA, 25 bp, Saccharomyces pastorianus
tagttgaagtttcttctggcctaga

SEQ ID NO: 10878 - DNA, 25 bp, Saccharomyces pastorianus
taggtttcttcttaccgcatacccg

SEQ ID NO: 10879 - DNA, 25 bp, Saccharomyces pastorianus
gacaactcacctaggtttcttctta

SEQ ID NO: 10880 - DNA, 25 bp, Saccharomyces pastorianus
ctggcctagaagacgattcggactt

SEQ ID NO: 10881 - DNA, 25 bp, Saccharomyces pastorianus
gtttcgcataactacagcaagagcc

SEQ ID NO: 10882 - DNA, 25 bp, Saccharomyces pastorianus
gagccaaagccctcctatgagataa

SEQ ID NO: 10883 - DNA, 25 bp, Saccharomyces pastorianus
ttagcagaaatcctgcccgacaact

SEQ ID NO: 10884 - DNA, 25 bp, Saccharomyces pastorianus
attaaggccctgtcaatcaaaattg

SEQ ID NO: 10885 - DNA, 25 bp, Saccharomyces pastorianus
gaaacgagtgtggtactttcaaatt

SEQ ID NO: 10886 - DNA, 25 bp, Saccharomyces pastorianus
gcatacccgatcacaacgaaagacg

SEQ ID NO: 10887 - DNA, 25 bp, Saccharomyces pastorianus
tgctttacgcgggtgcattagaaat

SEQ ID NO: 10888 - DNA, 25 bp, Saccharomyces pastorianus
tagataacccaaagaaacccgctag

SEQ ID NO: 10889 - DNA, 25 bp, Saccharomyces pastorianus
ctctgctaggctatcatataccaaa

SEQ ID NO: 10890 - DNA, 25 bp, Saccharomyces pastorianus
ggtgatctttaacttgcaggccaaa

SEQ ID NO: 10891 - DNA, 25 bp, Saccharomyces pastorianus
taggtacaacccagccagtcaaaat

SEQ ID NO: 10892 - DNA, 25 bp, Saccharomyces pastorianus
ggcactccatgaggctatttgggaa

SEQ ID NO: 10893 - DNA, 25 bp, Saccharomyces pastorianus
aatgctgggaatcttgatacggcaa

SEQ ID NO: 10894 - DNA, 25 bp, Saccharomyces pastorianus
gcaggccaaaagcattcaaaaggtt

SEQ ID NO: 10895 - DNA, 25 bp, Saccharomyces pastorianus
gacgatctcaacttttgtgaatcaa

SEQ ID NO: 10896 - DNA, 25 bp, Saccharomyces pastorianus
agaaaaaggttctccctctgctagg

SEQ ID NO: 10897 - DNA, 25 bp, Saccharomyces pastorianus
gaggaagccttaccatatgtcacac

SEQ ID NO: 10898 - DNA, 25 bp, Saccharomyces pastorianus
atcaaatgcttcttgggcactccat

SEQ ID NO: 10899 - DNA, 25 bp, Saccharomyces pastorianus
attatccctgttatatgcactgtac

SEQ ID NO: 10900 - DNA, 25 bp, Saccharomyces pastorianus
gcgatatattgcacgagcacccgta

SEQ ID NO: 10901 - DNA, 25 bp, Saccharomyces pastorianus
gaacccttcgattaaaatacgtgct

SEQ ID NO: 10902 - DNA, 25 bp, Saccharomyces pastorianus
ataatatcccttgttgttgcctgta

SEQ ID NO: 10903 - DNA, 25 bp, Saccharomyces pastorianus
gaagacgccaacacatctgaaaagg

SEQ ID NO: 10904 - DNA, 25 bp, Saccharomyces pastorianus
gatgatgcacaaaccgaagacgcca

SEQ ID NO: 10905 - DNA, 25 bp, Saccharomyces pastorianus
ttgcgagagtgagcagtgtgcccaa

SEQ ID NO: 10906 - DNA, 25 bp, Saccharomyces pastorianus
attgacaccggaacctctggataat

SEQ ID NO: 10907 - DNA, 25 bp, Saccharomyces pastorianus
aactgtccccattgaatatgacgtg

SEQ ID NO: 10908 - DNA, 25 bp, Saccharomyces pastorianus
aagttccctggatcacagtgcgata

SEQ ID NO: 10909 - DNA, 25 bp, Saccharomyces pastorianus
aatgatccccaaatgcttaagtttt

SEQ ID NO: 10910 - DNA, 25 bp, Saccharomyces pastorianus
tgaagactaccagtttttggtccgg

SEQ ID NO: 10911 - DNA, 25 bp, Saccharomyces pastorianus
gaaaggaattgctgttggcggaaat

SEQ ID NO: 10912 - DNA, 25 bp, Saccharomyces pastorianus
gttttggtagcatcaacgatacaac

SEQ ID NO: 10913 - DNA, 25 bp, Saccharomyces pastorianus
gaatttctggaacatatacttctca

SEQ ID NO: 10914 - DNA, 25 bp, Saccharomyces pastorianus
atacacaacgtggagaatctcgctc

SEQ ID NO: 10915 - DNA, 25 bp, Saccharomyces pastorianus
cgatacaacagatgacgcttccgct

SEQ ID NO: 10916 - DNA, 25 bp, Saccharomyces pastorianus
gacattatcaaaagacaggtcggtt

SEQ ID NO: 10917 - DNA, 25 bp, Saccharomyces pastorianus
gacgcttccgctgacaattttgagg

SEQ ID NO: 10918 - DNA, 25 bp, Saccharomyces pastorianus
tttggtccggttttggtagcatcaa

SEQ ID NO: 10919 - DNA, 25 bp, Saccharomyces pastorianus
gagaatctcgctcagtcatattgga

SEQ ID NO: 10920 - DNA, 25 bp, Saccharomyces pastorianus
atggatttagagaaggaaccgtttg

SEQ ID NO: 10921 - DNA, 25 bp, Saccharomyces pastorianus
gacgataccaagtacagacccgcta

SEQ ID NO: 10922 - DNA, 25 bp, Saccharomyces pastorianus
gggctaacgattttgatggcgtctt

SEQ ID NO: 10923 - DNA, 25 bp, Saccharomyces pastorianus
gcagacagccatccacaaaacagtt

SEQ ID NO: 10924 - DNA, 25 bp, Saccharomyces pastorianus
tatccgttcttgttggacttaactc

SEQ ID NO: 10925 - DNA, 25 bp, Saccharomyces pastorianus
gggtcattatacctcctatgtgaaa

SEQ ID NO: 10926 - DNA, 25 bp, Saccharomyces pastorianus
cagtattatcgattcctatcccaag

SEQ ID NO: 10927 - DNA, 25 bp, Saccharomyces pastorianus
gggcaatacgcatcacggctaaaat

SEQ ID NO: 10928 - DNA, 25 bp, Saccharomyces pastorianus
gacgagcaatggttgtgtcctcatt

SEQ ID NO: 10929 - DNA, 25 bp, Saccharomyces pastorianus
atggcgtctttccaccaggtgtaaa

SEQ ID NO: 10930 - DNA, 25 bp, Saccharomyces pastorianus
tcgacaacgtatcaacctttcacag

SEQ ID NO: 10931 - DNA, 25 bp, Saccharomyces pastorianus
atggcgtagcgtgtcatttcggtac

SEQ ID NO: 10932 - DNA, 25 bp, Saccharomyces pastorianus
ggatctgtaagtcaccaaaggcggc

SEQ ID NO: 10933 - DNA, 25 bp, Saccharomyces pastorianus
gaatcctgatttcaaacagcctgga

SEQ ID NO: 10934 - DNA, 25 bp, Saccharomyces pastorianus
taagggtttctacccgcacttgaag

SEQ ID NO: 10935 - DNA, 25 bp, Saccharomyces pastorianus
gaagcacgatcaagacgcggcggaa

SEQ ID NO: 10936 - DNA, 25 bp, Saccharomyces pastorianus
tgtaagtcaccaaaggcggcccttt

SEQ ID NO: 10937 - DNA, 25 bp, Saccharomyces pastorianus
gcactccaagacaatggatctgtaa

SEQ ID NO: 10938 - DNA, 25 bp, Saccharomyces pastorianus
gaagaaactggataacttggaacat

SEQ ID NO: 10939 - DNA, 25 bp, Saccharomyces pastorianus
gttaagagcaactatttcacgcact

SEQ ID NO: 10940 - DNA, 25 bp, Saccharomyces pastorianus
agacgcggcggaacagaaggaacaa

SEQ ID NO: 10941 - DNA, 25 bp, Saccharomyces pastorianus
tttctacccgcacttgaagcacgat

SEQ ID NO: 10942 - DNA, 25 bp, Saccharomyces pastorianus
cttggaacatgggaagaatcctgat

SEQ ID NO: 10943 - DNA, 25 bp, Saccharomyces pastorianus
gaggaaatcatcagcttccgtctga

SEQ ID NO: 10944 - DNA, 25 bp, Saccharomyces pastorianus
aagtttcggcgagcacaaatggatc

SEQ ID NO: 10945 - DNA, 25 bp, Saccharomyces pastorianus
gttccggtttgttcatcagagacat

SEQ ID NO: 10946 - DNA, 25 bp, Saccharomyces pastorianus
attgtccagaattatgttccggttt

SEQ ID NO: 10947 - DNA, 25 bp, Saccharomyces pastorianus
atgagtaccaagatacccgatgagt

SEQ ID NO: 10948 - DNA, 25 bp, Saccharomyces pastorianus
atatcggtatccactccgtggttat

SEQ ID NO: 10949 - DNA, 25 bp, Saccharomyces pastorianus
gagccattggtaccattttacgaga

SEQ ID NO: 10950 - DNA, 25 bp, Saccharomyces pastorianus
gatgagtacatcaccattgaaagca

SEQ ID NO: 10951 - DNA, 25 bp, Saccharomyces pastorianus
tgctgagaacaccaacgttagtaag

SEQ ID NO: 10952 - DNA, 25 bp, Saccharomyces pastorianus
gtggaatccagcaacaatatcggta

SEQ ID NO: 10953 - DNA, 25 bp, Saccharomyces pastorianus
aatcgttttgatcgctcacgagcca

SEQ ID NO: 10954 - DNA, 25 bp, Saccharomyces pastorianus
taaatcaaggcatcccttcggctaa

SEQ ID NO: 10955 - DNA, 25 bp, Saccharomyces pastorianus
aacagcttgcaaaacagtctacgga

SEQ ID NO: 10956 - DNA, 25 bp, Saccharomyces pastorianus
agcaacttatatcccagttcctcaa

SEQ ID NO: 10957 - DNA, 25 bp, Saccharomyces pastorianus
agtacaactgctactgcacatcaat

SEQ ID NO: 10958 - DNA, 25 bp, Saccharomyces pastorianus
atcaatagcatactgcttgccagag

SEQ ID NO: 10959 - DNA, 25 bp, Saccharomyces pastorianus
tgcttgccagagttatccagatgaa

SEQ ID NO: 10960 - DNA, 25 bp, Saccharomyces pastorianus
taaacgggaaccctcatgccggcat

SEQ ID NO: 10961 - DNA, 25 bp, Saccharomyces pastorianus
ttgcaagcccaaacctaaataccac

SEQ ID NO: 10962 - DNA, 25 bp, Saccharomyces pastorianus
tcggctaaaccgttgattctctctc

SEQ ID NO: 10963 - DNA, 25 bp, Saccharomyces pastorianus
caaaagggtccatgccaatctacaa

SEQ ID NO: 10964 - DNA, 25 bp, Saccharomyces pastorianus
aatgcagatttaaacctccctacgg

SEQ ID NO: 10965 - DNA, 25 bp, Saccharomyces pastorianus
taaactcgcatccaaagcttacgtc

SEQ ID NO: 10966 - DNA, 25 bp, Saccharomyces pastorianus
ttaaccgatcctcaacaagttttgg

SEQ ID NO: 10967 - DNA, 25 bp, Saccharomyces pastorianus
tggccaaccacaagacatgctgaag

SEQ ID NO: 10968 - DNA, 25 bp, Saccharomyces pastorianus
gcaggtactgtcgacttggattcaa

SEQ ID NO: 10969 - DNA, 25 bp, Saccharomyces pastorianus
tcactgttgggtccgcatccaagaa

SEQ ID NO: 10970 - DNA, 25 bp, Saccharomyces pastorianus
atgggttttatccagtcactgttgg

SEQ ID NO: 10971 - DNA, 25 bp, Saccharomyces pastorianus
gattggtttggcaccaacatggcca

SEQ ID NO: 10972 - DNA, 25 bp, Saccharomyces pastorianus
tcggcgatgtttcacttttccaaag

SEQ ID NO: 10973 - DNA, 25 bp, Saccharomyces pastorianus
accctaggtttacttgtcggcgatg

SEQ ID NO: 10974 - DNA, 25 bp, Saccharomyces pastorianus
agacgaaatgcctgactttgtatta

SEQ ID NO: 10975 - DNA, 25 bp, Saccharomyces pastorianus
ggcattataggcgtacagtcccaga

SEQ ID NO: 10976 - DNA, 25 bp, Saccharomyces pastorianus
tgccaatattggctcaatcccgaca

SEQ ID NO: 10977 - DNA, 25 bp, Saccharomyces pastorianus
gataacgaggcatgcaccatcaaag

SEQ ID NO: 10978 - DNA, 25 bp, Saccharomyces pastorianus
gacaggattggtttattcagagact

SEQ ID NO: 10979 - DNA, 25 bp, Saccharomyces pastorianus
gaggacggttccaatttctatgtca

SEQ ID NO: 10980 - DNA, 25 bp, Saccharomyces pastorianus
agctgttcccaactgtttgtcaaca

SEQ ID NO: 10981 - DNA, 25 bp, Saccharomyces pastorianus
aacaggcctattccgcgatataatc

SEQ ID NO: 10982 - DNA, 25 bp, Saccharomyces pastorianus
tcgactttgatagagcaacaggcct

SEQ ID NO: 10983 - DNA, 25 bp, Saccharomyces pastorianus
gggaggcaaagattccacctgggaa

SEQ ID NO: 10984 - DNA, 25 bp, Saccharomyces pastorianus
aagtgctctagtggccaatattgct

SEQ ID NO: 10985 - DNA, 25 bp, Saccharomyces pastorianus
gcgaagatcgcaaccgtattgttaa

SEQ ID NO: 10986 - DNA, 25 bp, Saccharomyces pastorianus
acgccgtcttcccaagataacgagg

SEQ ID NO: 10987 - DNA, 25 bp, Saccharomyces pastorianus
tgttctcatctattggcgttttcca

SEQ ID NO: 10988 - DNA, 25 bp, Saccharomyces pastorianus
aaattcgctcagttggatccgcata

SEQ ID NO: 10989 - DNA, 25 bp, Saccharomyces pastorianus
gtttccaagggagcttttcattcga

SEQ ID NO: 10990 - DNA, 25 bp, Saccharomyces pastorianus
acagggccgccgatactagtagaca

SEQ ID NO: 10991 - DNA, 25 bp, Saccharomyces pastorianus
tatagggactcgtcggatgtgccgt

SEQ ID NO: 10992 - DNA, 25 bp, Saccharomyces pastorianus
gacgaccacttgcaattttcaaacg

SEQ ID NO: 10993 - DNA, 25 bp, Saccharomyces pastorianus
gatgtgccgttagagtaccgcttaa

SEQ ID NO: 10994 - DNA, 25 bp, Saccharomyces pastorianus
ggatccgcatagtttgtccaaacaa

SEQ ID NO: 10995 - DNA, 25 bp, Saccharomyces pastorianus
tggtaaggtttgctgttctcatcta

SEQ ID NO: 10996 - DNA, 25 bp, Saccharomyces pastorianus
gacatatcgcactggttttgctcat

SEQ ID NO: 10997 - DNA, 25 bp, Saccharomyces pastorianus
gagtaccgcttaatcgtcaaggata

SEQ ID NO: 10998 - DNA, 25 bp, Saccharomyces pastorianus
gaatcagactggagaaaaaactgca

SEQ ID NO: 10999 - DNA, 25 bp, Saccharomyces pastorianus
gctactctgaaccagataccaaagg

SEQ ID NO: 11000 - DNA, 25 bp, Saccharomyces pastorianus
agggttctggccagatcctgctact

SEQ ID NO: 11001 - DNA, 25 bp, Saccharomyces pastorianus
ctgcaagaggaatttggtttggacc

SEQ ID NO: 11002 - DNA, 25 bp, Saccharomyces pastorianus
tggtttggaccttgaacaggaaaag

SEQ ID NO: 11003 - DNA, 25 bp, Saccharomyces pastorianus
agatcctgctactctgaaccagata

SEQ ID NO: 11004 - DNA, 25 bp, Saccharomyces pastorianus
gaaccgtatgagatcaaagctgaac

SEQ ID NO: 11005 - DNA, 25 bp, Saccharomyces pastorianus
aagggcgcaactggaaatattcaga

SEQ ID NO: 11006 - DNA, 25 bp, Saccharomyces pastorianus
ttctttttgtctgctagcacccgtt

SEQ ID NO: 11007 - DNA, 25 bp, Saccharomyces pastorianus
gaaatattcagattttctttttgtc

SEQ ID NO: 11008 - DNA, 25 bp, Saccharomyces pastorianus
gaaccagataccaaaggaaccgtat

SEQ ID NO: 11009 - DNA, 25 bp, Saccharomyces pastorianus
tggaggagttagatgacacccacct

SEQ ID NO: 11010 - DNA, 25 bp, Saccharomyces pastorianus
acctcctggtagatccaacgaaagt

SEQ ID NO: 11011 - DNA, 25 bp, Saccharomyces pastorianus
gcatgagttaaacagacttttatct

SEQ ID NO: 11012 - DNA, 25 bp, Saccharomyces pastorianus
gcgctgatccagtgtgatccatcta

SEQ ID NO: 11013 - DNA, 25 bp, Saccharomyces pastorianus
tgatccatctattaaggcacttata

SEQ ID NO: 11014 - DNA, 25 bp, Saccharomyces pastorianus
tccagtgtgatccatctattaaggc

SEQ ID NO: 11015 - DNA, 25 bp, Saccharomyces pastorianus
tgagcgatatagtattggaggagtt

SEQ ID NO: 11016 - DNA, 25 bp, Saccharomyces pastorianus
ggcacttatactacaaatcgacgca

SEQ ID NO: 11017 - DNA, 25 bp, Saccharomyces pastorianus
aagggcgcgctgatccagtgtgatc

SEQ ID NO: 11018 - DNA, 25 bp, Saccharomyces pastorianus
aaatcgacgcaaagatgagcgatat

SEQ ID NO: 11019 - DNA, 25 bp, Saccharomyces pastorianus
agatgacacccacctcctggtagat

SEQ ID NO: 11020 - DNA, 25 bp, Saccharomyces pastorianus
gttcaacccttccagactctagtaa

SEQ ID NO: 11021 - DNA, 25 bp, Saccharomyces pastorianus
ttggaacttccgtcaggcggttcaa

SEQ ID NO: 11022 - DNA, 25 bp, Saccharomyces pastorianus
ctccccaaacgttgtgtctcaaaat

SEQ ID NO: 11023 - DNA, 25 bp, Saccharomyces pastorianus
gaccatttagagacccttttatcag

SEQ ID NO: 11024 - DNA, 25 bp, Saccharomyces pastorianus
aagatctatgacgacagtaccgata

SEQ ID NO: 11025 - DNA, 25 bp, Saccharomyces pastorianus
atacatcgaagggtggacctcctgt

SEQ ID NO: 11026 - DNA, 25 bp, Saccharomyces pastorianus
ataggatcagcagcatcctctgctt

SEQ ID NO: 11027 - DNA, 25 bp, Saccharomyces pastorianus
taaacagctttcaacgtcatccatc

SEQ ID NO: 11028 - DNA, 25 bp, Saccharomyces pastorianus
ttacaccttcccctgtgactataaa

SEQ ID NO: 11029 - DNA, 25 bp, Saccharomyces pastorianus
atccatcatccgttgcagacgtttc

SEQ ID NO: 11030 - DNA, 25 bp, Saccharomyces pastorianus
gccatctggcttaggtcatcttgaa

SEQ ID NO: 11031 - DNA, 25 bp, Saccharomyces pastorianus
gattttaaagtcgtcgcacccgttg

SEQ ID NO: 11032 - DNA, 25 bp, Saccharomyces pastorianus
gttgctactatcattccacttggca

SEQ ID NO: 11033 - DNA, 25 bp, Saccharomyces pastorianus
atgccttctcttccaggattcgaaa

SEQ ID NO: 11034 - DNA, 25 bp, Saccharomyces pastorianus
catatgggttccgttgttgcgataa

SEQ ID NO: 11035 - DNA, 25 bp, Saccharomyces pastorianus
ggtatctttgccattttgtgtcttc

SEQ ID NO: 11036 - DNA, 25 bp, Saccharomyces pastorianus
atataagcagtatgcgcctggccca

SEQ ID NO: 11037 - DNA, 25 bp, Saccharomyces pastorianus
attttacacctcaattcatcaccgt

SEQ ID NO: 11038 - DNA, 25 bp, Saccharomyces pastorianus
atcgtggcagtgtgtttgaccgctt

SEQ ID NO: 11039 - DNA, 25 bp, Saccharomyces pastorianus
cgtcgtgcttttactttcgtttgat

SEQ ID NO: 11040 - DNA, 25 bp, Saccharomyces pastorianus
gaggacgcaaattcctggttcccta

SEQ ID NO: 11041 - DNA, 25 bp, Saccharomyces pastorianus
gaacctgctaatggacagtccggcg

SEQ ID NO: 11042 - DNA, 25 bp, Saccharomyces pastorianus
ggcaccagtggagtttgtcagagaa

SEQ ID NO: 11043 - DNA, 25 bp, Saccharomyces pastorianus
aaagaaatcaagcaacaaccaagtt

SEQ ID NO: 11044 - DNA, 25 bp, Saccharomyces pastorianus
atcggttttgttgccgtcggtatca

SEQ ID NO: 11045 - DNA, 25 bp, Saccharomyces pastorianus
cattggctatgctatcaagttgatt

SEQ ID NO: 11046 - DNA, 25 bp, Saccharomyces pastorianus
ggaactcaattcctagctaagtgta

SEQ ID NO: 11047 - DNA, 25 bp, Saccharomyces pastorianus
aagcctgatttgagggaatactcca

SEQ ID NO: 11048 - DNA, 25 bp, Saccharomyces pastorianus
aagatcgtcaaagccgtcggtatcg

SEQ ID NO: 11049 - DNA, 25 bp, Saccharomyces pastorianus
ccgtcggtatcattggctatgctat

SEQ ID NO: 11050 - DNA, 25 bp, Saccharomyces pastorianus
aaaaattggtcgaggcaccagtgga

SEQ ID NO: 11051 - DNA, 25 bp, Saccharomyces pastorianus
tcaaagccgtcggtatcggttttgt

SEQ ID NO: 11052 - DNA, 25 bp, Saccharomyces pastorianus
gaatactccaagatcgtcaaagccg

SEQ ID NO: 11053 - DNA, 25 bp, Saccharomyces pastorianus
gaagatgttccgcaggcatttgaca

SEQ ID NO: 11054 - DNA, 25 bp, Saccharomyces pastorianus
caatttgccagatcccatgctaagg

SEQ ID NO: 11055 - DNA, 25 bp, Saccharomyces pastorianus
gacgactctgaaaactcccaattat

SEQ ID NO: 11056 - DNA, 25 bp, Saccharomyces pastorianus
acaaggacgctgtaggttcattgaa

SEQ ID NO: 11057 - DNA, 25 bp, Saccharomyces pastorianus
agctgatgatgcactttgggataca

SEQ ID NO: 11058 - DNA, 25 bp, Saccharomyces pastorianus
gtggccaatcctacaaaatacgaat

SEQ ID NO: 11059 - DNA, 25 bp, Saccharomyces pastorianus
gaagacgccaatgagcccaaaacag

SEQ ID NO: 11060 - DNA, 25 bp, Saccharomyces pastorianus
gagacactgggatccgttgacgaaa

SEQ ID NO: 11061 - DNA, 25 bp, Saccharomyces pastorianus
tacaatgagctgatccgtaagtggg

SEQ ID NO: 11062 - DNA, 25 bp, Saccharomyces pastorianus
tacagcatgtattagtggccaatcc

SEQ ID NO: 11063 - DNA, 25 bp, Saccharomyces pastorianus
taagggccaatctcaagctgatgat

SEQ ID NO: 11064 - DNA, 25 bp, Saccharomyces pastorianus
actcactatggttcgatggcatcat

SEQ ID NO: 11065 - DNA, 25 bp, Saccharomyces pastorianus
atctgcgcttgtctgctattgttat

SEQ ID NO: 11066 - DNA, 25 bp, Saccharomyces pastorianus
tattcagtaggttcactttggcacc

SEQ ID NO: 11067 - DNA, 25 bp, Saccharomyces pastorianus
ttgccagttccgtttgatagttcca

SEQ ID NO: 11068 - DNA, 25 bp, Saccharomyces pastorianus
gattacattcctatacttgtccgca

SEQ ID NO: 11069 - DNA, 25 bp, Saccharomyces pastorianus
ttcgtcatgacaagagggcaccgtt

SEQ ID NO: 11070 - DNA, 25 bp, Saccharomyces pastorianus
cactacttacttcttgcattatggc

SEQ ID NO: 11071 - DNA, 25 bp, Saccharomyces pastorianus
gatagttccaaaaggcctcagcacc

SEQ ID NO: 11072 - DNA, 25 bp, Saccharomyces pastorianus
ctttggcacctatctggcattatat

SEQ ID NO: 11073 - DNA, 25 bp, Saccharomyces pastorianus
gctcgccaaccgactatggatttat

SEQ ID NO: 11074 - DNA, 25 bp, Saccharomyces pastorianus
attggtttcccttcttttgatctgc

SEQ ID NO: 11075 - DNA, 25 bp, Saccharomyces pastorianus
gtgtaggttcaagtggctcgctaaa

SEQ ID NO: 11076 - DNA, 25 bp, Saccharomyces pastorianus
ttgtgacgatgtctcaagcctcgca

SEQ ID NO: 11077 - DNA, 25 bp, Saccharomyces pastorianus
gttgtcggcattaactttgctttct

SEQ ID NO: 11078 - DNA, 25 bp, Saccharomyces pastorianus
gtcacacttctgatggcgatgcatt

SEQ ID NO: 11079 - DNA, 25 bp, Saccharomyces pastorianus
gtactacatggcctgatttaatttt

SEQ ID NO: 11080 - DNA, 25 bp, Saccharomyces pastorianus
ggattacttccaccctattatgaat

SEQ ID NO: 11081 - DNA, 25 bp, Saccharomyces pastorianus
tgtggttgagacctctttacgagaa

SEQ ID NO: 11082 - DNA, 25 bp, Saccharomyces pastorianus
aaggactcaaactcttcatgccgtt

SEQ ID NO: 11083 - DNA, 25 bp, Saccharomyces pastorianus
aatttttggtattcttgcatccgtt

SEQ ID NO: 11084 - DNA, 25 bp, Saccharomyces pastorianus
gattcgttaggagcctggttatcta

SEQ ID NO: 11085 - DNA, 25 bp, Saccharomyces pastorianus
tgcatccgttttgttagccgttgga

SEQ ID NO: 11086 - DNA, 25 bp, Saccharomyces pastorianus
attgcaaagagtcgccattgtctta

SEQ ID NO: 11087 - DNA, 25 bp, Saccharomyces pastorianus
gagatccaaactctttcaggccaag

SEQ ID NO: 11088 - DNA, 25 bp, Saccharomyces pastorianus
gaggccagtttctaaatccacaatt

SEQ ID NO: 11089 - DNA, 25 bp, Saccharomyces pastorianus
gaaccatccgcttacttagattctg

SEQ ID NO: 11090 - DNA, 25 bp, Saccharomyces pastorianus
ggtgttccttctaaaaacgctcatg

SEQ ID NO: 11091 - DNA, 25 bp, Saccharomyces pastorianus
atgcaagagctccagaatctttgtt

SEQ ID NO: 11092 - DNA, 25 bp, Saccharomyces pastorianus
gatcaaggtcaacacattccaagat

SEQ ID NO: 11093 - DNA, 25 bp, Saccharomyces pastorianus
gggtattccagctgacatttacttg

SEQ ID NO: 11094 - DNA, 25 bp, Saccharomyces pastorianus
gaaaaccgcgtttgtcgtcgagcac

SEQ ID NO: 11095 - DNA, 25 bp, Saccharomyces pastorianus
cattgtcttagctttgggtattcca

SEQ ID NO: 11096 - DNA, 25 bp, Saccharomyces pastorianus
tgcaccaaaattcccaggtaccgtt

SEQ ID NO: 11097 - DNA, 25 bp, Saccharomyces pastorianus
gtcagaccatggcaagatctacatt

SEQ ID NO: 11098 - DNA, 25 bp, Saccharomyces pastorianus
tatcaaccgcattcttctaaattcg

SEQ ID NO: 11099 - DNA, 25 bp, Saccharomyces pastorianus
agagccccatatcttcgtttgtcaa

SEQ ID NO: 11100 - DNA, 25 bp, Saccharomyces pastorianus
gttcattctggtgaaaagccccatt

SEQ ID NO: 11101 - DNA, 25 bp, Saccharomyces pastorianus
ttctggtcatcatctaacaaggcat

SEQ ID NO: 11102 - DNA, 25 bp, Saccharomyces pastorianus
gtactcttccacaattaacgactat

SEQ ID NO: 11103 - DNA, 25 bp, Saccharomyces pastorianus
ataggtctcctttgggcgtaagcaa

SEQ ID NO: 11104 - DNA, 25 bp, Saccharomyces pastorianus
gggcgtaagcaacccactaatgtac

SEQ ID NO: 11105 - DNA, 25 bp, Saccharomyces pastorianus
gtttgtcaacgattataggtctcct

SEQ ID NO: 11106 - DNA, 25 bp, Saccharomyces pastorianus
gaaacgtacaatacttcttcgatga

SEQ ID NO: 11107 - DNA, 25 bp, Saccharomyces pastorianus
gtaacaggcaattttcttctggtca

SEQ ID NO: 11108 - DNA, 25 bp, Saccharomyces pastorianus
atctggtggcttacagagcgatttc

SEQ ID NO: 11109 - DNA, 25 bp, Saccharomyces pastorianus
aagagtattatcgacaatgcgcaga

SEQ ID NO: 11110 - DNA, 25 bp, Saccharomyces pastorianus
aagaacgtgatttggcagtcaacaa

SEQ ID NO: 11111 - DNA, 25 bp, Saccharomyces pastorianus
aagcgatgggtttgccattgcagaa

SEQ ID NO: 11112 - DNA, 25 bp, Saccharomyces pastorianus
gtttaggatttttcgccacacatta

SEQ ID NO: 11113 - DNA, 25 bp, Saccharomyces pastorianus
agaagttctctctttatctggtggc

SEQ ID NO: 11114 - DNA, 25 bp, Saccharomyces pastorianus
cacattacggtacactggcactaag

SEQ ID NO: 11115 - DNA, 25 bp, Saccharomyces pastorianus
aggaacgtgacttttctgtacaaga

SEQ ID NO: 11116 - DNA, 25 bp, Saccharomyces pastorianus
cattcggtatgcatgtggcgtcaat

SEQ ID NO: 11117 - DNA, 25 bp, Saccharomyces pastorianus
gaaagtgtgctacaccacgtggcga

SEQ ID NO: 11118 - DNA, 25 bp, Saccharomyces pastorianus
gagcgatttcgttcggattgtgtac

SEQ ID NO: 11119 - DNA, 25 bp, Saccharomyces pastorianus
tacaaaactgcctctgaaattgcca

SEQ ID NO: 11120 - DNA, 25 bp, Saccharomyces pastorianus
tctccgatgatattttgtccgtatt

SEQ ID NO: 11121 - DNA, 25 bp, Saccharomyces pastorianus
tcgtcgtgcttcttggaggatagtt

SEQ ID NO: 11122 - DNA, 25 bp, Saccharomyces pastorianus
cgaattacctccaactcatccaatt

SEQ ID NO: 11123 - DNA, 25 bp, Saccharomyces pastorianus
cgtattagattctcatttgatccct

SEQ ID NO: 11124 - DNA, 25 bp, Saccharomyces pastorianus
atttggctgaattctccagcggtga

SEQ ID NO: 11125 - DNA, 25 bp, Saccharomyces pastorianus
gatcccttctgccactactggtgaa

SEQ ID NO: 11126 - DNA, 25 bp, Saccharomyces pastorianus
gacattatggacctcagacatttct

SEQ ID NO: 11127 - DNA, 25 bp, Saccharomyces pastorianus
gaattgattcgttcttaccgttcaa

SEQ ID NO: 11128 - DNA, 25 bp, Saccharomyces pastorianus
ttagctttgaacttctccgttttct

SEQ ID NO: 11129 - DNA, 25 bp, Saccharomyces pastorianus
accgaattgactaaaatctccgatg

SEQ ID NO: 11130 - DNA, 25 bp, Saccharomyces pastorianus
gtaccttttcaccaatttaagcatt

SEQ ID NO: 11131 - DNA, 25 bp, Saccharomyces pastorianus
tggctgtttagataccatcgccgca

SEQ ID NO: 11132 - DNA, 25 bp, Saccharomyces pastorianus
gagcacctggttcatctttatcaat

SEQ ID NO: 11133 - DNA, 25 bp, Saccharomyces pastorianus
gggtttccttcatagtcttccattt

SEQ ID NO: 11134 - DNA, 25 bp, Saccharomyces pastorianus
taagcatttttctcctagccgtgta

SEQ ID NO: 11135 - DNA, 25 bp, Saccharomyces pastorianus
atcgccgcactttcgcaattgaagt

SEQ ID NO: 11136 - DNA, 25 bp, Saccharomyces pastorianus
agtcttccatttctcacaatttgtg

SEQ ID NO: 11137 - DNA, 25 bp, Saccharomyces pastorianus
agccgtgtatggactagcacttaca

SEQ ID NO: 11138 - DNA, 25 bp, Saccharomyces pastorianus
gtgccaccaaacctttacagatacg

SEQ ID NO: 11139 - DNA, 25 bp, Saccharomyces pastorianus
cagcttcggcggtattttcaacaag

SEQ ID NO: 11140 - DNA, 25 bp, Saccharomyces pastorianus
acagatacgcgtctttttattttag

SEQ ID NO: 11141 - DNA, 25 bp, Saccharomyces pastorianus
gaggttattggtcctgcagcacaat

SEQ ID NO: 11142 - DNA, 25 bp, Saccharomyces pastorianus
tagtttcagtctaagctttgacgaa

SEQ ID NO: 11143 - DNA, 25 bp, Saccharomyces pastorianus
atcgactctccatttggtgacgaaa

SEQ ID NO: 11144 - DNA, 25 bp, Saccharomyces pastorianus
agcacaatcaccattagtctccaat

SEQ ID NO: 11145 - DNA, 25 bp, Saccharomyces pastorianus
acttgttgaggttggttcttggaat

SEQ ID NO: 11146 - DNA, 25 bp, Saccharomyces pastorianus
gactttcactttattctaacggaga

SEQ ID NO: 11147 - DNA, 25 bp, Saccharomyces pastorianus
tatcggatgttgagtctacgactac

SEQ ID NO: 11148 - DNA, 25 bp, Saccharomyces pastorianus
ggcgcggttcgttttcgagtctaat

SEQ ID NO: 11149 - DNA, 25 bp, Saccharomyces pastorianus
gacgcatctcacttgttgcttaatg

SEQ ID NO: 11150 - DNA, 25 bp, Saccharomyces pastorianus
gactactattcatatcgactctcca

SEQ ID NO: 11151 - DNA, 25 bp, Saccharomyces pastorianus
gaaagcgagactgacgcatctcact

SEQ ID NO: 11152 - DNA, 25 bp, Saccharomyces pastorianus
ttatattctttttggccacgcagtg

SEQ ID NO: 11153 - DNA, 25 bp, Saccharomyces pastorianus
tagtgctttccaaggtaccaatacc

SEQ ID NO: 11154 - DNA, 25 bp, Saccharomyces pastorianus
gtttagtattattctgggctcgtta

SEQ ID NO: 11155 - DNA, 25 bp, Saccharomyces pastorianus
gttgggaacaccttctttgactgat

SEQ ID NO: 11156 - DNA, 25 bp, Saccharomyces pastorianus
gagagtgccctatatgacacaactt

SEQ ID NO: 11157 - DNA, 25 bp, Saccharomyces pastorianus
tagttagatccagcggaacccgtaa

SEQ ID NO: 11158 - DNA, 25 bp, Saccharomyces pastorianus
ataccaatggcgcaatatatctcgg

SEQ ID NO: 11159 - DNA, 25 bp, Saccharomyces pastorianus
ttatgcgctttacggctggacagta

SEQ ID NO: 11160 - DNA, 25 bp, Saccharomyces pastorianus
ctgggctcgttatttacttttgttg

SEQ ID NO: 11161 - DNA, 25 bp, Saccharomyces pastorianus
acttttgttgcgatcgcctatacaa

SEQ ID NO: 11162 - DNA, 25 bp, Saccharomyces pastorianus
taggagattttataccggtcggaag

SEQ ID NO: 11163 - DNA, 25 bp, Saccharomyces pastorianus
gggcgatcggctttttcagtagcat

SEQ ID NO: 11164 - DNA, 25 bp, Saccharomyces pastorianus
atatctgtgctatgttgcgttgtca

SEQ ID NO: 11165 - DNA, 25 bp, Saccharomyces pastorianus
tttgctggttcatatattgcctaca

SEQ ID NO: 11166 - DNA, 25 bp, Saccharomyces pastorianus
ttcggtgtctattccattgtcgttt

SEQ ID NO: 11167 - DNA, 25 bp, Saccharomyces pastorianus
caggcaacccttattgcaggcattt

SEQ ID NO: 11168 - DNA, 25 bp, Saccharomyces pastorianus
atcttcctatggttttcggtgtcta

SEQ ID NO: 11169 - DNA, 25 bp, Saccharomyces pastorianus
aactcggtggattcgtcacaatcat

SEQ ID NO: 11170 - DNA, 25 bp, Saccharomyces pastorianus
ttatctgcgcagtcctcgggtgtga

SEQ ID NO: 11171 - DNA, 25 bp, Saccharomyces pastorianus
gacaaagtccatttcagccttggta

SEQ ID NO: 11172 - DNA, 25 bp, Saccharomyces pastorianus
aacgctgtttttcataatcttccta

SEQ ID NO: 11173 - DNA, 25 bp, Saccharomyces pastorianus
gcaggcattttctcttttggttcaa

SEQ ID NO: 11174 - DNA, 25 bp, Saccharomyces pastorianus
tgatctaatggtcaagcctcctcaa

SEQ ID NO: 11175 - DNA, 25 bp, Saccharomyces pastorianus
ataacgttcaactggcttctttaca

SEQ ID NO: 11176 - DNA, 25 bp, Saccharomyces pastorianus
attgcacagcactattggaatctac

SEQ ID NO: 11177 - DNA, 25 bp, Saccharomyces pastorianus
ttaccacgtgcggacaacctttttg

SEQ ID NO: 11178 - DNA, 25 bp, Saccharomyces pastorianus
gtaaacgtctcaacatcgagccaga

SEQ ID NO: 11179 - DNA, 25 bp, Saccharomyces pastorianus
ttttgccaccaggaacccaatggat

SEQ ID NO: 11180 - DNA, 25 bp, Saccharomyces pastorianus
tacaggtatttgtaccgtccctggt

SEQ ID NO: 11181 - DNA, 25 bp, Saccharomyces pastorianus
ggcttctttacattccatttccaaa

SEQ ID NO: 11182 - DNA, 25 bp, Saccharomyces pastorianus
ttttcccaaagcttgttttgcctga

SEQ ID NO: 11183 - DNA, 25 bp, Saccharomyces pastorianus
ttgttctgtagttactgggcaagct

SEQ ID NO: 11184 - DNA, 25 bp, Saccharomyces pastorianus
atcgagccagatgtgctttattgca

SEQ ID NO: 11185 - DNA, 25 bp, Saccharomyces pastorianus
agaggtaacacgtatcagcccagta

SEQ ID NO: 11186 - DNA, 25 bp, Saccharomyces pastorianus
atgtcactatttgggaggctgtacc

SEQ ID NO: 11187 - DNA, 25 bp, Saccharomyces pastorianus
aggctgtaccagtttcagtcaagga

SEQ ID NO: 11188 - DNA, 25 bp, Saccharomyces pastorianus
atctctgctctgtctgtattacgtc

SEQ ID NO: 11189 - DNA, 25 bp, Saccharomyces pastorianus
gagaatgttttcctccatatcgctc

SEQ ID NO: 11190 - DNA, 25 bp, Saccharomyces pastorianus
ttgaaaaccatgtcctctacaccgt

SEQ ID NO: 11191 - DNA, 25 bp, Saccharomyces pastorianus
gtgcttttaaacagctcaccattga

SEQ ID NO: 11192 - DNA, 25 bp, Saccharomyces pastorianus
gtatcagcccagtacgttgaagagg

SEQ ID NO: 11193 - DNA, 25 bp, Saccharomyces pastorianus
gtattacgtccgcaaaccaacgtgc

SEQ ID NO: 11194 - DNA, 25 bp, Saccharomyces pastorianus
atgtcctctacaccgtttgggtttg

SEQ ID NO: 11195 - DNA, 25 bp, Saccharomyces pastorianus
aactttcggattcttggccagggca

SEQ ID NO: 11196 - DNA, 25 bp, Saccharomyces pastorianus
agtggctaggatactgggtcctcgc

SEQ ID NO: 11197 - DNA, 25 bp, Saccharomyces pastorianus
gtaagaccacgctatcgagcacaca

SEQ ID NO: 11198 - DNA, 25 bp, Saccharomyces pastorianus
gtacggcgcccatatctgggaatgt

SEQ ID NO: 11199 - DNA, 25 bp, Saccharomyces pastorianus
gttgctatggcgctaagatacttgc

SEQ ID NO: 11200 - DNA, 25 bp, Saccharomyces pastorianus
gtaggcagacctcaatctcaacaaa

SEQ ID NO: 11201 - DNA, 25 bp, Saccharomyces pastorianus
gggctctatgcccttcagacaaagg

SEQ ID NO: 11202 - DNA, 25 bp, Saccharomyces pastorianus
aaggcatttgccacaccagatatcg

SEQ ID NO: 11203 - DNA, 25 bp, Saccharomyces pastorianus
gagcagcatttaaagccgcggttga

SEQ ID NO: 11204 - DNA, 25 bp, Saccharomyces pastorianus
gtcacatttcccaagccattgagat

SEQ ID NO: 11205 - DNA, 25 bp, Saccharomyces pastorianus
gatcgagagctcttgcagaacatta

SEQ ID NO: 11206 - DNA, 25 bp, Saccharomyces pastorianus
gaaagttgccgtctttactaatgac

SEQ ID NO: 11207 - DNA, 25 bp, Saccharomyces pastorianus
tttcagacatactacacctctcaag

SEQ ID NO: 11208 - DNA, 25 bp, Saccharomyces pastorianus
tgaagtgcaagttcaaggcccacat

SEQ ID NO: 11209 - DNA, 25 bp, Saccharomyces pastorianus
gacccagaattgcttgctgctgact

SEQ ID NO: 11210 - DNA, 25 bp, Saccharomyces pastorianus
agagtactcccgatgtagcacgtat

SEQ ID NO: 11211 - DNA, 25 bp, Saccharomyces pastorianus
aatgaagggttctctgccacgcatc

SEQ ID NO: 11212 - DNA, 25 bp, Saccharomyces pastorianus
aaatctcggatcctttactggccaa

SEQ ID NO: 11213 - DNA, 25 bp, Saccharomyces pastorianus
cacgtatcatacctagagcccaaat

SEQ ID NO: 11214 - DNA, 25 bp, Saccharomyces pastorianus
agaaagatctgtagtgggtccacca

SEQ ID NO: 11215 - DNA, 25 bp, Saccharomyces pastorianus
gcccacatggccagttaattattga

SEQ ID NO: 11216 - DNA, 25 bp, Saccharomyces pastorianus
gcgatgatacgcttttgtctagaac

SEQ ID NO: 11217 - DNA, 25 bp, Saccharomyces pastorianus
gaaacgcttcaaatcgacccagaat

SEQ ID NO: 11218 - DNA, 25 bp, Saccharomyces pastorianus
tttgcgctattttcacataccttca

SEQ ID NO: 11219 - DNA, 25 bp, Saccharomyces pastorianus
tgagctatgctttcctgaggctata

SEQ ID NO: 11220 - DNA, 25 bp, Saccharomyces pastorianus
ggatgctttacgattatttgcgcta

SEQ ID NO: 11221 - DNA, 25 bp, Saccharomyces pastorianus
atcccaatcctggtttctcaaattt

SEQ ID NO: 11222 - DNA, 25 bp, Saccharomyces pastorianus
tatttccaattctacttcttcctat

SEQ ID NO: 11223 - DNA, 25 bp, Saccharomyces pastorianus
actttatatctctcagcagcactgc

SEQ ID NO: 11224 - DNA, 25 bp, Saccharomyces pastorianus
gctgtgcttcctagagcagttctga

SEQ ID NO: 11225 - DNA, 25 bp, Saccharomyces pastorianus
ggctaggtccaaacattgcagtatt

SEQ ID NO: 11226 - DNA, 25 bp, Saccharomyces pastorianus
taatcggtgcgttctgggagctgac

SEQ ID NO: 11227 - DNA, 25 bp, Saccharomyces pastorianus
taaagtgttccacgtgccgtactat

SEQ ID NO: 11228 - DNA, 25 bp, Saccharomyces pastorianus
gacgcatccgaaattaccaacttat

SEQ ID NO: 11229 - DNA, 25 bp, Saccharomyces pastorianus
aagtggctgagtttgattccccatc

SEQ ID NO: 11230 - DNA, 25 bp, Saccharomyces pastorianus
caccgctgcagtggatgtcgaaaca

SEQ ID NO: 11231 - DNA, 25 bp, Saccharomyces pastorianus
acaggtgcaggtaaatcgtcgttaa

SEQ ID NO: 11232 - DNA, 25 bp, Saccharomyces pastorianus
gtccattatacctcaagattcccaa

SEQ ID NO: 11233 - DNA, 25 bp, Saccharomyces pastorianus
attgactatcgcacacaggttgaac

SEQ ID NO: 11234 - DNA, 25 bp, Saccharomyces pastorianus
gtaacgatgggttagactctcaatt

SEQ ID NO: 11235 - DNA, 25 bp, Saccharomyces pastorianus
atcgtcgttaacattagcgctattc

SEQ ID NO: 11236 - DNA, 25 bp, Saccharomyces pastorianus
agacaattcgcacggcctttagaga

SEQ ID NO: 11237 - DNA, 25 bp, Saccharomyces pastorianus
acaattactgtgtcttgcgagagca

SEQ ID NO: 11238 - DNA, 25 bp, Saccharomyces pastorianus
gtgctagatgaagccaccgctgcag

SEQ ID NO: 11239 - DNA, 25 bp, Saccharomyces pastorianus
gagagcaatgctggttccatccaaa

SEQ ID NO: 11240 - DNA, 25 bp, Saccharomyces pastorianus
gaagaattttcttgctacgtccctg

SEQ ID NO: 11241 - DNA, 25 bp, Saccharomyces pastorianus
gcacccttcttcaaaaccacagatg

SEQ ID NO: 11242 - DNA, 25 bp, Saccharomyces pastorianus
taggcctaaaatttgcaacagttgc

SEQ ID NO: 11243 - DNA, 25 bp, Saccharomyces pastorianus
aaagtatccttgtcagcacccttct

SEQ ID NO: 11244 - DNA, 25 bp, Saccharomyces pastorianus
gtaataacatctccaaccttggaca

SEQ ID NO: 11245 - DNA, 25 bp, Saccharomyces pastorianus
gtaacttcgctgactatatccttgg

SEQ ID NO: 11246 - DNA, 25 bp, Saccharomyces pastorianus
agatcgcccacaagtcagattactg

SEQ ID NO: 11247 - DNA, 25 bp, Saccharomyces pastorianus
gggcagttcaaaacagatgtctttc

SEQ ID NO: 11248 - DNA, 25 bp, Saccharomyces pastorianus
aagggcgttctgtttcattcaaaag

SEQ ID NO: 11249 - DNA, 25 bp, Saccharomyces pastorianus
ggcatggaatgatgtttctctcgta

SEQ ID NO: 11250 - DNA, 25 bp, Saccharomyces pastorianus
aacaactctaacattttgcctcagt

SEQ ID NO: 11251 - DNA, 25 bp, Saccharomyces pastorianus
acagttttcccctcatgatcaaaat

SEQ ID NO: 11252 - DNA, 25 bp, Saccharomyces pastorianus
gaccttatgtaattgccacgggcgg

SEQ ID NO: 11253 - DNA, 25 bp, Saccharomyces pastorianus
aaattcccaacgcacatgggctagc

SEQ ID NO: 11254 - DNA, 25 bp, Saccharomyces pastorianus
gcactgacgtgcgatttcaataaat

SEQ ID NO: 11255 - DNA, 25 bp, Saccharomyces pastorianus
ttcgggaaattcatacgcaagctta

SEQ ID NO: 11256 - DNA, 25 bp, Saccharomyces pastorianus
agactaccgcctagcaaaagccaga

SEQ ID NO: 11257 - DNA, 25 bp, Saccharomyces pastorianus
acgcaagcttattcgacatcagact

SEQ ID NO: 11258 - DNA, 25 bp, Saccharomyces pastorianus
cagataccggaaaaggctgcctctt

SEQ ID NO: 11259 - DNA, 25 bp, Saccharomyces pastorianus
aagccagaccaactttttagtacat

SEQ ID NO: 11260 - DNA, 25 bp, Saccharomyces pastorianus
aaggctgcctctttaatttcacgca

SEQ ID NO: 11261 - DNA, 25 bp, Saccharomyces pastorianus
gtgtataccaggcacagttttcccc

SEQ ID NO: 11262 - DNA, 25 bp, Saccharomyces pastorianus
atccacttcaaactcttctacaaaa

SEQ ID NO: 11263 - DNA, 25 bp, Saccharomyces pastorianus
gtatccatagctctggttcaggcac

SEQ ID NO: 11264 - DNA, 25 bp, Saccharomyces pastorianus
tatttgcattttgggctttgctcct

SEQ ID NO: 11265 - DNA, 25 bp, Saccharomyces pastorianus
agaagactctgttccaagtgccgtc

SEQ ID NO: 11266 - DNA, 25 bp, Saccharomyces pastorianus
gatggattgtatcaccgacactgat

SEQ ID NO: 11267 - DNA, 25 bp, Saccharomyces pastorianus
cgtcaaagcacccagttactcaaat

SEQ ID NO: 11268 - DNA, 25 bp, Saccharomyces pastorianus
gatacagcctaaatactcccttctt

SEQ ID NO: 11269 - DNA, 25 bp, Saccharomyces pastorianus
atttccatggcccaagttgacttga

SEQ ID NO: 11270 - DNA, 25 bp, Saccharomyces pastorianus
ttcaaagtctggagtcggttcggct

SEQ ID NO: 11271 - DNA, 25 bp, Saccharomyces pastorianus
ttcaggcacctattctacagcaagt

SEQ ID NO: 11272 - DNA, 25 bp, Saccharomyces pastorianus
taacatctggctcgagtatccatag

SEQ ID NO: 11273 - DNA, 25 bp, Saccharomyces pastorianus
aatgcaacagcgtccatgatgagta

SEQ ID NO: 11274 - DNA, 25 bp, Saccharomyces pastorianus
tggaacatcagaatccctggctact

SEQ ID NO: 11275 - DNA, 25 bp, Saccharomyces pastorianus
gaagaattactcctggacctggcgg

SEQ ID NO: 11276 - DNA, 25 bp, Saccharomyces pastorianus
gggctctgctatgaatgccactgct

SEQ ID NO: 11277 - DNA, 25 bp, Saccharomyces pastorianus
gaacctgccatacctatatctgaaa

SEQ ID NO: 11278 - DNA, 25 bp, Saccharomyces pastorianus
gatccaacaggcctacgataacggg

SEQ ID NO: 11279 - DNA, 25 bp, Saccharomyces pastorianus
gacctggcggatgattttgttacaa

SEQ ID NO: 11280 - DNA, 25 bp, Saccharomyces pastorianus
atgccactgctttgaatacacctgt

SEQ ID NO: 11281 - DNA, 25 bp, Saccharomyces pastorianus
atccctggctactcagcagacgaaa

SEQ ID NO: 11282 - DNA, 25 bp, Saccharomyces pastorianus
actgcttttgcttgtagattggcca

SEQ ID NO: 11283 - DNA, 25 bp, Saccharomyces pastorianus
gaaaacatatccaccaaggcgccag

SEQ ID NO: 11284 - DNA, 25 bp, Saccharomyces pastorianus
gagaagctgttactttcctaaagac

SEQ ID NO: 11285 - DNA, 25 bp, Saccharomyces pastorianus
cggattcatgggtctattttctaaa

SEQ ID NO: 11286 - DNA, 25 bp, Saccharomyces pastorianus
agcccgtgacggtaagttgactctc

SEQ ID NO: 11287 - DNA, 25 bp, Saccharomyces pastorianus
aattcaccacaaactgccgttttgg

SEQ ID NO: 11288 - DNA, 25 bp, Saccharomyces pastorianus
agaacactgctgcttctttgaccac

SEQ ID NO: 11289 - DNA, 25 bp, Saccharomyces pastorianus
gttgactctcgaagacatgaccggt

SEQ ID NO: 11290 - DNA, 25 bp, Saccharomyces pastorianus
atatctgttgctgtggctactccaa

SEQ ID NO: 11291 - DNA, 25 bp, Saccharomyces pastorianus
atatccctgccgttaatggtgctat

SEQ ID NO: 11292 - DNA, 25 bp, Saccharomyces pastorianus
ttgtccgtttgagccataaagcccg

SEQ ID NO: 11293 - DNA, 25 bp, Saccharomyces pastorianus
gaaagacctgtcaccgtcaatggac

SEQ ID NO: 11294 - DNA, 25 bp, Saccharomyces pastorianus
aagcctgtactctagctgctaagga

SEQ ID NO: 11295 - DNA, 25 bp, Saccharomyces pastorianus
ggtagagatcaacccaacttataca

SEQ ID NO: 11296 - DNA, 25 bp, Saccharomyces pastorianus
gtgcggaagttgatgtgccctcctc

SEQ ID NO: 11297 - DNA, 25 bp, Saccharomyces pastorianus
aagcgctgttgtttcaagcacggcg

SEQ ID NO: 11298 - DNA, 25 bp, Saccharomyces pastorianus
caatggctcaagtaacggtgcggaa

SEQ ID NO: 11299 - DNA, 25 bp, Saccharomyces pastorianus
tgcatcttcattacctttaaccaca

SEQ ID NO: 11300 - DNA, 25 bp, Saccharomyces pastorianus
aacaccaccaatttgactaagccca

SEQ ID NO: 11301 - DNA, 25 bp, Saccharomyces pastorianus
ggaactgtgcgaatcatttaccatt

SEQ ID NO: 11302 - DNA, 25 bp, Saccharomyces pastorianus
caactgaactcaccgccaaatggat

SEQ ID NO: 11303 - DNA, 25 bp, Saccharomyces pastorianus
tactgtccgtatggtaagcgctgtt

SEQ ID NO: 11304 - DNA, 25 bp, Saccharomyces pastorianus
ggattaccatatgtactcccaattc

SEQ ID NO: 11305 - DNA, 25 bp, Saccharomyces pastorianus
gcaaagttgggctactgtccgtatg

SEQ ID NO: 11306 - DNA, 25 bp, Saccharomyces pastorianus
aacggacatgttgctgggcatgcaa

SEQ ID NO: 11307 - DNA, 25 bp, Saccharomyces pastorianus
acaagccaagttccacggtacgaag

SEQ ID NO: 11308 - DNA, 25 bp, Saccharomyces pastorianus
gaagaagttccaaaacctgcccgat

SEQ ID NO: 11309 - DNA, 25 bp, Saccharomyces pastorianus
agtcgccctcaatgaaggccaggaa

SEQ ID NO: 11310 - DNA, 25 bp, Saccharomyces pastorianus
ggcacaggcgacgatttcatagagg

SEQ ID NO: 11311 - DNA, 25 bp, Saccharomyces pastorianus
gaaccatgcactatctcattagaag

SEQ ID NO: 11312 - DNA, 25 bp, Saccharomyces pastorianus
tagaagcgcaggaagtcgccctcaa

SEQ ID NO: 11313 - DNA, 25 bp, Saccharomyces pastorianus
aagaagaacgaaggcccaccatggg

SEQ ID NO: 11314 - DNA, 25 bp, Saccharomyces pastorianus
gaatggaggtccaacttccgcaaag

SEQ ID NO: 11315 - DNA, 25 bp, Saccharomyces pastorianus
gtgttttgctcttatttcgtcgata

SEQ ID NO: 11316 - DNA, 25 bp, Saccharomyces pastorianus
ccaccatgggaagctgaccgggaaa

SEQ ID NO: 11317 - DNA, 25 bp, Saccharomyces pastorianus
acctgctagactgggacggtccaaa

SEQ ID NO: 11318 - DNA, 25 bp, Saccharomyces pastorianus
acgaattcggcgatttccagagcga

SEQ ID NO: 11319 - DNA, 25 bp, Saccharomyces pastorianus
agaaacgtcactgcctattgtcgaa

SEQ ID NO: 11320 - DNA, 25 bp, Saccharomyces pastorianus
ggacaaatcgatgacctgctagact

SEQ ID NO: 11321 - DNA, 25 bp, Saccharomyces pastorianus
gataacatacctgatctgatcgact

SEQ ID NO: 11322 - DNA, 25 bp, Saccharomyces pastorianus
aaacaagtcccgatacaacagcgcc

SEQ ID NO: 11323 - DNA, 25 bp, Saccharomyces pastorianus
agcgcccagaacaaccggaggacaa

SEQ ID NO: 11324 - DNA, 25 bp, Saccharomyces pastorianus
ttccgccaactacgatagcgtggac

SEQ ID NO: 11325 - DNA, 25 bp, Saccharomyces pastorianus
tcactaacttcaacgttcccgtgga

SEQ ID NO: 11326 - DNA, 25 bp, Saccharomyces pastorianus
tgattcgaccaccacaaacagcaat

SEQ ID NO: 11327 - DNA, 25 bp, Saccharomyces pastorianus
gatcgacttcgatgattcgaccacc

SEQ ID NO: 11328 - DNA, 25 bp, Saccharomyces pastorianus
gtcattccagacttcatgctacaag

SEQ ID NO: 11329 - DNA, 25 bp, Saccharomyces pastorianus
caaagaccgccgagaacttcagagc

SEQ ID NO: 11330 - DNA, 25 bp, Saccharomyces pastorianus
aagcacgtcgtcttcggtgaggtcg

SEQ ID NO: 11331 - DNA, 25 bp, Saccharomyces pastorianus
ggtaccggtggtaagtccatctacg

SEQ ID NO: 11332 - DNA, 25 bp, Saccharomyces pastorianus
acttcagagcgctatgtaccggtga

SEQ ID NO: 11333 - DNA, 25 bp, Saccharomyces pastorianus
attttgatgtcgaagctgatggcca

SEQ ID NO: 11334 - DNA, 25 bp, Saccharomyces pastorianus
atctacggtggcaagttcccagatg

SEQ ID NO: 11335 - DNA, 25 bp, Saccharomyces pastorianus
tacaaggtggtgacttcaccgccgg

SEQ ID NO: 11336 - DNA, 25 bp, Saccharomyces pastorianus
tggccgtgtcgttttcaagttgtac

SEQ ID NO: 11337 - DNA, 25 bp, Saccharomyces pastorianus
gtgaggtcgtcgacggttacgacat

SEQ ID NO: 11338 - DNA, 25 bp, Saccharomyces pastorianus
gttgtacaacgacgtagtcccaaag

SEQ ID NO: 11339 - DNA, 25 bp, Saccharomyces pastorianus
agacccattgttggacttcaagatg

SEQ ID NO: 11340 - DNA, 25 bp, Saccharomyces pastorianus
tcaagatggttgttctgtcccacaa

SEQ ID NO: 11341 - DNA, 25 bp, Saccharomyces pastorianus
attttggccccattgtccgaagaca

SEQ ID NO: 11342 - DNA, 25 bp, Saccharomyces pastorianus
gccgacagaccacaaccaagattag

SEQ ID NO: 11343 - DNA, 25 bp, Saccharomyces pastorianus
gcaaaccatccacgttttggaccaa

SEQ ID NO: 11344 - DNA, 25 bp, Saccharomyces pastorianus
atatcatcccatacatcggtggtga

SEQ ID NO: 11345 - DNA, 25 bp, Saccharomyces pastorianus
gatgcttacaagttgggctgccatt

SEQ ID NO: 11346 - DNA, 25 bp, Saccharomyces pastorianus
gagaagttcggtcctatcgacgcct

SEQ ID NO: 11347 - DNA, 25 bp, Saccharomyces pastorianus
ggtgttccaggtatcgacatcttag

SEQ ID NO: 11348 - DNA, 25 bp, Saccharomyces pastorianus
agagtggctgtgtctgacggtcaca

SEQ ID NO: 11349 - DNA, 25 bp, Saccharomyces pastorianus
ccccttgaagcctttgatcgagaag

SEQ ID NO: 11350 - DNA, 25 bp, Saccharomyces pastorianus
cggacgctacggcaacaacagatat

SEQ ID NO: 11351 - DNA, 25 bp, Saccharomyces pastorianus
aataaacacttcagctcctgcgtcg

SEQ ID NO: 11352 - DNA, 25 bp, Saccharomyces pastorianus
gtactaccagttagcacaccaagtc

SEQ ID NO: 11353 - DNA, 25 bp, Saccharomyces pastorianus
aaagaggtcattggccggaattcac

SEQ ID NO: 11354 - DNA, 25 bp, Saccharomyces pastorianus
gaatctcatatatctgcatcgccta

SEQ ID NO: 11355 - DNA, 25 bp, Saccharomyces pastorianus
tcctgcgtcggagggctgtgataaa

SEQ ID NO: 11356 - DNA, 25 bp, Saccharomyces pastorianus
ctgtcgtcgtcacactcaagtgaat

SEQ ID NO: 11357 - DNA, 25 bp, Saccharomyces pastorianus
gactaaatacgtctggcacctcaac

SEQ ID NO: 11358 - DNA, 25 bp, Saccharomyces pastorianus
aagaaagctgccaatactcctgtcg

SEQ ID NO: 11359 - DNA, 25 bp, Saccharomyces pastorianus
aacacctttggcttctagactaaat

SEQ ID NO: 11360 - DNA, 25 bp, Saccharomyces pastorianus
atttaccagctgcaagttcggacgc

SEQ ID NO: 11361 - DNA, 25 bp, Saccharomyces pastorianus
ggtctggaccgaacacagtcaatat

SEQ ID NO: 11362 - DNA, 25 bp, Saccharomyces pastorianus
gaaaggcaccatccgtttttgaaat

SEQ ID NO: 11363 - DNA, 25 bp, Saccharomyces pastorianus
ttatacgccatgtccgtgcaacgaa

SEQ ID NO: 11364 - DNA, 25 bp, Saccharomyces pastorianus
tcatacaccgtttttggagcaccaa

SEQ ID NO: 11365 - DNA, 25 bp, Saccharomyces pastorianus
gtatctgtgatattctcttccttat

SEQ ID NO: 11366 - DNA, 25 bp, Saccharomyces pastorianus
attgcagtcgatcaaaccgtcattg

SEQ ID NO: 11367 - DNA, 25 bp, Saccharomyces pastorianus
tatcttcggtcattgcctatattgc

SEQ ID NO: 11368 - DNA, 25 bp, Saccharomyces pastorianus
tggctgttcattattcgttattttc

SEQ ID NO: 11369 - DNA, 25 bp, Saccharomyces pastorianus
ttcatcgtacccgtataaatctccg

SEQ ID NO: 11370 - DNA, 25 bp, Saccharomyces pastorianus
gggatatcctaatttcatacaccgt

SEQ ID NO: 11371 - DNA, 25 bp, Saccharomyces pastorianus
tataccgtcgttatttagttcttca

SEQ ID NO: 11372 - DNA, 25 bp, Saccharomyces pastorianus
gtgggcgcatatgaggtcgccttaa

SEQ ID NO: 11373 - DNA, 25 bp, Saccharomyces pastorianus
gttgcttcaagagatcggaggacct

SEQ ID NO: 11374 - DNA, 25 bp, Saccharomyces pastorianus
atctttggccaagatgtgcctcgaa

SEQ ID NO: 11375 - DNA, 25 bp, Saccharomyces pastorianus
gcaggcttggaagttctttgaccta

SEQ ID NO: 11376 - DNA, 25 bp, Saccharomyces pastorianus
gtcgccttaaaggttattacggcag

SEQ ID NO: 11377 - DNA, 25 bp, Saccharomyces pastorianus
tgggtggtgcaaacgcgttgcttca

SEQ ID NO: 11378 - DNA, 25 bp, Saccharomyces pastorianus
gcgtatgaagcattctcgcaggctt

SEQ ID NO: 11379 - DNA, 25 bp, Saccharomyces pastorianus
aatagcgtagcccagactattggct

SEQ ID NO: 11380 - DNA, 25 bp, Saccharomyces pastorianus
atcggaggacctgtggattcaaaag

SEQ ID NO: 11381 - DNA, 25 bp, Saccharomyces pastorianus
ctattggcttgcagtcagagtttat

SEQ ID NO: 11382 - DNA, 25 bp, Saccharomyces pastorianus
gtctatgattctcgtttagcattga

SEQ ID NO: 11383 - DNA, 25 bp, Saccharomyces pastorianus
gggccgctacgataggttatatatc

SEQ ID NO: 11384 - DNA, 25 bp, Saccharomyces pastorianus
agcgctacccgacgactacatagtt

SEQ ID NO: 11385 - DNA, 25 bp, Saccharomyces pastorianus
ggtgatctggtattcatcagctata

SEQ ID NO: 11386 - DNA, 25 bp, Saccharomyces pastorianus
aaaagaggacactgctcgacctttc

SEQ ID NO: 11387 - DNA, 25 bp, Saccharomyces pastorianus
taccggaggagttcgttacctatat

SEQ ID NO: 11388 - DNA, 25 bp, Saccharomyces pastorianus
aggcaaagtatagcgctacccgacg

SEQ ID NO: 11389 - DNA, 25 bp, Saccharomyces pastorianus
gaggattcaaatccgctccattatg

SEQ ID NO: 11390 - DNA, 25 bp, Saccharomyces pastorianus
tcgacctttctatctaacgcatttg

SEQ ID NO: 11391 - DNA, 25 bp, Saccharomyces pastorianus
agagcgattcagcagtggtacaaaa

SEQ ID NO: 11392 - DNA, 25 bp, Saccharomyces pastorianus
cgttacctatatacagccggaagat

SEQ ID NO: 11393 - DNA, 25 bp, Saccharomyces pastorianus
gatgaaatggcttctgattcttcag

SEQ ID NO: 11394 - DNA, 25 bp, Saccharomyces pastorianus
atcttggaggcaaagcacggcgttt

SEQ ID NO: 11395 - DNA, 25 bp, Saccharomyces pastorianus
ttactaccaggacacacgaaattga

SEQ ID NO: 11396 - DNA, 25 bp, Saccharomyces pastorianus
gacgatggtgcaaaaaatccactat

SEQ ID NO: 11397 - DNA, 25 bp, Saccharomyces pastorianus
gccgcatatactccaacaagcattg

SEQ ID NO: 11398 - DNA, 25 bp, Saccharomyces pastorianus
ggacaagaaaatacggcttcagcaa

SEQ ID NO: 11399 - DNA, 25 bp, Saccharomyces pastorianus
gaagtggtgcaaaagctgccgcata

SEQ ID NO: 11400 - DNA, 25 bp, Saccharomyces pastorianus
ttgaacacgcaagattactaccagg

SEQ ID NO: 11401 - DNA, 25 bp, Saccharomyces pastorianus
gaagaacagccgtccaaacgatctt

SEQ ID NO: 11402 - DNA, 25 bp, Saccharomyces pastorianus
acggcgtttggacgtcataaaatca

SEQ ID NO: 11403 - DNA, 25 bp, Saccharomyces pastorianus
ggcagtgtagacgagaggcaaatta

SEQ ID NO: 11404 - DNA, 25 bp, Saccharomyces pastorianus
tccactatctggatacgttaatgat

SEQ ID NO: 11405 - DNA, 25 bp, Saccharomyces pastorianus
aacccgtctcccatattcatttgag

SEQ ID NO: 11406 - DNA, 25 bp, Saccharomyces pastorianus
gagtgagcaatatttcccctattta

SEQ ID NO: 11407 - DNA, 25 bp, Saccharomyces pastorianus
gatggacccaaaccaggcagttcta

SEQ ID NO: 11408 - DNA, 25 bp, Saccharomyces pastorianus
gtagcaggctctccaaaccaagagt

SEQ ID NO: 11409 - DNA, 25 bp, Saccharomyces pastorianus
ggaatccacgccataaagcagcttg

SEQ ID NO: 11410 - DNA, 25 bp, Saccharomyces pastorianus
agttaatacttctgccaattcctcc

SEQ ID NO: 11411 - DNA, 25 bp, Saccharomyces pastorianus
aaacatcttgtccaaggtcgtcgcg

SEQ ID NO: 11412 - DNA, 25 bp, Saccharomyces pastorianus
agcagcatacggtcaatcaaacttg

SEQ ID NO: 11413 - DNA, 25 bp, Saccharomyces pastorianus
gtcgtcgcgaatccgttattattga

SEQ ID NO: 11414 - DNA, 25 bp, Saccharomyces pastorianus
gcagttctagtccagctgtagcagg

SEQ ID NO: 11415 - DNA, 25 bp, Saccharomyces pastorianus
ggataaaccgattgagctcttgaat

SEQ ID NO: 11416 - DNA, 25 bp, Saccharomyces pastorianus
gattacagcgacttgattaagcctt

SEQ ID NO: 11417 - DNA, 25 bp, Saccharomyces pastorianus
agtcgcctcaagttcaaagcagttt

SEQ ID NO: 11418 - DNA, 25 bp, Saccharomyces pastorianus
aaagaatatctgttgctgagcgctg

SEQ ID NO: 11419 - DNA, 25 bp, Saccharomyces pastorianus
atatcattgagtttgccgttagtaa

SEQ ID NO: 11420 - DNA, 25 bp, Saccharomyces pastorianus
atttgtccacttttgattacagcga

SEQ ID NO: 11421 - DNA, 25 bp, Saccharomyces pastorianus
gagcgctggcggtgataatgaaata

SEQ ID NO: 11422 - DNA, 25 bp, Saccharomyces pastorianus
agcagtttcgccaaattcattcagt

SEQ ID NO: 11423 - DNA, 25 bp, Saccharomyces pastorianus
aatgtcatttcattgtccgcacaaa

SEQ ID NO: 11424 - DNA, 25 bp, Saccharomyces pastorianus
aacatttggcaccatcgagattcca

SEQ ID NO: 11425 - DNA, 25 bp, Saccharomyces pastorianus
gttcggccataagcatttcgtttct

SEQ ID NO: 11426 - DNA, 25 bp, Saccharomyces pastorianus
gtttgttgcgtttttcgtcgaagct

SEQ ID NO: 11427 - DNA, 25 bp, Saccharomyces pastorianus
gagatgatggacgatacgcctccca

SEQ ID NO: 11428 - DNA, 25 bp, Saccharomyces pastorianus
gacatagccaaggacgcgtacgaat

SEQ ID NO: 11429 - DNA, 25 bp, Saccharomyces pastorianus
aggatcaggtcctcggttgccgtat

SEQ ID NO: 11430 - DNA, 25 bp, Saccharomyces pastorianus
agacttttagcattggctacccaga

SEQ ID NO: 11431 - DNA, 25 bp, Saccharomyces pastorianus
gggccattagagacgccttttccag

SEQ ID NO: 11432 - DNA, 25 bp, Saccharomyces pastorianus
cataacgccggtgaagatacatctt

SEQ ID NO: 11433 - DNA, 25 bp, Saccharomyces pastorianus
atgatctaagtagcgctgttgcaga

SEQ ID NO: 11434 - DNA, 25 bp, Saccharomyces pastorianus
agcagccgggagtacaacagatttc

SEQ ID NO: 11435 - DNA, 25 bp, Saccharomyces pastorianus
gaatacgatgccgaatttgacgaca

SEQ ID NO: 11436 - DNA, 25 bp, Saccharomyces pastorianus
gcaagcaccgctgacaatgagaaag

SEQ ID NO: 11437 - DNA, 25 bp, Saccharomyces pastorianus
gagctagacaattactgcaagggca

SEQ ID NO: 11438 - DNA, 25 bp, Saccharomyces pastorianus
gaaaattccattcttaaatccaata

SEQ ID NO: 11439 - DNA, 25 bp, Saccharomyces pastorianus
gaatcttttctaaaatcggttcaag

SEQ ID NO: 11440 - DNA, 25 bp, Saccharomyces pastorianus
aatcattggatgactctactgagtt

SEQ ID NO: 11441 - DNA, 25 bp, Saccharomyces pastorianus
cagggacacgaagatgccactgtag

SEQ ID NO: 11442 - DNA, 25 bp, Saccharomyces pastorianus
gatttcaattccaaggatgcacaag

SEQ ID NO: 11443 - DNA, 25 bp, Saccharomyces pastorianus
ggtgtttaacgatattgaccttatt

SEQ ID NO: 11444 - DNA, 25 bp, Saccharomyces pastorianus
gtgaacttgccagatttcaattcca

SEQ ID NO: 11445 - DNA, 25 bp, Saccharomyces pastorianus
gaaatgcagcaagccataatgacca

SEQ ID NO: 11446 - DNA, 25 bp, Saccharomyces pastorianus
atttctgcacgttcagaaacgttca

SEQ ID NO: 11447 - DNA, 25 bp, Saccharomyces pastorianus
accttattaccggaggaaatgcagc

SEQ ID NO: 11448 - DNA, 25 bp, Saccharomyces pastorianus
gatgccactgtagagaagctgacca

SEQ ID NO: 11449 - DNA, 25 bp, Saccharomyces pastorianus
ccgccagttcaacttcaactactat

SEQ ID NO: 11450 - DNA, 25 bp, Saccharomyces pastorianus
gcgactagtgaaccaacttcgagaa

SEQ ID NO: 11451 - DNA, 25 bp, Saccharomyces pastorianus
tcacgacaaaccctacctcaaaagt

SEQ ID NO: 11452 - DNA, 25 bp, Saccharomyces pastorianus
attggcgctgcctctttaaggaata

SEQ ID NO: 11453 - DNA, 25 bp, Saccharomyces pastorianus
attagatcaactcttttccccaata

SEQ ID NO: 11454 - DNA, 25 bp, Saccharomyces pastorianus
aaatgacattgccacacctgaacgg

SEQ ID NO: 11455 - DNA, 25 bp, Saccharomyces pastorianus
tagagaaaccggatcgcccttacaa

SEQ ID NO: 11456 - DNA, 25 bp, Saccharomyces pastorianus
ttcccgtttgtctgtctcgaaagag

SEQ ID NO: 11457 - DNA, 25 bp, Saccharomyces pastorianus
gattgggaatcgattggcgctgcct

SEQ ID NO: 11458 - DNA, 25 bp, Saccharomyces pastorianus
tggcgtggttagtccaaaacctaca

SEQ ID NO: 11459 - DNA, 25 bp, Saccharomyces pastorianus
aagttacatcagcttctacttctcc

SEQ ID NO: 11460 - DNA, 25 bp, Saccharomyces pastorianus
cattgtcgtcaaatgcgttctgcaa

SEQ ID NO: 11461 - DNA, 25 bp, Saccharomyces pastorianus
gaaggctgatctaatagtccgttta

SEQ ID NO: 11462 - DNA, 25 bp, Saccharomyces pastorianus
taaggagtccatcagaattaccaga

SEQ ID NO: 11463 - DNA, 25 bp, Saccharomyces pastorianus
gctcgcgtggttgataagatcccta

SEQ ID NO: 11464 - DNA, 25 bp, Saccharomyces pastorianus
gacaagccgtcaagcagttcctaag

SEQ ID NO: 11465 - DNA, 25 bp, Saccharomyces pastorianus
ttgtattgtccagctatgtacgcct

SEQ ID NO: 11466 - DNA, 25 bp, Saccharomyces pastorianus
aacgcttggcgttcagtgattgttg

SEQ ID NO: 11467 - DNA, 25 bp, Saccharomyces pastorianus
gagggttacgtttccttagatgata

SEQ ID NO: 11468 - DNA, 25 bp, Saccharomyces pastorianus
gattttgcgcattgcataccttata

SEQ ID NO: 11469 - DNA, 25 bp, Saccharomyces pastorianus
tatgtacgccttggtgattcagata

SEQ ID NO: 11470 - DNA, 25 bp, Saccharomyces pastorianus
tgttctccttgacatcatgttccag

SEQ ID NO: 11471 - DNA, 25 bp, Saccharomyces pastorianus
tccagttcctgaccctttacaagtt

SEQ ID NO: 11472 - DNA, 25 bp, Saccharomyces pastorianus
gaaacaataacaatcctcctctaga

SEQ ID NO: 11473 - DNA, 25 bp, Saccharomyces pastorianus
taagaaacgctcatctttcgctcac

SEQ ID NO: 11474 - DNA, 25 bp, Saccharomyces pastorianus
tccctgtcttgcctcgtatcaaaga

SEQ ID NO: 11475 - DNA, 25 bp, Saccharomyces pastorianus
aatggacttgccattttcacccgag

SEQ ID NO: 11476 - DNA, 25 bp, Saccharomyces pastorianus
tagagaaaccggaagcgtcctcaaa

SEQ ID NO: 11477 - DNA, 25 bp, Saccharomyces pastorianus
gccaactctaaagcgttccacatag

SEQ ID NO: 11478 - DNA, 25 bp, Saccharomyces pastorianus
gtctactacagatcaaggtccccaa

SEQ ID NO: 11479 - DNA, 25 bp, Saccharomyces pastorianus
caaggtccccaaaatcgtcaacgat

SEQ ID NO: 11480 - DNA, 25 bp, Saccharomyces pastorianus
tcacccgaggtgaacatctacgata

SEQ ID NO: 11481 - DNA, 25 bp, Saccharomyces pastorianus
gaaagaaccgtcaagttccctgtct

SEQ ID NO: 11482 - DNA, 25 bp, Saccharomyces pastorianus
tgaaccacgttgaccgtcgtatcaa

SEQ ID NO: 11483 - DNA, 25 bp, Saccharomyces pastorianus
aagctccagtttgcgtcgagactta

SEQ ID NO: 11484 - DNA, 25 bp, Saccharomyces pastorianus
gaagacgacatttcaccagggtttg

SEQ ID NO: 11485 - DNA, 25 bp, Saccharomyces pastorianus
tcgtatcaacgctccattcatgtta

SEQ ID NO: 11486 - DNA, 25 bp, Saccharomyces pastorianus
aattaaagtccattatagccgccgg

SEQ ID NO: 11487 - DNA, 25 bp, Saccharomyces pastorianus
ttcatgttacccattgctgctaaaa

SEQ ID NO: 11488 - DNA, 25 bp, Saccharomyces pastorianus
gggccaatccactttattgatgcct

SEQ ID NO: 11489 - DNA, 25 bp, Saccharomyces pastorianus
gttatgcatgttcacacagccattg

SEQ ID NO: 11490 - DNA, 25 bp, Saccharomyces pastorianus
cagggtttgtgttgacatccccaaa

SEQ ID NO: 11491 - DNA, 25 bp, Saccharomyces pastorianus
gaagaagccacctgcttttgctaag

SEQ ID NO: 11492 - DNA, 25 bp, Saccharomyces pastorianus
atagccgccggattttcatgtgtta

SEQ ID NO: 11493 - DNA, 25 bp, Saccharomyces pastorianus
agaaacgacttcaggctctttgtgt

SEQ ID NO: 11494 - DNA, 25 bp, Saccharomyces pastorianus
gagcagaaactgattacgtctttat

SEQ ID NO: 11495 - DNA, 25 bp, Saccharomyces pastorianus
atccacttgtctgagttcgatgtca

SEQ ID NO: 11496 - DNA, 25 bp, Saccharomyces pastorianus
atgccattgccctgtatttcgacaa

SEQ ID NO: 11497 - DNA, 25 bp, Saccharomyces pastorianus
aatcctcacctgtcggataccagga

SEQ ID NO: 11498 - DNA, 25 bp, Saccharomyces pastorianus
tacagaagaacccttcggtactggc

SEQ ID NO: 11499 - DNA, 25 bp, Saccharomyces pastorianus
gcacatgcagaagtaaccccgggaa

SEQ ID NO: 11500 - DNA, 25 bp, Saccharomyces pastorianus
gggatttgttgcatgataccgatca

SEQ ID NO: 11501 - DNA, 25 bp, Saccharomyces pastorianus
ataccgatcagctaatgcgggatga

SEQ ID NO: 11502 - DNA, 25 bp, Saccharomyces pastorianus
ggtactggcccagttatcgcctgaa

SEQ ID NO: 11503 - DNA, 25 bp, Saccharomyces pastorianus
tatggacgctcgaggactgaccaca

SEQ ID NO: 11504 - DNA, 25 bp, Saccharomyces pastorianus
tccaccagcttctctcgaaaacggt

SEQ ID NO: 11505 - DNA, 25 bp, Saccharomyces pastorianus
taaggacaccgtgatagcacctcca

SEQ ID NO: 11506 - DNA, 25 bp, Saccharomyces pastorianus
ctttatcctccactgaaatcacaca

SEQ ID NO: 11507 - DNA, 25 bp, Saccharomyces pastorianus
gtgatagcacctccagtcaaggctg

SEQ ID NO: 11508 - DNA, 25 bp, Saccharomyces pastorianus
ttattctgcctacgtgcgtcaagaa

SEQ ID NO: 11509 - DNA, 25 bp, Saccharomyces pastorianus
aagaaaaacggcactcttccaccag

SEQ ID NO: 11510 - DNA, 25 bp, Saccharomyces pastorianus
aacgttaacttctggtgtgaaccat

SEQ ID NO: 11511 - DNA, 25 bp, Saccharomyces pastorianus
agttctgaactggtcaaccctgcgg

SEQ ID NO: 11512 - DNA, 25 bp, Saccharomyces pastorianus
attgaccgttttcttcgcttattct

SEQ ID NO: 11513 - DNA, 25 bp, Saccharomyces pastorianus
cgctccaaagaagccattgaccgtt

SEQ ID NO: 11514 - DNA, 25 bp, Saccharomyces pastorianus
ccatttgcatggtatcagttctgaa

SEQ ID NO: 11515 - DNA, 25 bp, Saccharomyces pastorianus
gtcctttaacaagactgctgcatta

SEQ ID NO: 11516 - DNA, 25 bp, Saccharomyces pastorianus
gaagtctgcgttaatttcgcttcag

SEQ ID NO: 11517 - DNA, 25 bp, Saccharomyces pastorianus
aggtgtcaagtctttggaccccaat

SEQ ID NO: 11518 - DNA, 25 bp, Saccharomyces pastorianus
gaggtccctatggagtatccgttca

SEQ ID NO: 11519 - DNA, 25 bp, Saccharomyces pastorianus
tcaggcgctattgcaatctccagaa

SEQ ID NO: 11520 - DNA, 25 bp, Saccharomyces pastorianus
ggtccacccggaacgccttatgagg

SEQ ID NO: 11521 - DNA, 25 bp, Saccharomyces pastorianus
gattatacgccagcgaaggcgccaa

SEQ ID NO: 11522 - DNA, 25 bp, Saccharomyces pastorianus
acaagctgtcaaggatgaccccgca

SEQ ID NO: 11523 - DNA, 25 bp, Saccharomyces pastorianus
acaggtgccatttgcttggatattt

SEQ ID NO: 11524 - DNA, 25 bp, Saccharomyces pastorianus
ggtagcacagcattatctacgggat

SEQ ID NO: 11525 - DNA, 25 bp, Saccharomyces pastorianus
ttcgttgtggacattgaggtcccta

SEQ ID NO: 11526 - DNA, 25 bp, Saccharomyces pastorianus
atcgaacagcactcgtcaaacggta

SEQ ID NO: 11527 - DNA, 25 bp, Saccharomyces pastorianus
aattcgatttggtatccttactcaa

SEQ ID NO: 11528 - DNA, 25 bp, Saccharomyces pastorianus
aaataagcagcttccatccaagaag

SEQ ID NO: 11529 - DNA, 25 bp, Saccharomyces pastorianus
agtctattttcgtgctttgtaccaa

SEQ ID NO: 11530 - DNA, 25 bp, Saccharomyces pastorianus
acattactctattgatacgggtggt

SEQ ID NO: 11531 - DNA, 25 bp, Saccharomyces pastorianus
ggaatgacgttcttctactagatat

SEQ ID NO: 11532 - DNA, 25 bp, Saccharomyces pastorianus
gacttaggtactcatttgttacact

SEQ ID NO: 11533 - DNA, 25 bp, Saccharomyces pastorianus
ggaaactggtgacttttctgcacag

SEQ ID NO: 11534 - DNA, 25 bp, Saccharomyces pastorianus
tggatgatgctccatcttccagcaa

SEQ ID NO: 11535 - DNA, 25 bp, Saccharomyces pastorianus
tcacatacagtacccaattcgattt

SEQ ID NO: 11536 - DNA, 25 bp, Saccharomyces pastorianus
gaactatacagtcttacctcgatga

SEQ ID NO: 11537 - DNA, 25 bp, Saccharomyces pastorianus
gttctcacagtggtaattccgcttt

SEQ ID NO: 11538 - DNA, 25 bp, Saccharomyces pastorianus
tcctcggcacattcaaaatactctg

SEQ ID NO: 11539 - DNA, 25 bp, Saccharomyces pastorianus
ggatagatcacttacgcgttctcac

SEQ ID NO: 11540 - DNA, 25 bp, Saccharomyces pastorianus
attgccacatatcgcattcatatcc

SEQ ID NO: 11541 - DNA, 25 bp, Saccharomyces pastorianus
ggagatgatcatgactattgccaca

SEQ ID NO: 11542 - DNA, 25 bp, Saccharomyces pastorianus
cagaactcttattttccggagatga

SEQ ID NO: 11543 - DNA, 25 bp, Saccharomyces pastorianus
tgccagatccgtacaaatccatcag

SEQ ID NO: 11544 - DNA, 25 bp, Saccharomyces pastorianus
attacctgcaagtgtttccaaatct

SEQ ID NO: 11545 - DNA, 25 bp, Saccharomyces pastorianus
tttacatgcatttcctcccaaaatc

SEQ ID NO: 11546 - DNA, 25 bp, Saccharomyces pastorianus
cagctatccaactactttccttata

SEQ ID NO: 11547 - DNA, 25 bp, Saccharomyces pastorianus
gaaacgcgttctaccaaacagttct

SEQ ID NO: 11548 - DNA, 25 bp, Saccharomyces pastorianus
gtcatcgcagttgacgtgcttcgca

SEQ ID NO: 11549 - DNA, 25 bp, Saccharomyces pastorianus
acagggcaatgtactcctaacggaa

SEQ ID NO: 11550 - DNA, 25 bp, Saccharomyces pastorianus
ggtcgggttcgatagcattttggaa

SEQ ID NO: 11551 - DNA, 25 bp, Saccharomyces pastorianus
gaagtgtccaccattgaccgacgaa

SEQ ID NO: 11552 - DNA, 25 bp, Saccharomyces pastorianus
gaagttgcaatatgacgtttccgca

SEQ ID NO: 11553 - DNA, 25 bp, Saccharomyces pastorianus
gcaaaattcatatccggcatcccga

SEQ ID NO: 11554 - DNA, 25 bp, Saccharomyces pastorianus
gggaacaccaacctagcatacgtaa

SEQ ID NO: 11555 - DNA, 25 bp, Saccharomyces pastorianus
gacgtgcttcgcagagaacttcaag

SEQ ID NO: 11556 - DNA, 25 bp, Saccharomyces pastorianus
taacggaacgacttataaccatcag

SEQ ID NO: 11557 - DNA, 25 bp, Saccharomyces pastorianus
catcccgacccagatttttagcagg

SEQ ID NO: 11558 - DNA, 25 bp, Saccharomyces pastorianus
gaaacagtaacttatgcgccacatc

SEQ ID NO: 11559 - DNA, 25 bp, Saccharomyces pastorianus
agcacaatcataccgagccatacag

SEQ ID NO: 11560 - DNA, 25 bp, Saccharomyces pastorianus
caccgacgctttgatgggcggcaaa

SEQ ID NO: 11561 - DNA, 25 bp, Saccharomyces pastorianus
ggcttagcgctaaacttcaaatcta

SEQ ID NO: 11562 - DNA, 25 bp, Saccharomyces pastorianus
ccattacattggacttatacggtga

SEQ ID NO: 11563 - DNA, 25 bp, Saccharomyces pastorianus
acaccagccatggactattgaatct

SEQ ID NO: 11564 - DNA, 25 bp, Saccharomyces pastorianus
ttcaaatctagaacgcccaccgacg

SEQ ID NO: 11565 - DNA, 25 bp, Saccharomyces pastorianus
agaacttcttgaattcaccagtccc

SEQ ID NO: 11566 - DNA, 25 bp, Saccharomyces pastorianus
gacgatgattcgacaagcagcacaa

SEQ ID NO: 11567 - DNA, 25 bp, Saccharomyces pastorianus
caaatcatgtctgggtgcgcgaata

SEQ ID NO: 11568 - DNA, 25 bp, Saccharomyces pastorianus
gacaaccgtcaatcaatcttttcag

SEQ ID NO: 11569 - DNA, 25 bp, Saccharomyces pastorianus
atccccgctgttactcagaagcgat

SEQ ID NO: 11570 - DNA, 25 bp, Saccharomyces pastorianus
ataatggaccctttgaatagttctc

SEQ ID NO: 11571 - DNA, 25 bp, Saccharomyces pastorianus
ttggagaccaccgatagttatcttt

SEQ ID NO: 11572 - DNA, 25 bp, Saccharomyces pastorianus
taacatcatctaccggactaccaaa

SEQ ID NO: 11573 - DNA, 25 bp, Saccharomyces pastorianus
atctcgggtatcaggaaattgctac

SEQ ID NO: 11574 - DNA, 25 bp, Saccharomyces pastorianus
gaagatgggtccgattctaatttta

SEQ ID NO: 11575 - DNA, 25 bp, Saccharomyces pastorianus
gtagcacagccattactacaccagc

SEQ ID NO: 11576 - DNA, 25 bp, Saccharomyces pastorianus
actacaccagccgaatttttgaatg

SEQ ID NO: 11577 - DNA, 25 bp, Saccharomyces pastorianus
tgtgggaagtttgatctcgggtatc

SEQ ID NO: 11578 - DNA, 25 bp, Saccharomyces pastorianus
aaccttcaagaatgggctcactctc

SEQ ID NO: 11579 - DNA, 25 bp, Saccharomyces pastorianus
tgggctcactctcaattgcataatc

SEQ ID NO: 11580 - DNA, 25 bp, Saccharomyces pastorianus
tagttatctttacattgacccaaaa

SEQ ID NO: 11581 - DNA, 25 bp, Saccharomyces pastorianus
gacgtgatatcaccacacggtgttc

SEQ ID NO: 11582 - DNA, 25 bp, Saccharomyces pastorianus
gacaggttattgattgttcgcactt

SEQ ID NO: 11583 - DNA, 25 bp, Saccharomyces pastorianus
caatatcgccccagtcgttgtattg

SEQ ID NO: 11584 - DNA, 25 bp, Saccharomyces pastorianus
gaaaatggcgctttggaccttctag

SEQ ID NO: 11585 - DNA, 25 bp, Saccharomyces pastorianus
ggaccttctagctacaatgggctca

SEQ ID NO: 11586 - DNA, 25 bp, Saccharomyces pastorianus
agagccgctgtggaaagtttgcaaa

SEQ ID NO: 11587 - DNA, 25 bp, Saccharomyces pastorianus
atagaggtatgaccacagtccgtgg

SEQ ID NO: 11588 - DNA, 25 bp, Saccharomyces pastorianus
cggtgttccacctgatttgattgac

SEQ ID NO: 11589 - DNA, 25 bp, Saccharomyces pastorianus
aattccaggtgtcctattcatcgat

SEQ ID NO: 11590 - DNA, 25 bp, Saccharomyces pastorianus
gttcgcactttaccttacgacaaag

SEQ ID NO: 11591 - DNA, 25 bp, Saccharomyces pastorianus
gatgggccaattactcaagcctaag

SEQ ID NO: 11592 - DNA, 25 bp, Saccharomyces pastorianus
aacagatgctaattcggcgtctcaa

SEQ ID NO: 11593 - DNA, 25 bp, Saccharomyces pastorianus
catttggtcaaacagcctcagatcc

SEQ ID NO: 11594 - DNA, 25 bp, Saccharomyces pastorianus
ataagtcaccttttggtatggctgc

SEQ ID NO: 11595 - DNA, 25 bp, Saccharomyces pastorianus
gaaatctacagaacgcgctaccagt

SEQ ID NO: 11596 - DNA, 25 bp, Saccharomyces pastorianus
gctcaatctcccttcggtaataaag

SEQ ID NO: 11597 - DNA, 25 bp, Saccharomyces pastorianus
ggcaatagcagtccattcgcagcaa

SEQ ID NO: 11598 - DNA, 25 bp, Saccharomyces pastorianus
gcagctccatttggctcatttggta

SEQ ID NO: 11599 - DNA, 25 bp, Saccharomyces pastorianus
tagagttaagcgaccttgccgagga

SEQ ID NO: 11600 - DNA, 25 bp, Saccharomyces pastorianus
ggtacctttggctcagtatctaact

SEQ ID NO: 11601 - DNA, 25 bp, Saccharomyces pastorianus
gtacaacttcgtttggacagcaacc

SEQ ID NO: 11602 - DNA, 25 bp, Saccharomyces pastorianus
gatttgttcaaggtttaccctctga

SEQ ID NO: 11603 - DNA, 25 bp, Saccharomyces pastorianus
taaagatccctgtatccagaagatt

SEQ ID NO: 11604 - DNA, 25 bp, Saccharomyces pastorianus
gcctgaaattgcatctacctatggt

SEQ ID NO: 11605 - DNA, 25 bp, Saccharomyces pastorianus
ttcggacgcgacaacaacaatagac

SEQ ID NO: 11606 - DNA, 25 bp, Saccharomyces pastorianus
gttcttccgtcttattcatttgcaa

SEQ ID NO: 11607 - DNA, 25 bp, Saccharomyces pastorianus
aagattcagacacttccttcagaag

SEQ ID NO: 11608 - DNA, 25 bp, Saccharomyces pastorianus
acaatagacgttcattctcccgcaa

SEQ ID NO: 11609 - DNA, 25 bp, Saccharomyces pastorianus
ggtatactttcaaacgatcctgaat

SEQ ID NO: 11610 - DNA, 25 bp, Saccharomyces pastorianus
tttctgaaagacacatattgcctga

SEQ ID NO: 11611 - DNA, 25 bp, Saccharomyces pastorianus
gaagatggacaattcggacgcgaca

SEQ ID NO: 11612 - DNA, 25 bp, Saccharomyces pastorianus
gaagagctgtccgatgtcatagtaa

SEQ ID NO: 11613 - DNA, 25 bp, Saccharomyces pastorianus
atagtaagtttgatctcatcctaca

SEQ ID NO: 11614 - DNA, 25 bp, Saccharomyces pastorianus
atacagatcttcctctgatcggcga

SEQ ID NO: 11615 - DNA, 25 bp, Saccharomyces pastorianus
aaactgcggcccaggattggttcga

SEQ ID NO: 11616 - DNA, 25 bp, Saccharomyces pastorianus
atgattttccttcattgggcggcgc

SEQ ID NO: 11617 - DNA, 25 bp, Saccharomyces pastorianus
gtgaacggaaacaagcgcgccaaat

SEQ ID NO: 11618 - DNA, 25 bp, Saccharomyces pastorianus
aagttccattgagccactactagca

SEQ ID NO: 11619 - DNA, 25 bp, Saccharomyces pastorianus
gatcggcgacagacctacaaatgaa

SEQ ID NO: 11620 - DNA, 25 bp, Saccharomyces pastorianus
ttgtcattgatcaatcctacccatc

SEQ ID NO: 11621 - DNA, 25 bp, Saccharomyces pastorianus
cacgatttgttcttcgtcgcattag

SEQ ID NO: 11622 - DNA, 25 bp, Saccharomyces pastorianus
ggcgctggtcgcaatacagatcttc

SEQ ID NO: 11623 - DNA, 25 bp, Saccharomyces pastorianus
acggatattttgttgcacttgccaa

SEQ ID NO: 11624 - DNA, 25 bp, Saccharomyces pastorianus
ttgcatgttcatagttttcacgatt

SEQ ID NO: 11625 - DNA, 25 bp, Saccharomyces pastorianus
gggcgataaattacgcaagtctatg

SEQ ID NO: 11626 - DNA, 25 bp, Saccharomyces pastorianus
gaactggatacattgcagcagactt

SEQ ID NO: 11627 - DNA, 25 bp, Saccharomyces pastorianus
tctgtcgaatctctgaagcacgcaa

SEQ ID NO: 11628 - DNA, 25 bp, Saccharomyces pastorianus
actggaacagagtgtgcttgctttg

SEQ ID NO: 11629 - DNA, 25 bp, Saccharomyces pastorianus
gcttgctttggagagtacactttcg

SEQ ID NO: 11630 - DNA, 25 bp, Saccharomyces pastorianus
taattcggacatgggtcgcgatgat

SEQ ID NO: 11631 - DNA, 25 bp, Saccharomyces pastorianus
tttccgtttagtgcccgagtatgac

SEQ ID NO: 11632 - DNA, 25 bp, Saccharomyces pastorianus
agcacgcaaatgaacctagcacgaa

SEQ ID NO: 11633 - DNA, 25 bp, Saccharomyces pastorianus
aacgatggtctcgataattcggaca

SEQ ID NO: 11634 - DNA, 25 bp, Saccharomyces pastorianus
agtagagccgcttgttaggacgttg

SEQ ID NO: 11635 - DNA, 25 bp, Saccharomyces pastorianus
gagatgctgatgttagtaccgatgt

SEQ ID NO: 11636 - DNA, 25 bp, Saccharomyces pastorianus
gccttcatcggcatcagtatcatat

SEQ ID NO: 11637 - DNA, 25 bp, Saccharomyces pastorianus
gtatgtgcaatttccgtatggccca

SEQ ID NO: 11638 - DNA, 25 bp, Saccharomyces pastorianus
tatccaagtcccatgatgccttcat

SEQ ID NO: 11639 - DNA, 25 bp, Saccharomyces pastorianus
gtttcagcagcccatgcagcaagaa

SEQ ID NO: 11640 - DNA, 25 bp, Saccharomyces pastorianus
ggtagcgctgccatttaatgcacat

SEQ ID NO: 11641 - DNA, 25 bp, Saccharomyces pastorianus
aatgtcctcgataaactcctcctat

SEQ ID NO: 11642 - DNA, 25 bp, Saccharomyces pastorianus
tagtatcatatcctctgtgcaaacg

SEQ ID NO: 11643 - DNA, 25 bp, Saccharomyces pastorianus
gcagccacttcttcatctatttcaa

SEQ ID NO: 11644 - DNA, 25 bp, Saccharomyces pastorianus
tgtgtatcaacaacctccagcaatg

SEQ ID NO: 11645 - DNA, 25 bp, Saccharomyces pastorianus
gaaaccgttgcgaatttatctgctg

SEQ ID NO: 11646 - DNA, 25 bp, Saccharomyces pastorianus
acagcaggttcaaagttcgacgcag

SEQ ID NO: 11647 - DNA, 25 bp, Saccharomyces pastorianus
actggactgccattatgatgcgttc

SEQ ID NO: 11648 - DNA, 25 bp, Saccharomyces pastorianus
aaacttggcatatggcccagaatat

SEQ ID NO: 11649 - DNA, 25 bp, Saccharomyces pastorianus
agaaatgaacaacaccgcttcctct

SEQ ID NO: 11650 - DNA, 25 bp, Saccharomyces pastorianus
taatgccgattcaccagatacgagt

SEQ ID NO: 11651 - DNA, 25 bp, Saccharomyces pastorianus
gaaagcgtcgtcttcaaacttggca

SEQ ID NO: 11652 - DNA, 25 bp, Saccharomyces pastorianus
aagacccaactgtttcaattgtgag

SEQ ID NO: 11653 - DNA, 25 bp, Saccharomyces pastorianus
ttcttctccttctctgaaagcgtcg

SEQ ID NO: 11654 - DNA, 25 bp, Saccharomyces pastorianus
tataactcgcttggcgaatccccaa

SEQ ID NO: 11655 - DNA, 25 bp, Saccharomyces pastorianus
gcagccgctcaaggtacaagatctc

SEQ ID NO: 11656 - DNA, 25 bp, Saccharomyces pastorianus
tagacgactatcagcaccagaacag

SEQ ID NO: 11657 - DNA, 25 bp, Saccharomyces pastorianus
tgatgcgttcaagccggatttcgta

SEQ ID NO: 11658 - DNA, 25 bp, Saccharomyces pastorianus
gaagattctgtggatcctctacctc

SEQ ID NO: 11659 - DNA, 25 bp, Saccharomyces pastorianus
taaactggttagtgctattccacca

SEQ ID NO: 11660 - DNA, 25 bp, Saccharomyces pastorianus
gggattcgtgcatctgatcaattta

SEQ ID NO: 11661 - DNA, 25 bp, Saccharomyces pastorianus
acagtggtacggcattttttcagag

SEQ ID NO: 11662 - DNA, 25 bp, Saccharomyces pastorianus
gcgcaaacacaagggcccatgagat

SEQ ID NO: 11663 - DNA, 25 bp, Saccharomyces pastorianus
gggcccatgagatctggtactggaa

SEQ ID NO: 11664 - DNA, 25 bp, Saccharomyces pastorianus
gtttgcgccatgacactaaactggt

SEQ ID NO: 11665 - DNA, 25 bp, Saccharomyces pastorianus
gcatccattgaggagcaggcgcaaa

SEQ ID NO: 11666 - DNA, 25 bp, Saccharomyces pastorianus
gggtcgctcaactagcatagataag

SEQ ID NO: 11667 - DNA, 25 bp, Saccharomyces pastorianus
agacttgatatattacgtgggcata

SEQ ID NO: 11668 - DNA, 25 bp, Saccharomyces pastorianus
gatttacagtttcccgacactgcat

SEQ ID NO: 11669 - DNA, 25 bp, Saccharomyces pastorianus
ttcagcaaggaccagcaaaggagga

SEQ ID NO: 11670 - DNA, 25 bp, Saccharomyces pastorianus
aacaaggccctcctcaacaacaagg

SEQ ID NO: 11671 - DNA, 25 bp, Saccharomyces pastorianus
gtctacgttcagcaaggaccagcaa

SEQ ID NO: 11672 - DNA, 25 bp, Saccharomyces pastorianus
aggttactatcaacaaggccctcct

SEQ ID NO: 11673 - DNA, 25 bp, Saccharomyces pastorianus
ttgcttaaaatgtctgtgctgctgc

SEQ ID NO: 11674 - DNA, 25 bp, Saccharomyces pastorianus
cacaacagggctactaccaacaagg

SEQ ID NO: 11675 - DNA, 25 bp, Saccharomyces pastorianus
tcaacaacaaggctattaccaacaa

SEQ ID NO: 11676 - DNA, 25 bp, Saccharomyces pastorianus
acaaccagtctacgttcagcaagga

SEQ ID NO: 11677 - DNA, 25 bp, Saccharomyces pastorianus
aaggcccaccacaacagggctacta

SEQ ID NO: 11678 - DNA, 25 bp, Saccharomyces pastorianus
gaagctgcatggatagttgcttaaa

SEQ ID NO: 11679 - DNA, 25 bp, Saccharomyces pastorianus
gccctcctcaacaacaaggctatta

SEQ ID NO: 11680 - DNA, 25 bp, Saccharomyces pastorianus
cagtgtttctgttgatccttgttat

SEQ ID NO: 11681 - DNA, 25 bp, Saccharomyces pastorianus
gctgtggccaaagttttcaatcaat

SEQ ID NO: 11682 - DNA, 25 bp, Saccharomyces pastorianus
aaataaccatgatcttgacaccgcc

SEQ ID NO: 11683 - DNA, 25 bp, Saccharomyces pastorianus
gatcctatttagtgcattggtttct

SEQ ID NO: 11684 - DNA, 25 bp, Saccharomyces pastorianus
ttgacaccgccctactagaattaaa

SEQ ID NO: 11685 - DNA, 25 bp, Saccharomyces pastorianus
tagcaaccattactgcattattgaa

SEQ ID NO: 11686 - DNA, 25 bp, Saccharomyces pastorianus
taggtcccaaggatgctgtggccaa

SEQ ID NO: 11687 - DNA, 25 bp, Saccharomyces pastorianus
gtattgctactgtagagcgtgctat

SEQ ID NO: 11688 - DNA, 25 bp, Saccharomyces pastorianus
gagtatgaacgtcacgtaccatgaa

SEQ ID NO: 11689 - DNA, 25 bp, Saccharomyces pastorianus
accatttcatcgcaactcaaacatt

SEQ ID NO: 11690 - DNA, 25 bp, Saccharomyces pastorianus
taagtgatgactccatttcctctac

SEQ ID NO: 11691 - DNA, 25 bp, Saccharomyces pastorianus
gaagccgctttgaacatttatcttg

SEQ ID NO: 11692 - DNA, 25 bp, Saccharomyces pastorianus
agtcgttcaggctaaattttccgat

SEQ ID NO: 11693 - DNA, 25 bp, Saccharomyces pastorianus
gtaaatgccgctaaggattccagtg

SEQ ID NO: 11694 - DNA, 25 bp, Saccharomyces pastorianus
gctgctgcattattgatcatcccaa

SEQ ID NO: 11695 - DNA, 25 bp, Saccharomyces pastorianus
aagggtacttccaagcattcttctt

SEQ ID NO: 11696 - DNA, 25 bp, Saccharomyces pastorianus
aaattcatgccggtgttcttgagcc

SEQ ID NO: 11697 - DNA, 25 bp, Saccharomyces pastorianus
atcagcgttggaagcctgcatagca

SEQ ID NO: 11698 - DNA, 25 bp, Saccharomyces pastorianus
gatggaacgttctctacatgactca

SEQ ID NO: 11699 - DNA, 25 bp, Saccharomyces pastorianus
acatgactcactctctgttgttaag

SEQ ID NO: 11700 - DNA, 25 bp, Saccharomyces pastorianus
taagatcttatcatgctgccagcca

SEQ ID NO: 11701 - DNA, 25 bp, Saccharomyces pastorianus
cttgacaattttgccactacggttg

SEQ ID NO: 11702 - DNA, 25 bp, Saccharomyces pastorianus
taggcgatgtcatcaatcccgatgt

SEQ ID NO: 11703 - DNA, 25 bp, Saccharomyces pastorianus
acttcgagtttttacatttccagca

SEQ ID NO: 11704 - DNA, 25 bp, Saccharomyces pastorianus
atcatggactcactggcaaacgcta

SEQ ID NO: 11705 - DNA, 25 bp, Saccharomyces pastorianus
tactgatttatatccggtcggctta

SEQ ID NO: 11706 - DNA, 25 bp, Saccharomyces pastorianus
gattcgccatacttgataaccttag

SEQ ID NO: 11707 - DNA, 25 bp, Saccharomyces pastorianus
tatgatgctggatttcctcggcggt

SEQ ID NO: 11708 - DNA, 25 bp, Saccharomyces pastorianus
gcaagtgttgcctcaagacgttgac

SEQ ID NO: 11709 - DNA, 25 bp, Saccharomyces pastorianus
ctggtttctcgagggtgttacgcaa

SEQ ID NO: 11710 - DNA, 25 bp, Saccharomyces pastorianus
aacattcctcgcgttattgatgaca

SEQ ID NO: 11711 - DNA, 25 bp, Saccharomyces pastorianus
gattttaaccgctgtatggccatta

SEQ ID NO: 11712 - DNA, 25 bp, Saccharomyces pastorianus
tcggcggtgggctaccatcaatgac

SEQ ID NO: 11713 - DNA, 25 bp, Saccharomyces pastorianus
aaggactggtcagccagcttcaact

SEQ ID NO: 11714 - DNA, 25 bp, Saccharomyces pastorianus
atctatctagaacccactttcaacg

SEQ ID NO: 11715 - DNA, 25 bp, Saccharomyces pastorianus
ggagcagatccgcacagtttttcaa

SEQ ID NO: 11716 - DNA, 25 bp, Saccharomyces pastorianus
ttcgaagattactacgtgcgctcca

SEQ ID NO: 11717 - DNA, 25 bp, Saccharomyces pastorianus
atcagcgagctggtgtcgtgcgaaa

SEQ ID NO: 11718 - DNA, 25 bp, Saccharomyces pastorianus
aagccaggaaagagcgcgtctccat

SEQ ID NO: 11719 - DNA, 25 bp, Saccharomyces pastorianus
gtgccatccagcgagctatacgaaa

SEQ ID NO: 11720 - DNA, 25 bp, Saccharomyces pastorianus
gaactattcggtggcaacgtcatca

SEQ ID NO: 11721 - DNA, 25 bp, Saccharomyces pastorianus
gacttactggccactaatgctaatg

SEQ ID NO: 11722 - DNA, 25 bp, Saccharomyces pastorianus
gcgtgcgcggcaacttcgaagatta

SEQ ID NO: 11723 - DNA, 25 bp, Saccharomyces pastorianus
aatgaccttccacgaatctcaggag

SEQ ID NO: 11724 - DNA, 25 bp, Saccharomyces pastorianus
gacgatagcgatttgacttcacatt

SEQ ID NO: 11725 - DNA, 25 bp, Saccharomyces pastorianus
tatgggatcccagtcgtattgtatt

SEQ ID NO: 11726 - DNA, 25 bp, Saccharomyces pastorianus
taacgctattgtgggagaactgact

SEQ ID NO: 11727 - DNA, 25 bp, Saccharomyces pastorianus
gggcacacagtgacgatagcgattt

SEQ ID NO: 11728 - DNA, 25 bp, Saccharomyces pastorianus
agaccagtgctggaacggtccacat

SEQ ID NO: 11729 - DNA, 25 bp, Saccharomyces pastorianus
gtgacactttccaaattcggagcgt

SEQ ID NO: 11730 - DNA, 25 bp, Saccharomyces pastorianus
gtattcgtccgttgcagtgacactt

SEQ ID NO: 11731 - DNA, 25 bp, Saccharomyces pastorianus
gctgggctgcgacaaagcctttgaa

SEQ ID NO: 11732 - DNA, 25 bp, Saccharomyces pastorianus
ggtccacatagatcagccacggtat

SEQ ID NO: 11733 - DNA, 25 bp, Saccharomyces pastorianus
attgggtattgacgcagacttgaac

SEQ ID NO: 11734 - DNA, 25 bp, Saccharomyces pastorianus
tacatatttgacgtcagcgggccgc

SEQ ID NO: 11735 - DNA, 25 bp, Saccharomyces pastorianus
gaaaactactccattttggctatag

SEQ ID NO: 11736 - DNA, 25 bp, Saccharomyces pastorianus
aattaaccgatgtccctgtggctta

SEQ ID NO: 11737 - DNA, 25 bp, Saccharomyces pastorianus
aaactgaccgctattggttcttccg

SEQ ID NO: 11738 - DNA, 25 bp, Saccharomyces pastorianus
gcggtttcgggctactagtacagat

SEQ ID NO: 11739 - DNA, 25 bp, Saccharomyces pastorianus
ggtgaactcctttcctcagacaaaa

SEQ ID NO: 11740 - DNA, 25 bp, Saccharomyces pastorianus
aaagagatctctgccactggtgaac

SEQ ID NO: 11741 - DNA, 25 bp, Saccharomyces pastorianus
gtggcttatctagacgccgttcaag

SEQ ID NO: 11742 - DNA, 25 bp, Saccharomyces pastorianus
gcatggttagatcgctagctcagaa

SEQ ID NO: 11743 - DNA, 25 bp, Saccharomyces pastorianus
gaacttcttatgtttccacagtgaa

SEQ ID NO: 11744 - DNA, 25 bp, Saccharomyces pastorianus
aatgattagacacgtcttcgtcccc

SEQ ID NO: 11745 - DNA, 25 bp, Saccharomyces pastorianus
caacttccatcaaatttcccggtag

SEQ ID NO: 11746 - DNA, 25 bp, Saccharomyces pastorianus
agaagacctctacttccactgatgg

SEQ ID NO: 11747 - DNA, 25 bp, Saccharomyces pastorianus
caagaagacctctacttccactgat

SEQ ID NO: 11748 - DNA, 25 bp, Saccharomyces pastorianus
gaagacctctacttccactgatggt

SEQ ID NO: 11749 - DNA, 25 bp, Saccharomyces pastorianus
ttttgaactcctttgtaaacgatat

SEQ ID NO: 11750 - DNA, 25 bp, Saccharomyces pastorianus
gctgccaagaagacctctacttcca

SEQ ID NO: 11751 - DNA, 25 bp, Saccharomyces pastorianus
tattttgaactcctttgtaaacgat

SEQ ID NO: 11752 - DNA, 25 bp, Saccharomyces pastorianus
tgccaagaagacctctacttccact

SEQ ID NO: 11753 - DNA, 25 bp, Saccharomyces pastorianus
aagaagacctctacttccactgatg

SEQ ID NO: 11754 - DNA, 25 bp, Saccharomyces pastorianus
ttgaactcctttgtaaacgatatct

SEQ ID NO: 11755 - DNA, 25 bp, Saccharomyces pastorianus
tctattttgaactcctttgtaaacg

SEQ ID NO: 11756 - DNA, 25 bp, Saccharomyces pastorianus
gccaagaagacctctacttccactg

SEQ ID NO: 11757 - DNA, 25 bp, Saccharomyces pastorianus
tacttgactgccgtcctagaatatt

SEQ ID NO: 11758 - DNA, 25 bp, Saccharomyces pastorianus
ttgactgccgtcctagaatatttgg

SEQ ID NO: 11759 - DNA, 25 bp, Saccharomyces pastorianus
tattgctcaaggtggtgtcttgcca

SEQ ID NO: 11760 - DNA, 25 bp, Saccharomyces pastorianus
gacgacgaattgaacaaattgttgg

SEQ ID NO: 11761 - DNA, 25 bp, Saccharomyces pastorianus
gttgggtaacgttactattgctcaa

SEQ ID NO: 11762 - DNA, 25 bp, Saccharomyces pastorianus
tcaaagaattggttccggtgctcca

SEQ ID NO: 11763 - DNA, 25 bp, Saccharomyces pastorianus
aaagaccagaatcatcccaagacat

SEQ ID NO: 11764 - DNA, 25 bp, Saccharomyces pastorianus
tgccgtcctagaatatttggccgct

SEQ ID NO: 11765 - DNA, 25 bp, Saccharomyces pastorianus
attgttgggtaacgttactattgct

SEQ ID NO: 11766 - DNA, 25 bp, Saccharomyces pastorianus
agtctacttgactgccgtcctagaa

SEQ ID NO: 11767 - DNA, 25 bp, Saccharomyces pastorianus
gttactattgctcaaggtggtgtct

SEQ ID NO: 11768 - DNA, 25 bp, Saccharomyces pastorianus
gaaccattcctcaagccgaaaagtt

SEQ ID NO: 11769 - DNA, 25 bp, Saccharomyces pastorianus
atcaccggtagattggtccatccag

SEQ ID NO: 11770 - DNA, 25 bp, Saccharomyces pastorianus
gagattggatgcttaccacgctcaa

SEQ ID NO: 11771 - DNA, 25 bp, Saccharomyces pastorianus
ggtagatcttaccacaaactcttca

SEQ ID NO: 11772 - DNA, 25 bp, Saccharomyces pastorianus
aaggtgctttggtctccgacgacat

SEQ ID NO: 11773 - DNA, 25 bp, Saccharomyces pastorianus
tcaagctccaaacctgcaagaacgt

SEQ ID NO: 11774 - DNA, 25 bp, Saccharomyces pastorianus
gatccgatgacaatgctgacgcttt

SEQ ID NO: 11775 - DNA, 25 bp, Saccharomyces pastorianus
atttggctaccggtgacatgttgag

SEQ ID NO: 11776 - DNA, 25 bp, Saccharomyces pastorianus
tccatccaggttccggtagatctta

SEQ ID NO: 11777 - DNA, 25 bp, Saccharomyces pastorianus
caagaagtctggtatctgggctggt

SEQ ID NO: 11778 - DNA, 25 bp, Saccharomyces pastorianus
gaagctctagtccaaagatccgatg

SEQ ID NO: 11779 - DNA, 25 bp, Saccharomyces pastorianus
ctgtcaccggtgtttatgatgagga

SEQ ID NO: 11780 - DNA, 25 bp, Saccharomyces pastorianus
gaaatcacctctacacagcataaag

SEQ ID NO: 11781 - DNA, 25 bp, Saccharomyces pastorianus
gcaaacacaggtataagcaactcaa

SEQ ID NO: 11782 - DNA, 25 bp, Saccharomyces pastorianus
ttgctatcatgaaacctccgaaagt

SEQ ID NO: 11783 - DNA, 25 bp, Saccharomyces pastorianus
gcgattctcaatgggtagctttcaa

SEQ ID NO: 11784 - DNA, 25 bp, Saccharomyces pastorianus
gcaactcaaactcaaataccactac

SEQ ID NO: 11785 - DNA, 25 bp, Saccharomyces pastorianus
gatttgtaaagaaactgtcaccggt

SEQ ID NO: 11786 - DNA, 25 bp, Saccharomyces pastorianus
aatattttcattctacttgctatca

SEQ ID NO: 11787 - DNA, 25 bp, Saccharomyces pastorianus
gatatggttttcaagtgtccgattt

SEQ ID NO: 11788 - DNA, 25 bp, Saccharomyces pastorianus
aagtctgcaaaggacactttaggaa

SEQ ID NO: 11789 - DNA, 25 bp, Saccharomyces pastorianus
agttgactacactgatcccaatatt

SEQ ID NO: 11790 - DNA, 25 bp, Saccharomyces pastorianus
tcgttgccgcctacaagaaactcaa

SEQ ID NO: 11791 - DNA, 25 bp, Saccharomyces pastorianus
cttattatatgatgcggacgaccct

SEQ ID NO: 11792 - DNA, 25 bp, Saccharomyces pastorianus
ttttcaccaaagtccaagagctcct

SEQ ID NO: 11793 - DNA, 25 bp, Saccharomyces pastorianus
gacaatgacggcaacggcagcgata

SEQ ID NO: 11794 - DNA, 25 bp, Saccharomyces pastorianus
gaaggaactagtcgaccttccacgt

SEQ ID NO: 11795 - DNA, 25 bp, Saccharomyces pastorianus
gcggacgaccctttcagcaagaaga

SEQ ID NO: 11796 - DNA, 25 bp, Saccharomyces pastorianus
acgagctcgtggaaaatacctgcaa

SEQ ID NO: 11797 - DNA, 25 bp, Saccharomyces pastorianus
ctggcggtggactggatgacttatt

SEQ ID NO: 11798 - DNA, 25 bp, Saccharomyces pastorianus
aacaaagtcgccacagtgtccaggg

SEQ ID NO: 11799 - DNA, 25 bp, Saccharomyces pastorianus
gaagcagcaacaacgaaggccgcga

SEQ ID NO: 11800 - DNA, 25 bp, Saccharomyces pastorianus
ggcggagaactcgttttcgttgccg

SEQ ID NO: 11801 - DNA, 25 bp, Saccharomyces pastorianus
aaaaagcttccagattgcccagttg

SEQ ID NO: 11802 - DNA, 25 bp, Saccharomyces pastorianus
ttaaaggaggcctgggactcagtca

SEQ ID NO: 11803 - DNA, 25 bp, Saccharomyces pastorianus
tactggaggatactccgcccaagtt

SEQ ID NO: 11804 - DNA, 25 bp, Saccharomyces pastorianus
tctagagaggctgacgtcgatcccg

SEQ ID NO: 11805 - DNA, 25 bp, Saccharomyces pastorianus
ggagaacccgtactgacgaactact

SEQ ID NO: 11806 - DNA, 25 bp, Saccharomyces pastorianus
aagttcaccaatgacctatccaact

SEQ ID NO: 11807 - DNA, 25 bp, Saccharomyces pastorianus
gcataacgtggtgcatgacccagct

SEQ ID NO: 11808 - DNA, 25 bp, Saccharomyces pastorianus
atgacccagctttgccagaacaatg

SEQ ID NO: 11809 - DNA, 25 bp, Saccharomyces pastorianus
gaactgggccatgagctctctgata

SEQ ID NO: 11810 - DNA, 25 bp, Saccharomyces pastorianus
aaaagcaggcccagttccagcaaag

SEQ ID NO: 11811 - DNA, 25 bp, Saccharomyces pastorianus
gagctctctgatactgggatcaatt

SEQ ID NO: 11812 - DNA, 25 bp, Saccharomyces pastorianus
aacaagactgctactgtttcctcaa

SEQ ID NO: 11813 - DNA, 25 bp, Saccharomyces pastorianus
gggccctatctccaagttggtcaaa

SEQ ID NO: 11814 - DNA, 25 bp, Saccharomyces pastorianus
gaattctcccaattggcctgtgaaa

SEQ ID NO: 11815 - DNA, 25 bp, Saccharomyces pastorianus
aagcaattgccagttttccaagccc

SEQ ID NO: 11816 - DNA, 25 bp, Saccharomyces pastorianus
aggaatgtccaaacgtcgctggctt

SEQ ID NO: 11817 - DNA, 25 bp, Saccharomyces pastorianus
aagtcatgccagaagtcccagaaca

SEQ ID NO: 11818 - DNA, 25 bp, Saccharomyces pastorianus
gtttcctcaactactggtcctgaaa

SEQ ID NO: 11819 - DNA, 25 bp, Saccharomyces pastorianus
acttggccgctgaagttccattaga

SEQ ID NO: 11820 - DNA, 25 bp, Saccharomyces pastorianus
ggaccattatgttcgtcggcgacat

SEQ ID NO: 11821 - DNA, 25 bp, Saccharomyces pastorianus
gcctcgcatcgatgaagccttgaag

SEQ ID NO: 11822 - DNA, 25 bp, Saccharomyces pastorianus
caagttcttctcatggttttccatc

SEQ ID NO: 11823 - DNA, 25 bp, Saccharomyces pastorianus
aaagtagtcgtcaccgagggctctt

SEQ ID NO: 11824 - DNA, 25 bp, Saccharomyces pastorianus
agaagctccggttccaaagcaatcc

SEQ ID NO: 11825 - DNA, 25 bp, Saccharomyces pastorianus
ggaaggtttcccacgagagatctcg

SEQ ID NO: 11826 - DNA, 25 bp, Saccharomyces pastorianus
gatatcgtcatcagcgggttcaact

SEQ ID NO: 11827 - DNA, 25 bp, Saccharomyces pastorianus
gagttggtcttttgcgacgctgaca

SEQ ID NO: 11828 - DNA, 25 bp, Saccharomyces pastorianus
agaacaagcggccactgcattattg

SEQ ID NO: 11829 - DNA, 25 bp, Saccharomyces pastorianus
ggtaccggatcctccagagaacaag

SEQ ID NO: 11830 - DNA, 25 bp, Saccharomyces pastorianus
aggtatcaacttggtcgtgtccggc

SEQ ID NO: 11831 - DNA, 25 bp, Saccharomyces pastorianus
ttggatggtcccgtcatcatggaac

SEQ ID NO: 11832 - DNA, 25 bp, Saccharomyces pastorianus
gctccttcggtaacattttctctag

SEQ ID NO: 11833 - DNA, 25 bp, Saccharomyces pastorianus
gacgctgatttccaaacgagggccc

SEQ ID NO: 11834 - DNA, 25 bp, Saccharomyces pastorianus
agaagtagacttgcccatacctgta

SEQ ID NO: 11835 - DNA, 25 bp, Saccharomyces pastorianus
acgtgcccatagagcagttacccaa

SEQ ID NO: 11836 - DNA, 25 bp, Saccharomyces pastorianus
gctccccatggtactttcagtagga

SEQ ID NO: 11837 - DNA, 25 bp, Saccharomyces pastorianus
ggaattgcatgttcttcacgatttc

SEQ ID NO: 11838 - DNA, 25 bp, Saccharomyces pastorianus
attaggcatcccaacagccaacgtg

SEQ ID NO: 11839 - DNA, 25 bp, Saccharomyces pastorianus
ggctattgaccatggagaacccttg

SEQ ID NO: 11840 - DNA, 25 bp, Saccharomyces pastorianus
ggtgatttaaacgtgctccccatgg

SEQ ID NO: 11841 - DNA, 25 bp, Saccharomyces pastorianus
ggtttggacgtggatctgctgaatt

SEQ ID NO: 11842 - DNA, 25 bp, Saccharomyces pastorianus
ggatttgctcacatcaaggctattg

SEQ ID NO: 11843 - DNA, 25 bp, Saccharomyces pastorianus
ttgcacaaaaattcctatccacctc

SEQ ID NO: 11844 - DNA, 25 bp, Saccharomyces pastorianus
gcaggtaccttcttgatacatcgaa

SEQ ID NO: 11845 - DNA, 25 bp, Saccharomyces pastorianus
atcactgcagctcttcaattacaac

SEQ ID NO: 11846 - DNA, 25 bp, Saccharomyces pastorianus
aaagtccaactacctgatatccatc

SEQ ID NO: 11847 - DNA, 25 bp, Saccharomyces pastorianus
gaacagaccacctaagaatcctcag

SEQ ID NO: 11848 - DNA, 25 bp, Saccharomyces pastorianus
tctaaaaacgatgttcctacctgga

SEQ ID NO: 11849 - DNA, 25 bp, Saccharomyces pastorianus
aacataaacacttctgctcaattag

SEQ ID NO: 11850 - DNA, 25 bp, Saccharomyces pastorianus
aattattcgcacgatgcggccgtag

SEQ ID NO: 11851 - DNA, 25 bp, Saccharomyces pastorianus
aaccagttgtttgctatcactgcag

SEQ ID NO: 11852 - DNA, 25 bp, Saccharomyces pastorianus
gaatcctcagggttctaaagtccaa

SEQ ID NO: 11853 - DNA, 25 bp, Saccharomyces pastorianus
agactaccaggcaagaactttgtta

SEQ ID NO: 11854 - DNA, 25 bp, Saccharomyces pastorianus
aggtattagcaaccaatccgggaat

SEQ ID NO: 11855 - DNA, 25 bp, Saccharomyces pastorianus
gatgcgaaccaagactcatggccaa

SEQ ID NO: 11856 - DNA, 25 bp, Saccharomyces pastorianus
atactatctctctcttccagaatta

SEQ ID NO: 11857 - DNA, 25 bp, Saccharomyces pastorianus
gaaagcagtcaaatgggaaccgccc

SEQ ID NO: 11858 - DNA, 25 bp, Saccharomyces pastorianus
ggcacattttactgttcaacgtctt

SEQ ID NO: 11859 - DNA, 25 bp, Saccharomyces pastorianus
ggaagacctccatacacagtcaatc

SEQ ID NO: 11860 - DNA, 25 bp, Saccharomyces pastorianus
tatgccccacaacattaatgccttt

SEQ ID NO: 11861 - DNA, 25 bp, Saccharomyces pastorianus
agacctgacgttgttatatgcccca

SEQ ID NO: 11862 - DNA, 25 bp, Saccharomyces pastorianus
cagccctatttttgatgacagcgag

SEQ ID NO: 11863 - DNA, 25 bp, Saccharomyces pastorianus
aattttccatctttgtccgtacctg

SEQ ID NO: 11864 - DNA, 25 bp, Saccharomyces pastorianus
aggtactgtcgattgccagatggat

SEQ ID NO: 11865 - DNA, 25 bp, Saccharomyces pastorianus
taatgcctttcaggcctggtgacat

SEQ ID NO: 11866 - DNA, 25 bp, Saccharomyces pastorianus
ggatgtttcatcagctcttaatgca

SEQ ID NO: 11867 - DNA, 25 bp, Saccharomyces pastorianus
tggtaggactggtcgtgccgccaaa

SEQ ID NO: 11868 - DNA, 25 bp, Saccharomyces pastorianus
gtgccgccaaagaaggtaccgccat

SEQ ID NO: 11869 - DNA, 25 bp, Saccharomyces pastorianus
acagggtctgaacctctgattcaac

SEQ ID NO: 11870 - DNA, 25 bp, Saccharomyces pastorianus
gtggtcaatttccagattcctaaaa

SEQ ID NO: 11871 - DNA, 25 bp, Saccharomyces pastorianus
ataggcgagcttcacaagtacgtaa

SEQ ID NO: 11872 - DNA, 25 bp, Saccharomyces pastorianus
tgaagaagcccgtctacgcgactat

SEQ ID NO: 11873 - DNA, 25 bp, Saccharomyces pastorianus
aacaacaggttttccgatgctgtga

SEQ ID NO: 11874 - DNA, 25 bp, Saccharomyces pastorianus
aacagactgccgactggttggctga

SEQ ID NO: 11875 - DNA, 25 bp, Saccharomyces pastorianus
attccgcagcggcaaagttcaaatt

SEQ ID NO: 11876 - DNA, 25 bp, Saccharomyces pastorianus
acatggttccaagtcgcaagatcaa

SEQ ID NO: 11877 - DNA, 25 bp, Saccharomyces pastorianus
accgccatctcttacgttggtggta

SEQ ID NO: 11878 - DNA, 25 bp, Saccharomyces pastorianus
agtacagttgtgcttgggtcttcta

SEQ ID NO: 11879 - DNA, 25 bp, Saccharomyces pastorianus
gagcattgcaactgaaaccatcttt

SEQ ID NO: 11880 - DNA, 25 bp, Saccharomyces pastorianus
gcttgggtcttctattctacactaa

SEQ ID NO: 11881 - DNA, 25 bp, Saccharomyces pastorianus
tagcgatgaaccgagatgacctttt

SEQ ID NO: 11882 - DNA, 25 bp, Saccharomyces pastorianus
tggccaactccaacagatcagaaga

SEQ ID NO: 11883 - DNA, 25 bp, Saccharomyces pastorianus
agaggctgcaggctacttattgact

SEQ ID NO: 11884 - DNA, 25 bp, Saccharomyces pastorianus
gatctagggtctctcttgaacacat

SEQ ID NO: 11885 - DNA, 25 bp, Saccharomyces pastorianus
gttagagctcgttacaatctggcag

SEQ ID NO: 11886 - DNA, 25 bp, Saccharomyces pastorianus
caatctggcagtgtcttcaatgaat

SEQ ID NO: 11887 - DNA, 25 bp, Saccharomyces pastorianus
cacattgacatgaacgcgcgtgtaa

SEQ ID NO: 11888 - DNA, 25 bp, Saccharomyces pastorianus
taagctcggcagaccctgaagtaca

SEQ ID NO: 11889 - DNA, 25 bp, Saccharomyces pastorianus
gactcaagagctcatcgaacctggc

SEQ ID NO: 11890 - DNA, 25 bp, Saccharomyces pastorianus
aaacatgatcccgtacgtaccatac

SEQ ID NO: 11891 - DNA, 25 bp, Saccharomyces pastorianus
gatagcagacaactttctccggaag

SEQ ID NO: 11892 - DNA, 25 bp, Saccharomyces pastorianus
gggttaatctaccagcggaatttca

SEQ ID NO: 11893 - DNA, 25 bp, Saccharomyces pastorianus
taaaccgcacggcactagtaggaaa

SEQ ID NO: 11894 - DNA, 25 bp, Saccharomyces pastorianus
ttgaggcagctgtgcacggaccagt

SEQ ID NO: 11895 - DNA, 25 bp, Saccharomyces pastorianus
taagctccagcgtgatgccacagag

SEQ ID NO: 11896 - DNA, 25 bp, Saccharomyces pastorianus
acgatgttcatctaccaaacgctca

SEQ ID NO: 11897 - DNA, 25 bp, Saccharomyces pastorianus
gtatttgattctcgctagcacactg

SEQ ID NO: 11898 - DNA, 25 bp, Saccharomyces pastorianus
ggtatactgcctgtacagcgactac

SEQ ID NO: 11899 - DNA, 25 bp, Saccharomyces pastorianus
gaagttcgttgccataagctccagc

SEQ ID NO: 11900 - DNA, 25 bp, Saccharomyces pastorianus
gccaccgtttgggacctgctaagaa

SEQ ID NO: 11901 - DNA, 25 bp, Saccharomyces pastorianus
acacttccgggatatgcagaatggt

SEQ ID NO: 11902 - DNA, 25 bp, Saccharomyces pastorianus
atgccgataaagaggatttcccgcg

SEQ ID NO: 11903 - DNA, 25 bp, Saccharomyces pastorianus
aataacctccgaatttactgtgaat

SEQ ID NO: 11904 - DNA, 25 bp, Saccharomyces pastorianus
attctgtacgtttctggatctgcgg

SEQ ID NO: 11905 - DNA, 25 bp, Saccharomyces pastorianus
tccactgaacctcttttgactgtag

SEQ ID NO: 11906 - DNA, 25 bp, Saccharomyces pastorianus
gggcaaaaattcacttccactgaac

SEQ ID NO: 11907 - DNA, 25 bp, Saccharomyces pastorianus
agcacgaacttttatccgatgccac

SEQ ID NO: 11908 - DNA, 25 bp, Saccharomyces pastorianus
agaatgggttttccaagctatcgaa

SEQ ID NO: 11909 - DNA, 25 bp, Saccharomyces pastorianus
gtttttgttgtatttcactcacgta

SEQ ID NO: 11910 - DNA, 25 bp, Saccharomyces pastorianus
gtaaatttcctgcatacttcgaatt

SEQ ID NO: 11911 - DNA, 25 bp, Saccharomyces pastorianus
tttaccacaaataatgaccctgccc

SEQ ID NO: 11912 - DNA, 25 bp, Saccharomyces pastorianus
gtaacccaaccatcaccaatattga

SEQ ID NO: 11913 - DNA, 25 bp, Saccharomyces pastorianus
atcccttctgaagctacggttacaa

SEQ ID NO: 11914 - DNA, 25 bp, Saccharomyces pastorianus
cacagcctcagttgagctctacaaa

SEQ ID NO: 11915 - DNA, 25 bp, Saccharomyces pastorianus
gaatcgagtatcatccgcgaactac

SEQ ID NO: 11916 - DNA, 25 bp, Saccharomyces pastorianus
acgccaatgccgttaatggtactca

SEQ ID NO: 11917 - DNA, 25 bp, Saccharomyces pastorianus
atttagatcacaacaagggcttcct

SEQ ID NO: 11918 - DNA, 25 bp, Saccharomyces pastorianus
ttctcaacaccaattacaaccacag

SEQ ID NO: 11919 - DNA, 25 bp, Saccharomyces pastorianus
aacctttttcgaacaatggcagcaa

SEQ ID NO: 11920 - DNA, 25 bp, Saccharomyces pastorianus
agcgaaattcgggatcccttctgaa

SEQ ID NO: 11921 - DNA, 25 bp, Saccharomyces pastorianus
gattctgctccatgtgttaaccaac

SEQ ID NO: 11922 - DNA, 25 bp, Saccharomyces pastorianus
ggtcatctgacttaaggaggcacga

SEQ ID NO: 11923 - DNA, 25 bp, Saccharomyces pastorianus
gtaaagctcaagatcgtcgaaatag

SEQ ID NO: 11924 - DNA, 25 bp, Saccharomyces pastorianus
ccccagtgtggcaaaggtttcgcga

SEQ ID NO: 11925 - DNA, 25 bp, Saccharomyces pastorianus
agcaatcgtggatatatcgctagat

SEQ ID NO: 11926 - DNA, 25 bp, Saccharomyces pastorianus
tggaggaccaagattcagcatttat

SEQ ID NO: 11927 - DNA, 25 bp, Saccharomyces pastorianus
gaggccactcgcgtcaacagaaaat

SEQ ID NO: 11928 - DNA, 25 bp, Saccharomyces pastorianus
gcagtctaatattgctagtcgtgag

SEQ ID NO: 11929 - DNA, 25 bp, Saccharomyces pastorianus
gaatacacaaaacacatcacagcat

SEQ ID NO: 11930 - DNA, 25 bp, Saccharomyces pastorianus
gtgcaaaatgctccttagagttttc

SEQ ID NO: 11931 - DNA, 25 bp, Saccharomyces pastorianus
attggtactcataatgggatcgcga

SEQ ID NO: 11932 - DNA, 25 bp, Saccharomyces pastorianus
tagagttttcaaggtcatctgactt

SEQ ID NO: 11933 - DNA, 25 bp, Saccharomyces pastorianus
aatgacgcagcaagctcctttggat

SEQ ID NO: 11934 - DNA, 25 bp, Saccharomyces pastorianus
gcatgtcaccacgtcatttctaaaa

SEQ ID NO: 11935 - DNA, 25 bp, Saccharomyces pastorianus
ttatttttgatcgtcctaagcgggc

SEQ ID NO: 11936 - DNA, 25 bp, Saccharomyces pastorianus
aagtgcccatactgtccagtgaaca

SEQ ID NO: 11937 - DNA, 25 bp, Saccharomyces pastorianus
taagcgggctgatttctttccaatt

SEQ ID NO: 11938 - DNA, 25 bp, Saccharomyces pastorianus
gtgccattgctaactaaatcgctca

SEQ ID NO: 11939 - DNA, 25 bp, Saccharomyces pastorianus
gctccgcaaagcacattttcttcaa

SEQ ID NO: 11940 - DNA, 25 bp, Saccharomyces pastorianus
atcgctcataggacaacccgttgaa

SEQ ID NO: 11941 - DNA, 25 bp, Saccharomyces pastorianus
agcgcatgtggattggactactaaa

SEQ ID NO: 11942 - DNA, 25 bp, Saccharomyces pastorianus
tttccatccgatttttatttgtcca

SEQ ID NO: 11943 - DNA, 25 bp, Saccharomyces pastorianus
gaatcctgtggaagtttatcatcaa

SEQ ID NO: 11944 - DNA, 25 bp, Saccharomyces pastorianus
gcaaaggactggctaactgacaaag

SEQ ID NO: 11945 - DNA, 25 bp, Saccharomyces pastorianus
gaaaagatcttatccaccagaattt

SEQ ID NO: 11946 - DNA, 25 bp, Saccharomyces pastorianus
gaattcaatggcaaccttcttatta

SEQ ID NO: 11947 - DNA, 25 bp, Saccharomyces pastorianus
cgcaccctgatgtctccaaattgtt

SEQ ID NO: 11948 - DNA, 25 bp, Saccharomyces pastorianus
gtaagattgataccccaactaagga

SEQ ID NO: 11949 - DNA, 25 bp, Saccharomyces pastorianus
agccttattcagttgttttattcga

SEQ ID NO: 11950 - DNA, 25 bp, Saccharomyces pastorianus
attgtaatgacttcgaatatcggac

SEQ ID NO: 11951 - DNA, 25 bp, Saccharomyces pastorianus
tctagttttcaacaggttatccaag

SEQ ID NO: 11952 - DNA, 25 bp, Saccharomyces pastorianus
aaattgactgattctttagggcatc

SEQ ID NO: 11953 - DNA, 25 bp, Saccharomyces pastorianus
atgatccgatctatggtgcaagacc

SEQ ID NO: 11954 - DNA, 25 bp, Saccharomyces pastorianus
tgaagaaattcaggaccggttggct

SEQ ID NO: 11955 - DNA, 25 bp, Saccharomyces pastorianus
ggccatggaggataacgctcgcaat

SEQ ID NO: 11956 - DNA, 25 bp, Saccharomyces pastorianus
gagattcatttttccaataccggca

SEQ ID NO: 11957 - DNA, 25 bp, Saccharomyces pastorianus
acgggttctattttcgatgggcgcg

SEQ ID NO: 11958 - DNA, 25 bp, Saccharomyces pastorianus
gattggaatctctttaacggtatgg

SEQ ID NO: 11959 - DNA, 25 bp, Saccharomyces pastorianus
tgggcgcgttacacagttggcatat

SEQ ID NO: 11960 - DNA, 25 bp, Saccharomyces pastorianus
gtaaccgttattggaactcatttca

SEQ ID NO: 11961 - DNA, 25 bp, Saccharomyces pastorianus
tactagcacttccagacgaaatcgg

SEQ ID NO: 11962 - DNA, 25 bp, Saccharomyces pastorianus
caccacaccacatcttatatgcaga

SEQ ID NO: 11963 - DNA, 25 bp, Saccharomyces pastorianus
tgccgggcgcgcgtttgatcattct

SEQ ID NO: 11964 - DNA, 25 bp, Saccharomyces pastorianus
ttccaataccggcatttatcagcac

SEQ ID NO: 11965 - DNA, 25 bp, Saccharomyces pastorianus
aaatcggaaatgttgctatggccat

SEQ ID NO: 11966 - DNA, 25 bp, Saccharomyces pastorianus
tataatacgacactgttcaccaccg

SEQ ID NO: 11967 - DNA, 25 bp, Saccharomyces pastorianus
ttcccttcgccctttgataattata

SEQ ID NO: 11968 - DNA, 25 bp, Saccharomyces pastorianus
gattaccgtaatcgtgtcaggcaat

SEQ ID NO: 11969 - DNA, 25 bp, Saccharomyces pastorianus
gggtgcacgatatgatggctcctat

SEQ ID NO: 11970 - DNA, 25 bp, Saccharomyces pastorianus
ataagtacaacttccatcccattct

SEQ ID NO: 11971 - DNA, 25 bp, Saccharomyces pastorianus
gaatggtcgggtgccattaccgatt

SEQ ID NO: 11972 - DNA, 25 bp, Saccharomyces pastorianus
gtgtgcctcacaaaaacccttaagc

SEQ ID NO: 11973 - DNA, 25 bp, Saccharomyces pastorianus
taccgattgcgccacctggttgaat

SEQ ID NO: 11974 - DNA, 25 bp, Saccharomyces pastorianus
taaaccagctggtacgtgtgcctca

SEQ ID NO: 11975 - DNA, 25 bp, Saccharomyces pastorianus
aaagacgcagaactgttcccttcgc

SEQ ID NO: 11976 - DNA, 25 bp, Saccharomyces pastorianus
gtttttcatcctctttatctacaca

SEQ ID NO: 11977 - DNA, 25 bp, Saccharomyces pastorianus
acaagcgatgtaaacgcgcctttat

SEQ ID NO: 11978 - DNA, 25 bp, Saccharomyces pastorianus
gaattctgtattctcccacaagttc

SEQ ID NO: 11979 - DNA, 25 bp, Saccharomyces pastorianus
aatgatgcaatactggctcccgttc

SEQ ID NO: 11980 - DNA, 25 bp, Saccharomyces pastorianus
aaacgtcaaggatttctggcttaca

SEQ ID NO: 11981 - DNA, 25 bp, Saccharomyces pastorianus
gtctttttagtactcttgtgggcct

SEQ ID NO: 11982 - DNA, 25 bp, Saccharomyces pastorianus
ggatttgctccttcaattgagttgg

SEQ ID NO: 11983 - DNA, 25 bp, Saccharomyces pastorianus
atggtgctgacggtatatcttttaa

SEQ ID NO: 11984 - DNA, 25 bp, Saccharomyces pastorianus
taaagccttactcaacgggacagaa

SEQ ID NO: 11985 - DNA, 25 bp, Saccharomyces pastorianus
ggccttgttgcaatctgtttgggtt

SEQ ID NO: 11986 - DNA, 25 bp, Saccharomyces pastorianus
agtcgactacttcaagctttacaag

SEQ ID NO: 11987 - DNA, 25 bp, Saccharomyces pastorianus
tcccgttccaggttcgacattgagg

SEQ ID NO: 11988 - DNA, 25 bp, Saccharomyces pastorianus
taatgtcaccgggttctgcgagagc

SEQ ID NO: 11989 - DNA, 25 bp, Saccharomyces pastorianus
ttggctcacatacgtttgtcagaca

SEQ ID NO: 11990 - DNA, 25 bp, Saccharomyces pastorianus
atctcttgatttacagggaaccctt

SEQ ID NO: 11991 - DNA, 25 bp, Saccharomyces pastorianus
taagctctaccttagggtcgtggat

SEQ ID NO: 11992 - DNA, 25 bp, Saccharomyces pastorianus
gagaggcccgaatgtcctttatgta

SEQ ID NO: 11993 - DNA, 25 bp, Saccharomyces pastorianus
catctgttctgctgggactgtctga

SEQ ID NO: 11994 - DNA, 25 bp, Saccharomyces pastorianus
gaaaggtgccccaggttcgaatgta

SEQ ID NO: 11995 - DNA, 25 bp, Saccharomyces pastorianus
ggacatgactgatcctagctgcaca

SEQ ID NO: 11996 - DNA, 25 bp, Saccharomyces pastorianus
aagtggtatccagttctaagctcta

SEQ ID NO: 11997 - DNA, 25 bp, Saccharomyces pastorianus
tgccctatatcgcagaagcttcgag

SEQ ID NO: 11998 - DNA, 25 bp, Saccharomyces pastorianus
gtgttagacttgcatatgaccctat

SEQ ID NO: 11999 - DNA, 25 bp, Saccharomyces pastorianus
ttctcaaccaattagttatcgggct

SEQ ID NO: 12000 - DNA, 25 bp, Saccharomyces pastorianus
tatcgggctacttccaataacgcag

SEQ ID NO: 12001 - DNA, 25 bp, Saccharomyces pastorianus
tttaaacttgcctcaattacctcca

SEQ ID NO: 12002 - DNA, 25 bp, Saccharomyces pastorianus
aaaaaactcgtcatctgctgcttcg

SEQ ID NO: 12003 - DNA, 25 bp, Saccharomyces pastorianus
tccttgccatccttatcgagtgacc

SEQ ID NO: 12004 - DNA, 25 bp, Saccharomyces pastorianus
gagaatgccaatgtccacgatgatt

SEQ ID NO: 12005 - DNA, 25 bp, Saccharomyces pastorianus
taacgcagttgctttttctccaacg

SEQ ID NO: 12006 - DNA, 25 bp, Saccharomyces pastorianus
gaaaagccctgcagcatcgtatgat

SEQ ID NO: 12007 - DNA, 25 bp, Saccharomyces pastorianus
atagacctcaggctgcagatccaaa

SEQ ID NO: 12008 - DNA, 25 bp, Saccharomyces pastorianus
aagctcttgagcgacagacctcctt

SEQ ID NO: 12009 - DNA, 25 bp, Saccharomyces pastorianus
gtgacccctcactttcaatgtcaat

SEQ ID NO: 12010 - DNA, 25 bp, Saccharomyces pastorianus
acaggccgcagatattcttctttat

SEQ ID NO: 12011 - DNA, 25 bp, Saccharomyces pastorianus
gacgagcccaagactattcagaaaa

SEQ ID NO: 12012 - DNA, 25 bp, Saccharomyces pastorianus
gagtgatccaaaccacgattcagtg

SEQ ID NO: 12013 - DNA, 25 bp, Saccharomyces pastorianus
taaatctacgcatgttccggttggc

SEQ ID NO: 12014 - DNA, 25 bp, Saccharomyces pastorianus
aaggcaccttgctgacaaattcaat

SEQ ID NO: 12015 - DNA, 25 bp, Saccharomyces pastorianus
aagcctatcacgatgctggcgcaaa

SEQ ID NO: 12016 - DNA, 25 bp, Saccharomyces pastorianus
gtggaagatgtgtcccggttcaaca

SEQ ID NO: 12017 - DNA, 25 bp, Saccharomyces pastorianus
gaacggccaggtgtatccaatctaa

SEQ ID NO: 12018 - DNA, 25 bp, Saccharomyces pastorianus
gacaggttttattatgaccccgtag

SEQ ID NO: 12019 - DNA, 25 bp, Saccharomyces pastorianus
ggcgatgatcaatctcaacacttgg

SEQ ID NO: 12020 - DNA, 25 bp, Saccharomyces pastorianus
aagactgatttctttcccaagccta

SEQ ID NO: 12021 - DNA, 25 bp, Saccharomyces pastorianus
cgattcttcgagttcaatgacctat

SEQ ID NO: 12022 - DNA, 25 bp, Saccharomyces pastorianus
gtttctgttcagcatctttcagttg

SEQ ID NO: 12023 - DNA, 25 bp, Saccharomyces pastorianus
aagagatcatccctagtgtcgtcgc

SEQ ID NO: 12024 - DNA, 25 bp, Saccharomyces pastorianus
tagtggacgccattgatctgtttct

SEQ ID NO: 12025 - DNA, 25 bp, Saccharomyces pastorianus
gctttgctccttgggtgtgatcata

SEQ ID NO: 12026 - DNA, 25 bp, Saccharomyces pastorianus
tgctgaacgaatcctccgaatcatt

SEQ ID NO: 12027 - DNA, 25 bp, Saccharomyces pastorianus
gatctgtttctttatatatgccggt

SEQ ID NO: 12028 - DNA, 25 bp, Saccharomyces pastorianus
gcctttgataaggtcgtctcactga

SEQ ID NO: 12029 - DNA, 25 bp, Saccharomyces pastorianus
ggtactgctttagacgcggacacaa

SEQ ID NO: 12030 - DNA, 25 bp, Saccharomyces pastorianus
attacggctgtaaactggtccatta

SEQ ID NO: 12031 - DNA, 25 bp, Saccharomyces pastorianus
actgacgtgccattgcgggatttta

SEQ ID NO: 12032 - DNA, 25 bp, Saccharomyces pastorianus
atggattcctccaagatcatcaaca

SEQ ID NO: 12033 - DNA, 25 bp, Saccharomyces pastorianus
agtcgctgtttttctagcccgtgga

SEQ ID NO: 12034 - DNA, 25 bp, Saccharomyces pastorianus
tcttttcttacctccagtcgctgtt

SEQ ID NO: 12035 - DNA, 25 bp, Saccharomyces pastorianus
atctcttttcttacctccagtcgct

SEQ ID NO: 12036 - DNA, 25 bp, Saccharomyces pastorianus
gctgtttttctagcccgtggatggg

SEQ ID NO: 12037 - DNA, 25 bp, Saccharomyces pastorianus
tctcttttcttacctccagtcgctg

SEQ ID NO: 12038 - DNA, 25 bp, Saccharomyces pastorianus
tcctccaagatcatcaacattatat

SEQ ID NO: 12039 - DNA, 25 bp, Saccharomyces pastorianus
ccattttggcgtggttcccaggtat

SEQ ID NO: 12040 - DNA, 25 bp, Saccharomyces pastorianus
gggtactgactgtatagtggacatt

SEQ ID NO: 12041 - DNA, 25 bp, Saccharomyces pastorianus
ggacattattttgaccattttggcg

SEQ ID NO: 12042 - DNA, 25 bp, Saccharomyces pastorianus
ggattcctccaagatcatcaacatt

SEQ ID NO: 12043 - DNA, 25 bp, Saccharomyces pastorianus
aatatgccccagttcagattaaaat

SEQ ID NO: 12044 - DNA, 25 bp, Saccharomyces pastorianus
aacttgaagagacctgacatgccac

SEQ ID NO: 12045 - DNA, 25 bp, Saccharomyces pastorianus
aaaggctacaatatggtcgcagtgc

SEQ ID NO: 12046 - DNA, 25 bp, Saccharomyces pastorianus
gtcgcagtgccaggcgcaagtttac

SEQ ID NO: 12047 - DNA, 25 bp, Saccharomyces pastorianus
aattattgccattgtattctagcga

SEQ ID NO: 12048 - DNA, 25 bp, Saccharomyces pastorianus
cacattggtcaattcggatctatac

SEQ ID NO: 12049 - DNA, 25 bp, Saccharomyces pastorianus
aaccataatgaatctgtccaagcca

SEQ ID NO: 12050 - DNA, 25 bp, Saccharomyces pastorianus
ataccgcgtaggaacagctcagaaa

SEQ ID NO: 12051 - DNA, 25 bp, Saccharomyces pastorianus
gaagccaatctggactatgaattca

SEQ ID NO: 12052 - DNA, 25 bp, Saccharomyces pastorianus
aattgatgatgagggcgggcacccc

SEQ ID NO: 12053 - DNA, 25 bp, Saccharomyces pastorianus
tgacatgccacctccaagtctaata

SEQ ID NO: 12054 - DNA, 25 bp, Saccharomyces pastorianus
ggctactaatcttttggtttctttg

SEQ ID NO: 12055 - DNA, 25 bp, Saccharomyces pastorianus
ccaagctttcccatacttagacatg

SEQ ID NO: 12056 - DNA, 25 bp, Saccharomyces pastorianus
tctacgctgtcttgaaagtgggctt

SEQ ID NO: 12057 - DNA, 25 bp, Saccharomyces pastorianus
gattacgcctgcactaataacgaga

SEQ ID NO: 12058 - DNA, 25 bp, Saccharomyces pastorianus
ggtttctttgatcccgaaggcggct

SEQ ID NO: 12059 - DNA, 25 bp, Saccharomyces pastorianus
aattcgcgactatcatgacttgcta

SEQ ID NO: 12060 - DNA, 25 bp, Saccharomyces pastorianus
actggagccatatttctctacgctg

SEQ ID NO: 12061 - DNA, 25 bp, Saccharomyces pastorianus
caaatggcggttctgtgtctgtaaa

SEQ ID NO: 12062 - DNA, 25 bp, Saccharomyces pastorianus
gagaggtttcttacaattcgcgact

SEQ ID NO: 12063 - DNA, 25 bp, Saccharomyces pastorianus
gaattttcaccaagttcgacggatg

SEQ ID NO: 12064 - DNA, 25 bp, Saccharomyces pastorianus
gaaaactatcaaaccaccgacgagt

SEQ ID NO: 12065 - DNA, 25 bp, Saccharomyces pastorianus
tcggaatttattcctaactcttcga

SEQ ID NO: 12066 - DNA, 25 bp, Saccharomyces pastorianus
aattgattcctcatctaacaggccg

SEQ ID NO: 12067 - DNA, 25 bp, Saccharomyces pastorianus
ctctcccattcaaatcaagccagtg

SEQ ID NO: 12068 - DNA, 25 bp, Saccharomyces pastorianus
aagttctacgaaaccatcgggctca

SEQ ID NO: 12069 - DNA, 25 bp, Saccharomyces pastorianus
gcctagggtcgatcatacagccaaa

SEQ ID NO: 12070 - DNA, 25 bp, Saccharomyces pastorianus
atgagtttgatctttcttcgtcttc

SEQ ID NO: 12071 - DNA, 25 bp, Saccharomyces pastorianus
atttcatgaaacctccaatctcttc

SEQ ID NO: 12072 - DNA, 25 bp, Saccharomyces pastorianus
taacaggccgcctagggtcgatcat

SEQ ID NO: 12073 - DNA, 25 bp, Saccharomyces pastorianus
gatgacttagagcttaccaatccct

SEQ ID NO: 12074 - DNA, 25 bp, Saccharomyces pastorianus
gaaaagcaagacatcactgccgaaa

SEQ ID NO: 12075 - DNA, 25 bp, Saccharomyces pastorianus
cttcgtcttccaatgatgacttaga

SEQ ID NO: 12076 - DNA, 25 bp, Saccharomyces pastorianus
acggtatgctcgatgcttactggga

SEQ ID NO: 12077 - DNA, 25 bp, Saccharomyces pastorianus
gtggacccaatcgatggcactacta

SEQ ID NO: 12078 - DNA, 25 bp, Saccharomyces pastorianus
aattttatccatggctatccttata

SEQ ID NO: 12079 - DNA, 25 bp, Saccharomyces pastorianus
atagttgtacttcgctgggtctggc

SEQ ID NO: 12080 - DNA, 25 bp, Saccharomyces pastorianus
ggcgcagtttttaatccacatttaa

SEQ ID NO: 12081 - DNA, 25 bp, Saccharomyces pastorianus
tgcttggtgcatcctgagagagact

SEQ ID NO: 12082 - DNA, 25 bp, Saccharomyces pastorianus
acatatgctatgtcgctaacggtat

SEQ ID NO: 12083 - DNA, 25 bp, Saccharomyces pastorianus
aaatttgctcagtgagtcgggcgcc

SEQ ID NO: 12084 - DNA, 25 bp, Saccharomyces pastorianus
gaagatgctatttcgccatcagaag

SEQ ID NO: 12085 - DNA, 25 bp, Saccharomyces pastorianus
gagaaccggtagttggcgcagtttt

SEQ ID NO: 12086 - DNA, 25 bp, Saccharomyces pastorianus
tcaacttttccatgcctcgaaaggc

SEQ ID NO: 12087 - DNA, 25 bp, Saccharomyces pastorianus
agccgttgggacataggtctcagag

SEQ ID NO: 12088 - DNA, 25 bp, Saccharomyces pastorianus
agctgaattcgggttgggatctctt

SEQ ID NO: 12089 - DNA, 25 bp, Saccharomyces pastorianus
gatgatctgataaaggccctggaaa

SEQ ID NO: 12090 - DNA, 25 bp, Saccharomyces pastorianus
actgatcaggatcttgcttacaagg

SEQ ID NO: 12091 - DNA, 25 bp, Saccharomyces pastorianus
atttggtattcccagtgatggctca

SEQ ID NO: 12092 - DNA, 25 bp, Saccharomyces pastorianus
atatcttgcaccaggagttgatcaa

SEQ ID NO: 12093 - DNA, 25 bp, Saccharomyces pastorianus
gggatcctaaccgttattctatgca

SEQ ID NO: 12094 - DNA, 25 bp, Saccharomyces pastorianus
gagcattcgcacttacgaggagctg

SEQ ID NO: 12095 - DNA, 25 bp, Saccharomyces pastorianus
ttttgctaaacaacgctccatattt

SEQ ID NO: 12096 - DNA, 25 bp, Saccharomyces pastorianus
tgatggctcaaagattcctatactg

SEQ ID NO: 12097 - DNA, 25 bp, Saccharomyces pastorianus
aggctagaagcttacgtgatgatat

SEQ ID NO: 12098 - DNA, 25 bp, Saccharomyces pastorianus
tagacgttgacgaccatgatggtgc

SEQ ID NO: 12099 - DNA, 25 bp, Saccharomyces pastorianus
ttttgacgaggaacagagcatgctg

SEQ ID NO: 12100 - DNA, 25 bp, Saccharomyces pastorianus
ggaagatcctggtgacgattctcat

SEQ ID NO: 12101 - DNA, 25 bp, Saccharomyces pastorianus
caacggcaacagttatggacttgat

SEQ ID NO: 12102 - DNA, 25 bp, Saccharomyces pastorianus
gacatgacaggccatgatgatcata

SEQ ID NO: 12103 - DNA, 25 bp, Saccharomyces pastorianus
gaagctacaaagtgcactagacgac

SEQ ID NO: 12104 - DNA, 25 bp, Saccharomyces pastorianus
tatctgcgaaggatccatctaggtt

SEQ ID NO: 12105 - DNA, 25 bp, Saccharomyces pastorianus
gtgacgattctcattctgagctaaa

SEQ ID NO: 12106 - DNA, 25 bp, Saccharomyces pastorianus
gtatttctaacgataatggccatta

SEQ ID NO: 12107 - DNA, 25 bp, Saccharomyces pastorianus
gatgacgatgaatccaacggcaaca

SEQ ID NO: 12108 - DNA, 25 bp, Saccharomyces pastorianus
atggccattatgagctagacgttga

SEQ ID NO: 12109 - DNA, 25 bp, Saccharomyces pastorianus
ttagcacaactcatggacgattcac

SEQ ID NO: 12110 - DNA, 25 bp, Saccharomyces pastorianus
tatggtggctctgacttagtgacta

SEQ ID NO: 12111 - DNA, 25 bp, Saccharomyces pastorianus
gaaactagcgttctggctactgcaa

SEQ ID NO: 12112 - DNA, 25 bp, Saccharomyces pastorianus
aaatatgcccacgatcaaagctttg

SEQ ID NO: 12113 - DNA, 25 bp, Saccharomyces pastorianus
aaggtcctaattgttgcctgtgaca

SEQ ID NO: 12114 - DNA, 25 bp, Saccharomyces pastorianus
gacgattcacatgtgcgtggttcta

SEQ ID NO: 12115 - DNA, 25 bp, Saccharomyces pastorianus
gatctggtgcagtcgaacaacttag

SEQ ID NO: 12116 - DNA, 25 bp, Saccharomyces pastorianus
atgtcgccattgaaatcgtttgctg

SEQ ID NO: 12117 - DNA, 25 bp, Saccharomyces pastorianus
gtttgctgaccaggctaaaccagat

SEQ ID NO: 12118 - DNA, 25 bp, Saccharomyces pastorianus
gcctgtgacacgttcagatctggtg

SEQ ID NO: 12119 - DNA, 25 bp, Saccharomyces pastorianus
gtaggtacagattccgtccaacaag

SEQ ID NO: 12120 - DNA, 25 bp, Saccharomyces pastorianus
aaagagatatagacatgccatgacc

SEQ ID NO: 12121 - DNA, 25 bp, Saccharomyces pastorianus
gaatctacattagcaaccaagttga

SEQ ID NO: 12122 - DNA, 25 bp, Saccharomyces pastorianus
aagttcccgtagaaagctcaaagag

SEQ ID NO: 12123 - DNA, 25 bp, Saccharomyces pastorianus
aagcactacaggaagccaatgcgga

SEQ ID NO: 12124 - DNA, 25 bp, Saccharomyces pastorianus
gatgaattacgtttccaatatcaaa

SEQ ID NO: 12125 - DNA, 25 bp, Saccharomyces pastorianus
ctgcggaatcagctcaaactttgaa

SEQ ID NO: 12126 - DNA, 25 bp, Saccharomyces pastorianus
gtgtcccggaaatagttcatctgaa

SEQ ID NO: 12127 - DNA, 25 bp, Saccharomyces pastorianus
cgctacaactagtacacggttcaga

SEQ ID NO: 12128 - DNA, 25 bp, Saccharomyces pastorianus
gccatgaccgaatctaccaagctag

SEQ ID NO: 12129 - DNA, 25 bp, Saccharomyces pastorianus
gaatcttcaaaagctgcggaatcag

SEQ ID NO: 12130 - DNA, 25 bp, Saccharomyces pastorianus
gaactttagtgaattgtgtcccgga

SEQ ID NO: 12131 - DNA, 25 bp, Saccharomyces pastorianus
aacgggcatgtctggtacagcggac

SEQ ID NO: 12132 - DNA, 25 bp, Saccharomyces pastorianus
gaagatgttcgagggcagcgcacaa

SEQ ID NO: 12133 - DNA, 25 bp, Saccharomyces pastorianus
ccgccccaagtgtacattttcagga

SEQ ID NO: 12134 - DNA, 25 bp, Saccharomyces pastorianus
tttttcgcagaaccagcttgacaag

SEQ ID NO: 12135 - DNA, 25 bp, Saccharomyces pastorianus
tgtaccaaaacctctgccgattgag

SEQ ID NO: 12136 - DNA, 25 bp, Saccharomyces pastorianus
attaccagcagagcgtccaactgta

SEQ ID NO: 12137 - DNA, 25 bp, Saccharomyces pastorianus
cagcggacaatataggcccacgttt

SEQ ID NO: 12138 - DNA, 25 bp, Saccharomyces pastorianus
aagtgctgtattctcagttccccaa

SEQ ID NO: 12139 - DNA, 25 bp, Saccharomyces pastorianus
aaaatactggagctccggcgtgttc

SEQ ID NO: 12140 - DNA, 25 bp, Saccharomyces pastorianus
cttgacaagctgttcgtgaggccga

SEQ ID NO: 12141 - DNA, 25 bp, Saccharomyces pastorianus
gccgattgagatatctgcgcgacgt

SEQ ID NO: 12142 - DNA, 25 bp, Saccharomyces pastorianus
aaaggtactgtgacgagtgccgaac

SEQ ID NO: 12143 - DNA, 25 bp, Saccharomyces pastorianus
tggacgggtacgtcgtcaacttgtt

SEQ ID NO: 12144 - DNA, 25 bp, Saccharomyces pastorianus
tgtccctccaccagtgagattattc

SEQ ID NO: 12145 - DNA, 25 bp, Saccharomyces pastorianus
ttctgccttccaatctttgcaaaag

SEQ ID NO: 12146 - DNA, 25 bp, Saccharomyces pastorianus
tattaatgccatcgtggacactcac

SEQ ID NO: 12147 - DNA, 25 bp, Saccharomyces pastorianus
attcatcgattgattctgccttcca

SEQ ID NO: 12148 - DNA, 25 bp, Saccharomyces pastorianus
aaaaccgcggcttccaaagttgctg

SEQ ID NO: 12149 - DNA, 25 bp, Saccharomyces pastorianus
agaatcctgcattgtcgttgcatga

SEQ ID NO: 12150 - DNA, 25 bp, Saccharomyces pastorianus
aactgctttataccaggctgctgcg

SEQ ID NO: 12151 - DNA, 25 bp, Saccharomyces pastorianus
gagtgccgaacctttagatcctaaa

SEQ ID NO: 12152 - DNA, 25 bp, Saccharomyces pastorianus
gactgtcgacttaagtatctctaca

SEQ ID NO: 12153 - DNA, 25 bp, Saccharomyces pastorianus
tgataccagcgaaaacccgtacgtt

SEQ ID NO: 12154 - DNA, 25 bp, Saccharomyces pastorianus
taccagagctggcatctcaaaatgt

SEQ ID NO: 12155 - DNA, 25 bp, Saccharomyces pastorianus
agaggaggaccaacatgccggagaa

SEQ ID NO: 12156 - DNA, 25 bp, Saccharomyces pastorianus
ctctgttcaagatcctatagcaaat

SEQ ID NO: 12157 - DNA, 25 bp, Saccharomyces pastorianus
attatgaagcacctatttcttcggg

SEQ ID NO: 12158 - DNA, 25 bp, Saccharomyces pastorianus
gcagctattacaatcactacggcca

SEQ ID NO: 12159 - DNA, 25 bp, Saccharomyces pastorianus
gataataactccattgataccagcg

SEQ ID NO: 12160 - DNA, 25 bp, Saccharomyces pastorianus
tacggccaattctcgctcgaataac

SEQ ID NO: 12161 - DNA, 25 bp, Saccharomyces pastorianus
gatgacgggctcgatattccaaaaa

SEQ ID NO: 12162 - DNA, 25 bp, Saccharomyces pastorianus
tttttgcagggctaatgggccaaag

SEQ ID NO: 12163 - DNA, 25 bp, Saccharomyces pastorianus
aaacatcgacacgaaggcttccaaa

SEQ ID NO: 12164 - DNA, 25 bp, Saccharomyces pastorianus
tgctcaagttccatcgtttcagaat

SEQ ID NO: 12165 - DNA, 25 bp, Saccharomyces pastorianus
tgaggaatttggctctgctcaagtt

SEQ ID NO: 12166 - DNA, 25 bp, Saccharomyces pastorianus
gatcattgaccgagaattacagtta

SEQ ID NO: 12167 - DNA, 25 bp, Saccharomyces pastorianus
tattcaagctagttcctttaagcga

SEQ ID NO: 12168 - DNA, 25 bp, Saccharomyces pastorianus
tttctatcagatgggtcacgcaatg

SEQ ID NO: 12169 - DNA, 25 bp, Saccharomyces pastorianus
aagcaggacgacaggcacattttga

SEQ ID NO: 12170 - DNA, 25 bp, Saccharomyces pastorianus
aagattggccaatgatttctatcag

SEQ ID NO: 12171 - DNA, 25 bp, Saccharomyces pastorianus
tatacgaagattcagcgggctagct

SEQ ID NO: 12172 - DNA, 25 bp, Saccharomyces pastorianus
ttcacgttgcattccgttaatagtt

SEQ ID NO: 12173 - DNA, 25 bp, Saccharomyces pastorianus
aggtggactaaatcctcgtatggaa

SEQ ID NO: 12174 - DNA, 25 bp, Saccharomyces pastorianus
aagtcgacggatctgtattcaagct

SEQ ID NO: 12175 - DNA, 25 bp, Saccharomyces pastorianus
taagccttttaatacctgcacaaat

SEQ ID NO: 12176 - DNA, 25 bp, Saccharomyces pastorianus
aatatagatcacgatcgtccgcctg

SEQ ID NO: 12177 - DNA, 25 bp, Saccharomyces pastorianus
tgctttcttagcatatcctgcagtt

SEQ ID NO: 12178 - DNA, 25 bp, Saccharomyces pastorianus
agaattggccaaccccgattgttat

SEQ ID NO: 12179 - DNA, 25 bp, Saccharomyces pastorianus
aaccgttctatttggtgcaccattg

SEQ ID NO: 12180 - DNA, 25 bp, Saccharomyces pastorianus
gacacctctaatgacttttccatat

SEQ ID NO: 12181 - DNA, 25 bp, Saccharomyces pastorianus
tgggtgccacatttctgttgagttt

SEQ ID NO: 12182 - DNA, 25 bp, Saccharomyces pastorianus
attgtctttgatttgcctgggtgcc

SEQ ID NO: 12183 - DNA, 25 bp, Saccharomyces pastorianus
atatcacttgatactactgctctat

SEQ ID NO: 12184 - DNA, 25 bp, Saccharomyces pastorianus
gaaacttggttattgtcgttgcatt

SEQ ID NO: 12185 - DNA, 25 bp, Saccharomyces pastorianus
gatcgtccgcctgtatatgtaagaa

SEQ ID NO: 12186 - DNA, 25 bp, Saccharomyces pastorianus
gatcgtttgagtcttctgaagcggt

SEQ ID NO: 12187 - DNA, 25 bp, Saccharomyces pastorianus
gttagcgttataccaaagatcgttt

SEQ ID NO: 12188 - DNA, 25 bp, Saccharomyces pastorianus
aaatatcaaatttgccggtcatgaa

SEQ ID NO: 12189 - DNA, 25 bp, Saccharomyces pastorianus
gaggtacaggtactacgaccactgt

SEQ ID NO: 12190 - DNA, 25 bp, Saccharomyces pastorianus
gcaagaccttgcctgtaactaattc

SEQ ID NO: 12191 - DNA, 25 bp, Saccharomyces pastorianus
gacagtaaccacagtaacaacgaca

SEQ ID NO: 12192 - DNA, 25 bp, Saccharomyces pastorianus
actctggtcttgatgctgttagcgt

SEQ ID NO: 12193 - DNA, 25 bp, Saccharomyces pastorianus
gaggccaatttggagaatttcggtt

SEQ ID NO: 12194 - DNA, 25 bp, Saccharomyces pastorianus
acgaccactgttgataatgaggcca

SEQ ID NO: 12195 - DNA, 25 bp, Saccharomyces pastorianus
acaactctaccaataacggattcag

SEQ ID NO: 12196 - DNA, 25 bp, Saccharomyces pastorianus
attgcggttctgcaaactctggtct

SEQ ID NO: 12197 - DNA, 25 bp, Saccharomyces pastorianus
aggacaccaacggatcgcaattctt

SEQ ID NO: 12198 - DNA, 25 bp, Saccharomyces pastorianus
gtcatgggtctatatggcctcacca

SEQ ID NO: 12199 - DNA, 25 bp, Saccharomyces pastorianus
ggtagattgtccatggccaaccgtg

SEQ ID NO: 12200 - DNA, 25 bp, Saccharomyces pastorianus
gttcggaccctgagatcacacataa

SEQ ID NO: 12201 - DNA, 25 bp, Saccharomyces pastorianus
ggtgattttacccacagatctggaa

SEQ ID NO: 12202 - DNA, 25 bp, Saccharomyces pastorianus
acatgcccgtgaaggaagtctctat

SEQ ID NO: 12203 - DNA, 25 bp, Saccharomyces pastorianus
aagatgggttacctgcactctatct

SEQ ID NO: 12204 - DNA, 25 bp, Saccharomyces pastorianus
tcttccaccgtgttattccaaattt

SEQ ID NO: 12205 - DNA, 25 bp, Saccharomyces pastorianus
aaatcggtcgtatcgtcatgggtct

SEQ ID NO: 12206 - DNA, 25 bp, Saccharomyces pastorianus
gtggaaaacttctaccaactcacca

SEQ ID NO: 12207 - DNA, 25 bp, Saccharomyces pastorianus
aagtctatctttgggaactccttca

SEQ ID NO: 12208 - DNA, 25 bp, Saccharomyces pastorianus
gaggttgccgatttagtagtttctt

SEQ ID NO: 12209 - DNA, 25 bp, Saccharomyces pastorianus
tgctccaagtggtgtttttctgaat

SEQ ID NO: 12210 - DNA, 25 bp, Saccharomyces pastorianus
gaccatttgtgtttctcctaagtta

SEQ ID NO: 12211 - DNA, 25 bp, Saccharomyces pastorianus
aggctaccctgcttaaagaccattt

SEQ ID NO: 12212 - DNA, 25 bp, Saccharomyces pastorianus
aattccttggatcacgttttcacat

SEQ ID NO: 12213 - DNA, 25 bp, Saccharomyces pastorianus
attctcttactgtcctcaaatcaca

SEQ ID NO: 12214 - DNA, 25 bp, Saccharomyces pastorianus
gaaattgacgcacttgtcctttccc

SEQ ID NO: 12215 - DNA, 25 bp, Saccharomyces pastorianus
agctgtctattttctcgttgttatc

SEQ ID NO: 12216 - DNA, 25 bp, Saccharomyces pastorianus
ggtccttgggtttggcttctaagat

SEQ ID NO: 12217 - DNA, 25 bp, Saccharomyces pastorianus
actgccagggcttccaagatattga

SEQ ID NO: 12218 - DNA, 25 bp, Saccharomyces pastorianus
gatgacctgaccatagccatattag

SEQ ID NO: 12219 - DNA, 25 bp, Saccharomyces pastorianus
gaatagctcttcttttgttaaacga

SEQ ID NO: 12220 - DNA, 25 bp, Saccharomyces pastorianus
aatgccgatctagcgcagtttgcta

SEQ ID NO: 12221 - DNA, 25 bp, Saccharomyces pastorianus
acgagtgctatgacaaccttctaca

SEQ ID NO: 12222 - DNA, 25 bp, Saccharomyces pastorianus
gtgcctgtgcgttttccattataaa

SEQ ID NO: 12223 - DNA, 25 bp, Saccharomyces pastorianus
aaatacgcccgctgcactgaacgat

SEQ ID NO: 12224 - DNA, 25 bp, Saccharomyces pastorianus
gggccagaatgtggaagctctcgaa

SEQ ID NO: 12225 - DNA, 25 bp, Saccharomyces pastorianus
gacccaagactatcgcaagtcgcga

SEQ ID NO: 12226 - DNA, 25 bp, Saccharomyces pastorianus
gaaagcgcaaatgaccgcagctcaa

SEQ ID NO: 12227 - DNA, 25 bp, Saccharomyces pastorianus
gctagtctataagataccgcccatc

SEQ ID NO: 12228 - DNA, 25 bp, Saccharomyces pastorianus
aggaatgtcccatctgttttgaaga

SEQ ID NO: 12229 - DNA, 25 bp, Saccharomyces pastorianus
ttttgccccatttgtaatgccgatc

SEQ ID NO: 12230 - DNA, 25 bp, Saccharomyces pastorianus
gattcgagttggttgcactcaacaa

SEQ ID NO: 12231 - DNA, 25 bp, Saccharomyces pastorianus
gggctctccctttgggatagtttat

SEQ ID NO: 12232 - DNA, 25 bp, Saccharomyces pastorianus
tttcagacagaaacagggccacgct

SEQ ID NO: 12233 - DNA, 25 bp, Saccharomyces pastorianus
ttgggcaatactaggccgttccatt

SEQ ID NO: 12234 - DNA, 25 bp, Saccharomyces pastorianus
gacaataaacctgacggattcgagt

SEQ ID NO: 12235 - DNA, 25 bp, Saccharomyces pastorianus
ggccacgctattcccaaaatcgaaa

SEQ ID NO: 12236 - DNA, 25 bp, Saccharomyces pastorianus
gcgaacagacaatgaagacccctaa

SEQ ID NO: 12237 - DNA, 25 bp, Saccharomyces pastorianus
gatgacgatgtcaagggtctcataa

SEQ ID NO: 12238 - DNA, 25 bp, Saccharomyces pastorianus
cgttccattttacctggtgccagac

SEQ ID NO: 12239 - DNA, 25 bp, Saccharomyces pastorianus
atgaccacttcggttacgagcatgt

SEQ ID NO: 12240 - DNA, 25 bp, Saccharomyces pastorianus
ggtgccagaccattaaaacgtaaga

SEQ ID NO: 12241 - DNA, 25 bp, Saccharomyces pastorianus
accacttggtgtattgttgctaaaa

SEQ ID NO: 12242 - DNA, 25 bp, Saccharomyces pastorianus
tcacatcaactcgatcaccttttta

SEQ ID NO: 12243 - DNA, 25 bp, Saccharomyces pastorianus
gatcacctttttagactcatctgaa

SEQ ID NO: 12244 - DNA, 25 bp, Saccharomyces pastorianus
ttcggcttgtgttcccacgaggatc

SEQ ID NO: 12245 - DNA, 25 bp, Saccharomyces pastorianus
atacaattgtggaggccttcggctt

SEQ ID NO: 12246 - DNA, 25 bp, Saccharomyces pastorianus
gtggagaaatacctacagtcgagta

SEQ ID NO: 12247 - DNA, 25 bp, Saccharomyces pastorianus
gcaacgaaaggtaagtcccctcaag

SEQ ID NO: 12248 - DNA, 25 bp, Saccharomyces pastorianus
gggctgtagatggaaccttgattta

SEQ ID NO: 12249 - DNA, 25 bp, Saccharomyces pastorianus
aacggacgcacttgggtaccacttg

SEQ ID NO: 12250 - DNA, 25 bp, Saccharomyces pastorianus
aaggctgcctttgttgttgggaaag

SEQ ID NO: 12251 - DNA, 25 bp, Saccharomyces pastorianus
gagggttattttactggagcacggt

SEQ ID NO: 12252 - DNA, 25 bp, Saccharomyces pastorianus
ttcttccttagtttgactctactgc

SEQ ID NO: 12253 - DNA, 25 bp, Saccharomyces pastorianus
taccactgccgatatcgagttctga

SEQ ID NO: 12254 - DNA, 25 bp, Saccharomyces pastorianus
aaatgggttcgagcttgccttgtta

SEQ ID NO: 12255 - DNA, 25 bp, Saccharomyces pastorianus
atctggatctgcattctctgggtta

SEQ ID NO: 12256 - DNA, 25 bp, Saccharomyces pastorianus
ttatcctatagtaatcgtcggcccc

SEQ ID NO: 12257 - DNA, 25 bp, Saccharomyces pastorianus
gaaactggctctacatatttatcct

SEQ ID NO: 12258 - DNA, 25 bp, Saccharomyces pastorianus
cggcccctgctccaaaatagagtga

SEQ ID NO: 12259 - DNA, 25 bp, Saccharomyces pastorianus
gagcttgccttgttattatcagtgt

SEQ ID NO: 12260 - DNA, 25 bp, Saccharomyces pastorianus
gttactgccatttactaccatacga

SEQ ID NO: 12261 - DNA, 25 bp, Saccharomyces pastorianus
gctagactggatgtactaccactgc

SEQ ID NO: 12262 - DNA, 25 bp, Saccharomyces pastorianus
gtgattattactatggctgcccaat

SEQ ID NO: 12263 - DNA, 25 bp, Saccharomyces pastorianus
tatacgccatttgttagccaacctg

SEQ ID NO: 12264 - DNA, 25 bp, Saccharomyces pastorianus
aatgaagaagccaacttcctctcct

SEQ ID NO: 12265 - DNA, 25 bp, Saccharomyces pastorianus
agacgcaccctgacaagataccaaa

SEQ ID NO: 12266 - DNA, 25 bp, Saccharomyces pastorianus
tagccaacctgtctagtctactaac

SEQ ID NO: 12267 - DNA, 25 bp, Saccharomyces pastorianus
tcccgttgacaacgcttcgagagta

SEQ ID NO: 12268 - DNA, 25 bp, Saccharomyces pastorianus
accaactccggcaccaatgaagaag

SEQ ID NO: 12269 - DNA, 25 bp, Saccharomyces pastorianus
gcgcgctgaatctttcgagcattta

SEQ ID NO: 12270 - DNA, 25 bp, Saccharomyces pastorianus
aaagatcatgattaggcgcgctgaa

SEQ ID NO: 12271 - DNA, 25 bp, Saccharomyces pastorianus
ttcctgtaaggaaacccagtcctgt

SEQ ID NO: 12272 - DNA, 25 bp, Saccharomyces pastorianus
agctttgttaatcctattcctgtaa

SEQ ID NO: 12273 - DNA, 25 bp, Saccharomyces pastorianus
gtctctgatagaattggctgctgga

SEQ ID NO: 12274 - DNA, 25 bp, Saccharomyces pastorianus
gtgcaggccaatatactgtcgcgca

SEQ ID NO: 12275 - DNA, 25 bp, Saccharomyces pastorianus
gaaccaggagcttgtgaccatcaat

SEQ ID NO: 12276 - DNA, 25 bp, Saccharomyces pastorianus
gattatgggtgcgatttgtgacaac

SEQ ID NO: 12277 - DNA, 25 bp, Saccharomyces pastorianus
gtgaccatcaataatcggaacaaga

SEQ ID NO: 12278 - DNA, 25 bp, Saccharomyces pastorianus
ttgtgacaactaccacagcagcgtt

SEQ ID NO: 12279 - DNA, 25 bp, Saccharomyces pastorianus
agagtgtggcgatcctgaaccagga

SEQ ID NO: 12280 - DNA, 25 bp, Saccharomyces pastorianus
gagaaccctcacgaacaagtgcagg

SEQ ID NO: 12281 - DNA, 25 bp, Saccharomyces pastorianus
acagcagcgttcagttcaacctgga

SEQ ID NO: 12282 - DNA, 25 bp, Saccharomyces pastorianus
atactgtcgcgcataattggtaatg

SEQ ID NO: 12283 - DNA, 25 bp, Saccharomyces pastorianus
ttggtaatgttaagaggctcaacga

SEQ ID NO: 12284 - DNA, 25 bp, Saccharomyces pastorianus
gctcaacgagagtgtggcgatcctg

SEQ ID NO: 12285 - DNA, 25 bp, Saccharomyces pastorianus
ggaatacgccaagttgcagcctgca

SEQ ID NO: 12286 - DNA, 25 bp, Saccharomyces pastorianus
actattgcggtcaatttggaagatc

SEQ ID NO: 12287 - DNA, 25 bp, Saccharomyces pastorianus
gaggaacaagcacaatacgatgaaa

SEQ ID NO: 12288 - DNA, 25 bp, Saccharomyces pastorianus
tgcagcctgcagcaactcttaagga

SEQ ID NO: 12289 - DNA, 25 bp, Saccharomyces pastorianus
aaggacacacctgctactattgcgg

SEQ ID NO: 12290 - DNA, 25 bp, Saccharomyces pastorianus
acctgctactattgcggtcaatttg

SEQ ID NO: 12291 - DNA, 25 bp, Saccharomyces pastorianus
gaagatcctaacattgatttcgaaa

SEQ ID NO: 12292 - DNA, 25 bp, Saccharomyces pastorianus
cggttaatgtcttgaggtactctgc

SEQ ID NO: 12293 - DNA, 25 bp, Saccharomyces pastorianus
gcaactcttaaggacacacctgcta

SEQ ID NO: 12294 - DNA, 25 bp, Saccharomyces pastorianus
ctgcagcaactcttaaggacacacc

SEQ ID NO: 12295 - DNA, 25 bp, Saccharomyces pastorianus
acacacctgctactattgcggtcaa

SEQ ID NO: 12296 - DNA, 25 bp, Saccharomyces pastorianus
ccgaaatgatcagaggcaggtcccc

SEQ ID NO: 12297 - DNA, 25 bp, Saccharomyces pastorianus
ggcagaacaccacagggactccaat

SEQ ID NO: 12298 - DNA, 25 bp, Saccharomyces pastorianus
agcaacttacagaacaactccgatt

SEQ ID NO: 12299 - DNA, 25 bp, Saccharomyces pastorianus
tagcttctagtgttgttctcgtgag

SEQ ID NO: 12300 - DNA, 25 bp, Saccharomyces pastorianus
cagaaggtcatcgagtgggcagaac

SEQ ID NO: 12301 - DNA, 25 bp, Saccharomyces pastorianus
cccagaggaggaagccgccatcaga

SEQ ID NO: 12302 - DNA, 25 bp, Saccharomyces pastorianus
acgcgggctgcaaagttgttgccga

SEQ ID NO: 12303 - DNA, 25 bp, Saccharomyces pastorianus
tgaaatcatcctggcggcaaactac

SEQ ID NO: 12304 - DNA, 25 bp, Saccharomyces pastorianus
tccgaggccaaccacaagagcaaag

SEQ ID NO: 12305 - DNA, 25 bp, Saccharomyces pastorianus
acgatgattccagaaagagcgcccc

SEQ ID NO: 12306 - DNA, 25 bp, Saccharomyces pastorianus
taacatcaagccgttgctggacgcg

SEQ ID NO: 12307 - DNA, 25 bp, Saccharomyces pastorianus
atactcacatcactctgacgtggaa

SEQ ID NO: 12308 - DNA, 25 bp, Saccharomyces pastorianus
ttgacagactcactaaacgctttaa

SEQ ID NO: 12309 - DNA, 25 bp, Saccharomyces pastorianus
ataaagactacattggtactgccca

SEQ ID NO: 12310 - DNA, 25 bp, Saccharomyces pastorianus
atgaaaatttctcctcctcgaagtt

SEQ ID NO: 12311 - DNA, 25 bp, Saccharomyces pastorianus
aagcctctttcgttaagccattatc

SEQ ID NO: 12312 - DNA, 25 bp, Saccharomyces pastorianus
aatgtgttggatttggccctagaaa

SEQ ID NO: 12313 - DNA, 25 bp, Saccharomyces pastorianus
aacattttggccgtgggttctagtg

SEQ ID NO: 12314 - DNA, 25 bp, Saccharomyces pastorianus
aggatccattcgcatgtaggtgtta

SEQ ID NO: 12315 - DNA, 25 bp, Saccharomyces pastorianus
ggtcgctgtcatcgatagattcaca

SEQ ID NO: 12316 - DNA, 25 bp, Saccharomyces pastorianus
gccttttccaagcaatcagttacat

SEQ ID NO: 12317 - DNA, 25 bp, Saccharomyces pastorianus
gtaattcccgatgactcaaagcctc

SEQ ID NO: 12318 - DNA, 25 bp, Saccharomyces pastorianus
aagaatatccatcggctagagcatt

SEQ ID NO: 12319 - DNA, 25 bp, Saccharomyces pastorianus
gatttgaatattcttgccccatttt

SEQ ID NO: 12320 - DNA, 25 bp, Saccharomyces pastorianus
taagggccagagagcactcatgatt

SEQ ID NO: 12321 - DNA, 25 bp, Saccharomyces pastorianus
gagacatgttagatgatccgaatat

SEQ ID NO: 12322 - DNA, 25 bp, Saccharomyces pastorianus
cctgtatgtcttcaccgttatattc

SEQ ID NO: 12323 - DNA, 25 bp, Saccharomyces pastorianus
gttagccaacggttacaatattgat

SEQ ID NO: 12324 - DNA, 25 bp, Saccharomyces pastorianus
ggattcttttcatgaagccctgtat

SEQ ID NO: 12325 - DNA, 25 bp, Saccharomyces pastorianus
agagcatttttatttgagttagcca

SEQ ID NO: 12326 - DNA, 25 bp, Saccharomyces pastorianus
aatgttgtctgacttcagttctcaa

SEQ ID NO: 12327 - DNA, 25 bp, Saccharomyces pastorianus
tatagattgggtgaagtcctcaaat

SEQ ID NO: 12328 - DNA, 25 bp, Saccharomyces pastorianus
gtgttcgtttaattctatcctagtg

SEQ ID NO: 12329 - DNA, 25 bp, Saccharomyces pastorianus
tagggaacccgattgtaacacacca

SEQ ID NO: 12330 - DNA, 25 bp, Saccharomyces pastorianus
tgaaatgccaacacttcccagaatt

SEQ ID NO: 12331 - DNA, 25 bp, Saccharomyces pastorianus
aaggacgtgatactagcatcccgcc

SEQ ID NO: 12332 - DNA, 25 bp, Saccharomyces pastorianus
tgactcgcccggttatgggtttaat

SEQ ID NO: 12333 - DNA, 25 bp, Saccharomyces pastorianus
tctcccagacggttcggtatagact

SEQ ID NO: 12334 - DNA, 25 bp, Saccharomyces pastorianus
gttttctgttacttgccggtgataa

SEQ ID NO: 12335 - DNA, 25 bp, Saccharomyces pastorianus
gggaagtgtcactctacaatacctc

SEQ ID NO: 12336 - DNA, 25 bp, Saccharomyces pastorianus
aactcgcttacatctagtacgtctc

SEQ ID NO: 12337 - DNA, 25 bp, Saccharomyces pastorianus
aactcaggatgattgactcgcccgg

SEQ ID NO: 12338 - DNA, 25 bp, Saccharomyces pastorianus
tgaacatggcgttcctttcgaggtt

SEQ ID NO: 12339 - DNA, 25 bp, Saccharomyces pastorianus
ataaccacctcaatcctaagcaaag

SEQ ID NO: 12340 - DNA, 25 bp, Saccharomyces pastorianus
actagccgtagatttggcacgtaag

SEQ ID NO: 12341 - DNA, 25 bp, Saccharomyces pastorianus
gaaccgcttgttctttcaaaaggct

SEQ ID NO: 12342 - DNA, 25 bp, Saccharomyces pastorianus
acaagtttcttgtagctattgaatc

SEQ ID NO: 12343 - DNA, 25 bp, Saccharomyces pastorianus
ggcgacacaggctccagtgaagttc

SEQ ID NO: 12344 - DNA, 25 bp, Saccharomyces pastorianus
gctattgaatctgctaaacgtgaaa

SEQ ID NO: 12345 - DNA, 25 bp, Saccharomyces pastorianus
aacgatgctgctataacggatgaat

SEQ ID NO: 12346 - DNA, 25 bp, Saccharomyces pastorianus
aagaacgctattaaactagccgtag

SEQ ID NO: 12347 - DNA, 25 bp, Saccharomyces pastorianus
attatggccgagctaaaagaaccgc

SEQ ID NO: 12348 - DNA, 25 bp, Saccharomyces pastorianus
gttcaagcagcctgtatgactgttc

SEQ ID NO: 12349 - DNA, 25 bp, Saccharomyces pastorianus
gaagcaagacgtgaggctattttga

SEQ ID NO: 12350 - DNA, 25 bp, Saccharomyces pastorianus
atttgaaagattcccgggcgacaca

SEQ ID NO: 12351 - DNA, 25 bp, Saccharomyces pastorianus
ttgcgggatcatgtctcagaggtca

SEQ ID NO: 12352 - DNA, 25 bp, Saccharomyces pastorianus
tatggtcccttttgcgatcggtata

SEQ ID NO: 12353 - DNA, 25 bp, Saccharomyces pastorianus
gaactgatttcgctcacatttcttc

SEQ ID NO: 12354 - DNA, 25 bp, Saccharomyces pastorianus
cattctcatttattgccggatttgt

SEQ ID NO: 12355 - DNA, 25 bp, Saccharomyces pastorianus
cgattcacttaatgctgttgcggga

SEQ ID NO: 12356 - DNA, 25 bp, Saccharomyces pastorianus
tgcagtatccactatggcagcatta

SEQ ID NO: 12357 - DNA, 25 bp, Saccharomyces pastorianus
ggcagcattactttatatggtccct

SEQ ID NO: 12358 - DNA, 25 bp, Saccharomyces pastorianus
gaagttgtacggtctctggattggt

SEQ ID NO: 12359 - DNA, 25 bp, Saccharomyces pastorianus
gcatactacctatttgggattccat

SEQ ID NO: 12360 - DNA, 25 bp, Saccharomyces pastorianus
gatcggtatatctgcctctacgaga

SEQ ID NO: 12361 - DNA, 25 bp, Saccharomyces pastorianus
ggcttggtcgaatcctactatgtat

SEQ ID NO: 12362 - DNA, 25 bp, Saccharomyces pastorianus
gaagaccctgagttaaccagaaaca

SEQ ID NO: 12363 - DNA, 25 bp, Saccharomyces pastorianus
aactggctcgcgatccaaggataaa

SEQ ID NO: 12364 - DNA, 25 bp, Saccharomyces pastorianus
ataccacaagtgtcgagtgctcttt

SEQ ID NO: 12365 - DNA, 25 bp, Saccharomyces pastorianus
ttgtggctacgaacgatgctggttt

SEQ ID NO: 12366 - DNA, 25 bp, Saccharomyces pastorianus
gtgtaatccgttaatcacagactgt

SEQ ID NO: 12367 - DNA, 25 bp, Saccharomyces pastorianus
tggactgccttctcgcaaagtgtaa

SEQ ID NO: 12368 - DNA, 25 bp, Saccharomyces pastorianus
gtattgctttgaaactggctcgcga

SEQ ID NO: 12369 - DNA, 25 bp, Saccharomyces pastorianus
aagctgctcgcacaagggtacatat

SEQ ID NO: 12370 - DNA, 25 bp, Saccharomyces pastorianus
gttgggacctaaataccgtattgct

SEQ ID NO: 12371 - DNA, 25 bp, Saccharomyces pastorianus
cgagtgctcttttcttccaatataa

SEQ ID NO: 12372 - DNA, 25 bp, Saccharomyces pastorianus
aattcccggcattccattaatgagt

SEQ ID NO: 12373 - DNA, 25 bp, Saccharomyces pastorianus
gactcatgaaccaacgactgtggta

SEQ ID NO: 12374 - DNA, 25 bp, Saccharomyces pastorianus
ttattgggtcaatatcccgatgttt

SEQ ID NO: 12375 - DNA, 25 bp, Saccharomyces pastorianus
gagaaatgccatcaagactcatgaa

SEQ ID NO: 12376 - DNA, 25 bp, Saccharomyces pastorianus
gaaggtgacactggcccatacttac

SEQ ID NO: 12377 - DNA, 25 bp, Saccharomyces pastorianus
gacttctcattgttaagcgaacctg

SEQ ID NO: 12378 - DNA, 25 bp, Saccharomyces pastorianus
cgtttggctctatatggcgctgcta

SEQ ID NO: 12379 - DNA, 25 bp, Saccharomyces pastorianus
gcgaacctgctgctatattgctaat

SEQ ID NO: 12380 - DNA, 25 bp, Saccharomyces pastorianus
aagaaatgcttctggaattaccgaa

SEQ ID NO: 12381 - DNA, 25 bp, Saccharomyces pastorianus
tatggcgctgctagacaagtcttgt

SEQ ID NO: 12382 - DNA, 25 bp, Saccharomyces pastorianus
gaaagggaactgtcgtattcttaga

SEQ ID NO: 12383 - DNA, 25 bp, Saccharomyces pastorianus
ggcccatacttacaatacgctcatt

SEQ ID NO: 12384 - DNA, 25 bp, Saccharomyces pastorianus
gtacacagttgatcgttttggtcgt

SEQ ID NO: 12385 - DNA, 25 bp, Saccharomyces pastorianus
cgcttccgtcggtgttactaaattg

SEQ ID NO: 12386 - DNA, 25 bp, Saccharomyces pastorianus
tttgctatacggtgccatcggtatg

SEQ ID NO: 12387 - DNA, 25 bp, Saccharomyces pastorianus
agaagtcaacgatatgtatgccgaa

SEQ ID NO: 12388 - DNA, 25 bp, Saccharomyces pastorianus
tcctgggttcctgcctctaagagag

SEQ ID NO: 12389 - DNA, 25 bp, Saccharomyces pastorianus
ggttttcgcatacttctatgtcttc

SEQ ID NO: 12390 - DNA, 25 bp, Saccharomyces pastorianus
tggtcgtcgtaactgtttgctatac

SEQ ID NO: 12391 - DNA, 25 bp, Saccharomyces pastorianus
ggctccaatcgcttatgttgttatc

SEQ ID NO: 12392 - DNA, 25 bp, Saccharomyces pastorianus
tatgttgttatctccgaaactttcc

SEQ ID NO: 12393 - DNA, 25 bp, Saccharomyces pastorianus
tgttttgccatggaagtctgcttcc

SEQ ID NO: 12394 - DNA, 25 bp, Saccharomyces pastorianus
tatgtatgccgaaggtgttttgcca

SEQ ID NO: 12395 - DNA, 25 bp, Saccharomyces pastorianus
gaagtcttggccttaacaactaaca

SEQ ID NO: 12396 - DNA, 25 bp, Saccharomyces pastorianus
tctgctctgttgatggaattcacta

SEQ ID NO: 12397 - DNA, 25 bp, Saccharomyces pastorianus
tgtcaagaatatcgtctctggtgtt

SEQ ID NO: 12398 - DNA, 25 bp, Saccharomyces pastorianus
tacgccaacactaagatttctgccg

SEQ ID NO: 12399 - DNA, 25 bp, Saccharomyces pastorianus
atgctgtcattgaaggtccattgaa

SEQ ID NO: 12400 - DNA, 25 bp, Saccharomyces pastorianus
agtcgattccgttggctggaaagtt

SEQ ID NO: 12401 - DNA, 25 bp, Saccharomyces pastorianus
gagcatttggactcggaagtcgatt

SEQ ID NO: 12402 - DNA, 25 bp, Saccharomyces pastorianus
tatgaaacctcatcacgcggctaaa

SEQ ID NO: 12403 - DNA, 25 bp, Saccharomyces pastorianus
gcggctaaagcatggaatttcttgt

SEQ ID NO: 12404 - DNA, 25 bp, Saccharomyces pastorianus
atttctgccggtattgttactgacg

SEQ ID NO: 12405 - DNA, 25 bp, Saccharomyces pastorianus
atgggtgaagttccaaattttgtca

SEQ ID NO: 12406 - DNA, 25 bp, Saccharomyces pastorianus
ctactactgaactcgaatctggcca

SEQ ID NO: 12407 - DNA, 25 bp, Saccharomyces pastorianus
gaagcgttacttcaaaccccagact

SEQ ID NO: 12408 - DNA, 25 bp, Saccharomyces pastorianus
ttgtctcctcatttggttctctaat

SEQ ID NO: 12409 - DNA, 25 bp, Saccharomyces pastorianus
aggtttcatacatcccgttgttagc

SEQ ID NO: 12410 - DNA, 25 bp, Saccharomyces pastorianus
gaacgaacgcttgcaagaggccctt

SEQ ID NO: 12411 - DNA, 25 bp, Saccharomyces pastorianus
tggccatatcaggagacgggtttac

SEQ ID NO: 12412 - DNA, 25 bp, Saccharomyces pastorianus
cgagccattgactaccgggaacgaa

SEQ ID NO: 12413 - DNA, 25 bp, Saccharomyces pastorianus
gcctaaagcgtggttgcctgattat

SEQ ID NO: 12414 - DNA, 25 bp, Saccharomyces pastorianus
taacgtttctacttctggcataatg

SEQ ID NO: 12415 - DNA, 25 bp, Saccharomyces pastorianus
agccattgatgcgtcgcctaaagcg

SEQ ID NO: 12416 - DNA, 25 bp, Saccharomyces pastorianus
tgaacacttataatgccgggacccc

SEQ ID NO: 12417 - DNA, 25 bp, Saccharomyces pastorianus
aatgctcccatgaccggtgttagaa

SEQ ID NO: 12418 - DNA, 25 bp, Saccharomyces pastorianus
tatcctacagactttgacgaccaaa

SEQ ID NO: 12419 - DNA, 25 bp, Saccharomyces pastorianus
tatagcccacatactctgaaaagag

SEQ ID NO: 12420 - DNA, 25 bp, Saccharomyces pastorianus
gttcatggacccgttacagcaggat

SEQ ID NO: 12421 - DNA, 25 bp, Saccharomyces pastorianus
ggccttggaggatctggtgacacta

SEQ ID NO: 12422 - DNA, 25 bp, Saccharomyces pastorianus
accataatcgtactggcggtctaca

SEQ ID NO: 12423 - DNA, 25 bp, Saccharomyces pastorianus
gctttcacagcggttaggccttgga

SEQ ID NO: 12424 - DNA, 25 bp, Saccharomyces pastorianus
tcggcggccatcagaagcgacataa

SEQ ID NO: 12425 - DNA, 25 bp, Saccharomyces pastorianus
aggattaggctccagcacgttttta

SEQ ID NO: 12426 - DNA, 25 bp, Saccharomyces pastorianus
ataaaagcgcactccaaccataatc

SEQ ID NO: 12427 - DNA, 25 bp, Saccharomyces pastorianus
gtaaacccgtcaagcagaactcaca

SEQ ID NO: 12428 - DNA, 25 bp, Saccharomyces pastorianus
atcctctgcatactctgttatcaag

SEQ ID NO: 12429 - DNA, 25 bp, Saccharomyces pastorianus
gtttcagcctcagatgactgtgcac

SEQ ID NO: 12430 - DNA, 25 bp, Saccharomyces pastorianus
agaacatgactctttacccatctta

SEQ ID NO: 12431 - DNA, 25 bp, Saccharomyces pastorianus
atatgtttacggtcccaggtcagtt

SEQ ID NO: 12432 - DNA, 25 bp, Saccharomyces pastorianus
tgtccgcttgagtaacccctatata

SEQ ID NO: 12433 - DNA, 25 bp, Saccharomyces pastorianus
ggctcgtgtggcttcattgatacta

SEQ ID NO: 12434 - DNA, 25 bp, Saccharomyces pastorianus
aggtcagttgacagcggcgtactca

SEQ ID NO: 12435 - DNA, 25 bp, Saccharomyces pastorianus
gttacatcccttacgcaaagacgat

SEQ ID NO: 12436 - DNA, 25 bp, Saccharomyces pastorianus
gcaagtgaaaccaacgcatcctctg

SEQ ID NO: 12437 - DNA, 25 bp, Saccharomyces pastorianus
tacccatcttacaaatccggctata

SEQ ID NO: 12438 - DNA, 25 bp, Saccharomyces pastorianus
aaccagcaccttttcagggagggct

SEQ ID NO: 12439 - DNA, 25 bp, Saccharomyces pastorianus
agatggtttccctgcgcacggcaaa

SEQ ID NO: 12440 - DNA, 25 bp, Saccharomyces pastorianus
cctcgttctatgtgggtgcacgtat

SEQ ID NO: 12441 - DNA, 25 bp, Saccharomyces pastorianus
tacgcgacagacatgcagctcagag

SEQ ID NO: 12442 - DNA, 25 bp, Saccharomyces pastorianus
aaggagatctgccattacggccgcc

SEQ ID NO: 12443 - DNA, 25 bp, Saccharomyces pastorianus
aagttgccagttctttactactccg

SEQ ID NO: 12444 - DNA, 25 bp, Saccharomyces pastorianus
gaacatagcttctgatccatcctat

SEQ ID NO: 12445 - DNA, 25 bp, Saccharomyces pastorianus
agctagtgcatatcctctgaacata

SEQ ID NO: 12446 - DNA, 25 bp, Saccharomyces pastorianus
gttaccatttattttcggaagcgct

SEQ ID NO: 12447 - DNA, 25 bp, Saccharomyces pastorianus
caatactacgtgctttacgcgacag

SEQ ID NO: 12448 - DNA, 25 bp, Saccharomyces pastorianus
gcgctggaactattgcatttgactt

SEQ ID NO: 12449 - DNA, 25 bp, Saccharomyces pastorianus
gaactgggcacaatcctatcctgga

SEQ ID NO: 12450 - DNA, 25 bp, Saccharomyces pastorianus
acggtgctgtcccaatctttagaaa

SEQ ID NO: 12451 - DNA, 25 bp, Saccharomyces pastorianus
gaaactgacttacctgtcaacgggt

SEQ ID NO: 12452 - DNA, 25 bp, Saccharomyces pastorianus
gaaaagaccacttacgtgcttccac

SEQ ID NO: 12453 - DNA, 25 bp, Saccharomyces pastorianus
acgggttattctacgctattggcca

SEQ ID NO: 12454 - DNA, 25 bp, Saccharomyces pastorianus
gaacgtcgacgaagccggctacatt

SEQ ID NO: 12455 - DNA, 25 bp, Saccharomyces pastorianus
aaagaatgcacttgccaggcgagga

SEQ ID NO: 12456 - DNA, 25 bp, Saccharomyces pastorianus
agattgttgccgaccaagtgaacgt

SEQ ID NO: 12457 - DNA, 25 bp, Saccharomyces pastorianus
tcttccttaacttctgttccagggt

SEQ ID NO: 12458 - DNA, 25 bp, Saccharomyces pastorianus
aaagggtatctctgcctgtgccgtt

SEQ ID NO: 12459 - DNA, 25 bp, Saccharomyces pastorianus
tacgtgcttccactatcatgcaaag

SEQ ID NO: 12460 - DNA, 25 bp, Saccharomyces pastorianus
gatcgagatcctttataacactgtt

SEQ ID NO: 12461 - DNA, 25 bp, Saccharomyces pastorianus
aacgataactgatgctttcaaggag

SEQ ID NO: 12462 - DNA, 25 bp, Saccharomyces pastorianus
agcagcagccgtgcacgattacaat

SEQ ID NO: 12463 - DNA, 25 bp, Saccharomyces pastorianus
tggatacaactgagctttgcaagaa

SEQ ID NO: 12464 - DNA, 25 bp, Saccharomyces pastorianus
cattctagagagtcagtttcggctg

SEQ ID NO: 12465 - DNA, 25 bp, Saccharomyces pastorianus
agtgagtggcattatcgaaaatacc

SEQ ID NO: 12466 - DNA, 25 bp, Saccharomyces pastorianus
gagatgttaaaccaattagcaacga

SEQ ID NO: 12467 - DNA, 25 bp, Saccharomyces pastorianus
gagaatagcagcagccgtgcacgat

SEQ ID NO: 12468 - DNA, 25 bp, Saccharomyces pastorianus
taagctgacagttgattacgactac

SEQ ID NO: 12469 - DNA, 25 bp, Saccharomyces pastorianus
gttgattacgactacttactttata

SEQ ID NO: 12470 - DNA, 25 bp, Saccharomyces pastorianus
gtttcggctggcgatgatcctcttg

SEQ ID NO: 12471 - DNA, 25 bp, Saccharomyces pastorianus
atcgtcaaattcgaggagcttctca

SEQ ID NO: 12472 - DNA, 25 bp, Saccharomyces pastorianus
gatattactatcgtctcgaaagagt

SEQ ID NO: 12473 - DNA, 25 bp, Saccharomyces pastorianus
gaaacgagcgggaagaatctgaatt

SEQ ID NO: 12474 - DNA, 25 bp, Saccharomyces pastorianus
aactactgtttgatcatgacgaact

SEQ ID NO: 12475 - DNA, 25 bp, Saccharomyces pastorianus
gaattttgaggcaactttagaatca

SEQ ID NO: 12476 - DNA, 25 bp, Saccharomyces pastorianus
gaaactctacgccatttttcaaagt

SEQ ID NO: 12477 - DNA, 25 bp, Saccharomyces pastorianus
gtaactctttgcatattccgcaaga

SEQ ID NO: 12478 - DNA, 25 bp, Saccharomyces pastorianus
agcaatgtttgcaaaagaacgccaa

SEQ ID NO: 12479 - DNA, 25 bp, Saccharomyces pastorianus
tatgaatgaaccttctttacgagaa

SEQ ID NO: 12480 - DNA, 25 bp, Saccharomyces pastorianus
gacttgtaactctttgcatattccg

SEQ ID NO: 12481 - DNA, 25 bp, Saccharomyces pastorianus
gtgaatgttagaaactctacgccat

SEQ ID NO: 12482 - DNA, 25 bp, Saccharomyces pastorianus
aggttatgaaaattgcccttatggg

SEQ ID NO: 12483 - DNA, 25 bp, Saccharomyces pastorianus
gaaacagggccttgttcagacatat

SEQ ID NO: 12484 - DNA, 25 bp, Saccharomyces pastorianus
ttttaaatgtgcacccgtctcacaa

SEQ ID NO: 12485 - DNA, 25 bp, Saccharomyces pastorianus
gacggtcgttacatatcttcgggcg

SEQ ID NO: 12486 - DNA, 25 bp, Saccharomyces pastorianus
gtgatacagctcaacattccatgcc

SEQ ID NO: 12487 - DNA, 25 bp, Saccharomyces pastorianus
ttggctcttaagtactttcctgatg

SEQ ID NO: 12488 - DNA, 25 bp, Saccharomyces pastorianus
gttcatcgtgggtttatcaaactcc

SEQ ID NO: 12489 - DNA, 25 bp, Saccharomyces pastorianus
atcaaccccagcagatgtcgaatct

SEQ ID NO: 12490 - DNA, 25 bp, Saccharomyces pastorianus
agtagactcttcacatgggattgga

SEQ ID NO: 12491 - DNA, 25 bp, Saccharomyces pastorianus
gcaggctacggtataggcttgtcat

SEQ ID NO: 12492 - DNA, 25 bp, Saccharomyces pastorianus
aggcttgtcattttctggcgacggt

SEQ ID NO: 12493 - DNA, 25 bp, Saccharomyces pastorianus
aaagggcactcttcagcaggctacg

SEQ ID NO: 12494 - DNA, 25 bp, Saccharomyces pastorianus
tggtaagcgtgttcatgacagaaaa

SEQ ID NO: 12495 - DNA, 25 bp, Saccharomyces pastorianus
aggagcgtcgtaaggctagaaagca

SEQ ID NO: 12496 - DNA, 25 bp, Saccharomyces pastorianus
ataaaggtacacaggccatgaataa

SEQ ID NO: 12497 - DNA, 25 bp, Saccharomyces pastorianus
gaggtaagtccaaatctaccaacaa

SEQ ID NO: 12498 - DNA, 25 bp, Saccharomyces pastorianus
gcgattgatccaactcaacctgaat

SEQ ID NO: 12499 - DNA, 25 bp, Saccharomyces pastorianus
ggctgaactagagcttctaatggac

SEQ ID NO: 12500 - DNA, 25 bp, Saccharomyces pastorianus
gttgaagatactttcacacctgatg

SEQ ID NO: 12501 - DNA, 25 bp, Saccharomyces pastorianus
gaaaaaccagttgaaggccaagaag

SEQ ID NO: 12502 - DNA, 25 bp, Saccharomyces pastorianus
tcacacctgatgtggaagatcctag

SEQ ID NO: 12503 - DNA, 25 bp, Saccharomyces pastorianus
aatggacgatgatggcgacgctgaa

SEQ ID NO: 12504 - DNA, 25 bp, Saccharomyces pastorianus
tcacgattttgcgattgatccaact

SEQ ID NO: 12505 - DNA, 25 bp, Saccharomyces pastorianus
tcggtgtctctaatttctctgtcaa

SEQ ID NO: 12506 - DNA, 25 bp, Saccharomyces pastorianus
aatttttactttgcctgaggacgat

SEQ ID NO: 12507 - DNA, 25 bp, Saccharomyces pastorianus
actggcctgtacctctgaaaactga

SEQ ID NO: 12508 - DNA, 25 bp, Saccharomyces pastorianus
agaagcttattcaccatttgggagt

SEQ ID NO: 12509 - DNA, 25 bp, Saccharomyces pastorianus
gatggcgacgttttgtgcattccaa

SEQ ID NO: 12510 - DNA, 25 bp, Saccharomyces pastorianus
gtctccgagcaacaaattggtccca

SEQ ID NO: 12511 - DNA, 25 bp, Saccharomyces pastorianus
tgaaccggcacaacttatcatcagt

SEQ ID NO: 12512 - DNA, 25 bp, Saccharomyces pastorianus
tgtcttagccaaatctgtcaaccct

SEQ ID NO: 12513 - DNA, 25 bp, Saccharomyces pastorianus
gaaattcacccattattgccacaag

SEQ ID NO: 12514 - DNA, 25 bp, Saccharomyces pastorianus
atttgggagtgccaatgccccatta

SEQ ID NO: 12515 - DNA, 25 bp, Saccharomyces pastorianus
agaagatggcactgtcgacgttgac

SEQ ID NO: 12516 - DNA, 25 bp, Saccharomyces pastorianus
aatcaaatttacaaccagacgcggc

SEQ ID NO: 12517 - DNA, 25 bp, Saccharomyces pastorianus
gagtgctgccttcttaatcacgaga

SEQ ID NO: 12518 - DNA, 25 bp, Saccharomyces pastorianus
gacaatgacaatggcgacaacgacg

SEQ ID NO: 12519 - DNA, 25 bp, Saccharomyces pastorianus
gatactacaagtattgtccaaccag

SEQ ID NO: 12520 - DNA, 25 bp, Saccharomyces pastorianus
ttttcgcgtcgctcagatactacaa

SEQ ID NO: 12521 - DNA, 25 bp, Saccharomyces pastorianus
gaaagacttaggacctgatacacat

SEQ ID NO: 12522 - DNA, 25 bp, Saccharomyces pastorianus
aggatgtgctcgctctgacagagat

SEQ ID NO: 12523 - DNA, 25 bp, Saccharomyces pastorianus
gaggacggctttgaattggtcacaa

SEQ ID NO: 12524 - DNA, 25 bp, Saccharomyces pastorianus
gattttatgcccaagattcggatat

SEQ ID NO: 12525 - DNA, 25 bp, Saccharomyces pastorianus
gattttatacggagtgctgccttct

SEQ ID NO: 12526 - DNA, 25 bp, Saccharomyces pastorianus
cagacgcggcagaggaatcttccaa

SEQ ID NO: 12527 - DNA, 25 bp, Saccharomyces pastorianus
gatctcgaactggatcgacctttta

SEQ ID NO: 12528 - DNA, 25 bp, Saccharomyces pastorianus
gccactcacccaattgcagatgcaa

SEQ ID NO: 12529 - DNA, 25 bp, Saccharomyces pastorianus
attttcgcaatatccgttcgactta

SEQ ID NO: 12530 - DNA, 25 bp, Saccharomyces pastorianus
aagcaaccccggtcatgatttacaa

SEQ ID NO: 12531 - DNA, 25 bp, Saccharomyces pastorianus
ggaaggagaaagcaaccccggtcat

SEQ ID NO: 12532 - DNA, 25 bp, Saccharomyces pastorianus
ctttctatttgacatggccactcac

SEQ ID NO: 12533 - DNA, 25 bp, Saccharomyces pastorianus
gagcttggcgtctcagttaatttga

SEQ ID NO: 12534 - DNA, 25 bp, Saccharomyces pastorianus
gagctacaatgaatactttcccgaa

SEQ ID NO: 12535 - DNA, 25 bp, Saccharomyces pastorianus
gatgaacctttaacgatctcgaact

SEQ ID NO: 12536 - DNA, 25 bp, Saccharomyces pastorianus
gcgtagggtactttctgtacttgta

SEQ ID NO: 12537 - DNA, 25 bp, Saccharomyces pastorianus
ggactttggctttgatatgtggatc

SEQ ID NO: 12538 - DNA, 25 bp, Saccharomyces pastorianus
gaattcatcactgttttgagcacga

SEQ ID NO: 12539 - DNA, 25 bp, Saccharomyces pastorianus
aaacagtccacgtatttcgatcgca

SEQ ID NO: 12540 - DNA, 25 bp, Saccharomyces pastorianus
gccccagtggtcaacttaccagaga

SEQ ID NO: 12541 - DNA, 25 bp, Saccharomyces pastorianus
gctgtgttgggcttttgagctttat

SEQ ID NO: 12542 - DNA, 25 bp, Saccharomyces pastorianus
gaagacgaagctacaccggaatcaa

SEQ ID NO: 12543 - DNA, 25 bp, Saccharomyces pastorianus
gatctcctgaggatttcgctaatca

SEQ ID NO: 12544 - DNA, 25 bp, Saccharomyces pastorianus
gggtccatggtcacactaaatgaag

SEQ ID NO: 12545 - DNA, 25 bp, Saccharomyces pastorianus
ggttcttgagagattgccccagtgg

SEQ ID NO: 12546 - DNA, 25 bp, Saccharomyces pastorianus
ggatggatatattacgctggacgaa

SEQ ID NO: 12547 - DNA, 25 bp, Saccharomyces pastorianus
aattcttcccttttggatctcctga

SEQ ID NO: 12548 - DNA, 25 bp, Saccharomyces pastorianus
gatggatacattaccttcgacgaaa

SEQ ID NO: 12549 - DNA, 25 bp, Saccharomyces pastorianus
aatctggagccaagatctttttgtt

SEQ ID NO: 12550 - DNA, 25 bp, Saccharomyces pastorianus
catcgggaagattttgtggtgttgc

SEQ ID NO: 12551 - DNA, 25 bp, Saccharomyces pastorianus
gtctaaaccaaggtcttttcagcaa

SEQ ID NO: 12552 - DNA, 25 bp, Saccharomyces pastorianus
ggcggttgatcaatctggtaagagt

SEQ ID NO: 12553 - DNA, 25 bp, Saccharomyces pastorianus
aataactcattccagagatacccaa

SEQ ID NO: 12554 - DNA, 25 bp, Saccharomyces pastorianus
cggttatctgaagcgtacaagacat

SEQ ID NO: 12555 - DNA, 25 bp, Saccharomyces pastorianus
gaatggacttggataccagcatttg

SEQ ID NO: 12556 - DNA, 25 bp, Saccharomyces pastorianus
aattccacattcgattggtatttcg

SEQ ID NO: 12557 - DNA, 25 bp, Saccharomyces pastorianus
aagtcctcatctttgaaacatgtta

SEQ ID NO: 12558 - DNA, 25 bp, Saccharomyces pastorianus
gagatcattctacaacggaatttgg

SEQ ID NO: 12559 - DNA, 25 bp, Saccharomyces pastorianus
agaaagagttctgccattgttcccc

SEQ ID NO: 12560 - DNA, 25 bp, Saccharomyces pastorianus
aatcacatcgctagggtacgctggt

SEQ ID NO: 12561 - DNA, 25 bp, Saccharomyces pastorianus
ccaatgcccgaattttccaagctgt

SEQ ID NO: 12562 - DNA, 25 bp, Saccharomyces pastorianus
gaaatccattggtctctctaacatc

SEQ ID NO: 12563 - DNA, 25 bp, Saccharomyces pastorianus
tggcgaaatcttcccgcatttgtac

SEQ ID NO: 12564 - DNA, 25 bp, Saccharomyces pastorianus
gattatctgaagactcccttggaga

SEQ ID NO: 12565 - DNA, 25 bp, Saccharomyces pastorianus
gtaatcaagtcgttaaccctgtgta

SEQ ID NO: 12566 - DNA, 25 bp, Saccharomyces pastorianus
tccaagctgtctatccgctttgata

SEQ ID NO: 12567 - DNA, 25 bp, Saccharomyces pastorianus
gtgttttaaccgttgctggcgaaat

SEQ ID NO: 12568 - DNA, 25 bp, Saccharomyces pastorianus
catttgtacgcgtctggttggattc

SEQ ID NO: 12569 - DNA, 25 bp, Saccharomyces pastorianus
aagcctcgatccaagtttctaacac

SEQ ID NO: 12570 - DNA, 25 bp, Saccharomyces pastorianus
caagacgcttttgaggtcggtgaca

SEQ ID NO: 12571 - DNA, 25 bp, Saccharomyces pastorianus
tggttactcgatggaatactacttc

SEQ ID NO: 12572 - DNA, 25 bp, Saccharomyces pastorianus
ggtgtcatccaagaacatcggttca

SEQ ID NO: 12573 - DNA, 25 bp, Saccharomyces pastorianus
gtggcactttgctctgggaatcatt

SEQ ID NO: 12574 - DNA, 25 bp, Saccharomyces pastorianus
ggaatcattgcctttggttactcga

SEQ ID NO: 12575 - DNA, 25 bp, Saccharomyces pastorianus
ggcgtattgccaatgttgtgcactt

SEQ ID NO: 12576 - DNA, 25 bp, Saccharomyces pastorianus
ggttcagcaccagcaatcaaggccg

SEQ ID NO: 12577 - DNA, 25 bp, Saccharomyces pastorianus
gcaccaaatgctaggcgtattgcca

SEQ ID NO: 12578 - DNA, 25 bp, Saccharomyces pastorianus
cgtgcagtatctacactaattcccc

SEQ ID NO: 12579 - DNA, 25 bp, Saccharomyces pastorianus
aagtccttacctcaaggttcagcac

SEQ ID NO: 12580 - DNA, 25 bp, Saccharomyces pastorianus
atcaaggccgactctagattgggta

SEQ ID NO: 12581 - DNA, 25 bp, Saccharomyces pastorianus
gtgcacttttacaagtccttacctc

SEQ ID NO: 12582 - DNA, 25 bp, Saccharomyces pastorianus
ctgttctacccttttccatatatga

SEQ ID NO: 12583 - DNA, 25 bp, Saccharomyces pastorianus
attgagcaagaatgggcccgccgaa

SEQ ID NO: 12584 - DNA, 25 bp, Saccharomyces pastorianus
ggaaatccgggtcacaaactctaat

SEQ ID NO: 12585 - DNA, 25 bp, Saccharomyces pastorianus
tactgcatcaagacgtacacgcggt

SEQ ID NO: 12586 - DNA, 25 bp, Saccharomyces pastorianus
aaattaccagatcctgttctaccct

SEQ ID NO: 12587 - DNA, 25 bp, Saccharomyces pastorianus
taatccacgaccttgacggcgaaaa

SEQ ID NO: 12588 - DNA, 25 bp, Saccharomyces pastorianus
ggaatttgcccagaatactccattg

SEQ ID NO: 12589 - DNA, 25 bp, Saccharomyces pastorianus
tctgaagagtttacccctggaacat

SEQ ID NO: 12590 - DNA, 25 bp, Saccharomyces pastorianus
gggcccgccgaatcttcacagaaat

SEQ ID NO: 12591 - DNA, 25 bp, Saccharomyces pastorianus
acgtacacgcggtggctagcgtatt

SEQ ID NO: 12592 - DNA, 25 bp, Saccharomyces pastorianus
gaaggtactggcaacacatatcaac

SEQ ID NO: 12593 - DNA, 25 bp, Saccharomyces pastorianus
tagagtttctataaggacggcgcat

SEQ ID NO: 12594 - DNA, 25 bp, Saccharomyces pastorianus
accaagaaaggacttcaccactatt

SEQ ID NO: 12595 - DNA, 25 bp, Saccharomyces pastorianus
cctaagagactgagcgggttgcaga

SEQ ID NO: 12596 - DNA, 25 bp, Saccharomyces pastorianus
gagcgggttgcagaaagaagtttta

SEQ ID NO: 12597 - DNA, 25 bp, Saccharomyces pastorianus
tggaaataagaaagtagccacgttt

SEQ ID NO: 12598 - DNA, 25 bp, Saccharomyces pastorianus
gagatctaccaagaaaggacttcac

SEQ ID NO: 12599 - DNA, 25 bp, Saccharomyces pastorianus
agaagttttacatctctatagagtt

SEQ ID NO: 12600 - DNA, 25 bp, Saccharomyces pastorianus
gtttctataaggacggcgcatacga

SEQ ID NO: 12601 - DNA, 25 bp, Saccharomyces pastorianus
cactattgaacacttgttaagggtt

SEQ ID NO: 12602 - DNA, 25 bp, Saccharomyces pastorianus
gacggcgcatacgaagccaaaggaa

SEQ ID NO: 12603 - DNA, 25 bp, Saccharomyces pastorianus
agtttggcaagtatagagatctacc

SEQ ID NO: 12604 - DNA, 25 bp, Saccharomyces pastorianus
tcctagaagtcaaactgggcgtctt

SEQ ID NO: 12605 - DNA, 25 bp, Saccharomyces pastorianus
gacggcgctgcacaaatgacaattc

SEQ ID NO: 12606 - DNA, 25 bp, Saccharomyces pastorianus
gggcgtcttagacttcccagaacaa

SEQ ID NO: 12607 - DNA, 25 bp, Saccharomyces pastorianus
ggttcatttcaattttctgttcgag

SEQ ID NO: 12608 - DNA, 25 bp, Saccharomyces pastorianus
tttcctttccatcggtatggcttta

SEQ ID NO: 12609 - DNA, 25 bp, Saccharomyces pastorianus
tatggctttacctgcggcgctaggt

SEQ ID NO: 12610 - DNA, 25 bp, Saccharomyces pastorianus
gaaagagctatcatgggtcctacca

SEQ ID NO: 12611 - DNA, 25 bp, Saccharomyces pastorianus
ggtcctaccaggtcttataacgaca

SEQ ID NO: 12612 - DNA, 25 bp, Saccharomyces pastorianus
gaatccacctccaagttagcactga

SEQ ID NO: 12613 - DNA, 25 bp, Saccharomyces pastorianus
tctgttcgagattttgcctttccta

SEQ ID NO: 12614 - DNA, 25 bp, Saccharomyces pastorianus
aagaccatccaaacgcacacataaa

SEQ ID NO: 12615 - DNA, 25 bp, Saccharomyces pastorianus
aaagaagttcgcttctgtcccagct

SEQ ID NO: 12616 - DNA, 25 bp, Saccharomyces pastorianus
aaaagaagttcgcttctgtcccagc

SEQ ID NO: 12617 - DNA, 25 bp, Saccharomyces pastorianus
tcgcttctgtcccagctggtggtgc

SEQ ID NO: 12618 - DNA, 25 bp, Saccharomyces pastorianus
tgccgctgccggtgcttccggtgcc

SEQ ID NO: 12619 - DNA, 25 bp, Saccharomyces pastorianus
aagaagttcgcttctgtcccagctg

SEQ ID NO: 12620 - DNA, 25 bp, Saccharomyces pastorianus
gcttctgtcccagctggtggtgctt

SEQ ID NO: 12621 - DNA, 25 bp, Saccharomyces pastorianus
aagttcgcttctgtcccagctggtg

SEQ ID NO: 12622 - DNA, 25 bp, Saccharomyces pastorianus
ttctgtcccagctggtggtgcttct

SEQ ID NO: 12623 - DNA, 25 bp, Saccharomyces pastorianus
gttcgcttctgtcccagctggtggt

SEQ ID NO: 12624 - DNA, 25 bp, Saccharomyces pastorianus
agaagttcgcttctgtcccagctgg

SEQ ID NO: 12625 - DNA, 25 bp, Saccharomyces pastorianus
ctgtcccagctggtggtgcttctgc

SEQ ID NO: 12626 - DNA, 25 bp, Saccharomyces pastorianus
gtccgctttggttttatctttgatc

SEQ ID NO: 12627 - DNA, 25 bp, Saccharomyces pastorianus
tctgtttttgttctttggtggtgcc

SEQ ID NO: 12628 - DNA, 25 bp, Saccharomyces pastorianus
accgtgttcacctttttgatgctga

SEQ ID NO: 12629 - DNA, 25 bp, Saccharomyces pastorianus
ggacaacctggtaagcggctacacg

SEQ ID NO: 12630 - DNA, 25 bp, Saccharomyces pastorianus
gttgctgtggttggtactcgttata

SEQ ID NO: 12631 - DNA, 25 bp, Saccharomyces pastorianus
cttgctgctgacctttttggacata

SEQ ID NO: 12632 - DNA, 25 bp, Saccharomyces pastorianus
gatcccgcgatgctgaacaacgtca

SEQ ID NO: 12633 - DNA, 25 bp, Saccharomyces pastorianus
tttgatcaatgccaacgtccgcggt

SEQ ID NO: 12634 - DNA, 25 bp, Saccharomyces pastorianus
cggcggttatttcggcatcttgagt

SEQ ID NO: 12635 - DNA, 25 bp, Saccharomyces pastorianus
ttctggatttgctacggttacggac

SEQ ID NO: 12636 - DNA, 25 bp, Saccharomyces pastorianus
ttatactgttccgtggtgagcccat

SEQ ID NO: 12637 - DNA, 25 bp, Saccharomyces pastorianus
tttggttgtcgaccaaactaaggct

SEQ ID NO: 12638 - DNA, 25 bp, Saccharomyces pastorianus
ggtcttcgaccattgggccactttg

SEQ ID NO: 12639 - DNA, 25 bp, Saccharomyces pastorianus
gccactttgggttccgacccattgg

SEQ ID NO: 12640 - DNA, 25 bp, Saccharomyces pastorianus
atccgtcagagttaacatcttggac

SEQ ID NO: 12641 - DNA, 25 bp, Saccharomyces pastorianus
ttaacatcttggacgtcaccttaca

SEQ ID NO: 12642 - DNA, 25 bp, Saccharomyces pastorianus
ttggacgtcaccttacatgccgatg

SEQ ID NO: 12643 - DNA, 25 bp, Saccharomyces pastorianus
agttaacatcttggacgtcacctta

SEQ ID NO: 12644 - DNA, 25 bp, Saccharomyces pastorianus
tccaaatttggttgtcgaccaaact

SEQ ID NO: 12645 - DNA, 25 bp, Saccharomyces pastorianus
aacatcttggacgtcaccttacatg

SEQ ID NO: 12646 - DNA, 25 bp, Saccharomyces pastorianus
ggacgtcaccttacatgccgatgct

SEQ ID NO: 12647 - DNA, 25 bp, Saccharomyces pastorianus
gaccattgggccactttgggttccg

SEQ ID NO: 12648 - DNA, 25 bp, Saccharomyces pastorianus
tttccaaacgacctaaacagccaag

SEQ ID NO: 12649 - DNA, 25 bp, Saccharomyces pastorianus
gaagcactgaaaaccgctctttggc

SEQ ID NO: 12650 - DNA, 25 bp, Saccharomyces pastorianus
gcattgcatactgtcatatctcatc

SEQ ID NO: 12651 - DNA, 25 bp, Saccharomyces pastorianus
aacctaggagatgcaccaggcgcaa

SEQ ID NO: 12652 - DNA, 25 bp, Saccharomyces pastorianus
gaagactgtcggtgagttaactatt

SEQ ID NO: 12653 - DNA, 25 bp, Saccharomyces pastorianus
agatctcgtggtgatatttccaaac

SEQ ID NO: 12654 - DNA, 25 bp, Saccharomyces pastorianus
gaatgttgccacaatcttgaatgct

SEQ ID NO: 12655 - DNA, 25 bp, Saccharomyces pastorianus
gagaaagcggtagccattcaagaaa

SEQ ID NO: 12656 - DNA, 25 bp, Saccharomyces pastorianus
accgctctttggctcattttagtat

SEQ ID NO: 12657 - DNA, 25 bp, Saccharomyces pastorianus
ggcttataaaacatgcgcttcggaa

SEQ ID NO: 12658 - DNA, 25 bp, Saccharomyces pastorianus
ggttgcaatcacaagtattacctta

SEQ ID NO: 12659 - DNA, 25 bp, Saccharomyces pastorianus
gggcctgaaaatgttgtcaacccgc

SEQ ID NO: 12660 - DNA, 25 bp, Saccharomyces pastorianus
ggacaagtcccaacagtctaaccag

SEQ ID NO: 12661 - DNA, 25 bp, Saccharomyces pastorianus
tcacctcgtccacagttcataggaa

SEQ ID NO: 12662 - DNA, 25 bp, Saccharomyces pastorianus
gactggtccggaatatcccaactta

SEQ ID NO: 12663 - DNA, 25 bp, Saccharomyces pastorianus
gaggcatagagctttgacgaatttc

SEQ ID NO: 12664 - DNA, 25 bp, Saccharomyces pastorianus
atgttcaacgagcatcccttggaga

SEQ ID NO: 12665 - DNA, 25 bp, Saccharomyces pastorianus
tccaattttgaattcacctcgtcca

SEQ ID NO: 12666 - DNA, 25 bp, Saccharomyces pastorianus
tatgtgcactggtctgattgtcggc

SEQ ID NO: 12667 - DNA, 25 bp, Saccharomyces pastorianus
aaatctcagatcaagctaccatggg

SEQ ID NO: 12668 - DNA, 25 bp, Saccharomyces pastorianus
gcgctctgacggaaacggcactaaa

SEQ ID NO: 12669 - DNA, 25 bp, Saccharomyces pastorianus
cttttgagattgtttgcgctctgac

SEQ ID NO: 12670 - DNA, 25 bp, Saccharomyces pastorianus
gacacactagatccagctttgctga

SEQ ID NO: 12671 - DNA, 25 bp, Saccharomyces pastorianus
aaaagctgcattcattagggtcaat

SEQ ID NO: 12672 - DNA, 25 bp, Saccharomyces pastorianus
tgctgtcattgcagccatcatgcaa

SEQ ID NO: 12673 - DNA, 25 bp, Saccharomyces pastorianus
taaatatcttggtgagggtccgaga

SEQ ID NO: 12674 - DNA, 25 bp, Saccharomyces pastorianus
ctagactcgctaattattcgtaatg

SEQ ID NO: 12675 - DNA, 25 bp, Saccharomyces pastorianus
gatacgtcattctacaaagcgattt

SEQ ID NO: 12676 - DNA, 25 bp, Saccharomyces pastorianus
agggtcaatggctccgaattcgttc

SEQ ID NO: 12677 - DNA, 25 bp, Saccharomyces pastorianus
agctggtttgagagccgtcaggaaa

SEQ ID NO: 12678 - DNA, 25 bp, Saccharomyces pastorianus
aaacgttaaagttatcatggccaca

SEQ ID NO: 12679 - DNA, 25 bp, Saccharomyces pastorianus
gaatttccctcgcttcgtgatagac

SEQ ID NO: 12680 - DNA, 25 bp, Saccharomyces pastorianus
gatgggttcgaccaatccacaaacg

SEQ ID NO: 12681 - DNA, 25 bp, Saccharomyces pastorianus
ccttggaaggcgatttgactccgga

SEQ ID NO: 12682 - DNA, 25 bp, Saccharomyces pastorianus
gttttccaggaagtacatgcatttt

SEQ ID NO: 12683 - DNA, 25 bp, Saccharomyces pastorianus
gaaggagaccgtattggaccaaatc

SEQ ID NO: 12684 - DNA, 25 bp, Saccharomyces pastorianus
gaaattccaaatagcgtcagcccgc

SEQ ID NO: 12685 - DNA, 25 bp, Saccharomyces pastorianus
gtcaccgagggcaagtccttggaag

SEQ ID NO: 12686 - DNA, 25 bp, Saccharomyces pastorianus
aaagtatccaccaacgatgagcttg

SEQ ID NO: 12687 - DNA, 25 bp, Saccharomyces pastorianus
gtcagcccgctcttaagtaatttga

SEQ ID NO: 12688 - DNA, 25 bp, Saccharomyces pastorianus
aagaaatcgtgatgctgtcaccgag

SEQ ID NO: 12689 - DNA, 25 bp, Saccharomyces pastorianus
agttggttgacctgacactatcatt

SEQ ID NO: 12690 - DNA, 25 bp, Saccharomyces pastorianus
gagagatatcccactattcagtaaa

SEQ ID NO: 12691 - DNA, 25 bp, Saccharomyces pastorianus
gacactatcattacctaaggccata

SEQ ID NO: 12692 - DNA, 25 bp, Saccharomyces pastorianus
acggtcatcctgtcacaagcattac

SEQ ID NO: 12693 - DNA, 25 bp, Saccharomyces pastorianus
tcaccgtcaaggaccactgaatgtt

SEQ ID NO: 12694 - DNA, 25 bp, Saccharomyces pastorianus
aagactgctagcactggatgccaga

SEQ ID NO: 12695 - DNA, 25 bp, Saccharomyces pastorianus
gagcgatgtctactcgtcagaaaca

SEQ ID NO: 12696 - DNA, 25 bp, Saccharomyces pastorianus
gatgccagactggattgcactgtaa

SEQ ID NO: 12697 - DNA, 25 bp, Saccharomyces pastorianus
aaaccttatgtctactctgtcttcg

SEQ ID NO: 12698 - DNA, 25 bp, Saccharomyces pastorianus
tacgatttttcgactacaaccagcc

SEQ ID NO: 12699 - DNA, 25 bp, Saccharomyces pastorianus
ggcgttccgatttgttaccaagact

SEQ ID NO: 12700 - DNA, 25 bp, Saccharomyces pastorianus
gatcattcgctcttggagaccgtac

SEQ ID NO: 12701 - DNA, 25 bp, Saccharomyces pastorianus
agccctggctgtcattctattggaa

SEQ ID NO: 12702 - DNA, 25 bp, Saccharomyces pastorianus
tgtcttcgttgcattccacattgaa

SEQ ID NO: 12703 - DNA, 25 bp, Saccharomyces pastorianus
gatttcttacatattccaacgcctt

SEQ ID NO: 12704 - DNA, 25 bp, Saccharomyces pastorianus
agtgttctattgtcagctcattgga

SEQ ID NO: 12705 - DNA, 25 bp, Saccharomyces pastorianus
tattcatgcgcatactaatagcgga

SEQ ID NO: 12706 - DNA, 25 bp, Saccharomyces pastorianus
gtgatttccaacgatcagtgttcta

SEQ ID NO: 12707 - DNA, 25 bp, Saccharomyces pastorianus
aaagacacccgtttcgacaatggag

SEQ ID NO: 12708 - DNA, 25 bp, Saccharomyces pastorianus
gtgacacagacgcaggtcgtttgaa

SEQ ID NO: 12709 - DNA, 25 bp, Saccharomyces pastorianus
gtggcacattatactggaactcaaa

SEQ ID NO: 12710 - DNA, 25 bp, Saccharomyces pastorianus
gacgcattttcagaccttttcaaga

SEQ ID NO: 12711 - DNA, 25 bp, Saccharomyces pastorianus
agaattgatattcccacaccattta

SEQ ID NO: 12712 - DNA, 25 bp, Saccharomyces pastorianus
aatgacgcttattcgaatttggtag

SEQ ID NO: 12713 - DNA, 25 bp, Saccharomyces pastorianus
gggtttctgatactgaagtggcaca

SEQ ID NO: 12714 - DNA, 25 bp, Saccharomyces pastorianus
aattcggttacatcctttgtgtact

SEQ ID NO: 12715 - DNA, 25 bp, Saccharomyces pastorianus
gagccgtcgttttcaaaccattcaa

SEQ ID NO: 12716 - DNA, 25 bp, Saccharomyces pastorianus
gtaaccaagcatttgatgcctcaag

SEQ ID NO: 12717 - DNA, 25 bp, Saccharomyces pastorianus
tagttccatccacgcaatcggtagt

SEQ ID NO: 12718 - DNA, 25 bp, Saccharomyces pastorianus
attcaatgcaggctcaaatcctccg

SEQ ID NO: 12719 - DNA, 25 bp, Saccharomyces pastorianus
ggtggacggcacagtagtatcatgt

SEQ ID NO: 12720 - DNA, 25 bp, Saccharomyces pastorianus
tcaaatcctccgtcgtaccaaagtt

SEQ ID NO: 12721 - DNA, 25 bp, Saccharomyces pastorianus
tagtcaagttagttccatccacgca

SEQ ID NO: 12722 - DNA, 25 bp, Saccharomyces pastorianus
tttggccctcgaatgaagcagtatc

SEQ ID NO: 12723 - DNA, 25 bp, Saccharomyces pastorianus
agtatcatgttctcaacacgggttc

SEQ ID NO: 12724 - DNA, 25 bp, Saccharomyces pastorianus
ccaccgatgggtcagcagagttcaa

SEQ ID NO: 12725 - DNA, 25 bp, Saccharomyces pastorianus
aaacaagcccttgatggccggatgc

SEQ ID NO: 12726 - DNA, 25 bp, Saccharomyces pastorianus
atgtaatcatttgtgcaggctggct

SEQ ID NO: 12727 - DNA, 25 bp, Saccharomyces pastorianus
caggctggctgttgattctcgggtc

SEQ ID NO: 12728 - DNA, 25 bp, Saccharomyces pastorianus
tgcaggccctaatcgatgcccagaa

SEQ ID NO: 12729 - DNA, 25 bp, Saccharomyces pastorianus
tttctgagccaactacaatccgtgc

SEQ ID NO: 12730 - DNA, 25 bp, Saccharomyces pastorianus
atacacgaaagccatcccgaaggag

SEQ ID NO: 12731 - DNA, 25 bp, Saccharomyces pastorianus
gatgcccacattgtctctgtcatat

SEQ ID NO: 12732 - DNA, 25 bp, Saccharomyces pastorianus
ttgcgcggttggtccttgagaacaa

SEQ ID NO: 12733 - DNA, 25 bp, Saccharomyces pastorianus
ggccggatgcatggtacactacgtt

SEQ ID NO: 12734 - DNA, 25 bp, Saccharomyces pastorianus
ggtttgagaacgatcttgcgcggtt

SEQ ID NO: 12735 - DNA, 25 bp, Saccharomyces pastorianus
tgaaacagctcgaaatcaccccggg

SEQ ID NO: 12736 - DNA, 25 bp, Saccharomyces pastorianus
tcttgattatttgaccgggttccac

SEQ ID NO: 12737 - DNA, 25 bp, Saccharomyces pastorianus
gtggaatccttggagcccaacgata

SEQ ID NO: 12738 - DNA, 25 bp, Saccharomyces pastorianus
tatttggccaacttgaacaatgtca

SEQ ID NO: 12739 - DNA, 25 bp, Saccharomyces pastorianus
ggcaacgacgtgaagcccattttga

SEQ ID NO: 12740 - DNA, 25 bp, Saccharomyces pastorianus
gtttgacaaggattcccgtcttgat

SEQ ID NO: 12741 - DNA, 25 bp, Saccharomyces pastorianus
acagagctaccaaatacgccaaatt

SEQ ID NO: 12742 - DNA, 25 bp, Saccharomyces pastorianus
gtttgaacttggaggccgagataga

SEQ ID NO: 12743 - DNA, 25 bp, Saccharomyces pastorianus
acggtgccaaggtagagtctgacga

SEQ ID NO: 12744 - DNA, 25 bp, Saccharomyces pastorianus
gaaaaagtgctcacccaaagcataa

SEQ ID NO: 12745 - DNA, 25 bp, Saccharomyces pastorianus
gaagggcgccgttactgaaatatac

SEQ ID NO: 12746 - DNA, 25 bp, Saccharomyces pastorianus
ggtagagtctgacgattcctggcac

SEQ ID NO: 12747 - DNA, 25 bp, Saccharomyces pastorianus
gagaataccgcttactgcgcgataa

SEQ ID NO: 12748 - DNA, 25 bp, Saccharomyces pastorianus
actggtcgctggattcgttgtcaaa

SEQ ID NO: 12749 - DNA, 25 bp, Saccharomyces pastorianus
attttgacttatccgttgctctttt

SEQ ID NO: 12750 - DNA, 25 bp, Saccharomyces pastorianus
tatgggtctacttgttccagggttt

SEQ ID NO: 12751 - DNA, 25 bp, Saccharomyces pastorianus
gaaacacctatatcttgctctctga

SEQ ID NO: 12752 - DNA, 25 bp, Saccharomyces pastorianus
tgaaatacagctgtaacctccccat

SEQ ID NO: 12753 - DNA, 25 bp, Saccharomyces pastorianus
gaaaggctgctccacgcgcaaagat

SEQ ID NO: 12754 - DNA, 25 bp, Saccharomyces pastorianus
gtagctcctaatacagattgccttt

SEQ ID NO: 12755 - DNA, 25 bp, Saccharomyces pastorianus
ggttcatgctactcaattcttcgta

SEQ ID NO: 12756 - DNA, 25 bp, Saccharomyces pastorianus
gaacccttcacgcattttgacttat

SEQ ID NO: 12757 - DNA, 25 bp, Saccharomyces pastorianus
tgctcttttccctgtattggtcaga

SEQ ID NO: 12758 - DNA, 25 bp, Saccharomyces pastorianus
tgtcatagtggtcggttctcatcaa

SEQ ID NO: 12759 - DNA, 25 bp, Saccharomyces pastorianus
gcttgtagtgaccatggcagtgcca

SEQ ID NO: 12760 - DNA, 25 bp, Saccharomyces pastorianus
atcattgattcttacctgtccattc

SEQ ID NO: 12761 - DNA, 25 bp, Saccharomyces pastorianus
gttgagttccatttctattctgctg

SEQ ID NO: 12762 - DNA, 25 bp, Saccharomyces pastorianus
ggtgggccacagacctaataatact

SEQ ID NO: 12763 - DNA, 25 bp, Saccharomyces pastorianus
tataatggcagctcctggcgcagat

SEQ ID NO: 12764 - DNA, 25 bp, Saccharomyces pastorianus
gttttcaccgaatacgccaagcagg

SEQ ID NO: 12765 - DNA, 25 bp, Saccharomyces pastorianus
ggtttccaggctcctttgtaattga

SEQ ID NO: 12766 - DNA, 25 bp, Saccharomyces pastorianus
gaacatgtgggcatcgtgaccgatt

SEQ ID NO: 12767 - DNA, 25 bp, Saccharomyces pastorianus
gtttcgatcatatggccgagcacac

SEQ ID NO: 12768 - DNA, 25 bp, Saccharomyces pastorianus
gtacgataaccaacttagaggcctt

SEQ ID NO: 12769 - DNA, 25 bp, Saccharomyces pastorianus
ttgatttcaagaaccctcatgacat

SEQ ID NO: 12770 - DNA, 25 bp, Saccharomyces pastorianus
tttcaagaaccctcatgacatcatt

SEQ ID NO: 12771 - DNA, 25 bp, Saccharomyces pastorianus
atttcaagaaccctcatgacatcat

SEQ ID NO: 12772 - DNA, 25 bp, Saccharomyces pastorianus
gttgatttcaagaaccctcatgaca

SEQ ID NO: 12773 - DNA, 25 bp, Saccharomyces pastorianus
tgagagctgtcggtggtgaagtcgg

SEQ ID NO: 12774 - DNA, 25 bp, Saccharomyces pastorianus
gagagctgtcggtggtgaagtcggt

SEQ ID NO: 12775 - DNA, 25 bp, Saccharomyces pastorianus
ggttgtcgtgttgatttcaagaacc

SEQ ID NO: 12776 - DNA, 25 bp, Saccharomyces pastorianus
gttgtcgtgttgatttcaagaaccc

SEQ ID NO: 12777 - DNA, 25 bp, Saccharomyces pastorianus
ttgtcgtgttgatttcaagaaccct

SEQ ID NO: 12778 - DNA, 25 bp, Saccharomyces pastorianus
tgatttcaagaaccctcatgacatc

SEQ ID NO: 12779 - DNA, 25 bp, Saccharomyces pastorianus
tgttgatttcaagaaccctcatgac

SEQ ID NO: 12780 - DNA, 25 bp, Saccharomyces pastorianus
aacacttcatcgtacaagagtttga

SEQ ID NO: 12781 - DNA, 25 bp, Saccharomyces pastorianus
gattgtctgtccatatgcgtatcgg

SEQ ID NO: 12782 - DNA, 25 bp, Saccharomyces pastorianus
ccagttccagcggtcaccaaaatga

SEQ ID NO: 12783 - DNA, 25 bp, Saccharomyces pastorianus
aacatctacacccacaatgaatttg

SEQ ID NO: 12784 - DNA, 25 bp, Saccharomyces pastorianus
ttgaccatcgccaagatcttaaaat

SEQ ID NO: 12785 - DNA, 25 bp, Saccharomyces pastorianus
aaggacacaaggtcgctatcgaagt

SEQ ID NO: 12786 - DNA, 25 bp, Saccharomyces pastorianus
atgataacctggcaaactccgctat

SEQ ID NO: 12787 - DNA, 25 bp, Saccharomyces pastorianus
tataatcacatccacttgaccatcg

SEQ ID NO: 12788 - DNA, 25 bp, Saccharomyces pastorianus
agtcaagtacaaactccagttccag

SEQ ID NO: 12789 - DNA, 25 bp, Saccharomyces pastorianus
gggcaatgagccaaacgctgttaaa

SEQ ID NO: 12790 - DNA, 25 bp, Saccharomyces pastorianus
actccgctatgttggcagacgataa

SEQ ID NO: 12791 - DNA, 25 bp, Saccharomyces pastorianus
atgccttacgtgaagaaagcccttt

SEQ ID NO: 12792 - DNA, 25 bp, Saccharomyces pastorianus
gcacctagtgcattcttatagcgac

SEQ ID NO: 12793 - DNA, 25 bp, Saccharomyces pastorianus
atgttgggacttttgcagatcgtga

SEQ ID NO: 12794 - DNA, 25 bp, Saccharomyces pastorianus
ggatactgagtcaacggtttgtcaa

SEQ ID NO: 12795 - DNA, 25 bp, Saccharomyces pastorianus
tggagctacctttatttggcagata

SEQ ID NO: 12796 - DNA, 25 bp, Saccharomyces pastorianus
aatttcttgtcttcaggattatcag

SEQ ID NO: 12797 - DNA, 25 bp, Saccharomyces pastorianus
gagccctcgagagtaatgccttacg

SEQ ID NO: 12798 - DNA, 25 bp, Saccharomyces pastorianus
gccctttctcgcttcagtattgata

SEQ ID NO: 12799 - DNA, 25 bp, Saccharomyces pastorianus
aagacttgccttccctgatggtatt

SEQ ID NO: 12800 - DNA, 25 bp, Saccharomyces pastorianus
gtgggacattccgttggagctacct

SEQ ID NO: 12801 - DNA, 25 bp, Saccharomyces pastorianus
ttagctgcactcaaagatcctcaag

SEQ ID NO: 12802 - DNA, 25 bp, Saccharomyces pastorianus
attagaagacccagcagttagtgaa

SEQ ID NO: 12803 - DNA, 25 bp, Saccharomyces pastorianus
ctgtcagtgaagataagggtggcca

SEQ ID NO: 12804 - DNA, 25 bp, Saccharomyces pastorianus
cattttgagtgaactttccgcatta

SEQ ID NO: 12805 - DNA, 25 bp, Saccharomyces pastorianus
ccaagctggcggagctggcgccatc

SEQ ID NO: 12806 - DNA, 25 bp, Saccharomyces pastorianus
aaggcggagctgaagctgtcagtga

SEQ ID NO: 12807 - DNA, 25 bp, Saccharomyces pastorianus
acccagcagttagtgaaggcggagc

SEQ ID NO: 12808 - DNA, 25 bp, Saccharomyces pastorianus
aatgaattgtccattcaagaccatt

SEQ ID NO: 12809 - DNA, 25 bp, Saccharomyces pastorianus
gaagaagtcgatctaagattgacaa

SEQ ID NO: 12810 - DNA, 25 bp, Saccharomyces pastorianus
tggcgccatcccaggccaatatgtt

SEQ ID NO: 12811 - DNA, 25 bp, Saccharomyces pastorianus
gattgacaaggaactggaagcaagc

SEQ ID NO: 12812 - DNA, 25 bp, Saccharomyces pastorianus
gaccattttgagtgaactttccgca

SEQ ID NO: 12813 - DNA, 25 bp, Saccharomyces pastorianus
ggaactttgcgtaatgaccttgact

SEQ ID NO: 12814 - DNA, 25 bp, Saccharomyces pastorianus
gatcggtttggcaccattatgcagt

SEQ ID NO: 12815 - DNA, 25 bp, Saccharomyces pastorianus
agatggcccgaaactctgaacgtta

SEQ ID NO: 12816 - DNA, 25 bp, Saccharomyces pastorianus
ggcgacattcccactatcataatat

SEQ ID NO: 12817 - DNA, 25 bp, Saccharomyces pastorianus
aaggagtctcaactgctcatacacg

SEQ ID NO: 12818 - DNA, 25 bp, Saccharomyces pastorianus
aagatagtgccgactcatcaccggt

SEQ ID NO: 12819 - DNA, 25 bp, Saccharomyces pastorianus
tgaatacgtgtaccagcggcgacat

SEQ ID NO: 12820 - DNA, 25 bp, Saccharomyces pastorianus
atatccgaatgcttactgtgctaca

SEQ ID NO: 12821 - DNA, 25 bp, Saccharomyces pastorianus
ggttctcagcccaatgatcggtttg

SEQ ID NO: 12822 - DNA, 25 bp, Saccharomyces pastorianus
gcggtctcagcgaagtatgcccatg

SEQ ID NO: 12823 - DNA, 25 bp, Saccharomyces pastorianus
tggactatggatatcgtacgacccc

SEQ ID NO: 12824 - DNA, 25 bp, Saccharomyces pastorianus
ggattccttgtccacagtgacggat

SEQ ID NO: 12825 - DNA, 25 bp, Saccharomyces pastorianus
aatatggtcaatcctaccatcgtcc

SEQ ID NO: 12826 - DNA, 25 bp, Saccharomyces pastorianus
ttatgggcatgctgtgtatctacac

SEQ ID NO: 12827 - DNA, 25 bp, Saccharomyces pastorianus
gatactagacatctttccgcagagg

SEQ ID NO: 12828 - DNA, 25 bp, Saccharomyces pastorianus
gatggatcatcactctggaaggcat

SEQ ID NO: 12829 - DNA, 25 bp, Saccharomyces pastorianus
gtatctacaccggtcttctgatgta

SEQ ID NO: 12830 - DNA, 25 bp, Saccharomyces pastorianus
taccatcgtccttcggtgaggctac

SEQ ID NO: 12831 - DNA, 25 bp, Saccharomyces pastorianus
tacaatgaagactcgttaaccccac

SEQ ID NO: 12832 - DNA, 25 bp, Saccharomyces pastorianus
atgcgggcggccagctcgtaatact

SEQ ID NO: 12833 - DNA, 25 bp, Saccharomyces pastorianus
agcagttcgtcaacacgatactaga

SEQ ID NO: 12834 - DNA, 25 bp, Saccharomyces pastorianus
gtgaggctaccccacagcagttcgt

SEQ ID NO: 12835 - DNA, 25 bp, Saccharomyces pastorianus
gtcagttccccagtcaagggcgtat

SEQ ID NO: 12836 - DNA, 25 bp, Saccharomyces pastorianus
aacgaggcaacggatcaccacattg

SEQ ID NO: 12837 - DNA, 25 bp, Saccharomyces pastorianus
agaatcaacaccttggtcagttccc

SEQ ID NO: 12838 - DNA, 25 bp, Saccharomyces pastorianus
ttgagctgtcgagtatcggtgattc

SEQ ID NO: 12839 - DNA, 25 bp, Saccharomyces pastorianus
tatcaccattgctttcaaaacccgc

SEQ ID NO: 12840 - DNA, 25 bp, Saccharomyces pastorianus
gacatctaggagctcaactgccaat

SEQ ID NO: 12841 - DNA, 25 bp, Saccharomyces pastorianus
ggtgattcgaccacgatgacatcta

SEQ ID NO: 12842 - DNA, 25 bp, Saccharomyces pastorianus
gaaggatgaccatttggcggatcat

SEQ ID NO: 12843 - DNA, 25 bp, Saccharomyces pastorianus
gcggatcatgatatactgccaccta

SEQ ID NO: 12844 - DNA, 25 bp, Saccharomyces pastorianus
cgaacctgactcacctatatcaaag

SEQ ID NO: 12845 - DNA, 25 bp, Saccharomyces pastorianus
accacattgcccaattcagatgagg

SEQ ID NO: 12846 - DNA, 25 bp, Saccharomyces pastorianus
atcatggatgatgttcttgccaccg

SEQ ID NO: 12847 - DNA, 25 bp, Saccharomyces pastorianus
gctagaggtcttttgtttgggccgt

SEQ ID NO: 12848 - DNA, 25 bp, Saccharomyces pastorianus
atggctgcaggtaatctcatcaaac

SEQ ID NO: 12849 - DNA, 25 bp, Saccharomyces pastorianus
tagcactgggcgttggattcgtacc

SEQ ID NO: 12850 - DNA, 25 bp, Saccharomyces pastorianus
gaaacccaaagctattccagaagtt

SEQ ID NO: 12851 - DNA, 25 bp, Saccharomyces pastorianus
tttgggccgtccgtagcattagcac

SEQ ID NO: 12852 - DNA, 25 bp, Saccharomyces pastorianus
aactaccaggtgagtgtgctacagt

SEQ ID NO: 12853 - DNA, 25 bp, Saccharomyces pastorianus
tctcatcaaacaagtgggtgcccat

SEQ ID NO: 12854 - DNA, 25 bp, Saccharomyces pastorianus
gtaacgtttacgaagctggaccatg

SEQ ID NO: 12855 - DNA, 25 bp, Saccharomyces pastorianus
gatcgattttattgcgggtgtagaa

SEQ ID NO: 12856 - DNA, 25 bp, Saccharomyces pastorianus
ttgatcaacgctttcgcaacacatt

SEQ ID NO: 12857 - DNA, 25 bp, Saccharomyces pastorianus
ccaaaaatactttctcctgctacag

SEQ ID NO: 12858 - DNA, 25 bp, Saccharomyces pastorianus
tgttaagaccgagcccacaggattt

SEQ ID NO: 12859 - DNA, 25 bp, Saccharomyces pastorianus
tgatcagcaattccaactctaccaa

SEQ ID NO: 12860 - DNA, 25 bp, Saccharomyces pastorianus
gttgctgaccccaatttcaaagaaa

SEQ ID NO: 12861 - DNA, 25 bp, Saccharomyces pastorianus
tagtgtagccgattcgacattggaa

SEQ ID NO: 12862 - DNA, 25 bp, Saccharomyces pastorianus
gactactctagtatgttacctgctg

SEQ ID NO: 12863 - DNA, 25 bp, Saccharomyces pastorianus
gcagttagcgacacaccaaatgtta

SEQ ID NO: 12864 - DNA, 25 bp, Saccharomyces pastorianus
gatacgtgtctccaagactactcta

SEQ ID NO: 12865 - DNA, 25 bp, Saccharomyces pastorianus
aaatgtatcatctccggctaaacaa

SEQ ID NO: 12866 - DNA, 25 bp, Saccharomyces pastorianus
gggccaggaaatccttgatcagcaa

SEQ ID NO: 12867 - DNA, 25 bp, Saccharomyces pastorianus
acaggatttcagttgctgaccccaa

SEQ ID NO: 12868 - DNA, 25 bp, Saccharomyces pastorianus
gaagttccatggcaaacctgtggtt

SEQ ID NO: 12869 - DNA, 25 bp, Saccharomyces pastorianus
ttattaaagacctcacctccaaaca

SEQ ID NO: 12870 - DNA, 25 bp, Saccharomyces pastorianus
ataacgctcggttggctcgtcgaaa

SEQ ID NO: 12871 - DNA, 25 bp, Saccharomyces pastorianus
gaacgtcgtcgcatgagttaggaat

SEQ ID NO: 12872 - DNA, 25 bp, Saccharomyces pastorianus
ctccaaacatctctgcatcgatttt

SEQ ID NO: 12873 - DNA, 25 bp, Saccharomyces pastorianus
aagccgttgcaagattcactccagt

SEQ ID NO: 12874 - DNA, 25 bp, Saccharomyces pastorianus
gactgcgttcgatgaatgtcccact

SEQ ID NO: 12875 - DNA, 25 bp, Saccharomyces pastorianus
aagacgatcatattaccccttgtaa

SEQ ID NO: 12876 - DNA, 25 bp, Saccharomyces pastorianus
atgtcccactcctagtaagaccaag

SEQ ID NO: 12877 - DNA, 25 bp, Saccharomyces pastorianus
tcactccagtgattcgatttctatg

SEQ ID NO: 12878 - DNA, 25 bp, Saccharomyces pastorianus
tttagagattacttccaccccaaca

SEQ ID NO: 12879 - DNA, 25 bp, Saccharomyces pastorianus
aaacggttccagttgaaatgccaga

SEQ ID NO: 12880 - DNA, 25 bp, Saccharomyces pastorianus
taggtggttctgtcattccaacttt

SEQ ID NO: 12881 - DNA, 25 bp, Saccharomyces pastorianus
ccaactttcaatcctgcctttagaa

SEQ ID NO: 12882 - DNA, 25 bp, Saccharomyces pastorianus
gtatgtaccgcaactgtttactcca

SEQ ID NO: 12883 - DNA, 25 bp, Saccharomyces pastorianus
atacggactaggtcccgcgtatgta

SEQ ID NO: 12884 - DNA, 25 bp, Saccharomyces pastorianus
gaatccttactggaagacgaaccgg

SEQ ID NO: 12885 - DNA, 25 bp, Saccharomyces pastorianus
gaagccgtactcgatggacacgtta

SEQ ID NO: 12886 - DNA, 25 bp, Saccharomyces pastorianus
acattgactcccgaattagcagcga

SEQ ID NO: 12887 - DNA, 25 bp, Saccharomyces pastorianus
tgtatgaagacaaccctgcatggga

SEQ ID NO: 12888 - DNA, 25 bp, Saccharomyces pastorianus
atagcagatgaatccgacttcggta

SEQ ID NO: 12889 - DNA, 25 bp, Saccharomyces pastorianus
gtacacctcggatgagaagccgtac

SEQ ID NO: 12890 - DNA, 25 bp, Saccharomyces pastorianus
aatgggtgacaattccttcggagag

SEQ ID NO: 12891 - DNA, 25 bp, Saccharomyces pastorianus
attgaagcccgtgttcttggataac

SEQ ID NO: 12892 - DNA, 25 bp, Saccharomyces pastorianus
aaatgatgacattctgggccggact

SEQ ID NO: 12893 - DNA, 25 bp, Saccharomyces pastorianus
ttggataacatgtcgccgtccatac

SEQ ID NO: 12894 - DNA, 25 bp, Saccharomyces pastorianus
atcatctttggaggtactacggcag

SEQ ID NO: 12895 - DNA, 25 bp, Saccharomyces pastorianus
ggtgttgctttagccttgggtattc

SEQ ID NO: 12896 - DNA, 25 bp, Saccharomyces pastorianus
ataagctaggcacgatcttcaacgc

SEQ ID NO: 12897 - DNA, 25 bp, Saccharomyces pastorianus
tactttattggcgacggttcttgtt

SEQ ID NO: 12898 - DNA, 25 bp, Saccharomyces pastorianus
tttatgagtggtagccccatgccga

SEQ ID NO: 12899 - DNA, 25 bp, Saccharomyces pastorianus
gagtgttcctgatcatccatcaatg

SEQ ID NO: 12900 - DNA, 25 bp, Saccharomyces pastorianus
ggtttagggccatattctgataaca

SEQ ID NO: 12901 - DNA, 25 bp, Saccharomyces pastorianus
accacctatgtcaattataccgcga

SEQ ID NO: 12902 - DNA, 25 bp, Saccharomyces pastorianus
tttgcctccttatgaatcgtatgaa

SEQ ID NO: 12903 - DNA, 25 bp, Saccharomyces pastorianus
gtcaattacttctggagggcggtta

SEQ ID NO: 12904 - DNA, 25 bp, Saccharomyces pastorianus
cttcaatcagctgaatttgcctcct

SEQ ID NO: 12905 - DNA, 25 bp, Saccharomyces pastorianus
gattgccatcatcgcatacttgctt

SEQ ID NO: 12906 - DNA, 25 bp, Saccharomyces pastorianus
gttacgaggttctttattgttagca

SEQ ID NO: 12907 - DNA, 25 bp, Saccharomyces pastorianus
gaaacattttccgttgagactgatg

SEQ ID NO: 12908 - DNA, 25 bp, Saccharomyces pastorianus
gtgctaagctactgcaattcgttac

SEQ ID NO: 12909 - DNA, 25 bp, Saccharomyces pastorianus
gttggcttctatgctctgatatcta

SEQ ID NO: 12910 - DNA, 25 bp, Saccharomyces pastorianus
taagcttcaaacatccgtcaaggag

SEQ ID NO: 12911 - DNA, 25 bp, Saccharomyces pastorianus
agttgctgattagtggtttacctga

SEQ ID NO: 12912 - DNA, 25 bp, Saccharomyces pastorianus
tcgagaagtgctggtcgatctacca

SEQ ID NO: 12913 - DNA, 25 bp, Saccharomyces pastorianus
accagcagcagcagcgtgagcgcag

SEQ ID NO: 12914 - DNA, 25 bp, Saccharomyces pastorianus
ggtcacgcagctgagtgtgatttca

SEQ ID NO: 12915 - DNA, 25 bp, Saccharomyces pastorianus
agggtgccatgtccttgctgcaaga

SEQ ID NO: 12916 - DNA, 25 bp, Saccharomyces pastorianus
caagctgctgaaactctcgcgggag

SEQ ID NO: 12917 - DNA, 25 bp, Saccharomyces pastorianus
gagcaagagcgcaatgtcgcccctg

SEQ ID NO: 12918 - DNA, 25 bp, Saccharomyces pastorianus
agcgggtgtccggaaccacagtgtt

SEQ ID NO: 12919 - DNA, 25 bp, Saccharomyces pastorianus
agaagccatgcaggaccgtcgtgga

SEQ ID NO: 12920 - DNA, 25 bp, Saccharomyces pastorianus
gcgggaggatttgatcaagcaccaa

SEQ ID NO: 12921 - DNA, 25 bp, Saccharomyces pastorianus
aagagctcagccctcggctattcga

SEQ ID NO: 12922 - DNA, 25 bp, Saccharomyces pastorianus
ggaacacacagctagagttgcagta

SEQ ID NO: 12923 - DNA, 25 bp, Saccharomyces pastorianus
ggaaactatataacccgtcacaaca

SEQ ID NO: 12924 - DNA, 25 bp, Saccharomyces pastorianus
atttgatgccttgaaaacgcgtttc

SEQ ID NO: 12925 - DNA, 25 bp, Saccharomyces pastorianus
gatgactgttgtataggactactca

SEQ ID NO: 12926 - DNA, 25 bp, Saccharomyces pastorianus
ggtttccaacactaataatgacggc

SEQ ID NO: 12927 - DNA, 25 bp, Saccharomyces pastorianus
aacaccgccggtgatgatgatcaag

SEQ ID NO: 12928 - DNA, 25 bp, Saccharomyces pastorianus
caggatgttcatttggacggtattc

SEQ ID NO: 12929 - DNA, 25 bp, Saccharomyces pastorianus
agagcaattggaccgcttgggaaac

SEQ ID NO: 12930 - DNA, 25 bp, Saccharomyces pastorianus
aggactactcatcgttgtcttgata

SEQ ID NO: 12931 - DNA, 25 bp, Saccharomyces pastorianus
gcagaatttgcatatccaagcccaa

SEQ ID NO: 12932 - DNA, 25 bp, Saccharomyces pastorianus
taatgacggcggtatgtccaaccca

SEQ ID NO: 12933 - DNA, 25 bp, Saccharomyces pastorianus
aacgcgtttcgatcaaaggatacaa

SEQ ID NO: 12934 - DNA, 25 bp, Saccharomyces pastorianus
gcgtagaaacggtgtttccattcct

SEQ ID NO: 12935 - DNA, 25 bp, Saccharomyces pastorianus
atttgcggatatgggctacagataa

SEQ ID NO: 12936 - DNA, 25 bp, Saccharomyces pastorianus
tggcgtgatcagtttaatttgcgga

SEQ ID NO: 12937 - DNA, 25 bp, Saccharomyces pastorianus
gggtgcaggaatatttaccagtatt

SEQ ID NO: 12938 - DNA, 25 bp, Saccharomyces pastorianus
tacgtcgttgccagttaaactatct

SEQ ID NO: 12939 - DNA, 25 bp, Saccharomyces pastorianus
gtaagatcaccaacaccagaagttt

SEQ ID NO: 12940 - DNA, 25 bp, Saccharomyces pastorianus
ggtcatttacaatcaattccacata

SEQ ID NO: 12941 - DNA, 25 bp, Saccharomyces pastorianus
cattcctttagatatgtggtcttta

SEQ ID NO: 12942 - DNA, 25 bp, Saccharomyces pastorianus
aatcatttattttagccttgggtgc

SEQ ID NO: 12943 - DNA, 25 bp, Saccharomyces pastorianus
tattgtttaaagtcgattccactga

SEQ ID NO: 12944 - DNA, 25 bp, Saccharomyces pastorianus
gttccaaaacaaatacaggccaatt

SEQ ID NO: 12945 - DNA, 25 bp, Saccharomyces pastorianus
gggcgacgagaaatcgtgcagattt

SEQ ID NO: 12946 - DNA, 25 bp, Saccharomyces pastorianus
actctattacgtactttgagccaat

SEQ ID NO: 12947 - DNA, 25 bp, Saccharomyces pastorianus
tgtaactttcgtaaagccgtcggcg

SEQ ID NO: 12948 - DNA, 25 bp, Saccharomyces pastorianus
aaaaggcttgtgtcttcgtataaat

SEQ ID NO: 12949 - DNA, 25 bp, Saccharomyces pastorianus
ggactactaccaaagcctgaaccaa

SEQ ID NO: 12950 - DNA, 25 bp, Saccharomyces pastorianus
atatatcggatccaactgcctggga

SEQ ID NO: 12951 - DNA, 25 bp, Saccharomyces pastorianus
atgagcatgcaacataattcgattg

SEQ ID NO: 12952 - DNA, 25 bp, Saccharomyces pastorianus
gtcggcgtaccactgcaaggtattt

SEQ ID NO: 12953 - DNA, 25 bp, Saccharomyces pastorianus
gtgtgtaatgaccaagaaactctat

SEQ ID NO: 12954 - DNA, 25 bp, Saccharomyces pastorianus
gaattattatagtggtgggcgacga

SEQ ID NO: 12955 - DNA, 25 bp, Saccharomyces pastorianus
gagcgtctacgaaaatgaccagaat

SEQ ID NO: 12956 - DNA, 25 bp, Saccharomyces pastorianus
atgagcactttttcggcttatccat

SEQ ID NO: 12957 - DNA, 25 bp, Saccharomyces pastorianus
aagaatggccagttccactactcag

SEQ ID NO: 12958 - DNA, 25 bp, Saccharomyces pastorianus
ccaccgtttccaacatgtctgaaga

SEQ ID NO: 12959 - DNA, 25 bp, Saccharomyces pastorianus
aatctccattttacccacatcttta

SEQ ID NO: 12960 - DNA, 25 bp, Saccharomyces pastorianus
gctttgaaaaacttgggcgccgagt

SEQ ID NO: 12961 - DNA, 25 bp, Saccharomyces pastorianus
gttacggagatgacaccaccgtttc

SEQ ID NO: 12962 - DNA, 25 bp, Saccharomyces pastorianus
catagggctaacatgttggcgcagg

SEQ ID NO: 12963 - DNA, 25 bp, Saccharomyces pastorianus
agaggaagactccacaatctccatt

SEQ ID NO: 12964 - DNA, 25 bp, Saccharomyces pastorianus
tctttaccacagatccatagggcta

SEQ ID NO: 12965 - DNA, 25 bp, Saccharomyces pastorianus
cgccgagtgggcaaaaccttctgaa

SEQ ID NO: 12966 - DNA, 25 bp, Saccharomyces pastorianus
gccgcatccaagatatctccattaa

SEQ ID NO: 12967 - DNA, 25 bp, Saccharomyces pastorianus
gagaatcctcagtacgttgacaaga

SEQ ID NO: 12968 - DNA, 25 bp, Saccharomyces pastorianus
aagtttatggtttcaccgtctccat

SEQ ID NO: 12969 - DNA, 25 bp, Saccharomyces pastorianus
gggccttataataactgtccgttgg

SEQ ID NO: 12970 - DNA, 25 bp, Saccharomyces pastorianus
gtctccatccatgaatatgcggcca

SEQ ID NO: 12971 - DNA, 25 bp, Saccharomyces pastorianus
gatcatcaaggtgggttcttttacg

SEQ ID NO: 12972 - DNA, 25 bp, Saccharomyces pastorianus
tgatgctcctgttcattccattgct

SEQ ID NO: 12973 - DNA, 25 bp, Saccharomyces pastorianus
gacattggttactatcacgggcctt

SEQ ID NO: 12974 - DNA, 25 bp, Saccharomyces pastorianus
tggaaccaaacatcaagctacactg

SEQ ID NO: 12975 - DNA, 25 bp, Saccharomyces pastorianus
cattgctgcttctttgtttttacca

SEQ ID NO: 12976 - DNA, 25 bp, Saccharomyces pastorianus
gccactattccttccttatgggaaa

SEQ ID NO: 12977 - DNA, 25 bp, Saccharomyces pastorianus
tactttccaaagttactcttgcggt

SEQ ID NO: 12978 - DNA, 25 bp, Saccharomyces pastorianus
gagatataccgtccatgtttgatag

SEQ ID NO: 12979 - DNA, 25 bp, Saccharomyces pastorianus
ggcaataacacataaactggccatt

SEQ ID NO: 12980 - DNA, 25 bp, Saccharomyces pastorianus
tgacccattaacttcaccacatgaa

SEQ ID NO: 12981 - DNA, 25 bp, Saccharomyces pastorianus
gtactaatcagtatccgtgtggcaa

SEQ ID NO: 12982 - DNA, 25 bp, Saccharomyces pastorianus
tcagagagaccgagaaccacttcaa

SEQ ID NO: 12983 - DNA, 25 bp, Saccharomyces pastorianus
agttgattcagttatggccccggtt

SEQ ID NO: 12984 - DNA, 25 bp, Saccharomyces pastorianus
ggccccggtttcagcagttggtaga

SEQ ID NO: 12985 - DNA, 25 bp, Saccharomyces pastorianus
gatagtttcttaaacggccagttga

SEQ ID NO: 12986 - DNA, 25 bp, Saccharomyces pastorianus
gaatatgactgactcgaatacgcaa

SEQ ID NO: 12987 - DNA, 25 bp, Saccharomyces pastorianus
gtaagttttctgacattggcaataa

SEQ ID NO: 12988 - DNA, 25 bp, Saccharomyces pastorianus
ccgtgtggcaaatcaactgcagttt

SEQ ID NO: 12989 - DNA, 25 bp, Saccharomyces pastorianus
acgagtttggcaagccgtgctacac

SEQ ID NO: 12990 - DNA, 25 bp, Saccharomyces pastorianus
aaactccctctgctttgcatggaaa

SEQ ID NO: 12991 - DNA, 25 bp, Saccharomyces pastorianus
ggaacaagttcgtcttcatacacgt

SEQ ID NO: 12992 - DNA, 25 bp, Saccharomyces pastorianus
gaggtcgaactaaccattggcagta

SEQ ID NO: 12993 - DNA, 25 bp, Saccharomyces pastorianus
gtgacaatcccggacttgaacgaag

SEQ ID NO: 12994 - DNA, 25 bp, Saccharomyces pastorianus
tcatacacgtgaatgggccgccaga

SEQ ID NO: 12995 - DNA, 25 bp, Saccharomyces pastorianus
gactgttgaaccgaatatccgcgca

SEQ ID NO: 12996 - DNA, 25 bp, Saccharomyces pastorianus
gatcgacaaattctcgctctactta

SEQ ID NO: 12997 - DNA, 25 bp, Saccharomyces pastorianus
tgacctcccttaccgatttattgtc

SEQ ID NO: 12998 - DNA, 25 bp, Saccharomyces pastorianus
gctacgtacgatgtaggctcggcaa

SEQ ID NO: 12999 - DNA, 25 bp, Saccharomyces pastorianus
acgactcgcattctcttatctggtt

SEQ ID NO: 13000 - DNA, 25 bp, Saccharomyces pastorianus
ttgatcttgagacgcttgctccaga

SEQ ID NO: 13001 - DNA, 25 bp, Saccharomyces pastorianus
ttgtatgacgaaggctcccgaggga

SEQ ID NO: 13002 - DNA, 25 bp, Saccharomyces pastorianus
gaggcagcaacttgaagcgacccgc

SEQ ID NO: 13003 - DNA, 25 bp, Saccharomyces pastorianus
aagccacggaaagctcagcggttga

SEQ ID NO: 13004 - DNA, 25 bp, Saccharomyces pastorianus
gcgtgagttcgagctacagtttgaa

SEQ ID NO: 13005 - DNA, 25 bp, Saccharomyces pastorianus
atcgattctcctacagaaagcgccg

SEQ ID NO: 13006 - DNA, 25 bp, Saccharomyces pastorianus
tacaagagcccctgcgatatcgatt

SEQ ID NO: 13007 - DNA, 25 bp, Saccharomyces pastorianus
gcgatcatcgtccaattattccaaa

SEQ ID NO: 13008 - DNA, 25 bp, Saccharomyces pastorianus
aacggtcttcctggcagttgtatga

SEQ ID NO: 13009 - DNA, 25 bp, Saccharomyces pastorianus
gagcaggttagtcaacggtcttcct

SEQ ID NO: 13010 - DNA, 25 bp, Saccharomyces pastorianus
ggttcctcatgtacctgaatcgagc

SEQ ID NO: 13011 - DNA, 25 bp, Saccharomyces pastorianus
gtaaatataccccaggatcgtcatt

SEQ ID NO: 13012 - DNA, 25 bp, Saccharomyces pastorianus
gcgaatatcagctcttgaagccata

SEQ ID NO: 13013 - DNA, 25 bp, Saccharomyces pastorianus
tatgttctgtatgagccaacgcctt

SEQ ID NO: 13014 - DNA, 25 bp, Saccharomyces pastorianus
gaagtccaattaccctgtttataga

SEQ ID NO: 13015 - DNA, 25 bp, Saccharomyces pastorianus
gccaacgcctttatctttactagaa

SEQ ID NO: 13016 - DNA, 25 bp, Saccharomyces pastorianus
ggttaagagacctgctagtactgaa

SEQ ID NO: 13017 - DNA, 25 bp, Saccharomyces pastorianus
aatctgttgccatagcctctgaaga

SEQ ID NO: 13018 - DNA, 25 bp, Saccharomyces pastorianus
gtcacattttgacggcatctaagag

SEQ ID NO: 13019 - DNA, 25 bp, Saccharomyces pastorianus
actcacctcaagtgtttccaactaa

SEQ ID NO: 13020 - DNA, 25 bp, Saccharomyces pastorianus
gccgaatcgcaaggctgtcattaca

SEQ ID NO: 13021 - DNA, 25 bp, Saccharomyces pastorianus
aaatttgcctttgcaggaggatttt

SEQ ID NO: 13022 - DNA, 25 bp, Saccharomyces pastorianus
aaatcatcgattcctccaacttgtt

SEQ ID NO: 13023 - DNA, 25 bp, Saccharomyces pastorianus
ccccatgtttttgagtaccatatca

SEQ ID NO: 13024 - DNA, 25 bp, Saccharomyces pastorianus
aagaagacacgaacttttatccaag

SEQ ID NO: 13025 - DNA, 25 bp, Saccharomyces pastorianus
attgaattatccgaagccacttcta

SEQ ID NO: 13026 - DNA, 25 bp, Saccharomyces pastorianus
tagagctttctctactagattattg

SEQ ID NO: 13027 - DNA, 25 bp, Saccharomyces pastorianus
cgatgagttatacgcacaattgaat

SEQ ID NO: 13028 - DNA, 25 bp, Saccharomyces pastorianus
gaacctgggctgtcaatttgttgca

SEQ ID NO: 13029 - DNA, 25 bp, Saccharomyces pastorianus
aaggcttaggtgttccattcgccta

SEQ ID NO: 13030 - DNA, 25 bp, Saccharomyces pastorianus
ggaatggattaacaacgctgatagc

SEQ ID NO: 13031 - DNA, 25 bp, Saccharomyces pastorianus
attgttgccctatacgaaactttga

SEQ ID NO: 13032 - DNA, 25 bp, Saccharomyces pastorianus
gttccattcgcctacaaattatatg

SEQ ID NO: 13033 - DNA, 25 bp, Saccharomyces pastorianus
actagcgcagttgttgcctcaggat

SEQ ID NO: 13034 - DNA, 25 bp, Saccharomyces pastorianus
cttcattttcactttggttgccttt

SEQ ID NO: 13035 - DNA, 25 bp, Saccharomyces pastorianus
aacattactccagcaggttcctttg

SEQ ID NO: 13036 - DNA, 25 bp, Saccharomyces pastorianus
gcattctatgcccttggtatcggta

SEQ ID NO: 13037 - DNA, 25 bp, Saccharomyces pastorianus
ggttgcctttttctgcatcgataaa

SEQ ID NO: 13038 - DNA, 25 bp, Saccharomyces pastorianus
atcagtttcgatggcactagcgcag

SEQ ID NO: 13039 - DNA, 25 bp, Saccharomyces pastorianus
gccggactttcatgcttatcagtag

SEQ ID NO: 13040 - DNA, 25 bp, Saccharomyces pastorianus
gctggttctctagttattgcgtcta

SEQ ID NO: 13041 - DNA, 25 bp, Saccharomyces pastorianus
gtatgcgaccgctacaaactgggct

SEQ ID NO: 13042 - DNA, 25 bp, Saccharomyces pastorianus
gccattgcattccattacctaggta

SEQ ID NO: 13043 - DNA, 25 bp, Saccharomyces pastorianus
gtagaaccattctgctaatcggcct

SEQ ID NO: 13044 - DNA, 25 bp, Saccharomyces pastorianus
gagaaatgctcatctgttcatctga

SEQ ID NO: 13045 - DNA, 25 bp, Saccharomyces pastorianus
catgtcattatggagatttctcgta

SEQ ID NO: 13046 - DNA, 25 bp, Saccharomyces pastorianus
tatcgagggaacaagcactaatggt

SEQ ID NO: 13047 - DNA, 25 bp, Saccharomyces pastorianus
gaccattttgaacaactacgtgaag

SEQ ID NO: 13048 - DNA, 25 bp, Saccharomyces pastorianus
gttcatctgagtttttatcgaggga

SEQ ID NO: 13049 - DNA, 25 bp, Saccharomyces pastorianus
aatttggatcttcggtgccacctta

SEQ ID NO: 13050 - DNA, 25 bp, Saccharomyces pastorianus
atgtaggacaagactcgcccaattt

SEQ ID NO: 13051 - DNA, 25 bp, Saccharomyces pastorianus
gaaagtcaactagtcatgtcattat

SEQ ID NO: 13052 - DNA, 25 bp, Saccharomyces pastorianus
ttcggtgccaccttattgaacatgc

SEQ ID NO: 13053 - DNA, 25 bp, Saccharomyces pastorianus
aaatcattcgacttaactacactag

SEQ ID NO: 13054 - DNA, 25 bp, Saccharomyces pastorianus
agatgcttttgaagaacttccagga

SEQ ID NO: 13055 - DNA, 25 bp, Saccharomyces pastorianus
aatactgttcaggagacgccgcttc

SEQ ID NO: 13056 - DNA, 25 bp, Saccharomyces pastorianus
gattcaccgagccactttcaaaaat

SEQ ID NO: 13057 - DNA, 25 bp, Saccharomyces pastorianus
attcaatcacttcgcagttgagcag

SEQ ID NO: 13058 - DNA, 25 bp, Saccharomyces pastorianus
attactgacgaatctccttcatgta

SEQ ID NO: 13059 - DNA, 25 bp, Saccharomyces pastorianus
gcgcaaatcaccgtctttcagataa

SEQ ID NO: 13060 - DNA, 25 bp, Saccharomyces pastorianus
ggaaccaccaaattctcgtagtagc

SEQ ID NO: 13061 - DNA, 25 bp, Saccharomyces pastorianus
gccatgtaccccaaagaagctcaag

SEQ ID NO: 13062 - DNA, 25 bp, Saccharomyces pastorianus
attcatagggacgactttgttcata

SEQ ID NO: 13063 - DNA, 25 bp, Saccharomyces pastorianus
ggagacgccgcttcctaaagataag

SEQ ID NO: 13064 - DNA, 25 bp, Saccharomyces pastorianus
caaactccgttatccgacttacaga

SEQ ID NO: 13065 - DNA, 25 bp, Saccharomyces pastorianus
catcttgctttttctaatctccaac

SEQ ID NO: 13066 - DNA, 25 bp, Saccharomyces pastorianus
aaatgatggcgctcctaacagtttt

SEQ ID NO: 13067 - DNA, 25 bp, Saccharomyces pastorianus
tgcgcctccgcttaatgaaatccaa

SEQ ID NO: 13068 - DNA, 25 bp, Saccharomyces pastorianus
aatagaattaactttgcgcctccgc

SEQ ID NO: 13069 - DNA, 25 bp, Saccharomyces pastorianus
gccactccgtgggaagtaactacta

SEQ ID NO: 13070 - DNA, 25 bp, Saccharomyces pastorianus
aagcaagtcttacggtttgccactc

SEQ ID NO: 13071 - DNA, 25 bp, Saccharomyces pastorianus
aaaggctctacatattgctcaaaca

SEQ ID NO: 13072 - DNA, 25 bp, Saccharomyces pastorianus
gaatctggctatgtgctatcccaaa

SEQ ID NO: 13073 - DNA, 25 bp, Saccharomyces pastorianus
tccaaattccgcaaactactctaag

SEQ ID NO: 13074 - DNA, 25 bp, Saccharomyces pastorianus
ttatcgatcgattctaagtattacg

SEQ ID NO: 13075 - DNA, 25 bp, Saccharomyces pastorianus
gaattgattattccttctaagcaag

SEQ ID NO: 13076 - DNA, 25 bp, Saccharomyces pastorianus
gtaaatgacttctctcaaattaggt

SEQ ID NO: 13077 - DNA, 25 bp, Saccharomyces pastorianus
ttacgttcgacactatttgaggtta

SEQ ID NO: 13078 - DNA, 25 bp, Saccharomyces pastorianus
gattcttcgtcgcatgctgaaaaag

SEQ ID NO: 13079 - DNA, 25 bp, Saccharomyces pastorianus
gaaccaccattgaataagaccgtac

SEQ ID NO: 13080 - DNA, 25 bp, Saccharomyces pastorianus
tgaatcagattcttcgtcgcatgct

SEQ ID NO: 13081 - DNA, 25 bp, Saccharomyces pastorianus
ggtacacaggtcaaaaatcaatcga

SEQ ID NO: 13082 - DNA, 25 bp, Saccharomyces pastorianus
atatgttttctttacgttcgacact

SEQ ID NO: 13083 - DNA, 25 bp, Saccharomyces pastorianus
agaaattgctacgtggttggaatca

SEQ ID NO: 13084 - DNA, 25 bp, Saccharomyces pastorianus
aggaagaacttcatgagcaagcgaa

SEQ ID NO: 13085 - DNA, 25 bp, Saccharomyces pastorianus
gtggaagtggctcttttttcagaaa

SEQ ID NO: 13086 - DNA, 25 bp, Saccharomyces pastorianus
gaagaatgtcaaatccaatccaaac

SEQ ID NO: 13087 - DNA, 25 bp, Saccharomyces pastorianus
gagttatacgctaaagtttcagcaa

SEQ ID NO: 13088 - DNA, 25 bp, Saccharomyces pastorianus
tttcgagaattacttggccatgcca

SEQ ID NO: 13089 - DNA, 25 bp, Saccharomyces pastorianus
aggattggactttgttcattcccgc

SEQ ID NO: 13090 - DNA, 25 bp, Saccharomyces pastorianus
gttctcgtattctgatgtctttggc

SEQ ID NO: 13091 - DNA, 25 bp, Saccharomyces pastorianus
gatggtattggctttgattgcacaa

SEQ ID NO: 13092 - DNA, 25 bp, Saccharomyces pastorianus
gttgccatgcttgttagtgcactat

SEQ ID NO: 13093 - DNA, 25 bp, Saccharomyces pastorianus
tttccccaatcggtggaggtggcaa

SEQ ID NO: 13094 - DNA, 25 bp, Saccharomyces pastorianus
attttgtgcctcttctccaaaggag

SEQ ID NO: 13095 - DNA, 25 bp, Saccharomyces pastorianus
gtctgcgtacgctataatcatgatg

SEQ ID NO: 13096 - DNA, 25 bp, Saccharomyces pastorianus
tgtcccaacttttcacttggatcac

SEQ ID NO: 13097 - DNA, 25 bp, Saccharomyces pastorianus
tagcaatttccggtttgtcccaact

SEQ ID NO: 13098 - DNA, 25 bp, Saccharomyces pastorianus
gaaggtagaccagcagttgccatgc

SEQ ID NO: 13099 - DNA, 25 bp, Saccharomyces pastorianus
tggctcttcagagattttcttcaag

SEQ ID NO: 13100 - DNA, 25 bp, Saccharomyces pastorianus
agccaagccagacgtcaagccagac

SEQ ID NO: 13101 - DNA, 25 bp, Saccharomyces pastorianus
aagccgaccagacccctgaagatct

SEQ ID NO: 13102 - DNA, 25 bp, Saccharomyces pastorianus
gaggctttcgccaagagacaaggta

SEQ ID NO: 13103 - DNA, 25 bp, Saccharomyces pastorianus
gaaaaccactcccttgaggagactg

SEQ ID NO: 13104 - DNA, 25 bp, Saccharomyces pastorianus
taacctgaaggtgtctgatggctct

SEQ ID NO: 13105 - DNA, 25 bp, Saccharomyces pastorianus
ggagactgatggaggctttcgccaa

SEQ ID NO: 13106 - DNA, 25 bp, Saccharomyces pastorianus
ggaggacaacgatatcatcgaggct

SEQ ID NO: 13107 - DNA, 25 bp, Saccharomyces pastorianus
ttacgacggtatcagaatccaagcc

SEQ ID NO: 13108 - DNA, 25 bp, Saccharomyces pastorianus
gacgtcaagccggagactcacatta

SEQ ID NO: 13109 - DNA, 25 bp, Saccharomyces pastorianus
agccggagactcacattaacctgaa

SEQ ID NO: 13110 - DNA, 25 bp, Saccharomyces pastorianus
gggcaacgatgcatactacacactg

SEQ ID NO: 13111 - DNA, 25 bp, Saccharomyces pastorianus
ggacgagcccaagattttacctatg

SEQ ID NO: 13112 - DNA, 25 bp, Saccharomyces pastorianus
atttagcgggtcacaatggttccaa

SEQ ID NO: 13113 - DNA, 25 bp, Saccharomyces pastorianus
atactacacactgctattgatgctg

SEQ ID NO: 13114 - DNA, 25 bp, Saccharomyces pastorianus
aaaccagatggttcggtggaggcta

SEQ ID NO: 13115 - DNA, 25 bp, Saccharomyces pastorianus
gggtaagctgctaagactatttcat

SEQ ID NO: 13116 - DNA, 25 bp, Saccharomyces pastorianus
aagattggcgttcacatacccgagt

SEQ ID NO: 13117 - DNA, 25 bp, Saccharomyces pastorianus
attaagcgtgatgaatgccaacaac

SEQ ID NO: 13118 - DNA, 25 bp, Saccharomyces pastorianus
aaatctatagcatctgttacggtaa

SEQ ID NO: 13119 - DNA, 25 bp, Saccharomyces pastorianus
ccttcttacataatgcgggcaacga

SEQ ID NO: 13120 - DNA, 25 bp, Saccharomyces pastorianus
gaaagagcttttgtaggtcacagta

SEQ ID NO: 13121 - DNA, 25 bp, Saccharomyces pastorianus
gaccctattctcaaatccatcgaaa

SEQ ID NO: 13122 - DNA, 25 bp, Saccharomyces pastorianus
aaacgcatttccattcacagcaata

SEQ ID NO: 13123 - DNA, 25 bp, Saccharomyces pastorianus
gataactatttcatcagacctgaga

SEQ ID NO: 13124 - DNA, 25 bp, Saccharomyces pastorianus
ataatctgatggaccctattctcaa

SEQ ID NO: 13125 - DNA, 25 bp, Saccharomyces pastorianus
gggacccgaatctaattttggcatc

SEQ ID NO: 13126 - DNA, 25 bp, Saccharomyces pastorianus
tatccgtctttttaccccagtaatg

SEQ ID NO: 13127 - DNA, 25 bp, Saccharomyces pastorianus
accggcatatgagttcaacccatta

SEQ ID NO: 13128 - DNA, 25 bp, Saccharomyces pastorianus
gacctgagaattgggccgagttcac

SEQ ID NO: 13129 - DNA, 25 bp, Saccharomyces pastorianus
aacgcccaggtaaaaccggcatatg

SEQ ID NO: 13130 - DNA, 25 bp, Saccharomyces pastorianus
gaccaacgatgggtttatccccatg

SEQ ID NO: 13131 - DNA, 25 bp, Saccharomyces pastorianus
agggaaattctatcgtatggtcaat

SEQ ID NO: 13132 - DNA, 25 bp, Saccharomyces pastorianus
aatccaggctaccatcttttcgaaa

SEQ ID NO: 13133 - DNA, 25 bp, Saccharomyces pastorianus
gaccaactgcctcatcgtttgaaga

SEQ ID NO: 13134 - DNA, 25 bp, Saccharomyces pastorianus
gccctggcgctaagtccaattggta

SEQ ID NO: 13135 - DNA, 25 bp, Saccharomyces pastorianus
agaagatctgcgtacttggcgtctg

SEQ ID NO: 13136 - DNA, 25 bp, Saccharomyces pastorianus
aagacttccgaccactttcgaagag

SEQ ID NO: 13137 - DNA, 25 bp, Saccharomyces pastorianus
aatcgggttcgatggttacgtcatt

SEQ ID NO: 13138 - DNA, 25 bp, Saccharomyces pastorianus
agttgaagcatttatccgccaccaa

SEQ ID NO: 13139 - DNA, 25 bp, Saccharomyces pastorianus
tacgtcattgaatactaccctgggt

SEQ ID NO: 13140 - DNA, 25 bp, Saccharomyces pastorianus
taccctgggttcagatccatgctaa

SEQ ID NO: 13141 - DNA, 25 bp, Saccharomyces pastorianus
tctgtgccaattgccgctatcttaa

SEQ ID NO: 13142 - DNA, 25 bp, Saccharomyces pastorianus
agaaccccttccaattatgcagtga

SEQ ID NO: 13143 - DNA, 25 bp, Saccharomyces pastorianus
tacgcctcgtggtgtgttcacagta

SEQ ID NO: 13144 - DNA, 25 bp, Saccharomyces pastorianus
agttccccttattcgctattcataa

SEQ ID NO: 13145 - DNA, 25 bp, Saccharomyces pastorianus
tcatcagctttcctgtcacgggata

SEQ ID NO: 13146 - DNA, 25 bp, Saccharomyces pastorianus
agatgcgatcgttcaattggtcaaa

SEQ ID NO: 13147 - DNA, 25 bp, Saccharomyces pastorianus
agattgcagatgtttttgcctcaga

SEQ ID NO: 13148 - DNA, 25 bp, Saccharomyces pastorianus
acagtaagagattcgcgcccgttta

SEQ ID NO: 13149 - DNA, 25 bp, Saccharomyces pastorianus
gttcttgtcaagtattacgcctcgt

SEQ ID NO: 13150 - DNA, 25 bp, Saccharomyces pastorianus
aaatatggattaccgcagctgcccg

SEQ ID NO: 13151 - DNA, 25 bp, Saccharomyces pastorianus
tattgctctctaccctgcaggaaat

SEQ ID NO: 13152 - DNA, 25 bp, Saccharomyces pastorianus
tgcctcagatgagtccattcgtgat

SEQ ID NO: 13153 - DNA, 25 bp, Saccharomyces pastorianus
gaagcaggtacccatcatattgacg

SEQ ID NO: 13154 - DNA, 25 bp, Saccharomyces pastorianus
gaagttcattacactggttccttat

SEQ ID NO: 13155 - DNA, 25 bp, Saccharomyces pastorianus
gttatccaatatataccttttcttc

SEQ ID NO: 13156 - DNA, 25 bp, Saccharomyces pastorianus
gaatgtcaaatcaaggcaatgccag

SEQ ID NO: 13157 - DNA, 25 bp, Saccharomyces pastorianus
ggatttggaaatcggtgtcactaaa

SEQ ID NO: 13158 - DNA, 25 bp, Saccharomyces pastorianus
agctggctctttaacggatttggaa

SEQ ID NO: 13159 - DNA, 25 bp, Saccharomyces pastorianus
gttgctggtatgtgcattggcgaaa

SEQ ID NO: 13160 - DNA, 25 bp, Saccharomyces pastorianus
aatacccgtggaagaatgtcaaatc

SEQ ID NO: 13161 - DNA, 25 bp, Saccharomyces pastorianus
ccccattgcttttgaactaggtgtt

SEQ ID NO: 13162 - DNA, 25 bp, Saccharomyces pastorianus
gaatcaggtacagtatttgactcaa

SEQ ID NO: 13163 - DNA, 25 bp, Saccharomyces pastorianus
tttttgccgcagttttagctggctc

SEQ ID NO: 13164 - DNA, 25 bp, Saccharomyces pastorianus
tccaagcgctgatttggtgttcgac

SEQ ID NO: 13165 - DNA, 25 bp, Saccharomyces pastorianus
gaacgacttgaaccatccatccatt

SEQ ID NO: 13166 - DNA, 25 bp, Saccharomyces pastorianus
atttaaatactccttctagcacgcc

SEQ ID NO: 13167 - DNA, 25 bp, Saccharomyces pastorianus
aagtctctgatcaaggctatccatt

SEQ ID NO: 13168 - DNA, 25 bp, Saccharomyces pastorianus
tccatccattttccagtactcttta

SEQ ID NO: 13169 - DNA, 25 bp, Saccharomyces pastorianus
aacggaatcccgatattcttcatta

SEQ ID NO: 13170 - DNA, 25 bp, Saccharomyces pastorianus
gccttgcacagctgctcataataag

SEQ ID NO: 13171 - DNA, 25 bp, Saccharomyces pastorianus
gcccacaatcaggtccacatttaaa

SEQ ID NO: 13172 - DNA, 25 bp, Saccharomyces pastorianus
atacctgaacgtagtgcttccgcaa

SEQ ID NO: 13173 - DNA, 25 bp, Saccharomyces pastorianus
gtacggaaatttccaagccgccact

SEQ ID NO: 13174 - DNA, 25 bp, Saccharomyces pastorianus
cagagtatttattatgcaacggcat

SEQ ID NO: 13175 - DNA, 25 bp, Saccharomyces pastorianus
gatgaactacccaagatcactacaa

SEQ ID NO: 13176 - DNA, 25 bp, Saccharomyces pastorianus
gggtgctggtgtcttcggtgctgcc

SEQ ID NO: 13177 - DNA, 25 bp, Saccharomyces pastorianus
tgctgctgcttccaacgctttgggt

SEQ ID NO: 13178 - DNA, 25 bp, Saccharomyces pastorianus
ggtgctgctgcttccaacgctttgg

SEQ ID NO: 13179 - DNA, 25 bp, Saccharomyces pastorianus
tgctgcttccaacgctttgggtgct

SEQ ID NO: 13180 - DNA, 25 bp, Saccharomyces pastorianus
ttcgctactgttgccgctgtccaag

SEQ ID NO: 13181 - DNA, 25 bp, Saccharomyces pastorianus
atcgtcgctgccttcgctactgttg

SEQ ID NO: 13182 - DNA, 25 bp, Saccharomyces pastorianus
tgcttccaacgctttgggtgctggt

SEQ ID NO: 13183 - DNA, 25 bp, Saccharomyces pastorianus
aattcaagaccatcgtcgctgcctt

SEQ ID NO: 13184 - DNA, 25 bp, Saccharomyces pastorianus
caacgctttgggtgctggtgtcttc

SEQ ID NO: 13185 - DNA, 25 bp, Saccharomyces pastorianus
ttccaacgctttgggtgctggtgtc

SEQ ID NO: 13186 - DNA, 25 bp, Saccharomyces pastorianus
aacgctttgggtgctggtgtcttcg

SEQ ID NO: 13187 - DNA, 25 bp, Saccharomyces pastorianus
tggtcttcattgcaattttcgtccc

SEQ ID NO: 13188 - DNA, 25 bp, Saccharomyces pastorianus
ccccattagcagtctggctgaagag

SEQ ID NO: 13189 - DNA, 25 bp, Saccharomyces pastorianus
ggatctgctcattaatttcctgctg

SEQ ID NO: 13190 - DNA, 25 bp, Saccharomyces pastorianus
gcccgcgattggttattggtcttca

SEQ ID NO: 13191 - DNA, 25 bp, Saccharomyces pastorianus
tgggattcttccctggtttgatcca

SEQ ID NO: 13192 - DNA, 25 bp, Saccharomyces pastorianus
agggttcttctctaaggatctgctc

SEQ ID NO: 13193 - DNA, 25 bp, Saccharomyces pastorianus
ttagctgccacccatacgaggaaaa

SEQ ID NO: 13194 - DNA, 25 bp, Saccharomyces pastorianus
atgccatgtacgtgattagctgcca

SEQ ID NO: 13195 - DNA, 25 bp, Saccharomyces pastorianus
tccctggtttgatccatgccatgta

SEQ ID NO: 13196 - DNA, 25 bp, Saccharomyces pastorianus
aaaacgaggcctctgggtactcgca

SEQ ID NO: 13197 - DNA, 25 bp, Saccharomyces pastorianus
tttcctgctgtttttgctgggattc

SEQ ID NO: 13198 - DNA, 25 bp, Saccharomyces pastorianus
gctggttacaccatagtcgagctag

SEQ ID NO: 13199 - DNA, 25 bp, Saccharomyces pastorianus
gagctactaccaactagtgccggag

SEQ ID NO: 13200 - DNA, 25 bp, Saccharomyces pastorianus
tttagcggtaatcttgttccaccca

SEQ ID NO: 13201 - DNA, 25 bp, Saccharomyces pastorianus
tgcacgataagtacttcccggatct

SEQ ID NO: 13202 - DNA, 25 bp, Saccharomyces pastorianus
ggtgtattgccatacaaaccctggg

SEQ ID NO: 13203 - DNA, 25 bp, Saccharomyces pastorianus
attccggcttgcaccatcatagcga

SEQ ID NO: 13204 - DNA, 25 bp, Saccharomyces pastorianus
cccggatctgcccaaagaggtcaat

SEQ ID NO: 13205 - DNA, 25 bp, Saccharomyces pastorianus
gcaagatctactttcgcatctcaaa

SEQ ID NO: 13206 - DNA, 25 bp, Saccharomyces pastorianus
gatgcagcctatccgccaggaggaa

SEQ ID NO: 13207 - DNA, 25 bp, Saccharomyces pastorianus
ttgaatcactggaaattgcctcgga

SEQ ID NO: 13208 - DNA, 25 bp, Saccharomyces pastorianus
atagaatctaccgttcattccggct

SEQ ID NO: 13209 - DNA, 25 bp, Saccharomyces pastorianus
gaatcatatgccaggtcgtatagga

SEQ ID NO: 13210 - DNA, 25 bp, Saccharomyces pastorianus
gtccctgtagccagccaatttgtga

SEQ ID NO: 13211 - DNA, 25 bp, Saccharomyces pastorianus
agttgacccatcatttgctaccaag

SEQ ID NO: 13212 - DNA, 25 bp, Saccharomyces pastorianus
acccctcctatctaaactatgtgtc

SEQ ID NO: 13213 - DNA, 25 bp, Saccharomyces pastorianus
tacattttaaagtcacccctcctat

SEQ ID NO: 13214 - DNA, 25 bp, Saccharomyces pastorianus
gaaaatcctgtcatgcaaactgccc

SEQ ID NO: 13215 - DNA, 25 bp, Saccharomyces pastorianus
caatttgtgaacttttcgggctaca

SEQ ID NO: 13216 - DNA, 25 bp, Saccharomyces pastorianus
taaactatgtgtccctgtagccagc

SEQ ID NO: 13217 - DNA, 25 bp, Saccharomyces pastorianus
agaagacgttccttacttgttgcct

SEQ ID NO: 13218 - DNA, 25 bp, Saccharomyces pastorianus
gagctcatcaaaccgagttgaccca

SEQ ID NO: 13219 - DNA, 25 bp, Saccharomyces pastorianus
aactgccctaagaaggttgcctgaa

SEQ ID NO: 13220 - DNA, 25 bp, Saccharomyces pastorianus
gttggtccttgggatgattactcca

SEQ ID NO: 13221 - DNA, 25 bp, Saccharomyces pastorianus
attgcatccgatatctacgctaacg

SEQ ID NO: 13222 - DNA, 25 bp, Saccharomyces pastorianus
tgccggccacggtactttgttcgat

SEQ ID NO: 13223 - DNA, 25 bp, Saccharomyces pastorianus
gatgactaccagatattctttgcat

SEQ ID NO: 13224 - DNA, 25 bp, Saccharomyces pastorianus
taaggaagccctagacggccaagat

SEQ ID NO: 13225 - DNA, 25 bp, Saccharomyces pastorianus
aataactggtttcaccgatgtgggt

SEQ ID NO: 13226 - DNA, 25 bp, Saccharomyces pastorianus
gtggaagctttgcatcctttcaata

SEQ ID NO: 13227 - DNA, 25 bp, Saccharomyces pastorianus
aaactggtcactggtgtcaacccgg

SEQ ID NO: 13228 - DNA, 25 bp, Saccharomyces pastorianus
tgaaaccgttttgggcttggacagt

SEQ ID NO: 13229 - DNA, 25 bp, Saccharomyces pastorianus
gaagtatttggctccggttggtcct

SEQ ID NO: 13230 - DNA, 25 bp, Saccharomyces pastorianus
tcctgctattttcgatggcttaacg

SEQ ID NO: 13231 - DNA, 25 bp, Saccharomyces pastorianus
ggacatgccatttcctttgaagaat

SEQ ID NO: 13232 - DNA, 25 bp, Saccharomyces pastorianus
atgcagctggtttgattggtgacgc

SEQ ID NO: 13233 - DNA, 25 bp, Saccharomyces pastorianus
gaagagactctgaactcaaagctga

SEQ ID NO: 13234 - DNA, 25 bp, Saccharomyces pastorianus
taaatcttgtgggtacggtcatgta

SEQ ID NO: 13235 - DNA, 25 bp, Saccharomyces pastorianus
gagtacttgaaggacatgccatttc

SEQ ID NO: 13236 - DNA, 25 bp, Saccharomyces pastorianus
gagcacggtgttggcttccataaaa

SEQ ID NO: 13237 - DNA, 25 bp, Saccharomyces pastorianus
aactgagcggtttccttgaagagac

SEQ ID NO: 13238 - DNA, 25 bp, Saccharomyces pastorianus
gttctcattgagacctcaggttcta

SEQ ID NO: 13239 - DNA, 25 bp, Saccharomyces pastorianus
tccaatcaaagaagggttccatcag

SEQ ID NO: 13240 - DNA, 25 bp, Saccharomyces pastorianus
tcagtatcagaagccgtgacagaaa

SEQ ID NO: 13241 - DNA, 25 bp, Saccharomyces pastorianus
aatatgacatgtcccttcagttgaa

SEQ ID NO: 13242 - DNA, 25 bp, Saccharomyces pastorianus
agagaattgctgatcccacgttggc

SEQ ID NO: 13243 - DNA, 25 bp, Saccharomyces pastorianus
tgctttggtcatgtcttatcgttat

SEQ ID NO: 13244 - DNA, 25 bp, Saccharomyces pastorianus
gactcaggcgcacattcaggtataa

SEQ ID NO: 13245 - DNA, 25 bp, Saccharomyces pastorianus
gattgtttcattcggtcttttggtc

SEQ ID NO: 13246 - DNA, 25 bp, Saccharomyces pastorianus
gtaacttcattgtacttggctacct

SEQ ID NO: 13247 - DNA, 25 bp, Saccharomyces pastorianus
attcggcagttctgttagcggtgct

SEQ ID NO: 13248 - DNA, 25 bp, Saccharomyces pastorianus
tacggctcgcctttcgaatttatta

SEQ ID NO: 13249 - DNA, 25 bp, Saccharomyces pastorianus
tagcggtgctgtctggaccaatatt

SEQ ID NO: 13250 - DNA, 25 bp, Saccharomyces pastorianus
aagcttctgctggaactcacgcgag

SEQ ID NO: 13251 - DNA, 25 bp, Saccharomyces pastorianus
tttggcattctgtttccccttatta

SEQ ID NO: 13252 - DNA, 25 bp, Saccharomyces pastorianus
gaactaagcccttcatcatattcgg

SEQ ID NO: 13253 - DNA, 25 bp, Saccharomyces pastorianus
taactacctgtaacttgggtgcgtt

SEQ ID NO: 13254 - DNA, 25 bp, Saccharomyces pastorianus
gattgtcagcagcactcaaactatt

SEQ ID NO: 13255 - DNA, 25 bp, Saccharomyces pastorianus
atgctgcggcttaatgggttattca

SEQ ID NO: 13256 - DNA, 25 bp, Saccharomyces pastorianus
gctagactgtgctttgggtttaaca

SEQ ID NO: 13257 - DNA, 25 bp, Saccharomyces pastorianus
ggcgaaacttccatactacttttgc

SEQ ID NO: 13258 - DNA, 25 bp, Saccharomyces pastorianus
gaactaattggagctactacggcat

SEQ ID NO: 13259 - DNA, 25 bp, Saccharomyces pastorianus
tatttcggtaatatgctgcggctta

SEQ ID NO: 13260 - DNA, 25 bp, Saccharomyces pastorianus
tttcccaggaacagatgcagctatc

SEQ ID NO: 13261 - DNA, 25 bp, Saccharomyces pastorianus
tactacggcatccacaatggcttac

SEQ ID NO: 13262 - DNA, 25 bp, Saccharomyces pastorianus
ggtctttattaccatgggcatatca

SEQ ID NO: 13263 - DNA, 25 bp, Saccharomyces pastorianus
taacatgttaaccacttttccgatg

SEQ ID NO: 13264 - DNA, 25 bp, Saccharomyces pastorianus
acatacttcttgtcgttgcaaccag

SEQ ID NO: 13265 - DNA, 25 bp, Saccharomyces pastorianus
cattttgtccacatacatcggcagt

SEQ ID NO: 13266 - DNA, 25 bp, Saccharomyces pastorianus
gatgacactccaaacgctttgatct

SEQ ID NO: 13267 - DNA, 25 bp, Saccharomyces pastorianus
aaggacatcttgttcgacatccccg

SEQ ID NO: 13268 - DNA, 25 bp, Saccharomyces pastorianus
acagtgagttcttcgaatcgggcca

SEQ ID NO: 13269 - DNA, 25 bp, Saccharomyces pastorianus
gttgctggtctgttgacatacttct

SEQ ID NO: 13270 - DNA, 25 bp, Saccharomyces pastorianus
gggccagaaatctttgacccctcaa

SEQ ID NO: 13271 - DNA, 25 bp, Saccharomyces pastorianus
acatggacgagttcatcggttcgaa

SEQ ID NO: 13272 - DNA, 25 bp, Saccharomyces pastorianus
gaggccaccgctactttgtctggta

SEQ ID NO: 13273 - DNA, 25 bp, Saccharomyces pastorianus
gacaccaaaaagtctcactcgtctt

SEQ ID NO: 13274 - DNA, 25 bp, Saccharomyces pastorianus
ttgcaaccaggttccgacagtgagt

SEQ ID NO: 13275 - DNA, 25 bp, Saccharomyces pastorianus
cattgcacggcacccggtaaagcgg

SEQ ID NO: 13276 - DNA, 25 bp, Saccharomyces pastorianus
caccaaccacaattcgcggcagaga

SEQ ID NO: 13277 - DNA, 25 bp, Saccharomyces pastorianus
aattcgcggcagagaccaggcgctg

SEQ ID NO: 13278 - DNA, 25 bp, Saccharomyces pastorianus
acactcactgccacctgaaagagct

SEQ ID NO: 13279 - DNA, 25 bp, Saccharomyces pastorianus
cccttcaaacggctctttgagcatt

SEQ ID NO: 13280 - DNA, 25 bp, Saccharomyces pastorianus
tgccacctgaaagagctcgtgcagt

SEQ ID NO: 13281 - DNA, 25 bp, Saccharomyces pastorianus
tttgagcattgcacggcacccggta

SEQ ID NO: 13282 - DNA, 25 bp, Saccharomyces pastorianus
gccagttcaagggagcagactacat

SEQ ID NO: 13283 - DNA, 25 bp, Saccharomyces pastorianus
ctcgtgcagtgggagtgccagttca

SEQ ID NO: 13284 - DNA, 25 bp, Saccharomyces pastorianus
agactacatctgctcgcccttcaaa

SEQ ID NO: 13285 - DNA, 25 bp, Saccharomyces pastorianus
aacggctctttgagcattgcacggc

SEQ ID NO: 13286 - DNA, 25 bp, Saccharomyces pastorianus
agggacgaaatctccactttggaca

SEQ ID NO: 13287 - DNA, 25 bp, Saccharomyces pastorianus
ttttttcggtgatctatctcttggg

SEQ ID NO: 13288 - DNA, 25 bp, Saccharomyces pastorianus
agctgcaacgcttcatgaccaagtt

SEQ ID NO: 13289 - DNA, 25 bp, Saccharomyces pastorianus
gctgttcccagttgccatactaaaa

SEQ ID NO: 13290 - DNA, 25 bp, Saccharomyces pastorianus
aaatttggcgcgttcatcgtcaaaa

SEQ ID NO: 13291 - DNA, 25 bp, Saccharomyces pastorianus
gaaactgcaaactaagctgttccca

SEQ ID NO: 13292 - DNA, 25 bp, Saccharomyces pastorianus
gattacatacgagtacctttccaag

SEQ ID NO: 13293 - DNA, 25 bp, Saccharomyces pastorianus
tattggtcaaccgaacagcttttga

SEQ ID NO: 13294 - DNA, 25 bp, Saccharomyces pastorianus
gagacagttcaatcgtccactgtag

SEQ ID NO: 13295 - DNA, 25 bp, Saccharomyces pastorianus
gatttcctttacgaagactacttga

SEQ ID NO: 13296 - DNA, 25 bp, Saccharomyces pastorianus
agactttgccgccaaatcacgaaac

SEQ ID NO: 13297 - DNA, 25 bp, Saccharomyces pastorianus
ttcaaatcttttggcggctgcaggt

SEQ ID NO: 13298 - DNA, 25 bp, Saccharomyces pastorianus
ggctgcaggtacagactcacatgtt

SEQ ID NO: 13299 - DNA, 25 bp, Saccharomyces pastorianus
aattttcaccccatgtggatggcgt

SEQ ID NO: 13300 - DNA, 25 bp, Saccharomyces pastorianus
ggacggtgttcctgaattaatcatg

SEQ ID NO: 13301 - DNA, 25 bp, Saccharomyces pastorianus
agagcaaactcctgacgatgcagag

SEQ ID NO: 13302 - DNA, 25 bp, Saccharomyces pastorianus
gaagtgctcgcatagtttaccagtt

SEQ ID NO: 13303 - DNA, 25 bp, Saccharomyces pastorianus
tagcgtttagtcatcactcttcaaa

SEQ ID NO: 13304 - DNA, 25 bp, Saccharomyces pastorianus
tggtcgtttctagtggttccgataa

SEQ ID NO: 13305 - DNA, 25 bp, Saccharomyces pastorianus
caggccatgaagacgcggtgactaa

SEQ ID NO: 13306 - DNA, 25 bp, Saccharomyces pastorianus
tgaacgcacaaataccctggttggt

SEQ ID NO: 13307 - DNA, 25 bp, Saccharomyces pastorianus
gaaccattgcaccatatgtcaggcc

SEQ ID NO: 13308 - DNA, 25 bp, Saccharomyces pastorianus
ctctttggtcatcaccgccttgaag

SEQ ID NO: 13309 - DNA, 25 bp, Saccharomyces pastorianus
aatccgtcggctgtcgtgttgactt

SEQ ID NO: 13310 - DNA, 25 bp, Saccharomyces pastorianus
ggtcatcaccgccttgaaggaacca

SEQ ID NO: 13311 - DNA, 25 bp, Saccharomyces pastorianus
ttcctctttggtcatcaccgccttg

SEQ ID NO: 13312 - DNA, 25 bp, Saccharomyces pastorianus
gatgacatcattgaaattgctagac

SEQ ID NO: 13313 - DNA, 25 bp, Saccharomyces pastorianus
aggtctatctccaaagaaggtcggt

SEQ ID NO: 13314 - DNA, 25 bp, Saccharomyces pastorianus
aagatcggtcctttaggtctatctc

SEQ ID NO: 13315 - DNA, 25 bp, Saccharomyces pastorianus
tgttgacttcaagaatcctcatgat

SEQ ID NO: 13316 - DNA, 25 bp, Saccharomyces pastorianus
ggcttctgttactaaggaaatctta

SEQ ID NO: 13317 - DNA, 25 bp, Saccharomyces pastorianus
tacttatacctaagagccgttggtg

SEQ ID NO: 13318 - DNA, 25 bp, Saccharomyces pastorianus
atcttaggtactgctcaatccgtcg

SEQ ID NO: 13319 - DNA, 25 bp, Saccharomyces pastorianus
gagagtcatgcaaactgctgcgttc

SEQ ID NO: 13320 - DNA, 25 bp, Saccharomyces pastorianus
gtccaagaaagtgtttctaccgcaa

SEQ ID NO: 13321 - DNA, 25 bp, Saccharomyces pastorianus
gaacatgttatcattccaagaactg

SEQ ID NO: 13322 - DNA, 25 bp, Saccharomyces pastorianus
gaagagtcaatgctatcgaacatgt

SEQ ID NO: 13323 - DNA, 25 bp, Saccharomyces pastorianus
aactgctgcgttctcattagccgaa

SEQ ID NO: 13324 - DNA, 25 bp, Saccharomyces pastorianus
attagccgaagtttcctacgcaaca

SEQ ID NO: 13325 - DNA, 25 bp, Saccharomyces pastorianus
aatttgaatcttacattgaccctga

SEQ ID NO: 13326 - DNA, 25 bp, Saccharomyces pastorianus
acagactgcgttcatcattttggat

SEQ ID NO: 13327 - DNA, 25 bp, Saccharomyces pastorianus
gtgagtggtgtttacttgtcccaat

SEQ ID NO: 13328 - DNA, 25 bp, Saccharomyces pastorianus
gaaaccttagttgaattggcttctc

SEQ ID NO: 13329 - DNA, 25 bp, Saccharomyces pastorianus
tgaattggcttctctacagactgcg

SEQ ID NO: 13330 - DNA, 25 bp, Saccharomyces pastorianus
gttggacctgctaaattctgccgtt

SEQ ID NO: 13331 - DNA, 25 bp, Saccharomyces pastorianus
aggaataaggcccaccgtcagaggt

SEQ ID NO: 13332 - DNA, 25 bp, Saccharomyces pastorianus
agtgcgactggcgaattatcttata

SEQ ID NO: 13333 - DNA, 25 bp, Saccharomyces pastorianus
ggtgggaaggtcgatcctgctatct

SEQ ID NO: 13334 - DNA, 25 bp, Saccharomyces pastorianus
attgctaccgttggtgtggtctcca

SEQ ID NO: 13335 - DNA, 25 bp, Saccharomyces pastorianus
agaacaggtctctcggtaaagccgg

SEQ ID NO: 13336 - DNA, 25 bp, Saccharomyces pastorianus
gtgatggtttacgtccaggcgatat

SEQ ID NO: 13337 - DNA, 25 bp, Saccharomyces pastorianus
catcgttatgtctctttggaagcca

SEQ ID NO: 13338 - DNA, 25 bp, Saccharomyces pastorianus
gattcctatcggtactattgttcat

SEQ ID NO: 13339 - DNA, 25 bp, Saccharomyces pastorianus
agagttcttgcgaaactgcctgaga

SEQ ID NO: 13340 - DNA, 25 bp, Saccharomyces pastorianus
gtaactgtttacctatctctatgat

SEQ ID NO: 13341 - DNA, 25 bp, Saccharomyces pastorianus
ttacctggacttccttggattccaa

SEQ ID NO: 13342 - DNA, 25 bp, Saccharomyces pastorianus
gttctgaagtataacgtcctttcta

SEQ ID NO: 13343 - DNA, 25 bp, Saccharomyces pastorianus
atggcgacgaaatctctaccgtgga

SEQ ID NO: 13344 - DNA, 25 bp, Saccharomyces pastorianus
attggactattttgagagccctcta

SEQ ID NO: 13345 - DNA, 25 bp, Saccharomyces pastorianus
ttccaattggaaggcgcctctgtat

SEQ ID NO: 13346 - DNA, 25 bp, Saccharomyces pastorianus
agtctaattccctgcttcgtatcat

SEQ ID NO: 13347 - DNA, 25 bp, Saccharomyces pastorianus
attggccaaatcttcgaatccgtca

SEQ ID NO: 13348 - DNA, 25 bp, Saccharomyces pastorianus
aagatcgtcattgggtttgaacaga

SEQ ID NO: 13349 - DNA, 25 bp, Saccharomyces pastorianus
gcgcctctgtatttggcatgttaat

SEQ ID NO: 13350 - DNA, 25 bp, Saccharomyces pastorianus
ttgagagccctctaattacctggac

SEQ ID NO: 13351 - DNA, 25 bp, Saccharomyces pastorianus
gatttatgttcccaatgagaccgaa

SEQ ID NO: 13352 - DNA, 25 bp, Saccharomyces pastorianus
agaatggccctgtacaaaatcgacg

SEQ ID NO: 13353 - DNA, 25 bp, Saccharomyces pastorianus
tggtcgggaacctcaagtttatcaa

SEQ ID NO: 13354 - DNA, 25 bp, Saccharomyces pastorianus
aagccggcgtcccattgaaacagta

SEQ ID NO: 13355 - DNA, 25 bp, Saccharomyces pastorianus
atctctgaggccttcgattatgcaa

SEQ ID NO: 13356 - DNA, 25 bp, Saccharomyces pastorianus
tggcccgtttctgtagcgacaaagg

SEQ ID NO: 13357 - DNA, 25 bp, Saccharomyces pastorianus
tgggtggcagagtatccttccacta

SEQ ID NO: 13358 - DNA, 25 bp, Saccharomyces pastorianus
aatcgacggtgactggaaggcccaa

SEQ ID NO: 13359 - DNA, 25 bp, Saccharomyces pastorianus
gattccaacggtcctaccaagattt

SEQ ID NO: 13360 - DNA, 25 bp, Saccharomyces pastorianus
atctgtctgtccaagtccatgggtg

SEQ ID NO: 13361 - DNA, 25 bp, Saccharomyces pastorianus
caacttcgtcttcctagacctaaag

SEQ ID NO: 13362 - DNA, 25 bp, Saccharomyces pastorianus
gaccctgacgtccttgtcaagaagg

SEQ ID NO: 13363 - DNA, 25 bp, Saccharomyces pastorianus
acaccctctcattcgaacattttaa

SEQ ID NO: 13364 - DNA, 25 bp, Saccharomyces pastorianus
aagtcagcatcgtcttccggtaatg

SEQ ID NO: 13365 - DNA, 25 bp, Saccharomyces pastorianus
acttcgatgtgcctgtaactccaaa

SEQ ID NO: 13366 - DNA, 25 bp, Saccharomyces pastorianus
aggaagatcgttccatgcctcatca

SEQ ID NO: 13367 - DNA, 25 bp, Saccharomyces pastorianus
agtaccaaatcttagtccacggcgc

SEQ ID NO: 13368 - DNA, 25 bp, Saccharomyces pastorianus
acacgacgttcccattataccagga

SEQ ID NO: 13369 - DNA, 25 bp, Saccharomyces pastorianus
acgggaaacctcagtccgagagtct

SEQ ID NO: 13370 - DNA, 25 bp, Saccharomyces pastorianus
aggtgccaacaaaggactctcccaa

SEQ ID NO: 13371 - DNA, 25 bp, Saccharomyces pastorianus
agcaatagcagtatctcgtcagcct

SEQ ID NO: 13372 - DNA, 25 bp, Saccharomyces pastorianus
agcctggtctaagttcaagcacaag

SEQ ID NO: 13373 - DNA, 25 bp, Saccharomyces pastorianus
tggaacccaactacaaatcagcctt

SEQ ID NO: 13374 - DNA, 25 bp, Saccharomyces pastorianus
gttctggaaagaaaggtgcaactct

SEQ ID NO: 13375 - DNA, 25 bp, Saccharomyces pastorianus
aaagtgcagaattcaaaccaggttc

SEQ ID NO: 13376 - DNA, 25 bp, Saccharomyces pastorianus
gaagggctactcatacacggatgca

SEQ ID NO: 13377 - DNA, 25 bp, Saccharomyces pastorianus
aaaccagatgtcaacaatgccacac

SEQ ID NO: 13378 - DNA, 25 bp, Saccharomyces pastorianus
tgagaacaacatgtccgagtacttg

SEQ ID NO: 13379 - DNA, 25 bp, Saccharomyces pastorianus
gggtcctaatctgcatggtatcttt

SEQ ID NO: 13380 - DNA, 25 bp, Saccharomyces pastorianus
gtcaacaatgccacacaatagaaga

SEQ ID NO: 13381 - DNA, 25 bp, Saccharomyces pastorianus
ggctactcatacacggatgcaaata

SEQ ID NO: 13382 - DNA, 25 bp, Saccharomyces pastorianus
gtgcaactctatttaaaaccagatg

SEQ ID NO: 13383 - DNA, 25 bp, Saccharomyces pastorianus
actctggtcaagtgaagggctactc

SEQ ID NO: 13384 - DNA, 25 bp, Saccharomyces pastorianus
caataaagtgggtcctaatctgcat

SEQ ID NO: 13385 - DNA, 25 bp, Saccharomyces pastorianus
attcaggtgtatttcgcatgcgata

SEQ ID NO: 13386 - DNA, 25 bp, Saccharomyces pastorianus
aagtgaactatacccctgaagacga

SEQ ID NO: 13387 - DNA, 25 bp, Saccharomyces pastorianus
aaggcgacaatgcttcatctggcgg

SEQ ID NO: 13388 - DNA, 25 bp, Saccharomyces pastorianus
tgaagacgaccaagccatttcgcgc

SEQ ID NO: 13389 - DNA, 25 bp, Saccharomyces pastorianus
acgtcagacctaccagccgaagatg

SEQ ID NO: 13390 - DNA, 25 bp, Saccharomyces pastorianus
atttgcacaagctgctcaaggcgac

SEQ ID NO: 13391 - DNA, 25 bp, Saccharomyces pastorianus
agccgaagatgacctatttgcacaa

SEQ ID NO: 13392 - DNA, 25 bp, Saccharomyces pastorianus
gaaggcgaaggctctttccaagtga

SEQ ID NO: 13393 - DNA, 25 bp, Saccharomyces pastorianus
aacccagaggtgtttgtttctatgt

SEQ ID NO: 13394 - DNA, 25 bp, Saccharomyces pastorianus
gctgcggctgcgaccgaagaatcat

SEQ ID NO: 13395 - DNA, 25 bp, Saccharomyces pastorianus
gggttccatcggcttaactgtagaa

SEQ ID NO: 13396 - DNA, 25 bp, Saccharomyces pastorianus
gcatatttacgagccttccagtgat

SEQ ID NO: 13397 - DNA, 25 bp, Saccharomyces pastorianus
gaatccgcgagttctacaacaagat

SEQ ID NO: 13398 - DNA, 25 bp, Saccharomyces pastorianus
gccccactatgtaatctggcatatt

SEQ ID NO: 13399 - DNA, 25 bp, Saccharomyces pastorianus
gaggtgtctctatcctggcaaaggc

SEQ ID NO: 13400 - DNA, 25 bp, Saccharomyces pastorianus
tggcaaaggccaaggtcttcagaac

SEQ ID NO: 13401 - DNA, 25 bp, Saccharomyces pastorianus
aactggacggtatcggaggtgtctc

SEQ ID NO: 13402 - DNA, 25 bp, Saccharomyces pastorianus
ttacgagccttccagtgatgactta

SEQ ID NO: 13403 - DNA, 25 bp, Saccharomyces pastorianus
tgaactacaacgttatcggcctgcc

SEQ ID NO: 13404 - DNA, 25 bp, Saccharomyces pastorianus
aagcattcggcagattgtctcgcag

SEQ ID NO: 13405 - DNA, 25 bp, Saccharomyces pastorianus
gatgacttaaaacacatggcctgga

SEQ ID NO: 13406 - DNA, 25 bp, Saccharomyces pastorianus
aggtcttcagaacaggctcgcactt

SEQ ID NO: 13407 - DNA, 25 bp, Saccharomyces pastorianus
aggtccacatggtcgccattgatat

SEQ ID NO: 13408 - DNA, 25 bp, Saccharomyces pastorianus
ccatgcaagccgctttcgacgaagg

SEQ ID NO: 13409 - DNA, 25 bp, Saccharomyces pastorianus
gtgacaccatgcaagccgctttcga

SEQ ID NO: 13410 - DNA, 25 bp, Saccharomyces pastorianus
attgggtgacaccatgcaagccgct

SEQ ID NO: 13411 - DNA, 25 bp, Saccharomyces pastorianus
aaggtccacatggtcgccattgata

SEQ ID NO: 13412 - DNA, 25 bp, Saccharomyces pastorianus
ccacatggtcgccattgatatcttc

SEQ ID NO: 13413 - DNA, 25 bp, Saccharomyces pastorianus
tgggtgacaccatgcaagccgcttt

SEQ ID NO: 13414 - DNA, 25 bp, Saccharomyces pastorianus
ggtccacatggtcgccattgatatc

SEQ ID NO: 13415 - DNA, 25 bp, Saccharomyces pastorianus
gccaaggtccacatggtcgccattg

SEQ ID NO: 13416 - DNA, 25 bp, Saccharomyces pastorianus
gaaaccgccgatgccggtacctcca

SEQ ID NO: 13417 - DNA, 25 bp, Saccharomyces pastorianus
acgccaaggtccacatggtcgccat

SEQ ID NO: 13418 - DNA, 25 bp, Saccharomyces pastorianus
atggaagtcccagttgtcaagagaa

SEQ ID NO: 13419 - DNA, 25 bp, Saccharomyces pastorianus
ccatgcaagccgctttcgacgaagg

SEQ ID NO: 13420 - DNA, 25 bp, Saccharomyces pastorianus
gtgacaccatgcaagccgctttcga

SEQ ID NO: 13421 - DNA, 25 bp, Saccharomyces pastorianus
attgggtgacaccatgcaagccgct

SEQ ID NO: 13422 - DNA, 25 bp, Saccharomyces pastorianus
aaggtccacatggtcgccattgata

SEQ ID NO: 13423 - DNA, 25 bp, Saccharomyces pastorianus
acaccaaggatgacgtcaaggcccc

SEQ ID NO: 13424 - DNA, 25 bp, Saccharomyces pastorianus
ccacatggtcgccattgatatcttc

SEQ ID NO: 13425 - DNA, 25 bp, Saccharomyces pastorianus
tgggtgacaccatgcaagccgcttt

SEQ ID NO: 13426 - DNA, 25 bp, Saccharomyces pastorianus
ggtccacatggtcgccattgatatc

SEQ ID NO: 13427 - DNA, 25 bp, Saccharomyces pastorianus
gaaaccgccgatgccggtacctcca

SEQ ID NO: 13428 - DNA, 25 bp, Saccharomyces pastorianus
acgccaaggtccacatggtcgccat

SEQ ID NO: 13429 - DNA, 25 bp, Saccharomyces pastorianus
ggcaagtaattcagggtcaccaatc

SEQ ID NO: 13430 - DNA, 25 bp, Saccharomyces pastorianus
aggttatccctgatctcgggtataa

SEQ ID NO: 13431 - DNA, 25 bp, Saccharomyces pastorianus
gtggaaccaggtactatctctactg

SEQ ID NO: 13432 - DNA, 25 bp, Saccharomyces pastorianus
gcctcttactgaaatgggtacccca

SEQ ID NO: 13433 - DNA, 25 bp, Saccharomyces pastorianus
ctcgggtataattgcgcgtttgatg

SEQ ID NO: 13434 - DNA, 25 bp, Saccharomyces pastorianus
ataacgatatcatgtcgccacttcc

SEQ ID NO: 13435 - DNA, 25 bp, Saccharomyces pastorianus
gctacaccatcatcggcgcgtagaa

SEQ ID NO: 13436 - DNA, 25 bp, Saccharomyces pastorianus
atcagatgaaggtgccccagggcct

SEQ ID NO: 13437 - DNA, 25 bp, Saccharomyces pastorianus
tgagagtatctccaaggcgcaaaga

SEQ ID NO: 13438 - DNA, 25 bp, Saccharomyces pastorianus
aagagtcagacagccggcaagtaat

SEQ ID NO: 13439 - DNA, 25 bp, Saccharomyces pastorianus
aggcgcaaagagcatctccacacat

SEQ ID NO: 13440 - DNA, 25 bp, Saccharomyces pastorianus
ggtttattgttgtcagtctgtttct

SEQ ID NO: 13441 - DNA, 25 bp, Saccharomyces pastorianus
ttgaccttgacactgctacttgatt

SEQ ID NO: 13442 - DNA, 25 bp, Saccharomyces pastorianus
aagcagtttgctccatctctattaa

SEQ ID NO: 13443 - DNA, 25 bp, Saccharomyces pastorianus
tttgctattcacattgctactttgg

SEQ ID NO: 13444 - DNA, 25 bp, Saccharomyces pastorianus
gatggtcaagctactgtttctggtt

SEQ ID NO: 13445 - DNA, 25 bp, Saccharomyces pastorianus
gctactttggtttacatcacaacgg

SEQ ID NO: 13446 - DNA, 25 bp, Saccharomyces pastorianus
aacagagtttttccctgagctgaac

SEQ ID NO: 13447 - DNA, 25 bp, Saccharomyces pastorianus
tttgtgccaatgagcgacgacttta

SEQ ID NO: 13448 - DNA, 25 bp, Saccharomyces pastorianus
tatatggctggtgtcaagttcggtg

SEQ ID NO: 13449 - DNA, 25 bp, Saccharomyces pastorianus
ggatccgttctatctcaatttgcta

SEQ ID NO: 13450 - DNA, 25 bp, Saccharomyces pastorianus
aagacctcaagctggaattttcaat

SEQ ID NO: 13451 - DNA, 25 bp, Saccharomyces pastorianus
caatgctaaaatgggctccgctctg

SEQ ID NO: 13452 - DNA, 25 bp, Saccharomyces pastorianus
tgaatgtcactcgaagttatacttc

SEQ ID NO: 13453 - DNA, 25 bp, Saccharomyces pastorianus
aagctacatcgtacgattccagtga

SEQ ID NO: 13454 - DNA, 25 bp, Saccharomyces pastorianus
gttgtctcccaaacagctggtcgat

SEQ ID NO: 13455 - DNA, 25 bp, Saccharomyces pastorianus
gaaaatagcgttgtctcccaaacag

SEQ ID NO: 13456 - DNA, 25 bp, Saccharomyces pastorianus
tctgctttgctattagaccgagtct

SEQ ID NO: 13457 - DNA, 25 bp, Saccharomyces pastorianus
cctgttgtttatagagtgccgttca

SEQ ID NO: 13458 - DNA, 25 bp, Saccharomyces pastorianus
gaaaggcaagacacctgttgtttat

SEQ ID NO: 13459 - DNA, 25 bp, Saccharomyces pastorianus
aatgggctccgctctggaaatgaaa

SEQ ID NO: 13460 - DNA, 25 bp, Saccharomyces pastorianus
gattttatctattgtgtggcttcta

SEQ ID NO: 13461 - DNA, 25 bp, Saccharomyces pastorianus
gtcggtgatttgttctctgctttgc

SEQ ID NO: 13462 - DNA, 25 bp, Saccharomyces pastorianus
tatcattgccatttatgggctggtt

SEQ ID NO: 13463 - DNA, 25 bp, Saccharomyces pastorianus
cattatcttcacttccttaggtgct

SEQ ID NO: 13464 - DNA, 25 bp, Saccharomyces pastorianus
gtgttgagaccagacttgcttttca

SEQ ID NO: 13465 - DNA, 25 bp, Saccharomyces pastorianus
catttatgggctggttgtttccgtc

SEQ ID NO: 13466 - DNA, 25 bp, Saccharomyces pastorianus
tctgccattatcttcacttccttag

SEQ ID NO: 13467 - DNA, 25 bp, Saccharomyces pastorianus
ttatgggctggttgtttccgtcttg

SEQ ID NO: 13468 - DNA, 25 bp, Saccharomyces pastorianus
ttccgtcttggtctgttattcattg

SEQ ID NO: 13469 - DNA, 25 bp, Saccharomyces pastorianus
ttcacttccttaggtgctgcttatg

SEQ ID NO: 13470 - DNA, 25 bp, Saccharomyces pastorianus
ttccttaggtgctgcttatggtact

SEQ ID NO: 13471 - DNA, 25 bp, Saccharomyces pastorianus
ggtctgttattcattgggccaaaag

SEQ ID NO: 13472 - DNA, 25 bp, Saccharomyces pastorianus
gttgagaccagacttgcttttcaag

SEQ ID NO: 13473 - DNA, 25 bp, Saccharomyces pastorianus
gatgttgtccaacaagctgccaatt

SEQ ID NO: 13474 - DNA, 25 bp, Saccharomyces pastorianus
gactttaaaccgtggtatctctgaa

SEQ ID NO: 13475 - DNA, 25 bp, Saccharomyces pastorianus
atacgtctttgtcccatctagagtc

SEQ ID NO: 13476 - DNA, 25 bp, Saccharomyces pastorianus
ttggatgttgtccaacaagctgcca

SEQ ID NO: 13477 - DNA, 25 bp, Saccharomyces pastorianus
aacgttccatacgtctttgtcccat

SEQ ID NO: 13478 - DNA, 25 bp, Saccharomyces pastorianus
aagctgccaatttgagacaattgaa

SEQ ID NO: 13479 - DNA, 25 bp, Saccharomyces pastorianus
caagactttaaaccgtggtatctct

SEQ ID NO: 13480 - DNA, 25 bp, Saccharomyces pastorianus
acgtctttgtcccatctagagtcgc

SEQ ID NO: 13481 - DNA, 25 bp, Saccharomyces pastorianus
atcttggatgttgtccaacaagctg

SEQ ID NO: 13482 - DNA, 25 bp, Saccharomyces pastorianus
tgtgaagataaaaacgttccatacg

SEQ ID NO: 13483 - DNA, 25 bp, Saccharomyces pastorianus
cgtctttgtcccatctagagtcgct

SEQ ID NO: 13484 - DNA, 25 bp, Saccharomyces pastorianus
acgcccaactttgatgacgttctga

SEQ ID NO: 13485 - DNA, 25 bp, Saccharomyces pastorianus
aacttggcagccattccattaggta

SEQ ID NO: 13486 - DNA, 25 bp, Saccharomyces pastorianus
ttatttcatccatgactgccacagc

SEQ ID NO: 13487 - DNA, 25 bp, Saccharomyces pastorianus
tgccacagccgatgttctagctatg

SEQ ID NO: 13488 - DNA, 25 bp, Saccharomyces pastorianus
tatgggtctcttgtcttctgctggt

SEQ ID NO: 13489 - DNA, 25 bp, Saccharomyces pastorianus
gatcatgctgggtatctgtactcat

SEQ ID NO: 13490 - DNA, 25 bp, Saccharomyces pastorianus
tgctggtgccaagtcgactgttgaa

SEQ ID NO: 13491 - DNA, 25 bp, Saccharomyces pastorianus
aaatgtcgtcgtcaaatggcaaggt

SEQ ID NO: 13492 - DNA, 25 bp, Saccharomyces pastorianus
ggtcctgctcctttgaatctggaaa

SEQ ID NO: 13493 - DNA, 25 bp, Saccharomyces pastorianus
tacgcttatttcatggtcggtgcta

SEQ ID NO: 13494 - DNA, 25 bp, Saccharomyces pastorianus
gataagggccgttcttacgcttatt

SEQ ID NO: 13495 - DNA, 25 bp, Saccharomyces pastorianus
gactttgttattgggtttatcgctc

SEQ ID NO: 13496 - DNA, 25 bp, Saccharomyces pastorianus
ggatccgacatcattatcgtgggaa

SEQ ID NO: 13497 - DNA, 25 bp, Saccharomyces pastorianus
gaagctgcagtactcatcaggtgta

SEQ ID NO: 13498 - DNA, 25 bp, Saccharomyces pastorianus
agtgggcagacatcaccaatgcgca

SEQ ID NO: 13499 - DNA, 25 bp, Saccharomyces pastorianus
gacgtagtctctactggatccgaca

SEQ ID NO: 13500 - DNA, 25 bp, Saccharomyces pastorianus
gtacgactggttgattatgacgccc

SEQ ID NO: 13501 - DNA, 25 bp, Saccharomyces pastorianus
tggagggcactgtcaaaccgctaaa

SEQ ID NO: 13502 - DNA, 25 bp, Saccharomyces pastorianus
gtcctggcattgtcagcgggttgaa

SEQ ID NO: 13503 - DNA, 25 bp, Saccharomyces pastorianus
tcgacatcttgactgacttttccat

SEQ ID NO: 13504 - DNA, 25 bp, Saccharomyces pastorianus
gagcctagagctcttctgatgctag

SEQ ID NO: 13505 - DNA, 25 bp, Saccharomyces pastorianus
atgcaagggatctctagctactggg

SEQ ID NO: 13506 - DNA, 25 bp, Saccharomyces pastorianus
ggatttcatgcgtttatactccaac

SEQ ID NO: 13507 - DNA, 25 bp, Saccharomyces pastorianus
aggacaacgtttccaagagcagaac

SEQ ID NO: 13508 - DNA, 25 bp, Saccharomyces pastorianus
caacttccaagcttaccaacaagga

SEQ ID NO: 13509 - DNA, 25 bp, Saccharomyces pastorianus
cgagcgtgtaggacaacgtttccaa

SEQ ID NO: 13510 - DNA, 25 bp, Saccharomyces pastorianus
ggtgtttcacggactgtgtcaacga

SEQ ID NO: 13511 - DNA, 25 bp, Saccharomyces pastorianus
gtgtcaacgacttcacaacttccaa

SEQ ID NO: 13512 - DNA, 25 bp, Saccharomyces pastorianus
taccaacaaggaacaaacgtgcatc

SEQ ID NO: 13513 - DNA, 25 bp, Saccharomyces pastorianus
aacgtgcatcatgaagtgttcagag

SEQ ID NO: 13514 - DNA, 25 bp, Saccharomyces pastorianus
atgcgtttatactccaacttagtag

SEQ ID NO: 13515 - DNA, 25 bp, Saccharomyces pastorianus
gttcctaaagcacagcgagcgtgta

SEQ ID NO: 13516 - DNA, 25 bp, Saccharomyces pastorianus
gagaagttcctaaagcacagcgagc

SEQ ID NO: 13517 - DNA, 25 bp, Saccharomyces pastorianus
agaactaggcaagagcttccgggaa

SEQ ID NO: 13518 - DNA, 25 bp, Saccharomyces pastorianus
tggcgctagtcatcgtcgtcatgaa

SEQ ID NO: 13519 - DNA, 25 bp, Saccharomyces pastorianus
ctaaggccgcttatcgaggactata

SEQ ID NO: 13520 - DNA, 25 bp, Saccharomyces pastorianus
cacgggttcttcgtaaacacgctgg

SEQ ID NO: 13521 - DNA, 25 bp, Saccharomyces pastorianus
taatccagggcgattccgcattcgg

SEQ ID NO: 13522 - DNA, 25 bp, Saccharomyces pastorianus
gacaccgtctggacgcagggactaa

SEQ ID NO: 13523 - DNA, 25 bp, Saccharomyces pastorianus
gagctcgacgtggtgctaatccagg

SEQ ID NO: 13524 - DNA, 25 bp, Saccharomyces pastorianus
gaaccagacccgcttgcaggagaag

SEQ ID NO: 13525 - DNA, 25 bp, Saccharomyces pastorianus
gcattcgggttctcggccatggaaa

SEQ ID NO: 13526 - DNA, 25 bp, Saccharomyces pastorianus
agcgtcatcaacgtcatcatcgaac

SEQ ID NO: 13527 - DNA, 25 bp, Saccharomyces pastorianus
aagaattgccgctacgacctcgtgg

SEQ ID NO: 13528 - DNA, 25 bp, Saccharomyces pastorianus
ttgacctttccacctgggacaaata

SEQ ID NO: 13529 - DNA, 25 bp, Saccharomyces pastorianus
cgctccccaactttctgaattatat

SEQ ID NO: 13530 - DNA, 25 bp, Saccharomyces pastorianus
gggatttcgtaagagaccccatcat

SEQ ID NO: 13531 - DNA, 25 bp, Saccharomyces pastorianus
aaattcaatcagactcatgccctca

SEQ ID NO: 13532 - DNA, 25 bp, Saccharomyces pastorianus
taaggtcttaccgtacatctggaat

SEQ ID NO: 13533 - DNA, 25 bp, Saccharomyces pastorianus
tccaacgtgcgtgataccggatttg

SEQ ID NO: 13534 - DNA, 25 bp, Saccharomyces pastorianus
taaacatgtctcgatcggagccatc

SEQ ID NO: 13535 - DNA, 25 bp, Saccharomyces pastorianus
aagagactgtccacaagctgcatgc

SEQ ID NO: 13536 - DNA, 25 bp, Saccharomyces pastorianus
aagctgcatgctcacaagtcgtttc

SEQ ID NO: 13537 - DNA, 25 bp, Saccharomyces pastorianus
aaattgagttgacttgccccatcac

SEQ ID NO: 13538 - DNA, 25 bp, Saccharomyces pastorianus
aattcattccacaacgacatccaag

SEQ ID NO: 13539 - DNA, 25 bp, Saccharomyces pastorianus
agcgttcacgagctgcaactgatcc

SEQ ID NO: 13540 - DNA, 25 bp, Saccharomyces pastorianus
aagagcggtacaacgcaatcgcaat

SEQ ID NO: 13541 - DNA, 25 bp, Saccharomyces pastorianus
aaactgttcaagagccccaacaaca

SEQ ID NO: 13542 - DNA, 25 bp, Saccharomyces pastorianus
agttaagcctgcacggcctagagat

SEQ ID NO: 13543 - DNA, 25 bp, Saccharomyces pastorianus
gattgtgaagagtctgttccccggc

SEQ ID NO: 13544 - DNA, 25 bp, Saccharomyces pastorianus
taggcacgactacaacccatggagg

SEQ ID NO: 13545 - DNA, 25 bp, Saccharomyces pastorianus
gacaacgctgaacgatgggcagtta

SEQ ID NO: 13546 - DNA, 25 bp, Saccharomyces pastorianus
ggaggacatgctatggaccccaaaa

SEQ ID NO: 13547 - DNA, 25 bp, Saccharomyces pastorianus
gaaactcctagtgggcaagtacgat

SEQ ID NO: 13548 - DNA, 25 bp, Saccharomyces pastorianus
aatcgcaatcgcacacaggcaagag

SEQ ID NO: 13549 - DNA, 25 bp, Saccharomyces pastorianus
aactgtacagggacaccgtgctgaa

SEQ ID NO: 13550 - DNA, 25 bp, Saccharomyces pastorianus
tggcttgtatcattatcatttctac

SEQ ID NO: 13551 - DNA, 25 bp, Saccharomyces pastorianus
gaacatgttgccaggtggtgttatc

SEQ ID NO: 13552 - DNA, 25 bp, Saccharomyces pastorianus
gttgatgaacatgttgccaggtggt

SEQ ID NO: 13553 - DNA, 25 bp, Saccharomyces pastorianus
tgaacatgttgccaggtggtgttat

SEQ ID NO: 13554 - DNA, 25 bp, Saccharomyces pastorianus
tgttgatgaacatgttgccaggtgg

SEQ ID NO: 13555 - DNA, 25 bp, Saccharomyces pastorianus
atgttgatgaacatgttgccaggtg

SEQ ID NO: 13556 - DNA, 25 bp, Saccharomyces pastorianus
tgatgaacatgttgccaggtggtgt

SEQ ID NO: 13557 - DNA, 25 bp, Saccharomyces pastorianus
gatgaacatgttgccaggtggtgtt

SEQ ID NO: 13558 - DNA, 25 bp, Saccharomyces pastorianus
ttgatgaacatgttgccaggtggtg

SEQ ID NO: 13559 - DNA, 25 bp, Saccharomyces pastorianus
gttgccaggtggtgttatcttagtt

SEQ ID NO: 13560 - DNA, 25 bp, Saccharomyces pastorianus
ggtttggcttgtatcattatcattt

SEQ ID NO: 13561 - DNA, 25 bp, Saccharomyces pastorianus
atacgtcgaccaagtgtggacccag

SEQ ID NO: 13562 - DNA, 25 bp, Saccharomyces pastorianus
gtggacccagctctgtgtcgtgaac

SEQ ID NO: 13563 - DNA, 25 bp, Saccharomyces pastorianus
atactcacatggctgctctttttca

SEQ ID NO: 13564 - DNA, 25 bp, Saccharomyces pastorianus
ttggatccgatgacgttcaaccttt

SEQ ID NO: 13565 - DNA, 25 bp, Saccharomyces pastorianus
tcaatctgctcgatttcagcgctga

SEQ ID NO: 13566 - DNA, 25 bp, Saccharomyces pastorianus
tgagacaagtattagccgccgggcg

SEQ ID NO: 13567 - DNA, 25 bp, Saccharomyces pastorianus
atccggtacgacctggacatcgagt

SEQ ID NO: 13568 - DNA, 25 bp, Saccharomyces pastorianus
gaaattcttgatctctctggcaatc

SEQ ID NO: 13569 - DNA, 25 bp, Saccharomyces pastorianus
atagatttccactctcttcaatacg

SEQ ID NO: 13570 - DNA, 25 bp, Saccharomyces pastorianus
cgacgctggtttcgtactacatcaa

SEQ ID NO: 13571 - DNA, 25 bp, Saccharomyces pastorianus
acggtgcccctggtgttatctatgg

SEQ ID NO: 13572 - DNA, 25 bp, Saccharomyces pastorianus
agatatcttcttcccggacagaatc

SEQ ID NO: 13573 - DNA, 25 bp, Saccharomyces pastorianus
ggctggcccttaattgccatcaata

SEQ ID NO: 13574 - DNA, 25 bp, Saccharomyces pastorianus
agtatatcgtcactggaatccgcca

SEQ ID NO: 13575 - DNA, 25 bp, Saccharomyces pastorianus
ggtctggtgccaaagcattagcatt

SEQ ID NO: 13576 - DNA, 25 bp, Saccharomyces pastorianus
gggtacgactgcacattaagcgatc

SEQ ID NO: 13577 - DNA, 25 bp, Saccharomyces pastorianus
aataacttaatcacacacctaccta

SEQ ID NO: 13578 - DNA, 25 bp, Saccharomyces pastorianus
taggcacctatgtcaaacgggtcat

SEQ ID NO: 13579 - DNA, 25 bp, Saccharomyces pastorianus
aagtatggtctctggacattccaaa

SEQ ID NO: 13580 - DNA, 25 bp, Saccharomyces pastorianus
gatctagcaggcacgtcggagacaa

SEQ ID NO: 13581 - DNA, 25 bp, Saccharomyces pastorianus
tccaaatgggttcgatgcaggctct

SEQ ID NO: 13582 - DNA, 25 bp, Saccharomyces pastorianus
ggattatttgttcaggctggccctt

SEQ ID NO: 13583 - DNA, 25 bp, Saccharomyces pastorianus
aggtgtccggtaatgcagcagctgc

SEQ ID NO: 13584 - DNA, 25 bp, Saccharomyces pastorianus
gaggacgcaagcttagaactgtaca

SEQ ID NO: 13585 - DNA, 25 bp, Saccharomyces pastorianus
aggtattcgcggatttttgattaga

SEQ ID NO: 13586 - DNA, 25 bp, Saccharomyces pastorianus
ggcagatgcgacttttgaacgtcta

SEQ ID NO: 13587 - DNA, 25 bp, Saccharomyces pastorianus
tccgcatgttttgcaattttggctt

SEQ ID NO: 13588 - DNA, 25 bp, Saccharomyces pastorianus
aacgacacaggttcggagcatcaac

SEQ ID NO: 13589 - DNA, 25 bp, Saccharomyces pastorianus
tgctttggcaaatctgtgctcgagg

SEQ ID NO: 13590 - DNA, 25 bp, Saccharomyces pastorianus
gctttgattccaatgaccttttctc

SEQ ID NO: 13591 - DNA, 25 bp, Saccharomyces pastorianus
gagcatcaacctgcagaggacgcaa

SEQ ID NO: 13592 - DNA, 25 bp, Saccharomyces pastorianus
ttagattcgcctgttagtgtccaaa

SEQ ID NO: 13593 - DNA, 25 bp, Saccharomyces pastorianus
tggctttagcagacgtctccaaatt

SEQ ID NO: 13594 - DNA, 25 bp, Saccharomyces pastorianus
tcattgatcgtggtattgccctaca

SEQ ID NO: 13595 - DNA, 25 bp, Saccharomyces pastorianus
agatgatcctttgttacgctaccag

SEQ ID NO: 13596 - DNA, 25 bp, Saccharomyces pastorianus
ggttaattactcattcattgggtgg

SEQ ID NO: 13597 - DNA, 25 bp, Saccharomyces pastorianus
tattttcaactttcatcccacagac

SEQ ID NO: 13598 - DNA, 25 bp, Saccharomyces pastorianus
cgaattctttaccactgacttagaa

SEQ ID NO: 13599 - DNA, 25 bp, Saccharomyces pastorianus
gtattaaactcggatcgtgctgaat

SEQ ID NO: 13600 - DNA, 25 bp, Saccharomyces pastorianus
gacagttataagtacgctcggagac

SEQ ID NO: 13601 - DNA, 25 bp, Saccharomyces pastorianus
ggaacctaccattatcattgatcgt

SEQ ID NO: 13602 - DNA, 25 bp, Saccharomyces pastorianus
gtttggccacccagaatggttggat

SEQ ID NO: 13603 - DNA, 25 bp, Saccharomyces pastorianus
gaaggtaacgagtttggccacccag

SEQ ID NO: 13604 - DNA, 25 bp, Saccharomyces pastorianus
gatggatgcctcaatgtataccgat

SEQ ID NO: 13605 - DNA, 25 bp, Saccharomyces pastorianus
agatgacggcgatatacccaaatat

SEQ ID NO: 13606 - DNA, 25 bp, Saccharomyces pastorianus
gcccgtgtcgatgctatggttgaag

SEQ ID NO: 13607 - DNA, 25 bp, Saccharomyces pastorianus
gaagcggtccttcaatcgtaactaa

SEQ ID NO: 13608 - DNA, 25 bp, Saccharomyces pastorianus
gaatgttagtgcagatggcctcaca

SEQ ID NO: 13609 - DNA, 25 bp, Saccharomyces pastorianus
tcctctgctctttgattttttgcgt

SEQ ID NO: 13610 - DNA, 25 bp, Saccharomyces pastorianus
acaatactccggattctcattcaaa

SEQ ID NO: 13611 - DNA, 25 bp, Saccharomyces pastorianus
tggatggagaacttgcccgtgtcga

SEQ ID NO: 13612 - DNA, 25 bp, Saccharomyces pastorianus
gtaaggcatgcccagaagctatcgt

SEQ ID NO: 13613 - DNA, 25 bp, Saccharomyces pastorianus
agaagctatcgtttctgctacagaa

SEQ ID NO: 13614 - DNA, 25 bp, Saccharomyces pastorianus
caaagggcttctaccagtgggatca

SEQ ID NO: 13615 - DNA, 25 bp, Saccharomyces pastorianus
aatgaagctcattatcctctgctct

SEQ ID NO: 13616 - DNA, 25 bp, Saccharomyces pastorianus
ggtgctattattgcatcactgtata

SEQ ID NO: 13617 - DNA, 25 bp, Saccharomyces pastorianus
agggtgtaaacatgcttgccagcca

SEQ ID NO: 13618 - DNA, 25 bp, Saccharomyces pastorianus
aatcccgcacgcagaaacttttcta

SEQ ID NO: 13619 - DNA, 25 bp, Saccharomyces pastorianus
tacccctcttttcattgaacgcaaa

SEQ ID NO: 13620 - DNA, 25 bp, Saccharomyces pastorianus
gttctgacccagtatttttgcgtta

SEQ ID NO: 13621 - DNA, 25 bp, Saccharomyces pastorianus
tgatactttcttcggttacatcctc

SEQ ID NO: 13622 - DNA, 25 bp, Saccharomyces pastorianus
gatcgcacgttcgttttaggtgttt
